United States Patent Application Publication US 2005/0255487 A1 - sequence listing, part 51

SEQ ID NO: 1395820 - RNA, 19 nt, Homo sapiens
  misc_RNA (1)...(19): siRNA sense strand
gcagacaguugugcuauca

SEQ ID NO: 1395821 - RNA, 19 nt, Homo sapiens
  misc_RNA (1)...(19): siRNA sense strand
gaacuaaucagggucaaga

SEQ ID NO: 1395822 - RNA, 19 nt, Homo sapiens
  misc_RNA (1)...(19): siRNA sense strand
ucaaugacauggugaagau

SEQ ID NO: 1395823 - RNA, 19 nt, Homo sapiens
  misc_RNA (1)...(19): siRNA sense strand
agacacagauaauguacaa

SEQ ID NO: 1395824 - RNA, 19 nt, Homo sapiens
  misc_RNA (1)...(19): siRNA sense strand
caagagaggauuucaggaa

SEQ ID NO: 1395825 - RNA, 19 nt, Homo sapiens
  misc_RNA (1)...(19): siRNA sense strand
gagcaggagugauuucagu

SEQ ID NO: 1395826 - RNA, 19 nt, Homo sapiens
  misc_RNA (1)...(19): siRNA sense strand
ggagguggcuggagaucau

SEQ ID NO: 1395827 - RNA, 19 nt, Homo sapiens
  misc_RNA (1)...(19): siRNA sense strand
gaacuaggaagaauaacau

SEQ ID NO: 1395828 - RNA, 19 nt, Homo sapiens
  misc_RNA (1)...(19): siRNA sense strand
aagaggaaguuguauauuc

SEQ ID NO: 1395829 - RNA, 19 nt, Homo sapiens
  misc_RNA (1)...(19): siRNA sense strand
gaggaaggauccagugagu

SEQ ID NO: 1395830 - RNA, 19 nt, Homo sapiens
  misc_RNA (1)...(19): siRNA sense strand
aaacaagcuuacacccaua

SEQ ID NO: 1395831 - RNA, 19 nt, Homo sapiens
  misc_RNA (1)...(19): siRNA sense strand
ggaaggauccagugagugu

SEQ ID NO: 1395832 - RNA, 19 nt, Homo sapiens
  misc_RNA (1)...(19): siRNA sense strand
ggucagaugauuacacaaa

SEQ ID NO: 1395833 - RNA, 19 nt, Homo sapiens
  misc_RNA (1)...(19): siRNA sense strand
caauaaacagucacuacua

SEQ ID NO: 1395834 - RNA, 19 nt, Homo sapiens
  misc_RNA (1)...(19): siRNA sense strand
ccgaucaacugcugugaaa

SEQ ID NO: 1395835 - RNA, 19 nt, Homo sapiens
  misc_RNA (1)...(19): siRNA sense strand
gagguucugacaaugauua

SEQ ID NO: 1395836 - RNA, 19 nt, Homo sapiens
  misc_RNA (1)...(19): siRNA sense strand
gaagaaggaaagacacaga

SEQ ID NO: 1395837 - RNA, 19 nt, Homo sapiens
  misc_RNA (1)...(19): siRNA sense strand
ggaauuucuuugccugaga

SEQ ID NO: 1395838 - RNA, 19 nt, Homo sapiens
  misc_RNA (1)...(19): siRNA sense strand
aaagugcgauggaaugaau

SEQ ID NO: 1395839 - RNA, 19 nt, Homo sapiens
  misc_RNA (1)...(19): siRNA sense strand
ucucacagaugcuauuaga

SEQ ID NO: 1395840 - RNA, 19 nt, Homo sapiens
  misc_RNA (1)...(19): siRNA sense strand
ugacaaugauuaccugauc

SEQ ID NO: 1395841 - RNA, 19 nt, Homo sapiens
  misc_RNA (1)...(19): siRNA sense strand
aaaaugagguguaauccua

SEQ ID NO: 1395842 - RNA, 19 nt, Homo sapiens
  misc_RNA (1)...(19): siRNA sense strand
gccacuacauugagaaaga

SEQ ID NO: 1395843 - RNA, 19 nt, Homo sapiens
  misc_RNA (1)...(19): siRNA sense strand
gguguaauccuacuaaauc

SEQ ID NO: 1395844 - RNA, 19 nt, Homo sapiens
  misc_RNA (1)...(19): siRNA sense strand
gaagaggaaguuguauauu

SEQ ID NO: 1395845 - RNA, 19 nt, Homo sapiens
  misc_RNA (1)...(19): siRNA sense strand
gcucugaccugcuacuucu

SEQ ID NO: 1395846 - RNA, 19 nt, Homo sapiens
  misc_RNA (1)...(19): siRNA sense strand
gaagcuugcccucugugua

SEQ ID NO: 1395847 - RNA, 19 nt, Homo sapiens
  misc_RNA (1)...(19): siRNA sense strand
gaacuacaggcauccuuau

SEQ ID NO: 1395848 - RNA, 19 nt, Homo sapiens
  misc_RNA (1)...(19): siRNA sense strand
ugagaaaggagccaaagaa

SEQ ID NO: 1395849 - RNA, 19 nt, Homo sapiens
  misc_RNA (1)...(19): siRNA sense strand
uaaugaagaggaaguugua

SEQ ID NO: 1395850 - RNA, 19 nt, Homo sapiens
  misc_RNA (1)...(19): siRNA sense strand
aaucagaguuugcacuaug

SEQ ID NO: 1395851 - RNA, 19 nt, Homo sapiens
  misc_RNA (1)...(19): siRNA sense strand
ggaagaauaacauuugucu

SEQ ID NO: 1395852 - RNA, 19 nt, Homo sapiens
  misc_RNA (1)...(19): siRNA sense strand
gagaaaggagccaaagaau

SEQ ID NO: 1395853 - RNA, 19 nt, Homo sapiens
  misc_RNA (1)...(19): siRNA sense strand
gaauguauaagguguaaag

SEQ ID NO: 1395854 - RNA, 19 nt, Homo sapiens
  misc_RNA (1)...(19): siRNA sense strand
ugaagaggaaguuguauau

SEQ ID NO: 1395855 - RNA, 19 nt, Homo sapiens
  misc_RNA (1)...(19): siRNA sense strand
ccaacaauauaacagacuu

SEQ ID NO: 1395856 - RNA, 19 nt, Homo sapiens
  misc_RNA (1)...(19): siRNA sense strand
aauagacgguucaucaaug

SEQ ID NO: 1395857 - RNA, 19 nt, Homo sapiens
  misc_RNA (1)...(19): siRNA sense strand
gccaaagaauguauaaggu

SEQ ID NO: 1395858 - RNA, 19 nt, Homo sapiens
  misc_RNA (1)...(19): siRNA sense strand
aauaaacagucacuacuag

SEQ ID NO: 1395859 - RNA, 19 nt, Homo sapiens
  misc_RNA (1)...(19): siRNA sense strand
ugagggagccugcaagaga

SEQ ID NO: 1395860 - RNA, 19 nt, Homo sapiens
  misc_RNA (1)...(19): siRNA sense strand
gagguguaauccuacuaaa

SEQ ID NO: 1395861 - RNA, 19 nt, Homo sapiens
  misc_RNA (1)...(19): siRNA sense strand
cuaaucagggucaagauaa

SEQ ID NO: 1395862 - RNA, 19 nt, Homo sapiens
  misc_RNA (1)...(19): siRNA sense strand
cacagaugcuauuagauug

SEQ ID NO: 1395863 - RNA, 19 nt, Homo sapiens
  misc_RNA (1)...(19): siRNA sense strand
gauaauguacaaguggaua

SEQ ID NO: 1395864 - RNA, 19 nt, Homo sapiens
  misc_RNA (1)...(19): siRNA sense strand
ccacuacauugagaaagaa

SEQ ID NO: 1395865 - RNA, 19 nt, Homo sapiens
  misc_RNA (1)...(19): siRNA sense strand
caugguggauauuaauaga

SEQ ID NO: 1395866 - RNA, 19 nt, Homo sapiens
  misc_RNA (1)...(19): siRNA sense strand
acaccuaccuguccauaca

SEQ ID NO: 1395867 - RNA, 19 nt, Homo sapiens
  misc_RNA (1)...(19): siRNA sense strand
uaaugacgacuaacucaaa

SEQ ID NO: 1395868 - RNA, 19 nt, Homo sapiens
  misc_RNA (1)...(19): siRNA sense strand
uaccagaugugcauuucuu

SEQ ID NO: 1395869 - RNA, 19 nt, Homo sapiens
  misc_RNA (1)...(19): siRNA sense strand
aaagacgacucucaauuuu

SEQ ID NO: 1395870 - RNA, 19 nt, Homo sapiens
  misc_RNA (1)...(19): siRNA sense strand
ccaaauaccagaugugcau

SEQ ID NO: 1395871 - RNA, 19 nt, Homo sapiens
  misc_RNA (1)...(19): siRNA sense strand
ucauaggagucacaguuga

SEQ ID NO: 1395872 - RNA, 19 nt, Homo sapiens
  misc_RNA (1)...(19): siRNA sense strand
gaguuugcacuaugacuuu

SEQ ID NO: 1395873 - RNA, 19 nt, Homo sapiens
  misc_RNA (1)...(19): siRNA sense strand
cuaggaagaauaacauuug

SEQ ID NO: 1395874 - RNA, 19 nt, Homo sapiens
  misc_RNA (1)...(19): siRNA sense strand
ccagauccauacuccaugu

SEQ ID NO: 1395875 - RNA, 19 nt, Homo sapiens
  misc_RNA (1)...(19): siRNA sense strand
ggagccaaagaauguauaa

SEQ ID NO: 1395876 - RNA, 19 nt, Homo sapiens
  misc_RNA (1)...(19): siRNA sense strand
agacaguugugcuaucaug

SEQ ID NO: 1395877 - RNA, 19 nt, Homo sapiens
  misc_RNA (1)...(19): siRNA sense strand
caacaucuuguauuaaugg

SEQ ID NO: 1395878 - RNA, 19 nt, Homo sapiens
  misc_RNA (1)...(19): siRNA sense strand
gagcagccuuaucaucaca

SEQ ID NO: 1395879 - RNA, 19 nt, Homo sapiens
  misc_RNA (1)...(19): siRNA sense strand
guaccaacaauauaacaga

SEQ ID NO: 1395880 - RNA, 19 nt, Homo sapiens
  misc_RNA (1)...(19): siRNA sense strand
guccauacaucaggucuau

SEQ ID NO: 1395881 - RNA, 19 nt, Homo sapiens
  misc_RNA (1)...(19): siRNA sense strand
uaaucagggucaagauaau

SEQ ID NO: 1395882 - RNA, 19 nt, Homo sapiens
  misc_RNA (1)...(19): siRNA sense strand
aacaauggaucaucuucuu

SEQ ID NO: 1395883 - RNA, 19 nt, Homo sapiens
  misc_RNA (1)...(19): siRNA sense strand
agaagauaaugaagaggaa

SEQ ID NO: 1395884 - RNA, 19 nt, Homo sapiens
  misc_RNA (1)...(19): siRNA sense strand
gaagaagauggcucucugu

SEQ ID NO: 1395885 - RNA, 19 nt, Homo sapiens
  misc_RNA (1)...(19): siRNA sense strand
agaaggaaagacacagaua

SEQ ID NO: 1395886 - RNA, 19 nt, Homo sapiens
  misc_RNA (1)...(19): siRNA sense strand
gcaaagaggcuuguauucc

SEQ ID NO: 1395887 - RNA, 19 nt, Homo sapiens
  misc_RNA (1)...(19): siRNA sense strand
ggugaagauuuauucuauc

SEQ ID NO: 1395888 - RNA, 19 nt, Homo sapiens
  misc_RNA (1)...(19): siRNA sense strand
ucaagccugugcugguaaa

SEQ ID NO: 1395889 - RNA, 19 nt, Homo sapiens
  misc_RNA (1)...(19): siRNA sense strand
ggauuuaaaccaccaacau

SEQ ID NO: 1395890 - RNA, 19 nt, Homo sapiens
  misc_RNA (1)...(19): siRNA sense strand
gaucuuaaacuugcauauc

SEQ ID NO: 1395891 - RNA, 19 nt, Homo sapiens
  misc_RNA (1)...(19): siRNA sense strand
gauggaaccaaagaaugua

SEQ ID NO: 1395892 - RNA, 19 nt, Homo sapiens
  misc_RNA (1)...(19): siRNA sense strand
gugaaacgguugacuuuug

SEQ ID NO: 1395893 - RNA, 19 nt, Homo sapiens
  misc_RNA (1)...(19): siRNA sense strand
cacuuggcuuugaauauaa

SEQ ID NO: 1395894 - RNA, 19 nt, Homo sapiens
  misc_RNA (1)...(19): siRNA sense strand
ccaggccacuacauugaga

SEQ ID NO: 1395895 - RNA, 19 nt, Homo sapiens
  misc_RNA (1)...(19): siRNA sense strand
uaaacagucacuacuagga

SEQ ID NO: 1395896 - RNA, 19 nt, Homo sapiens
  misc_RNA (1)...(19): siRNA sense strand
agaacuacaggcauccuua

SEQ ID NO: 1395897 - RNA, 19 nt, Homo sapiens
  misc_RNA (1)...(19): siRNA sense strand
auacucuacuggagaacua

SEQ ID NO: 1395898 - RNA, 19 nt, Homo sapiens
  misc_RNA (1)...(19): siRNA sense strand
guacggagcaugacuucca

SEQ ID NO: 1395899 - RNA, 19 nt, Homo sapiens
  misc_RNA (1)...(19): siRNA sense strand
gcacuuggcuuugaauaua

SEQ ID NO: 1395900 - RNA, 19 nt, Homo sapiens
  misc_RNA (1)...(19): siRNA sense strand
gaagauauguucccaguuc

SEQ ID NO: 1395901 - RNA, 19 nt, Homo sapiens
  misc_RNA (1)...(19): siRNA sense strand
gaauauaaaugguggaaug

SEQ ID NO: 1395902 - RNA, 19 nt, Homo sapiens
  misc_RNA (1)...(19): siRNA sense strand
gaaaggagccaaagaaugu

SEQ ID NO: 1395903 - RNA, 19 nt, Homo sapiens
  misc_RNA (1)...(19): siRNA sense strand
gaaaucaggcacaaacaua

SEQ ID NO: 1395904 - RNA, 19 nt, Homo sapiens
  misc_RNA (1)...(19): siRNA sense strand
gaaagacacagauaaugua

SEQ ID NO: 1395905 - RNA, 19 nt, Homo sapiens
  misc_RNA (1)...(19): siRNA sense strand
guacaaaugugguagaauc

SEQ ID NO: 1395906 - RNA, 19 nt, Homo sapiens
  misc_RNA (1)...(19): siRNA sense strand
caacaauuauuccuucuga

SEQ ID NO: 1395907 - RNA, 19 nt, Homo sapiens
  misc_RNA (1)...(19): siRNA sense strand
gcacaaacauacucuacug

SEQ ID NO: 1395908 - RNA, 19 nt, Homo sapiens
  misc_RNA (1)...(19): siRNA sense strand
uaaagacgacucucaauuu

SEQ ID NO: 1395909 - RNA, 19 nt, Homo sapiens
  misc_RNA (1)...(19): siRNA sense strand
gauaauagacgguucauca

SEQ ID NO: 1395910 - RNA, 19 nt, Homo sapiens
  misc_RNA (1)...(19): siRNA sense strand
gaaggaaagacacagauaa

SEQ ID NO: 1395911 - RNA, 19 nt, Homo sapiens
  misc_RNA (1)...(19): siRNA sense strand
ggaaagacacagauaaugu

SEQ ID NO: 1395912 - RNA, 19 nt, Homo sapiens
  misc_RNA (1)...(19): siRNA sense strand
guaugccagucaacaauua

SEQ ID NO: 1395913 - RNA, 19 nt, Homo sapiens
  misc_RNA (1)...(19): siRNA sense strand
ggaaggagaagauaaugaa

SEQ ID NO: 1395914 - RNA, 19 nt, Homo sapiens
  misc_RNA (1)...(19): siRNA sense strand
caaagaauguagaccaugu

SEQ ID NO: 1395915 - RNA, 19 nt, Homo sapiens
  misc_RNA (1)...(19): siRNA sense strand
caggaaaccuuguaugugu

SEQ ID NO: 1395916 - RNA, 19 nt, Homo sapiens
  misc_RNA (1)...(19): siRNA sense strand
caaagaggcuuguauucca

SEQ ID NO: 1395917 - RNA, 19 nt, Homo sapiens
  misc_RNA (1)...(19): siRNA sense strand
ggucaagccugugcuggua

SEQ ID NO: 1395918 - RNA, 19 nt, Homo sapiens
  misc_RNA (1)...(19): siRNA sense strand
ucacagaugcuauuagauu

SEQ ID NO: 1395919 - RNA, 19 nt, Homo sapiens
  misc_RNA (1)...(19): siRNA sense strand
guaaagacgacucucaauu

SEQ ID NO: 1395920 - RNA, 19 nt, Homo sapiens
  misc_RNA (1)...(19): siRNA sense strand
gcagacaguugugcuauca

SEQ ID NO: 1395921 - RNA, 19 nt, Homo sapiens
  misc_RNA (1)...(19): siRNA sense strand
gaacuaaucagggucaaga

SEQ ID NO: 1395922 - RNA, 19 nt, Homo sapiens
  misc_RNA (1)...(19): siRNA sense strand
ucaaugacauggugaagau

SEQ ID NO: 1395923 - RNA, 19 nt, Homo sapiens
  misc_RNA (1)...(19): siRNA sense strand
agacacagauaauguacaa

SEQ ID NO: 1395924 - RNA, 19 nt, Homo sapiens
  misc_RNA (1)...(19): siRNA sense strand
caagagaggauuucaggaa

SEQ ID NO: 1395925 - RNA, 19 nt, Homo sapiens
  misc_RNA (1)...(19): siRNA sense strand
gagcaggagugauuucagu

SEQ ID NO: 1395926 - RNA, 19 nt, Homo sapiens
  misc_RNA (1)...(19): siRNA sense strand
ggagguggcuggagaucau

SEQ ID NO: 1395927 - RNA, 19 nt, Homo sapiens
  misc_RNA (1)...(19): siRNA sense strand
gaacuaggaagaauaacau

SEQ ID NO: 1395928 - RNA, 19 nt, Homo sapiens
  misc_RNA (1)...(19): siRNA sense strand
aagaggaaguuguauauuc

SEQ ID NO: 1395929 - RNA, 19 nt, Homo sapiens
  misc_RNA (1)...(19): siRNA sense strand
gaggaaggauccagugagu

SEQ ID NO: 1395930 - RNA, 19 nt, Homo sapiens
  misc_RNA (1)...(19): siRNA sense strand
aaacaagcuuacacccaua

SEQ ID NO: 1395931 - RNA, 19 nt, Homo sapiens
  misc_RNA (1)...(19): siRNA sense strand
ggaaggauccagugagugu

SEQ ID NO: 1395932 - RNA, 19 nt, Homo sapiens
  misc_RNA (1)...(19): siRNA sense strand
ggucagaugauuacacaaa

SEQ ID NO: 1395933 - RNA, 19 nt, Homo sapiens
  misc_RNA (1)...(19): siRNA sense strand
caauaaacagucacuacua

SEQ ID NO: 1395934 - RNA, 19 nt, Homo sapiens
  misc_RNA (1)...(19): siRNA sense strand
ccgaucaacugcugugaaa

SEQ ID NO: 1395935 - RNA, 19 nt, Homo sapiens
  misc_RNA (1)...(19): siRNA sense strand
gagguucugacaaugauua

SEQ ID NO: 1395936 - RNA, 19 nt, Homo sapiens
  misc_RNA (1)...(19): siRNA sense strand
gaagaaggaaagacacaga

SEQ ID NO: 1395937 - RNA, 19 nt, Homo sapiens
  misc_RNA (1)...(19): siRNA sense strand
ggaauuucuuugccugaga

SEQ ID NO: 1395938 - RNA, 19 nt, Homo sapiens
  misc_RNA (1)...(19): siRNA sense strand
aaagugcgauggaaugaau

SEQ ID NO: 1395939 - RNA, 19 nt, Homo sapiens
  misc_RNA (1)...(19): siRNA sense strand
ucucacagaugcuauuaga

SEQ ID NO: 1395940 - RNA, 19 nt, Homo sapiens
  misc_RNA (1)...(19): siRNA sense strand
ugacaaugauuaccugauc

SEQ ID NO: 1395941 - RNA, 19 nt, Homo sapiens
  misc_RNA (1)...(19): siRNA sense strand
aaaaugagguguaauccua

SEQ ID NO: 1395942 - RNA, 19 nt, Homo sapiens
  misc_RNA (1)...(19): siRNA sense strand
gccacuacauugagaaaga

SEQ ID NO: 1395943 - RNA, 19 nt, Homo sapiens
  misc_RNA (1)...(19): siRNA sense strand
gguguaauccuacuaaauc

SEQ ID NO: 1395944 - RNA, 19 nt, Homo sapiens
  misc_RNA (1)...(19): siRNA sense strand
gaagaggaaguuguauauu

SEQ ID NO: 1395945 - RNA, 19 nt, Homo sapiens
  misc_RNA (1)...(19): siRNA sense strand
gcucugaccugcuacuucu

SEQ ID NO: 1395946 - RNA, 19 nt, Homo sapiens
  misc_RNA (1)...(19): siRNA sense strand
gaacuacaggcauccuuau

SEQ ID NO: 1395947 - RNA, 19 nt, Homo sapiens
  misc_RNA (1)...(19): siRNA sense strand
gaagcuugcccucugugua

SEQ ID NO: 1395948 - RNA, 19 nt, Homo sapiens
  misc_RNA (1)...(19): siRNA sense strand
ugagaaaggagccaaagaa

SEQ ID NO: 1395949 - RNA, 19 nt, Homo sapiens
  misc_RNA (1)...(19): siRNA sense strand
uaaugaagaggaaguugua

SEQ ID NO: 1395950 - RNA, 19 nt, Homo sapiens
  misc_RNA (1)...(19): siRNA sense strand
aaucagaguuugcacuaug

SEQ ID NO: 1395951 - RNA, 19 nt, Homo sapiens
  misc_RNA (1)...(19): siRNA sense strand
ggaagaauaacauuugucu

SEQ ID NO: 1395952 - RNA, 19 nt, Homo sapiens
  misc_RNA (1)...(19): siRNA sense strand
gagaaaggagccaaagaau

SEQ ID NO: 1395953 - RNA, 19 nt, Homo sapiens
  misc_RNA (1)...(19): siRNA sense strand
gaauguauaagguguaaag

SEQ ID NO: 1395954 - RNA, 19 nt, Homo sapiens
  misc_RNA (1)...(19): siRNA sense strand
ugaagaggaaguuguauau

SEQ ID NO: 1395955 - RNA, 19 nt, Homo sapiens
  misc_RNA (1)...(19): siRNA sense strand
ccaacaauauaacagacuu

SEQ ID NO: 1395956 - RNA, 19 nt, Homo sapiens
  misc_RNA (1)...(19): siRNA sense strand
aauagacgguucaucaaug

SEQ ID NO: 1395957 - RNA, 19 nt, Homo sapiens
  misc_RNA (1)...(19): siRNA sense strand
gccaaagaauguauaaggu

SEQ ID NO: 1395958 - RNA, 19 nt, Homo sapiens
  misc_RNA (1)...(19): siRNA sense strand
aauaaacagucacuacuag

SEQ ID NO: 1395959 - RNA, 19 nt, Homo sapiens
  misc_RNA (1)...(19): siRNA sense strand
ugagggagccugcaagaga

SEQ ID NO: 1395960 - RNA, 19 nt, Homo sapiens
  misc_RNA (1)...(19): siRNA sense strand
gagguguaauccuacuaaa

SEQ ID NO: 1395961 - RNA, 19 nt, Homo sapiens
  misc_RNA (1)...(19): siRNA sense strand
cuaaucagggucaagauaa

SEQ ID NO: 1395962 - RNA, 19 nt, Homo sapiens
  misc_RNA (1)...(19): siRNA sense strand
cacagaugcuauuagauug

SEQ ID NO: 1395963 - RNA, 19 nt, Homo sapiens
  misc_RNA (1)...(19): siRNA sense strand
gauaauguacaaguggaua

SEQ ID NO: 1395964 - RNA, 19 nt, Homo sapiens
  misc_RNA (1)...(19): siRNA sense strand
ccacuacauugagaaagaa

SEQ ID NO: 1395965 - RNA, 19 nt, Homo sapiens
  misc_RNA (1)...(19): siRNA sense strand
caugguggauauuaauaga

SEQ ID NO: 1395966 - RNA, 19 nt, Homo sapiens
  misc_RNA (1)...(19): siRNA sense strand
acaccuaccuguccauaca

SEQ ID NO: 1395967 - RNA, 19 nt, Homo sapiens
  misc_RNA (1)...(19): siRNA sense strand
uaaugacgacuaacucaaa

SEQ ID NO: 1395968 - RNA, 19 nt, Homo sapiens
  misc_RNA (1)...(19): siRNA sense strand
uaccagaugugcauuucuu

SEQ ID NO: 1395969 - RNA, 19 nt, Homo sapiens
  misc_RNA (1)...(19): siRNA sense strand
aaagacgacucucaauuuu

SEQ ID NO: 1395970 - RNA, 19 nt, Homo sapiens
  misc_RNA (1)...(19): siRNA sense strand
ccaaauaccagaugugcau

SEQ ID NO: 1395971 - RNA, 19 nt, Homo sapiens
  misc_RNA (1)...(19): siRNA sense strand
ucauaggagucacaguuga

SEQ ID NO: 1395972 - RNA, 19 nt, Homo sapiens
  misc_RNA (1)...(19): siRNA sense strand
gaguuugcacuaugacuuu

SEQ ID NO: 1395973 - RNA, 19 nt, Homo sapiens
  misc_RNA (1)...(19): siRNA sense strand
cuaggaagaauaacauuug

SEQ ID NO: 1395974 - RNA, 19 nt, Homo sapiens
  misc_RNA (1)...(19): siRNA sense strand
ccagauccauacuccaugu

SEQ ID NO: 1395975 - RNA, 19 nt, Homo sapiens
  misc_RNA (1)...(19): siRNA sense strand
ggagccaaagaauguauaa

SEQ ID NO: 1395976 - RNA, 19 nt, Homo sapiens
  misc_RNA (1)...(19): siRNA sense strand
agacaguugugcuaucaug

SEQ ID NO: 1395977 - RNA, 19 nt, Homo sapiens
  misc_RNA (1)...(19): siRNA sense strand
caacaucuuguauuaaugg

SEQ ID NO: 1395978 - RNA, 19 nt, Homo sapiens
  misc_RNA (1)...(19): siRNA sense strand
gagcagccuuaucaucaca

SEQ ID NO: 1395979 - RNA, 19 nt, Homo sapiens
  misc_RNA (1)...(19): siRNA sense strand
guaccaacaauauaacaga

SEQ ID NO: 1395980 - RNA, 19 nt, Homo sapiens
  misc_RNA (1)...(19): siRNA sense strand
guccauacaucaggucuau

SEQ ID NO: 1395981 - RNA, 19 nt, Homo sapiens
  misc_RNA (1)...(19): siRNA sense strand
uaaucagggucaagauaau

SEQ ID NO: 1395982 - RNA, 19 nt, Homo sapiens
  misc_RNA (1)...(19): siRNA sense strand
aacaauggaucaucuucuu

SEQ ID NO: 1395983 - RNA, 19 nt, Homo sapiens
  misc_RNA (1)...(19): siRNA sense strand
agaagauaaugaagaggaa

SEQ ID NO: 1395984 - RNA, 19 nt, Homo sapiens
  misc_RNA (1)...(19): siRNA sense strand
gaagaagauggcucucugu

SEQ ID NO: 1395985 - RNA, 19 nt, Homo sapiens
  misc_RNA (1)...(19): siRNA sense strand
ucaagccugugcugguaaa

SEQ ID NO: 1395986 - RNA, 19 nt, Homo sapiens
  misc_RNA (1)...(19): siRNA sense strand
gcaaagaggcuuguauucc

SEQ ID NO: 1395987 - RNA, 19 nt, Homo sapiens
  misc_RNA (1)...(19): siRNA sense strand
ggugaagauuuauucuauc

SEQ ID NO: 1395988 - RNA, 19 nt, Homo sapiens
  misc_RNA (1)...(19): siRNA sense strand
ggauuuaaaccaccaacau

SEQ ID NO: 1395989 - RNA, 19 nt, Homo sapiens
  misc_RNA (1)...(19): siRNA sense strand
gaucuuaaacuugcauauc

SEQ ID NO: 1395990 - RNA, 19 nt, Homo sapiens
  misc_RNA (1)...(19): siRNA sense strand
agaaggaaagacacagaua

SEQ ID NO: 1395991 - RNA, 19 nt, Homo sapiens
  misc_RNA (1)...(19): siRNA sense strand
gauggaaccaaagaaugua

SEQ ID NO: 1395992 - RNA, 19 nt, Homo sapiens
  misc_RNA (1)...(19): siRNA sense strand
gugaaacgguugacuuuug

SEQ ID NO: 1395993 - RNA, 19 nt, Homo sapiens
  misc_RNA (1)...(19): siRNA sense strand
cacuuggcuuugaauauaa

SEQ ID NO: 1395994 - RNA, 19 nt, Homo sapiens
  misc_RNA (1)...(19): siRNA sense strand
ccaggcacauucagcaaca

SEQ ID NO: 1395995 - RNA, 19 nt, Homo sapiens
  misc_RNA (1)...(19): siRNA sense strand
uaaacagucacuacuagga

SEQ ID NO: 1395996 - RNA, 19 nt, Homo sapiens
  misc_RNA (1)...(19): siRNA sense strand
guacggagcaugacuucca

SEQ ID NO: 1395997 - RNA, 19 nt, Homo sapiens
  misc_RNA (1)...(19): siRNA sense strand
ccaggccacuacauugaga

SEQ ID NO: 1395998 - RNA, 19 nt, Homo sapiens
  misc_RNA (1)...(19): siRNA sense strand
auacucuacuggagaacua

SEQ ID NO: 1395999 - RNA, 19 nt, Homo sapiens
  misc_RNA (1)...(19): siRNA sense strand
gcacuuggcuuugaauaua

SEQ ID NO: 1396000 - RNA, 19 nt, Homo sapiens
  misc_RNA (1)...(19): siRNA sense strand
gaagauauguucccaguuc

SEQ ID NO: 1396001 - RNA, 19 nt, Homo sapiens
  misc_RNA (1)...(19): siRNA sense strand
gaauauaaaugguggaaug

SEQ ID NO: 1396002 - RNA, 19 nt, Homo sapiens
  misc_RNA (1)...(19): siRNA sense strand
gaaaggagccaaagaaugu

SEQ ID NO: 1396003 - RNA, 19 nt, Homo sapiens
  misc_RNA (1)...(19): siRNA sense strand
gaaaucaggcacaaacaua

SEQ ID NO: 1396004 - RNA, 19 nt, Homo sapiens
  misc_RNA (1)...(19): siRNA sense strand
gaaagacacagauaaugua

SEQ ID NO: 1396005 - RNA, 19 nt, Homo sapiens
  misc_RNA (1)...(19): siRNA sense strand
guacaaaugugguagaauc

SEQ ID NO: 1396006 - RNA, 19 nt, Homo sapiens
  misc_RNA (1)...(19): siRNA sense strand
caacaauuauuccuucuga

SEQ ID NO: 1396007 - RNA, 19 nt, Homo sapiens
  misc_RNA (1)...(19): siRNA sense strand
gcacaaacauacucuacug

SEQ ID NO: 1396008 - RNA, 19 nt, Homo sapiens
  misc_RNA (1)...(19): siRNA sense strand
uaaagacgacucucaauuu

SEQ ID NO: 1396009 - RNA, 19 nt, Homo sapiens
  misc_RNA (1)...(19): siRNA sense strand
gauaauagacgguucauca

SEQ ID NO: 1396010 - RNA, 19 nt, Homo sapiens
  misc_RNA (1)...(19): siRNA sense strand
gaaggaaagacacagauaa

SEQ ID NO: 1396011 - RNA, 19 nt, Homo sapiens
  misc_RNA (1)...(19): siRNA sense strand
ggaaagacacagauaaugu

SEQ ID NO: 1396012 - RNA, 19 nt, Homo sapiens
  misc_RNA (1)...(19): siRNA sense strand
guaugccagucaacaauua

SEQ ID NO: 1396013 - RNA, 19 nt, Homo sapiens
  misc_RNA (1)...(19): siRNA sense strand
ggaaggagaagauaaugaa

SEQ ID NO: 1396014 - RNA, 19 nt, Homo sapiens
  misc_RNA (1)...(19): siRNA sense strand
caaagaauguagaccaugu

SEQ ID NO: 1396015 - RNA, 19 nt, Homo sapiens
  misc_RNA (1)...(19): siRNA sense strand
caggaaaccuuguaugugu

SEQ ID NO: 1396016 - RNA, 19 nt, Homo sapiens
  misc_RNA (1)...(19): siRNA sense strand
caaagaggcuuguauucca

SEQ ID NO: 1396017 - RNA, 19 nt, Homo sapiens
  misc_RNA (1)...(19): siRNA sense strand
ggucaagccugugcuggua

SEQ ID NO: 1396018 - RNA, 19 nt, Homo sapiens
  misc_RNA (1)...(19): siRNA sense strand
ucacagaugcuauuagauu

SEQ ID NO: 1396019 - RNA, 19 nt, Homo sapiens
  misc_RNA (1)...(19): siRNA sense strand
guaaagacgacucucaauu

SEQ ID NO: 1396020 - RNA, 19 nt, Homo sapiens
  misc_RNA (1)...(19): siRNA sense strand
gcagacaguugugcuauca

SEQ ID NO: 1396021 - RNA, 19 nt, Homo sapiens
  misc_RNA (1)...(19): siRNA sense strand
gaacuaaucagggucaaga

SEQ ID NO: 1396022 - RNA, 19 nt, Homo sapiens
  misc_RNA (1)...(19): siRNA sense strand
ucaaugacauggugaagau

SEQ ID NO: 1396023 - RNA, 19 nt, Homo sapiens
  misc_RNA (1)...(19): siRNA sense strand
agacacagauaauguacaa

SEQ ID NO: 1396024 - RNA, 19 nt, Homo sapiens
  misc_RNA (1)...(19): siRNA sense strand
caagagaggauuucaggaa

SEQ ID NO: 1396025 - RNA, 19 nt, Homo sapiens
  misc_RNA (1)...(19): siRNA sense strand
gagcaggagugauuucagu

SEQ ID NO: 1396026 - RNA, 19 nt, Homo sapiens
  misc_RNA (1)...(19): siRNA sense strand
ggagguggcuggagaucau

SEQ ID NO: 1396027 - RNA, 19 nt, Homo sapiens
  misc_RNA (1)...(19): siRNA sense strand
gaacuaggaagaauaacau

SEQ ID NO: 1396028 - RNA, 19 nt, Homo sapiens
  misc_RNA (1)...(19): siRNA sense strand
aagaggaaguuguauauuc

SEQ ID NO: 1396029 - RNA, 19 nt, Homo sapiens
  misc_RNA (1)...(19): siRNA sense strand
gaggaaggauccagugagu

SEQ ID NO: 1396030 - RNA, 19 nt, Homo sapiens
  misc_RNA (1)...(19): siRNA sense strand
aaacaagcuuacacccaua

SEQ ID NO: 1396031 - RNA, 19 nt, Homo sapiens
  misc_RNA (1)...(19): siRNA sense strand
ggaaggauccagugagugu

SEQ ID NO: 1396032 - RNA, 19 nt, Homo sapiens
  misc_RNA (1)...(19): siRNA sense strand
ggucagaugauuacacaaa

SEQ ID NO: 1396033 - RNA, 19 nt, Homo sapiens
  misc_RNA (1)...(19): siRNA sense strand
caauaaacagucacuacua

SEQ ID NO: 1396034 - RNA, 19 nt, Homo sapiens
  misc_RNA (1)...(19): siRNA sense strand
ccgaucaacugcugugaaa

SEQ ID NO: 1396035 - RNA, 19 nt, Homo sapiens
  misc_RNA (1)...(19): siRNA sense strand
gagguucugacaaugauua

SEQ ID NO: 1396036 - RNA, 19 nt, Homo sapiens
  misc_RNA (1)...(19): siRNA sense strand
gaagaaggaaagacacaga

SEQ ID NO: 1396037 - RNA, 19 nt, Homo sapiens
  misc_RNA (1)...(19): siRNA sense strand
ggaauuucuuugccugaga

SEQ ID NO: 1396038 - RNA, 19 nt, Homo sapiens
  misc_RNA (1)...(19): siRNA sense strand
aaagugcgauggaaugaau

SEQ ID NO: 1396039 - RNA, 19 nt, Homo sapiens
  misc_RNA (1)...(19): siRNA sense strand
ucucacagaugcuauuaga

SEQ ID NO: 1396040 - RNA, 19 nt, Homo sapiens
  misc_RNA (1)...(19): siRNA sense strand
ugacaaugauuaccugauc

SEQ ID NO: 1396041 - RNA, 19 nt, Homo sapiens
  misc_RNA (1)...(19): siRNA sense strand
aaaaugagguguaauccua

SEQ ID NO: 1396042 - RNA, 19 nt, Homo sapiens
  misc_RNA (1)...(19): siRNA sense strand
gccacuacauugagaaaga

SEQ ID NO: 1396043 - RNA, 19 nt, Homo sapiens
  misc_RNA (1)...(19): siRNA sense strand
gguguaauccuacuaaauc

SEQ ID NO: 1396044 - RNA, 19 nt, Homo sapiens
  misc_RNA (1)...(19): siRNA sense strand
gaagaggaaguuguauauu

SEQ ID NO: 1396045 - RNA, 19 nt, Homo sapiens
  misc_RNA (1)...(19): siRNA sense strand
gcucugaccugcuacuucu

SEQ ID NO: 1396046 - RNA, 19 nt, Homo sapiens
  misc_RNA (1)...(19): siRNA sense strand
gaacuacaggcauccuuau

SEQ ID NO: 1396047 - RNA, 19 nt, Homo sapiens
  misc_RNA (1)...(19): siRNA sense strand
gaagcuugcccucugugua

SEQ ID NO: 1396048 - RNA, 19 nt, Homo sapiens
  misc_RNA (1)...(19): siRNA sense strand
ugagaaaggagccaaagaa

SEQ ID NO: 1396049 - RNA, 19 nt, Homo sapiens
  misc_RNA (1)...(19): siRNA sense strand
uaaugaagaggaaguugua

SEQ ID NO: 1396050 - RNA, 19 nt, Homo sapiens
  misc_RNA (1)...(19): siRNA sense strand
aaucagaguuugcacuaug

SEQ ID NO: 1396051 - RNA, 19 nt, Homo sapiens
  misc_RNA (1)...(19): siRNA sense strand
ggaagaauaacauuugucu

SEQ ID NO: 1396052 - RNA, 19 nt, Homo sapiens
  misc_RNA (1)...(19): siRNA sense strand
gagaaaggagccaaagaau

SEQ ID NO: 1396053 - RNA, 19 nt, Homo sapiens
  misc_RNA (1)...(19): siRNA sense strand
gaauguauaagguguaaag

SEQ ID NO: 1396054 - RNA, 19 nt, Homo sapiens
  misc_RNA (1)...(19): siRNA sense strand
ugaagaggaaguuguauau

SEQ ID NO: 1396055 - RNA, 19 nt, Homo sapiens
  misc_RNA (1)...(19): siRNA sense strand
ccaacaauauaacagacuu

SEQ ID NO: 1396056 - RNA, 19 nt, Homo sapiens
  misc_RNA (1)...(19): siRNA sense strand
aauagacgguucaucaaug

SEQ ID NO: 1396057 - RNA, 19 nt, Homo sapiens
  misc_RNA (1)...(19): siRNA sense strand
gccaaagaauguauaaggu

SEQ ID NO: 1396058 - RNA, 19 nt, Homo sapiens
  misc_RNA (1)...(19): siRNA sense strand
aauaaacagucacuacuag

SEQ ID NO: 1396059 - RNA, 19 nt, Homo sapiens
  misc_RNA (1)...(19): siRNA sense strand
ugagggagccugcaagaga

SEQ ID NO: 1396060 - RNA, 19 nt, Homo sapiens
  misc_RNA (1)...(19): siRNA sense strand
gagguguaauccuacuaaa

SEQ ID NO: 1396061 - RNA, 19 nt, Homo sapiens
  misc_RNA (1)...(19): siRNA sense strand
cuaaucagggucaagauaa

SEQ ID NO: 1396062 - RNA, 19 nt, Homo sapiens
  misc_RNA (1)...(19): siRNA sense strand
cacagaugcuauuagauug

SEQ ID NO: 1396063 - RNA, 19 nt, Homo sapiens
  misc_RNA (1)...(19): siRNA sense strand
gauaauguacaaguggaua

SEQ ID NO: 1396064 - RNA, 19 nt, Homo sapiens
  misc_RNA (1)...(19): siRNA sense strand
ccacuacauugagaaagaa

SEQ ID NO: 1396065 - RNA, 19 nt, Homo sapiens
  misc_RNA (1)...(19): siRNA sense strand
caugguggauauuaauaga

SEQ ID NO: 1396066 - RNA, 19 nt, Homo sapiens
  misc_RNA (1)...(19): siRNA sense strand
acaccuaccuguccauaca

SEQ ID NO: 1396067 - RNA, 19 nt, Homo sapiens
  misc_RNA (1)...(19): siRNA sense strand
uaaugacgacuaacucaaa

SEQ ID NO: 1396068 - RNA, 19 nt, Homo sapiens
  misc_RNA (1)...(19): siRNA sense strand
uaccagaugugcauuucuu

SEQ ID NO: 1396069 - RNA, 19 nt, Homo sapiens
  misc_RNA (1)...(19): siRNA sense strand
aaagacgacucucaauuuu

SEQ ID NO: 1396070 - RNA, 19 nt, Homo sapiens
  misc_RNA (1)...(19): siRNA sense strand
ccaaauaccagaugugcau

SEQ ID NO: 1396071 - RNA, 19 nt, Homo sapiens
  misc_RNA (1)...(19): siRNA sense strand
ucauaggagucacaguuga

SEQ ID NO: 1396072 - RNA, 19 nt, Homo sapiens
  misc_RNA (1)...(19): siRNA sense strand
gaguuugcacuaugacuuu

SEQ ID NO: 1396073 - RNA, 19 nt, Homo sapiens
  misc_RNA (1)...(19): siRNA sense strand
cuaggaagaauaacauuug

SEQ ID NO: 1396074 - RNA, 19 nt, Homo sapiens
  misc_RNA (1)...(19): siRNA sense strand
ccagauccauacuccaugu

SEQ ID NO: 1396075 - RNA, 19 nt, Homo sapiens
  misc_RNA (1)...(19): siRNA sense strand
ggagccaaagaauguauaa

SEQ ID NO: 1396076 - RNA, 19 nt, Homo sapiens
  misc_RNA (1)...(19): siRNA sense strand
agacaguugugcuaucaug

SEQ ID NO: 1396077 - RNA, 19 nt, Homo sapiens
  misc_RNA (1)...(19): siRNA sense strand
caacaucuuguauuaaugg

SEQ ID NO: 1396078 - RNA, 19 nt, Homo sapiens
  misc_RNA (1)...(19): siRNA sense strand
gagcagccuuaucaucaca

SEQ ID NO: 1396079 - RNA, 19 nt, Homo sapiens
  misc_RNA (1)...(19): siRNA sense strand
guaccaacaauauaacaga

SEQ ID NO: 1396080 - RNA, 19 nt, Homo sapiens
  misc_RNA (1)...(19): siRNA sense strand
guccauacaucaggucuau

SEQ ID NO: 1396081 - RNA, 19 nt, Homo sapiens
  misc_RNA (1)...(19): siRNA sense strand
uaaucagggucaagauaau

SEQ ID NO: 1396082 - RNA, 19 nt, Homo sapiens
  misc_RNA (1)...(19): siRNA sense strand
aacaauggaucaucuucuu

SEQ ID NO: 1396083 - RNA, 19 nt, Homo sapiens
  misc_RNA (1)...(19): siRNA sense strand
agaagauaaugaagaggaa

SEQ ID NO: 1396084 - RNA, 19 nt, Homo sapiens
  misc_RNA (1)...(19): siRNA sense strand
gaagaagauggcucucugu

SEQ ID NO: 1396085 - RNA, 19 nt, Homo sapiens
  misc_RNA (1)...(19): siRNA sense strand
ucaagccugugcugguaaa

SEQ ID NO: 1396086 - RNA, 19 nt, Homo sapiens
  misc_RNA (1)...(19): siRNA sense strand
gcaaagaggcuuguauucc

SEQ ID NO: 1396087 - RNA, 19 nt, Homo sapiens
  misc_RNA (1)...(19): siRNA sense strand
ggugaagauuuauucuauc

SEQ ID NO: 1396088 - RNA, 19 nt, Homo sapiens
  misc_RNA (1)...(19): siRNA sense strand
ggauuuaaaccaccaacau

SEQ ID NO: 1396089 - RNA, 19 nt, Homo sapiens
  misc_RNA (1)...(19): siRNA sense strand
gaucuuaaacuugcauauc

SEQ ID NO: 1396090 - RNA, 19 nt, Homo sapiens
  misc_RNA (1)...(19): siRNA sense strand
agaaggaaagacacagaua

SEQ ID NO: 1396091 - RNA, 19 nt, Homo sapiens
  misc_RNA (1)...(19): siRNA sense strand
gauggaaccaaagaaugua

SEQ ID NO: 1396092 - RNA, 19 nt, Homo sapiens
  misc_RNA (1)...(19): siRNA sense strand
gugaaacgguugacuuuug

SEQ ID NO: 1396093 - RNA, 19 nt, Homo sapiens
  misc_RNA (1)...(19): siRNA sense strand
cacuuggcuuugaauauaa

SEQ ID NO: 1396094 - RNA, 19 nt, Homo sapiens
  misc_RNA (1)...(19): siRNA sense strand
ccaggcacauucagcaaca

SEQ ID NO: 1396095 - RNA, 19 nt, Homo sapiens
  misc_RNA (1)...(19): siRNA sense strand
uaaacagucacuacuagga

SEQ ID NO: 1396096 - RNA, 19 nt, Homo sapiens
  misc_RNA (1)...(19): siRNA sense strand
guacggagcaugacuucca

SEQ ID NO: 1396097 - RNA, 19 nt, Homo sapiens
  misc_RNA (1)...(19): siRNA sense strand
ccaggccacuacauugaga

SEQ ID NO: 1396098 - RNA, 19 nt, Homo sapiens
  misc_RNA (1)...(19): siRNA sense strand
auacucuacuggagaacua

SEQ ID NO: 1396099 - RNA, 19 nt, Homo sapiens
  misc_RNA (1)...(19): siRNA sense strand
ggagacagauuuagauaua

SEQ ID NO: 1396100 - RNA, 19 nt, Homo sapiens
  misc_RNA (1)...(19): siRNA sense strand
gaacugcucuggacauaug

SEQ ID NO: 1396101 - RNA, 19 nt, Homo sapiens
  misc_RNA (1)...(19): siRNA sense strand
ggacacagcaucuuugauu

SEQ ID NO: 1396102 - RNA, 19 nt, Homo sapiens
  misc_RNA (1)...(19): siRNA sense strand
gcaagagcauccacaccuu

SEQ ID NO: 1396103 - RNA, 19 nt, Homo sapiens
  misc_RNA (1)...(19): siRNA sense strand
gacacagcaucuuugauuu

SEQ ID NO: 1396104 - RNA, 19 nt, Homo sapiens
  misc_RNA (1)...(19): siRNA sense strand
cgacaggauugcagaagug

SEQ ID NO: 1396105 - RNA, 19 nt, Homo sapiens
  misc_RNA (1)...(19): siRNA sense strand
agaaguggcuggcuauagu

SEQ ID NO: 1396106 - RNA, 19 nt, Homo sapiens
  misc_RNA (1)...(19): siRNA sense strand
gagcaagggccaggcagua

SEQ ID NO: 1396107 - RNA, 19 nt, Homo sapiens
  misc_RNA (1)...(19): siRNA sense strand
cagcaucuuugauuucauc

SEQ ID NO: 1396108 - RNA, 19 nt, Homo sapiens
  misc_RNA (1)...(19): siRNA sense strand
gagacagauuuagauauag

SEQ ID NO: 1396109 - RNA, 19 nt, Homo sapiens
  misc_RNA (1)...(19): siRNA sense strand
gccacagccuggacaugaa

SEQ ID NO: 1396110 - RNA, 19 nt, Homo sapiens
  misc_RNA (1)...(19): siRNA sense strand
guggagacagauuuagaua

SEQ ID NO: 1396111 - RNA, 19 nt, Homo sapiens
  misc_RNA (1)...(19): siRNA sense strand
ggcaguggagacagauuua

SEQ ID NO: 1396112 - RNA, 19 nt, Homo sapiens
  misc_RNA (1)...(19): siRNA sense strand
cacagcaucuuugauuuca

SEQ ID NO: 1396113 - RNA, 19 nt, Homo sapiens
  misc_RNA (1)...(19): siRNA sense strand
gcagaaguggcuggcuaua

SEQ ID NO: 1396114 - RNA, 19 nt, Homo sapiens
  misc_RNA (1)...(19): siRNA sense strand
ccuggaaggugcugaacug

SEQ ID NO: 1396115 - RNA, 19 nt, Homo sapiens
  misc_RNA (1)...(19): siRNA sense strand
cugaacugcucuggacaua

SEQ ID NO: 1396116 - RNA, 19 nt, Homo sapiens
  misc_RNA (1)...(19): siRNA sense strand
cggagaguaucgucugugu

SEQ ID NO: 1396117 - RNA, 19 nt, Homo sapiens
  misc_RNA (1)...(19): siRNA sense strand
gaaugugcacagacucuuc

SEQ ID NO: 1396118 - RNA, 19 nt, Homo sapiens
  misc_RNA (1)...(19): siRNA sense strand
gcuguuccgccuacgagua

SEQ ID NO: 1396119 - RNA, 19 nt, Homo sapiens
  misc_RNA (1)...(19): siRNA sense strand
ggacauaugagggccuaca

SEQ ID NO: 1396120 - RNA, 19 nt, Homo sapiens
  misc_RNA (1)...(19): siRNA sense strand
ggauggggcuucaguagca

SEQ ID NO: 1396121 - RNA, 19 nt, Homo sapiens
  misc_RNA (1)...(19): siRNA sense strand
gcaguaacagggcaguauc

SEQ ID NO: 1396122 - RNA, 19 nt, Homo sapiens
  misc_RNA (1)...(19): siRNA sense strand
acacagcaucuuugauuuc

SEQ ID NO: 1396123 - RNA, 19 nt, Homo sapiens
  misc_RNA (1)...(19): siRNA sense strand
gagaaugugcacagacucu

SEQ ID NO: 1396124 - RNA, 19 nt, Homo sapiens
  misc_RNA (1)...(19): siRNA sense strand
uaucgucuguguccauuuu

SEQ ID NO: 1396125 - RNA, 19 nt, Homo sapiens
  misc_RNA (1)...(19): siRNA sense strand
agacagauuuagauauagc

SEQ ID NO: 1396126 - RNA, 19 nt, Homo sapiens
  misc_RNA (1)...(19): siRNA sense strand
ccgagaaugugcacagacu

SEQ ID NO: 1396127 - RNA, 19 nt, Homo sapiens
  misc_RNA (1)...(19): siRNA sense strand
cauuggacacagcaucuuu

SEQ ID NO: 1396128 - RNA, 19 nt, Homo sapiens
  misc_RNA (1)...(19): siRNA sense strand
gaaguggcuggcuauaguc

SEQ ID NO: 1396129 - RNA, 19 nt, Homo sapiens
  misc_RNA (1)...(19): siRNA sense strand
cgccacagccuggacauga

SEQ ID NO: 1396130 - RNA, 19 nt, Homo sapiens
  misc_RNA (1)...(19): siRNA sense strand
cugaggcaguggagacaga

SEQ ID NO: 1396131 - RNA, 19 nt, Homo sapiens
  misc_RNA (1)...(19): siRNA sense strand
ggcaguaacagggcaguau

SEQ ID NO: 1396132 - RNA, 19 nt, Homo sapiens
  misc_RNA (1)...(19): siRNA sense strand
gacauaugagggccuacaa

SEQ ID NO: 1396133 - RNA, 19 nt, Homo sapiens
  misc_RNA (1)...(19): siRNA sense strand
caguggagacagauuuaga

SEQ ID NO: 1396134 - RNA, 19 nt, Homo sapiens
  misc_RNA (1)...(19): siRNA sense strand
caagggccaggcaguaaca

SEQ ID NO: 1396135 - RNA, 19 nt, Homo sapiens
  misc_RNA (1)...(19): siRNA sense strand
gcaagggccaggcaguaac

SEQ ID NO: 1396136 - RNA, 19 nt, Homo sapiens
  misc_RNA (1)...(19): siRNA sense strand
caccgagaaugugcacaga

SEQ ID NO: 1396137 - RNA, 19 nt, Homo sapiens
  misc_RNA (1)...(19): siRNA sense strand
ggagacagauuuagauaua

SEQ ID NO: 1396138 - RNA, 19 nt, Homo sapiens
  misc_RNA (1)...(19): siRNA sense strand
gaacugcucuggacauaug

SEQ ID NO: 1396139 - RNA, 19 nt, Homo sapiens
  misc_RNA (1)...(19): siRNA sense strand
ggacacagcaucuuugauu

SEQ ID NO: 1396140 - RNA, 19 nt, Homo sapiens
  misc_RNA (1)...(19): siRNA sense strand
ggacaaggccucuaucaug

SEQ ID NO: 1396141 - RNA, 19 nt, Homo sapiens
  misc_RNA (1)...(19): siRNA sense strand
gcaagagcauccacaccuu

SEQ ID NO: 1396142 - RNA, 19 nt, Homo sapiens
  misc_RNA (1)...(19): siRNA sense strand
gacacagcaucuuugauuu

SEQ ID NO: 1396143 - RNA, 19 nt, Homo sapiens
  misc_RNA (1)...(19): siRNA sense strand
cgacaggauugcagaagug

SEQ ID NO: 1396144 - RNA, 19 nt, Homo sapiens
  misc_RNA (1)...(19): siRNA sense strand
agaaguggcuggcuauagu

SEQ ID NO: 1396145 - RNA, 19 nt, Homo sapiens
  misc_RNA (1)...(19): siRNA sense strand
gagcaagggccaggcagua

SEQ ID NO: 1396146 - RNA, 19 nt, Homo sapiens
  misc_RNA (1)...(19): siRNA sense strand
cagcaucuuugauuucauc

SEQ ID NO: 1396147 - RNA, 19 nt, Homo sapiens
  misc_RNA (1)...(19): siRNA sense strand
gagacagauuuagauauag

SEQ ID NO: 1396148 - RNA, 19 nt, Homo sapiens
  misc_RNA (1)...(19): siRNA sense strand
gccacagccuggacaugaa

SEQ ID NO: 1396149 - RNA, 19 nt, Homo sapiens
  misc_RNA (1)...(19): siRNA sense strand
guggagacagauuuagaua

SEQ ID NO: 1396150 - RNA, 19 nt, Homo sapiens
  misc_RNA (1)...(19): siRNA sense strand
ggcaguggagacagauuua

SEQ ID NO: 1396151 - RNA, 19 nt, Homo sapiens
  misc_RNA (1)...(19): siRNA sense strand
cacagcaucuuugauuuca

SEQ ID NO: 1396152 - RNA, 19 nt, Homo sapiens
  misc_RNA (1)...(19): siRNA sense strand
gcagaaguggcuggcuaua

SEQ ID NO: 1396153 - RNA, 19 nt, Homo sapiens
  misc_RNA (1)...(19): siRNA sense strand
ccuggaaggugcugaacug

SEQ ID NO: 1396154 - RNA, 19 nt, Homo sapiens
  misc_RNA (1)...(19): siRNA sense strand
cugaacugcucuggacaua

SEQ ID NO: 1396155 - RNA, 19 nt, Homo sapiens
  misc_RNA (1)...(19): siRNA sense strand
cggagaguaucgucugugu

SEQ ID NO: 1396156 - RNA, 19 nt, Homo sapiens
  misc_RNA (1)...(19): siRNA sense strand
gaaugugcacagacucuuc

SEQ ID NO: 1396157 - RNA, 19 nt, Homo sapiens
  misc_RNA (1)...(19): siRNA sense strand
gcuguuccgccuacgagua

SEQ ID NO: 1396158 - RNA, 19 nt, Homo sapiens
  misc_RNA (1)...(19): siRNA sense strand
agaccgaggugcuguacca

SEQ ID NO: 1396159 - RNA, 19 nt, Homo sapiens
  misc_RNA (1)...(19): siRNA sense strand
ggacauaugagggccuaca

SEQ ID NO: 1396160 - RNA, 19 nt, Homo sapiens
  misc_RNA (1)...(19): siRNA sense strand
ggauggggcuucaguagca

SEQ ID NO: 1396161 - RNA, 19 nt, Homo sapiens
  misc_RNA (1)...(19): siRNA sense strand
gcaguaacagggcaguauc

SEQ ID NO: 1396162 - RNA, 19 nt, Homo sapiens
  misc_RNA (1)...(19): siRNA sense strand
acacagcaucuuugauuuc

SEQ ID NO: 1396163 - RNA, 19 nt, Homo sapiens
  misc_RNA (1)...(19): siRNA sense strand
gagaaugugcacagacucu

SEQ ID NO: 1396164 - RNA, 19 nt, Homo sapiens
  misc_RNA (1)...(19): siRNA sense strand
uaucgucuguguccauuuu

SEQ ID NO: 1396165 - RNA, 19 nt, Homo sapiens
  misc_RNA (1)...(19): siRNA sense strand
agacagauuuagauauagc

SEQ ID NO: 1396166 - RNA, 19 nt, Homo sapiens
  misc_RNA (1)...(19): siRNA sense strand
ccgagaaugugcacagacu

SEQ ID NO: 1396167 - RNA, 19 nt, Homo sapiens
  misc_RNA (1)...(19): siRNA sense strand
gaaguggcuggcuauaguc

SEQ ID NO: 1396168 - RNA, 19 nt, Homo sapiens
  misc_RNA (1)...(19): siRNA sense strand
cauuggacacagcaucuuu

SEQ ID NO: 1396169 - RNA, 19 nt, Homo sapiens
  misc_RNA (1)...(19): siRNA sense strand
cgccacagccuggacauga

SEQ ID NO: 1396170 - RNA, 19 nt, Homo sapiens
  misc_RNA (1)...(19): siRNA sense strand
cugaggcaguggagacaga

SEQ ID NO: 1396171 - RNA, 19 nt, Homo sapiens
  misc_RNA (1)...(19): siRNA sense strand
ggcaguaacagggcaguau

SEQ ID NO: 1396172 - RNA, 19 nt, Homo sapiens
  misc_RNA (1)...(19): siRNA sense strand
gacauaugagggccuacaa

SEQ ID NO: 1396173 - RNA, 19 nt, Homo sapiens
  misc_RNA (1)...(19): siRNA sense strand
caguggagacagauuuaga

SEQ ID NO: 1396174 - RNA, 19 nt, Homo sapiens
  misc_RNA (1)...(19): siRNA sense strand
caagggccaggcaguaaca

SEQ ID NO: 1396175 - RNA, 19 nt, Homo sapiens
  misc_RNA (1)...(19): siRNA sense strand
gcaagggccaggcaguaac

SEQ ID NO: 1396176 - RNA, 19 nt, Homo sapiens
  misc_RNA (1)...(19): siRNA sense strand
caccgagaaugugcacaga

SEQ ID NO: 1396177 - RNA, 19 nt, Homo sapiens
  misc_RNA (1)...(19): siRNA sense strand
ggagacagauuuagauaua

SEQ ID NO: 1396178 - RNA, 19 nt, Homo sapiens
  misc_RNA (1)...(19): siRNA sense strand
gaacugcucuggacauaug

SEQ ID NO: 1396179 - RNA, 19 nt, Homo sapiens
  misc_RNA (1)...(19): siRNA sense strand
ggacacagcaucuuugauu

SEQ ID NO: 1396180 - RNA, 19 nt, Homo sapiens
  misc_RNA (1)...(19): siRNA sense strand
ggacaaggccucuaucaug

SEQ ID NO: 1396181 - RNA, 19 nt, Homo sapiens
  misc_RNA (1)...(19): siRNA sense strand
gcaagagcauccacaccuu

SEQ ID NO: 1396182 - RNA, 19 nt, Homo sapiens
  misc_RNA (1)...(19): siRNA sense strand
gacacagcaucuuugauuu

SEQ ID NO: 1396183 - RNA, 19 nt, Homo sapiens
  misc_RNA (1)...(19): siRNA sense strand
cgacaggauugcagaagug

SEQ ID NO: 1396184 - RNA, 19 nt, Homo sapiens
  misc_RNA (1)...(19): siRNA sense strand
agaaguggcuggcuauagu

SEQ ID NO: 1396185 - RNA, 19 nt, Homo sapiens
  misc_RNA (1)...(19): siRNA sense strand
gagcaagggccaggcagua

SEQ ID NO: 1396186 - RNA, 19 nt, Homo sapiens
  misc_RNA (1)...(19): siRNA sense strand
cagcaucuuugauuucauc

SEQ ID NO: 1396187 - RNA, 19 nt, Homo sapiens
  misc_RNA (1)...(19): siRNA sense strand
gagacagauuuagauauag

SEQ ID NO: 1396188 - RNA, 19 nt, Homo sapiens
  misc_RNA (1)...(19): siRNA sense strand
gccacagccuggacaugaa

SEQ ID NO: 1396189 - RNA, 19 nt, Homo sapiens
  misc_RNA (1)...(19): siRNA sense strand
guggagacagauuuagaua

SEQ ID NO: 1396190 - RNA, 19 nt, Homo sapiens
  misc_RNA (1)...(19): siRNA sense strand
ggcaguggagacagauuua

SEQ ID NO: 1396191 - RNA, 19 nt, Homo sapiens
  misc_RNA (1)...(19): siRNA sense strand
cacagcaucuuugauuuca

SEQ ID NO: 1396192 - RNA, 19 nt, Homo sapiens
  misc_RNA (1)...(19): siRNA sense strand
gcagaaguggcuggcuaua

SEQ ID NO: 1396193 - RNA, 19 nt, Homo sapiens
  misc_RNA (1)...(19): siRNA sense strand
ccuggaaggugcugaacug

SEQ ID NO: 1396194 - RNA, 19 nt, Homo sapiens
  misc_RNA (1)...(19): siRNA sense strand
cugaacugcucuggacaua

SEQ ID NO: 1396195 - RNA, 19 nt, Homo sapiens
  misc_RNA (1)...(19): siRNA sense strand
cggagaguaucgucugugu

SEQ ID NO: 1396196 - RNA, 19 nt, Homo sapiens
  misc_RNA (1)...(19): siRNA sense strand
gaaugugcacagacucuuc

SEQ ID NO: 1396197 - RNA, 19 nt, Homo sapiens
  misc_RNA (1)...(19): siRNA sense strand
gcuguuccgccuacgagua

SEQ ID NO: 1396198 - RNA, 19 nt, Homo sapiens
  misc_RNA (1)...(19): siRNA sense strand
agaccgaggugcuguacca

SEQ ID NO: 1396199 - RNA, 19 nt, Homo sapiens
  misc_RNA (1)...(19): siRNA sense strand
ggacauaugagggccuaca

SEQ ID NO: 1396200 - RNA, 19 nt, Homo sapiens
  misc_RNA (1)...(19): siRNA sense strand
ggauggggcuucaguagca

SEQ ID NO: 1396201 - RNA, 19 nt, Homo sapiens
  misc_RNA (1)...(19): siRNA sense strand
gcaguaacagggcaguauc

SEQ ID NO: 1396202 - RNA, 19 nt, Homo sapiens
  misc_RNA (1)...(19): siRNA sense strand
acacagcaucuuugauuuc

SEQ ID NO: 1396203 - RNA, 19 nt, Homo sapiens
  misc_RNA (1)...(19): siRNA sense strand
gagaaugugcacagacucu

SEQ ID NO: 1396204 - RNA, 19 nt, Homo sapiens
  misc_RNA (1)...(19): siRNA sense strand
uaucgucuguguccauuuu

SEQ ID NO: 1396205 - RNA, 19 nt, Homo sapiens
  misc_RNA (1)...(19): siRNA sense strand
agacagauuuagauauagc

SEQ ID NO: 1396206 - RNA, 19 nt, Homo sapiens
  misc_RNA (1)...(19): siRNA sense strand
ccgagaaugugcacagacu

SEQ ID NO: 1396207 - RNA, 19 nt, Homo sapiens
  misc_RNA (1)...(19): siRNA sense strand
gaaguggcuggcuauaguc

SEQ ID NO: 1396208 - RNA, 19 nt, Homo sapiens
  misc_RNA (1)...(19): siRNA sense strand
cauuggacacagcaucuuu

SEQ ID NO: 1396209 - RNA, 19 nt, Homo sapiens
  misc_RNA (1)...(19): siRNA sense strand
cgccacagccuggacauga

SEQ ID NO: 1396210 - RNA, 19 nt, Homo sapiens
  misc_RNA (1)...(19): siRNA sense strand
cugaggcaguggagacaga

SEQ ID NO: 1396211 - RNA, 19 nt, Homo sapiens
  misc_RNA (1)...(19): siRNA sense strand
ggcaguaacagggcaguau

SEQ ID NO: 1396212 - RNA, 19 nt, Homo sapiens
  misc_RNA (1)...(19): siRNA sense strand
gacauaugagggccuacaa

SEQ ID NO: 1396213 - RNA, 19 nt, Homo sapiens
  misc_RNA (1)...(19): siRNA sense strand
caguggagacagauuuaga

SEQ ID NO: 1396214 - RNA, 19 nt, Homo sapiens
  misc_RNA (1)...(19): siRNA sense strand
caagggccaggcaguaaca

SEQ ID NO: 1396215 - RNA, 19 nt, Homo sapiens
  misc_RNA (1)...(19): siRNA sense strand
gcaagggccaggcaguaac

SEQ ID NO: 1396216 - RNA, 19 nt, Homo sapiens
  misc_RNA (1)...(19): siRNA sense strand
caccgagaaugugcacaga

SEQ ID NO: 1396217 - RNA, 19 nt, Homo sapiens
  misc_RNA (1)...(19): siRNA sense strand
ggagacagauuuagauaua

SEQ ID NO: 1396218 - RNA, 19 nt, Homo sapiens
  misc_RNA (1)...(19): siRNA sense strand
gaacugcucuggacauaug

SEQ ID NO: 1396219 - RNA, 19 nt, Homo sapiens
  misc_RNA (1)...(19): siRNA sense strand
ggacacagcaucuuugauu

SEQ ID NO: 1396220 - RNA, 19 nt, Homo sapiens
  misc_RNA (1)...(19): siRNA sense strand
ggacaaggccucuaucaug

SEQ ID NO: 1396221 - RNA, 19 nt, Homo sapiens
  misc_RNA (1)...(19): siRNA sense strand
gcaagagcauccacaccuu

SEQ ID NO: 1396222 - RNA, 19 nt, Homo sapiens
  misc_RNA (1)...(19): siRNA sense strand
gacacagcaucuuugauuu

SEQ ID NO: 1396223 - RNA, 19 nt, Homo sapiens
  misc_RNA (1)...(19): siRNA sense strand
cgacaggauugcagaagug

SEQ ID NO: 1396224 - RNA, 19 nt, Homo sapiens
  misc_RNA (1)...(19): siRNA sense strand
agaaguggcuggcuauagu

SEQ ID NO: 1396225 - RNA, 19 nt, Homo sapiens
  misc_RNA (1)...(19): siRNA sense strand
gagcaagggccaggcagua

SEQ ID NO: 1396226 - RNA, 19 nt, Homo sapiens
  misc_RNA (1)...(19): siRNA sense strand
cagcaucuuugauuucauc

SEQ ID NO: 1396227 - RNA, 19 nt, Homo sapiens
  misc_RNA (1)...(19): siRNA sense strand
gagacagauuuagauauag

SEQ ID NO: 1396228 - RNA, 19 nt, Homo sapiens
  misc_RNA (1)...(19): siRNA sense strand
gccacagccuggacaugaa

SEQ ID NO: 1396229 - RNA, 19 nt, Homo sapiens
  misc_RNA (1)...(19): siRNA sense strand
guggagacagauuuagaua

SEQ ID NO: 1396230 - RNA, 19 nt, Homo sapiens
  misc_RNA (1)...(19): siRNA sense strand
ggcaguggagacagauuua

SEQ ID NO: 1396231 - RNA, 19 nt, Homo sapiens
  misc_RNA (1)...(19): siRNA sense strand
cacagcaucuuugauuuca

SEQ ID NO: 1396232 - RNA, 19 nt, Homo sapiens
  misc_RNA (1)...(19): siRNA sense strand
gcagaaguggcuggcuaua

SEQ ID NO: 1396233 - RNA, 19 nt, Homo sapiens
  misc_RNA (1)...(19): siRNA sense strand
ccuggaaggugcugaacug

SEQ ID NO: 1396234 - RNA, 19 nt, Homo sapiens
  misc_RNA (1)...(19): siRNA sense strand
cugaacugcucuggacaua

SEQ ID NO: 1396235 - RNA, 19 nt, Homo sapiens
  misc_RNA (1)...(19): siRNA sense strand
cggagaguaucgucugugu

SEQ ID NO: 1396236 - RNA, 19 nt, Homo sapiens
  misc_RNA (1)...(19): siRNA sense strand
gaaugugcacagacucuuc

SEQ ID NO: 1396237 - RNA, 19 nt, Homo sapiens
  misc_RNA (1)...(19): siRNA sense strand
agaccgaggugcuguacca

SEQ ID NO: 1396238 - RNA, 19 nt, Homo sapiens
  misc_RNA (1)...(19): siRNA sense strand
gcuguuccgccuacgagua

SEQ ID NO: 1396239 - RNA, 19 nt, Homo sapiens
  misc_RNA (1)...(19): siRNA sense strand
ggacauaugagggccuaca

SEQ ID NO: 1396240 - RNA, 19 nt, Homo sapiens
  misc_RNA (1)...(19): siRNA sense strand
ggauggggcuucaguagca

SEQ ID NO: 1396241 - RNA, 19 nt, Homo sapiens
  misc_RNA (1)...(19): siRNA sense strand
gcaguaacagggcaguauc

SEQ ID NO: 1396242 - RNA, 19 nt, Homo sapiens
  misc_RNA (1)...(19): siRNA sense strand
acacagcaucuuugauuuc

SEQ ID NO: 1396243 - RNA, 19 nt, Homo sapiens
  misc_RNA (1)...(19): siRNA sense strand
gagaaugugcacagacucu

SEQ ID NO: 1396244 - RNA, 19 nt, Homo sapiens
  misc_RNA (1)...(19): siRNA sense strand
uaucgucuguguccauuuu

SEQ ID NO: 1396245 - RNA, 19 nt, Homo sapiens
  misc_RNA (1)...(19): siRNA sense strand
agacagauuuagauauagc

SEQ ID NO: 1396246 - RNA, 19 nt, Homo sapiens
  misc_RNA (1)...(19): siRNA sense strand
ccgagaaugugcacagacu

SEQ ID NO: 1396247 - RNA, 19 nt, Homo sapiens
  misc_RNA (1)...(19): siRNA sense strand
gaaguggcuggcuauaguc

SEQ ID NO: 1396248 - RNA, 19 nt, Homo sapiens
  misc_RNA (1)...(19): siRNA sense strand
cauuggacacagcaucuuu

SEQ ID NO: 1396249 - RNA, 19 nt, Homo sapiens
  misc_RNA (1)...(19): siRNA sense strand
cgccacagccuggacauga

SEQ ID NO: 1396250 - RNA, 19 nt, Homo sapiens
  misc_RNA (1)...(19): siRNA sense strand
cugaggcaguggagacaga

SEQ ID NO: 1396251 - RNA, 19 nt, Homo sapiens
  misc_RNA (1)...(19): siRNA sense strand
ggcaguaacagggcaguau

SEQ ID NO: 1396252 - RNA, 19 nt, Homo sapiens
  misc_RNA (1)...(19): siRNA sense strand
gacauaugagggccuacaa

SEQ ID NO: 1396253 - RNA, 19 nt, Homo sapiens
  misc_RNA (1)...(19): siRNA sense strand
caguggagacagauuuaga

SEQ ID NO: 1396254 - RNA, 19 nt, Homo sapiens
  misc_RNA (1)...(19): siRNA sense strand
caagggccaggcaguaaca

SEQ ID NO: 1396255 - RNA, 19 nt, Homo sapiens
  misc_RNA (1)...(19): siRNA sense strand
gcaagggccaggcaguaac

SEQ ID NO: 1396256 - RNA, 19 nt, Homo sapiens
  misc_RNA (1)...(19): siRNA sense strand
caccgagaaugugcacaga

SEQ ID NO: 1396257 - RNA, 19 nt, Homo sapiens
  misc_RNA (1)...(19): siRNA sense strand
ggagacagauuuagauaua

SEQ ID NO: 1396258 - RNA, 19 nt, Homo sapiens
  misc_RNA (1)...(19): siRNA sense strand
gaacugcucuggacauaug

SEQ ID NO: 1396259 - RNA, 19 nt, Homo sapiens
  misc_RNA (1)...(19): siRNA sense strand
ggacacagcaucuuugauu

SEQ ID NO: 1396260 - RNA, 19 nt, Homo sapiens
  misc_RNA (1)...(19): siRNA sense strand
gcaagagcauccacaccuu

SEQ ID NO: 1396261 - RNA, 19 nt, Homo sapiens
  misc_RNA (1)...(19): siRNA sense strand
gacacagcaucuuugauuu

SEQ ID NO: 1396262 - RNA, 19 nt, Homo sapiens
  misc_RNA (1)...(19): siRNA sense strand
cgacaggauugcagaagug

SEQ ID NO: 1396263 - RNA, 19 nt, Homo sapiens
  misc_RNA (1)...(19): siRNA sense strand
agaaguggcuggcuauagu

SEQ ID NO: 1396264 - RNA, 19 nt, Homo sapiens
  misc_RNA (1)...(19): siRNA sense strand
gagcaagggccaggcagua

SEQ ID NO: 1396265 - RNA, 19 nt, Homo sapiens
  misc_RNA (1)...(19): siRNA sense strand
cagcaucuuugauuucauc

SEQ ID NO: 1396266 - RNA, 19 nt, Homo sapiens
  misc_RNA (1)...(19): siRNA sense strand
gagacagauuuagauauag

SEQ ID NO: 1396267 - RNA, 19 nt, Homo sapiens
  misc_RNA (1)...(19): siRNA sense strand
gccacagccuggacaugaa

SEQ ID NO: 1396268 - RNA, 19 nt, Homo sapiens
  misc_RNA (1)...(19): siRNA sense strand
guggagacagauuuagaua

SEQ ID NO: 1396269 - RNA, 19 nt, Homo sapiens
  misc_RNA (1)...(19): siRNA sense strand
ggcaguggagacagauuua

SEQ ID NO: 1396270 - RNA, 19 nt, Homo sapiens
  misc_RNA (1)...(19): siRNA sense strand
cacagcaucuuugauuuca

SEQ ID NO: 1396271 - RNA, 19 nt, Homo sapiens
  misc_RNA (1)...(19): siRNA sense strand
gcagaaguggcuggcuaua

SEQ ID NO: 1396272 - RNA, 19 nt, Homo sapiens
  misc_RNA (1)...(19): siRNA sense strand
ccuggaaggugcugaacug

SEQ ID NO: 1396273 - RNA, 19 nt, Homo sapiens
  misc_RNA (1)...(19): siRNA sense strand
cugaacugcucuggacaua

SEQ ID NO: 1396274 - RNA, 19 nt, Homo sapiens
  misc_RNA (1)...(19): siRNA sense strand
cggagaguaucgucugugu

SEQ ID NO: 1396275 - RNA, 19 nt, Homo sapiens
  misc_RNA (1)...(19): siRNA sense strand
gaaugugcacagacucuuc

SEQ ID NO: 1396276 - RNA, 19 nt, Homo sapiens
  misc_RNA (1)...(19): siRNA sense strand
gcuguuccgccuacgagua

SEQ ID NO: 1396277 - RNA, 19 nt, Homo sapiens
  misc_RNA (1)...(19): siRNA sense strand
ggacauaugagggccuaca

SEQ ID NO: 1396278 - RNA, 19 nt, Homo sapiens
  misc_RNA (1)...(19): siRNA sense strand
ggauggggcuucaguagca

SEQ ID NO: 1396279 - RNA, 19 nt, Homo sapiens
  misc_RNA (1)...(19): siRNA sense strand
gcaguaacagggcaguauc

SEQ ID NO: 1396280 - RNA, 19 nt, Homo sapiens
  misc_RNA (1)...(19): siRNA sense strand
acacagcaucuuugauuuc

SEQ ID NO: 1396281 - RNA, 19 nt, Homo sapiens
  misc_RNA (1)...(19): siRNA sense strand
gagaaugugcacagacucu

SEQ ID NO: 1396282 - RNA, 19 nt, Homo sapiens
  misc_RNA (1)...(19): siRNA sense strand
uaucgucuguguccauuuu

SEQ ID NO: 1396283 - RNA, 19 nt, Homo sapiens
  misc_RNA (1)...(19): siRNA sense strand
agacagauuuagauauagc

SEQ ID NO: 1396284 - RNA, 19 nt, Homo sapiens
  misc_RNA (1)...(19): siRNA sense strand
ccgagaaugugcacagacu

SEQ ID NO: 1396285 - RNA, 19 nt, Homo sapiens
  misc_RNA (1)...(19): siRNA sense strand
cauuggacacagcaucuuu

SEQ ID NO: 1396286 - RNA, 19 nt, Homo sapiens
  misc_RNA (1)...(19): siRNA sense strand
gaaguggcuggcuauaguc

SEQ ID NO: 1396287 - RNA, 19 nt, Homo sapiens
  misc_RNA (1)...(19): siRNA sense strand
cgccacagccuggacauga

SEQ ID NO: 1396288 - RNA, 19 nt, Homo sapiens
  misc_RNA (1)...(19): siRNA sense strand
cugaggcaguggagacaga

SEQ ID NO: 1396289 - RNA, 19 nt, Homo sapiens
  misc_RNA (1)...(19): siRNA sense strand
ggcaguaacagggcaguau

SEQ ID NO: 1396290 - RNA, 19 nt, Homo sapiens
  misc_RNA (1)...(19): siRNA sense strand
gacauaugagggccuacaa

SEQ ID NO: 1396291 - RNA, 19 nt, Homo sapiens
  misc_RNA (1)...(19): siRNA sense strand
caguggagacagauuuaga

SEQ ID NO: 1396292 - RNA, 19 nt, Homo sapiens
  misc_RNA (1)...(19): siRNA sense strand
caagggccaggcaguaaca

SEQ ID NO: 1396293 - RNA, 19 nt, Homo sapiens
  misc_RNA (1)...(19): siRNA sense strand
gcaagggccaggcaguaac

SEQ ID NO: 1396294 - RNA, 19 nt, Homo sapiens
  misc_RNA (1)...(19): siRNA sense strand
caccgagaaugugcacaga

SEQ ID NO: 1396295 - RNA, 19 nt, Homo sapiens
  misc_RNA (1)...(19): siRNA sense strand
ggagacagauuuagauaua

SEQ ID NO: 1396296 - RNA, 19 nt, Homo sapiens
  misc_RNA (1)...(19): siRNA sense strand
gaacugcucuggacauaug

SEQ ID NO: 1396297 - RNA, 19 nt, Homo sapiens
  misc_RNA (1)...(19): siRNA sense strand
ggacacagcaucuuugauu

SEQ ID NO: 1396298 - RNA, 19 nt, Homo sapiens
  misc_RNA (1)...(19): siRNA sense strand
ggacaaggccucuaucaug

SEQ ID NO: 1396299 - RNA, 19 nt, Homo sapiens
  misc_RNA (1)...(19): siRNA sense strand
gcaagagcauccacaccuu

SEQ ID NO: 1396300 - RNA, 19 nt, Homo sapiens
  misc_RNA (1)...(19): siRNA sense strand
gacacagcaucuuugauuu

SEQ ID NO: 1396301 - RNA, 19 nt, Homo sapiens
  misc_RNA (1)...(19): siRNA sense strand
cgacaggauugcagaagug

SEQ ID NO: 1396302 - RNA, 19 nt, Homo sapiens
  misc_RNA (1)...(19): siRNA sense strand
agaaguggcuggcuauagu

SEQ ID NO: 1396303 - RNA, 19 nt, Homo sapiens
  misc_RNA (1)...(19): siRNA sense strand
gagcaagggccaggcagua

SEQ ID NO: 1396304 - RNA, 19 nt, Homo sapiens
  misc_RNA (1)...(19): siRNA sense strand
cagcaucuuugauuucauc

SEQ ID NO: 1396305 - RNA, 19 nt, Homo sapiens
  misc_RNA (1)...(19): siRNA sense strand
gagacagauuuagauauag

SEQ ID NO: 1396306 - RNA, 19 nt, Homo sapiens
  misc_RNA (1)...(19): siRNA sense strand
gccacagccuggacaugaa

SEQ ID NO: 1396307 - RNA, 19 nt, Homo sapiens
  misc_RNA (1)...(19): siRNA sense strand
guggagacagauuuagaua

SEQ ID NO: 1396308 - RNA, 19 nt, Homo sapiens
  misc_RNA (1)...(19): siRNA sense strand
ggcaguggagacagauuua

SEQ ID NO: 1396309 - RNA, 19 nt, Homo sapiens
  misc_RNA (1)...(19): siRNA sense strand
cacagcaucuuugauuuca

SEQ ID NO: 1396310 - RNA, 19 nt, Homo sapiens
  misc_RNA (1)...(19): siRNA sense strand
gcagaaguggcuggcuaua

SEQ ID NO: 1396311 - RNA, 19 nt, Homo sapiens
  misc_RNA (1)...(19): siRNA sense strand
ccuggaaggugcugaacug

SEQ ID NO: 1396312 - RNA, 19 nt, Homo sapiens
  misc_RNA (1)...(19): siRNA sense strand
cugaacugcucuggacaua

SEQ ID NO: 1396313 - RNA, 19 nt, Homo sapiens
  misc_RNA (1)...(19): siRNA sense strand
cggagaguaucgucugugu

SEQ ID NO: 1396314 - RNA, 19 nt, Homo sapiens
  misc_RNA (1)...(19): siRNA sense strand
gaaugugcacagacucuuc

SEQ ID NO: 1396315 - RNA, 19 nt, Homo sapiens
  misc_RNA (1)...(19): siRNA sense strand
gcuguuccgccuacgagua

SEQ ID NO: 1396316 - RNA, 19 nt, Homo sapiens
  misc_RNA (1)...(19): siRNA sense strand
agaccgaggugcuguacca

SEQ ID NO: 1396317 - RNA, 19 nt, Homo sapiens
  misc_RNA (1)...(19): siRNA sense strand
ggacauaugagggccuaca

SEQ ID NO: 1396318 - RNA, 19 nt, Homo sapiens
  misc_RNA (1)...(19): siRNA sense strand
ggauggggcuucaguagca

SEQ ID NO: 1396319 - RNA, 19 nt, Homo sapiens
  misc_RNA (1)...(19): siRNA sense strand
gcaguaacagggcaguauc

SEQ ID NO: 1396320 - RNA, 19 nt, Homo sapiens
  misc_RNA (1)...(19): siRNA sense strand
acacagcaucuuugauuuc

SEQ ID NO: 1396321 - RNA, 19 nt, Homo sapiens
  misc_RNA (1)...(19): siRNA sense strand
gagaaugugcacagacucu

SEQ ID NO: 1396322 - RNA, 19 nt, Homo sapiens
  misc_RNA (1)...(19): siRNA sense strand
uaucgucuguguccauuuu

SEQ ID NO: 1396323 - RNA, 19 nt, Homo sapiens
  misc_RNA (1)...(19): siRNA sense strand
agacagauuuagauauagc

SEQ ID NO: 1396324 - RNA, 19 nt, Homo sapiens
  misc_RNA (1)...(19): siRNA sense strand
ccgagaaugugcacagacu

SEQ ID NO: 1396325 - RNA, 19 nt, Homo sapiens
  misc_RNA (1)...(19): siRNA sense strand
gaaguggcuggcuauaguc

SEQ ID NO: 1396326 - RNA, 19 nt, Homo sapiens
  misc_RNA (1)...(19): siRNA sense strand
cauuggacacagcaucuuu

SEQ ID NO: 1396327 - RNA, 19 nt, Homo sapiens
  misc_RNA (1)...(19): siRNA sense strand
cgccacagccuggacauga

SEQ ID NO: 1396328 - RNA, 19 nt, Homo sapiens
  misc_RNA (1)...(19): siRNA sense strand
cugaggcaguggagacaga

SEQ ID NO: 1396329 - RNA, 19 nt, Homo sapiens
  misc_RNA (1)...(19): siRNA sense strand
ggcaguaacagggcaguau

SEQ ID NO: 1396330 - RNA, 19 nt, Homo sapiens
  misc_RNA (1)...(19): siRNA sense strand
gacauaugagggccuacaa

SEQ ID NO: 1396331 - RNA, 19 nt, Homo sapiens
  misc_RNA (1)...(19): siRNA sense strand
caguggagacagauuuaga

SEQ ID NO: 1396332 - RNA, 19 nt, Homo sapiens
  misc_RNA (1)...(19): siRNA sense strand
caagggccaggcaguaaca

SEQ ID NO: 1396333 - RNA, 19 nt, Homo sapiens
  misc_RNA (1)...(19): siRNA sense strand
gcaagggccaggcaguaac

SEQ ID NO: 1396334 - RNA, 19 nt, Homo sapiens
  misc_RNA (1)...(19): siRNA sense strand
caccgagaaugugcacaga

SEQ ID NO: 1396335 - RNA, 19 nt, Homo sapiens
  misc_RNA (1)...(19): siRNA sense strand
ggagacagauuuagauaua

SEQ ID NO: 1396336 - RNA, 19 nt, Homo sapiens
  misc_RNA (1)...(19): siRNA sense strand
gaacugcucuggacauaug

SEQ ID NO: 1396337 - RNA, 19 nt, Homo sapiens
  misc_RNA (1)...(19): siRNA sense strand
ggacacagcaucuuugauu

SEQ ID NO: 1396338 - RNA, 19 nt, Homo sapiens
  misc_RNA (1)...(19): siRNA sense strand
ggacaaggccucuaucaug

SEQ ID NO: 1396339 - RNA, 19 nt, Homo sapiens
  misc_RNA (1)...(19): siRNA sense strand
gcaagagcauccacaccuu

SEQ ID NO: 1396340 - RNA, 19 nt, Homo sapiens
  misc_RNA (1)...(19): siRNA sense strand
gacacagcaucuuugauuu

SEQ ID NO: 1396341 - RNA, 19 nt, Homo sapiens
  misc_RNA (1)...(19): siRNA sense strand
cgacaggauugcagaagug

SEQ ID NO: 1396342 - RNA, 19 nt, Homo sapiens
  misc_RNA (1)...(19): siRNA sense strand
agaaguggcuggcuauagu

SEQ ID NO: 1396343 - RNA, 19 nt, Homo sapiens
  misc_RNA (1)...(19): siRNA sense strand
gagcaagggccaggcagua

SEQ ID NO: 1396344 - RNA, 19 nt, Homo sapiens
  misc_RNA (1)...(19): siRNA sense strand
cagcaucuuugauuucauc

SEQ ID NO: 1396345 - RNA, 19 nt, Homo sapiens
  misc_RNA (1)...(19): siRNA sense strand
gagacagauuuagauauag

SEQ ID NO: 1396346 - RNA, 19 nt, Homo sapiens
  misc_RNA (1)...(19): siRNA sense strand
gccacagccuggacaugaa

SEQ ID NO: 1396347 - RNA, 19 nt, Homo sapiens
  misc_RNA (1)...(19): siRNA sense strand
guggagacagauuuagaua

SEQ ID NO: 1396348 - RNA, 19 nt, Homo sapiens
  misc_RNA (1)...(19): siRNA sense strand
ggcaguggagacagauuua

SEQ ID NO: 1396349 - RNA, 19 nt, Homo sapiens
  misc_RNA (1)...(19): siRNA sense strand
cacagcaucuuugauuuca

SEQ ID NO: 1396350 - RNA, 19 nt, Homo sapiens
  misc_RNA (1)...(19): siRNA sense strand
gcagaaguggcuggcuaua

SEQ ID NO: 1396351 - RNA, 19 nt, Homo sapiens
  misc_RNA (1)...(19): siRNA sense strand
ccuggaaggugcugaacug

SEQ ID NO: 1396352 - RNA, 19 nt, Homo sapiens
  misc_RNA (1)...(19): siRNA sense strand
cugaacugcucuggacaua

SEQ ID NO: 1396353 - RNA, 19 nt, Homo sapiens
  misc_RNA (1)...(19): siRNA sense strand
cggagaguaucgucugugu

SEQ ID NO: 1396354 - RNA, 19 nt, Homo sapiens
  misc_RNA (1)...(19): siRNA sense strand
gaaugugcacagacucuuc

SEQ ID NO: 1396355 - RNA, 19 nt, Homo sapiens
  misc_RNA (1)...(19): siRNA sense strand
gcuguuccgccuacgagua

SEQ ID NO: 1396356 - RNA, 19 nt, Homo sapiens
  misc_RNA (1)...(19): siRNA sense strand
agaccgaggugcuguacca

SEQ ID NO: 1396357 - RNA, 19 nt, Homo sapiens
  misc_RNA (1)...(19): siRNA sense strand
ggacauaugagggccuaca

SEQ ID NO: 1396358 - RNA, 19 nt, Homo sapiens
  misc_RNA (1)...(19): siRNA sense strand
ggauggggcuucaguagca

SEQ ID NO: 1396359 - RNA, 19 nt, Homo sapiens
  misc_RNA (1)...(19): siRNA sense strand
gcaguaacagggcaguauc

SEQ ID NO: 1396360 - RNA, 19 nt, Homo sapiens
  misc_RNA (1)...(19): siRNA sense strand
acacagcaucuuugauuuc

SEQ ID NO: 1396361 - RNA, 19 nt, Homo sapiens
  misc_RNA (1)...(19): siRNA sense strand
gagaaugugcacagacucu

SEQ ID NO: 1396362 - RNA, 19 nt, Homo sapiens
  misc_RNA (1)...(19): siRNA sense strand
uaucgucuguguccauuuu

SEQ ID NO: 1396363 - RNA, 19 nt, Homo sapiens
  misc_RNA (1)...(19): siRNA sense strand
agacagauuuagauauagc

SEQ ID NO: 1396364 - RNA, 19 nt, Homo sapiens
  misc_RNA (1)...(19): siRNA sense strand
ccgagaaugugcacagacu

SEQ ID NO: 1396365 - RNA, 19 nt, Homo sapiens
  misc_RNA (1)...(19): siRNA sense strand
gaaguggcuggcuauaguc

SEQ ID NO: 1396366 - RNA, 19 nt, Homo sapiens
  misc_RNA (1)...(19): siRNA sense strand
cauuggacacagcaucuuu

SEQ ID NO: 1396367 - RNA, 19 nt, Homo sapiens
  misc_RNA (1)...(19): siRNA sense strand
cgccacagccuggacauga

SEQ ID NO: 1396368 - RNA, 19 nt, Homo sapiens
  misc_RNA (1)...(19): siRNA sense strand
cugaggcaguggagacaga

SEQ ID NO: 1396369 - RNA, 19 nt, Homo sapiens
  misc_RNA (1)...(19): siRNA sense strand
ggcaguaacagggcaguau

SEQ ID NO: 1396370 - RNA, 19 nt, Homo sapiens
  misc_RNA (1)...(19): siRNA sense strand
gacauaugagggccuacaa

SEQ ID NO: 1396371 - RNA, 19 nt, Homo sapiens
  misc_RNA (1)...(19): siRNA sense strand
caguggagacagauuuaga

SEQ ID NO: 1396372 - RNA, 19 nt, Homo sapiens
  misc_RNA (1)...(19): siRNA sense strand
caagggccaggcaguaaca

SEQ ID NO: 1396373 - RNA, 19 nt, Homo sapiens
  misc_RNA (1)...(19): siRNA sense strand
gcaagggccaggcaguaac

SEQ ID NO: 1396374 - RNA, 19 nt, Homo sapiens
  misc_RNA (1)...(19): siRNA sense strand
caccgagaaugugcacaga

SEQ ID NO: 1396375 - RNA, 19 nt, Homo sapiens
  misc_RNA (1)...(19): siRNA sense strand
ggagacagauuuagauaua

SEQ ID NO: 1396376 - RNA, 19 nt, Homo sapiens
  misc_RNA (1)...(19): siRNA sense strand
gaacugcucuggacauaug

SEQ ID NO: 1396377 - RNA, 19 nt, Homo sapiens
  misc_RNA (1)...(19): siRNA sense strand
ggacacagcaucuuugauu

SEQ ID NO: 1396378 - RNA, 19 nt, Homo sapiens
  misc_RNA (1)...(19): siRNA sense strand
ggacaaggccucuaucaug

SEQ ID NO: 1396379 - RNA, 19 nt, Homo sapiens
  misc_RNA (1)...(19): siRNA sense strand
gcaagagcauccacaccuu

SEQ ID NO: 1396380 - RNA, 19 nt, Homo sapiens
  misc_RNA (1)...(19): siRNA sense strand
gacacagcaucuuugauuu

SEQ ID NO: 1396381 - RNA, 19 nt, Homo sapiens
  misc_RNA (1)...(19): siRNA sense strand
cgacaggauugcagaagug

SEQ ID NO: 1396382 - RNA, 19 nt, Homo sapiens
  misc_RNA (1)...(19): siRNA sense strand
agaaguggcuggcuauagu

SEQ ID NO: 1396383 - RNA, 19 nt, Homo sapiens
  misc_RNA (1)...(19): siRNA sense strand
gagcaagggccaggcagua

SEQ ID NO: 1396384 - RNA, 19 nt, Homo sapiens
  misc_RNA (1)...(19): siRNA sense strand
cagcaucuuugauuucauc

SEQ ID NO: 1396385 - RNA, 19 nt, Homo sapiens
  misc_RNA (1)...(19): siRNA sense strand
gagacagauuuagauauag

SEQ ID NO: 1396386 - RNA, 19 nt, Homo sapiens
  misc_RNA (1)...(19): siRNA sense strand
gccacagccuggacaugaa

SEQ ID NO: 1396387 - RNA, 19 nt, Homo sapiens
  misc_RNA (1)...(19): siRNA sense strand
guggagacagauuuagaua

SEQ ID NO: 1396388 - RNA, 19 nt, Homo sapiens
  misc_RNA (1)...(19): siRNA sense strand
ggcaguggagacagauuua

SEQ ID NO: 1396389 - RNA, 19 nt, Homo sapiens
  misc_RNA (1)...(19): siRNA sense strand
cacagcaucuuugauuuca

SEQ ID NO: 1396390 - RNA, 19 nt, Homo sapiens
  misc_RNA (1)...(19): siRNA sense strand
gcagaaguggcuggcuaua

SEQ ID NO: 1396391 - RNA, 19 nt, Homo sapiens
  misc_RNA (1)...(19): siRNA sense strand
ccuggaaggugcugaacug

SEQ ID NO: 1396392 - RNA, 19 nt, Homo sapiens
  misc_RNA (1)...(19): siRNA sense strand
cugaacugcucuggacaua

SEQ ID NO: 1396393 - RNA, 19 nt, Homo sapiens
  misc_RNA (1)...(19): siRNA sense strand
cggagaguaucgucugugu

SEQ ID NO: 1396394 - RNA, 19 nt, Homo sapiens
  misc_RNA (1)...(19): siRNA sense strand
gaaugugcacagacucuuc

SEQ ID NO: 1396395 - RNA, 19 nt, Homo sapiens
  misc_RNA (1)...(19): siRNA sense strand
agaccgaggugcuguacca

SEQ ID NO: 1396396 - RNA, 19 nt, Homo sapiens
  misc_RNA (1)...(19): siRNA sense strand
gcuguuccgccuacgagua

SEQ ID NO: 1396397 - RNA, 19 nt, Homo sapiens
  misc_RNA (1)...(19): siRNA sense strand
ggacauaugagggccuaca

SEQ ID NO: 1396398 - RNA, 19 nt, Homo sapiens
  misc_RNA (1)...(19): siRNA sense strand
ggauggggcuucaguagca

SEQ ID NO: 1396399 - RNA, 19 nt, Homo sapiens
  misc_RNA (1)...(19): siRNA sense strand
gcaguaacagggcaguauc

SEQ ID NO: 1396400 - RNA, 19 nt, Homo sapiens
  misc_RNA (1)...(19): siRNA sense strand
acacagcaucuuugauuuc

SEQ ID NO: 1396401 - RNA, 19 nt, Homo sapiens
  misc_RNA (1)...(19): siRNA sense strand
gagaaugugcacagacucu

SEQ ID NO: 1396402 - RNA, 19 nt, Homo sapiens
  misc_RNA (1)...(19): siRNA sense strand
uaucgucuguguccauuuu

SEQ ID NO: 1396403 - RNA, 19 nt, Homo sapiens
  misc_RNA (1)...(19): siRNA sense strand
agacagauuuagauauagc

SEQ ID NO: 1396404 - RNA, 19 nt, Homo sapiens
  misc_RNA (1)...(19): siRNA sense strand
ccgagaaugugcacagacu

SEQ ID NO: 1396405 - RNA, 19 nt, Homo sapiens
  misc_RNA (1)...(19): siRNA sense strand
gaaguggcuggcuauaguc

SEQ ID NO: 1396406 - RNA, 19 nt, Homo sapiens
  misc_RNA (1)...(19): siRNA sense strand
cauuggacacagcaucuuu

SEQ ID NO: 1396407 - RNA, 19 nt, Homo sapiens
  misc_RNA (1)...(19): siRNA sense strand
cgccacagccuggacauga

SEQ ID NO: 1396408 - RNA, 19 nt, Homo sapiens
  misc_RNA (1)...(19): siRNA sense strand
cugaggcaguggagacaga

SEQ ID NO: 1396409 - RNA, 19 nt, Homo sapiens
  misc_RNA (1)...(19): siRNA sense strand
ggcaguaacagggcaguau

SEQ ID NO: 1396410 - RNA, 19 nt, Homo sapiens
  misc_RNA (1)...(19): siRNA sense strand
gacauaugagggccuacaa

SEQ ID NO: 1396411 - RNA, 19 nt, Homo sapiens
  misc_RNA (1)...(19): siRNA sense strand
caguggagacagauuuaga

SEQ ID NO: 1396412 - RNA, 19 nt, Homo sapiens
  misc_RNA (1)...(19): siRNA sense strand
caagggccaggcaguaaca

SEQ ID NO: 1396413 - RNA, 19 nt, Homo sapiens
  misc_RNA (1)...(19): siRNA sense strand
gcaagggccaggcaguaac

SEQ ID NO: 1396414 - RNA, 19 nt, Homo sapiens
  misc_RNA (1)...(19): siRNA sense strand
caccgagaaugugcacaga

SEQ ID NO: 1396415 - RNA, 19 nt, Homo sapiens
  misc_RNA (1)...(19): siRNA sense strand
cagaagcacuuugagaaga

SEQ ID NO: 1396416 - RNA, 19 nt, Homo sapiens
  misc_RNA (1)...(19): siRNA sense strand
guacaucggcuuccuuugu

SEQ ID NO: 1396417 - RNA, 19 nt, Homo sapiens
  misc_RNA (1)...(19): siRNA sense strand
cggaaaccguucuguguga

SEQ ID NO: 1396418 - RNA, 19 nt, Homo sapiens
  misc_RNA (1)...(19): siRNA sense strand
gcucaaguuugcccggaaa

SEQ ID NO: 1396419 - RNA, 19 nt, Homo sapiens
  misc_RNA (1)...(19): siRNA sense strand
accgcaagcugcagaauuu

SEQ ID NO: 1396420 - RNA, 19 nt, Homo sapiens
  misc_RNA (1)...(19): siRNA sense strand
ggcagaagcacuuugagaa

SEQ ID NO: 1396421 - RNA, 19 nt, Homo sapiens
  misc_RNA (1)...(19): siRNA sense strand
caacgucuuugccacaucu

SEQ ID NO: 1396422 - RNA, 19 nt, Homo sapiens
  misc_RNA (1)...(19): siRNA sense strand
ggaagcugcugggcucugu

SEQ ID NO: 1396423 - RNA, 19 nt, Homo sapiens
  misc_RNA (1)...(19): siRNA sense strand
gcagaagcacuuugagaag

SEQ ID NO: 1396424 - RNA, 19 nt, Homo sapiens
  misc_RNA (1)...(19): siRNA sense strand
ggucuggguuugcccugaa

SEQ ID NO: 1396425 - RNA, 19 nt, Homo sapiens
  misc_RNA (1)...(19): siRNA sense strand
gaaaccguucugugugauu

SEQ ID NO: 1396426 - RNA, 19 nt, Homo sapiens
  misc_RNA (1)...(19): siRNA sense strand
gcugggcucuguggucuau

SEQ ID NO: 1396427 - RNA, 19 nt, Homo sapiens
  misc_RNA (1)...(19): siRNA sense strand
gggagaacgaccacuuuga

SEQ ID NO: 1396428 - RNA, 19 nt, Homo sapiens
  misc_RNA (1)...(19): siRNA sense strand
ggaaaccguucugugugau

SEQ ID NO: 1396429 - RNA, 19 nt, Homo sapiens
  misc_RNA (1)...(19): siRNA sense strand
gcacaggcagaagcacuuu

SEQ ID NO: 1396430 - RNA, 19 nt, Homo sapiens
  misc_RNA (1)...(19): siRNA sense strand
aaaccguucugugugauug

SEQ ID NO: 1396431 - RNA, 19 nt, Homo sapiens
  misc_RNA (1)...(19): siRNA sense strand
ccacguggcaguacuacga

SEQ ID NO: 1396432 - RNA, 19 nt, Homo sapiens
  misc_RNA (1)...(19): siRNA sense strand
ggagaacgaccacuuugac

SEQ ID NO: 1396433 - RNA, 19 nt, Homo sapiens
  misc_RNA (1)...(19): siRNA sense strand
ccucguuccugguguacuu

SEQ ID NO: 1396434 - RNA, 19 nt, Homo sapiens
  misc_RNA (1)...(19): siRNA sense strand
gagaacgaccacuuugaca

SEQ ID NO: 1396435 - RNA, 19 nt, Homo sapiens
  misc_RNA (1)...(19): siRNA sense strand
agaauuuccucuacaacgu

SEQ ID NO: 1396436 - RNA, 19 nt, Homo sapiens
  misc_RNA (1)...(19): siRNA sense strand
gggagaagaagcugaaggu

SEQ ID NO: 1396437 - RNA, 19 nt, Homo sapiens
  misc_RNA (1)...(19): siRNA sense strand
caucaaggaguaugagaag

SEQ ID NO: 1396438 - RNA, 19 nt, Homo sapiens
  misc_RNA (1)...(19): siRNA sense strand
ugcagaauuuccucuacaa

SEQ ID NO: 1396439 - RNA, 19 nt, Homo sapiens
  misc_RNA (1)...(19): siRNA sense strand
ugacuaucgugguguuugg

SEQ ID NO: 1396440 - RNA, 19 nt, Homo sapiens
  misc_RNA (1)...(19): siRNA sense strand
agaagcacuuugagaagag

SEQ ID NO: 1396441 - RNA, 19 nt, Homo sapiens
  misc_RNA (1)...(19): siRNA sense strand
gugcucaucgccuccauug

SEQ ID NO: 1396442 - RNA, 19 nt, Homo sapiens
  misc_RNA (1)...(19): siRNA sense strand
gcugcagaauuuccucuac

SEQ ID NO: 1396443 - RNA, 19 nt, Homo sapiens
  misc_RNA (1)...(19): siRNA sense strand
uacaucggcuuccuuuguc

SEQ ID NO: 1396444 - RNA, 19 nt, Homo sapiens
  misc_RNA (1)...(19): siRNA sense strand
uuuccaccaucaaggagua

SEQ ID NO: 1396445 - RNA, 19 nt, Homo sapiens
  misc_RNA (1)...(19): siRNA sense strand
gcugggcguucaucuacca

SEQ ID NO: 1396446 - RNA, 19 nt, Homo sapiens
  misc_RNA (1)...(19): siRNA sense strand
ucaaggaguaugagaagag

SEQ ID NO: 1396447 - RNA, 19 nt, Homo sapiens
  misc_RNA (1)...(19): siRNA sense strand
cugcagaauuuccucuaca

SEQ ID NO: 1396448 - RNA, 19 nt, Homo sapiens
  misc_RNA (1)...(19): siRNA sense strand
ccaucaaggaguaugagaa

SEQ ID NO: 1396449 - RNA, 19 nt, Homo sapiens
  misc_RNA (1)...(19): siRNA sense strand
acaggcagaagcacuuuga

SEQ ID NO: 1396450 - RNA, 19 nt, Homo sapiens
  misc_RNA (1)...(19): siRNA sense strand
ugaucacgcugaccaccau

SEQ ID NO: 1396451 - RNA, 19 nt, Homo sapiens
  misc_RNA (1)...(19): siRNA sense strand
ccaccaucaaggaguauga

SEQ ID NO: 1396452 - RNA, 19 nt, Homo sapiens
  misc_RNA (1)...(19): siRNA sense strand
gcggcagcauccucagcaa

SEQ ID NO: 1396453 - RNA, 19 nt, Homo sapiens
  misc_RNA (1)...(19): siRNA sense strand
cagaagcacuuugagaaga

SEQ ID NO: 1396454 - RNA, 19 nt, Homo sapiens
  misc_RNA (1)...(19): siRNA sense strand
guacaucggcuuccuuugu

SEQ ID NO: 1396455 - RNA, 19 nt, Homo sapiens
  misc_RNA (1)...(19): siRNA sense strand
cggaaaccguucuguguga

SEQ ID NO: 1396456 - RNA, 19 nt, Homo sapiens
  misc_RNA (1)...(19): siRNA sense strand
gcucaaguuugcccggaaa

SEQ ID NO: 1396457 - RNA, 19 nt, Homo sapiens
  misc_RNA (1)...(19): siRNA sense strand
accgcaagcugcagaauuu

SEQ ID NO: 1396458 - RNA, 19 nt, Homo sapiens
  misc_RNA (1)...(19): siRNA sense strand
ggcagaagcacuuugagaa

SEQ ID NO: 1396459 - RNA, 19 nt, Homo sapiens
  misc_RNA (1)...(19): siRNA sense strand
caacgucuuugccacaucu

SEQ ID NO: 1396460 - RNA, 19 nt, Homo sapiens
  misc_RNA (1)...(19): siRNA sense strand
ggaagcugcugggcucugu

SEQ ID NO: 1396461 - RNA, 19 nt, Homo sapiens
  misc_RNA (1)...(19): siRNA sense strand
gcagaagcacuuugagaag

SEQ ID NO: 1396462 - RNA, 19 nt, Homo sapiens
  misc_RNA (1)...(19): siRNA sense strand
ggucuggguuugcccugaa

SEQ ID NO: 1396463 - RNA, 19 nt, Homo sapiens
  misc_RNA (1)...(19): siRNA sense strand
gaaaccguucugugugauu

SEQ ID NO: 1396464 - RNA, 19 nt, Homo sapiens
  misc_RNA (1)...(19): siRNA sense strand
gcugggcucuguggucuau

SEQ ID NO: 1396465 - RNA, 19 nt, Homo sapiens
  misc_RNA (1)...(19): siRNA sense strand
gggagaacgaccacuuuga

SEQ ID NO: 1396466 - RNA, 19 nt, Homo sapiens
  misc_RNA (1)...(19): siRNA sense strand
ggaaaccguucugugugau

SEQ ID NO: 1396467 - RNA, 19 nt, Homo sapiens
  misc_RNA (1)...(19): siRNA sense strand
gcacaggcagaagcacuuu

SEQ ID NO: 1396468 - RNA, 19 nt, Homo sapiens
  misc_RNA (1)...(19): siRNA sense strand
aaaccguucugugugauug

SEQ ID NO: 1396469 - RNA, 19 nt, Homo sapiens
  misc_RNA (1)...(19): siRNA sense strand
ccacguggcaguacuacga

SEQ ID NO: 1396470 - RNA, 19 nt, Homo sapiens
  misc_RNA (1)...(19): siRNA sense strand
ggagaacgaccacuuugac

SEQ ID NO: 1396471 - RNA, 19 nt, Homo sapiens
  misc_RNA (1)...(19): siRNA sense strand
ccucguuccugguguacuu

SEQ ID NO: 1396472 - RNA, 19 nt, Homo sapiens
  misc_RNA (1)...(19): siRNA sense strand
gagaacgaccacuuugaca

SEQ ID NO: 1396473 - RNA, 19 nt, Homo sapiens
  misc_RNA (1)...(19): siRNA sense strand
agaauuuccucuacaacgu

SEQ ID NO: 1396474 - RNA, 19 nt, Homo sapiens
  misc_RNA (1)...(19): siRNA sense strand
gggagaagaagcugaaggu

SEQ ID NO: 1396475 - RNA, 19 nt, Homo sapiens
  misc_RNA (1)...(19): siRNA sense strand
caucaaggaguaugagaag

SEQ ID NO: 1396476 - RNA, 19 nt, Homo sapiens
  misc_RNA (1)...(19): siRNA sense strand
ugcagaauuuccucuacaa

SEQ ID NO: 1396477 - RNA, 19 nt, Homo sapiens
  misc_RNA (1)...(19): siRNA sense strand
ugacuaucgugguguuugg

SEQ ID NO: 1396478 - RNA, 19 nt, Homo sapiens
  misc_RNA (1)...(19): siRNA sense strand
agaagcacuuugagaagag

SEQ ID NO: 1396479 - RNA, 19 nt, Homo sapiens
  misc_RNA (1)...(19): siRNA sense strand
gugcucaucgccuccauug

SEQ ID NO: 1396480 - RNA, 19 nt, Homo sapiens
  misc_RNA (1)...(19): siRNA sense strand
gcugcagaauuuccucuac

SEQ ID NO: 1396481 - RNA, 19 nt, Homo sapiens
  misc_RNA (1)...(19): siRNA sense strand
uacaucggcuuccuuuguc

SEQ ID NO: 1396482 - RNA, 19 nt, Homo sapiens
  misc_RNA (1)...(19): siRNA sense strand
uuuccaccaucaaggagua

SEQ ID NO: 1396483 - RNA, 19 nt, Homo sapiens
  misc_RNA (1)...(19): siRNA sense strand
gcugggcguucaucuacca

SEQ ID NO: 1396484 - RNA, 19 nt, Homo sapiens
  misc_RNA (1)...(19): siRNA sense strand
ucaaggaguaugagaagag

SEQ ID NO: 1396485 - RNA, 19 nt, Homo sapiens
  misc_RNA (1)...(19): siRNA sense strand
cugcagaauuuccucuaca

SEQ ID NO: 1396486 - RNA, 19 nt, Homo sapiens
  misc_RNA (1)...(19): siRNA sense strand
ccaucaaggaguaugagaa

SEQ ID NO: 1396487 - RNA, 19 nt, Homo sapiens
  misc_RNA (1)...(19): siRNA sense strand
acaggcagaagcacuuuga

SEQ ID NO: 1396488 - RNA, 19 nt, Homo sapiens
  misc_RNA (1)...(19): siRNA sense strand
ugaucacgcugaccaccau

SEQ ID NO: 1396489 - RNA, 19 nt, Homo sapiens
  misc_RNA (1)...(19): siRNA sense strand
ccaccaucaaggaguauga

SEQ ID NO: 1396490 - RNA, 19 nt, Homo sapiens
  misc_RNA (1)...(19): siRNA sense strand
gcggcagcauccucagcaa

SEQ ID NO: 1396491 - RNA, 19 nt, Homo sapiens
  misc_RNA (1)...(19): siRNA sense strand
cagaagcacuuugagaaga

SEQ ID NO: 1396492 - RNA, 19 nt, Homo sapiens
  misc_RNA (1)...(19): siRNA sense strand
guacaucggcuuccuuugu

SEQ ID NO: 1396493 - RNA, 19 nt, Homo sapiens
  misc_RNA (1)...(19): siRNA sense strand
cggaaaccguucuguguga

SEQ ID NO: 1396494 - RNA, 19 nt, Homo sapiens
  misc_RNA (1)...(19): siRNA sense strand
gcucaaguuugcccggaaa

SEQ ID NO: 1396495 - RNA, 19 nt, Homo sapiens
  misc_RNA (1)...(19): siRNA sense strand
accgcaagcugcagaauuu

SEQ ID NO: 1396496 - RNA, 19 nt, Homo sapiens
  misc_RNA (1)...(19): siRNA sense strand
ggcagaagcacuuugagaa

SEQ ID NO: 1396497 - RNA, 19 nt, Homo sapiens
  misc_RNA (1)...(19): siRNA sense strand
caacgucuuugccacaucu

SEQ ID NO: 1396498 - RNA, 19 nt, Homo sapiens
  misc_RNA (1)...(19): siRNA sense strand
ggaagcugcugggcucugu

SEQ ID NO: 1396499 - RNA, 19 nt, Homo sapiens
  misc_RNA (1)...(19): siRNA sense strand
gcagaagcacuuugagaag

SEQ ID NO: 1396500 - RNA, 19 nt, Homo sapiens
  misc_RNA (1)...(19): siRNA sense strand
ggucuggguuugcccugaa

SEQ ID NO: 1396501 - RNA, 19 nt, Homo sapiens
  misc_RNA (1)...(19): siRNA sense strand
gaaaccguucugugugauu

SEQ ID NO: 1396502 - RNA, 19 nt, Homo sapiens
  misc_RNA (1)...(19): siRNA sense strand
gcugggcucuguggucuau

SEQ ID NO: 1396503 - RNA, 19 nt, Homo sapiens
  misc_RNA (1)...(19): siRNA sense strand
gggagaacgaccacuuuga

SEQ ID NO: 1396504 - RNA, 19 nt, Homo sapiens
  misc_RNA (1)...(19): siRNA sense strand
ggaaaccguucugugugau

SEQ ID NO: 1396505 - RNA, 19 nt, Homo sapiens
  misc_RNA (1)...(19): siRNA sense strand
gcacaggcagaagcacuuu

SEQ ID NO: 1396506 - RNA, 19 nt, Homo sapiens
  misc_RNA (1)...(19): siRNA sense strand
aaaccguucugugugauug

SEQ ID NO: 1396507 - RNA, 19 nt, Homo sapiens
  misc_RNA (1)...(19): siRNA sense strand
ccacguggcaguacuacga

SEQ ID NO: 1396508 - RNA, 19 nt, Homo sapiens
  misc_RNA (1)...(19): siRNA sense strand
ggagaacgaccacuuugac

SEQ ID NO: 1396509 - RNA, 19 nt, Homo sapiens
  misc_RNA (1)...(19): siRNA sense strand
ccucguuccugguguacuu

SEQ ID NO: 1396510 - RNA, 19 nt, Homo sapiens
  misc_RNA (1)...(19): siRNA sense strand
gagaacgaccacuuugaca

SEQ ID NO: 1396511 - RNA, 19 nt, Homo sapiens
  misc_RNA (1)...(19): siRNA sense strand
agaauuuccucuacaacgu

SEQ ID NO: 1396512 - RNA, 19 nt, Homo sapiens
  misc_RNA (1)...(19): siRNA sense strand
gggagaagaagcugaaggu

SEQ ID NO: 1396513 - RNA, 19 nt, Homo sapiens
  misc_RNA (1)...(19): siRNA sense strand
caucaaggaguaugagaag

SEQ ID NO: 1396514 - RNA, 19 nt, Homo sapiens
  misc_RNA (1)...(19): siRNA sense strand
ugcagaauuuccucuacaa

SEQ ID NO: 1396515 - RNA, 19 nt, Homo sapiens
  misc_RNA (1)...(19): siRNA sense strand
ugacuaucgugguguuugg

SEQ ID NO: 1396516 - RNA, 19 nt, Homo sapiens
  misc_RNA (1)...(19): siRNA sense strand
agaagcacuuugagaagag

SEQ ID NO: 1396517 - RNA, 19 nt, Homo sapiens
  misc_RNA (1)...(19): siRNA sense strand
gugcucaucgccuccauug

SEQ ID NO: 1396518 - RNA, 19 nt, Homo sapiens
  misc_RNA (1)...(19): siRNA sense strand
gcugcagaauuuccucuac

SEQ ID NO: 1396519 - RNA, 19 nt, Homo sapiens
  misc_RNA (1)...(19): siRNA sense strand
uacaucggcuuccuuuguc

SEQ ID NO: 1396520 - RNA, 19 nt, Homo sapiens
  misc_RNA (1)...(19): siRNA sense strand
uuuccaccaucaaggagua

SEQ ID NO: 1396521 - RNA, 19 nt, Homo sapiens
  misc_RNA (1)...(19): siRNA sense strand
gcugggcguucaucuacca

SEQ ID NO: 1396522 - RNA, 19 nt, Homo sapiens
  misc_RNA (1)...(19): siRNA sense strand
ucaaggaguaugagaagag

SEQ ID NO: 1396523 - RNA, 19 nt, Homo sapiens
  misc_RNA (1)...(19): siRNA sense strand
cugcagaauuuccucuaca

SEQ ID NO: 1396524 - RNA, 19 nt, Homo sapiens
  misc_RNA (1)...(19): siRNA sense strand
ccaucaaggaguaugagaa

SEQ ID NO: 1396525 - RNA, 19 nt, Homo sapiens
  misc_RNA (1)...(19): siRNA sense strand
acaggcagaagcacuuuga

SEQ ID NO: 1396526 - RNA, 19 nt, Homo sapiens
  misc_RNA (1)...(19): siRNA sense strand
ugaucacgcugaccaccau

SEQ ID NO: 1396527 - RNA, 19 nt, Homo sapiens
  misc_RNA (1)...(19): siRNA sense strand
ccaccaucaaggaguauga

SEQ ID NO: 1396528 - RNA, 19 nt, Homo sapiens
  misc_RNA (1)...(19): siRNA sense strand
gcggcagcauccucagcaa

SEQ ID NO: 1396529 - RNA, 19 nt, Homo sapiens
  misc_RNA (1)...(19): siRNA sense strand
cagaagcacuuugagaaga

SEQ ID NO: 1396530 - RNA, 19 nt, Homo sapiens
  misc_RNA (1)...(19): siRNA sense strand
guacaucggcuuccuuugu

SEQ ID NO: 1396531 - RNA, 19 nt, Homo sapiens
  misc_RNA (1)...(19): siRNA sense strand
cggaaaccguucuguguga

SEQ ID NO: 1396532 - RNA, 19 nt, Homo sapiens
  misc_RNA (1)...(19): siRNA sense strand
gcucaaguuugcccggaaa

SEQ ID NO: 1396533 - RNA, 19 nt, Homo sapiens
  misc_RNA (1)...(19): siRNA sense strand
accgcaagcugcagaauuu

SEQ ID NO: 1396534 - RNA, 19 nt, Homo sapiens
  misc_RNA (1)...(19): siRNA sense strand
ggcagaagcacuuugagaa

SEQ ID NO: 1396535 - RNA, 19 nt, Homo sapiens
  misc_RNA (1)...(19): siRNA sense strand
caacgucuuugccacaucu

SEQ ID NO: 1396536 - RNA, 19 nt, Homo sapiens
  misc_RNA (1)...(19): siRNA sense strand
ggaagcugcugggcucugu

SEQ ID NO: 1396537 - RNA, 19 nt, Homo sapiens
  misc_RNA (1)...(19): siRNA sense strand
gcagaagcacuuugagaag

SEQ ID NO: 1396538 - RNA, 19 nt, Homo sapiens
  misc_RNA (1)...(19): siRNA sense strand
ggucuggguuugcccugaa

SEQ ID NO: 1396539 - RNA, 19 nt, Homo sapiens
  misc_RNA (1)...(19): siRNA sense strand
gaaaccguucugugugauu

SEQ ID NO: 1396540 - RNA, 19 nt, Homo sapiens
  misc_RNA (1)...(19): siRNA sense strand
gcugggcucuguggucuau

SEQ ID NO: 1396541 - RNA, 19 nt, Homo sapiens
  misc_RNA (1)...(19): siRNA sense strand
gggagaacgaccacuuuga

SEQ ID NO: 1396542 - RNA, 19 nt, Homo sapiens
  misc_RNA (1)...(19): siRNA sense strand
ggaaaccguucugugugau

SEQ ID NO: 1396543 - RNA, 19 nt, Homo sapiens
  misc_RNA (1)...(19): siRNA sense strand
gcacaggcagaagcacuuu

SEQ ID NO: 1396544 - RNA, 19 nt, Homo sapiens
  misc_RNA (1)...(19): siRNA sense strand
aaaccguucugugugauug

SEQ ID NO: 1396545 - RNA, 19 nt, Homo sapiens
  misc_RNA (1)...(19): siRNA sense strand
ccacguggcaguacuacga

SEQ ID NO: 1396546 - RNA, 19 nt, Homo sapiens
  misc_RNA (1)...(19): siRNA sense strand
ggagaacgaccacuuugac

SEQ ID NO: 1396547 - RNA, 19 nt, Homo sapiens
  misc_RNA (1)...(19): siRNA sense strand
ccucguuccugguguacuu

SEQ ID NO: 1396548 - RNA, 19 nt, Homo sapiens
  misc_RNA (1)...(19): siRNA sense strand
gagaacgaccacuuugaca

SEQ ID NO: 1396549 - RNA, 19 nt, Homo sapiens
  misc_RNA (1)...(19): siRNA sense strand
agaauuuccucuacaacgu

SEQ ID NO: 1396550 - RNA, 19 nt, Homo sapiens
  misc_RNA (1)...(19): siRNA sense strand
gggagaagaagcugaaggu

SEQ ID NO: 1396551 - RNA, 19 nt, Homo sapiens
  misc_RNA (1)...(19): siRNA sense strand
caucaaggaguaugagaag

SEQ ID NO: 1396552 - RNA, 19 nt, Homo sapiens
  misc_RNA (1)...(19): siRNA sense strand
ugcagaauuuccucuacaa

SEQ ID NO: 1396553 - RNA, 19 nt, Homo sapiens
  misc_RNA (1)...(19): siRNA sense strand
ugacuaucgugguguuugg

SEQ ID NO: 1396554 - RNA, 19 nt, Homo sapiens
  misc_RNA (1)...(19): siRNA sense strand
agaagcacuuugagaagag

SEQ ID NO: 1396555 - RNA, 19 nt, Homo sapiens
  misc_RNA (1)...(19): siRNA sense strand
gugcucaucgccuccauug

SEQ ID NO: 1396556 - RNA, 19 nt, Homo sapiens
  misc_RNA (1)...(19): siRNA sense strand
gcugcagaauuuccucuac

SEQ ID NO: 1396557 - RNA, 19 nt, Homo sapiens
  misc_RNA (1)...(19): siRNA sense strand
uacaucggcuuccuuuguc

SEQ ID NO: 1396558 - RNA, 19 nt, Homo sapiens
  misc_RNA (1)...(19): siRNA sense strand
uuuccaccaucaaggagua

SEQ ID NO: 1396559 - RNA, 19 nt, Homo sapiens
  misc_RNA (1)...(19): siRNA sense strand
gcugggcguucaucuacca

SEQ ID NO: 1396560 - RNA, 19 nt, Homo sapiens
  misc_RNA (1)...(19): siRNA sense strand
ucaaggaguaugagaagag

SEQ ID NO: 1396561 - RNA, 19 nt, Homo sapiens
  misc_RNA (1)...(19): siRNA sense strand
cugcagaauuuccucuaca

SEQ ID NO: 1396562 - RNA, 19 nt, Homo sapiens
  misc_RNA (1)...(19): siRNA sense strand
ccaucaaggaguaugagaa

SEQ ID NO: 1396563 - RNA, 19 nt, Homo sapiens
  misc_RNA (1)...(19): siRNA sense strand
acaggcagaagcacuuuga

SEQ ID NO: 1396564 - RNA, 19 nt, Homo sapiens
  misc_RNA (1)...(19): siRNA sense strand
ugaucacgcugaccaccau

SEQ ID NO: 1396565 - RNA, 19 nt, Homo sapiens
  misc_RNA (1)...(19): siRNA sense strand
ccaccaucaaggaguauga

SEQ ID NO: 1396566 - RNA, 19 nt, Homo sapiens
  misc_RNA (1)...(19): siRNA sense strand
gcggcagcauccucagcaa

SEQ ID NO: 1396567 - RNA, 19 nt, Homo sapiens
  misc_RNA (1)...(19): siRNA sense strand
cagaagcacuuugagaaga

SEQ ID NO: 1396568 - RNA, 19 nt, Homo sapiens
  misc_RNA (1)...(19): siRNA sense strand
guacaucggcuuccuuugu

SEQ ID NO: 1396569 - RNA, 19 nt, Homo sapiens
  misc_RNA (1)...(19): siRNA sense strand
cggaaaccguucuguguga

SEQ ID NO: 1396570 - RNA, 19 nt, Homo sapiens
  misc_RNA (1)...(19): siRNA sense strand
gcucaaguuugcccggaaa

SEQ ID NO: 1396571 - RNA, 19 nt, Homo sapiens
  misc_RNA (1)...(19): siRNA sense strand
accgcaagcugcagaauuu

SEQ ID NO: 1396572 - RNA, 19 nt, Homo sapiens
  misc_RNA (1)...(19): siRNA sense strand
ggcagaagcacuuugagaa

SEQ ID NO: 1396573 - RNA, 19 nt, Homo sapiens
  misc_RNA (1)...(19): siRNA sense strand
caacgucuuugccacaucu

SEQ ID NO: 1396574 - RNA, 19 nt, Homo sapiens
  misc_RNA (1)...(19): siRNA sense strand
ggaagcugcugggcucugu

SEQ ID NO: 1396575 - RNA, 19 nt, Homo sapiens
  misc_RNA (1)...(19): siRNA sense strand
gcagaagcacuuugagaag

SEQ ID NO: 1396576 - RNA, 19 nt, Homo sapiens
  misc_RNA (1)...(19): siRNA sense strand
ggucuggguuugcccugaa

SEQ ID NO: 1396577 - RNA, 19 nt, Homo sapiens
  misc_RNA (1)...(19): siRNA sense strand
gaaaccguucugugugauu

SEQ ID NO: 1396578 - RNA, 19 nt, Homo sapiens
  misc_RNA (1)...(19): siRNA sense strand
gcugggcucuguggucuau

SEQ ID NO: 1396579 - RNA, 19 nt, Homo sapiens
  misc_RNA (1)...(19): siRNA sense strand
gggagaacgaccacuuuga

SEQ ID NO: 1396580 - RNA, 19 nt, Homo sapiens
  misc_RNA (1)...(19): siRNA sense strand
ggaaaccguucugugugau

SEQ ID NO: 1396581 - RNA, 19 nt, Homo sapiens
  misc_RNA (1)...(19): siRNA sense strand
gcacaggcagaagcacuuu

SEQ ID NO: 1396582 - RNA, 19 nt, Homo sapiens
  misc_RNA (1)...(19): siRNA sense strand
aaaccguucugugugauug

SEQ ID NO: 1396583 - RNA, 19 nt, Homo sapiens
  misc_RNA (1)...(19): siRNA sense strand
ccacguggcaguacuacga

SEQ ID NO: 1396584 - RNA, 19 nt, Homo sapiens
  misc_RNA (1)...(19): siRNA sense strand
ggagaacgaccacuuugac

SEQ ID NO: 1396585 - RNA, 19 nt, Homo sapiens
  misc_RNA (1)...(19): siRNA sense strand
ccucguuccugguguacuu

SEQ ID NO: 1396586 - RNA, 19 nt, Homo sapiens
  misc_RNA (1)...(19): siRNA sense strand
gagaacgaccacuuugaca

SEQ ID NO: 1396587 - RNA, 19 nt, Homo sapiens
  misc_RNA (1)...(19): siRNA sense strand
agaauuuccucuacaacgu

SEQ ID NO: 1396588 - RNA, 19 nt, Homo sapiens
  misc_RNA (1)...(19): siRNA sense strand
gggagaagaagcugaaggu

SEQ ID NO: 1396589 - RNA, 19 nt, Homo sapiens
  misc_RNA (1)...(19): siRNA sense strand
caucaaggaguaugagaag

SEQ ID NO: 1396590 - RNA, 19 nt, Homo sapiens
  misc_RNA (1)...(19): siRNA sense strand
ugcagaauuuccucuacaa

SEQ ID NO: 1396591 - RNA, 19 nt, Homo sapiens
  misc_RNA (1)...(19): siRNA sense strand
ugacuaucgugguguuugg

SEQ ID NO: 1396592 - RNA, 19 nt, Homo sapiens
  misc_RNA (1)...(19): siRNA sense strand
agaagcacuuugagaagag

SEQ ID NO: 1396593 - RNA, 19 nt, Homo sapiens
  misc_RNA (1)...(19): siRNA sense strand
gugcucaucgccuccauug

SEQ ID NO: 1396594 - RNA, 19 nt, Homo sapiens
  misc_RNA (1)...(19): siRNA sense strand
gcugcagaauuuccucuac

SEQ ID NO: 1396595 - RNA, 19 nt, Homo sapiens
  misc_RNA (1)...(19): siRNA sense strand
uacaucggcuuccuuuguc

SEQ ID NO: 1396596 - RNA, 19 nt, Homo sapiens
  misc_RNA (1)...(19): siRNA sense strand
uuuccaccaucaaggagua

SEQ ID NO: 1396597 - RNA, 19 nt, Homo sapiens
  misc_RNA (1)...(19): siRNA sense strand
gcugggcguucaucuacca

SEQ ID NO: 1396598 - RNA, 19 nt, Homo sapiens
  misc_RNA (1)...(19): siRNA sense strand
ucaaggaguaugagaagag

SEQ ID NO: 1396599 - RNA, 19 nt, Homo sapiens
  misc_RNA (1)...(19): siRNA sense strand
cugcagaauuuccucuaca

SEQ ID NO: 1396600 - RNA, 19 nt, Homo sapiens
  misc_RNA (1)...(19): siRNA sense strand
ccaucaaggaguaugagaa

SEQ ID NO: 1396601 - RNA, 19 nt, Homo sapiens
  misc_RNA (1)...(19): siRNA sense strand
acaggcagaagcacuuuga

SEQ ID NO: 1396602 - RNA, 19 nt, Homo sapiens
  misc_RNA (1)...(19): siRNA sense strand
ugaucacgcugaccaccau

SEQ ID NO: 1396603 - RNA, 19 nt, Homo sapiens
  misc_RNA (1)...(19): siRNA sense strand
ccaccaucaaggaguauga

SEQ ID NO: 1396604 - RNA, 19 nt, Homo sapiens
  misc_RNA (1)...(19): siRNA sense strand
gcggcagcauccucagcaa

SEQ ID NO: 1396605 - RNA, 19 nt, Homo sapiens
  misc_RNA (1)...(19): siRNA sense strand
cagaagcacuuugagaaga

SEQ ID NO: 1396606 - RNA, 19 nt, Homo sapiens
  misc_RNA (1)...(19): siRNA sense strand
guacaucggcuuccuuugu

SEQ ID NO: 1396607 - RNA, 19 nt, Homo sapiens
  misc_RNA (1)...(19): siRNA sense strand
cggaaaccguucuguguga

SEQ ID NO: 1396608 - RNA, 19 nt, Homo sapiens
  misc_RNA (1)...(19): siRNA sense strand
gcucaaguuugcccggaaa

SEQ ID NO: 1396609 - RNA, 19 nt, Homo sapiens
  misc_RNA (1)...(19): siRNA sense strand
accgcaagcugcagaauuu

SEQ ID NO: 1396610 - RNA, 19 nt, Homo sapiens
  misc_RNA (1)...(19): siRNA sense strand
ggcagaagcacuuugagaa

SEQ ID NO: 1396611 - RNA, 19 nt, Homo sapiens
  misc_RNA (1)...(19): siRNA sense strand
caacgucuuugccacaucu

SEQ ID NO: 1396612 - RNA, 19 nt, Homo sapiens
  misc_RNA (1)...(19): siRNA sense strand
ggaagcugcugggcucugu

SEQ ID NO: 1396613 - RNA, 19 nt, Homo sapiens
  misc_RNA (1)...(19): siRNA sense strand
gcagaagcacuuugagaag

SEQ ID NO: 1396614 - RNA, 19 nt, Homo sapiens
  misc_RNA (1)...(19): siRNA sense strand
ggucuggguuugcccugaa

SEQ ID NO: 1396615 - RNA, 19 nt, Homo sapiens
  misc_RNA (1)...(19): siRNA sense strand
gaaaccguucugugugauu

SEQ ID NO: 1396616 - RNA, 19 nt, Homo sapiens
  misc_RNA (1)...(19): siRNA sense strand
gcugggcucuguggucuau

SEQ ID NO: 1396617 - RNA, 19 nt, Homo sapiens
  misc_RNA (1)...(19): siRNA sense strand
gggagaacgaccacuuuga

SEQ ID NO: 1396618 - RNA, 19 nt, Homo sapiens
  misc_RNA (1)...(19): siRNA sense strand
ggaaaccguucugugugau

SEQ ID NO: 1396619 - RNA, 19 nt, Homo sapiens
  misc_RNA (1)...(19): siRNA sense strand
gcacaggcagaagcacuuu

SEQ ID NO: 1396620 - RNA, 19 nt, Homo sapiens
  misc_RNA (1)...(19): siRNA sense strand
aaaccguucugugugauug

SEQ ID NO: 1396621 - RNA, 19 nt, Homo sapiens
  misc_RNA (1)...(19): siRNA sense strand
ccacguggcaguacuacga

SEQ ID NO: 1396622 - RNA, 19 nt, Homo sapiens
  misc_RNA (1)...(19): siRNA sense strand
ggagaacgaccacuuugac

SEQ ID NO: 1396623 - RNA, 19 nt, Homo sapiens
  misc_RNA (1)...(19): siRNA sense strand
ccucguuccugguguacuu

SEQ ID NO: 1396624 - RNA, 19 nt, Homo sapiens
  misc_RNA (1)...(19): siRNA sense strand
gagaacgaccacuuugaca

SEQ ID NO: 1396625 - RNA, 19 nt, Homo sapiens
  misc_RNA (1)...(19): siRNA sense strand
agaauuuccucuacaacgu

SEQ ID NO: 1396626 - RNA, 19 nt, Homo sapiens
  misc_RNA (1)...(19): siRNA sense strand
gggagaagaagcugaaggu

SEQ ID NO: 1396627 - RNA, 19 nt, Homo sapiens
  misc_RNA (1)...(19): siRNA sense strand
caucaaggaguaugagaag

SEQ ID NO: 1396628 - RNA, 19 nt, Homo sapiens
  misc_RNA (1)...(19): siRNA sense strand
ugcagaauuuccucuacaa

SEQ ID NO: 1396629 - RNA, 19 nt, Homo sapiens
  misc_RNA (1)...(19): siRNA sense strand
ugacuaucgugguguuugg

SEQ ID NO: 1396630 - RNA, 19 nt, Homo sapiens
  misc_RNA (1)...(19): siRNA sense strand
agaagcacuuugagaagag

SEQ ID NO: 1396631 - RNA, 19 nt, Homo sapiens
  misc_RNA (1)...(19): siRNA sense strand
gugcucaucgccuccauug

SEQ ID NO: 1396632 - RNA, 19 nt, Homo sapiens
  misc_RNA (1)...(19): siRNA sense strand
gcugcagaauuuccucuac

SEQ ID NO: 1396633 - RNA, 19 nt, Homo sapiens
  misc_RNA (1)...(19): siRNA sense strand
uacaucggcuuccuuuguc

SEQ ID NO: 1396634 - RNA, 19 nt, Homo sapiens
  misc_RNA (1)...(19): siRNA sense strand
uuuccaccaucaaggagua

SEQ ID NO: 1396635 - RNA, 19 nt, Homo sapiens
  misc_RNA (1)...(19): siRNA sense strand
gcugggcguucaucuacca

SEQ ID NO: 1396636 - RNA, 19 nt, Homo sapiens
  misc_RNA (1)...(19): siRNA sense strand
ucaaggaguaugagaagag

SEQ ID NO: 1396637 - RNA, 19 nt, Homo sapiens
  misc_RNA (1)...(19): siRNA sense strand
cugcagaauuuccucuaca

SEQ ID NO: 1396638 - RNA, 19 nt, Homo sapiens
  misc_RNA (1)...(19): siRNA sense strand
ccaucaaggaguaugagaa

SEQ ID NO: 1396639 - RNA, 19 nt, Homo sapiens
  misc_RNA (1)...(19): siRNA sense strand
acaggcagaagcacuuuga

SEQ ID NO: 1396640 - RNA, 19 nt, Homo sapiens
  misc_RNA (1)...(19): siRNA sense strand
ugaucacgcugaccaccau

SEQ ID NO: 1396641 - RNA, 19 nt, Homo sapiens
  misc_RNA (1)...(19): siRNA sense strand
ccaccaucaaggaguauga

SEQ ID NO: 1396642 - RNA, 19 nt, Homo sapiens
  misc_RNA (1)...(19): siRNA sense strand
gcggcagcauccucagcaa

SEQ ID NO: 1396643 - RNA, 19 nt, Homo sapiens
  misc_RNA (1)...(19): siRNA sense strand
cagaagcacuuugagaaga

SEQ ID NO: 1396644 - RNA, 19 nt, Homo sapiens
  misc_RNA (1)...(19): siRNA sense strand
guacaucggcuuccuuugu

SEQ ID NO: 1396645 - RNA, 19 nt, Homo sapiens
  misc_RNA (1)...(19): siRNA sense strand
cggaaaccguucuguguga

SEQ ID NO: 1396646 - RNA, 19 nt, Homo sapiens
  misc_RNA (1)...(19): siRNA sense strand
gcucaaguuugcccggaaa

SEQ ID NO: 1396647 - RNA, 19 nt, Homo sapiens
  misc_RNA (1)...(19): siRNA sense strand
accgcaagcugcagaauuu

SEQ ID NO: 1396648 - RNA, 19 nt, Homo sapiens
  misc_RNA (1)...(19): siRNA sense strand
ggcagaagcacuuugagaa

SEQ ID NO: 1396649 - RNA, 19 nt, Homo sapiens
  misc_RNA (1)...(19): siRNA sense strand
caacgucuuugccacaucu

SEQ ID NO: 1396650 - RNA, 19 nt, Homo sapiens
  misc_RNA (1)...(19): siRNA sense strand
ggaagcugcugggcucugu

SEQ ID NO: 1396651 - RNA, 19 nt, Homo sapiens
  misc_RNA (1)...(19): siRNA sense strand
gcagaagcacuuugagaag

SEQ ID NO: 1396652 - RNA, 19 nt, Homo sapiens
  misc_RNA (1)...(19): siRNA sense strand
ggucuggguuugcccugaa

SEQ ID NO: 1396653 - RNA, 19 nt, Homo sapiens
  misc_RNA (1)...(19): siRNA sense strand
gaaaccguucugugugauu

SEQ ID NO: 1396654 - RNA, 19 nt, Homo sapiens
  misc_RNA (1)...(19): siRNA sense strand
gcugggcucuguggucuau

SEQ ID NO: 1396655 - RNA, 19 nt, Homo sapiens
  misc_RNA (1)...(19): siRNA sense strand
gggagaacgaccacuuuga

SEQ ID NO: 1396656 - RNA, 19 nt, Homo sapiens
  misc_RNA (1)...(19): siRNA sense strand
ggaaaccguucugugugau

SEQ ID NO: 1396657 - RNA, 19 nt, Homo sapiens
  misc_RNA (1)...(19): siRNA sense strand
gcacaggcagaagcacuuu

SEQ ID NO: 1396658 - RNA, 19 nt, Homo sapiens
  misc_RNA (1)...(19): siRNA sense strand
aaaccguucugugugauug

SEQ ID NO: 1396659 - RNA, 19 nt, Homo sapiens
  misc_RNA (1)...(19): siRNA sense strand
ccacguggcaguacuacga

SEQ ID NO: 1396660 - RNA, 19 nt, Homo sapiens
  misc_RNA (1)...(19): siRNA sense strand
ggagaacgaccacuuugac

SEQ ID NO: 1396661 - RNA, 19 nt, Homo sapiens
  misc_RNA (1)...(19): siRNA sense strand
ccucguuccugguguacuu

SEQ ID NO: 1396662 - RNA, 19 nt, Homo sapiens
  misc_RNA (1)...(19): siRNA sense strand
gagaacgaccacuuugaca

SEQ ID NO: 1396663 - RNA, 19 nt, Homo sapiens
  misc_RNA (1)...(19): siRNA sense strand
agaauuuccucuacaacgu

SEQ ID NO: 1396664 - RNA, 19 nt, Homo sapiens
  misc_RNA (1)...(19): siRNA sense strand
gggagaagaagcugaaggu

SEQ ID NO: 1396665 - RNA, 19 nt, Homo sapiens
  misc_RNA (1)...(19): siRNA sense strand
caucaaggaguaugagaag

SEQ ID NO: 1396666 - RNA, 19 nt, Homo sapiens
  misc_RNA (1)...(19): siRNA sense strand
ugcagaauuuccucuacaa

SEQ ID NO: 1396667 - RNA, 19 nt, Homo sapiens
  misc_RNA (1)...(19): siRNA sense strand
ugacuaucgugguguuugg

SEQ ID NO: 1396668 - RNA, 19 nt, Homo sapiens
  misc_RNA (1)...(19): siRNA sense strand
agaagcacuuugagaagag

SEQ ID NO: 1396669 - RNA, 19 nt, Homo sapiens
  misc_RNA (1)...(19): siRNA sense strand
gugcucaucgccuccauug

SEQ ID NO: 1396670 - RNA, 19 nt, Homo sapiens
  misc_RNA (1)...(19): siRNA sense strand
gcugcagaauuuccucuac

SEQ ID NO: 1396671 - RNA, 19 nt, Homo sapiens
  misc_RNA (1)...(19): siRNA sense strand
uacaucggcuuccuuuguc

SEQ ID NO: 1396672 - RNA, 19 nt, Homo sapiens
  misc_RNA (1)...(19): siRNA sense strand
uuuccaccaucaaggagua

SEQ ID NO: 1396673 - RNA, 19 nt, Homo sapiens
  misc_RNA (1)...(19): siRNA sense strand
gcugggcguucaucuacca

SEQ ID NO: 1396674 - RNA, 19 nt, Homo sapiens
  misc_RNA (1)...(19): siRNA sense strand
ucaaggaguaugagaagag

SEQ ID NO: 1396675 - RNA, 19 nt, Homo sapiens
  misc_RNA (1)...(19): siRNA sense strand
cugcagaauuuccucuaca

SEQ ID NO: 1396676 - RNA, 19 nt, Homo sapiens
  misc_RNA (1)...(19): siRNA sense strand
ccaucaaggaguaugagaa

SEQ ID NO: 1396677 - RNA, 19 nt, Homo sapiens
  misc_RNA (1)...(19): siRNA sense strand
acaggcagaagcacuuuga

SEQ ID NO: 1396678 - RNA, 19 nt, Homo sapiens
  misc_RNA (1)...(19): siRNA sense strand
ugaucacgcugaccaccau

SEQ ID NO: 1396679 - RNA, 19 nt, Homo sapiens
  misc_RNA (1)...(19): siRNA sense strand
ccaccaucaaggaguauga

SEQ ID NO: 1396680 - RNA, 19 nt, Homo sapiens
  misc_RNA (1)...(19): siRNA sense strand
gcggcagcauccucagcaa

SEQ ID NO: 1396681 - RNA, 19 nt, Homo sapiens
  misc_RNA (1)...(19): siRNA sense strand
cagaagcacuuugagaaga

SEQ ID NO: 1396682 - RNA, 19 nt, Homo sapiens
  misc_RNA (1)...(19): siRNA sense strand
guacaucggcuuccuuugu

SEQ ID NO: 1396683 - RNA, 19 nt, Homo sapiens
  misc_RNA (1)...(19): siRNA sense strand
cggaaaccguucuguguga

SEQ ID NO: 1396684 - RNA, 19 nt, Homo sapiens
  misc_RNA (1)...(19): siRNA sense strand
gcucaaguuugcccggaaa

SEQ ID NO: 1396685 - RNA, 19 nt, Homo sapiens
  misc_RNA (1)...(19): siRNA sense strand
accgcaagcugcagaauuu

SEQ ID NO: 1396686 - RNA, 19 nt, Homo sapiens
  misc_RNA (1)...(19): siRNA sense strand
ggcagaagcacuuugagaa

SEQ ID NO: 1396687 - RNA, 19 nt, Homo sapiens
  misc_RNA (1)...(19): siRNA sense strand
caacgucuuugccacaucu

SEQ ID NO: 1396688 - RNA, 19 nt, Homo sapiens
  misc_RNA (1)...(19): siRNA sense strand
ggaagcugcugggcucugu

SEQ ID NO: 1396689 - RNA, 19 nt, Homo sapiens
  misc_RNA (1)...(19): siRNA sense strand
gcagaagcacuuugagaag

SEQ ID NO: 1396690 - RNA, 19 nt, Homo sapiens
  misc_RNA (1)...(19): siRNA sense strand
ggucuggguuugcccugaa

SEQ ID NO: 1396691 - RNA, 19 nt, Homo sapiens
  misc_RNA (1)...(19): siRNA sense strand
gaaaccguucugugugauu

SEQ ID NO: 1396692 - RNA, 19 nt, Homo sapiens
  misc_RNA (1)...(19): siRNA sense strand
gcugggcucuguggucuau

SEQ ID NO: 1396693 - RNA, 19 nt, Homo sapiens
  misc_RNA (1)...(19): siRNA sense strand
gggagaacgaccacuuuga

SEQ ID NO: 1396694 - RNA, 19 nt, Homo sapiens
  misc_RNA (1)...(19): siRNA sense strand
ggaaaccguucugugugau

SEQ ID NO: 1396695 - RNA, 19 nt, Homo sapiens
  misc_RNA (1)...(19): siRNA sense strand
gcacaggcagaagcacuuu

SEQ ID NO: 1396696 - RNA, 19 nt, Homo sapiens
  misc_RNA (1)...(19): siRNA sense strand
aaaccguucugugugauug

SEQ ID NO: 1396697 - RNA, 19 nt, Homo sapiens
  misc_RNA (1)...(19): siRNA sense strand
ccacguggcaguacuacga

SEQ ID NO: 1396698 - RNA, 19 nt, Homo sapiens
  misc_RNA (1)...(19): siRNA sense strand
ggagaacgaccacuuugac

SEQ ID NO: 1396699 - RNA, 19 nt, Homo sapiens
  misc_RNA (1)...(19): siRNA sense strand
ccucguuccugguguacuu

SEQ ID NO: 1396700 - RNA, 19 nt, Homo sapiens
  misc_RNA (1)...(19): siRNA sense strand
gagaacgaccacuuugaca

SEQ ID NO: 1396701 - RNA, 19 nt, Homo sapiens
  misc_RNA (1)...(19): siRNA sense strand
agaauuuccucuacaacgu

SEQ ID NO: 1396702 - RNA, 19 nt, Homo sapiens
  misc_RNA (1)...(19): siRNA sense strand
gggagaagaagcugaaggu

SEQ ID NO: 1396703 - RNA, 19 nt, Homo sapiens
  misc_RNA (1)...(19): siRNA sense strand
caucaaggaguaugagaag

SEQ ID NO: 1396704 - RNA, 19 nt, Homo sapiens
  misc_RNA (1)...(19): siRNA sense strand
ugcagaauuuccucuacaa

SEQ ID NO: 1396705 - RNA, 19 nt, Homo sapiens
  misc_RNA (1)...(19): siRNA sense strand
ugacuaucgugguguuugg

SEQ ID NO: 1396706 - RNA, 19 nt, Homo sapiens
  misc_RNA (1)...(19): siRNA sense strand
agaagcacuuugagaagag

SEQ ID NO: 1396707 - RNA, 19 nt, Homo sapiens
  misc_RNA (1)...(19): siRNA sense strand
gugcucaucgccuccauug

SEQ ID NO: 1396708 - RNA, 19 nt, Homo sapiens
  misc_RNA (1)...(19): siRNA sense strand
gcugcagaauuuccucuac

SEQ ID NO: 1396709 - RNA, 19 nt, Homo sapiens
  misc_RNA (1)...(19): siRNA sense strand
uacaucggcuuccuuuguc

SEQ ID NO: 1396710 - RNA, 19 nt, Homo sapiens
  misc_RNA (1)...(19): siRNA sense strand
uuuccaccaucaaggagua

SEQ ID NO: 1396711 - RNA, 19 nt, Homo sapiens
  misc_RNA (1)...(19): siRNA sense strand
gcugggcguucaucuacca

SEQ ID NO: 1396712 - RNA, 19 nt, Homo sapiens
  misc_RNA (1)...(19): siRNA sense strand
ucaaggaguaugagaagag

SEQ ID NO: 1396713 - RNA, 19 nt, Homo sapiens
  misc_RNA (1)...(19): siRNA sense strand
cugcagaauuuccucuaca

SEQ ID NO: 1396714 - RNA, 19 nt, Homo sapiens
  misc_RNA (1)...(19): siRNA sense strand
ccaucaaggaguaugagaa

SEQ ID NO: 1396715 - RNA, 19 nt, Homo sapiens
  misc_RNA (1)...(19): siRNA sense strand
acaggcagaagcacuuuga

SEQ ID NO: 1396716 - RNA, 19 nt, Homo sapiens
  misc_RNA (1)...(19): siRNA sense strand
ugaucacgcugaccaccau

SEQ ID NO: 1396717 - RNA, 19 nt, Homo sapiens
  misc_RNA (1)...(19): siRNA sense strand
ccaccaucaaggaguauga

SEQ ID NO: 1396718 - RNA, 19 nt, Homo sapiens
  misc_RNA (1)...(19): siRNA sense strand
gcggcagcauccucagcaa

SEQ ID NO: 1396719 - RNA, 19 nt, Homo sapiens
  misc_RNA (1)...(19): siRNA sense strand
cagaagcacuuugagaaga

SEQ ID NO: 1396720 - RNA, 19 nt, Homo sapiens
  misc_RNA (1)...(19): siRNA sense strand
guacaucggcuuccuuugu

SEQ ID NO: 1396721 - RNA, 19 nt, Homo sapiens
  misc_RNA (1)...(19): siRNA sense strand
cggaaaccguucuguguga

SEQ ID NO: 1396722 - RNA, 19 nt, Homo sapiens
  misc_RNA (1)...(19): siRNA sense strand
gcucaaguuugcccggaaa

SEQ ID NO: 1396723 - RNA, 19 nt, Homo sapiens
  misc_RNA (1)...(19): siRNA sense strand
accgcaagcugcagaauuu

SEQ ID NO: 1396724 - RNA, 19 nt, Homo sapiens
  misc_RNA (1)...(19): siRNA sense strand
ggcagaagcacuuugagaa

SEQ ID NO: 1396725 - RNA, 19 nt, Homo sapiens
  misc_RNA (1)...(19): siRNA sense strand
caacgucuuugccacaucu

SEQ ID NO: 1396726 - RNA, 19 nt, Homo sapiens
  misc_RNA (1)...(19): siRNA sense strand
ggaagcugcugggcucugu

SEQ ID NO: 1396727 - RNA, 19 nt, Homo sapiens
  misc_RNA (1)...(19): siRNA sense strand
gcagaagcacuuugagaag

SEQ ID NO: 1396728 - RNA, 19 nt, Homo sapiens
  misc_RNA (1)...(19): siRNA sense strand
ggucuggguuugcccugaa

SEQ ID NO: 1396729 - RNA, 19 nt, Homo sapiens
  misc_RNA (1)...(19): siRNA sense strand
gaaaccguucugugugauu

SEQ ID NO: 1396730 - RNA, 19 nt, Homo sapiens
  misc_RNA (1)...(19): siRNA sense strand
gcugggcucuguggucuau

SEQ ID NO: 1396731 - RNA, 19 nt, Homo sapiens
  misc_RNA (1)...(19): siRNA sense strand
gggagaacgaccacuuuga

SEQ ID NO: 1396732 - RNA, 19 nt, Homo sapiens
  misc_RNA (1)...(19): siRNA sense strand
ggaaaccguucugugugau

SEQ ID NO: 1396733 - RNA, 19 nt, Homo sapiens
  misc_RNA (1)...(19): siRNA sense strand
gcacaggcagaagcacuuu

SEQ ID NO: 1396734 - RNA, 19 nt, Homo sapiens
  misc_RNA (1)...(19): siRNA sense strand
aaaccguucugugugauug

SEQ ID NO: 1396735 - RNA, 19 nt, Homo sapiens
  misc_RNA (1)...(19): siRNA sense strand
ccacguggcaguacuacga

SEQ ID NO: 1396736 - RNA, 19 nt, Homo sapiens
  misc_RNA (1)...(19): siRNA sense strand
ggagaacgaccacuuugac

SEQ ID NO: 1396737 - RNA, 19 nt, Homo sapiens
  misc_RNA (1)...(19): siRNA sense strand
ccucguuccugguguacuu

SEQ ID NO: 1396738 - RNA, 19 nt, Homo sapiens
  misc_RNA (1)...(19): siRNA sense strand
gagaacgaccacuuugaca

SEQ ID NO: 1396739 - RNA, 19 nt, Homo sapiens
  misc_RNA (1)...(19): siRNA sense strand
agaauuuccucuacaacgu

SEQ ID NO: 1396740 - RNA, 19 nt, Homo sapiens
  misc_RNA (1)...(19): siRNA sense strand
gggagaagaagcugaaggu

SEQ ID NO: 1396741 - RNA, 19 nt, Homo sapiens
  misc_RNA (1)...(19): siRNA sense strand
caucaaggaguaugagaag

SEQ ID NO: 1396742 - RNA, 19 nt, Homo sapiens
  misc_RNA (1)...(19): siRNA sense strand
ugcagaauuuccucuacaa

SEQ ID NO: 1396743 - RNA, 19 nt, Homo sapiens
  misc_RNA (1)...(19): siRNA sense strand
ugacuaucgugguguuugg

SEQ ID NO: 1396744 - RNA, 19 nt, Homo sapiens
  misc_RNA (1)...(19): siRNA sense strand
agaagcacuuugagaagag

SEQ ID NO: 1396745 - RNA, 19 nt, Homo sapiens
  misc_RNA (1)...(19): siRNA sense strand
gugcucaucgccuccauug

SEQ ID NO: 1396746 - RNA, 19 nt, Homo sapiens
  misc_RNA (1)...(19): siRNA sense strand
gcugcagaauuuccucuac

SEQ ID NO: 1396747 - RNA, 19 nt, Homo sapiens
  misc_RNA (1)...(19): siRNA sense strand
uacaucggcuuccuuuguc

SEQ ID NO: 1396748 - RNA, 19 nt, Homo sapiens
  misc_RNA (1)...(19): siRNA sense strand
uuuccaccaucaaggagua

SEQ ID NO: 1396749 - RNA, 19 nt, Homo sapiens
  misc_RNA (1)...(19): siRNA sense strand
gcugggcguucaucuacca

SEQ ID NO: 1396750 - RNA, 19 nt, Homo sapiens
  misc_RNA (1)...(19): siRNA sense strand
ucaaggaguaugagaagag

SEQ ID NO: 1396751 - RNA, 19 nt, Homo sapiens
  misc_RNA (1)...(19): siRNA sense strand
cugcagaauuuccucuaca

SEQ ID NO: 1396752 - RNA, 19 nt, Homo sapiens
  misc_RNA (1)...(19): siRNA sense strand
ccaucaaggaguaugagaa

SEQ ID NO: 1396753 - RNA, 19 nt, Homo sapiens
  misc_RNA (1)...(19): siRNA sense strand
acaggcagaagcacuuuga

SEQ ID NO: 1396754 - RNA, 19 nt, Homo sapiens
  misc_RNA (1)...(19): siRNA sense strand
ugaucacgcugaccaccau

SEQ ID NO: 1396755 - RNA, 19 nt, Homo sapiens
  misc_RNA (1)...(19): siRNA sense strand
ccaccaucaaggaguauga

SEQ ID NO: 1396756 - RNA, 19 nt, Homo sapiens
  misc_RNA (1)...(19): siRNA sense strand
gcggcagcauccucagcaa

SEQ ID NO: 1396757 - RNA, 19 nt, Homo sapiens
  misc_RNA (1)...(19): siRNA sense strand
cagaagcacuuugagaaga

SEQ ID NO: 1396758 - RNA, 19 nt, Homo sapiens
  misc_RNA (1)...(19): siRNA sense strand
guacaucggcuuccuuugu

SEQ ID NO: 1396759 - RNA, 19 nt, Homo sapiens
  misc_RNA (1)...(19): siRNA sense strand
cggaaaccguucuguguga

SEQ ID NO: 1396760 - RNA, 19 nt, Homo sapiens
  misc_RNA (1)...(19): siRNA sense strand
gcucaaguuugcccggaaa

SEQ ID NO: 1396761 - RNA, 19 nt, Homo sapiens
  misc_RNA (1)...(19): siRNA sense strand
accgcaagcugcagaauuu

SEQ ID NO: 1396762 - RNA, 19 nt, Homo sapiens
  misc_RNA (1)...(19): siRNA sense strand
ggcagaagcacuuugagaa

SEQ ID NO: 1396763 - RNA, 19 nt, Homo sapiens
  misc_RNA (1)...(19): siRNA sense strand
caacgucuuugccacaucu

SEQ ID NO: 1396764 - RNA, 19 nt, Homo sapiens
  misc_RNA (1)...(19): siRNA sense strand
ggaagcugcugggcucugu

SEQ ID NO: 1396765 - RNA, 19 nt, Homo sapiens
  misc_RNA (1)...(19): siRNA sense strand
gcagaagcacuuugagaag

SEQ ID NO: 1396766 - RNA, 19 nt, Homo sapiens
  misc_RNA (1)...(19): siRNA sense strand
ggucuggguuugcccugaa

SEQ ID NO: 1396767 - RNA, 19 nt, Homo sapiens
  misc_RNA (1)...(19): siRNA sense strand
gaaaccguucugugugauu

SEQ ID NO: 1396768 - RNA, 19 nt, Homo sapiens
  misc_RNA (1)...(19): siRNA sense strand
gcugggcucuguggucuau

SEQ ID NO: 1396769 - RNA, 19 nt, Homo sapiens
  misc_RNA (1)...(19): siRNA sense strand
gggagaacgaccacuuuga

SEQ ID NO: 1396770 - RNA, 19 nt, Homo sapiens
  misc_RNA (1)...(19): siRNA sense strand
ggaaaccguucugugugau

SEQ ID NO: 1396771 - RNA, 19 nt, Homo sapiens
  misc_RNA (1)...(19): siRNA sense strand
gcacaggcagaagcacuuu

SEQ ID NO: 1396772 - RNA, 19 nt, Homo sapiens
  misc_RNA (1)...(19): siRNA sense strand
aaaccguucugugugauug

SEQ ID NO: 1396773 - RNA, 19 nt, Homo sapiens
  misc_RNA (1)...(19): siRNA sense strand
ccacguggcaguacuacga

SEQ ID NO: 1396774 - RNA, 19 nt, Homo sapiens
  misc_RNA (1)...(19): siRNA sense strand
ggagaacgaccacuuugac

SEQ ID NO: 1396775 - RNA, 19 nt, Homo sapiens
  misc_RNA (1)...(19): siRNA sense strand
ccucguuccugguguacuu

SEQ ID NO: 1396776 - RNA, 19 nt, Homo sapiens
  misc_RNA (1)...(19): siRNA sense strand
gagaacgaccacuuugaca

SEQ ID NO: 1396777 - RNA, 19 nt, Homo sapiens
  misc_RNA (1)...(19): siRNA sense strand
agaauuuccucuacaacgu

SEQ ID NO: 1396778 - RNA, 19 nt, Homo sapiens
  misc_RNA (1)...(19): siRNA sense strand
gggagaagaagcugaaggu

SEQ ID NO: 1396779 - RNA, 19 nt, Homo sapiens
  misc_RNA (1)...(19): siRNA sense strand
caucaaggaguaugagaag

SEQ ID NO: 1396780 - RNA, 19 nt, Homo sapiens
  misc_RNA (1)...(19): siRNA sense strand
ugcagaauuuccucuacaa

SEQ ID NO: 1396781 - RNA, 19 nt, Homo sapiens
  misc_RNA (1)...(19): siRNA sense strand
ugacuaucgugguguuugg

SEQ ID NO: 1396782 - RNA, 19 nt, Homo sapiens
  misc_RNA (1)...(19): siRNA sense strand
agaagcacuuugagaagag

SEQ ID NO: 1396783 - RNA, 19 nt, Homo sapiens
  misc_RNA (1)...(19): siRNA sense strand
gugcucaucgccuccauug

SEQ ID NO: 1396784 - RNA, 19 nt, Homo sapiens
  misc_RNA (1)...(19): siRNA sense strand
gcugcagaauuuccucuac

SEQ ID NO: 1396785 - RNA, 19 nt, Homo sapiens
  misc_RNA (1)...(19): siRNA sense strand
uacaucggcuuccuuuguc

SEQ ID NO: 1396786 - RNA, 19 nt, Homo sapiens
  misc_RNA (1)...(19): siRNA sense strand
uuuccaccaucaaggagua

SEQ ID NO: 1396787 - RNA, 19 nt, Homo sapiens
  misc_RNA (1)...(19): siRNA sense strand
gcugggcguucaucuacca

SEQ ID NO: 1396788 - RNA, 19 nt, Homo sapiens
  misc_RNA (1)...(19): siRNA sense strand
ucaaggaguaugagaagag

SEQ ID NO: 1396789 - RNA, 19 nt, Homo sapiens
  misc_RNA (1)...(19): siRNA sense strand
cugcagaauuuccucuaca

SEQ ID NO: 1396790 - RNA, 19 nt, Homo sapiens
  misc_RNA (1)...(19): siRNA sense strand
ccaucaaggaguaugagaa

SEQ ID NO: 1396791 - RNA, 19 nt, Homo sapiens
  misc_RNA (1)...(19): siRNA sense strand
acaggcagaagcacuuuga

SEQ ID NO: 1396792 - RNA, 19 nt, Homo sapiens
  misc_RNA (1)...(19): siRNA sense strand
ugaucacgcugaccaccau

SEQ ID NO: 1396793 - RNA, 19 nt, Homo sapiens
  misc_RNA (1)...(19): siRNA sense strand
ccaccaucaaggaguauga

SEQ ID NO: 1396794 - RNA, 19 nt, Homo sapiens
  misc_RNA (1)...(19): siRNA sense strand
gcggcagcauccucagcaa

SEQ ID NO: 1396795 - RNA, 19 nt, Homo sapiens
  misc_RNA (1)...(19): siRNA sense strand
cagaagcacuuugagaaga

SEQ ID NO: 1396796 - RNA, 19 nt, Homo sapiens
  misc_RNA (1)...(19): siRNA sense strand
guacaucggcuuccuuugu

SEQ ID NO: 1396797 - RNA, 19 nt, Homo sapiens
  misc_RNA (1)...(19): siRNA sense strand
cggaaaccguucuguguga

SEQ ID NO: 1396798 - RNA, 19 nt, Homo sapiens
  misc_RNA (1)...(19): siRNA sense strand
gcucaaguuugcccggaaa

SEQ ID NO: 1396799 - RNA, 19 nt, Homo sapiens
  misc_RNA (1)...(19): siRNA sense strand
accgcaagcugcagaauuu

SEQ ID NO: 1396800 - RNA, 19 nt, Homo sapiens
  misc_RNA (1)...(19): siRNA sense strand
ggcagaagcacuuugagaa

SEQ ID NO: 1396801 - RNA, 19 nt, Homo sapiens
  misc_RNA (1)...(19): siRNA sense strand
caacgucuuugccacaucu

SEQ ID NO: 1396802 - RNA, 19 nt, Homo sapiens
  misc_RNA (1)...(19): siRNA sense strand
ggaagcugcugggcucugu

SEQ ID NO: 1396803 - RNA, 19 nt, Homo sapiens
  misc_RNA (1)...(19): siRNA sense strand
gcagaagcacuuugagaag

SEQ ID NO: 1396804 - RNA, 19 nt, Homo sapiens
  misc_RNA (1)...(19): siRNA sense strand
ggucuggguuugcccugaa

SEQ ID NO: 1396805 - RNA, 19 nt, Homo sapiens
  misc_RNA (1)...(19): siRNA sense strand
gaaaccguucugugugauu

SEQ ID NO: 1396806 - RNA, 19 nt, Homo sapiens
  misc_RNA (1)...(19): siRNA sense strand
gcugggcucuguggucuau

SEQ ID NO: 1396807 - RNA, 19 nt, Homo sapiens
  misc_RNA (1)...(19): siRNA sense strand
gggagaacgaccacuuuga

SEQ ID NO: 1396808 - RNA, 19 nt, Homo sapiens
  misc_RNA (1)...(19): siRNA sense strand
ggaaaccguucugugugau

SEQ ID NO: 1396809 - RNA, 19 nt, Homo sapiens
  misc_RNA (1)...(19): siRNA sense strand
gcacaggcagaagcacuuu

SEQ ID NO: 1396810 - RNA, 19 nt, Homo sapiens
  misc_RNA (1)...(19): siRNA sense strand
aaaccguucugugugauug

SEQ ID NO: 1396811 - RNA, 19 nt, Homo sapiens
  misc_RNA (1)...(19): siRNA sense strand
ccacguggcaguacuacga

SEQ ID NO: 1396812 - RNA, 19 nt, Homo sapiens
  misc_RNA (1)...(19): siRNA sense strand
ggagaacgaccacuuugac

SEQ ID NO: 1396813 - RNA, 19 nt, Homo sapiens
  misc_RNA (1)...(19): siRNA sense strand
ccucguuccugguguacuu

SEQ ID NO: 1396814 - RNA, 19 nt, Homo sapiens
  misc_RNA (1)...(19): siRNA sense strand
gagaacgaccacuuugaca

SEQ ID NO: 1396815 - RNA, 19 nt, Homo sapiens
  misc_RNA (1)...(19): siRNA sense strand
agaauuuccucuacaacgu

SEQ ID NO: 1396816 - RNA, 19 nt, Homo sapiens
  misc_RNA (1)...(19): siRNA sense strand
gggagaagaagcugaaggu

SEQ ID NO: 1396817 - RNA, 19 nt, Homo sapiens
  misc_RNA (1)...(19): siRNA sense strand
caucaaggaguaugagaag

SEQ ID NO: 1396818 - RNA, 19 nt, Homo sapiens
  misc_RNA (1)...(19): siRNA sense strand
ugcagaauuuccucuacaa

SEQ ID NO: 1396819 - RNA, 19 nt, Homo sapiens
  misc_RNA (1)...(19): siRNA sense strand
ugacuaucgugguguuugg

SEQ ID NO: 1396820 - RNA, 19 nt, Homo sapiens
  misc_RNA (1)...(19): siRNA sense strand
agaagcacuuugagaagag

SEQ ID NO: 1396821 - RNA, 19 nt, Homo sapiens
  misc_RNA (1)...(19): siRNA sense strand
gugcucaucgccuccauug

SEQ ID NO: 1396822 - RNA, 19 nt, Homo sapiens
  misc_RNA (1)...(19): siRNA sense strand
gcugcagaauuuccucuac

SEQ ID NO: 1396823 - RNA, 19 nt, Homo sapiens
  misc_RNA (1)...(19): siRNA sense strand
uacaucggcuuccuuuguc

SEQ ID NO: 1396824 - RNA, 19 nt, Homo sapiens
  misc_RNA (1)...(19): siRNA sense strand
uuuccaccaucaaggagua

SEQ ID NO: 1396825 - RNA, 19 nt, Homo sapiens
  misc_RNA (1)...(19): siRNA sense strand
gcugggcguucaucuacca

SEQ ID NO: 1396826 - RNA, 19 nt, Homo sapiens
  misc_RNA (1)...(19): siRNA sense strand
ucaaggaguaugagaagag

SEQ ID NO: 1396827 - RNA, 19 nt, Homo sapiens
  misc_RNA (1)...(19): siRNA sense strand
cugcagaauuuccucuaca

SEQ ID NO: 1396828 - RNA, 19 nt, Homo sapiens
  misc_RNA (1)...(19): siRNA sense strand
ccaucaaggaguaugagaa

SEQ ID NO: 1396829 - RNA, 19 nt, Homo sapiens
  misc_RNA (1)...(19): siRNA sense strand
acaggcagaagcacuuuga

SEQ ID NO: 1396830 - RNA, 19 nt, Homo sapiens
  misc_RNA (1)...(19): siRNA sense strand
ugaucacgcugaccaccau

SEQ ID NO: 1396831 - RNA, 19 nt, Homo sapiens
  misc_RNA (1)...(19): siRNA sense strand
ccaccaucaaggaguauga

SEQ ID NO: 1396832 - RNA, 19 nt, Homo sapiens
  misc_RNA (1)...(19): siRNA sense strand
gcggcagcauccucagcaa

SEQ ID NO: 1396833 - RNA, 19 nt, Homo sapiens
  misc_RNA (1)...(19): siRNA sense strand
cagaagcacuuugagaaga

SEQ ID NO: 1396834 - RNA, 19 nt, Homo sapiens
  misc_RNA (1)...(19): siRNA sense strand
guacaucggcuuccuuugu

SEQ ID NO: 1396835 - RNA, 19 nt, Homo sapiens
  misc_RNA (1)...(19): siRNA sense strand
cggaaaccguucuguguga

SEQ ID NO: 1396836 - RNA, 19 nt, Homo sapiens
  misc_RNA (1)...(19): siRNA sense strand
gcucaaguuugcccggaaa

SEQ ID NO: 1396837 - RNA, 19 nt, Homo sapiens
  misc_RNA (1)...(19): siRNA sense strand
accgcaagcugcagaauuu

SEQ ID NO: 1396838 - RNA, 19 nt, Homo sapiens
  misc_RNA (1)...(19): siRNA sense strand
ggcagaagcacuuugagaa

SEQ ID NO: 1396839 - RNA, 19 nt, Homo sapiens
  misc_RNA (1)...(19): siRNA sense strand
caacgucuuugccacaucu

SEQ ID NO: 1396840 - RNA, 19 nt, Homo sapiens
  misc_RNA (1)...(19): siRNA sense strand
ggaagcugcugggcucugu

SEQ ID NO: 1396841 - RNA, 19 nt, Homo sapiens
  misc_RNA (1)...(19): siRNA sense strand
gcagaagcacuuugagaag

SEQ ID NO: 1396842 - RNA, 19 nt, Homo sapiens
  misc_RNA (1)...(19): siRNA sense strand
ggucuggguuugcccugaa

SEQ ID NO: 1396843 - RNA, 19 nt, Homo sapiens
  misc_RNA (1)...(19): siRNA sense strand
gaaaccguucugugugauu

SEQ ID NO: 1396844 - RNA, 19 nt, Homo sapiens
  misc_RNA (1)...(19): siRNA sense strand
gcugggcucuguggucuau

SEQ ID NO: 1396845 - RNA, 19 nt, Homo sapiens
  misc_RNA (1)...(19): siRNA sense strand
gggagaacgaccacuuuga

SEQ ID NO: 1396846 - RNA, 19 nt, Homo sapiens
  misc_RNA (1)...(19): siRNA sense strand
ggaaaccguucugugugau

SEQ ID NO: 1396847 - RNA, 19 nt, Homo sapiens
  misc_RNA (1)...(19): siRNA sense strand
gcacaggcagaagcacuuu

SEQ ID NO: 1396848 - RNA, 19 nt, Homo sapiens
  misc_RNA (1)...(19): siRNA sense strand
aaaccguucugugugauug

SEQ ID NO: 1396849 - RNA, 19 nt, Homo sapiens
  misc_RNA (1)...(19): siRNA sense strand
ccacguggcaguacuacga

SEQ ID NO: 1396850 - RNA, 19 nt, Homo sapiens
  misc_RNA (1)...(19): siRNA sense strand
ggagaacgaccacuuugac

SEQ ID NO: 1396851 - RNA, 19 nt, Homo sapiens
  misc_RNA (1)...(19): siRNA sense strand
ccucguuccugguguacuu

SEQ ID NO: 1396852 - RNA, 19 nt, Homo sapiens
  misc_RNA (1)...(19): siRNA sense strand
gagaacgaccacuuugaca

SEQ ID NO: 1396853 - RNA, 19 nt, Homo sapiens
  misc_RNA (1)...(19): siRNA sense strand
agaauuuccucuacaacgu

SEQ ID NO: 1396854 - RNA, 19 nt, Homo sapiens
  misc_RNA (1)...(19): siRNA sense strand
gggagaagaagcugaaggu

SEQ ID NO: 1396855 - RNA, 19 nt, Homo sapiens
  misc_RNA (1)...(19): siRNA sense strand
caucaaggaguaugagaag

SEQ ID NO: 1396856 - RNA, 19 nt, Homo sapiens
  misc_RNA (1)...(19): siRNA sense strand
ugcagaauuuccucuacaa

SEQ ID NO: 1396857 - RNA, 19 nt, Homo sapiens
  misc_RNA (1)...(19): siRNA sense strand
ugacuaucgugguguuugg

SEQ ID NO: 1396858 - RNA, 19 nt, Homo sapiens
  misc_RNA (1)...(19): siRNA sense strand
agaagcacuuugagaagag

SEQ ID NO: 1396859 - RNA, 19 nt, Homo sapiens
  misc_RNA (1)...(19): siRNA sense strand
gugcucaucgccuccauug

SEQ ID NO: 1396860 - RNA, 19 nt, Homo sapiens
  misc_RNA (1)...(19): siRNA sense strand
gcugcagaauuuccucuac

SEQ ID NO: 1396861 - RNA, 19 nt, Homo sapiens
  misc_RNA (1)...(19): siRNA sense strand
uacaucggcuuccuuuguc

SEQ ID NO: 1396862 - RNA, 19 nt, Homo sapiens
  misc_RNA (1)...(19): siRNA sense strand
uuuccaccaucaaggagua

SEQ ID NO: 1396863 - RNA, 19 nt, Homo sapiens
  misc_RNA (1)...(19): siRNA sense strand
gcugggcguucaucuacca

SEQ ID NO: 1396864 - RNA, 19 nt, Homo sapiens
  misc_RNA (1)...(19): siRNA sense strand
ucaaggaguaugagaagag

SEQ ID NO: 1396865 - RNA, 19 nt, Homo sapiens
  misc_RNA (1)...(19): siRNA sense strand
cugcagaauuuccucuaca

SEQ ID NO: 1396866 - RNA, 19 nt, Homo sapiens
  misc_RNA (1)...(19): siRNA sense strand
ccaucaaggaguaugagaa

SEQ ID NO: 1396867 - RNA, 19 nt, Homo sapiens
  misc_RNA (1)...(19): siRNA sense strand
acaggcagaagcacuuuga

SEQ ID NO: 1396868 - RNA, 19 nt, Homo sapiens
  misc_RNA (1)...(19): siRNA sense strand
ugaucacgcugaccaccau

SEQ ID NO: 1396869 - RNA, 19 nt, Homo sapiens
  misc_RNA (1)...(19): siRNA sense strand
ccaccaucaaggaguauga

SEQ ID NO: 1396870 - RNA, 19 nt, Homo sapiens
  misc_RNA (1)...(19): siRNA sense strand
gcggcagcauccucagcaa

SEQ ID NO: 1396871 - RNA, 19 nt, Homo sapiens
  misc_RNA (1)...(19): siRNA sense strand
cagaagcacuuugagaaga

SEQ ID NO: 1396872 - RNA, 19 nt, Homo sapiens
  misc_RNA (1)...(19): siRNA sense strand
guacaucggcuuccuuugu

SEQ ID NO: 1396873 - RNA, 19 nt, Homo sapiens
  misc_RNA (1)...(19): siRNA sense strand
cggaaaccguucuguguga

SEQ ID NO: 1396874 - RNA, 19 nt, Homo sapiens
  misc_RNA (1)...(19): siRNA sense strand
gcucaaguuugcccggaaa

SEQ ID NO: 1396875 - RNA, 19 nt, Homo sapiens
  misc_RNA (1)...(19): siRNA sense strand
accgcaagcugcagaauuu

SEQ ID NO: 1396876 - RNA, 19 nt, Homo sapiens
  misc_RNA (1)...(19): siRNA sense strand
ggcagaagcacuuugagaa

SEQ ID NO: 1396877 - RNA, 19 nt, Homo sapiens
  misc_RNA (1)...(19): siRNA sense strand
caacgucuuugccacaucu

SEQ ID NO: 1396878 - RNA, 19 nt, Homo sapiens
  misc_RNA (1)...(19): siRNA sense strand
ggaagcugcugggcucugu

SEQ ID NO: 1396879 - RNA, 19 nt, Homo sapiens
  misc_RNA (1)...(19): siRNA sense strand
gcagaagcacuuugagaag

SEQ ID NO: 1396880 - RNA, 19 nt, Homo sapiens
  misc_RNA (1)...(19): siRNA sense strand
ggucuggguuugcccugaa

SEQ ID NO: 1396881 - RNA, 19 nt, Homo sapiens
  misc_RNA (1)...(19): siRNA sense strand
gaaaccguucugugugauu

SEQ ID NO: 1396882 - RNA, 19 nt, Homo sapiens
  misc_RNA (1)...(19): siRNA sense strand
gcugggcucuguggucuau

SEQ ID NO: 1396883 - RNA, 19 nt, Homo sapiens
  misc_RNA (1)...(19): siRNA sense strand
gggagaacgaccacuuuga

SEQ ID NO: 1396884 - RNA, 19 nt, Homo sapiens
  misc_RNA (1)...(19): siRNA sense strand
ggaaaccguucugugugau

SEQ ID NO: 1396885 - RNA, 19 nt, Homo sapiens
  misc_RNA (1)...(19): siRNA sense strand
gcacaggcagaagcacuuu

SEQ ID NO: 1396886 - RNA, 19 nt, Homo sapiens
  misc_RNA (1)...(19): siRNA sense strand
aaaccguucugugugauug

SEQ ID NO: 1396887 - RNA, 19 nt, Homo sapiens
  misc_RNA (1)...(19): siRNA sense strand
ccacguggcaguacuacga

SEQ ID NO: 1396888 - RNA, 19 nt, Homo sapiens
  misc_RNA (1)...(19): siRNA sense strand
ggagaacgaccacuuugac

SEQ ID NO: 1396889 - RNA, 19 nt, Homo sapiens
  misc_RNA (1)...(19): siRNA sense strand
ccucguuccugguguacuu

SEQ ID NO: 1396890 - RNA, 19 nt, Homo sapiens
  misc_RNA (1)...(19): siRNA sense strand
gagaacgaccacuuugaca

SEQ ID NO: 1396891 - RNA, 19 nt, Homo sapiens
  misc_RNA (1)...(19): siRNA sense strand
agaauuuccucuacaacgu

SEQ ID NO: 1396892 - RNA, 19 nt, Homo sapiens
  misc_RNA (1)...(19): siRNA sense strand
gggagaagaagcugaaggu

SEQ ID NO: 1396893 - RNA, 19 nt, Homo sapiens
  misc_RNA (1)...(19): siRNA sense strand
caucaaggaguaugagaag

SEQ ID NO: 1396894 - RNA, 19 nt, Homo sapiens
  misc_RNA (1)...(19): siRNA sense strand
ugcagaauuuccucuacaa

SEQ ID NO: 1396895 - RNA, 19 nt, Homo sapiens
  misc_RNA (1)...(19): siRNA sense strand
ugacuaucgugguguuugg

SEQ ID NO: 1396896 - RNA, 19 nt, Homo sapiens
  misc_RNA (1)...(19): siRNA sense strand
agaagcacuuugagaagag

SEQ ID NO: 1396897 - RNA, 19 nt, Homo sapiens
  misc_RNA (1)...(19): siRNA sense strand
gugcucaucgccuccauug

SEQ ID NO: 1396898 - RNA, 19 nt, Homo sapiens
  misc_RNA (1)...(19): siRNA sense strand
gcugcagaauuuccucuac

SEQ ID NO: 1396899 - RNA, 19 nt, Homo sapiens
  misc_RNA (1)...(19): siRNA sense strand
uacaucggcuuccuuuguc

SEQ ID NO: 1396900 - RNA, 19 nt, Homo sapiens
  misc_RNA (1)...(19): siRNA sense strand
uuuccaccaucaaggagua

SEQ ID NO: 1396901 - RNA, 19 nt, Homo sapiens
  misc_RNA (1)...(19): siRNA sense strand
gcugggcguucaucuacca

SEQ ID NO: 1396902 - RNA, 19 nt, Homo sapiens
  misc_RNA (1)...(19): siRNA sense strand
ucaaggaguaugagaagag

SEQ ID NO: 1396903 - RNA, 19 nt, Homo sapiens
  misc_RNA (1)...(19): siRNA sense strand
cugcagaauuuccucuaca

SEQ ID NO: 1396904 - RNA, 19 nt, Homo sapiens
  misc_RNA (1)...(19): siRNA sense strand
ccaucaaggaguaugagaa

SEQ ID NO: 1396905 - RNA, 19 nt, Homo sapiens
  misc_RNA (1)...(19): siRNA sense strand
acaggcagaagcacuuuga

SEQ ID NO: 1396906 - RNA, 19 nt, Homo sapiens
  misc_RNA (1)...(19): siRNA sense strand
ugaucacgcugaccaccau

SEQ ID NO: 1396907 - RNA, 19 nt, Homo sapiens
  misc_RNA (1)...(19): siRNA sense strand
ccaccaucaaggaguauga

SEQ ID NO: 1396908 - RNA, 19 nt, Homo sapiens
  misc_RNA (1)...(19): siRNA sense strand
gcggcagcauccucagcaa

SEQ ID NO: 1396909 - RNA, 19 nt, Homo sapiens
  misc_RNA (1)...(19): siRNA sense strand
cagaagcacuuugagaaga

SEQ ID NO: 1396910 - RNA, 19 nt, Homo sapiens
  misc_RNA (1)...(19): siRNA sense strand
guacaucggcuuccuuugu

SEQ ID NO: 1396911 - RNA, 19 nt, Homo sapiens
  misc_RNA (1)...(19): siRNA sense strand
cggaaaccguucuguguga

SEQ ID NO: 1396912 - RNA, 19 nt, Homo sapiens
  misc_RNA (1)...(19): siRNA sense strand
gcucaaguuugcccggaaa

SEQ ID NO: 1396913 - RNA, 19 nt, Homo sapiens
  misc_RNA (1)...(19): siRNA sense strand
accgcaagcugcagaauuu

SEQ ID NO: 1396914 - RNA, 19 nt, Homo sapiens
  misc_RNA (1)...(19): siRNA sense strand
ggcagaagcacuuugagaa

SEQ ID NO: 1396915 - RNA, 19 nt, Homo sapiens
  misc_RNA (1)...(19): siRNA sense strand
caacgucuuugccacaucu

SEQ ID NO: 1396916 - RNA, 19 nt, Homo sapiens
  misc_RNA (1)...(19): siRNA sense strand
ggaagcugcugggcucugu

SEQ ID NO: 1396917 - RNA, 19 nt, Homo sapiens
  misc_RNA (1)...(19): siRNA sense strand
gcagaagcacuuugagaag

SEQ ID NO: 1396918 - RNA, 19 nt, Homo sapiens
  misc_RNA (1)...(19): siRNA sense strand
ggucuggguuugcccugaa

SEQ ID NO: 1396919 - RNA, 19 nt, Homo sapiens
  misc_RNA (1)...(19): siRNA sense strand
gaaaccguucugugugauu

SEQ ID NO: 1396920 - RNA, 19 nt, Homo sapiens
  misc_RNA (1)...(19): siRNA sense strand
gcugggcucuguggucuau

SEQ ID NO: 1396921 - RNA, 19 nt, Homo sapiens
  misc_RNA (1)...(19): siRNA sense strand
gggagaacgaccacuuuga

SEQ ID NO: 1396922 - RNA, 19 nt, Homo sapiens
  misc_RNA (1)...(19): siRNA sense strand
ggaaaccguucugugugau

SEQ ID NO: 1396923 - RNA, 19 nt, Homo sapiens
  misc_RNA (1)...(19): siRNA sense strand
gcacaggcagaagcacuuu

SEQ ID NO: 1396924 - RNA, 19 nt, Homo sapiens
  misc_RNA (1)...(19): siRNA sense strand
aaaccguucugugugauug

SEQ ID NO: 1396925 - RNA, 19 nt, Homo sapiens
  misc_RNA (1)...(19): siRNA sense strand
ccacguggcaguacuacga

SEQ ID NO: 1396926 - RNA, 19 nt, Homo sapiens
  misc_RNA (1)...(19): siRNA sense strand
ggagaacgaccacuuugac

SEQ ID NO: 1396927 - RNA, 19 nt, Homo sapiens
  misc_RNA (1)...(19): siRNA sense strand
ccucguuccugguguacuu

SEQ ID NO: 1396928 - RNA, 19 nt, Homo sapiens
  misc_RNA (1)...(19): siRNA sense strand
gagaacgaccacuuugaca

SEQ ID NO: 1396929 - RNA, 19 nt, Homo sapiens
  misc_RNA (1)...(19): siRNA sense strand
agaauuuccucuacaacgu

SEQ ID NO: 1396930 - RNA, 19 nt, Homo sapiens
  misc_RNA (1)...(19): siRNA sense strand
gggagaagaagcugaaggu

SEQ ID NO: 1396931 - RNA, 19 nt, Homo sapiens
  misc_RNA (1)...(19): siRNA sense strand
caucaaggaguaugagaag

SEQ ID NO: 1396932 - RNA, 19 nt, Homo sapiens
  misc_RNA (1)...(19): siRNA sense strand
ugcagaauuuccucuacaa

SEQ ID NO: 1396933 - RNA, 19 nt, Homo sapiens
  misc_RNA (1)...(19): siRNA sense strand
ugacuaucgugguguuugg

SEQ ID NO: 1396934 - RNA, 19 nt, Homo sapiens
  misc_RNA (1)...(19): siRNA sense strand
agaagcacuuugagaagag

SEQ ID NO: 1396935 - RNA, 19 nt, Homo sapiens
  misc_RNA (1)...(19): siRNA sense strand
gugcucaucgccuccauug

SEQ ID NO: 1396936 - RNA, 19 nt, Homo sapiens
  misc_RNA (1)...(19): siRNA sense strand
gcugcagaauuuccucuac

SEQ ID NO: 1396937 - RNA, 19 nt, Homo sapiens
  misc_RNA (1)...(19): siRNA sense strand
uacaucggcuuccuuuguc

SEQ ID NO: 1396938 - RNA, 19 nt, Homo sapiens
  misc_RNA (1)...(19): siRNA sense strand
uuuccaccaucaaggagua

SEQ ID NO: 1396939 - RNA, 19 nt, Homo sapiens
  misc_RNA (1)...(19): siRNA sense strand
gcugggcguucaucuacca

SEQ ID NO: 1396940 - RNA, 19 nt, Homo sapiens
  misc_RNA (1)...(19): siRNA sense strand
ucaaggaguaugagaagag

SEQ ID NO: 1396941 - RNA, 19 nt, Homo sapiens
  misc_RNA (1)...(19): siRNA sense strand
cugcagaauuuccucuaca

SEQ ID NO: 1396942 - RNA, 19 nt, Homo sapiens
  misc_RNA (1)...(19): siRNA sense strand
ccaucaaggaguaugagaa

SEQ ID NO: 1396943 - RNA, 19 nt, Homo sapiens
  misc_RNA (1)...(19): siRNA sense strand
acaggcagaagcacuuuga

SEQ ID NO: 1396944 - RNA, 19 nt, Homo sapiens
  misc_RNA (1)...(19): siRNA sense strand
ugaucacgcugaccaccau

SEQ ID NO: 1396945 - RNA, 19 nt, Homo sapiens
  misc_RNA (1)...(19): siRNA sense strand
ccaccaucaaggaguauga

SEQ ID NO: 1396946 - RNA, 19 nt, Homo sapiens
  misc_RNA (1)...(19): siRNA sense strand
gcggcagcauccucagcaa

SEQ ID NO: 1396947 - RNA, 19 nt, Homo sapiens
  misc_RNA (1)...(19): siRNA sense strand
cagaagcacuuugagaaga

SEQ ID NO: 1396948 - RNA, 19 nt, Homo sapiens
  misc_RNA (1)...(19): siRNA sense strand
guacaucggcuuccuuugu

SEQ ID NO: 1396949 - RNA, 19 nt, Homo sapiens
  misc_RNA (1)...(19): siRNA sense strand
cggaaaccguucuguguga

SEQ ID NO: 1396950 - RNA, 19 nt, Homo sapiens
  misc_RNA (1)...(19): siRNA sense strand
gcucaaguuugcccggaaa

SEQ ID NO: 1396951 - RNA, 19 nt, Homo sapiens
  misc_RNA (1)...(19): siRNA sense strand
accgcaagcugcagaauuu

SEQ ID NO: 1396952 - RNA, 19 nt, Homo sapiens
  misc_RNA (1)...(19): siRNA sense strand
ggcagaagcacuuugagaa

SEQ ID NO: 1396953 - RNA, 19 nt, Homo sapiens
  misc_RNA (1)...(19): siRNA sense strand
caacgucuuugccacaucu

SEQ ID NO: 1396954 - RNA, 19 nt, Homo sapiens
  misc_RNA (1)...(19): siRNA sense strand
ggaagcugcugggcucugu

SEQ ID NO: 1396955 - RNA, 19 nt, Homo sapiens
  misc_RNA (1)...(19): siRNA sense strand
gcagaagcacuuugagaag

SEQ ID NO: 1396956 - RNA, 19 nt, Homo sapiens
  misc_RNA (1)...(19): siRNA sense strand
ggucuggguuugcccugaa

SEQ ID NO: 1396957 - RNA, 19 nt, Homo sapiens
  misc_RNA (1)...(19): siRNA sense strand
gaaaccguucugugugauu

SEQ ID NO: 1396958 - RNA, 19 nt, Homo sapiens
  misc_RNA (1)...(19): siRNA sense strand
gcugggcucuguggucuau

SEQ ID NO: 1396959 - RNA, 19 nt, Homo sapiens
  misc_RNA (1)...(19): siRNA sense strand
gggagaacgaccacuuuga

SEQ ID NO: 1396960 - RNA, 19 nt, Homo sapiens
  misc_RNA (1)...(19): siRNA sense strand
ggaaaccguucugugugau

SEQ ID NO: 1396961 - RNA, 19 nt, Homo sapiens
  misc_RNA (1)...(19): siRNA sense strand
gcacaggcagaagcacuuu

SEQ ID NO: 1396962 - RNA, 19 nt, Homo sapiens
  misc_RNA (1)...(19): siRNA sense strand
aaaccguucugugugauug

SEQ ID NO: 1396963 - RNA, 19 nt, Homo sapiens
  misc_RNA (1)...(19): siRNA sense strand
ccacguggcaguacuacga

SEQ ID NO: 1396964 - RNA, 19 nt, Homo sapiens
  misc_RNA (1)...(19): siRNA sense strand
ggagaacgaccacuuugac

SEQ ID NO: 1396965 - RNA, 19 nt, Homo sapiens
  misc_RNA (1)...(19): siRNA sense strand
ccucguuccugguguacuu

SEQ ID NO: 1396966 - RNA, 19 nt, Homo sapiens
  misc_RNA (1)...(19): siRNA sense strand
gagaacgaccacuuugaca

SEQ ID NO: 1396967 - RNA, 19 nt, Homo sapiens
  misc_RNA (1)...(19): siRNA sense strand
agaauuuccucuacaacgu

SEQ ID NO: 1396968 - RNA, 19 nt, Homo sapiens
  misc_RNA (1)...(19): siRNA sense strand
gggagaagaagcugaaggu

SEQ ID NO: 1396969 - RNA, 19 nt, Homo sapiens
  misc_RNA (1)...(19): siRNA sense strand
caucaaggaguaugagaag

SEQ ID NO: 1396970 - RNA, 19 nt, Homo sapiens
  misc_RNA (1)...(19): siRNA sense strand
ugcagaauuuccucuacaa

SEQ ID NO: 1396971 - RNA, 19 nt, Homo sapiens
  misc_RNA (1)...(19): siRNA sense strand
ugacuaucgugguguuugg

SEQ ID NO: 1396972 - RNA, 19 nt, Homo sapiens
  misc_RNA (1)...(19): siRNA sense strand
agaagcacuuugagaagag

SEQ ID NO: 1396973 - RNA, 19 nt, Homo sapiens
  misc_RNA (1)...(19): siRNA sense strand
gugcucaucgccuccauug

SEQ ID NO: 1396974 - RNA, 19 nt, Homo sapiens
  misc_RNA (1)...(19): siRNA sense strand
gcugcagaauuuccucuac

SEQ ID NO: 1396975 - RNA, 19 nt, Homo sapiens
  misc_RNA (1)...(19): siRNA sense strand
uacaucggcuuccuuuguc

SEQ ID NO: 1396976 - RNA, 19 nt, Homo sapiens
  misc_RNA (1)...(19): siRNA sense strand
uuuccaccaucaaggagua

SEQ ID NO: 1396977 - RNA, 19 nt, Homo sapiens
  misc_RNA (1)...(19): siRNA sense strand
gcugggcguucaucuacca

SEQ ID NO: 1396978 - RNA, 19 nt, Homo sapiens
  misc_RNA (1)...(19): siRNA sense strand
ucaaggaguaugagaagag

SEQ ID NO: 1396979 - RNA, 19 nt, Homo sapiens
  misc_RNA (1)...(19): siRNA sense strand
cugcagaauuuccucuaca

SEQ ID NO: 1396980 - RNA, 19 nt, Homo sapiens
  misc_RNA (1)...(19): siRNA sense strand
ccaucaaggaguaugagaa

SEQ ID NO: 1396981 - RNA, 19 nt, Homo sapiens
  misc_RNA (1)...(19): siRNA sense strand
acaggcagaagcacuuuga

SEQ ID NO: 1396982 - RNA, 19 nt, Homo sapiens
  misc_RNA (1)...(19): siRNA sense strand
ugaucacgcugaccaccau

SEQ ID NO: 1396983 - RNA, 19 nt, Homo sapiens
  misc_RNA (1)...(19): siRNA sense strand
ccaccaucaaggaguauga

SEQ ID NO: 1396984 - RNA, 19 nt, Homo sapiens
  misc_RNA (1)...(19): siRNA sense strand
gcggcagcauccucagcaa

SEQ ID NO: 1396985 - RNA, 19 nt, Homo sapiens
  misc_RNA (1)...(19): siRNA sense strand
cagaagcacuuugagaaga

SEQ ID NO: 1396986 - RNA, 19 nt, Homo sapiens
  misc_RNA (1)...(19): siRNA sense strand
guacaucggcuuccuuugu

SEQ ID NO: 1396987 - RNA, 19 nt, Homo sapiens
  misc_RNA (1)...(19): siRNA sense strand
cggaaaccguucuguguga

SEQ ID NO: 1396988 - RNA, 19 nt, Homo sapiens
  misc_RNA (1)...(19): siRNA sense strand
gcucaaguuugcccggaaa

SEQ ID NO: 1396989 - RNA, 19 nt, Homo sapiens
  misc_RNA (1)...(19): siRNA sense strand
accgcaagcugcagaauuu

SEQ ID NO: 1396990 - RNA, 19 nt, Homo sapiens
  misc_RNA (1)...(19): siRNA sense strand
ggcagaagcacuuugagaa

SEQ ID NO: 1396991 - RNA, 19 nt, Homo sapiens
  misc_RNA (1)...(19): siRNA sense strand
caacgucuuugccacaucu

SEQ ID NO: 1396992 - RNA, 19 nt, Homo sapiens
  misc_RNA (1)...(19): siRNA sense strand
ggaagcugcugggcucugu

SEQ ID NO: 1396993 - RNA, 19 nt, Homo sapiens
  misc_RNA (1)...(19): siRNA sense strand
gcagaagcacuuugagaag

SEQ ID NO: 1396994 - RNA, 19 nt, Homo sapiens
  misc_RNA (1)...(19): siRNA sense strand
ggucuggguuugcccugaa

SEQ ID NO: 1396995 - RNA, 19 nt, Homo sapiens
  misc_RNA (1)...(19): siRNA sense strand
gaaaccguucugugugauu

SEQ ID NO: 1396996 - RNA, 19 nt, Homo sapiens
  misc_RNA (1)...(19): siRNA sense strand
gcugggcucuguggucuau

SEQ ID NO: 1396997 - RNA, 19 nt, Homo sapiens
  misc_RNA (1)...(19): siRNA sense strand
gggagaacgaccacuuuga

SEQ ID NO: 1396998 - RNA, 19 nt, Homo sapiens
  misc_RNA (1)...(19): siRNA sense strand
ggaaaccguucugugugau

SEQ ID NO: 1396999 - RNA, 19 nt, Homo sapiens
  misc_RNA (1)...(19): siRNA sense strand
gcacaggcagaagcacuuu

SEQ ID NO: 1397000 - RNA, 19 nt, Homo sapiens
  misc_RNA (1)...(19): siRNA sense strand
aaaccguucugugugauug

SEQ ID NO: 1397001 - RNA, 19 nt, Homo sapiens
  misc_RNA (1)...(19): siRNA sense strand
ccacguggcaguacuacga

SEQ ID NO: 1397002 - RNA, 19 nt, Homo sapiens
  misc_RNA (1)...(19): siRNA sense strand
ggagaacgaccacuuugac

SEQ ID NO: 1397003 - RNA, 19 nt, Homo sapiens
  misc_RNA (1)...(19): siRNA sense strand
ccucguuccugguguacuu

SEQ ID NO: 1397004 - RNA, 19 nt, Homo sapiens
  misc_RNA (1)...(19): siRNA sense strand
gagaacgaccacuuugaca

SEQ ID NO: 1397005 - RNA, 19 nt, Homo sapiens
  misc_RNA (1)...(19): siRNA sense strand
agaauuuccucuacaacgu

SEQ ID NO: 1397006 - RNA, 19 nt, Homo sapiens
  misc_RNA (1)...(19): siRNA sense strand
gggagaagaagcugaaggu

SEQ ID NO: 1397007 - RNA, 19 nt, Homo sapiens
  misc_RNA (1)...(19): siRNA sense strand
caucaaggaguaugagaag

SEQ ID NO: 1397008 - RNA, 19 nt, Homo sapiens
  misc_RNA (1)...(19): siRNA sense strand
ugcagaauuuccucuacaa

SEQ ID NO: 1397009 - RNA, 19 nt, Homo sapiens
  misc_RNA (1)...(19): siRNA sense strand
ugacuaucgugguguuugg

SEQ ID NO: 1397010 - RNA, 19 nt, Homo sapiens
  misc_RNA (1)...(19): siRNA sense strand
agaagcacuuugagaagag

SEQ ID NO: 1397011 - RNA, 19 nt, Homo sapiens
  misc_RNA (1)...(19): siRNA sense strand
gugcucaucgccuccauug

SEQ ID NO: 1397012 - RNA, 19 nt, Homo sapiens
  misc_RNA (1)...(19): siRNA sense strand
gcugcagaauuuccucuac

SEQ ID NO: 1397013 - RNA, 19 nt, Homo sapiens
  misc_RNA (1)...(19): siRNA sense strand
uacaucggcuuccuuuguc

SEQ ID NO: 1397014 - RNA, 19 nt, Homo sapiens
  misc_RNA (1)...(19): siRNA sense strand
uuuccaccaucaaggagua

SEQ ID NO: 1397015 - RNA, 19 nt, Homo sapiens
  misc_RNA (1)...(19): siRNA sense strand
gcugggcguucaucuacca

SEQ ID NO: 1397016 - RNA, 19 nt, Homo sapiens
  misc_RNA (1)...(19): siRNA sense strand
ucaaggaguaugagaagag

SEQ ID NO: 1397017 - RNA, 19 nt, Homo sapiens
  misc_RNA (1)...(19): siRNA sense strand
cugcagaauuuccucuaca

SEQ ID NO: 1397018 - RNA, 19 nt, Homo sapiens
  misc_RNA (1)...(19): siRNA sense strand
ccaucaaggaguaugagaa

SEQ ID NO: 1397019 - RNA, 19 nt, Homo sapiens
  misc_RNA (1)...(19): siRNA sense strand
acaggcagaagcacuuuga

SEQ ID NO: 1397020 - RNA, 19 nt, Homo sapiens
  misc_RNA (1)...(19): siRNA sense strand
ugaucacgcugaccaccau

SEQ ID NO: 1397021 - RNA, 19 nt, Homo sapiens
  misc_RNA (1)...(19): siRNA sense strand
ccaccaucaaggaguauga

SEQ ID NO: 1397022 - RNA, 19 nt, Homo sapiens
  misc_RNA (1)...(19): siRNA sense strand
gcggcagcauccucagcaa

SEQ ID NO: 1397023 - RNA, 19 nt, Homo sapiens
  misc_RNA (1)...(19): siRNA sense strand
cagaagcacuuugagaaga

SEQ ID NO: 1397024 - RNA, 19 nt, Homo sapiens
  misc_RNA (1)...(19): siRNA sense strand
guacaucggcuuccuuugu

SEQ ID NO: 1397025 - RNA, 19 nt, Homo sapiens
  misc_RNA (1)...(19): siRNA sense strand
cggaaaccguucuguguga

SEQ ID NO: 1397026 - RNA, 19 nt, Homo sapiens
  misc_RNA (1)...(19): siRNA sense strand
gcucaaguuugcccggaaa

SEQ ID NO: 1397027 - RNA, 19 nt, Homo sapiens
  misc_RNA (1)...(19): siRNA sense strand
accgcaagcugcagaauuu

SEQ ID NO: 1397028 - RNA, 19 nt, Homo sapiens
  misc_RNA (1)...(19): siRNA sense strand
ggcagaagcacuuugagaa

SEQ ID NO: 1397029 - RNA, 19 nt, Homo sapiens
  misc_RNA (1)...(19): siRNA sense strand
caacgucuuugccacaucu

SEQ ID NO: 1397030 - RNA, 19 nt, Homo sapiens
  misc_RNA (1)...(19): siRNA sense strand
ggaagcugcugggcucugu

SEQ ID NO: 1397031 - RNA, 19 nt, Homo sapiens
  misc_RNA (1)...(19): siRNA sense strand
gcagaagcacuuugagaag

SEQ ID NO: 1397032 - RNA, 19 nt, Homo sapiens
  misc_RNA (1)...(19): siRNA sense strand
ggucuggguuugcccugaa

SEQ ID NO: 1397033 - RNA, 19 nt, Homo sapiens
  misc_RNA (1)...(19): siRNA sense strand
gaaaccguucugugugauu

SEQ ID NO: 1397034 - RNA, 19 nt, Homo sapiens
  misc_RNA (1)...(19): siRNA sense strand
gcugggcucuguggucuau

SEQ ID NO: 1397035 - RNA, 19 nt, Homo sapiens
  misc_RNA (1)...(19): siRNA sense strand
gggagaacgaccacuuuga

SEQ ID NO: 1397036 - RNA, 19 nt, Homo sapiens
  misc_RNA (1)...(19): siRNA sense strand
ggaaaccguucugugugau

SEQ ID NO: 1397037 - RNA, 19 nt, Homo sapiens
  misc_RNA (1)...(19): siRNA sense strand
gcacaggcagaagcacuuu

SEQ ID NO: 1397038 - RNA, 19 nt, Homo sapiens
  misc_RNA (1)...(19): siRNA sense strand
aaaccguucugugugauug

SEQ ID NO: 1397039 - RNA, 19 nt, Homo sapiens
  misc_RNA (1)...(19): siRNA sense strand
ccacguggcaguacuacga

SEQ ID NO: 1397040 - RNA, 19 nt, Homo sapiens
  misc_RNA (1)...(19): siRNA sense strand
ggagaacgaccacuuugac

SEQ ID NO: 1397041 - RNA, 19 nt, Homo sapiens
  misc_RNA (1)...(19): siRNA sense strand
ccucguuccugguguacuu

SEQ ID NO: 1397042 - RNA, 19 nt, Homo sapiens
  misc_RNA (1)...(19): siRNA sense strand
gagaacgaccacuuugaca

SEQ ID NO: 1397043 - RNA, 19 nt, Homo sapiens
  misc_RNA (1)...(19): siRNA sense strand
agaauuuccucuacaacgu

SEQ ID NO: 1397044 - RNA, 19 nt, Homo sapiens
  misc_RNA (1)...(19): siRNA sense strand
gggagaagaagcugaaggu

SEQ ID NO: 1397045 - RNA, 19 nt, Homo sapiens
  misc_RNA (1)...(19): siRNA sense strand
caucaaggaguaugagaag

SEQ ID NO: 1397046 - RNA, 19 nt, Homo sapiens
  misc_RNA (1)...(19): siRNA sense strand
ugcagaauuuccucuacaa

SEQ ID NO: 1397047 - RNA, 19 nt, Homo sapiens
  misc_RNA (1)...(19): siRNA sense strand
ugacuaucgugguguuugg

SEQ ID NO: 1397048 - RNA, 19 nt, Homo sapiens
  misc_RNA (1)...(19): siRNA sense strand
agaagcacuuugagaagag

SEQ ID NO: 1397049 - RNA, 19 nt, Homo sapiens
  misc_RNA (1)...(19): siRNA sense strand
gugcucaucgccuccauug

SEQ ID NO: 1397050 - RNA, 19 nt, Homo sapiens
  misc_RNA (1)...(19): siRNA sense strand
gcugcagaauuuccucuac

SEQ ID NO: 1397051 - RNA, 19 nt, Homo sapiens
  misc_RNA (1)...(19): siRNA sense strand
uacaucggcuuccuuuguc

SEQ ID NO: 1397052 - RNA, 19 nt, Homo sapiens
  misc_RNA (1)...(19): siRNA sense strand
uuuccaccaucaaggagua

SEQ ID NO: 1397053 - RNA, 19 nt, Homo sapiens
  misc_RNA (1)...(19): siRNA sense strand
gcugggcguucaucuacca

SEQ ID NO: 1397054 - RNA, 19 nt, Homo sapiens
  misc_RNA (1)...(19): siRNA sense strand
ucaaggaguaugagaagag

SEQ ID NO: 1397055 - RNA, 19 nt, Homo sapiens
  misc_RNA (1)...(19): siRNA sense strand
cugcagaauuuccucuaca

SEQ ID NO: 1397056 - RNA, 19 nt, Homo sapiens
  misc_RNA (1)...(19): siRNA sense strand
ccaucaaggaguaugagaa

SEQ ID NO: 1397057 - RNA, 19 nt, Homo sapiens
  misc_RNA (1)...(19): siRNA sense strand
acaggcagaagcacuuuga

SEQ ID NO: 1397058 - RNA, 19 nt, Homo sapiens
  misc_RNA (1)...(19): siRNA sense strand
ugaucacgcugaccaccau

SEQ ID NO: 1397059 - RNA, 19 nt, Homo sapiens
  misc_RNA (1)...(19): siRNA sense strand
ccaccaucaaggaguauga

SEQ ID NO: 1397060 - RNA, 19 nt, Homo sapiens
  misc_RNA (1)...(19): siRNA sense strand
gcggcagcauccucagcaa

SEQ ID NO: 1397061 - RNA, 19 nt, Homo sapiens
  misc_RNA (1)...(19): siRNA sense strand
cagaagcacuuugagaaga

SEQ ID NO: 1397062 - RNA, 19 nt, Homo sapiens
  misc_RNA (1)...(19): siRNA sense strand
guacaucggcuuccuuugu

SEQ ID NO: 1397063 - RNA, 19 nt, Homo sapiens
  misc_RNA (1)...(19): siRNA sense strand
cggaaaccguucuguguga

SEQ ID NO: 1397064 - RNA, 19 nt, Homo sapiens
  misc_RNA (1)...(19): siRNA sense strand
gcucaaguuugcccggaaa

SEQ ID NO: 1397065 - RNA, 19 nt, Homo sapiens
  misc_RNA (1)...(19): siRNA sense strand
accgcaagcugcagaauuu

SEQ ID NO: 1397066 - RNA, 19 nt, Homo sapiens
  misc_RNA (1)...(19): siRNA sense strand
ggcagaagcacuuugagaa

SEQ ID NO: 1397067 - RNA, 19 nt, Homo sapiens
  misc_RNA (1)...(19): siRNA sense strand
caacgucuuugccacaucu

SEQ ID NO: 1397068 - RNA, 19 nt, Homo sapiens
  misc_RNA (1)...(19): siRNA sense strand
ggaagcugcugggcucugu

SEQ ID NO: 1397069 - RNA, 19 nt, Homo sapiens
  misc_RNA (1)...(19): siRNA sense strand
gcagaagcacuuugagaag

SEQ ID NO: 1397070 - RNA, 19 nt, Homo sapiens
  misc_RNA (1)...(19): siRNA sense strand
ggucuggguuugcccugaa

SEQ ID NO: 1397071 - RNA, 19 nt, Homo sapiens
  misc_RNA (1)...(19): siRNA sense strand
gaaaccguucugugugauu

SEQ ID NO: 1397072 - RNA, 19 nt, Homo sapiens
  misc_RNA (1)...(19): siRNA sense strand
gcugggcucuguggucuau

SEQ ID NO: 1397073 - RNA, 19 nt, Homo sapiens
  misc_RNA (1)...(19): siRNA sense strand
gggagaacgaccacuuuga

SEQ ID NO: 1397074 - RNA, 19 nt, Homo sapiens
  misc_RNA (1)...(19): siRNA sense strand
ggaaaccguucugugugau

SEQ ID NO: 1397075 - RNA, 19 nt, Homo sapiens
  misc_RNA (1)...(19): siRNA sense strand
gcacaggcagaagcacuuu

SEQ ID NO: 1397076 - RNA, 19 nt, Homo sapiens
  misc_RNA (1)...(19): siRNA sense strand
aaaccguucugugugauug

SEQ ID NO: 1397077 - RNA, 19 nt, Homo sapiens
  misc_RNA (1)...(19): siRNA sense strand
ccacguggcaguacuacga

SEQ ID NO: 1397078 - RNA, 19 nt, Homo sapiens
  misc_RNA (1)...(19): siRNA sense strand
ggagaacgaccacuuugac

SEQ ID NO: 1397079 - RNA, 19 nt, Homo sapiens
  misc_RNA (1)...(19): siRNA sense strand
ccucguuccugguguacuu

SEQ ID NO: 1397080 - RNA, 19 nt, Homo sapiens
  misc_RNA (1)...(19): siRNA sense strand
gagaacgaccacuuugaca

SEQ ID NO: 1397081 - RNA, 19 nt, Homo sapiens
  misc_RNA (1)...(19): siRNA sense strand
agaauuuccucuacaacgu

SEQ ID NO: 1397082 - RNA, 19 nt, Homo sapiens
  misc_RNA (1)...(19): siRNA sense strand
gggagaagaagcugaaggu

SEQ ID NO: 1397083 - RNA, 19 nt, Homo sapiens
  misc_RNA (1)...(19): siRNA sense strand
caucaaggaguaugagaag

SEQ ID NO: 1397084 - RNA, 19 nt, Homo sapiens
  misc_RNA (1)...(19): siRNA sense strand
ugcagaauuuccucuacaa

SEQ ID NO: 1397085 - RNA, 19 nt, Homo sapiens
  misc_RNA (1)...(19): siRNA sense strand
ugacuaucgugguguuugg

SEQ ID NO: 1397086 - RNA, 19 nt, Homo sapiens
  misc_RNA (1)...(19): siRNA sense strand
agaagcacuuugagaagag

SEQ ID NO: 1397087 - RNA, 19 nt, Homo sapiens
  misc_RNA (1)...(19): siRNA sense strand
gugcucaucgccuccauug

SEQ ID NO: 1397088 - RNA, 19 nt, Homo sapiens
  misc_RNA (1)...(19): siRNA sense strand
gcugcagaauuuccucuac

SEQ ID NO: 1397089 - RNA, 19 nt, Homo sapiens
  misc_RNA (1)...(19): siRNA sense strand
uacaucggcuuccuuuguc

SEQ ID NO: 1397090 - RNA, 19 nt, Homo sapiens
  misc_RNA (1)...(19): siRNA sense strand
uuuccaccaucaaggagua

SEQ ID NO: 1397091 - RNA, 19 nt, Homo sapiens
  misc_RNA (1)...(19): siRNA sense strand
gcugggcguucaucuacca

SEQ ID NO: 1397092 - RNA, 19 nt, Homo sapiens
  misc_RNA (1)...(19): siRNA sense strand
ucaaggaguaugagaagag

SEQ ID NO: 1397093 - RNA, 19 nt, Homo sapiens
  misc_RNA (1)...(19): siRNA sense strand
cugcagaauuuccucuaca

SEQ ID NO: 1397094 - RNA, 19 nt, Homo sapiens
  misc_RNA (1)...(19): siRNA sense strand
ccaucaaggaguaugagaa

SEQ ID NO: 1397095 - RNA, 19 nt, Homo sapiens
  misc_RNA (1)...(19): siRNA sense strand
acaggcagaagcacuuuga

SEQ ID NO: 1397096 - RNA, 19 nt, Homo sapiens
  misc_RNA (1)...(19): siRNA sense strand
ugaucacgcugaccaccau

SEQ ID NO: 1397097 - RNA, 19 nt, Homo sapiens
  misc_RNA (1)...(19): siRNA sense strand
ccaccaucaaggaguauga

SEQ ID NO: 1397098 - RNA, 19 nt, Homo sapiens
  misc_RNA (1)...(19): siRNA sense strand
gcggcagcauccucagcaa

SEQ ID NO: 1397099 - RNA, 19 nt, Homo sapiens
  misc_RNA (1)...(19): siRNA sense strand
cagaagcacuuugagaaga

SEQ ID NO: 1397100 - RNA, 19 nt, Homo sapiens
  misc_RNA (1)...(19): siRNA sense strand
guacaucggcuuccuuugu

SEQ ID NO: 1397101 - RNA, 19 nt, Homo sapiens
  misc_RNA (1)...(19): siRNA sense strand
cggaaaccguucuguguga

SEQ ID NO: 1397102 - RNA, 19 nt, Homo sapiens
  misc_RNA (1)...(19): siRNA sense strand
gcucaaguuugcccggaaa

SEQ ID NO: 1397103 - RNA, 19 nt, Homo sapiens
  misc_RNA (1)...(19): siRNA sense strand
accgcaagcugcagaauuu

SEQ ID NO: 1397104 - RNA, 19 nt, Homo sapiens
  misc_RNA (1)...(19): siRNA sense strand
ggcagaagcacuuugagaa

SEQ ID NO: 1397105 - RNA, 19 nt, Homo sapiens
  misc_RNA (1)...(19): siRNA sense strand
caacgucuuugccacaucu

SEQ ID NO: 1397106 - RNA, 19 nt, Homo sapiens
  misc_RNA (1)...(19): siRNA sense strand
ggaagcugcugggcucugu

SEQ ID NO: 1397107 - RNA, 19 nt, Homo sapiens
  misc_RNA (1)...(19): siRNA sense strand
gcagaagcacuuugagaag

SEQ ID NO: 1397108 - RNA, 19 nt, Homo sapiens
  misc_RNA (1)...(19): siRNA sense strand
ggucuggguuugcccugaa

SEQ ID NO: 1397109 - RNA, 19 nt, Homo sapiens
  misc_RNA (1)...(19): siRNA sense strand
gaaaccguucugugugauu

SEQ ID NO: 1397110 - RNA, 19 nt, Homo sapiens
  misc_RNA (1)...(19): siRNA sense strand
gcugggcucuguggucuau

SEQ ID NO: 1397111 - RNA, 19 nt, Homo sapiens
  misc_RNA (1)...(19): siRNA sense strand
gggagaacgaccacuuuga

SEQ ID NO: 1397112 - RNA, 19 nt, Homo sapiens
  misc_RNA (1)...(19): siRNA sense strand
ggaaaccguucugugugau

SEQ ID NO: 1397113 - RNA, 19 nt, Homo sapiens
  misc_RNA (1)...(19): siRNA sense strand
gcacaggcagaagcacuuu

SEQ ID NO: 1397114 - RNA, 19 nt, Homo sapiens
  misc_RNA (1)...(19): siRNA sense strand
aaaccguucugugugauug

SEQ ID NO: 1397115 - RNA, 19 nt, Homo sapiens
  misc_RNA (1)...(19): siRNA sense strand
ccacguggcaguacuacga

SEQ ID NO: 1397116 - RNA, 19 nt, Homo sapiens
  misc_RNA (1)...(19): siRNA sense strand
ggagaacgaccacuuugac

SEQ ID NO: 1397117 - RNA, 19 nt, Homo sapiens
  misc_RNA (1)...(19): siRNA sense strand
ccucguuccugguguacuu

SEQ ID NO: 1397118 - RNA, 19 nt, Homo sapiens
  misc_RNA (1)...(19): siRNA sense strand
gagaacgaccacuuugaca

SEQ ID NO: 1397119 - RNA, 19 nt, Homo sapiens
  misc_RNA (1)...(19): siRNA sense strand
agaauuuccucuacaacgu

SEQ ID NO: 1397120 - RNA, 19 nt, Homo sapiens
  misc_RNA (1)...(19): siRNA sense strand
gggagaagaagcugaaggu

SEQ ID NO: 1397121 - RNA, 19 nt, Homo sapiens
  misc_RNA (1)...(19): siRNA sense strand
caucaaggaguaugagaag

SEQ ID NO: 1397122 - RNA, 19 nt, Homo sapiens
  misc_RNA (1)...(19): siRNA sense strand
ugcagaauuuccucuacaa

SEQ ID NO: 1397123 - RNA, 19 nt, Homo sapiens
  misc_RNA (1)...(19): siRNA sense strand
ugacuaucgugguguuugg

SEQ ID NO: 1397124 - RNA, 19 nt, Homo sapiens
  misc_RNA (1)...(19): siRNA sense strand
agaagcacuuugagaagag

SEQ ID NO: 1397125 - RNA, 19 nt, Homo sapiens
  misc_RNA (1)...(19): siRNA sense strand
gugcucaucgccuccauug

SEQ ID NO: 1397126 - RNA, 19 nt, Homo sapiens
  misc_RNA (1)...(19): siRNA sense strand
gcugcagaauuuccucuac

SEQ ID NO: 1397127 - RNA, 19 nt, Homo sapiens
  misc_RNA (1)...(19): siRNA sense strand
uacaucggcuuccuuuguc

SEQ ID NO: 1397128 - RNA, 19 nt, Homo sapiens
  misc_RNA (1)...(19): siRNA sense strand
uuuccaccaucaaggagua

SEQ ID NO: 1397129 - RNA, 19 nt, Homo sapiens
  misc_RNA (1)...(19): siRNA sense strand
gcugggcguucaucuacca

SEQ ID NO: 1397130 - RNA, 19 nt, Homo sapiens
  misc_RNA (1)...(19): siRNA sense strand
ucaaggaguaugagaagag

SEQ ID NO: 1397131 - RNA, 19 nt, Homo sapiens
  misc_RNA (1)...(19): siRNA sense strand
cugcagaauuuccucuaca

SEQ ID NO: 1397132 - RNA, 19 nt, Homo sapiens
  misc_RNA (1)...(19): siRNA sense strand
ccaucaaggaguaugagaa

SEQ ID NO: 1397133 - RNA, 19 nt, Homo sapiens
  misc_RNA (1)...(19): siRNA sense strand
acaggcagaagcacuuuga

SEQ ID NO: 1397134 - RNA, 19 nt, Homo sapiens
  misc_RNA (1)...(19): siRNA sense strand
ugaucacgcugaccaccau

SEQ ID NO: 1397135 - RNA, 19 nt, Homo sapiens
  misc_RNA (1)...(19): siRNA sense strand
ccaccaucaaggaguauga

SEQ ID NO: 1397136 - RNA, 19 nt, Homo sapiens
  misc_RNA (1)...(19): siRNA sense strand
gcggcagcauccucagcaa

SEQ ID NO: 1397137 - RNA, 19 nt, Homo sapiens
  misc_RNA (1)...(19): siRNA sense strand
cagaagcacuuugagaaga

SEQ ID NO: 1397138 - RNA, 19 nt, Homo sapiens
  misc_RNA (1)...(19): siRNA sense strand
guacaucggcuuccuuugu

SEQ ID NO: 1397139 - RNA, 19 nt, Homo sapiens
  misc_RNA (1)...(19): siRNA sense strand
cggaaaccguucuguguga

SEQ ID NO: 1397140 - RNA, 19 nt, Homo sapiens
  misc_RNA (1)...(19): siRNA sense strand
gcucaaguuugcccggaaa

SEQ ID NO: 1397141 - RNA, 19 nt, Homo sapiens
  misc_RNA (1)...(19): siRNA sense strand
accgcaagcugcagaauuu

SEQ ID NO: 1397142 - RNA, 19 nt, Homo sapiens
  misc_RNA (1)...(19): siRNA sense strand
ggcagaagcacuuugagaa

SEQ ID NO: 1397143 - RNA, 19 nt, Homo sapiens
  misc_RNA (1)...(19): siRNA sense strand
caacgucuuugccacaucu

SEQ ID NO: 1397144 - RNA, 19 nt, Homo sapiens
  misc_RNA (1)...(19): siRNA sense strand
ggaagcugcugggcucugu

SEQ ID NO: 1397145 - RNA, 19 nt, Homo sapiens
  misc_RNA (1)...(19): siRNA sense strand
gcagaagcacuuugagaag

SEQ ID NO: 1397146 - RNA, 19 nt, Homo sapiens
  misc_RNA (1)...(19): siRNA sense strand
ggucuggguuugcccugaa

SEQ ID NO: 1397147 - RNA, 19 nt, Homo sapiens
  misc_RNA (1)...(19): siRNA sense strand
gaaaccguucugugugauu

SEQ ID NO: 1397148 - RNA, 19 nt, Homo sapiens
  misc_RNA (1)...(19): siRNA sense strand
gcugggcucuguggucuau

SEQ ID NO: 1397149 - RNA, 19 nt, Homo sapiens
  misc_RNA (1)...(19): siRNA sense strand
gggagaacgaccacuuuga

SEQ ID NO: 1397150 - RNA, 19 nt, Homo sapiens
  misc_RNA (1)...(19): siRNA sense strand
ggaaaccguucugugugau

SEQ ID NO: 1397151 - RNA, 19 nt, Homo sapiens
  misc_RNA (1)...(19): siRNA sense strand
gcacaggcagaagcacuuu

SEQ ID NO: 1397152 - RNA, 19 nt, Homo sapiens
  misc_RNA (1)...(19): siRNA sense strand
aaaccguucugugugauug

SEQ ID NO: 1397153 - RNA, 19 nt, Homo sapiens
  misc_RNA (1)...(19): siRNA sense strand
ccacguggcaguacuacga

SEQ ID NO: 1397154 - RNA, 19 nt, Homo sapiens
  misc_RNA (1)...(19): siRNA sense strand
ggagaacgaccacuuugac

SEQ ID NO: 1397155 - RNA, 19 nt, Homo sapiens
  misc_RNA (1)...(19): siRNA sense strand
ccucguuccugguguacuu

SEQ ID NO: 1397156 - RNA, 19 nt, Homo sapiens
  misc_RNA (1)...(19): siRNA sense strand
gagaacgaccacuuugaca

SEQ ID NO: 1397157 - RNA, 19 nt, Homo sapiens
  misc_RNA (1)...(19): siRNA sense strand
agaauuuccucuacaacgu

SEQ ID NO: 1397158 - RNA, 19 nt, Homo sapiens
  misc_RNA (1)...(19): siRNA sense strand
gggagaagaagcugaaggu

SEQ ID NO: 1397159 - RNA, 19 nt, Homo sapiens
  misc_RNA (1)...(19): siRNA sense strand
caucaaggaguaugagaag

SEQ ID NO: 1397160 - RNA, 19 nt, Homo sapiens
  misc_RNA (1)...(19): siRNA sense strand
ugcagaauuuccucuacaa

SEQ ID NO: 1397161 - RNA, 19 nt, Homo sapiens
  misc_RNA (1)...(19): siRNA sense strand
ugacuaucgugguguuugg

SEQ ID NO: 1397162 - RNA, 19 nt, Homo sapiens
  misc_RNA (1)...(19): siRNA sense strand
agaagcacuuugagaagag

SEQ ID NO: 1397163 - RNA, 19 nt, Homo sapiens
  misc_RNA (1)...(19): siRNA sense strand
gugcucaucgccuccauug

SEQ ID NO: 1397164 - RNA, 19 nt, Homo sapiens
  misc_RNA (1)...(19): siRNA sense strand
gcugcagaauuuccucuac

SEQ ID NO: 1397165 - RNA, 19 nt, Homo sapiens
  misc_RNA (1)...(19): siRNA sense strand
uacaucggcuuccuuuguc

SEQ ID NO: 1397166 - RNA, 19 nt, Homo sapiens
  misc_RNA (1)...(19): siRNA sense strand
uuuccaccaucaaggagua

SEQ ID NO: 1397167 - RNA, 19 nt, Homo sapiens
  misc_RNA (1)...(19): siRNA sense strand
gcugggcguucaucuacca

SEQ ID NO: 1397168 - RNA, 19 nt, Homo sapiens
  misc_RNA (1)...(19): siRNA sense strand
ucaaggaguaugagaagag

SEQ ID NO: 1397169 - RNA, 19 nt, Homo sapiens
  misc_RNA (1)...(19): siRNA sense strand
cugcagaauuuccucuaca

SEQ ID NO: 1397170 - RNA, 19 nt, Homo sapiens
  misc_RNA (1)...(19): siRNA sense strand
ccaucaaggaguaugagaa

SEQ ID NO: 1397171 - RNA, 19 nt, Homo sapiens
  misc_RNA (1)...(19): siRNA sense strand
acaggcagaagcacuuuga

SEQ ID NO: 1397172 - RNA, 19 nt, Homo sapiens
  misc_RNA (1)...(19): siRNA sense strand
ugaucacgcugaccaccau

SEQ ID NO: 1397173 - RNA, 19 nt, Homo sapiens
  misc_RNA (1)...(19): siRNA sense strand
ccaccaucaaggaguauga

SEQ ID NO: 1397174 - RNA, 19 nt, Homo sapiens
  misc_RNA (1)...(19): siRNA sense strand
gcggcagcauccucagcaa

SEQ ID NO: 1397175 - RNA, 19 nt, Homo sapiens
  misc_RNA (1)...(19): siRNA sense strand
ggacuuggaugagacaaua

SEQ ID NO: 1397176 - RNA, 19 nt, Homo sapiens
  misc_RNA (1)...(19): siRNA sense strand
ugaaggagauguacaauac

SEQ ID NO: 1397177 - RNA, 19 nt, Homo sapiens
  misc_RNA (1)...(19): siRNA sense strand
gagaacaucuacagugcaa

SEQ ID NO: 1397178 - RNA, 19 nt, Homo sapiens
  misc_RNA (1)...(19): siRNA sense strand
ugacaauggccaagauuua

SEQ ID NO: 1397179 - RNA, 19 nt, Homo sapiens
  misc_RNA (1)...(19): siRNA sense strand
aaacagcgauugucuggau

SEQ ID NO: 1397180 - RNA, 19 nt, Homo sapiens
  misc_RNA (1)...(19): siRNA sense strand
caccaccacucaacuaauu

SEQ ID NO: 1397181 - RNA, 19 nt, Homo sapiens
  misc_RNA (1)...(19): siRNA sense strand
ccaaaguccugcuauaugg

SEQ ID NO: 1397182 - RNA, 19 nt, Homo sapiens
  misc_RNA (1)...(19): siRNA sense strand
gacaaggcaucaccaaauc

SEQ ID NO: 1397183 - RNA, 19 nt, Homo sapiens
  misc_RNA (1)...(19): siRNA sense strand
gcauuggccuuaugaugga

SEQ ID NO: 1397184 - RNA, 19 nt, Homo sapiens
  misc_RNA (1)...(19): siRNA sense strand
ggacauuugcauccagaua

SEQ ID NO: 1397185 - RNA, 19 nt, Homo sapiens
  misc_RNA (1)...(19): siRNA sense strand
gaauacaacacacacaaug

SEQ ID NO: 1397186 - RNA, 19 nt, Homo sapiens
  misc_RNA (1)...(19): siRNA sense strand
gcacaacaggguucuauca

SEQ ID NO: 1397187 - RNA, 19 nt, Homo sapiens
  misc_RNA (1)...(19): siRNA sense strand
gcacuaaaccucaucaacu

SEQ ID NO: 1397188 - RNA, 19 nt, Homo sapiens
  misc_RNA (1)...(19): siRNA sense strand
gcugacggcuuccacaguu

SEQ ID NO: 1397189 - RNA, 19 nt, Homo sapiens
  misc_RNA (1)...(19): siRNA sense strand
acacaucuguucuucaaug

SEQ ID NO: 1397190 - RNA, 19 nt, Homo sapiens
  misc_RNA (1)...(19): siRNA sense strand
gaucggugaugguguggaa

SEQ ID NO: 1397191 - RNA, 19 nt, Homo sapiens
  misc_RNA (1)...(19): siRNA sense strand
cccuggagcuggaguauuu

SEQ ID NO: 1397192 - RNA, 19 nt, Homo sapiens
  misc_RNA (1)...(19): siRNA sense strand
gacaauggccaagauuuaa

SEQ ID NO: 1397193 - RNA, 19 nt, Homo sapiens
  misc_RNA (1)...(19): siRNA sense strand
gcgauugucuggauaaacu

SEQ ID NO: 1397194 - RNA, 19 nt, Homo sapiens
  misc_RNA (1)...(19): siRNA sense strand
auacacaucuguucuucaa

SEQ ID NO: 1397195 - RNA, 19 nt, Homo sapiens
  misc_RNA (1)...(19): siRNA sense strand
ucacccagccucacuguaa

SEQ ID NO: 1397196 - RNA, 19 nt, Homo sapiens
  misc_RNA (1)...(19): siRNA sense strand
ggucuguguuuccuauuga

SEQ ID NO: 1397197 - RNA, 19 nt, Homo sapiens
  misc_RNA (1)...(19): siRNA sense strand
gccaagauuuaagcacaua

SEQ ID NO: 1397198 - RNA, 19 nt, Homo sapiens
  misc_RNA (1)...(19): siRNA sense strand
caaccagaguuccgaguca

SEQ ID NO: 1397199 - RNA, 19 nt, Homo sapiens
  misc_RNA (1)...(19): siRNA sense strand
uacaauaccuacaagaaca

SEQ ID NO: 1397200 - RNA, 19 nt, Homo sapiens
  misc_RNA (1)...(19): siRNA sense strand
gugaaggagauguacaaua

SEQ ID NO: 1397201 - RNA, 19 nt, Homo sapiens
  misc_RNA (1)...(19): siRNA sense strand
gcacaagccuauggaaucc

SEQ ID NO: 1397202 - RNA, 19 nt, Homo sapiens
  misc_RNA (1)...(19): siRNA sense strand
cgaaagagggagacacaga

SEQ ID NO: 1397203 - RNA, 19 nt, Homo sapiens
  misc_RNA (1)...(19): siRNA sense strand
agacaaggcaucaccaaau

SEQ ID NO: 1397204 - RNA, 19 nt, Homo sapiens
  misc_RNA (1)...(19): siRNA sense strand
gccaaaguccugcuauaug

SEQ ID NO: 1397205 - RNA, 19 nt, Homo sapiens
  misc_RNA (1)...(19): siRNA sense strand
ggagugugcaccaggacua

SEQ ID NO: 1397206 - RNA, 19 nt, Homo sapiens
  misc_RNA (1)...(19): siRNA sense strand
ggagcuggaguauuuauag

SEQ ID NO: 1397207 - RNA, 19 nt, Homo sapiens
  misc_RNA (1)...(19): siRNA sense strand
uggccaaaguccugcuaua

SEQ ID NO: 1397208 - RNA, 19 nt, Homo sapiens
  misc_RNA (1)...(19): siRNA sense strand
gcccaacugugucaaugug

SEQ ID NO: 1397209 - RNA, 19 nt, Homo sapiens
  misc_RNA (1)...(19): siRNA sense strand
ggaggauugugaccagauc

SEQ ID NO: 1397210 - RNA, 19 nt, Homo sapiens
  misc_RNA (1)...(19): siRNA sense strand
ggucaccaccacucaacua

SEQ ID NO: 1397211 - RNA, 19 nt, Homo sapiens
  misc_RNA (1)...(19): siRNA sense strand
gugaccagauccacguuga

SEQ ID NO: 1397212 - RNA, 19 nt, Homo sapiens
  misc_RNA (1)...(19): siRNA sense strand
gggucuguguuuccuauug

SEQ ID NO: 1397213 - RNA, 19 nt, Homo sapiens
  misc_RNA (1)...(19): siRNA sense strand
gcugcuguguggacucuga

SEQ ID NO: 1397214 - RNA, 19 nt, Homo sapiens
  misc_RNA (1)...(19): siRNA sense strand
ggccaaaguccugcuauau

SEQ ID NO: 1397215 - RNA, 19 nt, Homo sapiens
  misc_RNA (1)...(19): siRNA sense strand
guacaauaccuacaagaac

SEQ ID NO: 1397216 - RNA, 19 nt, Homo sapiens
  misc_RNA (1)...(19): siRNA sense strand
ggucuaagaggagcaguga

SEQ ID NO: 1397217 - RNA, 19 nt, Homo sapiens
  misc_RNA (1)...(19): siRNA sense strand
gagaggauaaugcagagau

SEQ ID NO: 1397218 - RNA, 19 nt, Homo sapiens
  misc_RNA (1)...(19): siRNA sense strand
cacuaaaccucaucaacuc

SEQ ID NO: 1397219 - RNA, 19 nt, Homo sapiens
  misc_RNA (1)...(19): siRNA sense strand
gcgcauuggccuuaugaug

SEQ ID NO: 1397220 - RNA, 19 nt, Homo sapiens
  misc_RNA (1)...(19): siRNA sense strand
acaacaggguucuaucaag

SEQ ID NO: 1397221 - RNA, 19 nt, Homo sapiens
  misc_RNA (1)...(19): siRNA sense strand
agaggauaaugcagagauu

SEQ ID NO: 1397222 - RNA, 19 nt, Homo sapiens
  misc_RNA (1)...(19): siRNA sense strand
gauuuaagcacauacaacu

SEQ ID NO: 1397223 - RNA, 19 nt, Homo sapiens
  misc_RNA (1)...(19): siRNA sense strand
gacagagcccauacaccua

SEQ ID NO: 1397224 - RNA, 19 nt, Homo sapiens
  misc_RNA (1)...(19): siRNA sense strand
cacccagccucacuguaaa

SEQ ID NO: 1397225 - RNA, 19 nt, Homo sapiens
  misc_RNA (1)...(19): siRNA sense strand
gaugacaauggccaagauu

SEQ ID NO: 1397226 - RNA, 19 nt, Homo sapiens
  misc_RNA (1)...(19): siRNA sense strand
gaccagauccacguugaug

SEQ ID NO: 1397227 - RNA, 19 nt, Homo sapiens
  misc_RNA (1)...(19): siRNA sense strand
cacaucuguucuucaauga

SEQ ID NO: 1397228 - RNA, 19 nt, Homo sapiens
  misc_RNA (1)...(19): siRNA sense strand
guugauaggcacucccaaa

SEQ ID NO: 1397229 - RNA, 19 nt, Homo sapiens
  misc_RNA (1)...(19): siRNA sense strand
gugaauacaacacacacaa

SEQ ID NO: 1397230 - RNA, 19 nt, Homo sapiens
  misc_RNA (1)...(19): siRNA sense strand
ccacuggacagagcccaua

SEQ ID NO: 1397231 - RNA, 19 nt, Homo sapiens
  misc_RNA (1)...(19): siRNA sense strand
gcagagauucggcagaaaa

SEQ ID NO: 1397232 - RNA, 19 nt, Homo sapiens
  misc_RNA (1)...(19): siRNA sense strand
uuacccaccuccagcacaa

SEQ ID NO: 1397233 - RNA, 19 nt, Homo sapiens
  misc_RNA (1)...(19): siRNA sense strand
gcccauacaccuaccagau

SEQ ID NO: 1397234 - RNA, 19 nt, Homo sapiens
  misc_RNA (1)...(19): siRNA sense strand
cagcgauugucuggauaaa

SEQ ID NO: 1397235 - RNA, 19 nt, Homo sapiens
  misc_RNA (1)...(19): siRNA sense strand
ugaaggcacuaaaccucau

SEQ ID NO: 1397236 - RNA, 19 nt, Homo sapiens
  misc_RNA (1)...(19): siRNA sense strand
gauaggcacucccaaaagg

SEQ ID NO: 1397237 - RNA, 19 nt, Homo sapiens
  misc_RNA (1)...(19): siRNA sense strand
ggccaagauuuaagcacau

SEQ ID NO: 1397238 - RNA, 19 nt, Homo sapiens
  misc_RNA (1)...(19): siRNA sense strand
augcagagauucggcagaa

SEQ ID NO: 1397239 - RNA, 19 nt, Homo sapiens
  misc_RNA (1)...(19): siRNA sense strand
caaccaagacagggaagga

SEQ ID NO: 1397240 - RNA, 19 nt, Homo sapiens
  misc_RNA (1)...(19): siRNA sense strand
uauuacggcucauccuaca

SEQ ID NO: 1397241 - RNA, 19 nt, Homo sapiens
  misc_RNA (1)...(19): siRNA sense strand
gagcugcuucgagaggaua

SEQ ID NO: 1397242 - RNA, 19 nt, Homo sapiens
  misc_RNA (1)...(19): siRNA sense strand
cagcucuucuccagaucuu

SEQ ID NO: 1397243 - RNA, 19 nt, Homo sapiens
  misc_RNA (1)...(19): siRNA sense strand
cagacaaggcaucaccaaa

SEQ ID NO: 1397244 - RNA, 19 nt, Homo sapiens
  misc_RNA (1)...(19): siRNA sense strand
ucccagcucuucuccagau

SEQ ID NO: 1397245 - RNA, 19 nt, Homo sapiens
  misc_RNA (1)...(19): siRNA sense strand
gggugaaggagauguacaa

SEQ ID NO: 1397246 - RNA, 19 nt, Homo sapiens
  misc_RNA (1)...(19): siRNA sense strand
ugaauacaacacacacaau

SEQ ID NO: 1397247 - RNA, 19 nt, Homo sapiens
  misc_RNA (1)...(19): siRNA sense strand
cagcacaagccuauggaau

SEQ ID NO: 1397248 - RNA, 19 nt, Homo sapiens
  misc_RNA (1)...(19): siRNA sense strand
gacauuugcauccagauac

SEQ ID NO: 1397249 - RNA, 19 nt, Homo sapiens
  misc_RNA (1)...(19): siRNA sense strand
gaggauaaugcagagauuc

SEQ ID NO: 1397250 - RNA, 19 nt, Homo sapiens
  misc_RNA (1)...(19): siRNA sense strand
caagauuuaagcacauaca

SEQ ID NO: 1397251 - RNA, 19 nt, Homo sapiens
  misc_RNA (1)...(19): siRNA sense strand
agaugacaauggccaagau

SEQ ID NO: 1397252 - RNA, 19 nt, Homo sapiens
  misc_RNA (1)...(19): siRNA sense strand
auacaacacacacaaugga

SEQ ID NO: 1397253 - RNA, 19 nt, Homo sapiens
  misc_RNA (1)...(19): siRNA sense strand
ccagaugcacggcacaaca

SEQ ID NO: 1397254 - RNA, 19 nt, Homo sapiens
  misc_RNA (1)...(19): siRNA sense strand
cacaacaggguucuaucaa

SEQ ID NO: 1397255 - RNA, 19 nt, Homo sapiens
  misc_RNA (1)...(19): siRNA sense strand
gauacacaucuguucuuca

SEQ ID NO: 1397256 - RNA, 19 nt, Homo sapiens
  misc_RNA (1)...(19): siRNA sense strand
cuucaaccuugcagauaca

SEQ ID NO: 1397257 - RNA, 19 nt, Homo sapiens
  misc_RNA (1)...(19): siRNA sense strand
gauugucuggauaaacuga

SEQ ID NO: 1397258 - RNA, 19 nt, Homo sapiens
  misc_RNA (1)...(19): siRNA sense strand
uuuaagcacauacaacuuc

SEQ ID NO: 1397259 - RNA, 19 nt, Homo sapiens
  misc_RNA (1)...(19): siRNA sense strand
caaccuugcagauacacau

SEQ ID NO: 1397260 - RNA, 19 nt, Homo sapiens
  misc_RNA (1)...(19): siRNA sense strand
ggacuuggaugagacaaua

SEQ ID NO: 1397261 - RNA, 19 nt, Homo sapiens
  misc_RNA (1)...(19): siRNA sense strand
ugaaggagauguacaauac

SEQ ID NO: 1397262 - RNA, 19 nt, Homo sapiens
  misc_RNA (1)...(19): siRNA sense strand
gagaacaucuacagugcaa

SEQ ID NO: 1397263 - RNA, 19 nt, Homo sapiens
  misc_RNA (1)...(19): siRNA sense strand
ugacaauggccaagauuua

SEQ ID NO: 1397264 - RNA, 19 nt, Homo sapiens
  misc_RNA (1)...(19): siRNA sense strand
aaacagcgauugucuggau

SEQ ID NO: 1397265 - RNA, 19 nt, Homo sapiens
  misc_RNA (1)...(19): siRNA sense strand
caccaccacucaacuaauu

SEQ ID NO: 1397266 - RNA, 19 nt, Homo sapiens
  misc_RNA (1)...(19): siRNA sense strand
ccaaaguccugcuauaugg

SEQ ID NO: 1397267 - RNA, 19 nt, Homo sapiens
  misc_RNA (1)...(19): siRNA sense strand
gacaaggcaucaccaaauc

SEQ ID NO: 1397268 - RNA, 19 nt, Homo sapiens
  misc_RNA (1)...(19): siRNA sense strand
gcauuggccuuaugaugga

SEQ ID NO: 1397269 - RNA, 19 nt, Homo sapiens
  misc_RNA (1)...(19): siRNA sense strand
ggacauuugcauccagaua

SEQ ID NO: 1397270 - RNA, 19 nt, Homo sapiens
  misc_RNA (1)...(19): siRNA sense strand
gaauacaacacacacaaug

SEQ ID NO: 1397271 - RNA, 19 nt, Homo sapiens
  misc_RNA (1)...(19): siRNA sense strand
gcacaacaggguucuauca

SEQ ID NO: 1397272 - RNA, 19 nt, Homo sapiens
  misc_RNA (1)...(19): siRNA sense strand
gcacuaaaccucaucaacu

SEQ ID NO: 1397273 - RNA, 19 nt, Homo sapiens
  misc_RNA (1)...(19): siRNA sense strand
gcugacggcuuccacaguu

SEQ ID NO: 1397274 - RNA, 19 nt, Homo sapiens
  misc_RNA (1)...(19): siRNA sense strand
acacaucuguucuucaaug

SEQ ID NO: 1397275 - RNA, 19 nt, Homo sapiens
  misc_RNA (1)...(19): siRNA sense strand
gaucggugaugguguggaa

SEQ ID NO: 1397276 - RNA, 19 nt, Homo sapiens
  misc_RNA (1)...(19): siRNA sense strand
cccuggagcuggaguauuu

SEQ ID NO: 1397277 - RNA, 19 nt, Homo sapiens
  misc_RNA (1)...(19): siRNA sense strand
gacaauggccaagauuuaa

SEQ ID NO: 1397278 - RNA, 19 nt, Homo sapiens
  misc_RNA (1)...(19): siRNA sense strand
gcgauugucuggauaaacu

SEQ ID NO: 1397279 - RNA, 19 nt, Homo sapiens
  misc_RNA (1)...(19): siRNA sense strand
auacacaucuguucuucaa

SEQ ID NO: 1397280 - RNA, 19 nt, Homo sapiens
  misc_RNA (1)...(19): siRNA sense strand
ucacccagccucacuguaa

SEQ ID NO: 1397281 - RNA, 19 nt, Homo sapiens
  misc_RNA (1)...(19): siRNA sense strand
ggucuguguuuccuauuga

SEQ ID NO: 1397282 - RNA, 19 nt, Homo sapiens
  misc_RNA (1)...(19): siRNA sense strand
gccaagauuuaagcacaua

SEQ ID NO: 1397283 - RNA, 19 nt, Homo sapiens
  misc_RNA (1)...(19): siRNA sense strand
caaccagaguuccgaguca

SEQ ID NO: 1397284 - RNA, 19 nt, Homo sapiens
  misc_RNA (1)...(19): siRNA sense strand
uacaauaccuacaagaaca

SEQ ID NO: 1397285 - RNA, 19 nt, Homo sapiens
  misc_RNA (1)...(19): siRNA sense strand
gugaaggagauguacaaua

SEQ ID NO: 1397286 - RNA, 19 nt, Homo sapiens
  misc_RNA (1)...(19): siRNA sense strand
gcacaagccuauggaaucc

SEQ ID NO: 1397287 - RNA, 19 nt, Homo sapiens
  misc_RNA (1)...(19): siRNA sense strand
cgaaagagggagacacaga

SEQ ID NO: 1397288 - RNA, 19 nt, Homo sapiens
  misc_RNA (1)...(19): siRNA sense strand
agacaaggcaucaccaaau

SEQ ID NO: 1397289 - RNA, 19 nt, Homo sapiens
  misc_RNA (1)...(19): siRNA sense strand
gccaaaguccugcuauaug

SEQ ID NO: 1397290 - RNA, 19 nt, Homo sapiens
  misc_RNA (1)...(19): siRNA sense strand
ggagugugcaccaggacua

SEQ ID NO: 1397291 - RNA, 19 nt, Homo sapiens
  misc_RNA (1)...(19): siRNA sense strand
ggagcuggaguauuuauag

SEQ ID NO: 1397292 - RNA, 19 nt, Homo sapiens
  misc_RNA (1)...(19): siRNA sense strand
uggccaaaguccugcuaua

SEQ ID NO: 1397293 - RNA, 19 nt, Homo sapiens
  misc_RNA (1)...(19): siRNA sense strand
gcccaacugugucaaugug

SEQ ID NO: 1397294 - RNA, 19 nt, Homo sapiens
  misc_RNA (1)...(19): siRNA sense strand
ggaggauugugaccagauc

SEQ ID NO: 1397295 - RNA, 19 nt, Homo sapiens
  misc_RNA (1)...(19): siRNA sense strand
ggucaccaccacucaacua

SEQ ID NO: 1397296 - RNA, 19 nt, Homo sapiens
  misc_RNA (1)...(19): siRNA sense strand
gugaccagauccacguuga

SEQ ID NO: 1397297 - RNA, 19 nt, Homo sapiens
  misc_RNA (1)...(19): siRNA sense strand
gggucuguguuuccuauug

SEQ ID NO: 1397298 - RNA, 19 nt, Homo sapiens
  misc_RNA (1)...(19): siRNA sense strand
gcugcuguguggacucuga

SEQ ID NO: 1397299 - RNA, 19 nt, Homo sapiens
  misc_RNA (1)...(19): siRNA sense strand
ggccaaaguccugcuauau

SEQ ID NO: 1397300 - RNA, 19 nt, Homo sapiens
  misc_RNA (1)...(19): siRNA sense strand
guacaauaccuacaagaac

SEQ ID NO: 1397301 - RNA, 19 nt, Homo sapiens
  misc_RNA (1)...(19): siRNA sense strand
ggucuaagaggagcaguga

SEQ ID NO: 1397302 - RNA, 19 nt, Homo sapiens
  misc_RNA (1)...(19): siRNA sense strand
gagaggauaaugcagagau

SEQ ID NO: 1397303 - RNA, 19 nt, Homo sapiens
  misc_RNA (1)...(19): siRNA sense strand
cacuaaaccucaucaacuc

SEQ ID NO: 1397304 - RNA, 19 nt, Homo sapiens
  misc_RNA (1)...(19): siRNA sense strand
gcgcauuggccuuaugaug

SEQ ID NO: 1397305 - RNA, 19 nt, Homo sapiens
  misc_RNA (1)...(19): siRNA sense strand
acaacaggguucuaucaag

SEQ ID NO: 1397306 - RNA, 19 nt, Homo sapiens
  misc_RNA (1)...(19): siRNA sense strand
agaggauaaugcagagauu

SEQ ID NO: 1397307 - RNA, 19 nt, Homo sapiens
  misc_RNA (1)...(19): siRNA sense strand
gauuuaagcacauacaacu

SEQ ID NO: 1397308 - RNA, 19 nt, Homo sapiens
  misc_RNA (1)...(19): siRNA sense strand
gacagagcccauacaccua

SEQ ID NO: 1397309 - RNA, 19 nt, Homo sapiens
  misc_RNA (1)...(19): siRNA sense strand
cacccagccucacuguaaa

SEQ ID NO: 1397310 - RNA, 19 nt, Homo sapiens
  misc_RNA (1)...(19): siRNA sense strand
gaugacaauggccaagauu

SEQ ID NO: 1397311 - RNA, 19 nt, Homo sapiens
  misc_RNA (1)...(19): siRNA sense strand
gaccagauccacguugaug

SEQ ID NO: 1397312 - RNA, 19 nt, Homo sapiens
  misc_RNA (1)...(19): siRNA sense strand
cacaucuguucuucaauga

SEQ ID NO: 1397313 - RNA, 19 nt, Homo sapiens
  misc_RNA (1)...(19): siRNA sense strand
guugauaggcacucccaaa

SEQ ID NO: 1397314 - RNA, 19 nt, Homo sapiens
  misc_RNA (1)...(19): siRNA sense strand
gugaauacaacacacacaa

SEQ ID NO: 1397315 - RNA, 19 nt, Homo sapiens
  misc_RNA (1)...(19): siRNA sense strand
ccacuggacagagcccaua

SEQ ID NO: 1397316 - RNA, 19 nt, Homo sapiens
  misc_RNA (1)...(19): siRNA sense strand
gcagagauucggcagaaaa

SEQ ID NO: 1397317 - RNA, 19 nt, Homo sapiens
  misc_RNA (1)...(19): siRNA sense strand
uuacccaccuccagcacaa

SEQ ID NO: 1397318 - RNA, 19 nt, Homo sapiens
  misc_RNA (1)...(19): siRNA sense strand
gcccauacaccuaccagau

SEQ ID NO: 1397319 - RNA, 19 nt, Homo sapiens
  misc_RNA (1)...(19): siRNA sense strand
cagcgauugucuggauaaa

SEQ ID NO: 1397320 - RNA, 19 nt, Homo sapiens
  misc_RNA (1)...(19): siRNA sense strand
ugaaggcacuaaaccucau

SEQ ID NO: 1397321 - RNA, 19 nt, Homo sapiens
  misc_RNA (1)...(19): siRNA sense strand
gauaggcacucccaaaagg

SEQ ID NO: 1397322 - RNA, 19 nt, Homo sapiens
  misc_RNA (1)...(19): siRNA sense strand
ggccaagauuuaagcacau

SEQ ID NO: 1397323 - RNA, 19 nt, Homo sapiens
  misc_RNA (1)...(19): siRNA sense strand
augcagagauucggcagaa

SEQ ID NO: 1397324 - RNA, 19 nt, Homo sapiens
  misc_RNA (1)...(19): siRNA sense strand
caaccaagacagggaagga

SEQ ID NO: 1397325 - RNA, 19 nt, Homo sapiens
  misc_RNA (1)...(19): siRNA sense strand
uauuacggcucauccuaca

SEQ ID NO: 1397326 - RNA, 19 nt, Homo sapiens
  misc_RNA (1)...(19): siRNA sense strand
gagcugcuucgagaggaua

SEQ ID NO: 1397327 - RNA, 19 nt, Homo sapiens
  misc_RNA (1)...(19): siRNA sense strand
cagcucuucuccagaucuu

SEQ ID NO: 1397328 - RNA, 19 nt, Homo sapiens
  misc_RNA (1)...(19): siRNA sense strand
cagacaaggcaucaccaaa

SEQ ID NO: 1397329 - RNA, 19 nt, Homo sapiens
  misc_RNA (1)...(19): siRNA sense strand
ucccagcucuucuccagau

SEQ ID NO: 1397330 - RNA, 19 nt, Homo sapiens
  misc_RNA (1)...(19): siRNA sense strand
gggugaaggagauguacaa

SEQ ID NO: 1397331 - RNA, 19 nt, Homo sapiens
  misc_RNA (1)...(19): siRNA sense strand
ugaauacaacacacacaau

SEQ ID NO: 1397332 - RNA, 19 nt, Homo sapiens
  misc_RNA (1)...(19): siRNA sense strand
cagcacaagccuauggaau

SEQ ID NO: 1397333 - RNA, 19 nt, Homo sapiens
  misc_RNA (1)...(19): siRNA sense strand
gacauuugcauccagauac

SEQ ID NO: 1397334 - RNA, 19 nt, Homo sapiens
  misc_RNA (1)...(19): siRNA sense strand
gaggauaaugcagagauuc

SEQ ID NO: 1397335 - RNA, 19 nt, Homo sapiens
  misc_RNA (1)...(19): siRNA sense strand
caagauuuaagcacauaca

SEQ ID NO: 1397336 - RNA, 19 nt, Homo sapiens
  misc_RNA (1)...(19): siRNA sense strand
agaugacaauggccaagau

SEQ ID NO: 1397337 - RNA, 19 nt, Homo sapiens
  misc_RNA (1)...(19): siRNA sense strand
auacaacacacacaaugga

SEQ ID NO: 1397338 - RNA, 19 nt, Homo sapiens
  misc_RNA (1)...(19): siRNA sense strand
ccagaugcacggcacaaca

SEQ ID NO: 1397339 - RNA, 19 nt, Homo sapiens
  misc_RNA (1)...(19): siRNA sense strand
cacaacaggguucuaucaa

SEQ ID NO: 1397340 - RNA, 19 nt, Homo sapiens
  misc_RNA (1)...(19): siRNA sense strand
gauacacaucuguucuuca

SEQ ID NO: 1397341 - RNA, 19 nt, Homo sapiens
  misc_RNA (1)...(19): siRNA sense strand
cuucaaccuugcagauaca

SEQ ID NO: 1397342 - RNA, 19 nt, Homo sapiens
  misc_RNA (1)...(19): siRNA sense strand
gauugucuggauaaacuga

SEQ ID NO: 1397343 - RNA, 19 nt, Homo sapiens
  misc_RNA (1)...(19): siRNA sense strand
uuuaagcacauacaacuuc

SEQ ID NO: 1397344 - RNA, 19 nt, Homo sapiens
  misc_RNA (1)...(19): siRNA sense strand
caaccuugcagauacacau

SEQ ID NO: 1397345 - RNA, 19 nt, Homo sapiens
  misc_RNA (1)...(19): siRNA sense strand
ggacuuggaugagacaaua

SEQ ID NO: 1397346 - RNA, 19 nt, Homo sapiens
  misc_RNA (1)...(19): siRNA sense strand
ugaaggagauguacaauac

SEQ ID NO: 1397347 - RNA, 19 nt, Homo sapiens
  misc_RNA (1)...(19): siRNA sense strand
gagaacaucuacagugcaa

SEQ ID NO: 1397348 - RNA, 19 nt, Homo sapiens
  misc_RNA (1)...(19): siRNA sense strand
ugacaauggccaagauuua

SEQ ID NO: 1397349 - RNA, 19 nt, Homo sapiens
  misc_RNA (1)...(19): siRNA sense strand
aaacagcgauugucuggau

SEQ ID NO: 1397350 - RNA, 19 nt, Homo sapiens
  misc_RNA (1)...(19): siRNA sense strand
caccaccacucaacuaauu

SEQ ID NO: 1397351 - RNA, 19 nt, Homo sapiens
  misc_RNA (1)...(19): siRNA sense strand
ccaaaguccugcuauaugg

SEQ ID NO: 1397352 - RNA, 19 nt, Homo sapiens
  misc_RNA (1)...(19): siRNA sense strand
gacaaggcaucaccaaauc

SEQ ID NO: 1397353 - RNA, 19 nt, Homo sapiens
  misc_RNA (1)...(19): siRNA sense strand
gcauuggccuuaugaugga

SEQ ID NO: 1397354 - RNA, 19 nt, Homo sapiens
  misc_RNA (1)...(19): siRNA sense strand
ggacauuugcauccagaua

SEQ ID NO: 1397355 - RNA, 19 nt, Homo sapiens
  misc_RNA (1)...(19): siRNA sense strand
gaauacaacacacacaaug

SEQ ID NO: 1397356 - RNA, 19 nt, Homo sapiens
  misc_RNA (1)...(19): siRNA sense strand
gcacaacaggguucuauca

SEQ ID NO: 1397357 - RNA, 19 nt, Homo sapiens
  misc_RNA (1)...(19): siRNA sense strand
gcacuaaaccucaucaacu

SEQ ID NO: 1397358 - RNA, 19 nt, Homo sapiens
  misc_RNA (1)...(19): siRNA sense strand
gcugacggcuuccacaguu

SEQ ID NO: 1397359 - RNA, 19 nt, Homo sapiens
  misc_RNA (1)...(19): siRNA sense strand
acacaucuguucuucaaug

SEQ ID NO: 1397360 - RNA, 19 nt, Homo sapiens
  misc_RNA (1)...(19): siRNA sense strand
gaucggugaugguguggaa

SEQ ID NO: 1397361 - RNA, 19 nt, Homo sapiens
  misc_RNA (1)...(19): siRNA sense strand
cccuggagcuggaguauuu

SEQ ID NO: 1397362 - RNA, 19 nt, Homo sapiens
  misc_RNA (1)...(19): siRNA sense strand
gacaauggccaagauuuaa

SEQ ID NO: 1397363 - RNA, 19 nt, Homo sapiens
  misc_RNA (1)...(19): siRNA sense strand
gcgauugucuggauaaacu

SEQ ID NO: 1397364 - RNA, 19 nt, Homo sapiens
  misc_RNA (1)...(19): siRNA sense strand
auacacaucuguucuucaa

SEQ ID NO: 1397365 - RNA, 19 nt, Homo sapiens
  misc_RNA (1)...(19): siRNA sense strand
ucacccagccucacuguaa

SEQ ID NO: 1397366 - RNA, 19 nt, Homo sapiens
  misc_RNA (1)...(19): siRNA sense strand
ggucuguguuuccuauuga

SEQ ID NO: 1397367 - RNA, 19 nt, Homo sapiens
  misc_RNA (1)...(19): siRNA sense strand
gccaagauuuaagcacaua

SEQ ID NO: 1397368 - RNA, 19 nt, Homo sapiens
  misc_RNA (1)...(19): siRNA sense strand
caaccagaguuccgaguca

SEQ ID NO: 1397369 - RNA, 19 nt, Homo sapiens
  misc_RNA (1)...(19): siRNA sense strand
uacaauaccuacaagaaca

SEQ ID NO: 1397370 - RNA, 19 nt, Homo sapiens
  misc_RNA (1)...(19): siRNA sense strand
gugaaggagauguacaaua

SEQ ID NO: 1397371 - RNA, 19 nt, Homo sapiens
  misc_RNA (1)...(19): siRNA sense strand
gcacaagccuauggaaucc

SEQ ID NO: 1397372 - RNA, 19 nt, Homo sapiens
  misc_RNA (1)...(19): siRNA sense strand
cgaaagagggagacacaga

SEQ ID NO: 1397373 - RNA, 19 nt, Homo sapiens
  misc_RNA (1)...(19): siRNA sense strand
agacaaggcaucaccaaau

SEQ ID NO: 1397374 - RNA, 19 nt, Homo sapiens
  misc_RNA (1)...(19): siRNA sense strand
gccaaaguccugcuauaug

SEQ ID NO: 1397375 - RNA, 19 nt, Homo sapiens
  misc_RNA (1)...(19): siRNA sense strand
ggagugugcaccaggacua

SEQ ID NO: 1397376 - RNA, 19 nt, Homo sapiens
  misc_RNA (1)...(19): siRNA sense strand
ggagcuggaguauuuauag

SEQ ID NO: 1397377 - RNA, 19 nt, Homo sapiens
  misc_RNA (1)...(19): siRNA sense strand
uggccaaaguccugcuaua

SEQ ID NO: 1397378 - RNA, 19 nt, Homo sapiens
  misc_RNA (1)...(19): siRNA sense strand
gcccaacugugucaaugug

SEQ ID NO: 1397379 - RNA, 19 nt, Homo sapiens
  misc_RNA (1)...(19): siRNA sense strand
ggaggauugugaccagauc

SEQ ID NO: 1397380 - RNA, 19 nt, Homo sapiens
  misc_RNA (1)...(19): siRNA sense strand
ggucaccaccacucaacua

SEQ ID NO: 1397381 - RNA, 19 nt, Homo sapiens
  misc_RNA (1)...(19): siRNA sense strand
gugaccagauccacguuga

SEQ ID NO: 1397382 - RNA, 19 nt, Homo sapiens
  misc_RNA (1)...(19): siRNA sense strand
gggucuguguuuccuauug

SEQ ID NO: 1397383 - RNA, 19 nt, Homo sapiens
  misc_RNA (1)...(19): siRNA sense strand
gcugcuguguggacucuga

SEQ ID NO: 1397384 - RNA, 19 nt, Homo sapiens
  misc_RNA (1)...(19): siRNA sense strand
ggccaaaguccugcuauau

SEQ ID NO: 1397385 - RNA, 19 nt, Homo sapiens
  misc_RNA (1)...(19): siRNA sense strand
guacaauaccuacaagaac

SEQ ID NO: 1397386 - RNA, 19 nt, Homo sapiens
  misc_RNA (1)...(19): siRNA sense strand
ggucuaagaggagcaguga

SEQ ID NO: 1397387 - RNA, 19 nt, Homo sapiens
  misc_RNA (1)...(19): siRNA sense strand
gagaggauaaugcagagau

SEQ ID NO: 1397388 - RNA, 19 nt, Homo sapiens
  misc_RNA (1)...(19): siRNA sense strand
cacuaaaccucaucaacuc

SEQ ID NO: 1397389 - RNA, 19 nt, Homo sapiens
  misc_RNA (1)...(19): siRNA sense strand
gcgcauuggccuuaugaug

SEQ ID NO: 1397390 - RNA, 19 nt, Homo sapiens
  misc_RNA (1)...(19): siRNA sense strand
acaacaggguucuaucaag

SEQ ID NO: 1397391 - RNA, 19 nt, Homo sapiens
  misc_RNA (1)...(19): siRNA sense strand
agaggauaaugcagagauu

SEQ ID NO: 1397392 - RNA, 19 nt, Homo sapiens
  misc_RNA (1)...(19): siRNA sense strand
gauuuaagcacauacaacu

SEQ ID NO: 1397393 - RNA, 19 nt, Homo sapiens
  misc_RNA (1)...(19): siRNA sense strand
gacagagcccauacaccua

SEQ ID NO: 1397394 - RNA, 19 nt, Homo sapiens
  misc_RNA (1)...(19): siRNA sense strand
cacccagccucacuguaaa

SEQ ID NO: 1397395 - RNA, 19 nt, Homo sapiens
  misc_RNA (1)...(19): siRNA sense strand
gaugacaauggccaagauu

SEQ ID NO: 1397396 - RNA, 19 nt, Homo sapiens
  misc_RNA (1)...(19): siRNA sense strand
gaccagauccacguugaug

SEQ ID NO: 1397397 - RNA, 19 nt, Homo sapiens
  misc_RNA (1)...(19): siRNA sense strand
cacaucuguucuucaauga

SEQ ID NO: 1397398 - RNA, 19 nt, Homo sapiens
  misc_RNA (1)...(19): siRNA sense strand
guugauaggcacucccaaa

SEQ ID NO: 1397399 - RNA, 19 nt, Homo sapiens
  misc_RNA (1)...(19): siRNA sense strand
gugaauacaacacacacaa

SEQ ID NO: 1397400 - RNA, 19 nt, Homo sapiens
  misc_RNA (1)...(19): siRNA sense strand
ccacuggacagagcccaua

SEQ ID NO: 1397401 - RNA, 19 nt, Homo sapiens
  misc_RNA (1)...(19): siRNA sense strand
gcagagauucggcagaaaa

SEQ ID NO: 1397402 - RNA, 19 nt, Homo sapiens
  misc_RNA (1)...(19): siRNA sense strand
uuacccaccuccagcacaa

SEQ ID NO: 1397403 - RNA, 19 nt, Homo sapiens
  misc_RNA (1)...(19): siRNA sense strand
gcccauacaccuaccagau

SEQ ID NO: 1397404 - RNA, 19 nt, Homo sapiens
  misc_RNA (1)...(19): siRNA sense strand
cagcgauugucuggauaaa

SEQ ID NO: 1397405 - RNA, 19 nt, Homo sapiens
  misc_RNA (1)...(19): siRNA sense strand
ugaaggcacuaaaccucau

SEQ ID NO: 1397406 - RNA, 19 nt, Homo sapiens
  misc_RNA (1)...(19): siRNA sense strand
gauaggcacucccaaaagg

SEQ ID NO: 1397407 - RNA, 19 nt, Homo sapiens
  misc_RNA (1)...(19): siRNA sense strand
ggccaagauuuaagcacau

SEQ ID NO: 1397408 - RNA, 19 nt, Homo sapiens
  misc_RNA (1)...(19): siRNA sense strand
augcagagauucggcagaa

SEQ ID NO: 1397409 - RNA, 19 nt, Homo sapiens
  misc_RNA (1)...(19): siRNA sense strand
caaccaagacagggaagga

SEQ ID NO: 1397410 - RNA, 19 nt, Homo sapiens
  misc_RNA (1)...(19): siRNA sense strand
uauuacggcucauccuaca

SEQ ID NO: 1397411 - RNA, 19 nt, Homo sapiens
  misc_RNA (1)...(19): siRNA sense strand
gagcugcuucgagaggaua

SEQ ID NO: 1397412 - RNA, 19 nt, Homo sapiens
  misc_RNA (1)...(19): siRNA sense strand
cagcucuucuccagaucuu

SEQ ID NO: 1397413 - RNA, 19 nt, Homo sapiens
  misc_RNA (1)...(19): siRNA sense strand
cagacaaggcaucaccaaa

SEQ ID NO: 1397414 - RNA, 19 nt, Homo sapiens
  misc_RNA (1)...(19): siRNA sense strand
ucccagcucuucuccagau

SEQ ID NO: 1397415 - RNA, 19 nt, Homo sapiens
  misc_RNA (1)...(19): siRNA sense strand
gggugaaggagauguacaa

SEQ ID NO: 1397416 - RNA, 19 nt, Homo sapiens
  misc_RNA (1)...(19): siRNA sense strand
ugaauacaacacacacaau

SEQ ID NO: 1397417 - RNA, 19 nt, Homo sapiens
  misc_RNA (1)...(19): siRNA sense strand
cagcacaagccuauggaau

SEQ ID NO: 1397418 - RNA, 19 nt, Homo sapiens
  misc_RNA (1)...(19): siRNA sense strand
gacauuugcauccagauac

SEQ ID NO: 1397419 - RNA, 19 nt, Homo sapiens
  misc_RNA (1)...(19): siRNA sense strand
gaggauaaugcagagauuc

SEQ ID NO: 1397420 - RNA, 19 nt, Homo sapiens
  misc_RNA (1)...(19): siRNA sense strand
caagauuuaagcacauaca

SEQ ID NO: 1397421 - RNA, 19 nt, Homo sapiens
  misc_RNA (1)...(19): siRNA sense strand
agaugacaauggccaagau

SEQ ID NO: 1397422 - RNA, 19 nt, Homo sapiens
  misc_RNA (1)...(19): siRNA sense strand
auacaacacacacaaugga

SEQ ID NO: 1397423 - RNA, 19 nt, Homo sapiens
  misc_RNA (1)...(19): siRNA sense strand
ccagaugcacggcacaaca

SEQ ID NO: 1397424 - RNA, 19 nt, Homo sapiens
  misc_RNA (1)...(19): siRNA sense strand
cacaacaggguucuaucaa

SEQ ID NO: 1397425 - RNA, 19 nt, Homo sapiens
  misc_RNA (1)...(19): siRNA sense strand
gauacacaucuguucuuca

SEQ ID NO: 1397426 - RNA, 19 nt, Homo sapiens
  misc_RNA (1)...(19): siRNA sense strand
cuucaaccuugcagauaca

SEQ ID NO: 1397427 - RNA, 19 nt, Homo sapiens
  misc_RNA (1)...(19): siRNA sense strand
gauugucuggauaaacuga

SEQ ID NO: 1397428 - RNA, 19 nt, Homo sapiens
  misc_RNA (1)...(19): siRNA sense strand
uuuaagcacauacaacuuc

SEQ ID NO: 1397429 - RNA, 19 nt, Homo sapiens
  misc_RNA (1)...(19): siRNA sense strand
caaccuugcagauacacau

SEQ ID NO: 1397430 - RNA, 19 nt, Homo sapiens
  misc_RNA (1)...(19): siRNA sense strand
ggacuuggaugagacaaua

SEQ ID NO: 1397431 - RNA, 19 nt, Homo sapiens
  misc_RNA (1)...(19): siRNA sense strand
ugaaggagauguacaauac

SEQ ID NO: 1397432 - RNA, 19 nt, Homo sapiens
  misc_RNA (1)...(19): siRNA sense strand
gagaacaucuacagugcaa

SEQ ID NO: 1397433 - RNA, 19 nt, Homo sapiens
  misc_RNA (1)...(19): siRNA sense strand
ugacaauggccaagauuua

SEQ ID NO: 1397434 - RNA, 19 nt, Homo sapiens
  misc_RNA (1)...(19): siRNA sense strand
aaacagcgauugucuggau

SEQ ID NO: 1397435 - RNA, 19 nt, Homo sapiens
  misc_RNA (1)...(19): siRNA sense strand
caccaccacucaacuaauu

SEQ ID NO: 1397436 - RNA, 19 nt, Homo sapiens
  misc_RNA (1)...(19): siRNA sense strand
ccaaaguccugcuauaugg

SEQ ID NO: 1397437 - RNA, 19 nt, Homo sapiens
  misc_RNA (1)...(19): siRNA sense strand
gacaaggcaucaccaaauc

SEQ ID NO: 1397438 - RNA, 19 nt, Homo sapiens
  misc_RNA (1)...(19): siRNA sense strand
gcauuggccuuaugaugga

SEQ ID NO: 1397439 - RNA, 19 nt, Homo sapiens
  misc_RNA (1)...(19): siRNA sense strand
ggacauuugcauccagaua

SEQ ID NO: 1397440 - RNA, 19 nt, Homo sapiens
  misc_RNA (1)...(19): siRNA sense strand
gaauacaacacacacaaug

SEQ ID NO: 1397441 - RNA, 19 nt, Homo sapiens
  misc_RNA (1)...(19): siRNA sense strand
gcacaacaggguucuauca

SEQ ID NO: 1397442 - RNA, 19 nt, Homo sapiens
  misc_RNA (1)...(19): siRNA sense strand
gcacuaaaccucaucaacu

SEQ ID NO: 1397443 - RNA, 19 nt, Homo sapiens
  misc_RNA (1)...(19): siRNA sense strand
gcugacggcuuccacaguu

SEQ ID NO: 1397444 - RNA, 19 nt, Homo sapiens
  misc_RNA (1)...(19): siRNA sense strand
acacaucuguucuucaaug

SEQ ID NO: 1397445 - RNA, 19 nt, Homo sapiens
  misc_RNA (1)...(19): siRNA sense strand
gaucggugaugguguggaa

SEQ ID NO: 1397446 - RNA, 19 nt, Homo sapiens
  misc_RNA (1)...(19): siRNA sense strand
cccuggagcuggaguauuu

SEQ ID NO: 1397447 - RNA, 19 nt, Homo sapiens
  misc_RNA (1)...(19): siRNA sense strand
gacaauggccaagauuuaa

SEQ ID NO: 1397448 - RNA, 19 nt, Homo sapiens
  misc_RNA (1)...(19): siRNA sense strand
gcgauugucuggauaaacu

SEQ ID NO: 1397449 - RNA, 19 nt, Homo sapiens
  misc_RNA (1)...(19): siRNA sense strand
auacacaucuguucuucaa

SEQ ID NO: 1397450 - RNA, 19 nt, Homo sapiens
  misc_RNA (1)...(19): siRNA sense strand
ucacccagccucacuguaa

SEQ ID NO: 1397451 - RNA, 19 nt, Homo sapiens
  misc_RNA (1)...(19): siRNA sense strand
ggucuguguuuccuauuga

SEQ ID NO: 1397452 - RNA, 19 nt, Homo sapiens
  misc_RNA (1)...(19): siRNA sense strand
gccaagauuuaagcacaua

SEQ ID NO: 1397453 - RNA, 19 nt, Homo sapiens
  misc_RNA (1)...(19): siRNA sense strand
caaccagaguuccgaguca

SEQ ID NO: 1397454 - RNA, 19 nt, Homo sapiens
  misc_RNA (1)...(19): siRNA sense strand
uacaauaccuacaagaaca

SEQ ID NO: 1397455 - RNA, 19 nt, Homo sapiens
  misc_RNA (1)...(19): siRNA sense strand
gugaaggagauguacaaua

SEQ ID NO: 1397456 - RNA, 19 nt, Homo sapiens
  misc_RNA (1)...(19): siRNA sense strand
gcacaagccuauggaaucc

SEQ ID NO: 1397457 - RNA, 19 nt, Homo sapiens
  misc_RNA (1)...(19): siRNA sense strand
cgaaagagggagacacaga

SEQ ID NO: 1397458 - RNA, 19 nt, Homo sapiens
  misc_RNA (1)...(19): siRNA sense strand
agacaaggcaucaccaaau

SEQ ID NO: 1397459 - RNA, 19 nt, Homo sapiens
  misc_RNA (1)...(19): siRNA sense strand
gccaaaguccugcuauaug

SEQ ID NO: 1397460 - RNA, 19 nt, Homo sapiens
  misc_RNA (1)...(19): siRNA sense strand
ggagugugcaccaggacua

SEQ ID NO: 1397461 - RNA, 19 nt, Homo sapiens
  misc_RNA (1)...(19): siRNA sense strand
ggagcuggaguauuuauag

SEQ ID NO: 1397462 - RNA, 19 nt, Homo sapiens
  misc_RNA (1)...(19): siRNA sense strand
uggccaaaguccugcuaua

SEQ ID NO: 1397463 - RNA, 19 nt, Homo sapiens
  misc_RNA (1)...(19): siRNA sense strand
gcccaacugugucaaugug

SEQ ID NO: 1397464 - RNA, 19 nt, Homo sapiens
  misc_RNA (1)...(19): siRNA sense strand
ggaggauugugaccagauc

SEQ ID NO: 1397465 - RNA, 19 nt, Homo sapiens
  misc_RNA (1)...(19): siRNA sense strand
ggucaccaccacucaacua

SEQ ID NO: 1397466 - RNA, 19 nt, Homo sapiens
  misc_RNA (1)...(19): siRNA sense strand
gugaccagauccacguuga

SEQ ID NO: 1397467 - RNA, 19 nt, Homo sapiens
  misc_RNA (1)...(19): siRNA sense strand
gggucuguguuuccuauug

SEQ ID NO: 1397468 - RNA, 19 nt, Homo sapiens
  misc_RNA (1)...(19): siRNA sense strand
gcugcuguguggacucuga

SEQ ID NO: 1397469 - RNA, 19 nt, Homo sapiens
  misc_RNA (1)...(19): siRNA sense strand
ggccaaaguccugcuauau

SEQ ID NO: 1397470 - RNA, 19 nt, Homo sapiens
  misc_RNA (1)...(19): siRNA sense strand
guacaauaccuacaagaac

SEQ ID NO: 1397471 - RNA, 19 nt, Homo sapiens
  misc_RNA (1)...(19): siRNA sense strand
ggucuaagaggagcaguga

SEQ ID NO: 1397472 - RNA, 19 nt, Homo sapiens
  misc_RNA (1)...(19): siRNA sense strand
gagaggauaaugcagagau

SEQ ID NO: 1397473 - RNA, 19 nt, Homo sapiens
  misc_RNA (1)...(19): siRNA sense strand
cacuaaaccucaucaacuc

SEQ ID NO: 1397474 - RNA, 19 nt, Homo sapiens
  misc_RNA (1)...(19): siRNA sense strand
gcgcauuggccuuaugaug

SEQ ID NO: 1397475 - RNA, 19 nt, Homo sapiens
  misc_RNA (1)...(19): siRNA sense strand
acaacaggguucuaucaag

SEQ ID NO: 1397476 - RNA, 19 nt, Homo sapiens
  misc_RNA (1)...(19): siRNA sense strand
agaggauaaugcagagauu

SEQ ID NO: 1397477 - RNA, 19 nt, Homo sapiens
  misc_RNA (1)...(19): siRNA sense strand
gauuuaagcacauacaacu

SEQ ID NO: 1397478 - RNA, 19 nt, Homo sapiens
  misc_RNA (1)...(19): siRNA sense strand
gacagagcccauacaccua

SEQ ID NO: 1397479 - RNA, 19 nt, Homo sapiens
  misc_RNA (1)...(19): siRNA sense strand
cacccagccucacuguaaa

SEQ ID NO: 1397480 - RNA, 19 nt, Homo sapiens
  misc_RNA (1)...(19): siRNA sense strand
gaugacaauggccaagauu

SEQ ID NO: 1397481 - RNA, 19 nt, Homo sapiens
  misc_RNA (1)...(19): siRNA sense strand
gaccagauccacguugaug

SEQ ID NO: 1397482 - RNA, 19 nt, Homo sapiens
  misc_RNA (1)...(19): siRNA sense strand
cacaucuguucuucaauga

SEQ ID NO: 1397483 - RNA, 19 nt, Homo sapiens
  misc_RNA (1)...(19): siRNA sense strand
guugauaggcacucccaaa

SEQ ID NO: 1397484 - RNA, 19 nt, Homo sapiens
  misc_RNA (1)...(19): siRNA sense strand
gugaauacaacacacacaa

SEQ ID NO: 1397485 - RNA, 19 nt, Homo sapiens
  misc_RNA (1)...(19): siRNA sense strand
ccacuggacagagcccaua

SEQ ID NO: 1397486 - RNA, 19 nt, Homo sapiens
  misc_RNA (1)...(19): siRNA sense strand
gcagagauucggcagaaaa

SEQ ID NO: 1397487 - RNA, 19 nt, Homo sapiens
  misc_RNA (1)...(19): siRNA sense strand
uuacccaccuccagcacaa

SEQ ID NO: 1397488 - RNA, 19 nt, Homo sapiens
  misc_RNA (1)...(19): siRNA sense strand
gcccauacaccuaccagau

SEQ ID NO: 1397489 - RNA, 19 nt, Homo sapiens
  misc_RNA (1)...(19): siRNA sense strand
cagcgauugucuggauaaa

SEQ ID NO: 1397490 - RNA, 19 nt, Homo sapiens
  misc_RNA (1)...(19): siRNA sense strand
ugaaggcacuaaaccucau

SEQ ID NO: 1397491 - RNA, 19 nt, Homo sapiens
  misc_RNA (1)...(19): siRNA sense strand
gauaggcacucccaaaagg

SEQ ID NO: 1397492 - RNA, 19 nt, Homo sapiens
  misc_RNA (1)...(19): siRNA sense strand
ggccaagauuuaagcacau

SEQ ID NO: 1397493 - RNA, 19 nt, Homo sapiens
  misc_RNA (1)...(19): siRNA sense strand
augcagagauucggcagaa

SEQ ID NO: 1397494 - RNA, 19 nt, Homo sapiens
  misc_RNA (1)...(19): siRNA sense strand
caaccaagacagggaagga

SEQ ID NO: 1397495 - RNA, 19 nt, Homo sapiens
  misc_RNA (1)...(19): siRNA sense strand
uauuacggcucauccuaca

SEQ ID NO: 1397496 - RNA, 19 nt, Homo sapiens
  misc_RNA (1)...(19): siRNA sense strand
gagcugcuucgagaggaua

SEQ ID NO: 1397497 - RNA, 19 nt, Homo sapiens
  misc_RNA (1)...(19): siRNA sense strand
cagcucuucuccagaucuu

SEQ ID NO: 1397498 - RNA, 19 nt, Homo sapiens
  misc_RNA (1)...(19): siRNA sense strand
cagacaaggcaucaccaaa

SEQ ID NO: 1397499 - RNA, 19 nt, Homo sapiens
  misc_RNA (1)...(19): siRNA sense strand
ucccagcucuucuccagau

SEQ ID NO: 1397500 - RNA, 19 nt, Homo sapiens
  misc_RNA (1)...(19): siRNA sense strand
gggugaaggagauguacaa

SEQ ID NO: 1397501 - RNA, 19 nt, Homo sapiens
  misc_RNA (1)...(19): siRNA sense strand
ugaauacaacacacacaau

SEQ ID NO: 1397502 - RNA, 19 nt, Homo sapiens
  misc_RNA (1)...(19): siRNA sense strand
cagcacaagccuauggaau

SEQ ID NO: 1397503 - RNA, 19 nt, Homo sapiens
  misc_RNA (1)...(19): siRNA sense strand
gacauuugcauccagauac

SEQ ID NO: 1397504 - RNA, 19 nt, Homo sapiens
  misc_RNA (1)...(19): siRNA sense strand
gaggauaaugcagagauuc

SEQ ID NO: 1397505 - RNA, 19 nt, Homo sapiens
  misc_RNA (1)...(19): siRNA sense strand
caagauuuaagcacauaca

SEQ ID NO: 1397506 - RNA, 19 nt, Homo sapiens
  misc_RNA (1)...(19): siRNA sense strand
agaugacaauggccaagau

SEQ ID NO: 1397507 - RNA, 19 nt, Homo sapiens
  misc_RNA (1)...(19): siRNA sense strand
auacaacacacacaaugga

SEQ ID NO: 1397508 - RNA, 19 nt, Homo sapiens
  misc_RNA (1)...(19): siRNA sense strand
ccagaugcacggcacaaca

SEQ ID NO: 1397509 - RNA, 19 nt, Homo sapiens
  misc_RNA (1)...(19): siRNA sense strand
cacaacaggguucuaucaa

SEQ ID NO: 1397510 - RNA, 19 nt, Homo sapiens
  misc_RNA (1)...(19): siRNA sense strand
gauacacaucuguucuuca

SEQ ID NO: 1397511 - RNA, 19 nt, Homo sapiens
  misc_RNA (1)...(19): siRNA sense strand
cuucaaccuugcagauaca

SEQ ID NO: 1397512 - RNA, 19 nt, Homo sapiens
  misc_RNA (1)...(19): siRNA sense strand
gauugucuggauaaacuga

SEQ ID NO: 1397513 - RNA, 19 nt, Homo sapiens
  misc_RNA (1)...(19): siRNA sense strand
uuuaagcacauacaacuuc

SEQ ID NO: 1397514 - RNA, 19 nt, Homo sapiens
  misc_RNA (1)...(19): siRNA sense strand
caaccuugcagauacacau

SEQ ID NO: 1397515 - RNA, 19 nt, Homo sapiens
  misc_RNA (1)...(19): siRNA sense strand
ggacuuggaugagacaaua

SEQ ID NO: 1397516 - RNA, 19 nt, Homo sapiens
  misc_RNA (1)...(19): siRNA sense strand
ugaaggagauguacaauac

SEQ ID NO: 1397517 - RNA, 19 nt, Homo sapiens
  misc_RNA (1)...(19): siRNA sense strand
gagaacaucuacagugcaa

SEQ ID NO: 1397518 - RNA, 19 nt, Homo sapiens
  misc_RNA (1)...(19): siRNA sense strand
ugacaauggccaagauuua

SEQ ID NO: 1397519 - RNA, 19 nt, Homo sapiens
  misc_RNA (1)...(19): siRNA sense strand
aaacagcgauugucuggau

SEQ ID NO: 1397520 - RNA, 19 nt, Homo sapiens
  misc_RNA (1)...(19): siRNA sense strand
caccaccacucaacuaauu

SEQ ID NO: 1397521 - RNA, 19 nt, Homo sapiens
  misc_RNA (1)...(19): siRNA sense strand
ccaaaguccugcuauaugg

SEQ ID NO: 1397522 - RNA, 19 nt, Homo sapiens
  misc_RNA (1)...(19): siRNA sense strand
gacaaggcaucaccaaauc

SEQ ID NO: 1397523 - RNA, 19 nt, Homo sapiens
  misc_RNA (1)...(19): siRNA sense strand
gcauuggccuuaugaugga

SEQ ID NO: 1397524 - RNA, 19 nt, Homo sapiens
  misc_RNA (1)...(19): siRNA sense strand
ggacauuugcauccagaua

SEQ ID NO: 1397525 - RNA, 19 nt, Homo sapiens
  misc_RNA (1)...(19): siRNA sense strand
gaauacaacacacacaaug

SEQ ID NO: 1397526 - RNA, 19 nt, Homo sapiens
  misc_RNA (1)...(19): siRNA sense strand
gcacaacaggguucuauca

SEQ ID NO: 1397527 - RNA, 19 nt, Homo sapiens
  misc_RNA (1)...(19): siRNA sense strand
gcacuaaaccucaucaacu

SEQ ID NO: 1397528 - RNA, 19 nt, Homo sapiens
  misc_RNA (1)...(19): siRNA sense strand
gcugacggcuuccacaguu

SEQ ID NO: 1397529 - RNA, 19 nt, Homo sapiens
  misc_RNA (1)...(19): siRNA sense strand
acacaucuguucuucaaug

SEQ ID NO: 1397530 - RNA, 19 nt, Homo sapiens
  misc_RNA (1)...(19): siRNA sense strand
gaaaugguagaacuaguga

SEQ ID NO: 1397531 - RNA, 19 nt, Homo sapiens
  misc_RNA (1)...(19): siRNA sense strand
cccuggagcuggaguauuu

SEQ ID NO: 1397532 - RNA, 19 nt, Homo sapiens
  misc_RNA (1)...(19): siRNA sense strand
gaucggugaugguguggaa

SEQ ID NO: 1397533 - RNA, 19 nt, Homo sapiens
  misc_RNA (1)...(19): siRNA sense strand
gacaauggccaagauuuaa

SEQ ID NO: 1397534 - RNA, 19 nt, Homo sapiens
  misc_RNA (1)...(19): siRNA sense strand
gcgauugucuggauaaacu

SEQ ID NO: 1397535 - RNA, 19 nt, Homo sapiens
  misc_RNA (1)...(19): siRNA sense strand
ggaaaugguagaacuagug

SEQ ID NO: 1397536 - RNA, 19 nt, Homo sapiens
  misc_RNA (1)...(19): siRNA sense strand
auacacaucuguucuucaa

SEQ ID NO: 1397537 - RNA, 19 nt, Homo sapiens
  misc_RNA (1)...(19): siRNA sense strand
ucacccagccucacuguaa

SEQ ID NO: 1397538 - RNA, 19 nt, Homo sapiens
  misc_RNA (1)...(19): siRNA sense strand
ggucuguguuuccuauuga

SEQ ID NO: 1397539 - RNA, 19 nt, Homo sapiens
  misc_RNA (1)...(19): siRNA sense strand
gccaagauuuaagcacaua

SEQ ID NO: 1397540 - RNA, 19 nt, Homo sapiens
  misc_RNA (1)...(19): siRNA sense strand
caaccagaguuccgaguca

SEQ ID NO: 1397541 - RNA, 19 nt, Homo sapiens
  misc_RNA (1)...(19): siRNA sense strand
uacaauaccuacaagaaca

SEQ ID NO: 1397542 - RNA, 19 nt, Homo sapiens
  misc_RNA (1)...(19): siRNA sense strand
caaggaaaugguagaacua

SEQ ID NO: 1397543 - RNA, 19 nt, Homo sapiens
  misc_RNA (1)...(19): siRNA sense strand
gugaaggagauguacaaua

SEQ ID NO: 1397544 - RNA, 19 nt, Homo sapiens
  misc_RNA (1)...(19): siRNA sense strand
gcacaagccuauggaaucc

SEQ ID NO: 1397545 - RNA, 19 nt, Homo sapiens
  misc_RNA (1)...(19): siRNA sense strand
cgaaagagggagacacaga

SEQ ID NO: 1397546 - RNA, 19 nt, Homo sapiens
  misc_RNA (1)...(19): siRNA sense strand
agacaaggcaucaccaaau

SEQ ID NO: 1397547 - RNA, 19 nt, Homo sapiens
  misc_RNA (1)...(19): siRNA sense strand
gccaaaguccugcuauaug

SEQ ID NO: 1397548 - RNA, 19 nt, Homo sapiens
  misc_RNA (1)...(19): siRNA sense strand
ggagugugcaccaggacua

SEQ ID NO: 1397549 - RNA, 19 nt, Homo sapiens
  misc_RNA (1)...(19): siRNA sense strand
ggagcuggaguauuuauag

SEQ ID NO: 1397550 - RNA, 19 nt, Homo sapiens
  misc_RNA (1)...(19): siRNA sense strand
uggccaaaguccugcuaua

SEQ ID NO: 1397551 - RNA, 19 nt, Homo sapiens
  misc_RNA (1)...(19): siRNA sense strand
gcccaacugugucaaugug

SEQ ID NO: 1397552 - RNA, 19 nt, Homo sapiens
  misc_RNA (1)...(19): siRNA sense strand
ggaggauugugaccagauc

SEQ ID NO: 1397553 - RNA, 19 nt, Homo sapiens
  misc_RNA (1)...(19): siRNA sense strand
acaaggaaaugguagaacu

SEQ ID NO: 1397554 - RNA, 19 nt, Homo sapiens
  misc_RNA (1)...(19): siRNA sense strand
ggucaccaccacucaacua

SEQ ID NO: 1397555 - RNA, 19 nt, Homo sapiens
  misc_RNA (1)...(19): siRNA sense strand
gugaccagauccacguuga

SEQ ID NO: 1397556 - RNA, 19 nt, Homo sapiens
  misc_RNA (1)...(19): siRNA sense strand
guacaaggaaaugguagaa

SEQ ID NO: 1397557 - RNA, 19 nt, Homo sapiens
  misc_RNA (1)...(19): siRNA sense strand
gggucuguguuuccuauug

SEQ ID NO: 1397558 - RNA, 19 nt, Homo sapiens
  misc_RNA (1)...(19): siRNA sense strand
guacaauaccuacaagaac

SEQ ID NO: 1397559 - RNA, 19 nt, Homo sapiens
  misc_RNA (1)...(19): siRNA sense strand
ggccaaaguccugcuauau

SEQ ID NO: 1397560 - RNA, 19 nt, Homo sapiens
  misc_RNA (1)...(19): siRNA sense strand
gcugcuguguggacucuga

SEQ ID NO: 1397561 - RNA, 19 nt, Homo sapiens
  misc_RNA (1)...(19): siRNA sense strand
ggucuaagaggagcaguga

SEQ ID NO: 1397562 - RNA, 19 nt, Homo sapiens
  misc_RNA (1)...(19): siRNA sense strand
gagaggauaaugcagagau

SEQ ID NO: 1397563 - RNA, 19 nt, Homo sapiens
  misc_RNA (1)...(19): siRNA sense strand
cacuaaaccucaucaacuc

SEQ ID NO: 1397564 - RNA, 19 nt, Homo sapiens
  misc_RNA (1)...(19): siRNA sense strand
gcgcauuggccuuaugaug

SEQ ID NO: 1397565 - RNA, 19 nt, Homo sapiens
  misc_RNA (1)...(19): siRNA sense strand
acaacaggguucuaucaag

SEQ ID NO: 1397566 - RNA, 19 nt, Homo sapiens
  misc_RNA (1)...(19): siRNA sense strand
agaggauaaugcagagauu

SEQ ID NO: 1397567 - RNA, 19 nt, Homo sapiens
  misc_RNA (1)...(19): siRNA sense strand
gauuuaagcacauacaacu

SEQ ID NO: 1397568 - RNA, 19 nt, Homo sapiens
  misc_RNA (1)...(19): siRNA sense strand
gacagagcccauacaccua

SEQ ID NO: 1397569 - RNA, 19 nt, Homo sapiens
  misc_RNA (1)...(19): siRNA sense strand
cacccagccucacuguaaa

SEQ ID NO: 1397570 - RNA, 19 nt, Homo sapiens
  misc_RNA (1)...(19): siRNA sense strand
gaugacaauggccaagauu

SEQ ID NO: 1397571 - RNA, 19 nt, Homo sapiens
  misc_RNA (1)...(19): siRNA sense strand
gaccagauccacguugaug

SEQ ID NO: 1397572 - RNA, 19 nt, Homo sapiens
  misc_RNA (1)...(19): siRNA sense strand
cacaucuguucuucaauga

SEQ ID NO: 1397573 - RNA, 19 nt, Homo sapiens
  misc_RNA (1)...(19): siRNA sense strand
guugauaggcacucccaaa

SEQ ID NO: 1397574 - RNA, 19 nt, Homo sapiens
  misc_RNA (1)...(19): siRNA sense strand
gugaauacaacacacacaa

SEQ ID NO: 1397575 - RNA, 19 nt, Homo sapiens
  misc_RNA (1)...(19): siRNA sense strand
ccacuggacagagcccaua

SEQ ID NO: 1397576 - RNA, 19 nt, Homo sapiens
  misc_RNA (1)...(19): siRNA sense strand
gcagagauucggcagaaaa

SEQ ID NO: 1397577 - RNA, 19 nt, Homo sapiens
  misc_RNA (1)...(19): siRNA sense strand
uuacccaccuccagcacaa

SEQ ID NO: 1397578 - RNA, 19 nt, Homo sapiens
  misc_RNA (1)...(19): siRNA sense strand
gcccauacaccuaccagau

SEQ ID NO: 1397579 - RNA, 19 nt, Homo sapiens
  misc_RNA (1)...(19): siRNA sense strand
ugaaggcacuaaaccucau

SEQ ID NO: 1397580 - RNA, 19 nt, Homo sapiens
  misc_RNA (1)...(19): siRNA sense strand
gauaggcacucccaaaagg

SEQ ID NO: 1397581 - RNA, 19 nt, Homo sapiens
  misc_RNA (1)...(19): siRNA sense strand
cagcgauugucuggauaaa

SEQ ID NO: 1397582 - RNA, 19 nt, Homo sapiens
  misc_RNA (1)...(19): siRNA sense strand
ggccaagauuuaagcacau

SEQ ID NO: 1397583 - RNA, 19 nt, Homo sapiens
  misc_RNA (1)...(19): siRNA sense strand
augcagagauucggcagaa

SEQ ID NO: 1397584 - RNA, 19 nt, Homo sapiens
  misc_RNA (1)...(19): siRNA sense strand
caaccaagacagggaagga

SEQ ID NO: 1397585 - RNA, 19 nt, Homo sapiens
  misc_RNA (1)...(19): siRNA sense strand
cagacaaggcaucaccaaa

SEQ ID NO: 1397586 - RNA, 19 nt, Homo sapiens
  misc_RNA (1)...(19): siRNA sense strand
gagcugcuucgagaggaua

SEQ ID NO: 1397587 - RNA, 19 nt, Homo sapiens
  misc_RNA (1)...(19): siRNA sense strand
cagcucuucuccagaucuu

SEQ ID NO: 1397588 - RNA, 19 nt, Homo sapiens
  misc_RNA (1)...(19): siRNA sense strand
ucccagcucuucuccagau

SEQ ID NO: 1397589 - RNA, 19 nt, Homo sapiens
  misc_RNA (1)...(19): siRNA sense strand
uauuacggcucauccuaca

SEQ ID NO: 1397590 - RNA, 19 nt, Homo sapiens
  misc_RNA (1)...(19): siRNA sense strand
gggugaaggagauguacaa

SEQ ID NO: 1397591 - RNA, 19 nt, Homo sapiens
  misc_RNA (1)...(19): siRNA sense strand
cagcacaagccuauggaau

SEQ ID NO: 1397592 - RNA, 19 nt, Homo sapiens
  misc_RNA (1)...(19): siRNA sense strand
ugaauacaacacacacaau

SEQ ID NO: 1397593 - RNA, 19 nt, Homo sapiens
  misc_RNA (1)...(19): siRNA sense strand
gacauuugcauccagauac

SEQ ID NO: 1397594 - RNA, 19 nt, Homo sapiens
  misc_RNA (1)...(19): siRNA sense strand
gaggauaaugcagagauuc

SEQ ID NO: 1397595 - RNA, 19 nt, Homo sapiens
  misc_RNA (1)...(19): siRNA sense strand
caagauuuaagcacauaca

SEQ ID NO: 1397596 - RNA, 19 nt, Homo sapiens
  misc_RNA (1)...(19): siRNA sense strand
agaugacaauggccaagau

SEQ ID NO: 1397597 - RNA, 19 nt, Homo sapiens
  misc_RNA (1)...(19): siRNA sense strand
ccagaugcacggcacaaca

SEQ ID NO: 1397598 - RNA, 19 nt, Homo sapiens
  misc_RNA (1)...(19): siRNA sense strand
auacaacacacacaaugga

SEQ ID NO: 1397599 - RNA, 19 nt, Homo sapiens
  misc_RNA (1)...(19): siRNA sense strand
cacaacaggguucuaucaa

SEQ ID NO: 1397600 - RNA, 19 nt, Homo sapiens
  misc_RNA (1)...(19): siRNA sense strand
gguacaaggaaaugguaga

SEQ ID NO: 1397601 - RNA, 19 nt, Homo sapiens
  misc_RNA (1)...(19): siRNA sense strand
gauacacaucuguucuuca

SEQ ID NO: 1397602 - RNA, 19 nt, Homo sapiens
  misc_RNA (1)...(19): siRNA sense strand
cuucaaccuugcagauaca

SEQ ID NO: 1397603 - RNA, 19 nt, Homo sapiens
  misc_RNA (1)...(19): siRNA sense strand
gauugucuggauaaacuga

SEQ ID NO: 1397604 - RNA, 19 nt, Homo sapiens
  misc_RNA (1)...(19): siRNA sense strand
uuuaagcacauacaacuuc

SEQ ID NO: 1397605 - RNA, 19 nt, Homo sapiens
  misc_RNA (1)...(19): siRNA sense strand
caaccuugcagauacacau

SEQ ID NO: 1397606 - RNA, 19 nt, Homo sapiens
  misc_RNA (1)...(19): siRNA sense strand
ggacuuggaugagacaaua

SEQ ID NO: 1397607 - RNA, 19 nt, Homo sapiens
  misc_RNA (1)...(19): siRNA sense strand
ugaaggagauguacaauac

SEQ ID NO: 1397608 - RNA, 19 nt, Homo sapiens
  misc_RNA (1)...(19): siRNA sense strand
gagaacaucuacagugcaa

SEQ ID NO: 1397609 - RNA, 19 nt, Homo sapiens
  misc_RNA (1)...(19): siRNA sense strand
ugacaauggccaagauuua

SEQ ID NO: 1397610 - RNA, 19 nt, Homo sapiens
  misc_RNA (1)...(19): siRNA sense strand
aaacagcgauugucuggau

SEQ ID NO: 1397611 - RNA, 19 nt, Homo sapiens
  misc_RNA (1)...(19): siRNA sense strand
caccaccacucaacuaauu

SEQ ID NO: 1397612 - RNA, 19 nt, Homo sapiens
  misc_RNA (1)...(19): siRNA sense strand
ccaaaguccugcuauaugg

SEQ ID NO: 1397613 - RNA, 19 nt, Homo sapiens
  misc_RNA (1)...(19): siRNA sense strand
gacaaggcaucaccaaauc

SEQ ID NO: 1397614 - RNA, 19 nt, Homo sapiens
  misc_RNA (1)...(19): siRNA sense strand
gcauuggccuuaugaugga

SEQ ID NO: 1397615 - RNA, 19 nt, Homo sapiens
  misc_RNA (1)...(19): siRNA sense strand
ggacauuugcauccagaua

SEQ ID NO: 1397616 - RNA, 19 nt, Homo sapiens
  misc_RNA (1)...(19): siRNA sense strand
gaauacaacacacacaaug

SEQ ID NO: 1397617 - RNA, 19 nt, Homo sapiens
  misc_RNA (1)...(19): siRNA sense strand
gcacaacaggguucuauca

SEQ ID NO: 1397618 - RNA, 19 nt, Homo sapiens
  misc_RNA (1)...(19): siRNA sense strand
gcacuaaaccucaucaacu

SEQ ID NO: 1397619 - RNA, 19 nt, Homo sapiens
  misc_RNA (1)...(19): siRNA sense strand
gcugacggcuuccacaguu

SEQ ID NO: 1397620 - RNA, 19 nt, Homo sapiens
  misc_RNA (1)...(19): siRNA sense strand
acacaucuguucuucaaug

SEQ ID NO: 1397621 - RNA, 19 nt, Homo sapiens
  misc_RNA (1)...(19): siRNA sense strand
gaucggugaugguguggaa

SEQ ID NO: 1397622 - RNA, 19 nt, Homo sapiens
  misc_RNA (1)...(19): siRNA sense strand
cccuggagcuggaguauuu

SEQ ID NO: 1397623 - RNA, 19 nt, Homo sapiens
  misc_RNA (1)...(19): siRNA sense strand
gacaauggccaagauuuaa

SEQ ID NO: 1397624 - RNA, 19 nt, Homo sapiens
  misc_RNA (1)...(19): siRNA sense strand
gcgauugucuggauaaacu

SEQ ID NO: 1397625 - RNA, 19 nt, Homo sapiens
  misc_RNA (1)...(19): siRNA sense strand
auacacaucuguucuucaa

SEQ ID NO: 1397626 - RNA, 19 nt, Homo sapiens
  misc_RNA (1)...(19): siRNA sense strand
ucacccagccucacuguaa

SEQ ID NO: 1397627 - RNA, 19 nt, Homo sapiens
  misc_RNA (1)...(19): siRNA sense strand
ggucuguguuuccuauuga

SEQ ID NO: 1397628 - RNA, 19 nt, Homo sapiens
  misc_RNA (1)...(19): siRNA sense strand
gccaagauuuaagcacaua

SEQ ID NO: 1397629 - RNA, 19 nt, Homo sapiens
  misc_RNA (1)...(19): siRNA sense strand
caaccagaguuccgaguca

SEQ ID NO: 1397630 - RNA, 19 nt, Homo sapiens
  misc_RNA (1)...(19): siRNA sense strand
uacaauaccuacaagaaca

SEQ ID NO: 1397631 - RNA, 19 nt, Homo sapiens
  misc_RNA (1)...(19): siRNA sense strand
gugaaggagauguacaaua

SEQ ID NO: 1397632 - RNA, 19 nt, Homo sapiens
  misc_RNA (1)...(19): siRNA sense strand
gcacaagccuauggaaucc

SEQ ID NO: 1397633 - RNA, 19 nt, Homo sapiens
  misc_RNA (1)...(19): siRNA sense strand
cgaaagagggagacacaga

SEQ ID NO: 1397634 - RNA, 19 nt, Homo sapiens
  misc_RNA (1)...(19): siRNA sense strand
agacaaggcaucaccaaau

SEQ ID NO: 1397635 - RNA, 19 nt, Homo sapiens
  misc_RNA (1)...(19): siRNA sense strand
gccaaaguccugcuauaug

SEQ ID NO: 1397636 - RNA, 19 nt, Homo sapiens
  misc_RNA (1)...(19): siRNA sense strand
ggagugugcaccaggacua

SEQ ID NO: 1397637 - RNA, 19 nt, Homo sapiens
  misc_RNA (1)...(19): siRNA sense strand
ggagcuggaguauuuauag

SEQ ID NO: 1397638 - RNA, 19 nt, Homo sapiens
  misc_RNA (1)...(19): siRNA sense strand
uggccaaaguccugcuaua

SEQ ID NO: 1397639 - RNA, 19 nt, Homo sapiens
  misc_RNA (1)...(19): siRNA sense strand
gcccaacugugucaaugug

SEQ ID NO: 1397640 - RNA, 19 nt, Homo sapiens
  misc_RNA (1)...(19): siRNA sense strand
ggaggauugugaccagauc

SEQ ID NO: 1397641 - RNA, 19 nt, Homo sapiens
  misc_RNA (1)...(19): siRNA sense strand
ggucaccaccacucaacua

SEQ ID NO: 1397642 - RNA, 19 nt, Homo sapiens
  misc_RNA (1)...(19): siRNA sense strand
gugaccagauccacguuga

SEQ ID NO: 1397643 - RNA, 19 nt, Homo sapiens
  misc_RNA (1)...(19): siRNA sense strand
gggucuguguuuccuauug

SEQ ID NO: 1397644 - RNA, 19 nt, Homo sapiens
  misc_RNA (1)...(19): siRNA sense strand
gcugcuguguggacucuga

SEQ ID NO: 1397645 - RNA, 19 nt, Homo sapiens
  misc_RNA (1)...(19): siRNA sense strand
ggccaaaguccugcuauau

SEQ ID NO: 1397646 - RNA, 19 nt, Homo sapiens
  misc_RNA (1)...(19): siRNA sense strand
guacaauaccuacaagaac

SEQ ID NO: 1397647 - RNA, 19 nt, Homo sapiens
  misc_RNA (1)...(19): siRNA sense strand
ggucuaagaggagcaguga

SEQ ID NO: 1397648 - RNA, 19 nt, Homo sapiens
  misc_RNA (1)...(19): siRNA sense strand
gagaggauaaugcagagau

SEQ ID NO: 1397649 - RNA, 19 nt, Homo sapiens
  misc_RNA (1)...(19): siRNA sense strand
cacuaaaccucaucaacuc

SEQ ID NO: 1397650 - RNA, 19 nt, Homo sapiens
  misc_RNA (1)...(19): siRNA sense strand
gcgcauuggccuuaugaug

SEQ ID NO: 1397651 - RNA, 19 nt, Homo sapiens
  misc_RNA (1)...(19): siRNA sense strand
acaacaggguucuaucaag

SEQ ID NO: 1397652 - RNA, 19 nt, Homo sapiens
  misc_RNA (1)...(19): siRNA sense strand
agaggauaaugcagagauu

SEQ ID NO: 1397653 - RNA, 19 nt, Homo sapiens
  misc_RNA (1)...(19): siRNA sense strand
gauuuaagcacauacaacu

SEQ ID NO: 1397654 - RNA, 19 nt, Homo sapiens
  misc_RNA (1)...(19): siRNA sense strand
gacagagcccauacaccua

SEQ ID NO: 1397655 - RNA, 19 nt, Homo sapiens
  misc_RNA (1)...(19): siRNA sense strand
cacccagccucacuguaaa

SEQ ID NO: 1397656 - RNA, 19 nt, Homo sapiens
  misc_RNA (1)...(19): siRNA sense strand
gaugacaauggccaagauu

SEQ ID NO: 1397657 - RNA, 19 nt, Homo sapiens
  misc_RNA (1)...(19): siRNA sense strand
gaccagauccacguugaug

SEQ ID NO: 1397658 - RNA, 19 nt, Homo sapiens
  misc_RNA (1)...(19): siRNA sense strand
cacaucuguucuucaauga

SEQ ID NO: 1397659 - RNA, 19 nt, Homo sapiens
  misc_RNA (1)...(19): siRNA sense strand
guugauaggcacucccaaa

SEQ ID NO: 1397660 - RNA, 19 nt, Homo sapiens
  misc_RNA (1)...(19): siRNA sense strand
gugaauacaacacacacaa

SEQ ID NO: 1397661 - RNA, 19 nt, Homo sapiens
  misc_RNA (1)...(19): siRNA sense strand
ccacuggacagagcccaua

SEQ ID NO: 1397662 - RNA, 19 nt, Homo sapiens
  misc_RNA (1)...(19): siRNA sense strand
gcagagauucggcagaaaa

SEQ ID NO: 1397663 - RNA, 19 nt, Homo sapiens
  misc_RNA (1)...(19): siRNA sense strand
uuacccaccuccagcacaa

SEQ ID NO: 1397664 - RNA, 19 nt, Homo sapiens
  misc_RNA (1)...(19): siRNA sense strand
gcccauacaccuaccagau

SEQ ID NO: 1397665 - RNA, 19 nt, Homo sapiens
  misc_RNA (1)...(19): siRNA sense strand
cagcgauugucuggauaaa

SEQ ID NO: 1397666 - RNA, 19 nt, Homo sapiens
  misc_RNA (1)...(19): siRNA sense strand
ugaaggcacuaaaccucau

SEQ ID NO: 1397667 - RNA, 19 nt, Homo sapiens
  misc_RNA (1)...(19): siRNA sense strand
gauaggcacucccaaaagg

SEQ ID NO: 1397668 - RNA, 19 nt, Homo sapiens
  misc_RNA (1)...(19): siRNA sense strand
ggccaagauuuaagcacau

SEQ ID NO: 1397669 - RNA, 19 nt, Homo sapiens
  misc_RNA (1)...(19): siRNA sense strand
augcagagauucggcagaa

SEQ ID NO: 1397670 - RNA, 19 nt, Homo sapiens
  misc_RNA (1)...(19): siRNA sense strand
caaccaagacagggaagga

SEQ ID NO: 1397671 - RNA, 19 nt, Homo sapiens
  misc_RNA (1)...(19): siRNA sense strand
uauuacggcucauccuaca

SEQ ID NO: 1397672 - RNA, 19 nt, Homo sapiens
  misc_RNA (1)...(19): siRNA sense strand
gagcugcuucgagaggaua

SEQ ID NO: 1397673 - RNA, 19 nt, Homo sapiens
  misc_RNA (1)...(19): siRNA sense strand
cagcucuucuccagaucuu

SEQ ID NO: 1397674 - RNA, 19 nt, Homo sapiens
  misc_RNA (1)...(19): siRNA sense strand
cagacaaggcaucaccaaa

SEQ ID NO: 1397675 - RNA, 19 nt, Homo sapiens
  misc_RNA (1)...(19): siRNA sense strand
ucccagcucuucuccagau

SEQ ID NO: 1397676 - RNA, 19 nt, Homo sapiens
  misc_RNA (1)...(19): siRNA sense strand
gggugaaggagauguacaa

SEQ ID NO: 1397677 - RNA, 19 nt, Homo sapiens
  misc_RNA (1)...(19): siRNA sense strand
ugaauacaacacacacaau

SEQ ID NO: 1397678 - RNA, 19 nt, Homo sapiens
  misc_RNA (1)...(19): siRNA sense strand
cagcacaagccuauggaau

SEQ ID NO: 1397679 - RNA, 19 nt, Homo sapiens
  misc_RNA (1)...(19): siRNA sense strand
gacauuugcauccagauac

SEQ ID NO: 1397680 - RNA, 19 nt, Homo sapiens
  misc_RNA (1)...(19): siRNA sense strand
gaggauaaugcagagauuc

SEQ ID NO: 1397681 - RNA, 19 nt, Homo sapiens
  misc_RNA (1)...(19): siRNA sense strand
caagauuuaagcacauaca

SEQ ID NO: 1397682 - RNA, 19 nt, Homo sapiens
  misc_RNA (1)...(19): siRNA sense strand
agaugacaauggccaagau

SEQ ID NO: 1397683 - RNA, 19 nt, Homo sapiens
  misc_RNA (1)...(19): siRNA sense strand
auacaacacacacaaugga

SEQ ID NO: 1397684 - RNA, 19 nt, Homo sapiens
  misc_RNA (1)...(19): siRNA sense strand
ccagaugcacggcacaaca

SEQ ID NO: 1397685 - RNA, 19 nt, Homo sapiens
  misc_RNA (1)...(19): siRNA sense strand
cacaacaggguucuaucaa

SEQ ID NO: 1397686 - RNA, 19 nt, Homo sapiens
  misc_RNA (1)...(19): siRNA sense strand
gauacacaucuguucuuca

SEQ ID NO: 1397687 - RNA, 19 nt, Homo sapiens
  misc_RNA (1)...(19): siRNA sense strand
cuucaaccuugcagauaca

SEQ ID NO: 1397688 - RNA, 19 nt, Homo sapiens
  misc_RNA (1)...(19): siRNA sense strand
gauugucuggauaaacuga

SEQ ID NO: 1397689 - RNA, 19 nt, Homo sapiens
  misc_RNA (1)...(19): siRNA sense strand
uuuaagcacauacaacuuc

SEQ ID NO: 1397690 - RNA, 19 nt, Homo sapiens
  misc_RNA (1)...(19): siRNA sense strand
caaccuugcagauacacau

SEQ ID NO: 1397691 - RNA, 19 nt, Homo sapiens
  misc_RNA (1)...(19): siRNA sense strand
ggacuuggaugagacaaua

SEQ ID NO: 1397692 - RNA, 19 nt, Homo sapiens
  misc_RNA (1)...(19): siRNA sense strand
ugaaggagauguacaauac

SEQ ID NO: 1397693 - RNA, 19 nt, Homo sapiens
  misc_RNA (1)...(19): siRNA sense strand
gagaacaucuacagugcaa

SEQ ID NO: 1397694 - RNA, 19 nt, Homo sapiens
  misc_RNA (1)...(19): siRNA sense strand
ugacaauggccaagauuua

SEQ ID NO: 1397695 - RNA, 19 nt, Homo sapiens
  misc_RNA (1)...(19): siRNA sense strand
aaacagcgauugucuggau

SEQ ID NO: 1397696 - RNA, 19 nt, Homo sapiens
  misc_RNA (1)...(19): siRNA sense strand
caccaccacucaacuaauu

SEQ ID NO: 1397697 - RNA, 19 nt, Homo sapiens
  misc_RNA (1)...(19): siRNA sense strand
ccaaaguccugcuauaugg

SEQ ID NO: 1397698 - RNA, 19 nt, Homo sapiens
  misc_RNA (1)...(19): siRNA sense strand
gacaaggcaucaccaaauc

SEQ ID NO: 1397699 - RNA, 19 nt, Homo sapiens
  misc_RNA (1)...(19): siRNA sense strand
gcauuggccuuaugaugga

SEQ ID NO: 1397700 - RNA, 19 nt, Homo sapiens
  misc_RNA (1)...(19): siRNA sense strand
ggacauuugcauccagaua

SEQ ID NO: 1397701 - RNA, 19 nt, Homo sapiens
  misc_RNA (1)...(19): siRNA sense strand
gaauacaacacacacaaug

SEQ ID NO: 1397702 - RNA, 19 nt, Homo sapiens
  misc_RNA (1)...(19): siRNA sense strand
gcacaacaggguucuauca

SEQ ID NO: 1397703 - RNA, 19 nt, Homo sapiens
  misc_RNA (1)...(19): siRNA sense strand
gcacuaaaccucaucaacu

SEQ ID NO: 1397704 - RNA, 19 nt, Homo sapiens
  misc_RNA (1)...(19): siRNA sense strand
gcugacggcuuccacaguu

SEQ ID NO: 1397705 - RNA, 19 nt, Homo sapiens
  misc_RNA (1)...(19): siRNA sense strand
acacaucuguucuucaaug

SEQ ID NO: 1397706 - RNA, 19 nt, Homo sapiens
  misc_RNA (1)...(19): siRNA sense strand
gaucggugaugguguggaa

SEQ ID NO: 1397707 - RNA, 19 nt, Homo sapiens
  misc_RNA (1)...(19): siRNA sense strand
cccuggagcuggaguauuu

SEQ ID NO: 1397708 - RNA, 19 nt, Homo sapiens
  misc_RNA (1)...(19): siRNA sense strand
gacaauggccaagauuuaa

SEQ ID NO: 1397709 - RNA, 19 nt, Homo sapiens
  misc_RNA (1)...(19): siRNA sense strand
gcgauugucuggauaaacu

SEQ ID NO: 1397710 - RNA, 19 nt, Homo sapiens
  misc_RNA (1)...(19): siRNA sense strand
auacacaucuguucuucaa

SEQ ID NO: 1397711 - RNA, 19 nt, Homo sapiens
  misc_RNA (1)...(19): siRNA sense strand
ucacccagccucacuguaa

SEQ ID NO: 1397712 - RNA, 19 nt, Homo sapiens
  misc_RNA (1)...(19): siRNA sense strand
ggucuguguuuccuauuga

SEQ ID NO: 1397713 - RNA, 19 nt, Homo sapiens
  misc_RNA (1)...(19): siRNA sense strand
gccaagauuuaagcacaua

SEQ ID NO: 1397714 - RNA, 19 nt, Homo sapiens
  misc_RNA (1)...(19): siRNA sense strand
caaccagaguuccgaguca

SEQ ID NO: 1397715 - RNA, 19 nt, Homo sapiens
  misc_RNA (1)...(19): siRNA sense strand
uacaauaccuacaagaaca

SEQ ID NO: 1397716 - RNA, 19 nt, Homo sapiens
  misc_RNA (1)...(19): siRNA sense strand
gugaaggagauguacaaua

SEQ ID NO: 1397717 - RNA, 19 nt, Homo sapiens
  misc_RNA (1)...(19): siRNA sense strand
gcacaagccuauggaaucc

SEQ ID NO: 1397718 - RNA, 19 nt, Homo sapiens
  misc_RNA (1)...(19): siRNA sense strand
cgaaagagggagacacaga

SEQ ID NO: 1397719 - RNA, 19 nt, Homo sapiens
  misc_RNA (1)...(19): siRNA sense strand
agacaaggcaucaccaaau

SEQ ID NO: 1397720 - RNA, 19 nt, Homo sapiens
  misc_RNA (1)...(19): siRNA sense strand
gccaaaguccugcuauaug

SEQ ID NO: 1397721 - RNA, 19 nt, Homo sapiens
  misc_RNA (1)...(19): siRNA sense strand
ggagugugcaccaggacua

SEQ ID NO: 1397722 - RNA, 19 nt, Homo sapiens
  misc_RNA (1)...(19): siRNA sense strand
ggagcuggaguauuuauag

SEQ ID NO: 1397723 - RNA, 19 nt, Homo sapiens
  misc_RNA (1)...(19): siRNA sense strand
uggccaaaguccugcuaua

SEQ ID NO: 1397724 - RNA, 19 nt, Homo sapiens
  misc_RNA (1)...(19): siRNA sense strand
gcccaacugugucaaugug

SEQ ID NO: 1397725 - RNA, 19 nt, Homo sapiens
  misc_RNA (1)...(19): siRNA sense strand
ggaggauugugaccagauc

SEQ ID NO: 1397726 - RNA, 19 nt, Homo sapiens
  misc_RNA (1)...(19): siRNA sense strand
ggucaccaccacucaacua

SEQ ID NO: 1397727 - RNA, 19 nt, Homo sapiens
  misc_RNA (1)...(19): siRNA sense strand
gugaccagauccacguuga

SEQ ID NO: 1397728 - RNA, 19 nt, Homo sapiens
  misc_RNA (1)...(19): siRNA sense strand
gggucuguguuuccuauug

SEQ ID NO: 1397729 - RNA, 19 nt, Homo sapiens
  misc_RNA (1)...(19): siRNA sense strand
gcugcuguguggacucuga

SEQ ID NO: 1397730 - RNA, 19 nt, Homo sapiens
  misc_RNA (1)...(19): siRNA sense strand
ggccaaaguccugcuauau

SEQ ID NO: 1397731 - RNA, 19 nt, Homo sapiens
  misc_RNA (1)...(19): siRNA sense strand
guacaauaccuacaagaac

SEQ ID NO: 1397732 - RNA, 19 nt, Homo sapiens
  misc_RNA (1)...(19): siRNA sense strand
ggucuaagaggagcaguga

SEQ ID NO: 1397733 - RNA, 19 nt, Homo sapiens
  misc_RNA (1)...(19): siRNA sense strand
gagaggauaaugcagagau

SEQ ID NO: 1397734 - RNA, 19 nt, Homo sapiens
  misc_RNA (1)...(19): siRNA sense strand
cacuaaaccucaucaacuc

SEQ ID NO: 1397735 - RNA, 19 nt, Homo sapiens
  misc_RNA (1)...(19): siRNA sense strand
gcgcauuggccuuaugaug

SEQ ID NO: 1397736 - RNA, 19 nt, Homo sapiens
  misc_RNA (1)...(19): siRNA sense strand
acaacaggguucuaucaag

SEQ ID NO: 1397737 - RNA, 19 nt, Homo sapiens
  misc_RNA (1)...(19): siRNA sense strand
agaggauaaugcagagauu

SEQ ID NO: 1397738 - RNA, 19 nt, Homo sapiens
  misc_RNA (1)...(19): siRNA sense strand
gauuuaagcacauacaacu

SEQ ID NO: 1397739 - RNA, 19 nt, Homo sapiens
  misc_RNA (1)...(19): siRNA sense strand
gacagagcccauacaccua

SEQ ID NO: 1397740 - RNA, 19 nt, Homo sapiens
  misc_RNA (1)...(19): siRNA sense strand
cacccagccucacuguaaa

SEQ ID NO: 1397741 - RNA, 19 nt, Homo sapiens
  misc_RNA (1)...(19): siRNA sense strand
gaugacaauggccaagauu

SEQ ID NO: 1397742 - RNA, 19 nt, Homo sapiens
  misc_RNA (1)...(19): siRNA sense strand
gaccagauccacguugaug

SEQ ID NO: 1397743 - RNA, 19 nt, Homo sapiens
  misc_RNA (1)...(19): siRNA sense strand
cacaucuguucuucaauga

SEQ ID NO: 1397744 - RNA, 19 nt, Homo sapiens
  misc_RNA (1)...(19): siRNA sense strand
guugauaggcacucccaaa

SEQ ID NO: 1397745 - RNA, 19 nt, Homo sapiens
  misc_RNA (1)...(19): siRNA sense strand
gugaauacaacacacacaa

SEQ ID NO: 1397746 - RNA, 19 nt, Homo sapiens
  misc_RNA (1)...(19): siRNA sense strand
ccacuggacagagcccaua

SEQ ID NO: 1397747 - RNA, 19 nt, Homo sapiens
  misc_RNA (1)...(19): siRNA sense strand
gcagagauucggcagaaaa

SEQ ID NO: 1397748 - RNA, 19 nt, Homo sapiens
  misc_RNA (1)...(19): siRNA sense strand
uuacccaccuccagcacaa

SEQ ID NO: 1397749 - RNA, 19 nt, Homo sapiens
  misc_RNA (1)...(19): siRNA sense strand
gcccauacaccuaccagau

SEQ ID NO: 1397750 - RNA, 19 nt, Homo sapiens
  misc_RNA (1)...(19): siRNA sense strand
cagcgauugucuggauaaa

SEQ ID NO: 1397751 - RNA, 19 nt, Homo sapiens
  misc_RNA (1)...(19): siRNA sense strand
ugaaggcacuaaaccucau

SEQ ID NO: 1397752 - RNA, 19 nt, Homo sapiens
  misc_RNA (1)...(19): siRNA sense strand
gauaggcacucccaaaagg

SEQ ID NO: 1397753 - RNA, 19 nt, Homo sapiens
  misc_RNA (1)...(19): siRNA sense strand
ggccaagauuuaagcacau

SEQ ID NO: 1397754 - RNA, 19 nt, Homo sapiens
  misc_RNA (1)...(19): siRNA sense strand
augcagagauucggcagaa

SEQ ID NO: 1397755 - RNA, 19 nt, Homo sapiens
  misc_RNA (1)...(19): siRNA sense strand
caaccaagacagggaagga

SEQ ID NO: 1397756 - RNA, 19 nt, Homo sapiens
  misc_RNA (1)...(19): siRNA sense strand
uauuacggcucauccuaca

SEQ ID NO: 1397757 - RNA, 19 nt, Homo sapiens
  misc_RNA (1)...(19): siRNA sense strand
gagcugcuucgagaggaua

SEQ ID NO: 1397758 - RNA, 19 nt, Homo sapiens
  misc_RNA (1)...(19): siRNA sense strand
cagcucuucuccagaucuu

SEQ ID NO: 1397759 - RNA, 19 nt, Homo sapiens
  misc_RNA (1)...(19): siRNA sense strand
cagacaaggcaucaccaaa

SEQ ID NO: 1397760 - RNA, 19 nt, Homo sapiens
  misc_RNA (1)...(19): siRNA sense strand
ucccagcucuucuccagau

SEQ ID NO: 1397761 - RNA, 19 nt, Homo sapiens
  misc_RNA (1)...(19): siRNA sense strand
gggugaaggagauguacaa

SEQ ID NO: 1397762 - RNA, 19 nt, Homo sapiens
  misc_RNA (1)...(19): siRNA sense strand
ugaauacaacacacacaau

SEQ ID NO: 1397763 - RNA, 19 nt, Homo sapiens
  misc_RNA (1)...(19): siRNA sense strand
cagcacaagccuauggaau

SEQ ID NO: 1397764 - RNA, 19 nt, Homo sapiens
  misc_RNA (1)...(19): siRNA sense strand
gacauuugcauccagauac

SEQ ID NO: 1397765 - RNA, 19 nt, Homo sapiens
  misc_RNA (1)...(19): siRNA sense strand
gaggauaaugcagagauuc

SEQ ID NO: 1397766 - RNA, 19 nt, Homo sapiens
  misc_RNA (1)...(19): siRNA sense strand
caagauuuaagcacauaca

SEQ ID NO: 1397767 - RNA, 19 nt, Homo sapiens
  misc_RNA (1)...(19): siRNA sense strand
agaugacaauggccaagau

SEQ ID NO: 1397768 - RNA, 19 nt, Homo sapiens
  misc_RNA (1)...(19): siRNA sense strand
auacaacacacacaaugga

SEQ ID NO: 1397769 - RNA, 19 nt, Homo sapiens
  misc_RNA (1)...(19): siRNA sense strand
ccagaugcacggcacaaca

SEQ ID NO: 1397770 - RNA, 19 nt, Homo sapiens
  misc_RNA (1)...(19): siRNA sense strand
cacaacaggguucuaucaa

SEQ ID NO: 1397771 - RNA, 19 nt, Homo sapiens
  misc_RNA (1)...(19): siRNA sense strand
gauacacaucuguucuuca

SEQ ID NO: 1397772 - RNA, 19 nt, Homo sapiens
  misc_RNA (1)...(19): siRNA sense strand
cuucaaccuugcagauaca

SEQ ID NO: 1397773 - RNA, 19 nt, Homo sapiens
  misc_RNA (1)...(19): siRNA sense strand
gauugucuggauaaacuga

SEQ ID NO: 1397774 - RNA, 19 nt, Homo sapiens
  misc_RNA (1)...(19): siRNA sense strand
uuuaagcacauacaacuuc

SEQ ID NO: 1397775 - RNA, 19 nt, Homo sapiens
  misc_RNA (1)...(19): siRNA sense strand
caaccuugcagauacacau

SEQ ID NO: 1397776 - RNA, 19 nt, Homo sapiens
  misc_RNA (1)...(19): siRNA sense strand
ggacuuggaugagacaaua

SEQ ID NO: 1397777 - RNA, 19 nt, Homo sapiens
  misc_RNA (1)...(19): siRNA sense strand
ugaaggagauguacaauac

SEQ ID NO: 1397778 - RNA, 19 nt, Homo sapiens
  misc_RNA (1)...(19): siRNA sense strand
gagaacaucuacagugcaa

SEQ ID NO: 1397779 - RNA, 19 nt, Homo sapiens
  misc_RNA (1)...(19): siRNA sense strand
ugacaauggccaagauuua

SEQ ID NO: 1397780 - RNA, 19 nt, Homo sapiens
  misc_RNA (1)...(19): siRNA sense strand
aaacagcgauugucuggau

SEQ ID NO: 1397781 - RNA, 19 nt, Homo sapiens
  misc_RNA (1)...(19): siRNA sense strand
caccaccacucaacuaauu

SEQ ID NO: 1397782 - RNA, 19 nt, Homo sapiens
  misc_RNA (1)...(19): siRNA sense strand
ccaaaguccugcuauaugg

SEQ ID NO: 1397783 - RNA, 19 nt, Homo sapiens
  misc_RNA (1)...(19): siRNA sense strand
gacaaggcaucaccaaauc

SEQ ID NO: 1397784 - RNA, 19 nt, Homo sapiens
  misc_RNA (1)...(19): siRNA sense strand
gcauuggccuuaugaugga

SEQ ID NO: 1397785 - RNA, 19 nt, Homo sapiens
  misc_RNA (1)...(19): siRNA sense strand
ggacauuugcauccagaua

SEQ ID NO: 1397786 - RNA, 19 nt, Homo sapiens
  misc_RNA (1)...(19): siRNA sense strand
gaauacaacacacacaaug

SEQ ID NO: 1397787 - RNA, 19 nt, Homo sapiens
  misc_RNA (1)...(19): siRNA sense strand
gcacaacaggguucuauca

SEQ ID NO: 1397788 - RNA, 19 nt, Homo sapiens
  misc_RNA (1)...(19): siRNA sense strand
gcacuaaaccucaucaacu

SEQ ID NO: 1397789 - RNA, 19 nt, Homo sapiens
  misc_RNA (1)...(19): siRNA sense strand
gcugacggcuuccacaguu

SEQ ID NO: 1397790 - RNA, 19 nt, Homo sapiens
  misc_RNA (1)...(19): siRNA sense strand
acacaucuguucuucaaug

SEQ ID NO: 1397791 - RNA, 19 nt, Homo sapiens
  misc_RNA (1)...(19): siRNA sense strand
gaucggugaugguguggaa

SEQ ID NO: 1397792 - RNA, 19 nt, Homo sapiens
  misc_RNA (1)...(19): siRNA sense strand
cccuggagcuggaguauuu

SEQ ID NO: 1397793 - RNA, 19 nt, Homo sapiens
  misc_RNA (1)...(19): siRNA sense strand
gacaauggccaagauuuaa

SEQ ID NO: 1397794 - RNA, 19 nt, Homo sapiens
  misc_RNA (1)...(19): siRNA sense strand
gcgauugucuggauaaacu

SEQ ID NO: 1397795 - RNA, 19 nt, Homo sapiens
  misc_RNA (1)...(19): siRNA sense strand
auacacaucuguucuucaa

SEQ ID NO: 1397796 - RNA, 19 nt, Homo sapiens
  misc_RNA (1)...(19): siRNA sense strand
ucacccagccucacuguaa

SEQ ID NO: 1397797 - RNA, 19 nt, Homo sapiens
  misc_RNA (1)...(19): siRNA sense strand
ggucuguguuuccuauuga

SEQ ID NO: 1397798 - RNA, 19 nt, Homo sapiens
  misc_RNA (1)...(19): siRNA sense strand
gccaagauuuaagcacaua

SEQ ID NO: 1397799 - RNA, 19 nt, Homo sapiens
  misc_RNA (1)...(19): siRNA sense strand
caaccagaguuccgaguca

SEQ ID NO: 1397800 - RNA, 19 nt, Homo sapiens
  misc_RNA (1)...(19): siRNA sense strand
uacaauaccuacaagaaca

SEQ ID NO: 1397801 - RNA, 19 nt, Homo sapiens
  misc_RNA (1)...(19): siRNA sense strand
gugaaggagauguacaaua

SEQ ID NO: 1397802 - RNA, 19 nt, Homo sapiens
  misc_RNA (1)...(19): siRNA sense strand
gcacaagccuauggaaucc

SEQ ID NO: 1397803 - RNA, 19 nt, Homo sapiens
  misc_RNA (1)...(19): siRNA sense strand
cgaaagagggagacacaga

SEQ ID NO: 1397804 - RNA, 19 nt, Homo sapiens
  misc_RNA (1)...(19): siRNA sense strand
agacaaggcaucaccaaau

SEQ ID NO: 1397805 - RNA, 19 nt, Homo sapiens
  misc_RNA (1)...(19): siRNA sense strand
gccaaaguccugcuauaug

SEQ ID NO: 1397806 - RNA, 19 nt, Homo sapiens
  misc_RNA (1)...(19): siRNA sense strand
ggagugugcaccaggacua

SEQ ID NO: 1397807 - RNA, 19 nt, Homo sapiens
  misc_RNA (1)...(19): siRNA sense strand
ggagcuggaguauuuauag

SEQ ID NO: 1397808 - RNA, 19 nt, Homo sapiens
  misc_RNA (1)...(19): siRNA sense strand
uggccaaaguccugcuaua

SEQ ID NO: 1397809 - RNA, 19 nt, Homo sapiens
  misc_RNA (1)...(19): siRNA sense strand
gcccaacugugucaaugug

SEQ ID NO: 1397810 - RNA, 19 nt, Homo sapiens
  misc_RNA (1)...(19): siRNA sense strand
ggaggauugugaccagauc

SEQ ID NO: 1397811 - RNA, 19 nt, Homo sapiens
  misc_RNA (1)...(19): siRNA sense strand
ggucaccaccacucaacua

SEQ ID NO: 1397812 - RNA, 19 nt, Homo sapiens
  misc_RNA (1)...(19): siRNA sense strand
gugaccagauccacguuga

SEQ ID NO: 1397813 - RNA, 19 nt, Homo sapiens
  misc_RNA (1)...(19): siRNA sense strand
gggucuguguuuccuauug

SEQ ID NO: 1397814 - RNA, 19 nt, Homo sapiens
  misc_RNA (1)...(19): siRNA sense strand
gcugcuguguggacucuga

SEQ ID NO: 1397815 - RNA, 19 nt, Homo sapiens
  misc_RNA (1)...(19): siRNA sense strand
ggccaaaguccugcuauau

SEQ ID NO: 1397816 - RNA, 19 nt, Homo sapiens
  misc_RNA (1)...(19): siRNA sense strand
guacaauaccuacaagaac

SEQ ID NO: 1397817 - RNA, 19 nt, Homo sapiens
  misc_RNA (1)...(19): siRNA sense strand
ggucuaagaggagcaguga

SEQ ID NO: 1397818 - RNA, 19 nt, Homo sapiens
  misc_RNA (1)...(19): siRNA sense strand
gagaggauaaugcagagau

SEQ ID NO: 1397819 - RNA, 19 nt, Homo sapiens
  misc_RNA (1)...(19): siRNA sense strand
cacuaaaccucaucaacuc

SEQ ID NO: 1397820 - RNA, 19 nt, Homo sapiens
  misc_RNA (1)...(19): siRNA sense strand
gcgcauuggccuuaugaug

SEQ ID NO: 1397821 - RNA, 19 nt, Homo sapiens
  misc_RNA (1)...(19): siRNA sense strand
acaacaggguucuaucaag

SEQ ID NO: 1397822 - RNA, 19 nt, Homo sapiens
  misc_RNA (1)...(19): siRNA sense strand
agaggauaaugcagagauu

SEQ ID NO: 1397823 - RNA, 19 nt, Homo sapiens
  misc_RNA (1)...(19): siRNA sense strand
gauuuaagcacauacaacu

SEQ ID NO: 1397824 - RNA, 19 nt, Homo sapiens
  misc_RNA (1)...(19): siRNA sense strand
gacagagcccauacaccua

SEQ ID NO: 1397825 - RNA, 19 nt, Homo sapiens
  misc_RNA (1)...(19): siRNA sense strand
cacccagccucacuguaaa

SEQ ID NO: 1397826 - RNA, 19 nt, Homo sapiens
  misc_RNA (1)...(19): siRNA sense strand
gaugacaauggccaagauu

SEQ ID NO: 1397827 - RNA, 19 nt, Homo sapiens
  misc_RNA (1)...(19): siRNA sense strand
gaccagauccacguugaug

SEQ ID NO: 1397828 - RNA, 19 nt, Homo sapiens
  misc_RNA (1)...(19): siRNA sense strand
cacaucuguucuucaauga

SEQ ID NO: 1397829 - RNA, 19 nt, Homo sapiens
  misc_RNA (1)...(19): siRNA sense strand
guugauaggcacucccaaa

SEQ ID NO: 1397830 - RNA, 19 nt, Homo sapiens
  misc_RNA (1)...(19): siRNA sense strand
gugaauacaacacacacaa

SEQ ID NO: 1397831 - RNA, 19 nt, Homo sapiens
  misc_RNA (1)...(19): siRNA sense strand
ccacuggacagagcccaua

SEQ ID NO: 1397832 - RNA, 19 nt, Homo sapiens
  misc_RNA (1)...(19): siRNA sense strand
gcagagauucggcagaaaa

SEQ ID NO: 1397833 - RNA, 19 nt, Homo sapiens
  misc_RNA (1)...(19): siRNA sense strand
uuacccaccuccagcacaa

SEQ ID NO: 1397834 - RNA, 19 nt, Homo sapiens
  misc_RNA (1)...(19): siRNA sense strand
gcccauacaccuaccagau

SEQ ID NO: 1397835 - RNA, 19 nt, Homo sapiens
  misc_RNA (1)...(19): siRNA sense strand
cagcgauugucuggauaaa

SEQ ID NO: 1397836 - RNA, 19 nt, Homo sapiens
  misc_RNA (1)...(19): siRNA sense strand
ugaaggcacuaaaccucau

SEQ ID NO: 1397837 - RNA, 19 nt, Homo sapiens
  misc_RNA (1)...(19): siRNA sense strand
gauaggcacucccaaaagg

SEQ ID NO: 1397838 - RNA, 19 nt, Homo sapiens
  misc_RNA (1)...(19): siRNA sense strand
ggccaagauuuaagcacau

SEQ ID NO: 1397839 - RNA, 19 nt, Homo sapiens
  misc_RNA (1)...(19): siRNA sense strand
augcagagauucggcagaa

SEQ ID NO: 1397840 - RNA, 19 nt, Homo sapiens
  misc_RNA (1)...(19): siRNA sense strand
caaccaagacagggaagga

SEQ ID NO: 1397841 - RNA, 19 nt, Homo sapiens
  misc_RNA (1)...(19): siRNA sense strand
uauuacggcucauccuaca

SEQ ID NO: 1397842 - RNA, 19 nt, Homo sapiens
  misc_RNA (1)...(19): siRNA sense strand
gagcugcuucgagaggaua

SEQ ID NO: 1397843 - RNA, 19 nt, Homo sapiens
  misc_RNA (1)...(19): siRNA sense strand
cagcucuucuccagaucuu

SEQ ID NO: 1397844 - RNA, 19 nt, Homo sapiens
  misc_RNA (1)...(19): siRNA sense strand
cagacaaggcaucaccaaa

SEQ ID NO: 1397845 - RNA, 19 nt, Homo sapiens
  misc_RNA (1)...(19): siRNA sense strand
ucccagcucuucuccagau

SEQ ID NO: 1397846 - RNA, 19 nt, Homo sapiens
  misc_RNA (1)...(19): siRNA sense strand
gggugaaggagauguacaa

SEQ ID NO: 1397847 - RNA, 19 nt, Homo sapiens
  misc_RNA (1)...(19): siRNA sense strand
ugaauacaacacacacaau

SEQ ID NO: 1397848 - RNA, 19 nt, Homo sapiens
  misc_RNA (1)...(19): siRNA sense strand
cagcacaagccuauggaau

SEQ ID NO: 1397849 - RNA, 19 nt, Homo sapiens
  misc_RNA (1)...(19): siRNA sense strand
gacauuugcauccagauac

SEQ ID NO: 1397850 - RNA, 19 nt, Homo sapiens
  misc_RNA (1)...(19): siRNA sense strand
gaggauaaugcagagauuc

SEQ ID NO: 1397851 - RNA, 19 nt, Homo sapiens
  misc_RNA (1)...(19): siRNA sense strand
caagauuuaagcacauaca

SEQ ID NO: 1397852 - RNA, 19 nt, Homo sapiens
  misc_RNA (1)...(19): siRNA sense strand
agaugacaauggccaagau

SEQ ID NO: 1397853 - RNA, 19 nt, Homo sapiens
  misc_RNA (1)...(19): siRNA sense strand
auacaacacacacaaugga

SEQ ID NO: 1397854 - RNA, 19 nt, Homo sapiens
  misc_RNA (1)...(19): siRNA sense strand
ccagaugcacggcacaaca

SEQ ID NO: 1397855 - RNA, 19 nt, Homo sapiens
  misc_RNA (1)...(19): siRNA sense strand
cacaacaggguucuaucaa

SEQ ID NO: 1397856 - RNA, 19 nt, Homo sapiens
  misc_RNA (1)...(19): siRNA sense strand
gauacacaucuguucuuca

SEQ ID NO: 1397857 - RNA, 19 nt, Homo sapiens
  misc_RNA (1)...(19): siRNA sense strand
cuucaaccuugcagauaca

SEQ ID NO: 1397858 - RNA, 19 nt, Homo sapiens
  misc_RNA (1)...(19): siRNA sense strand
gauugucuggauaaacuga

SEQ ID NO: 1397859 - RNA, 19 nt, Homo sapiens
  misc_RNA (1)...(19): siRNA sense strand
uuuaagcacauacaacuuc

SEQ ID NO: 1397860 - RNA, 19 nt, Homo sapiens
  misc_RNA (1)...(19): siRNA sense strand
caaccuugcagauacacau

SEQ ID NO: 1397861 - RNA, 19 nt, Homo sapiens
  misc_RNA (1)...(19): siRNA sense strand
ggacuuggaugagacaaua

SEQ ID NO: 1397862 - RNA, 19 nt, Homo sapiens
  misc_RNA (1)...(19): siRNA sense strand
ugaaggagauguacaauac

SEQ ID NO: 1397863 - RNA, 19 nt, Homo sapiens
  misc_RNA (1)...(19): siRNA sense strand
gagaacaucuacagugcaa

SEQ ID NO: 1397864 - RNA, 19 nt, Homo sapiens
  misc_RNA (1)...(19): siRNA sense strand
ugacaauggccaagauuua

SEQ ID NO: 1397865 - RNA, 19 nt, Homo sapiens
  misc_RNA (1)...(19): siRNA sense strand
aaacagcgauugucuggau

SEQ ID NO: 1397866 - RNA, 19 nt, Homo sapiens
  misc_RNA (1)...(19): siRNA sense strand
caccaccacucaacuaauu

SEQ ID NO: 1397867 - RNA, 19 nt, Homo sapiens
  misc_RNA (1)...(19): siRNA sense strand
ccaaaguccugcuauaugg

SEQ ID NO: 1397868 - RNA, 19 nt, Homo sapiens
  misc_RNA (1)...(19): siRNA sense strand
gacaaggcaucaccaaauc

SEQ ID NO: 1397869 - RNA, 19 nt, Homo sapiens
  misc_RNA (1)...(19): siRNA sense strand
gcauuggccuuaugaugga

SEQ ID NO: 1397870 - RNA, 19 nt, Homo sapiens
  misc_RNA (1)...(19): siRNA sense strand
ggacauuugcauccagaua

SEQ ID NO: 1397871 - RNA, 19 nt, Homo sapiens
  misc_RNA (1)...(19): siRNA sense strand
gaauacaacacacacaaug

SEQ ID NO: 1397872 - RNA, 19 nt, Homo sapiens
  misc_RNA (1)...(19): siRNA sense strand
gcacaacaggguucuauca

SEQ ID NO: 1397873 - RNA, 19 nt, Homo sapiens
  misc_RNA (1)...(19): siRNA sense strand
gcacuaaaccucaucaacu

SEQ ID NO: 1397874 - RNA, 19 nt, Homo sapiens
  misc_RNA (1)...(19): siRNA sense strand
gcugacggcuuccacaguu

SEQ ID NO: 1397875 - RNA, 19 nt, Homo sapiens
  misc_RNA (1)...(19): siRNA sense strand
acacaucuguucuucaaug

SEQ ID NO: 1397876 - RNA, 19 nt, Homo sapiens
  misc_RNA (1)...(19): siRNA sense strand
gaucggugaugguguggaa

SEQ ID NO: 1397877 - RNA, 19 nt, Homo sapiens
  misc_RNA (1)...(19): siRNA sense strand
cccuggagcuggaguauuu

SEQ ID NO: 1397878 - RNA, 19 nt, Homo sapiens
  misc_RNA (1)...(19): siRNA sense strand
gacaauggccaagauuuaa

SEQ ID NO: 1397879 - RNA, 19 nt, Homo sapiens
  misc_RNA (1)...(19): siRNA sense strand
gcgauugucuggauaaacu

SEQ ID NO: 1397880 - RNA, 19 nt, Homo sapiens
  misc_RNA (1)...(19): siRNA sense strand
auacacaucuguucuucaa

SEQ ID NO: 1397881 - RNA, 19 nt, Homo sapiens
  misc_RNA (1)...(19): siRNA sense strand
ucacccagccucacuguaa

SEQ ID NO: 1397882 - RNA, 19 nt, Homo sapiens
  misc_RNA (1)...(19): siRNA sense strand
ggucuguguuuccuauuga

SEQ ID NO: 1397883 - RNA, 19 nt, Homo sapiens
  misc_RNA (1)...(19): siRNA sense strand
gccaagauuuaagcacaua

SEQ ID NO: 1397884 - RNA, 19 nt, Homo sapiens
  misc_RNA (1)...(19): siRNA sense strand
caaccagaguuccgaguca

SEQ ID NO: 1397885 - RNA, 19 nt, Homo sapiens
  misc_RNA (1)...(19): siRNA sense strand
uacaauaccuacaagaaca

SEQ ID NO: 1397886 - RNA, 19 nt, Homo sapiens
  misc_RNA (1)...(19): siRNA sense strand
gugaaggagauguacaaua

SEQ ID NO: 1397887 - RNA, 19 nt, Homo sapiens
  misc_RNA (1)...(19): siRNA sense strand
gcacaagccuauggaaucc

SEQ ID NO: 1397888 - RNA, 19 nt, Homo sapiens
  misc_RNA (1)...(19): siRNA sense strand
cgaaagagggagacacaga

SEQ ID NO: 1397889 - RNA, 19 nt, Homo sapiens
  misc_RNA (1)...(19): siRNA sense strand
agacaaggcaucaccaaau

SEQ ID NO: 1397890 - RNA, 19 nt, Homo sapiens
  misc_RNA (1)...(19): siRNA sense strand
gccaaaguccugcuauaug

SEQ ID NO: 1397891 - RNA, 19 nt, Homo sapiens
  misc_RNA (1)...(19): siRNA sense strand
ggagugugcaccaggacua

SEQ ID NO: 1397892 - RNA, 19 nt, Homo sapiens
  misc_RNA (1)...(19): siRNA sense strand
ggagcuggaguauuuauag

SEQ ID NO: 1397893 - RNA, 19 nt, Homo sapiens
  misc_RNA (1)...(19): siRNA sense strand
uggccaaaguccugcuaua

SEQ ID NO: 1397894 - RNA, 19 nt, Homo sapiens
  misc_RNA (1)...(19): siRNA sense strand
gcccaacugugucaaugug

SEQ ID NO: 1397895 - RNA, 19 nt, Homo sapiens
  misc_RNA (1)...(19): siRNA sense strand
ggaggauugugaccagauc

SEQ ID NO: 1397896 - RNA, 19 nt, Homo sapiens
  misc_RNA (1)...(19): siRNA sense strand
ggucaccaccacucaacua

SEQ ID NO: 1397897 - RNA, 19 nt, Homo sapiens
  misc_RNA (1)...(19): siRNA sense strand
gugaccagauccacguuga

SEQ ID NO: 1397898 - RNA, 19 nt, Homo sapiens
  misc_RNA (1)...(19): siRNA sense strand
gggucuguguuuccuauug

SEQ ID NO: 1397899 - RNA, 19 nt, Homo sapiens
  misc_RNA (1)...(19): siRNA sense strand
gcugcuguguggacucuga

SEQ ID NO: 1397900 - RNA, 19 nt, Homo sapiens
  misc_RNA (1)...(19): siRNA sense strand
ggccaaaguccugcuauau

SEQ ID NO: 1397901 - RNA, 19 nt, Homo sapiens
  misc_RNA (1)...(19): siRNA sense strand
guacaauaccuacaagaac

SEQ ID NO: 1397902 - RNA, 19 nt, Homo sapiens
  misc_RNA (1)...(19): siRNA sense strand
ggucuaagaggagcaguga

SEQ ID NO: 1397903 - RNA, 19 nt, Homo sapiens
  misc_RNA (1)...(19): siRNA sense strand
gagaggauaaugcagagau

SEQ ID NO: 1397904 - RNA, 19 nt, Homo sapiens
  misc_RNA (1)...(19): siRNA sense strand
cacuaaaccucaucaacuc

SEQ ID NO: 1397905 - RNA, 19 nt, Homo sapiens
  misc_RNA (1)...(19): siRNA sense strand
gcgcauuggccuuaugaug

SEQ ID NO: 1397906 - RNA, 19 nt, Homo sapiens
  misc_RNA (1)...(19): siRNA sense strand
acaacaggguucuaucaag

SEQ ID NO: 1397907 - RNA, 19 nt, Homo sapiens
  misc_RNA (1)...(19): siRNA sense strand
agaggauaaugcagagauu

SEQ ID NO: 1397908 - RNA, 19 nt, Homo sapiens
  misc_RNA (1)...(19): siRNA sense strand
gauuuaagcacauacaacu

SEQ ID NO: 1397909 - RNA, 19 nt, Homo sapiens
  misc_RNA (1)...(19): siRNA sense strand
gacagagcccauacaccua

SEQ ID NO: 1397910 - RNA, 19 nt, Homo sapiens
  misc_RNA (1)...(19): siRNA sense strand
cacccagccucacuguaaa

SEQ ID NO: 1397911 - RNA, 19 nt, Homo sapiens
  misc_RNA (1)...(19): siRNA sense strand
gaugacaauggccaagauu

SEQ ID NO: 1397912 - RNA, 19 nt, Homo sapiens
  misc_RNA (1)...(19): siRNA sense strand
gaccagauccacguugaug

SEQ ID NO: 1397913 - RNA, 19 nt, Homo sapiens
  misc_RNA (1)...(19): siRNA sense strand
cacaucuguucuucaauga

SEQ ID NO: 1397914 - RNA, 19 nt, Homo sapiens
  misc_RNA (1)...(19): siRNA sense strand
guugauaggcacucccaaa

SEQ ID NO: 1397915 - RNA, 19 nt, Homo sapiens
  misc_RNA (1)...(19): siRNA sense strand
gugaauacaacacacacaa

SEQ ID NO: 1397916 - RNA, 19 nt, Homo sapiens
  misc_RNA (1)...(19): siRNA sense strand
ccacuggacagagcccaua

SEQ ID NO: 1397917 - RNA, 19 nt, Homo sapiens
  misc_RNA (1)...(19): siRNA sense strand
gcagagauucggcagaaaa

SEQ ID NO: 1397918 - RNA, 19 nt, Homo sapiens
  misc_RNA (1)...(19): siRNA sense strand
uuacccaccuccagcacaa

SEQ ID NO: 1397919 - RNA, 19 nt, Homo sapiens
  misc_RNA (1)...(19): siRNA sense strand
gcccauacaccuaccagau

SEQ ID NO: 1397920 - RNA, 19 nt, Homo sapiens
  misc_RNA (1)...(19): siRNA sense strand
cagcgauugucuggauaaa

SEQ ID NO: 1397921 - RNA, 19 nt, Homo sapiens
  misc_RNA (1)...(19): siRNA sense strand
ugaaggcacuaaaccucau

SEQ ID NO: 1397922 - RNA, 19 nt, Homo sapiens
  misc_RNA (1)...(19): siRNA sense strand
gauaggcacucccaaaagg

SEQ ID NO: 1397923 - RNA, 19 nt, Homo sapiens
  misc_RNA (1)...(19): siRNA sense strand
ggccaagauuuaagcacau

SEQ ID NO: 1397924 - RNA, 19 nt, Homo sapiens
  misc_RNA (1)...(19): siRNA sense strand
augcagagauucggcagaa

SEQ ID NO: 1397925 - RNA, 19 nt, Homo sapiens
  misc_RNA (1)...(19): siRNA sense strand
caaccaagacagggaagga

SEQ ID NO: 1397926 - RNA, 19 nt, Homo sapiens
  misc_RNA (1)...(19): siRNA sense strand
uauuacggcucauccuaca

SEQ ID NO: 1397927 - RNA, 19 nt, Homo sapiens
  misc_RNA (1)...(19): siRNA sense strand
gagcugcuucgagaggaua

SEQ ID NO: 1397928 - RNA, 19 nt, Homo sapiens
  misc_RNA (1)...(19): siRNA sense strand
cagcucuucuccagaucuu

SEQ ID NO: 1397929 - RNA, 19 nt, Homo sapiens
  misc_RNA (1)...(19): siRNA sense strand
cagacaaggcaucaccaaa

SEQ ID NO: 1397930 - RNA, 19 nt, Homo sapiens
  misc_RNA (1)...(19): siRNA sense strand
ucccagcucuucuccagau

SEQ ID NO: 1397931 - RNA, 19 nt, Homo sapiens
  misc_RNA (1)...(19): siRNA sense strand
gggugaaggagauguacaa

SEQ ID NO: 1397932 - RNA, 19 nt, Homo sapiens
  misc_RNA (1)...(19): siRNA sense strand
ugaauacaacacacacaau

SEQ ID NO: 1397933 - RNA, 19 nt, Homo sapiens
  misc_RNA (1)...(19): siRNA sense strand
cagcacaagccuauggaau

SEQ ID NO: 1397934 - RNA, 19 nt, Homo sapiens
  misc_RNA (1)...(19): siRNA sense strand
gacauuugcauccagauac

SEQ ID NO: 1397935 - RNA, 19 nt, Homo sapiens
  misc_RNA (1)...(19): siRNA sense strand
gaggauaaugcagagauuc

SEQ ID NO: 1397936 - RNA, 19 nt, Homo sapiens
  misc_RNA (1)...(19): siRNA sense strand
caagauuuaagcacauaca

SEQ ID NO: 1397937 - RNA, 19 nt, Homo sapiens
  misc_RNA (1)...(19): siRNA sense strand
agaugacaauggccaagau

SEQ ID NO: 1397938 - RNA, 19 nt, Homo sapiens
  misc_RNA (1)...(19): siRNA sense strand
auacaacacacacaaugga

SEQ ID NO: 1397939 - RNA, 19 nt, Homo sapiens
  misc_RNA (1)...(19): siRNA sense strand
ccagaugcacggcacaaca

SEQ ID NO: 1397940 - RNA, 19 nt, Homo sapiens
  misc_RNA (1)...(19): siRNA sense strand
cacaacaggguucuaucaa

SEQ ID NO: 1397941 - RNA, 19 nt, Homo sapiens
  misc_RNA (1)...(19): siRNA sense strand
gauacacaucuguucuuca

SEQ ID NO: 1397942 - RNA, 19 nt, Homo sapiens
  misc_RNA (1)...(19): siRNA sense strand
cuucaaccuugcagauaca

SEQ ID NO: 1397943 - RNA, 19 nt, Homo sapiens
  misc_RNA (1)...(19): siRNA sense strand
gauugucuggauaaacuga

SEQ ID NO: 1397944 - RNA, 19 nt, Homo sapiens
  misc_RNA (1)...(19): siRNA sense strand
uuuaagcacauacaacuuc

SEQ ID NO: 1397945 - RNA, 19 nt, Homo sapiens
  misc_RNA (1)...(19): siRNA sense strand
caaccuugcagauacacau

SEQ ID NO: 1397946 - RNA, 19 nt, Homo sapiens
  misc_RNA (1)...(19): siRNA sense strand
ggacuuggaugagacaaua

SEQ ID NO: 1397947 - RNA, 19 nt, Homo sapiens
  misc_RNA (1)...(19): siRNA sense strand
ugaaggagauguacaauac

SEQ ID NO: 1397948 - RNA, 19 nt, Homo sapiens
  misc_RNA (1)...(19): siRNA sense strand
gagaacaucuacagugcaa

SEQ ID NO: 1397949 - RNA, 19 nt, Homo sapiens
  misc_RNA (1)...(19): siRNA sense strand
ugacaauggccaagauuua

SEQ ID NO: 1397950 - RNA, 19 nt, Homo sapiens
  misc_RNA (1)...(19): siRNA sense strand
aaacagcgauugucuggau

SEQ ID NO: 1397951 - RNA, 19 nt, Homo sapiens
  misc_RNA (1)...(19): siRNA sense strand
caccaccacucaacuaauu

SEQ ID NO: 1397952 - RNA, 19 nt, Homo sapiens
  misc_RNA (1)...(19): siRNA sense strand
ccaaaguccugcuauaugg

SEQ ID NO: 1397953 - RNA, 19 nt, Homo sapiens
  misc_RNA (1)...(19): siRNA sense strand
gacaaggcaucaccaaauc

SEQ ID NO: 1397954 - RNA, 19 nt, Homo sapiens
  misc_RNA (1)...(19): siRNA sense strand
gcauuggccuuaugaugga

SEQ ID NO: 1397955 - RNA, 19 nt, Homo sapiens
  misc_RNA (1)...(19): siRNA sense strand
ggacauuugcauccagaua

SEQ ID NO: 1397956 - RNA, 19 nt, Homo sapiens
  misc_RNA (1)...(19): siRNA sense strand
gaauacaacacacacaaug

SEQ ID NO: 1397957 - RNA, 19 nt, Homo sapiens
  misc_RNA (1)...(19): siRNA sense strand
gcacaacaggguucuauca

SEQ ID NO: 1397958 - RNA, 19 nt, Homo sapiens
  misc_RNA (1)...(19): siRNA sense strand
gcacuaaaccucaucaacu

SEQ ID NO: 1397959 - RNA, 19 nt, Homo sapiens
  misc_RNA (1)...(19): siRNA sense strand
gcugacggcuuccacaguu

SEQ ID NO: 1397960 - RNA, 19 nt, Homo sapiens
  misc_RNA (1)...(19): siRNA sense strand
acacaucuguucuucaaug

SEQ ID NO: 1397961 - RNA, 19 nt, Homo sapiens
  misc_RNA (1)...(19): siRNA sense strand
gaaaugguagaacuaguga

SEQ ID NO: 1397962 - RNA, 19 nt, Homo sapiens
  misc_RNA (1)...(19): siRNA sense strand
cccuggagcuggaguauuu

SEQ ID NO: 1397963 - RNA, 19 nt, Homo sapiens
  misc_RNA (1)...(19): siRNA sense strand
gaucggugaugguguggaa

SEQ ID NO: 1397964 - RNA, 19 nt, Homo sapiens
  misc_RNA (1)...(19): siRNA sense strand
gacaauggccaagauuuaa

SEQ ID NO: 1397965 - RNA, 19 nt, Homo sapiens
  misc_RNA (1)...(19): siRNA sense strand
gcgauugucuggauaaacu

SEQ ID NO: 1397966 - RNA, 19 nt, Homo sapiens
  misc_RNA (1)...(19): siRNA sense strand
ggaaaugguagaacuagug

SEQ ID NO: 1397967 - RNA, 19 nt, Homo sapiens
  misc_RNA (1)...(19): siRNA sense strand
auacacaucuguucuucaa

SEQ ID NO: 1397968 - RNA, 19 nt, Homo sapiens
  misc_RNA (1)...(19): siRNA sense strand
ucacccagccucacuguaa

SEQ ID NO: 1397969 - RNA, 19 nt, Homo sapiens
  misc_RNA (1)...(19): siRNA sense strand
ggucuguguuuccuauuga

SEQ ID NO: 1397970 - RNA, 19 nt, Homo sapiens
  misc_RNA (1)...(19): siRNA sense strand
gccaagauuuaagcacaua

SEQ ID NO: 1397971 - RNA, 19 nt, Homo sapiens
  misc_RNA (1)...(19): siRNA sense strand
caaccagaguuccgaguca

SEQ ID NO: 1397972 - RNA, 19 nt, Homo sapiens
  misc_RNA (1)...(19): siRNA sense strand
uacaauaccuacaagaaca

SEQ ID NO: 1397973 - RNA, 19 nt, Homo sapiens
  misc_RNA (1)...(19): siRNA sense strand
caaggaaaugguagaacua

SEQ ID NO: 1397974 - RNA, 19 nt, Homo sapiens
  misc_RNA (1)...(19): siRNA sense strand
gugaaggagauguacaaua

SEQ ID NO: 1397975 - RNA, 19 nt, Homo sapiens
  misc_RNA (1)...(19): siRNA sense strand
gcacaagccuauggaaucc

SEQ ID NO: 1397976 - RNA, 19 nt, Homo sapiens
  misc_RNA (1)...(19): siRNA sense strand
cgaaagagggagacacaga

SEQ ID NO: 1397977 - RNA, 19 nt, Homo sapiens
  misc_RNA (1)...(19): siRNA sense strand
agacaaggcaucaccaaau

SEQ ID NO: 1397978 - RNA, 19 nt, Homo sapiens
  misc_RNA (1)...(19): siRNA sense strand
gccaaaguccugcuauaug

SEQ ID NO: 1397979 - RNA, 19 nt, Homo sapiens
  misc_RNA (1)...(19): siRNA sense strand
ggagugugcaccaggacua

SEQ ID NO: 1397980 - RNA, 19 nt, Homo sapiens
  misc_RNA (1)...(19): siRNA sense strand
ggagcuggaguauuuauag

SEQ ID NO: 1397981 - RNA, 19 nt, Homo sapiens
  misc_RNA (1)...(19): siRNA sense strand
uggccaaaguccugcuaua

SEQ ID NO: 1397982 - RNA, 19 nt, Homo sapiens
  misc_RNA (1)...(19): siRNA sense strand
gcccaacugugucaaugug

SEQ ID NO: 1397983 - RNA, 19 nt, Homo sapiens
  misc_RNA (1)...(19): siRNA sense strand
ggaggauugugaccagauc

SEQ ID NO: 1397984 - RNA, 19 nt, Homo sapiens
  misc_RNA (1)...(19): siRNA sense strand
acaaggaaaugguagaacu

SEQ ID NO: 1397985 - RNA, 19 nt, Homo sapiens
  misc_RNA (1)...(19): siRNA sense strand
ggucaccaccacucaacua

SEQ ID NO: 1397986 - RNA, 19 nt, Homo sapiens
  misc_RNA (1)...(19): siRNA sense strand
gugaccagauccacguuga

SEQ ID NO: 1397987 - RNA, 19 nt, Homo sapiens
  misc_RNA (1)...(19): siRNA sense strand
guacaaggaaaugguagaa

SEQ ID NO: 1397988 - RNA, 19 nt, Homo sapiens
  misc_RNA (1)...(19): siRNA sense strand
gggucuguguuuccuauug

SEQ ID NO: 1397989 - RNA, 19 nt, Homo sapiens
  misc_RNA (1)...(19): siRNA sense strand
guacaauaccuacaagaac

SEQ ID NO: 1397990 - RNA, 19 nt, Homo sapiens
  misc_RNA (1)...(19): siRNA sense strand
ggccaaaguccugcuauau

SEQ ID NO: 1397991 - RNA, 19 nt, Homo sapiens
  misc_RNA (1)...(19): siRNA sense strand
gcugcuguguggacucuga

SEQ ID NO: 1397992 - RNA, 19 nt, Homo sapiens
  misc_RNA (1)...(19): siRNA sense strand
ggucuaagaggagcaguga

SEQ ID NO: 1397993 - RNA, 19 nt, Homo sapiens
  misc_RNA (1)...(19): siRNA sense strand
gagaggauaaugcagagau

SEQ ID NO: 1397994 - RNA, 19 nt, Homo sapiens
  misc_RNA (1)...(19): siRNA sense strand
cacuaaaccucaucaacuc

SEQ ID NO: 1397995 - RNA, 19 nt, Homo sapiens
  misc_RNA (1)...(19): siRNA sense strand
gcgcauuggccuuaugaug

SEQ ID NO: 1397996 - RNA, 19 nt, Homo sapiens
  misc_RNA (1)...(19): siRNA sense strand
acaacaggguucuaucaag

SEQ ID NO: 1397997 - RNA, 19 nt, Homo sapiens
  misc_RNA (1)...(19): siRNA sense strand
agaggauaaugcagagauu

SEQ ID NO: 1397998 - RNA, 19 nt, Homo sapiens
  misc_RNA (1)...(19): siRNA sense strand
gauuuaagcacauacaacu

SEQ ID NO: 1397999 - RNA, 19 nt, Homo sapiens
  misc_RNA (1)...(19): siRNA sense strand
gacagagcccauacaccua

SEQ ID NO: 1398000 - RNA, 19 nt, Homo sapiens
  misc_RNA (1)...(19): siRNA sense strand
cacccagccucacuguaaa

SEQ ID NO: 1398001 - RNA, 19 nt, Homo sapiens
  misc_RNA (1)...(19): siRNA sense strand
gaugacaauggccaagauu

SEQ ID NO: 1398002 - RNA, 19 nt, Homo sapiens
  misc_RNA (1)...(19): siRNA sense strand
gaccagauccacguugaug

SEQ ID NO: 1398003 - RNA, 19 nt, Homo sapiens
  misc_RNA (1)...(19): siRNA sense strand
cacaucuguucuucaauga

SEQ ID NO: 1398004 - RNA, 19 nt, Homo sapiens
  misc_RNA (1)...(19): siRNA sense strand
guugauaggcacucccaaa

SEQ ID NO: 1398005 - RNA, 19 nt, Homo sapiens
  misc_RNA (1)...(19): siRNA sense strand
gugaauacaacacacacaa

SEQ ID NO: 1398006 - RNA, 19 nt, Homo sapiens
  misc_RNA (1)...(19): siRNA sense strand
ccacuggacagagcccaua

SEQ ID NO: 1398007 - RNA, 19 nt, Homo sapiens
  misc_RNA (1)...(19): siRNA sense strand
gcagagauucggcagaaaa

SEQ ID NO: 1398008 - RNA, 19 nt, Homo sapiens
  misc_RNA (1)...(19): siRNA sense strand
uuacccaccuccagcacaa

SEQ ID NO: 1398009 - RNA, 19 nt, Homo sapiens
  misc_RNA (1)...(19): siRNA sense strand
gcccauacaccuaccagau

SEQ ID NO: 1398010 - RNA, 19 nt, Homo sapiens
  misc_RNA (1)...(19): siRNA sense strand
ugaaggcacuaaaccucau

SEQ ID NO: 1398011 - RNA, 19 nt, Homo sapiens
  misc_RNA (1)...(19): siRNA sense strand
gauaggcacucccaaaagg

SEQ ID NO: 1398012 - RNA, 19 nt, Homo sapiens
  misc_RNA (1)...(19): siRNA sense strand
cagcgauugucuggauaaa

SEQ ID NO: 1398013 - RNA, 19 nt, Homo sapiens
  misc_RNA (1)...(19): siRNA sense strand
ggccaagauuuaagcacau

SEQ ID NO: 1398014 - RNA, 19 nt, Homo sapiens
  misc_RNA (1)...(19): siRNA sense strand
augcagagauucggcagaa

SEQ ID NO: 1398015 - RNA, 19 nt, Homo sapiens
  misc_RNA (1)...(19): siRNA sense strand
caaccaagacagggaagga

SEQ ID NO: 1398016 - RNA, 19 nt, Homo sapiens
  misc_RNA (1)...(19): siRNA sense strand
cagacaaggcaucaccaaa

SEQ ID NO: 1398017 - RNA, 19 nt, Homo sapiens
  misc_RNA (1)...(19): siRNA sense strand
gagcugcuucgagaggaua

SEQ ID NO: 1398018 - RNA, 19 nt, Homo sapiens
  misc_RNA (1)...(19): siRNA sense strand
cagcucuucuccagaucuu

SEQ ID NO: 1398019 - RNA, 19 nt, Homo sapiens
  misc_RNA (1)...(19): siRNA sense strand
ucccagcucuucuccagau

SEQ ID NO: 1398020 - RNA, 19 nt, Homo sapiens
  misc_RNA (1)...(19): siRNA sense strand
uauuacggcucauccuaca

SEQ ID NO: 1398021 - RNA, 19 nt, Homo sapiens
  misc_RNA (1)...(19): siRNA sense strand
gggugaaggagauguacaa

SEQ ID NO: 1398022 - RNA, 19 nt, Homo sapiens
  misc_RNA (1)...(19): siRNA sense strand
cagcacaagccuauggaau

SEQ ID NO: 1398023 - RNA, 19 nt, Homo sapiens
  misc_RNA (1)...(19): siRNA sense strand
ugaauacaacacacacaau

SEQ ID NO: 1398024 - RNA, 19 nt, Homo sapiens
  misc_RNA (1)...(19): siRNA sense strand
gacauuugcauccagauac

SEQ ID NO: 1398025 - RNA, 19 nt, Homo sapiens
  misc_RNA (1)...(19): siRNA sense strand
gaggauaaugcagagauuc

SEQ ID NO: 1398026 - RNA, 19 nt, Homo sapiens
  misc_RNA (1)...(19): siRNA sense strand
caagauuuaagcacauaca

SEQ ID NO: 1398027 - RNA, 19 nt, Homo sapiens
  misc_RNA (1)...(19): siRNA sense strand
agaugacaauggccaagau

SEQ ID NO: 1398028 - RNA, 19 nt, Homo sapiens
  misc_RNA (1)...(19): siRNA sense strand
ccagaugcacggcacaaca

SEQ ID NO: 1398029 - RNA, 19 nt, Homo sapiens
  misc_RNA (1)...(19): siRNA sense strand
auacaacacacacaaugga

SEQ ID NO: 1398030 - RNA, 19 nt, Homo sapiens
  misc_RNA (1)...(19): siRNA sense strand
cacaacaggguucuaucaa

SEQ ID NO: 1398031 - RNA, 19 nt, Homo sapiens
  misc_RNA (1)...(19): siRNA sense strand
gguacaaggaaaugguaga

SEQ ID NO: 1398032 - RNA, 19 nt, Homo sapiens
  misc_RNA (1)...(19): siRNA sense strand
gauacacaucuguucuuca

SEQ ID NO: 1398033 - RNA, 19 nt, Homo sapiens
  misc_RNA (1)...(19): siRNA sense strand
cuucaaccuugcagauaca

SEQ ID NO: 1398034 - RNA, 19 nt, Homo sapiens
  misc_RNA (1)...(19): siRNA sense strand
gauugucuggauaaacuga

SEQ ID NO: 1398035 - RNA, 19 nt, Homo sapiens
  misc_RNA (1)...(19): siRNA sense strand
uuuaagcacauacaacuuc

SEQ ID NO: 1398036 - RNA, 19 nt, Homo sapiens
  misc_RNA (1)...(19): siRNA sense strand
caaccuugcagauacacau

SEQ ID NO: 1398037 - RNA, 19 nt, Homo sapiens
  misc_RNA (1)...(19): siRNA sense strand
ggacuuggaugagacaaua

SEQ ID NO: 1398038 - RNA, 19 nt, Homo sapiens
  misc_RNA (1)...(19): siRNA sense strand
ugaaggagauguacaauac

SEQ ID NO: 1398039 - RNA, 19 nt, Homo sapiens
  misc_RNA (1)...(19): siRNA sense strand
gagaacaucuacagugcaa

SEQ ID NO: 1398040 - RNA, 19 nt, Homo sapiens
  misc_RNA (1)...(19): siRNA sense strand
ugacaauggccaagauuua

SEQ ID NO: 1398041 - RNA, 19 nt, Homo sapiens
  misc_RNA (1)...(19): siRNA sense strand
aaacagcgauugucuggau

SEQ ID NO: 1398042 - RNA, 19 nt, Homo sapiens
  misc_RNA (1)...(19): siRNA sense strand
caccaccacucaacuaauu

SEQ ID NO: 1398043 - RNA, 19 nt, Homo sapiens
  misc_RNA (1)...(19): siRNA sense strand
ccaaaguccugcuauaugg

SEQ ID NO: 1398044 - RNA, 19 nt, Homo sapiens
  misc_RNA (1)...(19): siRNA sense strand
gacaaggcaucaccaaauc

SEQ ID NO: 1398045 - RNA, 19 nt, Homo sapiens
  misc_RNA (1)...(19): siRNA sense strand
gcauuggccuuaugaugga

SEQ ID NO: 1398046 - RNA, 19 nt, Homo sapiens
  misc_RNA (1)...(19): siRNA sense strand
ggacauuugcauccagaua

SEQ ID NO: 1398047 - RNA, 19 nt, Homo sapiens
  misc_RNA (1)...(19): siRNA sense strand
gaauacaacacacacaaug

SEQ ID NO: 1398048 - RNA, 19 nt, Homo sapiens
  misc_RNA (1)...(19): siRNA sense strand
gcacaacaggguucuauca

SEQ ID NO: 1398049 - RNA, 19 nt, Homo sapiens
  misc_RNA (1)...(19): siRNA sense strand
gcacuaaaccucaucaacu

SEQ ID NO: 1398050 - RNA, 19 nt, Homo sapiens
  misc_RNA (1)...(19): siRNA sense strand
gcugacggcuuccacaguu

SEQ ID NO: 1398051 - RNA, 19 nt, Homo sapiens
  misc_RNA (1)...(19): siRNA sense strand
acacaucuguucuucaaug

SEQ ID NO: 1398052 - RNA, 19 nt, Homo sapiens
  misc_RNA (1)...(19): siRNA sense strand
gaucggugaugguguggaa

SEQ ID NO: 1398053 - RNA, 19 nt, Homo sapiens
  misc_RNA (1)...(19): siRNA sense strand
cccuggagcuggaguauuu

SEQ ID NO: 1398054 - RNA, 19 nt, Homo sapiens
  misc_RNA (1)...(19): siRNA sense strand
gacaauggccaagauuuaa

SEQ ID NO: 1398055 - RNA, 19 nt, Homo sapiens
  misc_RNA (1)...(19): siRNA sense strand
gcgauugucuggauaaacu

SEQ ID NO: 1398056 - RNA, 19 nt, Homo sapiens
  misc_RNA (1)...(19): siRNA sense strand
auacacaucuguucuucaa

SEQ ID NO: 1398057 - RNA, 19 nt, Homo sapiens
  misc_RNA (1)...(19): siRNA sense strand
ucacccagccucacuguaa

SEQ ID NO: 1398058 - RNA, 19 nt, Homo sapiens
  misc_RNA (1)...(19): siRNA sense strand
ggucuguguuuccuauuga

SEQ ID NO: 1398059 - RNA, 19 nt, Homo sapiens
  misc_RNA (1)...(19): siRNA sense strand
gccaagauuuaagcacaua

SEQ ID NO: 1398060 - RNA, 19 nt, Homo sapiens
  misc_RNA (1)...(19): siRNA sense strand
caaccagaguuccgaguca

SEQ ID NO: 1398061 - RNA, 19 nt, Homo sapiens
  misc_RNA (1)...(19): siRNA sense strand
uacaauaccuacaagaaca

SEQ ID NO: 1398062 - RNA, 19 nt, Homo sapiens
  misc_RNA (1)...(19): siRNA sense strand
gugaaggagauguacaaua

SEQ ID NO: 1398063 - RNA, 19 nt, Homo sapiens
  misc_RNA (1)...(19): siRNA sense strand
gcacaagccuauggaaucc

SEQ ID NO: 1398064 - RNA, 19 nt, Homo sapiens
  misc_RNA (1)...(19): siRNA sense strand
cgaaagagggagacacaga

SEQ ID NO: 1398065 - RNA, 19 nt, Homo sapiens
  misc_RNA (1)...(19): siRNA sense strand
agacaaggcaucaccaaau

SEQ ID NO: 1398066 - RNA, 19 nt, Homo sapiens
  misc_RNA (1)...(19): siRNA sense strand
gccaaaguccugcuauaug

SEQ ID NO: 1398067 - RNA, 19 nt, Homo sapiens
  misc_RNA (1)...(19): siRNA sense strand
ggagugugcaccaggacua

SEQ ID NO: 1398068 - RNA, 19 nt, Homo sapiens
  misc_RNA (1)...(19): siRNA sense strand
ggagcuggaguauuuauag

SEQ ID NO: 1398069 - RNA, 19 nt, Homo sapiens
  misc_RNA (1)...(19): siRNA sense strand
uggccaaaguccugcuaua

SEQ ID NO: 1398070 - RNA, 19 nt, Homo sapiens
  misc_RNA (1)...(19): siRNA sense strand
gcccaacugugucaaugug

SEQ ID NO: 1398071 - RNA, 19 nt, Homo sapiens
  misc_RNA (1)...(19): siRNA sense strand
ggaggauugugaccagauc

SEQ ID NO: 1398072 - RNA, 19 nt, Homo sapiens
  misc_RNA (1)...(19): siRNA sense strand
ggucaccaccacucaacua

SEQ ID NO: 1398073 - RNA, 19 nt, Homo sapiens
  misc_RNA (1)...(19): siRNA sense strand
gugaccagauccacguuga

SEQ ID NO: 1398074 - RNA, 19 nt, Homo sapiens
  misc_RNA (1)...(19): siRNA sense strand
gggucuguguuuccuauug

SEQ ID NO: 1398075 - RNA, 19 nt, Homo sapiens
  misc_RNA (1)...(19): siRNA sense strand
gcugcuguguggacucuga

SEQ ID NO: 1398076 - RNA, 19 nt, Homo sapiens
  misc_RNA (1)...(19): siRNA sense strand
ggccaaaguccugcuauau

SEQ ID NO: 1398077 - RNA, 19 nt, Homo sapiens
  misc_RNA (1)...(19): siRNA sense strand
guacaauaccuacaagaac

SEQ ID NO: 1398078 - RNA, 19 nt, Homo sapiens
  misc_RNA (1)...(19): siRNA sense strand
ggucuaagaggagcaguga

SEQ ID NO: 1398079 - RNA, 19 nt, Homo sapiens
  misc_RNA (1)...(19): siRNA sense strand
gagaggauaaugcagagau

SEQ ID NO: 1398080 - RNA, 19 nt, Homo sapiens
  misc_RNA (1)...(19): siRNA sense strand
cacuaaaccucaucaacuc

SEQ ID NO: 1398081 - RNA, 19 nt, Homo sapiens
  misc_RNA (1)...(19): siRNA sense strand
gcgcauuggccuuaugaug

SEQ ID NO: 1398082 - RNA, 19 nt, Homo sapiens
  misc_RNA (1)...(19): siRNA sense strand
acaacaggguucuaucaag

SEQ ID NO: 1398083 - RNA, 19 nt, Homo sapiens
  misc_RNA (1)...(19): siRNA sense strand
agaggauaaugcagagauu

SEQ ID NO: 1398084 - RNA, 19 nt, Homo sapiens
  misc_RNA (1)...(19): siRNA sense strand
gauuuaagcacauacaacu

SEQ ID NO: 1398085 - RNA, 19 nt, Homo sapiens
  misc_RNA (1)...(19): siRNA sense strand
gacagagcccauacaccua

SEQ ID NO: 1398086 - RNA, 19 nt, Homo sapiens
  misc_RNA (1)...(19): siRNA sense strand
cacccagccucacuguaaa

SEQ ID NO: 1398087 - RNA, 19 nt, Homo sapiens
  misc_RNA (1)...(19): siRNA sense strand
gaugacaauggccaagauu

SEQ ID NO: 1398088 - RNA, 19 nt, Homo sapiens
  misc_RNA (1)...(19): siRNA sense strand
gaccagauccacguugaug

SEQ ID NO: 1398089 - RNA, 19 nt, Homo sapiens
  misc_RNA (1)...(19): siRNA sense strand
cacaucuguucuucaauga

SEQ ID NO: 1398090 - RNA, 19 nt, Homo sapiens
  misc_RNA (1)...(19): siRNA sense strand
guugauaggcacucccaaa

SEQ ID NO: 1398091 - RNA, 19 nt, Homo sapiens
  misc_RNA (1)...(19): siRNA sense strand
gugaauacaacacacacaa

SEQ ID NO: 1398092 - RNA, 19 nt, Homo sapiens
  misc_RNA (1)...(19): siRNA sense strand
ccacuggacagagcccaua

SEQ ID NO: 1398093 - RNA, 19 nt, Homo sapiens
  misc_RNA (1)...(19): siRNA sense strand
gcagagauucggcagaaaa

SEQ ID NO: 1398094 - RNA, 19 nt, Homo sapiens
  misc_RNA (1)...(19): siRNA sense strand
uuacccaccuccagcacaa

SEQ ID NO: 1398095 - RNA, 19 nt, Homo sapiens
  misc_RNA (1)...(19): siRNA sense strand
gcccauacaccuaccagau

SEQ ID NO: 1398096 - RNA, 19 nt, Homo sapiens
  misc_RNA (1)...(19): siRNA sense strand
cagcgauugucuggauaaa

SEQ ID NO: 1398097 - RNA, 19 nt, Homo sapiens
  misc_RNA (1)...(19): siRNA sense strand
ugaaggcacuaaaccucau

SEQ ID NO: 1398098 - RNA, 19 nt, Homo sapiens
  misc_RNA (1)...(19): siRNA sense strand
gauaggcacucccaaaagg

SEQ ID NO: 1398099 - RNA, 19 nt, Homo sapiens
  misc_RNA (1)...(19): siRNA sense strand
ggccaagauuuaagcacau

SEQ ID NO: 1398100 - RNA, 19 nt, Homo sapiens
  misc_RNA (1)...(19): siRNA sense strand
augcagagauucggcagaa

SEQ ID NO: 1398101 - RNA, 19 nt, Homo sapiens
  misc_RNA (1)...(19): siRNA sense strand
caaccaagacagggaagga

SEQ ID NO: 1398102 - RNA, 19 nt, Homo sapiens
  misc_RNA (1)...(19): siRNA sense strand
uauuacggcucauccuaca

SEQ ID NO: 1398103 - RNA, 19 nt, Homo sapiens
  misc_RNA (1)...(19): siRNA sense strand
gagcugcuucgagaggaua

SEQ ID NO: 1398104 - RNA, 19 nt, Homo sapiens
  misc_RNA (1)...(19): siRNA sense strand
cagcucuucuccagaucuu

SEQ ID NO: 1398105 - RNA, 19 nt, Homo sapiens
  misc_RNA (1)...(19): siRNA sense strand
cagacaaggcaucaccaaa

SEQ ID NO: 1398106 - RNA, 19 nt, Homo sapiens
  misc_RNA (1)...(19): siRNA sense strand
ucccagcucuucuccagau

SEQ ID NO: 1398107 - RNA, 19 nt, Homo sapiens
  misc_RNA (1)...(19): siRNA sense strand
gggugaaggagauguacaa

SEQ ID NO: 1398108 - RNA, 19 nt, Homo sapiens
  misc_RNA (1)...(19): siRNA sense strand
ugaauacaacacacacaau

SEQ ID NO: 1398109 - RNA, 19 nt, Homo sapiens
  misc_RNA (1)...(19): siRNA sense strand
cagcacaagccuauggaau

SEQ ID NO: 1398110 - RNA, 19 nt, Homo sapiens
  misc_RNA (1)...(19): siRNA sense strand
gacauuugcauccagauac

SEQ ID NO: 1398111 - RNA, 19 nt, Homo sapiens
  misc_RNA (1)...(19): siRNA sense strand
gaggauaaugcagagauuc

SEQ ID NO: 1398112 - RNA, 19 nt, Homo sapiens
  misc_RNA (1)...(19): siRNA sense strand
caagauuuaagcacauaca

SEQ ID NO: 1398113 - RNA, 19 nt, Homo sapiens
  misc_RNA (1)...(19): siRNA sense strand
agaugacaauggccaagau

SEQ ID NO: 1398114 - RNA, 19 nt, Homo sapiens
  misc_RNA (1)...(19): siRNA sense strand
auacaacacacacaaugga

SEQ ID NO: 1398115 - RNA, 19 nt, Homo sapiens
  misc_RNA (1)...(19): siRNA sense strand
ccagaugcacggcacaaca

SEQ ID NO: 1398116 - RNA, 19 nt, Homo sapiens
  misc_RNA (1)...(19): siRNA sense strand
cacaacaggguucuaucaa

SEQ ID NO: 1398117 - RNA, 19 nt, Homo sapiens
  misc_RNA (1)...(19): siRNA sense strand
gauacacaucuguucuuca

SEQ ID NO: 1398118 - RNA, 19 nt, Homo sapiens
  misc_RNA (1)...(19): siRNA sense strand
cuucaaccuugcagauaca

SEQ ID NO: 1398119 - RNA, 19 nt, Homo sapiens
  misc_RNA (1)...(19): siRNA sense strand
gauugucuggauaaacuga

SEQ ID NO: 1398120 - RNA, 19 nt, Homo sapiens
  misc_RNA (1)...(19): siRNA sense strand
uuuaagcacauacaacuuc

SEQ ID NO: 1398121 - RNA, 19 nt, Homo sapiens
  misc_RNA (1)...(19): siRNA sense strand
caaccuugcagauacacau

SEQ ID NO: 1398122 - RNA, 19 nt, Homo sapiens
  misc_RNA (1)...(19): siRNA sense strand
ggacuuggaugagacaaua

SEQ ID NO: 1398123 - RNA, 19 nt, Homo sapiens
  misc_RNA (1)...(19): siRNA sense strand
ugaaggagauguacaauac

SEQ ID NO: 1398124 - RNA, 19 nt, Homo sapiens
  misc_RNA (1)...(19): siRNA sense strand
gagaacaucuacagugcaa

SEQ ID NO: 1398125 - RNA, 19 nt, Homo sapiens
  misc_RNA (1)...(19): siRNA sense strand
ugacaauggccaagauuua

SEQ ID NO: 1398126 - RNA, 19 nt, Homo sapiens
  misc_RNA (1)...(19): siRNA sense strand
aaacagcgauugucuggau

SEQ ID NO: 1398127 - RNA, 19 nt, Homo sapiens
  misc_RNA (1)...(19): siRNA sense strand
caccaccacucaacuaauu

SEQ ID NO: 1398128 - RNA, 19 nt, Homo sapiens
  misc_RNA (1)...(19): siRNA sense strand
ccaaaguccugcuauaugg

SEQ ID NO: 1398129 - RNA, 19 nt, Homo sapiens
  misc_RNA (1)...(19): siRNA sense strand
gacaaggcaucaccaaauc

SEQ ID NO: 1398130 - RNA, 19 nt, Homo sapiens
  misc_RNA (1)...(19): siRNA sense strand
gcauuggccuuaugaugga

SEQ ID NO: 1398131 - RNA, 19 nt, Homo sapiens
  misc_RNA (1)...(19): siRNA sense strand
ggacauuugcauccagaua

SEQ ID NO: 1398132 - RNA, 19 nt, Homo sapiens
  misc_RNA (1)...(19): siRNA sense strand
gaauacaacacacacaaug

SEQ ID NO: 1398133 - RNA, 19 nt, Homo sapiens
  misc_RNA (1)...(19): siRNA sense strand
gcacaacaggguucuauca

SEQ ID NO: 1398134 - RNA, 19 nt, Homo sapiens
  misc_RNA (1)...(19): siRNA sense strand
gcacuaaaccucaucaacu

SEQ ID NO: 1398135 - RNA, 19 nt, Homo sapiens
  misc_RNA (1)...(19): siRNA sense strand
gcugacggcuuccacaguu

SEQ ID NO: 1398136 - RNA, 19 nt, Homo sapiens
  misc_RNA (1)...(19): siRNA sense strand
acacaucuguucuucaaug

SEQ ID NO: 1398137 - RNA, 19 nt, Homo sapiens
  misc_RNA (1)...(19): siRNA sense strand
gaucggugaugguguggaa

SEQ ID NO: 1398138 - RNA, 19 nt, Homo sapiens
  misc_RNA (1)...(19): siRNA sense strand
cccuggagcuggaguauuu

SEQ ID NO: 1398139 - RNA, 19 nt, Homo sapiens
  misc_RNA (1)...(19): siRNA sense strand
gacaauggccaagauuuaa

SEQ ID NO: 1398140 - RNA, 19 nt, Homo sapiens
  misc_RNA (1)...(19): siRNA sense strand
gcgauugucuggauaaacu

SEQ ID NO: 1398141 - RNA, 19 nt, Homo sapiens
  misc_RNA (1)...(19): siRNA sense strand
auacacaucuguucuucaa

SEQ ID NO: 1398142 - RNA, 19 nt, Homo sapiens
  misc_RNA (1)...(19): siRNA sense strand
ucacccagccucacuguaa

SEQ ID NO: 1398143 - RNA, 19 nt, Homo sapiens
  misc_RNA (1)...(19): siRNA sense strand
ggucuguguuuccuauuga

SEQ ID NO: 1398144 - RNA, 19 nt, Homo sapiens
  misc_RNA (1)...(19): siRNA sense strand
gccaagauuuaagcacaua

SEQ ID NO: 1398145 - RNA, 19 nt, Homo sapiens
  misc_RNA (1)...(19): siRNA sense strand
caaccagaguuccgaguca

SEQ ID NO: 1398146 - RNA, 19 nt, Homo sapiens
  misc_RNA (1)...(19): siRNA sense strand
uacaauaccuacaagaaca

SEQ ID NO: 1398147 - RNA, 19 nt, Homo sapiens
  misc_RNA (1)...(19): siRNA sense strand
gugaaggagauguacaaua

SEQ ID NO: 1398148 - RNA, 19 nt, Homo sapiens
  misc_RNA (1)...(19): siRNA sense strand
gcacaagccuauggaaucc

SEQ ID NO: 1398149 - RNA, 19 nt, Homo sapiens
  misc_RNA (1)...(19): siRNA sense strand
cgaaagagggagacacaga

SEQ ID NO: 1398150 - RNA, 19 nt, Homo sapiens
  misc_RNA (1)...(19): siRNA sense strand
agacaaggcaucaccaaau

SEQ ID NO: 1398151 - RNA, 19 nt, Homo sapiens
  misc_RNA (1)...(19): siRNA sense strand
gccaaaguccugcuauaug

SEQ ID NO: 1398152 - RNA, 19 nt, Homo sapiens
  misc_RNA (1)...(19): siRNA sense strand
ggagugugcaccaggacua

SEQ ID NO: 1398153 - RNA, 19 nt, Homo sapiens
  misc_RNA (1)...(19): siRNA sense strand
ggagcuggaguauuuauag

SEQ ID NO: 1398154 - RNA, 19 nt, Homo sapiens
  misc_RNA (1)...(19): siRNA sense strand
uggccaaaguccugcuaua

SEQ ID NO: 1398155 - RNA, 19 nt, Homo sapiens
  misc_RNA (1)...(19): siRNA sense strand
gcccaacugugucaaugug

SEQ ID NO: 1398156 - RNA, 19 nt, Homo sapiens
  misc_RNA (1)...(19): siRNA sense strand
ggaggauugugaccagauc

SEQ ID NO: 1398157 - RNA, 19 nt, Homo sapiens
  misc_RNA (1)...(19): siRNA sense strand
ggucaccaccacucaacua

SEQ ID NO: 1398158 - RNA, 19 nt, Homo sapiens
  misc_RNA (1)...(19): siRNA sense strand
gugaccagauccacguuga

SEQ ID NO: 1398159 - RNA, 19 nt, Homo sapiens
  misc_RNA (1)...(19): siRNA sense strand
gggucuguguuuccuauug

SEQ ID NO: 1398160 - RNA, 19 nt, Homo sapiens
  misc_RNA (1)...(19): siRNA sense strand
gcugcuguguggacucuga

SEQ ID NO: 1398161 - RNA, 19 nt, Homo sapiens
  misc_RNA (1)...(19): siRNA sense strand
ggccaaaguccugcuauau

SEQ ID NO: 1398162 - RNA, 19 nt, Homo sapiens
  misc_RNA (1)...(19): siRNA sense strand
guacaauaccuacaagaac

SEQ ID NO: 1398163 - RNA, 19 nt, Homo sapiens
  misc_RNA (1)...(19): siRNA sense strand
ggucuaagaggagcaguga

SEQ ID NO: 1398164 - RNA, 19 nt, Homo sapiens
  misc_RNA (1)...(19): siRNA sense strand
gagaggauaaugcagagau

SEQ ID NO: 1398165 - RNA, 19 nt, Homo sapiens
  misc_RNA (1)...(19): siRNA sense strand
cacuaaaccucaucaacuc

SEQ ID NO: 1398166 - RNA, 19 nt, Homo sapiens
  misc_RNA (1)...(19): siRNA sense strand
gcgcauuggccuuaugaug

SEQ ID NO: 1398167 - RNA, 19 nt, Homo sapiens
  misc_RNA (1)...(19): siRNA sense strand
acaacaggguucuaucaag

SEQ ID NO: 1398168 - RNA, 19 nt, Homo sapiens
  misc_RNA (1)...(19): siRNA sense strand
agaggauaaugcagagauu

SEQ ID NO: 1398169 - RNA, 19 nt, Homo sapiens
  misc_RNA (1)...(19): siRNA sense strand
gauuuaagcacauacaacu

SEQ ID NO: 1398170 - RNA, 19 nt, Homo sapiens
  misc_RNA (1)...(19): siRNA sense strand
gacagagcccauacaccua

SEQ ID NO: 1398171 - RNA, 19 nt, Homo sapiens
  misc_RNA (1)...(19): siRNA sense strand
cacccagccucacuguaaa

SEQ ID NO: 1398172 - RNA, 19 nt, Homo sapiens
  misc_RNA (1)...(19): siRNA sense strand
gaugacaauggccaagauu

SEQ ID NO: 1398173 - RNA, 19 nt, Homo sapiens
  misc_RNA (1)...(19): siRNA sense strand
gaccagauccacguugaug

SEQ ID NO: 1398174 - RNA, 19 nt, Homo sapiens
  misc_RNA (1)...(19): siRNA sense strand
cacaucuguucuucaauga

SEQ ID NO: 1398175 - RNA, 19 nt, Homo sapiens
  misc_RNA (1)...(19): siRNA sense strand
guugauaggcacucccaaa

SEQ ID NO: 1398176 - RNA, 19 nt, Homo sapiens
  misc_RNA (1)...(19): siRNA sense strand
gugaauacaacacacacaa

SEQ ID NO: 1398177 - RNA, 19 nt, Homo sapiens
  misc_RNA (1)...(19): siRNA sense strand
ccacuggacagagcccaua

SEQ ID NO: 1398178 - RNA, 19 nt, Homo sapiens
  misc_RNA (1)...(19): siRNA sense strand
gcagagauucggcagaaaa

SEQ ID NO: 1398179 - RNA, 19 nt, Homo sapiens
  misc_RNA (1)...(19): siRNA sense strand
uuacccaccuccagcacaa

SEQ ID NO: 1398180 - RNA, 19 nt, Homo sapiens
  misc_RNA (1)...(19): siRNA sense strand
gcccauacaccuaccagau

SEQ ID NO: 1398181 - RNA, 19 nt, Homo sapiens
  misc_RNA (1)...(19): siRNA sense strand
cagcgauugucuggauaaa

SEQ ID NO: 1398182 - RNA, 19 nt, Homo sapiens
  misc_RNA (1)...(19): siRNA sense strand
ugaaggcacuaaaccucau

SEQ ID NO: 1398183 - RNA, 19 nt, Homo sapiens
  misc_RNA (1)...(19): siRNA sense strand
gauaggcacucccaaaagg

SEQ ID NO: 1398184 - RNA, 19 nt, Homo sapiens
  misc_RNA (1)...(19): siRNA sense strand
ggccaagauuuaagcacau

SEQ ID NO: 1398185 - RNA, 19 nt, Homo sapiens
  misc_RNA (1)...(19): siRNA sense strand
augcagagauucggcagaa

SEQ ID NO: 1398186 - RNA, 19 nt, Homo sapiens
  misc_RNA (1)...(19): siRNA sense strand
caaccaagacagggaagga

SEQ ID NO: 1398187 - RNA, 19 nt, Homo sapiens
  misc_RNA (1)...(19): siRNA sense strand
uauuacggcucauccuaca

SEQ ID NO: 1398188 - RNA, 19 nt, Homo sapiens
  misc_RNA (1)...(19): siRNA sense strand
gagcugcuucgagaggaua

SEQ ID NO: 1398189 - RNA, 19 nt, Homo sapiens
  misc_RNA (1)...(19): siRNA sense strand
cagcucuucuccagaucuu

SEQ ID NO: 1398190 - RNA, 19 nt, Homo sapiens
  misc_RNA (1)...(19): siRNA sense strand
cagacaaggcaucaccaaa

SEQ ID NO: 1398191 - RNA, 19 nt, Homo sapiens
  misc_RNA (1)...(19): siRNA sense strand
ucccagcucuucuccagau

SEQ ID NO: 1398192 - RNA, 19 nt, Homo sapiens
  misc_RNA (1)...(19): siRNA sense strand
gggugaaggagauguacaa

SEQ ID NO: 1398193 - RNA, 19 nt, Homo sapiens
  misc_RNA (1)...(19): siRNA sense strand
ugaauacaacacacacaau

SEQ ID NO: 1398194 - RNA, 19 nt, Homo sapiens
  misc_RNA (1)...(19): siRNA sense strand
cagcacaagccuauggaau

SEQ ID NO: 1398195 - RNA, 19 nt, Homo sapiens
  misc_RNA (1)...(19): siRNA sense strand
gacauuugcauccagauac

SEQ ID NO: 1398196 - RNA, 19 nt, Homo sapiens
  misc_RNA (1)...(19): siRNA sense strand
gaggauaaugcagagauuc

SEQ ID NO: 1398197 - RNA, 19 nt, Homo sapiens
  misc_RNA (1)...(19): siRNA sense strand
caagauuuaagcacauaca

SEQ ID NO: 1398198 - RNA, 19 nt, Homo sapiens
  misc_RNA (1)...(19): siRNA sense strand
agaugacaauggccaagau

SEQ ID NO: 1398199 - RNA, 19 nt, Homo sapiens
  misc_RNA (1)...(19): siRNA sense strand
auacaacacacacaaugga

SEQ ID NO: 1398200 - RNA, 19 nt, Homo sapiens
  misc_RNA (1)...(19): siRNA sense strand
ccagaugcacggcacaaca

SEQ ID NO: 1398201 - RNA, 19 nt, Homo sapiens
  misc_RNA (1)...(19): siRNA sense strand
cacaacaggguucuaucaa

SEQ ID NO: 1398202 - RNA, 19 nt, Homo sapiens
  misc_RNA (1)...(19): siRNA sense strand
gauacacaucuguucuuca

SEQ ID NO: 1398203 - RNA, 19 nt, Homo sapiens
  misc_RNA (1)...(19): siRNA sense strand
cuucaaccuugcagauaca

SEQ ID NO: 1398204 - RNA, 19 nt, Homo sapiens
  misc_RNA (1)...(19): siRNA sense strand
gauugucuggauaaacuga

SEQ ID NO: 1398205 - RNA, 19 nt, Homo sapiens
  misc_RNA (1)...(19): siRNA sense strand
uuuaagcacauacaacuuc

SEQ ID NO: 1398206 - RNA, 19 nt, Homo sapiens
  misc_RNA (1)...(19): siRNA sense strand
caaccuugcagauacacau

SEQ ID NO: 1398207 - RNA, 19 nt, Homo sapiens
  misc_RNA (1)...(19): siRNA sense strand
ggacuuggaugagacaaua

SEQ ID NO: 1398208 - RNA, 19 nt, Homo sapiens
  misc_RNA (1)...(19): siRNA sense strand
ugaaggagauguacaauac

SEQ ID NO: 1398209 - RNA, 19 nt, Homo sapiens
  misc_RNA (1)...(19): siRNA sense strand
gagaacaucuacagugcaa

SEQ ID NO: 1398210 - RNA, 19 nt, Homo sapiens
  misc_RNA (1)...(19): siRNA sense strand
ugacaauggccaagauuua

SEQ ID NO: 1398211 - RNA, 19 nt, Homo sapiens
  misc_RNA (1)...(19): siRNA sense strand
aaacagcgauugucuggau

SEQ ID NO: 1398212 - RNA, 19 nt, Homo sapiens
  misc_RNA (1)...(19): siRNA sense strand
caccaccacucaacuaauu

SEQ ID NO: 1398213 - RNA, 19 nt, Homo sapiens
  misc_RNA (1)...(19): siRNA sense strand
ccaaaguccugcuauaugg

SEQ ID NO: 1398214 - RNA, 19 nt, Homo sapiens
  misc_RNA (1)...(19): siRNA sense strand
gacaaggcaucaccaaauc

SEQ ID NO: 1398215 - RNA, 19 nt, Homo sapiens
  misc_RNA (1)...(19): siRNA sense strand
gcauuggccuuaugaugga

SEQ ID NO: 1398216 - RNA, 19 nt, Homo sapiens
  misc_RNA (1)...(19): siRNA sense strand
ggacauuugcauccagaua

SEQ ID NO: 1398217 - RNA, 19 nt, Homo sapiens
  misc_RNA (1)...(19): siRNA sense strand
gaauacaacacacacaaug

SEQ ID NO: 1398218 - RNA, 19 nt, Homo sapiens
  misc_RNA (1)...(19): siRNA sense strand
gcacaacaggguucuauca

SEQ ID NO: 1398219 - RNA, 19 nt, Homo sapiens
  misc_RNA (1)...(19): siRNA sense strand
gcacuaaaccucaucaacu

SEQ ID NO: 1398220 - RNA, 19 nt, Homo sapiens
  misc_RNA (1)...(19): siRNA sense strand
gcugacggcuuccacaguu

SEQ ID NO: 1398221 - RNA, 19 nt, Homo sapiens
  misc_RNA (1)...(19): siRNA sense strand
acacaucuguucuucaaug

SEQ ID NO: 1398222 - RNA, 19 nt, Homo sapiens
  misc_RNA (1)...(19): siRNA sense strand
gaucggugaugguguggaa

SEQ ID NO: 1398223 - RNA, 19 nt, Homo sapiens
  misc_RNA (1)...(19): siRNA sense strand
cccuggagcuggaguauuu

SEQ ID NO: 1398224 - RNA, 19 nt, Homo sapiens
  misc_RNA (1)...(19): siRNA sense strand
gacaauggccaagauuuaa

SEQ ID NO: 1398225 - RNA, 19 nt, Homo sapiens
  misc_RNA (1)...(19): siRNA sense strand
gcgauugucuggauaaacu

SEQ ID NO: 1398226 - RNA, 19 nt, Homo sapiens
  misc_RNA (1)...(19): siRNA sense strand
auacacaucuguucuucaa

SEQ ID NO: 1398227 - RNA, 19 nt, Homo sapiens
  misc_RNA (1)...(19): siRNA sense strand
ucacccagccucacuguaa

SEQ ID NO: 1398228 - RNA, 19 nt, Homo sapiens
  misc_RNA (1)...(19): siRNA sense strand
ggucuguguuuccuauuga

SEQ ID NO: 1398229 - RNA, 19 nt, Homo sapiens
  misc_RNA (1)...(19): siRNA sense strand
gccaagauuuaagcacaua

SEQ ID NO: 1398230 - RNA, 19 nt, Homo sapiens
  misc_RNA (1)...(19): siRNA sense strand
caaccagaguuccgaguca

SEQ ID NO: 1398231 - RNA, 19 nt, Homo sapiens
  misc_RNA (1)...(19): siRNA sense strand
uacaauaccuacaagaaca

SEQ ID NO: 1398232 - RNA, 19 nt, Homo sapiens
  misc_RNA (1)...(19): siRNA sense strand
gugaaggagauguacaaua

SEQ ID NO: 1398233 - RNA, 19 nt, Homo sapiens
  misc_RNA (1)...(19): siRNA sense strand
gcacaagccuauggaaucc

SEQ ID NO: 1398234 - RNA, 19 nt, Homo sapiens
  misc_RNA (1)...(19): siRNA sense strand
cgaaagagggagacacaga

SEQ ID NO: 1398235 - RNA, 19 nt, Homo sapiens
  misc_RNA (1)...(19): siRNA sense strand
agacaaggcaucaccaaau

SEQ ID NO: 1398236 - RNA, 19 nt, Homo sapiens
  misc_RNA (1)...(19): siRNA sense strand
gccaaaguccugcuauaug

SEQ ID NO: 1398237 - RNA, 19 nt, Homo sapiens
  misc_RNA (1)...(19): siRNA sense strand
ggagugugcaccaggacua

SEQ ID NO: 1398238 - RNA, 19 nt, Homo sapiens
  misc_RNA (1)...(19): siRNA sense strand
ggagcuggaguauuuauag

SEQ ID NO: 1398239 - RNA, 19 nt, Homo sapiens
  misc_RNA (1)...(19): siRNA sense strand
uggccaaaguccugcuaua

SEQ ID NO: 1398240 - RNA, 19 nt, Homo sapiens
  misc_RNA (1)...(19): siRNA sense strand
gcccaacugugucaaugug

SEQ ID NO: 1398241 - RNA, 19 nt, Homo sapiens
  misc_RNA (1)...(19): siRNA sense strand
ggaggauugugaccagauc

SEQ ID NO: 1398242 - RNA, 19 nt, Homo sapiens
  misc_RNA (1)...(19): siRNA sense strand
ggucaccaccacucaacua

SEQ ID NO: 1398243 - RNA, 19 nt, Homo sapiens
  misc_RNA (1)...(19): siRNA sense strand
gugaccagauccacguuga

SEQ ID NO: 1398244 - RNA, 19 nt, Homo sapiens
  misc_RNA (1)...(19): siRNA sense strand
gggucuguguuuccuauug

SEQ ID NO: 1398245 - RNA, 19 nt, Homo sapiens
  misc_RNA (1)...(19): siRNA sense strand
gcugcuguguggacucuga

SEQ ID NO: 1398246 - RNA, 19 nt, Homo sapiens
  misc_RNA (1)...(19): siRNA sense strand
ggccaaaguccugcuauau

SEQ ID NO: 1398247 - RNA, 19 nt, Homo sapiens
  misc_RNA (1)...(19): siRNA sense strand
guacaauaccuacaagaac

SEQ ID NO: 1398248 - RNA, 19 nt, Homo sapiens
  misc_RNA (1)...(19): siRNA sense strand
ggucuaagaggagcaguga

SEQ ID NO: 1398249 - RNA, 19 nt, Homo sapiens
  misc_RNA (1)...(19): siRNA sense strand
gagaggauaaugcagagau

SEQ ID NO: 1398250 - RNA, 19 nt, Homo sapiens
  misc_RNA (1)...(19): siRNA sense strand
cacuaaaccucaucaacuc

SEQ ID NO: 1398251 - RNA, 19 nt, Homo sapiens
  misc_RNA (1)...(19): siRNA sense strand
gcgcauuggccuuaugaug

SEQ ID NO: 1398252 - RNA, 19 nt, Homo sapiens
  misc_RNA (1)...(19): siRNA sense strand
acaacaggguucuaucaag

SEQ ID NO: 1398253 - RNA, 19 nt, Homo sapiens
  misc_RNA (1)...(19): siRNA sense strand
agaggauaaugcagagauu

SEQ ID NO: 1398254 - RNA, 19 nt, Homo sapiens
  misc_RNA (1)...(19): siRNA sense strand
gauuuaagcacauacaacu

SEQ ID NO: 1398255 - RNA, 19 nt, Homo sapiens
  misc_RNA (1)...(19): siRNA sense strand
gacagagcccauacaccua

SEQ ID NO: 1398256 - RNA, 19 nt, Homo sapiens
  misc_RNA (1)...(19): siRNA sense strand
cacccagccucacuguaaa

SEQ ID NO: 1398257 - RNA, 19 nt, Homo sapiens
  misc_RNA (1)...(19): siRNA sense strand
gaugacaauggccaagauu

SEQ ID NO: 1398258 - RNA, 19 nt, Homo sapiens
  misc_RNA (1)...(19): siRNA sense strand
gaccagauccacguugaug

SEQ ID NO: 1398259 - RNA, 19 nt, Homo sapiens
  misc_RNA (1)...(19): siRNA sense strand
cacaucuguucuucaauga

SEQ ID NO: 1398260 - RNA, 19 nt, Homo sapiens
  misc_RNA (1)...(19): siRNA sense strand
guugauaggcacucccaaa

SEQ ID NO: 1398261 - RNA, 19 nt, Homo sapiens
  misc_RNA (1)...(19): siRNA sense strand
gugaauacaacacacacaa

SEQ ID NO: 1398262 - RNA, 19 nt, Homo sapiens
  misc_RNA (1)...(19): siRNA sense strand
ccacuggacagagcccaua

SEQ ID NO: 1398263 - RNA, 19 nt, Homo sapiens
  misc_RNA (1)...(19): siRNA sense strand
gcagagauucggcagaaaa

SEQ ID NO: 1398264 - RNA, 19 nt, Homo sapiens
  misc_RNA (1)...(19): siRNA sense strand
uuacccaccuccagcacaa

SEQ ID NO: 1398265 - RNA, 19 nt, Homo sapiens
  misc_RNA (1)...(19): siRNA sense strand
gcccauacaccuaccagau

SEQ ID NO: 1398266 - RNA, 19 nt, Homo sapiens
  misc_RNA (1)...(19): siRNA sense strand
cagcgauugucuggauaaa

SEQ ID NO: 1398267 - RNA, 19 nt, Homo sapiens
  misc_RNA (1)...(19): siRNA sense strand
ugaaggcacuaaaccucau

SEQ ID NO: 1398268 - RNA, 19 nt, Homo sapiens
  misc_RNA (1)...(19): siRNA sense strand
gauaggcacucccaaaagg

SEQ ID NO: 1398269 - RNA, 19 nt, Homo sapiens
  misc_RNA (1)...(19): siRNA sense strand
ggccaagauuuaagcacau

SEQ ID NO: 1398270 - RNA, 19 nt, Homo sapiens
  misc_RNA (1)...(19): siRNA sense strand
augcagagauucggcagaa

SEQ ID NO: 1398271 - RNA, 19 nt, Homo sapiens
  misc_RNA (1)...(19): siRNA sense strand
caaccaagacagggaagga

SEQ ID NO: 1398272 - RNA, 19 nt, Homo sapiens
  misc_RNA (1)...(19): siRNA sense strand
uauuacggcucauccuaca

SEQ ID NO: 1398273 - RNA, 19 nt, Homo sapiens
  misc_RNA (1)...(19): siRNA sense strand
gagcugcuucgagaggaua

SEQ ID NO: 1398274 - RNA, 19 nt, Homo sapiens
  misc_RNA (1)...(19): siRNA sense strand
cagcucuucuccagaucuu

SEQ ID NO: 1398275 - RNA, 19 nt, Homo sapiens
  misc_RNA (1)...(19): siRNA sense strand
cagacaaggcaucaccaaa

SEQ ID NO: 1398276 - RNA, 19 nt, Homo sapiens
  misc_RNA (1)...(19): siRNA sense strand
ucccagcucuucuccagau

SEQ ID NO: 1398277 - RNA, 19 nt, Homo sapiens
  misc_RNA (1)...(19): siRNA sense strand
gggugaaggagauguacaa

SEQ ID NO: 1398278 - RNA, 19 nt, Homo sapiens
  misc_RNA (1)...(19): siRNA sense strand
ugaauacaacacacacaau

SEQ ID NO: 1398279 - RNA, 19 nt, Homo sapiens
  misc_RNA (1)...(19): siRNA sense strand
cagcacaagccuauggaau

SEQ ID NO: 1398280 - RNA, 19 nt, Homo sapiens
  misc_RNA (1)...(19): siRNA sense strand
gacauuugcauccagauac

SEQ ID NO: 1398281 - RNA, 19 nt, Homo sapiens
  misc_RNA (1)...(19): siRNA sense strand
gaggauaaugcagagauuc

SEQ ID NO: 1398282 - RNA, 19 nt, Homo sapiens
  misc_RNA (1)...(19): siRNA sense strand
caagauuuaagcacauaca

SEQ ID NO: 1398283 - RNA, 19 nt, Homo sapiens
  misc_RNA (1)...(19): siRNA sense strand
agaugacaauggccaagau

SEQ ID NO: 1398284 - RNA, 19 nt, Homo sapiens
  misc_RNA (1)...(19): siRNA sense strand
auacaacacacacaaugga

SEQ ID NO: 1398285 - RNA, 19 nt, Homo sapiens
  misc_RNA (1)...(19): siRNA sense strand
ccagaugcacggcacaaca

SEQ ID NO: 1398286 - RNA, 19 nt, Homo sapiens
  misc_RNA (1)...(19): siRNA sense strand
cacaacaggguucuaucaa

SEQ ID NO: 1398287 - RNA, 19 nt, Homo sapiens
  misc_RNA (1)...(19): siRNA sense strand
gauacacaucuguucuuca

SEQ ID NO: 1398288 - RNA, 19 nt, Homo sapiens
  misc_RNA (1)...(19): siRNA sense strand
cuucaaccuugcagauaca

SEQ ID NO: 1398289 - RNA, 19 nt, Homo sapiens
  misc_RNA (1)...(19): siRNA sense strand
gauugucuggauaaacuga

SEQ ID NO: 1398290 - RNA, 19 nt, Homo sapiens
  misc_RNA (1)...(19): siRNA sense strand
uuuaagcacauacaacuuc

SEQ ID NO: 1398291 - RNA, 19 nt, Homo sapiens
  misc_RNA (1)...(19): siRNA sense strand
caaccuugcagauacacau

SEQ ID NO: 1398292 - RNA, 19 nt, Homo sapiens
  misc_RNA (1)...(19): siRNA sense strand
ggacuuggaugagacaaua

SEQ ID NO: 1398293 - RNA, 19 nt, Homo sapiens
  misc_RNA (1)...(19): siRNA sense strand
ugaaggagauguacaauac

SEQ ID NO: 1398294 - RNA, 19 nt, Homo sapiens
  misc_RNA (1)...(19): siRNA sense strand
gagaacaucuacagugcaa

SEQ ID NO: 1398295 - RNA, 19 nt, Homo sapiens
  misc_RNA (1)...(19): siRNA sense strand
ugacaauggccaagauuua

SEQ ID NO: 1398296 - RNA, 19 nt, Homo sapiens
  misc_RNA (1)...(19): siRNA sense strand
aaacagcgauugucuggau

SEQ ID NO: 1398297 - RNA, 19 nt, Homo sapiens
  misc_RNA (1)...(19): siRNA sense strand
caccaccacucaacuaauu

SEQ ID NO: 1398298 - RNA, 19 nt, Homo sapiens
  misc_RNA (1)...(19): siRNA sense strand
ccaaaguccugcuauaugg

SEQ ID NO: 1398299 - RNA, 19 nt, Homo sapiens
  misc_RNA (1)...(19): siRNA sense strand
gacaaggcaucaccaaauc

SEQ ID NO: 1398300 - RNA, 19 nt, Homo sapiens
  misc_RNA (1)...(19): siRNA sense strand
gcauuggccuuaugaugga

SEQ ID NO: 1398301 - RNA, 19 nt, Homo sapiens
  misc_RNA (1)...(19): siRNA sense strand
ggacauuugcauccagaua

SEQ ID NO: 1398302 - RNA, 19 nt, Homo sapiens
  misc_RNA (1)...(19): siRNA sense strand
gaauacaacacacacaaug

SEQ ID NO: 1398303 - RNA, 19 nt, Homo sapiens
  misc_RNA (1)...(19): siRNA sense strand
gcacaacaggguucuauca

SEQ ID NO: 1398304 - RNA, 19 nt, Homo sapiens
  misc_RNA (1)...(19): siRNA sense strand
gcacuaaaccucaucaacu

SEQ ID NO: 1398305 - RNA, 19 nt, Homo sapiens
  misc_RNA (1)...(19): siRNA sense strand
gcugacggcuuccacaguu

SEQ ID NO: 1398306 - RNA, 19 nt, Homo sapiens
  misc_RNA (1)...(19): siRNA sense strand
acacaucuguucuucaaug

SEQ ID NO: 1398307 - RNA, 19 nt, Homo sapiens
  misc_RNA (1)...(19): siRNA sense strand
gaucggugaugguguggaa

SEQ ID NO: 1398308 - RNA, 19 nt, Homo sapiens
  misc_RNA (1)...(19): siRNA sense strand
cccuggagcuggaguauuu

SEQ ID NO: 1398309 - RNA, 19 nt, Homo sapiens
  misc_RNA (1)...(19): siRNA sense strand
gacaauggccaagauuuaa

SEQ ID NO: 1398310 - RNA, 19 nt, Homo sapiens
  misc_RNA (1)...(19): siRNA sense strand
gcgauugucuggauaaacu

SEQ ID NO: 1398311 - RNA, 19 nt, Homo sapiens
  misc_RNA (1)...(19): siRNA sense strand
auacacaucuguucuucaa

SEQ ID NO: 1398312 - RNA, 19 nt, Homo sapiens
  misc_RNA (1)...(19): siRNA sense strand
ucacccagccucacuguaa

SEQ ID NO: 1398313 - RNA, 19 nt, Homo sapiens
  misc_RNA (1)...(19): siRNA sense strand
ggucuguguuuccuauuga

SEQ ID NO: 1398314 - RNA, 19 nt, Homo sapiens
  misc_RNA (1)...(19): siRNA sense strand
gccaagauuuaagcacaua

SEQ ID NO: 1398315 - RNA, 19 nt, Homo sapiens
  misc_RNA (1)...(19): siRNA sense strand
caaccagaguuccgaguca

SEQ ID NO: 1398316 - RNA, 19 nt, Homo sapiens
  misc_RNA (1)...(19): siRNA sense strand
uacaauaccuacaagaaca

SEQ ID NO: 1398317 - RNA, 19 nt, Homo sapiens
  misc_RNA (1)...(19): siRNA sense strand
gugaaggagauguacaaua

SEQ ID NO: 1398318 - RNA, 19 nt, Homo sapiens
  misc_RNA (1)...(19): siRNA sense strand
gcacaagccuauggaaucc

SEQ ID NO: 1398319 - RNA, 19 nt, Homo sapiens
  misc_RNA (1)...(19): siRNA sense strand
cgaaagagggagacacaga

SEQ ID NO: 1398320 - RNA, 19 nt, Homo sapiens
  misc_RNA (1)...(19): siRNA sense strand
agacaaggcaucaccaaau

SEQ ID NO: 1398321 - RNA, 19 nt, Homo sapiens
  misc_RNA (1)...(19): siRNA sense strand
gccaaaguccugcuauaug

SEQ ID NO: 1398322 - RNA, 19 nt, Homo sapiens
  misc_RNA (1)...(19): siRNA sense strand
ggagugugcaccaggacua

SEQ ID NO: 1398323 - RNA, 19 nt, Homo sapiens
  misc_RNA (1)...(19): siRNA sense strand
ggagcuggaguauuuauag

SEQ ID NO: 1398324 - RNA, 19 nt, Homo sapiens
  misc_RNA (1)...(19): siRNA sense strand
uggccaaaguccugcuaua

SEQ ID NO: 1398325 - RNA, 19 nt, Homo sapiens
  misc_RNA (1)...(19): siRNA sense strand
gcccaacugugucaaugug

SEQ ID NO: 1398326 - RNA, 19 nt, Homo sapiens
  misc_RNA (1)...(19): siRNA sense strand
ggaggauugugaccagauc

SEQ ID NO: 1398327 - RNA, 19 nt, Homo sapiens
  misc_RNA (1)...(19): siRNA sense strand
ggucaccaccacucaacua

SEQ ID NO: 1398328 - RNA, 19 nt, Homo sapiens
  misc_RNA (1)...(19): siRNA sense strand
gugaccagauccacguuga

SEQ ID NO: 1398329 - RNA, 19 nt, Homo sapiens
  misc_RNA (1)...(19): siRNA sense strand
gggucuguguuuccuauug

SEQ ID NO: 1398330 - RNA, 19 nt, Homo sapiens
  misc_RNA (1)...(19): siRNA sense strand
gcugcuguguggacucuga

SEQ ID NO: 1398331 - RNA, 19 nt, Homo sapiens
  misc_RNA (1)...(19): siRNA sense strand
ggccaaaguccugcuauau

SEQ ID NO: 1398332 - RNA, 19 nt, Homo sapiens
  misc_RNA (1)...(19): siRNA sense strand
guacaauaccuacaagaac

SEQ ID NO: 1398333 - RNA, 19 nt, Homo sapiens
  misc_RNA (1)...(19): siRNA sense strand
ggucuaagaggagcaguga

SEQ ID NO: 1398334 - RNA, 19 nt, Homo sapiens
  misc_RNA (1)...(19): siRNA sense strand
gagaggauaaugcagagau

SEQ ID NO: 1398335 - RNA, 19 nt, Homo sapiens
  misc_RNA (1)...(19): siRNA sense strand
cacuaaaccucaucaacuc

SEQ ID NO: 1398336 - RNA, 19 nt, Homo sapiens
  misc_RNA (1)...(19): siRNA sense strand
gcgcauuggccuuaugaug

SEQ ID NO: 1398337 - RNA, 19 nt, Homo sapiens
  misc_RNA (1)...(19): siRNA sense strand
acaacaggguucuaucaag

SEQ ID NO: 1398338 - RNA, 19 nt, Homo sapiens
  misc_RNA (1)...(19): siRNA sense strand
agaggauaaugcagagauu

SEQ ID NO: 1398339 - RNA, 19 nt, Homo sapiens
  misc_RNA (1)...(19): siRNA sense strand
gauuuaagcacauacaacu

SEQ ID NO: 1398340 - RNA, 19 nt, Homo sapiens
  misc_RNA (1)...(19): siRNA sense strand
gacagagcccauacaccua

SEQ ID NO: 1398341 - RNA, 19 nt, Homo sapiens
  misc_RNA (1)...(19): siRNA sense strand
cacccagccucacuguaaa

SEQ ID NO: 1398342 - RNA, 19 nt, Homo sapiens
  misc_RNA (1)...(19): siRNA sense strand
gaugacaauggccaagauu

SEQ ID NO: 1398343 - RNA, 19 nt, Homo sapiens
  misc_RNA (1)...(19): siRNA sense strand
gaccagauccacguugaug

SEQ ID NO: 1398344 - RNA, 19 nt, Homo sapiens
  misc_RNA (1)...(19): siRNA sense strand
cacaucuguucuucaauga

SEQ ID NO: 1398345 - RNA, 19 nt, Homo sapiens
  misc_RNA (1)...(19): siRNA sense strand
guugauaggcacucccaaa

SEQ ID NO: 1398346 - RNA, 19 nt, Homo sapiens
  misc_RNA (1)...(19): siRNA sense strand
gugaauacaacacacacaa

SEQ ID NO: 1398347 - RNA, 19 nt, Homo sapiens
  misc_RNA (1)...(19): siRNA sense strand
ccacuggacagagcccaua

SEQ ID NO: 1398348 - RNA, 19 nt, Homo sapiens
  misc_RNA (1)...(19): siRNA sense strand
gcagagauucggcagaaaa

SEQ ID NO: 1398349 - RNA, 19 nt, Homo sapiens
  misc_RNA (1)...(19): siRNA sense strand
uuacccaccuccagcacaa

SEQ ID NO: 1398350 - RNA, 19 nt, Homo sapiens
  misc_RNA (1)...(19): siRNA sense strand
gcccauacaccuaccagau

SEQ ID NO: 1398351 - RNA, 19 nt, Homo sapiens
  misc_RNA (1)...(19): siRNA sense strand
cagcgauugucuggauaaa

SEQ ID NO: 1398352 - RNA, 19 nt, Homo sapiens
  misc_RNA (1)...(19): siRNA sense strand
ugaaggcacuaaaccucau

SEQ ID NO: 1398353 - RNA, 19 nt, Homo sapiens
  misc_RNA (1)...(19): siRNA sense strand
gauaggcacucccaaaagg

SEQ ID NO: 1398354 - RNA, 19 nt, Homo sapiens
  misc_RNA (1)...(19): siRNA sense strand
ggccaagauuuaagcacau

SEQ ID NO: 1398355 - RNA, 19 nt, Homo sapiens
  misc_RNA (1)...(19): siRNA sense strand
augcagagauucggcagaa

SEQ ID NO: 1398356 - RNA, 19 nt, Homo sapiens
  misc_RNA (1)...(19): siRNA sense strand
caaccaagacagggaagga

SEQ ID NO: 1398357 - RNA, 19 nt, Homo sapiens
  misc_RNA (1)...(19): siRNA sense strand
uauuacggcucauccuaca

SEQ ID NO: 1398358 - RNA, 19 nt, Homo sapiens
  misc_RNA (1)...(19): siRNA sense strand
gagcugcuucgagaggaua

SEQ ID NO: 1398359 - RNA, 19 nt, Homo sapiens
  misc_RNA (1)...(19): siRNA sense strand
cagcucuucuccagaucuu

SEQ ID NO: 1398360 - RNA, 19 nt, Homo sapiens
  misc_RNA (1)...(19): siRNA sense strand
cagacaaggcaucaccaaa

SEQ ID NO: 1398361 - RNA, 19 nt, Homo sapiens
  misc_RNA (1)...(19): siRNA sense strand
ucccagcucuucuccagau

SEQ ID NO: 1398362 - RNA, 19 nt, Homo sapiens
  misc_RNA (1)...(19): siRNA sense strand
gggugaaggagauguacaa

SEQ ID NO: 1398363 - RNA, 19 nt, Homo sapiens
  misc_RNA (1)...(19): siRNA sense strand
ugaauacaacacacacaau

SEQ ID NO: 1398364 - RNA, 19 nt, Homo sapiens
  misc_RNA (1)...(19): siRNA sense strand
cagcacaagccuauggaau

SEQ ID NO: 1398365 - RNA, 19 nt, Homo sapiens
  misc_RNA (1)...(19): siRNA sense strand
gacauuugcauccagauac

SEQ ID NO: 1398366 - RNA, 19 nt, Homo sapiens
  misc_RNA (1)...(19): siRNA sense strand
gaggauaaugcagagauuc

SEQ ID NO: 1398367 - RNA, 19 nt, Homo sapiens
  misc_RNA (1)...(19): siRNA sense strand
caagauuuaagcacauaca

SEQ ID NO: 1398368 - RNA, 19 nt, Homo sapiens
  misc_RNA (1)...(19): siRNA sense strand
agaugacaauggccaagau

SEQ ID NO: 1398369 - RNA, 19 nt, Homo sapiens
  misc_RNA (1)...(19): siRNA sense strand
auacaacacacacaaugga

SEQ ID NO: 1398370 - RNA, 19 nt, Homo sapiens
  misc_RNA (1)...(19): siRNA sense strand
ccagaugcacggcacaaca

SEQ ID NO: 1398371 - RNA, 19 nt, Homo sapiens
  misc_RNA (1)...(19): siRNA sense strand
cacaacaggguucuaucaa

SEQ ID NO: 1398372 - RNA, 19 nt, Homo sapiens
  misc_RNA (1)...(19): siRNA sense strand
gauacacaucuguucuuca

SEQ ID NO: 1398373 - RNA, 19 nt, Homo sapiens
  misc_RNA (1)...(19): siRNA sense strand
cuucaaccuugcagauaca

SEQ ID NO: 1398374 - RNA, 19 nt, Homo sapiens
  misc_RNA (1)...(19): siRNA sense strand
gauugucuggauaaacuga

SEQ ID NO: 1398375 - RNA, 19 nt, Homo sapiens
  misc_RNA (1)...(19): siRNA sense strand
uuuaagcacauacaacuuc

SEQ ID NO: 1398376 - RNA, 19 nt, Homo sapiens
  misc_RNA (1)...(19): siRNA sense strand
caaccuugcagauacacau

SEQ ID NO: 1398377 - RNA, 19 nt, Homo sapiens
  misc_RNA (1)...(19): siRNA sense strand
ggacuuggaugagacaaua

SEQ ID NO: 1398378 - RNA, 19 nt, Homo sapiens
  misc_RNA (1)...(19): siRNA sense strand
ugaaggagauguacaauac

SEQ ID NO: 1398379 - RNA, 19 nt, Homo sapiens
  misc_RNA (1)...(19): siRNA sense strand
gagaacaucuacagugcaa

SEQ ID NO: 1398380 - RNA, 19 nt, Homo sapiens
  misc_RNA (1)...(19): siRNA sense strand
ugacaauggccaagauuua

SEQ ID NO: 1398381 - RNA, 19 nt, Homo sapiens
  misc_RNA (1)...(19): siRNA sense strand
aaacagcgauugucuggau

SEQ ID NO: 1398382 - RNA, 19 nt, Homo sapiens
  misc_RNA (1)...(19): siRNA sense strand
caccaccacucaacuaauu

SEQ ID NO: 1398383 - RNA, 19 nt, Homo sapiens
  misc_RNA (1)...(19): siRNA sense strand
ccaaaguccugcuauaugg

SEQ ID NO: 1398384 - RNA, 19 nt, Homo sapiens
  misc_RNA (1)...(19): siRNA sense strand
gacaaggcaucaccaaauc

SEQ ID NO: 1398385 - RNA, 19 nt, Homo sapiens
  misc_RNA (1)...(19): siRNA sense strand
gcauuggccuuaugaugga

SEQ ID NO: 1398386 - RNA, 19 nt, Homo sapiens
  misc_RNA (1)...(19): siRNA sense strand
ggacauuugcauccagaua

SEQ ID NO: 1398387 - RNA, 19 nt, Homo sapiens
  misc_RNA (1)...(19): siRNA sense strand
gaauacaacacacacaaug

SEQ ID NO: 1398388 - RNA, 19 nt, Homo sapiens
  misc_RNA (1)...(19): siRNA sense strand
gcacaacaggguucuauca

SEQ ID NO: 1398389 - RNA, 19 nt, Homo sapiens
  misc_RNA (1)...(19): siRNA sense strand
gcacuaaaccucaucaacu

SEQ ID NO: 1398390 - RNA, 19 nt, Homo sapiens
  misc_RNA (1)...(19): siRNA sense strand
gcugacggcuuccacaguu

SEQ ID NO: 1398391 - RNA, 19 nt, Homo sapiens
  misc_RNA (1)...(19): siRNA sense strand
acacaucuguucuucaaug

SEQ ID NO: 1398392 - RNA, 19 nt, Homo sapiens
  misc_RNA (1)...(19): siRNA sense strand
gaaaugguagaacuaguga

SEQ ID NO: 1398393 - RNA, 19 nt, Homo sapiens
  misc_RNA (1)...(19): siRNA sense strand
cccuggagcuggaguauuu

SEQ ID NO: 1398394 - RNA, 19 nt, Homo sapiens
  misc_RNA (1)...(19): siRNA sense strand
gaucggugaugguguggaa

SEQ ID NO: 1398395 - RNA, 19 nt, Homo sapiens
  misc_RNA (1)...(19): siRNA sense strand
gacaauggccaagauuuaa

SEQ ID NO: 1398396 - RNA, 19 nt, Homo sapiens
  misc_RNA (1)...(19): siRNA sense strand
gcgauugucuggauaaacu

SEQ ID NO: 1398397 - RNA, 19 nt, Homo sapiens
  misc_RNA (1)...(19): siRNA sense strand
ggaaaugguagaacuagug

SEQ ID NO: 1398398 - RNA, 19 nt, Homo sapiens
  misc_RNA (1)...(19): siRNA sense strand
auacacaucuguucuucaa

SEQ ID NO: 1398399 - RNA, 19 nt, Homo sapiens
  misc_RNA (1)...(19): siRNA sense strand
ucacccagccucacuguaa

SEQ ID NO: 1398400 - RNA, 19 nt, Homo sapiens
  misc_RNA (1)...(19): siRNA sense strand
ggucuguguuuccuauuga

SEQ ID NO: 1398401 - RNA, 19 nt, Homo sapiens
  misc_RNA (1)...(19): siRNA sense strand
gccaagauuuaagcacaua

SEQ ID NO: 1398402 - RNA, 19 nt, Homo sapiens
  misc_RNA (1)...(19): siRNA sense strand
caaccagaguuccgaguca

SEQ ID NO: 1398403 - RNA, 19 nt, Homo sapiens
  misc_RNA (1)...(19): siRNA sense strand
uacaauaccuacaagaaca

SEQ ID NO: 1398404 - RNA, 19 nt, Homo sapiens
  misc_RNA (1)...(19): siRNA sense strand
caaggaaaugguagaacua

SEQ ID NO: 1398405 - RNA, 19 nt, Homo sapiens
  misc_RNA (1)...(19): siRNA sense strand
gugaaggagauguacaaua

SEQ ID NO: 1398406 - RNA, 19 nt, Homo sapiens
  misc_RNA (1)...(19): siRNA sense strand
gcacaagccuauggaaucc

SEQ ID NO: 1398407 - RNA, 19 nt, Homo sapiens
  misc_RNA (1)...(19): siRNA sense strand
cgaaagagggagacacaga

SEQ ID NO: 1398408 - RNA, 19 nt, Homo sapiens
  misc_RNA (1)...(19): siRNA sense strand
agacaaggcaucaccaaau

SEQ ID NO: 1398409 - RNA, 19 nt, Homo sapiens
  misc_RNA (1)...(19): siRNA sense strand
gccaaaguccugcuauaug

SEQ ID NO: 1398410 - RNA, 19 nt, Homo sapiens
  misc_RNA (1)...(19): siRNA sense strand
ggagugugcaccaggacua

SEQ ID NO: 1398411 - RNA, 19 nt, Homo sapiens
  misc_RNA (1)...(19): siRNA sense strand
ggagcuggaguauuuauag

SEQ ID NO: 1398412 - RNA, 19 nt, Homo sapiens
  misc_RNA (1)...(19): siRNA sense strand
uggccaaaguccugcuaua

SEQ ID NO: 1398413 - RNA, 19 nt, Homo sapiens
  misc_RNA (1)...(19): siRNA sense strand
gcccaacugugucaaugug

SEQ ID NO: 1398414 - RNA, 19 nt, Homo sapiens
  misc_RNA (1)...(19): siRNA sense strand
ggaggauugugaccagauc

SEQ ID NO: 1398415 - RNA, 19 nt, Homo sapiens
  misc_RNA (1)...(19): siRNA sense strand
acaaggaaaugguagaacu

SEQ ID NO: 1398416 - RNA, 19 nt, Homo sapiens
  misc_RNA (1)...(19): siRNA sense strand
ggucaccaccacucaacua

SEQ ID NO: 1398417 - RNA, 19 nt, Homo sapiens
  misc_RNA (1)...(19): siRNA sense strand
gugaccagauccacguuga

SEQ ID NO: 1398418 - RNA, 19 nt, Homo sapiens
  misc_RNA (1)...(19): siRNA sense strand
guacaaggaaaugguagaa

SEQ ID NO: 1398419 - RNA, 19 nt, Homo sapiens
  misc_RNA (1)...(19): siRNA sense strand
gggucuguguuuccuauug

SEQ ID NO: 1398420 - RNA, 19 nt, Homo sapiens
  misc_RNA (1)...(19): siRNA sense strand
guacaauaccuacaagaac

SEQ ID NO: 1398421 - RNA, 19 nt, Homo sapiens
  misc_RNA (1)...(19): siRNA sense strand
ggccaaaguccugcuauau

SEQ ID NO: 1398422 - RNA, 19 nt, Homo sapiens
  misc_RNA (1)...(19): siRNA sense strand
gcugcuguguggacucuga

SEQ ID NO: 1398423 - RNA, 19 nt, Homo sapiens
  misc_RNA (1)...(19): siRNA sense strand
ggucuaagaggagcaguga

SEQ ID NO: 1398424 - RNA, 19 nt, Homo sapiens
  misc_RNA (1)...(19): siRNA sense strand
gagaggauaaugcagagau

SEQ ID NO: 1398425 - RNA, 19 nt, Homo sapiens
  misc_RNA (1)...(19): siRNA sense strand
cacuaaaccucaucaacuc

SEQ ID NO: 1398426 - RNA, 19 nt, Homo sapiens
  misc_RNA (1)...(19): siRNA sense strand
gcgcauuggccuuaugaug

SEQ ID NO: 1398427 - RNA, 19 nt, Homo sapiens
  misc_RNA (1)...(19): siRNA sense strand
acaacaggguucuaucaag

SEQ ID NO: 1398428 - RNA, 19 nt, Homo sapiens
  misc_RNA (1)...(19): siRNA sense strand
agaggauaaugcagagauu

SEQ ID NO: 1398429 - RNA, 19 nt, Homo sapiens
  misc_RNA (1)...(19): siRNA sense strand
gauuuaagcacauacaacu

SEQ ID NO: 1398430 - RNA, 19 nt, Homo sapiens
  misc_RNA (1)...(19): siRNA sense strand
gacagagcccauacaccua

SEQ ID NO: 1398431 - RNA, 19 nt, Homo sapiens
  misc_RNA (1)...(19): siRNA sense strand
cacccagccucacuguaaa

SEQ ID NO: 1398432 - RNA, 19 nt, Homo sapiens
  misc_RNA (1)...(19): siRNA sense strand
gaugacaauggccaagauu

SEQ ID NO: 1398433 - RNA, 19 nt, Homo sapiens
  misc_RNA (1)...(19): siRNA sense strand
gaccagauccacguugaug

SEQ ID NO: 1398434 - RNA, 19 nt, Homo sapiens
  misc_RNA (1)...(19): siRNA sense strand
cacaucuguucuucaauga

SEQ ID NO: 1398435 - RNA, 19 nt, Homo sapiens
  misc_RNA (1)...(19): siRNA sense strand
guugauaggcacucccaaa

SEQ ID NO: 1398436 - RNA, 19 nt, Homo sapiens
  misc_RNA (1)...(19): siRNA sense strand
gugaauacaacacacacaa

SEQ ID NO: 1398437 - RNA, 19 nt, Homo sapiens
  misc_RNA (1)...(19): siRNA sense strand
ccacuggacagagcccaua

SEQ ID NO: 1398438 - RNA, 19 nt, Homo sapiens
  misc_RNA (1)...(19): siRNA sense strand
gcagagauucggcagaaaa

SEQ ID NO: 1398439 - RNA, 19 nt, Homo sapiens
  misc_RNA (1)...(19): siRNA sense strand
uuacccaccuccagcacaa

SEQ ID NO: 1398440 - RNA, 19 nt, Homo sapiens
  misc_RNA (1)...(19): siRNA sense strand
gcccauacaccuaccagau

SEQ ID NO: 1398441 - RNA, 19 nt, Homo sapiens
  misc_RNA (1)...(19): siRNA sense strand
ugaaggcacuaaaccucau

SEQ ID NO: 1398442 - RNA, 19 nt, Homo sapiens
  misc_RNA (1)...(19): siRNA sense strand
gauaggcacucccaaaagg

SEQ ID NO: 1398443 - RNA, 19 nt, Homo sapiens
  misc_RNA (1)...(19): siRNA sense strand
cagcgauugucuggauaaa

SEQ ID NO: 1398444 - RNA, 19 nt, Homo sapiens
  misc_RNA (1)...(19): siRNA sense strand
ggccaagauuuaagcacau

SEQ ID NO: 1398445 - RNA, 19 nt, Homo sapiens
  misc_RNA (1)...(19): siRNA sense strand
augcagagauucggcagaa

SEQ ID NO: 1398446 - RNA, 19 nt, Homo sapiens
  misc_RNA (1)...(19): siRNA sense strand
caaccaagacagggaagga

SEQ ID NO: 1398447 - RNA, 19 nt, Homo sapiens
  misc_RNA (1)...(19): siRNA sense strand
cagacaaggcaucaccaaa

SEQ ID NO: 1398448 - RNA, 19 nt, Homo sapiens
  misc_RNA (1)...(19): siRNA sense strand
gagcugcuucgagaggaua

SEQ ID NO: 1398449 - RNA, 19 nt, Homo sapiens
  misc_RNA (1)...(19): siRNA sense strand
cagcucuucuccagaucuu

SEQ ID NO: 1398450 - RNA, 19 nt, Homo sapiens
  misc_RNA (1)...(19): siRNA sense strand
ucccagcucuucuccagau

SEQ ID NO: 1398451 - RNA, 19 nt, Homo sapiens
  misc_RNA (1)...(19): siRNA sense strand
uauuacggcucauccuaca

SEQ ID NO: 1398452 - RNA, 19 nt, Homo sapiens
  misc_RNA (1)...(19): siRNA sense strand
gggugaaggagauguacaa

SEQ ID NO: 1398453 - RNA, 19 nt, Homo sapiens
  misc_RNA (1)...(19): siRNA sense strand
cagcacaagccuauggaau

SEQ ID NO: 1398454 - RNA, 19 nt, Homo sapiens
  misc_RNA (1)...(19): siRNA sense strand
ugaauacaacacacacaau

SEQ ID NO: 1398455 - RNA, 19 nt, Homo sapiens
  misc_RNA (1)...(19): siRNA sense strand
gacauuugcauccagauac

SEQ ID NO: 1398456 - RNA, 19 nt, Homo sapiens
  misc_RNA (1)...(19): siRNA sense strand
gaggauaaugcagagauuc

SEQ ID NO: 1398457 - RNA, 19 nt, Homo sapiens
  misc_RNA (1)...(19): siRNA sense strand
caagauuuaagcacauaca

SEQ ID NO: 1398458 - RNA, 19 nt, Homo sapiens
  misc_RNA (1)...(19): siRNA sense strand
agaugacaauggccaagau

SEQ ID NO: 1398459 - RNA, 19 nt, Homo sapiens
  misc_RNA (1)...(19): siRNA sense strand
ccagaugcacggcacaaca

SEQ ID NO: 1398460 - RNA, 19 nt, Homo sapiens
  misc_RNA (1)...(19): siRNA sense strand
auacaacacacacaaugga

SEQ ID NO: 1398461 - RNA, 19 nt, Homo sapiens
  misc_RNA (1)...(19): siRNA sense strand
cacaacaggguucuaucaa

SEQ ID NO: 1398462 - RNA, 19 nt, Homo sapiens
  misc_RNA (1)...(19): siRNA sense strand
gguacaaggaaaugguaga

SEQ ID NO: 1398463 - RNA, 19 nt, Homo sapiens
  misc_RNA (1)...(19): siRNA sense strand
gauacacaucuguucuuca

SEQ ID NO: 1398464 - RNA, 19 nt, Homo sapiens
  misc_RNA (1)...(19): siRNA sense strand
cuucaaccuugcagauaca

SEQ ID NO: 1398465 - RNA, 19 nt, Homo sapiens
  misc_RNA (1)...(19): siRNA sense strand
gauugucuggauaaacuga

SEQ ID NO: 1398466 - RNA, 19 nt, Homo sapiens
  misc_RNA (1)...(19): siRNA sense strand
uuuaagcacauacaacuuc

SEQ ID NO: 1398467 - RNA, 19 nt, Homo sapiens
  misc_RNA (1)...(19): siRNA sense strand
caaccuugcagauacacau

SEQ ID NO: 1398468 - RNA, 19 nt, Homo sapiens
  misc_RNA (1)...(19): siRNA sense strand
ggacuuggaugagacaaua

SEQ ID NO: 1398469 - RNA, 19 nt, Homo sapiens
  misc_RNA (1)...(19): siRNA sense strand
ugaaggagauguacaauac

SEQ ID NO: 1398470 - RNA, 19 nt, Homo sapiens
  misc_RNA (1)...(19): siRNA sense strand
gagaacaucuacagugcaa

SEQ ID NO: 1398471 - RNA, 19 nt, Homo sapiens
  misc_RNA (1)...(19): siRNA sense strand
ugacaauggccaagauuua

SEQ ID NO: 1398472 - RNA, 19 nt, Homo sapiens
  misc_RNA (1)...(19): siRNA sense strand
aaacagcgauugucuggau

SEQ ID NO: 1398473 - RNA, 19 nt, Homo sapiens
  misc_RNA (1)...(19): siRNA sense strand
caccaccacucaacuaauu

SEQ ID NO: 1398474 - RNA, 19 nt, Homo sapiens
  misc_RNA (1)...(19): siRNA sense strand
ccaaaguccugcuauaugg

SEQ ID NO: 1398475 - RNA, 19 nt, Homo sapiens
  misc_RNA (1)...(19): siRNA sense strand
gacaaggcaucaccaaauc

SEQ ID NO: 1398476 - RNA, 19 nt, Homo sapiens
  misc_RNA (1)...(19): siRNA sense strand
gcauuggccuuaugaugga

SEQ ID NO: 1398477 - RNA, 19 nt, Homo sapiens
  misc_RNA (1)...(19): siRNA sense strand
ggacauuugcauccagaua

SEQ ID NO: 1398478 - RNA, 19 nt, Homo sapiens
  misc_RNA (1)...(19): siRNA sense strand
gaauacaacacacacaaug

SEQ ID NO: 1398479 - RNA, 19 nt, Homo sapiens
  misc_RNA (1)...(19): siRNA sense strand
gcacaacaggguucuauca

SEQ ID NO: 1398480 - RNA, 19 nt, Homo sapiens
  misc_RNA (1)...(19): siRNA sense strand
gcacuaaaccucaucaacu

SEQ ID NO: 1398481 - RNA, 19 nt, Homo sapiens
  misc_RNA (1)...(19): siRNA sense strand
gcugacggcuuccacaguu

SEQ ID NO: 1398482 - RNA, 19 nt, Homo sapiens
  misc_RNA (1)...(19): siRNA sense strand
acacaucuguucuucaaug

SEQ ID NO: 1398483 - RNA, 19 nt, Homo sapiens
  misc_RNA (1)...(19): siRNA sense strand
gaucggugaugguguggaa

SEQ ID NO: 1398484 - RNA, 19 nt, Homo sapiens
  misc_RNA (1)...(19): siRNA sense strand
cccuggagcuggaguauuu

SEQ ID NO: 1398485 - RNA, 19 nt, Homo sapiens
  misc_RNA (1)...(19): siRNA sense strand
gacaauggccaagauuuaa

SEQ ID NO: 1398486 - RNA, 19 nt, Homo sapiens
  misc_RNA (1)...(19): siRNA sense strand
gcgauugucuggauaaacu

SEQ ID NO: 1398487 - RNA, 19 nt, Homo sapiens
  misc_RNA (1)...(19): siRNA sense strand
auacacaucuguucuucaa

SEQ ID NO: 1398488 - RNA, 19 nt, Homo sapiens
  misc_RNA (1)...(19): siRNA sense strand
ucacccagccucacuguaa

SEQ ID NO: 1398489 - RNA, 19 nt, Homo sapiens
  misc_RNA (1)...(19): siRNA sense strand
ggucuguguuuccuauuga

SEQ ID NO: 1398490 - RNA, 19 nt, Homo sapiens
  misc_RNA (1)...(19): siRNA sense strand
gccaagauuuaagcacaua

SEQ ID NO: 1398491 - RNA, 19 nt, Homo sapiens
  misc_RNA (1)...(19): siRNA sense strand
caaccagaguuccgaguca

SEQ ID NO: 1398492 - RNA, 19 nt, Homo sapiens
  misc_RNA (1)...(19): siRNA sense strand
uacaauaccuacaagaaca

SEQ ID NO: 1398493 - RNA, 19 nt, Homo sapiens
  misc_RNA (1)...(19): siRNA sense strand
gugaaggagauguacaaua

SEQ ID NO: 1398494 - RNA, 19 nt, Homo sapiens
  misc_RNA (1)...(19): siRNA sense strand
gcacaagccuauggaaucc

SEQ ID NO: 1398495 - RNA, 19 nt, Homo sapiens
  misc_RNA (1)...(19): siRNA sense strand
cgaaagagggagacacaga

SEQ ID NO: 1398496 - RNA, 19 nt, Homo sapiens
  misc_RNA (1)...(19): siRNA sense strand
agacaaggcaucaccaaau

SEQ ID NO: 1398497 - RNA, 19 nt, Homo sapiens
  misc_RNA (1)...(19): siRNA sense strand
gccaaaguccugcuauaug

SEQ ID NO: 1398498 - RNA, 19 nt, Homo sapiens
  misc_RNA (1)...(19): siRNA sense strand
ggagugugcaccaggacua

SEQ ID NO: 1398499 - RNA, 19 nt, Homo sapiens
  misc_RNA (1)...(19): siRNA sense strand
ggagcuggaguauuuauag

SEQ ID NO: 1398500 - RNA, 19 nt, Homo sapiens
  misc_RNA (1)...(19): siRNA sense strand
uggccaaaguccugcuaua

SEQ ID NO: 1398501 - RNA, 19 nt, Homo sapiens
  misc_RNA (1)...(19): siRNA sense strand
gcccaacugugucaaugug

SEQ ID NO: 1398502 - RNA, 19 nt, Homo sapiens
  misc_RNA (1)...(19): siRNA sense strand
ggaggauugugaccagauc

SEQ ID NO: 1398503 - RNA, 19 nt, Homo sapiens
  misc_RNA (1)...(19): siRNA sense strand
ggucaccaccacucaacua

SEQ ID NO: 1398504 - RNA, 19 nt, Homo sapiens
  misc_RNA (1)...(19): siRNA sense strand
gugaccagauccacguuga

SEQ ID NO: 1398505 - RNA, 19 nt, Homo sapiens
  misc_RNA (1)...(19): siRNA sense strand
gggucuguguuuccuauug

SEQ ID NO: 1398506 - RNA, 19 nt, Homo sapiens
  misc_RNA (1)...(19): siRNA sense strand
gcugcuguguggacucuga

SEQ ID NO: 1398507 - RNA, 19 nt, Homo sapiens
  misc_RNA (1)...(19): siRNA sense strand
ggccaaaguccugcuauau

SEQ ID NO: 1398508 - RNA, 19 nt, Homo sapiens
  misc_RNA (1)...(19): siRNA sense strand
guacaauaccuacaagaac

SEQ ID NO: 1398509 - RNA, 19 nt, Homo sapiens
  misc_RNA (1)...(19): siRNA sense strand
ggucuaagaggagcaguga

SEQ ID NO: 1398510 - RNA, 19 nt, Homo sapiens
  misc_RNA (1)...(19): siRNA sense strand
gagaggauaaugcagagau

SEQ ID NO: 1398511 - RNA, 19 nt, Homo sapiens
  misc_RNA (1)...(19): siRNA sense strand
cacuaaaccucaucaacuc

SEQ ID NO: 1398512 - RNA, 19 nt, Homo sapiens
  misc_RNA (1)...(19): siRNA sense strand
gcgcauuggccuuaugaug

SEQ ID NO: 1398513 - RNA, 19 nt, Homo sapiens
  misc_RNA (1)...(19): siRNA sense strand
acaacaggguucuaucaag

SEQ ID NO: 1398514 - RNA, 19 nt, Homo sapiens
  misc_RNA (1)...(19): siRNA sense strand
agaggauaaugcagagauu

SEQ ID NO: 1398515 - RNA, 19 nt, Homo sapiens
  misc_RNA (1)...(19): siRNA sense strand
gauuuaagcacauacaacu

SEQ ID NO: 1398516 - RNA, 19 nt, Homo sapiens
  misc_RNA (1)...(19): siRNA sense strand
gacagagcccauacaccua

SEQ ID NO: 1398517 - RNA, 19 nt, Homo sapiens
  misc_RNA (1)...(19): siRNA sense strand
cacccagccucacuguaaa

SEQ ID NO: 1398518 - RNA, 19 nt, Homo sapiens
  misc_RNA (1)...(19): siRNA sense strand
gaugacaauggccaagauu

SEQ ID NO: 1398519 - RNA, 19 nt, Homo sapiens
  misc_RNA (1)...(19): siRNA sense strand
gaccagauccacguugaug

SEQ ID NO: 1398520 - RNA, 19 nt, Homo sapiens
  misc_RNA (1)...(19): siRNA sense strand
cacaucuguucuucaauga

SEQ ID NO: 1398521 - RNA, 19 nt, Homo sapiens
  misc_RNA (1)...(19): siRNA sense strand
guugauaggcacucccaaa

SEQ ID NO: 1398522 - RNA, 19 nt, Homo sapiens
  misc_RNA (1)...(19): siRNA sense strand
gugaauacaacacacacaa

SEQ ID NO: 1398523 - RNA, 19 nt, Homo sapiens
  misc_RNA (1)...(19): siRNA sense strand
ccacuggacagagcccaua

SEQ ID NO: 1398524 - RNA, 19 nt, Homo sapiens
  misc_RNA (1)...(19): siRNA sense strand
gcagagauucggcagaaaa

SEQ ID NO: 1398525 - RNA, 19 nt, Homo sapiens
  misc_RNA (1)...(19): siRNA sense strand
uuacccaccuccagcacaa

SEQ ID NO: 1398526 - RNA, 19 nt, Homo sapiens
  misc_RNA (1)...(19): siRNA sense strand
gcccauacaccuaccagau

SEQ ID NO: 1398527 - RNA, 19 nt, Homo sapiens
  misc_RNA (1)...(19): siRNA sense strand
cagcgauugucuggauaaa

SEQ ID NO: 1398528 - RNA, 19 nt, Homo sapiens
  misc_RNA (1)...(19): siRNA sense strand
ugaaggcacuaaaccucau

SEQ ID NO: 1398529 - RNA, 19 nt, Homo sapiens
  misc_RNA (1)...(19): siRNA sense strand
gauaggcacucccaaaagg

SEQ ID NO: 1398530 - RNA, 19 nt, Homo sapiens
  misc_RNA (1)...(19): siRNA sense strand
ggccaagauuuaagcacau

SEQ ID NO: 1398531 - RNA, 19 nt, Homo sapiens
  misc_RNA (1)...(19): siRNA sense strand
augcagagauucggcagaa

SEQ ID NO: 1398532 - RNA, 19 nt, Homo sapiens
  misc_RNA (1)...(19): siRNA sense strand
caaccaagacagggaagga

SEQ ID NO: 1398533 - RNA, 19 nt, Homo sapiens
  misc_RNA (1)...(19): siRNA sense strand
uauuacggcucauccuaca

SEQ ID NO: 1398534 - RNA, 19 nt, Homo sapiens
  misc_RNA (1)...(19): siRNA sense strand
gagcugcuucgagaggaua

SEQ ID NO: 1398535 - RNA, 19 nt, Homo sapiens
  misc_RNA (1)...(19): siRNA sense strand
cagcucuucuccagaucuu

SEQ ID NO: 1398536 - RNA, 19 nt, Homo sapiens
  misc_RNA (1)...(19): siRNA sense strand
cagacaaggcaucaccaaa

SEQ ID NO: 1398537 - RNA, 19 nt, Homo sapiens
  misc_RNA (1)...(19): siRNA sense strand
ucccagcucuucuccagau

SEQ ID NO: 1398538 - RNA, 19 nt, Homo sapiens
  misc_RNA (1)...(19): siRNA sense strand
gggugaaggagauguacaa

SEQ ID NO: 1398539 - RNA, 19 nt, Homo sapiens
  misc_RNA (1)...(19): siRNA sense strand
ugaauacaacacacacaau

SEQ ID NO: 1398540 - RNA, 19 nt, Homo sapiens
  misc_RNA (1)...(19): siRNA sense strand
cagcacaagccuauggaau

SEQ ID NO: 1398541 - RNA, 19 nt, Homo sapiens
  misc_RNA (1)...(19): siRNA sense strand
gacauuugcauccagauac

SEQ ID NO: 1398542 - RNA, 19 nt, Homo sapiens
  misc_RNA (1)...(19): siRNA sense strand
gaggauaaugcagagauuc

SEQ ID NO: 1398543 - RNA, 19 nt, Homo sapiens
  misc_RNA (1)...(19): siRNA sense strand
caagauuuaagcacauaca

SEQ ID NO: 1398544 - RNA, 19 nt, Homo sapiens
  misc_RNA (1)...(19): siRNA sense strand
agaugacaauggccaagau

SEQ ID NO: 1398545 - RNA, 19 nt, Homo sapiens
  misc_RNA (1)...(19): siRNA sense strand
auacaacacacacaaugga

SEQ ID NO: 1398546 - RNA, 19 nt, Homo sapiens
  misc_RNA (1)...(19): siRNA sense strand
ccagaugcacggcacaaca

SEQ ID NO: 1398547 - RNA, 19 nt, Homo sapiens
  misc_RNA (1)...(19): siRNA sense strand
cacaacaggguucuaucaa

SEQ ID NO: 1398548 - RNA, 19 nt, Homo sapiens
  misc_RNA (1)...(19): siRNA sense strand
gauacacaucuguucuuca

SEQ ID NO: 1398549 - RNA, 19 nt, Homo sapiens
  misc_RNA (1)...(19): siRNA sense strand
cuucaaccuugcagauaca

SEQ ID NO: 1398550 - RNA, 19 nt, Homo sapiens
  misc_RNA (1)...(19): siRNA sense strand
gauugucuggauaaacuga

SEQ ID NO: 1398551 - RNA, 19 nt, Homo sapiens
  misc_RNA (1)...(19): siRNA sense strand
uuuaagcacauacaacuuc

SEQ ID NO: 1398552 - RNA, 19 nt, Homo sapiens
  misc_RNA (1)...(19): siRNA sense strand
caaccuugcagauacacau

SEQ ID NO: 1398553 - RNA, 19 nt, Homo sapiens
  misc_RNA (1)...(19): siRNA sense strand
ggacuuggaugagacaaua

SEQ ID NO: 1398554 - RNA, 19 nt, Homo sapiens
  misc_RNA (1)...(19): siRNA sense strand
ugaaggagauguacaauac

SEQ ID NO: 1398555 - RNA, 19 nt, Homo sapiens
  misc_RNA (1)...(19): siRNA sense strand
gagaacaucuacagugcaa

SEQ ID NO: 1398556 - RNA, 19 nt, Homo sapiens
  misc_RNA (1)...(19): siRNA sense strand
ugacaauggccaagauuua

SEQ ID NO: 1398557 - RNA, 19 nt, Homo sapiens
  misc_RNA (1)...(19): siRNA sense strand
aaacagcgauugucuggau

SEQ ID NO: 1398558 - RNA, 19 nt, Homo sapiens
  misc_RNA (1)...(19): siRNA sense strand
caccaccacucaacuaauu

SEQ ID NO: 1398559 - RNA, 19 nt, Homo sapiens
  misc_RNA (1)...(19): siRNA sense strand
ccaaaguccugcuauaugg

SEQ ID NO: 1398560 - RNA, 19 nt, Homo sapiens
  misc_RNA (1)...(19): siRNA sense strand
gacaaggcaucaccaaauc

SEQ ID NO: 1398561 - RNA, 19 nt, Homo sapiens
  misc_RNA (1)...(19): siRNA sense strand
gcauuggccuuaugaugga

SEQ ID NO: 1398562 - RNA, 19 nt, Homo sapiens
  misc_RNA (1)...(19): siRNA sense strand
ggacauuugcauccagaua

SEQ ID NO: 1398563 - RNA, 19 nt, Homo sapiens
  misc_RNA (1)...(19): siRNA sense strand
gaauacaacacacacaaug

SEQ ID NO: 1398564 - RNA, 19 nt, Homo sapiens
  misc_RNA (1)...(19): siRNA sense strand
gcacaacaggguucuauca

SEQ ID NO: 1398565 - RNA, 19 nt, Homo sapiens
  misc_RNA (1)...(19): siRNA sense strand
gcacuaaaccucaucaacu

SEQ ID NO: 1398566 - RNA, 19 nt, Homo sapiens
  misc_RNA (1)...(19): siRNA sense strand
gcugacggcuuccacaguu

SEQ ID NO: 1398567 - RNA, 19 nt, Homo sapiens
  misc_RNA (1)...(19): siRNA sense strand
acacaucuguucuucaaug

SEQ ID NO: 1398568 - RNA, 19 nt, Homo sapiens
  misc_RNA (1)...(19): siRNA sense strand
gaucggugaugguguggaa

SEQ ID NO: 1398569 - RNA, 19 nt, Homo sapiens
  misc_RNA (1)...(19): siRNA sense strand
cccuggagcuggaguauuu

SEQ ID NO: 1398570 - RNA, 19 nt, Homo sapiens
  misc_RNA (1)...(19): siRNA sense strand
gacaauggccaagauuuaa

SEQ ID NO: 1398571 - RNA, 19 nt, Homo sapiens
  misc_RNA (1)...(19): siRNA sense strand
gcgauugucuggauaaacu

SEQ ID NO: 1398572 - RNA, 19 nt, Homo sapiens
  misc_RNA (1)...(19): siRNA sense strand
auacacaucuguucuucaa

SEQ ID NO: 1398573 - RNA, 19 nt, Homo sapiens
  misc_RNA (1)...(19): siRNA sense strand
ucacccagccucacuguaa

SEQ ID NO: 1398574 - RNA, 19 nt, Homo sapiens
  misc_RNA (1)...(19): siRNA sense strand
ggucuguguuuccuauuga

SEQ ID NO: 1398575 - RNA, 19 nt, Homo sapiens
  misc_RNA (1)...(19): siRNA sense strand
gccaagauuuaagcacaua

SEQ ID NO: 1398576 - RNA, 19 nt, Homo sapiens
  misc_RNA (1)...(19): siRNA sense strand
caaccagaguuccgaguca

SEQ ID NO: 1398577 - RNA, 19 nt, Homo sapiens
  misc_RNA (1)...(19): siRNA sense strand
uacaauaccuacaagaaca

SEQ ID NO: 1398578 - RNA, 19 nt, Homo sapiens
  misc_RNA (1)...(19): siRNA sense strand
gugaaggagauguacaaua

SEQ ID NO: 1398579 - RNA, 19 nt, Homo sapiens
  misc_RNA (1)...(19): siRNA sense strand
gcacaagccuauggaaucc

SEQ ID NO: 1398580 - RNA, 19 nt, Homo sapiens
  misc_RNA (1)...(19): siRNA sense strand
cgaaagagggagacacaga

SEQ ID NO: 1398581 - RNA, 19 nt, Homo sapiens
  misc_RNA (1)...(19): siRNA sense strand
agacaaggcaucaccaaau

SEQ ID NO: 1398582 - RNA, 19 nt, Homo sapiens
  misc_RNA (1)...(19): siRNA sense strand
gccaaaguccugcuauaug

SEQ ID NO: 1398583 - RNA, 19 nt, Homo sapiens
  misc_RNA (1)...(19): siRNA sense strand
ggagugugcaccaggacua

SEQ ID NO: 1398584 - RNA, 19 nt, Homo sapiens
  misc_RNA (1)...(19): siRNA sense strand
ggagcuggaguauuuauag

SEQ ID NO: 1398585 - RNA, 19 nt, Homo sapiens
  misc_RNA (1)...(19): siRNA sense strand
uggccaaaguccugcuaua

SEQ ID NO: 1398586 - RNA, 19 nt, Homo sapiens
  misc_RNA (1)...(19): siRNA sense strand
gcccaacugugucaaugug

SEQ ID NO: 1398587 - RNA, 19 nt, Homo sapiens
  misc_RNA (1)...(19): siRNA sense strand
ggaggauugugaccagauc

SEQ ID NO: 1398588 - RNA, 19 nt, Homo sapiens
  misc_RNA (1)...(19): siRNA sense strand
ggucaccaccacucaacua

SEQ ID NO: 1398589 - RNA, 19 nt, Homo sapiens
  misc_RNA (1)...(19): siRNA sense strand
gugaccagauccacguuga

SEQ ID NO: 1398590 - RNA, 19 nt, Homo sapiens
  misc_RNA (1)...(19): siRNA sense strand
gggucuguguuuccuauug

SEQ ID NO: 1398591 - RNA, 19 nt, Homo sapiens
  misc_RNA (1)...(19): siRNA sense strand
gcugcuguguggacucuga

SEQ ID NO: 1398592 - RNA, 19 nt, Homo sapiens
  misc_RNA (1)...(19): siRNA sense strand
ggccaaaguccugcuauau

SEQ ID NO: 1398593 - RNA, 19 nt, Homo sapiens
  misc_RNA (1)...(19): siRNA sense strand
guacaauaccuacaagaac

SEQ ID NO: 1398594 - RNA, 19 nt, Homo sapiens
  misc_RNA (1)...(19): siRNA sense strand
ggucuaagaggagcaguga

SEQ ID NO: 1398595 - RNA, 19 nt, Homo sapiens
  misc_RNA (1)...(19): siRNA sense strand
gagaggauaaugcagagau

SEQ ID NO: 1398596 - RNA, 19 nt, Homo sapiens
  misc_RNA (1)...(19): siRNA sense strand
cacuaaaccucaucaacuc

SEQ ID NO: 1398597 - RNA, 19 nt, Homo sapiens
  misc_RNA (1)...(19): siRNA sense strand
gcgcauuggccuuaugaug

SEQ ID NO: 1398598 - RNA, 19 nt, Homo sapiens
  misc_RNA (1)...(19): siRNA sense strand
acaacaggguucuaucaag

SEQ ID NO: 1398599 - RNA, 19 nt, Homo sapiens
  misc_RNA (1)...(19): siRNA sense strand
agaggauaaugcagagauu

SEQ ID NO: 1398600 - RNA, 19 nt, Homo sapiens
  misc_RNA (1)...(19): siRNA sense strand
gauuuaagcacauacaacu

SEQ ID NO: 1398601 - RNA, 19 nt, Homo sapiens
  misc_RNA (1)...(19): siRNA sense strand
gacagagcccauacaccua

SEQ ID NO: 1398602 - RNA, 19 nt, Homo sapiens
  misc_RNA (1)...(19): siRNA sense strand
cacccagccucacuguaaa

SEQ ID NO: 1398603 - RNA, 19 nt, Homo sapiens
  misc_RNA (1)...(19): siRNA sense strand
gaugacaauggccaagauu

SEQ ID NO: 1398604 - RNA, 19 nt, Homo sapiens
  misc_RNA (1)...(19): siRNA sense strand
gaccagauccacguugaug

SEQ ID NO: 1398605 - RNA, 19 nt, Homo sapiens
  misc_RNA (1)...(19): siRNA sense strand
cacaucuguucuucaauga

SEQ ID NO: 1398606 - RNA, 19 nt, Homo sapiens
  misc_RNA (1)...(19): siRNA sense strand
guugauaggcacucccaaa

SEQ ID NO: 1398607 - RNA, 19 nt, Homo sapiens
  misc_RNA (1)...(19): siRNA sense strand
gugaauacaacacacacaa

SEQ ID NO: 1398608 - RNA, 19 nt, Homo sapiens
  misc_RNA (1)...(19): siRNA sense strand
ccacuggacagagcccaua

SEQ ID NO: 1398609 - RNA, 19 nt, Homo sapiens
  misc_RNA (1)...(19): siRNA sense strand
gcagagauucggcagaaaa

SEQ ID NO: 1398610 - RNA, 19 nt, Homo sapiens
  misc_RNA (1)...(19): siRNA sense strand
uuacccaccuccagcacaa

SEQ ID NO: 1398611 - RNA, 19 nt, Homo sapiens
  misc_RNA (1)...(19): siRNA sense strand
gcccauacaccuaccagau

SEQ ID NO: 1398612 - RNA, 19 nt, Homo sapiens
  misc_RNA (1)...(19): siRNA sense strand
cagcgauugucuggauaaa

SEQ ID NO: 1398613 - RNA, 19 nt, Homo sapiens
  misc_RNA (1)...(19): siRNA sense strand
ugaaggcacuaaaccucau

SEQ ID NO: 1398614 - RNA, 19 nt, Homo sapiens
  misc_RNA (1)...(19): siRNA sense strand
gauaggcacucccaaaagg

SEQ ID NO: 1398615 - RNA, 19 nt, Homo sapiens
  misc_RNA (1)...(19): siRNA sense strand
ggccaagauuuaagcacau

SEQ ID NO: 1398616 - RNA, 19 nt, Homo sapiens
  misc_RNA (1)...(19): siRNA sense strand
augcagagauucggcagaa

SEQ ID NO: 1398617 - RNA, 19 nt, Homo sapiens
  misc_RNA (1)...(19): siRNA sense strand
caaccaagacagggaagga

SEQ ID NO: 1398618 - RNA, 19 nt, Homo sapiens
  misc_RNA (1)...(19): siRNA sense strand
uauuacggcucauccuaca

SEQ ID NO: 1398619 - RNA, 19 nt, Homo sapiens
  misc_RNA (1)...(19): siRNA sense strand
gagcugcuucgagaggaua

SEQ ID NO: 1398620 - RNA, 19 nt, Homo sapiens
  misc_RNA (1)...(19): siRNA sense strand
cagcucuucuccagaucuu

SEQ ID NO: 1398621 - RNA, 19 nt, Homo sapiens
  misc_RNA (1)...(19): siRNA sense strand
cagacaaggcaucaccaaa

SEQ ID NO: 1398622 - RNA, 19 nt, Homo sapiens
  misc_RNA (1)...(19): siRNA sense strand
ucccagcucuucuccagau

SEQ ID NO: 1398623 - RNA, 19 nt, Homo sapiens
  misc_RNA (1)...(19): siRNA sense strand
gggugaaggagauguacaa

SEQ ID NO: 1398624 - RNA, 19 nt, Homo sapiens
  misc_RNA (1)...(19): siRNA sense strand
ugaauacaacacacacaau

SEQ ID NO: 1398625 - RNA, 19 nt, Homo sapiens
  misc_RNA (1)...(19): siRNA sense strand
cagcacaagccuauggaau

SEQ ID NO: 1398626 - RNA, 19 nt, Homo sapiens
  misc_RNA (1)...(19): siRNA sense strand
gacauuugcauccagauac

SEQ ID NO: 1398627 - RNA, 19 nt, Homo sapiens
  misc_RNA (1)...(19): siRNA sense strand
gaggauaaugcagagauuc

SEQ ID NO: 1398628 - RNA, 19 nt, Homo sapiens
  misc_RNA (1)...(19): siRNA sense strand
caagauuuaagcacauaca

SEQ ID NO: 1398629 - RNA, 19 nt, Homo sapiens
  misc_RNA (1)...(19): siRNA sense strand
agaugacaauggccaagau

SEQ ID NO: 1398630 - RNA, 19 nt, Homo sapiens
  misc_RNA (1)...(19): siRNA sense strand
auacaacacacacaaugga

SEQ ID NO: 1398631 - RNA, 19 nt, Homo sapiens
  misc_RNA (1)...(19): siRNA sense strand
ccagaugcacggcacaaca

SEQ ID NO: 1398632 - RNA, 19 nt, Homo sapiens
  misc_RNA (1)...(19): siRNA sense strand
cacaacaggguucuaucaa

SEQ ID NO: 1398633 - RNA, 19 nt, Homo sapiens
  misc_RNA (1)...(19): siRNA sense strand
gauacacaucuguucuuca

SEQ ID NO: 1398634 - RNA, 19 nt, Homo sapiens
  misc_RNA (1)...(19): siRNA sense strand
cuucaaccuugcagauaca

SEQ ID NO: 1398635 - RNA, 19 nt, Homo sapiens
  misc_RNA (1)...(19): siRNA sense strand
gauugucuggauaaacuga

SEQ ID NO: 1398636 - RNA, 19 nt, Homo sapiens
  misc_RNA (1)...(19): siRNA sense strand
uuuaagcacauacaacuuc

SEQ ID NO: 1398637 - RNA, 19 nt, Homo sapiens
  misc_RNA (1)...(19): siRNA sense strand
caaccuugcagauacacau

SEQ ID NO: 1398638 - RNA, 19 nt, Homo sapiens
  misc_RNA (1)...(19): siRNA sense strand
ggacuuggaugagacaaua

SEQ ID NO: 1398639 - RNA, 19 nt, Homo sapiens
  misc_RNA (1)...(19): siRNA sense strand
ugaaggagauguacaauac

SEQ ID NO: 1398640 - RNA, 19 nt, Homo sapiens
  misc_RNA (1)...(19): siRNA sense strand
gagaacaucuacagugcaa

SEQ ID NO: 1398641 - RNA, 19 nt, Homo sapiens
  misc_RNA (1)...(19): siRNA sense strand
ugacaauggccaagauuua

SEQ ID NO: 1398642 - RNA, 19 nt, Homo sapiens
  misc_RNA (1)...(19): siRNA sense strand
aaacagcgauugucuggau

SEQ ID NO: 1398643 - RNA, 19 nt, Homo sapiens
  misc_RNA (1)...(19): siRNA sense strand
caccaccacucaacuaauu

SEQ ID NO: 1398644 - RNA, 19 nt, Homo sapiens
  misc_RNA (1)...(19): siRNA sense strand
ccaaaguccugcuauaugg

SEQ ID NO: 1398645 - RNA, 19 nt, Homo sapiens
  misc_RNA (1)...(19): siRNA sense strand
gacaaggcaucaccaaauc

SEQ ID NO: 1398646 - RNA, 19 nt, Homo sapiens
  misc_RNA (1)...(19): siRNA sense strand
gcauuggccuuaugaugga

SEQ ID NO: 1398647 - RNA, 19 nt, Homo sapiens
  misc_RNA (1)...(19): siRNA sense strand
ggacauuugcauccagaua

SEQ ID NO: 1398648 - RNA, 19 nt, Homo sapiens
  misc_RNA (1)...(19): siRNA sense strand
gaauacaacacacacaaug

SEQ ID NO: 1398649 - RNA, 19 nt, Homo sapiens
  misc_RNA (1)...(19): siRNA sense strand
gcacaacaggguucuauca

SEQ ID NO: 1398650 - RNA, 19 nt, Homo sapiens
  misc_RNA (1)...(19): siRNA sense strand
gcacuaaaccucaucaacu

SEQ ID NO: 1398651 - RNA, 19 nt, Homo sapiens
  misc_RNA (1)...(19): siRNA sense strand
gcugacggcuuccacaguu

SEQ ID NO: 1398652 - RNA, 19 nt, Homo sapiens
  misc_RNA (1)...(19): siRNA sense strand
acacaucuguucuucaaug

SEQ ID NO: 1398653 - RNA, 19 nt, Homo sapiens
  misc_RNA (1)...(19): siRNA sense strand
gaucggugaugguguggaa

SEQ ID NO: 1398654 - RNA, 19 nt, Homo sapiens
  misc_RNA (1)...(19): siRNA sense strand
cccuggagcuggaguauuu

SEQ ID NO: 1398655 - RNA, 19 nt, Homo sapiens
  misc_RNA (1)...(19): siRNA sense strand
gacaauggccaagauuuaa

SEQ ID NO: 1398656 - RNA, 19 nt, Homo sapiens
  misc_RNA (1)...(19): siRNA sense strand
gcgauugucuggauaaacu

SEQ ID NO: 1398657 - RNA, 19 nt, Homo sapiens
  misc_RNA (1)...(19): siRNA sense strand
auacacaucuguucuucaa

SEQ ID NO: 1398658 - RNA, 19 nt, Homo sapiens
  misc_RNA (1)...(19): siRNA sense strand
ucacccagccucacuguaa

SEQ ID NO: 1398659 - RNA, 19 nt, Homo sapiens
  misc_RNA (1)...(19): siRNA sense strand
ggucuguguuuccuauuga

SEQ ID NO: 1398660 - RNA, 19 nt, Homo sapiens
  misc_RNA (1)...(19): siRNA sense strand
gccaagauuuaagcacaua

SEQ ID NO: 1398661 - RNA, 19 nt, Homo sapiens
  misc_RNA (1)...(19): siRNA sense strand
caaccagaguuccgaguca

SEQ ID NO: 1398662 - RNA, 19 nt, Homo sapiens
  misc_RNA (1)...(19): siRNA sense strand
uacaauaccuacaagaaca

SEQ ID NO: 1398663 - RNA, 19 nt, Homo sapiens
  misc_RNA (1)...(19): siRNA sense strand
gugaaggagauguacaaua

SEQ ID NO: 1398664 - RNA, 19 nt, Homo sapiens
  misc_RNA (1)...(19): siRNA sense strand
gcacaagccuauggaaucc

SEQ ID NO: 1398665 - RNA, 19 nt, Homo sapiens
  misc_RNA (1)...(19): siRNA sense strand
cgaaagagggagacacaga

SEQ ID NO: 1398666 - RNA, 19 nt, Homo sapiens
  misc_RNA (1)...(19): siRNA sense strand
agacaaggcaucaccaaau

SEQ ID NO: 1398667 - RNA, 19 nt, Homo sapiens
  misc_RNA (1)...(19): siRNA sense strand
gccaaaguccugcuauaug

SEQ ID NO: 1398668 - RNA, 19 nt, Homo sapiens
  misc_RNA (1)...(19): siRNA sense strand
ggagugugcaccaggacua

SEQ ID NO: 1398669 - RNA, 19 nt, Homo sapiens
  misc_RNA (1)...(19): siRNA sense strand
ggagcuggaguauuuauag

SEQ ID NO: 1398670 - RNA, 19 nt, Homo sapiens
  misc_RNA (1)...(19): siRNA sense strand
uggccaaaguccugcuaua

SEQ ID NO: 1398671 - RNA, 19 nt, Homo sapiens
  misc_RNA (1)...(19): siRNA sense strand
gcccaacugugucaaugug

SEQ ID NO: 1398672 - RNA, 19 nt, Homo sapiens
  misc_RNA (1)...(19): siRNA sense strand
ggaggauugugaccagauc

SEQ ID NO: 1398673 - RNA, 19 nt, Homo sapiens
  misc_RNA (1)...(19): siRNA sense strand
ggucaccaccacucaacua

SEQ ID NO: 1398674 - RNA, 19 nt, Homo sapiens
  misc_RNA (1)...(19): siRNA sense strand
gugaccagauccacguuga

SEQ ID NO: 1398675 - RNA, 19 nt, Homo sapiens
  misc_RNA (1)...(19): siRNA sense strand
gggucuguguuuccuauug

SEQ ID NO: 1398676 - RNA, 19 nt, Homo sapiens
  misc_RNA (1)...(19): siRNA sense strand
gcugcuguguggacucuga

SEQ ID NO: 1398677 - RNA, 19 nt, Homo sapiens
  misc_RNA (1)...(19): siRNA sense strand
ggccaaaguccugcuauau

SEQ ID NO: 1398678 - RNA, 19 nt, Homo sapiens
  misc_RNA (1)...(19): siRNA sense strand
guacaauaccuacaagaac

SEQ ID NO: 1398679 - RNA, 19 nt, Homo sapiens
  misc_RNA (1)...(19): siRNA sense strand
ggucuaagaggagcaguga

SEQ ID NO: 1398680 - RNA, 19 nt, Homo sapiens
  misc_RNA (1)...(19): siRNA sense strand
gagaggauaaugcagagau

SEQ ID NO: 1398681 - RNA, 19 nt, Homo sapiens
  misc_RNA (1)...(19): siRNA sense strand
cacuaaaccucaucaacuc

SEQ ID NO: 1398682 - RNA, 19 nt, Homo sapiens
  misc_RNA (1)...(19): siRNA sense strand
gcgcauuggccuuaugaug

SEQ ID NO: 1398683 - RNA, 19 nt, Homo sapiens
  misc_RNA (1)...(19): siRNA sense strand
acaacaggguucuaucaag

SEQ ID NO: 1398684 - RNA, 19 nt, Homo sapiens
  misc_RNA (1)...(19): siRNA sense strand
agaggauaaugcagagauu

SEQ ID NO: 1398685 - RNA, 19 nt, Homo sapiens
  misc_RNA (1)...(19): siRNA sense strand
gauuuaagcacauacaacu

SEQ ID NO: 1398686 - RNA, 19 nt, Homo sapiens
  misc_RNA (1)...(19): siRNA sense strand
gacagagcccauacaccua

SEQ ID NO: 1398687 - RNA, 19 nt, Homo sapiens
  misc_RNA (1)...(19): siRNA sense strand
cacccagccucacuguaaa

SEQ ID NO: 1398688 - RNA, 19 nt, Homo sapiens
  misc_RNA (1)...(19): siRNA sense strand
gaugacaauggccaagauu

SEQ ID NO: 1398689 - RNA, 19 nt, Homo sapiens
  misc_RNA (1)...(19): siRNA sense strand
gaccagauccacguugaug

SEQ ID NO: 1398690 - RNA, 19 nt, Homo sapiens
  misc_RNA (1)...(19): siRNA sense strand
cacaucuguucuucaauga

SEQ ID NO: 1398691 - RNA, 19 nt, Homo sapiens
  misc_RNA (1)...(19): siRNA sense strand
guugauaggcacucccaaa

SEQ ID NO: 1398692 - RNA, 19 nt, Homo sapiens
  misc_RNA (1)...(19): siRNA sense strand
gugaauacaacacacacaa

SEQ ID NO: 1398693 - RNA, 19 nt, Homo sapiens
  misc_RNA (1)...(19): siRNA sense strand
ccacuggacagagcccaua

SEQ ID NO: 1398694 - RNA, 19 nt, Homo sapiens
  misc_RNA (1)...(19): siRNA sense strand
gcagagauucggcagaaaa

SEQ ID NO: 1398695 - RNA, 19 nt, Homo sapiens
  misc_RNA (1)...(19): siRNA sense strand
uuacccaccuccagcacaa

SEQ ID NO: 1398696 - RNA, 19 nt, Homo sapiens
  misc_RNA (1)...(19): siRNA sense strand
gcccauacaccuaccagau

SEQ ID NO: 1398697 - RNA, 19 nt, Homo sapiens
  misc_RNA (1)...(19): siRNA sense strand
cagcgauugucuggauaaa

SEQ ID NO: 1398698 - RNA, 19 nt, Homo sapiens
  misc_RNA (1)...(19): siRNA sense strand
ugaaggcacuaaaccucau

SEQ ID NO: 1398699 - RNA, 19 nt, Homo sapiens
  misc_RNA (1)...(19): siRNA sense strand
gauaggcacucccaaaagg

SEQ ID NO: 1398700 - RNA, 19 nt, Homo sapiens
  misc_RNA (1)...(19): siRNA sense strand
ggccaagauuuaagcacau

SEQ ID NO: 1398701 - RNA, 19 nt, Homo sapiens
  misc_RNA (1)...(19): siRNA sense strand
augcagagauucggcagaa

SEQ ID NO: 1398702 - RNA, 19 nt, Homo sapiens
  misc_RNA (1)...(19): siRNA sense strand
caaccaagacagggaagga

SEQ ID NO: 1398703 - RNA, 19 nt, Homo sapiens
  misc_RNA (1)...(19): siRNA sense strand
uauuacggcucauccuaca

SEQ ID NO: 1398704 - RNA, 19 nt, Homo sapiens
  misc_RNA (1)...(19): siRNA sense strand
gagcugcuucgagaggaua

SEQ ID NO: 1398705 - RNA, 19 nt, Homo sapiens
  misc_RNA (1)...(19): siRNA sense strand
cagcucuucuccagaucuu

SEQ ID NO: 1398706 - RNA, 19 nt, Homo sapiens
  misc_RNA (1)...(19): siRNA sense strand
cagacaaggcaucaccaaa

SEQ ID NO: 1398707 - RNA, 19 nt, Homo sapiens
  misc_RNA (1)...(19): siRNA sense strand
ucccagcucuucuccagau

SEQ ID NO: 1398708 - RNA, 19 nt, Homo sapiens
  misc_RNA (1)...(19): siRNA sense strand
gggugaaggagauguacaa

SEQ ID NO: 1398709 - RNA, 19 nt, Homo sapiens
  misc_RNA (1)...(19): siRNA sense strand
ugaauacaacacacacaau

SEQ ID NO: 1398710 - RNA, 19 nt, Homo sapiens
  misc_RNA (1)...(19): siRNA sense strand
cagcacaagccuauggaau

SEQ ID NO: 1398711 - RNA, 19 nt, Homo sapiens
  misc_RNA (1)...(19): siRNA sense strand
gacauuugcauccagauac

SEQ ID NO: 1398712 - RNA, 19 nt, Homo sapiens
  misc_RNA (1)...(19): siRNA sense strand
gaggauaaugcagagauuc

SEQ ID NO: 1398713 - RNA, 19 nt, Homo sapiens
  misc_RNA (1)...(19): siRNA sense strand
caagauuuaagcacauaca

SEQ ID NO: 1398714 - RNA, 19 nt, Homo sapiens
  misc_RNA (1)...(19): siRNA sense strand
agaugacaauggccaagau

SEQ ID NO: 1398715 - RNA, 19 nt, Homo sapiens
  misc_RNA (1)...(19): siRNA sense strand
auacaacacacacaaugga

SEQ ID NO: 1398716 - RNA, 19 nt, Homo sapiens
  misc_RNA (1)...(19): siRNA sense strand
ccagaugcacggcacaaca

SEQ ID NO: 1398717 - RNA, 19 nt, Homo sapiens
  misc_RNA (1)...(19): siRNA sense strand
cacaacaggguucuaucaa

SEQ ID NO: 1398718 - RNA, 19 nt, Homo sapiens
  misc_RNA (1)...(19): siRNA sense strand
gauacacaucuguucuuca

SEQ ID NO: 1398719 - RNA, 19 nt, Homo sapiens
  misc_RNA (1)...(19): siRNA sense strand
cuucaaccuugcagauaca

SEQ ID NO: 1398720 - RNA, 19 nt, Homo sapiens
  misc_RNA (1)...(19): siRNA sense strand
gauugucuggauaaacuga

SEQ ID NO: 1398721 - RNA, 19 nt, Homo sapiens
  misc_RNA (1)...(19): siRNA sense strand
uuuaagcacauacaacuuc

SEQ ID NO: 1398722 - RNA, 19 nt, Homo sapiens
  misc_RNA (1)...(19): siRNA sense strand
caaccuugcagauacacau

SEQ ID NO: 1398723 - RNA, 19 nt, Homo sapiens
  misc_RNA (1)...(19): siRNA sense strand
ggacuuggaugagacaaua

SEQ ID NO: 1398724 - RNA, 19 nt, Homo sapiens
  misc_RNA (1)...(19): siRNA sense strand
ugaaggagauguacaauac

SEQ ID NO: 1398725 - RNA, 19 nt, Homo sapiens
  misc_RNA (1)...(19): siRNA sense strand
gagaacaucuacagugcaa

SEQ ID NO: 1398726 - RNA, 19 nt, Homo sapiens
  misc_RNA (1)...(19): siRNA sense strand
ugacaauggccaagauuua

SEQ ID NO: 1398727 - RNA, 19 nt, Homo sapiens
  misc_RNA (1)...(19): siRNA sense strand
aaacagcgauugucuggau

SEQ ID NO: 1398728 - RNA, 19 nt, Homo sapiens
  misc_RNA (1)...(19): siRNA sense strand
caccaccacucaacuaauu

SEQ ID NO: 1398729 - RNA, 19 nt, Homo sapiens
  misc_RNA (1)...(19): siRNA sense strand
ccaaaguccugcuauaugg

SEQ ID NO: 1398730 - RNA, 19 nt, Homo sapiens
  misc_RNA (1)...(19): siRNA sense strand
gacaaggcaucaccaaauc

SEQ ID NO: 1398731 - RNA, 19 nt, Homo sapiens
  misc_RNA (1)...(19): siRNA sense strand
gcauuggccuuaugaugga

SEQ ID NO: 1398732 - RNA, 19 nt, Homo sapiens
  misc_RNA (1)...(19): siRNA sense strand
ggacauuugcauccagaua

SEQ ID NO: 1398733 - RNA, 19 nt, Homo sapiens
  misc_RNA (1)...(19): siRNA sense strand
gaauacaacacacacaaug

SEQ ID NO: 1398734 - RNA, 19 nt, Homo sapiens
  misc_RNA (1)...(19): siRNA sense strand
gcacaacaggguucuauca

SEQ ID NO: 1398735 - RNA, 19 nt, Homo sapiens
  misc_RNA (1)...(19): siRNA sense strand
gcacuaaaccucaucaacu

SEQ ID NO: 1398736 - RNA, 19 nt, Homo sapiens
  misc_RNA (1)...(19): siRNA sense strand
gcugacggcuuccacaguu

SEQ ID NO: 1398737 - RNA, 19 nt, Homo sapiens
  misc_RNA (1)...(19): siRNA sense strand
acacaucuguucuucaaug

SEQ ID NO: 1398738 - RNA, 19 nt, Homo sapiens
  misc_RNA (1)...(19): siRNA sense strand
gaucggugaugguguggaa

SEQ ID NO: 1398739 - RNA, 19 nt, Homo sapiens
  misc_RNA (1)...(19): siRNA sense strand
cccuggagcuggaguauuu

SEQ ID NO: 1398740 - RNA, 19 nt, Homo sapiens
  misc_RNA (1)...(19): siRNA sense strand
gacaauggccaagauuuaa

SEQ ID NO: 1398741 - RNA, 19 nt, Homo sapiens
  misc_RNA (1)...(19): siRNA sense strand
gcgauugucuggauaaacu

SEQ ID NO: 1398742 - RNA, 19 nt, Homo sapiens
  misc_RNA (1)...(19): siRNA sense strand
auacacaucuguucuucaa

SEQ ID NO: 1398743 - RNA, 19 nt, Homo sapiens
  misc_RNA (1)...(19): siRNA sense strand
ucacccagccucacuguaa

SEQ ID NO: 1398744 - RNA, 19 nt, Homo sapiens
  misc_RNA (1)...(19): siRNA sense strand
ggucuguguuuccuauuga

SEQ ID NO: 1398745 - RNA, 19 nt, Homo sapiens
  misc_RNA (1)...(19): siRNA sense strand
gccaagauuuaagcacaua

SEQ ID NO: 1398746 - RNA, 19 nt, Homo sapiens
  misc_RNA (1)...(19): siRNA sense strand
caaccagaguuccgaguca

SEQ ID NO: 1398747 - RNA, 19 nt, Homo sapiens
  misc_RNA (1)...(19): siRNA sense strand
uacaauaccuacaagaaca

SEQ ID NO: 1398748 - RNA, 19 nt, Homo sapiens
  misc_RNA (1)...(19): siRNA sense strand
gugaaggagauguacaaua

SEQ ID NO: 1398749 - RNA, 19 nt, Homo sapiens
  misc_RNA (1)...(19): siRNA sense strand
gcacaagccuauggaaucc

SEQ ID NO: 1398750 - RNA, 19 nt, Homo sapiens
  misc_RNA (1)...(19): siRNA sense strand
cgaaagagggagacacaga

SEQ ID NO: 1398751 - RNA, 19 nt, Homo sapiens
  misc_RNA (1)...(19): siRNA sense strand
agacaaggcaucaccaaau

SEQ ID NO: 1398752 - RNA, 19 nt, Homo sapiens
  misc_RNA (1)...(19): siRNA sense strand
gccaaaguccugcuauaug

SEQ ID NO: 1398753 - RNA, 19 nt, Homo sapiens
  misc_RNA (1)...(19): siRNA sense strand
ggagugugcaccaggacua

SEQ ID NO: 1398754 - RNA, 19 nt, Homo sapiens
  misc_RNA (1)...(19): siRNA sense strand
ggagcuggaguauuuauag

SEQ ID NO: 1398755 - RNA, 19 nt, Homo sapiens
  misc_RNA (1)...(19): siRNA sense strand
uggccaaaguccugcuaua

SEQ ID NO: 1398756 - RNA, 19 nt, Homo sapiens
  misc_RNA (1)...(19): siRNA sense strand
gcccaacugugucaaugug

SEQ ID NO: 1398757 - RNA, 19 nt, Homo sapiens
  misc_RNA (1)...(19): siRNA sense strand
ggaggauugugaccagauc

SEQ ID NO: 1398758 - RNA, 19 nt, Homo sapiens
  misc_RNA (1)...(19): siRNA sense strand
ggucaccaccacucaacua

SEQ ID NO: 1398759 - RNA, 19 nt, Homo sapiens
  misc_RNA (1)...(19): siRNA sense strand
gugaccagauccacguuga

SEQ ID NO: 1398760 - RNA, 19 nt, Homo sapiens
  misc_RNA (1)...(19): siRNA sense strand
gggucuguguuuccuauug

SEQ ID NO: 1398761 - RNA, 19 nt, Homo sapiens
  misc_RNA (1)...(19): siRNA sense strand
gcugcuguguggacucuga

SEQ ID NO: 1398762 - RNA, 19 nt, Homo sapiens
  misc_RNA (1)...(19): siRNA sense strand
ggccaaaguccugcuauau

SEQ ID NO: 1398763 - RNA, 19 nt, Homo sapiens
  misc_RNA (1)...(19): siRNA sense strand
guacaauaccuacaagaac

SEQ ID NO: 1398764 - RNA, 19 nt, Homo sapiens
  misc_RNA (1)...(19): siRNA sense strand
ggucuaagaggagcaguga

SEQ ID NO: 1398765 - RNA, 19 nt, Homo sapiens
  misc_RNA (1)...(19): siRNA sense strand
gagaggauaaugcagagau

SEQ ID NO: 1398766 - RNA, 19 nt, Homo sapiens
  misc_RNA (1)...(19): siRNA sense strand
cacuaaaccucaucaacuc

SEQ ID NO: 1398767 - RNA, 19 nt, Homo sapiens
  misc_RNA (1)...(19): siRNA sense strand
gcgcauuggccuuaugaug

SEQ ID NO: 1398768 - RNA, 19 nt, Homo sapiens
  misc_RNA (1)...(19): siRNA sense strand
acaacaggguucuaucaag

SEQ ID NO: 1398769 - RNA, 19 nt, Homo sapiens
  misc_RNA (1)...(19): siRNA sense strand
agaggauaaugcagagauu

SEQ ID NO: 1398770 - RNA, 19 nt, Homo sapiens
  misc_RNA (1)...(19): siRNA sense strand
gauuuaagcacauacaacu

SEQ ID NO: 1398771 - RNA, 19 nt, Homo sapiens
  misc_RNA (1)...(19): siRNA sense strand
gacagagcccauacaccua

SEQ ID NO: 1398772 - RNA, 19 nt, Homo sapiens
  misc_RNA (1)...(19): siRNA sense strand
cacccagccucacuguaaa

SEQ ID NO: 1398773 - RNA, 19 nt, Homo sapiens
  misc_RNA (1)...(19): siRNA sense strand
gaugacaauggccaagauu

SEQ ID NO: 1398774 - RNA, 19 nt, Homo sapiens
  misc_RNA (1)...(19): siRNA sense strand
gaccagauccacguugaug

SEQ ID NO: 1398775 - RNA, 19 nt, Homo sapiens
  misc_RNA (1)...(19): siRNA sense strand
cacaucuguucuucaauga

SEQ ID NO: 1398776 - RNA, 19 nt, Homo sapiens
  misc_RNA (1)...(19): siRNA sense strand
guugauaggcacucccaaa

SEQ ID NO: 1398777 - RNA, 19 nt, Homo sapiens
  misc_RNA (1)...(19): siRNA sense strand
gugaauacaacacacacaa

SEQ ID NO: 1398778 - RNA, 19 nt, Homo sapiens
  misc_RNA (1)...(19): siRNA sense strand
ccacuggacagagcccaua

SEQ ID NO: 1398779 - RNA, 19 nt, Homo sapiens
  misc_RNA (1)...(19): siRNA sense strand
gcagagauucggcagaaaa

SEQ ID NO: 1398780 - RNA, 19 nt, Homo sapiens
  misc_RNA (1)...(19): siRNA sense strand
uuacccaccuccagcacaa

SEQ ID NO: 1398781 - RNA, 19 nt, Homo sapiens
  misc_RNA (1)...(19): siRNA sense strand
gcccauacaccuaccagau

SEQ ID NO: 1398782 - RNA, 19 nt, Homo sapiens
  misc_RNA (1)...(19): siRNA sense strand
cagcgauugucuggauaaa

SEQ ID NO: 1398783 - RNA, 19 nt, Homo sapiens
  misc_RNA (1)...(19): siRNA sense strand
ugaaggcacuaaaccucau

SEQ ID NO: 1398784 - RNA, 19 nt, Homo sapiens
  misc_RNA (1)...(19): siRNA sense strand
gauaggcacucccaaaagg

SEQ ID NO: 1398785 - RNA, 19 nt, Homo sapiens
  misc_RNA (1)...(19): siRNA sense strand
ggccaagauuuaagcacau

SEQ ID NO: 1398786 - RNA, 19 nt, Homo sapiens
  misc_RNA (1)...(19): siRNA sense strand
augcagagauucggcagaa

SEQ ID NO: 1398787 - RNA, 19 nt, Homo sapiens
  misc_RNA (1)...(19): siRNA sense strand
caaccaagacagggaagga

SEQ ID NO: 1398788 - RNA, 19 nt, Homo sapiens
  misc_RNA (1)...(19): siRNA sense strand
uauuacggcucauccuaca

SEQ ID NO: 1398789 - RNA, 19 nt, Homo sapiens
  misc_RNA (1)...(19): siRNA sense strand
gagcugcuucgagaggaua

SEQ ID NO: 1398790 - RNA, 19 nt, Homo sapiens
  misc_RNA (1)...(19): siRNA sense strand
cagcucuucuccagaucuu

SEQ ID NO: 1398791 - RNA, 19 nt, Homo sapiens
  misc_RNA (1)...(19): siRNA sense strand
cagacaaggcaucaccaaa

SEQ ID NO: 1398792 - RNA, 19 nt, Homo sapiens
  misc_RNA (1)...(19): siRNA sense strand
ucccagcucuucuccagau

SEQ ID NO: 1398793 - RNA, 19 nt, Homo sapiens
  misc_RNA (1)...(19): siRNA sense strand
gggugaaggagauguacaa

SEQ ID NO: 1398794 - RNA, 19 nt, Homo sapiens
  misc_RNA (1)...(19): siRNA sense strand
ugaauacaacacacacaau

SEQ ID NO: 1398795 - RNA, 19 nt, Homo sapiens
  misc_RNA (1)...(19): siRNA sense strand
cagcacaagccuauggaau

SEQ ID NO: 1398796 - RNA, 19 nt, Homo sapiens
  misc_RNA (1)...(19): siRNA sense strand
gacauuugcauccagauac

SEQ ID NO: 1398797 - RNA, 19 nt, Homo sapiens
  misc_RNA (1)...(19): siRNA sense strand
gaggauaaugcagagauuc

SEQ ID NO: 1398798 - RNA, 19 nt, Homo sapiens
  misc_RNA (1)...(19): siRNA sense strand
caagauuuaagcacauaca

SEQ ID NO: 1398799 - RNA, 19 nt, Homo sapiens
  misc_RNA (1)...(19): siRNA sense strand
agaugacaauggccaagau

SEQ ID NO: 1398800 - RNA, 19 nt, Homo sapiens
  misc_RNA (1)...(19): siRNA sense strand
auacaacacacacaaugga

SEQ ID NO: 1398801 - RNA, 19 nt, Homo sapiens
  misc_RNA (1)...(19): siRNA sense strand
ccagaugcacggcacaaca

SEQ ID NO: 1398802 - RNA, 19 nt, Homo sapiens
  misc_RNA (1)...(19): siRNA sense strand
cacaacaggguucuaucaa

SEQ ID NO: 1398803 - RNA, 19 nt, Homo sapiens
  misc_RNA (1)...(19): siRNA sense strand
gauacacaucuguucuuca

SEQ ID NO: 1398804 - RNA, 19 nt, Homo sapiens
  misc_RNA (1)...(19): siRNA sense strand
cuucaaccuugcagauaca

SEQ ID NO: 1398805 - RNA, 19 nt, Homo sapiens
  misc_RNA (1)...(19): siRNA sense strand
gauugucuggauaaacuga

SEQ ID NO: 1398806 - RNA, 19 nt, Homo sapiens
  misc_RNA (1)...(19): siRNA sense strand
uuuaagcacauacaacuuc

SEQ ID NO: 1398807 - RNA, 19 nt, Homo sapiens
  misc_RNA (1)...(19): siRNA sense strand
caaccuugcagauacacau

SEQ ID NO: 1398808 - RNA, 19 nt, Homo sapiens
  misc_RNA (1)...(19): siRNA sense strand
ggacuuggaugagacaaua

SEQ ID NO: 1398809 - RNA, 19 nt, Homo sapiens
  misc_RNA (1)...(19): siRNA sense strand
ugaaggagauguacaauac

SEQ ID NO: 1398810 - RNA, 19 nt, Homo sapiens
  misc_RNA (1)...(19): siRNA sense strand
gagaacaucuacagugcaa

SEQ ID NO: 1398811 - RNA, 19 nt, Homo sapiens
  misc_RNA (1)...(19): siRNA sense strand
ugacaauggccaagauuua

SEQ ID NO: 1398812 - RNA, 19 nt, Homo sapiens
  misc_RNA (1)...(19): siRNA sense strand
aaacagcgauugucuggau

SEQ ID NO: 1398813 - RNA, 19 nt, Homo sapiens
  misc_RNA (1)...(19): siRNA sense strand
caccaccacucaacuaauu

SEQ ID NO: 1398814 - RNA, 19 nt, Homo sapiens
  misc_RNA (1)...(19): siRNA sense strand
ccaaaguccugcuauaugg

SEQ ID NO: 1398815 - RNA, 19 nt, Homo sapiens
  misc_RNA (1)...(19): siRNA sense strand
gacaaggcaucaccaaauc

SEQ ID NO: 1398816 - RNA, 19 nt, Homo sapiens
  misc_RNA (1)...(19): siRNA sense strand
gcauuggccuuaugaugga

SEQ ID NO: 1398817 - RNA, 19 nt, Homo sapiens
  misc_RNA (1)...(19): siRNA sense strand
ggacauuugcauccagaua

SEQ ID NO: 1398818 - RNA, 19 nt, Homo sapiens
  misc_RNA (1)...(19): siRNA sense strand
gaauacaacacacacaaug

SEQ ID NO: 1398819 - RNA, 19 nt, Homo sapiens
  misc_RNA (1)...(19): siRNA sense strand
gcacaacaggguucuauca

SEQ ID NO: 1398820 - RNA, 19 nt, Homo sapiens
  misc_RNA (1)...(19): siRNA sense strand
gcacuaaaccucaucaacu

SEQ ID NO: 1398821 - RNA, 19 nt, Homo sapiens
  misc_RNA (1)...(19): siRNA sense strand
gcugacggcuuccacaguu

SEQ ID NO: 1398822 - RNA, 19 nt, Homo sapiens
  misc_RNA (1)...(19): siRNA sense strand
acacaucuguucuucaaug

SEQ ID NO: 1398823 - RNA, 19 nt, Homo sapiens
  misc_RNA (1)...(19): siRNA sense strand
gaaaugguagaacuaguga

SEQ ID NO: 1398824 - RNA, 19 nt, Homo sapiens
  misc_RNA (1)...(19): siRNA sense strand
cccuggagcuggaguauuu

SEQ ID NO: 1398825 - RNA, 19 nt, Homo sapiens
  misc_RNA (1)...(19): siRNA sense strand
gaucggugaugguguggaa

SEQ ID NO: 1398826 - RNA, 19 nt, Homo sapiens
  misc_RNA (1)...(19): siRNA sense strand
gacaauggccaagauuuaa

SEQ ID NO: 1398827 - RNA, 19 nt, Homo sapiens
  misc_RNA (1)...(19): siRNA sense strand
gcgauugucuggauaaacu

SEQ ID NO: 1398828 - RNA, 19 nt, Homo sapiens
  misc_RNA (1)...(19): siRNA sense strand
ggaaaugguagaacuagug

SEQ ID NO: 1398829 - RNA, 19 nt, Homo sapiens
  misc_RNA (1)...(19): siRNA sense strand
auacacaucuguucuucaa

SEQ ID NO: 1398830 - RNA, 19 nt, Homo sapiens
  misc_RNA (1)...(19): siRNA sense strand
ucacccagccucacuguaa

SEQ ID NO: 1398831 - RNA, 19 nt, Homo sapiens
  misc_RNA (1)...(19): siRNA sense strand
ggucuguguuuccuauuga

SEQ ID NO: 1398832 - RNA, 19 nt, Homo sapiens
  misc_RNA (1)...(19): siRNA sense strand
gccaagauuuaagcacaua

SEQ ID NO: 1398833 - RNA, 19 nt, Homo sapiens
  misc_RNA (1)...(19): siRNA sense strand
caaccagaguuccgaguca

SEQ ID NO: 1398834 - RNA, 19 nt, Homo sapiens
  misc_RNA (1)...(19): siRNA sense strand
uacaauaccuacaagaaca

SEQ ID NO: 1398835 - RNA, 19 nt, Homo sapiens
  misc_RNA (1)...(19): siRNA sense strand
caaggaaaugguagaacua

SEQ ID NO: 1398836 - RNA, 19 nt, Homo sapiens
  misc_RNA (1)...(19): siRNA sense strand
gugaaggagauguacaaua

SEQ ID NO: 1398837 - RNA, 19 nt, Homo sapiens
  misc_RNA (1)...(19): siRNA sense strand
gcacaagccuauggaaucc

SEQ ID NO: 1398838 - RNA, 19 nt, Homo sapiens
  misc_RNA (1)...(19): siRNA sense strand
cgaaagagggagacacaga

SEQ ID NO: 1398839 - RNA, 19 nt, Homo sapiens
  misc_RNA (1)...(19): siRNA sense strand
agacaaggcaucaccaaau

SEQ ID NO: 1398840 - RNA, 19 nt, Homo sapiens
  misc_RNA (1)...(19): siRNA sense strand
gccaaaguccugcuauaug

SEQ ID NO: 1398841 - RNA, 19 nt, Homo sapiens
  misc_RNA (1)...(19): siRNA sense strand
ggagugugcaccaggacua

SEQ ID NO: 1398842 - RNA, 19 nt, Homo sapiens
  misc_RNA (1)...(19): siRNA sense strand
ggagcuggaguauuuauag

SEQ ID NO: 1398843 - RNA, 19 nt, Homo sapiens
  misc_RNA (1)...(19): siRNA sense strand
uggccaaaguccugcuaua

SEQ ID NO: 1398844 - RNA, 19 nt, Homo sapiens
  misc_RNA (1)...(19): siRNA sense strand
gcccaacugugucaaugug

SEQ ID NO: 1398845 - RNA, 19 nt, Homo sapiens
  misc_RNA (1)...(19): siRNA sense strand
ggaggauugugaccagauc

SEQ ID NO: 1398846 - RNA, 19 nt, Homo sapiens
  misc_RNA (1)...(19): siRNA sense strand
acaaggaaaugguagaacu

SEQ ID NO: 1398847 - RNA, 19 nt, Homo sapiens
  misc_RNA (1)...(19): siRNA sense strand
ggucaccaccacucaacua

SEQ ID NO: 1398848 - RNA, 19 nt, Homo sapiens
  misc_RNA (1)...(19): siRNA sense strand
gugaccagauccacguuga

SEQ ID NO: 1398849 - RNA, 19 nt, Homo sapiens
  misc_RNA (1)...(19): siRNA sense strand
guacaaggaaaugguagaa

SEQ ID NO: 1398850 - RNA, 19 nt, Homo sapiens
  misc_RNA (1)...(19): siRNA sense strand
gggucuguguuuccuauug

SEQ ID NO: 1398851 - RNA, 19 nt, Homo sapiens
  misc_RNA (1)...(19): siRNA sense strand
guacaauaccuacaagaac

SEQ ID NO: 1398852 - RNA, 19 nt, Homo sapiens
  misc_RNA (1)...(19): siRNA sense strand
ggccaaaguccugcuauau

SEQ ID NO: 1398853 - RNA, 19 nt, Homo sapiens
  misc_RNA (1)...(19): siRNA sense strand
gcugcuguguggacucuga

SEQ ID NO: 1398854 - RNA, 19 nt, Homo sapiens
  misc_RNA (1)...(19): siRNA sense strand
ggucuaagaggagcaguga

SEQ ID NO: 1398855 - RNA, 19 nt, Homo sapiens
  misc_RNA (1)...(19): siRNA sense strand
gagaggauaaugcagagau

SEQ ID NO: 1398856 - RNA, 19 nt, Homo sapiens
  misc_RNA (1)...(19): siRNA sense strand
cacuaaaccucaucaacuc

SEQ ID NO: 1398857 - RNA, 19 nt, Homo sapiens
  misc_RNA (1)...(19): siRNA sense strand
gcgcauuggccuuaugaug

SEQ ID NO: 1398858 - RNA, 19 nt, Homo sapiens
  misc_RNA (1)...(19): siRNA sense strand
acaacaggguucuaucaag

SEQ ID NO: 1398859 - RNA, 19 nt, Homo sapiens
  misc_RNA (1)...(19): siRNA sense strand
agaggauaaugcagagauu

SEQ ID NO: 1398860 - RNA, 19 nt, Homo sapiens
  misc_RNA (1)...(19): siRNA sense strand
gauuuaagcacauacaacu

SEQ ID NO: 1398861 - RNA, 19 nt, Homo sapiens
  misc_RNA (1)...(19): siRNA sense strand
gacagagcccauacaccua

SEQ ID NO: 1398862 - RNA, 19 nt, Homo sapiens
  misc_RNA (1)...(19): siRNA sense strand
cacccagccucacuguaaa

SEQ ID NO: 1398863 - RNA, 19 nt, Homo sapiens
  misc_RNA (1)...(19): siRNA sense strand
gaugacaauggccaagauu

SEQ ID NO: 1398864 - RNA, 19 nt, Homo sapiens
  misc_RNA (1)...(19): siRNA sense strand
gaccagauccacguugaug

SEQ ID NO: 1398865 - RNA, 19 nt, Homo sapiens
  misc_RNA (1)...(19): siRNA sense strand
cacaucuguucuucaauga

SEQ ID NO: 1398866 - RNA, 19 nt, Homo sapiens
  misc_RNA (1)...(19): siRNA sense strand
guugauaggcacucccaaa

SEQ ID NO: 1398867 - RNA, 19 nt, Homo sapiens
  misc_RNA (1)...(19): siRNA sense strand
gugaauacaacacacacaa

SEQ ID NO: 1398868 - RNA, 19 nt, Homo sapiens
  misc_RNA (1)...(19): siRNA sense strand
ccacuggacagagcccaua

SEQ ID NO: 1398869 - RNA, 19 nt, Homo sapiens
  misc_RNA (1)...(19): siRNA sense strand
gcagagauucggcagaaaa

SEQ ID NO: 1398870 - RNA, 19 nt, Homo sapiens
  misc_RNA (1)...(19): siRNA sense strand
uuacccaccuccagcacaa

SEQ ID NO: 1398871 - RNA, 19 nt, Homo sapiens
  misc_RNA (1)...(19): siRNA sense strand
gcccauacaccuaccagau

SEQ ID NO: 1398872 - RNA, 19 nt, Homo sapiens
  misc_RNA (1)...(19): siRNA sense strand
ugaaggcacuaaaccucau

SEQ ID NO: 1398873 - RNA, 19 nt, Homo sapiens
  misc_RNA (1)...(19): siRNA sense strand
gauaggcacucccaaaagg

SEQ ID NO: 1398874 - RNA, 19 nt, Homo sapiens
  misc_RNA (1)...(19): siRNA sense strand
cagcgauugucuggauaaa

SEQ ID NO: 1398875 - RNA, 19 nt, Homo sapiens
  misc_RNA (1)...(19): siRNA sense strand
ggccaagauuuaagcacau

SEQ ID NO: 1398876 - RNA, 19 nt, Homo sapiens
  misc_RNA (1)...(19): siRNA sense strand
augcagagauucggcagaa

SEQ ID NO: 1398877 - RNA, 19 nt, Homo sapiens
  misc_RNA (1)...(19): siRNA sense strand
caaccaagacagggaagga

SEQ ID NO: 1398878 - RNA, 19 nt, Homo sapiens
  misc_RNA (1)...(19): siRNA sense strand
cagacaaggcaucaccaaa

SEQ ID NO: 1398879 - RNA, 19 nt, Homo sapiens
  misc_RNA (1)...(19): siRNA sense strand
gagcugcuucgagaggaua

SEQ ID NO: 1398880 - RNA, 19 nt, Homo sapiens
  misc_RNA (1)...(19): siRNA sense strand
cagcucuucuccagaucuu

SEQ ID NO: 1398881 - RNA, 19 nt, Homo sapiens
  misc_RNA (1)...(19): siRNA sense strand
ucccagcucuucuccagau

SEQ ID NO: 1398882 - RNA, 19 nt, Homo sapiens
  misc_RNA (1)...(19): siRNA sense strand
uauuacggcucauccuaca

SEQ ID NO: 1398883 - RNA, 19 nt, Homo sapiens
  misc_RNA (1)...(19): siRNA sense strand
gggugaaggagauguacaa

SEQ ID NO: 1398884 - RNA, 19 nt, Homo sapiens
  misc_RNA (1)...(19): siRNA sense strand
cagcacaagccuauggaau

SEQ ID NO: 1398885 - RNA, 19 nt, Homo sapiens
  misc_RNA (1)...(19): siRNA sense strand
ugaauacaacacacacaau

SEQ ID NO: 1398886 - RNA, 19 nt, Homo sapiens
  misc_RNA (1)...(19): siRNA sense strand
gacauuugcauccagauac

SEQ ID NO: 1398887 - RNA, 19 nt, Homo sapiens
  misc_RNA (1)...(19): siRNA sense strand
gaggauaaugcagagauuc

SEQ ID NO: 1398888 - RNA, 19 nt, Homo sapiens
  misc_RNA (1)...(19): siRNA sense strand
caagauuuaagcacauaca

SEQ ID NO: 1398889 - RNA, 19 nt, Homo sapiens
  misc_RNA (1)...(19): siRNA sense strand
agaugacaauggccaagau

SEQ ID NO: 1398890 - RNA, 19 nt, Homo sapiens
  misc_RNA (1)...(19): siRNA sense strand
ccagaugcacggcacaaca

SEQ ID NO: 1398891 - RNA, 19 nt, Homo sapiens
  misc_RNA (1)...(19): siRNA sense strand
auacaacacacacaaugga

SEQ ID NO: 1398892 - RNA, 19 nt, Homo sapiens
  misc_RNA (1)...(19): siRNA sense strand
cacaacaggguucuaucaa

SEQ ID NO: 1398893 - RNA, 19 nt, Homo sapiens
  misc_RNA (1)...(19): siRNA sense strand
gguacaaggaaaugguaga

SEQ ID NO: 1398894 - RNA, 19 nt, Homo sapiens
  misc_RNA (1)...(19): siRNA sense strand
gauacacaucuguucuuca

SEQ ID NO: 1398895 - RNA, 19 nt, Homo sapiens
  misc_RNA (1)...(19): siRNA sense strand
cuucaaccuugcagauaca

SEQ ID NO: 1398896 - RNA, 19 nt, Homo sapiens
  misc_RNA (1)...(19): siRNA sense strand
gauugucuggauaaacuga

SEQ ID NO: 1398897 - RNA, 19 nt, Homo sapiens
  misc_RNA (1)...(19): siRNA sense strand
uuuaagcacauacaacuuc

SEQ ID NO: 1398898 - RNA, 19 nt, Homo sapiens
  misc_RNA (1)...(19): siRNA sense strand
caaccuugcagauacacau

SEQ ID NO: 1398899 - RNA, 19 nt, Homo sapiens
  misc_RNA (1)...(19): siRNA sense strand
ccaaagaccucaucaauaa

SEQ ID NO: 1398900 - RNA, 19 nt, Homo sapiens
  misc_RNA (1)...(19): siRNA sense strand
gcuagaaucugccgucuuu

SEQ ID NO: 1398901 - RNA, 19 nt, Homo sapiens
  misc_RNA (1)...(19): siRNA sense strand
gaagaaaccagauggagua

SEQ ID NO: 1398902 - RNA, 19 nt, Homo sapiens
  misc_RNA (1)...(19): siRNA sense strand
gaucaaggcuggagcuuau

SEQ ID NO: 1398903 - RNA, 19 nt, Homo sapiens
  misc_RNA (1)...(19): siRNA sense strand
gaucgaagcuaucaacaau

SEQ ID NO: 1398904 - RNA, 19 nt, Homo sapiens
  misc_RNA (1)...(19): siRNA sense strand
guaaagauccuuauggaaa

SEQ ID NO: 1398905 - RNA, 19 nt, Homo sapiens
  misc_RNA (1)...(19): siRNA sense strand
gaggugaacuguuugaaga

SEQ ID NO: 1398906 - RNA, 19 nt, Homo sapiens
  misc_RNA (1)...(19): siRNA sense strand
gaaaccagauggaguaaag

SEQ ID NO: 1398907 - RNA, 19 nt, Homo sapiens
  misc_RNA (1)...(19): siRNA sense strand
gaagagggcuuucacuacu

SEQ ID NO: 1398908 - RNA, 19 nt, Homo sapiens
  misc_RNA (1)...(19): siRNA sense strand
guaaaggagucaacugaga

SEQ ID NO: 1398909 - RNA, 19 nt, Homo sapiens
  misc_RNA (1)...(19): siRNA sense strand
aaaccaauccacacuauua

SEQ ID NO: 1398910 - RNA, 19 nt, Homo sapiens
  misc_RNA (1)...(19): siRNA sense strand
caaagucacugaacaacug

SEQ ID NO: 1398911 - RNA, 19 nt, Homo sapiens
  misc_RNA (1)...(19): siRNA sense strand
gggagcagcugugaaauug

SEQ ID NO: 1398912 - RNA, 19 nt, Homo sapiens
  misc_RNA (1)...(19): siRNA sense strand
caaagacaaugcagucaga

SEQ ID NO: 1398913 - RNA, 19 nt, Homo sapiens
  misc_RNA (1)...(19): siRNA sense strand
gccaagaguuuguugaaga

SEQ ID NO: 1398914 - RNA, 19 nt, Homo sapiens
  misc_RNA (1)...(19): siRNA sense strand
gcacgaaagcaagagauua

SEQ ID NO: 1398915 - RNA, 19 nt, Homo sapiens
  misc_RNA (1)...(19): siRNA sense strand
gccaaagaccucaucaaua

SEQ ID NO: 1398916 - RNA, 19 nt, Homo sapiens
  misc_RNA (1)...(19): siRNA sense strand
caagggagcagcugugaaa

SEQ ID NO: 1398917 - RNA, 19 nt, Homo sapiens
  misc_RNA (1)...(19): siRNA sense strand
caacuaugcuggcuacaag

SEQ ID NO: 1398918 - RNA, 19 nt, Homo sapiens
  misc_RNA (1)...(19): siRNA sense strand
gaaagccaguggauaugug

SEQ ID NO: 1398919 - RNA, 19 nt, Homo sapiens
  misc_RNA (1)...(19): siRNA sense strand
ucaccuaaauggcauaguu

SEQ ID NO: 1398920 - RNA, 19 nt, Homo sapiens
  misc_RNA (1)...(19): siRNA sense strand
acaagaauaugcugccaaa

SEQ ID NO: 1398921 - RNA, 19 nt, Homo sapiens
  misc_RNA (1)...(19): siRNA sense strand
ccaagaguuuguugaagaa

SEQ ID NO: 1398922 - RNA, 19 nt, Homo sapiens
  misc_RNA (1)...(19): siRNA sense strand
guagacugcuugaagaaau

SEQ ID NO: 1398923 - RNA, 19 nt, Homo sapiens
  misc_RNA (1)...(19): siRNA sense strand
ccauggaucugucaacguu

SEQ ID NO: 1398924 - RNA, 19 nt, Homo sapiens
  misc_RNA (1)...(19): siRNA sense strand
gaagcacccuaauauugug

SEQ ID NO: 1398925 - RNA, 19 nt, Homo sapiens
  misc_RNA (1)...(19): siRNA sense strand
guuaaucauugucaccuaa

SEQ ID NO: 1398926 - RNA, 19 nt, Homo sapiens
  misc_RNA (1)...(19): siRNA sense strand
auacaacaauugaggauga

SEQ ID NO: 1398927 - RNA, 19 nt, Homo sapiens
  misc_RNA (1)...(19): siRNA sense strand
ugaacuguuugaagacaua

SEQ ID NO: 1398928 - RNA, 19 nt, Homo sapiens
  misc_RNA (1)...(19): siRNA sense strand
ggugccaucuugacaacua

SEQ ID NO: 1398929 - RNA, 19 nt, Homo sapiens
  misc_RNA (1)...(19): siRNA sense strand
uaaagauccuuauggaaag

SEQ ID NO: 1398930 - RNA, 19 nt, Homo sapiens
  misc_RNA (1)...(19): siRNA sense strand
ggaugaagaccaacacaga

SEQ ID NO: 1398931 - RNA, 19 nt, Homo sapiens
  misc_RNA (1)...(19): siRNA sense strand
gaguaaaggagucaacuga

SEQ ID NO: 1398932 - RNA, 19 nt, Homo sapiens
  misc_RNA (1)...(19): siRNA sense strand
gaaagcaagagauuaucaa

SEQ ID NO: 1398933 - RNA, 19 nt, Homo sapiens
  misc_RNA (1)...(19): siRNA sense strand
ggaugaagaugugaaagca

SEQ ID NO: 1398934 - RNA, 19 nt, Homo sapiens
  misc_RNA (1)...(19): siRNA sense strand
gaaagagaagcuagaaucu

SEQ ID NO: 1398935 - RNA, 19 nt, Homo sapiens
  misc_RNA (1)...(19): siRNA sense strand
gaacaacugaucgaagcua

SEQ ID NO: 1398936 - RNA, 19 nt, Homo sapiens
  misc_RNA (1)...(19): siRNA sense strand
caagagaauacuacaguga

SEQ ID NO: 1398937 - RNA, 19 nt, Homo sapiens
  misc_RNA (1)...(19): siRNA sense strand
auauuaggcucacacagua

SEQ ID NO: 1398938 - RNA, 19 nt, Homo sapiens
  misc_RNA (1)...(19): siRNA sense strand
gcaagagauuaucaaaguc

SEQ ID NO: 1398939 - RNA, 19 nt, Homo sapiens
  misc_RNA (1)...(19): siRNA sense strand
cagaagagggcuuucacua

SEQ ID NO: 1398940 - RNA, 19 nt, Homo sapiens
  misc_RNA (1)...(19): siRNA sense strand
cuacuugguguuugauuua

SEQ ID NO: 1398941 - RNA, 19 nt, Homo sapiens
  misc_RNA (1)...(19): siRNA sense strand
acuaaagggugccaucuug

SEQ ID NO: 1398942 - RNA, 19 nt, Homo sapiens
  misc_RNA (1)...(19): siRNA sense strand
ggugagaagauguaugaaa

SEQ ID NO: 1398943 - RNA, 19 nt, Homo sapiens
  misc_RNA (1)...(19): siRNA sense strand
cagcaggcgugguuugguu

SEQ ID NO: 1398944 - RNA, 19 nt, Homo sapiens
  misc_RNA (1)...(19): siRNA sense strand
gaucaucagaaacuagaaa

SEQ ID NO: 1398945 - RNA, 19 nt, Homo sapiens
  misc_RNA (1)...(19): siRNA sense strand
agcaagagauuaucaaagu

SEQ ID NO: 1398946 - RNA, 19 nt, Homo sapiens
  misc_RNA (1)...(19): siRNA sense strand
gugagaagauguaugaaaa

SEQ ID NO: 1398947 - RNA, 19 nt, Homo sapiens
  misc_RNA (1)...(19): siRNA sense strand
uacuggaggugaacuguuu

SEQ ID NO: 1398948 - RNA, 19 nt, Homo sapiens
  misc_RNA (1)...(19): siRNA sense strand
gaaaauuccuacuggacaa

SEQ ID NO: 1398949 - RNA, 19 nt, Homo sapiens
  misc_RNA (1)...(19): siRNA sense strand
gcugaugccagucauugua

SEQ ID NO: 1398950 - RNA, 19 nt, Homo sapiens
  misc_RNA (1)...(19): siRNA sense strand
gcgacuucaugauagcaua

SEQ ID NO: 1398951 - RNA, 19 nt, Homo sapiens
  misc_RNA (1)...(19): siRNA sense strand
ucuaaacccucauguacau

SEQ ID NO: 1398952 - RNA, 19 nt, Homo sapiens
  misc_RNA (1)...(19): siRNA sense strand
caagagauuaucaaaguca

SEQ ID NO: 1398953 - RNA, 19 nt, Homo sapiens
  misc_RNA (1)...(19): siRNA sense strand
acugagaguucaaauacaa

SEQ ID NO: 1398954 - RNA, 19 nt, Homo sapiens
  misc_RNA (1)...(19): siRNA sense strand
ugaagcacccuaauauugu

SEQ ID NO: 1398955 - RNA, 19 nt, Homo sapiens
  misc_RNA (1)...(19): siRNA sense strand
gcaguggaaugccaaagac

SEQ ID NO: 1398956 - RNA, 19 nt, Homo sapiens
  misc_RNA (1)...(19): siRNA sense strand
gaauaugcugccaaaauua

SEQ ID NO: 1398957 - RNA, 19 nt, Homo sapiens
  misc_RNA (1)...(19): siRNA sense strand
auaaaccaauccacacuau

SEQ ID NO: 1398958 - RNA, 19 nt, Homo sapiens
  misc_RNA (1)...(19): siRNA sense strand
agaauaugcugccaaaauu

SEQ ID NO: 1398959 - RNA, 19 nt, Homo sapiens
  misc_RNA (1)...(19): siRNA sense strand
guggugagaagauguauga

SEQ ID NO: 1398960 - RNA, 19 nt, Homo sapiens
  misc_RNA (1)...(19): siRNA sense strand
uggcacaccuggauaucuu

SEQ ID NO: 1398961 - RNA, 19 nt, Homo sapiens
  misc_RNA (1)...(19): siRNA sense strand
cagauucuagaaaguguua

SEQ ID NO: 1398962 - RNA, 19 nt, Homo sapiens
  misc_RNA (1)...(19): siRNA sense strand
guauacagcagauucuaga

SEQ ID NO: 1398963 - RNA, 19 nt, Homo sapiens
  misc_RNA (1)...(19): siRNA sense strand
ccugaagccugagaauuug

SEQ ID NO: 1398964 - RNA, 19 nt, Homo sapiens
  misc_RNA (1)...(19): siRNA sense strand
ccaauccacacuauuauuc

SEQ ID NO: 1398965 - RNA, 19 nt, Homo sapiens
  misc_RNA (1)...(19): siRNA sense strand
uagacugcuugaagaaauu

SEQ ID NO: 1398966 - RNA, 19 nt, Homo sapiens
  misc_RNA (1)...(19): siRNA sense strand
caaagaccucaucaauaaa

SEQ ID NO: 1398967 - RNA, 19 nt, Homo sapiens
  misc_RNA (1)...(19): siRNA sense strand
ggaaagccaguggauaugu

SEQ ID NO: 1398968 - RNA, 19 nt, Homo sapiens
  misc_RNA (1)...(19): siRNA sense strand
agaaagagaagcuagaauc

SEQ ID NO: 1398969 - RNA, 19 nt, Homo sapiens
  misc_RNA (1)...(19): siRNA sense strand
ggcuggagcuuaugauuuu

SEQ ID NO: 1398970 - RNA, 19 nt, Homo sapiens
  misc_RNA (1)...(19): siRNA sense strand
caauugaggaugaagaugu

SEQ ID NO: 1398971 - RNA, 19 nt, Homo sapiens
  misc_RNA (1)...(19): siRNA sense strand
gcacugaagcacccaugga

SEQ ID NO: 1398972 - RNA, 19 nt, Homo sapiens
  misc_RNA (1)...(19): siRNA sense strand
ggugacuccugaagccaaa

SEQ ID NO: 1398973 - RNA, 19 nt, Homo sapiens
  misc_RNA (1)...(19): siRNA sense strand
uugaagcacccuaauauug

SEQ ID NO: 1398974 - RNA, 19 nt, Homo sapiens
  misc_RNA (1)...(19): siRNA sense strand
ucgaagcuaucaacaaugg

SEQ ID NO: 1398975 - RNA, 19 nt, Homo sapiens
  misc_RNA (1)...(19): siRNA sense strand
caacaauugaggaugaaga

SEQ ID NO: 1398976 - RNA, 19 nt, Homo sapiens
  misc_RNA (1)...(19): siRNA sense strand
agacauaguggcaagagaa

SEQ ID NO: 1398977 - RNA, 19 nt, Homo sapiens
  misc_RNA (1)...(19): siRNA sense strand
caccgauucuacuuugaaa

SEQ ID NO: 1398978 - RNA, 19 nt, Homo sapiens
  misc_RNA (1)...(19): siRNA sense strand
acccaggccuuacugcuuu

SEQ ID NO: 1398979 - RNA, 19 nt, Homo sapiens
  misc_RNA (1)...(19): siRNA sense strand
cgaaagcaagagauuauca

SEQ ID NO: 1398980 - RNA, 19 nt, Homo sapiens
  misc_RNA (1)...(19): siRNA sense strand
cauguggugucauucucua

SEQ ID NO: 1398981 - RNA, 19 nt, Homo sapiens
  misc_RNA (1)...(19): siRNA sense strand
ugaugccagucauuguaua

SEQ ID NO: 1398982 - RNA, 19 nt, Homo sapiens
  misc_RNA (1)...(19): siRNA sense strand
gaaacuagaaagagaagcu

SEQ ID NO: 1398983 - RNA, 19 nt, Homo sapiens
  misc_RNA (1)...(19): siRNA sense strand
cugaagcuuuggguaauuu

SEQ ID NO: 1398984 - RNA, 19 nt, Homo sapiens
  misc_RNA (1)...(19): siRNA sense strand
uaucaaagucacugaacaa

SEQ ID NO: 1398985 - RNA, 19 nt, Homo sapiens
  misc_RNA (1)...(19): siRNA sense strand
guggugucauucucuauau

SEQ ID NO: 1398986 - RNA, 19 nt, Homo sapiens
  misc_RNA (1)...(19): siRNA sense strand
gugggcauguggugucauu

SEQ ID NO: 1398987 - RNA, 19 nt, Homo sapiens
  misc_RNA (1)...(19): siRNA sense strand
cacgaaagcaagagauuau

SEQ ID NO: 1398988 - RNA, 19 nt, Homo sapiens
  misc_RNA (1)...(19): siRNA sense strand
ggcaagagaauacuacagu

SEQ ID NO: 1398989 - RNA, 19 nt, Homo sapiens
  misc_RNA (1)...(19): siRNA sense strand
agacaaugcagucagaaga

SEQ ID NO: 1398990 - RNA, 19 nt, Homo sapiens
  misc_RNA (1)...(19): siRNA sense strand
uauauuaggcucacacagu

SEQ ID NO: 1398991 - RNA, 19 nt, Homo sapiens
  misc_RNA (1)...(19): siRNA sense strand
ugaaagcacgaaagcaaga

SEQ ID NO: 1398992 - RNA, 19 nt, Homo sapiens
  misc_RNA (1)...(19): siRNA sense strand
ggaggugaacuguuugaag

SEQ ID NO: 1398993 - RNA, 19 nt, Homo sapiens
  misc_RNA (1)...(19): siRNA sense strand
gccugcauagcauauauua

SEQ ID NO: 1398994 - RNA, 19 nt, Homo sapiens
  misc_RNA (1)...(19): siRNA sense strand
caaaagcaauaaaccaauc

SEQ ID NO: 1398995 - RNA, 19 nt, Homo sapiens
  misc_RNA (1)...(19): siRNA sense strand
acguaaagauccuuaugga

SEQ ID NO: 1398996 - RNA, 19 nt, Homo sapiens
  misc_RNA (1)...(19): siRNA sense strand
gaccugaagccugagaauu

SEQ ID NO: 1398997 - RNA, 19 nt, Homo sapiens
  misc_RNA (1)...(19): siRNA sense strand
uacagcagauucuagaaag

SEQ ID NO: 1398998 - RNA, 19 nt, Homo sapiens
  misc_RNA (1)...(19): siRNA sense strand
ggugaacuguuugaagaca

SEQ ID NO: 1398999 - RNA, 19 nt, Homo sapiens
  misc_RNA (1)...(19): siRNA sense strand
ccaaagaccucaucaauaa

SEQ ID NO: 1399000 - RNA, 19 nt, Homo sapiens
  misc_RNA (1)...(19): siRNA sense strand
gcuagaaucugccgucuuu

SEQ ID NO: 1399001 - RNA, 19 nt, Homo sapiens
  misc_RNA (1)...(19): siRNA sense strand
gaagaaaccagauggagua

SEQ ID NO: 1399002 - RNA, 19 nt, Homo sapiens
  misc_RNA (1)...(19): siRNA sense strand
gaucaaggcuggagcuuau

SEQ ID NO: 1399003 - RNA, 19 nt, Homo sapiens
  misc_RNA (1)...(19): siRNA sense strand
gaucgaagcuaucaacaau

SEQ ID NO: 1399004 - RNA, 19 nt, Homo sapiens
  misc_RNA (1)...(19): siRNA sense strand
guaaagauccuuauggaaa

SEQ ID NO: 1399005 - RNA, 19 nt, Homo sapiens
  misc_RNA (1)...(19): siRNA sense strand
gaggugaacuguuugaaga

SEQ ID NO: 1399006 - RNA, 19 nt, Homo sapiens
  misc_RNA (1)...(19): siRNA sense strand
gaaaccagauggaguaaag

SEQ ID NO: 1399007 - RNA, 19 nt, Homo sapiens
  misc_RNA (1)...(19): siRNA sense strand
gaagagggcuuucacuacu

SEQ ID NO: 1399008 - RNA, 19 nt, Homo sapiens
  misc_RNA (1)...(19): siRNA sense strand
guaaaggagucaacugaga

SEQ ID NO: 1399009 - RNA, 19 nt, Homo sapiens
  misc_RNA (1)...(19): siRNA sense strand
aaaccaauccacacuauua

SEQ ID NO: 1399010 - RNA, 19 nt, Homo sapiens
  misc_RNA (1)...(19): siRNA sense strand
caaagucacugaacaacug

SEQ ID NO: 1399011 - RNA, 19 nt, Homo sapiens
  misc_RNA (1)...(19): siRNA sense strand
gggagcagcugugaaauug

SEQ ID NO: 1399012 - RNA, 19 nt, Homo sapiens
  misc_RNA (1)...(19): siRNA sense strand
caaagacaaugcagucaga

SEQ ID NO: 1399013 - RNA, 19 nt, Homo sapiens
  misc_RNA (1)...(19): siRNA sense strand
gccaagaguuuguugaaga

SEQ ID NO: 1399014 - RNA, 19 nt, Homo sapiens
  misc_RNA (1)...(19): siRNA sense strand
gcacgaaagcaagagauua

SEQ ID NO: 1399015 - RNA, 19 nt, Homo sapiens
  misc_RNA (1)...(19): siRNA sense strand
gccaaagaccucaucaaua

SEQ ID NO: 1399016 - RNA, 19 nt, Homo sapiens
  misc_RNA (1)...(19): siRNA sense strand
caagggagcagcugugaaa

SEQ ID NO: 1399017 - RNA, 19 nt, Homo sapiens
  misc_RNA (1)...(19): siRNA sense strand
caacuaugcuggcuacaag

SEQ ID NO: 1399018 - RNA, 19 nt, Homo sapiens
  misc_RNA (1)...(19): siRNA sense strand
gaaagccaguggauaugug

SEQ ID NO: 1399019 - RNA, 19 nt, Homo sapiens
  misc_RNA (1)...(19): siRNA sense strand
ucaccuaaauggcauaguu

SEQ ID NO: 1399020 - RNA, 19 nt, Homo sapiens
  misc_RNA (1)...(19): siRNA sense strand
acaagaauaugcugccaaa

SEQ ID NO: 1399021 - RNA, 19 nt, Homo sapiens
  misc_RNA (1)...(19): siRNA sense strand
ccaagaguuuguugaagaa

SEQ ID NO: 1399022 - RNA, 19 nt, Homo sapiens
  misc_RNA (1)...(19): siRNA sense strand
guagacugcuugaagaaau

SEQ ID NO: 1399023 - RNA, 19 nt, Homo sapiens
  misc_RNA (1)...(19): siRNA sense strand
ccauggaucugucaacguu

SEQ ID NO: 1399024 - RNA, 19 nt, Homo sapiens
  misc_RNA (1)...(19): siRNA sense strand
gaagcacccuaauauugug

SEQ ID NO: 1399025 - RNA, 19 nt, Homo sapiens
  misc_RNA (1)...(19): siRNA sense strand
guuaaucauugucaccuaa

SEQ ID NO: 1399026 - RNA, 19 nt, Homo sapiens
  misc_RNA (1)...(19): siRNA sense strand
auacaacaauugaggauga

SEQ ID NO: 1399027 - RNA, 19 nt, Homo sapiens
  misc_RNA (1)...(19): siRNA sense strand
ugaacuguuugaagacaua

SEQ ID NO: 1399028 - RNA, 19 nt, Homo sapiens
  misc_RNA (1)...(19): siRNA sense strand
ggugccaucuugacaacua

SEQ ID NO: 1399029 - RNA, 19 nt, Homo sapiens
  misc_RNA (1)...(19): siRNA sense strand
uaaagauccuuauggaaag

SEQ ID NO: 1399030 - RNA, 19 nt, Homo sapiens
  misc_RNA (1)...(19): siRNA sense strand
ggaugaagaccaacacaga

SEQ ID NO: 1399031 - RNA, 19 nt, Homo sapiens
  misc_RNA (1)...(19): siRNA sense strand
gaguaaaggagucaacuga

SEQ ID NO: 1399032 - RNA, 19 nt, Homo sapiens
  misc_RNA (1)...(19): siRNA sense strand
gaaagcaagagauuaucaa

SEQ ID NO: 1399033 - RNA, 19 nt, Homo sapiens
  misc_RNA (1)...(19): siRNA sense strand
ggaugaagaugugaaagca

SEQ ID NO: 1399034 - RNA, 19 nt, Homo sapiens
  misc_RNA (1)...(19): siRNA sense strand
gaaagagaagcuagaaucu

SEQ ID NO: 1399035 - RNA, 19 nt, Homo sapiens
  misc_RNA (1)...(19): siRNA sense strand
gaacaacugaucgaagcua

SEQ ID NO: 1399036 - RNA, 19 nt, Homo sapiens
  misc_RNA (1)...(19): siRNA sense strand
caagagaauacuacaguga

SEQ ID NO: 1399037 - RNA, 19 nt, Homo sapiens
  misc_RNA (1)...(19): siRNA sense strand
auauuaggcucacacagua

SEQ ID NO: 1399038 - RNA, 19 nt, Homo sapiens
  misc_RNA (1)...(19): siRNA sense strand
gcaagagauuaucaaaguc

SEQ ID NO: 1399039 - RNA, 19 nt, Homo sapiens
  misc_RNA (1)...(19): siRNA sense strand
cagaagagggcuuucacua

SEQ ID NO: 1399040 - RNA, 19 nt, Homo sapiens
  misc_RNA (1)...(19): siRNA sense strand
cuacuugguguuugauuua

SEQ ID NO: 1399041 - RNA, 19 nt, Homo sapiens
  misc_RNA (1)...(19): siRNA sense strand
acuaaagggugccaucuug

SEQ ID NO: 1399042 - RNA, 19 nt, Homo sapiens
  misc_RNA (1)...(19): siRNA sense strand
ggugagaagauguaugaaa

SEQ ID NO: 1399043 - RNA, 19 nt, Homo sapiens
  misc_RNA (1)...(19): siRNA sense strand
cagcaggcgugguuugguu

SEQ ID NO: 1399044 - RNA, 19 nt, Homo sapiens
  misc_RNA (1)...(19): siRNA sense strand
gaucaucagaaacuagaaa

SEQ ID NO: 1399045 - RNA, 19 nt, Homo sapiens
  misc_RNA (1)...(19): siRNA sense strand
agcaagagauuaucaaagu

SEQ ID NO: 1399046 - RNA, 19 nt, Homo sapiens
  misc_RNA (1)...(19): siRNA sense strand
gugagaagauguaugaaaa

SEQ ID NO: 1399047 - RNA, 19 nt, Homo sapiens
  misc_RNA (1)...(19): siRNA sense strand
uacuggaggugaacuguuu

SEQ ID NO: 1399048 - RNA, 19 nt, Homo sapiens
  misc_RNA (1)...(19): siRNA sense strand
gaaaauuccuacuggacaa

SEQ ID NO: 1399049 - RNA, 19 nt, Homo sapiens
  misc_RNA (1)...(19): siRNA sense strand
gcugaugccagucauugua

SEQ ID NO: 1399050 - RNA, 19 nt, Homo sapiens
  misc_RNA (1)...(19): siRNA sense strand
gcgacuucaugauagcaua

SEQ ID NO: 1399051 - RNA, 19 nt, Homo sapiens
  misc_RNA (1)...(19): siRNA sense strand
ucuaaacccucauguacau

SEQ ID NO: 1399052 - RNA, 19 nt, Homo sapiens
  misc_RNA (1)...(19): siRNA sense strand
caagagauuaucaaaguca

SEQ ID NO: 1399053 - RNA, 19 nt, Homo sapiens
  misc_RNA (1)...(19): siRNA sense strand
acugagaguucaaauacaa

SEQ ID NO: 1399054 - RNA, 19 nt, Homo sapiens
  misc_RNA (1)...(19): siRNA sense strand
ugaagcacccuaauauugu

SEQ ID NO: 1399055 - RNA, 19 nt, Homo sapiens
  misc_RNA (1)...(19): siRNA sense strand
gcaguggaaugccaaagac

SEQ ID NO: 1399056 - RNA, 19 nt, Homo sapiens
  misc_RNA (1)...(19): siRNA sense strand
gaauaugcugccaaaauua

SEQ ID NO: 1399057 - RNA, 19 nt, Homo sapiens
  misc_RNA (1)...(19): siRNA sense strand
auaaaccaauccacacuau

SEQ ID NO: 1399058 - RNA, 19 nt, Homo sapiens
  misc_RNA (1)...(19): siRNA sense strand
agaauaugcugccaaaauu

SEQ ID NO: 1399059 - RNA, 19 nt, Homo sapiens
  misc_RNA (1)...(19): siRNA sense strand
guggugagaagauguauga

SEQ ID NO: 1399060 - RNA, 19 nt, Homo sapiens
  misc_RNA (1)...(19): siRNA sense strand
uggcacaccuggauaucuu

SEQ ID NO: 1399061 - RNA, 19 nt, Homo sapiens
  misc_RNA (1)...(19): siRNA sense strand
cagauucuagaaaguguua

SEQ ID NO: 1399062 - RNA, 19 nt, Homo sapiens
  misc_RNA (1)...(19): siRNA sense strand
guauacagcagauucuaga

SEQ ID NO: 1399063 - RNA, 19 nt, Homo sapiens
  misc_RNA (1)...(19): siRNA sense strand
ccugaagccugagaauuug

SEQ ID NO: 1399064 - RNA, 19 nt, Homo sapiens
  misc_RNA (1)...(19): siRNA sense strand
ccaauccacacuauuauuc

SEQ ID NO: 1399065 - RNA, 19 nt, Homo sapiens
  misc_RNA (1)...(19): siRNA sense strand
uagacugcuugaagaaauu

SEQ ID NO: 1399066 - RNA, 19 nt, Homo sapiens
  misc_RNA (1)...(19): siRNA sense strand
caaagaccucaucaauaaa

SEQ ID NO: 1399067 - RNA, 19 nt, Homo sapiens
  misc_RNA (1)...(19): siRNA sense strand
ggaaagccaguggauaugu

SEQ ID NO: 1399068 - RNA, 19 nt, Homo sapiens
  misc_RNA (1)...(19): siRNA sense strand
agaaagagaagcuagaauc

SEQ ID NO: 1399069 - RNA, 19 nt, Homo sapiens
  misc_RNA (1)...(19): siRNA sense strand
ggcuggagcuuaugauuuu

SEQ ID NO: 1399070 - RNA, 19 nt, Homo sapiens
  misc_RNA (1)...(19): siRNA sense strand
caauugaggaugaagaugu

SEQ ID NO: 1399071 - RNA, 19 nt, Homo sapiens
  misc_RNA (1)...(19): siRNA sense strand
gcacugaagcacccaugga

SEQ ID NO: 1399072 - RNA, 19 nt, Homo sapiens
  misc_RNA (1)...(19): siRNA sense strand
ggugacuccugaagccaaa

SEQ ID NO: 1399073 - RNA, 19 nt, Homo sapiens
  misc_RNA (1)...(19): siRNA sense strand
uugaagcacccuaauauug

SEQ ID NO: 1399074 - RNA, 19 nt, Homo sapiens
  misc_RNA (1)...(19): siRNA sense strand
ucgaagcuaucaacaaugg

SEQ ID NO: 1399075 - RNA, 19 nt, Homo sapiens
  misc_RNA (1)...(19): siRNA sense strand
caacaauugaggaugaaga

SEQ ID NO: 1399076 - RNA, 19 nt, Homo sapiens
  misc_RNA (1)...(19): siRNA sense strand
agacauaguggcaagagaa

SEQ ID NO: 1399077 - RNA, 19 nt, Homo sapiens
  misc_RNA (1)...(19): siRNA sense strand
caccgauucuacuuugaaa

SEQ ID NO: 1399078 - RNA, 19 nt, Homo sapiens
  misc_RNA (1)...(19): siRNA sense strand
acccaggccuuacugcuuu

SEQ ID NO: 1399079 - RNA, 19 nt, Homo sapiens
  misc_RNA (1)...(19): siRNA sense strand
cgaaagcaagagauuauca

SEQ ID NO: 1399080 - RNA, 19 nt, Homo sapiens
  misc_RNA (1)...(19): siRNA sense strand
cauguggugucauucucua

SEQ ID NO: 1399081 - RNA, 19 nt, Homo sapiens
  misc_RNA (1)...(19): siRNA sense strand
ugaugccagucauuguaua

SEQ ID NO: 1399082 - RNA, 19 nt, Homo sapiens
  misc_RNA (1)...(19): siRNA sense strand
gaaacuagaaagagaagcu

SEQ ID NO: 1399083 - RNA, 19 nt, Homo sapiens
  misc_RNA (1)...(19): siRNA sense strand
cugaagcuuuggguaauuu

SEQ ID NO: 1399084 - RNA, 19 nt, Homo sapiens
  misc_RNA (1)...(19): siRNA sense strand
uaucaaagucacugaacaa

SEQ ID NO: 1399085 - RNA, 19 nt, Homo sapiens
  misc_RNA (1)...(19): siRNA sense strand
guggugucauucucuauau

SEQ ID NO: 1399086 - RNA, 19 nt, Homo sapiens
  misc_RNA (1)...(19): siRNA sense strand
gugggcauguggugucauu

SEQ ID NO: 1399087 - RNA, 19 nt, Homo sapiens
  misc_RNA (1)...(19): siRNA sense strand
cacgaaagcaagagauuau

SEQ ID NO: 1399088 - RNA, 19 nt, Homo sapiens
  misc_RNA (1)...(19): siRNA sense strand
ggcaagagaauacuacagu

SEQ ID NO: 1399089 - RNA, 19 nt, Homo sapiens
  misc_RNA (1)...(19): siRNA sense strand
agacaaugcagucagaaga

SEQ ID NO: 1399090 - RNA, 19 nt, Homo sapiens
  misc_RNA (1)...(19): siRNA sense strand
uauauuaggcucacacagu

SEQ ID NO: 1399091 - RNA, 19 nt, Homo sapiens
  misc_RNA (1)...(19): siRNA sense strand
ugaaagcacgaaagcaaga

SEQ ID NO: 1399092 - RNA, 19 nt, Homo sapiens
  misc_RNA (1)...(19): siRNA sense strand
ggaggugaacuguuugaag

SEQ ID NO: 1399093 - RNA, 19 nt, Homo sapiens
  misc_RNA (1)...(19): siRNA sense strand
gccugcauagcauauauua

SEQ ID NO: 1399094 - RNA, 19 nt, Homo sapiens
  misc_RNA (1)...(19): siRNA sense strand
caaaagcaauaaaccaauc

SEQ ID NO: 1399095 - RNA, 19 nt, Homo sapiens
  misc_RNA (1)...(19): siRNA sense strand
acguaaagauccuuaugga

SEQ ID NO: 1399096 - RNA, 19 nt, Homo sapiens
  misc_RNA (1)...(19): siRNA sense strand
gaccugaagccugagaauu

SEQ ID NO: 1399097 - RNA, 19 nt, Homo sapiens
  misc_RNA (1)...(19): siRNA sense strand
uacagcagauucuagaaag

SEQ ID NO: 1399098 - RNA, 19 nt, Homo sapiens
  misc_RNA (1)...(19): siRNA sense strand
ggugaacuguuugaagaca

SEQ ID NO: 1399099 - RNA, 19 nt, Homo sapiens
  misc_RNA (1)...(19): siRNA sense strand
ccaaagaccucaucaauaa

SEQ ID NO: 1399100 - RNA, 19 nt, Homo sapiens
  misc_RNA (1)...(19): siRNA sense strand
gcuagaaucugccgucuuu

SEQ ID NO: 1399101 - RNA, 19 nt, Homo sapiens
  misc_RNA (1)...(19): siRNA sense strand
gaagaaaccagauggagua

SEQ ID NO: 1399102 - RNA, 19 nt, Homo sapiens
  misc_RNA (1)...(19): siRNA sense strand
gaucaaggcuggagcuuau

SEQ ID NO: 1399103 - RNA, 19 nt, Homo sapiens
  misc_RNA (1)...(19): siRNA sense strand
gaucgaagcuaucaacaau

SEQ ID NO: 1399104 - RNA, 19 nt, Homo sapiens
  misc_RNA (1)...(19): siRNA sense strand
guaaagauccuuauggaaa

SEQ ID NO: 1399105 - RNA, 19 nt, Homo sapiens
  misc_RNA (1)...(19): siRNA sense strand
gaggugaacuguuugaaga

SEQ ID NO: 1399106 - RNA, 19 nt, Homo sapiens
  misc_RNA (1)...(19): siRNA sense strand
gaaaccagauggaguaaag

SEQ ID NO: 1399107 - RNA, 19 nt, Homo sapiens
  misc_RNA (1)...(19): siRNA sense strand
gaagagggcuuucacuacu

SEQ ID NO: 1399108 - RNA, 19 nt, Homo sapiens
  misc_RNA (1)...(19): siRNA sense strand
guaaaggagucaacugaga

SEQ ID NO: 1399109 - RNA, 19 nt, Homo sapiens
  misc_RNA (1)...(19): siRNA sense strand
aaaccaauccacacuauua

SEQ ID NO: 1399110 - RNA, 19 nt, Homo sapiens
  misc_RNA (1)...(19): siRNA sense strand
caaagucacugaacaacug

SEQ ID NO: 1399111 - RNA, 19 nt, Homo sapiens
  misc_RNA (1)...(19): siRNA sense strand
gggagcagcugugaaauug

SEQ ID NO: 1399112 - RNA, 19 nt, Homo sapiens
  misc_RNA (1)...(19): siRNA sense strand
caaagacaaugcagucaga

SEQ ID NO: 1399113 - RNA, 19 nt, Homo sapiens
  misc_RNA (1)...(19): siRNA sense strand
gccaagaguuuguugaaga

SEQ ID NO: 1399114 - RNA, 19 nt, Homo sapiens
  misc_RNA (1)...(19): siRNA sense strand
gcacgaaagcaagagauua

SEQ ID NO: 1399115 - RNA, 19 nt, Homo sapiens
  misc_RNA (1)...(19): siRNA sense strand
gccaaagaccucaucaaua

SEQ ID NO: 1399116 - RNA, 19 nt, Homo sapiens
  misc_RNA (1)...(19): siRNA sense strand
caagggagcagcugugaaa

SEQ ID NO: 1399117 - RNA, 19 nt, Homo sapiens
  misc_RNA (1)...(19): siRNA sense strand
caacuaugcuggcuacaag

SEQ ID NO: 1399118 - RNA, 19 nt, Homo sapiens
  misc_RNA (1)...(19): siRNA sense strand
gaaagccaguggauaugug

SEQ ID NO: 1399119 - RNA, 19 nt, Homo sapiens
  misc_RNA (1)...(19): siRNA sense strand
ucaccuaaauggcauaguu

SEQ ID NO: 1399120 - RNA, 19 nt, Homo sapiens
  misc_RNA (1)...(19): siRNA sense strand
acaagaauaugcugccaaa

SEQ ID NO: 1399121 - RNA, 19 nt, Homo sapiens
  misc_RNA (1)...(19): siRNA sense strand
ccaagaguuuguugaagaa

SEQ ID NO: 1399122 - RNA, 19 nt, Homo sapiens
  misc_RNA (1)...(19): siRNA sense strand
guagacugcuugaagaaau

SEQ ID NO: 1399123 - RNA, 19 nt, Homo sapiens
  misc_RNA (1)...(19): siRNA sense strand
ccauggaucugucaacguu

SEQ ID NO: 1399124 - RNA, 19 nt, Homo sapiens
  misc_RNA (1)...(19): siRNA sense strand
gaagcacccuaauauugug

SEQ ID NO: 1399125 - RNA, 19 nt, Homo sapiens
  misc_RNA (1)...(19): siRNA sense strand
guuaaucauugucaccuaa

SEQ ID NO: 1399126 - RNA, 19 nt, Homo sapiens
  misc_RNA (1)...(19): siRNA sense strand
auacaacaauugaggauga

SEQ ID NO: 1399127 - RNA, 19 nt, Homo sapiens
  misc_RNA (1)...(19): siRNA sense strand
ugaacuguuugaagacaua

SEQ ID NO: 1399128 - RNA, 19 nt, Homo sapiens
  misc_RNA (1)...(19): siRNA sense strand
ggugccaucuugacaacua

SEQ ID NO: 1399129 - RNA, 19 nt, Homo sapiens
  misc_RNA (1)...(19): siRNA sense strand
uaaagauccuuauggaaag

SEQ ID NO: 1399130 - RNA, 19 nt, Homo sapiens
  misc_RNA (1)...(19): siRNA sense strand
ggaugaagaccaacacaga

SEQ ID NO: 1399131 - RNA, 19 nt, Homo sapiens
  misc_RNA (1)...(19): siRNA sense strand
gaguaaaggagucaacuga

SEQ ID NO: 1399132 - RNA, 19 nt, Homo sapiens
  misc_RNA (1)...(19): siRNA sense strand
gaaagcaagagauuaucaa

SEQ ID NO: 1399133 - RNA, 19 nt, Homo sapiens
  misc_RNA (1)...(19): siRNA sense strand
ggaugaagaugugaaagca

SEQ ID NO: 1399134 - RNA, 19 nt, Homo sapiens
  misc_RNA (1)...(19): siRNA sense strand
gaaagagaagcuagaaucu

SEQ ID NO: 1399135 - RNA, 19 nt, Homo sapiens
  misc_RNA (1)...(19): siRNA sense strand
gaacaacugaucgaagcua

SEQ ID NO: 1399136 - RNA, 19 nt, Homo sapiens
  misc_RNA (1)...(19): siRNA sense strand
caagagaauacuacaguga

SEQ ID NO: 1399137 - RNA, 19 nt, Homo sapiens
  misc_RNA (1)...(19): siRNA sense strand
auauuaggcucacacagua

SEQ ID NO: 1399138 - RNA, 19 nt, Homo sapiens
  misc_RNA (1)...(19): siRNA sense strand
gcaagagauuaucaaaguc

SEQ ID NO: 1399139 - RNA, 19 nt, Homo sapiens
  misc_RNA (1)...(19): siRNA sense strand
cagaagagggcuuucacua

SEQ ID NO: 1399140 - RNA, 19 nt, Homo sapiens
  misc_RNA (1)...(19): siRNA sense strand
cuacuugguguuugauuua

SEQ ID NO: 1399141 - RNA, 19 nt, Homo sapiens
  misc_RNA (1)...(19): siRNA sense strand
acuaaagggugccaucuug

SEQ ID NO: 1399142 - RNA, 19 nt, Homo sapiens
  misc_RNA (1)...(19): siRNA sense strand
ggugagaagauguaugaaa

SEQ ID NO: 1399143 - RNA, 19 nt, Homo sapiens
  misc_RNA (1)...(19): siRNA sense strand
cagcaggcgugguuugguu

SEQ ID NO: 1399144 - RNA, 19 nt, Homo sapiens
  misc_RNA (1)...(19): siRNA sense strand
gaucaucagaaacuagaaa

SEQ ID NO: 1399145 - RNA, 19 nt, Homo sapiens
  misc_RNA (1)...(19): siRNA sense strand
agcaagagauuaucaaagu

SEQ ID NO: 1399146 - RNA, 19 nt, Homo sapiens
  misc_RNA (1)...(19): siRNA sense strand
gugagaagauguaugaaaa

SEQ ID NO: 1399147 - RNA, 19 nt, Homo sapiens
  misc_RNA (1)...(19): siRNA sense strand
uacuggaggugaacuguuu

SEQ ID NO: 1399148 - RNA, 19 nt, Homo sapiens
  misc_RNA (1)...(19): siRNA sense strand
gaaaauuccuacuggacaa

SEQ ID NO: 1399149 - RNA, 19 nt, Homo sapiens
  misc_RNA (1)...(19): siRNA sense strand
gcugaugccagucauugua

SEQ ID NO: 1399150 - RNA, 19 nt, Homo sapiens
  misc_RNA (1)...(19): siRNA sense strand
gcgacuucaugauagcaua

SEQ ID NO: 1399151 - RNA, 19 nt, Homo sapiens
  misc_RNA (1)...(19): siRNA sense strand
ucuaaacccucauguacau

SEQ ID NO: 1399152 - RNA, 19 nt, Homo sapiens
  misc_RNA (1)...(19): siRNA sense strand
caagagauuaucaaaguca

SEQ ID NO: 1399153 - RNA, 19 nt, Homo sapiens
  misc_RNA (1)...(19): siRNA sense strand
acugagaguucaaauacaa

SEQ ID NO: 1399154 - RNA, 19 nt, Homo sapiens
  misc_RNA (1)...(19): siRNA sense strand
ugaagcacccuaauauugu

SEQ ID NO: 1399155 - RNA, 19 nt, Homo sapiens
  misc_RNA (1)...(19): siRNA sense strand
gcaguggaaugccaaagac

SEQ ID NO: 1399156 - RNA, 19 nt, Homo sapiens
  misc_RNA (1)...(19): siRNA sense strand
gaauaugcugccaaaauua

SEQ ID NO: 1399157 - RNA, 19 nt, Homo sapiens
  misc_RNA (1)...(19): siRNA sense strand
auaaaccaauccacacuau

SEQ ID NO: 1399158 - RNA, 19 nt, Homo sapiens
  misc_RNA (1)...(19): siRNA sense strand
agaauaugcugccaaaauu

SEQ ID NO: 1399159 - RNA, 19 nt, Homo sapiens
  misc_RNA (1)...(19): siRNA sense strand
guggugagaagauguauga

SEQ ID NO: 1399160 - RNA, 19 nt, Homo sapiens
  misc_RNA (1)...(19): siRNA sense strand
uggcacaccuggauaucuu

SEQ ID NO: 1399161 - RNA, 19 nt, Homo sapiens
  misc_RNA (1)...(19): siRNA sense strand
cagauucuagaaaguguua

SEQ ID NO: 1399162 - RNA, 19 nt, Homo sapiens
  misc_RNA (1)...(19): siRNA sense strand
guauacagcagauucuaga

SEQ ID NO: 1399163 - RNA, 19 nt, Homo sapiens
  misc_RNA (1)...(19): siRNA sense strand
ccugaagccugagaauuug

SEQ ID NO: 1399164 - RNA, 19 nt, Homo sapiens
  misc_RNA (1)...(19): siRNA sense strand
ccaauccacacuauuauuc

SEQ ID NO: 1399165 - RNA, 19 nt, Homo sapiens
  misc_RNA (1)...(19): siRNA sense strand
uagacugcuugaagaaauu

SEQ ID NO: 1399166 - RNA, 19 nt, Homo sapiens
  misc_RNA (1)...(19): siRNA sense strand
caaagaccucaucaauaaa

SEQ ID NO: 1399167 - RNA, 19 nt, Homo sapiens
  misc_RNA (1)...(19): siRNA sense strand
ggaaagccaguggauaugu

SEQ ID NO: 1399168 - RNA, 19 nt, Homo sapiens
  misc_RNA (1)...(19): siRNA sense strand
agaaagagaagcuagaauc

SEQ ID NO: 1399169 - RNA, 19 nt, Homo sapiens
  misc_RNA (1)...(19): siRNA sense strand
ggcuggagcuuaugauuuu

SEQ ID NO: 1399170 - RNA, 19 nt, Homo sapiens
  misc_RNA (1)...(19): siRNA sense strand
caauugaggaugaagaugu

SEQ ID NO: 1399171 - RNA, 19 nt, Homo sapiens
  misc_RNA (1)...(19): siRNA sense strand
gcacugaagcacccaugga

SEQ ID NO: 1399172 - RNA, 19 nt, Homo sapiens
  misc_RNA (1)...(19): siRNA sense strand
ggugacuccugaagccaaa

SEQ ID NO: 1399173 - RNA, 19 nt, Homo sapiens
  misc_RNA (1)...(19): siRNA sense strand
uugaagcacccuaauauug

SEQ ID NO: 1399174 - RNA, 19 nt, Homo sapiens
  misc_RNA (1)...(19): siRNA sense strand
ucgaagcuaucaacaaugg

SEQ ID NO: 1399175 - RNA, 19 nt, Homo sapiens
  misc_RNA (1)...(19): siRNA sense strand
caacaauugaggaugaaga

SEQ ID NO: 1399176 - RNA, 19 nt, Homo sapiens
  misc_RNA (1)...(19): siRNA sense strand
agacauaguggcaagagaa

SEQ ID NO: 1399177 - RNA, 19 nt, Homo sapiens
  misc_RNA (1)...(19): siRNA sense strand
caccgauucuacuuugaaa

SEQ ID NO: 1399178 - RNA, 19 nt, Homo sapiens
  misc_RNA (1)...(19): siRNA sense strand
acccaggccuuacugcuuu

SEQ ID NO: 1399179 - RNA, 19 nt, Homo sapiens
  misc_RNA (1)...(19): siRNA sense strand
cgaaagcaagagauuauca

SEQ ID NO: 1399180 - RNA, 19 nt, Homo sapiens
  misc_RNA (1)...(19): siRNA sense strand
cauguggugucauucucua

SEQ ID NO: 1399181 - RNA, 19 nt, Homo sapiens
  misc_RNA (1)...(19): siRNA sense strand
ugaugccagucauuguaua

SEQ ID NO: 1399182 - RNA, 19 nt, Homo sapiens
  misc_RNA (1)...(19): siRNA sense strand
gaaacuagaaagagaagcu

SEQ ID NO: 1399183 - RNA, 19 nt, Homo sapiens
  misc_RNA (1)...(19): siRNA sense strand
cugaagcuuuggguaauuu

SEQ ID NO: 1399184 - RNA, 19 nt, Homo sapiens
  misc_RNA (1)...(19): siRNA sense strand
uaucaaagucacugaacaa

SEQ ID NO: 1399185 - RNA, 19 nt, Homo sapiens
  misc_RNA (1)...(19): siRNA sense strand
guggugucauucucuauau

SEQ ID NO: 1399186 - RNA, 19 nt, Homo sapiens
  misc_RNA (1)...(19): siRNA sense strand
gugggcauguggugucauu

SEQ ID NO: 1399187 - RNA, 19 nt, Homo sapiens
  misc_RNA (1)...(19): siRNA sense strand
cacgaaagcaagagauuau

SEQ ID NO: 1399188 - RNA, 19 nt, Homo sapiens
  misc_RNA (1)...(19): siRNA sense strand
ggcaagagaauacuacagu

SEQ ID NO: 1399189 - RNA, 19 nt, Homo sapiens
  misc_RNA (1)...(19): siRNA sense strand
agacaaugcagucagaaga

SEQ ID NO: 1399190 - RNA, 19 nt, Homo sapiens
  misc_RNA (1)...(19): siRNA sense strand
uauauuaggcucacacagu

SEQ ID NO: 1399191 - RNA, 19 nt, Homo sapiens
  misc_RNA (1)...(19): siRNA sense strand
ugaaagcacgaaagcaaga

SEQ ID NO: 1399192 - RNA, 19 nt, Homo sapiens
  misc_RNA (1)...(19): siRNA sense strand
ggaggugaacuguuugaag

SEQ ID NO: 1399193 - RNA, 19 nt, Homo sapiens
  misc_RNA (1)...(19): siRNA sense strand
gccugcauagcauauauua

SEQ ID NO: 1399194 - RNA, 19 nt, Homo sapiens
  misc_RNA (1)...(19): siRNA sense strand
caaaagcaauaaaccaauc

SEQ ID NO: 1399195 - RNA, 19 nt, Homo sapiens
  misc_RNA (1)...(19): siRNA sense strand
acguaaagauccuuaugga

SEQ ID NO: 1399196 - RNA, 19 nt, Homo sapiens
  misc_RNA (1)...(19): siRNA sense strand
gaccugaagccugagaauu

SEQ ID NO: 1399197 - RNA, 19 nt, Homo sapiens
  misc_RNA (1)...(19): siRNA sense strand
uacagcagauucuagaaag

SEQ ID NO: 1399198 - RNA, 19 nt, Homo sapiens
  misc_RNA (1)...(19): siRNA sense strand
ggugaacuguuugaagaca

SEQ ID NO: 1399199 - RNA, 19 nt, Homo sapiens
  misc_RNA (1)...(19): siRNA sense strand
ccaaagaccucaucaauaa

SEQ ID NO: 1399200 - RNA, 19 nt, Homo sapiens
  misc_RNA (1)...(19): siRNA sense strand
gcuagaaucugccgucuuu

SEQ ID NO: 1399201 - RNA, 19 nt, Homo sapiens
  misc_RNA (1)...(19): siRNA sense strand
gaagaaaccagauggagua

SEQ ID NO: 1399202 - RNA, 19 nt, Homo sapiens
  misc_RNA (1)...(19): siRNA sense strand
gaucaaggcuggagcuuau

SEQ ID NO: 1399203 - RNA, 19 nt, Homo sapiens
  misc_RNA (1)...(19): siRNA sense strand
gaucgaagcuaucaacaau

SEQ ID NO: 1399204 - RNA, 19 nt, Homo sapiens
  misc_RNA (1)...(19): siRNA sense strand
guaaagauccuuauggaaa

SEQ ID NO: 1399205 - RNA, 19 nt, Homo sapiens
  misc_RNA (1)...(19): siRNA sense strand
gaggugaacuguuugaaga

SEQ ID NO: 1399206 - RNA, 19 nt, Homo sapiens
  misc_RNA (1)...(19): siRNA sense strand
gaaaccagauggaguaaag

SEQ ID NO: 1399207 - RNA, 19 nt, Homo sapiens
  misc_RNA (1)...(19): siRNA sense strand
gaagagggcuuucacuacu

SEQ ID NO: 1399208 - RNA, 19 nt, Homo sapiens
  misc_RNA (1)...(19): siRNA sense strand
guaaaggagucaacugaga

SEQ ID NO: 1399209 - RNA, 19 nt, Homo sapiens
  misc_RNA (1)...(19): siRNA sense strand
aaaccaauccacacuauua

SEQ ID NO: 1399210 - RNA, 19 nt, Homo sapiens
  misc_RNA (1)...(19): siRNA sense strand
caaagucacugaacaacug

SEQ ID NO: 1399211 - RNA, 19 nt, Homo sapiens
  misc_RNA (1)...(19): siRNA sense strand
gggagcagcugugaaauug

SEQ ID NO: 1399212 - RNA, 19 nt, Homo sapiens
  misc_RNA (1)...(19): siRNA sense strand
caaagacaaugcagucaga

SEQ ID NO: 1399213 - RNA, 19 nt, Homo sapiens
  misc_RNA (1)...(19): siRNA sense strand
gccaagaguuuguugaaga

SEQ ID NO: 1399214 - RNA, 19 nt, Homo sapiens
  misc_RNA (1)...(19): siRNA sense strand
gcacgaaagcaagagauua

SEQ ID NO: 1399215 - RNA, 19 nt, Homo sapiens
  misc_RNA (1)...(19): siRNA sense strand
gccaaagaccucaucaaua

SEQ ID NO: 1399216 - RNA, 19 nt, Homo sapiens
  misc_RNA (1)...(19): siRNA sense strand
caagggagcagcugugaaa

SEQ ID NO: 1399217 - RNA, 19 nt, Homo sapiens
  misc_RNA (1)...(19): siRNA sense strand
caacuaugcuggcuacaag

SEQ ID NO: 1399218 - RNA, 19 nt, Homo sapiens
  misc_RNA (1)...(19): siRNA sense strand
gaaagccaguggauaugug

SEQ ID NO: 1399219 - RNA, 19 nt, Homo sapiens
  misc_RNA (1)...(19): siRNA sense strand
ucaccuaaauggcauaguu

SEQ ID NO: 1399220 - RNA, 19 nt, Homo sapiens
  misc_RNA (1)...(19): siRNA sense strand
acaagaauaugcugccaaa

SEQ ID NO: 1399221 - RNA, 19 nt, Homo sapiens
  misc_RNA (1)...(19): siRNA sense strand
ccaagaguuuguugaagaa

SEQ ID NO: 1399222 - RNA, 19 nt, Homo sapiens
  misc_RNA (1)...(19): siRNA sense strand
guagacugcuugaagaaau

SEQ ID NO: 1399223 - RNA, 19 nt, Homo sapiens
  misc_RNA (1)...(19): siRNA sense strand
ccauggaucugucaacguu

SEQ ID NO: 1399224 - RNA, 19 nt, Homo sapiens
  misc_RNA (1)...(19): siRNA sense strand
gaagcacccuaauauugug

SEQ ID NO: 1399225 - RNA, 19 nt, Homo sapiens
  misc_RNA (1)...(19): siRNA sense strand
guuaaucauugucaccuaa

SEQ ID NO: 1399226 - RNA, 19 nt, Homo sapiens
  misc_RNA (1)...(19): siRNA sense strand
auacaacaauugaggauga

SEQ ID NO: 1399227 - RNA, 19 nt, Homo sapiens
  misc_RNA (1)...(19): siRNA sense strand
ugaacuguuugaagacaua

SEQ ID NO: 1399228 - RNA, 19 nt, Homo sapiens
  misc_RNA (1)...(19): siRNA sense strand
ggugccaucuugacaacua

SEQ ID NO: 1399229 - RNA, 19 nt, Homo sapiens
  misc_RNA (1)...(19): siRNA sense strand
uaaagauccuuauggaaag

SEQ ID NO: 1399230 - RNA, 19 nt, Homo sapiens
  misc_RNA (1)...(19): siRNA sense strand
ggaugaagaccaacacaga

SEQ ID NO: 1399231 - RNA, 19 nt, Homo sapiens
  misc_RNA (1)...(19): siRNA sense strand
gaguaaaggagucaacuga

SEQ ID NO: 1399232 - RNA, 19 nt, Homo sapiens
  misc_RNA (1)...(19): siRNA sense strand
gaaagcaagagauuaucaa

SEQ ID NO: 1399233 - RNA, 19 nt, Homo sapiens
  misc_RNA (1)...(19): siRNA sense strand
ggaugaagaugugaaagca

SEQ ID NO: 1399234 - RNA, 19 nt, Homo sapiens
  misc_RNA (1)...(19): siRNA sense strand
gaaagagaagcuagaaucu

SEQ ID NO: 1399235 - RNA, 19 nt, Homo sapiens
  misc_RNA (1)...(19): siRNA sense strand
gaacaacugaucgaagcua

SEQ ID NO: 1399236 - RNA, 19 nt, Homo sapiens
  misc_RNA (1)...(19): siRNA sense strand
caagagaauacuacaguga

SEQ ID NO: 1399237 - RNA, 19 nt, Homo sapiens
  misc_RNA (1)...(19): siRNA sense strand
auauuaggcucacacagua

SEQ ID NO: 1399238 - RNA, 19 nt, Homo sapiens
  misc_RNA (1)...(19): siRNA sense strand
gcaagagauuaucaaaguc

SEQ ID NO: 1399239 - RNA, 19 nt, Homo sapiens
  misc_RNA (1)...(19): siRNA sense strand
cagaagagggcuuucacua

SEQ ID NO: 1399240 - RNA, 19 nt, Homo sapiens
  misc_RNA (1)...(19): siRNA sense strand
cuacuugguguuugauuua

SEQ ID NO: 1399241 - RNA, 19 nt, Homo sapiens
  misc_RNA (1)...(19): siRNA sense strand
acuaaagggugccaucuug

SEQ ID NO: 1399242 - RNA, 19 nt, Homo sapiens
  misc_RNA (1)...(19): siRNA sense strand
ggugagaagauguaugaaa

SEQ ID NO: 1399243 - RNA, 19 nt, Homo sapiens
  misc_RNA (1)...(19): siRNA sense strand
cagcaggcgugguuugguu

SEQ ID NO: 1399244 - RNA, 19 nt, Homo sapiens
  misc_RNA (1)...(19): siRNA sense strand
gaucaucagaaacuagaaa

SEQ ID NO: 1399245 - RNA, 19 nt, Homo sapiens
  misc_RNA (1)...(19): siRNA sense strand
agcaagagauuaucaaagu

SEQ ID NO: 1399246 - RNA, 19 nt, Homo sapiens
  misc_RNA (1)...(19): siRNA sense strand
gugagaagauguaugaaaa

SEQ ID NO: 1399247 - RNA, 19 nt, Homo sapiens
  misc_RNA (1)...(19): siRNA sense strand
uacuggaggugaacuguuu

SEQ ID NO: 1399248 - RNA, 19 nt, Homo sapiens
  misc_RNA (1)...(19): siRNA sense strand
gaaaauuccuacuggacaa

SEQ ID NO: 1399249 - RNA, 19 nt, Homo sapiens
  misc_RNA (1)...(19): siRNA sense strand
gcugaugccagucauugua

SEQ ID NO: 1399250 - RNA, 19 nt, Homo sapiens
  misc_RNA (1)...(19): siRNA sense strand
gcgacuucaugauagcaua

SEQ ID NO: 1399251 - RNA, 19 nt, Homo sapiens
  misc_RNA (1)...(19): siRNA sense strand
ucuaaacccucauguacau

SEQ ID NO: 1399252 - RNA, 19 nt, Homo sapiens
  misc_RNA (1)...(19): siRNA sense strand
caagagauuaucaaaguca

SEQ ID NO: 1399253 - RNA, 19 nt, Homo sapiens
  misc_RNA (1)...(19): siRNA sense strand
acugagaguucaaauacaa

SEQ ID NO: 1399254 - RNA, 19 nt, Homo sapiens
  misc_RNA (1)...(19): siRNA sense strand
ugaagcacccuaauauugu

SEQ ID NO: 1399255 - RNA, 19 nt, Homo sapiens
  misc_RNA (1)...(19): siRNA sense strand
gcaguggaaugccaaagac

SEQ ID NO: 1399256 - RNA, 19 nt, Homo sapiens
  misc_RNA (1)...(19): siRNA sense strand
gaauaugcugccaaaauua

SEQ ID NO: 1399257 - RNA, 19 nt, Homo sapiens
  misc_RNA (1)...(19): siRNA sense strand
auaaaccaauccacacuau

SEQ ID NO: 1399258 - RNA, 19 nt, Homo sapiens
  misc_RNA (1)...(19): siRNA sense strand
agaauaugcugccaaaauu

SEQ ID NO: 1399259 - RNA, 19 nt, Homo sapiens
  misc_RNA (1)...(19): siRNA sense strand
guggugagaagauguauga

SEQ ID NO: 1399260 - RNA, 19 nt, Homo sapiens
  misc_RNA (1)...(19): siRNA sense strand
uggcacaccuggauaucuu

SEQ ID NO: 1399261 - RNA, 19 nt, Homo sapiens
  misc_RNA (1)...(19): siRNA sense strand
cagauucuagaaaguguua

SEQ ID NO: 1399262 - RNA, 19 nt, Homo sapiens
  misc_RNA (1)...(19): siRNA sense strand
guauacagcagauucuaga

SEQ ID NO: 1399263 - RNA, 19 nt, Homo sapiens
  misc_RNA (1)...(19): siRNA sense strand
ccugaagccugagaauuug

SEQ ID NO: 1399264 - RNA, 19 nt, Homo sapiens
  misc_RNA (1)...(19): siRNA sense strand
ccaauccacacuauuauuc

SEQ ID NO: 1399265 - RNA, 19 nt, Homo sapiens
  misc_RNA (1)...(19): siRNA sense strand
uagacugcuugaagaaauu

SEQ ID NO: 1399266 - RNA, 19 nt, Homo sapiens
  misc_RNA (1)...(19): siRNA sense strand
caaagaccucaucaauaaa

SEQ ID NO: 1399267 - RNA, 19 nt, Homo sapiens
  misc_RNA (1)...(19): siRNA sense strand
ggaaagccaguggauaugu

SEQ ID NO: 1399268 - RNA, 19 nt, Homo sapiens
  misc_RNA (1)...(19): siRNA sense strand
agaaagagaagcuagaauc

SEQ ID NO: 1399269 - RNA, 19 nt, Homo sapiens
  misc_RNA (1)...(19): siRNA sense strand
ggcuggagcuuaugauuuu

SEQ ID NO: 1399270 - RNA, 19 nt, Homo sapiens
  misc_RNA (1)...(19): siRNA sense strand
caauugaggaugaagaugu

SEQ ID NO: 1399271 - RNA, 19 nt, Homo sapiens
  misc_RNA (1)...(19): siRNA sense strand
gcacugaagcacccaugga

SEQ ID NO: 1399272 - RNA, 19 nt, Homo sapiens
  misc_RNA (1)...(19): siRNA sense strand
ggugacuccugaagccaaa

SEQ ID NO: 1399273 - RNA, 19 nt, Homo sapiens
  misc_RNA (1)...(19): siRNA sense strand
uugaagcacccuaauauug

SEQ ID NO: 1399274 - RNA, 19 nt, Homo sapiens
  misc_RNA (1)...(19): siRNA sense strand
ucgaagcuaucaacaaugg

SEQ ID NO: 1399275 - RNA, 19 nt, Homo sapiens
  misc_RNA (1)...(19): siRNA sense strand
caacaauugaggaugaaga

SEQ ID NO: 1399276 - RNA, 19 nt, Homo sapiens
  misc_RNA (1)...(19): siRNA sense strand
agacauaguggcaagagaa

SEQ ID NO: 1399277 - RNA, 19 nt, Homo sapiens
  misc_RNA (1)...(19): siRNA sense strand
caccgauucuacuuugaaa

SEQ ID NO: 1399278 - RNA, 19 nt, Homo sapiens
  misc_RNA (1)...(19): siRNA sense strand
acccaggccuuacugcuuu

SEQ ID NO: 1399279 - RNA, 19 nt, Homo sapiens
  misc_RNA (1)...(19): siRNA sense strand
cgaaagcaagagauuauca

SEQ ID NO: 1399280 - RNA, 19 nt, Homo sapiens
  misc_RNA (1)...(19): siRNA sense strand
cauguggugucauucucua

SEQ ID NO: 1399281 - RNA, 19 nt, Homo sapiens
  misc_RNA (1)...(19): siRNA sense strand
ugaugccagucauuguaua

SEQ ID NO: 1399282 - RNA, 19 nt, Homo sapiens
  misc_RNA (1)...(19): siRNA sense strand
gaaacuagaaagagaagcu

SEQ ID NO: 1399283 - RNA, 19 nt, Homo sapiens
  misc_RNA (1)...(19): siRNA sense strand
cugaagcuuuggguaauuu

SEQ ID NO: 1399284 - RNA, 19 nt, Homo sapiens
  misc_RNA (1)...(19): siRNA sense strand
uaucaaagucacugaacaa

SEQ ID NO: 1399285 - RNA, 19 nt, Homo sapiens
  misc_RNA (1)...(19): siRNA sense strand
guggugucauucucuauau

SEQ ID NO: 1399286 - RNA, 19 nt, Homo sapiens
  misc_RNA (1)...(19): siRNA sense strand
gugggcauguggugucauu

SEQ ID NO: 1399287 - RNA, 19 nt, Homo sapiens
  misc_RNA (1)...(19): siRNA sense strand
cacgaaagcaagagauuau

SEQ ID NO: 1399288 - RNA, 19 nt, Homo sapiens
  misc_RNA (1)...(19): siRNA sense strand
ggcaagagaauacuacagu

SEQ ID NO: 1399289 - RNA, 19 nt, Homo sapiens
  misc_RNA (1)...(19): siRNA sense strand
agacaaugcagucagaaga

SEQ ID NO: 1399290 - RNA, 19 nt, Homo sapiens
  misc_RNA (1)...(19): siRNA sense strand
uauauuaggcucacacagu

SEQ ID NO: 1399291 - RNA, 19 nt, Homo sapiens
  misc_RNA (1)...(19): siRNA sense strand
ugaaagcacgaaagcaaga

SEQ ID NO: 1399292 - RNA, 19 nt, Homo sapiens
  misc_RNA (1)...(19): siRNA sense strand
ggaggugaacuguuugaag

SEQ ID NO: 1399293 - RNA, 19 nt, Homo sapiens
  misc_RNA (1)...(19): siRNA sense strand
gccugcauagcauauauua

SEQ ID NO: 1399294 - RNA, 19 nt, Homo sapiens
  misc_RNA (1)...(19): siRNA sense strand
caaaagcaauaaaccaauc

SEQ ID NO: 1399295 - RNA, 19 nt, Homo sapiens
  misc_RNA (1)...(19): siRNA sense strand
acguaaagauccuuaugga

SEQ ID NO: 1399296 - RNA, 19 nt, Homo sapiens
  misc_RNA (1)...(19): siRNA sense strand
gaccugaagccugagaauu

SEQ ID NO: 1399297 - RNA, 19 nt, Homo sapiens
  misc_RNA (1)...(19): siRNA sense strand
uacagcagauucuagaaag

SEQ ID NO: 1399298 - RNA, 19 nt, Homo sapiens
  misc_RNA (1)...(19): siRNA sense strand
ggugaacuguuugaagaca

SEQ ID NO: 1399299 - RNA, 19 nt, Homo sapiens
  misc_RNA (1)...(19): siRNA sense strand
gcauguaaaccacugaaga

SEQ ID NO: 1399300 - RNA, 19 nt, Homo sapiens
  misc_RNA (1)...(19): siRNA sense strand
cauguaaaccacugaagaa

SEQ ID NO: 1399301 - RNA, 19 nt, Homo sapiens
  misc_RNA (1)...(19): siRNA sense strand
gcucuuggguuuagcaaaa

SEQ ID NO: 1399302 - RNA, 19 nt, Homo sapiens
  misc_RNA (1)...(19): siRNA sense strand
aaaucugucugaugcaugu

SEQ ID NO: 1399303 - RNA, 19 nt, Homo sapiens
  misc_RNA (1)...(19): siRNA sense strand
ggcagcaucuucagcucuu

SEQ ID NO: 1399304 - RNA, 19 nt, Homo sapiens
  misc_RNA (1)...(19): siRNA sense strand
cuucagcucuuggguuuag

SEQ ID NO: 1399305 - RNA, 19 nt, Homo sapiens
  misc_RNA (1)...(19): siRNA sense strand
ccacugaagaagcgaaauc

SEQ ID NO: 1399306 - RNA, 19 nt, Homo sapiens
  misc_RNA (1)...(19): siRNA sense strand
cauccuuaacugagaauga

SEQ ID NO: 1399307 - RNA, 19 nt, Homo sapiens
  misc_RNA (1)...(19): siRNA sense strand
gcagcaucuucagcucuug

SEQ ID NO: 1399308 - RNA, 19 nt, Homo sapiens
  misc_RNA (1)...(19): siRNA sense strand
cugcauccuuaacugagaa

SEQ ID NO: 1399309 - RNA, 19 nt, Homo sapiens
  misc_RNA (1)...(19): siRNA sense strand
gcauguaaaccacugaaga

SEQ ID NO: 1399310 - RNA, 19 nt, Homo sapiens
  misc_RNA (1)...(19): siRNA sense strand
cauguaaaccacugaagaa

SEQ ID NO: 1399311 - RNA, 19 nt, Homo sapiens
  misc_RNA (1)...(19): siRNA sense strand
gcucuuggguuuagcaaaa

SEQ ID NO: 1399312 - RNA, 19 nt, Homo sapiens
  misc_RNA (1)...(19): siRNA sense strand
aaaucugucugaugcaugu

SEQ ID NO: 1399313 - RNA, 19 nt, Homo sapiens
  misc_RNA (1)...(19): siRNA sense strand
ggcagcaucuucagcucuu

SEQ ID NO: 1399314 - RNA, 19 nt, Homo sapiens
  misc_RNA (1)...(19): siRNA sense strand
cuucagcucuuggguuuag

SEQ ID NO: 1399315 - RNA, 19 nt, Homo sapiens
  misc_RNA (1)...(19): siRNA sense strand
ccacugaagaagcgaaauc

SEQ ID NO: 1399316 - RNA, 19 nt, Homo sapiens
  misc_RNA (1)...(19): siRNA sense strand
cauccuuaacugagaauga

SEQ ID NO: 1399317 - RNA, 19 nt, Homo sapiens
  misc_RNA (1)...(19): siRNA sense strand
gcagcaucuucagcucuug

SEQ ID NO: 1399318 - RNA, 19 nt, Homo sapiens
  misc_RNA (1)...(19): siRNA sense strand
cugcauccuuaacugagaa

SEQ ID NO: 1399319 - RNA, 19 nt, Homo sapiens
  misc_RNA (1)...(19): siRNA sense strand
gcauguaaaccacugaaga

SEQ ID NO: 1399320 - RNA, 19 nt, Homo sapiens
  misc_RNA (1)...(19): siRNA sense strand
cauguaaaccacugaagaa

SEQ ID NO: 1399321 - RNA, 19 nt, Homo sapiens
  misc_RNA (1)...(19): siRNA sense strand
gcucuuggguuuagcaaaa

SEQ ID NO: 1399322 - RNA, 19 nt, Homo sapiens
  misc_RNA (1)...(19): siRNA sense strand
aaaucugucugaugcaugu

SEQ ID NO: 1399323 - RNA, 19 nt, Homo sapiens
  misc_RNA (1)...(19): siRNA sense strand
ggcagcaucuucagcucuu

SEQ ID NO: 1399324 - RNA, 19 nt, Homo sapiens
  misc_RNA (1)...(19): siRNA sense strand
cuucagcucuuggguuuag

SEQ ID NO: 1399325 - RNA, 19 nt, Homo sapiens
  misc_RNA (1)...(19): siRNA sense strand
ccacugaagaagcgaaauc

SEQ ID NO: 1399326 - RNA, 19 nt, Homo sapiens
  misc_RNA (1)...(19): siRNA sense strand
cauccuuaacugagaauga

SEQ ID NO: 1399327 - RNA, 19 nt, Homo sapiens
  misc_RNA (1)...(19): siRNA sense strand
gcagcaucuucagcucuug

SEQ ID NO: 1399328 - RNA, 19 nt, Homo sapiens
  misc_RNA (1)...(19): siRNA sense strand
cugcauccuuaacugagaa

SEQ ID NO: 1399329 - RNA, 19 nt, Homo sapiens
  misc_RNA (1)...(19): siRNA sense strand
gcauguaaaccacugaaga

SEQ ID NO: 1399330 - RNA, 19 nt, Homo sapiens
  misc_RNA (1)...(19): siRNA sense strand
cauguaaaccacugaagaa

SEQ ID NO: 1399331 - RNA, 19 nt, Homo sapiens
  misc_RNA (1)...(19): siRNA sense strand
gcucuuggguuuagcaaaa

SEQ ID NO: 1399332 - RNA, 19 nt, Homo sapiens
  misc_RNA (1)...(19): siRNA sense strand
aaaucugucugaugcaugu

SEQ ID NO: 1399333 - RNA, 19 nt, Homo sapiens
  misc_RNA (1)...(19): siRNA sense strand
ggcagcaucuucagcucuu

SEQ ID NO: 1399334 - RNA, 19 nt, Homo sapiens
  misc_RNA (1)...(19): siRNA sense strand
cuucagcucuuggguuuag

SEQ ID NO: 1399335 - RNA, 19 nt, Homo sapiens
  misc_RNA (1)...(19): siRNA sense strand
ccacugaagaagcgaaauc

SEQ ID NO: 1399336 - RNA, 19 nt, Homo sapiens
  misc_RNA (1)...(19): siRNA sense strand
cauccuuaacugagaauga

SEQ ID NO: 1399337 - RNA, 19 nt, Homo sapiens
  misc_RNA (1)...(19): siRNA sense strand
gcagcaucuucagcucuug

SEQ ID NO: 1399338 - RNA, 19 nt, Homo sapiens
  misc_RNA (1)...(19): siRNA sense strand
cugcauccuuaacugagaa

SEQ ID NO: 1399339 - RNA, 19 nt, Homo sapiens
  misc_RNA (1)...(19): siRNA sense strand
gcauguaaaccacugaaga

SEQ ID NO: 1399340 - RNA, 19 nt, Homo sapiens
  misc_RNA (1)...(19): siRNA sense strand
cauguaaaccacugaagaa

SEQ ID NO: 1399341 - RNA, 19 nt, Homo sapiens
  misc_RNA (1)...(19): siRNA sense strand
gcucuuggguuuagcaaaa

SEQ ID NO: 1399342 - RNA, 19 nt, Homo sapiens
  misc_RNA (1)...(19): siRNA sense strand
aaaucugucugaugcaugu

SEQ ID NO: 1399343 - RNA, 19 nt, Homo sapiens
  misc_RNA (1)...(19): siRNA sense strand
ggcagcaucuucagcucuu

SEQ ID NO: 1399344 - RNA, 19 nt, Homo sapiens
  misc_RNA (1)...(19): siRNA sense strand
cuucagcucuuggguuuag

SEQ ID NO: 1399345 - RNA, 19 nt, Homo sapiens
  misc_RNA (1)...(19): siRNA sense strand
ccacugaagaagcgaaauc

SEQ ID NO: 1399346 - RNA, 19 nt, Homo sapiens
  misc_RNA (1)...(19): siRNA sense strand
cauccuuaacugagaauga

SEQ ID NO: 1399347 - RNA, 19 nt, Homo sapiens
  misc_RNA (1)...(19): siRNA sense strand
gcagcaucuucagcucuug

SEQ ID NO: 1399348 - RNA, 19 nt, Homo sapiens
  misc_RNA (1)...(19): siRNA sense strand
cugcauccuuaacugagaa

SEQ ID NO: 1399349 - RNA, 19 nt, Homo sapiens
  misc_RNA (1)...(19): siRNA sense strand
gcauguaaaccacugaaga

SEQ ID NO: 1399350 - RNA, 19 nt, Homo sapiens
  misc_RNA (1)...(19): siRNA sense strand
cauguaaaccacugaagaa

SEQ ID NO: 1399351 - RNA, 19 nt, Homo sapiens
  misc_RNA (1)...(19): siRNA sense strand
gcucuuggguuuagcaaaa

SEQ ID NO: 1399352 - RNA, 19 nt, Homo sapiens
  misc_RNA (1)...(19): siRNA sense strand
aaaucugucugaugcaugu

SEQ ID NO: 1399353 - RNA, 19 nt, Homo sapiens
  misc_RNA (1)...(19): siRNA sense strand
ggcagcaucuucagcucuu

SEQ ID NO: 1399354 - RNA, 19 nt, Homo sapiens
  misc_RNA (1)...(19): siRNA sense strand
cuucagcucuuggguuuag

SEQ ID NO: 1399355 - RNA, 19 nt, Homo sapiens
  misc_RNA (1)...(19): siRNA sense strand
ccacugaagaagcgaaauc

SEQ ID NO: 1399356 - RNA, 19 nt, Homo sapiens
  misc_RNA (1)...(19): siRNA sense strand
cauccuuaacugagaauga

SEQ ID NO: 1399357 - RNA, 19 nt, Homo sapiens
  misc_RNA (1)...(19): siRNA sense strand
gcagcaucuucagcucuug

SEQ ID NO: 1399358 - RNA, 19 nt, Homo sapiens
  misc_RNA (1)...(19): siRNA sense strand
cugcauccuuaacugagaa

SEQ ID NO: 1399359 - RNA, 19 nt, Homo sapiens
  misc_RNA (1)...(19): siRNA sense strand
gcauguaaaccacugaaga

SEQ ID NO: 1399360 - RNA, 19 nt, Homo sapiens
  misc_RNA (1)...(19): siRNA sense strand
cauguaaaccacugaagaa

SEQ ID NO: 1399361 - RNA, 19 nt, Homo sapiens
  misc_RNA (1)...(19): siRNA sense strand
gcucuuggguuuagcaaaa

SEQ ID NO: 1399362 - RNA, 19 nt, Homo sapiens
  misc_RNA (1)...(19): siRNA sense strand
aaaucugucugaugcaugu

SEQ ID NO: 1399363 - RNA, 19 nt, Homo sapiens
  misc_RNA (1)...(19): siRNA sense strand
ggcagcaucuucagcucuu

SEQ ID NO: 1399364 - RNA, 19 nt, Homo sapiens
  misc_RNA (1)...(19): siRNA sense strand
cuucagcucuuggguuuag

SEQ ID NO: 1399365 - RNA, 19 nt, Homo sapiens
  misc_RNA (1)...(19): siRNA sense strand
ccacugaagaagcgaaauc

SEQ ID NO: 1399366 - RNA, 19 nt, Homo sapiens
  misc_RNA (1)...(19): siRNA sense strand
cauccuuaacugagaauga

SEQ ID NO: 1399367 - RNA, 19 nt, Homo sapiens
  misc_RNA (1)...(19): siRNA sense strand
gcagcaucuucagcucuug

SEQ ID NO: 1399368 - RNA, 19 nt, Homo sapiens
  misc_RNA (1)...(19): siRNA sense strand
cugcauccuuaacugagaa

SEQ ID NO: 1399369 - RNA, 19 nt, Homo sapiens
  misc_RNA (1)...(19): siRNA sense strand
gcauguaaaccacugaaga

SEQ ID NO: 1399370 - RNA, 19 nt, Homo sapiens
  misc_RNA (1)...(19): siRNA sense strand
cauguaaaccacugaagaa

SEQ ID NO: 1399371 - RNA, 19 nt, Homo sapiens
  misc_RNA (1)...(19): siRNA sense strand
gcucuuggguuuagcaaaa

SEQ ID NO: 1399372 - RNA, 19 nt, Homo sapiens
  misc_RNA (1)...(19): siRNA sense strand
aaaucugucugaugcaugu

SEQ ID NO: 1399373 - RNA, 19 nt, Homo sapiens
  misc_RNA (1)...(19): siRNA sense strand
ggcagcaucuucagcucuu

SEQ ID NO: 1399374 - RNA, 19 nt, Homo sapiens
  misc_RNA (1)...(19): siRNA sense strand
cuucagcucuuggguuuag

SEQ ID NO: 1399375 - RNA, 19 nt, Homo sapiens
  misc_RNA (1)...(19): siRNA sense strand
ccacugaagaagcgaaauc

SEQ ID NO: 1399376 - RNA, 19 nt, Homo sapiens
  misc_RNA (1)...(19): siRNA sense strand
cauccuuaacugagaauga

SEQ ID NO: 1399377 - RNA, 19 nt, Homo sapiens
  misc_RNA (1)...(19): siRNA sense strand
gcagcaucuucagcucuug

SEQ ID NO: 1399378 - RNA, 19 nt, Homo sapiens
  misc_RNA (1)...(19): siRNA sense strand
cugcauccuuaacugagaa

SEQ ID NO: 1399379 - RNA, 19 nt, Homo sapiens
  misc_RNA (1)...(19): siRNA sense strand
gcauguaaaccacugaaga

SEQ ID NO: 1399380 - RNA, 19 nt, Homo sapiens
  misc_RNA (1)...(19): siRNA sense strand
cauguaaaccacugaagaa

SEQ ID NO: 1399381 - RNA, 19 nt, Homo sapiens
  misc_RNA (1)...(19): siRNA sense strand
gcucuuggguuuagcaaaa

SEQ ID NO: 1399382 - RNA, 19 nt, Homo sapiens
  misc_RNA (1)...(19): siRNA sense strand
aaaucugucugaugcaugu

SEQ ID NO: 1399383 - RNA, 19 nt, Homo sapiens
  misc_RNA (1)...(19): siRNA sense strand
ggcagcaucuucagcucuu

SEQ ID NO: 1399384 - RNA, 19 nt, Homo sapiens
  misc_RNA (1)...(19): siRNA sense strand
cuucagcucuuggguuuag

SEQ ID NO: 1399385 - RNA, 19 nt, Homo sapiens
  misc_RNA (1)...(19): siRNA sense strand
ccacugaagaagcgaaauc

SEQ ID NO: 1399386 - RNA, 19 nt, Homo sapiens
  misc_RNA (1)...(19): siRNA sense strand
cauccuuaacugagaauga

SEQ ID NO: 1399387 - RNA, 19 nt, Homo sapiens
  misc_RNA (1)...(19): siRNA sense strand
gcagcaucuucagcucuug

SEQ ID NO: 1399388 - RNA, 19 nt, Homo sapiens
  misc_RNA (1)...(19): siRNA sense strand
cugcauccuuaacugagaa

SEQ ID NO: 1399389 - RNA, 19 nt, Homo sapiens
  misc_RNA (1)...(19): siRNA sense strand
gcauguaaaccacugaaga

SEQ ID NO: 1399390 - RNA, 19 nt, Homo sapiens
  misc_RNA (1)...(19): siRNA sense strand
cauguaaaccacugaagaa

SEQ ID NO: 1399391 - RNA, 19 nt, Homo sapiens
  misc_RNA (1)...(19): siRNA sense strand
gcucuuggguuuagcaaaa

SEQ ID NO: 1399392 - RNA, 19 nt, Homo sapiens
  misc_RNA (1)...(19): siRNA sense strand
aaaucugucugaugcaugu

SEQ ID NO: 1399393 - RNA, 19 nt, Homo sapiens
  misc_RNA (1)...(19): siRNA sense strand
ggcagcaucuucagcucuu

SEQ ID NO: 1399394 - RNA, 19 nt, Homo sapiens
  misc_RNA (1)...(19): siRNA sense strand
cuucagcucuuggguuuag

SEQ ID NO: 1399395 - RNA, 19 nt, Homo sapiens
  misc_RNA (1)...(19): siRNA sense strand
ccacugaagaagcgaaauc

SEQ ID NO: 1399396 - RNA, 19 nt, Homo sapiens
  misc_RNA (1)...(19): siRNA sense strand
cauccuuaacugagaauga

SEQ ID NO: 1399397 - RNA, 19 nt, Homo sapiens
  misc_RNA (1)...(19): siRNA sense strand
gcagcaucuucagcucuug

SEQ ID NO: 1399398 - RNA, 19 nt, Homo sapiens
  misc_RNA (1)...(19): siRNA sense strand
cugcauccuuaacugagaa

SEQ ID NO: 1399399 - RNA, 19 nt, Homo sapiens
  misc_RNA (1)...(19): siRNA sense strand
gcauguaaaccacugaaga

SEQ ID NO: 1399400 - RNA, 19 nt, Homo sapiens
  misc_RNA (1)...(19): siRNA sense strand
cauguaaaccacugaagaa

SEQ ID NO: 1399401 - RNA, 19 nt, Homo sapiens
  misc_RNA (1)...(19): siRNA sense strand
gcucuuggguuuagcaaaa

SEQ ID NO: 1399402 - RNA, 19 nt, Homo sapiens
  misc_RNA (1)...(19): siRNA sense strand
aaaucugucugaugcaugu

SEQ ID NO: 1399403 - RNA, 19 nt, Homo sapiens
  misc_RNA (1)...(19): siRNA sense strand
ggcagcaucuucagcucuu

SEQ ID NO: 1399404 - RNA, 19 nt, Homo sapiens
  misc_RNA (1)...(19): siRNA sense strand
cuucagcucuuggguuuag

SEQ ID NO: 1399405 - RNA, 19 nt, Homo sapiens
  misc_RNA (1)...(19): siRNA sense strand
ccacugaagaagcgaaauc

SEQ ID NO: 1399406 - RNA, 19 nt, Homo sapiens
  misc_RNA (1)...(19): siRNA sense strand
cauccuuaacugagaauga

SEQ ID NO: 1399407 - RNA, 19 nt, Homo sapiens
  misc_RNA (1)...(19): siRNA sense strand
gcagcaucuucagcucuug

SEQ ID NO: 1399408 - RNA, 19 nt, Homo sapiens
  misc_RNA (1)...(19): siRNA sense strand
cugcauccuuaacugagaa

SEQ ID NO: 1399409 - RNA, 19 nt, Homo sapiens
  misc_RNA (1)...(19): siRNA sense strand
gcauguaaaccacugaaga

SEQ ID NO: 1399410 - RNA, 19 nt, Homo sapiens
  misc_RNA (1)...(19): siRNA sense strand
cauguaaaccacugaagaa

SEQ ID NO: 1399411 - RNA, 19 nt, Homo sapiens
  misc_RNA (1)...(19): siRNA sense strand
gcucuuggguuuagcaaaa

SEQ ID NO: 1399412 - RNA, 19 nt, Homo sapiens
  misc_RNA (1)...(19): siRNA sense strand
aaaucugucugaugcaugu

SEQ ID NO: 1399413 - RNA, 19 nt, Homo sapiens
  misc_RNA (1)...(19): siRNA sense strand
ggcagcaucuucagcucuu

SEQ ID NO: 1399414 - RNA, 19 nt, Homo sapiens
  misc_RNA (1)...(19): siRNA sense strand
cuucagcucuuggguuuag

SEQ ID NO: 1399415 - RNA, 19 nt, Homo sapiens
  misc_RNA (1)...(19): siRNA sense strand
ccacugaagaagcgaaauc

SEQ ID NO: 1399416 - RNA, 19 nt, Homo sapiens
  misc_RNA (1)...(19): siRNA sense strand
cauccuuaacugagaauga

SEQ ID NO: 1399417 - RNA, 19 nt, Homo sapiens
  misc_RNA (1)...(19): siRNA sense strand
gcagcaucuucagcucuug

SEQ ID NO: 1399418 - RNA, 19 nt, Homo sapiens
  misc_RNA (1)...(19): siRNA sense strand
cugcauccuuaacugagaa

SEQ ID NO: 1399419 - RNA, 19 nt, Homo sapiens
  misc_RNA (1)...(19): siRNA sense strand
gcauguaaaccacugaaga

SEQ ID NO: 1399420 - RNA, 19 nt, Homo sapiens
  misc_RNA (1)...(19): siRNA sense strand
cauguaaaccacugaagaa

SEQ ID NO: 1399421 - RNA, 19 nt, Homo sapiens
  misc_RNA (1)...(19): siRNA sense strand
gcucuuggguuuagcaaaa

SEQ ID NO: 1399422 - RNA, 19 nt, Homo sapiens
  misc_RNA (1)...(19): siRNA sense strand
aaaucugucugaugcaugu

SEQ ID NO: 1399423 - RNA, 19 nt, Homo sapiens
  misc_RNA (1)...(19): siRNA sense strand
ggcagcaucuucagcucuu

SEQ ID NO: 1399424 - RNA, 19 nt, Homo sapiens
  misc_RNA (1)...(19): siRNA sense strand
cuucagcucuuggguuuag

SEQ ID NO: 1399425 - RNA, 19 nt, Homo sapiens
  misc_RNA (1)...(19): siRNA sense strand
ccacugaagaagcgaaauc

SEQ ID NO: 1399426 - RNA, 19 nt, Homo sapiens
  misc_RNA (1)...(19): siRNA sense strand
cauccuuaacugagaauga

SEQ ID NO: 1399427 - RNA, 19 nt, Homo sapiens
  misc_RNA (1)...(19): siRNA sense strand
gcagcaucuucagcucuug

SEQ ID NO: 1399428 - RNA, 19 nt, Homo sapiens
  misc_RNA (1)...(19): siRNA sense strand
cugcauccuuaacugagaa

SEQ ID NO: 1399429 - RNA, 19 nt, Homo sapiens
  misc_RNA (1)...(19): siRNA sense strand
gcauguaaaccacugaaga

SEQ ID NO: 1399430 - RNA, 19 nt, Homo sapiens
  misc_RNA (1)...(19): siRNA sense strand
cauguaaaccacugaagaa

SEQ ID NO: 1399431 - RNA, 19 nt, Homo sapiens
  misc_RNA (1)...(19): siRNA sense strand
gcucuuggguuuagcaaaa

SEQ ID NO: 1399432 - RNA, 19 nt, Homo sapiens
  misc_RNA (1)...(19): siRNA sense strand
aaaucugucugaugcaugu

SEQ ID NO: 1399433 - RNA, 19 nt, Homo sapiens
  misc_RNA (1)...(19): siRNA sense strand
ggcagcaucuucagcucuu

SEQ ID NO: 1399434 - RNA, 19 nt, Homo sapiens
  misc_RNA (1)...(19): siRNA sense strand
cuucagcucuuggguuuag

SEQ ID NO: 1399435 - RNA, 19 nt, Homo sapiens
  misc_RNA (1)...(19): siRNA sense strand
ccacugaagaagcgaaauc

SEQ ID NO: 1399436 - RNA, 19 nt, Homo sapiens
  misc_RNA (1)...(19): siRNA sense strand
cauccuuaacugagaauga

SEQ ID NO: 1399437 - RNA, 19 nt, Homo sapiens
  misc_RNA (1)...(19): siRNA sense strand
gcagcaucuucagcucuug

SEQ ID NO: 1399438 - RNA, 19 nt, Homo sapiens
  misc_RNA (1)...(19): siRNA sense strand
cugcauccuuaacugagaa

SEQ ID NO: 1399439 - RNA, 19 nt, Homo sapiens
  misc_RNA (1)...(19): siRNA sense strand
gcauguaaaccacugaaga

SEQ ID NO: 1399440 - RNA, 19 nt, Homo sapiens
  misc_RNA (1)...(19): siRNA sense strand
cauguaaaccacugaagaa

SEQ ID NO: 1399441 - RNA, 19 nt, Homo sapiens
  misc_RNA (1)...(19): siRNA sense strand
gcucuuggguuuagcaaaa

SEQ ID NO: 1399442 - RNA, 19 nt, Homo sapiens
  misc_RNA (1)...(19): siRNA sense strand
aaaucugucugaugcaugu

SEQ ID NO: 1399443 - RNA, 19 nt, Homo sapiens
  misc_RNA (1)...(19): siRNA sense strand
ggcagcaucuucagcucuu

SEQ ID NO: 1399444 - RNA, 19 nt, Homo sapiens
  misc_RNA (1)...(19): siRNA sense strand
cuucagcucuuggguuuag

SEQ ID NO: 1399445 - RNA, 19 nt, Homo sapiens
  misc_RNA (1)...(19): siRNA sense strand
ccacugaagaagcgaaauc

SEQ ID NO: 1399446 - RNA, 19 nt, Homo sapiens
  misc_RNA (1)...(19): siRNA sense strand
cauccuuaacugagaauga

SEQ ID NO: 1399447 - RNA, 19 nt, Homo sapiens
  misc_RNA (1)...(19): siRNA sense strand
gcagcaucuucagcucuug

SEQ ID NO: 1399448 - RNA, 19 nt, Homo sapiens
  misc_RNA (1)...(19): siRNA sense strand
cugcauccuuaacugagaa

SEQ ID NO: 1399449 - RNA, 19 nt, Homo sapiens
  misc_RNA (1)...(19): siRNA sense strand
gcauguaaaccacugaaga

SEQ ID NO: 1399450 - RNA, 19 nt, Homo sapiens
  misc_RNA (1)...(19): siRNA sense strand
cauguaaaccacugaagaa

SEQ ID NO: 1399451 - RNA, 19 nt, Homo sapiens
  misc_RNA (1)...(19): siRNA sense strand
gcucuuggguuuagcaaaa

SEQ ID NO: 1399452 - RNA, 19 nt, Homo sapiens
  misc_RNA (1)...(19): siRNA sense strand
aaaucugucugaugcaugu

SEQ ID NO: 1399453 - RNA, 19 nt, Homo sapiens
  misc_RNA (1)...(19): siRNA sense strand
ggcagcaucuucagcucuu

SEQ ID NO: 1399454 - RNA, 19 nt, Homo sapiens
  misc_RNA (1)...(19): siRNA sense strand
cuucagcucuuggguuuag

SEQ ID NO: 1399455 - RNA, 19 nt, Homo sapiens
  misc_RNA (1)...(19): siRNA sense strand
ccacugaagaagcgaaauc

SEQ ID NO: 1399456 - RNA, 19 nt, Homo sapiens
  misc_RNA (1)...(19): siRNA sense strand
cauccuuaacugagaauga

SEQ ID NO: 1399457 - RNA, 19 nt, Homo sapiens
  misc_RNA (1)...(19): siRNA sense strand
gcagcaucuucagcucuug

SEQ ID NO: 1399458 - RNA, 19 nt, Homo sapiens
  misc_RNA (1)...(19): siRNA sense strand
cugcauccuuaacugagaa

SEQ ID NO: 1399459 - RNA, 19 nt, Homo sapiens
  misc_RNA (1)...(19): siRNA sense strand
ggagacagauuuagauaua

SEQ ID NO: 1399460 - RNA, 19 nt, Homo sapiens
  misc_RNA (1)...(19): siRNA sense strand
gaacugcucuggacauaug

SEQ ID NO: 1399461 - RNA, 19 nt, Homo sapiens
  misc_RNA (1)...(19): siRNA sense strand
ggacacagcaucuuugauu

SEQ ID NO: 1399462 - RNA, 19 nt, Homo sapiens
  misc_RNA (1)...(19): siRNA sense strand
gcaagagcauccacaccuu

SEQ ID NO: 1399463 - RNA, 19 nt, Homo sapiens
  misc_RNA (1)...(19): siRNA sense strand
gacacagcaucuuugauuu

SEQ ID NO: 1399464 - RNA, 19 nt, Homo sapiens
  misc_RNA (1)...(19): siRNA sense strand
cgacaggauugcagaagug

SEQ ID NO: 1399465 - RNA, 19 nt, Homo sapiens
  misc_RNA (1)...(19): siRNA sense strand
agaaguggcuggcuauagu

SEQ ID NO: 1399466 - RNA, 19 nt, Homo sapiens
  misc_RNA (1)...(19): siRNA sense strand
gagcaagggccaggcagua

SEQ ID NO: 1399467 - RNA, 19 nt, Homo sapiens
  misc_RNA (1)...(19): siRNA sense strand
cagcaucuuugauuucauc

SEQ ID NO: 1399468 - RNA, 19 nt, Homo sapiens
  misc_RNA (1)...(19): siRNA sense strand
gagacagauuuagauauag

SEQ ID NO: 1399469 - RNA, 19 nt, Homo sapiens
  misc_RNA (1)...(19): siRNA sense strand
gccacagccuggacaugaa

SEQ ID NO: 1399470 - RNA, 19 nt, Homo sapiens
  misc_RNA (1)...(19): siRNA sense strand
guggagacagauuuagaua

SEQ ID NO: 1399471 - RNA, 19 nt, Homo sapiens
  misc_RNA (1)...(19): siRNA sense strand
ggcaguggagacagauuua

SEQ ID NO: 1399472 - RNA, 19 nt, Homo sapiens
  misc_RNA (1)...(19): siRNA sense strand
cacagcaucuuugauuuca

SEQ ID NO: 1399473 - RNA, 19 nt, Homo sapiens
  misc_RNA (1)...(19): siRNA sense strand
gcagaaguggcuggcuaua

SEQ ID NO: 1399474 - RNA, 19 nt, Homo sapiens
  misc_RNA (1)...(19): siRNA sense strand
ccuggaaggugcugaacug

SEQ ID NO: 1399475 - RNA, 19 nt, Homo sapiens
  misc_RNA (1)...(19): siRNA sense strand
cugaacugcucuggacaua

SEQ ID NO: 1399476 - RNA, 19 nt, Homo sapiens
  misc_RNA (1)...(19): siRNA sense strand
cggagaguaucgucugugu

SEQ ID NO: 1399477 - RNA, 19 nt, Homo sapiens
  misc_RNA (1)...(19): siRNA sense strand
gaaugugcacagacucuuc

SEQ ID NO: 1399478 - RNA, 19 nt, Homo sapiens
  misc_RNA (1)...(19): siRNA sense strand
gcuguuccgccuacgagua

SEQ ID NO: 1399479 - RNA, 19 nt, Homo sapiens
  misc_RNA (1)...(19): siRNA sense strand
ggacauaugagggccuaca

SEQ ID NO: 1399480 - RNA, 19 nt, Homo sapiens
  misc_RNA (1)...(19): siRNA sense strand
ggauggggcuucaguagca

SEQ ID NO: 1399481 - RNA, 19 nt, Homo sapiens
  misc_RNA (1)...(19): siRNA sense strand
gcaguaacagggcaguauc

SEQ ID NO: 1399482 - RNA, 19 nt, Homo sapiens
  misc_RNA (1)...(19): siRNA sense strand
acacagcaucuuugauuuc

SEQ ID NO: 1399483 - RNA, 19 nt, Homo sapiens
  misc_RNA (1)...(19): siRNA sense strand
gagaaugugcacagacucu

SEQ ID NO: 1399484 - RNA, 19 nt, Homo sapiens
  misc_RNA (1)...(19): siRNA sense strand
uaucgucuguguccauuuu

SEQ ID NO: 1399485 - RNA, 19 nt, Homo sapiens
  misc_RNA (1)...(19): siRNA sense strand
agacagauuuagauauagc

SEQ ID NO: 1399486 - RNA, 19 nt, Homo sapiens
  misc_RNA (1)...(19): siRNA sense strand
ccgagaaugugcacagacu

SEQ ID NO: 1399487 - RNA, 19 nt, Homo sapiens
  misc_RNA (1)...(19): siRNA sense strand
cauuggacacagcaucuuu

SEQ ID NO: 1399488 - RNA, 19 nt, Homo sapiens
  misc_RNA (1)...(19): siRNA sense strand
gaaguggcuggcuauaguc

SEQ ID NO: 1399489 - RNA, 19 nt, Homo sapiens
  misc_RNA (1)...(19): siRNA sense strand
cgccacagccuggacauga

SEQ ID NO: 1399490 - RNA, 19 nt, Homo sapiens
  misc_RNA (1)...(19): siRNA sense strand
cugaggcaguggagacaga

SEQ ID NO: 1399491 - RNA, 19 nt, Homo sapiens
  misc_RNA (1)...(19): siRNA sense strand
ggcaguaacagggcaguau

SEQ ID NO: 1399492 - RNA, 19 nt, Homo sapiens
  misc_RNA (1)...(19): siRNA sense strand
gacauaugagggccuacaa

SEQ ID NO: 1399493 - RNA, 19 nt, Homo sapiens
  misc_RNA (1)...(19): siRNA sense strand
caguggagacagauuuaga

SEQ ID NO: 1399494 - RNA, 19 nt, Homo sapiens
  misc_RNA (1)...(19): siRNA sense strand
caagggccaggcaguaaca

SEQ ID NO: 1399495 - RNA, 19 nt, Homo sapiens
  misc_RNA (1)...(19): siRNA sense strand
gcaagggccaggcaguaac

SEQ ID NO: 1399496 - RNA, 19 nt, Homo sapiens
  misc_RNA (1)...(19): siRNA sense strand
caccgagaaugugcacaga

SEQ ID NO: 1399497 - RNA, 19 nt, Homo sapiens
  misc_RNA (1)...(19): siRNA sense strand
ggagacagauuuagauaua

SEQ ID NO: 1399498 - RNA, 19 nt, Homo sapiens
  misc_RNA (1)...(19): siRNA sense strand
gaacugcucuggacauaug

SEQ ID NO: 1399499 - RNA, 19 nt, Homo sapiens
  misc_RNA (1)...(19): siRNA sense strand
ggacacagcaucuuugauu

SEQ ID NO: 1399500 - RNA, 19 nt, Homo sapiens
  misc_RNA (1)...(19): siRNA sense strand
ggacaaggccucuaucaug

SEQ ID NO: 1399501 - RNA, 19 nt, Homo sapiens
  misc_RNA (1)...(19): siRNA sense strand
gcaagagcauccacaccuu

SEQ ID NO: 1399502 - RNA, 19 nt, Homo sapiens
  misc_RNA (1)...(19): siRNA sense strand
gacacagcaucuuugauuu

SEQ ID NO: 1399503 - RNA, 19 nt, Homo sapiens
  misc_RNA (1)...(19): siRNA sense strand
cgacaggauugcagaagug

SEQ ID NO: 1399504 - RNA, 19 nt, Homo sapiens
  misc_RNA (1)...(19): siRNA sense strand
agaaguggcuggcuauagu

SEQ ID NO: 1399505 - RNA, 19 nt, Homo sapiens
  misc_RNA (1)...(19): siRNA sense strand
gagcaagggccaggcagua

SEQ ID NO: 1399506 - RNA, 19 nt, Homo sapiens
  misc_RNA (1)...(19): siRNA sense strand
cagcaucuuugauuucauc

SEQ ID NO: 1399507 - RNA, 19 nt, Homo sapiens
  misc_RNA (1)...(19): siRNA sense strand
gagacagauuuagauauag

SEQ ID NO: 1399508 - RNA, 19 nt, Homo sapiens
  misc_RNA (1)...(19): siRNA sense strand
gccacagccuggacaugaa

SEQ ID NO: 1399509 - RNA, 19 nt, Homo sapiens
  misc_RNA (1)...(19): siRNA sense strand
guggagacagauuuagaua

SEQ ID NO: 1399510 - RNA, 19 nt, Homo sapiens
  misc_RNA (1)...(19): siRNA sense strand
ggcaguggagacagauuua

SEQ ID NO: 1399511 - RNA, 19 nt, Homo sapiens
  misc_RNA (1)...(19): siRNA sense strand
cacagcaucuuugauuuca

SEQ ID NO: 1399512 - RNA, 19 nt, Homo sapiens
  misc_RNA (1)...(19): siRNA sense strand
gcagaaguggcuggcuaua

SEQ ID NO: 1399513 - RNA, 19 nt, Homo sapiens
  misc_RNA (1)...(19): siRNA sense strand
ccuggaaggugcugaacug

SEQ ID NO: 1399514 - RNA, 19 nt, Homo sapiens
  misc_RNA (1)...(19): siRNA sense strand
cugaacugcucuggacaua

SEQ ID NO: 1399515 - RNA, 19 nt, Homo sapiens
  misc_RNA (1)...(19): siRNA sense strand
cggagaguaucgucugugu

SEQ ID NO: 1399516 - RNA, 19 nt, Homo sapiens
  misc_RNA (1)...(19): siRNA sense strand
gaaugugcacagacucuuc

SEQ ID NO: 1399517 - RNA, 19 nt, Homo sapiens
  misc_RNA (1)...(19): siRNA sense strand
gcuguuccgccuacgagua

SEQ ID NO: 1399518 - RNA, 19 nt, Homo sapiens
  misc_RNA (1)...(19): siRNA sense strand
agaccgaggugcuguacca

SEQ ID NO: 1399519 - RNA, 19 nt, Homo sapiens
  misc_RNA (1)...(19): siRNA sense strand
ggacauaugagggccuaca

SEQ ID NO: 1399520 - RNA, 19 nt, Homo sapiens
  misc_RNA (1)...(19): siRNA sense strand
ggauggggcuucaguagca

SEQ ID NO: 1399521 - RNA, 19 nt, Homo sapiens
  misc_RNA (1)...(19): siRNA sense strand
gcaguaacagggcaguauc

SEQ ID NO: 1399522 - RNA, 19 nt, Homo sapiens
  misc_RNA (1)...(19): siRNA sense strand
acacagcaucuuugauuuc

SEQ ID NO: 1399523 - RNA, 19 nt, Homo sapiens
  misc_RNA (1)...(19): siRNA sense strand
gagaaugugcacagacucu

SEQ ID NO: 1399524 - RNA, 19 nt, Homo sapiens
  misc_RNA (1)...(19): siRNA sense strand
uaucgucuguguccauuuu

SEQ ID NO: 1399525 - RNA, 19 nt, Homo sapiens
  misc_RNA (1)...(19): siRNA sense strand
agacagauuuagauauagc

SEQ ID NO: 1399526 - RNA, 19 nt, Homo sapiens
  misc_RNA (1)...(19): siRNA sense strand
ccgagaaugugcacagacu

SEQ ID NO: 1399527 - RNA, 19 nt, Homo sapiens
  misc_RNA (1)...(19): siRNA sense strand
gaaguggcuggcuauaguc

SEQ ID NO: 1399528 - RNA, 19 nt, Homo sapiens
  misc_RNA (1)...(19): siRNA sense strand
cauuggacacagcaucuuu

SEQ ID NO: 1399529 - RNA, 19 nt, Homo sapiens
  misc_RNA (1)...(19): siRNA sense strand
cgccacagccuggacauga

SEQ ID NO: 1399530 - RNA, 19 nt, Homo sapiens
  misc_RNA (1)...(19): siRNA sense strand
cugaggcaguggagacaga

SEQ ID NO: 1399531 - RNA, 19 nt, Homo sapiens
  misc_RNA (1)...(19): siRNA sense strand
ggcaguaacagggcaguau

SEQ ID NO: 1399532 - RNA, 19 nt, Homo sapiens
  misc_RNA (1)...(19): siRNA sense strand
gacauaugagggccuacaa

SEQ ID NO: 1399533 - RNA, 19 nt, Homo sapiens
  misc_RNA (1)...(19): siRNA sense strand
caguggagacagauuuaga

SEQ ID NO: 1399534 - RNA, 19 nt, Homo sapiens
  misc_RNA (1)...(19): siRNA sense strand
caagggccaggcaguaaca

SEQ ID NO: 1399535 - RNA, 19 nt, Homo sapiens
  misc_RNA (1)...(19): siRNA sense strand
gcaagggccaggcaguaac

SEQ ID NO: 1399536 - RNA, 19 nt, Homo sapiens
  misc_RNA (1)...(19): siRNA sense strand
caccgagaaugugcacaga

SEQ ID NO: 1399537 - RNA, 19 nt, Homo sapiens
  misc_RNA (1)...(19): siRNA sense strand
ggagacagauuuagauaua

SEQ ID NO: 1399538 - RNA, 19 nt, Homo sapiens
  misc_RNA (1)...(19): siRNA sense strand
gaacugcucuggacauaug

SEQ ID NO: 1399539 - RNA, 19 nt, Homo sapiens
  misc_RNA (1)...(19): siRNA sense strand
ggacacagcaucuuugauu

SEQ ID NO: 1399540 - RNA, 19 nt, Homo sapiens
  misc_RNA (1)...(19): siRNA sense strand
ggacaaggccucuaucaug

SEQ ID NO: 1399541 - RNA, 19 nt, Homo sapiens
  misc_RNA (1)...(19): siRNA sense strand
gcaagagcauccacaccuu

SEQ ID NO: 1399542 - RNA, 19 nt, Homo sapiens
  misc_RNA (1)...(19): siRNA sense strand
gacacagcaucuuugauuu

SEQ ID NO: 1399543 - RNA, 19 nt, Homo sapiens
  misc_RNA (1)...(19): siRNA sense strand
cgacaggauugcagaagug

SEQ ID NO: 1399544 - RNA, 19 nt, Homo sapiens
  misc_RNA (1)...(19): siRNA sense strand
agaaguggcuggcuauagu

SEQ ID NO: 1399545 - RNA, 19 nt, Homo sapiens
  misc_RNA (1)...(19): siRNA sense strand
gagcaagggccaggcagua

SEQ ID NO: 1399546 - RNA, 19 nt, Homo sapiens
  misc_RNA (1)...(19): siRNA sense strand
cagcaucuuugauuucauc

SEQ ID NO: 1399547 - RNA, 19 nt, Homo sapiens
  misc_RNA (1)...(19): siRNA sense strand
gagacagauuuagauauag

SEQ ID NO: 1399548 - RNA, 19 nt, Homo sapiens
  misc_RNA (1)...(19): siRNA sense strand
gccacagccuggacaugaa

SEQ ID NO: 1399549 - RNA, 19 nt, Homo sapiens
  misc_RNA (1)...(19): siRNA sense strand
guggagacagauuuagaua

SEQ ID NO: 1399550 - RNA, 19 nt, Homo sapiens
  misc_RNA (1)...(19): siRNA sense strand
ggcaguggagacagauuua

SEQ ID NO: 1399551 - RNA, 19 nt, Homo sapiens
  misc_RNA (1)...(19): siRNA sense strand
cacagcaucuuugauuuca

SEQ ID NO: 1399552 - RNA, 19 nt, Homo sapiens
  misc_RNA (1)...(19): siRNA sense strand
gcagaaguggcuggcuaua

SEQ ID NO: 1399553 - RNA, 19 nt, Homo sapiens
  misc_RNA (1)...(19): siRNA sense strand
ccuggaaggugcugaacug

SEQ ID NO: 1399554 - RNA, 19 nt, Homo sapiens
  misc_RNA (1)...(19): siRNA sense strand
cugaacugcucuggacaua

SEQ ID NO: 1399555 - RNA, 19 nt, Homo sapiens
  misc_RNA (1)...(19): siRNA sense strand
cggagaguaucgucugugu

SEQ ID NO: 1399556 - RNA, 19 nt, Homo sapiens
  misc_RNA (1)...(19): siRNA sense strand
gaaugugcacagacucuuc

SEQ ID NO: 1399557 - RNA, 19 nt, Homo sapiens
  misc_RNA (1)...(19): siRNA sense strand
gcuguuccgccuacgagua

SEQ ID NO: 1399558 - RNA, 19 nt, Homo sapiens
  misc_RNA (1)...(19): siRNA sense strand
agaccgaggugcuguacca

SEQ ID NO: 1399559 - RNA, 19 nt, Homo sapiens
  misc_RNA (1)...(19): siRNA sense strand
ggacauaugagggccuaca

SEQ ID NO: 1399560 - RNA, 19 nt, Homo sapiens
  misc_RNA (1)...(19): siRNA sense strand
ggauggggcuucaguagca

SEQ ID NO: 1399561 - RNA, 19 nt, Homo sapiens
  misc_RNA (1)...(19): siRNA sense strand
gcaguaacagggcaguauc

SEQ ID NO: 1399562 - RNA, 19 nt, Homo sapiens
  misc_RNA (1)...(19): siRNA sense strand
acacagcaucuuugauuuc

SEQ ID NO: 1399563 - RNA, 19 nt, Homo sapiens
  misc_RNA (1)...(19): siRNA sense strand
gagaaugugcacagacucu

SEQ ID NO: 1399564 - RNA, 19 nt, Homo sapiens
  misc_RNA (1)...(19): siRNA sense strand
uaucgucuguguccauuuu

SEQ ID NO: 1399565 - RNA, 19 nt, Homo sapiens
  misc_RNA (1)...(19): siRNA sense strand
agacagauuuagauauagc

SEQ ID NO: 1399566 - RNA, 19 nt, Homo sapiens
  misc_RNA (1)...(19): siRNA sense strand
ccgagaaugugcacagacu

SEQ ID NO: 1399567 - RNA, 19 nt, Homo sapiens
  misc_RNA (1)...(19): siRNA sense strand
gaaguggcuggcuauaguc

SEQ ID NO: 1399568 - RNA, 19 nt, Homo sapiens
  misc_RNA (1)...(19): siRNA sense strand
cauuggacacagcaucuuu

SEQ ID NO: 1399569 - RNA, 19 nt, Homo sapiens
  misc_RNA (1)...(19): siRNA sense strand
cgccacagccuggacauga

SEQ ID NO: 1399570 - RNA, 19 nt, Homo sapiens
  misc_RNA (1)...(19): siRNA sense strand
cugaggcaguggagacaga

SEQ ID NO: 1399571 - RNA, 19 nt, Homo sapiens
  misc_RNA (1)...(19): siRNA sense strand
ggcaguaacagggcaguau

SEQ ID NO: 1399572 - RNA, 19 nt, Homo sapiens
  misc_RNA (1)...(19): siRNA sense strand
gacauaugagggccuacaa

SEQ ID NO: 1399573 - RNA, 19 nt, Homo sapiens
  misc_RNA (1)...(19): siRNA sense strand
caguggagacagauuuaga

SEQ ID NO: 1399574 - RNA, 19 nt, Homo sapiens
  misc_RNA (1)...(19): siRNA sense strand
caagggccaggcaguaaca

SEQ ID NO: 1399575 - RNA, 19 nt, Homo sapiens
  misc_RNA (1)...(19): siRNA sense strand
gcaagggccaggcaguaac

SEQ ID NO: 1399576 - RNA, 19 nt, Homo sapiens
  misc_RNA (1)...(19): siRNA sense strand
caccgagaaugugcacaga

SEQ ID NO: 1399577 - RNA, 19 nt, Homo sapiens
  misc_RNA (1)...(19): siRNA sense strand
ggagacagauuuagauaua

SEQ ID NO: 1399578 - RNA, 19 nt, Homo sapiens
  misc_RNA (1)...(19): siRNA sense strand
gaacugcucuggacauaug

SEQ ID NO: 1399579 - RNA, 19 nt, Homo sapiens
  misc_RNA (1)...(19): siRNA sense strand
ggacacagcaucuuugauu

SEQ ID NO: 1399580 - RNA, 19 nt, Homo sapiens
  misc_RNA (1)...(19): siRNA sense strand
ggacaaggccucuaucaug

SEQ ID NO: 1399581 - RNA, 19 nt, Homo sapiens
  misc_RNA (1)...(19): siRNA sense strand
gcaagagcauccacaccuu

SEQ ID NO: 1399582 - RNA, 19 nt, Homo sapiens
  misc_RNA (1)...(19): siRNA sense strand
gacacagcaucuuugauuu

SEQ ID NO: 1399583 - RNA, 19 nt, Homo sapiens
  misc_RNA (1)...(19): siRNA sense strand
cgacaggauugcagaagug

SEQ ID NO: 1399584 - RNA, 19 nt, Homo sapiens
  misc_RNA (1)...(19): siRNA sense strand
agaaguggcuggcuauagu

SEQ ID NO: 1399585 - RNA, 19 nt, Homo sapiens
  misc_RNA (1)...(19): siRNA sense strand
gagcaagggccaggcagua

SEQ ID NO: 1399586 - RNA, 19 nt, Homo sapiens
  misc_RNA (1)...(19): siRNA sense strand
cagcaucuuugauuucauc

SEQ ID NO: 1399587 - RNA, 19 nt, Homo sapiens
  misc_RNA (1)...(19): siRNA sense strand
gagacagauuuagauauag

SEQ ID NO: 1399588 - RNA, 19 nt, Homo sapiens
  misc_RNA (1)...(19): siRNA sense strand
gccacagccuggacaugaa

SEQ ID NO: 1399589 - RNA, 19 nt, Homo sapiens
  misc_RNA (1)...(19): siRNA sense strand
guggagacagauuuagaua

SEQ ID NO: 1399590 - RNA, 19 nt, Homo sapiens
  misc_RNA (1)...(19): siRNA sense strand
ggcaguggagacagauuua

SEQ ID NO: 1399591 - RNA, 19 nt, Homo sapiens
  misc_RNA (1)...(19): siRNA sense strand
cacagcaucuuugauuuca

SEQ ID NO: 1399592 - RNA, 19 nt, Homo sapiens
  misc_RNA (1)...(19): siRNA sense strand
gcagaaguggcuggcuaua

SEQ ID NO: 1399593 - RNA, 19 nt, Homo sapiens
  misc_RNA (1)...(19): siRNA sense strand
ccuggaaggugcugaacug

SEQ ID NO: 1399594 - RNA, 19 nt, Homo sapiens
  misc_RNA (1)...(19): siRNA sense strand
cugaacugcucuggacaua

SEQ ID NO: 1399595 - RNA, 19 nt, Homo sapiens
  misc_RNA (1)...(19): siRNA sense strand
cggagaguaucgucugugu

SEQ ID NO: 1399596 - RNA, 19 nt, Homo sapiens
  misc_RNA (1)...(19): siRNA sense strand
gaaugugcacagacucuuc

SEQ ID NO: 1399597 - RNA, 19 nt, Homo sapiens
  misc_RNA (1)...(19): siRNA sense strand
agaccgaggugcuguacca

SEQ ID NO: 1399598 - RNA, 19 nt, Homo sapiens
  misc_RNA (1)...(19): siRNA sense strand
gcuguuccgccuacgagua

SEQ ID NO: 1399599 - RNA, 19 nt, Homo sapiens
  misc_RNA (1)...(19): siRNA sense strand
ggacauaugagggccuaca

SEQ ID NO: 1399600 - RNA, 19 nt, Homo sapiens
  misc_RNA (1)...(19): siRNA sense strand
ggauggggcuucaguagca

SEQ ID NO: 1399601 - RNA, 19 nt, Homo sapiens
  misc_RNA (1)...(19): siRNA sense strand
gcaguaacagggcaguauc

SEQ ID NO: 1399602 - RNA, 19 nt, Homo sapiens
  misc_RNA (1)...(19): siRNA sense strand
acacagcaucuuugauuuc

SEQ ID NO: 1399603 - RNA, 19 nt, Homo sapiens
  misc_RNA (1)...(19): siRNA sense strand
gagaaugugcacagacucu

SEQ ID NO: 1399604 - RNA, 19 nt, Homo sapiens
  misc_RNA (1)...(19): siRNA sense strand
uaucgucuguguccauuuu

SEQ ID NO: 1399605 - RNA, 19 nt, Homo sapiens
  misc_RNA (1)...(19): siRNA sense strand
agacagauuuagauauagc

SEQ ID NO: 1399606 - RNA, 19 nt, Homo sapiens
  misc_RNA (1)...(19): siRNA sense strand
ccgagaaugugcacagacu

SEQ ID NO: 1399607 - RNA, 19 nt, Homo sapiens
  misc_RNA (1)...(19): siRNA sense strand
gaaguggcuggcuauaguc

SEQ ID NO: 1399608 - RNA, 19 nt, Homo sapiens
  misc_RNA (1)...(19): siRNA sense strand
cauuggacacagcaucuuu

SEQ ID NO: 1399609 - RNA, 19 nt, Homo sapiens
  misc_RNA (1)...(19): siRNA sense strand
cgccacagccuggacauga

SEQ ID NO: 1399610 - RNA, 19 nt, Homo sapiens
  misc_RNA (1)...(19): siRNA sense strand
cugaggcaguggagacaga

SEQ ID NO: 1399611 - RNA, 19 nt, Homo sapiens
  misc_RNA (1)...(19): siRNA sense strand
ggcaguaacagggcaguau

SEQ ID NO: 1399612 - RNA, 19 nt, Homo sapiens
  misc_RNA (1)...(19): siRNA sense strand
gacauaugagggccuacaa

SEQ ID NO: 1399613 - RNA, 19 nt, Homo sapiens
  misc_RNA (1)...(19): siRNA sense strand
caguggagacagauuuaga

SEQ ID NO: 1399614 - RNA, 19 nt, Homo sapiens
  misc_RNA (1)...(19): siRNA sense strand
caagggccaggcaguaaca

SEQ ID NO: 1399615 - RNA, 19 nt, Homo sapiens
  misc_RNA (1)...(19): siRNA sense strand
gcaagggccaggcaguaac

SEQ ID NO: 1399616 - RNA, 19 nt, Homo sapiens
  misc_RNA (1)...(19): siRNA sense strand
caccgagaaugugcacaga

SEQ ID NO: 1399617 - RNA, 19 nt, Homo sapiens
  misc_RNA (1)...(19): siRNA sense strand
ggaaagagcuagcgcugaa

SEQ ID NO: 1399618 - RNA, 19 nt, Homo sapiens
  misc_RNA (1)...(19): siRNA sense strand
gaaacugcaugcuguugua

SEQ ID NO: 1399619 - RNA, 19 nt, Homo sapiens
  misc_RNA (1)...(19): siRNA sense strand
aaacaucagucuccaaaga

SEQ ID NO: 1399620 - RNA, 19 nt, Homo sapiens
  misc_RNA (1)...(19): siRNA sense strand
gagcagcgcuuacggaaac

SEQ ID NO: 1399621 - RNA, 19 nt, Homo sapiens
  misc_RNA (1)...(19): siRNA sense strand
gaagugauacgguuugaga

SEQ ID NO: 1399622 - RNA, 19 nt, Homo sapiens
  misc_RNA (1)...(19): siRNA sense strand
aacaauggcuccaaagaaa

SEQ ID NO: 1399623 - RNA, 19 nt, Homo sapiens
  misc_RNA (1)...(19): siRNA sense strand
caacaauggcuccaaagaa

SEQ ID NO: 1399624 - RNA, 19 nt, Homo sapiens
  misc_RNA (1)...(19): siRNA sense strand
gaaacucuagucaaccaua

SEQ ID NO: 1399625 - RNA, 19 nt, Homo sapiens
  misc_RNA (1)...(19): siRNA sense strand
guaaacaucagucuccaaa

SEQ ID NO: 1399626 - RNA, 19 nt, Homo sapiens
  misc_RNA (1)...(19): siRNA sense strand
caucaacaauggcuccaaa

SEQ ID NO: 1399627 - RNA, 19 nt, Homo sapiens
  misc_RNA (1)...(19): siRNA sense strand
uaaaucauccuaccauguu

SEQ ID NO: 1399628 - RNA, 19 nt, Homo sapiens
  misc_RNA (1)...(19): siRNA sense strand
gaacacagcccaguuugca

SEQ ID NO: 1399629 - RNA, 19 nt, Homo sapiens
  misc_RNA (1)...(19): siRNA sense strand
uugcugagcuccugaguga

SEQ ID NO: 1399630 - RNA, 19 nt, Homo sapiens
  misc_RNA (1)...(19): siRNA sense strand
aaucagacauuugguuuga

SEQ ID NO: 1399631 - RNA, 19 nt, Homo sapiens
  misc_RNA (1)...(19): siRNA sense strand
agaaccacgugaucaagua

SEQ ID NO: 1399632 - RNA, 19 nt, Homo sapiens
  misc_RNA (1)...(19): siRNA sense strand
ggccaacaaugacuucuuc

SEQ ID NO: 1399633 - RNA, 19 nt, Homo sapiens
  misc_RNA (1)...(19): siRNA sense strand
acaucagucuccaaagaua

SEQ ID NO: 1399634 - RNA, 19 nt, Homo sapiens
  misc_RNA (1)...(19): siRNA sense strand
gcuccugagugacuacauu

SEQ ID NO: 1399635 - RNA, 19 nt, Homo sapiens
  misc_RNA (1)...(19): siRNA sense strand
augagaagcuuuccgagaa

SEQ ID NO: 1399636 - RNA, 19 nt, Homo sapiens
  misc_RNA (1)...(19): siRNA sense strand
ggcaaaggccaucuccuaa

SEQ ID NO: 1399637 - RNA, 19 nt, Homo sapiens
  misc_RNA (1)...(19): siRNA sense strand
gugcuggucuccucaagau

SEQ ID NO: 1399638 - RNA, 19 nt, Homo sapiens
  misc_RNA (1)...(19): siRNA sense strand
aaaucauccuaccauguua

SEQ ID NO: 1399639 - RNA, 19 nt, Homo sapiens
  misc_RNA (1)...(19): siRNA sense strand
ugaaucagacauuugguuu

SEQ ID NO: 1399640 - RNA, 19 nt, Homo sapiens
  misc_RNA (1)...(19): siRNA sense strand
guaaaucauccuaccaugu

SEQ ID NO: 1399641 - RNA, 19 nt, Homo sapiens
  misc_RNA (1)...(19): siRNA sense strand
ccacagaugccgucagcaa

SEQ ID NO: 1399642 - RNA, 19 nt, Homo sapiens
  misc_RNA (1)...(19): siRNA sense strand
ucagagaguucuuggaaaa

SEQ ID NO: 1399643 - RNA, 19 nt, Homo sapiens
  misc_RNA (1)...(19): siRNA sense strand
ccaaggacuucaagaacca

SEQ ID NO: 1399644 - RNA, 19 nt, Homo sapiens
  misc_RNA (1)...(19): siRNA sense strand
ugauacgguuugagaaaga

SEQ ID NO: 1399645 - RNA, 19 nt, Homo sapiens
  misc_RNA (1)...(19): siRNA sense strand
gaacaggccaacaaugacu

SEQ ID NO: 1399646 - RNA, 19 nt, Homo sapiens
  misc_RNA (1)...(19): siRNA sense strand
gaaucagacauuugguuug

SEQ ID NO: 1399647 - RNA, 19 nt, Homo sapiens
  misc_RNA (1)...(19): siRNA sense strand
cgucagagaguucuuggaa

SEQ ID NO: 1399648 - RNA, 19 nt, Homo sapiens
  misc_RNA (1)...(19): siRNA sense strand
agaaagagaaauccaagga

SEQ ID NO: 1399649 - RNA, 19 nt, Homo sapiens
  misc_RNA (1)...(19): siRNA sense strand
caaagagucuagccaugcu

SEQ ID NO: 1399650 - RNA, 19 nt, Homo sapiens
  misc_RNA (1)...(19): siRNA sense strand
ggaaacugcaugcuguugu

SEQ ID NO: 1399651 - RNA, 19 nt, Homo sapiens
  misc_RNA (1)...(19): siRNA sense strand
auaacuacaucccuucuuc

SEQ ID NO: 1399652 - RNA, 19 nt, Homo sapiens
  misc_RNA (1)...(19): siRNA sense strand
ucaagaaccacgugaucaa

SEQ ID NO: 1399653 - RNA, 19 nt, Homo sapiens
  misc_RNA (1)...(19): siRNA sense strand
gugacuuucugggucuuua

SEQ ID NO: 1399654 - RNA, 19 nt, Homo sapiens
  misc_RNA (1)...(19): siRNA sense strand
ucgggugacucaauaugaa

SEQ ID NO: 1399655 - RNA, 19 nt, Homo sapiens
  misc_RNA (1)...(19): siRNA sense strand
aggaacaggccaacaauga

SEQ ID NO: 1399656 - RNA, 19 nt, Homo sapiens
  misc_RNA (1)...(19): siRNA sense strand
ccuacaaaguuacaacaca

SEQ ID NO: 1399657 - RNA, 19 nt, Homo sapiens
  misc_RNA (1)...(19): siRNA sense strand
gucagagaguucuuggaaa

SEQ ID NO: 1399658 - RNA, 19 nt, Homo sapiens
  misc_RNA (1)...(19): siRNA sense strand
gaagauuuagugacuuucu

SEQ ID NO: 1399659 - RNA, 19 nt, Homo sapiens
  misc_RNA (1)...(19): siRNA sense strand
uccaggagguagaguguga

SEQ ID NO: 1399660 - RNA, 19 nt, Homo sapiens
  misc_RNA (1)...(19): siRNA sense strand
agacacuccuuuacucaca

SEQ ID NO: 1399661 - RNA, 19 nt, Homo sapiens
  misc_RNA (1)...(19): siRNA sense strand
gaaauccaaggacuucaag

SEQ ID NO: 1399662 - RNA, 19 nt, Homo sapiens
  misc_RNA (1)...(19): siRNA sense strand
acacagcccaguuugcaaa

SEQ ID NO: 1399663 - RNA, 19 nt, Homo sapiens
  misc_RNA (1)...(19): siRNA sense strand
acagacaagcuuaccauug

SEQ ID NO: 1399664 - RNA, 19 nt, Homo sapiens
  misc_RNA (1)...(19): siRNA sense strand
aggcaaaggccaucuccua

SEQ ID NO: 1399665 - RNA, 19 nt, Homo sapiens
  misc_RNA (1)...(19): siRNA sense strand
caucagucuccaaagauaa

SEQ ID NO: 1399666 - RNA, 19 nt, Homo sapiens
  misc_RNA (1)...(19): siRNA sense strand
ugggauccaugaagaacaa

SEQ ID NO: 1399667 - RNA, 19 nt, Homo sapiens
  misc_RNA (1)...(19): siRNA sense strand
cuccaaagauaacuacauc

SEQ ID NO: 1399668 - RNA, 19 nt, Homo sapiens
  misc_RNA (1)...(19): siRNA sense strand
ucgagaggauuucaacagu

SEQ ID NO: 1399669 - RNA, 19 nt, Homo sapiens
  misc_RNA (1)...(19): siRNA sense strand
acauuugguuugaggagaa

SEQ ID NO: 1399670 - RNA, 19 nt, Homo sapiens
  misc_RNA (1)...(19): siRNA sense strand
caacagugguccgaaaaga

SEQ ID NO: 1399671 - RNA, 19 nt, Homo sapiens
  misc_RNA (1)...(19): siRNA sense strand
ucaacaauggcuccaaaga

SEQ ID NO: 1399672 - RNA, 19 nt, Homo sapiens
  misc_RNA (1)...(19): siRNA sense strand
aaacucuagucaaccauag

SEQ ID NO: 1399673 - RNA, 19 nt, Homo sapiens
  misc_RNA (1)...(19): siRNA sense strand
gcuggucuccucaagaugu

SEQ ID NO: 1399674 - RNA, 19 nt, Homo sapiens
  misc_RNA (1)...(19): siRNA sense strand
ugagaagcuuuccgagaag

SEQ ID NO: 1399675 - RNA, 19 nt, Homo sapiens
  misc_RNA (1)...(19): siRNA sense strand
gugauacgguuugagaaag

SEQ ID NO: 1399676 - RNA, 19 nt, Homo sapiens
  misc_RNA (1)...(19): siRNA sense strand
gcaaaaugaccaucaagau

SEQ ID NO: 1399677 - RNA, 19 nt, Homo sapiens
  misc_RNA (1)...(19): siRNA sense strand
aaagaagugauacgguuug

SEQ ID NO: 1399678 - RNA, 19 nt, Homo sapiens
  misc_RNA (1)...(19): siRNA sense strand
ggagcagcgcuuacggaaa

SEQ ID NO: 1399679 - RNA, 19 nt, Homo sapiens
  misc_RNA (1)...(19): siRNA sense strand
aaaguuacaacacagacaa

SEQ ID NO: 1399680 - RNA, 19 nt, Homo sapiens
  misc_RNA (1)...(19): siRNA sense strand
gauaacuacaucccuucuu

SEQ ID NO: 1399681 - RNA, 19 nt, Homo sapiens
  misc_RNA (1)...(19): siRNA sense strand
ucaagaugaaugaaucaga

SEQ ID NO: 1399682 - RNA, 19 nt, Homo sapiens
  misc_RNA (1)...(19): siRNA sense strand
uuacaacacagacaagcuu

SEQ ID NO: 1399683 - RNA, 19 nt, Homo sapiens
  misc_RNA (1)...(19): siRNA sense strand
uggcugagguggaagaaaa

SEQ ID NO: 1399684 - RNA, 19 nt, Homo sapiens
  misc_RNA (1)...(19): siRNA sense strand
aauccaaggacuucaagaa

SEQ ID NO: 1399685 - RNA, 19 nt, Homo sapiens
  misc_RNA (1)...(19): siRNA sense strand
aagaagugauacgguuuga

SEQ ID NO: 1399686 - RNA, 19 nt, Homo sapiens
  misc_RNA (1)...(19): siRNA sense strand
ccaugaagaacaagaccaa

SEQ ID NO: 1399687 - RNA, 19 nt, Homo sapiens
  misc_RNA (1)...(19): siRNA sense strand
agugaaaguugggaaggaa

SEQ ID NO: 1399688 - RNA, 19 nt, Homo sapiens
  misc_RNA (1)...(19): siRNA sense strand
ggaacaggccaacaaugac

SEQ ID NO: 1399689 - RNA, 19 nt, Homo sapiens
  misc_RNA (1)...(19): siRNA sense strand
acugcaugcuguuguagaa

SEQ ID NO: 1399690 - RNA, 19 nt, Homo sapiens
  misc_RNA (1)...(19): siRNA sense strand
gaaaguugggaaggaagau

SEQ ID NO: 1399691 - RNA, 19 nt, Homo sapiens
  misc_RNA (1)...(19): siRNA sense strand
agagaaauccaaggacuuc

SEQ ID NO: 1399692 - RNA, 19 nt, Homo sapiens
  misc_RNA (1)...(19): siRNA sense strand
ugaagaacaagaccaagag

SEQ ID NO: 1399693 - RNA, 19 nt, Homo sapiens
  misc_RNA (1)...(19): siRNA sense strand
ccaggaacaggccaacaau

SEQ ID NO: 1399694 - RNA, 19 nt, Homo sapiens
  misc_RNA (1)...(19): siRNA sense strand
uacaacacagacaagcuua

SEQ ID NO: 1399695 - RNA, 19 nt, Homo sapiens
  misc_RNA (1)...(19): siRNA sense strand
gccacaggaucucuuugca

SEQ ID NO: 1399696 - RNA, 19 nt, Homo sapiens
  misc_RNA (1)...(19): siRNA sense strand
cacagaugccgucagcaaa

SEQ ID NO: 1399697 - RNA, 19 nt, Homo sapiens
  misc_RNA (1)...(19): siRNA sense strand
caaaguuacaacacagaca

SEQ ID NO: 1399698 - RNA, 19 nt, Homo sapiens
  misc_RNA (1)...(19): siRNA sense strand
cagcccaguuugcaaagag

SEQ ID NO: 1399699 - RNA, 19 nt, Homo sapiens
  misc_RNA (1)...(19): siRNA sense strand
ugaaaguugggaaggaaga

SEQ ID NO: 1399700 - RNA, 19 nt, Homo sapiens
  misc_RNA (1)...(19): siRNA sense strand
gaaccacgugaucaaguac

SEQ ID NO: 1399701 - RNA, 19 nt, Homo sapiens
  misc_RNA (1)...(19): siRNA sense strand
agaaauccaaggacuucaa

SEQ ID NO: 1399702 - RNA, 19 nt, Homo sapiens
  misc_RNA (1)...(19): siRNA sense strand
uaccuucagaggauuguaa

SEQ ID NO: 1399703 - RNA, 19 nt, Homo sapiens
  misc_RNA (1)...(19): siRNA sense strand
caagaaccacgugaucaag

SEQ ID NO: 1399704 - RNA, 19 nt, Homo sapiens
  misc_RNA (1)...(19): siRNA sense strand
gguuugagaaagagaaauc

SEQ ID NO: 1399705 - RNA, 19 nt, Homo sapiens
  misc_RNA (1)...(19): siRNA sense strand
gauacgguuugagaaagag

SEQ ID NO: 1399706 - RNA, 19 nt, Homo sapiens
  misc_RNA (1)...(19): siRNA sense strand
agugauacgguuugagaaa

SEQ ID NO: 1399707 - RNA, 19 nt, Homo sapiens
  misc_RNA (1)...(19): siRNA sense strand
gcaugcuguuguagaaacu

SEQ ID NO: 1399708 - RNA, 19 nt, Homo sapiens
  misc_RNA (1)...(19): siRNA sense strand
gcugagcuccugagugacu

SEQ ID NO: 1399709 - RNA, 19 nt, Homo sapiens
  misc_RNA (1)...(19): siRNA sense strand
uugagacacuccuuuacuc

SEQ ID NO: 1399710 - RNA, 19 nt, Homo sapiens
  misc_RNA (1)...(19): siRNA sense strand
ggaaagagcuagcgcugaa

SEQ ID NO: 1399711 - RNA, 19 nt, Homo sapiens
  misc_RNA (1)...(19): siRNA sense strand
gaaacugcaugcuguugua

SEQ ID NO: 1399712 - RNA, 19 nt, Homo sapiens
  misc_RNA (1)...(19): siRNA sense strand
aaacaucagucuccaaaga

SEQ ID NO: 1399713 - RNA, 19 nt, Homo sapiens
  misc_RNA (1)...(19): siRNA sense strand
gagcagcgcuuacggaaac

SEQ ID NO: 1399714 - RNA, 19 nt, Homo sapiens
  misc_RNA (1)...(19): siRNA sense strand
gaagugauacgguuugaga

SEQ ID NO: 1399715 - RNA, 19 nt, Homo sapiens
  misc_RNA (1)...(19): siRNA sense strand
aacaauggcuccaaagaaa

SEQ ID NO: 1399716 - RNA, 19 nt, Homo sapiens
  misc_RNA (1)...(19): siRNA sense strand
caacaauggcuccaaagaa

SEQ ID NO: 1399717 - RNA, 19 nt, Homo sapiens
  misc_RNA (1)...(19): siRNA sense strand
gaaacucuagucaaccaua

SEQ ID NO: 1399718 - RNA, 19 nt, Homo sapiens
  misc_RNA (1)...(19): siRNA sense strand
guaaacaucagucuccaaa

SEQ ID NO: 1399719 - RNA, 19 nt, Homo sapiens
  misc_RNA (1)...(19): siRNA sense strand
caucaacaauggcuccaaa

SEQ ID NO: 1399720 - RNA, 19 nt, Homo sapiens
  misc_RNA (1)...(19): siRNA sense strand
uaaaucauccuaccauguu

SEQ ID NO: 1399721 - RNA, 19 nt, Homo sapiens
  misc_RNA (1)...(19): siRNA sense strand
gaacacagcccaguuugca

SEQ ID NO: 1399722 - RNA, 19 nt, Homo sapiens
  misc_RNA (1)...(19): siRNA sense strand
uugcugagcuccugaguga

SEQ ID NO: 1399723 - RNA, 19 nt, Homo sapiens
  misc_RNA (1)...(19): siRNA sense strand
aaucagacauuugguuuga

SEQ ID NO: 1399724 - RNA, 19 nt, Homo sapiens
  misc_RNA (1)...(19): siRNA sense strand
agaaccacgugaucaagua

SEQ ID NO: 1399725 - RNA, 19 nt, Homo sapiens
  misc_RNA (1)...(19): siRNA sense strand
ggccaacaaugacuucuuc

SEQ ID NO: 1399726 - RNA, 19 nt, Homo sapiens
  misc_RNA (1)...(19): siRNA sense strand
acaucagucuccaaagaua

SEQ ID NO: 1399727 - RNA, 19 nt, Homo sapiens
  misc_RNA (1)...(19): siRNA sense strand
gcuccugagugacuacauu

SEQ ID NO: 1399728 - RNA, 19 nt, Homo sapiens
  misc_RNA (1)...(19): siRNA sense strand
augagaagcuuuccgagaa

SEQ ID NO: 1399729 - RNA, 19 nt, Homo sapiens
  misc_RNA (1)...(19): siRNA sense strand
ggcaaaggccaucuccuaa

SEQ ID NO: 1399730 - RNA, 19 nt, Homo sapiens
  misc_RNA (1)...(19): siRNA sense strand
gugcuggucuccucaagau

SEQ ID NO: 1399731 - RNA, 19 nt, Homo sapiens
  misc_RNA (1)...(19): siRNA sense strand
aaaucauccuaccauguua

SEQ ID NO: 1399732 - RNA, 19 nt, Homo sapiens
  misc_RNA (1)...(19): siRNA sense strand
ugaaucagacauuugguuu

SEQ ID NO: 1399733 - RNA, 19 nt, Homo sapiens
  misc_RNA (1)...(19): siRNA sense strand
guaaaucauccuaccaugu

SEQ ID NO: 1399734 - RNA, 19 nt, Homo sapiens
  misc_RNA (1)...(19): siRNA sense strand
ccacagaugccgucagcaa

SEQ ID NO: 1399735 - RNA, 19 nt, Homo sapiens
  misc_RNA (1)...(19): siRNA sense strand
ucagagaguucuuggaaaa

SEQ ID NO: 1399736 - RNA, 19 nt, Homo sapiens
  misc_RNA (1)...(19): siRNA sense strand
ccaaggacuucaagaacca

SEQ ID NO: 1399737 - RNA, 19 nt, Homo sapiens
  misc_RNA (1)...(19): siRNA sense strand
ugauacgguuugagaaaga

SEQ ID NO: 1399738 - RNA, 19 nt, Homo sapiens
  misc_RNA (1)...(19): siRNA sense strand
gaacaggccaacaaugacu

SEQ ID NO: 1399739 - RNA, 19 nt, Homo sapiens
  misc_RNA (1)...(19): siRNA sense strand
gaaucagacauuugguuug

SEQ ID NO: 1399740 - RNA, 19 nt, Homo sapiens
  misc_RNA (1)...(19): siRNA sense strand
cgucagagaguucuuggaa

SEQ ID NO: 1399741 - RNA, 19 nt, Homo sapiens
  misc_RNA (1)...(19): siRNA sense strand
agaaagagaaauccaagga

SEQ ID NO: 1399742 - RNA, 19 nt, Homo sapiens
  misc_RNA (1)...(19): siRNA sense strand
caaagagucuagccaugcu

SEQ ID NO: 1399743 - RNA, 19 nt, Homo sapiens
  misc_RNA (1)...(19): siRNA sense strand
ggaaacugcaugcuguugu

SEQ ID NO: 1399744 - RNA, 19 nt, Homo sapiens
  misc_RNA (1)...(19): siRNA sense strand
auaacuacaucccuucuuc

SEQ ID NO: 1399745 - RNA, 19 nt, Homo sapiens
  misc_RNA (1)...(19): siRNA sense strand
ucaagaaccacgugaucaa

SEQ ID NO: 1399746 - RNA, 19 nt, Homo sapiens
  misc_RNA (1)...(19): siRNA sense strand
gugacuuucugggucuuua

SEQ ID NO: 1399747 - RNA, 19 nt, Homo sapiens
  misc_RNA (1)...(19): siRNA sense strand
ucgggugacucaauaugaa

SEQ ID NO: 1399748 - RNA, 19 nt, Homo sapiens
  misc_RNA (1)...(19): siRNA sense strand
aggaacaggccaacaauga

SEQ ID NO: 1399749 - RNA, 19 nt, Homo sapiens
  misc_RNA (1)...(19): siRNA sense strand
ccuacaaaguuacaacaca

SEQ ID NO: 1399750 - RNA, 19 nt, Homo sapiens
  misc_RNA (1)...(19): siRNA sense strand
gucagagaguucuuggaaa

SEQ ID NO: 1399751 - RNA, 19 nt, Homo sapiens
  misc_RNA (1)...(19): siRNA sense strand
gaagauuuagugacuuucu

SEQ ID NO: 1399752 - RNA, 19 nt, Homo sapiens
  misc_RNA (1)...(19): siRNA sense strand
uccaggagguagaguguga

SEQ ID NO: 1399753 - RNA, 19 nt, Homo sapiens
  misc_RNA (1)...(19): siRNA sense strand
agacacuccuuuacucaca

SEQ ID NO: 1399754 - RNA, 19 nt, Homo sapiens
  misc_RNA (1)...(19): siRNA sense strand
gaaauccaaggacuucaag

SEQ ID NO: 1399755 - RNA, 19 nt, Homo sapiens
  misc_RNA (1)...(19): siRNA sense strand
acacagcccaguuugcaaa

SEQ ID NO: 1399756 - RNA, 19 nt, Homo sapiens
  misc_RNA (1)...(19): siRNA sense strand
acagacaagcuuaccauug

SEQ ID NO: 1399757 - RNA, 19 nt, Homo sapiens
  misc_RNA (1)...(19): siRNA sense strand
aggcaaaggccaucuccua

SEQ ID NO: 1399758 - RNA, 19 nt, Homo sapiens
  misc_RNA (1)...(19): siRNA sense strand
caucagucuccaaagauaa

SEQ ID NO: 1399759 - RNA, 19 nt, Homo sapiens
  misc_RNA (1)...(19): siRNA sense strand
ugggauccaugaagaacaa

SEQ ID NO: 1399760 - RNA, 19 nt, Homo sapiens
  misc_RNA (1)...(19): siRNA sense strand
cuccaaagauaacuacauc

SEQ ID NO: 1399761 - RNA, 19 nt, Homo sapiens
  misc_RNA (1)...(19): siRNA sense strand
ucgagaggauuucaacagu

SEQ ID NO: 1399762 - RNA, 19 nt, Homo sapiens
  misc_RNA (1)...(19): siRNA sense strand
acauuugguuugaggagaa

SEQ ID NO: 1399763 - RNA, 19 nt, Homo sapiens
  misc_RNA (1)...(19): siRNA sense strand
caacagugguccgaaaaga

SEQ ID NO: 1399764 - RNA, 19 nt, Homo sapiens
  misc_RNA (1)...(19): siRNA sense strand
ucaacaauggcuccaaaga

SEQ ID NO: 1399765 - RNA, 19 nt, Homo sapiens
  misc_RNA (1)...(19): siRNA sense strand
aaacucuagucaaccauag

SEQ ID NO: 1399766 - RNA, 19 nt, Homo sapiens
  misc_RNA (1)...(19): siRNA sense strand
gcuggucuccucaagaugu

SEQ ID NO: 1399767 - RNA, 19 nt, Homo sapiens
  misc_RNA (1)...(19): siRNA sense strand
ugagaagcuuuccgagaag

SEQ ID NO: 1399768 - RNA, 19 nt, Homo sapiens
  misc_RNA (1)...(19): siRNA sense strand
gugauacgguuugagaaag

SEQ ID NO: 1399769 - RNA, 19 nt, Homo sapiens
  misc_RNA (1)...(19): siRNA sense strand
gcaaaaugaccaucaagau

SEQ ID NO: 1399770 - RNA, 19 nt, Homo sapiens
  misc_RNA (1)...(19): siRNA sense strand
aaagaagugauacgguuug

SEQ ID NO: 1399771 - RNA, 19 nt, Homo sapiens
  misc_RNA (1)...(19): siRNA sense strand
ggagcagcgcuuacggaaa

SEQ ID NO: 1399772 - RNA, 19 nt, Homo sapiens
  misc_RNA (1)...(19): siRNA sense strand
aaaguuacaacacagacaa

SEQ ID NO: 1399773 - RNA, 19 nt, Homo sapiens
  misc_RNA (1)...(19): siRNA sense strand
gauaacuacaucccuucuu

SEQ ID NO: 1399774 - RNA, 19 nt, Homo sapiens
  misc_RNA (1)...(19): siRNA sense strand
ucaagaugaaugaaucaga

SEQ ID NO: 1399775 - RNA, 19 nt, Homo sapiens
  misc_RNA (1)...(19): siRNA sense strand
uuacaacacagacaagcuu

SEQ ID NO: 1399776 - RNA, 19 nt, Homo sapiens
  misc_RNA (1)...(19): siRNA sense strand
uggcugagguggaagaaaa

SEQ ID NO: 1399777 - RNA, 19 nt, Homo sapiens
  misc_RNA (1)...(19): siRNA sense strand
aauccaaggacuucaagaa

SEQ ID NO: 1399778 - RNA, 19 nt, Homo sapiens
  misc_RNA (1)...(19): siRNA sense strand
aagaagugauacgguuuga

SEQ ID NO: 1399779 - RNA, 19 nt, Homo sapiens
  misc_RNA (1)...(19): siRNA sense strand
ccaugaagaacaagaccaa

SEQ ID NO: 1399780 - RNA, 19 nt, Homo sapiens
  misc_RNA (1)...(19): siRNA sense strand
agugaaaguugggaaggaa

SEQ ID NO: 1399781 - RNA, 19 nt, Homo sapiens
  misc_RNA (1)...(19): siRNA sense strand
ggaacaggccaacaaugac

SEQ ID NO: 1399782 - RNA, 19 nt, Homo sapiens
  misc_RNA (1)...(19): siRNA sense strand
acugcaugcuguuguagaa

SEQ ID NO: 1399783 - RNA, 19 nt, Homo sapiens
  misc_RNA (1)...(19): siRNA sense strand
gaaaguugggaaggaagau

SEQ ID NO: 1399784 - RNA, 19 nt, Homo sapiens
  misc_RNA (1)...(19): siRNA sense strand
agagaaauccaaggacuuc

SEQ ID NO: 1399785 - RNA, 19 nt, Homo sapiens
  misc_RNA (1)...(19): siRNA sense strand
ugaagaacaagaccaagag

SEQ ID NO: 1399786 - RNA, 19 nt, Homo sapiens
  misc_RNA (1)...(19): siRNA sense strand
ccaggaacaggccaacaau

SEQ ID NO: 1399787 - RNA, 19 nt, Homo sapiens
  misc_RNA (1)...(19): siRNA sense strand
uacaacacagacaagcuua

SEQ ID NO: 1399788 - RNA, 19 nt, Homo sapiens
  misc_RNA (1)...(19): siRNA sense strand
gccacaggaucucuuugca

SEQ ID NO: 1399789 - RNA, 19 nt, Homo sapiens
  misc_RNA (1)...(19): siRNA sense strand
cacagaugccgucagcaaa

SEQ ID NO: 1399790 - RNA, 19 nt, Homo sapiens
  misc_RNA (1)...(19): siRNA sense strand
caaaguuacaacacagaca

SEQ ID NO: 1399791 - RNA, 19 nt, Homo sapiens
  misc_RNA (1)...(19): siRNA sense strand
cagcccaguuugcaaagag

SEQ ID NO: 1399792 - RNA, 19 nt, Homo sapiens
  misc_RNA (1)...(19): siRNA sense strand
ugaaaguugggaaggaaga

SEQ ID NO: 1399793 - RNA, 19 nt, Homo sapiens
  misc_RNA (1)...(19): siRNA sense strand
gaaccacgugaucaaguac

SEQ ID NO: 1399794 - RNA, 19 nt, Homo sapiens
  misc_RNA (1)...(19): siRNA sense strand
agaaauccaaggacuucaa

SEQ ID NO: 1399795 - RNA, 19 nt, Homo sapiens
  misc_RNA (1)...(19): siRNA sense strand
uaccuucagaggauuguaa

SEQ ID NO: 1399796 - RNA, 19 nt, Homo sapiens
  misc_RNA (1)...(19): siRNA sense strand
caagaaccacgugaucaag

SEQ ID NO: 1399797 - RNA, 19 nt, Homo sapiens
  misc_RNA (1)...(19): siRNA sense strand
gguuugagaaagagaaauc

SEQ ID NO: 1399798 - RNA, 19 nt, Homo sapiens
  misc_RNA (1)...(19): siRNA sense strand
gauacgguuugagaaagag

SEQ ID NO: 1399799 - RNA, 19 nt, Homo sapiens
  misc_RNA (1)...(19): siRNA sense strand
agugauacgguuugagaaa

SEQ ID NO: 1399800 - RNA, 19 nt, Homo sapiens
  misc_RNA (1)...(19): siRNA sense strand
gcaugcuguuguagaaacu

SEQ ID NO: 1399801 - RNA, 19 nt, Homo sapiens
  misc_RNA (1)...(19): siRNA sense strand
gcugagcuccugagugacu

SEQ ID NO: 1399802 - RNA, 19 nt, Homo sapiens
  misc_RNA (1)...(19): siRNA sense strand
uugagacacuccuuuacuc

SEQ ID NO: 1399803 - RNA, 19 nt, Homo sapiens
  misc_RNA (1)...(19): siRNA sense strand
ggaaagagcuagcgcugaa

SEQ ID NO: 1399804 - RNA, 19 nt, Homo sapiens
  misc_RNA (1)...(19): siRNA sense strand
gaaacugcaugcuguugua

SEQ ID NO: 1399805 - RNA, 19 nt, Homo sapiens
  misc_RNA (1)...(19): siRNA sense strand
aaacaucagucuccaaaga

SEQ ID NO: 1399806 - RNA, 19 nt, Homo sapiens
  misc_RNA (1)...(19): siRNA sense strand
gagcagcgcuuacggaaac

SEQ ID NO: 1399807 - RNA, 19 nt, Homo sapiens
  misc_RNA (1)...(19): siRNA sense strand
gaagugauacgguuugaga

SEQ ID NO: 1399808 - RNA, 19 nt, Homo sapiens
  misc_RNA (1)...(19): siRNA sense strand
aacaauggcuccaaagaaa

SEQ ID NO: 1399809 - RNA, 19 nt, Homo sapiens
  misc_RNA (1)...(19): siRNA sense strand
caacaauggcuccaaagaa

SEQ ID NO: 1399810 - RNA, 19 nt, Homo sapiens
  misc_RNA (1)...(19): siRNA sense strand
gaaacucuagucaaccaua

SEQ ID NO: 1399811 - RNA, 19 nt, Homo sapiens
  misc_RNA (1)...(19): siRNA sense strand
guaaacaucagucuccaaa

SEQ ID NO: 1399812 - RNA, 19 nt, Homo sapiens
  misc_RNA (1)...(19): siRNA sense strand
caucaacaauggcuccaaa

SEQ ID NO: 1399813 - RNA, 19 nt, Homo sapiens
  misc_RNA (1)...(19): siRNA sense strand
uaaaucauccuaccauguu

SEQ ID NO: 1399814 - RNA, 19 nt, Homo sapiens
  misc_RNA (1)...(19): siRNA sense strand
gaacacagcccaguuugca

SEQ ID NO: 1399815 - RNA, 19 nt, Homo sapiens
  misc_RNA (1)...(19): siRNA sense strand
uugcugagcuccugaguga

SEQ ID NO: 1399816 - RNA, 19 nt, Homo sapiens
  misc_RNA (1)...(19): siRNA sense strand
aaucagacauuugguuuga

SEQ ID NO: 1399817 - RNA, 19 nt, Homo sapiens
  misc_RNA (1)...(19): siRNA sense strand
agaaccacgugaucaagua

SEQ ID NO: 1399818 - RNA, 19 nt, Homo sapiens
  misc_RNA (1)...(19): siRNA sense strand
ggccaacaaugacuucuuc

SEQ ID NO: 1399819 - RNA, 19 nt, Homo sapiens
  misc_RNA (1)...(19): siRNA sense strand
acaucagucuccaaagaua

SEQ ID NO: 1399820 - RNA, 19 nt, Homo sapiens
  misc_RNA (1)...(19): siRNA sense strand
gcuccugagugacuacauu

SEQ ID NO: 1399821 - RNA, 19 nt, Homo sapiens
  misc_RNA (1)...(19): siRNA sense strand
augagaagcuuuccgagaa

SEQ ID NO: 1399822 - RNA, 19 nt, Homo sapiens
  misc_RNA (1)...(19): siRNA sense strand
ggcaaaggccaucuccuaa

SEQ ID NO: 1399823 - RNA, 19 nt, Homo sapiens
  misc_RNA (1)...(19): siRNA sense strand
gugcuggucuccucaagau

SEQ ID NO: 1399824 - RNA, 19 nt, Homo sapiens
  misc_RNA (1)...(19): siRNA sense strand
aaaucauccuaccauguua

SEQ ID NO: 1399825 - RNA, 19 nt, Homo sapiens
  misc_RNA (1)...(19): siRNA sense strand
ugaaucagacauuugguuu

SEQ ID NO: 1399826 - RNA, 19 nt, Homo sapiens
  misc_RNA (1)...(19): siRNA sense strand
guaaaucauccuaccaugu

SEQ ID NO: 1399827 - RNA, 19 nt, Homo sapiens
  misc_RNA (1)...(19): siRNA sense strand
ccacagaugccgucagcaa

SEQ ID NO: 1399828 - RNA, 19 nt, Homo sapiens
  misc_RNA (1)...(19): siRNA sense strand
ucagagaguucuuggaaaa

SEQ ID NO: 1399829 - RNA, 19 nt, Homo sapiens
  misc_RNA (1)...(19): siRNA sense strand
ccaaggacuucaagaacca

SEQ ID NO: 1399830 - RNA, 19 nt, Homo sapiens
  misc_RNA (1)...(19): siRNA sense strand
ugauacgguuugagaaaga

SEQ ID NO: 1399831 - RNA, 19 nt, Homo sapiens
  misc_RNA (1)...(19): siRNA sense strand
gaacaggccaacaaugacu

SEQ ID NO: 1399832 - RNA, 19 nt, Homo sapiens
  misc_RNA (1)...(19): siRNA sense strand
gaaucagacauuugguuug

SEQ ID NO: 1399833 - RNA, 19 nt, Homo sapiens
  misc_RNA (1)...(19): siRNA sense strand
cgucagagaguucuuggaa

SEQ ID NO: 1399834 - RNA, 19 nt, Homo sapiens
  misc_RNA (1)...(19): siRNA sense strand
agaaagagaaauccaagga

SEQ ID NO: 1399835 - RNA, 19 nt, Homo sapiens
  misc_RNA (1)...(19): siRNA sense strand
caaagagucuagccaugcu

SEQ ID NO: 1399836 - RNA, 19 nt, Homo sapiens
  misc_RNA (1)...(19): siRNA sense strand
ggaaacugcaugcuguugu

SEQ ID NO: 1399837 - RNA, 19 nt, Homo sapiens
  misc_RNA (1)...(19): siRNA sense strand
auaacuacaucccuucuuc

SEQ ID NO: 1399838 - RNA, 19 nt, Homo sapiens
  misc_RNA (1)...(19): siRNA sense strand
ucaagaaccacgugaucaa

SEQ ID NO: 1399839 - RNA, 19 nt, Homo sapiens
  misc_RNA (1)...(19): siRNA sense strand
gugacuuucugggucuuua

SEQ ID NO: 1399840 - RNA, 19 nt, Homo sapiens
  misc_RNA (1)...(19): siRNA sense strand
ucgggugacucaauaugaa

SEQ ID NO: 1399841 - RNA, 19 nt, Homo sapiens
  misc_RNA (1)...(19): siRNA sense strand
aggaacaggccaacaauga

SEQ ID NO: 1399842 - RNA, 19 nt, Homo sapiens
  misc_RNA (1)...(19): siRNA sense strand
ccuacaaaguuacaacaca

SEQ ID NO: 1399843 - RNA, 19 nt, Homo sapiens
  misc_RNA (1)...(19): siRNA sense strand
gucagagaguucuuggaaa

SEQ ID NO: 1399844 - RNA, 19 nt, Homo sapiens
  misc_RNA (1)...(19): siRNA sense strand
gaagauuuagugacuuucu

SEQ ID NO: 1399845 - RNA, 19 nt, Homo sapiens
  misc_RNA (1)...(19): siRNA sense strand
uccaggagguagaguguga

SEQ ID NO: 1399846 - RNA, 19 nt, Homo sapiens
  misc_RNA (1)...(19): siRNA sense strand
agacacuccuuuacucaca

SEQ ID NO: 1399847 - RNA, 19 nt, Homo sapiens
  misc_RNA (1)...(19): siRNA sense strand
gaaauccaaggacuucaag

SEQ ID NO: 1399848 - RNA, 19 nt, Homo sapiens
  misc_RNA (1)...(19): siRNA sense strand
acacagcccaguuugcaaa

SEQ ID NO: 1399849 - RNA, 19 nt, Homo sapiens
  misc_RNA (1)...(19): siRNA sense strand
acagacaagcuuaccauug

SEQ ID NO: 1399850 - RNA, 19 nt, Homo sapiens
  misc_RNA (1)...(19): siRNA sense strand
aggcaaaggccaucuccua

SEQ ID NO: 1399851 - RNA, 19 nt, Homo sapiens
  misc_RNA (1)...(19): siRNA sense strand
caucagucuccaaagauaa

SEQ ID NO: 1399852 - RNA, 19 nt, Homo sapiens
  misc_RNA (1)...(19): siRNA sense strand
ugggauccaugaagaacaa

SEQ ID NO: 1399853 - RNA, 19 nt, Homo sapiens
  misc_RNA (1)...(19): siRNA sense strand
cuccaaagauaacuacauc

SEQ ID NO: 1399854 - RNA, 19 nt, Homo sapiens
  misc_RNA (1)...(19): siRNA sense strand
ucgagaggauuucaacagu

SEQ ID NO: 1399855 - RNA, 19 nt, Homo sapiens
  misc_RNA (1)...(19): siRNA sense strand
acauuugguuugaggagaa

SEQ ID NO: 1399856 - RNA, 19 nt, Homo sapiens
  misc_RNA (1)...(19): siRNA sense strand
caacagugguccgaaaaga

SEQ ID NO: 1399857 - RNA, 19 nt, Homo sapiens
  misc_RNA (1)...(19): siRNA sense strand
ucaacaauggcuccaaaga

SEQ ID NO: 1399858 - RNA, 19 nt, Homo sapiens
  misc_RNA (1)...(19): siRNA sense strand
aaacucuagucaaccauag

SEQ ID NO: 1399859 - RNA, 19 nt, Homo sapiens
  misc_RNA (1)...(19): siRNA sense strand
gcuggucuccucaagaugu

SEQ ID NO: 1399860 - RNA, 19 nt, Homo sapiens
  misc_RNA (1)...(19): siRNA sense strand
ugagaagcuuuccgagaag

SEQ ID NO: 1399861 - RNA, 19 nt, Homo sapiens
  misc_RNA (1)...(19): siRNA sense strand
gugauacgguuugagaaag

SEQ ID NO: 1399862 - RNA, 19 nt, Homo sapiens
  misc_RNA (1)...(19): siRNA sense strand
gcaaaaugaccaucaagau

SEQ ID NO: 1399863 - RNA, 19 nt, Homo sapiens
  misc_RNA (1)...(19): siRNA sense strand
aaagaagugauacgguuug

SEQ ID NO: 1399864 - RNA, 19 nt, Homo sapiens
  misc_RNA (1)...(19): siRNA sense strand
ggagcagcgcuuacggaaa

SEQ ID NO: 1399865 - RNA, 19 nt, Homo sapiens
  misc_RNA (1)...(19): siRNA sense strand
aaaguuacaacacagacaa

SEQ ID NO: 1399866 - RNA, 19 nt, Homo sapiens
  misc_RNA (1)...(19): siRNA sense strand
gauaacuacaucccuucuu

SEQ ID NO: 1399867 - RNA, 19 nt, Homo sapiens
  misc_RNA (1)...(19): siRNA sense strand
ucaagaugaaugaaucaga

SEQ ID NO: 1399868 - RNA, 19 nt, Homo sapiens
  misc_RNA (1)...(19): siRNA sense strand
uuacaacacagacaagcuu

SEQ ID NO: 1399869 - RNA, 19 nt, Homo sapiens
  misc_RNA (1)...(19): siRNA sense strand
uggcugagguggaagaaaa

SEQ ID NO: 1399870 - RNA, 19 nt, Homo sapiens
  misc_RNA (1)...(19): siRNA sense strand
aauccaaggacuucaagaa

SEQ ID NO: 1399871 - RNA, 19 nt, Homo sapiens
  misc_RNA (1)...(19): siRNA sense strand
aagaagugauacgguuuga

SEQ ID NO: 1399872 - RNA, 19 nt, Homo sapiens
  misc_RNA (1)...(19): siRNA sense strand
ccaugaagaacaagaccaa

SEQ ID NO: 1399873 - RNA, 19 nt, Homo sapiens
  misc_RNA (1)...(19): siRNA sense strand
agugaaaguugggaaggaa

SEQ ID NO: 1399874 - RNA, 19 nt, Homo sapiens
  misc_RNA (1)...(19): siRNA sense strand
ggaacaggccaacaaugac

SEQ ID NO: 1399875 - RNA, 19 nt, Homo sapiens
  misc_RNA (1)...(19): siRNA sense strand
acugcaugcuguuguagaa

SEQ ID NO: 1399876 - RNA, 19 nt, Homo sapiens
  misc_RNA (1)...(19): siRNA sense strand
gaaaguugggaaggaagau

SEQ ID NO: 1399877 - RNA, 19 nt, Homo sapiens
  misc_RNA (1)...(19): siRNA sense strand
agagaaauccaaggacuuc

SEQ ID NO: 1399878 - RNA, 19 nt, Homo sapiens
  misc_RNA (1)...(19): siRNA sense strand
ugaagaacaagaccaagag

SEQ ID NO: 1399879 - RNA, 19 nt, Homo sapiens
  misc_RNA (1)...(19): siRNA sense strand
ccaggaacaggccaacaau

SEQ ID NO: 1399880 - RNA, 19 nt, Homo sapiens
  misc_RNA (1)...(19): siRNA sense strand
uacaacacagacaagcuua

SEQ ID NO: 1399881 - RNA, 19 nt, Homo sapiens
  misc_RNA (1)...(19): siRNA sense strand
gccacaggaucucuuugca

SEQ ID NO: 1399882 - RNA, 19 nt, Homo sapiens
  misc_RNA (1)...(19): siRNA sense strand
cacagaugccgucagcaaa

SEQ ID NO: 1399883 - RNA, 19 nt, Homo sapiens
  misc_RNA (1)...(19): siRNA sense strand
caaaguuacaacacagaca

SEQ ID NO: 1399884 - RNA, 19 nt, Homo sapiens
  misc_RNA (1)...(19): siRNA sense strand
cagcccaguuugcaaagag

SEQ ID NO: 1399885 - RNA, 19 nt, Homo sapiens
  misc_RNA (1)...(19): siRNA sense strand
ugaaaguugggaaggaaga

SEQ ID NO: 1399886 - RNA, 19 nt, Homo sapiens
  misc_RNA (1)...(19): siRNA sense strand
gaaccacgugaucaaguac

SEQ ID NO: 1399887 - RNA, 19 nt, Homo sapiens
  misc_RNA (1)...(19): siRNA sense strand
agaaauccaaggacuucaa

SEQ ID NO: 1399888 - RNA, 19 nt, Homo sapiens
  misc_RNA (1)...(19): siRNA sense strand
uaccuucagaggauuguaa

SEQ ID NO: 1399889 - RNA, 19 nt, Homo sapiens
  misc_RNA (1)...(19): siRNA sense strand
caagaaccacgugaucaag

SEQ ID NO: 1399890 - RNA, 19 nt, Homo sapiens
  misc_RNA (1)...(19): siRNA sense strand
gguuugagaaagagaaauc

SEQ ID NO: 1399891 - RNA, 19 nt, Homo sapiens
  misc_RNA (1)...(19): siRNA sense strand
gauacgguuugagaaagag

SEQ ID NO: 1399892 - RNA, 19 nt, Homo sapiens
  misc_RNA (1)...(19): siRNA sense strand
agugauacgguuugagaaa

SEQ ID NO: 1399893 - RNA, 19 nt, Homo sapiens
  misc_RNA (1)...(19): siRNA sense strand
gcaugcuguuguagaaacu

SEQ ID NO: 1399894 - RNA, 19 nt, Homo sapiens
  misc_RNA (1)...(19): siRNA sense strand
gcugagcuccugagugacu

SEQ ID NO: 1399895 - RNA, 19 nt, Homo sapiens
  misc_RNA (1)...(19): siRNA sense strand
uugagacacuccuuuacuc

SEQ ID NO: 1399896 - RNA, 19 nt, Homo sapiens
  misc_RNA (1)...(19): siRNA sense strand
uagaggagaugauggaaua

SEQ ID NO: 1399897 - RNA, 19 nt, Homo sapiens
  misc_RNA (1)...(19): siRNA sense strand
gaugauggaauauuugaug

SEQ ID NO: 1399898 - RNA, 19 nt, Homo sapiens
  misc_RNA (1)...(19): siRNA sense strand
gauaaaagcuauacuccau

SEQ ID NO: 1399899 - RNA, 19 nt, Homo sapiens
  misc_RNA (1)...(19): siRNA sense strand
aggagaugauggaauauuu

SEQ ID NO: 1399900 - RNA, 19 nt, Homo sapiens
  misc_RNA (1)...(19): siRNA sense strand
gauggaauauuugaugaca

SEQ ID NO: 1399901 - RNA, 19 nt, Homo sapiens
  misc_RNA (1)...(19): siRNA sense strand
gagaugauggaauauuuga

SEQ ID NO: 1399902 - RNA, 19 nt, Homo sapiens
  misc_RNA (1)...(19): siRNA sense strand
aacaagggcuggagcaguu

SEQ ID NO: 1399903 - RNA, 19 nt, Homo sapiens
  misc_RNA (1)...(19): siRNA sense strand
gaacguugucuucacaugu

SEQ ID NO: 1399904 - RNA, 19 nt, Homo sapiens
  misc_RNA (1)...(19): siRNA sense strand
ggagaugauggaauauuug

SEQ ID NO: 1399905 - RNA, 19 nt, Homo sapiens
  misc_RNA (1)...(19): siRNA sense strand
aaagcuauacuccaucuaa

SEQ ID NO: 1399906 - RNA, 19 nt, Homo sapiens
  misc_RNA (1)...(19): siRNA sense strand
gggcuggagcaguuuauaa

SEQ ID NO: 1399907 - RNA, 19 nt, Homo sapiens
  misc_RNA (1)...(19): siRNA sense strand
gaugugagcaacccgcaaa

SEQ ID NO: 1399908 - RNA, 19 nt, Homo sapiens
  misc_RNA (1)...(19): siRNA sense strand
aagcuauacuccaucuaaa

SEQ ID NO: 1399909 - RNA, 19 nt, Homo sapiens
  misc_RNA (1)...(19): siRNA sense strand
gaggagaugauggaauauu

SEQ ID NO: 1399910 - RNA, 19 nt, Homo sapiens
  misc_RNA (1)...(19): siRNA sense strand
cuucaccacuuacgaaauc

SEQ ID NO: 1399911 - RNA, 19 nt, Homo sapiens
  misc_RNA (1)...(19): siRNA sense strand
caaggucgcuggucauccu

SEQ ID NO: 1399912 - RNA, 19 nt, Homo sapiens
  misc_RNA (1)...(19): siRNA sense strand
ggcuggagcaguuuauaaa

SEQ ID NO: 1399913 - RNA, 19 nt, Homo sapiens
  misc_RNA (1)...(19): siRNA sense strand
cgaacguugucuucacaug

SEQ ID NO: 1399914 - RNA, 19 nt, Homo sapiens
  misc_RNA (1)...(19): siRNA sense strand
caagggcuggagcaguuua

SEQ ID NO: 1399915 - RNA, 19 nt, Homo sapiens
  misc_RNA (1)...(19): siRNA sense strand
aacguugucuucacauguu

SEQ ID NO: 1399916 - RNA, 19 nt, Homo sapiens
  misc_RNA (1)...(19): siRNA sense strand
ccaagccgcagaaccugaa

SEQ ID NO: 1399917 - RNA, 19 nt, Homo sapiens
  misc_RNA (1)...(19): siRNA sense strand
ccagcaacuuccucgagau

SEQ ID NO: 1399918 - RNA, 19 nt, Homo sapiens
  misc_RNA (1)...(19): siRNA sense strand
uaaaagcuauacuccaucu

SEQ ID NO: 1399919 - RNA, 19 nt, Homo sapiens
  misc_RNA (1)...(19): siRNA sense strand
uagaggagaugauggaaua

SEQ ID NO: 1399920 - RNA, 19 nt, Homo sapiens
  misc_RNA (1)...(19): siRNA sense strand
gaugauggaauauuugaug

SEQ ID NO: 1399921 - RNA, 19 nt, Homo sapiens
  misc_RNA (1)...(19): siRNA sense strand
gauaaaagcuauacuccau

SEQ ID NO: 1399922 - RNA, 19 nt, Homo sapiens
  misc_RNA (1)...(19): siRNA sense strand
aggagaugauggaauauuu

SEQ ID NO: 1399923 - RNA, 19 nt, Homo sapiens
  misc_RNA (1)...(19): siRNA sense strand
gauggaauauuugaugaca

SEQ ID NO: 1399924 - RNA, 19 nt, Homo sapiens
  misc_RNA (1)...(19): siRNA sense strand
gagaugauggaauauuuga

SEQ ID NO: 1399925 - RNA, 19 nt, Homo sapiens
  misc_RNA (1)...(19): siRNA sense strand
aacaagggcuggagcaguu

SEQ ID NO: 1399926 - RNA, 19 nt, Homo sapiens
  misc_RNA (1)...(19): siRNA sense strand
gaacguugucuucacaugu

SEQ ID NO: 1399927 - RNA, 19 nt, Homo sapiens
  misc_RNA (1)...(19): siRNA sense strand
ggagaugauggaauauuug

SEQ ID NO: 1399928 - RNA, 19 nt, Homo sapiens
  misc_RNA (1)...(19): siRNA sense strand
aaagcuauacuccaucuaa

SEQ ID NO: 1399929 - RNA, 19 nt, Homo sapiens
  misc_RNA (1)...(19): siRNA sense strand
gggcuggagcaguuuauaa

SEQ ID NO: 1399930 - RNA, 19 nt, Homo sapiens
  misc_RNA (1)...(19): siRNA sense strand
gaugugagcaacccgcaaa

SEQ ID NO: 1399931 - RNA, 19 nt, Homo sapiens
  misc_RNA (1)...(19): siRNA sense strand
aagcuauacuccaucuaaa

SEQ ID NO: 1399932 - RNA, 19 nt, Homo sapiens
  misc_RNA (1)...(19): siRNA sense strand
gaggagaugauggaauauu

SEQ ID NO: 1399933 - RNA, 19 nt, Homo sapiens
  misc_RNA (1)...(19): siRNA sense strand
cuucaccacuuacgaaauc

SEQ ID NO: 1399934 - RNA, 19 nt, Homo sapiens
  misc_RNA (1)...(19): siRNA sense strand
caaggucgcuggucauccu

SEQ ID NO: 1399935 - RNA, 19 nt, Homo sapiens
  misc_RNA (1)...(19): siRNA sense strand
ggcuggagcaguuuauaaa

SEQ ID NO: 1399936 - RNA, 19 nt, Homo sapiens
  misc_RNA (1)...(19): siRNA sense strand
cgaacguugucuucacaug

SEQ ID NO: 1399937 - RNA, 19 nt, Homo sapiens
  misc_RNA (1)...(19): siRNA sense strand
caagggcuggagcaguuua

SEQ ID NO: 1399938 - RNA, 19 nt, Homo sapiens
  misc_RNA (1)...(19): siRNA sense strand
aacguugucuucacauguu

SEQ ID NO: 1399939 - RNA, 19 nt, Homo sapiens
  misc_RNA (1)...(19): siRNA sense strand
ccaagccgcagaaccugaa

SEQ ID NO: 1399940 - RNA, 19 nt, Homo sapiens
  misc_RNA (1)...(19): siRNA sense strand
ccagcaacuuccucgagau

SEQ ID NO: 1399941 - RNA, 19 nt, Homo sapiens
  misc_RNA (1)...(19): siRNA sense strand
uaaaagcuauacuccaucu

SEQ ID NO: 1399942 - RNA, 19 nt, Homo sapiens
  misc_RNA (1)...(19): siRNA sense strand
gaugugagcaacccgcaaa

SEQ ID NO: 1399943 - RNA, 19 nt, Homo sapiens
  misc_RNA (1)...(19): siRNA sense strand
cuucaccacuuacgaaauc

SEQ ID NO: 1399944 - RNA, 19 nt, Homo sapiens
  misc_RNA (1)...(19): siRNA sense strand
ccaagccgcagaaccugaa

SEQ ID NO: 1399945 - RNA, 19 nt, Homo sapiens
  misc_RNA (1)...(19): siRNA sense strand
ccagcaacuuccucgagau

SEQ ID NO: 1399946 - RNA, 19 nt, Homo sapiens
  misc_RNA (1)...(19): siRNA sense strand
uagaggagaugauggaaua

SEQ ID NO: 1399947 - RNA, 19 nt, Homo sapiens
  misc_RNA (1)...(19): siRNA sense strand
gaugauggaauauuugaug

SEQ ID NO: 1399948 - RNA, 19 nt, Homo sapiens
  misc_RNA (1)...(19): siRNA sense strand
gauaaaagcuauacuccau

SEQ ID NO: 1399949 - RNA, 19 nt, Homo sapiens
  misc_RNA (1)...(19): siRNA sense strand
aggagaugauggaauauuu

SEQ ID NO: 1399950 - RNA, 19 nt, Homo sapiens
  misc_RNA (1)...(19): siRNA sense strand
gauggaauauuugaugaca

SEQ ID NO: 1399951 - RNA, 19 nt, Homo sapiens
  misc_RNA (1)...(19): siRNA sense strand
gagaugauggaauauuuga

SEQ ID NO: 1399952 - RNA, 19 nt, Homo sapiens
  misc_RNA (1)...(19): siRNA sense strand
aacaagggcuggagcaguu

SEQ ID NO: 1399953 - RNA, 19 nt, Homo sapiens
  misc_RNA (1)...(19): siRNA sense strand
gaacguugucuucacaugu

SEQ ID NO: 1399954 - RNA, 19 nt, Homo sapiens
  misc_RNA (1)...(19): siRNA sense strand
ggagaugauggaauauuug

SEQ ID NO: 1399955 - RNA, 19 nt, Homo sapiens
  misc_RNA (1)...(19): siRNA sense strand
aaagcuauacuccaucuaa

SEQ ID NO: 1399956 - RNA, 19 nt, Homo sapiens
  misc_RNA (1)...(19): siRNA sense strand
gggcuggagcaguuuauaa

SEQ ID NO: 1399957 - RNA, 19 nt, Homo sapiens
  misc_RNA (1)...(19): siRNA sense strand
gaugugagcaacccgcaaa

SEQ ID NO: 1399958 - RNA, 19 nt, Homo sapiens
  misc_RNA (1)...(19): siRNA sense strand
aagcuauacuccaucuaaa

SEQ ID NO: 1399959 - RNA, 19 nt, Homo sapiens
  misc_RNA (1)...(19): siRNA sense strand
gaggagaugauggaauauu

SEQ ID NO: 1399960 - RNA, 19 nt, Homo sapiens
  misc_RNA (1)...(19): siRNA sense strand
cuucaccacuuacgaaauc

SEQ ID NO: 1399961 - RNA, 19 nt, Homo sapiens
  misc_RNA (1)...(19): siRNA sense strand
caaggucgcuggucauccu

SEQ ID NO: 1399962 - RNA, 19 nt, Homo sapiens
  misc_RNA (1)...(19): siRNA sense strand
ggcuggagcaguuuauaaa

SEQ ID NO: 1399963 - RNA, 19 nt, Homo sapiens
  misc_RNA (1)...(19): siRNA sense strand
cgaacguugucuucacaug

SEQ ID NO: 1399964 - RNA, 19 nt, Homo sapiens
  misc_RNA (1)...(19): siRNA sense strand
caagggcuggagcaguuua

SEQ ID NO: 1399965 - RNA, 19 nt, Homo sapiens
  misc_RNA (1)...(19): siRNA sense strand
aacguugucuucacauguu

SEQ ID NO: 1399966 - RNA, 19 nt, Homo sapiens
  misc_RNA (1)...(19): siRNA sense strand
ccaagccgcagaaccugaa

SEQ ID NO: 1399967 - RNA, 19 nt, Homo sapiens
  misc_RNA (1)...(19): siRNA sense strand
ccagcaacuuccucgagau

SEQ ID NO: 1399968 - RNA, 19 nt, Homo sapiens
  misc_RNA (1)...(19): siRNA sense strand
uaaaagcuauacuccaucu

SEQ ID NO: 1399969 - RNA, 19 nt, Homo sapiens
  misc_RNA (1)...(19): siRNA sense strand
uagaggagaugauggaaua

SEQ ID NO: 1399970 - RNA, 19 nt, Homo sapiens
  misc_RNA (1)...(19): siRNA sense strand
gaugauggaauauuugaug

SEQ ID NO: 1399971 - RNA, 19 nt, Homo sapiens
  misc_RNA (1)...(19): siRNA sense strand
gauaaaagcuauacuccau

SEQ ID NO: 1399972 - RNA, 19 nt, Homo sapiens
  misc_RNA (1)...(19): siRNA sense strand
aggagaugauggaauauuu

SEQ ID NO: 1399973 - RNA, 19 nt, Homo sapiens
  misc_RNA (1)...(19): siRNA sense strand
gauggaauauuugaugaca

SEQ ID NO: 1399974 - RNA, 19 nt, Homo sapiens
  misc_RNA (1)...(19): siRNA sense strand
gagaugauggaauauuuga

SEQ ID NO: 1399975 - RNA, 19 nt, Homo sapiens
  misc_RNA (1)...(19): siRNA sense strand
aacaagggcuggagcaguu

SEQ ID NO: 1399976 - RNA, 19 nt, Homo sapiens
  misc_RNA (1)...(19): siRNA sense strand
gaacguugucuucacaugu

SEQ ID NO: 1399977 - RNA, 19 nt, Homo sapiens
  misc_RNA (1)...(19): siRNA sense strand
ggagaugauggaauauuug

SEQ ID NO: 1399978 - RNA, 19 nt, Homo sapiens
  misc_RNA (1)...(19): siRNA sense strand
aaagcuauacuccaucuaa

SEQ ID NO: 1399979 - RNA, 19 nt, Homo sapiens
  misc_RNA (1)...(19): siRNA sense strand
gggcuggagcaguuuauaa

SEQ ID NO: 1399980 - RNA, 19 nt, Homo sapiens
  misc_RNA (1)...(19): siRNA sense strand
gaugugagcaacccgcaaa

SEQ ID NO: 1399981 - RNA, 19 nt, Homo sapiens
  misc_RNA (1)...(19): siRNA sense strand
aagcuauacuccaucuaaa

SEQ ID NO: 1399982 - RNA, 19 nt, Homo sapiens
  misc_RNA (1)...(19): siRNA sense strand
gaggagaugauggaauauu

SEQ ID NO: 1399983 - RNA, 19 nt, Homo sapiens
  misc_RNA (1)...(19): siRNA sense strand
cuucaccacuuacgaaauc

SEQ ID NO: 1399984 - RNA, 19 nt, Homo sapiens
  misc_RNA (1)...(19): siRNA sense strand
caaggucgcuggucauccu

SEQ ID NO: 1399985 - RNA, 19 nt, Homo sapiens
  misc_RNA (1)...(19): siRNA sense strand
ggcuggagcaguuuauaaa

SEQ ID NO: 1399986 - RNA, 19 nt, Homo sapiens
  misc_RNA (1)...(19): siRNA sense strand
cgaacguugucuucacaug

SEQ ID NO: 1399987 - RNA, 19 nt, Homo sapiens
  misc_RNA (1)...(19): siRNA sense strand
caagggcuggagcaguuua

SEQ ID NO: 1399988 - RNA, 19 nt, Homo sapiens
  misc_RNA (1)...(19): siRNA sense strand
aacguugucuucacauguu

SEQ ID NO: 1399989 - RNA, 19 nt, Homo sapiens
  misc_RNA (1)...(19): siRNA sense strand
ccaagccgcagaaccugaa

SEQ ID NO: 1399990 - RNA, 19 nt, Homo sapiens
  misc_RNA (1)...(19): siRNA sense strand
ccagcaacuuccucgagau

SEQ ID NO: 1399991 - RNA, 19 nt, Homo sapiens
  misc_RNA (1)...(19): siRNA sense strand
uaaaagcuauacuccaucu

SEQ ID NO: 1399992 - RNA, 19 nt, Homo sapiens
  misc_RNA (1)...(19): siRNA sense strand
gaugugagcaacccgcaaa

SEQ ID NO: 1399993 - RNA, 19 nt, Homo sapiens
  misc_RNA (1)...(19): siRNA sense strand
cuucaccacuuacgaaauc

SEQ ID NO: 1399994 - RNA, 19 nt, Homo sapiens
  misc_RNA (1)...(19): siRNA sense strand
ccaagccgcagaaccugaa

SEQ ID NO: 1399995 - RNA, 19 nt, Homo sapiens
  misc_RNA (1)...(19): siRNA sense strand
ccagcaacuuccucgagau

SEQ ID NO: 1399996 - RNA, 19 nt, Homo sapiens
  misc_RNA (1)...(19): siRNA sense strand
gagagaagcuucccaaagg

SEQ ID NO: 1399997 - RNA, 19 nt, Homo sapiens
  misc_RNA (1)...(19): siRNA sense strand
aagcaaaggugaaggauga

SEQ ID NO: 1399998 - RNA, 19 nt, Homo sapiens
  misc_RNA (1)...(19): siRNA sense strand
gagaucagcucgguugucu

SEQ ID NO: 1399999 - RNA, 19 nt, Homo sapiens
  misc_RNA (1)...(19): siRNA sense strand
ggagagaagcuucccaaag

SEQ ID NO: 1400000 - RNA, 19 nt, Homo sapiens
  misc_RNA (1)...(19): siRNA sense strand
uaaaccagcuccuccaaaa

SEQ ID NO: 1400001 - RNA, 19 nt, Homo sapiens
  misc_RNA (1)...(19): siRNA sense strand
aaaccgagaugccucuaca

SEQ ID NO: 1400002 - RNA, 19 nt, Homo sapiens
  misc_RNA (1)...(19): siRNA sense strand
uaaaggugauaaagcaaag

SEQ ID NO: 1400003 - RNA, 19 nt, Homo sapiens
  misc_RNA (1)...(19): siRNA sense strand
ucagcucgguugucugcua

SEQ ID NO: 1400004 - RNA, 19 nt, Homo sapiens
  misc_RNA (1)...(19): siRNA sense strand
cagcucgguugucugcuaa

SEQ ID NO: 1400005 - RNA, 19 nt, Homo sapiens
  misc_RNA (1)...(19): siRNA sense strand
aaaaggagaugcuaaaggu

SEQ ID NO: 1400006 - RNA, 19 nt, Homo sapiens
  misc_RNA (1)...(19): siRNA sense strand
cuaaaggugauaaagcaaa

SEQ ID NO: 1400007 - RNA, 19 nt, Homo sapiens
  misc_RNA (1)...(19): siRNA sense strand
aaaggccucugcaaagaag

SEQ ID NO: 1400008 - RNA, 19 nt, Homo sapiens
  misc_RNA (1)...(19): siRNA sense strand
ggagaugcuaaaggugaua

SEQ ID NO: 1400009 - RNA, 19 nt, Homo sapiens
  misc_RNA (1)...(19): siRNA sense strand
aaccagagcccaggccuaa

SEQ ID NO: 1400010 - RNA, 19 nt, Homo sapiens
  misc_RNA (1)...(19): siRNA sense strand
gagaugcuaaaggugauaa

SEQ ID NO: 1400011 - RNA, 19 nt, Homo sapiens
  misc_RNA (1)...(19): siRNA sense strand
caaagaagggagagaagcu

SEQ ID NO: 1400012 - RNA, 19 nt, Homo sapiens
  misc_RNA (1)...(19): siRNA sense strand
gaugggaacaacccugcaa

SEQ ID NO: 1400013 - RNA, 19 nt, Homo sapiens
  misc_RNA (1)...(19): siRNA sense strand
gcuaaaccagcuccuccaa

SEQ ID NO: 1400014 - RNA, 19 nt, Homo sapiens
  misc_RNA (1)...(19): siRNA sense strand
cuaaaccagcuccuccaaa

SEQ ID NO: 1400015 - RNA, 19 nt, Homo sapiens
  misc_RNA (1)...(19): siRNA sense strand
gcuaaaggugauaaagcaa

SEQ ID NO: 1400016 - RNA, 19 nt, Homo sapiens
  misc_RNA (1)...(19): siRNA sense strand
gugauaaagcaaaggugaa

SEQ ID NO: 1400017 - RNA, 19 nt, Homo sapiens
  misc_RNA (1)...(19): siRNA sense strand
caagagaaaggcaaaagga

SEQ ID NO: 1400018 - RNA, 19 nt, Homo sapiens
  misc_RNA (1)...(19): siRNA sense strand
acacuccagucccagaaag

SEQ ID NO: 1400019 - RNA, 19 nt, Homo sapiens
  misc_RNA (1)...(19): siRNA sense strand
aagaaugucuccaucaaua

SEQ ID NO: 1400020 - RNA, 19 nt, Homo sapiens
  misc_RNA (1)...(19): siRNA sense strand
ucaauacaguuaccuauga

SEQ ID NO: 1400021 - RNA, 19 nt, Homo sapiens
  misc_RNA (1)...(19): siRNA sense strand
ggaagaagcagcuggcaaa

SEQ ID NO: 1400022 - RNA, 19 nt, Homo sapiens
  misc_RNA (1)...(19): siRNA sense strand
cgaaagggcuggcuaugau

SEQ ID NO: 1400023 - RNA, 19 nt, Homo sapiens
  misc_RNA (1)...(19): siRNA sense strand
ggaagaaugagaagcuaua

SEQ ID NO: 1400024 - RNA, 19 nt, Homo sapiens
  misc_RNA (1)...(19): siRNA sense strand
ugaaggagauggagcaguu

SEQ ID NO: 1400025 - RNA, 19 nt, Homo sapiens
  misc_RNA (1)...(19): siRNA sense strand
ccagagaggugaaggagau

SEQ ID NO: 1400026 - RNA, 19 nt, Homo sapiens
  misc_RNA (1)...(19): siRNA sense strand
gccaugaacuccugguuga

SEQ ID NO: 1400027 - RNA, 19 nt, Homo sapiens
  misc_RNA (1)...(19): siRNA sense strand
gggcuuaggucacgagcaa

SEQ ID NO: 1400028 - RNA, 19 nt, Homo sapiens
  misc_RNA (1)...(19): siRNA sense strand
gaaagggcuggcuaugaua

SEQ ID NO: 1400029 - RNA, 19 nt, Homo sapiens
  misc_RNA (1)...(19): siRNA sense strand
gcaaugaagaggaucgaaa

SEQ ID NO: 1400030 - RNA, 19 nt, Homo sapiens
  misc_RNA (1)...(19): siRNA sense strand
aaacuaaagucagauggaa

SEQ ID NO: 1400031 - RNA, 19 nt, Homo sapiens
  misc_RNA (1)...(19): siRNA sense strand
gauguccucuugagcaaug

SEQ ID NO: 1400032 - RNA, 19 nt, Homo sapiens
  misc_RNA (1)...(19): siRNA sense strand
guuaugauauugacgaauc

SEQ ID NO: 1400033 - RNA, 19 nt, Homo sapiens
  misc_RNA (1)...(19): siRNA sense strand
agaagaaugucuccaucaa

SEQ ID NO: 1400034 - RNA, 19 nt, Homo sapiens
  misc_RNA (1)...(19): siRNA sense strand
gcaaacugaguaugaaaga

SEQ ID NO: 1400035 - RNA, 19 nt, Homo sapiens
  misc_RNA (1)...(19): siRNA sense strand
gaacucaauauuccugcua

SEQ ID NO: 1400036 - RNA, 19 nt, Homo sapiens
  misc_RNA (1)...(19): siRNA sense strand
agaagcagcuggcaaagca

SEQ ID NO: 1400037 - RNA, 19 nt, Homo sapiens
  misc_RNA (1)...(19): siRNA sense strand
gggaguaggagaugucaaa

SEQ ID NO: 1400038 - RNA, 19 nt, Homo sapiens
  misc_RNA (1)...(19): siRNA sense strand
gaaucacgcuguggugugu

SEQ ID NO: 1400039 - RNA, 19 nt, Homo sapiens
  misc_RNA (1)...(19): siRNA sense strand
aaacacuucugcugcuuug

SEQ ID NO: 1400040 - RNA, 19 nt, Homo sapiens
  misc_RNA (1)...(19): siRNA sense strand
gaaacacuucugcugcuuu

SEQ ID NO: 1400041 - RNA, 19 nt, Homo sapiens
  misc_RNA (1)...(19): siRNA sense strand
gaagaaugucuccaucaau

SEQ ID NO: 1400042 - RNA, 19 nt, Homo sapiens
  misc_RNA (1)...(19): siRNA sense strand
cgggugaccuauaacaauu

SEQ ID NO: 1400043 - RNA, 19 nt, Homo sapiens
  misc_RNA (1)...(19): siRNA sense strand
ggaauucccauguauaaac

SEQ ID NO: 1400044 - RNA, 19 nt, Homo sapiens
  misc_RNA (1)...(19): siRNA sense strand
aguaggagaugucaaacuu

SEQ ID NO: 1400045 - RNA, 19 nt, Homo sapiens
  misc_RNA (1)...(19): siRNA sense strand
ugucaaggaugccacaaug

SEQ ID NO: 1400046 - RNA, 19 nt, Homo sapiens
  misc_RNA (1)...(19): siRNA sense strand
ucaguggaauguaagaaga

SEQ ID NO: 1400047 - RNA, 19 nt, Homo sapiens
  misc_RNA (1)...(19): siRNA sense strand
caaaagaacucaauauucc

SEQ ID NO: 1400048 - RNA, 19 nt, Homo sapiens
  misc_RNA (1)...(19): siRNA sense strand
uauacgugauggucaauga

SEQ ID NO: 1400049 - RNA, 19 nt, Homo sapiens
  misc_RNA (1)...(19): siRNA sense strand
caaacugaguaugaaagaa

SEQ ID NO: 1400050 - RNA, 19 nt, Homo sapiens
  misc_RNA (1)...(19): siRNA sense strand
gcugcaaacugaguaugaa

SEQ ID NO: 1400051 - RNA, 19 nt, Homo sapiens
  misc_RNA (1)...(19): siRNA sense strand
gaaguucaugccaguagaa

SEQ ID NO: 1400052 - RNA, 19 nt, Homo sapiens
  misc_RNA (1)...(19): siRNA sense strand
ugcaagcccugcuauguga

SEQ ID NO: 1400053 - RNA, 19 nt, Homo sapiens
  misc_RNA (1)...(19): siRNA sense strand
ugacugugauagcauucua

SEQ ID NO: 1400054 - RNA, 19 nt, Homo sapiens
  misc_RNA (1)...(19): siRNA sense strand
gaccaggacccuucaaagu

SEQ ID NO: 1400055 - RNA, 19 nt, Homo sapiens
  misc_RNA (1)...(19): siRNA sense strand
gauauucagcaaugaguau

SEQ ID NO: 1400056 - RNA, 19 nt, Homo sapiens
  misc_RNA (1)...(19): siRNA sense strand
ucuguucaguggaauguaa

SEQ ID NO: 1400057 - RNA, 19 nt, Homo sapiens
  misc_RNA (1)...(19): siRNA sense strand
gcaaguguggccaagaaga

SEQ ID NO: 1400058 - RNA, 19 nt, Homo sapiens
  misc_RNA (1)...(19): siRNA sense strand
gauauugacgaauccaguu

SEQ ID NO: 1400059 - RNA, 19 nt, Homo sapiens
  misc_RNA (1)...(19): siRNA sense strand
uggagcaguuugugaagaa

SEQ ID NO: 1400060 - RNA, 19 nt, Homo sapiens
  misc_RNA (1)...(19): siRNA sense strand
gaagacaccaaguauacca

SEQ ID NO: 1400061 - RNA, 19 nt, Homo sapiens
  misc_RNA (1)...(19): siRNA sense strand
gauucgaacugcacuucug

SEQ ID NO: 1400062 - RNA, 19 nt, Homo sapiens
  misc_RNA (1)...(19): siRNA sense strand
ggagcaguuugugaagaaa

SEQ ID NO: 1400063 - RNA, 19 nt, Homo sapiens
  misc_RNA (1)...(19): siRNA sense strand
gagauggagcaguuuguga

SEQ ID NO: 1400064 - RNA, 19 nt, Homo sapiens
  misc_RNA (1)...(19): siRNA sense strand
gaaugucuccaucaauaca

SEQ ID NO: 1400065 - RNA, 19 nt, Homo sapiens
  misc_RNA (1)...(19): siRNA sense strand
auaccacucugauugcaaa

SEQ ID NO: 1400066 - RNA, 19 nt, Homo sapiens
  misc_RNA (1)...(19): siRNA sense strand
gcacaaaagaacucaauau

SEQ ID NO: 1400067 - RNA, 19 nt, Homo sapiens
  misc_RNA (1)...(19): siRNA sense strand
cugcaaguguggccaagaa

SEQ ID NO: 1400068 - RNA, 19 nt, Homo sapiens
  misc_RNA (1)...(19): siRNA sense strand
caaguauaccacucugauu

SEQ ID NO: 1400069 - RNA, 19 nt, Homo sapiens
  misc_RNA (1)...(19): siRNA sense strand
ggugaccuauaacaauuuc

SEQ ID NO: 1400070 - RNA, 19 nt, Homo sapiens
  misc_RNA (1)...(19): siRNA sense strand
ccugcuaugugaagaauca

SEQ ID NO: 1400071 - RNA, 19 nt, Homo sapiens
  misc_RNA (1)...(19): siRNA sense strand
gaauucccauguauaaacg

SEQ ID NO: 1400072 - RNA, 19 nt, Homo sapiens
  misc_RNA (1)...(19): siRNA sense strand
gaaugagaagcuauacugu

SEQ ID NO: 1400073 - RNA, 19 nt, Homo sapiens
  misc_RNA (1)...(19): siRNA sense strand
ugcagcgggugaccuauaa

SEQ ID NO: 1400074 - RNA, 19 nt, Homo sapiens
  misc_RNA (1)...(19): siRNA sense strand
gaacuccugguugacauga

SEQ ID NO: 1400075 - RNA, 19 nt, Homo sapiens
  misc_RNA (1)...(19): siRNA sense strand
gaauguaagaagaggaugu

SEQ ID NO: 1400076 - RNA, 19 nt, Homo sapiens
  misc_RNA (1)...(19): siRNA sense strand
gugcagcgggugaccuaua

SEQ ID NO: 1400077 - RNA, 19 nt, Homo sapiens
  misc_RNA (1)...(19): siRNA sense strand
agauauacgugauggucaa

SEQ ID NO: 1400078 - RNA, 19 nt, Homo sapiens
  misc_RNA (1)...(19): siRNA sense strand
agaauuggcaccugaaaca

SEQ ID NO: 1400079 - RNA, 19 nt, Homo sapiens
  misc_RNA (1)...(19): siRNA sense strand
gaguauacccaggcagaaa

SEQ ID NO: 1400080 - RNA, 19 nt, Homo sapiens
  misc_RNA (1)...(19): siRNA sense strand
gcuauacuguggcagacau

SEQ ID NO: 1400081 - RNA, 19 nt, Homo sapiens
  misc_RNA (1)...(19): siRNA sense strand
agcaguuugugaagaaaua

SEQ ID NO: 1400082 - RNA, 19 nt, Homo sapiens
  misc_RNA (1)...(19): siRNA sense strand
gagcaugauguccucuuga

SEQ ID NO: 1400083 - RNA, 19 nt, Homo sapiens
  misc_RNA (1)...(19): siRNA sense strand
gcacccagcuuguuuuguc

SEQ ID NO: 1400084 - RNA, 19 nt, Homo sapiens
  misc_RNA (1)...(19): siRNA sense strand
caaacuucccugugagaug

SEQ ID NO: 1400085 - RNA, 19 nt, Homo sapiens
  misc_RNA (1)...(19): siRNA sense strand
ccaagaagagcaugauguc

SEQ ID NO: 1400086 - RNA, 19 nt, Homo sapiens
  misc_RNA (1)...(19): siRNA sense strand
gaaggagauggagcaguuu

SEQ ID NO: 1400087 - RNA, 19 nt, Homo sapiens
  misc_RNA (1)...(19): siRNA sense strand
ccaagaagaaugucuccau

SEQ ID NO: 1400088 - RNA, 19 nt, Homo sapiens
  misc_RNA (1)...(19): siRNA sense strand
gcgggugaccuauaacaau

SEQ ID NO: 1400089 - RNA, 19 nt, Homo sapiens
  misc_RNA (1)...(19): siRNA sense strand
agaaugagaagcuauacug

SEQ ID NO: 1400090 - RNA, 19 nt, Homo sapiens
  misc_RNA (1)...(19): siRNA sense strand
aaagggcuggcuaugauaa

SEQ ID NO: 1400091 - RNA, 19 nt, Homo sapiens
  misc_RNA (1)...(19): siRNA sense strand
caaagugccaugaguuguc

SEQ ID NO: 1400092 - RNA, 19 nt, Homo sapiens
  misc_RNA (1)...(19): siRNA sense strand
ccaaguauaccacucugau

SEQ ID NO: 1400093 - RNA, 19 nt, Homo sapiens
  misc_RNA (1)...(19): siRNA sense strand
caauacaguuaccuaugag

SEQ ID NO: 1400094 - RNA, 19 nt, Homo sapiens
  misc_RNA (1)...(19): siRNA sense strand
gcagaugcuacccaaggaa

SEQ ID NO: 1400095 - RNA, 19 nt, Homo sapiens
  misc_RNA (1)...(19): siRNA sense strand
gcuguggugugucaaggau

SEQ ID NO: 1400096 - RNA, 19 nt, Homo sapiens
  misc_RNA (1)...(19): siRNA sense strand
gcugugacgagcugauauu

SEQ ID NO: 1400097 - RNA, 19 nt, Homo sapiens
  misc_RNA (1)...(19): siRNA sense strand
aaacugaguaugaaagaag

SEQ ID NO: 1400098 - RNA, 19 nt, Homo sapiens
  misc_RNA (1)...(19): siRNA sense strand
acuaaagucagauggaauu

SEQ ID NO: 1400099 - RNA, 19 nt, Homo sapiens
  misc_RNA (1)...(19): siRNA sense strand
ugaagaggaucgaaaagug

SEQ ID NO: 1400100 - RNA, 19 nt, Homo sapiens
  misc_RNA (1)...(19): siRNA sense strand
gaaggugacccagccaucu

SEQ ID NO: 1400101 - RNA, 19 nt, Homo sapiens
  misc_RNA (1)...(19): siRNA sense strand
uguccagaaucaagcauug

SEQ ID NO: 1400102 - RNA, 19 nt, Homo sapiens
  misc_RNA (1)...(19): siRNA sense strand
caucaauacaguuaccuau

SEQ ID NO: 1400103 - RNA, 19 nt, Homo sapiens
  misc_RNA (1)...(19): siRNA sense strand
gccaagaagagcaugaugu

SEQ ID NO: 1400104 - RNA, 19 nt, Homo sapiens
  misc_RNA (1)...(19): siRNA sense strand
gcagaaguucaugccagua

SEQ ID NO: 1400105 - RNA, 19 nt, Homo sapiens
  misc_RNA (1)...(19): siRNA sense strand
ugaaacacuucugcugcuu

SEQ ID NO: 1400106 - RNA, 19 nt, Homo sapiens
  misc_RNA (1)...(19): siRNA sense strand
ccgaaagggcuggcuauga

SEQ ID NO: 1400107 - RNA, 19 nt, Homo sapiens
  misc_RNA (1)...(19): siRNA sense strand
aaguauaccacucugauug

SEQ ID NO: 1400108 - RNA, 19 nt, Homo sapiens
  misc_RNA (1)...(19): siRNA sense strand
gugcaagcccugcuaugug

SEQ ID NO: 1400109 - RNA, 19 nt, Homo sapiens
  misc_RNA (1)...(19): siRNA sense strand
ggagauggagcaguuugug

SEQ ID NO: 1400110 - RNA, 19 nt, Homo sapiens
  misc_RNA (1)...(19): siRNA sense strand
cagaugcuacccaaggaaa

SEQ ID NO: 1400111 - RNA, 19 nt, Homo sapiens
  misc_RNA (1)...(19): siRNA sense strand
ccaguagaagggaugguuu

SEQ ID NO: 1400112 - RNA, 19 nt, Homo sapiens
  misc_RNA (1)...(19): siRNA sense strand
agaaguucaugccaguaga

SEQ ID NO: 1400113 - RNA, 19 nt, Homo sapiens
  misc_RNA (1)...(19): siRNA sense strand
aaauaugucguaacugcaa

SEQ ID NO: 1400114 - RNA, 19 nt, Homo sapiens
  misc_RNA (1)...(19): siRNA sense strand
gggcuccuccuguccagaa

SEQ ID NO: 1400115 - RNA, 19 nt, Homo sapiens
  misc_RNA (1)...(19): siRNA sense strand
gaagaaugagaagcuauac

SEQ ID NO: 1400116 - RNA, 19 nt, Homo sapiens
  misc_RNA (1)...(19): siRNA sense strand
uggcaugcauccacagagu

SEQ ID NO: 1400117 - RNA, 19 nt, Homo sapiens
  misc_RNA (1)...(19): siRNA sense strand
gcccugcuaugugaagaau

SEQ ID NO: 1400118 - RNA, 19 nt, Homo sapiens
  misc_RNA (1)...(19): siRNA sense strand
guauaccacucugauugca

SEQ ID NO: 1400119 - RNA, 19 nt, Homo sapiens
  misc_RNA (1)...(19): siRNA sense strand
aagaaugucuccaucaaua

SEQ ID NO: 1400120 - RNA, 19 nt, Homo sapiens
  misc_RNA (1)...(19): siRNA sense strand
ucaauacaguuaccuauga

SEQ ID NO: 1400121 - RNA, 19 nt, Homo sapiens
  misc_RNA (1)...(19): siRNA sense strand
ggaagaagcagcuggcaaa

SEQ ID NO: 1400122 - RNA, 19 nt, Homo sapiens
  misc_RNA (1)...(19): siRNA sense strand
cgaaagggcuggcuaugau

SEQ ID NO: 1400123 - RNA, 19 nt, Homo sapiens
  misc_RNA (1)...(19): siRNA sense strand
ggaagaaugagaagcuaua

SEQ ID NO: 1400124 - RNA, 19 nt, Homo sapiens
  misc_RNA (1)...(19): siRNA sense strand
ugaaggagauggagcaguu

SEQ ID NO: 1400125 - RNA, 19 nt, Homo sapiens
  misc_RNA (1)...(19): siRNA sense strand
ccagagaggugaaggagau

SEQ ID NO: 1400126 - RNA, 19 nt, Homo sapiens
  misc_RNA (1)...(19): siRNA sense strand
gccaugaacuccugguuga

SEQ ID NO: 1400127 - RNA, 19 nt, Homo sapiens
  misc_RNA (1)...(19): siRNA sense strand
gggcuuaggucacgagcaa

SEQ ID NO: 1400128 - RNA, 19 nt, Homo sapiens
  misc_RNA (1)...(19): siRNA sense strand
gaaagggcuggcuaugaua

SEQ ID NO: 1400129 - RNA, 19 nt, Homo sapiens
  misc_RNA (1)...(19): siRNA sense strand
gcaaugaagaggaucgaaa

SEQ ID NO: 1400130 - RNA, 19 nt, Homo sapiens
  misc_RNA (1)...(19): siRNA sense strand
aaacuaaagucagauggaa

SEQ ID NO: 1400131 - RNA, 19 nt, Homo sapiens
  misc_RNA (1)...(19): siRNA sense strand
gauguccucuugagcaaug

SEQ ID NO: 1400132 - RNA, 19 nt, Homo sapiens
  misc_RNA (1)...(19): siRNA sense strand
guuaugauauugacgaauc

SEQ ID NO: 1400133 - RNA, 19 nt, Homo sapiens
  misc_RNA (1)...(19): siRNA sense strand
agaagaaugucuccaucaa

SEQ ID NO: 1400134 - RNA, 19 nt, Homo sapiens
  misc_RNA (1)...(19): siRNA sense strand
gcaaacugaguaugaaaga

SEQ ID NO: 1400135 - RNA, 19 nt, Homo sapiens
  misc_RNA (1)...(19): siRNA sense strand
gaacucaauauuccugcua

SEQ ID NO: 1400136 - RNA, 19 nt, Homo sapiens
  misc_RNA (1)...(19): siRNA sense strand
agaagcagcuggcaaagca

SEQ ID NO: 1400137 - RNA, 19 nt, Homo sapiens
  misc_RNA (1)...(19): siRNA sense strand
gggaguaggagaugucaaa

SEQ ID NO: 1400138 - RNA, 19 nt, Homo sapiens
  misc_RNA (1)...(19): siRNA sense strand
gaaucacgcuguggugugu

SEQ ID NO: 1400139 - RNA, 19 nt, Homo sapiens
  misc_RNA (1)...(19): siRNA sense strand
aaacacuucugcugcuuug

SEQ ID NO: 1400140 - RNA, 19 nt, Homo sapiens
  misc_RNA (1)...(19): siRNA sense strand
gaaacacuucugcugcuuu

SEQ ID NO: 1400141 - RNA, 19 nt, Homo sapiens
  misc_RNA (1)...(19): siRNA sense strand
gaagaaugucuccaucaau

SEQ ID NO: 1400142 - RNA, 19 nt, Homo sapiens
  misc_RNA (1)...(19): siRNA sense strand
cgggugaccuauaacaauu

SEQ ID NO: 1400143 - RNA, 19 nt, Homo sapiens
  misc_RNA (1)...(19): siRNA sense strand
ggaauucccauguauaaac

SEQ ID NO: 1400144 - RNA, 19 nt, Homo sapiens
  misc_RNA (1)...(19): siRNA sense strand
aguaggagaugucaaacuu

SEQ ID NO: 1400145 - RNA, 19 nt, Homo sapiens
  misc_RNA (1)...(19): siRNA sense strand
ugucaaggaugccacaaug

SEQ ID NO: 1400146 - RNA, 19 nt, Homo sapiens
  misc_RNA (1)...(19): siRNA sense strand
ucaguggaauguaagaaga

SEQ ID NO: 1400147 - RNA, 19 nt, Homo sapiens
  misc_RNA (1)...(19): siRNA sense strand
caaaagaacucaauauucc

SEQ ID NO: 1400148 - RNA, 19 nt, Homo sapiens
  misc_RNA (1)...(19): siRNA sense strand
uauacgugauggucaauga

SEQ ID NO: 1400149 - RNA, 19 nt, Homo sapiens
  misc_RNA (1)...(19): siRNA sense strand
caaacugaguaugaaagaa

SEQ ID NO: 1400150 - RNA, 19 nt, Homo sapiens
  misc_RNA (1)...(19): siRNA sense strand
gcugcaaacugaguaugaa

SEQ ID NO: 1400151 - RNA, 19 nt, Homo sapiens
  misc_RNA (1)...(19): siRNA sense strand
gaaguucaugccaguagaa

SEQ ID NO: 1400152 - RNA, 19 nt, Homo sapiens
  misc_RNA (1)...(19): siRNA sense strand
ugcaagcccugcuauguga

SEQ ID NO: 1400153 - RNA, 19 nt, Homo sapiens
  misc_RNA (1)...(19): siRNA sense strand
ugacugugauagcauucua

SEQ ID NO: 1400154 - RNA, 19 nt, Homo sapiens
  misc_RNA (1)...(19): siRNA sense strand
gaccaggacccuucaaagu

SEQ ID NO: 1400155 - RNA, 19 nt, Homo sapiens
  misc_RNA (1)...(19): siRNA sense strand
gauauucagcaaugaguau

SEQ ID NO: 1400156 - RNA, 19 nt, Homo sapiens
  misc_RNA (1)...(19): siRNA sense strand
ucuguucaguggaauguaa

SEQ ID NO: 1400157 - RNA, 19 nt, Homo sapiens
  misc_RNA (1)...(19): siRNA sense strand
gcaaguguggccaagaaga

SEQ ID NO: 1400158 - RNA, 19 nt, Homo sapiens
  misc_RNA (1)...(19): siRNA sense strand
gauauugacgaauccaguu

SEQ ID NO: 1400159 - RNA, 19 nt, Homo sapiens
  misc_RNA (1)...(19): siRNA sense strand
uggagcaguuugugaagaa

SEQ ID NO: 1400160 - RNA, 19 nt, Homo sapiens
  misc_RNA (1)...(19): siRNA sense strand
gaagacaccaaguauacca

SEQ ID NO: 1400161 - RNA, 19 nt, Homo sapiens
  misc_RNA (1)...(19): siRNA sense strand
gauucgaacugcacuucug

SEQ ID NO: 1400162 - RNA, 19 nt, Homo sapiens
  misc_RNA (1)...(19): siRNA sense strand
ggagcaguuugugaagaaa

SEQ ID NO: 1400163 - RNA, 19 nt, Homo sapiens
  misc_RNA (1)...(19): siRNA sense strand
gagauggagcaguuuguga

SEQ ID NO: 1400164 - RNA, 19 nt, Homo sapiens
  misc_RNA (1)...(19): siRNA sense strand
gaaugucuccaucaauaca

SEQ ID NO: 1400165 - RNA, 19 nt, Homo sapiens
  misc_RNA (1)...(19): siRNA sense strand
auaccacucugauugcaaa

SEQ ID NO: 1400166 - RNA, 19 nt, Homo sapiens
  misc_RNA (1)...(19): siRNA sense strand
gcacaaaagaacucaauau

SEQ ID NO: 1400167 - RNA, 19 nt, Homo sapiens
  misc_RNA (1)...(19): siRNA sense strand
cugcaaguguggccaagaa

SEQ ID NO: 1400168 - RNA, 19 nt, Homo sapiens
  misc_RNA (1)...(19): siRNA sense strand
caaguauaccacucugauu

SEQ ID NO: 1400169 - RNA, 19 nt, Homo sapiens
  misc_RNA (1)...(19): siRNA sense strand
ggugaccuauaacaauuuc

SEQ ID NO: 1400170 - RNA, 19 nt, Homo sapiens
  misc_RNA (1)...(19): siRNA sense strand
ccugcuaugugaagaauca

SEQ ID NO: 1400171 - RNA, 19 nt, Homo sapiens
  misc_RNA (1)...(19): siRNA sense strand
gaauucccauguauaaacg

SEQ ID NO: 1400172 - RNA, 19 nt, Homo sapiens
  misc_RNA (1)...(19): siRNA sense strand
gaaugagaagcuauacugu

SEQ ID NO: 1400173 - RNA, 19 nt, Homo sapiens
  misc_RNA (1)...(19): siRNA sense strand
ugcagcgggugaccuauaa

SEQ ID NO: 1400174 - RNA, 19 nt, Homo sapiens
  misc_RNA (1)...(19): siRNA sense strand
gaacuccugguugacauga

SEQ ID NO: 1400175 - RNA, 19 nt, Homo sapiens
  misc_RNA (1)...(19): siRNA sense strand
gaauguaagaagaggaugu

SEQ ID NO: 1400176 - RNA, 19 nt, Homo sapiens
  misc_RNA (1)...(19): siRNA sense strand
gugcagcgggugaccuaua

SEQ ID NO: 1400177 - RNA, 19 nt, Homo sapiens
  misc_RNA (1)...(19): siRNA sense strand
agauauacgugauggucaa

SEQ ID NO: 1400178 - RNA, 19 nt, Homo sapiens
  misc_RNA (1)...(19): siRNA sense strand
agaauuggcaccugaaaca

SEQ ID NO: 1400179 - RNA, 19 nt, Homo sapiens
  misc_RNA (1)...(19): siRNA sense strand
gaguauacccaggcagaaa

SEQ ID NO: 1400180 - RNA, 19 nt, Homo sapiens
  misc_RNA (1)...(19): siRNA sense strand
gcuauacuguggcagacau

SEQ ID NO: 1400181 - RNA, 19 nt, Homo sapiens
  misc_RNA (1)...(19): siRNA sense strand
agcaguuugugaagaaaua

SEQ ID NO: 1400182 - RNA, 19 nt, Homo sapiens
  misc_RNA (1)...(19): siRNA sense strand
gagcaugauguccucuuga

SEQ ID NO: 1400183 - RNA, 19 nt, Homo sapiens
  misc_RNA (1)...(19): siRNA sense strand
gcacccagcuuguuuuguc

SEQ ID NO: 1400184 - RNA, 19 nt, Homo sapiens
  misc_RNA (1)...(19): siRNA sense strand
caaacuucccugugagaug

SEQ ID NO: 1400185 - RNA, 19 nt, Homo sapiens
  misc_RNA (1)...(19): siRNA sense strand
ccaagaagagcaugauguc

SEQ ID NO: 1400186 - RNA, 19 nt, Homo sapiens
  misc_RNA (1)...(19): siRNA sense strand
gaaggagauggagcaguuu

SEQ ID NO: 1400187 - RNA, 19 nt, Homo sapiens
  misc_RNA (1)...(19): siRNA sense strand
ccaagaagaaugucuccau

SEQ ID NO: 1400188 - RNA, 19 nt, Homo sapiens
  misc_RNA (1)...(19): siRNA sense strand
gcgggugaccuauaacaau

SEQ ID NO: 1400189 - RNA, 19 nt, Homo sapiens
  misc_RNA (1)...(19): siRNA sense strand
agaaugagaagcuauacug

SEQ ID NO: 1400190 - RNA, 19 nt, Homo sapiens
  misc_RNA (1)...(19): siRNA sense strand
aaagggcuggcuaugauaa

SEQ ID NO: 1400191 - RNA, 19 nt, Homo sapiens
  misc_RNA (1)...(19): siRNA sense strand
caaagugccaugaguuguc

SEQ ID NO: 1400192 - RNA, 19 nt, Homo sapiens
  misc_RNA (1)...(19): siRNA sense strand
ccaaguauaccacucugau

SEQ ID NO: 1400193 - RNA, 19 nt, Homo sapiens
  misc_RNA (1)...(19): siRNA sense strand
caauacaguuaccuaugag

SEQ ID NO: 1400194 - RNA, 19 nt, Homo sapiens
  misc_RNA (1)...(19): siRNA sense strand
gcagaugcuacccaaggaa

SEQ ID NO: 1400195 - RNA, 19 nt, Homo sapiens
  misc_RNA (1)...(19): siRNA sense strand
gcuguggugugucaaggau

SEQ ID NO: 1400196 - RNA, 19 nt, Homo sapiens
  misc_RNA (1)...(19): siRNA sense strand
gcugugacgagcugauauu

SEQ ID NO: 1400197 - RNA, 19 nt, Homo sapiens
  misc_RNA (1)...(19): siRNA sense strand
aaacugaguaugaaagaag

SEQ ID NO: 1400198 - RNA, 19 nt, Homo sapiens
  misc_RNA (1)...(19): siRNA sense strand
acuaaagucagauggaauu

SEQ ID NO: 1400199 - RNA, 19 nt, Homo sapiens
  misc_RNA (1)...(19): siRNA sense strand
ugaagaggaucgaaaagug

SEQ ID NO: 1400200 - RNA, 19 nt, Homo sapiens
  misc_RNA (1)...(19): siRNA sense strand
gaaggugacccagccaucu

SEQ ID NO: 1400201 - RNA, 19 nt, Homo sapiens
  misc_RNA (1)...(19): siRNA sense strand
uguccagaaucaagcauug

SEQ ID NO: 1400202 - RNA, 19 nt, Homo sapiens
  misc_RNA (1)...(19): siRNA sense strand
caucaauacaguuaccuau

SEQ ID NO: 1400203 - RNA, 19 nt, Homo sapiens
  misc_RNA (1)...(19): siRNA sense strand
gccaagaagagcaugaugu

SEQ ID NO: 1400204 - RNA, 19 nt, Homo sapiens
  misc_RNA (1)...(19): siRNA sense strand
gcagaaguucaugccagua

SEQ ID NO: 1400205 - RNA, 19 nt, Homo sapiens
  misc_RNA (1)...(19): siRNA sense strand
ugaaacacuucugcugcuu

SEQ ID NO: 1400206 - RNA, 19 nt, Homo sapiens
  misc_RNA (1)...(19): siRNA sense strand
ccgaaagggcuggcuauga

SEQ ID NO: 1400207 - RNA, 19 nt, Homo sapiens
  misc_RNA (1)...(19): siRNA sense strand
aaguauaccacucugauug

SEQ ID NO: 1400208 - RNA, 19 nt, Homo sapiens
  misc_RNA (1)...(19): siRNA sense strand
gugcaagcccugcuaugug

SEQ ID NO: 1400209 - RNA, 19 nt, Homo sapiens
  misc_RNA (1)...(19): siRNA sense strand
ggagauggagcaguuugug

SEQ ID NO: 1400210 - RNA, 19 nt, Homo sapiens
  misc_RNA (1)...(19): siRNA sense strand
cagaugcuacccaaggaaa

SEQ ID NO: 1400211 - RNA, 19 nt, Homo sapiens
  misc_RNA (1)...(19): siRNA sense strand
ccaguagaagggaugguuu

SEQ ID NO: 1400212 - RNA, 19 nt, Homo sapiens
  misc_RNA (1)...(19): siRNA sense strand
agaaguucaugccaguaga

SEQ ID NO: 1400213 - RNA, 19 nt, Homo sapiens
  misc_RNA (1)...(19): siRNA sense strand
aaauaugucguaacugcaa

SEQ ID NO: 1400214 - RNA, 19 nt, Homo sapiens
  misc_RNA (1)...(19): siRNA sense strand
gggcuccuccuguccagaa

SEQ ID NO: 1400215 - RNA, 19 nt, Homo sapiens
  misc_RNA (1)...(19): siRNA sense strand
gaagaaugagaagcuauac

SEQ ID NO: 1400216 - RNA, 19 nt, Homo sapiens
  misc_RNA (1)...(19): siRNA sense strand
uggcaugcauccacagagu

SEQ ID NO: 1400217 - RNA, 19 nt, Homo sapiens
  misc_RNA (1)...(19): siRNA sense strand
gcccugcuaugugaagaau

SEQ ID NO: 1400218 - RNA, 19 nt, Homo sapiens
  misc_RNA (1)...(19): siRNA sense strand
guauaccacucugauugca

SEQ ID NO: 1400219 - RNA, 19 nt, Homo sapiens
  misc_RNA (1)...(19): siRNA sense strand
gaaauaugaagaccuguua

SEQ ID NO: 1400220 - RNA, 19 nt, Homo sapiens
  misc_RNA (1)...(19): siRNA sense strand
gcaaguuuguggaggaaua

SEQ ID NO: 1400221 - RNA, 19 nt, Homo sapiens
  misc_RNA (1)...(19): siRNA sense strand
uaaggaggcugaugauuuc

SEQ ID NO: 1400222 - RNA, 19 nt, Homo sapiens
  misc_RNA (1)...(19): siRNA sense strand
ccacagaggcuaugcuaaa

SEQ ID NO: 1400223 - RNA, 19 nt, Homo sapiens
  misc_RNA (1)...(19): siRNA sense strand
ucaagcggaucauaaagaa

SEQ ID NO: 1400224 - RNA, 19 nt, Homo sapiens
  misc_RNA (1)...(19): siRNA sense strand
ccaggaggauguuuaagga

SEQ ID NO: 1400225 - RNA, 19 nt, Homo sapiens
  misc_RNA (1)...(19): siRNA sense strand
gcagaagaacaugcaaaua

SEQ ID NO: 1400226 - RNA, 19 nt, Homo sapiens
  misc_RNA (1)...(19): siRNA sense strand
uuaaggaggcugaugauuu

SEQ ID NO: 1400227 - RNA, 19 nt, Homo sapiens
  misc_RNA (1)...(19): siRNA sense strand
cagaagaacaugcaaauag

SEQ ID NO: 1400228 - RNA, 19 nt, Homo sapiens
  misc_RNA (1)...(19): siRNA sense strand
ucaccaaggagaacuauaa

SEQ ID NO: 1400229 - RNA, 19 nt, Homo sapiens
  misc_RNA (1)...(19): siRNA sense strand
ccaggaaguuugaugugaa

SEQ ID NO: 1400230 - RNA, 19 nt, Homo sapiens
  misc_RNA (1)...(19): siRNA sense strand
ggcaaggacuuccggauca

SEQ ID NO: 1400231 - RNA, 19 nt, Homo sapiens
  misc_RNA (1)...(19): siRNA sense strand
cgaaauacguggaacucau

SEQ ID NO: 1400232 - RNA, 19 nt, Homo sapiens
  misc_RNA (1)...(19): siRNA sense strand
acaagucgaugcuggagaa

SEQ ID NO: 1400233 - RNA, 19 nt, Homo sapiens
  misc_RNA (1)...(19): siRNA sense strand
ugaugaagauggcccuuga

SEQ ID NO: 1400234 - RNA, 19 nt, Homo sapiens
  misc_RNA (1)...(19): siRNA sense strand
ggaaauaugaagaccuguu

SEQ ID NO: 1400235 - RNA, 19 nt, Homo sapiens
  misc_RNA (1)...(19): siRNA sense strand
ggaggcugaugauuucuuc

SEQ ID NO: 1400236 - RNA, 19 nt, Homo sapiens
  misc_RNA (1)...(19): siRNA sense strand
caccaucccuggagcaaga

SEQ ID NO: 1400237 - RNA, 19 nt, Homo sapiens
  misc_RNA (1)...(19): siRNA sense strand
gguccaacaucuaugacuu

SEQ ID NO: 1400238 - RNA, 19 nt, Homo sapiens
  misc_RNA (1)...(19): siRNA sense strand
ccaagcaccugcacagucu

SEQ ID NO: 1400239 - RNA, 19 nt, Homo sapiens
  misc_RNA (1)...(19): siRNA sense strand
gcaccaccgugaacuugga

SEQ ID NO: 1400240 - RNA, 19 nt, Homo sapiens
  misc_RNA (1)...(19): siRNA sense strand
gaaauacguggaacucauc

SEQ ID NO: 1400241 - RNA, 19 nt, Homo sapiens
  misc_RNA (1)...(19): siRNA sense strand
ucagcuaccucgucgauca

SEQ ID NO: 1400242 - RNA, 19 nt, Homo sapiens
  misc_RNA (1)...(19): siRNA sense strand
gcaaggacuuccggaucaa

SEQ ID NO: 1400243 - RNA, 19 nt, Homo sapiens
  misc_RNA (1)...(19): siRNA sense strand
gccaggaaguuugauguga

SEQ ID NO: 1400244 - RNA, 19 nt, Homo sapiens
  misc_RNA (1)...(19): siRNA sense strand
agccagaucugacgaaugu

SEQ ID NO: 1400245 - RNA, 19 nt, Homo sapiens
  misc_RNA (1)...(19): siRNA sense strand
gaacuacaacaccaacauc

SEQ ID NO: 1400246 - RNA, 19 nt, Homo sapiens
  misc_RNA (1)...(19): siRNA sense strand
acaccaacaucaccacaga

SEQ ID NO: 1400247 - RNA, 19 nt, Homo sapiens
  misc_RNA (1)...(19): siRNA sense strand
ccacagagaccagcaagau

SEQ ID NO: 1400248 - RNA, 19 nt, Homo sapiens
  misc_RNA (1)...(19): siRNA sense strand
gagccauccuccaguuuua

SEQ ID NO: 1400249 - RNA, 19 nt, Homo sapiens
  misc_RNA (1)...(19): siRNA sense strand
gcagaacaccacuaucaag

SEQ ID NO: 1400250 - RNA, 19 nt, Homo sapiens
  misc_RNA (1)...(19): siRNA sense strand
ccaaccacacccugaagua

SEQ ID NO: 1400251 - RNA, 19 nt, Homo sapiens
  misc_RNA (1)...(19): siRNA sense strand
ccacauccaguauuucaug

SEQ ID NO: 1400252 - RNA, 19 nt, Homo sapiens
  misc_RNA (1)...(19): siRNA sense strand
caucccaggugguguggaa

SEQ ID NO: 1400253 - RNA, 19 nt, Homo sapiens
  misc_RNA (1)...(19): siRNA sense strand
uccaguauuucaugcagua

SEQ ID NO: 1400254 - RNA, 19 nt, Homo sapiens
  misc_RNA (1)...(19): siRNA sense strand
gcucaauggcuauguagau

SEQ ID NO: 1400255 - RNA, 19 nt, Homo sapiens
  misc_RNA (1)...(19): siRNA sense strand
uugacaagaucgccuuuau

SEQ ID NO: 1400256 - RNA, 19 nt, Homo sapiens
  misc_RNA (1)...(19): siRNA sense strand
acagagaccagcaagauuc

SEQ ID NO: 1400257 - RNA, 19 nt, Homo sapiens
  misc_RNA (1)...(19): siRNA sense strand
ccucggccauguugagcua

SEQ ID NO: 1400258 - RNA, 19 nt, Homo sapiens
  misc_RNA (1)...(19): siRNA sense strand
caguggcgcuggaggguau

SEQ ID NO: 1400259 - RNA, 19 nt, Homo sapiens
  misc_RNA (1)...(19): siRNA sense strand
cgacgagcaugacaucaac

SEQ ID NO: 1400260 - RNA, 19 nt, Homo sapiens
  misc_RNA (1)...(19): siRNA sense strand
gaggccaacuggaacuaca

SEQ ID NO: 1400261 - RNA, 19 nt, Homo sapiens
  misc_RNA (1)...(19): siRNA sense strand
ccagaucugacgaauguga

SEQ ID NO: 1400262 - RNA, 19 nt, Homo sapiens
  misc_RNA (1)...(19): siRNA sense strand
agaagaacaugcaaauagc

SEQ ID NO: 1400263 - RNA, 19 nt, Homo sapiens
  misc_RNA (1)...(19): siRNA sense strand
ccaaggagaacuauaacca

SEQ ID NO: 1400264 - RNA, 19 nt, Homo sapiens
  misc_RNA (1)...(19): siRNA sense strand
gcgacgagcaugacaucaa

SEQ ID NO: 1400265 - RNA, 19 nt, Homo sapiens
  misc_RNA (1)...(19): siRNA sense strand
ggaacuacaacaccaacau

SEQ ID NO: 1400266 - RNA, 19 nt, Homo sapiens
  misc_RNA (1)...(19): siRNA sense strand
gcacccaggccaggaaguu

SEQ ID NO: 1400267 - RNA, 19 nt, Homo sapiens
  misc_RNA (1)...(19): siRNA sense strand
gacaagaucgccuuuaucc

SEQ ID NO: 1400268 - RNA, 19 nt, Homo sapiens
  misc_RNA (1)...(19): siRNA sense strand
caauggcuauguagaugca

SEQ ID NO: 1400269 - RNA, 19 nt, Homo sapiens
  misc_RNA (1)...(19): siRNA sense strand
gagagccauccuccaguuu

SEQ ID NO: 1400270 - RNA, 19 nt, Homo sapiens
  misc_RNA (1)...(19): siRNA sense strand
gugaaccaguugcagaaca

SEQ ID NO: 1400271 - RNA, 19 nt, Homo sapiens
  misc_RNA (1)...(19): siRNA sense strand
ugggccacauccaguauuu

SEQ ID NO: 1400272 - RNA, 19 nt, Homo sapiens
  misc_RNA (1)...(19): siRNA sense strand
cagcaaguuuguggaggaa

SEQ ID NO: 1400273 - RNA, 19 nt, Homo sapiens
  misc_RNA (1)...(19): siRNA sense strand
cuaucaagcggaucauaaa

SEQ ID NO: 1400274 - RNA, 19 nt, Homo sapiens
  misc_RNA (1)...(19): siRNA sense strand
ggccacauccaguauuuca

SEQ ID NO: 1400275 - RNA, 19 nt, Homo sapiens
  misc_RNA (1)...(19): siRNA sense strand
gaagcaucaccaaggagaa

SEQ ID NO: 1400276 - RNA, 19 nt, Homo sapiens
  misc_RNA (1)...(19): siRNA sense strand
uugcagaacaccacuauca

SEQ ID NO: 1400277 - RNA, 19 nt, Homo sapiens
  misc_RNA (1)...(19): siRNA sense strand
caugcaguacaaagacuua

SEQ ID NO: 1400278 - RNA, 19 nt, Homo sapiens
  misc_RNA (1)...(19): siRNA sense strand
cacagaggcuaugcuaaag

SEQ ID NO: 1400279 - RNA, 19 nt, Homo sapiens
  misc_RNA (1)...(19): siRNA sense strand
gaagccaugcagcugauca

SEQ ID NO: 1400280 - RNA, 19 nt, Homo sapiens
  misc_RNA (1)...(19): siRNA sense strand
ggaggaguacaacaagauc

SEQ ID NO: 1400281 - RNA, 19 nt, Homo sapiens
  misc_RNA (1)...(19): siRNA sense strand
caucauccaguuccaguuc

SEQ ID NO: 1400282 - RNA, 19 nt, Homo sapiens
  misc_RNA (1)...(19): siRNA sense strand
aaaugggccacauccagua

SEQ ID NO: 1400283 - RNA, 19 nt, Homo sapiens
  misc_RNA (1)...(19): siRNA sense strand
caccacagaggcuaugcua

SEQ ID NO: 1400284 - RNA, 19 nt, Homo sapiens
  misc_RNA (1)...(19): siRNA sense strand
ccggcucaauggcuaugua

SEQ ID NO: 1400285 - RNA, 19 nt, Homo sapiens
  misc_RNA (1)...(19): siRNA sense strand
acuaucaagcggaucauaa

SEQ ID NO: 1400286 - RNA, 19 nt, Homo sapiens
  misc_RNA (1)...(19): siRNA sense strand
ggacaccacagaggcuaug

SEQ ID NO: 1400287 - RNA, 19 nt, Homo sapiens
  misc_RNA (1)...(19): siRNA sense strand
gcaucaccaaggagaacua

SEQ ID NO: 1400288 - RNA, 19 nt, Homo sapiens
  misc_RNA (1)...(19): siRNA sense strand
gugcuagcccucucagugu

SEQ ID NO: 1400289 - RNA, 19 nt, Homo sapiens
  misc_RNA (1)...(19): siRNA sense strand
cucaauggcuauguagaug

SEQ ID NO: 1400290 - RNA, 19 nt, Homo sapiens
  misc_RNA (1)...(19): siRNA sense strand
cacagagaccagcaagauu

SEQ ID NO: 1400291 - RNA, 19 nt, Homo sapiens
  misc_RNA (1)...(19): siRNA sense strand
ugacaagaucgccuuuauc

SEQ ID NO: 1400292 - RNA, 19 nt, Homo sapiens
  misc_RNA (1)...(19): siRNA sense strand
ggacgugcuagcccucuca

SEQ ID NO: 1400293 - RNA, 19 nt, Homo sapiens
  misc_RNA (1)...(19): siRNA sense strand
caggaaguuugaugugaac

SEQ ID NO: 1400294 - RNA, 19 nt, Homo sapiens
  misc_RNA (1)...(19): siRNA sense strand
cggaagccaugcagcugau

SEQ ID NO: 1400295 - RNA, 19 nt, Homo sapiens
  misc_RNA (1)...(19): siRNA sense strand
aguuugaugugaaccaguu

SEQ ID NO: 1400296 - RNA, 19 nt, Homo sapiens
  misc_RNA (1)...(19): siRNA sense strand
aauaugaagaccuguuaug

SEQ ID NO: 1400297 - RNA, 19 nt, Homo sapiens
  misc_RNA (1)...(19): siRNA sense strand
guccaacaucuaugacuug

SEQ ID NO: 1400298 - RNA, 19 nt, Homo sapiens
  misc_RNA (1)...(19): siRNA sense strand
ucagcuucaucauccaguu

SEQ ID NO: 1400299 - RNA, 19 nt, Homo sapiens
  misc_RNA (1)...(19): siRNA sense strand
aguauuucaugcaguacaa

SEQ ID NO: 1400300 - RNA, 19 nt, Homo sapiens
  misc_RNA (1)...(19): siRNA sense strand
gauauggaaaccaccuaca

SEQ ID NO: 1400301 - RNA, 19 nt, Homo sapiens
  misc_RNA (1)...(19): siRNA sense strand
gggccaaguuccacauucc

SEQ ID NO: 1400302 - RNA, 19 nt, Homo sapiens
  misc_RNA (1)...(19): siRNA sense strand
uggaggguauuugauggaa

SEQ ID NO: 1400303 - RNA, 19 nt, Homo sapiens
  misc_RNA (1)...(19): siRNA sense strand
ugaagauggcccuugacaa

SEQ ID NO: 1400304 - RNA, 19 nt, Homo sapiens
  misc_RNA (1)...(19): siRNA sense strand
cgagccagaucugacgaau

SEQ ID NO: 1400305 - RNA, 19 nt, Homo sapiens
  misc_RNA (1)...(19): siRNA sense strand
gguggugcccuucccuuca

SEQ ID NO: 1400306 - RNA, 19 nt, Homo sapiens
  misc_RNA (1)...(19): siRNA sense strand
gagccagaucugacgaaug

SEQ ID NO: 1400307 - RNA, 19 nt, Homo sapiens
  misc_RNA (1)...(19): siRNA sense strand
gaaauaugaagaccuguua

SEQ ID NO: 1400308 - RNA, 19 nt, Homo sapiens
  misc_RNA (1)...(19): siRNA sense strand
gcaaguuuguggaggaaua

SEQ ID NO: 1400309 - RNA, 19 nt, Homo sapiens
  misc_RNA (1)...(19): siRNA sense strand
uaaggaggcugaugauuuc

SEQ ID NO: 1400310 - RNA, 19 nt, Homo sapiens
  misc_RNA (1)...(19): siRNA sense strand
ccacagaggcuaugcuaaa

SEQ ID NO: 1400311 - RNA, 19 nt, Homo sapiens
  misc_RNA (1)...(19): siRNA sense strand
ucaagcggaucauaaagaa

SEQ ID NO: 1400312 - RNA, 19 nt, Homo sapiens
  misc_RNA (1)...(19): siRNA sense strand
ccaggaggauguuuaagga

SEQ ID NO: 1400313 - RNA, 19 nt, Homo sapiens
  misc_RNA (1)...(19): siRNA sense strand
gcagaagaacaugcaaaua

SEQ ID NO: 1400314 - RNA, 19 nt, Homo sapiens
  misc_RNA (1)...(19): siRNA sense strand
uuaaggaggcugaugauuu

SEQ ID NO: 1400315 - RNA, 19 nt, Homo sapiens
  misc_RNA (1)...(19): siRNA sense strand
cagaagaacaugcaaauag

SEQ ID NO: 1400316 - RNA, 19 nt, Homo sapiens
  misc_RNA (1)...(19): siRNA sense strand
ucaccaaggagaacuauaa

SEQ ID NO: 1400317 - RNA, 19 nt, Homo sapiens
  misc_RNA (1)...(19): siRNA sense strand
ccaggaaguuugaugugaa

SEQ ID NO: 1400318 - RNA, 19 nt, Homo sapiens
  misc_RNA (1)...(19): siRNA sense strand
ggcaaggacuuccggauca

SEQ ID NO: 1400319 - RNA, 19 nt, Homo sapiens
  misc_RNA (1)...(19): siRNA sense strand
cgaaauacguggaacucau

SEQ ID NO: 1400320 - RNA, 19 nt, Homo sapiens
  misc_RNA (1)...(19): siRNA sense strand
acaagucgaugcuggagaa

SEQ ID NO: 1400321 - RNA, 19 nt, Homo sapiens
  misc_RNA (1)...(19): siRNA sense strand
ugaugaagauggcccuuga

SEQ ID NO: 1400322 - RNA, 19 nt, Homo sapiens
  misc_RNA (1)...(19): siRNA sense strand
ggaaauaugaagaccuguu

SEQ ID NO: 1400323 - RNA, 19 nt, Homo sapiens
  misc_RNA (1)...(19): siRNA sense strand
ggaggcugaugauuucuuc

SEQ ID NO: 1400324 - RNA, 19 nt, Homo sapiens
  misc_RNA (1)...(19): siRNA sense strand
caccaucccuggagcaaga

SEQ ID NO: 1400325 - RNA, 19 nt, Homo sapiens
  misc_RNA (1)...(19): siRNA sense strand
gguccaacaucuaugacuu

SEQ ID NO: 1400326 - RNA, 19 nt, Homo sapiens
  misc_RNA (1)...(19): siRNA sense strand
ccaagcaccugcacagucu

SEQ ID NO: 1400327 - RNA, 19 nt, Homo sapiens
  misc_RNA (1)...(19): siRNA sense strand
gcaccaccgugaacuugga

SEQ ID NO: 1400328 - RNA, 19 nt, Homo sapiens
  misc_RNA (1)...(19): siRNA sense strand
gaaauacguggaacucauc

SEQ ID NO: 1400329 - RNA, 19 nt, Homo sapiens
  misc_RNA (1)...(19): siRNA sense strand
ucagcuaccucgucgauca

SEQ ID NO: 1400330 - RNA, 19 nt, Homo sapiens
  misc_RNA (1)...(19): siRNA sense strand
gcaaggacuuccggaucaa

SEQ ID NO: 1400331 - RNA, 19 nt, Homo sapiens
  misc_RNA (1)...(19): siRNA sense strand
gccaggaaguuugauguga

SEQ ID NO: 1400332 - RNA, 19 nt, Homo sapiens
  misc_RNA (1)...(19): siRNA sense strand
agccagaucugacgaaugu

SEQ ID NO: 1400333 - RNA, 19 nt, Homo sapiens
  misc_RNA (1)...(19): siRNA sense strand
gaacuacaacaccaacauc

SEQ ID NO: 1400334 - RNA, 19 nt, Homo sapiens
  misc_RNA (1)...(19): siRNA sense strand
acaccaacaucaccacaga

SEQ ID NO: 1400335 - RNA, 19 nt, Homo sapiens
  misc_RNA (1)...(19): siRNA sense strand
ccacagagaccagcaagau

SEQ ID NO: 1400336 - RNA, 19 nt, Homo sapiens
  misc_RNA (1)...(19): siRNA sense strand
gagccauccuccaguuuua

SEQ ID NO: 1400337 - RNA, 19 nt, Homo sapiens
  misc_RNA (1)...(19): siRNA sense strand
gcagaacaccacuaucaag

SEQ ID NO: 1400338 - RNA, 19 nt, Homo sapiens
  misc_RNA (1)...(19): siRNA sense strand
ccaaccacacccugaagua

SEQ ID NO: 1400339 - RNA, 19 nt, Homo sapiens
  misc_RNA (1)...(19): siRNA sense strand
caucccaggugguguggaa

SEQ ID NO: 1400340 - RNA, 19 nt, Homo sapiens
  misc_RNA (1)...(19): siRNA sense strand
ccacauccaguauuucaug

SEQ ID NO: 1400341 - RNA, 19 nt, Homo sapiens
  misc_RNA (1)...(19): siRNA sense strand
uccaguauuucaugcagua

SEQ ID NO: 1400342 - RNA, 19 nt, Homo sapiens
  misc_RNA (1)...(19): siRNA sense strand
gcucaauggcuauguagau

SEQ ID NO: 1400343 - RNA, 19 nt, Homo sapiens
  misc_RNA (1)...(19): siRNA sense strand
uugacaagaucgccuuuau

SEQ ID NO: 1400344 - RNA, 19 nt, Homo sapiens
  misc_RNA (1)...(19): siRNA sense strand
ccagaucugacgaauguga

SEQ ID NO: 1400345 - RNA, 19 nt, Homo sapiens
  misc_RNA (1)...(19): siRNA sense strand
ccucggccauguugagcua

SEQ ID NO: 1400346 - RNA, 19 nt, Homo sapiens
  misc_RNA (1)...(19): siRNA sense strand
caguggcgcuggaggguau

SEQ ID NO: 1400347 - RNA, 19 nt, Homo sapiens
  misc_RNA (1)...(19): siRNA sense strand
cgacgagcaugacaucaac

SEQ ID NO: 1400348 - RNA, 19 nt, Homo sapiens
  misc_RNA (1)...(19): siRNA sense strand
gaggccaacuggaacuaca

SEQ ID NO: 1400349 - RNA, 19 nt, Homo sapiens
  misc_RNA (1)...(19): siRNA sense strand
acagagaccagcaagauuc

SEQ ID NO: 1400350 - RNA, 19 nt, Homo sapiens
  misc_RNA (1)...(19): siRNA sense strand
agaagaacaugcaaauagc

SEQ ID NO: 1400351 - RNA, 19 nt, Homo sapiens
  misc_RNA (1)...(19): siRNA sense strand
ccaaggagaacuauaacca

SEQ ID NO: 1400352 - RNA, 19 nt, Homo sapiens
  misc_RNA (1)...(19): siRNA sense strand
ggaacuacaacaccaacau

SEQ ID NO: 1400353 - RNA, 19 nt, Homo sapiens
  misc_RNA (1)...(19): siRNA sense strand
gcgacgagcaugacaucaa

SEQ ID NO: 1400354 - RNA, 19 nt, Homo sapiens
  misc_RNA (1)...(19): siRNA sense strand
gcacccaggccaggaaguu

SEQ ID NO: 1400355 - RNA, 19 nt, Homo sapiens
  misc_RNA (1)...(19): siRNA sense strand
gacaagaucgccuuuaucc

SEQ ID NO: 1400356 - RNA, 19 nt, Homo sapiens
  misc_RNA (1)...(19): siRNA sense strand
caauggcuauguagaugca

SEQ ID NO: 1400357 - RNA, 19 nt, Homo sapiens
  misc_RNA (1)...(19): siRNA sense strand
gagagccauccuccaguuu

SEQ ID NO: 1400358 - RNA, 19 nt, Homo sapiens
  misc_RNA (1)...(19): siRNA sense strand
gugaaccaguugcagaaca

SEQ ID NO: 1400359 - RNA, 19 nt, Homo sapiens
  misc_RNA (1)...(19): siRNA sense strand
ugggccacauccaguauuu

SEQ ID NO: 1400360 - RNA, 19 nt, Homo sapiens
  misc_RNA (1)...(19): siRNA sense strand
cagcaaguuuguggaggaa

SEQ ID NO: 1400361 - RNA, 19 nt, Homo sapiens
  misc_RNA (1)...(19): siRNA sense strand
cuaucaagcggaucauaaa

SEQ ID NO: 1400362 - RNA, 19 nt, Homo sapiens
  misc_RNA (1)...(19): siRNA sense strand
ggccacauccaguauuuca

SEQ ID NO: 1400363 - RNA, 19 nt, Homo sapiens
  misc_RNA (1)...(19): siRNA sense strand
gaagcaucaccaaggagaa

SEQ ID NO: 1400364 - RNA, 19 nt, Homo sapiens
  misc_RNA (1)...(19): siRNA sense strand
uugcagaacaccacuauca

SEQ ID NO: 1400365 - RNA, 19 nt, Homo sapiens
  misc_RNA (1)...(19): siRNA sense strand
caugcaguacaaagacuua

SEQ ID NO: 1400366 - RNA, 19 nt, Homo sapiens
  misc_RNA (1)...(19): siRNA sense strand
cacagaggcuaugcuaaag

SEQ ID NO: 1400367 - RNA, 19 nt, Homo sapiens
  misc_RNA (1)...(19): siRNA sense strand
gaagccaugcagcugauca

SEQ ID NO: 1400368 - RNA, 19 nt, Homo sapiens
  misc_RNA (1)...(19): siRNA sense strand
ggaggaguacaacaagauc

SEQ ID NO: 1400369 - RNA, 19 nt, Homo sapiens
  misc_RNA (1)...(19): siRNA sense strand
caucauccaguuccaguuc

SEQ ID NO: 1400370 - RNA, 19 nt, Homo sapiens
  misc_RNA (1)...(19): siRNA sense strand
aaaugggccacauccagua

SEQ ID NO: 1400371 - RNA, 19 nt, Homo sapiens
  misc_RNA (1)...(19): siRNA sense strand
caccacagaggcuaugcua

SEQ ID NO: 1400372 - RNA, 19 nt, Homo sapiens
  misc_RNA (1)...(19): siRNA sense strand
ccggcucaauggcuaugua

SEQ ID NO: 1400373 - RNA, 19 nt, Homo sapiens
  misc_RNA (1)...(19): siRNA sense strand
acuaucaagcggaucauaa

SEQ ID NO: 1400374 - RNA, 19 nt, Homo sapiens
  misc_RNA (1)...(19): siRNA sense strand
ggacaccacagaggcuaug

SEQ ID NO: 1400375 - RNA, 19 nt, Homo sapiens
  misc_RNA (1)...(19): siRNA sense strand
gcaucaccaaggagaacua

SEQ ID NO: 1400376 - RNA, 19 nt, Homo sapiens
  misc_RNA (1)...(19): siRNA sense strand
gugcuagcccucucagugu

SEQ ID NO: 1400377 - RNA, 19 nt, Homo sapiens
  misc_RNA (1)...(19): siRNA sense strand
cucaauggcuauguagaug

SEQ ID NO: 1400378 - RNA, 19 nt, Homo sapiens
  misc_RNA (1)...(19): siRNA sense strand
ugacaagaucgccuuuauc

SEQ ID NO: 1400379 - RNA, 19 nt, Homo sapiens
  misc_RNA (1)...(19): siRNA sense strand
cacagagaccagcaagauu

SEQ ID NO: 1400380 - RNA, 19 nt, Homo sapiens
  misc_RNA (1)...(19): siRNA sense strand
ggacgugcuagcccucuca

SEQ ID NO: 1400381 - RNA, 19 nt, Homo sapiens
  misc_RNA (1)...(19): siRNA sense strand
aauaugaagaccuguuaug

SEQ ID NO: 1400382 - RNA, 19 nt, Homo sapiens
  misc_RNA (1)...(19): siRNA sense strand
cggaagccaugcagcugau

SEQ ID NO: 1400383 - RNA, 19 nt, Homo sapiens
  misc_RNA (1)...(19): siRNA sense strand
caggaaguuugaugugaac

SEQ ID NO: 1400384 - RNA, 19 nt, Homo sapiens
  misc_RNA (1)...(19): siRNA sense strand
aguuugaugugaaccaguu

SEQ ID NO: 1400385 - RNA, 19 nt, Homo sapiens
  misc_RNA (1)...(19): siRNA sense strand
guccaacaucuaugacuug

SEQ ID NO: 1400386 - RNA, 19 nt, Homo sapiens
  misc_RNA (1)...(19): siRNA sense strand
ucagcuucaucauccaguu

SEQ ID NO: 1400387 - RNA, 19 nt, Homo sapiens
  misc_RNA (1)...(19): siRNA sense strand
aguauuucaugcaguacaa

SEQ ID NO: 1400388 - RNA, 19 nt, Homo sapiens
  misc_RNA (1)...(19): siRNA sense strand
gauauggaaaccaccuaca

SEQ ID NO: 1400389 - RNA, 19 nt, Homo sapiens
  misc_RNA (1)...(19): siRNA sense strand
gggccaaguuccacauucc

SEQ ID NO: 1400390 - RNA, 19 nt, Homo sapiens
  misc_RNA (1)...(19): siRNA sense strand
uggaggguauuugauggaa

SEQ ID NO: 1400391 - RNA, 19 nt, Homo sapiens
  misc_RNA (1)...(19): siRNA sense strand
ugaagauggcccuugacaa

SEQ ID NO: 1400392 - RNA, 19 nt, Homo sapiens
  misc_RNA (1)...(19): siRNA sense strand
cgagccagaucugacgaau

SEQ ID NO: 1400393 - RNA, 19 nt, Homo sapiens
  misc_RNA (1)...(19): siRNA sense strand
gguggugcccuucccuuca

SEQ ID NO: 1400394 - RNA, 19 nt, Homo sapiens
  misc_RNA (1)...(19): siRNA sense strand
gagccagaucugacgaaug

SEQ ID NO: 1400395 - RNA, 19 nt, Homo sapiens
  misc_RNA (1)...(19): siRNA sense strand
gaaauaugaagaccuguua

SEQ ID NO: 1400396 - RNA, 19 nt, Homo sapiens
  misc_RNA (1)...(19): siRNA sense strand
gcaaguuuguggaggaaua

SEQ ID NO: 1400397 - RNA, 19 nt, Homo sapiens
  misc_RNA (1)...(19): siRNA sense strand
uaaggaggcugaugauuuc

SEQ ID NO: 1400398 - RNA, 19 nt, Homo sapiens
  misc_RNA (1)...(19): siRNA sense strand
ccacagaggcuaugcuaaa

SEQ ID NO: 1400399 - RNA, 19 nt, Homo sapiens
  misc_RNA (1)...(19): siRNA sense strand
ucaagcggaucauaaagaa

SEQ ID NO: 1400400 - RNA, 19 nt, Homo sapiens
  misc_RNA (1)...(19): siRNA sense strand
ccaggaggauguuuaagga

SEQ ID NO: 1400401 - RNA, 19 nt, Homo sapiens
  misc_RNA (1)...(19): siRNA sense strand
gcagaagaacaugcaaaua

SEQ ID NO: 1400402 - RNA, 19 nt, Homo sapiens
  misc_RNA (1)...(19): siRNA sense strand
uuaaggaggcugaugauuu

SEQ ID NO: 1400403 - RNA, 19 nt, Homo sapiens
  misc_RNA (1)...(19): siRNA sense strand
cagaagaacaugcaaauag

SEQ ID NO: 1400404 - RNA, 19 nt, Homo sapiens
  misc_RNA (1)...(19): siRNA sense strand
ucaccaaggagaacuauaa

SEQ ID NO: 1400405 - RNA, 19 nt, Homo sapiens
  misc_RNA (1)...(19): siRNA sense strand
ccaggaaguuugaugugaa

SEQ ID NO: 1400406 - RNA, 19 nt, Homo sapiens
  misc_RNA (1)...(19): siRNA sense strand
ggcaaggacuuccggauca

SEQ ID NO: 1400407 - RNA, 19 nt, Homo sapiens
  misc_RNA (1)...(19): siRNA sense strand
cgaaauacguggaacucau

SEQ ID NO: 1400408 - RNA, 19 nt, Homo sapiens
  misc_RNA (1)...(19): siRNA sense strand
acaagucgaugcuggagaa

SEQ ID NO: 1400409 - RNA, 19 nt, Homo sapiens
  misc_RNA (1)...(19): siRNA sense strand
ugaugaagauggcccuuga

SEQ ID NO: 1400410 - RNA, 19 nt, Homo sapiens
  misc_RNA (1)...(19): siRNA sense strand
ggaaauaugaagaccuguu

SEQ ID NO: 1400411 - RNA, 19 nt, Homo sapiens
  misc_RNA (1)...(19): siRNA sense strand
ggaggcugaugauuucuuc

SEQ ID NO: 1400412 - RNA, 19 nt, Homo sapiens
  misc_RNA (1)...(19): siRNA sense strand
caccaucccuggagcaaga

SEQ ID NO: 1400413 - RNA, 19 nt, Homo sapiens
  misc_RNA (1)...(19): siRNA sense strand
gguccaacaucuaugacuu

SEQ ID NO: 1400414 - RNA, 19 nt, Homo sapiens
  misc_RNA (1)...(19): siRNA sense strand
ccaagcaccugcacagucu

SEQ ID NO: 1400415 - RNA, 19 nt, Homo sapiens
  misc_RNA (1)...(19): siRNA sense strand
gcaccaccgugaacuugga

SEQ ID NO: 1400416 - RNA, 19 nt, Homo sapiens
  misc_RNA (1)...(19): siRNA sense strand
gaaauacguggaacucauc

SEQ ID NO: 1400417 - RNA, 19 nt, Homo sapiens
  misc_RNA (1)...(19): siRNA sense strand
ucagcuaccucgucgauca

SEQ ID NO: 1400418 - RNA, 19 nt, Homo sapiens
  misc_RNA (1)...(19): siRNA sense strand
gcaaggacuuccggaucaa

SEQ ID NO: 1400419 - RNA, 19 nt, Homo sapiens
  misc_RNA (1)...(19): siRNA sense strand
gccaggaaguuugauguga

SEQ ID NO: 1400420 - RNA, 19 nt, Homo sapiens
  misc_RNA (1)...(19): siRNA sense strand
agccagaucugacgaaugu

SEQ ID NO: 1400421 - RNA, 19 nt, Homo sapiens
  misc_RNA (1)...(19): siRNA sense strand
gaacuacaacaccaacauc

SEQ ID NO: 1400422 - RNA, 19 nt, Homo sapiens
  misc_RNA (1)...(19): siRNA sense strand
acaccaacaucaccacaga

SEQ ID NO: 1400423 - RNA, 19 nt, Homo sapiens
  misc_RNA (1)...(19): siRNA sense strand
ccacagagaccagcaagau

SEQ ID NO: 1400424 - RNA, 19 nt, Homo sapiens
  misc_RNA (1)...(19): siRNA sense strand
gagccauccuccaguuuua

SEQ ID NO: 1400425 - RNA, 19 nt, Homo sapiens
  misc_RNA (1)...(19): siRNA sense strand
gcagaacaccacuaucaag

SEQ ID NO: 1400426 - RNA, 19 nt, Homo sapiens
  misc_RNA (1)...(19): siRNA sense strand
ccaaccacacccugaagua

SEQ ID NO: 1400427 - RNA, 19 nt, Homo sapiens
  misc_RNA (1)...(19): siRNA sense strand
caucccaggugguguggaa

SEQ ID NO: 1400428 - RNA, 19 nt, Homo sapiens
  misc_RNA (1)...(19): siRNA sense strand
ccacauccaguauuucaug

SEQ ID NO: 1400429 - RNA, 19 nt, Homo sapiens
  misc_RNA (1)...(19): siRNA sense strand
uccaguauuucaugcagua

SEQ ID NO: 1400430 - RNA, 19 nt, Homo sapiens
  misc_RNA (1)...(19): siRNA sense strand
gcucaauggcuauguagau

SEQ ID NO: 1400431 - RNA, 19 nt, Homo sapiens
  misc_RNA (1)...(19): siRNA sense strand
uugacaagaucgccuuuau

SEQ ID NO: 1400432 - RNA, 19 nt, Homo sapiens
  misc_RNA (1)...(19): siRNA sense strand
ccagaucugacgaauguga

SEQ ID NO: 1400433 - RNA, 19 nt, Homo sapiens
  misc_RNA (1)...(19): siRNA sense strand
ccucggccauguugagcua

SEQ ID NO: 1400434 - RNA, 19 nt, Homo sapiens
  misc_RNA (1)...(19): siRNA sense strand
caguggcgcuggaggguau

SEQ ID NO: 1400435 - RNA, 19 nt, Homo sapiens
  misc_RNA (1)...(19): siRNA sense strand
cgacgagcaugacaucaac

SEQ ID NO: 1400436 - RNA, 19 nt, Homo sapiens
  misc_RNA (1)...(19): siRNA sense strand
gaggccaacuggaacuaca

SEQ ID NO: 1400437 - RNA, 19 nt, Homo sapiens
  misc_RNA (1)...(19): siRNA sense strand
acagagaccagcaagauuc

SEQ ID NO: 1400438 - RNA, 19 nt, Homo sapiens
  misc_RNA (1)...(19): siRNA sense strand
agaagaacaugcaaauagc

SEQ ID NO: 1400439 - RNA, 19 nt, Homo sapiens
  misc_RNA (1)...(19): siRNA sense strand
ccaaggagaacuauaacca

SEQ ID NO: 1400440 - RNA, 19 nt, Homo sapiens
  misc_RNA (1)...(19): siRNA sense strand
ggaacuacaacaccaacau

SEQ ID NO: 1400441 - RNA, 19 nt, Homo sapiens
  misc_RNA (1)...(19): siRNA sense strand
gcgacgagcaugacaucaa

SEQ ID NO: 1400442 - RNA, 19 nt, Homo sapiens
  misc_RNA (1)...(19): siRNA sense strand
gcacccaggccaggaaguu

SEQ ID NO: 1400443 - RNA, 19 nt, Homo sapiens
  misc_RNA (1)...(19): siRNA sense strand
gacaagaucgccuuuaucc

SEQ ID NO: 1400444 - RNA, 19 nt, Homo sapiens
  misc_RNA (1)...(19): siRNA sense strand
caauggcuauguagaugca

SEQ ID NO: 1400445 - RNA, 19 nt, Homo sapiens
  misc_RNA (1)...(19): siRNA sense strand
gagagccauccuccaguuu

SEQ ID NO: 1400446 - RNA, 19 nt, Homo sapiens
  misc_RNA (1)...(19): siRNA sense strand
gugaaccaguugcagaaca

SEQ ID NO: 1400447 - RNA, 19 nt, Homo sapiens
  misc_RNA (1)...(19): siRNA sense strand
ugggccacauccaguauuu

SEQ ID NO: 1400448 - RNA, 19 nt, Homo sapiens
  misc_RNA (1)...(19): siRNA sense strand
cagcaaguuuguggaggaa

SEQ ID NO: 1400449 - RNA, 19 nt, Homo sapiens
  misc_RNA (1)...(19): siRNA sense strand
cuaucaagcggaucauaaa

SEQ ID NO: 1400450 - RNA, 19 nt, Homo sapiens
  misc_RNA (1)...(19): siRNA sense strand
ggccacauccaguauuuca

SEQ ID NO: 1400451 - RNA, 19 nt, Homo sapiens
  misc_RNA (1)...(19): siRNA sense strand
gaagcaucaccaaggagaa

SEQ ID NO: 1400452 - RNA, 19 nt, Homo sapiens
  misc_RNA (1)...(19): siRNA sense strand
uugcagaacaccacuauca

SEQ ID NO: 1400453 - RNA, 19 nt, Homo sapiens
  misc_RNA (1)...(19): siRNA sense strand
caugcaguacaaagacuua

SEQ ID NO: 1400454 - RNA, 19 nt, Homo sapiens
  misc_RNA (1)...(19): siRNA sense strand
cacagaggcuaugcuaaag

SEQ ID NO: 1400455 - RNA, 19 nt, Homo sapiens
  misc_RNA (1)...(19): siRNA sense strand
gaagccaugcagcugauca

SEQ ID NO: 1400456 - RNA, 19 nt, Homo sapiens
  misc_RNA (1)...(19): siRNA sense strand
ggaggaguacaacaagauc

SEQ ID NO: 1400457 - RNA, 19 nt, Homo sapiens
  misc_RNA (1)...(19): siRNA sense strand
caucauccaguuccaguuc

SEQ ID NO: 1400458 - RNA, 19 nt, Homo sapiens
  misc_RNA (1)...(19): siRNA sense strand
aaaugggccacauccagua

SEQ ID NO: 1400459 - RNA, 19 nt, Homo sapiens
  misc_RNA (1)...(19): siRNA sense strand
caccacagaggcuaugcua

SEQ ID NO: 1400460 - RNA, 19 nt, Homo sapiens
  misc_RNA (1)...(19): siRNA sense strand
ccggcucaauggcuaugua

SEQ ID NO: 1400461 - RNA, 19 nt, Homo sapiens
  misc_RNA (1)...(19): siRNA sense strand
acuaucaagcggaucauaa

SEQ ID NO: 1400462 - RNA, 19 nt, Homo sapiens
  misc_RNA (1)...(19): siRNA sense strand
ggacaccacagaggcuaug

SEQ ID NO: 1400463 - RNA, 19 nt, Homo sapiens
  misc_RNA (1)...(19): siRNA sense strand
gcaucaccaaggagaacua

SEQ ID NO: 1400464 - RNA, 19 nt, Homo sapiens
  misc_RNA (1)...(19): siRNA sense strand
gugcuagcccucucagugu

SEQ ID NO: 1400465 - RNA, 19 nt, Homo sapiens
  misc_RNA (1)...(19): siRNA sense strand
cucaauggcuauguagaug

SEQ ID NO: 1400466 - RNA, 19 nt, Homo sapiens
  misc_RNA (1)...(19): siRNA sense strand
ugacaagaucgccuuuauc

SEQ ID NO: 1400467 - RNA, 19 nt, Homo sapiens
  misc_RNA (1)...(19): siRNA sense strand
cacagagaccagcaagauu

SEQ ID NO: 1400468 - RNA, 19 nt, Homo sapiens
  misc_RNA (1)...(19): siRNA sense strand
ggacgugcuagcccucuca

SEQ ID NO: 1400469 - RNA, 19 nt, Homo sapiens
  misc_RNA (1)...(19): siRNA sense strand
aauaugaagaccuguuaug

SEQ ID NO: 1400470 - RNA, 19 nt, Homo sapiens
  misc_RNA (1)...(19): siRNA sense strand
cggaagccaugcagcugau

SEQ ID NO: 1400471 - RNA, 19 nt, Homo sapiens
  misc_RNA (1)...(19): siRNA sense strand
caggaaguuugaugugaac

SEQ ID NO: 1400472 - RNA, 19 nt, Homo sapiens
  misc_RNA (1)...(19): siRNA sense strand
aguuugaugugaaccaguu

SEQ ID NO: 1400473 - RNA, 19 nt, Homo sapiens
  misc_RNA (1)...(19): siRNA sense strand
guccaacaucuaugacuug

SEQ ID NO: 1400474 - RNA, 19 nt, Homo sapiens
  misc_RNA (1)...(19): siRNA sense strand
ucagcuucaucauccaguu

SEQ ID NO: 1400475 - RNA, 19 nt, Homo sapiens
  misc_RNA (1)...(19): siRNA sense strand
aguauuucaugcaguacaa

SEQ ID NO: 1400476 - RNA, 19 nt, Homo sapiens
  misc_RNA (1)...(19): siRNA sense strand
gauauggaaaccaccuaca

SEQ ID NO: 1400477 - RNA, 19 nt, Homo sapiens
  misc_RNA (1)...(19): siRNA sense strand
gggccaaguuccacauucc

SEQ ID NO: 1400478 - RNA, 19 nt, Homo sapiens
  misc_RNA (1)...(19): siRNA sense strand
uggaggguauuugauggaa

SEQ ID NO: 1400479 - RNA, 19 nt, Homo sapiens
  misc_RNA (1)...(19): siRNA sense strand
ugaagauggcccuugacaa

SEQ ID NO: 1400480 - RNA, 19 nt, Homo sapiens
  misc_RNA (1)...(19): siRNA sense strand
cgagccagaucugacgaau

SEQ ID NO: 1400481 - RNA, 19 nt, Homo sapiens
  misc_RNA (1)...(19): siRNA sense strand
gguggugcccuucccuuca

SEQ ID NO: 1400482 - RNA, 19 nt, Homo sapiens
  misc_RNA (1)...(19): siRNA sense strand
gagccagaucugacgaaug

SEQ ID NO: 1400483 - RNA, 19 nt, Homo sapiens
  misc_RNA (1)...(19): siRNA sense strand
gaaauaugaagaccuguua

SEQ ID NO: 1400484 - RNA, 19 nt, Homo sapiens
  misc_RNA (1)...(19): siRNA sense strand
gcaaguuuguggaggaaua

SEQ ID NO: 1400485 - RNA, 19 nt, Homo sapiens
  misc_RNA (1)...(19): siRNA sense strand
uaaggaggcugaugauuuc

SEQ ID NO: 1400486 - RNA, 19 nt, Homo sapiens
  misc_RNA (1)...(19): siRNA sense strand
ccacagaggcuaugcuaaa

SEQ ID NO: 1400487 - RNA, 19 nt, Homo sapiens
  misc_RNA (1)...(19): siRNA sense strand
ucaagcggaucauaaagaa

SEQ ID NO: 1400488 - RNA, 19 nt, Homo sapiens
  misc_RNA (1)...(19): siRNA sense strand
ccaggaggauguuuaagga

SEQ ID NO: 1400489 - RNA, 19 nt, Homo sapiens
  misc_RNA (1)...(19): siRNA sense strand
gcagaagaacaugcaaaua

SEQ ID NO: 1400490 - RNA, 19 nt, Homo sapiens
  misc_RNA (1)...(19): siRNA sense strand
uuaaggaggcugaugauuu

SEQ ID NO: 1400491 - RNA, 19 nt, Homo sapiens
  misc_RNA (1)...(19): siRNA sense strand
cagaagaacaugcaaauag

SEQ ID NO: 1400492 - RNA, 19 nt, Homo sapiens
  misc_RNA (1)...(19): siRNA sense strand
ucaccaaggagaacuauaa

SEQ ID NO: 1400493 - RNA, 19 nt, Homo sapiens
  misc_RNA (1)...(19): siRNA sense strand
ccaggaaguuugaugugaa

SEQ ID NO: 1400494 - RNA, 19 nt, Homo sapiens
  misc_RNA (1)...(19): siRNA sense strand
ggcaaggacuuccggauca

SEQ ID NO: 1400495 - RNA, 19 nt, Homo sapiens
  misc_RNA (1)...(19): siRNA sense strand
cgaaauacguggaacucau

SEQ ID NO: 1400496 - RNA, 19 nt, Homo sapiens
  misc_RNA (1)...(19): siRNA sense strand
acaagucgaugcuggagaa

SEQ ID NO: 1400497 - RNA, 19 nt, Homo sapiens
  misc_RNA (1)...(19): siRNA sense strand
ugaugaagauggcccuuga

SEQ ID NO: 1400498 - RNA, 19 nt, Homo sapiens
  misc_RNA (1)...(19): siRNA sense strand
ggaaauaugaagaccuguu

SEQ ID NO: 1400499 - RNA, 19 nt, Homo sapiens
  misc_RNA (1)...(19): siRNA sense strand
ggaggcugaugauuucuuc

SEQ ID NO: 1400500 - RNA, 19 nt, Homo sapiens
  misc_RNA (1)...(19): siRNA sense strand
caccaucccuggagcaaga

SEQ ID NO: 1400501 - RNA, 19 nt, Homo sapiens
  misc_RNA (1)...(19): siRNA sense strand
gguccaacaucuaugacuu

SEQ ID NO: 1400502 - RNA, 19 nt, Homo sapiens
  misc_RNA (1)...(19): siRNA sense strand
ccaagcaccugcacagucu

SEQ ID NO: 1400503 - RNA, 19 nt, Homo sapiens
  misc_RNA (1)...(19): siRNA sense strand
gcaccaccgugaacuugga

SEQ ID NO: 1400504 - RNA, 19 nt, Homo sapiens
  misc_RNA (1)...(19): siRNA sense strand
gaaauacguggaacucauc

SEQ ID NO: 1400505 - RNA, 19 nt, Homo sapiens
  misc_RNA (1)...(19): siRNA sense strand
ucagcuaccucgucgauca

SEQ ID NO: 1400506 - RNA, 19 nt, Homo sapiens
  misc_RNA (1)...(19): siRNA sense strand
gcaaggacuuccggaucaa

SEQ ID NO: 1400507 - RNA, 19 nt, Homo sapiens
  misc_RNA (1)...(19): siRNA sense strand
gccaggaaguuugauguga

SEQ ID NO: 1400508 - RNA, 19 nt, Homo sapiens
  misc_RNA (1)...(19): siRNA sense strand
agccagaucugacgaaugu

SEQ ID NO: 1400509 - RNA, 19 nt, Homo sapiens
  misc_RNA (1)...(19): siRNA sense strand
gaacuacaacaccaacauc

SEQ ID NO: 1400510 - RNA, 19 nt, Homo sapiens
  misc_RNA (1)...(19): siRNA sense strand
acaccaacaucaccacaga

SEQ ID NO: 1400511 - RNA, 19 nt, Homo sapiens
  misc_RNA (1)...(19): siRNA sense strand
ccacagagaccagcaagau

SEQ ID NO: 1400512 - RNA, 19 nt, Homo sapiens
  misc_RNA (1)...(19): siRNA sense strand
gagccauccuccaguuuua

SEQ ID NO: 1400513 - RNA, 19 nt, Homo sapiens
  misc_RNA (1)...(19): siRNA sense strand
gcagaacaccacuaucaag

SEQ ID NO: 1400514 - RNA, 19 nt, Homo sapiens
  misc_RNA (1)...(19): siRNA sense strand
ccaaccacacccugaagua

SEQ ID NO: 1400515 - RNA, 19 nt, Homo sapiens
  misc_RNA (1)...(19): siRNA sense strand
ccacauccaguauuucaug

SEQ ID NO: 1400516 - RNA, 19 nt, Homo sapiens
  misc_RNA (1)...(19): siRNA sense strand
caucccaggugguguggaa

SEQ ID NO: 1400517 - RNA, 19 nt, Homo sapiens
  misc_RNA (1)...(19): siRNA sense strand
uccaguauuucaugcagua

SEQ ID NO: 1400518 - RNA, 19 nt, Homo sapiens
  misc_RNA (1)...(19): siRNA sense strand
gcucaauggcuauguagau

SEQ ID NO: 1400519 - RNA, 19 nt, Homo sapiens
  misc_RNA (1)...(19): siRNA sense strand
uugacaagaucgccuuuau

SEQ ID NO: 1400520 - RNA, 19 nt, Homo sapiens
  misc_RNA (1)...(19): siRNA sense strand
acagagaccagcaagauuc

SEQ ID NO: 1400521 - RNA, 19 nt, Homo sapiens
  misc_RNA (1)...(19): siRNA sense strand
ccucggccauguugagcua

SEQ ID NO: 1400522 - RNA, 19 nt, Homo sapiens
  misc_RNA (1)...(19): siRNA sense strand
caguggcgcuggaggguau

SEQ ID NO: 1400523 - RNA, 19 nt, Homo sapiens
  misc_RNA (1)...(19): siRNA sense strand
cgacgagcaugacaucaac

SEQ ID NO: 1400524 - RNA, 19 nt, Homo sapiens
  misc_RNA (1)...(19): siRNA sense strand
gaggccaacuggaacuaca

SEQ ID NO: 1400525 - RNA, 19 nt, Homo sapiens
  misc_RNA (1)...(19): siRNA sense strand
ccagaucugacgaauguga

SEQ ID NO: 1400526 - RNA, 19 nt, Homo sapiens
  misc_RNA (1)...(19): siRNA sense strand
agaagaacaugcaaauagc

SEQ ID NO: 1400527 - RNA, 19 nt, Homo sapiens
  misc_RNA (1)...(19): siRNA sense strand
ccaaggagaacuauaacca

SEQ ID NO: 1400528 - RNA, 19 nt, Homo sapiens
  misc_RNA (1)...(19): siRNA sense strand
gcgacgagcaugacaucaa

SEQ ID NO: 1400529 - RNA, 19 nt, Homo sapiens
  misc_RNA (1)...(19): siRNA sense strand
ggaacuacaacaccaacau

SEQ ID NO: 1400530 - RNA, 19 nt, Homo sapiens
  misc_RNA (1)...(19): siRNA sense strand
gcacccaggccaggaaguu

SEQ ID NO: 1400531 - RNA, 19 nt, Homo sapiens
  misc_RNA (1)...(19): siRNA sense strand
gacaagaucgccuuuaucc

SEQ ID NO: 1400532 - RNA, 19 nt, Homo sapiens
  misc_RNA (1)...(19): siRNA sense strand
caauggcuauguagaugca

SEQ ID NO: 1400533 - RNA, 19 nt, Homo sapiens
  misc_RNA (1)...(19): siRNA sense strand
gagagccauccuccaguuu

SEQ ID NO: 1400534 - RNA, 19 nt, Homo sapiens
  misc_RNA (1)...(19): siRNA sense strand
gugaaccaguugcagaaca

SEQ ID NO: 1400535 - RNA, 19 nt, Homo sapiens
  misc_RNA (1)...(19): siRNA sense strand
ugggccacauccaguauuu

SEQ ID NO: 1400536 - RNA, 19 nt, Homo sapiens
  misc_RNA (1)...(19): siRNA sense strand
cagcaaguuuguggaggaa

SEQ ID NO: 1400537 - RNA, 19 nt, Homo sapiens
  misc_RNA (1)...(19): siRNA sense strand
cuaucaagcggaucauaaa

SEQ ID NO: 1400538 - RNA, 19 nt, Homo sapiens
  misc_RNA (1)...(19): siRNA sense strand
ggccacauccaguauuuca

SEQ ID NO: 1400539 - RNA, 19 nt, Homo sapiens
  misc_RNA (1)...(19): siRNA sense strand
gaagcaucaccaaggagaa

SEQ ID NO: 1400540 - RNA, 19 nt, Homo sapiens
  misc_RNA (1)...(19): siRNA sense strand
uugcagaacaccacuauca

SEQ ID NO: 1400541 - RNA, 19 nt, Homo sapiens
  misc_RNA (1)...(19): siRNA sense strand
caugcaguacaaagacuua

SEQ ID NO: 1400542 - RNA, 19 nt, Homo sapiens
  misc_RNA (1)...(19): siRNA sense strand
cacagaggcuaugcuaaag

SEQ ID NO: 1400543 - RNA, 19 nt, Homo sapiens
  misc_RNA (1)...(19): siRNA sense strand
gaagccaugcagcugauca

SEQ ID NO: 1400544 - RNA, 19 nt, Homo sapiens
  misc_RNA (1)...(19): siRNA sense strand
ggaggaguacaacaagauc

SEQ ID NO: 1400545 - RNA, 19 nt, Homo sapiens
  misc_RNA (1)...(19): siRNA sense strand
caucauccaguuccaguuc

SEQ ID NO: 1400546 - RNA, 19 nt, Homo sapiens
  misc_RNA (1)...(19): siRNA sense strand
aaaugggccacauccagua

SEQ ID NO: 1400547 - RNA, 19 nt, Homo sapiens
  misc_RNA (1)...(19): siRNA sense strand
caccacagaggcuaugcua

SEQ ID NO: 1400548 - RNA, 19 nt, Homo sapiens
  misc_RNA (1)...(19): siRNA sense strand
ccggcucaauggcuaugua

SEQ ID NO: 1400549 - RNA, 19 nt, Homo sapiens
  misc_RNA (1)...(19): siRNA sense strand
acuaucaagcggaucauaa

SEQ ID NO: 1400550 - RNA, 19 nt, Homo sapiens
  misc_RNA (1)...(19): siRNA sense strand
ggacaccacagaggcuaug

SEQ ID NO: 1400551 - RNA, 19 nt, Homo sapiens
  misc_RNA (1)...(19): siRNA sense strand
gcaucaccaaggagaacua

SEQ ID NO: 1400552 - RNA, 19 nt, Homo sapiens
  misc_RNA (1)...(19): siRNA sense strand
gugcuagcccucucagugu

SEQ ID NO: 1400553 - RNA, 19 nt, Homo sapiens
  misc_RNA (1)...(19): siRNA sense strand
cucaauggcuauguagaug

SEQ ID NO: 1400554 - RNA, 19 nt, Homo sapiens
  misc_RNA (1)...(19): siRNA sense strand
cacagagaccagcaagauu

SEQ ID NO: 1400555 - RNA, 19 nt, Homo sapiens
  misc_RNA (1)...(19): siRNA sense strand
ugacaagaucgccuuuauc

SEQ ID NO: 1400556 - RNA, 19 nt, Homo sapiens
  misc_RNA (1)...(19): siRNA sense strand
ggacgugcuagcccucuca

SEQ ID NO: 1400557 - RNA, 19 nt, Homo sapiens
  misc_RNA (1)...(19): siRNA sense strand
caggaaguuugaugugaac

SEQ ID NO: 1400558 - RNA, 19 nt, Homo sapiens
  misc_RNA (1)...(19): siRNA sense strand
cggaagccaugcagcugau

SEQ ID NO: 1400559 - RNA, 19 nt, Homo sapiens
  misc_RNA (1)...(19): siRNA sense strand
aguuugaugugaaccaguu

SEQ ID NO: 1400560 - RNA, 19 nt, Homo sapiens
  misc_RNA (1)...(19): siRNA sense strand
aauaugaagaccuguuaug

SEQ ID NO: 1400561 - RNA, 19 nt, Homo sapiens
  misc_RNA (1)...(19): siRNA sense strand
guccaacaucuaugacuug

SEQ ID NO: 1400562 - RNA, 19 nt, Homo sapiens
  misc_RNA (1)...(19): siRNA sense strand
ucagcuucaucauccaguu

SEQ ID NO: 1400563 - RNA, 19 nt, Homo sapiens
  misc_RNA (1)...(19): siRNA sense strand
aguauuucaugcaguacaa

SEQ ID NO: 1400564 - RNA, 19 nt, Homo sapiens
  misc_RNA (1)...(19): siRNA sense strand
gauauggaaaccaccuaca

SEQ ID NO: 1400565 - RNA, 19 nt, Homo sapiens
  misc_RNA (1)...(19): siRNA sense strand
gggccaaguuccacauucc

SEQ ID NO: 1400566 - RNA, 19 nt, Homo sapiens
  misc_RNA (1)...(19): siRNA sense strand
uggaggguauuugauggaa

SEQ ID NO: 1400567 - RNA, 19 nt, Homo sapiens
  misc_RNA (1)...(19): siRNA sense strand
ugaagauggcccuugacaa

SEQ ID NO: 1400568 - RNA, 19 nt, Homo sapiens
  misc_RNA (1)...(19): siRNA sense strand
cgagccagaucugacgaau

SEQ ID NO: 1400569 - RNA, 19 nt, Homo sapiens
  misc_RNA (1)...(19): siRNA sense strand
gguggugcccuucccuuca

SEQ ID NO: 1400570 - RNA, 19 nt, Homo sapiens
  misc_RNA (1)...(19): siRNA sense strand
gagccagaucugacgaaug

SEQ ID NO: 1400571 - RNA, 19 nt, Homo sapiens
  misc_RNA (1)...(19): siRNA sense strand
gaaauaugaagaccuguua

SEQ ID NO: 1400572 - RNA, 19 nt, Homo sapiens
  misc_RNA (1)...(19): siRNA sense strand
gcaaguuuguggaggaaua

SEQ ID NO: 1400573 - RNA, 19 nt, Homo sapiens
  misc_RNA (1)...(19): siRNA sense strand
uaaggaggcugaugauuuc

SEQ ID NO: 1400574 - RNA, 19 nt, Homo sapiens
  misc_RNA (1)...(19): siRNA sense strand
ccacagaggcuaugcuaaa

SEQ ID NO: 1400575 - RNA, 19 nt, Homo sapiens
  misc_RNA (1)...(19): siRNA sense strand
ucaagcggaucauaaagaa

SEQ ID NO: 1400576 - RNA, 19 nt, Homo sapiens
  misc_RNA (1)...(19): siRNA sense strand
ccaggaggauguuuaagga

SEQ ID NO: 1400577 - RNA, 19 nt, Homo sapiens
  misc_RNA (1)...(19): siRNA sense strand
gcagaagaacaugcaaaua

SEQ ID NO: 1400578 - RNA, 19 nt, Homo sapiens
  misc_RNA (1)...(19): siRNA sense strand
uuaaggaggcugaugauuu

SEQ ID NO: 1400579 - RNA, 19 nt, Homo sapiens
  misc_RNA (1)...(19): siRNA sense strand
cagaagaacaugcaaauag

SEQ ID NO: 1400580 - RNA, 19 nt, Homo sapiens
  misc_RNA (1)...(19): siRNA sense strand
ucaccaaggagaacuauaa

SEQ ID NO: 1400581 - RNA, 19 nt, Homo sapiens
  misc_RNA (1)...(19): siRNA sense strand
ccaggaaguuugaugugaa

SEQ ID NO: 1400582 - RNA, 19 nt, Homo sapiens
  misc_RNA (1)...(19): siRNA sense strand
ggcaaggacuuccggauca

SEQ ID NO: 1400583 - RNA, 19 nt, Homo sapiens
  misc_RNA (1)...(19): siRNA sense strand
cgaaauacguggaacucau

SEQ ID NO: 1400584 - RNA, 19 nt, Homo sapiens
  misc_RNA (1)...(19): siRNA sense strand
acaagucgaugcuggagaa

SEQ ID NO: 1400585 - RNA, 19 nt, Homo sapiens
  misc_RNA (1)...(19): siRNA sense strand
ugaugaagauggcccuuga

SEQ ID NO: 1400586 - RNA, 19 nt, Homo sapiens
  misc_RNA (1)...(19): siRNA sense strand
ggaaauaugaagaccuguu

SEQ ID NO: 1400587 - RNA, 19 nt, Homo sapiens
  misc_RNA (1)...(19): siRNA sense strand
ggaggcugaugauuucuuc

SEQ ID NO: 1400588 - RNA, 19 nt, Homo sapiens
  misc_RNA (1)...(19): siRNA sense strand
caccaucccuggagcaaga

SEQ ID NO: 1400589 - RNA, 19 nt, Homo sapiens
  misc_RNA (1)...(19): siRNA sense strand
gguccaacaucuaugacuu

SEQ ID NO: 1400590 - RNA, 19 nt, Homo sapiens
  misc_RNA (1)...(19): siRNA sense strand
ccaagcaccugcacagucu

SEQ ID NO: 1400591 - RNA, 19 nt, Homo sapiens
  misc_RNA (1)...(19): siRNA sense strand
gcaccaccgugaacuugga

SEQ ID NO: 1400592 - RNA, 19 nt, Homo sapiens
  misc_RNA (1)...(19): siRNA sense strand
gaaauacguggaacucauc

SEQ ID NO: 1400593 - RNA, 19 nt, Homo sapiens
  misc_RNA (1)...(19): siRNA sense strand
ucagcuaccucgucgauca

SEQ ID NO: 1400594 - RNA, 19 nt, Homo sapiens
  misc_RNA (1)...(19): siRNA sense strand
gcaaggacuuccggaucaa

SEQ ID NO: 1400595 - RNA, 19 nt, Homo sapiens
  misc_RNA (1)...(19): siRNA sense strand
gccaggaaguuugauguga

SEQ ID NO: 1400596 - RNA, 19 nt, Homo sapiens
  misc_RNA (1)...(19): siRNA sense strand
agccagaucugacgaaugu

SEQ ID NO: 1400597 - RNA, 19 nt, Homo sapiens
  misc_RNA (1)...(19): siRNA sense strand
gaacuacaacaccaacauc

SEQ ID NO: 1400598 - RNA, 19 nt, Homo sapiens
  misc_RNA (1)...(19): siRNA sense strand
acaccaacaucaccacaga

SEQ ID NO: 1400599 - RNA, 19 nt, Homo sapiens
  misc_RNA (1)...(19): siRNA sense strand
ccacagagaccagcaagau

SEQ ID NO: 1400600 - RNA, 19 nt, Homo sapiens
  misc_RNA (1)...(19): siRNA sense strand
gagccauccuccaguuuua

SEQ ID NO: 1400601 - RNA, 19 nt, Homo sapiens
  misc_RNA (1)...(19): siRNA sense strand
gcagaacaccacuaucaag

SEQ ID NO: 1400602 - RNA, 19 nt, Homo sapiens
  misc_RNA (1)...(19): siRNA sense strand
ccaaccacacccugaagua

SEQ ID NO: 1400603 - RNA, 19 nt, Homo sapiens
  misc_RNA (1)...(19): siRNA sense strand
caucccaggugguguggaa

SEQ ID NO: 1400604 - RNA, 19 nt, Homo sapiens
  misc_RNA (1)...(19): siRNA sense strand
ccacauccaguauuucaug

SEQ ID NO: 1400605 - RNA, 19 nt, Homo sapiens
  misc_RNA (1)...(19): siRNA sense strand
uccaguauuucaugcagua

SEQ ID NO: 1400606 - RNA, 19 nt, Homo sapiens
  misc_RNA (1)...(19): siRNA sense strand
gcucaauggcuauguagau

SEQ ID NO: 1400607 - RNA, 19 nt, Homo sapiens
  misc_RNA (1)...(19): siRNA sense strand
uugacaagaucgccuuuau

SEQ ID NO: 1400608 - RNA, 19 nt, Homo sapiens
  misc_RNA (1)...(19): siRNA sense strand
ccagaucugacgaauguga

SEQ ID NO: 1400609 - RNA, 19 nt, Homo sapiens
  misc_RNA (1)...(19): siRNA sense strand
ccucggccauguugagcua

SEQ ID NO: 1400610 - RNA, 19 nt, Homo sapiens
  misc_RNA (1)...(19): siRNA sense strand
caguggcgcuggaggguau

SEQ ID NO: 1400611 - RNA, 19 nt, Homo sapiens
  misc_RNA (1)...(19): siRNA sense strand
cgacgagcaugacaucaac

SEQ ID NO: 1400612 - RNA, 19 nt, Homo sapiens
  misc_RNA (1)...(19): siRNA sense strand
gaggccaacuggaacuaca

SEQ ID NO: 1400613 - RNA, 19 nt, Homo sapiens
  misc_RNA (1)...(19): siRNA sense strand
acagagaccagcaagauuc

SEQ ID NO: 1400614 - RNA, 19 nt, Homo sapiens
  misc_RNA (1)...(19): siRNA sense strand
agaagaacaugcaaauagc

SEQ ID NO: 1400615 - RNA, 19 nt, Homo sapiens
  misc_RNA (1)...(19): siRNA sense strand
ccaaggagaacuauaacca

SEQ ID NO: 1400616 - RNA, 19 nt, Homo sapiens
  misc_RNA (1)...(19): siRNA sense strand
ggaacuacaacaccaacau

SEQ ID NO: 1400617 - RNA, 19 nt, Homo sapiens
  misc_RNA (1)...(19): siRNA sense strand
gcgacgagcaugacaucaa

SEQ ID NO: 1400618 - RNA, 19 nt, Homo sapiens
  misc_RNA (1)...(19): siRNA sense strand
gcacccaggccaggaaguu

SEQ ID NO: 1400619 - RNA, 19 nt, Homo sapiens
  misc_RNA (1)...(19): siRNA sense strand
gacaagaucgccuuuaucc

SEQ ID NO: 1400620 - RNA, 19 nt, Homo sapiens
  misc_RNA (1)...(19): siRNA sense strand
caauggcuauguagaugca

SEQ ID NO: 1400621 - RNA, 19 nt, Homo sapiens
  misc_RNA (1)...(19): siRNA sense strand
gagagccauccuccaguuu

SEQ ID NO: 1400622 - RNA, 19 nt, Homo sapiens
  misc_RNA (1)...(19): siRNA sense strand
gugaaccaguugcagaaca

SEQ ID NO: 1400623 - RNA, 19 nt, Homo sapiens
  misc_RNA (1)...(19): siRNA sense strand
ugggccacauccaguauuu

SEQ ID NO: 1400624 - RNA, 19 nt, Homo sapiens
  misc_RNA (1)...(19): siRNA sense strand
cagcaaguuuguggaggaa

SEQ ID NO: 1400625 - RNA, 19 nt, Homo sapiens
  misc_RNA (1)...(19): siRNA sense strand
cuaucaagcggaucauaaa

SEQ ID NO: 1400626 - RNA, 19 nt, Homo sapiens
  misc_RNA (1)...(19): siRNA sense strand
ggccacauccaguauuuca

SEQ ID NO: 1400627 - RNA, 19 nt, Homo sapiens
  misc_RNA (1)...(19): siRNA sense strand
gaagcaucaccaaggagaa

SEQ ID NO: 1400628 - RNA, 19 nt, Homo sapiens
  misc_RNA (1)...(19): siRNA sense strand
uugcagaacaccacuauca

SEQ ID NO: 1400629 - RNA, 19 nt, Homo sapiens
  misc_RNA (1)...(19): siRNA sense strand
caugcaguacaaagacuua

SEQ ID NO: 1400630 - RNA, 19 nt, Homo sapiens
  misc_RNA (1)...(19): siRNA sense strand
cacagaggcuaugcuaaag

SEQ ID NO: 1400631 - RNA, 19 nt, Homo sapiens
  misc_RNA (1)...(19): siRNA sense strand
gaagccaugcagcugauca

SEQ ID NO: 1400632 - RNA, 19 nt, Homo sapiens
  misc_RNA (1)...(19): siRNA sense strand
ggaggaguacaacaagauc

SEQ ID NO: 1400633 - RNA, 19 nt, Homo sapiens
  misc_RNA (1)...(19): siRNA sense strand
caucauccaguuccaguuc

SEQ ID NO: 1400634 - RNA, 19 nt, Homo sapiens
  misc_RNA (1)...(19): siRNA sense strand
aaaugggccacauccagua

SEQ ID NO: 1400635 - RNA, 19 nt, Homo sapiens
  misc_RNA (1)...(19): siRNA sense strand
caccacagaggcuaugcua

SEQ ID NO: 1400636 - RNA, 19 nt, Homo sapiens
  misc_RNA (1)...(19): siRNA sense strand
ccggcucaauggcuaugua

SEQ ID NO: 1400637 - RNA, 19 nt, Homo sapiens
  misc_RNA (1)...(19): siRNA sense strand
acuaucaagcggaucauaa

SEQ ID NO: 1400638 - RNA, 19 nt, Homo sapiens
  misc_RNA (1)...(19): siRNA sense strand
ggacaccacagaggcuaug

SEQ ID NO: 1400639 - RNA, 19 nt, Homo sapiens
  misc_RNA (1)...(19): siRNA sense strand
gcaucaccaaggagaacua

SEQ ID NO: 1400640 - RNA, 19 nt, Homo sapiens
  misc_RNA (1)...(19): siRNA sense strand
gugcuagcccucucagugu

SEQ ID NO: 1400641 - RNA, 19 nt, Homo sapiens
  misc_RNA (1)...(19): siRNA sense strand
cucaauggcuauguagaug

SEQ ID NO: 1400642 - RNA, 19 nt, Homo sapiens
  misc_RNA (1)...(19): siRNA sense strand
ugacaagaucgccuuuauc

SEQ ID NO: 1400643 - RNA, 19 nt, Homo sapiens
  misc_RNA (1)...(19): siRNA sense strand
cacagagaccagcaagauu

SEQ ID NO: 1400644 - RNA, 19 nt, Homo sapiens
  misc_RNA (1)...(19): siRNA sense strand
ggacgugcuagcccucuca

SEQ ID NO: 1400645 - RNA, 19 nt, Homo sapiens
  misc_RNA (1)...(19): siRNA sense strand
aauaugaagaccuguuaug

SEQ ID NO: 1400646 - RNA, 19 nt, Homo sapiens
  misc_RNA (1)...(19): siRNA sense strand
cggaagccaugcagcugau

SEQ ID NO: 1400647 - RNA, 19 nt, Homo sapiens
  misc_RNA (1)...(19): siRNA sense strand
caggaaguuugaugugaac

SEQ ID NO: 1400648 - RNA, 19 nt, Homo sapiens
  misc_RNA (1)...(19): siRNA sense strand
aguuugaugugaaccaguu

SEQ ID NO: 1400649 - RNA, 19 nt, Homo sapiens
  misc_RNA (1)...(19): siRNA sense strand
guccaacaucuaugacuug

SEQ ID NO: 1400650 - RNA, 19 nt, Homo sapiens
  misc_RNA (1)...(19): siRNA sense strand
ucagcuucaucauccaguu

SEQ ID NO: 1400651 - RNA, 19 nt, Homo sapiens
  misc_RNA (1)...(19): siRNA sense strand
aguauuucaugcaguacaa

SEQ ID NO: 1400652 - RNA, 19 nt, Homo sapiens
  misc_RNA (1)...(19): siRNA sense strand
gauauggaaaccaccuaca

SEQ ID NO: 1400653 - RNA, 19 nt, Homo sapiens
  misc_RNA (1)...(19): siRNA sense strand
gggccaaguuccacauucc

SEQ ID NO: 1400654 - RNA, 19 nt, Homo sapiens
  misc_RNA (1)...(19): siRNA sense strand
uggaggguauuugauggaa

SEQ ID NO: 1400655 - RNA, 19 nt, Homo sapiens
  misc_RNA (1)...(19): siRNA sense strand
ugaagauggcccuugacaa

SEQ ID NO: 1400656 - RNA, 19 nt, Homo sapiens
  misc_RNA (1)...(19): siRNA sense strand
cgagccagaucugacgaau

SEQ ID NO: 1400657 - RNA, 19 nt, Homo sapiens
  misc_RNA (1)...(19): siRNA sense strand
gguggugcccuucccuuca

SEQ ID NO: 1400658 - RNA, 19 nt, Homo sapiens
  misc_RNA (1)...(19): siRNA sense strand
gagccagaucugacgaaug

SEQ ID NO: 1400659 - RNA, 19 nt, Homo sapiens
  misc_RNA (1)...(19): siRNA sense strand
gaaauaugaagaccuguua

SEQ ID NO: 1400660 - RNA, 19 nt, Homo sapiens
  misc_RNA (1)...(19): siRNA sense strand
gcaaguuuguggaggaaua

SEQ ID NO: 1400661 - RNA, 19 nt, Homo sapiens
  misc_RNA (1)...(19): siRNA sense strand
uaaggaggcugaugauuuc

SEQ ID NO: 1400662 - RNA, 19 nt, Homo sapiens
  misc_RNA (1)...(19): siRNA sense strand
ccacagaggcuaugcuaaa

SEQ ID NO: 1400663 - RNA, 19 nt, Homo sapiens
  misc_RNA (1)...(19): siRNA sense strand
ucaagcggaucauaaagaa

SEQ ID NO: 1400664 - RNA, 19 nt, Homo sapiens
  misc_RNA (1)...(19): siRNA sense strand
ccaggaggauguuuaagga

SEQ ID NO: 1400665 - RNA, 19 nt, Homo sapiens
  misc_RNA (1)...(19): siRNA sense strand
gcagaagaacaugcaaaua

SEQ ID NO: 1400666 - RNA, 19 nt, Homo sapiens
  misc_RNA (1)...(19): siRNA sense strand
uuaaggaggcugaugauuu

SEQ ID NO: 1400667 - RNA, 19 nt, Homo sapiens
  misc_RNA (1)...(19): siRNA sense strand
cagaagaacaugcaaauag

SEQ ID NO: 1400668 - RNA, 19 nt, Homo sapiens
  misc_RNA (1)...(19): siRNA sense strand
ucaccaaggagaacuauaa

SEQ ID NO: 1400669 - RNA, 19 nt, Homo sapiens
  misc_RNA (1)...(19): siRNA sense strand
ccaggaaguuugaugugaa

SEQ ID NO: 1400670 - RNA, 19 nt, Homo sapiens
  misc_RNA (1)...(19): siRNA sense strand
ggcaaggacuuccggauca

SEQ ID NO: 1400671 - RNA, 19 nt, Homo sapiens
  misc_RNA (1)...(19): siRNA sense strand
cgaaauacguggaacucau

SEQ ID NO: 1400672 - RNA, 19 nt, Homo sapiens
  misc_RNA (1)...(19): siRNA sense strand
acaagucgaugcuggagaa

SEQ ID NO: 1400673 - RNA, 19 nt, Homo sapiens
  misc_RNA (1)...(19): siRNA sense strand
ugaugaagauggcccuuga

SEQ ID NO: 1400674 - RNA, 19 nt, Homo sapiens
  misc_RNA (1)...(19): siRNA sense strand
ggaaauaugaagaccuguu

SEQ ID NO: 1400675 - RNA, 19 nt, Homo sapiens
  misc_RNA (1)...(19): siRNA sense strand
ggaggcugaugauuucuuc

SEQ ID NO: 1400676 - RNA, 19 nt, Homo sapiens
  misc_RNA (1)...(19): siRNA sense strand
caccaucccuggagcaaga

SEQ ID NO: 1400677 - RNA, 19 nt, Homo sapiens
  misc_RNA (1)...(19): siRNA sense strand
gguccaacaucuaugacuu

SEQ ID NO: 1400678 - RNA, 19 nt, Homo sapiens
  misc_RNA (1)...(19): siRNA sense strand
ccaagcaccugcacagucu

SEQ ID NO: 1400679 - RNA, 19 nt, Homo sapiens
  misc_RNA (1)...(19): siRNA sense strand
gcaccaccgugaacuugga

SEQ ID NO: 1400680 - RNA, 19 nt, Homo sapiens
  misc_RNA (1)...(19): siRNA sense strand
gaaauacguggaacucauc

SEQ ID NO: 1400681 - RNA, 19 nt, Homo sapiens
  misc_RNA (1)...(19): siRNA sense strand
ucagcuaccucgucgauca

SEQ ID NO: 1400682 - RNA, 19 nt, Homo sapiens
  misc_RNA (1)...(19): siRNA sense strand
gcaaggacuuccggaucaa

SEQ ID NO: 1400683 - RNA, 19 nt, Homo sapiens
  misc_RNA (1)...(19): siRNA sense strand
gccaggaaguuugauguga

SEQ ID NO: 1400684 - RNA, 19 nt, Homo sapiens
  misc_RNA (1)...(19): siRNA sense strand
agccagaucugacgaaugu

SEQ ID NO: 1400685 - RNA, 19 nt, Homo sapiens
  misc_RNA (1)...(19): siRNA sense strand
gaacuacaacaccaacauc

SEQ ID NO: 1400686 - RNA, 19 nt, Homo sapiens
  misc_RNA (1)...(19): siRNA sense strand
acaccaacaucaccacaga

SEQ ID NO: 1400687 - RNA, 19 nt, Homo sapiens
  misc_RNA (1)...(19): siRNA sense strand
ccacagagaccagcaagau

SEQ ID NO: 1400688 - RNA, 19 nt, Homo sapiens
  misc_RNA (1)...(19): siRNA sense strand
gagccauccuccaguuuua

SEQ ID NO: 1400689 - RNA, 19 nt, Homo sapiens
  misc_RNA (1)...(19): siRNA sense strand
gcagaacaccacuaucaag

SEQ ID NO: 1400690 - RNA, 19 nt, Homo sapiens
  misc_RNA (1)...(19): siRNA sense strand
ccaaccacacccugaagua

SEQ ID NO: 1400691 - RNA, 19 nt, Homo sapiens
  misc_RNA (1)...(19): siRNA sense strand
caucccaggugguguggaa

SEQ ID NO: 1400692 - RNA, 19 nt, Homo sapiens
  misc_RNA (1)...(19): siRNA sense strand
ccacauccaguauuucaug

SEQ ID NO: 1400693 - RNA, 19 nt, Homo sapiens
  misc_RNA (1)...(19): siRNA sense strand
uccaguauuucaugcagua

SEQ ID NO: 1400694 - RNA, 19 nt, Homo sapiens
  misc_RNA (1)...(19): siRNA sense strand
gcucaauggcuauguagau

SEQ ID NO: 1400695 - RNA, 19 nt, Homo sapiens
  misc_RNA (1)...(19): siRNA sense strand
uugacaagaucgccuuuau

SEQ ID NO: 1400696 - RNA, 19 nt, Homo sapiens
  misc_RNA (1)...(19): siRNA sense strand
ccagaucugacgaauguga

SEQ ID NO: 1400697 - RNA, 19 nt, Homo sapiens
  misc_RNA (1)...(19): siRNA sense strand
ccucggccauguugagcua

SEQ ID NO: 1400698 - RNA, 19 nt, Homo sapiens
  misc_RNA (1)...(19): siRNA sense strand
caguggcgcuggaggguau

SEQ ID NO: 1400699 - RNA, 19 nt, Homo sapiens
  misc_RNA (1)...(19): siRNA sense strand
cgacgagcaugacaucaac

SEQ ID NO: 1400700 - RNA, 19 nt, Homo sapiens
  misc_RNA (1)...(19): siRNA sense strand
gaggccaacuggaacuaca

SEQ ID NO: 1400701 - RNA, 19 nt, Homo sapiens
  misc_RNA (1)...(19): siRNA sense strand
acagagaccagcaagauuc

SEQ ID NO: 1400702 - RNA, 19 nt, Homo sapiens
  misc_RNA (1)...(19): siRNA sense strand
agaagaacaugcaaauagc

SEQ ID NO: 1400703 - RNA, 19 nt, Homo sapiens
  misc_RNA (1)...(19): siRNA sense strand
ccaaggagaacuauaacca

SEQ ID NO: 1400704 - RNA, 19 nt, Homo sapiens
  misc_RNA (1)...(19): siRNA sense strand
ggaacuacaacaccaacau

SEQ ID NO: 1400705 - RNA, 19 nt, Homo sapiens
  misc_RNA (1)...(19): siRNA sense strand
gcgacgagcaugacaucaa

SEQ ID NO: 1400706 - RNA, 19 nt, Homo sapiens
  misc_RNA (1)...(19): siRNA sense strand
gcacccaggccaggaaguu

SEQ ID NO: 1400707 - RNA, 19 nt, Homo sapiens
  misc_RNA (1)...(19): siRNA sense strand
gacaagaucgccuuuaucc

SEQ ID NO: 1400708 - RNA, 19 nt, Homo sapiens
  misc_RNA (1)...(19): siRNA sense strand
caauggcuauguagaugca

SEQ ID NO: 1400709 - RNA, 19 nt, Homo sapiens
  misc_RNA (1)...(19): siRNA sense strand
gagagccauccuccaguuu

SEQ ID NO: 1400710 - RNA, 19 nt, Homo sapiens
  misc_RNA (1)...(19): siRNA sense strand
gugaaccaguugcagaaca

SEQ ID NO: 1400711 - RNA, 19 nt, Homo sapiens
  misc_RNA (1)...(19): siRNA sense strand
ugggccacauccaguauuu

SEQ ID NO: 1400712 - RNA, 19 nt, Homo sapiens
  misc_RNA (1)...(19): siRNA sense strand
cagcaaguuuguggaggaa

SEQ ID NO: 1400713 - RNA, 19 nt, Homo sapiens
  misc_RNA (1)...(19): siRNA sense strand
cuaucaagcggaucauaaa

SEQ ID NO: 1400714 - RNA, 19 nt, Homo sapiens
  misc_RNA (1)...(19): siRNA sense strand
ggccacauccaguauuuca

SEQ ID NO: 1400715 - RNA, 19 nt, Homo sapiens
  misc_RNA (1)...(19): siRNA sense strand
gaagcaucaccaaggagaa

SEQ ID NO: 1400716 - RNA, 19 nt, Homo sapiens
  misc_RNA (1)...(19): siRNA sense strand
uugcagaacaccacuauca

SEQ ID NO: 1400717 - RNA, 19 nt, Homo sapiens
  misc_RNA (1)...(19): siRNA sense strand
caugcaguacaaagacuua

SEQ ID NO: 1400718 - RNA, 19 nt, Homo sapiens
  misc_RNA (1)...(19): siRNA sense strand
cacagaggcuaugcuaaag

SEQ ID NO: 1400719 - RNA, 19 nt, Homo sapiens
  misc_RNA (1)...(19): siRNA sense strand
gaagccaugcagcugauca

SEQ ID NO: 1400720 - RNA, 19 nt, Homo sapiens
  misc_RNA (1)...(19): siRNA sense strand
ggaggaguacaacaagauc

SEQ ID NO: 1400721 - RNA, 19 nt, Homo sapiens
  misc_RNA (1)...(19): siRNA sense strand
caucauccaguuccaguuc

SEQ ID NO: 1400722 - RNA, 19 nt, Homo sapiens
  misc_RNA (1)...(19): siRNA sense strand
aaaugggccacauccagua

SEQ ID NO: 1400723 - RNA, 19 nt, Homo sapiens
  misc_RNA (1)...(19): siRNA sense strand
caccacagaggcuaugcua

SEQ ID NO: 1400724 - RNA, 19 nt, Homo sapiens
  misc_RNA (1)...(19): siRNA sense strand
ccggcucaauggcuaugua

SEQ ID NO: 1400725 - RNA, 19 nt, Homo sapiens
  misc_RNA (1)...(19): siRNA sense strand
acuaucaagcggaucauaa

SEQ ID NO: 1400726 - RNA, 19 nt, Homo sapiens
  misc_RNA (1)...(19): siRNA sense strand
ggacaccacagaggcuaug

SEQ ID NO: 1400727 - RNA, 19 nt, Homo sapiens
  misc_RNA (1)...(19): siRNA sense strand
gcaucaccaaggagaacua

SEQ ID NO: 1400728 - RNA, 19 nt, Homo sapiens
  misc_RNA (1)...(19): siRNA sense strand
gugcuagcccucucagugu

SEQ ID NO: 1400729 - RNA, 19 nt, Homo sapiens
  misc_RNA (1)...(19): siRNA sense strand
cucaauggcuauguagaug

SEQ ID NO: 1400730 - RNA, 19 nt, Homo sapiens
  misc_RNA (1)...(19): siRNA sense strand
ugacaagaucgccuuuauc

SEQ ID NO: 1400731 - RNA, 19 nt, Homo sapiens
  misc_RNA (1)...(19): siRNA sense strand
cacagagaccagcaagauu

SEQ ID NO: 1400732 - RNA, 19 nt, Homo sapiens
  misc_RNA (1)...(19): siRNA sense strand
ggacgugcuagcccucuca

SEQ ID NO: 1400733 - RNA, 19 nt, Homo sapiens
  misc_RNA (1)...(19): siRNA sense strand
aauaugaagaccuguuaug

SEQ ID NO: 1400734 - RNA, 19 nt, Homo sapiens
  misc_RNA (1)...(19): siRNA sense strand
cggaagccaugcagcugau

SEQ ID NO: 1400735 - RNA, 19 nt, Homo sapiens
  misc_RNA (1)...(19): siRNA sense strand
caggaaguuugaugugaac

SEQ ID NO: 1400736 - RNA, 19 nt, Homo sapiens
  misc_RNA (1)...(19): siRNA sense strand
aguuugaugugaaccaguu

SEQ ID NO: 1400737 - RNA, 19 nt, Homo sapiens
  misc_RNA (1)...(19): siRNA sense strand
guccaacaucuaugacuug

SEQ ID NO: 1400738 - RNA, 19 nt, Homo sapiens
  misc_RNA (1)...(19): siRNA sense strand
ucagcuucaucauccaguu

SEQ ID NO: 1400739 - RNA, 19 nt, Homo sapiens
  misc_RNA (1)...(19): siRNA sense strand
aguauuucaugcaguacaa

SEQ ID NO: 1400740 - RNA, 19 nt, Homo sapiens
  misc_RNA (1)...(19): siRNA sense strand
gauauggaaaccaccuaca

SEQ ID NO: 1400741 - RNA, 19 nt, Homo sapiens
  misc_RNA (1)...(19): siRNA sense strand
gggccaaguuccacauucc

SEQ ID NO: 1400742 - RNA, 19 nt, Homo sapiens
  misc_RNA (1)...(19): siRNA sense strand
uggaggguauuugauggaa

SEQ ID NO: 1400743 - RNA, 19 nt, Homo sapiens
  misc_RNA (1)...(19): siRNA sense strand
ugaagauggcccuugacaa

SEQ ID NO: 1400744 - RNA, 19 nt, Homo sapiens
  misc_RNA (1)...(19): siRNA sense strand
cgagccagaucugacgaau

SEQ ID NO: 1400745 - RNA, 19 nt, Homo sapiens
  misc_RNA (1)...(19): siRNA sense strand
gguggugcccuucccuuca

SEQ ID NO: 1400746 - RNA, 19 nt, Homo sapiens
  misc_RNA (1)...(19): siRNA sense strand
gagccagaucugacgaaug

SEQ ID NO: 1400747 - RNA, 19 nt, Homo sapiens
  misc_RNA (1)...(19): siRNA sense strand
gaaaggcgaugaagaaguu

SEQ ID NO: 1400748 - RNA, 19 nt, Homo sapiens
  misc_RNA (1)...(19): siRNA sense strand
gcagaaaggcgaugaagaa

SEQ ID NO: 1400749 - RNA, 19 nt, Homo sapiens
  misc_RNA (1)...(19): siRNA sense strand
gcaacuaugugguggagaa

SEQ ID NO: 1400750 - RNA, 19 nt, Homo sapiens
  misc_RNA (1)...(19): siRNA sense strand
gcacugggcugcagaaagg

SEQ ID NO: 1400751 - RNA, 19 nt, Homo sapiens
  misc_RNA (1)...(19): siRNA sense strand
ggacggaggugcacgaagu

SEQ ID NO: 1400752 - RNA, 19 nt, Homo sapiens
  misc_RNA (1)...(19): siRNA sense strand
ggcacacgcucuuggaaua

SEQ ID NO: 1400753 - RNA, 19 nt, Homo sapiens
  misc_RNA (1)...(19): siRNA sense strand
gaggauggcuucuucuauc

SEQ ID NO: 1400754 - RNA, 19 nt, Homo sapiens
  misc_RNA (1)...(19): siRNA sense strand
ugaccaaguucacccagua

SEQ ID NO: 1400755 - RNA, 19 nt, Homo sapiens
  misc_RNA (1)...(19): siRNA sense strand
uggagaaggugcccgagaa

SEQ ID NO: 1400756 - RNA, 19 nt, Homo sapiens
  misc_RNA (1)...(19): siRNA sense strand
gauggcuucuucuaucuca

SEQ ID NO: 1400757 - RNA, 19 nt, Homo sapiens
  misc_RNA (1)...(19): siRNA sense strand
cgcaugaccuggcaaagga

SEQ ID NO: 1400758 - RNA, 19 nt, Homo sapiens
  misc_RNA (1)...(19): siRNA sense strand
aagugaagcugcgcaacua

SEQ ID NO: 1400759 - RNA, 19 nt, Homo sapiens
  misc_RNA (1)...(19): siRNA sense strand
gaagugaagcugcgcaacu

SEQ ID NO: 1400760 - RNA, 19 nt, Homo sapiens
  misc_RNA (1)...(19): siRNA sense strand
ggccaguuaucucuccaaa

SEQ ID NO: 1400761 - RNA, 19 nt, Homo sapiens
  misc_RNA (1)...(19): siRNA sense strand
ggcucaaccugaccaaguu

SEQ ID NO: 1400762 - RNA, 19 nt, Homo sapiens
  misc_RNA (1)...(19): siRNA sense strand
gcgaugaagaaguuugaaa

SEQ ID NO: 1400763 - RNA, 19 nt, Homo sapiens
  misc_RNA (1)...(19): siRNA sense strand
ccaagguguuccuaagcuu

SEQ ID NO: 1400764 - RNA, 19 nt, Homo sapiens
  misc_RNA (1)...(19): siRNA sense strand
gcacacgcucuuggaauau

SEQ ID NO: 1400765 - RNA, 19 nt, Homo sapiens
  misc_RNA (1)...(19): siRNA sense strand
guccgaggauggcuucuuc

SEQ ID NO: 1400766 - RNA, 19 nt, Homo sapiens
  misc_RNA (1)...(19): siRNA sense strand
ucaaccaggcccucaaaga

SEQ ID NO: 1400767 - RNA, 19 nt, Homo sapiens
  misc_RNA (1)...(19): siRNA sense strand
caaccaggcccucaaagac

SEQ ID NO: 1400768 - RNA, 19 nt, Homo sapiens
  misc_RNA (1)...(19): siRNA sense strand
cagccacccuccaguccaa

SEQ ID NO: 1400769 - RNA, 19 nt, Homo sapiens
  misc_RNA (1)...(19): siRNA sense strand
gcgacagacuccaguacag

SEQ ID NO: 1400770 - RNA, 19 nt, Homo sapiens
  misc_RNA (1)...(19): siRNA sense strand
ccaguuaucucuccaaaac

SEQ ID NO: 1400771 - RNA, 19 nt, Homo sapiens
  misc_RNA (1)...(19): siRNA sense strand
ccaggguggcuuuguggua

SEQ ID NO: 1400772 - RNA, 19 nt, Homo sapiens
  misc_RNA (1)...(19): siRNA sense strand
gaugaagaaguuugaaagg

SEQ ID NO: 1400773 - RNA, 19 nt, Homo sapiens
  misc_RNA (1)...(19): siRNA sense strand
gggcucaaccugaccaagu

SEQ ID NO: 1400774 - RNA, 19 nt, Homo sapiens
  misc_RNA (1)...(19): siRNA sense strand
gcgcgaggagcacauugaa

SEQ ID NO: 1400775 - RNA, 19 nt, Homo sapiens
  misc_RNA (1)...(19): siRNA sense strand
cgaggauggcuucuucuau

SEQ ID NO: 1400776 - RNA, 19 nt, Homo sapiens
  misc_RNA (1)...(19): siRNA sense strand
ucaccuaccgggaccagaa

SEQ ID NO: 1400777 - RNA, 19 nt, Homo sapiens
  misc_RNA (1)...(19): siRNA sense strand
uguccgggcuugugcuguu

SEQ ID NO: 1400778 - RNA, 19 nt, Homo sapiens
  misc_RNA (1)...(19): siRNA sense strand
ggaggugcacgaagugaag

SEQ ID NO: 1400779 - RNA, 19 nt, Homo sapiens
  misc_RNA (1)...(19): siRNA sense strand
cagaacacgggcuggauug

SEQ ID NO: 1400780 - RNA, 19 nt, Homo sapiens
  misc_RNA (1)...(19): siRNA sense strand
ggagaaggugcccgagaag

SEQ ID NO: 1400781 - RNA, 19 nt, Homo sapiens
  misc_RNA (1)...(19): siRNA sense strand
cgaugaagaaguuugaaag

SEQ ID NO: 1400782 - RNA, 19 nt, Homo sapiens
  misc_RNA (1)...(19): siRNA sense strand
gacacaaggucaccauccu

SEQ ID NO: 1400783 - RNA, 19 nt, Homo sapiens
  misc_RNA (1)...(19): siRNA sense strand
ggaaucugaaggugcugaa

SEQ ID NO: 1400784 - RNA, 19 nt, Homo sapiens
  misc_RNA (1)...(19): siRNA sense strand
ugaagcugcgcaacuaugu

SEQ ID NO: 1400785 - RNA, 19 nt, Homo sapiens
  misc_RNA (1)...(19): siRNA sense strand
ccaagaccccuucgagaaa

SEQ ID NO: 1400786 - RNA, 19 nt, Homo sapiens
  misc_RNA (1)...(19): siRNA sense strand
ucgacgacguggcggcauu

SEQ ID NO: 1400787 - RNA, 19 nt, Homo sapiens
  misc_RNA (1)...(19): siRNA sense strand
ccacucgcccgaagacauc

SEQ ID NO: 1400788 - RNA, 19 nt, Homo sapiens
  misc_RNA (1)...(19): siRNA sense strand
gaagcugcgcaacuaugug

SEQ ID NO: 1400789 - RNA, 19 nt, Homo sapiens
  misc_RNA (1)...(19): siRNA sense strand
gugaagcugcgcaacuaug

SEQ ID NO: 1400790 - RNA, 19 nt, Homo sapiens
  misc_RNA (1)...(19): siRNA sense strand
ccgaggauggcuucuucua

SEQ ID NO: 1400791 - RNA, 19 nt, Homo sapiens
  misc_RNA (1)...(19): siRNA sense strand
gaaaggcgaugaagaaguu

SEQ ID NO: 1400792 - RNA, 19 nt, Homo sapiens
  misc_RNA (1)...(19): siRNA sense strand
gcagaaaggcgaugaagaa

SEQ ID NO: 1400793 - RNA, 19 nt, Homo sapiens
  misc_RNA (1)...(19): siRNA sense strand
gcaacuaugugguggagaa

SEQ ID NO: 1400794 - RNA, 19 nt, Homo sapiens
  misc_RNA (1)...(19): siRNA sense strand
gcacugggcugcagaaagg

SEQ ID NO: 1400795 - RNA, 19 nt, Homo sapiens
  misc_RNA (1)...(19): siRNA sense strand
ggacggaggugcacgaagu

SEQ ID NO: 1400796 - RNA, 19 nt, Homo sapiens
  misc_RNA (1)...(19): siRNA sense strand
ggcacacgcucuuggaaua

SEQ ID NO: 1400797 - RNA, 19 nt, Homo sapiens
  misc_RNA (1)...(19): siRNA sense strand
gaggauggcuucuucuauc

SEQ ID NO: 1400798 - RNA, 19 nt, Homo sapiens
  misc_RNA (1)...(19): siRNA sense strand
ugaccaaguucacccagua

SEQ ID NO: 1400799 - RNA, 19 nt, Homo sapiens
  misc_RNA (1)...(19): siRNA sense strand
uggagaaggugcccgagaa

SEQ ID NO: 1400800 - RNA, 19 nt, Homo sapiens
  misc_RNA (1)...(19): siRNA sense strand
gauggcuucuucuaucuca

SEQ ID NO: 1400801 - RNA, 19 nt, Homo sapiens
  misc_RNA (1)...(19): siRNA sense strand
cgcaugaccuggcaaagga

SEQ ID NO: 1400802 - RNA, 19 nt, Homo sapiens
  misc_RNA (1)...(19): siRNA sense strand
aagugaagcugcgcaacua

SEQ ID NO: 1400803 - RNA, 19 nt, Homo sapiens
  misc_RNA (1)...(19): siRNA sense strand
gaagugaagcugcgcaacu

SEQ ID NO: 1400804 - RNA, 19 nt, Homo sapiens
  misc_RNA (1)...(19): siRNA sense strand
ggccaguuaucucuccaaa

SEQ ID NO: 1400805 - RNA, 19 nt, Homo sapiens
  misc_RNA (1)...(19): siRNA sense strand
ggcucaaccugaccaaguu

SEQ ID NO: 1400806 - RNA, 19 nt, Homo sapiens
  misc_RNA (1)...(19): siRNA sense strand
gcgaugaagaaguuugaaa

SEQ ID NO: 1400807 - RNA, 19 nt, Homo sapiens
  misc_RNA (1)...(19): siRNA sense strand
ccaagguguuccuaagcuu

SEQ ID NO: 1400808 - RNA, 19 nt, Homo sapiens
  misc_RNA (1)...(19): siRNA sense strand
gcacacgcucuuggaauau

SEQ ID NO: 1400809 - RNA, 19 nt, Homo sapiens
  misc_RNA (1)...(19): siRNA sense strand
guccgaggauggcuucuuc

SEQ ID NO: 1400810 - RNA, 19 nt, Homo sapiens
  misc_RNA (1)...(19): siRNA sense strand
ucaaccaggcccucaaaga

SEQ ID NO: 1400811 - RNA, 19 nt, Homo sapiens
  misc_RNA (1)...(19): siRNA sense strand
caaccaggcccucaaagac

SEQ ID NO: 1400812 - RNA, 19 nt, Homo sapiens
  misc_RNA (1)...(19): siRNA sense strand
cagccacccuccaguccaa

SEQ ID NO: 1400813 - RNA, 19 nt, Homo sapiens
  misc_RNA (1)...(19): siRNA sense strand
gcgacagacuccaguacag

SEQ ID NO: 1400814 - RNA, 19 nt, Homo sapiens
  misc_RNA (1)...(19): siRNA sense strand
ccaguuaucucuccaaaac

SEQ ID NO: 1400815 - RNA, 19 nt, Homo sapiens
  misc_RNA (1)...(19): siRNA sense strand
ccaggguggcuuuguggua

SEQ ID NO: 1400816 - RNA, 19 nt, Homo sapiens
  misc_RNA (1)...(19): siRNA sense strand
gaugaagaaguuugaaagg

SEQ ID NO: 1400817 - RNA, 19 nt, Homo sapiens
  misc_RNA (1)...(19): siRNA sense strand
gggcucaaccugaccaagu

SEQ ID NO: 1400818 - RNA, 19 nt, Homo sapiens
  misc_RNA (1)...(19): siRNA sense strand
gcgcgaggagcacauugaa

SEQ ID NO: 1400819 - RNA, 19 nt, Homo sapiens
  misc_RNA (1)...(19): siRNA sense strand
cgaggauggcuucuucuau

SEQ ID NO: 1400820 - RNA, 19 nt, Homo sapiens
  misc_RNA (1)...(19): siRNA sense strand
ucaccuaccgggaccagaa

SEQ ID NO: 1400821 - RNA, 19 nt, Homo sapiens
  misc_RNA (1)...(19): siRNA sense strand
uguccgggcuugugcuguu

SEQ ID NO: 1400822 - RNA, 19 nt, Homo sapiens
  misc_RNA (1)...(19): siRNA sense strand
ggaggugcacgaagugaag

SEQ ID NO: 1400823 - RNA, 19 nt, Homo sapiens
  misc_RNA (1)...(19): siRNA sense strand
cagaacacgggcuggauug

SEQ ID NO: 1400824 - RNA, 19 nt, Homo sapiens
  misc_RNA (1)...(19): siRNA sense strand
ggagaaggugcccgagaag

SEQ ID NO: 1400825 - RNA, 19 nt, Homo sapiens
  misc_RNA (1)...(19): siRNA sense strand
cgaugaagaaguuugaaag

SEQ ID NO: 1400826 - RNA, 19 nt, Homo sapiens
  misc_RNA (1)...(19): siRNA sense strand
gacacaaggucaccauccu

SEQ ID NO: 1400827 - RNA, 19 nt, Homo sapiens
  misc_RNA (1)...(19): siRNA sense strand
ggaaucugaaggugcugaa

SEQ ID NO: 1400828 - RNA, 19 nt, Homo sapiens
  misc_RNA (1)...(19): siRNA sense strand
ugaagcugcgcaacuaugu

SEQ ID NO: 1400829 - RNA, 19 nt, Homo sapiens
  misc_RNA (1)...(19): siRNA sense strand
ccaagaccccuucgagaaa

SEQ ID NO: 1400830 - RNA, 19 nt, Homo sapiens
  misc_RNA (1)...(19): siRNA sense strand
ucgacgacguggcggcauu

SEQ ID NO: 1400831 - RNA, 19 nt, Homo sapiens
  misc_RNA (1)...(19): siRNA sense strand
ccacucgcccgaagacauc

SEQ ID NO: 1400832 - RNA, 19 nt, Homo sapiens
  misc_RNA (1)...(19): siRNA sense strand
gaagcugcgcaacuaugug

SEQ ID NO: 1400833 - RNA, 19 nt, Homo sapiens
  misc_RNA (1)...(19): siRNA sense strand
gugaagcugcgcaacuaug

SEQ ID NO: 1400834 - RNA, 19 nt, Homo sapiens
  misc_RNA (1)...(19): siRNA sense strand
ccgaggauggcuucuucua

SEQ ID NO: 1400835 - RNA, 19 nt, Homo sapiens
  misc_RNA (1)...(19): siRNA sense strand
ggaagaaagagcuaaauuu

SEQ ID NO: 1400836 - RNA, 19 nt, Homo sapiens
  misc_RNA (1)...(19): siRNA sense strand
gagauggaaucacuaaaga

SEQ ID NO: 1400837 - RNA, 19 nt, Homo sapiens
  misc_RNA (1)...(19): siRNA sense strand
uagcagaaguggcauauga

SEQ ID NO: 1400838 - RNA, 19 nt, Homo sapiens
  misc_RNA (1)...(19): siRNA sense strand
gaacagaaucagaacauug

SEQ ID NO: 1400839 - RNA, 19 nt, Homo sapiens
  misc_RNA (1)...(19): siRNA sense strand
ucaacaagcucaaauucuu

SEQ ID NO: 1400840 - RNA, 19 nt, Homo sapiens
  misc_RNA (1)...(19): siRNA sense strand
gauaauacuucaucugucu

SEQ ID NO: 1400841 - RNA, 19 nt, Homo sapiens
  misc_RNA (1)...(19): siRNA sense strand
aaagagauguuuccagguu

SEQ ID NO: 1400842 - RNA, 19 nt, Homo sapiens
  misc_RNA (1)...(19): siRNA sense strand
agacagacaauuaggauua

SEQ ID NO: 1400843 - RNA, 19 nt, Homo sapiens
  misc_RNA (1)...(19): siRNA sense strand
ggcauucugugaaacuuua

SEQ ID NO: 1400844 - RNA, 19 nt, Homo sapiens
  misc_RNA (1)...(19): siRNA sense strand
uuacaagcguuucuucaaa

SEQ ID NO: 1400845 - RNA, 19 nt, Homo sapiens
  misc_RNA (1)...(19): siRNA sense strand
gauggaaucacuaaagaaa

SEQ ID NO: 1400846 - RNA, 19 nt, Homo sapiens
  misc_RNA (1)...(19): siRNA sense strand
gaaucuagagcugauaaua

SEQ ID NO: 1400847 - RNA, 19 nt, Homo sapiens
  misc_RNA (1)...(19): siRNA sense strand
guuaugaagugauggaaga

SEQ ID NO: 1400848 - RNA, 19 nt, Homo sapiens
  misc_RNA (1)...(19): siRNA sense strand
uuagaagacucaaauaugg

SEQ ID NO: 1400849 - RNA, 19 nt, Homo sapiens
  misc_RNA (1)...(19): siRNA sense strand
uuuagaaccugaagaauca

SEQ ID NO: 1400850 - RNA, 19 nt, Homo sapiens
  misc_RNA (1)...(19): siRNA sense strand
gaagacagacaauuaggau

SEQ ID NO: 1400851 - RNA, 19 nt, Homo sapiens
  misc_RNA (1)...(19): siRNA sense strand
agacaaguguuccugauca

SEQ ID NO: 1400852 - RNA, 19 nt, Homo sapiens
  misc_RNA (1)...(19): siRNA sense strand
gaaggugaacagauccuaa

SEQ ID NO: 1400853 - RNA, 19 nt, Homo sapiens
  misc_RNA (1)...(19): siRNA sense strand
gacuagcacuuccuccaaa

SEQ ID NO: 1400854 - RNA, 19 nt, Homo sapiens
  misc_RNA (1)...(19): siRNA sense strand
caaacuaccgcuuacagaa

SEQ ID NO: 1400855 - RNA, 19 nt, Homo sapiens
  misc_RNA (1)...(19): siRNA sense strand
gugaacagauccuaaaggu

SEQ ID NO: 1400856 - RNA, 19 nt, Homo sapiens
  misc_RNA (1)...(19): siRNA sense strand
cagaaagaacuacuugaaa

SEQ ID NO: 1400857 - RNA, 19 nt, Homo sapiens
  misc_RNA (1)...(19): siRNA sense strand
ggagauggaaucacuaaag

SEQ ID NO: 1400858 - RNA, 19 nt, Homo sapiens
  misc_RNA (1)...(19): siRNA sense strand
guuagaagacucaaauaug

SEQ ID NO: 1400859 - RNA, 19 nt, Homo sapiens
  misc_RNA (1)...(19): siRNA sense strand
cuacuauacuggguuauga

SEQ ID NO: 1400860 - RNA, 19 nt, Homo sapiens
  misc_RNA (1)...(19): siRNA sense strand
aagagacacugaagaacaa

SEQ ID NO: 1400861 - RNA, 19 nt, Homo sapiens
  misc_RNA (1)...(19): siRNA sense strand
caagagacacugaagaaca

SEQ ID NO: 1400862 - RNA, 19 nt, Homo sapiens
  misc_RNA (1)...(19): siRNA sense strand
guacagcuucuuccauuga

SEQ ID NO: 1400863 - RNA, 19 nt, Homo sapiens
  misc_RNA (1)...(19): siRNA sense strand
acaaggacauugcuaacug

SEQ ID NO: 1400864 - RNA, 19 nt, Homo sapiens
  misc_RNA (1)...(19): siRNA sense strand
ugaagaaucuagagcugau

SEQ ID NO: 1400865 - RNA, 19 nt, Homo sapiens
  misc_RNA (1)...(19): siRNA sense strand
ucagaacauugucuuuaga

SEQ ID NO: 1400866 - RNA, 19 nt, Homo sapiens
  misc_RNA (1)...(19): siRNA sense strand
caccuacuauacuggguua

SEQ ID NO: 1400867 - RNA, 19 nt, Homo sapiens
  misc_RNA (1)...(19): siRNA sense strand
ggaaagcagggcauucugu

SEQ ID NO: 1400868 - RNA, 19 nt, Homo sapiens
  misc_RNA (1)...(19): siRNA sense strand
gauagaaguagcagaagug

SEQ ID NO: 1400869 - RNA, 19 nt, Homo sapiens
  misc_RNA (1)...(19): siRNA sense strand
aggacuaaauuuacaggua

SEQ ID NO: 1400870 - RNA, 19 nt, Homo sapiens
  misc_RNA (1)...(19): siRNA sense strand
gagaacagaaucagaacau

SEQ ID NO: 1400871 - RNA, 19 nt, Homo sapiens
  misc_RNA (1)...(19): siRNA sense strand
aaacuaccgcuuacagaaa

SEQ ID NO: 1400872 - RNA, 19 nt, Homo sapiens
  misc_RNA (1)...(19): siRNA sense strand
gagacaaacuaccgcuuac

SEQ ID NO: 1400873 - RNA, 19 nt, Homo sapiens
  misc_RNA (1)...(19): siRNA sense strand
agagacaaacuaccgcuua

SEQ ID NO: 1400874 - RNA, 19 nt, Homo sapiens
  misc_RNA (1)...(19): siRNA sense strand
acagugaauugggaagaua

SEQ ID NO: 1400875 - RNA, 19 nt, Homo sapiens
  misc_RNA (1)...(19): siRNA sense strand
uauacuggguuaugaagug

SEQ ID NO: 1400876 - RNA, 19 nt, Homo sapiens
  misc_RNA (1)...(19): siRNA sense strand
cauaugaugcugaagaaga

SEQ ID NO: 1400877 - RNA, 19 nt, Homo sapiens
  misc_RNA (1)...(19): siRNA sense strand
gcagaaguggcauaugaug

SEQ ID NO: 1400878 - RNA, 19 nt, Homo sapiens
  misc_RNA (1)...(19): siRNA sense strand
gaaucagaacauugucuuu

SEQ ID NO: 1400879 - RNA, 19 nt, Homo sapiens
  misc_RNA (1)...(19): siRNA sense strand
caacaaacagaaaucaaag

SEQ ID NO: 1400880 - RNA, 19 nt, Homo sapiens
  misc_RNA (1)...(19): siRNA sense strand
gacaaguguuccugaucaa

SEQ ID NO: 1400881 - RNA, 19 nt, Homo sapiens
  misc_RNA (1)...(19): siRNA sense strand
acagaaagaacuacuugaa

SEQ ID NO: 1400882 - RNA, 19 nt, Homo sapiens
  misc_RNA (1)...(19): siRNA sense strand
uauagacacuuuagagaac

SEQ ID NO: 1400883 - RNA, 19 nt, Homo sapiens
  misc_RNA (1)...(19): siRNA sense strand
ccaguuagaagacucaaau

SEQ ID NO: 1400884 - RNA, 19 nt, Homo sapiens
  misc_RNA (1)...(19): siRNA sense strand
agagauagaaguagcagaa

SEQ ID NO: 1400885 - RNA, 19 nt, Homo sapiens
  misc_RNA (1)...(19): siRNA sense strand
ggaguccucugcacuugag

SEQ ID NO: 1400886 - RNA, 19 nt, Homo sapiens
  misc_RNA (1)...(19): siRNA sense strand
uuagagaacagaaucagaa

SEQ ID NO: 1400887 - RNA, 19 nt, Homo sapiens
  misc_RNA (1)...(19): siRNA sense strand
caagcucaaauucuucuaa

SEQ ID NO: 1400888 - RNA, 19 nt, Homo sapiens
  misc_RNA (1)...(19): siRNA sense strand
ccaccggguccauuugaua

SEQ ID NO: 1400889 - RNA, 19 nt, Homo sapiens
  misc_RNA (1)...(19): siRNA sense strand
gguacagcuucuuccauug

SEQ ID NO: 1400890 - RNA, 19 nt, Homo sapiens
  misc_RNA (1)...(19): siRNA sense strand
gauggaagaaagagcuaaa

SEQ ID NO: 1400891 - RNA, 19 nt, Homo sapiens
  misc_RNA (1)...(19): siRNA sense strand
ggaugugucagaaacagaa

SEQ ID NO: 1400892 - RNA, 19 nt, Homo sapiens
  misc_RNA (1)...(19): siRNA sense strand
caacaagcucaaauucuuc

SEQ ID NO: 1400893 - RNA, 19 nt, Homo sapiens
  misc_RNA (1)...(19): siRNA sense strand
cuucuuccauugaguauuc

SEQ ID NO: 1400894 - RNA, 19 nt, Homo sapiens
  misc_RNA (1)...(19): siRNA sense strand
gaagaaucuagagcugaua

SEQ ID NO: 1400895 - RNA, 19 nt, Homo sapiens
  misc_RNA (1)...(19): siRNA sense strand
cauauagacacuuuagaga

SEQ ID NO: 1400896 - RNA, 19 nt, Homo sapiens
  misc_RNA (1)...(19): siRNA sense strand
agguacagcuucuuccauu

SEQ ID NO: 1400897 - RNA, 19 nt, Homo sapiens
  misc_RNA (1)...(19): siRNA sense strand
aacagaaggugaacagauc

SEQ ID NO: 1400898 - RNA, 19 nt, Homo sapiens
  misc_RNA (1)...(19): siRNA sense strand
aaacagaaggugaacagau

SEQ ID NO: 1400899 - RNA, 19 nt, Homo sapiens
  misc_RNA (1)...(19): siRNA sense strand
caaguguuccugaucaaau

SEQ ID NO: 1400900 - RNA, 19 nt, Homo sapiens
  misc_RNA (1)...(19): siRNA sense strand
gaccaucuacaccuacuau

SEQ ID NO: 1400901 - RNA, 19 nt, Homo sapiens
  misc_RNA (1)...(19): siRNA sense strand
aagauguccuggaugaaga

SEQ ID NO: 1400902 - RNA, 19 nt, Homo sapiens
  misc_RNA (1)...(19): siRNA sense strand
uggaaucacuaaagaaacu

SEQ ID NO: 1400903 - RNA, 19 nt, Homo sapiens
  misc_RNA (1)...(19): siRNA sense strand
uuacagaaagaacuacuug

SEQ ID NO: 1400904 - RNA, 19 nt, Homo sapiens
  misc_RNA (1)...(19): siRNA sense strand
aagagauguuuccagguuu

SEQ ID NO: 1400905 - RNA, 19 nt, Homo sapiens
  misc_RNA (1)...(19): siRNA sense strand
gaagaaucacuggaugugu

SEQ ID NO: 1400906 - RNA, 19 nt, Homo sapiens
  misc_RNA (1)...(19): siRNA sense strand
cagaacauugucuuuagaa

SEQ ID NO: 1400907 - RNA, 19 nt, Homo sapiens
  misc_RNA (1)...(19): siRNA sense strand
agaacagaaucagaacauu

SEQ ID NO: 1400908 - RNA, 19 nt, Homo sapiens
  misc_RNA (1)...(19): siRNA sense strand
uggaagaaagagcuaaauu

SEQ ID NO: 1400909 - RNA, 19 nt, Homo sapiens
  misc_RNA (1)...(19): siRNA sense strand
aucaagauguccuggauga

SEQ ID NO: 1400910 - RNA, 19 nt, Homo sapiens
  misc_RNA (1)...(19): siRNA sense strand
ugaucaagauguccuggau

SEQ ID NO: 1400911 - RNA, 19 nt, Homo sapiens
  misc_RNA (1)...(19): siRNA sense strand
gaggaaagcagggcauucu

SEQ ID NO: 1400912 - RNA, 19 nt, Homo sapiens
  misc_RNA (1)...(19): siRNA sense strand
cagcuucuuccauugagua

SEQ ID NO: 1400913 - RNA, 19 nt, Homo sapiens
  misc_RNA (1)...(19): siRNA sense strand
caagauguccuggaugaag

SEQ ID NO: 1400914 - RNA, 19 nt, Homo sapiens
  misc_RNA (1)...(19): siRNA sense strand
gaaacagaaggugaacaga

SEQ ID NO: 1400915 - RNA, 19 nt, Homo sapiens
  misc_RNA (1)...(19): siRNA sense strand
cugaucaaauggauaauac

SEQ ID NO: 1400916 - RNA, 19 nt, Homo sapiens
  misc_RNA (1)...(19): siRNA sense strand
gacagacaauuaggauuac

SEQ ID NO: 1400917 - RNA, 19 nt, Homo sapiens
  misc_RNA (1)...(19): siRNA sense strand
ggcagugucucaacaagcu

SEQ ID NO: 1400918 - RNA, 19 nt, Homo sapiens
  misc_RNA (1)...(19): siRNA sense strand
gaccaagagacacugaaga

SEQ ID NO: 1400919 - RNA, 19 nt, Homo sapiens
  misc_RNA (1)...(19): siRNA sense strand
gauuacaagcguuucuuca

SEQ ID NO: 1400920 - RNA, 19 nt, Homo sapiens
  misc_RNA (1)...(19): siRNA sense strand
acagacaaguguuccugau

SEQ ID NO: 1400921 - RNA, 19 nt, Homo sapiens
  misc_RNA (1)...(19): siRNA sense strand
agauagaaguagcagaagu

SEQ ID NO: 1400922 - RNA, 19 nt, Homo sapiens
  misc_RNA (1)...(19): siRNA sense strand
gggcauucugugaaacuuu

SEQ ID NO: 1400923 - RNA, 19 nt, Homo sapiens
  misc_RNA (1)...(19): siRNA sense strand
ggauuacaagcguuucuuc

SEQ ID NO: 1400924 - RNA, 19 nt, Homo sapiens
  misc_RNA (1)...(19): siRNA sense strand
ccugaucaaauggauaaua

SEQ ID NO: 1400925 - RNA, 19 nt, Homo sapiens
  misc_RNA (1)...(19): siRNA sense strand
gaaaaugcuguaucagaga

SEQ ID NO: 1400926 - RNA, 19 nt, Homo sapiens
  misc_RNA (1)...(19): siRNA sense strand
guggaguccucugcacuug

SEQ ID NO: 1400927 - RNA, 19 nt, Homo sapiens
  misc_RNA (1)...(19): siRNA sense strand
uggauaauacuucaucugu

SEQ ID NO: 1400928 - RNA, 19 nt, Homo sapiens
  misc_RNA (1)...(19): siRNA sense strand
ucauauagacacuuuagag

SEQ ID NO: 1400929 - RNA, 19 nt, Homo sapiens
  misc_RNA (1)...(19): siRNA sense strand
ugugaaacuuuagaagaga

SEQ ID NO: 1400930 - RNA, 19 nt, Homo sapiens
  misc_RNA (1)...(19): siRNA sense strand
gcucacaaggacauugcua

SEQ ID NO: 1400931 - RNA, 19 nt, Homo sapiens
  misc_RNA (1)...(19): siRNA sense strand
aacgcugguuuaaagauaa

SEQ ID NO: 1400932 - RNA, 19 nt, Homo sapiens
  misc_RNA (1)...(19): siRNA sense strand
cgacuagcacuuccuccaa

SEQ ID NO: 1400933 - RNA, 19 nt, Homo sapiens
  misc_RNA (1)...(19): siRNA sense strand
uguccuggaugaagaaucu

SEQ ID NO: 1400934 - RNA, 19 nt, Homo sapiens
  misc_RNA (1)...(19): siRNA sense strand
aagaaucuagagcugauaa

SEQ ID NO: 1400935 - RNA, 19 nt, Homo sapiens
  misc_RNA (1)...(19): siRNA sense strand
ggaagaaagagcuaaauuu

SEQ ID NO: 1400936 - RNA, 19 nt, Homo sapiens
  misc_RNA (1)...(19): siRNA sense strand
gagauggaaucacuaaaga

SEQ ID NO: 1400937 - RNA, 19 nt, Homo sapiens
  misc_RNA (1)...(19): siRNA sense strand
uagcagaaguggcauauga

SEQ ID NO: 1400938 - RNA, 19 nt, Homo sapiens
  misc_RNA (1)...(19): siRNA sense strand
gaacagaaucagaacauug

SEQ ID NO: 1400939 - RNA, 19 nt, Homo sapiens
  misc_RNA (1)...(19): siRNA sense strand
ucaacaagcucaaauucuu

SEQ ID NO: 1400940 - RNA, 19 nt, Homo sapiens
  misc_RNA (1)...(19): siRNA sense strand
gauaauacuucaucugucu

SEQ ID NO: 1400941 - RNA, 19 nt, Homo sapiens
  misc_RNA (1)...(19): siRNA sense strand
aaagagauguuuccagguu

SEQ ID NO: 1400942 - RNA, 19 nt, Homo sapiens
  misc_RNA (1)...(19): siRNA sense strand
agacagacaauuaggauua

SEQ ID NO: 1400943 - RNA, 19 nt, Homo sapiens
  misc_RNA (1)...(19): siRNA sense strand
ggcauucugugaaacuuua

SEQ ID NO: 1400944 - RNA, 19 nt, Homo sapiens
  misc_RNA (1)...(19): siRNA sense strand
uuacaagcguuucuucaaa

SEQ ID NO: 1400945 - RNA, 19 nt, Homo sapiens
  misc_RNA (1)...(19): siRNA sense strand
gauggaaucacuaaagaaa

SEQ ID NO: 1400946 - RNA, 19 nt, Homo sapiens
  misc_RNA (1)...(19): siRNA sense strand
gaaucuagagcugauaaua

SEQ ID NO: 1400947 - RNA, 19 nt, Homo sapiens
  misc_RNA (1)...(19): siRNA sense strand
guuaugaagugauggaaga

SEQ ID NO: 1400948 - RNA, 19 nt, Homo sapiens
  misc_RNA (1)...(19): siRNA sense strand
uuagaagacucaaauaugg

SEQ ID NO: 1400949 - RNA, 19 nt, Homo sapiens
  misc_RNA (1)...(19): siRNA sense strand
uuuagaaccugaagaauca

SEQ ID NO: 1400950 - RNA, 19 nt, Homo sapiens
  misc_RNA (1)...(19): siRNA sense strand
gaagacagacaauuaggau

SEQ ID NO: 1400951 - RNA, 19 nt, Homo sapiens
  misc_RNA (1)...(19): siRNA sense strand
agacaaguguuccugauca

SEQ ID NO: 1400952 - RNA, 19 nt, Homo sapiens
  misc_RNA (1)...(19): siRNA sense strand
gaaggugaacagauccuaa

SEQ ID NO: 1400953 - RNA, 19 nt, Homo sapiens
  misc_RNA (1)...(19): siRNA sense strand
gacuagcacuuccuccaaa

SEQ ID NO: 1400954 - RNA, 19 nt, Homo sapiens
  misc_RNA (1)...(19): siRNA sense strand
caaacuaccgcuuacagaa

SEQ ID NO: 1400955 - RNA, 19 nt, Homo sapiens
  misc_RNA (1)...(19): siRNA sense strand
gugaacagauccuaaaggu

SEQ ID NO: 1400956 - RNA, 19 nt, Homo sapiens
  misc_RNA (1)...(19): siRNA sense strand
cagaaagaacuacuugaaa

SEQ ID NO: 1400957 - RNA, 19 nt, Homo sapiens
  misc_RNA (1)...(19): siRNA sense strand
ggagauggaaucacuaaag

SEQ ID NO: 1400958 - RNA, 19 nt, Homo sapiens
  misc_RNA (1)...(19): siRNA sense strand
guuagaagacucaaauaug

SEQ ID NO: 1400959 - RNA, 19 nt, Homo sapiens
  misc_RNA (1)...(19): siRNA sense strand
cuacuauacuggguuauga

SEQ ID NO: 1400960 - RNA, 19 nt, Homo sapiens
  misc_RNA (1)...(19): siRNA sense strand
aagagacacugaagaacaa

SEQ ID NO: 1400961 - RNA, 19 nt, Homo sapiens
  misc_RNA (1)...(19): siRNA sense strand
caagagacacugaagaaca

SEQ ID NO: 1400962 - RNA, 19 nt, Homo sapiens
  misc_RNA (1)...(19): siRNA sense strand
guacagcuucuuccauuga

SEQ ID NO: 1400963 - RNA, 19 nt, Homo sapiens
  misc_RNA (1)...(19): siRNA sense strand
acaaggacauugcuaacug

SEQ ID NO: 1400964 - RNA, 19 nt, Homo sapiens
  misc_RNA (1)...(19): siRNA sense strand
ugaagaaucuagagcugau

SEQ ID NO: 1400965 - RNA, 19 nt, Homo sapiens
  misc_RNA (1)...(19): siRNA sense strand
ucagaacauugucuuuaga

SEQ ID NO: 1400966 - RNA, 19 nt, Homo sapiens
  misc_RNA (1)...(19): siRNA sense strand
caccuacuauacuggguua

SEQ ID NO: 1400967 - RNA, 19 nt, Homo sapiens
  misc_RNA (1)...(19): siRNA sense strand
ggaaagcagggcauucugu

SEQ ID NO: 1400968 - RNA, 19 nt, Homo sapiens
  misc_RNA (1)...(19): siRNA sense strand
gauagaaguagcagaagug

SEQ ID NO: 1400969 - RNA, 19 nt, Homo sapiens
  misc_RNA (1)...(19): siRNA sense strand
aggacuaaauuuacaggua

SEQ ID NO: 1400970 - RNA, 19 nt, Homo sapiens
  misc_RNA (1)...(19): siRNA sense strand
gagaacagaaucagaacau

SEQ ID NO: 1400971 - RNA, 19 nt, Homo sapiens
  misc_RNA (1)...(19): siRNA sense strand
aaacuaccgcuuacagaaa

SEQ ID NO: 1400972 - RNA, 19 nt, Homo sapiens
  misc_RNA (1)...(19): siRNA sense strand
gagacaaacuaccgcuuac

SEQ ID NO: 1400973 - RNA, 19 nt, Homo sapiens
  misc_RNA (1)...(19): siRNA sense strand
agagacaaacuaccgcuua

SEQ ID NO: 1400974 - RNA, 19 nt, Homo sapiens
  misc_RNA (1)...(19): siRNA sense strand
acagugaauugggaagaua

SEQ ID NO: 1400975 - RNA, 19 nt, Homo sapiens
  misc_RNA (1)...(19): siRNA sense strand
uauacuggguuaugaagug

SEQ ID NO: 1400976 - RNA, 19 nt, Homo sapiens
  misc_RNA (1)...(19): siRNA sense strand
cauaugaugcugaagaaga

SEQ ID NO: 1400977 - RNA, 19 nt, Homo sapiens
  misc_RNA (1)...(19): siRNA sense strand
gcagaaguggcauaugaug

SEQ ID NO: 1400978 - RNA, 19 nt, Homo sapiens
  misc_RNA (1)...(19): siRNA sense strand
gaaucagaacauugucuuu

SEQ ID NO: 1400979 - RNA, 19 nt, Homo sapiens
  misc_RNA (1)...(19): siRNA sense strand
caacaaacagaaaucaaag

SEQ ID NO: 1400980 - RNA, 19 nt, Homo sapiens
  misc_RNA (1)...(19): siRNA sense strand
gacaaguguuccugaucaa

SEQ ID NO: 1400981 - RNA, 19 nt, Homo sapiens
  misc_RNA (1)...(19): siRNA sense strand
acagaaagaacuacuugaa

SEQ ID NO: 1400982 - RNA, 19 nt, Homo sapiens
  misc_RNA (1)...(19): siRNA sense strand
uauagacacuuuagagaac

SEQ ID NO: 1400983 - RNA, 19 nt, Homo sapiens
  misc_RNA (1)...(19): siRNA sense strand
ccaguuagaagacucaaau

SEQ ID NO: 1400984 - RNA, 19 nt, Homo sapiens
  misc_RNA (1)...(19): siRNA sense strand
agagauagaaguagcagaa

SEQ ID NO: 1400985 - RNA, 19 nt, Homo sapiens
  misc_RNA (1)...(19): siRNA sense strand
ggaguccucugcacuugag

SEQ ID NO: 1400986 - RNA, 19 nt, Homo sapiens
  misc_RNA (1)...(19): siRNA sense strand
uuagagaacagaaucagaa

SEQ ID NO: 1400987 - RNA, 19 nt, Homo sapiens
  misc_RNA (1)...(19): siRNA sense strand
caagcucaaauucuucuaa

SEQ ID NO: 1400988 - RNA, 19 nt, Homo sapiens
  misc_RNA (1)...(19): siRNA sense strand
ccaccggguccauuugaua

SEQ ID NO: 1400989 - RNA, 19 nt, Homo sapiens
  misc_RNA (1)...(19): siRNA sense strand
gguacagcuucuuccauug

SEQ ID NO: 1400990 - RNA, 19 nt, Homo sapiens
  misc_RNA (1)...(19): siRNA sense strand
gauggaagaaagagcuaaa

SEQ ID NO: 1400991 - RNA, 19 nt, Homo sapiens
  misc_RNA (1)...(19): siRNA sense strand
ggaugugucagaaacagaa

SEQ ID NO: 1400992 - RNA, 19 nt, Homo sapiens
  misc_RNA (1)...(19): siRNA sense strand
caacaagcucaaauucuuc

SEQ ID NO: 1400993 - RNA, 19 nt, Homo sapiens
  misc_RNA (1)...(19): siRNA sense strand
cuucuuccauugaguauuc

SEQ ID NO: 1400994 - RNA, 19 nt, Homo sapiens
  misc_RNA (1)...(19): siRNA sense strand
gaagaaucuagagcugaua

SEQ ID NO: 1400995 - RNA, 19 nt, Homo sapiens
  misc_RNA (1)...(19): siRNA sense strand
cauauagacacuuuagaga

SEQ ID NO: 1400996 - RNA, 19 nt, Homo sapiens
  misc_RNA (1)...(19): siRNA sense strand
agguacagcuucuuccauu

SEQ ID NO: 1400997 - RNA, 19 nt, Homo sapiens
  misc_RNA (1)...(19): siRNA sense strand
aacagaaggugaacagauc

SEQ ID NO: 1400998 - RNA, 19 nt, Homo sapiens
  misc_RNA (1)...(19): siRNA sense strand
aaacagaaggugaacagau

SEQ ID NO: 1400999 - RNA, 19 nt, Homo sapiens
  misc_RNA (1)...(19): siRNA sense strand
caaguguuccugaucaaau

SEQ ID NO: 1401000 - RNA, 19 nt, Homo sapiens
  misc_RNA (1)...(19): siRNA sense strand
gaccaucuacaccuacuau

SEQ ID NO: 1401001 - RNA, 19 nt, Homo sapiens
  misc_RNA (1)...(19): siRNA sense strand
aagauguccuggaugaaga

SEQ ID NO: 1401002 - RNA, 19 nt, Homo sapiens
  misc_RNA (1)...(19): siRNA sense strand
uggaaucacuaaagaaacu

SEQ ID NO: 1401003 - RNA, 19 nt, Homo sapiens
  misc_RNA (1)...(19): siRNA sense strand
uuacagaaagaacuacuug

SEQ ID NO: 1401004 - RNA, 19 nt, Homo sapiens
  misc_RNA (1)...(19): siRNA sense strand
aagagauguuuccagguuu

SEQ ID NO: 1401005 - RNA, 19 nt, Homo sapiens
  misc_RNA (1)...(19): siRNA sense strand
gaagaaucacuggaugugu

SEQ ID NO: 1401006 - RNA, 19 nt, Homo sapiens
  misc_RNA (1)...(19): siRNA sense strand
cagaacauugucuuuagaa

SEQ ID NO: 1401007 - RNA, 19 nt, Homo sapiens
  misc_RNA (1)...(19): siRNA sense strand
agaacagaaucagaacauu

SEQ ID NO: 1401008 - RNA, 19 nt, Homo sapiens
  misc_RNA (1)...(19): siRNA sense strand
uggaagaaagagcuaaauu

SEQ ID NO: 1401009 - RNA, 19 nt, Homo sapiens
  misc_RNA (1)...(19): siRNA sense strand
aucaagauguccuggauga

SEQ ID NO: 1401010 - RNA, 19 nt, Homo sapiens
  misc_RNA (1)...(19): siRNA sense strand
ugaucaagauguccuggau

SEQ ID NO: 1401011 - RNA, 19 nt, Homo sapiens
  misc_RNA (1)...(19): siRNA sense strand
gaggaaagcagggcauucu

SEQ ID NO: 1401012 - RNA, 19 nt, Homo sapiens
  misc_RNA (1)...(19): siRNA sense strand
cagcuucuuccauugagua

SEQ ID NO: 1401013 - RNA, 19 nt, Homo sapiens
  misc_RNA (1)...(19): siRNA sense strand
caagauguccuggaugaag

SEQ ID NO: 1401014 - RNA, 19 nt, Homo sapiens
  misc_RNA (1)...(19): siRNA sense strand
gaaacagaaggugaacaga

SEQ ID NO: 1401015 - RNA, 19 nt, Homo sapiens
  misc_RNA (1)...(19): siRNA sense strand
cugaucaaauggauaauac

SEQ ID NO: 1401016 - RNA, 19 nt, Homo sapiens
  misc_RNA (1)...(19): siRNA sense strand
gacagacaauuaggauuac

SEQ ID NO: 1401017 - RNA, 19 nt, Homo sapiens
  misc_RNA (1)...(19): siRNA sense strand
ggcagugucucaacaagcu

SEQ ID NO: 1401018 - RNA, 19 nt, Homo sapiens
  misc_RNA (1)...(19): siRNA sense strand
gaccaagagacacugaaga

SEQ ID NO: 1401019 - RNA, 19 nt, Homo sapiens
  misc_RNA (1)...(19): siRNA sense strand
gauuacaagcguuucuuca

SEQ ID NO: 1401020 - RNA, 19 nt, Homo sapiens
  misc_RNA (1)...(19): siRNA sense strand
acagacaaguguuccugau

SEQ ID NO: 1401021 - RNA, 19 nt, Homo sapiens
  misc_RNA (1)...(19): siRNA sense strand
agauagaaguagcagaagu

SEQ ID NO: 1401022 - RNA, 19 nt, Homo sapiens
  misc_RNA (1)...(19): siRNA sense strand
gggcauucugugaaacuuu

SEQ ID NO: 1401023 - RNA, 19 nt, Homo sapiens
  misc_RNA (1)...(19): siRNA sense strand
ggauuacaagcguuucuuc

SEQ ID NO: 1401024 - RNA, 19 nt, Homo sapiens
  misc_RNA (1)...(19): siRNA sense strand
ccugaucaaauggauaaua

SEQ ID NO: 1401025 - RNA, 19 nt, Homo sapiens
  misc_RNA (1)...(19): siRNA sense strand
gaaaaugcuguaucagaga

SEQ ID NO: 1401026 - RNA, 19 nt, Homo sapiens
  misc_RNA (1)...(19): siRNA sense strand
guggaguccucugcacuug

SEQ ID NO: 1401027 - RNA, 19 nt, Homo sapiens
  misc_RNA (1)...(19): siRNA sense strand
uggauaauacuucaucugu

SEQ ID NO: 1401028 - RNA, 19 nt, Homo sapiens
  misc_RNA (1)...(19): siRNA sense strand
ucauauagacacuuuagag

SEQ ID NO: 1401029 - RNA, 19 nt, Homo sapiens
  misc_RNA (1)...(19): siRNA sense strand
ugugaaacuuuagaagaga

SEQ ID NO: 1401030 - RNA, 19 nt, Homo sapiens
  misc_RNA (1)...(19): siRNA sense strand
gcucacaaggacauugcua

SEQ ID NO: 1401031 - RNA, 19 nt, Homo sapiens
  misc_RNA (1)...(19): siRNA sense strand
aacgcugguuuaaagauaa

SEQ ID NO: 1401032 - RNA, 19 nt, Homo sapiens
  misc_RNA (1)...(19): siRNA sense strand
cgacuagcacuuccuccaa

SEQ ID NO: 1401033 - RNA, 19 nt, Homo sapiens
  misc_RNA (1)...(19): siRNA sense strand
uguccuggaugaagaaucu

SEQ ID NO: 1401034 - RNA, 19 nt, Homo sapiens
  misc_RNA (1)...(19): siRNA sense strand
aagaaucuagagcugauaa

SEQ ID NO: 1401035 - RNA, 19 nt, Homo sapiens
  misc_RNA (1)...(19): siRNA sense strand
ggaagaaagagcuaaauuu

SEQ ID NO: 1401036 - RNA, 19 nt, Homo sapiens
  misc_RNA (1)...(19): siRNA sense strand
gagauggaaucacuaaaga

SEQ ID NO: 1401037 - RNA, 19 nt, Homo sapiens
  misc_RNA (1)...(19): siRNA sense strand
uagcagaaguggcauauga

SEQ ID NO: 1401038 - RNA, 19 nt, Homo sapiens
  misc_RNA (1)...(19): siRNA sense strand
gaacagaaucagaacauug

SEQ ID NO: 1401039 - RNA, 19 nt, Homo sapiens
  misc_RNA (1)...(19): siRNA sense strand
ucaacaagcucaaauucuu

SEQ ID NO: 1401040 - RNA, 19 nt, Homo sapiens
  misc_RNA (1)...(19): siRNA sense strand
gauaauacuucaucugucu

SEQ ID NO: 1401041 - RNA, 19 nt, Homo sapiens
  misc_RNA (1)...(19): siRNA sense strand
aaagagauguuuccagguu

SEQ ID NO: 1401042 - RNA, 19 nt, Homo sapiens
  misc_RNA (1)...(19): siRNA sense strand
agacagacaauuaggauua

SEQ ID NO: 1401043 - RNA, 19 nt, Homo sapiens
  misc_RNA (1)...(19): siRNA sense strand
ggcauucugugaaacuuua

SEQ ID NO: 1401044 - RNA, 19 nt, Homo sapiens
  misc_RNA (1)...(19): siRNA sense strand
uuacaagcguuucuucaaa

SEQ ID NO: 1401045 - RNA, 19 nt, Homo sapiens
  misc_RNA (1)...(19): siRNA sense strand
gauggaaucacuaaagaaa

SEQ ID NO: 1401046 - RNA, 19 nt, Homo sapiens
  misc_RNA (1)...(19): siRNA sense strand
gaaucuagagcugauaaua

SEQ ID NO: 1401047 - RNA, 19 nt, Homo sapiens
  misc_RNA (1)...(19): siRNA sense strand
guuaugaagugauggaaga

SEQ ID NO: 1401048 - RNA, 19 nt, Homo sapiens
  misc_RNA (1)...(19): siRNA sense strand
uuagaagacucaaauaugg

SEQ ID NO: 1401049 - RNA, 19 nt, Homo sapiens
  misc_RNA (1)...(19): siRNA sense strand
uuuagaaccugaagaauca

SEQ ID NO: 1401050 - RNA, 19 nt, Homo sapiens
  misc_RNA (1)...(19): siRNA sense strand
gaagacagacaauuaggau

SEQ ID NO: 1401051 - RNA, 19 nt, Homo sapiens
  misc_RNA (1)...(19): siRNA sense strand
agacaaguguuccugauca

SEQ ID NO: 1401052 - RNA, 19 nt, Homo sapiens
  misc_RNA (1)...(19): siRNA sense strand
gaaggugaacagauccuaa

SEQ ID NO: 1401053 - RNA, 19 nt, Homo sapiens
  misc_RNA (1)...(19): siRNA sense strand
gacuagcacuuccuccaaa

SEQ ID NO: 1401054 - RNA, 19 nt, Homo sapiens
  misc_RNA (1)...(19): siRNA sense strand
caaacuaccgcuuacagaa

SEQ ID NO: 1401055 - RNA, 19 nt, Homo sapiens
  misc_RNA (1)...(19): siRNA sense strand
gugaacagauccuaaaggu

SEQ ID NO: 1401056 - RNA, 19 nt, Homo sapiens
  misc_RNA (1)...(19): siRNA sense strand
cagaaagaacuacuugaaa

SEQ ID NO: 1401057 - RNA, 19 nt, Homo sapiens
  misc_RNA (1)...(19): siRNA sense strand
ggagauggaaucacuaaag

SEQ ID NO: 1401058 - RNA, 19 nt, Homo sapiens
  misc_RNA (1)...(19): siRNA sense strand
guuagaagacucaaauaug

SEQ ID NO: 1401059 - RNA, 19 nt, Homo sapiens
  misc_RNA (1)...(19): siRNA sense strand
cuacuauacuggguuauga

SEQ ID NO: 1401060 - RNA, 19 nt, Homo sapiens
  misc_RNA (1)...(19): siRNA sense strand
aagagacacugaagaacaa

SEQ ID NO: 1401061 - RNA, 19 nt, Homo sapiens
  misc_RNA (1)...(19): siRNA sense strand
caagagacacugaagaaca

SEQ ID NO: 1401062 - RNA, 19 nt, Homo sapiens
  misc_RNA (1)...(19): siRNA sense strand
guacagcuucuuccauuga

SEQ ID NO: 1401063 - RNA, 19 nt, Homo sapiens
  misc_RNA (1)...(19): siRNA sense strand
acaaggacauugcuaacug

SEQ ID NO: 1401064 - RNA, 19 nt, Homo sapiens
  misc_RNA (1)...(19): siRNA sense strand
ugaagaaucuagagcugau

SEQ ID NO: 1401065 - RNA, 19 nt, Homo sapiens
  misc_RNA (1)...(19): siRNA sense strand
ucagaacauugucuuuaga

SEQ ID NO: 1401066 - RNA, 19 nt, Homo sapiens
  misc_RNA (1)...(19): siRNA sense strand
caccuacuauacuggguua

SEQ ID NO: 1401067 - RNA, 19 nt, Homo sapiens
  misc_RNA (1)...(19): siRNA sense strand
ggaaagcagggcauucugu

SEQ ID NO: 1401068 - RNA, 19 nt, Homo sapiens
  misc_RNA (1)...(19): siRNA sense strand
gauagaaguagcagaagug

SEQ ID NO: 1401069 - RNA, 19 nt, Homo sapiens
  misc_RNA (1)...(19): siRNA sense strand
aggacuaaauuuacaggua

SEQ ID NO: 1401070 - RNA, 19 nt, Homo sapiens
  misc_RNA (1)...(19): siRNA sense strand
gagaacagaaucagaacau

SEQ ID NO: 1401071 - RNA, 19 nt, Homo sapiens
  misc_RNA (1)...(19): siRNA sense strand
aaacuaccgcuuacagaaa

SEQ ID NO: 1401072 - RNA, 19 nt, Homo sapiens
  misc_RNA (1)...(19): siRNA sense strand
gagacaaacuaccgcuuac

SEQ ID NO: 1401073 - RNA, 19 nt, Homo sapiens
  misc_RNA (1)...(19): siRNA sense strand
agagacaaacuaccgcuua

SEQ ID NO: 1401074 - RNA, 19 nt, Homo sapiens
  misc_RNA (1)...(19): siRNA sense strand
acagugaauugggaagaua

SEQ ID NO: 1401075 - RNA, 19 nt, Homo sapiens
  misc_RNA (1)...(19): siRNA sense strand
uauacuggguuaugaagug

SEQ ID NO: 1401076 - RNA, 19 nt, Homo sapiens
  misc_RNA (1)...(19): siRNA sense strand
cauaugaugcugaagaaga

SEQ ID NO: 1401077 - RNA, 19 nt, Homo sapiens
  misc_RNA (1)...(19): siRNA sense strand
gcagaaguggcauaugaug

SEQ ID NO: 1401078 - RNA, 19 nt, Homo sapiens
  misc_RNA (1)...(19): siRNA sense strand
gaaucagaacauugucuuu

SEQ ID NO: 1401079 - RNA, 19 nt, Homo sapiens
  misc_RNA (1)...(19): siRNA sense strand
caacaaacagaaaucaaag

SEQ ID NO: 1401080 - RNA, 19 nt, Homo sapiens
  misc_RNA (1)...(19): siRNA sense strand
gacaaguguuccugaucaa

SEQ ID NO: 1401081 - RNA, 19 nt, Homo sapiens
  misc_RNA (1)...(19): siRNA sense strand
acagaaagaacuacuugaa

SEQ ID NO: 1401082 - RNA, 19 nt, Homo sapiens
  misc_RNA (1)...(19): siRNA sense strand
uauagacacuuuagagaac

SEQ ID NO: 1401083 - RNA, 19 nt, Homo sapiens
  misc_RNA (1)...(19): siRNA sense strand
ccaguuagaagacucaaau

SEQ ID NO: 1401084 - RNA, 19 nt, Homo sapiens
  misc_RNA (1)...(19): siRNA sense strand
agagauagaaguagcagaa

SEQ ID NO: 1401085 - RNA, 19 nt, Homo sapiens
  misc_RNA (1)...(19): siRNA sense strand
ggaguccucugcacuugag

SEQ ID NO: 1401086 - RNA, 19 nt, Homo sapiens
  misc_RNA (1)...(19): siRNA sense strand
uuagagaacagaaucagaa

SEQ ID NO: 1401087 - RNA, 19 nt, Homo sapiens
  misc_RNA (1)...(19): siRNA sense strand
caagcucaaauucuucuaa

SEQ ID NO: 1401088 - RNA, 19 nt, Homo sapiens
  misc_RNA (1)...(19): siRNA sense strand
ccaccggguccauuugaua

SEQ ID NO: 1401089 - RNA, 19 nt, Homo sapiens
  misc_RNA (1)...(19): siRNA sense strand
gguacagcuucuuccauug

SEQ ID NO: 1401090 - RNA, 19 nt, Homo sapiens
  misc_RNA (1)...(19): siRNA sense strand
gauggaagaaagagcuaaa

SEQ ID NO: 1401091 - RNA, 19 nt, Homo sapiens
  misc_RNA (1)...(19): siRNA sense strand
ggaugugucagaaacagaa

SEQ ID NO: 1401092 - RNA, 19 nt, Homo sapiens
  misc_RNA (1)...(19): siRNA sense strand
caacaagcucaaauucuuc

SEQ ID NO: 1401093 - RNA, 19 nt, Homo sapiens
  misc_RNA (1)...(19): siRNA sense strand
cuucuuccauugaguauuc

SEQ ID NO: 1401094 - RNA, 19 nt, Homo sapiens
  misc_RNA (1)...(19): siRNA sense strand
gaagaaucuagagcugaua

SEQ ID NO: 1401095 - RNA, 19 nt, Homo sapiens
  misc_RNA (1)...(19): siRNA sense strand
cauauagacacuuuagaga

SEQ ID NO: 1401096 - RNA, 19 nt, Homo sapiens
  misc_RNA (1)...(19): siRNA sense strand
agguacagcuucuuccauu

SEQ ID NO: 1401097 - RNA, 19 nt, Homo sapiens
  misc_RNA (1)...(19): siRNA sense strand
aacagaaggugaacagauc

SEQ ID NO: 1401098 - RNA, 19 nt, Homo sapiens
  misc_RNA (1)...(19): siRNA sense strand
aaacagaaggugaacagau

SEQ ID NO: 1401099 - RNA, 19 nt, Homo sapiens
  misc_RNA (1)...(19): siRNA sense strand
caaguguuccugaucaaau

SEQ ID NO: 1401100 - RNA, 19 nt, Homo sapiens
  misc_RNA (1)...(19): siRNA sense strand
gaccaucuacaccuacuau

SEQ ID NO: 1401101 - RNA, 19 nt, Homo sapiens
  misc_RNA (1)...(19): siRNA sense strand
aagauguccuggaugaaga

SEQ ID NO: 1401102 - RNA, 19 nt, Homo sapiens
  misc_RNA (1)...(19): siRNA sense strand
uggaaucacuaaagaaacu

SEQ ID NO: 1401103 - RNA, 19 nt, Homo sapiens
  misc_RNA (1)...(19): siRNA sense strand
uuacagaaagaacuacuug

SEQ ID NO: 1401104 - RNA, 19 nt, Homo sapiens
  misc_RNA (1)...(19): siRNA sense strand
aagagauguuuccagguuu

SEQ ID NO: 1401105 - RNA, 19 nt, Homo sapiens
  misc_RNA (1)...(19): siRNA sense strand
gaagaaucacuggaugugu

SEQ ID NO: 1401106 - RNA, 19 nt, Homo sapiens
  misc_RNA (1)...(19): siRNA sense strand
cagaacauugucuuuagaa

SEQ ID NO: 1401107 - RNA, 19 nt, Homo sapiens
  misc_RNA (1)...(19): siRNA sense strand
agaacagaaucagaacauu

SEQ ID NO: 1401108 - RNA, 19 nt, Homo sapiens
  misc_RNA (1)...(19): siRNA sense strand
uggaagaaagagcuaaauu

SEQ ID NO: 1401109 - RNA, 19 nt, Homo sapiens
  misc_RNA (1)...(19): siRNA sense strand
aucaagauguccuggauga

SEQ ID NO: 1401110 - RNA, 19 nt, Homo sapiens
  misc_RNA (1)...(19): siRNA sense strand
ugaucaagauguccuggau

SEQ ID NO: 1401111 - RNA, 19 nt, Homo sapiens
  misc_RNA (1)...(19): siRNA sense strand
gaggaaagcagggcauucu

SEQ ID NO: 1401112 - RNA, 19 nt, Homo sapiens
  misc_RNA (1)...(19): siRNA sense strand
cagcuucuuccauugagua

SEQ ID NO: 1401113 - RNA, 19 nt, Homo sapiens
  misc_RNA (1)...(19): siRNA sense strand
caagauguccuggaugaag

SEQ ID NO: 1401114 - RNA, 19 nt, Homo sapiens
  misc_RNA (1)...(19): siRNA sense strand
gaaacagaaggugaacaga

SEQ ID NO: 1401115 - RNA, 19 nt, Homo sapiens
  misc_RNA (1)...(19): siRNA sense strand
cugaucaaauggauaauac

SEQ ID NO: 1401116 - RNA, 19 nt, Homo sapiens
  misc_RNA (1)...(19): siRNA sense strand
gacagacaauuaggauuac

SEQ ID NO: 1401117 - RNA, 19 nt, Homo sapiens
  misc_RNA (1)...(19): siRNA sense strand
ggcagugucucaacaagcu

SEQ ID NO: 1401118 - RNA, 19 nt, Homo sapiens
  misc_RNA (1)...(19): siRNA sense strand
gaccaagagacacugaaga

SEQ ID NO: 1401119 - RNA, 19 nt, Homo sapiens
  misc_RNA (1)...(19): siRNA sense strand
gauuacaagcguuucuuca

SEQ ID NO: 1401120 - RNA, 19 nt, Homo sapiens
  misc_RNA (1)...(19): siRNA sense strand
acagacaaguguuccugau

SEQ ID NO: 1401121 - RNA, 19 nt, Homo sapiens
  misc_RNA (1)...(19): siRNA sense strand
agauagaaguagcagaagu

SEQ ID NO: 1401122 - RNA, 19 nt, Homo sapiens
  misc_RNA (1)...(19): siRNA sense strand
gggcauucugugaaacuuu

SEQ ID NO: 1401123 - RNA, 19 nt, Homo sapiens
  misc_RNA (1)...(19): siRNA sense strand
ggauuacaagcguuucuuc

SEQ ID NO: 1401124 - RNA, 19 nt, Homo sapiens
  misc_RNA (1)...(19): siRNA sense strand
ccugaucaaauggauaaua

SEQ ID NO: 1401125 - RNA, 19 nt, Homo sapiens
  misc_RNA (1)...(19): siRNA sense strand
gaaaaugcuguaucagaga

SEQ ID NO: 1401126 - RNA, 19 nt, Homo sapiens
  misc_RNA (1)...(19): siRNA sense strand
guggaguccucugcacuug

SEQ ID NO: 1401127 - RNA, 19 nt, Homo sapiens
  misc_RNA (1)...(19): siRNA sense strand
uggauaauacuucaucugu

SEQ ID NO: 1401128 - RNA, 19 nt, Homo sapiens
  misc_RNA (1)...(19): siRNA sense strand
ucauauagacacuuuagag

SEQ ID NO: 1401129 - RNA, 19 nt, Homo sapiens
  misc_RNA (1)...(19): siRNA sense strand
ugugaaacuuuagaagaga

SEQ ID NO: 1401130 - RNA, 19 nt, Homo sapiens
  misc_RNA (1)...(19): siRNA sense strand
gcucacaaggacauugcua

SEQ ID NO: 1401131 - RNA, 19 nt, Homo sapiens
  misc_RNA (1)...(19): siRNA sense strand
aacgcugguuuaaagauaa

SEQ ID NO: 1401132 - RNA, 19 nt, Homo sapiens
  misc_RNA (1)...(19): siRNA sense strand
cgacuagcacuuccuccaa

SEQ ID NO: 1401133 - RNA, 19 nt, Homo sapiens
  misc_RNA (1)...(19): siRNA sense strand
uguccuggaugaagaaucu

SEQ ID NO: 1401134 - RNA, 19 nt, Homo sapiens
  misc_RNA (1)...(19): siRNA sense strand
aagaaucuagagcugauaa

SEQ ID NO: 1401135 - RNA, 19 nt, Homo sapiens
  misc_RNA (1)...(19): siRNA sense strand
ggaagaaagagcuaaauuu

SEQ ID NO: 1401136 - RNA, 19 nt, Homo sapiens
  misc_RNA (1)...(19): siRNA sense strand
gagauggaaucacuaaaga

SEQ ID NO: 1401137 - RNA, 19 nt, Homo sapiens
  misc_RNA (1)...(19): siRNA sense strand
uagcagaaguggcauauga

SEQ ID NO: 1401138 - RNA, 19 nt, Homo sapiens
  misc_RNA (1)...(19): siRNA sense strand
gaacagaaucagaacauug

SEQ ID NO: 1401139 - RNA, 19 nt, Homo sapiens
  misc_RNA (1)...(19): siRNA sense strand
ucaacaagcucaaauucuu

SEQ ID NO: 1401140 - RNA, 19 nt, Homo sapiens
  misc_RNA (1)...(19): siRNA sense strand
gauaauacuucaucugucu

SEQ ID NO: 1401141 - RNA, 19 nt, Homo sapiens
  misc_RNA (1)...(19): siRNA sense strand
aaagagauguuuccagguu

SEQ ID NO: 1401142 - RNA, 19 nt, Homo sapiens
  misc_RNA (1)...(19): siRNA sense strand
agacagacaauuaggauua

SEQ ID NO: 1401143 - RNA, 19 nt, Homo sapiens
  misc_RNA (1)...(19): siRNA sense strand
ggcauucugugaaacuuua

SEQ ID NO: 1401144 - RNA, 19 nt, Homo sapiens
  misc_RNA (1)...(19): siRNA sense strand
uuacaagcguuucuucaaa

SEQ ID NO: 1401145 - RNA, 19 nt, Homo sapiens
  misc_RNA (1)...(19): siRNA sense strand
gauggaaucacuaaagaaa

SEQ ID NO: 1401146 - RNA, 19 nt, Homo sapiens
  misc_RNA (1)...(19): siRNA sense strand
gaaucuagagcugauaaua

SEQ ID NO: 1401147 - RNA, 19 nt, Homo sapiens
  misc_RNA (1)...(19): siRNA sense strand
guuaugaagugauggaaga

SEQ ID NO: 1401148 - RNA, 19 nt, Homo sapiens
  misc_RNA (1)...(19): siRNA sense strand
uuagaagacucaaauaugg

SEQ ID NO: 1401149 - RNA, 19 nt, Homo sapiens
  misc_RNA (1)...(19): siRNA sense strand
uuuagaaccugaagaauca

SEQ ID NO: 1401150 - RNA, 19 nt, Homo sapiens
  misc_RNA (1)...(19): siRNA sense strand
gaagacagacaauuaggau

SEQ ID NO: 1401151 - RNA, 19 nt, Homo sapiens
  misc_RNA (1)...(19): siRNA sense strand
agacaaguguuccugauca

SEQ ID NO: 1401152 - RNA, 19 nt, Homo sapiens
  misc_RNA (1)...(19): siRNA sense strand
gaaggugaacagauccuaa

SEQ ID NO: 1401153 - RNA, 19 nt, Homo sapiens
  misc_RNA (1)...(19): siRNA sense strand
gacuagcacuuccuccaaa

SEQ ID NO: 1401154 - RNA, 19 nt, Homo sapiens
  misc_RNA (1)...(19): siRNA sense strand
caaacuaccgcuuacagaa

SEQ ID NO: 1401155 - RNA, 19 nt, Homo sapiens
  misc_RNA (1)...(19): siRNA sense strand
gugaacagauccuaaaggu

SEQ ID NO: 1401156 - RNA, 19 nt, Homo sapiens
  misc_RNA (1)...(19): siRNA sense strand
cagaaagaacuacuugaaa

SEQ ID NO: 1401157 - RNA, 19 nt, Homo sapiens
  misc_RNA (1)...(19): siRNA sense strand
ggagauggaaucacuaaag

SEQ ID NO: 1401158 - RNA, 19 nt, Homo sapiens
  misc_RNA (1)...(19): siRNA sense strand
guuagaagacucaaauaug

SEQ ID NO: 1401159 - RNA, 19 nt, Homo sapiens
  misc_RNA (1)...(19): siRNA sense strand
cuacuauacuggguuauga

SEQ ID NO: 1401160 - RNA, 19 nt, Homo sapiens
  misc_RNA (1)...(19): siRNA sense strand
aagagacacugaagaacaa

SEQ ID NO: 1401161 - RNA, 19 nt, Homo sapiens
  misc_RNA (1)...(19): siRNA sense strand
caagagacacugaagaaca

SEQ ID NO: 1401162 - RNA, 19 nt, Homo sapiens
  misc_RNA (1)...(19): siRNA sense strand
guacagcuucuuccauuga

SEQ ID NO: 1401163 - RNA, 19 nt, Homo sapiens
  misc_RNA (1)...(19): siRNA sense strand
acaaggacauugcuaacug

SEQ ID NO: 1401164 - RNA, 19 nt, Homo sapiens
  misc_RNA (1)...(19): siRNA sense strand
ugaagaaucuagagcugau

SEQ ID NO: 1401165 - RNA, 19 nt, Homo sapiens
  misc_RNA (1)...(19): siRNA sense strand
ucagaacauugucuuuaga

SEQ ID NO: 1401166 - RNA, 19 nt, Homo sapiens
  misc_RNA (1)...(19): siRNA sense strand
caccuacuauacuggguua

SEQ ID NO: 1401167 - RNA, 19 nt, Homo sapiens
  misc_RNA (1)...(19): siRNA sense strand
ggaaagcagggcauucugu

SEQ ID NO: 1401168 - RNA, 19 nt, Homo sapiens
  misc_RNA (1)...(19): siRNA sense strand
gauagaaguagcagaagug

SEQ ID NO: 1401169 - RNA, 19 nt, Homo sapiens
  misc_RNA (1)...(19): siRNA sense strand
aggacuaaauuuacaggua

SEQ ID NO: 1401170 - RNA, 19 nt, Homo sapiens
  misc_RNA (1)...(19): siRNA sense strand
gagaacagaaucagaacau

SEQ ID NO: 1401171 - RNA, 19 nt, Homo sapiens
  misc_RNA (1)...(19): siRNA sense strand
aaacuaccgcuuacagaaa

SEQ ID NO: 1401172 - RNA, 19 nt, Homo sapiens
  misc_RNA (1)...(19): siRNA sense strand
gagacaaacuaccgcuuac

SEQ ID NO: 1401173 - RNA, 19 nt, Homo sapiens
  misc_RNA (1)...(19): siRNA sense strand
agagacaaacuaccgcuua

SEQ ID NO: 1401174 - RNA, 19 nt, Homo sapiens
  misc_RNA (1)...(19): siRNA sense strand
acagugaauugggaagaua

SEQ ID NO: 1401175 - RNA, 19 nt, Homo sapiens
  misc_RNA (1)...(19): siRNA sense strand
uauacuggguuaugaagug

SEQ ID NO: 1401176 - RNA, 19 nt, Homo sapiens
  misc_RNA (1)...(19): siRNA sense strand
cauaugaugcugaagaaga

SEQ ID NO: 1401177 - RNA, 19 nt, Homo sapiens
  misc_RNA (1)...(19): siRNA sense strand
gcagaaguggcauaugaug

SEQ ID NO: 1401178 - RNA, 19 nt, Homo sapiens
  misc_RNA (1)...(19): siRNA sense strand
gaaucagaacauugucuuu

SEQ ID NO: 1401179 - RNA, 19 nt, Homo sapiens
  misc_RNA (1)...(19): siRNA sense strand
caacaaacagaaaucaaag

SEQ ID NO: 1401180 - RNA, 19 nt, Homo sapiens
  misc_RNA (1)...(19): siRNA sense strand
gacaaguguuccugaucaa

SEQ ID NO: 1401181 - RNA, 19 nt, Homo sapiens
  misc_RNA (1)...(19): siRNA sense strand
acagaaagaacuacuugaa

SEQ ID NO: 1401182 - RNA, 19 nt, Homo sapiens
  misc_RNA (1)...(19): siRNA sense strand
uauagacacuuuagagaac

SEQ ID NO: 1401183 - RNA, 19 nt, Homo sapiens
  misc_RNA (1)...(19): siRNA sense strand
ccaguuagaagacucaaau

SEQ ID NO: 1401184 - RNA, 19 nt, Homo sapiens
  misc_RNA (1)...(19): siRNA sense strand
agagauagaaguagcagaa

SEQ ID NO: 1401185 - RNA, 19 nt, Homo sapiens
  misc_RNA (1)...(19): siRNA sense strand
ggaguccucugcacuugag

SEQ ID NO: 1401186 - RNA, 19 nt, Homo sapiens
  misc_RNA (1)...(19): siRNA sense strand
uuagagaacagaaucagaa

SEQ ID NO: 1401187 - RNA, 19 nt, Homo sapiens
  misc_RNA (1)...(19): siRNA sense strand
caagcucaaauucuucuaa

SEQ ID NO: 1401188 - RNA, 19 nt, Homo sapiens
  misc_RNA (1)...(19): siRNA sense strand
ccaccggguccauuugaua

SEQ ID NO: 1401189 - RNA, 19 nt, Homo sapiens
  misc_RNA (1)...(19): siRNA sense strand
gguacagcuucuuccauug

SEQ ID NO: 1401190 - RNA, 19 nt, Homo sapiens
  misc_RNA (1)...(19): siRNA sense strand
gauggaagaaagagcuaaa

SEQ ID NO: 1401191 - RNA, 19 nt, Homo sapiens
  misc_RNA (1)...(19): siRNA sense strand
ggaugugucagaaacagaa

SEQ ID NO: 1401192 - RNA, 19 nt, Homo sapiens
  misc_RNA (1)...(19): siRNA sense strand
caacaagcucaaauucuuc

SEQ ID NO: 1401193 - RNA, 19 nt, Homo sapiens
  misc_RNA (1)...(19): siRNA sense strand
cuucuuccauugaguauuc

SEQ ID NO: 1401194 - RNA, 19 nt, Homo sapiens
  misc_RNA (1)...(19): siRNA sense strand
gaagaaucuagagcugaua

SEQ ID NO: 1401195 - RNA, 19 nt, Homo sapiens
  misc_RNA (1)...(19): siRNA sense strand
cauauagacacuuuagaga

SEQ ID NO: 1401196 - RNA, 19 nt, Homo sapiens
  misc_RNA (1)...(19): siRNA sense strand
agguacagcuucuuccauu

SEQ ID NO: 1401197 - RNA, 19 nt, Homo sapiens
  misc_RNA (1)...(19): siRNA sense strand
aacagaaggugaacagauc

SEQ ID NO: 1401198 - RNA, 19 nt, Homo sapiens
  misc_RNA (1)...(19): siRNA sense strand
aaacagaaggugaacagau

SEQ ID NO: 1401199 - RNA, 19 nt, Homo sapiens
  misc_RNA (1)...(19): siRNA sense strand
caaguguuccugaucaaau

SEQ ID NO: 1401200 - RNA, 19 nt, Homo sapiens
  misc_RNA (1)...(19): siRNA sense strand
gaccaucuacaccuacuau

SEQ ID NO: 1401201 - RNA, 19 nt, Homo sapiens
  misc_RNA (1)...(19): siRNA sense strand
aagauguccuggaugaaga

SEQ ID NO: 1401202 - RNA, 19 nt, Homo sapiens
  misc_RNA (1)...(19): siRNA sense strand
uggaaucacuaaagaaacu

SEQ ID NO: 1401203 - RNA, 19 nt, Homo sapiens
  misc_RNA (1)...(19): siRNA sense strand
uuacagaaagaacuacuug

SEQ ID NO: 1401204 - RNA, 19 nt, Homo sapiens
  misc_RNA (1)...(19): siRNA sense strand
aagagauguuuccagguuu

SEQ ID NO: 1401205 - RNA, 19 nt, Homo sapiens
  misc_RNA (1)...(19): siRNA sense strand
gaagaaucacuggaugugu

SEQ ID NO: 1401206 - RNA, 19 nt, Homo sapiens
  misc_RNA (1)...(19): siRNA sense strand
cagaacauugucuuuagaa

SEQ ID NO: 1401207 - RNA, 19 nt, Homo sapiens
  misc_RNA (1)...(19): siRNA sense strand
agaacagaaucagaacauu

SEQ ID NO: 1401208 - RNA, 19 nt, Homo sapiens
  misc_RNA (1)...(19): siRNA sense strand
uggaagaaagagcuaaauu

SEQ ID NO: 1401209 - RNA, 19 nt, Homo sapiens
  misc_RNA (1)...(19): siRNA sense strand
aucaagauguccuggauga

SEQ ID NO: 1401210 - RNA, 19 nt, Homo sapiens
  misc_RNA (1)...(19): siRNA sense strand
ugaucaagauguccuggau

SEQ ID NO: 1401211 - RNA, 19 nt, Homo sapiens
  misc_RNA (1)...(19): siRNA sense strand
gaggaaagcagggcauucu

SEQ ID NO: 1401212 - RNA, 19 nt, Homo sapiens
  misc_RNA (1)...(19): siRNA sense strand
cagcuucuuccauugagua

SEQ ID NO: 1401213 - RNA, 19 nt, Homo sapiens
  misc_RNA (1)...(19): siRNA sense strand
caagauguccuggaugaag

SEQ ID NO: 1401214 - RNA, 19 nt, Homo sapiens
  misc_RNA (1)...(19): siRNA sense strand
gaaacagaaggugaacaga

SEQ ID NO: 1401215 - RNA, 19 nt, Homo sapiens
  misc_RNA (1)...(19): siRNA sense strand
cugaucaaauggauaauac

SEQ ID NO: 1401216 - RNA, 19 nt, Homo sapiens
  misc_RNA (1)...(19): siRNA sense strand
gacagacaauuaggauuac

SEQ ID NO: 1401217 - RNA, 19 nt, Homo sapiens
  misc_RNA (1)...(19): siRNA sense strand
ggcagugucucaacaagcu

SEQ ID NO: 1401218 - RNA, 19 nt, Homo sapiens
  misc_RNA (1)...(19): siRNA sense strand
gaccaagagacacugaaga

SEQ ID NO: 1401219 - RNA, 19 nt, Homo sapiens
  misc_RNA (1)...(19): siRNA sense strand
gauuacaagcguuucuuca

SEQ ID NO: 1401220 - RNA, 19 nt, Homo sapiens
  misc_RNA (1)...(19): siRNA sense strand
acagacaaguguuccugau

SEQ ID NO: 1401221 - RNA, 19 nt, Homo sapiens
  misc_RNA (1)...(19): siRNA sense strand
agauagaaguagcagaagu

SEQ ID NO: 1401222 - RNA, 19 nt, Homo sapiens
  misc_RNA (1)...(19): siRNA sense strand
gggcauucugugaaacuuu

SEQ ID NO: 1401223 - RNA, 19 nt, Homo sapiens
  misc_RNA (1)...(19): siRNA sense strand
ggauuacaagcguuucuuc

SEQ ID NO: 1401224 - RNA, 19 nt, Homo sapiens
  misc_RNA (1)...(19): siRNA sense strand
ccugaucaaauggauaaua

SEQ ID NO: 1401225 - RNA, 19 nt, Homo sapiens
  misc_RNA (1)...(19): siRNA sense strand
gaaaaugcuguaucagaga

SEQ ID NO: 1401226 - RNA, 19 nt, Homo sapiens
  misc_RNA (1)...(19): siRNA sense strand
guggaguccucugcacuug

SEQ ID NO: 1401227 - RNA, 19 nt, Homo sapiens
  misc_RNA (1)...(19): siRNA sense strand
uggauaauacuucaucugu

SEQ ID NO: 1401228 - RNA, 19 nt, Homo sapiens
  misc_RNA (1)...(19): siRNA sense strand
ucauauagacacuuuagag

SEQ ID NO: 1401229 - RNA, 19 nt, Homo sapiens
  misc_RNA (1)...(19): siRNA sense strand
ugugaaacuuuagaagaga

SEQ ID NO: 1401230 - RNA, 19 nt, Homo sapiens
  misc_RNA (1)...(19): siRNA sense strand
gcucacaaggacauugcua

SEQ ID NO: 1401231 - RNA, 19 nt, Homo sapiens
  misc_RNA (1)...(19): siRNA sense strand
aacgcugguuuaaagauaa

SEQ ID NO: 1401232 - RNA, 19 nt, Homo sapiens
  misc_RNA (1)...(19): siRNA sense strand
cgacuagcacuuccuccaa

SEQ ID NO: 1401233 - RNA, 19 nt, Homo sapiens
  misc_RNA (1)...(19): siRNA sense strand
uguccuggaugaagaaucu

SEQ ID NO: 1401234 - RNA, 19 nt, Homo sapiens
  misc_RNA (1)...(19): siRNA sense strand
aagaaucuagagcugauaa

SEQ ID NO: 1401235 - RNA, 19 nt, Homo sapiens
  misc_RNA (1)...(19): siRNA sense strand
ggaagaaagagcuaaauuu

SEQ ID NO: 1401236 - RNA, 19 nt, Homo sapiens
  misc_RNA (1)...(19): siRNA sense strand
gagauggaaucacuaaaga

SEQ ID NO: 1401237 - RNA, 19 nt, Homo sapiens
  misc_RNA (1)...(19): siRNA sense strand
uagcagaaguggcauauga

SEQ ID NO: 1401238 - RNA, 19 nt, Homo sapiens
  misc_RNA (1)...(19): siRNA sense strand
gaacagaaucagaacauug

SEQ ID NO: 1401239 - RNA, 19 nt, Homo sapiens
  misc_RNA (1)...(19): siRNA sense strand
ucaacaagcucaaauucuu

SEQ ID NO: 1401240 - RNA, 19 nt, Homo sapiens
  misc_RNA (1)...(19): siRNA sense strand
gauaauacuucaucugucu

SEQ ID NO: 1401241 - RNA, 19 nt, Homo sapiens
  misc_RNA (1)...(19): siRNA sense strand
aaagagauguuuccagguu

SEQ ID NO: 1401242 - RNA, 19 nt, Homo sapiens
  misc_RNA (1)...(19): siRNA sense strand
agacagacaauuaggauua

SEQ ID NO: 1401243 - RNA, 19 nt, Homo sapiens
  misc_RNA (1)...(19): siRNA sense strand
ggcauucugugaaacuuua

SEQ ID NO: 1401244 - RNA, 19 nt, Homo sapiens
  misc_RNA (1)...(19): siRNA sense strand
uuacaagcguuucuucaaa

SEQ ID NO: 1401245 - RNA, 19 nt, Homo sapiens
  misc_RNA (1)...(19): siRNA sense strand
gauggaaucacuaaagaaa

SEQ ID NO: 1401246 - RNA, 19 nt, Homo sapiens
  misc_RNA (1)...(19): siRNA sense strand
gaaucuagagcugauaaua

SEQ ID NO: 1401247 - RNA, 19 nt, Homo sapiens
  misc_RNA (1)...(19): siRNA sense strand
guuaugaagugauggaaga

SEQ ID NO: 1401248 - RNA, 19 nt, Homo sapiens
  misc_RNA (1)...(19): siRNA sense strand
uuagaagacucaaauaugg

SEQ ID NO: 1401249 - RNA, 19 nt, Homo sapiens
  misc_RNA (1)...(19): siRNA sense strand
uuuagaaccugaagaauca

SEQ ID NO: 1401250 - RNA, 19 nt, Homo sapiens
  misc_RNA (1)...(19): siRNA sense strand
gaagacagacaauuaggau

SEQ ID NO: 1401251 - RNA, 19 nt, Homo sapiens
  misc_RNA (1)...(19): siRNA sense strand
agacaaguguuccugauca

SEQ ID NO: 1401252 - RNA, 19 nt, Homo sapiens
  misc_RNA (1)...(19): siRNA sense strand
gaaggugaacagauccuaa

SEQ ID NO: 1401253 - RNA, 19 nt, Homo sapiens
  misc_RNA (1)...(19): siRNA sense strand
gacuagcacuuccuccaaa

SEQ ID NO: 1401254 - RNA, 19 nt, Homo sapiens
  misc_RNA (1)...(19): siRNA sense strand
caaacuaccgcuuacagaa

SEQ ID NO: 1401255 - RNA, 19 nt, Homo sapiens
  misc_RNA (1)...(19): siRNA sense strand
gugaacagauccuaaaggu

SEQ ID NO: 1401256 - RNA, 19 nt, Homo sapiens
  misc_RNA (1)...(19): siRNA sense strand
cagaaagaacuacuugaaa

SEQ ID NO: 1401257 - RNA, 19 nt, Homo sapiens
  misc_RNA (1)...(19): siRNA sense strand
ggagauggaaucacuaaag

SEQ ID NO: 1401258 - RNA, 19 nt, Homo sapiens
  misc_RNA (1)...(19): siRNA sense strand
guuagaagacucaaauaug

SEQ ID NO: 1401259 - RNA, 19 nt, Homo sapiens
  misc_RNA (1)...(19): siRNA sense strand
cuacuauacuggguuauga

SEQ ID NO: 1401260 - RNA, 19 nt, Homo sapiens
  misc_RNA (1)...(19): siRNA sense strand
aagagacacugaagaacaa

SEQ ID NO: 1401261 - RNA, 19 nt, Homo sapiens
  misc_RNA (1)...(19): siRNA sense strand
caagagacacugaagaaca

SEQ ID NO: 1401262 - RNA, 19 nt, Homo sapiens
  misc_RNA (1)...(19): siRNA sense strand
guacagcuucuuccauuga

SEQ ID NO: 1401263 - RNA, 19 nt, Homo sapiens
  misc_RNA (1)...(19): siRNA sense strand
acaaggacauugcuaacug

SEQ ID NO: 1401264 - RNA, 19 nt, Homo sapiens
  misc_RNA (1)...(19): siRNA sense strand
ugaagaaucuagagcugau

SEQ ID NO: 1401265 - RNA, 19 nt, Homo sapiens
  misc_RNA (1)...(19): siRNA sense strand
ucagaacauugucuuuaga

SEQ ID NO: 1401266 - RNA, 19 nt, Homo sapiens
  misc_RNA (1)...(19): siRNA sense strand
caccuacuauacuggguua

SEQ ID NO: 1401267 - RNA, 19 nt, Homo sapiens
  misc_RNA (1)...(19): siRNA sense strand
ggaaagcagggcauucugu

SEQ ID NO: 1401268 - RNA, 19 nt, Homo sapiens
  misc_RNA (1)...(19): siRNA sense strand
gauagaaguagcagaagug

SEQ ID NO: 1401269 - RNA, 19 nt, Homo sapiens
  misc_RNA (1)...(19): siRNA sense strand
aggacuaaauuuacaggua

SEQ ID NO: 1401270 - RNA, 19 nt, Homo sapiens
  misc_RNA (1)...(19): siRNA sense strand
gagaacagaaucagaacau

SEQ ID NO: 1401271 - RNA, 19 nt, Homo sapiens
  misc_RNA (1)...(19): siRNA sense strand
aaacuaccgcuuacagaaa

SEQ ID NO: 1401272 - RNA, 19 nt, Homo sapiens
  misc_RNA (1)...(19): siRNA sense strand
gagacaaacuaccgcuuac

SEQ ID NO: 1401273 - RNA, 19 nt, Homo sapiens
  misc_RNA (1)...(19): siRNA sense strand
agagacaaacuaccgcuua

SEQ ID NO: 1401274 - RNA, 19 nt, Homo sapiens
  misc_RNA (1)...(19): siRNA sense strand
acagugaauugggaagaua

SEQ ID NO: 1401275 - RNA, 19 nt, Homo sapiens
  misc_RNA (1)...(19): siRNA sense strand
uauacuggguuaugaagug

SEQ ID NO: 1401276 - RNA, 19 nt, Homo sapiens
  misc_RNA (1)...(19): siRNA sense strand
cauaugaugcugaagaaga

SEQ ID NO: 1401277 - RNA, 19 nt, Homo sapiens
  misc_RNA (1)...(19): siRNA sense strand
gcagaaguggcauaugaug

SEQ ID NO: 1401278 - RNA, 19 nt, Homo sapiens
  misc_RNA (1)...(19): siRNA sense strand
gaaucagaacauugucuuu

SEQ ID NO: 1401279 - RNA, 19 nt, Homo sapiens
  misc_RNA (1)...(19): siRNA sense strand
caacaaacagaaaucaaag

SEQ ID NO: 1401280 - RNA, 19 nt, Homo sapiens
  misc_RNA (1)...(19): siRNA sense strand
gacaaguguuccugaucaa

SEQ ID NO: 1401281 - RNA, 19 nt, Homo sapiens
  misc_RNA (1)...(19): siRNA sense strand
acagaaagaacuacuugaa

SEQ ID NO: 1401282 - RNA, 19 nt, Homo sapiens
  misc_RNA (1)...(19): siRNA sense strand
uauagacacuuuagagaac

SEQ ID NO: 1401283 - RNA, 19 nt, Homo sapiens
  misc_RNA (1)...(19): siRNA sense strand
ccaguuagaagacucaaau

SEQ ID NO: 1401284 - RNA, 19 nt, Homo sapiens
  misc_RNA (1)...(19): siRNA sense strand
agagauagaaguagcagaa

SEQ ID NO: 1401285 - RNA, 19 nt, Homo sapiens
  misc_RNA (1)...(19): siRNA sense strand
ggaguccucugcacuugag

SEQ ID NO: 1401286 - RNA, 19 nt, Homo sapiens
  misc_RNA (1)...(19): siRNA sense strand
uuagagaacagaaucagaa

SEQ ID NO: 1401287 - RNA, 19 nt, Homo sapiens
  misc_RNA (1)...(19): siRNA sense strand
caagcucaaauucuucuaa

SEQ ID NO: 1401288 - RNA, 19 nt, Homo sapiens
  misc_RNA (1)...(19): siRNA sense strand
ccaccggguccauuugaua

SEQ ID NO: 1401289 - RNA, 19 nt, Homo sapiens
  misc_RNA (1)...(19): siRNA sense strand
gguacagcuucuuccauug

SEQ ID NO: 1401290 - RNA, 19 nt, Homo sapiens
  misc_RNA (1)...(19): siRNA sense strand
gauggaagaaagagcuaaa

SEQ ID NO: 1401291 - RNA, 19 nt, Homo sapiens
  misc_RNA (1)...(19): siRNA sense strand
ggaugugucagaaacagaa

SEQ ID NO: 1401292 - RNA, 19 nt, Homo sapiens
  misc_RNA (1)...(19): siRNA sense strand
caacaagcucaaauucuuc

SEQ ID NO: 1401293 - RNA, 19 nt, Homo sapiens
  misc_RNA (1)...(19): siRNA sense strand
cuucuuccauugaguauuc

SEQ ID NO: 1401294 - RNA, 19 nt, Homo sapiens
  misc_RNA (1)...(19): siRNA sense strand
gaagaaucuagagcugaua

SEQ ID NO: 1401295 - RNA, 19 nt, Homo sapiens
  misc_RNA (1)...(19): siRNA sense strand
cauauagacacuuuagaga

SEQ ID NO: 1401296 - RNA, 19 nt, Homo sapiens
  misc_RNA (1)...(19): siRNA sense strand
agguacagcuucuuccauu

SEQ ID NO: 1401297 - RNA, 19 nt, Homo sapiens
  misc_RNA (1)...(19): siRNA sense strand
aacagaaggugaacagauc

SEQ ID NO: 1401298 - RNA, 19 nt, Homo sapiens
  misc_RNA (1)...(19): siRNA sense strand
aaacagaaggugaacagau

SEQ ID NO: 1401299 - RNA, 19 nt, Homo sapiens
  misc_RNA (1)...(19): siRNA sense strand
caaguguuccugaucaaau

SEQ ID NO: 1401300 - RNA, 19 nt, Homo sapiens
  misc_RNA (1)...(19): siRNA sense strand
gaccaucuacaccuacuau

SEQ ID NO: 1401301 - RNA, 19 nt, Homo sapiens
  misc_RNA (1)...(19): siRNA sense strand
aagauguccuggaugaaga

SEQ ID NO: 1401302 - RNA, 19 nt, Homo sapiens
  misc_RNA (1)...(19): siRNA sense strand
uggaaucacuaaagaaacu

SEQ ID NO: 1401303 - RNA, 19 nt, Homo sapiens
  misc_RNA (1)...(19): siRNA sense strand
uuacagaaagaacuacuug

SEQ ID NO: 1401304 - RNA, 19 nt, Homo sapiens
  misc_RNA (1)...(19): siRNA sense strand
aagagauguuuccagguuu

SEQ ID NO: 1401305 - RNA, 19 nt, Homo sapiens
  misc_RNA (1)...(19): siRNA sense strand
gaagaaucacuggaugugu

SEQ ID NO: 1401306 - RNA, 19 nt, Homo sapiens
  misc_RNA (1)...(19): siRNA sense strand
cagaacauugucuuuagaa

SEQ ID NO: 1401307 - RNA, 19 nt, Homo sapiens
  misc_RNA (1)...(19): siRNA sense strand
agaacagaaucagaacauu

SEQ ID NO: 1401308 - RNA, 19 nt, Homo sapiens
  misc_RNA (1)...(19): siRNA sense strand
uggaagaaagagcuaaauu

SEQ ID NO: 1401309 - RNA, 19 nt, Homo sapiens
  misc_RNA (1)...(19): siRNA sense strand
aucaagauguccuggauga

SEQ ID NO: 1401310 - RNA, 19 nt, Homo sapiens
  misc_RNA (1)...(19): siRNA sense strand
ugaucaagauguccuggau

SEQ ID NO: 1401311 - RNA, 19 nt, Homo sapiens
  misc_RNA (1)...(19): siRNA sense strand
gaggaaagcagggcauucu

SEQ ID NO: 1401312 - RNA, 19 nt, Homo sapiens
  misc_RNA (1)...(19): siRNA sense strand
cagcuucuuccauugagua

SEQ ID NO: 1401313 - RNA, 19 nt, Homo sapiens
  misc_RNA (1)...(19): siRNA sense strand
caagauguccuggaugaag

SEQ ID NO: 1401314 - RNA, 19 nt, Homo sapiens
  misc_RNA (1)...(19): siRNA sense strand
gaaacagaaggugaacaga

SEQ ID NO: 1401315 - RNA, 19 nt, Homo sapiens
  misc_RNA (1)...(19): siRNA sense strand
cugaucaaauggauaauac

SEQ ID NO: 1401316 - RNA, 19 nt, Homo sapiens
  misc_RNA (1)...(19): siRNA sense strand
gacagacaauuaggauuac

SEQ ID NO: 1401317 - RNA, 19 nt, Homo sapiens
  misc_RNA (1)...(19): siRNA sense strand
ggcagugucucaacaagcu

SEQ ID NO: 1401318 - RNA, 19 nt, Homo sapiens
  misc_RNA (1)...(19): siRNA sense strand
gaccaagagacacugaaga

SEQ ID NO: 1401319 - RNA, 19 nt, Homo sapiens
  misc_RNA (1)...(19): siRNA sense strand
gauuacaagcguuucuuca

SEQ ID NO: 1401320 - RNA, 19 nt, Homo sapiens
  misc_RNA (1)...(19): siRNA sense strand
acagacaaguguuccugau

SEQ ID NO: 1401321 - RNA, 19 nt, Homo sapiens
  misc_RNA (1)...(19): siRNA sense strand
agauagaaguagcagaagu

SEQ ID NO: 1401322 - RNA, 19 nt, Homo sapiens
  misc_RNA (1)...(19): siRNA sense strand
gggcauucugugaaacuuu

SEQ ID NO: 1401323 - RNA, 19 nt, Homo sapiens
  misc_RNA (1)...(19): siRNA sense strand
ggauuacaagcguuucuuc

SEQ ID NO: 1401324 - RNA, 19 nt, Homo sapiens
  misc_RNA (1)...(19): siRNA sense strand
ccugaucaaauggauaaua

SEQ ID NO: 1401325 - RNA, 19 nt, Homo sapiens
  misc_RNA (1)...(19): siRNA sense strand
gaaaaugcuguaucagaga

SEQ ID NO: 1401326 - RNA, 19 nt, Homo sapiens
  misc_RNA (1)...(19): siRNA sense strand
guggaguccucugcacuug

SEQ ID NO: 1401327 - RNA, 19 nt, Homo sapiens
  misc_RNA (1)...(19): siRNA sense strand
uggauaauacuucaucugu

SEQ ID NO: 1401328 - RNA, 19 nt, Homo sapiens
  misc_RNA (1)...(19): siRNA sense strand
ucauauagacacuuuagag

SEQ ID NO: 1401329 - RNA, 19 nt, Homo sapiens
  misc_RNA (1)...(19): siRNA sense strand
ugugaaacuuuagaagaga

SEQ ID NO: 1401330 - RNA, 19 nt, Homo sapiens
  misc_RNA (1)...(19): siRNA sense strand
gcucacaaggacauugcua

SEQ ID NO: 1401331 - RNA, 19 nt, Homo sapiens
  misc_RNA (1)...(19): siRNA sense strand
aacgcugguuuaaagauaa

SEQ ID NO: 1401332 - RNA, 19 nt, Homo sapiens
  misc_RNA (1)...(19): siRNA sense strand
cgacuagcacuuccuccaa

SEQ ID NO: 1401333 - RNA, 19 nt, Homo sapiens
  misc_RNA (1)...(19): siRNA sense strand
uguccuggaugaagaaucu

SEQ ID NO: 1401334 - RNA, 19 nt, Homo sapiens
  misc_RNA (1)...(19): siRNA sense strand
aagaaucuagagcugauaa

SEQ ID NO: 1401335 - RNA, 19 nt, Homo sapiens
  misc_RNA (1)...(19): siRNA sense strand
ggaagaaagagcuaaauuu

SEQ ID NO: 1401336 - RNA, 19 nt, Homo sapiens
  misc_RNA (1)...(19): siRNA sense strand
gagauggaaucacuaaaga

SEQ ID NO: 1401337 - RNA, 19 nt, Homo sapiens
  misc_RNA (1)...(19): siRNA sense strand
uagcagaaguggcauauga

SEQ ID NO: 1401338 - RNA, 19 nt, Homo sapiens
  misc_RNA (1)...(19): siRNA sense strand
gaacagaaucagaacauug

SEQ ID NO: 1401339 - RNA, 19 nt, Homo sapiens
  misc_RNA (1)...(19): siRNA sense strand
ucaacaagcucaaauucuu

SEQ ID NO: 1401340 - RNA, 19 nt, Homo sapiens
  misc_RNA (1)...(19): siRNA sense strand
gauaauacuucaucugucu

SEQ ID NO: 1401341 - RNA, 19 nt, Homo sapiens
  misc_RNA (1)...(19): siRNA sense strand
aaagagauguuuccagguu

SEQ ID NO: 1401342 - RNA, 19 nt, Homo sapiens
  misc_RNA (1)...(19): siRNA sense strand
agacagacaauuaggauua

SEQ ID NO: 1401343 - RNA, 19 nt, Homo sapiens
  misc_RNA (1)...(19): siRNA sense strand
ggcauucugugaaacuuua

SEQ ID NO: 1401344 - RNA, 19 nt, Homo sapiens
  misc_RNA (1)...(19): siRNA sense strand
uuacaagcguuucuucaaa

SEQ ID NO: 1401345 - RNA, 19 nt, Homo sapiens
  misc_RNA (1)...(19): siRNA sense strand
gauggaaucacuaaagaaa

SEQ ID NO: 1401346 - RNA, 19 nt, Homo sapiens
  misc_RNA (1)...(19): siRNA sense strand
gaaucuagagcugauaaua

SEQ ID NO: 1401347 - RNA, 19 nt, Homo sapiens
  misc_RNA (1)...(19): siRNA sense strand
guuaugaagugauggaaga

SEQ ID NO: 1401348 - RNA, 19 nt, Homo sapiens
  misc_RNA (1)...(19): siRNA sense strand
uuagaagacucaaauaugg

SEQ ID NO: 1401349 - RNA, 19 nt, Homo sapiens
  misc_RNA (1)...(19): siRNA sense strand
uuuagaaccugaagaauca

SEQ ID NO: 1401350 - RNA, 19 nt, Homo sapiens
  misc_RNA (1)...(19): siRNA sense strand
gaagacagacaauuaggau

SEQ ID NO: 1401351 - RNA, 19 nt, Homo sapiens
  misc_RNA (1)...(19): siRNA sense strand
agacaaguguuccugauca

SEQ ID NO: 1401352 - RNA, 19 nt, Homo sapiens
  misc_RNA (1)...(19): siRNA sense strand
gaaggugaacagauccuaa

SEQ ID NO: 1401353 - RNA, 19 nt, Homo sapiens
  misc_RNA (1)...(19): siRNA sense strand
gacuagcacuuccuccaaa

SEQ ID NO: 1401354 - RNA, 19 nt, Homo sapiens
  misc_RNA (1)...(19): siRNA sense strand
caaacuaccgcuuacagaa

SEQ ID NO: 1401355 - RNA, 19 nt, Homo sapiens
  misc_RNA (1)...(19): siRNA sense strand
gugaacagauccuaaaggu

SEQ ID NO: 1401356 - RNA, 19 nt, Homo sapiens
  misc_RNA (1)...(19): siRNA sense strand
cagaaagaacuacuugaaa

SEQ ID NO: 1401357 - RNA, 19 nt, Homo sapiens
  misc_RNA (1)...(19): siRNA sense strand
ggagauggaaucacuaaag

SEQ ID NO: 1401358 - RNA, 19 nt, Homo sapiens
  misc_RNA (1)...(19): siRNA sense strand
guuagaagacucaaauaug

SEQ ID NO: 1401359 - RNA, 19 nt, Homo sapiens
  misc_RNA (1)...(19): siRNA sense strand
cuacuauacuggguuauga

SEQ ID NO: 1401360 - RNA, 19 nt, Homo sapiens
  misc_RNA (1)...(19): siRNA sense strand
aagagacacugaagaacaa

SEQ ID NO: 1401361 - RNA, 19 nt, Homo sapiens
  misc_RNA (1)...(19): siRNA sense strand
caagagacacugaagaaca

SEQ ID NO: 1401362 - RNA, 19 nt, Homo sapiens
  misc_RNA (1)...(19): siRNA sense strand
guacagcuucuuccauuga

SEQ ID NO: 1401363 - RNA, 19 nt, Homo sapiens
  misc_RNA (1)...(19): siRNA sense strand
acaaggacauugcuaacug

SEQ ID NO: 1401364 - RNA, 19 nt, Homo sapiens
  misc_RNA (1)...(19): siRNA sense strand
ugaagaaucuagagcugau

SEQ ID NO: 1401365 - RNA, 19 nt, Homo sapiens
  misc_RNA (1)...(19): siRNA sense strand
ucagaacauugucuuuaga

SEQ ID NO: 1401366 - RNA, 19 nt, Homo sapiens
  misc_RNA (1)...(19): siRNA sense strand
caccuacuauacuggguua

SEQ ID NO: 1401367 - RNA, 19 nt, Homo sapiens
  misc_RNA (1)...(19): siRNA sense strand
ggaaagcagggcauucugu

SEQ ID NO: 1401368 - RNA, 19 nt, Homo sapiens
  misc_RNA (1)...(19): siRNA sense strand
gauagaaguagcagaagug

SEQ ID NO: 1401369 - RNA, 19 nt, Homo sapiens
  misc_RNA (1)...(19): siRNA sense strand
aggacuaaauuuacaggua

SEQ ID NO: 1401370 - RNA, 19 nt, Homo sapiens
  misc_RNA (1)...(19): siRNA sense strand
gagaacagaaucagaacau

SEQ ID NO: 1401371 - RNA, 19 nt, Homo sapiens
  misc_RNA (1)...(19): siRNA sense strand
aaacuaccgcuuacagaaa

SEQ ID NO: 1401372 - RNA, 19 nt, Homo sapiens
  misc_RNA (1)...(19): siRNA sense strand
gagacaaacuaccgcuuac

SEQ ID NO: 1401373 - RNA, 19 nt, Homo sapiens
  misc_RNA (1)...(19): siRNA sense strand
agagacaaacuaccgcuua

SEQ ID NO: 1401374 - RNA, 19 nt, Homo sapiens
  misc_RNA (1)...(19): siRNA sense strand
acagugaauugggaagaua

SEQ ID NO: 1401375 - RNA, 19 nt, Homo sapiens
  misc_RNA (1)...(19): siRNA sense strand
uauacuggguuaugaagug

SEQ ID NO: 1401376 - RNA, 19 nt, Homo sapiens
  misc_RNA (1)...(19): siRNA sense strand
cauaugaugcugaagaaga

SEQ ID NO: 1401377 - RNA, 19 nt, Homo sapiens
  misc_RNA (1)...(19): siRNA sense strand
gcagaaguggcauaugaug

SEQ ID NO: 1401378 - RNA, 19 nt, Homo sapiens
  misc_RNA (1)...(19): siRNA sense strand
gaaucagaacauugucuuu

SEQ ID NO: 1401379 - RNA, 19 nt, Homo sapiens
  misc_RNA (1)...(19): siRNA sense strand
caacaaacagaaaucaaag

SEQ ID NO: 1401380 - RNA, 19 nt, Homo sapiens
  misc_RNA (1)...(19): siRNA sense strand
gacaaguguuccugaucaa

SEQ ID NO: 1401381 - RNA, 19 nt, Homo sapiens
  misc_RNA (1)...(19): siRNA sense strand
acagaaagaacuacuugaa

SEQ ID NO: 1401382 - RNA, 19 nt, Homo sapiens
  misc_RNA (1)...(19): siRNA sense strand
uauagacacuuuagagaac

SEQ ID NO: 1401383 - RNA, 19 nt, Homo sapiens
  misc_RNA (1)...(19): siRNA sense strand
ccaguuagaagacucaaau

SEQ ID NO: 1401384 - RNA, 19 nt, Homo sapiens
  misc_RNA (1)...(19): siRNA sense strand
agagauagaaguagcagaa

SEQ ID NO: 1401385 - RNA, 19 nt, Homo sapiens
  misc_RNA (1)...(19): siRNA sense strand
ggaguccucugcacuugag

SEQ ID NO: 1401386 - RNA, 19 nt, Homo sapiens
  misc_RNA (1)...(19): siRNA sense strand
uuagagaacagaaucagaa

SEQ ID NO: 1401387 - RNA, 19 nt, Homo sapiens
  misc_RNA (1)...(19): siRNA sense strand
caagcucaaauucuucuaa

SEQ ID NO: 1401388 - RNA, 19 nt, Homo sapiens
  misc_RNA (1)...(19): siRNA sense strand
ccaccggguccauuugaua

SEQ ID NO: 1401389 - RNA, 19 nt, Homo sapiens
  misc_RNA (1)...(19): siRNA sense strand
gguacagcuucuuccauug

SEQ ID NO: 1401390 - RNA, 19 nt, Homo sapiens
  misc_RNA (1)...(19): siRNA sense strand
gauggaagaaagagcuaaa

SEQ ID NO: 1401391 - RNA, 19 nt, Homo sapiens
  misc_RNA (1)...(19): siRNA sense strand
ggaugugucagaaacagaa

SEQ ID NO: 1401392 - RNA, 19 nt, Homo sapiens
  misc_RNA (1)...(19): siRNA sense strand
caacaagcucaaauucuuc

SEQ ID NO: 1401393 - RNA, 19 nt, Homo sapiens
  misc_RNA (1)...(19): siRNA sense strand
cuucuuccauugaguauuc

SEQ ID NO: 1401394 - RNA, 19 nt, Homo sapiens
  misc_RNA (1)...(19): siRNA sense strand
gaagaaucuagagcugaua

SEQ ID NO: 1401395 - RNA, 19 nt, Homo sapiens
  misc_RNA (1)...(19): siRNA sense strand
cauauagacacuuuagaga

SEQ ID NO: 1401396 - RNA, 19 nt, Homo sapiens
  misc_RNA (1)...(19): siRNA sense strand
agguacagcuucuuccauu

SEQ ID NO: 1401397 - RNA, 19 nt, Homo sapiens
  misc_RNA (1)...(19): siRNA sense strand
aacagaaggugaacagauc

SEQ ID NO: 1401398 - RNA, 19 nt, Homo sapiens
  misc_RNA (1)...(19): siRNA sense strand
aaacagaaggugaacagau

SEQ ID NO: 1401399 - RNA, 19 nt, Homo sapiens
  misc_RNA (1)...(19): siRNA sense strand
caaguguuccugaucaaau

SEQ ID NO: 1401400 - RNA, 19 nt, Homo sapiens
  misc_RNA (1)...(19): siRNA sense strand
gaccaucuacaccuacuau

SEQ ID NO: 1401401 - RNA, 19 nt, Homo sapiens
  misc_RNA (1)...(19): siRNA sense strand
aagauguccuggaugaaga

SEQ ID NO: 1401402 - RNA, 19 nt, Homo sapiens
  misc_RNA (1)...(19): siRNA sense strand
uggaaucacuaaagaaacu

SEQ ID NO: 1401403 - RNA, 19 nt, Homo sapiens
  misc_RNA (1)...(19): siRNA sense strand
uuacagaaagaacuacuug

SEQ ID NO: 1401404 - RNA, 19 nt, Homo sapiens
  misc_RNA (1)...(19): siRNA sense strand
aagagauguuuccagguuu

SEQ ID NO: 1401405 - RNA, 19 nt, Homo sapiens
  misc_RNA (1)...(19): siRNA sense strand
gaagaaucacuggaugugu

SEQ ID NO: 1401406 - RNA, 19 nt, Homo sapiens
  misc_RNA (1)...(19): siRNA sense strand
cagaacauugucuuuagaa

SEQ ID NO: 1401407 - RNA, 19 nt, Homo sapiens
  misc_RNA (1)...(19): siRNA sense strand
agaacagaaucagaacauu

SEQ ID NO: 1401408 - RNA, 19 nt, Homo sapiens
  misc_RNA (1)...(19): siRNA sense strand
uggaagaaagagcuaaauu

SEQ ID NO: 1401409 - RNA, 19 nt, Homo sapiens
  misc_RNA (1)...(19): siRNA sense strand
aucaagauguccuggauga

SEQ ID NO: 1401410 - RNA, 19 nt, Homo sapiens
  misc_RNA (1)...(19): siRNA sense strand
ugaucaagauguccuggau

SEQ ID NO: 1401411 - RNA, 19 nt, Homo sapiens
  misc_RNA (1)...(19): siRNA sense strand
gaggaaagcagggcauucu

SEQ ID NO: 1401412 - RNA, 19 nt, Homo sapiens
  misc_RNA (1)...(19): siRNA sense strand
cagcuucuuccauugagua

SEQ ID NO: 1401413 - RNA, 19 nt, Homo sapiens
  misc_RNA (1)...(19): siRNA sense strand
caagauguccuggaugaag

SEQ ID NO: 1401414 - RNA, 19 nt, Homo sapiens
  misc_RNA (1)...(19): siRNA sense strand
gaaacagaaggugaacaga

SEQ ID NO: 1401415 - RNA, 19 nt, Homo sapiens
  misc_RNA (1)...(19): siRNA sense strand
cugaucaaauggauaauac

SEQ ID NO: 1401416 - RNA, 19 nt, Homo sapiens
  misc_RNA (1)...(19): siRNA sense strand
gacagacaauuaggauuac

SEQ ID NO: 1401417 - RNA, 19 nt, Homo sapiens
  misc_RNA (1)...(19): siRNA sense strand
ggcagugucucaacaagcu

SEQ ID NO: 1401418 - RNA, 19 nt, Homo sapiens
  misc_RNA (1)...(19): siRNA sense strand
gaccaagagacacugaaga

SEQ ID NO: 1401419 - RNA, 19 nt, Homo sapiens
  misc_RNA (1)...(19): siRNA sense strand
gauuacaagcguuucuuca

SEQ ID NO: 1401420 - RNA, 19 nt, Homo sapiens
  misc_RNA (1)...(19): siRNA sense strand
acagacaaguguuccugau

SEQ ID NO: 1401421 - RNA, 19 nt, Homo sapiens
  misc_RNA (1)...(19): siRNA sense strand
agauagaaguagcagaagu

SEQ ID NO: 1401422 - RNA, 19 nt, Homo sapiens
  misc_RNA (1)...(19): siRNA sense strand
gggcauucugugaaacuuu

SEQ ID NO: 1401423 - RNA, 19 nt, Homo sapiens
  misc_RNA (1)...(19): siRNA sense strand
ggauuacaagcguuucuuc

SEQ ID NO: 1401424 - RNA, 19 nt, Homo sapiens
  misc_RNA (1)...(19): siRNA sense strand
ccugaucaaauggauaaua

SEQ ID NO: 1401425 - RNA, 19 nt, Homo sapiens
  misc_RNA (1)...(19): siRNA sense strand
gaaaaugcuguaucagaga

SEQ ID NO: 1401426 - RNA, 19 nt, Homo sapiens
  misc_RNA (1)...(19): siRNA sense strand
guggaguccucugcacuug

SEQ ID NO: 1401427 - RNA, 19 nt, Homo sapiens
  misc_RNA (1)...(19): siRNA sense strand
uggauaauacuucaucugu

SEQ ID NO: 1401428 - RNA, 19 nt, Homo sapiens
  misc_RNA (1)...(19): siRNA sense strand
ucauauagacacuuuagag

SEQ ID NO: 1401429 - RNA, 19 nt, Homo sapiens
  misc_RNA (1)...(19): siRNA sense strand
ugugaaacuuuagaagaga

SEQ ID NO: 1401430 - RNA, 19 nt, Homo sapiens
  misc_RNA (1)...(19): siRNA sense strand
gcucacaaggacauugcua

SEQ ID NO: 1401431 - RNA, 19 nt, Homo sapiens
  misc_RNA (1)...(19): siRNA sense strand
aacgcugguuuaaagauaa

SEQ ID NO: 1401432 - RNA, 19 nt, Homo sapiens
  misc_RNA (1)...(19): siRNA sense strand
cgacuagcacuuccuccaa

SEQ ID NO: 1401433 - RNA, 19 nt, Homo sapiens
  misc_RNA (1)...(19): siRNA sense strand
uguccuggaugaagaaucu

SEQ ID NO: 1401434 - RNA, 19 nt, Homo sapiens
  misc_RNA (1)...(19): siRNA sense strand
aagaaucuagagcugauaa

SEQ ID NO: 1401435 - RNA, 19 nt, Homo sapiens
  misc_RNA (1)...(19): siRNA sense strand
gaaaugaggcugacuauaa

SEQ ID NO: 1401436 - RNA, 19 nt, Homo sapiens
  misc_RNA (1)...(19): siRNA sense strand
gaacagcuccuccaaauau

SEQ ID NO: 1401437 - RNA, 19 nt, Homo sapiens
  misc_RNA (1)...(19): siRNA sense strand
ugaaagggcuaccauuuga

SEQ ID NO: 1401438 - RNA, 19 nt, Homo sapiens
  misc_RNA (1)...(19): siRNA sense strand
gaucaaaggaagccaauaa

SEQ ID NO: 1401439 - RNA, 19 nt, Homo sapiens
  misc_RNA (1)...(19): siRNA sense strand
ccauuuaacuuuccuggua

SEQ ID NO: 1401440 - RNA, 19 nt, Homo sapiens
  misc_RNA (1)...(19): siRNA sense strand
ggaauggauugguuaaguu

SEQ ID NO: 1401441 - RNA, 19 nt, Homo sapiens
  misc_RNA (1)...(19): siRNA sense strand
gcgcacaggugguacaauu

SEQ ID NO: 1401442 - RNA, 19 nt, Homo sapiens
  misc_RNA (1)...(19): siRNA sense strand
ccaccuagcucaggaauga

SEQ ID NO: 1401443 - RNA, 19 nt, Homo sapiens
  misc_RNA (1)...(19): siRNA sense strand
gaucauguaggucgaaaua

SEQ ID NO: 1401444 - RNA, 19 nt, Homo sapiens
  misc_RNA (1)...(19): siRNA sense strand
gaaauaaugggaauggauu

SEQ ID NO: 1401445 - RNA, 19 nt, Homo sapiens
  misc_RNA (1)...(19): siRNA sense strand
gcacaggugguacaauuaa

SEQ ID NO: 1401446 - RNA, 19 nt, Homo sapiens
  misc_RNA (1)...(19): siRNA sense strand
uaagaaagguaugcuagaa

SEQ ID NO: 1401447 - RNA, 19 nt, Homo sapiens
  misc_RNA (1)...(19): siRNA sense strand
agacggaaaugcagaauau

SEQ ID NO: 1401448 - RNA, 19 nt, Homo sapiens
  misc_RNA (1)...(19): siRNA sense strand
gaaacugccaacuuagaua

SEQ ID NO: 1401449 - RNA, 19 nt, Homo sapiens
  misc_RNA (1)...(19): siRNA sense strand
gagcaccuaugaauuugaa

SEQ ID NO: 1401450 - RNA, 19 nt, Homo sapiens
  misc_RNA (1)...(19): siRNA sense strand
gaaacagaaugcugaugau

SEQ ID NO: 1401451 - RNA, 19 nt, Homo sapiens
  misc_RNA (1)...(19): siRNA sense strand
ggcaaucgcuuuauucaag

SEQ ID NO: 1401452 - RNA, 19 nt, Homo sapiens
  misc_RNA (1)...(19): siRNA sense strand
guaguuacccuagaagaua

SEQ ID NO: 1401453 - RNA, 19 nt, Homo sapiens
  misc_RNA (1)...(19): siRNA sense strand
caagauacauuugaagcuu

SEQ ID NO: 1401454 - RNA, 19 nt, Homo sapiens
  misc_RNA (1)...(19): siRNA sense strand
aaauggcccugguagcuua

SEQ ID NO: 1401455 - RNA, 19 nt, Homo sapiens
  misc_RNA (1)...(19): siRNA sense strand
ggaaugaguagcaggguaa

SEQ ID NO: 1401456 - RNA, 19 nt, Homo sapiens
  misc_RNA (1)...(19): siRNA sense strand
gaagauaugagagagauug

SEQ ID NO: 1401457 - RNA, 19 nt, Homo sapiens
  misc_RNA (1)...(19): siRNA sense strand
gaauaugauugaacugagu

SEQ ID NO: 1401458 - RNA, 19 nt, Homo sapiens
  misc_RNA (1)...(19): siRNA sense strand
ggagguggaccaaacaauu

SEQ ID NO: 1401459 - RNA, 19 nt, Homo sapiens
  misc_RNA (1)...(19): siRNA sense strand
acaacaguauccaacuuua

SEQ ID NO: 1401460 - RNA, 19 nt, Homo sapiens
  misc_RNA (1)...(19): siRNA sense strand
ggaaaugcagaauaugauu

SEQ ID NO: 1401461 - RNA, 19 nt, Homo sapiens
  misc_RNA (1)...(19): siRNA sense strand
gagguggaccaaacaauuu

SEQ ID NO: 1401462 - RNA, 19 nt, Homo sapiens
  misc_RNA (1)...(19): siRNA sense strand
gaauggauugguuaaguuu

SEQ ID NO: 1401463 - RNA, 19 nt, Homo sapiens
  misc_RNA (1)...(19): siRNA sense strand
guugaaagaucauguaggu

SEQ ID NO: 1401464 - RNA, 19 nt, Homo sapiens
  misc_RNA (1)...(19): siRNA sense strand
gaaaugcagaauaugauug

SEQ ID NO: 1401465 - RNA, 19 nt, Homo sapiens
  misc_RNA (1)...(19): siRNA sense strand
ccacaacaguauccaacuu

SEQ ID NO: 1401466 - RNA, 19 nt, Homo sapiens
  misc_RNA (1)...(19): siRNA sense strand
cgaaacagaaugcugauga

SEQ ID NO: 1401467 - RNA, 19 nt, Homo sapiens
  misc_RNA (1)...(19): siRNA sense strand
ggaacagcuccuccaaaua

SEQ ID NO: 1401468 - RNA, 19 nt, Homo sapiens
  misc_RNA (1)...(19): siRNA sense strand
gggaauggauugguuaagu

SEQ ID NO: 1401469 - RNA, 19 nt, Homo sapiens
  misc_RNA (1)...(19): siRNA sense strand
caaaggaagccaauaaugg

SEQ ID NO: 1401470 - RNA, 19 nt, Homo sapiens
  misc_RNA (1)...(19): siRNA sense strand
uuacaaagauggauguucu

SEQ ID NO: 1401471 - RNA, 19 nt, Homo sapiens
  misc_RNA (1)...(19): siRNA sense strand
guacaugggcaaucgcuuu

SEQ ID NO: 1401472 - RNA, 19 nt, Homo sapiens
  misc_RNA (1)...(19): siRNA sense strand
caacaguauccaacuuuaa

SEQ ID NO: 1401473 - RNA, 19 nt, Homo sapiens
  misc_RNA (1)...(19): siRNA sense strand
agagggaaaugauacuaaa

SEQ ID NO: 1401474 - RNA, 19 nt, Homo sapiens
  misc_RNA (1)...(19): siRNA sense strand
ucauguaggucgaaauaau

SEQ ID NO: 1401475 - RNA, 19 nt, Homo sapiens
  misc_RNA (1)...(19): siRNA sense strand
gggugaggcuuucaucguu

SEQ ID NO: 1401476 - RNA, 19 nt, Homo sapiens
  misc_RNA (1)...(19): siRNA sense strand
ggacaggcauugguucagu

SEQ ID NO: 1401477 - RNA, 19 nt, Homo sapiens
  misc_RNA (1)...(19): siRNA sense strand
guacauguucuuguugaua

SEQ ID NO: 1401478 - RNA, 19 nt, Homo sapiens
  misc_RNA (1)...(19): siRNA sense strand
cuauaaggcugcucugugu

SEQ ID NO: 1401479 - RNA, 19 nt, Homo sapiens
  misc_RNA (1)...(19): siRNA sense strand
gcgaaggcuuuguagaguu

SEQ ID NO: 1401480 - RNA, 19 nt, Homo sapiens
  misc_RNA (1)...(19): siRNA sense strand
ggugaggcuuucaucguuu

SEQ ID NO: 1401481 - RNA, 19 nt, Homo sapiens
  misc_RNA (1)...(19): siRNA sense strand
gauaugagagagauugaga

SEQ ID NO: 1401482 - RNA, 19 nt, Homo sapiens
  misc_RNA (1)...(19): siRNA sense strand
ugacaggccuauagguuca

SEQ ID NO: 1401483 - RNA, 19 nt, Homo sapiens
  misc_RNA (1)...(19): siRNA sense strand
ggaccaaacaauuuaagug

SEQ ID NO: 1401484 - RNA, 19 nt, Homo sapiens
  misc_RNA (1)...(19): siRNA sense strand
ccacuucuguucaugaaag

SEQ ID NO: 1401485 - RNA, 19 nt, Homo sapiens
  misc_RNA (1)...(19): siRNA sense strand
gagagaagcuuuuguucau

SEQ ID NO: 1401486 - RNA, 19 nt, Homo sapiens
  misc_RNA (1)...(19): siRNA sense strand
aggcauugguucaguuuaa

SEQ ID NO: 1401487 - RNA, 19 nt, Homo sapiens
  misc_RNA (1)...(19): siRNA sense strand
cugcagaacuucagcuaug

SEQ ID NO: 1401488 - RNA, 19 nt, Homo sapiens
  misc_RNA (1)...(19): siRNA sense strand
gcugcucugugucgucaua

SEQ ID NO: 1401489 - RNA, 19 nt, Homo sapiens
  misc_RNA (1)...(19): siRNA sense strand
gcacagccucuccaaugaa

SEQ ID NO: 1401490 - RNA, 19 nt, Homo sapiens
  misc_RNA (1)...(19): siRNA sense strand
gcaaucgcuuuauucaagu

SEQ ID NO: 1401491 - RNA, 19 nt, Homo sapiens
  misc_RNA (1)...(19): siRNA sense strand
aaaugaggcugacuauaag

SEQ ID NO: 1401492 - RNA, 19 nt, Homo sapiens
  misc_RNA (1)...(19): siRNA sense strand
aaacuugcccacaacagua

SEQ ID NO: 1401493 - RNA, 19 nt, Homo sapiens
  misc_RNA (1)...(19): siRNA sense strand
gaaauggcccugguagcuu

SEQ ID NO: 1401494 - RNA, 19 nt, Homo sapiens
  misc_RNA (1)...(19): siRNA sense strand
gacuggauguuccggguuu

SEQ ID NO: 1401495 - RNA, 19 nt, Homo sapiens
  misc_RNA (1)...(19): siRNA sense strand
caaguucauccaauuacua

SEQ ID NO: 1401496 - RNA, 19 nt, Homo sapiens
  misc_RNA (1)...(19): siRNA sense strand
cgaaggcuuuguagaguuc

SEQ ID NO: 1401497 - RNA, 19 nt, Homo sapiens
  misc_RNA (1)...(19): siRNA sense strand
gcagugcauuuguugaaag

SEQ ID NO: 1401498 - RNA, 19 nt, Homo sapiens
  misc_RNA (1)...(19): siRNA sense strand
caacccugaugaucuguau

SEQ ID NO: 1401499 - RNA, 19 nt, Homo sapiens
  misc_RNA (1)...(19): siRNA sense strand
ggauugaccauuccugaug

SEQ ID NO: 1401500 - RNA, 19 nt, Homo sapiens
  misc_RNA (1)...(19): siRNA sense strand
cauuuaacuuuccugguaa

SEQ ID NO: 1401501 - RNA, 19 nt, Homo sapiens
  misc_RNA (1)...(19): siRNA sense strand
caugggcaaucgcuuuauu

SEQ ID NO: 1401502 - RNA, 19 nt, Homo sapiens
  misc_RNA (1)...(19): siRNA sense strand
uaugggaccuucuggacaa

SEQ ID NO: 1401503 - RNA, 19 nt, Homo sapiens
  misc_RNA (1)...(19): siRNA sense strand
ggaaugcccuuuucugcaa

SEQ ID NO: 1401504 - RNA, 19 nt, Homo sapiens
  misc_RNA (1)...(19): siRNA sense strand
uaaugggaauggauugguu

SEQ ID NO: 1401505 - RNA, 19 nt, Homo sapiens
  misc_RNA (1)...(19): siRNA sense strand
gacaguaauuaaagugcaa

SEQ ID NO: 1401506 - RNA, 19 nt, Homo sapiens
  misc_RNA (1)...(19): siRNA sense strand
aaaccaggaccgacaguaa

SEQ ID NO: 1401507 - RNA, 19 nt, Homo sapiens
  misc_RNA (1)...(19): siRNA sense strand
gaaagggcuaccauuugaa

SEQ ID NO: 1401508 - RNA, 19 nt, Homo sapiens
  misc_RNA (1)...(19): siRNA sense strand
ggacauucgccacuucuuc

SEQ ID NO: 1401509 - RNA, 19 nt, Homo sapiens
  misc_RNA (1)...(19): siRNA sense strand
gcugaugauucaacgcuau

SEQ ID NO: 1401510 - RNA, 19 nt, Homo sapiens
  misc_RNA (1)...(19): siRNA sense strand
ucauguaguuacccuagaa

SEQ ID NO: 1401511 - RNA, 19 nt, Homo sapiens
  misc_RNA (1)...(19): siRNA sense strand
gauggauguucuucaguuc

SEQ ID NO: 1401512 - RNA, 19 nt, Homo sapiens
  misc_RNA (1)...(19): siRNA sense strand
ugucaacucugccaaaguc

SEQ ID NO: 1401513 - RNA, 19 nt, Homo sapiens
  misc_RNA (1)...(19): siRNA sense strand
gaccgacaguaauuaaagu

SEQ ID NO: 1401514 - RNA, 19 nt, Homo sapiens
  misc_RNA (1)...(19): siRNA sense strand
ggaccgacaguaauuaaag

SEQ ID NO: 1401515 - RNA, 19 nt, Homo sapiens
  misc_RNA (1)...(19): siRNA sense strand
ugaaaaugcuguacauguu

SEQ ID NO: 1401516 - RNA, 19 nt, Homo sapiens
  misc_RNA (1)...(19): siRNA sense strand
ccauucagcauuacaaaga

SEQ ID NO: 1401517 - RNA, 19 nt, Homo sapiens
  misc_RNA (1)...(19): siRNA sense strand
ugaauccuguuaacccuau

SEQ ID NO: 1401518 - RNA, 19 nt, Homo sapiens
  misc_RNA (1)...(19): siRNA sense strand
ucaaaggaagccaauaaug

SEQ ID NO: 1401519 - RNA, 19 nt, Homo sapiens
  misc_RNA (1)...(19): siRNA sense strand
uagaagauaugagagagau

SEQ ID NO: 1401520 - RNA, 19 nt, Homo sapiens
  misc_RNA (1)...(19): siRNA sense strand
gaagaugaugcacguaagu

SEQ ID NO: 1401521 - RNA, 19 nt, Homo sapiens
  misc_RNA (1)...(19): siRNA sense strand
gacaggcauugguucaguu

SEQ ID NO: 1401522 - RNA, 19 nt, Homo sapiens
  misc_RNA (1)...(19): siRNA sense strand
ggaaaaugaugucagagau

SEQ ID NO: 1401523 - RNA, 19 nt, Homo sapiens
  misc_RNA (1)...(19): siRNA sense strand
cuggagcaccuaugaauuu

SEQ ID NO: 1401524 - RNA, 19 nt, Homo sapiens
  misc_RNA (1)...(19): siRNA sense strand
ggaaauggcccugguagcu

SEQ ID NO: 1401525 - RNA, 19 nt, Homo sapiens
  misc_RNA (1)...(19): siRNA sense strand
ggcauugguucaguuuaaa

SEQ ID NO: 1401526 - RNA, 19 nt, Homo sapiens
  misc_RNA (1)...(19): siRNA sense strand
agauggauguucuucaguu

SEQ ID NO: 1401527 - RNA, 19 nt, Homo sapiens
  misc_RNA (1)...(19): siRNA sense strand
acguuuagcucaacuguuc

SEQ ID NO: 1401528 - RNA, 19 nt, Homo sapiens
  misc_RNA (1)...(19): siRNA sense strand
gaugucaacucugccaaag

SEQ ID NO: 1401529 - RNA, 19 nt, Homo sapiens
  misc_RNA (1)...(19): siRNA sense strand
guaguaagacggaaaugca

SEQ ID NO: 1401530 - RNA, 19 nt, Homo sapiens
  misc_RNA (1)...(19): siRNA sense strand
aagcacagccucuccaaug

SEQ ID NO: 1401531 - RNA, 19 nt, Homo sapiens
  misc_RNA (1)...(19): siRNA sense strand
ccaauuacuaagaaaggua

SEQ ID NO: 1401532 - RNA, 19 nt, Homo sapiens
  misc_RNA (1)...(19): siRNA sense strand
ggucaaaaguaacacuauu

SEQ ID NO: 1401533 - RNA, 19 nt, Homo sapiens
  misc_RNA (1)...(19): siRNA sense strand
aaagcuggauauuguggaa

SEQ ID NO: 1401534 - RNA, 19 nt, Homo sapiens
  misc_RNA (1)...(19): siRNA sense strand
cagaauaugauugaacuga

SEQ ID NO: 1401535 - RNA, 19 nt, Homo sapiens
  misc_RNA (1)...(19): siRNA sense strand
gaaaugaggcugacuauaa

SEQ ID NO: 1401536 - RNA, 19 nt, Homo sapiens
  misc_RNA (1)...(19): siRNA sense strand
gaacagcuccuccaaauau

SEQ ID NO: 1401537 - RNA, 19 nt, Homo sapiens
  misc_RNA (1)...(19): siRNA sense strand
ugaaagggcuaccauuuga

SEQ ID NO: 1401538 - RNA, 19 nt, Homo sapiens
  misc_RNA (1)...(19): siRNA sense strand
gaucaaaggaagccaauaa

SEQ ID NO: 1401539 - RNA, 19 nt, Homo sapiens
  misc_RNA (1)...(19): siRNA sense strand
ccauuuaacuuuccuggua

SEQ ID NO: 1401540 - RNA, 19 nt, Homo sapiens
  misc_RNA (1)...(19): siRNA sense strand
ggaauggauugguuaaguu

SEQ ID NO: 1401541 - RNA, 19 nt, Homo sapiens
  misc_RNA (1)...(19): siRNA sense strand
gcgcacaggugguacaauu

SEQ ID NO: 1401542 - RNA, 19 nt, Homo sapiens
  misc_RNA (1)...(19): siRNA sense strand
ccaccuagcucaggaauga

SEQ ID NO: 1401543 - RNA, 19 nt, Homo sapiens
  misc_RNA (1)...(19): siRNA sense strand
gaucauguaggucgaaaua

SEQ ID NO: 1401544 - RNA, 19 nt, Homo sapiens
  misc_RNA (1)...(19): siRNA sense strand
gaaauaaugggaauggauu

SEQ ID NO: 1401545 - RNA, 19 nt, Homo sapiens
  misc_RNA (1)...(19): siRNA sense strand
gcacaggugguacaauuaa

SEQ ID NO: 1401546 - RNA, 19 nt, Homo sapiens
  misc_RNA (1)...(19): siRNA sense strand
uaagaaagguaugcuagaa

SEQ ID NO: 1401547 - RNA, 19 nt, Homo sapiens
  misc_RNA (1)...(19): siRNA sense strand
agacggaaaugcagaauau

SEQ ID NO: 1401548 - RNA, 19 nt, Homo sapiens
  misc_RNA (1)...(19): siRNA sense strand
gaaacugccaacuuagaua

SEQ ID NO: 1401549 - RNA, 19 nt, Homo sapiens
  misc_RNA (1)...(19): siRNA sense strand
gagcaccuaugaauuugaa

SEQ ID NO: 1401550 - RNA, 19 nt, Homo sapiens
  misc_RNA (1)...(19): siRNA sense strand
gaaacagaaugcugaugau

SEQ ID NO: 1401551 - RNA, 19 nt, Homo sapiens
  misc_RNA (1)...(19): siRNA sense strand
ggcaaucgcuuuauucaag

SEQ ID NO: 1401552 - RNA, 19 nt, Homo sapiens
  misc_RNA (1)...(19): siRNA sense strand
guaguuacccuagaagaua

SEQ ID NO: 1401553 - RNA, 19 nt, Homo sapiens
  misc_RNA (1)...(19): siRNA sense strand
caagauacauuugaagcuu

SEQ ID NO: 1401554 - RNA, 19 nt, Homo sapiens
  misc_RNA (1)...(19): siRNA sense strand
aaauggcccugguagcuua

SEQ ID NO: 1401555 - RNA, 19 nt, Homo sapiens
  misc_RNA (1)...(19): siRNA sense strand
ggaaugaguagcaggguaa

SEQ ID NO: 1401556 - RNA, 19 nt, Homo sapiens
  misc_RNA (1)...(19): siRNA sense strand
gaagauaugagagagauug

SEQ ID NO: 1401557 - RNA, 19 nt, Homo sapiens
  misc_RNA (1)...(19): siRNA sense strand
gaauaugauugaacugagu

SEQ ID NO: 1401558 - RNA, 19 nt, Homo sapiens
  misc_RNA (1)...(19): siRNA sense strand
ggagguggaccaaacaauu

SEQ ID NO: 1401559 - RNA, 19 nt, Homo sapiens
  misc_RNA (1)...(19): siRNA sense strand
acaacaguauccaacuuua

SEQ ID NO: 1401560 - RNA, 19 nt, Homo sapiens
  misc_RNA (1)...(19): siRNA sense strand
ggaaaugcagaauaugauu

SEQ ID NO: 1401561 - RNA, 19 nt, Homo sapiens
  misc_RNA (1)...(19): siRNA sense strand
gagguggaccaaacaauuu

SEQ ID NO: 1401562 - RNA, 19 nt, Homo sapiens
  misc_RNA (1)...(19): siRNA sense strand
gaauggauugguuaaguuu

SEQ ID NO: 1401563 - RNA, 19 nt, Homo sapiens
  misc_RNA (1)...(19): siRNA sense strand
guugaaagaucauguaggu

SEQ ID NO: 1401564 - RNA, 19 nt, Homo sapiens
  misc_RNA (1)...(19): siRNA sense strand
gaaaugcagaauaugauug

SEQ ID NO: 1401565 - RNA, 19 nt, Homo sapiens
  misc_RNA (1)...(19): siRNA sense strand
ccacaacaguauccaacuu

SEQ ID NO: 1401566 - RNA, 19 nt, Homo sapiens
  misc_RNA (1)...(19): siRNA sense strand
cgaaacagaaugcugauga

SEQ ID NO: 1401567 - RNA, 19 nt, Homo sapiens
  misc_RNA (1)...(19): siRNA sense strand
ggaacagcuccuccaaaua

SEQ ID NO: 1401568 - RNA, 19 nt, Homo sapiens
  misc_RNA (1)...(19): siRNA sense strand
gggaauggauugguuaagu

SEQ ID NO: 1401569 - RNA, 19 nt, Homo sapiens
  misc_RNA (1)...(19): siRNA sense strand
caaaggaagccaauaaugg

SEQ ID NO: 1401570 - RNA, 19 nt, Homo sapiens
  misc_RNA (1)...(19): siRNA sense strand
uuacaaagauggauguucu

SEQ ID NO: 1401571 - RNA, 19 nt, Homo sapiens
  misc_RNA (1)...(19): siRNA sense strand
guacaugggcaaucgcuuu

SEQ ID NO: 1401572 - RNA, 19 nt, Homo sapiens
  misc_RNA (1)...(19): siRNA sense strand
caacaguauccaacuuuaa

SEQ ID NO: 1401573 - RNA, 19 nt, Homo sapiens
  misc_RNA (1)...(19): siRNA sense strand
agagggaaaugauacuaaa

SEQ ID NO: 1401574 - RNA, 19 nt, Homo sapiens
  misc_RNA (1)...(19): siRNA sense strand
ucauguaggucgaaauaau

SEQ ID NO: 1401575 - RNA, 19 nt, Homo sapiens
  misc_RNA (1)...(19): siRNA sense strand
gggugaggcuuucaucguu

SEQ ID NO: 1401576 - RNA, 19 nt, Homo sapiens
  misc_RNA (1)...(19): siRNA sense strand
ggacaggcauugguucagu

SEQ ID NO: 1401577 - RNA, 19 nt, Homo sapiens
  misc_RNA (1)...(19): siRNA sense strand
guacauguucuuguugaua

SEQ ID NO: 1401578 - RNA, 19 nt, Homo sapiens
  misc_RNA (1)...(19): siRNA sense strand
cuauaaggcugcucugugu

SEQ ID NO: 1401579 - RNA, 19 nt, Homo sapiens
  misc_RNA (1)...(19): siRNA sense strand
gcgaaggcuuuguagaguu

SEQ ID NO: 1401580 - RNA, 19 nt, Homo sapiens
  misc_RNA (1)...(19): siRNA sense strand
ggugaggcuuucaucguuu

SEQ ID NO: 1401581 - RNA, 19 nt, Homo sapiens
  misc_RNA (1)...(19): siRNA sense strand
gauaugagagagauugaga

SEQ ID NO: 1401582 - RNA, 19 nt, Homo sapiens
  misc_RNA (1)...(19): siRNA sense strand
ugacaggccuauagguuca

SEQ ID NO: 1401583 - RNA, 19 nt, Homo sapiens
  misc_RNA (1)...(19): siRNA sense strand
ggaccaaacaauuuaagug

SEQ ID NO: 1401584 - RNA, 19 nt, Homo sapiens
  misc_RNA (1)...(19): siRNA sense strand
ccacuucuguucaugaaag

SEQ ID NO: 1401585 - RNA, 19 nt, Homo sapiens
  misc_RNA (1)...(19): siRNA sense strand
gagagaagcuuuuguucau

SEQ ID NO: 1401586 - RNA, 19 nt, Homo sapiens
  misc_RNA (1)...(19): siRNA sense strand
aggcauugguucaguuuaa

SEQ ID NO: 1401587 - RNA, 19 nt, Homo sapiens
  misc_RNA (1)...(19): siRNA sense strand
cugcagaacuucagcuaug

SEQ ID NO: 1401588 - RNA, 19 nt, Homo sapiens
  misc_RNA (1)...(19): siRNA sense strand
gcugcucugugucgucaua

SEQ ID NO: 1401589 - RNA, 19 nt, Homo sapiens
  misc_RNA (1)...(19): siRNA sense strand
gcacagccucuccaaugaa

SEQ ID NO: 1401590 - RNA, 19 nt, Homo sapiens
  misc_RNA (1)...(19): siRNA sense strand
gcaaucgcuuuauucaagu

SEQ ID NO: 1401591 - RNA, 19 nt, Homo sapiens
  misc_RNA (1)...(19): siRNA sense strand
aaaugaggcugacuauaag

SEQ ID NO: 1401592 - RNA, 19 nt, Homo sapiens
  misc_RNA (1)...(19): siRNA sense strand
aaacuugcccacaacagua

SEQ ID NO: 1401593 - RNA, 19 nt, Homo sapiens
  misc_RNA (1)...(19): siRNA sense strand
gaaauggcccugguagcuu

SEQ ID NO: 1401594 - RNA, 19 nt, Homo sapiens
  misc_RNA (1)...(19): siRNA sense strand
gacuggauguuccggguuu

SEQ ID NO: 1401595 - RNA, 19 nt, Homo sapiens
  misc_RNA (1)...(19): siRNA sense strand
caaguucauccaauuacua

SEQ ID NO: 1401596 - RNA, 19 nt, Homo sapiens
  misc_RNA (1)...(19): siRNA sense strand
cgaaggcuuuguagaguuc

SEQ ID NO: 1401597 - RNA, 19 nt, Homo sapiens
  misc_RNA (1)...(19): siRNA sense strand
gcagugcauuuguugaaag

SEQ ID NO: 1401598 - RNA, 19 nt, Homo sapiens
  misc_RNA (1)...(19): siRNA sense strand
caacccugaugaucuguau

SEQ ID NO: 1401599 - RNA, 19 nt, Homo sapiens
  misc_RNA (1)...(19): siRNA sense strand
ggauugaccauuccugaug

SEQ ID NO: 1401600 - RNA, 19 nt, Homo sapiens
  misc_RNA (1)...(19): siRNA sense strand
cauuuaacuuuccugguaa

SEQ ID NO: 1401601 - RNA, 19 nt, Homo sapiens
  misc_RNA (1)...(19): siRNA sense strand
caugggcaaucgcuuuauu

SEQ ID NO: 1401602 - RNA, 19 nt, Homo sapiens
  misc_RNA (1)...(19): siRNA sense strand
uaugggaccuucuggacaa

SEQ ID NO: 1401603 - RNA, 19 nt, Homo sapiens
  misc_RNA (1)...(19): siRNA sense strand
ggaaugcccuuuucugcaa

SEQ ID NO: 1401604 - RNA, 19 nt, Homo sapiens
  misc_RNA (1)...(19): siRNA sense strand
uaaugggaauggauugguu

SEQ ID NO: 1401605 - RNA, 19 nt, Homo sapiens
  misc_RNA (1)...(19): siRNA sense strand
gacaguaauuaaagugcaa

SEQ ID NO: 1401606 - RNA, 19 nt, Homo sapiens
  misc_RNA (1)...(19): siRNA sense strand
aaaccaggaccgacaguaa

SEQ ID NO: 1401607 - RNA, 19 nt, Homo sapiens
  misc_RNA (1)...(19): siRNA sense strand
gaaagggcuaccauuugaa

SEQ ID NO: 1401608 - RNA, 19 nt, Homo sapiens
  misc_RNA (1)...(19): siRNA sense strand
ggacauucgccacuucuuc

SEQ ID NO: 1401609 - RNA, 19 nt, Homo sapiens
  misc_RNA (1)...(19): siRNA sense strand
gcugaugauucaacgcuau

SEQ ID NO: 1401610 - RNA, 19 nt, Homo sapiens
  misc_RNA (1)...(19): siRNA sense strand
ucauguaguuacccuagaa

SEQ ID NO: 1401611 - RNA, 19 nt, Homo sapiens
  misc_RNA (1)...(19): siRNA sense strand
gauggauguucuucaguuc

SEQ ID NO: 1401612 - RNA, 19 nt, Homo sapiens
  misc_RNA (1)...(19): siRNA sense strand
ugucaacucugccaaaguc

SEQ ID NO: 1401613 - RNA, 19 nt, Homo sapiens
  misc_RNA (1)...(19): siRNA sense strand
gaccgacaguaauuaaagu

SEQ ID NO: 1401614 - RNA, 19 nt, Homo sapiens
  misc_RNA (1)...(19): siRNA sense strand
ggaccgacaguaauuaaag

SEQ ID NO: 1401615 - RNA, 19 nt, Homo sapiens
  misc_RNA (1)...(19): siRNA sense strand
ugaaaaugcuguacauguu

SEQ ID NO: 1401616 - RNA, 19 nt, Homo sapiens
  misc_RNA (1)...(19): siRNA sense strand
ccauucagcauuacaaaga

SEQ ID NO: 1401617 - RNA, 19 nt, Homo sapiens
  misc_RNA (1)...(19): siRNA sense strand
ugaauccuguuaacccuau

SEQ ID NO: 1401618 - RNA, 19 nt, Homo sapiens
  misc_RNA (1)...(19): siRNA sense strand
ucaaaggaagccaauaaug

SEQ ID NO: 1401619 - RNA, 19 nt, Homo sapiens
  misc_RNA (1)...(19): siRNA sense strand
uagaagauaugagagagau

SEQ ID NO: 1401620 - RNA, 19 nt, Homo sapiens
  misc_RNA (1)...(19): siRNA sense strand
gaagaugaugcacguaagu

SEQ ID NO: 1401621 - RNA, 19 nt, Homo sapiens
  misc_RNA (1)...(19): siRNA sense strand
gacaggcauugguucaguu

SEQ ID NO: 1401622 - RNA, 19 nt, Homo sapiens
  misc_RNA (1)...(19): siRNA sense strand
ggaaaaugaugucagagau

SEQ ID NO: 1401623 - RNA, 19 nt, Homo sapiens
  misc_RNA (1)...(19): siRNA sense strand
cuggagcaccuaugaauuu

SEQ ID NO: 1401624 - RNA, 19 nt, Homo sapiens
  misc_RNA (1)...(19): siRNA sense strand
ggaaauggcccugguagcu

SEQ ID NO: 1401625 - RNA, 19 nt, Homo sapiens
  misc_RNA (1)...(19): siRNA sense strand
ggcauugguucaguuuaaa

SEQ ID NO: 1401626 - RNA, 19 nt, Homo sapiens
  misc_RNA (1)...(19): siRNA sense strand
agauggauguucuucaguu

SEQ ID NO: 1401627 - RNA, 19 nt, Homo sapiens
  misc_RNA (1)...(19): siRNA sense strand
acguuuagcucaacuguuc

SEQ ID NO: 1401628 - RNA, 19 nt, Homo sapiens
  misc_RNA (1)...(19): siRNA sense strand
gaugucaacucugccaaag

SEQ ID NO: 1401629 - RNA, 19 nt, Homo sapiens
  misc_RNA (1)...(19): siRNA sense strand
guaguaagacggaaaugca

SEQ ID NO: 1401630 - RNA, 19 nt, Homo sapiens
  misc_RNA (1)...(19): siRNA sense strand
aagcacagccucuccaaug

SEQ ID NO: 1401631 - RNA, 19 nt, Homo sapiens
  misc_RNA (1)...(19): siRNA sense strand
ccaauuacuaagaaaggua

SEQ ID NO: 1401632 - RNA, 19 nt, Homo sapiens
  misc_RNA (1)...(19): siRNA sense strand
ggucaaaaguaacacuauu

SEQ ID NO: 1401633 - RNA, 19 nt, Homo sapiens
  misc_RNA (1)...(19): siRNA sense strand
aaagcuggauauuguggaa

SEQ ID NO: 1401634 - RNA, 19 nt, Homo sapiens
  misc_RNA (1)...(19): siRNA sense strand
cagaauaugauugaacuga

SEQ ID NO: 1401635 - RNA, 19 nt, Homo sapiens
  misc_RNA (1)...(19): siRNA sense strand
gcagaaagccucaguguug

SEQ ID NO: 1401636 - RNA, 19 nt, Homo sapiens
  misc_RNA (1)...(19): siRNA sense strand
guacuuggcugccugcuuu

SEQ ID NO: 1401637 - RNA, 19 nt, Homo sapiens
  misc_RNA (1)...(19): siRNA sense strand
ggucucagcugcucucuuu

SEQ ID NO: 1401638 - RNA, 19 nt, Homo sapiens
  misc_RNA (1)...(19): siRNA sense strand
gaaauggccaagaaacuua

SEQ ID NO: 1401639 - RNA, 19 nt, Homo sapiens
  misc_RNA (1)...(19): siRNA sense strand
ggucauggcuccuguacuu

SEQ ID NO: 1401640 - RNA, 19 nt, Homo sapiens
  misc_RNA (1)...(19): siRNA sense strand
gggcauagcuuuggugaug

SEQ ID NO: 1401641 - RNA, 19 nt, Homo sapiens
  misc_RNA (1)...(19): siRNA sense strand
gauagaugcucugcgauuu

SEQ ID NO: 1401642 - RNA, 19 nt, Homo sapiens
  misc_RNA (1)...(19): siRNA sense strand
gcugugggcuucauuguga

SEQ ID NO: 1401643 - RNA, 19 nt, Homo sapiens
  misc_RNA (1)...(19): siRNA sense strand
ggaagacaaucucauuaag

SEQ ID NO: 1401644 - RNA, 19 nt, Homo sapiens
  misc_RNA (1)...(19): siRNA sense strand
cagcugcucucuuucugua

SEQ ID NO: 1401645 - RNA, 19 nt, Homo sapiens
  misc_RNA (1)...(19): siRNA sense strand
gcugugagcuccugguuca

SEQ ID NO: 1401646 - RNA, 19 nt, Homo sapiens
  misc_RNA (1)...(19): siRNA sense strand
gcugcucucuuucuguaua

SEQ ID NO: 1401647 - RNA, 19 nt, Homo sapiens
  misc_RNA (1)...(19): siRNA sense strand
cuccaaagcuuucuucuuc

SEQ ID NO: 1401648 - RNA, 19 nt, Homo sapiens
  misc_RNA (1)...(19): siRNA sense strand
caagaaacuuagccagaug

SEQ ID NO: 1401649 - RNA, 19 nt, Homo sapiens
  misc_RNA (1)...(19): siRNA sense strand
cuggauggcuucccgauuu

SEQ ID NO: 1401650 - RNA, 19 nt, Homo sapiens
  misc_RNA (1)...(19): siRNA sense strand
ccaagaaacuuagccagau

SEQ ID NO: 1401651 - RNA, 19 nt, Homo sapiens
  misc_RNA (1)...(19): siRNA sense strand
gcucuggccuuuccugugu

SEQ ID NO: 1401652 - RNA, 19 nt, Homo sapiens
  misc_RNA (1)...(19): siRNA sense strand
ucagagaccuagacacagu

SEQ ID NO: 1401653 - RNA, 19 nt, Homo sapiens
  misc_RNA (1)...(19): siRNA sense strand
ggccucaaguaccucuuua

SEQ ID NO: 1401654 - RNA, 19 nt, Homo sapiens
  misc_RNA (1)...(19): siRNA sense strand
gaaugggacgugcugauug

SEQ ID NO: 1401655 - RNA, 19 nt, Homo sapiens
  misc_RNA (1)...(19): siRNA sense strand
gagaugauaccuggaaaga

SEQ ID NO: 1401656 - RNA, 19 nt, Homo sapiens
  misc_RNA (1)...(19): siRNA sense strand
cagcaggugucccgauuuc

SEQ ID NO: 1401657 - RNA, 19 nt, Homo sapiens
  misc_RNA (1)...(19): siRNA sense strand
ggaagaggagccacugaug

SEQ ID NO: 1401658 - RNA, 19 nt, Homo sapiens
  misc_RNA (1)...(19): siRNA sense strand
uagaugcucugcgauuuga

SEQ ID NO: 1401659 - RNA, 19 nt, Homo sapiens
  misc_RNA (1)...(19): siRNA sense strand
cucaggaccuucaagcuaa

SEQ ID NO: 1401660 - RNA, 19 nt, Homo sapiens
  misc_RNA (1)...(19): siRNA sense strand
guggaagacaaucucauua

SEQ ID NO: 1401661 - RNA, 19 nt, Homo sapiens
  misc_RNA (1)...(19): siRNA sense strand
ggaaaguguuugccccuaa

SEQ ID NO: 1401662 - RNA, 19 nt, Homo sapiens
  misc_RNA (1)...(19): siRNA sense strand
ggacaauggcauccuggaa

SEQ ID NO: 1401663 - RNA, 19 nt, Homo sapiens
  misc_RNA (1)...(19): siRNA sense strand
aagacaaucucauuaagca

SEQ ID NO: 1401664 - RNA, 19 nt, Homo sapiens
  misc_RNA (1)...(19): siRNA sense strand
gcaggugucccgauuucuu

SEQ ID NO: 1401665 - RNA, 19 nt, Homo sapiens
  misc_RNA (1)...(19): siRNA sense strand
uggaagacaaucucauuaa

SEQ ID NO: 1401666 - RNA, 19 nt, Homo sapiens
  misc_RNA (1)...(19): siRNA sense strand
ucaaguaccucuuuauccu

SEQ ID NO: 1401667 - RNA, 19 nt, Homo sapiens
  misc_RNA (1)...(19): siRNA sense strand
uggagcgucuggagaauga

SEQ ID NO: 1401668 - RNA, 19 nt, Homo sapiens
  misc_RNA (1)...(19): siRNA sense strand
gcucacugccuaccuuuau

SEQ ID NO: 1401669 - RNA, 19 nt, Homo sapiens
  misc_RNA (1)...(19): siRNA sense strand
ccaugugcaucgagucuug

SEQ ID NO: 1401670 - RNA, 19 nt, Homo sapiens
  misc_RNA (1)...(19): siRNA sense strand
cugccuaccuuuauugaug

SEQ ID NO: 1401671 - RNA, 19 nt, Homo sapiens
  misc_RNA (1)...(19): siRNA sense strand
gagcuuccuucuccuacau

SEQ ID NO: 1401672 - RNA, 19 nt, Homo sapiens
  misc_RNA (1)...(19): siRNA sense strand
caaggccucugcugacuac

SEQ ID NO: 1401673 - RNA, 19 nt, Homo sapiens
  misc_RNA (1)...(19): siRNA sense strand
ccucagcucuccaucucaa

SEQ ID NO: 1401674 - RNA, 19 nt, Homo sapiens
  misc_RNA (1)...(19): siRNA sense strand
gaaugacacacugcuggua

SEQ ID NO: 1401675 - RNA, 19 nt, Homo sapiens
  misc_RNA (1)...(19): siRNA sense strand
gggagaugauaccuggaaa

SEQ ID NO: 1401676 - RNA, 19 nt, Homo sapiens
  misc_RNA (1)...(19): siRNA sense strand
gaagacaaucucauuaagc

SEQ ID NO: 1401677 - RNA, 19 nt, Homo sapiens
  misc_RNA (1)...(19): siRNA sense strand
ggacuucuccugggcauag

SEQ ID NO: 1401678 - RNA, 19 nt, Homo sapiens
  misc_RNA (1)...(19): siRNA sense strand
ugaaauggccaagaaacuu

SEQ ID NO: 1401679 - RNA, 19 nt, Homo sapiens
  misc_RNA (1)...(19): siRNA sense strand
gggaugcgccucagcacuu

SEQ ID NO: 1401680 - RNA, 19 nt, Homo sapiens
  misc_RNA (1)...(19): siRNA sense strand
gaagugauggcugagcuau

SEQ ID NO: 1401681 - RNA, 19 nt, Homo sapiens
  misc_RNA (1)...(19): siRNA sense strand
ccacacagaccuucuacuc

SEQ ID NO: 1401682 - RNA, 19 nt, Homo sapiens
  misc_RNA (1)...(19): siRNA sense strand
agugauggcugagcuauuc

SEQ ID NO: 1401683 - RNA, 19 nt, Homo sapiens
  misc_RNA (1)...(19): siRNA sense strand
ggaagugauggcugagcua

SEQ ID NO: 1401684 - RNA, 19 nt, Homo sapiens
  misc_RNA (1)...(19): siRNA sense strand
acaauggcauccuggaaca

SEQ ID NO: 1401685 - RNA, 19 nt, Homo sapiens
  misc_RNA (1)...(19): siRNA sense strand
gcauagcuuuggugaugag

SEQ ID NO: 1401686 - RNA, 19 nt, Homo sapiens
  misc_RNA (1)...(19): siRNA sense strand
cccgauuucuucauaccua

SEQ ID NO: 1401687 - RNA, 19 nt, Homo sapiens
  misc_RNA (1)...(19): siRNA sense strand
gugucccgauuucuucaua

SEQ ID NO: 1401688 - RNA, 19 nt, Homo sapiens
  misc_RNA (1)...(19): siRNA sense strand
ugauagaugcucugcgauu

SEQ ID NO: 1401689 - RNA, 19 nt, Homo sapiens
  misc_RNA (1)...(19): siRNA sense strand
gcagaggauccuggagauu

SEQ ID NO: 1401690 - RNA, 19 nt, Homo sapiens
  misc_RNA (1)...(19): siRNA sense strand
acccugaaauggccaagaa

SEQ ID NO: 1401691 - RNA, 19 nt, Homo sapiens
  misc_RNA (1)...(19): siRNA sense strand
cauggacaguggugaaugg

SEQ ID NO: 1401692 - RNA, 19 nt, Homo sapiens
  misc_RNA (1)...(19): siRNA sense strand
agaggauccuggagauuca

SEQ ID NO: 1401693 - RNA, 19 nt, Homo sapiens
  misc_RNA (1)...(19): siRNA sense strand
cagaggauccuggagauuc

SEQ ID NO: 1401694 - RNA, 19 nt, Homo sapiens
  misc_RNA (1)...(19): siRNA sense strand
uauccuugguauucagauu

SEQ ID NO: 1401695 - RNA, 19 nt, Homo sapiens
  misc_RNA (1)...(19): siRNA sense strand
ggaugcgccucagcacuuc

SEQ ID NO: 1401696 - RNA, 19 nt, Homo sapiens
  misc_RNA (1)...(19): siRNA sense strand
accaugggaugaccacaaa

SEQ ID NO: 1401697 - RNA, 19 nt, Homo sapiens
  misc_RNA (1)...(19): siRNA sense strand
gaccaugggaugaccacaa

SEQ ID NO: 1401698 - RNA, 19 nt, Homo sapiens
  misc_RNA (1)...(19): siRNA sense strand
ugaaugggacgugcugauu

SEQ ID NO: 1401699 - RNA, 19 nt, Homo sapiens
  misc_RNA (1)...(19): siRNA sense strand
gcaggaaggcguguagucu

SEQ ID NO: 1401700 - RNA, 19 nt, Homo sapiens
  misc_RNA (1)...(19): siRNA sense strand
acucaggaccuucaagcua

SEQ ID NO: 1401701 - RNA, 19 nt, Homo sapiens
  misc_RNA (1)...(19): siRNA sense strand
uagcuuuggugaugagagu

SEQ ID NO: 1401702 - RNA, 19 nt, Homo sapiens
  misc_RNA (1)...(19): siRNA sense strand
ccaccagccugucuuucca

SEQ ID NO: 1401703 - RNA, 19 nt, Homo sapiens
  misc_RNA (1)...(19): siRNA sense strand
ucugcuugcugcugggaua

SEQ ID NO: 1401704 - RNA, 19 nt, Homo sapiens
  misc_RNA (1)...(19): siRNA sense strand
ucacugccuaccuuuauug

SEQ ID NO: 1401705 - RNA, 19 nt, Homo sapiens
  misc_RNA (1)...(19): siRNA sense strand
ggcauagcuuuggugauga

SEQ ID NO: 1401706 - RNA, 19 nt, Homo sapiens
  misc_RNA (1)...(19): siRNA sense strand
ggugauuccucaaguuagc

SEQ ID NO: 1401707 - RNA, 19 nt, Homo sapiens
  misc_RNA (1)...(19): siRNA sense strand
gucaagggcugcggaagag

SEQ ID NO: 1401708 - RNA, 19 nt, Homo sapiens
  misc_RNA (1)...(19): siRNA sense strand
caaguaccucuuuauccuu

SEQ ID NO: 1401709 - RNA, 19 nt, Homo sapiens
  misc_RNA (1)...(19): siRNA sense strand
uagacacaguggacaaugg

SEQ ID NO: 1401710 - RNA, 19 nt, Homo sapiens
  misc_RNA (1)...(19): siRNA sense strand
gggccucaaguaccucuuu

SEQ ID NO: 1401711 - RNA, 19 nt, Homo sapiens
  misc_RNA (1)...(19): siRNA sense strand
gaggaagaggagccacuga

SEQ ID NO: 1401712 - RNA, 19 nt, Homo sapiens
  misc_RNA (1)...(19): siRNA sense strand
ccaccuccucuuugcagua

SEQ ID NO: 1401713 - RNA, 19 nt, Homo sapiens
  misc_RNA (1)...(19): siRNA sense strand
ccaaggccucugcugacua

SEQ ID NO: 1401714 - RNA, 19 nt, Homo sapiens
  misc_RNA (1)...(19): siRNA sense strand
caugggaugaccacaaaug

SEQ ID NO: 1401715 - RNA, 19 nt, Homo sapiens
  misc_RNA (1)...(19): siRNA sense strand
aagaggagccacugaugga

SEQ ID NO: 1401716 - RNA, 19 nt, Homo sapiens
  misc_RNA (1)...(19): siRNA sense strand
cucauggucuggaaagugu

SEQ ID NO: 1401717 - RNA, 19 nt, Homo sapiens
  misc_RNA (1)...(19): siRNA sense strand
ggagaugauaccuggaaag

SEQ ID NO: 1401718 - RNA, 19 nt, Homo sapiens
  misc_RNA (1)...(19): siRNA sense strand
gcagcugggccucaaguac

SEQ ID NO: 1401719 - RNA, 19 nt, Homo sapiens
  misc_RNA (1)...(19): siRNA sense strand
gcuuccugcucacccguuu

SEQ ID NO: 1401720 - RNA, 19 nt, Homo sapiens
  misc_RNA (1)...(19): siRNA sense strand
aggcgacacugccgacugu

SEQ ID NO: 1401721 - RNA, 19 nt, Homo sapiens
  misc_RNA (1)...(19): siRNA sense strand
cagaggagccagaggugau

SEQ ID NO: 1401722 - RNA, 19 nt, Homo sapiens
  misc_RNA (1)...(19): siRNA sense strand
auucacacgugccuagaga

SEQ ID NO: 1401723 - RNA, 19 nt, Homo sapiens
  misc_RNA (1)...(19): siRNA sense strand
gaaaguguuugccccuaag

SEQ ID NO: 1401724 - RNA, 19 nt, Homo sapiens
  misc_RNA (1)...(19): siRNA sense strand
gcgacacugccgacuguga

SEQ ID NO: 1401725 - RNA, 19 nt, Homo sapiens
  misc_RNA (1)...(19): siRNA sense strand
gagcucaccaaccauagca

SEQ ID NO: 1401726 - RNA, 19 nt, Homo sapiens
  misc_RNA (1)...(19): siRNA sense strand
ggccugcccaucccauuug

SEQ ID NO: 1401727 - RNA, 19 nt, Homo sapiens
  misc_RNA (1)...(19): siRNA sense strand
caggaaggcguguagucuu

SEQ ID NO: 1401728 - RNA, 19 nt, Homo sapiens
  misc_RNA (1)...(19): siRNA sense strand
gccccuaaguucauauuug

SEQ ID NO: 1401729 - RNA, 19 nt, Homo sapiens
  misc_RNA (1)...(19): siRNA sense strand
ccucaaguaccucuuuauc

SEQ ID NO: 1401730 - RNA, 19 nt, Homo sapiens
  misc_RNA (1)...(19): siRNA sense strand
gcucuaccgaucucagguu

SEQ ID NO: 1401731 - RNA, 19 nt, Homo sapiens
  misc_RNA (1)...(19): siRNA sense strand
agugggagccaacaccuuu

SEQ ID NO: 1401732 - RNA, 19 nt, Homo sapiens
  misc_RNA (1)...(19): siRNA sense strand
gaauaucggggaagugaug

SEQ ID NO: 1401733 - RNA, 19 nt, Homo sapiens
  misc_RNA (1)...(19): siRNA sense strand
ccccuaaguucauauuuga

SEQ ID NO: 1401734 - RNA, 19 nt, Homo sapiens
  misc_RNA (1)...(19): siRNA sense strand
gaagcugaugccagaguca

SEQ ID NO: 1401735 - RNA, 19 nt, Homo sapiens
  misc_RNA (1)...(19): siRNA sense strand
gcagaaagccucaguguug

SEQ ID NO: 1401736 - RNA, 19 nt, Homo sapiens
  misc_RNA (1)...(19): siRNA sense strand
guacuuggcugccugcuuu

SEQ ID NO: 1401737 - RNA, 19 nt, Homo sapiens
  misc_RNA (1)...(19): siRNA sense strand
ggucucagcugcucucuuu

SEQ ID NO: 1401738 - RNA, 19 nt, Homo sapiens
  misc_RNA (1)...(19): siRNA sense strand
gaaauggccaagaaacuua

SEQ ID NO: 1401739 - RNA, 19 nt, Homo sapiens
  misc_RNA (1)...(19): siRNA sense strand
ggucauggcuccuguacuu

SEQ ID NO: 1401740 - RNA, 19 nt, Homo sapiens
  misc_RNA (1)...(19): siRNA sense strand
gggcauagcuuuggugaug

SEQ ID NO: 1401741 - RNA, 19 nt, Homo sapiens
  misc_RNA (1)...(19): siRNA sense strand
gauagaugcucugcgauuu

SEQ ID NO: 1401742 - RNA, 19 nt, Homo sapiens
  misc_RNA (1)...(19): siRNA sense strand
gcugugggcuucauuguga

SEQ ID NO: 1401743 - RNA, 19 nt, Homo sapiens
  misc_RNA (1)...(19): siRNA sense strand
ggaagacaaucucauuaag

SEQ ID NO: 1401744 - RNA, 19 nt, Homo sapiens
  misc_RNA (1)...(19): siRNA sense strand
cagcugcucucuuucugua

SEQ ID NO: 1401745 - RNA, 19 nt, Homo sapiens
  misc_RNA (1)...(19): siRNA sense strand
gcugugagcuccugguuca

SEQ ID NO: 1401746 - RNA, 19 nt, Homo sapiens
  misc_RNA (1)...(19): siRNA sense strand
gcugcucucuuucuguaua

SEQ ID NO: 1401747 - RNA, 19 nt, Homo sapiens
  misc_RNA (1)...(19): siRNA sense strand
cuccaaagcuuucuucuuc

SEQ ID NO: 1401748 - RNA, 19 nt, Homo sapiens
  misc_RNA (1)...(19): siRNA sense strand
caagaaacuuagccagaug

SEQ ID NO: 1401749 - RNA, 19 nt, Homo sapiens
  misc_RNA (1)...(19): siRNA sense strand
cuggauggcuucccgauuu

SEQ ID NO: 1401750 - RNA, 19 nt, Homo sapiens
  misc_RNA (1)...(19): siRNA sense strand
ccaagaaacuuagccagau

SEQ ID NO: 1401751 - RNA, 19 nt, Homo sapiens
  misc_RNA (1)...(19): siRNA sense strand
gcucuggccuuuccugugu

SEQ ID NO: 1401752 - RNA, 19 nt, Homo sapiens
  misc_RNA (1)...(19): siRNA sense strand
ucagagaccuagacacagu

SEQ ID NO: 1401753 - RNA, 19 nt, Homo sapiens
  misc_RNA (1)...(19): siRNA sense strand
ggccucaaguaccucuuua

SEQ ID NO: 1401754 - RNA, 19 nt, Homo sapiens
  misc_RNA (1)...(19): siRNA sense strand
gaaugggacgugcugauug

SEQ ID NO: 1401755 - RNA, 19 nt, Homo sapiens
  misc_RNA (1)...(19): siRNA sense strand
gagaugauaccuggaaaga

SEQ ID NO: 1401756 - RNA, 19 nt, Homo sapiens
  misc_RNA (1)...(19): siRNA sense strand
cagcaggugucccgauuuc

SEQ ID NO: 1401757 - RNA, 19 nt, Homo sapiens
  misc_RNA (1)...(19): siRNA sense strand
ggaagaggagccacugaug

SEQ ID NO: 1401758 - RNA, 19 nt, Homo sapiens
  misc_RNA (1)...(19): siRNA sense strand
uagaugcucugcgauuuga

SEQ ID NO: 1401759 - RNA, 19 nt, Homo sapiens
  misc_RNA (1)...(19): siRNA sense strand
cucaggaccuucaagcuaa

SEQ ID NO: 1401760 - RNA, 19 nt, Homo sapiens
  misc_RNA (1)...(19): siRNA sense strand
guggaagacaaucucauua

SEQ ID NO: 1401761 - RNA, 19 nt, Homo sapiens
  misc_RNA (1)...(19): siRNA sense strand
ggaaaguguuugccccuaa

SEQ ID NO: 1401762 - RNA, 19 nt, Homo sapiens
  misc_RNA (1)...(19): siRNA sense strand
ggacaauggcauccuggaa

SEQ ID NO: 1401763 - RNA, 19 nt, Homo sapiens
  misc_RNA (1)...(19): siRNA sense strand
aagacaaucucauuaagca

SEQ ID NO: 1401764 - RNA, 19 nt, Homo sapiens
  misc_RNA (1)...(19): siRNA sense strand
gcaggugucccgauuucuu

SEQ ID NO: 1401765 - RNA, 19 nt, Homo sapiens
  misc_RNA (1)...(19): siRNA sense strand
uggaagacaaucucauuaa

SEQ ID NO: 1401766 - RNA, 19 nt, Homo sapiens
  misc_RNA (1)...(19): siRNA sense strand
ucaaguaccucuuuauccu

SEQ ID NO: 1401767 - RNA, 19 nt, Homo sapiens
  misc_RNA (1)...(19): siRNA sense strand
uggagcgucuggagaauga

SEQ ID NO: 1401768 - RNA, 19 nt, Homo sapiens
  misc_RNA (1)...(19): siRNA sense strand
gcucacugccuaccuuuau

SEQ ID NO: 1401769 - RNA, 19 nt, Homo sapiens
  misc_RNA (1)...(19): siRNA sense strand
ccaugugcaucgagucuug

SEQ ID NO: 1401770 - RNA, 19 nt, Homo sapiens
  misc_RNA (1)...(19): siRNA sense strand
cugccuaccuuuauugaug

SEQ ID NO: 1401771 - RNA, 19 nt, Homo sapiens
  misc_RNA (1)...(19): siRNA sense strand
gagcuuccuucuccuacau

SEQ ID NO: 1401772 - RNA, 19 nt, Homo sapiens
  misc_RNA (1)...(19): siRNA sense strand
caaggccucugcugacuac

SEQ ID NO: 1401773 - RNA, 19 nt, Homo sapiens
  misc_RNA (1)...(19): siRNA sense strand
ccucagcucuccaucucaa

SEQ ID NO: 1401774 - RNA, 19 nt, Homo sapiens
  misc_RNA (1)...(19): siRNA sense strand
gaaugacacacugcuggua

SEQ ID NO: 1401775 - RNA, 19 nt, Homo sapiens
  misc_RNA (1)...(19): siRNA sense strand
gggagaugauaccuggaaa

SEQ ID NO: 1401776 - RNA, 19 nt, Homo sapiens
  misc_RNA (1)...(19): siRNA sense strand
gaagacaaucucauuaagc

SEQ ID NO: 1401777 - RNA, 19 nt, Homo sapiens
  misc_RNA (1)...(19): siRNA sense strand
ggacuucuccugggcauag

SEQ ID NO: 1401778 - RNA, 19 nt, Homo sapiens
  misc_RNA (1)...(19): siRNA sense strand
ugaaauggccaagaaacuu

SEQ ID NO: 1401779 - RNA, 19 nt, Homo sapiens
  misc_RNA (1)...(19): siRNA sense strand
gggaugcgccucagcacuu

SEQ ID NO: 1401780 - RNA, 19 nt, Homo sapiens
  misc_RNA (1)...(19): siRNA sense strand
gaagugauggcugagcuau

SEQ ID NO: 1401781 - RNA, 19 nt, Homo sapiens
  misc_RNA (1)...(19): siRNA sense strand
ccacacagaccuucuacuc

SEQ ID NO: 1401782 - RNA, 19 nt, Homo sapiens
  misc_RNA (1)...(19): siRNA sense strand
agugauggcugagcuauuc

SEQ ID NO: 1401783 - RNA, 19 nt, Homo sapiens
  misc_RNA (1)...(19): siRNA sense strand
ggaagugauggcugagcua

SEQ ID NO: 1401784 - RNA, 19 nt, Homo sapiens
  misc_RNA (1)...(19): siRNA sense strand
acaauggcauccuggaaca

SEQ ID NO: 1401785 - RNA, 19 nt, Homo sapiens
  misc_RNA (1)...(19): siRNA sense strand
gcauagcuuuggugaugag

SEQ ID NO: 1401786 - RNA, 19 nt, Homo sapiens
  misc_RNA (1)...(19): siRNA sense strand
cccgauuucuucauaccua

SEQ ID NO: 1401787 - RNA, 19 nt, Homo sapiens
  misc_RNA (1)...(19): siRNA sense strand
gugucccgauuucuucaua

SEQ ID NO: 1401788 - RNA, 19 nt, Homo sapiens
  misc_RNA (1)...(19): siRNA sense strand
ugauagaugcucugcgauu

SEQ ID NO: 1401789 - RNA, 19 nt, Homo sapiens
  misc_RNA (1)...(19): siRNA sense strand
gcagaggauccuggagauu

SEQ ID NO: 1401790 - RNA, 19 nt, Homo sapiens
  misc_RNA (1)...(19): siRNA sense strand
acccugaaauggccaagaa

SEQ ID NO: 1401791 - RNA, 19 nt, Homo sapiens
  misc_RNA (1)...(19): siRNA sense strand
cauggacaguggugaaugg

SEQ ID NO: 1401792 - RNA, 19 nt, Homo sapiens
  misc_RNA (1)...(19): siRNA sense strand
agaggauccuggagauuca

SEQ ID NO: 1401793 - RNA, 19 nt, Homo sapiens
  misc_RNA (1)...(19): siRNA sense strand
cagaggauccuggagauuc

SEQ ID NO: 1401794 - RNA, 19 nt, Homo sapiens
  misc_RNA (1)...(19): siRNA sense strand
uauccuugguauucagauu

SEQ ID NO: 1401795 - RNA, 19 nt, Homo sapiens
  misc_RNA (1)...(19): siRNA sense strand
ggaugcgccucagcacuuc

SEQ ID NO: 1401796 - RNA, 19 nt, Homo sapiens
  misc_RNA (1)...(19): siRNA sense strand
accaugggaugaccacaaa

SEQ ID NO: 1401797 - RNA, 19 nt, Homo sapiens
  misc_RNA (1)...(19): siRNA sense strand
gaccaugggaugaccacaa

SEQ ID NO: 1401798 - RNA, 19 nt, Homo sapiens
  misc_RNA (1)...(19): siRNA sense strand
ugaaugggacgugcugauu

SEQ ID NO: 1401799 - RNA, 19 nt, Homo sapiens
  misc_RNA (1)...(19): siRNA sense strand
gcaggaaggcguguagucu

SEQ ID NO: 1401800 - RNA, 19 nt, Homo sapiens
  misc_RNA (1)...(19): siRNA sense strand
acucaggaccuucaagcua

SEQ ID NO: 1401801 - RNA, 19 nt, Homo sapiens
  misc_RNA (1)...(19): siRNA sense strand
uagcuuuggugaugagagu

SEQ ID NO: 1401802 - RNA, 19 nt, Homo sapiens
  misc_RNA (1)...(19): siRNA sense strand
ccaccagccugucuuucca

SEQ ID NO: 1401803 - RNA, 19 nt, Homo sapiens
  misc_RNA (1)...(19): siRNA sense strand
ucugcuugcugcugggaua

SEQ ID NO: 1401804 - RNA, 19 nt, Homo sapiens
  misc_RNA (1)...(19): siRNA sense strand
ucacugccuaccuuuauug

SEQ ID NO: 1401805 - RNA, 19 nt, Homo sapiens
  misc_RNA (1)...(19): siRNA sense strand
ggcauagcuuuggugauga

SEQ ID NO: 1401806 - RNA, 19 nt, Homo sapiens
  misc_RNA (1)...(19): siRNA sense strand
ggugauuccucaaguuagc

SEQ ID NO: 1401807 - RNA, 19 nt, Homo sapiens
  misc_RNA (1)...(19): siRNA sense strand
gucaagggcugcggaagag

SEQ ID NO: 1401808 - RNA, 19 nt, Homo sapiens
  misc_RNA (1)...(19): siRNA sense strand
caaguaccucuuuauccuu

SEQ ID NO: 1401809 - RNA, 19 nt, Homo sapiens
  misc_RNA (1)...(19): siRNA sense strand
uagacacaguggacaaugg

SEQ ID NO: 1401810 - RNA, 19 nt, Homo sapiens
  misc_RNA (1)...(19): siRNA sense strand
gggccucaaguaccucuuu

SEQ ID NO: 1401811 - RNA, 19 nt, Homo sapiens
  misc_RNA (1)...(19): siRNA sense strand
gaggaagaggagccacuga

SEQ ID NO: 1401812 - RNA, 19 nt, Homo sapiens
  misc_RNA (1)...(19): siRNA sense strand
ccaccuccucuuugcagua

SEQ ID NO: 1401813 - RNA, 19 nt, Homo sapiens
  misc_RNA (1)...(19): siRNA sense strand
ccaaggccucugcugacua

SEQ ID NO: 1401814 - RNA, 19 nt, Homo sapiens
  misc_RNA (1)...(19): siRNA sense strand
caugggaugaccacaaaug

SEQ ID NO: 1401815 - RNA, 19 nt, Homo sapiens
  misc_RNA (1)...(19): siRNA sense strand
aagaggagccacugaugga

SEQ ID NO: 1401816 - RNA, 19 nt, Homo sapiens
  misc_RNA (1)...(19): siRNA sense strand
cucauggucuggaaagugu

SEQ ID NO: 1401817 - RNA, 19 nt, Homo sapiens
  misc_RNA (1)...(19): siRNA sense strand
ggagaugauaccuggaaag

SEQ ID NO: 1401818 - RNA, 19 nt, Homo sapiens
  misc_RNA (1)...(19): siRNA sense strand
gcagcugggccucaaguac

SEQ ID NO: 1401819 - RNA, 19 nt, Homo sapiens
  misc_RNA (1)...(19): siRNA sense strand
gcuuccugcucacccguuu

SEQ ID NO: 1401820 - RNA, 19 nt, Homo sapiens
  misc_RNA (1)...(19): siRNA sense strand
aggcgacacugccgacugu

SEQ ID NO: 1401821 - RNA, 19 nt, Homo sapiens
  misc_RNA (1)...(19): siRNA sense strand
cagaggagccagaggugau

SEQ ID NO: 1401822 - RNA, 19 nt, Homo sapiens
  misc_RNA (1)...(19): siRNA sense strand
auucacacgugccuagaga

SEQ ID NO: 1401823 - RNA, 19 nt, Homo sapiens
  misc_RNA (1)...(19): siRNA sense strand
gaaaguguuugccccuaag

SEQ ID NO: 1401824 - RNA, 19 nt, Homo sapiens
  misc_RNA (1)...(19): siRNA sense strand
gcgacacugccgacuguga

SEQ ID NO: 1401825 - RNA, 19 nt, Homo sapiens
  misc_RNA (1)...(19): siRNA sense strand
gagcucaccaaccauagca

SEQ ID NO: 1401826 - RNA, 19 nt, Homo sapiens
  misc_RNA (1)...(19): siRNA sense strand
ggccugcccaucccauuug

SEQ ID NO: 1401827 - RNA, 19 nt, Homo sapiens
  misc_RNA (1)...(19): siRNA sense strand
caggaaggcguguagucuu

SEQ ID NO: 1401828 - RNA, 19 nt, Homo sapiens
  misc_RNA (1)...(19): siRNA sense strand
gccccuaaguucauauuug

SEQ ID NO: 1401829 - RNA, 19 nt, Homo sapiens
  misc_RNA (1)...(19): siRNA sense strand
ccucaaguaccucuuuauc

SEQ ID NO: 1401830 - RNA, 19 nt, Homo sapiens
  misc_RNA (1)...(19): siRNA sense strand
gcucuaccgaucucagguu

SEQ ID NO: 1401831 - RNA, 19 nt, Homo sapiens
  misc_RNA (1)...(19): siRNA sense strand
agugggagccaacaccuuu

SEQ ID NO: 1401832 - RNA, 19 nt, Homo sapiens
  misc_RNA (1)...(19): siRNA sense strand
gaauaucggggaagugaug

SEQ ID NO: 1401833 - RNA, 19 nt, Homo sapiens
  misc_RNA (1)...(19): siRNA sense strand
ccccuaaguucauauuuga

SEQ ID NO: 1401834 - RNA, 19 nt, Homo sapiens
  misc_RNA (1)...(19): siRNA sense strand
gaagcugaugccagaguca

SEQ ID NO: 1401835 - RNA, 19 nt, Homo sapiens
  misc_RNA (1)...(19): siRNA sense strand
gcauguaaaccacugaaga

SEQ ID NO: 1401836 - RNA, 19 nt, Homo sapiens
  misc_RNA (1)...(19): siRNA sense strand
cauguaaaccacugaagaa

SEQ ID NO: 1401837 - RNA, 19 nt, Homo sapiens
  misc_RNA (1)...(19): siRNA sense strand
gcucuuggguuuagcaaaa

SEQ ID NO: 1401838 - RNA, 19 nt, Homo sapiens
  misc_RNA (1)...(19): siRNA sense strand
aaaucugucugaugcaugu

SEQ ID NO: 1401839 - RNA, 19 nt, Homo sapiens
  misc_RNA (1)...(19): siRNA sense strand
ggcagcaucuucagcucuu

SEQ ID NO: 1401840 - RNA, 19 nt, Homo sapiens
  misc_RNA (1)...(19): siRNA sense strand
cuucagcucuuggguuuag

SEQ ID NO: 1401841 - RNA, 19 nt, Homo sapiens
  misc_RNA (1)...(19): siRNA sense strand
ccacugaagaagcgaaauc

SEQ ID NO: 1401842 - RNA, 19 nt, Homo sapiens
  misc_RNA (1)...(19): siRNA sense strand
cauccuuaacugagaauga

SEQ ID NO: 1401843 - RNA, 19 nt, Homo sapiens
  misc_RNA (1)...(19): siRNA sense strand
gcagcaucuucagcucuug

SEQ ID NO: 1401844 - RNA, 19 nt, Homo sapiens
  misc_RNA (1)...(19): siRNA sense strand
cugcauccuuaacugagaa

SEQ ID NO: 1401845 - RNA, 19 nt, Homo sapiens
  misc_RNA (1)...(19): siRNA sense strand
gcauguaaaccacugaaga

SEQ ID NO: 1401846 - RNA, 19 nt, Homo sapiens
  misc_RNA (1)...(19): siRNA sense strand
cauguaaaccacugaagaa

SEQ ID NO: 1401847 - RNA, 19 nt, Homo sapiens
  misc_RNA (1)...(19): siRNA sense strand
gcucuuggguuuagcaaaa

SEQ ID NO: 1401848 - RNA, 19 nt, Homo sapiens
  misc_RNA (1)...(19): siRNA sense strand
aaaucugucugaugcaugu

SEQ ID NO: 1401849 - RNA, 19 nt, Homo sapiens
  misc_RNA (1)...(19): siRNA sense strand
ggcagcaucuucagcucuu

SEQ ID NO: 1401850 - RNA, 19 nt, Homo sapiens
  misc_RNA (1)...(19): siRNA sense strand
cuucagcucuuggguuuag

SEQ ID NO: 1401851 - RNA, 19 nt, Homo sapiens
  misc_RNA (1)...(19): siRNA sense strand
ccacugaagaagcgaaauc

SEQ ID NO: 1401852 - RNA, 19 nt, Homo sapiens
  misc_RNA (1)...(19): siRNA sense strand
cauccuuaacugagaauga

SEQ ID NO: 1401853 - RNA, 19 nt, Homo sapiens
  misc_RNA (1)...(19): siRNA sense strand
gcagcaucuucagcucuug

SEQ ID NO: 1401854 - RNA, 19 nt, Homo sapiens
  misc_RNA (1)...(19): siRNA sense strand
cugcauccuuaacugagaa

SEQ ID NO: 1401855 - RNA, 19 nt, Homo sapiens
  misc_RNA (1)...(19): siRNA sense strand
gcauguaaaccacugaaga

SEQ ID NO: 1401856 - RNA, 19 nt, Homo sapiens
  misc_RNA (1)...(19): siRNA sense strand
cauguaaaccacugaagaa

SEQ ID NO: 1401857 - RNA, 19 nt, Homo sapiens
  misc_RNA (1)...(19): siRNA sense strand
gcucuuggguuuagcaaaa

SEQ ID NO: 1401858 - RNA, 19 nt, Homo sapiens
  misc_RNA (1)...(19): siRNA sense strand
aaaucugucugaugcaugu

SEQ ID NO: 1401859 - RNA, 19 nt, Homo sapiens
  misc_RNA (1)...(19): siRNA sense strand
ggcagcaucuucagcucuu

SEQ ID NO: 1401860 - RNA, 19 nt, Homo sapiens
  misc_RNA (1)...(19): siRNA sense strand
cuucagcucuuggguuuag

SEQ ID NO: 1401861 - RNA, 19 nt, Homo sapiens
  misc_RNA (1)...(19): siRNA sense strand
ccacugaagaagcgaaauc

SEQ ID NO: 1401862 - RNA, 19 nt, Homo sapiens
  misc_RNA (1)...(19): siRNA sense strand
cauccuuaacugagaauga

SEQ ID NO: 1401863 - RNA, 19 nt, Homo sapiens
  misc_RNA (1)...(19): siRNA sense strand
gcagcaucuucagcucuug

SEQ ID NO: 1401864 - RNA, 19 nt, Homo sapiens
  misc_RNA (1)...(19): siRNA sense strand
cugcauccuuaacugagaa

SEQ ID NO: 1401865 - RNA, 19 nt, Homo sapiens
  misc_RNA (1)...(19): siRNA sense strand
gcauguaaaccacugaaga

SEQ ID NO: 1401866 - RNA, 19 nt, Homo sapiens
  misc_RNA (1)...(19): siRNA sense strand
cauguaaaccacugaagaa

SEQ ID NO: 1401867 - RNA, 19 nt, Homo sapiens
  misc_RNA (1)...(19): siRNA sense strand
gcucuuggguuuagcaaaa

SEQ ID NO: 1401868 - RNA, 19 nt, Homo sapiens
  misc_RNA (1)...(19): siRNA sense strand
aaaucugucugaugcaugu

SEQ ID NO: 1401869 - RNA, 19 nt, Homo sapiens
  misc_RNA (1)...(19): siRNA sense strand
ggcagcaucuucagcucuu

SEQ ID NO: 1401870 - RNA, 19 nt, Homo sapiens
  misc_RNA (1)...(19): siRNA sense strand
cuucagcucuuggguuuag

SEQ ID NO: 1401871 - RNA, 19 nt, Homo sapiens
  misc_RNA (1)...(19): siRNA sense strand
ccacugaagaagcgaaauc

SEQ ID NO: 1401872 - RNA, 19 nt, Homo sapiens
  misc_RNA (1)...(19): siRNA sense strand
cauccuuaacugagaauga

SEQ ID NO: 1401873 - RNA, 19 nt, Homo sapiens
  misc_RNA (1)...(19): siRNA sense strand
gcagcaucuucagcucuug

SEQ ID NO: 1401874 - RNA, 19 nt, Homo sapiens
  misc_RNA (1)...(19): siRNA sense strand
cugcauccuuaacugagaa

SEQ ID NO: 1401875 - RNA, 19 nt, Homo sapiens
  misc_RNA (1)...(19): siRNA sense strand
gcauguaaaccacugaaga

SEQ ID NO: 1401876 - RNA, 19 nt, Homo sapiens
  misc_RNA (1)...(19): siRNA sense strand
cauguaaaccacugaagaa

SEQ ID NO: 1401877 - RNA, 19 nt, Homo sapiens
  misc_RNA (1)...(19): siRNA sense strand
gcucuuggguuuagcaaaa

SEQ ID NO: 1401878 - RNA, 19 nt, Homo sapiens
  misc_RNA (1)...(19): siRNA sense strand
aaaucugucugaugcaugu

SEQ ID NO: 1401879 - RNA, 19 nt, Homo sapiens
  misc_RNA (1)...(19): siRNA sense strand
ggcagcaucuucagcucuu

SEQ ID NO: 1401880 - RNA, 19 nt, Homo sapiens
  misc_RNA (1)...(19): siRNA sense strand
cuucagcucuuggguuuag

SEQ ID NO: 1401881 - RNA, 19 nt, Homo sapiens
  misc_RNA (1)...(19): siRNA sense strand
ccacugaagaagcgaaauc

SEQ ID NO: 1401882 - RNA, 19 nt, Homo sapiens
  misc_RNA (1)...(19): siRNA sense strand
cauccuuaacugagaauga

SEQ ID NO: 1401883 - RNA, 19 nt, Homo sapiens
  misc_RNA (1)...(19): siRNA sense strand
gcagcaucuucagcucuug

SEQ ID NO: 1401884 - RNA, 19 nt, Homo sapiens
  misc_RNA (1)...(19): siRNA sense strand
cugcauccuuaacugagaa

SEQ ID NO: 1401885 - RNA, 19 nt, Homo sapiens
  misc_RNA (1)...(19): siRNA sense strand
gcauguaaaccacugaaga

SEQ ID NO: 1401886 - RNA, 19 nt, Homo sapiens
  misc_RNA (1)...(19): siRNA sense strand
cauguaaaccacugaagaa

SEQ ID NO: 1401887 - RNA, 19 nt, Homo sapiens
  misc_RNA (1)...(19): siRNA sense strand
gcucuuggguuuagcaaaa

SEQ ID NO: 1401888 - RNA, 19 nt, Homo sapiens
  misc_RNA (1)...(19): siRNA sense strand
aaaucugucugaugcaugu

SEQ ID NO: 1401889 - RNA, 19 nt, Homo sapiens
  misc_RNA (1)...(19): siRNA sense strand
ggcagcaucuucagcucuu

SEQ ID NO: 1401890 - RNA, 19 nt, Homo sapiens
  misc_RNA (1)...(19): siRNA sense strand
cuucagcucuuggguuuag

SEQ ID NO: 1401891 - RNA, 19 nt, Homo sapiens
  misc_RNA (1)...(19): siRNA sense strand
ccacugaagaagcgaaauc

SEQ ID NO: 1401892 - RNA, 19 nt, Homo sapiens
  misc_RNA (1)...(19): siRNA sense strand
cauccuuaacugagaauga

SEQ ID NO: 1401893 - RNA, 19 nt, Homo sapiens
  misc_RNA (1)...(19): siRNA sense strand
gcagcaucuucagcucuug

SEQ ID NO: 1401894 - RNA, 19 nt, Homo sapiens
  misc_RNA (1)...(19): siRNA sense strand
cugcauccuuaacugagaa

SEQ ID NO: 1401895 - RNA, 19 nt, Homo sapiens
  misc_RNA (1)...(19): siRNA sense strand
gcauguaaaccacugaaga

SEQ ID NO: 1401896 - RNA, 19 nt, Homo sapiens
  misc_RNA (1)...(19): siRNA sense strand
cauguaaaccacugaagaa

SEQ ID NO: 1401897 - RNA, 19 nt, Homo sapiens
  misc_RNA (1)...(19): siRNA sense strand
gcucuuggguuuagcaaaa

SEQ ID NO: 1401898 - RNA, 19 nt, Homo sapiens
  misc_RNA (1)...(19): siRNA sense strand
aaaucugucugaugcaugu

SEQ ID NO: 1401899 - RNA, 19 nt, Homo sapiens
  misc_RNA (1)...(19): siRNA sense strand
ggcagcaucuucagcucuu

SEQ ID NO: 1401900 - RNA, 19 nt, Homo sapiens
  misc_RNA (1)...(19): siRNA sense strand
cuucagcucuuggguuuag

SEQ ID NO: 1401901 - RNA, 19 nt, Homo sapiens
  misc_RNA (1)...(19): siRNA sense strand
ccacugaagaagcgaaauc

SEQ ID NO: 1401902 - RNA, 19 nt, Homo sapiens
  misc_RNA (1)...(19): siRNA sense strand
cauccuuaacugagaauga

SEQ ID NO: 1401903 - RNA, 19 nt, Homo sapiens
  misc_RNA (1)...(19): siRNA sense strand
gcagcaucuucagcucuug

SEQ ID NO: 1401904 - RNA, 19 nt, Homo sapiens
  misc_RNA (1)...(19): siRNA sense strand
cugcauccuuaacugagaa

SEQ ID NO: 1401905 - RNA, 19 nt, Homo sapiens
  misc_RNA (1)...(19): siRNA sense strand
gcauguaaaccacugaaga

SEQ ID NO: 1401906 - RNA, 19 nt, Homo sapiens
  misc_RNA (1)...(19): siRNA sense strand
cauguaaaccacugaagaa

SEQ ID NO: 1401907 - RNA, 19 nt, Homo sapiens
  misc_RNA (1)...(19): siRNA sense strand
gcucuuggguuuagcaaaa

SEQ ID NO: 1401908 - RNA, 19 nt, Homo sapiens
  misc_RNA (1)...(19): siRNA sense strand
aaaucugucugaugcaugu

SEQ ID NO: 1401909 - RNA, 19 nt, Homo sapiens
  misc_RNA (1)...(19): siRNA sense strand
ggcagcaucuucagcucuu

SEQ ID NO: 1401910 - RNA, 19 nt, Homo sapiens
  misc_RNA (1)...(19): siRNA sense strand
cuucagcucuuggguuuag

SEQ ID NO: 1401911 - RNA, 19 nt, Homo sapiens
  misc_RNA (1)...(19): siRNA sense strand
ccacugaagaagcgaaauc

SEQ ID NO: 1401912 - RNA, 19 nt, Homo sapiens
  misc_RNA (1)...(19): siRNA sense strand
cauccuuaacugagaauga

SEQ ID NO: 1401913 - RNA, 19 nt, Homo sapiens
  misc_RNA (1)...(19): siRNA sense strand
gcagcaucuucagcucuug

SEQ ID NO: 1401914 - RNA, 19 nt, Homo sapiens
  misc_RNA (1)...(19): siRNA sense strand
cugcauccuuaacugagaa

SEQ ID NO: 1401915 - RNA, 19 nt, Homo sapiens
  misc_RNA (1)...(19): siRNA sense strand
gcauguaaaccacugaaga

SEQ ID NO: 1401916 - RNA, 19 nt, Homo sapiens
  misc_RNA (1)...(19): siRNA sense strand
cauguaaaccacugaagaa

SEQ ID NO: 1401917 - RNA, 19 nt, Homo sapiens
  misc_RNA (1)...(19): siRNA sense strand
gcucuuggguuuagcaaaa

SEQ ID NO: 1401918 - RNA, 19 nt, Homo sapiens
  misc_RNA (1)...(19): siRNA sense strand
aaaucugucugaugcaugu

SEQ ID NO: 1401919 - RNA, 19 nt, Homo sapiens
  misc_RNA (1)...(19): siRNA sense strand
ggcagcaucuucagcucuu

SEQ ID NO: 1401920 - RNA, 19 nt, Homo sapiens
  misc_RNA (1)...(19): siRNA sense strand
cuucagcucuuggguuuag

SEQ ID NO: 1401921 - RNA, 19 nt, Homo sapiens
  misc_RNA (1)...(19): siRNA sense strand
ccacugaagaagcgaaauc

SEQ ID NO: 1401922 - RNA, 19 nt, Homo sapiens
  misc_RNA (1)...(19): siRNA sense strand
cauccuuaacugagaauga

SEQ ID NO: 1401923 - RNA, 19 nt, Homo sapiens
  misc_RNA (1)...(19): siRNA sense strand
gcagcaucuucagcucuug

SEQ ID NO: 1401924 - RNA, 19 nt, Homo sapiens
  misc_RNA (1)...(19): siRNA sense strand
cugcauccuuaacugagaa

SEQ ID NO: 1401925 - RNA, 19 nt, Homo sapiens
  misc_RNA (1)...(19): siRNA sense strand
gcauguaaaccacugaaga

SEQ ID NO: 1401926 - RNA, 19 nt, Homo sapiens
  misc_RNA (1)...(19): siRNA sense strand
cauguaaaccacugaagaa

SEQ ID NO: 1401927 - RNA, 19 nt, Homo sapiens
  misc_RNA (1)...(19): siRNA sense strand
gcucuuggguuuagcaaaa

SEQ ID NO: 1401928 - RNA, 19 nt, Homo sapiens
  misc_RNA (1)...(19): siRNA sense strand
aaaucugucugaugcaugu

SEQ ID NO: 1401929 - RNA, 19 nt, Homo sapiens
  misc_RNA (1)...(19): siRNA sense strand
ggcagcaucuucagcucuu

SEQ ID NO: 1401930 - RNA, 19 nt, Homo sapiens
  misc_RNA (1)...(19): siRNA sense strand
cuucagcucuuggguuuag

SEQ ID NO: 1401931 - RNA, 19 nt, Homo sapiens
  misc_RNA (1)...(19): siRNA sense strand
ccacugaagaagcgaaauc

SEQ ID NO: 1401932 - RNA, 19 nt, Homo sapiens
  misc_RNA (1)...(19): siRNA sense strand
cauccuuaacugagaauga

SEQ ID NO: 1401933 - RNA, 19 nt, Homo sapiens
  misc_RNA (1)...(19): siRNA sense strand
gcagcaucuucagcucuug

SEQ ID NO: 1401934 - RNA, 19 nt, Homo sapiens
  misc_RNA (1)...(19): siRNA sense strand
cugcauccuuaacugagaa

SEQ ID NO: 1401935 - RNA, 19 nt, Homo sapiens
  misc_RNA (1)...(19): siRNA sense strand
gcauguaaaccacugaaga

SEQ ID NO: 1401936 - RNA, 19 nt, Homo sapiens
  misc_RNA (1)...(19): siRNA sense strand
cauguaaaccacugaagaa

SEQ ID NO: 1401937 - RNA, 19 nt, Homo sapiens
  misc_RNA (1)...(19): siRNA sense strand
gcucuuggguuuagcaaaa

SEQ ID NO: 1401938 - RNA, 19 nt, Homo sapiens
  misc_RNA (1)...(19): siRNA sense strand
aaaucugucugaugcaugu

SEQ ID NO: 1401939 - RNA, 19 nt, Homo sapiens
  misc_RNA (1)...(19): siRNA sense strand
ggcagcaucuucagcucuu

SEQ ID NO: 1401940 - RNA, 19 nt, Homo sapiens
  misc_RNA (1)...(19): siRNA sense strand
cuucagcucuuggguuuag

SEQ ID NO: 1401941 - RNA, 19 nt, Homo sapiens
  misc_RNA (1)...(19): siRNA sense strand
ccacugaagaagcgaaauc

SEQ ID NO: 1401942 - RNA, 19 nt, Homo sapiens
  misc_RNA (1)...(19): siRNA sense strand
cauccuuaacugagaauga

SEQ ID NO: 1401943 - RNA, 19 nt, Homo sapiens
  misc_RNA (1)...(19): siRNA sense strand
gcagcaucuucagcucuug

SEQ ID NO: 1401944 - RNA, 19 nt, Homo sapiens
  misc_RNA (1)...(19): siRNA sense strand
cugcauccuuaacugagaa

SEQ ID NO: 1401945 - RNA, 19 nt, Homo sapiens
  misc_RNA (1)...(19): siRNA sense strand
gcauguaaaccacugaaga

SEQ ID NO: 1401946 - RNA, 19 nt, Homo sapiens
  misc_RNA (1)...(19): siRNA sense strand
cauguaaaccacugaagaa

SEQ ID NO: 1401947 - RNA, 19 nt, Homo sapiens
  misc_RNA (1)...(19): siRNA sense strand
gcucuuggguuuagcaaaa

SEQ ID NO: 1401948 - RNA, 19 nt, Homo sapiens
  misc_RNA (1)...(19): siRNA sense strand
aaaucugucugaugcaugu

SEQ ID NO: 1401949 - RNA, 19 nt, Homo sapiens
  misc_RNA (1)...(19): siRNA sense strand
ggcagcaucuucagcucuu

SEQ ID NO: 1401950 - RNA, 19 nt, Homo sapiens
  misc_RNA (1)...(19): siRNA sense strand
cuucagcucuuggguuuag

SEQ ID NO: 1401951 - RNA, 19 nt, Homo sapiens
  misc_RNA (1)...(19): siRNA sense strand
ccacugaagaagcgaaauc

SEQ ID NO: 1401952 - RNA, 19 nt, Homo sapiens
  misc_RNA (1)...(19): siRNA sense strand
cauccuuaacugagaauga

SEQ ID NO: 1401953 - RNA, 19 nt, Homo sapiens
  misc_RNA (1)...(19): siRNA sense strand
gcagcaucuucagcucuug

SEQ ID NO: 1401954 - RNA, 19 nt, Homo sapiens
  misc_RNA (1)...(19): siRNA sense strand
cugcauccuuaacugagaa

SEQ ID NO: 1401955 - RNA, 19 nt, Homo sapiens
  misc_RNA (1)...(19): siRNA sense strand
gcauguaaaccacugaaga

SEQ ID NO: 1401956 - RNA, 19 nt, Homo sapiens
  misc_RNA (1)...(19): siRNA sense strand
cauguaaaccacugaagaa

SEQ ID NO: 1401957 - RNA, 19 nt, Homo sapiens
  misc_RNA (1)...(19): siRNA sense strand
gcucuuggguuuagcaaaa

SEQ ID NO: 1401958 - RNA, 19 nt, Homo sapiens
  misc_RNA (1)...(19): siRNA sense strand
aaaucugucugaugcaugu

SEQ ID NO: 1401959 - RNA, 19 nt, Homo sapiens
  misc_RNA (1)...(19): siRNA sense strand
ggcagcaucuucagcucuu

SEQ ID NO: 1401960 - RNA, 19 nt, Homo sapiens
  misc_RNA (1)...(19): siRNA sense strand
cuucagcucuuggguuuag

SEQ ID NO: 1401961 - RNA, 19 nt, Homo sapiens
  misc_RNA (1)...(19): siRNA sense strand
ccacugaagaagcgaaauc

SEQ ID NO: 1401962 - RNA, 19 nt, Homo sapiens
  misc_RNA (1)...(19): siRNA sense strand
cauccuuaacugagaauga

SEQ ID NO: 1401963 - RNA, 19 nt, Homo sapiens
  misc_RNA (1)...(19): siRNA sense strand
gcagcaucuucagcucuug

SEQ ID NO: 1401964 - RNA, 19 nt, Homo sapiens
  misc_RNA (1)...(19): siRNA sense strand
cugcauccuuaacugagaa

SEQ ID NO: 1401965 - RNA, 19 nt, Homo sapiens
  misc_RNA (1)...(19): siRNA sense strand
gcauguaaaccacugaaga

SEQ ID NO: 1401966 - RNA, 19 nt, Homo sapiens
  misc_RNA (1)...(19): siRNA sense strand
cauguaaaccacugaagaa

SEQ ID NO: 1401967 - RNA, 19 nt, Homo sapiens
  misc_RNA (1)...(19): siRNA sense strand
gcucuuggguuuagcaaaa

SEQ ID NO: 1401968 - RNA, 19 nt, Homo sapiens
  misc_RNA (1)...(19): siRNA sense strand
aaaucugucugaugcaugu

SEQ ID NO: 1401969 - RNA, 19 nt, Homo sapiens
  misc_RNA (1)...(19): siRNA sense strand
ggcagcaucuucagcucuu

SEQ ID NO: 1401970 - RNA, 19 nt, Homo sapiens
  misc_RNA (1)...(19): siRNA sense strand
cuucagcucuuggguuuag

SEQ ID NO: 1401971 - RNA, 19 nt, Homo sapiens
  misc_RNA (1)...(19): siRNA sense strand
ccacugaagaagcgaaauc

SEQ ID NO: 1401972 - RNA, 19 nt, Homo sapiens
  misc_RNA (1)...(19): siRNA sense strand
cauccuuaacugagaauga

SEQ ID NO: 1401973 - RNA, 19 nt, Homo sapiens
  misc_RNA (1)...(19): siRNA sense strand
gcagcaucuucagcucuug

SEQ ID NO: 1401974 - RNA, 19 nt, Homo sapiens
  misc_RNA (1)...(19): siRNA sense strand
cugcauccuuaacugagaa

SEQ ID NO: 1401975 - RNA, 19 nt, Homo sapiens
  misc_RNA (1)...(19): siRNA sense strand
gcauguaaaccacugaaga

SEQ ID NO: 1401976 - RNA, 19 nt, Homo sapiens
  misc_RNA (1)...(19): siRNA sense strand
cauguaaaccacugaagaa

SEQ ID NO: 1401977 - RNA, 19 nt, Homo sapiens
  misc_RNA (1)...(19): siRNA sense strand
gcucuuggguuuagcaaaa

SEQ ID NO: 1401978 - RNA, 19 nt, Homo sapiens
  misc_RNA (1)...(19): siRNA sense strand
aaaucugucugaugcaugu

SEQ ID NO: 1401979 - RNA, 19 nt, Homo sapiens
  misc_RNA (1)...(19): siRNA sense strand
ggcagcaucuucagcucuu

SEQ ID NO: 1401980 - RNA, 19 nt, Homo sapiens
  misc_RNA (1)...(19): siRNA sense strand
cuucagcucuuggguuuag

SEQ ID NO: 1401981 - RNA, 19 nt, Homo sapiens
  misc_RNA (1)...(19): siRNA sense strand
ccacugaagaagcgaaauc

SEQ ID NO: 1401982 - RNA, 19 nt, Homo sapiens
  misc_RNA (1)...(19): siRNA sense strand
cauccuuaacugagaauga

SEQ ID NO: 1401983 - RNA, 19 nt, Homo sapiens
  misc_RNA (1)...(19): siRNA sense strand
gcagcaucuucagcucuug

SEQ ID NO: 1401984 - RNA, 19 nt, Homo sapiens
  misc_RNA (1)...(19): siRNA sense strand
cugcauccuuaacugagaa

SEQ ID NO: 1401985 - RNA, 19 nt, Homo sapiens
  misc_RNA (1)...(19): siRNA sense strand
gcauguaaaccacugaaga

SEQ ID NO: 1401986 - RNA, 19 nt, Homo sapiens
  misc_RNA (1)...(19): siRNA sense strand
cauguaaaccacugaagaa

SEQ ID NO: 1401987 - RNA, 19 nt, Homo sapiens
  misc_RNA (1)...(19): siRNA sense strand
gcucuuggguuuagcaaaa

SEQ ID NO: 1401988 - RNA, 19 nt, Homo sapiens
  misc_RNA (1)...(19): siRNA sense strand
aaaucugucugaugcaugu

SEQ ID NO: 1401989 - RNA, 19 nt, Homo sapiens
  misc_RNA (1)...(19): siRNA sense strand
ggcagcaucuucagcucuu

SEQ ID NO: 1401990 - RNA, 19 nt, Homo sapiens
  misc_RNA (1)...(19): siRNA sense strand
cuucagcucuuggguuuag

SEQ ID NO: 1401991 - RNA, 19 nt, Homo sapiens
  misc_RNA (1)...(19): siRNA sense strand
ccacugaagaagcgaaauc

SEQ ID NO: 1401992 - RNA, 19 nt, Homo sapiens
  misc_RNA (1)...(19): siRNA sense strand
cauccuuaacugagaauga

SEQ ID NO: 1401993 - RNA, 19 nt, Homo sapiens
  misc_RNA (1)...(19): siRNA sense strand
gcagcaucuucagcucuug

SEQ ID NO: 1401994 - RNA, 19 nt, Homo sapiens
  misc_RNA (1)...(19): siRNA sense strand
cugcauccuuaacugagaa

SEQ ID NO: 1401995 - RNA, 19 nt, Homo sapiens
  misc_RNA (1)...(19): siRNA sense strand
gaacucgacuugucugaaa

SEQ ID NO: 1401996 - RNA, 19 nt, Homo sapiens
  misc_RNA (1)...(19): siRNA sense strand
gagcacaucugcccugaaa

SEQ ID NO: 1401997 - RNA, 19 nt, Homo sapiens
  misc_RNA (1)...(19): siRNA sense strand
ggaaggaacuagucuuucu

SEQ ID NO: 1401998 - RNA, 19 nt, Homo sapiens
  misc_RNA (1)...(19): siRNA sense strand
ugacgaagcuuguccagau

SEQ ID NO: 1401999 - RNA, 19 nt, Homo sapiens
  misc_RNA (1)...(19): siRNA sense strand
ggaguuguccgcuguguuu

SEQ ID NO: 1402000 - RNA, 19 nt, Homo sapiens
  misc_RNA (1)...(19): siRNA sense strand
caagagcuggcauuuguua

SEQ ID NO: 1402001 - RNA, 19 nt, Homo sapiens
  misc_RNA (1)...(19): siRNA sense strand
gcacaucugcccugaaaga

SEQ ID NO: 1402002 - RNA, 19 nt, Homo sapiens
  misc_RNA (1)...(19): siRNA sense strand
gaagaaggcgauccaacaa

SEQ ID NO: 1402003 - RNA, 19 nt, Homo sapiens
  misc_RNA (1)...(19): siRNA sense strand
ggaagaaggcgauccaaca

SEQ ID NO: 1402004 - RNA, 19 nt, Homo sapiens
  misc_RNA (1)...(19): siRNA sense strand
ucagcuaguuggauucuuu

SEQ ID NO: 1402005 - RNA, 19 nt, Homo sapiens
  misc_RNA (1)...(19): siRNA sense strand
gacaaggucucuagcaucu

SEQ ID NO: 1402006 - RNA, 19 nt, Homo sapiens
  misc_RNA (1)...(19): siRNA sense strand
gcaagcgguuucuggauca

SEQ ID NO: 1402007 - RNA, 19 nt, Homo sapiens
  misc_RNA (1)...(19): siRNA sense strand
agaaggcgauccaacaaga

SEQ ID NO: 1402008 - RNA, 19 nt, Homo sapiens
  misc_RNA (1)...(19): siRNA sense strand
ggaaauggccucaggucau

SEQ ID NO: 1402009 - RNA, 19 nt, Homo sapiens
  misc_RNA (1)...(19): siRNA sense strand
uaugaugguuccaagguaa

SEQ ID NO: 1402010 - RNA, 19 nt, Homo sapiens
  misc_RNA (1)...(19): siRNA sense strand
gaccaaagaggaagccauu

SEQ ID NO: 1402011 - RNA, 19 nt, Homo sapiens
  misc_RNA (1)...(19): siRNA sense strand
aagaagaacucgacuuguc

SEQ ID NO: 1402012 - RNA, 19 nt, Homo sapiens
  misc_RNA (1)...(19): siRNA sense strand
gagcuggcauuuguuacuu

SEQ ID NO: 1402013 - RNA, 19 nt, Homo sapiens
  misc_RNA (1)...(19): siRNA sense strand
ggaacuagucuuucuccaa

SEQ ID NO: 1402014 - RNA, 19 nt, Homo sapiens
  misc_RNA (1)...(19): siRNA sense strand
ccauuagucuccacgaguu

SEQ ID NO: 1402015 - RNA, 19 nt, Homo sapiens
  misc_RNA (1)...(19): siRNA sense strand
gaaggcagcccgcauucug

SEQ ID NO: 1402016 - RNA, 19 nt, Homo sapiens
  misc_RNA (1)...(19): siRNA sense strand
caacaagagcuggcauuug

SEQ ID NO: 1402017 - RNA, 19 nt, Homo sapiens
  misc_RNA (1)...(19): siRNA sense strand
uauaaaggacugauuguca

SEQ ID NO: 1402018 - RNA, 19 nt, Homo sapiens
  misc_RNA (1)...(19): siRNA sense strand
uggaucagcuaguuggauu

SEQ ID NO: 1402019 - RNA, 19 nt, Homo sapiens
  misc_RNA (1)...(19): siRNA sense strand
gccaugaucuggagagcau

SEQ ID NO: 1402020 - RNA, 19 nt, Homo sapiens
  misc_RNA (1)...(19): siRNA sense strand
ggacagauugcuggaguug

SEQ ID NO: 1402021 - RNA, 19 nt, Homo sapiens
  misc_RNA (1)...(19): siRNA sense strand
ugauggagauuaccuuugg

SEQ ID NO: 1402022 - RNA, 19 nt, Homo sapiens
  misc_RNA (1)...(19): siRNA sense strand
ggaccuguuucccuagcuu

SEQ ID NO: 1402023 - RNA, 19 nt, Homo sapiens
  misc_RNA (1)...(19): siRNA sense strand
ccaaagaggaagccauuag

SEQ ID NO: 1402024 - RNA, 19 nt, Homo sapiens
  misc_RNA (1)...(19): siRNA sense strand
gacgaagcuuguccagaug

SEQ ID NO: 1402025 - RNA, 19 nt, Homo sapiens
  misc_RNA (1)...(19): siRNA sense strand
gcacggagugggacaccuu

SEQ ID NO: 1402026 - RNA, 19 nt, Homo sapiens
  misc_RNA (1)...(19): siRNA sense strand
ggaaggagaacggaugcuu

SEQ ID NO: 1402027 - RNA, 19 nt, Homo sapiens
  misc_RNA (1)...(19): siRNA sense strand
acagauugcuggaguuguc

SEQ ID NO: 1402028 - RNA, 19 nt, Homo sapiens
  misc_RNA (1)...(19): siRNA sense strand
ggagaacggaugcuugucu

SEQ ID NO: 1402029 - RNA, 19 nt, Homo sapiens
  misc_RNA (1)...(19): siRNA sense strand
caucugcccugaaagaaaa

SEQ ID NO: 1402030 - RNA, 19 nt, Homo sapiens
  misc_RNA (1)...(19): siRNA sense strand
ccaacaagagcuggcauuu

SEQ ID NO: 1402031 - RNA, 19 nt, Homo sapiens
  misc_RNA (1)...(19): siRNA sense strand
caaagaggaagccauuagu

SEQ ID NO: 1402032 - RNA, 19 nt, Homo sapiens
  misc_RNA (1)...(19): siRNA sense strand
gaaguuugccauaaaaguu

SEQ ID NO: 1402033 - RNA, 19 nt, Homo sapiens
  misc_RNA (1)...(19): siRNA sense strand
gaagaccauccuggccaua

SEQ ID NO: 1402034 - RNA, 19 nt, Homo sapiens
  misc_RNA (1)...(19): siRNA sense strand
aaacaccagugaucugcau

SEQ ID NO: 1402035 - RNA, 19 nt, Homo sapiens
  misc_RNA (1)...(19): siRNA sense strand
uuaugaugguuccaaggua

SEQ ID NO: 1402036 - RNA, 19 nt, Homo sapiens
  misc_RNA (1)...(19): siRNA sense strand
cauaaaaguugauggagau

SEQ ID NO: 1402037 - RNA, 19 nt, Homo sapiens
  misc_RNA (1)...(19): siRNA sense strand
cagcuaguuggauucuuua

SEQ ID NO: 1402038 - RNA, 19 nt, Homo sapiens
  misc_RNA (1)...(19): siRNA sense strand
ccgcuguguuucugacauu

SEQ ID NO: 1402039 - RNA, 19 nt, Homo sapiens
  misc_RNA (1)...(19): siRNA sense strand
cagauggcagggcuccuua

SEQ ID NO: 1402040 - RNA, 19 nt, Homo sapiens
  misc_RNA (1)...(19): siRNA sense strand
cuguggagcucccugaugu

SEQ ID NO: 1402041 - RNA, 19 nt, Homo sapiens
  misc_RNA (1)...(19): siRNA sense strand
ccgccaagguccugcuuca

SEQ ID NO: 1402042 - RNA, 19 nt, Homo sapiens
  misc_RNA (1)...(19): siRNA sense strand
ggagugggacaccuucauc

SEQ ID NO: 1402043 - RNA, 19 nt, Homo sapiens
  misc_RNA (1)...(19): siRNA sense strand
gaccuguuucccuagcuua

SEQ ID NO: 1402044 - RNA, 19 nt, Homo sapiens
  misc_RNA (1)...(19): siRNA sense strand
guccagauuaucccuguuu

SEQ ID NO: 1402045 - RNA, 19 nt, Homo sapiens
  misc_RNA (1)...(19): siRNA sense strand
cuggcugcauccucuauaa

SEQ ID NO: 1402046 - RNA, 19 nt, Homo sapiens
  misc_RNA (1)...(19): siRNA sense strand
guugauggagauuaccuuu

SEQ ID NO: 1402047 - RNA, 19 nt, Homo sapiens
  misc_RNA (1)...(19): siRNA sense strand
acacagccaucagcagcuu

SEQ ID NO: 1402048 - RNA, 19 nt, Homo sapiens
  misc_RNA (1)...(19): siRNA sense strand
cuguuucccuagcuuauga

SEQ ID NO: 1402049 - RNA, 19 nt, Homo sapiens
  misc_RNA (1)...(19): siRNA sense strand
gcuaguuggauucuuuaau

SEQ ID NO: 1402050 - RNA, 19 nt, Homo sapiens
  misc_RNA (1)...(19): siRNA sense strand
acaugugccuguuccagau

SEQ ID NO: 1402051 - RNA, 19 nt, Homo sapiens
  misc_RNA (1)...(19): siRNA sense strand
gaaggaacuagucuuucuc

SEQ ID NO: 1402052 - RNA, 19 nt, Homo sapiens
  misc_RNA (1)...(19): siRNA sense strand
gaugacaaggucucuagca

SEQ ID NO: 1402053 - RNA, 19 nt, Homo sapiens
  misc_RNA (1)...(19): siRNA sense strand
cagaugacaaggucucuag

SEQ ID NO: 1402054 - RNA, 19 nt, Homo sapiens
  misc_RNA (1)...(19): siRNA sense strand
gcaggacuccaggaugguu

SEQ ID NO: 1402055 - RNA, 19 nt, Homo sapiens
  misc_RNA (1)...(19): siRNA sense strand
ugacucuccuccuacucuu

SEQ ID NO: 1402056 - RNA, 19 nt, Homo sapiens
  misc_RNA (1)...(19): siRNA sense strand
gcugcauccucuauaaagg

SEQ ID NO: 1402057 - RNA, 19 nt, Homo sapiens
  misc_RNA (1)...(19): siRNA sense strand
gcgcucgccucacauucuc

SEQ ID NO: 1402058 - RNA, 19 nt, Homo sapiens
  misc_RNA (1)...(19): siRNA sense strand
cagcccagcaccauccaaa

SEQ ID NO: 1402059 - RNA, 19 nt, Homo sapiens
  misc_RNA (1)...(19): siRNA sense strand
ggacaccuucaucgagcaa

SEQ ID NO: 1402060 - RNA, 19 nt, Homo sapiens
  misc_RNA (1)...(19): siRNA sense strand
gcuggcugcauccucuaua

SEQ ID NO: 1402061 - RNA, 19 nt, Homo sapiens
  misc_RNA (1)...(19): siRNA sense strand
acaccagugaucugcauaa

SEQ ID NO: 1402062 - RNA, 19 nt, Homo sapiens
  misc_RNA (1)...(19): siRNA sense strand
caucgagcaaauucugaaa

SEQ ID NO: 1402063 - RNA, 19 nt, Homo sapiens
  misc_RNA (1)...(19): siRNA sense strand
uccagaggcucaggaagug

SEQ ID NO: 1402064 - RNA, 19 nt, Homo sapiens
  misc_RNA (1)...(19): siRNA sense strand
gggaaggaacuagucuuuc

SEQ ID NO: 1402065 - RNA, 19 nt, Homo sapiens
  misc_RNA (1)...(19): siRNA sense strand
gaguugcuuuguggacaga

SEQ ID NO: 1402066 - RNA, 19 nt, Homo sapiens
  misc_RNA (1)...(19): siRNA sense strand
guugcuuuguggacagauu

SEQ ID NO: 1402067 - RNA, 19 nt, Homo sapiens
  misc_RNA (1)...(19): siRNA sense strand
acaccuucaucgagcaaau

SEQ ID NO: 1402068 - RNA, 19 nt, Homo sapiens
  misc_RNA (1)...(19): siRNA sense strand
aaagaggaagccauuaguc

SEQ ID NO: 1402069 - RNA, 19 nt, Homo sapiens
  misc_RNA (1)...(19): siRNA sense strand
gaaggcgauccaacaagag

SEQ ID NO: 1402070 - RNA, 19 nt, Homo sapiens
  misc_RNA (1)...(19): siRNA sense strand
gguccugcuucaccgaaca

SEQ ID NO: 1402071 - RNA, 19 nt, Homo sapiens
  misc_RNA (1)...(19): siRNA sense strand
ggaguuguccgcuguguuu

SEQ ID NO: 1402072 - RNA, 19 nt, Homo sapiens
  misc_RNA (1)...(19): siRNA sense strand
caagagcuggcauuuguua

SEQ ID NO: 1402073 - RNA, 19 nt, Homo sapiens
  misc_RNA (1)...(19): siRNA sense strand
gaagaaggcgauccaacaa

SEQ ID NO: 1402074 - RNA, 19 nt, Homo sapiens
  misc_RNA (1)...(19): siRNA sense strand
ggaagaaggcgauccaaca

SEQ ID NO: 1402075 - RNA, 19 nt, Homo sapiens
  misc_RNA (1)...(19): siRNA sense strand
ucagcuaguuggauucuuu

SEQ ID NO: 1402076 - RNA, 19 nt, Homo sapiens
  misc_RNA (1)...(19): siRNA sense strand
gcaagcgguuucuggauca

SEQ ID NO: 1402077 - RNA, 19 nt, Homo sapiens
  misc_RNA (1)...(19): siRNA sense strand
uaugaugguuccaagguaa

SEQ ID NO: 1402078 - RNA, 19 nt, Homo sapiens
  misc_RNA (1)...(19): siRNA sense strand
agaaggcgauccaacaaga

SEQ ID NO: 1402079 - RNA, 19 nt, Homo sapiens
  misc_RNA (1)...(19): siRNA sense strand
gagcuggcauuuguuacuu

SEQ ID NO: 1402080 - RNA, 19 nt, Homo sapiens
  misc_RNA (1)...(19): siRNA sense strand
caacaagagcuggcauuug

SEQ ID NO: 1402081 - RNA, 19 nt, Homo sapiens
  misc_RNA (1)...(19): siRNA sense strand
uggaucagcuaguuggauu

SEQ ID NO: 1402082 - RNA, 19 nt, Homo sapiens
  misc_RNA (1)...(19): siRNA sense strand
ggacagauugcuggaguug

SEQ ID NO: 1402083 - RNA, 19 nt, Homo sapiens
  misc_RNA (1)...(19): siRNA sense strand
ugauggagauuaccuuugg

SEQ ID NO: 1402084 - RNA, 19 nt, Homo sapiens
  misc_RNA (1)...(19): siRNA sense strand
ggaccuguuucccuagcuu

SEQ ID NO: 1402085 - RNA, 19 nt, Homo sapiens
  misc_RNA (1)...(19): siRNA sense strand
gcacggagugggacaccuu

SEQ ID NO: 1402086 - RNA, 19 nt, Homo sapiens
  misc_RNA (1)...(19): siRNA sense strand
ccaacaagagcuggcauuu

SEQ ID NO: 1402087 - RNA, 19 nt, Homo sapiens
  misc_RNA (1)...(19): siRNA sense strand
acagauugcuggaguuguc

SEQ ID NO: 1402088 - RNA, 19 nt, Homo sapiens
  misc_RNA (1)...(19): siRNA sense strand
gaaguuugccauaaaaguu

SEQ ID NO: 1402089 - RNA, 19 nt, Homo sapiens
  misc_RNA (1)...(19): siRNA sense strand
aaacaccagugaucugcau

SEQ ID NO: 1402090 - RNA, 19 nt, Homo sapiens
  misc_RNA (1)...(19): siRNA sense strand
uuaugaugguuccaaggua

SEQ ID NO: 1402091 - RNA, 19 nt, Homo sapiens
  misc_RNA (1)...(19): siRNA sense strand
cauaaaaguugauggagau

SEQ ID NO: 1402092 - RNA, 19 nt, Homo sapiens
  misc_RNA (1)...(19): siRNA sense strand
cagcuaguuggauucuuua

SEQ ID NO: 1402093 - RNA, 19 nt, Homo sapiens
  misc_RNA (1)...(19): siRNA sense strand
ccgcuguguuucugacauu

SEQ ID NO: 1402094 - RNA, 19 nt, Homo sapiens
  misc_RNA (1)...(19): siRNA sense strand
cuguggagcucccugaugu

SEQ ID NO: 1402095 - RNA, 19 nt, Homo sapiens
  misc_RNA (1)...(19): siRNA sense strand
ggagugggacaccuucauc

SEQ ID NO: 1402096 - RNA, 19 nt, Homo sapiens
  misc_RNA (1)...(19): siRNA sense strand
gaccuguuucccuagcuua

SEQ ID NO: 1402097 - RNA, 19 nt, Homo sapiens
  misc_RNA (1)...(19): siRNA sense strand
guugauggagauuaccuuu

SEQ ID NO: 1402098 - RNA, 19 nt, Homo sapiens
  misc_RNA (1)...(19): siRNA sense strand
cuguuucccuagcuuauga

SEQ ID NO: 1402099 - RNA, 19 nt, Homo sapiens
  misc_RNA (1)...(19): siRNA sense strand
gcuaguuggauucuuuaau

SEQ ID NO: 1402100 - RNA, 19 nt, Homo sapiens
  misc_RNA (1)...(19): siRNA sense strand
ugacucuccuccuacucuu

SEQ ID NO: 1402101 - RNA, 19 nt, Homo sapiens
  misc_RNA (1)...(19): siRNA sense strand
ggacaccuucaucgagcaa

SEQ ID NO: 1402102 - RNA, 19 nt, Homo sapiens
  misc_RNA (1)...(19): siRNA sense strand
acaccagugaucugcauaa

SEQ ID NO: 1402103 - RNA, 19 nt, Homo sapiens
  misc_RNA (1)...(19): siRNA sense strand
gaguugcuuuguggacaga

SEQ ID NO: 1402104 - RNA, 19 nt, Homo sapiens
  misc_RNA (1)...(19): siRNA sense strand
caucgagcaaauucugaaa

SEQ ID NO: 1402105 - RNA, 19 nt, Homo sapiens
  misc_RNA (1)...(19): siRNA sense strand
guugcuuuguggacagauu

SEQ ID NO: 1402106 - RNA, 19 nt, Homo sapiens
  misc_RNA (1)...(19): siRNA sense strand
gaaggcgauccaacaagag

SEQ ID NO: 1402107 - RNA, 19 nt, Homo sapiens
  misc_RNA (1)...(19): siRNA sense strand
acaccuucaucgagcaaau

SEQ ID NO: 1402108 - RNA, 19 nt, Homo sapiens
  misc_RNA (1)...(19): siRNA sense strand
gaacucgacuugucugaaa

SEQ ID NO: 1402109 - RNA, 19 nt, Homo sapiens
  misc_RNA (1)...(19): siRNA sense strand
gagcacaucugcccugaaa

SEQ ID NO: 1402110 - RNA, 19 nt, Homo sapiens
  misc_RNA (1)...(19): siRNA sense strand
ggaaggaacuagucuuucu

SEQ ID NO: 1402111 - RNA, 19 nt, Homo sapiens
  misc_RNA (1)...(19): siRNA sense strand
ugacgaagcuuguccagau

SEQ ID NO: 1402112 - RNA, 19 nt, Homo sapiens
  misc_RNA (1)...(19): siRNA sense strand
ggaguuguccgcuguguuu

SEQ ID NO: 1402113 - RNA, 19 nt, Homo sapiens
  misc_RNA (1)...(19): siRNA sense strand
caagagcuggcauuuguua

SEQ ID NO: 1402114 - RNA, 19 nt, Homo sapiens
  misc_RNA (1)...(19): siRNA sense strand
gcacaucugcccugaaaga

SEQ ID NO: 1402115 - RNA, 19 nt, Homo sapiens
  misc_RNA (1)...(19): siRNA sense strand
gaagaaggcgauccaacaa

SEQ ID NO: 1402116 - RNA, 19 nt, Homo sapiens
  misc_RNA (1)...(19): siRNA sense strand
ggaagaaggcgauccaaca

SEQ ID NO: 1402117 - RNA, 19 nt, Homo sapiens
  misc_RNA (1)...(19): siRNA sense strand
ucagcuaguuggauucuuu

SEQ ID NO: 1402118 - RNA, 19 nt, Homo sapiens
  misc_RNA (1)...(19): siRNA sense strand
gacaaggucucuagcaucu

SEQ ID NO: 1402119 - RNA, 19 nt, Homo sapiens
  misc_RNA (1)...(19): siRNA sense strand
gcaagcgguuucuggauca

SEQ ID NO: 1402120 - RNA, 19 nt, Homo sapiens
  misc_RNA (1)...(19): siRNA sense strand
agaaggcgauccaacaaga

SEQ ID NO: 1402121 - RNA, 19 nt, Homo sapiens
  misc_RNA (1)...(19): siRNA sense strand
ggaaauggccucaggucau

SEQ ID NO: 1402122 - RNA, 19 nt, Homo sapiens
  misc_RNA (1)...(19): siRNA sense strand
uaugaugguuccaagguaa

SEQ ID NO: 1402123 - RNA, 19 nt, Homo sapiens
  misc_RNA (1)...(19): siRNA sense strand
gaccaaagaggaagccauu

SEQ ID NO: 1402124 - RNA, 19 nt, Homo sapiens
  misc_RNA (1)...(19): siRNA sense strand
aagaagaacucgacuuguc

SEQ ID NO: 1402125 - RNA, 19 nt, Homo sapiens
  misc_RNA (1)...(19): siRNA sense strand
gagcuggcauuuguuacuu

SEQ ID NO: 1402126 - RNA, 19 nt, Homo sapiens
  misc_RNA (1)...(19): siRNA sense strand
ggaacuagucuuucuccaa

SEQ ID NO: 1402127 - RNA, 19 nt, Homo sapiens
  misc_RNA (1)...(19): siRNA sense strand
ccauuagucuccacgaguu

SEQ ID NO: 1402128 - RNA, 19 nt, Homo sapiens
  misc_RNA (1)...(19): siRNA sense strand
gaaggcagcccgcauucug

SEQ ID NO: 1402129 - RNA, 19 nt, Homo sapiens
  misc_RNA (1)...(19): siRNA sense strand
caacaagagcuggcauuug

SEQ ID NO: 1402130 - RNA, 19 nt, Homo sapiens
  misc_RNA (1)...(19): siRNA sense strand
uauaaaggacugauuguca

SEQ ID NO: 1402131 - RNA, 19 nt, Homo sapiens
  misc_RNA (1)...(19): siRNA sense strand
uggaucagcuaguuggauu

SEQ ID NO: 1402132 - RNA, 19 nt, Homo sapiens
  misc_RNA (1)...(19): siRNA sense strand
gccaugaucuggagagcau

SEQ ID NO: 1402133 - RNA, 19 nt, Homo sapiens
  misc_RNA (1)...(19): siRNA sense strand
ggacagauugcuggaguug

SEQ ID NO: 1402134 - RNA, 19 nt, Homo sapiens
  misc_RNA (1)...(19): siRNA sense strand
ugauggagauuaccuuugg

SEQ ID NO: 1402135 - RNA, 19 nt, Homo sapiens
  misc_RNA (1)...(19): siRNA sense strand
ggaccuguuucccuagcuu

SEQ ID NO: 1402136 - RNA, 19 nt, Homo sapiens
  misc_RNA (1)...(19): siRNA sense strand
ccaaagaggaagccauuag

SEQ ID NO: 1402137 - RNA, 19 nt, Homo sapiens
  misc_RNA (1)...(19): siRNA sense strand
gacgaagcuuguccagaug

SEQ ID NO: 1402138 - RNA, 19 nt, Homo sapiens
  misc_RNA (1)...(19): siRNA sense strand
gcacggagugggacaccuu

SEQ ID NO: 1402139 - RNA, 19 nt, Homo sapiens
  misc_RNA (1)...(19): siRNA sense strand
ggaaggagaacggaugcuu

SEQ ID NO: 1402140 - RNA, 19 nt, Homo sapiens
  misc_RNA (1)...(19): siRNA sense strand
acagauugcuggaguuguc

SEQ ID NO: 1402141 - RNA, 19 nt, Homo sapiens
  misc_RNA (1)...(19): siRNA sense strand
ggagaacggaugcuugucu

SEQ ID NO: 1402142 - RNA, 19 nt, Homo sapiens
  misc_RNA (1)...(19): siRNA sense strand
caucugcccugaaagaaaa

SEQ ID NO: 1402143 - RNA, 19 nt, Homo sapiens
  misc_RNA (1)...(19): siRNA sense strand
ccaacaagagcuggcauuu

SEQ ID NO: 1402144 - RNA, 19 nt, Homo sapiens
  misc_RNA (1)...(19): siRNA sense strand
caaagaggaagccauuagu

SEQ ID NO: 1402145 - RNA, 19 nt, Homo sapiens
  misc_RNA (1)...(19): siRNA sense strand
gaaguuugccauaaaaguu

SEQ ID NO: 1402146 - RNA, 19 nt, Homo sapiens
  misc_RNA (1)...(19): siRNA sense strand
gaagaccauccuggccaua

SEQ ID NO: 1402147 - RNA, 19 nt, Homo sapiens
  misc_RNA (1)...(19): siRNA sense strand
aaacaccagugaucugcau

SEQ ID NO: 1402148 - RNA, 19 nt, Homo sapiens
  misc_RNA (1)...(19): siRNA sense strand
uuaugaugguuccaaggua

SEQ ID NO: 1402149 - RNA, 19 nt, Homo sapiens
  misc_RNA (1)...(19): siRNA sense strand
cauaaaaguugauggagau

SEQ ID NO: 1402150 - RNA, 19 nt, Homo sapiens
  misc_RNA (1)...(19): siRNA sense strand
cagcuaguuggauucuuua

SEQ ID NO: 1402151 - RNA, 19 nt, Homo sapiens
  misc_RNA (1)...(19): siRNA sense strand
ccgcuguguuucugacauu

SEQ ID NO: 1402152 - RNA, 19 nt, Homo sapiens
  misc_RNA (1)...(19): siRNA sense strand
cagauggcagggcuccuua

SEQ ID NO: 1402153 - RNA, 19 nt, Homo sapiens
  misc_RNA (1)...(19): siRNA sense strand
cuguggagcucccugaugu

SEQ ID NO: 1402154 - RNA, 19 nt, Homo sapiens
  misc_RNA (1)...(19): siRNA sense strand
ccgccaagguccugcuuca

SEQ ID NO: 1402155 - RNA, 19 nt, Homo sapiens
  misc_RNA (1)...(19): siRNA sense strand
ggagugggacaccuucauc

SEQ ID NO: 1402156 - RNA, 19 nt, Homo sapiens
  misc_RNA (1)...(19): siRNA sense strand
gaccuguuucccuagcuua

SEQ ID NO: 1402157 - RNA, 19 nt, Homo sapiens
  misc_RNA (1)...(19): siRNA sense strand
guccagauuaucccuguuu

SEQ ID NO: 1402158 - RNA, 19 nt, Homo sapiens
  misc_RNA (1)...(19): siRNA sense strand
cuggcugcauccucuauaa

SEQ ID NO: 1402159 - RNA, 19 nt, Homo sapiens
  misc_RNA (1)...(19): siRNA sense strand
guugauggagauuaccuuu

SEQ ID NO: 1402160 - RNA, 19 nt, Homo sapiens
  misc_RNA (1)...(19): siRNA sense strand
acacagccaucagcagcuu

SEQ ID NO: 1402161 - RNA, 19 nt, Homo sapiens
  misc_RNA (1)...(19): siRNA sense strand
cuguuucccuagcuuauga

SEQ ID NO: 1402162 - RNA, 19 nt, Homo sapiens
  misc_RNA (1)...(19): siRNA sense strand
gcuaguuggauucuuuaau

SEQ ID NO: 1402163 - RNA, 19 nt, Homo sapiens
  misc_RNA (1)...(19): siRNA sense strand
acaugugccuguuccagau

SEQ ID NO: 1402164 - RNA, 19 nt, Homo sapiens
  misc_RNA (1)...(19): siRNA sense strand
gaaggaacuagucuuucuc

SEQ ID NO: 1402165 - RNA, 19 nt, Homo sapiens
  misc_RNA (1)...(19): siRNA sense strand
gaugacaaggucucuagca

SEQ ID NO: 1402166 - RNA, 19 nt, Homo sapiens
  misc_RNA (1)...(19): siRNA sense strand
cagaugacaaggucucuag

SEQ ID NO: 1402167 - RNA, 19 nt, Homo sapiens
  misc_RNA (1)...(19): siRNA sense strand
gcaggacuccaggaugguu

SEQ ID NO: 1402168 - RNA, 19 nt, Homo sapiens
  misc_RNA (1)...(19): siRNA sense strand
ugacucuccuccuacucuu

SEQ ID NO: 1402169 - RNA, 19 nt, Homo sapiens
  misc_RNA (1)...(19): siRNA sense strand
gcugcauccucuauaaagg

SEQ ID NO: 1402170 - RNA, 19 nt, Homo sapiens
  misc_RNA (1)...(19): siRNA sense strand
gcgcucgccucacauucuc

SEQ ID NO: 1402171 - RNA, 19 nt, Homo sapiens
  misc_RNA (1)...(19): siRNA sense strand
cagcccagcaccauccaaa

SEQ ID NO: 1402172 - RNA, 19 nt, Homo sapiens
  misc_RNA (1)...(19): siRNA sense strand
ggacaccuucaucgagcaa

SEQ ID NO: 1402173 - RNA, 19 nt, Homo sapiens
  misc_RNA (1)...(19): siRNA sense strand
gcuggcugcauccucuaua

SEQ ID NO: 1402174 - RNA, 19 nt, Homo sapiens
  misc_RNA (1)...(19): siRNA sense strand
acaccagugaucugcauaa

SEQ ID NO: 1402175 - RNA, 19 nt, Homo sapiens
  misc_RNA (1)...(19): siRNA sense strand
caucgagcaaauucugaaa

SEQ ID NO: 1402176 - RNA, 19 nt, Homo sapiens
  misc_RNA (1)...(19): siRNA sense strand
uccagaggcucaggaagug

SEQ ID NO: 1402177 - RNA, 19 nt, Homo sapiens
  misc_RNA (1)...(19): siRNA sense strand
gggaaggaacuagucuuuc

SEQ ID NO: 1402178 - RNA, 19 nt, Homo sapiens
  misc_RNA (1)...(19): siRNA sense strand
gaguugcuuuguggacaga

SEQ ID NO: 1402179 - RNA, 19 nt, Homo sapiens
  misc_RNA (1)...(19): siRNA sense strand
guugcuuuguggacagauu

SEQ ID NO: 1402180 - RNA, 19 nt, Homo sapiens
  misc_RNA (1)...(19): siRNA sense strand
acaccuucaucgagcaaau

SEQ ID NO: 1402181 - RNA, 19 nt, Homo sapiens
  misc_RNA (1)...(19): siRNA sense strand
aaagaggaagccauuaguc

SEQ ID NO: 1402182 - RNA, 19 nt, Homo sapiens
  misc_RNA (1)...(19): siRNA sense strand
gaaggcgauccaacaagag

SEQ ID NO: 1402183 - RNA, 19 nt, Homo sapiens
  misc_RNA (1)...(19): siRNA sense strand
gguccugcuucaccgaaca

SEQ ID NO: 1402184 - RNA, 19 nt, Homo sapiens
  misc_RNA (1)...(19): siRNA sense strand
ggaguuguccgcuguguuu

SEQ ID NO: 1402185 - RNA, 19 nt, Homo sapiens
  misc_RNA (1)...(19): siRNA sense strand
caagagcuggcauuuguua

SEQ ID NO: 1402186 - RNA, 19 nt, Homo sapiens
  misc_RNA (1)...(19): siRNA sense strand
gaagaaggcgauccaacaa

SEQ ID NO: 1402187 - RNA, 19 nt, Homo sapiens
  misc_RNA (1)...(19): siRNA sense strand
ggaagaaggcgauccaaca

SEQ ID NO: 1402188 - RNA, 19 nt, Homo sapiens
  misc_RNA (1)...(19): siRNA sense strand
ucagcuaguuggauucuuu

SEQ ID NO: 1402189 - RNA, 19 nt, Homo sapiens
  misc_RNA (1)...(19): siRNA sense strand
gcaagcgguuucuggauca

SEQ ID NO: 1402190 - RNA, 19 nt, Homo sapiens
  misc_RNA (1)...(19): siRNA sense strand
uaugaugguuccaagguaa

SEQ ID NO: 1402191 - RNA, 19 nt, Homo sapiens
  misc_RNA (1)...(19): siRNA sense strand
agaaggcgauccaacaaga

SEQ ID NO: 1402192 - RNA, 19 nt, Homo sapiens
  misc_RNA (1)...(19): siRNA sense strand
gagcuggcauuuguuacuu

SEQ ID NO: 1402193 - RNA, 19 nt, Homo sapiens
  misc_RNA (1)...(19): siRNA sense strand
gaaggcagcccgcauucug

SEQ ID NO: 1402194 - RNA, 19 nt, Homo sapiens
  misc_RNA (1)...(19): siRNA sense strand
caacaagagcuggcauuug

SEQ ID NO: 1402195 - RNA, 19 nt, Homo sapiens
  misc_RNA (1)...(19): siRNA sense strand
uauaaaggacugauuguca

SEQ ID NO: 1402196 - RNA, 19 nt, Homo sapiens
  misc_RNA (1)...(19): siRNA sense strand
uggaucagcuaguuggauu

SEQ ID NO: 1402197 - RNA, 19 nt, Homo sapiens
  misc_RNA (1)...(19): siRNA sense strand
ggacagauugcuggaguug

SEQ ID NO: 1402198 - RNA, 19 nt, Homo sapiens
  misc_RNA (1)...(19): siRNA sense strand
ugauggagauuaccuuugg

SEQ ID NO: 1402199 - RNA, 19 nt, Homo sapiens
  misc_RNA (1)...(19): siRNA sense strand
ggaccuguuucccuagcuu

SEQ ID NO: 1402200 - RNA, 19 nt, Homo sapiens
  misc_RNA (1)...(19): siRNA sense strand
gcacggagugggacaccuu

SEQ ID NO: 1402201 - RNA, 19 nt, Homo sapiens
  misc_RNA (1)...(19): siRNA sense strand
ccaacaagagcuggcauuu

SEQ ID NO: 1402202 - RNA, 19 nt, Homo sapiens
  misc_RNA (1)...(19): siRNA sense strand
acagauugcuggaguuguc

SEQ ID NO: 1402203 - RNA, 19 nt, Homo sapiens
  misc_RNA (1)...(19): siRNA sense strand
gaaguuugccauaaaaguu

SEQ ID NO: 1402204 - RNA, 19 nt, Homo sapiens
  misc_RNA (1)...(19): siRNA sense strand
aaacaccagugaucugcau

SEQ ID NO: 1402205 - RNA, 19 nt, Homo sapiens
  misc_RNA (1)...(19): siRNA sense strand
uuaugaugguuccaaggua

SEQ ID NO: 1402206 - RNA, 19 nt, Homo sapiens
  misc_RNA (1)...(19): siRNA sense strand
cauaaaaguugauggagau

SEQ ID NO: 1402207 - RNA, 19 nt, Homo sapiens
  misc_RNA (1)...(19): siRNA sense strand
cagcuaguuggauucuuua

SEQ ID NO: 1402208 - RNA, 19 nt, Homo sapiens
  misc_RNA (1)...(19): siRNA sense strand
ccgcuguguuucugacauu

SEQ ID NO: 1402209 - RNA, 19 nt, Homo sapiens
  misc_RNA (1)...(19): siRNA sense strand
cuguggagcucccugaugu

SEQ ID NO: 1402210 - RNA, 19 nt, Homo sapiens
  misc_RNA (1)...(19): siRNA sense strand
ccgccaagguccugcuuca

SEQ ID NO: 1402211 - RNA, 19 nt, Homo sapiens
  misc_RNA (1)...(19): siRNA sense strand
ggagugggacaccuucauc

SEQ ID NO: 1402212 - RNA, 19 nt, Homo sapiens
  misc_RNA (1)...(19): siRNA sense strand
gaccuguuucccuagcuua

SEQ ID NO: 1402213 - RNA, 19 nt, Homo sapiens
  misc_RNA (1)...(19): siRNA sense strand
cuggcugcauccucuauaa

SEQ ID NO: 1402214 - RNA, 19 nt, Homo sapiens
  misc_RNA (1)...(19): siRNA sense strand
guugauggagauuaccuuu

SEQ ID NO: 1402215 - RNA, 19 nt, Homo sapiens
  misc_RNA (1)...(19): siRNA sense strand
cuguuucccuagcuuauga

SEQ ID NO: 1402216 - RNA, 19 nt, Homo sapiens
  misc_RNA (1)...(19): siRNA sense strand
gcuaguuggauucuuuaau

SEQ ID NO: 1402217 - RNA, 19 nt, Homo sapiens
  misc_RNA (1)...(19): siRNA sense strand
ugacucuccuccuacucuu

SEQ ID NO: 1402218 - RNA, 19 nt, Homo sapiens
  misc_RNA (1)...(19): siRNA sense strand
gcugcauccucuauaaagg

SEQ ID NO: 1402219 - RNA, 19 nt, Homo sapiens
  misc_RNA (1)...(19): siRNA sense strand
gcgcucgccucacauucuc

SEQ ID NO: 1402220 - RNA, 19 nt, Homo sapiens
  misc_RNA (1)...(19): siRNA sense strand
ggacaccuucaucgagcaa

SEQ ID NO: 1402221 - RNA, 19 nt, Homo sapiens
  misc_RNA (1)...(19): siRNA sense strand
gcuggcugcauccucuaua

SEQ ID NO: 1402222 - RNA, 19 nt, Homo sapiens
  misc_RNA (1)...(19): siRNA sense strand
acaccagugaucugcauaa

SEQ ID NO: 1402223 - RNA, 19 nt, Homo sapiens
  misc_RNA (1)...(19): siRNA sense strand
guugcuuuguggacagauu

SEQ ID NO: 1402224 - RNA, 19 nt, Homo sapiens
  misc_RNA (1)...(19): siRNA sense strand
gaguugcuuuguggacaga

SEQ ID NO: 1402225 - RNA, 19 nt, Homo sapiens
  misc_RNA (1)...(19): siRNA sense strand
caucgagcaaauucugaaa

SEQ ID NO: 1402226 - RNA, 19 nt, Homo sapiens
  misc_RNA (1)...(19): siRNA sense strand
gaaggcgauccaacaagag

SEQ ID NO: 1402227 - RNA, 19 nt, Homo sapiens
  misc_RNA (1)...(19): siRNA sense strand
gguccugcuucaccgaaca

SEQ ID NO: 1402228 - RNA, 19 nt, Homo sapiens
  misc_RNA (1)...(19): siRNA sense strand
acaccuucaucgagcaaau

SEQ ID NO: 1402229 - RNA, 19 nt, Homo sapiens
  misc_RNA (1)...(19): siRNA sense strand
gaacucgacuugucugaaa

SEQ ID NO: 1402230 - RNA, 19 nt, Homo sapiens
  misc_RNA (1)...(19): siRNA sense strand
gagcacaucugcccugaaa

SEQ ID NO: 1402231 - RNA, 19 nt, Homo sapiens
  misc_RNA (1)...(19): siRNA sense strand
ggaaggaacuagucuuucu

SEQ ID NO: 1402232 - RNA, 19 nt, Homo sapiens
  misc_RNA (1)...(19): siRNA sense strand
ugacgaagcuuguccagau

SEQ ID NO: 1402233 - RNA, 19 nt, Homo sapiens
  misc_RNA (1)...(19): siRNA sense strand
gagacagacugcaggauga

SEQ ID NO: 1402234 - RNA, 19 nt, Homo sapiens
  misc_RNA (1)...(19): siRNA sense strand
ggaguuguccgcuguguuu

SEQ ID NO: 1402235 - RNA, 19 nt, Homo sapiens
  misc_RNA (1)...(19): siRNA sense strand
caagagcuggcauuuguua

SEQ ID NO: 1402236 - RNA, 19 nt, Homo sapiens
  misc_RNA (1)...(19): siRNA sense strand
gcacaucugcccugaaaga

SEQ ID NO: 1402237 - RNA, 19 nt, Homo sapiens
  misc_RNA (1)...(19): siRNA sense strand
gaagaaggcgauccaacaa

SEQ ID NO: 1402238 - RNA, 19 nt, Homo sapiens
  misc_RNA (1)...(19): siRNA sense strand
ggaagaaggcgauccaaca

SEQ ID NO: 1402239 - RNA, 19 nt, Homo sapiens
  misc_RNA (1)...(19): siRNA sense strand
ucagcuaguuggauucuuu

SEQ ID NO: 1402240 - RNA, 19 nt, Homo sapiens
  misc_RNA (1)...(19): siRNA sense strand
ccucaguucuauuacguua

SEQ ID NO: 1402241 - RNA, 19 nt, Homo sapiens
  misc_RNA (1)...(19): siRNA sense strand
gacaaggucucuagcaucu

SEQ ID NO: 1402242 - RNA, 19 nt, Homo sapiens
  misc_RNA (1)...(19): siRNA sense strand
gcaagcgguuucuggauca

SEQ ID NO: 1402243 - RNA, 19 nt, Homo sapiens
  misc_RNA (1)...(19): siRNA sense strand
agaaggcgauccaacaaga

SEQ ID NO: 1402244 - RNA, 19 nt, Homo sapiens
  misc_RNA (1)...(19): siRNA sense strand
uaugaugguuccaagguaa

SEQ ID NO: 1402245 - RNA, 19 nt, Homo sapiens
  misc_RNA (1)...(19): siRNA sense strand
ggaaauggccucaggucau

SEQ ID NO: 1402246 - RNA, 19 nt, Homo sapiens
  misc_RNA (1)...(19): siRNA sense strand
gaccaaagaggaagccauu

SEQ ID NO: 1402247 - RNA, 19 nt, Homo sapiens
  misc_RNA (1)...(19): siRNA sense strand
aagaagaacucgacuuguc

SEQ ID NO: 1402248 - RNA, 19 nt, Homo sapiens
  misc_RNA (1)...(19): siRNA sense strand
gagcuggcauuuguuacuu

SEQ ID NO: 1402249 - RNA, 19 nt, Homo sapiens
  misc_RNA (1)...(19): siRNA sense strand
ggaacuagucuuucuccaa

SEQ ID NO: 1402250 - RNA, 19 nt, Homo sapiens
  misc_RNA (1)...(19): siRNA sense strand
ccauuagucuccacgaguu

SEQ ID NO: 1402251 - RNA, 19 nt, Homo sapiens
  misc_RNA (1)...(19): siRNA sense strand
gaaggcagcccgcauucug

SEQ ID NO: 1402252 - RNA, 19 nt, Homo sapiens
  misc_RNA (1)...(19): siRNA sense strand
uauaaaggacugauuguca

SEQ ID NO: 1402253 - RNA, 19 nt, Homo sapiens
  misc_RNA (1)...(19): siRNA sense strand
caacaagagcuggcauuug

SEQ ID NO: 1402254 - RNA, 19 nt, Homo sapiens
  misc_RNA (1)...(19): siRNA sense strand
uggaucagcuaguuggauu

SEQ ID NO: 1402255 - RNA, 19 nt, Homo sapiens
  misc_RNA (1)...(19): siRNA sense strand
gccaugaucuggagagcau

SEQ ID NO: 1402256 - RNA, 19 nt, Homo sapiens
  misc_RNA (1)...(19): siRNA sense strand
ggacagauugcuggaguug

SEQ ID NO: 1402257 - RNA, 19 nt, Homo sapiens
  misc_RNA (1)...(19): siRNA sense strand
ugauggagauuaccuuugg

SEQ ID NO: 1402258 - RNA, 19 nt, Homo sapiens
  misc_RNA (1)...(19): siRNA sense strand
ggaccuguuucccuagcuu

SEQ ID NO: 1402259 - RNA, 19 nt, Homo sapiens
  misc_RNA (1)...(19): siRNA sense strand
ccaaagaggaagccauuag

SEQ ID NO: 1402260 - RNA, 19 nt, Homo sapiens
  misc_RNA (1)...(19): siRNA sense strand
gggcuugugugguacuuag

SEQ ID NO: 1402261 - RNA, 19 nt, Homo sapiens
  misc_RNA (1)...(19): siRNA sense strand
gacgaagcuuguccagaug

SEQ ID NO: 1402262 - RNA, 19 nt, Homo sapiens
  misc_RNA (1)...(19): siRNA sense strand
gcacggagugggacaccuu

SEQ ID NO: 1402263 - RNA, 19 nt, Homo sapiens
  misc_RNA (1)...(19): siRNA sense strand
uuccugggcuuguguggua

SEQ ID NO: 1402264 - RNA, 19 nt, Homo sapiens
  misc_RNA (1)...(19): siRNA sense strand
ggaaggagaacggaugcuu

SEQ ID NO: 1402265 - RNA, 19 nt, Homo sapiens
  misc_RNA (1)...(19): siRNA sense strand
acagauugcuggaguuguc

SEQ ID NO: 1402266 - RNA, 19 nt, Homo sapiens
  misc_RNA (1)...(19): siRNA sense strand
ggagaacggaugcuugucu

SEQ ID NO: 1402267 - RNA, 19 nt, Homo sapiens
  misc_RNA (1)...(19): siRNA sense strand
caucugcccugaaagaaaa

SEQ ID NO: 1402268 - RNA, 19 nt, Homo sapiens
  misc_RNA (1)...(19): siRNA sense strand
caaagaggaagccauuagu

SEQ ID NO: 1402269 - RNA, 19 nt, Homo sapiens
  misc_RNA (1)...(19): siRNA sense strand
ccaacaagagcuggcauuu

SEQ ID NO: 1402270 - RNA, 19 nt, Homo sapiens
  misc_RNA (1)...(19): siRNA sense strand
gaaguuugccauaaaaguu

SEQ ID NO: 1402271 - RNA, 19 nt, Homo sapiens
  misc_RNA (1)...(19): siRNA sense strand
ugaaagggagcgacacuca

SEQ ID NO: 1402272 - RNA, 19 nt, Homo sapiens
  misc_RNA (1)...(19): siRNA sense strand
gaagaccauccuggccaua

SEQ ID NO: 1402273 - RNA, 19 nt, Homo sapiens
  misc_RNA (1)...(19): siRNA sense strand
aaacaccagugaucugcau

SEQ ID NO: 1402274 - RNA, 19 nt, Homo sapiens
  misc_RNA (1)...(19): siRNA sense strand
uuaugaugguuccaaggua

SEQ ID NO: 1402275 - RNA, 19 nt, Homo sapiens
  misc_RNA (1)...(19): siRNA sense strand
cauaaaaguugauggagau

SEQ ID NO: 1402276 - RNA, 19 nt, Homo sapiens
  misc_RNA (1)...(19): siRNA sense strand
cagcuaguuggauucuuua

SEQ ID NO: 1402277 - RNA, 19 nt, Homo sapiens
  misc_RNA (1)...(19): siRNA sense strand
ccgcuguguuucugacauu

SEQ ID NO: 1402278 - RNA, 19 nt, Homo sapiens
  misc_RNA (1)...(19): siRNA sense strand
cagauggcagggcuccuua

SEQ ID NO: 1402279 - RNA, 19 nt, Homo sapiens
  misc_RNA (1)...(19): siRNA sense strand
cuguggagcucccugaugu

SEQ ID NO: 1402280 - RNA, 19 nt, Homo sapiens
  misc_RNA (1)...(19): siRNA sense strand
ccgccaagguccugcuuca

SEQ ID NO: 1402281 - RNA, 19 nt, Homo sapiens
  misc_RNA (1)...(19): siRNA sense strand
ggagugggacaccuucauc

SEQ ID NO: 1402282 - RNA, 19 nt, Homo sapiens
  misc_RNA (1)...(19): siRNA sense strand
gaccuguuucccuagcuua

SEQ ID NO: 1402283 - RNA, 19 nt, Homo sapiens
  misc_RNA (1)...(19): siRNA sense strand
guccagauuaucccuguuu

SEQ ID NO: 1402284 - RNA, 19 nt, Homo sapiens
  misc_RNA (1)...(19): siRNA sense strand
cuggcugcauccucuauaa

SEQ ID NO: 1402285 - RNA, 19 nt, Homo sapiens
  misc_RNA (1)...(19): siRNA sense strand
guugauggagauuaccuuu

SEQ ID NO: 1402286 - RNA, 19 nt, Homo sapiens
  misc_RNA (1)...(19): siRNA sense strand
acacagccaucagcagcuu

SEQ ID NO: 1402287 - RNA, 19 nt, Homo sapiens
  misc_RNA (1)...(19): siRNA sense strand
cuguuucccuagcuuauga

SEQ ID NO: 1402288 - RNA, 19 nt, Homo sapiens
  misc_RNA (1)...(19): siRNA sense strand
gcuaguuggauucuuuaau

SEQ ID NO: 1402289 - RNA, 19 nt, Homo sapiens
  misc_RNA (1)...(19): siRNA sense strand
acaugugccuguuccagau

SEQ ID NO: 1402290 - RNA, 19 nt, Homo sapiens
  misc_RNA (1)...(19): siRNA sense strand
gaaggaacuagucuuucuc

SEQ ID NO: 1402291 - RNA, 19 nt, Homo sapiens
  misc_RNA (1)...(19): siRNA sense strand
gaugacaaggucucuagca

SEQ ID NO: 1402292 - RNA, 19 nt, Homo sapiens
  misc_RNA (1)...(19): siRNA sense strand
cagaugacaaggucucuag

SEQ ID NO: 1402293 - RNA, 19 nt, Homo sapiens
  misc_RNA (1)...(19): siRNA sense strand
gcaggacuccaggaugguu

SEQ ID NO: 1402294 - RNA, 19 nt, Homo sapiens
  misc_RNA (1)...(19): siRNA sense strand
ugacucuccuccuacucuu

SEQ ID NO: 1402295 - RNA, 19 nt, Homo sapiens
  misc_RNA (1)...(19): siRNA sense strand
gcugcauccucuauaaagg

SEQ ID NO: 1402296 - RNA, 19 nt, Homo sapiens
  misc_RNA (1)...(19): siRNA sense strand
gcgcucgccucacauucuc

SEQ ID NO: 1402297 - RNA, 19 nt, Homo sapiens
  misc_RNA (1)...(19): siRNA sense strand
cagcccagcaccauccaaa

SEQ ID NO: 1402298 - RNA, 19 nt, Homo sapiens
  misc_RNA (1)...(19): siRNA sense strand
ggacaccuucaucgagcaa

SEQ ID NO: 1402299 - RNA, 19 nt, Homo sapiens
  misc_RNA (1)...(19): siRNA sense strand
gcuggcugcauccucuaua

SEQ ID NO: 1402300 - RNA, 19 nt, Homo sapiens
  misc_RNA (1)...(19): siRNA sense strand
acaccagugaucugcauaa

SEQ ID NO: 1402301 - RNA, 19 nt, Homo sapiens
  misc_RNA (1)...(19): siRNA sense strand
caucgagcaaauucugaaa

SEQ ID NO: 1402302 - RNA, 19 nt, Homo sapiens
  misc_RNA (1)...(19): siRNA sense strand
uccagaggcucaggaagug

SEQ ID NO: 1402303 - RNA, 19 nt, Homo sapiens
  misc_RNA (1)...(19): siRNA sense strand
gggaaggaacuagucuuuc

SEQ ID NO: 1402304 - RNA, 19 nt, Homo sapiens
  misc_RNA (1)...(19): siRNA sense strand
gaguugcuuuguggacaga

SEQ ID NO: 1402305 - RNA, 19 nt, Homo sapiens
  misc_RNA (1)...(19): siRNA sense strand
guugcuuuguggacagauu

SEQ ID NO: 1402306 - RNA, 19 nt, Homo sapiens
  misc_RNA (1)...(19): siRNA sense strand
acaccuucaucgagcaaau

SEQ ID NO: 1402307 - RNA, 19 nt, Homo sapiens
  misc_RNA (1)...(19): siRNA sense strand
gaaggcgauccaacaagag

SEQ ID NO: 1402308 - RNA, 19 nt, Homo sapiens
  misc_RNA (1)...(19): siRNA sense strand
aaagaggaagccauuaguc

SEQ ID NO: 1402309 - RNA, 19 nt, Homo sapiens
  misc_RNA (1)...(19): siRNA sense strand
gguccugcuucaccgaaca

SEQ ID NO: 1402310 - RNA, 19 nt, Homo sapiens
  misc_RNA (1)...(19): siRNA sense strand
gaacucgacuugucugaaa

SEQ ID NO: 1402311 - RNA, 19 nt, Homo sapiens
  misc_RNA (1)...(19): siRNA sense strand
gagcacaucugcccugaaa

SEQ ID NO: 1402312 - RNA, 19 nt, Homo sapiens
  misc_RNA (1)...(19): siRNA sense strand
ggaaggaacuagucuuucu

SEQ ID NO: 1402313 - RNA, 19 nt, Homo sapiens
  misc_RNA (1)...(19): siRNA sense strand
ugacgaagcuuguccagau

SEQ ID NO: 1402314 - RNA, 19 nt, Homo sapiens
  misc_RNA (1)...(19): siRNA sense strand
ggaguuguccgcuguguuu

SEQ ID NO: 1402315 - RNA, 19 nt, Homo sapiens
  misc_RNA (1)...(19): siRNA sense strand
caagagcuggcauuuguua

SEQ ID NO: 1402316 - RNA, 19 nt, Homo sapiens
  misc_RNA (1)...(19): siRNA sense strand
gcacaucugcccugaaaga

SEQ ID NO: 1402317 - RNA, 19 nt, Homo sapiens
  misc_RNA (1)...(19): siRNA sense strand
gaagaaggcgauccaacaa

SEQ ID NO: 1402318 - RNA, 19 nt, Homo sapiens
  misc_RNA (1)...(19): siRNA sense strand
ggaagaaggcgauccaaca

SEQ ID NO: 1402319 - RNA, 19 nt, Homo sapiens
  misc_RNA (1)...(19): siRNA sense strand
ucagcuaguuggauucuuu

SEQ ID NO: 1402320 - RNA, 19 nt, Homo sapiens
  misc_RNA (1)...(19): siRNA sense strand
gacaaggucucuagcaucu

SEQ ID NO: 1402321 - RNA, 19 nt, Homo sapiens
  misc_RNA (1)...(19): siRNA sense strand
gcaagcgguuucuggauca

SEQ ID NO: 1402322 - RNA, 19 nt, Homo sapiens
  misc_RNA (1)...(19): siRNA sense strand
agaaggcgauccaacaaga

SEQ ID NO: 1402323 - RNA, 19 nt, Homo sapiens
  misc_RNA (1)...(19): siRNA sense strand
ggaaauggccucaggucau

SEQ ID NO: 1402324 - RNA, 19 nt, Homo sapiens
  misc_RNA (1)...(19): siRNA sense strand
uaugaugguuccaagguaa

SEQ ID NO: 1402325 - RNA, 19 nt, Homo sapiens
  misc_RNA (1)...(19): siRNA sense strand
gaccaaagaggaagccauu

SEQ ID NO: 1402326 - RNA, 19 nt, Homo sapiens
  misc_RNA (1)...(19): siRNA sense strand
aagaagaacucgacuuguc

SEQ ID NO: 1402327 - RNA, 19 nt, Homo sapiens
  misc_RNA (1)...(19): siRNA sense strand
gagcuggcauuuguuacuu

SEQ ID NO: 1402328 - RNA, 19 nt, Homo sapiens
  misc_RNA (1)...(19): siRNA sense strand
ggaacuagucuuucuccaa

SEQ ID NO: 1402329 - RNA, 19 nt, Homo sapiens
  misc_RNA (1)...(19): siRNA sense strand
ccauuagucuccacgaguu

SEQ ID NO: 1402330 - RNA, 19 nt, Homo sapiens
  misc_RNA (1)...(19): siRNA sense strand
gaaggcagcccgcauucug

SEQ ID NO: 1402331 - RNA, 19 nt, Homo sapiens
  misc_RNA (1)...(19): siRNA sense strand
caacaagagcuggcauuug

SEQ ID NO: 1402332 - RNA, 19 nt, Homo sapiens
  misc_RNA (1)...(19): siRNA sense strand
uauaaaggacugauuguca

SEQ ID NO: 1402333 - RNA, 19 nt, Homo sapiens
  misc_RNA (1)...(19): siRNA sense strand
uggaucagcuaguuggauu

SEQ ID NO: 1402334 - RNA, 19 nt, Homo sapiens
  misc_RNA (1)...(19): siRNA sense strand
gccaugaucuggagagcau

SEQ ID NO: 1402335 - RNA, 19 nt, Homo sapiens
  misc_RNA (1)...(19): siRNA sense strand
ggacagauugcuggaguug

SEQ ID NO: 1402336 - RNA, 19 nt, Homo sapiens
  misc_RNA (1)...(19): siRNA sense strand
ugauggagauuaccuuugg

SEQ ID NO: 1402337 - RNA, 19 nt, Homo sapiens
  misc_RNA (1)...(19): siRNA sense strand
ggaccuguuucccuagcuu

SEQ ID NO: 1402338 - RNA, 19 nt, Homo sapiens
  misc_RNA (1)...(19): siRNA sense strand
ccaaagaggaagccauuag

SEQ ID NO: 1402339 - RNA, 19 nt, Homo sapiens
  misc_RNA (1)...(19): siRNA sense strand
gacgaagcuuguccagaug

SEQ ID NO: 1402340 - RNA, 19 nt, Homo sapiens
  misc_RNA (1)...(19): siRNA sense strand
gcacggagugggacaccuu

SEQ ID NO: 1402341 - RNA, 19 nt, Homo sapiens
  misc_RNA (1)...(19): siRNA sense strand
ggaaggagaacggaugcuu

SEQ ID NO: 1402342 - RNA, 19 nt, Homo sapiens
  misc_RNA (1)...(19): siRNA sense strand
acagauugcuggaguuguc

SEQ ID NO: 1402343 - RNA, 19 nt, Homo sapiens
  misc_RNA (1)...(19): siRNA sense strand
ggagaacggaugcuugucu

SEQ ID NO: 1402344 - RNA, 19 nt, Homo sapiens
  misc_RNA (1)...(19): siRNA sense strand
caucugcccugaaagaaaa

SEQ ID NO: 1402345 - RNA, 19 nt, Homo sapiens
  misc_RNA (1)...(19): siRNA sense strand
ccaacaagagcuggcauuu

SEQ ID NO: 1402346 - RNA, 19 nt, Homo sapiens
  misc_RNA (1)...(19): siRNA sense strand
caaagaggaagccauuagu

SEQ ID NO: 1402347 - RNA, 19 nt, Homo sapiens
  misc_RNA (1)...(19): siRNA sense strand
gaaguuugccauaaaaguu

SEQ ID NO: 1402348 - RNA, 19 nt, Homo sapiens
  misc_RNA (1)...(19): siRNA sense strand
gaagaccauccuggccaua

SEQ ID NO: 1402349 - RNA, 19 nt, Homo sapiens
  misc_RNA (1)...(19): siRNA sense strand
aaacaccagugaucugcau

SEQ ID NO: 1402350 - RNA, 19 nt, Homo sapiens
  misc_RNA (1)...(19): siRNA sense strand
uuaugaugguuccaaggua

SEQ ID NO: 1402351 - RNA, 19 nt, Homo sapiens
  misc_RNA (1)...(19): siRNA sense strand
cauaaaaguugauggagau

SEQ ID NO: 1402352 - RNA, 19 nt, Homo sapiens
  misc_RNA (1)...(19): siRNA sense strand
cagcuaguuggauucuuua

SEQ ID NO: 1402353 - RNA, 19 nt, Homo sapiens
  misc_RNA (1)...(19): siRNA sense strand
ccgcuguguuucugacauu

SEQ ID NO: 1402354 - RNA, 19 nt, Homo sapiens
  misc_RNA (1)...(19): siRNA sense strand
cagauggcagggcuccuua

SEQ ID NO: 1402355 - RNA, 19 nt, Homo sapiens
  misc_RNA (1)...(19): siRNA sense strand
cuguggagcucccugaugu

SEQ ID NO: 1402356 - RNA, 19 nt, Homo sapiens
  misc_RNA (1)...(19): siRNA sense strand
ccgccaagguccugcuuca

SEQ ID NO: 1402357 - RNA, 19 nt, Homo sapiens
  misc_RNA (1)...(19): siRNA sense strand
ggagugggacaccuucauc

SEQ ID NO: 1402358 - RNA, 19 nt, Homo sapiens
  misc_RNA (1)...(19): siRNA sense strand
gaccuguuucccuagcuua

SEQ ID NO: 1402359 - RNA, 19 nt, Homo sapiens
  misc_RNA (1)...(19): siRNA sense strand
guccagauuaucccuguuu

SEQ ID NO: 1402360 - RNA, 19 nt, Homo sapiens
  misc_RNA (1)...(19): siRNA sense strand
cuggcugcauccucuauaa

SEQ ID NO: 1402361 - RNA, 19 nt, Homo sapiens
  misc_RNA (1)...(19): siRNA sense strand
guugauggagauuaccuuu

SEQ ID NO: 1402362 - RNA, 19 nt, Homo sapiens
  misc_RNA (1)...(19): siRNA sense strand
acacagccaucagcagcuu

SEQ ID NO: 1402363 - RNA, 19 nt, Homo sapiens
  misc_RNA (1)...(19): siRNA sense strand
cuguuucccuagcuuauga

SEQ ID NO: 1402364 - RNA, 19 nt, Homo sapiens
  misc_RNA (1)...(19): siRNA sense strand
gcuaguuggauucuuuaau

SEQ ID NO: 1402365 - RNA, 19 nt, Homo sapiens
  misc_RNA (1)...(19): siRNA sense strand
acaugugccuguuccagau

SEQ ID NO: 1402366 - RNA, 19 nt, Homo sapiens
  misc_RNA (1)...(19): siRNA sense strand
gaaggaacuagucuuucuc

SEQ ID NO: 1402367 - RNA, 19 nt, Homo sapiens
  misc_RNA (1)...(19): siRNA sense strand
gaugacaaggucucuagca

SEQ ID NO: 1402368 - RNA, 19 nt, Homo sapiens
  misc_RNA (1)...(19): siRNA sense strand
cagaugacaaggucucuag

SEQ ID NO: 1402369 - RNA, 19 nt, Homo sapiens
  misc_RNA (1)...(19): siRNA sense strand
gcaggacuccaggaugguu

SEQ ID NO: 1402370 - RNA, 19 nt, Homo sapiens
  misc_RNA (1)...(19): siRNA sense strand
ugacucuccuccuacucuu

SEQ ID NO: 1402371 - RNA, 19 nt, Homo sapiens
  misc_RNA (1)...(19): siRNA sense strand
gcugcauccucuauaaagg

SEQ ID NO: 1402372 - RNA, 19 nt, Homo sapiens
  misc_RNA (1)...(19): siRNA sense strand
gcgcucgccucacauucuc

SEQ ID NO: 1402373 - RNA, 19 nt, Homo sapiens
  misc_RNA (1)...(19): siRNA sense strand
cagcccagcaccauccaaa

SEQ ID NO: 1402374 - RNA, 19 nt, Homo sapiens
  misc_RNA (1)...(19): siRNA sense strand
ggacaccuucaucgagcaa

SEQ ID NO: 1402375 - RNA, 19 nt, Homo sapiens
  misc_RNA (1)...(19): siRNA sense strand
gcuggcugcauccucuaua

SEQ ID NO: 1402376 - RNA, 19 nt, Homo sapiens
  misc_RNA (1)...(19): siRNA sense strand
acaccagugaucugcauaa

SEQ ID NO: 1402377 - RNA, 19 nt, Homo sapiens
  misc_RNA (1)...(19): siRNA sense strand
caucgagcaaauucugaaa

SEQ ID NO: 1402378 - RNA, 19 nt, Homo sapiens
  misc_RNA (1)...(19): siRNA sense strand
uccagaggcucaggaagug

SEQ ID NO: 1402379 - RNA, 19 nt, Homo sapiens
  misc_RNA (1)...(19): siRNA sense strand
gggaaggaacuagucuuuc

SEQ ID NO: 1402380 - RNA, 19 nt, Homo sapiens
  misc_RNA (1)...(19): siRNA sense strand
gaguugcuuuguggacaga

SEQ ID NO: 1402381 - RNA, 19 nt, Homo sapiens
  misc_RNA (1)...(19): siRNA sense strand
guugcuuuguggacagauu

SEQ ID NO: 1402382 - RNA, 19 nt, Homo sapiens
  misc_RNA (1)...(19): siRNA sense strand
acaccuucaucgagcaaau

SEQ ID NO: 1402383 - RNA, 19 nt, Homo sapiens
  misc_RNA (1)...(19): siRNA sense strand
aaagaggaagccauuaguc

SEQ ID NO: 1402384 - RNA, 19 nt, Homo sapiens
  misc_RNA (1)...(19): siRNA sense strand
gaaggcgauccaacaagag

SEQ ID NO: 1402385 - RNA, 19 nt, Homo sapiens
  misc_RNA (1)...(19): siRNA sense strand
gguccugcuucaccgaaca

SEQ ID NO: 1402386 - RNA, 19 nt, Homo sapiens
  misc_RNA (1)...(19): siRNA sense strand
ggaguuguccgcuguguuu

SEQ ID NO: 1402387 - RNA, 19 nt, Homo sapiens
  misc_RNA (1)...(19): siRNA sense strand
caagagcuggcauuuguua

SEQ ID NO: 1402388 - RNA, 19 nt, Homo sapiens
  misc_RNA (1)...(19): siRNA sense strand
gaagaaggcgauccaacaa

SEQ ID NO: 1402389 - RNA, 19 nt, Homo sapiens
  misc_RNA (1)...(19): siRNA sense strand
ggaagaaggcgauccaaca

SEQ ID NO: 1402390 - RNA, 19 nt, Homo sapiens
  misc_RNA (1)...(19): siRNA sense strand
ucagcuaguuggauucuuu

SEQ ID NO: 1402391 - RNA, 19 nt, Homo sapiens
  misc_RNA (1)...(19): siRNA sense strand
gcaagcgguuucuggauca

SEQ ID NO: 1402392 - RNA, 19 nt, Homo sapiens
  misc_RNA (1)...(19): siRNA sense strand
uaugaugguuccaagguaa

SEQ ID NO: 1402393 - RNA, 19 nt, Homo sapiens
  misc_RNA (1)...(19): siRNA sense strand
agaaggcgauccaacaaga

SEQ ID NO: 1402394 - RNA, 19 nt, Homo sapiens
  misc_RNA (1)...(19): siRNA sense strand
gagcuggcauuuguuacuu

SEQ ID NO: 1402395 - RNA, 19 nt, Homo sapiens
  misc_RNA (1)...(19): siRNA sense strand
caacaagagcuggcauuug

SEQ ID NO: 1402396 - RNA, 19 nt, Homo sapiens
  misc_RNA (1)...(19): siRNA sense strand
uggaucagcuaguuggauu

SEQ ID NO: 1402397 - RNA, 19 nt, Homo sapiens
  misc_RNA (1)...(19): siRNA sense strand
ggacagauugcuggaguug

SEQ ID NO: 1402398 - RNA, 19 nt, Homo sapiens
  misc_RNA (1)...(19): siRNA sense strand
ugauggagauuaccuuugg

SEQ ID NO: 1402399 - RNA, 19 nt, Homo sapiens
  misc_RNA (1)...(19): siRNA sense strand
ggaccuguuucccuagcuu

SEQ ID NO: 1402400 - RNA, 19 nt, Homo sapiens
  misc_RNA (1)...(19): siRNA sense strand
gcacggagugggacaccuu

SEQ ID NO: 1402401 - RNA, 19 nt, Homo sapiens
  misc_RNA (1)...(19): siRNA sense strand
ccaacaagagcuggcauuu

SEQ ID NO: 1402402 - RNA, 19 nt, Homo sapiens
  misc_RNA (1)...(19): siRNA sense strand
acagauugcuggaguuguc

SEQ ID NO: 1402403 - RNA, 19 nt, Homo sapiens
  misc_RNA (1)...(19): siRNA sense strand
gaaguuugccauaaaaguu

SEQ ID NO: 1402404 - RNA, 19 nt, Homo sapiens
  misc_RNA (1)...(19): siRNA sense strand
aaacaccagugaucugcau

SEQ ID NO: 1402405 - RNA, 19 nt, Homo sapiens
  misc_RNA (1)...(19): siRNA sense strand
uuaugaugguuccaaggua

SEQ ID NO: 1402406 - RNA, 19 nt, Homo sapiens
  misc_RNA (1)...(19): siRNA sense strand
cauaaaaguugauggagau

SEQ ID NO: 1402407 - RNA, 19 nt, Homo sapiens
  misc_RNA (1)...(19): siRNA sense strand
cagcuaguuggauucuuua

SEQ ID NO: 1402408 - RNA, 19 nt, Homo sapiens
  misc_RNA (1)...(19): siRNA sense strand
ccgcuguguuucugacauu

SEQ ID NO: 1402409 - RNA, 19 nt, Homo sapiens
  misc_RNA (1)...(19): siRNA sense strand
cuguggagcucccugaugu

SEQ ID NO: 1402410 - RNA, 19 nt, Homo sapiens
  misc_RNA (1)...(19): siRNA sense strand
ggagugggacaccuucauc

SEQ ID NO: 1402411 - RNA, 19 nt, Homo sapiens
  misc_RNA (1)...(19): siRNA sense strand
gaccuguuucccuagcuua

SEQ ID NO: 1402412 - RNA, 19 nt, Homo sapiens
  misc_RNA (1)...(19): siRNA sense strand
guugauggagauuaccuuu

SEQ ID NO: 1402413 - RNA, 19 nt, Homo sapiens
  misc_RNA (1)...(19): siRNA sense strand
cuguuucccuagcuuauga

SEQ ID NO: 1402414 - RNA, 19 nt, Homo sapiens
  misc_RNA (1)...(19): siRNA sense strand
gcuaguuggauucuuuaau

SEQ ID NO: 1402415 - RNA, 19 nt, Homo sapiens
  misc_RNA (1)...(19): siRNA sense strand
ugacucuccuccuacucuu

SEQ ID NO: 1402416 - RNA, 19 nt, Homo sapiens
  misc_RNA (1)...(19): siRNA sense strand
ggacaccuucaucgagcaa

SEQ ID NO: 1402417 - RNA, 19 nt, Homo sapiens
  misc_RNA (1)...(19): siRNA sense strand
acaccagugaucugcauaa

SEQ ID NO: 1402418 - RNA, 19 nt, Homo sapiens
  misc_RNA (1)...(19): siRNA sense strand
gaguugcuuuguggacaga

SEQ ID NO: 1402419 - RNA, 19 nt, Homo sapiens
  misc_RNA (1)...(19): siRNA sense strand
caucgagcaaauucugaaa

SEQ ID NO: 1402420 - RNA, 19 nt, Homo sapiens
  misc_RNA (1)...(19): siRNA sense strand
guugcuuuguggacagauu

SEQ ID NO: 1402421 - RNA, 19 nt, Homo sapiens
  misc_RNA (1)...(19): siRNA sense strand
gaaggcgauccaacaagag

SEQ ID NO: 1402422 - RNA, 19 nt, Homo sapiens
  misc_RNA (1)...(19): siRNA sense strand
acaccuucaucgagcaaau

SEQ ID NO: 1402423 - RNA, 19 nt, Homo sapiens
  misc_RNA (1)...(19): siRNA sense strand
gaacucgacuugucugaaa

SEQ ID NO: 1402424 - RNA, 19 nt, Homo sapiens
  misc_RNA (1)...(19): siRNA sense strand
gagcacaucugcccugaaa

SEQ ID NO: 1402425 - RNA, 19 nt, Homo sapiens
  misc_RNA (1)...(19): siRNA sense strand
ggaaggaacuagucuuucu

SEQ ID NO: 1402426 - RNA, 19 nt, Homo sapiens
  misc_RNA (1)...(19): siRNA sense strand
ugacgaagcuuguccagau

SEQ ID NO: 1402427 - RNA, 19 nt, Homo sapiens
  misc_RNA (1)...(19): siRNA sense strand
ggaguuguccgcuguguuu

SEQ ID NO: 1402428 - RNA, 19 nt, Homo sapiens
  misc_RNA (1)...(19): siRNA sense strand
caagagcuggcauuuguua

SEQ ID NO: 1402429 - RNA, 19 nt, Homo sapiens
  misc_RNA (1)...(19): siRNA sense strand
gcacaucugcccugaaaga

SEQ ID NO: 1402430 - RNA, 19 nt, Homo sapiens
  misc_RNA (1)...(19): siRNA sense strand
gaagaaggcgauccaacaa

SEQ ID NO: 1402431 - RNA, 19 nt, Homo sapiens
  misc_RNA (1)...(19): siRNA sense strand
ggaagaaggcgauccaaca

SEQ ID NO: 1402432 - RNA, 19 nt, Homo sapiens
  misc_RNA (1)...(19): siRNA sense strand
ucagcuaguuggauucuuu

SEQ ID NO: 1402433 - RNA, 19 nt, Homo sapiens
  misc_RNA (1)...(19): siRNA sense strand
gacaaggucucuagcaucu

SEQ ID NO: 1402434 - RNA, 19 nt, Homo sapiens
  misc_RNA (1)...(19): siRNA sense strand
gcaagcgguuucuggauca

SEQ ID NO: 1402435 - RNA, 19 nt, Homo sapiens
  misc_RNA (1)...(19): siRNA sense strand
agaaggcgauccaacaaga

SEQ ID NO: 1402436 - RNA, 19 nt, Homo sapiens
  misc_RNA (1)...(19): siRNA sense strand
ggaaauggccucaggucau

SEQ ID NO: 1402437 - RNA, 19 nt, Homo sapiens
  misc_RNA (1)...(19): siRNA sense strand
uaugaugguuccaagguaa

SEQ ID NO: 1402438 - RNA, 19 nt, Homo sapiens
  misc_RNA (1)...(19): siRNA sense strand
gaccaaagaggaagccauu

SEQ ID NO: 1402439 - RNA, 19 nt, Homo sapiens
  misc_RNA (1)...(19): siRNA sense strand
aagaagaacucgacuuguc

SEQ ID NO: 1402440 - RNA, 19 nt, Homo sapiens
  misc_RNA (1)...(19): siRNA sense strand
gagcuggcauuuguuacuu

SEQ ID NO: 1402441 - RNA, 19 nt, Homo sapiens
  misc_RNA (1)...(19): siRNA sense strand
ggaacuagucuuucuccaa

SEQ ID NO: 1402442 - RNA, 19 nt, Homo sapiens
  misc_RNA (1)...(19): siRNA sense strand
ccauuagucuccacgaguu

SEQ ID NO: 1402443 - RNA, 19 nt, Homo sapiens
  misc_RNA (1)...(19): siRNA sense strand
gaaggcagcccgcauucug

SEQ ID NO: 1402444 - RNA, 19 nt, Homo sapiens
  misc_RNA (1)...(19): siRNA sense strand
caacaagagcuggcauuug

SEQ ID NO: 1402445 - RNA, 19 nt, Homo sapiens
  misc_RNA (1)...(19): siRNA sense strand
uauaaaggacugauuguca

SEQ ID NO: 1402446 - RNA, 19 nt, Homo sapiens
  misc_RNA (1)...(19): siRNA sense strand
uggaucagcuaguuggauu

SEQ ID NO: 1402447 - RNA, 19 nt, Homo sapiens
  misc_RNA (1)...(19): siRNA sense strand
gccaugaucuggagagcau

SEQ ID NO: 1402448 - RNA, 19 nt, Homo sapiens
  misc_RNA (1)...(19): siRNA sense strand
ggacagauugcuggaguug

SEQ ID NO: 1402449 - RNA, 19 nt, Homo sapiens
  misc_RNA (1)...(19): siRNA sense strand
ugauggagauuaccuuugg

SEQ ID NO: 1402450 - RNA, 19 nt, Homo sapiens
  misc_RNA (1)...(19): siRNA sense strand
ggaccuguuucccuagcuu

SEQ ID NO: 1402451 - RNA, 19 nt, Homo sapiens
  misc_RNA (1)...(19): siRNA sense strand
ccaaagaggaagccauuag

SEQ ID NO: 1402452 - RNA, 19 nt, Homo sapiens
  misc_RNA (1)...(19): siRNA sense strand
gacgaagcuuguccagaug

SEQ ID NO: 1402453 - RNA, 19 nt, Homo sapiens
  misc_RNA (1)...(19): siRNA sense strand
gcacggagugggacaccuu

SEQ ID NO: 1402454 - RNA, 19 nt, Homo sapiens
  misc_RNA (1)...(19): siRNA sense strand
ggaaggagaacggaugcuu

SEQ ID NO: 1402455 - RNA, 19 nt, Homo sapiens
  misc_RNA (1)...(19): siRNA sense strand
acagauugcuggaguuguc

SEQ ID NO: 1402456 - RNA, 19 nt, Homo sapiens
  misc_RNA (1)...(19): siRNA sense strand
ggagaacggaugcuugucu

SEQ ID NO: 1402457 - RNA, 19 nt, Homo sapiens
  misc_RNA (1)...(19): siRNA sense strand
caucugcccugaaagaaaa

SEQ ID NO: 1402458 - RNA, 19 nt, Homo sapiens
  misc_RNA (1)...(19): siRNA sense strand
ccaacaagagcuggcauuu

SEQ ID NO: 1402459 - RNA, 19 nt, Homo sapiens
  misc_RNA (1)...(19): siRNA sense strand
caaagaggaagccauuagu

SEQ ID NO: 1402460 - RNA, 19 nt, Homo sapiens
  misc_RNA (1)...(19): siRNA sense strand
gaaguuugccauaaaaguu

SEQ ID NO: 1402461 - RNA, 19 nt, Homo sapiens
  misc_RNA (1)...(19): siRNA sense strand
gaagaccauccuggccaua

SEQ ID NO: 1402462 - RNA, 19 nt, Homo sapiens
  misc_RNA (1)...(19): siRNA sense strand
aaacaccagugaucugcau

SEQ ID NO: 1402463 - RNA, 19 nt, Homo sapiens
  misc_RNA (1)...(19): siRNA sense strand
uuaugaugguuccaaggua

SEQ ID NO: 1402464 - RNA, 19 nt, Homo sapiens
  misc_RNA (1)...(19): siRNA sense strand
cauaaaaguugauggagau

SEQ ID NO: 1402465 - RNA, 19 nt, Homo sapiens
  misc_RNA (1)...(19): siRNA sense strand
cagcuaguuggauucuuua

SEQ ID NO: 1402466 - RNA, 19 nt, Homo sapiens
  misc_RNA (1)...(19): siRNA sense strand
ccgcuguguuucugacauu

SEQ ID NO: 1402467 - RNA, 19 nt, Homo sapiens
  misc_RNA (1)...(19): siRNA sense strand
cagauggcagggcuccuua

SEQ ID NO: 1402468 - RNA, 19 nt, Homo sapiens
  misc_RNA (1)...(19): siRNA sense strand
cuguggagcucccugaugu

SEQ ID NO: 1402469 - RNA, 19 nt, Homo sapiens
  misc_RNA (1)...(19): siRNA sense strand
ccgccaagguccugcuuca

SEQ ID NO: 1402470 - RNA, 19 nt, Homo sapiens
  misc_RNA (1)...(19): siRNA sense strand
ggagugggacaccuucauc

SEQ ID NO: 1402471 - RNA, 19 nt, Homo sapiens
  misc_RNA (1)...(19): siRNA sense strand
gaccuguuucccuagcuua

SEQ ID NO: 1402472 - RNA, 19 nt, Homo sapiens
  misc_RNA (1)...(19): siRNA sense strand
guccagauuaucccuguuu

SEQ ID NO: 1402473 - RNA, 19 nt, Homo sapiens
  misc_RNA (1)...(19): siRNA sense strand
cuggcugcauccucuauaa

SEQ ID NO: 1402474 - RNA, 19 nt, Homo sapiens
  misc_RNA (1)...(19): siRNA sense strand
guugauggagauuaccuuu

SEQ ID NO: 1402475 - RNA, 19 nt, Homo sapiens
  misc_RNA (1)...(19): siRNA sense strand
acacagccaucagcagcuu

SEQ ID NO: 1402476 - RNA, 19 nt, Homo sapiens
  misc_RNA (1)...(19): siRNA sense strand
cuguuucccuagcuuauga

SEQ ID NO: 1402477 - RNA, 19 nt, Homo sapiens
  misc_RNA (1)...(19): siRNA sense strand
gcuaguuggauucuuuaau

SEQ ID NO: 1402478 - RNA, 19 nt, Homo sapiens
  misc_RNA (1)...(19): siRNA sense strand
acaugugccuguuccagau

SEQ ID NO: 1402479 - RNA, 19 nt, Homo sapiens
  misc_RNA (1)...(19): siRNA sense strand
gaaggaacuagucuuucuc

SEQ ID NO: 1402480 - RNA, 19 nt, Homo sapiens
  misc_RNA (1)...(19): siRNA sense strand
gaugacaaggucucuagca

SEQ ID NO: 1402481 - RNA, 19 nt, Homo sapiens
  misc_RNA (1)...(19): siRNA sense strand
cagaugacaaggucucuag

SEQ ID NO: 1402482 - RNA, 19 nt, Homo sapiens
  misc_RNA (1)...(19): siRNA sense strand
gcaggacuccaggaugguu

SEQ ID NO: 1402483 - RNA, 19 nt, Homo sapiens
  misc_RNA (1)...(19): siRNA sense strand
ugacucuccuccuacucuu

SEQ ID NO: 1402484 - RNA, 19 nt, Homo sapiens
  misc_RNA (1)...(19): siRNA sense strand
gcugcauccucuauaaagg

SEQ ID NO: 1402485 - RNA, 19 nt, Homo sapiens
  misc_RNA (1)...(19): siRNA sense strand
gcgcucgccucacauucuc

SEQ ID NO: 1402486 - RNA, 19 nt, Homo sapiens
  misc_RNA (1)...(19): siRNA sense strand
cagcccagcaccauccaaa

SEQ ID NO: 1402487 - RNA, 19 nt, Homo sapiens
  misc_RNA (1)...(19): siRNA sense strand
ggacaccuucaucgagcaa

SEQ ID NO: 1402488 - RNA, 19 nt, Homo sapiens
  misc_RNA (1)...(19): siRNA sense strand
gcuggcugcauccucuaua

SEQ ID NO: 1402489 - RNA, 19 nt, Homo sapiens
  misc_RNA (1)...(19): siRNA sense strand
acaccagugaucugcauaa

SEQ ID NO: 1402490 - RNA, 19 nt, Homo sapiens
  misc_RNA (1)...(19): siRNA sense strand
caucgagcaaauucugaaa

SEQ ID NO: 1402491 - RNA, 19 nt, Homo sapiens
  misc_RNA (1)...(19): siRNA sense strand
uccagaggcucaggaagug

SEQ ID NO: 1402492 - RNA, 19 nt, Homo sapiens
  misc_RNA (1)...(19): siRNA sense strand
gggaaggaacuagucuuuc

SEQ ID NO: 1402493 - RNA, 19 nt, Homo sapiens
  misc_RNA (1)...(19): siRNA sense strand
gaguugcuuuguggacaga

SEQ ID NO: 1402494 - RNA, 19 nt, Homo sapiens
  misc_RNA (1)...(19): siRNA sense strand
guugcuuuguggacagauu

SEQ ID NO: 1402495 - RNA, 19 nt, Homo sapiens
  misc_RNA (1)...(19): siRNA sense strand
acaccuucaucgagcaaau

SEQ ID NO: 1402496 - RNA, 19 nt, Homo sapiens
  misc_RNA (1)...(19): siRNA sense strand
aaagaggaagccauuaguc

SEQ ID NO: 1402497 - RNA, 19 nt, Homo sapiens
  misc_RNA (1)...(19): siRNA sense strand
gaaggcgauccaacaagag

SEQ ID NO: 1402498 - RNA, 19 nt, Homo sapiens
  misc_RNA (1)...(19): siRNA sense strand
gguccugcuucaccgaaca

SEQ ID NO: 1402499 - RNA, 19 nt, Homo sapiens
  misc_RNA (1)...(19): siRNA sense strand
ggaguuguccgcuguguuu

SEQ ID NO: 1402500 - RNA, 19 nt, Homo sapiens
  misc_RNA (1)...(19): siRNA sense strand
caagagcuggcauuuguua

SEQ ID NO: 1402501 - RNA, 19 nt, Homo sapiens
  misc_RNA (1)...(19): siRNA sense strand
gaagaaggcgauccaacaa

SEQ ID NO: 1402502 - RNA, 19 nt, Homo sapiens
  misc_RNA (1)...(19): siRNA sense strand
ggaagaaggcgauccaaca

SEQ ID NO: 1402503 - RNA, 19 nt, Homo sapiens
  misc_RNA (1)...(19): siRNA sense strand
ucagcuaguuggauucuuu

SEQ ID NO: 1402504 - RNA, 19 nt, Homo sapiens
  misc_RNA (1)...(19): siRNA sense strand
gcaagcgguuucuggauca

SEQ ID NO: 1402505 - RNA, 19 nt, Homo sapiens
  misc_RNA (1)...(19): siRNA sense strand
uaugaugguuccaagguaa

SEQ ID NO: 1402506 - RNA, 19 nt, Homo sapiens
  misc_RNA (1)...(19): siRNA sense strand
agaaggcgauccaacaaga

SEQ ID NO: 1402507 - RNA, 19 nt, Homo sapiens
  misc_RNA (1)...(19): siRNA sense strand
gagcuggcauuuguuacuu

SEQ ID NO: 1402508 - RNA, 19 nt, Homo sapiens
  misc_RNA (1)...(19): siRNA sense strand
gaaggcagcccgcauucug

SEQ ID NO: 1402509 - RNA, 19 nt, Homo sapiens
  misc_RNA (1)...(19): siRNA sense strand
caacaagagcuggcauuug

SEQ ID NO: 1402510 - RNA, 19 nt, Homo sapiens
  misc_RNA (1)...(19): siRNA sense strand
uauaaaggacugauuguca

SEQ ID NO: 1402511 - RNA, 19 nt, Homo sapiens
  misc_RNA (1)...(19): siRNA sense strand
uggaucagcuaguuggauu

SEQ ID NO: 1402512 - RNA, 19 nt, Homo sapiens
  misc_RNA (1)...(19): siRNA sense strand
ggacagauugcuggaguug

SEQ ID NO: 1402513 - RNA, 19 nt, Homo sapiens
  misc_RNA (1)...(19): siRNA sense strand
ugauggagauuaccuuugg

SEQ ID NO: 1402514 - RNA, 19 nt, Homo sapiens
  misc_RNA (1)...(19): siRNA sense strand
ggaccuguuucccuagcuu

SEQ ID NO: 1402515 - RNA, 19 nt, Homo sapiens
  misc_RNA (1)...(19): siRNA sense strand
gcacggagugggacaccuu

SEQ ID NO: 1402516 - RNA, 19 nt, Homo sapiens
  misc_RNA (1)...(19): siRNA sense strand
ccaacaagagcuggcauuu

SEQ ID NO: 1402517 - RNA, 19 nt, Homo sapiens
  misc_RNA (1)...(19): siRNA sense strand
acagauugcuggaguuguc

SEQ ID NO: 1402518 - RNA, 19 nt, Homo sapiens
  misc_RNA (1)...(19): siRNA sense strand
gaaguuugccauaaaaguu

SEQ ID NO: 1402519 - RNA, 19 nt, Homo sapiens
  misc_RNA (1)...(19): siRNA sense strand
aaacaccagugaucugcau

SEQ ID NO: 1402520 - RNA, 19 nt, Homo sapiens
  misc_RNA (1)...(19): siRNA sense strand
uuaugaugguuccaaggua

SEQ ID NO: 1402521 - RNA, 19 nt, Homo sapiens
  misc_RNA (1)...(19): siRNA sense strand
cauaaaaguugauggagau

SEQ ID NO: 1402522 - RNA, 19 nt, Homo sapiens
  misc_RNA (1)...(19): siRNA sense strand
cagcuaguuggauucuuua

SEQ ID NO: 1402523 - RNA, 19 nt, Homo sapiens
  misc_RNA (1)...(19): siRNA sense strand
ccgcuguguuucugacauu

SEQ ID NO: 1402524 - RNA, 19 nt, Homo sapiens
  misc_RNA (1)...(19): siRNA sense strand
cuguggagcucccugaugu

SEQ ID NO: 1402525 - RNA, 19 nt, Homo sapiens
  misc_RNA (1)...(19): siRNA sense strand
ccgccaagguccugcuuca

SEQ ID NO: 1402526 - RNA, 19 nt, Homo sapiens
  misc_RNA (1)...(19): siRNA sense strand
ggagugggacaccuucauc

SEQ ID NO: 1402527 - RNA, 19 nt, Homo sapiens
  misc_RNA (1)...(19): siRNA sense strand
gaccuguuucccuagcuua

SEQ ID NO: 1402528 - RNA, 19 nt, Homo sapiens
  misc_RNA (1)...(19): siRNA sense strand
cuggcugcauccucuauaa

SEQ ID NO: 1402529 - RNA, 19 nt, Homo sapiens
  misc_RNA (1)...(19): siRNA sense strand
guugauggagauuaccuuu

SEQ ID NO: 1402530 - RNA, 19 nt, Homo sapiens
  misc_RNA (1)...(19): siRNA sense strand
cuguuucccuagcuuauga

SEQ ID NO: 1402531 - RNA, 19 nt, Homo sapiens
  misc_RNA (1)...(19): siRNA sense strand
gcuaguuggauucuuuaau

SEQ ID NO: 1402532 - RNA, 19 nt, Homo sapiens
  misc_RNA (1)...(19): siRNA sense strand
ugacucuccuccuacucuu

SEQ ID NO: 1402533 - RNA, 19 nt, Homo sapiens
  misc_RNA (1)...(19): siRNA sense strand
gcugcauccucuauaaagg

SEQ ID NO: 1402534 - RNA, 19 nt, Homo sapiens
  misc_RNA (1)...(19): siRNA sense strand
gcgcucgccucacauucuc

SEQ ID NO: 1402535 - RNA, 19 nt, Homo sapiens
  misc_RNA (1)...(19): siRNA sense strand
ggacaccuucaucgagcaa

SEQ ID NO: 1402536 - RNA, 19 nt, Homo sapiens
  misc_RNA (1)...(19): siRNA sense strand
gcuggcugcauccucuaua

SEQ ID NO: 1402537 - RNA, 19 nt, Homo sapiens
  misc_RNA (1)...(19): siRNA sense strand
acaccagugaucugcauaa

SEQ ID NO: 1402538 - RNA, 19 nt, Homo sapiens
  misc_RNA (1)...(19): siRNA sense strand
guugcuuuguggacagauu

SEQ ID NO: 1402539 - RNA, 19 nt, Homo sapiens
  misc_RNA (1)...(19): siRNA sense strand
gaguugcuuuguggacaga

SEQ ID NO: 1402540 - RNA, 19 nt, Homo sapiens
  misc_RNA (1)...(19): siRNA sense strand
caucgagcaaauucugaaa

SEQ ID NO: 1402541 - RNA, 19 nt, Homo sapiens
  misc_RNA (1)...(19): siRNA sense strand
gaaggcgauccaacaagag

SEQ ID NO: 1402542 - RNA, 19 nt, Homo sapiens
  misc_RNA (1)...(19): siRNA sense strand
gguccugcuucaccgaaca

SEQ ID NO: 1402543 - RNA, 19 nt, Homo sapiens
  misc_RNA (1)...(19): siRNA sense strand
acaccuucaucgagcaaau

SEQ ID NO: 1402544 - RNA, 19 nt, Homo sapiens
  misc_RNA (1)...(19): siRNA sense strand
gaacucgacuugucugaaa

SEQ ID NO: 1402545 - RNA, 19 nt, Homo sapiens
  misc_RNA (1)...(19): siRNA sense strand
gagcacaucugcccugaaa

SEQ ID NO: 1402546 - RNA, 19 nt, Homo sapiens
  misc_RNA (1)...(19): siRNA sense strand
ggaaggaacuagucuuucu

SEQ ID NO: 1402547 - RNA, 19 nt, Homo sapiens
  misc_RNA (1)...(19): siRNA sense strand
ugacgaagcuuguccagau

SEQ ID NO: 1402548 - RNA, 19 nt, Homo sapiens
  misc_RNA (1)...(19): siRNA sense strand
gagacagacugcaggauga

SEQ ID NO: 1402549 - RNA, 19 nt, Homo sapiens
  misc_RNA (1)...(19): siRNA sense strand
ggaguuguccgcuguguuu

SEQ ID NO: 1402550 - RNA, 19 nt, Homo sapiens
  misc_RNA (1)...(19): siRNA sense strand
caagagcuggcauuuguua

SEQ ID NO: 1402551 - RNA, 19 nt, Homo sapiens
  misc_RNA (1)...(19): siRNA sense strand
gcacaucugcccugaaaga

SEQ ID NO: 1402552 - RNA, 19 nt, Homo sapiens
  misc_RNA (1)...(19): siRNA sense strand
gaagaaggcgauccaacaa

SEQ ID NO: 1402553 - RNA, 19 nt, Homo sapiens
  misc_RNA (1)...(19): siRNA sense strand
ggaagaaggcgauccaaca

SEQ ID NO: 1402554 - RNA, 19 nt, Homo sapiens
  misc_RNA (1)...(19): siRNA sense strand
ucagcuaguuggauucuuu

SEQ ID NO: 1402555 - RNA, 19 nt, Homo sapiens
  misc_RNA (1)...(19): siRNA sense strand
ccucaguucuauuacguua

SEQ ID NO: 1402556 - RNA, 19 nt, Homo sapiens
  misc_RNA (1)...(19): siRNA sense strand
gacaaggucucuagcaucu

SEQ ID NO: 1402557 - RNA, 19 nt, Homo sapiens
  misc_RNA (1)...(19): siRNA sense strand
gcaagcgguuucuggauca

SEQ ID NO: 1402558 - RNA, 19 nt, Homo sapiens
  misc_RNA (1)...(19): siRNA sense strand
agaaggcgauccaacaaga

SEQ ID NO: 1402559 - RNA, 19 nt, Homo sapiens
  misc_RNA (1)...(19): siRNA sense strand
uaugaugguuccaagguaa

SEQ ID NO: 1402560 - RNA, 19 nt, Homo sapiens
  misc_RNA (1)...(19): siRNA sense strand
ggaaauggccucaggucau

SEQ ID NO: 1402561 - RNA, 19 nt, Homo sapiens
  misc_RNA (1)...(19): siRNA sense strand
gaccaaagaggaagccauu

SEQ ID NO: 1402562 - RNA, 19 nt, Homo sapiens
  misc_RNA (1)...(19): siRNA sense strand
aagaagaacucgacuuguc

SEQ ID NO: 1402563 - RNA, 19 nt, Homo sapiens
  misc_RNA (1)...(19): siRNA sense strand
gagcuggcauuuguuacuu

SEQ ID NO: 1402564 - RNA, 19 nt, Homo sapiens
  misc_RNA (1)...(19): siRNA sense strand
ggaacuagucuuucuccaa

SEQ ID NO: 1402565 - RNA, 19 nt, Homo sapiens
  misc_RNA (1)...(19): siRNA sense strand
ccauuagucuccacgaguu

SEQ ID NO: 1402566 - RNA, 19 nt, Homo sapiens
  misc_RNA (1)...(19): siRNA sense strand
gaaggcagcccgcauucug

SEQ ID NO: 1402567 - RNA, 19 nt, Homo sapiens
  misc_RNA (1)...(19): siRNA sense strand
uauaaaggacugauuguca

SEQ ID NO: 1402568 - RNA, 19 nt, Homo sapiens
  misc_RNA (1)...(19): siRNA sense strand
caacaagagcuggcauuug

SEQ ID NO: 1402569 - RNA, 19 nt, Homo sapiens
  misc_RNA (1)...(19): siRNA sense strand
uggaucagcuaguuggauu

SEQ ID NO: 1402570 - RNA, 19 nt, Homo sapiens
  misc_RNA (1)...(19): siRNA sense strand
gccaugaucuggagagcau

SEQ ID NO: 1402571 - RNA, 19 nt, Homo sapiens
  misc_RNA (1)...(19): siRNA sense strand
ggacagauugcuggaguug

SEQ ID NO: 1402572 - RNA, 19 nt, Homo sapiens
  misc_RNA (1)...(19): siRNA sense strand
ugauggagauuaccuuugg

SEQ ID NO: 1402573 - RNA, 19 nt, Homo sapiens
  misc_RNA (1)...(19): siRNA sense strand
ggaccuguuucccuagcuu

SEQ ID NO: 1402574 - RNA, 19 nt, Homo sapiens
  misc_RNA (1)...(19): siRNA sense strand
ccaaagaggaagccauuag

SEQ ID NO: 1402575 - RNA, 19 nt, Homo sapiens
  misc_RNA (1)...(19): siRNA sense strand
gggcuugugugguacuuag

SEQ ID NO: 1402576 - RNA, 19 nt, Homo sapiens
  misc_RNA (1)...(19): siRNA sense strand
gacgaagcuuguccagaug

SEQ ID NO: 1402577 - RNA, 19 nt, Homo sapiens
  misc_RNA (1)...(19): siRNA sense strand
gcacggagugggacaccuu

SEQ ID NO: 1402578 - RNA, 19 nt, Homo sapiens
  misc_RNA (1)...(19): siRNA sense strand
uuccugggcuuguguggua

SEQ ID NO: 1402579 - RNA, 19 nt, Homo sapiens
  misc_RNA (1)...(19): siRNA sense strand
ggaaggagaacggaugcuu

SEQ ID NO: 1402580 - RNA, 19 nt, Homo sapiens
  misc_RNA (1)...(19): siRNA sense strand
acagauugcuggaguuguc

SEQ ID NO: 1402581 - RNA, 19 nt, Homo sapiens
  misc_RNA (1)...(19): siRNA sense strand
ggagaacggaugcuugucu

SEQ ID NO: 1402582 - RNA, 19 nt, Homo sapiens
  misc_RNA (1)...(19): siRNA sense strand
caucugcccugaaagaaaa

SEQ ID NO: 1402583 - RNA, 19 nt, Homo sapiens
  misc_RNA (1)...(19): siRNA sense strand
caaagaggaagccauuagu

SEQ ID NO: 1402584 - RNA, 19 nt, Homo sapiens
  misc_RNA (1)...(19): siRNA sense strand
ccaacaagagcuggcauuu

SEQ ID NO: 1402585 - RNA, 19 nt, Homo sapiens
  misc_RNA (1)...(19): siRNA sense strand
gaaguuugccauaaaaguu

SEQ ID NO: 1402586 - RNA, 19 nt, Homo sapiens
  misc_RNA (1)...(19): siRNA sense strand
ugaaagggagcgacacuca

SEQ ID NO: 1402587 - RNA, 19 nt, Homo sapiens
  misc_RNA (1)...(19): siRNA sense strand
gaagaccauccuggccaua

SEQ ID NO: 1402588 - RNA, 19 nt, Homo sapiens
  misc_RNA (1)...(19): siRNA sense strand
aaacaccagugaucugcau

SEQ ID NO: 1402589 - RNA, 19 nt, Homo sapiens
  misc_RNA (1)...(19): siRNA sense strand
uuaugaugguuccaaggua

SEQ ID NO: 1402590 - RNA, 19 nt, Homo sapiens
  misc_RNA (1)...(19): siRNA sense strand
cauaaaaguugauggagau

SEQ ID NO: 1402591 - RNA, 19 nt, Homo sapiens
  misc_RNA (1)...(19): siRNA sense strand
cagcuaguuggauucuuua

SEQ ID NO: 1402592 - RNA, 19 nt, Homo sapiens
  misc_RNA (1)...(19): siRNA sense strand
ccgcuguguuucugacauu

SEQ ID NO: 1402593 - RNA, 19 nt, Homo sapiens
  misc_RNA (1)...(19): siRNA sense strand
cagauggcagggcuccuua

SEQ ID NO: 1402594 - RNA, 19 nt, Homo sapiens
  misc_RNA (1)...(19): siRNA sense strand
cuguggagcucccugaugu

SEQ ID NO: 1402595 - RNA, 19 nt, Homo sapiens
  misc_RNA (1)...(19): siRNA sense strand
ccgccaagguccugcuuca

SEQ ID NO: 1402596 - RNA, 19 nt, Homo sapiens
  misc_RNA (1)...(19): siRNA sense strand
ggagugggacaccuucauc

SEQ ID NO: 1402597 - RNA, 19 nt, Homo sapiens
  misc_RNA (1)...(19): siRNA sense strand
gaccuguuucccuagcuua

SEQ ID NO: 1402598 - RNA, 19 nt, Homo sapiens
  misc_RNA (1)...(19): siRNA sense strand
guccagauuaucccuguuu

SEQ ID NO: 1402599 - RNA, 19 nt, Homo sapiens
  misc_RNA (1)...(19): siRNA sense strand
cuggcugcauccucuauaa

SEQ ID NO: 1402600 - RNA, 19 nt, Homo sapiens
  misc_RNA (1)...(19): siRNA sense strand
guugauggagauuaccuuu

SEQ ID NO: 1402601 - RNA, 19 nt, Homo sapiens
  misc_RNA (1)...(19): siRNA sense strand
acacagccaucagcagcuu

SEQ ID NO: 1402602 - RNA, 19 nt, Homo sapiens
  misc_RNA (1)...(19): siRNA sense strand
cuguuucccuagcuuauga

SEQ ID NO: 1402603 - RNA, 19 nt, Homo sapiens
  misc_RNA (1)...(19): siRNA sense strand
gcuaguuggauucuuuaau

SEQ ID NO: 1402604 - RNA, 19 nt, Homo sapiens
  misc_RNA (1)...(19): siRNA sense strand
acaugugccuguuccagau

SEQ ID NO: 1402605 - RNA, 19 nt, Homo sapiens
  misc_RNA (1)...(19): siRNA sense strand
gaaggaacuagucuuucuc

SEQ ID NO: 1402606 - RNA, 19 nt, Homo sapiens
  misc_RNA (1)...(19): siRNA sense strand
gaugacaaggucucuagca

SEQ ID NO: 1402607 - RNA, 19 nt, Homo sapiens
  misc_RNA (1)...(19): siRNA sense strand
cagaugacaaggucucuag

SEQ ID NO: 1402608 - RNA, 19 nt, Homo sapiens
  misc_RNA (1)...(19): siRNA sense strand
gcaggacuccaggaugguu

SEQ ID NO: 1402609 - RNA, 19 nt, Homo sapiens
  misc_RNA (1)...(19): siRNA sense strand
ugacucuccuccuacucuu

SEQ ID NO: 1402610 - RNA, 19 nt, Homo sapiens
  misc_RNA (1)...(19): siRNA sense strand
gcugcauccucuauaaagg

SEQ ID NO: 1402611 - RNA, 19 nt, Homo sapiens
  misc_RNA (1)...(19): siRNA sense strand
gcgcucgccucacauucuc

SEQ ID NO: 1402612 - RNA, 19 nt, Homo sapiens
  misc_RNA (1)...(19): siRNA sense strand
cagcccagcaccauccaaa

SEQ ID NO: 1402613 - RNA, 19 nt, Homo sapiens
  misc_RNA (1)...(19): siRNA sense strand
ggacaccuucaucgagcaa

SEQ ID NO: 1402614 - RNA, 19 nt, Homo sapiens
  misc_RNA (1)...(19): siRNA sense strand
gcuggcugcauccucuaua

SEQ ID NO: 1402615 - RNA, 19 nt, Homo sapiens
  misc_RNA (1)...(19): siRNA sense strand
acaccagugaucugcauaa

SEQ ID NO: 1402616 - RNA, 19 nt, Homo sapiens
  misc_RNA (1)...(19): siRNA sense strand
caucgagcaaauucugaaa

SEQ ID NO: 1402617 - RNA, 19 nt, Homo sapiens
  misc_RNA (1)...(19): siRNA sense strand
uccagaggcucaggaagug

SEQ ID NO: 1402618 - RNA, 19 nt, Homo sapiens
  misc_RNA (1)...(19): siRNA sense strand
gggaaggaacuagucuuuc

SEQ ID NO: 1402619 - RNA, 19 nt, Homo sapiens
  misc_RNA (1)...(19): siRNA sense strand
gaguugcuuuguggacaga

SEQ ID NO: 1402620 - RNA, 19 nt, Homo sapiens
  misc_RNA (1)...(19): siRNA sense strand
guugcuuuguggacagauu

SEQ ID NO: 1402621 - RNA, 19 nt, Homo sapiens
  misc_RNA (1)...(19): siRNA sense strand
acaccuucaucgagcaaau

SEQ ID NO: 1402622 - RNA, 19 nt, Homo sapiens
  misc_RNA (1)...(19): siRNA sense strand
gaaggcgauccaacaagag

SEQ ID NO: 1402623 - RNA, 19 nt, Homo sapiens
  misc_RNA (1)...(19): siRNA sense strand
aaagaggaagccauuaguc

SEQ ID NO: 1402624 - RNA, 19 nt, Homo sapiens
  misc_RNA (1)...(19): siRNA sense strand
gguccugcuucaccgaaca

SEQ ID NO: 1402625 - RNA, 19 nt, Homo sapiens
  misc_RNA (1)...(19): siRNA sense strand
gaacucgacuugucugaaa

SEQ ID NO: 1402626 - RNA, 19 nt, Homo sapiens
  misc_RNA (1)...(19): siRNA sense strand
gagcacaucugcccugaaa

SEQ ID NO: 1402627 - RNA, 19 nt, Homo sapiens
  misc_RNA (1)...(19): siRNA sense strand
ggaaggaacuagucuuucu

SEQ ID NO: 1402628 - RNA, 19 nt, Homo sapiens
  misc_RNA (1)...(19): siRNA sense strand
ugacgaagcuuguccagau

SEQ ID NO: 1402629 - RNA, 19 nt, Homo sapiens
  misc_RNA (1)...(19): siRNA sense strand
ggaguuguccgcuguguuu

SEQ ID NO: 1402630 - RNA, 19 nt, Homo sapiens
  misc_RNA (1)...(19): siRNA sense strand
caagagcuggcauuuguua

SEQ ID NO: 1402631 - RNA, 19 nt, Homo sapiens
  misc_RNA (1)...(19): siRNA sense strand
gcacaucugcccugaaaga

SEQ ID NO: 1402632 - RNA, 19 nt, Homo sapiens
  misc_RNA (1)...(19): siRNA sense strand
gaagaaggcgauccaacaa

SEQ ID NO: 1402633 - RNA, 19 nt, Homo sapiens
  misc_RNA (1)...(19): siRNA sense strand
ggaagaaggcgauccaaca

SEQ ID NO: 1402634 - RNA, 19 nt, Homo sapiens
  misc_RNA (1)...(19): siRNA sense strand
ucagcuaguuggauucuuu

SEQ ID NO: 1402635 - RNA, 19 nt, Homo sapiens
  misc_RNA (1)...(19): siRNA sense strand
gacaaggucucuagcaucu

SEQ ID NO: 1402636 - RNA, 19 nt, Homo sapiens
  misc_RNA (1)...(19): siRNA sense strand
gcaagcgguuucuggauca

SEQ ID NO: 1402637 - RNA, 19 nt, Homo sapiens
  misc_RNA (1)...(19): siRNA sense strand
agaaggcgauccaacaaga

SEQ ID NO: 1402638 - RNA, 19 nt, Homo sapiens
  misc_RNA (1)...(19): siRNA sense strand
ggaaauggccucaggucau

SEQ ID NO: 1402639 - RNA, 19 nt, Homo sapiens
  misc_RNA (1)...(19): siRNA sense strand
uaugaugguuccaagguaa

SEQ ID NO: 1402640 - RNA, 19 nt, Homo sapiens
  misc_RNA (1)...(19): siRNA sense strand
gaccaaagaggaagccauu

SEQ ID NO: 1402641 - RNA, 19 nt, Homo sapiens
  misc_RNA (1)...(19): siRNA sense strand
aagaagaacucgacuuguc

SEQ ID NO: 1402642 - RNA, 19 nt, Homo sapiens
  misc_RNA (1)...(19): siRNA sense strand
gagcuggcauuuguuacuu

SEQ ID NO: 1402643 - RNA, 19 nt, Homo sapiens
  misc_RNA (1)...(19): siRNA sense strand
ggaacuagucuuucuccaa

SEQ ID NO: 1402644 - RNA, 19 nt, Homo sapiens
  misc_RNA (1)...(19): siRNA sense strand
ccauuagucuccacgaguu

SEQ ID NO: 1402645 - RNA, 19 nt, Homo sapiens
  misc_RNA (1)...(19): siRNA sense strand
gaaggcagcccgcauucug

SEQ ID NO: 1402646 - RNA, 19 nt, Homo sapiens
  misc_RNA (1)...(19): siRNA sense strand
caacaagagcuggcauuug

SEQ ID NO: 1402647 - RNA, 19 nt, Homo sapiens
  misc_RNA (1)...(19): siRNA sense strand
uauaaaggacugauuguca

SEQ ID NO: 1402648 - RNA, 19 nt, Homo sapiens
  misc_RNA (1)...(19): siRNA sense strand
uggaucagcuaguuggauu

SEQ ID NO: 1402649 - RNA, 19 nt, Homo sapiens
  misc_RNA (1)...(19): siRNA sense strand
gccaugaucuggagagcau

SEQ ID NO: 1402650 - RNA, 19 nt, Homo sapiens
  misc_RNA (1)...(19): siRNA sense strand
ggacagauugcuggaguug

SEQ ID NO: 1402651 - RNA, 19 nt, Homo sapiens
  misc_RNA (1)...(19): siRNA sense strand
ugauggagauuaccuuugg

SEQ ID NO: 1402652 - RNA, 19 nt, Homo sapiens
  misc_RNA (1)...(19): siRNA sense strand
ggaccuguuucccuagcuu

SEQ ID NO: 1402653 - RNA, 19 nt, Homo sapiens
  misc_RNA (1)...(19): siRNA sense strand
ccaaagaggaagccauuag

SEQ ID NO: 1402654 - RNA, 19 nt, Homo sapiens
  misc_RNA (1)...(19): siRNA sense strand
gacgaagcuuguccagaug

SEQ ID NO: 1402655 - RNA, 19 nt, Homo sapiens
  misc_RNA (1)...(19): siRNA sense strand
gcacggagugggacaccuu

SEQ ID NO: 1402656 - RNA, 19 nt, Homo sapiens
  misc_RNA (1)...(19): siRNA sense strand
ggaaggagaacggaugcuu

SEQ ID NO: 1402657 - RNA, 19 nt, Homo sapiens
  misc_RNA (1)...(19): siRNA sense strand
acagauugcuggaguuguc

SEQ ID NO: 1402658 - RNA, 19 nt, Homo sapiens
  misc_RNA (1)...(19): siRNA sense strand
ggagaacggaugcuugucu

SEQ ID NO: 1402659 - RNA, 19 nt, Homo sapiens
  misc_RNA (1)...(19): siRNA sense strand
caucugcccugaaagaaaa

SEQ ID NO: 1402660 - RNA, 19 nt, Homo sapiens
  misc_RNA (1)...(19): siRNA sense strand
ccaacaagagcuggcauuu

SEQ ID NO: 1402661 - RNA, 19 nt, Homo sapiens
  misc_RNA (1)...(19): siRNA sense strand
caaagaggaagccauuagu

SEQ ID NO: 1402662 - RNA, 19 nt, Homo sapiens
  misc_RNA (1)...(19): siRNA sense strand
gaaguuugccauaaaaguu

SEQ ID NO: 1402663 - RNA, 19 nt, Homo sapiens
  misc_RNA (1)...(19): siRNA sense strand
gaagaccauccuggccaua

SEQ ID NO: 1402664 - RNA, 19 nt, Homo sapiens
  misc_RNA (1)...(19): siRNA sense strand
aaacaccagugaucugcau

SEQ ID NO: 1402665 - RNA, 19 nt, Homo sapiens
  misc_RNA (1)...(19): siRNA sense strand
uuaugaugguuccaaggua

SEQ ID NO: 1402666 - RNA, 19 nt, Homo sapiens
  misc_RNA (1)...(19): siRNA sense strand
cauaaaaguugauggagau

SEQ ID NO: 1402667 - RNA, 19 nt, Homo sapiens
  misc_RNA (1)...(19): siRNA sense strand
cagcuaguuggauucuuua

SEQ ID NO: 1402668 - RNA, 19 nt, Homo sapiens
  misc_RNA (1)...(19): siRNA sense strand
ccgcuguguuucugacauu

SEQ ID NO: 1402669 - RNA, 19 nt, Homo sapiens
  misc_RNA (1)...(19): siRNA sense strand
cagauggcagggcuccuua

SEQ ID NO: 1402670 - RNA, 19 nt, Homo sapiens
  misc_RNA (1)...(19): siRNA sense strand
cuguggagcucccugaugu

SEQ ID NO: 1402671 - RNA, 19 nt, Homo sapiens
  misc_RNA (1)...(19): siRNA sense strand
ccgccaagguccugcuuca

SEQ ID NO: 1402672 - RNA, 19 nt, Homo sapiens
  misc_RNA (1)...(19): siRNA sense strand
ggagugggacaccuucauc

SEQ ID NO: 1402673 - RNA, 19 nt, Homo sapiens
  misc_RNA (1)...(19): siRNA sense strand
gaccuguuucccuagcuua

SEQ ID NO: 1402674 - RNA, 19 nt, Homo sapiens
  misc_RNA (1)...(19): siRNA sense strand
guccagauuaucccuguuu

SEQ ID NO: 1402675 - RNA, 19 nt, Homo sapiens
  misc_RNA (1)...(19): siRNA sense strand
cuggcugcauccucuauaa

SEQ ID NO: 1402676 - RNA, 19 nt, Homo sapiens
  misc_RNA (1)...(19): siRNA sense strand
guugauggagauuaccuuu

SEQ ID NO: 1402677 - RNA, 19 nt, Homo sapiens
  misc_RNA (1)...(19): siRNA sense strand
acacagccaucagcagcuu

SEQ ID NO: 1402678 - RNA, 19 nt, Homo sapiens
  misc_RNA (1)...(19): siRNA sense strand
cuguuucccuagcuuauga

SEQ ID NO: 1402679 - RNA, 19 nt, Homo sapiens
  misc_RNA (1)...(19): siRNA sense strand
gcuaguuggauucuuuaau

SEQ ID NO: 1402680 - RNA, 19 nt, Homo sapiens
  misc_RNA (1)...(19): siRNA sense strand
acaugugccuguuccagau

SEQ ID NO: 1402681 - RNA, 19 nt, Homo sapiens
  misc_RNA (1)...(19): siRNA sense strand
gaaggaacuagucuuucuc

SEQ ID NO: 1402682 - RNA, 19 nt, Homo sapiens
  misc_RNA (1)...(19): siRNA sense strand
gaugacaaggucucuagca

SEQ ID NO: 1402683 - RNA, 19 nt, Homo sapiens
  misc_RNA (1)...(19): siRNA sense strand
cagaugacaaggucucuag

SEQ ID NO: 1402684 - RNA, 19 nt, Homo sapiens
  misc_RNA (1)...(19): siRNA sense strand
gcaggacuccaggaugguu

SEQ ID NO: 1402685 - RNA, 19 nt, Homo sapiens
  misc_RNA (1)...(19): siRNA sense strand
ugacucuccuccuacucuu

SEQ ID NO: 1402686 - RNA, 19 nt, Homo sapiens
  misc_RNA (1)...(19): siRNA sense strand
gcugcauccucuauaaagg

SEQ ID NO: 1402687 - RNA, 19 nt, Homo sapiens
  misc_RNA (1)...(19): siRNA sense strand
gcgcucgccucacauucuc

SEQ ID NO: 1402688 - RNA, 19 nt, Homo sapiens
  misc_RNA (1)...(19): siRNA sense strand
cagcccagcaccauccaaa

SEQ ID NO: 1402689 - RNA, 19 nt, Homo sapiens
  misc_RNA (1)...(19): siRNA sense strand
ggacaccuucaucgagcaa

SEQ ID NO: 1402690 - RNA, 19 nt, Homo sapiens
  misc_RNA (1)...(19): siRNA sense strand
gcuggcugcauccucuaua

SEQ ID NO: 1402691 - RNA, 19 nt, Homo sapiens
  misc_RNA (1)...(19): siRNA sense strand
acaccagugaucugcauaa

SEQ ID NO: 1402692 - RNA, 19 nt, Homo sapiens
  misc_RNA (1)...(19): siRNA sense strand
caucgagcaaauucugaaa

SEQ ID NO: 1402693 - RNA, 19 nt, Homo sapiens
  misc_RNA (1)...(19): siRNA sense strand
uccagaggcucaggaagug

SEQ ID NO: 1402694 - RNA, 19 nt, Homo sapiens
  misc_RNA (1)...(19): siRNA sense strand
gggaaggaacuagucuuuc

SEQ ID NO: 1402695 - RNA, 19 nt, Homo sapiens
  misc_RNA (1)...(19): siRNA sense strand
gaguugcuuuguggacaga

SEQ ID NO: 1402696 - RNA, 19 nt, Homo sapiens
  misc_RNA (1)...(19): siRNA sense strand
guugcuuuguggacagauu

SEQ ID NO: 1402697 - RNA, 19 nt, Homo sapiens
  misc_RNA (1)...(19): siRNA sense strand
acaccuucaucgagcaaau

SEQ ID NO: 1402698 - RNA, 19 nt, Homo sapiens
  misc_RNA (1)...(19): siRNA sense strand
aaagaggaagccauuaguc

SEQ ID NO: 1402699 - RNA, 19 nt, Homo sapiens
  misc_RNA (1)...(19): siRNA sense strand
gaaggcgauccaacaagag

SEQ ID NO: 1402700 - RNA, 19 nt, Homo sapiens
  misc_RNA (1)...(19): siRNA sense strand
gguccugcuucaccgaaca

SEQ ID NO: 1402701 - RNA, 19 nt, Homo sapiens
  misc_RNA (1)...(19): siRNA sense strand
ggaguuguccgcuguguuu

SEQ ID NO: 1402702 - RNA, 19 nt, Homo sapiens
  misc_RNA (1)...(19): siRNA sense strand
caagagcuggcauuuguua

SEQ ID NO: 1402703 - RNA, 19 nt, Homo sapiens
  misc_RNA (1)...(19): siRNA sense strand
gaagaaggcgauccaacaa

SEQ ID NO: 1402704 - RNA, 19 nt, Homo sapiens
  misc_RNA (1)...(19): siRNA sense strand
ggaagaaggcgauccaaca

SEQ ID NO: 1402705 - RNA, 19 nt, Homo sapiens
  misc_RNA (1)...(19): siRNA sense strand
ucagcuaguuggauucuuu

SEQ ID NO: 1402706 - RNA, 19 nt, Homo sapiens
  misc_RNA (1)...(19): siRNA sense strand
gcaagcgguuucuggauca

SEQ ID NO: 1402707 - RNA, 19 nt, Homo sapiens
  misc_RNA (1)...(19): siRNA sense strand
uaugaugguuccaagguaa

SEQ ID NO: 1402708 - RNA, 19 nt, Homo sapiens
  misc_RNA (1)...(19): siRNA sense strand
agaaggcgauccaacaaga

SEQ ID NO: 1402709 - RNA, 19 nt, Homo sapiens
  misc_RNA (1)...(19): siRNA sense strand
gagcuggcauuuguuacuu

SEQ ID NO: 1402710 - RNA, 19 nt, Homo sapiens
  misc_RNA (1)...(19): siRNA sense strand
caacaagagcuggcauuug

SEQ ID NO: 1402711 - RNA, 19 nt, Homo sapiens
  misc_RNA (1)...(19): siRNA sense strand
uggaucagcuaguuggauu

SEQ ID NO: 1402712 - RNA, 19 nt, Homo sapiens
  misc_RNA (1)...(19): siRNA sense strand
ggacagauugcuggaguug

SEQ ID NO: 1402713 - RNA, 19 nt, Homo sapiens
  misc_RNA (1)...(19): siRNA sense strand
ugauggagauuaccuuugg

SEQ ID NO: 1402714 - RNA, 19 nt, Homo sapiens
  misc_RNA (1)...(19): siRNA sense strand
ggaccuguuucccuagcuu

SEQ ID NO: 1402715 - RNA, 19 nt, Homo sapiens
  misc_RNA (1)...(19): siRNA sense strand
gcacggagugggacaccuu

SEQ ID NO: 1402716 - RNA, 19 nt, Homo sapiens
  misc_RNA (1)...(19): siRNA sense strand
ccaacaagagcuggcauuu

SEQ ID NO: 1402717 - RNA, 19 nt, Homo sapiens
  misc_RNA (1)...(19): siRNA sense strand
acagauugcuggaguuguc

SEQ ID NO: 1402718 - RNA, 19 nt, Homo sapiens
  misc_RNA (1)...(19): siRNA sense strand
gaaguuugccauaaaaguu

SEQ ID NO: 1402719 - RNA, 19 nt, Homo sapiens
  misc_RNA (1)...(19): siRNA sense strand
aaacaccagugaucugcau

SEQ ID NO: 1402720 - RNA, 19 nt, Homo sapiens
  misc_RNA (1)...(19): siRNA sense strand
uuaugaugguuccaaggua

SEQ ID NO: 1402721 - RNA, 19 nt, Homo sapiens
  misc_RNA (1)...(19): siRNA sense strand
cauaaaaguugauggagau

SEQ ID NO: 1402722 - RNA, 19 nt, Homo sapiens
  misc_RNA (1)...(19): siRNA sense strand
cagcuaguuggauucuuua

SEQ ID NO: 1402723 - RNA, 19 nt, Homo sapiens
  misc_RNA (1)...(19): siRNA sense strand
ccgcuguguuucugacauu

SEQ ID NO: 1402724 - RNA, 19 nt, Homo sapiens
  misc_RNA (1)...(19): siRNA sense strand
cuguggagcucccugaugu

SEQ ID NO: 1402725 - RNA, 19 nt, Homo sapiens
  misc_RNA (1)...(19): siRNA sense strand
ggagugggacaccuucauc

SEQ ID NO: 1402726 - RNA, 19 nt, Homo sapiens
  misc_RNA (1)...(19): siRNA sense strand
gaccuguuucccuagcuua

SEQ ID NO: 1402727 - RNA, 19 nt, Homo sapiens
  misc_RNA (1)...(19): siRNA sense strand
guugauggagauuaccuuu

SEQ ID NO: 1402728 - RNA, 19 nt, Homo sapiens
  misc_RNA (1)...(19): siRNA sense strand
cuguuucccuagcuuauga

SEQ ID NO: 1402729 - RNA, 19 nt, Homo sapiens
  misc_RNA (1)...(19): siRNA sense strand
gcuaguuggauucuuuaau

SEQ ID NO: 1402730 - RNA, 19 nt, Homo sapiens
  misc_RNA (1)...(19): siRNA sense strand
ugacucuccuccuacucuu

SEQ ID NO: 1402731 - RNA, 19 nt, Homo sapiens
  misc_RNA (1)...(19): siRNA sense strand
ggacaccuucaucgagcaa

SEQ ID NO: 1402732 - RNA, 19 nt, Homo sapiens
  misc_RNA (1)...(19): siRNA sense strand
acaccagugaucugcauaa

SEQ ID NO: 1402733 - RNA, 19 nt, Homo sapiens
  misc_RNA (1)...(19): siRNA sense strand
gaguugcuuuguggacaga

SEQ ID NO: 1402734 - RNA, 19 nt, Homo sapiens
  misc_RNA (1)...(19): siRNA sense strand
caucgagcaaauucugaaa

SEQ ID NO: 1402735 - RNA, 19 nt, Homo sapiens
  misc_RNA (1)...(19): siRNA sense strand
guugcuuuguggacagauu

SEQ ID NO: 1402736 - RNA, 19 nt, Homo sapiens
  misc_RNA (1)...(19): siRNA sense strand
gaaggcgauccaacaagag

SEQ ID NO: 1402737 - RNA, 19 nt, Homo sapiens
  misc_RNA (1)...(19): siRNA sense strand
acaccuucaucgagcaaau

SEQ ID NO: 1402738 - RNA, 19 nt, Homo sapiens
  misc_RNA (1)...(19): siRNA sense strand
gaacucgacuugucugaaa

SEQ ID NO: 1402739 - RNA, 19 nt, Homo sapiens
  misc_RNA (1)...(19): siRNA sense strand
gagcacaucugcccugaaa

SEQ ID NO: 1402740 - RNA, 19 nt, Homo sapiens
  misc_RNA (1)...(19): siRNA sense strand
ggaaggaacuagucuuucu

SEQ ID NO: 1402741 - RNA, 19 nt, Homo sapiens
  misc_RNA (1)...(19): siRNA sense strand
ugacgaagcuuguccagau

SEQ ID NO: 1402742 - RNA, 19 nt, Homo sapiens
  misc_RNA (1)...(19): siRNA sense strand
ggaguuguccgcuguguuu

SEQ ID NO: 1402743 - RNA, 19 nt, Homo sapiens
  misc_RNA (1)...(19): siRNA sense strand
caagagcuggcauuuguua

SEQ ID NO: 1402744 - RNA, 19 nt, Homo sapiens
  misc_RNA (1)...(19): siRNA sense strand
gcacaucugcccugaaaga

SEQ ID NO: 1402745 - RNA, 19 nt, Homo sapiens
  misc_RNA (1)...(19): siRNA sense strand
gaagaaggcgauccaacaa

SEQ ID NO: 1402746 - RNA, 19 nt, Homo sapiens
  misc_RNA (1)...(19): siRNA sense strand
ggaagaaggcgauccaaca

SEQ ID NO: 1402747 - RNA, 19 nt, Homo sapiens
  misc_RNA (1)...(19): siRNA sense strand
ucagcuaguuggauucuuu

SEQ ID NO: 1402748 - RNA, 19 nt, Homo sapiens
  misc_RNA (1)...(19): siRNA sense strand
gacaaggucucuagcaucu

SEQ ID NO: 1402749 - RNA, 19 nt, Homo sapiens
  misc_RNA (1)...(19): siRNA sense strand
gcaagcgguuucuggauca

SEQ ID NO: 1402750 - RNA, 19 nt, Homo sapiens
  misc_RNA (1)...(19): siRNA sense strand
agaaggcgauccaacaaga

SEQ ID NO: 1402751 - RNA, 19 nt, Homo sapiens
  misc_RNA (1)...(19): siRNA sense strand
ggaaauggccucaggucau

SEQ ID NO: 1402752 - RNA, 19 nt, Homo sapiens
  misc_RNA (1)...(19): siRNA sense strand
uaugaugguuccaagguaa

SEQ ID NO: 1402753 - RNA, 19 nt, Homo sapiens
  misc_RNA (1)...(19): siRNA sense strand
gaccaaagaggaagccauu

SEQ ID NO: 1402754 - RNA, 19 nt, Homo sapiens
  misc_RNA (1)...(19): siRNA sense strand
aagaagaacucgacuuguc

SEQ ID NO: 1402755 - RNA, 19 nt, Homo sapiens
  misc_RNA (1)...(19): siRNA sense strand
gagcuggcauuuguuacuu

SEQ ID NO: 1402756 - RNA, 19 nt, Homo sapiens
  misc_RNA (1)...(19): siRNA sense strand
ggaacuagucuuucuccaa

SEQ ID NO: 1402757 - RNA, 19 nt, Homo sapiens
  misc_RNA (1)...(19): siRNA sense strand
ccauuagucuccacgaguu

SEQ ID NO: 1402758 - RNA, 19 nt, Homo sapiens
  misc_RNA (1)...(19): siRNA sense strand
gaaggcagcccgcauucug

SEQ ID NO: 1402759 - RNA, 19 nt, Homo sapiens
  misc_RNA (1)...(19): siRNA sense strand
caacaagagcuggcauuug

SEQ ID NO: 1402760 - RNA, 19 nt, Homo sapiens
  misc_RNA (1)...(19): siRNA sense strand
uauaaaggacugauuguca

SEQ ID NO: 1402761 - RNA, 19 nt, Homo sapiens
  misc_RNA (1)...(19): siRNA sense strand
uggaucagcuaguuggauu

SEQ ID NO: 1402762 - RNA, 19 nt, Homo sapiens
  misc_RNA (1)...(19): siRNA sense strand
gccaugaucuggagagcau

SEQ ID NO: 1402763 - RNA, 19 nt, Homo sapiens
  misc_RNA (1)...(19): siRNA sense strand
ggacagauugcuggaguug

SEQ ID NO: 1402764 - RNA, 19 nt, Homo sapiens
  misc_RNA (1)...(19): siRNA sense strand
ugauggagauuaccuuugg

SEQ ID NO: 1402765 - RNA, 19 nt, Homo sapiens
  misc_RNA (1)...(19): siRNA sense strand
ggaccuguuucccuagcuu

SEQ ID NO: 1402766 - RNA, 19 nt, Homo sapiens
  misc_RNA (1)...(19): siRNA sense strand
ccaaagaggaagccauuag

SEQ ID NO: 1402767 - RNA, 19 nt, Homo sapiens
  misc_RNA (1)...(19): siRNA sense strand
gacgaagcuuguccagaug

SEQ ID NO: 1402768 - RNA, 19 nt, Homo sapiens
  misc_RNA (1)...(19): siRNA sense strand
gcacggagugggacaccuu

SEQ ID NO: 1402769 - RNA, 19 nt, Homo sapiens
  misc_RNA (1)...(19): siRNA sense strand
ggaaggagaacggaugcuu

SEQ ID NO: 1402770 - RNA, 19 nt, Homo sapiens
  misc_RNA (1)...(19): siRNA sense strand
acagauugcuggaguuguc

SEQ ID NO: 1402771 - RNA, 19 nt, Homo sapiens
  misc_RNA (1)...(19): siRNA sense strand
ggagaacggaugcuugucu

SEQ ID NO: 1402772 - RNA, 19 nt, Homo sapiens
  misc_RNA (1)...(19): siRNA sense strand
caucugcccugaaagaaaa

SEQ ID NO: 1402773 - RNA, 19 nt, Homo sapiens
  misc_RNA (1)...(19): siRNA sense strand
ccaacaagagcuggcauuu

SEQ ID NO: 1402774 - RNA, 19 nt, Homo sapiens
  misc_RNA (1)...(19): siRNA sense strand
caaagaggaagccauuagu

SEQ ID NO: 1402775 - RNA, 19 nt, Homo sapiens
  misc_RNA (1)...(19): siRNA sense strand
gaaguuugccauaaaaguu

SEQ ID NO: 1402776 - RNA, 19 nt, Homo sapiens
  misc_RNA (1)...(19): siRNA sense strand
gaagaccauccuggccaua

SEQ ID NO: 1402777 - RNA, 19 nt, Homo sapiens
  misc_RNA (1)...(19): siRNA sense strand
aaacaccagugaucugcau

SEQ ID NO: 1402778 - RNA, 19 nt, Homo sapiens
  misc_RNA (1)...(19): siRNA sense strand
uuaugaugguuccaaggua

SEQ ID NO: 1402779 - RNA, 19 nt, Homo sapiens
  misc_RNA (1)...(19): siRNA sense strand
cauaaaaguugauggagau

SEQ ID NO: 1402780 - RNA, 19 nt, Homo sapiens
  misc_RNA (1)...(19): siRNA sense strand
cagcuaguuggauucuuua

SEQ ID NO: 1402781 - RNA, 19 nt, Homo sapiens
  misc_RNA (1)...(19): siRNA sense strand
ccgcuguguuucugacauu

SEQ ID NO: 1402782 - RNA, 19 nt, Homo sapiens
  misc_RNA (1)...(19): siRNA sense strand
cagauggcagggcuccuua

SEQ ID NO: 1402783 - RNA, 19 nt, Homo sapiens
  misc_RNA (1)...(19): siRNA sense strand
cuguggagcucccugaugu

SEQ ID NO: 1402784 - RNA, 19 nt, Homo sapiens
  misc_RNA (1)...(19): siRNA sense strand
ccgccaagguccugcuuca

SEQ ID NO: 1402785 - RNA, 19 nt, Homo sapiens
  misc_RNA (1)...(19): siRNA sense strand
ggagugggacaccuucauc

SEQ ID NO: 1402786 - RNA, 19 nt, Homo sapiens
  misc_RNA (1)...(19): siRNA sense strand
gaccuguuucccuagcuua

SEQ ID NO: 1402787 - RNA, 19 nt, Homo sapiens
  misc_RNA (1)...(19): siRNA sense strand
guccagauuaucccuguuu

SEQ ID NO: 1402788 - RNA, 19 nt, Homo sapiens
  misc_RNA (1)...(19): siRNA sense strand
cuggcugcauccucuauaa

SEQ ID NO: 1402789 - RNA, 19 nt, Homo sapiens
  misc_RNA (1)...(19): siRNA sense strand
guugauggagauuaccuuu

SEQ ID NO: 1402790 - RNA, 19 nt, Homo sapiens
  misc_RNA (1)...(19): siRNA sense strand
acacagccaucagcagcuu

SEQ ID NO: 1402791 - RNA, 19 nt, Homo sapiens
  misc_RNA (1)...(19): siRNA sense strand
cuguuucccuagcuuauga

SEQ ID NO: 1402792 - RNA, 19 nt, Homo sapiens
  misc_RNA (1)...(19): siRNA sense strand
gcuaguuggauucuuuaau

SEQ ID NO: 1402793 - RNA, 19 nt, Homo sapiens
  misc_RNA (1)...(19): siRNA sense strand
acaugugccuguuccagau

SEQ ID NO: 1402794 - RNA, 19 nt, Homo sapiens
  misc_RNA (1)...(19): siRNA sense strand
gaaggaacuagucuuucuc

SEQ ID NO: 1402795 - RNA, 19 nt, Homo sapiens
  misc_RNA (1)...(19): siRNA sense strand
gaugacaaggucucuagca

SEQ ID NO: 1402796 - RNA, 19 nt, Homo sapiens
  misc_RNA (1)...(19): siRNA sense strand
cagaugacaaggucucuag

SEQ ID NO: 1402797 - RNA, 19 nt, Homo sapiens
  misc_RNA (1)...(19): siRNA sense strand
gcaggacuccaggaugguu

SEQ ID NO: 1402798 - RNA, 19 nt, Homo sapiens
  misc_RNA (1)...(19): siRNA sense strand
ugacucuccuccuacucuu

SEQ ID NO: 1402799 - RNA, 19 nt, Homo sapiens
  misc_RNA (1)...(19): siRNA sense strand
gcugcauccucuauaaagg

SEQ ID NO: 1402800 - RNA, 19 nt, Homo sapiens
  misc_RNA (1)...(19): siRNA sense strand
gcgcucgccucacauucuc

SEQ ID NO: 1402801 - RNA, 19 nt, Homo sapiens
  misc_RNA (1)...(19): siRNA sense strand
cagcccagcaccauccaaa

SEQ ID NO: 1402802 - RNA, 19 nt, Homo sapiens
  misc_RNA (1)...(19): siRNA sense strand
ggacaccuucaucgagcaa

SEQ ID NO: 1402803 - RNA, 19 nt, Homo sapiens
  misc_RNA (1)...(19): siRNA sense strand
gcuggcugcauccucuaua

SEQ ID NO: 1402804 - RNA, 19 nt, Homo sapiens
  misc_RNA (1)...(19): siRNA sense strand
acaccagugaucugcauaa

SEQ ID NO: 1402805 - RNA, 19 nt, Homo sapiens
  misc_RNA (1)...(19): siRNA sense strand
caucgagcaaauucugaaa

SEQ ID NO: 1402806 - RNA, 19 nt, Homo sapiens
  misc_RNA (1)...(19): siRNA sense strand
uccagaggcucaggaagug

SEQ ID NO: 1402807 - RNA, 19 nt, Homo sapiens
  misc_RNA (1)...(19): siRNA sense strand
gggaaggaacuagucuuuc

SEQ ID NO: 1402808 - RNA, 19 nt, Homo sapiens
  misc_RNA (1)...(19): siRNA sense strand
gaguugcuuuguggacaga

SEQ ID NO: 1402809 - RNA, 19 nt, Homo sapiens
  misc_RNA (1)...(19): siRNA sense strand
guugcuuuguggacagauu

SEQ ID NO: 1402810 - RNA, 19 nt, Homo sapiens
  misc_RNA (1)...(19): siRNA sense strand
acaccuucaucgagcaaau

SEQ ID NO: 1402811 - RNA, 19 nt, Homo sapiens
  misc_RNA (1)...(19): siRNA sense strand
aaagaggaagccauuaguc

SEQ ID NO: 1402812 - RNA, 19 nt, Homo sapiens
  misc_RNA (1)...(19): siRNA sense strand
gaaggcgauccaacaagag

SEQ ID NO: 1402813 - RNA, 19 nt, Homo sapiens
  misc_RNA (1)...(19): siRNA sense strand
gguccugcuucaccgaaca

SEQ ID NO: 1402814 - RNA, 19 nt, Homo sapiens
  misc_RNA (1)...(19): siRNA sense strand
ggaguuguccgcuguguuu

SEQ ID NO: 1402815 - RNA, 19 nt, Homo sapiens
  misc_RNA (1)...(19): siRNA sense strand
caagagcuggcauuuguua

SEQ ID NO: 1402816 - RNA, 19 nt, Homo sapiens
  misc_RNA (1)...(19): siRNA sense strand
gaagaaggcgauccaacaa

SEQ ID NO: 1402817 - RNA, 19 nt, Homo sapiens
  misc_RNA (1)...(19): siRNA sense strand
ggaagaaggcgauccaaca

SEQ ID NO: 1402818 - RNA, 19 nt, Homo sapiens
  misc_RNA (1)...(19): siRNA sense strand
ucagcuaguuggauucuuu

SEQ ID NO: 1402819 - RNA, 19 nt, Homo sapiens
  misc_RNA (1)...(19): siRNA sense strand
gcaagcgguuucuggauca

SEQ ID NO: 1402820 - RNA, 19 nt, Homo sapiens
  misc_RNA (1)...(19): siRNA sense strand
uaugaugguuccaagguaa

SEQ ID NO: 1402821 - RNA, 19 nt, Homo sapiens
  misc_RNA (1)...(19): siRNA sense strand
agaaggcgauccaacaaga

SEQ ID NO: 1402822 - RNA, 19 nt, Homo sapiens
  misc_RNA (1)...(19): siRNA sense strand
gagcuggcauuuguuacuu

SEQ ID NO: 1402823 - RNA, 19 nt, Homo sapiens
  misc_RNA (1)...(19): siRNA sense strand
gaaggcagcccgcauucug

SEQ ID NO: 1402824 - RNA, 19 nt, Homo sapiens
  misc_RNA (1)...(19): siRNA sense strand
caacaagagcuggcauuug

SEQ ID NO: 1402825 - RNA, 19 nt, Homo sapiens
  misc_RNA (1)...(19): siRNA sense strand
uauaaaggacugauuguca

SEQ ID NO: 1402826 - RNA, 19 nt, Homo sapiens
  misc_RNA (1)...(19): siRNA sense strand
uggaucagcuaguuggauu

SEQ ID NO: 1402827 - RNA, 19 nt, Homo sapiens
  misc_RNA (1)...(19): siRNA sense strand
ggacagauugcuggaguug

SEQ ID NO: 1402828 - RNA, 19 nt, Homo sapiens
  misc_RNA (1)...(19): siRNA sense strand
ugauggagauuaccuuugg

SEQ ID NO: 1402829 - RNA, 19 nt, Homo sapiens
  misc_RNA (1)...(19): siRNA sense strand
ggaccuguuucccuagcuu

SEQ ID NO: 1402830 - RNA, 19 nt, Homo sapiens
  misc_RNA (1)...(19): siRNA sense strand
gcacggagugggacaccuu

SEQ ID NO: 1402831 - RNA, 19 nt, Homo sapiens
  misc_RNA (1)...(19): siRNA sense strand
ccaacaagagcuggcauuu

SEQ ID NO: 1402832 - RNA, 19 nt, Homo sapiens
  misc_RNA (1)...(19): siRNA sense strand
acagauugcuggaguuguc

SEQ ID NO: 1402833 - RNA, 19 nt, Homo sapiens
  misc_RNA (1)...(19): siRNA sense strand
gaaguuugccauaaaaguu

SEQ ID NO: 1402834 - RNA, 19 nt, Homo sapiens
  misc_RNA (1)...(19): siRNA sense strand
aaacaccagugaucugcau

SEQ ID NO: 1402835 - RNA, 19 nt, Homo sapiens
  misc_RNA (1)...(19): siRNA sense strand
uuaugaugguuccaaggua

SEQ ID NO: 1402836 - RNA, 19 nt, Homo sapiens
  misc_RNA (1)...(19): siRNA sense strand
cauaaaaguugauggagau

SEQ ID NO: 1402837 - RNA, 19 nt, Homo sapiens
  misc_RNA (1)...(19): siRNA sense strand
cagcuaguuggauucuuua

SEQ ID NO: 1402838 - RNA, 19 nt, Homo sapiens
  misc_RNA (1)...(19): siRNA sense strand
ccgcuguguuucugacauu

SEQ ID NO: 1402839 - RNA, 19 nt, Homo sapiens
  misc_RNA (1)...(19): siRNA sense strand
cuguggagcucccugaugu

SEQ ID NO: 1402840 - RNA, 19 nt, Homo sapiens
  misc_RNA (1)...(19): siRNA sense strand
ccgccaagguccugcuuca

SEQ ID NO: 1402841 - RNA, 19 nt, Homo sapiens
  misc_RNA (1)...(19): siRNA sense strand
ggagugggacaccuucauc

SEQ ID NO: 1402842 - RNA, 19 nt, Homo sapiens
  misc_RNA (1)...(19): siRNA sense strand
gaccuguuucccuagcuua

SEQ ID NO: 1402843 - RNA, 19 nt, Homo sapiens
  misc_RNA (1)...(19): siRNA sense strand
cuggcugcauccucuauaa

SEQ ID NO: 1402844 - RNA, 19 nt, Homo sapiens
  misc_RNA (1)...(19): siRNA sense strand
guugauggagauuaccuuu

SEQ ID NO: 1402845 - RNA, 19 nt, Homo sapiens
  misc_RNA (1)...(19): siRNA sense strand
cuguuucccuagcuuauga

SEQ ID NO: 1402846 - RNA, 19 nt, Homo sapiens
  misc_RNA (1)...(19): siRNA sense strand
gcuaguuggauucuuuaau

SEQ ID NO: 1402847 - RNA, 19 nt, Homo sapiens
  misc_RNA (1)...(19): siRNA sense strand
ugacucuccuccuacucuu

SEQ ID NO: 1402848 - RNA, 19 nt, Homo sapiens
  misc_RNA (1)...(19): siRNA sense strand
gcugcauccucuauaaagg

SEQ ID NO: 1402849 - RNA, 19 nt, Homo sapiens
  misc_RNA (1)...(19): siRNA sense strand
gcgcucgccucacauucuc

SEQ ID NO: 1402850 - RNA, 19 nt, Homo sapiens
  misc_RNA (1)...(19): siRNA sense strand
ggacaccuucaucgagcaa

SEQ ID NO: 1402851 - RNA, 19 nt, Homo sapiens
  misc_RNA (1)...(19): siRNA sense strand
gcuggcugcauccucuaua

SEQ ID NO: 1402852 - RNA, 19 nt, Homo sapiens
  misc_RNA (1)...(19): siRNA sense strand
acaccagugaucugcauaa

SEQ ID NO: 1402853 - RNA, 19 nt, Homo sapiens
  misc_RNA (1)...(19): siRNA sense strand
guugcuuuguggacagauu

SEQ ID NO: 1402854 - RNA, 19 nt, Homo sapiens
  misc_RNA (1)...(19): siRNA sense strand
gaguugcuuuguggacaga

SEQ ID NO: 1402855 - RNA, 19 nt, Homo sapiens
  misc_RNA (1)...(19): siRNA sense strand
caucgagcaaauucugaaa

SEQ ID NO: 1402856 - RNA, 19 nt, Homo sapiens
  misc_RNA (1)...(19): siRNA sense strand
gaaggcgauccaacaagag

SEQ ID NO: 1402857 - RNA, 19 nt, Homo sapiens
  misc_RNA (1)...(19): siRNA sense strand
gguccugcuucaccgaaca

SEQ ID NO: 1402858 - RNA, 19 nt, Homo sapiens
  misc_RNA (1)...(19): siRNA sense strand
acaccuucaucgagcaaau

SEQ ID NO: 1402859 - RNA, 19 nt, Homo sapiens
  misc_RNA (1)...(19): siRNA sense strand
gaacucgacuugucugaaa

SEQ ID NO: 1402860 - RNA, 19 nt, Homo sapiens
  misc_RNA (1)...(19): siRNA sense strand
gagcacaucugcccugaaa

SEQ ID NO: 1402861 - RNA, 19 nt, Homo sapiens
  misc_RNA (1)...(19): siRNA sense strand
ggaaggaacuagucuuucu

SEQ ID NO: 1402862 - RNA, 19 nt, Homo sapiens
  misc_RNA (1)...(19): siRNA sense strand
ugacgaagcuuguccagau

SEQ ID NO: 1402863 - RNA, 19 nt, Homo sapiens
  misc_RNA (1)...(19): siRNA sense strand
gagacagacugcaggauga

SEQ ID NO: 1402864 - RNA, 19 nt, Homo sapiens
  misc_RNA (1)...(19): siRNA sense strand
ggaguuguccgcuguguuu

SEQ ID NO: 1402865 - RNA, 19 nt, Homo sapiens
  misc_RNA (1)...(19): siRNA sense strand
caagagcuggcauuuguua

SEQ ID NO: 1402866 - RNA, 19 nt, Homo sapiens
  misc_RNA (1)...(19): siRNA sense strand
gcacaucugcccugaaaga

SEQ ID NO: 1402867 - RNA, 19 nt, Homo sapiens
  misc_RNA (1)...(19): siRNA sense strand
gaagaaggcgauccaacaa

SEQ ID NO: 1402868 - RNA, 19 nt, Homo sapiens
  misc_RNA (1)...(19): siRNA sense strand
ggaagaaggcgauccaaca

SEQ ID NO: 1402869 - RNA, 19 nt, Homo sapiens
  misc_RNA (1)...(19): siRNA sense strand
ucagcuaguuggauucuuu

SEQ ID NO: 1402870 - RNA, 19 nt, Homo sapiens
  misc_RNA (1)...(19): siRNA sense strand
ccucaguucuauuacguua

SEQ ID NO: 1402871 - RNA, 19 nt, Homo sapiens
  misc_RNA (1)...(19): siRNA sense strand
gacaaggucucuagcaucu

SEQ ID NO: 1402872 - RNA, 19 nt, Homo sapiens
  misc_RNA (1)...(19): siRNA sense strand
gcaagcgguuucuggauca

SEQ ID NO: 1402873 - RNA, 19 nt, Homo sapiens
  misc_RNA (1)...(19): siRNA sense strand
agaaggcgauccaacaaga

SEQ ID NO: 1402874 - RNA, 19 nt, Homo sapiens
  misc_RNA (1)...(19): siRNA sense strand
uaugaugguuccaagguaa

SEQ ID NO: 1402875 - RNA, 19 nt, Homo sapiens
  misc_RNA (1)...(19): siRNA sense strand
ggaaauggccucaggucau

SEQ ID NO: 1402876 - RNA, 19 nt, Homo sapiens
  misc_RNA (1)...(19): siRNA sense strand
gaccaaagaggaagccauu

SEQ ID NO: 1402877 - RNA, 19 nt, Homo sapiens
  misc_RNA (1)...(19): siRNA sense strand
aagaagaacucgacuuguc

SEQ ID NO: 1402878 - RNA, 19 nt, Homo sapiens
  misc_RNA (1)...(19): siRNA sense strand
gagcuggcauuuguuacuu

SEQ ID NO: 1402879 - RNA, 19 nt, Homo sapiens
  misc_RNA (1)...(19): siRNA sense strand
ggaacuagucuuucuccaa

SEQ ID NO: 1402880 - RNA, 19 nt, Homo sapiens
  misc_RNA (1)...(19): siRNA sense strand
ccauuagucuccacgaguu

SEQ ID NO: 1402881 - RNA, 19 nt, Homo sapiens
  misc_RNA (1)...(19): siRNA sense strand
gaaggcagcccgcauucug

SEQ ID NO: 1402882 - RNA, 19 nt, Homo sapiens
  misc_RNA (1)...(19): siRNA sense strand
uauaaaggacugauuguca

SEQ ID NO: 1402883 - RNA, 19 nt, Homo sapiens
  misc_RNA (1)...(19): siRNA sense strand
caacaagagcuggcauuug

SEQ ID NO: 1402884 - RNA, 19 nt, Homo sapiens
  misc_RNA (1)...(19): siRNA sense strand
uggaucagcuaguuggauu

SEQ ID NO: 1402885 - RNA, 19 nt, Homo sapiens
  misc_RNA (1)...(19): siRNA sense strand
gccaugaucuggagagcau

SEQ ID NO: 1402886 - RNA, 19 nt, Homo sapiens
  misc_RNA (1)...(19): siRNA sense strand
ggacagauugcuggaguug

SEQ ID NO: 1402887 - RNA, 19 nt, Homo sapiens
  misc_RNA (1)...(19): siRNA sense strand
ugauggagauuaccuuugg

SEQ ID NO: 1402888 - RNA, 19 nt, Homo sapiens
  misc_RNA (1)...(19): siRNA sense strand
ggaccuguuucccuagcuu

SEQ ID NO: 1402889 - RNA, 19 nt, Homo sapiens
  misc_RNA (1)...(19): siRNA sense strand
ccaaagaggaagccauuag

SEQ ID NO: 1402890 - RNA, 19 nt, Homo sapiens
  misc_RNA (1)...(19): siRNA sense strand
gggcuugugugguacuuag

SEQ ID NO: 1402891 - RNA, 19 nt, Homo sapiens
  misc_RNA (1)...(19): siRNA sense strand
gacgaagcuuguccagaug

SEQ ID NO: 1402892 - RNA, 19 nt, Homo sapiens
  misc_RNA (1)...(19): siRNA sense strand
gcacggagugggacaccuu

SEQ ID NO: 1402893 - RNA, 19 nt, Homo sapiens
  misc_RNA (1)...(19): siRNA sense strand
uuccugggcuuguguggua

SEQ ID NO: 1402894 - RNA, 19 nt, Homo sapiens
  misc_RNA (1)...(19): siRNA sense strand
ggaaggagaacggaugcuu

SEQ ID NO: 1402895 - RNA, 19 nt, Homo sapiens
  misc_RNA (1)...(19): siRNA sense strand
acagauugcuggaguuguc

SEQ ID NO: 1402896 - RNA, 19 nt, Homo sapiens
  misc_RNA (1)...(19): siRNA sense strand
ggagaacggaugcuugucu

SEQ ID NO: 1402897 - RNA, 19 nt, Homo sapiens
  misc_RNA (1)...(19): siRNA sense strand
caucugcccugaaagaaaa

SEQ ID NO: 1402898 - RNA, 19 nt, Homo sapiens
  misc_RNA (1)...(19): siRNA sense strand
caaagaggaagccauuagu

SEQ ID NO: 1402899 - RNA, 19 nt, Homo sapiens
  misc_RNA (1)...(19): siRNA sense strand
ccaacaagagcuggcauuu

SEQ ID NO: 1402900 - RNA, 19 nt, Homo sapiens
  misc_RNA (1)...(19): siRNA sense strand
gaaguuugccauaaaaguu

SEQ ID NO: 1402901 - RNA, 19 nt, Homo sapiens
  misc_RNA (1)...(19): siRNA sense strand
ugaaagggagcgacacuca

SEQ ID NO: 1402902 - RNA, 19 nt, Homo sapiens
  misc_RNA (1)...(19): siRNA sense strand
gaagaccauccuggccaua

SEQ ID NO: 1402903 - RNA, 19 nt, Homo sapiens
  misc_RNA (1)...(19): siRNA sense strand
aaacaccagugaucugcau

SEQ ID NO: 1402904 - RNA, 19 nt, Homo sapiens
  misc_RNA (1)...(19): siRNA sense strand
uuaugaugguuccaaggua

SEQ ID NO: 1402905 - RNA, 19 nt, Homo sapiens
  misc_RNA (1)...(19): siRNA sense strand
cauaaaaguugauggagau

SEQ ID NO: 1402906 - RNA, 19 nt, Homo sapiens
  misc_RNA (1)...(19): siRNA sense strand
cagcuaguuggauucuuua

SEQ ID NO: 1402907 - RNA, 19 nt, Homo sapiens
  misc_RNA (1)...(19): siRNA sense strand
ccgcuguguuucugacauu

SEQ ID NO: 1402908 - RNA, 19 nt, Homo sapiens
  misc_RNA (1)...(19): siRNA sense strand
cagauggcagggcuccuua

SEQ ID NO: 1402909 - RNA, 19 nt, Homo sapiens
  misc_RNA (1)...(19): siRNA sense strand
cuguggagcucccugaugu

SEQ ID NO: 1402910 - RNA, 19 nt, Homo sapiens
  misc_RNA (1)...(19): siRNA sense strand
ccgccaagguccugcuuca

SEQ ID NO: 1402911 - RNA, 19 nt, Homo sapiens
  misc_RNA (1)...(19): siRNA sense strand
ggagugggacaccuucauc

SEQ ID NO: 1402912 - RNA, 19 nt, Homo sapiens
  misc_RNA (1)...(19): siRNA sense strand
gaccuguuucccuagcuua

SEQ ID NO: 1402913 - RNA, 19 nt, Homo sapiens
  misc_RNA (1)...(19): siRNA sense strand
guccagauuaucccuguuu

SEQ ID NO: 1402914 - RNA, 19 nt, Homo sapiens
  misc_RNA (1)...(19): siRNA sense strand
cuggcugcauccucuauaa

SEQ ID NO: 1402915 - RNA, 19 nt, Homo sapiens
  misc_RNA (1)...(19): siRNA sense strand
guugauggagauuaccuuu

SEQ ID NO: 1402916 - RNA, 19 nt, Homo sapiens
  misc_RNA (1)...(19): siRNA sense strand
acacagccaucagcagcuu

SEQ ID NO: 1402917 - RNA, 19 nt, Homo sapiens
  misc_RNA (1)...(19): siRNA sense strand
cuguuucccuagcuuauga

SEQ ID NO: 1402918 - RNA, 19 nt, Homo sapiens
  misc_RNA (1)...(19): siRNA sense strand
gcuaguuggauucuuuaau

SEQ ID NO: 1402919 - RNA, 19 nt, Homo sapiens
  misc_RNA (1)...(19): siRNA sense strand
acaugugccuguuccagau

SEQ ID NO: 1402920 - RNA, 19 nt, Homo sapiens
  misc_RNA (1)...(19): siRNA sense strand
gaaggaacuagucuuucuc

SEQ ID NO: 1402921 - RNA, 19 nt, Homo sapiens
  misc_RNA (1)...(19): siRNA sense strand
gaugacaaggucucuagca

SEQ ID NO: 1402922 - RNA, 19 nt, Homo sapiens
  misc_RNA (1)...(19): siRNA sense strand
cagaugacaaggucucuag

SEQ ID NO: 1402923 - RNA, 19 nt, Homo sapiens
  misc_RNA (1)...(19): siRNA sense strand
gcaggacuccaggaugguu

SEQ ID NO: 1402924 - RNA, 19 nt, Homo sapiens
  misc_RNA (1)...(19): siRNA sense strand
ugacucuccuccuacucuu

SEQ ID NO: 1402925 - RNA, 19 nt, Homo sapiens
  misc_RNA (1)...(19): siRNA sense strand
gcugcauccucuauaaagg

SEQ ID NO: 1402926 - RNA, 19 nt, Homo sapiens
  misc_RNA (1)...(19): siRNA sense strand
gcgcucgccucacauucuc

SEQ ID NO: 1402927 - RNA, 19 nt, Homo sapiens
  misc_RNA (1)...(19): siRNA sense strand
cagcccagcaccauccaaa

SEQ ID NO: 1402928 - RNA, 19 nt, Homo sapiens
  misc_RNA (1)...(19): siRNA sense strand
ggacaccuucaucgagcaa

SEQ ID NO: 1402929 - RNA, 19 nt, Homo sapiens
  misc_RNA (1)...(19): siRNA sense strand
gcuggcugcauccucuaua

SEQ ID NO: 1402930 - RNA, 19 nt, Homo sapiens
  misc_RNA (1)...(19): siRNA sense strand
acaccagugaucugcauaa

SEQ ID NO: 1402931 - RNA, 19 nt, Homo sapiens
  misc_RNA (1)...(19): siRNA sense strand
caucgagcaaauucugaaa

SEQ ID NO: 1402932 - RNA, 19 nt, Homo sapiens
  misc_RNA (1)...(19): siRNA sense strand
uccagaggcucaggaagug

SEQ ID NO: 1402933 - RNA, 19 nt, Homo sapiens
  misc_RNA (1)...(19): siRNA sense strand
gggaaggaacuagucuuuc

SEQ ID NO: 1402934 - RNA, 19 nt, Homo sapiens
  misc_RNA (1)...(19): siRNA sense strand
gaguugcuuuguggacaga

SEQ ID NO: 1402935 - RNA, 19 nt, Homo sapiens
  misc_RNA (1)...(19): siRNA sense strand
guugcuuuguggacagauu

SEQ ID NO: 1402936 - RNA, 19 nt, Homo sapiens
  misc_RNA (1)...(19): siRNA sense strand
acaccuucaucgagcaaau

SEQ ID NO: 1402937 - RNA, 19 nt, Homo sapiens
  misc_RNA (1)...(19): siRNA sense strand
gaaggcgauccaacaagag

SEQ ID NO: 1402938 - RNA, 19 nt, Homo sapiens
  misc_RNA (1)...(19): siRNA sense strand
aaagaggaagccauuaguc

SEQ ID NO: 1402939 - RNA, 19 nt, Homo sapiens
  misc_RNA (1)...(19): siRNA sense strand
gguccugcuucaccgaaca

SEQ ID NO: 1402940 - RNA, 19 nt, Homo sapiens
  misc_RNA (1)...(19): siRNA sense strand
gaacucgacuugucugaaa

SEQ ID NO: 1402941 - RNA, 19 nt, Homo sapiens
  misc_RNA (1)...(19): siRNA sense strand
gagcacaucugcccugaaa

SEQ ID NO: 1402942 - RNA, 19 nt, Homo sapiens
  misc_RNA (1)...(19): siRNA sense strand
ggaaggaacuagucuuucu

SEQ ID NO: 1402943 - RNA, 19 nt, Homo sapiens
  misc_RNA (1)...(19): siRNA sense strand
ugacgaagcuuguccagau

SEQ ID NO: 1402944 - RNA, 19 nt, Homo sapiens
  misc_RNA (1)...(19): siRNA sense strand
ggaguuguccgcuguguuu

SEQ ID NO: 1402945 - RNA, 19 nt, Homo sapiens
  misc_RNA (1)...(19): siRNA sense strand
caagagcuggcauuuguua

SEQ ID NO: 1402946 - RNA, 19 nt, Homo sapiens
  misc_RNA (1)...(19): siRNA sense strand
gcacaucugcccugaaaga

SEQ ID NO: 1402947 - RNA, 19 nt, Homo sapiens
  misc_RNA (1)...(19): siRNA sense strand
gaagaaggcgauccaacaa

SEQ ID NO: 1402948 - RNA, 19 nt, Homo sapiens
  misc_RNA (1)...(19): siRNA sense strand
ggaagaaggcgauccaaca

SEQ ID NO: 1402949 - RNA, 19 nt, Homo sapiens
  misc_RNA (1)...(19): siRNA sense strand
ucagcuaguuggauucuuu

SEQ ID NO: 1402950 - RNA, 19 nt, Homo sapiens
  misc_RNA (1)...(19): siRNA sense strand
gacaaggucucuagcaucu

SEQ ID NO: 1402951 - RNA, 19 nt, Homo sapiens
  misc_RNA (1)...(19): siRNA sense strand
gcaagcgguuucuggauca

SEQ ID NO: 1402952 - RNA, 19 nt, Homo sapiens
  misc_RNA (1)...(19): siRNA sense strand
agaaggcgauccaacaaga

SEQ ID NO: 1402953 - RNA, 19 nt, Homo sapiens
  misc_RNA (1)...(19): siRNA sense strand
ggaaauggccucaggucau

SEQ ID NO: 1402954 - RNA, 19 nt, Homo sapiens
  misc_RNA (1)...(19): siRNA sense strand
uaugaugguuccaagguaa

SEQ ID NO: 1402955 - RNA, 19 nt, Homo sapiens
  misc_RNA (1)...(19): siRNA sense strand
gaccaaagaggaagccauu

SEQ ID NO: 1402956 - RNA, 19 nt, Homo sapiens
  misc_RNA (1)...(19): siRNA sense strand
aagaagaacucgacuuguc

SEQ ID NO: 1402957 - RNA, 19 nt, Homo sapiens
  misc_RNA (1)...(19): siRNA sense strand
gagcuggcauuuguuacuu

SEQ ID NO: 1402958 - RNA, 19 nt, Homo sapiens
  misc_RNA (1)...(19): siRNA sense strand
ggaacuagucuuucuccaa

SEQ ID NO: 1402959 - RNA, 19 nt, Homo sapiens
  misc_RNA (1)...(19): siRNA sense strand
ccauuagucuccacgaguu

SEQ ID NO: 1402960 - RNA, 19 nt, Homo sapiens
  misc_RNA (1)...(19): siRNA sense strand
gaaggcagcccgcauucug

SEQ ID NO: 1402961 - RNA, 19 nt, Homo sapiens
  misc_RNA (1)...(19): siRNA sense strand
caacaagagcuggcauuug

SEQ ID NO: 1402962 - RNA, 19 nt, Homo sapiens
  misc_RNA (1)...(19): siRNA sense strand
uauaaaggacugauuguca

SEQ ID NO: 1402963 - RNA, 19 nt, Homo sapiens
  misc_RNA (1)...(19): siRNA sense strand
uggaucagcuaguuggauu

SEQ ID NO: 1402964 - RNA, 19 nt, Homo sapiens
  misc_RNA (1)...(19): siRNA sense strand
gccaugaucuggagagcau

SEQ ID NO: 1402965 - RNA, 19 nt, Homo sapiens
  misc_RNA (1)...(19): siRNA sense strand
ggacagauugcuggaguug

SEQ ID NO: 1402966 - RNA, 19 nt, Homo sapiens
  misc_RNA (1)...(19): siRNA sense strand
ugauggagauuaccuuugg

SEQ ID NO: 1402967 - RNA, 19 nt, Homo sapiens
  misc_RNA (1)...(19): siRNA sense strand
ggaccuguuucccuagcuu

SEQ ID NO: 1402968 - RNA, 19 nt, Homo sapiens
  misc_RNA (1)...(19): siRNA sense strand
ccaaagaggaagccauuag

SEQ ID NO: 1402969 - RNA, 19 nt, Homo sapiens
  misc_RNA (1)...(19): siRNA sense strand
gacgaagcuuguccagaug

SEQ ID NO: 1402970 - RNA, 19 nt, Homo sapiens
  misc_RNA (1)...(19): siRNA sense strand
gcacggagugggacaccuu

SEQ ID NO: 1402971 - RNA, 19 nt, Homo sapiens
  misc_RNA (1)...(19): siRNA sense strand
ggaaggagaacggaugcuu

SEQ ID NO: 1402972 - RNA, 19 nt, Homo sapiens
  misc_RNA (1)...(19): siRNA sense strand
acagauugcuggaguuguc

SEQ ID NO: 1402973 - RNA, 19 nt, Homo sapiens
  misc_RNA (1)...(19): siRNA sense strand
ggagaacggaugcuugucu

SEQ ID NO: 1402974 - RNA, 19 nt, Homo sapiens
  misc_RNA (1)...(19): siRNA sense strand
caucugcccugaaagaaaa

SEQ ID NO: 1402975 - RNA, 19 nt, Homo sapiens
  misc_RNA (1)...(19): siRNA sense strand
ccaacaagagcuggcauuu

SEQ ID NO: 1402976 - RNA, 19 nt, Homo sapiens
  misc_RNA (1)...(19): siRNA sense strand
caaagaggaagccauuagu

SEQ ID NO: 1402977 - RNA, 19 nt, Homo sapiens
  misc_RNA (1)...(19): siRNA sense strand
gaaguuugccauaaaaguu

SEQ ID NO: 1402978 - RNA, 19 nt, Homo sapiens
  misc_RNA (1)...(19): siRNA sense strand
gaagaccauccuggccaua

SEQ ID NO: 1402979 - RNA, 19 nt, Homo sapiens
  misc_RNA (1)...(19): siRNA sense strand
aaacaccagugaucugcau

SEQ ID NO: 1402980 - RNA, 19 nt, Homo sapiens
  misc_RNA (1)...(19): siRNA sense strand
uuaugaugguuccaaggua

SEQ ID NO: 1402981 - RNA, 19 nt, Homo sapiens
  misc_RNA (1)...(19): siRNA sense strand
cauaaaaguugauggagau

SEQ ID NO: 1402982 - RNA, 19 nt, Homo sapiens
  misc_RNA (1)...(19): siRNA sense strand
cagcuaguuggauucuuua

SEQ ID NO: 1402983 - RNA, 19 nt, Homo sapiens
  misc_RNA (1)...(19): siRNA sense strand
ccgcuguguuucugacauu

SEQ ID NO: 1402984 - RNA, 19 nt, Homo sapiens
  misc_RNA (1)...(19): siRNA sense strand
cagauggcagggcuccuua

SEQ ID NO: 1402985 - RNA, 19 nt, Homo sapiens
  misc_RNA (1)...(19): siRNA sense strand
cuguggagcucccugaugu

SEQ ID NO: 1402986 - RNA, 19 nt, Homo sapiens
  misc_RNA (1)...(19): siRNA sense strand
ccgccaagguccugcuuca

SEQ ID NO: 1402987 - RNA, 19 nt, Homo sapiens
  misc_RNA (1)...(19): siRNA sense strand
ggagugggacaccuucauc

SEQ ID NO: 1402988 - RNA, 19 nt, Homo sapiens
  misc_RNA (1)...(19): siRNA sense strand
gaccuguuucccuagcuua

SEQ ID NO: 1402989 - RNA, 19 nt, Homo sapiens
  misc_RNA (1)...(19): siRNA sense strand
guccagauuaucccuguuu

SEQ ID NO: 1402990 - RNA, 19 nt, Homo sapiens
  misc_RNA (1)...(19): siRNA sense strand
cuggcugcauccucuauaa

SEQ ID NO: 1402991 - RNA, 19 nt, Homo sapiens
  misc_RNA (1)...(19): siRNA sense strand
guugauggagauuaccuuu

SEQ ID NO: 1402992 - RNA, 19 nt, Homo sapiens
  misc_RNA (1)...(19): siRNA sense strand
acacagccaucagcagcuu

SEQ ID NO: 1402993 - RNA, 19 nt, Homo sapiens
  misc_RNA (1)...(19): siRNA sense strand
cuguuucccuagcuuauga

SEQ ID NO: 1402994 - RNA, 19 nt, Homo sapiens
  misc_RNA (1)...(19): siRNA sense strand
gcuaguuggauucuuuaau

SEQ ID NO: 1402995 - RNA, 19 nt, Homo sapiens
  misc_RNA (1)...(19): siRNA sense strand
acaugugccuguuccagau

SEQ ID NO: 1402996 - RNA, 19 nt, Homo sapiens
  misc_RNA (1)...(19): siRNA sense strand
gaaggaacuagucuuucuc

SEQ ID NO: 1402997 - RNA, 19 nt, Homo sapiens
  misc_RNA (1)...(19): siRNA sense strand
gaugacaaggucucuagca

SEQ ID NO: 1402998 - RNA, 19 nt, Homo sapiens
  misc_RNA (1)...(19): siRNA sense strand
cagaugacaaggucucuag

SEQ ID NO: 1402999 - RNA, 19 nt, Homo sapiens
  misc_RNA (1)...(19): siRNA sense strand
gcaggacuccaggaugguu

SEQ ID NO: 1403000 - RNA, 19 nt, Homo sapiens
  misc_RNA (1)...(19): siRNA sense strand
ugacucuccuccuacucuu

SEQ ID NO: 1403001 - RNA, 19 nt, Homo sapiens
  misc_RNA (1)...(19): siRNA sense strand
gcugcauccucuauaaagg

SEQ ID NO: 1403002 - RNA, 19 nt, Homo sapiens
  misc_RNA (1)...(19): siRNA sense strand
gcgcucgccucacauucuc

SEQ ID NO: 1403003 - RNA, 19 nt, Homo sapiens
  misc_RNA (1)...(19): siRNA sense strand
cagcccagcaccauccaaa

SEQ ID NO: 1403004 - RNA, 19 nt, Homo sapiens
  misc_RNA (1)...(19): siRNA sense strand
ggacaccuucaucgagcaa

SEQ ID NO: 1403005 - RNA, 19 nt, Homo sapiens
  misc_RNA (1)...(19): siRNA sense strand
gcuggcugcauccucuaua

SEQ ID NO: 1403006 - RNA, 19 nt, Homo sapiens
  misc_RNA (1)...(19): siRNA sense strand
acaccagugaucugcauaa

SEQ ID NO: 1403007 - RNA, 19 nt, Homo sapiens
  misc_RNA (1)...(19): siRNA sense strand
caucgagcaaauucugaaa

SEQ ID NO: 1403008 - RNA, 19 nt, Homo sapiens
  misc_RNA (1)...(19): siRNA sense strand
uccagaggcucaggaagug

SEQ ID NO: 1403009 - RNA, 19 nt, Homo sapiens
  misc_RNA (1)...(19): siRNA sense strand
gggaaggaacuagucuuuc

SEQ ID NO: 1403010 - RNA, 19 nt, Homo sapiens
  misc_RNA (1)...(19): siRNA sense strand
gaguugcuuuguggacaga

SEQ ID NO: 1403011 - RNA, 19 nt, Homo sapiens
  misc_RNA (1)...(19): siRNA sense strand
guugcuuuguggacagauu

SEQ ID NO: 1403012 - RNA, 19 nt, Homo sapiens
  misc_RNA (1)...(19): siRNA sense strand
acaccuucaucgagcaaau

SEQ ID NO: 1403013 - RNA, 19 nt, Homo sapiens
  misc_RNA (1)...(19): siRNA sense strand
aaagaggaagccauuaguc

SEQ ID NO: 1403014 - RNA, 19 nt, Homo sapiens
  misc_RNA (1)...(19): siRNA sense strand
gaaggcgauccaacaagag

SEQ ID NO: 1403015 - RNA, 19 nt, Homo sapiens
  misc_RNA (1)...(19): siRNA sense strand
gguccugcuucaccgaaca

SEQ ID NO: 1403016 - RNA, 19 nt, Homo sapiens
  misc_RNA (1)...(19): siRNA sense strand
ggaguuguccgcuguguuu

SEQ ID NO: 1403017 - RNA, 19 nt, Homo sapiens
  misc_RNA (1)...(19): siRNA sense strand
caagagcuggcauuuguua

SEQ ID NO: 1403018 - RNA, 19 nt, Homo sapiens
  misc_RNA (1)...(19): siRNA sense strand
gaagaaggcgauccaacaa

SEQ ID NO: 1403019 - RNA, 19 nt, Homo sapiens
  misc_RNA (1)...(19): siRNA sense strand
ggaagaaggcgauccaaca

SEQ ID NO: 1403020 - RNA, 19 nt, Homo sapiens
  misc_RNA (1)...(19): siRNA sense strand
ucagcuaguuggauucuuu

SEQ ID NO: 1403021 - RNA, 19 nt, Homo sapiens
  misc_RNA (1)...(19): siRNA sense strand
gcaagcgguuucuggauca

SEQ ID NO: 1403022 - RNA, 19 nt, Homo sapiens
  misc_RNA (1)...(19): siRNA sense strand
uaugaugguuccaagguaa

SEQ ID NO: 1403023 - RNA, 19 nt, Homo sapiens
  misc_RNA (1)...(19): siRNA sense strand
agaaggcgauccaacaaga

SEQ ID NO: 1403024 - RNA, 19 nt, Homo sapiens
  misc_RNA (1)...(19): siRNA sense strand
gagcuggcauuuguuacuu

SEQ ID NO: 1403025 - RNA, 19 nt, Homo sapiens
  misc_RNA (1)...(19): siRNA sense strand
caacaagagcuggcauuug

SEQ ID NO: 1403026 - RNA, 19 nt, Homo sapiens
  misc_RNA (1)...(19): siRNA sense strand
uggaucagcuaguuggauu

SEQ ID NO: 1403027 - RNA, 19 nt, Homo sapiens
  misc_RNA (1)...(19): siRNA sense strand
ggacagauugcuggaguug

SEQ ID NO: 1403028 - RNA, 19 nt, Homo sapiens
  misc_RNA (1)...(19): siRNA sense strand
ugauggagauuaccuuugg

SEQ ID NO: 1403029 - RNA, 19 nt, Homo sapiens
  misc_RNA (1)...(19): siRNA sense strand
ggaccuguuucccuagcuu

SEQ ID NO: 1403030 - RNA, 19 nt, Homo sapiens
  misc_RNA (1)...(19): siRNA sense strand
gcacggagugggacaccuu

SEQ ID NO: 1403031 - RNA, 19 nt, Homo sapiens
  misc_RNA (1)...(19): siRNA sense strand
ccaacaagagcuggcauuu

SEQ ID NO: 1403032 - RNA, 19 nt, Homo sapiens
  misc_RNA (1)...(19): siRNA sense strand
acagauugcuggaguuguc

SEQ ID NO: 1403033 - RNA, 19 nt, Homo sapiens
  misc_RNA (1)...(19): siRNA sense strand
gaaguuugccauaaaaguu

SEQ ID NO: 1403034 - RNA, 19 nt, Homo sapiens
  misc_RNA (1)...(19): siRNA sense strand
aaacaccagugaucugcau

SEQ ID NO: 1403035 - RNA, 19 nt, Homo sapiens
  misc_RNA (1)...(19): siRNA sense strand
uuaugaugguuccaaggua

SEQ ID NO: 1403036 - RNA, 19 nt, Homo sapiens
  misc_RNA (1)...(19): siRNA sense strand
cauaaaaguugauggagau

SEQ ID NO: 1403037 - RNA, 19 nt, Homo sapiens
  misc_RNA (1)...(19): siRNA sense strand
cagcuaguuggauucuuua

SEQ ID NO: 1403038 - RNA, 19 nt, Homo sapiens
  misc_RNA (1)...(19): siRNA sense strand
ccgcuguguuucugacauu

SEQ ID NO: 1403039 - RNA, 19 nt, Homo sapiens
  misc_RNA (1)...(19): siRNA sense strand
cuguggagcucccugaugu

SEQ ID NO: 1403040 - RNA, 19 nt, Homo sapiens
  misc_RNA (1)...(19): siRNA sense strand
ggagugggacaccuucauc

SEQ ID NO: 1403041 - RNA, 19 nt, Homo sapiens
  misc_RNA (1)...(19): siRNA sense strand
gaccuguuucccuagcuua

SEQ ID NO: 1403042 - RNA, 19 nt, Homo sapiens
  misc_RNA (1)...(19): siRNA sense strand
guugauggagauuaccuuu

SEQ ID NO: 1403043 - RNA, 19 nt, Homo sapiens
  misc_RNA (1)...(19): siRNA sense strand
cuguuucccuagcuuauga

SEQ ID NO: 1403044 - RNA, 19 nt, Homo sapiens
  misc_RNA (1)...(19): siRNA sense strand
gcuaguuggauucuuuaau

SEQ ID NO: 1403045 - RNA, 19 nt, Homo sapiens
  misc_RNA (1)...(19): siRNA sense strand
ugacucuccuccuacucuu

SEQ ID NO: 1403046 - RNA, 19 nt, Homo sapiens
  misc_RNA (1)...(19): siRNA sense strand
ggacaccuucaucgagcaa

SEQ ID NO: 1403047 - RNA, 19 nt, Homo sapiens
  misc_RNA (1)...(19): siRNA sense strand
acaccagugaucugcauaa

SEQ ID NO: 1403048 - RNA, 19 nt, Homo sapiens
  misc_RNA (1)...(19): siRNA sense strand
gaguugcuuuguggacaga

SEQ ID NO: 1403049 - RNA, 19 nt, Homo sapiens
  misc_RNA (1)...(19): siRNA sense strand
caucgagcaaauucugaaa

SEQ ID NO: 1403050 - RNA, 19 nt, Homo sapiens
  misc_RNA (1)...(19): siRNA sense strand
guugcuuuguggacagauu

SEQ ID NO: 1403051 - RNA, 19 nt, Homo sapiens
  misc_RNA (1)...(19): siRNA sense strand
gaaggcgauccaacaagag

SEQ ID NO: 1403052 - RNA, 19 nt, Homo sapiens
  misc_RNA (1)...(19): siRNA sense strand
acaccuucaucgagcaaau

SEQ ID NO: 1403053 - RNA, 19 nt, Homo sapiens
  misc_RNA (1)...(19): siRNA sense strand
gaacucgacuugucugaaa

SEQ ID NO: 1403054 - RNA, 19 nt, Homo sapiens
  misc_RNA (1)...(19): siRNA sense strand
gagcacaucugcccugaaa

SEQ ID NO: 1403055 - RNA, 19 nt, Homo sapiens
  misc_RNA (1)...(19): siRNA sense strand
ggaaggaacuagucuuucu

SEQ ID NO: 1403056 - RNA, 19 nt, Homo sapiens
  misc_RNA (1)...(19): siRNA sense strand
ugacgaagcuuguccagau

SEQ ID NO: 1403057 - RNA, 19 nt, Homo sapiens
  misc_RNA (1)...(19): siRNA sense strand
ggaguuguccgcuguguuu

SEQ ID NO: 1403058 - RNA, 19 nt, Homo sapiens
  misc_RNA (1)...(19): siRNA sense strand
caagagcuggcauuuguua

SEQ ID NO: 1403059 - RNA, 19 nt, Homo sapiens
  misc_RNA (1)...(19): siRNA sense strand
gcacaucugcccugaaaga

SEQ ID NO: 1403060 - RNA, 19 nt, Homo sapiens
  misc_RNA (1)...(19): siRNA sense strand
gaagaaggcgauccaacaa

SEQ ID NO: 1403061 - RNA, 19 nt, Homo sapiens
  misc_RNA (1)...(19): siRNA sense strand
ggaagaaggcgauccaaca

SEQ ID NO: 1403062 - RNA, 19 nt, Homo sapiens
  misc_RNA (1)...(19): siRNA sense strand
ucagcuaguuggauucuuu

SEQ ID NO: 1403063 - RNA, 19 nt, Homo sapiens
  misc_RNA (1)...(19): siRNA sense strand
gacaaggucucuagcaucu

SEQ ID NO: 1403064 - RNA, 19 nt, Homo sapiens
  misc_RNA (1)...(19): siRNA sense strand
gcaagcgguuucuggauca

SEQ ID NO: 1403065 - RNA, 19 nt, Homo sapiens
  misc_RNA (1)...(19): siRNA sense strand
agaaggcgauccaacaaga

SEQ ID NO: 1403066 - RNA, 19 nt, Homo sapiens
  misc_RNA (1)...(19): siRNA sense strand
ggaaauggccucaggucau

SEQ ID NO: 1403067 - RNA, 19 nt, Homo sapiens
  misc_RNA (1)...(19): siRNA sense strand
uaugaugguuccaagguaa

SEQ ID NO: 1403068 - RNA, 19 nt, Homo sapiens
  misc_RNA (1)...(19): siRNA sense strand
gaccaaagaggaagccauu

SEQ ID NO: 1403069 - RNA, 19 nt, Homo sapiens
  misc_RNA (1)...(19): siRNA sense strand
aagaagaacucgacuuguc

SEQ ID NO: 1403070 - RNA, 19 nt, Homo sapiens
  misc_RNA (1)...(19): siRNA sense strand
gagcuggcauuuguuacuu

SEQ ID NO: 1403071 - RNA, 19 nt, Homo sapiens
  misc_RNA (1)...(19): siRNA sense strand
ggaacuagucuuucuccaa

SEQ ID NO: 1403072 - RNA, 19 nt, Homo sapiens
  misc_RNA (1)...(19): siRNA sense strand
ccauuagucuccacgaguu

SEQ ID NO: 1403073 - RNA, 19 nt, Homo sapiens
  misc_RNA (1)...(19): siRNA sense strand
gaaggcagcccgcauucug

SEQ ID NO: 1403074 - RNA, 19 nt, Homo sapiens
  misc_RNA (1)...(19): siRNA sense strand
caacaagagcuggcauuug

SEQ ID NO: 1403075 - RNA, 19 nt, Homo sapiens
  misc_RNA (1)...(19): siRNA sense strand
uauaaaggacugauuguca

SEQ ID NO: 1403076 - RNA, 19 nt, Homo sapiens
  misc_RNA (1)...(19): siRNA sense strand
uggaucagcuaguuggauu

SEQ ID NO: 1403077 - RNA, 19 nt, Homo sapiens
  misc_RNA (1)...(19): siRNA sense strand
gccaugaucuggagagcau

SEQ ID NO: 1403078 - RNA, 19 nt, Homo sapiens
  misc_RNA (1)...(19): siRNA sense strand
ggacagauugcuggaguug

SEQ ID NO: 1403079 - RNA, 19 nt, Homo sapiens
  misc_RNA (1)...(19): siRNA sense strand
ugauggagauuaccuuugg

SEQ ID NO: 1403080 - RNA, 19 nt, Homo sapiens
  misc_RNA (1)...(19): siRNA sense strand
ggaccuguuucccuagcuu

SEQ ID NO: 1403081 - RNA, 19 nt, Homo sapiens
  misc_RNA (1)...(19): siRNA sense strand
ccaaagaggaagccauuag

SEQ ID NO: 1403082 - RNA, 19 nt, Homo sapiens
  misc_RNA (1)...(19): siRNA sense strand
gacgaagcuuguccagaug

SEQ ID NO: 1403083 - RNA, 19 nt, Homo sapiens
  misc_RNA (1)...(19): siRNA sense strand
gcacggagugggacaccuu

SEQ ID NO: 1403084 - RNA, 19 nt, Homo sapiens
  misc_RNA (1)...(19): siRNA sense strand
ggaaggagaacggaugcuu

SEQ ID NO: 1403085 - RNA, 19 nt, Homo sapiens
  misc_RNA (1)...(19): siRNA sense strand
acagauugcuggaguuguc

SEQ ID NO: 1403086 - RNA, 19 nt, Homo sapiens
  misc_RNA (1)...(19): siRNA sense strand
ggagaacggaugcuugucu

SEQ ID NO: 1403087 - RNA, 19 nt, Homo sapiens
  misc_RNA (1)...(19): siRNA sense strand
caucugcccugaaagaaaa

SEQ ID NO: 1403088 - RNA, 19 nt, Homo sapiens
  misc_RNA (1)...(19): siRNA sense strand
ccaacaagagcuggcauuu

SEQ ID NO: 1403089 - RNA, 19 nt, Homo sapiens
  misc_RNA (1)...(19): siRNA sense strand
caaagaggaagccauuagu

SEQ ID NO: 1403090 - RNA, 19 nt, Homo sapiens
  misc_RNA (1)...(19): siRNA sense strand
gaaguuugccauaaaaguu

SEQ ID NO: 1403091 - RNA, 19 nt, Homo sapiens
  misc_RNA (1)...(19): siRNA sense strand
gaagaccauccuggccaua

SEQ ID NO: 1403092 - RNA, 19 nt, Homo sapiens
  misc_RNA (1)...(19): siRNA sense strand
aaacaccagugaucugcau

SEQ ID NO: 1403093 - RNA, 19 nt, Homo sapiens
  misc_RNA (1)...(19): siRNA sense strand
uuaugaugguuccaaggua

SEQ ID NO: 1403094 - RNA, 19 nt, Homo sapiens
  misc_RNA (1)...(19): siRNA sense strand
cauaaaaguugauggagau

SEQ ID NO: 1403095 - RNA, 19 nt, Homo sapiens
  misc_RNA (1)...(19): siRNA sense strand
cagcuaguuggauucuuua

SEQ ID NO: 1403096 - RNA, 19 nt, Homo sapiens
  misc_RNA (1)...(19): siRNA sense strand
ccgcuguguuucugacauu

SEQ ID NO: 1403097 - RNA, 19 nt, Homo sapiens
  misc_RNA (1)...(19): siRNA sense strand
cagauggcagggcuccuua

SEQ ID NO: 1403098 - RNA, 19 nt, Homo sapiens
  misc_RNA (1)...(19): siRNA sense strand
cuguggagcucccugaugu

SEQ ID NO: 1403099 - RNA, 19 nt, Homo sapiens
  misc_RNA (1)...(19): siRNA sense strand
ccgccaagguccugcuuca

SEQ ID NO: 1403100 - RNA, 19 nt, Homo sapiens
  misc_RNA (1)...(19): siRNA sense strand
ggagugggacaccuucauc

SEQ ID NO: 1403101 - RNA, 19 nt, Homo sapiens
  misc_RNA (1)...(19): siRNA sense strand
gaccuguuucccuagcuua

SEQ ID NO: 1403102 - RNA, 19 nt, Homo sapiens
  misc_RNA (1)...(19): siRNA sense strand
guccagauuaucccuguuu

SEQ ID NO: 1403103 - RNA, 19 nt, Homo sapiens
  misc_RNA (1)...(19): siRNA sense strand
cuggcugcauccucuauaa

SEQ ID NO: 1403104 - RNA, 19 nt, Homo sapiens
  misc_RNA (1)...(19): siRNA sense strand
guugauggagauuaccuuu

SEQ ID NO: 1403105 - RNA, 19 nt, Homo sapiens
  misc_RNA (1)...(19): siRNA sense strand
acacagccaucagcagcuu

SEQ ID NO: 1403106 - RNA, 19 nt, Homo sapiens
  misc_RNA (1)...(19): siRNA sense strand
cuguuucccuagcuuauga

SEQ ID NO: 1403107 - RNA, 19 nt, Homo sapiens
  misc_RNA (1)...(19): siRNA sense strand
gcuaguuggauucuuuaau

SEQ ID NO: 1403108 - RNA, 19 nt, Homo sapiens
  misc_RNA (1)...(19): siRNA sense strand
acaugugccuguuccagau

SEQ ID NO: 1403109 - RNA, 19 nt, Homo sapiens
  misc_RNA (1)...(19): siRNA sense strand
gaaggaacuagucuuucuc

SEQ ID NO: 1403110 - RNA, 19 nt, Homo sapiens
  misc_RNA (1)...(19): siRNA sense strand
gaugacaaggucucuagca

SEQ ID NO: 1403111 - RNA, 19 nt, Homo sapiens
  misc_RNA (1)...(19): siRNA sense strand
cagaugacaaggucucuag

SEQ ID NO: 1403112 - RNA, 19 nt, Homo sapiens
  misc_RNA (1)...(19): siRNA sense strand
gcaggacuccaggaugguu

SEQ ID NO: 1403113 - RNA, 19 nt, Homo sapiens
  misc_RNA (1)...(19): siRNA sense strand
ugacucuccuccuacucuu

SEQ ID NO: 1403114 - RNA, 19 nt, Homo sapiens
  misc_RNA (1)...(19): siRNA sense strand
gcugcauccucuauaaagg

SEQ ID NO: 1403115 - RNA, 19 nt, Homo sapiens
  misc_RNA (1)...(19): siRNA sense strand
gcgcucgccucacauucuc

SEQ ID NO: 1403116 - RNA, 19 nt, Homo sapiens
  misc_RNA (1)...(19): siRNA sense strand
cagcccagcaccauccaaa

SEQ ID NO: 1403117 - RNA, 19 nt, Homo sapiens
  misc_RNA (1)...(19): siRNA sense strand
ggacaccuucaucgagcaa

SEQ ID NO: 1403118 - RNA, 19 nt, Homo sapiens
  misc_RNA (1)...(19): siRNA sense strand
gcuggcugcauccucuaua

SEQ ID NO: 1403119 - RNA, 19 nt, Homo sapiens
  misc_RNA (1)...(19): siRNA sense strand
acaccagugaucugcauaa

SEQ ID NO: 1403120 - RNA, 19 nt, Homo sapiens
  misc_RNA (1)...(19): siRNA sense strand
caucgagcaaauucugaaa

SEQ ID NO: 1403121 - RNA, 19 nt, Homo sapiens
  misc_RNA (1)...(19): siRNA sense strand
uccagaggcucaggaagug

SEQ ID NO: 1403122 - RNA, 19 nt, Homo sapiens
  misc_RNA (1)...(19): siRNA sense strand
gggaaggaacuagucuuuc

SEQ ID NO: 1403123 - RNA, 19 nt, Homo sapiens
  misc_RNA (1)...(19): siRNA sense strand
gaguugcuuuguggacaga

SEQ ID NO: 1403124 - RNA, 19 nt, Homo sapiens
  misc_RNA (1)...(19): siRNA sense strand
guugcuuuguggacagauu

SEQ ID NO: 1403125 - RNA, 19 nt, Homo sapiens
  misc_RNA (1)...(19): siRNA sense strand
acaccuucaucgagcaaau

SEQ ID NO: 1403126 - RNA, 19 nt, Homo sapiens
  misc_RNA (1)...(19): siRNA sense strand
aaagaggaagccauuaguc

SEQ ID NO: 1403127 - RNA, 19 nt, Homo sapiens
  misc_RNA (1)...(19): siRNA sense strand
gaaggcgauccaacaagag

SEQ ID NO: 1403128 - RNA, 19 nt, Homo sapiens
  misc_RNA (1)...(19): siRNA sense strand
gguccugcuucaccgaaca

SEQ ID NO: 1403129 - RNA, 19 nt, Homo sapiens
  misc_RNA (1)...(19): siRNA sense strand
ggaguuguccgcuguguuu

SEQ ID NO: 1403130 - RNA, 19 nt, Homo sapiens
  misc_RNA (1)...(19): siRNA sense strand
caagagcuggcauuuguua

SEQ ID NO: 1403131 - RNA, 19 nt, Homo sapiens
  misc_RNA (1)...(19): siRNA sense strand
gaagaaggcgauccaacaa

SEQ ID NO: 1403132 - RNA, 19 nt, Homo sapiens
  misc_RNA (1)...(19): siRNA sense strand
ggaagaaggcgauccaaca

SEQ ID NO: 1403133 - RNA, 19 nt, Homo sapiens
  misc_RNA (1)...(19): siRNA sense strand
ucagcuaguuggauucuuu

SEQ ID NO: 1403134 - RNA, 19 nt, Homo sapiens
  misc_RNA (1)...(19): siRNA sense strand
gcaagcgguuucuggauca

SEQ ID NO: 1403135 - RNA, 19 nt, Homo sapiens
  misc_RNA (1)...(19): siRNA sense strand
uaugaugguuccaagguaa

SEQ ID NO: 1403136 - RNA, 19 nt, Homo sapiens
  misc_RNA (1)...(19): siRNA sense strand
agaaggcgauccaacaaga

SEQ ID NO: 1403137 - RNA, 19 nt, Homo sapiens
  misc_RNA (1)...(19): siRNA sense strand
gagcuggcauuuguuacuu

SEQ ID NO: 1403138 - RNA, 19 nt, Homo sapiens
  misc_RNA (1)...(19): siRNA sense strand
gaaggcagcccgcauucug

SEQ ID NO: 1403139 - RNA, 19 nt, Homo sapiens
  misc_RNA (1)...(19): siRNA sense strand
caacaagagcuggcauuug

SEQ ID NO: 1403140 - RNA, 19 nt, Homo sapiens
  misc_RNA (1)...(19): siRNA sense strand
uauaaaggacugauuguca

SEQ ID NO: 1403141 - RNA, 19 nt, Homo sapiens
  misc_RNA (1)...(19): siRNA sense strand
uggaucagcuaguuggauu

SEQ ID NO: 1403142 - RNA, 19 nt, Homo sapiens
  misc_RNA (1)...(19): siRNA sense strand
ggacagauugcuggaguug

SEQ ID NO: 1403143 - RNA, 19 nt, Homo sapiens
  misc_RNA (1)...(19): siRNA sense strand
ugauggagauuaccuuugg

SEQ ID NO: 1403144 - RNA, 19 nt, Homo sapiens
  misc_RNA (1)...(19): siRNA sense strand
ggaccuguuucccuagcuu

SEQ ID NO: 1403145 - RNA, 19 nt, Homo sapiens
  misc_RNA (1)...(19): siRNA sense strand
gcacggagugggacaccuu

SEQ ID NO: 1403146 - RNA, 19 nt, Homo sapiens
  misc_RNA (1)...(19): siRNA sense strand
ccaacaagagcuggcauuu

SEQ ID NO: 1403147 - RNA, 19 nt, Homo sapiens
  misc_RNA (1)...(19): siRNA sense strand
acagauugcuggaguuguc

SEQ ID NO: 1403148 - RNA, 19 nt, Homo sapiens
  misc_RNA (1)...(19): siRNA sense strand
gaaguuugccauaaaaguu

SEQ ID NO: 1403149 - RNA, 19 nt, Homo sapiens
  misc_RNA (1)...(19): siRNA sense strand
aaacaccagugaucugcau

SEQ ID NO: 1403150 - RNA, 19 nt, Homo sapiens
  misc_RNA (1)...(19): siRNA sense strand
uuaugaugguuccaaggua

SEQ ID NO: 1403151 - RNA, 19 nt, Homo sapiens
  misc_RNA (1)...(19): siRNA sense strand
cauaaaaguugauggagau

SEQ ID NO: 1403152 - RNA, 19 nt, Homo sapiens
  misc_RNA (1)...(19): siRNA sense strand
cagcuaguuggauucuuua

SEQ ID NO: 1403153 - RNA, 19 nt, Homo sapiens
  misc_RNA (1)...(19): siRNA sense strand
ccgcuguguuucugacauu

SEQ ID NO: 1403154 - RNA, 19 nt, Homo sapiens
  misc_RNA (1)...(19): siRNA sense strand
cuguggagcucccugaugu

SEQ ID NO: 1403155 - RNA, 19 nt, Homo sapiens
  misc_RNA (1)...(19): siRNA sense strand
ccgccaagguccugcuuca

SEQ ID NO: 1403156 - RNA, 19 nt, Homo sapiens
  misc_RNA (1)...(19): siRNA sense strand
ggagugggacaccuucauc

SEQ ID NO: 1403157 - RNA, 19 nt, Homo sapiens
  misc_RNA (1)...(19): siRNA sense strand
gaccuguuucccuagcuua

SEQ ID NO: 1403158 - RNA, 19 nt, Homo sapiens
  misc_RNA (1)...(19): siRNA sense strand
cuggcugcauccucuauaa

SEQ ID NO: 1403159 - RNA, 19 nt, Homo sapiens
  misc_RNA (1)...(19): siRNA sense strand
guugauggagauuaccuuu

SEQ ID NO: 1403160 - RNA, 19 nt, Homo sapiens
  misc_RNA (1)...(19): siRNA sense strand
cuguuucccuagcuuauga

SEQ ID NO: 1403161 - RNA, 19 nt, Homo sapiens
  misc_RNA (1)...(19): siRNA sense strand
gcuaguuggauucuuuaau

SEQ ID NO: 1403162 - RNA, 19 nt, Homo sapiens
  misc_RNA (1)...(19): siRNA sense strand
ugacucuccuccuacucuu

SEQ ID NO: 1403163 - RNA, 19 nt, Homo sapiens
  misc_RNA (1)...(19): siRNA sense strand
gcugcauccucuauaaagg

SEQ ID NO: 1403164 - RNA, 19 nt, Homo sapiens
  misc_RNA (1)...(19): siRNA sense strand
gcgcucgccucacauucuc

SEQ ID NO: 1403165 - RNA, 19 nt, Homo sapiens
  misc_RNA (1)...(19): siRNA sense strand
ggacaccuucaucgagcaa

SEQ ID NO: 1403166 - RNA, 19 nt, Homo sapiens
  misc_RNA (1)...(19): siRNA sense strand
gcuggcugcauccucuaua

SEQ ID NO: 1403167 - RNA, 19 nt, Homo sapiens
  misc_RNA (1)...(19): siRNA sense strand
acaccagugaucugcauaa

SEQ ID NO: 1403168 - RNA, 19 nt, Homo sapiens
  misc_RNA (1)...(19): siRNA sense strand
guugcuuuguggacagauu

SEQ ID NO: 1403169 - RNA, 19 nt, Homo sapiens
  misc_RNA (1)...(19): siRNA sense strand
gaguugcuuuguggacaga

SEQ ID NO: 1403170 - RNA, 19 nt, Homo sapiens
  misc_RNA (1)...(19): siRNA sense strand
caucgagcaaauucugaaa

SEQ ID NO: 1403171 - RNA, 19 nt, Homo sapiens
  misc_RNA (1)...(19): siRNA sense strand
gaaggcgauccaacaagag

SEQ ID NO: 1403172 - RNA, 19 nt, Homo sapiens
  misc_RNA (1)...(19): siRNA sense strand
gguccugcuucaccgaaca

SEQ ID NO: 1403173 - RNA, 19 nt, Homo sapiens
  misc_RNA (1)...(19): siRNA sense strand
acaccuucaucgagcaaau

SEQ ID NO: 1403174 - RNA, 19 nt, Homo sapiens
  misc_RNA (1)...(19): siRNA sense strand
gaacucgacuugucugaaa

SEQ ID NO: 1403175 - RNA, 19 nt, Homo sapiens
  misc_RNA (1)...(19): siRNA sense strand
gagcacaucugcccugaaa

SEQ ID NO: 1403176 - RNA, 19 nt, Homo sapiens
  misc_RNA (1)...(19): siRNA sense strand
ggaaggaacuagucuuucu

SEQ ID NO: 1403177 - RNA, 19 nt, Homo sapiens
  misc_RNA (1)...(19): siRNA sense strand
ugacgaagcuuguccagau

SEQ ID NO: 1403178 - RNA, 19 nt, Homo sapiens
  misc_RNA (1)...(19): siRNA sense strand
gagacagacugcaggauga

SEQ ID NO: 1403179 - RNA, 19 nt, Homo sapiens
  misc_RNA (1)...(19): siRNA sense strand
ggaguuguccgcuguguuu

SEQ ID NO: 1403180 - RNA, 19 nt, Homo sapiens
  misc_RNA (1)...(19): siRNA sense strand
caagagcuggcauuuguua

SEQ ID NO: 1403181 - RNA, 19 nt, Homo sapiens
  misc_RNA (1)...(19): siRNA sense strand
gcacaucugcccugaaaga

SEQ ID NO: 1403182 - RNA, 19 nt, Homo sapiens
  misc_RNA (1)...(19): siRNA sense strand
gaagaaggcgauccaacaa

SEQ ID NO: 1403183 - RNA, 19 nt, Homo sapiens
  misc_RNA (1)...(19): siRNA sense strand
ggaagaaggcgauccaaca

SEQ ID NO: 1403184 - RNA, 19 nt, Homo sapiens
  misc_RNA (1)...(19): siRNA sense strand
ucagcuaguuggauucuuu

SEQ ID NO: 1403185 - RNA, 19 nt, Homo sapiens
  misc_RNA (1)...(19): siRNA sense strand
ccucaguucuauuacguua

SEQ ID NO: 1403186 - RNA, 19 nt, Homo sapiens
  misc_RNA (1)...(19): siRNA sense strand
gacaaggucucuagcaucu

SEQ ID NO: 1403187 - RNA, 19 nt, Homo sapiens
  misc_RNA (1)...(19): siRNA sense strand
gcaagcgguuucuggauca

SEQ ID NO: 1403188 - RNA, 19 nt, Homo sapiens
  misc_RNA (1)...(19): siRNA sense strand
agaaggcgauccaacaaga

SEQ ID NO: 1403189 - RNA, 19 nt, Homo sapiens
  misc_RNA (1)...(19): siRNA sense strand
uaugaugguuccaagguaa

SEQ ID NO: 1403190 - RNA, 19 nt, Homo sapiens
  misc_RNA (1)...(19): siRNA sense strand
ggaaauggccucaggucau

SEQ ID NO: 1403191 - RNA, 19 nt, Homo sapiens
  misc_RNA (1)...(19): siRNA sense strand
gaccaaagaggaagccauu

SEQ ID NO: 1403192 - RNA, 19 nt, Homo sapiens
  misc_RNA (1)...(19): siRNA sense strand
aagaagaacucgacuuguc

SEQ ID NO: 1403193 - RNA, 19 nt, Homo sapiens
  misc_RNA (1)...(19): siRNA sense strand
gagcuggcauuuguuacuu

SEQ ID NO: 1403194 - RNA, 19 nt, Homo sapiens
  misc_RNA (1)...(19): siRNA sense strand
ggaacuagucuuucuccaa

SEQ ID NO: 1403195 - RNA, 19 nt, Homo sapiens
  misc_RNA (1)...(19): siRNA sense strand
ccauuagucuccacgaguu

SEQ ID NO: 1403196 - RNA, 19 nt, Homo sapiens
  misc_RNA (1)...(19): siRNA sense strand
gaaggcagcccgcauucug

SEQ ID NO: 1403197 - RNA, 19 nt, Homo sapiens
  misc_RNA (1)...(19): siRNA sense strand
uauaaaggacugauuguca

SEQ ID NO: 1403198 - RNA, 19 nt, Homo sapiens
  misc_RNA (1)...(19): siRNA sense strand
caacaagagcuggcauuug

SEQ ID NO: 1403199 - RNA, 19 nt, Homo sapiens
  misc_RNA (1)...(19): siRNA sense strand
uggaucagcuaguuggauu

SEQ ID NO: 1403200 - RNA, 19 nt, Homo sapiens
  misc_RNA (1)...(19): siRNA sense strand
gccaugaucuggagagcau

SEQ ID NO: 1403201 - RNA, 19 nt, Homo sapiens
  misc_RNA (1)...(19): siRNA sense strand
ggacagauugcuggaguug

SEQ ID NO: 1403202 - RNA, 19 nt, Homo sapiens
  misc_RNA (1)...(19): siRNA sense strand
ugauggagauuaccuuugg

SEQ ID NO: 1403203 - RNA, 19 nt, Homo sapiens
  misc_RNA (1)...(19): siRNA sense strand
ggaccuguuucccuagcuu

SEQ ID NO: 1403204 - RNA, 19 nt, Homo sapiens
  misc_RNA (1)...(19): siRNA sense strand
ccaaagaggaagccauuag

SEQ ID NO: 1403205 - RNA, 19 nt, Homo sapiens
  misc_RNA (1)...(19): siRNA sense strand
gggcuugugugguacuuag

SEQ ID NO: 1403206 - RNA, 19 nt, Homo sapiens
  misc_RNA (1)...(19): siRNA sense strand
gacgaagcuuguccagaug

SEQ ID NO: 1403207 - RNA, 19 nt, Homo sapiens
  misc_RNA (1)...(19): siRNA sense strand
gcacggagugggacaccuu

SEQ ID NO: 1403208 - RNA, 19 nt, Homo sapiens
  misc_RNA (1)...(19): siRNA sense strand
uuccugggcuuguguggua

SEQ ID NO: 1403209 - RNA, 19 nt, Homo sapiens
  misc_RNA (1)...(19): siRNA sense strand
ggaaggagaacggaugcuu

SEQ ID NO: 1403210 - RNA, 19 nt, Homo sapiens
  misc_RNA (1)...(19): siRNA sense strand
acagauugcuggaguuguc

SEQ ID NO: 1403211 - RNA, 19 nt, Homo sapiens
  misc_RNA (1)...(19): siRNA sense strand
ggagaacggaugcuugucu

SEQ ID NO: 1403212 - RNA, 19 nt, Homo sapiens
  misc_RNA (1)...(19): siRNA sense strand
caucugcccugaaagaaaa

SEQ ID NO: 1403213 - RNA, 19 nt, Homo sapiens
  misc_RNA (1)...(19): siRNA sense strand
caaagaggaagccauuagu

SEQ ID NO: 1403214 - RNA, 19 nt, Homo sapiens
  misc_RNA (1)...(19): siRNA sense strand
ccaacaagagcuggcauuu

SEQ ID NO: 1403215 - RNA, 19 nt, Homo sapiens
  misc_RNA (1)...(19): siRNA sense strand
gaaguuugccauaaaaguu

SEQ ID NO: 1403216 - RNA, 19 nt, Homo sapiens
  misc_RNA (1)...(19): siRNA sense strand
ugaaagggagcgacacuca

SEQ ID NO: 1403217 - RNA, 19 nt, Homo sapiens
  misc_RNA (1)...(19): siRNA sense strand
gaagaccauccuggccaua

SEQ ID NO: 1403218 - RNA, 19 nt, Homo sapiens
  misc_RNA (1)...(19): siRNA sense strand
aaacaccagugaucugcau

SEQ ID NO: 1403219 - RNA, 19 nt, Homo sapiens
  misc_RNA (1)...(19): siRNA sense strand
uuaugaugguuccaaggua

SEQ ID NO: 1403220 - RNA, 19 nt, Homo sapiens
  misc_RNA (1)...(19): siRNA sense strand
cauaaaaguugauggagau

SEQ ID NO: 1403221 - RNA, 19 nt, Homo sapiens
  misc_RNA (1)...(19): siRNA sense strand
cagcuaguuggauucuuua

SEQ ID NO: 1403222 - RNA, 19 nt, Homo sapiens
  misc_RNA (1)...(19): siRNA sense strand
ccgcuguguuucugacauu

SEQ ID NO: 1403223 - RNA, 19 nt, Homo sapiens
  misc_RNA (1)...(19): siRNA sense strand
cagauggcagggcuccuua

SEQ ID NO: 1403224 - RNA, 19 nt, Homo sapiens
  misc_RNA (1)...(19): siRNA sense strand
cuguggagcucccugaugu

SEQ ID NO: 1403225 - RNA, 19 nt, Homo sapiens
  misc_RNA (1)...(19): siRNA sense strand
ccgccaagguccugcuuca

SEQ ID NO: 1403226 - RNA, 19 nt, Homo sapiens
  misc_RNA (1)...(19): siRNA sense strand
ggagugggacaccuucauc

SEQ ID NO: 1403227 - RNA, 19 nt, Homo sapiens
  misc_RNA (1)...(19): siRNA sense strand
gaccuguuucccuagcuua

SEQ ID NO: 1403228 - RNA, 19 nt, Homo sapiens
  misc_RNA (1)...(19): siRNA sense strand
guccagauuaucccuguuu

SEQ ID NO: 1403229 - RNA, 19 nt, Homo sapiens
  misc_RNA (1)...(19): siRNA sense strand
cuggcugcauccucuauaa

SEQ ID NO: 1403230 - RNA, 19 nt, Homo sapiens
  misc_RNA (1)...(19): siRNA sense strand
guugauggagauuaccuuu

SEQ ID NO: 1403231 - RNA, 19 nt, Homo sapiens
  misc_RNA (1)...(19): siRNA sense strand
acacagccaucagcagcuu

SEQ ID NO: 1403232 - RNA, 19 nt, Homo sapiens
  misc_RNA (1)...(19): siRNA sense strand
cuguuucccuagcuuauga

SEQ ID NO: 1403233 - RNA, 19 nt, Homo sapiens
  misc_RNA (1)...(19): siRNA sense strand
gcuaguuggauucuuuaau

SEQ ID NO: 1403234 - RNA, 19 nt, Homo sapiens
  misc_RNA (1)...(19): siRNA sense strand
acaugugccuguuccagau

SEQ ID NO: 1403235 - RNA, 19 nt, Homo sapiens
  misc_RNA (1)...(19): siRNA sense strand
gaaggaacuagucuuucuc

SEQ ID NO: 1403236 - RNA, 19 nt, Homo sapiens
  misc_RNA (1)...(19): siRNA sense strand
gaugacaaggucucuagca

SEQ ID NO: 1403237 - RNA, 19 nt, Homo sapiens
  misc_RNA (1)...(19): siRNA sense strand
cagaugacaaggucucuag

SEQ ID NO: 1403238 - RNA, 19 nt, Homo sapiens
  misc_RNA (1)...(19): siRNA sense strand
gcaggacuccaggaugguu

SEQ ID NO: 1403239 - RNA, 19 nt, Homo sapiens
  misc_RNA (1)...(19): siRNA sense strand
ugacucuccuccuacucuu

SEQ ID NO: 1403240 - RNA, 19 nt, Homo sapiens
  misc_RNA (1)...(19): siRNA sense strand
gcugcauccucuauaaagg

SEQ ID NO: 1403241 - RNA, 19 nt, Homo sapiens
  misc_RNA (1)...(19): siRNA sense strand
gcgcucgccucacauucuc

SEQ ID NO: 1403242 - RNA, 19 nt, Homo sapiens
  misc_RNA (1)...(19): siRNA sense strand
cagcccagcaccauccaaa

SEQ ID NO: 1403243 - RNA, 19 nt, Homo sapiens
  misc_RNA (1)...(19): siRNA sense strand
ggacaccuucaucgagcaa

SEQ ID NO: 1403244 - RNA, 19 nt, Homo sapiens
  misc_RNA (1)...(19): siRNA sense strand
gcuggcugcauccucuaua

SEQ ID NO: 1403245 - RNA, 19 nt, Homo sapiens
  misc_RNA (1)...(19): siRNA sense strand
acaccagugaucugcauaa

SEQ ID NO: 1403246 - RNA, 19 nt, Homo sapiens
  misc_RNA (1)...(19): siRNA sense strand
caucgagcaaauucugaaa

SEQ ID NO: 1403247 - RNA, 19 nt, Homo sapiens
  misc_RNA (1)...(19): siRNA sense strand
uccagaggcucaggaagug

SEQ ID NO: 1403248 - RNA, 19 nt, Homo sapiens
  misc_RNA (1)...(19): siRNA sense strand
gggaaggaacuagucuuuc

SEQ ID NO: 1403249 - RNA, 19 nt, Homo sapiens
  misc_RNA (1)...(19): siRNA sense strand
gaguugcuuuguggacaga

SEQ ID NO: 1403250 - RNA, 19 nt, Homo sapiens
  misc_RNA (1)...(19): siRNA sense strand
guugcuuuguggacagauu

SEQ ID NO: 1403251 - RNA, 19 nt, Homo sapiens
  misc_RNA (1)...(19): siRNA sense strand
acaccuucaucgagcaaau

SEQ ID NO: 1403252 - RNA, 19 nt, Homo sapiens
  misc_RNA (1)...(19): siRNA sense strand
gaaggcgauccaacaagag

SEQ ID NO: 1403253 - RNA, 19 nt, Homo sapiens
  misc_RNA (1)...(19): siRNA sense strand
aaagaggaagccauuaguc

SEQ ID NO: 1403254 - RNA, 19 nt, Homo sapiens
  misc_RNA (1)...(19): siRNA sense strand
gguccugcuucaccgaaca

SEQ ID NO: 1403255 - RNA, 19 nt, Homo sapiens
  misc_RNA (1)...(19): siRNA sense strand
gcuacaagccuggaguuga

SEQ ID NO: 1403256 - RNA, 19 nt, Homo sapiens
  misc_RNA (1)...(19): siRNA sense strand
cuacaagccuggaguugac

SEQ ID NO: 1403257 - RNA, 19 nt, Homo sapiens
  misc_RNA (1)...(19): siRNA sense strand
gcucggacgcaaucuguga

SEQ ID NO: 1403258 - RNA, 19 nt, Homo sapiens
  misc_RNA (1)...(19): siRNA sense strand
gcaauagcucggacgcaau

SEQ ID NO: 1403259 - RNA, 19 nt, Homo sapiens
  misc_RNA (1)...(19): siRNA sense strand
caauagcucggacgcaauc

SEQ ID NO: 1403260 - RNA, 19 nt, Homo sapiens
  misc_RNA (1)...(19): siRNA sense strand
ugacggggcuccacugugu

SEQ ID NO: 1403261 - RNA, 19 nt, Homo sapiens
  misc_RNA (1)...(19): siRNA sense strand
ucacuguccagcccacuga

SEQ ID NO: 1403262 - RNA, 19 nt, Homo sapiens
  misc_RNA (1)...(19): siRNA sense strand
gcgacaaccaggccugcaa

SEQ ID NO: 1403263 - RNA, 19 nt, Homo sapiens
  misc_RNA (1)...(19): siRNA sense strand
ccauccugcuggcccugua

SEQ ID NO: 1403264 - RNA, 19 nt, Homo sapiens
  misc_RNA (1)...(19): siRNA sense strand
gcagaaagccucaguguug

SEQ ID NO: 1403265 - RNA, 19 nt, Homo sapiens
  misc_RNA (1)...(19): siRNA sense strand
guacuuggcugccugcuuu

SEQ ID NO: 1403266 - RNA, 19 nt, Homo sapiens
  misc_RNA (1)...(19): siRNA sense strand
ggucucagcugcucucuuu

SEQ ID NO: 1403267 - RNA, 19 nt, Homo sapiens
  misc_RNA (1)...(19): siRNA sense strand
gaaauggccaagaaacuua

SEQ ID NO: 1403268 - RNA, 19 nt, Homo sapiens
  misc_RNA (1)...(19): siRNA sense strand
ggucauggcuccuguacuu

SEQ ID NO: 1403269 - RNA, 19 nt, Homo sapiens
  misc_RNA (1)...(19): siRNA sense strand
gggcauagcuuuggugaug

SEQ ID NO: 1403270 - RNA, 19 nt, Homo sapiens
  misc_RNA (1)...(19): siRNA sense strand
gauagaugcucugcgauuu

SEQ ID NO: 1403271 - RNA, 19 nt, Homo sapiens
  misc_RNA (1)...(19): siRNA sense strand
gcugugggcuucauuguga

SEQ ID NO: 1403272 - RNA, 19 nt, Homo sapiens
  misc_RNA (1)...(19): siRNA sense strand
ggaagacaaucucauuaag

SEQ ID NO: 1403273 - RNA, 19 nt, Homo sapiens
  misc_RNA (1)...(19): siRNA sense strand
cagcugcucucuuucugua

SEQ ID NO: 1403274 - RNA, 19 nt, Homo sapiens
  misc_RNA (1)...(19): siRNA sense strand
gcugugagcuccugguuca

SEQ ID NO: 1403275 - RNA, 19 nt, Homo sapiens
  misc_RNA (1)...(19): siRNA sense strand
gcugcucucuuucuguaua

SEQ ID NO: 1403276 - RNA, 19 nt, Homo sapiens
  misc_RNA (1)...(19): siRNA sense strand
cuccaaagcuuucuucuuc

SEQ ID NO: 1403277 - RNA, 19 nt, Homo sapiens
  misc_RNA (1)...(19): siRNA sense strand
caagaaacuuagccagaug

SEQ ID NO: 1403278 - RNA, 19 nt, Homo sapiens
  misc_RNA (1)...(19): siRNA sense strand
cuggauggcuucccgauuu

SEQ ID NO: 1403279 - RNA, 19 nt, Homo sapiens
  misc_RNA (1)...(19): siRNA sense strand
ccaagaaacuuagccagau

SEQ ID NO: 1403280 - RNA, 19 nt, Homo sapiens
  misc_RNA (1)...(19): siRNA sense strand
gcucuggccuuuccugugu

SEQ ID NO: 1403281 - RNA, 19 nt, Homo sapiens
  misc_RNA (1)...(19): siRNA sense strand
ucagagaccuagacacagu

SEQ ID NO: 1403282 - RNA, 19 nt, Homo sapiens
  misc_RNA (1)...(19): siRNA sense strand
ggccucaaguaccucuuua

SEQ ID NO: 1403283 - RNA, 19 nt, Homo sapiens
  misc_RNA (1)...(19): siRNA sense strand
gaaugggacgugcugauug

SEQ ID NO: 1403284 - RNA, 19 nt, Homo sapiens
  misc_RNA (1)...(19): siRNA sense strand
gagaugauaccuggaaaga

SEQ ID NO: 1403285 - RNA, 19 nt, Homo sapiens
  misc_RNA (1)...(19): siRNA sense strand
cagcaggugucccgauuuc

SEQ ID NO: 1403286 - RNA, 19 nt, Homo sapiens
  misc_RNA (1)...(19): siRNA sense strand
ggaagaggagccacugaug

SEQ ID NO: 1403287 - RNA, 19 nt, Homo sapiens
  misc_RNA (1)...(19): siRNA sense strand
uagaugcucugcgauuuga

SEQ ID NO: 1403288 - RNA, 19 nt, Homo sapiens
  misc_RNA (1)...(19): siRNA sense strand
cucaggaccuucaagcuaa

SEQ ID NO: 1403289 - RNA, 19 nt, Homo sapiens
  misc_RNA (1)...(19): siRNA sense strand
guggaagacaaucucauua

SEQ ID NO: 1403290 - RNA, 19 nt, Homo sapiens
  misc_RNA (1)...(19): siRNA sense strand
ggaaaguguuugccccuaa

SEQ ID NO: 1403291 - RNA, 19 nt, Homo sapiens
  misc_RNA (1)...(19): siRNA sense strand
ggacaauggcauccuggaa

SEQ ID NO: 1403292 - RNA, 19 nt, Homo sapiens
  misc_RNA (1)...(19): siRNA sense strand
aagacaaucucauuaagca

SEQ ID NO: 1403293 - RNA, 19 nt, Homo sapiens
  misc_RNA (1)...(19): siRNA sense strand
gcaggugucccgauuucuu

SEQ ID NO: 1403294 - RNA, 19 nt, Homo sapiens
  misc_RNA (1)...(19): siRNA sense strand
uggaagacaaucucauuaa

SEQ ID NO: 1403295 - RNA, 19 nt, Homo sapiens
  misc_RNA (1)...(19): siRNA sense strand
ucaaguaccucuuuauccu

SEQ ID NO: 1403296 - RNA, 19 nt, Homo sapiens
  misc_RNA (1)...(19): siRNA sense strand
uggagcgucuggagaauga

SEQ ID NO: 1403297 - RNA, 19 nt, Homo sapiens
  misc_RNA (1)...(19): siRNA sense strand
gcucacugccuaccuuuau

SEQ ID NO: 1403298 - RNA, 19 nt, Homo sapiens
  misc_RNA (1)...(19): siRNA sense strand
ccaugugcaucgagucuug

SEQ ID NO: 1403299 - RNA, 19 nt, Homo sapiens
  misc_RNA (1)...(19): siRNA sense strand
cugccuaccuuuauugaug

SEQ ID NO: 1403300 - RNA, 19 nt, Homo sapiens
  misc_RNA (1)...(19): siRNA sense strand
gagcuuccuucuccuacau

SEQ ID NO: 1403301 - RNA, 19 nt, Homo sapiens
  misc_RNA (1)...(19): siRNA sense strand
caaggccucugcugacuac

SEQ ID NO: 1403302 - RNA, 19 nt, Homo sapiens
  misc_RNA (1)...(19): siRNA sense strand
ccucagcucuccaucucaa

SEQ ID NO: 1403303 - RNA, 19 nt, Homo sapiens
  misc_RNA (1)...(19): siRNA sense strand
gaaugacacacugcuggua

SEQ ID NO: 1403304 - RNA, 19 nt, Homo sapiens
  misc_RNA (1)...(19): siRNA sense strand
gggagaugauaccuggaaa

SEQ ID NO: 1403305 - RNA, 19 nt, Homo sapiens
  misc_RNA (1)...(19): siRNA sense strand
gaagacaaucucauuaagc

SEQ ID NO: 1403306 - RNA, 19 nt, Homo sapiens
  misc_RNA (1)...(19): siRNA sense strand
ggacuucuccugggcauag

SEQ ID NO: 1403307 - RNA, 19 nt, Homo sapiens
  misc_RNA (1)...(19): siRNA sense strand
ugaaauggccaagaaacuu

SEQ ID NO: 1403308 - RNA, 19 nt, Homo sapiens
  misc_RNA (1)...(19): siRNA sense strand
gggaugcgccucagcacuu

SEQ ID NO: 1403309 - RNA, 19 nt, Homo sapiens
  misc_RNA (1)...(19): siRNA sense strand
gaagugauggcugagcuau

SEQ ID NO: 1403310 - RNA, 19 nt, Homo sapiens
  misc_RNA (1)...(19): siRNA sense strand
ccacacagaccuucuacuc

SEQ ID NO: 1403311 - RNA, 19 nt, Homo sapiens
  misc_RNA (1)...(19): siRNA sense strand
agugauggcugagcuauuc

SEQ ID NO: 1403312 - RNA, 19 nt, Homo sapiens
  misc_RNA (1)...(19): siRNA sense strand
ggaagugauggcugagcua

SEQ ID NO: 1403313 - RNA, 19 nt, Homo sapiens
  misc_RNA (1)...(19): siRNA sense strand
acaauggcauccuggaaca

SEQ ID NO: 1403314 - RNA, 19 nt, Homo sapiens
  misc_RNA (1)...(19): siRNA sense strand
gcauagcuuuggugaugag

SEQ ID NO: 1403315 - RNA, 19 nt, Homo sapiens
  misc_RNA (1)...(19): siRNA sense strand
cccgauuucuucauaccua

SEQ ID NO: 1403316 - RNA, 19 nt, Homo sapiens
  misc_RNA (1)...(19): siRNA sense strand
gugucccgauuucuucaua

SEQ ID NO: 1403317 - RNA, 19 nt, Homo sapiens
  misc_RNA (1)...(19): siRNA sense strand
ugauagaugcucugcgauu

SEQ ID NO: 1403318 - RNA, 19 nt, Homo sapiens
  misc_RNA (1)...(19): siRNA sense strand
gcagaggauccuggagauu

SEQ ID NO: 1403319 - RNA, 19 nt, Homo sapiens
  misc_RNA (1)...(19): siRNA sense strand
acccugaaauggccaagaa

SEQ ID NO: 1403320 - RNA, 19 nt, Homo sapiens
  misc_RNA (1)...(19): siRNA sense strand
cauggacaguggugaaugg

SEQ ID NO: 1403321 - RNA, 19 nt, Homo sapiens
  misc_RNA (1)...(19): siRNA sense strand
agaggauccuggagauuca

SEQ ID NO: 1403322 - RNA, 19 nt, Homo sapiens
  misc_RNA (1)...(19): siRNA sense strand
cagaggauccuggagauuc

SEQ ID NO: 1403323 - RNA, 19 nt, Homo sapiens
  misc_RNA (1)...(19): siRNA sense strand
uauccuugguauucagauu

SEQ ID NO: 1403324 - RNA, 19 nt, Homo sapiens
  misc_RNA (1)...(19): siRNA sense strand
ggaugcgccucagcacuuc

SEQ ID NO: 1403325 - RNA, 19 nt, Homo sapiens
  misc_RNA (1)...(19): siRNA sense strand
accaugggaugaccacaaa

SEQ ID NO: 1403326 - RNA, 19 nt, Homo sapiens
  misc_RNA (1)...(19): siRNA sense strand
gaccaugggaugaccacaa

SEQ ID NO: 1403327 - RNA, 19 nt, Homo sapiens
  misc_RNA (1)...(19): siRNA sense strand
ugaaugggacgugcugauu

SEQ ID NO: 1403328 - RNA, 19 nt, Homo sapiens
  misc_RNA (1)...(19): siRNA sense strand
gcaggaaggcguguagucu

SEQ ID NO: 1403329 - RNA, 19 nt, Homo sapiens
  misc_RNA (1)...(19): siRNA sense strand
acucaggaccuucaagcua

SEQ ID NO: 1403330 - RNA, 19 nt, Homo sapiens
  misc_RNA (1)...(19): siRNA sense strand
uagcuuuggugaugagagu

SEQ ID NO: 1403331 - RNA, 19 nt, Homo sapiens
  misc_RNA (1)...(19): siRNA sense strand
ccaccagccugucuuucca

SEQ ID NO: 1403332 - RNA, 19 nt, Homo sapiens
  misc_RNA (1)...(19): siRNA sense strand
ucugcuugcugcugggaua

SEQ ID NO: 1403333 - RNA, 19 nt, Homo sapiens
  misc_RNA (1)...(19): siRNA sense strand
ucacugccuaccuuuauug

SEQ ID NO: 1403334 - RNA, 19 nt, Homo sapiens
  misc_RNA (1)...(19): siRNA sense strand
ggcauagcuuuggugauga

SEQ ID NO: 1403335 - RNA, 19 nt, Homo sapiens
  misc_RNA (1)...(19): siRNA sense strand
ggugauuccucaaguuagc

SEQ ID NO: 1403336 - RNA, 19 nt, Homo sapiens
  misc_RNA (1)...(19): siRNA sense strand
gucaagggcugcggaagag

SEQ ID NO: 1403337 - RNA, 19 nt, Homo sapiens
  misc_RNA (1)...(19): siRNA sense strand
caaguaccucuuuauccuu

SEQ ID NO: 1403338 - RNA, 19 nt, Homo sapiens
  misc_RNA (1)...(19): siRNA sense strand
uagacacaguggacaaugg

SEQ ID NO: 1403339 - RNA, 19 nt, Homo sapiens
  misc_RNA (1)...(19): siRNA sense strand
gggccucaaguaccucuuu

SEQ ID NO: 1403340 - RNA, 19 nt, Homo sapiens
  misc_RNA (1)...(19): siRNA sense strand
gaggaagaggagccacuga

SEQ ID NO: 1403341 - RNA, 19 nt, Homo sapiens
  misc_RNA (1)...(19): siRNA sense strand
ccaccuccucuuugcagua

SEQ ID NO: 1403342 - RNA, 19 nt, Homo sapiens
  misc_RNA (1)...(19): siRNA sense strand
ccaaggccucugcugacua

SEQ ID NO: 1403343 - RNA, 19 nt, Homo sapiens
  misc_RNA (1)...(19): siRNA sense strand
caugggaugaccacaaaug

SEQ ID NO: 1403344 - RNA, 19 nt, Homo sapiens
  misc_RNA (1)...(19): siRNA sense strand
aagaggagccacugaugga

SEQ ID NO: 1403345 - RNA, 19 nt, Homo sapiens
  misc_RNA (1)...(19): siRNA sense strand
cucauggucuggaaagugu

SEQ ID NO: 1403346 - RNA, 19 nt, Homo sapiens
  misc_RNA (1)...(19): siRNA sense strand
ggagaugauaccuggaaag

SEQ ID NO: 1403347 - RNA, 19 nt, Homo sapiens
  misc_RNA (1)...(19): siRNA sense strand
gcagcugggccucaaguac

SEQ ID NO: 1403348 - RNA, 19 nt, Homo sapiens
  misc_RNA (1)...(19): siRNA sense strand
gcuuccugcucacccguuu

SEQ ID NO: 1403349 - RNA, 19 nt, Homo sapiens
  misc_RNA (1)...(19): siRNA sense strand
aggcgacacugccgacugu

SEQ ID NO: 1403350 - RNA, 19 nt, Homo sapiens
  misc_RNA (1)...(19): siRNA sense strand
cagaggagccagaggugau

SEQ ID NO: 1403351 - RNA, 19 nt, Homo sapiens
  misc_RNA (1)...(19): siRNA sense strand
auucacacgugccuagaga

SEQ ID NO: 1403352 - RNA, 19 nt, Homo sapiens
  misc_RNA (1)...(19): siRNA sense strand
gaaaguguuugccccuaag

SEQ ID NO: 1403353 - RNA, 19 nt, Homo sapiens
  misc_RNA (1)...(19): siRNA sense strand
gcgacacugccgacuguga

SEQ ID NO: 1403354 - RNA, 19 nt, Homo sapiens
  misc_RNA (1)...(19): siRNA sense strand
gagcucaccaaccauagca

SEQ ID NO: 1403355 - RNA, 19 nt, Homo sapiens
  misc_RNA (1)...(19): siRNA sense strand
ggccugcccaucccauuug

SEQ ID NO: 1403356 - RNA, 19 nt, Homo sapiens
  misc_RNA (1)...(19): siRNA sense strand
caggaaggcguguagucuu

SEQ ID NO: 1403357 - RNA, 19 nt, Homo sapiens
  misc_RNA (1)...(19): siRNA sense strand
gccccuaaguucauauuug

SEQ ID NO: 1403358 - RNA, 19 nt, Homo sapiens
  misc_RNA (1)...(19): siRNA sense strand
ccucaaguaccucuuuauc

SEQ ID NO: 1403359 - RNA, 19 nt, Homo sapiens
  misc_RNA (1)...(19): siRNA sense strand
gcucuaccgaucucagguu

SEQ ID NO: 1403360 - RNA, 19 nt, Homo sapiens
  misc_RNA (1)...(19): siRNA sense strand
agugggagccaacaccuuu

SEQ ID NO: 1403361 - RNA, 19 nt, Homo sapiens
  misc_RNA (1)...(19): siRNA sense strand
gaauaucggggaagugaug

SEQ ID NO: 1403362 - RNA, 19 nt, Homo sapiens
  misc_RNA (1)...(19): siRNA sense strand
ccccuaaguucauauuuga

SEQ ID NO: 1403363 - RNA, 19 nt, Homo sapiens
  misc_RNA (1)...(19): siRNA sense strand
gaagcugaugccagaguca

SEQ ID NO: 1403364 - RNA, 19 nt, Homo sapiens
  misc_RNA (1)...(19): siRNA sense strand
gcagaaagccucaguguug

SEQ ID NO: 1403365 - RNA, 19 nt, Homo sapiens
  misc_RNA (1)...(19): siRNA sense strand
guacuuggcugccugcuuu

SEQ ID NO: 1403366 - RNA, 19 nt, Homo sapiens
  misc_RNA (1)...(19): siRNA sense strand
ggucucagcugcucucuuu

SEQ ID NO: 1403367 - RNA, 19 nt, Homo sapiens
  misc_RNA (1)...(19): siRNA sense strand
gaaauggccaagaaacuua

SEQ ID NO: 1403368 - RNA, 19 nt, Homo sapiens
  misc_RNA (1)...(19): siRNA sense strand
ggucauggcuccuguacuu

SEQ ID NO: 1403369 - RNA, 19 nt, Homo sapiens
  misc_RNA (1)...(19): siRNA sense strand
gggcauagcuuuggugaug

SEQ ID NO: 1403370 - RNA, 19 nt, Homo sapiens
  misc_RNA (1)...(19): siRNA sense strand
gauagaugcucugcgauuu

SEQ ID NO: 1403371 - RNA, 19 nt, Homo sapiens
  misc_RNA (1)...(19): siRNA sense strand
gcugugggcuucauuguga

SEQ ID NO: 1403372 - RNA, 19 nt, Homo sapiens
  misc_RNA (1)...(19): siRNA sense strand
ggaagacaaucucauuaag

SEQ ID NO: 1403373 - RNA, 19 nt, Homo sapiens
  misc_RNA (1)...(19): siRNA sense strand
cagcugcucucuuucugua

SEQ ID NO: 1403374 - RNA, 19 nt, Homo sapiens
  misc_RNA (1)...(19): siRNA sense strand
gcugugagcuccugguuca

SEQ ID NO: 1403375 - RNA, 19 nt, Homo sapiens
  misc_RNA (1)...(19): siRNA sense strand
gcugcucucuuucuguaua

SEQ ID NO: 1403376 - RNA, 19 nt, Homo sapiens
  misc_RNA (1)...(19): siRNA sense strand
cuccaaagcuuucuucuuc

SEQ ID NO: 1403377 - RNA, 19 nt, Homo sapiens
  misc_RNA (1)...(19): siRNA sense strand
caagaaacuuagccagaug

SEQ ID NO: 1403378 - RNA, 19 nt, Homo sapiens
  misc_RNA (1)...(19): siRNA sense strand
cuggauggcuucccgauuu

SEQ ID NO: 1403379 - RNA, 19 nt, Homo sapiens
  misc_RNA (1)...(19): siRNA sense strand
ccaagaaacuuagccagau

SEQ ID NO: 1403380 - RNA, 19 nt, Homo sapiens
  misc_RNA (1)...(19): siRNA sense strand
gcucuggccuuuccugugu

SEQ ID NO: 1403381 - RNA, 19 nt, Homo sapiens
  misc_RNA (1)...(19): siRNA sense strand
ucagagaccuagacacagu

SEQ ID NO: 1403382 - RNA, 19 nt, Homo sapiens
  misc_RNA (1)...(19): siRNA sense strand
ggccucaaguaccucuuua

SEQ ID NO: 1403383 - RNA, 19 nt, Homo sapiens
  misc_RNA (1)...(19): siRNA sense strand
gaaugggacgugcugauug

SEQ ID NO: 1403384 - RNA, 19 nt, Homo sapiens
  misc_RNA (1)...(19): siRNA sense strand
gagaugauaccuggaaaga

SEQ ID NO: 1403385 - RNA, 19 nt, Homo sapiens
  misc_RNA (1)...(19): siRNA sense strand
cagcaggugucccgauuuc

SEQ ID NO: 1403386 - RNA, 19 nt, Homo sapiens
  misc_RNA (1)...(19): siRNA sense strand
ggaagaggagccacugaug

SEQ ID NO: 1403387 - RNA, 19 nt, Homo sapiens
  misc_RNA (1)...(19): siRNA sense strand
uagaugcucugcgauuuga

SEQ ID NO: 1403388 - RNA, 19 nt, Homo sapiens
  misc_RNA (1)...(19): siRNA sense strand
cucaggaccuucaagcuaa

SEQ ID NO: 1403389 - RNA, 19 nt, Homo sapiens
  misc_RNA (1)...(19): siRNA sense strand
guggaagacaaucucauua

SEQ ID NO: 1403390 - RNA, 19 nt, Homo sapiens
  misc_RNA (1)...(19): siRNA sense strand
ggaaaguguuugccccuaa

SEQ ID NO: 1403391 - RNA, 19 nt, Homo sapiens
  misc_RNA (1)...(19): siRNA sense strand
ggacaauggcauccuggaa

SEQ ID NO: 1403392 - RNA, 19 nt, Homo sapiens
  misc_RNA (1)...(19): siRNA sense strand
aagacaaucucauuaagca

SEQ ID NO: 1403393 - RNA, 19 nt, Homo sapiens
  misc_RNA (1)...(19): siRNA sense strand
gcaggugucccgauuucuu

SEQ ID NO: 1403394 - RNA, 19 nt, Homo sapiens
  misc_RNA (1)...(19): siRNA sense strand
uggaagacaaucucauuaa

SEQ ID NO: 1403395 - RNA, 19 nt, Homo sapiens
  misc_RNA (1)...(19): siRNA sense strand
ucaaguaccucuuuauccu

SEQ ID NO: 1403396 - RNA, 19 nt, Homo sapiens
  misc_RNA (1)...(19): siRNA sense strand
uggagcgucuggagaauga

SEQ ID NO: 1403397 - RNA, 19 nt, Homo sapiens
  misc_RNA (1)...(19): siRNA sense strand
gcucacugccuaccuuuau

SEQ ID NO: 1403398 - RNA, 19 nt, Homo sapiens
  misc_RNA (1)...(19): siRNA sense strand
ccaugugcaucgagucuug

SEQ ID NO: 1403399 - RNA, 19 nt, Homo sapiens
  misc_RNA (1)...(19): siRNA sense strand
cugccuaccuuuauugaug

SEQ ID NO: 1403400 - RNA, 19 nt, Homo sapiens
  misc_RNA (1)...(19): siRNA sense strand
gagcuuccuucuccuacau

SEQ ID NO: 1403401 - RNA, 19 nt, Homo sapiens
  misc_RNA (1)...(19): siRNA sense strand
caaggccucugcugacuac

SEQ ID NO: 1403402 - RNA, 19 nt, Homo sapiens
  misc_RNA (1)...(19): siRNA sense strand
ccucagcucuccaucucaa

SEQ ID NO: 1403403 - RNA, 19 nt, Homo sapiens
  misc_RNA (1)...(19): siRNA sense strand
gaaugacacacugcuggua

SEQ ID NO: 1403404 - RNA, 19 nt, Homo sapiens
  misc_RNA (1)...(19): siRNA sense strand
gggagaugauaccuggaaa

SEQ ID NO: 1403405 - RNA, 19 nt, Homo sapiens
  misc_RNA (1)...(19): siRNA sense strand
gaagacaaucucauuaagc

SEQ ID NO: 1403406 - RNA, 19 nt, Homo sapiens
  misc_RNA (1)...(19): siRNA sense strand
ggacuucuccugggcauag

SEQ ID NO: 1403407 - RNA, 19 nt, Homo sapiens
  misc_RNA (1)...(19): siRNA sense strand
ugaaauggccaagaaacuu

SEQ ID NO: 1403408 - RNA, 19 nt, Homo sapiens
  misc_RNA (1)...(19): siRNA sense strand
gggaugcgccucagcacuu

SEQ ID NO: 1403409 - RNA, 19 nt, Homo sapiens
  misc_RNA (1)...(19): siRNA sense strand
gaagugauggcugagcuau

SEQ ID NO: 1403410 - RNA, 19 nt, Homo sapiens
  misc_RNA (1)...(19): siRNA sense strand
ccacacagaccuucuacuc

SEQ ID NO: 1403411 - RNA, 19 nt, Homo sapiens
  misc_RNA (1)...(19): siRNA sense strand
agugauggcugagcuauuc

SEQ ID NO: 1403412 - RNA, 19 nt, Homo sapiens
  misc_RNA (1)...(19): siRNA sense strand
ggaagugauggcugagcua

SEQ ID NO: 1403413 - RNA, 19 nt, Homo sapiens
  misc_RNA (1)...(19): siRNA sense strand
acaauggcauccuggaaca

SEQ ID NO: 1403414 - RNA, 19 nt, Homo sapiens
  misc_RNA (1)...(19): siRNA sense strand
gcauagcuuuggugaugag

SEQ ID NO: 1403415 - RNA, 19 nt, Homo sapiens
  misc_RNA (1)...(19): siRNA sense strand
cccgauuucuucauaccua

SEQ ID NO: 1403416 - RNA, 19 nt, Homo sapiens
  misc_RNA (1)...(19): siRNA sense strand
gugucccgauuucuucaua

SEQ ID NO: 1403417 - RNA, 19 nt, Homo sapiens
  misc_RNA (1)...(19): siRNA sense strand
ugauagaugcucugcgauu

SEQ ID NO: 1403418 - RNA, 19 nt, Homo sapiens
  misc_RNA (1)...(19): siRNA sense strand
gcagaggauccuggagauu

SEQ ID NO: 1403419 - RNA, 19 nt, Homo sapiens
  misc_RNA (1)...(19): siRNA sense strand
acccugaaauggccaagaa

SEQ ID NO: 1403420 - RNA, 19 nt, Homo sapiens
  misc_RNA (1)...(19): siRNA sense strand
cauggacaguggugaaugg

SEQ ID NO: 1403421 - RNA, 19 nt, Homo sapiens
  misc_RNA (1)...(19): siRNA sense strand
agaggauccuggagauuca

SEQ ID NO: 1403422 - RNA, 19 nt, Homo sapiens
  misc_RNA (1)...(19): siRNA sense strand
cagaggauccuggagauuc

SEQ ID NO: 1403423 - RNA, 19 nt, Homo sapiens
  misc_RNA (1)...(19): siRNA sense strand
uauccuugguauucagauu

SEQ ID NO: 1403424 - RNA, 19 nt, Homo sapiens
  misc_RNA (1)...(19): siRNA sense strand
ggaugcgccucagcacuuc

SEQ ID NO: 1403425 - RNA, 19 nt, Homo sapiens
  misc_RNA (1)...(19): siRNA sense strand
accaugggaugaccacaaa

SEQ ID NO: 1403426 - RNA, 19 nt, Homo sapiens
  misc_RNA (1)...(19): siRNA sense strand
gaccaugggaugaccacaa

SEQ ID NO: 1403427 - RNA, 19 nt, Homo sapiens
  misc_RNA (1)...(19): siRNA sense strand
ugaaugggacgugcugauu

SEQ ID NO: 1403428 - RNA, 19 nt, Homo sapiens
  misc_RNA (1)...(19): siRNA sense strand
gcaggaaggcguguagucu

SEQ ID NO: 1403429 - RNA, 19 nt, Homo sapiens
  misc_RNA (1)...(19): siRNA sense strand
acucaggaccuucaagcua

SEQ ID NO: 1403430 - RNA, 19 nt, Homo sapiens
  misc_RNA (1)...(19): siRNA sense strand
uagcuuuggugaugagagu

SEQ ID NO: 1403431 - RNA, 19 nt, Homo sapiens
  misc_RNA (1)...(19): siRNA sense strand
ccaccagccugucuuucca

SEQ ID NO: 1403432 - RNA, 19 nt, Homo sapiens
  misc_RNA (1)...(19): siRNA sense strand
ucugcuugcugcugggaua

SEQ ID NO: 1403433 - RNA, 19 nt, Homo sapiens
  misc_RNA (1)...(19): siRNA sense strand
ucacugccuaccuuuauug

SEQ ID NO: 1403434 - RNA, 19 nt, Homo sapiens
  misc_RNA (1)...(19): siRNA sense strand
ggcauagcuuuggugauga

SEQ ID NO: 1403435 - RNA, 19 nt, Homo sapiens
  misc_RNA (1)...(19): siRNA sense strand
ggugauuccucaaguuagc

SEQ ID NO: 1403436 - RNA, 19 nt, Homo sapiens
  misc_RNA (1)...(19): siRNA sense strand
gucaagggcugcggaagag

SEQ ID NO: 1403437 - RNA, 19 nt, Homo sapiens
  misc_RNA (1)...(19): siRNA sense strand
caaguaccucuuuauccuu

SEQ ID NO: 1403438 - RNA, 19 nt, Homo sapiens
  misc_RNA (1)...(19): siRNA sense strand
uagacacaguggacaaugg

SEQ ID NO: 1403439 - RNA, 19 nt, Homo sapiens
  misc_RNA (1)...(19): siRNA sense strand
gggccucaaguaccucuuu

SEQ ID NO: 1403440 - RNA, 19 nt, Homo sapiens
  misc_RNA (1)...(19): siRNA sense strand
gaggaagaggagccacuga

SEQ ID NO: 1403441 - RNA, 19 nt, Homo sapiens
  misc_RNA (1)...(19): siRNA sense strand
ccaccuccucuuugcagua

SEQ ID NO: 1403442 - RNA, 19 nt, Homo sapiens
  misc_RNA (1)...(19): siRNA sense strand
ccaaggccucugcugacua

SEQ ID NO: 1403443 - RNA, 19 nt, Homo sapiens
  misc_RNA (1)...(19): siRNA sense strand
caugggaugaccacaaaug

SEQ ID NO: 1403444 - RNA, 19 nt, Homo sapiens
  misc_RNA (1)...(19): siRNA sense strand
aagaggagccacugaugga

SEQ ID NO: 1403445 - RNA, 19 nt, Homo sapiens
  misc_RNA (1)...(19): siRNA sense strand
cucauggucuggaaagugu

SEQ ID NO: 1403446 - RNA, 19 nt, Homo sapiens
  misc_RNA (1)...(19): siRNA sense strand
ggagaugauaccuggaaag

SEQ ID NO: 1403447 - RNA, 19 nt, Homo sapiens
  misc_RNA (1)...(19): siRNA sense strand
gcagcugggccucaaguac

SEQ ID NO: 1403448 - RNA, 19 nt, Homo sapiens
  misc_RNA (1)...(19): siRNA sense strand
gcuuccugcucacccguuu

SEQ ID NO: 1403449 - RNA, 19 nt, Homo sapiens
  misc_RNA (1)...(19): siRNA sense strand
aggcgacacugccgacugu

SEQ ID NO: 1403450 - RNA, 19 nt, Homo sapiens
  misc_RNA (1)...(19): siRNA sense strand
cagaggagccagaggugau

SEQ ID NO: 1403451 - RNA, 19 nt, Homo sapiens
  misc_RNA (1)...(19): siRNA sense strand
auucacacgugccuagaga

SEQ ID NO: 1403452 - RNA, 19 nt, Homo sapiens
  misc_RNA (1)...(19): siRNA sense strand
gaaaguguuugccccuaag

SEQ ID NO: 1403453 - RNA, 19 nt, Homo sapiens
  misc_RNA (1)...(19): siRNA sense strand
gcgacacugccgacuguga

SEQ ID NO: 1403454 - RNA, 19 nt, Homo sapiens
  misc_RNA (1)...(19): siRNA sense strand
gagcucaccaaccauagca

SEQ ID NO: 1403455 - RNA, 19 nt, Homo sapiens
  misc_RNA (1)...(19): siRNA sense strand
ggccugcccaucccauuug

SEQ ID NO: 1403456 - RNA, 19 nt, Homo sapiens
  misc_RNA (1)...(19): siRNA sense strand
caggaaggcguguagucuu

SEQ ID NO: 1403457 - RNA, 19 nt, Homo sapiens
  misc_RNA (1)...(19): siRNA sense strand
gccccuaaguucauauuug

SEQ ID NO: 1403458 - RNA, 19 nt, Homo sapiens
  misc_RNA (1)...(19): siRNA sense strand
ccucaaguaccucuuuauc

SEQ ID NO: 1403459 - RNA, 19 nt, Homo sapiens
  misc_RNA (1)...(19): siRNA sense strand
gcucuaccgaucucagguu

SEQ ID NO: 1403460 - RNA, 19 nt, Homo sapiens
  misc_RNA (1)...(19): siRNA sense strand
agugggagccaacaccuuu

SEQ ID NO: 1403461 - RNA, 19 nt, Homo sapiens
  misc_RNA (1)...(19): siRNA sense strand
gaauaucggggaagugaug

SEQ ID NO: 1403462 - RNA, 19 nt, Homo sapiens
  misc_RNA (1)...(19): siRNA sense strand
ccccuaaguucauauuuga

SEQ ID NO: 1403463 - RNA, 19 nt, Homo sapiens
  misc_RNA (1)...(19): siRNA sense strand
gaagcugaugccagaguca

SEQ ID NO: 1403464 - RNA, 19 nt, Homo sapiens
  misc_RNA (1)...(19): siRNA sense strand
gaagagagugugccgguua

SEQ ID NO: 1403465 - RNA, 19 nt, Homo sapiens
  misc_RNA (1)...(19): siRNA sense strand
gcuaaaaucucccucagua

SEQ ID NO: 1403466 - RNA, 19 nt, Homo sapiens
  misc_RNA (1)...(19): siRNA sense strand
gcaagccgguucauucuca

SEQ ID NO: 1403467 - RNA, 19 nt, Homo sapiens
  misc_RNA (1)...(19): siRNA sense strand
acauaaaggugcaaaccaa

SEQ ID NO: 1403468 - RNA, 19 nt, Homo sapiens
  misc_RNA (1)...(19): siRNA sense strand
gaugcaagccgguucauuc

SEQ ID NO: 1403469 - RNA, 19 nt, Homo sapiens
  misc_RNA (1)...(19): siRNA sense strand
ggagaagauagcuguguuu

SEQ ID NO: 1403470 - RNA, 19 nt, Homo sapiens
  misc_RNA (1)...(19): siRNA sense strand
ucaguaacaugcgcaucua

SEQ ID NO: 1403471 - RNA, 19 nt, Homo sapiens
  misc_RNA (1)...(19): siRNA sense strand
ggcaucuacuucugcauga

SEQ ID NO: 1403472 - RNA, 19 nt, Homo sapiens
  misc_RNA (1)...(19): siRNA sense strand
gaaguccacccucaagaag

SEQ ID NO: 1403473 - RNA, 19 nt, Homo sapiens
  misc_RNA (1)...(19): siRNA sense strand
ccaacaagauggugaugcu

SEQ ID NO: 1403474 - RNA, 19 nt, Homo sapiens
  misc_RNA (1)...(19): siRNA sense strand
gagugugguugauuuccuu

SEQ ID NO: 1403475 - RNA, 19 nt, Homo sapiens
  misc_RNA (1)...(19): siRNA sense strand
gagaagauagcuguguuuc

SEQ ID NO: 1403476 - RNA, 19 nt, Homo sapiens
  misc_RNA (1)...(19): siRNA sense strand
uaaaggugcaaaccaacaa

SEQ ID NO: 1403477 - RNA, 19 nt, Homo sapiens
  misc_RNA (1)...(19): siRNA sense strand
caagaaguccacccucaag

SEQ ID NO: 1403478 - RNA, 19 nt, Homo sapiens
  misc_RNA (1)...(19): siRNA sense strand
gguggaacaggagaagaua

SEQ ID NO: 1403479 - RNA, 19 nt, Homo sapiens
  misc_RNA (1)...(19): siRNA sense strand
agaaguccacccucaagaa

SEQ ID NO: 1403480 - RNA, 19 nt, Homo sapiens
  misc_RNA (1)...(19): siRNA sense strand
ccaagaaguccacccucaa

SEQ ID NO: 1403481 - RNA, 19 nt, Homo sapiens
  misc_RNA (1)...(19): siRNA sense strand
aggagaagauagcuguguu

SEQ ID NO: 1403482 - RNA, 19 nt, Homo sapiens
  misc_RNA (1)...(19): siRNA sense strand
ccgcgcagcugacaguucu

SEQ ID NO: 1403483 - RNA, 19 nt, Homo sapiens
  misc_RNA (1)...(19): siRNA sense strand
ggugcaaaccaacaagaug

SEQ ID NO: 1403484 - RNA, 19 nt, Homo sapiens
  misc_RNA (1)...(19): siRNA sense strand
ggacuauccacggugaaga

SEQ ID NO: 1403485 - RNA, 19 nt, Homo sapiens
  misc_RNA (1)...(19): siRNA sense strand
guaacaugcgcaucuacug

SEQ ID NO: 1403486 - RNA, 19 nt, Homo sapiens
  misc_RNA (1)...(19): siRNA sense strand
gacaguggcaucuacuucu

SEQ ID NO: 1403487 - RNA, 19 nt, Homo sapiens
  misc_RNA (1)...(19): siRNA sense strand
gcgcaucuacuggcugaga

SEQ ID NO: 1403488 - RNA, 19 nt, Homo sapiens
  misc_RNA (1)...(19): siRNA sense strand
caagccgguucauucucaa

SEQ ID NO: 1403489 - RNA, 19 nt, Homo sapiens
  misc_RNA (1)...(19): siRNA sense strand
ggaugcaagccgguucauu

SEQ ID NO: 1403490 - RNA, 19 nt, Homo sapiens
  misc_RNA (1)...(19): siRNA sense strand
gcaucuacuucugcaugau

SEQ ID NO: 1403491 - RNA, 19 nt, Homo sapiens
  misc_RNA (1)...(19): siRNA sense strand
ccucugggauuccgcaaaa

SEQ ID NO: 1403492 - RNA, 19 nt, Homo sapiens
  misc_RNA (1)...(19): siRNA sense strand
cagcugagugugguugauu

SEQ ID NO: 1403493 - RNA, 19 nt, Homo sapiens
  misc_RNA (1)...(19): siRNA sense strand
acaguggcaucuacuucug

SEQ ID NO: 1403494 - RNA, 19 nt, Homo sapiens
  misc_RNA (1)...(19): siRNA sense strand
gaagagagugugccgguua

SEQ ID NO: 1403495 - RNA, 19 nt, Homo sapiens
  misc_RNA (1)...(19): siRNA sense strand
gcuaaaaucucccucagua

SEQ ID NO: 1403496 - RNA, 19 nt, Homo sapiens
  misc_RNA (1)...(19): siRNA sense strand
gcaagccgguucauucuca

SEQ ID NO: 1403497 - RNA, 19 nt, Homo sapiens
  misc_RNA (1)...(19): siRNA sense strand
acauaaaggugcaaaccaa

SEQ ID NO: 1403498 - RNA, 19 nt, Homo sapiens
  misc_RNA (1)...(19): siRNA sense strand
gaugcaagccgguucauuc

SEQ ID NO: 1403499 - RNA, 19 nt, Homo sapiens
  misc_RNA (1)...(19): siRNA sense strand
ggagaagauagcuguguuu

SEQ ID NO: 1403500 - RNA, 19 nt, Homo sapiens
  misc_RNA (1)...(19): siRNA sense strand
ucaguaacaugcgcaucua

SEQ ID NO: 1403501 - RNA, 19 nt, Homo sapiens
  misc_RNA (1)...(19): siRNA sense strand
ggcaucuacuucugcauga

SEQ ID NO: 1403502 - RNA, 19 nt, Homo sapiens
  misc_RNA (1)...(19): siRNA sense strand
gaaguccacccucaagaag

SEQ ID NO: 1403503 - RNA, 19 nt, Homo sapiens
  misc_RNA (1)...(19): siRNA sense strand
ccaacaagauggugaugcu

SEQ ID NO: 1403504 - RNA, 19 nt, Homo sapiens
  misc_RNA (1)...(19): siRNA sense strand
gagugugguugauuuccuu

SEQ ID NO: 1403505 - RNA, 19 nt, Homo sapiens
  misc_RNA (1)...(19): siRNA sense strand
gagaagauagcuguguuuc

SEQ ID NO: 1403506 - RNA, 19 nt, Homo sapiens
  misc_RNA (1)...(19): siRNA sense strand
uaaaggugcaaaccaacaa

SEQ ID NO: 1403507 - RNA, 19 nt, Homo sapiens
  misc_RNA (1)...(19): siRNA sense strand
caagaaguccacccucaag

SEQ ID NO: 1403508 - RNA, 19 nt, Homo sapiens
  misc_RNA (1)...(19): siRNA sense strand
gguggaacaggagaagaua

SEQ ID NO: 1403509 - RNA, 19 nt, Homo sapiens
  misc_RNA (1)...(19): siRNA sense strand
agaaguccacccucaagaa

SEQ ID NO: 1403510 - RNA, 19 nt, Homo sapiens
  misc_RNA (1)...(19): siRNA sense strand
ccaagaaguccacccucaa

SEQ ID NO: 1403511 - RNA, 19 nt, Homo sapiens
  misc_RNA (1)...(19): siRNA sense strand
aggagaagauagcuguguu

SEQ ID NO: 1403512 - RNA, 19 nt, Homo sapiens
  misc_RNA (1)...(19): siRNA sense strand
ccgcgcagcugacaguucu

SEQ ID NO: 1403513 - RNA, 19 nt, Homo sapiens
  misc_RNA (1)...(19): siRNA sense strand
ggugcaaaccaacaagaug

SEQ ID NO: 1403514 - RNA, 19 nt, Homo sapiens
  misc_RNA (1)...(19): siRNA sense strand
ggacuauccacggugaaga

SEQ ID NO: 1403515 - RNA, 19 nt, Homo sapiens
  misc_RNA (1)...(19): siRNA sense strand
guaacaugcgcaucuacug

SEQ ID NO: 1403516 - RNA, 19 nt, Homo sapiens
  misc_RNA (1)...(19): siRNA sense strand
gacaguggcaucuacuucu

SEQ ID NO: 1403517 - RNA, 19 nt, Homo sapiens
  misc_RNA (1)...(19): siRNA sense strand
gcgcaucuacuggcugaga

SEQ ID NO: 1403518 - RNA, 19 nt, Homo sapiens
  misc_RNA (1)...(19): siRNA sense strand
caagccgguucauucucaa

SEQ ID NO: 1403519 - RNA, 19 nt, Homo sapiens
  misc_RNA (1)...(19): siRNA sense strand
ggaugcaagccgguucauu

SEQ ID NO: 1403520 - RNA, 19 nt, Homo sapiens
  misc_RNA (1)...(19): siRNA sense strand
gcaucuacuucugcaugau

SEQ ID NO: 1403521 - RNA, 19 nt, Homo sapiens
  misc_RNA (1)...(19): siRNA sense strand
ccucugggauuccgcaaaa

SEQ ID NO: 1403522 - RNA, 19 nt, Homo sapiens
  misc_RNA (1)...(19): siRNA sense strand
cagcugagugugguugauu

SEQ ID NO: 1403523 - RNA, 19 nt, Homo sapiens
  misc_RNA (1)...(19): siRNA sense strand
acaguggcaucuacuucug

SEQ ID NO: 1403524 - RNA, 19 nt, Homo sapiens
  misc_RNA (1)...(19): siRNA sense strand
gaagagagugugccgguua

SEQ ID NO: 1403525 - RNA, 19 nt, Homo sapiens
  misc_RNA (1)...(19): siRNA sense strand
gcuaaaaucucccucagua

SEQ ID NO: 1403526 - RNA, 19 nt, Homo sapiens
  misc_RNA (1)...(19): siRNA sense strand
gcaagccgguucauucuca

SEQ ID NO: 1403527 - RNA, 19 nt, Homo sapiens
  misc_RNA (1)...(19): siRNA sense strand
acauaaaggugcaaaccaa

SEQ ID NO: 1403528 - RNA, 19 nt, Homo sapiens
  misc_RNA (1)...(19): siRNA sense strand
gaugcaagccgguucauuc

SEQ ID NO: 1403529 - RNA, 19 nt, Homo sapiens
  misc_RNA (1)...(19): siRNA sense strand
ggagaagauagcuguguuu

SEQ ID NO: 1403530 - RNA, 19 nt, Homo sapiens
  misc_RNA (1)...(19): siRNA sense strand
ucaguaacaugcgcaucua

SEQ ID NO: 1403531 - RNA, 19 nt, Homo sapiens
  misc_RNA (1)...(19): siRNA sense strand
ggcaucuacuucugcauga

SEQ ID NO: 1403532 - RNA, 19 nt, Homo sapiens
  misc_RNA (1)...(19): siRNA sense strand
gaaguccacccucaagaag

SEQ ID NO: 1403533 - RNA, 19 nt, Homo sapiens
  misc_RNA (1)...(19): siRNA sense strand
ccaacaagauggugaugcu

SEQ ID NO: 1403534 - RNA, 19 nt, Homo sapiens
  misc_RNA (1)...(19): siRNA sense strand
gagugugguugauuuccuu

SEQ ID NO: 1403535 - RNA, 19 nt, Homo sapiens
  misc_RNA (1)...(19): siRNA sense strand
gagaagauagcuguguuuc

SEQ ID NO: 1403536 - RNA, 19 nt, Homo sapiens
  misc_RNA (1)...(19): siRNA sense strand
uaaaggugcaaaccaacaa

SEQ ID NO: 1403537 - RNA, 19 nt, Homo sapiens
  misc_RNA (1)...(19): siRNA sense strand
caagaaguccacccucaag

SEQ ID NO: 1403538 - RNA, 19 nt, Homo sapiens
  misc_RNA (1)...(19): siRNA sense strand
gguggaacaggagaagaua

SEQ ID NO: 1403539 - RNA, 19 nt, Homo sapiens
  misc_RNA (1)...(19): siRNA sense strand
agaaguccacccucaagaa

SEQ ID NO: 1403540 - RNA, 19 nt, Homo sapiens
  misc_RNA (1)...(19): siRNA sense strand
ccaagaaguccacccucaa

SEQ ID NO: 1403541 - RNA, 19 nt, Homo sapiens
  misc_RNA (1)...(19): siRNA sense strand
aggagaagauagcuguguu

SEQ ID NO: 1403542 - RNA, 19 nt, Homo sapiens
  misc_RNA (1)...(19): siRNA sense strand
ccgcgcagcugacaguucu

SEQ ID NO: 1403543 - RNA, 19 nt, Homo sapiens
  misc_RNA (1)...(19): siRNA sense strand
ggugcaaaccaacaagaug

SEQ ID NO: 1403544 - RNA, 19 nt, Homo sapiens
  misc_RNA (1)...(19): siRNA sense strand
ggacuauccacggugaaga

SEQ ID NO: 1403545 - RNA, 19 nt, Homo sapiens
  misc_RNA (1)...(19): siRNA sense strand
guaacaugcgcaucuacug

SEQ ID NO: 1403546 - RNA, 19 nt, Homo sapiens
  misc_RNA (1)...(19): siRNA sense strand
gacaguggcaucuacuucu

SEQ ID NO: 1403547 - RNA, 19 nt, Homo sapiens
  misc_RNA (1)...(19): siRNA sense strand
gcgcaucuacuggcugaga

SEQ ID NO: 1403548 - RNA, 19 nt, Homo sapiens
  misc_RNA (1)...(19): siRNA sense strand
caagccgguucauucucaa

SEQ ID NO: 1403549 - RNA, 19 nt, Homo sapiens
  misc_RNA (1)...(19): siRNA sense strand
ggaugcaagccgguucauu

SEQ ID NO: 1403550 - RNA, 19 nt, Homo sapiens
  misc_RNA (1)...(19): siRNA sense strand
gcaucuacuucugcaugau

SEQ ID NO: 1403551 - RNA, 19 nt, Homo sapiens
  misc_RNA (1)...(19): siRNA sense strand
ccucugggauuccgcaaaa

SEQ ID NO: 1403552 - RNA, 19 nt, Homo sapiens
  misc_RNA (1)...(19): siRNA sense strand
cagcugagugugguugauu

SEQ ID NO: 1403553 - RNA, 19 nt, Homo sapiens
  misc_RNA (1)...(19): siRNA sense strand
acaguggcaucuacuucug

SEQ ID NO: 1403554 - RNA, 19 nt, Homo sapiens
  misc_RNA (1)...(19): siRNA sense strand
gaagagagugugccgguua

SEQ ID NO: 1403555 - RNA, 19 nt, Homo sapiens
  misc_RNA (1)...(19): siRNA sense strand
gcuaaaaucucccucagua

SEQ ID NO: 1403556 - RNA, 19 nt, Homo sapiens
  misc_RNA (1)...(19): siRNA sense strand
gcaagccgguucauucuca

SEQ ID NO: 1403557 - RNA, 19 nt, Homo sapiens
  misc_RNA (1)...(19): siRNA sense strand
acauaaaggugcaaaccaa

SEQ ID NO: 1403558 - RNA, 19 nt, Homo sapiens
  misc_RNA (1)...(19): siRNA sense strand
gaugcaagccgguucauuc

SEQ ID NO: 1403559 - RNA, 19 nt, Homo sapiens
  misc_RNA (1)...(19): siRNA sense strand
ggagaagauagcuguguuu

SEQ ID NO: 1403560 - RNA, 19 nt, Homo sapiens
  misc_RNA (1)...(19): siRNA sense strand
ucaguaacaugcgcaucua

SEQ ID NO: 1403561 - RNA, 19 nt, Homo sapiens
  misc_RNA (1)...(19): siRNA sense strand
ggcaucuacuucugcauga

SEQ ID NO: 1403562 - RNA, 19 nt, Homo sapiens
  misc_RNA (1)...(19): siRNA sense strand
gaaguccacccucaagaag

SEQ ID NO: 1403563 - RNA, 19 nt, Homo sapiens
  misc_RNA (1)...(19): siRNA sense strand
ccaacaagauggugaugcu

SEQ ID NO: 1403564 - RNA, 19 nt, Homo sapiens
  misc_RNA (1)...(19): siRNA sense strand
gagugugguugauuuccuu

SEQ ID NO: 1403565 - RNA, 19 nt, Homo sapiens
  misc_RNA (1)...(19): siRNA sense strand
gagaagauagcuguguuuc

SEQ ID NO: 1403566 - RNA, 19 nt, Homo sapiens
  misc_RNA (1)...(19): siRNA sense strand
uaaaggugcaaaccaacaa

SEQ ID NO: 1403567 - RNA, 19 nt, Homo sapiens
  misc_RNA (1)...(19): siRNA sense strand
caagaaguccacccucaag

SEQ ID NO: 1403568 - RNA, 19 nt, Homo sapiens
  misc_RNA (1)...(19): siRNA sense strand
gguggaacaggagaagaua

SEQ ID NO: 1403569 - RNA, 19 nt, Homo sapiens
  misc_RNA (1)...(19): siRNA sense strand
agaaguccacccucaagaa

SEQ ID NO: 1403570 - RNA, 19 nt, Homo sapiens
  misc_RNA (1)...(19): siRNA sense strand
ccaagaaguccacccucaa

SEQ ID NO: 1403571 - RNA, 19 nt, Homo sapiens
  misc_RNA (1)...(19): siRNA sense strand
aggagaagauagcuguguu

SEQ ID NO: 1403572 - RNA, 19 nt, Homo sapiens
  misc_RNA (1)...(19): siRNA sense strand
ccgcgcagcugacaguucu

SEQ ID NO: 1403573 - RNA, 19 nt, Homo sapiens
  misc_RNA (1)...(19): siRNA sense strand
ggugcaaaccaacaagaug

SEQ ID NO: 1403574 - RNA, 19 nt, Homo sapiens
  misc_RNA (1)...(19): siRNA sense strand
ggacuauccacggugaaga

SEQ ID NO: 1403575 - RNA, 19 nt, Homo sapiens
  misc_RNA (1)...(19): siRNA sense strand
guaacaugcgcaucuacug

SEQ ID NO: 1403576 - RNA, 19 nt, Homo sapiens
  misc_RNA (1)...(19): siRNA sense strand
gacaguggcaucuacuucu

SEQ ID NO: 1403577 - RNA, 19 nt, Homo sapiens
  misc_RNA (1)...(19): siRNA sense strand
gcgcaucuacuggcugaga

SEQ ID NO: 1403578 - RNA, 19 nt, Homo sapiens
  misc_RNA (1)...(19): siRNA sense strand
caagccgguucauucucaa

SEQ ID NO: 1403579 - RNA, 19 nt, Homo sapiens
  misc_RNA (1)...(19): siRNA sense strand
ggaugcaagccgguucauu

SEQ ID NO: 1403580 - RNA, 19 nt, Homo sapiens
  misc_RNA (1)...(19): siRNA sense strand
gcaucuacuucugcaugau

SEQ ID NO: 1403581 - RNA, 19 nt, Homo sapiens
  misc_RNA (1)...(19): siRNA sense strand
ccucugggauuccgcaaaa

SEQ ID NO: 1403582 - RNA, 19 nt, Homo sapiens
  misc_RNA (1)...(19): siRNA sense strand
cagcugagugugguugauu

SEQ ID NO: 1403583 - RNA, 19 nt, Homo sapiens
  misc_RNA (1)...(19): siRNA sense strand
acaguggcaucuacuucug

SEQ ID NO: 1403584 - RNA, 19 nt, Homo sapiens
  misc_RNA (1)...(19): siRNA sense strand
gaagagagugugccgguua

SEQ ID NO: 1403585 - RNA, 19 nt, Homo sapiens
  misc_RNA (1)...(19): siRNA sense strand
gcuaaaaucucccucagua

SEQ ID NO: 1403586 - RNA, 19 nt, Homo sapiens
  misc_RNA (1)...(19): siRNA sense strand
gcaagccgguucauucuca

SEQ ID NO: 1403587 - RNA, 19 nt, Homo sapiens
  misc_RNA (1)...(19): siRNA sense strand
acauaaaggugcaaaccaa

SEQ ID NO: 1403588 - RNA, 19 nt, Homo sapiens
  misc_RNA (1)...(19): siRNA sense strand
gaugcaagccgguucauuc

SEQ ID NO: 1403589 - RNA, 19 nt, Homo sapiens
  misc_RNA (1)...(19): siRNA sense strand
ggagaagauagcuguguuu

SEQ ID NO: 1403590 - RNA, 19 nt, Homo sapiens
  misc_RNA (1)...(19): siRNA sense strand
ucaguaacaugcgcaucua

SEQ ID NO: 1403591 - RNA, 19 nt, Homo sapiens
  misc_RNA (1)...(19): siRNA sense strand
ggcaucuacuucugcauga

SEQ ID NO: 1403592 - RNA, 19 nt, Homo sapiens
  misc_RNA (1)...(19): siRNA sense strand
gaaguccacccucaagaag

SEQ ID NO: 1403593 - RNA, 19 nt, Homo sapiens
  misc_RNA (1)...(19): siRNA sense strand
ccaacaagauggugaugcu

SEQ ID NO: 1403594 - RNA, 19 nt, Homo sapiens
  misc_RNA (1)...(19): siRNA sense strand
gagugugguugauuuccuu

SEQ ID NO: 1403595 - RNA, 19 nt, Homo sapiens
  misc_RNA (1)...(19): siRNA sense strand
gagaagauagcuguguuuc

SEQ ID NO: 1403596 - RNA, 19 nt, Homo sapiens
  misc_RNA (1)...(19): siRNA sense strand
uaaaggugcaaaccaacaa

SEQ ID NO: 1403597 - RNA, 19 nt, Homo sapiens
  misc_RNA (1)...(19): siRNA sense strand
caagaaguccacccucaag

SEQ ID NO: 1403598 - RNA, 19 nt, Homo sapiens
  misc_RNA (1)...(19): siRNA sense strand
gguggaacaggagaagaua

SEQ ID NO: 1403599 - RNA, 19 nt, Homo sapiens
  misc_RNA (1)...(19): siRNA sense strand
agaaguccacccucaagaa

SEQ ID NO: 1403600 - RNA, 19 nt, Homo sapiens
  misc_RNA (1)...(19): siRNA sense strand
ccaagaaguccacccucaa

SEQ ID NO: 1403601 - RNA, 19 nt, Homo sapiens
  misc_RNA (1)...(19): siRNA sense strand
aggagaagauagcuguguu

SEQ ID NO: 1403602 - RNA, 19 nt, Homo sapiens
  misc_RNA (1)...(19): siRNA sense strand
ccgcgcagcugacaguucu

SEQ ID NO: 1403603 - RNA, 19 nt, Homo sapiens
  misc_RNA (1)...(19): siRNA sense strand
ggugcaaaccaacaagaug

SEQ ID NO: 1403604 - RNA, 19 nt, Homo sapiens
  misc_RNA (1)...(19): siRNA sense strand
ggacuauccacggugaaga

SEQ ID NO: 1403605 - RNA, 19 nt, Homo sapiens
  misc_RNA (1)...(19): siRNA sense strand
guaacaugcgcaucuacug

SEQ ID NO: 1403606 - RNA, 19 nt, Homo sapiens
  misc_RNA (1)...(19): siRNA sense strand
gacaguggcaucuacuucu

SEQ ID NO: 1403607 - RNA, 19 nt, Homo sapiens
  misc_RNA (1)...(19): siRNA sense strand
gcgcaucuacuggcugaga

SEQ ID NO: 1403608 - RNA, 19 nt, Homo sapiens
  misc_RNA (1)...(19): siRNA sense strand
caagccgguucauucucaa

SEQ ID NO: 1403609 - RNA, 19 nt, Homo sapiens
  misc_RNA (1)...(19): siRNA sense strand
ggaugcaagccgguucauu

SEQ ID NO: 1403610 - RNA, 19 nt, Homo sapiens
  misc_RNA (1)...(19): siRNA sense strand
gcaucuacuucugcaugau

SEQ ID NO: 1403611 - RNA, 19 nt, Homo sapiens
  misc_RNA (1)...(19): siRNA sense strand
ccucugggauuccgcaaaa

SEQ ID NO: 1403612 - RNA, 19 nt, Homo sapiens
  misc_RNA (1)...(19): siRNA sense strand
cagcugagugugguugauu

SEQ ID NO: 1403613 - RNA, 19 nt, Homo sapiens
  misc_RNA (1)...(19): siRNA sense strand
acaguggcaucuacuucug

SEQ ID NO: 1403614 - RNA, 19 nt, Homo sapiens
  misc_RNA (1)...(19): siRNA sense strand
gaagagagugugccgguua

SEQ ID NO: 1403615 - RNA, 19 nt, Homo sapiens
  misc_RNA (1)...(19): siRNA sense strand
gcuaaaaucucccucagua

SEQ ID NO: 1403616 - RNA, 19 nt, Homo sapiens
  misc_RNA (1)...(19): siRNA sense strand
gcaagccgguucauucuca

SEQ ID NO: 1403617 - RNA, 19 nt, Homo sapiens
  misc_RNA (1)...(19): siRNA sense strand
acauaaaggugcaaaccaa

SEQ ID NO: 1403618 - RNA, 19 nt, Homo sapiens
  misc_RNA (1)...(19): siRNA sense strand
gaugcaagccgguucauuc

SEQ ID NO: 1403619 - RNA, 19 nt, Homo sapiens
  misc_RNA (1)...(19): siRNA sense strand
ggagaagauagcuguguuu

SEQ ID NO: 1403620 - RNA, 19 nt, Homo sapiens
  misc_RNA (1)...(19): siRNA sense strand
ucaguaacaugcgcaucua

SEQ ID NO: 1403621 - RNA, 19 nt, Homo sapiens
  misc_RNA (1)...(19): siRNA sense strand
ggcaucuacuucugcauga

SEQ ID NO: 1403622 - RNA, 19 nt, Homo sapiens
  misc_RNA (1)...(19): siRNA sense strand
gaaguccacccucaagaag

SEQ ID NO: 1403623 - RNA, 19 nt, Homo sapiens
  misc_RNA (1)...(19): siRNA sense strand
ccaacaagauggugaugcu

SEQ ID NO: 1403624 - RNA, 19 nt, Homo sapiens
  misc_RNA (1)...(19): siRNA sense strand
gagugugguugauuuccuu

SEQ ID NO: 1403625 - RNA, 19 nt, Homo sapiens
  misc_RNA (1)...(19): siRNA sense strand
gagaagauagcuguguuuc

SEQ ID NO: 1403626 - RNA, 19 nt, Homo sapiens
  misc_RNA (1)...(19): siRNA sense strand
uaaaggugcaaaccaacaa

SEQ ID NO: 1403627 - RNA, 19 nt, Homo sapiens
  misc_RNA (1)...(19): siRNA sense strand
caagaaguccacccucaag

SEQ ID NO: 1403628 - RNA, 19 nt, Homo sapiens
  misc_RNA (1)...(19): siRNA sense strand
gguggaacaggagaagaua

SEQ ID NO: 1403629 - RNA, 19 nt, Homo sapiens
  misc_RNA (1)...(19): siRNA sense strand
agaaguccacccucaagaa

SEQ ID NO: 1403630 - RNA, 19 nt, Homo sapiens
  misc_RNA (1)...(19): siRNA sense strand
ccaagaaguccacccucaa

SEQ ID NO: 1403631 - RNA, 19 nt, Homo sapiens
  misc_RNA (1)...(19): siRNA sense strand
aggagaagauagcuguguu

SEQ ID NO: 1403632 - RNA, 19 nt, Homo sapiens
  misc_RNA (1)...(19): siRNA sense strand
ccgcgcagcugacaguucu

SEQ ID NO: 1403633 - RNA, 19 nt, Homo sapiens
  misc_RNA (1)...(19): siRNA sense strand
ggugcaaaccaacaagaug

SEQ ID NO: 1403634 - RNA, 19 nt, Homo sapiens
  misc_RNA (1)...(19): siRNA sense strand
ggacuauccacggugaaga

SEQ ID NO: 1403635 - RNA, 19 nt, Homo sapiens
  misc_RNA (1)...(19): siRNA sense strand
guaacaugcgcaucuacug

SEQ ID NO: 1403636 - RNA, 19 nt, Homo sapiens
  misc_RNA (1)...(19): siRNA sense strand
gacaguggcaucuacuucu

SEQ ID NO: 1403637 - RNA, 19 nt, Homo sapiens
  misc_RNA (1)...(19): siRNA sense strand
gcgcaucuacuggcugaga

SEQ ID NO: 1403638 - RNA, 19 nt, Homo sapiens
  misc_RNA (1)...(19): siRNA sense strand
caagccgguucauucucaa

SEQ ID NO: 1403639 - RNA, 19 nt, Homo sapiens
  misc_RNA (1)...(19): siRNA sense strand
ggaugcaagccgguucauu

SEQ ID NO: 1403640 - RNA, 19 nt, Homo sapiens
  misc_RNA (1)...(19): siRNA sense strand
gcaucuacuucugcaugau

SEQ ID NO: 1403641 - RNA, 19 nt, Homo sapiens
  misc_RNA (1)...(19): siRNA sense strand
ccucugggauuccgcaaaa

SEQ ID NO: 1403642 - RNA, 19 nt, Homo sapiens
  misc_RNA (1)...(19): siRNA sense strand
cagcugagugugguugauu

SEQ ID NO: 1403643 - RNA, 19 nt, Homo sapiens
  misc_RNA (1)...(19): siRNA sense strand
acaguggcaucuacuucug

SEQ ID NO: 1403644 - RNA, 19 nt, Homo sapiens
  misc_RNA (1)...(19): siRNA sense strand
gaagagagugugccgguua

SEQ ID NO: 1403645 - RNA, 19 nt, Homo sapiens
  misc_RNA (1)...(19): siRNA sense strand
gcuaaaaucucccucagua

SEQ ID NO: 1403646 - RNA, 19 nt, Homo sapiens
  misc_RNA (1)...(19): siRNA sense strand
gcaagccgguucauucuca

SEQ ID NO: 1403647 - RNA, 19 nt, Homo sapiens
  misc_RNA (1)...(19): siRNA sense strand
acauaaaggugcaaaccaa

SEQ ID NO: 1403648 - RNA, 19 nt, Homo sapiens
  misc_RNA (1)...(19): siRNA sense strand
gaugcaagccgguucauuc

SEQ ID NO: 1403649 - RNA, 19 nt, Homo sapiens
  misc_RNA (1)...(19): siRNA sense strand
ggagaagauagcuguguuu

SEQ ID NO: 1403650 - RNA, 19 nt, Homo sapiens
  misc_RNA (1)...(19): siRNA sense strand
ucaguaacaugcgcaucua

SEQ ID NO: 1403651 - RNA, 19 nt, Homo sapiens
  misc_RNA (1)...(19): siRNA sense strand
ggcaucuacuucugcauga

SEQ ID NO: 1403652 - RNA, 19 nt, Homo sapiens
  misc_RNA (1)...(19): siRNA sense strand
gaaguccacccucaagaag

SEQ ID NO: 1403653 - RNA, 19 nt, Homo sapiens
  misc_RNA (1)...(19): siRNA sense strand
ccaacaagauggugaugcu

SEQ ID NO: 1403654 - RNA, 19 nt, Homo sapiens
  misc_RNA (1)...(19): siRNA sense strand
gagugugguugauuuccuu

SEQ ID NO: 1403655 - RNA, 19 nt, Homo sapiens
  misc_RNA (1)...(19): siRNA sense strand
gagaagauagcuguguuuc

SEQ ID NO: 1403656 - RNA, 19 nt, Homo sapiens
  misc_RNA (1)...(19): siRNA sense strand
uaaaggugcaaaccaacaa

SEQ ID NO: 1403657 - RNA, 19 nt, Homo sapiens
  misc_RNA (1)...(19): siRNA sense strand
caagaaguccacccucaag

SEQ ID NO: 1403658 - RNA, 19 nt, Homo sapiens
  misc_RNA (1)...(19): siRNA sense strand
gguggaacaggagaagaua

SEQ ID NO: 1403659 - RNA, 19 nt, Homo sapiens
  misc_RNA (1)...(19): siRNA sense strand
agaaguccacccucaagaa

SEQ ID NO: 1403660 - RNA, 19 nt, Homo sapiens
  misc_RNA (1)...(19): siRNA sense strand
ccaagaaguccacccucaa

SEQ ID NO: 1403661 - RNA, 19 nt, Homo sapiens
  misc_RNA (1)...(19): siRNA sense strand
aggagaagauagcuguguu

SEQ ID NO: 1403662 - RNA, 19 nt, Homo sapiens
  misc_RNA (1)...(19): siRNA sense strand
ccgcgcagcugacaguucu

SEQ ID NO: 1403663 - RNA, 19 nt, Homo sapiens
  misc_RNA (1)...(19): siRNA sense strand
ggugcaaaccaacaagaug

SEQ ID NO: 1403664 - RNA, 19 nt, Homo sapiens
  misc_RNA (1)...(19): siRNA sense strand
ggacuauccacggugaaga

SEQ ID NO: 1403665 - RNA, 19 nt, Homo sapiens
  misc_RNA (1)...(19): siRNA sense strand
guaacaugcgcaucuacug

SEQ ID NO: 1403666 - RNA, 19 nt, Homo sapiens
  misc_RNA (1)...(19): siRNA sense strand
gacaguggcaucuacuucu

SEQ ID NO: 1403667 - RNA, 19 nt, Homo sapiens
  misc_RNA (1)...(19): siRNA sense strand
gcgcaucuacuggcugaga

SEQ ID NO: 1403668 - RNA, 19 nt, Homo sapiens
  misc_RNA (1)...(19): siRNA sense strand
caagccgguucauucucaa

SEQ ID NO: 1403669 - RNA, 19 nt, Homo sapiens
  misc_RNA (1)...(19): siRNA sense strand
ggaugcaagccgguucauu

SEQ ID NO: 1403670 - RNA, 19 nt, Homo sapiens
  misc_RNA (1)...(19): siRNA sense strand
gcaucuacuucugcaugau

SEQ ID NO: 1403671 - RNA, 19 nt, Homo sapiens
  misc_RNA (1)...(19): siRNA sense strand
ccucugggauuccgcaaaa

SEQ ID NO: 1403672 - RNA, 19 nt, Homo sapiens
  misc_RNA (1)...(19): siRNA sense strand
cagcugagugugguugauu

SEQ ID NO: 1403673 - RNA, 19 nt, Homo sapiens
  misc_RNA (1)...(19): siRNA sense strand
acaguggcaucuacuucug

SEQ ID NO: 1403674 - RNA, 19 nt, Homo sapiens
  misc_RNA (1)...(19): siRNA sense strand
gaagagagugugccgguua

SEQ ID NO: 1403675 - RNA, 19 nt, Homo sapiens
  misc_RNA (1)...(19): siRNA sense strand
gcuaaaaucucccucagua

SEQ ID NO: 1403676 - RNA, 19 nt, Homo sapiens
  misc_RNA (1)...(19): siRNA sense strand
gcaagccgguucauucuca

SEQ ID NO: 1403677 - RNA, 19 nt, Homo sapiens
  misc_RNA (1)...(19): siRNA sense strand
acauaaaggugcaaaccaa

SEQ ID NO: 1403678 - RNA, 19 nt, Homo sapiens
  misc_RNA (1)...(19): siRNA sense strand
gaugcaagccgguucauuc

SEQ ID NO: 1403679 - RNA, 19 nt, Homo sapiens
  misc_RNA (1)...(19): siRNA sense strand
ggagaagauagcuguguuu

SEQ ID NO: 1403680 - RNA, 19 nt, Homo sapiens
  misc_RNA (1)...(19): siRNA sense strand
ucaguaacaugcgcaucua

SEQ ID NO: 1403681 - RNA, 19 nt, Homo sapiens
  misc_RNA (1)...(19): siRNA sense strand
ggcaucuacuucugcauga

SEQ ID NO: 1403682 - RNA, 19 nt, Homo sapiens
  misc_RNA (1)...(19): siRNA sense strand
gaaguccacccucaagaag

SEQ ID NO: 1403683 - RNA, 19 nt, Homo sapiens
  misc_RNA (1)...(19): siRNA sense strand
ccaacaagauggugaugcu

SEQ ID NO: 1403684 - RNA, 19 nt, Homo sapiens
  misc_RNA (1)...(19): siRNA sense strand
gagugugguugauuuccuu

SEQ ID NO: 1403685 - RNA, 19 nt, Homo sapiens
  misc_RNA (1)...(19): siRNA sense strand
gagaagauagcuguguuuc

SEQ ID NO: 1403686 - RNA, 19 nt, Homo sapiens
  misc_RNA (1)...(19): siRNA sense strand
uaaaggugcaaaccaacaa

SEQ ID NO: 1403687 - RNA, 19 nt, Homo sapiens
  misc_RNA (1)...(19): siRNA sense strand
caagaaguccacccucaag

SEQ ID NO: 1403688 - RNA, 19 nt, Homo sapiens
  misc_RNA (1)...(19): siRNA sense strand
gguggaacaggagaagaua

SEQ ID NO: 1403689 - RNA, 19 nt, Homo sapiens
  misc_RNA (1)...(19): siRNA sense strand
agaaguccacccucaagaa

SEQ ID NO: 1403690 - RNA, 19 nt, Homo sapiens
  misc_RNA (1)...(19): siRNA sense strand
ccaagaaguccacccucaa

SEQ ID NO: 1403691 - RNA, 19 nt, Homo sapiens
  misc_RNA (1)...(19): siRNA sense strand
aggagaagauagcuguguu

SEQ ID NO: 1403692 - RNA, 19 nt, Homo sapiens
  misc_RNA (1)...(19): siRNA sense strand
ccgcgcagcugacaguucu

SEQ ID NO: 1403693 - RNA, 19 nt, Homo sapiens
  misc_RNA (1)...(19): siRNA sense strand
ggugcaaaccaacaagaug

SEQ ID NO: 1403694 - RNA, 19 nt, Homo sapiens
  misc_RNA (1)...(19): siRNA sense strand
ggacuauccacggugaaga

SEQ ID NO: 1403695 - RNA, 19 nt, Homo sapiens
  misc_RNA (1)...(19): siRNA sense strand
guaacaugcgcaucuacug

SEQ ID NO: 1403696 - RNA, 19 nt, Homo sapiens
  misc_RNA (1)...(19): siRNA sense strand
gacaguggcaucuacuucu

SEQ ID NO: 1403697 - RNA, 19 nt, Homo sapiens
  misc_RNA (1)...(19): siRNA sense strand
gcgcaucuacuggcugaga

SEQ ID NO: 1403698 - RNA, 19 nt, Homo sapiens
  misc_RNA (1)...(19): siRNA sense strand
caagccgguucauucucaa

SEQ ID NO: 1403699 - RNA, 19 nt, Homo sapiens
  misc_RNA (1)...(19): siRNA sense strand
ggaugcaagccgguucauu

SEQ ID NO: 1403700 - RNA, 19 nt, Homo sapiens
  misc_RNA (1)...(19): siRNA sense strand
gcaucuacuucugcaugau

SEQ ID NO: 1403701 - RNA, 19 nt, Homo sapiens
  misc_RNA (1)...(19): siRNA sense strand
ccucugggauuccgcaaaa

SEQ ID NO: 1403702 - RNA, 19 nt, Homo sapiens
  misc_RNA (1)...(19): siRNA sense strand
cagcugagugugguugauu

SEQ ID NO: 1403703 - RNA, 19 nt, Homo sapiens
  misc_RNA (1)...(19): siRNA sense strand
acaguggcaucuacuucug

SEQ ID NO: 1403704 - RNA, 19 nt, Homo sapiens
  misc_RNA (1)...(19): siRNA sense strand
gaagagagugugccgguua

SEQ ID NO: 1403705 - RNA, 19 nt, Homo sapiens
  misc_RNA (1)...(19): siRNA sense strand
gcuaaaaucucccucagua

SEQ ID NO: 1403706 - RNA, 19 nt, Homo sapiens
  misc_RNA (1)...(19): siRNA sense strand
gcaagccgguucauucuca

SEQ ID NO: 1403707 - RNA, 19 nt, Homo sapiens
  misc_RNA (1)...(19): siRNA sense strand
acauaaaggugcaaaccaa

SEQ ID NO: 1403708 - RNA, 19 nt, Homo sapiens
  misc_RNA (1)...(19): siRNA sense strand
gaugcaagccgguucauuc

SEQ ID NO: 1403709 - RNA, 19 nt, Homo sapiens
  misc_RNA (1)...(19): siRNA sense strand
ggagaagauagcuguguuu

SEQ ID NO: 1403710 - RNA, 19 nt, Homo sapiens
  misc_RNA (1)...(19): siRNA sense strand
ucaguaacaugcgcaucua

SEQ ID NO: 1403711 - RNA, 19 nt, Homo sapiens
  misc_RNA (1)...(19): siRNA sense strand
ggcaucuacuucugcauga

SEQ ID NO: 1403712 - RNA, 19 nt, Homo sapiens
  misc_RNA (1)...(19): siRNA sense strand
gaaguccacccucaagaag

SEQ ID NO: 1403713 - RNA, 19 nt, Homo sapiens
  misc_RNA (1)...(19): siRNA sense strand
ccaacaagauggugaugcu

SEQ ID NO: 1403714 - RNA, 19 nt, Homo sapiens
  misc_RNA (1)...(19): siRNA sense strand
gagugugguugauuuccuu

SEQ ID NO: 1403715 - RNA, 19 nt, Homo sapiens
  misc_RNA (1)...(19): siRNA sense strand
gagaagauagcuguguuuc

SEQ ID NO: 1403716 - RNA, 19 nt, Homo sapiens
  misc_RNA (1)...(19): siRNA sense strand
uaaaggugcaaaccaacaa

SEQ ID NO: 1403717 - RNA, 19 nt, Homo sapiens
  misc_RNA (1)...(19): siRNA sense strand
caagaaguccacccucaag

SEQ ID NO: 1403718 - RNA, 19 nt, Homo sapiens
  misc_RNA (1)...(19): siRNA sense strand
gguggaacaggagaagaua

SEQ ID NO: 1403719 - RNA, 19 nt, Homo sapiens
  misc_RNA (1)...(19): siRNA sense strand
agaaguccacccucaagaa

SEQ ID NO: 1403720 - RNA, 19 nt, Homo sapiens
  misc_RNA (1)...(19): siRNA sense strand
ccaagaaguccacccucaa

SEQ ID NO: 1403721 - RNA, 19 nt, Homo sapiens
  misc_RNA (1)...(19): siRNA sense strand
aggagaagauagcuguguu

SEQ ID NO: 1403722 - RNA, 19 nt, Homo sapiens
  misc_RNA (1)...(19): siRNA sense strand
ccgcgcagcugacaguucu

SEQ ID NO: 1403723 - RNA, 19 nt, Homo sapiens
  misc_RNA (1)...(19): siRNA sense strand
ggugcaaaccaacaagaug

SEQ ID NO: 1403724 - RNA, 19 nt, Homo sapiens
  misc_RNA (1)...(19): siRNA sense strand
ggacuauccacggugaaga

SEQ ID NO: 1403725 - RNA, 19 nt, Homo sapiens
  misc_RNA (1)...(19): siRNA sense strand
guaacaugcgcaucuacug

SEQ ID NO: 1403726 - RNA, 19 nt, Homo sapiens
  misc_RNA (1)...(19): siRNA sense strand
gacaguggcaucuacuucu

SEQ ID NO: 1403727 - RNA, 19 nt, Homo sapiens
  misc_RNA (1)...(19): siRNA sense strand
gcgcaucuacuggcugaga

SEQ ID NO: 1403728 - RNA, 19 nt, Homo sapiens
  misc_RNA (1)...(19): siRNA sense strand
caagccgguucauucucaa

SEQ ID NO: 1403729 - RNA, 19 nt, Homo sapiens
  misc_RNA (1)...(19): siRNA sense strand
ggaugcaagccgguucauu

SEQ ID NO: 1403730 - RNA, 19 nt, Homo sapiens
  misc_RNA (1)...(19): siRNA sense strand
gcaucuacuucugcaugau

SEQ ID NO: 1403731 - RNA, 19 nt, Homo sapiens
  misc_RNA (1)...(19): siRNA sense strand
ccucugggauuccgcaaaa

SEQ ID NO: 1403732 - RNA, 19 nt, Homo sapiens
  misc_RNA (1)...(19): siRNA sense strand
cagcugagugugguugauu

SEQ ID NO: 1403733 - RNA, 19 nt, Homo sapiens
  misc_RNA (1)...(19): siRNA sense strand
acaguggcaucuacuucug

SEQ ID NO: 1403734 - RNA, 19 nt, Homo sapiens
  misc_RNA (1)...(19): siRNA sense strand
gaagagagugugccgguua

SEQ ID NO: 1403735 - RNA, 19 nt, Homo sapiens
  misc_RNA (1)...(19): siRNA sense strand
gcuaaaaucucccucagua

SEQ ID NO: 1403736 - RNA, 19 nt, Homo sapiens
  misc_RNA (1)...(19): siRNA sense strand
gcaagccgguucauucuca

SEQ ID NO: 1403737 - RNA, 19 nt, Homo sapiens
  misc_RNA (1)...(19): siRNA sense strand
acauaaaggugcaaaccaa

SEQ ID NO: 1403738 - RNA, 19 nt, Homo sapiens
  misc_RNA (1)...(19): siRNA sense strand
gaugcaagccgguucauuc

SEQ ID NO: 1403739 - RNA, 19 nt, Homo sapiens
  misc_RNA (1)...(19): siRNA sense strand
ggagaagauagcuguguuu

SEQ ID NO: 1403740 - RNA, 19 nt, Homo sapiens
  misc_RNA (1)...(19): siRNA sense strand
ucaguaacaugcgcaucua

SEQ ID NO: 1403741 - RNA, 19 nt, Homo sapiens
  misc_RNA (1)...(19): siRNA sense strand
ggcaucuacuucugcauga

SEQ ID NO: 1403742 - RNA, 19 nt, Homo sapiens
  misc_RNA (1)...(19): siRNA sense strand
gaaguccacccucaagaag

SEQ ID NO: 1403743 - RNA, 19 nt, Homo sapiens
  misc_RNA (1)...(19): siRNA sense strand
ccaacaagauggugaugcu

SEQ ID NO: 1403744 - RNA, 19 nt, Homo sapiens
  misc_RNA (1)...(19): siRNA sense strand
gagugugguugauuuccuu

SEQ ID NO: 1403745 - RNA, 19 nt, Homo sapiens
  misc_RNA (1)...(19): siRNA sense strand
gagaagauagcuguguuuc

SEQ ID NO: 1403746 - RNA, 19 nt, Homo sapiens
  misc_RNA (1)...(19): siRNA sense strand
uaaaggugcaaaccaacaa

SEQ ID NO: 1403747 - RNA, 19 nt, Homo sapiens
  misc_RNA (1)...(19): siRNA sense strand
caagaaguccacccucaag

SEQ ID NO: 1403748 - RNA, 19 nt, Homo sapiens
  misc_RNA (1)...(19): siRNA sense strand
gguggaacaggagaagaua

SEQ ID NO: 1403749 - RNA, 19 nt, Homo sapiens
  misc_RNA (1)...(19): siRNA sense strand
agaaguccacccucaagaa

SEQ ID NO: 1403750 - RNA, 19 nt, Homo sapiens
  misc_RNA (1)...(19): siRNA sense strand
ccaagaaguccacccucaa

SEQ ID NO: 1403751 - RNA, 19 nt, Homo sapiens
  misc_RNA (1)...(19): siRNA sense strand
aggagaagauagcuguguu

SEQ ID NO: 1403752 - RNA, 19 nt, Homo sapiens
  misc_RNA (1)...(19): siRNA sense strand
ccgcgcagcugacaguucu

SEQ ID NO: 1403753 - RNA, 19 nt, Homo sapiens
  misc_RNA (1)...(19): siRNA sense strand
ggugcaaaccaacaagaug

SEQ ID NO: 1403754 - RNA, 19 nt, Homo sapiens
  misc_RNA (1)...(19): siRNA sense strand
ggacuauccacggugaaga

SEQ ID NO: 1403755 - RNA, 19 nt, Homo sapiens
  misc_RNA (1)...(19): siRNA sense strand
guaacaugcgcaucuacug

SEQ ID NO: 1403756 - RNA, 19 nt, Homo sapiens
  misc_RNA (1)...(19): siRNA sense strand
gacaguggcaucuacuucu

SEQ ID NO: 1403757 - RNA, 19 nt, Homo sapiens
  misc_RNA (1)...(19): siRNA sense strand
gcgcaucuacuggcugaga

SEQ ID NO: 1403758 - RNA, 19 nt, Homo sapiens
  misc_RNA (1)...(19): siRNA sense strand
caagccgguucauucucaa

SEQ ID NO: 1403759 - RNA, 19 nt, Homo sapiens
  misc_RNA (1)...(19): siRNA sense strand
ggaugcaagccgguucauu

SEQ ID NO: 1403760 - RNA, 19 nt, Homo sapiens
  misc_RNA (1)...(19): siRNA sense strand
gcaucuacuucugcaugau

SEQ ID NO: 1403761 - RNA, 19 nt, Homo sapiens
  misc_RNA (1)...(19): siRNA sense strand
ccucugggauuccgcaaaa

SEQ ID NO: 1403762 - RNA, 19 nt, Homo sapiens
  misc_RNA (1)...(19): siRNA sense strand
cagcugagugugguugauu

SEQ ID NO: 1403763 - RNA, 19 nt, Homo sapiens
  misc_RNA (1)...(19): siRNA sense strand
acaguggcaucuacuucug

SEQ ID NO: 1403764 - RNA, 19 nt, Homo sapiens
  misc_RNA (1)...(19): siRNA sense strand
gaagagagugugccgguua

SEQ ID NO: 1403765 - RNA, 19 nt, Homo sapiens
  misc_RNA (1)...(19): siRNA sense strand
gcuaaaaucucccucagua

SEQ ID NO: 1403766 - RNA, 19 nt, Homo sapiens
  misc_RNA (1)...(19): siRNA sense strand
gcaagccgguucauucuca

SEQ ID NO: 1403767 - RNA, 19 nt, Homo sapiens
  misc_RNA (1)...(19): siRNA sense strand
acauaaaggugcaaaccaa

SEQ ID NO: 1403768 - RNA, 19 nt, Homo sapiens
  misc_RNA (1)...(19): siRNA sense strand
gaugcaagccgguucauuc

SEQ ID NO: 1403769 - RNA, 19 nt, Homo sapiens
  misc_RNA (1)...(19): siRNA sense strand
ggagaagauagcuguguuu

SEQ ID NO: 1403770 - RNA, 19 nt, Homo sapiens
  misc_RNA (1)...(19): siRNA sense strand
ucaguaacaugcgcaucua

SEQ ID NO: 1403771 - RNA, 19 nt, Homo sapiens
  misc_RNA (1)...(19): siRNA sense strand
ggcaucuacuucugcauga

SEQ ID NO: 1403772 - RNA, 19 nt, Homo sapiens
  misc_RNA (1)...(19): siRNA sense strand
gaaguccacccucaagaag

SEQ ID NO: 1403773 - RNA, 19 nt, Homo sapiens
  misc_RNA (1)...(19): siRNA sense strand
ccaacaagauggugaugcu

SEQ ID NO: 1403774 - RNA, 19 nt, Homo sapiens
  misc_RNA (1)...(19): siRNA sense strand
gagugugguugauuuccuu

SEQ ID NO: 1403775 - RNA, 19 nt, Homo sapiens
  misc_RNA (1)...(19): siRNA sense strand
gagaagauagcuguguuuc

SEQ ID NO: 1403776 - RNA, 19 nt, Homo sapiens
  misc_RNA (1)...(19): siRNA sense strand
uaaaggugcaaaccaacaa

SEQ ID NO: 1403777 - RNA, 19 nt, Homo sapiens
  misc_RNA (1)...(19): siRNA sense strand
caagaaguccacccucaag

SEQ ID NO: 1403778 - RNA, 19 nt, Homo sapiens
  misc_RNA (1)...(19): siRNA sense strand
gguggaacaggagaagaua

SEQ ID NO: 1403779 - RNA, 19 nt, Homo sapiens
  misc_RNA (1)...(19): siRNA sense strand
agaaguccacccucaagaa

SEQ ID NO: 1403780 - RNA, 19 nt, Homo sapiens
  misc_RNA (1)...(19): siRNA sense strand
ccaagaaguccacccucaa

SEQ ID NO: 1403781 - RNA, 19 nt, Homo sapiens
  misc_RNA (1)...(19): siRNA sense strand
aggagaagauagcuguguu

SEQ ID NO: 1403782 - RNA, 19 nt, Homo sapiens
  misc_RNA (1)...(19): siRNA sense strand
ccgcgcagcugacaguucu

SEQ ID NO: 1403783 - RNA, 19 nt, Homo sapiens
  misc_RNA (1)...(19): siRNA sense strand
ggugcaaaccaacaagaug

SEQ ID NO: 1403784 - RNA, 19 nt, Homo sapiens
  misc_RNA (1)...(19): siRNA sense strand
ggacuauccacggugaaga

SEQ ID NO: 1403785 - RNA, 19 nt, Homo sapiens
  misc_RNA (1)...(19): siRNA sense strand
guaacaugcgcaucuacug

SEQ ID NO: 1403786 - RNA, 19 nt, Homo sapiens
  misc_RNA (1)...(19): siRNA sense strand
gacaguggcaucuacuucu

SEQ ID NO: 1403787 - RNA, 19 nt, Homo sapiens
  misc_RNA (1)...(19): siRNA sense strand
gcgcaucuacuggcugaga

SEQ ID NO: 1403788 - RNA, 19 nt, Homo sapiens
  misc_RNA (1)...(19): siRNA sense strand
caagccgguucauucucaa

SEQ ID NO: 1403789 - RNA, 19 nt, Homo sapiens
  misc_RNA (1)...(19): siRNA sense strand
ggaugcaagccgguucauu

SEQ ID NO: 1403790 - RNA, 19 nt, Homo sapiens
  misc_RNA (1)...(19): siRNA sense strand
gcaucuacuucugcaugau

SEQ ID NO: 1403791 - RNA, 19 nt, Homo sapiens
  misc_RNA (1)...(19): siRNA sense strand
ccucugggauuccgcaaaa

SEQ ID NO: 1403792 - RNA, 19 nt, Homo sapiens
  misc_RNA (1)...(19): siRNA sense strand
cagcugagugugguugauu

SEQ ID NO: 1403793 - RNA, 19 nt, Homo sapiens
  misc_RNA (1)...(19): siRNA sense strand
acaguggcaucuacuucug

SEQ ID NO: 1403794 - RNA, 19 nt, Homo sapiens
  misc_RNA (1)...(19): siRNA sense strand
gaagagagugugccgguua

SEQ ID NO: 1403795 - RNA, 19 nt, Homo sapiens
  misc_RNA (1)...(19): siRNA sense strand
gcuaaaaucucccucagua

SEQ ID NO: 1403796 - RNA, 19 nt, Homo sapiens
  misc_RNA (1)...(19): siRNA sense strand
gcaagccgguucauucuca

SEQ ID NO: 1403797 - RNA, 19 nt, Homo sapiens
  misc_RNA (1)...(19): siRNA sense strand
acauaaaggugcaaaccaa

SEQ ID NO: 1403798 - RNA, 19 nt, Homo sapiens
  misc_RNA (1)...(19): siRNA sense strand
gaugcaagccgguucauuc

SEQ ID NO: 1403799 - RNA, 19 nt, Homo sapiens
  misc_RNA (1)...(19): siRNA sense strand
ggagaagauagcuguguuu

SEQ ID NO: 1403800 - RNA, 19 nt, Homo sapiens
  misc_RNA (1)...(19): siRNA sense strand
ucaguaacaugcgcaucua

SEQ ID NO: 1403801 - RNA, 19 nt, Homo sapiens
  misc_RNA (1)...(19): siRNA sense strand
ggcaucuacuucugcauga

SEQ ID NO: 1403802 - RNA, 19 nt, Homo sapiens
  misc_RNA (1)...(19): siRNA sense strand
gaaguccacccucaagaag

SEQ ID NO: 1403803 - RNA, 19 nt, Homo sapiens
  misc_RNA (1)...(19): siRNA sense strand
ccaacaagauggugaugcu

SEQ ID NO: 1403804 - RNA, 19 nt, Homo sapiens
  misc_RNA (1)...(19): siRNA sense strand
gagugugguugauuuccuu

SEQ ID NO: 1403805 - RNA, 19 nt, Homo sapiens
  misc_RNA (1)...(19): siRNA sense strand
gagaagauagcuguguuuc

SEQ ID NO: 1403806 - RNA, 19 nt, Homo sapiens
  misc_RNA (1)...(19): siRNA sense strand
uaaaggugcaaaccaacaa

SEQ ID NO: 1403807 - RNA, 19 nt, Homo sapiens
  misc_RNA (1)...(19): siRNA sense strand
caagaaguccacccucaag

SEQ ID NO: 1403808 - RNA, 19 nt, Homo sapiens
  misc_RNA (1)...(19): siRNA sense strand
gguggaacaggagaagaua

SEQ ID NO: 1403809 - RNA, 19 nt, Homo sapiens
  misc_RNA (1)...(19): siRNA sense strand
agaaguccacccucaagaa

SEQ ID NO: 1403810 - RNA, 19 nt, Homo sapiens
  misc_RNA (1)...(19): siRNA sense strand
ccaagaaguccacccucaa

SEQ ID NO: 1403811 - RNA, 19 nt, Homo sapiens
  misc_RNA (1)...(19): siRNA sense strand
aggagaagauagcuguguu

SEQ ID NO: 1403812 - RNA, 19 nt, Homo sapiens
  misc_RNA (1)...(19): siRNA sense strand
ccgcgcagcugacaguucu

SEQ ID NO: 1403813 - RNA, 19 nt, Homo sapiens
  misc_RNA (1)...(19): siRNA sense strand
ggugcaaaccaacaagaug

SEQ ID NO: 1403814 - RNA, 19 nt, Homo sapiens
  misc_RNA (1)...(19): siRNA sense strand
ggacuauccacggugaaga

SEQ ID NO: 1403815 - RNA, 19 nt, Homo sapiens
  misc_RNA (1)...(19): siRNA sense strand
guaacaugcgcaucuacug

SEQ ID NO: 1403816 - RNA, 19 nt, Homo sapiens
  misc_RNA (1)...(19): siRNA sense strand
gacaguggcaucuacuucu

SEQ ID NO: 1403817 - RNA, 19 nt, Homo sapiens
  misc_RNA (1)...(19): siRNA sense strand
gcgcaucuacuggcugaga

SEQ ID NO: 1403818 - RNA, 19 nt, Homo sapiens
  misc_RNA (1)...(19): siRNA sense strand
caagccgguucauucucaa

SEQ ID NO: 1403819 - RNA, 19 nt, Homo sapiens
  misc_RNA (1)...(19): siRNA sense strand
ggaugcaagccgguucauu

SEQ ID NO: 1403820 - RNA, 19 nt, Homo sapiens
  misc_RNA (1)...(19): siRNA sense strand
gcaucuacuucugcaugau

SEQ ID NO: 1403821 - RNA, 19 nt, Homo sapiens
  misc_RNA (1)...(19): siRNA sense strand
ccucugggauuccgcaaaa

SEQ ID NO: 1403822 - RNA, 19 nt, Homo sapiens
  misc_RNA (1)...(19): siRNA sense strand
cagcugagugugguugauu

SEQ ID NO: 1403823 - RNA, 19 nt, Homo sapiens
  misc_RNA (1)...(19): siRNA sense strand
acaguggcaucuacuucug

SEQ ID NO: 1403824 - RNA, 19 nt, Homo sapiens
  misc_RNA (1)...(19): siRNA sense strand
gaagagagugugccgguua

SEQ ID NO: 1403825 - RNA, 19 nt, Homo sapiens
  misc_RNA (1)...(19): siRNA sense strand
gcuaaaaucucccucagua

SEQ ID NO: 1403826 - RNA, 19 nt, Homo sapiens
  misc_RNA (1)...(19): siRNA sense strand
gcaagccgguucauucuca

SEQ ID NO: 1403827 - RNA, 19 nt, Homo sapiens
  misc_RNA (1)...(19): siRNA sense strand
acauaaaggugcaaaccaa

SEQ ID NO: 1403828 - RNA, 19 nt, Homo sapiens
  misc_RNA (1)...(19): siRNA sense strand
gaugcaagccgguucauuc

SEQ ID NO: 1403829 - RNA, 19 nt, Homo sapiens
  misc_RNA (1)...(19): siRNA sense strand
ggagaagauagcuguguuu

SEQ ID NO: 1403830 - RNA, 19 nt, Homo sapiens
  misc_RNA (1)...(19): siRNA sense strand
ucaguaacaugcgcaucua

SEQ ID NO: 1403831 - RNA, 19 nt, Homo sapiens
  misc_RNA (1)...(19): siRNA sense strand
ggcaucuacuucugcauga

SEQ ID NO: 1403832 - RNA, 19 nt, Homo sapiens
  misc_RNA (1)...(19): siRNA sense strand
gaaguccacccucaagaag

SEQ ID NO: 1403833 - RNA, 19 nt, Homo sapiens
  misc_RNA (1)...(19): siRNA sense strand
ccaacaagauggugaugcu

SEQ ID NO: 1403834 - RNA, 19 nt, Homo sapiens
  misc_RNA (1)...(19): siRNA sense strand
gagugugguugauuuccuu

SEQ ID NO: 1403835 - RNA, 19 nt, Homo sapiens
  misc_RNA (1)...(19): siRNA sense strand
gagaagauagcuguguuuc

SEQ ID NO: 1403836 - RNA, 19 nt, Homo sapiens
  misc_RNA (1)...(19): siRNA sense strand
uaaaggugcaaaccaacaa

SEQ ID NO: 1403837 - RNA, 19 nt, Homo sapiens
  misc_RNA (1)...(19): siRNA sense strand
caagaaguccacccucaag

SEQ ID NO: 1403838 - RNA, 19 nt, Homo sapiens
  misc_RNA (1)...(19): siRNA sense strand
gguggaacaggagaagaua

SEQ ID NO: 1403839 - RNA, 19 nt, Homo sapiens
  misc_RNA (1)...(19): siRNA sense strand
agaaguccacccucaagaa

SEQ ID NO: 1403840 - RNA, 19 nt, Homo sapiens
  misc_RNA (1)...(19): siRNA sense strand
ccaagaaguccacccucaa

SEQ ID NO: 1403841 - RNA, 19 nt, Homo sapiens
  misc_RNA (1)...(19): siRNA sense strand
aggagaagauagcuguguu

SEQ ID NO: 1403842 - RNA, 19 nt, Homo sapiens
  misc_RNA (1)...(19): siRNA sense strand
ccgcgcagcugacaguucu

SEQ ID NO: 1403843 - RNA, 19 nt, Homo sapiens
  misc_RNA (1)...(19): siRNA sense strand
ggugcaaaccaacaagaug

SEQ ID NO: 1403844 - RNA, 19 nt, Homo sapiens
  misc_RNA (1)...(19): siRNA sense strand
ggacuauccacggugaaga

SEQ ID NO: 1403845 - RNA, 19 nt, Homo sapiens
  misc_RNA (1)...(19): siRNA sense strand
guaacaugcgcaucuacug

SEQ ID NO: 1403846 - RNA, 19 nt, Homo sapiens
  misc_RNA (1)...(19): siRNA sense strand
gacaguggcaucuacuucu

SEQ ID NO: 1403847 - RNA, 19 nt, Homo sapiens
  misc_RNA (1)...(19): siRNA sense strand
gcgcaucuacuggcugaga

SEQ ID NO: 1403848 - RNA, 19 nt, Homo sapiens
  misc_RNA (1)...(19): siRNA sense strand
caagccgguucauucucaa

SEQ ID NO: 1403849 - RNA, 19 nt, Homo sapiens
  misc_RNA (1)...(19): siRNA sense strand
ggaugcaagccgguucauu

SEQ ID NO: 1403850 - RNA, 19 nt, Homo sapiens
  misc_RNA (1)...(19): siRNA sense strand
gcaucuacuucugcaugau

SEQ ID NO: 1403851 - RNA, 19 nt, Homo sapiens
  misc_RNA (1)...(19): siRNA sense strand
ccucugggauuccgcaaaa

SEQ ID NO: 1403852 - RNA, 19 nt, Homo sapiens
  misc_RNA (1)...(19): siRNA sense strand
cagcugagugugguugauu

SEQ ID NO: 1403853 - RNA, 19 nt, Homo sapiens
  misc_RNA (1)...(19): siRNA sense strand
acaguggcaucuacuucug

SEQ ID NO: 1403854 - RNA, 19 nt, Homo sapiens
  misc_RNA (1)...(19): siRNA sense strand
gaagagagugugccgguua

SEQ ID NO: 1403855 - RNA, 19 nt, Homo sapiens
  misc_RNA (1)...(19): siRNA sense strand
gcuaaaaucucccucagua

SEQ ID NO: 1403856 - RNA, 19 nt, Homo sapiens
  misc_RNA (1)...(19): siRNA sense strand
gcaagccgguucauucuca

SEQ ID NO: 1403857 - RNA, 19 nt, Homo sapiens
  misc_RNA (1)...(19): siRNA sense strand
acauaaaggugcaaaccaa

SEQ ID NO: 1403858 - RNA, 19 nt, Homo sapiens
  misc_RNA (1)...(19): siRNA sense strand
gaugcaagccgguucauuc

SEQ ID NO: 1403859 - RNA, 19 nt, Homo sapiens
  misc_RNA (1)...(19): siRNA sense strand
ggagaagauagcuguguuu

SEQ ID NO: 1403860 - RNA, 19 nt, Homo sapiens
  misc_RNA (1)...(19): siRNA sense strand
ucaguaacaugcgcaucua

SEQ ID NO: 1403861 - RNA, 19 nt, Homo sapiens
  misc_RNA (1)...(19): siRNA sense strand
ggcaucuacuucugcauga

SEQ ID NO: 1403862 - RNA, 19 nt, Homo sapiens
  misc_RNA (1)...(19): siRNA sense strand
gaaguccacccucaagaag

SEQ ID NO: 1403863 - RNA, 19 nt, Homo sapiens
  misc_RNA (1)...(19): siRNA sense strand
ccaacaagauggugaugcu

SEQ ID NO: 1403864 - RNA, 19 nt, Homo sapiens
  misc_RNA (1)...(19): siRNA sense strand
gagugugguugauuuccuu

SEQ ID NO: 1403865 - RNA, 19 nt, Homo sapiens
  misc_RNA (1)...(19): siRNA sense strand
gagaagauagcuguguuuc

SEQ ID NO: 1403866 - RNA, 19 nt, Homo sapiens
  misc_RNA (1)...(19): siRNA sense strand
uaaaggugcaaaccaacaa

SEQ ID NO: 1403867 - RNA, 19 nt, Homo sapiens
  misc_RNA (1)...(19): siRNA sense strand
caagaaguccacccucaag

SEQ ID NO: 1403868 - RNA, 19 nt, Homo sapiens
  misc_RNA (1)...(19): siRNA sense strand
gguggaacaggagaagaua

SEQ ID NO: 1403869 - RNA, 19 nt, Homo sapiens
  misc_RNA (1)...(19): siRNA sense strand
agaaguccacccucaagaa

SEQ ID NO: 1403870 - RNA, 19 nt, Homo sapiens
  misc_RNA (1)...(19): siRNA sense strand
ccaagaaguccacccucaa

SEQ ID NO: 1403871 - RNA, 19 nt, Homo sapiens
  misc_RNA (1)...(19): siRNA sense strand
aggagaagauagcuguguu

SEQ ID NO: 1403872 - RNA, 19 nt, Homo sapiens
  misc_RNA (1)...(19): siRNA sense strand
ccgcgcagcugacaguucu

SEQ ID NO: 1403873 - RNA, 19 nt, Homo sapiens
  misc_RNA (1)...(19): siRNA sense strand
ggugcaaaccaacaagaug

SEQ ID NO: 1403874 - RNA, 19 nt, Homo sapiens
  misc_RNA (1)...(19): siRNA sense strand
ggacuauccacggugaaga

SEQ ID NO: 1403875 - RNA, 19 nt, Homo sapiens
  misc_RNA (1)...(19): siRNA sense strand
guaacaugcgcaucuacug

SEQ ID NO: 1403876 - RNA, 19 nt, Homo sapiens
  misc_RNA (1)...(19): siRNA sense strand
gacaguggcaucuacuucu

SEQ ID NO: 1403877 - RNA, 19 nt, Homo sapiens
  misc_RNA (1)...(19): siRNA sense strand
gcgcaucuacuggcugaga

SEQ ID NO: 1403878 - RNA, 19 nt, Homo sapiens
  misc_RNA (1)...(19): siRNA sense strand
caagccgguucauucucaa

SEQ ID NO: 1403879 - RNA, 19 nt, Homo sapiens
  misc_RNA (1)...(19): siRNA sense strand
ggaugcaagccgguucauu

SEQ ID NO: 1403880 - RNA, 19 nt, Homo sapiens
  misc_RNA (1)...(19): siRNA sense strand
gcaucuacuucugcaugau

SEQ ID NO: 1403881 - RNA, 19 nt, Homo sapiens
  misc_RNA (1)...(19): siRNA sense strand
ccucugggauuccgcaaaa

SEQ ID NO: 1403882 - RNA, 19 nt, Homo sapiens
  misc_RNA (1)...(19): siRNA sense strand
cagcugagugugguugauu

SEQ ID NO: 1403883 - RNA, 19 nt, Homo sapiens
  misc_RNA (1)...(19): siRNA sense strand
acaguggcaucuacuucug

SEQ ID NO: 1403884 - RNA, 19 nt, Homo sapiens
  misc_RNA (1)...(19): siRNA sense strand
gaagagagugugccgguua

SEQ ID NO: 1403885 - RNA, 19 nt, Homo sapiens
  misc_RNA (1)...(19): siRNA sense strand
gcuaaaaucucccucagua

SEQ ID NO: 1403886 - RNA, 19 nt, Homo sapiens
  misc_RNA (1)...(19): siRNA sense strand
gcaagccgguucauucuca

SEQ ID NO: 1403887 - RNA, 19 nt, Homo sapiens
  misc_RNA (1)...(19): siRNA sense strand
acauaaaggugcaaaccaa

SEQ ID NO: 1403888 - RNA, 19 nt, Homo sapiens
  misc_RNA (1)...(19): siRNA sense strand
gaugcaagccgguucauuc

SEQ ID NO: 1403889 - RNA, 19 nt, Homo sapiens
  misc_RNA (1)...(19): siRNA sense strand
ggagaagauagcuguguuu

SEQ ID NO: 1403890 - RNA, 19 nt, Homo sapiens
  misc_RNA (1)...(19): siRNA sense strand
ucaguaacaugcgcaucua

SEQ ID NO: 1403891 - RNA, 19 nt, Homo sapiens
  misc_RNA (1)...(19): siRNA sense strand
ggcaucuacuucugcauga

SEQ ID NO: 1403892 - RNA, 19 nt, Homo sapiens
  misc_RNA (1)...(19): siRNA sense strand
gaaguccacccucaagaag

SEQ ID NO: 1403893 - RNA, 19 nt, Homo sapiens
  misc_RNA (1)...(19): siRNA sense strand
ccaacaagauggugaugcu

SEQ ID NO: 1403894 - RNA, 19 nt, Homo sapiens
  misc_RNA (1)...(19): siRNA sense strand
gagugugguugauuuccuu

SEQ ID NO: 1403895 - RNA, 19 nt, Homo sapiens
  misc_RNA (1)...(19): siRNA sense strand
gagaagauagcuguguuuc

SEQ ID NO: 1403896 - RNA, 19 nt, Homo sapiens
  misc_RNA (1)...(19): siRNA sense strand
uaaaggugcaaaccaacaa

SEQ ID NO: 1403897 - RNA, 19 nt, Homo sapiens
  misc_RNA (1)...(19): siRNA sense strand
caagaaguccacccucaag

SEQ ID NO: 1403898 - RNA, 19 nt, Homo sapiens
  misc_RNA (1)...(19): siRNA sense strand
gguggaacaggagaagaua

SEQ ID NO: 1403899 - RNA, 19 nt, Homo sapiens
  misc_RNA (1)...(19): siRNA sense strand
agaaguccacccucaagaa

SEQ ID NO: 1403900 - RNA, 19 nt, Homo sapiens
  misc_RNA (1)...(19): siRNA sense strand
ccaagaaguccacccucaa

SEQ ID NO: 1403901 - RNA, 19 nt, Homo sapiens
  misc_RNA (1)...(19): siRNA sense strand
aggagaagauagcuguguu

SEQ ID NO: 1403902 - RNA, 19 nt, Homo sapiens
  misc_RNA (1)...(19): siRNA sense strand
ccgcgcagcugacaguucu

SEQ ID NO: 1403903 - RNA, 19 nt, Homo sapiens
  misc_RNA (1)...(19): siRNA sense strand
ggugcaaaccaacaagaug

SEQ ID NO: 1403904 - RNA, 19 nt, Homo sapiens
  misc_RNA (1)...(19): siRNA sense strand
ggacuauccacggugaaga

SEQ ID NO: 1403905 - RNA, 19 nt, Homo sapiens
  misc_RNA (1)...(19): siRNA sense strand
guaacaugcgcaucuacug

SEQ ID NO: 1403906 - RNA, 19 nt, Homo sapiens
  misc_RNA (1)...(19): siRNA sense strand
gacaguggcaucuacuucu

SEQ ID NO: 1403907 - RNA, 19 nt, Homo sapiens
  misc_RNA (1)...(19): siRNA sense strand
gcgcaucuacuggcugaga

SEQ ID NO: 1403908 - RNA, 19 nt, Homo sapiens
  misc_RNA (1)...(19): siRNA sense strand
caagccgguucauucucaa

SEQ ID NO: 1403909 - RNA, 19 nt, Homo sapiens
  misc_RNA (1)...(19): siRNA sense strand
ggaugcaagccgguucauu

SEQ ID NO: 1403910 - RNA, 19 nt, Homo sapiens
  misc_RNA (1)...(19): siRNA sense strand
gcaucuacuucugcaugau

SEQ ID NO: 1403911 - RNA, 19 nt, Homo sapiens
  misc_RNA (1)...(19): siRNA sense strand
ccucugggauuccgcaaaa

SEQ ID NO: 1403912 - RNA, 19 nt, Homo sapiens
  misc_RNA (1)...(19): siRNA sense strand
cagcugagugugguugauu

SEQ ID NO: 1403913 - RNA, 19 nt, Homo sapiens
  misc_RNA (1)...(19): siRNA sense strand
acaguggcaucuacuucug

SEQ ID NO: 1403914 - RNA, 19 nt, Homo sapiens
  misc_RNA (1)...(19): siRNA sense strand
gaagagagugugccgguua

SEQ ID NO: 1403915 - RNA, 19 nt, Homo sapiens
  misc_RNA (1)...(19): siRNA sense strand
gcuaaaaucucccucagua

SEQ ID NO: 1403916 - RNA, 19 nt, Homo sapiens
  misc_RNA (1)...(19): siRNA sense strand
gcaagccgguucauucuca

SEQ ID NO: 1403917 - RNA, 19 nt, Homo sapiens
  misc_RNA (1)...(19): siRNA sense strand
acauaaaggugcaaaccaa

SEQ ID NO: 1403918 - RNA, 19 nt, Homo sapiens
  misc_RNA (1)...(19): siRNA sense strand
gaugcaagccgguucauuc

SEQ ID NO: 1403919 - RNA, 19 nt, Homo sapiens
  misc_RNA (1)...(19): siRNA sense strand
ggagaagauagcuguguuu

SEQ ID NO: 1403920 - RNA, 19 nt, Homo sapiens
  misc_RNA (1)...(19): siRNA sense strand
ucaguaacaugcgcaucua

SEQ ID NO: 1403921 - RNA, 19 nt, Homo sapiens
  misc_RNA (1)...(19): siRNA sense strand
ggcaucuacuucugcauga

SEQ ID NO: 1403922 - RNA, 19 nt, Homo sapiens
  misc_RNA (1)...(19): siRNA sense strand
gaaguccacccucaagaag

SEQ ID NO: 1403923 - RNA, 19 nt, Homo sapiens
  misc_RNA (1)...(19): siRNA sense strand
ccaacaagauggugaugcu

SEQ ID NO: 1403924 - RNA, 19 nt, Homo sapiens
  misc_RNA (1)...(19): siRNA sense strand
gagugugguugauuuccuu

SEQ ID NO: 1403925 - RNA, 19 nt, Homo sapiens
  misc_RNA (1)...(19): siRNA sense strand
gagaagauagcuguguuuc

SEQ ID NO: 1403926 - RNA, 19 nt, Homo sapiens
  misc_RNA (1)...(19): siRNA sense strand
uaaaggugcaaaccaacaa

SEQ ID NO: 1403927 - RNA, 19 nt, Homo sapiens
  misc_RNA (1)...(19): siRNA sense strand
caagaaguccacccucaag

SEQ ID NO: 1403928 - RNA, 19 nt, Homo sapiens
  misc_RNA (1)...(19): siRNA sense strand
gguggaacaggagaagaua

SEQ ID NO: 1403929 - RNA, 19 nt, Homo sapiens
  misc_RNA (1)...(19): siRNA sense strand
agaaguccacccucaagaa

SEQ ID NO: 1403930 - RNA, 19 nt, Homo sapiens
  misc_RNA (1)...(19): siRNA sense strand
ccaagaaguccacccucaa

SEQ ID NO: 1403931 - RNA, 19 nt, Homo sapiens
  misc_RNA (1)...(19): siRNA sense strand
aggagaagauagcuguguu

SEQ ID NO: 1403932 - RNA, 19 nt, Homo sapiens
  misc_RNA (1)...(19): siRNA sense strand
ccgcgcagcugacaguucu

SEQ ID NO: 1403933 - RNA, 19 nt, Homo sapiens
  misc_RNA (1)...(19): siRNA sense strand
ggugcaaaccaacaagaug

SEQ ID NO: 1403934 - RNA, 19 nt, Homo sapiens
  misc_RNA (1)...(19): siRNA sense strand
ggacuauccacggugaaga

SEQ ID NO: 1403935 - RNA, 19 nt, Homo sapiens
  misc_RNA (1)...(19): siRNA sense strand
guaacaugcgcaucuacug

SEQ ID NO: 1403936 - RNA, 19 nt, Homo sapiens
  misc_RNA (1)...(19): siRNA sense strand
gacaguggcaucuacuucu

SEQ ID NO: 1403937 - RNA, 19 nt, Homo sapiens
  misc_RNA (1)...(19): siRNA sense strand
gcgcaucuacuggcugaga

SEQ ID NO: 1403938 - RNA, 19 nt, Homo sapiens
  misc_RNA (1)...(19): siRNA sense strand
caagccgguucauucucaa

SEQ ID NO: 1403939 - RNA, 19 nt, Homo sapiens
  misc_RNA (1)...(19): siRNA sense strand
ggaugcaagccgguucauu

SEQ ID NO: 1403940 - RNA, 19 nt, Homo sapiens
  misc_RNA (1)...(19): siRNA sense strand
gcaucuacuucugcaugau

SEQ ID NO: 1403941 - RNA, 19 nt, Homo sapiens
  misc_RNA (1)...(19): siRNA sense strand
ccucugggauuccgcaaaa

SEQ ID NO: 1403942 - RNA, 19 nt, Homo sapiens
  misc_RNA (1)...(19): siRNA sense strand
cagcugagugugguugauu

SEQ ID NO: 1403943 - RNA, 19 nt, Homo sapiens
  misc_RNA (1)...(19): siRNA sense strand
acaguggcaucuacuucug

SEQ ID NO: 1403944 - RNA, 19 nt, Homo sapiens
  misc_RNA (1)...(19): siRNA sense strand
gaagagagugugccgguua

SEQ ID NO: 1403945 - RNA, 19 nt, Homo sapiens
  misc_RNA (1)...(19): siRNA sense strand
gcuaaaaucucccucagua

SEQ ID NO: 1403946 - RNA, 19 nt, Homo sapiens
  misc_RNA (1)...(19): siRNA sense strand
gcaagccgguucauucuca

SEQ ID NO: 1403947 - RNA, 19 nt, Homo sapiens
  misc_RNA (1)...(19): siRNA sense strand
acauaaaggugcaaaccaa

SEQ ID NO: 1403948 - RNA, 19 nt, Homo sapiens
  misc_RNA (1)...(19): siRNA sense strand
gaugcaagccgguucauuc

SEQ ID NO: 1403949 - RNA, 19 nt, Homo sapiens
  misc_RNA (1)...(19): siRNA sense strand
ggagaagauagcuguguuu

SEQ ID NO: 1403950 - RNA, 19 nt, Homo sapiens
  misc_RNA (1)...(19): siRNA sense strand
ucaguaacaugcgcaucua

SEQ ID NO: 1403951 - RNA, 19 nt, Homo sapiens
  misc_RNA (1)...(19): siRNA sense strand
ggcaucuacuucugcauga

SEQ ID NO: 1403952 - RNA, 19 nt, Homo sapiens
  misc_RNA (1)...(19): siRNA sense strand
gaaguccacccucaagaag

SEQ ID NO: 1403953 - RNA, 19 nt, Homo sapiens
  misc_RNA (1)...(19): siRNA sense strand
ccaacaagauggugaugcu

SEQ ID NO: 1403954 - RNA, 19 nt, Homo sapiens
  misc_RNA (1)...(19): siRNA sense strand
gagugugguugauuuccuu

SEQ ID NO: 1403955 - RNA, 19 nt, Homo sapiens
  misc_RNA (1)...(19): siRNA sense strand
gagaagauagcuguguuuc

SEQ ID NO: 1403956 - RNA, 19 nt, Homo sapiens
  misc_RNA (1)...(19): siRNA sense strand
uaaaggugcaaaccaacaa

SEQ ID NO: 1403957 - RNA, 19 nt, Homo sapiens
  misc_RNA (1)...(19): siRNA sense strand
caagaaguccacccucaag

SEQ ID NO: 1403958 - RNA, 19 nt, Homo sapiens
  misc_RNA (1)...(19): siRNA sense strand
gguggaacaggagaagaua

SEQ ID NO: 1403959 - RNA, 19 nt, Homo sapiens
  misc_RNA (1)...(19): siRNA sense strand
agaaguccacccucaagaa

SEQ ID NO: 1403960 - RNA, 19 nt, Homo sapiens
  misc_RNA (1)...(19): siRNA sense strand
ccaagaaguccacccucaa

SEQ ID NO: 1403961 - RNA, 19 nt, Homo sapiens
  misc_RNA (1)...(19): siRNA sense strand
aggagaagauagcuguguu

SEQ ID NO: 1403962 - RNA, 19 nt, Homo sapiens
  misc_RNA (1)...(19): siRNA sense strand
ccgcgcagcugacaguucu

SEQ ID NO: 1403963 - RNA, 19 nt, Homo sapiens
  misc_RNA (1)...(19): siRNA sense strand
ggugcaaaccaacaagaug

SEQ ID NO: 1403964 - RNA, 19 nt, Homo sapiens
  misc_RNA (1)...(19): siRNA sense strand
ggacuauccacggugaaga

SEQ ID NO: 1403965 - RNA, 19 nt, Homo sapiens
  misc_RNA (1)...(19): siRNA sense strand
guaacaugcgcaucuacug

SEQ ID NO: 1403966 - RNA, 19 nt, Homo sapiens
  misc_RNA (1)...(19): siRNA sense strand
gacaguggcaucuacuucu

SEQ ID NO: 1403967 - RNA, 19 nt, Homo sapiens
  misc_RNA (1)...(19): siRNA sense strand
gcgcaucuacuggcugaga

SEQ ID NO: 1403968 - RNA, 19 nt, Homo sapiens
  misc_RNA (1)...(19): siRNA sense strand
caagccgguucauucucaa

SEQ ID NO: 1403969 - RNA, 19 nt, Homo sapiens
  misc_RNA (1)...(19): siRNA sense strand
ggaugcaagccgguucauu

SEQ ID NO: 1403970 - RNA, 19 nt, Homo sapiens
  misc_RNA (1)...(19): siRNA sense strand
gcaucuacuucugcaugau

SEQ ID NO: 1403971 - RNA, 19 nt, Homo sapiens
  misc_RNA (1)...(19): siRNA sense strand
ccucugggauuccgcaaaa

SEQ ID NO: 1403972 - RNA, 19 nt, Homo sapiens
  misc_RNA (1)...(19): siRNA sense strand
cagcugagugugguugauu

SEQ ID NO: 1403973 - RNA, 19 nt, Homo sapiens
  misc_RNA (1)...(19): siRNA sense strand
acaguggcaucuacuucug

SEQ ID NO: 1403974 - RNA, 19 nt, Homo sapiens
  misc_RNA (1)...(19): siRNA sense strand
gaagagagugugccgguua

SEQ ID NO: 1403975 - RNA, 19 nt, Homo sapiens
  misc_RNA (1)...(19): siRNA sense strand
gcuaaaaucucccucagua

SEQ ID NO: 1403976 - RNA, 19 nt, Homo sapiens
  misc_RNA (1)...(19): siRNA sense strand
gcaagccgguucauucuca

SEQ ID NO: 1403977 - RNA, 19 nt, Homo sapiens
  misc_RNA (1)...(19): siRNA sense strand
acauaaaggugcaaaccaa

SEQ ID NO: 1403978 - RNA, 19 nt, Homo sapiens
  misc_RNA (1)...(19): siRNA sense strand
gaugcaagccgguucauuc

SEQ ID NO: 1403979 - RNA, 19 nt, Homo sapiens
  misc_RNA (1)...(19): siRNA sense strand
ggagaagauagcuguguuu

SEQ ID NO: 1403980 - RNA, 19 nt, Homo sapiens
  misc_RNA (1)...(19): siRNA sense strand
ucaguaacaugcgcaucua

SEQ ID NO: 1403981 - RNA, 19 nt, Homo sapiens
  misc_RNA (1)...(19): siRNA sense strand
ggcaucuacuucugcauga

SEQ ID NO: 1403982 - RNA, 19 nt, Homo sapiens
  misc_RNA (1)...(19): siRNA sense strand
gaaguccacccucaagaag

SEQ ID NO: 1403983 - RNA, 19 nt, Homo sapiens
  misc_RNA (1)...(19): siRNA sense strand
ccaacaagauggugaugcu

SEQ ID NO: 1403984 - RNA, 19 nt, Homo sapiens
  misc_RNA (1)...(19): siRNA sense strand
gagugugguugauuuccuu

SEQ ID NO: 1403985 - RNA, 19 nt, Homo sapiens
  misc_RNA (1)...(19): siRNA sense strand
gagaagauagcuguguuuc

SEQ ID NO: 1403986 - RNA, 19 nt, Homo sapiens
  misc_RNA (1)...(19): siRNA sense strand
uaaaggugcaaaccaacaa

SEQ ID NO: 1403987 - RNA, 19 nt, Homo sapiens
  misc_RNA (1)...(19): siRNA sense strand
caagaaguccacccucaag

SEQ ID NO: 1403988 - RNA, 19 nt, Homo sapiens
  misc_RNA (1)...(19): siRNA sense strand
gguggaacaggagaagaua

SEQ ID NO: 1403989 - RNA, 19 nt, Homo sapiens
  misc_RNA (1)...(19): siRNA sense strand
agaaguccacccucaagaa

SEQ ID NO: 1403990 - RNA, 19 nt, Homo sapiens
  misc_RNA (1)...(19): siRNA sense strand
ccaagaaguccacccucaa

SEQ ID NO: 1403991 - RNA, 19 nt, Homo sapiens
  misc_RNA (1)...(19): siRNA sense strand
aggagaagauagcuguguu

SEQ ID NO: 1403992 - RNA, 19 nt, Homo sapiens
  misc_RNA (1)...(19): siRNA sense strand
ccgcgcagcugacaguucu

SEQ ID NO: 1403993 - RNA, 19 nt, Homo sapiens
  misc_RNA (1)...(19): siRNA sense strand
ggugcaaaccaacaagaug

SEQ ID NO: 1403994 - RNA, 19 nt, Homo sapiens
  misc_RNA (1)...(19): siRNA sense strand
ggacuauccacggugaaga

SEQ ID NO: 1403995 - RNA, 19 nt, Homo sapiens
  misc_RNA (1)...(19): siRNA sense strand
guaacaugcgcaucuacug

SEQ ID NO: 1403996 - RNA, 19 nt, Homo sapiens
  misc_RNA (1)...(19): siRNA sense strand
gacaguggcaucuacuucu

SEQ ID NO: 1403997 - RNA, 19 nt, Homo sapiens
  misc_RNA (1)...(19): siRNA sense strand
gcgcaucuacuggcugaga

SEQ ID NO: 1403998 - RNA, 19 nt, Homo sapiens
  misc_RNA (1)...(19): siRNA sense strand
caagccgguucauucucaa

SEQ ID NO: 1403999 - RNA, 19 nt, Homo sapiens
  misc_RNA (1)...(19): siRNA sense strand
ggaugcaagccgguucauu

SEQ ID NO: 1404000 - RNA, 19 nt, Homo sapiens
  misc_RNA (1)...(19): siRNA sense strand
gcaucuacuucugcaugau

SEQ ID NO: 1404001 - RNA, 19 nt, Homo sapiens
  misc_RNA (1)...(19): siRNA sense strand
ccucugggauuccgcaaaa

SEQ ID NO: 1404002 - RNA, 19 nt, Homo sapiens
  misc_RNA (1)...(19): siRNA sense strand
cagcugagugugguugauu

SEQ ID NO: 1404003 - RNA, 19 nt, Homo sapiens
  misc_RNA (1)...(19): siRNA sense strand
acaguggcaucuacuucug

SEQ ID NO: 1404004 - RNA, 19 nt, Homo sapiens
  misc_RNA (1)...(19): siRNA sense strand
gaagagagugugccgguua

SEQ ID NO: 1404005 - RNA, 19 nt, Homo sapiens
  misc_RNA (1)...(19): siRNA sense strand
gcuaaaaucucccucagua

SEQ ID NO: 1404006 - RNA, 19 nt, Homo sapiens
  misc_RNA (1)...(19): siRNA sense strand
gcaagccgguucauucuca

SEQ ID NO: 1404007 - RNA, 19 nt, Homo sapiens
  misc_RNA (1)...(19): siRNA sense strand
acauaaaggugcaaaccaa

SEQ ID NO: 1404008 - RNA, 19 nt, Homo sapiens
  misc_RNA (1)...(19): siRNA sense strand
gaugcaagccgguucauuc

SEQ ID NO: 1404009 - RNA, 19 nt, Homo sapiens
  misc_RNA (1)...(19): siRNA sense strand
ggagaagauagcuguguuu

SEQ ID NO: 1404010 - RNA, 19 nt, Homo sapiens
  misc_RNA (1)...(19): siRNA sense strand
ucaguaacaugcgcaucua

SEQ ID NO: 1404011 - RNA, 19 nt, Homo sapiens
  misc_RNA (1)...(19): siRNA sense strand
ggcaucuacuucugcauga

SEQ ID NO: 1404012 - RNA, 19 nt, Homo sapiens
  misc_RNA (1)...(19): siRNA sense strand
gaaguccacccucaagaag

SEQ ID NO: 1404013 - RNA, 19 nt, Homo sapiens
  misc_RNA (1)...(19): siRNA sense strand
ccaacaagauggugaugcu

SEQ ID NO: 1404014 - RNA, 19 nt, Homo sapiens
  misc_RNA (1)...(19): siRNA sense strand
gagugugguugauuuccuu

SEQ ID NO: 1404015 - RNA, 19 nt, Homo sapiens
  misc_RNA (1)...(19): siRNA sense strand
gagaagauagcuguguuuc

SEQ ID NO: 1404016 - RNA, 19 nt, Homo sapiens
  misc_RNA (1)...(19): siRNA sense strand
uaaaggugcaaaccaacaa

SEQ ID NO: 1404017 - RNA, 19 nt, Homo sapiens
  misc_RNA (1)...(19): siRNA sense strand
caagaaguccacccucaag

SEQ ID NO: 1404018 - RNA, 19 nt, Homo sapiens
  misc_RNA (1)...(19): siRNA sense strand
gguggaacaggagaagaua

SEQ ID NO: 1404019 - RNA, 19 nt, Homo sapiens
  misc_RNA (1)...(19): siRNA sense strand
agaaguccacccucaagaa

SEQ ID NO: 1404020 - RNA, 19 nt, Homo sapiens
  misc_RNA (1)...(19): siRNA sense strand
ccaagaaguccacccucaa

SEQ ID NO: 1404021 - RNA, 19 nt, Homo sapiens
  misc_RNA (1)...(19): siRNA sense strand
aggagaagauagcuguguu

SEQ ID NO: 1404022 - RNA, 19 nt, Homo sapiens
  misc_RNA (1)...(19): siRNA sense strand
ccgcgcagcugacaguucu

SEQ ID NO: 1404023 - RNA, 19 nt, Homo sapiens
  misc_RNA (1)...(19): siRNA sense strand
ggugcaaaccaacaagaug

SEQ ID NO: 1404024 - RNA, 19 nt, Homo sapiens
  misc_RNA (1)...(19): siRNA sense strand
ggacuauccacggugaaga

SEQ ID NO: 1404025 - RNA, 19 nt, Homo sapiens
  misc_RNA (1)...(19): siRNA sense strand
guaacaugcgcaucuacug

SEQ ID NO: 1404026 - RNA, 19 nt, Homo sapiens
  misc_RNA (1)...(19): siRNA sense strand
gacaguggcaucuacuucu

SEQ ID NO: 1404027 - RNA, 19 nt, Homo sapiens
  misc_RNA (1)...(19): siRNA sense strand
gcgcaucuacuggcugaga

SEQ ID NO: 1404028 - RNA, 19 nt, Homo sapiens
  misc_RNA (1)...(19): siRNA sense strand
caagccgguucauucucaa

SEQ ID NO: 1404029 - RNA, 19 nt, Homo sapiens
  misc_RNA (1)...(19): siRNA sense strand
ggaugcaagccgguucauu

SEQ ID NO: 1404030 - RNA, 19 nt, Homo sapiens
  misc_RNA (1)...(19): siRNA sense strand
gcaucuacuucugcaugau

SEQ ID NO: 1404031 - RNA, 19 nt, Homo sapiens
  misc_RNA (1)...(19): siRNA sense strand
ccucugggauuccgcaaaa

SEQ ID NO: 1404032 - RNA, 19 nt, Homo sapiens
  misc_RNA (1)...(19): siRNA sense strand
cagcugagugugguugauu

SEQ ID NO: 1404033 - RNA, 19 nt, Homo sapiens
  misc_RNA (1)...(19): siRNA sense strand
acaguggcaucuacuucug

SEQ ID NO: 1404034 - RNA, 19 nt, Homo sapiens
  misc_RNA (1)...(19): siRNA sense strand
gaagagagugugccgguua

SEQ ID NO: 1404035 - RNA, 19 nt, Homo sapiens
  misc_RNA (1)...(19): siRNA sense strand
gcuaaaaucucccucagua

SEQ ID NO: 1404036 - RNA, 19 nt, Homo sapiens
  misc_RNA (1)...(19): siRNA sense strand
gcaagccgguucauucuca

SEQ ID NO: 1404037 - RNA, 19 nt, Homo sapiens
  misc_RNA (1)...(19): siRNA sense strand
acauaaaggugcaaaccaa

SEQ ID NO: 1404038 - RNA, 19 nt, Homo sapiens
  misc_RNA (1)...(19): siRNA sense strand
gaugcaagccgguucauuc

SEQ ID NO: 1404039 - RNA, 19 nt, Homo sapiens
  misc_RNA (1)...(19): siRNA sense strand
ggagaagauagcuguguuu

SEQ ID NO: 1404040 - RNA, 19 nt, Homo sapiens
  misc_RNA (1)...(19): siRNA sense strand
ucaguaacaugcgcaucua

SEQ ID NO: 1404041 - RNA, 19 nt, Homo sapiens
  misc_RNA (1)...(19): siRNA sense strand
ggcaucuacuucugcauga

SEQ ID NO: 1404042 - RNA, 19 nt, Homo sapiens
  misc_RNA (1)...(19): siRNA sense strand
gaaguccacccucaagaag

SEQ ID NO: 1404043 - RNA, 19 nt, Homo sapiens
  misc_RNA (1)...(19): siRNA sense strand
ccaacaagauggugaugcu

SEQ ID NO: 1404044 - RNA, 19 nt, Homo sapiens
  misc_RNA (1)...(19): siRNA sense strand
gagugugguugauuuccuu

SEQ ID NO: 1404045 - RNA, 19 nt, Homo sapiens
  misc_RNA (1)...(19): siRNA sense strand
gagaagauagcuguguuuc

SEQ ID NO: 1404046 - RNA, 19 nt, Homo sapiens
  misc_RNA (1)...(19): siRNA sense strand
uaaaggugcaaaccaacaa

SEQ ID NO: 1404047 - RNA, 19 nt, Homo sapiens
  misc_RNA (1)...(19): siRNA sense strand
caagaaguccacccucaag

SEQ ID NO: 1404048 - RNA, 19 nt, Homo sapiens
  misc_RNA (1)...(19): siRNA sense strand
gguggaacaggagaagaua

SEQ ID NO: 1404049 - RNA, 19 nt, Homo sapiens
  misc_RNA (1)...(19): siRNA sense strand
agaaguccacccucaagaa

SEQ ID NO: 1404050 - RNA, 19 nt, Homo sapiens
  misc_RNA (1)...(19): siRNA sense strand
ccaagaaguccacccucaa

SEQ ID NO: 1404051 - RNA, 19 nt, Homo sapiens
  misc_RNA (1)...(19): siRNA sense strand
aggagaagauagcuguguu

SEQ ID NO: 1404052 - RNA, 19 nt, Homo sapiens
  misc_RNA (1)...(19): siRNA sense strand
ccgcgcagcugacaguucu

SEQ ID NO: 1404053 - RNA, 19 nt, Homo sapiens
  misc_RNA (1)...(19): siRNA sense strand
ggugcaaaccaacaagaug

SEQ ID NO: 1404054 - RNA, 19 nt, Homo sapiens
  misc_RNA (1)...(19): siRNA sense strand
ggacuauccacggugaaga

SEQ ID NO: 1404055 - RNA, 19 nt, Homo sapiens
  misc_RNA (1)...(19): siRNA sense strand
guaacaugcgcaucuacug

SEQ ID NO: 1404056 - RNA, 19 nt, Homo sapiens
  misc_RNA (1)...(19): siRNA sense strand
gacaguggcaucuacuucu

SEQ ID NO: 1404057 - RNA, 19 nt, Homo sapiens
  misc_RNA (1)...(19): siRNA sense strand
gcgcaucuacuggcugaga

SEQ ID NO: 1404058 - RNA, 19 nt, Homo sapiens
  misc_RNA (1)...(19): siRNA sense strand
caagccgguucauucucaa

SEQ ID NO: 1404059 - RNA, 19 nt, Homo sapiens
  misc_RNA (1)...(19): siRNA sense strand
ggaugcaagccgguucauu

SEQ ID NO: 1404060 - RNA, 19 nt, Homo sapiens
  misc_RNA (1)...(19): siRNA sense strand
gcaucuacuucugcaugau

SEQ ID NO: 1404061 - RNA, 19 nt, Homo sapiens
  misc_RNA (1)...(19): siRNA sense strand
ccucugggauuccgcaaaa

SEQ ID NO: 1404062 - RNA, 19 nt, Homo sapiens
  misc_RNA (1)...(19): siRNA sense strand
cagcugagugugguugauu

SEQ ID NO: 1404063 - RNA, 19 nt, Homo sapiens
  misc_RNA (1)...(19): siRNA sense strand
acaguggcaucuacuucug

SEQ ID NO: 1404064 - RNA, 19 nt, Homo sapiens
  misc_RNA (1)...(19): siRNA sense strand
gaagagagugugccgguua

SEQ ID NO: 1404065 - RNA, 19 nt, Homo sapiens
  misc_RNA (1)...(19): siRNA sense strand
gcuaaaaucucccucagua

SEQ ID NO: 1404066 - RNA, 19 nt, Homo sapiens
  misc_RNA (1)...(19): siRNA sense strand
gcaagccgguucauucuca

SEQ ID NO: 1404067 - RNA, 19 nt, Homo sapiens
  misc_RNA (1)...(19): siRNA sense strand
acauaaaggugcaaaccaa

SEQ ID NO: 1404068 - RNA, 19 nt, Homo sapiens
  misc_RNA (1)...(19): siRNA sense strand
gaugcaagccgguucauuc

SEQ ID NO: 1404069 - RNA, 19 nt, Homo sapiens
  misc_RNA (1)...(19): siRNA sense strand
ggagaagauagcuguguuu

SEQ ID NO: 1404070 - RNA, 19 nt, Homo sapiens
  misc_RNA (1)...(19): siRNA sense strand
ucaguaacaugcgcaucua

SEQ ID NO: 1404071 - RNA, 19 nt, Homo sapiens
  misc_RNA (1)...(19): siRNA sense strand
ggcaucuacuucugcauga

SEQ ID NO: 1404072 - RNA, 19 nt, Homo sapiens
  misc_RNA (1)...(19): siRNA sense strand
gaaguccacccucaagaag

SEQ ID NO: 1404073 - RNA, 19 nt, Homo sapiens
  misc_RNA (1)...(19): siRNA sense strand
ccaacaagauggugaugcu

SEQ ID NO: 1404074 - RNA, 19 nt, Homo sapiens
  misc_RNA (1)...(19): siRNA sense strand
gagugugguugauuuccuu

SEQ ID NO: 1404075 - RNA, 19 nt, Homo sapiens
  misc_RNA (1)...(19): siRNA sense strand
gagaagauagcuguguuuc

SEQ ID NO: 1404076 - RNA, 19 nt, Homo sapiens
  misc_RNA (1)...(19): siRNA sense strand
uaaaggugcaaaccaacaa

SEQ ID NO: 1404077 - RNA, 19 nt, Homo sapiens
  misc_RNA (1)...(19): siRNA sense strand
caagaaguccacccucaag

SEQ ID NO: 1404078 - RNA, 19 nt, Homo sapiens
  misc_RNA (1)...(19): siRNA sense strand
gguggaacaggagaagaua

SEQ ID NO: 1404079 - RNA, 19 nt, Homo sapiens
  misc_RNA (1)...(19): siRNA sense strand
agaaguccacccucaagaa

SEQ ID NO: 1404080 - RNA, 19 nt, Homo sapiens
  misc_RNA (1)...(19): siRNA sense strand
ccaagaaguccacccucaa

SEQ ID NO: 1404081 - RNA, 19 nt, Homo sapiens
  misc_RNA (1)...(19): siRNA sense strand
aggagaagauagcuguguu

SEQ ID NO: 1404082 - RNA, 19 nt, Homo sapiens
  misc_RNA (1)...(19): siRNA sense strand
ccgcgcagcugacaguucu

SEQ ID NO: 1404083 - RNA, 19 nt, Homo sapiens
  misc_RNA (1)...(19): siRNA sense strand
ggugcaaaccaacaagaug

SEQ ID NO: 1404084 - RNA, 19 nt, Homo sapiens
  misc_RNA (1)...(19): siRNA sense strand
ggacuauccacggugaaga

SEQ ID NO: 1404085 - RNA, 19 nt, Homo sapiens
  misc_RNA (1)...(19): siRNA sense strand
guaacaugcgcaucuacug

SEQ ID NO: 1404086 - RNA, 19 nt, Homo sapiens
  misc_RNA (1)...(19): siRNA sense strand
gacaguggcaucuacuucu

SEQ ID NO: 1404087 - RNA, 19 nt, Homo sapiens
  misc_RNA (1)...(19): siRNA sense strand
gcgcaucuacuggcugaga

SEQ ID NO: 1404088 - RNA, 19 nt, Homo sapiens
  misc_RNA (1)...(19): siRNA sense strand
caagccgguucauucucaa

SEQ ID NO: 1404089 - RNA, 19 nt, Homo sapiens
  misc_RNA (1)...(19): siRNA sense strand
ggaugcaagccgguucauu

SEQ ID NO: 1404090 - RNA, 19 nt, Homo sapiens
  misc_RNA (1)...(19): siRNA sense strand
gcaucuacuucugcaugau

SEQ ID NO: 1404091 - RNA, 19 nt, Homo sapiens
  misc_RNA (1)...(19): siRNA sense strand
ccucugggauuccgcaaaa

SEQ ID NO: 1404092 - RNA, 19 nt, Homo sapiens
  misc_RNA (1)...(19): siRNA sense strand
cagcugagugugguugauu

SEQ ID NO: 1404093 - RNA, 19 nt, Homo sapiens
  misc_RNA (1)...(19): siRNA sense strand
acaguggcaucuacuucug

SEQ ID NO: 1404094 - RNA, 19 nt, Homo sapiens
  misc_RNA (1)...(19): siRNA sense strand
gaagagagugugccgguua

SEQ ID NO: 1404095 - RNA, 19 nt, Homo sapiens
  misc_RNA (1)...(19): siRNA sense strand
gcuaaaaucucccucagua

SEQ ID NO: 1404096 - RNA, 19 nt, Homo sapiens
  misc_RNA (1)...(19): siRNA sense strand
gcaagccgguucauucuca

SEQ ID NO: 1404097 - RNA, 19 nt, Homo sapiens
  misc_RNA (1)...(19): siRNA sense strand
acauaaaggugcaaaccaa

SEQ ID NO: 1404098 - RNA, 19 nt, Homo sapiens
  misc_RNA (1)...(19): siRNA sense strand
gaugcaagccgguucauuc

SEQ ID NO: 1404099 - RNA, 19 nt, Homo sapiens
  misc_RNA (1)...(19): siRNA sense strand
ggagaagauagcuguguuu

SEQ ID NO: 1404100 - RNA, 19 nt, Homo sapiens
  misc_RNA (1)...(19): siRNA sense strand
ucaguaacaugcgcaucua

SEQ ID NO: 1404101 - RNA, 19 nt, Homo sapiens
  misc_RNA (1)...(19): siRNA sense strand
ggcaucuacuucugcauga

SEQ ID NO: 1404102 - RNA, 19 nt, Homo sapiens
  misc_RNA (1)...(19): siRNA sense strand
gaaguccacccucaagaag

SEQ ID NO: 1404103 - RNA, 19 nt, Homo sapiens
  misc_RNA (1)...(19): siRNA sense strand
ccaacaagauggugaugcu

SEQ ID NO: 1404104 - RNA, 19 nt, Homo sapiens
  misc_RNA (1)...(19): siRNA sense strand
gagugugguugauuuccuu

SEQ ID NO: 1404105 - RNA, 19 nt, Homo sapiens
  misc_RNA (1)...(19): siRNA sense strand
gagaagauagcuguguuuc

SEQ ID NO: 1404106 - RNA, 19 nt, Homo sapiens
  misc_RNA (1)...(19): siRNA sense strand
uaaaggugcaaaccaacaa

SEQ ID NO: 1404107 - RNA, 19 nt, Homo sapiens
  misc_RNA (1)...(19): siRNA sense strand
caagaaguccacccucaag

SEQ ID NO: 1404108 - RNA, 19 nt, Homo sapiens
  misc_RNA (1)...(19): siRNA sense strand
gguggaacaggagaagaua

SEQ ID NO: 1404109 - RNA, 19 nt, Homo sapiens
  misc_RNA (1)...(19): siRNA sense strand
agaaguccacccucaagaa

SEQ ID NO: 1404110 - RNA, 19 nt, Homo sapiens
  misc_RNA (1)...(19): siRNA sense strand
ccaagaaguccacccucaa

SEQ ID NO: 1404111 - RNA, 19 nt, Homo sapiens
  misc_RNA (1)...(19): siRNA sense strand
aggagaagauagcuguguu

SEQ ID NO: 1404112 - RNA, 19 nt, Homo sapiens
  misc_RNA (1)...(19): siRNA sense strand
ccgcgcagcugacaguucu

SEQ ID NO: 1404113 - RNA, 19 nt, Homo sapiens
  misc_RNA (1)...(19): siRNA sense strand
ggugcaaaccaacaagaug

SEQ ID NO: 1404114 - RNA, 19 nt, Homo sapiens
  misc_RNA (1)...(19): siRNA sense strand
ggacuauccacggugaaga

SEQ ID NO: 1404115 - RNA, 19 nt, Homo sapiens
  misc_RNA (1)...(19): siRNA sense strand
guaacaugcgcaucuacug

SEQ ID NO: 1404116 - RNA, 19 nt, Homo sapiens
  misc_RNA (1)...(19): siRNA sense strand
gacaguggcaucuacuucu

SEQ ID NO: 1404117 - RNA, 19 nt, Homo sapiens
  misc_RNA (1)...(19): siRNA sense strand
gcgcaucuacuggcugaga

SEQ ID NO: 1404118 - RNA, 19 nt, Homo sapiens
  misc_RNA (1)...(19): siRNA sense strand
caagccgguucauucucaa

SEQ ID NO: 1404119 - RNA, 19 nt, Homo sapiens
  misc_RNA (1)...(19): siRNA sense strand
ggaugcaagccgguucauu

SEQ ID NO: 1404120 - RNA, 19 nt, Homo sapiens
  misc_RNA (1)...(19): siRNA sense strand
gcaucuacuucugcaugau

SEQ ID NO: 1404121 - RNA, 19 nt, Homo sapiens
  misc_RNA (1)...(19): siRNA sense strand
ccucugggauuccgcaaaa

SEQ ID NO: 1404122 - RNA, 19 nt, Homo sapiens
  misc_RNA (1)...(19): siRNA sense strand
cagcugagugugguugauu

SEQ ID NO: 1404123 - RNA, 19 nt, Homo sapiens
  misc_RNA (1)...(19): siRNA sense strand
acaguggcaucuacuucug

SEQ ID NO: 1404124 - RNA, 19 nt, Homo sapiens
  misc_RNA (1)...(19): siRNA sense strand
gaagagagugugccgguua

SEQ ID NO: 1404125 - RNA, 19 nt, Homo sapiens
  misc_RNA (1)...(19): siRNA sense strand
gcuaaaaucucccucagua

SEQ ID NO: 1404126 - RNA, 19 nt, Homo sapiens
  misc_RNA (1)...(19): siRNA sense strand
gcaagccgguucauucuca

SEQ ID NO: 1404127 - RNA, 19 nt, Homo sapiens
  misc_RNA (1)...(19): siRNA sense strand
acauaaaggugcaaaccaa

SEQ ID NO: 1404128 - RNA, 19 nt, Homo sapiens
  misc_RNA (1)...(19): siRNA sense strand
gaugcaagccgguucauuc

SEQ ID NO: 1404129 - RNA, 19 nt, Homo sapiens
  misc_RNA (1)...(19): siRNA sense strand
ggagaagauagcuguguuu

SEQ ID NO: 1404130 - RNA, 19 nt, Homo sapiens
  misc_RNA (1)...(19): siRNA sense strand
ucaguaacaugcgcaucua

SEQ ID NO: 1404131 - RNA, 19 nt, Homo sapiens
  misc_RNA (1)...(19): siRNA sense strand
ggcaucuacuucugcauga

SEQ ID NO: 1404132 - RNA, 19 nt, Homo sapiens
  misc_RNA (1)...(19): siRNA sense strand
gaaguccacccucaagaag

SEQ ID NO: 1404133 - RNA, 19 nt, Homo sapiens
  misc_RNA (1)...(19): siRNA sense strand
ccaacaagauggugaugcu

SEQ ID NO: 1404134 - RNA, 19 nt, Homo sapiens
  misc_RNA (1)...(19): siRNA sense strand
gagugugguugauuuccuu

SEQ ID NO: 1404135 - RNA, 19 nt, Homo sapiens
  misc_RNA (1)...(19): siRNA sense strand
gagaagauagcuguguuuc

SEQ ID NO: 1404136 - RNA, 19 nt, Homo sapiens
  misc_RNA (1)...(19): siRNA sense strand
uaaaggugcaaaccaacaa

SEQ ID NO: 1404137 - RNA, 19 nt, Homo sapiens
  misc_RNA (1)...(19): siRNA sense strand
caagaaguccacccucaag

SEQ ID NO: 1404138 - RNA, 19 nt, Homo sapiens
  misc_RNA (1)...(19): siRNA sense strand
gguggaacaggagaagaua

SEQ ID NO: 1404139 - RNA, 19 nt, Homo sapiens
  misc_RNA (1)...(19): siRNA sense strand
agaaguccacccucaagaa

SEQ ID NO: 1404140 - RNA, 19 nt, Homo sapiens
  misc_RNA (1)...(19): siRNA sense strand
ccaagaaguccacccucaa

SEQ ID NO: 1404141 - RNA, 19 nt, Homo sapiens
  misc_RNA (1)...(19): siRNA sense strand
aggagaagauagcuguguu

SEQ ID NO: 1404142 - RNA, 19 nt, Homo sapiens
  misc_RNA (1)...(19): siRNA sense strand
ccgcgcagcugacaguucu

SEQ ID NO: 1404143 - RNA, 19 nt, Homo sapiens
  misc_RNA (1)...(19): siRNA sense strand
ggugcaaaccaacaagaug

SEQ ID NO: 1404144 - RNA, 19 nt, Homo sapiens
  misc_RNA (1)...(19): siRNA sense strand
ggacuauccacggugaaga

SEQ ID NO: 1404145 - RNA, 19 nt, Homo sapiens
  misc_RNA (1)...(19): siRNA sense strand
guaacaugcgcaucuacug

SEQ ID NO: 1404146 - RNA, 19 nt, Homo sapiens
  misc_RNA (1)...(19): siRNA sense strand
gacaguggcaucuacuucu

SEQ ID NO: 1404147 - RNA, 19 nt, Homo sapiens
  misc_RNA (1)...(19): siRNA sense strand
gcgcaucuacuggcugaga

SEQ ID NO: 1404148 - RNA, 19 nt, Homo sapiens
  misc_RNA (1)...(19): siRNA sense strand
caagccgguucauucucaa

SEQ ID NO: 1404149 - RNA, 19 nt, Homo sapiens
  misc_RNA (1)...(19): siRNA sense strand
ggaugcaagccgguucauu

SEQ ID NO: 1404150 - RNA, 19 nt, Homo sapiens
  misc_RNA (1)...(19): siRNA sense strand
gcaucuacuucugcaugau

SEQ ID NO: 1404151 - RNA, 19 nt, Homo sapiens
  misc_RNA (1)...(19): siRNA sense strand
ccucugggauuccgcaaaa

SEQ ID NO: 1404152 - RNA, 19 nt, Homo sapiens
  misc_RNA (1)...(19): siRNA sense strand
cagcugagugugguugauu

SEQ ID NO: 1404153 - RNA, 19 nt, Homo sapiens
  misc_RNA (1)...(19): siRNA sense strand
acaguggcaucuacuucug

SEQ ID NO: 1404154 - RNA, 19 nt, Homo sapiens
  misc_RNA (1)...(19): siRNA sense strand
gaagagagugugccgguua

SEQ ID NO: 1404155 - RNA, 19 nt, Homo sapiens
  misc_RNA (1)...(19): siRNA sense strand
gcuaaaaucucccucagua

SEQ ID NO: 1404156 - RNA, 19 nt, Homo sapiens
  misc_RNA (1)...(19): siRNA sense strand
gcaagccgguucauucuca

SEQ ID NO: 1404157 - RNA, 19 nt, Homo sapiens
  misc_RNA (1)...(19): siRNA sense strand
acauaaaggugcaaaccaa

SEQ ID NO: 1404158 - RNA, 19 nt, Homo sapiens
  misc_RNA (1)...(19): siRNA sense strand
gaugcaagccgguucauuc

SEQ ID NO: 1404159 - RNA, 19 nt, Homo sapiens
  misc_RNA (1)...(19): siRNA sense strand
ggagaagauagcuguguuu

SEQ ID NO: 1404160 - RNA, 19 nt, Homo sapiens
  misc_RNA (1)...(19): siRNA sense strand
ucaguaacaugcgcaucua

SEQ ID NO: 1404161 - RNA, 19 nt, Homo sapiens
  misc_RNA (1)...(19): siRNA sense strand
ggcaucuacuucugcauga

SEQ ID NO: 1404162 - RNA, 19 nt, Homo sapiens
  misc_RNA (1)...(19): siRNA sense strand
gaaguccacccucaagaag

SEQ ID NO: 1404163 - RNA, 19 nt, Homo sapiens
  misc_RNA (1)...(19): siRNA sense strand
ccaacaagauggugaugcu

SEQ ID NO: 1404164 - RNA, 19 nt, Homo sapiens
  misc_RNA (1)...(19): siRNA sense strand
gagugugguugauuuccuu

SEQ ID NO: 1404165 - RNA, 19 nt, Homo sapiens
  misc_RNA (1)...(19): siRNA sense strand
gagaagauagcuguguuuc

SEQ ID NO: 1404166 - RNA, 19 nt, Homo sapiens
  misc_RNA (1)...(19): siRNA sense strand
uaaaggugcaaaccaacaa

SEQ ID NO: 1404167 - RNA, 19 nt, Homo sapiens
  misc_RNA (1)...(19): siRNA sense strand
caagaaguccacccucaag

SEQ ID NO: 1404168 - RNA, 19 nt, Homo sapiens
  misc_RNA (1)...(19): siRNA sense strand
gguggaacaggagaagaua

SEQ ID NO: 1404169 - RNA, 19 nt, Homo sapiens
  misc_RNA (1)...(19): siRNA sense strand
agaaguccacccucaagaa

SEQ ID NO: 1404170 - RNA, 19 nt, Homo sapiens
  misc_RNA (1)...(19): siRNA sense strand
ccaagaaguccacccucaa

SEQ ID NO: 1404171 - RNA, 19 nt, Homo sapiens
  misc_RNA (1)...(19): siRNA sense strand
aggagaagauagcuguguu

SEQ ID NO: 1404172 - RNA, 19 nt, Homo sapiens
  misc_RNA (1)...(19): siRNA sense strand
ccgcgcagcugacaguucu

SEQ ID NO: 1404173 - RNA, 19 nt, Homo sapiens
  misc_RNA (1)...(19): siRNA sense strand
ggugcaaaccaacaagaug

SEQ ID NO: 1404174 - RNA, 19 nt, Homo sapiens
  misc_RNA (1)...(19): siRNA sense strand
ggacuauccacggugaaga

SEQ ID NO: 1404175 - RNA, 19 nt, Homo sapiens
  misc_RNA (1)...(19): siRNA sense strand
guaacaugcgcaucuacug

SEQ ID NO: 1404176 - RNA, 19 nt, Homo sapiens
  misc_RNA (1)...(19): siRNA sense strand
gacaguggcaucuacuucu

SEQ ID NO: 1404177 - RNA, 19 nt, Homo sapiens
  misc_RNA (1)...(19): siRNA sense strand
gcgcaucuacuggcugaga

SEQ ID NO: 1404178 - RNA, 19 nt, Homo sapiens
  misc_RNA (1)...(19): siRNA sense strand
caagccgguucauucucaa

SEQ ID NO: 1404179 - RNA, 19 nt, Homo sapiens
  misc_RNA (1)...(19): siRNA sense strand
ggaugcaagccgguucauu

SEQ ID NO: 1404180 - RNA, 19 nt, Homo sapiens
  misc_RNA (1)...(19): siRNA sense strand
gcaucuacuucugcaugau

SEQ ID NO: 1404181 - RNA, 19 nt, Homo sapiens
  misc_RNA (1)...(19): siRNA sense strand
ccucugggauuccgcaaaa

SEQ ID NO: 1404182 - RNA, 19 nt, Homo sapiens
  misc_RNA (1)...(19): siRNA sense strand
cagcugagugugguugauu

SEQ ID NO: 1404183 - RNA, 19 nt, Homo sapiens
  misc_RNA (1)...(19): siRNA sense strand
acaguggcaucuacuucug

SEQ ID NO: 1404184 - RNA, 19 nt, Homo sapiens
  misc_RNA (1)...(19): siRNA sense strand
caaaugcacuuaagucuuu

SEQ ID NO: 1404185 - RNA, 19 nt, Homo sapiens
  misc_RNA (1)...(19): siRNA sense strand
gcacaucaguuacuacaaa

SEQ ID NO: 1404186 - RNA, 19 nt, Homo sapiens
  misc_RNA (1)...(19): siRNA sense strand
gcacuuaagucuuuaucaa

SEQ ID NO: 1404187 - RNA, 19 nt, Homo sapiens
  misc_RNA (1)...(19): siRNA sense strand
gagagaaccuguaggaguu

SEQ ID NO: 1404188 - RNA, 19 nt, Homo sapiens
  misc_RNA (1)...(19): siRNA sense strand
gagcguauaugacaucgaa

SEQ ID NO: 1404189 - RNA, 19 nt, Homo sapiens
  misc_RNA (1)...(19): siRNA sense strand
gcaccaucaucuacuauuu

SEQ ID NO: 1404190 - RNA, 19 nt, Homo sapiens
  misc_RNA (1)...(19): siRNA sense strand
ggaagacucccaggauuua

SEQ ID NO: 1404191 - RNA, 19 nt, Homo sapiens
  misc_RNA (1)...(19): siRNA sense strand
ccaccaagcacuggaauua

SEQ ID NO: 1404192 - RNA, 19 nt, Homo sapiens
  misc_RNA (1)...(19): siRNA sense strand
uagaugauguuuccucuga

SEQ ID NO: 1404193 - RNA, 19 nt, Homo sapiens
  misc_RNA (1)...(19): siRNA sense strand
gagaauauuuacagugcaa

SEQ ID NO: 1404194 - RNA, 19 nt, Homo sapiens
  misc_RNA (1)...(19): siRNA sense strand
gccagacaccuuauucuua

SEQ ID NO: 1404195 - RNA, 19 nt, Homo sapiens
  misc_RNA (1)...(19): siRNA sense strand
gcacuggaauuagaguauu

SEQ ID NO: 1404196 - RNA, 19 nt, Homo sapiens
  misc_RNA (1)...(19): siRNA sense strand
cugcauaaaugucuuggua

SEQ ID NO: 1404197 - RNA, 19 nt, Homo sapiens
  misc_RNA (1)...(19): siRNA sense strand
gaucagcacaucaguauuc

SEQ ID NO: 1404198 - RNA, 19 nt, Homo sapiens
  misc_RNA (1)...(19): siRNA sense strand
gauguuuccucugaugaua

SEQ ID NO: 1404199 - RNA, 19 nt, Homo sapiens
  misc_RNA (1)...(19): siRNA sense strand
gaauuucagugguucacaa

SEQ ID NO: 1404200 - RNA, 19 nt, Homo sapiens
  misc_RNA (1)...(19): siRNA sense strand
cagaguggcugccucaguu

SEQ ID NO: 1404201 - RNA, 19 nt, Homo sapiens
  misc_RNA (1)...(19): siRNA sense strand
aggaguaacugcauaaaug

SEQ ID NO: 1404202 - RNA, 19 nt, Homo sapiens
  misc_RNA (1)...(19): siRNA sense strand
gcuaacaaaugcacuuaag

SEQ ID NO: 1404203 - RNA, 19 nt, Homo sapiens
  misc_RNA (1)...(19): siRNA sense strand
caacugaucccagcacuug

SEQ ID NO: 1404204 - RNA, 19 nt, Homo sapiens
  misc_RNA (1)...(19): siRNA sense strand
agaaucagauguuucacaa

SEQ ID NO: 1404205 - RNA, 19 nt, Homo sapiens
  misc_RNA (1)...(19): siRNA sense strand
gaugauguuuccucugaug

SEQ ID NO: 1404206 - RNA, 19 nt, Homo sapiens
  misc_RNA (1)...(19): siRNA sense strand
ggucuuaugcacagaagua

SEQ ID NO: 1404207 - RNA, 19 nt, Homo sapiens
  misc_RNA (1)...(19): siRNA sense strand
aaucagauguuucacaauc

SEQ ID NO: 1404208 - RNA, 19 nt, Homo sapiens
  misc_RNA (1)...(19): siRNA sense strand
gcauaaaugucuugguaac

SEQ ID NO: 1404209 - RNA, 19 nt, Homo sapiens
  misc_RNA (1)...(19): siRNA sense strand
gaugagagaaccuguagga

SEQ ID NO: 1404210 - RNA, 19 nt, Homo sapiens
  misc_RNA (1)...(19): siRNA sense strand
gcaaauaauucaguuucca

SEQ ID NO: 1404211 - RNA, 19 nt, Homo sapiens
  misc_RNA (1)...(19): siRNA sense strand
ccagacaccuuauucuuac

SEQ ID NO: 1404212 - RNA, 19 nt, Homo sapiens
  misc_RNA (1)...(19): siRNA sense strand
aaacagagcccuugaacag

SEQ ID NO: 1404213 - RNA, 19 nt, Homo sapiens
  misc_RNA (1)...(19): siRNA sense strand
ggucaguaauuacaaguag

SEQ ID NO: 1404214 - RNA, 19 nt, Homo sapiens
  misc_RNA (1)...(19): siRNA sense strand
gaggauauccagucacuca

SEQ ID NO: 1404215 - RNA, 19 nt, Homo sapiens
  misc_RNA (1)...(19): siRNA sense strand
gagaguggacuuucccaaa

SEQ ID NO: 1404216 - RNA, 19 nt, Homo sapiens
  misc_RNA (1)...(19): siRNA sense strand
gugaucaaguucauauaga

SEQ ID NO: 1404217 - RNA, 19 nt, Homo sapiens
  misc_RNA (1)...(19): siRNA sense strand
cgaagguucuacucuauag

SEQ ID NO: 1404218 - RNA, 19 nt, Homo sapiens
  misc_RNA (1)...(19): siRNA sense strand
aaaccaguaugcacaguau

SEQ ID NO: 1404219 - RNA, 19 nt, Homo sapiens
  misc_RNA (1)...(19): siRNA sense strand
caaagaucuugaugagaga

SEQ ID NO: 1404220 - RNA, 19 nt, Homo sapiens
  misc_RNA (1)...(19): siRNA sense strand
caacguauggagcguauau

SEQ ID NO: 1404221 - RNA, 19 nt, Homo sapiens
  misc_RNA (1)...(19): siRNA sense strand
uauaacaccuacaagaaca

SEQ ID NO: 1404222 - RNA, 19 nt, Homo sapiens
  misc_RNA (1)...(19): siRNA sense strand
caccaucaucuacuauuua

SEQ ID NO: 1404223 - RNA, 19 nt, Homo sapiens
  misc_RNA (1)...(19): siRNA sense strand
guucuacucuauaguuuag

SEQ ID NO: 1404224 - RNA, 19 nt, Homo sapiens
  misc_RNA (1)...(19): siRNA sense strand
uaacaaaugcacuuaaguc

SEQ ID NO: 1404225 - RNA, 19 nt, Homo sapiens
  misc_RNA (1)...(19): siRNA sense strand
gcguauaugacaucgaaua

SEQ ID NO: 1404226 - RNA, 19 nt, Homo sapiens
  misc_RNA (1)...(19): siRNA sense strand
auggagcgcuugacacuuu

SEQ ID NO: 1404227 - RNA, 19 nt, Homo sapiens
  misc_RNA (1)...(19): siRNA sense strand
gaaguuggcuuuucguuac

SEQ ID NO: 1404228 - RNA, 19 nt, Homo sapiens
  misc_RNA (1)...(19): siRNA sense strand
gcacagaaucagauguuuc

SEQ ID NO: 1404229 - RNA, 19 nt, Homo sapiens
  misc_RNA (1)...(19): siRNA sense strand
caaacaaugucugccuaug

SEQ ID NO: 1404230 - RNA, 19 nt, Homo sapiens
  misc_RNA (1)...(19): siRNA sense strand
gcgaagguucuacucuaua

SEQ ID NO: 1404231 - RNA, 19 nt, Homo sapiens
  misc_RNA (1)...(19): siRNA sense strand
ggaguaacugcauaaaugu

SEQ ID NO: 1404232 - RNA, 19 nt, Homo sapiens
  misc_RNA (1)...(19): siRNA sense strand
ccucuucaaccucuacuua

SEQ ID NO: 1404233 - RNA, 19 nt, Homo sapiens
  misc_RNA (1)...(19): siRNA sense strand
ucaacgaauuucagugguu

SEQ ID NO: 1404234 - RNA, 19 nt, Homo sapiens
  misc_RNA (1)...(19): siRNA sense strand
caaaugccagguucuaguu

SEQ ID NO: 1404235 - RNA, 19 nt, Homo sapiens
  misc_RNA (1)...(19): siRNA sense strand
ggagugugaucaaguucau

SEQ ID NO: 1404236 - RNA, 19 nt, Homo sapiens
  misc_RNA (1)...(19): siRNA sense strand
acagauuccuggcuaacaa

SEQ ID NO: 1404237 - RNA, 19 nt, Homo sapiens
  misc_RNA (1)...(19): siRNA sense strand
cagaucagcacaucaguau

SEQ ID NO: 1404238 - RNA, 19 nt, Homo sapiens
  misc_RNA (1)...(19): siRNA sense strand
agaggagugugaucaaguu

SEQ ID NO: 1404239 - RNA, 19 nt, Homo sapiens
  misc_RNA (1)...(19): siRNA sense strand
ggacuccgcauggaagaaa

SEQ ID NO: 1404240 - RNA, 19 nt, Homo sapiens
  misc_RNA (1)...(19): siRNA sense strand
guaacgacaacucaacuga

SEQ ID NO: 1404241 - RNA, 19 nt, Homo sapiens
  misc_RNA (1)...(19): siRNA sense strand
caagcccuauccacacauu

SEQ ID NO: 1404242 - RNA, 19 nt, Homo sapiens
  misc_RNA (1)...(19): siRNA sense strand
ccacacccaucaaagaucu

SEQ ID NO: 1404243 - RNA, 19 nt, Homo sapiens
  misc_RNA (1)...(19): siRNA sense strand
gaagacucccaggauuuaa

SEQ ID NO: 1404244 - RNA, 19 nt, Homo sapiens
  misc_RNA (1)...(19): siRNA sense strand
ggaugaggaaguuggcuuu

SEQ ID NO: 1404245 - RNA, 19 nt, Homo sapiens
  misc_RNA (1)...(19): siRNA sense strand
caaccucuacuuaucaguu

SEQ ID NO: 1404246 - RNA, 19 nt, Homo sapiens
  misc_RNA (1)...(19): siRNA sense strand
ggaaaugcaggaccuagca

SEQ ID NO: 1404247 - RNA, 19 nt, Homo sapiens
  misc_RNA (1)...(19): siRNA sense strand
ccuacagcuugcccacuua

SEQ ID NO: 1404248 - RNA, 19 nt, Homo sapiens
  misc_RNA (1)...(19): siRNA sense strand
ucucagaauuccaggucua

SEQ ID NO: 1404249 - RNA, 19 nt, Homo sapiens
  misc_RNA (1)...(19): siRNA sense strand
auaaaugucuugguaacga

SEQ ID NO: 1404250 - RNA, 19 nt, Homo sapiens
  misc_RNA (1)...(19): siRNA sense strand
ggaaguuggcuuuucguua

SEQ ID NO: 1404251 - RNA, 19 nt, Homo sapiens
  misc_RNA (1)...(19): siRNA sense strand
gaucaaguucauauagaug

SEQ ID NO: 1404252 - RNA, 19 nt, Homo sapiens
  misc_RNA (1)...(19): siRNA sense strand
uaaccaaccaggagaguuc

SEQ ID NO: 1404253 - RNA, 19 nt, Homo sapiens
  misc_RNA (1)...(19): siRNA sense strand
guauggagcguauaugaca

SEQ ID NO: 1404254 - RNA, 19 nt, Homo sapiens
  misc_RNA (1)...(19): siRNA sense strand
gauuauccauccuauacag

SEQ ID NO: 1404255 - RNA, 19 nt, Homo sapiens
  misc_RNA (1)...(19): siRNA sense strand
gaccuagcaaguccucaua

SEQ ID NO: 1404256 - RNA, 19 nt, Homo sapiens
  misc_RNA (1)...(19): siRNA sense strand
cgauuugggugugauguug

SEQ ID NO: 1404257 - RNA, 19 nt, Homo sapiens
  misc_RNA (1)...(19): siRNA sense strand
ggagauggagcgcuugaca

SEQ ID NO: 1404258 - RNA, 19 nt, Homo sapiens
  misc_RNA (1)...(19): siRNA sense strand
uugcgaagguucuacucua

SEQ ID NO: 1404259 - RNA, 19 nt, Homo sapiens
  misc_RNA (1)...(19): siRNA sense strand
caggagaguucgauaccau

SEQ ID NO: 1404260 - RNA, 19 nt, Homo sapiens
  misc_RNA (1)...(19): siRNA sense strand
ccagaucagcacaucagua

SEQ ID NO: 1404261 - RNA, 19 nt, Homo sapiens
  misc_RNA (1)...(19): siRNA sense strand
gcagccagccgucuacaca

SEQ ID NO: 1404262 - RNA, 19 nt, Homo sapiens
  misc_RNA (1)...(19): siRNA sense strand
cacuggaauuagaguauuu

SEQ ID NO: 1404263 - RNA, 19 nt, Homo sapiens
  misc_RNA (1)...(19): siRNA sense strand
accaagcacuggaauuaga

SEQ ID NO: 1404264 - RNA, 19 nt, Homo sapiens
  misc_RNA (1)...(19): siRNA sense strand
ggaugccuggcuacaguua

SEQ ID NO: 1404265 - RNA, 19 nt, Homo sapiens
  misc_RNA (1)...(19): siRNA sense strand
caaccaggagaguucgaua

SEQ ID NO: 1404266 - RNA, 19 nt, Homo sapiens
  misc_RNA (1)...(19): siRNA sense strand
gcacaguauuauucagcau

SEQ ID NO: 1404267 - RNA, 19 nt, Homo sapiens
  misc_RNA (1)...(19): siRNA sense strand
acagaaguauggcaaggau

SEQ ID NO: 1404268 - RNA, 19 nt, Homo sapiens
  misc_RNA (1)...(19): siRNA sense strand
gaaaugcaggaccuagcaa

SEQ ID NO: 1404269 - RNA, 19 nt, Homo sapiens
  misc_RNA (1)...(19): siRNA sense strand
gcacuaggaguaacugcau

SEQ ID NO: 1404270 - RNA, 19 nt, Homo sapiens
  misc_RNA (1)...(19): siRNA sense strand
auuauuagcacuaggagua

SEQ ID NO: 1404271 - RNA, 19 nt, Homo sapiens
  misc_RNA (1)...(19): siRNA sense strand
ccgcauggaagaaaugauu

SEQ ID NO: 1404272 - RNA, 19 nt, Homo sapiens
  misc_RNA (1)...(19): siRNA sense strand
accagcagcucaaacaaug

SEQ ID NO: 1404273 - RNA, 19 nt, Homo sapiens
  misc_RNA (1)...(19): siRNA sense strand
ggauauccagucacucaga

SEQ ID NO: 1404274 - RNA, 19 nt, Homo sapiens
  misc_RNA (1)...(19): siRNA sense strand
guaacugcauaaaugucuu

SEQ ID NO: 1404275 - RNA, 19 nt, Homo sapiens
  misc_RNA (1)...(19): siRNA sense strand
cguauaugacaucgaauaa

SEQ ID NO: 1404276 - RNA, 19 nt, Homo sapiens
  misc_RNA (1)...(19): siRNA sense strand
caggacagcccuacagcuu

SEQ ID NO: 1404277 - RNA, 19 nt, Homo sapiens
  misc_RNA (1)...(19): siRNA sense strand
gaaucucucccaggacuga

SEQ ID NO: 1404278 - RNA, 19 nt, Homo sapiens
  misc_RNA (1)...(19): siRNA sense strand
gugguucacaacaggauua

SEQ ID NO: 1404279 - RNA, 19 nt, Homo sapiens
  misc_RNA (1)...(19): siRNA sense strand
caucaucuacuauuuaugc

SEQ ID NO: 1404280 - RNA, 19 nt, Homo sapiens
  misc_RNA (1)...(19): siRNA sense strand
ggccagacaccuuauucuu

SEQ ID NO: 1404281 - RNA, 19 nt, Homo sapiens
  misc_RNA (1)...(19): siRNA sense strand
ccaggucuauggaaaugca

SEQ ID NO: 1404282 - RNA, 19 nt, Homo sapiens
  misc_RNA (1)...(19): siRNA sense strand
ccuccuggcucuccaccaa

SEQ ID NO: 1404283 - RNA, 19 nt, Homo sapiens
  misc_RNA (1)...(19): siRNA sense strand
gguucuacucuauaguuua

SEQ ID NO: 1404284 - RNA, 19 nt, Homo sapiens
  misc_RNA (1)...(19): siRNA sense strand
caaaugcacuuaagucuuu

SEQ ID NO: 1404285 - RNA, 19 nt, Homo sapiens
  misc_RNA (1)...(19): siRNA sense strand
gcacuuaagucuuuaucaa

SEQ ID NO: 1404286 - RNA, 19 nt, Homo sapiens
  misc_RNA (1)...(19): siRNA sense strand
gagagaaccuguaggaguu

SEQ ID NO: 1404287 - RNA, 19 nt, Homo sapiens
  misc_RNA (1)...(19): siRNA sense strand
gagcguauaugacaucgaa

SEQ ID NO: 1404288 - RNA, 19 nt, Homo sapiens
  misc_RNA (1)...(19): siRNA sense strand
gcaccaucaucuacuauuu

SEQ ID NO: 1404289 - RNA, 19 nt, Homo sapiens
  misc_RNA (1)...(19): siRNA sense strand
ccaccaagcacuggaauua

SEQ ID NO: 1404290 - RNA, 19 nt, Homo sapiens
  misc_RNA (1)...(19): siRNA sense strand
uagaugauguuuccucuga

SEQ ID NO: 1404291 - RNA, 19 nt, Homo sapiens
  misc_RNA (1)...(19): siRNA sense strand
gagaauauuuacagugcaa

SEQ ID NO: 1404292 - RNA, 19 nt, Homo sapiens
  misc_RNA (1)...(19): siRNA sense strand
gccagacaccuuauucuua

SEQ ID NO: 1404293 - RNA, 19 nt, Homo sapiens
  misc_RNA (1)...(19): siRNA sense strand
gcacuggaauuagaguauu

SEQ ID NO: 1404294 - RNA, 19 nt, Homo sapiens
  misc_RNA (1)...(19): siRNA sense strand
cugcauaaaugucuuggua

SEQ ID NO: 1404295 - RNA, 19 nt, Homo sapiens
  misc_RNA (1)...(19): siRNA sense strand
gaucagcacaucaguauuc

SEQ ID NO: 1404296 - RNA, 19 nt, Homo sapiens
  misc_RNA (1)...(19): siRNA sense strand
gauguuuccucugaugaua

SEQ ID NO: 1404297 - RNA, 19 nt, Homo sapiens
  misc_RNA (1)...(19): siRNA sense strand
gaauuucagugguucacaa

SEQ ID NO: 1404298 - RNA, 19 nt, Homo sapiens
  misc_RNA (1)...(19): siRNA sense strand
cagaguggcugccucaguu

SEQ ID NO: 1404299 - RNA, 19 nt, Homo sapiens
  misc_RNA (1)...(19): siRNA sense strand
aggaguaacugcauaaaug

SEQ ID NO: 1404300 - RNA, 19 nt, Homo sapiens
  misc_RNA (1)...(19): siRNA sense strand
gcuaacaaaugcacuuaag

SEQ ID NO: 1404301 - RNA, 19 nt, Homo sapiens
  misc_RNA (1)...(19): siRNA sense strand
caacugaucccagcacuug

SEQ ID NO: 1404302 - RNA, 19 nt, Homo sapiens
  misc_RNA (1)...(19): siRNA sense strand
gaugauguuuccucugaug

SEQ ID NO: 1404303 - RNA, 19 nt, Homo sapiens
  misc_RNA (1)...(19): siRNA sense strand
ggucuuaugcacagaagua

SEQ ID NO: 1404304 - RNA, 19 nt, Homo sapiens
  misc_RNA (1)...(19): siRNA sense strand
ccagacaccuuauucuuac

SEQ ID NO: 1404305 - RNA, 19 nt, Homo sapiens
  misc_RNA (1)...(19): siRNA sense strand
gcauaaaugucuugguaac

SEQ ID NO: 1404306 - RNA, 19 nt, Homo sapiens
  misc_RNA (1)...(19): siRNA sense strand
aaacagagcccuugaacag

SEQ ID NO: 1404307 - RNA, 19 nt, Homo sapiens
  misc_RNA (1)...(19): siRNA sense strand
gaugagagaaccuguagga

SEQ ID NO: 1404308 - RNA, 19 nt, Homo sapiens
  misc_RNA (1)...(19): siRNA sense strand
gcaaauaauucaguuucca

SEQ ID NO: 1404309 - RNA, 19 nt, Homo sapiens
  misc_RNA (1)...(19): siRNA sense strand
ggucaguaauuacaaguag

SEQ ID NO: 1404310 - RNA, 19 nt, Homo sapiens
  misc_RNA (1)...(19): siRNA sense strand
gaggauauccagucacuca

SEQ ID NO: 1404311 - RNA, 19 nt, Homo sapiens
  misc_RNA (1)...(19): siRNA sense strand
gagaguggacuuucccaaa

SEQ ID NO: 1404312 - RNA, 19 nt, Homo sapiens
  misc_RNA (1)...(19): siRNA sense strand
gugaucaaguucauauaga

SEQ ID NO: 1404313 - RNA, 19 nt, Homo sapiens
  misc_RNA (1)...(19): siRNA sense strand
cgaagguucuacucuauag

SEQ ID NO: 1404314 - RNA, 19 nt, Homo sapiens
  misc_RNA (1)...(19): siRNA sense strand
aaaccaguaugcacaguau

SEQ ID NO: 1404315 - RNA, 19 nt, Homo sapiens
  misc_RNA (1)...(19): siRNA sense strand
caaagaucuugaugagaga

SEQ ID NO: 1404316 - RNA, 19 nt, Homo sapiens
  misc_RNA (1)...(19): siRNA sense strand
caacguauggagcguauau

SEQ ID NO: 1404317 - RNA, 19 nt, Homo sapiens
  misc_RNA (1)...(19): siRNA sense strand
uauaacaccuacaagaaca

SEQ ID NO: 1404318 - RNA, 19 nt, Homo sapiens
  misc_RNA (1)...(19): siRNA sense strand
caccaucaucuacuauuua

SEQ ID NO: 1404319 - RNA, 19 nt, Homo sapiens
  misc_RNA (1)...(19): siRNA sense strand
guucuacucuauaguuuag

SEQ ID NO: 1404320 - RNA, 19 nt, Homo sapiens
  misc_RNA (1)...(19): siRNA sense strand
uaacaaaugcacuuaaguc

SEQ ID NO: 1404321 - RNA, 19 nt, Homo sapiens
  misc_RNA (1)...(19): siRNA sense strand
gcguauaugacaucgaaua

SEQ ID NO: 1404322 - RNA, 19 nt, Homo sapiens
  misc_RNA (1)...(19): siRNA sense strand
auggagcgcuugacacuuu

SEQ ID NO: 1404323 - RNA, 19 nt, Homo sapiens
  misc_RNA (1)...(19): siRNA sense strand
gaaguuggcuuuucguuac

SEQ ID NO: 1404324 - RNA, 19 nt, Homo sapiens
  misc_RNA (1)...(19): siRNA sense strand
caaacaaugucugccuaug

SEQ ID NO: 1404325 - RNA, 19 nt, Homo sapiens
  misc_RNA (1)...(19): siRNA sense strand
gcgaagguucuacucuaua

SEQ ID NO: 1404326 - RNA, 19 nt, Homo sapiens
  misc_RNA (1)...(19): siRNA sense strand
ggaguaacugcauaaaugu

SEQ ID NO: 1404327 - RNA, 19 nt, Homo sapiens
  misc_RNA (1)...(19): siRNA sense strand
ccucuucaaccucuacuua

SEQ ID NO: 1404328 - RNA, 19 nt, Homo sapiens
  misc_RNA (1)...(19): siRNA sense strand
ucaacgaauuucagugguu

SEQ ID NO: 1404329 - RNA, 19 nt, Homo sapiens
  misc_RNA (1)...(19): siRNA sense strand
caaaugccagguucuaguu

SEQ ID NO: 1404330 - RNA, 19 nt, Homo sapiens
  misc_RNA (1)...(19): siRNA sense strand
ggagugugaucaaguucau

SEQ ID NO: 1404331 - RNA, 19 nt, Homo sapiens
  misc_RNA (1)...(19): siRNA sense strand
acagauuccuggcuaacaa

SEQ ID NO: 1404332 - RNA, 19 nt, Homo sapiens
  misc_RNA (1)...(19): siRNA sense strand
cagaucagcacaucaguau

SEQ ID NO: 1404333 - RNA, 19 nt, Homo sapiens
  misc_RNA (1)...(19): siRNA sense strand
agaggagugugaucaaguu

SEQ ID NO: 1404334 - RNA, 19 nt, Homo sapiens
  misc_RNA (1)...(19): siRNA sense strand
ggacuccgcauggaagaaa

SEQ ID NO: 1404335 - RNA, 19 nt, Homo sapiens
  misc_RNA (1)...(19): siRNA sense strand
guaacgacaacucaacuga

SEQ ID NO: 1404336 - RNA, 19 nt, Homo sapiens
  misc_RNA (1)...(19): siRNA sense strand
caagcccuauccacacauu

SEQ ID NO: 1404337 - RNA, 19 nt, Homo sapiens
  misc_RNA (1)...(19): siRNA sense strand
ccacacccaucaaagaucu

SEQ ID NO: 1404338 - RNA, 19 nt, Homo sapiens
  misc_RNA (1)...(19): siRNA sense strand
caaccucuacuuaucaguu

SEQ ID NO: 1404339 - RNA, 19 nt, Homo sapiens
  misc_RNA (1)...(19): siRNA sense strand
ggaugaggaaguuggcuuu

SEQ ID NO: 1404340 - RNA, 19 nt, Homo sapiens
  misc_RNA (1)...(19): siRNA sense strand
ccuacagcuugcccacuua

SEQ ID NO: 1404341 - RNA, 19 nt, Homo sapiens
  misc_RNA (1)...(19): siRNA sense strand
auaaaugucuugguaacga

SEQ ID NO: 1404342 - RNA, 19 nt, Homo sapiens
  misc_RNA (1)...(19): siRNA sense strand
ggaaguuggcuuuucguua

SEQ ID NO: 1404343 - RNA, 19 nt, Homo sapiens
  misc_RNA (1)...(19): siRNA sense strand
gaucaaguucauauagaug

SEQ ID NO: 1404344 - RNA, 19 nt, Homo sapiens
  misc_RNA (1)...(19): siRNA sense strand
uaaccaaccaggagaguuc

SEQ ID NO: 1404345 - RNA, 19 nt, Homo sapiens
  misc_RNA (1)...(19): siRNA sense strand
guauggagcguauaugaca

SEQ ID NO: 1404346 - RNA, 19 nt, Homo sapiens
  misc_RNA (1)...(19): siRNA sense strand
gauuauccauccuauacag

SEQ ID NO: 1404347 - RNA, 19 nt, Homo sapiens
  misc_RNA (1)...(19): siRNA sense strand
cgauuugggugugauguug

SEQ ID NO: 1404348 - RNA, 19 nt, Homo sapiens
  misc_RNA (1)...(19): siRNA sense strand
caggagaguucgauaccau

SEQ ID NO: 1404349 - RNA, 19 nt, Homo sapiens
  misc_RNA (1)...(19): siRNA sense strand
uugcgaagguucuacucua

SEQ ID NO: 1404350 - RNA, 19 nt, Homo sapiens
  misc_RNA (1)...(19): siRNA sense strand
ggagauggagcgcuugaca

SEQ ID NO: 1404351 - RNA, 19 nt, Homo sapiens
  misc_RNA (1)...(19): siRNA sense strand
ccagaucagcacaucagua

SEQ ID NO: 1404352 - RNA, 19 nt, Homo sapiens
  misc_RNA (1)...(19): siRNA sense strand
gcagccagccgucuacaca

SEQ ID NO: 1404353 - RNA, 19 nt, Homo sapiens
  misc_RNA (1)...(19): siRNA sense strand
cacuggaauuagaguauuu

SEQ ID NO: 1404354 - RNA, 19 nt, Homo sapiens
  misc_RNA (1)...(19): siRNA sense strand
accaagcacuggaauuaga

SEQ ID NO: 1404355 - RNA, 19 nt, Homo sapiens
  misc_RNA (1)...(19): siRNA sense strand
ggaugccuggcuacaguua

SEQ ID NO: 1404356 - RNA, 19 nt, Homo sapiens
  misc_RNA (1)...(19): siRNA sense strand
caaccaggagaguucgaua

SEQ ID NO: 1404357 - RNA, 19 nt, Homo sapiens
  misc_RNA (1)...(19): siRNA sense strand
gcacaguauuauucagcau

SEQ ID NO: 1404358 - RNA, 19 nt, Homo sapiens
  misc_RNA (1)...(19): siRNA sense strand
acagaaguauggcaaggau

SEQ ID NO: 1404359 - RNA, 19 nt, Homo sapiens
  misc_RNA (1)...(19): siRNA sense strand
gcacuaggaguaacugcau

SEQ ID NO: 1404360 - RNA, 19 nt, Homo sapiens
  misc_RNA (1)...(19): siRNA sense strand
auuauuagcacuaggagua

SEQ ID NO: 1404361 - RNA, 19 nt, Homo sapiens
  misc_RNA (1)...(19): siRNA sense strand
ccgcauggaagaaaugauu

SEQ ID NO: 1404362 - RNA, 19 nt, Homo sapiens
  misc_RNA (1)...(19): siRNA sense strand
cguauaugacaucgaauaa

SEQ ID NO: 1404363 - RNA, 19 nt, Homo sapiens
  misc_RNA (1)...(19): siRNA sense strand
ggauauccagucacucaga

SEQ ID NO: 1404364 - RNA, 19 nt, Homo sapiens
  misc_RNA (1)...(19): siRNA sense strand
guaacugcauaaaugucuu

SEQ ID NO: 1404365 - RNA, 19 nt, Homo sapiens
  misc_RNA (1)...(19): siRNA sense strand
accagcagcucaaacaaug

SEQ ID NO: 1404366 - RNA, 19 nt, Homo sapiens
  misc_RNA (1)...(19): siRNA sense strand
caggacagcccuacagcuu

SEQ ID NO: 1404367 - RNA, 19 nt, Homo sapiens
  misc_RNA (1)...(19): siRNA sense strand
gaaucucucccaggacuga

SEQ ID NO: 1404368 - RNA, 19 nt, Homo sapiens
  misc_RNA (1)...(19): siRNA sense strand
gugguucacaacaggauua

SEQ ID NO: 1404369 - RNA, 19 nt, Homo sapiens
  misc_RNA (1)...(19): siRNA sense strand
caucaucuacuauuuaugc

SEQ ID NO: 1404370 - RNA, 19 nt, Homo sapiens
  misc_RNA (1)...(19): siRNA sense strand
ggccagacaccuuauucuu

SEQ ID NO: 1404371 - RNA, 19 nt, Homo sapiens
  misc_RNA (1)...(19): siRNA sense strand
gggucaaaguccagaggaa

SEQ ID NO: 1404372 - RNA, 19 nt, Homo sapiens
  misc_RNA (1)...(19): siRNA sense strand
ccuccuggcucuccaccaa

SEQ ID NO: 1404373 - RNA, 19 nt, Homo sapiens
  misc_RNA (1)...(19): siRNA sense strand
gguucuacucuauaguuua

SEQ ID NO: 1404374 - RNA, 19 nt, Homo sapiens
  misc_RNA (1)...(19): siRNA sense strand
accaguaugcacaguauua

SEQ ID NO: 1404375 - RNA, 19 nt, Homo sapiens
  misc_RNA (1)...(19): siRNA sense strand
ucaauuauuagcacuagga

SEQ ID NO: 1404376 - RNA, 19 nt, Homo sapiens
  misc_RNA (1)...(19): siRNA sense strand
gaguggacuuucccaaacu

SEQ ID NO: 1404377 - RNA, 19 nt, Homo sapiens
  misc_RNA (1)...(19): siRNA sense strand
guuaagggcagagauugaa

SEQ ID NO: 1404378 - RNA, 19 nt, Homo sapiens
  misc_RNA (1)...(19): siRNA sense strand
ugaccuggagcguguguuu

SEQ ID NO: 1404379 - RNA, 19 nt, Homo sapiens
  misc_RNA (1)...(19): siRNA sense strand
acaguauuauucagcauca

SEQ ID NO: 1404380 - RNA, 19 nt, Homo sapiens
  misc_RNA (1)...(19): siRNA sense strand
ggacuuucccaaacucagu

SEQ ID NO: 1404381 - RNA, 19 nt, Homo sapiens
  misc_RNA (1)...(19): siRNA sense strand
aacaaugucugccuaugca

SEQ ID NO: 1404382 - RNA, 19 nt, Homo sapiens
  misc_RNA (1)...(19): siRNA sense strand
aacgacaacucaacugauc

SEQ ID NO: 1404383 - RNA, 19 nt, Homo sapiens
  misc_RNA (1)...(19): siRNA sense strand
cacuaggaguaacugcaua

SEQ ID NO: 1404384 - RNA, 19 nt, Homo sapiens
  misc_RNA (1)...(19): siRNA sense strand
caaaugcacuuaagucuuu

SEQ ID NO: 1404385 - RNA, 19 nt, Homo sapiens
  misc_RNA (1)...(19): siRNA sense strand
gcacaucaguuacuacaaa

SEQ ID NO: 1404386 - RNA, 19 nt, Homo sapiens
  misc_RNA (1)...(19): siRNA sense strand
gcacuuaagucuuuaucaa

SEQ ID NO: 1404387 - RNA, 19 nt, Homo sapiens
  misc_RNA (1)...(19): siRNA sense strand
gagagaaccuguaggaguu

SEQ ID NO: 1404388 - RNA, 19 nt, Homo sapiens
  misc_RNA (1)...(19): siRNA sense strand
gagcguauaugacaucgaa

SEQ ID NO: 1404389 - RNA, 19 nt, Homo sapiens
  misc_RNA (1)...(19): siRNA sense strand
gcaccaucaucuacuauuu

SEQ ID NO: 1404390 - RNA, 19 nt, Homo sapiens
  misc_RNA (1)...(19): siRNA sense strand
ggaagacucccaggauuua

SEQ ID NO: 1404391 - RNA, 19 nt, Homo sapiens
  misc_RNA (1)...(19): siRNA sense strand
ccaccaagcacuggaauua

SEQ ID NO: 1404392 - RNA, 19 nt, Homo sapiens
  misc_RNA (1)...(19): siRNA sense strand
uagaugauguuuccucuga

SEQ ID NO: 1404393 - RNA, 19 nt, Homo sapiens
  misc_RNA (1)...(19): siRNA sense strand
gagaauauuuacagugcaa

SEQ ID NO: 1404394 - RNA, 19 nt, Homo sapiens
  misc_RNA (1)...(19): siRNA sense strand
gccagacaccuuauucuua

SEQ ID NO: 1404395 - RNA, 19 nt, Homo sapiens
  misc_RNA (1)...(19): siRNA sense strand
gcacuggaauuagaguauu

SEQ ID NO: 1404396 - RNA, 19 nt, Homo sapiens
  misc_RNA (1)...(19): siRNA sense strand
cugcauaaaugucuuggua

SEQ ID NO: 1404397 - RNA, 19 nt, Homo sapiens
  misc_RNA (1)...(19): siRNA sense strand
gaucagcacaucaguauuc

SEQ ID NO: 1404398 - RNA, 19 nt, Homo sapiens
  misc_RNA (1)...(19): siRNA sense strand
gauguuuccucugaugaua

SEQ ID NO: 1404399 - RNA, 19 nt, Homo sapiens
  misc_RNA (1)...(19): siRNA sense strand
gaauuucagugguucacaa

SEQ ID NO: 1404400 - RNA, 19 nt, Homo sapiens
  misc_RNA (1)...(19): siRNA sense strand
cagaguggcugccucaguu

SEQ ID NO: 1404401 - RNA, 19 nt, Homo sapiens
  misc_RNA (1)...(19): siRNA sense strand
aggaguaacugcauaaaug

SEQ ID NO: 1404402 - RNA, 19 nt, Homo sapiens
  misc_RNA (1)...(19): siRNA sense strand
gcuaacaaaugcacuuaag

SEQ ID NO: 1404403 - RNA, 19 nt, Homo sapiens
  misc_RNA (1)...(19): siRNA sense strand
caacugaucccagcacuug

SEQ ID NO: 1404404 - RNA, 19 nt, Homo sapiens
  misc_RNA (1)...(19): siRNA sense strand
agaaucagauguuucacaa

SEQ ID NO: 1404405 - RNA, 19 nt, Homo sapiens
  misc_RNA (1)...(19): siRNA sense strand
gaugauguuuccucugaug

SEQ ID NO: 1404406 - RNA, 19 nt, Homo sapiens
  misc_RNA (1)...(19): siRNA sense strand
ggucuuaugcacagaagua

SEQ ID NO: 1404407 - RNA, 19 nt, Homo sapiens
  misc_RNA (1)...(19): siRNA sense strand
aaucagauguuucacaauc

SEQ ID NO: 1404408 - RNA, 19 nt, Homo sapiens
  misc_RNA (1)...(19): siRNA sense strand
gcauaaaugucuugguaac

SEQ ID NO: 1404409 - RNA, 19 nt, Homo sapiens
  misc_RNA (1)...(19): siRNA sense strand
gaugagagaaccuguagga

SEQ ID NO: 1404410 - RNA, 19 nt, Homo sapiens
  misc_RNA (1)...(19): siRNA sense strand
gcaaauaauucaguuucca

SEQ ID NO: 1404411 - RNA, 19 nt, Homo sapiens
  misc_RNA (1)...(19): siRNA sense strand
ccagacaccuuauucuuac

SEQ ID NO: 1404412 - RNA, 19 nt, Homo sapiens
  misc_RNA (1)...(19): siRNA sense strand
aaacagagcccuugaacag

SEQ ID NO: 1404413 - RNA, 19 nt, Homo sapiens
  misc_RNA (1)...(19): siRNA sense strand
ggucaguaauuacaaguag

SEQ ID NO: 1404414 - RNA, 19 nt, Homo sapiens
  misc_RNA (1)...(19): siRNA sense strand
gaggauauccagucacuca

SEQ ID NO: 1404415 - RNA, 19 nt, Homo sapiens
  misc_RNA (1)...(19): siRNA sense strand
gagaguggacuuucccaaa

SEQ ID NO: 1404416 - RNA, 19 nt, Homo sapiens
  misc_RNA (1)...(19): siRNA sense strand
gugaucaaguucauauaga

SEQ ID NO: 1404417 - RNA, 19 nt, Homo sapiens
  misc_RNA (1)...(19): siRNA sense strand
cgaagguucuacucuauag

SEQ ID NO: 1404418 - RNA, 19 nt, Homo sapiens
  misc_RNA (1)...(19): siRNA sense strand
aaaccaguaugcacaguau

SEQ ID NO: 1404419 - RNA, 19 nt, Homo sapiens
  misc_RNA (1)...(19): siRNA sense strand
caaagaucuugaugagaga

SEQ ID NO: 1404420 - RNA, 19 nt, Homo sapiens
  misc_RNA (1)...(19): siRNA sense strand
caacguauggagcguauau

SEQ ID NO: 1404421 - RNA, 19 nt, Homo sapiens
  misc_RNA (1)...(19): siRNA sense strand
uauaacaccuacaagaaca

SEQ ID NO: 1404422 - RNA, 19 nt, Homo sapiens
  misc_RNA (1)...(19): siRNA sense strand
caccaucaucuacuauuua

SEQ ID NO: 1404423 - RNA, 19 nt, Homo sapiens
  misc_RNA (1)...(19): siRNA sense strand
guucuacucuauaguuuag

SEQ ID NO: 1404424 - RNA, 19 nt, Homo sapiens
  misc_RNA (1)...(19): siRNA sense strand
uaacaaaugcacuuaaguc

SEQ ID NO: 1404425 - RNA, 19 nt, Homo sapiens
  misc_RNA (1)...(19): siRNA sense strand
gcguauaugacaucgaaua

SEQ ID NO: 1404426 - RNA, 19 nt, Homo sapiens
  misc_RNA (1)...(19): siRNA sense strand
auggagcgcuugacacuuu

SEQ ID NO: 1404427 - RNA, 19 nt, Homo sapiens
  misc_RNA (1)...(19): siRNA sense strand
gaaguuggcuuuucguuac

SEQ ID NO: 1404428 - RNA, 19 nt, Homo sapiens
  misc_RNA (1)...(19): siRNA sense strand
gcacagaaucagauguuuc

SEQ ID NO: 1404429 - RNA, 19 nt, Homo sapiens
  misc_RNA (1)...(19): siRNA sense strand
caaacaaugucugccuaug

SEQ ID NO: 1404430 - RNA, 19 nt, Homo sapiens
  misc_RNA (1)...(19): siRNA sense strand
gcgaagguucuacucuaua

SEQ ID NO: 1404431 - RNA, 19 nt, Homo sapiens
  misc_RNA (1)...(19): siRNA sense strand
ggaguaacugcauaaaugu

SEQ ID NO: 1404432 - RNA, 19 nt, Homo sapiens
  misc_RNA (1)...(19): siRNA sense strand
ccucuucaaccucuacuua

SEQ ID NO: 1404433 - RNA, 19 nt, Homo sapiens
  misc_RNA (1)...(19): siRNA sense strand
ucaacgaauuucagugguu

SEQ ID NO: 1404434 - RNA, 19 nt, Homo sapiens
  misc_RNA (1)...(19): siRNA sense strand
caaaugccagguucuaguu

SEQ ID NO: 1404435 - RNA, 19 nt, Homo sapiens
  misc_RNA (1)...(19): siRNA sense strand
ggagugugaucaaguucau

SEQ ID NO: 1404436 - RNA, 19 nt, Homo sapiens
  misc_RNA (1)...(19): siRNA sense strand
acagauuccuggcuaacaa

SEQ ID NO: 1404437 - RNA, 19 nt, Homo sapiens
  misc_RNA (1)...(19): siRNA sense strand
cagaucagcacaucaguau

SEQ ID NO: 1404438 - RNA, 19 nt, Homo sapiens
  misc_RNA (1)...(19): siRNA sense strand
agaggagugugaucaaguu

SEQ ID NO: 1404439 - RNA, 19 nt, Homo sapiens
  misc_RNA (1)...(19): siRNA sense strand
ggacuccgcauggaagaaa

SEQ ID NO: 1404440 - RNA, 19 nt, Homo sapiens
  misc_RNA (1)...(19): siRNA sense strand
guaacgacaacucaacuga

SEQ ID NO: 1404441 - RNA, 19 nt, Homo sapiens
  misc_RNA (1)...(19): siRNA sense strand
caagcccuauccacacauu

SEQ ID NO: 1404442 - RNA, 19 nt, Homo sapiens
  misc_RNA (1)...(19): siRNA sense strand
ccacacccaucaaagaucu

SEQ ID NO: 1404443 - RNA, 19 nt, Homo sapiens
  misc_RNA (1)...(19): siRNA sense strand
gaagacucccaggauuuaa

SEQ ID NO: 1404444 - RNA, 19 nt, Homo sapiens
  misc_RNA (1)...(19): siRNA sense strand
ggaugaggaaguuggcuuu

SEQ ID NO: 1404445 - RNA, 19 nt, Homo sapiens
  misc_RNA (1)...(19): siRNA sense strand
caaccucuacuuaucaguu

SEQ ID NO: 1404446 - RNA, 19 nt, Homo sapiens
  misc_RNA (1)...(19): siRNA sense strand
ggaaaugcaggaccuagca

SEQ ID NO: 1404447 - RNA, 19 nt, Homo sapiens
  misc_RNA (1)...(19): siRNA sense strand
ccuacagcuugcccacuua

SEQ ID NO: 1404448 - RNA, 19 nt, Homo sapiens
  misc_RNA (1)...(19): siRNA sense strand
ucucagaauuccaggucua

SEQ ID NO: 1404449 - RNA, 19 nt, Homo sapiens
  misc_RNA (1)...(19): siRNA sense strand
auaaaugucuugguaacga

SEQ ID NO: 1404450 - RNA, 19 nt, Homo sapiens
  misc_RNA (1)...(19): siRNA sense strand
ggaaguuggcuuuucguua

SEQ ID NO: 1404451 - RNA, 19 nt, Homo sapiens
  misc_RNA (1)...(19): siRNA sense strand
gaucaaguucauauagaug

SEQ ID NO: 1404452 - RNA, 19 nt, Homo sapiens
  misc_RNA (1)...(19): siRNA sense strand
uaaccaaccaggagaguuc

SEQ ID NO: 1404453 - RNA, 19 nt, Homo sapiens
  misc_RNA (1)...(19): siRNA sense strand
guauggagcguauaugaca

SEQ ID NO: 1404454 - RNA, 19 nt, Homo sapiens
  misc_RNA (1)...(19): siRNA sense strand
gauuauccauccuauacag

SEQ ID NO: 1404455 - RNA, 19 nt, Homo sapiens
  misc_RNA (1)...(19): siRNA sense strand
gaccuagcaaguccucaua

SEQ ID NO: 1404456 - RNA, 19 nt, Homo sapiens
  misc_RNA (1)...(19): siRNA sense strand
cgauuugggugugauguug

SEQ ID NO: 1404457 - RNA, 19 nt, Homo sapiens
  misc_RNA (1)...(19): siRNA sense strand
ggagauggagcgcuugaca

SEQ ID NO: 1404458 - RNA, 19 nt, Homo sapiens
  misc_RNA (1)...(19): siRNA sense strand
uugcgaagguucuacucua

SEQ ID NO: 1404459 - RNA, 19 nt, Homo sapiens
  misc_RNA (1)...(19): siRNA sense strand
caggagaguucgauaccau

SEQ ID NO: 1404460 - RNA, 19 nt, Homo sapiens
  misc_RNA (1)...(19): siRNA sense strand
ccagaucagcacaucagua

SEQ ID NO: 1404461 - RNA, 19 nt, Homo sapiens
  misc_RNA (1)...(19): siRNA sense strand
gcagccagccgucuacaca

SEQ ID NO: 1404462 - RNA, 19 nt, Homo sapiens
  misc_RNA (1)...(19): siRNA sense strand
cacuggaauuagaguauuu

SEQ ID NO: 1404463 - RNA, 19 nt, Homo sapiens
  misc_RNA (1)...(19): siRNA sense strand
accaagcacuggaauuaga

SEQ ID NO: 1404464 - RNA, 19 nt, Homo sapiens
  misc_RNA (1)...(19): siRNA sense strand
ggaugccuggcuacaguua

SEQ ID NO: 1404465 - RNA, 19 nt, Homo sapiens
  misc_RNA (1)...(19): siRNA sense strand
caaccaggagaguucgaua

SEQ ID NO: 1404466 - RNA, 19 nt, Homo sapiens
  misc_RNA (1)...(19): siRNA sense strand
gcacaguauuauucagcau

SEQ ID NO: 1404467 - RNA, 19 nt, Homo sapiens
  misc_RNA (1)...(19): siRNA sense strand
acagaaguauggcaaggau

SEQ ID NO: 1404468 - RNA, 19 nt, Homo sapiens
  misc_RNA (1)...(19): siRNA sense strand
gaaaugcaggaccuagcaa

SEQ ID NO: 1404469 - RNA, 19 nt, Homo sapiens
  misc_RNA (1)...(19): siRNA sense strand
gcacuaggaguaacugcau

SEQ ID NO: 1404470 - RNA, 19 nt, Homo sapiens
  misc_RNA (1)...(19): siRNA sense strand
auuauuagcacuaggagua

SEQ ID NO: 1404471 - RNA, 19 nt, Homo sapiens
  misc_RNA (1)...(19): siRNA sense strand
ccgcauggaagaaaugauu

SEQ ID NO: 1404472 - RNA, 19 nt, Homo sapiens
  misc_RNA (1)...(19): siRNA sense strand
accagcagcucaaacaaug

SEQ ID NO: 1404473 - RNA, 19 nt, Homo sapiens
  misc_RNA (1)...(19): siRNA sense strand
ggauauccagucacucaga

SEQ ID NO: 1404474 - RNA, 19 nt, Homo sapiens
  misc_RNA (1)...(19): siRNA sense strand
guaacugcauaaaugucuu

SEQ ID NO: 1404475 - RNA, 19 nt, Homo sapiens
  misc_RNA (1)...(19): siRNA sense strand
cguauaugacaucgaauaa

SEQ ID NO: 1404476 - RNA, 19 nt, Homo sapiens
  misc_RNA (1)...(19): siRNA sense strand
caggacagcccuacagcuu

SEQ ID NO: 1404477 - RNA, 19 nt, Homo sapiens
  misc_RNA (1)...(19): siRNA sense strand
gaaucucucccaggacuga

SEQ ID NO: 1404478 - RNA, 19 nt, Homo sapiens
  misc_RNA (1)...(19): siRNA sense strand
gugguucacaacaggauua

SEQ ID NO: 1404479 - RNA, 19 nt, Homo sapiens
  misc_RNA (1)...(19): siRNA sense strand
caucaucuacuauuuaugc

SEQ ID NO: 1404480 - RNA, 19 nt, Homo sapiens
  misc_RNA (1)...(19): siRNA sense strand
ggccagacaccuuauucuu

SEQ ID NO: 1404481 - RNA, 19 nt, Homo sapiens
  misc_RNA (1)...(19): siRNA sense strand
ccaggucuauggaaaugca

SEQ ID NO: 1404482 - RNA, 19 nt, Homo sapiens
  misc_RNA (1)...(19): siRNA sense strand
ccuccuggcucuccaccaa

SEQ ID NO: 1404483 - RNA, 19 nt, Homo sapiens
  misc_RNA (1)...(19): siRNA sense strand
gguucuacucuauaguuua

SEQ ID NO: 1404484 - RNA, 19 nt, Homo sapiens
  misc_RNA (1)...(19): siRNA sense strand
caaaugcacuuaagucuuu

SEQ ID NO: 1404485 - RNA, 19 nt, Homo sapiens
  misc_RNA (1)...(19): siRNA sense strand
gcacaucaguuacuacaaa

SEQ ID NO: 1404486 - RNA, 19 nt, Homo sapiens
  misc_RNA (1)...(19): siRNA sense strand
gcacuuaagucuuuaucaa

SEQ ID NO: 1404487 - RNA, 19 nt, Homo sapiens
  misc_RNA (1)...(19): siRNA sense strand
gagagaaccuguaggaguu

SEQ ID NO: 1404488 - RNA, 19 nt, Homo sapiens
  misc_RNA (1)...(19): siRNA sense strand
gagcguauaugacaucgaa

SEQ ID NO: 1404489 - RNA, 19 nt, Homo sapiens
  misc_RNA (1)...(19): siRNA sense strand
gcaccaucaucuacuauuu

SEQ ID NO: 1404490 - RNA, 19 nt, Homo sapiens
  misc_RNA (1)...(19): siRNA sense strand
ggaagacucccaggauuua

SEQ ID NO: 1404491 - RNA, 19 nt, Homo sapiens
  misc_RNA (1)...(19): siRNA sense strand
ccaccaagcacuggaauua

SEQ ID NO: 1404492 - RNA, 19 nt, Homo sapiens
  misc_RNA (1)...(19): siRNA sense strand
uagaugauguuuccucuga

SEQ ID NO: 1404493 - RNA, 19 nt, Homo sapiens
  misc_RNA (1)...(19): siRNA sense strand
gagaauauuuacagugcaa

SEQ ID NO: 1404494 - RNA, 19 nt, Homo sapiens
  misc_RNA (1)...(19): siRNA sense strand
gccagacaccuuauucuua

SEQ ID NO: 1404495 - RNA, 19 nt, Homo sapiens
  misc_RNA (1)...(19): siRNA sense strand
gcacuggaauuagaguauu

SEQ ID NO: 1404496 - RNA, 19 nt, Homo sapiens
  misc_RNA (1)...(19): siRNA sense strand
cugcauaaaugucuuggua

SEQ ID NO: 1404497 - RNA, 19 nt, Homo sapiens
  misc_RNA (1)...(19): siRNA sense strand
gaucagcacaucaguauuc

SEQ ID NO: 1404498 - RNA, 19 nt, Homo sapiens
  misc_RNA (1)...(19): siRNA sense strand
gauguuuccucugaugaua

SEQ ID NO: 1404499 - RNA, 19 nt, Homo sapiens
  misc_RNA (1)...(19): siRNA sense strand
gaauuucagugguucacaa

SEQ ID NO: 1404500 - RNA, 19 nt, Homo sapiens
  misc_RNA (1)...(19): siRNA sense strand
cagaguggcugccucaguu

SEQ ID NO: 1404501 - RNA, 19 nt, Homo sapiens
  misc_RNA (1)...(19): siRNA sense strand
aggaguaacugcauaaaug

SEQ ID NO: 1404502 - RNA, 19 nt, Homo sapiens
  misc_RNA (1)...(19): siRNA sense strand
gcuaacaaaugcacuuaag

SEQ ID NO: 1404503 - RNA, 19 nt, Homo sapiens
  misc_RNA (1)...(19): siRNA sense strand
caacugaucccagcacuug

SEQ ID NO: 1404504 - RNA, 19 nt, Homo sapiens
  misc_RNA (1)...(19): siRNA sense strand
agaaucagauguuucacaa

SEQ ID NO: 1404505 - RNA, 19 nt, Homo sapiens
  misc_RNA (1)...(19): siRNA sense strand
gaugauguuuccucugaug

SEQ ID NO: 1404506 - RNA, 19 nt, Homo sapiens
  misc_RNA (1)...(19): siRNA sense strand
ggucuuaugcacagaagua

SEQ ID NO: 1404507 - RNA, 19 nt, Homo sapiens
  misc_RNA (1)...(19): siRNA sense strand
aaucagauguuucacaauc

SEQ ID NO: 1404508 - RNA, 19 nt, Homo sapiens
  misc_RNA (1)...(19): siRNA sense strand
gcauaaaugucuugguaac

SEQ ID NO: 1404509 - RNA, 19 nt, Homo sapiens
  misc_RNA (1)...(19): siRNA sense strand
gaugagagaaccuguagga

SEQ ID NO: 1404510 - RNA, 19 nt, Homo sapiens
  misc_RNA (1)...(19): siRNA sense strand
gcaaauaauucaguuucca

SEQ ID NO: 1404511 - RNA, 19 nt, Homo sapiens
  misc_RNA (1)...(19): siRNA sense strand
ccagacaccuuauucuuac

SEQ ID NO: 1404512 - RNA, 19 nt, Homo sapiens
  misc_RNA (1)...(19): siRNA sense strand
aaacagagcccuugaacag

SEQ ID NO: 1404513 - RNA, 19 nt, Homo sapiens
  misc_RNA (1)...(19): siRNA sense strand
ggucaguaauuacaaguag

SEQ ID NO: 1404514 - RNA, 19 nt, Homo sapiens
  misc_RNA (1)...(19): siRNA sense strand
gaggauauccagucacuca

SEQ ID NO: 1404515 - RNA, 19 nt, Homo sapiens
  misc_RNA (1)...(19): siRNA sense strand
gagaguggacuuucccaaa

SEQ ID NO: 1404516 - RNA, 19 nt, Homo sapiens
  misc_RNA (1)...(19): siRNA sense strand
gugaucaaguucauauaga

SEQ ID NO: 1404517 - RNA, 19 nt, Homo sapiens
  misc_RNA (1)...(19): siRNA sense strand
cgaagguucuacucuauag

SEQ ID NO: 1404518 - RNA, 19 nt, Homo sapiens
  misc_RNA (1)...(19): siRNA sense strand
aaaccaguaugcacaguau

SEQ ID NO: 1404519 - RNA, 19 nt, Homo sapiens
  misc_RNA (1)...(19): siRNA sense strand
caaagaucuugaugagaga

SEQ ID NO: 1404520 - RNA, 19 nt, Homo sapiens
  misc_RNA (1)...(19): siRNA sense strand
caacguauggagcguauau

SEQ ID NO: 1404521 - RNA, 19 nt, Homo sapiens
  misc_RNA (1)...(19): siRNA sense strand
uauaacaccuacaagaaca

SEQ ID NO: 1404522 - RNA, 19 nt, Homo sapiens
  misc_RNA (1)...(19): siRNA sense strand
caccaucaucuacuauuua

SEQ ID NO: 1404523 - RNA, 19 nt, Homo sapiens
  misc_RNA (1)...(19): siRNA sense strand
guucuacucuauaguuuag

SEQ ID NO: 1404524 - RNA, 19 nt, Homo sapiens
  misc_RNA (1)...(19): siRNA sense strand
uaacaaaugcacuuaaguc

SEQ ID NO: 1404525 - RNA, 19 nt, Homo sapiens
  misc_RNA (1)...(19): siRNA sense strand
gcguauaugacaucgaaua

SEQ ID NO: 1404526 - RNA, 19 nt, Homo sapiens
  misc_RNA (1)...(19): siRNA sense strand
auggagcgcuugacacuuu

SEQ ID NO: 1404527 - RNA, 19 nt, Homo sapiens
  misc_RNA (1)...(19): siRNA sense strand
gaaguuggcuuuucguuac

SEQ ID NO: 1404528 - RNA, 19 nt, Homo sapiens
  misc_RNA (1)...(19): siRNA sense strand
gcacagaaucagauguuuc

SEQ ID NO: 1404529 - RNA, 19 nt, Homo sapiens
  misc_RNA (1)...(19): siRNA sense strand
caaacaaugucugccuaug

SEQ ID NO: 1404530 - RNA, 19 nt, Homo sapiens
  misc_RNA (1)...(19): siRNA sense strand
gcgaagguucuacucuaua

SEQ ID NO: 1404531 - RNA, 19 nt, Homo sapiens
  misc_RNA (1)...(19): siRNA sense strand
ggaguaacugcauaaaugu

SEQ ID NO: 1404532 - RNA, 19 nt, Homo sapiens
  misc_RNA (1)...(19): siRNA sense strand
ccucuucaaccucuacuua

SEQ ID NO: 1404533 - RNA, 19 nt, Homo sapiens
  misc_RNA (1)...(19): siRNA sense strand
ucaacgaauuucagugguu

SEQ ID NO: 1404534 - RNA, 19 nt, Homo sapiens
  misc_RNA (1)...(19): siRNA sense strand
caaaugccagguucuaguu

SEQ ID NO: 1404535 - RNA, 19 nt, Homo sapiens
  misc_RNA (1)...(19): siRNA sense strand
ggagugugaucaaguucau

SEQ ID NO: 1404536 - RNA, 19 nt, Homo sapiens
  misc_RNA (1)...(19): siRNA sense strand
acagauuccuggcuaacaa

SEQ ID NO: 1404537 - RNA, 19 nt, Homo sapiens
  misc_RNA (1)...(19): siRNA sense strand
cagaucagcacaucaguau

SEQ ID NO: 1404538 - RNA, 19 nt, Homo sapiens
  misc_RNA (1)...(19): siRNA sense strand
agaggagugugaucaaguu

SEQ ID NO: 1404539 - RNA, 19 nt, Homo sapiens
  misc_RNA (1)...(19): siRNA sense strand
ggacuccgcauggaagaaa

SEQ ID NO: 1404540 - RNA, 19 nt, Homo sapiens
  misc_RNA (1)...(19): siRNA sense strand
guaacgacaacucaacuga

SEQ ID NO: 1404541 - RNA, 19 nt, Homo sapiens
  misc_RNA (1)...(19): siRNA sense strand
caagcccuauccacacauu

SEQ ID NO: 1404542 - RNA, 19 nt, Homo sapiens
  misc_RNA (1)...(19): siRNA sense strand
ccacacccaucaaagaucu

SEQ ID NO: 1404543 - RNA, 19 nt, Homo sapiens
  misc_RNA (1)...(19): siRNA sense strand
gaagacucccaggauuuaa

SEQ ID NO: 1404544 - RNA, 19 nt, Homo sapiens
  misc_RNA (1)...(19): siRNA sense strand
ggaugaggaaguuggcuuu

SEQ ID NO: 1404545 - RNA, 19 nt, Homo sapiens
  misc_RNA (1)...(19): siRNA sense strand
caaccucuacuuaucaguu

SEQ ID NO: 1404546 - RNA, 19 nt, Homo sapiens
  misc_RNA (1)...(19): siRNA sense strand
ggaaaugcaggaccuagca

SEQ ID NO: 1404547 - RNA, 19 nt, Homo sapiens
  misc_RNA (1)...(19): siRNA sense strand
ccuacagcuugcccacuua

SEQ ID NO: 1404548 - RNA, 19 nt, Homo sapiens
  misc_RNA (1)...(19): siRNA sense strand
ucucagaauuccaggucua

SEQ ID NO: 1404549 - RNA, 19 nt, Homo sapiens
  misc_RNA (1)...(19): siRNA sense strand
auaaaugucuugguaacga

SEQ ID NO: 1404550 - RNA, 19 nt, Homo sapiens
  misc_RNA (1)...(19): siRNA sense strand
ggaaguuggcuuuucguua

SEQ ID NO: 1404551 - RNA, 19 nt, Homo sapiens
  misc_RNA (1)...(19): siRNA sense strand
gaucaaguucauauagaug

SEQ ID NO: 1404552 - RNA, 19 nt, Homo sapiens
  misc_RNA (1)...(19): siRNA sense strand
uaaccaaccaggagaguuc

SEQ ID NO: 1404553 - RNA, 19 nt, Homo sapiens
  misc_RNA (1)...(19): siRNA sense strand
guauggagcguauaugaca

SEQ ID NO: 1404554 - RNA, 19 nt, Homo sapiens
  misc_RNA (1)...(19): siRNA sense strand
gauuauccauccuauacag

SEQ ID NO: 1404555 - RNA, 19 nt, Homo sapiens
  misc_RNA (1)...(19): siRNA sense strand
gaccuagcaaguccucaua

SEQ ID NO: 1404556 - RNA, 19 nt, Homo sapiens
  misc_RNA (1)...(19): siRNA sense strand
cgauuugggugugauguug

SEQ ID NO: 1404557 - RNA, 19 nt, Homo sapiens
  misc_RNA (1)...(19): siRNA sense strand
ggagauggagcgcuugaca

SEQ ID NO: 1404558 - RNA, 19 nt, Homo sapiens
  misc_RNA (1)...(19): siRNA sense strand
uugcgaagguucuacucua

SEQ ID NO: 1404559 - RNA, 19 nt, Homo sapiens
  misc_RNA (1)...(19): siRNA sense strand
caggagaguucgauaccau

SEQ ID NO: 1404560 - RNA, 19 nt, Homo sapiens
  misc_RNA (1)...(19): siRNA sense strand
ccagaucagcacaucagua

SEQ ID NO: 1404561 - RNA, 19 nt, Homo sapiens
  misc_RNA (1)...(19): siRNA sense strand
gcagccagccgucuacaca

SEQ ID NO: 1404562 - RNA, 19 nt, Homo sapiens
  misc_RNA (1)...(19): siRNA sense strand
cacuggaauuagaguauuu

SEQ ID NO: 1404563 - RNA, 19 nt, Homo sapiens
  misc_RNA (1)...(19): siRNA sense strand
accaagcacuggaauuaga

SEQ ID NO: 1404564 - RNA, 19 nt, Homo sapiens
  misc_RNA (1)...(19): siRNA sense strand
ggaugccuggcuacaguua

SEQ ID NO: 1404565 - RNA, 19 nt, Homo sapiens
  misc_RNA (1)...(19): siRNA sense strand
caaccaggagaguucgaua

SEQ ID NO: 1404566 - RNA, 19 nt, Homo sapiens
  misc_RNA (1)...(19): siRNA sense strand
gcacaguauuauucagcau

SEQ ID NO: 1404567 - RNA, 19 nt, Homo sapiens
  misc_RNA (1)...(19): siRNA sense strand
acagaaguauggcaaggau

SEQ ID NO: 1404568 - RNA, 19 nt, Homo sapiens
  misc_RNA (1)...(19): siRNA sense strand
gaaaugcaggaccuagcaa

SEQ ID NO: 1404569 - RNA, 19 nt, Homo sapiens
  misc_RNA (1)...(19): siRNA sense strand
gcacuaggaguaacugcau

SEQ ID NO: 1404570 - RNA, 19 nt, Homo sapiens
  misc_RNA (1)...(19): siRNA sense strand
auuauuagcacuaggagua

SEQ ID NO: 1404571 - RNA, 19 nt, Homo sapiens
  misc_RNA (1)...(19): siRNA sense strand
ccgcauggaagaaaugauu

SEQ ID NO: 1404572 - RNA, 19 nt, Homo sapiens
  misc_RNA (1)...(19): siRNA sense strand
accagcagcucaaacaaug

SEQ ID NO: 1404573 - RNA, 19 nt, Homo sapiens
  misc_RNA (1)...(19): siRNA sense strand
ggauauccagucacucaga

SEQ ID NO: 1404574 - RNA, 19 nt, Homo sapiens
  misc_RNA (1)...(19): siRNA sense strand
guaacugcauaaaugucuu

SEQ ID NO: 1404575 - RNA, 19 nt, Homo sapiens
  misc_RNA (1)...(19): siRNA sense strand
cguauaugacaucgaauaa

SEQ ID NO: 1404576 - RNA, 19 nt, Homo sapiens
  misc_RNA (1)...(19): siRNA sense strand
caggacagcccuacagcuu

SEQ ID NO: 1404577 - RNA, 19 nt, Homo sapiens
  misc_RNA (1)...(19): siRNA sense strand
gaaucucucccaggacuga

SEQ ID NO: 1404578 - RNA, 19 nt, Homo sapiens
  misc_RNA (1)...(19): siRNA sense strand
gugguucacaacaggauua

SEQ ID NO: 1404579 - RNA, 19 nt, Homo sapiens
  misc_RNA (1)...(19): siRNA sense strand
caucaucuacuauuuaugc

SEQ ID NO: 1404580 - RNA, 19 nt, Homo sapiens
  misc_RNA (1)...(19): siRNA sense strand
ggccagacaccuuauucuu

SEQ ID NO: 1404581 - RNA, 19 nt, Homo sapiens
  misc_RNA (1)...(19): siRNA sense strand
ccaggucuauggaaaugca

SEQ ID NO: 1404582 - RNA, 19 nt, Homo sapiens
  misc_RNA (1)...(19): siRNA sense strand
ccuccuggcucuccaccaa

SEQ ID NO: 1404583 - RNA, 19 nt, Homo sapiens
  misc_RNA (1)...(19): siRNA sense strand
gguucuacucuauaguuua

SEQ ID NO: 1404584 - RNA, 19 nt, Homo sapiens
  misc_RNA (1)...(19): siRNA sense strand
caaaugcacuuaagucuuu

SEQ ID NO: 1404585 - RNA, 19 nt, Homo sapiens
  misc_RNA (1)...(19): siRNA sense strand
gcacaucaguuacuacaaa

SEQ ID NO: 1404586 - RNA, 19 nt, Homo sapiens
  misc_RNA (1)...(19): siRNA sense strand
gcacuuaagucuuuaucaa

SEQ ID NO: 1404587 - RNA, 19 nt, Homo sapiens
  misc_RNA (1)...(19): siRNA sense strand
gagagaaccuguaggaguu

SEQ ID NO: 1404588 - RNA, 19 nt, Homo sapiens
  misc_RNA (1)...(19): siRNA sense strand
gagcguauaugacaucgaa

SEQ ID NO: 1404589 - RNA, 19 nt, Homo sapiens
  misc_RNA (1)...(19): siRNA sense strand
gcaccaucaucuacuauuu

SEQ ID NO: 1404590 - RNA, 19 nt, Homo sapiens
  misc_RNA (1)...(19): siRNA sense strand
ggaagacucccaggauuua

SEQ ID NO: 1404591 - RNA, 19 nt, Homo sapiens
  misc_RNA (1)...(19): siRNA sense strand
ccaccaagcacuggaauua

SEQ ID NO: 1404592 - RNA, 19 nt, Homo sapiens
  misc_RNA (1)...(19): siRNA sense strand
uagaugauguuuccucuga

SEQ ID NO: 1404593 - RNA, 19 nt, Homo sapiens
  misc_RNA (1)...(19): siRNA sense strand
gagaauauuuacagugcaa

SEQ ID NO: 1404594 - RNA, 19 nt, Homo sapiens
  misc_RNA (1)...(19): siRNA sense strand
gccagacaccuuauucuua

SEQ ID NO: 1404595 - RNA, 19 nt, Homo sapiens
  misc_RNA (1)...(19): siRNA sense strand
gcacuggaauuagaguauu

SEQ ID NO: 1404596 - RNA, 19 nt, Homo sapiens
  misc_RNA (1)...(19): siRNA sense strand
cugcauaaaugucuuggua

SEQ ID NO: 1404597 - RNA, 19 nt, Homo sapiens
  misc_RNA (1)...(19): siRNA sense strand
gaucagcacaucaguauuc

SEQ ID NO: 1404598 - RNA, 19 nt, Homo sapiens
  misc_RNA (1)...(19): siRNA sense strand
gauguuuccucugaugaua

SEQ ID NO: 1404599 - RNA, 19 nt, Homo sapiens
  misc_RNA (1)...(19): siRNA sense strand
gaauuucagugguucacaa

SEQ ID NO: 1404600 - RNA, 19 nt, Homo sapiens
  misc_RNA (1)...(19): siRNA sense strand
cagaguggcugccucaguu

SEQ ID NO: 1404601 - RNA, 19 nt, Homo sapiens
  misc_RNA (1)...(19): siRNA sense strand
aggaguaacugcauaaaug

SEQ ID NO: 1404602 - RNA, 19 nt, Homo sapiens
  misc_RNA (1)...(19): siRNA sense strand
gcuaacaaaugcacuuaag

SEQ ID NO: 1404603 - RNA, 19 nt, Homo sapiens
  misc_RNA (1)...(19): siRNA sense strand
caacugaucccagcacuug

SEQ ID NO: 1404604 - RNA, 19 nt, Homo sapiens
  misc_RNA (1)...(19): siRNA sense strand
agaaucagauguuucacaa

SEQ ID NO: 1404605 - RNA, 19 nt, Homo sapiens
  misc_RNA (1)...(19): siRNA sense strand
gaugauguuuccucugaug

SEQ ID NO: 1404606 - RNA, 19 nt, Homo sapiens
  misc_RNA (1)...(19): siRNA sense strand
ggucuuaugcacagaagua

SEQ ID NO: 1404607 - RNA, 19 nt, Homo sapiens
  misc_RNA (1)...(19): siRNA sense strand
aaucagauguuucacaauc

SEQ ID NO: 1404608 - RNA, 19 nt, Homo sapiens
  misc_RNA (1)...(19): siRNA sense strand
gcauaaaugucuugguaac

SEQ ID NO: 1404609 - RNA, 19 nt, Homo sapiens
  misc_RNA (1)...(19): siRNA sense strand
gaugagagaaccuguagga

SEQ ID NO: 1404610 - RNA, 19 nt, Homo sapiens
  misc_RNA (1)...(19): siRNA sense strand
gcaaauaauucaguuucca

SEQ ID NO: 1404611 - RNA, 19 nt, Homo sapiens
  misc_RNA (1)...(19): siRNA sense strand
ccagacaccuuauucuuac

SEQ ID NO: 1404612 - RNA, 19 nt, Homo sapiens
  misc_RNA (1)...(19): siRNA sense strand
aaacagagcccuugaacag

SEQ ID NO: 1404613 - RNA, 19 nt, Homo sapiens
  misc_RNA (1)...(19): siRNA sense strand
ggucaguaauuacaaguag

SEQ ID NO: 1404614 - RNA, 19 nt, Homo sapiens
  misc_RNA (1)...(19): siRNA sense strand
gaggauauccagucacuca

SEQ ID NO: 1404615 - RNA, 19 nt, Homo sapiens
  misc_RNA (1)...(19): siRNA sense strand
gagaguggacuuucccaaa

SEQ ID NO: 1404616 - RNA, 19 nt, Homo sapiens
  misc_RNA (1)...(19): siRNA sense strand
gugaucaaguucauauaga

SEQ ID NO: 1404617 - RNA, 19 nt, Homo sapiens
  misc_RNA (1)...(19): siRNA sense strand
cgaagguucuacucuauag

SEQ ID NO: 1404618 - RNA, 19 nt, Homo sapiens
  misc_RNA (1)...(19): siRNA sense strand
aaaccaguaugcacaguau

SEQ ID NO: 1404619 - RNA, 19 nt, Homo sapiens
  misc_RNA (1)...(19): siRNA sense strand
caaagaucuugaugagaga

SEQ ID NO: 1404620 - RNA, 19 nt, Homo sapiens
  misc_RNA (1)...(19): siRNA sense strand
caacguauggagcguauau

SEQ ID NO: 1404621 - RNA, 19 nt, Homo sapiens
  misc_RNA (1)...(19): siRNA sense strand
uauaacaccuacaagaaca

SEQ ID NO: 1404622 - RNA, 19 nt, Homo sapiens
  misc_RNA (1)...(19): siRNA sense strand
caccaucaucuacuauuua

SEQ ID NO: 1404623 - RNA, 19 nt, Homo sapiens
  misc_RNA (1)...(19): siRNA sense strand
guucuacucuauaguuuag

SEQ ID NO: 1404624 - RNA, 19 nt, Homo sapiens
  misc_RNA (1)...(19): siRNA sense strand
uaacaaaugcacuuaaguc

SEQ ID NO: 1404625 - RNA, 19 nt, Homo sapiens
  misc_RNA (1)...(19): siRNA sense strand
gcguauaugacaucgaaua

SEQ ID NO: 1404626 - RNA, 19 nt, Homo sapiens
  misc_RNA (1)...(19): siRNA sense strand
auggagcgcuugacacuuu

SEQ ID NO: 1404627 - RNA, 19 nt, Homo sapiens
  misc_RNA (1)...(19): siRNA sense strand
gaaguuggcuuuucguuac

SEQ ID NO: 1404628 - RNA, 19 nt, Homo sapiens
  misc_RNA (1)...(19): siRNA sense strand
gcacagaaucagauguuuc

SEQ ID NO: 1404629 - RNA, 19 nt, Homo sapiens
  misc_RNA (1)...(19): siRNA sense strand
caaacaaugucugccuaug

SEQ ID NO: 1404630 - RNA, 19 nt, Homo sapiens
  misc_RNA (1)...(19): siRNA sense strand
gcgaagguucuacucuaua

SEQ ID NO: 1404631 - RNA, 19 nt, Homo sapiens
  misc_RNA (1)...(19): siRNA sense strand
ggaguaacugcauaaaugu

SEQ ID NO: 1404632 - RNA, 19 nt, Homo sapiens
  misc_RNA (1)...(19): siRNA sense strand
ccucuucaaccucuacuua

SEQ ID NO: 1404633 - RNA, 19 nt, Homo sapiens
  misc_RNA (1)...(19): siRNA sense strand
ucaacgaauuucagugguu

SEQ ID NO: 1404634 - RNA, 19 nt, Homo sapiens
  misc_RNA (1)...(19): siRNA sense strand
caaaugccagguucuaguu

SEQ ID NO: 1404635 - RNA, 19 nt, Homo sapiens
  misc_RNA (1)...(19): siRNA sense strand
ggagugugaucaaguucau

SEQ ID NO: 1404636 - RNA, 19 nt, Homo sapiens
  misc_RNA (1)...(19): siRNA sense strand
acagauuccuggcuaacaa

SEQ ID NO: 1404637 - RNA, 19 nt, Homo sapiens
  misc_RNA (1)...(19): siRNA sense strand
cagaucagcacaucaguau

SEQ ID NO: 1404638 - RNA, 19 nt, Homo sapiens
  misc_RNA (1)...(19): siRNA sense strand
agaggagugugaucaaguu

SEQ ID NO: 1404639 - RNA, 19 nt, Homo sapiens
  misc_RNA (1)...(19): siRNA sense strand
ggacuccgcauggaagaaa

SEQ ID NO: 1404640 - RNA, 19 nt, Homo sapiens
  misc_RNA (1)...(19): siRNA sense strand
guaacgacaacucaacuga

SEQ ID NO: 1404641 - RNA, 19 nt, Homo sapiens
  misc_RNA (1)...(19): siRNA sense strand
caagcccuauccacacauu

SEQ ID NO: 1404642 - RNA, 19 nt, Homo sapiens
  misc_RNA (1)...(19): siRNA sense strand
ccacacccaucaaagaucu

SEQ ID NO: 1404643 - RNA, 19 nt, Homo sapiens
  misc_RNA (1)...(19): siRNA sense strand
gaagacucccaggauuuaa

SEQ ID NO: 1404644 - RNA, 19 nt, Homo sapiens
  misc_RNA (1)...(19): siRNA sense strand
ggaugaggaaguuggcuuu

SEQ ID NO: 1404645 - RNA, 19 nt, Homo sapiens
  misc_RNA (1)...(19): siRNA sense strand
caaccucuacuuaucaguu

SEQ ID NO: 1404646 - RNA, 19 nt, Homo sapiens
  misc_RNA (1)...(19): siRNA sense strand
ggaaaugcaggaccuagca

SEQ ID NO: 1404647 - RNA, 19 nt, Homo sapiens
  misc_RNA (1)...(19): siRNA sense strand
ccuacagcuugcccacuua

SEQ ID NO: 1404648 - RNA, 19 nt, Homo sapiens
  misc_RNA (1)...(19): siRNA sense strand
ucucagaauuccaggucua

SEQ ID NO: 1404649 - RNA, 19 nt, Homo sapiens
  misc_RNA (1)...(19): siRNA sense strand
auaaaugucuugguaacga

SEQ ID NO: 1404650 - RNA, 19 nt, Homo sapiens
  misc_RNA (1)...(19): siRNA sense strand
ggaaguuggcuuuucguua

SEQ ID NO: 1404651 - RNA, 19 nt, Homo sapiens
  misc_RNA (1)...(19): siRNA sense strand
gaucaaguucauauagaug

SEQ ID NO: 1404652 - RNA, 19 nt, Homo sapiens
  misc_RNA (1)...(19): siRNA sense strand
uaaccaaccaggagaguuc

SEQ ID NO: 1404653 - RNA, 19 nt, Homo sapiens
  misc_RNA (1)...(19): siRNA sense strand
guauggagcguauaugaca

SEQ ID NO: 1404654 - RNA, 19 nt, Homo sapiens
  misc_RNA (1)...(19): siRNA sense strand
gauuauccauccuauacag

SEQ ID NO: 1404655 - RNA, 19 nt, Homo sapiens
  misc_RNA (1)...(19): siRNA sense strand
gaccuagcaaguccucaua

SEQ ID NO: 1404656 - RNA, 19 nt, Homo sapiens
  misc_RNA (1)...(19): siRNA sense strand
cgauuugggugugauguug

SEQ ID NO: 1404657 - RNA, 19 nt, Homo sapiens
  misc_RNA (1)...(19): siRNA sense strand
ggagauggagcgcuugaca

SEQ ID NO: 1404658 - RNA, 19 nt, Homo sapiens
  misc_RNA (1)...(19): siRNA sense strand
uugcgaagguucuacucua

SEQ ID NO: 1404659 - RNA, 19 nt, Homo sapiens
  misc_RNA (1)...(19): siRNA sense strand
caggagaguucgauaccau

SEQ ID NO: 1404660 - RNA, 19 nt, Homo sapiens
  misc_RNA (1)...(19): siRNA sense strand
ccagaucagcacaucagua

SEQ ID NO: 1404661 - RNA, 19 nt, Homo sapiens
  misc_RNA (1)...(19): siRNA sense strand
gcagccagccgucuacaca

SEQ ID NO: 1404662 - RNA, 19 nt, Homo sapiens
  misc_RNA (1)...(19): siRNA sense strand
cacuggaauuagaguauuu

SEQ ID NO: 1404663 - RNA, 19 nt, Homo sapiens
  misc_RNA (1)...(19): siRNA sense strand
accaagcacuggaauuaga

SEQ ID NO: 1404664 - RNA, 19 nt, Homo sapiens
  misc_RNA (1)...(19): siRNA sense strand
ggaugccuggcuacaguua

SEQ ID NO: 1404665 - RNA, 19 nt, Homo sapiens
  misc_RNA (1)...(19): siRNA sense strand
caaccaggagaguucgaua

SEQ ID NO: 1404666 - RNA, 19 nt, Homo sapiens
  misc_RNA (1)...(19): siRNA sense strand
gcacaguauuauucagcau

SEQ ID NO: 1404667 - RNA, 19 nt, Homo sapiens
  misc_RNA (1)...(19): siRNA sense strand
acagaaguauggcaaggau

SEQ ID NO: 1404668 - RNA, 19 nt, Homo sapiens
  misc_RNA (1)...(19): siRNA sense strand
gaaaugcaggaccuagcaa

SEQ ID NO: 1404669 - RNA, 19 nt, Homo sapiens
  misc_RNA (1)...(19): siRNA sense strand
gcacuaggaguaacugcau

SEQ ID NO: 1404670 - RNA, 19 nt, Homo sapiens
  misc_RNA (1)...(19): siRNA sense strand
auuauuagcacuaggagua

SEQ ID NO: 1404671 - RNA, 19 nt, Homo sapiens
  misc_RNA (1)...(19): siRNA sense strand
ccgcauggaagaaaugauu

SEQ ID NO: 1404672 - RNA, 19 nt, Homo sapiens
  misc_RNA (1)...(19): siRNA sense strand
accagcagcucaaacaaug

SEQ ID NO: 1404673 - RNA, 19 nt, Homo sapiens
  misc_RNA (1)...(19): siRNA sense strand
ggauauccagucacucaga

SEQ ID NO: 1404674 - RNA, 19 nt, Homo sapiens
  misc_RNA (1)...(19): siRNA sense strand
guaacugcauaaaugucuu

SEQ ID NO: 1404675 - RNA, 19 nt, Homo sapiens
  misc_RNA (1)...(19): siRNA sense strand
cguauaugacaucgaauaa

SEQ ID NO: 1404676 - RNA, 19 nt, Homo sapiens
  misc_RNA (1)...(19): siRNA sense strand
caggacagcccuacagcuu

SEQ ID NO: 1404677 - RNA, 19 nt, Homo sapiens
  misc_RNA (1)...(19): siRNA sense strand
gaaucucucccaggacuga

SEQ ID NO: 1404678 - RNA, 19 nt, Homo sapiens
  misc_RNA (1)...(19): siRNA sense strand
gugguucacaacaggauua

SEQ ID NO: 1404679 - RNA, 19 nt, Homo sapiens
  misc_RNA (1)...(19): siRNA sense strand
caucaucuacuauuuaugc

SEQ ID NO: 1404680 - RNA, 19 nt, Homo sapiens
  misc_RNA (1)...(19): siRNA sense strand
ggccagacaccuuauucuu

SEQ ID NO: 1404681 - RNA, 19 nt, Homo sapiens
  misc_RNA (1)...(19): siRNA sense strand
ccaggucuauggaaaugca

SEQ ID NO: 1404682 - RNA, 19 nt, Homo sapiens
  misc_RNA (1)...(19): siRNA sense strand
ccuccuggcucuccaccaa

SEQ ID NO: 1404683 - RNA, 19 nt, Homo sapiens
  misc_RNA (1)...(19): siRNA sense strand
gguucuacucuauaguuua

SEQ ID NO: 1404684 - RNA, 19 nt, Homo sapiens
  misc_RNA (1)...(19): siRNA sense strand
caaaugcacuuaagucuuu

SEQ ID NO: 1404685 - RNA, 19 nt, Homo sapiens
  misc_RNA (1)...(19): siRNA sense strand
gcacuuaagucuuuaucaa

SEQ ID NO: 1404686 - RNA, 19 nt, Homo sapiens
  misc_RNA (1)...(19): siRNA sense strand
gagagaaccuguaggaguu

SEQ ID NO: 1404687 - RNA, 19 nt, Homo sapiens
  misc_RNA (1)...(19): siRNA sense strand
gagcguauaugacaucgaa

SEQ ID NO: 1404688 - RNA, 19 nt, Homo sapiens
  misc_RNA (1)...(19): siRNA sense strand
gcaccaucaucuacuauuu

SEQ ID NO: 1404689 - RNA, 19 nt, Homo sapiens
  misc_RNA (1)...(19): siRNA sense strand
ccaccaagcacuggaauua

SEQ ID NO: 1404690 - RNA, 19 nt, Homo sapiens
  misc_RNA (1)...(19): siRNA sense strand
uagaugauguuuccucuga

SEQ ID NO: 1404691 - RNA, 19 nt, Homo sapiens
  misc_RNA (1)...(19): siRNA sense strand
gagaauauuuacagugcaa

SEQ ID NO: 1404692 - RNA, 19 nt, Homo sapiens
  misc_RNA (1)...(19): siRNA sense strand
gccagacaccuuauucuua

SEQ ID NO: 1404693 - RNA, 19 nt, Homo sapiens
  misc_RNA (1)...(19): siRNA sense strand
gcacuggaauuagaguauu

SEQ ID NO: 1404694 - RNA, 19 nt, Homo sapiens
  misc_RNA (1)...(19): siRNA sense strand
cugcauaaaugucuuggua

SEQ ID NO: 1404695 - RNA, 19 nt, Homo sapiens
  misc_RNA (1)...(19): siRNA sense strand
gaucagcacaucaguauuc

SEQ ID NO: 1404696 - RNA, 19 nt, Homo sapiens
  misc_RNA (1)...(19): siRNA sense strand
gauguuuccucugaugaua

SEQ ID NO: 1404697 - RNA, 19 nt, Homo sapiens
  misc_RNA (1)...(19): siRNA sense strand
gaauuucagugguucacaa

SEQ ID NO: 1404698 - RNA, 19 nt, Homo sapiens
  misc_RNA (1)...(19): siRNA sense strand
cagaguggcugccucaguu

SEQ ID NO: 1404699 - RNA, 19 nt, Homo sapiens
  misc_RNA (1)...(19): siRNA sense strand
aggaguaacugcauaaaug

SEQ ID NO: 1404700 - RNA, 19 nt, Homo sapiens
  misc_RNA (1)...(19): siRNA sense strand
gcuaacaaaugcacuuaag

SEQ ID NO: 1404701 - RNA, 19 nt, Homo sapiens
  misc_RNA (1)...(19): siRNA sense strand
caacugaucccagcacuug

SEQ ID NO: 1404702 - RNA, 19 nt, Homo sapiens
  misc_RNA (1)...(19): siRNA sense strand
gaugauguuuccucugaug

SEQ ID NO: 1404703 - RNA, 19 nt, Homo sapiens
  misc_RNA (1)...(19): siRNA sense strand
ggucuuaugcacagaagua

SEQ ID NO: 1404704 - RNA, 19 nt, Homo sapiens
  misc_RNA (1)...(19): siRNA sense strand
ccagacaccuuauucuuac

SEQ ID NO: 1404705 - RNA, 19 nt, Homo sapiens
  misc_RNA (1)...(19): siRNA sense strand
gcauaaaugucuugguaac

SEQ ID NO: 1404706 - RNA, 19 nt, Homo sapiens
  misc_RNA (1)...(19): siRNA sense strand
aaacagagcccuugaacag

SEQ ID NO: 1404707 - RNA, 19 nt, Homo sapiens
  misc_RNA (1)...(19): siRNA sense strand
gaugagagaaccuguagga

SEQ ID NO: 1404708 - RNA, 19 nt, Homo sapiens
  misc_RNA (1)...(19): siRNA sense strand
gcaaauaauucaguuucca

SEQ ID NO: 1404709 - RNA, 19 nt, Homo sapiens
  misc_RNA (1)...(19): siRNA sense strand
ggucaguaauuacaaguag

SEQ ID NO: 1404710 - RNA, 19 nt, Homo sapiens
  misc_RNA (1)...(19): siRNA sense strand
gaggauauccagucacuca

SEQ ID NO: 1404711 - RNA, 19 nt, Homo sapiens
  misc_RNA (1)...(19): siRNA sense strand
gagaguggacuuucccaaa

SEQ ID NO: 1404712 - RNA, 19 nt, Homo sapiens
  misc_RNA (1)...(19): siRNA sense strand
gugaucaaguucauauaga

SEQ ID NO: 1404713 - RNA, 19 nt, Homo sapiens
  misc_RNA (1)...(19): siRNA sense strand
cgaagguucuacucuauag

SEQ ID NO: 1404714 - RNA, 19 nt, Homo sapiens
  misc_RNA (1)...(19): siRNA sense strand
aaaccaguaugcacaguau

SEQ ID NO: 1404715 - RNA, 19 nt, Homo sapiens
  misc_RNA (1)...(19): siRNA sense strand
caaagaucuugaugagaga

SEQ ID NO: 1404716 - RNA, 19 nt, Homo sapiens
  misc_RNA (1)...(19): siRNA sense strand
caacguauggagcguauau

SEQ ID NO: 1404717 - RNA, 19 nt, Homo sapiens
  misc_RNA (1)...(19): siRNA sense strand
uauaacaccuacaagaaca

SEQ ID NO: 1404718 - RNA, 19 nt, Homo sapiens
  misc_RNA (1)...(19): siRNA sense strand
caccaucaucuacuauuua

SEQ ID NO: 1404719 - RNA, 19 nt, Homo sapiens
  misc_RNA (1)...(19): siRNA sense strand
guucuacucuauaguuuag

SEQ ID NO: 1404720 - RNA, 19 nt, Homo sapiens
  misc_RNA (1)...(19): siRNA sense strand
uaacaaaugcacuuaaguc

SEQ ID NO: 1404721 - RNA, 19 nt, Homo sapiens
  misc_RNA (1)...(19): siRNA sense strand
gcguauaugacaucgaaua

SEQ ID NO: 1404722 - RNA, 19 nt, Homo sapiens
  misc_RNA (1)...(19): siRNA sense strand
auggagcgcuugacacuuu

SEQ ID NO: 1404723 - RNA, 19 nt, Homo sapiens
  misc_RNA (1)...(19): siRNA sense strand
gaaguuggcuuuucguuac

SEQ ID NO: 1404724 - RNA, 19 nt, Homo sapiens
  misc_RNA (1)...(19): siRNA sense strand
caaacaaugucugccuaug

SEQ ID NO: 1404725 - RNA, 19 nt, Homo sapiens
  misc_RNA (1)...(19): siRNA sense strand
gcgaagguucuacucuaua

SEQ ID NO: 1404726 - RNA, 19 nt, Homo sapiens
  misc_RNA (1)...(19): siRNA sense strand
ggaguaacugcauaaaugu

SEQ ID NO: 1404727 - RNA, 19 nt, Homo sapiens
  misc_RNA (1)...(19): siRNA sense strand
ccucuucaaccucuacuua

SEQ ID NO: 1404728 - RNA, 19 nt, Homo sapiens
  misc_RNA (1)...(19): siRNA sense strand
ucaacgaauuucagugguu

SEQ ID NO: 1404729 - RNA, 19 nt, Homo sapiens
  misc_RNA (1)...(19): siRNA sense strand
caaaugccagguucuaguu

SEQ ID NO: 1404730 - RNA, 19 nt, Homo sapiens
  misc_RNA (1)...(19): siRNA sense strand
ggagugugaucaaguucau

SEQ ID NO: 1404731 - RNA, 19 nt, Homo sapiens
  misc_RNA (1)...(19): siRNA sense strand
acagauuccuggcuaacaa

SEQ ID NO: 1404732 - RNA, 19 nt, Homo sapiens
  misc_RNA (1)...(19): siRNA sense strand
cagaucagcacaucaguau

SEQ ID NO: 1404733 - RNA, 19 nt, Homo sapiens
  misc_RNA (1)...(19): siRNA sense strand
agaggagugugaucaaguu

SEQ ID NO: 1404734 - RNA, 19 nt, Homo sapiens
  misc_RNA (1)...(19): siRNA sense strand
ggacuccgcauggaagaaa

SEQ ID NO: 1404735 - RNA, 19 nt, Homo sapiens
  misc_RNA (1)...(19): siRNA sense strand
guaacgacaacucaacuga

SEQ ID NO: 1404736 - RNA, 19 nt, Homo sapiens
  misc_RNA (1)...(19): siRNA sense strand
caagcccuauccacacauu

SEQ ID NO: 1404737 - RNA, 19 nt, Homo sapiens
  misc_RNA (1)...(19): siRNA sense strand
ccacacccaucaaagaucu

SEQ ID NO: 1404738 - RNA, 19 nt, Homo sapiens
  misc_RNA (1)...(19): siRNA sense strand
caaccucuacuuaucaguu

SEQ ID NO: 1404739 - RNA, 19 nt, Homo sapiens
  misc_RNA (1)...(19): siRNA sense strand
ggaugaggaaguuggcuuu

SEQ ID NO: 1404740 - RNA, 19 nt, Homo sapiens
  misc_RNA (1)...(19): siRNA sense strand
ccuacagcuugcccacuua

SEQ ID NO: 1404741 - RNA, 19 nt, Homo sapiens
  misc_RNA (1)...(19): siRNA sense strand
auaaaugucuugguaacga

SEQ ID NO: 1404742 - RNA, 19 nt, Homo sapiens
  misc_RNA (1)...(19): siRNA sense strand
ggaaguuggcuuuucguua

SEQ ID NO: 1404743 - RNA, 19 nt, Homo sapiens
  misc_RNA (1)...(19): siRNA sense strand
gaucaaguucauauagaug

SEQ ID NO: 1404744 - RNA, 19 nt, Homo sapiens
  misc_RNA (1)...(19): siRNA sense strand
uaaccaaccaggagaguuc

SEQ ID NO: 1404745 - RNA, 19 nt, Homo sapiens
  misc_RNA (1)...(19): siRNA sense strand
guauggagcguauaugaca

SEQ ID NO: 1404746 - RNA, 19 nt, Homo sapiens
  misc_RNA (1)...(19): siRNA sense strand
gauuauccauccuauacag

SEQ ID NO: 1404747 - RNA, 19 nt, Homo sapiens
  misc_RNA (1)...(19): siRNA sense strand
cgauuugggugugauguug

SEQ ID NO: 1404748 - RNA, 19 nt, Homo sapiens
  misc_RNA (1)...(19): siRNA sense strand
caggagaguucgauaccau

SEQ ID NO: 1404749 - RNA, 19 nt, Homo sapiens
  misc_RNA (1)...(19): siRNA sense strand
uugcgaagguucuacucua

SEQ ID NO: 1404750 - RNA, 19 nt, Homo sapiens
  misc_RNA (1)...(19): siRNA sense strand
ggagauggagcgcuugaca

SEQ ID NO: 1404751 - RNA, 19 nt, Homo sapiens
  misc_RNA (1)...(19): siRNA sense strand
ccagaucagcacaucagua

SEQ ID NO: 1404752 - RNA, 19 nt, Homo sapiens
  misc_RNA (1)...(19): siRNA sense strand
gcagccagccgucuacaca

SEQ ID NO: 1404753 - RNA, 19 nt, Homo sapiens
  misc_RNA (1)...(19): siRNA sense strand
cacuggaauuagaguauuu

SEQ ID NO: 1404754 - RNA, 19 nt, Homo sapiens
  misc_RNA (1)...(19): siRNA sense strand
accaagcacuggaauuaga

SEQ ID NO: 1404755 - RNA, 19 nt, Homo sapiens
  misc_RNA (1)...(19): siRNA sense strand
ggaugccuggcuacaguua

SEQ ID NO: 1404756 - RNA, 19 nt, Homo sapiens
  misc_RNA (1)...(19): siRNA sense strand
caaccaggagaguucgaua

SEQ ID NO: 1404757 - RNA, 19 nt, Homo sapiens
  misc_RNA (1)...(19): siRNA sense strand
gcacaguauuauucagcau

SEQ ID NO: 1404758 - RNA, 19 nt, Homo sapiens
  misc_RNA (1)...(19): siRNA sense strand
acagaaguauggcaaggau

SEQ ID NO: 1404759 - RNA, 19 nt, Homo sapiens
  misc_RNA (1)...(19): siRNA sense strand
gcacuaggaguaacugcau

SEQ ID NO: 1404760 - RNA, 19 nt, Homo sapiens
  misc_RNA (1)...(19): siRNA sense strand
auuauuagcacuaggagua

SEQ ID NO: 1404761 - RNA, 19 nt, Homo sapiens
  misc_RNA (1)...(19): siRNA sense strand
ccgcauggaagaaaugauu

SEQ ID NO: 1404762 - RNA, 19 nt, Homo sapiens
  misc_RNA (1)...(19): siRNA sense strand
cguauaugacaucgaauaa

SEQ ID NO: 1404763 - RNA, 19 nt, Homo sapiens
  misc_RNA (1)...(19): siRNA sense strand
ggauauccagucacucaga

SEQ ID NO: 1404764 - RNA, 19 nt, Homo sapiens
  misc_RNA (1)...(19): siRNA sense strand
guaacugcauaaaugucuu

SEQ ID NO: 1404765 - RNA, 19 nt, Homo sapiens
  misc_RNA (1)...(19): siRNA sense strand
accagcagcucaaacaaug

SEQ ID NO: 1404766 - RNA, 19 nt, Homo sapiens
  misc_RNA (1)...(19): siRNA sense strand
caggacagcccuacagcuu

SEQ ID NO: 1404767 - RNA, 19 nt, Homo sapiens
  misc_RNA (1)...(19): siRNA sense strand
gaaucucucccaggacuga

SEQ ID NO: 1404768 - RNA, 19 nt, Homo sapiens
  misc_RNA (1)...(19): siRNA sense strand
gugguucacaacaggauua

SEQ ID NO: 1404769 - RNA, 19 nt, Homo sapiens
  misc_RNA (1)...(19): siRNA sense strand
caucaucuacuauuuaugc

SEQ ID NO: 1404770 - RNA, 19 nt, Homo sapiens
  misc_RNA (1)...(19): siRNA sense strand
ggccagacaccuuauucuu

SEQ ID NO: 1404771 - RNA, 19 nt, Homo sapiens
  misc_RNA (1)...(19): siRNA sense strand
gggucaaaguccagaggaa

SEQ ID NO: 1404772 - RNA, 19 nt, Homo sapiens
  misc_RNA (1)...(19): siRNA sense strand
ccuccuggcucuccaccaa

SEQ ID NO: 1404773 - RNA, 19 nt, Homo sapiens
  misc_RNA (1)...(19): siRNA sense strand
gguucuacucuauaguuua

SEQ ID NO: 1404774 - RNA, 19 nt, Homo sapiens
  misc_RNA (1)...(19): siRNA sense strand
accaguaugcacaguauua

SEQ ID NO: 1404775 - RNA, 19 nt, Homo sapiens
  misc_RNA (1)...(19): siRNA sense strand
ucaauuauuagcacuagga

SEQ ID NO: 1404776 - RNA, 19 nt, Homo sapiens
  misc_RNA (1)...(19): siRNA sense strand
gaguggacuuucccaaacu

SEQ ID NO: 1404777 - RNA, 19 nt, Homo sapiens
  misc_RNA (1)...(19): siRNA sense strand
guuaagggcagagauugaa

SEQ ID NO: 1404778 - RNA, 19 nt, Homo sapiens
  misc_RNA (1)...(19): siRNA sense strand
ugaccuggagcguguguuu

SEQ ID NO: 1404779 - RNA, 19 nt, Homo sapiens
  misc_RNA (1)...(19): siRNA sense strand
acaguauuauucagcauca

SEQ ID NO: 1404780 - RNA, 19 nt, Homo sapiens
  misc_RNA (1)...(19): siRNA sense strand
ggacuuucccaaacucagu

SEQ ID NO: 1404781 - RNA, 19 nt, Homo sapiens
  misc_RNA (1)...(19): siRNA sense strand
aacaaugucugccuaugca

SEQ ID NO: 1404782 - RNA, 19 nt, Homo sapiens
  misc_RNA (1)...(19): siRNA sense strand
aacgacaacucaacugauc

SEQ ID NO: 1404783 - RNA, 19 nt, Homo sapiens
  misc_RNA (1)...(19): siRNA sense strand
cacuaggaguaacugcaua

SEQ ID NO: 1404784 - RNA, 19 nt, Homo sapiens
  misc_RNA (1)...(19): siRNA sense strand
caaaugcacuuaagucuuu

SEQ ID NO: 1404785 - RNA, 19 nt, Homo sapiens
  misc_RNA (1)...(19): siRNA sense strand
gcacaucaguuacuacaaa

SEQ ID NO: 1404786 - RNA, 19 nt, Homo sapiens
  misc_RNA (1)...(19): siRNA sense strand
gcacuuaagucuuuaucaa

SEQ ID NO: 1404787 - RNA, 19 nt, Homo sapiens
  misc_RNA (1)...(19): siRNA sense strand
gagagaaccuguaggaguu

SEQ ID NO: 1404788 - RNA, 19 nt, Homo sapiens
  misc_RNA (1)...(19): siRNA sense strand
gagcguauaugacaucgaa

SEQ ID NO: 1404789 - RNA, 19 nt, Homo sapiens
  misc_RNA (1)...(19): siRNA sense strand
gcaccaucaucuacuauuu

SEQ ID NO: 1404790 - RNA, 19 nt, Homo sapiens
  misc_RNA (1)...(19): siRNA sense strand
ggaagacucccaggauuua

SEQ ID NO: 1404791 - RNA, 19 nt, Homo sapiens
  misc_RNA (1)...(19): siRNA sense strand
ccaccaagcacuggaauua

SEQ ID NO: 1404792 - RNA, 19 nt, Homo sapiens
  misc_RNA (1)...(19): siRNA sense strand
uagaugauguuuccucuga

SEQ ID NO: 1404793 - RNA, 19 nt, Homo sapiens
  misc_RNA (1)...(19): siRNA sense strand
gagaauauuuacagugcaa

SEQ ID NO: 1404794 - RNA, 19 nt, Homo sapiens
  misc_RNA (1)...(19): siRNA sense strand
gccagacaccuuauucuua

SEQ ID NO: 1404795 - RNA, 19 nt, Homo sapiens
  misc_RNA (1)...(19): siRNA sense strand
gcacuggaauuagaguauu

SEQ ID NO: 1404796 - RNA, 19 nt, Homo sapiens
  misc_RNA (1)...(19): siRNA sense strand
cugcauaaaugucuuggua

SEQ ID NO: 1404797 - RNA, 19 nt, Homo sapiens
  misc_RNA (1)...(19): siRNA sense strand
gaucagcacaucaguauuc

SEQ ID NO: 1404798 - RNA, 19 nt, Homo sapiens
  misc_RNA (1)...(19): siRNA sense strand
gauguuuccucugaugaua

SEQ ID NO: 1404799 - RNA, 19 nt, Homo sapiens
  misc_RNA (1)...(19): siRNA sense strand
gaauuucagugguucacaa

SEQ ID NO: 1404800 - RNA, 19 nt, Homo sapiens
  misc_RNA (1)...(19): siRNA sense strand
cagaguggcugccucaguu

SEQ ID NO: 1404801 - RNA, 19 nt, Homo sapiens
  misc_RNA (1)...(19): siRNA sense strand
aggaguaacugcauaaaug

SEQ ID NO: 1404802 - RNA, 19 nt, Homo sapiens
  misc_RNA (1)...(19): siRNA sense strand
gcuaacaaaugcacuuaag

SEQ ID NO: 1404803 - RNA, 19 nt, Homo sapiens
  misc_RNA (1)...(19): siRNA sense strand
caacugaucccagcacuug

SEQ ID NO: 1404804 - RNA, 19 nt, Homo sapiens
  misc_RNA (1)...(19): siRNA sense strand
agaaucagauguuucacaa

SEQ ID NO: 1404805 - RNA, 19 nt, Homo sapiens
  misc_RNA (1)...(19): siRNA sense strand
gaugauguuuccucugaug

SEQ ID NO: 1404806 - RNA, 19 nt, Homo sapiens
  misc_RNA (1)...(19): siRNA sense strand
ggucuuaugcacagaagua

SEQ ID NO: 1404807 - RNA, 19 nt, Homo sapiens
  misc_RNA (1)...(19): siRNA sense strand
aaucagauguuucacaauc

SEQ ID NO: 1404808 - RNA, 19 nt, Homo sapiens
  misc_RNA (1)...(19): siRNA sense strand
gcauaaaugucuugguaac

SEQ ID NO: 1404809 - RNA, 19 nt, Homo sapiens
  misc_RNA (1)...(19): siRNA sense strand
gaugagagaaccuguagga

SEQ ID NO: 1404810 - RNA, 19 nt, Homo sapiens
  misc_RNA (1)...(19): siRNA sense strand
gcaaauaauucaguuucca

SEQ ID NO: 1404811 - RNA, 19 nt, Homo sapiens
  misc_RNA (1)...(19): siRNA sense strand
ccagacaccuuauucuuac

SEQ ID NO: 1404812 - RNA, 19 nt, Homo sapiens
  misc_RNA (1)...(19): siRNA sense strand
aaacagagcccuugaacag

SEQ ID NO: 1404813 - RNA, 19 nt, Homo sapiens
  misc_RNA (1)...(19): siRNA sense strand
ggucaguaauuacaaguag

SEQ ID NO: 1404814 - RNA, 19 nt, Homo sapiens
  misc_RNA (1)...(19): siRNA sense strand
gaggauauccagucacuca

SEQ ID NO: 1404815 - RNA, 19 nt, Homo sapiens
  misc_RNA (1)...(19): siRNA sense strand
gagaguggacuuucccaaa

SEQ ID NO: 1404816 - RNA, 19 nt, Homo sapiens
  misc_RNA (1)...(19): siRNA sense strand
gugaucaaguucauauaga

SEQ ID NO: 1404817 - RNA, 19 nt, Homo sapiens
  misc_RNA (1)...(19): siRNA sense strand
cgaagguucuacucuauag

SEQ ID NO: 1404818 - RNA, 19 nt, Homo sapiens
  misc_RNA (1)...(19): siRNA sense strand
aaaccaguaugcacaguau

SEQ ID NO: 1404819 - RNA, 19 nt, Homo sapiens
  misc_RNA (1)...(19): siRNA sense strand
caaagaucuugaugagaga

SEQ ID NO: 1404820 - RNA, 19 nt, Homo sapiens
  misc_RNA (1)...(19): siRNA sense strand
caacguauggagcguauau

SEQ ID NO: 1404821 - RNA, 19 nt, Homo sapiens
  misc_RNA (1)...(19): siRNA sense strand
uauaacaccuacaagaaca

SEQ ID NO: 1404822 - RNA, 19 nt, Homo sapiens
  misc_RNA (1)...(19): siRNA sense strand
caccaucaucuacuauuua

SEQ ID NO: 1404823 - RNA, 19 nt, Homo sapiens
  misc_RNA (1)...(19): siRNA sense strand
guucuacucuauaguuuag

SEQ ID NO: 1404824 - RNA, 19 nt, Homo sapiens
  misc_RNA (1)...(19): siRNA sense strand
uaacaaaugcacuuaaguc

SEQ ID NO: 1404825 - RNA, 19 nt, Homo sapiens
  misc_RNA (1)...(19): siRNA sense strand
gcguauaugacaucgaaua

SEQ ID NO: 1404826 - RNA, 19 nt, Homo sapiens
  misc_RNA (1)...(19): siRNA sense strand
auggagcgcuugacacuuu

SEQ ID NO: 1404827 - RNA, 19 nt, Homo sapiens
  misc_RNA (1)...(19): siRNA sense strand
gaaguuggcuuuucguuac

SEQ ID NO: 1404828 - RNA, 19 nt, Homo sapiens
  misc_RNA (1)...(19): siRNA sense strand
gcacagaaucagauguuuc

SEQ ID NO: 1404829 - RNA, 19 nt, Homo sapiens
  misc_RNA (1)...(19): siRNA sense strand
caaacaaugucugccuaug

SEQ ID NO: 1404830 - RNA, 19 nt, Homo sapiens
  misc_RNA (1)...(19): siRNA sense strand
gcgaagguucuacucuaua

SEQ ID NO: 1404831 - RNA, 19 nt, Homo sapiens
  misc_RNA (1)...(19): siRNA sense strand
ggaguaacugcauaaaugu

SEQ ID NO: 1404832 - RNA, 19 nt, Homo sapiens
  misc_RNA (1)...(19): siRNA sense strand
ccucuucaaccucuacuua

SEQ ID NO: 1404833 - RNA, 19 nt, Homo sapiens
  misc_RNA (1)...(19): siRNA sense strand
ucaacgaauuucagugguu

SEQ ID NO: 1404834 - RNA, 19 nt, Homo sapiens
  misc_RNA (1)...(19): siRNA sense strand
caaaugccagguucuaguu

SEQ ID NO: 1404835 - RNA, 19 nt, Homo sapiens
  misc_RNA (1)...(19): siRNA sense strand
ggagugugaucaaguucau

SEQ ID NO: 1404836 - RNA, 19 nt, Homo sapiens
  misc_RNA (1)...(19): siRNA sense strand
acagauuccuggcuaacaa

SEQ ID NO: 1404837 - RNA, 19 nt, Homo sapiens
  misc_RNA (1)...(19): siRNA sense strand
cagaucagcacaucaguau

SEQ ID NO: 1404838 - RNA, 19 nt, Homo sapiens
  misc_RNA (1)...(19): siRNA sense strand
agaggagugugaucaaguu

SEQ ID NO: 1404839 - RNA, 19 nt, Homo sapiens
  misc_RNA (1)...(19): siRNA sense strand
ggacuccgcauggaagaaa

SEQ ID NO: 1404840 - RNA, 19 nt, Homo sapiens
  misc_RNA (1)...(19): siRNA sense strand
guaacgacaacucaacuga

SEQ ID NO: 1404841 - RNA, 19 nt, Homo sapiens
  misc_RNA (1)...(19): siRNA sense strand
caagcccuauccacacauu

SEQ ID NO: 1404842 - RNA, 19 nt, Homo sapiens
  misc_RNA (1)...(19): siRNA sense strand
ccacacccaucaaagaucu

SEQ ID NO: 1404843 - RNA, 19 nt, Homo sapiens
  misc_RNA (1)...(19): siRNA sense strand
gaagacucccaggauuuaa

SEQ ID NO: 1404844 - RNA, 19 nt, Homo sapiens
  misc_RNA (1)...(19): siRNA sense strand
ggaugaggaaguuggcuuu

SEQ ID NO: 1404845 - RNA, 19 nt, Homo sapiens
  misc_RNA (1)...(19): siRNA sense strand
caaccucuacuuaucaguu

SEQ ID NO: 1404846 - RNA, 19 nt, Homo sapiens
  misc_RNA (1)...(19): siRNA sense strand
ggaaaugcaggaccuagca

SEQ ID NO: 1404847 - RNA, 19 nt, Homo sapiens
  misc_RNA (1)...(19): siRNA sense strand
ccuacagcuugcccacuua

SEQ ID NO: 1404848 - RNA, 19 nt, Homo sapiens
  misc_RNA (1)...(19): siRNA sense strand
ucucagaauuccaggucua

SEQ ID NO: 1404849 - RNA, 19 nt, Homo sapiens
  misc_RNA (1)...(19): siRNA sense strand
auaaaugucuugguaacga

SEQ ID NO: 1404850 - RNA, 19 nt, Homo sapiens
  misc_RNA (1)...(19): siRNA sense strand
ggaaguuggcuuuucguua

SEQ ID NO: 1404851 - RNA, 19 nt, Homo sapiens
  misc_RNA (1)...(19): siRNA sense strand
gaucaaguucauauagaug

SEQ ID NO: 1404852 - RNA, 19 nt, Homo sapiens
  misc_RNA (1)...(19): siRNA sense strand
uaaccaaccaggagaguuc

SEQ ID NO: 1404853 - RNA, 19 nt, Homo sapiens
  misc_RNA (1)...(19): siRNA sense strand
guauggagcguauaugaca

SEQ ID NO: 1404854 - RNA, 19 nt, Homo sapiens
  misc_RNA (1)...(19): siRNA sense strand
gauuauccauccuauacag

SEQ ID NO: 1404855 - RNA, 19 nt, Homo sapiens
  misc_RNA (1)...(19): siRNA sense strand
gaccuagcaaguccucaua

SEQ ID NO: 1404856 - RNA, 19 nt, Homo sapiens
  misc_RNA (1)...(19): siRNA sense strand
cgauuugggugugauguug

SEQ ID NO: 1404857 - RNA, 19 nt, Homo sapiens
  misc_RNA (1)...(19): siRNA sense strand
ggagauggagcgcuugaca

SEQ ID NO: 1404858 - RNA, 19 nt, Homo sapiens
  misc_RNA (1)...(19): siRNA sense strand
uugcgaagguucuacucua

SEQ ID NO: 1404859 - RNA, 19 nt, Homo sapiens
  misc_RNA (1)...(19): siRNA sense strand
caggagaguucgauaccau

SEQ ID NO: 1404860 - RNA, 19 nt, Homo sapiens
  misc_RNA (1)...(19): siRNA sense strand
ccagaucagcacaucagua

SEQ ID NO: 1404861 - RNA, 19 nt, Homo sapiens
  misc_RNA (1)...(19): siRNA sense strand
gcagccagccgucuacaca

SEQ ID NO: 1404862 - RNA, 19 nt, Homo sapiens
  misc_RNA (1)...(19): siRNA sense strand
cacuggaauuagaguauuu

SEQ ID NO: 1404863 - RNA, 19 nt, Homo sapiens
  misc_RNA (1)...(19): siRNA sense strand
accaagcacuggaauuaga

SEQ ID NO: 1404864 - RNA, 19 nt, Homo sapiens
  misc_RNA (1)...(19): siRNA sense strand
ggaugccuggcuacaguua

SEQ ID NO: 1404865 - RNA, 19 nt, Homo sapiens
  misc_RNA (1)...(19): siRNA sense strand
caaccaggagaguucgaua

SEQ ID NO: 1404866 - RNA, 19 nt, Homo sapiens
  misc_RNA (1)...(19): siRNA sense strand
gcacaguauuauucagcau

SEQ ID NO: 1404867 - RNA, 19 nt, Homo sapiens
  misc_RNA (1)...(19): siRNA sense strand
acagaaguauggcaaggau

SEQ ID NO: 1404868 - RNA, 19 nt, Homo sapiens
  misc_RNA (1)...(19): siRNA sense strand
gaaaugcaggaccuagcaa

SEQ ID NO: 1404869 - RNA, 19 nt, Homo sapiens
  misc_RNA (1)...(19): siRNA sense strand
gcacuaggaguaacugcau

SEQ ID NO: 1404870 - RNA, 19 nt, Homo sapiens
  misc_RNA (1)...(19): siRNA sense strand
auuauuagcacuaggagua

SEQ ID NO: 1404871 - RNA, 19 nt, Homo sapiens
  misc_RNA (1)...(19): siRNA sense strand
ccgcauggaagaaaugauu

SEQ ID NO: 1404872 - RNA, 19 nt, Homo sapiens
  misc_RNA (1)...(19): siRNA sense strand
accagcagcucaaacaaug

SEQ ID NO: 1404873 - RNA, 19 nt, Homo sapiens
  misc_RNA (1)...(19): siRNA sense strand
ggauauccagucacucaga

SEQ ID NO: 1404874 - RNA, 19 nt, Homo sapiens
  misc_RNA (1)...(19): siRNA sense strand
guaacugcauaaaugucuu

SEQ ID NO: 1404875 - RNA, 19 nt, Homo sapiens
  misc_RNA (1)...(19): siRNA sense strand
cguauaugacaucgaauaa

SEQ ID NO: 1404876 - RNA, 19 nt, Homo sapiens
  misc_RNA (1)...(19): siRNA sense strand
caggacagcccuacagcuu

SEQ ID NO: 1404877 - RNA, 19 nt, Homo sapiens
  misc_RNA (1)...(19): siRNA sense strand
gaaucucucccaggacuga

SEQ ID NO: 1404878 - RNA, 19 nt, Homo sapiens
  misc_RNA (1)...(19): siRNA sense strand
gugguucacaacaggauua

SEQ ID NO: 1404879 - RNA, 19 nt, Homo sapiens
  misc_RNA (1)...(19): siRNA sense strand
caucaucuacuauuuaugc

SEQ ID NO: 1404880 - RNA, 19 nt, Homo sapiens
  misc_RNA (1)...(19): siRNA sense strand
ggccagacaccuuauucuu

SEQ ID NO: 1404881 - RNA, 19 nt, Homo sapiens
  misc_RNA (1)...(19): siRNA sense strand
ccaggucuauggaaaugca

SEQ ID NO: 1404882 - RNA, 19 nt, Homo sapiens
  misc_RNA (1)...(19): siRNA sense strand
ccuccuggcucuccaccaa

SEQ ID NO: 1404883 - RNA, 19 nt, Homo sapiens
  misc_RNA (1)...(19): siRNA sense strand
gguucuacucuauaguuua

SEQ ID NO: 1404884 - RNA, 19 nt, Homo sapiens
  misc_RNA (1)...(19): siRNA sense strand
caaaugcacuuaagucuuu

SEQ ID NO: 1404885 - RNA, 19 nt, Homo sapiens
  misc_RNA (1)...(19): siRNA sense strand
gcacaucaguuacuacaaa

SEQ ID NO: 1404886 - RNA, 19 nt, Homo sapiens
  misc_RNA (1)...(19): siRNA sense strand
gcacuuaagucuuuaucaa

SEQ ID NO: 1404887 - RNA, 19 nt, Homo sapiens
  misc_RNA (1)...(19): siRNA sense strand
gagagaaccuguaggaguu

SEQ ID NO: 1404888 - RNA, 19 nt, Homo sapiens
  misc_RNA (1)...(19): siRNA sense strand
gagcguauaugacaucgaa

SEQ ID NO: 1404889 - RNA, 19 nt, Homo sapiens
  misc_RNA (1)...(19): siRNA sense strand
gcaccaucaucuacuauuu

SEQ ID NO: 1404890 - RNA, 19 nt, Homo sapiens
  misc_RNA (1)...(19): siRNA sense strand
ggaagacucccaggauuua

SEQ ID NO: 1404891 - RNA, 19 nt, Homo sapiens
  misc_RNA (1)...(19): siRNA sense strand
ccaccaagcacuggaauua

SEQ ID NO: 1404892 - RNA, 19 nt, Homo sapiens
  misc_RNA (1)...(19): siRNA sense strand
uagaugauguuuccucuga

SEQ ID NO: 1404893 - RNA, 19 nt, Homo sapiens
  misc_RNA (1)...(19): siRNA sense strand
gagaauauuuacagugcaa

SEQ ID NO: 1404894 - RNA, 19 nt, Homo sapiens
  misc_RNA (1)...(19): siRNA sense strand
gccagacaccuuauucuua

SEQ ID NO: 1404895 - RNA, 19 nt, Homo sapiens
  misc_RNA (1)...(19): siRNA sense strand
gcacuggaauuagaguauu

SEQ ID NO: 1404896 - RNA, 19 nt, Homo sapiens
  misc_RNA (1)...(19): siRNA sense strand
cugcauaaaugucuuggua

SEQ ID NO: 1404897 - RNA, 19 nt, Homo sapiens
  misc_RNA (1)...(19): siRNA sense strand
gaucagcacaucaguauuc

SEQ ID NO: 1404898 - RNA, 19 nt, Homo sapiens
  misc_RNA (1)...(19): siRNA sense strand
gauguuuccucugaugaua

SEQ ID NO: 1404899 - RNA, 19 nt, Homo sapiens
  misc_RNA (1)...(19): siRNA sense strand
gaauuucagugguucacaa

SEQ ID NO: 1404900 - RNA, 19 nt, Homo sapiens
  misc_RNA (1)...(19): siRNA sense strand
cagaguggcugccucaguu

SEQ ID NO: 1404901 - RNA, 19 nt, Homo sapiens
  misc_RNA (1)...(19): siRNA sense strand
aggaguaacugcauaaaug

SEQ ID NO: 1404902 - RNA, 19 nt, Homo sapiens
  misc_RNA (1)...(19): siRNA sense strand
gcuaacaaaugcacuuaag

SEQ ID NO: 1404903 - RNA, 19 nt, Homo sapiens
  misc_RNA (1)...(19): siRNA sense strand
caacugaucccagcacuug

SEQ ID NO: 1404904 - RNA, 19 nt, Homo sapiens
  misc_RNA (1)...(19): siRNA sense strand
agaaucagauguuucacaa

SEQ ID NO: 1404905 - RNA, 19 nt, Homo sapiens
  misc_RNA (1)...(19): siRNA sense strand
gaugauguuuccucugaug

SEQ ID NO: 1404906 - RNA, 19 nt, Homo sapiens
  misc_RNA (1)...(19): siRNA sense strand
ggucuuaugcacagaagua

SEQ ID NO: 1404907 - RNA, 19 nt, Homo sapiens
  misc_RNA (1)...(19): siRNA sense strand
aaucagauguuucacaauc

SEQ ID NO: 1404908 - RNA, 19 nt, Homo sapiens
  misc_RNA (1)...(19): siRNA sense strand
gcauaaaugucuugguaac

SEQ ID NO: 1404909 - RNA, 19 nt, Homo sapiens
  misc_RNA (1)...(19): siRNA sense strand
gaugagagaaccuguagga

SEQ ID NO: 1404910 - RNA, 19 nt, Homo sapiens
  misc_RNA (1)...(19): siRNA sense strand
gcaaauaauucaguuucca

SEQ ID NO: 1404911 - RNA, 19 nt, Homo sapiens
  misc_RNA (1)...(19): siRNA sense strand
ccagacaccuuauucuuac

SEQ ID NO: 1404912 - RNA, 19 nt, Homo sapiens
  misc_RNA (1)...(19): siRNA sense strand
aaacagagcccuugaacag

SEQ ID NO: 1404913 - RNA, 19 nt, Homo sapiens
  misc_RNA (1)...(19): siRNA sense strand
ggucaguaauuacaaguag

SEQ ID NO: 1404914 - RNA, 19 nt, Homo sapiens
  misc_RNA (1)...(19): siRNA sense strand
gaggauauccagucacuca

SEQ ID NO: 1404915 - RNA, 19 nt, Homo sapiens
  misc_RNA (1)...(19): siRNA sense strand
gagaguggacuuucccaaa

SEQ ID NO: 1404916 - RNA, 19 nt, Homo sapiens
  misc_RNA (1)...(19): siRNA sense strand
gugaucaaguucauauaga

SEQ ID NO: 1404917 - RNA, 19 nt, Homo sapiens
  misc_RNA (1)...(19): siRNA sense strand
cgaagguucuacucuauag

SEQ ID NO: 1404918 - RNA, 19 nt, Homo sapiens
  misc_RNA (1)...(19): siRNA sense strand
aaaccaguaugcacaguau

SEQ ID NO: 1404919 - RNA, 19 nt, Homo sapiens
  misc_RNA (1)...(19): siRNA sense strand
caaagaucuugaugagaga

SEQ ID NO: 1404920 - RNA, 19 nt, Homo sapiens
  misc_RNA (1)...(19): siRNA sense strand
caacguauggagcguauau

SEQ ID NO: 1404921 - RNA, 19 nt, Homo sapiens
  misc_RNA (1)...(19): siRNA sense strand
uauaacaccuacaagaaca

SEQ ID NO: 1404922 - RNA, 19 nt, Homo sapiens
  misc_RNA (1)...(19): siRNA sense strand
caccaucaucuacuauuua

SEQ ID NO: 1404923 - RNA, 19 nt, Homo sapiens
  misc_RNA (1)...(19): siRNA sense strand
guucuacucuauaguuuag

SEQ ID NO: 1404924 - RNA, 19 nt, Homo sapiens
  misc_RNA (1)...(19): siRNA sense strand
uaacaaaugcacuuaaguc

SEQ ID NO: 1404925 - RNA, 19 nt, Homo sapiens
  misc_RNA (1)...(19): siRNA sense strand
gcguauaugacaucgaaua

SEQ ID NO: 1404926 - RNA, 19 nt, Homo sapiens
  misc_RNA (1)...(19): siRNA sense strand
auggagcgcuugacacuuu

SEQ ID NO: 1404927 - RNA, 19 nt, Homo sapiens
  misc_RNA (1)...(19): siRNA sense strand
gaaguuggcuuuucguuac

SEQ ID NO: 1404928 - RNA, 19 nt, Homo sapiens
  misc_RNA (1)...(19): siRNA sense strand
gcacagaaucagauguuuc

SEQ ID NO: 1404929 - RNA, 19 nt, Homo sapiens
  misc_RNA (1)...(19): siRNA sense strand
caaacaaugucugccuaug

SEQ ID NO: 1404930 - RNA, 19 nt, Homo sapiens
  misc_RNA (1)...(19): siRNA sense strand
gcgaagguucuacucuaua

SEQ ID NO: 1404931 - RNA, 19 nt, Homo sapiens
  misc_RNA (1)...(19): siRNA sense strand
ggaguaacugcauaaaugu

SEQ ID NO: 1404932 - RNA, 19 nt, Homo sapiens
  misc_RNA (1)...(19): siRNA sense strand
ccucuucaaccucuacuua

SEQ ID NO: 1404933 - RNA, 19 nt, Homo sapiens
  misc_RNA (1)...(19): siRNA sense strand
ucaacgaauuucagugguu

SEQ ID NO: 1404934 - RNA, 19 nt, Homo sapiens
  misc_RNA (1)...(19): siRNA sense strand
caaaugccagguucuaguu

SEQ ID NO: 1404935 - RNA, 19 nt, Homo sapiens
  misc_RNA (1)...(19): siRNA sense strand
ggagugugaucaaguucau

SEQ ID NO: 1404936 - RNA, 19 nt, Homo sapiens
  misc_RNA (1)...(19): siRNA sense strand
acagauuccuggcuaacaa

SEQ ID NO: 1404937 - RNA, 19 nt, Homo sapiens
  misc_RNA (1)...(19): siRNA sense strand
cagaucagcacaucaguau

SEQ ID NO: 1404938 - RNA, 19 nt, Homo sapiens
  misc_RNA (1)...(19): siRNA sense strand
agaggagugugaucaaguu

SEQ ID NO: 1404939 - RNA, 19 nt, Homo sapiens
  misc_RNA (1)...(19): siRNA sense strand
ggacuccgcauggaagaaa

SEQ ID NO: 1404940 - RNA, 19 nt, Homo sapiens
  misc_RNA (1)...(19): siRNA sense strand
guaacgacaacucaacuga

SEQ ID NO: 1404941 - RNA, 19 nt, Homo sapiens
  misc_RNA (1)...(19): siRNA sense strand
caagcccuauccacacauu

SEQ ID NO: 1404942 - RNA, 19 nt, Homo sapiens
  misc_RNA (1)...(19): siRNA sense strand
ccacacccaucaaagaucu

SEQ ID NO: 1404943 - RNA, 19 nt, Homo sapiens
  misc_RNA (1)...(19): siRNA sense strand
gaagacucccaggauuuaa

SEQ ID NO: 1404944 - RNA, 19 nt, Homo sapiens
  misc_RNA (1)...(19): siRNA sense strand
ggaugaggaaguuggcuuu

SEQ ID NO: 1404945 - RNA, 19 nt, Homo sapiens
  misc_RNA (1)...(19): siRNA sense strand
caaccucuacuuaucaguu

SEQ ID NO: 1404946 - RNA, 19 nt, Homo sapiens
  misc_RNA (1)...(19): siRNA sense strand
ggaaaugcaggaccuagca

SEQ ID NO: 1404947 - RNA, 19 nt, Homo sapiens
  misc_RNA (1)...(19): siRNA sense strand
ccuacagcuugcccacuua

SEQ ID NO: 1404948 - RNA, 19 nt, Homo sapiens
  misc_RNA (1)...(19): siRNA sense strand
ucucagaauuccaggucua

SEQ ID NO: 1404949 - RNA, 19 nt, Homo sapiens
  misc_RNA (1)...(19): siRNA sense strand
auaaaugucuugguaacga

SEQ ID NO: 1404950 - RNA, 19 nt, Homo sapiens
  misc_RNA (1)...(19): siRNA sense strand
ggaaguuggcuuuucguua

SEQ ID NO: 1404951 - RNA, 19 nt, Homo sapiens
  misc_RNA (1)...(19): siRNA sense strand
gaucaaguucauauagaug

SEQ ID NO: 1404952 - RNA, 19 nt, Homo sapiens
  misc_RNA (1)...(19): siRNA sense strand
uaaccaaccaggagaguuc

SEQ ID NO: 1404953 - RNA, 19 nt, Homo sapiens
  misc_RNA (1)...(19): siRNA sense strand
guauggagcguauaugaca

SEQ ID NO: 1404954 - RNA, 19 nt, Homo sapiens
  misc_RNA (1)...(19): siRNA sense strand
gauuauccauccuauacag

SEQ ID NO: 1404955 - RNA, 19 nt, Homo sapiens
  misc_RNA (1)...(19): siRNA sense strand
gaccuagcaaguccucaua

SEQ ID NO: 1404956 - RNA, 19 nt, Homo sapiens
  misc_RNA (1)...(19): siRNA sense strand
cgauuugggugugauguug

SEQ ID NO: 1404957 - RNA, 19 nt, Homo sapiens
  misc_RNA (1)...(19): siRNA sense strand
ggagauggagcgcuugaca

SEQ ID NO: 1404958 - RNA, 19 nt, Homo sapiens
  misc_RNA (1)...(19): siRNA sense strand
uugcgaagguucuacucua

SEQ ID NO: 1404959 - RNA, 19 nt, Homo sapiens
  misc_RNA (1)...(19): siRNA sense strand
caggagaguucgauaccau

SEQ ID NO: 1404960 - RNA, 19 nt, Homo sapiens
  misc_RNA (1)...(19): siRNA sense strand
ccagaucagcacaucagua

SEQ ID NO: 1404961 - RNA, 19 nt, Homo sapiens
  misc_RNA (1)...(19): siRNA sense strand
gcagccagccgucuacaca

SEQ ID NO: 1404962 - RNA, 19 nt, Homo sapiens
  misc_RNA (1)...(19): siRNA sense strand
cacuggaauuagaguauuu

SEQ ID NO: 1404963 - RNA, 19 nt, Homo sapiens
  misc_RNA (1)...(19): siRNA sense strand
accaagcacuggaauuaga

SEQ ID NO: 1404964 - RNA, 19 nt, Homo sapiens
  misc_RNA (1)...(19): siRNA sense strand
ggaugccuggcuacaguua

SEQ ID NO: 1404965 - RNA, 19 nt, Homo sapiens
  misc_RNA (1)...(19): siRNA sense strand
caaccaggagaguucgaua

SEQ ID NO: 1404966 - RNA, 19 nt, Homo sapiens
  misc_RNA (1)...(19): siRNA sense strand
gcacaguauuauucagcau

SEQ ID NO: 1404967 - RNA, 19 nt, Homo sapiens
  misc_RNA (1)...(19): siRNA sense strand
acagaaguauggcaaggau

SEQ ID NO: 1404968 - RNA, 19 nt, Homo sapiens
  misc_RNA (1)...(19): siRNA sense strand
gaaaugcaggaccuagcaa

SEQ ID NO: 1404969 - RNA, 19 nt, Homo sapiens
  misc_RNA (1)...(19): siRNA sense strand
gcacuaggaguaacugcau

SEQ ID NO: 1404970 - RNA, 19 nt, Homo sapiens
  misc_RNA (1)...(19): siRNA sense strand
auuauuagcacuaggagua

SEQ ID NO: 1404971 - RNA, 19 nt, Homo sapiens
  misc_RNA (1)...(19): siRNA sense strand
ccgcauggaagaaaugauu

SEQ ID NO: 1404972 - RNA, 19 nt, Homo sapiens
  misc_RNA (1)...(19): siRNA sense strand
accagcagcucaaacaaug

SEQ ID NO: 1404973 - RNA, 19 nt, Homo sapiens
  misc_RNA (1)...(19): siRNA sense strand
ggauauccagucacucaga

SEQ ID NO: 1404974 - RNA, 19 nt, Homo sapiens
  misc_RNA (1)...(19): siRNA sense strand
guaacugcauaaaugucuu

SEQ ID NO: 1404975 - RNA, 19 nt, Homo sapiens
  misc_RNA (1)...(19): siRNA sense strand
cguauaugacaucgaauaa

SEQ ID NO: 1404976 - RNA, 19 nt, Homo sapiens
  misc_RNA (1)...(19): siRNA sense strand
caggacagcccuacagcuu

SEQ ID NO: 1404977 - RNA, 19 nt, Homo sapiens
  misc_RNA (1)...(19): siRNA sense strand
gaaucucucccaggacuga

SEQ ID NO: 1404978 - RNA, 19 nt, Homo sapiens
  misc_RNA (1)...(19): siRNA sense strand
gugguucacaacaggauua

SEQ ID NO: 1404979 - RNA, 19 nt, Homo sapiens
  misc_RNA (1)...(19): siRNA sense strand
caucaucuacuauuuaugc

SEQ ID NO: 1404980 - RNA, 19 nt, Homo sapiens
  misc_RNA (1)...(19): siRNA sense strand
ggccagacaccuuauucuu

SEQ ID NO: 1404981 - RNA, 19 nt, Homo sapiens
  misc_RNA (1)...(19): siRNA sense strand
ccaggucuauggaaaugca

SEQ ID NO: 1404982 - RNA, 19 nt, Homo sapiens
  misc_RNA (1)...(19): siRNA sense strand
ccuccuggcucuccaccaa

SEQ ID NO: 1404983 - RNA, 19 nt, Homo sapiens
  misc_RNA (1)...(19): siRNA sense strand
gguucuacucuauaguuua

SEQ ID NO: 1404984 - RNA, 19 nt, Homo sapiens
  misc_RNA (1)...(19): siRNA sense strand
caaaugcacuuaagucuuu

SEQ ID NO: 1404985 - RNA, 19 nt, Homo sapiens
  misc_RNA (1)...(19): siRNA sense strand
gcacaucaguuacuacaaa

SEQ ID NO: 1404986 - RNA, 19 nt, Homo sapiens
  misc_RNA (1)...(19): siRNA sense strand
gcacuuaagucuuuaucaa

SEQ ID NO: 1404987 - RNA, 19 nt, Homo sapiens
  misc_RNA (1)...(19): siRNA sense strand
gagagaaccuguaggaguu

SEQ ID NO: 1404988 - RNA, 19 nt, Homo sapiens
  misc_RNA (1)...(19): siRNA sense strand
gagcguauaugacaucgaa

SEQ ID NO: 1404989 - RNA, 19 nt, Homo sapiens
  misc_RNA (1)...(19): siRNA sense strand
gcaccaucaucuacuauuu

SEQ ID NO: 1404990 - RNA, 19 nt, Homo sapiens
  misc_RNA (1)...(19): siRNA sense strand
ggaagacucccaggauuua

SEQ ID NO: 1404991 - RNA, 19 nt, Homo sapiens
  misc_RNA (1)...(19): siRNA sense strand
ccaccaagcacuggaauua

SEQ ID NO: 1404992 - RNA, 19 nt, Homo sapiens
  misc_RNA (1)...(19): siRNA sense strand
uagaugauguuuccucuga

SEQ ID NO: 1404993 - RNA, 19 nt, Homo sapiens
  misc_RNA (1)...(19): siRNA sense strand
gagaauauuuacagugcaa

SEQ ID NO: 1404994 - RNA, 19 nt, Homo sapiens
  misc_RNA (1)...(19): siRNA sense strand
gccagacaccuuauucuua

SEQ ID NO: 1404995 - RNA, 19 nt, Homo sapiens
  misc_RNA (1)...(19): siRNA sense strand
gcacuggaauuagaguauu

SEQ ID NO: 1404996 - RNA, 19 nt, Homo sapiens
  misc_RNA (1)...(19): siRNA sense strand
cugcauaaaugucuuggua

SEQ ID NO: 1404997 - RNA, 19 nt, Homo sapiens
  misc_RNA (1)...(19): siRNA sense strand
gaucagcacaucaguauuc

SEQ ID NO: 1404998 - RNA, 19 nt, Homo sapiens
  misc_RNA (1)...(19): siRNA sense strand
gauguuuccucugaugaua

SEQ ID NO: 1404999 - RNA, 19 nt, Homo sapiens
  misc_RNA (1)...(19): siRNA sense strand
gaauuucagugguucacaa

SEQ ID NO: 1405000 - RNA, 19 nt, Homo sapiens
  misc_RNA (1)...(19): siRNA sense strand
cagaguggcugccucaguu

SEQ ID NO: 1405001 - RNA, 19 nt, Homo sapiens
  misc_RNA (1)...(19): siRNA sense strand
aggaguaacugcauaaaug

SEQ ID NO: 1405002 - RNA, 19 nt, Homo sapiens
  misc_RNA (1)...(19): siRNA sense strand
gcuaacaaaugcacuuaag

SEQ ID NO: 1405003 - RNA, 19 nt, Homo sapiens
  misc_RNA (1)...(19): siRNA sense strand
caacugaucccagcacuug

SEQ ID NO: 1405004 - RNA, 19 nt, Homo sapiens
  misc_RNA (1)...(19): siRNA sense strand
agaaucagauguuucacaa

SEQ ID NO: 1405005 - RNA, 19 nt, Homo sapiens
  misc_RNA (1)...(19): siRNA sense strand
gaugauguuuccucugaug

SEQ ID NO: 1405006 - RNA, 19 nt, Homo sapiens
  misc_RNA (1)...(19): siRNA sense strand
ggucuuaugcacagaagua

SEQ ID NO: 1405007 - RNA, 19 nt, Homo sapiens
  misc_RNA (1)...(19): siRNA sense strand
aaucagauguuucacaauc

SEQ ID NO: 1405008 - RNA, 19 nt, Homo sapiens
  misc_RNA (1)...(19): siRNA sense strand
gcauaaaugucuugguaac

SEQ ID NO: 1405009 - RNA, 19 nt, Homo sapiens
  misc_RNA (1)...(19): siRNA sense strand
gaugagagaaccuguagga

SEQ ID NO: 1405010 - RNA, 19 nt, Homo sapiens
  misc_RNA (1)...(19): siRNA sense strand
gcaaauaauucaguuucca

SEQ ID NO: 1405011 - RNA, 19 nt, Homo sapiens
  misc_RNA (1)...(19): siRNA sense strand
ccagacaccuuauucuuac

SEQ ID NO: 1405012 - RNA, 19 nt, Homo sapiens
  misc_RNA (1)...(19): siRNA sense strand
aaacagagcccuugaacag

SEQ ID NO: 1405013 - RNA, 19 nt, Homo sapiens
  misc_RNA (1)...(19): siRNA sense strand
ggucaguaauuacaaguag

SEQ ID NO: 1405014 - RNA, 19 nt, Homo sapiens
  misc_RNA (1)...(19): siRNA sense strand
gaggauauccagucacuca

SEQ ID NO: 1405015 - RNA, 19 nt, Homo sapiens
  misc_RNA (1)...(19): siRNA sense strand
gagaguggacuuucccaaa

SEQ ID NO: 1405016 - RNA, 19 nt, Homo sapiens
  misc_RNA (1)...(19): siRNA sense strand
gugaucaaguucauauaga

SEQ ID NO: 1405017 - RNA, 19 nt, Homo sapiens
  misc_RNA (1)...(19): siRNA sense strand
cgaagguucuacucuauag

SEQ ID NO: 1405018 - RNA, 19 nt, Homo sapiens
  misc_RNA (1)...(19): siRNA sense strand
aaaccaguaugcacaguau

SEQ ID NO: 1405019 - RNA, 19 nt, Homo sapiens
  misc_RNA (1)...(19): siRNA sense strand
caaagaucuugaugagaga

SEQ ID NO: 1405020 - RNA, 19 nt, Homo sapiens
  misc_RNA (1)...(19): siRNA sense strand
caacguauggagcguauau

SEQ ID NO: 1405021 - RNA, 19 nt, Homo sapiens
  misc_RNA (1)...(19): siRNA sense strand
uauaacaccuacaagaaca

SEQ ID NO: 1405022 - RNA, 19 nt, Homo sapiens
  misc_RNA (1)...(19): siRNA sense strand
caccaucaucuacuauuua

SEQ ID NO: 1405023 - RNA, 19 nt, Homo sapiens
  misc_RNA (1)...(19): siRNA sense strand
guucuacucuauaguuuag

SEQ ID NO: 1405024 - RNA, 19 nt, Homo sapiens
  misc_RNA (1)...(19): siRNA sense strand
uaacaaaugcacuuaaguc

SEQ ID NO: 1405025 - RNA, 19 nt, Homo sapiens
  misc_RNA (1)...(19): siRNA sense strand
gcguauaugacaucgaaua

SEQ ID NO: 1405026 - RNA, 19 nt, Homo sapiens
  misc_RNA (1)...(19): siRNA sense strand
auggagcgcuugacacuuu

SEQ ID NO: 1405027 - RNA, 19 nt, Homo sapiens
  misc_RNA (1)...(19): siRNA sense strand
gaaguuggcuuuucguuac

SEQ ID NO: 1405028 - RNA, 19 nt, Homo sapiens
  misc_RNA (1)...(19): siRNA sense strand
gcacagaaucagauguuuc

SEQ ID NO: 1405029 - RNA, 19 nt, Homo sapiens
  misc_RNA (1)...(19): siRNA sense strand
caaacaaugucugccuaug

SEQ ID NO: 1405030 - RNA, 19 nt, Homo sapiens
  misc_RNA (1)...(19): siRNA sense strand
gcgaagguucuacucuaua

SEQ ID NO: 1405031 - RNA, 19 nt, Homo sapiens
  misc_RNA (1)...(19): siRNA sense strand
ggaguaacugcauaaaugu

SEQ ID NO: 1405032 - RNA, 19 nt, Homo sapiens
  misc_RNA (1)...(19): siRNA sense strand
ccucuucaaccucuacuua

SEQ ID NO: 1405033 - RNA, 19 nt, Homo sapiens
  misc_RNA (1)...(19): siRNA sense strand
ucaacgaauuucagugguu

SEQ ID NO: 1405034 - RNA, 19 nt, Homo sapiens
  misc_RNA (1)...(19): siRNA sense strand
caaaugccagguucuaguu

SEQ ID NO: 1405035 - RNA, 19 nt, Homo sapiens
  misc_RNA (1)...(19): siRNA sense strand
ggagugugaucaaguucau

SEQ ID NO: 1405036 - RNA, 19 nt, Homo sapiens
  misc_RNA (1)...(19): siRNA sense strand
acagauuccuggcuaacaa

SEQ ID NO: 1405037 - RNA, 19 nt, Homo sapiens
  misc_RNA (1)...(19): siRNA sense strand
cagaucagcacaucaguau

SEQ ID NO: 1405038 - RNA, 19 nt, Homo sapiens
  misc_RNA (1)...(19): siRNA sense strand
agaggagugugaucaaguu

SEQ ID NO: 1405039 - RNA, 19 nt, Homo sapiens
  misc_RNA (1)...(19): siRNA sense strand
ggacuccgcauggaagaaa

SEQ ID NO: 1405040 - RNA, 19 nt, Homo sapiens
  misc_RNA (1)...(19): siRNA sense strand
guaacgacaacucaacuga

SEQ ID NO: 1405041 - RNA, 19 nt, Homo sapiens
  misc_RNA (1)...(19): siRNA sense strand
caagcccuauccacacauu

SEQ ID NO: 1405042 - RNA, 19 nt, Homo sapiens
  misc_RNA (1)...(19): siRNA sense strand
ccacacccaucaaagaucu

SEQ ID NO: 1405043 - RNA, 19 nt, Homo sapiens
  misc_RNA (1)...(19): siRNA sense strand
gaagacucccaggauuuaa

SEQ ID NO: 1405044 - RNA, 19 nt, Homo sapiens
  misc_RNA (1)...(19): siRNA sense strand
ggaugaggaaguuggcuuu

SEQ ID NO: 1405045 - RNA, 19 nt, Homo sapiens
  misc_RNA (1)...(19): siRNA sense strand
caaccucuacuuaucaguu

SEQ ID NO: 1405046 - RNA, 19 nt, Homo sapiens
  misc_RNA (1)...(19): siRNA sense strand
ggaaaugcaggaccuagca

SEQ ID NO: 1405047 - RNA, 19 nt, Homo sapiens
  misc_RNA (1)...(19): siRNA sense strand
ccuacagcuugcccacuua

SEQ ID NO: 1405048 - RNA, 19 nt, Homo sapiens
  misc_RNA (1)...(19): siRNA sense strand
ucucagaauuccaggucua

SEQ ID NO: 1405049 - RNA, 19 nt, Homo sapiens
  misc_RNA (1)...(19): siRNA sense strand
auaaaugucuugguaacga

SEQ ID NO: 1405050 - RNA, 19 nt, Homo sapiens
  misc_RNA (1)...(19): siRNA sense strand
ggaaguuggcuuuucguua

SEQ ID NO: 1405051 - RNA, 19 nt, Homo sapiens
  misc_RNA (1)...(19): siRNA sense strand
gaucaaguucauauagaug

SEQ ID NO: 1405052 - RNA, 19 nt, Homo sapiens
  misc_RNA (1)...(19): siRNA sense strand
uaaccaaccaggagaguuc

SEQ ID NO: 1405053 - RNA, 19 nt, Homo sapiens
  misc_RNA (1)...(19): siRNA sense strand
guauggagcguauaugaca

SEQ ID NO: 1405054 - RNA, 19 nt, Homo sapiens
  misc_RNA (1)...(19): siRNA sense strand
gauuauccauccuauacag

SEQ ID NO: 1405055 - RNA, 19 nt, Homo sapiens
  misc_RNA (1)...(19): siRNA sense strand
gaccuagcaaguccucaua

SEQ ID NO: 1405056 - RNA, 19 nt, Homo sapiens
  misc_RNA (1)...(19): siRNA sense strand
cgauuugggugugauguug

SEQ ID NO: 1405057 - RNA, 19 nt, Homo sapiens
  misc_RNA (1)...(19): siRNA sense strand
ggagauggagcgcuugaca

SEQ ID NO: 1405058 - RNA, 19 nt, Homo sapiens
  misc_RNA (1)...(19): siRNA sense strand
uugcgaagguucuacucua

SEQ ID NO: 1405059 - RNA, 19 nt, Homo sapiens
  misc_RNA (1)...(19): siRNA sense strand
caggagaguucgauaccau

SEQ ID NO: 1405060 - RNA, 19 nt, Homo sapiens
  misc_RNA (1)...(19): siRNA sense strand
ccagaucagcacaucagua

SEQ ID NO: 1405061 - RNA, 19 nt, Homo sapiens
  misc_RNA (1)...(19): siRNA sense strand
gcagccagccgucuacaca

SEQ ID NO: 1405062 - RNA, 19 nt, Homo sapiens
  misc_RNA (1)...(19): siRNA sense strand
cacuggaauuagaguauuu

SEQ ID NO: 1405063 - RNA, 19 nt, Homo sapiens
  misc_RNA (1)...(19): siRNA sense strand
accaagcacuggaauuaga

SEQ ID NO: 1405064 - RNA, 19 nt, Homo sapiens
  misc_RNA (1)...(19): siRNA sense strand
ggaugccuggcuacaguua

SEQ ID NO: 1405065 - RNA, 19 nt, Homo sapiens
  misc_RNA (1)...(19): siRNA sense strand
caaccaggagaguucgaua

SEQ ID NO: 1405066 - RNA, 19 nt, Homo sapiens
  misc_RNA (1)...(19): siRNA sense strand
gcacaguauuauucagcau

SEQ ID NO: 1405067 - RNA, 19 nt, Homo sapiens
  misc_RNA (1)...(19): siRNA sense strand
acagaaguauggcaaggau

SEQ ID NO: 1405068 - RNA, 19 nt, Homo sapiens
  misc_RNA (1)...(19): siRNA sense strand
gaaaugcaggaccuagcaa

SEQ ID NO: 1405069 - RNA, 19 nt, Homo sapiens
  misc_RNA (1)...(19): siRNA sense strand
gcacuaggaguaacugcau

SEQ ID NO: 1405070 - RNA, 19 nt, Homo sapiens
  misc_RNA (1)...(19): siRNA sense strand
auuauuagcacuaggagua

SEQ ID NO: 1405071 - RNA, 19 nt, Homo sapiens
  misc_RNA (1)...(19): siRNA sense strand
ccgcauggaagaaaugauu

SEQ ID NO: 1405072 - RNA, 19 nt, Homo sapiens
  misc_RNA (1)...(19): siRNA sense strand
accagcagcucaaacaaug

SEQ ID NO: 1405073 - RNA, 19 nt, Homo sapiens
  misc_RNA (1)...(19): siRNA sense strand
ggauauccagucacucaga

SEQ ID NO: 1405074 - RNA, 19 nt, Homo sapiens
  misc_RNA (1)...(19): siRNA sense strand
guaacugcauaaaugucuu

SEQ ID NO: 1405075 - RNA, 19 nt, Homo sapiens
  misc_RNA (1)...(19): siRNA sense strand
cguauaugacaucgaauaa

SEQ ID NO: 1405076 - RNA, 19 nt, Homo sapiens
  misc_RNA (1)...(19): siRNA sense strand
caggacagcccuacagcuu

SEQ ID NO: 1405077 - RNA, 19 nt, Homo sapiens
  misc_RNA (1)...(19): siRNA sense strand
gaaucucucccaggacuga

SEQ ID NO: 1405078 - RNA, 19 nt, Homo sapiens
  misc_RNA (1)...(19): siRNA sense strand
gugguucacaacaggauua

SEQ ID NO: 1405079 - RNA, 19 nt, Homo sapiens
  misc_RNA (1)...(19): siRNA sense strand
caucaucuacuauuuaugc

SEQ ID NO: 1405080 - RNA, 19 nt, Homo sapiens
  misc_RNA (1)...(19): siRNA sense strand
ggccagacaccuuauucuu

SEQ ID NO: 1405081 - RNA, 19 nt, Homo sapiens
  misc_RNA (1)...(19): siRNA sense strand
ccaggucuauggaaaugca

SEQ ID NO: 1405082 - RNA, 19 nt, Homo sapiens
  misc_RNA (1)...(19): siRNA sense strand
ccuccuggcucuccaccaa

SEQ ID NO: 1405083 - RNA, 19 nt, Homo sapiens
  misc_RNA (1)...(19): siRNA sense strand
gguucuacucuauaguuua

SEQ ID NO: 1405084 - RNA, 19 nt, Homo sapiens
  misc_RNA (1)...(19): siRNA sense strand
caaaugcacuuaagucuuu

SEQ ID NO: 1405085 - RNA, 19 nt, Homo sapiens
  misc_RNA (1)...(19): siRNA sense strand
gcacuuaagucuuuaucaa

SEQ ID NO: 1405086 - RNA, 19 nt, Homo sapiens
  misc_RNA (1)...(19): siRNA sense strand
gagagaaccuguaggaguu

SEQ ID NO: 1405087 - RNA, 19 nt, Homo sapiens
  misc_RNA (1)...(19): siRNA sense strand
gagcguauaugacaucgaa

SEQ ID NO: 1405088 - RNA, 19 nt, Homo sapiens
  misc_RNA (1)...(19): siRNA sense strand
gcaccaucaucuacuauuu

SEQ ID NO: 1405089 - RNA, 19 nt, Homo sapiens
  misc_RNA (1)...(19): siRNA sense strand
ccaccaagcacuggaauua

SEQ ID NO: 1405090 - RNA, 19 nt, Homo sapiens
  misc_RNA (1)...(19): siRNA sense strand
uagaugauguuuccucuga

SEQ ID NO: 1405091 - RNA, 19 nt, Homo sapiens
  misc_RNA (1)...(19): siRNA sense strand
gagaauauuuacagugcaa

SEQ ID NO: 1405092 - RNA, 19 nt, Homo sapiens
  misc_RNA (1)...(19): siRNA sense strand
gccagacaccuuauucuua

SEQ ID NO: 1405093 - RNA, 19 nt, Homo sapiens
  misc_RNA (1)...(19): siRNA sense strand
gcacuggaauuagaguauu

SEQ ID NO: 1405094 - RNA, 19 nt, Homo sapiens
  misc_RNA (1)...(19): siRNA sense strand
cugcauaaaugucuuggua

SEQ ID NO: 1405095 - RNA, 19 nt, Homo sapiens
  misc_RNA (1)...(19): siRNA sense strand
gaucagcacaucaguauuc

SEQ ID NO: 1405096 - RNA, 19 nt, Homo sapiens
  misc_RNA (1)...(19): siRNA sense strand
gauguuuccucugaugaua

SEQ ID NO: 1405097 - RNA, 19 nt, Homo sapiens
  misc_RNA (1)...(19): siRNA sense strand
gaauuucagugguucacaa

SEQ ID NO: 1405098 - RNA, 19 nt, Homo sapiens
  misc_RNA (1)...(19): siRNA sense strand
cagaguggcugccucaguu

SEQ ID NO: 1405099 - RNA, 19 nt, Homo sapiens
  misc_RNA (1)...(19): siRNA sense strand
aggaguaacugcauaaaug

SEQ ID NO: 1405100 - RNA, 19 nt, Homo sapiens
  misc_RNA (1)...(19): siRNA sense strand
gcuaacaaaugcacuuaag

SEQ ID NO: 1405101 - RNA, 19 nt, Homo sapiens
  misc_RNA (1)...(19): siRNA sense strand
caacugaucccagcacuug

SEQ ID NO: 1405102 - RNA, 19 nt, Homo sapiens
  misc_RNA (1)...(19): siRNA sense strand
gaugauguuuccucugaug

SEQ ID NO: 1405103 - RNA, 19 nt, Homo sapiens
  misc_RNA (1)...(19): siRNA sense strand
ggucuuaugcacagaagua

SEQ ID NO: 1405104 - RNA, 19 nt, Homo sapiens
  misc_RNA (1)...(19): siRNA sense strand
ccagacaccuuauucuuac

SEQ ID NO: 1405105 - RNA, 19 nt, Homo sapiens
  misc_RNA (1)...(19): siRNA sense strand
gcauaaaugucuugguaac

SEQ ID NO: 1405106 - RNA, 19 nt, Homo sapiens
  misc_RNA (1)...(19): siRNA sense strand
aaacagagcccuugaacag

SEQ ID NO: 1405107 - RNA, 19 nt, Homo sapiens
  misc_RNA (1)...(19): siRNA sense strand
gaugagagaaccuguagga

SEQ ID NO: 1405108 - RNA, 19 nt, Homo sapiens
  misc_RNA (1)...(19): siRNA sense strand
gcaaauaauucaguuucca

SEQ ID NO: 1405109 - RNA, 19 nt, Homo sapiens
  misc_RNA (1)...(19): siRNA sense strand
ggucaguaauuacaaguag

SEQ ID NO: 1405110 - RNA, 19 nt, Homo sapiens
  misc_RNA (1)...(19): siRNA sense strand
gaggauauccagucacuca

SEQ ID NO: 1405111 - RNA, 19 nt, Homo sapiens
  misc_RNA (1)...(19): siRNA sense strand
gagaguggacuuucccaaa

SEQ ID NO: 1405112 - RNA, 19 nt, Homo sapiens
  misc_RNA (1)...(19): siRNA sense strand
gugaucaaguucauauaga

SEQ ID NO: 1405113 - RNA, 19 nt, Homo sapiens
  misc_RNA (1)...(19): siRNA sense strand
cgaagguucuacucuauag

SEQ ID NO: 1405114 - RNA, 19 nt, Homo sapiens
  misc_RNA (1)...(19): siRNA sense strand
aaaccaguaugcacaguau

SEQ ID NO: 1405115 - RNA, 19 nt, Homo sapiens
  misc_RNA (1)...(19): siRNA sense strand
caaagaucuugaugagaga

SEQ ID NO: 1405116 - RNA, 19 nt, Homo sapiens
  misc_RNA (1)...(19): siRNA sense strand
caacguauggagcguauau

SEQ ID NO: 1405117 - RNA, 19 nt, Homo sapiens
  misc_RNA (1)...(19): siRNA sense strand
uauaacaccuacaagaaca

SEQ ID NO: 1405118 - RNA, 19 nt, Homo sapiens
  misc_RNA (1)...(19): siRNA sense strand
caccaucaucuacuauuua

SEQ ID NO: 1405119 - RNA, 19 nt, Homo sapiens
  misc_RNA (1)...(19): siRNA sense strand
guucuacucuauaguuuag

SEQ ID NO: 1405120 - RNA, 19 nt, Homo sapiens
  misc_RNA (1)...(19): siRNA sense strand
uaacaaaugcacuuaaguc

SEQ ID NO: 1405121 - RNA, 19 nt, Homo sapiens
  misc_RNA (1)...(19): siRNA sense strand
gcguauaugacaucgaaua

SEQ ID NO: 1405122 - RNA, 19 nt, Homo sapiens
  misc_RNA (1)...(19): siRNA sense strand
auggagcgcuugacacuuu

SEQ ID NO: 1405123 - RNA, 19 nt, Homo sapiens
  misc_RNA (1)...(19): siRNA sense strand
gaaguuggcuuuucguuac

SEQ ID NO: 1405124 - RNA, 19 nt, Homo sapiens
  misc_RNA (1)...(19): siRNA sense strand
caaacaaugucugccuaug

SEQ ID NO: 1405125 - RNA, 19 nt, Homo sapiens
  misc_RNA (1)...(19): siRNA sense strand
gcgaagguucuacucuaua

SEQ ID NO: 1405126 - RNA, 19 nt, Homo sapiens
  misc_RNA (1)...(19): siRNA sense strand
ggaguaacugcauaaaugu

SEQ ID NO: 1405127 - RNA, 19 nt, Homo sapiens
  misc_RNA (1)...(19): siRNA sense strand
ccucuucaaccucuacuua

SEQ ID NO: 1405128 - RNA, 19 nt, Homo sapiens
  misc_RNA (1)...(19): siRNA sense strand
ucaacgaauuucagugguu

SEQ ID NO: 1405129 - RNA, 19 nt, Homo sapiens
  misc_RNA (1)...(19): siRNA sense strand
caaaugccagguucuaguu

SEQ ID NO: 1405130 - RNA, 19 nt, Homo sapiens
  misc_RNA (1)...(19): siRNA sense strand
ggagugugaucaaguucau

SEQ ID NO: 1405131 - RNA, 19 nt, Homo sapiens
  misc_RNA (1)...(19): siRNA sense strand
acagauuccuggcuaacaa

SEQ ID NO: 1405132 - RNA, 19 nt, Homo sapiens
  misc_RNA (1)...(19): siRNA sense strand
cagaucagcacaucaguau

SEQ ID NO: 1405133 - RNA, 19 nt, Homo sapiens
  misc_RNA (1)...(19): siRNA sense strand
agaggagugugaucaaguu

SEQ ID NO: 1405134 - RNA, 19 nt, Homo sapiens
  misc_RNA (1)...(19): siRNA sense strand
ggacuccgcauggaagaaa

SEQ ID NO: 1405135 - RNA, 19 nt, Homo sapiens
  misc_RNA (1)...(19): siRNA sense strand
guaacgacaacucaacuga

SEQ ID NO: 1405136 - RNA, 19 nt, Homo sapiens
  misc_RNA (1)...(19): siRNA sense strand
caagcccuauccacacauu

SEQ ID NO: 1405137 - RNA, 19 nt, Homo sapiens
  misc_RNA (1)...(19): siRNA sense strand
ccacacccaucaaagaucu

SEQ ID NO: 1405138 - RNA, 19 nt, Homo sapiens
  misc_RNA (1)...(19): siRNA sense strand
caaccucuacuuaucaguu

SEQ ID NO: 1405139 - RNA, 19 nt, Homo sapiens
  misc_RNA (1)...(19): siRNA sense strand
ggaugaggaaguuggcuuu

SEQ ID NO: 1405140 - RNA, 19 nt, Homo sapiens
  misc_RNA (1)...(19): siRNA sense strand
ccuacagcuugcccacuua

SEQ ID NO: 1405141 - RNA, 19 nt, Homo sapiens
  misc_RNA (1)...(19): siRNA sense strand
auaaaugucuugguaacga

SEQ ID NO: 1405142 - RNA, 19 nt, Homo sapiens
  misc_RNA (1)...(19): siRNA sense strand
ggaaguuggcuuuucguua

SEQ ID NO: 1405143 - RNA, 19 nt, Homo sapiens
  misc_RNA (1)...(19): siRNA sense strand
gaucaaguucauauagaug

SEQ ID NO: 1405144 - RNA, 19 nt, Homo sapiens
  misc_RNA (1)...(19): siRNA sense strand
uaaccaaccaggagaguuc

SEQ ID NO: 1405145 - RNA, 19 nt, Homo sapiens
  misc_RNA (1)...(19): siRNA sense strand
guauggagcguauaugaca

SEQ ID NO: 1405146 - RNA, 19 nt, Homo sapiens
  misc_RNA (1)...(19): siRNA sense strand
gauuauccauccuauacag

SEQ ID NO: 1405147 - RNA, 19 nt, Homo sapiens
  misc_RNA (1)...(19): siRNA sense strand
cgauuugggugugauguug

SEQ ID NO: 1405148 - RNA, 19 nt, Homo sapiens
  misc_RNA (1)...(19): siRNA sense strand
caggagaguucgauaccau

SEQ ID NO: 1405149 - RNA, 19 nt, Homo sapiens
  misc_RNA (1)...(19): siRNA sense strand
uugcgaagguucuacucua

SEQ ID NO: 1405150 - RNA, 19 nt, Homo sapiens
  misc_RNA (1)...(19): siRNA sense strand
ggagauggagcgcuugaca

SEQ ID NO: 1405151 - RNA, 19 nt, Homo sapiens
  misc_RNA (1)...(19): siRNA sense strand
ccagaucagcacaucagua

SEQ ID NO: 1405152 - RNA, 19 nt, Homo sapiens
  misc_RNA (1)...(19): siRNA sense strand
gcagccagccgucuacaca

SEQ ID NO: 1405153 - RNA, 19 nt, Homo sapiens
  misc_RNA (1)...(19): siRNA sense strand
cacuggaauuagaguauuu

SEQ ID NO: 1405154 - RNA, 19 nt, Homo sapiens
  misc_RNA (1)...(19): siRNA sense strand
accaagcacuggaauuaga

SEQ ID NO: 1405155 - RNA, 19 nt, Homo sapiens
  misc_RNA (1)...(19): siRNA sense strand
ggaugccuggcuacaguua

SEQ ID NO: 1405156 - RNA, 19 nt, Homo sapiens
  misc_RNA (1)...(19): siRNA sense strand
caaccaggagaguucgaua

SEQ ID NO: 1405157 - RNA, 19 nt, Homo sapiens
  misc_RNA (1)...(19): siRNA sense strand
gcacaguauuauucagcau

SEQ ID NO: 1405158 - RNA, 19 nt, Homo sapiens
  misc_RNA (1)...(19): siRNA sense strand
acagaaguauggcaaggau

SEQ ID NO: 1405159 - RNA, 19 nt, Homo sapiens
  misc_RNA (1)...(19): siRNA sense strand
gcacuaggaguaacugcau

SEQ ID NO: 1405160 - RNA, 19 nt, Homo sapiens
  misc_RNA (1)...(19): siRNA sense strand
auuauuagcacuaggagua

SEQ ID NO: 1405161 - RNA, 19 nt, Homo sapiens
  misc_RNA (1)...(19): siRNA sense strand
ccgcauggaagaaaugauu

SEQ ID NO: 1405162 - RNA, 19 nt, Homo sapiens
  misc_RNA (1)...(19): siRNA sense strand
cguauaugacaucgaauaa

SEQ ID NO: 1405163 - RNA, 19 nt, Homo sapiens
  misc_RNA (1)...(19): siRNA sense strand
ggauauccagucacucaga

SEQ ID NO: 1405164 - RNA, 19 nt, Homo sapiens
  misc_RNA (1)...(19): siRNA sense strand
guaacugcauaaaugucuu

SEQ ID NO: 1405165 - RNA, 19 nt, Homo sapiens
  misc_RNA (1)...(19): siRNA sense strand
accagcagcucaaacaaug

SEQ ID NO: 1405166 - RNA, 19 nt, Homo sapiens
  misc_RNA (1)...(19): siRNA sense strand
caggacagcccuacagcuu

SEQ ID NO: 1405167 - RNA, 19 nt, Homo sapiens
  misc_RNA (1)...(19): siRNA sense strand
gaaucucucccaggacuga

SEQ ID NO: 1405168 - RNA, 19 nt, Homo sapiens
  misc_RNA (1)...(19): siRNA sense strand
gugguucacaacaggauua

SEQ ID NO: 1405169 - RNA, 19 nt, Homo sapiens
  misc_RNA (1)...(19): siRNA sense strand
caucaucuacuauuuaugc

SEQ ID NO: 1405170 - RNA, 19 nt, Homo sapiens
  misc_RNA (1)...(19): siRNA sense strand
ggccagacaccuuauucuu

SEQ ID NO: 1405171 - RNA, 19 nt, Homo sapiens
  misc_RNA (1)...(19): siRNA sense strand
gggucaaaguccagaggaa

SEQ ID NO: 1405172 - RNA, 19 nt, Homo sapiens
  misc_RNA (1)...(19): siRNA sense strand
ccuccuggcucuccaccaa

SEQ ID NO: 1405173 - RNA, 19 nt, Homo sapiens
  misc_RNA (1)...(19): siRNA sense strand
gguucuacucuauaguuua

SEQ ID NO: 1405174 - RNA, 19 nt, Homo sapiens
  misc_RNA (1)...(19): siRNA sense strand
accaguaugcacaguauua

SEQ ID NO: 1405175 - RNA, 19 nt, Homo sapiens
  misc_RNA (1)...(19): siRNA sense strand
ucaauuauuagcacuagga

SEQ ID NO: 1405176 - RNA, 19 nt, Homo sapiens
  misc_RNA (1)...(19): siRNA sense strand
gaguggacuuucccaaacu

SEQ ID NO: 1405177 - RNA, 19 nt, Homo sapiens
  misc_RNA (1)...(19): siRNA sense strand
guuaagggcagagauugaa

SEQ ID NO: 1405178 - RNA, 19 nt, Homo sapiens
  misc_RNA (1)...(19): siRNA sense strand
ugaccuggagcguguguuu

SEQ ID NO: 1405179 - RNA, 19 nt, Homo sapiens
  misc_RNA (1)...(19): siRNA sense strand
acaguauuauucagcauca

SEQ ID NO: 1405180 - RNA, 19 nt, Homo sapiens
  misc_RNA (1)...(19): siRNA sense strand
ggacuuucccaaacucagu

SEQ ID NO: 1405181 - RNA, 19 nt, Homo sapiens
  misc_RNA (1)...(19): siRNA sense strand
aacaaugucugccuaugca

SEQ ID NO: 1405182 - RNA, 19 nt, Homo sapiens
  misc_RNA (1)...(19): siRNA sense strand
aacgacaacucaacugauc

SEQ ID NO: 1405183 - RNA, 19 nt, Homo sapiens
  misc_RNA (1)...(19): siRNA sense strand
cacuaggaguaacugcaua

SEQ ID NO: 1405184 - RNA, 19 nt, Homo sapiens
  misc_RNA (1)...(19): siRNA sense strand
caaaugcacuuaagucuuu

SEQ ID NO: 1405185 - RNA, 19 nt, Homo sapiens
  misc_RNA (1)...(19): siRNA sense strand
gcacaucaguuacuacaaa

SEQ ID NO: 1405186 - RNA, 19 nt, Homo sapiens
  misc_RNA (1)...(19): siRNA sense strand
gcacuuaagucuuuaucaa

SEQ ID NO: 1405187 - RNA, 19 nt, Homo sapiens
  misc_RNA (1)...(19): siRNA sense strand
gagagaaccuguaggaguu

SEQ ID NO: 1405188 - RNA, 19 nt, Homo sapiens
  misc_RNA (1)...(19): siRNA sense strand
gagcguauaugacaucgaa

SEQ ID NO: 1405189 - RNA, 19 nt, Homo sapiens
  misc_RNA (1)...(19): siRNA sense strand
gcaccaucaucuacuauuu

SEQ ID NO: 1405190 - RNA, 19 nt, Homo sapiens
  misc_RNA (1)...(19): siRNA sense strand
ggaagacucccaggauuua

SEQ ID NO: 1405191 - RNA, 19 nt, Homo sapiens
  misc_RNA (1)...(19): siRNA sense strand
ccaccaagcacuggaauua

SEQ ID NO: 1405192 - RNA, 19 nt, Homo sapiens
  misc_RNA (1)...(19): siRNA sense strand
uagaugauguuuccucuga

SEQ ID NO: 1405193 - RNA, 19 nt, Homo sapiens
  misc_RNA (1)...(19): siRNA sense strand
gagaauauuuacagugcaa

SEQ ID NO: 1405194 - RNA, 19 nt, Homo sapiens
  misc_RNA (1)...(19): siRNA sense strand
gccagacaccuuauucuua

SEQ ID NO: 1405195 - RNA, 19 nt, Homo sapiens
  misc_RNA (1)...(19): siRNA sense strand
gcacuggaauuagaguauu

SEQ ID NO: 1405196 - RNA, 19 nt, Homo sapiens
  misc_RNA (1)...(19): siRNA sense strand
cugcauaaaugucuuggua

SEQ ID NO: 1405197 - RNA, 19 nt, Homo sapiens
  misc_RNA (1)...(19): siRNA sense strand
gaucagcacaucaguauuc

SEQ ID NO: 1405198 - RNA, 19 nt, Homo sapiens
  misc_RNA (1)...(19): siRNA sense strand
gauguuuccucugaugaua

SEQ ID NO: 1405199 - RNA, 19 nt, Homo sapiens
  misc_RNA (1)...(19): siRNA sense strand
gaauuucagugguucacaa

SEQ ID NO: 1405200 - RNA, 19 nt, Homo sapiens
  misc_RNA (1)...(19): siRNA sense strand
cagaguggcugccucaguu

SEQ ID NO: 1405201 - RNA, 19 nt, Homo sapiens
  misc_RNA (1)...(19): siRNA sense strand
aggaguaacugcauaaaug

SEQ ID NO: 1405202 - RNA, 19 nt, Homo sapiens
  misc_RNA (1)...(19): siRNA sense strand
gcuaacaaaugcacuuaag

SEQ ID NO: 1405203 - RNA, 19 nt, Homo sapiens
  misc_RNA (1)...(19): siRNA sense strand
caacugaucccagcacuug

SEQ ID NO: 1405204 - RNA, 19 nt, Homo sapiens
  misc_RNA (1)...(19): siRNA sense strand
agaaucagauguuucacaa

SEQ ID NO: 1405205 - RNA, 19 nt, Homo sapiens
  misc_RNA (1)...(19): siRNA sense strand
gaugauguuuccucugaug

SEQ ID NO: 1405206 - RNA, 19 nt, Homo sapiens
  misc_RNA (1)...(19): siRNA sense strand
ggucuuaugcacagaagua

SEQ ID NO: 1405207 - RNA, 19 nt, Homo sapiens
  misc_RNA (1)...(19): siRNA sense strand
aaucagauguuucacaauc

SEQ ID NO: 1405208 - RNA, 19 nt, Homo sapiens
  misc_RNA (1)...(19): siRNA sense strand
gcauaaaugucuugguaac

SEQ ID NO: 1405209 - RNA, 19 nt, Homo sapiens
  misc_RNA (1)...(19): siRNA sense strand
gaugagagaaccuguagga

SEQ ID NO: 1405210 - RNA, 19 nt, Homo sapiens
  misc_RNA (1)...(19): siRNA sense strand
gcaaauaauucaguuucca

SEQ ID NO: 1405211 - RNA, 19 nt, Homo sapiens
  misc_RNA (1)...(19): siRNA sense strand
ccagacaccuuauucuuac

SEQ ID NO: 1405212 - RNA, 19 nt, Homo sapiens
  misc_RNA (1)...(19): siRNA sense strand
aaacagagcccuugaacag

SEQ ID NO: 1405213 - RNA, 19 nt, Homo sapiens
  misc_RNA (1)...(19): siRNA sense strand
ggucaguaauuacaaguag

SEQ ID NO: 1405214 - RNA, 19 nt, Homo sapiens
  misc_RNA (1)...(19): siRNA sense strand
gaggauauccagucacuca

SEQ ID NO: 1405215 - RNA, 19 nt, Homo sapiens
  misc_RNA (1)...(19): siRNA sense strand
gagaguggacuuucccaaa

SEQ ID NO: 1405216 - RNA, 19 nt, Homo sapiens
  misc_RNA (1)...(19): siRNA sense strand
gugaucaaguucauauaga

SEQ ID NO: 1405217 - RNA, 19 nt, Homo sapiens
  misc_RNA (1)...(19): siRNA sense strand
cgaagguucuacucuauag

SEQ ID NO: 1405218 - RNA, 19 nt, Homo sapiens
  misc_RNA (1)...(19): siRNA sense strand
aaaccaguaugcacaguau

SEQ ID NO: 1405219 - RNA, 19 nt, Homo sapiens
  misc_RNA (1)...(19): siRNA sense strand
caaagaucuugaugagaga

SEQ ID NO: 1405220 - RNA, 19 nt, Homo sapiens
  misc_RNA (1)...(19): siRNA sense strand
caacguauggagcguauau

SEQ ID NO: 1405221 - RNA, 19 nt, Homo sapiens
  misc_RNA (1)...(19): siRNA sense strand
uauaacaccuacaagaaca

SEQ ID NO: 1405222 - RNA, 19 nt, Homo sapiens
  misc_RNA (1)...(19): siRNA sense strand
caccaucaucuacuauuua

SEQ ID NO: 1405223 - RNA, 19 nt, Homo sapiens
  misc_RNA (1)...(19): siRNA sense strand
guucuacucuauaguuuag

SEQ ID NO: 1405224 - RNA, 19 nt, Homo sapiens
  misc_RNA (1)...(19): siRNA sense strand
uaacaaaugcacuuaaguc

SEQ ID NO: 1405225 - RNA, 19 nt, Homo sapiens
  misc_RNA (1)...(19): siRNA sense strand
gcguauaugacaucgaaua

SEQ ID NO: 1405226 - RNA, 19 nt, Homo sapiens
  misc_RNA (1)...(19): siRNA sense strand
auggagcgcuugacacuuu

SEQ ID NO: 1405227 - RNA, 19 nt, Homo sapiens
  misc_RNA (1)...(19): siRNA sense strand
gaaguuggcuuuucguuac

SEQ ID NO: 1405228 - RNA, 19 nt, Homo sapiens
  misc_RNA (1)...(19): siRNA sense strand
gcacagaaucagauguuuc

SEQ ID NO: 1405229 - RNA, 19 nt, Homo sapiens
  misc_RNA (1)...(19): siRNA sense strand
caaacaaugucugccuaug

SEQ ID NO: 1405230 - RNA, 19 nt, Homo sapiens
  misc_RNA (1)...(19): siRNA sense strand
gcgaagguucuacucuaua

SEQ ID NO: 1405231 - RNA, 19 nt, Homo sapiens
  misc_RNA (1)...(19): siRNA sense strand
ggaguaacugcauaaaugu

SEQ ID NO: 1405232 - RNA, 19 nt, Homo sapiens
  misc_RNA (1)...(19): siRNA sense strand
ccucuucaaccucuacuua

SEQ ID NO: 1405233 - RNA, 19 nt, Homo sapiens
  misc_RNA (1)...(19): siRNA sense strand
ucaacgaauuucagugguu

SEQ ID NO: 1405234 - RNA, 19 nt, Homo sapiens
  misc_RNA (1)...(19): siRNA sense strand
caaaugccagguucuaguu

SEQ ID NO: 1405235 - RNA, 19 nt, Homo sapiens
  misc_RNA (1)...(19): siRNA sense strand
ggagugugaucaaguucau

SEQ ID NO: 1405236 - RNA, 19 nt, Homo sapiens
  misc_RNA (1)...(19): siRNA sense strand
acagauuccuggcuaacaa

SEQ ID NO: 1405237 - RNA, 19 nt, Homo sapiens
  misc_RNA (1)...(19): siRNA sense strand
cagaucagcacaucaguau

SEQ ID NO: 1405238 - RNA, 19 nt, Homo sapiens
  misc_RNA (1)...(19): siRNA sense strand
agaggagugugaucaaguu

SEQ ID NO: 1405239 - RNA, 19 nt, Homo sapiens
  misc_RNA (1)...(19): siRNA sense strand
ggacuccgcauggaagaaa

SEQ ID NO: 1405240 - RNA, 19 nt, Homo sapiens
  misc_RNA (1)...(19): siRNA sense strand
guaacgacaacucaacuga

SEQ ID NO: 1405241 - RNA, 19 nt, Homo sapiens
  misc_RNA (1)...(19): siRNA sense strand
caagcccuauccacacauu

SEQ ID NO: 1405242 - RNA, 19 nt, Homo sapiens
  misc_RNA (1)...(19): siRNA sense strand
ccacacccaucaaagaucu

SEQ ID NO: 1405243 - RNA, 19 nt, Homo sapiens
  misc_RNA (1)...(19): siRNA sense strand
gaagacucccaggauuuaa

SEQ ID NO: 1405244 - RNA, 19 nt, Homo sapiens
  misc_RNA (1)...(19): siRNA sense strand
ggaugaggaaguuggcuuu

SEQ ID NO: 1405245 - RNA, 19 nt, Homo sapiens
  misc_RNA (1)...(19): siRNA sense strand
caaccucuacuuaucaguu

SEQ ID NO: 1405246 - RNA, 19 nt, Homo sapiens
  misc_RNA (1)...(19): siRNA sense strand
ggaaaugcaggaccuagca

SEQ ID NO: 1405247 - RNA, 19 nt, Homo sapiens
  misc_RNA (1)...(19): siRNA sense strand
ccuacagcuugcccacuua

SEQ ID NO: 1405248 - RNA, 19 nt, Homo sapiens
  misc_RNA (1)...(19): siRNA sense strand
ucucagaauuccaggucua

SEQ ID NO: 1405249 - RNA, 19 nt, Homo sapiens
  misc_RNA (1)...(19): siRNA sense strand
auaaaugucuugguaacga

SEQ ID NO: 1405250 - RNA, 19 nt, Homo sapiens
  misc_RNA (1)...(19): siRNA sense strand
ggaaguuggcuuuucguua

SEQ ID NO: 1405251 - RNA, 19 nt, Homo sapiens
  misc_RNA (1)...(19): siRNA sense strand
gaucaaguucauauagaug

SEQ ID NO: 1405252 - RNA, 19 nt, Homo sapiens
  misc_RNA (1)...(19): siRNA sense strand
uaaccaaccaggagaguuc

SEQ ID NO: 1405253 - RNA, 19 nt, Homo sapiens
  misc_RNA (1)...(19): siRNA sense strand
guauggagcguauaugaca

SEQ ID NO: 1405254 - RNA, 19 nt, Homo sapiens
  misc_RNA (1)...(19): siRNA sense strand
gauuauccauccuauacag

SEQ ID NO: 1405255 - RNA, 19 nt, Homo sapiens
  misc_RNA (1)...(19): siRNA sense strand
gaccuagcaaguccucaua

SEQ ID NO: 1405256 - RNA, 19 nt, Homo sapiens
  misc_RNA (1)...(19): siRNA sense strand
cgauuugggugugauguug

SEQ ID NO: 1405257 - RNA, 19 nt, Homo sapiens
  misc_RNA (1)...(19): siRNA sense strand
ggagauggagcgcuugaca

SEQ ID NO: 1405258 - RNA, 19 nt, Homo sapiens
  misc_RNA (1)...(19): siRNA sense strand
uugcgaagguucuacucua

SEQ ID NO: 1405259 - RNA, 19 nt, Homo sapiens
  misc_RNA (1)...(19): siRNA sense strand
caggagaguucgauaccau

SEQ ID NO: 1405260 - RNA, 19 nt, Homo sapiens
  misc_RNA (1)...(19): siRNA sense strand
ccagaucagcacaucagua

SEQ ID NO: 1405261 - RNA, 19 nt, Homo sapiens
  misc_RNA (1)...(19): siRNA sense strand
gcagccagccgucuacaca

SEQ ID NO: 1405262 - RNA, 19 nt, Homo sapiens
  misc_RNA (1)...(19): siRNA sense strand
cacuggaauuagaguauuu

SEQ ID NO: 1405263 - RNA, 19 nt, Homo sapiens
  misc_RNA (1)...(19): siRNA sense strand
accaagcacuggaauuaga

SEQ ID NO: 1405264 - RNA, 19 nt, Homo sapiens
  misc_RNA (1)...(19): siRNA sense strand
ggaugccuggcuacaguua

SEQ ID NO: 1405265 - RNA, 19 nt, Homo sapiens
  misc_RNA (1)...(19): siRNA sense strand
caaccaggagaguucgaua

SEQ ID NO: 1405266 - RNA, 19 nt, Homo sapiens
  misc_RNA (1)...(19): siRNA sense strand
gcacaguauuauucagcau

SEQ ID NO: 1405267 - RNA, 19 nt, Homo sapiens
  misc_RNA (1)...(19): siRNA sense strand
acagaaguauggcaaggau

SEQ ID NO: 1405268 - RNA, 19 nt, Homo sapiens
  misc_RNA (1)...(19): siRNA sense strand
gaaaugcaggaccuagcaa

SEQ ID NO: 1405269 - RNA, 19 nt, Homo sapiens
  misc_RNA (1)...(19): siRNA sense strand
gcacuaggaguaacugcau

SEQ ID NO: 1405270 - RNA, 19 nt, Homo sapiens
  misc_RNA (1)...(19): siRNA sense strand
auuauuagcacuaggagua

SEQ ID NO: 1405271 - RNA, 19 nt, Homo sapiens
  misc_RNA (1)...(19): siRNA sense strand
ccgcauggaagaaaugauu

SEQ ID NO: 1405272 - RNA, 19 nt, Homo sapiens
  misc_RNA (1)...(19): siRNA sense strand
accagcagcucaaacaaug

SEQ ID NO: 1405273 - RNA, 19 nt, Homo sapiens
  misc_RNA (1)...(19): siRNA sense strand
ggauauccagucacucaga

SEQ ID NO: 1405274 - RNA, 19 nt, Homo sapiens
  misc_RNA (1)...(19): siRNA sense strand
guaacugcauaaaugucuu

SEQ ID NO: 1405275 - RNA, 19 nt, Homo sapiens
  misc_RNA (1)...(19): siRNA sense strand
cguauaugacaucgaauaa

SEQ ID NO: 1405276 - RNA, 19 nt, Homo sapiens
  misc_RNA (1)...(19): siRNA sense strand
caggacagcccuacagcuu

SEQ ID NO: 1405277 - RNA, 19 nt, Homo sapiens
  misc_RNA (1)...(19): siRNA sense strand
gaaucucucccaggacuga

SEQ ID NO: 1405278 - RNA, 19 nt, Homo sapiens
  misc_RNA (1)...(19): siRNA sense strand
gugguucacaacaggauua

SEQ ID NO: 1405279 - RNA, 19 nt, Homo sapiens
  misc_RNA (1)...(19): siRNA sense strand
caucaucuacuauuuaugc

SEQ ID NO: 1405280 - RNA, 19 nt, Homo sapiens
  misc_RNA (1)...(19): siRNA sense strand
ggccagacaccuuauucuu

SEQ ID NO: 1405281 - RNA, 19 nt, Homo sapiens
  misc_RNA (1)...(19): siRNA sense strand
ccaggucuauggaaaugca

SEQ ID NO: 1405282 - RNA, 19 nt, Homo sapiens
  misc_RNA (1)...(19): siRNA sense strand
ccuccuggcucuccaccaa

SEQ ID NO: 1405283 - RNA, 19 nt, Homo sapiens
  misc_RNA (1)...(19): siRNA sense strand
gguucuacucuauaguuua

SEQ ID NO: 1405284 - RNA, 19 nt, Homo sapiens
  misc_RNA (1)...(19): siRNA sense strand
caaaugcacuuaagucuuu

SEQ ID NO: 1405285 - RNA, 19 nt, Homo sapiens
  misc_RNA (1)...(19): siRNA sense strand
gcacaucaguuacuacaaa

SEQ ID NO: 1405286 - RNA, 19 nt, Homo sapiens
  misc_RNA (1)...(19): siRNA sense strand
gcacuuaagucuuuaucaa

SEQ ID NO: 1405287 - RNA, 19 nt, Homo sapiens
  misc_RNA (1)...(19): siRNA sense strand
gagagaaccuguaggaguu

SEQ ID NO: 1405288 - RNA, 19 nt, Homo sapiens
  misc_RNA (1)...(19): siRNA sense strand
gagcguauaugacaucgaa

SEQ ID NO: 1405289 - RNA, 19 nt, Homo sapiens
  misc_RNA (1)...(19): siRNA sense strand
gcaccaucaucuacuauuu

SEQ ID NO: 1405290 - RNA, 19 nt, Homo sapiens
  misc_RNA (1)...(19): siRNA sense strand
ggaagacucccaggauuua

SEQ ID NO: 1405291 - RNA, 19 nt, Homo sapiens
  misc_RNA (1)...(19): siRNA sense strand
ccaccaagcacuggaauua

SEQ ID NO: 1405292 - RNA, 19 nt, Homo sapiens
  misc_RNA (1)...(19): siRNA sense strand
uagaugauguuuccucuga

SEQ ID NO: 1405293 - RNA, 19 nt, Homo sapiens
  misc_RNA (1)...(19): siRNA sense strand
gagaauauuuacagugcaa

SEQ ID NO: 1405294 - RNA, 19 nt, Homo sapiens
  misc_RNA (1)...(19): siRNA sense strand
gccagacaccuuauucuua

SEQ ID NO: 1405295 - RNA, 19 nt, Homo sapiens
  misc_RNA (1)...(19): siRNA sense strand
gcacuggaauuagaguauu

SEQ ID NO: 1405296 - RNA, 19 nt, Homo sapiens
  misc_RNA (1)...(19): siRNA sense strand
cugcauaaaugucuuggua

SEQ ID NO: 1405297 - RNA, 19 nt, Homo sapiens
  misc_RNA (1)...(19): siRNA sense strand
gaucagcacaucaguauuc

SEQ ID NO: 1405298 - RNA, 19 nt, Homo sapiens
  misc_RNA (1)...(19): siRNA sense strand
gauguuuccucugaugaua

SEQ ID NO: 1405299 - RNA, 19 nt, Homo sapiens
  misc_RNA (1)...(19): siRNA sense strand
gaauuucagugguucacaa

SEQ ID NO: 1405300 - RNA, 19 nt, Homo sapiens
  misc_RNA (1)...(19): siRNA sense strand
cagaguggcugccucaguu

SEQ ID NO: 1405301 - RNA, 19 nt, Homo sapiens
  misc_RNA (1)...(19): siRNA sense strand
aggaguaacugcauaaaug

SEQ ID NO: 1405302 - RNA, 19 nt, Homo sapiens
  misc_RNA (1)...(19): siRNA sense strand
gcuaacaaaugcacuuaag

SEQ ID NO: 1405303 - RNA, 19 nt, Homo sapiens
  misc_RNA (1)...(19): siRNA sense strand
caacugaucccagcacuug

SEQ ID NO: 1405304 - RNA, 19 nt, Homo sapiens
  misc_RNA (1)...(19): siRNA sense strand
agaaucagauguuucacaa

SEQ ID NO: 1405305 - RNA, 19 nt, Homo sapiens
  misc_RNA (1)...(19): siRNA sense strand
gaugauguuuccucugaug

SEQ ID NO: 1405306 - RNA, 19 nt, Homo sapiens
  misc_RNA (1)...(19): siRNA sense strand
ggucuuaugcacagaagua

SEQ ID NO: 1405307 - RNA, 19 nt, Homo sapiens
  misc_RNA (1)...(19): siRNA sense strand
aaucagauguuucacaauc

SEQ ID NO: 1405308 - RNA, 19 nt, Homo sapiens
  misc_RNA (1)...(19): siRNA sense strand
gcauaaaugucuugguaac

SEQ ID NO: 1405309 - RNA, 19 nt, Homo sapiens
  misc_RNA (1)...(19): siRNA sense strand
gaugagagaaccuguagga

SEQ ID NO: 1405310 - RNA, 19 nt, Homo sapiens
  misc_RNA (1)...(19): siRNA sense strand
gcaaauaauucaguuucca

SEQ ID NO: 1405311 - RNA, 19 nt, Homo sapiens
  misc_RNA (1)...(19): siRNA sense strand
ccagacaccuuauucuuac

SEQ ID NO: 1405312 - RNA, 19 nt, Homo sapiens
  misc_RNA (1)...(19): siRNA sense strand
aaacagagcccuugaacag

SEQ ID NO: 1405313 - RNA, 19 nt, Homo sapiens
  misc_RNA (1)...(19): siRNA sense strand
ggucaguaauuacaaguag

SEQ ID NO: 1405314 - RNA, 19 nt, Homo sapiens
  misc_RNA (1)...(19): siRNA sense strand
gaggauauccagucacuca

SEQ ID NO: 1405315 - RNA, 19 nt, Homo sapiens
  misc_RNA (1)...(19): siRNA sense strand
gagaguggacuuucccaaa

SEQ ID NO: 1405316 - RNA, 19 nt, Homo sapiens
  misc_RNA (1)...(19): siRNA sense strand
gugaucaaguucauauaga

SEQ ID NO: 1405317 - RNA, 19 nt, Homo sapiens
  misc_RNA (1)...(19): siRNA sense strand
cgaagguucuacucuauag

SEQ ID NO: 1405318 - RNA, 19 nt, Homo sapiens
  misc_RNA (1)...(19): siRNA sense strand
aaaccaguaugcacaguau

SEQ ID NO: 1405319 - RNA, 19 nt, Homo sapiens
  misc_RNA (1)...(19): siRNA sense strand
caaagaucuugaugagaga

SEQ ID NO: 1405320 - RNA, 19 nt, Homo sapiens
  misc_RNA (1)...(19): siRNA sense strand
caacguauggagcguauau

SEQ ID NO: 1405321 - RNA, 19 nt, Homo sapiens
  misc_RNA (1)...(19): siRNA sense strand
uauaacaccuacaagaaca

SEQ ID NO: 1405322 - RNA, 19 nt, Homo sapiens
  misc_RNA (1)...(19): siRNA sense strand
caccaucaucuacuauuua

SEQ ID NO: 1405323 - RNA, 19 nt, Homo sapiens
  misc_RNA (1)...(19): siRNA sense strand
guucuacucuauaguuuag

SEQ ID NO: 1405324 - RNA, 19 nt, Homo sapiens
  misc_RNA (1)...(19): siRNA sense strand
uaacaaaugcacuuaaguc

SEQ ID NO: 1405325 - RNA, 19 nt, Homo sapiens
  misc_RNA (1)...(19): siRNA sense strand
gcguauaugacaucgaaua

SEQ ID NO: 1405326 - RNA, 19 nt, Homo sapiens
  misc_RNA (1)...(19): siRNA sense strand
auggagcgcuugacacuuu

SEQ ID NO: 1405327 - RNA, 19 nt, Homo sapiens
  misc_RNA (1)...(19): siRNA sense strand
gaaguuggcuuuucguuac

SEQ ID NO: 1405328 - RNA, 19 nt, Homo sapiens
  misc_RNA (1)...(19): siRNA sense strand
gcacagaaucagauguuuc

SEQ ID NO: 1405329 - RNA, 19 nt, Homo sapiens
  misc_RNA (1)...(19): siRNA sense strand
caaacaaugucugccuaug

SEQ ID NO: 1405330 - RNA, 19 nt, Homo sapiens
  misc_RNA (1)...(19): siRNA sense strand
gcgaagguucuacucuaua

SEQ ID NO: 1405331 - RNA, 19 nt, Homo sapiens
  misc_RNA (1)...(19): siRNA sense strand
ggaguaacugcauaaaugu

SEQ ID NO: 1405332 - RNA, 19 nt, Homo sapiens
  misc_RNA (1)...(19): siRNA sense strand
ccucuucaaccucuacuua

SEQ ID NO: 1405333 - RNA, 19 nt, Homo sapiens
  misc_RNA (1)...(19): siRNA sense strand
ucaacgaauuucagugguu

SEQ ID NO: 1405334 - RNA, 19 nt, Homo sapiens
  misc_RNA (1)...(19): siRNA sense strand
caaaugccagguucuaguu

SEQ ID NO: 1405335 - RNA, 19 nt, Homo sapiens
  misc_RNA (1)...(19): siRNA sense strand
ggagugugaucaaguucau

SEQ ID NO: 1405336 - RNA, 19 nt, Homo sapiens
  misc_RNA (1)...(19): siRNA sense strand
acagauuccuggcuaacaa

SEQ ID NO: 1405337 - RNA, 19 nt, Homo sapiens
  misc_RNA (1)...(19): siRNA sense strand
cagaucagcacaucaguau

SEQ ID NO: 1405338 - RNA, 19 nt, Homo sapiens
  misc_RNA (1)...(19): siRNA sense strand
agaggagugugaucaaguu

SEQ ID NO: 1405339 - RNA, 19 nt, Homo sapiens
  misc_RNA (1)...(19): siRNA sense strand
ggacuccgcauggaagaaa

SEQ ID NO: 1405340 - RNA, 19 nt, Homo sapiens
  misc_RNA (1)...(19): siRNA sense strand
guaacgacaacucaacuga

SEQ ID NO: 1405341 - RNA, 19 nt, Homo sapiens
  misc_RNA (1)...(19): siRNA sense strand
caagcccuauccacacauu

SEQ ID NO: 1405342 - RNA, 19 nt, Homo sapiens
  misc_RNA (1)...(19): siRNA sense strand
ccacacccaucaaagaucu

SEQ ID NO: 1405343 - RNA, 19 nt, Homo sapiens
  misc_RNA (1)...(19): siRNA sense strand
gaagacucccaggauuuaa

SEQ ID NO: 1405344 - RNA, 19 nt, Homo sapiens
  misc_RNA (1)...(19): siRNA sense strand
ggaugaggaaguuggcuuu

SEQ ID NO: 1405345 - RNA, 19 nt, Homo sapiens
  misc_RNA (1)...(19): siRNA sense strand
caaccucuacuuaucaguu

SEQ ID NO: 1405346 - RNA, 19 nt, Homo sapiens
  misc_RNA (1)...(19): siRNA sense strand
ggaaaugcaggaccuagca

SEQ ID NO: 1405347 - RNA, 19 nt, Homo sapiens
  misc_RNA (1)...(19): siRNA sense strand
ccuacagcuugcccacuua

SEQ ID NO: 1405348 - RNA, 19 nt, Homo sapiens
  misc_RNA (1)...(19): siRNA sense strand
ucucagaauuccaggucua

SEQ ID NO: 1405349 - RNA, 19 nt, Homo sapiens
  misc_RNA (1)...(19): siRNA sense strand
auaaaugucuugguaacga

SEQ ID NO: 1405350 - RNA, 19 nt, Homo sapiens
  misc_RNA (1)...(19): siRNA sense strand
ggaaguuggcuuuucguua

SEQ ID NO: 1405351 - RNA, 19 nt, Homo sapiens
  misc_RNA (1)...(19): siRNA sense strand
gaucaaguucauauagaug

SEQ ID NO: 1405352 - RNA, 19 nt, Homo sapiens
  misc_RNA (1)...(19): siRNA sense strand
uaaccaaccaggagaguuc

SEQ ID NO: 1405353 - RNA, 19 nt, Homo sapiens
  misc_RNA (1)...(19): siRNA sense strand
guauggagcguauaugaca

SEQ ID NO: 1405354 - RNA, 19 nt, Homo sapiens
  misc_RNA (1)...(19): siRNA sense strand
gauuauccauccuauacag

SEQ ID NO: 1405355 - RNA, 19 nt, Homo sapiens
  misc_RNA (1)...(19): siRNA sense strand
gaccuagcaaguccucaua

SEQ ID NO: 1405356 - RNA, 19 nt, Homo sapiens
  misc_RNA (1)...(19): siRNA sense strand
cgauuugggugugauguug

SEQ ID NO: 1405357 - RNA, 19 nt, Homo sapiens
  misc_RNA (1)...(19): siRNA sense strand
ggagauggagcgcuugaca

SEQ ID NO: 1405358 - RNA, 19 nt, Homo sapiens
  misc_RNA (1)...(19): siRNA sense strand
uugcgaagguucuacucua

SEQ ID NO: 1405359 - RNA, 19 nt, Homo sapiens
  misc_RNA (1)...(19): siRNA sense strand
caggagaguucgauaccau

SEQ ID NO: 1405360 - RNA, 19 nt, Homo sapiens
  misc_RNA (1)...(19): siRNA sense strand
ccagaucagcacaucagua

SEQ ID NO: 1405361 - RNA, 19 nt, Homo sapiens
  misc_RNA (1)...(19): siRNA sense strand
gcagccagccgucuacaca

SEQ ID NO: 1405362 - RNA, 19 nt, Homo sapiens
  misc_RNA (1)...(19): siRNA sense strand
cacuggaauuagaguauuu

SEQ ID NO: 1405363 - RNA, 19 nt, Homo sapiens
  misc_RNA (1)...(19): siRNA sense strand
accaagcacuggaauuaga

SEQ ID NO: 1405364 - RNA, 19 nt, Homo sapiens
  misc_RNA (1)...(19): siRNA sense strand
ggaugccuggcuacaguua

SEQ ID NO: 1405365 - RNA, 19 nt, Homo sapiens
  misc_RNA (1)...(19): siRNA sense strand
caaccaggagaguucgaua

SEQ ID NO: 1405366 - RNA, 19 nt, Homo sapiens
  misc_RNA (1)...(19): siRNA sense strand
gcacaguauuauucagcau

SEQ ID NO: 1405367 - RNA, 19 nt, Homo sapiens
  misc_RNA (1)...(19): siRNA sense strand
acagaaguauggcaaggau

SEQ ID NO: 1405368 - RNA, 19 nt, Homo sapiens
  misc_RNA (1)...(19): siRNA sense strand
gaaaugcaggaccuagcaa

SEQ ID NO: 1405369 - RNA, 19 nt, Homo sapiens
  misc_RNA (1)...(19): siRNA sense strand
gcacuaggaguaacugcau

SEQ ID NO: 1405370 - RNA, 19 nt, Homo sapiens
  misc_RNA (1)...(19): siRNA sense strand
auuauuagcacuaggagua

SEQ ID NO: 1405371 - RNA, 19 nt, Homo sapiens
  misc_RNA (1)...(19): siRNA sense strand
ccgcauggaagaaaugauu

SEQ ID NO: 1405372 - RNA, 19 nt, Homo sapiens
  misc_RNA (1)...(19): siRNA sense strand
accagcagcucaaacaaug

SEQ ID NO: 1405373 - RNA, 19 nt, Homo sapiens
  misc_RNA (1)...(19): siRNA sense strand
ggauauccagucacucaga

SEQ ID NO: 1405374 - RNA, 19 nt, Homo sapiens
  misc_RNA (1)...(19): siRNA sense strand
guaacugcauaaaugucuu

SEQ ID NO: 1405375 - RNA, 19 nt, Homo sapiens
  misc_RNA (1)...(19): siRNA sense strand
cguauaugacaucgaauaa

SEQ ID NO: 1405376 - RNA, 19 nt, Homo sapiens
  misc_RNA (1)...(19): siRNA sense strand
caggacagcccuacagcuu

SEQ ID NO: 1405377 - RNA, 19 nt, Homo sapiens
  misc_RNA (1)...(19): siRNA sense strand
gaaucucucccaggacuga

SEQ ID NO: 1405378 - RNA, 19 nt, Homo sapiens
  misc_RNA (1)...(19): siRNA sense strand
gugguucacaacaggauua

SEQ ID NO: 1405379 - RNA, 19 nt, Homo sapiens
  misc_RNA (1)...(19): siRNA sense strand
caucaucuacuauuuaugc

SEQ ID NO: 1405380 - RNA, 19 nt, Homo sapiens
  misc_RNA (1)...(19): siRNA sense strand
ggccagacaccuuauucuu

SEQ ID NO: 1405381 - RNA, 19 nt, Homo sapiens
  misc_RNA (1)...(19): siRNA sense strand
ccaggucuauggaaaugca

SEQ ID NO: 1405382 - RNA, 19 nt, Homo sapiens
  misc_RNA (1)...(19): siRNA sense strand
ccuccuggcucuccaccaa

SEQ ID NO: 1405383 - RNA, 19 nt, Homo sapiens
  misc_RNA (1)...(19): siRNA sense strand
gguucuacucuauaguuua

SEQ ID NO: 1405384 - RNA, 19 nt, Homo sapiens
  misc_RNA (1)...(19): siRNA sense strand
gaaccacuaucccguguuu

SEQ ID NO: 1405385 - RNA, 19 nt, Homo sapiens
  misc_RNA (1)...(19): siRNA sense strand
gggacuaccugaaccacua

SEQ ID NO: 1405386 - RNA, 19 nt, Homo sapiens
  misc_RNA (1)...(19): siRNA sense strand
gggaugcucuucacagcua

SEQ ID NO: 1405387 - RNA, 19 nt, Homo sapiens
  misc_RNA (1)...(19): siRNA sense strand
aagcugaccuggagaucua

SEQ ID NO: 1405388 - RNA, 19 nt, Homo sapiens
  misc_RNA (1)...(19): siRNA sense strand
gggcagccaugucuacuuc

SEQ ID NO: 1405389 - RNA, 19 nt, Homo sapiens
  misc_RNA (1)...(19): siRNA sense strand
agauugcgauggaguuuaa

SEQ ID NO: 1405390 - RNA, 19 nt, Homo sapiens
  misc_RNA (1)...(19): siRNA sense strand
gguggcagcuguguuugaa

SEQ ID NO: 1405391 - RNA, 19 nt, Homo sapiens
  misc_RNA (1)...(19): siRNA sense strand
gggcgagugucgaaacuuc

SEQ ID NO: 1405392 - RNA, 19 nt, Homo sapiens
  misc_RNA (1)...(19): siRNA sense strand
gcagccaugucuacuucuu

SEQ ID NO: 1405393 - RNA, 19 nt, Homo sapiens
  misc_RNA (1)...(19): siRNA sense strand
gagacaacaucagcgguau

SEQ ID NO: 1405394 - RNA, 19 nt, Homo sapiens
  misc_RNA (1)...(19): siRNA sense strand
ggacagggacaaccucuac

SEQ ID NO: 1405395 - RNA, 19 nt, Homo sapiens
  misc_RNA (1)...(19): siRNA sense strand
auaaacgugugucggauga

SEQ ID NO: 1405396 - RNA, 19 nt, Homo sapiens
  misc_RNA (1)...(19): siRNA sense strand
ggagauugcgauggaguuu

SEQ ID NO: 1405397 - RNA, 19 nt, Homo sapiens
  misc_RNA (1)...(19): siRNA sense strand
cagcuacuguuaccgacuu

SEQ ID NO: 1405398 - RNA, 19 nt, Homo sapiens
  misc_RNA (1)...(19): siRNA sense strand
gagauugcgauggaguuua

SEQ ID NO: 1405399 - RNA, 19 nt, Homo sapiens
  misc_RNA (1)...(19): siRNA sense strand
gagacucccauuucuacuu

SEQ ID NO: 1405400 - RNA, 19 nt, Homo sapiens
  misc_RNA (1)...(19): siRNA sense strand
agacucccauuucuacuuc

SEQ ID NO: 1405401 - RNA, 19 nt, Homo sapiens
  misc_RNA (1)...(19): siRNA sense strand
gucaagacccacccucuga

SEQ ID NO: 1405402 - RNA, 19 nt, Homo sapiens
  misc_RNA (1)...(19): siRNA sense strand
cggcucaacugcucuguac

SEQ ID NO: 1405403 - RNA, 19 nt, Homo sapiens
  misc_RNA (1)...(19): siRNA sense strand
ugaaacaugacuccaagug

SEQ ID NO: 1405404 - RNA, 19 nt, Homo sapiens
  misc_RNA (1)...(19): siRNA sense strand
caagacccacccucugaug

SEQ ID NO: 1405405 - RNA, 19 nt, Homo sapiens
  misc_RNA (1)...(19): siRNA sense strand
ggacuaccugaaccacuau

SEQ ID NO: 1405406 - RNA, 19 nt, Homo sapiens
  misc_RNA (1)...(19): siRNA sense strand
aaacgugugucggaugaag

SEQ ID NO: 1405407 - RNA, 19 nt, Homo sapiens
  misc_RNA (1)...(19): siRNA sense strand
caaacaggagggcgagugu

SEQ ID NO: 1405408 - RNA, 19 nt, Homo sapiens
  misc_RNA (1)...(19): siRNA sense strand
gaagcugaccuggagaucu

SEQ ID NO: 1405409 - RNA, 19 nt, Homo sapiens
  misc_RNA (1)...(19): siRNA sense strand
gagggcgagugucgaaacu

SEQ ID NO: 1405410 - RNA, 19 nt, Homo sapiens
  misc_RNA (1)...(19): siRNA sense strand
caauguugcccucuucucu

SEQ ID NO: 1405411 - RNA, 19 nt, Homo sapiens
  misc_RNA (1)...(19): siRNA sense strand
gacaacaucagcgguaugg

SEQ ID NO: 1405412 - RNA, 19 nt, Homo sapiens
  misc_RNA (1)...(19): siRNA sense strand
ccaugucuacuucuucuuc

SEQ ID NO: 1405413 - RNA, 19 nt, Homo sapiens
  misc_RNA (1)...(19): siRNA sense strand
caggagggcgagugucgaa

SEQ ID NO: 1405414 - RNA, 19 nt, Homo sapiens
  misc_RNA (1)...(19): siRNA sense strand
ucuccgaggugccgguuag

SEQ ID NO: 1405415 - RNA, 19 nt, Homo sapiens
  misc_RNA (1)...(19): siRNA sense strand
ccgacuuccuagccauuga

SEQ ID NO: 1405416 - RNA, 19 nt, Homo sapiens
  misc_RNA (1)...(19): siRNA sense strand
cccaagcacgccaauguug

SEQ ID NO: 1405417 - RNA, 19 nt, Homo sapiens
  misc_RNA (1)...(19): siRNA sense strand
gugcgccaacuacagcaua

SEQ ID NO: 1405418 - RNA, 19 nt, Homo sapiens
  misc_RNA (1)...(19): siRNA sense strand
uccgggagauugcgaugga

SEQ ID NO: 1405419 - RNA, 19 nt, Homo sapiens
  misc_RNA (1)...(19): siRNA sense strand
gaggugccgguuaggaguu

SEQ ID NO: 1405420 - RNA, 19 nt, Homo sapiens
  misc_RNA (1)...(19): siRNA sense strand
gaaccacuaucccguguuu

SEQ ID NO: 1405421 - RNA, 19 nt, Homo sapiens
  misc_RNA (1)...(19): siRNA sense strand
gggacuaccugaaccacua

SEQ ID NO: 1405422 - RNA, 19 nt, Homo sapiens
  misc_RNA (1)...(19): siRNA sense strand
gggaugcucuucacagcua

SEQ ID NO: 1405423 - RNA, 19 nt, Homo sapiens
  misc_RNA (1)...(19): siRNA sense strand
aagcugaccuggagaucua

SEQ ID NO: 1405424 - RNA, 19 nt, Homo sapiens
  misc_RNA (1)...(19): siRNA sense strand
gggcagccaugucuacuuc

SEQ ID NO: 1405425 - RNA, 19 nt, Homo sapiens
  misc_RNA (1)...(19): siRNA sense strand
agauugcgauggaguuuaa

SEQ ID NO: 1405426 - RNA, 19 nt, Homo sapiens
  misc_RNA (1)...(19): siRNA sense strand
gguggcagcuguguuugaa

SEQ ID NO: 1405427 - RNA, 19 nt, Homo sapiens
  misc_RNA (1)...(19): siRNA sense strand
gggcgagugucgaaacuuc

SEQ ID NO: 1405428 - RNA, 19 nt, Homo sapiens
  misc_RNA (1)...(19): siRNA sense strand
gcagccaugucuacuucuu

SEQ ID NO: 1405429 - RNA, 19 nt, Homo sapiens
  misc_RNA (1)...(19): siRNA sense strand
gagacaacaucagcgguau

SEQ ID NO: 1405430 - RNA, 19 nt, Homo sapiens
  misc_RNA (1)...(19): siRNA sense strand
ggacagggacaaccucuac

SEQ ID NO: 1405431 - RNA, 19 nt, Homo sapiens
  misc_RNA (1)...(19): siRNA sense strand
auaaacgugugucggauga

SEQ ID NO: 1405432 - RNA, 19 nt, Homo sapiens
  misc_RNA (1)...(19): siRNA sense strand
ggagauugcgauggaguuu

SEQ ID NO: 1405433 - RNA, 19 nt, Homo sapiens
  misc_RNA (1)...(19): siRNA sense strand
cagcuacuguuaccgacuu

SEQ ID NO: 1405434 - RNA, 19 nt, Homo sapiens
  misc_RNA (1)...(19): siRNA sense strand
gagauugcgauggaguuua

SEQ ID NO: 1405435 - RNA, 19 nt, Homo sapiens
  misc_RNA (1)...(19): siRNA sense strand
gagacucccauuucuacuu

SEQ ID NO: 1405436 - RNA, 19 nt, Homo sapiens
  misc_RNA (1)...(19): siRNA sense strand
agacucccauuucuacuuc

SEQ ID NO: 1405437 - RNA, 19 nt, Homo sapiens
  misc_RNA (1)...(19): siRNA sense strand
gucaagacccacccucuga

SEQ ID NO: 1405438 - RNA, 19 nt, Homo sapiens
  misc_RNA (1)...(19): siRNA sense strand
cggcucaacugcucuguac

SEQ ID NO: 1405439 - RNA, 19 nt, Homo sapiens
  misc_RNA (1)...(19): siRNA sense strand
ugaaacaugacuccaagug

SEQ ID NO: 1405440 - RNA, 19 nt, Homo sapiens
  misc_RNA (1)...(19): siRNA sense strand
caagacccacccucugaug

SEQ ID NO: 1405441 - RNA, 19 nt, Homo sapiens
  misc_RNA (1)...(19): siRNA sense strand
ggacuaccugaaccacuau

SEQ ID NO: 1405442 - RNA, 19 nt, Homo sapiens
  misc_RNA (1)...(19): siRNA sense strand
aaacgugugucggaugaag

SEQ ID NO: 1405443 - RNA, 19 nt, Homo sapiens
  misc_RNA (1)...(19): siRNA sense strand
caaacaggagggcgagugu

SEQ ID NO: 1405444 - RNA, 19 nt, Homo sapiens
  misc_RNA (1)...(19): siRNA sense strand
gaagcugaccuggagaucu

SEQ ID NO: 1405445 - RNA, 19 nt, Homo sapiens
  misc_RNA (1)...(19): siRNA sense strand
gagggcgagugucgaaacu

SEQ ID NO: 1405446 - RNA, 19 nt, Homo sapiens
  misc_RNA (1)...(19): siRNA sense strand
caauguugcccucuucucu

SEQ ID NO: 1405447 - RNA, 19 nt, Homo sapiens
  misc_RNA (1)...(19): siRNA sense strand
gacaacaucagcgguaugg

SEQ ID NO: 1405448 - RNA, 19 nt, Homo sapiens
  misc_RNA (1)...(19): siRNA sense strand
ccaugucuacuucuucuuc

SEQ ID NO: 1405449 - RNA, 19 nt, Homo sapiens
  misc_RNA (1)...(19): siRNA sense strand
caggagggcgagugucgaa

SEQ ID NO: 1405450 - RNA, 19 nt, Homo sapiens
  misc_RNA (1)...(19): siRNA sense strand
ccgacuuccuagccauuga

SEQ ID NO: 1405451 - RNA, 19 nt, Homo sapiens
  misc_RNA (1)...(19): siRNA sense strand
cccaagcacgccaauguug

SEQ ID NO: 1405452 - RNA, 19 nt, Homo sapiens
  misc_RNA (1)...(19): siRNA sense strand
gugcgccaacuacagcaua

SEQ ID NO: 1405453 - RNA, 19 nt, Homo sapiens
  misc_RNA (1)...(19): siRNA sense strand
uccgggagauugcgaugga

SEQ ID NO: 1405454 - RNA, 19 nt, Homo sapiens
  misc_RNA (1)...(19): siRNA sense strand
gaaccacuaucccguguuu

SEQ ID NO: 1405455 - RNA, 19 nt, Homo sapiens
  misc_RNA (1)...(19): siRNA sense strand
gggacuaccugaaccacua

SEQ ID NO: 1405456 - RNA, 19 nt, Homo sapiens
  misc_RNA (1)...(19): siRNA sense strand
gggaugcucuucacagcua

SEQ ID NO: 1405457 - RNA, 19 nt, Homo sapiens
  misc_RNA (1)...(19): siRNA sense strand
aagcugaccuggagaucua

SEQ ID NO: 1405458 - RNA, 19 nt, Homo sapiens
  misc_RNA (1)...(19): siRNA sense strand
gggcagccaugucuacuuc

SEQ ID NO: 1405459 - RNA, 19 nt, Homo sapiens
  misc_RNA (1)...(19): siRNA sense strand
agauugcgauggaguuuaa

SEQ ID NO: 1405460 - RNA, 19 nt, Homo sapiens
  misc_RNA (1)...(19): siRNA sense strand
gguggcagcuguguuugaa

SEQ ID NO: 1405461 - RNA, 19 nt, Homo sapiens
  misc_RNA (1)...(19): siRNA sense strand
gggcgagugucgaaacuuc

SEQ ID NO: 1405462 - RNA, 19 nt, Homo sapiens
  misc_RNA (1)...(19): siRNA sense strand
gcagccaugucuacuucuu

SEQ ID NO: 1405463 - RNA, 19 nt, Homo sapiens
  misc_RNA (1)...(19): siRNA sense strand
gagacaacaucagcgguau

SEQ ID NO: 1405464 - RNA, 19 nt, Homo sapiens
  misc_RNA (1)...(19): siRNA sense strand
ggacagggacaaccucuac

SEQ ID NO: 1405465 - RNA, 19 nt, Homo sapiens
  misc_RNA (1)...(19): siRNA sense strand
auaaacgugugucggauga

SEQ ID NO: 1405466 - RNA, 19 nt, Homo sapiens
  misc_RNA (1)...(19): siRNA sense strand
ggagauugcgauggaguuu

SEQ ID NO: 1405467 - RNA, 19 nt, Homo sapiens
  misc_RNA (1)...(19): siRNA sense strand
cagcuacuguuaccgacuu

SEQ ID NO: 1405468 - RNA, 19 nt, Homo sapiens
  misc_RNA (1)...(19): siRNA sense strand
gagauugcgauggaguuua

SEQ ID NO: 1405469 - RNA, 19 nt, Homo sapiens
  misc_RNA (1)...(19): siRNA sense strand
gagacucccauuucuacuu

SEQ ID NO: 1405470 - RNA, 19 nt, Homo sapiens
  misc_RNA (1)...(19): siRNA sense strand
agacucccauuucuacuuc

SEQ ID NO: 1405471 - RNA, 19 nt, Homo sapiens
  misc_RNA (1)...(19): siRNA sense strand
gucaagacccacccucuga

SEQ ID NO: 1405472 - RNA, 19 nt, Homo sapiens
  misc_RNA (1)...(19): siRNA sense strand
cggcucaacugcucuguac

SEQ ID NO: 1405473 - RNA, 19 nt, Homo sapiens
  misc_RNA (1)...(19): siRNA sense strand
ugaaacaugacuccaagug

SEQ ID NO: 1405474 - RNA, 19 nt, Homo sapiens
  misc_RNA (1)...(19): siRNA sense strand
caagacccacccucugaug

SEQ ID NO: 1405475 - RNA, 19 nt, Homo sapiens
  misc_RNA (1)...(19): siRNA sense strand
ggacuaccugaaccacuau

SEQ ID NO: 1405476 - RNA, 19 nt, Homo sapiens
  misc_RNA (1)...(19): siRNA sense strand
aaacgugugucggaugaag

SEQ ID NO: 1405477 - RNA, 19 nt, Homo sapiens
  misc_RNA (1)...(19): siRNA sense strand
caaacaggagggcgagugu

SEQ ID NO: 1405478 - RNA, 19 nt, Homo sapiens
  misc_RNA (1)...(19): siRNA sense strand
gaagcugaccuggagaucu

SEQ ID NO: 1405479 - RNA, 19 nt, Homo sapiens
  misc_RNA (1)...(19): siRNA sense strand
gagggcgagugucgaaacu

SEQ ID NO: 1405480 - RNA, 19 nt, Homo sapiens
  misc_RNA (1)...(19): siRNA sense strand
caauguugcccucuucucu

SEQ ID NO: 1405481 - RNA, 19 nt, Homo sapiens
  misc_RNA (1)...(19): siRNA sense strand
gacaacaucagcgguaugg

SEQ ID NO: 1405482 - RNA, 19 nt, Homo sapiens
  misc_RNA (1)...(19): siRNA sense strand
ccaugucuacuucuucuuc

SEQ ID NO: 1405483 - RNA, 19 nt, Homo sapiens
  misc_RNA (1)...(19): siRNA sense strand
caggagggcgagugucgaa

SEQ ID NO: 1405484 - RNA, 19 nt, Homo sapiens
  misc_RNA (1)...(19): siRNA sense strand
ucuccgaggugccgguuag

SEQ ID NO: 1405485 - RNA, 19 nt, Homo sapiens
  misc_RNA (1)...(19): siRNA sense strand
ccgacuuccuagccauuga

SEQ ID NO: 1405486 - RNA, 19 nt, Homo sapiens
  misc_RNA (1)...(19): siRNA sense strand
cccaagcacgccaauguug

SEQ ID NO: 1405487 - RNA, 19 nt, Homo sapiens
  misc_RNA (1)...(19): siRNA sense strand
gugcgccaacuacagcaua

SEQ ID NO: 1405488 - RNA, 19 nt, Homo sapiens
  misc_RNA (1)...(19): siRNA sense strand
uccgggagauugcgaugga

SEQ ID NO: 1405489 - RNA, 19 nt, Homo sapiens
  misc_RNA (1)...(19): siRNA sense strand
gaggugccgguuaggaguu

SEQ ID NO: 1405490 - RNA, 19 nt, Homo sapiens
  misc_RNA (1)...(19): siRNA sense strand
gcauguaaaccacugaaga

SEQ ID NO: 1405491 - RNA, 19 nt, Homo sapiens
  misc_RNA (1)...(19): siRNA sense strand
cauguaaaccacugaagaa

SEQ ID NO: 1405492 - RNA, 19 nt, Homo sapiens
  misc_RNA (1)...(19): siRNA sense strand
gcucuuggguuuagcaaaa

SEQ ID NO: 1405493 - RNA, 19 nt, Homo sapiens
  misc_RNA (1)...(19): siRNA sense strand
aaaucugucugaugcaugu

SEQ ID NO: 1405494 - RNA, 19 nt, Homo sapiens
  misc_RNA (1)...(19): siRNA sense strand
ggcagcaucuucagcucuu

SEQ ID NO: 1405495 - RNA, 19 nt, Homo sapiens
  misc_RNA (1)...(19): siRNA sense strand
cuucagcucuuggguuuag

SEQ ID NO: 1405496 - RNA, 19 nt, Homo sapiens
  misc_RNA (1)...(19): siRNA sense strand
ccacugaagaagcgaaauc

SEQ ID NO: 1405497 - RNA, 19 nt, Homo sapiens
  misc_RNA (1)...(19): siRNA sense strand
cauccuuaacugagaauga

SEQ ID NO: 1405498 - RNA, 19 nt, Homo sapiens
  misc_RNA (1)...(19): siRNA sense strand
gcagcaucuucagcucuug

SEQ ID NO: 1405499 - RNA, 19 nt, Homo sapiens
  misc_RNA (1)...(19): siRNA sense strand
cugcauccuuaacugagaa

SEQ ID NO: 1405500 - RNA, 19 nt, Homo sapiens
  misc_RNA (1)...(19): siRNA sense strand
gcauguaaaccacugaaga

SEQ ID NO: 1405501 - RNA, 19 nt, Homo sapiens
  misc_RNA (1)...(19): siRNA sense strand
cauguaaaccacugaagaa

SEQ ID NO: 1405502 - RNA, 19 nt, Homo sapiens
  misc_RNA (1)...(19): siRNA sense strand
gcucuuggguuuagcaaaa

SEQ ID NO: 1405503 - RNA, 19 nt, Homo sapiens
  misc_RNA (1)...(19): siRNA sense strand
aaaucugucugaugcaugu

SEQ ID NO: 1405504 - RNA, 19 nt, Homo sapiens
  misc_RNA (1)...(19): siRNA sense strand
ggcagcaucuucagcucuu

SEQ ID NO: 1405505 - RNA, 19 nt, Homo sapiens
  misc_RNA (1)...(19): siRNA sense strand
cuucagcucuuggguuuag

SEQ ID NO: 1405506 - RNA, 19 nt, Homo sapiens
  misc_RNA (1)...(19): siRNA sense strand
ccacugaagaagcgaaauc

SEQ ID NO: 1405507 - RNA, 19 nt, Homo sapiens
  misc_RNA (1)...(19): siRNA sense strand
cauccuuaacugagaauga

SEQ ID NO: 1405508 - RNA, 19 nt, Homo sapiens
  misc_RNA (1)...(19): siRNA sense strand
gcagcaucuucagcucuug

SEQ ID NO: 1405509 - RNA, 19 nt, Homo sapiens
  misc_RNA (1)...(19): siRNA sense strand
cugcauccuuaacugagaa

SEQ ID NO: 1405510 - RNA, 19 nt, Homo sapiens
  misc_RNA (1)...(19): siRNA sense strand
gcauguaaaccacugaaga

SEQ ID NO: 1405511 - RNA, 19 nt, Homo sapiens
  misc_RNA (1)...(19): siRNA sense strand
cauguaaaccacugaagaa

SEQ ID NO: 1405512 - RNA, 19 nt, Homo sapiens
  misc_RNA (1)...(19): siRNA sense strand
gcucuuggguuuagcaaaa

SEQ ID NO: 1405513 - RNA, 19 nt, Homo sapiens
  misc_RNA (1)...(19): siRNA sense strand
aaaucugucugaugcaugu

SEQ ID NO: 1405514 - RNA, 19 nt, Homo sapiens
  misc_RNA (1)...(19): siRNA sense strand
ggcagcaucuucagcucuu

SEQ ID NO: 1405515 - RNA, 19 nt, Homo sapiens
  misc_RNA (1)...(19): siRNA sense strand
cuucagcucuuggguuuag

SEQ ID NO: 1405516 - RNA, 19 nt, Homo sapiens
  misc_RNA (1)...(19): siRNA sense strand
ccacugaagaagcgaaauc

SEQ ID NO: 1405517 - RNA, 19 nt, Homo sapiens
  misc_RNA (1)...(19): siRNA sense strand
cauccuuaacugagaauga

SEQ ID NO: 1405518 - RNA, 19 nt, Homo sapiens
  misc_RNA (1)...(19): siRNA sense strand
gcagcaucuucagcucuug

SEQ ID NO: 1405519 - RNA, 19 nt, Homo sapiens
  misc_RNA (1)...(19): siRNA sense strand
cugcauccuuaacugagaa

SEQ ID NO: 1405520 - RNA, 19 nt, Homo sapiens
  misc_RNA (1)...(19): siRNA sense strand
gcauguaaaccacugaaga

SEQ ID NO: 1405521 - RNA, 19 nt, Homo sapiens
  misc_RNA (1)...(19): siRNA sense strand
cauguaaaccacugaagaa

SEQ ID NO: 1405522 - RNA, 19 nt, Homo sapiens
  misc_RNA (1)...(19): siRNA sense strand
gcucuuggguuuagcaaaa

SEQ ID NO: 1405523 - RNA, 19 nt, Homo sapiens
  misc_RNA (1)...(19): siRNA sense strand
aaaucugucugaugcaugu

SEQ ID NO: 1405524 - RNA, 19 nt, Homo sapiens
  misc_RNA (1)...(19): siRNA sense strand
ggcagcaucuucagcucuu

SEQ ID NO: 1405525 - RNA, 19 nt, Homo sapiens
  misc_RNA (1)...(19): siRNA sense strand
cuucagcucuuggguuuag

SEQ ID NO: 1405526 - RNA, 19 nt, Homo sapiens
  misc_RNA (1)...(19): siRNA sense strand
ccacugaagaagcgaaauc

SEQ ID NO: 1405527 - RNA, 19 nt, Homo sapiens
  misc_RNA (1)...(19): siRNA sense strand
cauccuuaacugagaauga

SEQ ID NO: 1405528 - RNA, 19 nt, Homo sapiens
  misc_RNA (1)...(19): siRNA sense strand
gcagcaucuucagcucuug

SEQ ID NO: 1405529 - RNA, 19 nt, Homo sapiens
  misc_RNA (1)...(19): siRNA sense strand
cugcauccuuaacugagaa

SEQ ID NO: 1405530 - RNA, 19 nt, Homo sapiens
  misc_RNA (1)...(19): siRNA sense strand
gcauguaaaccacugaaga

SEQ ID NO: 1405531 - RNA, 19 nt, Homo sapiens
  misc_RNA (1)...(19): siRNA sense strand
cauguaaaccacugaagaa

SEQ ID NO: 1405532 - RNA, 19 nt, Homo sapiens
  misc_RNA (1)...(19): siRNA sense strand
gcucuuggguuuagcaaaa

SEQ ID NO: 1405533 - RNA, 19 nt, Homo sapiens
  misc_RNA (1)...(19): siRNA sense strand
aaaucugucugaugcaugu

SEQ ID NO: 1405534 - RNA, 19 nt, Homo sapiens
  misc_RNA (1)...(19): siRNA sense strand
ggcagcaucuucagcucuu

SEQ ID NO: 1405535 - RNA, 19 nt, Homo sapiens
  misc_RNA (1)...(19): siRNA sense strand
cuucagcucuuggguuuag

SEQ ID NO: 1405536 - RNA, 19 nt, Homo sapiens
  misc_RNA (1)...(19): siRNA sense strand
ccacugaagaagcgaaauc

SEQ ID NO: 1405537 - RNA, 19 nt, Homo sapiens
  misc_RNA (1)...(19): siRNA sense strand
cauccuuaacugagaauga

SEQ ID NO: 1405538 - RNA, 19 nt, Homo sapiens
  misc_RNA (1)...(19): siRNA sense strand
gcagcaucuucagcucuug

SEQ ID NO: 1405539 - RNA, 19 nt, Homo sapiens
  misc_RNA (1)...(19): siRNA sense strand
cugcauccuuaacugagaa

SEQ ID NO: 1405540 - RNA, 19 nt, Homo sapiens
  misc_RNA (1)...(19): siRNA sense strand
gcauguaaaccacugaaga

SEQ ID NO: 1405541 - RNA, 19 nt, Homo sapiens
  misc_RNA (1)...(19): siRNA sense strand
cauguaaaccacugaagaa

SEQ ID NO: 1405542 - RNA, 19 nt, Homo sapiens
  misc_RNA (1)...(19): siRNA sense strand
gcucuuggguuuagcaaaa

SEQ ID NO: 1405543 - RNA, 19 nt, Homo sapiens
  misc_RNA (1)...(19): siRNA sense strand
aaaucugucugaugcaugu

SEQ ID NO: 1405544 - RNA, 19 nt, Homo sapiens
  misc_RNA (1)...(19): siRNA sense strand
ggcagcaucuucagcucuu

SEQ ID NO: 1405545 - RNA, 19 nt, Homo sapiens
  misc_RNA (1)...(19): siRNA sense strand
cuucagcucuuggguuuag

SEQ ID NO: 1405546 - RNA, 19 nt, Homo sapiens
  misc_RNA (1)...(19): siRNA sense strand
ccacugaagaagcgaaauc

SEQ ID NO: 1405547 - RNA, 19 nt, Homo sapiens
  misc_RNA (1)...(19): siRNA sense strand
cauccuuaacugagaauga

SEQ ID NO: 1405548 - RNA, 19 nt, Homo sapiens
  misc_RNA (1)...(19): siRNA sense strand
gcagcaucuucagcucuug

SEQ ID NO: 1405549 - RNA, 19 nt, Homo sapiens
  misc_RNA (1)...(19): siRNA sense strand
cugcauccuuaacugagaa

SEQ ID NO: 1405550 - RNA, 19 nt, Homo sapiens
  misc_RNA (1)...(19): siRNA sense strand
gcauguaaaccacugaaga

SEQ ID NO: 1405551 - RNA, 19 nt, Homo sapiens
  misc_RNA (1)...(19): siRNA sense strand
cauguaaaccacugaagaa

SEQ ID NO: 1405552 - RNA, 19 nt, Homo sapiens
  misc_RNA (1)...(19): siRNA sense strand
gcucuuggguuuagcaaaa

SEQ ID NO: 1405553 - RNA, 19 nt, Homo sapiens
  misc_RNA (1)...(19): siRNA sense strand
aaaucugucugaugcaugu

SEQ ID NO: 1405554 - RNA, 19 nt, Homo sapiens
  misc_RNA (1)...(19): siRNA sense strand
ggcagcaucuucagcucuu

SEQ ID NO: 1405555 - RNA, 19 nt, Homo sapiens
  misc_RNA (1)...(19): siRNA sense strand
cuucagcucuuggguuuag

SEQ ID NO: 1405556 - RNA, 19 nt, Homo sapiens
  misc_RNA (1)...(19): siRNA sense strand
ccacugaagaagcgaaauc

SEQ ID NO: 1405557 - RNA, 19 nt, Homo sapiens
  misc_RNA (1)...(19): siRNA sense strand
cauccuuaacugagaauga

SEQ ID NO: 1405558 - RNA, 19 nt, Homo sapiens
  misc_RNA (1)...(19): siRNA sense strand
gcagcaucuucagcucuug

SEQ ID NO: 1405559 - RNA, 19 nt, Homo sapiens
  misc_RNA (1)...(19): siRNA sense strand
cugcauccuuaacugagaa

SEQ ID NO: 1405560 - RNA, 19 nt, Homo sapiens
  misc_RNA (1)...(19): siRNA sense strand
gcauguaaaccacugaaga

SEQ ID NO: 1405561 - RNA, 19 nt, Homo sapiens
  misc_RNA (1)...(19): siRNA sense strand
cauguaaaccacugaagaa

SEQ ID NO: 1405562 - RNA, 19 nt, Homo sapiens
  misc_RNA (1)...(19): siRNA sense strand
gcucuuggguuuagcaaaa

SEQ ID NO: 1405563 - RNA, 19 nt, Homo sapiens
  misc_RNA (1)...(19): siRNA sense strand
aaaucugucugaugcaugu

SEQ ID NO: 1405564 - RNA, 19 nt, Homo sapiens
  misc_RNA (1)...(19): siRNA sense strand
ggcagcaucuucagcucuu

SEQ ID NO: 1405565 - RNA, 19 nt, Homo sapiens
  misc_RNA (1)...(19): siRNA sense strand
cuucagcucuuggguuuag

SEQ ID NO: 1405566 - RNA, 19 nt, Homo sapiens
  misc_RNA (1)...(19): siRNA sense strand
ccacugaagaagcgaaauc

SEQ ID NO: 1405567 - RNA, 19 nt, Homo sapiens
  misc_RNA (1)...(19): siRNA sense strand
cauccuuaacugagaauga

SEQ ID NO: 1405568 - RNA, 19 nt, Homo sapiens
  misc_RNA (1)...(19): siRNA sense strand
gcagcaucuucagcucuug

SEQ ID NO: 1405569 - RNA, 19 nt, Homo sapiens
  misc_RNA (1)...(19): siRNA sense strand
cugcauccuuaacugagaa

SEQ ID NO: 1405570 - RNA, 19 nt, Homo sapiens
  misc_RNA (1)...(19): siRNA sense strand
gaacucugcuuacccauuc

SEQ ID NO: 1405571 - RNA, 19 nt, Homo sapiens
  misc_RNA (1)...(19): siRNA sense strand
ggaaacaggcuuacucuga

SEQ ID NO: 1405572 - RNA, 19 nt, Homo sapiens
  misc_RNA (1)...(19): siRNA sense strand
caucaaaugucaucaacuu

SEQ ID NO: 1405573 - RNA, 19 nt, Homo sapiens
  misc_RNA (1)...(19): siRNA sense strand
gcagaaaucaaaguuauug

SEQ ID NO: 1405574 - RNA, 19 nt, Homo sapiens
  misc_RNA (1)...(19): siRNA sense strand
gaucuuguguggcaugaug

SEQ ID NO: 1405575 - RNA, 19 nt, Homo sapiens
  misc_RNA (1)...(19): siRNA sense strand
ucauagugcucccaucaaa

SEQ ID NO: 1405576 - RNA, 19 nt, Homo sapiens
  misc_RNA (1)...(19): siRNA sense strand
ucaaacaggccaccuuaaa

SEQ ID NO: 1405577 - RNA, 19 nt, Homo sapiens
  misc_RNA (1)...(19): siRNA sense strand
gcacucugcuggaauucug

SEQ ID NO: 1405578 - RNA, 19 nt, Homo sapiens
  misc_RNA (1)...(19): siRNA sense strand
caaacaggccaccuuaaau

SEQ ID NO: 1405579 - RNA, 19 nt, Homo sapiens
  misc_RNA (1)...(19): siRNA sense strand
cacaaccuguucccaauga

SEQ ID NO: 1405580 - RNA, 19 nt, Homo sapiens
  misc_RNA (1)...(19): siRNA sense strand
acgcagaaaucaaaguuau

SEQ ID NO: 1405581 - RNA, 19 nt, Homo sapiens
  misc_RNA (1)...(19): siRNA sense strand
aaacaggccaccuuaaauc

SEQ ID NO: 1405582 - RNA, 19 nt, Homo sapiens
  misc_RNA (1)...(19): siRNA sense strand
ucaaaguuauugggacuau

SEQ ID NO: 1405583 - RNA, 19 nt, Homo sapiens
  misc_RNA (1)...(19): siRNA sense strand
ugucugcccugguggguuu

SEQ ID NO: 1405584 - RNA, 19 nt, Homo sapiens
  misc_RNA (1)...(19): siRNA sense strand
gauuugcacucugcuggaa

SEQ ID NO: 1405585 - RNA, 19 nt, Homo sapiens
  misc_RNA (1)...(19): siRNA sense strand
ugucaaacaggccaccuua

SEQ ID NO: 1405586 - RNA, 19 nt, Homo sapiens
  misc_RNA (1)...(19): siRNA sense strand
caaaugucaucaacuucuc

SEQ ID NO: 1405587 - RNA, 19 nt, Homo sapiens
  misc_RNA (1)...(19): siRNA sense strand
gcccugguggguuucauua

SEQ ID NO: 1405588 - RNA, 19 nt, Homo sapiens
  misc_RNA (1)...(19): siRNA sense strand
aggauagccugaagaaaca

SEQ ID NO: 1405589 - RNA, 19 nt, Homo sapiens
  misc_RNA (1)...(19): siRNA sense strand
gcaugaugguauugagcuu

SEQ ID NO: 1405590 - RNA, 19 nt, Homo sapiens
  misc_RNA (1)...(19): siRNA sense strand
caucauagugcucccauca

SEQ ID NO: 1405591 - RNA, 19 nt, Homo sapiens
  misc_RNA (1)...(19): siRNA sense strand
ggacuauccagaucuugug

SEQ ID NO: 1405592 - RNA, 19 nt, Homo sapiens
  misc_RNA (1)...(19): siRNA sense strand
cagccugguuggaagcauu

SEQ ID NO: 1405593 - RNA, 19 nt, Homo sapiens
  misc_RNA (1)...(19): siRNA sense strand
cauagcagccugguuggaa

SEQ ID NO: 1405594 - RNA, 19 nt, Homo sapiens
  misc_RNA (1)...(19): siRNA sense strand
gugcucccaucaaauguca

SEQ ID NO: 1405595 - RNA, 19 nt, Homo sapiens
  misc_RNA (1)...(19): siRNA sense strand
ccugguggguuucauuauc

SEQ ID NO: 1405596 - RNA, 19 nt, Homo sapiens
  misc_RNA (1)...(19): siRNA sense strand
ucaaaugucaucaacuucu

SEQ ID NO: 1405597 - RNA, 19 nt, Homo sapiens
  misc_RNA (1)...(19): siRNA sense strand
aaacaucuacacgcagaaa

SEQ ID NO: 1405598 - RNA, 19 nt, Homo sapiens
  misc_RNA (1)...(19): siRNA sense strand
caaccuguucccaaugaga

SEQ ID NO: 1405599 - RNA, 19 nt, Homo sapiens
  misc_RNA (1)...(19): siRNA sense strand
ucucucugaugcugauuug

SEQ ID NO: 1405600 - RNA, 19 nt, Homo sapiens
  misc_RNA (1)...(19): siRNA sense strand
cuucuacacuguugaacuc

SEQ ID NO: 1405601 - RNA, 19 nt, Homo sapiens
  misc_RNA (1)...(19): siRNA sense strand
guauugagcuuggggauca

SEQ ID NO: 1405602 - RNA, 19 nt, Homo sapiens
  misc_RNA (1)...(19): siRNA sense strand
ucuacacgcagaaaucaaa

SEQ ID NO: 1405603 - RNA, 19 nt, Homo sapiens
  misc_RNA (1)...(19): siRNA sense strand
ugacuucuacacuguugaa

SEQ ID NO: 1405604 - RNA, 19 nt, Homo sapiens
  misc_RNA (1)...(19): siRNA sense strand
acacgcagaaaucaaaguu

SEQ ID NO: 1405605 - RNA, 19 nt, Homo sapiens
  misc_RNA (1)...(19): siRNA sense strand
gggacuauccagaucuugu

SEQ ID NO: 1405606 - RNA, 19 nt, Homo sapiens
  misc_RNA (1)...(19): siRNA sense strand
auagugcucccaucaaaug

SEQ ID NO: 1405607 - RNA, 19 nt, Homo sapiens
  misc_RNA (1)...(19): siRNA sense strand
uguguggcaugaugguauu

SEQ ID NO: 1405608 - RNA, 19 nt, Homo sapiens
  misc_RNA (1)...(19): siRNA sense strand
gaaacaucuacacgcagaa

SEQ ID NO: 1405609 - RNA, 19 nt, Homo sapiens
  misc_RNA (1)...(19): siRNA sense strand
aaacaggcuuacucugacu

SEQ ID NO: 1405610 - RNA, 19 nt, Homo sapiens
  misc_RNA (1)...(19): siRNA sense strand
caucuacacgcagaaauca

SEQ ID NO: 1405611 - RNA, 19 nt, Homo sapiens
  misc_RNA (1)...(19): siRNA sense strand
ugaacucugcuuacccauu

SEQ ID NO: 1405612 - RNA, 19 nt, Homo sapiens
  misc_RNA (1)...(19): siRNA sense strand
ucauuauccugucugucaa

SEQ ID NO: 1405613 - RNA, 19 nt, Homo sapiens
  misc_RNA (1)...(19): siRNA sense strand
uuugcacucugcuggaauu

SEQ ID NO: 1405614 - RNA, 19 nt, Homo sapiens
  misc_RNA (1)...(19): siRNA sense strand
caaaguuauugggacuauc

SEQ ID NO: 1405615 - RNA, 19 nt, Homo sapiens
  misc_RNA (1)...(19): siRNA sense strand
gguggaaacaggcuuacuc

SEQ ID NO: 1405616 - RNA, 19 nt, Homo sapiens
  misc_RNA (1)...(19): siRNA sense strand
ucacaaccuguucccaaug

SEQ ID NO: 1405617 - RNA, 19 nt, Homo sapiens
  misc_RNA (1)...(19): siRNA sense strand
cacgcagaaaucaaaguua

SEQ ID NO: 1405618 - RNA, 19 nt, Homo sapiens
  misc_RNA (1)...(19): siRNA sense strand
gucaaacaggccaccuuaa

SEQ ID NO: 1405619 - RNA, 19 nt, Homo sapiens
  misc_RNA (1)...(19): siRNA sense strand
uaucaaucgccacagagaa

SEQ ID NO: 1405620 - RNA, 19 nt, Homo sapiens
  misc_RNA (1)...(19): siRNA sense strand
gaacucugcuuacccauuc

SEQ ID NO: 1405621 - RNA, 19 nt, Homo sapiens
  misc_RNA (1)...(19): siRNA sense strand
ggaaacaggcuuacucuga

SEQ ID NO: 1405622 - RNA, 19 nt, Homo sapiens
  misc_RNA (1)...(19): siRNA sense strand
caucaaaugucaucaacuu

SEQ ID NO: 1405623 - RNA, 19 nt, Homo sapiens
  misc_RNA (1)...(19): siRNA sense strand
gcagaaaucaaaguuauug

SEQ ID NO: 1405624 - RNA, 19 nt, Homo sapiens
  misc_RNA (1)...(19): siRNA sense strand
gaucuuguguggcaugaug

SEQ ID NO: 1405625 - RNA, 19 nt, Homo sapiens
  misc_RNA (1)...(19): siRNA sense strand
ucauagugcucccaucaaa

SEQ ID NO: 1405626 - RNA, 19 nt, Homo sapiens
  misc_RNA (1)...(19): siRNA sense strand
ucaaacaggccaccuuaaa

SEQ ID NO: 1405627 - RNA, 19 nt, Homo sapiens
  misc_RNA (1)...(19): siRNA sense strand
gcacucugcuggaauucug

SEQ ID NO: 1405628 - RNA, 19 nt, Homo sapiens
  misc_RNA (1)...(19): siRNA sense strand
caaacaggccaccuuaaau

SEQ ID NO: 1405629 - RNA, 19 nt, Homo sapiens
  misc_RNA (1)...(19): siRNA sense strand
cacaaccuguucccaauga

SEQ ID NO: 1405630 - RNA, 19 nt, Homo sapiens
  misc_RNA (1)...(19): siRNA sense strand
acgcagaaaucaaaguuau

SEQ ID NO: 1405631 - RNA, 19 nt, Homo sapiens
  misc_RNA (1)...(19): siRNA sense strand
aaacaggccaccuuaaauc

SEQ ID NO: 1405632 - RNA, 19 nt, Homo sapiens
  misc_RNA (1)...(19): siRNA sense strand
ucaaaguuauugggacuau

SEQ ID NO: 1405633 - RNA, 19 nt, Homo sapiens
  misc_RNA (1)...(19): siRNA sense strand
ugucugcccugguggguuu

SEQ ID NO: 1405634 - RNA, 19 nt, Homo sapiens
  misc_RNA (1)...(19): siRNA sense strand
gauuugcacucugcuggaa

SEQ ID NO: 1405635 - RNA, 19 nt, Homo sapiens
  misc_RNA (1)...(19): siRNA sense strand
ugucaaacaggccaccuua

SEQ ID NO: 1405636 - RNA, 19 nt, Homo sapiens
  misc_RNA (1)...(19): siRNA sense strand
caaaugucaucaacuucuc

SEQ ID NO: 1405637 - RNA, 19 nt, Homo sapiens
  misc_RNA (1)...(19): siRNA sense strand
gcccugguggguuucauua

SEQ ID NO: 1405638 - RNA, 19 nt, Homo sapiens
  misc_RNA (1)...(19): siRNA sense strand
aggauagccugaagaaaca

SEQ ID NO: 1405639 - RNA, 19 nt, Homo sapiens
  misc_RNA (1)...(19): siRNA sense strand
gcaugaugguauugagcuu

SEQ ID NO: 1405640 - RNA, 19 nt, Homo sapiens
  misc_RNA (1)...(19): siRNA sense strand
caucauagugcucccauca

SEQ ID NO: 1405641 - RNA, 19 nt, Homo sapiens
  misc_RNA (1)...(19): siRNA sense strand
ggacuauccagaucuugug

SEQ ID NO: 1405642 - RNA, 19 nt, Homo sapiens
  misc_RNA (1)...(19): siRNA sense strand
cagccugguuggaagcauu

SEQ ID NO: 1405643 - RNA, 19 nt, Homo sapiens
  misc_RNA (1)...(19): siRNA sense strand
cauagcagccugguuggaa

SEQ ID NO: 1405644 - RNA, 19 nt, Homo sapiens
  misc_RNA (1)...(19): siRNA sense strand
gugcucccaucaaauguca

SEQ ID NO: 1405645 - RNA, 19 nt, Homo sapiens
  misc_RNA (1)...(19): siRNA sense strand
ccugguggguuucauuauc

SEQ ID NO: 1405646 - RNA, 19 nt, Homo sapiens
  misc_RNA (1)...(19): siRNA sense strand
ucaaaugucaucaacuucu

SEQ ID NO: 1405647 - RNA, 19 nt, Homo sapiens
  misc_RNA (1)...(19): siRNA sense strand
aaacaucuacacgcagaaa

SEQ ID NO: 1405648 - RNA, 19 nt, Homo sapiens
  misc_RNA (1)...(19): siRNA sense strand
caaccuguucccaaugaga

SEQ ID NO: 1405649 - RNA, 19 nt, Homo sapiens
  misc_RNA (1)...(19): siRNA sense strand
ucucucugaugcugauuug

SEQ ID NO: 1405650 - RNA, 19 nt, Homo sapiens
  misc_RNA (1)...(19): siRNA sense strand
cuucuacacuguugaacuc

SEQ ID NO: 1405651 - RNA, 19 nt, Homo sapiens
  misc_RNA (1)...(19): siRNA sense strand
guauugagcuuggggauca

SEQ ID NO: 1405652 - RNA, 19 nt, Homo sapiens
  misc_RNA (1)...(19): siRNA sense strand
ucuacacgcagaaaucaaa

SEQ ID NO: 1405653 - RNA, 19 nt, Homo sapiens
  misc_RNA (1)...(19): siRNA sense strand
ugacuucuacacuguugaa

SEQ ID NO: 1405654 - RNA, 19 nt, Homo sapiens
  misc_RNA (1)...(19): siRNA sense strand
acacgcagaaaucaaaguu

SEQ ID NO: 1405655 - RNA, 19 nt, Homo sapiens
  misc_RNA (1)...(19): siRNA sense strand
gggacuauccagaucuugu

SEQ ID NO: 1405656 - RNA, 19 nt, Homo sapiens
  misc_RNA (1)...(19): siRNA sense strand
auagugcucccaucaaaug

SEQ ID NO: 1405657 - RNA, 19 nt, Homo sapiens
  misc_RNA (1)...(19): siRNA sense strand
uguguggcaugaugguauu

SEQ ID NO: 1405658 - RNA, 19 nt, Homo sapiens
  misc_RNA (1)...(19): siRNA sense strand
gaaacaucuacacgcagaa

SEQ ID NO: 1405659 - RNA, 19 nt, Homo sapiens
  misc_RNA (1)...(19): siRNA sense strand
caucuacacgcagaaauca

SEQ ID NO: 1405660 - RNA, 19 nt, Homo sapiens
  misc_RNA (1)...(19): siRNA sense strand
ugaacucugcuuacccauu

SEQ ID NO: 1405661 - RNA, 19 nt, Homo sapiens
  misc_RNA (1)...(19): siRNA sense strand
ucauuauccugucugucaa

SEQ ID NO: 1405662 - RNA, 19 nt, Homo sapiens
  misc_RNA (1)...(19): siRNA sense strand
uuugcacucugcuggaauu

SEQ ID NO: 1405663 - RNA, 19 nt, Homo sapiens
  misc_RNA (1)...(19): siRNA sense strand
caaaguuauugggacuauc

SEQ ID NO: 1405664 - RNA, 19 nt, Homo sapiens
  misc_RNA (1)...(19): siRNA sense strand
gguggaaacaggcuuacuc

SEQ ID NO: 1405665 - RNA, 19 nt, Homo sapiens
  misc_RNA (1)...(19): siRNA sense strand
ucacaaccuguucccaaug

SEQ ID NO: 1405666 - RNA, 19 nt, Homo sapiens
  misc_RNA (1)...(19): siRNA sense strand
cacgcagaaaucaaaguua

SEQ ID NO: 1405667 - RNA, 19 nt, Homo sapiens
  misc_RNA (1)...(19): siRNA sense strand
gucaaacaggccaccuuaa

SEQ ID NO: 1405668 - RNA, 19 nt, Homo sapiens
  misc_RNA (1)...(19): siRNA sense strand
uaucaaucgccacagagaa

SEQ ID NO: 1405669 - RNA, 19 nt, Homo sapiens
  misc_RNA (1)...(19): siRNA sense strand
gaacucugcuuacccauuc

SEQ ID NO: 1405670 - RNA, 19 nt, Homo sapiens
  misc_RNA (1)...(19): siRNA sense strand
ggaaacaggcuuacucuga

SEQ ID NO: 1405671 - RNA, 19 nt, Homo sapiens
  misc_RNA (1)...(19): siRNA sense strand
caucaaaugucaucaacuu

SEQ ID NO: 1405672 - RNA, 19 nt, Homo sapiens
  misc_RNA (1)...(19): siRNA sense strand
gcagaaaucaaaguuauug

SEQ ID NO: 1405673 - RNA, 19 nt, Homo sapiens
  misc_RNA (1)...(19): siRNA sense strand
gaucuuguguggcaugaug

SEQ ID NO: 1405674 - RNA, 19 nt, Homo sapiens
  misc_RNA (1)...(19): siRNA sense strand
ucauagugcucccaucaaa

SEQ ID NO: 1405675 - RNA, 19 nt, Homo sapiens
  misc_RNA (1)...(19): siRNA sense strand
ucaaacaggccaccuuaaa

SEQ ID NO: 1405676 - RNA, 19 nt, Homo sapiens
  misc_RNA (1)...(19): siRNA sense strand
gcacucugcuggaauucug

SEQ ID NO: 1405677 - RNA, 19 nt, Homo sapiens
  misc_RNA (1)...(19): siRNA sense strand
caaacaggccaccuuaaau

SEQ ID NO: 1405678 - RNA, 19 nt, Homo sapiens
  misc_RNA (1)...(19): siRNA sense strand
cacaaccuguucccaauga

SEQ ID NO: 1405679 - RNA, 19 nt, Homo sapiens
  misc_RNA (1)...(19): siRNA sense strand
acgcagaaaucaaaguuau

SEQ ID NO: 1405680 - RNA, 19 nt, Homo sapiens
  misc_RNA (1)...(19): siRNA sense strand
aaacaggccaccuuaaauc

SEQ ID NO: 1405681 - RNA, 19 nt, Homo sapiens
  misc_RNA (1)...(19): siRNA sense strand
ucaaaguuauugggacuau

SEQ ID NO: 1405682 - RNA, 19 nt, Homo sapiens
  misc_RNA (1)...(19): siRNA sense strand
ugucugcccugguggguuu

SEQ ID NO: 1405683 - RNA, 19 nt, Homo sapiens
  misc_RNA (1)...(19): siRNA sense strand
gauuugcacucugcuggaa

SEQ ID NO: 1405684 - RNA, 19 nt, Homo sapiens
  misc_RNA (1)...(19): siRNA sense strand
ugucaaacaggccaccuua

SEQ ID NO: 1405685 - RNA, 19 nt, Homo sapiens
  misc_RNA (1)...(19): siRNA sense strand
caaaugucaucaacuucuc

SEQ ID NO: 1405686 - RNA, 19 nt, Homo sapiens
  misc_RNA (1)...(19): siRNA sense strand
gcccugguggguuucauua

SEQ ID NO: 1405687 - RNA, 19 nt, Homo sapiens
  misc_RNA (1)...(19): siRNA sense strand
aggauagccugaagaaaca

SEQ ID NO: 1405688 - RNA, 19 nt, Homo sapiens
  misc_RNA (1)...(19): siRNA sense strand
gcaugaugguauugagcuu

SEQ ID NO: 1405689 - RNA, 19 nt, Homo sapiens
  misc_RNA (1)...(19): siRNA sense strand
caucauagugcucccauca

SEQ ID NO: 1405690 - RNA, 19 nt, Homo sapiens
  misc_RNA (1)...(19): siRNA sense strand
ggacuauccagaucuugug

SEQ ID NO: 1405691 - RNA, 19 nt, Homo sapiens
  misc_RNA (1)...(19): siRNA sense strand
cagccugguuggaagcauu

SEQ ID NO: 1405692 - RNA, 19 nt, Homo sapiens
  misc_RNA (1)...(19): siRNA sense strand
cauagcagccugguuggaa

SEQ ID NO: 1405693 - RNA, 19 nt, Homo sapiens
  misc_RNA (1)...(19): siRNA sense strand
gugcucccaucaaauguca

SEQ ID NO: 1405694 - RNA, 19 nt, Homo sapiens
  misc_RNA (1)...(19): siRNA sense strand
ccugguggguuucauuauc

SEQ ID NO: 1405695 - RNA, 19 nt, Homo sapiens
  misc_RNA (1)...(19): siRNA sense strand
ucaaaugucaucaacuucu

SEQ ID NO: 1405696 - RNA, 19 nt, Homo sapiens
  misc_RNA (1)...(19): siRNA sense strand
aaacaucuacacgcagaaa

SEQ ID NO: 1405697 - RNA, 19 nt, Homo sapiens
  misc_RNA (1)...(19): siRNA sense strand
caaccuguucccaaugaga

SEQ ID NO: 1405698 - RNA, 19 nt, Homo sapiens
  misc_RNA (1)...(19): siRNA sense strand
ucucucugaugcugauuug

SEQ ID NO: 1405699 - RNA, 19 nt, Homo sapiens
  misc_RNA (1)...(19): siRNA sense strand
cuucuacacuguugaacuc

SEQ ID NO: 1405700 - RNA, 19 nt, Homo sapiens
  misc_RNA (1)...(19): siRNA sense strand
guauugagcuuggggauca

SEQ ID NO: 1405701 - RNA, 19 nt, Homo sapiens
  misc_RNA (1)...(19): siRNA sense strand
ucuacacgcagaaaucaaa

SEQ ID NO: 1405702 - RNA, 19 nt, Homo sapiens
  misc_RNA (1)...(19): siRNA sense strand
ugacuucuacacuguugaa

SEQ ID NO: 1405703 - RNA, 19 nt, Homo sapiens
  misc_RNA (1)...(19): siRNA sense strand
acacgcagaaaucaaaguu

SEQ ID NO: 1405704 - RNA, 19 nt, Homo sapiens
  misc_RNA (1)...(19): siRNA sense strand
gggacuauccagaucuugu

SEQ ID NO: 1405705 - RNA, 19 nt, Homo sapiens
  misc_RNA (1)...(19): siRNA sense strand
auagugcucccaucaaaug

SEQ ID NO: 1405706 - RNA, 19 nt, Homo sapiens
  misc_RNA (1)...(19): siRNA sense strand
uguguggcaugaugguauu

SEQ ID NO: 1405707 - RNA, 19 nt, Homo sapiens
  misc_RNA (1)...(19): siRNA sense strand
gaaacaucuacacgcagaa

SEQ ID NO: 1405708 - RNA, 19 nt, Homo sapiens
  misc_RNA (1)...(19): siRNA sense strand
aaacaggcuuacucugacu

SEQ ID NO: 1405709 - RNA, 19 nt, Homo sapiens
  misc_RNA (1)...(19): siRNA sense strand
caucuacacgcagaaauca

SEQ ID NO: 1405710 - RNA, 19 nt, Homo sapiens
  misc_RNA (1)...(19): siRNA sense strand
ugaacucugcuuacccauu

SEQ ID NO: 1405711 - RNA, 19 nt, Homo sapiens
  misc_RNA (1)...(19): siRNA sense strand
ucauuauccugucugucaa

SEQ ID NO: 1405712 - RNA, 19 nt, Homo sapiens
  misc_RNA (1)...(19): siRNA sense strand
uuugcacucugcuggaauu

SEQ ID NO: 1405713 - RNA, 19 nt, Homo sapiens
  misc_RNA (1)...(19): siRNA sense strand
caaaguuauugggacuauc

SEQ ID NO: 1405714 - RNA, 19 nt, Homo sapiens
  misc_RNA (1)...(19): siRNA sense strand
gguggaaacaggcuuacuc

SEQ ID NO: 1405715 - RNA, 19 nt, Homo sapiens
  misc_RNA (1)...(19): siRNA sense strand
ucacaaccuguucccaaug

SEQ ID NO: 1405716 - RNA, 19 nt, Homo sapiens
  misc_RNA (1)...(19): siRNA sense strand
cacgcagaaaucaaaguua

SEQ ID NO: 1405717 - RNA, 19 nt, Homo sapiens
  misc_RNA (1)...(19): siRNA sense strand
gucaaacaggccaccuuaa

SEQ ID NO: 1405718 - RNA, 19 nt, Homo sapiens
  misc_RNA (1)...(19): siRNA sense strand
uaucaaucgccacagagaa

SEQ ID NO: 1405719 - RNA, 19 nt, Homo sapiens
  misc_RNA (1)...(19): siRNA sense strand
gaagaaggcuggcacugua

SEQ ID NO: 1405720 - RNA, 19 nt, Homo sapiens
  misc_RNA (1)...(19): siRNA sense strand
gacagaaacuggugaguga

SEQ ID NO: 1405721 - RNA, 19 nt, Homo sapiens
  misc_RNA (1)...(19): siRNA sense strand
ccaagaagccaaccaauaa

SEQ ID NO: 1405722 - RNA, 19 nt, Homo sapiens
  misc_RNA (1)...(19): siRNA sense strand
gcaggagacuuuacaugga

SEQ ID NO: 1405723 - RNA, 19 nt, Homo sapiens
  misc_RNA (1)...(19): siRNA sense strand
gaaagcgaauuccuagaca

SEQ ID NO: 1405724 - RNA, 19 nt, Homo sapiens
  misc_RNA (1)...(19): siRNA sense strand
gccaagaagccaaccaaua

SEQ ID NO: 1405725 - RNA, 19 nt, Homo sapiens
  misc_RNA (1)...(19): siRNA sense strand
gaagggcaccucagaaaca

SEQ ID NO: 1405726 - RNA, 19 nt, Homo sapiens
  misc_RNA (1)...(19): siRNA sense strand
cagaagggcaccucagaaa

SEQ ID NO: 1405727 - RNA, 19 nt, Homo sapiens
  misc_RNA (1)...(19): siRNA sense strand
gcagaagggcaccucagaa

SEQ ID NO: 1405728 - RNA, 19 nt, Homo sapiens
  misc_RNA (1)...(19): siRNA sense strand
caucugcaccugugaagaa

SEQ ID NO: 1405729 - RNA, 19 nt, Homo sapiens
  misc_RNA (1)...(19): siRNA sense strand
ccaggaggauggcaaagag

SEQ ID NO: 1405730 - RNA, 19 nt, Homo sapiens
  misc_RNA (1)...(19): siRNA sense strand
agucagugcuguucuuugu

SEQ ID NO: 1405731 - RNA, 19 nt, Homo sapiens
  misc_RNA (1)...(19): siRNA sense strand
caggagacuuuacauggau

SEQ ID NO: 1405732 - RNA, 19 nt, Homo sapiens
  misc_RNA (1)...(19): siRNA sense strand
gugagugacugcacagagu

SEQ ID NO: 1405733 - RNA, 19 nt, Homo sapiens
  misc_RNA (1)...(19): siRNA sense strand
ugugucaucugcuuucgaa

SEQ ID NO: 1405734 - RNA, 19 nt, Homo sapiens
  misc_RNA (1)...(19): siRNA sense strand
ugagagcccugguggugau

SEQ ID NO: 1405735 - RNA, 19 nt, Homo sapiens
  misc_RNA (1)...(19): siRNA sense strand
gugcuggucuuuaucaaaa

SEQ ID NO: 1405736 - RNA, 19 nt, Homo sapiens
  misc_RNA (1)...(19): siRNA sense strand
guacgagugaggccuguga

SEQ ID NO: 1405737 - RNA, 19 nt, Homo sapiens
  misc_RNA (1)...(19): siRNA sense strand
gcugaccgcuguccaucca

SEQ ID NO: 1405738 - RNA, 19 nt, Homo sapiens
  misc_RNA (1)...(19): siRNA sense strand
caucuucgggauccuguuu

SEQ ID NO: 1405739 - RNA, 19 nt, Homo sapiens
  misc_RNA (1)...(19): siRNA sense strand
ugaagaaggcuggcacugu

SEQ ID NO: 1405740 - RNA, 19 nt, Homo sapiens
  misc_RNA (1)...(19): siRNA sense strand
caagaagccaaccaauaag

SEQ ID NO: 1405741 - RNA, 19 nt, Homo sapiens
  misc_RNA (1)...(19): siRNA sense strand
aacaguaccuaauaaacag

SEQ ID NO: 1405742 - RNA, 19 nt, Homo sapiens
  misc_RNA (1)...(19): siRNA sense strand
ggugcuggucuuuaucaaa

SEQ ID NO: 1405743 - RNA, 19 nt, Homo sapiens
  misc_RNA (1)...(19): siRNA sense strand
ucuuggugcuggucuuuau

SEQ ID NO: 1405744 - RNA, 19 nt, Homo sapiens
  misc_RNA (1)...(19): siRNA sense strand
uccaaugugucaucugcuu

SEQ ID NO: 1405745 - RNA, 19 nt, Homo sapiens
  misc_RNA (1)...(19): siRNA sense strand
caaugugucaucugcuuuc

SEQ ID NO: 1405746 - RNA, 19 nt, Homo sapiens
  misc_RNA (1)...(19): siRNA sense strand
ccaaugugucaucugcuuu

SEQ ID NO: 1405747 - RNA, 19 nt, Homo sapiens
  misc_RNA (1)...(19): siRNA sense strand
ugaaagcgaauuccuagac

SEQ ID NO: 1405748 - RNA, 19 nt, Homo sapiens
  misc_RNA (1)...(19): siRNA sense strand
cuacagggguuucugauac

SEQ ID NO: 1405749 - RNA, 19 nt, Homo sapiens
  misc_RNA (1)...(19): siRNA sense strand
gugcaggagacuuuacaug

SEQ ID NO: 1405750 - RNA, 19 nt, Homo sapiens
  misc_RNA (1)...(19): siRNA sense strand
gaagaaggcuggcacugua

SEQ ID NO: 1405751 - RNA, 19 nt, Homo sapiens
  misc_RNA (1)...(19): siRNA sense strand
gacagaaacuggugaguga

SEQ ID NO: 1405752 - RNA, 19 nt, Homo sapiens
  misc_RNA (1)...(19): siRNA sense strand
ccaagaagccaaccaauaa

SEQ ID NO: 1405753 - RNA, 19 nt, Homo sapiens
  misc_RNA (1)...(19): siRNA sense strand
gaaagcgaauuccuagaca

SEQ ID NO: 1405754 - RNA, 19 nt, Homo sapiens
  misc_RNA (1)...(19): siRNA sense strand
gccaagaagccaaccaaua

SEQ ID NO: 1405755 - RNA, 19 nt, Homo sapiens
  misc_RNA (1)...(19): siRNA sense strand
gaagggcaccucagaaaca

SEQ ID NO: 1405756 - RNA, 19 nt, Homo sapiens
  misc_RNA (1)...(19): siRNA sense strand
cagaagggcaccucagaaa

SEQ ID NO: 1405757 - RNA, 19 nt, Homo sapiens
  misc_RNA (1)...(19): siRNA sense strand
gcagaagggcaccucagaa

SEQ ID NO: 1405758 - RNA, 19 nt, Homo sapiens
  misc_RNA (1)...(19): siRNA sense strand
caucugcaccugugaagaa

SEQ ID NO: 1405759 - RNA, 19 nt, Homo sapiens
  misc_RNA (1)...(19): siRNA sense strand
agucagugcuguucuuugu

SEQ ID NO: 1405760 - RNA, 19 nt, Homo sapiens
  misc_RNA (1)...(19): siRNA sense strand
gugagugacugcacagagu

SEQ ID NO: 1405761 - RNA, 19 nt, Homo sapiens
  misc_RNA (1)...(19): siRNA sense strand
ugugucaucugcuuucgaa

SEQ ID NO: 1405762 - RNA, 19 nt, Homo sapiens
  misc_RNA (1)...(19): siRNA sense strand
ugagagcccugguggugau

SEQ ID NO: 1405763 - RNA, 19 nt, Homo sapiens
  misc_RNA (1)...(19): siRNA sense strand
gugcuggucuuuaucaaaa

SEQ ID NO: 1405764 - RNA, 19 nt, Homo sapiens
  misc_RNA (1)...(19): siRNA sense strand
guacgagugaggccuguga

SEQ ID NO: 1405765 - RNA, 19 nt, Homo sapiens
  misc_RNA (1)...(19): siRNA sense strand
gcugaccgcuguccaucca

SEQ ID NO: 1405766 - RNA, 19 nt, Homo sapiens
  misc_RNA (1)...(19): siRNA sense strand
caucuucgggauccuguuu

SEQ ID NO: 1405767 - RNA, 19 nt, Homo sapiens
  misc_RNA (1)...(19): siRNA sense strand
ugaagaaggcuggcacugu

SEQ ID NO: 1405768 - RNA, 19 nt, Homo sapiens
  misc_RNA (1)...(19): siRNA sense strand
aacaguaccuaauaaacag

SEQ ID NO: 1405769 - RNA, 19 nt, Homo sapiens
  misc_RNA (1)...(19): siRNA sense strand
ggugcuggucuuuaucaaa

SEQ ID NO: 1405770 - RNA, 19 nt, Homo sapiens
  misc_RNA (1)...(19): siRNA sense strand
ucuuggugcuggucuuuau

SEQ ID NO: 1405771 - RNA, 19 nt, Homo sapiens
  misc_RNA (1)...(19): siRNA sense strand
uccaaugugucaucugcuu

SEQ ID NO: 1405772 - RNA, 19 nt, Homo sapiens
  misc_RNA (1)...(19): siRNA sense strand
caaugugucaucugcuuuc

SEQ ID NO: 1405773 - RNA, 19 nt, Homo sapiens
  misc_RNA (1)...(19): siRNA sense strand
ccaaugugucaucugcuuu

SEQ ID NO: 1405774 - RNA, 19 nt, Homo sapiens
  misc_RNA (1)...(19): siRNA sense strand
ugaaagcgaauuccuagac

SEQ ID NO: 1405775 - RNA, 19 nt, Homo sapiens
  misc_RNA (1)...(19): siRNA sense strand
cuacagggguuucugauac

SEQ ID NO: 1405776 - RNA, 19 nt, Homo sapiens
  misc_RNA (1)...(19): siRNA sense strand
gaacgagggcuacuauuuc

SEQ ID NO: 1405777 - RNA, 19 nt, Homo sapiens
  misc_RNA (1)...(19): siRNA sense strand
gaagacguguuugcaaaug

SEQ ID NO: 1405778 - RNA, 19 nt, Homo sapiens
  misc_RNA (1)...(19): siRNA sense strand
gcaacuccaucauguacuu

SEQ ID NO: 1405779 - RNA, 19 nt, Homo sapiens
  misc_RNA (1)...(19): siRNA sense strand
ccgaagacguguuugcaaa

SEQ ID NO: 1405780 - RNA, 19 nt, Homo sapiens
  misc_RNA (1)...(19): siRNA sense strand
ggagacaagcccagccuuu

SEQ ID NO: 1405781 - RNA, 19 nt, Homo sapiens
  misc_RNA (1)...(19): siRNA sense strand
agaacgagggcuacuauuu

SEQ ID NO: 1405782 - RNA, 19 nt, Homo sapiens
  misc_RNA (1)...(19): siRNA sense strand
ggucaaaucgggagacaag

SEQ ID NO: 1405783 - RNA, 19 nt, Homo sapiens
  misc_RNA (1)...(19): siRNA sense strand
gcgagacaguggagcugaa

SEQ ID NO: 1405784 - RNA, 19 nt, Homo sapiens
  misc_RNA (1)...(19): siRNA sense strand
gagcaacuccaucauguac

SEQ ID NO: 1405785 - RNA, 19 nt, Homo sapiens
  misc_RNA (1)...(19): siRNA sense strand
gccaggugcugcuguccaa

SEQ ID NO: 1405786 - RNA, 19 nt, Homo sapiens
  misc_RNA (1)...(19): siRNA sense strand
gagagaacgagggcuacua

SEQ ID NO: 1405787 - RNA, 19 nt, Homo sapiens
  misc_RNA (1)...(19): siRNA sense strand
cugagcaacuccaucaugu

SEQ ID NO: 1405788 - RNA, 19 nt, Homo sapiens
  misc_RNA (1)...(19): siRNA sense strand
gagacaagcccagccuuuc

SEQ ID NO: 1405789 - RNA, 19 nt, Homo sapiens
  misc_RNA (1)...(19): siRNA sense strand
gagaacgagggcuacuauu

SEQ ID NO: 1405790 - RNA, 19 nt, Homo sapiens
  misc_RNA (1)...(19): siRNA sense strand
gaaccgaagacguguuugc

SEQ ID NO: 1405791 - RNA, 19 nt, Homo sapiens
  misc_RNA (1)...(19): siRNA sense strand
agagaacgagggcuacuau

SEQ ID NO: 1405792 - RNA, 19 nt, Homo sapiens
  misc_RNA (1)...(19): siRNA sense strand
cgaagacguguuugcaaau

SEQ ID NO: 1405793 - RNA, 19 nt, Homo sapiens
  misc_RNA (1)...(19): siRNA sense strand
gcccugagcaacuccauca

SEQ ID NO: 1405794 - RNA, 19 nt, Homo sapiens
  misc_RNA (1)...(19): siRNA sense strand
ugagcaacuccaucaugua

SEQ ID NO: 1405795 - RNA, 19 nt, Homo sapiens
  misc_RNA (1)...(19): siRNA sense strand
cagcgguucucgggcaaga

SEQ ID NO: 1405796 - RNA, 19 nt, Homo sapiens
  misc_RNA (1)...(19): siRNA sense strand
agacguguuugcaaauguc

SEQ ID NO: 1405797 - RNA, 19 nt, Homo sapiens
  misc_RNA (1)...(19): siRNA sense strand
aacgagggcuacuauuucu

SEQ ID NO: 1405798 - RNA, 19 nt, Homo sapiens
  misc_RNA (1)...(19): siRNA sense strand
agucccaccuuccuccuau

SEQ ID NO: 1405799 - RNA, 19 nt, Homo sapiens
  misc_RNA (1)...(19): siRNA sense strand
aagacguguuugcaaaugu

SEQ ID NO: 1405800 - RNA, 19 nt, Homo sapiens
  misc_RNA (1)...(19): siRNA sense strand
gucccaccuuccuccuaua

SEQ ID NO: 1405801 - RNA, 19 nt, Homo sapiens
  misc_RNA (1)...(19): siRNA sense strand
gaacgagggcuacuauuuc

SEQ ID NO: 1405802 - RNA, 19 nt, Homo sapiens
  misc_RNA (1)...(19): siRNA sense strand
gaagacguguuugcaaaug

SEQ ID NO: 1405803 - RNA, 19 nt, Homo sapiens
  misc_RNA (1)...(19): siRNA sense strand
gcaacuccaucauguacuu

SEQ ID NO: 1405804 - RNA, 19 nt, Homo sapiens
  misc_RNA (1)...(19): siRNA sense strand
ccgaagacguguuugcaaa

SEQ ID NO: 1405805 - RNA, 19 nt, Homo sapiens
  misc_RNA (1)...(19): siRNA sense strand
ggagacaagcccagccuuu

SEQ ID NO: 1405806 - RNA, 19 nt, Homo sapiens
  misc_RNA (1)...(19): siRNA sense strand
agaacgagggcuacuauuu

SEQ ID NO: 1405807 - RNA, 19 nt, Homo sapiens
  misc_RNA (1)...(19): siRNA sense strand
ggucaaaucgggagacaag

SEQ ID NO: 1405808 - RNA, 19 nt, Homo sapiens
  misc_RNA (1)...(19): siRNA sense strand
gcgagacaguggagcugaa

SEQ ID NO: 1405809 - RNA, 19 nt, Homo sapiens
  misc_RNA (1)...(19): siRNA sense strand
gagcaacuccaucauguac

SEQ ID NO: 1405810 - RNA, 19 nt, Homo sapiens
  misc_RNA (1)...(19): siRNA sense strand
gccaggugcugcuguccaa

SEQ ID NO: 1405811 - RNA, 19 nt, Homo sapiens
  misc_RNA (1)...(19): siRNA sense strand
gagagaacgagggcuacua

SEQ ID NO: 1405812 - RNA, 19 nt, Homo sapiens
  misc_RNA (1)...(19): siRNA sense strand
cugagcaacuccaucaugu

SEQ ID NO: 1405813 - RNA, 19 nt, Homo sapiens
  misc_RNA (1)...(19): siRNA sense strand
gagacaagcccagccuuuc

SEQ ID NO: 1405814 - RNA, 19 nt, Homo sapiens
  misc_RNA (1)...(19): siRNA sense strand
gagaacgagggcuacuauu

SEQ ID NO: 1405815 - RNA, 19 nt, Homo sapiens
  misc_RNA (1)...(19): siRNA sense strand
gaaccgaagacguguuugc

SEQ ID NO: 1405816 - RNA, 19 nt, Homo sapiens
  misc_RNA (1)...(19): siRNA sense strand
agagaacgagggcuacuau

SEQ ID NO: 1405817 - RNA, 19 nt, Homo sapiens
  misc_RNA (1)...(19): siRNA sense strand
cgaagacguguuugcaaau

SEQ ID NO: 1405818 - RNA, 19 nt, Homo sapiens
  misc_RNA (1)...(19): siRNA sense strand
gcccugagcaacuccauca

SEQ ID NO: 1405819 - RNA, 19 nt, Homo sapiens
  misc_RNA (1)...(19): siRNA sense strand
ugagcaacuccaucaugua

SEQ ID NO: 1405820 - RNA, 19 nt, Homo sapiens
  misc_RNA (1)...(19): siRNA sense strand
cagcgguucucgggcaaga

SEQ ID NO: 1405821 - RNA, 19 nt, Homo sapiens
  misc_RNA (1)...(19): siRNA sense strand
agacguguuugcaaauguc

SEQ ID NO: 1405822 - RNA, 19 nt, Homo sapiens
  misc_RNA (1)...(19): siRNA sense strand
aacgagggcuacuauuucu

SEQ ID NO: 1405823 - RNA, 19 nt, Homo sapiens
  misc_RNA (1)...(19): siRNA sense strand
agucccaccuuccuccuau

SEQ ID NO: 1405824 - RNA, 19 nt, Homo sapiens
  misc_RNA (1)...(19): siRNA sense strand
aagacguguuugcaaaugu

SEQ ID NO: 1405825 - RNA, 19 nt, Homo sapiens
  misc_RNA (1)...(19): siRNA sense strand
gucccaccuuccuccuaua

SEQ ID NO: 1405826 - RNA, 19 nt, Homo sapiens
  misc_RNA (1)...(19): siRNA sense strand
ccaaacagagcaacaacaa

SEQ ID NO: 1405827 - RNA, 19 nt, Homo sapiens
  misc_RNA (1)...(19): siRNA sense strand
aaacagagcaacaacaagu

SEQ ID NO: 1405828 - RNA, 19 nt, Homo sapiens
  misc_RNA (1)...(19): siRNA sense strand
caguggaggucccgcagaa

SEQ ID NO: 1405829 - RNA, 19 nt, Homo sapiens
  misc_RNA (1)...(19): siRNA sense strand
ugaccacgcccuccaaaca

SEQ ID NO: 1405830 - RNA, 19 nt, Homo sapiens
  misc_RNA (1)...(19): siRNA sense strand
gaugaccacgcccuccaaa

SEQ ID NO: 1405831 - RNA, 19 nt, Homo sapiens
  misc_RNA (1)...(19): siRNA sense strand
ggaggucccgcagaagcua

SEQ ID NO: 1405832 - RNA, 19 nt, Homo sapiens
  misc_RNA (1)...(19): siRNA sense strand
ggagcaccguggagaagac

SEQ ID NO: 1405833 - RNA, 19 nt, Homo sapiens
  misc_RNA (1)...(19): siRNA sense strand
ucuugacggugaccuggaa

SEQ ID NO: 1405834 - RNA, 19 nt, Homo sapiens
  misc_RNA (1)...(19): siRNA sense strand
gaaauagaauugcuggaau

SEQ ID NO: 1405835 - RNA, 19 nt, Homo sapiens
  misc_RNA (1)...(19): siRNA sense strand
gcuagugcguuucucuaua

SEQ ID NO: 1405836 - RNA, 19 nt, Homo sapiens
  misc_RNA (1)...(19): siRNA sense strand
gauacuuucucucucauug

SEQ ID NO: 1405837 - RNA, 19 nt, Homo sapiens
  misc_RNA (1)...(19): siRNA sense strand
cuagugcguuucucuauaa

SEQ ID NO: 1405838 - RNA, 19 nt, Homo sapiens
  misc_RNA (1)...(19): siRNA sense strand
gaaugucuuugacuuuguu

SEQ ID NO: 1405839 - RNA, 19 nt, Homo sapiens
  misc_RNA (1)...(19): siRNA sense strand
ucaaacuccuugcacaauu

SEQ ID NO: 1405840 - RNA, 19 nt, Homo sapiens
  misc_RNA (1)...(19): siRNA sense strand
ggagguggcagcuugguuu

SEQ ID NO: 1405841 - RNA, 19 nt, Homo sapiens
  misc_RNA (1)...(19): siRNA sense strand
ccacaaauaccaaacuaug

SEQ ID NO: 1405842 - RNA, 19 nt, Homo sapiens
  misc_RNA (1)...(19): siRNA sense strand
caaacuccuugcacaauuc

SEQ ID NO: 1405843 - RNA, 19 nt, Homo sapiens
  misc_RNA (1)...(19): siRNA sense strand
caugugcgcugcagucaga

SEQ ID NO: 1405844 - RNA, 19 nt, Homo sapiens
  misc_RNA (1)...(19): siRNA sense strand
cauugaagcugaccuugga

SEQ ID NO: 1405845 - RNA, 19 nt, Homo sapiens
  misc_RNA (1)...(19): siRNA sense strand
ggaaugucuuugacuuugu

SEQ ID NO: 1405846 - RNA, 19 nt, Homo sapiens
  misc_RNA (1)...(19): siRNA sense strand
ugaguguccucucuucaaa

SEQ ID NO: 1405847 - RNA, 19 nt, Homo sapiens
  misc_RNA (1)...(19): siRNA sense strand
ccagaagaaacuuguauug

SEQ ID NO: 1405848 - RNA, 19 nt, Homo sapiens
  misc_RNA (1)...(19): siRNA sense strand
cuauaaagccucagcguau

SEQ ID NO: 1405849 - RNA, 19 nt, Homo sapiens
  misc_RNA (1)...(19): siRNA sense strand
guauagaacagauuucaca

SEQ ID NO: 1405850 - RNA, 19 nt, Homo sapiens
  misc_RNA (1)...(19): siRNA sense strand
gucuuugacuuuguuguua

SEQ ID NO: 1405851 - RNA, 19 nt, Homo sapiens
  misc_RNA (1)...(19): siRNA sense strand
aaauagaauugcuggaauc

SEQ ID NO: 1405852 - RNA, 19 nt, Homo sapiens
  misc_RNA (1)...(19): siRNA sense strand
ugaaauagaauugcuggaa

SEQ ID NO: 1405853 - RNA, 19 nt, Homo sapiens
  misc_RNA (1)...(19): siRNA sense strand
ggccaccucuuucuuugug

SEQ ID NO: 1405854 - RNA, 19 nt, Homo sapiens
  misc_RNA (1)...(19): siRNA sense strand
uggaaugucuuugacuuug

SEQ ID NO: 1405855 - RNA, 19 nt, Homo sapiens
  misc_RNA (1)...(19): siRNA sense strand
guucacgucucaucgauac

SEQ ID NO: 1405856 - RNA, 19 nt, Homo sapiens
  misc_RNA (1)...(19): siRNA sense strand
ggaauccacaaauaccaaa

SEQ ID NO: 1405857 - RNA, 19 nt, Homo sapiens
  misc_RNA (1)...(19): siRNA sense strand
gagguggcagcuugguuua

SEQ ID NO: 1405858 - RNA, 19 nt, Homo sapiens
  misc_RNA (1)...(19): siRNA sense strand
gguggcagcuugguuuauc

SEQ ID NO: 1405859 - RNA, 19 nt, Homo sapiens
  misc_RNA (1)...(19): siRNA sense strand
gccauucguucacgucuca

SEQ ID NO: 1405860 - RNA, 19 nt, Homo sapiens
  misc_RNA (1)...(19): siRNA sense strand
cagcguauagaacagauuu

SEQ ID NO: 1405861 - RNA, 19 nt, Homo sapiens
  misc_RNA (1)...(19): siRNA sense strand
ggaagagugccuggaaugu

SEQ ID NO: 1405862 - RNA, 19 nt, Homo sapiens
  misc_RNA (1)...(19): siRNA sense strand
gaagagugccuggaauguc

SEQ ID NO: 1405863 - RNA, 19 nt, Homo sapiens
  misc_RNA (1)...(19): siRNA sense strand
aaacuuguauugggagauc

SEQ ID NO: 1405864 - RNA, 19 nt, Homo sapiens
  misc_RNA (1)...(19): siRNA sense strand
ccuggaaugucuuugacuu

SEQ ID NO: 1405865 - RNA, 19 nt, Homo sapiens
  misc_RNA (1)...(19): siRNA sense strand
gaugguugaaauagaauug

SEQ ID NO: 1405866 - RNA, 19 nt, Homo sapiens
  misc_RNA (1)...(19): siRNA sense strand
accaaacuauggccauuga

SEQ ID NO: 1405867 - RNA, 19 nt, Homo sapiens
  misc_RNA (1)...(19): siRNA sense strand
uggagauccuucuuaagug

SEQ ID NO: 1405868 - RNA, 19 nt, Homo sapiens
  misc_RNA (1)...(19): siRNA sense strand
uccuggagauccuucuuaa

SEQ ID NO: 1405869 - RNA, 19 nt, Homo sapiens
  misc_RNA (1)...(19): siRNA sense strand
aagagugccuggaaugucu

SEQ ID NO: 1405870 - RNA, 19 nt, Homo sapiens
  misc_RNA (1)...(19): siRNA sense strand
ucucaucgauacuuucucu

SEQ ID NO: 1405871 - RNA, 19 nt, Homo sapiens
  misc_RNA (1)...(19): siRNA sense strand
aacaccagcuagugcguuu

SEQ ID NO: 1405872 - RNA, 19 nt, Homo sapiens
  misc_RNA (1)...(19): siRNA sense strand
caaacuauggccauugaag

SEQ ID NO: 1405873 - RNA, 19 nt, Homo sapiens
  misc_RNA (1)...(19): siRNA sense strand
gccagaagaaacuuguauu

SEQ ID NO: 1405874 - RNA, 19 nt, Homo sapiens
  misc_RNA (1)...(19): siRNA sense strand
gcacacuaucagggaguua

SEQ ID NO: 1405875 - RNA, 19 nt, Homo sapiens
  misc_RNA (1)...(19): siRNA sense strand
caucaucuuccuggucuuu

SEQ ID NO: 1405876 - RNA, 19 nt, Homo sapiens
  misc_RNA (1)...(19): siRNA sense strand
cuggagauccuucuuaagu

SEQ ID NO: 1405877 - RNA, 19 nt, Homo sapiens
  misc_RNA (1)...(19): siRNA sense strand
cagaagaaacuuguauugg

SEQ ID NO: 1405878 - RNA, 19 nt, Homo sapiens
  misc_RNA (1)...(19): siRNA sense strand
gugcguuucucuauaaagc

SEQ ID NO: 1405879 - RNA, 19 nt, Homo sapiens
  misc_RNA (1)...(19): siRNA sense strand
gagaucaacaccagcuagu

SEQ ID NO: 1405880 - RNA, 19 nt, Homo sapiens
  misc_RNA (1)...(19): siRNA sense strand
auaccaaacuauggccauu

SEQ ID NO: 1405881 - RNA, 19 nt, Homo sapiens
  misc_RNA (1)...(19): siRNA sense strand
cagcuagugcguuucucua

SEQ ID NO: 1405882 - RNA, 19 nt, Homo sapiens
  misc_RNA (1)...(19): siRNA sense strand
gcguauagaacagauuuca

SEQ ID NO: 1405883 - RNA, 19 nt, Homo sapiens
  misc_RNA (1)...(19): siRNA sense strand
cagcuugguuuaucuugcu

SEQ ID NO: 1405884 - RNA, 19 nt, Homo sapiens
  misc_RNA (1)...(19): siRNA sense strand
ccaacaagaagagcagaug

SEQ ID NO: 1405885 - RNA, 19 nt, Homo sapiens
  misc_RNA (1)...(19): siRNA sense strand
ccgcuuaccaacaagaaga

SEQ ID NO: 1405886 - RNA, 19 nt, Homo sapiens
  misc_RNA (1)...(19): siRNA sense strand
cacgucucaucgauacuuu

SEQ ID NO: 1405887 - RNA, 19 nt, Homo sapiens
  misc_RNA (1)...(19): siRNA sense strand
auccacaaauaccaaacua

SEQ ID NO: 1405888 - RNA, 19 nt, Homo sapiens
  misc_RNA (1)...(19): siRNA sense strand
ucacgucucaucgauacuu

SEQ ID NO: 1405889 - RNA, 19 nt, Homo sapiens
  misc_RNA (1)...(19): siRNA sense strand
cgagguugugguauuggua

SEQ ID NO: 1405890 - RNA, 19 nt, Homo sapiens
  misc_RNA (1)...(19): siRNA sense strand
gugccuggaaugucuuuga

SEQ ID NO: 1405891 - RNA, 19 nt, Homo sapiens
  misc_RNA (1)...(19): siRNA sense strand
cuauccaacuuuucuguuu

SEQ ID NO: 1405892 - RNA, 19 nt, Homo sapiens
  misc_RNA (1)...(19): siRNA sense strand
gaaauagaauugcuggaau

SEQ ID NO: 1405893 - RNA, 19 nt, Homo sapiens
  misc_RNA (1)...(19): siRNA sense strand
gcuagugcguuucucuaua

SEQ ID NO: 1405894 - RNA, 19 nt, Homo sapiens
  misc_RNA (1)...(19): siRNA sense strand
gauacuuucucucucauug

SEQ ID NO: 1405895 - RNA, 19 nt, Homo sapiens
  misc_RNA (1)...(19): siRNA sense strand
cuagugcguuucucuauaa

SEQ ID NO: 1405896 - RNA, 19 nt, Homo sapiens
  misc_RNA (1)...(19): siRNA sense strand
gaaugucuuugacuuuguu

SEQ ID NO: 1405897 - RNA, 19 nt, Homo sapiens
  misc_RNA (1)...(19): siRNA sense strand
ucaaacuccuugcacaauu

SEQ ID NO: 1405898 - RNA, 19 nt, Homo sapiens
  misc_RNA (1)...(19): siRNA sense strand
ggagguggcagcuugguuu

SEQ ID NO: 1405899 - RNA, 19 nt, Homo sapiens
  misc_RNA (1)...(19): siRNA sense strand
ccacaaauaccaaacuaug

SEQ ID NO: 1405900 - RNA, 19 nt, Homo sapiens
  misc_RNA (1)...(19): siRNA sense strand
caaacuccuugcacaauuc

SEQ ID NO: 1405901 - RNA, 19 nt, Homo sapiens
  misc_RNA (1)...(19): siRNA sense strand
caugugcgcugcagucaga

SEQ ID NO: 1405902 - RNA, 19 nt, Homo sapiens
  misc_RNA (1)...(19): siRNA sense strand
cauugaagcugaccuugga

SEQ ID NO: 1405903 - RNA, 19 nt, Homo sapiens
  misc_RNA (1)...(19): siRNA sense strand
ggaaugucuuugacuuugu

SEQ ID NO: 1405904 - RNA, 19 nt, Homo sapiens
  misc_RNA (1)...(19): siRNA sense strand
ugaguguccucucuucaaa

SEQ ID NO: 1405905 - RNA, 19 nt, Homo sapiens
  misc_RNA (1)...(19): siRNA sense strand
ccagaagaaacuuguauug

SEQ ID NO: 1405906 - RNA, 19 nt, Homo sapiens
  misc_RNA (1)...(19): siRNA sense strand
cuauaaagccucagcguau

SEQ ID NO: 1405907 - RNA, 19 nt, Homo sapiens
  misc_RNA (1)...(19): siRNA sense strand
guauagaacagauuucaca

SEQ ID NO: 1405908 - RNA, 19 nt, Homo sapiens
  misc_RNA (1)...(19): siRNA sense strand
gucuuugacuuuguuguua

SEQ ID NO: 1405909 - RNA, 19 nt, Homo sapiens
  misc_RNA (1)...(19): siRNA sense strand
aaauagaauugcuggaauc

SEQ ID NO: 1405910 - RNA, 19 nt, Homo sapiens
  misc_RNA (1)...(19): siRNA sense strand
ugaaauagaauugcuggaa

SEQ ID NO: 1405911 - RNA, 19 nt, Homo sapiens
  misc_RNA (1)...(19): siRNA sense strand
ggccaccucuuucuuugug

SEQ ID NO: 1405912 - RNA, 19 nt, Homo sapiens
  misc_RNA (1)...(19): siRNA sense strand
uggaaugucuuugacuuug

SEQ ID NO: 1405913 - RNA, 19 nt, Homo sapiens
  misc_RNA (1)...(19): siRNA sense strand
guucacgucucaucgauac

SEQ ID NO: 1405914 - RNA, 19 nt, Homo sapiens
  misc_RNA (1)...(19): siRNA sense strand
ggaauccacaaauaccaaa

SEQ ID NO: 1405915 - RNA, 19 nt, Homo sapiens
  misc_RNA (1)...(19): siRNA sense strand
gagguggcagcuugguuua

SEQ ID NO: 1405916 - RNA, 19 nt, Homo sapiens
  misc_RNA (1)...(19): siRNA sense strand
gguggcagcuugguuuauc

SEQ ID NO: 1405917 - RNA, 19 nt, Homo sapiens
  misc_RNA (1)...(19): siRNA sense strand
gccauucguucacgucuca

SEQ ID NO: 1405918 - RNA, 19 nt, Homo sapiens
  misc_RNA (1)...(19): siRNA sense strand
cagcguauagaacagauuu

SEQ ID NO: 1405919 - RNA, 19 nt, Homo sapiens
  misc_RNA (1)...(19): siRNA sense strand
ggaagagugccuggaaugu

SEQ ID NO: 1405920 - RNA, 19 nt, Homo sapiens
  misc_RNA (1)...(19): siRNA sense strand
gaagagugccuggaauguc

SEQ ID NO: 1405921 - RNA, 19 nt, Homo sapiens
  misc_RNA (1)...(19): siRNA sense strand
aaacuuguauugggagauc

SEQ ID NO: 1405922 - RNA, 19 nt, Homo sapiens
  misc_RNA (1)...(19): siRNA sense strand
ccuggaaugucuuugacuu

SEQ ID NO: 1405923 - RNA, 19 nt, Homo sapiens
  misc_RNA (1)...(19): siRNA sense strand
gaugguugaaauagaauug

SEQ ID NO: 1405924 - RNA, 19 nt, Homo sapiens
  misc_RNA (1)...(19): siRNA sense strand
accaaacuauggccauuga

SEQ ID NO: 1405925 - RNA, 19 nt, Homo sapiens
  misc_RNA (1)...(19): siRNA sense strand
uggagauccuucuuaagug

SEQ ID NO: 1405926 - RNA, 19 nt, Homo sapiens
  misc_RNA (1)...(19): siRNA sense strand
uccuggagauccuucuuaa

SEQ ID NO: 1405927 - RNA, 19 nt, Homo sapiens
  misc_RNA (1)...(19): siRNA sense strand
aagagugccuggaaugucu

SEQ ID NO: 1405928 - RNA, 19 nt, Homo sapiens
  misc_RNA (1)...(19): siRNA sense strand
ucucaucgauacuuucucu

SEQ ID NO: 1405929 - RNA, 19 nt, Homo sapiens
  misc_RNA (1)...(19): siRNA sense strand
aacaccagcuagugcguuu

SEQ ID NO: 1405930 - RNA, 19 nt, Homo sapiens
  misc_RNA (1)...(19): siRNA sense strand
caaacuauggccauugaag

SEQ ID NO: 1405931 - RNA, 19 nt, Homo sapiens
  misc_RNA (1)...(19): siRNA sense strand
gccagaagaaacuuguauu

SEQ ID NO: 1405932 - RNA, 19 nt, Homo sapiens
  misc_RNA (1)...(19): siRNA sense strand
gcacacuaucagggaguua

SEQ ID NO: 1405933 - RNA, 19 nt, Homo sapiens
  misc_RNA (1)...(19): siRNA sense strand
caucaucuuccuggucuuu

SEQ ID NO: 1405934 - RNA, 19 nt, Homo sapiens
  misc_RNA (1)...(19): siRNA sense strand
cuggagauccuucuuaagu

SEQ ID NO: 1405935 - RNA, 19 nt, Homo sapiens
  misc_RNA (1)...(19): siRNA sense strand
cagaagaaacuuguauugg

SEQ ID NO: 1405936 - RNA, 19 nt, Homo sapiens
  misc_RNA (1)...(19): siRNA sense strand
gugcguuucucuauaaagc

SEQ ID NO: 1405937 - RNA, 19 nt, Homo sapiens
  misc_RNA (1)...(19): siRNA sense strand
gagaucaacaccagcuagu

SEQ ID NO: 1405938 - RNA, 19 nt, Homo sapiens
  misc_RNA (1)...(19): siRNA sense strand
auaccaaacuauggccauu

SEQ ID NO: 1405939 - RNA, 19 nt, Homo sapiens
  misc_RNA (1)...(19): siRNA sense strand
cagcuagugcguuucucua

SEQ ID NO: 1405940 - RNA, 19 nt, Homo sapiens
  misc_RNA (1)...(19): siRNA sense strand
gcguauagaacagauuuca

SEQ ID NO: 1405941 - RNA, 19 nt, Homo sapiens
  misc_RNA (1)...(19): siRNA sense strand
cagcuugguuuaucuugcu

SEQ ID NO: 1405942 - RNA, 19 nt, Homo sapiens
  misc_RNA (1)...(19): siRNA sense strand
ccaacaagaagagcagaug

SEQ ID NO: 1405943 - RNA, 19 nt, Homo sapiens
  misc_RNA (1)...(19): siRNA sense strand
ccgcuuaccaacaagaaga

SEQ ID NO: 1405944 - RNA, 19 nt, Homo sapiens
  misc_RNA (1)...(19): siRNA sense strand
cacgucucaucgauacuuu

SEQ ID NO: 1405945 - RNA, 19 nt, Homo sapiens
  misc_RNA (1)...(19): siRNA sense strand
auccacaaauaccaaacua

SEQ ID NO: 1405946 - RNA, 19 nt, Homo sapiens
  misc_RNA (1)...(19): siRNA sense strand
ucacgucucaucgauacuu

SEQ ID NO: 1405947 - RNA, 19 nt, Homo sapiens
  misc_RNA (1)...(19): siRNA sense strand
cgagguugugguauuggua

SEQ ID NO: 1405948 - RNA, 19 nt, Homo sapiens
  misc_RNA (1)...(19): siRNA sense strand
gugccuggaaugucuuuga

SEQ ID NO: 1405949 - RNA, 19 nt, Homo sapiens
  misc_RNA (1)...(19): siRNA sense strand
cuauccaacuuuucuguuu

SEQ ID NO: 1405950 - RNA, 19 nt, Homo sapiens
  misc_RNA (1)...(19): siRNA sense strand
gaaauagaauugcuggaau

SEQ ID NO: 1405951 - RNA, 19 nt, Homo sapiens
  misc_RNA (1)...(19): siRNA sense strand
gcuagugcguuucucuaua

SEQ ID NO: 1405952 - RNA, 19 nt, Homo sapiens
  misc_RNA (1)...(19): siRNA sense strand
gauacuuucucucucauug

SEQ ID NO: 1405953 - RNA, 19 nt, Homo sapiens
  misc_RNA (1)...(19): siRNA sense strand
cuagugcguuucucuauaa

SEQ ID NO: 1405954 - RNA, 19 nt, Homo sapiens
  misc_RNA (1)...(19): siRNA sense strand
gaaugucuuugacuuuguu

SEQ ID NO: 1405955 - RNA, 19 nt, Homo sapiens
  misc_RNA (1)...(19): siRNA sense strand
ucaaacuccuugcacaauu

SEQ ID NO: 1405956 - RNA, 19 nt, Homo sapiens
  misc_RNA (1)...(19): siRNA sense strand
ggagguggcagcuugguuu

SEQ ID NO: 1405957 - RNA, 19 nt, Homo sapiens
  misc_RNA (1)...(19): siRNA sense strand
ccacaaauaccaaacuaug

SEQ ID NO: 1405958 - RNA, 19 nt, Homo sapiens
  misc_RNA (1)...(19): siRNA sense strand
caaacuccuugcacaauuc

SEQ ID NO: 1405959 - RNA, 19 nt, Homo sapiens
  misc_RNA (1)...(19): siRNA sense strand
caugugcgcugcagucaga

SEQ ID NO: 1405960 - RNA, 19 nt, Homo sapiens
  misc_RNA (1)...(19): siRNA sense strand
cauugaagcugaccuugga

SEQ ID NO: 1405961 - RNA, 19 nt, Homo sapiens
  misc_RNA (1)...(19): siRNA sense strand
ggaaugucuuugacuuugu

SEQ ID NO: 1405962 - RNA, 19 nt, Homo sapiens
  misc_RNA (1)...(19): siRNA sense strand
ugaguguccucucuucaaa

SEQ ID NO: 1405963 - RNA, 19 nt, Homo sapiens
  misc_RNA (1)...(19): siRNA sense strand
ccagaagaaacuuguauug

SEQ ID NO: 1405964 - RNA, 19 nt, Homo sapiens
  misc_RNA (1)...(19): siRNA sense strand
cuauaaagccucagcguau

SEQ ID NO: 1405965 - RNA, 19 nt, Homo sapiens
  misc_RNA (1)...(19): siRNA sense strand
guauagaacagauuucaca

SEQ ID NO: 1405966 - RNA, 19 nt, Homo sapiens
  misc_RNA (1)...(19): siRNA sense strand
gucuuugacuuuguuguua

SEQ ID NO: 1405967 - RNA, 19 nt, Homo sapiens
  misc_RNA (1)...(19): siRNA sense strand
aaauagaauugcuggaauc

SEQ ID NO: 1405968 - RNA, 19 nt, Homo sapiens
  misc_RNA (1)...(19): siRNA sense strand
ugaaauagaauugcuggaa

SEQ ID NO: 1405969 - RNA, 19 nt, Homo sapiens
  misc_RNA (1)...(19): siRNA sense strand
ggccaccucuuucuuugug

SEQ ID NO: 1405970 - RNA, 19 nt, Homo sapiens
  misc_RNA (1)...(19): siRNA sense strand
uggaaugucuuugacuuug

SEQ ID NO: 1405971 - RNA, 19 nt, Homo sapiens
  misc_RNA (1)...(19): siRNA sense strand
guucacgucucaucgauac

SEQ ID NO: 1405972 - RNA, 19 nt, Homo sapiens
  misc_RNA (1)...(19): siRNA sense strand
ggaauccacaaauaccaaa

SEQ ID NO: 1405973 - RNA, 19 nt, Homo sapiens
  misc_RNA (1)...(19): siRNA sense strand
gagguggcagcuugguuua

SEQ ID NO: 1405974 - RNA, 19 nt, Homo sapiens
  misc_RNA (1)...(19): siRNA sense strand
gguggcagcuugguuuauc

SEQ ID NO: 1405975 - RNA, 19 nt, Homo sapiens
  misc_RNA (1)...(19): siRNA sense strand
gccauucguucacgucuca

SEQ ID NO: 1405976 - RNA, 19 nt, Homo sapiens
  misc_RNA (1)...(19): siRNA sense strand
cagcguauagaacagauuu

SEQ ID NO: 1405977 - RNA, 19 nt, Homo sapiens
  misc_RNA (1)...(19): siRNA sense strand
ggaagagugccuggaaugu

SEQ ID NO: 1405978 - RNA, 19 nt, Homo sapiens
  misc_RNA (1)...(19): siRNA sense strand
gaagagugccuggaauguc

SEQ ID NO: 1405979 - RNA, 19 nt, Homo sapiens
  misc_RNA (1)...(19): siRNA sense strand
aaacuuguauugggagauc

SEQ ID NO: 1405980 - RNA, 19 nt, Homo sapiens
  misc_RNA (1)...(19): siRNA sense strand
ccuggaaugucuuugacuu

SEQ ID NO: 1405981 - RNA, 19 nt, Homo sapiens
  misc_RNA (1)...(19): siRNA sense strand
gaugguugaaauagaauug

SEQ ID NO: 1405982 - RNA, 19 nt, Homo sapiens
  misc_RNA (1)...(19): siRNA sense strand
accaaacuauggccauuga

SEQ ID NO: 1405983 - RNA, 19 nt, Homo sapiens
  misc_RNA (1)...(19): siRNA sense strand
uggagauccuucuuaagug

SEQ ID NO: 1405984 - RNA, 19 nt, Homo sapiens
  misc_RNA (1)...(19): siRNA sense strand
uccuggagauccuucuuaa

SEQ ID NO: 1405985 - RNA, 19 nt, Homo sapiens
  misc_RNA (1)...(19): siRNA sense strand
aagagugccuggaaugucu

SEQ ID NO: 1405986 - RNA, 19 nt, Homo sapiens
  misc_RNA (1)...(19): siRNA sense strand
ucucaucgauacuuucucu

SEQ ID NO: 1405987 - RNA, 19 nt, Homo sapiens
  misc_RNA (1)...(19): siRNA sense strand
aacaccagcuagugcguuu

SEQ ID NO: 1405988 - RNA, 19 nt, Homo sapiens
  misc_RNA (1)...(19): siRNA sense strand
caaacuauggccauugaag

SEQ ID NO: 1405989 - RNA, 19 nt, Homo sapiens
  misc_RNA (1)...(19): siRNA sense strand
gccagaagaaacuuguauu

SEQ ID NO: 1405990 - RNA, 19 nt, Homo sapiens
  misc_RNA (1)...(19): siRNA sense strand
gcacacuaucagggaguua

SEQ ID NO: 1405991 - RNA, 19 nt, Homo sapiens
  misc_RNA (1)...(19): siRNA sense strand
caucaucuuccuggucuuu

SEQ ID NO: 1405992 - RNA, 19 nt, Homo sapiens
  misc_RNA (1)...(19): siRNA sense strand
cuggagauccuucuuaagu

SEQ ID NO: 1405993 - RNA, 19 nt, Homo sapiens
  misc_RNA (1)...(19): siRNA sense strand
cagaagaaacuuguauugg

SEQ ID NO: 1405994 - RNA, 19 nt, Homo sapiens
  misc_RNA (1)...(19): siRNA sense strand
gugcguuucucuauaaagc

SEQ ID NO: 1405995 - RNA, 19 nt, Homo sapiens
  misc_RNA (1)...(19): siRNA sense strand
gagaucaacaccagcuagu

SEQ ID NO: 1405996 - RNA, 19 nt, Homo sapiens
  misc_RNA (1)...(19): siRNA sense strand
auaccaaacuauggccauu

SEQ ID NO: 1405997 - RNA, 19 nt, Homo sapiens
  misc_RNA (1)...(19): siRNA sense strand
cagcuagugcguuucucua

SEQ ID NO: 1405998 - RNA, 19 nt, Homo sapiens
  misc_RNA (1)...(19): siRNA sense strand
gcguauagaacagauuuca

SEQ ID NO: 1405999 - RNA, 19 nt, Homo sapiens
  misc_RNA (1)...(19): siRNA sense strand
cagcuugguuuaucuugcu

SEQ ID NO: 1406000 - RNA, 19 nt, Homo sapiens
  misc_RNA (1)...(19): siRNA sense strand
ccaacaagaagagcagaug

SEQ ID NO: 1406001 - RNA, 19 nt, Homo sapiens
  misc_RNA (1)...(19): siRNA sense strand
ccgcuuaccaacaagaaga

SEQ ID NO: 1406002 - RNA, 19 nt, Homo sapiens
  misc_RNA (1)...(19): siRNA sense strand
cacgucucaucgauacuuu

SEQ ID NO: 1406003 - RNA, 19 nt, Homo sapiens
  misc_RNA (1)...(19): siRNA sense strand
auccacaaauaccaaacua

SEQ ID NO: 1406004 - RNA, 19 nt, Homo sapiens
  misc_RNA (1)...(19): siRNA sense strand
ucacgucucaucgauacuu

SEQ ID NO: 1406005 - RNA, 19 nt, Homo sapiens
  misc_RNA (1)...(19): siRNA sense strand
cgagguugugguauuggua

SEQ ID NO: 1406006 - RNA, 19 nt, Homo sapiens
  misc_RNA (1)...(19): siRNA sense strand
gugccuggaaugucuuuga

SEQ ID NO: 1406007 - RNA, 19 nt, Homo sapiens
  misc_RNA (1)...(19): siRNA sense strand
cuauccaacuuuucuguuu

SEQ ID NO: 1406008 - RNA, 19 nt, Homo sapiens
  misc_RNA (1)...(19): siRNA sense strand
gaaauagaauugcuggaau

SEQ ID NO: 1406009 - RNA, 19 nt, Homo sapiens
  misc_RNA (1)...(19): siRNA sense strand
gcuagugcguuucucuaua

SEQ ID NO: 1406010 - RNA, 19 nt, Homo sapiens
  misc_RNA (1)...(19): siRNA sense strand
gauacuuucucucucauug

SEQ ID NO: 1406011 - RNA, 19 nt, Homo sapiens
  misc_RNA (1)...(19): siRNA sense strand
cuagugcguuucucuauaa

SEQ ID NO: 1406012 - RNA, 19 nt, Homo sapiens
  misc_RNA (1)...(19): siRNA sense strand
gaaugucuuugacuuuguu

SEQ ID NO: 1406013 - RNA, 19 nt, Homo sapiens
  misc_RNA (1)...(19): siRNA sense strand
ggagguggcagcuugguuu

SEQ ID NO: 1406014 - RNA, 19 nt, Homo sapiens
  misc_RNA (1)...(19): siRNA sense strand
ccacaaauaccaaacuaug

SEQ ID NO: 1406015 - RNA, 19 nt, Homo sapiens
  misc_RNA (1)...(19): siRNA sense strand
caugugcgcugcagucaga

SEQ ID NO: 1406016 - RNA, 19 nt, Homo sapiens
  misc_RNA (1)...(19): siRNA sense strand
cauugaagcugaccuugga

SEQ ID NO: 1406017 - RNA, 19 nt, Homo sapiens
  misc_RNA (1)...(19): siRNA sense strand
ggaaugucuuugacuuugu

SEQ ID NO: 1406018 - RNA, 19 nt, Homo sapiens
  misc_RNA (1)...(19): siRNA sense strand
ugaguguccucucuucaaa

SEQ ID NO: 1406019 - RNA, 19 nt, Homo sapiens
  misc_RNA (1)...(19): siRNA sense strand
ccagaagaaacuuguauug

SEQ ID NO: 1406020 - RNA, 19 nt, Homo sapiens
  misc_RNA (1)...(19): siRNA sense strand
cuauaaagccucagcguau

SEQ ID NO: 1406021 - RNA, 19 nt, Homo sapiens
  misc_RNA (1)...(19): siRNA sense strand
guauagaacagauuucaca

SEQ ID NO: 1406022 - RNA, 19 nt, Homo sapiens
  misc_RNA (1)...(19): siRNA sense strand
gucuuugacuuuguuguua

SEQ ID NO: 1406023 - RNA, 19 nt, Homo sapiens
  misc_RNA (1)...(19): siRNA sense strand
aaauagaauugcuggaauc

SEQ ID NO: 1406024 - RNA, 19 nt, Homo sapiens
  misc_RNA (1)...(19): siRNA sense strand
ugaaauagaauugcuggaa

SEQ ID NO: 1406025 - RNA, 19 nt, Homo sapiens
  misc_RNA (1)...(19): siRNA sense strand
ggccaccucuuucuuugug

SEQ ID NO: 1406026 - RNA, 19 nt, Homo sapiens
  misc_RNA (1)...(19): siRNA sense strand
uggaaugucuuugacuuug

SEQ ID NO: 1406027 - RNA, 19 nt, Homo sapiens
  misc_RNA (1)...(19): siRNA sense strand
guucacgucucaucgauac

SEQ ID NO: 1406028 - RNA, 19 nt, Homo sapiens
  misc_RNA (1)...(19): siRNA sense strand
ggaauccacaaauaccaaa

SEQ ID NO: 1406029 - RNA, 19 nt, Homo sapiens
  misc_RNA (1)...(19): siRNA sense strand
gagguggcagcuugguuua

SEQ ID NO: 1406030 - RNA, 19 nt, Homo sapiens
  misc_RNA (1)...(19): siRNA sense strand
gguggcagcuugguuuauc

SEQ ID NO: 1406031 - RNA, 19 nt, Homo sapiens
  misc_RNA (1)...(19): siRNA sense strand
gccauucguucacgucuca

SEQ ID NO: 1406032 - RNA, 19 nt, Homo sapiens
  misc_RNA (1)...(19): siRNA sense strand
cagcguauagaacagauuu

SEQ ID NO: 1406033 - RNA, 19 nt, Homo sapiens
  misc_RNA (1)...(19): siRNA sense strand
ggaagagugccuggaaugu

SEQ ID NO: 1406034 - RNA, 19 nt, Homo sapiens
  misc_RNA (1)...(19): siRNA sense strand
gaagagugccuggaauguc

SEQ ID NO: 1406035 - RNA, 19 nt, Homo sapiens
  misc_RNA (1)...(19): siRNA sense strand
aaacuuguauugggagauc

SEQ ID NO: 1406036 - RNA, 19 nt, Homo sapiens
  misc_RNA (1)...(19): siRNA sense strand
ccuggaaugucuuugacuu

SEQ ID NO: 1406037 - RNA, 19 nt, Homo sapiens
  misc_RNA (1)...(19): siRNA sense strand
gaugguugaaauagaauug

SEQ ID NO: 1406038 - RNA, 19 nt, Homo sapiens
  misc_RNA (1)...(19): siRNA sense strand
accaaacuauggccauuga

SEQ ID NO: 1406039 - RNA, 19 nt, Homo sapiens
  misc_RNA (1)...(19): siRNA sense strand
uggagauccuucuuaagug

SEQ ID NO: 1406040 - RNA, 19 nt, Homo sapiens
  misc_RNA (1)...(19): siRNA sense strand
ucucaucgauacuuucucu

SEQ ID NO: 1406041 - RNA, 19 nt, Homo sapiens
  misc_RNA (1)...(19): siRNA sense strand
aagagugccuggaaugucu

SEQ ID NO: 1406042 - RNA, 19 nt, Homo sapiens
  misc_RNA (1)...(19): siRNA sense strand
uccuggagauccuucuuaa

SEQ ID NO: 1406043 - RNA, 19 nt, Homo sapiens
  misc_RNA (1)...(19): siRNA sense strand
aacaccagcuagugcguuu

SEQ ID NO: 1406044 - RNA, 19 nt, Homo sapiens
  misc_RNA (1)...(19): siRNA sense strand
caaacuauggccauugaag

SEQ ID NO: 1406045 - RNA, 19 nt, Homo sapiens
  misc_RNA (1)...(19): siRNA sense strand
gccagaagaaacuuguauu

SEQ ID NO: 1406046 - RNA, 19 nt, Homo sapiens
  misc_RNA (1)...(19): siRNA sense strand
gcacacuaucagggaguua

SEQ ID NO: 1406047 - RNA, 19 nt, Homo sapiens
  misc_RNA (1)...(19): siRNA sense strand
caucaucuuccuggucuuu

SEQ ID NO: 1406048 - RNA, 19 nt, Homo sapiens
  misc_RNA (1)...(19): siRNA sense strand
cuggagauccuucuuaagu

SEQ ID NO: 1406049 - RNA, 19 nt, Homo sapiens
  misc_RNA (1)...(19): siRNA sense strand
cagaagaaacuuguauugg

SEQ ID NO: 1406050 - RNA, 19 nt, Homo sapiens
  misc_RNA (1)...(19): siRNA sense strand
gugcguuucucuauaaagc

SEQ ID NO: 1406051 - RNA, 19 nt, Homo sapiens
  misc_RNA (1)...(19): siRNA sense strand
gagaucaacaccagcuagu

SEQ ID NO: 1406052 - RNA, 19 nt, Homo sapiens
  misc_RNA (1)...(19): siRNA sense strand
auaccaaacuauggccauu

SEQ ID NO: 1406053 - RNA, 19 nt, Homo sapiens
  misc_RNA (1)...(19): siRNA sense strand
cagcuagugcguuucucua

SEQ ID NO: 1406054 - RNA, 19 nt, Homo sapiens
  misc_RNA (1)...(19): siRNA sense strand
gcguauagaacagauuuca

SEQ ID NO: 1406055 - RNA, 19 nt, Homo sapiens
  misc_RNA (1)...(19): siRNA sense strand
ccaacaagaagagcagaug

SEQ ID NO: 1406056 - RNA, 19 nt, Homo sapiens
  misc_RNA (1)...(19): siRNA sense strand
cagcuugguuuaucuugcu

SEQ ID NO: 1406057 - RNA, 19 nt, Homo sapiens
  misc_RNA (1)...(19): siRNA sense strand
ccgcuuaccaacaagaaga

SEQ ID NO: 1406058 - RNA, 19 nt, Homo sapiens
  misc_RNA (1)...(19): siRNA sense strand
cacgucucaucgauacuuu

SEQ ID NO: 1406059 - RNA, 19 nt, Homo sapiens
  misc_RNA (1)...(19): siRNA sense strand
auccacaaauaccaaacua

SEQ ID NO: 1406060 - RNA, 19 nt, Homo sapiens
  misc_RNA (1)...(19): siRNA sense strand
ucacgucucaucgauacuu

SEQ ID NO: 1406061 - RNA, 19 nt, Homo sapiens
  misc_RNA (1)...(19): siRNA sense strand
gugccuggaaugucuuuga

SEQ ID NO: 1406062 - RNA, 19 nt, Homo sapiens
  misc_RNA (1)...(19): siRNA sense strand
cuauccaacuuuucuguuu

SEQ ID NO: 1406063 - RNA, 19 nt, Homo sapiens
  misc_RNA (1)...(19): siRNA sense strand
ggaagaagagcaagauuua

SEQ ID NO: 1406064 - RNA, 19 nt, Homo sapiens
  misc_RNA (1)...(19): siRNA sense strand
gaaagugguuuaauucaga

SEQ ID NO: 1406065 - RNA, 19 nt, Homo sapiens
  misc_RNA (1)...(19): siRNA sense strand
gauuauaccucacaaaugu

SEQ ID NO: 1406066 - RNA, 19 nt, Homo sapiens
  misc_RNA (1)...(19): siRNA sense strand
gagaacaucuauagugcua

SEQ ID NO: 1406067 - RNA, 19 nt, Homo sapiens
  misc_RNA (1)...(19): siRNA sense strand
ggagaagccuagugucaug

SEQ ID NO: 1406068 - RNA, 19 nt, Homo sapiens
  misc_RNA (1)...(19): siRNA sense strand
ccaagacagugaauuagaa

SEQ ID NO: 1406069 - RNA, 19 nt, Homo sapiens
  misc_RNA (1)...(19): siRNA sense strand
gauccuaugcccagaaaua

SEQ ID NO: 1406070 - RNA, 19 nt, Homo sapiens
  misc_RNA (1)...(19): siRNA sense strand
gcagagagcaccacauuag

SEQ ID NO: 1406071 - RNA, 19 nt, Homo sapiens
  misc_RNA (1)...(19): siRNA sense strand
ggaaaggacccaacaguag

SEQ ID NO: 1406072 - RNA, 19 nt, Homo sapiens
  misc_RNA (1)...(19): siRNA sense strand
gaaagaauugugugaaugu

SEQ ID NO: 1406073 - RNA, 19 nt, Homo sapiens
  misc_RNA (1)...(19): siRNA sense strand
guuaggaacugcauuaaag

SEQ ID NO: 1406074 - RNA, 19 nt, Homo sapiens
  misc_RNA (1)...(19): siRNA sense strand
gcacauauucucucaguuc

SEQ ID NO: 1406075 - RNA, 19 nt, Homo sapiens
  misc_RNA (1)...(19): siRNA sense strand
gagcagaaauugaaguuuu

SEQ ID NO: 1406076 - RNA, 19 nt, Homo sapiens
  misc_RNA (1)...(19): siRNA sense strand
gagauuaagagcagaaauu

SEQ ID NO: 1406077 - RNA, 19 nt, Homo sapiens
  misc_RNA (1)...(19): siRNA sense strand
gugauuggcucagguuuaa

SEQ ID NO: 1406078 - RNA, 19 nt, Homo sapiens
  misc_RNA (1)...(19): siRNA sense strand
gaaagugagagaaaucuau

SEQ ID NO: 1406079 - RNA, 19 nt, Homo sapiens
  misc_RNA (1)...(19): siRNA sense strand
cagaggaaauuaugacaug

SEQ ID NO: 1406080 - RNA, 19 nt, Homo sapiens
  misc_RNA (1)...(19): siRNA sense strand
gcccagcacauuauucuua

SEQ ID NO: 1406081 - RNA, 19 nt, Homo sapiens
  misc_RNA (1)...(19): siRNA sense strand
ucacaaauguauucugcaa

SEQ ID NO: 1406082 - RNA, 19 nt, Homo sapiens
  misc_RNA (1)...(19): siRNA sense strand
ggccaagguucuccuauau

SEQ ID NO: 1406083 - RNA, 19 nt, Homo sapiens
  misc_RNA (1)...(19): siRNA sense strand
gaacugcauuaaaguccuu

SEQ ID NO: 1406084 - RNA, 19 nt, Homo sapiens
  misc_RNA (1)...(19): siRNA sense strand
cagaaagaauugugugaau

SEQ ID NO: 1406085 - RNA, 19 nt, Homo sapiens
  misc_RNA (1)...(19): siRNA sense strand
gaaggaagcacugcagaga

SEQ ID NO: 1406086 - RNA, 19 nt, Homo sapiens
  misc_RNA (1)...(19): siRNA sense strand
ccacauaccagucggagaa

SEQ ID NO: 1406087 - RNA, 19 nt, Homo sapiens
  misc_RNA (1)...(19): siRNA sense strand
ugaauuagaacggguauuu

SEQ ID NO: 1406088 - RNA, 19 nt, Homo sapiens
  misc_RNA (1)...(19): siRNA sense strand
gaaaggacccaacaguagu

SEQ ID NO: 1406089 - RNA, 19 nt, Homo sapiens
  misc_RNA (1)...(19): siRNA sense strand
ccaagguucuccuauaugg

SEQ ID NO: 1406090 - RNA, 19 nt, Homo sapiens
  misc_RNA (1)...(19): siRNA sense strand
caaguaagcaauccagaug

SEQ ID NO: 1406091 - RNA, 19 nt, Homo sapiens
  misc_RNA (1)...(19): siRNA sense strand
gauuaucccaccuauacua

SEQ ID NO: 1406092 - RNA, 19 nt, Homo sapiens
  misc_RNA (1)...(19): siRNA sense strand
uggccaagguucuccuaua

SEQ ID NO: 1406093 - RNA, 19 nt, Homo sapiens
  misc_RNA (1)...(19): siRNA sense strand
aggaagcacugcagagauu

SEQ ID NO: 1406094 - RNA, 19 nt, Homo sapiens
  misc_RNA (1)...(19): siRNA sense strand
ggacccaacaguagugauu

SEQ ID NO: 1406095 - RNA, 19 nt, Homo sapiens
  misc_RNA (1)...(19): siRNA sense strand
aaacaugacuagcaagaac

SEQ ID NO: 1406096 - RNA, 19 nt, Homo sapiens
  misc_RNA (1)...(19): siRNA sense strand
ggcugauacucaucuauuu

SEQ ID NO: 1406097 - RNA, 19 nt, Homo sapiens
  misc_RNA (1)...(19): siRNA sense strand
ggaaagcugaugccacuuc

SEQ ID NO: 1406098 - RNA, 19 nt, Homo sapiens
  misc_RNA (1)...(19): siRNA sense strand
gaagcacugcagagauuaa

SEQ ID NO: 1406099 - RNA, 19 nt, Homo sapiens
  misc_RNA (1)...(19): siRNA sense strand
ggaaagugagagaaaucua

SEQ ID NO: 1406100 - RNA, 19 nt, Homo sapiens
  misc_RNA (1)...(19): siRNA sense strand
ugaaguggcugauacucau

SEQ ID NO: 1406101 - RNA, 19 nt, Homo sapiens
  misc_RNA (1)...(19): siRNA sense strand
gaaagcugaugccacuucu

SEQ ID NO: 1406102 - RNA, 19 nt, Homo sapiens
  misc_RNA (1)...(19): siRNA sense strand
gagagcaaacuauaaguca

SEQ ID NO: 1406103 - RNA, 19 nt, Homo sapiens
  misc_RNA (1)...(19): siRNA sense strand
agaaagaauugugugaaug

SEQ ID NO: 1406104 - RNA, 19 nt, Homo sapiens
  misc_RNA (1)...(19): siRNA sense strand
gcaggaaucaggagagcaa

SEQ ID NO: 1406105 - RNA, 19 nt, Homo sapiens
  misc_RNA (1)...(19): siRNA sense strand
cguauggacuaccuccuuu

SEQ ID NO: 1406106 - RNA, 19 nt, Homo sapiens
  misc_RNA (1)...(19): siRNA sense strand
guucuuaccugcacuacag

SEQ ID NO: 1406107 - RNA, 19 nt, Homo sapiens
  misc_RNA (1)...(19): siRNA sense strand
ggaagcacugcagagauua

SEQ ID NO: 1406108 - RNA, 19 nt, Homo sapiens
  misc_RNA (1)...(19): siRNA sense strand
gauaucuacuucuucuaca

SEQ ID NO: 1406109 - RNA, 19 nt, Homo sapiens
  misc_RNA (1)...(19): siRNA sense strand
ugaauguucugaucacuac

SEQ ID NO: 1406110 - RNA, 19 nt, Homo sapiens
  misc_RNA (1)...(19): siRNA sense strand
uggcucagguuuaacaaug

SEQ ID NO: 1406111 - RNA, 19 nt, Homo sapiens
  misc_RNA (1)...(19): siRNA sense strand
cuucaaaccuucccauguc

SEQ ID NO: 1406112 - RNA, 19 nt, Homo sapiens
  misc_RNA (1)...(19): siRNA sense strand
ggagacccuucuacaaguc

SEQ ID NO: 1406113 - RNA, 19 nt, Homo sapiens
  misc_RNA (1)...(19): siRNA sense strand
uaucccaccuauacuauuc

SEQ ID NO: 1406114 - RNA, 19 nt, Homo sapiens
  misc_RNA (1)...(19): siRNA sense strand
gcaucucaaaccaggauua

SEQ ID NO: 1406115 - RNA, 19 nt, Homo sapiens
  misc_RNA (1)...(19): siRNA sense strand
gcaauccagaugucaguga

SEQ ID NO: 1406116 - RNA, 19 nt, Homo sapiens
  misc_RNA (1)...(19): siRNA sense strand
caucuauagugcuaccaaa

SEQ ID NO: 1406117 - RNA, 19 nt, Homo sapiens
  misc_RNA (1)...(19): siRNA sense strand
gagagaaaucuaugauaag

SEQ ID NO: 1406118 - RNA, 19 nt, Homo sapiens
  misc_RNA (1)...(19): siRNA sense strand
gaugaucaguccaggaaaa

SEQ ID NO: 1406119 - RNA, 19 nt, Homo sapiens
  misc_RNA (1)...(19): siRNA sense strand
cacaaaugccagccugaua

SEQ ID NO: 1406120 - RNA, 19 nt, Homo sapiens
  misc_RNA (1)...(19): siRNA sense strand
uggacuaggagaaauauuu

SEQ ID NO: 1406121 - RNA, 19 nt, Homo sapiens
  misc_RNA (1)...(19): siRNA sense strand
gugagagaaaucuaugaua

SEQ ID NO: 1406122 - RNA, 19 nt, Homo sapiens
  misc_RNA (1)...(19): siRNA sense strand
ccagguacauguggaagau

SEQ ID NO: 1406123 - RNA, 19 nt, Homo sapiens
  misc_RNA (1)...(19): siRNA sense strand
uggaaaggacccaacagua

SEQ ID NO: 1406124 - RNA, 19 nt, Homo sapiens
  misc_RNA (1)...(19): siRNA sense strand
acaaaugccagccugauau

SEQ ID NO: 1406125 - RNA, 19 nt, Homo sapiens
  misc_RNA (1)...(19): siRNA sense strand
ggagagcaaacuauaaguc

SEQ ID NO: 1406126 - RNA, 19 nt, Homo sapiens
  misc_RNA (1)...(19): siRNA sense strand
gcucagguuuaacaaugga

SEQ ID NO: 1406127 - RNA, 19 nt, Homo sapiens
  misc_RNA (1)...(19): siRNA sense strand
ucaggagagcaaacuauaa

SEQ ID NO: 1406128 - RNA, 19 nt, Homo sapiens
  misc_RNA (1)...(19): siRNA sense strand
gagcaaacuauaagucaag

SEQ ID NO: 1406129 - RNA, 19 nt, Homo sapiens
  misc_RNA (1)...(19): siRNA sense strand
gauuaagagcagaaauuga

SEQ ID NO: 1406130 - RNA, 19 nt, Homo sapiens
  misc_RNA (1)...(19): siRNA sense strand
gcagagauuaagagcagaa

SEQ ID NO: 1406131 - RNA, 19 nt, Homo sapiens
  misc_RNA (1)...(19): siRNA sense strand
gaaucaggagagcaaacua

SEQ ID NO: 1406132 - RNA, 19 nt, Homo sapiens
  misc_RNA (1)...(19): siRNA sense strand
gguuaggaacugcauuaaa

SEQ ID NO: 1406133 - RNA, 19 nt, Homo sapiens
  misc_RNA (1)...(19): siRNA sense strand
gcaaacuauaagucaagua

SEQ ID NO: 1406134 - RNA, 19 nt, Homo sapiens
  misc_RNA (1)...(19): siRNA sense strand
caggucagacuaacaguga

SEQ ID NO: 1406135 - RNA, 19 nt, Homo sapiens
  misc_RNA (1)...(19): siRNA sense strand
gacaugcaccgauuacauc

SEQ ID NO: 1406136 - RNA, 19 nt, Homo sapiens
  misc_RNA (1)...(19): siRNA sense strand
ccugauaucuacuucuucu

SEQ ID NO: 1406137 - RNA, 19 nt, Homo sapiens
  misc_RNA (1)...(19): siRNA sense strand
gcacaaaugccagccugau

SEQ ID NO: 1406138 - RNA, 19 nt, Homo sapiens
  misc_RNA (1)...(19): siRNA sense strand
aagccaagaugcaggaauc

SEQ ID NO: 1406139 - RNA, 19 nt, Homo sapiens
  misc_RNA (1)...(19): siRNA sense strand
uacaguuucucaacagaug

SEQ ID NO: 1406140 - RNA, 19 nt, Homo sapiens
  misc_RNA (1)...(19): siRNA sense strand
ggaugaggaaacuagcuuu

SEQ ID NO: 1406141 - RNA, 19 nt, Homo sapiens
  misc_RNA (1)...(19): siRNA sense strand
acagcagacucaacccuau

SEQ ID NO: 1406142 - RNA, 19 nt, Homo sapiens
  misc_RNA (1)...(19): siRNA sense strand
ccagaaagaauugugugaa

SEQ ID NO: 1406143 - RNA, 19 nt, Homo sapiens
  misc_RNA (1)...(19): siRNA sense strand
gcacugcagagauuaagag

SEQ ID NO: 1406144 - RNA, 19 nt, Homo sapiens
  misc_RNA (1)...(19): siRNA sense strand
gaauuagaacggguauuuc

SEQ ID NO: 1406145 - RNA, 19 nt, Homo sapiens
  misc_RNA (1)...(19): siRNA sense strand
gccaagcccagcacauuau

SEQ ID NO: 1406146 - RNA, 19 nt, Homo sapiens
  misc_RNA (1)...(19): siRNA sense strand
cagccaagcccagcacauu

SEQ ID NO: 1406147 - RNA, 19 nt, Homo sapiens
  misc_RNA (1)...(19): siRNA sense strand
cuacaggguuaaccacaag

SEQ ID NO: 1406148 - RNA, 19 nt, Homo sapiens
  misc_RNA (1)...(19): siRNA sense strand
ccugaaagugguuuaauuc

SEQ ID NO: 1406149 - RNA, 19 nt, Homo sapiens
  misc_RNA (1)...(19): siRNA sense strand
gguaugaaaccugaaagug

SEQ ID NO: 1406150 - RNA, 19 nt, Homo sapiens
  misc_RNA (1)...(19): siRNA sense strand
uggagacccuucuacaagu

SEQ ID NO: 1406151 - RNA, 19 nt, Homo sapiens
  misc_RNA (1)...(19): siRNA sense strand
agagcaaacuauaagucaa

SEQ ID NO: 1406152 - RNA, 19 nt, Homo sapiens
  misc_RNA (1)...(19): siRNA sense strand
agagaaaucuaugauaagc

SEQ ID NO: 1406153 - RNA, 19 nt, Homo sapiens
  misc_RNA (1)...(19): siRNA sense strand
gaagaagagcaagauuuac

SEQ ID NO: 1406154 - RNA, 19 nt, Homo sapiens
  misc_RNA (1)...(19): siRNA sense strand
uauauggacuaggagaaau

SEQ ID NO: 1406155 - RNA, 19 nt, Homo sapiens
  misc_RNA (1)...(19): siRNA sense strand
caauccagaugucagugau

SEQ ID NO: 1406156 - RNA, 19 nt, Homo sapiens
  misc_RNA (1)...(19): siRNA sense strand
ucaggcaacccaaacguau

SEQ ID NO: 1406157 - RNA, 19 nt, Homo sapiens
  misc_RNA (1)...(19): siRNA sense strand
auuaugacaugcaccgauu

SEQ ID NO: 1406158 - RNA, 19 nt, Homo sapiens
  misc_RNA (1)...(19): siRNA sense strand
ugacaugcaccgauuacau

SEQ ID NO: 1406159 - RNA, 19 nt, Homo sapiens
  misc_RNA (1)...(19): siRNA sense strand
caggagagcaaacuauaag

SEQ ID NO: 1406160 - RNA, 19 nt, Homo sapiens
  misc_RNA (1)...(19): siRNA sense strand
gcaguagccagcaucucaa

SEQ ID NO: 1406161 - RNA, 19 nt, Homo sapiens
  misc_RNA (1)...(19): siRNA sense strand
cccagcacauuauucuuau

SEQ ID NO: 1406162 - RNA, 19 nt, Homo sapiens
  misc_RNA (1)...(19): siRNA sense strand
caaaugccagccugauauc

SEQ ID NO: 1406163 - RNA, 19 nt, Homo sapiens
  misc_RNA (1)...(19): siRNA sense strand
ggaagaagagcaagauuua

SEQ ID NO: 1406164 - RNA, 19 nt, Homo sapiens
  misc_RNA (1)...(19): siRNA sense strand
gaaagugguuuaauucaga

SEQ ID NO: 1406165 - RNA, 19 nt, Homo sapiens
  misc_RNA (1)...(19): siRNA sense strand
gauuauaccucacaaaugu

SEQ ID NO: 1406166 - RNA, 19 nt, Homo sapiens
  misc_RNA (1)...(19): siRNA sense strand
ggagaagccuagugucaug

SEQ ID NO: 1406167 - RNA, 19 nt, Homo sapiens
  misc_RNA (1)...(19): siRNA sense strand
ccaagacagugaauuagaa

SEQ ID NO: 1406168 - RNA, 19 nt, Homo sapiens
  misc_RNA (1)...(19): siRNA sense strand
gauccuaugcccagaaaua

SEQ ID NO: 1406169 - RNA, 19 nt, Homo sapiens
  misc_RNA (1)...(19): siRNA sense strand
gcagagagcaccacauuag

SEQ ID NO: 1406170 - RNA, 19 nt, Homo sapiens
  misc_RNA (1)...(19): siRNA sense strand
ggaaaggacccaacaguag

SEQ ID NO: 1406171 - RNA, 19 nt, Homo sapiens
  misc_RNA (1)...(19): siRNA sense strand
gcacauauucucucaguuc

SEQ ID NO: 1406172 - RNA, 19 nt, Homo sapiens
  misc_RNA (1)...(19): siRNA sense strand
gugauuggcucagguuuaa

SEQ ID NO: 1406173 - RNA, 19 nt, Homo sapiens
  misc_RNA (1)...(19): siRNA sense strand
cagaggaaauuaugacaug

SEQ ID NO: 1406174 - RNA, 19 nt, Homo sapiens
  misc_RNA (1)...(19): siRNA sense strand
gcccagcacauuauucuua

SEQ ID NO: 1406175 - RNA, 19 nt, Homo sapiens
  misc_RNA (1)...(19): siRNA sense strand
ucacaaauguauucugcaa

SEQ ID NO: 1406176 - RNA, 19 nt, Homo sapiens
  misc_RNA (1)...(19): siRNA sense strand
ccacauaccagucggagaa

SEQ ID NO: 1406177 - RNA, 19 nt, Homo sapiens
  misc_RNA (1)...(19): siRNA sense strand
ugaauuagaacggguauuu

SEQ ID NO: 1406178 - RNA, 19 nt, Homo sapiens
  misc_RNA (1)...(19): siRNA sense strand
gaaaggacccaacaguagu

SEQ ID NO: 1406179 - RNA, 19 nt, Homo sapiens
  misc_RNA (1)...(19): siRNA sense strand
caaguaagcaauccagaug

SEQ ID NO: 1406180 - RNA, 19 nt, Homo sapiens
  misc_RNA (1)...(19): siRNA sense strand
gauuaucccaccuauacua

SEQ ID NO: 1406181 - RNA, 19 nt, Homo sapiens
  misc_RNA (1)...(19): siRNA sense strand
ggacccaacaguagugauu

SEQ ID NO: 1406182 - RNA, 19 nt, Homo sapiens
  misc_RNA (1)...(19): siRNA sense strand
aaacaugacuagcaagaac

SEQ ID NO: 1406183 - RNA, 19 nt, Homo sapiens
  misc_RNA (1)...(19): siRNA sense strand
ggcugauacucaucuauuu

SEQ ID NO: 1406184 - RNA, 19 nt, Homo sapiens
  misc_RNA (1)...(19): siRNA sense strand
ggaaagcugaugccacuuc

SEQ ID NO: 1406185 - RNA, 19 nt, Homo sapiens
  misc_RNA (1)...(19): siRNA sense strand
ugaaguggcugauacucau

SEQ ID NO: 1406186 - RNA, 19 nt, Homo sapiens
  misc_RNA (1)...(19): siRNA sense strand
gagagcaaacuauaaguca

SEQ ID NO: 1406187 - RNA, 19 nt, Homo sapiens
  misc_RNA (1)...(19): siRNA sense strand
gcaggaaucaggagagcaa

SEQ ID NO: 1406188 - RNA, 19 nt, Homo sapiens
  misc_RNA (1)...(19): siRNA sense strand
gaaagcugaugccacuucu

SEQ ID NO: 1406189 - RNA, 19 nt, Homo sapiens
  misc_RNA (1)...(19): siRNA sense strand
cguauggacuaccuccuuu

SEQ ID NO: 1406190 - RNA, 19 nt, Homo sapiens
  misc_RNA (1)...(19): siRNA sense strand
guucuuaccugcacuacag

SEQ ID NO: 1406191 - RNA, 19 nt, Homo sapiens
  misc_RNA (1)...(19): siRNA sense strand
gauaucuacuucuucuaca

SEQ ID NO: 1406192 - RNA, 19 nt, Homo sapiens
  misc_RNA (1)...(19): siRNA sense strand
uggcucagguuuaacaaug

SEQ ID NO: 1406193 - RNA, 19 nt, Homo sapiens
  misc_RNA (1)...(19): siRNA sense strand
cuucaaaccuucccauguc

SEQ ID NO: 1406194 - RNA, 19 nt, Homo sapiens
  misc_RNA (1)...(19): siRNA sense strand
ggagacccuucuacaaguc

SEQ ID NO: 1406195 - RNA, 19 nt, Homo sapiens
  misc_RNA (1)...(19): siRNA sense strand
uaucccaccuauacuauuc

SEQ ID NO: 1406196 - RNA, 19 nt, Homo sapiens
  misc_RNA (1)...(19): siRNA sense strand
gcaucucaaaccaggauua

SEQ ID NO: 1406197 - RNA, 19 nt, Homo sapiens
  misc_RNA (1)...(19): siRNA sense strand
gcaauccagaugucaguga

SEQ ID NO: 1406198 - RNA, 19 nt, Homo sapiens
  misc_RNA (1)...(19): siRNA sense strand
gaugaucaguccaggaaaa

SEQ ID NO: 1406199 - RNA, 19 nt, Homo sapiens
  misc_RNA (1)...(19): siRNA sense strand
cacaaaugccagccugaua

SEQ ID NO: 1406200 - RNA, 19 nt, Homo sapiens
  misc_RNA (1)...(19): siRNA sense strand
uggaaaggacccaacagua

SEQ ID NO: 1406201 - RNA, 19 nt, Homo sapiens
  misc_RNA (1)...(19): siRNA sense strand
acaaaugccagccugauau

SEQ ID NO: 1406202 - RNA, 19 nt, Homo sapiens
  misc_RNA (1)...(19): siRNA sense strand
ggagagcaaacuauaaguc

SEQ ID NO: 1406203 - RNA, 19 nt, Homo sapiens
  misc_RNA (1)...(19): siRNA sense strand
gcucagguuuaacaaugga

SEQ ID NO: 1406204 - RNA, 19 nt, Homo sapiens
  misc_RNA (1)...(19): siRNA sense strand
gagcaaacuauaagucaag

SEQ ID NO: 1406205 - RNA, 19 nt, Homo sapiens
  misc_RNA (1)...(19): siRNA sense strand
ucaggagagcaaacuauaa

SEQ ID NO: 1406206 - RNA, 19 nt, Homo sapiens
  misc_RNA (1)...(19): siRNA sense strand
gacaugcaccgauuacauc

SEQ ID NO: 1406207 - RNA, 19 nt, Homo sapiens
  misc_RNA (1)...(19): siRNA sense strand
gaaucaggagagcaaacua

SEQ ID NO: 1406208 - RNA, 19 nt, Homo sapiens
  misc_RNA (1)...(19): siRNA sense strand
gcaaacuauaagucaagua

SEQ ID NO: 1406209 - RNA, 19 nt, Homo sapiens
  misc_RNA (1)...(19): siRNA sense strand
caggucagacuaacaguga

SEQ ID NO: 1406210 - RNA, 19 nt, Homo sapiens
  misc_RNA (1)...(19): siRNA sense strand
ccugauaucuacuucuucu

SEQ ID NO: 1406211 - RNA, 19 nt, Homo sapiens
  misc_RNA (1)...(19): siRNA sense strand
gcacaaaugccagccugau

SEQ ID NO: 1406212 - RNA, 19 nt, Homo sapiens
  misc_RNA (1)...(19): siRNA sense strand
aagccaagaugcaggaauc

SEQ ID NO: 1406213 - RNA, 19 nt, Homo sapiens
  misc_RNA (1)...(19): siRNA sense strand
acagcagacucaacccuau

SEQ ID NO: 1406214 - RNA, 19 nt, Homo sapiens
  misc_RNA (1)...(19): siRNA sense strand
gaauuagaacggguauuuc

SEQ ID NO: 1406215 - RNA, 19 nt, Homo sapiens
  misc_RNA (1)...(19): siRNA sense strand
gccaagcccagcacauuau

SEQ ID NO: 1406216 - RNA, 19 nt, Homo sapiens
  misc_RNA (1)...(19): siRNA sense strand
cagccaagcccagcacauu

SEQ ID NO: 1406217 - RNA, 19 nt, Homo sapiens
  misc_RNA (1)...(19): siRNA sense strand
cuacaggguuaaccacaag

SEQ ID NO: 1406218 - RNA, 19 nt, Homo sapiens
  misc_RNA (1)...(19): siRNA sense strand
ccugaaagugguuuaauuc

SEQ ID NO: 1406219 - RNA, 19 nt, Homo sapiens
  misc_RNA (1)...(19): siRNA sense strand
gguaugaaaccugaaagug

SEQ ID NO: 1406220 - RNA, 19 nt, Homo sapiens
  misc_RNA (1)...(19): siRNA sense strand
agagcaaacuauaagucaa

SEQ ID NO: 1406221 - RNA, 19 nt, Homo sapiens
  misc_RNA (1)...(19): siRNA sense strand
uggagacccuucuacaagu

SEQ ID NO: 1406222 - RNA, 19 nt, Homo sapiens
  misc_RNA (1)...(19): siRNA sense strand
gaagaagagcaagauuuac

SEQ ID NO: 1406223 - RNA, 19 nt, Homo sapiens
  misc_RNA (1)...(19): siRNA sense strand
caauccagaugucagugau

SEQ ID NO: 1406224 - RNA, 19 nt, Homo sapiens
  misc_RNA (1)...(19): siRNA sense strand
auuaugacaugcaccgauu

SEQ ID NO: 1406225 - RNA, 19 nt, Homo sapiens
  misc_RNA (1)...(19): siRNA sense strand
caggagagcaaacuauaag

SEQ ID NO: 1406226 - RNA, 19 nt, Homo sapiens
  misc_RNA (1)...(19): siRNA sense strand
gcaguagccagcaucucaa

SEQ ID NO: 1406227 - RNA, 19 nt, Homo sapiens
  misc_RNA (1)...(19): siRNA sense strand
cccagcacauuauucuuau

SEQ ID NO: 1406228 - RNA, 19 nt, Homo sapiens
  misc_RNA (1)...(19): siRNA sense strand
ucaggcaacccaaacguau

SEQ ID NO: 1406229 - RNA, 19 nt, Homo sapiens
  misc_RNA (1)...(19): siRNA sense strand
ugacaugcaccgauuacau

SEQ ID NO: 1406230 - RNA, 19 nt, Homo sapiens
  misc_RNA (1)...(19): siRNA sense strand
caaaugccagccugauauc

SEQ ID NO: 1406231 - RNA, 19 nt, Homo sapiens
  misc_RNA (1)...(19): siRNA sense strand
ccaaacguauggacuaccu

SEQ ID NO: 1406232 - RNA, 19 nt, Homo sapiens
  misc_RNA (1)...(19): siRNA sense strand
uggauccuaugcccagaaa

SEQ ID NO: 1406233 - RNA, 19 nt, Homo sapiens
  misc_RNA (1)...(19): siRNA sense strand
caucaucaucuuccacuca

SEQ ID NO: 1406234 - RNA, 19 nt, Homo sapiens
  misc_RNA (1)...(19): siRNA sense strand
accugaaagugguuuaauu

SEQ ID NO: 1406235 - RNA, 19 nt, Homo sapiens
  misc_RNA (1)...(19): siRNA sense strand
gcauuguggccagguauga

SEQ ID NO: 1406236 - RNA, 19 nt, Homo sapiens
  misc_RNA (1)...(19): siRNA sense strand
ggugcauuguggccaggua

SEQ ID NO: 1406237 - RNA, 19 nt, Homo sapiens
  misc_RNA (1)...(19): siRNA sense strand
caaugauuauaccucacaa

SEQ ID NO: 1406238 - RNA, 19 nt, Homo sapiens
  misc_RNA (1)...(19): siRNA sense strand
uggcugauacucaucuauu

SEQ ID NO: 1406239 - RNA, 19 nt, Homo sapiens
  misc_RNA (1)...(19): siRNA sense strand
gauuggcucagguuuaaca

SEQ ID NO: 1406240 - RNA, 19 nt, Homo sapiens
  misc_RNA (1)...(19): siRNA sense strand
gcccagaaauauggaaagg

SEQ ID NO: 1406241 - RNA, 19 nt, Homo sapiens
  misc_RNA (1)...(19): siRNA sense strand
cauuagcagcaaccacaua

SEQ ID NO: 1406242 - RNA, 19 nt, Homo sapiens
  misc_RNA (1)...(19): siRNA sense strand
ccaaugauuauaccucaca

SEQ ID NO: 1406243 - RNA, 19 nt, Homo sapiens
  misc_RNA (1)...(19): siRNA sense strand
ccagaugucagugaucaga

SEQ ID NO: 1406244 - RNA, 19 nt, Homo sapiens
  misc_RNA (1)...(19): siRNA sense strand
guagugauuggcucagguu

SEQ ID NO: 1406245 - RNA, 19 nt, Homo sapiens
  misc_RNA (1)...(19): siRNA sense strand
uucccaagacagugaauua

SEQ ID NO: 1406246 - RNA, 19 nt, Homo sapiens
  misc_RNA (1)...(19): siRNA sense strand
cagacuacaccaaguaaag

SEQ ID NO: 1406247 - RNA, 19 nt, Homo sapiens
  misc_RNA (1)...(19): siRNA sense strand
ugauuauaccucacaaaug

SEQ ID NO: 1406248 - RNA, 19 nt, Homo sapiens
  misc_RNA (1)...(19): siRNA sense strand
ucaaguaagcaauccagau

SEQ ID NO: 1406249 - RNA, 19 nt, Homo sapiens
  misc_RNA (1)...(19): siRNA sense strand
agccaagcccagcacauua

SEQ ID NO: 1406250 - RNA, 19 nt, Homo sapiens
  misc_RNA (1)...(19): siRNA sense strand
caaaccuucccaugucaga

SEQ ID NO: 1406251 - RNA, 19 nt, Homo sapiens
  misc_RNA (1)...(19): siRNA sense strand
ggaaucaggagagcaaacu

SEQ ID NO: 1406252 - RNA, 19 nt, Homo sapiens
  misc_RNA (1)...(19): siRNA sense strand
caugucagaggaaauuaug

SEQ ID NO: 1406253 - RNA, 19 nt, Homo sapiens
  misc_RNA (1)...(19): siRNA sense strand
gaggaaauuaugacaugca

SEQ ID NO: 1406254 - RNA, 19 nt, Homo sapiens
  misc_RNA (1)...(19): siRNA sense strand
gcuucaaaccuucccaugu

SEQ ID NO: 1406255 - RNA, 19 nt, Homo sapiens
  misc_RNA (1)...(19): siRNA sense strand
aagcugaugccacuucuuc

SEQ ID NO: 1406256 - RNA, 19 nt, Homo sapiens
  misc_RNA (1)...(19): siRNA sense strand
agacuacaccaaguaaaga

SEQ ID NO: 1406257 - RNA, 19 nt, Homo sapiens
  misc_RNA (1)...(19): siRNA sense strand
ggucagacuaacagugaug

SEQ ID NO: 1406258 - RNA, 19 nt, Homo sapiens
  misc_RNA (1)...(19): siRNA sense strand
ccaagcccagcacauuauu

SEQ ID NO: 1406259 - RNA, 19 nt, Homo sapiens
  misc_RNA (1)...(19): siRNA sense strand
agccugauaucuacuucuu

SEQ ID NO: 1406260 - RNA, 19 nt, Homo sapiens
  misc_RNA (1)...(19): siRNA sense strand
agugauuggcucagguuua

SEQ ID NO: 1406261 - RNA, 19 nt, Homo sapiens
  misc_RNA (1)...(19): siRNA sense strand
uaccagagcaaccagugaa

SEQ ID NO: 1406262 - RNA, 19 nt, Homo sapiens
  misc_RNA (1)...(19): siRNA sense strand
ucacaggucagacuaacag

SEQ ID NO: 1406263 - RNA, 19 nt, Homo sapiens
  misc_RNA (1)...(19): siRNA sense strand
gcaaagugcuggcccauuu

SEQ ID NO: 1406264 - RNA, 19 nt, Homo sapiens
  misc_RNA (1)...(19): siRNA sense strand
ggccuucgcugaggacuua

SEQ ID NO: 1406265 - RNA, 19 nt, Homo sapiens
  misc_RNA (1)...(19): siRNA sense strand
ugaaugcacuggugucuca

SEQ ID NO: 1406266 - RNA, 19 nt, Homo sapiens
  misc_RNA (1)...(19): siRNA sense strand
gcauugagccucucuacau

SEQ ID NO: 1406267 - RNA, 19 nt, Homo sapiens
  misc_RNA (1)...(19): siRNA sense strand
gagcaucccaggcuucuca

SEQ ID NO: 1406268 - RNA, 19 nt, Homo sapiens
  misc_RNA (1)...(19): siRNA sense strand
ccagacagcgggcaaagug

SEQ ID NO: 1406269 - RNA, 19 nt, Homo sapiens
  misc_RNA (1)...(19): siRNA sense strand
gcgagaggaguauguucua

SEQ ID NO: 1406270 - RNA, 19 nt, Homo sapiens
  misc_RNA (1)...(19): siRNA sense strand
acgaggcccugcuggagua

SEQ ID NO: 1406271 - RNA, 19 nt, Homo sapiens
  misc_RNA (1)...(19): siRNA sense strand
cugcaaagccuucuucaag

SEQ ID NO: 1406272 - RNA, 19 nt, Homo sapiens
  misc_RNA (1)...(19): siRNA sense strand
cauugagccucucuacauc

SEQ ID NO: 1406273 - RNA, 19 nt, Homo sapiens
  misc_RNA (1)...(19): siRNA sense strand
uacccucugugaccucuuu

SEQ ID NO: 1406274 - RNA, 19 nt, Homo sapiens
  misc_RNA (1)...(19): siRNA sense strand
gggugggcaugcucaagga

SEQ ID NO: 1406275 - RNA, 19 nt, Homo sapiens
  misc_RNA (1)...(19): siRNA sense strand
ggagcgagaggaguauguu

SEQ ID NO: 1406276 - RNA, 19 nt, Homo sapiens
  misc_RNA (1)...(19): siRNA sense strand
gccagguggugggcauuga

SEQ ID NO: 1406277 - RNA, 19 nt, Homo sapiens
  misc_RNA (1)...(19): siRNA sense strand
caaagugcuggcccauuuc

SEQ ID NO: 1406278 - RNA, 19 nt, Homo sapiens
  misc_RNA (1)...(19): siRNA sense strand
gagaugcucgaggccauga

SEQ ID NO: 1406279 - RNA, 19 nt, Homo sapiens
  misc_RNA (1)...(19): siRNA sense strand
cgagaggaguauguucuac

SEQ ID NO: 1406280 - RNA, 19 nt, Homo sapiens
  misc_RNA (1)...(19): siRNA sense strand
gagcgagaggaguauguuc

SEQ ID NO: 1406281 - RNA, 19 nt, Homo sapiens
  misc_RNA (1)...(19): siRNA sense strand
aggcccugcuggaguauga

SEQ ID NO: 1406282 - RNA, 19 nt, Homo sapiens
  misc_RNA (1)...(19): siRNA sense strand
ggcuggagcgagaggagua

SEQ ID NO: 1406283 - RNA, 19 nt, Homo sapiens
  misc_RNA (1)...(19): siRNA sense strand
gcagagagauaaagaguuu

SEQ ID NO: 1406284 - RNA, 19 nt, Homo sapiens
  misc_RNA (1)...(19): siRNA sense strand
gauaaagaguuucgacuaa

SEQ ID NO: 1406285 - RNA, 19 nt, Homo sapiens
  misc_RNA (1)...(19): siRNA sense strand
auaaugggcucucagaaua

SEQ ID NO: 1406286 - RNA, 19 nt, Homo sapiens
  misc_RNA (1)...(19): siRNA sense strand
gaaauugaccaguacagaa

SEQ ID NO: 1406287 - RNA, 19 nt, Homo sapiens
  misc_RNA (1)...(19): siRNA sense strand
cuacagagccaccaacuaa

SEQ ID NO: 1406288 - RNA, 19 nt, Homo sapiens
  misc_RNA (1)...(19): siRNA sense strand
gaacaaacacuagggaaga

SEQ ID NO: 1406289 - RNA, 19 nt, Homo sapiens
  misc_RNA (1)...(19): siRNA sense strand
gauaaugggcucucagaau

SEQ ID NO: 1406290 - RNA, 19 nt, Homo sapiens
  misc_RNA (1)...(19): siRNA sense strand
gggaagauacaagaacuua

SEQ ID NO: 1406291 - RNA, 19 nt, Homo sapiens
  misc_RNA (1)...(19): siRNA sense strand
ucucucagaugaaauagaa

SEQ ID NO: 1406292 - RNA, 19 nt, Homo sapiens
  misc_RNA (1)...(19): siRNA sense strand
ggaagcaaugguagaaauu

SEQ ID NO: 1406293 - RNA, 19 nt, Homo sapiens
  misc_RNA (1)...(19): siRNA sense strand
ggacacuacaauaaguaua

SEQ ID NO: 1406294 - RNA, 19 nt, Homo sapiens
  misc_RNA (1)...(19): siRNA sense strand
caaggaggaagcaauggua

SEQ ID NO: 1406295 - RNA, 19 nt, Homo sapiens
  misc_RNA (1)...(19): siRNA sense strand
ggaagauacaagaacuuaa

SEQ ID NO: 1406296 - RNA, 19 nt, Homo sapiens
  misc_RNA (1)...(19): siRNA sense strand
ggaggaagcaaugguagaa

SEQ ID NO: 1406297 - RNA, 19 nt, Homo sapiens
  misc_RNA (1)...(19): siRNA sense strand
gguagaaauugaccaguac

SEQ ID NO: 1406298 - RNA, 19 nt, Homo sapiens
  misc_RNA (1)...(19): siRNA sense strand
cagaugaaauagaagaaca

SEQ ID NO: 1406299 - RNA, 19 nt, Homo sapiens
  misc_RNA (1)...(19): siRNA sense strand
gaagcaagccaaggaggaa

SEQ ID NO: 1406300 - RNA, 19 nt, Homo sapiens
  misc_RNA (1)...(19): siRNA sense strand
gaaugcagagagauaaaga

SEQ ID NO: 1406301 - RNA, 19 nt, Homo sapiens
  misc_RNA (1)...(19): siRNA sense strand
gauacaagaacuuaaugga

SEQ ID NO: 1406302 - RNA, 19 nt, Homo sapiens
  misc_RNA (1)...(19): siRNA sense strand
gaacuuaauggacacuaca

SEQ ID NO: 1406303 - RNA, 19 nt, Homo sapiens
  misc_RNA (1)...(19): siRNA sense strand
cuuaauggacacuacaaua

SEQ ID NO: 1406304 - RNA, 19 nt, Homo sapiens
  misc_RNA (1)...(19): siRNA sense strand
cagaaauccaugugaacua

SEQ ID NO: 1406305 - RNA, 19 nt, Homo sapiens
  misc_RNA (1)...(19): siRNA sense strand
aaccagaaauccaugugaa

SEQ ID NO: 1406306 - RNA, 19 nt, Homo sapiens
  misc_RNA (1)...(19): siRNA sense strand
agauaaagaguuucgacua

SEQ ID NO: 1406307 - RNA, 19 nt, Homo sapiens
  misc_RNA (1)...(19): siRNA sense strand
uaaugggcucucagaauaa

SEQ ID NO: 1406308 - RNA, 19 nt, Homo sapiens
  misc_RNA (1)...(19): siRNA sense strand
gaaaccagaaauccaugug

SEQ ID NO: 1406309 - RNA, 19 nt, Homo sapiens
  misc_RNA (1)...(19): siRNA sense strand
gauugaagcaagccaagga

SEQ ID NO: 1406310 - RNA, 19 nt, Homo sapiens
  misc_RNA (1)...(19): siRNA sense strand
aggaagcaaugguagaaau

SEQ ID NO: 1406311 - RNA, 19 nt, Homo sapiens
  misc_RNA (1)...(19): siRNA sense strand
gugaugaaccagcucuuga

SEQ ID NO: 1406312 - RNA, 19 nt, Homo sapiens
  misc_RNA (1)...(19): siRNA sense strand
ugacaugaaaccagaaauc

SEQ ID NO: 1406313 - RNA, 19 nt, Homo sapiens
  misc_RNA (1)...(19): siRNA sense strand
uacagaaugcagagagaua

SEQ ID NO: 1406314 - RNA, 19 nt, Homo sapiens
  misc_RNA (1)...(19): siRNA sense strand
agaaauccaugugaacuac

SEQ ID NO: 1406315 - RNA, 19 nt, Homo sapiens
  misc_RNA (1)...(19): siRNA sense strand
aaauugaccaguacagaau

SEQ ID NO: 1406316 - RNA, 19 nt, Homo sapiens
  misc_RNA (1)...(19): siRNA sense strand
aauggacacuacaauaagu

SEQ ID NO: 1406317 - RNA, 19 nt, Homo sapiens
  misc_RNA (1)...(19): siRNA sense strand
caaggacaagcuagaggaa

SEQ ID NO: 1406318 - RNA, 19 nt, Homo sapiens
  misc_RNA (1)...(19): siRNA sense strand
acagaaugcagagagauaa

SEQ ID NO: 1406319 - RNA, 19 nt, Homo sapiens
  misc_RNA (1)...(19): siRNA sense strand
gaggaagcaaugguagaaa

SEQ ID NO: 1406320 - RNA, 19 nt, Homo sapiens
  misc_RNA (1)...(19): siRNA sense strand
cagaaugcagagagauaaa

SEQ ID NO: 1406321 - RNA, 19 nt, Homo sapiens
  misc_RNA (1)...(19): siRNA sense strand
uaauggacacuacaauaag

SEQ ID NO: 1406322 - RNA, 19 nt, Homo sapiens
  misc_RNA (1)...(19): siRNA sense strand
caugaaaccagaaauccau

SEQ ID NO: 1406323 - RNA, 19 nt, Homo sapiens
  misc_RNA (1)...(19): siRNA sense strand
gaaauagaagaacaaacac

SEQ ID NO: 1406324 - RNA, 19 nt, Homo sapiens
  misc_RNA (1)...(19): siRNA sense strand
aaaccagaaauccauguga

SEQ ID NO: 1406325 - RNA, 19 nt, Homo sapiens
  misc_RNA (1)...(19): siRNA sense strand
uggaaagugugaugaacca

SEQ ID NO: 1406326 - RNA, 19 nt, Homo sapiens
  misc_RNA (1)...(19): siRNA sense strand
guauauggaaagugugaug

SEQ ID NO: 1406327 - RNA, 19 nt, Homo sapiens
  misc_RNA (1)...(19): siRNA sense strand
uagggaagauacaagaacu

SEQ ID NO: 1406328 - RNA, 19 nt, Homo sapiens
  misc_RNA (1)...(19): siRNA sense strand
gaaauccaugugaacuaca

SEQ ID NO: 1406329 - RNA, 19 nt, Homo sapiens
  misc_RNA (1)...(19): siRNA sense strand
cgacuaaaacaaucuaaga

SEQ ID NO: 1406330 - RNA, 19 nt, Homo sapiens
  misc_RNA (1)...(19): siRNA sense strand
acaaacacuagggaagaua

SEQ ID NO: 1406331 - RNA, 19 nt, Homo sapiens
  misc_RNA (1)...(19): siRNA sense strand
aaugggcucucagaauaau

SEQ ID NO: 1406332 - RNA, 19 nt, Homo sapiens
  misc_RNA (1)...(19): siRNA sense strand
gggccaaggacaagcuaga

SEQ ID NO: 1406333 - RNA, 19 nt, Homo sapiens
  misc_RNA (1)...(19): siRNA sense strand
agaaauugaccaguacaga

SEQ ID NO: 1406334 - RNA, 19 nt, Homo sapiens
  misc_RNA (1)...(19): siRNA sense strand
cuaagauaaugggcucuca

SEQ ID NO: 1406335 - RNA, 19 nt, Homo sapiens
  misc_RNA (1)...(19): siRNA sense strand
ucuugagcauggucuguga

SEQ ID NO: 1406336 - RNA, 19 nt, Homo sapiens
  misc_RNA (1)...(19): siRNA sense strand
gcuagaggaagccaagaag

SEQ ID NO: 1406337 - RNA, 19 nt, Homo sapiens
  misc_RNA (1)...(19): siRNA sense strand
gaaaaggaaagcgauugaa

SEQ ID NO: 1406338 - RNA, 19 nt, Homo sapiens
  misc_RNA (1)...(19): siRNA sense strand
aaggaaagcgauugaagca

SEQ ID NO: 1406339 - RNA, 19 nt, Homo sapiens
  misc_RNA (1)...(19): siRNA sense strand
guacagaaugcagagagau

SEQ ID NO: 1406340 - RNA, 19 nt, Homo sapiens
  misc_RNA (1)...(19): siRNA sense strand
ucucagaugaaauagaaga

SEQ ID NO: 1406341 - RNA, 19 nt, Homo sapiens
  misc_RNA (1)...(19): siRNA sense strand
aagauaaugggcucucaga

SEQ ID NO: 1406342 - RNA, 19 nt, Homo sapiens
  misc_RNA (1)...(19): siRNA sense strand
caaacacuagggaagauac

SEQ ID NO: 1406343 - RNA, 19 nt, Homo sapiens
  misc_RNA (1)...(19): siRNA sense strand
aacaaacacuagggaagau

SEQ ID NO: 1406344 - RNA, 19 nt, Homo sapiens
  misc_RNA (1)...(19): siRNA sense strand
ggaagcaaugguagaaauu

SEQ ID NO: 1406345 - RNA, 19 nt, Homo sapiens
  misc_RNA (1)...(19): siRNA sense strand
caaggaggaagcaauggua

SEQ ID NO: 1406346 - RNA, 19 nt, Homo sapiens
  misc_RNA (1)...(19): siRNA sense strand
ggaggaagcaaugguagaa

SEQ ID NO: 1406347 - RNA, 19 nt, Homo sapiens
  misc_RNA (1)...(19): siRNA sense strand
gaagcaagccaaggaggaa

SEQ ID NO: 1406348 - RNA, 19 nt, Homo sapiens
  misc_RNA (1)...(19): siRNA sense strand
gauugaagcaagccaagga

SEQ ID NO: 1406349 - RNA, 19 nt, Homo sapiens
  misc_RNA (1)...(19): siRNA sense strand
aggaagcaaugguagaaau

SEQ ID NO: 1406350 - RNA, 19 nt, Homo sapiens
  misc_RNA (1)...(19): siRNA sense strand
caaggacaagcuagaggaa

SEQ ID NO: 1406351 - RNA, 19 nt, Homo sapiens
  misc_RNA (1)...(19): siRNA sense strand
gaggaagcaaugguagaaa

SEQ ID NO: 1406352 - RNA, 19 nt, Homo sapiens
  misc_RNA (1)...(19): siRNA sense strand
gggccaaggacaagcuaga

SEQ ID NO: 1406353 - RNA, 19 nt, Homo sapiens
  misc_RNA (1)...(19): siRNA sense strand
gcuagaggaagccaagaag

SEQ ID NO: 1406354 - RNA, 19 nt, Homo sapiens
  misc_RNA (1)...(19): siRNA sense strand
aaggaaagcgauugaagca

SEQ ID NO: 1406355 - RNA, 19 nt, Homo sapiens
  misc_RNA (1)...(19): siRNA sense strand
gaaaaggaaagcgauugaa

SEQ ID NO: 1406356 - RNA, 19 nt, Homo sapiens
  misc_RNA (1)...(19): siRNA sense strand
caagacagcucaacagauu

SEQ ID NO: 1406357 - RNA, 19 nt, Homo sapiens
  misc_RNA (1)...(19): siRNA sense strand
gcauggaucucccgaaauu

SEQ ID NO: 1406358 - RNA, 19 nt, Homo sapiens
  misc_RNA (1)...(19): siRNA sense strand
ggacauggccuccaaugaa

SEQ ID NO: 1406359 - RNA, 19 nt, Homo sapiens
  misc_RNA (1)...(19): siRNA sense strand
gcaaagagaagaaggagaa

SEQ ID NO: 1406360 - RNA, 19 nt, Homo sapiens
  misc_RNA (1)...(19): siRNA sense strand
gcucagagaacgccaauga

SEQ ID NO: 1406361 - RNA, 19 nt, Homo sapiens
  misc_RNA (1)...(19): siRNA sense strand
cagcauggaucucccgaaa

SEQ ID NO: 1406362 - RNA, 19 nt, Homo sapiens
  misc_RNA (1)...(19): siRNA sense strand
uagaagcacuagagaagaa

SEQ ID NO: 1406363 - RNA, 19 nt, Homo sapiens
  misc_RNA (1)...(19): siRNA sense strand
ugacaggacuggccgcuau

SEQ ID NO: 1406364 - RNA, 19 nt, Homo sapiens
  misc_RNA (1)...(19): siRNA sense strand
ggacauggacuaccguuca

SEQ ID NO: 1406365 - RNA, 19 nt, Homo sapiens
  misc_RNA (1)...(19): siRNA sense strand
agaccggccucuacuauga

SEQ ID NO: 1406366 - RNA, 19 nt, Homo sapiens
  misc_RNA (1)...(19): siRNA sense strand
agaaugacauggagcaaau

SEQ ID NO: 1406367 - RNA, 19 nt, Homo sapiens
  misc_RNA (1)...(19): siRNA sense strand
ccacacagcaccauggauu

SEQ ID NO: 1406368 - RNA, 19 nt, Homo sapiens
  misc_RNA (1)...(19): siRNA sense strand
gcaugacuaugacgacuca

SEQ ID NO: 1406369 - RNA, 19 nt, Homo sapiens
  misc_RNA (1)...(19): siRNA sense strand
gcaagaagcagggcauugu

SEQ ID NO: 1406370 - RNA, 19 nt, Homo sapiens
  misc_RNA (1)...(19): siRNA sense strand
ggcagaagcuggccugucu

SEQ ID NO: 1406371 - RNA, 19 nt, Homo sapiens
  misc_RNA (1)...(19): siRNA sense strand
ggcaagaccaucaauguug

SEQ ID NO: 1406372 - RNA, 19 nt, Homo sapiens
  misc_RNA (1)...(19): siRNA sense strand
gcuaugccauccucgagaa

SEQ ID NO: 1406373 - RNA, 19 nt, Homo sapiens
  misc_RNA (1)...(19): siRNA sense strand
ccgcugugcucaaaucuga

SEQ ID NO: 1406374 - RNA, 19 nt, Homo sapiens
  misc_RNA (1)...(19): siRNA sense strand
uggcaucacuggaaccaaa

SEQ ID NO: 1406375 - RNA, 19 nt, Homo sapiens
  misc_RNA (1)...(19): siRNA sense strand
guucauauccucgcgagua

SEQ ID NO: 1406376 - RNA, 19 nt, Homo sapiens
  misc_RNA (1)...(19): siRNA sense strand
gccaacagccagucguaua

SEQ ID NO: 1406377 - RNA, 19 nt, Homo sapiens
  misc_RNA (1)...(19): siRNA sense strand
gacauggccuccaaugaag

SEQ ID NO: 1406378 - RNA, 19 nt, Homo sapiens
  misc_RNA (1)...(19): siRNA sense strand
gcugggcagugacaacauu

SEQ ID NO: 1406379 - RNA, 19 nt, Homo sapiens
  misc_RNA (1)...(19): siRNA sense strand
caagaagcagggcauugua

SEQ ID NO: 1406380 - RNA, 19 nt, Homo sapiens
  misc_RNA (1)...(19): siRNA sense strand
gaugagggcuauggcaaca

SEQ ID NO: 1406381 - RNA, 19 nt, Homo sapiens
  misc_RNA (1)...(19): siRNA sense strand
cgaaggagggcaaagagaa

SEQ ID NO: 1406382 - RNA, 19 nt, Homo sapiens
  misc_RNA (1)...(19): siRNA sense strand
ucucagggcuccacaagca

SEQ ID NO: 1406383 - RNA, 19 nt, Homo sapiens
  misc_RNA (1)...(19): siRNA sense strand
aaucagcacucccucaaca

SEQ ID NO: 1406384 - RNA, 19 nt, Homo sapiens
  misc_RNA (1)...(19): siRNA sense strand
gaggacuggcugugcaaua

SEQ ID NO: 1406385 - RNA, 19 nt, Homo sapiens
  misc_RNA (1)...(19): siRNA sense strand
cgagcccacuugucagaaa

SEQ ID NO: 1406386 - RNA, 19 nt, Homo sapiens
  misc_RNA (1)...(19): siRNA sense strand
gagaagcacaagaccaaga

SEQ ID NO: 1406387 - RNA, 19 nt, Homo sapiens
  misc_RNA (1)...(19): siRNA sense strand
gccagaaggugucgaugca

SEQ ID NO: 1406388 - RNA, 19 nt, Homo sapiens
  misc_RNA (1)...(19): siRNA sense strand
aggacuggcugugcaauaa

SEQ ID NO: 1406389 - RNA, 19 nt, Homo sapiens
  misc_RNA (1)...(19): siRNA sense strand
gggagaggcggaccuaugu

SEQ ID NO: 1406390 - RNA, 19 nt, Homo sapiens
  misc_RNA (1)...(19): siRNA sense strand
acauggagcaaaugaagua

SEQ ID NO: 1406391 - RNA, 19 nt, Homo sapiens
  misc_RNA (1)...(19): siRNA sense strand
caagggcccuggcaucacu

SEQ ID NO: 1406392 - RNA, 19 nt, Homo sapiens
  misc_RNA (1)...(19): siRNA sense strand
caacgugcgcgucauaaag

SEQ ID NO: 1406393 - RNA, 19 nt, Homo sapiens
  misc_RNA (1)...(19): siRNA sense strand
gcagcugaacgcagagaaa

SEQ ID NO: 1406394 - RNA, 19 nt, Homo sapiens
  misc_RNA (1)...(19): siRNA sense strand
ggacuaccguucauauccu

SEQ ID NO: 1406395 - RNA, 19 nt, Homo sapiens
  misc_RNA (1)...(19): siRNA sense strand
ggagucagccacugcagau

SEQ ID NO: 1406396 - RNA, 19 nt, Homo sapiens
  misc_RNA (1)...(19): siRNA sense strand
gaaggagggcaaagagaag

SEQ ID NO: 1406397 - RNA, 19 nt, Homo sapiens
  misc_RNA (1)...(19): siRNA sense strand
gacaagcagacccaacuga

SEQ ID NO: 1406398 - RNA, 19 nt, Homo sapiens
  misc_RNA (1)...(19): siRNA sense strand
gagaggcggaccuauguuc

SEQ ID NO: 1406399 - RNA, 19 nt, Homo sapiens
  misc_RNA (1)...(19): siRNA sense strand
ggagggcaagcaugacuau

SEQ ID NO: 1406400 - RNA, 19 nt, Homo sapiens
  misc_RNA (1)...(19): siRNA sense strand
gaugagaccuccggcuacu

SEQ ID NO: 1406401 - RNA, 19 nt, Homo sapiens
  misc_RNA (1)...(19): siRNA sense strand
cuaccuaccaguacgauga

SEQ ID NO: 1406402 - RNA, 19 nt, Homo sapiens
  misc_RNA (1)...(19): siRNA sense strand
ugaaggcagucgcaucagu

SEQ ID NO: 1406403 - RNA, 19 nt, Homo sapiens
  misc_RNA (1)...(19): siRNA sense strand
ucagagaacgccaaugaca

SEQ ID NO: 1406404 - RNA, 19 nt, Homo sapiens
  misc_RNA (1)...(19): siRNA sense strand
cucaacagauugccaagga

SEQ ID NO: 1406405 - RNA, 19 nt, Homo sapiens
  misc_RNA (1)...(19): siRNA sense strand
ccaacaggaugagggcuau

SEQ ID NO: 1406406 - RNA, 19 nt, Homo sapiens
  misc_RNA (1)...(19): siRNA sense strand
gacauggacuaccguucau

SEQ ID NO: 1406407 - RNA, 19 nt, Homo sapiens
  misc_RNA (1)...(19): siRNA sense strand
gggcaagcaugacuaugac

SEQ ID NO: 1406408 - RNA, 19 nt, Homo sapiens
  misc_RNA (1)...(19): siRNA sense strand
gcuacuaccaacaggauga

SEQ ID NO: 1406409 - RNA, 19 nt, Homo sapiens
  misc_RNA (1)...(19): siRNA sense strand
gccaggagggcaagcauga

SEQ ID NO: 1406410 - RNA, 19 nt, Homo sapiens
  misc_RNA (1)...(19): siRNA sense strand
ccagaccggccucuacuau

SEQ ID NO: 1406411 - RNA, 19 nt, Homo sapiens
  misc_RNA (1)...(19): siRNA sense strand
ccaaucagcacucccucaa

SEQ ID NO: 1406412 - RNA, 19 nt, Homo sapiens
  misc_RNA (1)...(19): siRNA sense strand
ugacauggagcaaaugaag

SEQ ID NO: 1406413 - RNA, 19 nt, Homo sapiens
  misc_RNA (1)...(19): siRNA sense strand
gagaagaagggagcacuag

SEQ ID NO: 1406414 - RNA, 19 nt, Homo sapiens
  misc_RNA (1)...(19): siRNA sense strand
ccaagcccaagaucaauga

SEQ ID NO: 1406415 - RNA, 19 nt, Homo sapiens
  misc_RNA (1)...(19): siRNA sense strand
cgacuacagcuacuaccaa

SEQ ID NO: 1406416 - RNA, 19 nt, Homo sapiens
  misc_RNA (1)...(19): siRNA sense strand
aagaagcagggcauuguaa

SEQ ID NO: 1406417 - RNA, 19 nt, Homo sapiens
  misc_RNA (1)...(19): siRNA sense strand
agaagaaggagaagcacaa

SEQ ID NO: 1406418 - RNA, 19 nt, Homo sapiens
  misc_RNA (1)...(19): siRNA sense strand
cgacggacauaaggagaca

SEQ ID NO: 1406419 - RNA, 19 nt, Homo sapiens
  misc_RNA (1)...(19): siRNA sense strand
gaccuccggcuacuacuau

SEQ ID NO: 1406420 - RNA, 19 nt, Homo sapiens
  misc_RNA (1)...(19): siRNA sense strand
ccaacgugcgcgucauaaa

SEQ ID NO: 1406421 - RNA, 19 nt, Homo sapiens
  misc_RNA (1)...(19): siRNA sense strand
gaagaaugacauggagcaa

SEQ ID NO: 1406422 - RNA, 19 nt, Homo sapiens
  misc_RNA (1)...(19): siRNA sense strand
uagagaagaaugacaugga

SEQ ID NO: 1406423 - RNA, 19 nt, Homo sapiens
  misc_RNA (1)...(19): siRNA sense strand
cgagaagaagggagcacua

SEQ ID NO: 1406424 - RNA, 19 nt, Homo sapiens
  misc_RNA (1)...(19): siRNA sense strand
ucagcucccugcgagauga

SEQ ID NO: 1406425 - RNA, 19 nt, Homo sapiens
  misc_RNA (1)...(19): siRNA sense strand
gacuggcugugcaauaagu

SEQ ID NO: 1406426 - RNA, 19 nt, Homo sapiens
  misc_RNA (1)...(19): siRNA sense strand
gggacauggccuccaauga

SEQ ID NO: 1406427 - RNA, 19 nt, Homo sapiens
  misc_RNA (1)...(19): siRNA sense strand
ggacaagcagacccaacug

SEQ ID NO: 1406428 - RNA, 19 nt, Homo sapiens
  misc_RNA (1)...(19): siRNA sense strand
uggcaucuaccaacaauca

SEQ ID NO: 1406429 - RNA, 19 nt, Homo sapiens
  misc_RNA (1)...(19): siRNA sense strand
gcacuagagaagaaugaca

SEQ ID NO: 1406430 - RNA, 19 nt, Homo sapiens
  misc_RNA (1)...(19): siRNA sense strand
ccagucguauaccaucaug

SEQ ID NO: 1406431 - RNA, 19 nt, Homo sapiens
  misc_RNA (1)...(19): siRNA sense strand
acaagcagacccaacugaa

SEQ ID NO: 1406432 - RNA, 19 nt, Homo sapiens
  misc_RNA (1)...(19): siRNA sense strand
acaaggagacacugcacaa

SEQ ID NO: 1406433 - RNA, 19 nt, Homo sapiens
  misc_RNA (1)...(19): siRNA sense strand
gaagcacuagagaagaaug

SEQ ID NO: 1406434 - RNA, 19 nt, Homo sapiens
  misc_RNA (1)...(19): siRNA sense strand
ucccgaaauuggccaguga

SEQ ID NO: 1406435 - RNA, 19 nt, Homo sapiens
  misc_RNA (1)...(19): siRNA sense strand
ccaagacagcucaacagau

SEQ ID NO: 1406436 - RNA, 19 nt, Homo sapiens
  misc_RNA (1)...(19): siRNA sense strand
gaagaaggagaagcacaag

SEQ ID NO: 1406437 - RNA, 19 nt, Homo sapiens
  misc_RNA (1)...(19): siRNA sense strand
ggagaggcggaccuauguu

SEQ ID NO: 1406438 - RNA, 19 nt, Homo sapiens
  misc_RNA (1)...(19): siRNA sense strand
ccuggcaucuaccaacaau

SEQ ID NO: 1406439 - RNA, 19 nt, Homo sapiens
  misc_RNA (1)...(19): siRNA sense strand
cggcaagaccaucaauguu

SEQ ID NO: 1406440 - RNA, 19 nt, Homo sapiens
  misc_RNA (1)...(19): siRNA sense strand
cgucgaguuuagucacuug

SEQ ID NO: 1406441 - RNA, 19 nt, Homo sapiens
  misc_RNA (1)...(19): siRNA sense strand
cauggacuaccguucauau

SEQ ID NO: 1406442 - RNA, 19 nt, Homo sapiens
  misc_RNA (1)...(19): siRNA sense strand
aaggagacacugcacaaga

SEQ ID NO: 1406443 - RNA, 19 nt, Homo sapiens
  misc_RNA (1)...(19): siRNA sense strand
gcacccaccacucacuauc

SEQ ID NO: 1406444 - RNA, 19 nt, Homo sapiens
  misc_RNA (1)...(19): siRNA sense strand
ggagacacugcacaagaca

SEQ ID NO: 1406445 - RNA, 19 nt, Homo sapiens
  misc_RNA (1)...(19): siRNA sense strand
aaugaaggcagucgcauca

SEQ ID NO: 1406446 - RNA, 19 nt, Homo sapiens
  misc_RNA (1)...(19): siRNA sense strand
agggcaagcaugacuauga

SEQ ID NO: 1406447 - RNA, 19 nt, Homo sapiens
  misc_RNA (1)...(19): siRNA sense strand
gcaacagccagggcacaga

SEQ ID NO: 1406448 - RNA, 19 nt, Homo sapiens
  misc_RNA (1)...(19): siRNA sense strand
gaccaagacagcucaacag

SEQ ID NO: 1406449 - RNA, 19 nt, Homo sapiens
  misc_RNA (1)...(19): siRNA sense strand
cggcugaugcggaacaaau

SEQ ID NO: 1406450 - RNA, 19 nt, Homo sapiens
  misc_RNA (1)...(19): siRNA sense strand
ccaacagccagucguauac

SEQ ID NO: 1406451 - RNA, 19 nt, Homo sapiens
  misc_RNA (1)...(19): siRNA sense strand
cugugucgaugcaggcuuu

SEQ ID NO: 1406452 - RNA, 19 nt, Homo sapiens
  misc_RNA (1)...(19): siRNA sense strand
cacugcagaugcuggcuau

SEQ ID NO: 1406453 - RNA, 19 nt, Homo sapiens
  misc_RNA (1)...(19): siRNA sense strand
ucaccucaaccgaguccua

SEQ ID NO: 1406454 - RNA, 19 nt, Homo sapiens
  misc_RNA (1)...(19): siRNA sense strand
aaacgagcuagaagcacua

SEQ ID NO: 1406455 - RNA, 19 nt, Homo sapiens
  misc_RNA (1)...(19): siRNA sense strand
ucagggcuccacaagcaaa

SEQ ID NO: 1406456 - RNA, 19 nt, Homo sapiens
  misc_RNA (1)...(19): siRNA sense strand
caagacagcucaacagauu

SEQ ID NO: 1406457 - RNA, 19 nt, Homo sapiens
  misc_RNA (1)...(19): siRNA sense strand
gcauggaucucccgaaauu

SEQ ID NO: 1406458 - RNA, 19 nt, Homo sapiens
  misc_RNA (1)...(19): siRNA sense strand
ggacauggccuccaaugaa

SEQ ID NO: 1406459 - RNA, 19 nt, Homo sapiens
  misc_RNA (1)...(19): siRNA sense strand
gcaaagagaagaaggagaa

SEQ ID NO: 1406460 - RNA, 19 nt, Homo sapiens
  misc_RNA (1)...(19): siRNA sense strand
gcucagagaacgccaauga

SEQ ID NO: 1406461 - RNA, 19 nt, Homo sapiens
  misc_RNA (1)...(19): siRNA sense strand
cagcauggaucucccgaaa

SEQ ID NO: 1406462 - RNA, 19 nt, Homo sapiens
  misc_RNA (1)...(19): siRNA sense strand
uagaagcacuagagaagaa

SEQ ID NO: 1406463 - RNA, 19 nt, Homo sapiens
  misc_RNA (1)...(19): siRNA sense strand
ugacaggacuggccgcuau

SEQ ID NO: 1406464 - RNA, 19 nt, Homo sapiens
  misc_RNA (1)...(19): siRNA sense strand
ggacauggacuaccguuca

SEQ ID NO: 1406465 - RNA, 19 nt, Homo sapiens
  misc_RNA (1)...(19): siRNA sense strand
agaccggccucuacuauga

SEQ ID NO: 1406466 - RNA, 19 nt, Homo sapiens
  misc_RNA (1)...(19): siRNA sense strand
agaaugacauggagcaaau

SEQ ID NO: 1406467 - RNA, 19 nt, Homo sapiens
  misc_RNA (1)...(19): siRNA sense strand
ccacacagcaccauggauu

SEQ ID NO: 1406468 - RNA, 19 nt, Homo sapiens
  misc_RNA (1)...(19): siRNA sense strand
gcaugacuaugacgacuca

SEQ ID NO: 1406469 - RNA, 19 nt, Homo sapiens
  misc_RNA (1)...(19): siRNA sense strand
gcaagaagcagggcauugu

SEQ ID NO: 1406470 - RNA, 19 nt, Homo sapiens
  misc_RNA (1)...(19): siRNA sense strand
ggcagaagcuggccugucu

SEQ ID NO: 1406471 - RNA, 19 nt, Homo sapiens
  misc_RNA (1)...(19): siRNA sense strand
ggcaagaccaucaauguug

SEQ ID NO: 1406472 - RNA, 19 nt, Homo sapiens
  misc_RNA (1)...(19): siRNA sense strand
gcuaugccauccucgagaa

SEQ ID NO: 1406473 - RNA, 19 nt, Homo sapiens
  misc_RNA (1)...(19): siRNA sense strand
ccgcugugcucaaaucuga

SEQ ID NO: 1406474 - RNA, 19 nt, Homo sapiens
  misc_RNA (1)...(19): siRNA sense strand
uggcaucacuggaaccaaa

SEQ ID NO: 1406475 - RNA, 19 nt, Homo sapiens
  misc_RNA (1)...(19): siRNA sense strand
guucauauccucgcgagua

SEQ ID NO: 1406476 - RNA, 19 nt, Homo sapiens
  misc_RNA (1)...(19): siRNA sense strand
gccaacagccagucguaua

SEQ ID NO: 1406477 - RNA, 19 nt, Homo sapiens
  misc_RNA (1)...(19): siRNA sense strand
gacauggccuccaaugaag

SEQ ID NO: 1406478 - RNA, 19 nt, Homo sapiens
  misc_RNA (1)...(19): siRNA sense strand
gcugggcagugacaacauu

SEQ ID NO: 1406479 - RNA, 19 nt, Homo sapiens
  misc_RNA (1)...(19): siRNA sense strand
caagaagcagggcauugua

SEQ ID NO: 1406480 - RNA, 19 nt, Homo sapiens
  misc_RNA (1)...(19): siRNA sense strand
gaugagggcuauggcaaca

SEQ ID NO: 1406481 - RNA, 19 nt, Homo sapiens
  misc_RNA (1)...(19): siRNA sense strand
cgaaggagggcaaagagaa

SEQ ID NO: 1406482 - RNA, 19 nt, Homo sapiens
  misc_RNA (1)...(19): siRNA sense strand
ucucagggcuccacaagca

SEQ ID NO: 1406483 - RNA, 19 nt, Homo sapiens
  misc_RNA (1)...(19): siRNA sense strand
aaucagcacucccucaaca

SEQ ID NO: 1406484 - RNA, 19 nt, Homo sapiens
  misc_RNA (1)...(19): siRNA sense strand
gaggacuggcugugcaaua

SEQ ID NO: 1406485 - RNA, 19 nt, Homo sapiens
  misc_RNA (1)...(19): siRNA sense strand
cgagcccacuugucagaaa

SEQ ID NO: 1406486 - RNA, 19 nt, Homo sapiens
  misc_RNA (1)...(19): siRNA sense strand
gagaagcacaagaccaaga

SEQ ID NO: 1406487 - RNA, 19 nt, Homo sapiens
  misc_RNA (1)...(19): siRNA sense strand
gccagaaggugucgaugca

SEQ ID NO: 1406488 - RNA, 19 nt, Homo sapiens
  misc_RNA (1)...(19): siRNA sense strand
aggacuggcugugcaauaa

SEQ ID NO: 1406489 - RNA, 19 nt, Homo sapiens
  misc_RNA (1)...(19): siRNA sense strand
gggagaggcggaccuaugu

SEQ ID NO: 1406490 - RNA, 19 nt, Homo sapiens
  misc_RNA (1)...(19): siRNA sense strand
acauggagcaaaugaagua

SEQ ID NO: 1406491 - RNA, 19 nt, Homo sapiens
  misc_RNA (1)...(19): siRNA sense strand
caagggcccuggcaucacu

SEQ ID NO: 1406492 - RNA, 19 nt, Homo sapiens
  misc_RNA (1)...(19): siRNA sense strand
caacgugcgcgucauaaag

SEQ ID NO: 1406493 - RNA, 19 nt, Homo sapiens
  misc_RNA (1)...(19): siRNA sense strand
gcagcugaacgcagagaaa

SEQ ID NO: 1406494 - RNA, 19 nt, Homo sapiens
  misc_RNA (1)...(19): siRNA sense strand
ggacuaccguucauauccu

SEQ ID NO: 1406495 - RNA, 19 nt, Homo sapiens
  misc_RNA (1)...(19): siRNA sense strand
ggagucagccacugcagau

SEQ ID NO: 1406496 - RNA, 19 nt, Homo sapiens
  misc_RNA (1)...(19): siRNA sense strand
gaaggagggcaaagagaag

SEQ ID NO: 1406497 - RNA, 19 nt, Homo sapiens
  misc_RNA (1)...(19): siRNA sense strand
gacaagcagacccaacuga

SEQ ID NO: 1406498 - RNA, 19 nt, Homo sapiens
  misc_RNA (1)...(19): siRNA sense strand
gagaggcggaccuauguuc

SEQ ID NO: 1406499 - RNA, 19 nt, Homo sapiens
  misc_RNA (1)...(19): siRNA sense strand
ggagggcaagcaugacuau

SEQ ID NO: 1406500 - RNA, 19 nt, Homo sapiens
  misc_RNA (1)...(19): siRNA sense strand
gaugagaccuccggcuacu

SEQ ID NO: 1406501 - RNA, 19 nt, Homo sapiens
  misc_RNA (1)...(19): siRNA sense strand
cuaccuaccaguacgauga

SEQ ID NO: 1406502 - RNA, 19 nt, Homo sapiens
  misc_RNA (1)...(19): siRNA sense strand
ugaaggcagucgcaucagu

SEQ ID NO: 1406503 - RNA, 19 nt, Homo sapiens
  misc_RNA (1)...(19): siRNA sense strand
ucagagaacgccaaugaca

SEQ ID NO: 1406504 - RNA, 19 nt, Homo sapiens
  misc_RNA (1)...(19): siRNA sense strand
cucaacagauugccaagga

SEQ ID NO: 1406505 - RNA, 19 nt, Homo sapiens
  misc_RNA (1)...(19): siRNA sense strand
ccaacaggaugagggcuau

SEQ ID NO: 1406506 - RNA, 19 nt, Homo sapiens
  misc_RNA (1)...(19): siRNA sense strand
gacauggacuaccguucau

SEQ ID NO: 1406507 - RNA, 19 nt, Homo sapiens
  misc_RNA (1)...(19): siRNA sense strand
gggcaagcaugacuaugac

SEQ ID NO: 1406508 - RNA, 19 nt, Homo sapiens
  misc_RNA (1)...(19): siRNA sense strand
gcuacuaccaacaggauga

SEQ ID NO: 1406509 - RNA, 19 nt, Homo sapiens
  misc_RNA (1)...(19): siRNA sense strand
gccaggagggcaagcauga

SEQ ID NO: 1406510 - RNA, 19 nt, Homo sapiens
  misc_RNA (1)...(19): siRNA sense strand
ccagaccggccucuacuau

SEQ ID NO: 1406511 - RNA, 19 nt, Homo sapiens
  misc_RNA (1)...(19): siRNA sense strand
ccaaucagcacucccucaa

SEQ ID NO: 1406512 - RNA, 19 nt, Homo sapiens
  misc_RNA (1)...(19): siRNA sense strand
ugacauggagcaaaugaag

SEQ ID NO: 1406513 - RNA, 19 nt, Homo sapiens
  misc_RNA (1)...(19): siRNA sense strand
gagaagaagggagcacuag

SEQ ID NO: 1406514 - RNA, 19 nt, Homo sapiens
  misc_RNA (1)...(19): siRNA sense strand
ccaagcccaagaucaauga

SEQ ID NO: 1406515 - RNA, 19 nt, Homo sapiens
  misc_RNA (1)...(19): siRNA sense strand
cgacuacagcuacuaccaa

SEQ ID NO: 1406516 - RNA, 19 nt, Homo sapiens
  misc_RNA (1)...(19): siRNA sense strand
aagaagcagggcauuguaa

SEQ ID NO: 1406517 - RNA, 19 nt, Homo sapiens
  misc_RNA (1)...(19): siRNA sense strand
agaagaaggagaagcacaa

SEQ ID NO: 1406518 - RNA, 19 nt, Homo sapiens
  misc_RNA (1)...(19): siRNA sense strand
cgacggacauaaggagaca

SEQ ID NO: 1406519 - RNA, 19 nt, Homo sapiens
  misc_RNA (1)...(19): siRNA sense strand
gaccuccggcuacuacuau

SEQ ID NO: 1406520 - RNA, 19 nt, Homo sapiens
  misc_RNA (1)...(19): siRNA sense strand
ccaacgugcgcgucauaaa

SEQ ID NO: 1406521 - RNA, 19 nt, Homo sapiens
  misc_RNA (1)...(19): siRNA sense strand
gaagaaugacauggagcaa

SEQ ID NO: 1406522 - RNA, 19 nt, Homo sapiens
  misc_RNA (1)...(19): siRNA sense strand
uagagaagaaugacaugga

SEQ ID NO: 1406523 - RNA, 19 nt, Homo sapiens
  misc_RNA (1)...(19): siRNA sense strand
cgagaagaagggagcacua

SEQ ID NO: 1406524 - RNA, 19 nt, Homo sapiens
  misc_RNA (1)...(19): siRNA sense strand
ucagcucccugcgagauga

SEQ ID NO: 1406525 - RNA, 19 nt, Homo sapiens
  misc_RNA (1)...(19): siRNA sense strand
gacuggcugugcaauaagu

SEQ ID NO: 1406526 - RNA, 19 nt, Homo sapiens
  misc_RNA (1)...(19): siRNA sense strand
gggacauggccuccaauga

SEQ ID NO: 1406527 - RNA, 19 nt, Homo sapiens
  misc_RNA (1)...(19): siRNA sense strand
ggacaagcagacccaacug

SEQ ID NO: 1406528 - RNA, 19 nt, Homo sapiens
  misc_RNA (1)...(19): siRNA sense strand
uggcaucuaccaacaauca

SEQ ID NO: 1406529 - RNA, 19 nt, Homo sapiens
  misc_RNA (1)...(19): siRNA sense strand
gcacuagagaagaaugaca

SEQ ID NO: 1406530 - RNA, 19 nt, Homo sapiens
  misc_RNA (1)...(19): siRNA sense strand
ccagucguauaccaucaug

SEQ ID NO: 1406531 - RNA, 19 nt, Homo sapiens
  misc_RNA (1)...(19): siRNA sense strand
acaagcagacccaacugaa

SEQ ID NO: 1406532 - RNA, 19 nt, Homo sapiens
  misc_RNA (1)...(19): siRNA sense strand
acaaggagacacugcacaa

SEQ ID NO: 1406533 - RNA, 19 nt, Homo sapiens
  misc_RNA (1)...(19): siRNA sense strand
gaagcacuagagaagaaug

SEQ ID NO: 1406534 - RNA, 19 nt, Homo sapiens
  misc_RNA (1)...(19): siRNA sense strand
ucccgaaauuggccaguga

SEQ ID NO: 1406535 - RNA, 19 nt, Homo sapiens
  misc_RNA (1)...(19): siRNA sense strand
ccaagacagcucaacagau

SEQ ID NO: 1406536 - RNA, 19 nt, Homo sapiens
  misc_RNA (1)...(19): siRNA sense strand
gaagaaggagaagcacaag

SEQ ID NO: 1406537 - RNA, 19 nt, Homo sapiens
  misc_RNA (1)...(19): siRNA sense strand
ggagaggcggaccuauguu

SEQ ID NO: 1406538 - RNA, 19 nt, Homo sapiens
  misc_RNA (1)...(19): siRNA sense strand
ccuggcaucuaccaacaau

SEQ ID NO: 1406539 - RNA, 19 nt, Homo sapiens
  misc_RNA (1)...(19): siRNA sense strand
cggcaagaccaucaauguu

SEQ ID NO: 1406540 - RNA, 19 nt, Homo sapiens
  misc_RNA (1)...(19): siRNA sense strand
cgucgaguuuagucacuug

SEQ ID NO: 1406541 - RNA, 19 nt, Homo sapiens
  misc_RNA (1)...(19): siRNA sense strand
cauggacuaccguucauau

SEQ ID NO: 1406542 - RNA, 19 nt, Homo sapiens
  misc_RNA (1)...(19): siRNA sense strand
aaggagacacugcacaaga

SEQ ID NO: 1406543 - RNA, 19 nt, Homo sapiens
  misc_RNA (1)...(19): siRNA sense strand
gcacccaccacucacuauc

SEQ ID NO: 1406544 - RNA, 19 nt, Homo sapiens
  misc_RNA (1)...(19): siRNA sense strand
ggagacacugcacaagaca

SEQ ID NO: 1406545 - RNA, 19 nt, Homo sapiens
  misc_RNA (1)...(19): siRNA sense strand
aaugaaggcagucgcauca

SEQ ID NO: 1406546 - RNA, 19 nt, Homo sapiens
  misc_RNA (1)...(19): siRNA sense strand
agggcaagcaugacuauga

SEQ ID NO: 1406547 - RNA, 19 nt, Homo sapiens
  misc_RNA (1)...(19): siRNA sense strand
gcaacagccagggcacaga

SEQ ID NO: 1406548 - RNA, 19 nt, Homo sapiens
  misc_RNA (1)...(19): siRNA sense strand
gaccaagacagcucaacag

SEQ ID NO: 1406549 - RNA, 19 nt, Homo sapiens
  misc_RNA (1)...(19): siRNA sense strand
cggcugaugcggaacaaau

SEQ ID NO: 1406550 - RNA, 19 nt, Homo sapiens
  misc_RNA (1)...(19): siRNA sense strand
ccaacagccagucguauac

SEQ ID NO: 1406551 - RNA, 19 nt, Homo sapiens
  misc_RNA (1)...(19): siRNA sense strand
cugugucgaugcaggcuuu

SEQ ID NO: 1406552 - RNA, 19 nt, Homo sapiens
  misc_RNA (1)...(19): siRNA sense strand
cacugcagaugcuggcuau

SEQ ID NO: 1406553 - RNA, 19 nt, Homo sapiens
  misc_RNA (1)...(19): siRNA sense strand
ucaccucaaccgaguccua

SEQ ID NO: 1406554 - RNA, 19 nt, Homo sapiens
  misc_RNA (1)...(19): siRNA sense strand
aaacgagcuagaagcacua

SEQ ID NO: 1406555 - RNA, 19 nt, Homo sapiens
  misc_RNA (1)...(19): siRNA sense strand
ucagggcuccacaagcaaa

SEQ ID NO: 1406556 - RNA, 19 nt, Homo sapiens
  misc_RNA (1)...(19): siRNA sense strand
acacagaucuuaacucuaa

SEQ ID NO: 1406557 - RNA, 19 nt, Homo sapiens
  misc_RNA (1)...(19): siRNA sense strand
gaucuuaacucuaaugaug

SEQ ID NO: 1406558 - RNA, 19 nt, Homo sapiens
  misc_RNA (1)...(19): siRNA sense strand
caacugagaucaacaaugg

SEQ ID NO: 1406559 - RNA, 19 nt, Homo sapiens
  misc_RNA (1)...(19): siRNA sense strand
ggaacagacuaaagacaaa

SEQ ID NO: 1406560 - RNA, 19 nt, Homo sapiens
  misc_RNA (1)...(19): siRNA sense strand
ggcaagagaugaguuaauu

SEQ ID NO: 1406561 - RNA, 19 nt, Homo sapiens
  misc_RNA (1)...(19): siRNA sense strand
guacacagaucuuaacucu

SEQ ID NO: 1406562 - RNA, 19 nt, Homo sapiens
  misc_RNA (1)...(19): siRNA sense strand
gcaaguacacagaucuuaa

SEQ ID NO: 1406563 - RNA, 19 nt, Homo sapiens
  misc_RNA (1)...(19): siRNA sense strand
ugauguaacuggccuaaga

SEQ ID NO: 1406564 - RNA, 19 nt, Homo sapiens
  misc_RNA (1)...(19): siRNA sense strand
aaugaaaggugaacuggaa

SEQ ID NO: 1406565 - RNA, 19 nt, Homo sapiens
  misc_RNA (1)...(19): siRNA sense strand
caagaagguucgauugagu

SEQ ID NO: 1406566 - RNA, 19 nt, Homo sapiens
  misc_RNA (1)...(19): siRNA sense strand
cugagugccuggaaguuua

SEQ ID NO: 1406567 - RNA, 19 nt, Homo sapiens
  misc_RNA (1)...(19): siRNA sense strand
gagaugaguuaauucuaag

SEQ ID NO: 1406568 - RNA, 19 nt, Homo sapiens
  misc_RNA (1)...(19): siRNA sense strand
ucaaaguuauggcaagaga

SEQ ID NO: 1406569 - RNA, 19 nt, Homo sapiens
  misc_RNA (1)...(19): siRNA sense strand
gaacaagagaugcaagagu

SEQ ID NO: 1406570 - RNA, 19 nt, Homo sapiens
  misc_RNA (1)...(19): siRNA sense strand
gaacuggaacagacuaaag

SEQ ID NO: 1406571 - RNA, 19 nt, Homo sapiens
  misc_RNA (1)...(19): siRNA sense strand
gaacugagugccuggaagu

SEQ ID NO: 1406572 - RNA, 19 nt, Homo sapiens
  misc_RNA (1)...(19): siRNA sense strand
ccuaagagagucugaagaa

SEQ ID NO: 1406573 - RNA, 19 nt, Homo sapiens
  misc_RNA (1)...(19): siRNA sense strand
aagguucgauugagugaaa

SEQ ID NO: 1406574 - RNA, 19 nt, Homo sapiens
  misc_RNA (1)...(19): siRNA sense strand
ggaacaagcccaaaaugaa

SEQ ID NO: 1406575 - RNA, 19 nt, Homo sapiens
  misc_RNA (1)...(19): siRNA sense strand
cuaagagagucugaagaaa

SEQ ID NO: 1406576 - RNA, 19 nt, Homo sapiens
  misc_RNA (1)...(19): siRNA sense strand
ccaagaagguucgauugag

SEQ ID NO: 1406577 - RNA, 19 nt, Homo sapiens
  misc_RNA (1)...(19): siRNA sense strand
caagagaugaguuaauucu

SEQ ID NO: 1406578 - RNA, 19 nt, Homo sapiens
  misc_RNA (1)...(19): siRNA sense strand
guaacuggccuaagagagu

SEQ ID NO: 1406579 - RNA, 19 nt, Homo sapiens
  misc_RNA (1)...(19): siRNA sense strand
caagagaugcaagagugua

SEQ ID NO: 1406580 - RNA, 19 nt, Homo sapiens
  misc_RNA (1)...(19): siRNA sense strand
gacuaaagacaaacuggaa

SEQ ID NO: 1406581 - RNA, 19 nt, Homo sapiens
  misc_RNA (1)...(19): siRNA sense strand
gcaagagaugaguuaauuc

SEQ ID NO: 1406582 - RNA, 19 nt, Homo sapiens
  misc_RNA (1)...(19): siRNA sense strand
ggaaguuuacgccugauag

SEQ ID NO: 1406583 - RNA, 19 nt, Homo sapiens
  misc_RNA (1)...(19): siRNA sense strand
gagaugcaagaguguacua

SEQ ID NO: 1406584 - RNA, 19 nt, Homo sapiens
  misc_RNA (1)...(19): siRNA sense strand
ugaagcauauguacaagcu

SEQ ID NO: 1406585 - RNA, 19 nt, Homo sapiens
  misc_RNA (1)...(19): siRNA sense strand
gggaaaacauccuuguaau

SEQ ID NO: 1406586 - RNA, 19 nt, Homo sapiens
  misc_RNA (1)...(19): siRNA sense strand
ggcaaguacacagaucuua

SEQ ID NO: 1406587 - RNA, 19 nt, Homo sapiens
  misc_RNA (1)...(19): siRNA sense strand
uaagagagucugaagaaaa

SEQ ID NO: 1406588 - RNA, 19 nt, Homo sapiens
  misc_RNA (1)...(19): siRNA sense strand
gagggcaaguacacagauc

SEQ ID NO: 1406589 - RNA, 19 nt, Homo sapiens
  misc_RNA (1)...(19): siRNA sense strand
uauggcaagagaugaguua

SEQ ID NO: 1406590 - RNA, 19 nt, Homo sapiens
  misc_RNA (1)...(19): siRNA sense strand
gcgacuagcaaccaaggaa

SEQ ID NO: 1406591 - RNA, 19 nt, Homo sapiens
  misc_RNA (1)...(19): siRNA sense strand
ggaaaacauccuuguaaug

SEQ ID NO: 1406592 - RNA, 19 nt, Homo sapiens
  misc_RNA (1)...(19): siRNA sense strand
uccaguaccucaagcaagu

SEQ ID NO: 1406593 - RNA, 19 nt, Homo sapiens
  misc_RNA (1)...(19): siRNA sense strand
aaaguuauggcaagagaug

SEQ ID NO: 1406594 - RNA, 19 nt, Homo sapiens
  misc_RNA (1)...(19): siRNA sense strand
gaaaacauccuuguaaugc

SEQ ID NO: 1406595 - RNA, 19 nt, Homo sapiens
  misc_RNA (1)...(19): siRNA sense strand
acccagcgaucaacuuguu

SEQ ID NO: 1406596 - RNA, 19 nt, Homo sapiens
  misc_RNA (1)...(19): siRNA sense strand
uggaacagacuaaagacaa

SEQ ID NO: 1406597 - RNA, 19 nt, Homo sapiens
  misc_RNA (1)...(19): siRNA sense strand
gaguuaauucuaagaugga

SEQ ID NO: 1406598 - RNA, 19 nt, Homo sapiens
  misc_RNA (1)...(19): siRNA sense strand
cuucaaaguuauggcaaga

SEQ ID NO: 1406599 - RNA, 19 nt, Homo sapiens
  misc_RNA (1)...(19): siRNA sense strand
caaccaaggaacaagagau

SEQ ID NO: 1406600 - RNA, 19 nt, Homo sapiens
  misc_RNA (1)...(19): siRNA sense strand
caaguacacagaucuuaac

SEQ ID NO: 1406601 - RNA, 19 nt, Homo sapiens
  misc_RNA (1)...(19): siRNA sense strand
uaaugcgacuagcaaccaa

SEQ ID NO: 1406602 - RNA, 19 nt, Homo sapiens
  misc_RNA (1)...(19): siRNA sense strand
cccaagaagguucgauuga

SEQ ID NO: 1406603 - RNA, 19 nt, Homo sapiens
  misc_RNA (1)...(19): siRNA sense strand
gcaaccaaggaacaagaga

SEQ ID NO: 1406604 - RNA, 19 nt, Homo sapiens
  misc_RNA (1)...(19): siRNA sense strand
gaacaagcccaaaaugaac

SEQ ID NO: 1406605 - RNA, 19 nt, Homo sapiens
  misc_RNA (1)...(19): siRNA sense strand
gaacagacuaaagacaaac

SEQ ID NO: 1406606 - RNA, 19 nt, Homo sapiens
  misc_RNA (1)...(19): siRNA sense strand
acugagaucaacaauggua

SEQ ID NO: 1406607 - RNA, 19 nt, Homo sapiens
  misc_RNA (1)...(19): siRNA sense strand
gggcaaguacacagaucuu

SEQ ID NO: 1406608 - RNA, 19 nt, Homo sapiens
  misc_RNA (1)...(19): siRNA sense strand
uaaagacaaacuggaacaa

SEQ ID NO: 1406609 - RNA, 19 nt, Homo sapiens
  misc_RNA (1)...(19): siRNA sense strand
ccaaggaacaagagaugca

SEQ ID NO: 1406610 - RNA, 19 nt, Homo sapiens
  misc_RNA (1)...(19): siRNA sense strand
uagcaaccaaggaacaaga

SEQ ID NO: 1406611 - RNA, 19 nt, Homo sapiens
  misc_RNA (1)...(19): siRNA sense strand
ggagggcaaguacacagau

SEQ ID NO: 1406612 - RNA, 19 nt, Homo sapiens
  misc_RNA (1)...(19): siRNA sense strand
cuaaagacaaacuggaaca

SEQ ID NO: 1406613 - RNA, 19 nt, Homo sapiens
  misc_RNA (1)...(19): siRNA sense strand
gcccaacugagaucaacaa

SEQ ID NO: 1406614 - RNA, 19 nt, Homo sapiens
  misc_RNA (1)...(19): siRNA sense strand
ucaaauccaguaccucaag

SEQ ID NO: 1406615 - RNA, 19 nt, Homo sapiens
  misc_RNA (1)...(19): siRNA sense strand
guaaugcgacuagcaacca

SEQ ID NO: 1406616 - RNA, 19 nt, Homo sapiens
  misc_RNA (1)...(19): siRNA sense strand
ccaacugagaucaacaaug

SEQ ID NO: 1406617 - RNA, 19 nt, Homo sapiens
  misc_RNA (1)...(19): siRNA sense strand
caaggaacaagagaugcaa

SEQ ID NO: 1406618 - RNA, 19 nt, Homo sapiens
  misc_RNA (1)...(19): siRNA sense strand
ugagaucaacaaugguaga

SEQ ID NO: 1406619 - RNA, 19 nt, Homo sapiens
  misc_RNA (1)...(19): siRNA sense strand
ggugaacuggaacagacua

SEQ ID NO: 1406620 - RNA, 19 nt, Homo sapiens
  misc_RNA (1)...(19): siRNA sense strand
agacccagcgaucaacuug

SEQ ID NO: 1406621 - RNA, 19 nt, Homo sapiens
  misc_RNA (1)...(19): siRNA sense strand
acacagaucuuaacucuaa

SEQ ID NO: 1406622 - RNA, 19 nt, Homo sapiens
  misc_RNA (1)...(19): siRNA sense strand
gaucuuaacucuaaugaug

SEQ ID NO: 1406623 - RNA, 19 nt, Homo sapiens
  misc_RNA (1)...(19): siRNA sense strand
caacugagaucaacaaugg

SEQ ID NO: 1406624 - RNA, 19 nt, Homo sapiens
  misc_RNA (1)...(19): siRNA sense strand
ggaacagacuaaagacaaa

SEQ ID NO: 1406625 - RNA, 19 nt, Homo sapiens
  misc_RNA (1)...(19): siRNA sense strand
ggcaagagaugaguuaauu

SEQ ID NO: 1406626 - RNA, 19 nt, Homo sapiens
  misc_RNA (1)...(19): siRNA sense strand
guacacagaucuuaacucu

SEQ ID NO: 1406627 - RNA, 19 nt, Homo sapiens
  misc_RNA (1)...(19): siRNA sense strand
gcaaguacacagaucuuaa

SEQ ID NO: 1406628 - RNA, 19 nt, Homo sapiens
  misc_RNA (1)...(19): siRNA sense strand
ugauguaacuggccuaaga

SEQ ID NO: 1406629 - RNA, 19 nt, Homo sapiens
  misc_RNA (1)...(19): siRNA sense strand
aaugaaaggugaacuggaa

SEQ ID NO: 1406630 - RNA, 19 nt, Homo sapiens
  misc_RNA (1)...(19): siRNA sense strand
caagaagguucgauugagu

SEQ ID NO: 1406631 - RNA, 19 nt, Homo sapiens
  misc_RNA (1)...(19): siRNA sense strand
cugagugccuggaaguuua

SEQ ID NO: 1406632 - RNA, 19 nt, Homo sapiens
  misc_RNA (1)...(19): siRNA sense strand
gagaugaguuaauucuaag

SEQ ID NO: 1406633 - RNA, 19 nt, Homo sapiens
  misc_RNA (1)...(19): siRNA sense strand
ucaaaguuauggcaagaga

SEQ ID NO: 1406634 - RNA, 19 nt, Homo sapiens
  misc_RNA (1)...(19): siRNA sense strand
gaacaagagaugcaagagu

SEQ ID NO: 1406635 - RNA, 19 nt, Homo sapiens
  misc_RNA (1)...(19): siRNA sense strand
gaacuggaacagacuaaag

SEQ ID NO: 1406636 - RNA, 19 nt, Homo sapiens
  misc_RNA (1)...(19): siRNA sense strand
gaacugagugccuggaagu

SEQ ID NO: 1406637 - RNA, 19 nt, Homo sapiens
  misc_RNA (1)...(19): siRNA sense strand
ccuaagagagucugaagaa

SEQ ID NO: 1406638 - RNA, 19 nt, Homo sapiens
  misc_RNA (1)...(19): siRNA sense strand
aagguucgauugagugaaa

SEQ ID NO: 1406639 - RNA, 19 nt, Homo sapiens
  misc_RNA (1)...(19): siRNA sense strand
ggaacaagcccaaaaugaa

SEQ ID NO: 1406640 - RNA, 19 nt, Homo sapiens
  misc_RNA (1)...(19): siRNA sense strand
cuaagagagucugaagaaa

SEQ ID NO: 1406641 - RNA, 19 nt, Homo sapiens
  misc_RNA (1)...(19): siRNA sense strand
ccaagaagguucgauugag

SEQ ID NO: 1406642 - RNA, 19 nt, Homo sapiens
  misc_RNA (1)...(19): siRNA sense strand
caagagaugaguuaauucu

SEQ ID NO: 1406643 - RNA, 19 nt, Homo sapiens
  misc_RNA (1)...(19): siRNA sense strand
guaacuggccuaagagagu

SEQ ID NO: 1406644 - RNA, 19 nt, Homo sapiens
  misc_RNA (1)...(19): siRNA sense strand
caagagaugcaagagugua

SEQ ID NO: 1406645 - RNA, 19 nt, Homo sapiens
  misc_RNA (1)...(19): siRNA sense strand
gacuaaagacaaacuggaa

SEQ ID NO: 1406646 - RNA, 19 nt, Homo sapiens
  misc_RNA (1)...(19): siRNA sense strand
gcaagagaugaguuaauuc

SEQ ID NO: 1406647 - RNA, 19 nt, Homo sapiens
  misc_RNA (1)...(19): siRNA sense strand
ggaaguuuacgccugauag

SEQ ID NO: 1406648 - RNA, 19 nt, Homo sapiens
  misc_RNA (1)...(19): siRNA sense strand
gagaugcaagaguguacua

SEQ ID NO: 1406649 - RNA, 19 nt, Homo sapiens
  misc_RNA (1)...(19): siRNA sense strand
ugaagcauauguacaagcu

SEQ ID NO: 1406650 - RNA, 19 nt, Homo sapiens
  misc_RNA (1)...(19): siRNA sense strand
gggaaaacauccuuguaau

SEQ ID NO: 1406651 - RNA, 19 nt, Homo sapiens
  misc_RNA (1)...(19): siRNA sense strand
ggcaaguacacagaucuua

SEQ ID NO: 1406652 - RNA, 19 nt, Homo sapiens
  misc_RNA (1)...(19): siRNA sense strand
uaagagagucugaagaaaa

SEQ ID NO: 1406653 - RNA, 19 nt, Homo sapiens
  misc_RNA (1)...(19): siRNA sense strand
gagggcaaguacacagauc

SEQ ID NO: 1406654 - RNA, 19 nt, Homo sapiens
  misc_RNA (1)...(19): siRNA sense strand
uauggcaagagaugaguua

SEQ ID NO: 1406655 - RNA, 19 nt, Homo sapiens
  misc_RNA (1)...(19): siRNA sense strand
gcgacuagcaaccaaggaa

SEQ ID NO: 1406656 - RNA, 19 nt, Homo sapiens
  misc_RNA (1)...(19): siRNA sense strand
ggaaaacauccuuguaaug

SEQ ID NO: 1406657 - RNA, 19 nt, Homo sapiens
  misc_RNA (1)...(19): siRNA sense strand
uccaguaccucaagcaagu

SEQ ID NO: 1406658 - RNA, 19 nt, Homo sapiens
  misc_RNA (1)...(19): siRNA sense strand
aaaguuauggcaagagaug

SEQ ID NO: 1406659 - RNA, 19 nt, Homo sapiens
  misc_RNA (1)...(19): siRNA sense strand
gaaaacauccuuguaaugc

SEQ ID NO: 1406660 - RNA, 19 nt, Homo sapiens
  misc_RNA (1)...(19): siRNA sense strand
acccagcgaucaacuuguu

SEQ ID NO: 1406661 - RNA, 19 nt, Homo sapiens
  misc_RNA (1)...(19): siRNA sense strand
uggaacagacuaaagacaa

SEQ ID NO: 1406662 - RNA, 19 nt, Homo sapiens
  misc_RNA (1)...(19): siRNA sense strand
gaguuaauucuaagaugga

SEQ ID NO: 1406663 - RNA, 19 nt, Homo sapiens
  misc_RNA (1)...(19): siRNA sense strand
cuucaaaguuauggcaaga

SEQ ID NO: 1406664 - RNA, 19 nt, Homo sapiens
  misc_RNA (1)...(19): siRNA sense strand
caaccaaggaacaagagau

SEQ ID NO: 1406665 - RNA, 19 nt, Homo sapiens
  misc_RNA (1)...(19): siRNA sense strand
caaguacacagaucuuaac

SEQ ID NO: 1406666 - RNA, 19 nt, Homo sapiens
  misc_RNA (1)...(19): siRNA sense strand
uaaugcgacuagcaaccaa

SEQ ID NO: 1406667 - RNA, 19 nt, Homo sapiens
  misc_RNA (1)...(19): siRNA sense strand
cccaagaagguucgauuga

SEQ ID NO: 1406668 - RNA, 19 nt, Homo sapiens
  misc_RNA (1)...(19): siRNA sense strand
gcaaccaaggaacaagaga

SEQ ID NO: 1406669 - RNA, 19 nt, Homo sapiens
  misc_RNA (1)...(19): siRNA sense strand
gaacaagcccaaaaugaac

SEQ ID NO: 1406670 - RNA, 19 nt, Homo sapiens
  misc_RNA (1)...(19): siRNA sense strand
gaacagacuaaagacaaac

SEQ ID NO: 1406671 - RNA, 19 nt, Homo sapiens
  misc_RNA (1)...(19): siRNA sense strand
acugagaucaacaauggua

SEQ ID NO: 1406672 - RNA, 19 nt, Homo sapiens
  misc_RNA (1)...(19): siRNA sense strand
gggcaaguacacagaucuu

SEQ ID NO: 1406673 - RNA, 19 nt, Homo sapiens
  misc_RNA (1)...(19): siRNA sense strand
uaaagacaaacuggaacaa

SEQ ID NO: 1406674 - RNA, 19 nt, Homo sapiens
  misc_RNA (1)...(19): siRNA sense strand
ccaaggaacaagagaugca

SEQ ID NO: 1406675 - RNA, 19 nt, Homo sapiens
  misc_RNA (1)...(19): siRNA sense strand
uagcaaccaaggaacaaga

SEQ ID NO: 1406676 - RNA, 19 nt, Homo sapiens
  misc_RNA (1)...(19): siRNA sense strand
ggagggcaaguacacagau

SEQ ID NO: 1406677 - RNA, 19 nt, Homo sapiens
  misc_RNA (1)...(19): siRNA sense strand
cuaaagacaaacuggaaca

SEQ ID NO: 1406678 - RNA, 19 nt, Homo sapiens
  misc_RNA (1)...(19): siRNA sense strand
gcccaacugagaucaacaa

SEQ ID NO: 1406679 - RNA, 19 nt, Homo sapiens
  misc_RNA (1)...(19): siRNA sense strand
ucaaauccaguaccucaag

SEQ ID NO: 1406680 - RNA, 19 nt, Homo sapiens
  misc_RNA (1)...(19): siRNA sense strand
guaaugcgacuagcaacca

SEQ ID NO: 1406681 - RNA, 19 nt, Homo sapiens
  misc_RNA (1)...(19): siRNA sense strand
ccaacugagaucaacaaug

SEQ ID NO: 1406682 - RNA, 19 nt, Homo sapiens
  misc_RNA (1)...(19): siRNA sense strand
caaggaacaagagaugcaa

SEQ ID NO: 1406683 - RNA, 19 nt, Homo sapiens
  misc_RNA (1)...(19): siRNA sense strand
ugagaucaacaaugguaga

SEQ ID NO: 1406684 - RNA, 19 nt, Homo sapiens
  misc_RNA (1)...(19): siRNA sense strand
ggugaacuggaacagacua

SEQ ID NO: 1406685 - RNA, 19 nt, Homo sapiens
  misc_RNA (1)...(19): siRNA sense strand
agacccagcgaucaacuug

SEQ ID NO: 1406686 - RNA, 19 nt, Homo sapiens
  misc_RNA (1)...(19): siRNA sense strand
acacagaucuuaacucuaa

SEQ ID NO: 1406687 - RNA, 19 nt, Homo sapiens
  misc_RNA (1)...(19): siRNA sense strand
gaucuuaacucuaaugaug

SEQ ID NO: 1406688 - RNA, 19 nt, Homo sapiens
  misc_RNA (1)...(19): siRNA sense strand
caacugagaucaacaaugg

SEQ ID NO: 1406689 - RNA, 19 nt, Homo sapiens
  misc_RNA (1)...(19): siRNA sense strand
ggaacagacuaaagacaaa

SEQ ID NO: 1406690 - RNA, 19 nt, Homo sapiens
  misc_RNA (1)...(19): siRNA sense strand
ggcaagagaugaguuaauu

SEQ ID NO: 1406691 - RNA, 19 nt, Homo sapiens
  misc_RNA (1)...(19): siRNA sense strand
guacacagaucuuaacucu

SEQ ID NO: 1406692 - RNA, 19 nt, Homo sapiens
  misc_RNA (1)...(19): siRNA sense strand
gcaaguacacagaucuuaa

SEQ ID NO: 1406693 - RNA, 19 nt, Homo sapiens
  misc_RNA (1)...(19): siRNA sense strand
ugauguaacuggccuaaga

SEQ ID NO: 1406694 - RNA, 19 nt, Homo sapiens
  misc_RNA (1)...(19): siRNA sense strand
aaugaaaggugaacuggaa

SEQ ID NO: 1406695 - RNA, 19 nt, Homo sapiens
  misc_RNA (1)...(19): siRNA sense strand
caagaagguucgauugagu

SEQ ID NO: 1406696 - RNA, 19 nt, Homo sapiens
  misc_RNA (1)...(19): siRNA sense strand
cugagugccuggaaguuua

SEQ ID NO: 1406697 - RNA, 19 nt, Homo sapiens
  misc_RNA (1)...(19): siRNA sense strand
gagaugaguuaauucuaag

SEQ ID NO: 1406698 - RNA, 19 nt, Homo sapiens
  misc_RNA (1)...(19): siRNA sense strand
ucaaaguuauggcaagaga

SEQ ID NO: 1406699 - RNA, 19 nt, Homo sapiens
  misc_RNA (1)...(19): siRNA sense strand
gaacaagagaugcaagagu

SEQ ID NO: 1406700 - RNA, 19 nt, Homo sapiens
  misc_RNA (1)...(19): siRNA sense strand
gaacuggaacagacuaaag

SEQ ID NO: 1406701 - RNA, 19 nt, Homo sapiens
  misc_RNA (1)...(19): siRNA sense strand
gaacugagugccuggaagu

SEQ ID NO: 1406702 - RNA, 19 nt, Homo sapiens
  misc_RNA (1)...(19): siRNA sense strand
ccuaagagagucugaagaa

SEQ ID NO: 1406703 - RNA, 19 nt, Homo sapiens
  misc_RNA (1)...(19): siRNA sense strand
aagguucgauugagugaaa

SEQ ID NO: 1406704 - RNA, 19 nt, Homo sapiens
  misc_RNA (1)...(19): siRNA sense strand
ggaacaagcccaaaaugaa

SEQ ID NO: 1406705 - RNA, 19 nt, Homo sapiens
  misc_RNA (1)...(19): siRNA sense strand
cuaagagagucugaagaaa

SEQ ID NO: 1406706 - RNA, 19 nt, Homo sapiens
  misc_RNA (1)...(19): siRNA sense strand
ccaagaagguucgauugag

SEQ ID NO: 1406707 - RNA, 19 nt, Homo sapiens
  misc_RNA (1)...(19): siRNA sense strand
caagagaugaguuaauucu

SEQ ID NO: 1406708 - RNA, 19 nt, Homo sapiens
  misc_RNA (1)...(19): siRNA sense strand
guaacuggccuaagagagu

SEQ ID NO: 1406709 - RNA, 19 nt, Homo sapiens
  misc_RNA (1)...(19): siRNA sense strand
caagagaugcaagagugua

SEQ ID NO: 1406710 - RNA, 19 nt, Homo sapiens
  misc_RNA (1)...(19): siRNA sense strand
gacuaaagacaaacuggaa

SEQ ID NO: 1406711 - RNA, 19 nt, Homo sapiens
  misc_RNA (1)...(19): siRNA sense strand
gcaagagaugaguuaauuc

SEQ ID NO: 1406712 - RNA, 19 nt, Homo sapiens
  misc_RNA (1)...(19): siRNA sense strand
ggaaguuuacgccugauag

SEQ ID NO: 1406713 - RNA, 19 nt, Homo sapiens
  misc_RNA (1)...(19): siRNA sense strand
gagaugcaagaguguacua

SEQ ID NO: 1406714 - RNA, 19 nt, Homo sapiens
  misc_RNA (1)...(19): siRNA sense strand
ugaagcauauguacaagcu

SEQ ID NO: 1406715 - RNA, 19 nt, Homo sapiens
  misc_RNA (1)...(19): siRNA sense strand
gggaaaacauccuuguaau

SEQ ID NO: 1406716 - RNA, 19 nt, Homo sapiens
  misc_RNA (1)...(19): siRNA sense strand
ggcaaguacacagaucuua

SEQ ID NO: 1406717 - RNA, 19 nt, Homo sapiens
  misc_RNA (1)...(19): siRNA sense strand
uaagagagucugaagaaaa

SEQ ID NO: 1406718 - RNA, 19 nt, Homo sapiens
  misc_RNA (1)...(19): siRNA sense strand
gagggcaaguacacagauc

SEQ ID NO: 1406719 - RNA, 19 nt, Homo sapiens
  misc_RNA (1)...(19): siRNA sense strand
uauggcaagagaugaguua

SEQ ID NO: 1406720 - RNA, 19 nt, Homo sapiens
  misc_RNA (1)...(19): siRNA sense strand
gcgacuagcaaccaaggaa

SEQ ID NO: 1406721 - RNA, 19 nt, Homo sapiens
  misc_RNA (1)...(19): siRNA sense strand
ggaaaacauccuuguaaug

SEQ ID NO: 1406722 - RNA, 19 nt, Homo sapiens
  misc_RNA (1)...(19): siRNA sense strand
uccaguaccucaagcaagu

SEQ ID NO: 1406723 - RNA, 19 nt, Homo sapiens
  misc_RNA (1)...(19): siRNA sense strand
aaaguuauggcaagagaug

SEQ ID NO: 1406724 - RNA, 19 nt, Homo sapiens
  misc_RNA (1)...(19): siRNA sense strand
gaaaacauccuuguaaugc

SEQ ID NO: 1406725 - RNA, 19 nt, Homo sapiens
  misc_RNA (1)...(19): siRNA sense strand
acccagcgaucaacuuguu

SEQ ID NO: 1406726 - RNA, 19 nt, Homo sapiens
  misc_RNA (1)...(19): siRNA sense strand
uggaacagacuaaagacaa

SEQ ID NO: 1406727 - RNA, 19 nt, Homo sapiens
  misc_RNA (1)...(19): siRNA sense strand
gaguuaauucuaagaugga

SEQ ID NO: 1406728 - RNA, 19 nt, Homo sapiens
  misc_RNA (1)...(19): siRNA sense strand
cuucaaaguuauggcaaga

SEQ ID NO: 1406729 - RNA, 19 nt, Homo sapiens
  misc_RNA (1)...(19): siRNA sense strand
caaccaaggaacaagagau

SEQ ID NO: 1406730 - RNA, 19 nt, Homo sapiens
  misc_RNA (1)...(19): siRNA sense strand
caaguacacagaucuuaac

SEQ ID NO: 1406731 - RNA, 19 nt, Homo sapiens
  misc_RNA (1)...(19): siRNA sense strand
uaaugcgacuagcaaccaa

SEQ ID NO: 1406732 - RNA, 19 nt, Homo sapiens
  misc_RNA (1)...(19): siRNA sense strand
cccaagaagguucgauuga

SEQ ID NO: 1406733 - RNA, 19 nt, Homo sapiens
  misc_RNA (1)...(19): siRNA sense strand
gcaaccaaggaacaagaga

SEQ ID NO: 1406734 - RNA, 19 nt, Homo sapiens
  misc_RNA (1)...(19): siRNA sense strand
gaacaagcccaaaaugaac

SEQ ID NO: 1406735 - RNA, 19 nt, Homo sapiens
  misc_RNA (1)...(19): siRNA sense strand
gaacagacuaaagacaaac

SEQ ID NO: 1406736 - RNA, 19 nt, Homo sapiens
  misc_RNA (1)...(19): siRNA sense strand
acugagaucaacaauggua

SEQ ID NO: 1406737 - RNA, 19 nt, Homo sapiens
  misc_RNA (1)...(19): siRNA sense strand
gggcaaguacacagaucuu

SEQ ID NO: 1406738 - RNA, 19 nt, Homo sapiens
  misc_RNA (1)...(19): siRNA sense strand
uaaagacaaacuggaacaa

SEQ ID NO: 1406739 - RNA, 19 nt, Homo sapiens
  misc_RNA (1)...(19): siRNA sense strand
ccaaggaacaagagaugca

SEQ ID NO: 1406740 - RNA, 19 nt, Homo sapiens
  misc_RNA (1)...(19): siRNA sense strand
uagcaaccaaggaacaaga

SEQ ID NO: 1406741 - RNA, 19 nt, Homo sapiens
  misc_RNA (1)...(19): siRNA sense strand
ggagggcaaguacacagau

SEQ ID NO: 1406742 - RNA, 19 nt, Homo sapiens
  misc_RNA (1)...(19): siRNA sense strand
cuaaagacaaacuggaaca

SEQ ID NO: 1406743 - RNA, 19 nt, Homo sapiens
  misc_RNA (1)...(19): siRNA sense strand
gcccaacugagaucaacaa

SEQ ID NO: 1406744 - RNA, 19 nt, Homo sapiens
  misc_RNA (1)...(19): siRNA sense strand
ucaaauccaguaccucaag

SEQ ID NO: 1406745 - RNA, 19 nt, Homo sapiens
  misc_RNA (1)...(19): siRNA sense strand
guaaugcgacuagcaacca

SEQ ID NO: 1406746 - RNA, 19 nt, Homo sapiens
  misc_RNA (1)...(19): siRNA sense strand
ccaacugagaucaacaaug

SEQ ID NO: 1406747 - RNA, 19 nt, Homo sapiens
  misc_RNA (1)...(19): siRNA sense strand
caaggaacaagagaugcaa

SEQ ID NO: 1406748 - RNA, 19 nt, Homo sapiens
  misc_RNA (1)...(19): siRNA sense strand
ugagaucaacaaugguaga

SEQ ID NO: 1406749 - RNA, 19 nt, Homo sapiens
  misc_RNA (1)...(19): siRNA sense strand
ggugaacuggaacagacua

SEQ ID NO: 1406750 - RNA, 19 nt, Homo sapiens
  misc_RNA (1)...(19): siRNA sense strand
agacccagcgaucaacuug

SEQ ID NO: 1406751 - RNA, 19 nt, Homo sapiens
  misc_RNA (1)...(19): siRNA sense strand
gaacauggauugaaugaaa

SEQ ID NO: 1406752 - RNA, 19 nt, Homo sapiens
  misc_RNA (1)...(19): siRNA sense strand
gaagaaagguauuacauag

SEQ ID NO: 1406753 - RNA, 19 nt, Homo sapiens
  misc_RNA (1)...(19): siRNA sense strand
caucagagguggugucuuu

SEQ ID NO: 1406754 - RNA, 19 nt, Homo sapiens
  misc_RNA (1)...(19): siRNA sense strand
gcagaucuguuacgagaaa

SEQ ID NO: 1406755 - RNA, 19 nt, Homo sapiens
  misc_RNA (1)...(19): siRNA sense strand
gaagagugguuaugccauu

SEQ ID NO: 1406756 - RNA, 19 nt, Homo sapiens
  misc_RNA (1)...(19): siRNA sense strand
gaagagcaguugcgaguuc

SEQ ID NO: 1406757 - RNA, 19 nt, Homo sapiens
  misc_RNA (1)...(19): siRNA sense strand
caucaaaccagauuagaua

SEQ ID NO: 1406758 - RNA, 19 nt, Homo sapiens
  misc_RNA (1)...(19): siRNA sense strand
gcacagaucaaacagcuuu

SEQ ID NO: 1406759 - RNA, 19 nt, Homo sapiens
  misc_RNA (1)...(19): siRNA sense strand
ggccuuagccauuugauua

SEQ ID NO: 1406760 - RNA, 19 nt, Homo sapiens
  misc_RNA (1)...(19): siRNA sense strand
ggaggaaaccagacccuua

SEQ ID NO: 1406761 - RNA, 19 nt, Homo sapiens
  misc_RNA (1)...(19): siRNA sense strand
ggauuuggaggauuuaaua

SEQ ID NO: 1406762 - RNA, 19 nt, Homo sapiens
  misc_RNA (1)...(19): siRNA sense strand
ccaaccagcugauaaauac

SEQ ID NO: 1406763 - RNA, 19 nt, Homo sapiens
  misc_RNA (1)...(19): siRNA sense strand
gguguaacccuuucuauga

SEQ ID NO: 1406764 - RNA, 19 nt, Homo sapiens
  misc_RNA (1)...(19): siRNA sense strand
gaacuggacugggauuugg

SEQ ID NO: 1406765 - RNA, 19 nt, Homo sapiens
  misc_RNA (1)...(19): siRNA sense strand
caaaccagauuagauauca

SEQ ID NO: 1406766 - RNA, 19 nt, Homo sapiens
  misc_RNA (1)...(19): siRNA sense strand
gaacaggccaagguagaua

SEQ ID NO: 1406767 - RNA, 19 nt, Homo sapiens
  misc_RNA (1)...(19): siRNA sense strand
gaagaugggcuagugguuu

SEQ ID NO: 1406768 - RNA, 19 nt, Homo sapiens
  misc_RNA (1)...(19): siRNA sense strand
ggucgaacauggauugaau

SEQ ID NO: 1406769 - RNA, 19 nt, Homo sapiens
  misc_RNA (1)...(19): siRNA sense strand
gagguggugucuuuaguug

SEQ ID NO: 1406770 - RNA, 19 nt, Homo sapiens
  misc_RNA (1)...(19): siRNA sense strand
gaucagacagaaguuguua

SEQ ID NO: 1406771 - RNA, 19 nt, Homo sapiens
  misc_RNA (1)...(19): siRNA sense strand
gaucugaagaaagguauua

SEQ ID NO: 1406772 - RNA, 19 nt, Homo sapiens
  misc_RNA (1)...(19): siRNA sense strand
gcagcaaacuacauuaggu

SEQ ID NO: 1406773 - RNA, 19 nt, Homo sapiens
  misc_RNA (1)...(19): siRNA sense strand
gaaagguauuacauagaug

SEQ ID NO: 1406774 - RNA, 19 nt, Homo sapiens
  misc_RNA (1)...(19): siRNA sense strand
ucaaacagcuuuuacagaa

SEQ ID NO: 1406775 - RNA, 19 nt, Homo sapiens
  misc_RNA (1)...(19): siRNA sense strand
gauuuaaggcaguagguua

SEQ ID NO: 1406776 - RNA, 19 nt, Homo sapiens
  misc_RNA (1)...(19): siRNA sense strand
gaaaccagacccuuacugu

SEQ ID NO: 1406777 - RNA, 19 nt, Homo sapiens
  misc_RNA (1)...(19): siRNA sense strand
uagauaacccugauucuga

SEQ ID NO: 1406778 - RNA, 19 nt, Homo sapiens
  misc_RNA (1)...(19): siRNA sense strand
ggaaggccuuagccauuug

SEQ ID NO: 1406779 - RNA, 19 nt, Homo sapiens
  misc_RNA (1)...(19): siRNA sense strand
uaaaugcaccuacucaguu

SEQ ID NO: 1406780 - RNA, 19 nt, Homo sapiens
  misc_RNA (1)...(19): siRNA sense strand
guuaauuccuguaccaaug

SEQ ID NO: 1406781 - RNA, 19 nt, Homo sapiens
  misc_RNA (1)...(19): siRNA sense strand
guacucagaacaaagguuu

SEQ ID NO: 1406782 - RNA, 19 nt, Homo sapiens
  misc_RNA (1)...(19): siRNA sense strand
gaugagagagaugcuauuu

SEQ ID NO: 1406783 - RNA, 19 nt, Homo sapiens
  misc_RNA (1)...(19): siRNA sense strand
ggacugggauuuggaggau

SEQ ID NO: 1406784 - RNA, 19 nt, Homo sapiens
  misc_RNA (1)...(19): siRNA sense strand
gaguucagcuggauacgau

SEQ ID NO: 1406785 - RNA, 19 nt, Homo sapiens
  misc_RNA (1)...(19): siRNA sense strand
guagaaucauugcauaaag

SEQ ID NO: 1406786 - RNA, 19 nt, Homo sapiens
  misc_RNA (1)...(19): siRNA sense strand
cauuaaagacgaucuagaa

SEQ ID NO: 1406787 - RNA, 19 nt, Homo sapiens
  misc_RNA (1)...(19): siRNA sense strand
uacauuagguggucucuuc

SEQ ID NO: 1406788 - RNA, 19 nt, Homo sapiens
  misc_RNA (1)...(19): siRNA sense strand
caagguagauaacccugau

SEQ ID NO: 1406789 - RNA, 19 nt, Homo sapiens
  misc_RNA (1)...(19): siRNA sense strand
ugagagagaugcuauuuug

SEQ ID NO: 1406790 - RNA, 19 nt, Homo sapiens
  misc_RNA (1)...(19): siRNA sense strand
auauaaagcuggucgaaca

SEQ ID NO: 1406791 - RNA, 19 nt, Homo sapiens
  misc_RNA (1)...(19): siRNA sense strand
gauauuagugagcuacaaa

SEQ ID NO: 1406792 - RNA, 19 nt, Homo sapiens
  misc_RNA (1)...(19): siRNA sense strand
gggaacuaguacugguuua

SEQ ID NO: 1406793 - RNA, 19 nt, Homo sapiens
  misc_RNA (1)...(19): siRNA sense strand
gaaugaaaccauccacauc

SEQ ID NO: 1406794 - RNA, 19 nt, Homo sapiens
  misc_RNA (1)...(19): siRNA sense strand
ccaaaugguacuucaagaa

SEQ ID NO: 1406795 - RNA, 19 nt, Homo sapiens
  misc_RNA (1)...(19): siRNA sense strand
ucaagaagaguuccagcua

SEQ ID NO: 1406796 - RNA, 19 nt, Homo sapiens
  misc_RNA (1)...(19): siRNA sense strand
gguagaaucauugcauaaa

SEQ ID NO: 1406797 - RNA, 19 nt, Homo sapiens
  misc_RNA (1)...(19): siRNA sense strand
agaggaaacucauggaucu

SEQ ID NO: 1406798 - RNA, 19 nt, Homo sapiens
  misc_RNA (1)...(19): siRNA sense strand
caacuugguguaacccuuu

SEQ ID NO: 1406799 - RNA, 19 nt, Homo sapiens
  misc_RNA (1)...(19): siRNA sense strand
gggacaacaucuacaacug

SEQ ID NO: 1406800 - RNA, 19 nt, Homo sapiens
  misc_RNA (1)...(19): siRNA sense strand
guugagcguucgccaaaug

SEQ ID NO: 1406801 - RNA, 19 nt, Homo sapiens
  misc_RNA (1)...(19): siRNA sense strand
gaacuuuacagguccuaau

SEQ ID NO: 1406802 - RNA, 19 nt, Homo sapiens
  misc_RNA (1)...(19): siRNA sense strand
ucagacagaaguuguuauu

SEQ ID NO: 1406803 - RNA, 19 nt, Homo sapiens
  misc_RNA (1)...(19): siRNA sense strand
caggaaggccuuagccauu

SEQ ID NO: 1406804 - RNA, 19 nt, Homo sapiens
  misc_RNA (1)...(19): siRNA sense strand
ccgacuaaaugaauugaug

SEQ ID NO: 1406805 - RNA, 19 nt, Homo sapiens
  misc_RNA (1)...(19): siRNA sense strand
agauaacccugauucugaa

SEQ ID NO: 1406806 - RNA, 19 nt, Homo sapiens
  misc_RNA (1)...(19): siRNA sense strand
gagaugagagagaugcuau

SEQ ID NO: 1406807 - RNA, 19 nt, Homo sapiens
  misc_RNA (1)...(19): siRNA sense strand
aggaaggccuuagccauuu

SEQ ID NO: 1406808 - RNA, 19 nt, Homo sapiens
  misc_RNA (1)...(19): siRNA sense strand
aaaucaggaugcagaauca

SEQ ID NO: 1406809 - RNA, 19 nt, Homo sapiens
  misc_RNA (1)...(19): siRNA sense strand
aacaggaaauucaaaggaa

SEQ ID NO: 1406810 - RNA, 19 nt, Homo sapiens
  misc_RNA (1)...(19): siRNA sense strand
aaacauugccagaugauca

SEQ ID NO: 1406811 - RNA, 19 nt, Homo sapiens
  misc_RNA (1)...(19): siRNA sense strand
gcagcagcaaacuacauua

SEQ ID NO: 1406812 - RNA, 19 nt, Homo sapiens
  misc_RNA (1)...(19): siRNA sense strand
cgagaaaucaagcagcauu

SEQ ID NO: 1406813 - RNA, 19 nt, Homo sapiens
  misc_RNA (1)...(19): siRNA sense strand
guucaagggccgacuaaau

SEQ ID NO: 1406814 - RNA, 19 nt, Homo sapiens
  misc_RNA (1)...(19): siRNA sense strand
gaacuaaaugcaccuacuc

SEQ ID NO: 1406815 - RNA, 19 nt, Homo sapiens
  misc_RNA (1)...(19): siRNA sense strand
gccaaaugguacuucaaga

SEQ ID NO: 1406816 - RNA, 19 nt, Homo sapiens
  misc_RNA (1)...(19): siRNA sense strand
uagguggucucuucaguca

SEQ ID NO: 1406817 - RNA, 19 nt, Homo sapiens
  misc_RNA (1)...(19): siRNA sense strand
caaaucaggaugcagaauc

SEQ ID NO: 1406818 - RNA, 19 nt, Homo sapiens
  misc_RNA (1)...(19): siRNA sense strand
aaacaggaaauucaaagga

SEQ ID NO: 1406819 - RNA, 19 nt, Homo sapiens
  misc_RNA (1)...(19): siRNA sense strand
guaacccuuucuaugacua

SEQ ID NO: 1406820 - RNA, 19 nt, Homo sapiens
  misc_RNA (1)...(19): siRNA sense strand
auaguugcaugcccaguaa

SEQ ID NO: 1406821 - RNA, 19 nt, Homo sapiens
  misc_RNA (1)...(19): siRNA sense strand
gcaguagguuauaguugca

SEQ ID NO: 1406822 - RNA, 19 nt, Homo sapiens
  misc_RNA (1)...(19): siRNA sense strand
gcacaacaacgggaacuag

SEQ ID NO: 1406823 - RNA, 19 nt, Homo sapiens
  misc_RNA (1)...(19): siRNA sense strand
ucaggaugcagaaucauuu

SEQ ID NO: 1406824 - RNA, 19 nt, Homo sapiens
  misc_RNA (1)...(19): siRNA sense strand
aagaucagaugacuaagca

SEQ ID NO: 1406825 - RNA, 19 nt, Homo sapiens
  misc_RNA (1)...(19): siRNA sense strand
aaaccagacccuuacugua

SEQ ID NO: 1406826 - RNA, 19 nt, Homo sapiens
  misc_RNA (1)...(19): siRNA sense strand
ggauuugggacaacaucua

SEQ ID NO: 1406827 - RNA, 19 nt, Homo sapiens
  misc_RNA (1)...(19): siRNA sense strand
ggaacuggacugggauuug

SEQ ID NO: 1406828 - RNA, 19 nt, Homo sapiens
  misc_RNA (1)...(19): siRNA sense strand
aagaagaguuccagcuaca

SEQ ID NO: 1406829 - RNA, 19 nt, Homo sapiens
  misc_RNA (1)...(19): siRNA sense strand
caacaacaggaaggccuua

SEQ ID NO: 1406830 - RNA, 19 nt, Homo sapiens
  misc_RNA (1)...(19): siRNA sense strand
gggaacaggccaagguaga

SEQ ID NO: 1406831 - RNA, 19 nt, Homo sapiens
  misc_RNA (1)...(19): siRNA sense strand
ccaguggaauucacacaag

SEQ ID NO: 1406832 - RNA, 19 nt, Homo sapiens
  misc_RNA (1)...(19): siRNA sense strand
uuaaagacgaucuagaaga

SEQ ID NO: 1406833 - RNA, 19 nt, Homo sapiens
  misc_RNA (1)...(19): siRNA sense strand
caagcagcauuugaaacaa

SEQ ID NO: 1406834 - RNA, 19 nt, Homo sapiens
  misc_RNA (1)...(19): siRNA sense strand
aaaguuaauuccuguacca

SEQ ID NO: 1406835 - RNA, 19 nt, Homo sapiens
  misc_RNA (1)...(19): siRNA sense strand
gagcguucgccaaauggua

SEQ ID NO: 1406836 - RNA, 19 nt, Homo sapiens
  misc_RNA (1)...(19): siRNA sense strand
gaagccaacaacaacaguu

SEQ ID NO: 1406837 - RNA, 19 nt, Homo sapiens
  misc_RNA (1)...(19): siRNA sense strand
ucaagggccgacuaaauga

SEQ ID NO: 1406838 - RNA, 19 nt, Homo sapiens
  misc_RNA (1)...(19): siRNA sense strand
aaaugcaccuacucaguuc

SEQ ID NO: 1406839 - RNA, 19 nt, Homo sapiens
  misc_RNA (1)...(19): siRNA sense strand
gcaucaaaccagauuagau

SEQ ID NO: 1406840 - RNA, 19 nt, Homo sapiens
  misc_RNA (1)...(19): siRNA sense strand
ugacuaagcagcaucaaac

SEQ ID NO: 1406841 - RNA, 19 nt, Homo sapiens
  misc_RNA (1)...(19): siRNA sense strand
guagauaacccugauucug

SEQ ID NO: 1406842 - RNA, 19 nt, Homo sapiens
  misc_RNA (1)...(19): siRNA sense strand
uuagugagcuacaaaagaa

SEQ ID NO: 1406843 - RNA, 19 nt, Homo sapiens
  misc_RNA (1)...(19): siRNA sense strand
ggguggguuuggaggauuu

SEQ ID NO: 1406844 - RNA, 19 nt, Homo sapiens
  misc_RNA (1)...(19): siRNA sense strand
acaacaacgggaacuagua

SEQ ID NO: 1406845 - RNA, 19 nt, Homo sapiens
  misc_RNA (1)...(19): siRNA sense strand
gaucuuucccauagaacuu

SEQ ID NO: 1406846 - RNA, 19 nt, Homo sapiens
  misc_RNA (1)...(19): siRNA sense strand
aggcacuacuggacucuuu

SEQ ID NO: 1406847 - RNA, 19 nt, Homo sapiens
  misc_RNA (1)...(19): siRNA sense strand
gcccaguaauaaagaugaa

SEQ ID NO: 1406848 - RNA, 19 nt, Homo sapiens
  misc_RNA (1)...(19): siRNA sense strand
ggaauucacacaagaaaau

SEQ ID NO: 1406849 - RNA, 19 nt, Homo sapiens
  misc_RNA (1)...(19): siRNA sense strand
uucaagaucagaugacuaa

SEQ ID NO: 1406850 - RNA, 19 nt, Homo sapiens
  misc_RNA (1)...(19): siRNA sense strand
caaaggaagagugguuaug

SEQ ID NO: 1406851 - RNA, 19 nt, Homo sapiens
  misc_RNA (1)...(19): siRNA sense strand
gcagagcucuccaccauua

SEQ ID NO: 1406852 - RNA, 19 nt, Homo sapiens
  misc_RNA (1)...(19): siRNA sense strand
ccaaagagguggcgaguga

SEQ ID NO: 1406853 - RNA, 19 nt, Homo sapiens
  misc_RNA (1)...(19): siRNA sense strand
gcgcguaucauuccaguua

SEQ ID NO: 1406854 - RNA, 19 nt, Homo sapiens
  misc_RNA (1)...(19): siRNA sense strand
caaagaagaagggcaauuu

SEQ ID NO: 1406855 - RNA, 19 nt, Homo sapiens
  misc_RNA (1)...(19): siRNA sense strand
gagaauuuaucccacuauu

SEQ ID NO: 1406856 - RNA, 19 nt, Homo sapiens
  misc_RNA (1)...(19): siRNA sense strand
aagagaagcugcuggaaga

SEQ ID NO: 1406857 - RNA, 19 nt, Homo sapiens
  misc_RNA (1)...(19): siRNA sense strand
gaagaagggcaauuucaga

SEQ ID NO: 1406858 - RNA, 19 nt, Homo sapiens
  misc_RNA (1)...(19): siRNA sense strand
uaacgcagauagguucuuu

SEQ ID NO: 1406859 - RNA, 19 nt, Homo sapiens
  misc_RNA (1)...(19): siRNA sense strand
cagcagagcucuccaccau

SEQ ID NO: 1406860 - RNA, 19 nt, Homo sapiens
  misc_RNA (1)...(19): siRNA sense strand
ggaacaauuuggacuucuu

SEQ ID NO: 1406861 - RNA, 19 nt, Homo sapiens
  misc_RNA (1)...(19): siRNA sense strand
aagcuaaccuuccucauuc

SEQ ID NO: 1406862 - RNA, 19 nt, Homo sapiens
  misc_RNA (1)...(19): siRNA sense strand
ugaagcggcucaucgagaa

SEQ ID NO: 1406863 - RNA, 19 nt, Homo sapiens
  misc_RNA (1)...(19): siRNA sense strand
gaagggacacucuaccaau

SEQ ID NO: 1406864 - RNA, 19 nt, Homo sapiens
  misc_RNA (1)...(19): siRNA sense strand
ggugaggacuaccaugaug

SEQ ID NO: 1406865 - RNA, 19 nt, Homo sapiens
  misc_RNA (1)...(19): siRNA sense strand
caauuuggacuucuucauu

SEQ ID NO: 1406866 - RNA, 19 nt, Homo sapiens
  misc_RNA (1)...(19): siRNA sense strand
cagcgaggcuucccaccuu

SEQ ID NO: 1406867 - RNA, 19 nt, Homo sapiens
  misc_RNA (1)...(19): siRNA sense strand
caggauaucuccaccaaac

SEQ ID NO: 1406868 - RNA, 19 nt, Homo sapiens
  misc_RNA (1)...(19): siRNA sense strand
acaauccgcucacguguca

SEQ ID NO: 1406869 - RNA, 19 nt, Homo sapiens
  misc_RNA (1)...(19): siRNA sense strand
ccucauaauuuacaucauc

SEQ ID NO: 1406870 - RNA, 19 nt, Homo sapiens
  misc_RNA (1)...(19): siRNA sense strand
gacccaaucccuacaguga

SEQ ID NO: 1406871 - RNA, 19 nt, Homo sapiens
  misc_RNA (1)...(19): siRNA sense strand
ccagagcacuucccaacuc

SEQ ID NO: 1406872 - RNA, 19 nt, Homo sapiens
  misc_RNA (1)...(19): siRNA sense strand
agacggcgcuguucaaagg

SEQ ID NO: 1406873 - RNA, 19 nt, Homo sapiens
  misc_RNA (1)...(19): siRNA sense strand
aaagcuaaccuuccucauu

SEQ ID NO: 1406874 - RNA, 19 nt, Homo sapiens
  misc_RNA (1)...(19): siRNA sense strand
gcacuucccaacucucuau

SEQ ID NO: 1406875 - RNA, 19 nt, Homo sapiens
  misc_RNA (1)...(19): siRNA sense strand
gcaaagaagaagggcaauu

SEQ ID NO: 1406876 - RNA, 19 nt, Homo sapiens
  misc_RNA (1)...(19): siRNA sense strand
gaacaauuuggacuucuuc

SEQ ID NO: 1406877 - RNA, 19 nt, Homo sapiens
  misc_RNA (1)...(19): siRNA sense strand
caucauucccauccucaua

SEQ ID NO: 1406878 - RNA, 19 nt, Homo sapiens
  misc_RNA (1)...(19): siRNA sense strand
gugagaauuuaucccacua

SEQ ID NO: 1406879 - RNA, 19 nt, Homo sapiens
  misc_RNA (1)...(19): siRNA sense strand
gaaugaggcagacaccaau

SEQ ID NO: 1406880 - RNA, 19 nt, Homo sapiens
  misc_RNA (1)...(19): siRNA sense strand
uggaagcccugcucaagau

SEQ ID NO: 1406881 - RNA, 19 nt, Homo sapiens
  misc_RNA (1)...(19): siRNA sense strand
ccaccaaacauucagaaga

SEQ ID NO: 1406882 - RNA, 19 nt, Homo sapiens
  misc_RNA (1)...(19): siRNA sense strand
cccaagcgcuuccagaaca

SEQ ID NO: 1406883 - RNA, 19 nt, Homo sapiens
  misc_RNA (1)...(19): siRNA sense strand
cauggaaagucuccucauc

SEQ ID NO: 1406884 - RNA, 19 nt, Homo sapiens
  misc_RNA (1)...(19): siRNA sense strand
gaugagcuccaacgugaug

SEQ ID NO: 1406885 - RNA, 19 nt, Homo sapiens
  misc_RNA (1)...(19): siRNA sense strand
ccaauaacgcagauagguu

SEQ ID NO: 1406886 - RNA, 19 nt, Homo sapiens
  misc_RNA (1)...(19): siRNA sense strand
gcaagaagggacacucuac

SEQ ID NO: 1406887 - RNA, 19 nt, Homo sapiens
  misc_RNA (1)...(19): siRNA sense strand
caccaaacauucagaagac

SEQ ID NO: 1406888 - RNA, 19 nt, Homo sapiens
  misc_RNA (1)...(19): siRNA sense strand
gggccucucguacuucuuu

SEQ ID NO: 1406889 - RNA, 19 nt, Homo sapiens
  misc_RNA (1)...(19): siRNA sense strand
aagaggacuucaggaauug

SEQ ID NO: 1406890 - RNA, 19 nt, Homo sapiens
  misc_RNA (1)...(19): siRNA sense strand
gcucacgugucacccagau

SEQ ID NO: 1406891 - RNA, 19 nt, Homo sapiens
  misc_RNA (1)...(19): siRNA sense strand
ggauaucuccaccaaacau

SEQ ID NO: 1406892 - RNA, 19 nt, Homo sapiens
  misc_RNA (1)...(19): siRNA sense strand
gauaucuccaccaaacauu

SEQ ID NO: 1406893 - RNA, 19 nt, Homo sapiens
  misc_RNA (1)...(19): siRNA sense strand
gagcugcagagcccaaaga

SEQ ID NO: 1406894 - RNA, 19 nt, Homo sapiens
  misc_RNA (1)...(19): siRNA sense strand
uuacuguccugguggauag

SEQ ID NO: 1406895 - RNA, 19 nt, Homo sapiens
  misc_RNA (1)...(19): siRNA sense strand
gcacuguuccgcaaaucug

SEQ ID NO: 1406896 - RNA, 19 nt, Homo sapiens
  misc_RNA (1)...(19): siRNA sense strand
cauggcaggucccgucauc

SEQ ID NO: 1406897 - RNA, 19 nt, Homo sapiens
  misc_RNA (1)...(19): siRNA sense strand
uucccauccucauaauuua

SEQ ID NO: 1406898 - RNA, 19 nt, Homo sapiens
  misc_RNA (1)...(19): siRNA sense strand
ucucguacuucuuugacuu

SEQ ID NO: 1406899 - RNA, 19 nt, Homo sapiens
  misc_RNA (1)...(19): siRNA sense strand
gcaccgagacuaccaucag

SEQ ID NO: 1406900 - RNA, 19 nt, Homo sapiens
  misc_RNA (1)...(19): siRNA sense strand
ccaccagcauggaaagucu

SEQ ID NO: 1406901 - RNA, 19 nt, Homo sapiens
  misc_RNA (1)...(19): siRNA sense strand
ucacagcgaguaccaccaa

SEQ ID NO: 1406902 - RNA, 19 nt, Homo sapiens
  misc_RNA (1)...(19): siRNA sense strand
ccaggcagccgucaucgau

SEQ ID NO: 1406903 - RNA, 19 nt, Homo sapiens
  misc_RNA (1)...(19): siRNA sense strand
aagaagggcaauuucagaa

SEQ ID NO: 1406904 - RNA, 19 nt, Homo sapiens
  misc_RNA (1)...(19): siRNA sense strand
caucacggagagaccauuu

SEQ ID NO: 1406905 - RNA, 19 nt, Homo sapiens
  misc_RNA (1)...(19): siRNA sense strand
guggaagcccugcucaaga

SEQ ID NO: 1406906 - RNA, 19 nt, Homo sapiens
  misc_RNA (1)...(19): siRNA sense strand
aagggacacucuaccaauc

SEQ ID NO: 1406907 - RNA, 19 nt, Homo sapiens
  misc_RNA (1)...(19): siRNA sense strand
aaagaagaagggcaauuuc

SEQ ID NO: 1406908 - RNA, 19 nt, Homo sapiens
  misc_RNA (1)...(19): siRNA sense strand
cccaggauaucuccaccaa

SEQ ID NO: 1406909 - RNA, 19 nt, Homo sapiens
  misc_RNA (1)...(19): siRNA sense strand
gaagcccaccagcauggaa

SEQ ID NO: 1406910 - RNA, 19 nt, Homo sapiens
  misc_RNA (1)...(19): siRNA sense strand
ggaccaugacugagaagca

SEQ ID NO: 1406911 - RNA, 19 nt, Homo sapiens
  misc_RNA (1)...(19): siRNA sense strand
ugacuggucccucaucuac

SEQ ID NO: 1406912 - RNA, 19 nt, Homo sapiens
  misc_RNA (1)...(19): siRNA sense strand
caucuucaccaccaucuuc

SEQ ID NO: 1406913 - RNA, 19 nt, Homo sapiens
  misc_RNA (1)...(19): siRNA sense strand
ucuccaccauuacgaguug

SEQ ID NO: 1406914 - RNA, 19 nt, Homo sapiens
  misc_RNA (1)...(19): siRNA sense strand
gaagcccugcucaagauca

SEQ ID NO: 1406915 - RNA, 19 nt, Homo sapiens
  misc_RNA (1)...(19): siRNA sense strand
aagaagaagggcaauuuca

SEQ ID NO: 1406916 - RNA, 19 nt, Homo sapiens
  misc_RNA (1)...(19): siRNA sense strand
ccacagcgaggcacggaau

SEQ ID NO: 1406917 - RNA, 19 nt, Homo sapiens
  misc_RNA (1)...(19): siRNA sense strand
gaagcggcucaucgagaaa

SEQ ID NO: 1406918 - RNA, 19 nt, Homo sapiens
  misc_RNA (1)...(19): siRNA sense strand
agaaugaggcagacaccaa

SEQ ID NO: 1406919 - RNA, 19 nt, Homo sapiens
  misc_RNA (1)...(19): siRNA sense strand
ucaccacccuccggaguuc

SEQ ID NO: 1406920 - RNA, 19 nt, Homo sapiens
  misc_RNA (1)...(19): siRNA sense strand
ccuuggccuuugaaacuuu

SEQ ID NO: 1406921 - RNA, 19 nt, Homo sapiens
  misc_RNA (1)...(19): siRNA sense strand
ucacgugucacccagaugu

SEQ ID NO: 1406922 - RNA, 19 nt, Homo sapiens
  misc_RNA (1)...(19): siRNA sense strand
ccagacggcgcuguucaaa

SEQ ID NO: 1406923 - RNA, 19 nt, Homo sapiens
  misc_RNA (1)...(19): siRNA sense strand
ucaaccuggugauuacugu

SEQ ID NO: 1406924 - RNA, 19 nt, Homo sapiens
  misc_RNA (1)...(19): siRNA sense strand
acacacagcaccacuacca

SEQ ID NO: 1406925 - RNA, 19 nt, Homo sapiens
  misc_RNA (1)...(19): siRNA sense strand
uuaccugccucuuccucuu

SEQ ID NO: 1406926 - RNA, 19 nt, Homo sapiens
  misc_RNA (1)...(19): siRNA sense strand
cccaaucccuacagugagu

SEQ ID NO: 1406927 - RNA, 19 nt, Homo sapiens
  misc_RNA (1)...(19): siRNA sense strand
gagcaggagcagcagaagu

SEQ ID NO: 1406928 - RNA, 19 nt, Homo sapiens
  misc_RNA (1)...(19): siRNA sense strand
auucccauccucauaauuu

SEQ ID NO: 1406929 - RNA, 19 nt, Homo sapiens
  misc_RNA (1)...(19): siRNA sense strand
cauccucauccucauguuu

SEQ ID NO: 1406930 - RNA, 19 nt, Homo sapiens
  misc_RNA (1)...(19): siRNA sense strand
caucgcagccauccucauc

SEQ ID NO: 1406931 - RNA, 19 nt, Homo sapiens
  misc_RNA (1)...(19): siRNA sense strand
ugacuucuggaacaauuug

SEQ ID NO: 1406932 - RNA, 19 nt, Homo sapiens
  misc_RNA (1)...(19): siRNA sense strand
uuugacuucuggaacaauu

SEQ ID NO: 1406933 - RNA, 19 nt, Homo sapiens
  misc_RNA (1)...(19): siRNA sense strand
aaacuuucaucuucuucgu

SEQ ID NO: 1406934 - RNA, 19 nt, Homo sapiens
  misc_RNA (1)...(19): siRNA sense strand
agacaccaauaacgcagau

SEQ ID NO: 1406935 - RNA, 19 nt, Homo sapiens
  misc_RNA (1)...(19): siRNA sense strand
gagcacuucccaacucucu

SEQ ID NO: 1406936 - RNA, 19 nt, Homo sapiens
  misc_RNA (1)...(19): siRNA sense strand
agacuaccaucagcaccaa

SEQ ID NO: 1406937 - RNA, 19 nt, Homo sapiens
  misc_RNA (1)...(19): siRNA sense strand
caucauccaguacuucauc

SEQ ID NO: 1406938 - RNA, 19 nt, Homo sapiens
  misc_RNA (1)...(19): siRNA sense strand
ccaagcgcuuccagaacau

SEQ ID NO: 1406939 - RNA, 19 nt, Homo sapiens
  misc_RNA (1)...(19): siRNA sense strand
ugaccagcguccaggaagu

SEQ ID NO: 1406940 - RNA, 19 nt, Homo sapiens
  misc_RNA (1)...(19): siRNA sense strand
gguggaagcccugcucaag

SEQ ID NO: 1406941 - RNA, 19 nt, Homo sapiens
  misc_RNA (1)...(19): siRNA sense strand
gugaggacuaccaugauga

SEQ ID NO: 1406942 - RNA, 19 nt, Homo sapiens
  misc_RNA (1)...(19): siRNA sense strand
ucaugaagcccaccagcau

SEQ ID NO: 1406943 - RNA, 19 nt, Homo sapiens
  misc_RNA (1)...(19): siRNA sense strand
gugaaggcaccaugcugaa

SEQ ID NO: 1406944 - RNA, 19 nt, Homo sapiens
  misc_RNA (1)...(19): siRNA sense strand
ugacucccauuaccauagg

SEQ ID NO: 1406945 - RNA, 19 nt, Homo sapiens
  misc_RNA (1)...(19): siRNA sense strand
ucauucccauccucauaau

SEQ ID NO: 1406946 - RNA, 19 nt, Homo sapiens
  misc_RNA (1)...(19): siRNA sense strand
ccauggccgugcuggacuu

SEQ ID NO: 1406947 - RNA, 19 nt, Homo sapiens
  misc_RNA (1)...(19): siRNA sense strand
gguacuucauggccuugga

SEQ ID NO: 1406948 - RNA, 19 nt, Homo sapiens
  misc_RNA (1)...(19): siRNA sense strand
ccacacacagcaccacuac

SEQ ID NO: 1406949 - RNA, 19 nt, Homo sapiens
  misc_RNA (1)...(19): siRNA sense strand
gaagcugcuggaagacuca

SEQ ID NO: 1406950 - RNA, 19 nt, Homo sapiens
  misc_RNA (1)...(19): siRNA sense strand
uccggaaccugacccaauc

SEQ ID NO: 1406951 - RNA, 19 nt, Homo sapiens
  misc_RNA (1)...(19): siRNA sense strand
gaaauagaauugcuggaau

SEQ ID NO: 1406952 - RNA, 19 nt, Homo sapiens
  misc_RNA (1)...(19): siRNA sense strand
gcuagugcguuucucuaua

SEQ ID NO: 1406953 - RNA, 19 nt, Homo sapiens
  misc_RNA (1)...(19): siRNA sense strand
gauacuuucucucucauug

SEQ ID NO: 1406954 - RNA, 19 nt, Homo sapiens
  misc_RNA (1)...(19): siRNA sense strand
cuagugcguuucucuauaa

SEQ ID NO: 1406955 - RNA, 19 nt, Homo sapiens
  misc_RNA (1)...(19): siRNA sense strand
gaaugucuuugacuuuguu

SEQ ID NO: 1406956 - RNA, 19 nt, Homo sapiens
  misc_RNA (1)...(19): siRNA sense strand
ucaaacuccuugcacaauu

SEQ ID NO: 1406957 - RNA, 19 nt, Homo sapiens
  misc_RNA (1)...(19): siRNA sense strand
ggagguggcagcuugguuu

SEQ ID NO: 1406958 - RNA, 19 nt, Homo sapiens
  misc_RNA (1)...(19): siRNA sense strand
ccacaaauaccaaacuaug

SEQ ID NO: 1406959 - RNA, 19 nt, Homo sapiens
  misc_RNA (1)...(19): siRNA sense strand
caaacuccuugcacaauuc

SEQ ID NO: 1406960 - RNA, 19 nt, Homo sapiens
  misc_RNA (1)...(19): siRNA sense strand
caugugcgcugcagucaga

SEQ ID NO: 1406961 - RNA, 19 nt, Homo sapiens
  misc_RNA (1)...(19): siRNA sense strand
cauugaagcugaccuugga

SEQ ID NO: 1406962 - RNA, 19 nt, Homo sapiens
  misc_RNA (1)...(19): siRNA sense strand
ggaaugucuuugacuuugu

SEQ ID NO: 1406963 - RNA, 19 nt, Homo sapiens
  misc_RNA (1)...(19): siRNA sense strand
ugaguguccucucuucaaa

SEQ ID NO: 1406964 - RNA, 19 nt, Homo sapiens
  misc_RNA (1)...(19): siRNA sense strand
ccagaagaaacuuguauug

SEQ ID NO: 1406965 - RNA, 19 nt, Homo sapiens
  misc_RNA (1)...(19): siRNA sense strand
cuauaaagccucagcguau

SEQ ID NO: 1406966 - RNA, 19 nt, Homo sapiens
  misc_RNA (1)...(19): siRNA sense strand
guauagaacagauuucaca

SEQ ID NO: 1406967 - RNA, 19 nt, Homo sapiens
  misc_RNA (1)...(19): siRNA sense strand
gucuuugacuuuguuguua

SEQ ID NO: 1406968 - RNA, 19 nt, Homo sapiens
  misc_RNA (1)...(19): siRNA sense strand
aaauagaauugcuggaauc

SEQ ID NO: 1406969 - RNA, 19 nt, Homo sapiens
  misc_RNA (1)...(19): siRNA sense strand
ugaaauagaauugcuggaa

SEQ ID NO: 1406970 - RNA, 19 nt, Homo sapiens
  misc_RNA (1)...(19): siRNA sense strand
ggccaccucuuucuuugug

SEQ ID NO: 1406971 - RNA, 19 nt, Homo sapiens
  misc_RNA (1)...(19): siRNA sense strand
uggaaugucuuugacuuug

SEQ ID NO: 1406972 - RNA, 19 nt, Homo sapiens
  misc_RNA (1)...(19): siRNA sense strand
guucacgucucaucgauac

SEQ ID NO: 1406973 - RNA, 19 nt, Homo sapiens
  misc_RNA (1)...(19): siRNA sense strand
ggaauccacaaauaccaaa

SEQ ID NO: 1406974 - RNA, 19 nt, Homo sapiens
  misc_RNA (1)...(19): siRNA sense strand
gagguggcagcuugguuua

SEQ ID NO: 1406975 - RNA, 19 nt, Homo sapiens
  misc_RNA (1)...(19): siRNA sense strand
gguggcagcuugguuuauc

SEQ ID NO: 1406976 - RNA, 19 nt, Homo sapiens
  misc_RNA (1)...(19): siRNA sense strand
gccauucguucacgucuca

SEQ ID NO: 1406977 - RNA, 19 nt, Homo sapiens
  misc_RNA (1)...(19): siRNA sense strand
cagcguauagaacagauuu

SEQ ID NO: 1406978 - RNA, 19 nt, Homo sapiens
  misc_RNA (1)...(19): siRNA sense strand
ggaagagugccuggaaugu

SEQ ID NO: 1406979 - RNA, 19 nt, Homo sapiens
  misc_RNA (1)...(19): siRNA sense strand
gaagagugccuggaauguc

SEQ ID NO: 1406980 - RNA, 19 nt, Homo sapiens
  misc_RNA (1)...(19): siRNA sense strand
aaacuuguauugggagauc

SEQ ID NO: 1406981 - RNA, 19 nt, Homo sapiens
  misc_RNA (1)...(19): siRNA sense strand
ccuggaaugucuuugacuu

SEQ ID NO: 1406982 - RNA, 19 nt, Homo sapiens
  misc_RNA (1)...(19): siRNA sense strand
gaugguugaaauagaauug

SEQ ID NO: 1406983 - RNA, 19 nt, Homo sapiens
  misc_RNA (1)...(19): siRNA sense strand
accaaacuauggccauuga

SEQ ID NO: 1406984 - RNA, 19 nt, Homo sapiens
  misc_RNA (1)...(19): siRNA sense strand
uggagauccuucuuaagug

SEQ ID NO: 1406985 - RNA, 19 nt, Homo sapiens
  misc_RNA (1)...(19): siRNA sense strand
uccuggagauccuucuuaa

SEQ ID NO: 1406986 - RNA, 19 nt, Homo sapiens
  misc_RNA (1)...(19): siRNA sense strand
aagagugccuggaaugucu

SEQ ID NO: 1406987 - RNA, 19 nt, Homo sapiens
  misc_RNA (1)...(19): siRNA sense strand
ucucaucgauacuuucucu

SEQ ID NO: 1406988 - RNA, 19 nt, Homo sapiens
  misc_RNA (1)...(19): siRNA sense strand
aacaccagcuagugcguuu

SEQ ID NO: 1406989 - RNA, 19 nt, Homo sapiens
  misc_RNA (1)...(19): siRNA sense strand
caaacuauggccauugaag

SEQ ID NO: 1406990 - RNA, 19 nt, Homo sapiens
  misc_RNA (1)...(19): siRNA sense strand
gccagaagaaacuuguauu

SEQ ID NO: 1406991 - RNA, 19 nt, Homo sapiens
  misc_RNA (1)...(19): siRNA sense strand
gcacacuaucagggaguua

SEQ ID NO: 1406992 - RNA, 19 nt, Homo sapiens
  misc_RNA (1)...(19): siRNA sense strand
caucaucuuccuggucuuu

SEQ ID NO: 1406993 - RNA, 19 nt, Homo sapiens
  misc_RNA (1)...(19): siRNA sense strand
cuggagauccuucuuaagu

SEQ ID NO: 1406994 - RNA, 19 nt, Homo sapiens
  misc_RNA (1)...(19): siRNA sense strand
cagaagaaacuuguauugg

SEQ ID NO: 1406995 - RNA, 19 nt, Homo sapiens
  misc_RNA (1)...(19): siRNA sense strand
gugcguuucucuauaaagc

SEQ ID NO: 1406996 - RNA, 19 nt, Homo sapiens
  misc_RNA (1)...(19): siRNA sense strand
gagaucaacaccagcuagu

SEQ ID NO: 1406997 - RNA, 19 nt, Homo sapiens
  misc_RNA (1)...(19): siRNA sense strand
auaccaaacuauggccauu

SEQ ID NO: 1406998 - RNA, 19 nt, Homo sapiens
  misc_RNA (1)...(19): siRNA sense strand
cagcuagugcguuucucua

SEQ ID NO: 1406999 - RNA, 19 nt, Homo sapiens
  misc_RNA (1)...(19): siRNA sense strand
gcguauagaacagauuuca

SEQ ID NO: 1407000 - RNA, 19 nt, Homo sapiens
  misc_RNA (1)...(19): siRNA sense strand
cagcuugguuuaucuugcu

SEQ ID NO: 1407001 - RNA, 19 nt, Homo sapiens
  misc_RNA (1)...(19): siRNA sense strand
ccaacaagaagagcagaug

SEQ ID NO: 1407002 - RNA, 19 nt, Homo sapiens
  misc_RNA (1)...(19): siRNA sense strand
ccgcuuaccaacaagaaga

SEQ ID NO: 1407003 - RNA, 19 nt, Homo sapiens
  misc_RNA (1)...(19): siRNA sense strand
cacgucucaucgauacuuu

SEQ ID NO: 1407004 - RNA, 19 nt, Homo sapiens
  misc_RNA (1)...(19): siRNA sense strand
auccacaaauaccaaacua

SEQ ID NO: 1407005 - RNA, 19 nt, Homo sapiens
  misc_RNA (1)...(19): siRNA sense strand
ucacgucucaucgauacuu

SEQ ID NO: 1407006 - RNA, 19 nt, Homo sapiens
  misc_RNA (1)...(19): siRNA sense strand
cgagguugugguauuggua

SEQ ID NO: 1407007 - RNA, 19 nt, Homo sapiens
  misc_RNA (1)...(19): siRNA sense strand
gugccuggaaugucuuuga

SEQ ID NO: 1407008 - RNA, 19 nt, Homo sapiens
  misc_RNA (1)...(19): siRNA sense strand
cuauccaacuuuucuguuu

SEQ ID NO: 1407009 - RNA, 19 nt, Homo sapiens
  misc_RNA (1)...(19): siRNA sense strand
gaaauagaauugcuggaau

SEQ ID NO: 1407010 - RNA, 19 nt, Homo sapiens
  misc_RNA (1)...(19): siRNA sense strand
gcuagugcguuucucuaua

SEQ ID NO: 1407011 - RNA, 19 nt, Homo sapiens
  misc_RNA (1)...(19): siRNA sense strand
gauacuuucucucucauug

SEQ ID NO: 1407012 - RNA, 19 nt, Homo sapiens
  misc_RNA (1)...(19): siRNA sense strand
cuagugcguuucucuauaa

SEQ ID NO: 1407013 - RNA, 19 nt, Homo sapiens
  misc_RNA (1)...(19): siRNA sense strand
gaaugucuuugacuuuguu

SEQ ID NO: 1407014 - RNA, 19 nt, Homo sapiens
  misc_RNA (1)...(19): siRNA sense strand
ucaaacuccuugcacaauu

SEQ ID NO: 1407015 - RNA, 19 nt, Homo sapiens
  misc_RNA (1)...(19): siRNA sense strand
ggagguggcagcuugguuu

SEQ ID NO: 1407016 - RNA, 19 nt, Homo sapiens
  misc_RNA (1)...(19): siRNA sense strand
ccacaaauaccaaacuaug

SEQ ID NO: 1407017 - RNA, 19 nt, Homo sapiens
  misc_RNA (1)...(19): siRNA sense strand
caaacuccuugcacaauuc

SEQ ID NO: 1407018 - RNA, 19 nt, Homo sapiens
  misc_RNA (1)...(19): siRNA sense strand
caugugcgcugcagucaga

SEQ ID NO: 1407019 - RNA, 19 nt, Homo sapiens
  misc_RNA (1)...(19): siRNA sense strand
cauugaagcugaccuugga

SEQ ID NO: 1407020 - RNA, 19 nt, Homo sapiens
  misc_RNA (1)...(19): siRNA sense strand
ggaaugucuuugacuuugu

SEQ ID NO: 1407021 - RNA, 19 nt, Homo sapiens
  misc_RNA (1)...(19): siRNA sense strand
ugaguguccucucuucaaa

SEQ ID NO: 1407022 - RNA, 19 nt, Homo sapiens
  misc_RNA (1)...(19): siRNA sense strand
ccagaagaaacuuguauug

SEQ ID NO: 1407023 - RNA, 19 nt, Homo sapiens
  misc_RNA (1)...(19): siRNA sense strand
cuauaaagccucagcguau

SEQ ID NO: 1407024 - RNA, 19 nt, Homo sapiens
  misc_RNA (1)...(19): siRNA sense strand
guauagaacagauuucaca

SEQ ID NO: 1407025 - RNA, 19 nt, Homo sapiens
  misc_RNA (1)...(19): siRNA sense strand
gucuuugacuuuguuguua

SEQ ID NO: 1407026 - RNA, 19 nt, Homo sapiens
  misc_RNA (1)...(19): siRNA sense strand
aaauagaauugcuggaauc

SEQ ID NO: 1407027 - RNA, 19 nt, Homo sapiens
  misc_RNA (1)...(19): siRNA sense strand
ugaaauagaauugcuggaa

SEQ ID NO: 1407028 - RNA, 19 nt, Homo sapiens
  misc_RNA (1)...(19): siRNA sense strand
ggccaccucuuucuuugug

SEQ ID NO: 1407029 - RNA, 19 nt, Homo sapiens
  misc_RNA (1)...(19): siRNA sense strand
uggaaugucuuugacuuug

SEQ ID NO: 1407030 - RNA, 19 nt, Homo sapiens
  misc_RNA (1)...(19): siRNA sense strand
guucacgucucaucgauac

SEQ ID NO: 1407031 - RNA, 19 nt, Homo sapiens
  misc_RNA (1)...(19): siRNA sense strand
ggaauccacaaauaccaaa

SEQ ID NO: 1407032 - RNA, 19 nt, Homo sapiens
  misc_RNA (1)...(19): siRNA sense strand
gagguggcagcuugguuua

SEQ ID NO: 1407033 - RNA, 19 nt, Homo sapiens
  misc_RNA (1)...(19): siRNA sense strand
gguggcagcuugguuuauc

SEQ ID NO: 1407034 - RNA, 19 nt, Homo sapiens
  misc_RNA (1)...(19): siRNA sense strand
gccauucguucacgucuca

SEQ ID NO: 1407035 - RNA, 19 nt, Homo sapiens
  misc_RNA (1)...(19): siRNA sense strand
cagcguauagaacagauuu

SEQ ID NO: 1407036 - RNA, 19 nt, Homo sapiens
  misc_RNA (1)...(19): siRNA sense strand
ggaagagugccuggaaugu

SEQ ID NO: 1407037 - RNA, 19 nt, Homo sapiens
  misc_RNA (1)...(19): siRNA sense strand
gaagagugccuggaauguc

SEQ ID NO: 1407038 - RNA, 19 nt, Homo sapiens
  misc_RNA (1)...(19): siRNA sense strand
aaacuuguauugggagauc

SEQ ID NO: 1407039 - RNA, 19 nt, Homo sapiens
  misc_RNA (1)...(19): siRNA sense strand
ccuggaaugucuuugacuu

SEQ ID NO: 1407040 - RNA, 19 nt, Homo sapiens
  misc_RNA (1)...(19): siRNA sense strand
gaugguugaaauagaauug

SEQ ID NO: 1407041 - RNA, 19 nt, Homo sapiens
  misc_RNA (1)...(19): siRNA sense strand
accaaacuauggccauuga

SEQ ID NO: 1407042 - RNA, 19 nt, Homo sapiens
  misc_RNA (1)...(19): siRNA sense strand
uggagauccuucuuaagug

SEQ ID NO: 1407043 - RNA, 19 nt, Homo sapiens
  misc_RNA (1)...(19): siRNA sense strand
uccuggagauccuucuuaa

SEQ ID NO: 1407044 - RNA, 19 nt, Homo sapiens
  misc_RNA (1)...(19): siRNA sense strand
aagagugccuggaaugucu

SEQ ID NO: 1407045 - RNA, 19 nt, Homo sapiens
  misc_RNA (1)...(19): siRNA sense strand
ucucaucgauacuuucucu

SEQ ID NO: 1407046 - RNA, 19 nt, Homo sapiens
  misc_RNA (1)...(19): siRNA sense strand
aacaccagcuagugcguuu

SEQ ID NO: 1407047 - RNA, 19 nt, Homo sapiens
  misc_RNA (1)...(19): siRNA sense strand
caaacuauggccauugaag

SEQ ID NO: 1407048 - RNA, 19 nt, Homo sapiens
  misc_RNA (1)...(19): siRNA sense strand
gccagaagaaacuuguauu

SEQ ID NO: 1407049 - RNA, 19 nt, Homo sapiens
  misc_RNA (1)...(19): siRNA sense strand
gcacacuaucagggaguua

SEQ ID NO: 1407050 - RNA, 19 nt, Homo sapiens
  misc_RNA (1)...(19): siRNA sense strand
caucaucuuccuggucuuu

SEQ ID NO: 1407051 - RNA, 19 nt, Homo sapiens
  misc_RNA (1)...(19): siRNA sense strand
cuggagauccuucuuaagu

SEQ ID NO: 1407052 - RNA, 19 nt, Homo sapiens
  misc_RNA (1)...(19): siRNA sense strand
cagaagaaacuuguauugg

SEQ ID NO: 1407053 - RNA, 19 nt, Homo sapiens
  misc_RNA (1)...(19): siRNA sense strand
gugcguuucucuauaaagc

SEQ ID NO: 1407054 - RNA, 19 nt, Homo sapiens
  misc_RNA (1)...(19): siRNA sense strand
gagaucaacaccagcuagu

SEQ ID NO: 1407055 - RNA, 19 nt, Homo sapiens
  misc_RNA (1)...(19): siRNA sense strand
auaccaaacuauggccauu

SEQ ID NO: 1407056 - RNA, 19 nt, Homo sapiens
  misc_RNA (1)...(19): siRNA sense strand
cagcuagugcguuucucua

SEQ ID NO: 1407057 - RNA, 19 nt, Homo sapiens
  misc_RNA (1)...(19): siRNA sense strand
gcguauagaacagauuuca

SEQ ID NO: 1407058 - RNA, 19 nt, Homo sapiens
  misc_RNA (1)...(19): siRNA sense strand
cagcuugguuuaucuugcu

SEQ ID NO: 1407059 - RNA, 19 nt, Homo sapiens
  misc_RNA (1)...(19): siRNA sense strand
ccaacaagaagagcagaug

SEQ ID NO: 1407060 - RNA, 19 nt, Homo sapiens
  misc_RNA (1)...(19): siRNA sense strand
ccgcuuaccaacaagaaga

SEQ ID NO: 1407061 - RNA, 19 nt, Homo sapiens
  misc_RNA (1)...(19): siRNA sense strand
cacgucucaucgauacuuu

SEQ ID NO: 1407062 - RNA, 19 nt, Homo sapiens
  misc_RNA (1)...(19): siRNA sense strand
auccacaaauaccaaacua

SEQ ID NO: 1407063 - RNA, 19 nt, Homo sapiens
  misc_RNA (1)...(19): siRNA sense strand
ucacgucucaucgauacuu

SEQ ID NO: 1407064 - RNA, 19 nt, Homo sapiens
  misc_RNA (1)...(19): siRNA sense strand
cgagguugugguauuggua

SEQ ID NO: 1407065 - RNA, 19 nt, Homo sapiens
  misc_RNA (1)...(19): siRNA sense strand
gugccuggaaugucuuuga

SEQ ID NO: 1407066 - RNA, 19 nt, Homo sapiens
  misc_RNA (1)...(19): siRNA sense strand
cuauccaacuuuucuguuu

SEQ ID NO: 1407067 - RNA, 19 nt, Homo sapiens
  misc_RNA (1)...(19): siRNA sense strand
gaaauagaauugcuggaau

SEQ ID NO: 1407068 - RNA, 19 nt, Homo sapiens
  misc_RNA (1)...(19): siRNA sense strand
gcuagugcguuucucuaua

SEQ ID NO: 1407069 - RNA, 19 nt, Homo sapiens
  misc_RNA (1)...(19): siRNA sense strand
gauacuuucucucucauug

SEQ ID NO: 1407070 - RNA, 19 nt, Homo sapiens
  misc_RNA (1)...(19): siRNA sense strand
cuagugcguuucucuauaa

SEQ ID NO: 1407071 - RNA, 19 nt, Homo sapiens
  misc_RNA (1)...(19): siRNA sense strand
gaaugucuuugacuuuguu

SEQ ID NO: 1407072 - RNA, 19 nt, Homo sapiens
  misc_RNA (1)...(19): siRNA sense strand
ucaaacuccuugcacaauu

SEQ ID NO: 1407073 - RNA, 19 nt, Homo sapiens
  misc_RNA (1)...(19): siRNA sense strand
ggagguggcagcuugguuu

SEQ ID NO: 1407074 - RNA, 19 nt, Homo sapiens
  misc_RNA (1)...(19): siRNA sense strand
ccacaaauaccaaacuaug

SEQ ID NO: 1407075 - RNA, 19 nt, Homo sapiens
  misc_RNA (1)...(19): siRNA sense strand
caaacuccuugcacaauuc

SEQ ID NO: 1407076 - RNA, 19 nt, Homo sapiens
  misc_RNA (1)...(19): siRNA sense strand
caugugcgcugcagucaga

SEQ ID NO: 1407077 - RNA, 19 nt, Homo sapiens
  misc_RNA (1)...(19): siRNA sense strand
cauugaagcugaccuugga

SEQ ID NO: 1407078 - RNA, 19 nt, Homo sapiens
  misc_RNA (1)...(19): siRNA sense strand
ggaaugucuuugacuuugu

SEQ ID NO: 1407079 - RNA, 19 nt, Homo sapiens
  misc_RNA (1)...(19): siRNA sense strand
ugaguguccucucuucaaa

SEQ ID NO: 1407080 - RNA, 19 nt, Homo sapiens
  misc_RNA (1)...(19): siRNA sense strand
ccagaagaaacuuguauug

SEQ ID NO: 1407081 - RNA, 19 nt, Homo sapiens
  misc_RNA (1)...(19): siRNA sense strand
cuauaaagccucagcguau

SEQ ID NO: 1407082 - RNA, 19 nt, Homo sapiens
  misc_RNA (1)...(19): siRNA sense strand
guauagaacagauuucaca

SEQ ID NO: 1407083 - RNA, 19 nt, Homo sapiens
  misc_RNA (1)...(19): siRNA sense strand
gucuuugacuuuguuguua

SEQ ID NO: 1407084 - RNA, 19 nt, Homo sapiens
  misc_RNA (1)...(19): siRNA sense strand
aaauagaauugcuggaauc

SEQ ID NO: 1407085 - RNA, 19 nt, Homo sapiens
  misc_RNA (1)...(19): siRNA sense strand
ugaaauagaauugcuggaa

SEQ ID NO: 1407086 - RNA, 19 nt, Homo sapiens
  misc_RNA (1)...(19): siRNA sense strand
ggccaccucuuucuuugug

SEQ ID NO: 1407087 - RNA, 19 nt, Homo sapiens
  misc_RNA (1)...(19): siRNA sense strand
uggaaugucuuugacuuug

SEQ ID NO: 1407088 - RNA, 19 nt, Homo sapiens
  misc_RNA (1)...(19): siRNA sense strand
guucacgucucaucgauac

SEQ ID NO: 1407089 - RNA, 19 nt, Homo sapiens
  misc_RNA (1)...(19): siRNA sense strand
ggaauccacaaauaccaaa

SEQ ID NO: 1407090 - RNA, 19 nt, Homo sapiens
  misc_RNA (1)...(19): siRNA sense strand
gagguggcagcuugguuua

SEQ ID NO: 1407091 - RNA, 19 nt, Homo sapiens
  misc_RNA (1)...(19): siRNA sense strand
gguggcagcuugguuuauc

SEQ ID NO: 1407092 - RNA, 19 nt, Homo sapiens
  misc_RNA (1)...(19): siRNA sense strand
gccauucguucacgucuca

SEQ ID NO: 1407093 - RNA, 19 nt, Homo sapiens
  misc_RNA (1)...(19): siRNA sense strand
cagcguauagaacagauuu

SEQ ID NO: 1407094 - RNA, 19 nt, Homo sapiens
  misc_RNA (1)...(19): siRNA sense strand
ggaagagugccuggaaugu

SEQ ID NO: 1407095 - RNA, 19 nt, Homo sapiens
  misc_RNA (1)...(19): siRNA sense strand
gaagagugccuggaauguc

SEQ ID NO: 1407096 - RNA, 19 nt, Homo sapiens
  misc_RNA (1)...(19): siRNA sense strand
aaacuuguauugggagauc

SEQ ID NO: 1407097 - RNA, 19 nt, Homo sapiens
  misc_RNA (1)...(19): siRNA sense strand
ccuggaaugucuuugacuu

SEQ ID NO: 1407098 - RNA, 19 nt, Homo sapiens
  misc_RNA (1)...(19): siRNA sense strand
gaugguugaaauagaauug

SEQ ID NO: 1407099 - RNA, 19 nt, Homo sapiens
  misc_RNA (1)...(19): siRNA sense strand
accaaacuauggccauuga

SEQ ID NO: 1407100 - RNA, 19 nt, Homo sapiens
  misc_RNA (1)...(19): siRNA sense strand
uggagauccuucuuaagug

SEQ ID NO: 1407101 - RNA, 19 nt, Homo sapiens
  misc_RNA (1)...(19): siRNA sense strand
uccuggagauccuucuuaa

SEQ ID NO: 1407102 - RNA, 19 nt, Homo sapiens
  misc_RNA (1)...(19): siRNA sense strand
aagagugccuggaaugucu

SEQ ID NO: 1407103 - RNA, 19 nt, Homo sapiens
  misc_RNA (1)...(19): siRNA sense strand
ucucaucgauacuuucucu

SEQ ID NO: 1407104 - RNA, 19 nt, Homo sapiens
  misc_RNA (1)...(19): siRNA sense strand
aacaccagcuagugcguuu

SEQ ID NO: 1407105 - RNA, 19 nt, Homo sapiens
  misc_RNA (1)...(19): siRNA sense strand
caaacuauggccauugaag

SEQ ID NO: 1407106 - RNA, 19 nt, Homo sapiens
  misc_RNA (1)...(19): siRNA sense strand
gccagaagaaacuuguauu

SEQ ID NO: 1407107 - RNA, 19 nt, Homo sapiens
  misc_RNA (1)...(19): siRNA sense strand
gcacacuaucagggaguua

SEQ ID NO: 1407108 - RNA, 19 nt, Homo sapiens
  misc_RNA (1)...(19): siRNA sense strand
caucaucuuccuggucuuu

SEQ ID NO: 1407109 - RNA, 19 nt, Homo sapiens
  misc_RNA (1)...(19): siRNA sense strand
cuggagauccuucuuaagu

SEQ ID NO: 1407110 - RNA, 19 nt, Homo sapiens
  misc_RNA (1)...(19): siRNA sense strand
cagaagaaacuuguauugg

SEQ ID NO: 1407111 - RNA, 19 nt, Homo sapiens
  misc_RNA (1)...(19): siRNA sense strand
gugcguuucucuauaaagc

SEQ ID NO: 1407112 - RNA, 19 nt, Homo sapiens
  misc_RNA (1)...(19): siRNA sense strand
gagaucaacaccagcuagu

SEQ ID NO: 1407113 - RNA, 19 nt, Homo sapiens
  misc_RNA (1)...(19): siRNA sense strand
auaccaaacuauggccauu

SEQ ID NO: 1407114 - RNA, 19 nt, Homo sapiens
  misc_RNA (1)...(19): siRNA sense strand
cagcuagugcguuucucua

SEQ ID NO: 1407115 - RNA, 19 nt, Homo sapiens
  misc_RNA (1)...(19): siRNA sense strand
gcguauagaacagauuuca

SEQ ID NO: 1407116 - RNA, 19 nt, Homo sapiens
  misc_RNA (1)...(19): siRNA sense strand
cagcuugguuuaucuugcu

SEQ ID NO: 1407117 - RNA, 19 nt, Homo sapiens
  misc_RNA (1)...(19): siRNA sense strand
ccaacaagaagagcagaug

SEQ ID NO: 1407118 - RNA, 19 nt, Homo sapiens
  misc_RNA (1)...(19): siRNA sense strand
ccgcuuaccaacaagaaga

SEQ ID NO: 1407119 - RNA, 19 nt, Homo sapiens
  misc_RNA (1)...(19): siRNA sense strand
cacgucucaucgauacuuu

SEQ ID NO: 1407120 - RNA, 19 nt, Homo sapiens
  misc_RNA (1)...(19): siRNA sense strand
auccacaaauaccaaacua

SEQ ID NO: 1407121 - RNA, 19 nt, Homo sapiens
  misc_RNA (1)...(19): siRNA sense strand
ucacgucucaucgauacuu

SEQ ID NO: 1407122 - RNA, 19 nt, Homo sapiens
  misc_RNA (1)...(19): siRNA sense strand
cgagguugugguauuggua

SEQ ID NO: 1407123 - RNA, 19 nt, Homo sapiens
  misc_RNA (1)...(19): siRNA sense strand
gugccuggaaugucuuuga

SEQ ID NO: 1407124 - RNA, 19 nt, Homo sapiens
  misc_RNA (1)...(19): siRNA sense strand
cuauccaacuuuucuguuu

SEQ ID NO: 1407125 - RNA, 19 nt, Homo sapiens
  misc_RNA (1)...(19): siRNA sense strand
gaaauagaauugcuggaau

SEQ ID NO: 1407126 - RNA, 19 nt, Homo sapiens
  misc_RNA (1)...(19): siRNA sense strand
gcuagugcguuucucuaua

SEQ ID NO: 1407127 - RNA, 19 nt, Homo sapiens
  misc_RNA (1)...(19): siRNA sense strand
gauacuuucucucucauug

SEQ ID NO: 1407128 - RNA, 19 nt, Homo sapiens
  misc_RNA (1)...(19): siRNA sense strand
cuagugcguuucucuauaa

SEQ ID NO: 1407129 - RNA, 19 nt, Homo sapiens
  misc_RNA (1)...(19): siRNA sense strand
gaaugucuuugacuuuguu

SEQ ID NO: 1407130 - RNA, 19 nt, Homo sapiens
  misc_RNA (1)...(19): siRNA sense strand
ggagguggcagcuugguuu

SEQ ID NO: 1407131 - RNA, 19 nt, Homo sapiens
  misc_RNA (1)...(19): siRNA sense strand
ccacaaauaccaaacuaug

SEQ ID NO: 1407132 - RNA, 19 nt, Homo sapiens
  misc_RNA (1)...(19): siRNA sense strand
caugugcgcugcagucaga

SEQ ID NO: 1407133 - RNA, 19 nt, Homo sapiens
  misc_RNA (1)...(19): siRNA sense strand
cauugaagcugaccuugga

SEQ ID NO: 1407134 - RNA, 19 nt, Homo sapiens
  misc_RNA (1)...(19): siRNA sense strand
ggaaugucuuugacuuugu

SEQ ID NO: 1407135 - RNA, 19 nt, Homo sapiens
  misc_RNA (1)...(19): siRNA sense strand
ugaguguccucucuucaaa

SEQ ID NO: 1407136 - RNA, 19 nt, Homo sapiens
  misc_RNA (1)...(19): siRNA sense strand
ccagaagaaacuuguauug

SEQ ID NO: 1407137 - RNA, 19 nt, Homo sapiens
  misc_RNA (1)...(19): siRNA sense strand
cuauaaagccucagcguau

SEQ ID NO: 1407138 - RNA, 19 nt, Homo sapiens
  misc_RNA (1)...(19): siRNA sense strand
guauagaacagauuucaca

SEQ ID NO: 1407139 - RNA, 19 nt, Homo sapiens
  misc_RNA (1)...(19): siRNA sense strand
gucuuugacuuuguuguua

SEQ ID NO: 1407140 - RNA, 19 nt, Homo sapiens
  misc_RNA (1)...(19): siRNA sense strand
aaauagaauugcuggaauc

SEQ ID NO: 1407141 - RNA, 19 nt, Homo sapiens
  misc_RNA (1)...(19): siRNA sense strand
ugaaauagaauugcuggaa

SEQ ID NO: 1407142 - RNA, 19 nt, Homo sapiens
  misc_RNA (1)...(19): siRNA sense strand
ggccaccucuuucuuugug

SEQ ID NO: 1407143 - RNA, 19 nt, Homo sapiens
  misc_RNA (1)...(19): siRNA sense strand
uggaaugucuuugacuuug

SEQ ID NO: 1407144 - RNA, 19 nt, Homo sapiens
  misc_RNA (1)...(19): siRNA sense strand
guucacgucucaucgauac

SEQ ID NO: 1407145 - RNA, 19 nt, Homo sapiens
  misc_RNA (1)...(19): siRNA sense strand
ggaauccacaaauaccaaa

SEQ ID NO: 1407146 - RNA, 19 nt, Homo sapiens
  misc_RNA (1)...(19): siRNA sense strand
gagguggcagcuugguuua

SEQ ID NO: 1407147 - RNA, 19 nt, Homo sapiens
  misc_RNA (1)...(19): siRNA sense strand
gguggcagcuugguuuauc

SEQ ID NO: 1407148 - RNA, 19 nt, Homo sapiens
  misc_RNA (1)...(19): siRNA sense strand
gccauucguucacgucuca

SEQ ID NO: 1407149 - RNA, 19 nt, Homo sapiens
  misc_RNA (1)...(19): siRNA sense strand
cagcguauagaacagauuu

SEQ ID NO: 1407150 - RNA, 19 nt, Homo sapiens
  misc_RNA (1)...(19): siRNA sense strand
ggaagagugccuggaaugu

SEQ ID NO: 1407151 - RNA, 19 nt, Homo sapiens
  misc_RNA (1)...(19): siRNA sense strand
gaagagugccuggaauguc

SEQ ID NO: 1407152 - RNA, 19 nt, Homo sapiens
  misc_RNA (1)...(19): siRNA sense strand
aaacuuguauugggagauc

SEQ ID NO: 1407153 - RNA, 19 nt, Homo sapiens
  misc_RNA (1)...(19): siRNA sense strand
ccuggaaugucuuugacuu

SEQ ID NO: 1407154 - RNA, 19 nt, Homo sapiens
  misc_RNA (1)...(19): siRNA sense strand
gaugguugaaauagaauug

SEQ ID NO: 1407155 - RNA, 19 nt, Homo sapiens
  misc_RNA (1)...(19): siRNA sense strand
accaaacuauggccauuga

SEQ ID NO: 1407156 - RNA, 19 nt, Homo sapiens
  misc_RNA (1)...(19): siRNA sense strand
uggagauccuucuuaagug

SEQ ID NO: 1407157 - RNA, 19 nt, Homo sapiens
  misc_RNA (1)...(19): siRNA sense strand
ucucaucgauacuuucucu

SEQ ID NO: 1407158 - RNA, 19 nt, Homo sapiens
  misc_RNA (1)...(19): siRNA sense strand
aagagugccuggaaugucu

SEQ ID NO: 1407159 - RNA, 19 nt, Homo sapiens
  misc_RNA (1)...(19): siRNA sense strand
uccuggagauccuucuuaa

SEQ ID NO: 1407160 - RNA, 19 nt, Homo sapiens
  misc_RNA (1)...(19): siRNA sense strand
aacaccagcuagugcguuu

SEQ ID NO: 1407161 - RNA, 19 nt, Homo sapiens
  misc_RNA (1)...(19): siRNA sense strand
caaacuauggccauugaag

SEQ ID NO: 1407162 - RNA, 19 nt, Homo sapiens
  misc_RNA (1)...(19): siRNA sense strand
gccagaagaaacuuguauu

SEQ ID NO: 1407163 - RNA, 19 nt, Homo sapiens
  misc_RNA (1)...(19): siRNA sense strand
gcacacuaucagggaguua

SEQ ID NO: 1407164 - RNA, 19 nt, Homo sapiens
  misc_RNA (1)...(19): siRNA sense strand
caucaucuuccuggucuuu

SEQ ID NO: 1407165 - RNA, 19 nt, Homo sapiens
  misc_RNA (1)...(19): siRNA sense strand
cuggagauccuucuuaagu

SEQ ID NO: 1407166 - RNA, 19 nt, Homo sapiens
  misc_RNA (1)...(19): siRNA sense strand
cagaagaaacuuguauugg

SEQ ID NO: 1407167 - RNA, 19 nt, Homo sapiens
  misc_RNA (1)...(19): siRNA sense strand
gugcguuucucuauaaagc

SEQ ID NO: 1407168 - RNA, 19 nt, Homo sapiens
  misc_RNA (1)...(19): siRNA sense strand
gagaucaacaccagcuagu

SEQ ID NO: 1407169 - RNA, 19 nt, Homo sapiens
  misc_RNA (1)...(19): siRNA sense strand
auaccaaacuauggccauu

SEQ ID NO: 1407170 - RNA, 19 nt, Homo sapiens
  misc_RNA (1)...(19): siRNA sense strand
cagcuagugcguuucucua

SEQ ID NO: 1407171 - RNA, 19 nt, Homo sapiens
  misc_RNA (1)...(19): siRNA sense strand
gcguauagaacagauuuca

SEQ ID NO: 1407172 - RNA, 19 nt, Homo sapiens
  misc_RNA (1)...(19): siRNA sense strand
ccaacaagaagagcagaug

SEQ ID NO: 1407173 - RNA, 19 nt, Homo sapiens
  misc_RNA (1)...(19): siRNA sense strand
cagcuugguuuaucuugcu

SEQ ID NO: 1407174 - RNA, 19 nt, Homo sapiens
  misc_RNA (1)...(19): siRNA sense strand
ccgcuuaccaacaagaaga

SEQ ID NO: 1407175 - RNA, 19 nt, Homo sapiens
  misc_RNA (1)...(19): siRNA sense strand
cacgucucaucgauacuuu

SEQ ID NO: 1407176 - RNA, 19 nt, Homo sapiens
  misc_RNA (1)...(19): siRNA sense strand
auccacaaauaccaaacua

SEQ ID NO: 1407177 - RNA, 19 nt, Homo sapiens
  misc_RNA (1)...(19): siRNA sense strand
ucacgucucaucgauacuu

SEQ ID NO: 1407178 - RNA, 19 nt, Homo sapiens
  misc_RNA (1)...(19): siRNA sense strand
gugccuggaaugucuuuga

SEQ ID NO: 1407179 - RNA, 19 nt, Homo sapiens
  misc_RNA (1)...(19): siRNA sense strand
cuauccaacuuuucuguuu

SEQ ID NO: 1407180 - RNA, 19 nt, Homo sapiens
  misc_RNA (1)...(19): siRNA sense strand
gaaauagaauugcuggaau

SEQ ID NO: 1407181 - RNA, 19 nt, Homo sapiens
  misc_RNA (1)...(19): siRNA sense strand
gcuagugcguuucucuaua

SEQ ID NO: 1407182 - RNA, 19 nt, Homo sapiens
  misc_RNA (1)...(19): siRNA sense strand
gauacuuucucucucauug

SEQ ID NO: 1407183 - RNA, 19 nt, Homo sapiens
  misc_RNA (1)...(19): siRNA sense strand
cuagugcguuucucuauaa

SEQ ID NO: 1407184 - RNA, 19 nt, Homo sapiens
  misc_RNA (1)...(19): siRNA sense strand
gaaugucuuugacuuuguu

SEQ ID NO: 1407185 - RNA, 19 nt, Homo sapiens
  misc_RNA (1)...(19): siRNA sense strand
ucaaacuccuugcacaauu

SEQ ID NO: 1407186 - RNA, 19 nt, Homo sapiens
  misc_RNA (1)...(19): siRNA sense strand
ggagguggcagcuugguuu

SEQ ID NO: 1407187 - RNA, 19 nt, Homo sapiens
  misc_RNA (1)...(19): siRNA sense strand
ccacaaauaccaaacuaug

SEQ ID NO: 1407188 - RNA, 19 nt, Homo sapiens
  misc_RNA (1)...(19): siRNA sense strand
caaacuccuugcacaauuc

SEQ ID NO: 1407189 - RNA, 19 nt, Homo sapiens
  misc_RNA (1)...(19): siRNA sense strand
caugugcgcugcagucaga

SEQ ID NO: 1407190 - RNA, 19 nt, Homo sapiens
  misc_RNA (1)...(19): siRNA sense strand
cauugaagcugaccuugga

SEQ ID NO: 1407191 - RNA, 19 nt, Homo sapiens
  misc_RNA (1)...(19): siRNA sense strand
ggaaugucuuugacuuugu

SEQ ID NO: 1407192 - RNA, 19 nt, Homo sapiens
  misc_RNA (1)...(19): siRNA sense strand
ugaguguccucucuucaaa

SEQ ID NO: 1407193 - RNA, 19 nt, Homo sapiens
  misc_RNA (1)...(19): siRNA sense strand
ccagaagaaacuuguauug

SEQ ID NO: 1407194 - RNA, 19 nt, Homo sapiens
  misc_RNA (1)...(19): siRNA sense strand
cuauaaagccucagcguau

SEQ ID NO: 1407195 - RNA, 19 nt, Homo sapiens
  misc_RNA (1)...(19): siRNA sense strand
guauagaacagauuucaca

SEQ ID NO: 1407196 - RNA, 19 nt, Homo sapiens
  misc_RNA (1)...(19): siRNA sense strand
gucuuugacuuuguuguua

SEQ ID NO: 1407197 - RNA, 19 nt, Homo sapiens
  misc_RNA (1)...(19): siRNA sense strand
aaauagaauugcuggaauc

SEQ ID NO: 1407198 - RNA, 19 nt, Homo sapiens
  misc_RNA (1)...(19): siRNA sense strand
ugaaauagaauugcuggaa

SEQ ID NO: 1407199 - RNA, 19 nt, Homo sapiens
  misc_RNA (1)...(19): siRNA sense strand
ggccaccucuuucuuugug

SEQ ID NO: 1407200 - RNA, 19 nt, Homo sapiens
  misc_RNA (1)...(19): siRNA sense strand
uggaaugucuuugacuuug

SEQ ID NO: 1407201 - RNA, 19 nt, Homo sapiens
  misc_RNA (1)...(19): siRNA sense strand
guucacgucucaucgauac

SEQ ID NO: 1407202 - RNA, 19 nt, Homo sapiens
  misc_RNA (1)...(19): siRNA sense strand
ggaauccacaaauaccaaa

SEQ ID NO: 1407203 - RNA, 19 nt, Homo sapiens
  misc_RNA (1)...(19): siRNA sense strand
gagguggcagcuugguuua

SEQ ID NO: 1407204 - RNA, 19 nt, Homo sapiens
  misc_RNA (1)...(19): siRNA sense strand
gguggcagcuugguuuauc

SEQ ID NO: 1407205 - RNA, 19 nt, Homo sapiens
  misc_RNA (1)...(19): siRNA sense strand
gccauucguucacgucuca

SEQ ID NO: 1407206 - RNA, 19 nt, Homo sapiens
  misc_RNA (1)...(19): siRNA sense strand
cagcguauagaacagauuu

SEQ ID NO: 1407207 - RNA, 19 nt, Homo sapiens
  misc_RNA (1)...(19): siRNA sense strand
ggaagagugccuggaaugu

SEQ ID NO: 1407208 - RNA, 19 nt, Homo sapiens
  misc_RNA (1)...(19): siRNA sense strand
gaagagugccuggaauguc

SEQ ID NO: 1407209 - RNA, 19 nt, Homo sapiens
  misc_RNA (1)...(19): siRNA sense strand
aaacuuguauugggagauc

SEQ ID NO: 1407210 - RNA, 19 nt, Homo sapiens
  misc_RNA (1)...(19): siRNA sense strand
ccuggaaugucuuugacuu

SEQ ID NO: 1407211 - RNA, 19 nt, Homo sapiens
  misc_RNA (1)...(19): siRNA sense strand
gaugguugaaauagaauug

SEQ ID NO: 1407212 - RNA, 19 nt, Homo sapiens
  misc_RNA (1)...(19): siRNA sense strand
accaaacuauggccauuga

SEQ ID NO: 1407213 - RNA, 19 nt, Homo sapiens
  misc_RNA (1)...(19): siRNA sense strand
uggagauccuucuuaagug

SEQ ID NO: 1407214 - RNA, 19 nt, Homo sapiens
  misc_RNA (1)...(19): siRNA sense strand
uccuggagauccuucuuaa

SEQ ID NO: 1407215 - RNA, 19 nt, Homo sapiens
  misc_RNA (1)...(19): siRNA sense strand
aagagugccuggaaugucu

SEQ ID NO: 1407216 - RNA, 19 nt, Homo sapiens
  misc_RNA (1)...(19): siRNA sense strand
ucucaucgauacuuucucu

SEQ ID NO: 1407217 - RNA, 19 nt, Homo sapiens
  misc_RNA (1)...(19): siRNA sense strand
aacaccagcuagugcguuu

SEQ ID NO: 1407218 - RNA, 19 nt, Homo sapiens
  misc_RNA (1)...(19): siRNA sense strand
caaacuauggccauugaag

SEQ ID NO: 1407219 - RNA, 19 nt, Homo sapiens
  misc_RNA (1)...(19): siRNA sense strand
gccagaagaaacuuguauu

SEQ ID NO: 1407220 - RNA, 19 nt, Homo sapiens
  misc_RNA (1)...(19): siRNA sense strand
gcacacuaucagggaguua

SEQ ID NO: 1407221 - RNA, 19 nt, Homo sapiens
  misc_RNA (1)...(19): siRNA sense strand
caucaucuuccuggucuuu

SEQ ID NO: 1407222 - RNA, 19 nt, Homo sapiens
  misc_RNA (1)...(19): siRNA sense strand
cuggagauccuucuuaagu

SEQ ID NO: 1407223 - RNA, 19 nt, Homo sapiens
  misc_RNA (1)...(19): siRNA sense strand
cagaagaaacuuguauugg

SEQ ID NO: 1407224 - RNA, 19 nt, Homo sapiens
  misc_RNA (1)...(19): siRNA sense strand
gugcguuucucuauaaagc

SEQ ID NO: 1407225 - RNA, 19 nt, Homo sapiens
  misc_RNA (1)...(19): siRNA sense strand
gagaucaacaccagcuagu

SEQ ID NO: 1407226 - RNA, 19 nt, Homo sapiens
  misc_RNA (1)...(19): siRNA sense strand
auaccaaacuauggccauu

SEQ ID NO: 1407227 - RNA, 19 nt, Homo sapiens
  misc_RNA (1)...(19): siRNA sense strand
cagcuagugcguuucucua

SEQ ID NO: 1407228 - RNA, 19 nt, Homo sapiens
  misc_RNA (1)...(19): siRNA sense strand
gcguauagaacagauuuca

SEQ ID NO: 1407229 - RNA, 19 nt, Homo sapiens
  misc_RNA (1)...(19): siRNA sense strand
cagcuugguuuaucuugcu

SEQ ID NO: 1407230 - RNA, 19 nt, Homo sapiens
  misc_RNA (1)...(19): siRNA sense strand
ccaacaagaagagcagaug

SEQ ID NO: 1407231 - RNA, 19 nt, Homo sapiens
  misc_RNA (1)...(19): siRNA sense strand
ccgcuuaccaacaagaaga

SEQ ID NO: 1407232 - RNA, 19 nt, Homo sapiens
  misc_RNA (1)...(19): siRNA sense strand
cacgucucaucgauacuuu

SEQ ID NO: 1407233 - RNA, 19 nt, Homo sapiens
  misc_RNA (1)...(19): siRNA sense strand
auccacaaauaccaaacua

SEQ ID NO: 1407234 - RNA, 19 nt, Homo sapiens
  misc_RNA (1)...(19): siRNA sense strand
ucacgucucaucgauacuu

SEQ ID NO: 1407235 - RNA, 19 nt, Homo sapiens
  misc_RNA (1)...(19): siRNA sense strand
cgagguugugguauuggua

SEQ ID NO: 1407236 - RNA, 19 nt, Homo sapiens
  misc_RNA (1)...(19): siRNA sense strand
gugccuggaaugucuuuga

SEQ ID NO: 1407237 - RNA, 19 nt, Homo sapiens
  misc_RNA (1)...(19): siRNA sense strand
cuauccaacuuuucuguuu

SEQ ID NO: 1407238 - RNA, 19 nt, Homo sapiens
  misc_RNA (1)...(19): siRNA sense strand
gaaauagaauugcuggaau

SEQ ID NO: 1407239 - RNA, 19 nt, Homo sapiens
  misc_RNA (1)...(19): siRNA sense strand
gcuagugcguuucucuaua

SEQ ID NO: 1407240 - RNA, 19 nt, Homo sapiens
  misc_RNA (1)...(19): siRNA sense strand
gauacuuucucucucauug

SEQ ID NO: 1407241 - RNA, 19 nt, Homo sapiens
  misc_RNA (1)...(19): siRNA sense strand
cuagugcguuucucuauaa

SEQ ID NO: 1407242 - RNA, 19 nt, Homo sapiens
  misc_RNA (1)...(19): siRNA sense strand
gaaugucuuugacuuuguu

SEQ ID NO: 1407243 - RNA, 19 nt, Homo sapiens
  misc_RNA (1)...(19): siRNA sense strand
ucaaacuccuugcacaauu

SEQ ID NO: 1407244 - RNA, 19 nt, Homo sapiens
  misc_RNA (1)...(19): siRNA sense strand
ggagguggcagcuugguuu

SEQ ID NO: 1407245 - RNA, 19 nt, Homo sapiens
  misc_RNA (1)...(19): siRNA sense strand
ccacaaauaccaaacuaug

SEQ ID NO: 1407246 - RNA, 19 nt, Homo sapiens
  misc_RNA (1)...(19): siRNA sense strand
caaacuccuugcacaauuc

SEQ ID NO: 1407247 - RNA, 19 nt, Homo sapiens
  misc_RNA (1)...(19): siRNA sense strand
caugugcgcugcagucaga

SEQ ID NO: 1407248 - RNA, 19 nt, Homo sapiens
  misc_RNA (1)...(19): siRNA sense strand
cauugaagcugaccuugga

SEQ ID NO: 1407249 - RNA, 19 nt, Homo sapiens
  misc_RNA (1)...(19): siRNA sense strand
ggaaugucuuugacuuugu

SEQ ID NO: 1407250 - RNA, 19 nt, Homo sapiens
  misc_RNA (1)...(19): siRNA sense strand
ugaguguccucucuucaaa

SEQ ID NO: 1407251 - RNA, 19 nt, Homo sapiens
  misc_RNA (1)...(19): siRNA sense strand
ccagaagaaacuuguauug

SEQ ID NO: 1407252 - RNA, 19 nt, Homo sapiens
  misc_RNA (1)...(19): siRNA sense strand
cuauaaagccucagcguau

SEQ ID NO: 1407253 - RNA, 19 nt, Homo sapiens
  misc_RNA (1)...(19): siRNA sense strand
guauagaacagauuucaca

SEQ ID NO: 1407254 - RNA, 19 nt, Homo sapiens
  misc_RNA (1)...(19): siRNA sense strand
gucuuugacuuuguuguua

SEQ ID NO: 1407255 - RNA, 19 nt, Homo sapiens
  misc_RNA (1)...(19): siRNA sense strand
aaauagaauugcuggaauc

SEQ ID NO: 1407256 - RNA, 19 nt, Homo sapiens
  misc_RNA (1)...(19): siRNA sense strand
ugaaauagaauugcuggaa

SEQ ID NO: 1407257 - RNA, 19 nt, Homo sapiens
  misc_RNA (1)...(19): siRNA sense strand
ggccaccucuuucuuugug

SEQ ID NO: 1407258 - RNA, 19 nt, Homo sapiens
  misc_RNA (1)...(19): siRNA sense strand
uggaaugucuuugacuuug

SEQ ID NO: 1407259 - RNA, 19 nt, Homo sapiens
  misc_RNA (1)...(19): siRNA sense strand
guucacgucucaucgauac

SEQ ID NO: 1407260 - RNA, 19 nt, Homo sapiens
  misc_RNA (1)...(19): siRNA sense strand
ggaauccacaaauaccaaa

SEQ ID NO: 1407261 - RNA, 19 nt, Homo sapiens
  misc_RNA (1)...(19): siRNA sense strand
gagguggcagcuugguuua

SEQ ID NO: 1407262 - RNA, 19 nt, Homo sapiens
  misc_RNA (1)...(19): siRNA sense strand
gguggcagcuugguuuauc

SEQ ID NO: 1407263 - RNA, 19 nt, Homo sapiens
  misc_RNA (1)...(19): siRNA sense strand
gccauucguucacgucuca

SEQ ID NO: 1407264 - RNA, 19 nt, Homo sapiens
  misc_RNA (1)...(19): siRNA sense strand
cagcguauagaacagauuu

SEQ ID NO: 1407265 - RNA, 19 nt, Homo sapiens
  misc_RNA (1)...(19): siRNA sense strand
ggaagagugccuggaaugu

SEQ ID NO: 1407266 - RNA, 19 nt, Homo sapiens
  misc_RNA (1)...(19): siRNA sense strand
gaagagugccuggaauguc

SEQ ID NO: 1407267 - RNA, 19 nt, Homo sapiens
  misc_RNA (1)...(19): siRNA sense strand
aaacuuguauugggagauc

SEQ ID NO: 1407268 - RNA, 19 nt, Homo sapiens
  misc_RNA (1)...(19): siRNA sense strand
ccuggaaugucuuugacuu

SEQ ID NO: 1407269 - RNA, 19 nt, Homo sapiens
  misc_RNA (1)...(19): siRNA sense strand
gaugguugaaauagaauug

SEQ ID NO: 1407270 - RNA, 19 nt, Homo sapiens
  misc_RNA (1)...(19): siRNA sense strand
accaaacuauggccauuga

SEQ ID NO: 1407271 - RNA, 19 nt, Homo sapiens
  misc_RNA (1)...(19): siRNA sense strand
uggagauccuucuuaagug

SEQ ID NO: 1407272 - RNA, 19 nt, Homo sapiens
  misc_RNA (1)...(19): siRNA sense strand
uccuggagauccuucuuaa

SEQ ID NO: 1407273 - RNA, 19 nt, Homo sapiens
  misc_RNA (1)...(19): siRNA sense strand
aagagugccuggaaugucu

SEQ ID NO: 1407274 - RNA, 19 nt, Homo sapiens
  misc_RNA (1)...(19): siRNA sense strand
ucucaucgauacuuucucu

SEQ ID NO: 1407275 - RNA, 19 nt, Homo sapiens
  misc_RNA (1)...(19): siRNA sense strand
aacaccagcuagugcguuu

SEQ ID NO: 1407276 - RNA, 19 nt, Homo sapiens
  misc_RNA (1)...(19): siRNA sense strand
caaacuauggccauugaag

SEQ ID NO: 1407277 - RNA, 19 nt, Homo sapiens
  misc_RNA (1)...(19): siRNA sense strand
gccagaagaaacuuguauu

SEQ ID NO: 1407278 - RNA, 19 nt, Homo sapiens
  misc_RNA (1)...(19): siRNA sense strand
gcacacuaucagggaguua

SEQ ID NO: 1407279 - RNA, 19 nt, Homo sapiens
  misc_RNA (1)...(19): siRNA sense strand
caucaucuuccuggucuuu

SEQ ID NO: 1407280 - RNA, 19 nt, Homo sapiens
  misc_RNA (1)...(19): siRNA sense strand
cuggagauccuucuuaagu

SEQ ID NO: 1407281 - RNA, 19 nt, Homo sapiens
  misc_RNA (1)...(19): siRNA sense strand
cagaagaaacuuguauugg

SEQ ID NO: 1407282 - RNA, 19 nt, Homo sapiens
  misc_RNA (1)...(19): siRNA sense strand
gugcguuucucuauaaagc

SEQ ID NO: 1407283 - RNA, 19 nt, Homo sapiens
  misc_RNA (1)...(19): siRNA sense strand
gagaucaacaccagcuagu

SEQ ID NO: 1407284 - RNA, 19 nt, Homo sapiens
  misc_RNA (1)...(19): siRNA sense strand
auaccaaacuauggccauu

SEQ ID NO: 1407285 - RNA, 19 nt, Homo sapiens
  misc_RNA (1)...(19): siRNA sense strand
cagcuagugcguuucucua

SEQ ID NO: 1407286 - RNA, 19 nt, Homo sapiens
  misc_RNA (1)...(19): siRNA sense strand
gcguauagaacagauuuca

SEQ ID NO: 1407287 - RNA, 19 nt, Homo sapiens
  misc_RNA (1)...(19): siRNA sense strand
cagcuugguuuaucuugcu

SEQ ID NO: 1407288 - RNA, 19 nt, Homo sapiens
  misc_RNA (1)...(19): siRNA sense strand
ccaacaagaagagcagaug

SEQ ID NO: 1407289 - RNA, 19 nt, Homo sapiens
  misc_RNA (1)...(19): siRNA sense strand
ccgcuuaccaacaagaaga

SEQ ID NO: 1407290 - RNA, 19 nt, Homo sapiens
  misc_RNA (1)...(19): siRNA sense strand
cacgucucaucgauacuuu

SEQ ID NO: 1407291 - RNA, 19 nt, Homo sapiens
  misc_RNA (1)...(19): siRNA sense strand
auccacaaauaccaaacua

SEQ ID NO: 1407292 - RNA, 19 nt, Homo sapiens
  misc_RNA (1)...(19): siRNA sense strand
ucacgucucaucgauacuu

SEQ ID NO: 1407293 - RNA, 19 nt, Homo sapiens
  misc_RNA (1)...(19): siRNA sense strand
cgagguugugguauuggua

SEQ ID NO: 1407294 - RNA, 19 nt, Homo sapiens
  misc_RNA (1)...(19): siRNA sense strand
gugccuggaaugucuuuga

SEQ ID NO: 1407295 - RNA, 19 nt, Homo sapiens
  misc_RNA (1)...(19): siRNA sense strand
cuauccaacuuuucuguuu

SEQ ID NO: 1407296 - RNA, 19 nt, Homo sapiens
  misc_RNA (1)...(19): siRNA sense strand
gaaauagaauugcuggaau

SEQ ID NO: 1407297 - RNA, 19 nt, Homo sapiens
  misc_RNA (1)...(19): siRNA sense strand
gcuagugcguuucucuaua

SEQ ID NO: 1407298 - RNA, 19 nt, Homo sapiens
  misc_RNA (1)...(19): siRNA sense strand
gauacuuucucucucauug

SEQ ID NO: 1407299 - RNA, 19 nt, Homo sapiens
  misc_RNA (1)...(19): siRNA sense strand
cuagugcguuucucuauaa

SEQ ID NO: 1407300 - RNA, 19 nt, Homo sapiens
  misc_RNA (1)...(19): siRNA sense strand
gaaugucuuugacuuuguu

SEQ ID NO: 1407301 - RNA, 19 nt, Homo sapiens
  misc_RNA (1)...(19): siRNA sense strand
ucaaacuccuugcacaauu

SEQ ID NO: 1407302 - RNA, 19 nt, Homo sapiens
  misc_RNA (1)...(19): siRNA sense strand
ggagguggcagcuugguuu

SEQ ID NO: 1407303 - RNA, 19 nt, Homo sapiens
  misc_RNA (1)...(19): siRNA sense strand
ccacaaauaccaaacuaug

SEQ ID NO: 1407304 - RNA, 19 nt, Homo sapiens
  misc_RNA (1)...(19): siRNA sense strand
caaacuccuugcacaauuc

SEQ ID NO: 1407305 - RNA, 19 nt, Homo sapiens
  misc_RNA (1)...(19): siRNA sense strand
caugugcgcugcagucaga

SEQ ID NO: 1407306 - RNA, 19 nt, Homo sapiens
  misc_RNA (1)...(19): siRNA sense strand
cauugaagcugaccuugga

SEQ ID NO: 1407307 - RNA, 19 nt, Homo sapiens
  misc_RNA (1)...(19): siRNA sense strand
ggaaugucuuugacuuugu

SEQ ID NO: 1407308 - RNA, 19 nt, Homo sapiens
  misc_RNA (1)...(19): siRNA sense strand
ugaguguccucucuucaaa

SEQ ID NO: 1407309 - RNA, 19 nt, Homo sapiens
  misc_RNA (1)...(19): siRNA sense strand
ccagaagaaacuuguauug

SEQ ID NO: 1407310 - RNA, 19 nt, Homo sapiens
  misc_RNA (1)...(19): siRNA sense strand
cuauaaagccucagcguau

SEQ ID NO: 1407311 - RNA, 19 nt, Homo sapiens
  misc_RNA (1)...(19): siRNA sense strand
guauagaacagauuucaca

SEQ ID NO: 1407312 - RNA, 19 nt, Homo sapiens
  misc_RNA (1)...(19): siRNA sense strand
gucuuugacuuuguuguua

SEQ ID NO: 1407313 - RNA, 19 nt, Homo sapiens
  misc_RNA (1)...(19): siRNA sense strand
aaauagaauugcuggaauc

SEQ ID NO: 1407314 - RNA, 19 nt, Homo sapiens
  misc_RNA (1)...(19): siRNA sense strand
ugaaauagaauugcuggaa

SEQ ID NO: 1407315 - RNA, 19 nt, Homo sapiens
  misc_RNA (1)...(19): siRNA sense strand
ggccaccucuuucuuugug

SEQ ID NO: 1407316 - RNA, 19 nt, Homo sapiens
  misc_RNA (1)...(19): siRNA sense strand
uggaaugucuuugacuuug

SEQ ID NO: 1407317 - RNA, 19 nt, Homo sapiens
  misc_RNA (1)...(19): siRNA sense strand
guucacgucucaucgauac

SEQ ID NO: 1407318 - RNA, 19 nt, Homo sapiens
  misc_RNA (1)...(19): siRNA sense strand
ggaauccacaaauaccaaa

SEQ ID NO: 1407319 - RNA, 19 nt, Homo sapiens
  misc_RNA (1)...(19): siRNA sense strand
gagguggcagcuugguuua

SEQ ID NO: 1407320 - RNA, 19 nt, Homo sapiens
  misc_RNA (1)...(19): siRNA sense strand
gguggcagcuugguuuauc

SEQ ID NO: 1407321 - RNA, 19 nt, Homo sapiens
  misc_RNA (1)...(19): siRNA sense strand
gccauucguucacgucuca

SEQ ID NO: 1407322 - RNA, 19 nt, Homo sapiens
  misc_RNA (1)...(19): siRNA sense strand
cagcguauagaacagauuu

SEQ ID NO: 1407323 - RNA, 19 nt, Homo sapiens
  misc_RNA (1)...(19): siRNA sense strand
ggaagagugccuggaaugu

SEQ ID NO: 1407324 - RNA, 19 nt, Homo sapiens
  misc_RNA (1)...(19): siRNA sense strand
gaagagugccuggaauguc

SEQ ID NO: 1407325 - RNA, 19 nt, Homo sapiens
  misc_RNA (1)...(19): siRNA sense strand
aaacuuguauugggagauc

SEQ ID NO: 1407326 - RNA, 19 nt, Homo sapiens
  misc_RNA (1)...(19): siRNA sense strand
ccuggaaugucuuugacuu

SEQ ID NO: 1407327 - RNA, 19 nt, Homo sapiens
  misc_RNA (1)...(19): siRNA sense strand
gaugguugaaauagaauug

SEQ ID NO: 1407328 - RNA, 19 nt, Homo sapiens
  misc_RNA (1)...(19): siRNA sense strand
accaaacuauggccauuga

SEQ ID NO: 1407329 - RNA, 19 nt, Homo sapiens
  misc_RNA (1)...(19): siRNA sense strand
uggagauccuucuuaagug

SEQ ID NO: 1407330 - RNA, 19 nt, Homo sapiens
  misc_RNA (1)...(19): siRNA sense strand
uccuggagauccuucuuaa

SEQ ID NO: 1407331 - RNA, 19 nt, Homo sapiens
  misc_RNA (1)...(19): siRNA sense strand
aagagugccuggaaugucu

SEQ ID NO: 1407332 - RNA, 19 nt, Homo sapiens
  misc_RNA (1)...(19): siRNA sense strand
ucucaucgauacuuucucu

SEQ ID NO: 1407333 - RNA, 19 nt, Homo sapiens
  misc_RNA (1)...(19): siRNA sense strand
aacaccagcuagugcguuu

SEQ ID NO: 1407334 - RNA, 19 nt, Homo sapiens
  misc_RNA (1)...(19): siRNA sense strand
caaacuauggccauugaag

SEQ ID NO: 1407335 - RNA, 19 nt, Homo sapiens
  misc_RNA (1)...(19): siRNA sense strand
gccagaagaaacuuguauu

SEQ ID NO: 1407336 - RNA, 19 nt, Homo sapiens
  misc_RNA (1)...(19): siRNA sense strand
gcacacuaucagggaguua

SEQ ID NO: 1407337 - RNA, 19 nt, Homo sapiens
  misc_RNA (1)...(19): siRNA sense strand
caucaucuuccuggucuuu

SEQ ID NO: 1407338 - RNA, 19 nt, Homo sapiens
  misc_RNA (1)...(19): siRNA sense strand
cuggagauccuucuuaagu

SEQ ID NO: 1407339 - RNA, 19 nt, Homo sapiens
  misc_RNA (1)...(19): siRNA sense strand
cagaagaaacuuguauugg

SEQ ID NO: 1407340 - RNA, 19 nt, Homo sapiens
  misc_RNA (1)...(19): siRNA sense strand
gugcguuucucuauaaagc

SEQ ID NO: 1407341 - RNA, 19 nt, Homo sapiens
  misc_RNA (1)...(19): siRNA sense strand
gagaucaacaccagcuagu

SEQ ID NO: 1407342 - RNA, 19 nt, Homo sapiens
  misc_RNA (1)...(19): siRNA sense strand
auaccaaacuauggccauu

SEQ ID NO: 1407343 - RNA, 19 nt, Homo sapiens
  misc_RNA (1)...(19): siRNA sense strand
cagcuagugcguuucucua

SEQ ID NO: 1407344 - RNA, 19 nt, Homo sapiens
  misc_RNA (1)...(19): siRNA sense strand
gcguauagaacagauuuca

SEQ ID NO: 1407345 - RNA, 19 nt, Homo sapiens
  misc_RNA (1)...(19): siRNA sense strand
cagcuugguuuaucuugcu

SEQ ID NO: 1407346 - RNA, 19 nt, Homo sapiens
  misc_RNA (1)...(19): siRNA sense strand
ccaacaagaagagcagaug

SEQ ID NO: 1407347 - RNA, 19 nt, Homo sapiens
  misc_RNA (1)...(19): siRNA sense strand
ccgcuuaccaacaagaaga

SEQ ID NO: 1407348 - RNA, 19 nt, Homo sapiens
  misc_RNA (1)...(19): siRNA sense strand
cacgucucaucgauacuuu

SEQ ID NO: 1407349 - RNA, 19 nt, Homo sapiens
  misc_RNA (1)...(19): siRNA sense strand
auccacaaauaccaaacua

SEQ ID NO: 1407350 - RNA, 19 nt, Homo sapiens
  misc_RNA (1)...(19): siRNA sense strand
ucacgucucaucgauacuu

SEQ ID NO: 1407351 - RNA, 19 nt, Homo sapiens
  misc_RNA (1)...(19): siRNA sense strand
cgagguugugguauuggua

SEQ ID NO: 1407352 - RNA, 19 nt, Homo sapiens
  misc_RNA (1)...(19): siRNA sense strand
gugccuggaaugucuuuga

SEQ ID NO: 1407353 - RNA, 19 nt, Homo sapiens
  misc_RNA (1)...(19): siRNA sense strand
cuauccaacuuuucuguuu

SEQ ID NO: 1407354 - RNA, 19 nt, Homo sapiens
  misc_RNA (1)...(19): siRNA sense strand
gaaauagaauugcuggaau

SEQ ID NO: 1407355 - RNA, 19 nt, Homo sapiens
  misc_RNA (1)...(19): siRNA sense strand
gcuagugcguuucucuaua

SEQ ID NO: 1407356 - RNA, 19 nt, Homo sapiens
  misc_RNA (1)...(19): siRNA sense strand
gauacuuucucucucauug

SEQ ID NO: 1407357 - RNA, 19 nt, Homo sapiens
  misc_RNA (1)...(19): siRNA sense strand
cuagugcguuucucuauaa

SEQ ID NO: 1407358 - RNA, 19 nt, Homo sapiens
  misc_RNA (1)...(19): siRNA sense strand
gaaugucuuugacuuuguu

SEQ ID NO: 1407359 - RNA, 19 nt, Homo sapiens
  misc_RNA (1)...(19): siRNA sense strand
ggagguggcagcuugguuu

SEQ ID NO: 1407360 - RNA, 19 nt, Homo sapiens
  misc_RNA (1)...(19): siRNA sense strand
ccacaaauaccaaacuaug

SEQ ID NO: 1407361 - RNA, 19 nt, Homo sapiens
  misc_RNA (1)...(19): siRNA sense strand
caugugcgcugcagucaga

SEQ ID NO: 1407362 - RNA, 19 nt, Homo sapiens
  misc_RNA (1)...(19): siRNA sense strand
cauugaagcugaccuugga

SEQ ID NO: 1407363 - RNA, 19 nt, Homo sapiens
  misc_RNA (1)...(19): siRNA sense strand
ggaaugucuuugacuuugu

SEQ ID NO: 1407364 - RNA, 19 nt, Homo sapiens
  misc_RNA (1)...(19): siRNA sense strand
ugaguguccucucuucaaa

SEQ ID NO: 1407365 - RNA, 19 nt, Homo sapiens
  misc_RNA (1)...(19): siRNA sense strand
ccagaagaaacuuguauug

SEQ ID NO: 1407366 - RNA, 19 nt, Homo sapiens
  misc_RNA (1)...(19): siRNA sense strand
cuauaaagccucagcguau

SEQ ID NO: 1407367 - RNA, 19 nt, Homo sapiens
  misc_RNA (1)...(19): siRNA sense strand
guauagaacagauuucaca

SEQ ID NO: 1407368 - RNA, 19 nt, Homo sapiens
  misc_RNA (1)...(19): siRNA sense strand
gucuuugacuuuguuguua

SEQ ID NO: 1407369 - RNA, 19 nt, Homo sapiens
  misc_RNA (1)...(19): siRNA sense strand
aaauagaauugcuggaauc

SEQ ID NO: 1407370 - RNA, 19 nt, Homo sapiens
  misc_RNA (1)...(19): siRNA sense strand
ugaaauagaauugcuggaa

SEQ ID NO: 1407371 - RNA, 19 nt, Homo sapiens
  misc_RNA (1)...(19): siRNA sense strand
ggccaccucuuucuuugug

SEQ ID NO: 1407372 - RNA, 19 nt, Homo sapiens
  misc_RNA (1)...(19): siRNA sense strand
uggaaugucuuugacuuug

SEQ ID NO: 1407373 - RNA, 19 nt, Homo sapiens
  misc_RNA (1)...(19): siRNA sense strand
guucacgucucaucgauac

SEQ ID NO: 1407374 - RNA, 19 nt, Homo sapiens
  misc_RNA (1)...(19): siRNA sense strand
ggaauccacaaauaccaaa

SEQ ID NO: 1407375 - RNA, 19 nt, Homo sapiens
  misc_RNA (1)...(19): siRNA sense strand
gagguggcagcuugguuua

SEQ ID NO: 1407376 - RNA, 19 nt, Homo sapiens
  misc_RNA (1)...(19): siRNA sense strand
gguggcagcuugguuuauc

SEQ ID NO: 1407377 - RNA, 19 nt, Homo sapiens
  misc_RNA (1)...(19): siRNA sense strand
gccauucguucacgucuca

SEQ ID NO: 1407378 - RNA, 19 nt, Homo sapiens
  misc_RNA (1)...(19): siRNA sense strand
cagcguauagaacagauuu

SEQ ID NO: 1407379 - RNA, 19 nt, Homo sapiens
  misc_RNA (1)...(19): siRNA sense strand
ggaagagugccuggaaugu

SEQ ID NO: 1407380 - RNA, 19 nt, Homo sapiens
  misc_RNA (1)...(19): siRNA sense strand
gaagagugccuggaauguc

SEQ ID NO: 1407381 - RNA, 19 nt, Homo sapiens
  misc_RNA (1)...(19): siRNA sense strand
aaacuuguauugggagauc

SEQ ID NO: 1407382 - RNA, 19 nt, Homo sapiens
  misc_RNA (1)...(19): siRNA sense strand
ccuggaaugucuuugacuu

SEQ ID NO: 1407383 - RNA, 19 nt, Homo sapiens
  misc_RNA (1)...(19): siRNA sense strand
gaugguugaaauagaauug

SEQ ID NO: 1407384 - RNA, 19 nt, Homo sapiens
  misc_RNA (1)...(19): siRNA sense strand
accaaacuauggccauuga

SEQ ID NO: 1407385 - RNA, 19 nt, Homo sapiens
  misc_RNA (1)...(19): siRNA sense strand
uggagauccuucuuaagug

SEQ ID NO: 1407386 - RNA, 19 nt, Homo sapiens
  misc_RNA (1)...(19): siRNA sense strand
ucucaucgauacuuucucu

SEQ ID NO: 1407387 - RNA, 19 nt, Homo sapiens
  misc_RNA (1)...(19): siRNA sense strand
aagagugccuggaaugucu

SEQ ID NO: 1407388 - RNA, 19 nt, Homo sapiens
  misc_RNA (1)...(19): siRNA sense strand
uccuggagauccuucuuaa

SEQ ID NO: 1407389 - RNA, 19 nt, Homo sapiens
  misc_RNA (1)...(19): siRNA sense strand
aacaccagcuagugcguuu

SEQ ID NO: 1407390 - RNA, 19 nt, Homo sapiens
  misc_RNA (1)...(19): siRNA sense strand
caaacuauggccauugaag

SEQ ID NO: 1407391 - RNA, 19 nt, Homo sapiens
  misc_RNA (1)...(19): siRNA sense strand
gccagaagaaacuuguauu

SEQ ID NO: 1407392 - RNA, 19 nt, Homo sapiens
  misc_RNA (1)...(19): siRNA sense strand
gcacacuaucagggaguua

SEQ ID NO: 1407393 - RNA, 19 nt, Homo sapiens
  misc_RNA (1)...(19): siRNA sense strand
caucaucuuccuggucuuu

SEQ ID NO: 1407394 - RNA, 19 nt, Homo sapiens
  misc_RNA (1)...(19): siRNA sense strand
cuggagauccuucuuaagu

SEQ ID NO: 1407395 - RNA, 19 nt, Homo sapiens
  misc_RNA (1)...(19): siRNA sense strand
cagaagaaacuuguauugg

SEQ ID NO: 1407396 - RNA, 19 nt, Homo sapiens
  misc_RNA (1)...(19): siRNA sense strand
gugcguuucucuauaaagc

SEQ ID NO: 1407397 - RNA, 19 nt, Homo sapiens
  misc_RNA (1)...(19): siRNA sense strand
gagaucaacaccagcuagu

SEQ ID NO: 1407398 - RNA, 19 nt, Homo sapiens
  misc_RNA (1)...(19): siRNA sense strand
auaccaaacuauggccauu

SEQ ID NO: 1407399 - RNA, 19 nt, Homo sapiens
  misc_RNA (1)...(19): siRNA sense strand
cagcuagugcguuucucua

SEQ ID NO: 1407400 - RNA, 19 nt, Homo sapiens
  misc_RNA (1)...(19): siRNA sense strand
gcguauagaacagauuuca

SEQ ID NO: 1407401 - RNA, 19 nt, Homo sapiens
  misc_RNA (1)...(19): siRNA sense strand
ccaacaagaagagcagaug

SEQ ID NO: 1407402 - RNA, 19 nt, Homo sapiens
  misc_RNA (1)...(19): siRNA sense strand
cagcuugguuuaucuugcu

SEQ ID NO: 1407403 - RNA, 19 nt, Homo sapiens
  misc_RNA (1)...(19): siRNA sense strand
ccgcuuaccaacaagaaga

SEQ ID NO: 1407404 - RNA, 19 nt, Homo sapiens
  misc_RNA (1)...(19): siRNA sense strand
cacgucucaucgauacuuu

SEQ ID NO: 1407405 - RNA, 19 nt, Homo sapiens
  misc_RNA (1)...(19): siRNA sense strand
auccacaaauaccaaacua

SEQ ID NO: 1407406 - RNA, 19 nt, Homo sapiens
  misc_RNA (1)...(19): siRNA sense strand
ucacgucucaucgauacuu

SEQ ID NO: 1407407 - RNA, 19 nt, Homo sapiens
  misc_RNA (1)...(19): siRNA sense strand
gugccuggaaugucuuuga

SEQ ID NO: 1407408 - RNA, 19 nt, Homo sapiens
  misc_RNA (1)...(19): siRNA sense strand
cuauccaacuuuucuguuu

SEQ ID NO: 1407409 - RNA, 19 nt, Homo sapiens
  misc_RNA (1)...(19): siRNA sense strand
gaaagagcaugaugacaua

SEQ ID NO: 1407410 - RNA, 19 nt, Homo sapiens
  misc_RNA (1)...(19): siRNA sense strand
gaacagcucugaaagcauu

SEQ ID NO: 1407411 - RNA, 19 nt, Homo sapiens
  misc_RNA (1)...(19): siRNA sense strand
gagaagauguugaaaugua

SEQ ID NO: 1407412 - RNA, 19 nt, Homo sapiens
  misc_RNA (1)...(19): siRNA sense strand
gaggacagcuugaggguua

SEQ ID NO: 1407413 - RNA, 19 nt, Homo sapiens
  misc_RNA (1)...(19): siRNA sense strand
gaaacugaauggaagaaua

SEQ ID NO: 1407414 - RNA, 19 nt, Homo sapiens
  misc_RNA (1)...(19): siRNA sense strand
aaagaaggcuguaccguua

SEQ ID NO: 1407415 - RNA, 19 nt, Homo sapiens
  misc_RNA (1)...(19): siRNA sense strand
aaacacagcucuggaauaa

SEQ ID NO: 1407416 - RNA, 19 nt, Homo sapiens
  misc_RNA (1)...(19): siRNA sense strand
gaaauagaacuucgaauga

SEQ ID NO: 1407417 - RNA, 19 nt, Homo sapiens
  misc_RNA (1)...(19): siRNA sense strand
gcaaugauguggucuuguu

SEQ ID NO: 1407418 - RNA, 19 nt, Homo sapiens
  misc_RNA (1)...(19): siRNA sense strand
gaccauauccuuaaaugua

SEQ ID NO: 1407419 - RNA, 19 nt, Homo sapiens
  misc_RNA (1)...(19): siRNA sense strand
gcaaugggaugcagcuauu

SEQ ID NO: 1407420 - RNA, 19 nt, Homo sapiens
  misc_RNA (1)...(19): siRNA sense strand
cagcuuaucuugcaaguga

SEQ ID NO: 1407421 - RNA, 19 nt, Homo sapiens
  misc_RNA (1)...(19): siRNA sense strand
gaaguuaggcgauuagaga

SEQ ID NO: 1407422 - RNA, 19 nt, Homo sapiens
  misc_RNA (1)...(19): siRNA sense strand
gacaaaggcauucaucaua

SEQ ID NO: 1407423 - RNA, 19 nt, Homo sapiens
  misc_RNA (1)...(19): siRNA sense strand
gauccaagcuugauuaagg

SEQ ID NO: 1407424 - RNA, 19 nt, Homo sapiens
  misc_RNA (1)...(19): siRNA sense strand
ggaagaaaguauuaaacga

SEQ ID NO: 1407425 - RNA, 19 nt, Homo sapiens
  misc_RNA (1)...(19): siRNA sense strand
aaacagcucuaaaccauug

SEQ ID NO: 1407426 - RNA, 19 nt, Homo sapiens
  misc_RNA (1)...(19): siRNA sense strand
ugacauguauucugaaguu

SEQ ID NO: 1407427 - RNA, 19 nt, Homo sapiens
  misc_RNA (1)...(19): siRNA sense strand
gaagaccucaagaaaguua

SEQ ID NO: 1407428 - RNA, 19 nt, Homo sapiens
  misc_RNA (1)...(19): siRNA sense strand
gcugaacgcaguauuguua

SEQ ID NO: 1407429 - RNA, 19 nt, Homo sapiens
  misc_RNA (1)...(19): siRNA sense strand
gauggugcuuguugacuua

SEQ ID NO: 1407430 - RNA, 19 nt, Homo sapiens
  misc_RNA (1)...(19): siRNA sense strand
ggacauccuuucagcaguu

SEQ ID NO: 1407431 - RNA, 19 nt, Homo sapiens
  misc_RNA (1)...(19): siRNA sense strand
gaaacacagcucuggaaua

SEQ ID NO: 1407432 - RNA, 19 nt, Homo sapiens
  misc_RNA (1)...(19): siRNA sense strand
ggaaauccuucaacaaucu

SEQ ID NO: 1407433 - RNA, 19 nt, Homo sapiens
  misc_RNA (1)...(19): siRNA sense strand
gcagauaauugaaggaaag

SEQ ID NO: 1407434 - RNA, 19 nt, Homo sapiens
  misc_RNA (1)...(19): siRNA sense strand
ugaaagcauugaagcuaua

SEQ ID NO: 1407435 - RNA, 19 nt, Homo sapiens
  misc_RNA (1)...(19): siRNA sense strand
ggaaagagcaugaugacau

SEQ ID NO: 1407436 - RNA, 19 nt, Homo sapiens
  misc_RNA (1)...(19): siRNA sense strand
ucacgaagcauuuaucauu

SEQ ID NO: 1407437 - RNA, 19 nt, Homo sapiens
  misc_RNA (1)...(19): siRNA sense strand
gcaguucucuucucugaca

SEQ ID NO: 1407438 - RNA, 19 nt, Homo sapiens
  misc_RNA (1)...(19): siRNA sense strand
uuaaagagguauuggaaga

SEQ ID NO: 1407439 - RNA, 19 nt, Homo sapiens
  misc_RNA (1)...(19): siRNA sense strand
aaacugaaauucucuccaa

SEQ ID NO: 1407440 - RNA, 19 nt, Homo sapiens
  misc_RNA (1)...(19): siRNA sense strand
ggcaacaacuuacaaauac

SEQ ID NO: 1407441 - RNA, 19 nt, Homo sapiens
  misc_RNA (1)...(19): siRNA sense strand
gaagaccgauccauaucug

SEQ ID NO: 1407442 - RNA, 19 nt, Homo sapiens
  misc_RNA (1)...(19): siRNA sense strand
ugaccggaaugaacuauuu

SEQ ID NO: 1407443 - RNA, 19 nt, Homo sapiens
  misc_RNA (1)...(19): siRNA sense strand
caaugaaagcuuuagguua

SEQ ID NO: 1407444 - RNA, 19 nt, Homo sapiens
  misc_RNA (1)...(19): siRNA sense strand
ggaccuuagugaauauaaa

SEQ ID NO: 1407445 - RNA, 19 nt, Homo sapiens
  misc_RNA (1)...(19): siRNA sense strand
ggaaauugaugaguauauc

SEQ ID NO: 1407446 - RNA, 19 nt, Homo sapiens
  misc_RNA (1)...(19): siRNA sense strand
cggaagaccucaagaaagu

SEQ ID NO: 1407447 - RNA, 19 nt, Homo sapiens
  misc_RNA (1)...(19): siRNA sense strand
gcaucaaguuuauagaaga

SEQ ID NO: 1407448 - RNA, 19 nt, Homo sapiens
  misc_RNA (1)...(19): siRNA sense strand
gcacccagcuuaucuugca

SEQ ID NO: 1407449 - RNA, 19 nt, Homo sapiens
  misc_RNA (1)...(19): siRNA sense strand
ggaagaaucggacccaaga

SEQ ID NO: 1407450 - RNA, 19 nt, Homo sapiens
  misc_RNA (1)...(19): siRNA sense strand
ugaaauccuugaugaaguu

SEQ ID NO: 1407451 - RNA, 19 nt, Homo sapiens
  misc_RNA (1)...(19): siRNA sense strand
gcugauaguuucaaagcaa

SEQ ID NO: 1407452 - RNA, 19 nt, Homo sapiens
  misc_RNA (1)...(19): siRNA sense strand
gagaccauauccuuaaaug

SEQ ID NO: 1407453 - RNA, 19 nt, Homo sapiens
  misc_RNA (1)...(19): siRNA sense strand
uaaagaggccguuaaggaa

SEQ ID NO: 1407454 - RNA, 19 nt, Homo sapiens
  misc_RNA (1)...(19): siRNA sense strand
guagauccaagcuugauua

SEQ ID NO: 1407455 - RNA, 19 nt, Homo sapiens
  misc_RNA (1)...(19): siRNA sense strand
uggagaagauguugaaaug

SEQ ID NO: 1407456 - RNA, 19 nt, Homo sapiens
  misc_RNA (1)...(19): siRNA sense strand
cagcaguucucuucucuga

SEQ ID NO: 1407457 - RNA, 19 nt, Homo sapiens
  misc_RNA (1)...(19): siRNA sense strand
gaugacacguucuccaguu

SEQ ID NO: 1407458 - RNA, 19 nt, Homo sapiens
  misc_RNA (1)...(19): siRNA sense strand
caaaggcauucaucauaga

SEQ ID NO: 1407459 - RNA, 19 nt, Homo sapiens
  misc_RNA (1)...(19): siRNA sense strand
gauaugauaccggaccuua

SEQ ID NO: 1407460 - RNA, 19 nt, Homo sapiens
  misc_RNA (1)...(19): siRNA sense strand
gggaugcagcuauuuauuu

SEQ ID NO: 1407461 - RNA, 19 nt, Homo sapiens
  misc_RNA (1)...(19): siRNA sense strand
ccaagugacuacaagaaau

SEQ ID NO: 1407462 - RNA, 19 nt, Homo sapiens
  misc_RNA (1)...(19): siRNA sense strand
ugauugacauguauucuga

SEQ ID NO: 1407463 - RNA, 19 nt, Homo sapiens
  misc_RNA (1)...(19): siRNA sense strand
uaauaaagcaguagagguu

SEQ ID NO: 1407464 - RNA, 19 nt, Homo sapiens
  misc_RNA (1)...(19): siRNA sense strand
cauugaagcuauaagagaa

SEQ ID NO: 1407465 - RNA, 19 nt, Homo sapiens
  misc_RNA (1)...(19): siRNA sense strand
ggauucagcagauaauuga

SEQ ID NO: 1407466 - RNA, 19 nt, Homo sapiens
  misc_RNA (1)...(19): siRNA sense strand
aaacuucgcuaucucauac

SEQ ID NO: 1407467 - RNA, 19 nt, Homo sapiens
  misc_RNA (1)...(19): siRNA sense strand
acaaugaaaccaagaauga

SEQ ID NO: 1407468 - RNA, 19 nt, Homo sapiens
  misc_RNA (1)...(19): siRNA sense strand
caaauggacccucauggaa

SEQ ID NO: 1407469 - RNA, 19 nt, Homo sapiens
  misc_RNA (1)...(19): siRNA sense strand
ugaaauagaacuucgaaug

SEQ ID NO: 1407470 - RNA, 19 nt, Homo sapiens
  misc_RNA (1)...(19): siRNA sense strand
uaccggaccuuagugaaua

SEQ ID NO: 1407471 - RNA, 19 nt, Homo sapiens
  misc_RNA (1)...(19): siRNA sense strand
gggaacagcucugaaagca

SEQ ID NO: 1407472 - RNA, 19 nt, Homo sapiens
  misc_RNA (1)...(19): siRNA sense strand
ugacaaaccuuccuuuacg

SEQ ID NO: 1407473 - RNA, 19 nt, Homo sapiens
  misc_RNA (1)...(19): siRNA sense strand
gaacaacaggcugauaguu

SEQ ID NO: 1407474 - RNA, 19 nt, Homo sapiens
  misc_RNA (1)...(19): siRNA sense strand
gauguucucucugauuaug

SEQ ID NO: 1407475 - RNA, 19 nt, Homo sapiens
  misc_RNA (1)...(19): siRNA sense strand
gcauuuaucauucacauca

SEQ ID NO: 1407476 - RNA, 19 nt, Homo sapiens
  misc_RNA (1)...(19): siRNA sense strand
ggaugcagcuauuuauuuu

SEQ ID NO: 1407477 - RNA, 19 nt, Homo sapiens
  misc_RNA (1)...(19): siRNA sense strand
gaacuugaccggaaugaac

SEQ ID NO: 1407478 - RNA, 19 nt, Homo sapiens
  misc_RNA (1)...(19): siRNA sense strand
ggauggugcuuguugacuu

SEQ ID NO: 1407479 - RNA, 19 nt, Homo sapiens
  misc_RNA (1)...(19): siRNA sense strand
acaaaggcauucaucauag

SEQ ID NO: 1407480 - RNA, 19 nt, Homo sapiens
  misc_RNA (1)...(19): siRNA sense strand
acacucaguugaaguauca

SEQ ID NO: 1407481 - RNA, 19 nt, Homo sapiens
  misc_RNA (1)...(19): siRNA sense strand
gaaagugacaagcauuuua

SEQ ID NO: 1407482 - RNA, 19 nt, Homo sapiens
  misc_RNA (1)...(19): siRNA sense strand
gacauugugugggaaauug

SEQ ID NO: 1407483 - RNA, 19 nt, Homo sapiens
  misc_RNA (1)...(19): siRNA sense strand
ggaaguuuaccacuacaaa

SEQ ID NO: 1407484 - RNA, 19 nt, Homo sapiens
  misc_RNA (1)...(19): siRNA sense strand
gcucgaauauucccaagag

SEQ ID NO: 1407485 - RNA, 19 nt, Homo sapiens
  misc_RNA (1)...(19): siRNA sense strand
gaaagaugacaaaggcauu

SEQ ID NO: 1407486 - RNA, 19 nt, Homo sapiens
  misc_RNA (1)...(19): siRNA sense strand
uugauguucucucugauua

SEQ ID NO: 1407487 - RNA, 19 nt, Homo sapiens
  misc_RNA (1)...(19): siRNA sense strand
aaagagguauuggaagauu

SEQ ID NO: 1407488 - RNA, 19 nt, Homo sapiens
  misc_RNA (1)...(19): siRNA sense strand
gggagacccuacaagaaga

SEQ ID NO: 1407489 - RNA, 19 nt, Homo sapiens
  misc_RNA (1)...(19): siRNA sense strand
gaauccuaaugccaucaua

SEQ ID NO: 1407490 - RNA, 19 nt, Homo sapiens
  misc_RNA (1)...(19): siRNA sense strand
agaagaucuugcagcauua

SEQ ID NO: 1407491 - RNA, 19 nt, Homo sapiens
  misc_RNA (1)...(19): siRNA sense strand
caucauagaaagcuuaaga

SEQ ID NO: 1407492 - RNA, 19 nt, Homo sapiens
  misc_RNA (1)...(19): siRNA sense strand
gaagaauuuucccgcuuua

SEQ ID NO: 1407493 - RNA, 19 nt, Homo sapiens
  misc_RNA (1)...(19): siRNA sense strand
caguggauaucaagcuuaa

SEQ ID NO: 1407494 - RNA, 19 nt, Homo sapiens
  misc_RNA (1)...(19): siRNA sense strand
gcauugaagcuauaagaga

SEQ ID NO: 1407495 - RNA, 19 nt, Homo sapiens
  misc_RNA (1)...(19): siRNA sense strand
gaaagcucuucccaaugaa

SEQ ID NO: 1407496 - RNA, 19 nt, Homo sapiens
  misc_RNA (1)...(19): siRNA sense strand
ugacuuaccaggugugauu

SEQ ID NO: 1407497 - RNA, 19 nt, Homo sapiens
  misc_RNA (1)...(19): siRNA sense strand
ggaaaugauugcccaagcu

SEQ ID NO: 1407498 - RNA, 19 nt, Homo sapiens
  misc_RNA (1)...(19): siRNA sense strand
acacagcucuggaauaaaa

SEQ ID NO: 1407499 - RNA, 19 nt, Homo sapiens
  misc_RNA (1)...(19): siRNA sense strand
ugugggaaauugaugagua

SEQ ID NO: 1407500 - RNA, 19 nt, Homo sapiens
  misc_RNA (1)...(19): siRNA sense strand
cuaaaccauuguaaccuuu

SEQ ID NO: 1407501 - RNA, 19 nt, Homo sapiens
  misc_RNA (1)...(19): siRNA sense strand
agagcaugaugacauauuu

SEQ ID NO: 1407502 - RNA, 19 nt, Homo sapiens
  misc_RNA (1)...(19): siRNA sense strand
caacucaugugauugaaaa

SEQ ID NO: 1407503 - RNA, 19 nt, Homo sapiens
  misc_RNA (1)...(19): siRNA sense strand
caagugacuacaagaaauu

SEQ ID NO: 1407504 - RNA, 19 nt, Homo sapiens
  misc_RNA (1)...(19): siRNA sense strand
gcuaaaggcacaccaagug

SEQ ID NO: 1407505 - RNA, 19 nt, Homo sapiens
  misc_RNA (1)...(19): siRNA sense strand
gagaauaugaagaagaguu

SEQ ID NO: 1407506 - RNA, 19 nt, Homo sapiens
  misc_RNA (1)...(19): siRNA sense strand
gcaguauuguuacagacuu

SEQ ID NO: 1407507 - RNA, 19 nt, Homo sapiens
  misc_RNA (1)...(19): siRNA sense strand
uggaaagacuaguguguug

SEQ ID NO: 1407508 - RNA, 19 nt, Homo sapiens
  misc_RNA (1)...(19): siRNA sense strand
ggagaacaaagaauugaga

SEQ ID NO: 1407509 - RNA, 19 nt, Homo sapiens
  misc_RNA (1)...(19): siRNA sense strand
gaaagagcaugaugacaua

SEQ ID NO: 1407510 - RNA, 19 nt, Homo sapiens
  misc_RNA (1)...(19): siRNA sense strand
gaacagcucugaaagcauu

SEQ ID NO: 1407511 - RNA, 19 nt, Homo sapiens
  misc_RNA (1)...(19): siRNA sense strand
gagaagauguugaaaugua

SEQ ID NO: 1407512 - RNA, 19 nt, Homo sapiens
  misc_RNA (1)...(19): siRNA sense strand
gaggacagcuugaggguua

SEQ ID NO: 1407513 - RNA, 19 nt, Homo sapiens
  misc_RNA (1)...(19): siRNA sense strand
gaaacugaauggaagaaua

SEQ ID NO: 1407514 - RNA, 19 nt, Homo sapiens
  misc_RNA (1)...(19): siRNA sense strand
aaagaaggcuguaccguua

SEQ ID NO: 1407515 - RNA, 19 nt, Homo sapiens
  misc_RNA (1)...(19): siRNA sense strand
aaacacagcucuggaauaa

SEQ ID NO: 1407516 - RNA, 19 nt, Homo sapiens
  misc_RNA (1)...(19): siRNA sense strand
gaaauagaacuucgaauga

SEQ ID NO: 1407517 - RNA, 19 nt, Homo sapiens
  misc_RNA (1)...(19): siRNA sense strand
gcaaugauguggucuuguu

SEQ ID NO: 1407518 - RNA, 19 nt, Homo sapiens
  misc_RNA (1)...(19): siRNA sense strand
gaccauauccuuaaaugua

SEQ ID NO: 1407519 - RNA, 19 nt, Homo sapiens
  misc_RNA (1)...(19): siRNA sense strand
gcaaugggaugcagcuauu

SEQ ID NO: 1407520 - RNA, 19 nt, Homo sapiens
  misc_RNA (1)...(19): siRNA sense strand
cagcuuaucuugcaaguga

SEQ ID NO: 1407521 - RNA, 19 nt, Homo sapiens
  misc_RNA (1)...(19): siRNA sense strand
gaaguuaggcgauuagaga

SEQ ID NO: 1407522 - RNA, 19 nt, Homo sapiens
  misc_RNA (1)...(19): siRNA sense strand
gacaaaggcauucaucaua

SEQ ID NO: 1407523 - RNA, 19 nt, Homo sapiens
  misc_RNA (1)...(19): siRNA sense strand
gauccaagcuugauuaagg

SEQ ID NO: 1407524 - RNA, 19 nt, Homo sapiens
  misc_RNA (1)...(19): siRNA sense strand
ggaagaaaguauuaaacga

SEQ ID NO: 1407525 - RNA, 19 nt, Homo sapiens
  misc_RNA (1)...(19): siRNA sense strand
aaacagcucuaaaccauug

SEQ ID NO: 1407526 - RNA, 19 nt, Homo sapiens
  misc_RNA (1)...(19): siRNA sense strand
ugacauguauucugaaguu

SEQ ID NO: 1407527 - RNA, 19 nt, Homo sapiens
  misc_RNA (1)...(19): siRNA sense strand
gaagaccucaagaaaguua

SEQ ID NO: 1407528 - RNA, 19 nt, Homo sapiens
  misc_RNA (1)...(19): siRNA sense strand
gcugaacgcaguauuguua

SEQ ID NO: 1407529 - RNA, 19 nt, Homo sapiens
  misc_RNA (1)...(19): siRNA sense strand
gauggugcuuguugacuua

SEQ ID NO: 1407530 - RNA, 19 nt, Homo sapiens
  misc_RNA (1)...(19): siRNA sense strand
ggacauccuuucagcaguu

SEQ ID NO: 1407531 - RNA, 19 nt, Homo sapiens
  misc_RNA (1)...(19): siRNA sense strand
gaaacacagcucuggaaua

SEQ ID NO: 1407532 - RNA, 19 nt, Homo sapiens
  misc_RNA (1)...(19): siRNA sense strand
ggaaauccuucaacaaucu

SEQ ID NO: 1407533 - RNA, 19 nt, Homo sapiens
  misc_RNA (1)...(19): siRNA sense strand
gcagauaauugaaggaaag

SEQ ID NO: 1407534 - RNA, 19 nt, Homo sapiens
  misc_RNA (1)...(19): siRNA sense strand
ugaaagcauugaagcuaua

SEQ ID NO: 1407535 - RNA, 19 nt, Homo sapiens
  misc_RNA (1)...(19): siRNA sense strand
ggaaagagcaugaugacau

SEQ ID NO: 1407536 - RNA, 19 nt, Homo sapiens
  misc_RNA (1)...(19): siRNA sense strand
ucacgaagcauuuaucauu

SEQ ID NO: 1407537 - RNA, 19 nt, Homo sapiens
  misc_RNA (1)...(19): siRNA sense strand
gcaguucucuucucugaca

SEQ ID NO: 1407538 - RNA, 19 nt, Homo sapiens
  misc_RNA (1)...(19): siRNA sense strand
uuaaagagguauuggaaga

SEQ ID NO: 1407539 - RNA, 19 nt, Homo sapiens
  misc_RNA (1)...(19): siRNA sense strand
aaacugaaauucucuccaa

SEQ ID NO: 1407540 - RNA, 19 nt, Homo sapiens
  misc_RNA (1)...(19): siRNA sense strand
ggcaacaacuuacaaauac

SEQ ID NO: 1407541 - RNA, 19 nt, Homo sapiens
  misc_RNA (1)...(19): siRNA sense strand
gaagaccgauccauaucug

SEQ ID NO: 1407542 - RNA, 19 nt, Homo sapiens
  misc_RNA (1)...(19): siRNA sense strand
ugaccggaaugaacuauuu

SEQ ID NO: 1407543 - RNA, 19 nt, Homo sapiens
  misc_RNA (1)...(19): siRNA sense strand
caaugaaagcuuuagguua

SEQ ID NO: 1407544 - RNA, 19 nt, Homo sapiens
  misc_RNA (1)...(19): siRNA sense strand
ggaccuuagugaauauaaa

SEQ ID NO: 1407545 - RNA, 19 nt, Homo sapiens
  misc_RNA (1)...(19): siRNA sense strand
ggaaauugaugaguauauc

SEQ ID NO: 1407546 - RNA, 19 nt, Homo sapiens
  misc_RNA (1)...(19): siRNA sense strand
cggaagaccucaagaaagu

SEQ ID NO: 1407547 - RNA, 19 nt, Homo sapiens
  misc_RNA (1)...(19): siRNA sense strand
gcaucaaguuuauagaaga

SEQ ID NO: 1407548 - RNA, 19 nt, Homo sapiens
  misc_RNA (1)...(19): siRNA sense strand
gcacccagcuuaucuugca

SEQ ID NO: 1407549 - RNA, 19 nt, Homo sapiens
  misc_RNA (1)...(19): siRNA sense strand
ggaagaaucggacccaaga

SEQ ID NO: 1407550 - RNA, 19 nt, Homo sapiens
  misc_RNA (1)...(19): siRNA sense strand
ugaaauccuugaugaaguu

SEQ ID NO: 1407551 - RNA, 19 nt, Homo sapiens
  misc_RNA (1)...(19): siRNA sense strand
gcugauaguuucaaagcaa

SEQ ID NO: 1407552 - RNA, 19 nt, Homo sapiens
  misc_RNA (1)...(19): siRNA sense strand
gagaccauauccuuaaaug

SEQ ID NO: 1407553 - RNA, 19 nt, Homo sapiens
  misc_RNA (1)...(19): siRNA sense strand
uaaagaggccguuaaggaa

SEQ ID NO: 1407554 - RNA, 19 nt, Homo sapiens
  misc_RNA (1)...(19): siRNA sense strand
guagauccaagcuugauua

SEQ ID NO: 1407555 - RNA, 19 nt, Homo sapiens
  misc_RNA (1)...(19): siRNA sense strand
uggagaagauguugaaaug

SEQ ID NO: 1407556 - RNA, 19 nt, Homo sapiens
  misc_RNA (1)...(19): siRNA sense strand
cagcaguucucuucucuga

SEQ ID NO: 1407557 - RNA, 19 nt, Homo sapiens
  misc_RNA (1)...(19): siRNA sense strand
gaugacacguucuccaguu

SEQ ID NO: 1407558 - RNA, 19 nt, Homo sapiens
  misc_RNA (1)...(19): siRNA sense strand
caaaggcauucaucauaga

SEQ ID NO: 1407559 - RNA, 19 nt, Homo sapiens
  misc_RNA (1)...(19): siRNA sense strand
gauaugauaccggaccuua

SEQ ID NO: 1407560 - RNA, 19 nt, Homo sapiens
  misc_RNA (1)...(19): siRNA sense strand
gggaugcagcuauuuauuu

SEQ ID NO: 1407561 - RNA, 19 nt, Homo sapiens
  misc_RNA (1)...(19): siRNA sense strand
ccaagugacuacaagaaau

SEQ ID NO: 1407562 - RNA, 19 nt, Homo sapiens
  misc_RNA (1)...(19): siRNA sense strand
ugauugacauguauucuga

SEQ ID NO: 1407563 - RNA, 19 nt, Homo sapiens
  misc_RNA (1)...(19): siRNA sense strand
uaauaaagcaguagagguu

SEQ ID NO: 1407564 - RNA, 19 nt, Homo sapiens
  misc_RNA (1)...(19): siRNA sense strand
cauugaagcuauaagagaa

SEQ ID NO: 1407565 - RNA, 19 nt, Homo sapiens
  misc_RNA (1)...(19): siRNA sense strand
ggauucagcagauaauuga

SEQ ID NO: 1407566 - RNA, 19 nt, Homo sapiens
  misc_RNA (1)...(19): siRNA sense strand
aaacuucgcuaucucauac

SEQ ID NO: 1407567 - RNA, 19 nt, Homo sapiens
  misc_RNA (1)...(19): siRNA sense strand
acaaugaaaccaagaauga

SEQ ID NO: 1407568 - RNA, 19 nt, Homo sapiens
  misc_RNA (1)...(19): siRNA sense strand
caaauggacccucauggaa

SEQ ID NO: 1407569 - RNA, 19 nt, Homo sapiens
  misc_RNA (1)...(19): siRNA sense strand
ugaaauagaacuucgaaug

SEQ ID NO: 1407570 - RNA, 19 nt, Homo sapiens
  misc_RNA (1)...(19): siRNA sense strand
uaccggaccuuagugaaua

SEQ ID NO: 1407571 - RNA, 19 nt, Homo sapiens
  misc_RNA (1)...(19): siRNA sense strand
gggaacagcucugaaagca

SEQ ID NO: 1407572 - RNA, 19 nt, Homo sapiens
  misc_RNA (1)...(19): siRNA sense strand
ugacaaaccuuccuuuacg

SEQ ID NO: 1407573 - RNA, 19 nt, Homo sapiens
  misc_RNA (1)...(19): siRNA sense strand
gaacaacaggcugauaguu

SEQ ID NO: 1407574 - RNA, 19 nt, Homo sapiens
  misc_RNA (1)...(19): siRNA sense strand
gauguucucucugauuaug

SEQ ID NO: 1407575 - RNA, 19 nt, Homo sapiens
  misc_RNA (1)...(19): siRNA sense strand
gcauuuaucauucacauca

SEQ ID NO: 1407576 - RNA, 19 nt, Homo sapiens
  misc_RNA (1)...(19): siRNA sense strand
ggaugcagcuauuuauuuu

SEQ ID NO: 1407577 - RNA, 19 nt, Homo sapiens
  misc_RNA (1)...(19): siRNA sense strand
gaacuugaccggaaugaac

SEQ ID NO: 1407578 - RNA, 19 nt, Homo sapiens
  misc_RNA (1)...(19): siRNA sense strand
ggauggugcuuguugacuu

SEQ ID NO: 1407579 - RNA, 19 nt, Homo sapiens
  misc_RNA (1)...(19): siRNA sense strand
acaaaggcauucaucauag

SEQ ID NO: 1407580 - RNA, 19 nt, Homo sapiens
  misc_RNA (1)...(19): siRNA sense strand
acacucaguugaaguauca

SEQ ID NO: 1407581 - RNA, 19 nt, Homo sapiens
  misc_RNA (1)...(19): siRNA sense strand
gaaagugacaagcauuuua

SEQ ID NO: 1407582 - RNA, 19 nt, Homo sapiens
  misc_RNA (1)...(19): siRNA sense strand
gacauugugugggaaauug

SEQ ID NO: 1407583 - RNA, 19 nt, Homo sapiens
  misc_RNA (1)...(19): siRNA sense strand
ggaaguuuaccacuacaaa

SEQ ID NO: 1407584 - RNA, 19 nt, Homo sapiens
  misc_RNA (1)...(19): siRNA sense strand
gcucgaauauucccaagag

SEQ ID NO: 1407585 - RNA, 19 nt, Homo sapiens
  misc_RNA (1)...(19): siRNA sense strand
gaaagaugacaaaggcauu

SEQ ID NO: 1407586 - RNA, 19 nt, Homo sapiens
  misc_RNA (1)...(19): siRNA sense strand
uugauguucucucugauua

SEQ ID NO: 1407587 - RNA, 19 nt, Homo sapiens
  misc_RNA (1)...(19): siRNA sense strand
aaagagguauuggaagauu

SEQ ID NO: 1407588 - RNA, 19 nt, Homo sapiens
  misc_RNA (1)...(19): siRNA sense strand
gggagacccuacaagaaga

SEQ ID NO: 1407589 - RNA, 19 nt, Homo sapiens
  misc_RNA (1)...(19): siRNA sense strand
gaauccuaaugccaucaua

SEQ ID NO: 1407590 - RNA, 19 nt, Homo sapiens
  misc_RNA (1)...(19): siRNA sense strand
agaagaucuugcagcauua

SEQ ID NO: 1407591 - RNA, 19 nt, Homo sapiens
  misc_RNA (1)...(19): siRNA sense strand
caucauagaaagcuuaaga

SEQ ID NO: 1407592 - RNA, 19 nt, Homo sapiens
  misc_RNA (1)...(19): siRNA sense strand
gaagaauuuucccgcuuua

SEQ ID NO: 1407593 - RNA, 19 nt, Homo sapiens
  misc_RNA (1)...(19): siRNA sense strand
caguggauaucaagcuuaa

SEQ ID NO: 1407594 - RNA, 19 nt, Homo sapiens
  misc_RNA (1)...(19): siRNA sense strand
gcauugaagcuauaagaga

SEQ ID NO: 1407595 - RNA, 19 nt, Homo sapiens
  misc_RNA (1)...(19): siRNA sense strand
gaaagcucuucccaaugaa

SEQ ID NO: 1407596 - RNA, 19 nt, Homo sapiens
  misc_RNA (1)...(19): siRNA sense strand
ugacuuaccaggugugauu

SEQ ID NO: 1407597 - RNA, 19 nt, Homo sapiens
  misc_RNA (1)...(19): siRNA sense strand
ggaaaugauugcccaagcu

SEQ ID NO: 1407598 - RNA, 19 nt, Homo sapiens
  misc_RNA (1)...(19): siRNA sense strand
acacagcucuggaauaaaa

SEQ ID NO: 1407599 - RNA, 19 nt, Homo sapiens
  misc_RNA (1)...(19): siRNA sense strand
ugugggaaauugaugagua

SEQ ID NO: 1407600 - RNA, 19 nt, Homo sapiens
  misc_RNA (1)...(19): siRNA sense strand
cuaaaccauuguaaccuuu

SEQ ID NO: 1407601 - RNA, 19 nt, Homo sapiens
  misc_RNA (1)...(19): siRNA sense strand
agagcaugaugacauauuu

SEQ ID NO: 1407602 - RNA, 19 nt, Homo sapiens
  misc_RNA (1)...(19): siRNA sense strand
caacucaugugauugaaaa

SEQ ID NO: 1407603 - RNA, 19 nt, Homo sapiens
  misc_RNA (1)...(19): siRNA sense strand
caagugacuacaagaaauu

SEQ ID NO: 1407604 - RNA, 19 nt, Homo sapiens
  misc_RNA (1)...(19): siRNA sense strand
gcuaaaggcacaccaagug

SEQ ID NO: 1407605 - RNA, 19 nt, Homo sapiens
  misc_RNA (1)...(19): siRNA sense strand
gagaauaugaagaagaguu

SEQ ID NO: 1407606 - RNA, 19 nt, Homo sapiens
  misc_RNA (1)...(19): siRNA sense strand
gcaguauuguuacagacuu

SEQ ID NO: 1407607 - RNA, 19 nt, Homo sapiens
  misc_RNA (1)...(19): siRNA sense strand
uggaaagacuaguguguug

SEQ ID NO: 1407608 - RNA, 19 nt, Homo sapiens
  misc_RNA (1)...(19): siRNA sense strand
ggagaacaaagaauugaga

SEQ ID NO: 1407609 - RNA, 19 nt, Homo sapiens
  misc_RNA (1)...(19): siRNA sense strand
gaaagagcaugaugacaua

SEQ ID NO: 1407610 - RNA, 19 nt, Homo sapiens
  misc_RNA (1)...(19): siRNA sense strand
gaacagcucugaaagcauu

SEQ ID NO: 1407611 - RNA, 19 nt, Homo sapiens
  misc_RNA (1)...(19): siRNA sense strand
gagaagauguugaaaugua

SEQ ID NO: 1407612 - RNA, 19 nt, Homo sapiens
  misc_RNA (1)...(19): siRNA sense strand
gaggacagcuugaggguua

SEQ ID NO: 1407613 - RNA, 19 nt, Homo sapiens
  misc_RNA (1)...(19): siRNA sense strand
gaaacugaauggaagaaua

SEQ ID NO: 1407614 - RNA, 19 nt, Homo sapiens
  misc_RNA (1)...(19): siRNA sense strand
aaagaaggcuguaccguua

SEQ ID NO: 1407615 - RNA, 19 nt, Homo sapiens
  misc_RNA (1)...(19): siRNA sense strand
aaacacagcucuggaauaa

SEQ ID NO: 1407616 - RNA, 19 nt, Homo sapiens
  misc_RNA (1)...(19): siRNA sense strand
gaaauagaacuucgaauga

SEQ ID NO: 1407617 - RNA, 19 nt, Homo sapiens
  misc_RNA (1)...(19): siRNA sense strand
gcaaugauguggucuuguu

SEQ ID NO: 1407618 - RNA, 19 nt, Homo sapiens
  misc_RNA (1)...(19): siRNA sense strand
gaccauauccuuaaaugua

SEQ ID NO: 1407619 - RNA, 19 nt, Homo sapiens
  misc_RNA (1)...(19): siRNA sense strand
gcaaugggaugcagcuauu

SEQ ID NO: 1407620 - RNA, 19 nt, Homo sapiens
  misc_RNA (1)...(19): siRNA sense strand
cagcuuaucuugcaaguga

SEQ ID NO: 1407621 - RNA, 19 nt, Homo sapiens
  misc_RNA (1)...(19): siRNA sense strand
gaaguuaggcgauuagaga

SEQ ID NO: 1407622 - RNA, 19 nt, Homo sapiens
  misc_RNA (1)...(19): siRNA sense strand
gacaaaggcauucaucaua

SEQ ID NO: 1407623 - RNA, 19 nt, Homo sapiens
  misc_RNA (1)...(19): siRNA sense strand
gauccaagcuugauuaagg

SEQ ID NO: 1407624 - RNA, 19 nt, Homo sapiens
  misc_RNA (1)...(19): siRNA sense strand
ggaagaaaguauuaaacga

SEQ ID NO: 1407625 - RNA, 19 nt, Homo sapiens
  misc_RNA (1)...(19): siRNA sense strand
aaacagcucuaaaccauug

SEQ ID NO: 1407626 - RNA, 19 nt, Homo sapiens
  misc_RNA (1)...(19): siRNA sense strand
ugacauguauucugaaguu

SEQ ID NO: 1407627 - RNA, 19 nt, Homo sapiens
  misc_RNA (1)...(19): siRNA sense strand
gaagaccucaagaaaguua

SEQ ID NO: 1407628 - RNA, 19 nt, Homo sapiens
  misc_RNA (1)...(19): siRNA sense strand
gcugaacgcaguauuguua

SEQ ID NO: 1407629 - RNA, 19 nt, Homo sapiens
  misc_RNA (1)...(19): siRNA sense strand
gauggugcuuguugacuua

SEQ ID NO: 1407630 - RNA, 19 nt, Homo sapiens
  misc_RNA (1)...(19): siRNA sense strand
ggacauccuuucagcaguu

SEQ ID NO: 1407631 - RNA, 19 nt, Homo sapiens
  misc_RNA (1)...(19): siRNA sense strand
gaaacacagcucuggaaua

SEQ ID NO: 1407632 - RNA, 19 nt, Homo sapiens
  misc_RNA (1)...(19): siRNA sense strand
ggaaauccuucaacaaucu

SEQ ID NO: 1407633 - RNA, 19 nt, Homo sapiens
  misc_RNA (1)...(19): siRNA sense strand
gcagauaauugaaggaaag

SEQ ID NO: 1407634 - RNA, 19 nt, Homo sapiens
  misc_RNA (1)...(19): siRNA sense strand
ugaaagcauugaagcuaua

SEQ ID NO: 1407635 - RNA, 19 nt, Homo sapiens
  misc_RNA (1)...(19): siRNA sense strand
ggaaagagcaugaugacau

SEQ ID NO: 1407636 - RNA, 19 nt, Homo sapiens
  misc_RNA (1)...(19): siRNA sense strand
ucacgaagcauuuaucauu

SEQ ID NO: 1407637 - RNA, 19 nt, Homo sapiens
  misc_RNA (1)...(19): siRNA sense strand
gcaguucucuucucugaca

SEQ ID NO: 1407638 - RNA, 19 nt, Homo sapiens
  misc_RNA (1)...(19): siRNA sense strand
uuaaagagguauuggaaga

SEQ ID NO: 1407639 - RNA, 19 nt, Homo sapiens
  misc_RNA (1)...(19): siRNA sense strand
aaacugaaauucucuccaa

SEQ ID NO: 1407640 - RNA, 19 nt, Homo sapiens
  misc_RNA (1)...(19): siRNA sense strand
ggcaacaacuuacaaauac

SEQ ID NO: 1407641 - RNA, 19 nt, Homo sapiens
  misc_RNA (1)...(19): siRNA sense strand
gaagaccgauccauaucug

SEQ ID NO: 1407642 - RNA, 19 nt, Homo sapiens
  misc_RNA (1)...(19): siRNA sense strand
ugaccggaaugaacuauuu

SEQ ID NO: 1407643 - RNA, 19 nt, Homo sapiens
  misc_RNA (1)...(19): siRNA sense strand
caaugaaagcuuuagguua

SEQ ID NO: 1407644 - RNA, 19 nt, Homo sapiens
  misc_RNA (1)...(19): siRNA sense strand
ggaccuuagugaauauaaa

SEQ ID NO: 1407645 - RNA, 19 nt, Homo sapiens
  misc_RNA (1)...(19): siRNA sense strand
ggaaauugaugaguauauc

SEQ ID NO: 1407646 - RNA, 19 nt, Homo sapiens
  misc_RNA (1)...(19): siRNA sense strand
cggaagaccucaagaaagu

SEQ ID NO: 1407647 - RNA, 19 nt, Homo sapiens
  misc_RNA (1)...(19): siRNA sense strand
gcaucaaguuuauagaaga

SEQ ID NO: 1407648 - RNA, 19 nt, Homo sapiens
  misc_RNA (1)...(19): siRNA sense strand
gcacccagcuuaucuugca

SEQ ID NO: 1407649 - RNA, 19 nt, Homo sapiens
  misc_RNA (1)...(19): siRNA sense strand
ggaagaaucggacccaaga

SEQ ID NO: 1407650 - RNA, 19 nt, Homo sapiens
  misc_RNA (1)...(19): siRNA sense strand
ugaaauccuugaugaaguu

SEQ ID NO: 1407651 - RNA, 19 nt, Homo sapiens
  misc_RNA (1)...(19): siRNA sense strand
gcugauaguuucaaagcaa

SEQ ID NO: 1407652 - RNA, 19 nt, Homo sapiens
  misc_RNA (1)...(19): siRNA sense strand
gagaccauauccuuaaaug

SEQ ID NO: 1407653 - RNA, 19 nt, Homo sapiens
  misc_RNA (1)...(19): siRNA sense strand
uaaagaggccguuaaggaa

SEQ ID NO: 1407654 - RNA, 19 nt, Homo sapiens
  misc_RNA (1)...(19): siRNA sense strand
guagauccaagcuugauua

SEQ ID NO: 1407655 - RNA, 19 nt, Homo sapiens
  misc_RNA (1)...(19): siRNA sense strand
uggagaagauguugaaaug

SEQ ID NO: 1407656 - RNA, 19 nt, Homo sapiens
  misc_RNA (1)...(19): siRNA sense strand
cagcaguucucuucucuga

SEQ ID NO: 1407657 - RNA, 19 nt, Homo sapiens
  misc_RNA (1)...(19): siRNA sense strand
gaugacacguucuccaguu

SEQ ID NO: 1407658 - RNA, 19 nt, Homo sapiens
  misc_RNA (1)...(19): siRNA sense strand
caaaggcauucaucauaga

SEQ ID NO: 1407659 - RNA, 19 nt, Homo sapiens
  misc_RNA (1)...(19): siRNA sense strand
gauaugauaccggaccuua

SEQ ID NO: 1407660 - RNA, 19 nt, Homo sapiens
  misc_RNA (1)...(19): siRNA sense strand
gggaugcagcuauuuauuu

SEQ ID NO: 1407661 - RNA, 19 nt, Homo sapiens
  misc_RNA (1)...(19): siRNA sense strand
ccaagugacuacaagaaau

SEQ ID NO: 1407662 - RNA, 19 nt, Homo sapiens
  misc_RNA (1)...(19): siRNA sense strand
ugauugacauguauucuga

SEQ ID NO: 1407663 - RNA, 19 nt, Homo sapiens
  misc_RNA (1)...(19): siRNA sense strand
uaauaaagcaguagagguu

SEQ ID NO: 1407664 - RNA, 19 nt, Homo sapiens
  misc_RNA (1)...(19): siRNA sense strand
cauugaagcuauaagagaa

SEQ ID NO: 1407665 - RNA, 19 nt, Homo sapiens
  misc_RNA (1)...(19): siRNA sense strand
ggauucagcagauaauuga

SEQ ID NO: 1407666 - RNA, 19 nt, Homo sapiens
  misc_RNA (1)...(19): siRNA sense strand
aaacuucgcuaucucauac

SEQ ID NO: 1407667 - RNA, 19 nt, Homo sapiens
  misc_RNA (1)...(19): siRNA sense strand
acaaugaaaccaagaauga

SEQ ID NO: 1407668 - RNA, 19 nt, Homo sapiens
  misc_RNA (1)...(19): siRNA sense strand
caaauggacccucauggaa

SEQ ID NO: 1407669 - RNA, 19 nt, Homo sapiens
  misc_RNA (1)...(19): siRNA sense strand
ugaaauagaacuucgaaug

SEQ ID NO: 1407670 - RNA, 19 nt, Homo sapiens
  misc_RNA (1)...(19): siRNA sense strand
uaccggaccuuagugaaua

SEQ ID NO: 1407671 - RNA, 19 nt, Homo sapiens
  misc_RNA (1)...(19): siRNA sense strand
gggaacagcucugaaagca

SEQ ID NO: 1407672 - RNA, 19 nt, Homo sapiens
  misc_RNA (1)...(19): siRNA sense strand
ugacaaaccuuccuuuacg

SEQ ID NO: 1407673 - RNA, 19 nt, Homo sapiens
  misc_RNA (1)...(19): siRNA sense strand
gaacaacaggcugauaguu

SEQ ID NO: 1407674 - RNA, 19 nt, Homo sapiens
  misc_RNA (1)...(19): siRNA sense strand
gauguucucucugauuaug

SEQ ID NO: 1407675 - RNA, 19 nt, Homo sapiens
  misc_RNA (1)...(19): siRNA sense strand
gcauuuaucauucacauca

SEQ ID NO: 1407676 - RNA, 19 nt, Homo sapiens
  misc_RNA (1)...(19): siRNA sense strand
ggaugcagcuauuuauuuu

SEQ ID NO: 1407677 - RNA, 19 nt, Homo sapiens
  misc_RNA (1)...(19): siRNA sense strand
gaacuugaccggaaugaac

SEQ ID NO: 1407678 - RNA, 19 nt, Homo sapiens
  misc_RNA (1)...(19): siRNA sense strand
ggauggugcuuguugacuu

SEQ ID NO: 1407679 - RNA, 19 nt, Homo sapiens
  misc_RNA (1)...(19): siRNA sense strand
acaaaggcauucaucauag

SEQ ID NO: 1407680 - RNA, 19 nt, Homo sapiens
  misc_RNA (1)...(19): siRNA sense strand
acacucaguugaaguauca

SEQ ID NO: 1407681 - RNA, 19 nt, Homo sapiens
  misc_RNA (1)...(19): siRNA sense strand
gaaagugacaagcauuuua

SEQ ID NO: 1407682 - RNA, 19 nt, Homo sapiens
  misc_RNA (1)...(19): siRNA sense strand
gacauugugugggaaauug

SEQ ID NO: 1407683 - RNA, 19 nt, Homo sapiens
  misc_RNA (1)...(19): siRNA sense strand
ggaaguuuaccacuacaaa

SEQ ID NO: 1407684 - RNA, 19 nt, Homo sapiens
  misc_RNA (1)...(19): siRNA sense strand
gcucgaauauucccaagag

SEQ ID NO: 1407685 - RNA, 19 nt, Homo sapiens
  misc_RNA (1)...(19): siRNA sense strand
gaaagaugacaaaggcauu

SEQ ID NO: 1407686 - RNA, 19 nt, Homo sapiens
  misc_RNA (1)...(19): siRNA sense strand
uugauguucucucugauua

SEQ ID NO: 1407687 - RNA, 19 nt, Homo sapiens
  misc_RNA (1)...(19): siRNA sense strand
aaagagguauuggaagauu

SEQ ID NO: 1407688 - RNA, 19 nt, Homo sapiens
  misc_RNA (1)...(19): siRNA sense strand
gggagacccuacaagaaga

SEQ ID NO: 1407689 - RNA, 19 nt, Homo sapiens
  misc_RNA (1)...(19): siRNA sense strand
gaauccuaaugccaucaua

SEQ ID NO: 1407690 - RNA, 19 nt, Homo sapiens
  misc_RNA (1)...(19): siRNA sense strand
agaagaucuugcagcauua

SEQ ID NO: 1407691 - RNA, 19 nt, Homo sapiens
  misc_RNA (1)...(19): siRNA sense strand
caucauagaaagcuuaaga

SEQ ID NO: 1407692 - RNA, 19 nt, Homo sapiens
  misc_RNA (1)...(19): siRNA sense strand
gaagaauuuucccgcuuua

SEQ ID NO: 1407693 - RNA, 19 nt, Homo sapiens
  misc_RNA (1)...(19): siRNA sense strand
caguggauaucaagcuuaa

SEQ ID NO: 1407694 - RNA, 19 nt, Homo sapiens
  misc_RNA (1)...(19): siRNA sense strand
gcauugaagcuauaagaga

SEQ ID NO: 1407695 - RNA, 19 nt, Homo sapiens
  misc_RNA (1)...(19): siRNA sense strand
gaaagcucuucccaaugaa

SEQ ID NO: 1407696 - RNA, 19 nt, Homo sapiens
  misc_RNA (1)...(19): siRNA sense strand
ugacuuaccaggugugauu

SEQ ID NO: 1407697 - RNA, 19 nt, Homo sapiens
  misc_RNA (1)...(19): siRNA sense strand
ggaaaugauugcccaagcu

SEQ ID NO: 1407698 - RNA, 19 nt, Homo sapiens
  misc_RNA (1)...(19): siRNA sense strand
acacagcucuggaauaaaa

SEQ ID NO: 1407699 - RNA, 19 nt, Homo sapiens
  misc_RNA (1)...(19): siRNA sense strand
ugugggaaauugaugagua

SEQ ID NO: 1407700 - RNA, 19 nt, Homo sapiens
  misc_RNA (1)...(19): siRNA sense strand
cuaaaccauuguaaccuuu

SEQ ID NO: 1407701 - RNA, 19 nt, Homo sapiens
  misc_RNA (1)...(19): siRNA sense strand
agagcaugaugacauauuu

SEQ ID NO: 1407702 - RNA, 19 nt, Homo sapiens
  misc_RNA (1)...(19): siRNA sense strand
caacucaugugauugaaaa

SEQ ID NO: 1407703 - RNA, 19 nt, Homo sapiens
  misc_RNA (1)...(19): siRNA sense strand
caagugacuacaagaaauu

SEQ ID NO: 1407704 - RNA, 19 nt, Homo sapiens
  misc_RNA (1)...(19): siRNA sense strand
gcuaaaggcacaccaagug

SEQ ID NO: 1407705 - RNA, 19 nt, Homo sapiens
  misc_RNA (1)...(19): siRNA sense strand
gagaauaugaagaagaguu

SEQ ID NO: 1407706 - RNA, 19 nt, Homo sapiens
  misc_RNA (1)...(19): siRNA sense strand
gcaguauuguuacagacuu

SEQ ID NO: 1407707 - RNA, 19 nt, Homo sapiens
  misc_RNA (1)...(19): siRNA sense strand
uggaaagacuaguguguug

SEQ ID NO: 1407708 - RNA, 19 nt, Homo sapiens
  misc_RNA (1)...(19): siRNA sense strand
ggagaacaaagaauugaga

SEQ ID NO: 1407709 - RNA, 19 nt, Homo sapiens
  misc_RNA (1)...(19): siRNA sense strand
gaaagagcaugaugacaua

SEQ ID NO: 1407710 - RNA, 19 nt, Homo sapiens
  misc_RNA (1)...(19): siRNA sense strand
gaacagcucugaaagcauu

SEQ ID NO: 1407711 - RNA, 19 nt, Homo sapiens
  misc_RNA (1)...(19): siRNA sense strand
gagaagauguugaaaugua

SEQ ID NO: 1407712 - RNA, 19 nt, Homo sapiens
  misc_RNA (1)...(19): siRNA sense strand
gaggacagcuugaggguua

SEQ ID NO: 1407713 - RNA, 19 nt, Homo sapiens
  misc_RNA (1)...(19): siRNA sense strand
gaaacugaauggaagaaua

SEQ ID NO: 1407714 - RNA, 19 nt, Homo sapiens
  misc_RNA (1)...(19): siRNA sense strand
aaagaaggcuguaccguua

SEQ ID NO: 1407715 - RNA, 19 nt, Homo sapiens
  misc_RNA (1)...(19): siRNA sense strand
aaacacagcucuggaauaa

SEQ ID NO: 1407716 - RNA, 19 nt, Homo sapiens
  misc_RNA (1)...(19): siRNA sense strand
gaaauagaacuucgaauga

SEQ ID NO: 1407717 - RNA, 19 nt, Homo sapiens
  misc_RNA (1)...(19): siRNA sense strand
gcaaugauguggucuuguu

SEQ ID NO: 1407718 - RNA, 19 nt, Homo sapiens
  misc_RNA (1)...(19): siRNA sense strand
gaccauauccuuaaaugua

SEQ ID NO: 1407719 - RNA, 19 nt, Homo sapiens
  misc_RNA (1)...(19): siRNA sense strand
gcaaugggaugcagcuauu

SEQ ID NO: 1407720 - RNA, 19 nt, Homo sapiens
  misc_RNA (1)...(19): siRNA sense strand
cagcuuaucuugcaaguga

SEQ ID NO: 1407721 - RNA, 19 nt, Homo sapiens
  misc_RNA (1)...(19): siRNA sense strand
gaaguuaggcgauuagaga

SEQ ID NO: 1407722 - RNA, 19 nt, Homo sapiens
  misc_RNA (1)...(19): siRNA sense strand
gacaaaggcauucaucaua

SEQ ID NO: 1407723 - RNA, 19 nt, Homo sapiens
  misc_RNA (1)...(19): siRNA sense strand
gauccaagcuugauuaagg

SEQ ID NO: 1407724 - RNA, 19 nt, Homo sapiens
  misc_RNA (1)...(19): siRNA sense strand
ggaagaaaguauuaaacga

SEQ ID NO: 1407725 - RNA, 19 nt, Homo sapiens
  misc_RNA (1)...(19): siRNA sense strand
aaacagcucuaaaccauug

SEQ ID NO: 1407726 - RNA, 19 nt, Homo sapiens
  misc_RNA (1)...(19): siRNA sense strand
ugacauguauucugaaguu

SEQ ID NO: 1407727 - RNA, 19 nt, Homo sapiens
  misc_RNA (1)...(19): siRNA sense strand
gaagaccucaagaaaguua

SEQ ID NO: 1407728 - RNA, 19 nt, Homo sapiens
  misc_RNA (1)...(19): siRNA sense strand
gcugaacgcaguauuguua

SEQ ID NO: 1407729 - RNA, 19 nt, Homo sapiens
  misc_RNA (1)...(19): siRNA sense strand
gauggugcuuguugacuua

SEQ ID NO: 1407730 - RNA, 19 nt, Homo sapiens
  misc_RNA (1)...(19): siRNA sense strand
ggacauccuuucagcaguu

SEQ ID NO: 1407731 - RNA, 19 nt, Homo sapiens
  misc_RNA (1)...(19): siRNA sense strand
gaaacacagcucuggaaua

SEQ ID NO: 1407732 - RNA, 19 nt, Homo sapiens
  misc_RNA (1)...(19): siRNA sense strand
ggaaauccuucaacaaucu

SEQ ID NO: 1407733 - RNA, 19 nt, Homo sapiens
  misc_RNA (1)...(19): siRNA sense strand
gcagauaauugaaggaaag

SEQ ID NO: 1407734 - RNA, 19 nt, Homo sapiens
  misc_RNA (1)...(19): siRNA sense strand
ugaaagcauugaagcuaua

SEQ ID NO: 1407735 - RNA, 19 nt, Homo sapiens
  misc_RNA (1)...(19): siRNA sense strand
ggaaagagcaugaugacau

SEQ ID NO: 1407736 - RNA, 19 nt, Homo sapiens
  misc_RNA (1)...(19): siRNA sense strand
ucacgaagcauuuaucauu

SEQ ID NO: 1407737 - RNA, 19 nt, Homo sapiens
  misc_RNA (1)...(19): siRNA sense strand
gcaguucucuucucugaca

SEQ ID NO: 1407738 - RNA, 19 nt, Homo sapiens
  misc_RNA (1)...(19): siRNA sense strand
uuaaagagguauuggaaga

SEQ ID NO: 1407739 - RNA, 19 nt, Homo sapiens
  misc_RNA (1)...(19): siRNA sense strand
aaacugaaauucucuccaa

SEQ ID NO: 1407740 - RNA, 19 nt, Homo sapiens
  misc_RNA (1)...(19): siRNA sense strand
ggcaacaacuuacaaauac

SEQ ID NO: 1407741 - RNA, 19 nt, Homo sapiens
  misc_RNA (1)...(19): siRNA sense strand
gaagaccgauccauaucug

SEQ ID NO: 1407742 - RNA, 19 nt, Homo sapiens
  misc_RNA (1)...(19): siRNA sense strand
ugaccggaaugaacuauuu

SEQ ID NO: 1407743 - RNA, 19 nt, Homo sapiens
  misc_RNA (1)...(19): siRNA sense strand
caaugaaagcuuuagguua

SEQ ID NO: 1407744 - RNA, 19 nt, Homo sapiens
  misc_RNA (1)...(19): siRNA sense strand
ggaccuuagugaauauaaa

SEQ ID NO: 1407745 - RNA, 19 nt, Homo sapiens
  misc_RNA (1)...(19): siRNA sense strand
ggaaauugaugaguauauc

SEQ ID NO: 1407746 - RNA, 19 nt, Homo sapiens
  misc_RNA (1)...(19): siRNA sense strand
cggaagaccucaagaaagu

SEQ ID NO: 1407747 - RNA, 19 nt, Homo sapiens
  misc_RNA (1)...(19): siRNA sense strand
gcaucaaguuuauagaaga

SEQ ID NO: 1407748 - RNA, 19 nt, Homo sapiens
  misc_RNA (1)...(19): siRNA sense strand
gcacccagcuuaucuugca

SEQ ID NO: 1407749 - RNA, 19 nt, Homo sapiens
  misc_RNA (1)...(19): siRNA sense strand
ggaagaaucggacccaaga

SEQ ID NO: 1407750 - RNA, 19 nt, Homo sapiens
  misc_RNA (1)...(19): siRNA sense strand
ugaaauccuugaugaaguu

SEQ ID NO: 1407751 - RNA, 19 nt, Homo sapiens
  misc_RNA (1)...(19): siRNA sense strand
gcugauaguuucaaagcaa

SEQ ID NO: 1407752 - RNA, 19 nt, Homo sapiens
  misc_RNA (1)...(19): siRNA sense strand
gagaccauauccuuaaaug

SEQ ID NO: 1407753 - RNA, 19 nt, Homo sapiens
  misc_RNA (1)...(19): siRNA sense strand
uaaagaggccguuaaggaa

SEQ ID NO: 1407754 - RNA, 19 nt, Homo sapiens
  misc_RNA (1)...(19): siRNA sense strand
guagauccaagcuugauua

SEQ ID NO: 1407755 - RNA, 19 nt, Homo sapiens
  misc_RNA (1)...(19): siRNA sense strand
uggagaagauguugaaaug

SEQ ID NO: 1407756 - RNA, 19 nt, Homo sapiens
  misc_RNA (1)...(19): siRNA sense strand
cagcaguucucuucucuga

SEQ ID NO: 1407757 - RNA, 19 nt, Homo sapiens
  misc_RNA (1)...(19): siRNA sense strand
gaugacacguucuccaguu

SEQ ID NO: 1407758 - RNA, 19 nt, Homo sapiens
  misc_RNA (1)...(19): siRNA sense strand
caaaggcauucaucauaga

SEQ ID NO: 1407759 - RNA, 19 nt, Homo sapiens
  misc_RNA (1)...(19): siRNA sense strand
gauaugauaccggaccuua

SEQ ID NO: 1407760 - RNA, 19 nt, Homo sapiens
  misc_RNA (1)...(19): siRNA sense strand
gggaugcagcuauuuauuu

SEQ ID NO: 1407761 - RNA, 19 nt, Homo sapiens
  misc_RNA (1)...(19): siRNA sense strand
ccaagugacuacaagaaau

SEQ ID NO: 1407762 - RNA, 19 nt, Homo sapiens
  misc_RNA (1)...(19): siRNA sense strand
ugauugacauguauucuga

SEQ ID NO: 1407763 - RNA, 19 nt, Homo sapiens
  misc_RNA (1)...(19): siRNA sense strand
uaauaaagcaguagagguu

SEQ ID NO: 1407764 - RNA, 19 nt, Homo sapiens
  misc_RNA (1)...(19): siRNA sense strand
cauugaagcuauaagagaa

SEQ ID NO: 1407765 - RNA, 19 nt, Homo sapiens
  misc_RNA (1)...(19): siRNA sense strand
ggauucagcagauaauuga

SEQ ID NO: 1407766 - RNA, 19 nt, Homo sapiens
  misc_RNA (1)...(19): siRNA sense strand
aaacuucgcuaucucauac

SEQ ID NO: 1407767 - RNA, 19 nt, Homo sapiens
  misc_RNA (1)...(19): siRNA sense strand
acaaugaaaccaagaauga

SEQ ID NO: 1407768 - RNA, 19 nt, Homo sapiens
  misc_RNA (1)...(19): siRNA sense strand
caaauggacccucauggaa

SEQ ID NO: 1407769 - RNA, 19 nt, Homo sapiens
  misc_RNA (1)...(19): siRNA sense strand
ugaaauagaacuucgaaug

SEQ ID NO: 1407770 - RNA, 19 nt, Homo sapiens
  misc_RNA (1)...(19): siRNA sense strand
uaccggaccuuagugaaua

SEQ ID NO: 1407771 - RNA, 19 nt, Homo sapiens
  misc_RNA (1)...(19): siRNA sense strand
gggaacagcucugaaagca

SEQ ID NO: 1407772 - RNA, 19 nt, Homo sapiens
  misc_RNA (1)...(19): siRNA sense strand
ugacaaaccuuccuuuacg

SEQ ID NO: 1407773 - RNA, 19 nt, Homo sapiens
  misc_RNA (1)...(19): siRNA sense strand
gaacaacaggcugauaguu

SEQ ID NO: 1407774 - RNA, 19 nt, Homo sapiens
  misc_RNA (1)...(19): siRNA sense strand
gauguucucucugauuaug

SEQ ID NO: 1407775 - RNA, 19 nt, Homo sapiens
  misc_RNA (1)...(19): siRNA sense strand
gcauuuaucauucacauca

SEQ ID NO: 1407776 - RNA, 19 nt, Homo sapiens
  misc_RNA (1)...(19): siRNA sense strand
ggaugcagcuauuuauuuu

SEQ ID NO: 1407777 - RNA, 19 nt, Homo sapiens
  misc_RNA (1)...(19): siRNA sense strand
gaacuugaccggaaugaac

SEQ ID NO: 1407778 - RNA, 19 nt, Homo sapiens
  misc_RNA (1)...(19): siRNA sense strand
ggauggugcuuguugacuu

SEQ ID NO: 1407779 - RNA, 19 nt, Homo sapiens
  misc_RNA (1)...(19): siRNA sense strand
acaaaggcauucaucauag

SEQ ID NO: 1407780 - RNA, 19 nt, Homo sapiens
  misc_RNA (1)...(19): siRNA sense strand
acacucaguugaaguauca

SEQ ID NO: 1407781 - RNA, 19 nt, Homo sapiens
  misc_RNA (1)...(19): siRNA sense strand
gaaagugacaagcauuuua

SEQ ID NO: 1407782 - RNA, 19 nt, Homo sapiens
  misc_RNA (1)...(19): siRNA sense strand
gacauugugugggaaauug

SEQ ID NO: 1407783 - RNA, 19 nt, Homo sapiens
  misc_RNA (1)...(19): siRNA sense strand
ggaaguuuaccacuacaaa

SEQ ID NO: 1407784 - RNA, 19 nt, Homo sapiens
  misc_RNA (1)...(19): siRNA sense strand
gcucgaauauucccaagag

SEQ ID NO: 1407785 - RNA, 19 nt, Homo sapiens
  misc_RNA (1)...(19): siRNA sense strand
gaaagaugacaaaggcauu

SEQ ID NO: 1407786 - RNA, 19 nt, Homo sapiens
  misc_RNA (1)...(19): siRNA sense strand
uugauguucucucugauua

SEQ ID NO: 1407787 - RNA, 19 nt, Homo sapiens
  misc_RNA (1)...(19): siRNA sense strand
aaagagguauuggaagauu

SEQ ID NO: 1407788 - RNA, 19 nt, Homo sapiens
  misc_RNA (1)...(19): siRNA sense strand
gggagacccuacaagaaga

SEQ ID NO: 1407789 - RNA, 19 nt, Homo sapiens
  misc_RNA (1)...(19): siRNA sense strand
gaauccuaaugccaucaua

SEQ ID NO: 1407790 - RNA, 19 nt, Homo sapiens
  misc_RNA (1)...(19): siRNA sense strand
agaagaucuugcagcauua

SEQ ID NO: 1407791 - RNA, 19 nt, Homo sapiens
  misc_RNA (1)...(19): siRNA sense strand
caucauagaaagcuuaaga

SEQ ID NO: 1407792 - RNA, 19 nt, Homo sapiens
  misc_RNA (1)...(19): siRNA sense strand
gaagaauuuucccgcuuua

SEQ ID NO: 1407793 - RNA, 19 nt, Homo sapiens
  misc_RNA (1)...(19): siRNA sense strand
caguggauaucaagcuuaa

SEQ ID NO: 1407794 - RNA, 19 nt, Homo sapiens
  misc_RNA (1)...(19): siRNA sense strand
gcauugaagcuauaagaga

SEQ ID NO: 1407795 - RNA, 19 nt, Homo sapiens
  misc_RNA (1)...(19): siRNA sense strand
gaaagcucuucccaaugaa

SEQ ID NO: 1407796 - RNA, 19 nt, Homo sapiens
  misc_RNA (1)...(19): siRNA sense strand
ugacuuaccaggugugauu

SEQ ID NO: 1407797 - RNA, 19 nt, Homo sapiens
  misc_RNA (1)...(19): siRNA sense strand
ggaaaugauugcccaagcu

SEQ ID NO: 1407798 - RNA, 19 nt, Homo sapiens
  misc_RNA (1)...(19): siRNA sense strand
acacagcucuggaauaaaa

SEQ ID NO: 1407799 - RNA, 19 nt, Homo sapiens
  misc_RNA (1)...(19): siRNA sense strand
ugugggaaauugaugagua

SEQ ID NO: 1407800 - RNA, 19 nt, Homo sapiens
  misc_RNA (1)...(19): siRNA sense strand
cuaaaccauuguaaccuuu

SEQ ID NO: 1407801 - RNA, 19 nt, Homo sapiens
  misc_RNA (1)...(19): siRNA sense strand
agagcaugaugacauauuu

SEQ ID NO: 1407802 - RNA, 19 nt, Homo sapiens
  misc_RNA (1)...(19): siRNA sense strand
caacucaugugauugaaaa

SEQ ID NO: 1407803 - RNA, 19 nt, Homo sapiens
  misc_RNA (1)...(19): siRNA sense strand
caagugacuacaagaaauu

SEQ ID NO: 1407804 - RNA, 19 nt, Homo sapiens
  misc_RNA (1)...(19): siRNA sense strand
gcuaaaggcacaccaagug

SEQ ID NO: 1407805 - RNA, 19 nt, Homo sapiens
  misc_RNA (1)...(19): siRNA sense strand
gagaauaugaagaagaguu

SEQ ID NO: 1407806 - RNA, 19 nt, Homo sapiens
  misc_RNA (1)...(19): siRNA sense strand
gcaguauuguuacagacuu

SEQ ID NO: 1407807 - RNA, 19 nt, Homo sapiens
  misc_RNA (1)...(19): siRNA sense strand
uggaaagacuaguguguug

SEQ ID NO: 1407808 - RNA, 19 nt, Homo sapiens
  misc_RNA (1)...(19): siRNA sense strand
ggagaacaaagaauugaga

SEQ ID NO: 1407809 - RNA, 19 nt, Homo sapiens
  misc_RNA (1)...(19): siRNA sense strand
gaaagagcaugaugacaua

SEQ ID NO: 1407810 - RNA, 19 nt, Homo sapiens
  misc_RNA (1)...(19): siRNA sense strand
gaacagcucugaaagcauu

SEQ ID NO: 1407811 - RNA, 19 nt, Homo sapiens
  misc_RNA (1)...(19): siRNA sense strand
gagaagauguugaaaugua

SEQ ID NO: 1407812 - RNA, 19 nt, Homo sapiens
  misc_RNA (1)...(19): siRNA sense strand
gaggacagcuugaggguua

SEQ ID NO: 1407813 - RNA, 19 nt, Homo sapiens
  misc_RNA (1)...(19): siRNA sense strand
gaaacugaauggaagaaua

SEQ ID NO: 1407814 - RNA, 19 nt, Homo sapiens
  misc_RNA (1)...(19): siRNA sense strand
aaagaaggcuguaccguua

SEQ ID NO: 1407815 - RNA, 19 nt, Homo sapiens
  misc_RNA (1)...(19): siRNA sense strand
aaacacagcucuggaauaa

SEQ ID NO: 1407816 - RNA, 19 nt, Homo sapiens
  misc_RNA (1)...(19): siRNA sense strand
gaaauagaacuucgaauga

SEQ ID NO: 1407817 - RNA, 19 nt, Homo sapiens
  misc_RNA (1)...(19): siRNA sense strand
gcaaugauguggucuuguu

SEQ ID NO: 1407818 - RNA, 19 nt, Homo sapiens
  misc_RNA (1)...(19): siRNA sense strand
gaccauauccuuaaaugua

SEQ ID NO: 1407819 - RNA, 19 nt, Homo sapiens
  misc_RNA (1)...(19): siRNA sense strand
gcaaugggaugcagcuauu

SEQ ID NO: 1407820 - RNA, 19 nt, Homo sapiens
  misc_RNA (1)...(19): siRNA sense strand
cagcuuaucuugcaaguga

SEQ ID NO: 1407821 - RNA, 19 nt, Homo sapiens
  misc_RNA (1)...(19): siRNA sense strand
gaaguuaggcgauuagaga

SEQ ID NO: 1407822 - RNA, 19 nt, Homo sapiens
  misc_RNA (1)...(19): siRNA sense strand
gacaaaggcauucaucaua

SEQ ID NO: 1407823 - RNA, 19 nt, Homo sapiens
  misc_RNA (1)...(19): siRNA sense strand
gauccaagcuugauuaagg

SEQ ID NO: 1407824 - RNA, 19 nt, Homo sapiens
  misc_RNA (1)...(19): siRNA sense strand
ggaagaaaguauuaaacga

SEQ ID NO: 1407825 - RNA, 19 nt, Homo sapiens
  misc_RNA (1)...(19): siRNA sense strand
aaacagcucuaaaccauug

SEQ ID NO: 1407826 - RNA, 19 nt, Homo sapiens
  misc_RNA (1)...(19): siRNA sense strand
ugacauguauucugaaguu

SEQ ID NO: 1407827 - RNA, 19 nt, Homo sapiens
  misc_RNA (1)...(19): siRNA sense strand
gaagaccucaagaaaguua

SEQ ID NO: 1407828 - RNA, 19 nt, Homo sapiens
  misc_RNA (1)...(19): siRNA sense strand
gcugaacgcaguauuguua

SEQ ID NO: 1407829 - RNA, 19 nt, Homo sapiens
  misc_RNA (1)...(19): siRNA sense strand
gauggugcuuguugacuua

SEQ ID NO: 1407830 - RNA, 19 nt, Homo sapiens
  misc_RNA (1)...(19): siRNA sense strand
ggacauccuuucagcaguu

SEQ ID NO: 1407831 - RNA, 19 nt, Homo sapiens
  misc_RNA (1)...(19): siRNA sense strand
gaaacacagcucuggaaua

SEQ ID NO: 1407832 - RNA, 19 nt, Homo sapiens
  misc_RNA (1)...(19): siRNA sense strand
ggaaauccuucaacaaucu

SEQ ID NO: 1407833 - RNA, 19 nt, Homo sapiens
  misc_RNA (1)...(19): siRNA sense strand
gcagauaauugaaggaaag

SEQ ID NO: 1407834 - RNA, 19 nt, Homo sapiens
  misc_RNA (1)...(19): siRNA sense strand
ugaaagcauugaagcuaua

SEQ ID NO: 1407835 - RNA, 19 nt, Homo sapiens
  misc_RNA (1)...(19): siRNA sense strand
ggaaagagcaugaugacau

SEQ ID NO: 1407836 - RNA, 19 nt, Homo sapiens
  misc_RNA (1)...(19): siRNA sense strand
ucacgaagcauuuaucauu

SEQ ID NO: 1407837 - RNA, 19 nt, Homo sapiens
  misc_RNA (1)...(19): siRNA sense strand
gcaguucucuucucugaca

SEQ ID NO: 1407838 - RNA, 19 nt, Homo sapiens
  misc_RNA (1)...(19): siRNA sense strand
uuaaagagguauuggaaga

SEQ ID NO: 1407839 - RNA, 19 nt, Homo sapiens
  misc_RNA (1)...(19): siRNA sense strand
aaacugaaauucucuccaa

SEQ ID NO: 1407840 - RNA, 19 nt, Homo sapiens
  misc_RNA (1)...(19): siRNA sense strand
ggcaacaacuuacaaauac

SEQ ID NO: 1407841 - RNA, 19 nt, Homo sapiens
  misc_RNA (1)...(19): siRNA sense strand
gaagaccgauccauaucug

SEQ ID NO: 1407842 - RNA, 19 nt, Homo sapiens
  misc_RNA (1)...(19): siRNA sense strand
ugaccggaaugaacuauuu

SEQ ID NO: 1407843 - RNA, 19 nt, Homo sapiens
  misc_RNA (1)...(19): siRNA sense strand
caaugaaagcuuuagguua

SEQ ID NO: 1407844 - RNA, 19 nt, Homo sapiens
  misc_RNA (1)...(19): siRNA sense strand
ggaccuuagugaauauaaa

SEQ ID NO: 1407845 - RNA, 19 nt, Homo sapiens
  misc_RNA (1)...(19): siRNA sense strand
ggaaauugaugaguauauc

SEQ ID NO: 1407846 - RNA, 19 nt, Homo sapiens
  misc_RNA (1)...(19): siRNA sense strand
cggaagaccucaagaaagu

SEQ ID NO: 1407847 - RNA, 19 nt, Homo sapiens
  misc_RNA (1)...(19): siRNA sense strand
gcaucaaguuuauagaaga

SEQ ID NO: 1407848 - RNA, 19 nt, Homo sapiens
  misc_RNA (1)...(19): siRNA sense strand
gcacccagcuuaucuugca

SEQ ID NO: 1407849 - RNA, 19 nt, Homo sapiens
  misc_RNA (1)...(19): siRNA sense strand
ggaagaaucggacccaaga

SEQ ID NO: 1407850 - RNA, 19 nt, Homo sapiens
  misc_RNA (1)...(19): siRNA sense strand
ugaaauccuugaugaaguu

SEQ ID NO: 1407851 - RNA, 19 nt, Homo sapiens
  misc_RNA (1)...(19): siRNA sense strand
gcugauaguuucaaagcaa

SEQ ID NO: 1407852 - RNA, 19 nt, Homo sapiens
  misc_RNA (1)...(19): siRNA sense strand
gagaccauauccuuaaaug

SEQ ID NO: 1407853 - RNA, 19 nt, Homo sapiens
  misc_RNA (1)...(19): siRNA sense strand
uaaagaggccguuaaggaa

SEQ ID NO: 1407854 - RNA, 19 nt, Homo sapiens
  misc_RNA (1)...(19): siRNA sense strand
guagauccaagcuugauua

SEQ ID NO: 1407855 - RNA, 19 nt, Homo sapiens
  misc_RNA (1)...(19): siRNA sense strand
uggagaagauguugaaaug

SEQ ID NO: 1407856 - RNA, 19 nt, Homo sapiens
  misc_RNA (1)...(19): siRNA sense strand
cagcaguucucuucucuga

SEQ ID NO: 1407857 - RNA, 19 nt, Homo sapiens
  misc_RNA (1)...(19): siRNA sense strand
gaugacacguucuccaguu

SEQ ID NO: 1407858 - RNA, 19 nt, Homo sapiens
  misc_RNA (1)...(19): siRNA sense strand
caaaggcauucaucauaga

SEQ ID NO: 1407859 - RNA, 19 nt, Homo sapiens
  misc_RNA (1)...(19): siRNA sense strand
gauaugauaccggaccuua

SEQ ID NO: 1407860 - RNA, 19 nt, Homo sapiens
  misc_RNA (1)...(19): siRNA sense strand
gggaugcagcuauuuauuu

SEQ ID NO: 1407861 - RNA, 19 nt, Homo sapiens
  misc_RNA (1)...(19): siRNA sense strand
ccaagugacuacaagaaau

SEQ ID NO: 1407862 - RNA, 19 nt, Homo sapiens
  misc_RNA (1)...(19): siRNA sense strand
ugauugacauguauucuga

SEQ ID NO: 1407863 - RNA, 19 nt, Homo sapiens
  misc_RNA (1)...(19): siRNA sense strand
uaauaaagcaguagagguu

SEQ ID NO: 1407864 - RNA, 19 nt, Homo sapiens
  misc_RNA (1)...(19): siRNA sense strand
cauugaagcuauaagagaa

SEQ ID NO: 1407865 - RNA, 19 nt, Homo sapiens
  misc_RNA (1)...(19): siRNA sense strand
ggauucagcagauaauuga

SEQ ID NO: 1407866 - RNA, 19 nt, Homo sapiens
  misc_RNA (1)...(19): siRNA sense strand
aaacuucgcuaucucauac

SEQ ID NO: 1407867 - RNA, 19 nt, Homo sapiens
  misc_RNA (1)...(19): siRNA sense strand
acaaugaaaccaagaauga

SEQ ID NO: 1407868 - RNA, 19 nt, Homo sapiens
  misc_RNA (1)...(19): siRNA sense strand
caaauggacccucauggaa

SEQ ID NO: 1407869 - RNA, 19 nt, Homo sapiens
  misc_RNA (1)...(19): siRNA sense strand
ugaaauagaacuucgaaug

SEQ ID NO: 1407870 - RNA, 19 nt, Homo sapiens
  misc_RNA (1)...(19): siRNA sense strand
uaccggaccuuagugaaua

SEQ ID NO: 1407871 - RNA, 19 nt, Homo sapiens
  misc_RNA (1)...(19): siRNA sense strand
gggaacagcucugaaagca

SEQ ID NO: 1407872 - RNA, 19 nt, Homo sapiens
  misc_RNA (1)...(19): siRNA sense strand
ugacaaaccuuccuuuacg

SEQ ID NO: 1407873 - RNA, 19 nt, Homo sapiens
  misc_RNA (1)...(19): siRNA sense strand
gaacaacaggcugauaguu

SEQ ID NO: 1407874 - RNA, 19 nt, Homo sapiens
  misc_RNA (1)...(19): siRNA sense strand
gauguucucucugauuaug

SEQ ID NO: 1407875 - RNA, 19 nt, Homo sapiens
  misc_RNA (1)...(19): siRNA sense strand
gcauuuaucauucacauca

SEQ ID NO: 1407876 - RNA, 19 nt, Homo sapiens
  misc_RNA (1)...(19): siRNA sense strand
ggaugcagcuauuuauuuu

SEQ ID NO: 1407877 - RNA, 19 nt, Homo sapiens
  misc_RNA (1)...(19): siRNA sense strand
gaacuugaccggaaugaac

SEQ ID NO: 1407878 - RNA, 19 nt, Homo sapiens
  misc_RNA (1)...(19): siRNA sense strand
ggauggugcuuguugacuu

SEQ ID NO: 1407879 - RNA, 19 nt, Homo sapiens
  misc_RNA (1)...(19): siRNA sense strand
acaaaggcauucaucauag

SEQ ID NO: 1407880 - RNA, 19 nt, Homo sapiens
  misc_RNA (1)...(19): siRNA sense strand
acacucaguugaaguauca

SEQ ID NO: 1407881 - RNA, 19 nt, Homo sapiens
  misc_RNA (1)...(19): siRNA sense strand
gaaagugacaagcauuuua

SEQ ID NO: 1407882 - RNA, 19 nt, Homo sapiens
  misc_RNA (1)...(19): siRNA sense strand
gacauugugugggaaauug

SEQ ID NO: 1407883 - RNA, 19 nt, Homo sapiens
  misc_RNA (1)...(19): siRNA sense strand
ggaaguuuaccacuacaaa

SEQ ID NO: 1407884 - RNA, 19 nt, Homo sapiens
  misc_RNA (1)...(19): siRNA sense strand
gcucgaauauucccaagag

SEQ ID NO: 1407885 - RNA, 19 nt, Homo sapiens
  misc_RNA (1)...(19): siRNA sense strand
gaaagaugacaaaggcauu

SEQ ID NO: 1407886 - RNA, 19 nt, Homo sapiens
  misc_RNA (1)...(19): siRNA sense strand
uugauguucucucugauua

SEQ ID NO: 1407887 - RNA, 19 nt, Homo sapiens
  misc_RNA (1)...(19): siRNA sense strand
aaagagguauuggaagauu

SEQ ID NO: 1407888 - RNA, 19 nt, Homo sapiens
  misc_RNA (1)...(19): siRNA sense strand
gggagacccuacaagaaga

SEQ ID NO: 1407889 - RNA, 19 nt, Homo sapiens
  misc_RNA (1)...(19): siRNA sense strand
gaauccuaaugccaucaua

SEQ ID NO: 1407890 - RNA, 19 nt, Homo sapiens
  misc_RNA (1)...(19): siRNA sense strand
agaagaucuugcagcauua

SEQ ID NO: 1407891 - RNA, 19 nt, Homo sapiens
  misc_RNA (1)...(19): siRNA sense strand
caucauagaaagcuuaaga

SEQ ID NO: 1407892 - RNA, 19 nt, Homo sapiens
  misc_RNA (1)...(19): siRNA sense strand
gaagaauuuucccgcuuua

SEQ ID NO: 1407893 - RNA, 19 nt, Homo sapiens
  misc_RNA (1)...(19): siRNA sense strand
caguggauaucaagcuuaa

SEQ ID NO: 1407894 - RNA, 19 nt, Homo sapiens
  misc_RNA (1)...(19): siRNA sense strand
gcauugaagcuauaagaga

SEQ ID NO: 1407895 - RNA, 19 nt, Homo sapiens
  misc_RNA (1)...(19): siRNA sense strand
gaaagcucuucccaaugaa

SEQ ID NO: 1407896 - RNA, 19 nt, Homo sapiens
  misc_RNA (1)...(19): siRNA sense strand
ugacuuaccaggugugauu

SEQ ID NO: 1407897 - RNA, 19 nt, Homo sapiens
  misc_RNA (1)...(19): siRNA sense strand
ggaaaugauugcccaagcu

SEQ ID NO: 1407898 - RNA, 19 nt, Homo sapiens
  misc_RNA (1)...(19): siRNA sense strand
acacagcucuggaauaaaa

SEQ ID NO: 1407899 - RNA, 19 nt, Homo sapiens
  misc_RNA (1)...(19): siRNA sense strand
ugugggaaauugaugagua

SEQ ID NO: 1407900 - RNA, 19 nt, Homo sapiens
  misc_RNA (1)...(19): siRNA sense strand
cuaaaccauuguaaccuuu

SEQ ID NO: 1407901 - RNA, 19 nt, Homo sapiens
  misc_RNA (1)...(19): siRNA sense strand
agagcaugaugacauauuu

SEQ ID NO: 1407902 - RNA, 19 nt, Homo sapiens
  misc_RNA (1)...(19): siRNA sense strand
caacucaugugauugaaaa

SEQ ID NO: 1407903 - RNA, 19 nt, Homo sapiens
  misc_RNA (1)...(19): siRNA sense strand
caagugacuacaagaaauu

SEQ ID NO: 1407904 - RNA, 19 nt, Homo sapiens
  misc_RNA (1)...(19): siRNA sense strand
gcuaaaggcacaccaagug

SEQ ID NO: 1407905 - RNA, 19 nt, Homo sapiens
  misc_RNA (1)...(19): siRNA sense strand
gagaauaugaagaagaguu

SEQ ID NO: 1407906 - RNA, 19 nt, Homo sapiens
  misc_RNA (1)...(19): siRNA sense strand
gcaguauuguuacagacuu

SEQ ID NO: 1407907 - RNA, 19 nt, Homo sapiens
  misc_RNA (1)...(19): siRNA sense strand
uggaaagacuaguguguug

SEQ ID NO: 1407908 - RNA, 19 nt, Homo sapiens
  misc_RNA (1)...(19): siRNA sense strand
ggagaacaaagaauugaga

SEQ ID NO: 1407909 - RNA, 19 nt, Homo sapiens
  misc_RNA (1)...(19): siRNA sense strand
gaaagagcaugaugacaua

SEQ ID NO: 1407910 - RNA, 19 nt, Homo sapiens
  misc_RNA (1)...(19): siRNA sense strand
gaacagcucugaaagcauu

SEQ ID NO: 1407911 - RNA, 19 nt, Homo sapiens
  misc_RNA (1)...(19): siRNA sense strand
gagaagauguugaaaugua

SEQ ID NO: 1407912 - RNA, 19 nt, Homo sapiens
  misc_RNA (1)...(19): siRNA sense strand
gaggacagcuugaggguua

SEQ ID NO: 1407913 - RNA, 19 nt, Homo sapiens
  misc_RNA (1)...(19): siRNA sense strand
gaaacugaauggaagaaua

SEQ ID NO: 1407914 - RNA, 19 nt, Homo sapiens
  misc_RNA (1)...(19): siRNA sense strand
aaagaaggcuguaccguua

SEQ ID NO: 1407915 - RNA, 19 nt, Homo sapiens
  misc_RNA (1)...(19): siRNA sense strand
aaacacagcucuggaauaa

SEQ ID NO: 1407916 - RNA, 19 nt, Homo sapiens
  misc_RNA (1)...(19): siRNA sense strand
gaaauagaacuucgaauga

SEQ ID NO: 1407917 - RNA, 19 nt, Homo sapiens
  misc_RNA (1)...(19): siRNA sense strand
gcaaugauguggucuuguu

SEQ ID NO: 1407918 - RNA, 19 nt, Homo sapiens
  misc_RNA (1)...(19): siRNA sense strand
gaccauauccuuaaaugua

SEQ ID NO: 1407919 - RNA, 19 nt, Homo sapiens
  misc_RNA (1)...(19): siRNA sense strand
gcaaugggaugcagcuauu

SEQ ID NO: 1407920 - RNA, 19 nt, Homo sapiens
  misc_RNA (1)...(19): siRNA sense strand
cagcuuaucuugcaaguga

SEQ ID NO: 1407921 - RNA, 19 nt, Homo sapiens
  misc_RNA (1)...(19): siRNA sense strand
gaaguuaggcgauuagaga

SEQ ID NO: 1407922 - RNA, 19 nt, Homo sapiens
  misc_RNA (1)...(19): siRNA sense strand
gacaaaggcauucaucaua

SEQ ID NO: 1407923 - RNA, 19 nt, Homo sapiens
  misc_RNA (1)...(19): siRNA sense strand
gauccaagcuugauuaagg

SEQ ID NO: 1407924 - RNA, 19 nt, Homo sapiens
  misc_RNA (1)...(19): siRNA sense strand
ggaagaaaguauuaaacga

SEQ ID NO: 1407925 - RNA, 19 nt, Homo sapiens
  misc_RNA (1)...(19): siRNA sense strand
aaacagcucuaaaccauug

SEQ ID NO: 1407926 - RNA, 19 nt, Homo sapiens
  misc_RNA (1)...(19): siRNA sense strand
ugacauguauucugaaguu

SEQ ID NO: 1407927 - RNA, 19 nt, Homo sapiens
  misc_RNA (1)...(19): siRNA sense strand
gaagaccucaagaaaguua

SEQ ID NO: 1407928 - RNA, 19 nt, Homo sapiens
  misc_RNA (1)...(19): siRNA sense strand
gcugaacgcaguauuguua

SEQ ID NO: 1407929 - RNA, 19 nt, Homo sapiens
  misc_RNA (1)...(19): siRNA sense strand
gauggugcuuguugacuua

SEQ ID NO: 1407930 - RNA, 19 nt, Homo sapiens
  misc_RNA (1)...(19): siRNA sense strand
ggacauccuuucagcaguu

SEQ ID NO: 1407931 - RNA, 19 nt, Homo sapiens
  misc_RNA (1)...(19): siRNA sense strand
gaaacacagcucuggaaua

SEQ ID NO: 1407932 - RNA, 19 nt, Homo sapiens
  misc_RNA (1)...(19): siRNA sense strand
ggaaauccuucaacaaucu

SEQ ID NO: 1407933 - RNA, 19 nt, Homo sapiens
  misc_RNA (1)...(19): siRNA sense strand
gcagauaauugaaggaaag

SEQ ID NO: 1407934 - RNA, 19 nt, Homo sapiens
  misc_RNA (1)...(19): siRNA sense strand
ugaaagcauugaagcuaua

SEQ ID NO: 1407935 - RNA, 19 nt, Homo sapiens
  misc_RNA (1)...(19): siRNA sense strand
ggaaagagcaugaugacau

SEQ ID NO: 1407936 - RNA, 19 nt, Homo sapiens
  misc_RNA (1)...(19): siRNA sense strand
ucacgaagcauuuaucauu

SEQ ID NO: 1407937 - RNA, 19 nt, Homo sapiens
  misc_RNA (1)...(19): siRNA sense strand
gcaguucucuucucugaca

SEQ ID NO: 1407938 - RNA, 19 nt, Homo sapiens
  misc_RNA (1)...(19): siRNA sense strand
uuaaagagguauuggaaga

SEQ ID NO: 1407939 - RNA, 19 nt, Homo sapiens
  misc_RNA (1)...(19): siRNA sense strand
aaacugaaauucucuccaa

SEQ ID NO: 1407940 - RNA, 19 nt, Homo sapiens
  misc_RNA (1)...(19): siRNA sense strand
ggcaacaacuuacaaauac

SEQ ID NO: 1407941 - RNA, 19 nt, Homo sapiens
  misc_RNA (1)...(19): siRNA sense strand
gaagaccgauccauaucug

SEQ ID NO: 1407942 - RNA, 19 nt, Homo sapiens
  misc_RNA (1)...(19): siRNA sense strand
ugaccggaaugaacuauuu

SEQ ID NO: 1407943 - RNA, 19 nt, Homo sapiens
  misc_RNA (1)...(19): siRNA sense strand
caaugaaagcuuuagguua

SEQ ID NO: 1407944 - RNA, 19 nt, Homo sapiens
  misc_RNA (1)...(19): siRNA sense strand
ggaccuuagugaauauaaa

SEQ ID NO: 1407945 - RNA, 19 nt, Homo sapiens
  misc_RNA (1)...(19): siRNA sense strand
ggaaauugaugaguauauc

SEQ ID NO: 1407946 - RNA, 19 nt, Homo sapiens
  misc_RNA (1)...(19): siRNA sense strand
cggaagaccucaagaaagu

SEQ ID NO: 1407947 - RNA, 19 nt, Homo sapiens
  misc_RNA (1)...(19): siRNA sense strand
gcaucaaguuuauagaaga

SEQ ID NO: 1407948 - RNA, 19 nt, Homo sapiens
  misc_RNA (1)...(19): siRNA sense strand
gcacccagcuuaucuugca

SEQ ID NO: 1407949 - RNA, 19 nt, Homo sapiens
  misc_RNA (1)...(19): siRNA sense strand
ggaagaaucggacccaaga

SEQ ID NO: 1407950 - RNA, 19 nt, Homo sapiens
  misc_RNA (1)...(19): siRNA sense strand
ugaaauccuugaugaaguu

SEQ ID NO: 1407951 - RNA, 19 nt, Homo sapiens
  misc_RNA (1)...(19): siRNA sense strand
gcugauaguuucaaagcaa

SEQ ID NO: 1407952 - RNA, 19 nt, Homo sapiens
  misc_RNA (1)...(19): siRNA sense strand
gagaccauauccuuaaaug

SEQ ID NO: 1407953 - RNA, 19 nt, Homo sapiens
  misc_RNA (1)...(19): siRNA sense strand
uaaagaggccguuaaggaa

SEQ ID NO: 1407954 - RNA, 19 nt, Homo sapiens
  misc_RNA (1)...(19): siRNA sense strand
guagauccaagcuugauua

SEQ ID NO: 1407955 - RNA, 19 nt, Homo sapiens
  misc_RNA (1)...(19): siRNA sense strand
uggagaagauguugaaaug

SEQ ID NO: 1407956 - RNA, 19 nt, Homo sapiens
  misc_RNA (1)...(19): siRNA sense strand
cagcaguucucuucucuga

SEQ ID NO: 1407957 - RNA, 19 nt, Homo sapiens
  misc_RNA (1)...(19): siRNA sense strand
gaugacacguucuccaguu

SEQ ID NO: 1407958 - RNA, 19 nt, Homo sapiens
  misc_RNA (1)...(19): siRNA sense strand
caaaggcauucaucauaga

SEQ ID NO: 1407959 - RNA, 19 nt, Homo sapiens
  misc_RNA (1)...(19): siRNA sense strand
gauaugauaccggaccuua

SEQ ID NO: 1407960 - RNA, 19 nt, Homo sapiens
  misc_RNA (1)...(19): siRNA sense strand
gggaugcagcuauuuauuu

SEQ ID NO: 1407961 - RNA, 19 nt, Homo sapiens
  misc_RNA (1)...(19): siRNA sense strand
ccaagugacuacaagaaau

SEQ ID NO: 1407962 - RNA, 19 nt, Homo sapiens
  misc_RNA (1)...(19): siRNA sense strand
ugauugacauguauucuga

SEQ ID NO: 1407963 - RNA, 19 nt, Homo sapiens
  misc_RNA (1)...(19): siRNA sense strand
uaauaaagcaguagagguu

SEQ ID NO: 1407964 - RNA, 19 nt, Homo sapiens
  misc_RNA (1)...(19): siRNA sense strand
cauugaagcuauaagagaa

SEQ ID NO: 1407965 - RNA, 19 nt, Homo sapiens
  misc_RNA (1)...(19): siRNA sense strand
ggauucagcagauaauuga

SEQ ID NO: 1407966 - RNA, 19 nt, Homo sapiens
  misc_RNA (1)...(19): siRNA sense strand
aaacuucgcuaucucauac

SEQ ID NO: 1407967 - RNA, 19 nt, Homo sapiens
  misc_RNA (1)...(19): siRNA sense strand
acaaugaaaccaagaauga

SEQ ID NO: 1407968 - RNA, 19 nt, Homo sapiens
  misc_RNA (1)...(19): siRNA sense strand
caaauggacccucauggaa

SEQ ID NO: 1407969 - RNA, 19 nt, Homo sapiens
  misc_RNA (1)...(19): siRNA sense strand
ugaaauagaacuucgaaug

SEQ ID NO: 1407970 - RNA, 19 nt, Homo sapiens
  misc_RNA (1)...(19): siRNA sense strand
uaccggaccuuagugaaua

SEQ ID NO: 1407971 - RNA, 19 nt, Homo sapiens
  misc_RNA (1)...(19): siRNA sense strand
gggaacagcucugaaagca

SEQ ID NO: 1407972 - RNA, 19 nt, Homo sapiens
  misc_RNA (1)...(19): siRNA sense strand
ugacaaaccuuccuuuacg

SEQ ID NO: 1407973 - RNA, 19 nt, Homo sapiens
  misc_RNA (1)...(19): siRNA sense strand
gaacaacaggcugauaguu

SEQ ID NO: 1407974 - RNA, 19 nt, Homo sapiens
  misc_RNA (1)...(19): siRNA sense strand
gauguucucucugauuaug

SEQ ID NO: 1407975 - RNA, 19 nt, Homo sapiens
  misc_RNA (1)...(19): siRNA sense strand
gcauuuaucauucacauca

SEQ ID NO: 1407976 - RNA, 19 nt, Homo sapiens
  misc_RNA (1)...(19): siRNA sense strand
ggaugcagcuauuuauuuu

SEQ ID NO: 1407977 - RNA, 19 nt, Homo sapiens
  misc_RNA (1)...(19): siRNA sense strand
gaacuugaccggaaugaac

SEQ ID NO: 1407978 - RNA, 19 nt, Homo sapiens
  misc_RNA (1)...(19): siRNA sense strand
ggauggugcuuguugacuu

SEQ ID NO: 1407979 - RNA, 19 nt, Homo sapiens
  misc_RNA (1)...(19): siRNA sense strand
acaaaggcauucaucauag

SEQ ID NO: 1407980 - RNA, 19 nt, Homo sapiens
  misc_RNA (1)...(19): siRNA sense strand
acacucaguugaaguauca

SEQ ID NO: 1407981 - RNA, 19 nt, Homo sapiens
  misc_RNA (1)...(19): siRNA sense strand
gaaagugacaagcauuuua

SEQ ID NO: 1407982 - RNA, 19 nt, Homo sapiens
  misc_RNA (1)...(19): siRNA sense strand
gacauugugugggaaauug

SEQ ID NO: 1407983 - RNA, 19 nt, Homo sapiens
  misc_RNA (1)...(19): siRNA sense strand
ggaaguuuaccacuacaaa

SEQ ID NO: 1407984 - RNA, 19 nt, Homo sapiens
  misc_RNA (1)...(19): siRNA sense strand
gcucgaauauucccaagag

SEQ ID NO: 1407985 - RNA, 19 nt, Homo sapiens
  misc_RNA (1)...(19): siRNA sense strand
gaaagaugacaaaggcauu

SEQ ID NO: 1407986 - RNA, 19 nt, Homo sapiens
  misc_RNA (1)...(19): siRNA sense strand
uugauguucucucugauua

SEQ ID NO: 1407987 - RNA, 19 nt, Homo sapiens
  misc_RNA (1)...(19): siRNA sense strand
aaagagguauuggaagauu

SEQ ID NO: 1407988 - RNA, 19 nt, Homo sapiens
  misc_RNA (1)...(19): siRNA sense strand
gggagacccuacaagaaga

SEQ ID NO: 1407989 - RNA, 19 nt, Homo sapiens
  misc_RNA (1)...(19): siRNA sense strand
gaauccuaaugccaucaua

SEQ ID NO: 1407990 - RNA, 19 nt, Homo sapiens
  misc_RNA (1)...(19): siRNA sense strand
agaagaucuugcagcauua

SEQ ID NO: 1407991 - RNA, 19 nt, Homo sapiens
  misc_RNA (1)...(19): siRNA sense strand
caucauagaaagcuuaaga

SEQ ID NO: 1407992 - RNA, 19 nt, Homo sapiens
  misc_RNA (1)...(19): siRNA sense strand
gaagaauuuucccgcuuua

SEQ ID NO: 1407993 - RNA, 19 nt, Homo sapiens
  misc_RNA (1)...(19): siRNA sense strand
caguggauaucaagcuuaa

SEQ ID NO: 1407994 - RNA, 19 nt, Homo sapiens
  misc_RNA (1)...(19): siRNA sense strand
gcauugaagcuauaagaga

SEQ ID NO: 1407995 - RNA, 19 nt, Homo sapiens
  misc_RNA (1)...(19): siRNA sense strand
gaaagcucuucccaaugaa

SEQ ID NO: 1407996 - RNA, 19 nt, Homo sapiens
  misc_RNA (1)...(19): siRNA sense strand
ugacuuaccaggugugauu

SEQ ID NO: 1407997 - RNA, 19 nt, Homo sapiens
  misc_RNA (1)...(19): siRNA sense strand
ggaaaugauugcccaagcu

SEQ ID NO: 1407998 - RNA, 19 nt, Homo sapiens
  misc_RNA (1)...(19): siRNA sense strand
acacagcucuggaauaaaa

SEQ ID NO: 1407999 - RNA, 19 nt, Homo sapiens
  misc_RNA (1)...(19): siRNA sense strand
ugugggaaauugaugagua

SEQ ID NO: 1408000 - RNA, 19 nt, Homo sapiens
  misc_RNA (1)...(19): siRNA sense strand
cuaaaccauuguaaccuuu

SEQ ID NO: 1408001 - RNA, 19 nt, Homo sapiens
  misc_RNA (1)...(19): siRNA sense strand
agagcaugaugacauauuu

SEQ ID NO: 1408002 - RNA, 19 nt, Homo sapiens
  misc_RNA (1)...(19): siRNA sense strand
caacucaugugauugaaaa

SEQ ID NO: 1408003 - RNA, 19 nt, Homo sapiens
  misc_RNA (1)...(19): siRNA sense strand
caagugacuacaagaaauu

SEQ ID NO: 1408004 - RNA, 19 nt, Homo sapiens
  misc_RNA (1)...(19): siRNA sense strand
gcuaaaggcacaccaagug

SEQ ID NO: 1408005 - RNA, 19 nt, Homo sapiens
  misc_RNA (1)...(19): siRNA sense strand
gagaauaugaagaagaguu

SEQ ID NO: 1408006 - RNA, 19 nt, Homo sapiens
  misc_RNA (1)...(19): siRNA sense strand
gcaguauuguuacagacuu

SEQ ID NO: 1408007 - RNA, 19 nt, Homo sapiens
  misc_RNA (1)...(19): siRNA sense strand
uggaaagacuaguguguug

SEQ ID NO: 1408008 - RNA, 19 nt, Homo sapiens
  misc_RNA (1)...(19): siRNA sense strand
ggagaacaaagaauugaga

SEQ ID NO: 1408009 - RNA, 19 nt, Homo sapiens
  misc_RNA (1)...(19): siRNA sense strand
gaaagagcaugaugacaua

SEQ ID NO: 1408010 - RNA, 19 nt, Homo sapiens
  misc_RNA (1)...(19): siRNA sense strand
gaacagcucugaaagcauu

SEQ ID NO: 1408011 - RNA, 19 nt, Homo sapiens
  misc_RNA (1)...(19): siRNA sense strand
gagaagauguugaaaugua

SEQ ID NO: 1408012 - RNA, 19 nt, Homo sapiens
  misc_RNA (1)...(19): siRNA sense strand
gaggacagcuugaggguua

SEQ ID NO: 1408013 - RNA, 19 nt, Homo sapiens
  misc_RNA (1)...(19): siRNA sense strand
gaaacugaauggaagaaua

SEQ ID NO: 1408014 - RNA, 19 nt, Homo sapiens
  misc_RNA (1)...(19): siRNA sense strand
aaagaaggcuguaccguua

SEQ ID NO: 1408015 - RNA, 19 nt, Homo sapiens
  misc_RNA (1)...(19): siRNA sense strand
aaacacagcucuggaauaa

SEQ ID NO: 1408016 - RNA, 19 nt, Homo sapiens
  misc_RNA (1)...(19): siRNA sense strand
gaaauagaacuucgaauga

SEQ ID NO: 1408017 - RNA, 19 nt, Homo sapiens
  misc_RNA (1)...(19): siRNA sense strand
gcaaugauguggucuuguu

SEQ ID NO: 1408018 - RNA, 19 nt, Homo sapiens
  misc_RNA (1)...(19): siRNA sense strand
gaccauauccuuaaaugua

SEQ ID NO: 1408019 - RNA, 19 nt, Homo sapiens
  misc_RNA (1)...(19): siRNA sense strand
gcaaugggaugcagcuauu

SEQ ID NO: 1408020 - RNA, 19 nt, Homo sapiens
  misc_RNA (1)...(19): siRNA sense strand
cagcuuaucuugcaaguga

SEQ ID NO: 1408021 - RNA, 19 nt, Homo sapiens
  misc_RNA (1)...(19): siRNA sense strand
gaaguuaggcgauuagaga

SEQ ID NO: 1408022 - RNA, 19 nt, Homo sapiens
  misc_RNA (1)...(19): siRNA sense strand
gacaaaggcauucaucaua

SEQ ID NO: 1408023 - RNA, 19 nt, Homo sapiens
  misc_RNA (1)...(19): siRNA sense strand
gauccaagcuugauuaagg

SEQ ID NO: 1408024 - RNA, 19 nt, Homo sapiens
  misc_RNA (1)...(19): siRNA sense strand
ggaagaaaguauuaaacga

SEQ ID NO: 1408025 - RNA, 19 nt, Homo sapiens
  misc_RNA (1)...(19): siRNA sense strand
aaacagcucuaaaccauug

SEQ ID NO: 1408026 - RNA, 19 nt, Homo sapiens
  misc_RNA (1)...(19): siRNA sense strand
ugacauguauucugaaguu

SEQ ID NO: 1408027 - RNA, 19 nt, Homo sapiens
  misc_RNA (1)...(19): siRNA sense strand
gaagaccucaagaaaguua

SEQ ID NO: 1408028 - RNA, 19 nt, Homo sapiens
  misc_RNA (1)...(19): siRNA sense strand
gcugaacgcaguauuguua

SEQ ID NO: 1408029 - RNA, 19 nt, Homo sapiens
  misc_RNA (1)...(19): siRNA sense strand
gauggugcuuguugacuua

SEQ ID NO: 1408030 - RNA, 19 nt, Homo sapiens
  misc_RNA (1)...(19): siRNA sense strand
ggacauccuuucagcaguu

SEQ ID NO: 1408031 - RNA, 19 nt, Homo sapiens
  misc_RNA (1)...(19): siRNA sense strand
gaaacacagcucuggaaua

SEQ ID NO: 1408032 - RNA, 19 nt, Homo sapiens
  misc_RNA (1)...(19): siRNA sense strand
ggaaauccuucaacaaucu

SEQ ID NO: 1408033 - RNA, 19 nt, Homo sapiens
  misc_RNA (1)...(19): siRNA sense strand
gcagauaauugaaggaaag

SEQ ID NO: 1408034 - RNA, 19 nt, Homo sapiens
  misc_RNA (1)...(19): siRNA sense strand
ugaaagcauugaagcuaua

SEQ ID NO: 1408035 - RNA, 19 nt, Homo sapiens
  misc_RNA (1)...(19): siRNA sense strand
ggaaagagcaugaugacau

SEQ ID NO: 1408036 - RNA, 19 nt, Homo sapiens
  misc_RNA (1)...(19): siRNA sense strand
ucacgaagcauuuaucauu

SEQ ID NO: 1408037 - RNA, 19 nt, Homo sapiens
  misc_RNA (1)...(19): siRNA sense strand
gcaguucucuucucugaca

SEQ ID NO: 1408038 - RNA, 19 nt, Homo sapiens
  misc_RNA (1)...(19): siRNA sense strand
uuaaagagguauuggaaga

SEQ ID NO: 1408039 - RNA, 19 nt, Homo sapiens
  misc_RNA (1)...(19): siRNA sense strand
aaacugaaauucucuccaa

SEQ ID NO: 1408040 - RNA, 19 nt, Homo sapiens
  misc_RNA (1)...(19): siRNA sense strand
ggcaacaacuuacaaauac

SEQ ID NO: 1408041 - RNA, 19 nt, Homo sapiens
  misc_RNA (1)...(19): siRNA sense strand
gaagaccgauccauaucug

SEQ ID NO: 1408042 - RNA, 19 nt, Homo sapiens
  misc_RNA (1)...(19): siRNA sense strand
ugaccggaaugaacuauuu

SEQ ID NO: 1408043 - RNA, 19 nt, Homo sapiens
  misc_RNA (1)...(19): siRNA sense strand
caaugaaagcuuuagguua

SEQ ID NO: 1408044 - RNA, 19 nt, Homo sapiens
  misc_RNA (1)...(19): siRNA sense strand
ggaccuuagugaauauaaa

SEQ ID NO: 1408045 - RNA, 19 nt, Homo sapiens
  misc_RNA (1)...(19): siRNA sense strand
ggaaauugaugaguauauc

SEQ ID NO: 1408046 - RNA, 19 nt, Homo sapiens
  misc_RNA (1)...(19): siRNA sense strand
cggaagaccucaagaaagu

SEQ ID NO: 1408047 - RNA, 19 nt, Homo sapiens
  misc_RNA (1)...(19): siRNA sense strand
gcaucaaguuuauagaaga

SEQ ID NO: 1408048 - RNA, 19 nt, Homo sapiens
  misc_RNA (1)...(19): siRNA sense strand
gcacccagcuuaucuugca

SEQ ID NO: 1408049 - RNA, 19 nt, Homo sapiens
  misc_RNA (1)...(19): siRNA sense strand
ggaagaaucggacccaaga

SEQ ID NO: 1408050 - RNA, 19 nt, Homo sapiens
  misc_RNA (1)...(19): siRNA sense strand
ugaaauccuugaugaaguu

SEQ ID NO: 1408051 - RNA, 19 nt, Homo sapiens
  misc_RNA (1)...(19): siRNA sense strand
gcugauaguuucaaagcaa

SEQ ID NO: 1408052 - RNA, 19 nt, Homo sapiens
  misc_RNA (1)...(19): siRNA sense strand
gagaccauauccuuaaaug

SEQ ID NO: 1408053 - RNA, 19 nt, Homo sapiens
  misc_RNA (1)...(19): siRNA sense strand
uaaagaggccguuaaggaa

SEQ ID NO: 1408054 - RNA, 19 nt, Homo sapiens
  misc_RNA (1)...(19): siRNA sense strand
guagauccaagcuugauua

SEQ ID NO: 1408055 - RNA, 19 nt, Homo sapiens
  misc_RNA (1)...(19): siRNA sense strand
uggagaagauguugaaaug

SEQ ID NO: 1408056 - RNA, 19 nt, Homo sapiens
  misc_RNA (1)...(19): siRNA sense strand
cagcaguucucuucucuga

SEQ ID NO: 1408057 - RNA, 19 nt, Homo sapiens
  misc_RNA (1)...(19): siRNA sense strand
gaugacacguucuccaguu

SEQ ID NO: 1408058 - RNA, 19 nt, Homo sapiens
  misc_RNA (1)...(19): siRNA sense strand
caaaggcauucaucauaga

SEQ ID NO: 1408059 - RNA, 19 nt, Homo sapiens
  misc_RNA (1)...(19): siRNA sense strand
gauaugauaccggaccuua

SEQ ID NO: 1408060 - RNA, 19 nt, Homo sapiens
  misc_RNA (1)...(19): siRNA sense strand
gggaugcagcuauuuauuu

SEQ ID NO: 1408061 - RNA, 19 nt, Homo sapiens
  misc_RNA (1)...(19): siRNA sense strand
ccaagugacuacaagaaau

SEQ ID NO: 1408062 - RNA, 19 nt, Homo sapiens
  misc_RNA (1)...(19): siRNA sense strand
ugauugacauguauucuga

SEQ ID NO: 1408063 - RNA, 19 nt, Homo sapiens
  misc_RNA (1)...(19): siRNA sense strand
uaauaaagcaguagagguu

SEQ ID NO: 1408064 - RNA, 19 nt, Homo sapiens
  misc_RNA (1)...(19): siRNA sense strand
cauugaagcuauaagagaa

SEQ ID NO: 1408065 - RNA, 19 nt, Homo sapiens
  misc_RNA (1)...(19): siRNA sense strand
ggauucagcagauaauuga

SEQ ID NO: 1408066 - RNA, 19 nt, Homo sapiens
  misc_RNA (1)...(19): siRNA sense strand
aaacuucgcuaucucauac

SEQ ID NO: 1408067 - RNA, 19 nt, Homo sapiens
  misc_RNA (1)...(19): siRNA sense strand
acaaugaaaccaagaauga

SEQ ID NO: 1408068 - RNA, 19 nt, Homo sapiens
  misc_RNA (1)...(19): siRNA sense strand
caaauggacccucauggaa

SEQ ID NO: 1408069 - RNA, 19 nt, Homo sapiens
  misc_RNA (1)...(19): siRNA sense strand
ugaaauagaacuucgaaug

SEQ ID NO: 1408070 - RNA, 19 nt, Homo sapiens
  misc_RNA (1)...(19): siRNA sense strand
uaccggaccuuagugaaua

SEQ ID NO: 1408071 - RNA, 19 nt, Homo sapiens
  misc_RNA (1)...(19): siRNA sense strand
gggaacagcucugaaagca

SEQ ID NO: 1408072 - RNA, 19 nt, Homo sapiens
  misc_RNA (1)...(19): siRNA sense strand
ugacaaaccuuccuuuacg

SEQ ID NO: 1408073 - RNA, 19 nt, Homo sapiens
  misc_RNA (1)...(19): siRNA sense strand
gaacaacaggcugauaguu

SEQ ID NO: 1408074 - RNA, 19 nt, Homo sapiens
  misc_RNA (1)...(19): siRNA sense strand
gauguucucucugauuaug

SEQ ID NO: 1408075 - RNA, 19 nt, Homo sapiens
  misc_RNA (1)...(19): siRNA sense strand
gcauuuaucauucacauca

SEQ ID NO: 1408076 - RNA, 19 nt, Homo sapiens
  misc_RNA (1)...(19): siRNA sense strand
ggaugcagcuauuuauuuu

SEQ ID NO: 1408077 - RNA, 19 nt, Homo sapiens
  misc_RNA (1)...(19): siRNA sense strand
gaacuugaccggaaugaac

SEQ ID NO: 1408078 - RNA, 19 nt, Homo sapiens
  misc_RNA (1)...(19): siRNA sense strand
ggauggugcuuguugacuu

SEQ ID NO: 1408079 - RNA, 19 nt, Homo sapiens
  misc_RNA (1)...(19): siRNA sense strand
acaaaggcauucaucauag

SEQ ID NO: 1408080 - RNA, 19 nt, Homo sapiens
  misc_RNA (1)...(19): siRNA sense strand
acacucaguugaaguauca

SEQ ID NO: 1408081 - RNA, 19 nt, Homo sapiens
  misc_RNA (1)...(19): siRNA sense strand
gaaagugacaagcauuuua

SEQ ID NO: 1408082 - RNA, 19 nt, Homo sapiens
  misc_RNA (1)...(19): siRNA sense strand
gacauugugugggaaauug

SEQ ID NO: 1408083 - RNA, 19 nt, Homo sapiens
  misc_RNA (1)...(19): siRNA sense strand
ggaaguuuaccacuacaaa

SEQ ID NO: 1408084 - RNA, 19 nt, Homo sapiens
  misc_RNA (1)...(19): siRNA sense strand
gcucgaauauucccaagag

SEQ ID NO: 1408085 - RNA, 19 nt, Homo sapiens
  misc_RNA (1)...(19): siRNA sense strand
gaaagaugacaaaggcauu

SEQ ID NO: 1408086 - RNA, 19 nt, Homo sapiens
  misc_RNA (1)...(19): siRNA sense strand
uugauguucucucugauua

SEQ ID NO: 1408087 - RNA, 19 nt, Homo sapiens
  misc_RNA (1)...(19): siRNA sense strand
aaagagguauuggaagauu

SEQ ID NO: 1408088 - RNA, 19 nt, Homo sapiens
  misc_RNA (1)...(19): siRNA sense strand
gggagacccuacaagaaga

SEQ ID NO: 1408089 - RNA, 19 nt, Homo sapiens
  misc_RNA (1)...(19): siRNA sense strand
gaauccuaaugccaucaua

SEQ ID NO: 1408090 - RNA, 19 nt, Homo sapiens
  misc_RNA (1)...(19): siRNA sense strand
agaagaucuugcagcauua

SEQ ID NO: 1408091 - RNA, 19 nt, Homo sapiens
  misc_RNA (1)...(19): siRNA sense strand
caucauagaaagcuuaaga

SEQ ID NO: 1408092 - RNA, 19 nt, Homo sapiens
  misc_RNA (1)...(19): siRNA sense strand
gaagaauuuucccgcuuua

SEQ ID NO: 1408093 - RNA, 19 nt, Homo sapiens
  misc_RNA (1)...(19): siRNA sense strand
caguggauaucaagcuuaa

SEQ ID NO: 1408094 - RNA, 19 nt, Homo sapiens
  misc_RNA (1)...(19): siRNA sense strand
gcauugaagcuauaagaga

SEQ ID NO: 1408095 - RNA, 19 nt, Homo sapiens
  misc_RNA (1)...(19): siRNA sense strand
gaaagcucuucccaaugaa

SEQ ID NO: 1408096 - RNA, 19 nt, Homo sapiens
  misc_RNA (1)...(19): siRNA sense strand
ugacuuaccaggugugauu

SEQ ID NO: 1408097 - RNA, 19 nt, Homo sapiens
  misc_RNA (1)...(19): siRNA sense strand
ggaaaugauugcccaagcu

SEQ ID NO: 1408098 - RNA, 19 nt, Homo sapiens
  misc_RNA (1)...(19): siRNA sense strand
acacagcucuggaauaaaa

SEQ ID NO: 1408099 - RNA, 19 nt, Homo sapiens
  misc_RNA (1)...(19): siRNA sense strand
ugugggaaauugaugagua

SEQ ID NO: 1408100 - RNA, 19 nt, Homo sapiens
  misc_RNA (1)...(19): siRNA sense strand
cuaaaccauuguaaccuuu

SEQ ID NO: 1408101 - RNA, 19 nt, Homo sapiens
  misc_RNA (1)...(19): siRNA sense strand
agagcaugaugacauauuu

SEQ ID NO: 1408102 - RNA, 19 nt, Homo sapiens
  misc_RNA (1)...(19): siRNA sense strand
caacucaugugauugaaaa

SEQ ID NO: 1408103 - RNA, 19 nt, Homo sapiens
  misc_RNA (1)...(19): siRNA sense strand
caagugacuacaagaaauu

SEQ ID NO: 1408104 - RNA, 19 nt, Homo sapiens
  misc_RNA (1)...(19): siRNA sense strand
gcuaaaggcacaccaagug

SEQ ID NO: 1408105 - RNA, 19 nt, Homo sapiens
  misc_RNA (1)...(19): siRNA sense strand
gagaauaugaagaagaguu

SEQ ID NO: 1408106 - RNA, 19 nt, Homo sapiens
  misc_RNA (1)...(19): siRNA sense strand
gcaguauuguuacagacuu

SEQ ID NO: 1408107 - RNA, 19 nt, Homo sapiens
  misc_RNA (1)...(19): siRNA sense strand
uggaaagacuaguguguug

SEQ ID NO: 1408108 - RNA, 19 nt, Homo sapiens
  misc_RNA (1)...(19): siRNA sense strand
ggagaacaaagaauugaga

SEQ ID NO: 1408109 - RNA, 19 nt, Homo sapiens
  misc_RNA (1)...(19): siRNA sense strand
gaaagagcaugaugacaua

SEQ ID NO: 1408110 - RNA, 19 nt, Homo sapiens
  misc_RNA (1)...(19): siRNA sense strand
gaacagcucugaaagcauu

SEQ ID NO: 1408111 - RNA, 19 nt, Homo sapiens
  misc_RNA (1)...(19): siRNA sense strand
gagaagauguugaaaugua

SEQ ID NO: 1408112 - RNA, 19 nt, Homo sapiens
  misc_RNA (1)...(19): siRNA sense strand
gaggacagcuugaggguua

SEQ ID NO: 1408113 - RNA, 19 nt, Homo sapiens
  misc_RNA (1)...(19): siRNA sense strand
gaaacugaauggaagaaua

SEQ ID NO: 1408114 - RNA, 19 nt, Homo sapiens
  misc_RNA (1)...(19): siRNA sense strand
aaagaaggcuguaccguua

SEQ ID NO: 1408115 - RNA, 19 nt, Homo sapiens
  misc_RNA (1)...(19): siRNA sense strand
aaacacagcucuggaauaa

SEQ ID NO: 1408116 - RNA, 19 nt, Homo sapiens
  misc_RNA (1)...(19): siRNA sense strand
gaaauagaacuucgaauga

SEQ ID NO: 1408117 - RNA, 19 nt, Homo sapiens
  misc_RNA (1)...(19): siRNA sense strand
gcaaugauguggucuuguu

SEQ ID NO: 1408118 - RNA, 19 nt, Homo sapiens
  misc_RNA (1)...(19): siRNA sense strand
gaccauauccuuaaaugua

SEQ ID NO: 1408119 - RNA, 19 nt, Homo sapiens
  misc_RNA (1)...(19): siRNA sense strand
gcaaugggaugcagcuauu

SEQ ID NO: 1408120 - RNA, 19 nt, Homo sapiens
  misc_RNA (1)...(19): siRNA sense strand
cagcuuaucuugcaaguga

SEQ ID NO: 1408121 - RNA, 19 nt, Homo sapiens
  misc_RNA (1)...(19): siRNA sense strand
gaaguuaggcgauuagaga

SEQ ID NO: 1408122 - RNA, 19 nt, Homo sapiens
  misc_RNA (1)...(19): siRNA sense strand
gacaaaggcauucaucaua

SEQ ID NO: 1408123 - RNA, 19 nt, Homo sapiens
  misc_RNA (1)...(19): siRNA sense strand
gauccaagcuugauuaagg

SEQ ID NO: 1408124 - RNA, 19 nt, Homo sapiens
  misc_RNA (1)...(19): siRNA sense strand
ggaagaaaguauuaaacga

SEQ ID NO: 1408125 - RNA, 19 nt, Homo sapiens
  misc_RNA (1)...(19): siRNA sense strand
aaacagcucuaaaccauug

SEQ ID NO: 1408126 - RNA, 19 nt, Homo sapiens
  misc_RNA (1)...(19): siRNA sense strand
ugacauguauucugaaguu

SEQ ID NO: 1408127 - RNA, 19 nt, Homo sapiens
  misc_RNA (1)...(19): siRNA sense strand
gaagaccucaagaaaguua

SEQ ID NO: 1408128 - RNA, 19 nt, Homo sapiens
  misc_RNA (1)...(19): siRNA sense strand
gcugaacgcaguauuguua

SEQ ID NO: 1408129 - RNA, 19 nt, Homo sapiens
  misc_RNA (1)...(19): siRNA sense strand
gauggugcuuguugacuua

SEQ ID NO: 1408130 - RNA, 19 nt, Homo sapiens
  misc_RNA (1)...(19): siRNA sense strand
ggacauccuuucagcaguu

SEQ ID NO: 1408131 - RNA, 19 nt, Homo sapiens
  misc_RNA (1)...(19): siRNA sense strand
gaaacacagcucuggaaua

SEQ ID NO: 1408132 - RNA, 19 nt, Homo sapiens
  misc_RNA (1)...(19): siRNA sense strand
ggaaauccuucaacaaucu

SEQ ID NO: 1408133 - RNA, 19 nt, Homo sapiens
  misc_RNA (1)...(19): siRNA sense strand
gcagauaauugaaggaaag

SEQ ID NO: 1408134 - RNA, 19 nt, Homo sapiens
  misc_RNA (1)...(19): siRNA sense strand
ugaaagcauugaagcuaua

SEQ ID NO: 1408135 - RNA, 19 nt, Homo sapiens
  misc_RNA (1)...(19): siRNA sense strand
ggaaagagcaugaugacau

SEQ ID NO: 1408136 - RNA, 19 nt, Homo sapiens
  misc_RNA (1)...(19): siRNA sense strand
ucacgaagcauuuaucauu

SEQ ID NO: 1408137 - RNA, 19 nt, Homo sapiens
  misc_RNA (1)...(19): siRNA sense strand
gcaguucucuucucugaca

SEQ ID NO: 1408138 - RNA, 19 nt, Homo sapiens
  misc_RNA (1)...(19): siRNA sense strand
uuaaagagguauuggaaga

SEQ ID NO: 1408139 - RNA, 19 nt, Homo sapiens
  misc_RNA (1)...(19): siRNA sense strand
aaacugaaauucucuccaa

SEQ ID NO: 1408140 - RNA, 19 nt, Homo sapiens
  misc_RNA (1)...(19): siRNA sense strand
ggcaacaacuuacaaauac

SEQ ID NO: 1408141 - RNA, 19 nt, Homo sapiens
  misc_RNA (1)...(19): siRNA sense strand
gaagaccgauccauaucug

SEQ ID NO: 1408142 - RNA, 19 nt, Homo sapiens
  misc_RNA (1)...(19): siRNA sense strand
ugaccggaaugaacuauuu

SEQ ID NO: 1408143 - RNA, 19 nt, Homo sapiens
  misc_RNA (1)...(19): siRNA sense strand
caaugaaagcuuuagguua

SEQ ID NO: 1408144 - RNA, 19 nt, Homo sapiens
  misc_RNA (1)...(19): siRNA sense strand
ggaccuuagugaauauaaa

SEQ ID NO: 1408145 - RNA, 19 nt, Homo sapiens
  misc_RNA (1)...(19): siRNA sense strand
ggaaauugaugaguauauc

SEQ ID NO: 1408146 - RNA, 19 nt, Homo sapiens
  misc_RNA (1)...(19): siRNA sense strand
cggaagaccucaagaaagu

SEQ ID NO: 1408147 - RNA, 19 nt, Homo sapiens
  misc_RNA (1)...(19): siRNA sense strand
gcaucaaguuuauagaaga

SEQ ID NO: 1408148 - RNA, 19 nt, Homo sapiens
  misc_RNA (1)...(19): siRNA sense strand
gcacccagcuuaucuugca

SEQ ID NO: 1408149 - RNA, 19 nt, Homo sapiens
  misc_RNA (1)...(19): siRNA sense strand
ggaagaaucggacccaaga

SEQ ID NO: 1408150 - RNA, 19 nt, Homo sapiens
  misc_RNA (1)...(19): siRNA sense strand
ugaaauccuugaugaaguu

SEQ ID NO: 1408151 - RNA, 19 nt, Homo sapiens
  misc_RNA (1)...(19): siRNA sense strand
gcugauaguuucaaagcaa

SEQ ID NO: 1408152 - RNA, 19 nt, Homo sapiens
  misc_RNA (1)...(19): siRNA sense strand
gagaccauauccuuaaaug

SEQ ID NO: 1408153 - RNA, 19 nt, Homo sapiens
  misc_RNA (1)...(19): siRNA sense strand
uaaagaggccguuaaggaa

SEQ ID NO: 1408154 - RNA, 19 nt, Homo sapiens
  misc_RNA (1)...(19): siRNA sense strand
guagauccaagcuugauua

SEQ ID NO: 1408155 - RNA, 19 nt, Homo sapiens
  misc_RNA (1)...(19): siRNA sense strand
uggagaagauguugaaaug

SEQ ID NO: 1408156 - RNA, 19 nt, Homo sapiens
  misc_RNA (1)...(19): siRNA sense strand
cagcaguucucuucucuga

SEQ ID NO: 1408157 - RNA, 19 nt, Homo sapiens
  misc_RNA (1)...(19): siRNA sense strand
gaugacacguucuccaguu

SEQ ID NO: 1408158 - RNA, 19 nt, Homo sapiens
  misc_RNA (1)...(19): siRNA sense strand
caaaggcauucaucauaga

SEQ ID NO: 1408159 - RNA, 19 nt, Homo sapiens
  misc_RNA (1)...(19): siRNA sense strand
gauaugauaccggaccuua

SEQ ID NO: 1408160 - RNA, 19 nt, Homo sapiens
  misc_RNA (1)...(19): siRNA sense strand
gggaugcagcuauuuauuu

SEQ ID NO: 1408161 - RNA, 19 nt, Homo sapiens
  misc_RNA (1)...(19): siRNA sense strand
ccaagugacuacaagaaau

SEQ ID NO: 1408162 - RNA, 19 nt, Homo sapiens
  misc_RNA (1)...(19): siRNA sense strand
ugauugacauguauucuga

SEQ ID NO: 1408163 - RNA, 19 nt, Homo sapiens
  misc_RNA (1)...(19): siRNA sense strand
uaauaaagcaguagagguu

SEQ ID NO: 1408164 - RNA, 19 nt, Homo sapiens
  misc_RNA (1)...(19): siRNA sense strand
cauugaagcuauaagagaa

SEQ ID NO: 1408165 - RNA, 19 nt, Homo sapiens
  misc_RNA (1)...(19): siRNA sense strand
ggauucagcagauaauuga

SEQ ID NO: 1408166 - RNA, 19 nt, Homo sapiens
  misc_RNA (1)...(19): siRNA sense strand
aaacuucgcuaucucauac

SEQ ID NO: 1408167 - RNA, 19 nt, Homo sapiens
  misc_RNA (1)...(19): siRNA sense strand
acaaugaaaccaagaauga

SEQ ID NO: 1408168 - RNA, 19 nt, Homo sapiens
  misc_RNA (1)...(19): siRNA sense strand
caaauggacccucauggaa

SEQ ID NO: 1408169 - RNA, 19 nt, Homo sapiens
  misc_RNA (1)...(19): siRNA sense strand
ugaaauagaacuucgaaug

SEQ ID NO: 1408170 - RNA, 19 nt, Homo sapiens
  misc_RNA (1)...(19): siRNA sense strand
uaccggaccuuagugaaua

SEQ ID NO: 1408171 - RNA, 19 nt, Homo sapiens
  misc_RNA (1)...(19): siRNA sense strand
gggaacagcucugaaagca

SEQ ID NO: 1408172 - RNA, 19 nt, Homo sapiens
  misc_RNA (1)...(19): siRNA sense strand
ugacaaaccuuccuuuacg

SEQ ID NO: 1408173 - RNA, 19 nt, Homo sapiens
  misc_RNA (1)...(19): siRNA sense strand
gaacaacaggcugauaguu

SEQ ID NO: 1408174 - RNA, 19 nt, Homo sapiens
  misc_RNA (1)...(19): siRNA sense strand
gauguucucucugauuaug

SEQ ID NO: 1408175 - RNA, 19 nt, Homo sapiens
  misc_RNA (1)...(19): siRNA sense strand
gcauuuaucauucacauca

SEQ ID NO: 1408176 - RNA, 19 nt, Homo sapiens
  misc_RNA (1)...(19): siRNA sense strand
ggaugcagcuauuuauuuu

SEQ ID NO: 1408177 - RNA, 19 nt, Homo sapiens
  misc_RNA (1)...(19): siRNA sense strand
gaacuugaccggaaugaac

SEQ ID NO: 1408178 - RNA, 19 nt, Homo sapiens
  misc_RNA (1)...(19): siRNA sense strand
ggauggugcuuguugacuu

SEQ ID NO: 1408179 - RNA, 19 nt, Homo sapiens
  misc_RNA (1)...(19): siRNA sense strand
acaaaggcauucaucauag

SEQ ID NO: 1408180 - RNA, 19 nt, Homo sapiens
  misc_RNA (1)...(19): siRNA sense strand
acacucaguugaaguauca

SEQ ID NO: 1408181 - RNA, 19 nt, Homo sapiens
  misc_RNA (1)...(19): siRNA sense strand
gaaagugacaagcauuuua

SEQ ID NO: 1408182 - RNA, 19 nt, Homo sapiens
  misc_RNA (1)...(19): siRNA sense strand
gacauugugugggaaauug

SEQ ID NO: 1408183 - RNA, 19 nt, Homo sapiens
  misc_RNA (1)...(19): siRNA sense strand
ggaaguuuaccacuacaaa

SEQ ID NO: 1408184 - RNA, 19 nt, Homo sapiens
  misc_RNA (1)...(19): siRNA sense strand
gcucgaauauucccaagag

SEQ ID NO: 1408185 - RNA, 19 nt, Homo sapiens
  misc_RNA (1)...(19): siRNA sense strand
gaaagaugacaaaggcauu

SEQ ID NO: 1408186 - RNA, 19 nt, Homo sapiens
  misc_RNA (1)...(19): siRNA sense strand
uugauguucucucugauua

SEQ ID NO: 1408187 - RNA, 19 nt, Homo sapiens
  misc_RNA (1)...(19): siRNA sense strand
aaagagguauuggaagauu

SEQ ID NO: 1408188 - RNA, 19 nt, Homo sapiens
  misc_RNA (1)...(19): siRNA sense strand
gggagacccuacaagaaga

SEQ ID NO: 1408189 - RNA, 19 nt, Homo sapiens
  misc_RNA (1)...(19): siRNA sense strand
gaauccuaaugccaucaua

SEQ ID NO: 1408190 - RNA, 19 nt, Homo sapiens
  misc_RNA (1)...(19): siRNA sense strand
agaagaucuugcagcauua

SEQ ID NO: 1408191 - RNA, 19 nt, Homo sapiens
  misc_RNA (1)...(19): siRNA sense strand
caucauagaaagcuuaaga

SEQ ID NO: 1408192 - RNA, 19 nt, Homo sapiens
  misc_RNA (1)...(19): siRNA sense strand
gaagaauuuucccgcuuua

SEQ ID NO: 1408193 - RNA, 19 nt, Homo sapiens
  misc_RNA (1)...(19): siRNA sense strand
caguggauaucaagcuuaa

SEQ ID NO: 1408194 - RNA, 19 nt, Homo sapiens
  misc_RNA (1)...(19): siRNA sense strand
gcauugaagcuauaagaga

SEQ ID NO: 1408195 - RNA, 19 nt, Homo sapiens
  misc_RNA (1)...(19): siRNA sense strand
gaaagcucuucccaaugaa

SEQ ID NO: 1408196 - RNA, 19 nt, Homo sapiens
  misc_RNA (1)...(19): siRNA sense strand
ugacuuaccaggugugauu

SEQ ID NO: 1408197 - RNA, 19 nt, Homo sapiens
  misc_RNA (1)...(19): siRNA sense strand
ggaaaugauugcccaagcu

SEQ ID NO: 1408198 - RNA, 19 nt, Homo sapiens
  misc_RNA (1)...(19): siRNA sense strand
acacagcucuggaauaaaa

SEQ ID NO: 1408199 - RNA, 19 nt, Homo sapiens
  misc_RNA (1)...(19): siRNA sense strand
ugugggaaauugaugagua

SEQ ID NO: 1408200 - RNA, 19 nt, Homo sapiens
  misc_RNA (1)...(19): siRNA sense strand
cuaaaccauuguaaccuuu

SEQ ID NO: 1408201 - RNA, 19 nt, Homo sapiens
  misc_RNA (1)...(19): siRNA sense strand
agagcaugaugacauauuu

SEQ ID NO: 1408202 - RNA, 19 nt, Homo sapiens
  misc_RNA (1)...(19): siRNA sense strand
caacucaugugauugaaaa

SEQ ID NO: 1408203 - RNA, 19 nt, Homo sapiens
  misc_RNA (1)...(19): siRNA sense strand
caagugacuacaagaaauu

SEQ ID NO: 1408204 - RNA, 19 nt, Homo sapiens
  misc_RNA (1)...(19): siRNA sense strand
gcuaaaggcacaccaagug

SEQ ID NO: 1408205 - RNA, 19 nt, Homo sapiens
  misc_RNA (1)...(19): siRNA sense strand
gagaauaugaagaagaguu

SEQ ID NO: 1408206 - RNA, 19 nt, Homo sapiens
  misc_RNA (1)...(19): siRNA sense strand
gcaguauuguuacagacuu

SEQ ID NO: 1408207 - RNA, 19 nt, Homo sapiens
  misc_RNA (1)...(19): siRNA sense strand
uggaaagacuaguguguug

SEQ ID NO: 1408208 - RNA, 19 nt, Homo sapiens
  misc_RNA (1)...(19): siRNA sense strand
ggagaacaaagaauugaga

SEQ ID NO: 1408209 - RNA, 19 nt, Homo sapiens
  misc_RNA (1)...(19): siRNA sense strand
gaaaugauguucugugaua

SEQ ID NO: 1408210 - RNA, 19 nt, Homo sapiens
  misc_RNA (1)...(19): siRNA sense strand
gaauuugucugaaggguaa

SEQ ID NO: 1408211 - RNA, 19 nt, Homo sapiens
  misc_RNA (1)...(19): siRNA sense strand
caauggagcuuguuucuau

SEQ ID NO: 1408212 - RNA, 19 nt, Homo sapiens
  misc_RNA (1)...(19): siRNA sense strand
gagcuuguuucuaugauua

SEQ ID NO: 1408213 - RNA, 19 nt, Homo sapiens
  misc_RNA (1)...(19): siRNA sense strand
caagggaaguacaaaguuu

SEQ ID NO: 1408214 - RNA, 19 nt, Homo sapiens
  misc_RNA (1)...(19): siRNA sense strand
gugaugaagugauugauuu

SEQ ID NO: 1408215 - RNA, 19 nt, Homo sapiens
  misc_RNA (1)...(19): siRNA sense strand
uaaagaguauucccaaaug

SEQ ID NO: 1408216 - RNA, 19 nt, Homo sapiens
  misc_RNA (1)...(19): siRNA sense strand
guaaagugccugaguauau

SEQ ID NO: 1408217 - RNA, 19 nt, Homo sapiens
  misc_RNA (1)...(19): siRNA sense strand
ucagugcacucuaggcuua

SEQ ID NO: 1408218 - RNA, 19 nt, Homo sapiens
  misc_RNA (1)...(19): siRNA sense strand
gaaaggaaaggcugaauca

SEQ ID NO: 1408219 - RNA, 19 nt, Homo sapiens
  misc_RNA (1)...(19): siRNA sense strand
gaagaaagaagagcuuauu

SEQ ID NO: 1408220 - RNA, 19 nt, Homo sapiens
  misc_RNA (1)...(19): siRNA sense strand
gaacaagucagugaauauu

SEQ ID NO: 1408221 - RNA, 19 nt, Homo sapiens
  misc_RNA (1)...(19): siRNA sense strand
ccaguaaagugccugagua

SEQ ID NO: 1408222 - RNA, 19 nt, Homo sapiens
  misc_RNA (1)...(19): siRNA sense strand
uaaagugccugaguauauu

SEQ ID NO: 1408223 - RNA, 19 nt, Homo sapiens
  misc_RNA (1)...(19): siRNA sense strand
gaaacucagugcacucuag

SEQ ID NO: 1408224 - RNA, 19 nt, Homo sapiens
  misc_RNA (1)...(19): siRNA sense strand
gcgcagugaugaagugauu

SEQ ID NO: 1408225 - RNA, 19 nt, Homo sapiens
  misc_RNA (1)...(19): siRNA sense strand
gguaaggaguccaacaaga

SEQ ID NO: 1408226 - RNA, 19 nt, Homo sapiens
  misc_RNA (1)...(19): siRNA sense strand
ugacagagguuaucauacu

SEQ ID NO: 1408227 - RNA, 19 nt, Homo sapiens
  misc_RNA (1)...(19): siRNA sense strand
aaagaacgucaacgaauua

SEQ ID NO: 1408228 - RNA, 19 nt, Homo sapiens
  misc_RNA (1)...(19): siRNA sense strand
guaaggaguccaacaagaa

SEQ ID NO: 1408229 - RNA, 19 nt, Homo sapiens
  misc_RNA (1)...(19): siRNA sense strand
caaaugcaacaacagaaua

SEQ ID NO: 1408230 - RNA, 19 nt, Homo sapiens
  misc_RNA (1)...(19): siRNA sense strand
ggaaaggcugaaucacuua

SEQ ID NO: 1408231 - RNA, 19 nt, Homo sapiens
  misc_RNA (1)...(19): siRNA sense strand
ggcaguguauggaauguaa

SEQ ID NO: 1408232 - RNA, 19 nt, Homo sapiens
  misc_RNA (1)...(19): siRNA sense strand
acaagucagugaauauuug

SEQ ID NO: 1408233 - RNA, 19 nt, Homo sapiens
  misc_RNA (1)...(19): siRNA sense strand
cagcagaauuuaauagcaa

SEQ ID NO: 1408234 - RNA, 19 nt, Homo sapiens
  misc_RNA (1)...(19): siRNA sense strand
gaaagaagagcuuauuuug

SEQ ID NO: 1408235 - RNA, 19 nt, Homo sapiens
  misc_RNA (1)...(19): siRNA sense strand
gauguucugugauaugugu

SEQ ID NO: 1408236 - RNA, 19 nt, Homo sapiens
  misc_RNA (1)...(19): siRNA sense strand
caacagagcgaacaaaggu

SEQ ID NO: 1408237 - RNA, 19 nt, Homo sapiens
  misc_RNA (1)...(19): siRNA sense strand
ggacagcuccucuggcaau

SEQ ID NO: 1408238 - RNA, 19 nt, Homo sapiens
  misc_RNA (1)...(19): siRNA sense strand
ccaaacaugcugaguauuc

SEQ ID NO: 1408239 - RNA, 19 nt, Homo sapiens
  misc_RNA (1)...(19): siRNA sense strand
cagcuccucuggcaaugua

SEQ ID NO: 1408240 - RNA, 19 nt, Homo sapiens
  misc_RNA (1)...(19): siRNA sense strand
gaaaguugaagccaguaaa

SEQ ID NO: 1408241 - RNA, 19 nt, Homo sapiens
  misc_RNA (1)...(19): siRNA sense strand
cgaauuacagaccauuaua

SEQ ID NO: 1408242 - RNA, 19 nt, Homo sapiens
  misc_RNA (1)...(19): siRNA sense strand
ggagaaacucuaccugaga

SEQ ID NO: 1408243 - RNA, 19 nt, Homo sapiens
  misc_RNA (1)...(19): siRNA sense strand
aagaacaagucagugaaua

SEQ ID NO: 1408244 - RNA, 19 nt, Homo sapiens
  misc_RNA (1)...(19): siRNA sense strand
ggagcuuguuucuaugauu

SEQ ID NO: 1408245 - RNA, 19 nt, Homo sapiens
  misc_RNA (1)...(19): siRNA sense strand
ggugugaccuccuuuaaaa

SEQ ID NO: 1408246 - RNA, 19 nt, Homo sapiens
  misc_RNA (1)...(19): siRNA sense strand
gcagcagaauuuaauagca

SEQ ID NO: 1408247 - RNA, 19 nt, Homo sapiens
  misc_RNA (1)...(19): siRNA sense strand
ucaggucgcuggauuugug

SEQ ID NO: 1408248 - RNA, 19 nt, Homo sapiens
  misc_RNA (1)...(19): siRNA sense strand
ugagagagcuaaaugucau

SEQ ID NO: 1408249 - RNA, 19 nt, Homo sapiens
  misc_RNA (1)...(19): siRNA sense strand
uaacagcauugcgcaguga

SEQ ID NO: 1408250 - RNA, 19 nt, Homo sapiens
  misc_RNA (1)...(19): siRNA sense strand
agacagugauggugauuca

SEQ ID NO: 1408251 - RNA, 19 nt, Homo sapiens
  misc_RNA (1)...(19): siRNA sense strand
aggaaaggcugaaucacuu

SEQ ID NO: 1408252 - RNA, 19 nt, Homo sapiens
  misc_RNA (1)...(19): siRNA sense strand
caugcugaguauucuguua

SEQ ID NO: 1408253 - RNA, 19 nt, Homo sapiens
  misc_RNA (1)...(19): siRNA sense strand
aaaagaacgucaacgaauu

SEQ ID NO: 1408254 - RNA, 19 nt, Homo sapiens
  misc_RNA (1)...(19): siRNA sense strand
gacagagguuaucauacuu

SEQ ID NO: 1408255 - RNA, 19 nt, Homo sapiens
  misc_RNA (1)...(19): siRNA sense strand
agccaaaggucauuccaaa

SEQ ID NO: 1408256 - RNA, 19 nt, Homo sapiens
  misc_RNA (1)...(19): siRNA sense strand
gaacgucaacgaauuacag

SEQ ID NO: 1408257 - RNA, 19 nt, Homo sapiens
  misc_RNA (1)...(19): siRNA sense strand
gcagugaugaagugauuga

SEQ ID NO: 1408258 - RNA, 19 nt, Homo sapiens
  misc_RNA (1)...(19): siRNA sense strand
gagaauaguggccauccuu

SEQ ID NO: 1408259 - RNA, 19 nt, Homo sapiens
  misc_RNA (1)...(19): siRNA sense strand
ggaagaaagaagagcuuau

SEQ ID NO: 1408260 - RNA, 19 nt, Homo sapiens
  misc_RNA (1)...(19): siRNA sense strand
gaauauccagccaaacaug

SEQ ID NO: 1408261 - RNA, 19 nt, Homo sapiens
  misc_RNA (1)...(19): siRNA sense strand
uaaggaguccaacaagaaa

SEQ ID NO: 1408262 - RNA, 19 nt, Homo sapiens
  misc_RNA (1)...(19): siRNA sense strand
acagaauacucagaaaguu

SEQ ID NO: 1408263 - RNA, 19 nt, Homo sapiens
  misc_RNA (1)...(19): siRNA sense strand
gaaaggcugaaucacuuau

SEQ ID NO: 1408264 - RNA, 19 nt, Homo sapiens
  misc_RNA (1)...(19): siRNA sense strand
gaagauggucgaggugaug

SEQ ID NO: 1408265 - RNA, 19 nt, Homo sapiens
  misc_RNA (1)...(19): siRNA sense strand
ugcgguaucugccauuaaa

SEQ ID NO: 1408266 - RNA, 19 nt, Homo sapiens
  misc_RNA (1)...(19): siRNA sense strand
gcugcgguaucugccauua

SEQ ID NO: 1408267 - RNA, 19 nt, Homo sapiens
  misc_RNA (1)...(19): siRNA sense strand
caaacaugcugaguauucu

SEQ ID NO: 1408268 - RNA, 19 nt, Homo sapiens
  misc_RNA (1)...(19): siRNA sense strand
aaaagaauauccagccaaa

SEQ ID NO: 1408269 - RNA, 19 nt, Homo sapiens
  misc_RNA (1)...(19): siRNA sense strand
caacagaauacucagaaag

SEQ ID NO: 1408270 - RNA, 19 nt, Homo sapiens
  misc_RNA (1)...(19): siRNA sense strand
caacaacagaauacucaga

SEQ ID NO: 1408271 - RNA, 19 nt, Homo sapiens
  misc_RNA (1)...(19): siRNA sense strand
acaacagaauacucagaaa

SEQ ID NO: 1408272 - RNA, 19 nt, Homo sapiens
  misc_RNA (1)...(19): siRNA sense strand
caagaacaagucagugaau

SEQ ID NO: 1408273 - RNA, 19 nt, Homo sapiens
  misc_RNA (1)...(19): siRNA sense strand
agccaaacaugcugaguau

SEQ ID NO: 1408274 - RNA, 19 nt, Homo sapiens
  misc_RNA (1)...(19): siRNA sense strand
caaaugcuauauguggaau

SEQ ID NO: 1408275 - RNA, 19 nt, Homo sapiens
  misc_RNA (1)...(19): siRNA sense strand
cagaauacucagaaaguug

SEQ ID NO: 1408276 - RNA, 19 nt, Homo sapiens
  misc_RNA (1)...(19): siRNA sense strand
ccaaaugcaacaacagaau

SEQ ID NO: 1408277 - RNA, 19 nt, Homo sapiens
  misc_RNA (1)...(19): siRNA sense strand
gaacgcauggaagaaagaa

SEQ ID NO: 1408278 - RNA, 19 nt, Homo sapiens
  misc_RNA (1)...(19): siRNA sense strand
gggaacgcauggaagaaag

SEQ ID NO: 1408279 - RNA, 19 nt, Homo sapiens
  misc_RNA (1)...(19): siRNA sense strand
aagaauauccagccaaaca

SEQ ID NO: 1408280 - RNA, 19 nt, Homo sapiens
  misc_RNA (1)...(19): siRNA sense strand
aaacagcaaagagggauaa

SEQ ID NO: 1408281 - RNA, 19 nt, Homo sapiens
  misc_RNA (1)...(19): siRNA sense strand
aagaaaagauggucccaaa

SEQ ID NO: 1408282 - RNA, 19 nt, Homo sapiens
  misc_RNA (1)...(19): siRNA sense strand
agaauacucagaaaguuga

SEQ ID NO: 1408283 - RNA, 19 nt, Homo sapiens
  misc_RNA (1)...(19): siRNA sense strand
ugugacagagguuaucaua

SEQ ID NO: 1408284 - RNA, 19 nt, Homo sapiens
  misc_RNA (1)...(19): siRNA sense strand
guacaagccaaaggucauu

SEQ ID NO: 1408285 - RNA, 19 nt, Homo sapiens
  misc_RNA (1)...(19): siRNA sense strand
gaagacagaaaucaaaaga

SEQ ID NO: 1408286 - RNA, 19 nt, Homo sapiens
  misc_RNA (1)...(19): siRNA sense strand
aaagugccugaguauauua

SEQ ID NO: 1408287 - RNA, 19 nt, Homo sapiens
  misc_RNA (1)...(19): siRNA sense strand
gugccugaguauauuaaga

SEQ ID NO: 1408288 - RNA, 19 nt, Homo sapiens
  misc_RNA (1)...(19): siRNA sense strand
ccaugaagaagaaaugaug

SEQ ID NO: 1408289 - RNA, 19 nt, Homo sapiens
  misc_RNA (1)...(19): siRNA sense strand
aaagauggucccaaacguu

SEQ ID NO: 1408290 - RNA, 19 nt, Homo sapiens
  misc_RNA (1)...(19): siRNA sense strand
ucaagggaaguacaaaguu

SEQ ID NO: 1408291 - RNA, 19 nt, Homo sapiens
  misc_RNA (1)...(19): siRNA sense strand
ccaaaugcuauauguggaa

SEQ ID NO: 1408292 - RNA, 19 nt, Homo sapiens
  misc_RNA (1)...(19): siRNA sense strand
guucuguacuguccaaguc

SEQ ID NO: 1408293 - RNA, 19 nt, Homo sapiens
  misc_RNA (1)...(19): siRNA sense strand
gggugugaccuccuuuaaa

SEQ ID NO: 1408294 - RNA, 19 nt, Homo sapiens
  misc_RNA (1)...(19): siRNA sense strand
cgaagauggucgaggugau

SEQ ID NO: 1408295 - RNA, 19 nt, Homo sapiens
  misc_RNA (1)...(19): siRNA sense strand
gauggugauucagaugaug

SEQ ID NO: 1408296 - RNA, 19 nt, Homo sapiens
  misc_RNA (1)...(19): siRNA sense strand
gacacauguuauccaggua

SEQ ID NO: 1408297 - RNA, 19 nt, Homo sapiens
  misc_RNA (1)...(19): siRNA sense strand
ggaacgcauggaagaaaga

SEQ ID NO: 1408298 - RNA, 19 nt, Homo sapiens
  misc_RNA (1)...(19): siRNA sense strand
ucccaaacguucuguacug

SEQ ID NO: 1408299 - RNA, 19 nt, Homo sapiens
  misc_RNA (1)...(19): siRNA sense strand
agacagaaaucaaaagaca

SEQ ID NO: 1408300 - RNA, 19 nt, Homo sapiens
  misc_RNA (1)...(19): siRNA sense strand
agaacaagucagugaauau

SEQ ID NO: 1408301 - RNA, 19 nt, Homo sapiens
  misc_RNA (1)...(19): siRNA sense strand
aagagguacucaccagaug

SEQ ID NO: 1408302 - RNA, 19 nt, Homo sapiens
  misc_RNA (1)...(19): siRNA sense strand
gacuugcagacacauguua

SEQ ID NO: 1408303 - RNA, 19 nt, Homo sapiens
  misc_RNA (1)...(19): siRNA sense strand
gccugaguauauuaagaaa

SEQ ID NO: 1408304 - RNA, 19 nt, Homo sapiens
  misc_RNA (1)...(19): siRNA sense strand
ucaagaacaagucagugaa

SEQ ID NO: 1408305 - RNA, 19 nt, Homo sapiens
  misc_RNA (1)...(19): siRNA sense strand
auacacugcucccaaugug

SEQ ID NO: 1408306 - RNA, 19 nt, Homo sapiens
  misc_RNA (1)...(19): siRNA sense strand
cuuauacacugcucccaau

SEQ ID NO: 1408307 - RNA, 19 nt, Homo sapiens
  misc_RNA (1)...(19): siRNA sense strand
caaagcugccacuccaaga

SEQ ID NO: 1408308 - RNA, 19 nt, Homo sapiens
  misc_RNA (1)...(19): siRNA sense strand
uaagagguacucaccagau

SEQ ID NO: 1408309 - RNA, 19 nt, Homo sapiens
  misc_RNA (1)...(19): siRNA sense strand
gaaaugauguucugugaua

SEQ ID NO: 1408310 - RNA, 19 nt, Homo sapiens
  misc_RNA (1)...(19): siRNA sense strand
gaauuugucugaaggguaa

SEQ ID NO: 1408311 - RNA, 19 nt, Homo sapiens
  misc_RNA (1)...(19): siRNA sense strand
caauggagcuuguuucuau

SEQ ID NO: 1408312 - RNA, 19 nt, Homo sapiens
  misc_RNA (1)...(19): siRNA sense strand
gagcuuguuucuaugauua

SEQ ID NO: 1408313 - RNA, 19 nt, Homo sapiens
  misc_RNA (1)...(19): siRNA sense strand
caagggaaguacaaaguuu

SEQ ID NO: 1408314 - RNA, 19 nt, Homo sapiens
  misc_RNA (1)...(19): siRNA sense strand
gugaugaagugauugauuu

SEQ ID NO: 1408315 - RNA, 19 nt, Homo sapiens
  misc_RNA (1)...(19): siRNA sense strand
uaaagaguauucccaaaug

SEQ ID NO: 1408316 - RNA, 19 nt, Homo sapiens
  misc_RNA (1)...(19): siRNA sense strand
guaaagugccugaguauau

SEQ ID NO: 1408317 - RNA, 19 nt, Homo sapiens
  misc_RNA (1)...(19): siRNA sense strand
ucagugcacucuaggcuua

SEQ ID NO: 1408318 - RNA, 19 nt, Homo sapiens
  misc_RNA (1)...(19): siRNA sense strand
gaaaggaaaggcugaauca

SEQ ID NO: 1408319 - RNA, 19 nt, Homo sapiens
  misc_RNA (1)...(19): siRNA sense strand
gaagaaagaagagcuuauu

SEQ ID NO: 1408320 - RNA, 19 nt, Homo sapiens
  misc_RNA (1)...(19): siRNA sense strand
gaacaagucagugaauauu

SEQ ID NO: 1408321 - RNA, 19 nt, Homo sapiens
  misc_RNA (1)...(19): siRNA sense strand
ccaguaaagugccugagua

SEQ ID NO: 1408322 - RNA, 19 nt, Homo sapiens
  misc_RNA (1)...(19): siRNA sense strand
uaaagugccugaguauauu

SEQ ID NO: 1408323 - RNA, 19 nt, Homo sapiens
  misc_RNA (1)...(19): siRNA sense strand
gaaacucagugcacucuag

SEQ ID NO: 1408324 - RNA, 19 nt, Homo sapiens
  misc_RNA (1)...(19): siRNA sense strand
gcgcagugaugaagugauu

SEQ ID NO: 1408325 - RNA, 19 nt, Homo sapiens
  misc_RNA (1)...(19): siRNA sense strand
gguaaggaguccaacaaga

SEQ ID NO: 1408326 - RNA, 19 nt, Homo sapiens
  misc_RNA (1)...(19): siRNA sense strand
ugacagagguuaucauacu

SEQ ID NO: 1408327 - RNA, 19 nt, Homo sapiens
  misc_RNA (1)...(19): siRNA sense strand
aaagaacgucaacgaauua

SEQ ID NO: 1408328 - RNA, 19 nt, Homo sapiens
  misc_RNA (1)...(19): siRNA sense strand
guaaggaguccaacaagaa

SEQ ID NO: 1408329 - RNA, 19 nt, Homo sapiens
  misc_RNA (1)...(19): siRNA sense strand
caaaugcaacaacagaaua

SEQ ID NO: 1408330 - RNA, 19 nt, Homo sapiens
  misc_RNA (1)...(19): siRNA sense strand
ggaaaggcugaaucacuua

SEQ ID NO: 1408331 - RNA, 19 nt, Homo sapiens
  misc_RNA (1)...(19): siRNA sense strand
ggcaguguauggaauguaa

SEQ ID NO: 1408332 - RNA, 19 nt, Homo sapiens
  misc_RNA (1)...(19): siRNA sense strand
acaagucagugaauauuug

SEQ ID NO: 1408333 - RNA, 19 nt, Homo sapiens
  misc_RNA (1)...(19): siRNA sense strand
cagcagaauuuaauagcaa

SEQ ID NO: 1408334 - RNA, 19 nt, Homo sapiens
  misc_RNA (1)...(19): siRNA sense strand
gaaagaagagcuuauuuug

SEQ ID NO: 1408335 - RNA, 19 nt, Homo sapiens
  misc_RNA (1)...(19): siRNA sense strand
gauguucugugauaugugu

SEQ ID NO: 1408336 - RNA, 19 nt, Homo sapiens
  misc_RNA (1)...(19): siRNA sense strand
caacagagcgaacaaaggu

SEQ ID NO: 1408337 - RNA, 19 nt, Homo sapiens
  misc_RNA (1)...(19): siRNA sense strand
ggacagcuccucuggcaau

SEQ ID NO: 1408338 - RNA, 19 nt, Homo sapiens
  misc_RNA (1)...(19): siRNA sense strand
ccaaacaugcugaguauuc

SEQ ID NO: 1408339 - RNA, 19 nt, Homo sapiens
  misc_RNA (1)...(19): siRNA sense strand
cagcuccucuggcaaugua

SEQ ID NO: 1408340 - RNA, 19 nt, Homo sapiens
  misc_RNA (1)...(19): siRNA sense strand
gaaaguugaagccaguaaa

SEQ ID NO: 1408341 - RNA, 19 nt, Homo sapiens
  misc_RNA (1)...(19): siRNA sense strand
cgaauuacagaccauuaua

SEQ ID NO: 1408342 - RNA, 19 nt, Homo sapiens
  misc_RNA (1)...(19): siRNA sense strand
ggagaaacucuaccugaga

SEQ ID NO: 1408343 - RNA, 19 nt, Homo sapiens
  misc_RNA (1)...(19): siRNA sense strand
aagaacaagucagugaaua

SEQ ID NO: 1408344 - RNA, 19 nt, Homo sapiens
  misc_RNA (1)...(19): siRNA sense strand
ggagcuuguuucuaugauu

SEQ ID NO: 1408345 - RNA, 19 nt, Homo sapiens
  misc_RNA (1)...(19): siRNA sense strand
ggugugaccuccuuuaaaa

SEQ ID NO: 1408346 - RNA, 19 nt, Homo sapiens
  misc_RNA (1)...(19): siRNA sense strand
gcagcagaauuuaauagca

SEQ ID NO: 1408347 - RNA, 19 nt, Homo sapiens
  misc_RNA (1)...(19): siRNA sense strand
ucaggucgcuggauuugug

SEQ ID NO: 1408348 - RNA, 19 nt, Homo sapiens
  misc_RNA (1)...(19): siRNA sense strand
ugagagagcuaaaugucau

SEQ ID NO: 1408349 - RNA, 19 nt, Homo sapiens
  misc_RNA (1)...(19): siRNA sense strand
uaacagcauugcgcaguga

SEQ ID NO: 1408350 - RNA, 19 nt, Homo sapiens
  misc_RNA (1)...(19): siRNA sense strand
agacagugauggugauuca

SEQ ID NO: 1408351 - RNA, 19 nt, Homo sapiens
  misc_RNA (1)...(19): siRNA sense strand
aggaaaggcugaaucacuu

SEQ ID NO: 1408352 - RNA, 19 nt, Homo sapiens
  misc_RNA (1)...(19): siRNA sense strand
caugcugaguauucuguua

SEQ ID NO: 1408353 - RNA, 19 nt, Homo sapiens
  misc_RNA (1)...(19): siRNA sense strand
aaaagaacgucaacgaauu

SEQ ID NO: 1408354 - RNA, 19 nt, Homo sapiens
  misc_RNA (1)...(19): siRNA sense strand
gacagagguuaucauacuu

SEQ ID NO: 1408355 - RNA, 19 nt, Homo sapiens
  misc_RNA (1)...(19): siRNA sense strand
agccaaaggucauuccaaa

SEQ ID NO: 1408356 - RNA, 19 nt, Homo sapiens
  misc_RNA (1)...(19): siRNA sense strand
gaacgucaacgaauuacag

SEQ ID NO: 1408357 - RNA, 19 nt, Homo sapiens
  misc_RNA (1)...(19): siRNA sense strand
gcagugaugaagugauuga

SEQ ID NO: 1408358 - RNA, 19 nt, Homo sapiens
  misc_RNA (1)...(19): siRNA sense strand
gagaauaguggccauccuu

SEQ ID NO: 1408359 - RNA, 19 nt, Homo sapiens
  misc_RNA (1)...(19): siRNA sense strand
ggaagaaagaagagcuuau

SEQ ID NO: 1408360 - RNA, 19 nt, Homo sapiens
  misc_RNA (1)...(19): siRNA sense strand
gaauauccagccaaacaug

SEQ ID NO: 1408361 - RNA, 19 nt, Homo sapiens
  misc_RNA (1)...(19): siRNA sense strand
uaaggaguccaacaagaaa

SEQ ID NO: 1408362 - RNA, 19 nt, Homo sapiens
  misc_RNA (1)...(19): siRNA sense strand
acagaauacucagaaaguu

SEQ ID NO: 1408363 - RNA, 19 nt, Homo sapiens
  misc_RNA (1)...(19): siRNA sense strand
gaaaggcugaaucacuuau

SEQ ID NO: 1408364 - RNA, 19 nt, Homo sapiens
  misc_RNA (1)...(19): siRNA sense strand
gaagauggucgaggugaug

SEQ ID NO: 1408365 - RNA, 19 nt, Homo sapiens
  misc_RNA (1)...(19): siRNA sense strand
ugcgguaucugccauuaaa

SEQ ID NO: 1408366 - RNA, 19 nt, Homo sapiens
  misc_RNA (1)...(19): siRNA sense strand
gcugcgguaucugccauua

SEQ ID NO: 1408367 - RNA, 19 nt, Homo sapiens
  misc_RNA (1)...(19): siRNA sense strand
caaacaugcugaguauucu

SEQ ID NO: 1408368 - RNA, 19 nt, Homo sapiens
  misc_RNA (1)...(19): siRNA sense strand
aaaagaauauccagccaaa

SEQ ID NO: 1408369 - RNA, 19 nt, Homo sapiens
  misc_RNA (1)...(19): siRNA sense strand
caacagaauacucagaaag

SEQ ID NO: 1408370 - RNA, 19 nt, Homo sapiens
  misc_RNA (1)...(19): siRNA sense strand
caacaacagaauacucaga

SEQ ID NO: 1408371 - RNA, 19 nt, Homo sapiens
  misc_RNA (1)...(19): siRNA sense strand
acaacagaauacucagaaa

SEQ ID NO: 1408372 - RNA, 19 nt, Homo sapiens
  misc_RNA (1)...(19): siRNA sense strand
caagaacaagucagugaau

SEQ ID NO: 1408373 - RNA, 19 nt, Homo sapiens
  misc_RNA (1)...(19): siRNA sense strand
agccaaacaugcugaguau

SEQ ID NO: 1408374 - RNA, 19 nt, Homo sapiens
  misc_RNA (1)...(19): siRNA sense strand
caaaugcuauauguggaau

SEQ ID NO: 1408375 - RNA, 19 nt, Homo sapiens
  misc_RNA (1)...(19): siRNA sense strand
cagaauacucagaaaguug

SEQ ID NO: 1408376 - RNA, 19 nt, Homo sapiens
  misc_RNA (1)...(19): siRNA sense strand
ccaaaugcaacaacagaau

SEQ ID NO: 1408377 - RNA, 19 nt, Homo sapiens
  misc_RNA (1)...(19): siRNA sense strand
gaacgcauggaagaaagaa

SEQ ID NO: 1408378 - RNA, 19 nt, Homo sapiens
  misc_RNA (1)...(19): siRNA sense strand
gggaacgcauggaagaaag

SEQ ID NO: 1408379 - RNA, 19 nt, Homo sapiens
  misc_RNA (1)...(19): siRNA sense strand
aagaauauccagccaaaca

SEQ ID NO: 1408380 - RNA, 19 nt, Homo sapiens
  misc_RNA (1)...(19): siRNA sense strand
aaacagcaaagagggauaa

SEQ ID NO: 1408381 - RNA, 19 nt, Homo sapiens
  misc_RNA (1)...(19): siRNA sense strand
aagaaaagauggucccaaa

SEQ ID NO: 1408382 - RNA, 19 nt, Homo sapiens
  misc_RNA (1)...(19): siRNA sense strand
agaauacucagaaaguuga

SEQ ID NO: 1408383 - RNA, 19 nt, Homo sapiens
  misc_RNA (1)...(19): siRNA sense strand
ugugacagagguuaucaua

SEQ ID NO: 1408384 - RNA, 19 nt, Homo sapiens
  misc_RNA (1)...(19): siRNA sense strand
guacaagccaaaggucauu

SEQ ID NO: 1408385 - RNA, 19 nt, Homo sapiens
  misc_RNA (1)...(19): siRNA sense strand
gaagacagaaaucaaaaga

SEQ ID NO: 1408386 - RNA, 19 nt, Homo sapiens
  misc_RNA (1)...(19): siRNA sense strand
aaagugccugaguauauua

SEQ ID NO: 1408387 - RNA, 19 nt, Homo sapiens
  misc_RNA (1)...(19): siRNA sense strand
gugccugaguauauuaaga

SEQ ID NO: 1408388 - RNA, 19 nt, Homo sapiens
  misc_RNA (1)...(19): siRNA sense strand
ccaugaagaagaaaugaug

SEQ ID NO: 1408389 - RNA, 19 nt, Homo sapiens
  misc_RNA (1)...(19): siRNA sense strand
aaagauggucccaaacguu

SEQ ID NO: 1408390 - RNA, 19 nt, Homo sapiens
  misc_RNA (1)...(19): siRNA sense strand
ucaagggaaguacaaaguu

SEQ ID NO: 1408391 - RNA, 19 nt, Homo sapiens
  misc_RNA (1)...(19): siRNA sense strand
ccaaaugcuauauguggaa

SEQ ID NO: 1408392 - RNA, 19 nt, Homo sapiens
  misc_RNA (1)...(19): siRNA sense strand
guucuguacuguccaaguc

SEQ ID NO: 1408393 - RNA, 19 nt, Homo sapiens
  misc_RNA (1)...(19): siRNA sense strand
gggugugaccuccuuuaaa

SEQ ID NO: 1408394 - RNA, 19 nt, Homo sapiens
  misc_RNA (1)...(19): siRNA sense strand
cgaagauggucgaggugau

SEQ ID NO: 1408395 - RNA, 19 nt, Homo sapiens
  misc_RNA (1)...(19): siRNA sense strand
gauggugauucagaugaug

SEQ ID NO: 1408396 - RNA, 19 nt, Homo sapiens
  misc_RNA (1)...(19): siRNA sense strand
gacacauguuauccaggua

SEQ ID NO: 1408397 - RNA, 19 nt, Homo sapiens
  misc_RNA (1)...(19): siRNA sense strand
ggaacgcauggaagaaaga

SEQ ID NO: 1408398 - RNA, 19 nt, Homo sapiens
  misc_RNA (1)...(19): siRNA sense strand
ucccaaacguucuguacug

SEQ ID NO: 1408399 - RNA, 19 nt, Homo sapiens
  misc_RNA (1)...(19): siRNA sense strand
agacagaaaucaaaagaca

SEQ ID NO: 1408400 - RNA, 19 nt, Homo sapiens
  misc_RNA (1)...(19): siRNA sense strand
agaacaagucagugaauau

SEQ ID NO: 1408401 - RNA, 19 nt, Homo sapiens
  misc_RNA (1)...(19): siRNA sense strand
aagagguacucaccagaug

SEQ ID NO: 1408402 - RNA, 19 nt, Homo sapiens
  misc_RNA (1)...(19): siRNA sense strand
gacuugcagacacauguua

SEQ ID NO: 1408403 - RNA, 19 nt, Homo sapiens
  misc_RNA (1)...(19): siRNA sense strand
gccugaguauauuaagaaa

SEQ ID NO: 1408404 - RNA, 19 nt, Homo sapiens
  misc_RNA (1)...(19): siRNA sense strand
ucaagaacaagucagugaa

SEQ ID NO: 1408405 - RNA, 19 nt, Homo sapiens
  misc_RNA (1)...(19): siRNA sense strand
auacacugcucccaaugug

SEQ ID NO: 1408406 - RNA, 19 nt, Homo sapiens
  misc_RNA (1)...(19): siRNA sense strand
cuuauacacugcucccaau

SEQ ID NO: 1408407 - RNA, 19 nt, Homo sapiens
  misc_RNA (1)...(19): siRNA sense strand
caaagcugccacuccaaga

SEQ ID NO: 1408408 - RNA, 19 nt, Homo sapiens
  misc_RNA (1)...(19): siRNA sense strand
uaagagguacucaccagau

SEQ ID NO: 1408409 - RNA, 19 nt, Homo sapiens
  misc_RNA (1)...(19): siRNA sense strand
acacagaucuuaacucuaa

SEQ ID NO: 1408410 - RNA, 19 nt, Homo sapiens
  misc_RNA (1)...(19): siRNA sense strand
gaucuuaacucuaaugaug

SEQ ID NO: 1408411 - RNA, 19 nt, Homo sapiens
  misc_RNA (1)...(19): siRNA sense strand
caacugagaucaacaaugg

SEQ ID NO: 1408412 - RNA, 19 nt, Homo sapiens
  misc_RNA (1)...(19): siRNA sense strand
ggaacagacuaaagacaaa

SEQ ID NO: 1408413 - RNA, 19 nt, Homo sapiens
  misc_RNA (1)...(19): siRNA sense strand
ggcaagagaugaguuaauu

SEQ ID NO: 1408414 - RNA, 19 nt, Homo sapiens
  misc_RNA (1)...(19): siRNA sense strand
guacacagaucuuaacucu

SEQ ID NO: 1408415 - RNA, 19 nt, Homo sapiens
  misc_RNA (1)...(19): siRNA sense strand
gcaaguacacagaucuuaa

SEQ ID NO: 1408416 - RNA, 19 nt, Homo sapiens
  misc_RNA (1)...(19): siRNA sense strand
ugauguaacuggccuaaga

SEQ ID NO: 1408417 - RNA, 19 nt, Homo sapiens
  misc_RNA (1)...(19): siRNA sense strand
aaugaaaggugaacuggaa

SEQ ID NO: 1408418 - RNA, 19 nt, Homo sapiens
  misc_RNA (1)...(19): siRNA sense strand
caagaagguucgauugagu

SEQ ID NO: 1408419 - RNA, 19 nt, Homo sapiens
  misc_RNA (1)...(19): siRNA sense strand
cugagugccuggaaguuua

SEQ ID NO: 1408420 - RNA, 19 nt, Homo sapiens
  misc_RNA (1)...(19): siRNA sense strand
gagaugaguuaauucuaag

SEQ ID NO: 1408421 - RNA, 19 nt, Homo sapiens
  misc_RNA (1)...(19): siRNA sense strand
ucaaaguuauggcaagaga

SEQ ID NO: 1408422 - RNA, 19 nt, Homo sapiens
  misc_RNA (1)...(19): siRNA sense strand
gaacaagagaugcaagagu

SEQ ID NO: 1408423 - RNA, 19 nt, Homo sapiens
  misc_RNA (1)...(19): siRNA sense strand
gaacuggaacagacuaaag

SEQ ID NO: 1408424 - RNA, 19 nt, Homo sapiens
  misc_RNA (1)...(19): siRNA sense strand
gaacugagugccuggaagu

SEQ ID NO: 1408425 - RNA, 19 nt, Homo sapiens
  misc_RNA (1)...(19): siRNA sense strand
ccuaagagagucugaagaa

SEQ ID NO: 1408426 - RNA, 19 nt, Homo sapiens
  misc_RNA (1)...(19): siRNA sense strand
aagguucgauugagugaaa

SEQ ID NO: 1408427 - RNA, 19 nt, Homo sapiens
  misc_RNA (1)...(19): siRNA sense strand
ggaacaagcccaaaaugaa

SEQ ID NO: 1408428 - RNA, 19 nt, Homo sapiens
  misc_RNA (1)...(19): siRNA sense strand
cuaagagagucugaagaaa

SEQ ID NO: 1408429 - RNA, 19 nt, Homo sapiens
  misc_RNA (1)...(19): siRNA sense strand
ccaagaagguucgauugag

SEQ ID NO: 1408430 - RNA, 19 nt, Homo sapiens
  misc_RNA (1)...(19): siRNA sense strand
caagagaugaguuaauucu

SEQ ID NO: 1408431 - RNA, 19 nt, Homo sapiens
  misc_RNA (1)...(19): siRNA sense strand
guaacuggccuaagagagu

SEQ ID NO: 1408432 - RNA, 19 nt, Homo sapiens
  misc_RNA (1)...(19): siRNA sense strand
caagagaugcaagagugua

SEQ ID NO: 1408433 - RNA, 19 nt, Homo sapiens
  misc_RNA (1)...(19): siRNA sense strand
gacuaaagacaaacuggaa

SEQ ID NO: 1408434 - RNA, 19 nt, Homo sapiens
  misc_RNA (1)...(19): siRNA sense strand
gcaagagaugaguuaauuc

SEQ ID NO: 1408435 - RNA, 19 nt, Homo sapiens
  misc_RNA (1)...(19): siRNA sense strand
ggaaguuuacgccugauag

SEQ ID NO: 1408436 - RNA, 19 nt, Homo sapiens
  misc_RNA (1)...(19): siRNA sense strand
gagaugcaagaguguacua

SEQ ID NO: 1408437 - RNA, 19 nt, Homo sapiens
  misc_RNA (1)...(19): siRNA sense strand
ugaagcauauguacaagcu

SEQ ID NO: 1408438 - RNA, 19 nt, Homo sapiens
  misc_RNA (1)...(19): siRNA sense strand
gggaaaacauccuuguaau

SEQ ID NO: 1408439 - RNA, 19 nt, Homo sapiens
  misc_RNA (1)...(19): siRNA sense strand
ggcaaguacacagaucuua

SEQ ID NO: 1408440 - RNA, 19 nt, Homo sapiens
  misc_RNA (1)...(19): siRNA sense strand
uaagagagucugaagaaaa

SEQ ID NO: 1408441 - RNA, 19 nt, Homo sapiens
  misc_RNA (1)...(19): siRNA sense strand
gagggcaaguacacagauc

SEQ ID NO: 1408442 - RNA, 19 nt, Homo sapiens
  misc_RNA (1)...(19): siRNA sense strand
uauggcaagagaugaguua

SEQ ID NO: 1408443 - RNA, 19 nt, Homo sapiens
  misc_RNA (1)...(19): siRNA sense strand
gcgacuagcaaccaaggaa

SEQ ID NO: 1408444 - RNA, 19 nt, Homo sapiens
  misc_RNA (1)...(19): siRNA sense strand
ggaaaacauccuuguaaug

SEQ ID NO: 1408445 - RNA, 19 nt, Homo sapiens
  misc_RNA (1)...(19): siRNA sense strand
uccaguaccucaagcaagu

SEQ ID NO: 1408446 - RNA, 19 nt, Homo sapiens
  misc_RNA (1)...(19): siRNA sense strand
aaaguuauggcaagagaug

SEQ ID NO: 1408447 - RNA, 19 nt, Homo sapiens
  misc_RNA (1)...(19): siRNA sense strand
gaaaacauccuuguaaugc

SEQ ID NO: 1408448 - RNA, 19 nt, Homo sapiens
  misc_RNA (1)...(19): siRNA sense strand
acccagcgaucaacuuguu

SEQ ID NO: 1408449 - RNA, 19 nt, Homo sapiens
  misc_RNA (1)...(19): siRNA sense strand
uggaacagacuaaagacaa

SEQ ID NO: 1408450 - RNA, 19 nt, Homo sapiens
  misc_RNA (1)...(19): siRNA sense strand
gaguuaauucuaagaugga

SEQ ID NO: 1408451 - RNA, 19 nt, Homo sapiens
  misc_RNA (1)...(19): siRNA sense strand
cuucaaaguuauggcaaga

SEQ ID NO: 1408452 - RNA, 19 nt, Homo sapiens
  misc_RNA (1)...(19): siRNA sense strand
caaccaaggaacaagagau

SEQ ID NO: 1408453 - RNA, 19 nt, Homo sapiens
  misc_RNA (1)...(19): siRNA sense strand
caaguacacagaucuuaac

SEQ ID NO: 1408454 - RNA, 19 nt, Homo sapiens
  misc_RNA (1)...(19): siRNA sense strand
uaaugcgacuagcaaccaa

SEQ ID NO: 1408455 - RNA, 19 nt, Homo sapiens
  misc_RNA (1)...(19): siRNA sense strand
cccaagaagguucgauuga

SEQ ID NO: 1408456 - RNA, 19 nt, Homo sapiens
  misc_RNA (1)...(19): siRNA sense strand
gcaaccaaggaacaagaga

SEQ ID NO: 1408457 - RNA, 19 nt, Homo sapiens
  misc_RNA (1)...(19): siRNA sense strand
gaacaagcccaaaaugaac

SEQ ID NO: 1408458 - RNA, 19 nt, Homo sapiens
  misc_RNA (1)...(19): siRNA sense strand
gaacagacuaaagacaaac

SEQ ID NO: 1408459 - RNA, 19 nt, Homo sapiens
  misc_RNA (1)...(19): siRNA sense strand
acugagaucaacaauggua

SEQ ID NO: 1408460 - RNA, 19 nt, Homo sapiens
  misc_RNA (1)...(19): siRNA sense strand
gggcaaguacacagaucuu

SEQ ID NO: 1408461 - RNA, 19 nt, Homo sapiens
  misc_RNA (1)...(19): siRNA sense strand
uaaagacaaacuggaacaa

SEQ ID NO: 1408462 - RNA, 19 nt, Homo sapiens
  misc_RNA (1)...(19): siRNA sense strand
ccaaggaacaagagaugca

SEQ ID NO: 1408463 - RNA, 19 nt, Homo sapiens
  misc_RNA (1)...(19): siRNA sense strand
uagcaaccaaggaacaaga

SEQ ID NO: 1408464 - RNA, 19 nt, Homo sapiens
  misc_RNA (1)...(19): siRNA sense strand
ggagggcaaguacacagau

SEQ ID NO: 1408465 - RNA, 19 nt, Homo sapiens
  misc_RNA (1)...(19): siRNA sense strand
cuaaagacaaacuggaaca

SEQ ID NO: 1408466 - RNA, 19 nt, Homo sapiens
  misc_RNA (1)...(19): siRNA sense strand
gcccaacugagaucaacaa

SEQ ID NO: 1408467 - RNA, 19 nt, Homo sapiens
  misc_RNA (1)...(19): siRNA sense strand
ucaaauccaguaccucaag

SEQ ID NO: 1408468 - RNA, 19 nt, Homo sapiens
  misc_RNA (1)...(19): siRNA sense strand
guaaugcgacuagcaacca

SEQ ID NO: 1408469 - RNA, 19 nt, Homo sapiens
  misc_RNA (1)...(19): siRNA sense strand
ccaacugagaucaacaaug

SEQ ID NO: 1408470 - RNA, 19 nt, Homo sapiens
  misc_RNA (1)...(19): siRNA sense strand
caaggaacaagagaugcaa

SEQ ID NO: 1408471 - RNA, 19 nt, Homo sapiens
  misc_RNA (1)...(19): siRNA sense strand
ugagaucaacaaugguaga

SEQ ID NO: 1408472 - RNA, 19 nt, Homo sapiens
  misc_RNA (1)...(19): siRNA sense strand
ggugaacuggaacagacua

SEQ ID NO: 1408473 - RNA, 19 nt, Homo sapiens
  misc_RNA (1)...(19): siRNA sense strand
agacccagcgaucaacuug

SEQ ID NO: 1408474 - RNA, 19 nt, Homo sapiens
  misc_RNA (1)...(19): siRNA sense strand
acacagaucuuaacucuaa

SEQ ID NO: 1408475 - RNA, 19 nt, Homo sapiens
  misc_RNA (1)...(19): siRNA sense strand
gaucuuaacucuaaugaug

SEQ ID NO: 1408476 - RNA, 19 nt, Homo sapiens
  misc_RNA (1)...(19): siRNA sense strand
caacugagaucaacaaugg

SEQ ID NO: 1408477 - RNA, 19 nt, Homo sapiens
  misc_RNA (1)...(19): siRNA sense strand
ggaacagacuaaagacaaa

SEQ ID NO: 1408478 - RNA, 19 nt, Homo sapiens
  misc_RNA (1)...(19): siRNA sense strand
ggcaagagaugaguuaauu

SEQ ID NO: 1408479 - RNA, 19 nt, Homo sapiens
  misc_RNA (1)...(19): siRNA sense strand
guacacagaucuuaacucu

SEQ ID NO: 1408480 - RNA, 19 nt, Homo sapiens
  misc_RNA (1)...(19): siRNA sense strand
gcaaguacacagaucuuaa

SEQ ID NO: 1408481 - RNA, 19 nt, Homo sapiens
  misc_RNA (1)...(19): siRNA sense strand
ugauguaacuggccuaaga

SEQ ID NO: 1408482 - RNA, 19 nt, Homo sapiens
  misc_RNA (1)...(19): siRNA sense strand
aaugaaaggugaacuggaa

SEQ ID NO: 1408483 - RNA, 19 nt, Homo sapiens
  misc_RNA (1)...(19): siRNA sense strand
caagaagguucgauugagu

SEQ ID NO: 1408484 - RNA, 19 nt, Homo sapiens
  misc_RNA (1)...(19): siRNA sense strand
cugagugccuggaaguuua

SEQ ID NO: 1408485 - RNA, 19 nt, Homo sapiens
  misc_RNA (1)...(19): siRNA sense strand
gagaugaguuaauucuaag

SEQ ID NO: 1408486 - RNA, 19 nt, Homo sapiens
  misc_RNA (1)...(19): siRNA sense strand
ucaaaguuauggcaagaga

SEQ ID NO: 1408487 - RNA, 19 nt, Homo sapiens
  misc_RNA (1)...(19): siRNA sense strand
gaacaagagaugcaagagu

SEQ ID NO: 1408488 - RNA, 19 nt, Homo sapiens
  misc_RNA (1)...(19): siRNA sense strand
gaacuggaacagacuaaag

SEQ ID NO: 1408489 - RNA, 19 nt, Homo sapiens
  misc_RNA (1)...(19): siRNA sense strand
gaacugagugccuggaagu

SEQ ID NO: 1408490 - RNA, 19 nt, Homo sapiens
  misc_RNA (1)...(19): siRNA sense strand
ccuaagagagucugaagaa

SEQ ID NO: 1408491 - RNA, 19 nt, Homo sapiens
  misc_RNA (1)...(19): siRNA sense strand
aagguucgauugagugaaa

SEQ ID NO: 1408492 - RNA, 19 nt, Homo sapiens
  misc_RNA (1)...(19): siRNA sense strand
ggaacaagcccaaaaugaa

SEQ ID NO: 1408493 - RNA, 19 nt, Homo sapiens
  misc_RNA (1)...(19): siRNA sense strand
cuaagagagucugaagaaa

SEQ ID NO: 1408494 - RNA, 19 nt, Homo sapiens
  misc_RNA (1)...(19): siRNA sense strand
ccaagaagguucgauugag

SEQ ID NO: 1408495 - RNA, 19 nt, Homo sapiens
  misc_RNA (1)...(19): siRNA sense strand
caagagaugaguuaauucu

SEQ ID NO: 1408496 - RNA, 19 nt, Homo sapiens
  misc_RNA (1)...(19): siRNA sense strand
guaacuggccuaagagagu

SEQ ID NO: 1408497 - RNA, 19 nt, Homo sapiens
  misc_RNA (1)...(19): siRNA sense strand
caagagaugcaagagugua

SEQ ID NO: 1408498 - RNA, 19 nt, Homo sapiens
  misc_RNA (1)...(19): siRNA sense strand
gacuaaagacaaacuggaa

SEQ ID NO: 1408499 - RNA, 19 nt, Homo sapiens
  misc_RNA (1)...(19): siRNA sense strand
gcaagagaugaguuaauuc

SEQ ID NO: 1408500 - RNA, 19 nt, Homo sapiens
  misc_RNA (1)...(19): siRNA sense strand
ggaaguuuacgccugauag

SEQ ID NO: 1408501 - RNA, 19 nt, Homo sapiens
  misc_RNA (1)...(19): siRNA sense strand
gagaugcaagaguguacua

SEQ ID NO: 1408502 - RNA, 19 nt, Homo sapiens
  misc_RNA (1)...(19): siRNA sense strand
ugaagcauauguacaagcu

SEQ ID NO: 1408503 - RNA, 19 nt, Homo sapiens
  misc_RNA (1)...(19): siRNA sense strand
gggaaaacauccuuguaau

SEQ ID NO: 1408504 - RNA, 19 nt, Homo sapiens
  misc_RNA (1)...(19): siRNA sense strand
ggcaaguacacagaucuua

SEQ ID NO: 1408505 - RNA, 19 nt, Homo sapiens
  misc_RNA (1)...(19): siRNA sense strand
uaagagagucugaagaaaa

SEQ ID NO: 1408506 - RNA, 19 nt, Homo sapiens
  misc_RNA (1)...(19): siRNA sense strand
gagggcaaguacacagauc

SEQ ID NO: 1408507 - RNA, 19 nt, Homo sapiens
  misc_RNA (1)...(19): siRNA sense strand
uauggcaagagaugaguua

SEQ ID NO: 1408508 - RNA, 19 nt, Homo sapiens
  misc_RNA (1)...(19): siRNA sense strand
gcgacuagcaaccaaggaa

SEQ ID NO: 1408509 - RNA, 19 nt, Homo sapiens
  misc_RNA (1)...(19): siRNA sense strand
ggaaaacauccuuguaaug

SEQ ID NO: 1408510 - RNA, 19 nt, Homo sapiens
  misc_RNA (1)...(19): siRNA sense strand
uccaguaccucaagcaagu

SEQ ID NO: 1408511 - RNA, 19 nt, Homo sapiens
  misc_RNA (1)...(19): siRNA sense strand
aaaguuauggcaagagaug

SEQ ID NO: 1408512 - RNA, 19 nt, Homo sapiens
  misc_RNA (1)...(19): siRNA sense strand
gaaaacauccuuguaaugc

SEQ ID NO: 1408513 - RNA, 19 nt, Homo sapiens
  misc_RNA (1)...(19): siRNA sense strand
acccagcgaucaacuuguu

SEQ ID NO: 1408514 - RNA, 19 nt, Homo sapiens
  misc_RNA (1)...(19): siRNA sense strand
uggaacagacuaaagacaa

SEQ ID NO: 1408515 - RNA, 19 nt, Homo sapiens
  misc_RNA (1)...(19): siRNA sense strand
gaguuaauucuaagaugga

SEQ ID NO: 1408516 - RNA, 19 nt, Homo sapiens
  misc_RNA (1)...(19): siRNA sense strand
cuucaaaguuauggcaaga

SEQ ID NO: 1408517 - RNA, 19 nt, Homo sapiens
  misc_RNA (1)...(19): siRNA sense strand
caaccaaggaacaagagau

SEQ ID NO: 1408518 - RNA, 19 nt, Homo sapiens
  misc_RNA (1)...(19): siRNA sense strand
caaguacacagaucuuaac

SEQ ID NO: 1408519 - RNA, 19 nt, Homo sapiens
  misc_RNA (1)...(19): siRNA sense strand
uaaugcgacuagcaaccaa

SEQ ID NO: 1408520 - RNA, 19 nt, Homo sapiens
  misc_RNA (1)...(19): siRNA sense strand
cccaagaagguucgauuga

SEQ ID NO: 1408521 - RNA, 19 nt, Homo sapiens
  misc_RNA (1)...(19): siRNA sense strand
gcaaccaaggaacaagaga

SEQ ID NO: 1408522 - RNA, 19 nt, Homo sapiens
  misc_RNA (1)...(19): siRNA sense strand
gaacaagcccaaaaugaac

SEQ ID NO: 1408523 - RNA, 19 nt, Homo sapiens
  misc_RNA (1)...(19): siRNA sense strand
gaacagacuaaagacaaac

SEQ ID NO: 1408524 - RNA, 19 nt, Homo sapiens
  misc_RNA (1)...(19): siRNA sense strand
acugagaucaacaauggua

SEQ ID NO: 1408525 - RNA, 19 nt, Homo sapiens
  misc_RNA (1)...(19): siRNA sense strand
gggcaaguacacagaucuu

SEQ ID NO: 1408526 - RNA, 19 nt, Homo sapiens
  misc_RNA (1)...(19): siRNA sense strand
uaaagacaaacuggaacaa

SEQ ID NO: 1408527 - RNA, 19 nt, Homo sapiens
  misc_RNA (1)...(19): siRNA sense strand
ccaaggaacaagagaugca

SEQ ID NO: 1408528 - RNA, 19 nt, Homo sapiens
  misc_RNA (1)...(19): siRNA sense strand
uagcaaccaaggaacaaga

SEQ ID NO: 1408529 - RNA, 19 nt, Homo sapiens
  misc_RNA (1)...(19): siRNA sense strand
ggagggcaaguacacagau

SEQ ID NO: 1408530 - RNA, 19 nt, Homo sapiens
  misc_RNA (1)...(19): siRNA sense strand
cuaaagacaaacuggaaca

SEQ ID NO: 1408531 - RNA, 19 nt, Homo sapiens
  misc_RNA (1)...(19): siRNA sense strand
gcccaacugagaucaacaa

SEQ ID NO: 1408532 - RNA, 19 nt, Homo sapiens
  misc_RNA (1)...(19): siRNA sense strand
ucaaauccaguaccucaag

SEQ ID NO: 1408533 - RNA, 19 nt, Homo sapiens
  misc_RNA (1)...(19): siRNA sense strand
guaaugcgacuagcaacca

SEQ ID NO: 1408534 - RNA, 19 nt, Homo sapiens
  misc_RNA (1)...(19): siRNA sense strand
ccaacugagaucaacaaug

SEQ ID NO: 1408535 - RNA, 19 nt, Homo sapiens
  misc_RNA (1)...(19): siRNA sense strand
caaggaacaagagaugcaa

SEQ ID NO: 1408536 - RNA, 19 nt, Homo sapiens
  misc_RNA (1)...(19): siRNA sense strand
ugagaucaacaaugguaga

SEQ ID NO: 1408537 - RNA, 19 nt, Homo sapiens
  misc_RNA (1)...(19): siRNA sense strand
ggugaacuggaacagacua

SEQ ID NO: 1408538 - RNA, 19 nt, Homo sapiens
  misc_RNA (1)...(19): siRNA sense strand
agacccagcgaucaacuug

SEQ ID NO: 1408539 - RNA, 19 nt, Homo sapiens
  misc_RNA (1)...(19): siRNA sense strand
acacagaucuuaacucuaa

SEQ ID NO: 1408540 - RNA, 19 nt, Homo sapiens
  misc_RNA (1)...(19): siRNA sense strand
gaucuuaacucuaaugaug

SEQ ID NO: 1408541 - RNA, 19 nt, Homo sapiens
  misc_RNA (1)...(19): siRNA sense strand
caacugagaucaacaaugg

SEQ ID NO: 1408542 - RNA, 19 nt, Homo sapiens
  misc_RNA (1)...(19): siRNA sense strand
ggaacagacuaaagacaaa

SEQ ID NO: 1408543 - RNA, 19 nt, Homo sapiens
  misc_RNA (1)...(19): siRNA sense strand
ggcaagagaugaguuaauu

SEQ ID NO: 1408544 - RNA, 19 nt, Homo sapiens
  misc_RNA (1)...(19): siRNA sense strand
guacacagaucuuaacucu

SEQ ID NO: 1408545 - RNA, 19 nt, Homo sapiens
  misc_RNA (1)...(19): siRNA sense strand
gcaaguacacagaucuuaa

SEQ ID NO: 1408546 - RNA, 19 nt, Homo sapiens
  misc_RNA (1)...(19): siRNA sense strand
ugauguaacuggccuaaga

SEQ ID NO: 1408547 - RNA, 19 nt, Homo sapiens
  misc_RNA (1)...(19): siRNA sense strand
aaugaaaggugaacuggaa

SEQ ID NO: 1408548 - RNA, 19 nt, Homo sapiens
  misc_RNA (1)...(19): siRNA sense strand
caagaagguucgauugagu

SEQ ID NO: 1408549 - RNA, 19 nt, Homo sapiens
  misc_RNA (1)...(19): siRNA sense strand
cugagugccuggaaguuua

SEQ ID NO: 1408550 - RNA, 19 nt, Homo sapiens
  misc_RNA (1)...(19): siRNA sense strand
gagaugaguuaauucuaag

SEQ ID NO: 1408551 - RNA, 19 nt, Homo sapiens
  misc_RNA (1)...(19): siRNA sense strand
ucaaaguuauggcaagaga

SEQ ID NO: 1408552 - RNA, 19 nt, Homo sapiens
  misc_RNA (1)...(19): siRNA sense strand
gaacaagagaugcaagagu

SEQ ID NO: 1408553 - RNA, 19 nt, Homo sapiens
  misc_RNA (1)...(19): siRNA sense strand
gaacuggaacagacuaaag

SEQ ID NO: 1408554 - RNA, 19 nt, Homo sapiens
  misc_RNA (1)...(19): siRNA sense strand
gaacugagugccuggaagu

SEQ ID NO: 1408555 - RNA, 19 nt, Homo sapiens
  misc_RNA (1)...(19): siRNA sense strand
ccuaagagagucugaagaa

SEQ ID NO: 1408556 - RNA, 19 nt, Homo sapiens
  misc_RNA (1)...(19): siRNA sense strand
aagguucgauugagugaaa

SEQ ID NO: 1408557 - RNA, 19 nt, Homo sapiens
  misc_RNA (1)...(19): siRNA sense strand
ggaacaagcccaaaaugaa

SEQ ID NO: 1408558 - RNA, 19 nt, Homo sapiens
  misc_RNA (1)...(19): siRNA sense strand
cuaagagagucugaagaaa

SEQ ID NO: 1408559 - RNA, 19 nt, Homo sapiens
  misc_RNA (1)...(19): siRNA sense strand
ccaagaagguucgauugag

SEQ ID NO: 1408560 - RNA, 19 nt, Homo sapiens
  misc_RNA (1)...(19): siRNA sense strand
caagagaugaguuaauucu

SEQ ID NO: 1408561 - RNA, 19 nt, Homo sapiens
  misc_RNA (1)...(19): siRNA sense strand
guaacuggccuaagagagu

SEQ ID NO: 1408562 - RNA, 19 nt, Homo sapiens
  misc_RNA (1)...(19): siRNA sense strand
caagagaugcaagagugua

SEQ ID NO: 1408563 - RNA, 19 nt, Homo sapiens
  misc_RNA (1)...(19): siRNA sense strand
gacuaaagacaaacuggaa

SEQ ID NO: 1408564 - RNA, 19 nt, Homo sapiens
  misc_RNA (1)...(19): siRNA sense strand
gcaagagaugaguuaauuc

SEQ ID NO: 1408565 - RNA, 19 nt, Homo sapiens
  misc_RNA (1)...(19): siRNA sense strand
ggaaguuuacgccugauag

SEQ ID NO: 1408566 - RNA, 19 nt, Homo sapiens
  misc_RNA (1)...(19): siRNA sense strand
gagaugcaagaguguacua

SEQ ID NO: 1408567 - RNA, 19 nt, Homo sapiens
  misc_RNA (1)...(19): siRNA sense strand
ugaagcauauguacaagcu

SEQ ID NO: 1408568 - RNA, 19 nt, Homo sapiens
  misc_RNA (1)...(19): siRNA sense strand
gggaaaacauccuuguaau

SEQ ID NO: 1408569 - RNA, 19 nt, Homo sapiens
  misc_RNA (1)...(19): siRNA sense strand
ggcaaguacacagaucuua

SEQ ID NO: 1408570 - RNA, 19 nt, Homo sapiens
  misc_RNA (1)...(19): siRNA sense strand
uaagagagucugaagaaaa

SEQ ID NO: 1408571 - RNA, 19 nt, Homo sapiens
  misc_RNA (1)...(19): siRNA sense strand
gagggcaaguacacagauc

SEQ ID NO: 1408572 - RNA, 19 nt, Homo sapiens
  misc_RNA (1)...(19): siRNA sense strand
uauggcaagagaugaguua

SEQ ID NO: 1408573 - RNA, 19 nt, Homo sapiens
  misc_RNA (1)...(19): siRNA sense strand
gcgacuagcaaccaaggaa

SEQ ID NO: 1408574 - RNA, 19 nt, Homo sapiens
  misc_RNA (1)...(19): siRNA sense strand
ggaaaacauccuuguaaug

SEQ ID NO: 1408575 - RNA, 19 nt, Homo sapiens
  misc_RNA (1)...(19): siRNA sense strand
uccaguaccucaagcaagu

SEQ ID NO: 1408576 - RNA, 19 nt, Homo sapiens
  misc_RNA (1)...(19): siRNA sense strand
aaaguuauggcaagagaug

SEQ ID NO: 1408577 - RNA, 19 nt, Homo sapiens
  misc_RNA (1)...(19): siRNA sense strand
gaaaacauccuuguaaugc

SEQ ID NO: 1408578 - RNA, 19 nt, Homo sapiens
  misc_RNA (1)...(19): siRNA sense strand
acccagcgaucaacuuguu

SEQ ID NO: 1408579 - RNA, 19 nt, Homo sapiens
  misc_RNA (1)...(19): siRNA sense strand
uggaacagacuaaagacaa

SEQ ID NO: 1408580 - RNA, 19 nt, Homo sapiens
  misc_RNA (1)...(19): siRNA sense strand
gaguuaauucuaagaugga

SEQ ID NO: 1408581 - RNA, 19 nt, Homo sapiens
  misc_RNA (1)...(19): siRNA sense strand
cuucaaaguuauggcaaga

SEQ ID NO: 1408582 - RNA, 19 nt, Homo sapiens
  misc_RNA (1)...(19): siRNA sense strand
caaccaaggaacaagagau

SEQ ID NO: 1408583 - RNA, 19 nt, Homo sapiens
  misc_RNA (1)...(19): siRNA sense strand
caaguacacagaucuuaac

SEQ ID NO: 1408584 - RNA, 19 nt, Homo sapiens
  misc_RNA (1)...(19): siRNA sense strand
uaaugcgacuagcaaccaa

SEQ ID NO: 1408585 - RNA, 19 nt, Homo sapiens
  misc_RNA (1)...(19): siRNA sense strand
cccaagaagguucgauuga

SEQ ID NO: 1408586 - RNA, 19 nt, Homo sapiens
  misc_RNA (1)...(19): siRNA sense strand
gcaaccaaggaacaagaga

SEQ ID NO: 1408587 - RNA, 19 nt, Homo sapiens
  misc_RNA (1)...(19): siRNA sense strand
gaacaagcccaaaaugaac

SEQ ID NO: 1408588 - RNA, 19 nt, Homo sapiens
  misc_RNA (1)...(19): siRNA sense strand
gaacagacuaaagacaaac

SEQ ID NO: 1408589 - RNA, 19 nt, Homo sapiens
  misc_RNA (1)...(19): siRNA sense strand
acugagaucaacaauggua

SEQ ID NO: 1408590 - RNA, 19 nt, Homo sapiens
  misc_RNA (1)...(19): siRNA sense strand
gggcaaguacacagaucuu

SEQ ID NO: 1408591 - RNA, 19 nt, Homo sapiens
  misc_RNA (1)...(19): siRNA sense strand
uaaagacaaacuggaacaa

SEQ ID NO: 1408592 - RNA, 19 nt, Homo sapiens
  misc_RNA (1)...(19): siRNA sense strand
ccaaggaacaagagaugca

SEQ ID NO: 1408593 - RNA, 19 nt, Homo sapiens
  misc_RNA (1)...(19): siRNA sense strand
uagcaaccaaggaacaaga

SEQ ID NO: 1408594 - RNA, 19 nt, Homo sapiens
  misc_RNA (1)...(19): siRNA sense strand
ggagggcaaguacacagau

SEQ ID NO: 1408595 - RNA, 19 nt, Homo sapiens
  misc_RNA (1)...(19): siRNA sense strand
cuaaagacaaacuggaaca

SEQ ID NO: 1408596 - RNA, 19 nt, Homo sapiens
  misc_RNA (1)...(19): siRNA sense strand
gcccaacugagaucaacaa

SEQ ID NO: 1408597 - RNA, 19 nt, Homo sapiens
  misc_RNA (1)...(19): siRNA sense strand
ucaaauccaguaccucaag

SEQ ID NO: 1408598 - RNA, 19 nt, Homo sapiens
  misc_RNA (1)...(19): siRNA sense strand
guaaugcgacuagcaacca

SEQ ID NO: 1408599 - RNA, 19 nt, Homo sapiens
  misc_RNA (1)...(19): siRNA sense strand
ccaacugagaucaacaaug

SEQ ID NO: 1408600 - RNA, 19 nt, Homo sapiens
  misc_RNA (1)...(19): siRNA sense strand
caaggaacaagagaugcaa

SEQ ID NO: 1408601 - RNA, 19 nt, Homo sapiens
  misc_RNA (1)...(19): siRNA sense strand
ugagaucaacaaugguaga

SEQ ID NO: 1408602 - RNA, 19 nt, Homo sapiens
  misc_RNA (1)...(19): siRNA sense strand
ggugaacuggaacagacua

SEQ ID NO: 1408603 - RNA, 19 nt, Homo sapiens
  misc_RNA (1)...(19): siRNA sense strand
agacccagcgaucaacuug

SEQ ID NO: 1408604 - RNA, 19 nt, Homo sapiens
  misc_RNA (1)...(19): siRNA sense strand
gaaguaacauuugcagauu

SEQ ID NO: 1408605 - RNA, 19 nt, Homo sapiens
  misc_RNA (1)...(19): siRNA sense strand
gcaucaagcuggcauguug

SEQ ID NO: 1408606 - RNA, 19 nt, Homo sapiens
  misc_RNA (1)...(19): siRNA sense strand
guacgggaguuucuuggua

SEQ ID NO: 1408607 - RNA, 19 nt, Homo sapiens
  misc_RNA (1)...(19): siRNA sense strand
ggagagaacagggcaguua

SEQ ID NO: 1408608 - RNA, 19 nt, Homo sapiens
  misc_RNA (1)...(19): siRNA sense strand
gcugaugaguuauuaaaga

SEQ ID NO: 1408609 - RNA, 19 nt, Homo sapiens
  misc_RNA (1)...(19): siRNA sense strand
ccauguauguugagucuaa

SEQ ID NO: 1408610 - RNA, 19 nt, Homo sapiens
  misc_RNA (1)...(19): siRNA sense strand
aaacaaaccggaagcagua

SEQ ID NO: 1408611 - RNA, 19 nt, Homo sapiens
  misc_RNA (1)...(19): siRNA sense strand
gaugagaccauguauguug

SEQ ID NO: 1408612 - RNA, 19 nt, Homo sapiens
  misc_RNA (1)...(19): siRNA sense strand
gaacagggcaguuauccau

SEQ ID NO: 1408613 - RNA, 19 nt, Homo sapiens
  misc_RNA (1)...(19): siRNA sense strand
acagggcaguuauccauua

SEQ ID NO: 1408614 - RNA, 19 nt, Homo sapiens
  misc_RNA (1)...(19): siRNA sense strand
caaugucucuuugcuauau

SEQ ID NO: 1408615 - RNA, 19 nt, Homo sapiens
  misc_RNA (1)...(19): siRNA sense strand
acauggugcugaugaguua

SEQ ID NO: 1408616 - RNA, 19 nt, Homo sapiens
  misc_RNA (1)...(19): siRNA sense strand
ugacaacauuggcuacauu

SEQ ID NO: 1408617 - RNA, 19 nt, Homo sapiens
  misc_RNA (1)...(19): siRNA sense strand
gggcaguuauccauuauag

SEQ ID NO: 1408618 - RNA, 19 nt, Homo sapiens
  misc_RNA (1)...(19): siRNA sense strand
aaagugauggucaguauuu

SEQ ID NO: 1408619 - RNA, 19 nt, Homo sapiens
  misc_RNA (1)...(19): siRNA sense strand
gcucuaaggccuauauuca

SEQ ID NO: 1408620 - RNA, 19 nt, Homo sapiens
  misc_RNA (1)...(19): siRNA sense strand
uacaaugucucuuugcuau

SEQ ID NO: 1408621 - RNA, 19 nt, Homo sapiens
  misc_RNA (1)...(19): siRNA sense strand
gacaacauuggcuacauua

SEQ ID NO: 1408622 - RNA, 19 nt, Homo sapiens
  misc_RNA (1)...(19): siRNA sense strand
gaccauguauguugagucu

SEQ ID NO: 1408623 - RNA, 19 nt, Homo sapiens
  misc_RNA (1)...(19): siRNA sense strand
ggacagagucacaguaguc

SEQ ID NO: 1408624 - RNA, 19 nt, Homo sapiens
  misc_RNA (1)...(19): siRNA sense strand
gauggucaguauuucuuug

SEQ ID NO: 1408625 - RNA, 19 nt, Homo sapiens
  misc_RNA (1)...(19): siRNA sense strand
gcaguagaaguaacauuug

SEQ ID NO: 1408626 - RNA, 19 nt, Homo sapiens
  misc_RNA (1)...(19): siRNA sense strand
caaaagugauggucaguau

SEQ ID NO: 1408627 - RNA, 19 nt, Homo sapiens
  misc_RNA (1)...(19): siRNA sense strand
gguccucuaucauauuuca

SEQ ID NO: 1408628 - RNA, 19 nt, Homo sapiens
  misc_RNA (1)...(19): siRNA sense strand
caggauacaaugucucuuu

SEQ ID NO: 1408629 - RNA, 19 nt, Homo sapiens
  misc_RNA (1)...(19): siRNA sense strand
ccaagaagagggcaaggaa

SEQ ID NO: 1408630 - RNA, 19 nt, Homo sapiens
  misc_RNA (1)...(19): siRNA sense strand
gggaugaugagaccaugua

SEQ ID NO: 1408631 - RNA, 19 nt, Homo sapiens
  misc_RNA (1)...(19): siRNA sense strand
ggaagcaguagaaguaaca

SEQ ID NO: 1408632 - RNA, 19 nt, Homo sapiens
  misc_RNA (1)...(19): siRNA sense strand
gaaucaggauacaaugucu

SEQ ID NO: 1408633 - RNA, 19 nt, Homo sapiens
  misc_RNA (1)...(19): siRNA sense strand
gaaauucuacaaggaacuu

SEQ ID NO: 1408634 - RNA, 19 nt, Homo sapiens
  misc_RNA (1)...(19): siRNA sense strand
gaaauuguuuugccucugu

SEQ ID NO: 1408635 - RNA, 19 nt, Homo sapiens
  misc_RNA (1)...(19): siRNA sense strand
gggacuaccugcacuacca

SEQ ID NO: 1408636 - RNA, 19 nt, Homo sapiens
  misc_RNA (1)...(19): siRNA sense strand
uacgggaguuucuugguaa

SEQ ID NO: 1408637 - RNA, 19 nt, Homo sapiens
  misc_RNA (1)...(19): siRNA sense strand
gauacaaugucucuuugcu

SEQ ID NO: 1408638 - RNA, 19 nt, Homo sapiens
  misc_RNA (1)...(19): siRNA sense strand
gggaguuucuugguaaauc

SEQ ID NO: 1408639 - RNA, 19 nt, Homo sapiens
  misc_RNA (1)...(19): siRNA sense strand
caagugcucuaaggccuau

SEQ ID NO: 1408640 - RNA, 19 nt, Homo sapiens
  misc_RNA (1)...(19): siRNA sense strand
gagagaacagggcaguuau

SEQ ID NO: 1408641 - RNA, 19 nt, Homo sapiens
  misc_RNA (1)...(19): siRNA sense strand
gugcugaugaguuauuaaa

SEQ ID NO: 1408642 - RNA, 19 nt, Homo sapiens
  misc_RNA (1)...(19): siRNA sense strand
ucuaaggccuauauucaca

SEQ ID NO: 1408643 - RNA, 19 nt, Homo sapiens
  misc_RNA (1)...(19): siRNA sense strand
agaaguaacauuugcagau

SEQ ID NO: 1408644 - RNA, 19 nt, Homo sapiens
  misc_RNA (1)...(19): siRNA sense strand
cagggcaguuauccauuau

SEQ ID NO: 1408645 - RNA, 19 nt, Homo sapiens
  misc_RNA (1)...(19): siRNA sense strand
gaggugaacaaccgcauca

SEQ ID NO: 1408646 - RNA, 19 nt, Homo sapiens
  misc_RNA (1)...(19): siRNA sense strand
caaaccggaagcaguagaa

SEQ ID NO: 1408647 - RNA, 19 nt, Homo sapiens
  misc_RNA (1)...(19): siRNA sense strand
aguaacauuugcagauuuc

SEQ ID NO: 1408648 - RNA, 19 nt, Homo sapiens
  misc_RNA (1)...(19): siRNA sense strand
gaugggguccucuaucaua

SEQ ID NO: 1408649 - RNA, 19 nt, Homo sapiens
  misc_RNA (1)...(19): siRNA sense strand
aggauacaaugucucuuug

SEQ ID NO: 1408650 - RNA, 19 nt, Homo sapiens
  misc_RNA (1)...(19): siRNA sense strand
gaugaugagaccauguaug

SEQ ID NO: 1408651 - RNA, 19 nt, Homo sapiens
  misc_RNA (1)...(19): siRNA sense strand
uaccugcacuaccacauca

SEQ ID NO: 1408652 - RNA, 19 nt, Homo sapiens
  misc_RNA (1)...(19): siRNA sense strand
cagagucacaguagucuuc

SEQ ID NO: 1408653 - RNA, 19 nt, Homo sapiens
  misc_RNA (1)...(19): siRNA sense strand
aaaggacagagucacagua

SEQ ID NO: 1408654 - RNA, 19 nt, Homo sapiens
  misc_RNA (1)...(19): siRNA sense strand
agcaguagaaguaacauuu

SEQ ID NO: 1408655 - RNA, 19 nt, Homo sapiens
  misc_RNA (1)...(19): siRNA sense strand
uguugaagcgaaauuguuu

SEQ ID NO: 1408656 - RNA, 19 nt, Homo sapiens
  misc_RNA (1)...(19): siRNA sense strand
gggguccucuaucauauuu

SEQ ID NO: 1408657 - RNA, 19 nt, Homo sapiens
  misc_RNA (1)...(19): siRNA sense strand
ggagacaaaacaaaaguga

SEQ ID NO: 1408658 - RNA, 19 nt, Homo sapiens
  misc_RNA (1)...(19): siRNA sense strand
uaaggccuauauucacaca

SEQ ID NO: 1408659 - RNA, 19 nt, Homo sapiens
  misc_RNA (1)...(19): siRNA sense strand
uuggaaagguguucaugca

SEQ ID NO: 1408660 - RNA, 19 nt, Homo sapiens
  misc_RNA (1)...(19): siRNA sense strand
accggaagcaguagaagua

SEQ ID NO: 1408661 - RNA, 19 nt, Homo sapiens
  misc_RNA (1)...(19): siRNA sense strand
cgucugacuuccucaaggu

SEQ ID NO: 1408662 - RNA, 19 nt, Homo sapiens
  misc_RNA (1)...(19): siRNA sense strand
cacaucaagugcucuaagg

SEQ ID NO: 1408663 - RNA, 19 nt, Homo sapiens
  misc_RNA (1)...(19): siRNA sense strand
ucaaccugauccacacguu

SEQ ID NO: 1408664 - RNA, 19 nt, Homo sapiens
  misc_RNA (1)...(19): siRNA sense strand
acgauguggucauuggaaa

SEQ ID NO: 1408665 - RNA, 19 nt, Homo sapiens
  misc_RNA (1)...(19): siRNA sense strand
ggaguuucuugguaaaucc

SEQ ID NO: 1408666 - RNA, 19 nt, Homo sapiens
  misc_RNA (1)...(19): siRNA sense strand
cugaugaguuauuaaagag

SEQ ID NO: 1408667 - RNA, 19 nt, Homo sapiens
  misc_RNA (1)...(19): siRNA sense strand
caguagaaguaacauuugc

SEQ ID NO: 1408668 - RNA, 19 nt, Homo sapiens
  misc_RNA (1)...(19): siRNA sense strand
gacgauguggucauuggaa

SEQ ID NO: 1408669 - RNA, 19 nt, Homo sapiens
  misc_RNA (1)...(19): siRNA sense strand
ggugaacaaccgcaucauc

SEQ ID NO: 1408670 - RNA, 19 nt, Homo sapiens
  misc_RNA (1)...(19): siRNA sense strand
gcaaggaaggagagaacag

SEQ ID NO: 1408671 - RNA, 19 nt, Homo sapiens
  misc_RNA (1)...(19): siRNA sense strand
gcauguugaagcgaaauug

SEQ ID NO: 1408672 - RNA, 19 nt, Homo sapiens
  misc_RNA (1)...(19): siRNA sense strand
gugauggucaguauuucuu

SEQ ID NO: 1408673 - RNA, 19 nt, Homo sapiens
  misc_RNA (1)...(19): siRNA sense strand
augaugagaccauguaugu

SEQ ID NO: 1408674 - RNA, 19 nt, Homo sapiens
  misc_RNA (1)...(19): siRNA sense strand
aggagacgcucgcgcucaa

SEQ ID NO: 1408675 - RNA, 19 nt, Homo sapiens
  misc_RNA (1)...(19): siRNA sense strand
uggugcugaugaguuauua

SEQ ID NO: 1408676 - RNA, 19 nt, Homo sapiens
  misc_RNA (1)...(19): siRNA sense strand
gcucgagacaacaccauca

SEQ ID NO: 1408677 - RNA, 19 nt, Homo sapiens
  misc_RNA (1)...(19): siRNA sense strand
cgcugugggugacaacauu

SEQ ID NO: 1408678 - RNA, 19 nt, Homo sapiens
  misc_RNA (1)...(19): siRNA sense strand
ucaugcaggaguucaaaga

SEQ ID NO: 1408679 - RNA, 19 nt, Homo sapiens
  misc_RNA (1)...(19): siRNA sense strand
acaaugucucuuugcuaua

SEQ ID NO: 1408680 - RNA, 19 nt, Homo sapiens
  misc_RNA (1)...(19): siRNA sense strand
auacaaugucucuuugcua

SEQ ID NO: 1408681 - RNA, 19 nt, Homo sapiens
  misc_RNA (1)...(19): siRNA sense strand
gguguacgggaguuucuug

SEQ ID NO: 1408682 - RNA, 19 nt, Homo sapiens
  misc_RNA (1)...(19): siRNA sense strand
cauguauguugagucuaaa

SEQ ID NO: 1408683 - RNA, 19 nt, Homo sapiens
  misc_RNA (1)...(19): siRNA sense strand
augagaccauguauguuga

SEQ ID NO: 1408684 - RNA, 19 nt, Homo sapiens
  misc_RNA (1)...(19): siRNA sense strand
uuugcuauaugaccuugaa

SEQ ID NO: 1408685 - RNA, 19 nt, Homo sapiens
  misc_RNA (1)...(19): siRNA sense strand
auacuuccaauuccaagaa

SEQ ID NO: 1408686 - RNA, 19 nt, Homo sapiens
  misc_RNA (1)...(19): siRNA sense strand
ccacaucaagugcucuaag

SEQ ID NO: 1408687 - RNA, 19 nt, Homo sapiens
  misc_RNA (1)...(19): siRNA sense strand
caacauuggcuacauuacc

SEQ ID NO: 1408688 - RNA, 19 nt, Homo sapiens
  misc_RNA (1)...(19): siRNA sense strand
gugacaacauuggcuacau

SEQ ID NO: 1408689 - RNA, 19 nt, Homo sapiens
  misc_RNA (1)...(19): siRNA sense strand
caugcaggaguucaaagaa

SEQ ID NO: 1408690 - RNA, 19 nt, Homo sapiens
  misc_RNA (1)...(19): siRNA sense strand
gagaccauguauguugagu

SEQ ID NO: 1408691 - RNA, 19 nt, Homo sapiens
  misc_RNA (1)...(19): siRNA sense strand
cuuugaaauucuacaagga

SEQ ID NO: 1408692 - RNA, 19 nt, Homo sapiens
  misc_RNA (1)...(19): siRNA sense strand
ugaacaaccgcaucaucga

SEQ ID NO: 1408693 - RNA, 19 nt, Homo sapiens
  misc_RNA (1)...(19): siRNA sense strand
uaacauuugcagauuucga

SEQ ID NO: 1408694 - RNA, 19 nt, Homo sapiens
  misc_RNA (1)...(19): siRNA sense strand
gaaguaacauuugcagauu

SEQ ID NO: 1408695 - RNA, 19 nt, Homo sapiens
  misc_RNA (1)...(19): siRNA sense strand
gcaucaagcuggcauguug

SEQ ID NO: 1408696 - RNA, 19 nt, Homo sapiens
  misc_RNA (1)...(19): siRNA sense strand
guacgggaguuucuuggua

SEQ ID NO: 1408697 - RNA, 19 nt, Homo sapiens
  misc_RNA (1)...(19): siRNA sense strand
ggagagaacagggcaguua

SEQ ID NO: 1408698 - RNA, 19 nt, Homo sapiens
  misc_RNA (1)...(19): siRNA sense strand
gcugaugaguuauuaaaga

SEQ ID NO: 1408699 - RNA, 19 nt, Homo sapiens
  misc_RNA (1)...(19): siRNA sense strand
ccauguauguugagucuaa

SEQ ID NO: 1408700 - RNA, 19 nt, Homo sapiens
  misc_RNA (1)...(19): siRNA sense strand
aaacaaaccggaagcagua

SEQ ID NO: 1408701 - RNA, 19 nt, Homo sapiens
  misc_RNA (1)...(19): siRNA sense strand
gaugagaccauguauguug

SEQ ID NO: 1408702 - RNA, 19 nt, Homo sapiens
  misc_RNA (1)...(19): siRNA sense strand
gaacagggcaguuauccau

SEQ ID NO: 1408703 - RNA, 19 nt, Homo sapiens
  misc_RNA (1)...(19): siRNA sense strand
acagggcaguuauccauua

SEQ ID NO: 1408704 - RNA, 19 nt, Homo sapiens
  misc_RNA (1)...(19): siRNA sense strand
caaugucucuuugcuauau

SEQ ID NO: 1408705 - RNA, 19 nt, Homo sapiens
  misc_RNA (1)...(19): siRNA sense strand
acauggugcugaugaguua

SEQ ID NO: 1408706 - RNA, 19 nt, Homo sapiens
  misc_RNA (1)...(19): siRNA sense strand
ugacaacauuggcuacauu

SEQ ID NO: 1408707 - RNA, 19 nt, Homo sapiens
  misc_RNA (1)...(19): siRNA sense strand
gggcaguuauccauuauag

SEQ ID NO: 1408708 - RNA, 19 nt, Homo sapiens
  misc_RNA (1)...(19): siRNA sense strand
aaagugauggucaguauuu

SEQ ID NO: 1408709 - RNA, 19 nt, Homo sapiens
  misc_RNA (1)...(19): siRNA sense strand
gcucuaaggccuauauuca

SEQ ID NO: 1408710 - RNA, 19 nt, Homo sapiens
  misc_RNA (1)...(19): siRNA sense strand
uacaaugucucuuugcuau

SEQ ID NO: 1408711 - RNA, 19 nt, Homo sapiens
  misc_RNA (1)...(19): siRNA sense strand
gacaacauuggcuacauua

SEQ ID NO: 1408712 - RNA, 19 nt, Homo sapiens
  misc_RNA (1)...(19): siRNA sense strand
gaccauguauguugagucu

SEQ ID NO: 1408713 - RNA, 19 nt, Homo sapiens
  misc_RNA (1)...(19): siRNA sense strand
ggacagagucacaguaguc

SEQ ID NO: 1408714 - RNA, 19 nt, Homo sapiens
  misc_RNA (1)...(19): siRNA sense strand
gauggucaguauuucuuug

SEQ ID NO: 1408715 - RNA, 19 nt, Homo sapiens
  misc_RNA (1)...(19): siRNA sense strand
gcaguagaaguaacauuug

SEQ ID NO: 1408716 - RNA, 19 nt, Homo sapiens
  misc_RNA (1)...(19): siRNA sense strand
caaaagugauggucaguau

SEQ ID NO: 1408717 - RNA, 19 nt, Homo sapiens
  misc_RNA (1)...(19): siRNA sense strand
gguccucuaucauauuuca

SEQ ID NO: 1408718 - RNA, 19 nt, Homo sapiens
  misc_RNA (1)...(19): siRNA sense strand
caggauacaaugucucuuu

SEQ ID NO: 1408719 - RNA, 19 nt, Homo sapiens
  misc_RNA (1)...(19): siRNA sense strand
ccaagaagagggcaaggaa

SEQ ID NO: 1408720 - RNA, 19 nt, Homo sapiens
  misc_RNA (1)...(19): siRNA sense strand
gggaugaugagaccaugua

SEQ ID NO: 1408721 - RNA, 19 nt, Homo sapiens
  misc_RNA (1)...(19): siRNA sense strand
ggaagcaguagaaguaaca

SEQ ID NO: 1408722 - RNA, 19 nt, Homo sapiens
  misc_RNA (1)...(19): siRNA sense strand
gaaucaggauacaaugucu

SEQ ID NO: 1408723 - RNA, 19 nt, Homo sapiens
  misc_RNA (1)...(19): siRNA sense strand
gaaauucuacaaggaacuu

SEQ ID NO: 1408724 - RNA, 19 nt, Homo sapiens
  misc_RNA (1)...(19): siRNA sense strand
gaaauuguuuugccucugu

SEQ ID NO: 1408725 - RNA, 19 nt, Homo sapiens
  misc_RNA (1)...(19): siRNA sense strand
gggacuaccugcacuacca

SEQ ID NO: 1408726 - RNA, 19 nt, Homo sapiens
  misc_RNA (1)...(19): siRNA sense strand
uacgggaguuucuugguaa

SEQ ID NO: 1408727 - RNA, 19 nt, Homo sapiens
  misc_RNA (1)...(19): siRNA sense strand
gauacaaugucucuuugcu

SEQ ID NO: 1408728 - RNA, 19 nt, Homo sapiens
  misc_RNA (1)...(19): siRNA sense strand
gggaguuucuugguaaauc

SEQ ID NO: 1408729 - RNA, 19 nt, Homo sapiens
  misc_RNA (1)...(19): siRNA sense strand
caagugcucuaaggccuau

SEQ ID NO: 1408730 - RNA, 19 nt, Homo sapiens
  misc_RNA (1)...(19): siRNA sense strand
gagagaacagggcaguuau

SEQ ID NO: 1408731 - RNA, 19 nt, Homo sapiens
  misc_RNA (1)...(19): siRNA sense strand
gugcugaugaguuauuaaa

SEQ ID NO: 1408732 - RNA, 19 nt, Homo sapiens
  misc_RNA (1)...(19): siRNA sense strand
ucuaaggccuauauucaca

SEQ ID NO: 1408733 - RNA, 19 nt, Homo sapiens
  misc_RNA (1)...(19): siRNA sense strand
agaaguaacauuugcagau

SEQ ID NO: 1408734 - RNA, 19 nt, Homo sapiens
  misc_RNA (1)...(19): siRNA sense strand
cagggcaguuauccauuau

SEQ ID NO: 1408735 - RNA, 19 nt, Homo sapiens
  misc_RNA (1)...(19): siRNA sense strand
gaggugaacaaccgcauca

SEQ ID NO: 1408736 - RNA, 19 nt, Homo sapiens
  misc_RNA (1)...(19): siRNA sense strand
caaaccggaagcaguagaa

SEQ ID NO: 1408737 - RNA, 19 nt, Homo sapiens
  misc_RNA (1)...(19): siRNA sense strand
aguaacauuugcagauuuc

SEQ ID NO: 1408738 - RNA, 19 nt, Homo sapiens
  misc_RNA (1)...(19): siRNA sense strand
gaugggguccucuaucaua

SEQ ID NO: 1408739 - RNA, 19 nt, Homo sapiens
  misc_RNA (1)...(19): siRNA sense strand
aggauacaaugucucuuug

SEQ ID NO: 1408740 - RNA, 19 nt, Homo sapiens
  misc_RNA (1)...(19): siRNA sense strand
gaugaugagaccauguaug

SEQ ID NO: 1408741 - RNA, 19 nt, Homo sapiens
  misc_RNA (1)...(19): siRNA sense strand
uaccugcacuaccacauca

SEQ ID NO: 1408742 - RNA, 19 nt, Homo sapiens
  misc_RNA (1)...(19): siRNA sense strand
cagagucacaguagucuuc

SEQ ID NO: 1408743 - RNA, 19 nt, Homo sapiens
  misc_RNA (1)...(19): siRNA sense strand
aaaggacagagucacagua

SEQ ID NO: 1408744 - RNA, 19 nt, Homo sapiens
  misc_RNA (1)...(19): siRNA sense strand
agcaguagaaguaacauuu

SEQ ID NO: 1408745 - RNA, 19 nt, Homo sapiens
  misc_RNA (1)...(19): siRNA sense strand
uguugaagcgaaauuguuu

SEQ ID NO: 1408746 - RNA, 19 nt, Homo sapiens
  misc_RNA (1)...(19): siRNA sense strand
gggguccucuaucauauuu

SEQ ID NO: 1408747 - RNA, 19 nt, Homo sapiens
  misc_RNA (1)...(19): siRNA sense strand
ggagacaaaacaaaaguga

SEQ ID NO: 1408748 - RNA, 19 nt, Homo sapiens
  misc_RNA (1)...(19): siRNA sense strand
uaaggccuauauucacaca

SEQ ID NO: 1408749 - RNA, 19 nt, Homo sapiens
  misc_RNA (1)...(19): siRNA sense strand
uuggaaagguguucaugca

SEQ ID NO: 1408750 - RNA, 19 nt, Homo sapiens
  misc_RNA (1)...(19): siRNA sense strand
accggaagcaguagaagua

SEQ ID NO: 1408751 - RNA, 19 nt, Homo sapiens
  misc_RNA (1)...(19): siRNA sense strand
cgucugacuuccucaaggu

SEQ ID NO: 1408752 - RNA, 19 nt, Homo sapiens
  misc_RNA (1)...(19): siRNA sense strand
cacaucaagugcucuaagg

SEQ ID NO: 1408753 - RNA, 19 nt, Homo sapiens
  misc_RNA (1)...(19): siRNA sense strand
ucaaccugauccacacguu

SEQ ID NO: 1408754 - RNA, 19 nt, Homo sapiens
  misc_RNA (1)...(19): siRNA sense strand
acgauguggucauuggaaa

SEQ ID NO: 1408755 - RNA, 19 nt, Homo sapiens
  misc_RNA (1)...(19): siRNA sense strand
ggaguuucuugguaaaucc

SEQ ID NO: 1408756 - RNA, 19 nt, Homo sapiens
  misc_RNA (1)...(19): siRNA sense strand
cugaugaguuauuaaagag

SEQ ID NO: 1408757 - RNA, 19 nt, Homo sapiens
  misc_RNA (1)...(19): siRNA sense strand
caguagaaguaacauuugc

SEQ ID NO: 1408758 - RNA, 19 nt, Homo sapiens
  misc_RNA (1)...(19): siRNA sense strand
gacgauguggucauuggaa

SEQ ID NO: 1408759 - RNA, 19 nt, Homo sapiens
  misc_RNA (1)...(19): siRNA sense strand
ggugaacaaccgcaucauc

SEQ ID NO: 1408760 - RNA, 19 nt, Homo sapiens
  misc_RNA (1)...(19): siRNA sense strand
gcaaggaaggagagaacag

SEQ ID NO: 1408761 - RNA, 19 nt, Homo sapiens
  misc_RNA (1)...(19): siRNA sense strand
gcauguugaagcgaaauug

SEQ ID NO: 1408762 - RNA, 19 nt, Homo sapiens
  misc_RNA (1)...(19): siRNA sense strand
gugauggucaguauuucuu

SEQ ID NO: 1408763 - RNA, 19 nt, Homo sapiens
  misc_RNA (1)...(19): siRNA sense strand
augaugagaccauguaugu

SEQ ID NO: 1408764 - RNA, 19 nt, Homo sapiens
  misc_RNA (1)...(19): siRNA sense strand
aggagacgcucgcgcucaa

SEQ ID NO: 1408765 - RNA, 19 nt, Homo sapiens
  misc_RNA (1)...(19): siRNA sense strand
uggugcugaugaguuauua

SEQ ID NO: 1408766 - RNA, 19 nt, Homo sapiens
  misc_RNA (1)...(19): siRNA sense strand
gcucgagacaacaccauca

SEQ ID NO: 1408767 - RNA, 19 nt, Homo sapiens
  misc_RNA (1)...(19): siRNA sense strand
cgcugugggugacaacauu

SEQ ID NO: 1408768 - RNA, 19 nt, Homo sapiens
  misc_RNA (1)...(19): siRNA sense strand
ucaugcaggaguucaaaga

SEQ ID NO: 1408769 - RNA, 19 nt, Homo sapiens
  misc_RNA (1)...(19): siRNA sense strand
acaaugucucuuugcuaua

SEQ ID NO: 1408770 - RNA, 19 nt, Homo sapiens
  misc_RNA (1)...(19): siRNA sense strand
auacaaugucucuuugcua

SEQ ID NO: 1408771 - RNA, 19 nt, Homo sapiens
  misc_RNA (1)...(19): siRNA sense strand
gguguacgggaguuucuug

SEQ ID NO: 1408772 - RNA, 19 nt, Homo sapiens
  misc_RNA (1)...(19): siRNA sense strand
cauguauguugagucuaaa

SEQ ID NO: 1408773 - RNA, 19 nt, Homo sapiens
  misc_RNA (1)...(19): siRNA sense strand
augagaccauguauguuga

SEQ ID NO: 1408774 - RNA, 19 nt, Homo sapiens
  misc_RNA (1)...(19): siRNA sense strand
uuugcuauaugaccuugaa

SEQ ID NO: 1408775 - RNA, 19 nt, Homo sapiens
  misc_RNA (1)...(19): siRNA sense strand
auacuuccaauuccaagaa

SEQ ID NO: 1408776 - RNA, 19 nt, Homo sapiens
  misc_RNA (1)...(19): siRNA sense strand
ccacaucaagugcucuaag

SEQ ID NO: 1408777 - RNA, 19 nt, Homo sapiens
  misc_RNA (1)...(19): siRNA sense strand
caacauuggcuacauuacc

SEQ ID NO: 1408778 - RNA, 19 nt, Homo sapiens
  misc_RNA (1)...(19): siRNA sense strand
gugacaacauuggcuacau

SEQ ID NO: 1408779 - RNA, 19 nt, Homo sapiens
  misc_RNA (1)...(19): siRNA sense strand
caugcaggaguucaaagaa

SEQ ID NO: 1408780 - RNA, 19 nt, Homo sapiens
  misc_RNA (1)...(19): siRNA sense strand
gagaccauguauguugagu

SEQ ID NO: 1408781 - RNA, 19 nt, Homo sapiens
  misc_RNA (1)...(19): siRNA sense strand
cuuugaaauucuacaagga

SEQ ID NO: 1408782 - RNA, 19 nt, Homo sapiens
  misc_RNA (1)...(19): siRNA sense strand
ugaacaaccgcaucaucga

SEQ ID NO: 1408783 - RNA, 19 nt, Homo sapiens
  misc_RNA (1)...(19): siRNA sense strand
uaacauuugcagauuucga

SEQ ID NO: 1408784 - RNA, 19 nt, Homo sapiens
  misc_RNA (1)...(19): siRNA sense strand
gcuaaugacuccagaaaca

SEQ ID NO: 1408785 - RNA, 19 nt, Homo sapiens
  misc_RNA (1)...(19): siRNA sense strand
ggaccacgguguucucaga

SEQ ID NO: 1408786 - RNA, 19 nt, Homo sapiens
  misc_RNA (1)...(19): siRNA sense strand
cagaagauguggucagguu

SEQ ID NO: 1408787 - RNA, 19 nt, Homo sapiens
  misc_RNA (1)...(19): siRNA sense strand
ccagaaacaugauauacau

SEQ ID NO: 1408788 - RNA, 19 nt, Homo sapiens
  misc_RNA (1)...(19): siRNA sense strand
gcaccuuccugcuccauga

SEQ ID NO: 1408789 - RNA, 19 nt, Homo sapiens
  misc_RNA (1)...(19): siRNA sense strand
gcgcagagauucccaucga

SEQ ID NO: 1408790 - RNA, 19 nt, Homo sapiens
  misc_RNA (1)...(19): siRNA sense strand
gcaggcaugugacagaaga

SEQ ID NO: 1408791 - RNA, 19 nt, Homo sapiens
  misc_RNA (1)...(19): siRNA sense strand
ggacuuccauggcugucuu

SEQ ID NO: 1408792 - RNA, 19 nt, Homo sapiens
  misc_RNA (1)...(19): siRNA sense strand
gaagauguggucagguuug

SEQ ID NO: 1408793 - RNA, 19 nt, Homo sapiens
  misc_RNA (1)...(19): siRNA sense strand
cagaggagaagcugacuuu

SEQ ID NO: 1408794 - RNA, 19 nt, Homo sapiens
  misc_RNA (1)...(19): siRNA sense strand
ggacccagaugaacucaac

SEQ ID NO: 1408795 - RNA, 19 nt, Homo sapiens
  misc_RNA (1)...(19): siRNA sense strand
ggacuaaccgcgcagagau

SEQ ID NO: 1408796 - RNA, 19 nt, Homo sapiens
  misc_RNA (1)...(19): siRNA sense strand
ggcaacagcaugcagguaa

SEQ ID NO: 1408797 - RNA, 19 nt, Homo sapiens
  misc_RNA (1)...(19): siRNA sense strand
gaacuggaacgcugagaag

SEQ ID NO: 1408798 - RNA, 19 nt, Homo sapiens
  misc_RNA (1)...(19): siRNA sense strand
gcagugggcuuugccuucu

SEQ ID NO: 1408799 - RNA, 19 nt, Homo sapiens
  misc_RNA (1)...(19): siRNA sense strand
ugugucugcuuccgaauaa

SEQ ID NO: 1408800 - RNA, 19 nt, Homo sapiens
  misc_RNA (1)...(19): siRNA sense strand
ugucaaugcuguaacaaag

SEQ ID NO: 1408801 - RNA, 19 nt, Homo sapiens
  misc_RNA (1)...(19): siRNA sense strand
ccagauacacuccaguuca

SEQ ID NO: 1408802 - RNA, 19 nt, Homo sapiens
  misc_RNA (1)...(19): siRNA sense strand
ggaaggcucggcugacauc

SEQ ID NO: 1408803 - RNA, 19 nt, Homo sapiens
  misc_RNA (1)...(19): siRNA sense strand
ucaaugcuguaacaaaggu

SEQ ID NO: 1408804 - RNA, 19 nt, Homo sapiens
  misc_RNA (1)...(19): siRNA sense strand
gcaacagcaugcagguaac

SEQ ID NO: 1408805 - RNA, 19 nt, Homo sapiens
  misc_RNA (1)...(19): siRNA sense strand
gcuguuauccugguucuca

SEQ ID NO: 1408806 - RNA, 19 nt, Homo sapiens
  misc_RNA (1)...(19): siRNA sense strand
guggaaggcucggcugaca

SEQ ID NO: 1408807 - RNA, 19 nt, Homo sapiens
  misc_RNA (1)...(19): siRNA sense strand
ccaggucugcuucccguaa

SEQ ID NO: 1408808 - RNA, 19 nt, Homo sapiens
  misc_RNA (1)...(19): siRNA sense strand
cguaaccgcaggcauguga

SEQ ID NO: 1408809 - RNA, 19 nt, Homo sapiens
  misc_RNA (1)...(19): siRNA sense strand
ggccagauacacuccaguu

SEQ ID NO: 1408810 - RNA, 19 nt, Homo sapiens
  misc_RNA (1)...(19): siRNA sense strand
ugacagaagaagcagaugu

SEQ ID NO: 1408811 - RNA, 19 nt, Homo sapiens
  misc_RNA (1)...(19): siRNA sense strand
ggucagguuugagguugga

SEQ ID NO: 1408812 - RNA, 19 nt, Homo sapiens
  misc_RNA (1)...(19): siRNA sense strand
gcaugugacagaagaagca

SEQ ID NO: 1408813 - RNA, 19 nt, Homo sapiens
  misc_RNA (1)...(19): siRNA sense strand
uaaugacuccagaaacaug

SEQ ID NO: 1408814 - RNA, 19 nt, Homo sapiens
  misc_RNA (1)...(19): siRNA sense strand
ccgcaggcaugugacagaa

SEQ ID NO: 1408815 - RNA, 19 nt, Homo sapiens
  misc_RNA (1)...(19): siRNA sense strand
cagauacacuccaguucac

SEQ ID NO: 1408816 - RNA, 19 nt, Homo sapiens
  misc_RNA (1)...(19): siRNA sense strand
gacucugacugcuguuauc

SEQ ID NO: 1408817 - RNA, 19 nt, Homo sapiens
  misc_RNA (1)...(19): siRNA sense strand
aagauguggucagguuuga

SEQ ID NO: 1408818 - RNA, 19 nt, Homo sapiens
  misc_RNA (1)...(19): siRNA sense strand
aggcucggcugacaucugu

SEQ ID NO: 1408819 - RNA, 19 nt, Homo sapiens
  misc_RNA (1)...(19): siRNA sense strand
gcaggacccagaugaacuc

SEQ ID NO: 1408820 - RNA, 19 nt, Homo sapiens
  misc_RNA (1)...(19): siRNA sense strand
ugggaaaccuguccaucgu

SEQ ID NO: 1408821 - RNA, 19 nt, Homo sapiens
  misc_RNA (1)...(19): siRNA sense strand
gacuaaccgcgcagagauu

SEQ ID NO: 1408822 - RNA, 19 nt, Homo sapiens
  misc_RNA (1)...(19): siRNA sense strand
cagaaugccuccccuuauc

SEQ ID NO: 1408823 - RNA, 19 nt, Homo sapiens
  misc_RNA (1)...(19): siRNA sense strand
gagcaggacccagaugaac

SEQ ID NO: 1408824 - RNA, 19 nt, Homo sapiens
  misc_RNA (1)...(19): siRNA sense strand
ugacuccagaaacaugaua

SEQ ID NO: 1408825 - RNA, 19 nt, Homo sapiens
  misc_RNA (1)...(19): siRNA sense strand
ugauggaggagaacuggaa

SEQ ID NO: 1408826 - RNA, 19 nt, Homo sapiens
  misc_RNA (1)...(19): siRNA sense strand
guagagcagugggcuuugc

SEQ ID NO: 1408827 - RNA, 19 nt, Homo sapiens
  misc_RNA (1)...(19): siRNA sense strand
guucacaguggaugucuuc

SEQ ID NO: 1408828 - RNA, 19 nt, Homo sapiens
  misc_RNA (1)...(19): siRNA sense strand
ucagcaagccuuccaacag

SEQ ID NO: 1408829 - RNA, 19 nt, Homo sapiens
  misc_RNA (1)...(19): siRNA sense strand
gggugaccaugaaguagag

SEQ ID NO: 1408830 - RNA, 19 nt, Homo sapiens
  misc_RNA (1)...(19): siRNA sense strand
ugucgacggucucacugau

SEQ ID NO: 1408831 - RNA, 19 nt, Homo sapiens
  misc_RNA (1)...(19): siRNA sense strand
gaugucuuccacuuugcua

SEQ ID NO: 1408832 - RNA, 19 nt, Homo sapiens
  misc_RNA (1)...(19): siRNA sense strand
gugagccucuggucuccau

SEQ ID NO: 1408833 - RNA, 19 nt, Homo sapiens
  misc_RNA (1)...(19): siRNA sense strand
ugccucuucugcauucaaa

SEQ ID NO: 1408834 - RNA, 19 nt, Homo sapiens
  misc_RNA (1)...(19): siRNA sense strand
uaacauaguucuccuguca

SEQ ID NO: 1408835 - RNA, 19 nt, Homo sapiens
  misc_RNA (1)...(19): siRNA sense strand
gcucacacaccauauauua

SEQ ID NO: 1408836 - RNA, 19 nt, Homo sapiens
  misc_RNA (1)...(19): siRNA sense strand
acgcaaagcuucuucauga

SEQ ID NO: 1408837 - RNA, 19 nt, Homo sapiens
  misc_RNA (1)...(19): siRNA sense strand
gaaaggcccuauugcuaug

SEQ ID NO: 1408838 - RNA, 19 nt, Homo sapiens
  misc_RNA (1)...(19): siRNA sense strand
uguaauagcuggcaucguu

SEQ ID NO: 1408839 - RNA, 19 nt, Homo sapiens
  misc_RNA (1)...(19): siRNA sense strand
ggaggcauuauguauauua

SEQ ID NO: 1408840 - RNA, 19 nt, Homo sapiens
  misc_RNA (1)...(19): siRNA sense strand
ccaagaagaggaagaagaa

SEQ ID NO: 1408841 - RNA, 19 nt, Homo sapiens
  misc_RNA (1)...(19): siRNA sense strand
cauacaaucucuguucuug

SEQ ID NO: 1408842 - RNA, 19 nt, Homo sapiens
  misc_RNA (1)...(19): siRNA sense strand
ugaaacaucuucccaacca

SEQ ID NO: 1408843 - RNA, 19 nt, Homo sapiens
  misc_RNA (1)...(19): siRNA sense strand
gagaaugaauggaaaagaa

SEQ ID NO: 1408844 - RNA, 19 nt, Homo sapiens
  misc_RNA (1)...(19): siRNA sense strand
gagacgaacuuuccagaac

SEQ ID NO: 1408845 - RNA, 19 nt, Homo sapiens
  misc_RNA (1)...(19): siRNA sense strand
ggaauccucaccaauagaa

SEQ ID NO: 1408846 - RNA, 19 nt, Homo sapiens
  misc_RNA (1)...(19): siRNA sense strand
gagggaaucuaagacuuug

SEQ ID NO: 1408847 - RNA, 19 nt, Homo sapiens
  misc_RNA (1)...(19): siRNA sense strand
ugaaugggcucuuccacau

SEQ ID NO: 1408848 - RNA, 19 nt, Homo sapiens
  misc_RNA (1)...(19): siRNA sense strand
ugaaaggcccuauugcuau

SEQ ID NO: 1408849 - RNA, 19 nt, Homo sapiens
  misc_RNA (1)...(19): siRNA sense strand
gaagaagaagaaacagaga

SEQ ID NO: 1408850 - RNA, 19 nt, Homo sapiens
  misc_RNA (1)...(19): siRNA sense strand
acccaaaucuaacauaguu

SEQ ID NO: 1408851 - RNA, 19 nt, Homo sapiens
  misc_RNA (1)...(19): siRNA sense strand
gcuccagacccaaaucuaa

SEQ ID NO: 1408852 - RNA, 19 nt, Homo sapiens
  misc_RNA (1)...(19): siRNA sense strand
caucuacccaauacuguua

SEQ ID NO: 1408853 - RNA, 19 nt, Homo sapiens
  misc_RNA (1)...(19): siRNA sense strand
cagcuaaucccucugagaa

SEQ ID NO: 1408854 - RNA, 19 nt, Homo sapiens
  misc_RNA (1)...(19): siRNA sense strand
gaagaagugguugggcuaa

SEQ ID NO: 1408855 - RNA, 19 nt, Homo sapiens
  misc_RNA (1)...(19): siRNA sense strand
ucaaucauggacauacuua

SEQ ID NO: 1408856 - RNA, 19 nt, Homo sapiens
  misc_RNA (1)...(19): siRNA sense strand
gaaacaucuucccaaccaa

SEQ ID NO: 1408857 - RNA, 19 nt, Homo sapiens
  misc_RNA (1)...(19): siRNA sense strand
gagcucacacaccauauau

SEQ ID NO: 1408858 - RNA, 19 nt, Homo sapiens
  misc_RNA (1)...(19): siRNA sense strand
acccagaaauucaguaaau

SEQ ID NO: 1408859 - RNA, 19 nt, Homo sapiens
  misc_RNA (1)...(19): siRNA sense strand
gcugaucuuugccuucuuc

SEQ ID NO: 1408860 - RNA, 19 nt, Homo sapiens
  misc_RNA (1)...(19): siRNA sense strand
ugagggaaucuaagacuuu

SEQ ID NO: 1408861 - RNA, 19 nt, Homo sapiens
  misc_RNA (1)...(19): siRNA sense strand
gacaacacccagaaauuca

SEQ ID NO: 1408862 - RNA, 19 nt, Homo sapiens
  misc_RNA (1)...(19): siRNA sense strand
gaagaggaagaagaagaaa

SEQ ID NO: 1408863 - RNA, 19 nt, Homo sapiens
  misc_RNA (1)...(19): siRNA sense strand
gauuaugaaugggcucuuc

SEQ ID NO: 1408864 - RNA, 19 nt, Homo sapiens
  misc_RNA (1)...(19): siRNA sense strand
uagcuggcaucguugagaa

SEQ ID NO: 1408865 - RNA, 19 nt, Homo sapiens
  misc_RNA (1)...(19): siRNA sense strand
gagccucuuugcugccauu

SEQ ID NO: 1408866 - RNA, 19 nt, Homo sapiens
  misc_RNA (1)...(19): siRNA sense strand
cagcauacaaucucuguuc

SEQ ID NO: 1408867 - RNA, 19 nt, Homo sapiens
  misc_RNA (1)...(19): siRNA sense strand
gaucuaugcacccaucugu

SEQ ID NO: 1408868 - RNA, 19 nt, Homo sapiens
  misc_RNA (1)...(19): siRNA sense strand
aaacaucuucccaaccaaa

SEQ ID NO: 1408869 - RNA, 19 nt, Homo sapiens
  misc_RNA (1)...(19): siRNA sense strand
gcuaaucccucugagaaaa

SEQ ID NO: 1408870 - RNA, 19 nt, Homo sapiens
  misc_RNA (1)...(19): siRNA sense strand
guauauuauuuccggauca

SEQ ID NO: 1408871 - RNA, 19 nt, Homo sapiens
  misc_RNA (1)...(19): siRNA sense strand
agaagaggaagaagaagaa

SEQ ID NO: 1408872 - RNA, 19 nt, Homo sapiens
  misc_RNA (1)...(19): siRNA sense strand
agacccaaaucuaacauag

SEQ ID NO: 1408873 - RNA, 19 nt, Homo sapiens
  misc_RNA (1)...(19): siRNA sense strand
gaaaaugacagcucuccuu

SEQ ID NO: 1408874 - RNA, 19 nt, Homo sapiens
  misc_RNA (1)...(19): siRNA sense strand
aaacagagacgaacuuucc

SEQ ID NO: 1408875 - RNA, 19 nt, Homo sapiens
  misc_RNA (1)...(19): siRNA sense strand
gaagaaacagagacgaacu

SEQ ID NO: 1408876 - RNA, 19 nt, Homo sapiens
  misc_RNA (1)...(19): siRNA sense strand
ggggaggcauuauguauau

SEQ ID NO: 1408877 - RNA, 19 nt, Homo sapiens
  misc_RNA (1)...(19): siRNA sense strand
uuagagcucacacaccaua

SEQ ID NO: 1408878 - RNA, 19 nt, Homo sapiens
  misc_RNA (1)...(19): siRNA sense strand
gaauucauugagccucuuu

SEQ ID NO: 1408879 - RNA, 19 nt, Homo sapiens
  misc_RNA (1)...(19): siRNA sense strand
ccucuuugcugccauuucu

SEQ ID NO: 1408880 - RNA, 19 nt, Homo sapiens
  misc_RNA (1)...(19): siRNA sense strand
gcuaugcaaucugguccaa

SEQ ID NO: 1408881 - RNA, 19 nt, Homo sapiens
  misc_RNA (1)...(19): siRNA sense strand
ccaggaacuuguaauagcu

SEQ ID NO: 1408882 - RNA, 19 nt, Homo sapiens
  misc_RNA (1)...(19): siRNA sense strand
ucucuguucuugggcauuu

SEQ ID NO: 1408883 - RNA, 19 nt, Homo sapiens
  misc_RNA (1)...(19): siRNA sense strand
aaccaaagaaugaagaaga

SEQ ID NO: 1408884 - RNA, 19 nt, Homo sapiens
  misc_RNA (1)...(19): siRNA sense strand
ucaggaggaugucuucacu

SEQ ID NO: 1408885 - RNA, 19 nt, Homo sapiens
  misc_RNA (1)...(19): siRNA sense strand
gugguugggcuaacugaaa

SEQ ID NO: 1408886 - RNA, 19 nt, Homo sapiens
  misc_RNA (1)...(19): siRNA sense strand
cggcagagccaaugaaagg

SEQ ID NO: 1408887 - RNA, 19 nt, Homo sapiens
  misc_RNA (1)...(19): siRNA sense strand
ccagaaauucaguaaaugg

SEQ ID NO: 1408888 - RNA, 19 nt, Homo sapiens
  misc_RNA (1)...(19): siRNA sense strand
gcauacaaucucuguucuu

SEQ ID NO: 1408889 - RNA, 19 nt, Homo sapiens
  misc_RNA (1)...(19): siRNA sense strand
ucacacaccauauauuaac

SEQ ID NO: 1408890 - RNA, 19 nt, Homo sapiens
  misc_RNA (1)...(19): siRNA sense strand
gggaggcauuauguauauu

SEQ ID NO: 1408891 - RNA, 19 nt, Homo sapiens
  misc_RNA (1)...(19): siRNA sense strand
augaaaggcccuauugcua

SEQ ID NO: 1408892 - RNA, 19 nt, Homo sapiens
  misc_RNA (1)...(19): siRNA sense strand
agaggaagaagaagaaaca

SEQ ID NO: 1408893 - RNA, 19 nt, Homo sapiens
  misc_RNA (1)...(19): siRNA sense strand
aagaagaggaagaagaaga

SEQ ID NO: 1408894 - RNA, 19 nt, Homo sapiens
  misc_RNA (1)...(19): siRNA sense strand
aagaagaaacagagacgaa

SEQ ID NO: 1408895 - RNA, 19 nt, Homo sapiens
  misc_RNA (1)...(19): siRNA sense strand
uggcaucguugagaaugaa

SEQ ID NO: 1408896 - RNA, 19 nt, Homo sapiens
  misc_RNA (1)...(19): siRNA sense strand
aaaaugacagcucuccuua

SEQ ID NO: 1408897 - RNA, 19 nt, Homo sapiens
  misc_RNA (1)...(19): siRNA sense strand
agaaacagagacgaacuuu

SEQ ID NO: 1408898 - RNA, 19 nt, Homo sapiens
  misc_RNA (1)...(19): siRNA sense strand
caaagaaugaagaagacau

SEQ ID NO: 1408899 - RNA, 19 nt, Homo sapiens
  misc_RNA (1)...(19): siRNA sense strand
agagcucacacaccauaua

SEQ ID NO: 1408900 - RNA, 19 nt, Homo sapiens
  misc_RNA (1)...(19): siRNA sense strand
aaaugacagcucuccuuaa

SEQ ID NO: 1408901 - RNA, 19 nt, Homo sapiens
  misc_RNA (1)...(19): siRNA sense strand
cccagaaauucaguaaaug

SEQ ID NO: 1408902 - RNA, 19 nt, Homo sapiens
  misc_RNA (1)...(19): siRNA sense strand
cguugagaaugaauggaaa

SEQ ID NO: 1408903 - RNA, 19 nt, Homo sapiens
  misc_RNA (1)...(19): siRNA sense strand
ccaaaucuaacauaguucu

SEQ ID NO: 1408904 - RNA, 19 nt, Homo sapiens
  misc_RNA (1)...(19): siRNA sense strand
caacugugaaccagcuaau

SEQ ID NO: 1408905 - RNA, 19 nt, Homo sapiens
  misc_RNA (1)...(19): siRNA sense strand
ugggcuaacugaaacaucu

SEQ ID NO: 1408906 - RNA, 19 nt, Homo sapiens
  misc_RNA (1)...(19): siRNA sense strand
gaagugguugggcuaacug

SEQ ID NO: 1408907 - RNA, 19 nt, Homo sapiens
  misc_RNA (1)...(19): siRNA sense strand
uaugcaaucugguccaaaa

SEQ ID NO: 1408908 - RNA, 19 nt, Homo sapiens
  misc_RNA (1)...(19): siRNA sense strand
acacccagaaauucaguaa

SEQ ID NO: 1408909 - RNA, 19 nt, Homo sapiens
  misc_RNA (1)...(19): siRNA sense strand
gggcuguccagauuaugaa

SEQ ID NO: 1408910 - RNA, 19 nt, Homo sapiens
  misc_RNA (1)...(19): siRNA sense strand
uaauagcuggcaucguuga

SEQ ID NO: 1408911 - RNA, 19 nt, Homo sapiens
  misc_RNA (1)...(19): siRNA sense strand
uggagagucugaauuuuau

SEQ ID NO: 1408912 - RNA, 19 nt, Homo sapiens
  misc_RNA (1)...(19): siRNA sense strand
gaauccucaccaauagaaa

SEQ ID NO: 1408913 - RNA, 19 nt, Homo sapiens
  misc_RNA (1)...(19): siRNA sense strand
cacacaccauauauuaaca

SEQ ID NO: 1408914 - RNA, 19 nt, Homo sapiens
  misc_RNA (1)...(19): siRNA sense strand
gccaaugaaaggcccuauu

SEQ ID NO: 1408915 - RNA, 19 nt, Homo sapiens
  misc_RNA (1)...(19): siRNA sense strand
ccaaccaaagaaugaagaa

SEQ ID NO: 1408916 - RNA, 19 nt, Homo sapiens
  misc_RNA (1)...(19): siRNA sense strand
caaucauggacauacuuaa

SEQ ID NO: 1408917 - RNA, 19 nt, Homo sapiens
  misc_RNA (1)...(19): siRNA sense strand
cagacccaaaucuaacaua

SEQ ID NO: 1408918 - RNA, 19 nt, Homo sapiens
  misc_RNA (1)...(19): siRNA sense strand
uccaggaacuuguaauagc

SEQ ID NO: 1408919 - RNA, 19 nt, Homo sapiens
  misc_RNA (1)...(19): siRNA sense strand
ucuaugcacccaucugugu

SEQ ID NO: 1408920 - RNA, 19 nt, Homo sapiens
  misc_RNA (1)...(19): siRNA sense strand
uuauuccaauccaagaaga

SEQ ID NO: 1408921 - RNA, 19 nt, Homo sapiens
  misc_RNA (1)...(19): siRNA sense strand
uaacauaguucuccuguca

SEQ ID NO: 1408922 - RNA, 19 nt, Homo sapiens
  misc_RNA (1)...(19): siRNA sense strand
gcucacacaccauauauua

SEQ ID NO: 1408923 - RNA, 19 nt, Homo sapiens
  misc_RNA (1)...(19): siRNA sense strand
acgcaaagcuucuucauga

SEQ ID NO: 1408924 - RNA, 19 nt, Homo sapiens
  misc_RNA (1)...(19): siRNA sense strand
gaaaggcccuauugcuaug

SEQ ID NO: 1408925 - RNA, 19 nt, Homo sapiens
  misc_RNA (1)...(19): siRNA sense strand
uguaauagcuggcaucguu

SEQ ID NO: 1408926 - RNA, 19 nt, Homo sapiens
  misc_RNA (1)...(19): siRNA sense strand
ggaggcauuauguauauua

SEQ ID NO: 1408927 - RNA, 19 nt, Homo sapiens
  misc_RNA (1)...(19): siRNA sense strand
ccaagaagaggaagaagaa

SEQ ID NO: 1408928 - RNA, 19 nt, Homo sapiens
  misc_RNA (1)...(19): siRNA sense strand
cauacaaucucuguucuug

SEQ ID NO: 1408929 - RNA, 19 nt, Homo sapiens
  misc_RNA (1)...(19): siRNA sense strand
ugaaacaucuucccaacca

SEQ ID NO: 1408930 - RNA, 19 nt, Homo sapiens
  misc_RNA (1)...(19): siRNA sense strand
gagaaugaauggaaaagaa

SEQ ID NO: 1408931 - RNA, 19 nt, Homo sapiens
  misc_RNA (1)...(19): siRNA sense strand
gagacgaacuuuccagaac

SEQ ID NO: 1408932 - RNA, 19 nt, Homo sapiens
  misc_RNA (1)...(19): siRNA sense strand
ggaauccucaccaauagaa

SEQ ID NO: 1408933 - RNA, 19 nt, Homo sapiens
  misc_RNA (1)...(19): siRNA sense strand
gagggaaucuaagacuuug

SEQ ID NO: 1408934 - RNA, 19 nt, Homo sapiens
  misc_RNA (1)...(19): siRNA sense strand
ugaaugggcucuuccacau

SEQ ID NO: 1408935 - RNA, 19 nt, Homo sapiens
  misc_RNA (1)...(19): siRNA sense strand
ugaaaggcccuauugcuau

SEQ ID NO: 1408936 - RNA, 19 nt, Homo sapiens
  misc_RNA (1)...(19): siRNA sense strand
gaagaagaagaaacagaga

SEQ ID NO: 1408937 - RNA, 19 nt, Homo sapiens
  misc_RNA (1)...(19): siRNA sense strand
acccaaaucuaacauaguu

SEQ ID NO: 1408938 - RNA, 19 nt, Homo sapiens
  misc_RNA (1)...(19): siRNA sense strand
gcuccagacccaaaucuaa

SEQ ID NO: 1408939 - RNA, 19 nt, Homo sapiens
  misc_RNA (1)...(19): siRNA sense strand
caucuacccaauacuguua

SEQ ID NO: 1408940 - RNA, 19 nt, Homo sapiens
  misc_RNA (1)...(19): siRNA sense strand
cagcuaaucccucugagaa

SEQ ID NO: 1408941 - RNA, 19 nt, Homo sapiens
  misc_RNA (1)...(19): siRNA sense strand
gaagaagugguugggcuaa

SEQ ID NO: 1408942 - RNA, 19 nt, Homo sapiens
  misc_RNA (1)...(19): siRNA sense strand
ucaaucauggacauacuua

SEQ ID NO: 1408943 - RNA, 19 nt, Homo sapiens
  misc_RNA (1)...(19): siRNA sense strand
gaaacaucuucccaaccaa

SEQ ID NO: 1408944 - RNA, 19 nt, Homo sapiens
  misc_RNA (1)...(19): siRNA sense strand
gagcucacacaccauauau

SEQ ID NO: 1408945 - RNA, 19 nt, Homo sapiens
  misc_RNA (1)...(19): siRNA sense strand
acccagaaauucaguaaau

SEQ ID NO: 1408946 - RNA, 19 nt, Homo sapiens
  misc_RNA (1)...(19): siRNA sense strand
gcugaucuuugccuucuuc

SEQ ID NO: 1408947 - RNA, 19 nt, Homo sapiens
  misc_RNA (1)...(19): siRNA sense strand
ugagggaaucuaagacuuu

SEQ ID NO: 1408948 - RNA, 19 nt, Homo sapiens
  misc_RNA (1)...(19): siRNA sense strand
gacaacacccagaaauuca

SEQ ID NO: 1408949 - RNA, 19 nt, Homo sapiens
  misc_RNA (1)...(19): siRNA sense strand
gaagaggaagaagaagaaa

SEQ ID NO: 1408950 - RNA, 19 nt, Homo sapiens
  misc_RNA (1)...(19): siRNA sense strand
gauuaugaaugggcucuuc

SEQ ID NO: 1408951 - RNA, 19 nt, Homo sapiens
  misc_RNA (1)...(19): siRNA sense strand
uagcuggcaucguugagaa

SEQ ID NO: 1408952 - RNA, 19 nt, Homo sapiens
  misc_RNA (1)...(19): siRNA sense strand
gagccucuuugcugccauu

SEQ ID NO: 1408953 - RNA, 19 nt, Homo sapiens
  misc_RNA (1)...(19): siRNA sense strand
cagcauacaaucucuguuc

SEQ ID NO: 1408954 - RNA, 19 nt, Homo sapiens
  misc_RNA (1)...(19): siRNA sense strand
gaucuaugcacccaucugu

SEQ ID NO: 1408955 - RNA, 19 nt, Homo sapiens
  misc_RNA (1)...(19): siRNA sense strand
aaacaucuucccaaccaaa

SEQ ID NO: 1408956 - RNA, 19 nt, Homo sapiens
  misc_RNA (1)...(19): siRNA sense strand
gcuaaucccucugagaaaa

SEQ ID NO: 1408957 - RNA, 19 nt, Homo sapiens
  misc_RNA (1)...(19): siRNA sense strand
guauauuauuuccggauca

SEQ ID NO: 1408958 - RNA, 19 nt, Homo sapiens
  misc_RNA (1)...(19): siRNA sense strand
agaagaggaagaagaagaa

SEQ ID NO: 1408959 - RNA, 19 nt, Homo sapiens
  misc_RNA (1)...(19): siRNA sense strand
agacccaaaucuaacauag

SEQ ID NO: 1408960 - RNA, 19 nt, Homo sapiens
  misc_RNA (1)...(19): siRNA sense strand
gaaaaugacagcucuccuu

SEQ ID NO: 1408961 - RNA, 19 nt, Homo sapiens
  misc_RNA (1)...(19): siRNA sense strand
aaacagagacgaacuuucc

SEQ ID NO: 1408962 - RNA, 19 nt, Homo sapiens
  misc_RNA (1)...(19): siRNA sense strand
gaagaaacagagacgaacu

SEQ ID NO: 1408963 - RNA, 19 nt, Homo sapiens
  misc_RNA (1)...(19): siRNA sense strand
ggggaggcauuauguauau

SEQ ID NO: 1408964 - RNA, 19 nt, Homo sapiens
  misc_RNA (1)...(19): siRNA sense strand
uuagagcucacacaccaua

SEQ ID NO: 1408965 - RNA, 19 nt, Homo sapiens
  misc_RNA (1)...(19): siRNA sense strand
gaauucauugagccucuuu

SEQ ID NO: 1408966 - RNA, 19 nt, Homo sapiens
  misc_RNA (1)...(19): siRNA sense strand
ccucuuugcugccauuucu

SEQ ID NO: 1408967 - RNA, 19 nt, Homo sapiens
  misc_RNA (1)...(19): siRNA sense strand
gcuaugcaaucugguccaa

SEQ ID NO: 1408968 - RNA, 19 nt, Homo sapiens
  misc_RNA (1)...(19): siRNA sense strand
ccaggaacuuguaauagcu

SEQ ID NO: 1408969 - RNA, 19 nt, Homo sapiens
  misc_RNA (1)...(19): siRNA sense strand
ucucuguucuugggcauuu

SEQ ID NO: 1408970 - RNA, 19 nt, Homo sapiens
  misc_RNA (1)...(19): siRNA sense strand
aaccaaagaaugaagaaga

SEQ ID NO: 1408971 - RNA, 19 nt, Homo sapiens
  misc_RNA (1)...(19): siRNA sense strand
ucaggaggaugucuucacu

SEQ ID NO: 1408972 - RNA, 19 nt, Homo sapiens
  misc_RNA (1)...(19): siRNA sense strand
gugguugggcuaacugaaa

SEQ ID NO: 1408973 - RNA, 19 nt, Homo sapiens
  misc_RNA (1)...(19): siRNA sense strand
cggcagagccaaugaaagg

SEQ ID NO: 1408974 - RNA, 19 nt, Homo sapiens
  misc_RNA (1)...(19): siRNA sense strand
ccagaaauucaguaaaugg

SEQ ID NO: 1408975 - RNA, 19 nt, Homo sapiens
  misc_RNA (1)...(19): siRNA sense strand
gcauacaaucucuguucuu

SEQ ID NO: 1408976 - RNA, 19 nt, Homo sapiens
  misc_RNA (1)...(19): siRNA sense strand
ucacacaccauauauuaac

SEQ ID NO: 1408977 - RNA, 19 nt, Homo sapiens
  misc_RNA (1)...(19): siRNA sense strand
gggaggcauuauguauauu

SEQ ID NO: 1408978 - RNA, 19 nt, Homo sapiens
  misc_RNA (1)...(19): siRNA sense strand
augaaaggcccuauugcua

SEQ ID NO: 1408979 - RNA, 19 nt, Homo sapiens
  misc_RNA (1)...(19): siRNA sense strand
agaggaagaagaagaaaca

SEQ ID NO: 1408980 - RNA, 19 nt, Homo sapiens
  misc_RNA (1)...(19): siRNA sense strand
aagaagaggaagaagaaga

SEQ ID NO: 1408981 - RNA, 19 nt, Homo sapiens
  misc_RNA (1)...(19): siRNA sense strand
aagaagaaacagagacgaa

SEQ ID NO: 1408982 - RNA, 19 nt, Homo sapiens
  misc_RNA (1)...(19): siRNA sense strand
uggcaucguugagaaugaa

SEQ ID NO: 1408983 - RNA, 19 nt, Homo sapiens
  misc_RNA (1)...(19): siRNA sense strand
aaaaugacagcucuccuua

SEQ ID NO: 1408984 - RNA, 19 nt, Homo sapiens
  misc_RNA (1)...(19): siRNA sense strand
agaaacagagacgaacuuu

SEQ ID NO: 1408985 - RNA, 19 nt, Homo sapiens
  misc_RNA (1)...(19): siRNA sense strand
caaagaaugaagaagacau

SEQ ID NO: 1408986 - RNA, 19 nt, Homo sapiens
  misc_RNA (1)...(19): siRNA sense strand
agagcucacacaccauaua

SEQ ID NO: 1408987 - RNA, 19 nt, Homo sapiens
  misc_RNA (1)...(19): siRNA sense strand
aaaugacagcucuccuuaa

SEQ ID NO: 1408988 - RNA, 19 nt, Homo sapiens
  misc_RNA (1)...(19): siRNA sense strand
cccagaaauucaguaaaug

SEQ ID NO: 1408989 - RNA, 19 nt, Homo sapiens
  misc_RNA (1)...(19): siRNA sense strand
cguugagaaugaauggaaa

SEQ ID NO: 1408990 - RNA, 19 nt, Homo sapiens
  misc_RNA (1)...(19): siRNA sense strand
ccaaaucuaacauaguucu

SEQ ID NO: 1408991 - RNA, 19 nt, Homo sapiens
  misc_RNA (1)...(19): siRNA sense strand
caacugugaaccagcuaau

SEQ ID NO: 1408992 - RNA, 19 nt, Homo sapiens
  misc_RNA (1)...(19): siRNA sense strand
ugggcuaacugaaacaucu

SEQ ID NO: 1408993 - RNA, 19 nt, Homo sapiens
  misc_RNA (1)...(19): siRNA sense strand
gaagugguugggcuaacug

SEQ ID NO: 1408994 - RNA, 19 nt, Homo sapiens
  misc_RNA (1)...(19): siRNA sense strand
uaugcaaucugguccaaaa

SEQ ID NO: 1408995 - RNA, 19 nt, Homo sapiens
  misc_RNA (1)...(19): siRNA sense strand
acacccagaaauucaguaa

SEQ ID NO: 1408996 - RNA, 19 nt, Homo sapiens
  misc_RNA (1)...(19): siRNA sense strand
gggcuguccagauuaugaa

SEQ ID NO: 1408997 - RNA, 19 nt, Homo sapiens
  misc_RNA (1)...(19): siRNA sense strand
uaauagcuggcaucguuga

SEQ ID NO: 1408998 - RNA, 19 nt, Homo sapiens
  misc_RNA (1)...(19): siRNA sense strand
uggagagucugaauuuuau

SEQ ID NO: 1408999 - RNA, 19 nt, Homo sapiens
  misc_RNA (1)...(19): siRNA sense strand
gaauccucaccaauagaaa

SEQ ID NO: 1409000 - RNA, 19 nt, Homo sapiens
  misc_RNA (1)...(19): siRNA sense strand
cacacaccauauauuaaca

SEQ ID NO: 1409001 - RNA, 19 nt, Homo sapiens
  misc_RNA (1)...(19): siRNA sense strand
gccaaugaaaggcccuauu

SEQ ID NO: 1409002 - RNA, 19 nt, Homo sapiens
  misc_RNA (1)...(19): siRNA sense strand
ccaaccaaagaaugaagaa

SEQ ID NO: 1409003 - RNA, 19 nt, Homo sapiens
  misc_RNA (1)...(19): siRNA sense strand
caaucauggacauacuuaa

SEQ ID NO: 1409004 - RNA, 19 nt, Homo sapiens
  misc_RNA (1)...(19): siRNA sense strand
cagacccaaaucuaacaua

SEQ ID NO: 1409005 - RNA, 19 nt, Homo sapiens
  misc_RNA (1)...(19): siRNA sense strand
uccaggaacuuguaauagc

SEQ ID NO: 1409006 - RNA, 19 nt, Homo sapiens
  misc_RNA (1)...(19): siRNA sense strand
ucuaugcacccaucugugu

SEQ ID NO: 1409007 - RNA, 19 nt, Homo sapiens
  misc_RNA (1)...(19): siRNA sense strand
uuauuccaauccaagaaga

SEQ ID NO: 1409008 - RNA, 19 nt, Homo sapiens
  misc_RNA (1)...(19): siRNA sense strand
uaacauaguucuccuguca

SEQ ID NO: 1409009 - RNA, 19 nt, Homo sapiens
  misc_RNA (1)...(19): siRNA sense strand
gcucacacaccauauauua

SEQ ID NO: 1409010 - RNA, 19 nt, Homo sapiens
  misc_RNA (1)...(19): siRNA sense strand
acgcaaagcuucuucauga

SEQ ID NO: 1409011 - RNA, 19 nt, Homo sapiens
  misc_RNA (1)...(19): siRNA sense strand
gaaaggcccuauugcuaug

SEQ ID NO: 1409012 - RNA, 19 nt, Homo sapiens
  misc_RNA (1)...(19): siRNA sense strand
uguaauagcuggcaucguu

SEQ ID NO: 1409013 - RNA, 19 nt, Homo sapiens
  misc_RNA (1)...(19): siRNA sense strand
ggaggcauuauguauauua

SEQ ID NO: 1409014 - RNA, 19 nt, Homo sapiens
  misc_RNA (1)...(19): siRNA sense strand
ccaagaagaggaagaagaa

SEQ ID NO: 1409015 - RNA, 19 nt, Homo sapiens
  misc_RNA (1)...(19): siRNA sense strand
cauacaaucucuguucuug

SEQ ID NO: 1409016 - RNA, 19 nt, Homo sapiens
  misc_RNA (1)...(19): siRNA sense strand
ugaaacaucuucccaacca

SEQ ID NO: 1409017 - RNA, 19 nt, Homo sapiens
  misc_RNA (1)...(19): siRNA sense strand
gagaaugaauggaaaagaa

SEQ ID NO: 1409018 - RNA, 19 nt, Homo sapiens
  misc_RNA (1)...(19): siRNA sense strand
gagacgaacuuuccagaac

SEQ ID NO: 1409019 - RNA, 19 nt, Homo sapiens
  misc_RNA (1)...(19): siRNA sense strand
ggaauccucaccaauagaa

SEQ ID NO: 1409020 - RNA, 19 nt, Homo sapiens
  misc_RNA (1)...(19): siRNA sense strand
gagggaaucuaagacuuug

SEQ ID NO: 1409021 - RNA, 19 nt, Homo sapiens
  misc_RNA (1)...(19): siRNA sense strand
ugaaugggcucuuccacau

SEQ ID NO: 1409022 - RNA, 19 nt, Homo sapiens
  misc_RNA (1)...(19): siRNA sense strand
ugaaaggcccuauugcuau

SEQ ID NO: 1409023 - RNA, 19 nt, Homo sapiens
  misc_RNA (1)...(19): siRNA sense strand
gaagaagaagaaacagaga

SEQ ID NO: 1409024 - RNA, 19 nt, Homo sapiens
  misc_RNA (1)...(19): siRNA sense strand
acccaaaucuaacauaguu

SEQ ID NO: 1409025 - RNA, 19 nt, Homo sapiens
  misc_RNA (1)...(19): siRNA sense strand
gcuccagacccaaaucuaa

SEQ ID NO: 1409026 - RNA, 19 nt, Homo sapiens
  misc_RNA (1)...(19): siRNA sense strand
caucuacccaauacuguua

SEQ ID NO: 1409027 - RNA, 19 nt, Homo sapiens
  misc_RNA (1)...(19): siRNA sense strand
cagcuaaucccucugagaa

SEQ ID NO: 1409028 - RNA, 19 nt, Homo sapiens
  misc_RNA (1)...(19): siRNA sense strand
gaagaagugguugggcuaa

SEQ ID NO: 1409029 - RNA, 19 nt, Homo sapiens
  misc_RNA (1)...(19): siRNA sense strand
ucaaucauggacauacuua

SEQ ID NO: 1409030 - RNA, 19 nt, Homo sapiens
  misc_RNA (1)...(19): siRNA sense strand
gaaacaucuucccaaccaa

SEQ ID NO: 1409031 - RNA, 19 nt, Homo sapiens
  misc_RNA (1)...(19): siRNA sense strand
gagcucacacaccauauau

SEQ ID NO: 1409032 - RNA, 19 nt, Homo sapiens
  misc_RNA (1)...(19): siRNA sense strand
acccagaaauucaguaaau

SEQ ID NO: 1409033 - RNA, 19 nt, Homo sapiens
  misc_RNA (1)...(19): siRNA sense strand
gcugaucuuugccuucuuc

SEQ ID NO: 1409034 - RNA, 19 nt, Homo sapiens
  misc_RNA (1)...(19): siRNA sense strand
ugagggaaucuaagacuuu

SEQ ID NO: 1409035 - RNA, 19 nt, Homo sapiens
  misc_RNA (1)...(19): siRNA sense strand
gacaacacccagaaauuca

SEQ ID NO: 1409036 - RNA, 19 nt, Homo sapiens
  misc_RNA (1)...(19): siRNA sense strand
gaagaggaagaagaagaaa

SEQ ID NO: 1409037 - RNA, 19 nt, Homo sapiens
  misc_RNA (1)...(19): siRNA sense strand
gauuaugaaugggcucuuc

SEQ ID NO: 1409038 - RNA, 19 nt, Homo sapiens
  misc_RNA (1)...(19): siRNA sense strand
uagcuggcaucguugagaa

SEQ ID NO: 1409039 - RNA, 19 nt, Homo sapiens
  misc_RNA (1)...(19): siRNA sense strand
gagccucuuugcugccauu

SEQ ID NO: 1409040 - RNA, 19 nt, Homo sapiens
  misc_RNA (1)...(19): siRNA sense strand
cagcauacaaucucuguuc

SEQ ID NO: 1409041 - RNA, 19 nt, Homo sapiens
  misc_RNA (1)...(19): siRNA sense strand
gaucuaugcacccaucugu

SEQ ID NO: 1409042 - RNA, 19 nt, Homo sapiens
  misc_RNA (1)...(19): siRNA sense strand
aaacaucuucccaaccaaa

SEQ ID NO: 1409043 - RNA, 19 nt, Homo sapiens
  misc_RNA (1)...(19): siRNA sense strand
gcuaaucccucugagaaaa

SEQ ID NO: 1409044 - RNA, 19 nt, Homo sapiens
  misc_RNA (1)...(19): siRNA sense strand
guauauuauuuccggauca

SEQ ID NO: 1409045 - RNA, 19 nt, Homo sapiens
  misc_RNA (1)...(19): siRNA sense strand
agaagaggaagaagaagaa

SEQ ID NO: 1409046 - RNA, 19 nt, Homo sapiens
  misc_RNA (1)...(19): siRNA sense strand
agacccaaaucuaacauag

SEQ ID NO: 1409047 - RNA, 19 nt, Homo sapiens
  misc_RNA (1)...(19): siRNA sense strand
gaaaaugacagcucuccuu

SEQ ID NO: 1409048 - RNA, 19 nt, Homo sapiens
  misc_RNA (1)...(19): siRNA sense strand
aaacagagacgaacuuucc

SEQ ID NO: 1409049 - RNA, 19 nt, Homo sapiens
  misc_RNA (1)...(19): siRNA sense strand
gaagaaacagagacgaacu

SEQ ID NO: 1409050 - RNA, 19 nt, Homo sapiens
  misc_RNA (1)...(19): siRNA sense strand
ggggaggcauuauguauau

SEQ ID NO: 1409051 - RNA, 19 nt, Homo sapiens
  misc_RNA (1)...(19): siRNA sense strand
uuagagcucacacaccaua

SEQ ID NO: 1409052 - RNA, 19 nt, Homo sapiens
  misc_RNA (1)...(19): siRNA sense strand
gaauucauugagccucuuu

SEQ ID NO: 1409053 - RNA, 19 nt, Homo sapiens
  misc_RNA (1)...(19): siRNA sense strand
ccucuuugcugccauuucu

SEQ ID NO: 1409054 - RNA, 19 nt, Homo sapiens
  misc_RNA (1)...(19): siRNA sense strand
gcuaugcaaucugguccaa

SEQ ID NO: 1409055 - RNA, 19 nt, Homo sapiens
  misc_RNA (1)...(19): siRNA sense strand
ccaggaacuuguaauagcu

SEQ ID NO: 1409056 - RNA, 19 nt, Homo sapiens
  misc_RNA (1)...(19): siRNA sense strand
ucucuguucuugggcauuu

SEQ ID NO: 1409057 - RNA, 19 nt, Homo sapiens
  misc_RNA (1)...(19): siRNA sense strand
aaccaaagaaugaagaaga

SEQ ID NO: 1409058 - RNA, 19 nt, Homo sapiens
  misc_RNA (1)...(19): siRNA sense strand
ucaggaggaugucuucacu

SEQ ID NO: 1409059 - RNA, 19 nt, Homo sapiens
  misc_RNA (1)...(19): siRNA sense strand
gugguugggcuaacugaaa

SEQ ID NO: 1409060 - RNA, 19 nt, Homo sapiens
  misc_RNA (1)...(19): siRNA sense strand
cggcagagccaaugaaagg

SEQ ID NO: 1409061 - RNA, 19 nt, Homo sapiens
  misc_RNA (1)...(19): siRNA sense strand
ccagaaauucaguaaaugg

SEQ ID NO: 1409062 - RNA, 19 nt, Homo sapiens
  misc_RNA (1)...(19): siRNA sense strand
gcauacaaucucuguucuu

SEQ ID NO: 1409063 - RNA, 19 nt, Homo sapiens
  misc_RNA (1)...(19): siRNA sense strand
ucacacaccauauauuaac

SEQ ID NO: 1409064 - RNA, 19 nt, Homo sapiens
  misc_RNA (1)...(19): siRNA sense strand
gggaggcauuauguauauu

SEQ ID NO: 1409065 - RNA, 19 nt, Homo sapiens
  misc_RNA (1)...(19): siRNA sense strand
augaaaggcccuauugcua

SEQ ID NO: 1409066 - RNA, 19 nt, Homo sapiens
  misc_RNA (1)...(19): siRNA sense strand
agaggaagaagaagaaaca

SEQ ID NO: 1409067 - RNA, 19 nt, Homo sapiens
  misc_RNA (1)...(19): siRNA sense strand
aagaagaggaagaagaaga

SEQ ID NO: 1409068 - RNA, 19 nt, Homo sapiens
  misc_RNA (1)...(19): siRNA sense strand
aagaagaaacagagacgaa

SEQ ID NO: 1409069 - RNA, 19 nt, Homo sapiens
  misc_RNA (1)...(19): siRNA sense strand
uggcaucguugagaaugaa

SEQ ID NO: 1409070 - RNA, 19 nt, Homo sapiens
  misc_RNA (1)...(19): siRNA sense strand
aaaaugacagcucuccuua

SEQ ID NO: 1409071 - RNA, 19 nt, Homo sapiens
  misc_RNA (1)...(19): siRNA sense strand
agaaacagagacgaacuuu

SEQ ID NO: 1409072 - RNA, 19 nt, Homo sapiens
  misc_RNA (1)...(19): siRNA sense strand
caaagaaugaagaagacau

SEQ ID NO: 1409073 - RNA, 19 nt, Homo sapiens
  misc_RNA (1)...(19): siRNA sense strand
agagcucacacaccauaua

SEQ ID NO: 1409074 - RNA, 19 nt, Homo sapiens
  misc_RNA (1)...(19): siRNA sense strand
aaaugacagcucuccuuaa

SEQ ID NO: 1409075 - RNA, 19 nt, Homo sapiens
  misc_RNA (1)...(19): siRNA sense strand
cccagaaauucaguaaaug

SEQ ID NO: 1409076 - RNA, 19 nt, Homo sapiens
  misc_RNA (1)...(19): siRNA sense strand
cguugagaaugaauggaaa

SEQ ID NO: 1409077 - RNA, 19 nt, Homo sapiens
  misc_RNA (1)...(19): siRNA sense strand
ccaaaucuaacauaguucu

SEQ ID NO: 1409078 - RNA, 19 nt, Homo sapiens
  misc_RNA (1)...(19): siRNA sense strand
caacugugaaccagcuaau

SEQ ID NO: 1409079 - RNA, 19 nt, Homo sapiens
  misc_RNA (1)...(19): siRNA sense strand
ugggcuaacugaaacaucu

SEQ ID NO: 1409080 - RNA, 19 nt, Homo sapiens
  misc_RNA (1)...(19): siRNA sense strand
gaagugguugggcuaacug

SEQ ID NO: 1409081 - RNA, 19 nt, Homo sapiens
  misc_RNA (1)...(19): siRNA sense strand
uaugcaaucugguccaaaa

SEQ ID NO: 1409082 - RNA, 19 nt, Homo sapiens
  misc_RNA (1)...(19): siRNA sense strand
acacccagaaauucaguaa

SEQ ID NO: 1409083 - RNA, 19 nt, Homo sapiens
  misc_RNA (1)...(19): siRNA sense strand
gggcuguccagauuaugaa

SEQ ID NO: 1409084 - RNA, 19 nt, Homo sapiens
  misc_RNA (1)...(19): siRNA sense strand
uaauagcuggcaucguuga

SEQ ID NO: 1409085 - RNA, 19 nt, Homo sapiens
  misc_RNA (1)...(19): siRNA sense strand
uggagagucugaauuuuau

SEQ ID NO: 1409086 - RNA, 19 nt, Homo sapiens
  misc_RNA (1)...(19): siRNA sense strand
gaauccucaccaauagaaa

SEQ ID NO: 1409087 - RNA, 19 nt, Homo sapiens
  misc_RNA (1)...(19): siRNA sense strand
cacacaccauauauuaaca

SEQ ID NO: 1409088 - RNA, 19 nt, Homo sapiens
  misc_RNA (1)...(19): siRNA sense strand
gccaaugaaaggcccuauu

SEQ ID NO: 1409089 - RNA, 19 nt, Homo sapiens
  misc_RNA (1)...(19): siRNA sense strand
ccaaccaaagaaugaagaa

SEQ ID NO: 1409090 - RNA, 19 nt, Homo sapiens
  misc_RNA (1)...(19): siRNA sense strand
caaucauggacauacuuaa

SEQ ID NO: 1409091 - RNA, 19 nt, Homo sapiens
  misc_RNA (1)...(19): siRNA sense strand
cagacccaaaucuaacaua

SEQ ID NO: 1409092 - RNA, 19 nt, Homo sapiens
  misc_RNA (1)...(19): siRNA sense strand
uccaggaacuuguaauagc

SEQ ID NO: 1409093 - RNA, 19 nt, Homo sapiens
  misc_RNA (1)...(19): siRNA sense strand
ucuaugcacccaucugugu

SEQ ID NO: 1409094 - RNA, 19 nt, Homo sapiens
  misc_RNA (1)...(19): siRNA sense strand
uuauuccaauccaagaaga

SEQ ID NO: 1409095 - RNA, 19 nt, Homo sapiens
  misc_RNA (1)...(19): siRNA sense strand
uaacauaguucuccuguca

SEQ ID NO: 1409096 - RNA, 19 nt, Homo sapiens
  misc_RNA (1)...(19): siRNA sense strand
gcucacacaccauauauua

SEQ ID NO: 1409097 - RNA, 19 nt, Homo sapiens
  misc_RNA (1)...(19): siRNA sense strand
acgcaaagcuucuucauga

SEQ ID NO: 1409098 - RNA, 19 nt, Homo sapiens
  misc_RNA (1)...(19): siRNA sense strand
gaaaggcccuauugcuaug

SEQ ID NO: 1409099 - RNA, 19 nt, Homo sapiens
  misc_RNA (1)...(19): siRNA sense strand
uguaauagcuggcaucguu

SEQ ID NO: 1409100 - RNA, 19 nt, Homo sapiens
  misc_RNA (1)...(19): siRNA sense strand
ggaggcauuauguauauua

SEQ ID NO: 1409101 - RNA, 19 nt, Homo sapiens
  misc_RNA (1)...(19): siRNA sense strand
ccaagaagaggaagaagaa

SEQ ID NO: 1409102 - RNA, 19 nt, Homo sapiens
  misc_RNA (1)...(19): siRNA sense strand
cauacaaucucuguucuug

SEQ ID NO: 1409103 - RNA, 19 nt, Homo sapiens
  misc_RNA (1)...(19): siRNA sense strand
ugaaacaucuucccaacca

SEQ ID NO: 1409104 - RNA, 19 nt, Homo sapiens
  misc_RNA (1)...(19): siRNA sense strand
gagaaugaauggaaaagaa

SEQ ID NO: 1409105 - RNA, 19 nt, Homo sapiens
  misc_RNA (1)...(19): siRNA sense strand
gagacgaacuuuccagaac

SEQ ID NO: 1409106 - RNA, 19 nt, Homo sapiens
  misc_RNA (1)...(19): siRNA sense strand
ggaauccucaccaauagaa

SEQ ID NO: 1409107 - RNA, 19 nt, Homo sapiens
  misc_RNA (1)...(19): siRNA sense strand
gagggaaucuaagacuuug

SEQ ID NO: 1409108 - RNA, 19 nt, Homo sapiens
  misc_RNA (1)...(19): siRNA sense strand
ugaaugggcucuuccacau

SEQ ID NO: 1409109 - RNA, 19 nt, Homo sapiens
  misc_RNA (1)...(19): siRNA sense strand
ugaaaggcccuauugcuau

SEQ ID NO: 1409110 - RNA, 19 nt, Homo sapiens
  misc_RNA (1)...(19): siRNA sense strand
gaagaagaagaaacagaga

SEQ ID NO: 1409111 - RNA, 19 nt, Homo sapiens
  misc_RNA (1)...(19): siRNA sense strand
acccaaaucuaacauaguu

SEQ ID NO: 1409112 - RNA, 19 nt, Homo sapiens
  misc_RNA (1)...(19): siRNA sense strand
gcuccagacccaaaucuaa

SEQ ID NO: 1409113 - RNA, 19 nt, Homo sapiens
  misc_RNA (1)...(19): siRNA sense strand
caucuacccaauacuguua

SEQ ID NO: 1409114 - RNA, 19 nt, Homo sapiens
  misc_RNA (1)...(19): siRNA sense strand
cagcuaaucccucugagaa

SEQ ID NO: 1409115 - RNA, 19 nt, Homo sapiens
  misc_RNA (1)...(19): siRNA sense strand
gaagaagugguugggcuaa

SEQ ID NO: 1409116 - RNA, 19 nt, Homo sapiens
  misc_RNA (1)...(19): siRNA sense strand
ucaaucauggacauacuua

SEQ ID NO: 1409117 - RNA, 19 nt, Homo sapiens
  misc_RNA (1)...(19): siRNA sense strand
gaaacaucuucccaaccaa

SEQ ID NO: 1409118 - RNA, 19 nt, Homo sapiens
  misc_RNA (1)...(19): siRNA sense strand
gagcucacacaccauauau

SEQ ID NO: 1409119 - RNA, 19 nt, Homo sapiens
  misc_RNA (1)...(19): siRNA sense strand
acccagaaauucaguaaau

SEQ ID NO: 1409120 - RNA, 19 nt, Homo sapiens
  misc_RNA (1)...(19): siRNA sense strand
gcugaucuuugccuucuuc

SEQ ID NO: 1409121 - RNA, 19 nt, Homo sapiens
  misc_RNA (1)...(19): siRNA sense strand
ugagggaaucuaagacuuu

SEQ ID NO: 1409122 - RNA, 19 nt, Homo sapiens
  misc_RNA (1)...(19): siRNA sense strand
gacaacacccagaaauuca

SEQ ID NO: 1409123 - RNA, 19 nt, Homo sapiens
  misc_RNA (1)...(19): siRNA sense strand
gaagaggaagaagaagaaa

SEQ ID NO: 1409124 - RNA, 19 nt, Homo sapiens
  misc_RNA (1)...(19): siRNA sense strand
gauuaugaaugggcucuuc

SEQ ID NO: 1409125 - RNA, 19 nt, Homo sapiens
  misc_RNA (1)...(19): siRNA sense strand
uagcuggcaucguugagaa

SEQ ID NO: 1409126 - RNA, 19 nt, Homo sapiens
  misc_RNA (1)...(19): siRNA sense strand
gagccucuuugcugccauu

SEQ ID NO: 1409127 - RNA, 19 nt, Homo sapiens
  misc_RNA (1)...(19): siRNA sense strand
cagcauacaaucucuguuc

SEQ ID NO: 1409128 - RNA, 19 nt, Homo sapiens
  misc_RNA (1)...(19): siRNA sense strand
gaucuaugcacccaucugu

SEQ ID NO: 1409129 - RNA, 19 nt, Homo sapiens
  misc_RNA (1)...(19): siRNA sense strand
aaacaucuucccaaccaaa

SEQ ID NO: 1409130 - RNA, 19 nt, Homo sapiens
  misc_RNA (1)...(19): siRNA sense strand
gcuaaucccucugagaaaa

SEQ ID NO: 1409131 - RNA, 19 nt, Homo sapiens
  misc_RNA (1)...(19): siRNA sense strand
guauauuauuuccggauca

SEQ ID NO: 1409132 - RNA, 19 nt, Homo sapiens
  misc_RNA (1)...(19): siRNA sense strand
agaagaggaagaagaagaa

SEQ ID NO: 1409133 - RNA, 19 nt, Homo sapiens
  misc_RNA (1)...(19): siRNA sense strand
agacccaaaucuaacauag

SEQ ID NO: 1409134 - RNA, 19 nt, Homo sapiens
  misc_RNA (1)...(19): siRNA sense strand
gaaaaugacagcucuccuu

SEQ ID NO: 1409135 - RNA, 19 nt, Homo sapiens
  misc_RNA (1)...(19): siRNA sense strand
aaacagagacgaacuuucc

SEQ ID NO: 1409136 - RNA, 19 nt, Homo sapiens
  misc_RNA (1)...(19): siRNA sense strand
gaagaaacagagacgaacu

SEQ ID NO: 1409137 - RNA, 19 nt, Homo sapiens
  misc_RNA (1)...(19): siRNA sense strand
ggggaggcauuauguauau

SEQ ID NO: 1409138 - RNA, 19 nt, Homo sapiens
  misc_RNA (1)...(19): siRNA sense strand
uuagagcucacacaccaua

SEQ ID NO: 1409139 - RNA, 19 nt, Homo sapiens
  misc_RNA (1)...(19): siRNA sense strand
gaauucauugagccucuuu

SEQ ID NO: 1409140 - RNA, 19 nt, Homo sapiens
  misc_RNA (1)...(19): siRNA sense strand
ccucuuugcugccauuucu

SEQ ID NO: 1409141 - RNA, 19 nt, Homo sapiens
  misc_RNA (1)...(19): siRNA sense strand
gcuaugcaaucugguccaa

SEQ ID NO: 1409142 - RNA, 19 nt, Homo sapiens
  misc_RNA (1)...(19): siRNA sense strand
ccaggaacuuguaauagcu

SEQ ID NO: 1409143 - RNA, 19 nt, Homo sapiens
  misc_RNA (1)...(19): siRNA sense strand
ucucuguucuugggcauuu

SEQ ID NO: 1409144 - RNA, 19 nt, Homo sapiens
  misc_RNA (1)...(19): siRNA sense strand
aaccaaagaaugaagaaga

SEQ ID NO: 1409145 - RNA, 19 nt, Homo sapiens
  misc_RNA (1)...(19): siRNA sense strand
ucaggaggaugucuucacu

SEQ ID NO: 1409146 - RNA, 19 nt, Homo sapiens
  misc_RNA (1)...(19): siRNA sense strand
gugguugggcuaacugaaa

SEQ ID NO: 1409147 - RNA, 19 nt, Homo sapiens
  misc_RNA (1)...(19): siRNA sense strand
cggcagagccaaugaaagg

SEQ ID NO: 1409148 - RNA, 19 nt, Homo sapiens
  misc_RNA (1)...(19): siRNA sense strand
ccagaaauucaguaaaugg

SEQ ID NO: 1409149 - RNA, 19 nt, Homo sapiens
  misc_RNA (1)...(19): siRNA sense strand
gcauacaaucucuguucuu

SEQ ID NO: 1409150 - RNA, 19 nt, Homo sapiens
  misc_RNA (1)...(19): siRNA sense strand
ucacacaccauauauuaac

SEQ ID NO: 1409151 - RNA, 19 nt, Homo sapiens
  misc_RNA (1)...(19): siRNA sense strand
gggaggcauuauguauauu

SEQ ID NO: 1409152 - RNA, 19 nt, Homo sapiens
  misc_RNA (1)...(19): siRNA sense strand
augaaaggcccuauugcua

SEQ ID NO: 1409153 - RNA, 19 nt, Homo sapiens
  misc_RNA (1)...(19): siRNA sense strand
agaggaagaagaagaaaca

SEQ ID NO: 1409154 - RNA, 19 nt, Homo sapiens
  misc_RNA (1)...(19): siRNA sense strand
aagaagaggaagaagaaga

SEQ ID NO: 1409155 - RNA, 19 nt, Homo sapiens
  misc_RNA (1)...(19): siRNA sense strand
aagaagaaacagagacgaa

SEQ ID NO: 1409156 - RNA, 19 nt, Homo sapiens
  misc_RNA (1)...(19): siRNA sense strand
uggcaucguugagaaugaa

SEQ ID NO: 1409157 - RNA, 19 nt, Homo sapiens
  misc_RNA (1)...(19): siRNA sense strand
aaaaugacagcucuccuua

SEQ ID NO: 1409158 - RNA, 19 nt, Homo sapiens
  misc_RNA (1)...(19): siRNA sense strand
agaaacagagacgaacuuu

SEQ ID NO: 1409159 - RNA, 19 nt, Homo sapiens
  misc_RNA (1)...(19): siRNA sense strand
caaagaaugaagaagacau

SEQ ID NO: 1409160 - RNA, 19 nt, Homo sapiens
  misc_RNA (1)...(19): siRNA sense strand
agagcucacacaccauaua

SEQ ID NO: 1409161 - RNA, 19 nt, Homo sapiens
  misc_RNA (1)...(19): siRNA sense strand
aaaugacagcucuccuuaa

SEQ ID NO: 1409162 - RNA, 19 nt, Homo sapiens
  misc_RNA (1)...(19): siRNA sense strand
cccagaaauucaguaaaug

SEQ ID NO: 1409163 - RNA, 19 nt, Homo sapiens
  misc_RNA (1)...(19): siRNA sense strand
cguugagaaugaauggaaa

SEQ ID NO: 1409164 - RNA, 19 nt, Homo sapiens
  misc_RNA (1)...(19): siRNA sense strand
ccaaaucuaacauaguucu

SEQ ID NO: 1409165 - RNA, 19 nt, Homo sapiens
  misc_RNA (1)...(19): siRNA sense strand
caacugugaaccagcuaau

SEQ ID NO: 1409166 - RNA, 19 nt, Homo sapiens
  misc_RNA (1)...(19): siRNA sense strand
ugggcuaacugaaacaucu

SEQ ID NO: 1409167 - RNA, 19 nt, Homo sapiens
  misc_RNA (1)...(19): siRNA sense strand
gaagugguugggcuaacug

SEQ ID NO: 1409168 - RNA, 19 nt, Homo sapiens
  misc_RNA (1)...(19): siRNA sense strand
uaugcaaucugguccaaaa

SEQ ID NO: 1409169 - RNA, 19 nt, Homo sapiens
  misc_RNA (1)...(19): siRNA sense strand
acacccagaaauucaguaa

SEQ ID NO: 1409170 - RNA, 19 nt, Homo sapiens
  misc_RNA (1)...(19): siRNA sense strand
gggcuguccagauuaugaa

SEQ ID NO: 1409171 - RNA, 19 nt, Homo sapiens
  misc_RNA (1)...(19): siRNA sense strand
uaauagcuggcaucguuga

SEQ ID NO: 1409172 - RNA, 19 nt, Homo sapiens
  misc_RNA (1)...(19): siRNA sense strand
uggagagucugaauuuuau

SEQ ID NO: 1409173 - RNA, 19 nt, Homo sapiens
  misc_RNA (1)...(19): siRNA sense strand
gaauccucaccaauagaaa

SEQ ID NO: 1409174 - RNA, 19 nt, Homo sapiens
  misc_RNA (1)...(19): siRNA sense strand
cacacaccauauauuaaca

SEQ ID NO: 1409175 - RNA, 19 nt, Homo sapiens
  misc_RNA (1)...(19): siRNA sense strand
gccaaugaaaggcccuauu

SEQ ID NO: 1409176 - RNA, 19 nt, Homo sapiens
  misc_RNA (1)...(19): siRNA sense strand
ccaaccaaagaaugaagaa

SEQ ID NO: 1409177 - RNA, 19 nt, Homo sapiens
  misc_RNA (1)...(19): siRNA sense strand
caaucauggacauacuuaa

SEQ ID NO: 1409178 - RNA, 19 nt, Homo sapiens
  misc_RNA (1)...(19): siRNA sense strand
cagacccaaaucuaacaua

SEQ ID NO: 1409179 - RNA, 19 nt, Homo sapiens
  misc_RNA (1)...(19): siRNA sense strand
uccaggaacuuguaauagc

SEQ ID NO: 1409180 - RNA, 19 nt, Homo sapiens
  misc_RNA (1)...(19): siRNA sense strand
ucuaugcacccaucugugu

SEQ ID NO: 1409181 - RNA, 19 nt, Homo sapiens
  misc_RNA (1)...(19): siRNA sense strand
uuauuccaauccaagaaga

SEQ ID NO: 1409182 - RNA, 19 nt, Homo sapiens
  misc_RNA (1)...(19): siRNA sense strand
uaacauaguucuccuguca

SEQ ID NO: 1409183 - RNA, 19 nt, Homo sapiens
  misc_RNA (1)...(19): siRNA sense strand
gcucacacaccauauauua

SEQ ID NO: 1409184 - RNA, 19 nt, Homo sapiens
  misc_RNA (1)...(19): siRNA sense strand
acgcaaagcuucuucauga

SEQ ID NO: 1409185 - RNA, 19 nt, Homo sapiens
  misc_RNA (1)...(19): siRNA sense strand
gaaaggcccuauugcuaug

SEQ ID NO: 1409186 - RNA, 19 nt, Homo sapiens
  misc_RNA (1)...(19): siRNA sense strand
uguaauagcuggcaucguu

SEQ ID NO: 1409187 - RNA, 19 nt, Homo sapiens
  misc_RNA (1)...(19): siRNA sense strand
ggaggcauuauguauauua

SEQ ID NO: 1409188 - RNA, 19 nt, Homo sapiens
  misc_RNA (1)...(19): siRNA sense strand
ccaagaagaggaagaagaa

SEQ ID NO: 1409189 - RNA, 19 nt, Homo sapiens
  misc_RNA (1)...(19): siRNA sense strand
cauacaaucucuguucuug

SEQ ID NO: 1409190 - RNA, 19 nt, Homo sapiens
  misc_RNA (1)...(19): siRNA sense strand
ugaaacaucuucccaacca

SEQ ID NO: 1409191 - RNA, 19 nt, Homo sapiens
  misc_RNA (1)...(19): siRNA sense strand
gagaaugaauggaaaagaa

SEQ ID NO: 1409192 - RNA, 19 nt, Homo sapiens
  misc_RNA (1)...(19): siRNA sense strand
gagacgaacuuuccagaac

SEQ ID NO: 1409193 - RNA, 19 nt, Homo sapiens
  misc_RNA (1)...(19): siRNA sense strand
ggaauccucaccaauagaa

SEQ ID NO: 1409194 - RNA, 19 nt, Homo sapiens
  misc_RNA (1)...(19): siRNA sense strand
gagggaaucuaagacuuug

SEQ ID NO: 1409195 - RNA, 19 nt, Homo sapiens
  misc_RNA (1)...(19): siRNA sense strand
ugaaugggcucuuccacau

SEQ ID NO: 1409196 - RNA, 19 nt, Homo sapiens
  misc_RNA (1)...(19): siRNA sense strand
ugaaaggcccuauugcuau

SEQ ID NO: 1409197 - RNA, 19 nt, Homo sapiens
  misc_RNA (1)...(19): siRNA sense strand
gaagaagaagaaacagaga

SEQ ID NO: 1409198 - RNA, 19 nt, Homo sapiens
  misc_RNA (1)...(19): siRNA sense strand
acccaaaucuaacauaguu

SEQ ID NO: 1409199 - RNA, 19 nt, Homo sapiens
  misc_RNA (1)...(19): siRNA sense strand
gcuccagacccaaaucuaa

SEQ ID NO: 1409200 - RNA, 19 nt, Homo sapiens
  misc_RNA (1)...(19): siRNA sense strand
caucuacccaauacuguua

SEQ ID NO: 1409201 - RNA, 19 nt, Homo sapiens
  misc_RNA (1)...(19): siRNA sense strand
cagcuaaucccucugagaa

SEQ ID NO: 1409202 - RNA, 19 nt, Homo sapiens
  misc_RNA (1)...(19): siRNA sense strand
gaagaagugguugggcuaa

SEQ ID NO: 1409203 - RNA, 19 nt, Homo sapiens
  misc_RNA (1)...(19): siRNA sense strand
ucaaucauggacauacuua

SEQ ID NO: 1409204 - RNA, 19 nt, Homo sapiens
  misc_RNA (1)...(19): siRNA sense strand
gaaacaucuucccaaccaa

SEQ ID NO: 1409205 - RNA, 19 nt, Homo sapiens
  misc_RNA (1)...(19): siRNA sense strand
gagcucacacaccauauau

SEQ ID NO: 1409206 - RNA, 19 nt, Homo sapiens
  misc_RNA (1)...(19): siRNA sense strand
acccagaaauucaguaaau

SEQ ID NO: 1409207 - RNA, 19 nt, Homo sapiens
  misc_RNA (1)...(19): siRNA sense strand
gcugaucuuugccuucuuc

SEQ ID NO: 1409208 - RNA, 19 nt, Homo sapiens
  misc_RNA (1)...(19): siRNA sense strand
ugagggaaucuaagacuuu

SEQ ID NO: 1409209 - RNA, 19 nt, Homo sapiens
  misc_RNA (1)...(19): siRNA sense strand
gacaacacccagaaauuca

SEQ ID NO: 1409210 - RNA, 19 nt, Homo sapiens
  misc_RNA (1)...(19): siRNA sense strand
gaagaggaagaagaagaaa

SEQ ID NO: 1409211 - RNA, 19 nt, Homo sapiens
  misc_RNA (1)...(19): siRNA sense strand
gauuaugaaugggcucuuc

SEQ ID NO: 1409212 - RNA, 19 nt, Homo sapiens
  misc_RNA (1)...(19): siRNA sense strand
uagcuggcaucguugagaa

SEQ ID NO: 1409213 - RNA, 19 nt, Homo sapiens
  misc_RNA (1)...(19): siRNA sense strand
gagccucuuugcugccauu

SEQ ID NO: 1409214 - RNA, 19 nt, Homo sapiens
  misc_RNA (1)...(19): siRNA sense strand
cagcauacaaucucuguuc

SEQ ID NO: 1409215 - RNA, 19 nt, Homo sapiens
  misc_RNA (1)...(19): siRNA sense strand
gaucuaugcacccaucugu

SEQ ID NO: 1409216 - RNA, 19 nt, Homo sapiens
  misc_RNA (1)...(19): siRNA sense strand
aaacaucuucccaaccaaa

SEQ ID NO: 1409217 - RNA, 19 nt, Homo sapiens
  misc_RNA (1)...(19): siRNA sense strand
gcuaaucccucugagaaaa

SEQ ID NO: 1409218 - RNA, 19 nt, Homo sapiens
  misc_RNA (1)...(19): siRNA sense strand
guauauuauuuccggauca

SEQ ID NO: 1409219 - RNA, 19 nt, Homo sapiens
  misc_RNA (1)...(19): siRNA sense strand
agaagaggaagaagaagaa

SEQ ID NO: 1409220 - RNA, 19 nt, Homo sapiens
  misc_RNA (1)...(19): siRNA sense strand
agacccaaaucuaacauag

SEQ ID NO: 1409221 - RNA, 19 nt, Homo sapiens
  misc_RNA (1)...(19): siRNA sense strand
gaaaaugacagcucuccuu

SEQ ID NO: 1409222 - RNA, 19 nt, Homo sapiens
  misc_RNA (1)...(19): siRNA sense strand
aaacagagacgaacuuucc

SEQ ID NO: 1409223 - RNA, 19 nt, Homo sapiens
  misc_RNA (1)...(19): siRNA sense strand
gaagaaacagagacgaacu

SEQ ID NO: 1409224 - RNA, 19 nt, Homo sapiens
  misc_RNA (1)...(19): siRNA sense strand
ggggaggcauuauguauau

SEQ ID NO: 1409225 - RNA, 19 nt, Homo sapiens
  misc_RNA (1)...(19): siRNA sense strand
uuagagcucacacaccaua

SEQ ID NO: 1409226 - RNA, 19 nt, Homo sapiens
  misc_RNA (1)...(19): siRNA sense strand
gaauucauugagccucuuu

SEQ ID NO: 1409227 - RNA, 19 nt, Homo sapiens
  misc_RNA (1)...(19): siRNA sense strand
ccucuuugcugccauuucu

SEQ ID NO: 1409228 - RNA, 19 nt, Homo sapiens
  misc_RNA (1)...(19): siRNA sense strand
gcuaugcaaucugguccaa

SEQ ID NO: 1409229 - RNA, 19 nt, Homo sapiens
  misc_RNA (1)...(19): siRNA sense strand
ccaggaacuuguaauagcu

SEQ ID NO: 1409230 - RNA, 19 nt, Homo sapiens
  misc_RNA (1)...(19): siRNA sense strand
ucucuguucuugggcauuu

SEQ ID NO: 1409231 - RNA, 19 nt, Homo sapiens
  misc_RNA (1)...(19): siRNA sense strand
aaccaaagaaugaagaaga

SEQ ID NO: 1409232 - RNA, 19 nt, Homo sapiens
  misc_RNA (1)...(19): siRNA sense strand
ucaggaggaugucuucacu

SEQ ID NO: 1409233 - RNA, 19 nt, Homo sapiens
  misc_RNA (1)...(19): siRNA sense strand
gugguugggcuaacugaaa

SEQ ID NO: 1409234 - RNA, 19 nt, Homo sapiens
  misc_RNA (1)...(19): siRNA sense strand
cggcagagccaaugaaagg

SEQ ID NO: 1409235 - RNA, 19 nt, Homo sapiens
  misc_RNA (1)...(19): siRNA sense strand
ccagaaauucaguaaaugg

SEQ ID NO: 1409236 - RNA, 19 nt, Homo sapiens
  misc_RNA (1)...(19): siRNA sense strand
gcauacaaucucuguucuu

SEQ ID NO: 1409237 - RNA, 19 nt, Homo sapiens
  misc_RNA (1)...(19): siRNA sense strand
ucacacaccauauauuaac

SEQ ID NO: 1409238 - RNA, 19 nt, Homo sapiens
  misc_RNA (1)...(19): siRNA sense strand
gggaggcauuauguauauu

SEQ ID NO: 1409239 - RNA, 19 nt, Homo sapiens
  misc_RNA (1)...(19): siRNA sense strand
augaaaggcccuauugcua

SEQ ID NO: 1409240 - RNA, 19 nt, Homo sapiens
  misc_RNA (1)...(19): siRNA sense strand
agaggaagaagaagaaaca

SEQ ID NO: 1409241 - RNA, 19 nt, Homo sapiens
  misc_RNA (1)...(19): siRNA sense strand
aagaagaggaagaagaaga

SEQ ID NO: 1409242 - RNA, 19 nt, Homo sapiens
  misc_RNA (1)...(19): siRNA sense strand
aagaagaaacagagacgaa

SEQ ID NO: 1409243 - RNA, 19 nt, Homo sapiens
  misc_RNA (1)...(19): siRNA sense strand
uggcaucguugagaaugaa

SEQ ID NO: 1409244 - RNA, 19 nt, Homo sapiens
  misc_RNA (1)...(19): siRNA sense strand
aaaaugacagcucuccuua

SEQ ID NO: 1409245 - RNA, 19 nt, Homo sapiens
  misc_RNA (1)...(19): siRNA sense strand
agaaacagagacgaacuuu

SEQ ID NO: 1409246 - RNA, 19 nt, Homo sapiens
  misc_RNA (1)...(19): siRNA sense strand
caaagaaugaagaagacau

SEQ ID NO: 1409247 - RNA, 19 nt, Homo sapiens
  misc_RNA (1)...(19): siRNA sense strand
agagcucacacaccauaua

SEQ ID NO: 1409248 - RNA, 19 nt, Homo sapiens
  misc_RNA (1)...(19): siRNA sense strand
aaaugacagcucuccuuaa

SEQ ID NO: 1409249 - RNA, 19 nt, Homo sapiens
  misc_RNA (1)...(19): siRNA sense strand
cccagaaauucaguaaaug

SEQ ID NO: 1409250 - RNA, 19 nt, Homo sapiens
  misc_RNA (1)...(19): siRNA sense strand
cguugagaaugaauggaaa

SEQ ID NO: 1409251 - RNA, 19 nt, Homo sapiens
  misc_RNA (1)...(19): siRNA sense strand
ccaaaucuaacauaguucu

SEQ ID NO: 1409252 - RNA, 19 nt, Homo sapiens
  misc_RNA (1)...(19): siRNA sense strand
caacugugaaccagcuaau

SEQ ID NO: 1409253 - RNA, 19 nt, Homo sapiens
  misc_RNA (1)...(19): siRNA sense strand
ugggcuaacugaaacaucu

SEQ ID NO: 1409254 - RNA, 19 nt, Homo sapiens
  misc_RNA (1)...(19): siRNA sense strand
gaagugguugggcuaacug

SEQ ID NO: 1409255 - RNA, 19 nt, Homo sapiens
  misc_RNA (1)...(19): siRNA sense strand
uaugcaaucugguccaaaa

SEQ ID NO: 1409256 - RNA, 19 nt, Homo sapiens
  misc_RNA (1)...(19): siRNA sense strand
acacccagaaauucaguaa

SEQ ID NO: 1409257 - RNA, 19 nt, Homo sapiens
  misc_RNA (1)...(19): siRNA sense strand
gggcuguccagauuaugaa

SEQ ID NO: 1409258 - RNA, 19 nt, Homo sapiens
  misc_RNA (1)...(19): siRNA sense strand
uaauagcuggcaucguuga

SEQ ID NO: 1409259 - RNA, 19 nt, Homo sapiens
  misc_RNA (1)...(19): siRNA sense strand
uggagagucugaauuuuau

SEQ ID NO: 1409260 - RNA, 19 nt, Homo sapiens
  misc_RNA (1)...(19): siRNA sense strand
gaauccucaccaauagaaa

SEQ ID NO: 1409261 - RNA, 19 nt, Homo sapiens
  misc_RNA (1)...(19): siRNA sense strand
cacacaccauauauuaaca

SEQ ID NO: 1409262 - RNA, 19 nt, Homo sapiens
  misc_RNA (1)...(19): siRNA sense strand
gccaaugaaaggcccuauu

SEQ ID NO: 1409263 - RNA, 19 nt, Homo sapiens
  misc_RNA (1)...(19): siRNA sense strand
ccaaccaaagaaugaagaa

SEQ ID NO: 1409264 - RNA, 19 nt, Homo sapiens
  misc_RNA (1)...(19): siRNA sense strand
caaucauggacauacuuaa

SEQ ID NO: 1409265 - RNA, 19 nt, Homo sapiens
  misc_RNA (1)...(19): siRNA sense strand
cagacccaaaucuaacaua

SEQ ID NO: 1409266 - RNA, 19 nt, Homo sapiens
  misc_RNA (1)...(19): siRNA sense strand
uccaggaacuuguaauagc

SEQ ID NO: 1409267 - RNA, 19 nt, Homo sapiens
  misc_RNA (1)...(19): siRNA sense strand
ucuaugcacccaucugugu

SEQ ID NO: 1409268 - RNA, 19 nt, Homo sapiens
  misc_RNA (1)...(19): siRNA sense strand
uuauuccaauccaagaaga

SEQ ID NO: 1409269 - RNA, 19 nt, Homo sapiens
  misc_RNA (1)...(19): siRNA sense strand
uaacauaguucuccuguca

SEQ ID NO: 1409270 - RNA, 19 nt, Homo sapiens
  misc_RNA (1)...(19): siRNA sense strand
gcucacacaccauauauua

SEQ ID NO: 1409271 - RNA, 19 nt, Homo sapiens
  misc_RNA (1)...(19): siRNA sense strand
acgcaaagcuucuucauga

SEQ ID NO: 1409272 - RNA, 19 nt, Homo sapiens
  misc_RNA (1)...(19): siRNA sense strand
gaaaggcccuauugcuaug

SEQ ID NO: 1409273 - RNA, 19 nt, Homo sapiens
  misc_RNA (1)...(19): siRNA sense strand
uguaauagcuggcaucguu

SEQ ID NO: 1409274 - RNA, 19 nt, Homo sapiens
  misc_RNA (1)...(19): siRNA sense strand
ggaggcauuauguauauua

SEQ ID NO: 1409275 - RNA, 19 nt, Homo sapiens
  misc_RNA (1)...(19): siRNA sense strand
ccaagaagaggaagaagaa

SEQ ID NO: 1409276 - RNA, 19 nt, Homo sapiens
  misc_RNA (1)...(19): siRNA sense strand
cauacaaucucuguucuug

SEQ ID NO: 1409277 - RNA, 19 nt, Homo sapiens
  misc_RNA (1)...(19): siRNA sense strand
ugaaacaucuucccaacca

SEQ ID NO: 1409278 - RNA, 19 nt, Homo sapiens
  misc_RNA (1)...(19): siRNA sense strand
gagaaugaauggaaaagaa

SEQ ID NO: 1409279 - RNA, 19 nt, Homo sapiens
  misc_RNA (1)...(19): siRNA sense strand
gagacgaacuuuccagaac

SEQ ID NO: 1409280 - RNA, 19 nt, Homo sapiens
  misc_RNA (1)...(19): siRNA sense strand
ggaauccucaccaauagaa

SEQ ID NO: 1409281 - RNA, 19 nt, Homo sapiens
  misc_RNA (1)...(19): siRNA sense strand
gagggaaucuaagacuuug

SEQ ID NO: 1409282 - RNA, 19 nt, Homo sapiens
  misc_RNA (1)...(19): siRNA sense strand
ugaaugggcucuuccacau

SEQ ID NO: 1409283 - RNA, 19 nt, Homo sapiens
  misc_RNA (1)...(19): siRNA sense strand
ugaaaggcccuauugcuau

SEQ ID NO: 1409284 - RNA, 19 nt, Homo sapiens
  misc_RNA (1)...(19): siRNA sense strand
gaagaagaagaaacagaga

SEQ ID NO: 1409285 - RNA, 19 nt, Homo sapiens
  misc_RNA (1)...(19): siRNA sense strand
acccaaaucuaacauaguu

SEQ ID NO: 1409286 - RNA, 19 nt, Homo sapiens
  misc_RNA (1)...(19): siRNA sense strand
gcuccagacccaaaucuaa

SEQ ID NO: 1409287 - RNA, 19 nt, Homo sapiens
  misc_RNA (1)...(19): siRNA sense strand
caucuacccaauacuguua

SEQ ID NO: 1409288 - RNA, 19 nt, Homo sapiens
  misc_RNA (1)...(19): siRNA sense strand
cagcuaaucccucugagaa

SEQ ID NO: 1409289 - RNA, 19 nt, Homo sapiens
  misc_RNA (1)...(19): siRNA sense strand
gaagaagugguugggcuaa

SEQ ID NO: 1409290 - RNA, 19 nt, Homo sapiens
  misc_RNA (1)...(19): siRNA sense strand
ucaaucauggacauacuua

SEQ ID NO: 1409291 - RNA, 19 nt, Homo sapiens
  misc_RNA (1)...(19): siRNA sense strand
gaaacaucuucccaaccaa

SEQ ID NO: 1409292 - RNA, 19 nt, Homo sapiens
  misc_RNA (1)...(19): siRNA sense strand
gagcucacacaccauauau

SEQ ID NO: 1409293 - RNA, 19 nt, Homo sapiens
  misc_RNA (1)...(19): siRNA sense strand
acccagaaauucaguaaau

SEQ ID NO: 1409294 - RNA, 19 nt, Homo sapiens
  misc_RNA (1)...(19): siRNA sense strand
gcugaucuuugccuucuuc

SEQ ID NO: 1409295 - RNA, 19 nt, Homo sapiens
  misc_RNA (1)...(19): siRNA sense strand
ugagggaaucuaagacuuu

SEQ ID NO: 1409296 - RNA, 19 nt, Homo sapiens
  misc_RNA (1)...(19): siRNA sense strand
gacaacacccagaaauuca

SEQ ID NO: 1409297 - RNA, 19 nt, Homo sapiens
  misc_RNA (1)...(19): siRNA sense strand
gaagaggaagaagaagaaa

SEQ ID NO: 1409298 - RNA, 19 nt, Homo sapiens
  misc_RNA (1)...(19): siRNA sense strand
gauuaugaaugggcucuuc

SEQ ID NO: 1409299 - RNA, 19 nt, Homo sapiens
  misc_RNA (1)...(19): siRNA sense strand
uagcuggcaucguugagaa

SEQ ID NO: 1409300 - RNA, 19 nt, Homo sapiens
  misc_RNA (1)...(19): siRNA sense strand
gagccucuuugcugccauu

SEQ ID NO: 1409301 - RNA, 19 nt, Homo sapiens
  misc_RNA (1)...(19): siRNA sense strand
cagcauacaaucucuguuc

SEQ ID NO: 1409302 - RNA, 19 nt, Homo sapiens
  misc_RNA (1)...(19): siRNA sense strand
gaucuaugcacccaucugu

SEQ ID NO: 1409303 - RNA, 19 nt, Homo sapiens
  misc_RNA (1)...(19): siRNA sense strand
aaacaucuucccaaccaaa

SEQ ID NO: 1409304 - RNA, 19 nt, Homo sapiens
  misc_RNA (1)...(19): siRNA sense strand
gcuaaucccucugagaaaa

SEQ ID NO: 1409305 - RNA, 19 nt, Homo sapiens
  misc_RNA (1)...(19): siRNA sense strand
guauauuauuuccggauca

SEQ ID NO: 1409306 - RNA, 19 nt, Homo sapiens
  misc_RNA (1)...(19): siRNA sense strand
agaagaggaagaagaagaa

SEQ ID NO: 1409307 - RNA, 19 nt, Homo sapiens
  misc_RNA (1)...(19): siRNA sense strand
agacccaaaucuaacauag

SEQ ID NO: 1409308 - RNA, 19 nt, Homo sapiens
  misc_RNA (1)...(19): siRNA sense strand
gaaaaugacagcucuccuu

SEQ ID NO: 1409309 - RNA, 19 nt, Homo sapiens
  misc_RNA (1)...(19): siRNA sense strand
aaacagagacgaacuuucc

SEQ ID NO: 1409310 - RNA, 19 nt, Homo sapiens
  misc_RNA (1)...(19): siRNA sense strand
gaagaaacagagacgaacu

SEQ ID NO: 1409311 - RNA, 19 nt, Homo sapiens
  misc_RNA (1)...(19): siRNA sense strand
ggggaggcauuauguauau

SEQ ID NO: 1409312 - RNA, 19 nt, Homo sapiens
  misc_RNA (1)...(19): siRNA sense strand
uuagagcucacacaccaua

SEQ ID NO: 1409313 - RNA, 19 nt, Homo sapiens
  misc_RNA (1)...(19): siRNA sense strand
gaauucauugagccucuuu

SEQ ID NO: 1409314 - RNA, 19 nt, Homo sapiens
  misc_RNA (1)...(19): siRNA sense strand
ccucuuugcugccauuucu

SEQ ID NO: 1409315 - RNA, 19 nt, Homo sapiens
  misc_RNA (1)...(19): siRNA sense strand
gcuaugcaaucugguccaa

SEQ ID NO: 1409316 - RNA, 19 nt, Homo sapiens
  misc_RNA (1)...(19): siRNA sense strand
ccaggaacuuguaauagcu

SEQ ID NO: 1409317 - RNA, 19 nt, Homo sapiens
  misc_RNA (1)...(19): siRNA sense strand
ucucuguucuugggcauuu

SEQ ID NO: 1409318 - RNA, 19 nt, Homo sapiens
  misc_RNA (1)...(19): siRNA sense strand
aaccaaagaaugaagaaga

SEQ ID NO: 1409319 - RNA, 19 nt, Homo sapiens
  misc_RNA (1)...(19): siRNA sense strand
ucaggaggaugucuucacu

SEQ ID NO: 1409320 - RNA, 19 nt, Homo sapiens
  misc_RNA (1)...(19): siRNA sense strand
gugguugggcuaacugaaa

SEQ ID NO: 1409321 - RNA, 19 nt, Homo sapiens
  misc_RNA (1)...(19): siRNA sense strand
cggcagagccaaugaaagg

SEQ ID NO: 1409322 - RNA, 19 nt, Homo sapiens
  misc_RNA (1)...(19): siRNA sense strand
ccagaaauucaguaaaugg

SEQ ID NO: 1409323 - RNA, 19 nt, Homo sapiens
  misc_RNA (1)...(19): siRNA sense strand
gcauacaaucucuguucuu

SEQ ID NO: 1409324 - RNA, 19 nt, Homo sapiens
  misc_RNA (1)...(19): siRNA sense strand
ucacacaccauauauuaac

SEQ ID NO: 1409325 - RNA, 19 nt, Homo sapiens
  misc_RNA (1)...(19): siRNA sense strand
gggaggcauuauguauauu

SEQ ID NO: 1409326 - RNA, 19 nt, Homo sapiens
  misc_RNA (1)...(19): siRNA sense strand
augaaaggcccuauugcua

SEQ ID NO: 1409327 - RNA, 19 nt, Homo sapiens
  misc_RNA (1)...(19): siRNA sense strand
agaggaagaagaagaaaca

SEQ ID NO: 1409328 - RNA, 19 nt, Homo sapiens
  misc_RNA (1)...(19): siRNA sense strand
aagaagaggaagaagaaga

SEQ ID NO: 1409329 - RNA, 19 nt, Homo sapiens
  misc_RNA (1)...(19): siRNA sense strand
aagaagaaacagagacgaa

SEQ ID NO: 1409330 - RNA, 19 nt, Homo sapiens
  misc_RNA (1)...(19): siRNA sense strand
uggcaucguugagaaugaa

SEQ ID NO: 1409331 - RNA, 19 nt, Homo sapiens
  misc_RNA (1)...(19): siRNA sense strand
aaaaugacagcucuccuua

SEQ ID NO: 1409332 - RNA, 19 nt, Homo sapiens
  misc_RNA (1)...(19): siRNA sense strand
agaaacagagacgaacuuu

SEQ ID NO: 1409333 - RNA, 19 nt, Homo sapiens
  misc_RNA (1)...(19): siRNA sense strand
caaagaaugaagaagacau

SEQ ID NO: 1409334 - RNA, 19 nt, Homo sapiens
  misc_RNA (1)...(19): siRNA sense strand
agagcucacacaccauaua

SEQ ID NO: 1409335 - RNA, 19 nt, Homo sapiens
  misc_RNA (1)...(19): siRNA sense strand
aaaugacagcucuccuuaa

SEQ ID NO: 1409336 - RNA, 19 nt, Homo sapiens
  misc_RNA (1)...(19): siRNA sense strand
cccagaaauucaguaaaug

SEQ ID NO: 1409337 - RNA, 19 nt, Homo sapiens
  misc_RNA (1)...(19): siRNA sense strand
cguugagaaugaauggaaa

SEQ ID NO: 1409338 - RNA, 19 nt, Homo sapiens
  misc_RNA (1)...(19): siRNA sense strand
ccaaaucuaacauaguucu

SEQ ID NO: 1409339 - RNA, 19 nt, Homo sapiens
  misc_RNA (1)...(19): siRNA sense strand
caacugugaaccagcuaau

SEQ ID NO: 1409340 - RNA, 19 nt, Homo sapiens
  misc_RNA (1)...(19): siRNA sense strand
ugggcuaacugaaacaucu

SEQ ID NO: 1409341 - RNA, 19 nt, Homo sapiens
  misc_RNA (1)...(19): siRNA sense strand
gaagugguugggcuaacug

SEQ ID NO: 1409342 - RNA, 19 nt, Homo sapiens
  misc_RNA (1)...(19): siRNA sense strand
uaugcaaucugguccaaaa

SEQ ID NO: 1409343 - RNA, 19 nt, Homo sapiens
  misc_RNA (1)...(19): siRNA sense strand
acacccagaaauucaguaa

SEQ ID NO: 1409344 - RNA, 19 nt, Homo sapiens
  misc_RNA (1)...(19): siRNA sense strand
gggcuguccagauuaugaa

SEQ ID NO: 1409345 - RNA, 19 nt, Homo sapiens
  misc_RNA (1)...(19): siRNA sense strand
uaauagcuggcaucguuga

SEQ ID NO: 1409346 - RNA, 19 nt, Homo sapiens
  misc_RNA (1)...(19): siRNA sense strand
uggagagucugaauuuuau

SEQ ID NO: 1409347 - RNA, 19 nt, Homo sapiens
  misc_RNA (1)...(19): siRNA sense strand
gaauccucaccaauagaaa

SEQ ID NO: 1409348 - RNA, 19 nt, Homo sapiens
  misc_RNA (1)...(19): siRNA sense strand
cacacaccauauauuaaca

SEQ ID NO: 1409349 - RNA, 19 nt, Homo sapiens
  misc_RNA (1)...(19): siRNA sense strand
gccaaugaaaggcccuauu

SEQ ID NO: 1409350 - RNA, 19 nt, Homo sapiens
  misc_RNA (1)...(19): siRNA sense strand
ccaaccaaagaaugaagaa

SEQ ID NO: 1409351 - RNA, 19 nt, Homo sapiens
  misc_RNA (1)...(19): siRNA sense strand
caaucauggacauacuuaa

SEQ ID NO: 1409352 - RNA, 19 nt, Homo sapiens
  misc_RNA (1)...(19): siRNA sense strand
cagacccaaaucuaacaua

SEQ ID NO: 1409353 - RNA, 19 nt, Homo sapiens
  misc_RNA (1)...(19): siRNA sense strand
uccaggaacuuguaauagc

SEQ ID NO: 1409354 - RNA, 19 nt, Homo sapiens
  misc_RNA (1)...(19): siRNA sense strand
ucuaugcacccaucugugu

SEQ ID NO: 1409355 - RNA, 19 nt, Homo sapiens
  misc_RNA (1)...(19): siRNA sense strand
uuauuccaauccaagaaga

SEQ ID NO: 1409356 - RNA, 19 nt, Homo sapiens
  misc_RNA (1)...(19): siRNA sense strand
gcgcagacguugcuguuca

SEQ ID NO: 1409357 - RNA, 19 nt, Homo sapiens
  misc_RNA (1)...(19): siRNA sense strand
agaacgagcuggcccuuau

SEQ ID NO: 1409358 - RNA, 19 nt, Homo sapiens
  misc_RNA (1)...(19): siRNA sense strand
gaggacagcccgcuuuaug

SEQ ID NO: 1409359 - RNA, 19 nt, Homo sapiens
  misc_RNA (1)...(19): siRNA sense strand
cagggagucugccaucuga

SEQ ID NO: 1409360 - RNA, 19 nt, Homo sapiens
  misc_RNA (1)...(19): siRNA sense strand
caucgacuccuucaugauu

SEQ ID NO: 1409361 - RNA, 19 nt, Homo sapiens
  misc_RNA (1)...(19): siRNA sense strand
gcaaccgcuucgucaagaa

SEQ ID NO: 1409362 - RNA, 19 nt, Homo sapiens
  misc_RNA (1)...(19): siRNA sense strand
caacgugggcuaugacauc

SEQ ID NO: 1409363 - RNA, 19 nt, Homo sapiens
  misc_RNA (1)...(19): siRNA sense strand
cuacauggcggacaucuuc

SEQ ID NO: 1409364 - RNA, 19 nt, Homo sapiens
  misc_RNA (1)...(19): siRNA sense strand
ggccuccucuucuggugua

SEQ ID NO: 1409365 - RNA, 19 nt, Homo sapiens
  misc_RNA (1)...(19): siRNA sense strand
ggagaagagccacuacaag

SEQ ID NO: 1409366 - RNA, 19 nt, Homo sapiens
  misc_RNA (1)...(19): siRNA sense strand
gagaacgagcuggcccuua

SEQ ID NO: 1409367 - RNA, 19 nt, Homo sapiens
  misc_RNA (1)...(19): siRNA sense strand
gaacgagcuggcccuuaug

SEQ ID NO: 1409368 - RNA, 19 nt, Homo sapiens
  misc_RNA (1)...(19): siRNA sense strand
gcagacgaccaucggcuau

SEQ ID NO: 1409369 - RNA, 19 nt, Homo sapiens
  misc_RNA (1)...(19): siRNA sense strand
cgucaucgacuccuucaug

SEQ ID NO: 1409370 - RNA, 19 nt, Homo sapiens
  misc_RNA (1)...(19): siRNA sense strand
caagaagaacggccaaugc

SEQ ID NO: 1409371 - RNA, 19 nt, Homo sapiens
  misc_RNA (1)...(19): siRNA sense strand
gacgaggacagcccgcuuu

SEQ ID NO: 1409372 - RNA, 19 nt, Homo sapiens
  misc_RNA (1)...(19): siRNA sense strand
gcucaucaagcccuacaug

SEQ ID NO: 1409373 - RNA, 19 nt, Homo sapiens
  misc_RNA (1)...(19): siRNA sense strand
gggagcugcaggagaguaa

SEQ ID NO: 1409374 - RNA, 19 nt, Homo sapiens
  misc_RNA (1)...(19): siRNA sense strand
gcuuugagccuguggucuu

SEQ ID NO: 1409375 - RNA, 19 nt, Homo sapiens
  misc_RNA (1)...(19): siRNA sense strand
gagcugcaggagaguaaga

SEQ ID NO: 1409376 - RNA, 19 nt, Homo sapiens
  misc_RNA (1)...(19): siRNA sense strand
gggcgcagacguugcuguu

SEQ ID NO: 1409377 - RNA, 19 nt, Homo sapiens
  misc_RNA (1)...(19): siRNA sense strand
cgcaaccgcuucgucaaga

SEQ ID NO: 1409378 - RNA, 19 nt, Homo sapiens
  misc_RNA (1)...(19): siRNA sense strand
ucaagaagaacggccaaug

SEQ ID NO: 1409379 - RNA, 19 nt, Homo sapiens
  misc_RNA (1)...(19): siRNA sense strand
ucgccaaccugagcaacaa

SEQ ID NO: 1409380 - RNA, 19 nt, Homo sapiens
  misc_RNA (1)...(19): siRNA sense strand
gaggagaagagccacuaca

SEQ ID NO: 1409381 - RNA, 19 nt, Homo sapiens
  misc_RNA (1)...(19): siRNA sense strand
ccaaugcaacguguacuuc

SEQ ID NO: 1409382 - RNA, 19 nt, Homo sapiens
  misc_RNA (1)...(19): siRNA sense strand
gccaaugcaacguguacuu

SEQ ID NO: 1409383 - RNA, 19 nt, Homo sapiens
  misc_RNA (1)...(19): siRNA sense strand
agaagaacggccaaugcaa

SEQ ID NO: 1409384 - RNA, 19 nt, Homo sapiens
  misc_RNA (1)...(19): siRNA sense strand
acuacaagguggacuacuc

SEQ ID NO: 1409385 - RNA, 19 nt, Homo sapiens
  misc_RNA (1)...(19): siRNA sense strand
ggugucgcccaucaucauu

SEQ ID NO: 1409386 - RNA, 19 nt, Homo sapiens
  misc_RNA (1)...(19): siRNA sense strand
caucgugggcugcgucauc

SEQ ID NO: 1409387 - RNA, 19 nt, Homo sapiens
  misc_RNA (1)...(19): siRNA sense strand
aagaagaacggccaaugca

SEQ ID NO: 1409388 - RNA, 19 nt, Homo sapiens
  misc_RNA (1)...(19): siRNA sense strand
gcgcagacguugcuguuca

SEQ ID NO: 1409389 - RNA, 19 nt, Homo sapiens
  misc_RNA (1)...(19): siRNA sense strand
agaacgagcuggcccuuau

SEQ ID NO: 1409390 - RNA, 19 nt, Homo sapiens
  misc_RNA (1)...(19): siRNA sense strand
gaggacagcccgcuuuaug

SEQ ID NO: 1409391 - RNA, 19 nt, Homo sapiens
  misc_RNA (1)...(19): siRNA sense strand
cagggagucugccaucuga

SEQ ID NO: 1409392 - RNA, 19 nt, Homo sapiens
  misc_RNA (1)...(19): siRNA sense strand
caucgacuccuucaugauu

SEQ ID NO: 1409393 - RNA, 19 nt, Homo sapiens
  misc_RNA (1)...(19): siRNA sense strand
gcaaccgcuucgucaagaa

SEQ ID NO: 1409394 - RNA, 19 nt, Homo sapiens
  misc_RNA (1)...(19): siRNA sense strand
caacgugggcuaugacauc

SEQ ID NO: 1409395 - RNA, 19 nt, Homo sapiens
  misc_RNA (1)...(19): siRNA sense strand
cuacauggcggacaucuuc

SEQ ID NO: 1409396 - RNA, 19 nt, Homo sapiens
  misc_RNA (1)...(19): siRNA sense strand
ggccuccucuucuggugua

SEQ ID NO: 1409397 - RNA, 19 nt, Homo sapiens
  misc_RNA (1)...(19): siRNA sense strand
ggagaagagccacuacaag

SEQ ID NO: 1409398 - RNA, 19 nt, Homo sapiens
  misc_RNA (1)...(19): siRNA sense strand
gagaacgagcuggcccuua

SEQ ID NO: 1409399 - RNA, 19 nt, Homo sapiens
  misc_RNA (1)...(19): siRNA sense strand
gaacgagcuggcccuuaug

SEQ ID NO: 1409400 - RNA, 19 nt, Homo sapiens
  misc_RNA (1)...(19): siRNA sense strand
gcagacgaccaucggcuau

SEQ ID NO: 1409401 - RNA, 19 nt, Homo sapiens
  misc_RNA (1)...(19): siRNA sense strand
cgucaucgacuccuucaug

SEQ ID NO: 1409402 - RNA, 19 nt, Homo sapiens
  misc_RNA (1)...(19): siRNA sense strand
caagaagaacggccaaugc

SEQ ID NO: 1409403 - RNA, 19 nt, Homo sapiens
  misc_RNA (1)...(19): siRNA sense strand
gacgaggacagcccgcuuu

SEQ ID NO: 1409404 - RNA, 19 nt, Homo sapiens
  misc_RNA (1)...(19): siRNA sense strand
gcucaucaagcccuacaug

SEQ ID NO: 1409405 - RNA, 19 nt, Homo sapiens
  misc_RNA (1)...(19): siRNA sense strand
gggagcugcaggagaguaa

SEQ ID NO: 1409406 - RNA, 19 nt, Homo sapiens
  misc_RNA (1)...(19): siRNA sense strand
gcuuugagccuguggucuu

SEQ ID NO: 1409407 - RNA, 19 nt, Homo sapiens
  misc_RNA (1)...(19): siRNA sense strand
gagcugcaggagaguaaga

SEQ ID NO: 1409408 - RNA, 19 nt, Homo sapiens
  misc_RNA (1)...(19): siRNA sense strand
gggcgcagacguugcuguu

SEQ ID NO: 1409409 - RNA, 19 nt, Homo sapiens
  misc_RNA (1)...(19): siRNA sense strand
cgcaaccgcuucgucaaga

SEQ ID NO: 1409410 - RNA, 19 nt, Homo sapiens
  misc_RNA (1)...(19): siRNA sense strand
ucaagaagaacggccaaug

SEQ ID NO: 1409411 - RNA, 19 nt, Homo sapiens
  misc_RNA (1)...(19): siRNA sense strand
ucgccaaccugagcaacaa

SEQ ID NO: 1409412 - RNA, 19 nt, Homo sapiens
  misc_RNA (1)...(19): siRNA sense strand
gaggagaagagccacuaca

SEQ ID NO: 1409413 - RNA, 19 nt, Homo sapiens
  misc_RNA (1)...(19): siRNA sense strand
ccaaugcaacguguacuuc

SEQ ID NO: 1409414 - RNA, 19 nt, Homo sapiens
  misc_RNA (1)...(19): siRNA sense strand
gccaaugcaacguguacuu

SEQ ID NO: 1409415 - RNA, 19 nt, Homo sapiens
  misc_RNA (1)...(19): siRNA sense strand
agaagaacggccaaugcaa

SEQ ID NO: 1409416 - RNA, 19 nt, Homo sapiens
  misc_RNA (1)...(19): siRNA sense strand
acuacaagguggacuacuc

SEQ ID NO: 1409417 - RNA, 19 nt, Homo sapiens
  misc_RNA (1)...(19): siRNA sense strand
ggugucgcccaucaucauu

SEQ ID NO: 1409418 - RNA, 19 nt, Homo sapiens
  misc_RNA (1)...(19): siRNA sense strand
caucgugggcugcgucauc

SEQ ID NO: 1409419 - RNA, 19 nt, Homo sapiens
  misc_RNA (1)...(19): siRNA sense strand
aagaagaacggccaaugca

SEQ ID NO: 1409420 - RNA, 19 nt, Homo sapiens
  misc_RNA (1)...(19): siRNA sense strand
ggaaacagcuccagcaguu

SEQ ID NO: 1409421 - RNA, 19 nt, Homo sapiens
  misc_RNA (1)...(19): siRNA sense strand
gaaguugccuguugauaaa

SEQ ID NO: 1409422 - RNA, 19 nt, Homo sapiens
  misc_RNA (1)...(19): siRNA sense strand
gaacaaaucccagauggaa

SEQ ID NO: 1409423 - RNA, 19 nt, Homo sapiens
  misc_RNA (1)...(19): siRNA sense strand
gaggaagagugauucguuu

SEQ ID NO: 1409424 - RNA, 19 nt, Homo sapiens
  misc_RNA (1)...(19): siRNA sense strand
gauggaauguguauugaug

SEQ ID NO: 1409425 - RNA, 19 nt, Homo sapiens
  misc_RNA (1)...(19): siRNA sense strand
gaagagugauucguuuaga

SEQ ID NO: 1409426 - RNA, 19 nt, Homo sapiens
  misc_RNA (1)...(19): siRNA sense strand
gaaagaacaaucagcaguu

SEQ ID NO: 1409427 - RNA, 19 nt, Homo sapiens
  misc_RNA (1)...(19): siRNA sense strand
gggaagaauuacucugaaa

SEQ ID NO: 1409428 - RNA, 19 nt, Homo sapiens
  misc_RNA (1)...(19): siRNA sense strand
ggaaaagacuucaaacugu

SEQ ID NO: 1409429 - RNA, 19 nt, Homo sapiens
  misc_RNA (1)...(19): siRNA sense strand
gaagaauuacucugaaaug

SEQ ID NO: 1409430 - RNA, 19 nt, Homo sapiens
  misc_RNA (1)...(19): siRNA sense strand
gaacuggaaagaacaauca

SEQ ID NO: 1409431 - RNA, 19 nt, Homo sapiens
  misc_RNA (1)...(19): siRNA sense strand
ccauuaagauugagugugu

SEQ ID NO: 1409432 - RNA, 19 nt, Homo sapiens
  misc_RNA (1)...(19): siRNA sense strand
ugaaguugccuguugauaa

SEQ ID NO: 1409433 - RNA, 19 nt, Homo sapiens
  misc_RNA (1)...(19): siRNA sense strand
aacaaucgcuucaaugaug

SEQ ID NO: 1409434 - RNA, 19 nt, Homo sapiens
  misc_RNA (1)...(19): siRNA sense strand
gaauugcucccuacuccua

SEQ ID NO: 1409435 - RNA, 19 nt, Homo sapiens
  misc_RNA (1)...(19): siRNA sense strand
gcagaaguguuuacaagcu

SEQ ID NO: 1409436 - RNA, 19 nt, Homo sapiens
  misc_RNA (1)...(19): siRNA sense strand
gagggaagaauuacucuga

SEQ ID NO: 1409437 - RNA, 19 nt, Homo sapiens
  misc_RNA (1)...(19): siRNA sense strand
ggaggaagagugauucguu

SEQ ID NO: 1409438 - RNA, 19 nt, Homo sapiens
  misc_RNA (1)...(19): siRNA sense strand
gaagaacaaaucccagaug

SEQ ID NO: 1409439 - RNA, 19 nt, Homo sapiens
  misc_RNA (1)...(19): siRNA sense strand
ccaacucucugcucuuugu

SEQ ID NO: 1409440 - RNA, 19 nt, Homo sapiens
  misc_RNA (1)...(19): siRNA sense strand
ccagauggaauguguauug

SEQ ID NO: 1409441 - RNA, 19 nt, Homo sapiens
  misc_RNA (1)...(19): siRNA sense strand
cagaaguguuuacaagcua

SEQ ID NO: 1409442 - RNA, 19 nt, Homo sapiens
  misc_RNA (1)...(19): siRNA sense strand
guccaacucucugcucuuu

SEQ ID NO: 1409443 - RNA, 19 nt, Homo sapiens
  misc_RNA (1)...(19): siRNA sense strand
aaagaacaaucagcaguug

SEQ ID NO: 1409444 - RNA, 19 nt, Homo sapiens
  misc_RNA (1)...(19): siRNA sense strand
ggaagaauuacucugaaau

SEQ ID NO: 1409445 - RNA, 19 nt, Homo sapiens
  misc_RNA (1)...(19): siRNA sense strand
ccgcagaaguguuuacaag

SEQ ID NO: 1409446 - RNA, 19 nt, Homo sapiens
  misc_RNA (1)...(19): siRNA sense strand
caccauggcugaggaaaca

SEQ ID NO: 1409447 - RNA, 19 nt, Homo sapiens
  misc_RNA (1)...(19): siRNA sense strand
cagauggaauguguauuga

SEQ ID NO: 1409448 - RNA, 19 nt, Homo sapiens
  misc_RNA (1)...(19): siRNA sense strand
gggaggaaguguccaacuc

SEQ ID NO: 1409449 - RNA, 19 nt, Homo sapiens
  misc_RNA (1)...(19): siRNA sense strand
ggaagagugauucguuuag

SEQ ID NO: 1409450 - RNA, 19 nt, Homo sapiens
  misc_RNA (1)...(19): siRNA sense strand
gcuuuggagggaagaauua

SEQ ID NO: 1409451 - RNA, 19 nt, Homo sapiens
  misc_RNA (1)...(19): siRNA sense strand
uggaugccuuugacuauga

SEQ ID NO: 1409452 - RNA, 19 nt, Homo sapiens
  misc_RNA (1)...(19): siRNA sense strand
gguggaauuuucaagauaa

SEQ ID NO: 1409453 - RNA, 19 nt, Homo sapiens
  misc_RNA (1)...(19): siRNA sense strand
acaaaucccagauggaaug

SEQ ID NO: 1409454 - RNA, 19 nt, Homo sapiens
  misc_RNA (1)...(19): siRNA sense strand
gggauucauucaccaagca

SEQ ID NO: 1409455 - RNA, 19 nt, Homo sapiens
  misc_RNA (1)...(19): siRNA sense strand
caauggaggaagagugauu

SEQ ID NO: 1409456 - RNA, 19 nt, Homo sapiens
  misc_RNA (1)...(19): siRNA sense strand
ggaagaacaaaucccagau

SEQ ID NO: 1409457 - RNA, 19 nt, Homo sapiens
  misc_RNA (1)...(19): siRNA sense strand
acugugaaguugccuguug

SEQ ID NO: 1409458 - RNA, 19 nt, Homo sapiens
  misc_RNA (1)...(19): siRNA sense strand
gaggcuauguugccaccau

SEQ ID NO: 1409459 - RNA, 19 nt, Homo sapiens
  misc_RNA (1)...(19): siRNA sense strand
accugaagcugguggaauu

SEQ ID NO: 1409460 - RNA, 19 nt, Homo sapiens
  misc_RNA (1)...(19): siRNA sense strand
guggaugccuuugacuaug

SEQ ID NO: 1409461 - RNA, 19 nt, Homo sapiens
  misc_RNA (1)...(19): siRNA sense strand
aaucccagauggaaugugu

SEQ ID NO: 1409462 - RNA, 19 nt, Homo sapiens
  misc_RNA (1)...(19): siRNA sense strand
ggaggaaguguccaacucu

SEQ ID NO: 1409463 - RNA, 19 nt, Homo sapiens
  misc_RNA (1)...(19): siRNA sense strand
uggguggccuguuacaaug

SEQ ID NO: 1409464 - RNA, 19 nt, Homo sapiens
  misc_RNA (1)...(19): siRNA sense strand
uacaauggaggaagaguga

SEQ ID NO: 1409465 - RNA, 19 nt, Homo sapiens
  misc_RNA (1)...(19): siRNA sense strand
gcccuguacucccucuuuc

SEQ ID NO: 1409466 - RNA, 19 nt, Homo sapiens
  misc_RNA (1)...(19): siRNA sense strand
aagagugauucguuuagau

SEQ ID NO: 1409467 - RNA, 19 nt, Homo sapiens
  misc_RNA (1)...(19): siRNA sense strand
aggaagagugauucguuua

SEQ ID NO: 1409468 - RNA, 19 nt, Homo sapiens
  misc_RNA (1)...(19): siRNA sense strand
aaaacaaucgcuucaauga

SEQ ID NO: 1409469 - RNA, 19 nt, Homo sapiens
  misc_RNA (1)...(19): siRNA sense strand
agacaggacagaucuccaa

SEQ ID NO: 1409470 - RNA, 19 nt, Homo sapiens
  misc_RNA (1)...(19): siRNA sense strand
ucguuuagauccugugaca

SEQ ID NO: 1409471 - RNA, 19 nt, Homo sapiens
  misc_RNA (1)...(19): siRNA sense strand
uuguagacauuccugcaaa

SEQ ID NO: 1409472 - RNA, 19 nt, Homo sapiens
  misc_RNA (1)...(19): siRNA sense strand
gggaaaagacuucaaacug

SEQ ID NO: 1409473 - RNA, 19 nt, Homo sapiens
  misc_RNA (1)...(19): siRNA sense strand
aaacaaucgcuucaaugau

SEQ ID NO: 1409474 - RNA, 19 nt, Homo sapiens
  misc_RNA (1)...(19): siRNA sense strand
cuacuccuaugcgggauga

SEQ ID NO: 1409475 - RNA, 19 nt, Homo sapiens
  misc_RNA (1)...(19): siRNA sense strand
uguggugagucuccaguau

SEQ ID NO: 1409476 - RNA, 19 nt, Homo sapiens
  misc_RNA (1)...(19): siRNA sense strand
gguggccuguuacaaugga

SEQ ID NO: 1409477 - RNA, 19 nt, Homo sapiens
  misc_RNA (1)...(19): siRNA sense strand
gugaaguugccuguugaua

SEQ ID NO: 1409478 - RNA, 19 nt, Homo sapiens
  misc_RNA (1)...(19): siRNA sense strand
agggaagaauuacucugaa

SEQ ID NO: 1409479 - RNA, 19 nt, Homo sapiens
  misc_RNA (1)...(19): siRNA sense strand
gguggauaacgacaagaaa

SEQ ID NO: 1409480 - RNA, 19 nt, Homo sapiens
  misc_RNA (1)...(19): siRNA sense strand
acaacuucaugcugcuuug

SEQ ID NO: 1409481 - RNA, 19 nt, Homo sapiens
  misc_RNA (1)...(19): siRNA sense strand
uccaaccgcagaaguguuu

SEQ ID NO: 1409482 - RNA, 19 nt, Homo sapiens
  misc_RNA (1)...(19): siRNA sense strand
gaaacagcuccagcaguuc

SEQ ID NO: 1409483 - RNA, 19 nt, Homo sapiens
  misc_RNA (1)...(19): siRNA sense strand
ucucugcucuuuguagaca

SEQ ID NO: 1409484 - RNA, 19 nt, Homo sapiens
  misc_RNA (1)...(19): siRNA sense strand
aaacagcuccagcaguucu

SEQ ID NO: 1409485 - RNA, 19 nt, Homo sapiens
  misc_RNA (1)...(19): siRNA sense strand
gaaguguuuacaagcuaga

SEQ ID NO: 1409486 - RNA, 19 nt, Homo sapiens
  misc_RNA (1)...(19): siRNA sense strand
cguggaugccuuugacuau

SEQ ID NO: 1409487 - RNA, 19 nt, Homo sapiens
  misc_RNA (1)...(19): siRNA sense strand
ggcccuguacucccucuuu

SEQ ID NO: 1409488 - RNA, 19 nt, Homo sapiens
  misc_RNA (1)...(19): siRNA sense strand
aagcaaguacagcgaguga

SEQ ID NO: 1409489 - RNA, 19 nt, Homo sapiens
  misc_RNA (1)...(19): siRNA sense strand
cugugaaguugccuguuga

SEQ ID NO: 1409490 - RNA, 19 nt, Homo sapiens
  misc_RNA (1)...(19): siRNA sense strand
acucucugcucuuuguaga

SEQ ID NO: 1409491 - RNA, 19 nt, Homo sapiens
  misc_RNA (1)...(19): siRNA sense strand
ggaaacagcuccagcaguu

SEQ ID NO: 1409492 - RNA, 19 nt, Homo sapiens
  misc_RNA (1)...(19): siRNA sense strand
gaaguugccuguugauaaa

SEQ ID NO: 1409493 - RNA, 19 nt, Homo sapiens
  misc_RNA (1)...(19): siRNA sense strand
gaacaaaucccagauggaa

SEQ ID NO: 1409494 - RNA, 19 nt, Homo sapiens
  misc_RNA (1)...(19): siRNA sense strand
gaggaagagugauucguuu

SEQ ID NO: 1409495 - RNA, 19 nt, Homo sapiens
  misc_RNA (1)...(19): siRNA sense strand
gauggaauguguauugaug

SEQ ID NO: 1409496 - RNA, 19 nt, Homo sapiens
  misc_RNA (1)...(19): siRNA sense strand
gaagagugauucguuuaga

SEQ ID NO: 1409497 - RNA, 19 nt, Homo sapiens
  misc_RNA (1)...(19): siRNA sense strand
gaaagaacaaucagcaguu

SEQ ID NO: 1409498 - RNA, 19 nt, Homo sapiens
  misc_RNA (1)...(19): siRNA sense strand
gggaagaauuacucugaaa

SEQ ID NO: 1409499 - RNA, 19 nt, Homo sapiens
  misc_RNA (1)...(19): siRNA sense strand
ggaaaagacuucaaacugu

SEQ ID NO: 1409500 - RNA, 19 nt, Homo sapiens
  misc_RNA (1)...(19): siRNA sense strand
gaagaauuacucugaaaug

SEQ ID NO: 1409501 - RNA, 19 nt, Homo sapiens
  misc_RNA (1)...(19): siRNA sense strand
gaacuggaaagaacaauca

SEQ ID NO: 1409502 - RNA, 19 nt, Homo sapiens
  misc_RNA (1)...(19): siRNA sense strand
ccauuaagauugagugugu

SEQ ID NO: 1409503 - RNA, 19 nt, Homo sapiens
  misc_RNA (1)...(19): siRNA sense strand
ugaaguugccuguugauaa

SEQ ID NO: 1409504 - RNA, 19 nt, Homo sapiens
  misc_RNA (1)...(19): siRNA sense strand
aacaaucgcuucaaugaug

SEQ ID NO: 1409505 - RNA, 19 nt, Homo sapiens
  misc_RNA (1)...(19): siRNA sense strand
gaauugcucccuacuccua

SEQ ID NO: 1409506 - RNA, 19 nt, Homo sapiens
  misc_RNA (1)...(19): siRNA sense strand
gcagaaguguuuacaagcu

SEQ ID NO: 1409507 - RNA, 19 nt, Homo sapiens
  misc_RNA (1)...(19): siRNA sense strand
gagggaagaauuacucuga

SEQ ID NO: 1409508 - RNA, 19 nt, Homo sapiens
  misc_RNA (1)...(19): siRNA sense strand
ggaggaagagugauucguu

SEQ ID NO: 1409509 - RNA, 19 nt, Homo sapiens
  misc_RNA (1)...(19): siRNA sense strand
gaagaacaaaucccagaug

SEQ ID NO: 1409510 - RNA, 19 nt, Homo sapiens
  misc_RNA (1)...(19): siRNA sense strand
ccaacucucugcucuuugu

SEQ ID NO: 1409511 - RNA, 19 nt, Homo sapiens
  misc_RNA (1)...(19): siRNA sense strand
ccagauggaauguguauug

SEQ ID NO: 1409512 - RNA, 19 nt, Homo sapiens
  misc_RNA (1)...(19): siRNA sense strand
cagaaguguuuacaagcua

SEQ ID NO: 1409513 - RNA, 19 nt, Homo sapiens
  misc_RNA (1)...(19): siRNA sense strand
guccaacucucugcucuuu

SEQ ID NO: 1409514 - RNA, 19 nt, Homo sapiens
  misc_RNA (1)...(19): siRNA sense strand
aaagaacaaucagcaguug

SEQ ID NO: 1409515 - RNA, 19 nt, Homo sapiens
  misc_RNA (1)...(19): siRNA sense strand
ggaagaauuacucugaaau

SEQ ID NO: 1409516 - RNA, 19 nt, Homo sapiens
  misc_RNA (1)...(19): siRNA sense strand
ccgcagaaguguuuacaag

SEQ ID NO: 1409517 - RNA, 19 nt, Homo sapiens
  misc_RNA (1)...(19): siRNA sense strand
caccauggcugaggaaaca

SEQ ID NO: 1409518 - RNA, 19 nt, Homo sapiens
  misc_RNA (1)...(19): siRNA sense strand
cagauggaauguguauuga

SEQ ID NO: 1409519 - RNA, 19 nt, Homo sapiens
  misc_RNA (1)...(19): siRNA sense strand
gggaggaaguguccaacuc

SEQ ID NO: 1409520 - RNA, 19 nt, Homo sapiens
  misc_RNA (1)...(19): siRNA sense strand
ggaagagugauucguuuag

SEQ ID NO: 1409521 - RNA, 19 nt, Homo sapiens
  misc_RNA (1)...(19): siRNA sense strand
gcuuuggagggaagaauua

SEQ ID NO: 1409522 - RNA, 19 nt, Homo sapiens
  misc_RNA (1)...(19): siRNA sense strand
uggaugccuuugacuauga

SEQ ID NO: 1409523 - RNA, 19 nt, Homo sapiens
  misc_RNA (1)...(19): siRNA sense strand
gguggaauuuucaagauaa

SEQ ID NO: 1409524 - RNA, 19 nt, Homo sapiens
  misc_RNA (1)...(19): siRNA sense strand
acaaaucccagauggaaug

SEQ ID NO: 1409525 - RNA, 19 nt, Homo sapiens
  misc_RNA (1)...(19): siRNA sense strand
gggauucauucaccaagca

SEQ ID NO: 1409526 - RNA, 19 nt, Homo sapiens
  misc_RNA (1)...(19): siRNA sense strand
caauggaggaagagugauu

SEQ ID NO: 1409527 - RNA, 19 nt, Homo sapiens
  misc_RNA (1)...(19): siRNA sense strand
ggaagaacaaaucccagau

SEQ ID NO: 1409528 - RNA, 19 nt, Homo sapiens
  misc_RNA (1)...(19): siRNA sense strand
acugugaaguugccuguug

SEQ ID NO: 1409529 - RNA, 19 nt, Homo sapiens
  misc_RNA (1)...(19): siRNA sense strand
gaggcuauguugccaccau

SEQ ID NO: 1409530 - RNA, 19 nt, Homo sapiens
  misc_RNA (1)...(19): siRNA sense strand
accugaagcugguggaauu

SEQ ID NO: 1409531 - RNA, 19 nt, Homo sapiens
  misc_RNA (1)...(19): siRNA sense strand
guggaugccuuugacuaug

SEQ ID NO: 1409532 - RNA, 19 nt, Homo sapiens
  misc_RNA (1)...(19): siRNA sense strand
aaucccagauggaaugugu

SEQ ID NO: 1409533 - RNA, 19 nt, Homo sapiens
  misc_RNA (1)...(19): siRNA sense strand
ggaggaaguguccaacucu

SEQ ID NO: 1409534 - RNA, 19 nt, Homo sapiens
  misc_RNA (1)...(19): siRNA sense strand
uggguggccuguuacaaug

SEQ ID NO: 1409535 - RNA, 19 nt, Homo sapiens
  misc_RNA (1)...(19): siRNA sense strand
uacaauggaggaagaguga

SEQ ID NO: 1409536 - RNA, 19 nt, Homo sapiens
  misc_RNA (1)...(19): siRNA sense strand
gcccuguacucccucuuuc

SEQ ID NO: 1409537 - RNA, 19 nt, Homo sapiens
  misc_RNA (1)...(19): siRNA sense strand
aagagugauucguuuagau

SEQ ID NO: 1409538 - RNA, 19 nt, Homo sapiens
  misc_RNA (1)...(19): siRNA sense strand
aggaagagugauucguuua

SEQ ID NO: 1409539 - RNA, 19 nt, Homo sapiens
  misc_RNA (1)...(19): siRNA sense strand
aaaacaaucgcuucaauga

SEQ ID NO: 1409540 - RNA, 19 nt, Homo sapiens
  misc_RNA (1)...(19): siRNA sense strand
agacaggacagaucuccaa

SEQ ID NO: 1409541 - RNA, 19 nt, Homo sapiens
  misc_RNA (1)...(19): siRNA sense strand
ucguuuagauccugugaca

SEQ ID NO: 1409542 - RNA, 19 nt, Homo sapiens
  misc_RNA (1)...(19): siRNA sense strand
uuguagacauuccugcaaa

SEQ ID NO: 1409543 - RNA, 19 nt, Homo sapiens
  misc_RNA (1)...(19): siRNA sense strand
gggaaaagacuucaaacug

SEQ ID NO: 1409544 - RNA, 19 nt, Homo sapiens
  misc_RNA (1)...(19): siRNA sense strand
aaacaaucgcuucaaugau

SEQ ID NO: 1409545 - RNA, 19 nt, Homo sapiens
  misc_RNA (1)...(19): siRNA sense strand
cuacuccuaugcgggauga

SEQ ID NO: 1409546 - RNA, 19 nt, Homo sapiens
  misc_RNA (1)...(19): siRNA sense strand
uguggugagucuccaguau

SEQ ID NO: 1409547 - RNA, 19 nt, Homo sapiens
  misc_RNA (1)...(19): siRNA sense strand
gguggccuguuacaaugga

SEQ ID NO: 1409548 - RNA, 19 nt, Homo sapiens
  misc_RNA (1)...(19): siRNA sense strand
gugaaguugccuguugaua

SEQ ID NO: 1409549 - RNA, 19 nt, Homo sapiens
  misc_RNA (1)...(19): siRNA sense strand
agggaagaauuacucugaa

SEQ ID NO: 1409550 - RNA, 19 nt, Homo sapiens
  misc_RNA (1)...(19): siRNA sense strand
gguggauaacgacaagaaa

SEQ ID NO: 1409551 - RNA, 19 nt, Homo sapiens
  misc_RNA (1)...(19): siRNA sense strand
acaacuucaugcugcuuug

SEQ ID NO: 1409552 - RNA, 19 nt, Homo sapiens
  misc_RNA (1)...(19): siRNA sense strand
uccaaccgcagaaguguuu

SEQ ID NO: 1409553 - RNA, 19 nt, Homo sapiens
  misc_RNA (1)...(19): siRNA sense strand
gaaacagcuccagcaguuc

SEQ ID NO: 1409554 - RNA, 19 nt, Homo sapiens
  misc_RNA (1)...(19): siRNA sense strand
ucucugcucuuuguagaca

SEQ ID NO: 1409555 - RNA, 19 nt, Homo sapiens
  misc_RNA (1)...(19): siRNA sense strand
aaacagcuccagcaguucu

SEQ ID NO: 1409556 - RNA, 19 nt, Homo sapiens
  misc_RNA (1)...(19): siRNA sense strand
gaaguguuuacaagcuaga

SEQ ID NO: 1409557 - RNA, 19 nt, Homo sapiens
  misc_RNA (1)...(19): siRNA sense strand
cguggaugccuuugacuau

SEQ ID NO: 1409558 - RNA, 19 nt, Homo sapiens
  misc_RNA (1)...(19): siRNA sense strand
ggcccuguacucccucuuu

SEQ ID NO: 1409559 - RNA, 19 nt, Homo sapiens
  misc_RNA (1)...(19): siRNA sense strand
aagcaaguacagcgaguga

SEQ ID NO: 1409560 - RNA, 19 nt, Homo sapiens
  misc_RNA (1)...(19): siRNA sense strand
cugugaaguugccuguuga

SEQ ID NO: 1409561 - RNA, 19 nt, Homo sapiens
  misc_RNA (1)...(19): siRNA sense strand
acucucugcucuuuguaga

SEQ ID NO: 1409562 - RNA, 19 nt, Homo sapiens
  misc_RNA (1)...(19): siRNA sense strand
cuaccaggcugucguguuu

SEQ ID NO: 1409563 - RNA, 19 nt, Homo sapiens
  misc_RNA (1)...(19): siRNA sense strand
gcaguagccaggauacaua

SEQ ID NO: 1409564 - RNA, 19 nt, Homo sapiens
  misc_RNA (1)...(19): siRNA sense strand
cagcaauacugaagaucua

SEQ ID NO: 1409565 - RNA, 19 nt, Homo sapiens
  misc_RNA (1)...(19): siRNA sense strand
gagccacacuguuccauca

SEQ ID NO: 1409566 - RNA, 19 nt, Homo sapiens
  misc_RNA (1)...(19): siRNA sense strand
gcugggcucugccaacuug

SEQ ID NO: 1409567 - RNA, 19 nt, Homo sapiens
  misc_RNA (1)...(19): siRNA sense strand
ggauaucaagacuguguua

SEQ ID NO: 1409568 - RNA, 19 nt, Homo sapiens
  misc_RNA (1)...(19): siRNA sense strand
ggauacuggugcugaauca

SEQ ID NO: 1409569 - RNA, 19 nt, Homo sapiens
  misc_RNA (1)...(19): siRNA sense strand
gaggccagcuccugcuaga

SEQ ID NO: 1409570 - RNA, 19 nt, Homo sapiens
  misc_RNA (1)...(19): siRNA sense strand
guacaauccgccaguuuga

SEQ ID NO: 1409571 - RNA, 19 nt, Homo sapiens
  misc_RNA (1)...(19): siRNA sense strand
ucaacucacugcucuucaa

SEQ ID NO: 1409572 - RNA, 19 nt, Homo sapiens
  misc_RNA (1)...(19): siRNA sense strand
gagggauacuggugcugaa

SEQ ID NO: 1409573 - RNA, 19 nt, Homo sapiens
  misc_RNA (1)...(19): siRNA sense strand
gcagcaagcccuagaacca

SEQ ID NO: 1409574 - RNA, 19 nt, Homo sapiens
  misc_RNA (1)...(19): siRNA sense strand
gcaccuaguuaaccaagcu

SEQ ID NO: 1409575 - RNA, 19 nt, Homo sapiens
  misc_RNA (1)...(19): siRNA sense strand
acccaacgcugugguguuu

SEQ ID NO: 1409576 - RNA, 19 nt, Homo sapiens
  misc_RNA (1)...(19): siRNA sense strand
aagacuguguuaccuacua

SEQ ID NO: 1409577 - RNA, 19 nt, Homo sapiens
  misc_RNA (1)...(19): siRNA sense strand
acucacugcucuucaauca

SEQ ID NO: 1409578 - RNA, 19 nt, Homo sapiens
  misc_RNA (1)...(19): siRNA sense strand
cugaagaucuagagacagu

SEQ ID NO: 1409579 - RNA, 19 nt, Homo sapiens
  misc_RNA (1)...(19): siRNA sense strand
ccaagacccugauccuacu

SEQ ID NO: 1409580 - RNA, 19 nt, Homo sapiens
  misc_RNA (1)...(19): siRNA sense strand
caccuucucucugcucuug

SEQ ID NO: 1409581 - RNA, 19 nt, Homo sapiens
  misc_RNA (1)...(19): siRNA sense strand
caaagcagcaagcccuaga

SEQ ID NO: 1409582 - RNA, 19 nt, Homo sapiens
  misc_RNA (1)...(19): siRNA sense strand
caucuguggccuuuggaua

SEQ ID NO: 1409583 - RNA, 19 nt, Homo sapiens
  misc_RNA (1)...(19): siRNA sense strand
gggcagacaccuucucucu

SEQ ID NO: 1409584 - RNA, 19 nt, Homo sapiens
  misc_RNA (1)...(19): siRNA sense strand
ccucagggcucucuuaccu

SEQ ID NO: 1409585 - RNA, 19 nt, Homo sapiens
  misc_RNA (1)...(19): siRNA sense strand
uacaaagcaucuuccaagu

SEQ ID NO: 1409586 - RNA, 19 nt, Homo sapiens
  misc_RNA (1)...(19): siRNA sense strand
ugaccucagggcucucuua

SEQ ID NO: 1409587 - RNA, 19 nt, Homo sapiens
  misc_RNA (1)...(19): siRNA sense strand
gcacugacucugucugcau

SEQ ID NO: 1409588 - RNA, 19 nt, Homo sapiens
  misc_RNA (1)...(19): siRNA sense strand
gcaauacugaagaucuaga

SEQ ID NO: 1409589 - RNA, 19 nt, Homo sapiens
  misc_RNA (1)...(19): siRNA sense strand
ucucugcucuuggcucuug

SEQ ID NO: 1409590 - RNA, 19 nt, Homo sapiens
  misc_RNA (1)...(19): siRNA sense strand
cgucugugcccuucccaua

SEQ ID NO: 1409591 - RNA, 19 nt, Homo sapiens
  misc_RNA (1)...(19): siRNA sense strand
ccggaucccugugcucuau

SEQ ID NO: 1409592 - RNA, 19 nt, Homo sapiens
  misc_RNA (1)...(19): siRNA sense strand
gacagucgugaaccacaua

SEQ ID NO: 1409593 - RNA, 19 nt, Homo sapiens
  misc_RNA (1)...(19): siRNA sense strand
cagagugacauccuccaaa

SEQ ID NO: 1409594 - RNA, 19 nt, Homo sapiens
  misc_RNA (1)...(19): siRNA sense strand
uguguuaccuacuacaaag

SEQ ID NO: 1409595 - RNA, 19 nt, Homo sapiens
  misc_RNA (1)...(19): siRNA sense strand
agagugacauccuccaaac

SEQ ID NO: 1409596 - RNA, 19 nt, Homo sapiens
  misc_RNA (1)...(19): siRNA sense strand
uacugaagaucuagagaca

SEQ ID NO: 1409597 - RNA, 19 nt, Homo sapiens
  misc_RNA (1)...(19): siRNA sense strand
accaggcugucguguuuaa

SEQ ID NO: 1409598 - RNA, 19 nt, Homo sapiens
  misc_RNA (1)...(19): siRNA sense strand
caacucacugcucuucaau

SEQ ID NO: 1409599 - RNA, 19 nt, Homo sapiens
  misc_RNA (1)...(19): siRNA sense strand
cguacaauccgccaguuug

SEQ ID NO: 1409600 - RNA, 19 nt, Homo sapiens
  misc_RNA (1)...(19): siRNA sense strand
cuacugggcaugugugcuu

SEQ ID NO: 1409601 - RNA, 19 nt, Homo sapiens
  misc_RNA (1)...(19): siRNA sense strand
ccaggauacauacgucuug

SEQ ID NO: 1409602 - RNA, 19 nt, Homo sapiens
  misc_RNA (1)...(19): siRNA sense strand
cuaguuaaccaagcucuga

SEQ ID NO: 1409603 - RNA, 19 nt, Homo sapiens
  misc_RNA (1)...(19): siRNA sense strand
gcaccugggcagacaccuu

SEQ ID NO: 1409604 - RNA, 19 nt, Homo sapiens
  misc_RNA (1)...(19): siRNA sense strand
ugagccgccucuugcauca

SEQ ID NO: 1409605 - RNA, 19 nt, Homo sapiens
  misc_RNA (1)...(19): siRNA sense strand
uagagacagucgugaacca

SEQ ID NO: 1409606 - RNA, 19 nt, Homo sapiens
  misc_RNA (1)...(19): siRNA sense strand
ggaucccugugcucuaucu

SEQ ID NO: 1409607 - RNA, 19 nt, Homo sapiens
  misc_RNA (1)...(19): siRNA sense strand
ccuagaaccaagauagaug

SEQ ID NO: 1409608 - RNA, 19 nt, Homo sapiens
  misc_RNA (1)...(19): siRNA sense strand
gcccuagaaccaagauaga

SEQ ID NO: 1409609 - RNA, 19 nt, Homo sapiens
  misc_RNA (1)...(19): siRNA sense strand
uaucaagacuguguuaccu

SEQ ID NO: 1409610 - RNA, 19 nt, Homo sapiens
  misc_RNA (1)...(19): siRNA sense strand
acaauccgccaguuugaug

SEQ ID NO: 1409611 - RNA, 19 nt, Homo sapiens
  misc_RNA (1)...(19): siRNA sense strand
gcucugccaacuuguggaa

SEQ ID NO: 1409612 - RNA, 19 nt, Homo sapiens
  misc_RNA (1)...(19): siRNA sense strand
cagcaagcccuagaaccaa

SEQ ID NO: 1409613 - RNA, 19 nt, Homo sapiens
  misc_RNA (1)...(19): siRNA sense strand
ccuaguccuuuaucagagu

SEQ ID NO: 1409614 - RNA, 19 nt, Homo sapiens
  misc_RNA (1)...(19): siRNA sense strand
ucugugcccuucccauaca

SEQ ID NO: 1409615 - RNA, 19 nt, Homo sapiens
  misc_RNA (1)...(19): siRNA sense strand
gcaagcccuagaaccaaga

SEQ ID NO: 1409616 - RNA, 19 nt, Homo sapiens
  misc_RNA (1)...(19): siRNA sense strand
cuuuggauaucaagacugu

SEQ ID NO: 1409617 - RNA, 19 nt, Homo sapiens
  misc_RNA (1)...(19): siRNA sense strand
agacagucgugaaccacau

SEQ ID NO: 1409618 - RNA, 19 nt, Homo sapiens
  misc_RNA (1)...(19): siRNA sense strand
ccuacuacccagcccauug

SEQ ID NO: 1409619 - RNA, 19 nt, Homo sapiens
  misc_RNA (1)...(19): siRNA sense strand
cuacuacccagcccauugu

SEQ ID NO: 1409620 - RNA, 19 nt, Homo sapiens
  misc_RNA (1)...(19): siRNA sense strand
gcuaccaggcugucguguu

SEQ ID NO: 1409621 - RNA, 19 nt, Homo sapiens
  misc_RNA (1)...(19): siRNA sense strand
accacucgcucccuggaaa

SEQ ID NO: 1409622 - RNA, 19 nt, Homo sapiens
  misc_RNA (1)...(19): siRNA sense strand
ccagcaauacugaagaucu

SEQ ID NO: 1409623 - RNA, 19 nt, Homo sapiens
  misc_RNA (1)...(19): siRNA sense strand
cuaccaggcugucguguuu

SEQ ID NO: 1409624 - RNA, 19 nt, Homo sapiens
  misc_RNA (1)...(19): siRNA sense strand
gcaguagccaggauacaua

SEQ ID NO: 1409625 - RNA, 19 nt, Homo sapiens
  misc_RNA (1)...(19): siRNA sense strand
cagcaauacugaagaucua

SEQ ID NO: 1409626 - RNA, 19 nt, Homo sapiens
  misc_RNA (1)...(19): siRNA sense strand
gagccacacuguuccauca

SEQ ID NO: 1409627 - RNA, 19 nt, Homo sapiens
  misc_RNA (1)...(19): siRNA sense strand
gcugggcucugccaacuug

SEQ ID NO: 1409628 - RNA, 19 nt, Homo sapiens
  misc_RNA (1)...(19): siRNA sense strand
ggauaucaagacuguguua

SEQ ID NO: 1409629 - RNA, 19 nt, Homo sapiens
  misc_RNA (1)...(19): siRNA sense strand
ggauacuggugcugaauca

SEQ ID NO: 1409630 - RNA, 19 nt, Homo sapiens
  misc_RNA (1)...(19): siRNA sense strand
gaggccagcuccugcuaga

SEQ ID NO: 1409631 - RNA, 19 nt, Homo sapiens
  misc_RNA (1)...(19): siRNA sense strand
guacaauccgccaguuuga

SEQ ID NO: 1409632 - RNA, 19 nt, Homo sapiens
  misc_RNA (1)...(19): siRNA sense strand
ucaacucacugcucuucaa

SEQ ID NO: 1409633 - RNA, 19 nt, Homo sapiens
  misc_RNA (1)...(19): siRNA sense strand
gagggauacuggugcugaa

SEQ ID NO: 1409634 - RNA, 19 nt, Homo sapiens
  misc_RNA (1)...(19): siRNA sense strand
gcagcaagcccuagaacca

SEQ ID NO: 1409635 - RNA, 19 nt, Homo sapiens
  misc_RNA (1)...(19): siRNA sense strand
gcaccuaguuaaccaagcu

SEQ ID NO: 1409636 - RNA, 19 nt, Homo sapiens
  misc_RNA (1)...(19): siRNA sense strand
acccaacgcugugguguuu

SEQ ID NO: 1409637 - RNA, 19 nt, Homo sapiens
  misc_RNA (1)...(19): siRNA sense strand
aagacuguguuaccuacua

SEQ ID NO: 1409638 - RNA, 19 nt, Homo sapiens
  misc_RNA (1)...(19): siRNA sense strand
acucacugcucuucaauca

SEQ ID NO: 1409639 - RNA, 19 nt, Homo sapiens
  misc_RNA (1)...(19): siRNA sense strand
cugaagaucuagagacagu

SEQ ID NO: 1409640 - RNA, 19 nt, Homo sapiens
  misc_RNA (1)...(19): siRNA sense strand
ccaagacccugauccuacu

SEQ ID NO: 1409641 - RNA, 19 nt, Homo sapiens
  misc_RNA (1)...(19): siRNA sense strand
caccuucucucugcucuug

SEQ ID NO: 1409642 - RNA, 19 nt, Homo sapiens
  misc_RNA (1)...(19): siRNA sense strand
caaagcagcaagcccuaga

SEQ ID NO: 1409643 - RNA, 19 nt, Homo sapiens
  misc_RNA (1)...(19): siRNA sense strand
caucuguggccuuuggaua

SEQ ID NO: 1409644 - RNA, 19 nt, Homo sapiens
  misc_RNA (1)...(19): siRNA sense strand
gggcagacaccuucucucu

SEQ ID NO: 1409645 - RNA, 19 nt, Homo sapiens
  misc_RNA (1)...(19): siRNA sense strand
uacaaagcaucuuccaagu

SEQ ID NO: 1409646 - RNA, 19 nt, Homo sapiens
  misc_RNA (1)...(19): siRNA sense strand
gcacugacucugucugcau

SEQ ID NO: 1409647 - RNA, 19 nt, Homo sapiens
  misc_RNA (1)...(19): siRNA sense strand
gcaauacugaagaucuaga

SEQ ID NO: 1409648 - RNA, 19 nt, Homo sapiens
  misc_RNA (1)...(19): siRNA sense strand
ucucugcucuuggcucuug

SEQ ID NO: 1409649 - RNA, 19 nt, Homo sapiens
  misc_RNA (1)...(19): siRNA sense strand
gacagucgugaaccacaua

SEQ ID NO: 1409650 - RNA, 19 nt, Homo sapiens
  misc_RNA (1)...(19): siRNA sense strand
cagagugacauccuccaaa

SEQ ID NO: 1409651 - RNA, 19 nt, Homo sapiens
  misc_RNA (1)...(19): siRNA sense strand
uguguuaccuacuacaaag

SEQ ID NO: 1409652 - RNA, 19 nt, Homo sapiens
  misc_RNA (1)...(19): siRNA sense strand
agagugacauccuccaaac

SEQ ID NO: 1409653 - RNA, 19 nt, Homo sapiens
  misc_RNA (1)...(19): siRNA sense strand
uacugaagaucuagagaca

SEQ ID NO: 1409654 - RNA, 19 nt, Homo sapiens
  misc_RNA (1)...(19): siRNA sense strand
accaggcugucguguuuaa

SEQ ID NO: 1409655 - RNA, 19 nt, Homo sapiens
  misc_RNA (1)...(19): siRNA sense strand
cuacugggcaugugugcuu

SEQ ID NO: 1409656 - RNA, 19 nt, Homo sapiens
  misc_RNA (1)...(19): siRNA sense strand
cguacaauccgccaguuug

SEQ ID NO: 1409657 - RNA, 19 nt, Homo sapiens
  misc_RNA (1)...(19): siRNA sense strand
caacucacugcucuucaau

SEQ ID NO: 1409658 - RNA, 19 nt, Homo sapiens
  misc_RNA (1)...(19): siRNA sense strand
ccaggauacauacgucuug

SEQ ID NO: 1409659 - RNA, 19 nt, Homo sapiens
  misc_RNA (1)...(19): siRNA sense strand
cuaguuaaccaagcucuga

SEQ ID NO: 1409660 - RNA, 19 nt, Homo sapiens
  misc_RNA (1)...(19): siRNA sense strand
gcaccugggcagacaccuu

SEQ ID NO: 1409661 - RNA, 19 nt, Homo sapiens
  misc_RNA (1)...(19): siRNA sense strand
uagagacagucgugaacca

SEQ ID NO: 1409662 - RNA, 19 nt, Homo sapiens
  misc_RNA (1)...(19): siRNA sense strand
uaucaagacuguguuaccu

SEQ ID NO: 1409663 - RNA, 19 nt, Homo sapiens
  misc_RNA (1)...(19): siRNA sense strand
acaauccgccaguuugaug

SEQ ID NO: 1409664 - RNA, 19 nt, Homo sapiens
  misc_RNA (1)...(19): siRNA sense strand
gcucugccaacuuguggaa

SEQ ID NO: 1409665 - RNA, 19 nt, Homo sapiens
  misc_RNA (1)...(19): siRNA sense strand
cagcaagcccuagaaccaa

SEQ ID NO: 1409666 - RNA, 19 nt, Homo sapiens
  misc_RNA (1)...(19): siRNA sense strand
ccuaguccuuuaucagagu

SEQ ID NO: 1409667 - RNA, 19 nt, Homo sapiens
  misc_RNA (1)...(19): siRNA sense strand
gcaagcccuagaaccaaga

SEQ ID NO: 1409668 - RNA, 19 nt, Homo sapiens
  misc_RNA (1)...(19): siRNA sense strand
cuuuggauaucaagacugu

SEQ ID NO: 1409669 - RNA, 19 nt, Homo sapiens
  misc_RNA (1)...(19): siRNA sense strand
agacagucgugaaccacau

SEQ ID NO: 1409670 - RNA, 19 nt, Homo sapiens
  misc_RNA (1)...(19): siRNA sense strand
ccuacuacccagcccauug

SEQ ID NO: 1409671 - RNA, 19 nt, Homo sapiens
  misc_RNA (1)...(19): siRNA sense strand
cuacuacccagcccauugu

SEQ ID NO: 1409672 - RNA, 19 nt, Homo sapiens
  misc_RNA (1)...(19): siRNA sense strand
gcuaccaggcugucguguu

SEQ ID NO: 1409673 - RNA, 19 nt, Homo sapiens
  misc_RNA (1)...(19): siRNA sense strand
accacucgcucccuggaaa

SEQ ID NO: 1409674 - RNA, 19 nt, Homo sapiens
  misc_RNA (1)...(19): siRNA sense strand
ccagcaauacugaagaucu

SEQ ID NO: 1409675 - RNA, 19 nt, Homo sapiens
  misc_RNA (1)...(19): siRNA sense strand
gaaaugaaauccaaagcuu

SEQ ID NO: 1409676 - RNA, 19 nt, Homo sapiens
  misc_RNA (1)...(19): siRNA sense strand
gaaagaauggugucaauga

SEQ ID NO: 1409677 - RNA, 19 nt, Homo sapiens
  misc_RNA (1)...(19): siRNA sense strand
uagaugagaucaagaauga

SEQ ID NO: 1409678 - RNA, 19 nt, Homo sapiens
  misc_RNA (1)...(19): siRNA sense strand
gaaagaagcguaugacaca

SEQ ID NO: 1409679 - RNA, 19 nt, Homo sapiens
  misc_RNA (1)...(19): siRNA sense strand
ucaaggacauuacuaguga

SEQ ID NO: 1409680 - RNA, 19 nt, Homo sapiens
  misc_RNA (1)...(19): siRNA sense strand
gaauugaggaagacuguua

SEQ ID NO: 1409681 - RNA, 19 nt, Homo sapiens
  misc_RNA (1)...(19): siRNA sense strand
gaaagaaagaagcguauga

SEQ ID NO: 1409682 - RNA, 19 nt, Homo sapiens
  misc_RNA (1)...(19): siRNA sense strand
ggacauuacuagugacuca

SEQ ID NO: 1409683 - RNA, 19 nt, Homo sapiens
  misc_RNA (1)...(19): siRNA sense strand
gacacuaagucaaguuaaa

SEQ ID NO: 1409684 - RNA, 19 nt, Homo sapiens
  misc_RNA (1)...(19): siRNA sense strand
gaggaagacuguuacuaca

SEQ ID NO: 1409685 - RNA, 19 nt, Homo sapiens
  misc_RNA (1)...(19): siRNA sense strand
ggcaucaacuucauggaaa

SEQ ID NO: 1409686 - RNA, 19 nt, Homo sapiens
  misc_RNA (1)...(19): siRNA sense strand
ggauuggaauugaggaaga

SEQ ID NO: 1409687 - RNA, 19 nt, Homo sapiens
  misc_RNA (1)...(19): siRNA sense strand
aaagaauggugucaaugaa

SEQ ID NO: 1409688 - RNA, 19 nt, Homo sapiens
  misc_RNA (1)...(19): siRNA sense strand
ugacugacaucaacuccaa

SEQ ID NO: 1409689 - RNA, 19 nt, Homo sapiens
  misc_RNA (1)...(19): siRNA sense strand
gcguaugacacauugauua

SEQ ID NO: 1409690 - RNA, 19 nt, Homo sapiens
  misc_RNA (1)...(19): siRNA sense strand
uggaaggccugcaucauga

SEQ ID NO: 1409691 - RNA, 19 nt, Homo sapiens
  misc_RNA (1)...(19): siRNA sense strand
agacacagcagaacagaaa

SEQ ID NO: 1409692 - RNA, 19 nt, Homo sapiens
  misc_RNA (1)...(19): siRNA sense strand
ccaagugacugacaucaac

SEQ ID NO: 1409693 - RNA, 19 nt, Homo sapiens
  misc_RNA (1)...(19): siRNA sense strand
guaauuggcaucaacuuca

SEQ ID NO: 1409694 - RNA, 19 nt, Homo sapiens
  misc_RNA (1)...(19): siRNA sense strand
uuacgucuguugcuagauu

SEQ ID NO: 1409695 - RNA, 19 nt, Homo sapiens
  misc_RNA (1)...(19): siRNA sense strand
guucaacugcuucguaauu

SEQ ID NO: 1409696 - RNA, 19 nt, Homo sapiens
  misc_RNA (1)...(19): siRNA sense strand
caaaauagaugagaucaag

SEQ ID NO: 1409697 - RNA, 19 nt, Homo sapiens
  misc_RNA (1)...(19): siRNA sense strand
guucuuacgucuguugcua

SEQ ID NO: 1409698 - RNA, 19 nt, Homo sapiens
  misc_RNA (1)...(19): siRNA sense strand
ucaacuucauggaaagaaa

SEQ ID NO: 1409699 - RNA, 19 nt, Homo sapiens
  misc_RNA (1)...(19): siRNA sense strand
agaagcguaugacacauug

SEQ ID NO: 1409700 - RNA, 19 nt, Homo sapiens
  misc_RNA (1)...(19): siRNA sense strand
gcuggagucaugacacuaa

SEQ ID NO: 1409701 - RNA, 19 nt, Homo sapiens
  misc_RNA (1)...(19): siRNA sense strand
gaugagaucaagaaugaca

SEQ ID NO: 1409702 - RNA, 19 nt, Homo sapiens
  misc_RNA (1)...(19): siRNA sense strand
ucgaaagaauggugucaau

SEQ ID NO: 1409703 - RNA, 19 nt, Homo sapiens
  misc_RNA (1)...(19): siRNA sense strand
cguaugacacauugauuaa

SEQ ID NO: 1409704 - RNA, 19 nt, Homo sapiens
  misc_RNA (1)...(19): siRNA sense strand
cagagaaaauucagacuau

SEQ ID NO: 1409705 - RNA, 19 nt, Homo sapiens
  misc_RNA (1)...(19): siRNA sense strand
gcaucaacuucauggaaag

SEQ ID NO: 1409706 - RNA, 19 nt, Homo sapiens
  misc_RNA (1)...(19): siRNA sense strand
ugaggaagacuguuacuac

SEQ ID NO: 1409707 - RNA, 19 nt, Homo sapiens
  misc_RNA (1)...(19): siRNA sense strand
ggaaagaaagaagcguaug

SEQ ID NO: 1409708 - RNA, 19 nt, Homo sapiens
  misc_RNA (1)...(19): siRNA sense strand
cacuauugcuggagucaug

SEQ ID NO: 1409709 - RNA, 19 nt, Homo sapiens
  misc_RNA (1)...(19): siRNA sense strand
gcagagaaaauucagacua

SEQ ID NO: 1409710 - RNA, 19 nt, Homo sapiens
  misc_RNA (1)...(19): siRNA sense strand
ggccaauucugccauaagc

SEQ ID NO: 1409711 - RNA, 19 nt, Homo sapiens
  misc_RNA (1)...(19): siRNA sense strand
uaauuggcaucaacuucau

SEQ ID NO: 1409712 - RNA, 19 nt, Homo sapiens
  misc_RNA (1)...(19): siRNA sense strand
aacauggaaucaucaagga

SEQ ID NO: 1409713 - RNA, 19 nt, Homo sapiens
  misc_RNA (1)...(19): siRNA sense strand
caucaacuccaagggauug

SEQ ID NO: 1409714 - RNA, 19 nt, Homo sapiens
  misc_RNA (1)...(19): siRNA sense strand
uacgucuguugcuagauua

SEQ ID NO: 1409715 - RNA, 19 nt, Homo sapiens
  misc_RNA (1)...(19): siRNA sense strand
ggagucaugacacuaaguc

SEQ ID NO: 1409716 - RNA, 19 nt, Homo sapiens
  misc_RNA (1)...(19): siRNA sense strand
cauggaaucaucaaggaau

SEQ ID NO: 1409717 - RNA, 19 nt, Homo sapiens
  misc_RNA (1)...(19): siRNA sense strand
cgaaagaauggugucaaug

SEQ ID NO: 1409718 - RNA, 19 nt, Homo sapiens
  misc_RNA (1)...(19): siRNA sense strand
gcaacaccaagugcaaaga

SEQ ID NO: 1409719 - RNA, 19 nt, Homo sapiens
  misc_RNA (1)...(19): siRNA sense strand
caacaccaagugcaaagag

SEQ ID NO: 1409720 - RNA, 19 nt, Homo sapiens
  misc_RNA (1)...(19): siRNA sense strand
gagaaaauucagacuauca

SEQ ID NO: 1409721 - RNA, 19 nt, Homo sapiens
  misc_RNA (1)...(19): siRNA sense strand
aagaagcguaugacacauu

SEQ ID NO: 1409722 - RNA, 19 nt, Homo sapiens
  misc_RNA (1)...(19): siRNA sense strand
caagacacagcagaacaga

SEQ ID NO: 1409723 - RNA, 19 nt, Homo sapiens
  misc_RNA (1)...(19): siRNA sense strand
ccuccuaccucugguucuu

SEQ ID NO: 1409724 - RNA, 19 nt, Homo sapiens
  misc_RNA (1)...(19): siRNA sense strand
caacuucauggaaagaaag

SEQ ID NO: 1409725 - RNA, 19 nt, Homo sapiens
  misc_RNA (1)...(19): siRNA sense strand
gcuagauuaucguccaaaa

SEQ ID NO: 1409726 - RNA, 19 nt, Homo sapiens
  misc_RNA (1)...(19): siRNA sense strand
uggcaucaacuucauggaa

SEQ ID NO: 1409727 - RNA, 19 nt, Homo sapiens
  misc_RNA (1)...(19): siRNA sense strand
cagcaacaccaagugcaaa

SEQ ID NO: 1409728 - RNA, 19 nt, Homo sapiens
  misc_RNA (1)...(19): siRNA sense strand
ucaacugcuucguaauugg

SEQ ID NO: 1409729 - RNA, 19 nt, Homo sapiens
  misc_RNA (1)...(19): siRNA sense strand
caaugaagccaaaauagau

SEQ ID NO: 1409730 - RNA, 19 nt, Homo sapiens
  misc_RNA (1)...(19): siRNA sense strand
uuaaugcccaagugacuga

SEQ ID NO: 1409731 - RNA, 19 nt, Homo sapiens
  misc_RNA (1)...(19): siRNA sense strand
ggaaggccugcaucaugau

SEQ ID NO: 1409732 - RNA, 19 nt, Homo sapiens
  misc_RNA (1)...(19): siRNA sense strand
cauuacuagugacucagaa

SEQ ID NO: 1409733 - RNA, 19 nt, Homo sapiens
  misc_RNA (1)...(19): siRNA sense strand
uucaacugcuucguaauug

SEQ ID NO: 1409734 - RNA, 19 nt, Homo sapiens
  misc_RNA (1)...(19): siRNA sense strand
aaugcacacucaccagcaa

SEQ ID NO: 1409735 - RNA, 19 nt, Homo sapiens
  misc_RNA (1)...(19): siRNA sense strand
ucagaaaugaaauccaaag

SEQ ID NO: 1409736 - RNA, 19 nt, Homo sapiens
  misc_RNA (1)...(19): siRNA sense strand
ccagcaacaccaagugcaa

SEQ ID NO: 1409737 - RNA, 19 nt, Homo sapiens
  misc_RNA (1)...(19): siRNA sense strand
gaaaugaaauccaaagcuu

SEQ ID NO: 1409738 - RNA, 19 nt, Homo sapiens
  misc_RNA (1)...(19): siRNA sense strand
gaaagaauggugucaauga

SEQ ID NO: 1409739 - RNA, 19 nt, Homo sapiens
  misc_RNA (1)...(19): siRNA sense strand
uagaugagaucaagaauga

SEQ ID NO: 1409740 - RNA, 19 nt, Homo sapiens
  misc_RNA (1)...(19): siRNA sense strand
gaaagaagcguaugacaca

SEQ ID NO: 1409741 - RNA, 19 nt, Homo sapiens
  misc_RNA (1)...(19): siRNA sense strand
ucaaggacauuacuaguga

SEQ ID NO: 1409742 - RNA, 19 nt, Homo sapiens
  misc_RNA (1)...(19): siRNA sense strand
gaauugaggaagacuguua

SEQ ID NO: 1409743 - RNA, 19 nt, Homo sapiens
  misc_RNA (1)...(19): siRNA sense strand
gaaagaaagaagcguauga

SEQ ID NO: 1409744 - RNA, 19 nt, Homo sapiens
  misc_RNA (1)...(19): siRNA sense strand
ggacauuacuagugacuca

SEQ ID NO: 1409745 - RNA, 19 nt, Homo sapiens
  misc_RNA (1)...(19): siRNA sense strand
gacacuaagucaaguuaaa

SEQ ID NO: 1409746 - RNA, 19 nt, Homo sapiens
  misc_RNA (1)...(19): siRNA sense strand
gaggaagacuguuacuaca

SEQ ID NO: 1409747 - RNA, 19 nt, Homo sapiens
  misc_RNA (1)...(19): siRNA sense strand
ggcaucaacuucauggaaa

SEQ ID NO: 1409748 - RNA, 19 nt, Homo sapiens
  misc_RNA (1)...(19): siRNA sense strand
ggauuggaauugaggaaga

SEQ ID NO: 1409749 - RNA, 19 nt, Homo sapiens
  misc_RNA (1)...(19): siRNA sense strand
aaagaauggugucaaugaa

SEQ ID NO: 1409750 - RNA, 19 nt, Homo sapiens
  misc_RNA (1)...(19): siRNA sense strand
ugacugacaucaacuccaa

SEQ ID NO: 1409751 - RNA, 19 nt, Homo sapiens
  misc_RNA (1)...(19): siRNA sense strand
gcguaugacacauugauua

SEQ ID NO: 1409752 - RNA, 19 nt, Homo sapiens
  misc_RNA (1)...(19): siRNA sense strand
uggaaggccugcaucauga

SEQ ID NO: 1409753 - RNA, 19 nt, Homo sapiens
  misc_RNA (1)...(19): siRNA sense strand
agacacagcagaacagaaa

SEQ ID NO: 1409754 - RNA, 19 nt, Homo sapiens
  misc_RNA (1)...(19): siRNA sense strand
ccaagugacugacaucaac

SEQ ID NO: 1409755 - RNA, 19 nt, Homo sapiens
  misc_RNA (1)...(19): siRNA sense strand
guaauuggcaucaacuuca

SEQ ID NO: 1409756 - RNA, 19 nt, Homo sapiens
  misc_RNA (1)...(19): siRNA sense strand
uuacgucuguugcuagauu

SEQ ID NO: 1409757 - RNA, 19 nt, Homo sapiens
  misc_RNA (1)...(19): siRNA sense strand
guucaacugcuucguaauu

SEQ ID NO: 1409758 - RNA, 19 nt, Homo sapiens
  misc_RNA (1)...(19): siRNA sense strand
caaaauagaugagaucaag

SEQ ID NO: 1409759 - RNA, 19 nt, Homo sapiens
  misc_RNA (1)...(19): siRNA sense strand
guucuuacgucuguugcua

SEQ ID NO: 1409760 - RNA, 19 nt, Homo sapiens
  misc_RNA (1)...(19): siRNA sense strand
ucaacuucauggaaagaaa

SEQ ID NO: 1409761 - RNA, 19 nt, Homo sapiens
  misc_RNA (1)...(19): siRNA sense strand
agaagcguaugacacauug

SEQ ID NO: 1409762 - RNA, 19 nt, Homo sapiens
  misc_RNA (1)...(19): siRNA sense strand
gcuggagucaugacacuaa

SEQ ID NO: 1409763 - RNA, 19 nt, Homo sapiens
  misc_RNA (1)...(19): siRNA sense strand
gaugagaucaagaaugaca

SEQ ID NO: 1409764 - RNA, 19 nt, Homo sapiens
  misc_RNA (1)...(19): siRNA sense strand
ucgaaagaauggugucaau

SEQ ID NO: 1409765 - RNA, 19 nt, Homo sapiens
  misc_RNA (1)...(19): siRNA sense strand
cguaugacacauugauuaa

SEQ ID NO: 1409766 - RNA, 19 nt, Homo sapiens
  misc_RNA (1)...(19): siRNA sense strand
cagagaaaauucagacuau

SEQ ID NO: 1409767 - RNA, 19 nt, Homo sapiens
  misc_RNA (1)...(19): siRNA sense strand
gcaucaacuucauggaaag

SEQ ID NO: 1409768 - RNA, 19 nt, Homo sapiens
  misc_RNA (1)...(19): siRNA sense strand
ugaggaagacuguuacuac

SEQ ID NO: 1409769 - RNA, 19 nt, Homo sapiens
  misc_RNA (1)...(19): siRNA sense strand
ggaaagaaagaagcguaug

SEQ ID NO: 1409770 - RNA, 19 nt, Homo sapiens
  misc_RNA (1)...(19): siRNA sense strand
cacuauugcuggagucaug

SEQ ID NO: 1409771 - RNA, 19 nt, Homo sapiens
  misc_RNA (1)...(19): siRNA sense strand
gcagagaaaauucagacua

SEQ ID NO: 1409772 - RNA, 19 nt, Homo sapiens
  misc_RNA (1)...(19): siRNA sense strand
ggccaauucugccauaagc

SEQ ID NO: 1409773 - RNA, 19 nt, Homo sapiens
  misc_RNA (1)...(19): siRNA sense strand
uaauuggcaucaacuucau

SEQ ID NO: 1409774 - RNA, 19 nt, Homo sapiens
  misc_RNA (1)...(19): siRNA sense strand
aacauggaaucaucaagga

SEQ ID NO: 1409775 - RNA, 19 nt, Homo sapiens
  misc_RNA (1)...(19): siRNA sense strand
caucaacuccaagggauug

SEQ ID NO: 1409776 - RNA, 19 nt, Homo sapiens
  misc_RNA (1)...(19): siRNA sense strand
uacgucuguugcuagauua

SEQ ID NO: 1409777 - RNA, 19 nt, Homo sapiens
  misc_RNA (1)...(19): siRNA sense strand
ggagucaugacacuaaguc

SEQ ID NO: 1409778 - RNA, 19 nt, Homo sapiens
  misc_RNA (1)...(19): siRNA sense strand
cauggaaucaucaaggaau

SEQ ID NO: 1409779 - RNA, 19 nt, Homo sapiens
  misc_RNA (1)...(19): siRNA sense strand
cgaaagaauggugucaaug

SEQ ID NO: 1409780 - RNA, 19 nt, Homo sapiens
  misc_RNA (1)...(19): siRNA sense strand
gcaacaccaagugcaaaga

SEQ ID NO: 1409781 - RNA, 19 nt, Homo sapiens
  misc_RNA (1)...(19): siRNA sense strand
caacaccaagugcaaagag

SEQ ID NO: 1409782 - RNA, 19 nt, Homo sapiens
  misc_RNA (1)...(19): siRNA sense strand
gagaaaauucagacuauca

SEQ ID NO: 1409783 - RNA, 19 nt, Homo sapiens
  misc_RNA (1)...(19): siRNA sense strand
aagaagcguaugacacauu

SEQ ID NO: 1409784 - RNA, 19 nt, Homo sapiens
  misc_RNA (1)...(19): siRNA sense strand
caagacacagcagaacaga

SEQ ID NO: 1409785 - RNA, 19 nt, Homo sapiens
  misc_RNA (1)...(19): siRNA sense strand
ccuccuaccucugguucuu

SEQ ID NO: 1409786 - RNA, 19 nt, Homo sapiens
  misc_RNA (1)...(19): siRNA sense strand
caacuucauggaaagaaag

SEQ ID NO: 1409787 - RNA, 19 nt, Homo sapiens
  misc_RNA (1)...(19): siRNA sense strand
gcuagauuaucguccaaaa

SEQ ID NO: 1409788 - RNA, 19 nt, Homo sapiens
  misc_RNA (1)...(19): siRNA sense strand
uggcaucaacuucauggaa

SEQ ID NO: 1409789 - RNA, 19 nt, Homo sapiens
  misc_RNA (1)...(19): siRNA sense strand
cagcaacaccaagugcaaa

SEQ ID NO: 1409790 - RNA, 19 nt, Homo sapiens
  misc_RNA (1)...(19): siRNA sense strand
ucaacugcuucguaauugg

SEQ ID NO: 1409791 - RNA, 19 nt, Homo sapiens
  misc_RNA (1)...(19): siRNA sense strand
caaugaagccaaaauagau

SEQ ID NO: 1409792 - RNA, 19 nt, Homo sapiens
  misc_RNA (1)...(19): siRNA sense strand
uuaaugcccaagugacuga

SEQ ID NO: 1409793 - RNA, 19 nt, Homo sapiens
  misc_RNA (1)...(19): siRNA sense strand
ggaaggccugcaucaugau

SEQ ID NO: 1409794 - RNA, 19 nt, Homo sapiens
  misc_RNA (1)...(19): siRNA sense strand
cauuacuagugacucagaa

SEQ ID NO: 1409795 - RNA, 19 nt, Homo sapiens
  misc_RNA (1)...(19): siRNA sense strand
uucaacugcuucguaauug

SEQ ID NO: 1409796 - RNA, 19 nt, Homo sapiens
  misc_RNA (1)...(19): siRNA sense strand
aaugcacacucaccagcaa

SEQ ID NO: 1409797 - RNA, 19 nt, Homo sapiens
  misc_RNA (1)...(19): siRNA sense strand
ucagaaaugaaauccaaag

SEQ ID NO: 1409798 - RNA, 19 nt, Homo sapiens
  misc_RNA (1)...(19): siRNA sense strand
ccagcaacaccaagugcaa

SEQ ID NO: 1409799 - RNA, 19 nt, Homo sapiens
  misc_RNA (1)...(19): siRNA sense strand
gaauugaggaagacuguua

SEQ ID NO: 1409800 - RNA, 19 nt, Homo sapiens
  misc_RNA (1)...(19): siRNA sense strand
gaggaagacuguuacuaca

SEQ ID NO: 1409801 - RNA, 19 nt, Homo sapiens
  misc_RNA (1)...(19): siRNA sense strand
ggauuggaauugaggaaga

SEQ ID NO: 1409802 - RNA, 19 nt, Homo sapiens
  misc_RNA (1)...(19): siRNA sense strand
ugacugacaucaacuccaa

SEQ ID NO: 1409803 - RNA, 19 nt, Homo sapiens
  misc_RNA (1)...(19): siRNA sense strand
uggaaggccugcaucauga

SEQ ID NO: 1409804 - RNA, 19 nt, Homo sapiens
  misc_RNA (1)...(19): siRNA sense strand
uuacgucuguugcuagauu

SEQ ID NO: 1409805 - RNA, 19 nt, Homo sapiens
  misc_RNA (1)...(19): siRNA sense strand
ccaagugacugacaucaac

SEQ ID NO: 1409806 - RNA, 19 nt, Homo sapiens
  misc_RNA (1)...(19): siRNA sense strand
guucuuacgucuguugcua

SEQ ID NO: 1409807 - RNA, 19 nt, Homo sapiens
  misc_RNA (1)...(19): siRNA sense strand
ugaggaagacuguuacuac

SEQ ID NO: 1409808 - RNA, 19 nt, Homo sapiens
  misc_RNA (1)...(19): siRNA sense strand
ggccaauucugccauaagc

SEQ ID NO: 1409809 - RNA, 19 nt, Homo sapiens
  misc_RNA (1)...(19): siRNA sense strand
aacauggaaucaucaagga

SEQ ID NO: 1409810 - RNA, 19 nt, Homo sapiens
  misc_RNA (1)...(19): siRNA sense strand
uacgucuguugcuagauua

SEQ ID NO: 1409811 - RNA, 19 nt, Homo sapiens
  misc_RNA (1)...(19): siRNA sense strand
caucaacuccaagggauug

SEQ ID NO: 1409812 - RNA, 19 nt, Homo sapiens
  misc_RNA (1)...(19): siRNA sense strand
cauggaaucaucaaggaau

SEQ ID NO: 1409813 - RNA, 19 nt, Homo sapiens
  misc_RNA (1)...(19): siRNA sense strand
gcaacaccaagugcaaaga

SEQ ID NO: 1409814 - RNA, 19 nt, Homo sapiens
  misc_RNA (1)...(19): siRNA sense strand
caacaccaagugcaaagag

SEQ ID NO: 1409815 - RNA, 19 nt, Homo sapiens
  misc_RNA (1)...(19): siRNA sense strand
gcuagauuaucguccaaaa

SEQ ID NO: 1409816 - RNA, 19 nt, Homo sapiens
  misc_RNA (1)...(19): siRNA sense strand
ccuccuaccucugguucuu

SEQ ID NO: 1409817 - RNA, 19 nt, Homo sapiens
  misc_RNA (1)...(19): siRNA sense strand
cagcaacaccaagugcaaa

SEQ ID NO: 1409818 - RNA, 19 nt, Homo sapiens
  misc_RNA (1)...(19): siRNA sense strand
uuaaugcccaagugacuga

SEQ ID NO: 1409819 - RNA, 19 nt, Homo sapiens
  misc_RNA (1)...(19): siRNA sense strand
ggaaggccugcaucaugau

SEQ ID NO: 1409820 - RNA, 19 nt, Homo sapiens
  misc_RNA (1)...(19): siRNA sense strand
aaugcacacucaccagcaa

SEQ ID NO: 1409821 - RNA, 19 nt, Homo sapiens
  misc_RNA (1)...(19): siRNA sense strand
ccagcaacaccaagugcaa

SEQ ID NO: 1409822 - RNA, 19 nt, Homo sapiens
  misc_RNA (1)...(19): siRNA sense strand
gaauugaggaagacuguua

SEQ ID NO: 1409823 - RNA, 19 nt, Homo sapiens
  misc_RNA (1)...(19): siRNA sense strand
gaggaagacuguuacuaca

SEQ ID NO: 1409824 - RNA, 19 nt, Homo sapiens
  misc_RNA (1)...(19): siRNA sense strand
ggauuggaauugaggaaga

SEQ ID NO: 1409825 - RNA, 19 nt, Homo sapiens
  misc_RNA (1)...(19): siRNA sense strand
ugacugacaucaacuccaa

SEQ ID NO: 1409826 - RNA, 19 nt, Homo sapiens
  misc_RNA (1)...(19): siRNA sense strand
uggaaggccugcaucauga

SEQ ID NO: 1409827 - RNA, 19 nt, Homo sapiens
  misc_RNA (1)...(19): siRNA sense strand
uuacgucuguugcuagauu

SEQ ID NO: 1409828 - RNA, 19 nt, Homo sapiens
  misc_RNA (1)...(19): siRNA sense strand
ccaagugacugacaucaac

SEQ ID NO: 1409829 - RNA, 19 nt, Homo sapiens
  misc_RNA (1)...(19): siRNA sense strand
guucuuacgucuguugcua

SEQ ID NO: 1409830 - RNA, 19 nt, Homo sapiens
  misc_RNA (1)...(19): siRNA sense strand
ugaggaagacuguuacuac

SEQ ID NO: 1409831 - RNA, 19 nt, Homo sapiens
  misc_RNA (1)...(19): siRNA sense strand
ggccaauucugccauaagc

SEQ ID NO: 1409832 - RNA, 19 nt, Homo sapiens
  misc_RNA (1)...(19): siRNA sense strand
aacauggaaucaucaagga

SEQ ID NO: 1409833 - RNA, 19 nt, Homo sapiens
  misc_RNA (1)...(19): siRNA sense strand
uacgucuguugcuagauua

SEQ ID NO: 1409834 - RNA, 19 nt, Homo sapiens
  misc_RNA (1)...(19): siRNA sense strand
caucaacuccaagggauug

SEQ ID NO: 1409835 - RNA, 19 nt, Homo sapiens
  misc_RNA (1)...(19): siRNA sense strand
cauggaaucaucaaggaau

SEQ ID NO: 1409836 - RNA, 19 nt, Homo sapiens
  misc_RNA (1)...(19): siRNA sense strand
gcaacaccaagugcaaaga

SEQ ID NO: 1409837 - RNA, 19 nt, Homo sapiens
  misc_RNA (1)...(19): siRNA sense strand
caacaccaagugcaaagag

SEQ ID NO: 1409838 - RNA, 19 nt, Homo sapiens
  misc_RNA (1)...(19): siRNA sense strand
gcuagauuaucguccaaaa

SEQ ID NO: 1409839 - RNA, 19 nt, Homo sapiens
  misc_RNA (1)...(19): siRNA sense strand
ccuccuaccucugguucuu

SEQ ID NO: 1409840 - RNA, 19 nt, Homo sapiens
  misc_RNA (1)...(19): siRNA sense strand
cagcaacaccaagugcaaa

SEQ ID NO: 1409841 - RNA, 19 nt, Homo sapiens
  misc_RNA (1)...(19): siRNA sense strand
uuaaugcccaagugacuga

SEQ ID NO: 1409842 - RNA, 19 nt, Homo sapiens
  misc_RNA (1)...(19): siRNA sense strand
ggaaggccugcaucaugau

SEQ ID NO: 1409843 - RNA, 19 nt, Homo sapiens
  misc_RNA (1)...(19): siRNA sense strand
aaugcacacucaccagcaa

SEQ ID NO: 1409844 - RNA, 19 nt, Homo sapiens
  misc_RNA (1)...(19): siRNA sense strand
ccagcaacaccaagugcaa

SEQ ID NO: 1409845 - RNA, 19 nt, Homo sapiens
  misc_RNA (1)...(19): siRNA sense strand
gaauugaggaagacuguua

SEQ ID NO: 1409846 - RNA, 19 nt, Homo sapiens
  misc_RNA (1)...(19): siRNA sense strand
gaggaagacuguuacuaca

SEQ ID NO: 1409847 - RNA, 19 nt, Homo sapiens
  misc_RNA (1)...(19): siRNA sense strand
ggauuggaauugaggaaga

SEQ ID NO: 1409848 - RNA, 19 nt, Homo sapiens
  misc_RNA (1)...(19): siRNA sense strand
ugacugacaucaacuccaa

SEQ ID NO: 1409849 - RNA, 19 nt, Homo sapiens
  misc_RNA (1)...(19): siRNA sense strand
uggaaggccugcaucauga

SEQ ID NO: 1409850 - RNA, 19 nt, Homo sapiens
  misc_RNA (1)...(19): siRNA sense strand
uuacgucuguugcuagauu

SEQ ID NO: 1409851 - RNA, 19 nt, Homo sapiens
  misc_RNA (1)...(19): siRNA sense strand
ccaagugacugacaucaac

SEQ ID NO: 1409852 - RNA, 19 nt, Homo sapiens
  misc_RNA (1)...(19): siRNA sense strand
guucuuacgucuguugcua

SEQ ID NO: 1409853 - RNA, 19 nt, Homo sapiens
  misc_RNA (1)...(19): siRNA sense strand
ugaggaagacuguuacuac

SEQ ID NO: 1409854 - RNA, 19 nt, Homo sapiens
  misc_RNA (1)...(19): siRNA sense strand
ggccaauucugccauaagc

SEQ ID NO: 1409855 - RNA, 19 nt, Homo sapiens
  misc_RNA (1)...(19): siRNA sense strand
aacauggaaucaucaagga

SEQ ID NO: 1409856 - RNA, 19 nt, Homo sapiens
  misc_RNA (1)...(19): siRNA sense strand
uacgucuguugcuagauua

SEQ ID NO: 1409857 - RNA, 19 nt, Homo sapiens
  misc_RNA (1)...(19): siRNA sense strand
caucaacuccaagggauug

SEQ ID NO: 1409858 - RNA, 19 nt, Homo sapiens
  misc_RNA (1)...(19): siRNA sense strand
cauggaaucaucaaggaau

SEQ ID NO: 1409859 - RNA, 19 nt, Homo sapiens
  misc_RNA (1)...(19): siRNA sense strand
gcaacaccaagugcaaaga

SEQ ID NO: 1409860 - RNA, 19 nt, Homo sapiens
  misc_RNA (1)...(19): siRNA sense strand
caacaccaagugcaaagag

SEQ ID NO: 1409861 - RNA, 19 nt, Homo sapiens
  misc_RNA (1)...(19): siRNA sense strand
gcuagauuaucguccaaaa

SEQ ID NO: 1409862 - RNA, 19 nt, Homo sapiens
  misc_RNA (1)...(19): siRNA sense strand
ccuccuaccucugguucuu

SEQ ID NO: 1409863 - RNA, 19 nt, Homo sapiens
  misc_RNA (1)...(19): siRNA sense strand
cagcaacaccaagugcaaa

SEQ ID NO: 1409864 - RNA, 19 nt, Homo sapiens
  misc_RNA (1)...(19): siRNA sense strand
uuaaugcccaagugacuga

SEQ ID NO: 1409865 - RNA, 19 nt, Homo sapiens
  misc_RNA (1)...(19): siRNA sense strand
ggaaggccugcaucaugau

SEQ ID NO: 1409866 - RNA, 19 nt, Homo sapiens
  misc_RNA (1)...(19): siRNA sense strand
aaugcacacucaccagcaa

SEQ ID NO: 1409867 - RNA, 19 nt, Homo sapiens
  misc_RNA (1)...(19): siRNA sense strand
ccagcaacaccaagugcaa

SEQ ID NO: 1409868 - RNA, 19 nt, Homo sapiens
  misc_RNA (1)...(19): siRNA sense strand
gaauugaggaagacuguua

SEQ ID NO: 1409869 - RNA, 19 nt, Homo sapiens
  misc_RNA (1)...(19): siRNA sense strand
gaggaagacuguuacuaca

SEQ ID NO: 1409870 - RNA, 19 nt, Homo sapiens
  misc_RNA (1)...(19): siRNA sense strand
ggauuggaauugaggaaga

SEQ ID NO: 1409871 - RNA, 19 nt, Homo sapiens
  misc_RNA (1)...(19): siRNA sense strand
ugacugacaucaacuccaa

SEQ ID NO: 1409872 - RNA, 19 nt, Homo sapiens
  misc_RNA (1)...(19): siRNA sense strand
uggaaggccugcaucauga

SEQ ID NO: 1409873 - RNA, 19 nt, Homo sapiens
  misc_RNA (1)...(19): siRNA sense strand
uuacgucuguugcuagauu

SEQ ID NO: 1409874 - RNA, 19 nt, Homo sapiens
  misc_RNA (1)...(19): siRNA sense strand
ccaagugacugacaucaac

SEQ ID NO: 1409875 - RNA, 19 nt, Homo sapiens
  misc_RNA (1)...(19): siRNA sense strand
guucuuacgucuguugcua

SEQ ID NO: 1409876 - RNA, 19 nt, Homo sapiens
  misc_RNA (1)...(19): siRNA sense strand
ugaggaagacuguuacuac

SEQ ID NO: 1409877 - RNA, 19 nt, Homo sapiens
  misc_RNA (1)...(19): siRNA sense strand
ggccaauucugccauaagc

SEQ ID NO: 1409878 - RNA, 19 nt, Homo sapiens
  misc_RNA (1)...(19): siRNA sense strand
aacauggaaucaucaagga

SEQ ID NO: 1409879 - RNA, 19 nt, Homo sapiens
  misc_RNA (1)...(19): siRNA sense strand
uacgucuguugcuagauua

SEQ ID NO: 1409880 - RNA, 19 nt, Homo sapiens
  misc_RNA (1)...(19): siRNA sense strand
caucaacuccaagggauug

SEQ ID NO: 1409881 - RNA, 19 nt, Homo sapiens
  misc_RNA (1)...(19): siRNA sense strand
cauggaaucaucaaggaau

SEQ ID NO: 1409882 - RNA, 19 nt, Homo sapiens
  misc_RNA (1)...(19): siRNA sense strand
gcaacaccaagugcaaaga

SEQ ID NO: 1409883 - RNA, 19 nt, Homo sapiens
  misc_RNA (1)...(19): siRNA sense strand
caacaccaagugcaaagag

SEQ ID NO: 1409884 - RNA, 19 nt, Homo sapiens
  misc_RNA (1)...(19): siRNA sense strand
gcuagauuaucguccaaaa

SEQ ID NO: 1409885 - RNA, 19 nt, Homo sapiens
  misc_RNA (1)...(19): siRNA sense strand
ccuccuaccucugguucuu

SEQ ID NO: 1409886 - RNA, 19 nt, Homo sapiens
  misc_RNA (1)...(19): siRNA sense strand
cagcaacaccaagugcaaa

SEQ ID NO: 1409887 - RNA, 19 nt, Homo sapiens
  misc_RNA (1)...(19): siRNA sense strand
uuaaugcccaagugacuga

SEQ ID NO: 1409888 - RNA, 19 nt, Homo sapiens
  misc_RNA (1)...(19): siRNA sense strand
ggaaggccugcaucaugau

SEQ ID NO: 1409889 - RNA, 19 nt, Homo sapiens
  misc_RNA (1)...(19): siRNA sense strand
aaugcacacucaccagcaa

SEQ ID NO: 1409890 - RNA, 19 nt, Homo sapiens
  misc_RNA (1)...(19): siRNA sense strand
ccagcaacaccaagugcaa

SEQ ID NO: 1409891 - RNA, 19 nt, Homo sapiens
  misc_RNA (1)...(19): siRNA sense strand
gaauugaggaagacuguua

SEQ ID NO: 1409892 - RNA, 19 nt, Homo sapiens
  misc_RNA (1)...(19): siRNA sense strand
gaggaagacuguuacuaca

SEQ ID NO: 1409893 - RNA, 19 nt, Homo sapiens
  misc_RNA (1)...(19): siRNA sense strand
ggauuggaauugaggaaga

SEQ ID NO: 1409894 - RNA, 19 nt, Homo sapiens
  misc_RNA (1)...(19): siRNA sense strand
ugacugacaucaacuccaa

SEQ ID NO: 1409895 - RNA, 19 nt, Homo sapiens
  misc_RNA (1)...(19): siRNA sense strand
uggaaggccugcaucauga

SEQ ID NO: 1409896 - RNA, 19 nt, Homo sapiens
  misc_RNA (1)...(19): siRNA sense strand
uuacgucuguugcuagauu

SEQ ID NO: 1409897 - RNA, 19 nt, Homo sapiens
  misc_RNA (1)...(19): siRNA sense strand
ccaagugacugacaucaac

SEQ ID NO: 1409898 - RNA, 19 nt, Homo sapiens
  misc_RNA (1)...(19): siRNA sense strand
guucuuacgucuguugcua

SEQ ID NO: 1409899 - RNA, 19 nt, Homo sapiens
  misc_RNA (1)...(19): siRNA sense strand
ugaggaagacuguuacuac

SEQ ID NO: 1409900 - RNA, 19 nt, Homo sapiens
  misc_RNA (1)...(19): siRNA sense strand
ggccaauucugccauaagc

SEQ ID NO: 1409901 - RNA, 19 nt, Homo sapiens
  misc_RNA (1)...(19): siRNA sense strand
aacauggaaucaucaagga

SEQ ID NO: 1409902 - RNA, 19 nt, Homo sapiens
  misc_RNA (1)...(19): siRNA sense strand
uacgucuguugcuagauua

SEQ ID NO: 1409903 - RNA, 19 nt, Homo sapiens
  misc_RNA (1)...(19): siRNA sense strand
caucaacuccaagggauug

SEQ ID NO: 1409904 - RNA, 19 nt, Homo sapiens
  misc_RNA (1)...(19): siRNA sense strand
cauggaaucaucaaggaau

SEQ ID NO: 1409905 - RNA, 19 nt, Homo sapiens
  misc_RNA (1)...(19): siRNA sense strand
gcaacaccaagugcaaaga

SEQ ID NO: 1409906 - RNA, 19 nt, Homo sapiens
  misc_RNA (1)...(19): siRNA sense strand
caacaccaagugcaaagag

SEQ ID NO: 1409907 - RNA, 19 nt, Homo sapiens
  misc_RNA (1)...(19): siRNA sense strand
gcuagauuaucguccaaaa

SEQ ID NO: 1409908 - RNA, 19 nt, Homo sapiens
  misc_RNA (1)...(19): siRNA sense strand
ccuccuaccucugguucuu

SEQ ID NO: 1409909 - RNA, 19 nt, Homo sapiens
  misc_RNA (1)...(19): siRNA sense strand
cagcaacaccaagugcaaa

SEQ ID NO: 1409910 - RNA, 19 nt, Homo sapiens
  misc_RNA (1)...(19): siRNA sense strand
uuaaugcccaagugacuga

SEQ ID NO: 1409911 - RNA, 19 nt, Homo sapiens
  misc_RNA (1)...(19): siRNA sense strand
ggaaggccugcaucaugau

SEQ ID NO: 1409912 - RNA, 19 nt, Homo sapiens
  misc_RNA (1)...(19): siRNA sense strand
aaugcacacucaccagcaa

SEQ ID NO: 1409913 - RNA, 19 nt, Homo sapiens
  misc_RNA (1)...(19): siRNA sense strand
ccagcaacaccaagugcaa

SEQ ID NO: 1409914 - RNA, 19 nt, Homo sapiens
  misc_RNA (1)...(19): siRNA sense strand
gaauugaggaagacuguua

SEQ ID NO: 1409915 - RNA, 19 nt, Homo sapiens
  misc_RNA (1)...(19): siRNA sense strand
gaggaagacuguuacuaca

SEQ ID NO: 1409916 - RNA, 19 nt, Homo sapiens
  misc_RNA (1)...(19): siRNA sense strand
ggauuggaauugaggaaga

SEQ ID NO: 1409917 - RNA, 19 nt, Homo sapiens
  misc_RNA (1)...(19): siRNA sense strand
ugacugacaucaacuccaa

SEQ ID NO: 1409918 - RNA, 19 nt, Homo sapiens
  misc_RNA (1)...(19): siRNA sense strand
uggaaggccugcaucauga

SEQ ID NO: 1409919 - RNA, 19 nt, Homo sapiens
  misc_RNA (1)...(19): siRNA sense strand
uuacgucuguugcuagauu

SEQ ID NO: 1409920 - RNA, 19 nt, Homo sapiens
  misc_RNA (1)...(19): siRNA sense strand
ccaagugacugacaucaac

SEQ ID NO: 1409921 - RNA, 19 nt, Homo sapiens
  misc_RNA (1)...(19): siRNA sense strand
guucuuacgucuguugcua

SEQ ID NO: 1409922 - RNA, 19 nt, Homo sapiens
  misc_RNA (1)...(19): siRNA sense strand
ugaggaagacuguuacuac

SEQ ID NO: 1409923 - RNA, 19 nt, Homo sapiens
  misc_RNA (1)...(19): siRNA sense strand
ggccaauucugccauaagc

SEQ ID NO: 1409924 - RNA, 19 nt, Homo sapiens
  misc_RNA (1)...(19): siRNA sense strand
aacauggaaucaucaagga

SEQ ID NO: 1409925 - RNA, 19 nt, Homo sapiens
  misc_RNA (1)...(19): siRNA sense strand
uacgucuguugcuagauua

SEQ ID NO: 1409926 - RNA, 19 nt, Homo sapiens
  misc_RNA (1)...(19): siRNA sense strand
caucaacuccaagggauug

SEQ ID NO: 1409927 - RNA, 19 nt, Homo sapiens
  misc_RNA (1)...(19): siRNA sense strand
cauggaaucaucaaggaau

SEQ ID NO: 1409928 - RNA, 19 nt, Homo sapiens
  misc_RNA (1)...(19): siRNA sense strand
gcaacaccaagugcaaaga

SEQ ID NO: 1409929 - RNA, 19 nt, Homo sapiens
  misc_RNA (1)...(19): siRNA sense strand
caacaccaagugcaaagag

SEQ ID NO: 1409930 - RNA, 19 nt, Homo sapiens
  misc_RNA (1)...(19): siRNA sense strand
gcuagauuaucguccaaaa

SEQ ID NO: 1409931 - RNA, 19 nt, Homo sapiens
  misc_RNA (1)...(19): siRNA sense strand
ccuccuaccucugguucuu

SEQ ID NO: 1409932 - RNA, 19 nt, Homo sapiens
  misc_RNA (1)...(19): siRNA sense strand
cagcaacaccaagugcaaa

SEQ ID NO: 1409933 - RNA, 19 nt, Homo sapiens
  misc_RNA (1)...(19): siRNA sense strand
uuaaugcccaagugacuga

SEQ ID NO: 1409934 - RNA, 19 nt, Homo sapiens
  misc_RNA (1)...(19): siRNA sense strand
ggaaggccugcaucaugau

SEQ ID NO: 1409935 - RNA, 19 nt, Homo sapiens
  misc_RNA (1)...(19): siRNA sense strand
aaugcacacucaccagcaa

SEQ ID NO: 1409936 - RNA, 19 nt, Homo sapiens
  misc_RNA (1)...(19): siRNA sense strand
ccagcaacaccaagugcaa

SEQ ID NO: 1409937 - RNA, 19 nt, Homo sapiens
  misc_RNA (1)...(19): siRNA sense strand
gaaaugaaauccaaagcuu

SEQ ID NO: 1409938 - RNA, 19 nt, Homo sapiens
  misc_RNA (1)...(19): siRNA sense strand
gaaagaauggugucaauga

SEQ ID NO: 1409939 - RNA, 19 nt, Homo sapiens
  misc_RNA (1)...(19): siRNA sense strand
uagaugagaucaagaauga

SEQ ID NO: 1409940 - RNA, 19 nt, Homo sapiens
  misc_RNA (1)...(19): siRNA sense strand
gaaagaagcguaugacaca

SEQ ID NO: 1409941 - RNA, 19 nt, Homo sapiens
  misc_RNA (1)...(19): siRNA sense strand
ucaaggacauuacuaguga

SEQ ID NO: 1409942 - RNA, 19 nt, Homo sapiens
  misc_RNA (1)...(19): siRNA sense strand
gaauugaggaagacuguua

SEQ ID NO: 1409943 - RNA, 19 nt, Homo sapiens
  misc_RNA (1)...(19): siRNA sense strand
gaaagaaagaagcguauga

SEQ ID NO: 1409944 - RNA, 19 nt, Homo sapiens
  misc_RNA (1)...(19): siRNA sense strand
ggacauuacuagugacuca

SEQ ID NO: 1409945 - RNA, 19 nt, Homo sapiens
  misc_RNA (1)...(19): siRNA sense strand
gacacuaagucaaguuaaa

SEQ ID NO: 1409946 - RNA, 19 nt, Homo sapiens
  misc_RNA (1)...(19): siRNA sense strand
gaggaagacuguuacuaca

SEQ ID NO: 1409947 - RNA, 19 nt, Homo sapiens
  misc_RNA (1)...(19): siRNA sense strand
ggcaucaacuucauggaaa

SEQ ID NO: 1409948 - RNA, 19 nt, Homo sapiens
  misc_RNA (1)...(19): siRNA sense strand
ggauuggaauugaggaaga

SEQ ID NO: 1409949 - RNA, 19 nt, Homo sapiens
  misc_RNA (1)...(19): siRNA sense strand
aaagaauggugucaaugaa

SEQ ID NO: 1409950 - RNA, 19 nt, Homo sapiens
  misc_RNA (1)...(19): siRNA sense strand
ugacugacaucaacuccaa

SEQ ID NO: 1409951 - RNA, 19 nt, Homo sapiens
  misc_RNA (1)...(19): siRNA sense strand
gcguaugacacauugauua

SEQ ID NO: 1409952 - RNA, 19 nt, Homo sapiens
  misc_RNA (1)...(19): siRNA sense strand
uggaaggccugcaucauga

SEQ ID NO: 1409953 - RNA, 19 nt, Homo sapiens
  misc_RNA (1)...(19): siRNA sense strand
agacacagcagaacagaaa

SEQ ID NO: 1409954 - RNA, 19 nt, Homo sapiens
  misc_RNA (1)...(19): siRNA sense strand
ccaagugacugacaucaac

SEQ ID NO: 1409955 - RNA, 19 nt, Homo sapiens
  misc_RNA (1)...(19): siRNA sense strand
guaauuggcaucaacuuca

SEQ ID NO: 1409956 - RNA, 19 nt, Homo sapiens
  misc_RNA (1)...(19): siRNA sense strand
uuacgucuguugcuagauu

SEQ ID NO: 1409957 - RNA, 19 nt, Homo sapiens
  misc_RNA (1)...(19): siRNA sense strand
guucaacugcuucguaauu

SEQ ID NO: 1409958 - RNA, 19 nt, Homo sapiens
  misc_RNA (1)...(19): siRNA sense strand
caaaauagaugagaucaag

SEQ ID NO: 1409959 - RNA, 19 nt, Homo sapiens
  misc_RNA (1)...(19): siRNA sense strand
guucuuacgucuguugcua

SEQ ID NO: 1409960 - RNA, 19 nt, Homo sapiens
  misc_RNA (1)...(19): siRNA sense strand
ucaacuucauggaaagaaa

SEQ ID NO: 1409961 - RNA, 19 nt, Homo sapiens
  misc_RNA (1)...(19): siRNA sense strand
agaagcguaugacacauug

SEQ ID NO: 1409962 - RNA, 19 nt, Homo sapiens
  misc_RNA (1)...(19): siRNA sense strand
gcuggagucaugacacuaa

SEQ ID NO: 1409963 - RNA, 19 nt, Homo sapiens
  misc_RNA (1)...(19): siRNA sense strand
gaugagaucaagaaugaca

SEQ ID NO: 1409964 - RNA, 19 nt, Homo sapiens
  misc_RNA (1)...(19): siRNA sense strand
ucgaaagaauggugucaau

SEQ ID NO: 1409965 - RNA, 19 nt, Homo sapiens
  misc_RNA (1)...(19): siRNA sense strand
cguaugacacauugauuaa

SEQ ID NO: 1409966 - RNA, 19 nt, Homo sapiens
  misc_RNA (1)...(19): siRNA sense strand
cagagaaaauucagacuau

SEQ ID NO: 1409967 - RNA, 19 nt, Homo sapiens
  misc_RNA (1)...(19): siRNA sense strand
gcaucaacuucauggaaag

SEQ ID NO: 1409968 - RNA, 19 nt, Homo sapiens
  misc_RNA (1)...(19): siRNA sense strand
ugaggaagacuguuacuac

SEQ ID NO: 1409969 - RNA, 19 nt, Homo sapiens
  misc_RNA (1)...(19): siRNA sense strand
ggaaagaaagaagcguaug

SEQ ID NO: 1409970 - RNA, 19 nt, Homo sapiens
  misc_RNA (1)...(19): siRNA sense strand
cacuauugcuggagucaug

SEQ ID NO: 1409971 - RNA, 19 nt, Homo sapiens
  misc_RNA (1)...(19): siRNA sense strand
gcagagaaaauucagacua

SEQ ID NO: 1409972 - RNA, 19 nt, Homo sapiens
  misc_RNA (1)...(19): siRNA sense strand
ggccaauucugccauaagc

SEQ ID NO: 1409973 - RNA, 19 nt, Homo sapiens
  misc_RNA (1)...(19): siRNA sense strand
uaauuggcaucaacuucau

SEQ ID NO: 1409974 - RNA, 19 nt, Homo sapiens
  misc_RNA (1)...(19): siRNA sense strand
aacauggaaucaucaagga

SEQ ID NO: 1409975 - RNA, 19 nt, Homo sapiens
  misc_RNA (1)...(19): siRNA sense strand
caucaacuccaagggauug

SEQ ID NO: 1409976 - RNA, 19 nt, Homo sapiens
  misc_RNA (1)...(19): siRNA sense strand
uacgucuguugcuagauua

SEQ ID NO: 1409977 - RNA, 19 nt, Homo sapiens
  misc_RNA (1)...(19): siRNA sense strand
ggagucaugacacuaaguc

SEQ ID NO: 1409978 - RNA, 19 nt, Homo sapiens
  misc_RNA (1)...(19): siRNA sense strand
cauggaaucaucaaggaau

SEQ ID NO: 1409979 - RNA, 19 nt, Homo sapiens
  misc_RNA (1)...(19): siRNA sense strand
cgaaagaauggugucaaug

SEQ ID NO: 1409980 - RNA, 19 nt, Homo sapiens
  misc_RNA (1)...(19): siRNA sense strand
gcaacaccaagugcaaaga

SEQ ID NO: 1409981 - RNA, 19 nt, Homo sapiens
  misc_RNA (1)...(19): siRNA sense strand
caacaccaagugcaaagag

SEQ ID NO: 1409982 - RNA, 19 nt, Homo sapiens
  misc_RNA (1)...(19): siRNA sense strand
gagaaaauucagacuauca

SEQ ID NO: 1409983 - RNA, 19 nt, Homo sapiens
  misc_RNA (1)...(19): siRNA sense strand
aagaagcguaugacacauu

SEQ ID NO: 1409984 - RNA, 19 nt, Homo sapiens
  misc_RNA (1)...(19): siRNA sense strand
caagacacagcagaacaga

SEQ ID NO: 1409985 - RNA, 19 nt, Homo sapiens
  misc_RNA (1)...(19): siRNA sense strand
ccuccuaccucugguucuu

SEQ ID NO: 1409986 - RNA, 19 nt, Homo sapiens
  misc_RNA (1)...(19): siRNA sense strand
caacuucauggaaagaaag

SEQ ID NO: 1409987 - RNA, 19 nt, Homo sapiens
  misc_RNA (1)...(19): siRNA sense strand
gcuagauuaucguccaaaa

SEQ ID NO: 1409988 - RNA, 19 nt, Homo sapiens
  misc_RNA (1)...(19): siRNA sense strand
uggcaucaacuucauggaa

SEQ ID NO: 1409989 - RNA, 19 nt, Homo sapiens
  misc_RNA (1)...(19): siRNA sense strand
cagcaacaccaagugcaaa

SEQ ID NO: 1409990 - RNA, 19 nt, Homo sapiens
  misc_RNA (1)...(19): siRNA sense strand
ucaacugcuucguaauugg

SEQ ID NO: 1409991 - RNA, 19 nt, Homo sapiens
  misc_RNA (1)...(19): siRNA sense strand
caaugaagccaaaauagau

SEQ ID NO: 1409992 - RNA, 19 nt, Homo sapiens
  misc_RNA (1)...(19): siRNA sense strand
uuaaugcccaagugacuga

SEQ ID NO: 1409993 - RNA, 19 nt, Homo sapiens
  misc_RNA (1)...(19): siRNA sense strand
ggaaggccugcaucaugau

SEQ ID NO: 1409994 - RNA, 19 nt, Homo sapiens
  misc_RNA (1)...(19): siRNA sense strand
cauuacuagugacucagaa

SEQ ID NO: 1409995 - RNA, 19 nt, Homo sapiens
  misc_RNA (1)...(19): siRNA sense strand
uucaacugcuucguaauug

SEQ ID NO: 1409996 - RNA, 19 nt, Homo sapiens
  misc_RNA (1)...(19): siRNA sense strand
aaugcacacucaccagcaa

SEQ ID NO: 1409997 - RNA, 19 nt, Homo sapiens
  misc_RNA (1)...(19): siRNA sense strand
ucagaaaugaaauccaaag

SEQ ID NO: 1409998 - RNA, 19 nt, Homo sapiens
  misc_RNA (1)...(19): siRNA sense strand
ccagcaacaccaagugcaa

SEQ ID NO: 1409999 - RNA, 19 nt, Homo sapiens
  misc_RNA (1)...(19): siRNA sense strand
gaaaugaaauccaaagcuu

SEQ ID NO: 1410000 - RNA, 19 nt, Homo sapiens
  misc_RNA (1)...(19): siRNA sense strand
gaaagaauggugucaauga

SEQ ID NO: 1410001 - RNA, 19 nt, Homo sapiens
  misc_RNA (1)...(19): siRNA sense strand
uagaugagaucaagaauga

SEQ ID NO: 1410002 - RNA, 19 nt, Homo sapiens
  misc_RNA (1)...(19): siRNA sense strand
gaaagaagcguaugacaca

SEQ ID NO: 1410003 - RNA, 19 nt, Homo sapiens
  misc_RNA (1)...(19): siRNA sense strand
ucaaggacauuacuaguga

SEQ ID NO: 1410004 - RNA, 19 nt, Homo sapiens
  misc_RNA (1)...(19): siRNA sense strand
gaauugaggaagacuguua

SEQ ID NO: 1410005 - RNA, 19 nt, Homo sapiens
  misc_RNA (1)...(19): siRNA sense strand
gaaagaaagaagcguauga

SEQ ID NO: 1410006 - RNA, 19 nt, Homo sapiens
  misc_RNA (1)...(19): siRNA sense strand
ggacauuacuagugacuca

SEQ ID NO: 1410007 - RNA, 19 nt, Homo sapiens
  misc_RNA (1)...(19): siRNA sense strand
gacacuaagucaaguuaaa

SEQ ID NO: 1410008 - RNA, 19 nt, Homo sapiens
  misc_RNA (1)...(19): siRNA sense strand
gaggaagacuguuacuaca

SEQ ID NO: 1410009 - RNA, 19 nt, Homo sapiens
  misc_RNA (1)...(19): siRNA sense strand
ggcaucaacuucauggaaa

SEQ ID NO: 1410010 - RNA, 19 nt, Homo sapiens
  misc_RNA (1)...(19): siRNA sense strand
ggauuggaauugaggaaga

SEQ ID NO: 1410011 - RNA, 19 nt, Homo sapiens
  misc_RNA (1)...(19): siRNA sense strand
aaagaauggugucaaugaa

SEQ ID NO: 1410012 - RNA, 19 nt, Homo sapiens
  misc_RNA (1)...(19): siRNA sense strand
ugacugacaucaacuccaa

SEQ ID NO: 1410013 - RNA, 19 nt, Homo sapiens
  misc_RNA (1)...(19): siRNA sense strand
gcguaugacacauugauua

SEQ ID NO: 1410014 - RNA, 19 nt, Homo sapiens
  misc_RNA (1)...(19): siRNA sense strand
uggaaggccugcaucauga

SEQ ID NO: 1410015 - RNA, 19 nt, Homo sapiens
  misc_RNA (1)...(19): siRNA sense strand
agacacagcagaacagaaa

SEQ ID NO: 1410016 - RNA, 19 nt, Homo sapiens
  misc_RNA (1)...(19): siRNA sense strand
ccaagugacugacaucaac

SEQ ID NO: 1410017 - RNA, 19 nt, Homo sapiens
  misc_RNA (1)...(19): siRNA sense strand
guaauuggcaucaacuuca

SEQ ID NO: 1410018 - RNA, 19 nt, Homo sapiens
  misc_RNA (1)...(19): siRNA sense strand
uuacgucuguugcuagauu

SEQ ID NO: 1410019 - RNA, 19 nt, Homo sapiens
  misc_RNA (1)...(19): siRNA sense strand
guucaacugcuucguaauu

SEQ ID NO: 1410020 - RNA, 19 nt, Homo sapiens
  misc_RNA (1)...(19): siRNA sense strand
caaaauagaugagaucaag

SEQ ID NO: 1410021 - RNA, 19 nt, Homo sapiens
  misc_RNA (1)...(19): siRNA sense strand
guucuuacgucuguugcua

SEQ ID NO: 1410022 - RNA, 19 nt, Homo sapiens
  misc_RNA (1)...(19): siRNA sense strand
ucaacuucauggaaagaaa

SEQ ID NO: 1410023 - RNA, 19 nt, Homo sapiens
  misc_RNA (1)...(19): siRNA sense strand
agaagcguaugacacauug

SEQ ID NO: 1410024 - RNA, 19 nt, Homo sapiens
  misc_RNA (1)...(19): siRNA sense strand
gcuggagucaugacacuaa

SEQ ID NO: 1410025 - RNA, 19 nt, Homo sapiens
  misc_RNA (1)...(19): siRNA sense strand
gaugagaucaagaaugaca

SEQ ID NO: 1410026 - RNA, 19 nt, Homo sapiens
  misc_RNA (1)...(19): siRNA sense strand
ucgaaagaauggugucaau

SEQ ID NO: 1410027 - RNA, 19 nt, Homo sapiens
  misc_RNA (1)...(19): siRNA sense strand
cguaugacacauugauuaa

SEQ ID NO: 1410028 - RNA, 19 nt, Homo sapiens
  misc_RNA (1)...(19): siRNA sense strand
cagagaaaauucagacuau

SEQ ID NO: 1410029 - RNA, 19 nt, Homo sapiens
  misc_RNA (1)...(19): siRNA sense strand
gcaucaacuucauggaaag

SEQ ID NO: 1410030 - RNA, 19 nt, Homo sapiens
  misc_RNA (1)...(19): siRNA sense strand
ugaggaagacuguuacuac

SEQ ID NO: 1410031 - RNA, 19 nt, Homo sapiens
  misc_RNA (1)...(19): siRNA sense strand
ggaaagaaagaagcguaug

SEQ ID NO: 1410032 - RNA, 19 nt, Homo sapiens
  misc_RNA (1)...(19): siRNA sense strand
cacuauugcuggagucaug

SEQ ID NO: 1410033 - RNA, 19 nt, Homo sapiens
  misc_RNA (1)...(19): siRNA sense strand
gcagagaaaauucagacua

SEQ ID NO: 1410034 - RNA, 19 nt, Homo sapiens
  misc_RNA (1)...(19): siRNA sense strand
ggccaauucugccauaagc

SEQ ID NO: 1410035 - RNA, 19 nt, Homo sapiens
  misc_RNA (1)...(19): siRNA sense strand
uaauuggcaucaacuucau

SEQ ID NO: 1410036 - RNA, 19 nt, Homo sapiens
  misc_RNA (1)...(19): siRNA sense strand
aacauggaaucaucaagga

SEQ ID NO: 1410037 - RNA, 19 nt, Homo sapiens
  misc_RNA (1)...(19): siRNA sense strand
caucaacuccaagggauug

SEQ ID NO: 1410038 - RNA, 19 nt, Homo sapiens
  misc_RNA (1)...(19): siRNA sense strand
uacgucuguugcuagauua

SEQ ID NO: 1410039 - RNA, 19 nt, Homo sapiens
  misc_RNA (1)...(19): siRNA sense strand
ggagucaugacacuaaguc

SEQ ID NO: 1410040 - RNA, 19 nt, Homo sapiens
  misc_RNA (1)...(19): siRNA sense strand
cauggaaucaucaaggaau

SEQ ID NO: 1410041 - RNA, 19 nt, Homo sapiens
  misc_RNA (1)...(19): siRNA sense strand
cgaaagaauggugucaaug

SEQ ID NO: 1410042 - RNA, 19 nt, Homo sapiens
  misc_RNA (1)...(19): siRNA sense strand
gcaacaccaagugcaaaga

SEQ ID NO: 1410043 - RNA, 19 nt, Homo sapiens
  misc_RNA (1)...(19): siRNA sense strand
caacaccaagugcaaagag

SEQ ID NO: 1410044 - RNA, 19 nt, Homo sapiens
  misc_RNA (1)...(19): siRNA sense strand
gagaaaauucagacuauca

SEQ ID NO: 1410045 - RNA, 19 nt, Homo sapiens
  misc_RNA (1)...(19): siRNA sense strand
aagaagcguaugacacauu

SEQ ID NO: 1410046 - RNA, 19 nt, Homo sapiens
  misc_RNA (1)...(19): siRNA sense strand
caagacacagcagaacaga

SEQ ID NO: 1410047 - RNA, 19 nt, Homo sapiens
  misc_RNA (1)...(19): siRNA sense strand
ccuccuaccucugguucuu

SEQ ID NO: 1410048 - RNA, 19 nt, Homo sapiens
  misc_RNA (1)...(19): siRNA sense strand
caacuucauggaaagaaag

SEQ ID NO: 1410049 - RNA, 19 nt, Homo sapiens
  misc_RNA (1)...(19): siRNA sense strand
gcuagauuaucguccaaaa

SEQ ID NO: 1410050 - RNA, 19 nt, Homo sapiens
  misc_RNA (1)...(19): siRNA sense strand
uggcaucaacuucauggaa

SEQ ID NO: 1410051 - RNA, 19 nt, Homo sapiens
  misc_RNA (1)...(19): siRNA sense strand
cagcaacaccaagugcaaa

SEQ ID NO: 1410052 - RNA, 19 nt, Homo sapiens
  misc_RNA (1)...(19): siRNA sense strand
ucaacugcuucguaauugg

SEQ ID NO: 1410053 - RNA, 19 nt, Homo sapiens
  misc_RNA (1)...(19): siRNA sense strand
caaugaagccaaaauagau

SEQ ID NO: 1410054 - RNA, 19 nt, Homo sapiens
  misc_RNA (1)...(19): siRNA sense strand
uuaaugcccaagugacuga

SEQ ID NO: 1410055 - RNA, 19 nt, Homo sapiens
  misc_RNA (1)...(19): siRNA sense strand
ggaaggccugcaucaugau

SEQ ID NO: 1410056 - RNA, 19 nt, Homo sapiens
  misc_RNA (1)...(19): siRNA sense strand
cauuacuagugacucagaa

SEQ ID NO: 1410057 - RNA, 19 nt, Homo sapiens
  misc_RNA (1)...(19): siRNA sense strand
uucaacugcuucguaauug

SEQ ID NO: 1410058 - RNA, 19 nt, Homo sapiens
  misc_RNA (1)...(19): siRNA sense strand
aaugcacacucaccagcaa

SEQ ID NO: 1410059 - RNA, 19 nt, Homo sapiens
  misc_RNA (1)...(19): siRNA sense strand
ucagaaaugaaauccaaag

SEQ ID NO: 1410060 - RNA, 19 nt, Homo sapiens
  misc_RNA (1)...(19): siRNA sense strand
ccagcaacaccaagugcaa

SEQ ID NO: 1410061 - RNA, 19 nt, Homo sapiens
  misc_RNA (1)...(19): siRNA sense strand
gaauugaggaagacuguua

SEQ ID NO: 1410062 - RNA, 19 nt, Homo sapiens
  misc_RNA (1)...(19): siRNA sense strand
gaggaagacuguuacuaca

SEQ ID NO: 1410063 - RNA, 19 nt, Homo sapiens
  misc_RNA (1)...(19): siRNA sense strand
ggauuggaauugaggaaga

SEQ ID NO: 1410064 - RNA, 19 nt, Homo sapiens
  misc_RNA (1)...(19): siRNA sense strand
ugacugacaucaacuccaa

SEQ ID NO: 1410065 - RNA, 19 nt, Homo sapiens
  misc_RNA (1)...(19): siRNA sense strand
uggaaggccugcaucauga

SEQ ID NO: 1410066 - RNA, 19 nt, Homo sapiens
  misc_RNA (1)...(19): siRNA sense strand
uuacgucuguugcuagauu

SEQ ID NO: 1410067 - RNA, 19 nt, Homo sapiens
  misc_RNA (1)...(19): siRNA sense strand
ccaagugacugacaucaac

SEQ ID NO: 1410068 - RNA, 19 nt, Homo sapiens
  misc_RNA (1)...(19): siRNA sense strand
guucuuacgucuguugcua

SEQ ID NO: 1410069 - RNA, 19 nt, Homo sapiens
  misc_RNA (1)...(19): siRNA sense strand
ugaggaagacuguuacuac

SEQ ID NO: 1410070 - RNA, 19 nt, Homo sapiens
  misc_RNA (1)...(19): siRNA sense strand
ggccaauucugccauaagc

SEQ ID NO: 1410071 - RNA, 19 nt, Homo sapiens
  misc_RNA (1)...(19): siRNA sense strand
aacauggaaucaucaagga

SEQ ID NO: 1410072 - RNA, 19 nt, Homo sapiens
  misc_RNA (1)...(19): siRNA sense strand
uacgucuguugcuagauua

SEQ ID NO: 1410073 - RNA, 19 nt, Homo sapiens
  misc_RNA (1)...(19): siRNA sense strand
caucaacuccaagggauug

SEQ ID NO: 1410074 - RNA, 19 nt, Homo sapiens
  misc_RNA (1)...(19): siRNA sense strand
cauggaaucaucaaggaau

SEQ ID NO: 1410075 - RNA, 19 nt, Homo sapiens
  misc_RNA (1)...(19): siRNA sense strand
gcaacaccaagugcaaaga

SEQ ID NO: 1410076 - RNA, 19 nt, Homo sapiens
  misc_RNA (1)...(19): siRNA sense strand
caacaccaagugcaaagag

SEQ ID NO: 1410077 - RNA, 19 nt, Homo sapiens
  misc_RNA (1)...(19): siRNA sense strand
gcuagauuaucguccaaaa

SEQ ID NO: 1410078 - RNA, 19 nt, Homo sapiens
  misc_RNA (1)...(19): siRNA sense strand
ccuccuaccucugguucuu

SEQ ID NO: 1410079 - RNA, 19 nt, Homo sapiens
  misc_RNA (1)...(19): siRNA sense strand
cagcaacaccaagugcaaa

SEQ ID NO: 1410080 - RNA, 19 nt, Homo sapiens
  misc_RNA (1)...(19): siRNA sense strand
uuaaugcccaagugacuga

SEQ ID NO: 1410081 - RNA, 19 nt, Homo sapiens
  misc_RNA (1)...(19): siRNA sense strand
ggaaggccugcaucaugau

SEQ ID NO: 1410082 - RNA, 19 nt, Homo sapiens
  misc_RNA (1)...(19): siRNA sense strand
aaugcacacucaccagcaa

SEQ ID NO: 1410083 - RNA, 19 nt, Homo sapiens
  misc_RNA (1)...(19): siRNA sense strand
ccagcaacaccaagugcaa

SEQ ID NO: 1410084 - RNA, 19 nt, Homo sapiens
  misc_RNA (1)...(19): siRNA sense strand
gaauugaggaagacuguua

SEQ ID NO: 1410085 - RNA, 19 nt, Homo sapiens
  misc_RNA (1)...(19): siRNA sense strand
gaggaagacuguuacuaca

SEQ ID NO: 1410086 - RNA, 19 nt, Homo sapiens
  misc_RNA (1)...(19): siRNA sense strand
ggauuggaauugaggaaga

SEQ ID NO: 1410087 - RNA, 19 nt, Homo sapiens
  misc_RNA (1)...(19): siRNA sense strand
ugacugacaucaacuccaa

SEQ ID NO: 1410088 - RNA, 19 nt, Homo sapiens
  misc_RNA (1)...(19): siRNA sense strand
uggaaggccugcaucauga

SEQ ID NO: 1410089 - RNA, 19 nt, Homo sapiens
  misc_RNA (1)...(19): siRNA sense strand
uuacgucuguugcuagauu

SEQ ID NO: 1410090 - RNA, 19 nt, Homo sapiens
  misc_RNA (1)...(19): siRNA sense strand
ccaagugacugacaucaac

SEQ ID NO: 1410091 - RNA, 19 nt, Homo sapiens
  misc_RNA (1)...(19): siRNA sense strand
guucuuacgucuguugcua

SEQ ID NO: 1410092 - RNA, 19 nt, Homo sapiens
  misc_RNA (1)...(19): siRNA sense strand
ugaggaagacuguuacuac

SEQ ID NO: 1410093 - RNA, 19 nt, Homo sapiens
  misc_RNA (1)...(19): siRNA sense strand
ggccaauucugccauaagc

SEQ ID NO: 1410094 - RNA, 19 nt, Homo sapiens
  misc_RNA (1)...(19): siRNA sense strand
aacauggaaucaucaagga

SEQ ID NO: 1410095 - RNA, 19 nt, Homo sapiens
  misc_RNA (1)...(19): siRNA sense strand
uacgucuguugcuagauua

SEQ ID NO: 1410096 - RNA, 19 nt, Homo sapiens
  misc_RNA (1)...(19): siRNA sense strand
caucaacuccaagggauug

SEQ ID NO: 1410097 - RNA, 19 nt, Homo sapiens
  misc_RNA (1)...(19): siRNA sense strand
cauggaaucaucaaggaau

SEQ ID NO: 1410098 - RNA, 19 nt, Homo sapiens
  misc_RNA (1)...(19): siRNA sense strand
gcaacaccaagugcaaaga

SEQ ID NO: 1410099 - RNA, 19 nt, Homo sapiens
  misc_RNA (1)...(19): siRNA sense strand
caacaccaagugcaaagag

SEQ ID NO: 1410100 - RNA, 19 nt, Homo sapiens
  misc_RNA (1)...(19): siRNA sense strand
gcuagauuaucguccaaaa

SEQ ID NO: 1410101 - RNA, 19 nt, Homo sapiens
  misc_RNA (1)...(19): siRNA sense strand
ccuccuaccucugguucuu

SEQ ID NO: 1410102 - RNA, 19 nt, Homo sapiens
  misc_RNA (1)...(19): siRNA sense strand
cagcaacaccaagugcaaa

SEQ ID NO: 1410103 - RNA, 19 nt, Homo sapiens
  misc_RNA (1)...(19): siRNA sense strand
uuaaugcccaagugacuga

SEQ ID NO: 1410104 - RNA, 19 nt, Homo sapiens
  misc_RNA (1)...(19): siRNA sense strand
ggaaggccugcaucaugau

SEQ ID NO: 1410105 - RNA, 19 nt, Homo sapiens
  misc_RNA (1)...(19): siRNA sense strand
aaugcacacucaccagcaa

SEQ ID NO: 1410106 - RNA, 19 nt, Homo sapiens
  misc_RNA (1)...(19): siRNA sense strand
ccagcaacaccaagugcaa

SEQ ID NO: 1410107 - RNA, 19 nt, Homo sapiens
  misc_RNA (1)...(19): siRNA sense strand
gaauugaggaagacuguua

SEQ ID NO: 1410108 - RNA, 19 nt, Homo sapiens
  misc_RNA (1)...(19): siRNA sense strand
gaggaagacuguuacuaca

SEQ ID NO: 1410109 - RNA, 19 nt, Homo sapiens
  misc_RNA (1)...(19): siRNA sense strand
ggauuggaauugaggaaga

SEQ ID NO: 1410110 - RNA, 19 nt, Homo sapiens
  misc_RNA (1)...(19): siRNA sense strand
ugacugacaucaacuccaa

SEQ ID NO: 1410111 - RNA, 19 nt, Homo sapiens
  misc_RNA (1)...(19): siRNA sense strand
uggaaggccugcaucauga

SEQ ID NO: 1410112 - RNA, 19 nt, Homo sapiens
  misc_RNA (1)...(19): siRNA sense strand
uuacgucuguugcuagauu

SEQ ID NO: 1410113 - RNA, 19 nt, Homo sapiens
  misc_RNA (1)...(19): siRNA sense strand
ccaagugacugacaucaac

SEQ ID NO: 1410114 - RNA, 19 nt, Homo sapiens
  misc_RNA (1)...(19): siRNA sense strand
guucuuacgucuguugcua

SEQ ID NO: 1410115 - RNA, 19 nt, Homo sapiens
  misc_RNA (1)...(19): siRNA sense strand
ugaggaagacuguuacuac

SEQ ID NO: 1410116 - RNA, 19 nt, Homo sapiens
  misc_RNA (1)...(19): siRNA sense strand
ggccaauucugccauaagc

SEQ ID NO: 1410117 - RNA, 19 nt, Homo sapiens
  misc_RNA (1)...(19): siRNA sense strand
aacauggaaucaucaagga

SEQ ID NO: 1410118 - RNA, 19 nt, Homo sapiens
  misc_RNA (1)...(19): siRNA sense strand
uacgucuguugcuagauua

SEQ ID NO: 1410119 - RNA, 19 nt, Homo sapiens
  misc_RNA (1)...(19): siRNA sense strand
caucaacuccaagggauug

SEQ ID NO: 1410120 - RNA, 19 nt, Homo sapiens
  misc_RNA (1)...(19): siRNA sense strand
cauggaaucaucaaggaau

SEQ ID NO: 1410121 - RNA, 19 nt, Homo sapiens
  misc_RNA (1)...(19): siRNA sense strand
gcaacaccaagugcaaaga

SEQ ID NO: 1410122 - RNA, 19 nt, Homo sapiens
  misc_RNA (1)...(19): siRNA sense strand
caacaccaagugcaaagag

SEQ ID NO: 1410123 - RNA, 19 nt, Homo sapiens
  misc_RNA (1)...(19): siRNA sense strand
gcuagauuaucguccaaaa

SEQ ID NO: 1410124 - RNA, 19 nt, Homo sapiens
  misc_RNA (1)...(19): siRNA sense strand
ccuccuaccucugguucuu

SEQ ID NO: 1410125 - RNA, 19 nt, Homo sapiens
  misc_RNA (1)...(19): siRNA sense strand
cagcaacaccaagugcaaa

SEQ ID NO: 1410126 - RNA, 19 nt, Homo sapiens
  misc_RNA (1)...(19): siRNA sense strand
uuaaugcccaagugacuga

SEQ ID NO: 1410127 - RNA, 19 nt, Homo sapiens
  misc_RNA (1)...(19): siRNA sense strand
ggaaggccugcaucaugau

SEQ ID NO: 1410128 - RNA, 19 nt, Homo sapiens
  misc_RNA (1)...(19): siRNA sense strand
aaugcacacucaccagcaa

SEQ ID NO: 1410129 - RNA, 19 nt, Homo sapiens
  misc_RNA (1)...(19): siRNA sense strand
ccagcaacaccaagugcaa

SEQ ID NO: 1410130 - RNA, 19 nt, Homo sapiens
  misc_RNA (1)...(19): siRNA sense strand
gaauugaggaagacuguua

SEQ ID NO: 1410131 - RNA, 19 nt, Homo sapiens
  misc_RNA (1)...(19): siRNA sense strand
gaggaagacuguuacuaca

SEQ ID NO: 1410132 - RNA, 19 nt, Homo sapiens
  misc_RNA (1)...(19): siRNA sense strand
ggauuggaauugaggaaga

SEQ ID NO: 1410133 - RNA, 19 nt, Homo sapiens
  misc_RNA (1)...(19): siRNA sense strand
ugacugacaucaacuccaa

SEQ ID NO: 1410134 - RNA, 19 nt, Homo sapiens
  misc_RNA (1)...(19): siRNA sense strand
uggaaggccugcaucauga

SEQ ID NO: 1410135 - RNA, 19 nt, Homo sapiens
  misc_RNA (1)...(19): siRNA sense strand
uuacgucuguugcuagauu

SEQ ID NO: 1410136 - RNA, 19 nt, Homo sapiens
  misc_RNA (1)...(19): siRNA sense strand
ccaagugacugacaucaac

SEQ ID NO: 1410137 - RNA, 19 nt, Homo sapiens
  misc_RNA (1)...(19): siRNA sense strand
guucuuacgucuguugcua

SEQ ID NO: 1410138 - RNA, 19 nt, Homo sapiens
  misc_RNA (1)...(19): siRNA sense strand
ugaggaagacuguuacuac

SEQ ID NO: 1410139 - RNA, 19 nt, Homo sapiens
  misc_RNA (1)...(19): siRNA sense strand
ggccaauucugccauaagc

SEQ ID NO: 1410140 - RNA, 19 nt, Homo sapiens
  misc_RNA (1)...(19): siRNA sense strand
aacauggaaucaucaagga

SEQ ID NO: 1410141 - RNA, 19 nt, Homo sapiens
  misc_RNA (1)...(19): siRNA sense strand
uacgucuguugcuagauua

SEQ ID NO: 1410142 - RNA, 19 nt, Homo sapiens
  misc_RNA (1)...(19): siRNA sense strand
caucaacuccaagggauug

SEQ ID NO: 1410143 - RNA, 19 nt, Homo sapiens
  misc_RNA (1)...(19): siRNA sense strand
cauggaaucaucaaggaau

SEQ ID NO: 1410144 - RNA, 19 nt, Homo sapiens
  misc_RNA (1)...(19): siRNA sense strand
gcaacaccaagugcaaaga

SEQ ID NO: 1410145 - RNA, 19 nt, Homo sapiens
  misc_RNA (1)...(19): siRNA sense strand
caacaccaagugcaaagag

SEQ ID NO: 1410146 - RNA, 19 nt, Homo sapiens
  misc_RNA (1)...(19): siRNA sense strand
gcuagauuaucguccaaaa

SEQ ID NO: 1410147 - RNA, 19 nt, Homo sapiens
  misc_RNA (1)...(19): siRNA sense strand
ccuccuaccucugguucuu

SEQ ID NO: 1410148 - RNA, 19 nt, Homo sapiens
  misc_RNA (1)...(19): siRNA sense strand
cagcaacaccaagugcaaa

SEQ ID NO: 1410149 - RNA, 19 nt, Homo sapiens
  misc_RNA (1)...(19): siRNA sense strand
uuaaugcccaagugacuga

SEQ ID NO: 1410150 - RNA, 19 nt, Homo sapiens
  misc_RNA (1)...(19): siRNA sense strand
ggaaggccugcaucaugau

SEQ ID NO: 1410151 - RNA, 19 nt, Homo sapiens
  misc_RNA (1)...(19): siRNA sense strand
aaugcacacucaccagcaa

SEQ ID NO: 1410152 - RNA, 19 nt, Homo sapiens
  misc_RNA (1)...(19): siRNA sense strand
ccagcaacaccaagugcaa

SEQ ID NO: 1410153 - RNA, 19 nt, Homo sapiens
  misc_RNA (1)...(19): siRNA sense strand
gaauugaggaagacuguua

SEQ ID NO: 1410154 - RNA, 19 nt, Homo sapiens
  misc_RNA (1)...(19): siRNA sense strand
gaggaagacuguuacuaca

SEQ ID NO: 1410155 - RNA, 19 nt, Homo sapiens
  misc_RNA (1)...(19): siRNA sense strand
ggauuggaauugaggaaga

SEQ ID NO: 1410156 - RNA, 19 nt, Homo sapiens
  misc_RNA (1)...(19): siRNA sense strand
ugacugacaucaacuccaa

SEQ ID NO: 1410157 - RNA, 19 nt, Homo sapiens
  misc_RNA (1)...(19): siRNA sense strand
uggaaggccugcaucauga

SEQ ID NO: 1410158 - RNA, 19 nt, Homo sapiens
  misc_RNA (1)...(19): siRNA sense strand
uuacgucuguugcuagauu

SEQ ID NO: 1410159 - RNA, 19 nt, Homo sapiens
  misc_RNA (1)...(19): siRNA sense strand
ccaagugacugacaucaac

SEQ ID NO: 1410160 - RNA, 19 nt, Homo sapiens
  misc_RNA (1)...(19): siRNA sense strand
guucuuacgucuguugcua

SEQ ID NO: 1410161 - RNA, 19 nt, Homo sapiens
  misc_RNA (1)...(19): siRNA sense strand
ugaggaagacuguuacuac

SEQ ID NO: 1410162 - RNA, 19 nt, Homo sapiens
  misc_RNA (1)...(19): siRNA sense strand
ggccaauucugccauaagc

SEQ ID NO: 1410163 - RNA, 19 nt, Homo sapiens
  misc_RNA (1)...(19): siRNA sense strand
aacauggaaucaucaagga

SEQ ID NO: 1410164 - RNA, 19 nt, Homo sapiens
  misc_RNA (1)...(19): siRNA sense strand
uacgucuguugcuagauua

SEQ ID NO: 1410165 - RNA, 19 nt, Homo sapiens
  misc_RNA (1)...(19): siRNA sense strand
caucaacuccaagggauug

SEQ ID NO: 1410166 - RNA, 19 nt, Homo sapiens
  misc_RNA (1)...(19): siRNA sense strand
cauggaaucaucaaggaau

SEQ ID NO: 1410167 - RNA, 19 nt, Homo sapiens
  misc_RNA (1)...(19): siRNA sense strand
gcaacaccaagugcaaaga

SEQ ID NO: 1410168 - RNA, 19 nt, Homo sapiens
  misc_RNA (1)...(19): siRNA sense strand
caacaccaagugcaaagag

SEQ ID NO: 1410169 - RNA, 19 nt, Homo sapiens
  misc_RNA (1)...(19): siRNA sense strand
gcuagauuaucguccaaaa

SEQ ID NO: 1410170 - RNA, 19 nt, Homo sapiens
  misc_RNA (1)...(19): siRNA sense strand
ccuccuaccucugguucuu

SEQ ID NO: 1410171 - RNA, 19 nt, Homo sapiens
  misc_RNA (1)...(19): siRNA sense strand
cagcaacaccaagugcaaa

SEQ ID NO: 1410172 - RNA, 19 nt, Homo sapiens
  misc_RNA (1)...(19): siRNA sense strand
uuaaugcccaagugacuga

SEQ ID NO: 1410173 - RNA, 19 nt, Homo sapiens
  misc_RNA (1)...(19): siRNA sense strand
ggaaggccugcaucaugau

SEQ ID NO: 1410174 - RNA, 19 nt, Homo sapiens
  misc_RNA (1)...(19): siRNA sense strand
aaugcacacucaccagcaa

SEQ ID NO: 1410175 - RNA, 19 nt, Homo sapiens
  misc_RNA (1)...(19): siRNA sense strand
ccagcaacaccaagugcaa

SEQ ID NO: 1410176 - RNA, 19 nt, Homo sapiens
  misc_RNA (1)...(19): siRNA sense strand
gaauugaggaagacuguua

SEQ ID NO: 1410177 - RNA, 19 nt, Homo sapiens
  misc_RNA (1)...(19): siRNA sense strand
gaggaagacuguuacuaca

SEQ ID NO: 1410178 - RNA, 19 nt, Homo sapiens
  misc_RNA (1)...(19): siRNA sense strand
ggauuggaauugaggaaga

SEQ ID NO: 1410179 - RNA, 19 nt, Homo sapiens
  misc_RNA (1)...(19): siRNA sense strand
ugacugacaucaacuccaa

SEQ ID NO: 1410180 - RNA, 19 nt, Homo sapiens
  misc_RNA (1)...(19): siRNA sense strand
uggaaggccugcaucauga

SEQ ID NO: 1410181 - RNA, 19 nt, Homo sapiens
  misc_RNA (1)...(19): siRNA sense strand
uuacgucuguugcuagauu

SEQ ID NO: 1410182 - RNA, 19 nt, Homo sapiens
  misc_RNA (1)...(19): siRNA sense strand
ccaagugacugacaucaac

SEQ ID NO: 1410183 - RNA, 19 nt, Homo sapiens
  misc_RNA (1)...(19): siRNA sense strand
guucuuacgucuguugcua

SEQ ID NO: 1410184 - RNA, 19 nt, Homo sapiens
  misc_RNA (1)...(19): siRNA sense strand
ugaggaagacuguuacuac

SEQ ID NO: 1410185 - RNA, 19 nt, Homo sapiens
  misc_RNA (1)...(19): siRNA sense strand
ggccaauucugccauaagc

SEQ ID NO: 1410186 - RNA, 19 nt, Homo sapiens
  misc_RNA (1)...(19): siRNA sense strand
aacauggaaucaucaagga

SEQ ID NO: 1410187 - RNA, 19 nt, Homo sapiens
  misc_RNA (1)...(19): siRNA sense strand
uacgucuguugcuagauua

SEQ ID NO: 1410188 - RNA, 19 nt, Homo sapiens
  misc_RNA (1)...(19): siRNA sense strand
caucaacuccaagggauug

SEQ ID NO: 1410189 - RNA, 19 nt, Homo sapiens
  misc_RNA (1)...(19): siRNA sense strand
cauggaaucaucaaggaau

SEQ ID NO: 1410190 - RNA, 19 nt, Homo sapiens
  misc_RNA (1)...(19): siRNA sense strand
gcaacaccaagugcaaaga

SEQ ID NO: 1410191 - RNA, 19 nt, Homo sapiens
  misc_RNA (1)...(19): siRNA sense strand
caacaccaagugcaaagag

SEQ ID NO: 1410192 - RNA, 19 nt, Homo sapiens
  misc_RNA (1)...(19): siRNA sense strand
gcuagauuaucguccaaaa

SEQ ID NO: 1410193 - RNA, 19 nt, Homo sapiens
  misc_RNA (1)...(19): siRNA sense strand
ccuccuaccucugguucuu

SEQ ID NO: 1410194 - RNA, 19 nt, Homo sapiens
  misc_RNA (1)...(19): siRNA sense strand
cagcaacaccaagugcaaa

SEQ ID NO: 1410195 - RNA, 19 nt, Homo sapiens
  misc_RNA (1)...(19): siRNA sense strand
uuaaugcccaagugacuga

SEQ ID NO: 1410196 - RNA, 19 nt, Homo sapiens
  misc_RNA (1)...(19): siRNA sense strand
ggaaggccugcaucaugau

SEQ ID NO: 1410197 - RNA, 19 nt, Homo sapiens
  misc_RNA (1)...(19): siRNA sense strand
aaugcacacucaccagcaa

SEQ ID NO: 1410198 - RNA, 19 nt, Homo sapiens
  misc_RNA (1)...(19): siRNA sense strand
ccagcaacaccaagugcaa

SEQ ID NO: 1410199 - RNA, 19 nt, Homo sapiens
  misc_RNA (1)...(19): siRNA sense strand
gaguuuaucugcuguauag

SEQ ID NO: 1410200 - RNA, 19 nt, Homo sapiens
  misc_RNA (1)...(19): siRNA sense strand
gcgcaggugucuuccauuu

SEQ ID NO: 1410201 - RNA, 19 nt, Homo sapiens
  misc_RNA (1)...(19): siRNA sense strand
gagacucuauuccgaugua

SEQ ID NO: 1410202 - RNA, 19 nt, Homo sapiens
  misc_RNA (1)...(19): siRNA sense strand
gcaggugucuuccauuuac

SEQ ID NO: 1410203 - RNA, 19 nt, Homo sapiens
  misc_RNA (1)...(19): siRNA sense strand
gggcaagggcgaaacuuaa

SEQ ID NO: 1410204 - RNA, 19 nt, Homo sapiens
  misc_RNA (1)...(19): siRNA sense strand
gaaggcaggagacucuauu

SEQ ID NO: 1410205 - RNA, 19 nt, Homo sapiens
  misc_RNA (1)...(19): siRNA sense strand
cuauuccgauguauaagaa

SEQ ID NO: 1410206 - RNA, 19 nt, Homo sapiens
  misc_RNA (1)...(19): siRNA sense strand
gauauucugagugucauaa

SEQ ID NO: 1410207 - RNA, 19 nt, Homo sapiens
  misc_RNA (1)...(19): siRNA sense strand
ggaguuuaucugcuguaua

SEQ ID NO: 1410208 - RNA, 19 nt, Homo sapiens
  misc_RNA (1)...(19): siRNA sense strand
cuuaaccucucuccacaug

SEQ ID NO: 1410209 - RNA, 19 nt, Homo sapiens
  misc_RNA (1)...(19): siRNA sense strand
ggaaggcaggagacucuau

SEQ ID NO: 1410210 - RNA, 19 nt, Homo sapiens
  misc_RNA (1)...(19): siRNA sense strand
acucuauuccgauguauaa

SEQ ID NO: 1410211 - RNA, 19 nt, Homo sapiens
  misc_RNA (1)...(19): siRNA sense strand
ugucuuccauuuacaccaa

SEQ ID NO: 1410212 - RNA, 19 nt, Homo sapiens
  misc_RNA (1)...(19): siRNA sense strand
cgggcaagggcgaaacuua

SEQ ID NO: 1410213 - RNA, 19 nt, Homo sapiens
  misc_RNA (1)...(19): siRNA sense strand
ccuacaggcccaaggauau

SEQ ID NO: 1410214 - RNA, 19 nt, Homo sapiens
  misc_RNA (1)...(19): siRNA sense strand
uagcgcaggugucuuccau

SEQ ID NO: 1410215 - RNA, 19 nt, Homo sapiens
  misc_RNA (1)...(19): siRNA sense strand
gccuacaacagcugcuaua

SEQ ID NO: 1410216 - RNA, 19 nt, Homo sapiens
  misc_RNA (1)...(19): siRNA sense strand
ggauauucugagugucaua

SEQ ID NO: 1410217 - RNA, 19 nt, Homo sapiens
  misc_RNA (1)...(19): siRNA sense strand
gauaugguguccgaaucca

SEQ ID NO: 1410218 - RNA, 19 nt, Homo sapiens
  misc_RNA (1)...(19): siRNA sense strand
cuauagcgcaggugucuuc

SEQ ID NO: 1410219 - RNA, 19 nt, Homo sapiens
  misc_RNA (1)...(19): siRNA sense strand
cagguggugucucgagaag

SEQ ID NO: 1410220 - RNA, 19 nt, Homo sapiens
  misc_RNA (1)...(19): siRNA sense strand
ggcgaaacuuaaccucucu

SEQ ID NO: 1410221 - RNA, 19 nt, Homo sapiens
  misc_RNA (1)...(19): siRNA sense strand
gacucuauuccgauguaua

SEQ ID NO: 1410222 - RNA, 19 nt, Homo sapiens
  misc_RNA (1)...(19): siRNA sense strand
cgcaggugucuuccauuua

SEQ ID NO: 1410223 - RNA, 19 nt, Homo sapiens
  misc_RNA (1)...(19): siRNA sense strand
gaguuuaucugcuguauag

SEQ ID NO: 1410224 - RNA, 19 nt, Homo sapiens
  misc_RNA (1)...(19): siRNA sense strand
gcgcaggugucuuccauuu

SEQ ID NO: 1410225 - RNA, 19 nt, Homo sapiens
  misc_RNA (1)...(19): siRNA sense strand
gagacucuauuccgaugua

SEQ ID NO: 1410226 - RNA, 19 nt, Homo sapiens
  misc_RNA (1)...(19): siRNA sense strand
gcaggugucuuccauuuac

SEQ ID NO: 1410227 - RNA, 19 nt, Homo sapiens
  misc_RNA (1)...(19): siRNA sense strand
gggcaagggcgaaacuuaa

SEQ ID NO: 1410228 - RNA, 19 nt, Homo sapiens
  misc_RNA (1)...(19): siRNA sense strand
gaaggcaggagacucuauu

SEQ ID NO: 1410229 - RNA, 19 nt, Homo sapiens
  misc_RNA (1)...(19): siRNA sense strand
cuauuccgauguauaagaa

SEQ ID NO: 1410230 - RNA, 19 nt, Homo sapiens
  misc_RNA (1)...(19): siRNA sense strand
gauauucugagugucauaa

SEQ ID NO: 1410231 - RNA, 19 nt, Homo sapiens
  misc_RNA (1)...(19): siRNA sense strand
ggaguuuaucugcuguaua

SEQ ID NO: 1410232 - RNA, 19 nt, Homo sapiens
  misc_RNA (1)...(19): siRNA sense strand
cuuaaccucucuccacaug

SEQ ID NO: 1410233 - RNA, 19 nt, Homo sapiens
  misc_RNA (1)...(19): siRNA sense strand
ggaaggcaggagacucuau

SEQ ID NO: 1410234 - RNA, 19 nt, Homo sapiens
  misc_RNA (1)...(19): siRNA sense strand
acucuauuccgauguauaa

SEQ ID NO: 1410235 - RNA, 19 nt, Homo sapiens
  misc_RNA (1)...(19): siRNA sense strand
ugucuuccauuuacaccaa

SEQ ID NO: 1410236 - RNA, 19 nt, Homo sapiens
  misc_RNA (1)...(19): siRNA sense strand
cgggcaagggcgaaacuua

SEQ ID NO: 1410237 - RNA, 19 nt, Homo sapiens
  misc_RNA (1)...(19): siRNA sense strand
ccuacaggcccaaggauau

SEQ ID NO: 1410238 - RNA, 19 nt, Homo sapiens
  misc_RNA (1)...(19): siRNA sense strand
uagcgcaggugucuuccau

SEQ ID NO: 1410239 - RNA, 19 nt, Homo sapiens
  misc_RNA (1)...(19): siRNA sense strand
gccuacaacagcugcuaua

SEQ ID NO: 1410240 - RNA, 19 nt, Homo sapiens
  misc_RNA (1)...(19): siRNA sense strand
ggauauucugagugucaua

SEQ ID NO: 1410241 - RNA, 19 nt, Homo sapiens
  misc_RNA (1)...(19): siRNA sense strand
gauaugguguccgaaucca

SEQ ID NO: 1410242 - RNA, 19 nt, Homo sapiens
  misc_RNA (1)...(19): siRNA sense strand
cuauagcgcaggugucuuc

SEQ ID NO: 1410243 - RNA, 19 nt, Homo sapiens
  misc_RNA (1)...(19): siRNA sense strand
cagguggugucucgagaag

SEQ ID NO: 1410244 - RNA, 19 nt, Homo sapiens
  misc_RNA (1)...(19): siRNA sense strand
ggcgaaacuuaaccucucu

SEQ ID NO: 1410245 - RNA, 19 nt, Homo sapiens
  misc_RNA (1)...(19): siRNA sense strand
gacucuauuccgauguaua

SEQ ID NO: 1410246 - RNA, 19 nt, Homo sapiens
  misc_RNA (1)...(19): siRNA sense strand
cgcaggugucuuccauuua

SEQ ID NO: 1410247 - RNA, 19 nt, Homo sapiens
  misc_RNA (1)...(19): siRNA sense strand
gaguuuaucugcuguauag

SEQ ID NO: 1410248 - RNA, 19 nt, Homo sapiens
  misc_RNA (1)...(19): siRNA sense strand
gcgcaggugucuuccauuu

SEQ ID NO: 1410249 - RNA, 19 nt, Homo sapiens
  misc_RNA (1)...(19): siRNA sense strand
gagacucuauuccgaugua

SEQ ID NO: 1410250 - RNA, 19 nt, Homo sapiens
  misc_RNA (1)...(19): siRNA sense strand
gcaggugucuuccauuuac

SEQ ID NO: 1410251 - RNA, 19 nt, Homo sapiens
  misc_RNA (1)...(19): siRNA sense strand
gggcaagggcgaaacuuaa

SEQ ID NO: 1410252 - RNA, 19 nt, Homo sapiens
  misc_RNA (1)...(19): siRNA sense strand
gaaggcaggagacucuauu

SEQ ID NO: 1410253 - RNA, 19 nt, Homo sapiens
  misc_RNA (1)...(19): siRNA sense strand
cuauuccgauguauaagaa

SEQ ID NO: 1410254 - RNA, 19 nt, Homo sapiens
  misc_RNA (1)...(19): siRNA sense strand
gauauucugagugucauaa

SEQ ID NO: 1410255 - RNA, 19 nt, Homo sapiens
  misc_RNA (1)...(19): siRNA sense strand
ggaguuuaucugcuguaua

SEQ ID NO: 1410256 - RNA, 19 nt, Homo sapiens
  misc_RNA (1)...(19): siRNA sense strand
cuuaaccucucuccacaug

SEQ ID NO: 1410257 - RNA, 19 nt, Homo sapiens
  misc_RNA (1)...(19): siRNA sense strand
ggaaggcaggagacucuau

SEQ ID NO: 1410258 - RNA, 19 nt, Homo sapiens
  misc_RNA (1)...(19): siRNA sense strand
acucuauuccgauguauaa

SEQ ID NO: 1410259 - RNA, 19 nt, Homo sapiens
  misc_RNA (1)...(19): siRNA sense strand
ugucuuccauuuacaccaa

SEQ ID NO: 1410260 - RNA, 19 nt, Homo sapiens
  misc_RNA (1)...(19): siRNA sense strand
cgggcaagggcgaaacuua

SEQ ID NO: 1410261 - RNA, 19 nt, Homo sapiens
  misc_RNA (1)...(19): siRNA sense strand
ccuacaggcccaaggauau

SEQ ID NO: 1410262 - RNA, 19 nt, Homo sapiens
  misc_RNA (1)...(19): siRNA sense strand
uagcgcaggugucuuccau

SEQ ID NO: 1410263 - RNA, 19 nt, Homo sapiens
  misc_RNA (1)...(19): siRNA sense strand
gccuacaacagcugcuaua

SEQ ID NO: 1410264 - RNA, 19 nt, Homo sapiens
  misc_RNA (1)...(19): siRNA sense strand
ggauauucugagugucaua

SEQ ID NO: 1410265 - RNA, 19 nt, Homo sapiens
  misc_RNA (1)...(19): siRNA sense strand
gauaugguguccgaaucca

SEQ ID NO: 1410266 - RNA, 19 nt, Homo sapiens
  misc_RNA (1)...(19): siRNA sense strand
cuauagcgcaggugucuuc

SEQ ID NO: 1410267 - RNA, 19 nt, Homo sapiens
  misc_RNA (1)...(19): siRNA sense strand
cagguggugucucgagaag

SEQ ID NO: 1410268 - RNA, 19 nt, Homo sapiens
  misc_RNA (1)...(19): siRNA sense strand
ggcgaaacuuaaccucucu

SEQ ID NO: 1410269 - RNA, 19 nt, Homo sapiens
  misc_RNA (1)...(19): siRNA sense strand
gacucuauuccgauguaua

SEQ ID NO: 1410270 - RNA, 19 nt, Homo sapiens
  misc_RNA (1)...(19): siRNA sense strand
cgcaggugucuuccauuua

SEQ ID NO: 1410271 - RNA, 19 nt, Homo sapiens
  misc_RNA (1)...(19): siRNA sense strand
gaguuuaucugcuguauag

SEQ ID NO: 1410272 - RNA, 19 nt, Homo sapiens
  misc_RNA (1)...(19): siRNA sense strand
gcgcaggugucuuccauuu

SEQ ID NO: 1410273 - RNA, 19 nt, Homo sapiens
  misc_RNA (1)...(19): siRNA sense strand
gagacucuauuccgaugua

SEQ ID NO: 1410274 - RNA, 19 nt, Homo sapiens
  misc_RNA (1)...(19): siRNA sense strand
gcaggugucuuccauuuac

SEQ ID NO: 1410275 - RNA, 19 nt, Homo sapiens
  misc_RNA (1)...(19): siRNA sense strand
gggcaagggcgaaacuuaa

SEQ ID NO: 1410276 - RNA, 19 nt, Homo sapiens
  misc_RNA (1)...(19): siRNA sense strand
gaaggcaggagacucuauu

SEQ ID NO: 1410277 - RNA, 19 nt, Homo sapiens
  misc_RNA (1)...(19): siRNA sense strand
cuauuccgauguauaagaa

SEQ ID NO: 1410278 - RNA, 19 nt, Homo sapiens
  misc_RNA (1)...(19): siRNA sense strand
gauauucugagugucauaa

SEQ ID NO: 1410279 - RNA, 19 nt, Homo sapiens
  misc_RNA (1)...(19): siRNA sense strand
ggaguuuaucugcuguaua

SEQ ID NO: 1410280 - RNA, 19 nt, Homo sapiens
  misc_RNA (1)...(19): siRNA sense strand
cuuaaccucucuccacaug

SEQ ID NO: 1410281 - RNA, 19 nt, Homo sapiens
  misc_RNA (1)...(19): siRNA sense strand
ggaaggcaggagacucuau

SEQ ID NO: 1410282 - RNA, 19 nt, Homo sapiens
  misc_RNA (1)...(19): siRNA sense strand
acucuauuccgauguauaa

SEQ ID NO: 1410283 - RNA, 19 nt, Homo sapiens
  misc_RNA (1)...(19): siRNA sense strand
ugucuuccauuuacaccaa

SEQ ID NO: 1410284 - RNA, 19 nt, Homo sapiens
  misc_RNA (1)...(19): siRNA sense strand
cgggcaagggcgaaacuua

SEQ ID NO: 1410285 - RNA, 19 nt, Homo sapiens
  misc_RNA (1)...(19): siRNA sense strand
ccuacaggcccaaggauau

SEQ ID NO: 1410286 - RNA, 19 nt, Homo sapiens
  misc_RNA (1)...(19): siRNA sense strand
uagcgcaggugucuuccau

SEQ ID NO: 1410287 - RNA, 19 nt, Homo sapiens
  misc_RNA (1)...(19): siRNA sense strand
gccuacaacagcugcuaua

SEQ ID NO: 1410288 - RNA, 19 nt, Homo sapiens
  misc_RNA (1)...(19): siRNA sense strand
ggauauucugagugucaua

SEQ ID NO: 1410289 - RNA, 19 nt, Homo sapiens
  misc_RNA (1)...(19): siRNA sense strand
gauaugguguccgaaucca

SEQ ID NO: 1410290 - RNA, 19 nt, Homo sapiens
  misc_RNA (1)...(19): siRNA sense strand
cuauagcgcaggugucuuc

SEQ ID NO: 1410291 - RNA, 19 nt, Homo sapiens
  misc_RNA (1)...(19): siRNA sense strand
cagguggugucucgagaag

SEQ ID NO: 1410292 - RNA, 19 nt, Homo sapiens
  misc_RNA (1)...(19): siRNA sense strand
ggcgaaacuuaaccucucu

SEQ ID NO: 1410293 - RNA, 19 nt, Homo sapiens
  misc_RNA (1)...(19): siRNA sense strand
gacucuauuccgauguaua

SEQ ID NO: 1410294 - RNA, 19 nt, Homo sapiens
  misc_RNA (1)...(19): siRNA sense strand
cgcaggugucuuccauuua

SEQ ID NO: 1410295 - RNA, 19 nt, Homo sapiens
  misc_RNA (1)...(19): siRNA sense strand
gaguuuaucugcuguauag

SEQ ID NO: 1410296 - RNA, 19 nt, Homo sapiens
  misc_RNA (1)...(19): siRNA sense strand
gcgcaggugucuuccauuu

SEQ ID NO: 1410297 - RNA, 19 nt, Homo sapiens
  misc_RNA (1)...(19): siRNA sense strand
gagacucuauuccgaugua

SEQ ID NO: 1410298 - RNA, 19 nt, Homo sapiens
  misc_RNA (1)...(19): siRNA sense strand
gcaggugucuuccauuuac

SEQ ID NO: 1410299 - RNA, 19 nt, Homo sapiens
  misc_RNA (1)...(19): siRNA sense strand
gggcaagggcgaaacuuaa

SEQ ID NO: 1410300 - RNA, 19 nt, Homo sapiens
  misc_RNA (1)...(19): siRNA sense strand
gaaggcaggagacucuauu

SEQ ID NO: 1410301 - RNA, 19 nt, Homo sapiens
  misc_RNA (1)...(19): siRNA sense strand
cuauuccgauguauaagaa

SEQ ID NO: 1410302 - RNA, 19 nt, Homo sapiens
  misc_RNA (1)...(19): siRNA sense strand
gauauucugagugucauaa

SEQ ID NO: 1410303 - RNA, 19 nt, Homo sapiens
  misc_RNA (1)...(19): siRNA sense strand
ggaguuuaucugcuguaua

SEQ ID NO: 1410304 - RNA, 19 nt, Homo sapiens
  misc_RNA (1)...(19): siRNA sense strand
cuuaaccucucuccacaug

SEQ ID NO: 1410305 - RNA, 19 nt, Homo sapiens
  misc_RNA (1)...(19): siRNA sense strand
ggaaggcaggagacucuau

SEQ ID NO: 1410306 - RNA, 19 nt, Homo sapiens
  misc_RNA (1)...(19): siRNA sense strand
acucuauuccgauguauaa

SEQ ID NO: 1410307 - RNA, 19 nt, Homo sapiens
  misc_RNA (1)...(19): siRNA sense strand
ugucuuccauuuacaccaa

SEQ ID NO: 1410308 - RNA, 19 nt, Homo sapiens
  misc_RNA (1)...(19): siRNA sense strand
cgggcaagggcgaaacuua

SEQ ID NO: 1410309 - RNA, 19 nt, Homo sapiens
  misc_RNA (1)...(19): siRNA sense strand
ccuacaggcccaaggauau

SEQ ID NO: 1410310 - RNA, 19 nt, Homo sapiens
  misc_RNA (1)...(19): siRNA sense strand
uagcgcaggugucuuccau

SEQ ID NO: 1410311 - RNA, 19 nt, Homo sapiens
  misc_RNA (1)...(19): siRNA sense strand
gccuacaacagcugcuaua

SEQ ID NO: 1410312 - RNA, 19 nt, Homo sapiens
  misc_RNA (1)...(19): siRNA sense strand
ggauauucugagugucaua

SEQ ID NO: 1410313 - RNA, 19 nt, Homo sapiens
  misc_RNA (1)...(19): siRNA sense strand
gauaugguguccgaaucca

SEQ ID NO: 1410314 - RNA, 19 nt, Homo sapiens
  misc_RNA (1)...(19): siRNA sense strand
cuauagcgcaggugucuuc

SEQ ID NO: 1410315 - RNA, 19 nt, Homo sapiens
  misc_RNA (1)...(19): siRNA sense strand
cagguggugucucgagaag

SEQ ID NO: 1410316 - RNA, 19 nt, Homo sapiens
  misc_RNA (1)...(19): siRNA sense strand
ggcgaaacuuaaccucucu

SEQ ID NO: 1410317 - RNA, 19 nt, Homo sapiens
  misc_RNA (1)...(19): siRNA sense strand
gacucuauuccgauguaua

SEQ ID NO: 1410318 - RNA, 19 nt, Homo sapiens
  misc_RNA (1)...(19): siRNA sense strand
cgcaggugucuuccauuua

SEQ ID NO: 1410319 - RNA, 19 nt, Homo sapiens
  misc_RNA (1)...(19): siRNA sense strand
gaguuuaucugcuguauag

SEQ ID NO: 1410320 - RNA, 19 nt, Homo sapiens
  misc_RNA (1)...(19): siRNA sense strand
gcgcaggugucuuccauuu

SEQ ID NO: 1410321 - RNA, 19 nt, Homo sapiens
  misc_RNA (1)...(19): siRNA sense strand
gagacucuauuccgaugua

SEQ ID NO: 1410322 - RNA, 19 nt, Homo sapiens
  misc_RNA (1)...(19): siRNA sense strand
gcaggugucuuccauuuac

SEQ ID NO: 1410323 - RNA, 19 nt, Homo sapiens
  misc_RNA (1)...(19): siRNA sense strand
gggcaagggcgaaacuuaa

SEQ ID NO: 1410324 - RNA, 19 nt, Homo sapiens
  misc_RNA (1)...(19): siRNA sense strand
gaaggcaggagacucuauu

SEQ ID NO: 1410325 - RNA, 19 nt, Homo sapiens
  misc_RNA (1)...(19): siRNA sense strand
cuauuccgauguauaagaa

SEQ ID NO: 1410326 - RNA, 19 nt, Homo sapiens
  misc_RNA (1)...(19): siRNA sense strand
gauauucugagugucauaa

SEQ ID NO: 1410327 - RNA, 19 nt, Homo sapiens
  misc_RNA (1)...(19): siRNA sense strand
ggaguuuaucugcuguaua

SEQ ID NO: 1410328 - RNA, 19 nt, Homo sapiens
  misc_RNA (1)...(19): siRNA sense strand
cuuaaccucucuccacaug

SEQ ID NO: 1410329 - RNA, 19 nt, Homo sapiens
  misc_RNA (1)...(19): siRNA sense strand
ggaaggcaggagacucuau

SEQ ID NO: 1410330 - RNA, 19 nt, Homo sapiens
  misc_RNA (1)...(19): siRNA sense strand
acucuauuccgauguauaa

SEQ ID NO: 1410331 - RNA, 19 nt, Homo sapiens
  misc_RNA (1)...(19): siRNA sense strand
ugucuuccauuuacaccaa

SEQ ID NO: 1410332 - RNA, 19 nt, Homo sapiens
  misc_RNA (1)...(19): siRNA sense strand
cgggcaagggcgaaacuua

SEQ ID NO: 1410333 - RNA, 19 nt, Homo sapiens
  misc_RNA (1)...(19): siRNA sense strand
ccuacaggcccaaggauau

SEQ ID NO: 1410334 - RNA, 19 nt, Homo sapiens
  misc_RNA (1)...(19): siRNA sense strand
uagcgcaggugucuuccau

SEQ ID NO: 1410335 - RNA, 19 nt, Homo sapiens
  misc_RNA (1)...(19): siRNA sense strand
gccuacaacagcugcuaua

SEQ ID NO: 1410336 - RNA, 19 nt, Homo sapiens
  misc_RNA (1)...(19): siRNA sense strand
ggauauucugagugucaua

SEQ ID NO: 1410337 - RNA, 19 nt, Homo sapiens
  misc_RNA (1)...(19): siRNA sense strand
gauaugguguccgaaucca

SEQ ID NO: 1410338 - RNA, 19 nt, Homo sapiens
  misc_RNA (1)...(19): siRNA sense strand
cuauagcgcaggugucuuc

SEQ ID NO: 1410339 - RNA, 19 nt, Homo sapiens
  misc_RNA (1)...(19): siRNA sense strand
cagguggugucucgagaag

SEQ ID NO: 1410340 - RNA, 19 nt, Homo sapiens
  misc_RNA (1)...(19): siRNA sense strand
ggcgaaacuuaaccucucu

SEQ ID NO: 1410341 - RNA, 19 nt, Homo sapiens
  misc_RNA (1)...(19): siRNA sense strand
gacucuauuccgauguaua

SEQ ID NO: 1410342 - RNA, 19 nt, Homo sapiens
  misc_RNA (1)...(19): siRNA sense strand
cgcaggugucuuccauuua

SEQ ID NO: 1410343 - RNA, 19 nt, Homo sapiens
  misc_RNA (1)...(19): siRNA sense strand
gaguuuaucugcuguauag

SEQ ID NO: 1410344 - RNA, 19 nt, Homo sapiens
  misc_RNA (1)...(19): siRNA sense strand
gcgcaggugucuuccauuu

SEQ ID NO: 1410345 - RNA, 19 nt, Homo sapiens
  misc_RNA (1)...(19): siRNA sense strand
gagacucuauuccgaugua

SEQ ID NO: 1410346 - RNA, 19 nt, Homo sapiens
  misc_RNA (1)...(19): siRNA sense strand
gcaggugucuuccauuuac

SEQ ID NO: 1410347 - RNA, 19 nt, Homo sapiens
  misc_RNA (1)...(19): siRNA sense strand
gggcaagggcgaaacuuaa

SEQ ID NO: 1410348 - RNA, 19 nt, Homo sapiens
  misc_RNA (1)...(19): siRNA sense strand
gaaggcaggagacucuauu

SEQ ID NO: 1410349 - RNA, 19 nt, Homo sapiens
  misc_RNA (1)...(19): siRNA sense strand
cuauuccgauguauaagaa

SEQ ID NO: 1410350 - RNA, 19 nt, Homo sapiens
  misc_RNA (1)...(19): siRNA sense strand
gauauucugagugucauaa

SEQ ID NO: 1410351 - RNA, 19 nt, Homo sapiens
  misc_RNA (1)...(19): siRNA sense strand
ggaguuuaucugcuguaua

SEQ ID NO: 1410352 - RNA, 19 nt, Homo sapiens
  misc_RNA (1)...(19): siRNA sense strand
cuuaaccucucuccacaug

SEQ ID NO: 1410353 - RNA, 19 nt, Homo sapiens
  misc_RNA (1)...(19): siRNA sense strand
ggaaggcaggagacucuau

SEQ ID NO: 1410354 - RNA, 19 nt, Homo sapiens
  misc_RNA (1)...(19): siRNA sense strand
acucuauuccgauguauaa

SEQ ID NO: 1410355 - RNA, 19 nt, Homo sapiens
  misc_RNA (1)...(19): siRNA sense strand
ugucuuccauuuacaccaa

SEQ ID NO: 1410356 - RNA, 19 nt, Homo sapiens
  misc_RNA (1)...(19): siRNA sense strand
cgggcaagggcgaaacuua

SEQ ID NO: 1410357 - RNA, 19 nt, Homo sapiens
  misc_RNA (1)...(19): siRNA sense strand
ccuacaggcccaaggauau

SEQ ID NO: 1410358 - RNA, 19 nt, Homo sapiens
  misc_RNA (1)...(19): siRNA sense strand
uagcgcaggugucuuccau

SEQ ID NO: 1410359 - RNA, 19 nt, Homo sapiens
  misc_RNA (1)...(19): siRNA sense strand
gccuacaacagcugcuaua

SEQ ID NO: 1410360 - RNA, 19 nt, Homo sapiens
  misc_RNA (1)...(19): siRNA sense strand
ggauauucugagugucaua

SEQ ID NO: 1410361 - RNA, 19 nt, Homo sapiens
  misc_RNA (1)...(19): siRNA sense strand
gauaugguguccgaaucca

SEQ ID NO: 1410362 - RNA, 19 nt, Homo sapiens
  misc_RNA (1)...(19): siRNA sense strand
cuauagcgcaggugucuuc

SEQ ID NO: 1410363 - RNA, 19 nt, Homo sapiens
  misc_RNA (1)...(19): siRNA sense strand
cagguggugucucgagaag

SEQ ID NO: 1410364 - RNA, 19 nt, Homo sapiens
  misc_RNA (1)...(19): siRNA sense strand
ggcgaaacuuaaccucucu

SEQ ID NO: 1410365 - RNA, 19 nt, Homo sapiens
  misc_RNA (1)...(19): siRNA sense strand
gacucuauuccgauguaua

SEQ ID NO: 1410366 - RNA, 19 nt, Homo sapiens
  misc_RNA (1)...(19): siRNA sense strand
cgcaggugucuuccauuua

SEQ ID NO: 1410367 - RNA, 19 nt, Homo sapiens
  misc_RNA (1)...(19): siRNA sense strand
gaguuuaucugcuguauag

SEQ ID NO: 1410368 - RNA, 19 nt, Homo sapiens
  misc_RNA (1)...(19): siRNA sense strand
gcgcaggugucuuccauuu

SEQ ID NO: 1410369 - RNA, 19 nt, Homo sapiens
  misc_RNA (1)...(19): siRNA sense strand
gagacucuauuccgaugua

SEQ ID NO: 1410370 - RNA, 19 nt, Homo sapiens
  misc_RNA (1)...(19): siRNA sense strand
gcaggugucuuccauuuac

SEQ ID NO: 1410371 - RNA, 19 nt, Homo sapiens
  misc_RNA (1)...(19): siRNA sense strand
gggcaagggcgaaacuuaa

SEQ ID NO: 1410372 - RNA, 19 nt, Homo sapiens
  misc_RNA (1)...(19): siRNA sense strand
gaaggcaggagacucuauu

SEQ ID NO: 1410373 - RNA, 19 nt, Homo sapiens
  misc_RNA (1)...(19): siRNA sense strand
cuauuccgauguauaagaa

SEQ ID NO: 1410374 - RNA, 19 nt, Homo sapiens
  misc_RNA (1)...(19): siRNA sense strand
gauauucugagugucauaa

SEQ ID NO: 1410375 - RNA, 19 nt, Homo sapiens
  misc_RNA (1)...(19): siRNA sense strand
ggaguuuaucugcuguaua

SEQ ID NO: 1410376 - RNA, 19 nt, Homo sapiens
  misc_RNA (1)...(19): siRNA sense strand
cuuaaccucucuccacaug

SEQ ID NO: 1410377 - RNA, 19 nt, Homo sapiens
  misc_RNA (1)...(19): siRNA sense strand
ggaaggcaggagacucuau

SEQ ID NO: 1410378 - RNA, 19 nt, Homo sapiens
  misc_RNA (1)...(19): siRNA sense strand
acucuauuccgauguauaa

SEQ ID NO: 1410379 - RNA, 19 nt, Homo sapiens
  misc_RNA (1)...(19): siRNA sense strand
ugucuuccauuuacaccaa

SEQ ID NO: 1410380 - RNA, 19 nt, Homo sapiens
  misc_RNA (1)...(19): siRNA sense strand
cgggcaagggcgaaacuua

SEQ ID NO: 1410381 - RNA, 19 nt, Homo sapiens
  misc_RNA (1)...(19): siRNA sense strand
ccuacaggcccaaggauau

SEQ ID NO: 1410382 - RNA, 19 nt, Homo sapiens
  misc_RNA (1)...(19): siRNA sense strand
uagcgcaggugucuuccau

SEQ ID NO: 1410383 - RNA, 19 nt, Homo sapiens
  misc_RNA (1)...(19): siRNA sense strand
gccuacaacagcugcuaua

SEQ ID NO: 1410384 - RNA, 19 nt, Homo sapiens
  misc_RNA (1)...(19): siRNA sense strand
ggauauucugagugucaua

SEQ ID NO: 1410385 - RNA, 19 nt, Homo sapiens
  misc_RNA (1)...(19): siRNA sense strand
gauaugguguccgaaucca

SEQ ID NO: 1410386 - RNA, 19 nt, Homo sapiens
  misc_RNA (1)...(19): siRNA sense strand
cuauagcgcaggugucuuc

SEQ ID NO: 1410387 - RNA, 19 nt, Homo sapiens
  misc_RNA (1)...(19): siRNA sense strand
cagguggugucucgagaag

SEQ ID NO: 1410388 - RNA, 19 nt, Homo sapiens
  misc_RNA (1)...(19): siRNA sense strand
ggcgaaacuuaaccucucu

SEQ ID NO: 1410389 - RNA, 19 nt, Homo sapiens
  misc_RNA (1)...(19): siRNA sense strand
gacucuauuccgauguaua

SEQ ID NO: 1410390 - RNA, 19 nt, Homo sapiens
  misc_RNA (1)...(19): siRNA sense strand
cgcaggugucuuccauuua

SEQ ID NO: 1410391 - RNA, 19 nt, Homo sapiens
  misc_RNA (1)...(19): siRNA sense strand
gaaagagcaugaugacaua

SEQ ID NO: 1410392 - RNA, 19 nt, Homo sapiens
  misc_RNA (1)...(19): siRNA sense strand
gaacagcucugaaagcauu

SEQ ID NO: 1410393 - RNA, 19 nt, Homo sapiens
  misc_RNA (1)...(19): siRNA sense strand
gagaagauguugaaaugua

SEQ ID NO: 1410394 - RNA, 19 nt, Homo sapiens
  misc_RNA (1)...(19): siRNA sense strand
gaggacagcuugaggguua

SEQ ID NO: 1410395 - RNA, 19 nt, Homo sapiens
  misc_RNA (1)...(19): siRNA sense strand
gaaacugaauggaagaaua

SEQ ID NO: 1410396 - RNA, 19 nt, Homo sapiens
  misc_RNA (1)...(19): siRNA sense strand
aaagaaggcuguaccguua

SEQ ID NO: 1410397 - RNA, 19 nt, Homo sapiens
  misc_RNA (1)...(19): siRNA sense strand
aaacacagcucuggaauaa

SEQ ID NO: 1410398 - RNA, 19 nt, Homo sapiens
  misc_RNA (1)...(19): siRNA sense strand
gaaauagaacuucgaauga

SEQ ID NO: 1410399 - RNA, 19 nt, Homo sapiens
  misc_RNA (1)...(19): siRNA sense strand
gcaaugauguggucuuguu

SEQ ID NO: 1410400 - RNA, 19 nt, Homo sapiens
  misc_RNA (1)...(19): siRNA sense strand
gaccauauccuuaaaugua

SEQ ID NO: 1410401 - RNA, 19 nt, Homo sapiens
  misc_RNA (1)...(19): siRNA sense strand
gcaaugggaugcagcuauu

SEQ ID NO: 1410402 - RNA, 19 nt, Homo sapiens
  misc_RNA (1)...(19): siRNA sense strand
cagcuuaucuugcaaguga

SEQ ID NO: 1410403 - RNA, 19 nt, Homo sapiens
  misc_RNA (1)...(19): siRNA sense strand
gaaguuaggcgauuagaga

SEQ ID NO: 1410404 - RNA, 19 nt, Homo sapiens
  misc_RNA (1)...(19): siRNA sense strand
gacaaaggcauucaucaua

SEQ ID NO: 1410405 - RNA, 19 nt, Homo sapiens
  misc_RNA (1)...(19): siRNA sense strand
gauccaagcuugauuaagg

SEQ ID NO: 1410406 - RNA, 19 nt, Homo sapiens
  misc_RNA (1)...(19): siRNA sense strand
ggaagaaaguauuaaacga

SEQ ID NO: 1410407 - RNA, 19 nt, Homo sapiens
  misc_RNA (1)...(19): siRNA sense strand
aaacagcucuaaaccauug

SEQ ID NO: 1410408 - RNA, 19 nt, Homo sapiens
  misc_RNA (1)...(19): siRNA sense strand
ugacauguauucugaaguu

SEQ ID NO: 1410409 - RNA, 19 nt, Homo sapiens
  misc_RNA (1)...(19): siRNA sense strand
gaagaccucaagaaaguua

SEQ ID NO: 1410410 - RNA, 19 nt, Homo sapiens
  misc_RNA (1)...(19): siRNA sense strand
gcugaacgcaguauuguua

SEQ ID NO: 1410411 - RNA, 19 nt, Homo sapiens
  misc_RNA (1)...(19): siRNA sense strand
gauggugcuuguugacuua

SEQ ID NO: 1410412 - RNA, 19 nt, Homo sapiens
  misc_RNA (1)...(19): siRNA sense strand
ggacauccuuucagcaguu

SEQ ID NO: 1410413 - RNA, 19 nt, Homo sapiens
  misc_RNA (1)...(19): siRNA sense strand
gaaacacagcucuggaaua

SEQ ID NO: 1410414 - RNA, 19 nt, Homo sapiens
  misc_RNA (1)...(19): siRNA sense strand
ggaaauccuucaacaaucu

SEQ ID NO: 1410415 - RNA, 19 nt, Homo sapiens
  misc_RNA (1)...(19): siRNA sense strand
gcagauaauugaaggaaag

SEQ ID NO: 1410416 - RNA, 19 nt, Homo sapiens
  misc_RNA (1)...(19): siRNA sense strand
ugaaagcauugaagcuaua

SEQ ID NO: 1410417 - RNA, 19 nt, Homo sapiens
  misc_RNA (1)...(19): siRNA sense strand
ggaaagagcaugaugacau

SEQ ID NO: 1410418 - RNA, 19 nt, Homo sapiens
  misc_RNA (1)...(19): siRNA sense strand
ucacgaagcauuuaucauu

SEQ ID NO: 1410419 - RNA, 19 nt, Homo sapiens
  misc_RNA (1)...(19): siRNA sense strand
gcaguucucuucucugaca

SEQ ID NO: 1410420 - RNA, 19 nt, Homo sapiens
  misc_RNA (1)...(19): siRNA sense strand
uuaaagagguauuggaaga

SEQ ID NO: 1410421 - RNA, 19 nt, Homo sapiens
  misc_RNA (1)...(19): siRNA sense strand
aaacugaaauucucuccaa

SEQ ID NO: 1410422 - RNA, 19 nt, Homo sapiens
  misc_RNA (1)...(19): siRNA sense strand
ggcaacaacuuacaaauac

SEQ ID NO: 1410423 - RNA, 19 nt, Homo sapiens
  misc_RNA (1)...(19): siRNA sense strand
gaagaccgauccauaucug

SEQ ID NO: 1410424 - RNA, 19 nt, Homo sapiens
  misc_RNA (1)...(19): siRNA sense strand
ugaccggaaugaacuauuu

SEQ ID NO: 1410425 - RNA, 19 nt, Homo sapiens
  misc_RNA (1)...(19): siRNA sense strand
caaugaaagcuuuagguua

SEQ ID NO: 1410426 - RNA, 19 nt, Homo sapiens
  misc_RNA (1)...(19): siRNA sense strand
ggaccuuagugaauauaaa

SEQ ID NO: 1410427 - RNA, 19 nt, Homo sapiens
  misc_RNA (1)...(19): siRNA sense strand
ggaaauugaugaguauauc

SEQ ID NO: 1410428 - RNA, 19 nt, Homo sapiens
  misc_RNA (1)...(19): siRNA sense strand
cggaagaccucaagaaagu

SEQ ID NO: 1410429 - RNA, 19 nt, Homo sapiens
  misc_RNA (1)...(19): siRNA sense strand
gcaucaaguuuauagaaga

SEQ ID NO: 1410430 - RNA, 19 nt, Homo sapiens
  misc_RNA (1)...(19): siRNA sense strand
gcacccagcuuaucuugca

SEQ ID NO: 1410431 - RNA, 19 nt, Homo sapiens
  misc_RNA (1)...(19): siRNA sense strand
ggaagaaucggacccaaga

SEQ ID NO: 1410432 - RNA, 19 nt, Homo sapiens
  misc_RNA (1)...(19): siRNA sense strand
ugaaauccuugaugaaguu

SEQ ID NO: 1410433 - RNA, 19 nt, Homo sapiens
  misc_RNA (1)...(19): siRNA sense strand
gcugauaguuucaaagcaa

SEQ ID NO: 1410434 - RNA, 19 nt, Homo sapiens
  misc_RNA (1)...(19): siRNA sense strand
gagaccauauccuuaaaug

SEQ ID NO: 1410435 - RNA, 19 nt, Homo sapiens
  misc_RNA (1)...(19): siRNA sense strand
uaaagaggccguuaaggaa

SEQ ID NO: 1410436 - RNA, 19 nt, Homo sapiens
  misc_RNA (1)...(19): siRNA sense strand
guagauccaagcuugauua

SEQ ID NO: 1410437 - RNA, 19 nt, Homo sapiens
  misc_RNA (1)...(19): siRNA sense strand
uggagaagauguugaaaug

SEQ ID NO: 1410438 - RNA, 19 nt, Homo sapiens
  misc_RNA (1)...(19): siRNA sense strand
cagcaguucucuucucuga

SEQ ID NO: 1410439 - RNA, 19 nt, Homo sapiens
  misc_RNA (1)...(19): siRNA sense strand
gaugacacguucuccaguu

SEQ ID NO: 1410440 - RNA, 19 nt, Homo sapiens
  misc_RNA (1)...(19): siRNA sense strand
caaaggcauucaucauaga

SEQ ID NO: 1410441 - RNA, 19 nt, Homo sapiens
  misc_RNA (1)...(19): siRNA sense strand
gauaugauaccggaccuua

SEQ ID NO: 1410442 - RNA, 19 nt, Homo sapiens
  misc_RNA (1)...(19): siRNA sense strand
gggaugcagcuauuuauuu

SEQ ID NO: 1410443 - RNA, 19 nt, Homo sapiens
  misc_RNA (1)...(19): siRNA sense strand
ccaagugacuacaagaaau

SEQ ID NO: 1410444 - RNA, 19 nt, Homo sapiens
  misc_RNA (1)...(19): siRNA sense strand
ugauugacauguauucuga

SEQ ID NO: 1410445 - RNA, 19 nt, Homo sapiens
  misc_RNA (1)...(19): siRNA sense strand
uaauaaagcaguagagguu

SEQ ID NO: 1410446 - RNA, 19 nt, Homo sapiens
  misc_RNA (1)...(19): siRNA sense strand
cauugaagcuauaagagaa

SEQ ID NO: 1410447 - RNA, 19 nt, Homo sapiens
  misc_RNA (1)...(19): siRNA sense strand
ggauucagcagauaauuga

SEQ ID NO: 1410448 - RNA, 19 nt, Homo sapiens
  misc_RNA (1)...(19): siRNA sense strand
aaacuucgcuaucucauac

SEQ ID NO: 1410449 - RNA, 19 nt, Homo sapiens
  misc_RNA (1)...(19): siRNA sense strand
acaaugaaaccaagaauga

SEQ ID NO: 1410450 - RNA, 19 nt, Homo sapiens
  misc_RNA (1)...(19): siRNA sense strand
caaauggacccucauggaa

SEQ ID NO: 1410451 - RNA, 19 nt, Homo sapiens
  misc_RNA (1)...(19): siRNA sense strand
ugaaauagaacuucgaaug

SEQ ID NO: 1410452 - RNA, 19 nt, Homo sapiens
  misc_RNA (1)...(19): siRNA sense strand
uaccggaccuuagugaaua

SEQ ID NO: 1410453 - RNA, 19 nt, Homo sapiens
  misc_RNA (1)...(19): siRNA sense strand
gggaacagcucugaaagca

SEQ ID NO: 1410454 - RNA, 19 nt, Homo sapiens
  misc_RNA (1)...(19): siRNA sense strand
ugacaaaccuuccuuuacg

SEQ ID NO: 1410455 - RNA, 19 nt, Homo sapiens
  misc_RNA (1)...(19): siRNA sense strand
gaacaacaggcugauaguu

SEQ ID NO: 1410456 - RNA, 19 nt, Homo sapiens
  misc_RNA (1)...(19): siRNA sense strand
gauguucucucugauuaug

SEQ ID NO: 1410457 - RNA, 19 nt, Homo sapiens
  misc_RNA (1)...(19): siRNA sense strand
gcauuuaucauucacauca

SEQ ID NO: 1410458 - RNA, 19 nt, Homo sapiens
  misc_RNA (1)...(19): siRNA sense strand
ggaugcagcuauuuauuuu

SEQ ID NO: 1410459 - RNA, 19 nt, Homo sapiens
  misc_RNA (1)...(19): siRNA sense strand
gaacuugaccggaaugaac

SEQ ID NO: 1410460 - RNA, 19 nt, Homo sapiens
  misc_RNA (1)...(19): siRNA sense strand
ggauggugcuuguugacuu

SEQ ID NO: 1410461 - RNA, 19 nt, Homo sapiens
  misc_RNA (1)...(19): siRNA sense strand
acaaaggcauucaucauag

SEQ ID NO: 1410462 - RNA, 19 nt, Homo sapiens
  misc_RNA (1)...(19): siRNA sense strand
acacucaguugaaguauca

SEQ ID NO: 1410463 - RNA, 19 nt, Homo sapiens
  misc_RNA (1)...(19): siRNA sense strand
gaaagugacaagcauuuua

SEQ ID NO: 1410464 - RNA, 19 nt, Homo sapiens
  misc_RNA (1)...(19): siRNA sense strand
gacauugugugggaaauug

SEQ ID NO: 1410465 - RNA, 19 nt, Homo sapiens
  misc_RNA (1)...(19): siRNA sense strand
ggaaguuuaccacuacaaa

SEQ ID NO: 1410466 - RNA, 19 nt, Homo sapiens
  misc_RNA (1)...(19): siRNA sense strand
gcucgaauauucccaagag

SEQ ID NO: 1410467 - RNA, 19 nt, Homo sapiens
  misc_RNA (1)...(19): siRNA sense strand
gaaagaugacaaaggcauu

SEQ ID NO: 1410468 - RNA, 19 nt, Homo sapiens
  misc_RNA (1)...(19): siRNA sense strand
uugauguucucucugauua

SEQ ID NO: 1410469 - RNA, 19 nt, Homo sapiens
  misc_RNA (1)...(19): siRNA sense strand
aaagagguauuggaagauu

SEQ ID NO: 1410470 - RNA, 19 nt, Homo sapiens
  misc_RNA (1)...(19): siRNA sense strand
gggagacccuacaagaaga

SEQ ID NO: 1410471 - RNA, 19 nt, Homo sapiens
  misc_RNA (1)...(19): siRNA sense strand
gaauccuaaugccaucaua

SEQ ID NO: 1410472 - RNA, 19 nt, Homo sapiens
  misc_RNA (1)...(19): siRNA sense strand
agaagaucuugcagcauua

SEQ ID NO: 1410473 - RNA, 19 nt, Homo sapiens
  misc_RNA (1)...(19): siRNA sense strand
caucauagaaagcuuaaga

SEQ ID NO: 1410474 - RNA, 19 nt, Homo sapiens
  misc_RNA (1)...(19): siRNA sense strand
gaagaauuuucccgcuuua

SEQ ID NO: 1410475 - RNA, 19 nt, Homo sapiens
  misc_RNA (1)...(19): siRNA sense strand
caguggauaucaagcuuaa

SEQ ID NO: 1410476 - RNA, 19 nt, Homo sapiens
  misc_RNA (1)...(19): siRNA sense strand
gcauugaagcuauaagaga

SEQ ID NO: 1410477 - RNA, 19 nt, Homo sapiens
  misc_RNA (1)...(19): siRNA sense strand
gaaagcucuucccaaugaa

SEQ ID NO: 1410478 - RNA, 19 nt, Homo sapiens
  misc_RNA (1)...(19): siRNA sense strand
ugacuuaccaggugugauu

SEQ ID NO: 1410479 - RNA, 19 nt, Homo sapiens
  misc_RNA (1)...(19): siRNA sense strand
ggaaaugauugcccaagcu

SEQ ID NO: 1410480 - RNA, 19 nt, Homo sapiens
  misc_RNA (1)...(19): siRNA sense strand
acacagcucuggaauaaaa

SEQ ID NO: 1410481 - RNA, 19 nt, Homo sapiens
  misc_RNA (1)...(19): siRNA sense strand
ugugggaaauugaugagua

SEQ ID NO: 1410482 - RNA, 19 nt, Homo sapiens
  misc_RNA (1)...(19): siRNA sense strand
cuaaaccauuguaaccuuu

SEQ ID NO: 1410483 - RNA, 19 nt, Homo sapiens
  misc_RNA (1)...(19): siRNA sense strand
agagcaugaugacauauuu

SEQ ID NO: 1410484 - RNA, 19 nt, Homo sapiens
  misc_RNA (1)...(19): siRNA sense strand
caacucaugugauugaaaa

SEQ ID NO: 1410485 - RNA, 19 nt, Homo sapiens
  misc_RNA (1)...(19): siRNA sense strand
caagugacuacaagaaauu

SEQ ID NO: 1410486 - RNA, 19 nt, Homo sapiens
  misc_RNA (1)...(19): siRNA sense strand
gcuaaaggcacaccaagug

SEQ ID NO: 1410487 - RNA, 19 nt, Homo sapiens
  misc_RNA (1)...(19): siRNA sense strand
gagaauaugaagaagaguu

SEQ ID NO: 1410488 - RNA, 19 nt, Homo sapiens
  misc_RNA (1)...(19): siRNA sense strand
gcaguauuguuacagacuu

SEQ ID NO: 1410489 - RNA, 19 nt, Homo sapiens
  misc_RNA (1)...(19): siRNA sense strand
uggaaagacuaguguguug

SEQ ID NO: 1410490 - RNA, 19 nt, Homo sapiens
  misc_RNA (1)...(19): siRNA sense strand
ggagaacaaagaauugaga

SEQ ID NO: 1410491 - RNA, 19 nt, Homo sapiens
  misc_RNA (1)...(19): siRNA sense strand
gaaagagcaugaugacaua

SEQ ID NO: 1410492 - RNA, 19 nt, Homo sapiens
  misc_RNA (1)...(19): siRNA sense strand
gaacagcucugaaagcauu

SEQ ID NO: 1410493 - RNA, 19 nt, Homo sapiens
  misc_RNA (1)...(19): siRNA sense strand
gagaagauguugaaaugua

SEQ ID NO: 1410494 - RNA, 19 nt, Homo sapiens
  misc_RNA (1)...(19): siRNA sense strand
gaggacagcuugaggguua

SEQ ID NO: 1410495 - RNA, 19 nt, Homo sapiens
  misc_RNA (1)...(19): siRNA sense strand
gaaacugaauggaagaaua

SEQ ID NO: 1410496 - RNA, 19 nt, Homo sapiens
  misc_RNA (1)...(19): siRNA sense strand
aaagaaggcuguaccguua

SEQ ID NO: 1410497 - RNA, 19 nt, Homo sapiens
  misc_RNA (1)...(19): siRNA sense strand
aaacacagcucuggaauaa

SEQ ID NO: 1410498 - RNA, 19 nt, Homo sapiens
  misc_RNA (1)...(19): siRNA sense strand
gaaauagaacuucgaauga

SEQ ID NO: 1410499 - RNA, 19 nt, Homo sapiens
  misc_RNA (1)...(19): siRNA sense strand
gcaaugauguggucuuguu

SEQ ID NO: 1410500 - RNA, 19 nt, Homo sapiens
  misc_RNA (1)...(19): siRNA sense strand
gaccauauccuuaaaugua

SEQ ID NO: 1410501 - RNA, 19 nt, Homo sapiens
  misc_RNA (1)...(19): siRNA sense strand
gcaaugggaugcagcuauu

SEQ ID NO: 1410502 - RNA, 19 nt, Homo sapiens
  misc_RNA (1)...(19): siRNA sense strand
cagcuuaucuugcaaguga

SEQ ID NO: 1410503 - RNA, 19 nt, Homo sapiens
  misc_RNA (1)...(19): siRNA sense strand
gaaguuaggcgauuagaga

SEQ ID NO: 1410504 - RNA, 19 nt, Homo sapiens
  misc_RNA (1)...(19): siRNA sense strand
gacaaaggcauucaucaua

SEQ ID NO: 1410505 - RNA, 19 nt, Homo sapiens
  misc_RNA (1)...(19): siRNA sense strand
gauccaagcuugauuaagg

SEQ ID NO: 1410506 - RNA, 19 nt, Homo sapiens
  misc_RNA (1)...(19): siRNA sense strand
ggaagaaaguauuaaacga

SEQ ID NO: 1410507 - RNA, 19 nt, Homo sapiens
  misc_RNA (1)...(19): siRNA sense strand
aaacagcucuaaaccauug

SEQ ID NO: 1410508 - RNA, 19 nt, Homo sapiens
  misc_RNA (1)...(19): siRNA sense strand
ugacauguauucugaaguu

SEQ ID NO: 1410509 - RNA, 19 nt, Homo sapiens
  misc_RNA (1)...(19): siRNA sense strand
gaagaccucaagaaaguua

SEQ ID NO: 1410510 - RNA, 19 nt, Homo sapiens
  misc_RNA (1)...(19): siRNA sense strand
gcugaacgcaguauuguua

SEQ ID NO: 1410511 - RNA, 19 nt, Homo sapiens
  misc_RNA (1)...(19): siRNA sense strand
gauggugcuuguugacuua

SEQ ID NO: 1410512 - RNA, 19 nt, Homo sapiens
  misc_RNA (1)...(19): siRNA sense strand
ggacauccuuucagcaguu

SEQ ID NO: 1410513 - RNA, 19 nt, Homo sapiens
  misc_RNA (1)...(19): siRNA sense strand
gaaacacagcucuggaaua

SEQ ID NO: 1410514 - RNA, 19 nt, Homo sapiens
  misc_RNA (1)...(19): siRNA sense strand
ggaaauccuucaacaaucu

SEQ ID NO: 1410515 - RNA, 19 nt, Homo sapiens
  misc_RNA (1)...(19): siRNA sense strand
gcagauaauugaaggaaag

SEQ ID NO: 1410516 - RNA, 19 nt, Homo sapiens
  misc_RNA (1)...(19): siRNA sense strand
ugaaagcauugaagcuaua

SEQ ID NO: 1410517 - RNA, 19 nt, Homo sapiens
  misc_RNA (1)...(19): siRNA sense strand
ggaaagagcaugaugacau

SEQ ID NO: 1410518 - RNA, 19 nt, Homo sapiens
  misc_RNA (1)...(19): siRNA sense strand
ucacgaagcauuuaucauu

SEQ ID NO: 1410519 - RNA, 19 nt, Homo sapiens
  misc_RNA (1)...(19): siRNA sense strand
gcaguucucuucucugaca

SEQ ID NO: 1410520 - RNA, 19 nt, Homo sapiens
  misc_RNA (1)...(19): siRNA sense strand
uuaaagagguauuggaaga

SEQ ID NO: 1410521 - RNA, 19 nt, Homo sapiens
  misc_RNA (1)...(19): siRNA sense strand
aaacugaaauucucuccaa

SEQ ID NO: 1410522 - RNA, 19 nt, Homo sapiens
  misc_RNA (1)...(19): siRNA sense strand
ggcaacaacuuacaaauac

SEQ ID NO: 1410523 - RNA, 19 nt, Homo sapiens
  misc_RNA (1)...(19): siRNA sense strand
gaagaccgauccauaucug

SEQ ID NO: 1410524 - RNA, 19 nt, Homo sapiens
  misc_RNA (1)...(19): siRNA sense strand
ugaccggaaugaacuauuu

SEQ ID NO: 1410525 - RNA, 19 nt, Homo sapiens
  misc_RNA (1)...(19): siRNA sense strand
caaugaaagcuuuagguua

SEQ ID NO: 1410526 - RNA, 19 nt, Homo sapiens
  misc_RNA (1)...(19): siRNA sense strand
ggaccuuagugaauauaaa

SEQ ID NO: 1410527 - RNA, 19 nt, Homo sapiens
  misc_RNA (1)...(19): siRNA sense strand
ggaaauugaugaguauauc

SEQ ID NO: 1410528 - RNA, 19 nt, Homo sapiens
  misc_RNA (1)...(19): siRNA sense strand
cggaagaccucaagaaagu

SEQ ID NO: 1410529 - RNA, 19 nt, Homo sapiens
  misc_RNA (1)...(19): siRNA sense strand
gcaucaaguuuauagaaga

SEQ ID NO: 1410530 - RNA, 19 nt, Homo sapiens
  misc_RNA (1)...(19): siRNA sense strand
gcacccagcuuaucuugca

SEQ ID NO: 1410531 - RNA, 19 nt, Homo sapiens
  misc_RNA (1)...(19): siRNA sense strand
ggaagaaucggacccaaga

SEQ ID NO: 1410532 - RNA, 19 nt, Homo sapiens
  misc_RNA (1)...(19): siRNA sense strand
ugaaauccuugaugaaguu

SEQ ID NO: 1410533 - RNA, 19 nt, Homo sapiens
  misc_RNA (1)...(19): siRNA sense strand
gcugauaguuucaaagcaa

SEQ ID NO: 1410534 - RNA, 19 nt, Homo sapiens
  misc_RNA (1)...(19): siRNA sense strand
gagaccauauccuuaaaug

SEQ ID NO: 1410535 - RNA, 19 nt, Homo sapiens
  misc_RNA (1)...(19): siRNA sense strand
uaaagaggccguuaaggaa

SEQ ID NO: 1410536 - RNA, 19 nt, Homo sapiens
  misc_RNA (1)...(19): siRNA sense strand
guagauccaagcuugauua

SEQ ID NO: 1410537 - RNA, 19 nt, Homo sapiens
  misc_RNA (1)...(19): siRNA sense strand
uggagaagauguugaaaug

SEQ ID NO: 1410538 - RNA, 19 nt, Homo sapiens
  misc_RNA (1)...(19): siRNA sense strand
cagcaguucucuucucuga

SEQ ID NO: 1410539 - RNA, 19 nt, Homo sapiens
  misc_RNA (1)...(19): siRNA sense strand
gaugacacguucuccaguu

SEQ ID NO: 1410540 - RNA, 19 nt, Homo sapiens
  misc_RNA (1)...(19): siRNA sense strand
caaaggcauucaucauaga

SEQ ID NO: 1410541 - RNA, 19 nt, Homo sapiens
  misc_RNA (1)...(19): siRNA sense strand
gauaugauaccggaccuua

SEQ ID NO: 1410542 - RNA, 19 nt, Homo sapiens
  misc_RNA (1)...(19): siRNA sense strand
gggaugcagcuauuuauuu

SEQ ID NO: 1410543 - RNA, 19 nt, Homo sapiens
  misc_RNA (1)...(19): siRNA sense strand
ccaagugacuacaagaaau

SEQ ID NO: 1410544 - RNA, 19 nt, Homo sapiens
  misc_RNA (1)...(19): siRNA sense strand
ugauugacauguauucuga

SEQ ID NO: 1410545 - RNA, 19 nt, Homo sapiens
  misc_RNA (1)...(19): siRNA sense strand
uaauaaagcaguagagguu

SEQ ID NO: 1410546 - RNA, 19 nt, Homo sapiens
  misc_RNA (1)...(19): siRNA sense strand
cauugaagcuauaagagaa

SEQ ID NO: 1410547 - RNA, 19 nt, Homo sapiens
  misc_RNA (1)...(19): siRNA sense strand
ggauucagcagauaauuga

SEQ ID NO: 1410548 - RNA, 19 nt, Homo sapiens
  misc_RNA (1)...(19): siRNA sense strand
aaacuucgcuaucucauac

SEQ ID NO: 1410549 - RNA, 19 nt, Homo sapiens
  misc_RNA (1)...(19): siRNA sense strand
acaaugaaaccaagaauga

SEQ ID NO: 1410550 - RNA, 19 nt, Homo sapiens
  misc_RNA (1)...(19): siRNA sense strand
caaauggacccucauggaa

SEQ ID NO: 1410551 - RNA, 19 nt, Homo sapiens
  misc_RNA (1)...(19): siRNA sense strand
ugaaauagaacuucgaaug

SEQ ID NO: 1410552 - RNA, 19 nt, Homo sapiens
  misc_RNA (1)...(19): siRNA sense strand
uaccggaccuuagugaaua

SEQ ID NO: 1410553 - RNA, 19 nt, Homo sapiens
  misc_RNA (1)...(19): siRNA sense strand
gggaacagcucugaaagca

SEQ ID NO: 1410554 - RNA, 19 nt, Homo sapiens
  misc_RNA (1)...(19): siRNA sense strand
ugacaaaccuuccuuuacg

SEQ ID NO: 1410555 - RNA, 19 nt, Homo sapiens
  misc_RNA (1)...(19): siRNA sense strand
gaacaacaggcugauaguu

SEQ ID NO: 1410556 - RNA, 19 nt, Homo sapiens
  misc_RNA (1)...(19): siRNA sense strand
gauguucucucugauuaug

SEQ ID NO: 1410557 - RNA, 19 nt, Homo sapiens
  misc_RNA (1)...(19): siRNA sense strand
gcauuuaucauucacauca

SEQ ID NO: 1410558 - RNA, 19 nt, Homo sapiens
  misc_RNA (1)...(19): siRNA sense strand
ggaugcagcuauuuauuuu

SEQ ID NO: 1410559 - RNA, 19 nt, Homo sapiens
  misc_RNA (1)...(19): siRNA sense strand
gaacuugaccggaaugaac

SEQ ID NO: 1410560 - RNA, 19 nt, Homo sapiens
  misc_RNA (1)...(19): siRNA sense strand
ggauggugcuuguugacuu

SEQ ID NO: 1410561 - RNA, 19 nt, Homo sapiens
  misc_RNA (1)...(19): siRNA sense strand
acaaaggcauucaucauag

SEQ ID NO: 1410562 - RNA, 19 nt, Homo sapiens
  misc_RNA (1)...(19): siRNA sense strand
acacucaguugaaguauca

SEQ ID NO: 1410563 - RNA, 19 nt, Homo sapiens
  misc_RNA (1)...(19): siRNA sense strand
gaaagugacaagcauuuua

SEQ ID NO: 1410564 - RNA, 19 nt, Homo sapiens
  misc_RNA (1)...(19): siRNA sense strand
gacauugugugggaaauug

SEQ ID NO: 1410565 - RNA, 19 nt, Homo sapiens
  misc_RNA (1)...(19): siRNA sense strand
ggaaguuuaccacuacaaa

SEQ ID NO: 1410566 - RNA, 19 nt, Homo sapiens
  misc_RNA (1)...(19): siRNA sense strand
gcucgaauauucccaagag

SEQ ID NO: 1410567 - RNA, 19 nt, Homo sapiens
  misc_RNA (1)...(19): siRNA sense strand
gaaagaugacaaaggcauu

SEQ ID NO: 1410568 - RNA, 19 nt, Homo sapiens
  misc_RNA (1)...(19): siRNA sense strand
uugauguucucucugauua

SEQ ID NO: 1410569 - RNA, 19 nt, Homo sapiens
  misc_RNA (1)...(19): siRNA sense strand
aaagagguauuggaagauu

SEQ ID NO: 1410570 - RNA, 19 nt, Homo sapiens
  misc_RNA (1)...(19): siRNA sense strand
gggagacccuacaagaaga

SEQ ID NO: 1410571 - RNA, 19 nt, Homo sapiens
  misc_RNA (1)...(19): siRNA sense strand
gaauccuaaugccaucaua

SEQ ID NO: 1410572 - RNA, 19 nt, Homo sapiens
  misc_RNA (1)...(19): siRNA sense strand
agaagaucuugcagcauua

SEQ ID NO: 1410573 - RNA, 19 nt, Homo sapiens
  misc_RNA (1)...(19): siRNA sense strand
caucauagaaagcuuaaga

SEQ ID NO: 1410574 - RNA, 19 nt, Homo sapiens
  misc_RNA (1)...(19): siRNA sense strand
gaagaauuuucccgcuuua

SEQ ID NO: 1410575 - RNA, 19 nt, Homo sapiens
  misc_RNA (1)...(19): siRNA sense strand
caguggauaucaagcuuaa

SEQ ID NO: 1410576 - RNA, 19 nt, Homo sapiens
  misc_RNA (1)...(19): siRNA sense strand
gcauugaagcuauaagaga

SEQ ID NO: 1410577 - RNA, 19 nt, Homo sapiens
  misc_RNA (1)...(19): siRNA sense strand
gaaagcucuucccaaugaa

SEQ ID NO: 1410578 - RNA, 19 nt, Homo sapiens
  misc_RNA (1)...(19): siRNA sense strand
ugacuuaccaggugugauu

SEQ ID NO: 1410579 - RNA, 19 nt, Homo sapiens
  misc_RNA (1)...(19): siRNA sense strand
ggaaaugauugcccaagcu

SEQ ID NO: 1410580 - RNA, 19 nt, Homo sapiens
  misc_RNA (1)...(19): siRNA sense strand
acacagcucuggaauaaaa

SEQ ID NO: 1410581 - RNA, 19 nt, Homo sapiens
  misc_RNA (1)...(19): siRNA sense strand
ugugggaaauugaugagua

SEQ ID NO: 1410582 - RNA, 19 nt, Homo sapiens
  misc_RNA (1)...(19): siRNA sense strand
cuaaaccauuguaaccuuu

SEQ ID NO: 1410583 - RNA, 19 nt, Homo sapiens
  misc_RNA (1)...(19): siRNA sense strand
agagcaugaugacauauuu

SEQ ID NO: 1410584 - RNA, 19 nt, Homo sapiens
  misc_RNA (1)...(19): siRNA sense strand
caacucaugugauugaaaa

SEQ ID NO: 1410585 - RNA, 19 nt, Homo sapiens
  misc_RNA (1)...(19): siRNA sense strand
caagugacuacaagaaauu

SEQ ID NO: 1410586 - RNA, 19 nt, Homo sapiens
  misc_RNA (1)...(19): siRNA sense strand
gcuaaaggcacaccaagug

SEQ ID NO: 1410587 - RNA, 19 nt, Homo sapiens
  misc_RNA (1)...(19): siRNA sense strand
gagaauaugaagaagaguu

SEQ ID NO: 1410588 - RNA, 19 nt, Homo sapiens
  misc_RNA (1)...(19): siRNA sense strand
gcaguauuguuacagacuu

SEQ ID NO: 1410589 - RNA, 19 nt, Homo sapiens
  misc_RNA (1)...(19): siRNA sense strand
uggaaagacuaguguguug

SEQ ID NO: 1410590 - RNA, 19 nt, Homo sapiens
  misc_RNA (1)...(19): siRNA sense strand
ggagaacaaagaauugaga

SEQ ID NO: 1410591 - RNA, 19 nt, Homo sapiens
  misc_RNA (1)...(19): siRNA sense strand
gaaagagcaugaugacaua

SEQ ID NO: 1410592 - RNA, 19 nt, Homo sapiens
  misc_RNA (1)...(19): siRNA sense strand
gaacagcucugaaagcauu

SEQ ID NO: 1410593 - RNA, 19 nt, Homo sapiens
  misc_RNA (1)...(19): siRNA sense strand
gagaagauguugaaaugua

SEQ ID NO: 1410594 - RNA, 19 nt, Homo sapiens
  misc_RNA (1)...(19): siRNA sense strand
gaggacagcuugaggguua

SEQ ID NO: 1410595 - RNA, 19 nt, Homo sapiens
  misc_RNA (1)...(19): siRNA sense strand
gaaacugaauggaagaaua

SEQ ID NO: 1410596 - RNA, 19 nt, Homo sapiens
  misc_RNA (1)...(19): siRNA sense strand
aaagaaggcuguaccguua

SEQ ID NO: 1410597 - RNA, 19 nt, Homo sapiens
  misc_RNA (1)...(19): siRNA sense strand
aaacacagcucuggaauaa

SEQ ID NO: 1410598 - RNA, 19 nt, Homo sapiens
  misc_RNA (1)...(19): siRNA sense strand
gaaauagaacuucgaauga

SEQ ID NO: 1410599 - RNA, 19 nt, Homo sapiens
  misc_RNA (1)...(19): siRNA sense strand
gcaaugauguggucuuguu

SEQ ID NO: 1410600 - RNA, 19 nt, Homo sapiens
  misc_RNA (1)...(19): siRNA sense strand
gaccauauccuuaaaugua

SEQ ID NO: 1410601 - RNA, 19 nt, Homo sapiens
  misc_RNA (1)...(19): siRNA sense strand
gcaaugggaugcagcuauu

SEQ ID NO: 1410602 - RNA, 19 nt, Homo sapiens
  misc_RNA (1)...(19): siRNA sense strand
cagcuuaucuugcaaguga

SEQ ID NO: 1410603 - RNA, 19 nt, Homo sapiens
  misc_RNA (1)...(19): siRNA sense strand
gaaguuaggcgauuagaga

SEQ ID NO: 1410604 - RNA, 19 nt, Homo sapiens
  misc_RNA (1)...(19): siRNA sense strand
gacaaaggcauucaucaua

SEQ ID NO: 1410605 - RNA, 19 nt, Homo sapiens
  misc_RNA (1)...(19): siRNA sense strand
gauccaagcuugauuaagg

SEQ ID NO: 1410606 - RNA, 19 nt, Homo sapiens
  misc_RNA (1)...(19): siRNA sense strand
ggaagaaaguauuaaacga

SEQ ID NO: 1410607 - RNA, 19 nt, Homo sapiens
  misc_RNA (1)...(19): siRNA sense strand
aaacagcucuaaaccauug

SEQ ID NO: 1410608 - RNA, 19 nt, Homo sapiens
  misc_RNA (1)...(19): siRNA sense strand
ugacauguauucugaaguu

SEQ ID NO: 1410609 - RNA, 19 nt, Homo sapiens
  misc_RNA (1)...(19): siRNA sense strand
gaagaccucaagaaaguua

SEQ ID NO: 1410610 - RNA, 19 nt, Homo sapiens
  misc_RNA (1)...(19): siRNA sense strand
gcugaacgcaguauuguua

SEQ ID NO: 1410611 - RNA, 19 nt, Homo sapiens
  misc_RNA (1)...(19): siRNA sense strand
gauggugcuuguugacuua

SEQ ID NO: 1410612 - RNA, 19 nt, Homo sapiens
  misc_RNA (1)...(19): siRNA sense strand
ggacauccuuucagcaguu

SEQ ID NO: 1410613 - RNA, 19 nt, Homo sapiens
  misc_RNA (1)...(19): siRNA sense strand
gaaacacagcucuggaaua

SEQ ID NO: 1410614 - RNA, 19 nt, Homo sapiens
  misc_RNA (1)...(19): siRNA sense strand
ggaaauccuucaacaaucu

SEQ ID NO: 1410615 - RNA, 19 nt, Homo sapiens
  misc_RNA (1)...(19): siRNA sense strand
gcagauaauugaaggaaag

SEQ ID NO: 1410616 - RNA, 19 nt, Homo sapiens
  misc_RNA (1)...(19): siRNA sense strand
ugaaagcauugaagcuaua

SEQ ID NO: 1410617 - RNA, 19 nt, Homo sapiens
  misc_RNA (1)...(19): siRNA sense strand
ggaaagagcaugaugacau

SEQ ID NO: 1410618 - RNA, 19 nt, Homo sapiens
  misc_RNA (1)...(19): siRNA sense strand
ucacgaagcauuuaucauu

SEQ ID NO: 1410619 - RNA, 19 nt, Homo sapiens
  misc_RNA (1)...(19): siRNA sense strand
gcaguucucuucucugaca

SEQ ID NO: 1410620 - RNA, 19 nt, Homo sapiens
  misc_RNA (1)...(19): siRNA sense strand
uuaaagagguauuggaaga

SEQ ID NO: 1410621 - RNA, 19 nt, Homo sapiens
  misc_RNA (1)...(19): siRNA sense strand
aaacugaaauucucuccaa

SEQ ID NO: 1410622 - RNA, 19 nt, Homo sapiens
  misc_RNA (1)...(19): siRNA sense strand
ggcaacaacuuacaaauac

SEQ ID NO: 1410623 - RNA, 19 nt, Homo sapiens
  misc_RNA (1)...(19): siRNA sense strand
gaagaccgauccauaucug

SEQ ID NO: 1410624 - RNA, 19 nt, Homo sapiens
  misc_RNA (1)...(19): siRNA sense strand
ugaccggaaugaacuauuu

SEQ ID NO: 1410625 - RNA, 19 nt, Homo sapiens
  misc_RNA (1)...(19): siRNA sense strand
caaugaaagcuuuagguua

SEQ ID NO: 1410626 - RNA, 19 nt, Homo sapiens
  misc_RNA (1)...(19): siRNA sense strand
ggaccuuagugaauauaaa

SEQ ID NO: 1410627 - RNA, 19 nt, Homo sapiens
  misc_RNA (1)...(19): siRNA sense strand
ggaaauugaugaguauauc

SEQ ID NO: 1410628 - RNA, 19 nt, Homo sapiens
  misc_RNA (1)...(19): siRNA sense strand
cggaagaccucaagaaagu

SEQ ID NO: 1410629 - RNA, 19 nt, Homo sapiens
  misc_RNA (1)...(19): siRNA sense strand
gcaucaaguuuauagaaga

SEQ ID NO: 1410630 - RNA, 19 nt, Homo sapiens
  misc_RNA (1)...(19): siRNA sense strand
gcacccagcuuaucuugca

SEQ ID NO: 1410631 - RNA, 19 nt, Homo sapiens
  misc_RNA (1)...(19): siRNA sense strand
ggaagaaucggacccaaga

SEQ ID NO: 1410632 - RNA, 19 nt, Homo sapiens
  misc_RNA (1)...(19): siRNA sense strand
ugaaauccuugaugaaguu

SEQ ID NO: 1410633 - RNA, 19 nt, Homo sapiens
  misc_RNA (1)...(19): siRNA sense strand
gcugauaguuucaaagcaa

SEQ ID NO: 1410634 - RNA, 19 nt, Homo sapiens
  misc_RNA (1)...(19): siRNA sense strand
gagaccauauccuuaaaug

SEQ ID NO: 1410635 - RNA, 19 nt, Homo sapiens
  misc_RNA (1)...(19): siRNA sense strand
uaaagaggccguuaaggaa

SEQ ID NO: 1410636 - RNA, 19 nt, Homo sapiens
  misc_RNA (1)...(19): siRNA sense strand
guagauccaagcuugauua

SEQ ID NO: 1410637 - RNA, 19 nt, Homo sapiens
  misc_RNA (1)...(19): siRNA sense strand
uggagaagauguugaaaug

SEQ ID NO: 1410638 - RNA, 19 nt, Homo sapiens
  misc_RNA (1)...(19): siRNA sense strand
cagcaguucucuucucuga

SEQ ID NO: 1410639 - RNA, 19 nt, Homo sapiens
  misc_RNA (1)...(19): siRNA sense strand
gaugacacguucuccaguu

SEQ ID NO: 1410640 - RNA, 19 nt, Homo sapiens
  misc_RNA (1)...(19): siRNA sense strand
caaaggcauucaucauaga

SEQ ID NO: 1410641 - RNA, 19 nt, Homo sapiens
  misc_RNA (1)...(19): siRNA sense strand
gauaugauaccggaccuua

SEQ ID NO: 1410642 - RNA, 19 nt, Homo sapiens
  misc_RNA (1)...(19): siRNA sense strand
gggaugcagcuauuuauuu

SEQ ID NO: 1410643 - RNA, 19 nt, Homo sapiens
  misc_RNA (1)...(19): siRNA sense strand
ccaagugacuacaagaaau

SEQ ID NO: 1410644 - RNA, 19 nt, Homo sapiens
  misc_RNA (1)...(19): siRNA sense strand
ugauugacauguauucuga

SEQ ID NO: 1410645 - RNA, 19 nt, Homo sapiens
  misc_RNA (1)...(19): siRNA sense strand
uaauaaagcaguagagguu

SEQ ID NO: 1410646 - RNA, 19 nt, Homo sapiens
  misc_RNA (1)...(19): siRNA sense strand
cauugaagcuauaagagaa

SEQ ID NO: 1410647 - RNA, 19 nt, Homo sapiens
  misc_RNA (1)...(19): siRNA sense strand
ggauucagcagauaauuga

SEQ ID NO: 1410648 - RNA, 19 nt, Homo sapiens
  misc_RNA (1)...(19): siRNA sense strand
aaacuucgcuaucucauac

SEQ ID NO: 1410649 - RNA, 19 nt, Homo sapiens
  misc_RNA (1)...(19): siRNA sense strand
acaaugaaaccaagaauga

SEQ ID NO: 1410650 - RNA, 19 nt, Homo sapiens
  misc_RNA (1)...(19): siRNA sense strand
caaauggacccucauggaa

SEQ ID NO: 1410651 - RNA, 19 nt, Homo sapiens
  misc_RNA (1)...(19): siRNA sense strand
ugaaauagaacuucgaaug

SEQ ID NO: 1410652 - RNA, 19 nt, Homo sapiens
  misc_RNA (1)...(19): siRNA sense strand
uaccggaccuuagugaaua

SEQ ID NO: 1410653 - RNA, 19 nt, Homo sapiens
  misc_RNA (1)...(19): siRNA sense strand
gggaacagcucugaaagca

SEQ ID NO: 1410654 - RNA, 19 nt, Homo sapiens
  misc_RNA (1)...(19): siRNA sense strand
ugacaaaccuuccuuuacg

SEQ ID NO: 1410655 - RNA, 19 nt, Homo sapiens
  misc_RNA (1)...(19): siRNA sense strand
gaacaacaggcugauaguu

SEQ ID NO: 1410656 - RNA, 19 nt, Homo sapiens
  misc_RNA (1)...(19): siRNA sense strand
gauguucucucugauuaug

SEQ ID NO: 1410657 - RNA, 19 nt, Homo sapiens
  misc_RNA (1)...(19): siRNA sense strand
gcauuuaucauucacauca

SEQ ID NO: 1410658 - RNA, 19 nt, Homo sapiens
  misc_RNA (1)...(19): siRNA sense strand
ggaugcagcuauuuauuuu

SEQ ID NO: 1410659 - RNA, 19 nt, Homo sapiens
  misc_RNA (1)...(19): siRNA sense strand
gaacuugaccggaaugaac

SEQ ID NO: 1410660 - RNA, 19 nt, Homo sapiens
  misc_RNA (1)...(19): siRNA sense strand
ggauggugcuuguugacuu

SEQ ID NO: 1410661 - RNA, 19 nt, Homo sapiens
  misc_RNA (1)...(19): siRNA sense strand
acaaaggcauucaucauag

SEQ ID NO: 1410662 - RNA, 19 nt, Homo sapiens
  misc_RNA (1)...(19): siRNA sense strand
acacucaguugaaguauca

SEQ ID NO: 1410663 - RNA, 19 nt, Homo sapiens
  misc_RNA (1)...(19): siRNA sense strand
gaaagugacaagcauuuua

SEQ ID NO: 1410664 - RNA, 19 nt, Homo sapiens
  misc_RNA (1)...(19): siRNA sense strand
gacauugugugggaaauug

SEQ ID NO: 1410665 - RNA, 19 nt, Homo sapiens
  misc_RNA (1)...(19): siRNA sense strand
ggaaguuuaccacuacaaa

SEQ ID NO: 1410666 - RNA, 19 nt, Homo sapiens
  misc_RNA (1)...(19): siRNA sense strand
gcucgaauauucccaagag

SEQ ID NO: 1410667 - RNA, 19 nt, Homo sapiens
  misc_RNA (1)...(19): siRNA sense strand
gaaagaugacaaaggcauu

SEQ ID NO: 1410668 - RNA, 19 nt, Homo sapiens
  misc_RNA (1)...(19): siRNA sense strand
uugauguucucucugauua

SEQ ID NO: 1410669 - RNA, 19 nt, Homo sapiens
  misc_RNA (1)...(19): siRNA sense strand
aaagagguauuggaagauu

SEQ ID NO: 1410670 - RNA, 19 nt, Homo sapiens
  misc_RNA (1)...(19): siRNA sense strand
gggagacccuacaagaaga

SEQ ID NO: 1410671 - RNA, 19 nt, Homo sapiens
  misc_RNA (1)...(19): siRNA sense strand
gaauccuaaugccaucaua

SEQ ID NO: 1410672 - RNA, 19 nt, Homo sapiens
  misc_RNA (1)...(19): siRNA sense strand
agaagaucuugcagcauua

SEQ ID NO: 1410673 - RNA, 19 nt, Homo sapiens
  misc_RNA (1)...(19): siRNA sense strand
caucauagaaagcuuaaga

SEQ ID NO: 1410674 - RNA, 19 nt, Homo sapiens
  misc_RNA (1)...(19): siRNA sense strand
gaagaauuuucccgcuuua

SEQ ID NO: 1410675 - RNA, 19 nt, Homo sapiens
  misc_RNA (1)...(19): siRNA sense strand
caguggauaucaagcuuaa

SEQ ID NO: 1410676 - RNA, 19 nt, Homo sapiens
  misc_RNA (1)...(19): siRNA sense strand
gcauugaagcuauaagaga

SEQ ID NO: 1410677 - RNA, 19 nt, Homo sapiens
  misc_RNA (1)...(19): siRNA sense strand
gaaagcucuucccaaugaa

SEQ ID NO: 1410678 - RNA, 19 nt, Homo sapiens
  misc_RNA (1)...(19): siRNA sense strand
ugacuuaccaggugugauu

SEQ ID NO: 1410679 - RNA, 19 nt, Homo sapiens
  misc_RNA (1)...(19): siRNA sense strand
ggaaaugauugcccaagcu

SEQ ID NO: 1410680 - RNA, 19 nt, Homo sapiens
  misc_RNA (1)...(19): siRNA sense strand
acacagcucuggaauaaaa

SEQ ID NO: 1410681 - RNA, 19 nt, Homo sapiens
  misc_RNA (1)...(19): siRNA sense strand
ugugggaaauugaugagua

SEQ ID NO: 1410682 - RNA, 19 nt, Homo sapiens
  misc_RNA (1)...(19): siRNA sense strand
cuaaaccauuguaaccuuu

SEQ ID NO: 1410683 - RNA, 19 nt, Homo sapiens
  misc_RNA (1)...(19): siRNA sense strand
agagcaugaugacauauuu

SEQ ID NO: 1410684 - RNA, 19 nt, Homo sapiens
  misc_RNA (1)...(19): siRNA sense strand
caacucaugugauugaaaa

SEQ ID NO: 1410685 - RNA, 19 nt, Homo sapiens
  misc_RNA (1)...(19): siRNA sense strand
caagugacuacaagaaauu

SEQ ID NO: 1410686 - RNA, 19 nt, Homo sapiens
  misc_RNA (1)...(19): siRNA sense strand
gcuaaaggcacaccaagug

SEQ ID NO: 1410687 - RNA, 19 nt, Homo sapiens
  misc_RNA (1)...(19): siRNA sense strand
gagaauaugaagaagaguu

SEQ ID NO: 1410688 - RNA, 19 nt, Homo sapiens
  misc_RNA (1)...(19): siRNA sense strand
gcaguauuguuacagacuu

SEQ ID NO: 1410689 - RNA, 19 nt, Homo sapiens
  misc_RNA (1)...(19): siRNA sense strand
uggaaagacuaguguguug

SEQ ID NO: 1410690 - RNA, 19 nt, Homo sapiens
  misc_RNA (1)...(19): siRNA sense strand
ggagaacaaagaauugaga

SEQ ID NO: 1410691 - RNA, 19 nt, Homo sapiens
  misc_RNA (1)...(19): siRNA sense strand
gaaagagcaugaugacaua

SEQ ID NO: 1410692 - RNA, 19 nt, Homo sapiens
  misc_RNA (1)...(19): siRNA sense strand
gaacagcucugaaagcauu

SEQ ID NO: 1410693 - RNA, 19 nt, Homo sapiens
  misc_RNA (1)...(19): siRNA sense strand
gagaagauguugaaaugua

SEQ ID NO: 1410694 - RNA, 19 nt, Homo sapiens
  misc_RNA (1)...(19): siRNA sense strand
gaggacagcuugaggguua

SEQ ID NO: 1410695 - RNA, 19 nt, Homo sapiens
  misc_RNA (1)...(19): siRNA sense strand
gaaacugaauggaagaaua

SEQ ID NO: 1410696 - RNA, 19 nt, Homo sapiens
  misc_RNA (1)...(19): siRNA sense strand
aaagaaggcuguaccguua

SEQ ID NO: 1410697 - RNA, 19 nt, Homo sapiens
  misc_RNA (1)...(19): siRNA sense strand
aaacacagcucuggaauaa

SEQ ID NO: 1410698 - RNA, 19 nt, Homo sapiens
  misc_RNA (1)...(19): siRNA sense strand
gaaauagaacuucgaauga

SEQ ID NO: 1410699 - RNA, 19 nt, Homo sapiens
  misc_RNA (1)...(19): siRNA sense strand
gcaaugauguggucuuguu

SEQ ID NO: 1410700 - RNA, 19 nt, Homo sapiens
  misc_RNA (1)...(19): siRNA sense strand
gaccauauccuuaaaugua

SEQ ID NO: 1410701 - RNA, 19 nt, Homo sapiens
  misc_RNA (1)...(19): siRNA sense strand
gcaaugggaugcagcuauu

SEQ ID NO: 1410702 - RNA, 19 nt, Homo sapiens
  misc_RNA (1)...(19): siRNA sense strand
cagcuuaucuugcaaguga

SEQ ID NO: 1410703 - RNA, 19 nt, Homo sapiens
  misc_RNA (1)...(19): siRNA sense strand
gaaguuaggcgauuagaga

SEQ ID NO: 1410704 - RNA, 19 nt, Homo sapiens
  misc_RNA (1)...(19): siRNA sense strand
gacaaaggcauucaucaua

SEQ ID NO: 1410705 - RNA, 19 nt, Homo sapiens
  misc_RNA (1)...(19): siRNA sense strand
gauccaagcuugauuaagg

SEQ ID NO: 1410706 - RNA, 19 nt, Homo sapiens
  misc_RNA (1)...(19): siRNA sense strand
ggaagaaaguauuaaacga

SEQ ID NO: 1410707 - RNA, 19 nt, Homo sapiens
  misc_RNA (1)...(19): siRNA sense strand
aaacagcucuaaaccauug

SEQ ID NO: 1410708 - RNA, 19 nt, Homo sapiens
  misc_RNA (1)...(19): siRNA sense strand
ugacauguauucugaaguu

SEQ ID NO: 1410709 - RNA, 19 nt, Homo sapiens
  misc_RNA (1)...(19): siRNA sense strand
gaagaccucaagaaaguua

SEQ ID NO: 1410710 - RNA, 19 nt, Homo sapiens
  misc_RNA (1)...(19): siRNA sense strand
gcugaacgcaguauuguua

SEQ ID NO: 1410711 - RNA, 19 nt, Homo sapiens
  misc_RNA (1)...(19): siRNA sense strand
gauggugcuuguugacuua

SEQ ID NO: 1410712 - RNA, 19 nt, Homo sapiens
  misc_RNA (1)...(19): siRNA sense strand
ggacauccuuucagcaguu

SEQ ID NO: 1410713 - RNA, 19 nt, Homo sapiens
  misc_RNA (1)...(19): siRNA sense strand
gaaacacagcucuggaaua

SEQ ID NO: 1410714 - RNA, 19 nt, Homo sapiens
  misc_RNA (1)...(19): siRNA sense strand
ggaaauccuucaacaaucu

SEQ ID NO: 1410715 - RNA, 19 nt, Homo sapiens
  misc_RNA (1)...(19): siRNA sense strand
gcagauaauugaaggaaag

SEQ ID NO: 1410716 - RNA, 19 nt, Homo sapiens
  misc_RNA (1)...(19): siRNA sense strand
ugaaagcauugaagcuaua

SEQ ID NO: 1410717 - RNA, 19 nt, Homo sapiens
  misc_RNA (1)...(19): siRNA sense strand
ggaaagagcaugaugacau

SEQ ID NO: 1410718 - RNA, 19 nt, Homo sapiens
  misc_RNA (1)...(19): siRNA sense strand
ucacgaagcauuuaucauu

SEQ ID NO: 1410719 - RNA, 19 nt, Homo sapiens
  misc_RNA (1)...(19): siRNA sense strand
gcaguucucuucucugaca

SEQ ID NO: 1410720 - RNA, 19 nt, Homo sapiens
  misc_RNA (1)...(19): siRNA sense strand
uuaaagagguauuggaaga

SEQ ID NO: 1410721 - RNA, 19 nt, Homo sapiens
  misc_RNA (1)...(19): siRNA sense strand
aaacugaaauucucuccaa

SEQ ID NO: 1410722 - RNA, 19 nt, Homo sapiens
  misc_RNA (1)...(19): siRNA sense strand
ggcaacaacuuacaaauac

SEQ ID NO: 1410723 - RNA, 19 nt, Homo sapiens
  misc_RNA (1)...(19): siRNA sense strand
gaagaccgauccauaucug

SEQ ID NO: 1410724 - RNA, 19 nt, Homo sapiens
  misc_RNA (1)...(19): siRNA sense strand
ugaccggaaugaacuauuu

SEQ ID NO: 1410725 - RNA, 19 nt, Homo sapiens
  misc_RNA (1)...(19): siRNA sense strand
caaugaaagcuuuagguua

SEQ ID NO: 1410726 - RNA, 19 nt, Homo sapiens
  misc_RNA (1)...(19): siRNA sense strand
ggaccuuagugaauauaaa

SEQ ID NO: 1410727 - RNA, 19 nt, Homo sapiens
  misc_RNA (1)...(19): siRNA sense strand
ggaaauugaugaguauauc

SEQ ID NO: 1410728 - RNA, 19 nt, Homo sapiens
  misc_RNA (1)...(19): siRNA sense strand
cggaagaccucaagaaagu

SEQ ID NO: 1410729 - RNA, 19 nt, Homo sapiens
  misc_RNA (1)...(19): siRNA sense strand
gcaucaaguuuauagaaga

SEQ ID NO: 1410730 - RNA, 19 nt, Homo sapiens
  misc_RNA (1)...(19): siRNA sense strand
gcacccagcuuaucuugca

SEQ ID NO: 1410731 - RNA, 19 nt, Homo sapiens
  misc_RNA (1)...(19): siRNA sense strand
ggaagaaucggacccaaga

SEQ ID NO: 1410732 - RNA, 19 nt, Homo sapiens
  misc_RNA (1)...(19): siRNA sense strand
ugaaauccuugaugaaguu

SEQ ID NO: 1410733 - RNA, 19 nt, Homo sapiens
  misc_RNA (1)...(19): siRNA sense strand
gcugauaguuucaaagcaa

SEQ ID NO: 1410734 - RNA, 19 nt, Homo sapiens
  misc_RNA (1)...(19): siRNA sense strand
gagaccauauccuuaaaug

SEQ ID NO: 1410735 - RNA, 19 nt, Homo sapiens
  misc_RNA (1)...(19): siRNA sense strand
uaaagaggccguuaaggaa

SEQ ID NO: 1410736 - RNA, 19 nt, Homo sapiens
  misc_RNA (1)...(19): siRNA sense strand
guagauccaagcuugauua

SEQ ID NO: 1410737 - RNA, 19 nt, Homo sapiens
  misc_RNA (1)...(19): siRNA sense strand
uggagaagauguugaaaug

SEQ ID NO: 1410738 - RNA, 19 nt, Homo sapiens
  misc_RNA (1)...(19): siRNA sense strand
cagcaguucucuucucuga

SEQ ID NO: 1410739 - RNA, 19 nt, Homo sapiens
  misc_RNA (1)...(19): siRNA sense strand
gaugacacguucuccaguu

SEQ ID NO: 1410740 - RNA, 19 nt, Homo sapiens
  misc_RNA (1)...(19): siRNA sense strand
caaaggcauucaucauaga

SEQ ID NO: 1410741 - RNA, 19 nt, Homo sapiens
  misc_RNA (1)...(19): siRNA sense strand
gauaugauaccggaccuua

SEQ ID NO: 1410742 - RNA, 19 nt, Homo sapiens
  misc_RNA (1)...(19): siRNA sense strand
gggaugcagcuauuuauuu

SEQ ID NO: 1410743 - RNA, 19 nt, Homo sapiens
  misc_RNA (1)...(19): siRNA sense strand
ccaagugacuacaagaaau

SEQ ID NO: 1410744 - RNA, 19 nt, Homo sapiens
  misc_RNA (1)...(19): siRNA sense strand
ugauugacauguauucuga

SEQ ID NO: 1410745 - RNA, 19 nt, Homo sapiens
  misc_RNA (1)...(19): siRNA sense strand
uaauaaagcaguagagguu

SEQ ID NO: 1410746 - RNA, 19 nt, Homo sapiens
  misc_RNA (1)...(19): siRNA sense strand
cauugaagcuauaagagaa

SEQ ID NO: 1410747 - RNA, 19 nt, Homo sapiens
  misc_RNA (1)...(19): siRNA sense strand
ggauucagcagauaauuga

SEQ ID NO: 1410748 - RNA, 19 nt, Homo sapiens
  misc_RNA (1)...(19): siRNA sense strand
aaacuucgcuaucucauac

SEQ ID NO: 1410749 - RNA, 19 nt, Homo sapiens
  misc_RNA (1)...(19): siRNA sense strand
acaaugaaaccaagaauga

SEQ ID NO: 1410750 - RNA, 19 nt, Homo sapiens
  misc_RNA (1)...(19): siRNA sense strand
caaauggacccucauggaa

SEQ ID NO: 1410751 - RNA, 19 nt, Homo sapiens
  misc_RNA (1)...(19): siRNA sense strand
ugaaauagaacuucgaaug

SEQ ID NO: 1410752 - RNA, 19 nt, Homo sapiens
  misc_RNA (1)...(19): siRNA sense strand
uaccggaccuuagugaaua

SEQ ID NO: 1410753 - RNA, 19 nt, Homo sapiens
  misc_RNA (1)...(19): siRNA sense strand
gggaacagcucugaaagca

SEQ ID NO: 1410754 - RNA, 19 nt, Homo sapiens
  misc_RNA (1)...(19): siRNA sense strand
ugacaaaccuuccuuuacg

SEQ ID NO: 1410755 - RNA, 19 nt, Homo sapiens
  misc_RNA (1)...(19): siRNA sense strand
gaacaacaggcugauaguu

SEQ ID NO: 1410756 - RNA, 19 nt, Homo sapiens
  misc_RNA (1)...(19): siRNA sense strand
gauguucucucugauuaug

SEQ ID NO: 1410757 - RNA, 19 nt, Homo sapiens
  misc_RNA (1)...(19): siRNA sense strand
gcauuuaucauucacauca

SEQ ID NO: 1410758 - RNA, 19 nt, Homo sapiens
  misc_RNA (1)...(19): siRNA sense strand
ggaugcagcuauuuauuuu

SEQ ID NO: 1410759 - RNA, 19 nt, Homo sapiens
  misc_RNA (1)...(19): siRNA sense strand
gaacuugaccggaaugaac

SEQ ID NO: 1410760 - RNA, 19 nt, Homo sapiens
  misc_RNA (1)...(19): siRNA sense strand
ggauggugcuuguugacuu

SEQ ID NO: 1410761 - RNA, 19 nt, Homo sapiens
  misc_RNA (1)...(19): siRNA sense strand
acaaaggcauucaucauag

SEQ ID NO: 1410762 - RNA, 19 nt, Homo sapiens
  misc_RNA (1)...(19): siRNA sense strand
acacucaguugaaguauca

SEQ ID NO: 1410763 - RNA, 19 nt, Homo sapiens
  misc_RNA (1)...(19): siRNA sense strand
gaaagugacaagcauuuua

SEQ ID NO: 1410764 - RNA, 19 nt, Homo sapiens
  misc_RNA (1)...(19): siRNA sense strand
gacauugugugggaaauug

SEQ ID NO: 1410765 - RNA, 19 nt, Homo sapiens
  misc_RNA (1)...(19): siRNA sense strand
ggaaguuuaccacuacaaa

SEQ ID NO: 1410766 - RNA, 19 nt, Homo sapiens
  misc_RNA (1)...(19): siRNA sense strand
gcucgaauauucccaagag

SEQ ID NO: 1410767 - RNA, 19 nt, Homo sapiens
  misc_RNA (1)...(19): siRNA sense strand
gaaagaugacaaaggcauu

SEQ ID NO: 1410768 - RNA, 19 nt, Homo sapiens
  misc_RNA (1)...(19): siRNA sense strand
uugauguucucucugauua

SEQ ID NO: 1410769 - RNA, 19 nt, Homo sapiens
  misc_RNA (1)...(19): siRNA sense strand
aaagagguauuggaagauu

SEQ ID NO: 1410770 - RNA, 19 nt, Homo sapiens
  misc_RNA (1)...(19): siRNA sense strand
gggagacccuacaagaaga

SEQ ID NO: 1410771 - RNA, 19 nt, Homo sapiens
  misc_RNA (1)...(19): siRNA sense strand
gaauccuaaugccaucaua

SEQ ID NO: 1410772 - RNA, 19 nt, Homo sapiens
  misc_RNA (1)...(19): siRNA sense strand
agaagaucuugcagcauua

SEQ ID NO: 1410773 - RNA, 19 nt, Homo sapiens
  misc_RNA (1)...(19): siRNA sense strand
caucauagaaagcuuaaga

SEQ ID NO: 1410774 - RNA, 19 nt, Homo sapiens
  misc_RNA (1)...(19): siRNA sense strand
gaagaauuuucccgcuuua

SEQ ID NO: 1410775 - RNA, 19 nt, Homo sapiens
  misc_RNA (1)...(19): siRNA sense strand
caguggauaucaagcuuaa

SEQ ID NO: 1410776 - RNA, 19 nt, Homo sapiens
  misc_RNA (1)...(19): siRNA sense strand
gcauugaagcuauaagaga

SEQ ID NO: 1410777 - RNA, 19 nt, Homo sapiens
  misc_RNA (1)...(19): siRNA sense strand
gaaagcucuucccaaugaa

SEQ ID NO: 1410778 - RNA, 19 nt, Homo sapiens
  misc_RNA (1)...(19): siRNA sense strand
ugacuuaccaggugugauu

SEQ ID NO: 1410779 - RNA, 19 nt, Homo sapiens
  misc_RNA (1)...(19): siRNA sense strand
ggaaaugauugcccaagcu

SEQ ID NO: 1410780 - RNA, 19 nt, Homo sapiens
  misc_RNA (1)...(19): siRNA sense strand
acacagcucuggaauaaaa

SEQ ID NO: 1410781 - RNA, 19 nt, Homo sapiens
  misc_RNA (1)...(19): siRNA sense strand
ugugggaaauugaugagua

SEQ ID NO: 1410782 - RNA, 19 nt, Homo sapiens
  misc_RNA (1)...(19): siRNA sense strand
cuaaaccauuguaaccuuu

SEQ ID NO: 1410783 - RNA, 19 nt, Homo sapiens
  misc_RNA (1)...(19): siRNA sense strand
agagcaugaugacauauuu

SEQ ID NO: 1410784 - RNA, 19 nt, Homo sapiens
  misc_RNA (1)...(19): siRNA sense strand
caacucaugugauugaaaa

SEQ ID NO: 1410785 - RNA, 19 nt, Homo sapiens
  misc_RNA (1)...(19): siRNA sense strand
caagugacuacaagaaauu

SEQ ID NO: 1410786 - RNA, 19 nt, Homo sapiens
  misc_RNA (1)...(19): siRNA sense strand
gcuaaaggcacaccaagug

SEQ ID NO: 1410787 - RNA, 19 nt, Homo sapiens
  misc_RNA (1)...(19): siRNA sense strand
gagaauaugaagaagaguu

SEQ ID NO: 1410788 - RNA, 19 nt, Homo sapiens
  misc_RNA (1)...(19): siRNA sense strand
gcaguauuguuacagacuu

SEQ ID NO: 1410789 - RNA, 19 nt, Homo sapiens
  misc_RNA (1)...(19): siRNA sense strand
uggaaagacuaguguguug

SEQ ID NO: 1410790 - RNA, 19 nt, Homo sapiens
  misc_RNA (1)...(19): siRNA sense strand
ggagaacaaagaauugaga

SEQ ID NO: 1410791 - RNA, 19 nt, Homo sapiens
  misc_RNA (1)...(19): siRNA sense strand
gaaagagcaugaugacaua

SEQ ID NO: 1410792 - RNA, 19 nt, Homo sapiens
  misc_RNA (1)...(19): siRNA sense strand
gaacagcucugaaagcauu

SEQ ID NO: 1410793 - RNA, 19 nt, Homo sapiens
  misc_RNA (1)...(19): siRNA sense strand
gagaagauguugaaaugua

SEQ ID NO: 1410794 - RNA, 19 nt, Homo sapiens
  misc_RNA (1)...(19): siRNA sense strand
gaggacagcuugaggguua

SEQ ID NO: 1410795 - RNA, 19 nt, Homo sapiens
  misc_RNA (1)...(19): siRNA sense strand
gaaacugaauggaagaaua

SEQ ID NO: 1410796 - RNA, 19 nt, Homo sapiens
  misc_RNA (1)...(19): siRNA sense strand
aaagaaggcuguaccguua

SEQ ID NO: 1410797 - RNA, 19 nt, Homo sapiens
  misc_RNA (1)...(19): siRNA sense strand
aaacacagcucuggaauaa

SEQ ID NO: 1410798 - RNA, 19 nt, Homo sapiens
  misc_RNA (1)...(19): siRNA sense strand
gaaauagaacuucgaauga

SEQ ID NO: 1410799 - RNA, 19 nt, Homo sapiens
  misc_RNA (1)...(19): siRNA sense strand
gcaaugauguggucuuguu

SEQ ID NO: 1410800 - RNA, 19 nt, Homo sapiens
  misc_RNA (1)...(19): siRNA sense strand
gaccauauccuuaaaugua

SEQ ID NO: 1410801 - RNA, 19 nt, Homo sapiens
  misc_RNA (1)...(19): siRNA sense strand
gcaaugggaugcagcuauu

SEQ ID NO: 1410802 - RNA, 19 nt, Homo sapiens
  misc_RNA (1)...(19): siRNA sense strand
cagcuuaucuugcaaguga

SEQ ID NO: 1410803 - RNA, 19 nt, Homo sapiens
  misc_RNA (1)...(19): siRNA sense strand
gaaguuaggcgauuagaga

SEQ ID NO: 1410804 - RNA, 19 nt, Homo sapiens
  misc_RNA (1)...(19): siRNA sense strand
gacaaaggcauucaucaua

SEQ ID NO: 1410805 - RNA, 19 nt, Homo sapiens
  misc_RNA (1)...(19): siRNA sense strand
gauccaagcuugauuaagg

SEQ ID NO: 1410806 - RNA, 19 nt, Homo sapiens
  misc_RNA (1)...(19): siRNA sense strand
ggaagaaaguauuaaacga

SEQ ID NO: 1410807 - RNA, 19 nt, Homo sapiens
  misc_RNA (1)...(19): siRNA sense strand
aaacagcucuaaaccauug

SEQ ID NO: 1410808 - RNA, 19 nt, Homo sapiens
  misc_RNA (1)...(19): siRNA sense strand
ugacauguauucugaaguu

SEQ ID NO: 1410809 - RNA, 19 nt, Homo sapiens
  misc_RNA (1)...(19): siRNA sense strand
gaagaccucaagaaaguua

SEQ ID NO: 1410810 - RNA, 19 nt, Homo sapiens
  misc_RNA (1)...(19): siRNA sense strand
gcugaacgcaguauuguua

SEQ ID NO: 1410811 - RNA, 19 nt, Homo sapiens
  misc_RNA (1)...(19): siRNA sense strand
gauggugcuuguugacuua

SEQ ID NO: 1410812 - RNA, 19 nt, Homo sapiens
  misc_RNA (1)...(19): siRNA sense strand
ggacauccuuucagcaguu

SEQ ID NO: 1410813 - RNA, 19 nt, Homo sapiens
  misc_RNA (1)...(19): siRNA sense strand
gaaacacagcucuggaaua

SEQ ID NO: 1410814 - RNA, 19 nt, Homo sapiens
  misc_RNA (1)...(19): siRNA sense strand
ggaaauccuucaacaaucu

SEQ ID NO: 1410815 - RNA, 19 nt, Homo sapiens
  misc_RNA (1)...(19): siRNA sense strand
gcagauaauugaaggaaag

SEQ ID NO: 1410816 - RNA, 19 nt, Homo sapiens
  misc_RNA (1)...(19): siRNA sense strand
ugaaagcauugaagcuaua

SEQ ID NO: 1410817 - RNA, 19 nt, Homo sapiens
  misc_RNA (1)...(19): siRNA sense strand
ggaaagagcaugaugacau

SEQ ID NO: 1410818 - RNA, 19 nt, Homo sapiens
  misc_RNA (1)...(19): siRNA sense strand
ucacgaagcauuuaucauu

SEQ ID NO: 1410819 - RNA, 19 nt, Homo sapiens
  misc_RNA (1)...(19): siRNA sense strand
gcaguucucuucucugaca

SEQ ID NO: 1410820 - RNA, 19 nt, Homo sapiens
  misc_RNA (1)...(19): siRNA sense strand
uuaaagagguauuggaaga

SEQ ID NO: 1410821 - RNA, 19 nt, Homo sapiens
  misc_RNA (1)...(19): siRNA sense strand
aaacugaaauucucuccaa

SEQ ID NO: 1410822 - RNA, 19 nt, Homo sapiens
  misc_RNA (1)...(19): siRNA sense strand
ggcaacaacuuacaaauac

SEQ ID NO: 1410823 - RNA, 19 nt, Homo sapiens
  misc_RNA (1)...(19): siRNA sense strand
gaagaccgauccauaucug

SEQ ID NO: 1410824 - RNA, 19 nt, Homo sapiens
  misc_RNA (1)...(19): siRNA sense strand
ugaccggaaugaacuauuu

SEQ ID NO: 1410825 - RNA, 19 nt, Homo sapiens
  misc_RNA (1)...(19): siRNA sense strand
caaugaaagcuuuagguua

SEQ ID NO: 1410826 - RNA, 19 nt, Homo sapiens
  misc_RNA (1)...(19): siRNA sense strand
ggaccuuagugaauauaaa

SEQ ID NO: 1410827 - RNA, 19 nt, Homo sapiens
  misc_RNA (1)...(19): siRNA sense strand
ggaaauugaugaguauauc

SEQ ID NO: 1410828 - RNA, 19 nt, Homo sapiens
  misc_RNA (1)...(19): siRNA sense strand
cggaagaccucaagaaagu

SEQ ID NO: 1410829 - RNA, 19 nt, Homo sapiens
  misc_RNA (1)...(19): siRNA sense strand
gcaucaaguuuauagaaga

SEQ ID NO: 1410830 - RNA, 19 nt, Homo sapiens
  misc_RNA (1)...(19): siRNA sense strand
gcacccagcuuaucuugca

SEQ ID NO: 1410831 - RNA, 19 nt, Homo sapiens
  misc_RNA (1)...(19): siRNA sense strand
ggaagaaucggacccaaga

SEQ ID NO: 1410832 - RNA, 19 nt, Homo sapiens
  misc_RNA (1)...(19): siRNA sense strand
ugaaauccuugaugaaguu

SEQ ID NO: 1410833 - RNA, 19 nt, Homo sapiens
  misc_RNA (1)...(19): siRNA sense strand
gcugauaguuucaaagcaa

SEQ ID NO: 1410834 - RNA, 19 nt, Homo sapiens
  misc_RNA (1)...(19): siRNA sense strand
gagaccauauccuuaaaug

SEQ ID NO: 1410835 - RNA, 19 nt, Homo sapiens
  misc_RNA (1)...(19): siRNA sense strand
uaaagaggccguuaaggaa

SEQ ID NO: 1410836 - RNA, 19 nt, Homo sapiens
  misc_RNA (1)...(19): siRNA sense strand
guagauccaagcuugauua

SEQ ID NO: 1410837 - RNA, 19 nt, Homo sapiens
  misc_RNA (1)...(19): siRNA sense strand
uggagaagauguugaaaug

SEQ ID NO: 1410838 - RNA, 19 nt, Homo sapiens
  misc_RNA (1)...(19): siRNA sense strand
cagcaguucucuucucuga

SEQ ID NO: 1410839 - RNA, 19 nt, Homo sapiens
  misc_RNA (1)...(19): siRNA sense strand
gaugacacguucuccaguu

SEQ ID NO: 1410840 - RNA, 19 nt, Homo sapiens
  misc_RNA (1)...(19): siRNA sense strand
caaaggcauucaucauaga

SEQ ID NO: 1410841 - RNA, 19 nt, Homo sapiens
  misc_RNA (1)...(19): siRNA sense strand
gauaugauaccggaccuua

SEQ ID NO: 1410842 - RNA, 19 nt, Homo sapiens
  misc_RNA (1)...(19): siRNA sense strand
gggaugcagcuauuuauuu

SEQ ID NO: 1410843 - RNA, 19 nt, Homo sapiens
  misc_RNA (1)...(19): siRNA sense strand
ccaagugacuacaagaaau

SEQ ID NO: 1410844 - RNA, 19 nt, Homo sapiens
  misc_RNA (1)...(19): siRNA sense strand
ugauugacauguauucuga

SEQ ID NO: 1410845 - RNA, 19 nt, Homo sapiens
  misc_RNA (1)...(19): siRNA sense strand
uaauaaagcaguagagguu

SEQ ID NO: 1410846 - RNA, 19 nt, Homo sapiens
  misc_RNA (1)...(19): siRNA sense strand
cauugaagcuauaagagaa

SEQ ID NO: 1410847 - RNA, 19 nt, Homo sapiens
  misc_RNA (1)...(19): siRNA sense strand
ggauucagcagauaauuga

SEQ ID NO: 1410848 - RNA, 19 nt, Homo sapiens
  misc_RNA (1)...(19): siRNA sense strand
aaacuucgcuaucucauac

SEQ ID NO: 1410849 - RNA, 19 nt, Homo sapiens
  misc_RNA (1)...(19): siRNA sense strand
acaaugaaaccaagaauga

SEQ ID NO: 1410850 - RNA, 19 nt, Homo sapiens
  misc_RNA (1)...(19): siRNA sense strand
caaauggacccucauggaa

SEQ ID NO: 1410851 - RNA, 19 nt, Homo sapiens
  misc_RNA (1)...(19): siRNA sense strand
ugaaauagaacuucgaaug

SEQ ID NO: 1410852 - RNA, 19 nt, Homo sapiens
  misc_RNA (1)...(19): siRNA sense strand
uaccggaccuuagugaaua

SEQ ID NO: 1410853 - RNA, 19 nt, Homo sapiens
  misc_RNA (1)...(19): siRNA sense strand
gggaacagcucugaaagca

SEQ ID NO: 1410854 - RNA, 19 nt, Homo sapiens
  misc_RNA (1)...(19): siRNA sense strand
ugacaaaccuuccuuuacg

SEQ ID NO: 1410855 - RNA, 19 nt, Homo sapiens
  misc_RNA (1)...(19): siRNA sense strand
gaacaacaggcugauaguu

SEQ ID NO: 1410856 - RNA, 19 nt, Homo sapiens
  misc_RNA (1)...(19): siRNA sense strand
gauguucucucugauuaug

SEQ ID NO: 1410857 - RNA, 19 nt, Homo sapiens
  misc_RNA (1)...(19): siRNA sense strand
gcauuuaucauucacauca

SEQ ID NO: 1410858 - RNA, 19 nt, Homo sapiens
  misc_RNA (1)...(19): siRNA sense strand
ggaugcagcuauuuauuuu

SEQ ID NO: 1410859 - RNA, 19 nt, Homo sapiens
  misc_RNA (1)...(19): siRNA sense strand
gaacuugaccggaaugaac

SEQ ID NO: 1410860 - RNA, 19 nt, Homo sapiens
  misc_RNA (1)...(19): siRNA sense strand
ggauggugcuuguugacuu

SEQ ID NO: 1410861 - RNA, 19 nt, Homo sapiens
  misc_RNA (1)...(19): siRNA sense strand
acaaaggcauucaucauag

SEQ ID NO: 1410862 - RNA, 19 nt, Homo sapiens
  misc_RNA (1)...(19): siRNA sense strand
acacucaguugaaguauca

SEQ ID NO: 1410863 - RNA, 19 nt, Homo sapiens
  misc_RNA (1)...(19): siRNA sense strand
gaaagugacaagcauuuua

SEQ ID NO: 1410864 - RNA, 19 nt, Homo sapiens
  misc_RNA (1)...(19): siRNA sense strand
gacauugugugggaaauug

SEQ ID NO: 1410865 - RNA, 19 nt, Homo sapiens
  misc_RNA (1)...(19): siRNA sense strand
ggaaguuuaccacuacaaa

SEQ ID NO: 1410866 - RNA, 19 nt, Homo sapiens
  misc_RNA (1)...(19): siRNA sense strand
gcucgaauauucccaagag

SEQ ID NO: 1410867 - RNA, 19 nt, Homo sapiens
  misc_RNA (1)...(19): siRNA sense strand
gaaagaugacaaaggcauu

SEQ ID NO: 1410868 - RNA, 19 nt, Homo sapiens
  misc_RNA (1)...(19): siRNA sense strand
uugauguucucucugauua

SEQ ID NO: 1410869 - RNA, 19 nt, Homo sapiens
  misc_RNA (1)...(19): siRNA sense strand
aaagagguauuggaagauu

SEQ ID NO: 1410870 - RNA, 19 nt, Homo sapiens
  misc_RNA (1)...(19): siRNA sense strand
gggagacccuacaagaaga

SEQ ID NO: 1410871 - RNA, 19 nt, Homo sapiens
  misc_RNA (1)...(19): siRNA sense strand
gaauccuaaugccaucaua

SEQ ID NO: 1410872 - RNA, 19 nt, Homo sapiens
  misc_RNA (1)...(19): siRNA sense strand
agaagaucuugcagcauua

SEQ ID NO: 1410873 - RNA, 19 nt, Homo sapiens
  misc_RNA (1)...(19): siRNA sense strand
caucauagaaagcuuaaga

SEQ ID NO: 1410874 - RNA, 19 nt, Homo sapiens
  misc_RNA (1)...(19): siRNA sense strand
gaagaauuuucccgcuuua

SEQ ID NO: 1410875 - RNA, 19 nt, Homo sapiens
  misc_RNA (1)...(19): siRNA sense strand
caguggauaucaagcuuaa

SEQ ID NO: 1410876 - RNA, 19 nt, Homo sapiens
  misc_RNA (1)...(19): siRNA sense strand
gcauugaagcuauaagaga

SEQ ID NO: 1410877 - RNA, 19 nt, Homo sapiens
  misc_RNA (1)...(19): siRNA sense strand
gaaagcucuucccaaugaa

SEQ ID NO: 1410878 - RNA, 19 nt, Homo sapiens
  misc_RNA (1)...(19): siRNA sense strand
ugacuuaccaggugugauu

SEQ ID NO: 1410879 - RNA, 19 nt, Homo sapiens
  misc_RNA (1)...(19): siRNA sense strand
ggaaaugauugcccaagcu

SEQ ID NO: 1410880 - RNA, 19 nt, Homo sapiens
  misc_RNA (1)...(19): siRNA sense strand
acacagcucuggaauaaaa

SEQ ID NO: 1410881 - RNA, 19 nt, Homo sapiens
  misc_RNA (1)...(19): siRNA sense strand
ugugggaaauugaugagua

SEQ ID NO: 1410882 - RNA, 19 nt, Homo sapiens
  misc_RNA (1)...(19): siRNA sense strand
cuaaaccauuguaaccuuu

SEQ ID NO: 1410883 - RNA, 19 nt, Homo sapiens
  misc_RNA (1)...(19): siRNA sense strand
agagcaugaugacauauuu

SEQ ID NO: 1410884 - RNA, 19 nt, Homo sapiens
  misc_RNA (1)...(19): siRNA sense strand
caacucaugugauugaaaa

SEQ ID NO: 1410885 - RNA, 19 nt, Homo sapiens
  misc_RNA (1)...(19): siRNA sense strand
caagugacuacaagaaauu

SEQ ID NO: 1410886 - RNA, 19 nt, Homo sapiens
  misc_RNA (1)...(19): siRNA sense strand
gcuaaaggcacaccaagug

SEQ ID NO: 1410887 - RNA, 19 nt, Homo sapiens
  misc_RNA (1)...(19): siRNA sense strand
gagaauaugaagaagaguu

SEQ ID NO: 1410888 - RNA, 19 nt, Homo sapiens
  misc_RNA (1)...(19): siRNA sense strand
gcaguauuguuacagacuu

SEQ ID NO: 1410889 - RNA, 19 nt, Homo sapiens
  misc_RNA (1)...(19): siRNA sense strand
uggaaagacuaguguguug

SEQ ID NO: 1410890 - RNA, 19 nt, Homo sapiens
  misc_RNA (1)...(19): siRNA sense strand
ggagaacaaagaauugaga

SEQ ID NO: 1410891 - RNA, 19 nt, Homo sapiens
  misc_RNA (1)...(19): siRNA sense strand
gaaagagcaugaugacaua

SEQ ID NO: 1410892 - RNA, 19 nt, Homo sapiens
  misc_RNA (1)...(19): siRNA sense strand
gaacagcucugaaagcauu

SEQ ID NO: 1410893 - RNA, 19 nt, Homo sapiens
  misc_RNA (1)...(19): siRNA sense strand
gagaagauguugaaaugua

SEQ ID NO: 1410894 - RNA, 19 nt, Homo sapiens
  misc_RNA (1)...(19): siRNA sense strand
gaggacagcuugaggguua

SEQ ID NO: 1410895 - RNA, 19 nt, Homo sapiens
  misc_RNA (1)...(19): siRNA sense strand
gaaacugaauggaagaaua

SEQ ID NO: 1410896 - RNA, 19 nt, Homo sapiens
  misc_RNA (1)...(19): siRNA sense strand
aaagaaggcuguaccguua

SEQ ID NO: 1410897 - RNA, 19 nt, Homo sapiens
  misc_RNA (1)...(19): siRNA sense strand
aaacacagcucuggaauaa

SEQ ID NO: 1410898 - RNA, 19 nt, Homo sapiens
  misc_RNA (1)...(19): siRNA sense strand
gaaauagaacuucgaauga

SEQ ID NO: 1410899 - RNA, 19 nt, Homo sapiens
  misc_RNA (1)...(19): siRNA sense strand
gcaaugauguggucuuguu

SEQ ID NO: 1410900 - RNA, 19 nt, Homo sapiens
  misc_RNA (1)...(19): siRNA sense strand
gaccauauccuuaaaugua

SEQ ID NO: 1410901 - RNA, 19 nt, Homo sapiens
  misc_RNA (1)...(19): siRNA sense strand
gcaaugggaugcagcuauu

SEQ ID NO: 1410902 - RNA, 19 nt, Homo sapiens
  misc_RNA (1)...(19): siRNA sense strand
cagcuuaucuugcaaguga

SEQ ID NO: 1410903 - RNA, 19 nt, Homo sapiens
  misc_RNA (1)...(19): siRNA sense strand
gaaguuaggcgauuagaga

SEQ ID NO: 1410904 - RNA, 19 nt, Homo sapiens
  misc_RNA (1)...(19): siRNA sense strand
gacaaaggcauucaucaua

SEQ ID NO: 1410905 - RNA, 19 nt, Homo sapiens
  misc_RNA (1)...(19): siRNA sense strand
gauccaagcuugauuaagg

SEQ ID NO: 1410906 - RNA, 19 nt, Homo sapiens
  misc_RNA (1)...(19): siRNA sense strand
ggaagaaaguauuaaacga

SEQ ID NO: 1410907 - RNA, 19 nt, Homo sapiens
  misc_RNA (1)...(19): siRNA sense strand
aaacagcucuaaaccauug

SEQ ID NO: 1410908 - RNA, 19 nt, Homo sapiens
  misc_RNA (1)...(19): siRNA sense strand
ugacauguauucugaaguu

SEQ ID NO: 1410909 - RNA, 19 nt, Homo sapiens
  misc_RNA (1)...(19): siRNA sense strand
gaagaccucaagaaaguua

SEQ ID NO: 1410910 - RNA, 19 nt, Homo sapiens
  misc_RNA (1)...(19): siRNA sense strand
gcugaacgcaguauuguua

SEQ ID NO: 1410911 - RNA, 19 nt, Homo sapiens
  misc_RNA (1)...(19): siRNA sense strand
gauggugcuuguugacuua

SEQ ID NO: 1410912 - RNA, 19 nt, Homo sapiens
  misc_RNA (1)...(19): siRNA sense strand
ggacauccuuucagcaguu

SEQ ID NO: 1410913 - RNA, 19 nt, Homo sapiens
  misc_RNA (1)...(19): siRNA sense strand
gaaacacagcucuggaaua

SEQ ID NO: 1410914 - RNA, 19 nt, Homo sapiens
  misc_RNA (1)...(19): siRNA sense strand
ggaaauccuucaacaaucu

SEQ ID NO: 1410915 - RNA, 19 nt, Homo sapiens
  misc_RNA (1)...(19): siRNA sense strand
gcagauaauugaaggaaag

SEQ ID NO: 1410916 - RNA, 19 nt, Homo sapiens
  misc_RNA (1)...(19): siRNA sense strand
ugaaagcauugaagcuaua

SEQ ID NO: 1410917 - RNA, 19 nt, Homo sapiens
  misc_RNA (1)...(19): siRNA sense strand
ggaaagagcaugaugacau

SEQ ID NO: 1410918 - RNA, 19 nt, Homo sapiens
  misc_RNA (1)...(19): siRNA sense strand
ucacgaagcauuuaucauu

SEQ ID NO: 1410919 - RNA, 19 nt, Homo sapiens
  misc_RNA (1)...(19): siRNA sense strand
gcaguucucuucucugaca

SEQ ID NO: 1410920 - RNA, 19 nt, Homo sapiens
  misc_RNA (1)...(19): siRNA sense strand
uuaaagagguauuggaaga

SEQ ID NO: 1410921 - RNA, 19 nt, Homo sapiens
  misc_RNA (1)...(19): siRNA sense strand
aaacugaaauucucuccaa

SEQ ID NO: 1410922 - RNA, 19 nt, Homo sapiens
  misc_RNA (1)...(19): siRNA sense strand
ggcaacaacuuacaaauac

SEQ ID NO: 1410923 - RNA, 19 nt, Homo sapiens
  misc_RNA (1)...(19): siRNA sense strand
gaagaccgauccauaucug

SEQ ID NO: 1410924 - RNA, 19 nt, Homo sapiens
  misc_RNA (1)...(19): siRNA sense strand
ugaccggaaugaacuauuu

SEQ ID NO: 1410925 - RNA, 19 nt, Homo sapiens
  misc_RNA (1)...(19): siRNA sense strand
caaugaaagcuuuagguua

SEQ ID NO: 1410926 - RNA, 19 nt, Homo sapiens
  misc_RNA (1)...(19): siRNA sense strand
ggaccuuagugaauauaaa

SEQ ID NO: 1410927 - RNA, 19 nt, Homo sapiens
  misc_RNA (1)...(19): siRNA sense strand
ggaaauugaugaguauauc

SEQ ID NO: 1410928 - RNA, 19 nt, Homo sapiens
  misc_RNA (1)...(19): siRNA sense strand
cggaagaccucaagaaagu

SEQ ID NO: 1410929 - RNA, 19 nt, Homo sapiens
  misc_RNA (1)...(19): siRNA sense strand
gcaucaaguuuauagaaga

SEQ ID NO: 1410930 - RNA, 19 nt, Homo sapiens
  misc_RNA (1)...(19): siRNA sense strand
gcacccagcuuaucuugca

SEQ ID NO: 1410931 - RNA, 19 nt, Homo sapiens
  misc_RNA (1)...(19): siRNA sense strand
ggaagaaucggacccaaga

SEQ ID NO: 1410932 - RNA, 19 nt, Homo sapiens
  misc_RNA (1)...(19): siRNA sense strand
ugaaauccuugaugaaguu

SEQ ID NO: 1410933 - RNA, 19 nt, Homo sapiens
  misc_RNA (1)...(19): siRNA sense strand
gcugauaguuucaaagcaa

SEQ ID NO: 1410934 - RNA, 19 nt, Homo sapiens
  misc_RNA (1)...(19): siRNA sense strand
gagaccauauccuuaaaug

SEQ ID NO: 1410935 - RNA, 19 nt, Homo sapiens
  misc_RNA (1)...(19): siRNA sense strand
uaaagaggccguuaaggaa

SEQ ID NO: 1410936 - RNA, 19 nt, Homo sapiens
  misc_RNA (1)...(19): siRNA sense strand
guagauccaagcuugauua

SEQ ID NO: 1410937 - RNA, 19 nt, Homo sapiens
  misc_RNA (1)...(19): siRNA sense strand
uggagaagauguugaaaug

SEQ ID NO: 1410938 - RNA, 19 nt, Homo sapiens
  misc_RNA (1)...(19): siRNA sense strand
cagcaguucucuucucuga

SEQ ID NO: 1410939 - RNA, 19 nt, Homo sapiens
  misc_RNA (1)...(19): siRNA sense strand
gaugacacguucuccaguu

SEQ ID NO: 1410940 - RNA, 19 nt, Homo sapiens
  misc_RNA (1)...(19): siRNA sense strand
caaaggcauucaucauaga

SEQ ID NO: 1410941 - RNA, 19 nt, Homo sapiens
  misc_RNA (1)...(19): siRNA sense strand
gauaugauaccggaccuua

SEQ ID NO: 1410942 - RNA, 19 nt, Homo sapiens
  misc_RNA (1)...(19): siRNA sense strand
gggaugcagcuauuuauuu

SEQ ID NO: 1410943 - RNA, 19 nt, Homo sapiens
  misc_RNA (1)...(19): siRNA sense strand
ccaagugacuacaagaaau

SEQ ID NO: 1410944 - RNA, 19 nt, Homo sapiens
  misc_RNA (1)...(19): siRNA sense strand
ugauugacauguauucuga

SEQ ID NO: 1410945 - RNA, 19 nt, Homo sapiens
  misc_RNA (1)...(19): siRNA sense strand
uaauaaagcaguagagguu

SEQ ID NO: 1410946 - RNA, 19 nt, Homo sapiens
  misc_RNA (1)...(19): siRNA sense strand
cauugaagcuauaagagaa

SEQ ID NO: 1410947 - RNA, 19 nt, Homo sapiens
  misc_RNA (1)...(19): siRNA sense strand
ggauucagcagauaauuga

SEQ ID NO: 1410948 - RNA, 19 nt, Homo sapiens
  misc_RNA (1)...(19): siRNA sense strand
aaacuucgcuaucucauac

SEQ ID NO: 1410949 - RNA, 19 nt, Homo sapiens
  misc_RNA (1)...(19): siRNA sense strand
acaaugaaaccaagaauga

SEQ ID NO: 1410950 - RNA, 19 nt, Homo sapiens
  misc_RNA (1)...(19): siRNA sense strand
caaauggacccucauggaa

SEQ ID NO: 1410951 - RNA, 19 nt, Homo sapiens
  misc_RNA (1)...(19): siRNA sense strand
ugaaauagaacuucgaaug

SEQ ID NO: 1410952 - RNA, 19 nt, Homo sapiens
  misc_RNA (1)...(19): siRNA sense strand
uaccggaccuuagugaaua

SEQ ID NO: 1410953 - RNA, 19 nt, Homo sapiens
  misc_RNA (1)...(19): siRNA sense strand
gggaacagcucugaaagca

SEQ ID NO: 1410954 - RNA, 19 nt, Homo sapiens
  misc_RNA (1)...(19): siRNA sense strand
ugacaaaccuuccuuuacg

SEQ ID NO: 1410955 - RNA, 19 nt, Homo sapiens
  misc_RNA (1)...(19): siRNA sense strand
gaacaacaggcugauaguu

SEQ ID NO: 1410956 - RNA, 19 nt, Homo sapiens
  misc_RNA (1)...(19): siRNA sense strand
gauguucucucugauuaug

SEQ ID NO: 1410957 - RNA, 19 nt, Homo sapiens
  misc_RNA (1)...(19): siRNA sense strand
gcauuuaucauucacauca

SEQ ID NO: 1410958 - RNA, 19 nt, Homo sapiens
  misc_RNA (1)...(19): siRNA sense strand
ggaugcagcuauuuauuuu

SEQ ID NO: 1410959 - RNA, 19 nt, Homo sapiens
  misc_RNA (1)...(19): siRNA sense strand
gaacuugaccggaaugaac

SEQ ID NO: 1410960 - RNA, 19 nt, Homo sapiens
  misc_RNA (1)...(19): siRNA sense strand
ggauggugcuuguugacuu

SEQ ID NO: 1410961 - RNA, 19 nt, Homo sapiens
  misc_RNA (1)...(19): siRNA sense strand
acaaaggcauucaucauag

SEQ ID NO: 1410962 - RNA, 19 nt, Homo sapiens
  misc_RNA (1)...(19): siRNA sense strand
acacucaguugaaguauca

SEQ ID NO: 1410963 - RNA, 19 nt, Homo sapiens
  misc_RNA (1)...(19): siRNA sense strand
gaaagugacaagcauuuua

SEQ ID NO: 1410964 - RNA, 19 nt, Homo sapiens
  misc_RNA (1)...(19): siRNA sense strand
gacauugugugggaaauug

SEQ ID NO: 1410965 - RNA, 19 nt, Homo sapiens
  misc_RNA (1)...(19): siRNA sense strand
ggaaguuuaccacuacaaa

SEQ ID NO: 1410966 - RNA, 19 nt, Homo sapiens
  misc_RNA (1)...(19): siRNA sense strand
gcucgaauauucccaagag

SEQ ID NO: 1410967 - RNA, 19 nt, Homo sapiens
  misc_RNA (1)...(19): siRNA sense strand
gaaagaugacaaaggcauu

SEQ ID NO: 1410968 - RNA, 19 nt, Homo sapiens
  misc_RNA (1)...(19): siRNA sense strand
uugauguucucucugauua

SEQ ID NO: 1410969 - RNA, 19 nt, Homo sapiens
  misc_RNA (1)...(19): siRNA sense strand
aaagagguauuggaagauu

SEQ ID NO: 1410970 - RNA, 19 nt, Homo sapiens
  misc_RNA (1)...(19): siRNA sense strand
gggagacccuacaagaaga

SEQ ID NO: 1410971 - RNA, 19 nt, Homo sapiens
  misc_RNA (1)...(19): siRNA sense strand
gaauccuaaugccaucaua

SEQ ID NO: 1410972 - RNA, 19 nt, Homo sapiens
  misc_RNA (1)...(19): siRNA sense strand
agaagaucuugcagcauua

SEQ ID NO: 1410973 - RNA, 19 nt, Homo sapiens
  misc_RNA (1)...(19): siRNA sense strand
caucauagaaagcuuaaga

SEQ ID NO: 1410974 - RNA, 19 nt, Homo sapiens
  misc_RNA (1)...(19): siRNA sense strand
gaagaauuuucccgcuuua

SEQ ID NO: 1410975 - RNA, 19 nt, Homo sapiens
  misc_RNA (1)...(19): siRNA sense strand
caguggauaucaagcuuaa

SEQ ID NO: 1410976 - RNA, 19 nt, Homo sapiens
  misc_RNA (1)...(19): siRNA sense strand
gcauugaagcuauaagaga

SEQ ID NO: 1410977 - RNA, 19 nt, Homo sapiens
  misc_RNA (1)...(19): siRNA sense strand
gaaagcucuucccaaugaa

SEQ ID NO: 1410978 - RNA, 19 nt, Homo sapiens
  misc_RNA (1)...(19): siRNA sense strand
ugacuuaccaggugugauu

SEQ ID NO: 1410979 - RNA, 19 nt, Homo sapiens
  misc_RNA (1)...(19): siRNA sense strand
ggaaaugauugcccaagcu

SEQ ID NO: 1410980 - RNA, 19 nt, Homo sapiens
  misc_RNA (1)...(19): siRNA sense strand
acacagcucuggaauaaaa

SEQ ID NO: 1410981 - RNA, 19 nt, Homo sapiens
  misc_RNA (1)...(19): siRNA sense strand
ugugggaaauugaugagua

SEQ ID NO: 1410982 - RNA, 19 nt, Homo sapiens
  misc_RNA (1)...(19): siRNA sense strand
cuaaaccauuguaaccuuu

SEQ ID NO: 1410983 - RNA, 19 nt, Homo sapiens
  misc_RNA (1)...(19): siRNA sense strand
agagcaugaugacauauuu

SEQ ID NO: 1410984 - RNA, 19 nt, Homo sapiens
  misc_RNA (1)...(19): siRNA sense strand
caacucaugugauugaaaa

SEQ ID NO: 1410985 - RNA, 19 nt, Homo sapiens
  misc_RNA (1)...(19): siRNA sense strand
caagugacuacaagaaauu

SEQ ID NO: 1410986 - RNA, 19 nt, Homo sapiens
  misc_RNA (1)...(19): siRNA sense strand
gcuaaaggcacaccaagug

SEQ ID NO: 1410987 - RNA, 19 nt, Homo sapiens
  misc_RNA (1)...(19): siRNA sense strand
gagaauaugaagaagaguu

SEQ ID NO: 1410988 - RNA, 19 nt, Homo sapiens
  misc_RNA (1)...(19): siRNA sense strand
gcaguauuguuacagacuu

SEQ ID NO: 1410989 - RNA, 19 nt, Homo sapiens
  misc_RNA (1)...(19): siRNA sense strand
uggaaagacuaguguguug

SEQ ID NO: 1410990 - RNA, 19 nt, Homo sapiens
  misc_RNA (1)...(19): siRNA sense strand
ggagaacaaagaauugaga

SEQ ID NO: 1410991 - RNA, 19 nt, Homo sapiens
  misc_RNA (1)...(19): siRNA sense strand
gaaagagcaugaugacaua

SEQ ID NO: 1410992 - RNA, 19 nt, Homo sapiens
  misc_RNA (1)...(19): siRNA sense strand
gaacagcucugaaagcauu

SEQ ID NO: 1410993 - RNA, 19 nt, Homo sapiens
  misc_RNA (1)...(19): siRNA sense strand
gagaagauguugaaaugua

SEQ ID NO: 1410994 - RNA, 19 nt, Homo sapiens
  misc_RNA (1)...(19): siRNA sense strand
gaggacagcuugaggguua

SEQ ID NO: 1410995 - RNA, 19 nt, Homo sapiens
  misc_RNA (1)...(19): siRNA sense strand
gaaacugaauggaagaaua

SEQ ID NO: 1410996 - RNA, 19 nt, Homo sapiens
  misc_RNA (1)...(19): siRNA sense strand
aaagaaggcuguaccguua

SEQ ID NO: 1410997 - RNA, 19 nt, Homo sapiens
  misc_RNA (1)...(19): siRNA sense strand
aaacacagcucuggaauaa

SEQ ID NO: 1410998 - RNA, 19 nt, Homo sapiens
  misc_RNA (1)...(19): siRNA sense strand
gaaauagaacuucgaauga

SEQ ID NO: 1410999 - RNA, 19 nt, Homo sapiens
  misc_RNA (1)...(19): siRNA sense strand
gcaaugauguggucuuguu

SEQ ID NO: 1411000 - RNA, 19 nt, Homo sapiens
  misc_RNA (1)...(19): siRNA sense strand
gaccauauccuuaaaugua

SEQ ID NO: 1411001 - RNA, 19 nt, Homo sapiens
  misc_RNA (1)...(19): siRNA sense strand
gcaaugggaugcagcuauu

SEQ ID NO: 1411002 - RNA, 19 nt, Homo sapiens
  misc_RNA (1)...(19): siRNA sense strand
cagcuuaucuugcaaguga

SEQ ID NO: 1411003 - RNA, 19 nt, Homo sapiens
  misc_RNA (1)...(19): siRNA sense strand
gaaguuaggcgauuagaga

SEQ ID NO: 1411004 - RNA, 19 nt, Homo sapiens
  misc_RNA (1)...(19): siRNA sense strand
gacaaaggcauucaucaua

SEQ ID NO: 1411005 - RNA, 19 nt, Homo sapiens
  misc_RNA (1)...(19): siRNA sense strand
gauccaagcuugauuaagg

SEQ ID NO: 1411006 - RNA, 19 nt, Homo sapiens
  misc_RNA (1)...(19): siRNA sense strand
ggaagaaaguauuaaacga

SEQ ID NO: 1411007 - RNA, 19 nt, Homo sapiens
  misc_RNA (1)...(19): siRNA sense strand
aaacagcucuaaaccauug

SEQ ID NO: 1411008 - RNA, 19 nt, Homo sapiens
  misc_RNA (1)...(19): siRNA sense strand
ugacauguauucugaaguu

SEQ ID NO: 1411009 - RNA, 19 nt, Homo sapiens
  misc_RNA (1)...(19): siRNA sense strand
gaagaccucaagaaaguua

SEQ ID NO: 1411010 - RNA, 19 nt, Homo sapiens
  misc_RNA (1)...(19): siRNA sense strand
gcugaacgcaguauuguua

SEQ ID NO: 1411011 - RNA, 19 nt, Homo sapiens
  misc_RNA (1)...(19): siRNA sense strand
gauggugcuuguugacuua

SEQ ID NO: 1411012 - RNA, 19 nt, Homo sapiens
  misc_RNA (1)...(19): siRNA sense strand
ggacauccuuucagcaguu

SEQ ID NO: 1411013 - RNA, 19 nt, Homo sapiens
  misc_RNA (1)...(19): siRNA sense strand
gaaacacagcucuggaaua

SEQ ID NO: 1411014 - RNA, 19 nt, Homo sapiens
  misc_RNA (1)...(19): siRNA sense strand
ggaaauccuucaacaaucu

SEQ ID NO: 1411015 - RNA, 19 nt, Homo sapiens
  misc_RNA (1)...(19): siRNA sense strand
gcagauaauugaaggaaag

SEQ ID NO: 1411016 - RNA, 19 nt, Homo sapiens
  misc_RNA (1)...(19): siRNA sense strand
ugaaagcauugaagcuaua

SEQ ID NO: 1411017 - RNA, 19 nt, Homo sapiens
  misc_RNA (1)...(19): siRNA sense strand
ggaaagagcaugaugacau

SEQ ID NO: 1411018 - RNA, 19 nt, Homo sapiens
  misc_RNA (1)...(19): siRNA sense strand
ucacgaagcauuuaucauu

SEQ ID NO: 1411019 - RNA, 19 nt, Homo sapiens
  misc_RNA (1)...(19): siRNA sense strand
gcaguucucuucucugaca

SEQ ID NO: 1411020 - RNA, 19 nt, Homo sapiens
  misc_RNA (1)...(19): siRNA sense strand
uuaaagagguauuggaaga

SEQ ID NO: 1411021 - RNA, 19 nt, Homo sapiens
  misc_RNA (1)...(19): siRNA sense strand
aaacugaaauucucuccaa

SEQ ID NO: 1411022 - RNA, 19 nt, Homo sapiens
  misc_RNA (1)...(19): siRNA sense strand
ggcaacaacuuacaaauac

SEQ ID NO: 1411023 - RNA, 19 nt, Homo sapiens
  misc_RNA (1)...(19): siRNA sense strand
gaagaccgauccauaucug

SEQ ID NO: 1411024 - RNA, 19 nt, Homo sapiens
  misc_RNA (1)...(19): siRNA sense strand
ugaccggaaugaacuauuu

SEQ ID NO: 1411025 - RNA, 19 nt, Homo sapiens
  misc_RNA (1)...(19): siRNA sense strand
caaugaaagcuuuagguua

SEQ ID NO: 1411026 - RNA, 19 nt, Homo sapiens
  misc_RNA (1)...(19): siRNA sense strand
ggaccuuagugaauauaaa

SEQ ID NO: 1411027 - RNA, 19 nt, Homo sapiens
  misc_RNA (1)...(19): siRNA sense strand
ggaaauugaugaguauauc

SEQ ID NO: 1411028 - RNA, 19 nt, Homo sapiens
  misc_RNA (1)...(19): siRNA sense strand
cggaagaccucaagaaagu

SEQ ID NO: 1411029 - RNA, 19 nt, Homo sapiens
  misc_RNA (1)...(19): siRNA sense strand
gcaucaaguuuauagaaga

SEQ ID NO: 1411030 - RNA, 19 nt, Homo sapiens
  misc_RNA (1)...(19): siRNA sense strand
gcacccagcuuaucuugca

SEQ ID NO: 1411031 - RNA, 19 nt, Homo sapiens
  misc_RNA (1)...(19): siRNA sense strand
ggaagaaucggacccaaga

SEQ ID NO: 1411032 - RNA, 19 nt, Homo sapiens
  misc_RNA (1)...(19): siRNA sense strand
ugaaauccuugaugaaguu

SEQ ID NO: 1411033 - RNA, 19 nt, Homo sapiens
  misc_RNA (1)...(19): siRNA sense strand
gcugauaguuucaaagcaa

SEQ ID NO: 1411034 - RNA, 19 nt, Homo sapiens
  misc_RNA (1)...(19): siRNA sense strand
gagaccauauccuuaaaug

SEQ ID NO: 1411035 - RNA, 19 nt, Homo sapiens
  misc_RNA (1)...(19): siRNA sense strand
uaaagaggccguuaaggaa

SEQ ID NO: 1411036 - RNA, 19 nt, Homo sapiens
  misc_RNA (1)...(19): siRNA sense strand
guagauccaagcuugauua

SEQ ID NO: 1411037 - RNA, 19 nt, Homo sapiens
  misc_RNA (1)...(19): siRNA sense strand
uggagaagauguugaaaug

SEQ ID NO: 1411038 - RNA, 19 nt, Homo sapiens
  misc_RNA (1)...(19): siRNA sense strand
cagcaguucucuucucuga

SEQ ID NO: 1411039 - RNA, 19 nt, Homo sapiens
  misc_RNA (1)...(19): siRNA sense strand
gaugacacguucuccaguu

SEQ ID NO: 1411040 - RNA, 19 nt, Homo sapiens
  misc_RNA (1)...(19): siRNA sense strand
caaaggcauucaucauaga

SEQ ID NO: 1411041 - RNA, 19 nt, Homo sapiens
  misc_RNA (1)...(19): siRNA sense strand
gauaugauaccggaccuua

SEQ ID NO: 1411042 - RNA, 19 nt, Homo sapiens
  misc_RNA (1)...(19): siRNA sense strand
gggaugcagcuauuuauuu

SEQ ID NO: 1411043 - RNA, 19 nt, Homo sapiens
  misc_RNA (1)...(19): siRNA sense strand
ccaagugacuacaagaaau

SEQ ID NO: 1411044 - RNA, 19 nt, Homo sapiens
  misc_RNA (1)...(19): siRNA sense strand
ugauugacauguauucuga

SEQ ID NO: 1411045 - RNA, 19 nt, Homo sapiens
  misc_RNA (1)...(19): siRNA sense strand
uaauaaagcaguagagguu

SEQ ID NO: 1411046 - RNA, 19 nt, Homo sapiens
  misc_RNA (1)...(19): siRNA sense strand
cauugaagcuauaagagaa

SEQ ID NO: 1411047 - RNA, 19 nt, Homo sapiens
  misc_RNA (1)...(19): siRNA sense strand
ggauucagcagauaauuga

SEQ ID NO: 1411048 - RNA, 19 nt, Homo sapiens
  misc_RNA (1)...(19): siRNA sense strand
aaacuucgcuaucucauac

SEQ ID NO: 1411049 - RNA, 19 nt, Homo sapiens
  misc_RNA (1)...(19): siRNA sense strand
acaaugaaaccaagaauga

SEQ ID NO: 1411050 - RNA, 19 nt, Homo sapiens
  misc_RNA (1)...(19): siRNA sense strand
caaauggacccucauggaa

SEQ ID NO: 1411051 - RNA, 19 nt, Homo sapiens
  misc_RNA (1)...(19): siRNA sense strand
ugaaauagaacuucgaaug

SEQ ID NO: 1411052 - RNA, 19 nt, Homo sapiens
  misc_RNA (1)...(19): siRNA sense strand
uaccggaccuuagugaaua

SEQ ID NO: 1411053 - RNA, 19 nt, Homo sapiens
  misc_RNA (1)...(19): siRNA sense strand
gggaacagcucugaaagca

SEQ ID NO: 1411054 - RNA, 19 nt, Homo sapiens
  misc_RNA (1)...(19): siRNA sense strand
ugacaaaccuuccuuuacg

SEQ ID NO: 1411055 - RNA, 19 nt, Homo sapiens
  misc_RNA (1)...(19): siRNA sense strand
gaacaacaggcugauaguu

SEQ ID NO: 1411056 - RNA, 19 nt, Homo sapiens
  misc_RNA (1)...(19): siRNA sense strand
gauguucucucugauuaug

SEQ ID NO: 1411057 - RNA, 19 nt, Homo sapiens
  misc_RNA (1)...(19): siRNA sense strand
gcauuuaucauucacauca

SEQ ID NO: 1411058 - RNA, 19 nt, Homo sapiens
  misc_RNA (1)...(19): siRNA sense strand
ggaugcagcuauuuauuuu

SEQ ID NO: 1411059 - RNA, 19 nt, Homo sapiens
  misc_RNA (1)...(19): siRNA sense strand
gaacuugaccggaaugaac

SEQ ID NO: 1411060 - RNA, 19 nt, Homo sapiens
  misc_RNA (1)...(19): siRNA sense strand
ggauggugcuuguugacuu

SEQ ID NO: 1411061 - RNA, 19 nt, Homo sapiens
  misc_RNA (1)...(19): siRNA sense strand
acaaaggcauucaucauag

SEQ ID NO: 1411062 - RNA, 19 nt, Homo sapiens
  misc_RNA (1)...(19): siRNA sense strand
acacucaguugaaguauca

SEQ ID NO: 1411063 - RNA, 19 nt, Homo sapiens
  misc_RNA (1)...(19): siRNA sense strand
gaaagugacaagcauuuua

SEQ ID NO: 1411064 - RNA, 19 nt, Homo sapiens
  misc_RNA (1)...(19): siRNA sense strand
gacauugugugggaaauug

SEQ ID NO: 1411065 - RNA, 19 nt, Homo sapiens
  misc_RNA (1)...(19): siRNA sense strand
ggaaguuuaccacuacaaa

SEQ ID NO: 1411066 - RNA, 19 nt, Homo sapiens
  misc_RNA (1)...(19): siRNA sense strand
gcucgaauauucccaagag

SEQ ID NO: 1411067 - RNA, 19 nt, Homo sapiens
  misc_RNA (1)...(19): siRNA sense strand
gaaagaugacaaaggcauu

SEQ ID NO: 1411068 - RNA, 19 nt, Homo sapiens
  misc_RNA (1)...(19): siRNA sense strand
uugauguucucucugauua

SEQ ID NO: 1411069 - RNA, 19 nt, Homo sapiens
  misc_RNA (1)...(19): siRNA sense strand
aaagagguauuggaagauu

SEQ ID NO: 1411070 - RNA, 19 nt, Homo sapiens
  misc_RNA (1)...(19): siRNA sense strand
gggagacccuacaagaaga

SEQ ID NO: 1411071 - RNA, 19 nt, Homo sapiens
  misc_RNA (1)...(19): siRNA sense strand
gaauccuaaugccaucaua

SEQ ID NO: 1411072 - RNA, 19 nt, Homo sapiens
  misc_RNA (1)...(19): siRNA sense strand
agaagaucuugcagcauua

SEQ ID NO: 1411073 - RNA, 19 nt, Homo sapiens
  misc_RNA (1)...(19): siRNA sense strand
caucauagaaagcuuaaga

SEQ ID NO: 1411074 - RNA, 19 nt, Homo sapiens
  misc_RNA (1)...(19): siRNA sense strand
gaagaauuuucccgcuuua

SEQ ID NO: 1411075 - RNA, 19 nt, Homo sapiens
  misc_RNA (1)...(19): siRNA sense strand
caguggauaucaagcuuaa

SEQ ID NO: 1411076 - RNA, 19 nt, Homo sapiens
  misc_RNA (1)...(19): siRNA sense strand
gcauugaagcuauaagaga

SEQ ID NO: 1411077 - RNA, 19 nt, Homo sapiens
  misc_RNA (1)...(19): siRNA sense strand
gaaagcucuucccaaugaa

SEQ ID NO: 1411078 - RNA, 19 nt, Homo sapiens
  misc_RNA (1)...(19): siRNA sense strand
ugacuuaccaggugugauu

SEQ ID NO: 1411079 - RNA, 19 nt, Homo sapiens
  misc_RNA (1)...(19): siRNA sense strand
ggaaaugauugcccaagcu

SEQ ID NO: 1411080 - RNA, 19 nt, Homo sapiens
  misc_RNA (1)...(19): siRNA sense strand
acacagcucuggaauaaaa

SEQ ID NO: 1411081 - RNA, 19 nt, Homo sapiens
  misc_RNA (1)...(19): siRNA sense strand
ugugggaaauugaugagua

SEQ ID NO: 1411082 - RNA, 19 nt, Homo sapiens
  misc_RNA (1)...(19): siRNA sense strand
cuaaaccauuguaaccuuu

SEQ ID NO: 1411083 - RNA, 19 nt, Homo sapiens
  misc_RNA (1)...(19): siRNA sense strand
agagcaugaugacauauuu

SEQ ID NO: 1411084 - RNA, 19 nt, Homo sapiens
  misc_RNA (1)...(19): siRNA sense strand
caacucaugugauugaaaa

SEQ ID NO: 1411085 - RNA, 19 nt, Homo sapiens
  misc_RNA (1)...(19): siRNA sense strand
caagugacuacaagaaauu

SEQ ID NO: 1411086 - RNA, 19 nt, Homo sapiens
  misc_RNA (1)...(19): siRNA sense strand
gcuaaaggcacaccaagug

SEQ ID NO: 1411087 - RNA, 19 nt, Homo sapiens
  misc_RNA (1)...(19): siRNA sense strand
gagaauaugaagaagaguu

SEQ ID NO: 1411088 - RNA, 19 nt, Homo sapiens
  misc_RNA (1)...(19): siRNA sense strand
gcaguauuguuacagacuu

SEQ ID NO: 1411089 - RNA, 19 nt, Homo sapiens
  misc_RNA (1)...(19): siRNA sense strand
uggaaagacuaguguguug

SEQ ID NO: 1411090 - RNA, 19 nt, Homo sapiens
  misc_RNA (1)...(19): siRNA sense strand
ggagaacaaagaauugaga

SEQ ID NO: 1411091 - RNA, 19 nt, Homo sapiens
  misc_RNA (1)...(19): siRNA sense strand
gaaagagcaugaugacaua

SEQ ID NO: 1411092 - RNA, 19 nt, Homo sapiens
  misc_RNA (1)...(19): siRNA sense strand
gaacagcucugaaagcauu

SEQ ID NO: 1411093 - RNA, 19 nt, Homo sapiens
  misc_RNA (1)...(19): siRNA sense strand
gagaagauguugaaaugua

SEQ ID NO: 1411094 - RNA, 19 nt, Homo sapiens
  misc_RNA (1)...(19): siRNA sense strand
gaggacagcuugaggguua

SEQ ID NO: 1411095 - RNA, 19 nt, Homo sapiens
  misc_RNA (1)...(19): siRNA sense strand
gaaacugaauggaagaaua

SEQ ID NO: 1411096 - RNA, 19 nt, Homo sapiens
  misc_RNA (1)...(19): siRNA sense strand
aaagaaggcuguaccguua

SEQ ID NO: 1411097 - RNA, 19 nt, Homo sapiens
  misc_RNA (1)...(19): siRNA sense strand
aaacacagcucuggaauaa

SEQ ID NO: 1411098 - RNA, 19 nt, Homo sapiens
  misc_RNA (1)...(19): siRNA sense strand
gaaauagaacuucgaauga

SEQ ID NO: 1411099 - RNA, 19 nt, Homo sapiens
  misc_RNA (1)...(19): siRNA sense strand
gcaaugauguggucuuguu

SEQ ID NO: 1411100 - RNA, 19 nt, Homo sapiens
  misc_RNA (1)...(19): siRNA sense strand
gaccauauccuuaaaugua

SEQ ID NO: 1411101 - RNA, 19 nt, Homo sapiens
  misc_RNA (1)...(19): siRNA sense strand
gcaaugggaugcagcuauu

SEQ ID NO: 1411102 - RNA, 19 nt, Homo sapiens
  misc_RNA (1)...(19): siRNA sense strand
cagcuuaucuugcaaguga

SEQ ID NO: 1411103 - RNA, 19 nt, Homo sapiens
  misc_RNA (1)...(19): siRNA sense strand
gaaguuaggcgauuagaga

SEQ ID NO: 1411104 - RNA, 19 nt, Homo sapiens
  misc_RNA (1)...(19): siRNA sense strand
gacaaaggcauucaucaua

SEQ ID NO: 1411105 - RNA, 19 nt, Homo sapiens
  misc_RNA (1)...(19): siRNA sense strand
gauccaagcuugauuaagg

SEQ ID NO: 1411106 - RNA, 19 nt, Homo sapiens
  misc_RNA (1)...(19): siRNA sense strand
ggaagaaaguauuaaacga

SEQ ID NO: 1411107 - RNA, 19 nt, Homo sapiens
  misc_RNA (1)...(19): siRNA sense strand
aaacagcucuaaaccauug

SEQ ID NO: 1411108 - RNA, 19 nt, Homo sapiens
  misc_RNA (1)...(19): siRNA sense strand
ugacauguauucugaaguu

SEQ ID NO: 1411109 - RNA, 19 nt, Homo sapiens
  misc_RNA (1)...(19): siRNA sense strand
gaagaccucaagaaaguua

SEQ ID NO: 1411110 - RNA, 19 nt, Homo sapiens
  misc_RNA (1)...(19): siRNA sense strand
gcugaacgcaguauuguua

SEQ ID NO: 1411111 - RNA, 19 nt, Homo sapiens
  misc_RNA (1)...(19): siRNA sense strand
gauggugcuuguugacuua

SEQ ID NO: 1411112 - RNA, 19 nt, Homo sapiens
  misc_RNA (1)...(19): siRNA sense strand
ggacauccuuucagcaguu

SEQ ID NO: 1411113 - RNA, 19 nt, Homo sapiens
  misc_RNA (1)...(19): siRNA sense strand
gaaacacagcucuggaaua

SEQ ID NO: 1411114 - RNA, 19 nt, Homo sapiens
  misc_RNA (1)...(19): siRNA sense strand
ggaaauccuucaacaaucu

SEQ ID NO: 1411115 - RNA, 19 nt, Homo sapiens
  misc_RNA (1)...(19): siRNA sense strand
gcagauaauugaaggaaag

SEQ ID NO: 1411116 - RNA, 19 nt, Homo sapiens
  misc_RNA (1)...(19): siRNA sense strand
ugaaagcauugaagcuaua

SEQ ID NO: 1411117 - RNA, 19 nt, Homo sapiens
  misc_RNA (1)...(19): siRNA sense strand
ggaaagagcaugaugacau

SEQ ID NO: 1411118 - RNA, 19 nt, Homo sapiens
  misc_RNA (1)...(19): siRNA sense strand
ucacgaagcauuuaucauu

SEQ ID NO: 1411119 - RNA, 19 nt, Homo sapiens
  misc_RNA (1)...(19): siRNA sense strand
gcaguucucuucucugaca

SEQ ID NO: 1411120 - RNA, 19 nt, Homo sapiens
  misc_RNA (1)...(19): siRNA sense strand
uuaaagagguauuggaaga

SEQ ID NO: 1411121 - RNA, 19 nt, Homo sapiens
  misc_RNA (1)...(19): siRNA sense strand
aaacugaaauucucuccaa

SEQ ID NO: 1411122 - RNA, 19 nt, Homo sapiens
  misc_RNA (1)...(19): siRNA sense strand
ggcaacaacuuacaaauac

SEQ ID NO: 1411123 - RNA, 19 nt, Homo sapiens
  misc_RNA (1)...(19): siRNA sense strand
gaagaccgauccauaucug

SEQ ID NO: 1411124 - RNA, 19 nt, Homo sapiens
  misc_RNA (1)...(19): siRNA sense strand
ugaccggaaugaacuauuu

SEQ ID NO: 1411125 - RNA, 19 nt, Homo sapiens
  misc_RNA (1)...(19): siRNA sense strand
caaugaaagcuuuagguua

SEQ ID NO: 1411126 - RNA, 19 nt, Homo sapiens
  misc_RNA (1)...(19): siRNA sense strand
ggaccuuagugaauauaaa

SEQ ID NO: 1411127 - RNA, 19 nt, Homo sapiens
  misc_RNA (1)...(19): siRNA sense strand
ggaaauugaugaguauauc

SEQ ID NO: 1411128 - RNA, 19 nt, Homo sapiens
  misc_RNA (1)...(19): siRNA sense strand
cggaagaccucaagaaagu

SEQ ID NO: 1411129 - RNA, 19 nt, Homo sapiens
  misc_RNA (1)...(19): siRNA sense strand
gcaucaaguuuauagaaga

SEQ ID NO: 1411130 - RNA, 19 nt, Homo sapiens
  misc_RNA (1)...(19): siRNA sense strand
gcacccagcuuaucuugca

SEQ ID NO: 1411131 - RNA, 19 nt, Homo sapiens
  misc_RNA (1)...(19): siRNA sense strand
ggaagaaucggacccaaga

SEQ ID NO: 1411132 - RNA, 19 nt, Homo sapiens
  misc_RNA (1)...(19): siRNA sense strand
ugaaauccuugaugaaguu

SEQ ID NO: 1411133 - RNA, 19 nt, Homo sapiens
  misc_RNA (1)...(19): siRNA sense strand
gcugauaguuucaaagcaa

SEQ ID NO: 1411134 - RNA, 19 nt, Homo sapiens
  misc_RNA (1)...(19): siRNA sense strand
gagaccauauccuuaaaug

SEQ ID NO: 1411135 - RNA, 19 nt, Homo sapiens
  misc_RNA (1)...(19): siRNA sense strand
uaaagaggccguuaaggaa

SEQ ID NO: 1411136 - RNA, 19 nt, Homo sapiens
  misc_RNA (1)...(19): siRNA sense strand
guagauccaagcuugauua

SEQ ID NO: 1411137 - RNA, 19 nt, Homo sapiens
  misc_RNA (1)...(19): siRNA sense strand
uggagaagauguugaaaug

SEQ ID NO: 1411138 - RNA, 19 nt, Homo sapiens
  misc_RNA (1)...(19): siRNA sense strand
cagcaguucucuucucuga

SEQ ID NO: 1411139 - RNA, 19 nt, Homo sapiens
  misc_RNA (1)...(19): siRNA sense strand
gaugacacguucuccaguu

SEQ ID NO: 1411140 - RNA, 19 nt, Homo sapiens
  misc_RNA (1)...(19): siRNA sense strand
caaaggcauucaucauaga

SEQ ID NO: 1411141 - RNA, 19 nt, Homo sapiens
  misc_RNA (1)...(19): siRNA sense strand
gauaugauaccggaccuua

SEQ ID NO: 1411142 - RNA, 19 nt, Homo sapiens
  misc_RNA (1)...(19): siRNA sense strand
gggaugcagcuauuuauuu

SEQ ID NO: 1411143 - RNA, 19 nt, Homo sapiens
  misc_RNA (1)...(19): siRNA sense strand
ccaagugacuacaagaaau

SEQ ID NO: 1411144 - RNA, 19 nt, Homo sapiens
  misc_RNA (1)...(19): siRNA sense strand
ugauugacauguauucuga

SEQ ID NO: 1411145 - RNA, 19 nt, Homo sapiens
  misc_RNA (1)...(19): siRNA sense strand
uaauaaagcaguagagguu

SEQ ID NO: 1411146 - RNA, 19 nt, Homo sapiens
  misc_RNA (1)...(19): siRNA sense strand
cauugaagcuauaagagaa

SEQ ID NO: 1411147 - RNA, 19 nt, Homo sapiens
  misc_RNA (1)...(19): siRNA sense strand
ggauucagcagauaauuga

SEQ ID NO: 1411148 - RNA, 19 nt, Homo sapiens
  misc_RNA (1)...(19): siRNA sense strand
aaacuucgcuaucucauac

SEQ ID NO: 1411149 - RNA, 19 nt, Homo sapiens
  misc_RNA (1)...(19): siRNA sense strand
acaaugaaaccaagaauga

SEQ ID NO: 1411150 - RNA, 19 nt, Homo sapiens
  misc_RNA (1)...(19): siRNA sense strand
caaauggacccucauggaa

SEQ ID NO: 1411151 - RNA, 19 nt, Homo sapiens
  misc_RNA (1)...(19): siRNA sense strand
ugaaauagaacuucgaaug

SEQ ID NO: 1411152 - RNA, 19 nt, Homo sapiens
  misc_RNA (1)...(19): siRNA sense strand
uaccggaccuuagugaaua

SEQ ID NO: 1411153 - RNA, 19 nt, Homo sapiens
  misc_RNA (1)...(19): siRNA sense strand
gggaacagcucugaaagca

SEQ ID NO: 1411154 - RNA, 19 nt, Homo sapiens
  misc_RNA (1)...(19): siRNA sense strand
ugacaaaccuuccuuuacg

SEQ ID NO: 1411155 - RNA, 19 nt, Homo sapiens
  misc_RNA (1)...(19): siRNA sense strand
gaacaacaggcugauaguu

SEQ ID NO: 1411156 - RNA, 19 nt, Homo sapiens
  misc_RNA (1)...(19): siRNA sense strand
gauguucucucugauuaug

SEQ ID NO: 1411157 - RNA, 19 nt, Homo sapiens
  misc_RNA (1)...(19): siRNA sense strand
gcauuuaucauucacauca

SEQ ID NO: 1411158 - RNA, 19 nt, Homo sapiens
  misc_RNA (1)...(19): siRNA sense strand
ggaugcagcuauuuauuuu

SEQ ID NO: 1411159 - RNA, 19 nt, Homo sapiens
  misc_RNA (1)...(19): siRNA sense strand
gaacuugaccggaaugaac

SEQ ID NO: 1411160 - RNA, 19 nt, Homo sapiens
  misc_RNA (1)...(19): siRNA sense strand
ggauggugcuuguugacuu

SEQ ID NO: 1411161 - RNA, 19 nt, Homo sapiens
  misc_RNA (1)...(19): siRNA sense strand
acaaaggcauucaucauag

SEQ ID NO: 1411162 - RNA, 19 nt, Homo sapiens
  misc_RNA (1)...(19): siRNA sense strand
acacucaguugaaguauca

SEQ ID NO: 1411163 - RNA, 19 nt, Homo sapiens
  misc_RNA (1)...(19): siRNA sense strand
gaaagugacaagcauuuua

SEQ ID NO: 1411164 - RNA, 19 nt, Homo sapiens
  misc_RNA (1)...(19): siRNA sense strand
gacauugugugggaaauug

SEQ ID NO: 1411165 - RNA, 19 nt, Homo sapiens
  misc_RNA (1)...(19): siRNA sense strand
ggaaguuuaccacuacaaa

SEQ ID NO: 1411166 - RNA, 19 nt, Homo sapiens
  misc_RNA (1)...(19): siRNA sense strand
gcucgaauauucccaagag

SEQ ID NO: 1411167 - RNA, 19 nt, Homo sapiens
  misc_RNA (1)...(19): siRNA sense strand
gaaagaugacaaaggcauu

SEQ ID NO: 1411168 - RNA, 19 nt, Homo sapiens
  misc_RNA (1)...(19): siRNA sense strand
uugauguucucucugauua

SEQ ID NO: 1411169 - RNA, 19 nt, Homo sapiens
  misc_RNA (1)...(19): siRNA sense strand
aaagagguauuggaagauu

SEQ ID NO: 1411170 - RNA, 19 nt, Homo sapiens
  misc_RNA (1)...(19): siRNA sense strand
gggagacccuacaagaaga

SEQ ID NO: 1411171 - RNA, 19 nt, Homo sapiens
  misc_RNA (1)...(19): siRNA sense strand
gaauccuaaugccaucaua

SEQ ID NO: 1411172 - RNA, 19 nt, Homo sapiens
  misc_RNA (1)...(19): siRNA sense strand
agaagaucuugcagcauua

SEQ ID NO: 1411173 - RNA, 19 nt, Homo sapiens
  misc_RNA (1)...(19): siRNA sense strand
caucauagaaagcuuaaga

SEQ ID NO: 1411174 - RNA, 19 nt, Homo sapiens
  misc_RNA (1)...(19): siRNA sense strand
gaagaauuuucccgcuuua

SEQ ID NO: 1411175 - RNA, 19 nt, Homo sapiens
  misc_RNA (1)...(19): siRNA sense strand
caguggauaucaagcuuaa

SEQ ID NO: 1411176 - RNA, 19 nt, Homo sapiens
  misc_RNA (1)...(19): siRNA sense strand
gcauugaagcuauaagaga

SEQ ID NO: 1411177 - RNA, 19 nt, Homo sapiens
  misc_RNA (1)...(19): siRNA sense strand
gaaagcucuucccaaugaa

SEQ ID NO: 1411178 - RNA, 19 nt, Homo sapiens
  misc_RNA (1)...(19): siRNA sense strand
ugacuuaccaggugugauu

SEQ ID NO: 1411179 - RNA, 19 nt, Homo sapiens
  misc_RNA (1)...(19): siRNA sense strand
ggaaaugauugcccaagcu

SEQ ID NO: 1411180 - RNA, 19 nt, Homo sapiens
  misc_RNA (1)...(19): siRNA sense strand
acacagcucuggaauaaaa

SEQ ID NO: 1411181 - RNA, 19 nt, Homo sapiens
  misc_RNA (1)...(19): siRNA sense strand
ugugggaaauugaugagua

SEQ ID NO: 1411182 - RNA, 19 nt, Homo sapiens
  misc_RNA (1)...(19): siRNA sense strand
cuaaaccauuguaaccuuu

SEQ ID NO: 1411183 - RNA, 19 nt, Homo sapiens
  misc_RNA (1)...(19): siRNA sense strand
agagcaugaugacauauuu

SEQ ID NO: 1411184 - RNA, 19 nt, Homo sapiens
  misc_RNA (1)...(19): siRNA sense strand
caacucaugugauugaaaa

SEQ ID NO: 1411185 - RNA, 19 nt, Homo sapiens
  misc_RNA (1)...(19): siRNA sense strand
caagugacuacaagaaauu

SEQ ID NO: 1411186 - RNA, 19 nt, Homo sapiens
  misc_RNA (1)...(19): siRNA sense strand
gcuaaaggcacaccaagug

SEQ ID NO: 1411187 - RNA, 19 nt, Homo sapiens
  misc_RNA (1)...(19): siRNA sense strand
gagaauaugaagaagaguu

SEQ ID NO: 1411188 - RNA, 19 nt, Homo sapiens
  misc_RNA (1)...(19): siRNA sense strand
gcaguauuguuacagacuu

SEQ ID NO: 1411189 - RNA, 19 nt, Homo sapiens
  misc_RNA (1)...(19): siRNA sense strand
uggaaagacuaguguguug

SEQ ID NO: 1411190 - RNA, 19 nt, Homo sapiens
  misc_RNA (1)...(19): siRNA sense strand
ggagaacaaagaauugaga

SEQ ID NO: 1411191 - RNA, 19 nt, Homo sapiens
  misc_RNA (1)...(19): siRNA sense strand
gaacuggacuucucccauu

SEQ ID NO: 1411192 - RNA, 19 nt, Homo sapiens
  misc_RNA (1)...(19): siRNA sense strand
gaaauaaguugaugacucu

SEQ ID NO: 1411193 - RNA, 19 nt, Homo sapiens
  misc_RNA (1)...(19): siRNA sense strand
gaucugagcacuuuauauu

SEQ ID NO: 1411194 - RNA, 19 nt, Homo sapiens
  misc_RNA (1)...(19): siRNA sense strand
gcaaguggaucauugacaa

SEQ ID NO: 1411195 - RNA, 19 nt, Homo sapiens
  misc_RNA (1)...(19): siRNA sense strand
caacuugacucauuucaca

SEQ ID NO: 1411196 - RNA, 19 nt, Homo sapiens
  misc_RNA (1)...(19): siRNA sense strand
gcaacaacaaucucaauuu

SEQ ID NO: 1411197 - RNA, 19 nt, Homo sapiens
  misc_RNA (1)...(19): siRNA sense strand
ggagcaacuugacucauuu

SEQ ID NO: 1411198 - RNA, 19 nt, Homo sapiens
  misc_RNA (1)...(19): siRNA sense strand
caucugauccuucauauga

SEQ ID NO: 1411199 - RNA, 19 nt, Homo sapiens
  misc_RNA (1)...(19): siRNA sense strand
ggaaugcaauaacuacguu

SEQ ID NO: 1411200 - RNA, 19 nt, Homo sapiens
  misc_RNA (1)...(19): siRNA sense strand
gggcagucuugaacauuua

SEQ ID NO: 1411201 - RNA, 19 nt, Homo sapiens
  misc_RNA (1)...(19): siRNA sense strand
ccaauggaauuaacacaau

SEQ ID NO: 1411202 - RNA, 19 nt, Homo sapiens
  misc_RNA (1)...(19): siRNA sense strand
gauugaugcuucagaucua

SEQ ID NO: 1411203 - RNA, 19 nt, Homo sapiens
  misc_RNA (1)...(19): siRNA sense strand
gaacugcgagauacugauu

SEQ ID NO: 1411204 - RNA, 19 nt, Homo sapiens
  misc_RNA (1)...(19): siRNA sense strand
uaagucaucugauccuuca

SEQ ID NO: 1411205 - RNA, 19 nt, Homo sapiens
  misc_RNA (1)...(19): siRNA sense strand
auacugauuuggacacuuu

SEQ ID NO: 1411206 - RNA, 19 nt, Homo sapiens
  misc_RNA (1)...(19): siRNA sense strand
ccaagacacuggaaauuuu

SEQ ID NO: 1411207 - RNA, 19 nt, Homo sapiens
  misc_RNA (1)...(19): siRNA sense strand
ucacuuacagaaagaguua

SEQ ID NO: 1411208 - RNA, 19 nt, Homo sapiens
  misc_RNA (1)...(19): siRNA sense strand
uuugaugacuguacccuua

SEQ ID NO: 1411209 - RNA, 19 nt, Homo sapiens
  misc_RNA (1)...(19): siRNA sense strand
uugaggaacuugagauuga

SEQ ID NO: 1411210 - RNA, 19 nt, Homo sapiens
  misc_RNA (1)...(19): siRNA sense strand
gaaaagagccacaaaacug

SEQ ID NO: 1411211 - RNA, 19 nt, Homo sapiens
  misc_RNA (1)...(19): siRNA sense strand
cuucagaucuacagagcua

SEQ ID NO: 1411212 - RNA, 19 nt, Homo sapiens
  misc_RNA (1)...(19): siRNA sense strand
ggaaagcucccagcaggaa

SEQ ID NO: 1411213 - RNA, 19 nt, Homo sapiens
  misc_RNA (1)...(19): siRNA sense strand
gaaaaucaccgaugaaagu

SEQ ID NO: 1411214 - RNA, 19 nt, Homo sapiens
  misc_RNA (1)...(19): siRNA sense strand
caaguugugucuucauaag

SEQ ID NO: 1411215 - RNA, 19 nt, Homo sapiens
  misc_RNA (1)...(19): siRNA sense strand
cagguaaaguggaaacguu

SEQ ID NO: 1411216 - RNA, 19 nt, Homo sapiens
  misc_RNA (1)...(19): siRNA sense strand
ggaagaauccuccaaucag

SEQ ID NO: 1411217 - RNA, 19 nt, Homo sapiens
  misc_RNA (1)...(19): siRNA sense strand
ucugagcacuuuauauuca

SEQ ID NO: 1411218 - RNA, 19 nt, Homo sapiens
  misc_RNA (1)...(19): siRNA sense strand
uuuaugaucugagcacuuu

SEQ ID NO: 1411219 - RNA, 19 nt, Homo sapiens
  misc_RNA (1)...(19): siRNA sense strand
gcacuggugucuggcaugu

SEQ ID NO: 1411220 - RNA, 19 nt, Homo sapiens
  misc_RNA (1)...(19): siRNA sense strand
ggaaauauggacaccuuca

SEQ ID NO: 1411221 - RNA, 19 nt, Homo sapiens
  misc_RNA (1)...(19): siRNA sense strand
ggcccucucuacaaacuuu

SEQ ID NO: 1411222 - RNA, 19 nt, Homo sapiens
  misc_RNA (1)...(19): siRNA sense strand
aacaggaucaccuacauua

SEQ ID NO: 1411223 - RNA, 19 nt, Homo sapiens
  misc_RNA (1)...(19): siRNA sense strand
guugaugacucuaccagau

SEQ ID NO: 1411224 - RNA, 19 nt, Homo sapiens
  misc_RNA (1)...(19): siRNA sense strand
aaucaccgaugaaaguuug

SEQ ID NO: 1411225 - RNA, 19 nt, Homo sapiens
  misc_RNA (1)...(19): siRNA sense strand
gaacuauccacuggugaaa

SEQ ID NO: 1411226 - RNA, 19 nt, Homo sapiens
  misc_RNA (1)...(19): siRNA sense strand
aggagcaacuugacucauu

SEQ ID NO: 1411227 - RNA, 19 nt, Homo sapiens
  misc_RNA (1)...(19): siRNA sense strand
aggcuucucugucuuguga

SEQ ID NO: 1411228 - RNA, 19 nt, Homo sapiens
  misc_RNA (1)...(19): siRNA sense strand
ccagaugccucccucuuac

SEQ ID NO: 1411229 - RNA, 19 nt, Homo sapiens
  misc_RNA (1)...(19): siRNA sense strand
ugacuaacauugauaucag

SEQ ID NO: 1411230 - RNA, 19 nt, Homo sapiens
  misc_RNA (1)...(19): siRNA sense strand
caaucaggcuucucugucu

SEQ ID NO: 1411231 - RNA, 19 nt, Homo sapiens
  misc_RNA (1)...(19): siRNA sense strand
caacaggaucaccuacauu

SEQ ID NO: 1411232 - RNA, 19 nt, Homo sapiens
  misc_RNA (1)...(19): siRNA sense strand
gccagcagguucaggaugu

SEQ ID NO: 1411233 - RNA, 19 nt, Homo sapiens
  misc_RNA (1)...(19): siRNA sense strand
gccuugaccuguccaacaa

SEQ ID NO: 1411234 - RNA, 19 nt, Homo sapiens
  misc_RNA (1)...(19): siRNA sense strand
gcaaauuaccugugugacu

SEQ ID NO: 1411235 - RNA, 19 nt, Homo sapiens
  misc_RNA (1)...(19): siRNA sense strand
aguuauagauccagguaaa

SEQ ID NO: 1411236 - RNA, 19 nt, Homo sapiens
  misc_RNA (1)...(19): siRNA sense strand
ugagauugaugcuucagau

SEQ ID NO: 1411237 - RNA, 19 nt, Homo sapiens
  misc_RNA (1)...(19): siRNA sense strand
cauggccugugguauauga

SEQ ID NO: 1411238 - RNA, 19 nt, Homo sapiens
  misc_RNA (1)...(19): siRNA sense strand
gguugaagaauacuugaaa

SEQ ID NO: 1411239 - RNA, 19 nt, Homo sapiens
  misc_RNA (1)...(19): siRNA sense strand
ugacagaguuauagaucca

SEQ ID NO: 1411240 - RNA, 19 nt, Homo sapiens
  misc_RNA (1)...(19): siRNA sense strand
auacuuggaucucagugaa

SEQ ID NO: 1411241 - RNA, 19 nt, Homo sapiens
  misc_RNA (1)...(19): siRNA sense strand
ugggcagucuugaacauuu

SEQ ID NO: 1411242 - RNA, 19 nt, Homo sapiens
  misc_RNA (1)...(19): siRNA sense strand
uaaugaacaccaagaccua

SEQ ID NO: 1411243 - RNA, 19 nt, Homo sapiens
  misc_RNA (1)...(19): siRNA sense strand
gccagcaaauuaccugugu

SEQ ID NO: 1411244 - RNA, 19 nt, Homo sapiens
  misc_RNA (1)...(19): siRNA sense strand
uuacccauguuacuaguau

SEQ ID NO: 1411245 - RNA, 19 nt, Homo sapiens
  misc_RNA (1)...(19): siRNA sense strand
ggacaccuucacuaagauu

SEQ ID NO: 1411246 - RNA, 19 nt, Homo sapiens
  misc_RNA (1)...(19): siRNA sense strand
acugggaaauccuuacaaa

SEQ ID NO: 1411247 - RNA, 19 nt, Homo sapiens
  misc_RNA (1)...(19): siRNA sense strand
cagcaaauuaccuguguga

SEQ ID NO: 1411248 - RNA, 19 nt, Homo sapiens
  misc_RNA (1)...(19): siRNA sense strand
ugggaaauauggacaccuu

SEQ ID NO: 1411249 - RNA, 19 nt, Homo sapiens
  misc_RNA (1)...(19): siRNA sense strand
ggaagcugguggcaauaac

SEQ ID NO: 1411250 - RNA, 19 nt, Homo sapiens
  misc_RNA (1)...(19): siRNA sense strand
uaacuacguuuucuaagga

SEQ ID NO: 1411251 - RNA, 19 nt, Homo sapiens
  misc_RNA (1)...(19): siRNA sense strand
gccuggcccucucuacaaa

SEQ ID NO: 1411252 - RNA, 19 nt, Homo sapiens
  misc_RNA (1)...(19): siRNA sense strand
gguaaaguggaaacguuaa

SEQ ID NO: 1411253 - RNA, 19 nt, Homo sapiens
  misc_RNA (1)...(19): siRNA sense strand
gaauuagaguuugaugacu

SEQ ID NO: 1411254 - RNA, 19 nt, Homo sapiens
  misc_RNA (1)...(19): siRNA sense strand
ucaagccccuuucuucuuu

SEQ ID NO: 1411255 - RNA, 19 nt, Homo sapiens
  misc_RNA (1)...(19): siRNA sense strand
gcagcaagcacuggccaaa

SEQ ID NO: 1411256 - RNA, 19 nt, Homo sapiens
  misc_RNA (1)...(19): siRNA sense strand
ccauguuacuaguauugaa

SEQ ID NO: 1411257 - RNA, 19 nt, Homo sapiens
  misc_RNA (1)...(19): siRNA sense strand
guggaaacguuaacaaucc

SEQ ID NO: 1411258 - RNA, 19 nt, Homo sapiens
  misc_RNA (1)...(19): siRNA sense strand
gaacuugagauugaugcuu

SEQ ID NO: 1411259 - RNA, 19 nt, Homo sapiens
  misc_RNA (1)...(19): siRNA sense strand
auggacaccuucacuaaga

SEQ ID NO: 1411260 - RNA, 19 nt, Homo sapiens
  misc_RNA (1)...(19): siRNA sense strand
caugugcugugcucuguuc

SEQ ID NO: 1411261 - RNA, 19 nt, Homo sapiens
  misc_RNA (1)...(19): siRNA sense strand
cccaagacacuggaaauuu

SEQ ID NO: 1411262 - RNA, 19 nt, Homo sapiens
  misc_RNA (1)...(19): siRNA sense strand
cauuuggcaucauuggaaa

SEQ ID NO: 1411263 - RNA, 19 nt, Homo sapiens
  misc_RNA (1)...(19): siRNA sense strand
gaugguugaagaauacuug

SEQ ID NO: 1411264 - RNA, 19 nt, Homo sapiens
  misc_RNA (1)...(19): siRNA sense strand
acaacaggaucaccuacau

SEQ ID NO: 1411265 - RNA, 19 nt, Homo sapiens
  misc_RNA (1)...(19): siRNA sense strand
uaucauugacuccauugaa

SEQ ID NO: 1411266 - RNA, 19 nt, Homo sapiens
  misc_RNA (1)...(19): siRNA sense strand
ccuggcaaguggaucauug

SEQ ID NO: 1411267 - RNA, 19 nt, Homo sapiens
  misc_RNA (1)...(19): siRNA sense strand
ccaacaacaggaucaccua

SEQ ID NO: 1411268 - RNA, 19 nt, Homo sapiens
  misc_RNA (1)...(19): siRNA sense strand
ucaaguugugucuucauaa

SEQ ID NO: 1411269 - RNA, 19 nt, Homo sapiens
  misc_RNA (1)...(19): siRNA sense strand
gcuaugaugcauuuguuuc

SEQ ID NO: 1411270 - RNA, 19 nt, Homo sapiens
  misc_RNA (1)...(19): siRNA sense strand
uuagagcaucugauaauga

SEQ ID NO: 1411271 - RNA, 19 nt, Homo sapiens
  misc_RNA (1)...(19): siRNA sense strand
uagagcaucugauaaugac

SEQ ID NO: 1411272 - RNA, 19 nt, Homo sapiens
  misc_RNA (1)...(19): siRNA sense strand
uucaaguugugucuucaua

SEQ ID NO: 1411273 - RNA, 19 nt, Homo sapiens
  misc_RNA (1)...(19): siRNA sense strand
uuuggaagcugguggcaau

SEQ ID NO: 1411274 - RNA, 19 nt, Homo sapiens
  misc_RNA (1)...(19): siRNA sense strand
ggccagaaaagaugaaaua

SEQ ID NO: 1411275 - RNA, 19 nt, Homo sapiens
  misc_RNA (1)...(19): siRNA sense strand
uuagaauacuuggaucuca

SEQ ID NO: 1411276 - RNA, 19 nt, Homo sapiens
  misc_RNA (1)...(19): siRNA sense strand
aucauugacuccauugaaa

SEQ ID NO: 1411277 - RNA, 19 nt, Homo sapiens
  misc_RNA (1)...(19): siRNA sense strand
gacuaacauugauaucagu

SEQ ID NO: 1411278 - RNA, 19 nt, Homo sapiens
  misc_RNA (1)...(19): siRNA sense strand
gugaaaauuugaugguuga

SEQ ID NO: 1411279 - RNA, 19 nt, Homo sapiens
  misc_RNA (1)...(19): siRNA sense strand
ucaucagccucuccaagga

SEQ ID NO: 1411280 - RNA, 19 nt, Homo sapiens
  misc_RNA (1)...(19): siRNA sense strand
gaaugcaauaacuacguuu

SEQ ID NO: 1411281 - RNA, 19 nt, Homo sapiens
  misc_RNA (1)...(19): siRNA sense strand
caagacacuggaaauuuua

SEQ ID NO: 1411282 - RNA, 19 nt, Homo sapiens
  misc_RNA (1)...(19): siRNA sense strand
ucauuuggcaucauuggaa

SEQ ID NO: 1411283 - RNA, 19 nt, Homo sapiens
  misc_RNA (1)...(19): siRNA sense strand
uagcaacagugaccuacag

SEQ ID NO: 1411284 - RNA, 19 nt, Homo sapiens
  misc_RNA (1)...(19): siRNA sense strand
cugguuccuuguuuacuuu

SEQ ID NO: 1411285 - RNA, 19 nt, Homo sapiens
  misc_RNA (1)...(19): siRNA sense strand
aaacugucuuugugcuuuc

SEQ ID NO: 1411286 - RNA, 19 nt, Homo sapiens
  misc_RNA (1)...(19): siRNA sense strand
cugcuaugaugcauuuguu

SEQ ID NO: 1411287 - RNA, 19 nt, Homo sapiens
  misc_RNA (1)...(19): siRNA sense strand
uuccauggccugugguaua

SEQ ID NO: 1411288 - RNA, 19 nt, Homo sapiens
  misc_RNA (1)...(19): siRNA sense strand
caguaggaaugcaauaacu

SEQ ID NO: 1411289 - RNA, 19 nt, Homo sapiens
  misc_RNA (1)...(19): siRNA sense strand
ccucuuacccauguuacua

SEQ ID NO: 1411290 - RNA, 19 nt, Homo sapiens
  misc_RNA (1)...(19): siRNA sense strand
cacaauagaggaagauucu

SEQ ID NO: 1411291 - RNA, 19 nt, Homo sapiens
  misc_RNA (1)...(19): siRNA sense strand
gaaaugaaauccaaagcuu

SEQ ID NO: 1411292 - RNA, 19 nt, Homo sapiens
  misc_RNA (1)...(19): siRNA sense strand
gaaagaauggugucaauga

SEQ ID NO: 1411293 - RNA, 19 nt, Homo sapiens
  misc_RNA (1)...(19): siRNA sense strand
uagaugagaucaagaauga

SEQ ID NO: 1411294 - RNA, 19 nt, Homo sapiens
  misc_RNA (1)...(19): siRNA sense strand
gaaagaagcguaugacaca

SEQ ID NO: 1411295 - RNA, 19 nt, Homo sapiens
  misc_RNA (1)...(19): siRNA sense strand
ucaaggacauuacuaguga

SEQ ID NO: 1411296 - RNA, 19 nt, Homo sapiens
  misc_RNA (1)...(19): siRNA sense strand
gaauugaggaagacuguua

SEQ ID NO: 1411297 - RNA, 19 nt, Homo sapiens
  misc_RNA (1)...(19): siRNA sense strand
gaaagaaagaagcguauga

SEQ ID NO: 1411298 - RNA, 19 nt, Homo sapiens
  misc_RNA (1)...(19): siRNA sense strand
ggacauuacuagugacuca

SEQ ID NO: 1411299 - RNA, 19 nt, Homo sapiens
  misc_RNA (1)...(19): siRNA sense strand
gacacuaagucaaguuaaa

SEQ ID NO: 1411300 - RNA, 19 nt, Homo sapiens
  misc_RNA (1)...(19): siRNA sense strand
gaggaagacuguuacuaca

SEQ ID NO: 1411301 - RNA, 19 nt, Homo sapiens
  misc_RNA (1)...(19): siRNA sense strand
ggcaucaacuucauggaaa

SEQ ID NO: 1411302 - RNA, 19 nt, Homo sapiens
  misc_RNA (1)...(19): siRNA sense strand
ggauuggaauugaggaaga

SEQ ID NO: 1411303 - RNA, 19 nt, Homo sapiens
  misc_RNA (1)...(19): siRNA sense strand
aaagaauggugucaaugaa

SEQ ID NO: 1411304 - RNA, 19 nt, Homo sapiens
  misc_RNA (1)...(19): siRNA sense strand
ugacugacaucaacuccaa

SEQ ID NO: 1411305 - RNA, 19 nt, Homo sapiens
  misc_RNA (1)...(19): siRNA sense strand
gcguaugacacauugauua

SEQ ID NO: 1411306 - RNA, 19 nt, Homo sapiens
  misc_RNA (1)...(19): siRNA sense strand
uggaaggccugcaucauga

SEQ ID NO: 1411307 - RNA, 19 nt, Homo sapiens
  misc_RNA (1)...(19): siRNA sense strand
agacacagcagaacagaaa

SEQ ID NO: 1411308 - RNA, 19 nt, Homo sapiens
  misc_RNA (1)...(19): siRNA sense strand
ccaagugacugacaucaac

SEQ ID NO: 1411309 - RNA, 19 nt, Homo sapiens
  misc_RNA (1)...(19): siRNA sense strand
guaauuggcaucaacuuca

SEQ ID NO: 1411310 - RNA, 19 nt, Homo sapiens
  misc_RNA (1)...(19): siRNA sense strand
uuacgucuguugcuagauu

SEQ ID NO: 1411311 - RNA, 19 nt, Homo sapiens
  misc_RNA (1)...(19): siRNA sense strand
guucaacugcuucguaauu

SEQ ID NO: 1411312 - RNA, 19 nt, Homo sapiens
  misc_RNA (1)...(19): siRNA sense strand
caaaauagaugagaucaag

SEQ ID NO: 1411313 - RNA, 19 nt, Homo sapiens
  misc_RNA (1)...(19): siRNA sense strand
guucuuacgucuguugcua

SEQ ID NO: 1411314 - RNA, 19 nt, Homo sapiens
  misc_RNA (1)...(19): siRNA sense strand
ucaacuucauggaaagaaa

SEQ ID NO: 1411315 - RNA, 19 nt, Homo sapiens
  misc_RNA (1)...(19): siRNA sense strand
agaagcguaugacacauug

SEQ ID NO: 1411316 - RNA, 19 nt, Homo sapiens
  misc_RNA (1)...(19): siRNA sense strand
gcuggagucaugacacuaa

SEQ ID NO: 1411317 - RNA, 19 nt, Homo sapiens
  misc_RNA (1)...(19): siRNA sense strand
gaugagaucaagaaugaca

SEQ ID NO: 1411318 - RNA, 19 nt, Homo sapiens
  misc_RNA (1)...(19): siRNA sense strand
ucgaaagaauggugucaau

SEQ ID NO: 1411319 - RNA, 19 nt, Homo sapiens
  misc_RNA (1)...(19): siRNA sense strand
cguaugacacauugauuaa

SEQ ID NO: 1411320 - RNA, 19 nt, Homo sapiens
  misc_RNA (1)...(19): siRNA sense strand
cagagaaaauucagacuau

SEQ ID NO: 1411321 - RNA, 19 nt, Homo sapiens
  misc_RNA (1)...(19): siRNA sense strand
gcaucaacuucauggaaag

SEQ ID NO: 1411322 - RNA, 19 nt, Homo sapiens
  misc_RNA (1)...(19): siRNA sense strand
ugaggaagacuguuacuac

SEQ ID NO: 1411323 - RNA, 19 nt, Homo sapiens
  misc_RNA (1)...(19): siRNA sense strand
ggaaagaaagaagcguaug

SEQ ID NO: 1411324 - RNA, 19 nt, Homo sapiens
  misc_RNA (1)...(19): siRNA sense strand
cacuauugcuggagucaug

SEQ ID NO: 1411325 - RNA, 19 nt, Homo sapiens
  misc_RNA (1)...(19): siRNA sense strand
gcagagaaaauucagacua

SEQ ID NO: 1411326 - RNA, 19 nt, Homo sapiens
  misc_RNA (1)...(19): siRNA sense strand
ggccaauucugccauaagc

SEQ ID NO: 1411327 - RNA, 19 nt, Homo sapiens
  misc_RNA (1)...(19): siRNA sense strand
uaauuggcaucaacuucau

SEQ ID NO: 1411328 - RNA, 19 nt, Homo sapiens
  misc_RNA (1)...(19): siRNA sense strand
aacauggaaucaucaagga

SEQ ID NO: 1411329 - RNA, 19 nt, Homo sapiens
  misc_RNA (1)...(19): siRNA sense strand
caucaacuccaagggauug

SEQ ID NO: 1411330 - RNA, 19 nt, Homo sapiens
  misc_RNA (1)...(19): siRNA sense strand
uacgucuguugcuagauua

SEQ ID NO: 1411331 - RNA, 19 nt, Homo sapiens
  misc_RNA (1)...(19): siRNA sense strand
ggagucaugacacuaaguc

SEQ ID NO: 1411332 - RNA, 19 nt, Homo sapiens
  misc_RNA (1)...(19): siRNA sense strand
cauggaaucaucaaggaau

SEQ ID NO: 1411333 - RNA, 19 nt, Homo sapiens
  misc_RNA (1)...(19): siRNA sense strand
cgaaagaauggugucaaug

SEQ ID NO: 1411334 - RNA, 19 nt, Homo sapiens
  misc_RNA (1)...(19): siRNA sense strand
gcaacaccaagugcaaaga

SEQ ID NO: 1411335 - RNA, 19 nt, Homo sapiens
  misc_RNA (1)...(19): siRNA sense strand
caacaccaagugcaaagag

SEQ ID NO: 1411336 - RNA, 19 nt, Homo sapiens
  misc_RNA (1)...(19): siRNA sense strand
gagaaaauucagacuauca

SEQ ID NO: 1411337 - RNA, 19 nt, Homo sapiens
  misc_RNA (1)...(19): siRNA sense strand
aagaagcguaugacacauu

SEQ ID NO: 1411338 - RNA, 19 nt, Homo sapiens
  misc_RNA (1)...(19): siRNA sense strand
caagacacagcagaacaga

SEQ ID NO: 1411339 - RNA, 19 nt, Homo sapiens
  misc_RNA (1)...(19): siRNA sense strand
ccuccuaccucugguucuu

SEQ ID NO: 1411340 - RNA, 19 nt, Homo sapiens
  misc_RNA (1)...(19): siRNA sense strand
caacuucauggaaagaaag

SEQ ID NO: 1411341 - RNA, 19 nt, Homo sapiens
  misc_RNA (1)...(19): siRNA sense strand
gcuagauuaucguccaaaa

SEQ ID NO: 1411342 - RNA, 19 nt, Homo sapiens
  misc_RNA (1)...(19): siRNA sense strand
uggcaucaacuucauggaa

SEQ ID NO: 1411343 - RNA, 19 nt, Homo sapiens
  misc_RNA (1)...(19): siRNA sense strand
cagcaacaccaagugcaaa

SEQ ID NO: 1411344 - RNA, 19 nt, Homo sapiens
  misc_RNA (1)...(19): siRNA sense strand
ucaacugcuucguaauugg

SEQ ID NO: 1411345 - RNA, 19 nt, Homo sapiens
  misc_RNA (1)...(19): siRNA sense strand
caaugaagccaaaauagau

SEQ ID NO: 1411346 - RNA, 19 nt, Homo sapiens
  misc_RNA (1)...(19): siRNA sense strand
uuaaugcccaagugacuga

SEQ ID NO: 1411347 - RNA, 19 nt, Homo sapiens
  misc_RNA (1)...(19): siRNA sense strand
ggaaggccugcaucaugau

SEQ ID NO: 1411348 - RNA, 19 nt, Homo sapiens
  misc_RNA (1)...(19): siRNA sense strand
cauuacuagugacucagaa

SEQ ID NO: 1411349 - RNA, 19 nt, Homo sapiens
  misc_RNA (1)...(19): siRNA sense strand
uucaacugcuucguaauug

SEQ ID NO: 1411350 - RNA, 19 nt, Homo sapiens
  misc_RNA (1)...(19): siRNA sense strand
aaugcacacucaccagcaa

SEQ ID NO: 1411351 - RNA, 19 nt, Homo sapiens
  misc_RNA (1)...(19): siRNA sense strand
ucagaaaugaaauccaaag

SEQ ID NO: 1411352 - RNA, 19 nt, Homo sapiens
  misc_RNA (1)...(19): siRNA sense strand
ccagcaacaccaagugcaa

SEQ ID NO: 1411353 - RNA, 19 nt, Homo sapiens
  misc_RNA (1)...(19): siRNA sense strand
gaaaugaaauccaaagcuu

SEQ ID NO: 1411354 - RNA, 19 nt, Homo sapiens
  misc_RNA (1)...(19): siRNA sense strand
gaaagaauggugucaauga

SEQ ID NO: 1411355 - RNA, 19 nt, Homo sapiens
  misc_RNA (1)...(19): siRNA sense strand
uagaugagaucaagaauga

SEQ ID NO: 1411356 - RNA, 19 nt, Homo sapiens
  misc_RNA (1)...(19): siRNA sense strand
gaaagaagcguaugacaca

SEQ ID NO: 1411357 - RNA, 19 nt, Homo sapiens
  misc_RNA (1)...(19): siRNA sense strand
ucaaggacauuacuaguga

SEQ ID NO: 1411358 - RNA, 19 nt, Homo sapiens
  misc_RNA (1)...(19): siRNA sense strand
gaauugaggaagacuguua

SEQ ID NO: 1411359 - RNA, 19 nt, Homo sapiens
  misc_RNA (1)...(19): siRNA sense strand
gaaagaaagaagcguauga

SEQ ID NO: 1411360 - RNA, 19 nt, Homo sapiens
  misc_RNA (1)...(19): siRNA sense strand
ggacauuacuagugacuca

SEQ ID NO: 1411361 - RNA, 19 nt, Homo sapiens
  misc_RNA (1)...(19): siRNA sense strand
gacacuaagucaaguuaaa

SEQ ID NO: 1411362 - RNA, 19 nt, Homo sapiens
  misc_RNA (1)...(19): siRNA sense strand
gaggaagacuguuacuaca

SEQ ID NO: 1411363 - RNA, 19 nt, Homo sapiens
  misc_RNA (1)...(19): siRNA sense strand
ggcaucaacuucauggaaa

SEQ ID NO: 1411364 - RNA, 19 nt, Homo sapiens
  misc_RNA (1)...(19): siRNA sense strand
ggauuggaauugaggaaga

SEQ ID NO: 1411365 - RNA, 19 nt, Homo sapiens
  misc_RNA (1)...(19): siRNA sense strand
aaagaauggugucaaugaa

SEQ ID NO: 1411366 - RNA, 19 nt, Homo sapiens
  misc_RNA (1)...(19): siRNA sense strand
ugacugacaucaacuccaa

SEQ ID NO: 1411367 - RNA, 19 nt, Homo sapiens
  misc_RNA (1)...(19): siRNA sense strand
gcguaugacacauugauua

SEQ ID NO: 1411368 - RNA, 19 nt, Homo sapiens
  misc_RNA (1)...(19): siRNA sense strand
uggaaggccugcaucauga

SEQ ID NO: 1411369 - RNA, 19 nt, Homo sapiens
  misc_RNA (1)...(19): siRNA sense strand
agacacagcagaacagaaa

SEQ ID NO: 1411370 - RNA, 19 nt, Homo sapiens
  misc_RNA (1)...(19): siRNA sense strand
ccaagugacugacaucaac

SEQ ID NO: 1411371 - RNA, 19 nt, Homo sapiens
  misc_RNA (1)...(19): siRNA sense strand
guaauuggcaucaacuuca

SEQ ID NO: 1411372 - RNA, 19 nt, Homo sapiens
  misc_RNA (1)...(19): siRNA sense strand
uuacgucuguugcuagauu

SEQ ID NO: 1411373 - RNA, 19 nt, Homo sapiens
  misc_RNA (1)...(19): siRNA sense strand
guucaacugcuucguaauu

SEQ ID NO: 1411374 - RNA, 19 nt, Homo sapiens
  misc_RNA (1)...(19): siRNA sense strand
caaaauagaugagaucaag

SEQ ID NO: 1411375 - RNA, 19 nt, Homo sapiens
  misc_RNA (1)...(19): siRNA sense strand
guucuuacgucuguugcua

SEQ ID NO: 1411376 - RNA, 19 nt, Homo sapiens
  misc_RNA (1)...(19): siRNA sense strand
ucaacuucauggaaagaaa

SEQ ID NO: 1411377 - RNA, 19 nt, Homo sapiens
  misc_RNA (1)...(19): siRNA sense strand
agaagcguaugacacauug

SEQ ID NO: 1411378 - RNA, 19 nt, Homo sapiens
  misc_RNA (1)...(19): siRNA sense strand
gcuggagucaugacacuaa

SEQ ID NO: 1411379 - RNA, 19 nt, Homo sapiens
  misc_RNA (1)...(19): siRNA sense strand
gaugagaucaagaaugaca

SEQ ID NO: 1411380 - RNA, 19 nt, Homo sapiens
  misc_RNA (1)...(19): siRNA sense strand
ucgaaagaauggugucaau

SEQ ID NO: 1411381 - RNA, 19 nt, Homo sapiens
  misc_RNA (1)...(19): siRNA sense strand
cguaugacacauugauuaa

SEQ ID NO: 1411382 - RNA, 19 nt, Homo sapiens
  misc_RNA (1)...(19): siRNA sense strand
cagagaaaauucagacuau

SEQ ID NO: 1411383 - RNA, 19 nt, Homo sapiens
  misc_RNA (1)...(19): siRNA sense strand
gcaucaacuucauggaaag

SEQ ID NO: 1411384 - RNA, 19 nt, Homo sapiens
  misc_RNA (1)...(19): siRNA sense strand
ugaggaagacuguuacuac

SEQ ID NO: 1411385 - RNA, 19 nt, Homo sapiens
  misc_RNA (1)...(19): siRNA sense strand
ggaaagaaagaagcguaug

SEQ ID NO: 1411386 - RNA, 19 nt, Homo sapiens
  misc_RNA (1)...(19): siRNA sense strand
cacuauugcuggagucaug

SEQ ID NO: 1411387 - RNA, 19 nt, Homo sapiens
  misc_RNA (1)...(19): siRNA sense strand
gcagagaaaauucagacua

SEQ ID NO: 1411388 - RNA, 19 nt, Homo sapiens
  misc_RNA (1)...(19): siRNA sense strand
ggccaauucugccauaagc

SEQ ID NO: 1411389 - RNA, 19 nt, Homo sapiens
  misc_RNA (1)...(19): siRNA sense strand
uaauuggcaucaacuucau

SEQ ID NO: 1411390 - RNA, 19 nt, Homo sapiens
  misc_RNA (1)...(19): siRNA sense strand
aacauggaaucaucaagga

SEQ ID NO: 1411391 - RNA, 19 nt, Homo sapiens
  misc_RNA (1)...(19): siRNA sense strand
caucaacuccaagggauug

SEQ ID NO: 1411392 - RNA, 19 nt, Homo sapiens
  misc_RNA (1)...(19): siRNA sense strand
uacgucuguugcuagauua

SEQ ID NO: 1411393 - RNA, 19 nt, Homo sapiens
  misc_RNA (1)...(19): siRNA sense strand
ggagucaugacacuaaguc

SEQ ID NO: 1411394 - RNA, 19 nt, Homo sapiens
  misc_RNA (1)...(19): siRNA sense strand
cauggaaucaucaaggaau

SEQ ID NO: 1411395 - RNA, 19 nt, Homo sapiens
  misc_RNA (1)...(19): siRNA sense strand
cgaaagaauggugucaaug

SEQ ID NO: 1411396 - RNA, 19 nt, Homo sapiens
  misc_RNA (1)...(19): siRNA sense strand
gcaacaccaagugcaaaga

SEQ ID NO: 1411397 - RNA, 19 nt, Homo sapiens
  misc_RNA (1)...(19): siRNA sense strand
caacaccaagugcaaagag

SEQ ID NO: 1411398 - RNA, 19 nt, Homo sapiens
  misc_RNA (1)...(19): siRNA sense strand
gagaaaauucagacuauca

SEQ ID NO: 1411399 - RNA, 19 nt, Homo sapiens
  misc_RNA (1)...(19): siRNA sense strand
aagaagcguaugacacauu

SEQ ID NO: 1411400 - RNA, 19 nt, Homo sapiens
  misc_RNA (1)...(19): siRNA sense strand
caagacacagcagaacaga

SEQ ID NO: 1411401 - RNA, 19 nt, Homo sapiens
  misc_RNA (1)...(19): siRNA sense strand
ccuccuaccucugguucuu

SEQ ID NO: 1411402 - RNA, 19 nt, Homo sapiens
  misc_RNA (1)...(19): siRNA sense strand
caacuucauggaaagaaag

SEQ ID NO: 1411403 - RNA, 19 nt, Homo sapiens
  misc_RNA (1)...(19): siRNA sense strand
gcuagauuaucguccaaaa

SEQ ID NO: 1411404 - RNA, 19 nt, Homo sapiens
  misc_RNA (1)...(19): siRNA sense strand
uggcaucaacuucauggaa

SEQ ID NO: 1411405 - RNA, 19 nt, Homo sapiens
  misc_RNA (1)...(19): siRNA sense strand
cagcaacaccaagugcaaa

SEQ ID NO: 1411406 - RNA, 19 nt, Homo sapiens
  misc_RNA (1)...(19): siRNA sense strand
ucaacugcuucguaauugg

SEQ ID NO: 1411407 - RNA, 19 nt, Homo sapiens
  misc_RNA (1)...(19): siRNA sense strand
caaugaagccaaaauagau

SEQ ID NO: 1411408 - RNA, 19 nt, Homo sapiens
  misc_RNA (1)...(19): siRNA sense strand
uuaaugcccaagugacuga

SEQ ID NO: 1411409 - RNA, 19 nt, Homo sapiens
  misc_RNA (1)...(19): siRNA sense strand
ggaaggccugcaucaugau

SEQ ID NO: 1411410 - RNA, 19 nt, Homo sapiens
  misc_RNA (1)...(19): siRNA sense strand
cauuacuagugacucagaa

SEQ ID NO: 1411411 - RNA, 19 nt, Homo sapiens
  misc_RNA (1)...(19): siRNA sense strand
uucaacugcuucguaauug

SEQ ID NO: 1411412 - RNA, 19 nt, Homo sapiens
  misc_RNA (1)...(19): siRNA sense strand
aaugcacacucaccagcaa

SEQ ID NO: 1411413 - RNA, 19 nt, Homo sapiens
  misc_RNA (1)...(19): siRNA sense strand
ucagaaaugaaauccaaag

SEQ ID NO: 1411414 - RNA, 19 nt, Homo sapiens
  misc_RNA (1)...(19): siRNA sense strand
ccagcaacaccaagugcaa

SEQ ID NO: 1411415 - RNA, 19 nt, Homo sapiens
  misc_RNA (1)...(19): siRNA sense strand
gaauugaggaagacuguua

SEQ ID NO: 1411416 - RNA, 19 nt, Homo sapiens
  misc_RNA (1)...(19): siRNA sense strand
gaggaagacuguuacuaca

SEQ ID NO: 1411417 - RNA, 19 nt, Homo sapiens
  misc_RNA (1)...(19): siRNA sense strand
ggauuggaauugaggaaga

SEQ ID NO: 1411418 - RNA, 19 nt, Homo sapiens
  misc_RNA (1)...(19): siRNA sense strand
ugacugacaucaacuccaa

SEQ ID NO: 1411419 - RNA, 19 nt, Homo sapiens
  misc_RNA (1)...(19): siRNA sense strand
uggaaggccugcaucauga

SEQ ID NO: 1411420 - RNA, 19 nt, Homo sapiens
  misc_RNA (1)...(19): siRNA sense strand
uuacgucuguugcuagauu

SEQ ID NO: 1411421 - RNA, 19 nt, Homo sapiens
  misc_RNA (1)...(19): siRNA sense strand
ccaagugacugacaucaac

SEQ ID NO: 1411422 - RNA, 19 nt, Homo sapiens
  misc_RNA (1)...(19): siRNA sense strand
guucuuacgucuguugcua

SEQ ID NO: 1411423 - RNA, 19 nt, Homo sapiens
  misc_RNA (1)...(19): siRNA sense strand
ugaggaagacuguuacuac

SEQ ID NO: 1411424 - RNA, 19 nt, Homo sapiens
  misc_RNA (1)...(19): siRNA sense strand
ggccaauucugccauaagc

SEQ ID NO: 1411425 - RNA, 19 nt, Homo sapiens
  misc_RNA (1)...(19): siRNA sense strand
aacauggaaucaucaagga

SEQ ID NO: 1411426 - RNA, 19 nt, Homo sapiens
  misc_RNA (1)...(19): siRNA sense strand
uacgucuguugcuagauua

SEQ ID NO: 1411427 - RNA, 19 nt, Homo sapiens
  misc_RNA (1)...(19): siRNA sense strand
caucaacuccaagggauug

SEQ ID NO: 1411428 - RNA, 19 nt, Homo sapiens
  misc_RNA (1)...(19): siRNA sense strand
cauggaaucaucaaggaau

SEQ ID NO: 1411429 - RNA, 19 nt, Homo sapiens
  misc_RNA (1)...(19): siRNA sense strand
gcaacaccaagugcaaaga

SEQ ID NO: 1411430 - RNA, 19 nt, Homo sapiens
  misc_RNA (1)...(19): siRNA sense strand
caacaccaagugcaaagag

SEQ ID NO: 1411431 - RNA, 19 nt, Homo sapiens
  misc_RNA (1)...(19): siRNA sense strand
gcuagauuaucguccaaaa

SEQ ID NO: 1411432 - RNA, 19 nt, Homo sapiens
  misc_RNA (1)...(19): siRNA sense strand
ccuccuaccucugguucuu

SEQ ID NO: 1411433 - RNA, 19 nt, Homo sapiens
  misc_RNA (1)...(19): siRNA sense strand
cagcaacaccaagugcaaa

SEQ ID NO: 1411434 - RNA, 19 nt, Homo sapiens
  misc_RNA (1)...(19): siRNA sense strand
uuaaugcccaagugacuga

SEQ ID NO: 1411435 - RNA, 19 nt, Homo sapiens
  misc_RNA (1)...(19): siRNA sense strand
ggaaggccugcaucaugau

SEQ ID NO: 1411436 - RNA, 19 nt, Homo sapiens
  misc_RNA (1)...(19): siRNA sense strand
aaugcacacucaccagcaa

SEQ ID NO: 1411437 - RNA, 19 nt, Homo sapiens
  misc_RNA (1)...(19): siRNA sense strand
ccagcaacaccaagugcaa

SEQ ID NO: 1411438 - RNA, 19 nt, Homo sapiens
  misc_RNA (1)...(19): siRNA sense strand
gaauugaggaagacuguua

SEQ ID NO: 1411439 - RNA, 19 nt, Homo sapiens
  misc_RNA (1)...(19): siRNA sense strand
gaggaagacuguuacuaca

SEQ ID NO: 1411440 - RNA, 19 nt, Homo sapiens
  misc_RNA (1)...(19): siRNA sense strand
ggauuggaauugaggaaga

SEQ ID NO: 1411441 - RNA, 19 nt, Homo sapiens
  misc_RNA (1)...(19): siRNA sense strand
ugacugacaucaacuccaa

SEQ ID NO: 1411442 - RNA, 19 nt, Homo sapiens
  misc_RNA (1)...(19): siRNA sense strand
uggaaggccugcaucauga

SEQ ID NO: 1411443 - RNA, 19 nt, Homo sapiens
  misc_RNA (1)...(19): siRNA sense strand
uuacgucuguugcuagauu

SEQ ID NO: 1411444 - RNA, 19 nt, Homo sapiens
  misc_RNA (1)...(19): siRNA sense strand
ccaagugacugacaucaac

SEQ ID NO: 1411445 - RNA, 19 nt, Homo sapiens
  misc_RNA (1)...(19): siRNA sense strand
guucuuacgucuguugcua

SEQ ID NO: 1411446 - RNA, 19 nt, Homo sapiens
  misc_RNA (1)...(19): siRNA sense strand
ugaggaagacuguuacuac

SEQ ID NO: 1411447 - RNA, 19 nt, Homo sapiens
  misc_RNA (1)...(19): siRNA sense strand
ggccaauucugccauaagc

SEQ ID NO: 1411448 - RNA, 19 nt, Homo sapiens
  misc_RNA (1)...(19): siRNA sense strand
aacauggaaucaucaagga

SEQ ID NO: 1411449 - RNA, 19 nt, Homo sapiens
  misc_RNA (1)...(19): siRNA sense strand
uacgucuguugcuagauua

SEQ ID NO: 1411450 - RNA, 19 nt, Homo sapiens
  misc_RNA (1)...(19): siRNA sense strand
caucaacuccaagggauug

SEQ ID NO: 1411451 - RNA, 19 nt, Homo sapiens
  misc_RNA (1)...(19): siRNA sense strand
cauggaaucaucaaggaau

SEQ ID NO: 1411452 - RNA, 19 nt, Homo sapiens
  misc_RNA (1)...(19): siRNA sense strand
gcaacaccaagugcaaaga

SEQ ID NO: 1411453 - RNA, 19 nt, Homo sapiens
  misc_RNA (1)...(19): siRNA sense strand
caacaccaagugcaaagag

SEQ ID NO: 1411454 - RNA, 19 nt, Homo sapiens
  misc_RNA (1)...(19): siRNA sense strand
gcuagauuaucguccaaaa

SEQ ID NO: 1411455 - RNA, 19 nt, Homo sapiens
  misc_RNA (1)...(19): siRNA sense strand
ccuccuaccucugguucuu

SEQ ID NO: 1411456 - RNA, 19 nt, Homo sapiens
  misc_RNA (1)...(19): siRNA sense strand
cagcaacaccaagugcaaa

SEQ ID NO: 1411457 - RNA, 19 nt, Homo sapiens
  misc_RNA (1)...(19): siRNA sense strand
uuaaugcccaagugacuga

SEQ ID NO: 1411458 - RNA, 19 nt, Homo sapiens
  misc_RNA (1)...(19): siRNA sense strand
ggaaggccugcaucaugau

SEQ ID NO: 1411459 - RNA, 19 nt, Homo sapiens
  misc_RNA (1)...(19): siRNA sense strand
aaugcacacucaccagcaa

SEQ ID NO: 1411460 - RNA, 19 nt, Homo sapiens
  misc_RNA (1)...(19): siRNA sense strand
ccagcaacaccaagugcaa

SEQ ID NO: 1411461 - RNA, 19 nt, Homo sapiens
  misc_RNA (1)...(19): siRNA sense strand
gaauugaggaagacuguua

SEQ ID NO: 1411462 - RNA, 19 nt, Homo sapiens
  misc_RNA (1)...(19): siRNA sense strand
gaggaagacuguuacuaca

SEQ ID NO: 1411463 - RNA, 19 nt, Homo sapiens
  misc_RNA (1)...(19): siRNA sense strand
ggauuggaauugaggaaga

SEQ ID NO: 1411464 - RNA, 19 nt, Homo sapiens
  misc_RNA (1)...(19): siRNA sense strand
ugacugacaucaacuccaa

SEQ ID NO: 1411465 - RNA, 19 nt, Homo sapiens
  misc_RNA (1)...(19): siRNA sense strand
uggaaggccugcaucauga

SEQ ID NO: 1411466 - RNA, 19 nt, Homo sapiens
  misc_RNA (1)...(19): siRNA sense strand
uuacgucuguugcuagauu

SEQ ID NO: 1411467 - RNA, 19 nt, Homo sapiens
  misc_RNA (1)...(19): siRNA sense strand
ccaagugacugacaucaac

SEQ ID NO: 1411468 - RNA, 19 nt, Homo sapiens
  misc_RNA (1)...(19): siRNA sense strand
guucuuacgucuguugcua

SEQ ID NO: 1411469 - RNA, 19 nt, Homo sapiens
  misc_RNA (1)...(19): siRNA sense strand
ugaggaagacuguuacuac

SEQ ID NO: 1411470 - RNA, 19 nt, Homo sapiens
  misc_RNA (1)...(19): siRNA sense strand
ggccaauucugccauaagc

SEQ ID NO: 1411471 - RNA, 19 nt, Homo sapiens
  misc_RNA (1)...(19): siRNA sense strand
aacauggaaucaucaagga

SEQ ID NO: 1411472 - RNA, 19 nt, Homo sapiens
  misc_RNA (1)...(19): siRNA sense strand
uacgucuguugcuagauua

SEQ ID NO: 1411473 - RNA, 19 nt, Homo sapiens
  misc_RNA (1)...(19): siRNA sense strand
caucaacuccaagggauug

SEQ ID NO: 1411474 - RNA, 19 nt, Homo sapiens
  misc_RNA (1)...(19): siRNA sense strand
cauggaaucaucaaggaau

SEQ ID NO: 1411475 - RNA, 19 nt, Homo sapiens
  misc_RNA (1)...(19): siRNA sense strand
gcaacaccaagugcaaaga

SEQ ID NO: 1411476 - RNA, 19 nt, Homo sapiens
  misc_RNA (1)...(19): siRNA sense strand
caacaccaagugcaaagag

SEQ ID NO: 1411477 - RNA, 19 nt, Homo sapiens
  misc_RNA (1)...(19): siRNA sense strand
gcuagauuaucguccaaaa

SEQ ID NO: 1411478 - RNA, 19 nt, Homo sapiens
  misc_RNA (1)...(19): siRNA sense strand
ccuccuaccucugguucuu

SEQ ID NO: 1411479 - RNA, 19 nt, Homo sapiens
  misc_RNA (1)...(19): siRNA sense strand
cagcaacaccaagugcaaa

SEQ ID NO: 1411480 - RNA, 19 nt, Homo sapiens
  misc_RNA (1)...(19): siRNA sense strand
uuaaugcccaagugacuga

SEQ ID NO: 1411481 - RNA, 19 nt, Homo sapiens
  misc_RNA (1)...(19): siRNA sense strand
ggaaggccugcaucaugau

SEQ ID NO: 1411482 - RNA, 19 nt, Homo sapiens
  misc_RNA (1)...(19): siRNA sense strand
aaugcacacucaccagcaa

SEQ ID NO: 1411483 - RNA, 19 nt, Homo sapiens
  misc_RNA (1)...(19): siRNA sense strand
ccagcaacaccaagugcaa

SEQ ID NO: 1411484 - RNA, 19 nt, Homo sapiens
  misc_RNA (1)...(19): siRNA sense strand
gaauugaggaagacuguua

SEQ ID NO: 1411485 - RNA, 19 nt, Homo sapiens
  misc_RNA (1)...(19): siRNA sense strand
gaggaagacuguuacuaca

SEQ ID NO: 1411486 - RNA, 19 nt, Homo sapiens
  misc_RNA (1)...(19): siRNA sense strand
ggauuggaauugaggaaga

SEQ ID NO: 1411487 - RNA, 19 nt, Homo sapiens
  misc_RNA (1)...(19): siRNA sense strand
ugacugacaucaacuccaa

SEQ ID NO: 1411488 - RNA, 19 nt, Homo sapiens
  misc_RNA (1)...(19): siRNA sense strand
uggaaggccugcaucauga

SEQ ID NO: 1411489 - RNA, 19 nt, Homo sapiens
  misc_RNA (1)...(19): siRNA sense strand
uuacgucuguugcuagauu

SEQ ID NO: 1411490 - RNA, 19 nt, Homo sapiens
  misc_RNA (1)...(19): siRNA sense strand
ccaagugacugacaucaac

SEQ ID NO: 1411491 - RNA, 19 nt, Homo sapiens
  misc_RNA (1)...(19): siRNA sense strand
guucuuacgucuguugcua

SEQ ID NO: 1411492 - RNA, 19 nt, Homo sapiens
  misc_RNA (1)...(19): siRNA sense strand
ugaggaagacuguuacuac

SEQ ID NO: 1411493 - RNA, 19 nt, Homo sapiens
  misc_RNA (1)...(19): siRNA sense strand
ggccaauucugccauaagc

SEQ ID NO: 1411494 - RNA, 19 nt, Homo sapiens
  misc_RNA (1)...(19): siRNA sense strand
aacauggaaucaucaagga

SEQ ID NO: 1411495 - RNA, 19 nt, Homo sapiens
  misc_RNA (1)...(19): siRNA sense strand
uacgucuguugcuagauua

SEQ ID NO: 1411496 - RNA, 19 nt, Homo sapiens
  misc_RNA (1)...(19): siRNA sense strand
caucaacuccaagggauug

SEQ ID NO: 1411497 - RNA, 19 nt, Homo sapiens
  misc_RNA (1)...(19): siRNA sense strand
cauggaaucaucaaggaau

SEQ ID NO: 1411498 - RNA, 19 nt, Homo sapiens
  misc_RNA (1)...(19): siRNA sense strand
gcaacaccaagugcaaaga

SEQ ID NO: 1411499 - RNA, 19 nt, Homo sapiens
  misc_RNA (1)...(19): siRNA sense strand
caacaccaagugcaaagag

SEQ ID NO: 1411500 - RNA, 19 nt, Homo sapiens
  misc_RNA (1)...(19): siRNA sense strand
gcuagauuaucguccaaaa

SEQ ID NO: 1411501 - RNA, 19 nt, Homo sapiens
  misc_RNA (1)...(19): siRNA sense strand
ccuccuaccucugguucuu

SEQ ID NO: 1411502 - RNA, 19 nt, Homo sapiens
  misc_RNA (1)...(19): siRNA sense strand
cagcaacaccaagugcaaa

SEQ ID NO: 1411503 - RNA, 19 nt, Homo sapiens
  misc_RNA (1)...(19): siRNA sense strand
uuaaugcccaagugacuga

SEQ ID NO: 1411504 - RNA, 19 nt, Homo sapiens
  misc_RNA (1)...(19): siRNA sense strand
ggaaggccugcaucaugau

SEQ ID NO: 1411505 - RNA, 19 nt, Homo sapiens
  misc_RNA (1)...(19): siRNA sense strand
aaugcacacucaccagcaa

SEQ ID NO: 1411506 - RNA, 19 nt, Homo sapiens
  misc_RNA (1)...(19): siRNA sense strand
ccagcaacaccaagugcaa

SEQ ID NO: 1411507 - RNA, 19 nt, Homo sapiens
  misc_RNA (1)...(19): siRNA sense strand
gaauugaggaagacuguua

SEQ ID NO: 1411508 - RNA, 19 nt, Homo sapiens
  misc_RNA (1)...(19): siRNA sense strand
gaggaagacuguuacuaca

SEQ ID NO: 1411509 - RNA, 19 nt, Homo sapiens
  misc_RNA (1)...(19): siRNA sense strand
ggauuggaauugaggaaga

SEQ ID NO: 1411510 - RNA, 19 nt, Homo sapiens
  misc_RNA (1)...(19): siRNA sense strand
ugacugacaucaacuccaa

SEQ ID NO: 1411511 - RNA, 19 nt, Homo sapiens
  misc_RNA (1)...(19): siRNA sense strand
uggaaggccugcaucauga

SEQ ID NO: 1411512 - RNA, 19 nt, Homo sapiens
  misc_RNA (1)...(19): siRNA sense strand
uuacgucuguugcuagauu

SEQ ID NO: 1411513 - RNA, 19 nt, Homo sapiens
  misc_RNA (1)...(19): siRNA sense strand
ccaagugacugacaucaac

SEQ ID NO: 1411514 - RNA, 19 nt, Homo sapiens
  misc_RNA (1)...(19): siRNA sense strand
guucuuacgucuguugcua

SEQ ID NO: 1411515 - RNA, 19 nt, Homo sapiens
  misc_RNA (1)...(19): siRNA sense strand
ugaggaagacuguuacuac

SEQ ID NO: 1411516 - RNA, 19 nt, Homo sapiens
  misc_RNA (1)...(19): siRNA sense strand
ggccaauucugccauaagc

SEQ ID NO: 1411517 - RNA, 19 nt, Homo sapiens
  misc_RNA (1)...(19): siRNA sense strand
aacauggaaucaucaagga

SEQ ID NO: 1411518 - RNA, 19 nt, Homo sapiens
  misc_RNA (1)...(19): siRNA sense strand
uacgucuguugcuagauua

SEQ ID NO: 1411519 - RNA, 19 nt, Homo sapiens
  misc_RNA (1)...(19): siRNA sense strand
caucaacuccaagggauug

SEQ ID NO: 1411520 - RNA, 19 nt, Homo sapiens
  misc_RNA (1)...(19): siRNA sense strand
cauggaaucaucaaggaau

SEQ ID NO: 1411521 - RNA, 19 nt, Homo sapiens
  misc_RNA (1)...(19): siRNA sense strand
gcaacaccaagugcaaaga

SEQ ID NO: 1411522 - RNA, 19 nt, Homo sapiens
  misc_RNA (1)...(19): siRNA sense strand
caacaccaagugcaaagag

SEQ ID NO: 1411523 - RNA, 19 nt, Homo sapiens
  misc_RNA (1)...(19): siRNA sense strand
gcuagauuaucguccaaaa

SEQ ID NO: 1411524 - RNA, 19 nt, Homo sapiens
  misc_RNA (1)...(19): siRNA sense strand
ccuccuaccucugguucuu

SEQ ID NO: 1411525 - RNA, 19 nt, Homo sapiens
  misc_RNA (1)...(19): siRNA sense strand
cagcaacaccaagugcaaa

SEQ ID NO: 1411526 - RNA, 19 nt, Homo sapiens
  misc_RNA (1)...(19): siRNA sense strand
uuaaugcccaagugacuga

SEQ ID NO: 1411527 - RNA, 19 nt, Homo sapiens
  misc_RNA (1)...(19): siRNA sense strand
ggaaggccugcaucaugau

SEQ ID NO: 1411528 - RNA, 19 nt, Homo sapiens
  misc_RNA (1)...(19): siRNA sense strand
aaugcacacucaccagcaa

SEQ ID NO: 1411529 - RNA, 19 nt, Homo sapiens
  misc_RNA (1)...(19): siRNA sense strand
ccagcaacaccaagugcaa

SEQ ID NO: 1411530 - RNA, 19 nt, Homo sapiens
  misc_RNA (1)...(19): siRNA sense strand
gaauugaggaagacuguua

SEQ ID NO: 1411531 - RNA, 19 nt, Homo sapiens
  misc_RNA (1)...(19): siRNA sense strand
gaggaagacuguuacuaca

SEQ ID NO: 1411532 - RNA, 19 nt, Homo sapiens
  misc_RNA (1)...(19): siRNA sense strand
ggauuggaauugaggaaga

SEQ ID NO: 1411533 - RNA, 19 nt, Homo sapiens
  misc_RNA (1)...(19): siRNA sense strand
ugacugacaucaacuccaa

SEQ ID NO: 1411534 - RNA, 19 nt, Homo sapiens
  misc_RNA (1)...(19): siRNA sense strand
uggaaggccugcaucauga

SEQ ID NO: 1411535 - RNA, 19 nt, Homo sapiens
  misc_RNA (1)...(19): siRNA sense strand
uuacgucuguugcuagauu

SEQ ID NO: 1411536 - RNA, 19 nt, Homo sapiens
  misc_RNA (1)...(19): siRNA sense strand
ccaagugacugacaucaac

SEQ ID NO: 1411537 - RNA, 19 nt, Homo sapiens
  misc_RNA (1)...(19): siRNA sense strand
guucuuacgucuguugcua

SEQ ID NO: 1411538 - RNA, 19 nt, Homo sapiens
  misc_RNA (1)...(19): siRNA sense strand
ugaggaagacuguuacuac

SEQ ID NO: 1411539 - RNA, 19 nt, Homo sapiens
  misc_RNA (1)...(19): siRNA sense strand
ggccaauucugccauaagc

SEQ ID NO: 1411540 - RNA, 19 nt, Homo sapiens
  misc_RNA (1)...(19): siRNA sense strand
aacauggaaucaucaagga

SEQ ID NO: 1411541 - RNA, 19 nt, Homo sapiens
  misc_RNA (1)...(19): siRNA sense strand
uacgucuguugcuagauua

SEQ ID NO: 1411542 - RNA, 19 nt, Homo sapiens
  misc_RNA (1)...(19): siRNA sense strand
caucaacuccaagggauug

SEQ ID NO: 1411543 - RNA, 19 nt, Homo sapiens
  misc_RNA (1)...(19): siRNA sense strand
cauggaaucaucaaggaau

SEQ ID NO: 1411544 - RNA, 19 nt, Homo sapiens
  misc_RNA (1)...(19): siRNA sense strand
gcaacaccaagugcaaaga

SEQ ID NO: 1411545 - RNA, 19 nt, Homo sapiens
  misc_RNA (1)...(19): siRNA sense strand
caacaccaagugcaaagag

SEQ ID NO: 1411546 - RNA, 19 nt, Homo sapiens
  misc_RNA (1)...(19): siRNA sense strand
gcuagauuaucguccaaaa

SEQ ID NO: 1411547 - RNA, 19 nt, Homo sapiens
  misc_RNA (1)...(19): siRNA sense strand
ccuccuaccucugguucuu

SEQ ID NO: 1411548 - RNA, 19 nt, Homo sapiens
  misc_RNA (1)...(19): siRNA sense strand
cagcaacaccaagugcaaa

SEQ ID NO: 1411549 - RNA, 19 nt, Homo sapiens
  misc_RNA (1)...(19): siRNA sense strand
uuaaugcccaagugacuga

SEQ ID NO: 1411550 - RNA, 19 nt, Homo sapiens
  misc_RNA (1)...(19): siRNA sense strand
ggaaggccugcaucaugau

SEQ ID NO: 1411551 - RNA, 19 nt, Homo sapiens
  misc_RNA (1)...(19): siRNA sense strand
aaugcacacucaccagcaa

SEQ ID NO: 1411552 - RNA, 19 nt, Homo sapiens
  misc_RNA (1)...(19): siRNA sense strand
ccagcaacaccaagugcaa

SEQ ID NO: 1411553 - RNA, 19 nt, Homo sapiens
  misc_RNA (1)...(19): siRNA sense strand
gaaaugaaauccaaagcuu

SEQ ID NO: 1411554 - RNA, 19 nt, Homo sapiens
  misc_RNA (1)...(19): siRNA sense strand
gaaagaauggugucaauga

SEQ ID NO: 1411555 - RNA, 19 nt, Homo sapiens
  misc_RNA (1)...(19): siRNA sense strand
uagaugagaucaagaauga

SEQ ID NO: 1411556 - RNA, 19 nt, Homo sapiens
  misc_RNA (1)...(19): siRNA sense strand
gaaagaagcguaugacaca

SEQ ID NO: 1411557 - RNA, 19 nt, Homo sapiens
  misc_RNA (1)...(19): siRNA sense strand
ucaaggacauuacuaguga

SEQ ID NO: 1411558 - RNA, 19 nt, Homo sapiens
  misc_RNA (1)...(19): siRNA sense strand
gaauugaggaagacuguua

SEQ ID NO: 1411559 - RNA, 19 nt, Homo sapiens
  misc_RNA (1)...(19): siRNA sense strand
gaaagaaagaagcguauga

SEQ ID NO: 1411560 - RNA, 19 nt, Homo sapiens
  misc_RNA (1)...(19): siRNA sense strand
ggacauuacuagugacuca

SEQ ID NO: 1411561 - RNA, 19 nt, Homo sapiens
  misc_RNA (1)...(19): siRNA sense strand
gacacuaagucaaguuaaa

SEQ ID NO: 1411562 - RNA, 19 nt, Homo sapiens
  misc_RNA (1)...(19): siRNA sense strand
gaggaagacuguuacuaca

SEQ ID NO: 1411563 - RNA, 19 nt, Homo sapiens
  misc_RNA (1)...(19): siRNA sense strand
ggcaucaacuucauggaaa

SEQ ID NO: 1411564 - RNA, 19 nt, Homo sapiens
  misc_RNA (1)...(19): siRNA sense strand
ggauuggaauugaggaaga

SEQ ID NO: 1411565 - RNA, 19 nt, Homo sapiens
  misc_RNA (1)...(19): siRNA sense strand
aaagaauggugucaaugaa

SEQ ID NO: 1411566 - RNA, 19 nt, Homo sapiens
  misc_RNA (1)...(19): siRNA sense strand
ugacugacaucaacuccaa

SEQ ID NO: 1411567 - RNA, 19 nt, Homo sapiens
  misc_RNA (1)...(19): siRNA sense strand
gcguaugacacauugauua

SEQ ID NO: 1411568 - RNA, 19 nt, Homo sapiens
  misc_RNA (1)...(19): siRNA sense strand
uggaaggccugcaucauga

SEQ ID NO: 1411569 - RNA, 19 nt, Homo sapiens
  misc_RNA (1)...(19): siRNA sense strand
agacacagcagaacagaaa

SEQ ID NO: 1411570 - RNA, 19 nt, Homo sapiens
  misc_RNA (1)...(19): siRNA sense strand
ccaagugacugacaucaac

SEQ ID NO: 1411571 - RNA, 19 nt, Homo sapiens
  misc_RNA (1)...(19): siRNA sense strand
guaauuggcaucaacuuca

SEQ ID NO: 1411572 - RNA, 19 nt, Homo sapiens
  misc_RNA (1)...(19): siRNA sense strand
uuacgucuguugcuagauu

SEQ ID NO: 1411573 - RNA, 19 nt, Homo sapiens
  misc_RNA (1)...(19): siRNA sense strand
guucaacugcuucguaauu

SEQ ID NO: 1411574 - RNA, 19 nt, Homo sapiens
  misc_RNA (1)...(19): siRNA sense strand
caaaauagaugagaucaag

SEQ ID NO: 1411575 - RNA, 19 nt, Homo sapiens
  misc_RNA (1)...(19): siRNA sense strand
guucuuacgucuguugcua

SEQ ID NO: 1411576 - RNA, 19 nt, Homo sapiens
  misc_RNA (1)...(19): siRNA sense strand
ucaacuucauggaaagaaa

SEQ ID NO: 1411577 - RNA, 19 nt, Homo sapiens
  misc_RNA (1)...(19): siRNA sense strand
agaagcguaugacacauug

SEQ ID NO: 1411578 - RNA, 19 nt, Homo sapiens
  misc_RNA (1)...(19): siRNA sense strand
gcuggagucaugacacuaa

SEQ ID NO: 1411579 - RNA, 19 nt, Homo sapiens
  misc_RNA (1)...(19): siRNA sense strand
gaugagaucaagaaugaca

SEQ ID NO: 1411580 - RNA, 19 nt, Homo sapiens
  misc_RNA (1)...(19): siRNA sense strand
ucgaaagaauggugucaau

SEQ ID NO: 1411581 - RNA, 19 nt, Homo sapiens
  misc_RNA (1)...(19): siRNA sense strand
cguaugacacauugauuaa

SEQ ID NO: 1411582 - RNA, 19 nt, Homo sapiens
  misc_RNA (1)...(19): siRNA sense strand
cagagaaaauucagacuau

SEQ ID NO: 1411583 - RNA, 19 nt, Homo sapiens
  misc_RNA (1)...(19): siRNA sense strand
gcaucaacuucauggaaag

SEQ ID NO: 1411584 - RNA, 19 nt, Homo sapiens
  misc_RNA (1)...(19): siRNA sense strand
ugaggaagacuguuacuac

SEQ ID NO: 1411585 - RNA, 19 nt, Homo sapiens
  misc_RNA (1)...(19): siRNA sense strand
ggaaagaaagaagcguaug

SEQ ID NO: 1411586 - RNA, 19 nt, Homo sapiens
  misc_RNA (1)...(19): siRNA sense strand
cacuauugcuggagucaug

SEQ ID NO: 1411587 - RNA, 19 nt, Homo sapiens
  misc_RNA (1)...(19): siRNA sense strand
gcagagaaaauucagacua

SEQ ID NO: 1411588 - RNA, 19 nt, Homo sapiens
  misc_RNA (1)...(19): siRNA sense strand
ggccaauucugccauaagc

SEQ ID NO: 1411589 - RNA, 19 nt, Homo sapiens
  misc_RNA (1)...(19): siRNA sense strand
uaauuggcaucaacuucau

SEQ ID NO: 1411590 - RNA, 19 nt, Homo sapiens
  misc_RNA (1)...(19): siRNA sense strand
aacauggaaucaucaagga

SEQ ID NO: 1411591 - RNA, 19 nt, Homo sapiens
  misc_RNA (1)...(19): siRNA sense strand
caucaacuccaagggauug

SEQ ID NO: 1411592 - RNA, 19 nt, Homo sapiens
  misc_RNA (1)...(19): siRNA sense strand
uacgucuguugcuagauua

SEQ ID NO: 1411593 - RNA, 19 nt, Homo sapiens
  misc_RNA (1)...(19): siRNA sense strand
ggagucaugacacuaaguc

SEQ ID NO: 1411594 - RNA, 19 nt, Homo sapiens
  misc_RNA (1)...(19): siRNA sense strand
cauggaaucaucaaggaau

SEQ ID NO: 1411595 - RNA, 19 nt, Homo sapiens
  misc_RNA (1)...(19): siRNA sense strand
cgaaagaauggugucaaug

SEQ ID NO: 1411596 - RNA, 19 nt, Homo sapiens
  misc_RNA (1)...(19): siRNA sense strand
gcaacaccaagugcaaaga

SEQ ID NO: 1411597 - RNA, 19 nt, Homo sapiens
  misc_RNA (1)...(19): siRNA sense strand
caacaccaagugcaaagag

SEQ ID NO: 1411598 - RNA, 19 nt, Homo sapiens
  misc_RNA (1)...(19): siRNA sense strand
gagaaaauucagacuauca

SEQ ID NO: 1411599 - RNA, 19 nt, Homo sapiens
  misc_RNA (1)...(19): siRNA sense strand
aagaagcguaugacacauu

SEQ ID NO: 1411600 - RNA, 19 nt, Homo sapiens
  misc_RNA (1)...(19): siRNA sense strand
caagacacagcagaacaga

SEQ ID NO: 1411601 - RNA, 19 nt, Homo sapiens
  misc_RNA (1)...(19): siRNA sense strand
ccuccuaccucugguucuu

SEQ ID NO: 1411602 - RNA, 19 nt, Homo sapiens
  misc_RNA (1)...(19): siRNA sense strand
caacuucauggaaagaaag

SEQ ID NO: 1411603 - RNA, 19 nt, Homo sapiens
  misc_RNA (1)...(19): siRNA sense strand
gcuagauuaucguccaaaa

SEQ ID NO: 1411604 - RNA, 19 nt, Homo sapiens
  misc_RNA (1)...(19): siRNA sense strand
uggcaucaacuucauggaa

SEQ ID NO: 1411605 - RNA, 19 nt, Homo sapiens
  misc_RNA (1)...(19): siRNA sense strand
cagcaacaccaagugcaaa

SEQ ID NO: 1411606 - RNA, 19 nt, Homo sapiens
  misc_RNA (1)...(19): siRNA sense strand
ucaacugcuucguaauugg

SEQ ID NO: 1411607 - RNA, 19 nt, Homo sapiens
  misc_RNA (1)...(19): siRNA sense strand
caaugaagccaaaauagau

SEQ ID NO: 1411608 - RNA, 19 nt, Homo sapiens
  misc_RNA (1)...(19): siRNA sense strand
uuaaugcccaagugacuga

SEQ ID NO: 1411609 - RNA, 19 nt, Homo sapiens
  misc_RNA (1)...(19): siRNA sense strand
ggaaggccugcaucaugau

SEQ ID NO: 1411610 - RNA, 19 nt, Homo sapiens
  misc_RNA (1)...(19): siRNA sense strand
cauuacuagugacucagaa

SEQ ID NO: 1411611 - RNA, 19 nt, Homo sapiens
  misc_RNA (1)...(19): siRNA sense strand
uucaacugcuucguaauug

SEQ ID NO: 1411612 - RNA, 19 nt, Homo sapiens
  misc_RNA (1)...(19): siRNA sense strand
aaugcacacucaccagcaa

SEQ ID NO: 1411613 - RNA, 19 nt, Homo sapiens
  misc_RNA (1)...(19): siRNA sense strand
ucagaaaugaaauccaaag

SEQ ID NO: 1411614 - RNA, 19 nt, Homo sapiens
  misc_RNA (1)...(19): siRNA sense strand
ccagcaacaccaagugcaa

SEQ ID NO: 1411615 - RNA, 19 nt, Homo sapiens
  misc_RNA (1)...(19): siRNA sense strand
gaaaugaaauccaaagcuu

SEQ ID NO: 1411616 - RNA, 19 nt, Homo sapiens
  misc_RNA (1)...(19): siRNA sense strand
gaaagaauggugucaauga

SEQ ID NO: 1411617 - RNA, 19 nt, Homo sapiens
  misc_RNA (1)...(19): siRNA sense strand
uagaugagaucaagaauga

SEQ ID NO: 1411618 - RNA, 19 nt, Homo sapiens
  misc_RNA (1)...(19): siRNA sense strand
gaaagaagcguaugacaca

SEQ ID NO: 1411619 - RNA, 19 nt, Homo sapiens
  misc_RNA (1)...(19): siRNA sense strand
ucaaggacauuacuaguga

SEQ ID NO: 1411620 - RNA, 19 nt, Homo sapiens
  misc_RNA (1)...(19): siRNA sense strand
gaauugaggaagacuguua

SEQ ID NO: 1411621 - RNA, 19 nt, Homo sapiens
  misc_RNA (1)...(19): siRNA sense strand
gaaagaaagaagcguauga

SEQ ID NO: 1411622 - RNA, 19 nt, Homo sapiens
  misc_RNA (1)...(19): siRNA sense strand
ggacauuacuagugacuca

SEQ ID NO: 1411623 - RNA, 19 nt, Homo sapiens
  misc_RNA (1)...(19): siRNA sense strand
gacacuaagucaaguuaaa

SEQ ID NO: 1411624 - RNA, 19 nt, Homo sapiens
  misc_RNA (1)...(19): siRNA sense strand
gaggaagacuguuacuaca

SEQ ID NO: 1411625 - RNA, 19 nt, Homo sapiens
  misc_RNA (1)...(19): siRNA sense strand
ggcaucaacuucauggaaa

SEQ ID NO: 1411626 - RNA, 19 nt, Homo sapiens
  misc_RNA (1)...(19): siRNA sense strand
ggauuggaauugaggaaga

SEQ ID NO: 1411627 - RNA, 19 nt, Homo sapiens
  misc_RNA (1)...(19): siRNA sense strand
aaagaauggugucaaugaa

SEQ ID NO: 1411628 - RNA, 19 nt, Homo sapiens
  misc_RNA (1)...(19): siRNA sense strand
ugacugacaucaacuccaa

SEQ ID NO: 1411629 - RNA, 19 nt, Homo sapiens
  misc_RNA (1)...(19): siRNA sense strand
gcguaugacacauugauua

SEQ ID NO: 1411630 - RNA, 19 nt, Homo sapiens
  misc_RNA (1)...(19): siRNA sense strand
uggaaggccugcaucauga

SEQ ID NO: 1411631 - RNA, 19 nt, Homo sapiens
  misc_RNA (1)...(19): siRNA sense strand
agacacagcagaacagaaa

SEQ ID NO: 1411632 - RNA, 19 nt, Homo sapiens
  misc_RNA (1)...(19): siRNA sense strand
ccaagugacugacaucaac

SEQ ID NO: 1411633 - RNA, 19 nt, Homo sapiens
  misc_RNA (1)...(19): siRNA sense strand
guaauuggcaucaacuuca

SEQ ID NO: 1411634 - RNA, 19 nt, Homo sapiens
  misc_RNA (1)...(19): siRNA sense strand
uuacgucuguugcuagauu

SEQ ID NO: 1411635 - RNA, 19 nt, Homo sapiens
  misc_RNA (1)...(19): siRNA sense strand
guucaacugcuucguaauu

SEQ ID NO: 1411636 - RNA, 19 nt, Homo sapiens
  misc_RNA (1)...(19): siRNA sense strand
caaaauagaugagaucaag

SEQ ID NO: 1411637 - RNA, 19 nt, Homo sapiens
  misc_RNA (1)...(19): siRNA sense strand
guucuuacgucuguugcua

SEQ ID NO: 1411638 - RNA, 19 nt, Homo sapiens
  misc_RNA (1)...(19): siRNA sense strand
ucaacuucauggaaagaaa

SEQ ID NO: 1411639 - RNA, 19 nt, Homo sapiens
  misc_RNA (1)...(19): siRNA sense strand
agaagcguaugacacauug

SEQ ID NO: 1411640 - RNA, 19 nt, Homo sapiens
  misc_RNA (1)...(19): siRNA sense strand
gcuggagucaugacacuaa

SEQ ID NO: 1411641 - RNA, 19 nt, Homo sapiens
  misc_RNA (1)...(19): siRNA sense strand
gaugagaucaagaaugaca

SEQ ID NO: 1411642 - RNA, 19 nt, Homo sapiens
  misc_RNA (1)...(19): siRNA sense strand
ucgaaagaauggugucaau

SEQ ID NO: 1411643 - RNA, 19 nt, Homo sapiens
  misc_RNA (1)...(19): siRNA sense strand
cguaugacacauugauuaa

SEQ ID NO: 1411644 - RNA, 19 nt, Homo sapiens
  misc_RNA (1)...(19): siRNA sense strand
cagagaaaauucagacuau

SEQ ID NO: 1411645 - RNA, 19 nt, Homo sapiens
  misc_RNA (1)...(19): siRNA sense strand
gcaucaacuucauggaaag

SEQ ID NO: 1411646 - RNA, 19 nt, Homo sapiens
  misc_RNA (1)...(19): siRNA sense strand
ugaggaagacuguuacuac

SEQ ID NO: 1411647 - RNA, 19 nt, Homo sapiens
  misc_RNA (1)...(19): siRNA sense strand
ggaaagaaagaagcguaug

SEQ ID NO: 1411648 - RNA, 19 nt, Homo sapiens
  misc_RNA (1)...(19): siRNA sense strand
cacuauugcuggagucaug

SEQ ID NO: 1411649 - RNA, 19 nt, Homo sapiens
  misc_RNA (1)...(19): siRNA sense strand
gcagagaaaauucagacua

SEQ ID NO: 1411650 - RNA, 19 nt, Homo sapiens
  misc_RNA (1)...(19): siRNA sense strand
ggccaauucugccauaagc

SEQ ID NO: 1411651 - RNA, 19 nt, Homo sapiens
  misc_RNA (1)...(19): siRNA sense strand
uaauuggcaucaacuucau

SEQ ID NO: 1411652 - RNA, 19 nt, Homo sapiens
  misc_RNA (1)...(19): siRNA sense strand
aacauggaaucaucaagga

SEQ ID NO: 1411653 - RNA, 19 nt, Homo sapiens
  misc_RNA (1)...(19): siRNA sense strand
caucaacuccaagggauug

SEQ ID NO: 1411654 - RNA, 19 nt, Homo sapiens
  misc_RNA (1)...(19): siRNA sense strand
uacgucuguugcuagauua

SEQ ID NO: 1411655 - RNA, 19 nt, Homo sapiens
  misc_RNA (1)...(19): siRNA sense strand
ggagucaugacacuaaguc

SEQ ID NO: 1411656 - RNA, 19 nt, Homo sapiens
  misc_RNA (1)...(19): siRNA sense strand
cauggaaucaucaaggaau

SEQ ID NO: 1411657 - RNA, 19 nt, Homo sapiens
  misc_RNA (1)...(19): siRNA sense strand
cgaaagaauggugucaaug

SEQ ID NO: 1411658 - RNA, 19 nt, Homo sapiens
  misc_RNA (1)...(19): siRNA sense strand
gcaacaccaagugcaaaga

SEQ ID NO: 1411659 - RNA, 19 nt, Homo sapiens
  misc_RNA (1)...(19): siRNA sense strand
caacaccaagugcaaagag

SEQ ID NO: 1411660 - RNA, 19 nt, Homo sapiens
  misc_RNA (1)...(19): siRNA sense strand
gagaaaauucagacuauca

SEQ ID NO: 1411661 - RNA, 19 nt, Homo sapiens
  misc_RNA (1)...(19): siRNA sense strand
aagaagcguaugacacauu

SEQ ID NO: 1411662 - RNA, 19 nt, Homo sapiens
  misc_RNA (1)...(19): siRNA sense strand
caagacacagcagaacaga

SEQ ID NO: 1411663 - RNA, 19 nt, Homo sapiens
  misc_RNA (1)...(19): siRNA sense strand
ccuccuaccucugguucuu

SEQ ID NO: 1411664 - RNA, 19 nt, Homo sapiens
  misc_RNA (1)...(19): siRNA sense strand
caacuucauggaaagaaag

SEQ ID NO: 1411665 - RNA, 19 nt, Homo sapiens
  misc_RNA (1)...(19): siRNA sense strand
gcuagauuaucguccaaaa

SEQ ID NO: 1411666 - RNA, 19 nt, Homo sapiens
  misc_RNA (1)...(19): siRNA sense strand
uggcaucaacuucauggaa

SEQ ID NO: 1411667 - RNA, 19 nt, Homo sapiens
  misc_RNA (1)...(19): siRNA sense strand
cagcaacaccaagugcaaa

SEQ ID NO: 1411668 - RNA, 19 nt, Homo sapiens
  misc_RNA (1)...(19): siRNA sense strand
ucaacugcuucguaauugg

SEQ ID NO: 1411669 - RNA, 19 nt, Homo sapiens
  misc_RNA (1)...(19): siRNA sense strand
caaugaagccaaaauagau

SEQ ID NO: 1411670 - RNA, 19 nt, Homo sapiens
  misc_RNA (1)...(19): siRNA sense strand
uuaaugcccaagugacuga

SEQ ID NO: 1411671 - RNA, 19 nt, Homo sapiens
  misc_RNA (1)...(19): siRNA sense strand
ggaaggccugcaucaugau

SEQ ID NO: 1411672 - RNA, 19 nt, Homo sapiens
  misc_RNA (1)...(19): siRNA sense strand
cauuacuagugacucagaa

SEQ ID NO: 1411673 - RNA, 19 nt, Homo sapiens
  misc_RNA (1)...(19): siRNA sense strand
uucaacugcuucguaauug

SEQ ID NO: 1411674 - RNA, 19 nt, Homo sapiens
  misc_RNA (1)...(19): siRNA sense strand
aaugcacacucaccagcaa

SEQ ID NO: 1411675 - RNA, 19 nt, Homo sapiens
  misc_RNA (1)...(19): siRNA sense strand
ucagaaaugaaauccaaag

SEQ ID NO: 1411676 - RNA, 19 nt, Homo sapiens
  misc_RNA (1)...(19): siRNA sense strand
ccagcaacaccaagugcaa

SEQ ID NO: 1411677 - RNA, 19 nt, Homo sapiens
  misc_RNA (1)...(19): siRNA sense strand
gaauugaggaagacuguua

SEQ ID NO: 1411678 - RNA, 19 nt, Homo sapiens
  misc_RNA (1)...(19): siRNA sense strand
gaggaagacuguuacuaca

SEQ ID NO: 1411679 - RNA, 19 nt, Homo sapiens
  misc_RNA (1)...(19): siRNA sense strand
ggauuggaauugaggaaga

SEQ ID NO: 1411680 - RNA, 19 nt, Homo sapiens
  misc_RNA (1)...(19): siRNA sense strand
ugacugacaucaacuccaa

SEQ ID NO: 1411681 - RNA, 19 nt, Homo sapiens
  misc_RNA (1)...(19): siRNA sense strand
uggaaggccugcaucauga

SEQ ID NO: 1411682 - RNA, 19 nt, Homo sapiens
  misc_RNA (1)...(19): siRNA sense strand
uuacgucuguugcuagauu

SEQ ID NO: 1411683 - RNA, 19 nt, Homo sapiens
  misc_RNA (1)...(19): siRNA sense strand
ccaagugacugacaucaac

SEQ ID NO: 1411684 - RNA, 19 nt, Homo sapiens
  misc_RNA (1)...(19): siRNA sense strand
guucuuacgucuguugcua

SEQ ID NO: 1411685 - RNA, 19 nt, Homo sapiens
  misc_RNA (1)...(19): siRNA sense strand
ugaggaagacuguuacuac

SEQ ID NO: 1411686 - RNA, 19 nt, Homo sapiens
  misc_RNA (1)...(19): siRNA sense strand
ggccaauucugccauaagc

SEQ ID NO: 1411687 - RNA, 19 nt, Homo sapiens
  misc_RNA (1)...(19): siRNA sense strand
aacauggaaucaucaagga

SEQ ID NO: 1411688 - RNA, 19 nt, Homo sapiens
  misc_RNA (1)...(19): siRNA sense strand
uacgucuguugcuagauua

SEQ ID NO: 1411689 - RNA, 19 nt, Homo sapiens
  misc_RNA (1)...(19): siRNA sense strand
caucaacuccaagggauug

SEQ ID NO: 1411690 - RNA, 19 nt, Homo sapiens
  misc_RNA (1)...(19): siRNA sense strand
cauggaaucaucaaggaau

SEQ ID NO: 1411691 - RNA, 19 nt, Homo sapiens
  misc_RNA (1)...(19): siRNA sense strand
gcaacaccaagugcaaaga

SEQ ID NO: 1411692 - RNA, 19 nt, Homo sapiens
  misc_RNA (1)...(19): siRNA sense strand
caacaccaagugcaaagag

SEQ ID NO: 1411693 - RNA, 19 nt, Homo sapiens
  misc_RNA (1)...(19): siRNA sense strand
gcuagauuaucguccaaaa

SEQ ID NO: 1411694 - RNA, 19 nt, Homo sapiens
  misc_RNA (1)...(19): siRNA sense strand
ccuccuaccucugguucuu

SEQ ID NO: 1411695 - RNA, 19 nt, Homo sapiens
  misc_RNA (1)...(19): siRNA sense strand
cagcaacaccaagugcaaa

SEQ ID NO: 1411696 - RNA, 19 nt, Homo sapiens
  misc_RNA (1)...(19): siRNA sense strand
uuaaugcccaagugacuga

SEQ ID NO: 1411697 - RNA, 19 nt, Homo sapiens
  misc_RNA (1)...(19): siRNA sense strand
ggaaggccugcaucaugau

SEQ ID NO: 1411698 - RNA, 19 nt, Homo sapiens
  misc_RNA (1)...(19): siRNA sense strand
aaugcacacucaccagcaa

SEQ ID NO: 1411699 - RNA, 19 nt, Homo sapiens
  misc_RNA (1)...(19): siRNA sense strand
ccagcaacaccaagugcaa

SEQ ID NO: 1411700 - RNA, 19 nt, Homo sapiens
  misc_RNA (1)...(19): siRNA sense strand
gaauugaggaagacuguua

SEQ ID NO: 1411701 - RNA, 19 nt, Homo sapiens
  misc_RNA (1)...(19): siRNA sense strand
gaggaagacuguuacuaca

SEQ ID NO: 1411702 - RNA, 19 nt, Homo sapiens
  misc_RNA (1)...(19): siRNA sense strand
ggauuggaauugaggaaga

SEQ ID NO: 1411703 - RNA, 19 nt, Homo sapiens
  misc_RNA (1)...(19): siRNA sense strand
ugacugacaucaacuccaa

SEQ ID NO: 1411704 - RNA, 19 nt, Homo sapiens
  misc_RNA (1)...(19): siRNA sense strand
uggaaggccugcaucauga

SEQ ID NO: 1411705 - RNA, 19 nt, Homo sapiens
  misc_RNA (1)...(19): siRNA sense strand
uuacgucuguugcuagauu

SEQ ID NO: 1411706 - RNA, 19 nt, Homo sapiens
  misc_RNA (1)...(19): siRNA sense strand
ccaagugacugacaucaac

SEQ ID NO: 1411707 - RNA, 19 nt, Homo sapiens
  misc_RNA (1)...(19): siRNA sense strand
guucuuacgucuguugcua

SEQ ID NO: 1411708 - RNA, 19 nt, Homo sapiens
  misc_RNA (1)...(19): siRNA sense strand
ugaggaagacuguuacuac

SEQ ID NO: 1411709 - RNA, 19 nt, Homo sapiens
  misc_RNA (1)...(19): siRNA sense strand
ggccaauucugccauaagc

SEQ ID NO: 1411710 - RNA, 19 nt, Homo sapiens
  misc_RNA (1)...(19): siRNA sense strand
aacauggaaucaucaagga

SEQ ID NO: 1411711 - RNA, 19 nt, Homo sapiens
  misc_RNA (1)...(19): siRNA sense strand
uacgucuguugcuagauua

SEQ ID NO: 1411712 - RNA, 19 nt, Homo sapiens
  misc_RNA (1)...(19): siRNA sense strand
caucaacuccaagggauug

SEQ ID NO: 1411713 - RNA, 19 nt, Homo sapiens
  misc_RNA (1)...(19): siRNA sense strand
cauggaaucaucaaggaau

SEQ ID NO: 1411714 - RNA, 19 nt, Homo sapiens
  misc_RNA (1)...(19): siRNA sense strand
gcaacaccaagugcaaaga

SEQ ID NO: 1411715 - RNA, 19 nt, Homo sapiens
  misc_RNA (1)...(19): siRNA sense strand
caacaccaagugcaaagag

SEQ ID NO: 1411716 - RNA, 19 nt, Homo sapiens
  misc_RNA (1)...(19): siRNA sense strand
gcuagauuaucguccaaaa

SEQ ID NO: 1411717 - RNA, 19 nt, Homo sapiens
  misc_RNA (1)...(19): siRNA sense strand
ccuccuaccucugguucuu

SEQ ID NO: 1411718 - RNA, 19 nt, Homo sapiens
  misc_RNA (1)...(19): siRNA sense strand
cagcaacaccaagugcaaa

SEQ ID NO: 1411719 - RNA, 19 nt, Homo sapiens
  misc_RNA (1)...(19): siRNA sense strand
uuaaugcccaagugacuga

SEQ ID NO: 1411720 - RNA, 19 nt, Homo sapiens
  misc_RNA (1)...(19): siRNA sense strand
ggaaggccugcaucaugau

SEQ ID NO: 1411721 - RNA, 19 nt, Homo sapiens
  misc_RNA (1)...(19): siRNA sense strand
aaugcacacucaccagcaa

SEQ ID NO: 1411722 - RNA, 19 nt, Homo sapiens
  misc_RNA (1)...(19): siRNA sense strand
ccagcaacaccaagugcaa

SEQ ID NO: 1411723 - RNA, 19 nt, Homo sapiens
  misc_RNA (1)...(19): siRNA sense strand
gaauugaggaagacuguua

SEQ ID NO: 1411724 - RNA, 19 nt, Homo sapiens
  misc_RNA (1)...(19): siRNA sense strand
gaggaagacuguuacuaca

SEQ ID NO: 1411725 - RNA, 19 nt, Homo sapiens
  misc_RNA (1)...(19): siRNA sense strand
ggauuggaauugaggaaga

SEQ ID NO: 1411726 - RNA, 19 nt, Homo sapiens
  misc_RNA (1)...(19): siRNA sense strand
ugacugacaucaacuccaa

SEQ ID NO: 1411727 - RNA, 19 nt, Homo sapiens
  misc_RNA (1)...(19): siRNA sense strand
uggaaggccugcaucauga

SEQ ID NO: 1411728 - RNA, 19 nt, Homo sapiens
  misc_RNA (1)...(19): siRNA sense strand
uuacgucuguugcuagauu

SEQ ID NO: 1411729 - RNA, 19 nt, Homo sapiens
  misc_RNA (1)...(19): siRNA sense strand
ccaagugacugacaucaac

SEQ ID NO: 1411730 - RNA, 19 nt, Homo sapiens
  misc_RNA (1)...(19): siRNA sense strand
guucuuacgucuguugcua

SEQ ID NO: 1411731 - RNA, 19 nt, Homo sapiens
  misc_RNA (1)...(19): siRNA sense strand
ugaggaagacuguuacuac

SEQ ID NO: 1411732 - RNA, 19 nt, Homo sapiens
  misc_RNA (1)...(19): siRNA sense strand
ggccaauucugccauaagc

SEQ ID NO: 1411733 - RNA, 19 nt, Homo sapiens
  misc_RNA (1)...(19): siRNA sense strand
aacauggaaucaucaagga

SEQ ID NO: 1411734 - RNA, 19 nt, Homo sapiens
  misc_RNA (1)...(19): siRNA sense strand
uacgucuguugcuagauua

SEQ ID NO: 1411735 - RNA, 19 nt, Homo sapiens
  misc_RNA (1)...(19): siRNA sense strand
caucaacuccaagggauug

SEQ ID NO: 1411736 - RNA, 19 nt, Homo sapiens
  misc_RNA (1)...(19): siRNA sense strand
cauggaaucaucaaggaau

SEQ ID NO: 1411737 - RNA, 19 nt, Homo sapiens
  misc_RNA (1)...(19): siRNA sense strand
gcaacaccaagugcaaaga

SEQ ID NO: 1411738 - RNA, 19 nt, Homo sapiens
  misc_RNA (1)...(19): siRNA sense strand
caacaccaagugcaaagag

SEQ ID NO: 1411739 - RNA, 19 nt, Homo sapiens
  misc_RNA (1)...(19): siRNA sense strand
gcuagauuaucguccaaaa

SEQ ID NO: 1411740 - RNA, 19 nt, Homo sapiens
  misc_RNA (1)...(19): siRNA sense strand
ccuccuaccucugguucuu

SEQ ID NO: 1411741 - RNA, 19 nt, Homo sapiens
  misc_RNA (1)...(19): siRNA sense strand
cagcaacaccaagugcaaa

SEQ ID NO: 1411742 - RNA, 19 nt, Homo sapiens
  misc_RNA (1)...(19): siRNA sense strand
uuaaugcccaagugacuga

SEQ ID NO: 1411743 - RNA, 19 nt, Homo sapiens
  misc_RNA (1)...(19): siRNA sense strand
ggaaggccugcaucaugau

SEQ ID NO: 1411744 - RNA, 19 nt, Homo sapiens
  misc_RNA (1)...(19): siRNA sense strand
aaugcacacucaccagcaa

SEQ ID NO: 1411745 - RNA, 19 nt, Homo sapiens
  misc_RNA (1)...(19): siRNA sense strand
ccagcaacaccaagugcaa

SEQ ID NO: 1411746 - RNA, 19 nt, Homo sapiens
  misc_RNA (1)...(19): siRNA sense strand
gaauugaggaagacuguua

SEQ ID NO: 1411747 - RNA, 19 nt, Homo sapiens
  misc_RNA (1)...(19): siRNA sense strand
gaggaagacuguuacuaca

SEQ ID NO: 1411748 - RNA, 19 nt, Homo sapiens
  misc_RNA (1)...(19): siRNA sense strand
ggauuggaauugaggaaga

SEQ ID NO: 1411749 - RNA, 19 nt, Homo sapiens
  misc_RNA (1)...(19): siRNA sense strand
ugacugacaucaacuccaa

SEQ ID NO: 1411750 - RNA, 19 nt, Homo sapiens
  misc_RNA (1)...(19): siRNA sense strand
uggaaggccugcaucauga

SEQ ID NO: 1411751 - RNA, 19 nt, Homo sapiens
  misc_RNA (1)...(19): siRNA sense strand
uuacgucuguugcuagauu

SEQ ID NO: 1411752 - RNA, 19 nt, Homo sapiens
  misc_RNA (1)...(19): siRNA sense strand
ccaagugacugacaucaac

SEQ ID NO: 1411753 - RNA, 19 nt, Homo sapiens
  misc_RNA (1)...(19): siRNA sense strand
guucuuacgucuguugcua

SEQ ID NO: 1411754 - RNA, 19 nt, Homo sapiens
  misc_RNA (1)...(19): siRNA sense strand
ugaggaagacuguuacuac

SEQ ID NO: 1411755 - RNA, 19 nt, Homo sapiens
  misc_RNA (1)...(19): siRNA sense strand
ggccaauucugccauaagc

SEQ ID NO: 1411756 - RNA, 19 nt, Homo sapiens
  misc_RNA (1)...(19): siRNA sense strand
aacauggaaucaucaagga

SEQ ID NO: 1411757 - RNA, 19 nt, Homo sapiens
  misc_RNA (1)...(19): siRNA sense strand
uacgucuguugcuagauua

SEQ ID NO: 1411758 - RNA, 19 nt, Homo sapiens
  misc_RNA (1)...(19): siRNA sense strand
caucaacuccaagggauug

SEQ ID NO: 1411759 - RNA, 19 nt, Homo sapiens
  misc_RNA (1)...(19): siRNA sense strand
cauggaaucaucaaggaau

SEQ ID NO: 1411760 - RNA, 19 nt, Homo sapiens
  misc_RNA (1)...(19): siRNA sense strand
gcaacaccaagugcaaaga

SEQ ID NO: 1411761 - RNA, 19 nt, Homo sapiens
  misc_RNA (1)...(19): siRNA sense strand
caacaccaagugcaaagag

SEQ ID NO: 1411762 - RNA, 19 nt, Homo sapiens
  misc_RNA (1)...(19): siRNA sense strand
gcuagauuaucguccaaaa

SEQ ID NO: 1411763 - RNA, 19 nt, Homo sapiens
  misc_RNA (1)...(19): siRNA sense strand
ccuccuaccucugguucuu

SEQ ID NO: 1411764 - RNA, 19 nt, Homo sapiens
  misc_RNA (1)...(19): siRNA sense strand
cagcaacaccaagugcaaa

SEQ ID NO: 1411765 - RNA, 19 nt, Homo sapiens
  misc_RNA (1)...(19): siRNA sense strand
uuaaugcccaagugacuga

SEQ ID NO: 1411766 - RNA, 19 nt, Homo sapiens
  misc_RNA (1)...(19): siRNA sense strand
ggaaggccugcaucaugau

SEQ ID NO: 1411767 - RNA, 19 nt, Homo sapiens
  misc_RNA (1)...(19): siRNA sense strand
aaugcacacucaccagcaa

SEQ ID NO: 1411768 - RNA, 19 nt, Homo sapiens
  misc_RNA (1)...(19): siRNA sense strand
ccagcaacaccaagugcaa

SEQ ID NO: 1411769 - RNA, 19 nt, Homo sapiens
  misc_RNA (1)...(19): siRNA sense strand
gaauugaggaagacuguua

SEQ ID NO: 1411770 - RNA, 19 nt, Homo sapiens
  misc_RNA (1)...(19): siRNA sense strand
gaggaagacuguuacuaca

SEQ ID NO: 1411771 - RNA, 19 nt, Homo sapiens
  misc_RNA (1)...(19): siRNA sense strand
ggauuggaauugaggaaga

SEQ ID NO: 1411772 - RNA, 19 nt, Homo sapiens
  misc_RNA (1)...(19): siRNA sense strand
ugacugacaucaacuccaa

SEQ ID NO: 1411773 - RNA, 19 nt, Homo sapiens
  misc_RNA (1)...(19): siRNA sense strand
uggaaggccugcaucauga

SEQ ID NO: 1411774 - RNA, 19 nt, Homo sapiens
  misc_RNA (1)...(19): siRNA sense strand
uuacgucuguugcuagauu

SEQ ID NO: 1411775 - RNA, 19 nt, Homo sapiens
  misc_RNA (1)...(19): siRNA sense strand
ccaagugacugacaucaac

SEQ ID NO: 1411776 - RNA, 19 nt, Homo sapiens
  misc_RNA (1)...(19): siRNA sense strand
guucuuacgucuguugcua

SEQ ID NO: 1411777 - RNA, 19 nt, Homo sapiens
  misc_RNA (1)...(19): siRNA sense strand
ugaggaagacuguuacuac

SEQ ID NO: 1411778 - RNA, 19 nt, Homo sapiens
  misc_RNA (1)...(19): siRNA sense strand
ggccaauucugccauaagc

SEQ ID NO: 1411779 - RNA, 19 nt, Homo sapiens
  misc_RNA (1)...(19): siRNA sense strand
aacauggaaucaucaagga

SEQ ID NO: 1411780 - RNA, 19 nt, Homo sapiens
  misc_RNA (1)...(19): siRNA sense strand
uacgucuguugcuagauua

SEQ ID NO: 1411781 - RNA, 19 nt, Homo sapiens
  misc_RNA (1)...(19): siRNA sense strand
caucaacuccaagggauug

SEQ ID NO: 1411782 - RNA, 19 nt, Homo sapiens
  misc_RNA (1)...(19): siRNA sense strand
cauggaaucaucaaggaau

SEQ ID NO: 1411783 - RNA, 19 nt, Homo sapiens
  misc_RNA (1)...(19): siRNA sense strand
gcaacaccaagugcaaaga

SEQ ID NO: 1411784 - RNA, 19 nt, Homo sapiens
  misc_RNA (1)...(19): siRNA sense strand
caacaccaagugcaaagag

SEQ ID NO: 1411785 - RNA, 19 nt, Homo sapiens
  misc_RNA (1)...(19): siRNA sense strand
gcuagauuaucguccaaaa

SEQ ID NO: 1411786 - RNA, 19 nt, Homo sapiens
  misc_RNA (1)...(19): siRNA sense strand
ccuccuaccucugguucuu

SEQ ID NO: 1411787 - RNA, 19 nt, Homo sapiens
  misc_RNA (1)...(19): siRNA sense strand
cagcaacaccaagugcaaa

SEQ ID NO: 1411788 - RNA, 19 nt, Homo sapiens
  misc_RNA (1)...(19): siRNA sense strand
uuaaugcccaagugacuga

SEQ ID NO: 1411789 - RNA, 19 nt, Homo sapiens
  misc_RNA (1)...(19): siRNA sense strand
ggaaggccugcaucaugau

SEQ ID NO: 1411790 - RNA, 19 nt, Homo sapiens
  misc_RNA (1)...(19): siRNA sense strand
aaugcacacucaccagcaa

SEQ ID NO: 1411791 - RNA, 19 nt, Homo sapiens
  misc_RNA (1)...(19): siRNA sense strand
ccagcaacaccaagugcaa

SEQ ID NO: 1411792 - RNA, 19 nt, Homo sapiens
  misc_RNA (1)...(19): siRNA sense strand
gaauugaggaagacuguua

SEQ ID NO: 1411793 - RNA, 19 nt, Homo sapiens
  misc_RNA (1)...(19): siRNA sense strand
gaggaagacuguuacuaca

SEQ ID NO: 1411794 - RNA, 19 nt, Homo sapiens
  misc_RNA (1)...(19): siRNA sense strand
ggauuggaauugaggaaga

SEQ ID NO: 1411795 - RNA, 19 nt, Homo sapiens
  misc_RNA (1)...(19): siRNA sense strand
ugacugacaucaacuccaa

SEQ ID NO: 1411796 - RNA, 19 nt, Homo sapiens
  misc_RNA (1)...(19): siRNA sense strand
uggaaggccugcaucauga

SEQ ID NO: 1411797 - RNA, 19 nt, Homo sapiens
  misc_RNA (1)...(19): siRNA sense strand
uuacgucuguugcuagauu

SEQ ID NO: 1411798 - RNA, 19 nt, Homo sapiens
  misc_RNA (1)...(19): siRNA sense strand
ccaagugacugacaucaac

SEQ ID NO: 1411799 - RNA, 19 nt, Homo sapiens
  misc_RNA (1)...(19): siRNA sense strand
guucuuacgucuguugcua

SEQ ID NO: 1411800 - RNA, 19 nt, Homo sapiens
  misc_RNA (1)...(19): siRNA sense strand
ugaggaagacuguuacuac

SEQ ID NO: 1411801 - RNA, 19 nt, Homo sapiens
  misc_RNA (1)...(19): siRNA sense strand
ggccaauucugccauaagc

SEQ ID NO: 1411802 - RNA, 19 nt, Homo sapiens
  misc_RNA (1)...(19): siRNA sense strand
aacauggaaucaucaagga

SEQ ID NO: 1411803 - RNA, 19 nt, Homo sapiens
  misc_RNA (1)...(19): siRNA sense strand
uacgucuguugcuagauua

SEQ ID NO: 1411804 - RNA, 19 nt, Homo sapiens
  misc_RNA (1)...(19): siRNA sense strand
caucaacuccaagggauug

SEQ ID NO: 1411805 - RNA, 19 nt, Homo sapiens
  misc_RNA (1)...(19): siRNA sense strand
cauggaaucaucaaggaau

SEQ ID NO: 1411806 - RNA, 19 nt, Homo sapiens
  misc_RNA (1)...(19): siRNA sense strand
gcaacaccaagugcaaaga

SEQ ID NO: 1411807 - RNA, 19 nt, Homo sapiens
  misc_RNA (1)...(19): siRNA sense strand
caacaccaagugcaaagag

SEQ ID NO: 1411808 - RNA, 19 nt, Homo sapiens
  misc_RNA (1)...(19): siRNA sense strand
gcuagauuaucguccaaaa

SEQ ID NO: 1411809 - RNA, 19 nt, Homo sapiens
  misc_RNA (1)...(19): siRNA sense strand
ccuccuaccucugguucuu

SEQ ID NO: 1411810 - RNA, 19 nt, Homo sapiens
  misc_RNA (1)...(19): siRNA sense strand
cagcaacaccaagugcaaa

SEQ ID NO: 1411811 - RNA, 19 nt, Homo sapiens
  misc_RNA (1)...(19): siRNA sense strand
uuaaugcccaagugacuga

SEQ ID NO: 1411812 - RNA, 19 nt, Homo sapiens
  misc_RNA (1)...(19): siRNA sense strand
ggaaggccugcaucaugau

SEQ ID NO: 1411813 - RNA, 19 nt, Homo sapiens
  misc_RNA (1)...(19): siRNA sense strand
aaugcacacucaccagcaa

SEQ ID NO: 1411814 - RNA, 19 nt, Homo sapiens
  misc_RNA (1)...(19): siRNA sense strand
ccagcaacaccaagugcaa

SEQ ID NO: 1411815 - RNA, 19 nt, Homo sapiens
  misc_RNA (1)...(19): siRNA sense strand
ggaagcaggagaucauuaa

SEQ ID NO: 1411816 - RNA, 19 nt, Homo sapiens
  misc_RNA (1)...(19): siRNA sense strand
caacaacggugacuuugag

SEQ ID NO: 1411817 - RNA, 19 nt, Homo sapiens
  misc_RNA (1)...(19): siRNA sense strand
cagcaggcaugguuugguu

SEQ ID NO: 1411818 - RNA, 19 nt, Homo sapiens
  misc_RNA (1)...(19): siRNA sense strand
gcacgucauuggagaggau

SEQ ID NO: 1411819 - RNA, 19 nt, Homo sapiens
  misc_RNA (1)...(19): siRNA sense strand
cagugaagcuggcagacuu

SEQ ID NO: 1411820 - RNA, 19 nt, Homo sapiens
  misc_RNA (1)...(19): siRNA sense strand
ccaagaucaucaacaccaa

SEQ ID NO: 1411821 - RNA, 19 nt, Homo sapiens
  misc_RNA (1)...(19): siRNA sense strand
gcaagccuguggacaucug

SEQ ID NO: 1411822 - RNA, 19 nt, Homo sapiens
  misc_RNA (1)...(19): siRNA sense strand
caaaggggcugcagugaag

SEQ ID NO: 1411823 - RNA, 19 nt, Homo sapiens
  misc_RNA (1)...(19): siRNA sense strand
uaccagcucuacgaggaua

SEQ ID NO: 1411824 - RNA, 19 nt, Homo sapiens
  misc_RNA (1)...(19): siRNA sense strand
agaaccugcuggccaagaa

SEQ ID NO: 1411825 - RNA, 19 nt, Homo sapiens
  misc_RNA (1)...(19): siRNA sense strand
gaucaucaacaccaagaag

SEQ ID NO: 1411826 - RNA, 19 nt, Homo sapiens
  misc_RNA (1)...(19): siRNA sense strand
cggaagcaggagaucauua

SEQ ID NO: 1411827 - RNA, 19 nt, Homo sapiens
  misc_RNA (1)...(19): siRNA sense strand
cgucacuccugaagccaaa

SEQ ID NO: 1411828 - RNA, 19 nt, Homo sapiens
  misc_RNA (1)...(19): siRNA sense strand
cagccaagaucaucaacac

SEQ ID NO: 1411829 - RNA, 19 nt, Homo sapiens
  misc_RNA (1)...(19): siRNA sense strand
ucaaccagaugcugaccau

SEQ ID NO: 1411830 - RNA, 19 nt, Homo sapiens
  misc_RNA (1)...(19): siRNA sense strand
gcagacuucggccuagcua

SEQ ID NO: 1411831 - RNA, 19 nt, Homo sapiens
  misc_RNA (1)...(19): siRNA sense strand
acauccggcucacgcagua

SEQ ID NO: 1411832 - RNA, 19 nt, Homo sapiens
  misc_RNA (1)...(19): siRNA sense strand
agccagagaucaccagaag

SEQ ID NO: 1411833 - RNA, 19 nt, Homo sapiens
  misc_RNA (1)...(19): siRNA sense strand
ggacgaggaccagcacaag

SEQ ID NO: 1411834 - RNA, 19 nt, Homo sapiens
  misc_RNA (1)...(19): siRNA sense strand
ggacaccgucacuccugaa

SEQ ID NO: 1411835 - RNA, 19 nt, Homo sapiens
  misc_RNA (1)...(19): siRNA sense strand
ccagagaucaccagaagcu

SEQ ID NO: 1411836 - RNA, 19 nt, Homo sapiens
  misc_RNA (1)...(19): siRNA sense strand
gagccauccucaccaccau

SEQ ID NO: 1411837 - RNA, 19 nt, Homo sapiens
  misc_RNA (1)...(19): siRNA sense strand
gcaaaggggcugcagugaa

SEQ ID NO: 1411838 - RNA, 19 nt, Homo sapiens
  misc_RNA (1)...(19): siRNA sense strand
guucuccauugucaccaaa

SEQ ID NO: 1411839 - RNA, 19 nt, Homo sapiens
  misc_RNA (1)...(19): siRNA sense strand
ggucuucgaucuggucacu

SEQ ID NO: 1411840 - RNA, 19 nt, Homo sapiens
  misc_RNA (1)...(19): siRNA sense strand
aagcaggagaucauuaaga

SEQ ID NO: 1411841 - RNA, 19 nt, Homo sapiens
  misc_RNA (1)...(19): siRNA sense strand
gcaggcaugguuugguuuc

SEQ ID NO: 1411842 - RNA, 19 nt, Homo sapiens
  misc_RNA (1)...(19): siRNA sense strand
ccgaggagggcuuccacua

SEQ ID NO: 1411843 - RNA, 19 nt, Homo sapiens
  misc_RNA (1)...(19): siRNA sense strand
ggcagaacgugcacuucca

SEQ ID NO: 1411844 - RNA, 19 nt, Homo sapiens
  misc_RNA (1)...(19): siRNA sense strand
gcaccggccaugaguaugc

SEQ ID NO: 1411845 - RNA, 19 nt, Homo sapiens
  misc_RNA (1)...(19): siRNA sense strand
gaagcaggagaucauuaag

SEQ ID NO: 1411846 - RNA, 19 nt, Homo sapiens
  misc_RNA (1)...(19): siRNA sense strand
caucgaggccgucaacaac

SEQ ID NO: 1411847 - RNA, 19 nt, Homo sapiens
  misc_RNA (1)...(19): siRNA sense strand
uggcaagccuguggacauc

SEQ ID NO: 1411848 - RNA, 19 nt, Homo sapiens
  misc_RNA (1)...(19): siRNA sense strand
gaguaugcagccaagauca

SEQ ID NO: 1411849 - RNA, 19 nt, Homo sapiens
  misc_RNA (1)...(19): siRNA sense strand
gacuguggagugucugaaa

SEQ ID NO: 1411850 - RNA, 19 nt, Homo sapiens
  misc_RNA (1)...(19): siRNA sense strand
gagaaccugcuggccaaga

SEQ ID NO: 1411851 - RNA, 19 nt, Homo sapiens
  misc_RNA (1)...(19): siRNA sense strand
agcaggagaucauuaagac

SEQ ID NO: 1411852 - RNA, 19 nt, Homo sapiens
  misc_RNA (1)...(19): siRNA sense strand
ggaagcaggagaucauuaa

SEQ ID NO: 1411853 - RNA, 19 nt, Homo sapiens
  misc_RNA (1)...(19): siRNA sense strand
caacaacggugacuuugag

SEQ ID NO: 1411854 - RNA, 19 nt, Homo sapiens
  misc_RNA (1)...(19): siRNA sense strand
cagcaggcaugguuugguu

SEQ ID NO: 1411855 - RNA, 19 nt, Homo sapiens
  misc_RNA (1)...(19): siRNA sense strand
gcacgucauuggagaggau

SEQ ID NO: 1411856 - RNA, 19 nt, Homo sapiens
  misc_RNA (1)...(19): siRNA sense strand
cagugaagcuggcagacuu

SEQ ID NO: 1411857 - RNA, 19 nt, Homo sapiens
  misc_RNA (1)...(19): siRNA sense strand
ccaagaucaucaacaccaa

SEQ ID NO: 1411858 - RNA, 19 nt, Homo sapiens
  misc_RNA (1)...(19): siRNA sense strand
gcaagccuguggacaucug

SEQ ID NO: 1411859 - RNA, 19 nt, Homo sapiens
  misc_RNA (1)...(19): siRNA sense strand
caaaggggcugcagugaag

SEQ ID NO: 1411860 - RNA, 19 nt, Homo sapiens
  misc_RNA (1)...(19): siRNA sense strand
uaccagcucuacgaggaua

SEQ ID NO: 1411861 - RNA, 19 nt, Homo sapiens
  misc_RNA (1)...(19): siRNA sense strand
agaaccugcuggccaagaa

SEQ ID NO: 1411862 - RNA, 19 nt, Homo sapiens
  misc_RNA (1)...(19): siRNA sense strand
gaucaucaacaccaagaag

SEQ ID NO: 1411863 - RNA, 19 nt, Homo sapiens
  misc_RNA (1)...(19): siRNA sense strand
cggaagcaggagaucauua

SEQ ID NO: 1411864 - RNA, 19 nt, Homo sapiens
  misc_RNA (1)...(19): siRNA sense strand
cgucacuccugaagccaaa

SEQ ID NO: 1411865 - RNA, 19 nt, Homo sapiens
  misc_RNA (1)...(19): siRNA sense strand
cagccaagaucaucaacac

SEQ ID NO: 1411866 - RNA, 19 nt, Homo sapiens
  misc_RNA (1)...(19): siRNA sense strand
ucaaccagaugcugaccau

SEQ ID NO: 1411867 - RNA, 19 nt, Homo sapiens
  misc_RNA (1)...(19): siRNA sense strand
gcagacuucggccuagcua

SEQ ID NO: 1411868 - RNA, 19 nt, Homo sapiens
  misc_RNA (1)...(19): siRNA sense strand
acauccggcucacgcagua

SEQ ID NO: 1411869 - RNA, 19 nt, Homo sapiens
  misc_RNA (1)...(19): siRNA sense strand
agccagagaucaccagaag

SEQ ID NO: 1411870 - RNA, 19 nt, Homo sapiens
  misc_RNA (1)...(19): siRNA sense strand
ggacgaggaccagcacaag

SEQ ID NO: 1411871 - RNA, 19 nt, Homo sapiens
  misc_RNA (1)...(19): siRNA sense strand
ggacaccgucacuccugaa

SEQ ID NO: 1411872 - RNA, 19 nt, Homo sapiens
  misc_RNA (1)...(19): siRNA sense strand
ccagagaucaccagaagcu

SEQ ID NO: 1411873 - RNA, 19 nt, Homo sapiens
  misc_RNA (1)...(19): siRNA sense strand
gagccauccucaccaccau

SEQ ID NO: 1411874 - RNA, 19 nt, Homo sapiens
  misc_RNA (1)...(19): siRNA sense strand
gcaaaggggcugcagugaa

SEQ ID NO: 1411875 - RNA, 19 nt, Homo sapiens
  misc_RNA (1)...(19): siRNA sense strand
guucuccauugucaccaaa

SEQ ID NO: 1411876 - RNA, 19 nt, Homo sapiens
  misc_RNA (1)...(19): siRNA sense strand
ggucuucgaucuggucacu

SEQ ID NO: 1411877 - RNA, 19 nt, Homo sapiens
  misc_RNA (1)...(19): siRNA sense strand
aagcaggagaucauuaaga

SEQ ID NO: 1411878 - RNA, 19 nt, Homo sapiens
  misc_RNA (1)...(19): siRNA sense strand
gcaggcaugguuugguuuc

SEQ ID NO: 1411879 - RNA, 19 nt, Homo sapiens
  misc_RNA (1)...(19): siRNA sense strand
ccgaggagggcuuccacua

SEQ ID NO: 1411880 - RNA, 19 nt, Homo sapiens
  misc_RNA (1)...(19): siRNA sense strand
ggcagaacgugcacuucca

SEQ ID NO: 1411881 - RNA, 19 nt, Homo sapiens
  misc_RNA (1)...(19): siRNA sense strand
gcaccggccaugaguaugc

SEQ ID NO: 1411882 - RNA, 19 nt, Homo sapiens
  misc_RNA (1)...(19): siRNA sense strand
gaagcaggagaucauuaag

SEQ ID NO: 1411883 - RNA, 19 nt, Homo sapiens
  misc_RNA (1)...(19): siRNA sense strand
caucgaggccgucaacaac

SEQ ID NO: 1411884 - RNA, 19 nt, Homo sapiens
  misc_RNA (1)...(19): siRNA sense strand
uggcaagccuguggacauc

SEQ ID NO: 1411885 - RNA, 19 nt, Homo sapiens
  misc_RNA (1)...(19): siRNA sense strand
gaguaugcagccaagauca

SEQ ID NO: 1411886 - RNA, 19 nt, Homo sapiens
  misc_RNA (1)...(19): siRNA sense strand
gacuguggagugucugaaa

SEQ ID NO: 1411887 - RNA, 19 nt, Homo sapiens
  misc_RNA (1)...(19): siRNA sense strand
gagaaccugcuggccaaga

SEQ ID NO: 1411888 - RNA, 19 nt, Homo sapiens
  misc_RNA (1)...(19): siRNA sense strand
agcaggagaucauuaagac

SEQ ID NO: 1411889 - RNA, 19 nt, Homo sapiens
  misc_RNA (1)...(19): siRNA sense strand
ggaagcaggagaucauuaa

SEQ ID NO: 1411890 - RNA, 19 nt, Homo sapiens
  misc_RNA (1)...(19): siRNA sense strand
caacaacggugacuuugag

SEQ ID NO: 1411891 - RNA, 19 nt, Homo sapiens
  misc_RNA (1)...(19): siRNA sense strand
cagcaggcaugguuugguu

SEQ ID NO: 1411892 - RNA, 19 nt, Homo sapiens
  misc_RNA (1)...(19): siRNA sense strand
gcacgucauuggagaggau

SEQ ID NO: 1411893 - RNA, 19 nt, Homo sapiens
  misc_RNA (1)...(19): siRNA sense strand
cagugaagcuggcagacuu

SEQ ID NO: 1411894 - RNA, 19 nt, Homo sapiens
  misc_RNA (1)...(19): siRNA sense strand
ccaagaucaucaacaccaa

SEQ ID NO: 1411895 - RNA, 19 nt, Homo sapiens
  misc_RNA (1)...(19): siRNA sense strand
gcaagccuguggacaucug

SEQ ID NO: 1411896 - RNA, 19 nt, Homo sapiens
  misc_RNA (1)...(19): siRNA sense strand
caaaggggcugcagugaag

SEQ ID NO: 1411897 - RNA, 19 nt, Homo sapiens
  misc_RNA (1)...(19): siRNA sense strand
uaccagcucuacgaggaua

SEQ ID NO: 1411898 - RNA, 19 nt, Homo sapiens
  misc_RNA (1)...(19): siRNA sense strand
agaaccugcuggccaagaa

SEQ ID NO: 1411899 - RNA, 19 nt, Homo sapiens
  misc_RNA (1)...(19): siRNA sense strand
gaucaucaacaccaagaag

SEQ ID NO: 1411900 - RNA, 19 nt, Homo sapiens
  misc_RNA (1)...(19): siRNA sense strand
cggaagcaggagaucauua

SEQ ID NO: 1411901 - RNA, 19 nt, Homo sapiens
  misc_RNA (1)...(19): siRNA sense strand
cgucacuccugaagccaaa

SEQ ID NO: 1411902 - RNA, 19 nt, Homo sapiens
  misc_RNA (1)...(19): siRNA sense strand
cagccaagaucaucaacac

SEQ ID NO: 1411903 - RNA, 19 nt, Homo sapiens
  misc_RNA (1)...(19): siRNA sense strand
ucaaccagaugcugaccau

SEQ ID NO: 1411904 - RNA, 19 nt, Homo sapiens
  misc_RNA (1)...(19): siRNA sense strand
gcagacuucggccuagcua

SEQ ID NO: 1411905 - RNA, 19 nt, Homo sapiens
  misc_RNA (1)...(19): siRNA sense strand
acauccggcucacgcagua

SEQ ID NO: 1411906 - RNA, 19 nt, Homo sapiens
  misc_RNA (1)...(19): siRNA sense strand
agccagagaucaccagaag

SEQ ID NO: 1411907 - RNA, 19 nt, Homo sapiens
  misc_RNA (1)...(19): siRNA sense strand
ggacgaggaccagcacaag

SEQ ID NO: 1411908 - RNA, 19 nt, Homo sapiens
  misc_RNA (1)...(19): siRNA sense strand
ggacaccgucacuccugaa

SEQ ID NO: 1411909 - RNA, 19 nt, Homo sapiens
  misc_RNA (1)...(19): siRNA sense strand
ccagagaucaccagaagcu

SEQ ID NO: 1411910 - RNA, 19 nt, Homo sapiens
  misc_RNA (1)...(19): siRNA sense strand
gagccauccucaccaccau

SEQ ID NO: 1411911 - RNA, 19 nt, Homo sapiens
  misc_RNA (1)...(19): siRNA sense strand
gcaaaggggcugcagugaa

SEQ ID NO: 1411912 - RNA, 19 nt, Homo sapiens
  misc_RNA (1)...(19): siRNA sense strand
guucuccauugucaccaaa

SEQ ID NO: 1411913 - RNA, 19 nt, Homo sapiens
  misc_RNA (1)...(19): siRNA sense strand
ggucuucgaucuggucacu

SEQ ID NO: 1411914 - RNA, 19 nt, Homo sapiens
  misc_RNA (1)...(19): siRNA sense strand
aagcaggagaucauuaaga

SEQ ID NO: 1411915 - RNA, 19 nt, Homo sapiens
  misc_RNA (1)...(19): siRNA sense strand
gcaggcaugguuugguuuc

SEQ ID NO: 1411916 - RNA, 19 nt, Homo sapiens
  misc_RNA (1)...(19): siRNA sense strand
ccgaggagggcuuccacua

SEQ ID NO: 1411917 - RNA, 19 nt, Homo sapiens
  misc_RNA (1)...(19): siRNA sense strand
ggcagaacgugcacuucca

SEQ ID NO: 1411918 - RNA, 19 nt, Homo sapiens
  misc_RNA (1)...(19): siRNA sense strand
gcaccggccaugaguaugc

SEQ ID NO: 1411919 - RNA, 19 nt, Homo sapiens
  misc_RNA (1)...(19): siRNA sense strand
gaagcaggagaucauuaag

SEQ ID NO: 1411920 - RNA, 19 nt, Homo sapiens
  misc_RNA (1)...(19): siRNA sense strand
caucgaggccgucaacaac

SEQ ID NO: 1411921 - RNA, 19 nt, Homo sapiens
  misc_RNA (1)...(19): siRNA sense strand
uggcaagccuguggacauc

SEQ ID NO: 1411922 - RNA, 19 nt, Homo sapiens
  misc_RNA (1)...(19): siRNA sense strand
gaguaugcagccaagauca

SEQ ID NO: 1411923 - RNA, 19 nt, Homo sapiens
  misc_RNA (1)...(19): siRNA sense strand
gacuguggagugucugaaa

SEQ ID NO: 1411924 - RNA, 19 nt, Homo sapiens
  misc_RNA (1)...(19): siRNA sense strand
gagaaccugcuggccaaga

SEQ ID NO: 1411925 - RNA, 19 nt, Homo sapiens
  misc_RNA (1)...(19): siRNA sense strand
agcaggagaucauuaagac

SEQ ID NO: 1411926 - RNA, 19 nt, Homo sapiens
  misc_RNA (1)...(19): siRNA sense strand
ggaagcaggagaucauuaa

SEQ ID NO: 1411927 - RNA, 19 nt, Homo sapiens
  misc_RNA (1)...(19): siRNA sense strand
caacaacggugacuuugag

SEQ ID NO: 1411928 - RNA, 19 nt, Homo sapiens
  misc_RNA (1)...(19): siRNA sense strand
cagcaggcaugguuugguu

SEQ ID NO: 1411929 - RNA, 19 nt, Homo sapiens
  misc_RNA (1)...(19): siRNA sense strand
gcacgucauuggagaggau

SEQ ID NO: 1411930 - RNA, 19 nt, Homo sapiens
  misc_RNA (1)...(19): siRNA sense strand
cagugaagcuggcagacuu

SEQ ID NO: 1411931 - RNA, 19 nt, Homo sapiens
  misc_RNA (1)...(19): siRNA sense strand
ccaagaucaucaacaccaa

SEQ ID NO: 1411932 - RNA, 19 nt, Homo sapiens
  misc_RNA (1)...(19): siRNA sense strand
gcaagccuguggacaucug

SEQ ID NO: 1411933 - RNA, 19 nt, Homo sapiens
  misc_RNA (1)...(19): siRNA sense strand
caaaggggcugcagugaag

SEQ ID NO: 1411934 - RNA, 19 nt, Homo sapiens
  misc_RNA (1)...(19): siRNA sense strand
uaccagcucuacgaggaua

SEQ ID NO: 1411935 - RNA, 19 nt, Homo sapiens
  misc_RNA (1)...(19): siRNA sense strand
agaaccugcuggccaagaa

SEQ ID NO: 1411936 - RNA, 19 nt, Homo sapiens
  misc_RNA (1)...(19): siRNA sense strand
gaucaucaacaccaagaag

SEQ ID NO: 1411937 - RNA, 19 nt, Homo sapiens
  misc_RNA (1)...(19): siRNA sense strand
cggaagcaggagaucauua

SEQ ID NO: 1411938 - RNA, 19 nt, Homo sapiens
  misc_RNA (1)...(19): siRNA sense strand
cgucacuccugaagccaaa

SEQ ID NO: 1411939 - RNA, 19 nt, Homo sapiens
  misc_RNA (1)...(19): siRNA sense strand
cagccaagaucaucaacac

SEQ ID NO: 1411940 - RNA, 19 nt, Homo sapiens
  misc_RNA (1)...(19): siRNA sense strand
ucaaccagaugcugaccau

SEQ ID NO: 1411941 - RNA, 19 nt, Homo sapiens
  misc_RNA (1)...(19): siRNA sense strand
gcagacuucggccuagcua

SEQ ID NO: 1411942 - RNA, 19 nt, Homo sapiens
  misc_RNA (1)...(19): siRNA sense strand
acauccggcucacgcagua

SEQ ID NO: 1411943 - RNA, 19 nt, Homo sapiens
  misc_RNA (1)...(19): siRNA sense strand
agccagagaucaccagaag

SEQ ID NO: 1411944 - RNA, 19 nt, Homo sapiens
  misc_RNA (1)...(19): siRNA sense strand
ggacgaggaccagcacaag

SEQ ID NO: 1411945 - RNA, 19 nt, Homo sapiens
  misc_RNA (1)...(19): siRNA sense strand
ggacaccgucacuccugaa

SEQ ID NO: 1411946 - RNA, 19 nt, Homo sapiens
  misc_RNA (1)...(19): siRNA sense strand
ccagagaucaccagaagcu

SEQ ID NO: 1411947 - RNA, 19 nt, Homo sapiens
  misc_RNA (1)...(19): siRNA sense strand
gagccauccucaccaccau

SEQ ID NO: 1411948 - RNA, 19 nt, Homo sapiens
  misc_RNA (1)...(19): siRNA sense strand
gcaaaggggcugcagugaa

SEQ ID NO: 1411949 - RNA, 19 nt, Homo sapiens
  misc_RNA (1)...(19): siRNA sense strand
guucuccauugucaccaaa

SEQ ID NO: 1411950 - RNA, 19 nt, Homo sapiens
  misc_RNA (1)...(19): siRNA sense strand
ggucuucgaucuggucacu

SEQ ID NO: 1411951 - RNA, 19 nt, Homo sapiens
  misc_RNA (1)...(19): siRNA sense strand
aagcaggagaucauuaaga

SEQ ID NO: 1411952 - RNA, 19 nt, Homo sapiens
  misc_RNA (1)...(19): siRNA sense strand
gcaggcaugguuugguuuc

SEQ ID NO: 1411953 - RNA, 19 nt, Homo sapiens
  misc_RNA (1)...(19): siRNA sense strand
ccgaggagggcuuccacua

SEQ ID NO: 1411954 - RNA, 19 nt, Homo sapiens
  misc_RNA (1)...(19): siRNA sense strand
ggcagaacgugcacuucca

SEQ ID NO: 1411955 - RNA, 19 nt, Homo sapiens
  misc_RNA (1)...(19): siRNA sense strand
gcaccggccaugaguaugc

SEQ ID NO: 1411956 - RNA, 19 nt, Homo sapiens
  misc_RNA (1)...(19): siRNA sense strand
gaagcaggagaucauuaag

SEQ ID NO: 1411957 - RNA, 19 nt, Homo sapiens
  misc_RNA (1)...(19): siRNA sense strand
caucgaggccgucaacaac

SEQ ID NO: 1411958 - RNA, 19 nt, Homo sapiens
  misc_RNA (1)...(19): siRNA sense strand
uggcaagccuguggacauc

SEQ ID NO: 1411959 - RNA, 19 nt, Homo sapiens
  misc_RNA (1)...(19): siRNA sense strand
gaguaugcagccaagauca

SEQ ID NO: 1411960 - RNA, 19 nt, Homo sapiens
  misc_RNA (1)...(19): siRNA sense strand
gacuguggagugucugaaa

SEQ ID NO: 1411961 - RNA, 19 nt, Homo sapiens
  misc_RNA (1)...(19): siRNA sense strand
gagaaccugcuggccaaga

SEQ ID NO: 1411962 - RNA, 19 nt, Homo sapiens
  misc_RNA (1)...(19): siRNA sense strand
agcaggagaucauuaagac

SEQ ID NO: 1411963 - RNA, 19 nt, Homo sapiens
  misc_RNA (1)...(19): siRNA sense strand
ggaagcaggagaucauuaa

SEQ ID NO: 1411964 - RNA, 19 nt, Homo sapiens
  misc_RNA (1)...(19): siRNA sense strand
caacaacggugacuuugag

SEQ ID NO: 1411965 - RNA, 19 nt, Homo sapiens
  misc_RNA (1)...(19): siRNA sense strand
cagcaggcaugguuugguu

SEQ ID NO: 1411966 - RNA, 19 nt, Homo sapiens
  misc_RNA (1)...(19): siRNA sense strand
gcacgucauuggagaggau

SEQ ID NO: 1411967 - RNA, 19 nt, Homo sapiens
  misc_RNA (1)...(19): siRNA sense strand
cagugaagcuggcagacuu

SEQ ID NO: 1411968 - RNA, 19 nt, Homo sapiens
  misc_RNA (1)...(19): siRNA sense strand
ccaagaucaucaacaccaa

SEQ ID NO: 1411969 - RNA, 19 nt, Homo sapiens
  misc_RNA (1)...(19): siRNA sense strand
gcaagccuguggacaucug

SEQ ID NO: 1411970 - RNA, 19 nt, Homo sapiens
  misc_RNA (1)...(19): siRNA sense strand
caaaggggcugcagugaag

SEQ ID NO: 1411971 - RNA, 19 nt, Homo sapiens
  misc_RNA (1)...(19): siRNA sense strand
uaccagcucuacgaggaua

SEQ ID NO: 1411972 - RNA, 19 nt, Homo sapiens
  misc_RNA (1)...(19): siRNA sense strand
agaaccugcuggccaagaa

SEQ ID NO: 1411973 - RNA, 19 nt, Homo sapiens
  misc_RNA (1)...(19): siRNA sense strand
gaucaucaacaccaagaag

SEQ ID NO: 1411974 - RNA, 19 nt, Homo sapiens
  misc_RNA (1)...(19): siRNA sense strand
cggaagcaggagaucauua

SEQ ID NO: 1411975 - RNA, 19 nt, Homo sapiens
  misc_RNA (1)...(19): siRNA sense strand
cgucacuccugaagccaaa

SEQ ID NO: 1411976 - RNA, 19 nt, Homo sapiens
  misc_RNA (1)...(19): siRNA sense strand
cagccaagaucaucaacac

SEQ ID NO: 1411977 - RNA, 19 nt, Homo sapiens
  misc_RNA (1)...(19): siRNA sense strand
ucaaccagaugcugaccau

SEQ ID NO: 1411978 - RNA, 19 nt, Homo sapiens
  misc_RNA (1)...(19): siRNA sense strand
gcagacuucggccuagcua

SEQ ID NO: 1411979 - RNA, 19 nt, Homo sapiens
  misc_RNA (1)...(19): siRNA sense strand
acauccggcucacgcagua

SEQ ID NO: 1411980 - RNA, 19 nt, Homo sapiens
  misc_RNA (1)...(19): siRNA sense strand
agccagagaucaccagaag

SEQ ID NO: 1411981 - RNA, 19 nt, Homo sapiens
  misc_RNA (1)...(19): siRNA sense strand
ggacgaggaccagcacaag

SEQ ID NO: 1411982 - RNA, 19 nt, Homo sapiens
  misc_RNA (1)...(19): siRNA sense strand
ggacaccgucacuccugaa

SEQ ID NO: 1411983 - RNA, 19 nt, Homo sapiens
  misc_RNA (1)...(19): siRNA sense strand
ccagagaucaccagaagcu

SEQ ID NO: 1411984 - RNA, 19 nt, Homo sapiens
  misc_RNA (1)...(19): siRNA sense strand
gagccauccucaccaccau

SEQ ID NO: 1411985 - RNA, 19 nt, Homo sapiens
  misc_RNA (1)...(19): siRNA sense strand
gcaaaggggcugcagugaa

SEQ ID NO: 1411986 - RNA, 19 nt, Homo sapiens
  misc_RNA (1)...(19): siRNA sense strand
guucuccauugucaccaaa

SEQ ID NO: 1411987 - RNA, 19 nt, Homo sapiens
  misc_RNA (1)...(19): siRNA sense strand
ggucuucgaucuggucacu

SEQ ID NO: 1411988 - RNA, 19 nt, Homo sapiens
  misc_RNA (1)...(19): siRNA sense strand
aagcaggagaucauuaaga

SEQ ID NO: 1411989 - RNA, 19 nt, Homo sapiens
  misc_RNA (1)...(19): siRNA sense strand
gcaggcaugguuugguuuc

SEQ ID NO: 1411990 - RNA, 19 nt, Homo sapiens
  misc_RNA (1)...(19): siRNA sense strand
ccgaggagggcuuccacua

SEQ ID NO: 1411991 - RNA, 19 nt, Homo sapiens
  misc_RNA (1)...(19): siRNA sense strand
ggcagaacgugcacuucca

SEQ ID NO: 1411992 - RNA, 19 nt, Homo sapiens
  misc_RNA (1)...(19): siRNA sense strand
gcaccggccaugaguaugc

SEQ ID NO: 1411993 - RNA, 19 nt, Homo sapiens
  misc_RNA (1)...(19): siRNA sense strand
gaagcaggagaucauuaag

SEQ ID NO: 1411994 - RNA, 19 nt, Homo sapiens
  misc_RNA (1)...(19): siRNA sense strand
caucgaggccgucaacaac

SEQ ID NO: 1411995 - RNA, 19 nt, Homo sapiens
  misc_RNA (1)...(19): siRNA sense strand
uggcaagccuguggacauc

SEQ ID NO: 1411996 - RNA, 19 nt, Homo sapiens
  misc_RNA (1)...(19): siRNA sense strand
gaguaugcagccaagauca

SEQ ID NO: 1411997 - RNA, 19 nt, Homo sapiens
  misc_RNA (1)...(19): siRNA sense strand
gacuguggagugucugaaa

SEQ ID NO: 1411998 - RNA, 19 nt, Homo sapiens
  misc_RNA (1)...(19): siRNA sense strand
gagaaccugcuggccaaga

SEQ ID NO: 1411999 - RNA, 19 nt, Homo sapiens
  misc_RNA (1)...(19): siRNA sense strand
agcaggagaucauuaagac

SEQ ID NO: 1412000 - RNA, 19 nt, Homo sapiens
  misc_RNA (1)...(19): siRNA sense strand
ggaagcaggagaucauuaa

SEQ ID NO: 1412001 - RNA, 19 nt, Homo sapiens
  misc_RNA (1)...(19): siRNA sense strand
caacaacggugacuuugag

SEQ ID NO: 1412002 - RNA, 19 nt, Homo sapiens
  misc_RNA (1)...(19): siRNA sense strand
cagcaggcaugguuugguu

SEQ ID NO: 1412003 - RNA, 19 nt, Homo sapiens
  misc_RNA (1)...(19): siRNA sense strand
gcacgucauuggagaggau

SEQ ID NO: 1412004 - RNA, 19 nt, Homo sapiens
  misc_RNA (1)...(19): siRNA sense strand
cagugaagcuggcagacuu

SEQ ID NO: 1412005 - RNA, 19 nt, Homo sapiens
  misc_RNA (1)...(19): siRNA sense strand
ccaagaucaucaacaccaa

SEQ ID NO: 1412006 - RNA, 19 nt, Homo sapiens
  misc_RNA (1)...(19): siRNA sense strand
gcaagccuguggacaucug

SEQ ID NO: 1412007 - RNA, 19 nt, Homo sapiens
  misc_RNA (1)...(19): siRNA sense strand
caaaggggcugcagugaag

SEQ ID NO: 1412008 - RNA, 19 nt, Homo sapiens
  misc_RNA (1)...(19): siRNA sense strand
uaccagcucuacgaggaua

SEQ ID NO: 1412009 - RNA, 19 nt, Homo sapiens
  misc_RNA (1)...(19): siRNA sense strand
agaaccugcuggccaagaa

SEQ ID NO: 1412010 - RNA, 19 nt, Homo sapiens
  misc_RNA (1)...(19): siRNA sense strand
gaucaucaacaccaagaag

SEQ ID NO: 1412011 - RNA, 19 nt, Homo sapiens
  misc_RNA (1)...(19): siRNA sense strand
cggaagcaggagaucauua

SEQ ID NO: 1412012 - RNA, 19 nt, Homo sapiens
  misc_RNA (1)...(19): siRNA sense strand
cgucacuccugaagccaaa

SEQ ID NO: 1412013 - RNA, 19 nt, Homo sapiens
  misc_RNA (1)...(19): siRNA sense strand
cagccaagaucaucaacac

SEQ ID NO: 1412014 - RNA, 19 nt, Homo sapiens
  misc_RNA (1)...(19): siRNA sense strand
ucaaccagaugcugaccau

SEQ ID NO: 1412015 - RNA, 19 nt, Homo sapiens
  misc_RNA (1)...(19): siRNA sense strand
gcagacuucggccuagcua

SEQ ID NO: 1412016 - RNA, 19 nt, Homo sapiens
  misc_RNA (1)...(19): siRNA sense strand
acauccggcucacgcagua

SEQ ID NO: 1412017 - RNA, 19 nt, Homo sapiens
  misc_RNA (1)...(19): siRNA sense strand
agccagagaucaccagaag

SEQ ID NO: 1412018 - RNA, 19 nt, Homo sapiens
  misc_RNA (1)...(19): siRNA sense strand
ggacgaggaccagcacaag

SEQ ID NO: 1412019 - RNA, 19 nt, Homo sapiens
  misc_RNA (1)...(19): siRNA sense strand
ggacaccgucacuccugaa

SEQ ID NO: 1412020 - RNA, 19 nt, Homo sapiens
  misc_RNA (1)...(19): siRNA sense strand
ccagagaucaccagaagcu

SEQ ID NO: 1412021 - RNA, 19 nt, Homo sapiens
  misc_RNA (1)...(19): siRNA sense strand
gagccauccucaccaccau

SEQ ID NO: 1412022 - RNA, 19 nt, Homo sapiens
  misc_RNA (1)...(19): siRNA sense strand
gcaaaggggcugcagugaa

SEQ ID NO: 1412023 - RNA, 19 nt, Homo sapiens
  misc_RNA (1)...(19): siRNA sense strand
guucuccauugucaccaaa

SEQ ID NO: 1412024 - RNA, 19 nt, Homo sapiens
  misc_RNA (1)...(19): siRNA sense strand
ggucuucgaucuggucacu

SEQ ID NO: 1412025 - RNA, 19 nt, Homo sapiens
  misc_RNA (1)...(19): siRNA sense strand
aagcaggagaucauuaaga

SEQ ID NO: 1412026 - RNA, 19 nt, Homo sapiens
  misc_RNA (1)...(19): siRNA sense strand
gcaggcaugguuugguuuc

SEQ ID NO: 1412027 - RNA, 19 nt, Homo sapiens
  misc_RNA (1)...(19): siRNA sense strand
ccgaggagggcuuccacua

SEQ ID NO: 1412028 - RNA, 19 nt, Homo sapiens
  misc_RNA (1)...(19): siRNA sense strand
ggcagaacgugcacuucca

SEQ ID NO: 1412029 - RNA, 19 nt, Homo sapiens
  misc_RNA (1)...(19): siRNA sense strand
gcaccggccaugaguaugc

SEQ ID NO: 1412030 - RNA, 19 nt, Homo sapiens
  misc_RNA (1)...(19): siRNA sense strand
gaagcaggagaucauuaag

SEQ ID NO: 1412031 - RNA, 19 nt, Homo sapiens
  misc_RNA (1)...(19): siRNA sense strand
caucgaggccgucaacaac

SEQ ID NO: 1412032 - RNA, 19 nt, Homo sapiens
  misc_RNA (1)...(19): siRNA sense strand
uggcaagccuguggacauc

SEQ ID NO: 1412033 - RNA, 19 nt, Homo sapiens
  misc_RNA (1)...(19): siRNA sense strand
gaguaugcagccaagauca

SEQ ID NO: 1412034 - RNA, 19 nt, Homo sapiens
  misc_RNA (1)...(19): siRNA sense strand
gacuguggagugucugaaa

SEQ ID NO: 1412035 - RNA, 19 nt, Homo sapiens
  misc_RNA (1)...(19): siRNA sense strand
gagaaccugcuggccaaga

SEQ ID NO: 1412036 - RNA, 19 nt, Homo sapiens
  misc_RNA (1)...(19): siRNA sense strand
agcaggagaucauuaagac

SEQ ID NO: 1412037 - RNA, 19 nt, Homo sapiens
  misc_RNA (1)...(19): siRNA sense strand
ggaagcaggagaucauuaa

SEQ ID NO: 1412038 - RNA, 19 nt, Homo sapiens
  misc_RNA (1)...(19): siRNA sense strand
caacaacggugacuuugag

SEQ ID NO: 1412039 - RNA, 19 nt, Homo sapiens
  misc_RNA (1)...(19): siRNA sense strand
cagcaggcaugguuugguu

SEQ ID NO: 1412040 - RNA, 19 nt, Homo sapiens
  misc_RNA (1)...(19): siRNA sense strand
gcacgucauuggagaggau

SEQ ID NO: 1412041 - RNA, 19 nt, Homo sapiens
  misc_RNA (1)...(19): siRNA sense strand
cagugaagcuggcagacuu

SEQ ID NO: 1412042 - RNA, 19 nt, Homo sapiens
  misc_RNA (1)...(19): siRNA sense strand
ccaagaucaucaacaccaa

SEQ ID NO: 1412043 - RNA, 19 nt, Homo sapiens
  misc_RNA (1)...(19): siRNA sense strand
gcaagccuguggacaucug

SEQ ID NO: 1412044 - RNA, 19 nt, Homo sapiens
  misc_RNA (1)...(19): siRNA sense strand
caaaggggcugcagugaag

SEQ ID NO: 1412045 - RNA, 19 nt, Homo sapiens
  misc_RNA (1)...(19): siRNA sense strand
uaccagcucuacgaggaua

SEQ ID NO: 1412046 - RNA, 19 nt, Homo sapiens
  misc_RNA (1)...(19): siRNA sense strand
agaaccugcuggccaagaa

SEQ ID NO: 1412047 - RNA, 19 nt, Homo sapiens
  misc_RNA (1)...(19): siRNA sense strand
gaucaucaacaccaagaag

SEQ ID NO: 1412048 - RNA, 19 nt, Homo sapiens
  misc_RNA (1)...(19): siRNA sense strand
cggaagcaggagaucauua

SEQ ID NO: 1412049 - RNA, 19 nt, Homo sapiens
  misc_RNA (1)...(19): siRNA sense strand
cgucacuccugaagccaaa

SEQ ID NO: 1412050 - RNA, 19 nt, Homo sapiens
  misc_RNA (1)...(19): siRNA sense strand
cagccaagaucaucaacac

SEQ ID NO: 1412051 - RNA, 19 nt, Homo sapiens
  misc_RNA (1)...(19): siRNA sense strand
ucaaccagaugcugaccau

SEQ ID NO: 1412052 - RNA, 19 nt, Homo sapiens
  misc_RNA (1)...(19): siRNA sense strand
gcagacuucggccuagcua

SEQ ID NO: 1412053 - RNA, 19 nt, Homo sapiens
  misc_RNA (1)...(19): siRNA sense strand
acauccggcucacgcagua

SEQ ID NO: 1412054 - RNA, 19 nt, Homo sapiens
  misc_RNA (1)...(19): siRNA sense strand
agccagagaucaccagaag

SEQ ID NO: 1412055 - RNA, 19 nt, Homo sapiens
  misc_RNA (1)...(19): siRNA sense strand
ggacgaggaccagcacaag

SEQ ID NO: 1412056 - RNA, 19 nt, Homo sapiens
  misc_RNA (1)...(19): siRNA sense strand
ggacaccgucacuccugaa

SEQ ID NO: 1412057 - RNA, 19 nt, Homo sapiens
  misc_RNA (1)...(19): siRNA sense strand
ccagagaucaccagaagcu

SEQ ID NO: 1412058 - RNA, 19 nt, Homo sapiens
  misc_RNA (1)...(19): siRNA sense strand
gagccauccucaccaccau

SEQ ID NO: 1412059 - RNA, 19 nt, Homo sapiens
  misc_RNA (1)...(19): siRNA sense strand
gcaaaggggcugcagugaa

SEQ ID NO: 1412060 - RNA, 19 nt, Homo sapiens
  misc_RNA (1)...(19): siRNA sense strand
guucuccauugucaccaaa

SEQ ID NO: 1412061 - RNA, 19 nt, Homo sapiens
  misc_RNA (1)...(19): siRNA sense strand
ggucuucgaucuggucacu

SEQ ID NO: 1412062 - RNA, 19 nt, Homo sapiens
  misc_RNA (1)...(19): siRNA sense strand
aagcaggagaucauuaaga

SEQ ID NO: 1412063 - RNA, 19 nt, Homo sapiens
  misc_RNA (1)...(19): siRNA sense strand
gcaggcaugguuugguuuc

SEQ ID NO: 1412064 - RNA, 19 nt, Homo sapiens
  misc_RNA (1)...(19): siRNA sense strand
ccgaggagggcuuccacua

SEQ ID NO: 1412065 - RNA, 19 nt, Homo sapiens
  misc_RNA (1)...(19): siRNA sense strand
ggcagaacgugcacuucca

SEQ ID NO: 1412066 - RNA, 19 nt, Homo sapiens
  misc_RNA (1)...(19): siRNA sense strand
gcaccggccaugaguaugc

SEQ ID NO: 1412067 - RNA, 19 nt, Homo sapiens
  misc_RNA (1)...(19): siRNA sense strand
gaagcaggagaucauuaag

SEQ ID NO: 1412068 - RNA, 19 nt, Homo sapiens
  misc_RNA (1)...(19): siRNA sense strand
caucgaggccgucaacaac

SEQ ID NO: 1412069 - RNA, 19 nt, Homo sapiens
  misc_RNA (1)...(19): siRNA sense strand
uggcaagccuguggacauc

SEQ ID NO: 1412070 - RNA, 19 nt, Homo sapiens
  misc_RNA (1)...(19): siRNA sense strand
gaguaugcagccaagauca

SEQ ID NO: 1412071 - RNA, 19 nt, Homo sapiens
  misc_RNA (1)...(19): siRNA sense strand
gacuguggagugucugaaa

SEQ ID NO: 1412072 - RNA, 19 nt, Homo sapiens
  misc_RNA (1)...(19): siRNA sense strand
gagaaccugcuggccaaga

SEQ ID NO: 1412073 - RNA, 19 nt, Homo sapiens
  misc_RNA (1)...(19): siRNA sense strand
agcaggagaucauuaagac

SEQ ID NO: 1412074 - RNA, 19 nt, Homo sapiens
  misc_RNA (1)...(19): siRNA sense strand
ggaagcaggagaucauuaa

SEQ ID NO: 1412075 - RNA, 19 nt, Homo sapiens
  misc_RNA (1)...(19): siRNA sense strand
caacaacggugacuuugag

SEQ ID NO: 1412076 - RNA, 19 nt, Homo sapiens
  misc_RNA (1)...(19): siRNA sense strand
cagcaggcaugguuugguu

SEQ ID NO: 1412077 - RNA, 19 nt, Homo sapiens
  misc_RNA (1)...(19): siRNA sense strand
gcacgucauuggagaggau

SEQ ID NO: 1412078 - RNA, 19 nt, Homo sapiens
  misc_RNA (1)...(19): siRNA sense strand
cagugaagcuggcagacuu

SEQ ID NO: 1412079 - RNA, 19 nt, Homo sapiens
  misc_RNA (1)...(19): siRNA sense strand
ccaagaucaucaacaccaa

SEQ ID NO: 1412080 - RNA, 19 nt, Homo sapiens
  misc_RNA (1)...(19): siRNA sense strand
gcaagccuguggacaucug

SEQ ID NO: 1412081 - RNA, 19 nt, Homo sapiens
  misc_RNA (1)...(19): siRNA sense strand
caaaggggcugcagugaag

SEQ ID NO: 1412082 - RNA, 19 nt, Homo sapiens
  misc_RNA (1)...(19): siRNA sense strand
uaccagcucuacgaggaua

SEQ ID NO: 1412083 - RNA, 19 nt, Homo sapiens
  misc_RNA (1)...(19): siRNA sense strand
agaaccugcuggccaagaa

SEQ ID NO: 1412084 - RNA, 19 nt, Homo sapiens
  misc_RNA (1)...(19): siRNA sense strand
gaucaucaacaccaagaag

SEQ ID NO: 1412085 - RNA, 19 nt, Homo sapiens
  misc_RNA (1)...(19): siRNA sense strand
cggaagcaggagaucauua

SEQ ID NO: 1412086 - RNA, 19 nt, Homo sapiens
  misc_RNA (1)...(19): siRNA sense strand
cgucacuccugaagccaaa

SEQ ID NO: 1412087 - RNA, 19 nt, Homo sapiens
  misc_RNA (1)...(19): siRNA sense strand
cagccaagaucaucaacac

SEQ ID NO: 1412088 - RNA, 19 nt, Homo sapiens
  misc_RNA (1)...(19): siRNA sense strand
ucaaccagaugcugaccau

SEQ ID NO: 1412089 - RNA, 19 nt, Homo sapiens
  misc_RNA (1)...(19): siRNA sense strand
gcagacuucggccuagcua

SEQ ID NO: 1412090 - RNA, 19 nt, Homo sapiens
  misc_RNA (1)...(19): siRNA sense strand
acauccggcucacgcagua

SEQ ID NO: 1412091 - RNA, 19 nt, Homo sapiens
  misc_RNA (1)...(19): siRNA sense strand
agccagagaucaccagaag

SEQ ID NO: 1412092 - RNA, 19 nt, Homo sapiens
  misc_RNA (1)...(19): siRNA sense strand
ggacgaggaccagcacaag

SEQ ID NO: 1412093 - RNA, 19 nt, Homo sapiens
  misc_RNA (1)...(19): siRNA sense strand
ggacaccgucacuccugaa

SEQ ID NO: 1412094 - RNA, 19 nt, Homo sapiens
  misc_RNA (1)...(19): siRNA sense strand
ccagagaucaccagaagcu

SEQ ID NO: 1412095 - RNA, 19 nt, Homo sapiens
  misc_RNA (1)...(19): siRNA sense strand
gagccauccucaccaccau

SEQ ID NO: 1412096 - RNA, 19 nt, Homo sapiens
  misc_RNA (1)...(19): siRNA sense strand
gcaaaggggcugcagugaa

SEQ ID NO: 1412097 - RNA, 19 nt, Homo sapiens
  misc_RNA (1)...(19): siRNA sense strand
guucuccauugucaccaaa

SEQ ID NO: 1412098 - RNA, 19 nt, Homo sapiens
  misc_RNA (1)...(19): siRNA sense strand
ggucuucgaucuggucacu

SEQ ID NO: 1412099 - RNA, 19 nt, Homo sapiens
  misc_RNA (1)...(19): siRNA sense strand
aagcaggagaucauuaaga

SEQ ID NO: 1412100 - RNA, 19 nt, Homo sapiens
  misc_RNA (1)...(19): siRNA sense strand
gcaggcaugguuugguuuc

SEQ ID NO: 1412101 - RNA, 19 nt, Homo sapiens
  misc_RNA (1)...(19): siRNA sense strand
ccgaggagggcuuccacua

SEQ ID NO: 1412102 - RNA, 19 nt, Homo sapiens
  misc_RNA (1)...(19): siRNA sense strand
ggcagaacgugcacuucca

SEQ ID NO: 1412103 - RNA, 19 nt, Homo sapiens
  misc_RNA (1)...(19): siRNA sense strand
gcaccggccaugaguaugc

SEQ ID NO: 1412104 - RNA, 19 nt, Homo sapiens
  misc_RNA (1)...(19): siRNA sense strand
gaagcaggagaucauuaag

SEQ ID NO: 1412105 - RNA, 19 nt, Homo sapiens
  misc_RNA (1)...(19): siRNA sense strand
caucgaggccgucaacaac

SEQ ID NO: 1412106 - RNA, 19 nt, Homo sapiens
  misc_RNA (1)...(19): siRNA sense strand
uggcaagccuguggacauc

SEQ ID NO: 1412107 - RNA, 19 nt, Homo sapiens
  misc_RNA (1)...(19): siRNA sense strand
gaguaugcagccaagauca

SEQ ID NO: 1412108 - RNA, 19 nt, Homo sapiens
  misc_RNA (1)...(19): siRNA sense strand
gacuguggagugucugaaa

SEQ ID NO: 1412109 - RNA, 19 nt, Homo sapiens
  misc_RNA (1)...(19): siRNA sense strand
gagaaccugcuggccaaga

SEQ ID NO: 1412110 - RNA, 19 nt, Homo sapiens
  misc_RNA (1)...(19): siRNA sense strand
agcaggagaucauuaagac

SEQ ID NO: 1412111 - RNA, 19 nt, Homo sapiens
  misc_RNA (1)...(19): siRNA sense strand
gaguuuaucugcuguauag

SEQ ID NO: 1412112 - RNA, 19 nt, Homo sapiens
  misc_RNA (1)...(19): siRNA sense strand
gcgcaggugucuuccauuu

SEQ ID NO: 1412113 - RNA, 19 nt, Homo sapiens
  misc_RNA (1)...(19): siRNA sense strand
gagacucuauuccgaugua

SEQ ID NO: 1412114 - RNA, 19 nt, Homo sapiens
  misc_RNA (1)...(19): siRNA sense strand
gcaggugucuuccauuuac

SEQ ID NO: 1412115 - RNA, 19 nt, Homo sapiens
  misc_RNA (1)...(19): siRNA sense strand
gggcaagggcgaaacuuaa

SEQ ID NO: 1412116 - RNA, 19 nt, Homo sapiens
  misc_RNA (1)...(19): siRNA sense strand
gaaggcaggagacucuauu

SEQ ID NO: 1412117 - RNA, 19 nt, Homo sapiens
  misc_RNA (1)...(19): siRNA sense strand
cuauuccgauguauaagaa

SEQ ID NO: 1412118 - RNA, 19 nt, Homo sapiens
  misc_RNA (1)...(19): siRNA sense strand
gauauucugagugucauaa

SEQ ID NO: 1412119 - RNA, 19 nt, Homo sapiens
  misc_RNA (1)...(19): siRNA sense strand
ggaguuuaucugcuguaua

SEQ ID NO: 1412120 - RNA, 19 nt, Homo sapiens
  misc_RNA (1)...(19): siRNA sense strand
cuuaaccucucuccacaug

SEQ ID NO: 1412121 - RNA, 19 nt, Homo sapiens
  misc_RNA (1)...(19): siRNA sense strand
ggaaggcaggagacucuau

SEQ ID NO: 1412122 - RNA, 19 nt, Homo sapiens
  misc_RNA (1)...(19): siRNA sense strand
acucuauuccgauguauaa

SEQ ID NO: 1412123 - RNA, 19 nt, Homo sapiens
  misc_RNA (1)...(19): siRNA sense strand
ugucuuccauuuacaccaa

SEQ ID NO: 1412124 - RNA, 19 nt, Homo sapiens
  misc_RNA (1)...(19): siRNA sense strand
cgggcaagggcgaaacuua

SEQ ID NO: 1412125 - RNA, 19 nt, Homo sapiens
  misc_RNA (1)...(19): siRNA sense strand
ccuacaggcccaaggauau

SEQ ID NO: 1412126 - RNA, 19 nt, Homo sapiens
  misc_RNA (1)...(19): siRNA sense strand
uagcgcaggugucuuccau

SEQ ID NO: 1412127 - RNA, 19 nt, Homo sapiens
  misc_RNA (1)...(19): siRNA sense strand
gccuacaacagcugcuaua

SEQ ID NO: 1412128 - RNA, 19 nt, Homo sapiens
  misc_RNA (1)...(19): siRNA sense strand
ggauauucugagugucaua

SEQ ID NO: 1412129 - RNA, 19 nt, Homo sapiens
  misc_RNA (1)...(19): siRNA sense strand
gauaugguguccgaaucca

SEQ ID NO: 1412130 - RNA, 19 nt, Homo sapiens
  misc_RNA (1)...(19): siRNA sense strand
cuauagcgcaggugucuuc

SEQ ID NO: 1412131 - RNA, 19 nt, Homo sapiens
  misc_RNA (1)...(19): siRNA sense strand
cagguggugucucgagaag

SEQ ID NO: 1412132 - RNA, 19 nt, Homo sapiens
  misc_RNA (1)...(19): siRNA sense strand
ggcgaaacuuaaccucucu

SEQ ID NO: 1412133 - RNA, 19 nt, Homo sapiens
  misc_RNA (1)...(19): siRNA sense strand
gacucuauuccgauguaua

SEQ ID NO: 1412134 - RNA, 19 nt, Homo sapiens
  misc_RNA (1)...(19): siRNA sense strand
cgcaggugucuuccauuua

SEQ ID NO: 1412135 - RNA, 19 nt, Homo sapiens
  misc_RNA (1)...(19): siRNA sense strand
gaguuuaucugcuguauag

SEQ ID NO: 1412136 - RNA, 19 nt, Homo sapiens
  misc_RNA (1)...(19): siRNA sense strand
gcgcaggugucuuccauuu

SEQ ID NO: 1412137 - RNA, 19 nt, Homo sapiens
  misc_RNA (1)...(19): siRNA sense strand
gagacucuauuccgaugua

SEQ ID NO: 1412138 - RNA, 19 nt, Homo sapiens
  misc_RNA (1)...(19): siRNA sense strand
gcaggugucuuccauuuac

SEQ ID NO: 1412139 - RNA, 19 nt, Homo sapiens
  misc_RNA (1)...(19): siRNA sense strand
gggcaagggcgaaacuuaa

SEQ ID NO: 1412140 - RNA, 19 nt, Homo sapiens
  misc_RNA (1)...(19): siRNA sense strand
gaaggcaggagacucuauu

SEQ ID NO: 1412141 - RNA, 19 nt, Homo sapiens
  misc_RNA (1)...(19): siRNA sense strand
cuauuccgauguauaagaa

SEQ ID NO: 1412142 - RNA, 19 nt, Homo sapiens
  misc_RNA (1)...(19): siRNA sense strand
gauauucugagugucauaa

SEQ ID NO: 1412143 - RNA, 19 nt, Homo sapiens
  misc_RNA (1)...(19): siRNA sense strand
ggaguuuaucugcuguaua

SEQ ID NO: 1412144 - RNA, 19 nt, Homo sapiens
  misc_RNA (1)...(19): siRNA sense strand
cuuaaccucucuccacaug

SEQ ID NO: 1412145 - RNA, 19 nt, Homo sapiens
  misc_RNA (1)...(19): siRNA sense strand
ggaaggcaggagacucuau

SEQ ID NO: 1412146 - RNA, 19 nt, Homo sapiens
  misc_RNA (1)...(19): siRNA sense strand
acucuauuccgauguauaa

SEQ ID NO: 1412147 - RNA, 19 nt, Homo sapiens
  misc_RNA (1)...(19): siRNA sense strand
ugucuuccauuuacaccaa

SEQ ID NO: 1412148 - RNA, 19 nt, Homo sapiens
  misc_RNA (1)...(19): siRNA sense strand
cgggcaagggcgaaacuua

SEQ ID NO: 1412149 - RNA, 19 nt, Homo sapiens
  misc_RNA (1)...(19): siRNA sense strand
ccuacaggcccaaggauau

SEQ ID NO: 1412150 - RNA, 19 nt, Homo sapiens
  misc_RNA (1)...(19): siRNA sense strand
uagcgcaggugucuuccau

SEQ ID NO: 1412151 - RNA, 19 nt, Homo sapiens
  misc_RNA (1)...(19): siRNA sense strand
gccuacaacagcugcuaua

SEQ ID NO: 1412152 - RNA, 19 nt, Homo sapiens
  misc_RNA (1)...(19): siRNA sense strand
ggauauucugagugucaua

SEQ ID NO: 1412153 - RNA, 19 nt, Homo sapiens
  misc_RNA (1)...(19): siRNA sense strand
gauaugguguccgaaucca

SEQ ID NO: 1412154 - RNA, 19 nt, Homo sapiens
  misc_RNA (1)...(19): siRNA sense strand
cuauagcgcaggugucuuc

SEQ ID NO: 1412155 - RNA, 19 nt, Homo sapiens
  misc_RNA (1)...(19): siRNA sense strand
cagguggugucucgagaag

SEQ ID NO: 1412156 - RNA, 19 nt, Homo sapiens
  misc_RNA (1)...(19): siRNA sense strand
ggcgaaacuuaaccucucu

SEQ ID NO: 1412157 - RNA, 19 nt, Homo sapiens
  misc_RNA (1)...(19): siRNA sense strand
gacucuauuccgauguaua

SEQ ID NO: 1412158 - RNA, 19 nt, Homo sapiens
  misc_RNA (1)...(19): siRNA sense strand
cgcaggugucuuccauuua

SEQ ID NO: 1412159 - RNA, 19 nt, Homo sapiens
  misc_RNA (1)...(19): siRNA sense strand
gaguuuaucugcuguauag

SEQ ID NO: 1412160 - RNA, 19 nt, Homo sapiens
  misc_RNA (1)...(19): siRNA sense strand
gcgcaggugucuuccauuu

SEQ ID NO: 1412161 - RNA, 19 nt, Homo sapiens
  misc_RNA (1)...(19): siRNA sense strand
gagacucuauuccgaugua

SEQ ID NO: 1412162 - RNA, 19 nt, Homo sapiens
  misc_RNA (1)...(19): siRNA sense strand
gcaggugucuuccauuuac

SEQ ID NO: 1412163 - RNA, 19 nt, Homo sapiens
  misc_RNA (1)...(19): siRNA sense strand
gggcaagggcgaaacuuaa

SEQ ID NO: 1412164 - RNA, 19 nt, Homo sapiens
  misc_RNA (1)...(19): siRNA sense strand
gaaggcaggagacucuauu

SEQ ID NO: 1412165 - RNA, 19 nt, Homo sapiens
  misc_RNA (1)...(19): siRNA sense strand
cuauuccgauguauaagaa

SEQ ID NO: 1412166 - RNA, 19 nt, Homo sapiens
  misc_RNA (1)...(19): siRNA sense strand
gauauucugagugucauaa

SEQ ID NO: 1412167 - RNA, 19 nt, Homo sapiens
  misc_RNA (1)...(19): siRNA sense strand
ggaguuuaucugcuguaua

SEQ ID NO: 1412168 - RNA, 19 nt, Homo sapiens
  misc_RNA (1)...(19): siRNA sense strand
cuuaaccucucuccacaug

SEQ ID NO: 1412169 - RNA, 19 nt, Homo sapiens
  misc_RNA (1)...(19): siRNA sense strand
ggaaggcaggagacucuau

SEQ ID NO: 1412170 - RNA, 19 nt, Homo sapiens
  misc_RNA (1)...(19): siRNA sense strand
acucuauuccgauguauaa

SEQ ID NO: 1412171 - RNA, 19 nt, Homo sapiens
  misc_RNA (1)...(19): siRNA sense strand
ugucuuccauuuacaccaa

SEQ ID NO: 1412172 - RNA, 19 nt, Homo sapiens
  misc_RNA (1)...(19): siRNA sense strand
cgggcaagggcgaaacuua

SEQ ID NO: 1412173 - RNA, 19 nt, Homo sapiens
  misc_RNA (1)...(19): siRNA sense strand
ccuacaggcccaaggauau

SEQ ID NO: 1412174 - RNA, 19 nt, Homo sapiens
  misc_RNA (1)...(19): siRNA sense strand
uagcgcaggugucuuccau

SEQ ID NO: 1412175 - RNA, 19 nt, Homo sapiens
  misc_RNA (1)...(19): siRNA sense strand
gccuacaacagcugcuaua

SEQ ID NO: 1412176 - RNA, 19 nt, Homo sapiens
  misc_RNA (1)...(19): siRNA sense strand
ggauauucugagugucaua

SEQ ID NO: 1412177 - RNA, 19 nt, Homo sapiens
  misc_RNA (1)...(19): siRNA sense strand
gauaugguguccgaaucca

SEQ ID NO: 1412178 - RNA, 19 nt, Homo sapiens
  misc_RNA (1)...(19): siRNA sense strand
cuauagcgcaggugucuuc

SEQ ID NO: 1412179 - RNA, 19 nt, Homo sapiens
  misc_RNA (1)...(19): siRNA sense strand
cagguggugucucgagaag

SEQ ID NO: 1412180 - RNA, 19 nt, Homo sapiens
  misc_RNA (1)...(19): siRNA sense strand
ggcgaaacuuaaccucucu

SEQ ID NO: 1412181 - RNA, 19 nt, Homo sapiens
  misc_RNA (1)...(19): siRNA sense strand
gacucuauuccgauguaua

SEQ ID NO: 1412182 - RNA, 19 nt, Homo sapiens
  misc_RNA (1)...(19): siRNA sense strand
cgcaggugucuuccauuua

SEQ ID NO: 1412183 - RNA, 19 nt, Homo sapiens
  misc_RNA (1)...(19): siRNA sense strand
gaguuuaucugcuguauag

SEQ ID NO: 1412184 - RNA, 19 nt, Homo sapiens
  misc_RNA (1)...(19): siRNA sense strand
gcgcaggugucuuccauuu

SEQ ID NO: 1412185 - RNA, 19 nt, Homo sapiens
  misc_RNA (1)...(19): siRNA sense strand
gagacucuauuccgaugua

SEQ ID NO: 1412186 - RNA, 19 nt, Homo sapiens
  misc_RNA (1)...(19): siRNA sense strand
gcaggugucuuccauuuac

SEQ ID NO: 1412187 - RNA, 19 nt, Homo sapiens
  misc_RNA (1)...(19): siRNA sense strand
gggcaagggcgaaacuuaa

SEQ ID NO: 1412188 - RNA, 19 nt, Homo sapiens
  misc_RNA (1)...(19): siRNA sense strand
gaaggcaggagacucuauu

SEQ ID NO: 1412189 - RNA, 19 nt, Homo sapiens
  misc_RNA (1)...(19): siRNA sense strand
cuauuccgauguauaagaa

SEQ ID NO: 1412190 - RNA, 19 nt, Homo sapiens
  misc_RNA (1)...(19): siRNA sense strand
gauauucugagugucauaa

SEQ ID NO: 1412191 - RNA, 19 nt, Homo sapiens
  misc_RNA (1)...(19): siRNA sense strand
ggaguuuaucugcuguaua

SEQ ID NO: 1412192 - RNA, 19 nt, Homo sapiens
  misc_RNA (1)...(19): siRNA sense strand
cuuaaccucucuccacaug

SEQ ID NO: 1412193 - RNA, 19 nt, Homo sapiens
  misc_RNA (1)...(19): siRNA sense strand
ggaaggcaggagacucuau

SEQ ID NO: 1412194 - RNA, 19 nt, Homo sapiens
  misc_RNA (1)...(19): siRNA sense strand
acucuauuccgauguauaa

SEQ ID NO: 1412195 - RNA, 19 nt, Homo sapiens
  misc_RNA (1)...(19): siRNA sense strand
ugucuuccauuuacaccaa

SEQ ID NO: 1412196 - RNA, 19 nt, Homo sapiens
  misc_RNA (1)...(19): siRNA sense strand
cgggcaagggcgaaacuua

SEQ ID NO: 1412197 - RNA, 19 nt, Homo sapiens
  misc_RNA (1)...(19): siRNA sense strand
ccuacaggcccaaggauau

SEQ ID NO: 1412198 - RNA, 19 nt, Homo sapiens
  misc_RNA (1)...(19): siRNA sense strand
uagcgcaggugucuuccau

SEQ ID NO: 1412199 - RNA, 19 nt, Homo sapiens
  misc_RNA (1)...(19): siRNA sense strand
gccuacaacagcugcuaua

SEQ ID NO: 1412200 - RNA, 19 nt, Homo sapiens
  misc_RNA (1)...(19): siRNA sense strand
ggauauucugagugucaua

SEQ ID NO: 1412201 - RNA, 19 nt, Homo sapiens
  misc_RNA (1)...(19): siRNA sense strand
gauaugguguccgaaucca

SEQ ID NO: 1412202 - RNA, 19 nt, Homo sapiens
  misc_RNA (1)...(19): siRNA sense strand
cuauagcgcaggugucuuc

SEQ ID NO: 1412203 - RNA, 19 nt, Homo sapiens
  misc_RNA (1)...(19): siRNA sense strand
cagguggugucucgagaag

SEQ ID NO: 1412204 - RNA, 19 nt, Homo sapiens
  misc_RNA (1)...(19): siRNA sense strand
ggcgaaacuuaaccucucu

SEQ ID NO: 1412205 - RNA, 19 nt, Homo sapiens
  misc_RNA (1)...(19): siRNA sense strand
gacucuauuccgauguaua

SEQ ID NO: 1412206 - RNA, 19 nt, Homo sapiens
  misc_RNA (1)...(19): siRNA sense strand
cgcaggugucuuccauuua

SEQ ID NO: 1412207 - RNA, 19 nt, Homo sapiens
  misc_RNA (1)...(19): siRNA sense strand
gaaagagcaugaugacaua

SEQ ID NO: 1412208 - RNA, 19 nt, Homo sapiens
  misc_RNA (1)...(19): siRNA sense strand
gaacagcucugaaagcauu

SEQ ID NO: 1412209 - RNA, 19 nt, Homo sapiens
  misc_RNA (1)...(19): siRNA sense strand
gagaagauguugaaaugua

SEQ ID NO: 1412210 - RNA, 19 nt, Homo sapiens
  misc_RNA (1)...(19): siRNA sense strand
gaggacagcuugaggguua

SEQ ID NO: 1412211 - RNA, 19 nt, Homo sapiens
  misc_RNA (1)...(19): siRNA sense strand
gaaacugaauggaagaaua

SEQ ID NO: 1412212 - RNA, 19 nt, Homo sapiens
  misc_RNA (1)...(19): siRNA sense strand
aaagaaggcuguaccguua

SEQ ID NO: 1412213 - RNA, 19 nt, Homo sapiens
  misc_RNA (1)...(19): siRNA sense strand
aaacacagcucuggaauaa

SEQ ID NO: 1412214 - RNA, 19 nt, Homo sapiens
  misc_RNA (1)...(19): siRNA sense strand
gaaauagaacuucgaauga

SEQ ID NO: 1412215 - RNA, 19 nt, Homo sapiens
  misc_RNA (1)...(19): siRNA sense strand
gcaaugauguggucuuguu

SEQ ID NO: 1412216 - RNA, 19 nt, Homo sapiens
  misc_RNA (1)...(19): siRNA sense strand
gaccauauccuuaaaugua

SEQ ID NO: 1412217 - RNA, 19 nt, Homo sapiens
  misc_RNA (1)...(19): siRNA sense strand
gcaaugggaugcagcuauu

SEQ ID NO: 1412218 - RNA, 19 nt, Homo sapiens
  misc_RNA (1)...(19): siRNA sense strand
cagcuuaucuugcaaguga

SEQ ID NO: 1412219 - RNA, 19 nt, Homo sapiens
  misc_RNA (1)...(19): siRNA sense strand
gaaguuaggcgauuagaga

SEQ ID NO: 1412220 - RNA, 19 nt, Homo sapiens
  misc_RNA (1)...(19): siRNA sense strand
gacaaaggcauucaucaua

SEQ ID NO: 1412221 - RNA, 19 nt, Homo sapiens
  misc_RNA (1)...(19): siRNA sense strand
gauccaagcuugauuaagg

SEQ ID NO: 1412222 - RNA, 19 nt, Homo sapiens
  misc_RNA (1)...(19): siRNA sense strand
ggaagaaaguauuaaacga

SEQ ID NO: 1412223 - RNA, 19 nt, Homo sapiens
  misc_RNA (1)...(19): siRNA sense strand
aaacagcucuaaaccauug

SEQ ID NO: 1412224 - RNA, 19 nt, Homo sapiens
  misc_RNA (1)...(19): siRNA sense strand
ugacauguauucugaaguu

SEQ ID NO: 1412225 - RNA, 19 nt, Homo sapiens
  misc_RNA (1)...(19): siRNA sense strand
gaagaccucaagaaaguua

SEQ ID NO: 1412226 - RNA, 19 nt, Homo sapiens
  misc_RNA (1)...(19): siRNA sense strand
gcugaacgcaguauuguua

SEQ ID NO: 1412227 - RNA, 19 nt, Homo sapiens
  misc_RNA (1)...(19): siRNA sense strand
gauggugcuuguugacuua

SEQ ID NO: 1412228 - RNA, 19 nt, Homo sapiens
  misc_RNA (1)...(19): siRNA sense strand
ggacauccuuucagcaguu

SEQ ID NO: 1412229 - RNA, 19 nt, Homo sapiens
  misc_RNA (1)...(19): siRNA sense strand
gaaacacagcucuggaaua

SEQ ID NO: 1412230 - RNA, 19 nt, Homo sapiens
  misc_RNA (1)...(19): siRNA sense strand
ggaaauccuucaacaaucu

SEQ ID NO: 1412231 - RNA, 19 nt, Homo sapiens
  misc_RNA (1)...(19): siRNA sense strand
gcagauaauugaaggaaag

SEQ ID NO: 1412232 - RNA, 19 nt, Homo sapiens
  misc_RNA (1)...(19): siRNA sense strand
ugaaagcauugaagcuaua

SEQ ID NO: 1412233 - RNA, 19 nt, Homo sapiens
  misc_RNA (1)...(19): siRNA sense strand
ggaaagagcaugaugacau

SEQ ID NO: 1412234 - RNA, 19 nt, Homo sapiens
  misc_RNA (1)...(19): siRNA sense strand
ucacgaagcauuuaucauu

SEQ ID NO: 1412235 - RNA, 19 nt, Homo sapiens
  misc_RNA (1)...(19): siRNA sense strand
gcaguucucuucucugaca

SEQ ID NO: 1412236 - RNA, 19 nt, Homo sapiens
  misc_RNA (1)...(19): siRNA sense strand
uuaaagagguauuggaaga

SEQ ID NO: 1412237 - RNA, 19 nt, Homo sapiens
  misc_RNA (1)...(19): siRNA sense strand
aaacugaaauucucuccaa

SEQ ID NO: 1412238 - RNA, 19 nt, Homo sapiens
  misc_RNA (1)...(19): siRNA sense strand
ggcaacaacuuacaaauac

SEQ ID NO: 1412239 - RNA, 19 nt, Homo sapiens
  misc_RNA (1)...(19): siRNA sense strand
gaagaccgauccauaucug

SEQ ID NO: 1412240 - RNA, 19 nt, Homo sapiens
  misc_RNA (1)...(19): siRNA sense strand
ugaccggaaugaacuauuu

SEQ ID NO: 1412241 - RNA, 19 nt, Homo sapiens
  misc_RNA (1)...(19): siRNA sense strand
caaugaaagcuuuagguua

SEQ ID NO: 1412242 - RNA, 19 nt, Homo sapiens
  misc_RNA (1)...(19): siRNA sense strand
ggaccuuagugaauauaaa

SEQ ID NO: 1412243 - RNA, 19 nt, Homo sapiens
  misc_RNA (1)...(19): siRNA sense strand
ggaaauugaugaguauauc

SEQ ID NO: 1412244 - RNA, 19 nt, Homo sapiens
  misc_RNA (1)...(19): siRNA sense strand
cggaagaccucaagaaagu

SEQ ID NO: 1412245 - RNA, 19 nt, Homo sapiens
  misc_RNA (1)...(19): siRNA sense strand
gcaucaaguuuauagaaga

SEQ ID NO: 1412246 - RNA, 19 nt, Homo sapiens
  misc_RNA (1)...(19): siRNA sense strand
gcacccagcuuaucuugca

SEQ ID NO: 1412247 - RNA, 19 nt, Homo sapiens
  misc_RNA (1)...(19): siRNA sense strand
ggaagaaucggacccaaga

SEQ ID NO: 1412248 - RNA, 19 nt, Homo sapiens
  misc_RNA (1)...(19): siRNA sense strand
ugaaauccuugaugaaguu

SEQ ID NO: 1412249 - RNA, 19 nt, Homo sapiens
  misc_RNA (1)...(19): siRNA sense strand
gcugauaguuucaaagcaa

SEQ ID NO: 1412250 - RNA, 19 nt, Homo sapiens
  misc_RNA (1)...(19): siRNA sense strand
gagaccauauccuuaaaug

SEQ ID NO: 1412251 - RNA, 19 nt, Homo sapiens
  misc_RNA (1)...(19): siRNA sense strand
uaaagaggccguuaaggaa

SEQ ID NO: 1412252 - RNA, 19 nt, Homo sapiens
  misc_RNA (1)...(19): siRNA sense strand
guagauccaagcuugauua

SEQ ID NO: 1412253 - RNA, 19 nt, Homo sapiens
  misc_RNA (1)...(19): siRNA sense strand
uggagaagauguugaaaug

SEQ ID NO: 1412254 - RNA, 19 nt, Homo sapiens
  misc_RNA (1)...(19): siRNA sense strand
cagcaguucucuucucuga

SEQ ID NO: 1412255 - RNA, 19 nt, Homo sapiens
  misc_RNA (1)...(19): siRNA sense strand
gaugacacguucuccaguu

SEQ ID NO: 1412256 - RNA, 19 nt, Homo sapiens
  misc_RNA (1)...(19): siRNA sense strand
caaaggcauucaucauaga

SEQ ID NO: 1412257 - RNA, 19 nt, Homo sapiens
  misc_RNA (1)...(19): siRNA sense strand
gauaugauaccggaccuua

SEQ ID NO: 1412258 - RNA, 19 nt, Homo sapiens
  misc_RNA (1)...(19): siRNA sense strand
gggaugcagcuauuuauuu

SEQ ID NO: 1412259 - RNA, 19 nt, Homo sapiens
  misc_RNA (1)...(19): siRNA sense strand
ccaagugacuacaagaaau

SEQ ID NO: 1412260 - RNA, 19 nt, Homo sapiens
  misc_RNA (1)...(19): siRNA sense strand
ugauugacauguauucuga

SEQ ID NO: 1412261 - RNA, 19 nt, Homo sapiens
  misc_RNA (1)...(19): siRNA sense strand
uaauaaagcaguagagguu

SEQ ID NO: 1412262 - RNA, 19 nt, Homo sapiens
  misc_RNA (1)...(19): siRNA sense strand
cauugaagcuauaagagaa

SEQ ID NO: 1412263 - RNA, 19 nt, Homo sapiens
  misc_RNA (1)...(19): siRNA sense strand
ggauucagcagauaauuga

SEQ ID NO: 1412264 - RNA, 19 nt, Homo sapiens
  misc_RNA (1)...(19): siRNA sense strand
aaacuucgcuaucucauac

SEQ ID NO: 1412265 - RNA, 19 nt, Homo sapiens
  misc_RNA (1)...(19): siRNA sense strand
acaaugaaaccaagaauga

SEQ ID NO: 1412266 - RNA, 19 nt, Homo sapiens
  misc_RNA (1)...(19): siRNA sense strand
caaauggacccucauggaa

SEQ ID NO: 1412267 - RNA, 19 nt, Homo sapiens
  misc_RNA (1)...(19): siRNA sense strand
ugaaauagaacuucgaaug

SEQ ID NO: 1412268 - RNA, 19 nt, Homo sapiens
  misc_RNA (1)...(19): siRNA sense strand
uaccggaccuuagugaaua

SEQ ID NO: 1412269 - RNA, 19 nt, Homo sapiens
  misc_RNA (1)...(19): siRNA sense strand
gggaacagcucugaaagca

SEQ ID NO: 1412270 - RNA, 19 nt, Homo sapiens
  misc_RNA (1)...(19): siRNA sense strand
ugacaaaccuuccuuuacg

SEQ ID NO: 1412271 - RNA, 19 nt, Homo sapiens
  misc_RNA (1)...(19): siRNA sense strand
gaacaacaggcugauaguu

SEQ ID NO: 1412272 - RNA, 19 nt, Homo sapiens
  misc_RNA (1)...(19): siRNA sense strand
gauguucucucugauuaug

SEQ ID NO: 1412273 - RNA, 19 nt, Homo sapiens
  misc_RNA (1)...(19): siRNA sense strand
gcauuuaucauucacauca

SEQ ID NO: 1412274 - RNA, 19 nt, Homo sapiens
  misc_RNA (1)...(19): siRNA sense strand
ggaugcagcuauuuauuuu

SEQ ID NO: 1412275 - RNA, 19 nt, Homo sapiens
  misc_RNA (1)...(19): siRNA sense strand
gaacuugaccggaaugaac

SEQ ID NO: 1412276 - RNA, 19 nt, Homo sapiens
  misc_RNA (1)...(19): siRNA sense strand
ggauggugcuuguugacuu

SEQ ID NO: 1412277 - RNA, 19 nt, Homo sapiens
  misc_RNA (1)...(19): siRNA sense strand
acaaaggcauucaucauag

SEQ ID NO: 1412278 - RNA, 19 nt, Homo sapiens
  misc_RNA (1)...(19): siRNA sense strand
acacucaguugaaguauca

SEQ ID NO: 1412279 - RNA, 19 nt, Homo sapiens
  misc_RNA (1)...(19): siRNA sense strand
gaaagugacaagcauuuua

SEQ ID NO: 1412280 - RNA, 19 nt, Homo sapiens
  misc_RNA (1)...(19): siRNA sense strand
gacauugugugggaaauug

SEQ ID NO: 1412281 - RNA, 19 nt, Homo sapiens
  misc_RNA (1)...(19): siRNA sense strand
ggaaguuuaccacuacaaa

SEQ ID NO: 1412282 - RNA, 19 nt, Homo sapiens
  misc_RNA (1)...(19): siRNA sense strand
gcucgaauauucccaagag

SEQ ID NO: 1412283 - RNA, 19 nt, Homo sapiens
  misc_RNA (1)...(19): siRNA sense strand
gaaagaugacaaaggcauu

SEQ ID NO: 1412284 - RNA, 19 nt, Homo sapiens
  misc_RNA (1)...(19): siRNA sense strand
uugauguucucucugauua

SEQ ID NO: 1412285 - RNA, 19 nt, Homo sapiens
  misc_RNA (1)...(19): siRNA sense strand
aaagagguauuggaagauu

SEQ ID NO: 1412286 - RNA, 19 nt, Homo sapiens
  misc_RNA (1)...(19): siRNA sense strand
gggagacccuacaagaaga

SEQ ID NO: 1412287 - RNA, 19 nt, Homo sapiens
  misc_RNA (1)...(19): siRNA sense strand
gaauccuaaugccaucaua

SEQ ID NO: 1412288 - RNA, 19 nt, Homo sapiens
  misc_RNA (1)...(19): siRNA sense strand
agaagaucuugcagcauua

SEQ ID NO: 1412289 - RNA, 19 nt, Homo sapiens
  misc_RNA (1)...(19): siRNA sense strand
caucauagaaagcuuaaga

SEQ ID NO: 1412290 - RNA, 19 nt, Homo sapiens
  misc_RNA (1)...(19): siRNA sense strand
gaagaauuuucccgcuuua

SEQ ID NO: 1412291 - RNA, 19 nt, Homo sapiens
  misc_RNA (1)...(19): siRNA sense strand
caguggauaucaagcuuaa

SEQ ID NO: 1412292 - RNA, 19 nt, Homo sapiens
  misc_RNA (1)...(19): siRNA sense strand
gcauugaagcuauaagaga

SEQ ID NO: 1412293 - RNA, 19 nt, Homo sapiens
  misc_RNA (1)...(19): siRNA sense strand
gaaagcucuucccaaugaa

SEQ ID NO: 1412294 - RNA, 19 nt, Homo sapiens
  misc_RNA (1)...(19): siRNA sense strand
ugacuuaccaggugugauu

SEQ ID NO: 1412295 - RNA, 19 nt, Homo sapiens
  misc_RNA (1)...(19): siRNA sense strand
ggaaaugauugcccaagcu

SEQ ID NO: 1412296 - RNA, 19 nt, Homo sapiens
  misc_RNA (1)...(19): siRNA sense strand
acacagcucuggaauaaaa

SEQ ID NO: 1412297 - RNA, 19 nt, Homo sapiens
  misc_RNA (1)...(19): siRNA sense strand
ugugggaaauugaugagua

SEQ ID NO: 1412298 - RNA, 19 nt, Homo sapiens
  misc_RNA (1)...(19): siRNA sense strand
cuaaaccauuguaaccuuu

SEQ ID NO: 1412299 - RNA, 19 nt, Homo sapiens
  misc_RNA (1)...(19): siRNA sense strand
agagcaugaugacauauuu

SEQ ID NO: 1412300 - RNA, 19 nt, Homo sapiens
  misc_RNA (1)...(19): siRNA sense strand
caacucaugugauugaaaa

SEQ ID NO: 1412301 - RNA, 19 nt, Homo sapiens
  misc_RNA (1)...(19): siRNA sense strand
caagugacuacaagaaauu

SEQ ID NO: 1412302 - RNA, 19 nt, Homo sapiens
  misc_RNA (1)...(19): siRNA sense strand
gcuaaaggcacaccaagug

SEQ ID NO: 1412303 - RNA, 19 nt, Homo sapiens
  misc_RNA (1)...(19): siRNA sense strand
gagaauaugaagaagaguu

SEQ ID NO: 1412304 - RNA, 19 nt, Homo sapiens
  misc_RNA (1)...(19): siRNA sense strand
gcaguauuguuacagacuu

SEQ ID NO: 1412305 - RNA, 19 nt, Homo sapiens
  misc_RNA (1)...(19): siRNA sense strand
uggaaagacuaguguguug

SEQ ID NO: 1412306 - RNA, 19 nt, Homo sapiens
  misc_RNA (1)...(19): siRNA sense strand
ggagaacaaagaauugaga

SEQ ID NO: 1412307 - RNA, 19 nt, Homo sapiens
  misc_RNA (1)...(19): siRNA sense strand
gaaagagcaugaugacaua

SEQ ID NO: 1412308 - RNA, 19 nt, Homo sapiens
  misc_RNA (1)...(19): siRNA sense strand
gaacagcucugaaagcauu

SEQ ID NO: 1412309 - RNA, 19 nt, Homo sapiens
  misc_RNA (1)...(19): siRNA sense strand
gagaagauguugaaaugua

SEQ ID NO: 1412310 - RNA, 19 nt, Homo sapiens
  misc_RNA (1)...(19): siRNA sense strand
gaggacagcuugaggguua

SEQ ID NO: 1412311 - RNA, 19 nt, Homo sapiens
  misc_RNA (1)...(19): siRNA sense strand
gaaacugaauggaagaaua

SEQ ID NO: 1412312 - RNA, 19 nt, Homo sapiens
  misc_RNA (1)...(19): siRNA sense strand
aaagaaggcuguaccguua

SEQ ID NO: 1412313 - RNA, 19 nt, Homo sapiens
  misc_RNA (1)...(19): siRNA sense strand
aaacacagcucuggaauaa

SEQ ID NO: 1412314 - RNA, 19 nt, Homo sapiens
  misc_RNA (1)...(19): siRNA sense strand
gaaauagaacuucgaauga

SEQ ID NO: 1412315 - RNA, 19 nt, Homo sapiens
  misc_RNA (1)...(19): siRNA sense strand
gcaaugauguggucuuguu

SEQ ID NO: 1412316 - RNA, 19 nt, Homo sapiens
  misc_RNA (1)...(19): siRNA sense strand
gaccauauccuuaaaugua

SEQ ID NO: 1412317 - RNA, 19 nt, Homo sapiens
  misc_RNA (1)...(19): siRNA sense strand
gcaaugggaugcagcuauu

SEQ ID NO: 1412318 - RNA, 19 nt, Homo sapiens
  misc_RNA (1)...(19): siRNA sense strand
cagcuuaucuugcaaguga

SEQ ID NO: 1412319 - RNA, 19 nt, Homo sapiens
  misc_RNA (1)...(19): siRNA sense strand
gaaguuaggcgauuagaga

SEQ ID NO: 1412320 - RNA, 19 nt, Homo sapiens
  misc_RNA (1)...(19): siRNA sense strand
gacaaaggcauucaucaua

SEQ ID NO: 1412321 - RNA, 19 nt, Homo sapiens
  misc_RNA (1)...(19): siRNA sense strand
gauccaagcuugauuaagg

SEQ ID NO: 1412322 - RNA, 19 nt, Homo sapiens
  misc_RNA (1)...(19): siRNA sense strand
ggaagaaaguauuaaacga

SEQ ID NO: 1412323 - RNA, 19 nt, Homo sapiens
  misc_RNA (1)...(19): siRNA sense strand
aaacagcucuaaaccauug

SEQ ID NO: 1412324 - RNA, 19 nt, Homo sapiens
  misc_RNA (1)...(19): siRNA sense strand
ugacauguauucugaaguu

SEQ ID NO: 1412325 - RNA, 19 nt, Homo sapiens
  misc_RNA (1)...(19): siRNA sense strand
gaagaccucaagaaaguua

SEQ ID NO: 1412326 - RNA, 19 nt, Homo sapiens
  misc_RNA (1)...(19): siRNA sense strand
gcugaacgcaguauuguua

SEQ ID NO: 1412327 - RNA, 19 nt, Homo sapiens
  misc_RNA (1)...(19): siRNA sense strand
gauggugcuuguugacuua

SEQ ID NO: 1412328 - RNA, 19 nt, Homo sapiens
  misc_RNA (1)...(19): siRNA sense strand
ggacauccuuucagcaguu

SEQ ID NO: 1412329 - RNA, 19 nt, Homo sapiens
  misc_RNA (1)...(19): siRNA sense strand
gaaacacagcucuggaaua

SEQ ID NO: 1412330 - RNA, 19 nt, Homo sapiens
  misc_RNA (1)...(19): siRNA sense strand
ggaaauccuucaacaaucu

SEQ ID NO: 1412331 - RNA, 19 nt, Homo sapiens
  misc_RNA (1)...(19): siRNA sense strand
gcagauaauugaaggaaag

SEQ ID NO: 1412332 - RNA, 19 nt, Homo sapiens
  misc_RNA (1)...(19): siRNA sense strand
ugaaagcauugaagcuaua

SEQ ID NO: 1412333 - RNA, 19 nt, Homo sapiens
  misc_RNA (1)...(19): siRNA sense strand
ggaaagagcaugaugacau

SEQ ID NO: 1412334 - RNA, 19 nt, Homo sapiens
  misc_RNA (1)...(19): siRNA sense strand
ucacgaagcauuuaucauu

SEQ ID NO: 1412335 - RNA, 19 nt, Homo sapiens
  misc_RNA (1)...(19): siRNA sense strand
gcaguucucuucucugaca

SEQ ID NO: 1412336 - RNA, 19 nt, Homo sapiens
  misc_RNA (1)...(19): siRNA sense strand
uuaaagagguauuggaaga

SEQ ID NO: 1412337 - RNA, 19 nt, Homo sapiens
  misc_RNA (1)...(19): siRNA sense strand
aaacugaaauucucuccaa

SEQ ID NO: 1412338 - RNA, 19 nt, Homo sapiens
  misc_RNA (1)...(19): siRNA sense strand
ggcaacaacuuacaaauac

SEQ ID NO: 1412339 - RNA, 19 nt, Homo sapiens
  misc_RNA (1)...(19): siRNA sense strand
gaagaccgauccauaucug

SEQ ID NO: 1412340 - RNA, 19 nt, Homo sapiens
  misc_RNA (1)...(19): siRNA sense strand
ugaccggaaugaacuauuu

SEQ ID NO: 1412341 - RNA, 19 nt, Homo sapiens
  misc_RNA (1)...(19): siRNA sense strand
caaugaaagcuuuagguua

SEQ ID NO: 1412342 - RNA, 19 nt, Homo sapiens
  misc_RNA (1)...(19): siRNA sense strand
ggaccuuagugaauauaaa

SEQ ID NO: 1412343 - RNA, 19 nt, Homo sapiens
  misc_RNA (1)...(19): siRNA sense strand
ggaaauugaugaguauauc

SEQ ID NO: 1412344 - RNA, 19 nt, Homo sapiens
  misc_RNA (1)...(19): siRNA sense strand
cggaagaccucaagaaagu

SEQ ID NO: 1412345 - RNA, 19 nt, Homo sapiens
  misc_RNA (1)...(19): siRNA sense strand
gcaucaaguuuauagaaga

SEQ ID NO: 1412346 - RNA, 19 nt, Homo sapiens
  misc_RNA (1)...(19): siRNA sense strand
gcacccagcuuaucuugca

SEQ ID NO: 1412347 - RNA, 19 nt, Homo sapiens
  misc_RNA (1)...(19): siRNA sense strand
ggaagaaucggacccaaga

SEQ ID NO: 1412348 - RNA, 19 nt, Homo sapiens
  misc_RNA (1)...(19): siRNA sense strand
ugaaauccuugaugaaguu

SEQ ID NO: 1412349 - RNA, 19 nt, Homo sapiens
  misc_RNA (1)...(19): siRNA sense strand
gcugauaguuucaaagcaa

SEQ ID NO: 1412350 - RNA, 19 nt, Homo sapiens
  misc_RNA (1)...(19): siRNA sense strand
gagaccauauccuuaaaug

SEQ ID NO: 1412351 - RNA, 19 nt, Homo sapiens
  misc_RNA (1)...(19): siRNA sense strand
uaaagaggccguuaaggaa

SEQ ID NO: 1412352 - RNA, 19 nt, Homo sapiens
  misc_RNA (1)...(19): siRNA sense strand
guagauccaagcuugauua

SEQ ID NO: 1412353 - RNA, 19 nt, Homo sapiens
  misc_RNA (1)...(19): siRNA sense strand
uggagaagauguugaaaug

SEQ ID NO: 1412354 - RNA, 19 nt, Homo sapiens
  misc_RNA (1)...(19): siRNA sense strand
cagcaguucucuucucuga

SEQ ID NO: 1412355 - RNA, 19 nt, Homo sapiens
  misc_RNA (1)...(19): siRNA sense strand
gaugacacguucuccaguu

SEQ ID NO: 1412356 - RNA, 19 nt, Homo sapiens
  misc_RNA (1)...(19): siRNA sense strand
caaaggcauucaucauaga

SEQ ID NO: 1412357 - RNA, 19 nt, Homo sapiens
  misc_RNA (1)...(19): siRNA sense strand
gauaugauaccggaccuua

SEQ ID NO: 1412358 - RNA, 19 nt, Homo sapiens
  misc_RNA (1)...(19): siRNA sense strand
gggaugcagcuauuuauuu

SEQ ID NO: 1412359 - RNA, 19 nt, Homo sapiens
  misc_RNA (1)...(19): siRNA sense strand
ccaagugacuacaagaaau

SEQ ID NO: 1412360 - RNA, 19 nt, Homo sapiens
  misc_RNA (1)...(19): siRNA sense strand
ugauugacauguauucuga

SEQ ID NO: 1412361 - RNA, 19 nt, Homo sapiens
  misc_RNA (1)...(19): siRNA sense strand
uaauaaagcaguagagguu

SEQ ID NO: 1412362 - RNA, 19 nt, Homo sapiens
  misc_RNA (1)...(19): siRNA sense strand
cauugaagcuauaagagaa

SEQ ID NO: 1412363 - RNA, 19 nt, Homo sapiens
  misc_RNA (1)...(19): siRNA sense strand
ggauucagcagauaauuga

SEQ ID NO: 1412364 - RNA, 19 nt, Homo sapiens
  misc_RNA (1)...(19): siRNA sense strand
aaacuucgcuaucucauac

SEQ ID NO: 1412365 - RNA, 19 nt, Homo sapiens
  misc_RNA (1)...(19): siRNA sense strand
acaaugaaaccaagaauga

SEQ ID NO: 1412366 - RNA, 19 nt, Homo sapiens
  misc_RNA (1)...(19): siRNA sense strand
caaauggacccucauggaa

SEQ ID NO: 1412367 - RNA, 19 nt, Homo sapiens
  misc_RNA (1)...(19): siRNA sense strand
ugaaauagaacuucgaaug

SEQ ID NO: 1412368 - RNA, 19 nt, Homo sapiens
  misc_RNA (1)...(19): siRNA sense strand
uaccggaccuuagugaaua

SEQ ID NO: 1412369 - RNA, 19 nt, Homo sapiens
  misc_RNA (1)...(19): siRNA sense strand
gggaacagcucugaaagca

SEQ ID NO: 1412370 - RNA, 19 nt, Homo sapiens
  misc_RNA (1)...(19): siRNA sense strand
ugacaaaccuuccuuuacg

SEQ ID NO: 1412371 - RNA, 19 nt, Homo sapiens
  misc_RNA (1)...(19): siRNA sense strand
gaacaacaggcugauaguu

SEQ ID NO: 1412372 - RNA, 19 nt, Homo sapiens
  misc_RNA (1)...(19): siRNA sense strand
gauguucucucugauuaug

SEQ ID NO: 1412373 - RNA, 19 nt, Homo sapiens
  misc_RNA (1)...(19): siRNA sense strand
gcauuuaucauucacauca

SEQ ID NO: 1412374 - RNA, 19 nt, Homo sapiens
  misc_RNA (1)...(19): siRNA sense strand
ggaugcagcuauuuauuuu

SEQ ID NO: 1412375 - RNA, 19 nt, Homo sapiens
  misc_RNA (1)...(19): siRNA sense strand
gaacuugaccggaaugaac

SEQ ID NO: 1412376 - RNA, 19 nt, Homo sapiens
  misc_RNA (1)...(19): siRNA sense strand
ggauggugcuuguugacuu

SEQ ID NO: 1412377 - RNA, 19 nt, Homo sapiens
  misc_RNA (1)...(19): siRNA sense strand
acaaaggcauucaucauag

SEQ ID NO: 1412378 - RNA, 19 nt, Homo sapiens
  misc_RNA (1)...(19): siRNA sense strand
acacucaguugaaguauca

SEQ ID NO: 1412379 - RNA, 19 nt, Homo sapiens
  misc_RNA (1)...(19): siRNA sense strand
gaaagugacaagcauuuua

SEQ ID NO: 1412380 - RNA, 19 nt, Homo sapiens
  misc_RNA (1)...(19): siRNA sense strand
gacauugugugggaaauug

SEQ ID NO: 1412381 - RNA, 19 nt, Homo sapiens
  misc_RNA (1)...(19): siRNA sense strand
ggaaguuuaccacuacaaa

SEQ ID NO: 1412382 - RNA, 19 nt, Homo sapiens
  misc_RNA (1)...(19): siRNA sense strand
gcucgaauauucccaagag

SEQ ID NO: 1412383 - RNA, 19 nt, Homo sapiens
  misc_RNA (1)...(19): siRNA sense strand
gaaagaugacaaaggcauu

SEQ ID NO: 1412384 - RNA, 19 nt, Homo sapiens
  misc_RNA (1)...(19): siRNA sense strand
uugauguucucucugauua

SEQ ID NO: 1412385 - RNA, 19 nt, Homo sapiens
  misc_RNA (1)...(19): siRNA sense strand
aaagagguauuggaagauu

SEQ ID NO: 1412386 - RNA, 19 nt, Homo sapiens
  misc_RNA (1)...(19): siRNA sense strand
gggagacccuacaagaaga

SEQ ID NO: 1412387 - RNA, 19 nt, Homo sapiens
  misc_RNA (1)...(19): siRNA sense strand
gaauccuaaugccaucaua

SEQ ID NO: 1412388 - RNA, 19 nt, Homo sapiens
  misc_RNA (1)...(19): siRNA sense strand
agaagaucuugcagcauua

SEQ ID NO: 1412389 - RNA, 19 nt, Homo sapiens
  misc_RNA (1)...(19): siRNA sense strand
caucauagaaagcuuaaga

SEQ ID NO: 1412390 - RNA, 19 nt, Homo sapiens
  misc_RNA (1)...(19): siRNA sense strand
gaagaauuuucccgcuuua

SEQ ID NO: 1412391 - RNA, 19 nt, Homo sapiens
  misc_RNA (1)...(19): siRNA sense strand
caguggauaucaagcuuaa

SEQ ID NO: 1412392 - RNA, 19 nt, Homo sapiens
  misc_RNA (1)...(19): siRNA sense strand
gcauugaagcuauaagaga

SEQ ID NO: 1412393 - RNA, 19 nt, Homo sapiens
  misc_RNA (1)...(19): siRNA sense strand
gaaagcucuucccaaugaa

SEQ ID NO: 1412394 - RNA, 19 nt, Homo sapiens
  misc_RNA (1)...(19): siRNA sense strand
ugacuuaccaggugugauu

SEQ ID NO: 1412395 - RNA, 19 nt, Homo sapiens
  misc_RNA (1)...(19): siRNA sense strand
ggaaaugauugcccaagcu

SEQ ID NO: 1412396 - RNA, 19 nt, Homo sapiens
  misc_RNA (1)...(19): siRNA sense strand
acacagcucuggaauaaaa

SEQ ID NO: 1412397 - RNA, 19 nt, Homo sapiens
  misc_RNA (1)...(19): siRNA sense strand
ugugggaaauugaugagua

SEQ ID NO: 1412398 - RNA, 19 nt, Homo sapiens
  misc_RNA (1)...(19): siRNA sense strand
cuaaaccauuguaaccuuu

SEQ ID NO: 1412399 - RNA, 19 nt, Homo sapiens
  misc_RNA (1)...(19): siRNA sense strand
agagcaugaugacauauuu

SEQ ID NO: 1412400 - RNA, 19 nt, Homo sapiens
  misc_RNA (1)...(19): siRNA sense strand
caacucaugugauugaaaa

SEQ ID NO: 1412401 - RNA, 19 nt, Homo sapiens
  misc_RNA (1)...(19): siRNA sense strand
caagugacuacaagaaauu

SEQ ID NO: 1412402 - RNA, 19 nt, Homo sapiens
  misc_RNA (1)...(19): siRNA sense strand
gcuaaaggcacaccaagug

SEQ ID NO: 1412403 - RNA, 19 nt, Homo sapiens
  misc_RNA (1)...(19): siRNA sense strand
gagaauaugaagaagaguu

SEQ ID NO: 1412404 - RNA, 19 nt, Homo sapiens
  misc_RNA (1)...(19): siRNA sense strand
gcaguauuguuacagacuu

SEQ ID NO: 1412405 - RNA, 19 nt, Homo sapiens
  misc_RNA (1)...(19): siRNA sense strand
uggaaagacuaguguguug

SEQ ID NO: 1412406 - RNA, 19 nt, Homo sapiens
  misc_RNA (1)...(19): siRNA sense strand
ggagaacaaagaauugaga

SEQ ID NO: 1412407 - RNA, 19 nt, Homo sapiens
  misc_RNA (1)...(19): siRNA sense strand
gaaagagcaugaugacaua

SEQ ID NO: 1412408 - RNA, 19 nt, Homo sapiens
  misc_RNA (1)...(19): siRNA sense strand
gaacagcucugaaagcauu

SEQ ID NO: 1412409 - RNA, 19 nt, Homo sapiens
  misc_RNA (1)...(19): siRNA sense strand
gagaagauguugaaaugua

SEQ ID NO: 1412410 - RNA, 19 nt, Homo sapiens
  misc_RNA (1)...(19): siRNA sense strand
gaggacagcuugaggguua

SEQ ID NO: 1412411 - RNA, 19 nt, Homo sapiens
  misc_RNA (1)...(19): siRNA sense strand
gaaacugaauggaagaaua

SEQ ID NO: 1412412 - RNA, 19 nt, Homo sapiens
  misc_RNA (1)...(19): siRNA sense strand
aaagaaggcuguaccguua

SEQ ID NO: 1412413 - RNA, 19 nt, Homo sapiens
  misc_RNA (1)...(19): siRNA sense strand
aaacacagcucuggaauaa

SEQ ID NO: 1412414 - RNA, 19 nt, Homo sapiens
  misc_RNA (1)...(19): siRNA sense strand
gaaauagaacuucgaauga

SEQ ID NO: 1412415 - RNA, 19 nt, Homo sapiens
  misc_RNA (1)...(19): siRNA sense strand
gcaaugauguggucuuguu

SEQ ID NO: 1412416 - RNA, 19 nt, Homo sapiens
  misc_RNA (1)...(19): siRNA sense strand
gaccauauccuuaaaugua

SEQ ID NO: 1412417 - RNA, 19 nt, Homo sapiens
  misc_RNA (1)...(19): siRNA sense strand
gcaaugggaugcagcuauu

SEQ ID NO: 1412418 - RNA, 19 nt, Homo sapiens
  misc_RNA (1)...(19): siRNA sense strand
cagcuuaucuugcaaguga

SEQ ID NO: 1412419 - RNA, 19 nt, Homo sapiens
  misc_RNA (1)...(19): siRNA sense strand
gaaguuaggcgauuagaga

SEQ ID NO: 1412420 - RNA, 19 nt, Homo sapiens
  misc_RNA (1)...(19): siRNA sense strand
gacaaaggcauucaucaua

SEQ ID NO: 1412421 - RNA, 19 nt, Homo sapiens
  misc_RNA (1)...(19): siRNA sense strand
gauccaagcuugauuaagg

SEQ ID NO: 1412422 - RNA, 19 nt, Homo sapiens
  misc_RNA (1)...(19): siRNA sense strand
ggaagaaaguauuaaacga

SEQ ID NO: 1412423 - RNA, 19 nt, Homo sapiens
  misc_RNA (1)...(19): siRNA sense strand
aaacagcucuaaaccauug

SEQ ID NO: 1412424 - RNA, 19 nt, Homo sapiens
  misc_RNA (1)...(19): siRNA sense strand
ugacauguauucugaaguu

SEQ ID NO: 1412425 - RNA, 19 nt, Homo sapiens
  misc_RNA (1)...(19): siRNA sense strand
gaagaccucaagaaaguua

SEQ ID NO: 1412426 - RNA, 19 nt, Homo sapiens
  misc_RNA (1)...(19): siRNA sense strand
gcugaacgcaguauuguua

SEQ ID NO: 1412427 - RNA, 19 nt, Homo sapiens
  misc_RNA (1)...(19): siRNA sense strand
gauggugcuuguugacuua

SEQ ID NO: 1412428 - RNA, 19 nt, Homo sapiens
  misc_RNA (1)...(19): siRNA sense strand
ggacauccuuucagcaguu

SEQ ID NO: 1412429 - RNA, 19 nt, Homo sapiens
  misc_RNA (1)...(19): siRNA sense strand
gaaacacagcucuggaaua

SEQ ID NO: 1412430 - RNA, 19 nt, Homo sapiens
  misc_RNA (1)...(19): siRNA sense strand
ggaaauccuucaacaaucu

SEQ ID NO: 1412431 - RNA, 19 nt, Homo sapiens
  misc_RNA (1)...(19): siRNA sense strand
gcagauaauugaaggaaag

SEQ ID NO: 1412432 - RNA, 19 nt, Homo sapiens
  misc_RNA (1)...(19): siRNA sense strand
ugaaagcauugaagcuaua

SEQ ID NO: 1412433 - RNA, 19 nt, Homo sapiens
  misc_RNA (1)...(19): siRNA sense strand
ggaaagagcaugaugacau

SEQ ID NO: 1412434 - RNA, 19 nt, Homo sapiens
  misc_RNA (1)...(19): siRNA sense strand
ucacgaagcauuuaucauu

SEQ ID NO: 1412435 - RNA, 19 nt, Homo sapiens
  misc_RNA (1)...(19): siRNA sense strand
gcaguucucuucucugaca

SEQ ID NO: 1412436 - RNA, 19 nt, Homo sapiens
  misc_RNA (1)...(19): siRNA sense strand
uuaaagagguauuggaaga

SEQ ID NO: 1412437 - RNA, 19 nt, Homo sapiens
  misc_RNA (1)...(19): siRNA sense strand
aaacugaaauucucuccaa

SEQ ID NO: 1412438 - RNA, 19 nt, Homo sapiens
  misc_RNA (1)...(19): siRNA sense strand
ggcaacaacuuacaaauac

SEQ ID NO: 1412439 - RNA, 19 nt, Homo sapiens
  misc_RNA (1)...(19): siRNA sense strand
gaagaccgauccauaucug

SEQ ID NO: 1412440 - RNA, 19 nt, Homo sapiens
  misc_RNA (1)...(19): siRNA sense strand
ugaccggaaugaacuauuu

SEQ ID NO: 1412441 - RNA, 19 nt, Homo sapiens
  misc_RNA (1)...(19): siRNA sense strand
caaugaaagcuuuagguua

SEQ ID NO: 1412442 - RNA, 19 nt, Homo sapiens
  misc_RNA (1)...(19): siRNA sense strand
ggaccuuagugaauauaaa

SEQ ID NO: 1412443 - RNA, 19 nt, Homo sapiens
  misc_RNA (1)...(19): siRNA sense strand
ggaaauugaugaguauauc

SEQ ID NO: 1412444 - RNA, 19 nt, Homo sapiens
  misc_RNA (1)...(19): siRNA sense strand
cggaagaccucaagaaagu

SEQ ID NO: 1412445 - RNA, 19 nt, Homo sapiens
  misc_RNA (1)...(19): siRNA sense strand
gcaucaaguuuauagaaga

SEQ ID NO: 1412446 - RNA, 19 nt, Homo sapiens
  misc_RNA (1)...(19): siRNA sense strand
gcacccagcuuaucuugca

SEQ ID NO: 1412447 - RNA, 19 nt, Homo sapiens
  misc_RNA (1)...(19): siRNA sense strand
ggaagaaucggacccaaga

SEQ ID NO: 1412448 - RNA, 19 nt, Homo sapiens
  misc_RNA (1)...(19): siRNA sense strand
ugaaauccuugaugaaguu

SEQ ID NO: 1412449 - RNA, 19 nt, Homo sapiens
  misc_RNA (1)...(19): siRNA sense strand
gcugauaguuucaaagcaa

SEQ ID NO: 1412450 - RNA, 19 nt, Homo sapiens
  misc_RNA (1)...(19): siRNA sense strand
gagaccauauccuuaaaug

SEQ ID NO: 1412451 - RNA, 19 nt, Homo sapiens
  misc_RNA (1)...(19): siRNA sense strand
uaaagaggccguuaaggaa

SEQ ID NO: 1412452 - RNA, 19 nt, Homo sapiens
  misc_RNA (1)...(19): siRNA sense strand
guagauccaagcuugauua

SEQ ID NO: 1412453 - RNA, 19 nt, Homo sapiens
  misc_RNA (1)...(19): siRNA sense strand
uggagaagauguugaaaug

SEQ ID NO: 1412454 - RNA, 19 nt, Homo sapiens
  misc_RNA (1)...(19): siRNA sense strand
cagcaguucucuucucuga

SEQ ID NO: 1412455 - RNA, 19 nt, Homo sapiens
  misc_RNA (1)...(19): siRNA sense strand
gaugacacguucuccaguu

SEQ ID NO: 1412456 - RNA, 19 nt, Homo sapiens
  misc_RNA (1)...(19): siRNA sense strand
caaaggcauucaucauaga

SEQ ID NO: 1412457 - RNA, 19 nt, Homo sapiens
  misc_RNA (1)...(19): siRNA sense strand
gauaugauaccggaccuua

SEQ ID NO: 1412458 - RNA, 19 nt, Homo sapiens
  misc_RNA (1)...(19): siRNA sense strand
gggaugcagcuauuuauuu

SEQ ID NO: 1412459 - RNA, 19 nt, Homo sapiens
  misc_RNA (1)...(19): siRNA sense strand
ccaagugacuacaagaaau

SEQ ID NO: 1412460 - RNA, 19 nt, Homo sapiens
  misc_RNA (1)...(19): siRNA sense strand
ugauugacauguauucuga

SEQ ID NO: 1412461 - RNA, 19 nt, Homo sapiens
  misc_RNA (1)...(19): siRNA sense strand
uaauaaagcaguagagguu

SEQ ID NO: 1412462 - RNA, 19 nt, Homo sapiens
  misc_RNA (1)...(19): siRNA sense strand
cauugaagcuauaagagaa

SEQ ID NO: 1412463 - RNA, 19 nt, Homo sapiens
  misc_RNA (1)...(19): siRNA sense strand
ggauucagcagauaauuga

SEQ ID NO: 1412464 - RNA, 19 nt, Homo sapiens
  misc_RNA (1)...(19): siRNA sense strand
aaacuucgcuaucucauac

SEQ ID NO: 1412465 - RNA, 19 nt, Homo sapiens
  misc_RNA (1)...(19): siRNA sense strand
acaaugaaaccaagaauga

SEQ ID NO: 1412466 - RNA, 19 nt, Homo sapiens
  misc_RNA (1)...(19): siRNA sense strand
caaauggacccucauggaa

SEQ ID NO: 1412467 - RNA, 19 nt, Homo sapiens
  misc_RNA (1)...(19): siRNA sense strand
ugaaauagaacuucgaaug

SEQ ID NO: 1412468 - RNA, 19 nt, Homo sapiens
  misc_RNA (1)...(19): siRNA sense strand
uaccggaccuuagugaaua

SEQ ID NO: 1412469 - RNA, 19 nt, Homo sapiens
  misc_RNA (1)...(19): siRNA sense strand
gggaacagcucugaaagca

SEQ ID NO: 1412470 - RNA, 19 nt, Homo sapiens
  misc_RNA (1)...(19): siRNA sense strand
ugacaaaccuuccuuuacg

SEQ ID NO: 1412471 - RNA, 19 nt, Homo sapiens
  misc_RNA (1)...(19): siRNA sense strand
gaacaacaggcugauaguu

SEQ ID NO: 1412472 - RNA, 19 nt, Homo sapiens
  misc_RNA (1)...(19): siRNA sense strand
gauguucucucugauuaug

SEQ ID NO: 1412473 - RNA, 19 nt, Homo sapiens
  misc_RNA (1)...(19): siRNA sense strand
gcauuuaucauucacauca

SEQ ID NO: 1412474 - RNA, 19 nt, Homo sapiens
  misc_RNA (1)...(19): siRNA sense strand
ggaugcagcuauuuauuuu

SEQ ID NO: 1412475 - RNA, 19 nt, Homo sapiens
  misc_RNA (1)...(19): siRNA sense strand
gaacuugaccggaaugaac

SEQ ID NO: 1412476 - RNA, 19 nt, Homo sapiens
  misc_RNA (1)...(19): siRNA sense strand
ggauggugcuuguugacuu

SEQ ID NO: 1412477 - RNA, 19 nt, Homo sapiens
  misc_RNA (1)...(19): siRNA sense strand
acaaaggcauucaucauag

SEQ ID NO: 1412478 - RNA, 19 nt, Homo sapiens
  misc_RNA (1)...(19): siRNA sense strand
acacucaguugaaguauca

SEQ ID NO: 1412479 - RNA, 19 nt, Homo sapiens
  misc_RNA (1)...(19): siRNA sense strand
gaaagugacaagcauuuua

SEQ ID NO: 1412480 - RNA, 19 nt, Homo sapiens
  misc_RNA (1)...(19): siRNA sense strand
gacauugugugggaaauug

SEQ ID NO: 1412481 - RNA, 19 nt, Homo sapiens
  misc_RNA (1)...(19): siRNA sense strand
ggaaguuuaccacuacaaa

SEQ ID NO: 1412482 - RNA, 19 nt, Homo sapiens
  misc_RNA (1)...(19): siRNA sense strand
gcucgaauauucccaagag

SEQ ID NO: 1412483 - RNA, 19 nt, Homo sapiens
  misc_RNA (1)...(19): siRNA sense strand
gaaagaugacaaaggcauu

SEQ ID NO: 1412484 - RNA, 19 nt, Homo sapiens
  misc_RNA (1)...(19): siRNA sense strand
uugauguucucucugauua

SEQ ID NO: 1412485 - RNA, 19 nt, Homo sapiens
  misc_RNA (1)...(19): siRNA sense strand
aaagagguauuggaagauu

SEQ ID NO: 1412486 - RNA, 19 nt, Homo sapiens
  misc_RNA (1)...(19): siRNA sense strand
gggagacccuacaagaaga

SEQ ID NO: 1412487 - RNA, 19 nt, Homo sapiens
  misc_RNA (1)...(19): siRNA sense strand
gaauccuaaugccaucaua

SEQ ID NO: 1412488 - RNA, 19 nt, Homo sapiens
  misc_RNA (1)...(19): siRNA sense strand
agaagaucuugcagcauua

SEQ ID NO: 1412489 - RNA, 19 nt, Homo sapiens
  misc_RNA (1)...(19): siRNA sense strand
caucauagaaagcuuaaga

SEQ ID NO: 1412490 - RNA, 19 nt, Homo sapiens
  misc_RNA (1)...(19): siRNA sense strand
gaagaauuuucccgcuuua

SEQ ID NO: 1412491 - RNA, 19 nt, Homo sapiens
  misc_RNA (1)...(19): siRNA sense strand
caguggauaucaagcuuaa

SEQ ID NO: 1412492 - RNA, 19 nt, Homo sapiens
  misc_RNA (1)...(19): siRNA sense strand
gcauugaagcuauaagaga

SEQ ID NO: 1412493 - RNA, 19 nt, Homo sapiens
  misc_RNA (1)...(19): siRNA sense strand
gaaagcucuucccaaugaa

SEQ ID NO: 1412494 - RNA, 19 nt, Homo sapiens
  misc_RNA (1)...(19): siRNA sense strand
ugacuuaccaggugugauu

SEQ ID NO: 1412495 - RNA, 19 nt, Homo sapiens
  misc_RNA (1)...(19): siRNA sense strand
ggaaaugauugcccaagcu

SEQ ID NO: 1412496 - RNA, 19 nt, Homo sapiens
  misc_RNA (1)...(19): siRNA sense strand
acacagcucuggaauaaaa

SEQ ID NO: 1412497 - RNA, 19 nt, Homo sapiens
  misc_RNA (1)...(19): siRNA sense strand
ugugggaaauugaugagua

SEQ ID NO: 1412498 - RNA, 19 nt, Homo sapiens
  misc_RNA (1)...(19): siRNA sense strand
cuaaaccauuguaaccuuu

SEQ ID NO: 1412499 - RNA, 19 nt, Homo sapiens
  misc_RNA (1)...(19): siRNA sense strand
agagcaugaugacauauuu

SEQ ID NO: 1412500 - RNA, 19 nt, Homo sapiens
  misc_RNA (1)...(19): siRNA sense strand
caacucaugugauugaaaa

SEQ ID NO: 1412501 - RNA, 19 nt, Homo sapiens
  misc_RNA (1)...(19): siRNA sense strand
caagugacuacaagaaauu

SEQ ID NO: 1412502 - RNA, 19 nt, Homo sapiens
  misc_RNA (1)...(19): siRNA sense strand
gcuaaaggcacaccaagug

SEQ ID NO: 1412503 - RNA, 19 nt, Homo sapiens
  misc_RNA (1)...(19): siRNA sense strand
gagaauaugaagaagaguu

SEQ ID NO: 1412504 - RNA, 19 nt, Homo sapiens
  misc_RNA (1)...(19): siRNA sense strand
gcaguauuguuacagacuu

SEQ ID NO: 1412505 - RNA, 19 nt, Homo sapiens
  misc_RNA (1)...(19): siRNA sense strand
uggaaagacuaguguguug

SEQ ID NO: 1412506 - RNA, 19 nt, Homo sapiens
  misc_RNA (1)...(19): siRNA sense strand
ggagaacaaagaauugaga

SEQ ID NO: 1412507 - RNA, 19 nt, Homo sapiens
  misc_RNA (1)...(19): siRNA sense strand
gaaagagcaugaugacaua

SEQ ID NO: 1412508 - RNA, 19 nt, Homo sapiens
  misc_RNA (1)...(19): siRNA sense strand
gaacagcucugaaagcauu

SEQ ID NO: 1412509 - RNA, 19 nt, Homo sapiens
  misc_RNA (1)...(19): siRNA sense strand
gagaagauguugaaaugua

SEQ ID NO: 1412510 - RNA, 19 nt, Homo sapiens
  misc_RNA (1)...(19): siRNA sense strand
gaggacagcuugaggguua

SEQ ID NO: 1412511 - RNA, 19 nt, Homo sapiens
  misc_RNA (1)...(19): siRNA sense strand
gaaacugaauggaagaaua

SEQ ID NO: 1412512 - RNA, 19 nt, Homo sapiens
  misc_RNA (1)...(19): siRNA sense strand
aaagaaggcuguaccguua

SEQ ID NO: 1412513 - RNA, 19 nt, Homo sapiens
  misc_RNA (1)...(19): siRNA sense strand
aaacacagcucuggaauaa

SEQ ID NO: 1412514 - RNA, 19 nt, Homo sapiens
  misc_RNA (1)...(19): siRNA sense strand
gaaauagaacuucgaauga

SEQ ID NO: 1412515 - RNA, 19 nt, Homo sapiens
  misc_RNA (1)...(19): siRNA sense strand
gcaaugauguggucuuguu

SEQ ID NO: 1412516 - RNA, 19 nt, Homo sapiens
  misc_RNA (1)...(19): siRNA sense strand
gaccauauccuuaaaugua

SEQ ID NO: 1412517 - RNA, 19 nt, Homo sapiens
  misc_RNA (1)...(19): siRNA sense strand
gcaaugggaugcagcuauu

SEQ ID NO: 1412518 - RNA, 19 nt, Homo sapiens
  misc_RNA (1)...(19): siRNA sense strand
cagcuuaucuugcaaguga

SEQ ID NO: 1412519 - RNA, 19 nt, Homo sapiens
  misc_RNA (1)...(19): siRNA sense strand
gaaguuaggcgauuagaga

SEQ ID NO: 1412520 - RNA, 19 nt, Homo sapiens
  misc_RNA (1)...(19): siRNA sense strand
gacaaaggcauucaucaua

SEQ ID NO: 1412521 - RNA, 19 nt, Homo sapiens
  misc_RNA (1)...(19): siRNA sense strand
gauccaagcuugauuaagg

SEQ ID NO: 1412522 - RNA, 19 nt, Homo sapiens
  misc_RNA (1)...(19): siRNA sense strand
ggaagaaaguauuaaacga

SEQ ID NO: 1412523 - RNA, 19 nt, Homo sapiens
  misc_RNA (1)...(19): siRNA sense strand
aaacagcucuaaaccauug

SEQ ID NO: 1412524 - RNA, 19 nt, Homo sapiens
  misc_RNA (1)...(19): siRNA sense strand
ugacauguauucugaaguu

SEQ ID NO: 1412525 - RNA, 19 nt, Homo sapiens
  misc_RNA (1)...(19): siRNA sense strand
gaagaccucaagaaaguua

SEQ ID NO: 1412526 - RNA, 19 nt, Homo sapiens
  misc_RNA (1)...(19): siRNA sense strand
gcugaacgcaguauuguua

SEQ ID NO: 1412527 - RNA, 19 nt, Homo sapiens
  misc_RNA (1)...(19): siRNA sense strand
gauggugcuuguugacuua

SEQ ID NO: 1412528 - RNA, 19 nt, Homo sapiens
  misc_RNA (1)...(19): siRNA sense strand
ggacauccuuucagcaguu

SEQ ID NO: 1412529 - RNA, 19 nt, Homo sapiens
  misc_RNA (1)...(19): siRNA sense strand
gaaacacagcucuggaaua

SEQ ID NO: 1412530 - RNA, 19 nt, Homo sapiens
  misc_RNA (1)...(19): siRNA sense strand
ggaaauccuucaacaaucu

SEQ ID NO: 1412531 - RNA, 19 nt, Homo sapiens
  misc_RNA (1)...(19): siRNA sense strand
gcagauaauugaaggaaag

SEQ ID NO: 1412532 - RNA, 19 nt, Homo sapiens
  misc_RNA (1)...(19): siRNA sense strand
ugaaagcauugaagcuaua

SEQ ID NO: 1412533 - RNA, 19 nt, Homo sapiens
  misc_RNA (1)...(19): siRNA sense strand
ggaaagagcaugaugacau

SEQ ID NO: 1412534 - RNA, 19 nt, Homo sapiens
  misc_RNA (1)...(19): siRNA sense strand
ucacgaagcauuuaucauu

SEQ ID NO: 1412535 - RNA, 19 nt, Homo sapiens
  misc_RNA (1)...(19): siRNA sense strand
gcaguucucuucucugaca

SEQ ID NO: 1412536 - RNA, 19 nt, Homo sapiens
  misc_RNA (1)...(19): siRNA sense strand
uuaaagagguauuggaaga

SEQ ID NO: 1412537 - RNA, 19 nt, Homo sapiens
  misc_RNA (1)...(19): siRNA sense strand
aaacugaaauucucuccaa

SEQ ID NO: 1412538 - RNA, 19 nt, Homo sapiens
  misc_RNA (1)...(19): siRNA sense strand
ggcaacaacuuacaaauac

SEQ ID NO: 1412539 - RNA, 19 nt, Homo sapiens
  misc_RNA (1)...(19): siRNA sense strand
gaagaccgauccauaucug

SEQ ID NO: 1412540 - RNA, 19 nt, Homo sapiens
  misc_RNA (1)...(19): siRNA sense strand
ugaccggaaugaacuauuu

SEQ ID NO: 1412541 - RNA, 19 nt, Homo sapiens
  misc_RNA (1)...(19): siRNA sense strand
caaugaaagcuuuagguua

SEQ ID NO: 1412542 - RNA, 19 nt, Homo sapiens
  misc_RNA (1)...(19): siRNA sense strand
ggaccuuagugaauauaaa

SEQ ID NO: 1412543 - RNA, 19 nt, Homo sapiens
  misc_RNA (1)...(19): siRNA sense strand
ggaaauugaugaguauauc

SEQ ID NO: 1412544 - RNA, 19 nt, Homo sapiens
  misc_RNA (1)...(19): siRNA sense strand
cggaagaccucaagaaagu

SEQ ID NO: 1412545 - RNA, 19 nt, Homo sapiens
  misc_RNA (1)...(19): siRNA sense strand
gcaucaaguuuauagaaga

SEQ ID NO: 1412546 - RNA, 19 nt, Homo sapiens
  misc_RNA (1)...(19): siRNA sense strand
gcacccagcuuaucuugca

SEQ ID NO: 1412547 - RNA, 19 nt, Homo sapiens
  misc_RNA (1)...(19): siRNA sense strand
ggaagaaucggacccaaga

SEQ ID NO: 1412548 - RNA, 19 nt, Homo sapiens
  misc_RNA (1)...(19): siRNA sense strand
ugaaauccuugaugaaguu

SEQ ID NO: 1412549 - RNA, 19 nt, Homo sapiens
  misc_RNA (1)...(19): siRNA sense strand
gcugauaguuucaaagcaa

SEQ ID NO: 1412550 - RNA, 19 nt, Homo sapiens
  misc_RNA (1)...(19): siRNA sense strand
gagaccauauccuuaaaug

SEQ ID NO: 1412551 - RNA, 19 nt, Homo sapiens
  misc_RNA (1)...(19): siRNA sense strand
uaaagaggccguuaaggaa

SEQ ID NO: 1412552 - RNA, 19 nt, Homo sapiens
  misc_RNA (1)...(19): siRNA sense strand
guagauccaagcuugauua

SEQ ID NO: 1412553 - RNA, 19 nt, Homo sapiens
  misc_RNA (1)...(19): siRNA sense strand
uggagaagauguugaaaug

SEQ ID NO: 1412554 - RNA, 19 nt, Homo sapiens
  misc_RNA (1)...(19): siRNA sense strand
cagcaguucucuucucuga

SEQ ID NO: 1412555 - RNA, 19 nt, Homo sapiens
  misc_RNA (1)...(19): siRNA sense strand
gaugacacguucuccaguu

SEQ ID NO: 1412556 - RNA, 19 nt, Homo sapiens
  misc_RNA (1)...(19): siRNA sense strand
caaaggcauucaucauaga

SEQ ID NO: 1412557 - RNA, 19 nt, Homo sapiens
  misc_RNA (1)...(19): siRNA sense strand
gauaugauaccggaccuua

SEQ ID NO: 1412558 - RNA, 19 nt, Homo sapiens
  misc_RNA (1)...(19): siRNA sense strand
gggaugcagcuauuuauuu

SEQ ID NO: 1412559 - RNA, 19 nt, Homo sapiens
  misc_RNA (1)...(19): siRNA sense strand
ccaagugacuacaagaaau

SEQ ID NO: 1412560 - RNA, 19 nt, Homo sapiens
  misc_RNA (1)...(19): siRNA sense strand
ugauugacauguauucuga

SEQ ID NO: 1412561 - RNA, 19 nt, Homo sapiens
  misc_RNA (1)...(19): siRNA sense strand
uaauaaagcaguagagguu

SEQ ID NO: 1412562 - RNA, 19 nt, Homo sapiens
  misc_RNA (1)...(19): siRNA sense strand
cauugaagcuauaagagaa

SEQ ID NO: 1412563 - RNA, 19 nt, Homo sapiens
  misc_RNA (1)...(19): siRNA sense strand
ggauucagcagauaauuga

SEQ ID NO: 1412564 - RNA, 19 nt, Homo sapiens
  misc_RNA (1)...(19): siRNA sense strand
aaacuucgcuaucucauac

SEQ ID NO: 1412565 - RNA, 19 nt, Homo sapiens
  misc_RNA (1)...(19): siRNA sense strand
acaaugaaaccaagaauga

SEQ ID NO: 1412566 - RNA, 19 nt, Homo sapiens
  misc_RNA (1)...(19): siRNA sense strand
caaauggacccucauggaa

SEQ ID NO: 1412567 - RNA, 19 nt, Homo sapiens
  misc_RNA (1)...(19): siRNA sense strand
ugaaauagaacuucgaaug

SEQ ID NO: 1412568 - RNA, 19 nt, Homo sapiens
  misc_RNA (1)...(19): siRNA sense strand
uaccggaccuuagugaaua

SEQ ID NO: 1412569 - RNA, 19 nt, Homo sapiens
  misc_RNA (1)...(19): siRNA sense strand
gggaacagcucugaaagca

SEQ ID NO: 1412570 - RNA, 19 nt, Homo sapiens
  misc_RNA (1)...(19): siRNA sense strand
ugacaaaccuuccuuuacg

SEQ ID NO: 1412571 - RNA, 19 nt, Homo sapiens
  misc_RNA (1)...(19): siRNA sense strand
gaacaacaggcugauaguu

SEQ ID NO: 1412572 - RNA, 19 nt, Homo sapiens
  misc_RNA (1)...(19): siRNA sense strand
gauguucucucugauuaug

SEQ ID NO: 1412573 - RNA, 19 nt, Homo sapiens
  misc_RNA (1)...(19): siRNA sense strand
gcauuuaucauucacauca

SEQ ID NO: 1412574 - RNA, 19 nt, Homo sapiens
  misc_RNA (1)...(19): siRNA sense strand
ggaugcagcuauuuauuuu

SEQ ID NO: 1412575 - RNA, 19 nt, Homo sapiens
  misc_RNA (1)...(19): siRNA sense strand
gaacuugaccggaaugaac

SEQ ID NO: 1412576 - RNA, 19 nt, Homo sapiens
  misc_RNA (1)...(19): siRNA sense strand
ggauggugcuuguugacuu

SEQ ID NO: 1412577 - RNA, 19 nt, Homo sapiens
  misc_RNA (1)...(19): siRNA sense strand
acaaaggcauucaucauag

SEQ ID NO: 1412578 - RNA, 19 nt, Homo sapiens
  misc_RNA (1)...(19): siRNA sense strand
acacucaguugaaguauca

SEQ ID NO: 1412579 - RNA, 19 nt, Homo sapiens
  misc_RNA (1)...(19): siRNA sense strand
gaaagugacaagcauuuua

SEQ ID NO: 1412580 - RNA, 19 nt, Homo sapiens
  misc_RNA (1)...(19): siRNA sense strand
gacauugugugggaaauug

SEQ ID NO: 1412581 - RNA, 19 nt, Homo sapiens
  misc_RNA (1)...(19): siRNA sense strand
ggaaguuuaccacuacaaa

SEQ ID NO: 1412582 - RNA, 19 nt, Homo sapiens
  misc_RNA (1)...(19): siRNA sense strand
gcucgaauauucccaagag

SEQ ID NO: 1412583 - RNA, 19 nt, Homo sapiens
  misc_RNA (1)...(19): siRNA sense strand
gaaagaugacaaaggcauu

SEQ ID NO: 1412584 - RNA, 19 nt, Homo sapiens
  misc_RNA (1)...(19): siRNA sense strand
uugauguucucucugauua

SEQ ID NO: 1412585 - RNA, 19 nt, Homo sapiens
  misc_RNA (1)...(19): siRNA sense strand
aaagagguauuggaagauu

SEQ ID NO: 1412586 - RNA, 19 nt, Homo sapiens
  misc_RNA (1)...(19): siRNA sense strand
gggagacccuacaagaaga

SEQ ID NO: 1412587 - RNA, 19 nt, Homo sapiens
  misc_RNA (1)...(19): siRNA sense strand
gaauccuaaugccaucaua

SEQ ID NO: 1412588 - RNA, 19 nt, Homo sapiens
  misc_RNA (1)...(19): siRNA sense strand
agaagaucuugcagcauua

SEQ ID NO: 1412589 - RNA, 19 nt, Homo sapiens
  misc_RNA (1)...(19): siRNA sense strand
caucauagaaagcuuaaga

SEQ ID NO: 1412590 - RNA, 19 nt, Homo sapiens
  misc_RNA (1)...(19): siRNA sense strand
gaagaauuuucccgcuuua

SEQ ID NO: 1412591 - RNA, 19 nt, Homo sapiens
  misc_RNA (1)...(19): siRNA sense strand
caguggauaucaagcuuaa

SEQ ID NO: 1412592 - RNA, 19 nt, Homo sapiens
  misc_RNA (1)...(19): siRNA sense strand
gcauugaagcuauaagaga

SEQ ID NO: 1412593 - RNA, 19 nt, Homo sapiens
  misc_RNA (1)...(19): siRNA sense strand
gaaagcucuucccaaugaa

SEQ ID NO: 1412594 - RNA, 19 nt, Homo sapiens
  misc_RNA (1)...(19): siRNA sense strand
ugacuuaccaggugugauu

SEQ ID NO: 1412595 - RNA, 19 nt, Homo sapiens
  misc_RNA (1)...(19): siRNA sense strand
ggaaaugauugcccaagcu

SEQ ID NO: 1412596 - RNA, 19 nt, Homo sapiens
  misc_RNA (1)...(19): siRNA sense strand
acacagcucuggaauaaaa

SEQ ID NO: 1412597 - RNA, 19 nt, Homo sapiens
  misc_RNA (1)...(19): siRNA sense strand
ugugggaaauugaugagua

SEQ ID NO: 1412598 - RNA, 19 nt, Homo sapiens
  misc_RNA (1)...(19): siRNA sense strand
cuaaaccauuguaaccuuu

SEQ ID NO: 1412599 - RNA, 19 nt, Homo sapiens
  misc_RNA (1)...(19): siRNA sense strand
agagcaugaugacauauuu

SEQ ID NO: 1412600 - RNA, 19 nt, Homo sapiens
  misc_RNA (1)...(19): siRNA sense strand
caacucaugugauugaaaa

SEQ ID NO: 1412601 - RNA, 19 nt, Homo sapiens
  misc_RNA (1)...(19): siRNA sense strand
caagugacuacaagaaauu

SEQ ID NO: 1412602 - RNA, 19 nt, Homo sapiens
  misc_RNA (1)...(19): siRNA sense strand
gcuaaaggcacaccaagug

SEQ ID NO: 1412603 - RNA, 19 nt, Homo sapiens
  misc_RNA (1)...(19): siRNA sense strand
gagaauaugaagaagaguu

SEQ ID NO: 1412604 - RNA, 19 nt, Homo sapiens
  misc_RNA (1)...(19): siRNA sense strand
gcaguauuguuacagacuu

SEQ ID NO: 1412605 - RNA, 19 nt, Homo sapiens
  misc_RNA (1)...(19): siRNA sense strand
uggaaagacuaguguguug

SEQ ID NO: 1412606 - RNA, 19 nt, Homo sapiens
  misc_RNA (1)...(19): siRNA sense strand
ggagaacaaagaauugaga

SEQ ID NO: 1412607 - RNA, 19 nt, Homo sapiens
  misc_RNA (1)...(19): siRNA sense strand
gaaagagcaugaugacaua

SEQ ID NO: 1412608 - RNA, 19 nt, Homo sapiens
  misc_RNA (1)...(19): siRNA sense strand
gaacagcucugaaagcauu

SEQ ID NO: 1412609 - RNA, 19 nt, Homo sapiens
  misc_RNA (1)...(19): siRNA sense strand
gagaagauguugaaaugua

SEQ ID NO: 1412610 - RNA, 19 nt, Homo sapiens
  misc_RNA (1)...(19): siRNA sense strand
gaggacagcuugaggguua

SEQ ID NO: 1412611 - RNA, 19 nt, Homo sapiens
  misc_RNA (1)...(19): siRNA sense strand
gaaacugaauggaagaaua

SEQ ID NO: 1412612 - RNA, 19 nt, Homo sapiens
  misc_RNA (1)...(19): siRNA sense strand
aaagaaggcuguaccguua

SEQ ID NO: 1412613 - RNA, 19 nt, Homo sapiens
  misc_RNA (1)...(19): siRNA sense strand
aaacacagcucuggaauaa

SEQ ID NO: 1412614 - RNA, 19 nt, Homo sapiens
  misc_RNA (1)...(19): siRNA sense strand
gaaauagaacuucgaauga

SEQ ID NO: 1412615 - RNA, 19 nt, Homo sapiens
  misc_RNA (1)...(19): siRNA sense strand
gcaaugauguggucuuguu

SEQ ID NO: 1412616 - RNA, 19 nt, Homo sapiens
  misc_RNA (1)...(19): siRNA sense strand
gaccauauccuuaaaugua

SEQ ID NO: 1412617 - RNA, 19 nt, Homo sapiens
  misc_RNA (1)...(19): siRNA sense strand
gcaaugggaugcagcuauu

SEQ ID NO: 1412618 - RNA, 19 nt, Homo sapiens
  misc_RNA (1)...(19): siRNA sense strand
cagcuuaucuugcaaguga

SEQ ID NO: 1412619 - RNA, 19 nt, Homo sapiens
  misc_RNA (1)...(19): siRNA sense strand
gaaguuaggcgauuagaga

SEQ ID NO: 1412620 - RNA, 19 nt, Homo sapiens
  misc_RNA (1)...(19): siRNA sense strand
gacaaaggcauucaucaua

SEQ ID NO: 1412621 - RNA, 19 nt, Homo sapiens
  misc_RNA (1)...(19): siRNA sense strand
gauccaagcuugauuaagg

SEQ ID NO: 1412622 - RNA, 19 nt, Homo sapiens
  misc_RNA (1)...(19): siRNA sense strand
ggaagaaaguauuaaacga

SEQ ID NO: 1412623 - RNA, 19 nt, Homo sapiens
  misc_RNA (1)...(19): siRNA sense strand
aaacagcucuaaaccauug

SEQ ID NO: 1412624 - RNA, 19 nt, Homo sapiens
  misc_RNA (1)...(19): siRNA sense strand
ugacauguauucugaaguu

SEQ ID NO: 1412625 - RNA, 19 nt, Homo sapiens
  misc_RNA (1)...(19): siRNA sense strand
gaagaccucaagaaaguua

SEQ ID NO: 1412626 - RNA, 19 nt, Homo sapiens
  misc_RNA (1)...(19): siRNA sense strand
gcugaacgcaguauuguua

SEQ ID NO: 1412627 - RNA, 19 nt, Homo sapiens
  misc_RNA (1)...(19): siRNA sense strand
gauggugcuuguugacuua

SEQ ID NO: 1412628 - RNA, 19 nt, Homo sapiens
  misc_RNA (1)...(19): siRNA sense strand
ggacauccuuucagcaguu

SEQ ID NO: 1412629 - RNA, 19 nt, Homo sapiens
  misc_RNA (1)...(19): siRNA sense strand
gaaacacagcucuggaaua

SEQ ID NO: 1412630 - RNA, 19 nt, Homo sapiens
  misc_RNA (1)...(19): siRNA sense strand
ggaaauccuucaacaaucu

SEQ ID NO: 1412631 - RNA, 19 nt, Homo sapiens
  misc_RNA (1)...(19): siRNA sense strand
gcagauaauugaaggaaag

SEQ ID NO: 1412632 - RNA, 19 nt, Homo sapiens
  misc_RNA (1)...(19): siRNA sense strand
ugaaagcauugaagcuaua

SEQ ID NO: 1412633 - RNA, 19 nt, Homo sapiens
  misc_RNA (1)...(19): siRNA sense strand
ggaaagagcaugaugacau

SEQ ID NO: 1412634 - RNA, 19 nt, Homo sapiens
  misc_RNA (1)...(19): siRNA sense strand
ucacgaagcauuuaucauu

SEQ ID NO: 1412635 - RNA, 19 nt, Homo sapiens
  misc_RNA (1)...(19): siRNA sense strand
gcaguucucuucucugaca

SEQ ID NO: 1412636 - RNA, 19 nt, Homo sapiens
  misc_RNA (1)...(19): siRNA sense strand
uuaaagagguauuggaaga

SEQ ID NO: 1412637 - RNA, 19 nt, Homo sapiens
  misc_RNA (1)...(19): siRNA sense strand
aaacugaaauucucuccaa

SEQ ID NO: 1412638 - RNA, 19 nt, Homo sapiens
  misc_RNA (1)...(19): siRNA sense strand
ggcaacaacuuacaaauac

SEQ ID NO: 1412639 - RNA, 19 nt, Homo sapiens
  misc_RNA (1)...(19): siRNA sense strand
gaagaccgauccauaucug

SEQ ID NO: 1412640 - RNA, 19 nt, Homo sapiens
  misc_RNA (1)...(19): siRNA sense strand
ugaccggaaugaacuauuu

SEQ ID NO: 1412641 - RNA, 19 nt, Homo sapiens
  misc_RNA (1)...(19): siRNA sense strand
caaugaaagcuuuagguua

SEQ ID NO: 1412642 - RNA, 19 nt, Homo sapiens
  misc_RNA (1)...(19): siRNA sense strand
ggaccuuagugaauauaaa

SEQ ID NO: 1412643 - RNA, 19 nt, Homo sapiens
  misc_RNA (1)...(19): siRNA sense strand
ggaaauugaugaguauauc

SEQ ID NO: 1412644 - RNA, 19 nt, Homo sapiens
  misc_RNA (1)...(19): siRNA sense strand
cggaagaccucaagaaagu

SEQ ID NO: 1412645 - RNA, 19 nt, Homo sapiens
  misc_RNA (1)...(19): siRNA sense strand
gcaucaaguuuauagaaga

SEQ ID NO: 1412646 - RNA, 19 nt, Homo sapiens
  misc_RNA (1)...(19): siRNA sense strand
gcacccagcuuaucuugca

SEQ ID NO: 1412647 - RNA, 19 nt, Homo sapiens
  misc_RNA (1)...(19): siRNA sense strand
ggaagaaucggacccaaga

SEQ ID NO: 1412648 - RNA, 19 nt, Homo sapiens
  misc_RNA (1)...(19): siRNA sense strand
ugaaauccuugaugaaguu

SEQ ID NO: 1412649 - RNA, 19 nt, Homo sapiens
  misc_RNA (1)...(19): siRNA sense strand
gcugauaguuucaaagcaa

SEQ ID NO: 1412650 - RNA, 19 nt, Homo sapiens
  misc_RNA (1)...(19): siRNA sense strand
gagaccauauccuuaaaug

SEQ ID NO: 1412651 - RNA, 19 nt, Homo sapiens
  misc_RNA (1)...(19): siRNA sense strand
uaaagaggccguuaaggaa

SEQ ID NO: 1412652 - RNA, 19 nt, Homo sapiens
  misc_RNA (1)...(19): siRNA sense strand
guagauccaagcuugauua

SEQ ID NO: 1412653 - RNA, 19 nt, Homo sapiens
  misc_RNA (1)...(19): siRNA sense strand
uggagaagauguugaaaug

SEQ ID NO: 1412654 - RNA, 19 nt, Homo sapiens
  misc_RNA (1)...(19): siRNA sense strand
cagcaguucucuucucuga

SEQ ID NO: 1412655 - RNA, 19 nt, Homo sapiens
  misc_RNA (1)...(19): siRNA sense strand
gaugacacguucuccaguu

SEQ ID NO: 1412656 - RNA, 19 nt, Homo sapiens
  misc_RNA (1)...(19): siRNA sense strand
caaaggcauucaucauaga

SEQ ID NO: 1412657 - RNA, 19 nt, Homo sapiens
  misc_RNA (1)...(19): siRNA sense strand
gauaugauaccggaccuua

SEQ ID NO: 1412658 - RNA, 19 nt, Homo sapiens
  misc_RNA (1)...(19): siRNA sense strand
gggaugcagcuauuuauuu

SEQ ID NO: 1412659 - RNA, 19 nt, Homo sapiens
  misc_RNA (1)...(19): siRNA sense strand
ccaagugacuacaagaaau

SEQ ID NO: 1412660 - RNA, 19 nt, Homo sapiens
  misc_RNA (1)...(19): siRNA sense strand
ugauugacauguauucuga

SEQ ID NO: 1412661 - RNA, 19 nt, Homo sapiens
  misc_RNA (1)...(19): siRNA sense strand
uaauaaagcaguagagguu

SEQ ID NO: 1412662 - RNA, 19 nt, Homo sapiens
  misc_RNA (1)...(19): siRNA sense strand
cauugaagcuauaagagaa

SEQ ID NO: 1412663 - RNA, 19 nt, Homo sapiens
  misc_RNA (1)...(19): siRNA sense strand
ggauucagcagauaauuga

SEQ ID NO: 1412664 - RNA, 19 nt, Homo sapiens
  misc_RNA (1)...(19): siRNA sense strand
aaacuucgcuaucucauac

SEQ ID NO: 1412665 - RNA, 19 nt, Homo sapiens
  misc_RNA (1)...(19): siRNA sense strand
acaaugaaaccaagaauga

SEQ ID NO: 1412666 - RNA, 19 nt, Homo sapiens
  misc_RNA (1)...(19): siRNA sense strand
caaauggacccucauggaa

SEQ ID NO: 1412667 - RNA, 19 nt, Homo sapiens
  misc_RNA (1)...(19): siRNA sense strand
ugaaauagaacuucgaaug

SEQ ID NO: 1412668 - RNA, 19 nt, Homo sapiens
  misc_RNA (1)...(19): siRNA sense strand
uaccggaccuuagugaaua

SEQ ID NO: 1412669 - RNA, 19 nt, Homo sapiens
  misc_RNA (1)...(19): siRNA sense strand
gggaacagcucugaaagca

SEQ ID NO: 1412670 - RNA, 19 nt, Homo sapiens
  misc_RNA (1)...(19): siRNA sense strand
ugacaaaccuuccuuuacg

SEQ ID NO: 1412671 - RNA, 19 nt, Homo sapiens
  misc_RNA (1)...(19): siRNA sense strand
gaacaacaggcugauaguu

SEQ ID NO: 1412672 - RNA, 19 nt, Homo sapiens
  misc_RNA (1)...(19): siRNA sense strand
gauguucucucugauuaug

SEQ ID NO: 1412673 - RNA, 19 nt, Homo sapiens
  misc_RNA (1)...(19): siRNA sense strand
gcauuuaucauucacauca

SEQ ID NO: 1412674 - RNA, 19 nt, Homo sapiens
  misc_RNA (1)...(19): siRNA sense strand
ggaugcagcuauuuauuuu

SEQ ID NO: 1412675 - RNA, 19 nt, Homo sapiens
  misc_RNA (1)...(19): siRNA sense strand
gaacuugaccggaaugaac

SEQ ID NO: 1412676 - RNA, 19 nt, Homo sapiens
  misc_RNA (1)...(19): siRNA sense strand
ggauggugcuuguugacuu

SEQ ID NO: 1412677 - RNA, 19 nt, Homo sapiens
  misc_RNA (1)...(19): siRNA sense strand
acaaaggcauucaucauag

SEQ ID NO: 1412678 - RNA, 19 nt, Homo sapiens
  misc_RNA (1)...(19): siRNA sense strand
acacucaguugaaguauca

SEQ ID NO: 1412679 - RNA, 19 nt, Homo sapiens
  misc_RNA (1)...(19): siRNA sense strand
gaaagugacaagcauuuua

SEQ ID NO: 1412680 - RNA, 19 nt, Homo sapiens
  misc_RNA (1)...(19): siRNA sense strand
gacauugugugggaaauug

SEQ ID NO: 1412681 - RNA, 19 nt, Homo sapiens
  misc_RNA (1)...(19): siRNA sense strand
ggaaguuuaccacuacaaa

SEQ ID NO: 1412682 - RNA, 19 nt, Homo sapiens
  misc_RNA (1)...(19): siRNA sense strand
gcucgaauauucccaagag

SEQ ID NO: 1412683 - RNA, 19 nt, Homo sapiens
  misc_RNA (1)...(19): siRNA sense strand
gaaagaugacaaaggcauu

SEQ ID NO: 1412684 - RNA, 19 nt, Homo sapiens
  misc_RNA (1)...(19): siRNA sense strand
uugauguucucucugauua

SEQ ID NO: 1412685 - RNA, 19 nt, Homo sapiens
  misc_RNA (1)...(19): siRNA sense strand
aaagagguauuggaagauu

SEQ ID NO: 1412686 - RNA, 19 nt, Homo sapiens
  misc_RNA (1)...(19): siRNA sense strand
gggagacccuacaagaaga

SEQ ID NO: 1412687 - RNA, 19 nt, Homo sapiens
  misc_RNA (1)...(19): siRNA sense strand
gaauccuaaugccaucaua

SEQ ID NO: 1412688 - RNA, 19 nt, Homo sapiens
  misc_RNA (1)...(19): siRNA sense strand
agaagaucuugcagcauua

SEQ ID NO: 1412689 - RNA, 19 nt, Homo sapiens
  misc_RNA (1)...(19): siRNA sense strand
caucauagaaagcuuaaga

SEQ ID NO: 1412690 - RNA, 19 nt, Homo sapiens
  misc_RNA (1)...(19): siRNA sense strand
gaagaauuuucccgcuuua

SEQ ID NO: 1412691 - RNA, 19 nt, Homo sapiens
  misc_RNA (1)...(19): siRNA sense strand
caguggauaucaagcuuaa

SEQ ID NO: 1412692 - RNA, 19 nt, Homo sapiens
  misc_RNA (1)...(19): siRNA sense strand
gcauugaagcuauaagaga

SEQ ID NO: 1412693 - RNA, 19 nt, Homo sapiens
  misc_RNA (1)...(19): siRNA sense strand
gaaagcucuucccaaugaa

SEQ ID NO: 1412694 - RNA, 19 nt, Homo sapiens
  misc_RNA (1)...(19): siRNA sense strand
ugacuuaccaggugugauu

SEQ ID NO: 1412695 - RNA, 19 nt, Homo sapiens
  misc_RNA (1)...(19): siRNA sense strand
ggaaaugauugcccaagcu

SEQ ID NO: 1412696 - RNA, 19 nt, Homo sapiens
  misc_RNA (1)...(19): siRNA sense strand
acacagcucuggaauaaaa

SEQ ID NO: 1412697 - RNA, 19 nt, Homo sapiens
  misc_RNA (1)...(19): siRNA sense strand
ugugggaaauugaugagua

SEQ ID NO: 1412698 - RNA, 19 nt, Homo sapiens
  misc_RNA (1)...(19): siRNA sense strand
cuaaaccauuguaaccuuu

SEQ ID NO: 1412699 - RNA, 19 nt, Homo sapiens
  misc_RNA (1)...(19): siRNA sense strand
agagcaugaugacauauuu

SEQ ID NO: 1412700 - RNA, 19 nt, Homo sapiens
  misc_RNA (1)...(19): siRNA sense strand
caacucaugugauugaaaa

SEQ ID NO: 1412701 - RNA, 19 nt, Homo sapiens
  misc_RNA (1)...(19): siRNA sense strand
caagugacuacaagaaauu

SEQ ID NO: 1412702 - RNA, 19 nt, Homo sapiens
  misc_RNA (1)...(19): siRNA sense strand
gcuaaaggcacaccaagug

SEQ ID NO: 1412703 - RNA, 19 nt, Homo sapiens
  misc_RNA (1)...(19): siRNA sense strand
gagaauaugaagaagaguu

SEQ ID NO: 1412704 - RNA, 19 nt, Homo sapiens
  misc_RNA (1)...(19): siRNA sense strand
gcaguauuguuacagacuu

SEQ ID NO: 1412705 - RNA, 19 nt, Homo sapiens
  misc_RNA (1)...(19): siRNA sense strand
uggaaagacuaguguguug

SEQ ID NO: 1412706 - RNA, 19 nt, Homo sapiens
  misc_RNA (1)...(19): siRNA sense strand
ggagaacaaagaauugaga

SEQ ID NO: 1412707 - RNA, 19 nt, Homo sapiens
  misc_RNA (1)...(19): siRNA sense strand
gaaagagcaugaugacaua

SEQ ID NO: 1412708 - RNA, 19 nt, Homo sapiens
  misc_RNA (1)...(19): siRNA sense strand
gaacagcucugaaagcauu

SEQ ID NO: 1412709 - RNA, 19 nt, Homo sapiens
  misc_RNA (1)...(19): siRNA sense strand
gagaagauguugaaaugua

SEQ ID NO: 1412710 - RNA, 19 nt, Homo sapiens
  misc_RNA (1)...(19): siRNA sense strand
gaggacagcuugaggguua

SEQ ID NO: 1412711 - RNA, 19 nt, Homo sapiens
  misc_RNA (1)...(19): siRNA sense strand
gaaacugaauggaagaaua

SEQ ID NO: 1412712 - RNA, 19 nt, Homo sapiens
  misc_RNA (1)...(19): siRNA sense strand
aaagaaggcuguaccguua

SEQ ID NO: 1412713 - RNA, 19 nt, Homo sapiens
  misc_RNA (1)...(19): siRNA sense strand
aaacacagcucuggaauaa

SEQ ID NO: 1412714 - RNA, 19 nt, Homo sapiens
  misc_RNA (1)...(19): siRNA sense strand
gaaauagaacuucgaauga

SEQ ID NO: 1412715 - RNA, 19 nt, Homo sapiens
  misc_RNA (1)...(19): siRNA sense strand
gcaaugauguggucuuguu

SEQ ID NO: 1412716 - RNA, 19 nt, Homo sapiens
  misc_RNA (1)...(19): siRNA sense strand
gaccauauccuuaaaugua

SEQ ID NO: 1412717 - RNA, 19 nt, Homo sapiens
  misc_RNA (1)...(19): siRNA sense strand
gcaaugggaugcagcuauu

SEQ ID NO: 1412718 - RNA, 19 nt, Homo sapiens
  misc_RNA (1)...(19): siRNA sense strand
cagcuuaucuugcaaguga

SEQ ID NO: 1412719 - RNA, 19 nt, Homo sapiens
  misc_RNA (1)...(19): siRNA sense strand
gaaguuaggcgauuagaga

SEQ ID NO: 1412720 - RNA, 19 nt, Homo sapiens
  misc_RNA (1)...(19): siRNA sense strand
gacaaaggcauucaucaua

SEQ ID NO: 1412721 - RNA, 19 nt, Homo sapiens
  misc_RNA (1)...(19): siRNA sense strand
gauccaagcuugauuaagg

SEQ ID NO: 1412722 - RNA, 19 nt, Homo sapiens
  misc_RNA (1)...(19): siRNA sense strand
ggaagaaaguauuaaacga

SEQ ID NO: 1412723 - RNA, 19 nt, Homo sapiens
  misc_RNA (1)...(19): siRNA sense strand
aaacagcucuaaaccauug

SEQ ID NO: 1412724 - RNA, 19 nt, Homo sapiens
  misc_RNA (1)...(19): siRNA sense strand
ugacauguauucugaaguu

SEQ ID NO: 1412725 - RNA, 19 nt, Homo sapiens
  misc_RNA (1)...(19): siRNA sense strand
gaagaccucaagaaaguua

SEQ ID NO: 1412726 - RNA, 19 nt, Homo sapiens
  misc_RNA (1)...(19): siRNA sense strand
gcugaacgcaguauuguua

SEQ ID NO: 1412727 - RNA, 19 nt, Homo sapiens
  misc_RNA (1)...(19): siRNA sense strand
gauggugcuuguugacuua

SEQ ID NO: 1412728 - RNA, 19 nt, Homo sapiens
  misc_RNA (1)...(19): siRNA sense strand
ggacauccuuucagcaguu

SEQ ID NO: 1412729 - RNA, 19 nt, Homo sapiens
  misc_RNA (1)...(19): siRNA sense strand
gaaacacagcucuggaaua

SEQ ID NO: 1412730 - RNA, 19 nt, Homo sapiens
  misc_RNA (1)...(19): siRNA sense strand
ggaaauccuucaacaaucu

SEQ ID NO: 1412731 - RNA, 19 nt, Homo sapiens
  misc_RNA (1)...(19): siRNA sense strand
gcagauaauugaaggaaag

SEQ ID NO: 1412732 - RNA, 19 nt, Homo sapiens
  misc_RNA (1)...(19): siRNA sense strand
ugaaagcauugaagcuaua

SEQ ID NO: 1412733 - RNA, 19 nt, Homo sapiens
  misc_RNA (1)...(19): siRNA sense strand
ggaaagagcaugaugacau

SEQ ID NO: 1412734 - RNA, 19 nt, Homo sapiens
  misc_RNA (1)...(19): siRNA sense strand
ucacgaagcauuuaucauu

SEQ ID NO: 1412735 - RNA, 19 nt, Homo sapiens
  misc_RNA (1)...(19): siRNA sense strand
gcaguucucuucucugaca

SEQ ID NO: 1412736 - RNA, 19 nt, Homo sapiens
  misc_RNA (1)...(19): siRNA sense strand
uuaaagagguauuggaaga

SEQ ID NO: 1412737 - RNA, 19 nt, Homo sapiens
  misc_RNA (1)...(19): siRNA sense strand
aaacugaaauucucuccaa

SEQ ID NO: 1412738 - RNA, 19 nt, Homo sapiens
  misc_RNA (1)...(19): siRNA sense strand
ggcaacaacuuacaaauac

SEQ ID NO: 1412739 - RNA, 19 nt, Homo sapiens
  misc_RNA (1)...(19): siRNA sense strand
gaagaccgauccauaucug

SEQ ID NO: 1412740 - RNA, 19 nt, Homo sapiens
  misc_RNA (1)...(19): siRNA sense strand
ugaccggaaugaacuauuu

SEQ ID NO: 1412741 - RNA, 19 nt, Homo sapiens
  misc_RNA (1)...(19): siRNA sense strand
caaugaaagcuuuagguua

SEQ ID NO: 1412742 - RNA, 19 nt, Homo sapiens
  misc_RNA (1)...(19): siRNA sense strand
ggaccuuagugaauauaaa

SEQ ID NO: 1412743 - RNA, 19 nt, Homo sapiens
  misc_RNA (1)...(19): siRNA sense strand
ggaaauugaugaguauauc

SEQ ID NO: 1412744 - RNA, 19 nt, Homo sapiens
  misc_RNA (1)...(19): siRNA sense strand
cggaagaccucaagaaagu

SEQ ID NO: 1412745 - RNA, 19 nt, Homo sapiens
  misc_RNA (1)...(19): siRNA sense strand
gcaucaaguuuauagaaga

SEQ ID NO: 1412746 - RNA, 19 nt, Homo sapiens
  misc_RNA (1)...(19): siRNA sense strand
gcacccagcuuaucuugca

SEQ ID NO: 1412747 - RNA, 19 nt, Homo sapiens
  misc_RNA (1)...(19): siRNA sense strand
ggaagaaucggacccaaga

SEQ ID NO: 1412748 - RNA, 19 nt, Homo sapiens
  misc_RNA (1)...(19): siRNA sense strand
ugaaauccuugaugaaguu

SEQ ID NO: 1412749 - RNA, 19 nt, Homo sapiens
  misc_RNA (1)...(19): siRNA sense strand
gcugauaguuucaaagcaa

SEQ ID NO: 1412750 - RNA, 19 nt, Homo sapiens
  misc_RNA (1)...(19): siRNA sense strand
gagaccauauccuuaaaug

SEQ ID NO: 1412751 - RNA, 19 nt, Homo sapiens
  misc_RNA (1)...(19): siRNA sense strand
uaaagaggccguuaaggaa

SEQ ID NO: 1412752 - RNA, 19 nt, Homo sapiens
  misc_RNA (1)...(19): siRNA sense strand
guagauccaagcuugauua

SEQ ID NO: 1412753 - RNA, 19 nt, Homo sapiens
  misc_RNA (1)...(19): siRNA sense strand
uggagaagauguugaaaug

SEQ ID NO: 1412754 - RNA, 19 nt, Homo sapiens
  misc_RNA (1)...(19): siRNA sense strand
cagcaguucucuucucuga

SEQ ID NO: 1412755 - RNA, 19 nt, Homo sapiens
  misc_RNA (1)...(19): siRNA sense strand
gaugacacguucuccaguu

SEQ ID NO: 1412756 - RNA, 19 nt, Homo sapiens
  misc_RNA (1)...(19): siRNA sense strand
caaaggcauucaucauaga

SEQ ID NO: 1412757 - RNA, 19 nt, Homo sapiens
  misc_RNA (1)...(19): siRNA sense strand
gauaugauaccggaccuua

SEQ ID NO: 1412758 - RNA, 19 nt, Homo sapiens
  misc_RNA (1)...(19): siRNA sense strand
gggaugcagcuauuuauuu

SEQ ID NO: 1412759 - RNA, 19 nt, Homo sapiens
  misc_RNA (1)...(19): siRNA sense strand
ccaagugacuacaagaaau

SEQ ID NO: 1412760 - RNA, 19 nt, Homo sapiens
  misc_RNA (1)...(19): siRNA sense strand
ugauugacauguauucuga

SEQ ID NO: 1412761 - RNA, 19 nt, Homo sapiens
  misc_RNA (1)...(19): siRNA sense strand
uaauaaagcaguagagguu

SEQ ID NO: 1412762 - RNA, 19 nt, Homo sapiens
  misc_RNA (1)...(19): siRNA sense strand
cauugaagcuauaagagaa

SEQ ID NO: 1412763 - RNA, 19 nt, Homo sapiens
  misc_RNA (1)...(19): siRNA sense strand
ggauucagcagauaauuga

SEQ ID NO: 1412764 - RNA, 19 nt, Homo sapiens
  misc_RNA (1)...(19): siRNA sense strand
aaacuucgcuaucucauac

SEQ ID NO: 1412765 - RNA, 19 nt, Homo sapiens
  misc_RNA (1)...(19): siRNA sense strand
acaaugaaaccaagaauga

SEQ ID NO: 1412766 - RNA, 19 nt, Homo sapiens
  misc_RNA (1)...(19): siRNA sense strand
caaauggacccucauggaa

SEQ ID NO: 1412767 - RNA, 19 nt, Homo sapiens
  misc_RNA (1)...(19): siRNA sense strand
ugaaauagaacuucgaaug

SEQ ID NO: 1412768 - RNA, 19 nt, Homo sapiens
  misc_RNA (1)...(19): siRNA sense strand
uaccggaccuuagugaaua

SEQ ID NO: 1412769 - RNA, 19 nt, Homo sapiens
  misc_RNA (1)...(19): siRNA sense strand
gggaacagcucugaaagca

SEQ ID NO: 1412770 - RNA, 19 nt, Homo sapiens
  misc_RNA (1)...(19): siRNA sense strand
ugacaaaccuuccuuuacg

SEQ ID NO: 1412771 - RNA, 19 nt, Homo sapiens
  misc_RNA (1)...(19): siRNA sense strand
gaacaacaggcugauaguu

SEQ ID NO: 1412772 - RNA, 19 nt, Homo sapiens
  misc_RNA (1)...(19): siRNA sense strand
gauguucucucugauuaug

SEQ ID NO: 1412773 - RNA, 19 nt, Homo sapiens
  misc_RNA (1)...(19): siRNA sense strand
gcauuuaucauucacauca

SEQ ID NO: 1412774 - RNA, 19 nt, Homo sapiens
  misc_RNA (1)...(19): siRNA sense strand
ggaugcagcuauuuauuuu

SEQ ID NO: 1412775 - RNA, 19 nt, Homo sapiens
  misc_RNA (1)...(19): siRNA sense strand
gaacuugaccggaaugaac

SEQ ID NO: 1412776 - RNA, 19 nt, Homo sapiens
  misc_RNA (1)...(19): siRNA sense strand
ggauggugcuuguugacuu

SEQ ID NO: 1412777 - RNA, 19 nt, Homo sapiens
  misc_RNA (1)...(19): siRNA sense strand
acaaaggcauucaucauag

SEQ ID NO: 1412778 - RNA, 19 nt, Homo sapiens
  misc_RNA (1)...(19): siRNA sense strand
acacucaguugaaguauca

SEQ ID NO: 1412779 - RNA, 19 nt, Homo sapiens
  misc_RNA (1)...(19): siRNA sense strand
gaaagugacaagcauuuua

SEQ ID NO: 1412780 - RNA, 19 nt, Homo sapiens
  misc_RNA (1)...(19): siRNA sense strand
gacauugugugggaaauug

SEQ ID NO: 1412781 - RNA, 19 nt, Homo sapiens
  misc_RNA (1)...(19): siRNA sense strand
ggaaguuuaccacuacaaa

SEQ ID NO: 1412782 - RNA, 19 nt, Homo sapiens
  misc_RNA (1)...(19): siRNA sense strand
gcucgaauauucccaagag

SEQ ID NO: 1412783 - RNA, 19 nt, Homo sapiens
  misc_RNA (1)...(19): siRNA sense strand
gaaagaugacaaaggcauu

SEQ ID NO: 1412784 - RNA, 19 nt, Homo sapiens
  misc_RNA (1)...(19): siRNA sense strand
uugauguucucucugauua

SEQ ID NO: 1412785 - RNA, 19 nt, Homo sapiens
  misc_RNA (1)...(19): siRNA sense strand
aaagagguauuggaagauu

SEQ ID NO: 1412786 - RNA, 19 nt, Homo sapiens
  misc_RNA (1)...(19): siRNA sense strand
gggagacccuacaagaaga

SEQ ID NO: 1412787 - RNA, 19 nt, Homo sapiens
  misc_RNA (1)...(19): siRNA sense strand
gaauccuaaugccaucaua

SEQ ID NO: 1412788 - RNA, 19 nt, Homo sapiens
  misc_RNA (1)...(19): siRNA sense strand
agaagaucuugcagcauua

SEQ ID NO: 1412789 - RNA, 19 nt, Homo sapiens
  misc_RNA (1)...(19): siRNA sense strand
caucauagaaagcuuaaga

SEQ ID NO: 1412790 - RNA, 19 nt, Homo sapiens
  misc_RNA (1)...(19): siRNA sense strand
gaagaauuuucccgcuuua

SEQ ID NO: 1412791 - RNA, 19 nt, Homo sapiens
  misc_RNA (1)...(19): siRNA sense strand
caguggauaucaagcuuaa

SEQ ID NO: 1412792 - RNA, 19 nt, Homo sapiens
  misc_RNA (1)...(19): siRNA sense strand
gcauugaagcuauaagaga

SEQ ID NO: 1412793 - RNA, 19 nt, Homo sapiens
  misc_RNA (1)...(19): siRNA sense strand
gaaagcucuucccaaugaa

SEQ ID NO: 1412794 - RNA, 19 nt, Homo sapiens
  misc_RNA (1)...(19): siRNA sense strand
ugacuuaccaggugugauu

SEQ ID NO: 1412795 - RNA, 19 nt, Homo sapiens
  misc_RNA (1)...(19): siRNA sense strand
ggaaaugauugcccaagcu

SEQ ID NO: 1412796 - RNA, 19 nt, Homo sapiens
  misc_RNA (1)...(19): siRNA sense strand
acacagcucuggaauaaaa

SEQ ID NO: 1412797 - RNA, 19 nt, Homo sapiens
  misc_RNA (1)...(19): siRNA sense strand
ugugggaaauugaugagua

SEQ ID NO: 1412798 - RNA, 19 nt, Homo sapiens
  misc_RNA (1)...(19): siRNA sense strand
cuaaaccauuguaaccuuu

SEQ ID NO: 1412799 - RNA, 19 nt, Homo sapiens
  misc_RNA (1)...(19): siRNA sense strand
agagcaugaugacauauuu

SEQ ID NO: 1412800 - RNA, 19 nt, Homo sapiens
  misc_RNA (1)...(19): siRNA sense strand
caacucaugugauugaaaa

SEQ ID NO: 1412801 - RNA, 19 nt, Homo sapiens
  misc_RNA (1)...(19): siRNA sense strand
caagugacuacaagaaauu

SEQ ID NO: 1412802 - RNA, 19 nt, Homo sapiens
  misc_RNA (1)...(19): siRNA sense strand
gcuaaaggcacaccaagug

SEQ ID NO: 1412803 - RNA, 19 nt, Homo sapiens
  misc_RNA (1)...(19): siRNA sense strand
gagaauaugaagaagaguu

SEQ ID NO: 1412804 - RNA, 19 nt, Homo sapiens
  misc_RNA (1)...(19): siRNA sense strand
gcaguauuguuacagacuu

SEQ ID NO: 1412805 - RNA, 19 nt, Homo sapiens
  misc_RNA (1)...(19): siRNA sense strand
uggaaagacuaguguguug

SEQ ID NO: 1412806 - RNA, 19 nt, Homo sapiens
  misc_RNA (1)...(19): siRNA sense strand
ggagaacaaagaauugaga

SEQ ID NO: 1412807 - RNA, 19 nt, Homo sapiens
  misc_RNA (1)...(19): siRNA sense strand
gaaagagcaugaugacaua

SEQ ID NO: 1412808 - RNA, 19 nt, Homo sapiens
  misc_RNA (1)...(19): siRNA sense strand
gaacagcucugaaagcauu

SEQ ID NO: 1412809 - RNA, 19 nt, Homo sapiens
  misc_RNA (1)...(19): siRNA sense strand
gagaagauguugaaaugua

SEQ ID NO: 1412810 - RNA, 19 nt, Homo sapiens
  misc_RNA (1)...(19): siRNA sense strand
gaggacagcuugaggguua

SEQ ID NO: 1412811 - RNA, 19 nt, Homo sapiens
  misc_RNA (1)...(19): siRNA sense strand
gaaacugaauggaagaaua

SEQ ID NO: 1412812 - RNA, 19 nt, Homo sapiens
  misc_RNA (1)...(19): siRNA sense strand
aaagaaggcuguaccguua

SEQ ID NO: 1412813 - RNA, 19 nt, Homo sapiens
  misc_RNA (1)...(19): siRNA sense strand
aaacacagcucuggaauaa

SEQ ID NO: 1412814 - RNA, 19 nt, Homo sapiens
  misc_RNA (1)...(19): siRNA sense strand
gaaauagaacuucgaauga

SEQ ID NO: 1412815 - RNA, 19 nt, Homo sapiens
  misc_RNA (1)...(19): siRNA sense strand
gcaaugauguggucuuguu

SEQ ID NO: 1412816 - RNA, 19 nt, Homo sapiens
  misc_RNA (1)...(19): siRNA sense strand
gaccauauccuuaaaugua

SEQ ID NO: 1412817 - RNA, 19 nt, Homo sapiens
  misc_RNA (1)...(19): siRNA sense strand
gcaaugggaugcagcuauu

SEQ ID NO: 1412818 - RNA, 19 nt, Homo sapiens
  misc_RNA (1)...(19): siRNA sense strand
cagcuuaucuugcaaguga

SEQ ID NO: 1412819 - RNA, 19 nt, Homo sapiens
  misc_RNA (1)...(19): siRNA sense strand
gaaguuaggcgauuagaga

SEQ ID NO: 1412820 - RNA, 19 nt, Homo sapiens
  misc_RNA (1)...(19): siRNA sense strand
gacaaaggcauucaucaua

SEQ ID NO: 1412821 - RNA, 19 nt, Homo sapiens
  misc_RNA (1)...(19): siRNA sense strand
gauccaagcuugauuaagg

SEQ ID NO: 1412822 - RNA, 19 nt, Homo sapiens
  misc_RNA (1)...(19): siRNA sense strand
ggaagaaaguauuaaacga

SEQ ID NO: 1412823 - RNA, 19 nt, Homo sapiens
  misc_RNA (1)...(19): siRNA sense strand
aaacagcucuaaaccauug

SEQ ID NO: 1412824 - RNA, 19 nt, Homo sapiens
  misc_RNA (1)...(19): siRNA sense strand
ugacauguauucugaaguu

SEQ ID NO: 1412825 - RNA, 19 nt, Homo sapiens
  misc_RNA (1)...(19): siRNA sense strand
gaagaccucaagaaaguua

SEQ ID NO: 1412826 - RNA, 19 nt, Homo sapiens
  misc_RNA (1)...(19): siRNA sense strand
gcugaacgcaguauuguua

SEQ ID NO: 1412827 - RNA, 19 nt, Homo sapiens
  misc_RNA (1)...(19): siRNA sense strand
gauggugcuuguugacuua

SEQ ID NO: 1412828 - RNA, 19 nt, Homo sapiens
  misc_RNA (1)...(19): siRNA sense strand
ggacauccuuucagcaguu

SEQ ID NO: 1412829 - RNA, 19 nt, Homo sapiens
  misc_RNA (1)...(19): siRNA sense strand
gaaacacagcucuggaaua

SEQ ID NO: 1412830 - RNA, 19 nt, Homo sapiens
  misc_RNA (1)...(19): siRNA sense strand
ggaaauccuucaacaaucu

SEQ ID NO: 1412831 - RNA, 19 nt, Homo sapiens
  misc_RNA (1)...(19): siRNA sense strand
gcagauaauugaaggaaag

SEQ ID NO: 1412832 - RNA, 19 nt, Homo sapiens
  misc_RNA (1)...(19): siRNA sense strand
ugaaagcauugaagcuaua

SEQ ID NO: 1412833 - RNA, 19 nt, Homo sapiens
  misc_RNA (1)...(19): siRNA sense strand
ggaaagagcaugaugacau

SEQ ID NO: 1412834 - RNA, 19 nt, Homo sapiens
  misc_RNA (1)...(19): siRNA sense strand
ucacgaagcauuuaucauu

SEQ ID NO: 1412835 - RNA, 19 nt, Homo sapiens
  misc_RNA (1)...(19): siRNA sense strand
gcaguucucuucucugaca

SEQ ID NO: 1412836 - RNA, 19 nt, Homo sapiens
  misc_RNA (1)...(19): siRNA sense strand
uuaaagagguauuggaaga

SEQ ID NO: 1412837 - RNA, 19 nt, Homo sapiens
  misc_RNA (1)...(19): siRNA sense strand
aaacugaaauucucuccaa

SEQ ID NO: 1412838 - RNA, 19 nt, Homo sapiens
  misc_RNA (1)...(19): siRNA sense strand
ggcaacaacuuacaaauac

SEQ ID NO: 1412839 - RNA, 19 nt, Homo sapiens
  misc_RNA (1)...(19): siRNA sense strand
gaagaccgauccauaucug

SEQ ID NO: 1412840 - RNA, 19 nt, Homo sapiens
  misc_RNA (1)...(19): siRNA sense strand
ugaccggaaugaacuauuu

SEQ ID NO: 1412841 - RNA, 19 nt, Homo sapiens
  misc_RNA (1)...(19): siRNA sense strand
caaugaaagcuuuagguua

SEQ ID NO: 1412842 - RNA, 19 nt, Homo sapiens
  misc_RNA (1)...(19): siRNA sense strand
ggaccuuagugaauauaaa

SEQ ID NO: 1412843 - RNA, 19 nt, Homo sapiens
  misc_RNA (1)...(19): siRNA sense strand
ggaaauugaugaguauauc

SEQ ID NO: 1412844 - RNA, 19 nt, Homo sapiens
  misc_RNA (1)...(19): siRNA sense strand
cggaagaccucaagaaagu

SEQ ID NO: 1412845 - RNA, 19 nt, Homo sapiens
  misc_RNA (1)...(19): siRNA sense strand
gcaucaaguuuauagaaga

SEQ ID NO: 1412846 - RNA, 19 nt, Homo sapiens
  misc_RNA (1)...(19): siRNA sense strand
gcacccagcuuaucuugca

SEQ ID NO: 1412847 - RNA, 19 nt, Homo sapiens
  misc_RNA (1)...(19): siRNA sense strand
ggaagaaucggacccaaga

SEQ ID NO: 1412848 - RNA, 19 nt, Homo sapiens
  misc_RNA (1)...(19): siRNA sense strand
ugaaauccuugaugaaguu

SEQ ID NO: 1412849 - RNA, 19 nt, Homo sapiens
  misc_RNA (1)...(19): siRNA sense strand
gcugauaguuucaaagcaa

SEQ ID NO: 1412850 - RNA, 19 nt, Homo sapiens
  misc_RNA (1)...(19): siRNA sense strand
gagaccauauccuuaaaug

SEQ ID NO: 1412851 - RNA, 19 nt, Homo sapiens
  misc_RNA (1)...(19): siRNA sense strand
uaaagaggccguuaaggaa

SEQ ID NO: 1412852 - RNA, 19 nt, Homo sapiens
  misc_RNA (1)...(19): siRNA sense strand
guagauccaagcuugauua

SEQ ID NO: 1412853 - RNA, 19 nt, Homo sapiens
  misc_RNA (1)...(19): siRNA sense strand
uggagaagauguugaaaug

SEQ ID NO: 1412854 - RNA, 19 nt, Homo sapiens
  misc_RNA (1)...(19): siRNA sense strand
cagcaguucucuucucuga

SEQ ID NO: 1412855 - RNA, 19 nt, Homo sapiens
  misc_RNA (1)...(19): siRNA sense strand
gaugacacguucuccaguu

SEQ ID NO: 1412856 - RNA, 19 nt, Homo sapiens
  misc_RNA (1)...(19): siRNA sense strand
caaaggcauucaucauaga

SEQ ID NO: 1412857 - RNA, 19 nt, Homo sapiens
  misc_RNA (1)...(19): siRNA sense strand
gauaugauaccggaccuua

SEQ ID NO: 1412858 - RNA, 19 nt, Homo sapiens
  misc_RNA (1)...(19): siRNA sense strand
gggaugcagcuauuuauuu

SEQ ID NO: 1412859 - RNA, 19 nt, Homo sapiens
  misc_RNA (1)...(19): siRNA sense strand
ccaagugacuacaagaaau

SEQ ID NO: 1412860 - RNA, 19 nt, Homo sapiens
  misc_RNA (1)...(19): siRNA sense strand
ugauugacauguauucuga

SEQ ID NO: 1412861 - RNA, 19 nt, Homo sapiens
  misc_RNA (1)...(19): siRNA sense strand
uaauaaagcaguagagguu

SEQ ID NO: 1412862 - RNA, 19 nt, Homo sapiens
  misc_RNA (1)...(19): siRNA sense strand
cauugaagcuauaagagaa

SEQ ID NO: 1412863 - RNA, 19 nt, Homo sapiens
  misc_RNA (1)...(19): siRNA sense strand
ggauucagcagauaauuga

SEQ ID NO: 1412864 - RNA, 19 nt, Homo sapiens
  misc_RNA (1)...(19): siRNA sense strand
aaacuucgcuaucucauac

SEQ ID NO: 1412865 - RNA, 19 nt, Homo sapiens
  misc_RNA (1)...(19): siRNA sense strand
acaaugaaaccaagaauga

SEQ ID NO: 1412866 - RNA, 19 nt, Homo sapiens
  misc_RNA (1)...(19): siRNA sense strand
caaauggacccucauggaa

SEQ ID NO: 1412867 - RNA, 19 nt, Homo sapiens
  misc_RNA (1)...(19): siRNA sense strand
ugaaauagaacuucgaaug

SEQ ID NO: 1412868 - RNA, 19 nt, Homo sapiens
  misc_RNA (1)...(19): siRNA sense strand
uaccggaccuuagugaaua

SEQ ID NO: 1412869 - RNA, 19 nt, Homo sapiens
  misc_RNA (1)...(19): siRNA sense strand
gggaacagcucugaaagca

SEQ ID NO: 1412870 - RNA, 19 nt, Homo sapiens
  misc_RNA (1)...(19): siRNA sense strand
ugacaaaccuuccuuuacg

SEQ ID NO: 1412871 - RNA, 19 nt, Homo sapiens
  misc_RNA (1)...(19): siRNA sense strand
gaacaacaggcugauaguu

SEQ ID NO: 1412872 - RNA, 19 nt, Homo sapiens
  misc_RNA (1)...(19): siRNA sense strand
gauguucucucugauuaug

SEQ ID NO: 1412873 - RNA, 19 nt, Homo sapiens
  misc_RNA (1)...(19): siRNA sense strand
gcauuuaucauucacauca

SEQ ID NO: 1412874 - RNA, 19 nt, Homo sapiens
  misc_RNA (1)...(19): siRNA sense strand
ggaugcagcuauuuauuuu

SEQ ID NO: 1412875 - RNA, 19 nt, Homo sapiens
  misc_RNA (1)...(19): siRNA sense strand
gaacuugaccggaaugaac

SEQ ID NO: 1412876 - RNA, 19 nt, Homo sapiens
  misc_RNA (1)...(19): siRNA sense strand
ggauggugcuuguugacuu

SEQ ID NO: 1412877 - RNA, 19 nt, Homo sapiens
  misc_RNA (1)...(19): siRNA sense strand
acaaaggcauucaucauag

SEQ ID NO: 1412878 - RNA, 19 nt, Homo sapiens
  misc_RNA (1)...(19): siRNA sense strand
acacucaguugaaguauca

SEQ ID NO: 1412879 - RNA, 19 nt, Homo sapiens
  misc_RNA (1)...(19): siRNA sense strand
gaaagugacaagcauuuua

SEQ ID NO: 1412880 - RNA, 19 nt, Homo sapiens
  misc_RNA (1)...(19): siRNA sense strand
gacauugugugggaaauug

SEQ ID NO: 1412881 - RNA, 19 nt, Homo sapiens
  misc_RNA (1)...(19): siRNA sense strand
ggaaguuuaccacuacaaa

SEQ ID NO: 1412882 - RNA, 19 nt, Homo sapiens
  misc_RNA (1)...(19): siRNA sense strand
gcucgaauauucccaagag

SEQ ID NO: 1412883 - RNA, 19 nt, Homo sapiens
  misc_RNA (1)...(19): siRNA sense strand
gaaagaugacaaaggcauu

SEQ ID NO: 1412884 - RNA, 19 nt, Homo sapiens
  misc_RNA (1)...(19): siRNA sense strand
uugauguucucucugauua

SEQ ID NO: 1412885 - RNA, 19 nt, Homo sapiens
  misc_RNA (1)...(19): siRNA sense strand
aaagagguauuggaagauu

SEQ ID NO: 1412886 - RNA, 19 nt, Homo sapiens
  misc_RNA (1)...(19): siRNA sense strand
gggagacccuacaagaaga

SEQ ID NO: 1412887 - RNA, 19 nt, Homo sapiens
  misc_RNA (1)...(19): siRNA sense strand
gaauccuaaugccaucaua

SEQ ID NO: 1412888 - RNA, 19 nt, Homo sapiens
  misc_RNA (1)...(19): siRNA sense strand
agaagaucuugcagcauua

SEQ ID NO: 1412889 - RNA, 19 nt, Homo sapiens
  misc_RNA (1)...(19): siRNA sense strand
caucauagaaagcuuaaga

SEQ ID NO: 1412890 - RNA, 19 nt, Homo sapiens
  misc_RNA (1)...(19): siRNA sense strand
gaagaauuuucccgcuuua

SEQ ID NO: 1412891 - RNA, 19 nt, Homo sapiens
  misc_RNA (1)...(19): siRNA sense strand
caguggauaucaagcuuaa

SEQ ID NO: 1412892 - RNA, 19 nt, Homo sapiens
  misc_RNA (1)...(19): siRNA sense strand
gcauugaagcuauaagaga

SEQ ID NO: 1412893 - RNA, 19 nt, Homo sapiens
  misc_RNA (1)...(19): siRNA sense strand
gaaagcucuucccaaugaa

SEQ ID NO: 1412894 - RNA, 19 nt, Homo sapiens
  misc_RNA (1)...(19): siRNA sense strand
ugacuuaccaggugugauu

SEQ ID NO: 1412895 - RNA, 19 nt, Homo sapiens
  misc_RNA (1)...(19): siRNA sense strand
ggaaaugauugcccaagcu

SEQ ID NO: 1412896 - RNA, 19 nt, Homo sapiens
  misc_RNA (1)...(19): siRNA sense strand
acacagcucuggaauaaaa

SEQ ID NO: 1412897 - RNA, 19 nt, Homo sapiens
  misc_RNA (1)...(19): siRNA sense strand
ugugggaaauugaugagua

SEQ ID NO: 1412898 - RNA, 19 nt, Homo sapiens
  misc_RNA (1)...(19): siRNA sense strand
cuaaaccauuguaaccuuu

SEQ ID NO: 1412899 - RNA, 19 nt, Homo sapiens
  misc_RNA (1)...(19): siRNA sense strand
agagcaugaugacauauuu

SEQ ID NO: 1412900 - RNA, 19 nt, Homo sapiens
  misc_RNA (1)...(19): siRNA sense strand
caacucaugugauugaaaa

SEQ ID NO: 1412901 - RNA, 19 nt, Homo sapiens
  misc_RNA (1)...(19): siRNA sense strand
caagugacuacaagaaauu

SEQ ID NO: 1412902 - RNA, 19 nt, Homo sapiens
  misc_RNA (1)...(19): siRNA sense strand
gcuaaaggcacaccaagug

SEQ ID NO: 1412903 - RNA, 19 nt, Homo sapiens
  misc_RNA (1)...(19): siRNA sense strand
gagaauaugaagaagaguu

SEQ ID NO: 1412904 - RNA, 19 nt, Homo sapiens
  misc_RNA (1)...(19): siRNA sense strand
gcaguauuguuacagacuu

SEQ ID NO: 1412905 - RNA, 19 nt, Homo sapiens
  misc_RNA (1)...(19): siRNA sense strand
uggaaagacuaguguguug

SEQ ID NO: 1412906 - RNA, 19 nt, Homo sapiens
  misc_RNA (1)...(19): siRNA sense strand
ggagaacaaagaauugaga

SEQ ID NO: 1412907 - RNA, 19 nt, Homo sapiens
  misc_RNA (1)...(19): siRNA sense strand
gaaagagcaugaugacaua

SEQ ID NO: 1412908 - RNA, 19 nt, Homo sapiens
  misc_RNA (1)...(19): siRNA sense strand
gaacagcucugaaagcauu

SEQ ID NO: 1412909 - RNA, 19 nt, Homo sapiens
  misc_RNA (1)...(19): siRNA sense strand
gagaagauguugaaaugua

SEQ ID NO: 1412910 - RNA, 19 nt, Homo sapiens
  misc_RNA (1)...(19): siRNA sense strand
gaggacagcuugaggguua

SEQ ID NO: 1412911 - RNA, 19 nt, Homo sapiens
  misc_RNA (1)...(19): siRNA sense strand
gaaacugaauggaagaaua

SEQ ID NO: 1412912 - RNA, 19 nt, Homo sapiens
  misc_RNA (1)...(19): siRNA sense strand
aaagaaggcuguaccguua

SEQ ID NO: 1412913 - RNA, 19 nt, Homo sapiens
  misc_RNA (1)...(19): siRNA sense strand
aaacacagcucuggaauaa

SEQ ID NO: 1412914 - RNA, 19 nt, Homo sapiens
  misc_RNA (1)...(19): siRNA sense strand
gaaauagaacuucgaauga

SEQ ID NO: 1412915 - RNA, 19 nt, Homo sapiens
  misc_RNA (1)...(19): siRNA sense strand
gcaaugauguggucuuguu

SEQ ID NO: 1412916 - RNA, 19 nt, Homo sapiens
  misc_RNA (1)...(19): siRNA sense strand
gaccauauccuuaaaugua

SEQ ID NO: 1412917 - RNA, 19 nt, Homo sapiens
  misc_RNA (1)...(19): siRNA sense strand
gcaaugggaugcagcuauu

SEQ ID NO: 1412918 - RNA, 19 nt, Homo sapiens
  misc_RNA (1)...(19): siRNA sense strand
cagcuuaucuugcaaguga

SEQ ID NO: 1412919 - RNA, 19 nt, Homo sapiens
  misc_RNA (1)...(19): siRNA sense strand
gaaguuaggcgauuagaga

SEQ ID NO: 1412920 - RNA, 19 nt, Homo sapiens
  misc_RNA (1)...(19): siRNA sense strand
gacaaaggcauucaucaua

SEQ ID NO: 1412921 - RNA, 19 nt, Homo sapiens
  misc_RNA (1)...(19): siRNA sense strand
gauccaagcuugauuaagg

SEQ ID NO: 1412922 - RNA, 19 nt, Homo sapiens
  misc_RNA (1)...(19): siRNA sense strand
ggaagaaaguauuaaacga

SEQ ID NO: 1412923 - RNA, 19 nt, Homo sapiens
  misc_RNA (1)...(19): siRNA sense strand
aaacagcucuaaaccauug

SEQ ID NO: 1412924 - RNA, 19 nt, Homo sapiens
  misc_RNA (1)...(19): siRNA sense strand
ugacauguauucugaaguu

SEQ ID NO: 1412925 - RNA, 19 nt, Homo sapiens
  misc_RNA (1)...(19): siRNA sense strand
gaagaccucaagaaaguua

SEQ ID NO: 1412926 - RNA, 19 nt, Homo sapiens
  misc_RNA (1)...(19): siRNA sense strand
gcugaacgcaguauuguua

SEQ ID NO: 1412927 - RNA, 19 nt, Homo sapiens
  misc_RNA (1)...(19): siRNA sense strand
gauggugcuuguugacuua

SEQ ID NO: 1412928 - RNA, 19 nt, Homo sapiens
  misc_RNA (1)...(19): siRNA sense strand
ggacauccuuucagcaguu

SEQ ID NO: 1412929 - RNA, 19 nt, Homo sapiens
  misc_RNA (1)...(19): siRNA sense strand
gaaacacagcucuggaaua

SEQ ID NO: 1412930 - RNA, 19 nt, Homo sapiens
  misc_RNA (1)...(19): siRNA sense strand
ggaaauccuucaacaaucu

SEQ ID NO: 1412931 - RNA, 19 nt, Homo sapiens
  misc_RNA (1)...(19): siRNA sense strand
gcagauaauugaaggaaag

SEQ ID NO: 1412932 - RNA, 19 nt, Homo sapiens
  misc_RNA (1)...(19): siRNA sense strand
ugaaagcauugaagcuaua

SEQ ID NO: 1412933 - RNA, 19 nt, Homo sapiens
  misc_RNA (1)...(19): siRNA sense strand
ggaaagagcaugaugacau

SEQ ID NO: 1412934 - RNA, 19 nt, Homo sapiens
  misc_RNA (1)...(19): siRNA sense strand
ucacgaagcauuuaucauu

SEQ ID NO: 1412935 - RNA, 19 nt, Homo sapiens
  misc_RNA (1)...(19): siRNA sense strand
gcaguucucuucucugaca

SEQ ID NO: 1412936 - RNA, 19 nt, Homo sapiens
  misc_RNA (1)...(19): siRNA sense strand
uuaaagagguauuggaaga

SEQ ID NO: 1412937 - RNA, 19 nt, Homo sapiens
  misc_RNA (1)...(19): siRNA sense strand
aaacugaaauucucuccaa

SEQ ID NO: 1412938 - RNA, 19 nt, Homo sapiens
  misc_RNA (1)...(19): siRNA sense strand
ggcaacaacuuacaaauac

SEQ ID NO: 1412939 - RNA, 19 nt, Homo sapiens
  misc_RNA (1)...(19): siRNA sense strand
gaagaccgauccauaucug

SEQ ID NO: 1412940 - RNA, 19 nt, Homo sapiens
  misc_RNA (1)...(19): siRNA sense strand
ugaccggaaugaacuauuu

SEQ ID NO: 1412941 - RNA, 19 nt, Homo sapiens
  misc_RNA (1)...(19): siRNA sense strand
caaugaaagcuuuagguua

SEQ ID NO: 1412942 - RNA, 19 nt, Homo sapiens
  misc_RNA (1)...(19): siRNA sense strand
ggaccuuagugaauauaaa

SEQ ID NO: 1412943 - RNA, 19 nt, Homo sapiens
  misc_RNA (1)...(19): siRNA sense strand
ggaaauugaugaguauauc

SEQ ID NO: 1412944 - RNA, 19 nt, Homo sapiens
  misc_RNA (1)...(19): siRNA sense strand
cggaagaccucaagaaagu

SEQ ID NO: 1412945 - RNA, 19 nt, Homo sapiens
  misc_RNA (1)...(19): siRNA sense strand
gcaucaaguuuauagaaga

SEQ ID NO: 1412946 - RNA, 19 nt, Homo sapiens
  misc_RNA (1)...(19): siRNA sense strand
gcacccagcuuaucuugca

SEQ ID NO: 1412947 - RNA, 19 nt, Homo sapiens
  misc_RNA (1)...(19): siRNA sense strand
ggaagaaucggacccaaga

SEQ ID NO: 1412948 - RNA, 19 nt, Homo sapiens
  misc_RNA (1)...(19): siRNA sense strand
ugaaauccuugaugaaguu

SEQ ID NO: 1412949 - RNA, 19 nt, Homo sapiens
  misc_RNA (1)...(19): siRNA sense strand
gcugauaguuucaaagcaa

SEQ ID NO: 1412950 - RNA, 19 nt, Homo sapiens
  misc_RNA (1)...(19): siRNA sense strand
gagaccauauccuuaaaug

SEQ ID NO: 1412951 - RNA, 19 nt, Homo sapiens
  misc_RNA (1)...(19): siRNA sense strand
uaaagaggccguuaaggaa

SEQ ID NO: 1412952 - RNA, 19 nt, Homo sapiens
  misc_RNA (1)...(19): siRNA sense strand
guagauccaagcuugauua

SEQ ID NO: 1412953 - RNA, 19 nt, Homo sapiens
  misc_RNA (1)...(19): siRNA sense strand
uggagaagauguugaaaug

SEQ ID NO: 1412954 - RNA, 19 nt, Homo sapiens
  misc_RNA (1)...(19): siRNA sense strand
cagcaguucucuucucuga

SEQ ID NO: 1412955 - RNA, 19 nt, Homo sapiens
  misc_RNA (1)...(19): siRNA sense strand
gaugacacguucuccaguu

SEQ ID NO: 1412956 - RNA, 19 nt, Homo sapiens
  misc_RNA (1)...(19): siRNA sense strand
caaaggcauucaucauaga

SEQ ID NO: 1412957 - RNA, 19 nt, Homo sapiens
  misc_RNA (1)...(19): siRNA sense strand
gauaugauaccggaccuua

SEQ ID NO: 1412958 - RNA, 19 nt, Homo sapiens
  misc_RNA (1)...(19): siRNA sense strand
gggaugcagcuauuuauuu

SEQ ID NO: 1412959 - RNA, 19 nt, Homo sapiens
  misc_RNA (1)...(19): siRNA sense strand
ccaagugacuacaagaaau

SEQ ID NO: 1412960 - RNA, 19 nt, Homo sapiens
  misc_RNA (1)...(19): siRNA sense strand
ugauugacauguauucuga

SEQ ID NO: 1412961 - RNA, 19 nt, Homo sapiens
  misc_RNA (1)...(19): siRNA sense strand
uaauaaagcaguagagguu

SEQ ID NO: 1412962 - RNA, 19 nt, Homo sapiens
  misc_RNA (1)...(19): siRNA sense strand
cauugaagcuauaagagaa

SEQ ID NO: 1412963 - RNA, 19 nt, Homo sapiens
  misc_RNA (1)...(19): siRNA sense strand
ggauucagcagauaauuga

SEQ ID NO: 1412964 - RNA, 19 nt, Homo sapiens
  misc_RNA (1)...(19): siRNA sense strand
aaacuucgcuaucucauac

SEQ ID NO: 1412965 - RNA, 19 nt, Homo sapiens
  misc_RNA (1)...(19): siRNA sense strand
acaaugaaaccaagaauga

SEQ ID NO: 1412966 - RNA, 19 nt, Homo sapiens
  misc_RNA (1)...(19): siRNA sense strand
caaauggacccucauggaa

SEQ ID NO: 1412967 - RNA, 19 nt, Homo sapiens
  misc_RNA (1)...(19): siRNA sense strand
ugaaauagaacuucgaaug

SEQ ID NO: 1412968 - RNA, 19 nt, Homo sapiens
  misc_RNA (1)...(19): siRNA sense strand
uaccggaccuuagugaaua

SEQ ID NO: 1412969 - RNA, 19 nt, Homo sapiens
  misc_RNA (1)...(19): siRNA sense strand
gggaacagcucugaaagca

SEQ ID NO: 1412970 - RNA, 19 nt, Homo sapiens
  misc_RNA (1)...(19): siRNA sense strand
ugacaaaccuuccuuuacg

SEQ ID NO: 1412971 - RNA, 19 nt, Homo sapiens
  misc_RNA (1)...(19): siRNA sense strand
gaacaacaggcugauaguu

SEQ ID NO: 1412972 - RNA, 19 nt, Homo sapiens
  misc_RNA (1)...(19): siRNA sense strand
gauguucucucugauuaug

SEQ ID NO: 1412973 - RNA, 19 nt, Homo sapiens
  misc_RNA (1)...(19): siRNA sense strand
gcauuuaucauucacauca

SEQ ID NO: 1412974 - RNA, 19 nt, Homo sapiens
  misc_RNA (1)...(19): siRNA sense strand
ggaugcagcuauuuauuuu

SEQ ID NO: 1412975 - RNA, 19 nt, Homo sapiens
  misc_RNA (1)...(19): siRNA sense strand
gaacuugaccggaaugaac

SEQ ID NO: 1412976 - RNA, 19 nt, Homo sapiens
  misc_RNA (1)...(19): siRNA sense strand
ggauggugcuuguugacuu

SEQ ID NO: 1412977 - RNA, 19 nt, Homo sapiens
  misc_RNA (1)...(19): siRNA sense strand
acaaaggcauucaucauag

SEQ ID NO: 1412978 - RNA, 19 nt, Homo sapiens
  misc_RNA (1)...(19): siRNA sense strand
acacucaguugaaguauca

SEQ ID NO: 1412979 - RNA, 19 nt, Homo sapiens
  misc_RNA (1)...(19): siRNA sense strand
gaaagugacaagcauuuua

SEQ ID NO: 1412980 - RNA, 19 nt, Homo sapiens
  misc_RNA (1)...(19): siRNA sense strand
gacauugugugggaaauug

SEQ ID NO: 1412981 - RNA, 19 nt, Homo sapiens
  misc_RNA (1)...(19): siRNA sense strand
ggaaguuuaccacuacaaa

SEQ ID NO: 1412982 - RNA, 19 nt, Homo sapiens
  misc_RNA (1)...(19): siRNA sense strand
gcucgaauauucccaagag

SEQ ID NO: 1412983 - RNA, 19 nt, Homo sapiens
  misc_RNA (1)...(19): siRNA sense strand
gaaagaugacaaaggcauu

SEQ ID NO: 1412984 - RNA, 19 nt, Homo sapiens
  misc_RNA (1)...(19): siRNA sense strand
uugauguucucucugauua

SEQ ID NO: 1412985 - RNA, 19 nt, Homo sapiens
  misc_RNA (1)...(19): siRNA sense strand
aaagagguauuggaagauu

SEQ ID NO: 1412986 - RNA, 19 nt, Homo sapiens
  misc_RNA (1)...(19): siRNA sense strand
gggagacccuacaagaaga

SEQ ID NO: 1412987 - RNA, 19 nt, Homo sapiens
  misc_RNA (1)...(19): siRNA sense strand
gaauccuaaugccaucaua

SEQ ID NO: 1412988 - RNA, 19 nt, Homo sapiens
  misc_RNA (1)...(19): siRNA sense strand
agaagaucuugcagcauua

SEQ ID NO: 1412989 - RNA, 19 nt, Homo sapiens
  misc_RNA (1)...(19): siRNA sense strand
caucauagaaagcuuaaga

SEQ ID NO: 1412990 - RNA, 19 nt, Homo sapiens
  misc_RNA (1)...(19): siRNA sense strand
gaagaauuuucccgcuuua

SEQ ID NO: 1412991 - RNA, 19 nt, Homo sapiens
  misc_RNA (1)...(19): siRNA sense strand
caguggauaucaagcuuaa

SEQ ID NO: 1412992 - RNA, 19 nt, Homo sapiens
  misc_RNA (1)...(19): siRNA sense strand
gcauugaagcuauaagaga

SEQ ID NO: 1412993 - RNA, 19 nt, Homo sapiens
  misc_RNA (1)...(19): siRNA sense strand
gaaagcucuucccaaugaa

SEQ ID NO: 1412994 - RNA, 19 nt, Homo sapiens
  misc_RNA (1)...(19): siRNA sense strand
ugacuuaccaggugugauu

SEQ ID NO: 1412995 - RNA, 19 nt, Homo sapiens
  misc_RNA (1)...(19): siRNA sense strand
ggaaaugauugcccaagcu

SEQ ID NO: 1412996 - RNA, 19 nt, Homo sapiens
  misc_RNA (1)...(19): siRNA sense strand
acacagcucuggaauaaaa

SEQ ID NO: 1412997 - RNA, 19 nt, Homo sapiens
  misc_RNA (1)...(19): siRNA sense strand
ugugggaaauugaugagua

SEQ ID NO: 1412998 - RNA, 19 nt, Homo sapiens
  misc_RNA (1)...(19): siRNA sense strand
cuaaaccauuguaaccuuu

SEQ ID NO: 1412999 - RNA, 19 nt, Homo sapiens
  misc_RNA (1)...(19): siRNA sense strand
agagcaugaugacauauuu

SEQ ID NO: 1413000 - RNA, 19 nt, Homo sapiens
  misc_RNA (1)...(19): siRNA sense strand
caacucaugugauugaaaa

SEQ ID NO: 1413001 - RNA, 19 nt, Homo sapiens
  misc_RNA (1)...(19): siRNA sense strand
caagugacuacaagaaauu

SEQ ID NO: 1413002 - RNA, 19 nt, Homo sapiens
  misc_RNA (1)...(19): siRNA sense strand
gcuaaaggcacaccaagug

SEQ ID NO: 1413003 - RNA, 19 nt, Homo sapiens
  misc_RNA (1)...(19): siRNA sense strand
gagaauaugaagaagaguu

SEQ ID NO: 1413004 - RNA, 19 nt, Homo sapiens
  misc_RNA (1)...(19): siRNA sense strand
gcaguauuguuacagacuu

SEQ ID NO: 1413005 - RNA, 19 nt, Homo sapiens
  misc_RNA (1)...(19): siRNA sense strand
uggaaagacuaguguguug

SEQ ID NO: 1413006 - RNA, 19 nt, Homo sapiens
  misc_RNA (1)...(19): siRNA sense strand
ggagaacaaagaauugaga

SEQ ID NO: 1413007 - RNA, 19 nt, Homo sapiens
  misc_RNA (1)...(19): siRNA sense strand
gaaagagcaugaugacaua

SEQ ID NO: 1413008 - RNA, 19 nt, Homo sapiens
  misc_RNA (1)...(19): siRNA sense strand
gaacagcucugaaagcauu

SEQ ID NO: 1413009 - RNA, 19 nt, Homo sapiens
  misc_RNA (1)...(19): siRNA sense strand
gagaagauguugaaaugua

SEQ ID NO: 1413010 - RNA, 19 nt, Homo sapiens
  misc_RNA (1)...(19): siRNA sense strand
gaggacagcuugaggguua

SEQ ID NO: 1413011 - RNA, 19 nt, Homo sapiens
  misc_RNA (1)...(19): siRNA sense strand
gaaacugaauggaagaaua

SEQ ID NO: 1413012 - RNA, 19 nt, Homo sapiens
  misc_RNA (1)...(19): siRNA sense strand
aaagaaggcuguaccguua

SEQ ID NO: 1413013 - RNA, 19 nt, Homo sapiens
  misc_RNA (1)...(19): siRNA sense strand
aaacacagcucuggaauaa

SEQ ID NO: 1413014 - RNA, 19 nt, Homo sapiens
  misc_RNA (1)...(19): siRNA sense strand
gaaauagaacuucgaauga

SEQ ID NO: 1413015 - RNA, 19 nt, Homo sapiens
  misc_RNA (1)...(19): siRNA sense strand
gcaaugauguggucuuguu

SEQ ID NO: 1413016 - RNA, 19 nt, Homo sapiens
  misc_RNA (1)...(19): siRNA sense strand
gaccauauccuuaaaugua

SEQ ID NO: 1413017 - RNA, 19 nt, Homo sapiens
  misc_RNA (1)...(19): siRNA sense strand
gcaaugggaugcagcuauu

SEQ ID NO: 1413018 - RNA, 19 nt, Homo sapiens
  misc_RNA (1)...(19): siRNA sense strand
cagcuuaucuugcaaguga

SEQ ID NO: 1413019 - RNA, 19 nt, Homo sapiens
  misc_RNA (1)...(19): siRNA sense strand
gaaguuaggcgauuagaga

SEQ ID NO: 1413020 - RNA, 19 nt, Homo sapiens
  misc_RNA (1)...(19): siRNA sense strand
gacaaaggcauucaucaua

SEQ ID NO: 1413021 - RNA, 19 nt, Homo sapiens
  misc_RNA (1)...(19): siRNA sense strand
gauccaagcuugauuaagg

SEQ ID NO: 1413022 - RNA, 19 nt, Homo sapiens
  misc_RNA (1)...(19): siRNA sense strand
ggaagaaaguauuaaacga

SEQ ID NO: 1413023 - RNA, 19 nt, Homo sapiens
  misc_RNA (1)...(19): siRNA sense strand
aaacagcucuaaaccauug

SEQ ID NO: 1413024 - RNA, 19 nt, Homo sapiens
  misc_RNA (1)...(19): siRNA sense strand
ugacauguauucugaaguu

SEQ ID NO: 1413025 - RNA, 19 nt, Homo sapiens
  misc_RNA (1)...(19): siRNA sense strand
gaagaccucaagaaaguua

SEQ ID NO: 1413026 - RNA, 19 nt, Homo sapiens
  misc_RNA (1)...(19): siRNA sense strand
gcugaacgcaguauuguua

SEQ ID NO: 1413027 - RNA, 19 nt, Homo sapiens
  misc_RNA (1)...(19): siRNA sense strand
gauggugcuuguugacuua

SEQ ID NO: 1413028 - RNA, 19 nt, Homo sapiens
  misc_RNA (1)...(19): siRNA sense strand
ggacauccuuucagcaguu

SEQ ID NO: 1413029 - RNA, 19 nt, Homo sapiens
  misc_RNA (1)...(19): siRNA sense strand
gaaacacagcucuggaaua

SEQ ID NO: 1413030 - RNA, 19 nt, Homo sapiens
  misc_RNA (1)...(19): siRNA sense strand
ggaaauccuucaacaaucu

SEQ ID NO: 1413031 - RNA, 19 nt, Homo sapiens
  misc_RNA (1)...(19): siRNA sense strand
gcagauaauugaaggaaag

SEQ ID NO: 1413032 - RNA, 19 nt, Homo sapiens
  misc_RNA (1)...(19): siRNA sense strand
ugaaagcauugaagcuaua

SEQ ID NO: 1413033 - RNA, 19 nt, Homo sapiens
  misc_RNA (1)...(19): siRNA sense strand
ggaaagagcaugaugacau

SEQ ID NO: 1413034 - RNA, 19 nt, Homo sapiens
  misc_RNA (1)...(19): siRNA sense strand
ucacgaagcauuuaucauu

SEQ ID NO: 1413035 - RNA, 19 nt, Homo sapiens
  misc_RNA (1)...(19): siRNA sense strand
gcaguucucuucucugaca

SEQ ID NO: 1413036 - RNA, 19 nt, Homo sapiens
  misc_RNA (1)...(19): siRNA sense strand
uuaaagagguauuggaaga

SEQ ID NO: 1413037 - RNA, 19 nt, Homo sapiens
  misc_RNA (1)...(19): siRNA sense strand
aaacugaaauucucuccaa

SEQ ID NO: 1413038 - RNA, 19 nt, Homo sapiens
  misc_RNA (1)...(19): siRNA sense strand
ggcaacaacuuacaaauac

SEQ ID NO: 1413039 - RNA, 19 nt, Homo sapiens
  misc_RNA (1)...(19): siRNA sense strand
gaagaccgauccauaucug

SEQ ID NO: 1413040 - RNA, 19 nt, Homo sapiens
  misc_RNA (1)...(19): siRNA sense strand
ugaccggaaugaacuauuu

SEQ ID NO: 1413041 - RNA, 19 nt, Homo sapiens
  misc_RNA (1)...(19): siRNA sense strand
caaugaaagcuuuagguua

SEQ ID NO: 1413042 - RNA, 19 nt, Homo sapiens
  misc_RNA (1)...(19): siRNA sense strand
ggaccuuagugaauauaaa

SEQ ID NO: 1413043 - RNA, 19 nt, Homo sapiens
  misc_RNA (1)...(19): siRNA sense strand
ggaaauugaugaguauauc

SEQ ID NO: 1413044 - RNA, 19 nt, Homo sapiens
  misc_RNA (1)...(19): siRNA sense strand
cggaagaccucaagaaagu

SEQ ID NO: 1413045 - RNA, 19 nt, Homo sapiens
  misc_RNA (1)...(19): siRNA sense strand
gcaucaaguuuauagaaga

SEQ ID NO: 1413046 - RNA, 19 nt, Homo sapiens
  misc_RNA (1)...(19): siRNA sense strand
gcacccagcuuaucuugca

SEQ ID NO: 1413047 - RNA, 19 nt, Homo sapiens
  misc_RNA (1)...(19): siRNA sense strand
ggaagaaucggacccaaga

SEQ ID NO: 1413048 - RNA, 19 nt, Homo sapiens
  misc_RNA (1)...(19): siRNA sense strand
ugaaauccuugaugaaguu

SEQ ID NO: 1413049 - RNA, 19 nt, Homo sapiens
  misc_RNA (1)...(19): siRNA sense strand
gcugauaguuucaaagcaa

SEQ ID NO: 1413050 - RNA, 19 nt, Homo sapiens
  misc_RNA (1)...(19): siRNA sense strand
gagaccauauccuuaaaug

SEQ ID NO: 1413051 - RNA, 19 nt, Homo sapiens
  misc_RNA (1)...(19): siRNA sense strand
uaaagaggccguuaaggaa

SEQ ID NO: 1413052 - RNA, 19 nt, Homo sapiens
  misc_RNA (1)...(19): siRNA sense strand
guagauccaagcuugauua

SEQ ID NO: 1413053 - RNA, 19 nt, Homo sapiens
  misc_RNA (1)...(19): siRNA sense strand
uggagaagauguugaaaug

SEQ ID NO: 1413054 - RNA, 19 nt, Homo sapiens
  misc_RNA (1)...(19): siRNA sense strand
cagcaguucucuucucuga

SEQ ID NO: 1413055 - RNA, 19 nt, Homo sapiens
  misc_RNA (1)...(19): siRNA sense strand
gaugacacguucuccaguu

SEQ ID NO: 1413056 - RNA, 19 nt, Homo sapiens
  misc_RNA (1)...(19): siRNA sense strand
caaaggcauucaucauaga

SEQ ID NO: 1413057 - RNA, 19 nt, Homo sapiens
  misc_RNA (1)...(19): siRNA sense strand
gauaugauaccggaccuua

SEQ ID NO: 1413058 - RNA, 19 nt, Homo sapiens
  misc_RNA (1)...(19): siRNA sense strand
gggaugcagcuauuuauuu

SEQ ID NO: 1413059 - RNA, 19 nt, Homo sapiens
  misc_RNA (1)...(19): siRNA sense strand
ccaagugacuacaagaaau

SEQ ID NO: 1413060 - RNA, 19 nt, Homo sapiens
  misc_RNA (1)...(19): siRNA sense strand
ugauugacauguauucuga

SEQ ID NO: 1413061 - RNA, 19 nt, Homo sapiens
  misc_RNA (1)...(19): siRNA sense strand
uaauaaagcaguagagguu

SEQ ID NO: 1413062 - RNA, 19 nt, Homo sapiens
  misc_RNA (1)...(19): siRNA sense strand
cauugaagcuauaagagaa

SEQ ID NO: 1413063 - RNA, 19 nt, Homo sapiens
  misc_RNA (1)...(19): siRNA sense strand
ggauucagcagauaauuga

SEQ ID NO: 1413064 - RNA, 19 nt, Homo sapiens
  misc_RNA (1)...(19): siRNA sense strand
aaacuucgcuaucucauac

SEQ ID NO: 1413065 - RNA, 19 nt, Homo sapiens
  misc_RNA (1)...(19): siRNA sense strand
acaaugaaaccaagaauga

SEQ ID NO: 1413066 - RNA, 19 nt, Homo sapiens
  misc_RNA (1)...(19): siRNA sense strand
caaauggacccucauggaa

SEQ ID NO: 1413067 - RNA, 19 nt, Homo sapiens
  misc_RNA (1)...(19): siRNA sense strand
ugaaauagaacuucgaaug

SEQ ID NO: 1413068 - RNA, 19 nt, Homo sapiens
  misc_RNA (1)...(19): siRNA sense strand
uaccggaccuuagugaaua

SEQ ID NO: 1413069 - RNA, 19 nt, Homo sapiens
  misc_RNA (1)...(19): siRNA sense strand
gggaacagcucugaaagca

SEQ ID NO: 1413070 - RNA, 19 nt, Homo sapiens
  misc_RNA (1)...(19): siRNA sense strand
ugacaaaccuuccuuuacg

SEQ ID NO: 1413071 - RNA, 19 nt, Homo sapiens
  misc_RNA (1)...(19): siRNA sense strand
gaacaacaggcugauaguu

SEQ ID NO: 1413072 - RNA, 19 nt, Homo sapiens
  misc_RNA (1)...(19): siRNA sense strand
gauguucucucugauuaug

SEQ ID NO: 1413073 - RNA, 19 nt, Homo sapiens
  misc_RNA (1)...(19): siRNA sense strand
gcauuuaucauucacauca

SEQ ID NO: 1413074 - RNA, 19 nt, Homo sapiens
  misc_RNA (1)...(19): siRNA sense strand
ggaugcagcuauuuauuuu

SEQ ID NO: 1413075 - RNA, 19 nt, Homo sapiens
  misc_RNA (1)...(19): siRNA sense strand
gaacuugaccggaaugaac

SEQ ID NO: 1413076 - RNA, 19 nt, Homo sapiens
  misc_RNA (1)...(19): siRNA sense strand
ggauggugcuuguugacuu

SEQ ID NO: 1413077 - RNA, 19 nt, Homo sapiens
  misc_RNA (1)...(19): siRNA sense strand
acaaaggcauucaucauag

SEQ ID NO: 1413078 - RNA, 19 nt, Homo sapiens
  misc_RNA (1)...(19): siRNA sense strand
acacucaguugaaguauca

SEQ ID NO: 1413079 - RNA, 19 nt, Homo sapiens
  misc_RNA (1)...(19): siRNA sense strand
gaaagugacaagcauuuua

SEQ ID NO: 1413080 - RNA, 19 nt, Homo sapiens
  misc_RNA (1)...(19): siRNA sense strand
gacauugugugggaaauug

SEQ ID NO: 1413081 - RNA, 19 nt, Homo sapiens
  misc_RNA (1)...(19): siRNA sense strand
ggaaguuuaccacuacaaa

SEQ ID NO: 1413082 - RNA, 19 nt, Homo sapiens
  misc_RNA (1)...(19): siRNA sense strand
gcucgaauauucccaagag

SEQ ID NO: 1413083 - RNA, 19 nt, Homo sapiens
  misc_RNA (1)...(19): siRNA sense strand
gaaagaugacaaaggcauu

SEQ ID NO: 1413084 - RNA, 19 nt, Homo sapiens
  misc_RNA (1)...(19): siRNA sense strand
uugauguucucucugauua

SEQ ID NO: 1413085 - RNA, 19 nt, Homo sapiens
  misc_RNA (1)...(19): siRNA sense strand
aaagagguauuggaagauu

SEQ ID NO: 1413086 - RNA, 19 nt, Homo sapiens
  misc_RNA (1)...(19): siRNA sense strand
gggagacccuacaagaaga

SEQ ID NO: 1413087 - RNA, 19 nt, Homo sapiens
  misc_RNA (1)...(19): siRNA sense strand
gaauccuaaugccaucaua

SEQ ID NO: 1413088 - RNA, 19 nt, Homo sapiens
  misc_RNA (1)...(19): siRNA sense strand
agaagaucuugcagcauua

SEQ ID NO: 1413089 - RNA, 19 nt, Homo sapiens
  misc_RNA (1)...(19): siRNA sense strand
caucauagaaagcuuaaga

SEQ ID NO: 1413090 - RNA, 19 nt, Homo sapiens
  misc_RNA (1)...(19): siRNA sense strand
gaagaauuuucccgcuuua

SEQ ID NO: 1413091 - RNA, 19 nt, Homo sapiens
  misc_RNA (1)...(19): siRNA sense strand
caguggauaucaagcuuaa

SEQ ID NO: 1413092 - RNA, 19 nt, Homo sapiens
  misc_RNA (1)...(19): siRNA sense strand
gcauugaagcuauaagaga

SEQ ID NO: 1413093 - RNA, 19 nt, Homo sapiens
  misc_RNA (1)...(19): siRNA sense strand
gaaagcucuucccaaugaa

SEQ ID NO: 1413094 - RNA, 19 nt, Homo sapiens
  misc_RNA (1)...(19): siRNA sense strand
ugacuuaccaggugugauu

SEQ ID NO: 1413095 - RNA, 19 nt, Homo sapiens
  misc_RNA (1)...(19): siRNA sense strand
ggaaaugauugcccaagcu

SEQ ID NO: 1413096 - RNA, 19 nt, Homo sapiens
  misc_RNA (1)...(19): siRNA sense strand
acacagcucuggaauaaaa

SEQ ID NO: 1413097 - RNA, 19 nt, Homo sapiens
  misc_RNA (1)...(19): siRNA sense strand
ugugggaaauugaugagua

SEQ ID NO: 1413098 - RNA, 19 nt, Homo sapiens
  misc_RNA (1)...(19): siRNA sense strand
cuaaaccauuguaaccuuu

SEQ ID NO: 1413099 - RNA, 19 nt, Homo sapiens
  misc_RNA (1)...(19): siRNA sense strand
agagcaugaugacauauuu

SEQ ID NO: 1413100 - RNA, 19 nt, Homo sapiens
  misc_RNA (1)...(19): siRNA sense strand
caacucaugugauugaaaa

SEQ ID NO: 1413101 - RNA, 19 nt, Homo sapiens
  misc_RNA (1)...(19): siRNA sense strand
caagugacuacaagaaauu

SEQ ID NO: 1413102 - RNA, 19 nt, Homo sapiens
  misc_RNA (1)...(19): siRNA sense strand
gcuaaaggcacaccaagug

SEQ ID NO: 1413103 - RNA, 19 nt, Homo sapiens
  misc_RNA (1)...(19): siRNA sense strand
gagaauaugaagaagaguu

SEQ ID NO: 1413104 - RNA, 19 nt, Homo sapiens
  misc_RNA (1)...(19): siRNA sense strand
gcaguauuguuacagacuu

SEQ ID NO: 1413105 - RNA, 19 nt, Homo sapiens
  misc_RNA (1)...(19): siRNA sense strand
uggaaagacuaguguguug

SEQ ID NO: 1413106 - RNA, 19 nt, Homo sapiens
  misc_RNA (1)...(19): siRNA sense strand
ggagaacaaagaauugaga

SEQ ID NO: 1413107 - RNA, 19 nt, Homo sapiens
  misc_RNA (1)...(19): siRNA sense strand
gaaagagcaugaugacaua

SEQ ID NO: 1413108 - RNA, 19 nt, Homo sapiens
  misc_RNA (1)...(19): siRNA sense strand
gaacagcucugaaagcauu

SEQ ID NO: 1413109 - RNA, 19 nt, Homo sapiens
  misc_RNA (1)...(19): siRNA sense strand
gagaagauguugaaaugua

SEQ ID NO: 1413110 - RNA, 19 nt, Homo sapiens
  misc_RNA (1)...(19): siRNA sense strand
gaggacagcuugaggguua

SEQ ID NO: 1413111 - RNA, 19 nt, Homo sapiens
  misc_RNA (1)...(19): siRNA sense strand
gaaacugaauggaagaaua

SEQ ID NO: 1413112 - RNA, 19 nt, Homo sapiens
  misc_RNA (1)...(19): siRNA sense strand
aaagaaggcuguaccguua

SEQ ID NO: 1413113 - RNA, 19 nt, Homo sapiens
  misc_RNA (1)...(19): siRNA sense strand
aaacacagcucuggaauaa

SEQ ID NO: 1413114 - RNA, 19 nt, Homo sapiens
  misc_RNA (1)...(19): siRNA sense strand
gaaauagaacuucgaauga

SEQ ID NO: 1413115 - RNA, 19 nt, Homo sapiens
  misc_RNA (1)...(19): siRNA sense strand
gcaaugauguggucuuguu

SEQ ID NO: 1413116 - RNA, 19 nt, Homo sapiens
  misc_RNA (1)...(19): siRNA sense strand
gaccauauccuuaaaugua

SEQ ID NO: 1413117 - RNA, 19 nt, Homo sapiens
  misc_RNA (1)...(19): siRNA sense strand
gcaaugggaugcagcuauu

SEQ ID NO: 1413118 - RNA, 19 nt, Homo sapiens
  misc_RNA (1)...(19): siRNA sense strand
cagcuuaucuugcaaguga

SEQ ID NO: 1413119 - RNA, 19 nt, Homo sapiens
  misc_RNA (1)...(19): siRNA sense strand
gaaguuaggcgauuagaga

SEQ ID NO: 1413120 - RNA, 19 nt, Homo sapiens
  misc_RNA (1)...(19): siRNA sense strand
gacaaaggcauucaucaua

SEQ ID NO: 1413121 - RNA, 19 nt, Homo sapiens
  misc_RNA (1)...(19): siRNA sense strand
gauccaagcuugauuaagg

SEQ ID NO: 1413122 - RNA, 19 nt, Homo sapiens
  misc_RNA (1)...(19): siRNA sense strand
ggaagaaaguauuaaacga

SEQ ID NO: 1413123 - RNA, 19 nt, Homo sapiens
  misc_RNA (1)...(19): siRNA sense strand
aaacagcucuaaaccauug

SEQ ID NO: 1413124 - RNA, 19 nt, Homo sapiens
  misc_RNA (1)...(19): siRNA sense strand
ugacauguauucugaaguu

SEQ ID NO: 1413125 - RNA, 19 nt, Homo sapiens
  misc_RNA (1)...(19): siRNA sense strand
gaagaccucaagaaaguua

SEQ ID NO: 1413126 - RNA, 19 nt, Homo sapiens
  misc_RNA (1)...(19): siRNA sense strand
gcugaacgcaguauuguua

SEQ ID NO: 1413127 - RNA, 19 nt, Homo sapiens
  misc_RNA (1)...(19): siRNA sense strand
gauggugcuuguugacuua

SEQ ID NO: 1413128 - RNA, 19 nt, Homo sapiens
  misc_RNA (1)...(19): siRNA sense strand
ggacauccuuucagcaguu

SEQ ID NO: 1413129 - RNA, 19 nt, Homo sapiens
  misc_RNA (1)...(19): siRNA sense strand
gaaacacagcucuggaaua

SEQ ID NO: 1413130 - RNA, 19 nt, Homo sapiens
  misc_RNA (1)...(19): siRNA sense strand
ggaaauccuucaacaaucu

SEQ ID NO: 1413131 - RNA, 19 nt, Homo sapiens
  misc_RNA (1)...(19): siRNA sense strand
gcagauaauugaaggaaag

SEQ ID NO: 1413132 - RNA, 19 nt, Homo sapiens
  misc_RNA (1)...(19): siRNA sense strand
ugaaagcauugaagcuaua

SEQ ID NO: 1413133 - RNA, 19 nt, Homo sapiens
  misc_RNA (1)...(19): siRNA sense strand
ggaaagagcaugaugacau

SEQ ID NO: 1413134 - RNA, 19 nt, Homo sapiens
  misc_RNA (1)...(19): siRNA sense strand
ucacgaagcauuuaucauu

SEQ ID NO: 1413135 - RNA, 19 nt, Homo sapiens
  misc_RNA (1)...(19): siRNA sense strand
gcaguucucuucucugaca

SEQ ID NO: 1413136 - RNA, 19 nt, Homo sapiens
  misc_RNA (1)...(19): siRNA sense strand
uuaaagagguauuggaaga

SEQ ID NO: 1413137 - RNA, 19 nt, Homo sapiens
  misc_RNA (1)...(19): siRNA sense strand
aaacugaaauucucuccaa

SEQ ID NO: 1413138 - RNA, 19 nt, Homo sapiens
  misc_RNA (1)...(19): siRNA sense strand
ggcaacaacuuacaaauac

SEQ ID NO: 1413139 - RNA, 19 nt, Homo sapiens
  misc_RNA (1)...(19): siRNA sense strand
gaagaccgauccauaucug

SEQ ID NO: 1413140 - RNA, 19 nt, Homo sapiens
  misc_RNA (1)...(19): siRNA sense strand
ugaccggaaugaacuauuu

SEQ ID NO: 1413141 - RNA, 19 nt, Homo sapiens
  misc_RNA (1)...(19): siRNA sense strand
caaugaaagcuuuagguua

SEQ ID NO: 1413142 - RNA, 19 nt, Homo sapiens
  misc_RNA (1)...(19): siRNA sense strand
ggaccuuagugaauauaaa

SEQ ID NO: 1413143 - RNA, 19 nt, Homo sapiens
  misc_RNA (1)...(19): siRNA sense strand
ggaaauugaugaguauauc

SEQ ID NO: 1413144 - RNA, 19 nt, Homo sapiens
  misc_RNA (1)...(19): siRNA sense strand
cggaagaccucaagaaagu

SEQ ID NO: 1413145 - RNA, 19 nt, Homo sapiens
  misc_RNA (1)...(19): siRNA sense strand
gcaucaaguuuauagaaga

SEQ ID NO: 1413146 - RNA, 19 nt, Homo sapiens
  misc_RNA (1)...(19): siRNA sense strand
gcacccagcuuaucuugca

SEQ ID NO: 1413147 - RNA, 19 nt, Homo sapiens
  misc_RNA (1)...(19): siRNA sense strand
ggaagaaucggacccaaga

SEQ ID NO: 1413148 - RNA, 19 nt, Homo sapiens
  misc_RNA (1)...(19): siRNA sense strand
ugaaauccuugaugaaguu

SEQ ID NO: 1413149 - RNA, 19 nt, Homo sapiens
  misc_RNA (1)...(19): siRNA sense strand
gcugauaguuucaaagcaa

SEQ ID NO: 1413150 - RNA, 19 nt, Homo sapiens
  misc_RNA (1)...(19): siRNA sense strand
gagaccauauccuuaaaug

SEQ ID NO: 1413151 - RNA, 19 nt, Homo sapiens
  misc_RNA (1)...(19): siRNA sense strand
uaaagaggccguuaaggaa

SEQ ID NO: 1413152 - RNA, 19 nt, Homo sapiens
  misc_RNA (1)...(19): siRNA sense strand
guagauccaagcuugauua

SEQ ID NO: 1413153 - RNA, 19 nt, Homo sapiens
  misc_RNA (1)...(19): siRNA sense strand
uggagaagauguugaaaug

SEQ ID NO: 1413154 - RNA, 19 nt, Homo sapiens
  misc_RNA (1)...(19): siRNA sense strand
cagcaguucucuucucuga

SEQ ID NO: 1413155 - RNA, 19 nt, Homo sapiens
  misc_RNA (1)...(19): siRNA sense strand
gaugacacguucuccaguu

SEQ ID NO: 1413156 - RNA, 19 nt, Homo sapiens
  misc_RNA (1)...(19): siRNA sense strand
caaaggcauucaucauaga

SEQ ID NO: 1413157 - RNA, 19 nt, Homo sapiens
  misc_RNA (1)...(19): siRNA sense strand
gauaugauaccggaccuua

SEQ ID NO: 1413158 - RNA, 19 nt, Homo sapiens
  misc_RNA (1)...(19): siRNA sense strand
gggaugcagcuauuuauuu

SEQ ID NO: 1413159 - RNA, 19 nt, Homo sapiens
  misc_RNA (1)...(19): siRNA sense strand
ccaagugacuacaagaaau

SEQ ID NO: 1413160 - RNA, 19 nt, Homo sapiens
  misc_RNA (1)...(19): siRNA sense strand
ugauugacauguauucuga

SEQ ID NO: 1413161 - RNA, 19 nt, Homo sapiens
  misc_RNA (1)...(19): siRNA sense strand
uaauaaagcaguagagguu

SEQ ID NO: 1413162 - RNA, 19 nt, Homo sapiens
  misc_RNA (1)...(19): siRNA sense strand
cauugaagcuauaagagaa

SEQ ID NO: 1413163 - RNA, 19 nt, Homo sapiens
  misc_RNA (1)...(19): siRNA sense strand
ggauucagcagauaauuga

SEQ ID NO: 1413164 - RNA, 19 nt, Homo sapiens
  misc_RNA (1)...(19): siRNA sense strand
aaacuucgcuaucucauac

SEQ ID NO: 1413165 - RNA, 19 nt, Homo sapiens
  misc_RNA (1)...(19): siRNA sense strand
acaaugaaaccaagaauga

SEQ ID NO: 1413166 - RNA, 19 nt, Homo sapiens
  misc_RNA (1)...(19): siRNA sense strand
caaauggacccucauggaa

SEQ ID NO: 1413167 - RNA, 19 nt, Homo sapiens
  misc_RNA (1)...(19): siRNA sense strand
ugaaauagaacuucgaaug

SEQ ID NO: 1413168 - RNA, 19 nt, Homo sapiens
  misc_RNA (1)...(19): siRNA sense strand
uaccggaccuuagugaaua

SEQ ID NO: 1413169 - RNA, 19 nt, Homo sapiens
  misc_RNA (1)...(19): siRNA sense strand
gggaacagcucugaaagca

SEQ ID NO: 1413170 - RNA, 19 nt, Homo sapiens
  misc_RNA (1)...(19): siRNA sense strand
ugacaaaccuuccuuuacg

SEQ ID NO: 1413171 - RNA, 19 nt, Homo sapiens
  misc_RNA (1)...(19): siRNA sense strand
gaacaacaggcugauaguu

SEQ ID NO: 1413172 - RNA, 19 nt, Homo sapiens
  misc_RNA (1)...(19): siRNA sense strand
gauguucucucugauuaug

SEQ ID NO: 1413173 - RNA, 19 nt, Homo sapiens
  misc_RNA (1)...(19): siRNA sense strand
gcauuuaucauucacauca

SEQ ID NO: 1413174 - RNA, 19 nt, Homo sapiens
  misc_RNA (1)...(19): siRNA sense strand
ggaugcagcuauuuauuuu

SEQ ID NO: 1413175 - RNA, 19 nt, Homo sapiens
  misc_RNA (1)...(19): siRNA sense strand
gaacuugaccggaaugaac

SEQ ID NO: 1413176 - RNA, 19 nt, Homo sapiens
  misc_RNA (1)...(19): siRNA sense strand
ggauggugcuuguugacuu

SEQ ID NO: 1413177 - RNA, 19 nt, Homo sapiens
  misc_RNA (1)...(19): siRNA sense strand
acaaaggcauucaucauag

SEQ ID NO: 1413178 - RNA, 19 nt, Homo sapiens
  misc_RNA (1)...(19): siRNA sense strand
acacucaguugaaguauca

SEQ ID NO: 1413179 - RNA, 19 nt, Homo sapiens
  misc_RNA (1)...(19): siRNA sense strand
gaaagugacaagcauuuua

SEQ ID NO: 1413180 - RNA, 19 nt, Homo sapiens
  misc_RNA (1)...(19): siRNA sense strand
gacauugugugggaaauug

SEQ ID NO: 1413181 - RNA, 19 nt, Homo sapiens
  misc_RNA (1)...(19): siRNA sense strand
ggaaguuuaccacuacaaa

SEQ ID NO: 1413182 - RNA, 19 nt, Homo sapiens
  misc_RNA (1)...(19): siRNA sense strand
gcucgaauauucccaagag

SEQ ID NO: 1413183 - RNA, 19 nt, Homo sapiens
  misc_RNA (1)...(19): siRNA sense strand
gaaagaugacaaaggcauu

SEQ ID NO: 1413184 - RNA, 19 nt, Homo sapiens
  misc_RNA (1)...(19): siRNA sense strand
uugauguucucucugauua

SEQ ID NO: 1413185 - RNA, 19 nt, Homo sapiens
  misc_RNA (1)...(19): siRNA sense strand
aaagagguauuggaagauu

SEQ ID NO: 1413186 - RNA, 19 nt, Homo sapiens
  misc_RNA (1)...(19): siRNA sense strand
gggagacccuacaagaaga

SEQ ID NO: 1413187 - RNA, 19 nt, Homo sapiens
  misc_RNA (1)...(19): siRNA sense strand
gaauccuaaugccaucaua

SEQ ID NO: 1413188 - RNA, 19 nt, Homo sapiens
  misc_RNA (1)...(19): siRNA sense strand
agaagaucuugcagcauua

SEQ ID NO: 1413189 - RNA, 19 nt, Homo sapiens
  misc_RNA (1)...(19): siRNA sense strand
caucauagaaagcuuaaga

SEQ ID NO: 1413190 - RNA, 19 nt, Homo sapiens
  misc_RNA (1)...(19): siRNA sense strand
gaagaauuuucccgcuuua

SEQ ID NO: 1413191 - RNA, 19 nt, Homo sapiens
  misc_RNA (1)...(19): siRNA sense strand
caguggauaucaagcuuaa

SEQ ID NO: 1413192 - RNA, 19 nt, Homo sapiens
  misc_RNA (1)...(19): siRNA sense strand
gcauugaagcuauaagaga

SEQ ID NO: 1413193 - RNA, 19 nt, Homo sapiens
  misc_RNA (1)...(19): siRNA sense strand
gaaagcucuucccaaugaa

SEQ ID NO: 1413194 - RNA, 19 nt, Homo sapiens
  misc_RNA (1)...(19): siRNA sense strand
ugacuuaccaggugugauu

SEQ ID NO: 1413195 - RNA, 19 nt, Homo sapiens
  misc_RNA (1)...(19): siRNA sense strand
ggaaaugauugcccaagcu

SEQ ID NO: 1413196 - RNA, 19 nt, Homo sapiens
  misc_RNA (1)...(19): siRNA sense strand
acacagcucuggaauaaaa

SEQ ID NO: 1413197 - RNA, 19 nt, Homo sapiens
  misc_RNA (1)...(19): siRNA sense strand
ugugggaaauugaugagua

SEQ ID NO: 1413198 - RNA, 19 nt, Homo sapiens
  misc_RNA (1)...(19): siRNA sense strand
cuaaaccauuguaaccuuu

SEQ ID NO: 1413199 - RNA, 19 nt, Homo sapiens
  misc_RNA (1)...(19): siRNA sense strand
agagcaugaugacauauuu

SEQ ID NO: 1413200 - RNA, 19 nt, Homo sapiens
  misc_RNA (1)...(19): siRNA sense strand
caacucaugugauugaaaa

SEQ ID NO: 1413201 - RNA, 19 nt, Homo sapiens
  misc_RNA (1)...(19): siRNA sense strand
caagugacuacaagaaauu

SEQ ID NO: 1413202 - RNA, 19 nt, Homo sapiens
  misc_RNA (1)...(19): siRNA sense strand
gcuaaaggcacaccaagug

SEQ ID NO: 1413203 - RNA, 19 nt, Homo sapiens
  misc_RNA (1)...(19): siRNA sense strand
gagaauaugaagaagaguu

SEQ ID NO: 1413204 - RNA, 19 nt, Homo sapiens
  misc_RNA (1)...(19): siRNA sense strand
gcaguauuguuacagacuu

SEQ ID NO: 1413205 - RNA, 19 nt, Homo sapiens
  misc_RNA (1)...(19): siRNA sense strand
uggaaagacuaguguguug

SEQ ID NO: 1413206 - RNA, 19 nt, Homo sapiens
  misc_RNA (1)...(19): siRNA sense strand
ggagaacaaagaauugaga

SEQ ID NO: 1413207 - RNA, 19 nt, Homo sapiens
  misc_RNA (1)...(19): siRNA sense strand
gaaagagcaugaugacaua

SEQ ID NO: 1413208 - RNA, 19 nt, Homo sapiens
  misc_RNA (1)...(19): siRNA sense strand
gaacagcucugaaagcauu

SEQ ID NO: 1413209 - RNA, 19 nt, Homo sapiens
  misc_RNA (1)...(19): siRNA sense strand
gagaagauguugaaaugua

SEQ ID NO: 1413210 - RNA, 19 nt, Homo sapiens
  misc_RNA (1)...(19): siRNA sense strand
gaggacagcuugaggguua

SEQ ID NO: 1413211 - RNA, 19 nt, Homo sapiens
  misc_RNA (1)...(19): siRNA sense strand
gaaacugaauggaagaaua

SEQ ID NO: 1413212 - RNA, 19 nt, Homo sapiens
  misc_RNA (1)...(19): siRNA sense strand
aaagaaggcuguaccguua

SEQ ID NO: 1413213 - RNA, 19 nt, Homo sapiens
  misc_RNA (1)...(19): siRNA sense strand
aaacacagcucuggaauaa

SEQ ID NO: 1413214 - RNA, 19 nt, Homo sapiens
  misc_RNA (1)...(19): siRNA sense strand
gaaauagaacuucgaauga

SEQ ID NO: 1413215 - RNA, 19 nt, Homo sapiens
  misc_RNA (1)...(19): siRNA sense strand
gcaaugauguggucuuguu

SEQ ID NO: 1413216 - RNA, 19 nt, Homo sapiens
  misc_RNA (1)...(19): siRNA sense strand
gaccauauccuuaaaugua

SEQ ID NO: 1413217 - RNA, 19 nt, Homo sapiens
  misc_RNA (1)...(19): siRNA sense strand
gcaaugggaugcagcuauu

SEQ ID NO: 1413218 - RNA, 19 nt, Homo sapiens
  misc_RNA (1)...(19): siRNA sense strand
cagcuuaucuugcaaguga

SEQ ID NO: 1413219 - RNA, 19 nt, Homo sapiens
  misc_RNA (1)...(19): siRNA sense strand
gaaguuaggcgauuagaga

SEQ ID NO: 1413220 - RNA, 19 nt, Homo sapiens
  misc_RNA (1)...(19): siRNA sense strand
gacaaaggcauucaucaua

SEQ ID NO: 1413221 - RNA, 19 nt, Homo sapiens
  misc_RNA (1)...(19): siRNA sense strand
gauccaagcuugauuaagg

SEQ ID NO: 1413222 - RNA, 19 nt, Homo sapiens
  misc_RNA (1)...(19): siRNA sense strand
ggaagaaaguauuaaacga

SEQ ID NO: 1413223 - RNA, 19 nt, Homo sapiens
  misc_RNA (1)...(19): siRNA sense strand
aaacagcucuaaaccauug

SEQ ID NO: 1413224 - RNA, 19 nt, Homo sapiens
  misc_RNA (1)...(19): siRNA sense strand
ugacauguauucugaaguu

SEQ ID NO: 1413225 - RNA, 19 nt, Homo sapiens
  misc_RNA (1)...(19): siRNA sense strand
gaagaccucaagaaaguua

SEQ ID NO: 1413226 - RNA, 19 nt, Homo sapiens
  misc_RNA (1)...(19): siRNA sense strand
gcugaacgcaguauuguua

SEQ ID NO: 1413227 - RNA, 19 nt, Homo sapiens
  misc_RNA (1)...(19): siRNA sense strand
gauggugcuuguugacuua

SEQ ID NO: 1413228 - RNA, 19 nt, Homo sapiens
  misc_RNA (1)...(19): siRNA sense strand
ggacauccuuucagcaguu

SEQ ID NO: 1413229 - RNA, 19 nt, Homo sapiens
  misc_RNA (1)...(19): siRNA sense strand
gaaacacagcucuggaaua

SEQ ID NO: 1413230 - RNA, 19 nt, Homo sapiens
  misc_RNA (1)...(19): siRNA sense strand
ggaaauccuucaacaaucu

SEQ ID NO: 1413231 - RNA, 19 nt, Homo sapiens
  misc_RNA (1)...(19): siRNA sense strand
gcagauaauugaaggaaag

SEQ ID NO: 1413232 - RNA, 19 nt, Homo sapiens
  misc_RNA (1)...(19): siRNA sense strand
ugaaagcauugaagcuaua

SEQ ID NO: 1413233 - RNA, 19 nt, Homo sapiens
  misc_RNA (1)...(19): siRNA sense strand
ggaaagagcaugaugacau

SEQ ID NO: 1413234 - RNA, 19 nt, Homo sapiens
  misc_RNA (1)...(19): siRNA sense strand
ucacgaagcauuuaucauu

SEQ ID NO: 1413235 - RNA, 19 nt, Homo sapiens
  misc_RNA (1)...(19): siRNA sense strand
gcaguucucuucucugaca

SEQ ID NO: 1413236 - RNA, 19 nt, Homo sapiens
  misc_RNA (1)...(19): siRNA sense strand
uuaaagagguauuggaaga

SEQ ID NO: 1413237 - RNA, 19 nt, Homo sapiens
  misc_RNA (1)...(19): siRNA sense strand
aaacugaaauucucuccaa

SEQ ID NO: 1413238 - RNA, 19 nt, Homo sapiens
  misc_RNA (1)...(19): siRNA sense strand
ggcaacaacuuacaaauac

SEQ ID NO: 1413239 - RNA, 19 nt, Homo sapiens
  misc_RNA (1)...(19): siRNA sense strand
gaagaccgauccauaucug

SEQ ID NO: 1413240 - RNA, 19 nt, Homo sapiens
  misc_RNA (1)...(19): siRNA sense strand
ugaccggaaugaacuauuu

SEQ ID NO: 1413241 - RNA, 19 nt, Homo sapiens
  misc_RNA (1)...(19): siRNA sense strand
caaugaaagcuuuagguua

SEQ ID NO: 1413242 - RNA, 19 nt, Homo sapiens
  misc_RNA (1)...(19): siRNA sense strand
ggaccuuagugaauauaaa

SEQ ID NO: 1413243 - RNA, 19 nt, Homo sapiens
  misc_RNA (1)...(19): siRNA sense strand
ggaaauugaugaguauauc

SEQ ID NO: 1413244 - RNA, 19 nt, Homo sapiens
  misc_RNA (1)...(19): siRNA sense strand
cggaagaccucaagaaagu

SEQ ID NO: 1413245 - RNA, 19 nt, Homo sapiens
  misc_RNA (1)...(19): siRNA sense strand
gcaucaaguuuauagaaga

SEQ ID NO: 1413246 - RNA, 19 nt, Homo sapiens
  misc_RNA (1)...(19): siRNA sense strand
gcacccagcuuaucuugca

SEQ ID NO: 1413247 - RNA, 19 nt, Homo sapiens
  misc_RNA (1)...(19): siRNA sense strand
ggaagaaucggacccaaga

SEQ ID NO: 1413248 - RNA, 19 nt, Homo sapiens
  misc_RNA (1)...(19): siRNA sense strand
ugaaauccuugaugaaguu

SEQ ID NO: 1413249 - RNA, 19 nt, Homo sapiens
  misc_RNA (1)...(19): siRNA sense strand
gcugauaguuucaaagcaa

SEQ ID NO: 1413250 - RNA, 19 nt, Homo sapiens
  misc_RNA (1)...(19): siRNA sense strand
gagaccauauccuuaaaug

SEQ ID NO: 1413251 - RNA, 19 nt, Homo sapiens
  misc_RNA (1)...(19): siRNA sense strand
uaaagaggccguuaaggaa

SEQ ID NO: 1413252 - RNA, 19 nt, Homo sapiens
  misc_RNA (1)...(19): siRNA sense strand
guagauccaagcuugauua

SEQ ID NO: 1413253 - RNA, 19 nt, Homo sapiens
  misc_RNA (1)...(19): siRNA sense strand
uggagaagauguugaaaug

SEQ ID NO: 1413254 - RNA, 19 nt, Homo sapiens
  misc_RNA (1)...(19): siRNA sense strand
cagcaguucucuucucuga

SEQ ID NO: 1413255 - RNA, 19 nt, Homo sapiens
  misc_RNA (1)...(19): siRNA sense strand
gaugacacguucuccaguu

SEQ ID NO: 1413256 - RNA, 19 nt, Homo sapiens
  misc_RNA (1)...(19): siRNA sense strand
caaaggcauucaucauaga

SEQ ID NO: 1413257 - RNA, 19 nt, Homo sapiens
  misc_RNA (1)...(19): siRNA sense strand
gauaugauaccggaccuua

SEQ ID NO: 1413258 - RNA, 19 nt, Homo sapiens
  misc_RNA (1)...(19): siRNA sense strand
gggaugcagcuauuuauuu

SEQ ID NO: 1413259 - RNA, 19 nt, Homo sapiens
  misc_RNA (1)...(19): siRNA sense strand
ccaagugacuacaagaaau

SEQ ID NO: 1413260 - RNA, 19 nt, Homo sapiens
  misc_RNA (1)...(19): siRNA sense strand
ugauugacauguauucuga

SEQ ID NO: 1413261 - RNA, 19 nt, Homo sapiens
  misc_RNA (1)...(19): siRNA sense strand
uaauaaagcaguagagguu

SEQ ID NO: 1413262 - RNA, 19 nt, Homo sapiens
  misc_RNA (1)...(19): siRNA sense strand
cauugaagcuauaagagaa

SEQ ID NO: 1413263 - RNA, 19 nt, Homo sapiens
  misc_RNA (1)...(19): siRNA sense strand
ggauucagcagauaauuga

SEQ ID NO: 1413264 - RNA, 19 nt, Homo sapiens
  misc_RNA (1)...(19): siRNA sense strand
aaacuucgcuaucucauac

SEQ ID NO: 1413265 - RNA, 19 nt, Homo sapiens
  misc_RNA (1)...(19): siRNA sense strand
acaaugaaaccaagaauga

SEQ ID NO: 1413266 - RNA, 19 nt, Homo sapiens
  misc_RNA (1)...(19): siRNA sense strand
caaauggacccucauggaa

SEQ ID NO: 1413267 - RNA, 19 nt, Homo sapiens
  misc_RNA (1)...(19): siRNA sense strand
ugaaauagaacuucgaaug

SEQ ID NO: 1413268 - RNA, 19 nt, Homo sapiens
  misc_RNA (1)...(19): siRNA sense strand
uaccggaccuuagugaaua

SEQ ID NO: 1413269 - RNA, 19 nt, Homo sapiens
  misc_RNA (1)...(19): siRNA sense strand
gggaacagcucugaaagca

SEQ ID NO: 1413270 - RNA, 19 nt, Homo sapiens
  misc_RNA (1)...(19): siRNA sense strand
ugacaaaccuuccuuuacg

SEQ ID NO: 1413271 - RNA, 19 nt, Homo sapiens
  misc_RNA (1)...(19): siRNA sense strand
gaacaacaggcugauaguu

SEQ ID NO: 1413272 - RNA, 19 nt, Homo sapiens
  misc_RNA (1)...(19): siRNA sense strand
gauguucucucugauuaug

SEQ ID NO: 1413273 - RNA, 19 nt, Homo sapiens
  misc_RNA (1)...(19): siRNA sense strand
gcauuuaucauucacauca

SEQ ID NO: 1413274 - RNA, 19 nt, Homo sapiens
  misc_RNA (1)...(19): siRNA sense strand
ggaugcagcuauuuauuuu

SEQ ID NO: 1413275 - RNA, 19 nt, Homo sapiens
  misc_RNA (1)...(19): siRNA sense strand
gaacuugaccggaaugaac

SEQ ID NO: 1413276 - RNA, 19 nt, Homo sapiens
  misc_RNA (1)...(19): siRNA sense strand
ggauggugcuuguugacuu

SEQ ID NO: 1413277 - RNA, 19 nt, Homo sapiens
  misc_RNA (1)...(19): siRNA sense strand
acaaaggcauucaucauag

SEQ ID NO: 1413278 - RNA, 19 nt, Homo sapiens
  misc_RNA (1)...(19): siRNA sense strand
acacucaguugaaguauca

SEQ ID NO: 1413279 - RNA, 19 nt, Homo sapiens
  misc_RNA (1)...(19): siRNA sense strand
gaaagugacaagcauuuua

SEQ ID NO: 1413280 - RNA, 19 nt, Homo sapiens
  misc_RNA (1)...(19): siRNA sense strand
gacauugugugggaaauug

SEQ ID NO: 1413281 - RNA, 19 nt, Homo sapiens
  misc_RNA (1)...(19): siRNA sense strand
ggaaguuuaccacuacaaa

SEQ ID NO: 1413282 - RNA, 19 nt, Homo sapiens
  misc_RNA (1)...(19): siRNA sense strand
gcucgaauauucccaagag

SEQ ID NO: 1413283 - RNA, 19 nt, Homo sapiens
  misc_RNA (1)...(19): siRNA sense strand
gaaagaugacaaaggcauu

SEQ ID NO: 1413284 - RNA, 19 nt, Homo sapiens
  misc_RNA (1)...(19): siRNA sense strand
uugauguucucucugauua

SEQ ID NO: 1413285 - RNA, 19 nt, Homo sapiens
  misc_RNA (1)...(19): siRNA sense strand
aaagagguauuggaagauu

SEQ ID NO: 1413286 - RNA, 19 nt, Homo sapiens
  misc_RNA (1)...(19): siRNA sense strand
gggagacccuacaagaaga

SEQ ID NO: 1413287 - RNA, 19 nt, Homo sapiens
  misc_RNA (1)...(19): siRNA sense strand
gaauccuaaugccaucaua

SEQ ID NO: 1413288 - RNA, 19 nt, Homo sapiens
  misc_RNA (1)...(19): siRNA sense strand
agaagaucuugcagcauua

SEQ ID NO: 1413289 - RNA, 19 nt, Homo sapiens
  misc_RNA (1)...(19): siRNA sense strand
caucauagaaagcuuaaga

SEQ ID NO: 1413290 - RNA, 19 nt, Homo sapiens
  misc_RNA (1)...(19): siRNA sense strand
gaagaauuuucccgcuuua

SEQ ID NO: 1413291 - RNA, 19 nt, Homo sapiens
  misc_RNA (1)...(19): siRNA sense strand
caguggauaucaagcuuaa

SEQ ID NO: 1413292 - RNA, 19 nt, Homo sapiens
  misc_RNA (1)...(19): siRNA sense strand
gcauugaagcuauaagaga

SEQ ID NO: 1413293 - RNA, 19 nt, Homo sapiens
  misc_RNA (1)...(19): siRNA sense strand
gaaagcucuucccaaugaa

SEQ ID NO: 1413294 - RNA, 19 nt, Homo sapiens
  misc_RNA (1)...(19): siRNA sense strand
ugacuuaccaggugugauu

SEQ ID NO: 1413295 - RNA, 19 nt, Homo sapiens
  misc_RNA (1)...(19): siRNA sense strand
ggaaaugauugcccaagcu

SEQ ID NO: 1413296 - RNA, 19 nt, Homo sapiens
  misc_RNA (1)...(19): siRNA sense strand
acacagcucuggaauaaaa

SEQ ID NO: 1413297 - RNA, 19 nt, Homo sapiens
  misc_RNA (1)...(19): siRNA sense strand
ugugggaaauugaugagua

SEQ ID NO: 1413298 - RNA, 19 nt, Homo sapiens
  misc_RNA (1)...(19): siRNA sense strand
cuaaaccauuguaaccuuu

SEQ ID NO: 1413299 - RNA, 19 nt, Homo sapiens
  misc_RNA (1)...(19): siRNA sense strand
agagcaugaugacauauuu

SEQ ID NO: 1413300 - RNA, 19 nt, Homo sapiens
  misc_RNA (1)...(19): siRNA sense strand
caacucaugugauugaaaa

SEQ ID NO: 1413301 - RNA, 19 nt, Homo sapiens
  misc_RNA (1)...(19): siRNA sense strand
caagugacuacaagaaauu

SEQ ID NO: 1413302 - RNA, 19 nt, Homo sapiens
  misc_RNA (1)...(19): siRNA sense strand
gcuaaaggcacaccaagug

SEQ ID NO: 1413303 - RNA, 19 nt, Homo sapiens
  misc_RNA (1)...(19): siRNA sense strand
gagaauaugaagaagaguu

SEQ ID NO: 1413304 - RNA, 19 nt, Homo sapiens
  misc_RNA (1)...(19): siRNA sense strand
gcaguauuguuacagacuu

SEQ ID NO: 1413305 - RNA, 19 nt, Homo sapiens
  misc_RNA (1)...(19): siRNA sense strand
uggaaagacuaguguguug

SEQ ID NO: 1413306 - RNA, 19 nt, Homo sapiens
  misc_RNA (1)...(19): siRNA sense strand
ggagaacaaagaauugaga

SEQ ID NO: 1413307 - RNA, 19 nt, Homo sapiens
  misc_RNA (1)...(19): siRNA sense strand
gaaagagcaugaugacaua

SEQ ID NO: 1413308 - RNA, 19 nt, Homo sapiens
  misc_RNA (1)...(19): siRNA sense strand
gaacagcucugaaagcauu

SEQ ID NO: 1413309 - RNA, 19 nt, Homo sapiens
  misc_RNA (1)...(19): siRNA sense strand
gagaagauguugaaaugua

SEQ ID NO: 1413310 - RNA, 19 nt, Homo sapiens
  misc_RNA (1)...(19): siRNA sense strand
gaggacagcuugaggguua

SEQ ID NO: 1413311 - RNA, 19 nt, Homo sapiens
  misc_RNA (1)...(19): siRNA sense strand
gaaacugaauggaagaaua

SEQ ID NO: 1413312 - RNA, 19 nt, Homo sapiens
  misc_RNA (1)...(19): siRNA sense strand
aaagaaggcuguaccguua

SEQ ID NO: 1413313 - RNA, 19 nt, Homo sapiens
  misc_RNA (1)...(19): siRNA sense strand
aaacacagcucuggaauaa

SEQ ID NO: 1413314 - RNA, 19 nt, Homo sapiens
  misc_RNA (1)...(19): siRNA sense strand
gaaauagaacuucgaauga

SEQ ID NO: 1413315 - RNA, 19 nt, Homo sapiens
  misc_RNA (1)...(19): siRNA sense strand
gcaaugauguggucuuguu

SEQ ID NO: 1413316 - RNA, 19 nt, Homo sapiens
  misc_RNA (1)...(19): siRNA sense strand
gaccauauccuuaaaugua

SEQ ID NO: 1413317 - RNA, 19 nt, Homo sapiens
  misc_RNA (1)...(19): siRNA sense strand
gcaaugggaugcagcuauu

SEQ ID NO: 1413318 - RNA, 19 nt, Homo sapiens
  misc_RNA (1)...(19): siRNA sense strand
cagcuuaucuugcaaguga

SEQ ID NO: 1413319 - RNA, 19 nt, Homo sapiens
  misc_RNA (1)...(19): siRNA sense strand
gaaguuaggcgauuagaga

SEQ ID NO: 1413320 - RNA, 19 nt, Homo sapiens
  misc_RNA (1)...(19): siRNA sense strand
gacaaaggcauucaucaua

SEQ ID NO: 1413321 - RNA, 19 nt, Homo sapiens
  misc_RNA (1)...(19): siRNA sense strand
gauccaagcuugauuaagg

SEQ ID NO: 1413322 - RNA, 19 nt, Homo sapiens
  misc_RNA (1)...(19): siRNA sense strand
ggaagaaaguauuaaacga

SEQ ID NO: 1413323 - RNA, 19 nt, Homo sapiens
  misc_RNA (1)...(19): siRNA sense strand
aaacagcucuaaaccauug

SEQ ID NO: 1413324 - RNA, 19 nt, Homo sapiens
  misc_RNA (1)...(19): siRNA sense strand
ugacauguauucugaaguu

SEQ ID NO: 1413325 - RNA, 19 nt, Homo sapiens
  misc_RNA (1)...(19): siRNA sense strand
gaagaccucaagaaaguua

SEQ ID NO: 1413326 - RNA, 19 nt, Homo sapiens
  misc_RNA (1)...(19): siRNA sense strand
gcugaacgcaguauuguua

SEQ ID NO: 1413327 - RNA, 19 nt, Homo sapiens
  misc_RNA (1)...(19): siRNA sense strand
gauggugcuuguugacuua

SEQ ID NO: 1413328 - RNA, 19 nt, Homo sapiens
  misc_RNA (1)...(19): siRNA sense strand
ggacauccuuucagcaguu

SEQ ID NO: 1413329 - RNA, 19 nt, Homo sapiens
  misc_RNA (1)...(19): siRNA sense strand
gaaacacagcucuggaaua

SEQ ID NO: 1413330 - RNA, 19 nt, Homo sapiens
  misc_RNA (1)...(19): siRNA sense strand
ggaaauccuucaacaaucu

SEQ ID NO: 1413331 - RNA, 19 nt, Homo sapiens
  misc_RNA (1)...(19): siRNA sense strand
gcagauaauugaaggaaag

SEQ ID NO: 1413332 - RNA, 19 nt, Homo sapiens
  misc_RNA (1)...(19): siRNA sense strand
ugaaagcauugaagcuaua

SEQ ID NO: 1413333 - RNA, 19 nt, Homo sapiens
  misc_RNA (1)...(19): siRNA sense strand
ggaaagagcaugaugacau

SEQ ID NO: 1413334 - RNA, 19 nt, Homo sapiens
  misc_RNA (1)...(19): siRNA sense strand
ucacgaagcauuuaucauu

SEQ ID NO: 1413335 - RNA, 19 nt, Homo sapiens
  misc_RNA (1)...(19): siRNA sense strand
gcaguucucuucucugaca

SEQ ID NO: 1413336 - RNA, 19 nt, Homo sapiens
  misc_RNA (1)...(19): siRNA sense strand
uuaaagagguauuggaaga

SEQ ID NO: 1413337 - RNA, 19 nt, Homo sapiens
  misc_RNA (1)...(19): siRNA sense strand
aaacugaaauucucuccaa

SEQ ID NO: 1413338 - RNA, 19 nt, Homo sapiens
  misc_RNA (1)...(19): siRNA sense strand
ggcaacaacuuacaaauac

SEQ ID NO: 1413339 - RNA, 19 nt, Homo sapiens
  misc_RNA (1)...(19): siRNA sense strand
gaagaccgauccauaucug

SEQ ID NO: 1413340 - RNA, 19 nt, Homo sapiens
  misc_RNA (1)...(19): siRNA sense strand
ugaccggaaugaacuauuu

SEQ ID NO: 1413341 - RNA, 19 nt, Homo sapiens
  misc_RNA (1)...(19): siRNA sense strand
caaugaaagcuuuagguua

SEQ ID NO: 1413342 - RNA, 19 nt, Homo sapiens
  misc_RNA (1)...(19): siRNA sense strand
ggaccuuagugaauauaaa

SEQ ID NO: 1413343 - RNA, 19 nt, Homo sapiens
  misc_RNA (1)...(19): siRNA sense strand
ggaaauugaugaguauauc

SEQ ID NO: 1413344 - RNA, 19 nt, Homo sapiens
  misc_RNA (1)...(19): siRNA sense strand
cggaagaccucaagaaagu

SEQ ID NO: 1413345 - RNA, 19 nt, Homo sapiens
  misc_RNA (1)...(19): siRNA sense strand
gcaucaaguuuauagaaga

SEQ ID NO: 1413346 - RNA, 19 nt, Homo sapiens
  misc_RNA (1)...(19): siRNA sense strand
gcacccagcuuaucuugca

SEQ ID NO: 1413347 - RNA, 19 nt, Homo sapiens
  misc_RNA (1)...(19): siRNA sense strand
ggaagaaucggacccaaga

SEQ ID NO: 1413348 - RNA, 19 nt, Homo sapiens
  misc_RNA (1)...(19): siRNA sense strand
ugaaauccuugaugaaguu

SEQ ID NO: 1413349 - RNA, 19 nt, Homo sapiens
  misc_RNA (1)...(19): siRNA sense strand
gcugauaguuucaaagcaa

SEQ ID NO: 1413350 - RNA, 19 nt, Homo sapiens
  misc_RNA (1)...(19): siRNA sense strand
gagaccauauccuuaaaug

SEQ ID NO: 1413351 - RNA, 19 nt, Homo sapiens
  misc_RNA (1)...(19): siRNA sense strand
uaaagaggccguuaaggaa

SEQ ID NO: 1413352 - RNA, 19 nt, Homo sapiens
  misc_RNA (1)...(19): siRNA sense strand
guagauccaagcuugauua

SEQ ID NO: 1413353 - RNA, 19 nt, Homo sapiens
  misc_RNA (1)...(19): siRNA sense strand
uggagaagauguugaaaug

SEQ ID NO: 1413354 - RNA, 19 nt, Homo sapiens
  misc_RNA (1)...(19): siRNA sense strand
cagcaguucucuucucuga

SEQ ID NO: 1413355 - RNA, 19 nt, Homo sapiens
  misc_RNA (1)...(19): siRNA sense strand
gaugacacguucuccaguu

SEQ ID NO: 1413356 - RNA, 19 nt, Homo sapiens
  misc_RNA (1)...(19): siRNA sense strand
caaaggcauucaucauaga

SEQ ID NO: 1413357 - RNA, 19 nt, Homo sapiens
  misc_RNA (1)...(19): siRNA sense strand
gauaugauaccggaccuua

SEQ ID NO: 1413358 - RNA, 19 nt, Homo sapiens
  misc_RNA (1)...(19): siRNA sense strand
gggaugcagcuauuuauuu

SEQ ID NO: 1413359 - RNA, 19 nt, Homo sapiens
  misc_RNA (1)...(19): siRNA sense strand
ccaagugacuacaagaaau

SEQ ID NO: 1413360 - RNA, 19 nt, Homo sapiens
  misc_RNA (1)...(19): siRNA sense strand
ugauugacauguauucuga

SEQ ID NO: 1413361 - RNA, 19 nt, Homo sapiens
  misc_RNA (1)...(19): siRNA sense strand
uaauaaagcaguagagguu

SEQ ID NO: 1413362 - RNA, 19 nt, Homo sapiens
  misc_RNA (1)...(19): siRNA sense strand
cauugaagcuauaagagaa

SEQ ID NO: 1413363 - RNA, 19 nt, Homo sapiens
  misc_RNA (1)...(19): siRNA sense strand
ggauucagcagauaauuga

SEQ ID NO: 1413364 - RNA, 19 nt, Homo sapiens
  misc_RNA (1)...(19): siRNA sense strand
aaacuucgcuaucucauac

SEQ ID NO: 1413365 - RNA, 19 nt, Homo sapiens
  misc_RNA (1)...(19): siRNA sense strand
acaaugaaaccaagaauga

SEQ ID NO: 1413366 - RNA, 19 nt, Homo sapiens
  misc_RNA (1)...(19): siRNA sense strand
caaauggacccucauggaa

SEQ ID NO: 1413367 - RNA, 19 nt, Homo sapiens
  misc_RNA (1)...(19): siRNA sense strand
ugaaauagaacuucgaaug

SEQ ID NO: 1413368 - RNA, 19 nt, Homo sapiens
  misc_RNA (1)...(19): siRNA sense strand
uaccggaccuuagugaaua

SEQ ID NO: 1413369 - RNA, 19 nt, Homo sapiens
  misc_RNA (1)...(19): siRNA sense strand
gggaacagcucugaaagca

SEQ ID NO: 1413370 - RNA, 19 nt, Homo sapiens
  misc_RNA (1)...(19): siRNA sense strand
ugacaaaccuuccuuuacg

SEQ ID NO: 1413371 - RNA, 19 nt, Homo sapiens
  misc_RNA (1)...(19): siRNA sense strand
gaacaacaggcugauaguu

SEQ ID NO: 1413372 - RNA, 19 nt, Homo sapiens
  misc_RNA (1)...(19): siRNA sense strand
gauguucucucugauuaug

SEQ ID NO: 1413373 - RNA, 19 nt, Homo sapiens
  misc_RNA (1)...(19): siRNA sense strand
gcauuuaucauucacauca

SEQ ID NO: 1413374 - RNA, 19 nt, Homo sapiens
  misc_RNA (1)...(19): siRNA sense strand
ggaugcagcuauuuauuuu

SEQ ID NO: 1413375 - RNA, 19 nt, Homo sapiens
  misc_RNA (1)...(19): siRNA sense strand
gaacuugaccggaaugaac

SEQ ID NO: 1413376 - RNA, 19 nt, Homo sapiens
  misc_RNA (1)...(19): siRNA sense strand
ggauggugcuuguugacuu

SEQ ID NO: 1413377 - RNA, 19 nt, Homo sapiens
  misc_RNA (1)...(19): siRNA sense strand
acaaaggcauucaucauag

SEQ ID NO: 1413378 - RNA, 19 nt, Homo sapiens
  misc_RNA (1)...(19): siRNA sense strand
acacucaguugaaguauca

SEQ ID NO: 1413379 - RNA, 19 nt, Homo sapiens
  misc_RNA (1)...(19): siRNA sense strand
gaaagugacaagcauuuua

SEQ ID NO: 1413380 - RNA, 19 nt, Homo sapiens
  misc_RNA (1)...(19): siRNA sense strand
gacauugugugggaaauug

SEQ ID NO: 1413381 - RNA, 19 nt, Homo sapiens
  misc_RNA (1)...(19): siRNA sense strand
ggaaguuuaccacuacaaa

SEQ ID NO: 1413382 - RNA, 19 nt, Homo sapiens
  misc_RNA (1)...(19): siRNA sense strand
gcucgaauauucccaagag

SEQ ID NO: 1413383 - RNA, 19 nt, Homo sapiens
  misc_RNA (1)...(19): siRNA sense strand
gaaagaugacaaaggcauu

SEQ ID NO: 1413384 - RNA, 19 nt, Homo sapiens
  misc_RNA (1)...(19): siRNA sense strand
uugauguucucucugauua

SEQ ID NO: 1413385 - RNA, 19 nt, Homo sapiens
  misc_RNA (1)...(19): siRNA sense strand
aaagagguauuggaagauu

SEQ ID NO: 1413386 - RNA, 19 nt, Homo sapiens
  misc_RNA (1)...(19): siRNA sense strand
gggagacccuacaagaaga

SEQ ID NO: 1413387 - RNA, 19 nt, Homo sapiens
  misc_RNA (1)...(19): siRNA sense strand
gaauccuaaugccaucaua

SEQ ID NO: 1413388 - RNA, 19 nt, Homo sapiens
  misc_RNA (1)...(19): siRNA sense strand
agaagaucuugcagcauua

SEQ ID NO: 1413389 - RNA, 19 nt, Homo sapiens
  misc_RNA (1)...(19): siRNA sense strand
caucauagaaagcuuaaga

SEQ ID NO: 1413390 - RNA, 19 nt, Homo sapiens
  misc_RNA (1)...(19): siRNA sense strand
gaagaauuuucccgcuuua

SEQ ID NO: 1413391 - RNA, 19 nt, Homo sapiens
  misc_RNA (1)...(19): siRNA sense strand
caguggauaucaagcuuaa

SEQ ID NO: 1413392 - RNA, 19 nt, Homo sapiens
  misc_RNA (1)...(19): siRNA sense strand
gcauugaagcuauaagaga

SEQ ID NO: 1413393 - RNA, 19 nt, Homo sapiens
  misc_RNA (1)...(19): siRNA sense strand
gaaagcucuucccaaugaa

SEQ ID NO: 1413394 - RNA, 19 nt, Homo sapiens
  misc_RNA (1)...(19): siRNA sense strand
ugacuuaccaggugugauu

SEQ ID NO: 1413395 - RNA, 19 nt, Homo sapiens
  misc_RNA (1)...(19): siRNA sense strand
ggaaaugauugcccaagcu

SEQ ID NO: 1413396 - RNA, 19 nt, Homo sapiens
  misc_RNA (1)...(19): siRNA sense strand
acacagcucuggaauaaaa

SEQ ID NO: 1413397 - RNA, 19 nt, Homo sapiens
  misc_RNA (1)...(19): siRNA sense strand
ugugggaaauugaugagua

SEQ ID NO: 1413398 - RNA, 19 nt, Homo sapiens
  misc_RNA (1)...(19): siRNA sense strand
cuaaaccauuguaaccuuu

SEQ ID NO: 1413399 - RNA, 19 nt, Homo sapiens
  misc_RNA (1)...(19): siRNA sense strand
agagcaugaugacauauuu

SEQ ID NO: 1413400 - RNA, 19 nt, Homo sapiens
  misc_RNA (1)...(19): siRNA sense strand
caacucaugugauugaaaa

SEQ ID NO: 1413401 - RNA, 19 nt, Homo sapiens
  misc_RNA (1)...(19): siRNA sense strand
caagugacuacaagaaauu

SEQ ID NO: 1413402 - RNA, 19 nt, Homo sapiens
  misc_RNA (1)...(19): siRNA sense strand
gcuaaaggcacaccaagug

SEQ ID NO: 1413403 - RNA, 19 nt, Homo sapiens
  misc_RNA (1)...(19): siRNA sense strand
gagaauaugaagaagaguu

SEQ ID NO: 1413404 - RNA, 19 nt, Homo sapiens
  misc_RNA (1)...(19): siRNA sense strand
gcaguauuguuacagacuu

SEQ ID NO: 1413405 - RNA, 19 nt, Homo sapiens
  misc_RNA (1)...(19): siRNA sense strand
uggaaagacuaguguguug

SEQ ID NO: 1413406 - RNA, 19 nt, Homo sapiens
  misc_RNA (1)...(19): siRNA sense strand
ggagaacaaagaauugaga

SEQ ID NO: 1413407 - RNA, 19 nt, Homo sapiens
  misc_RNA (1)...(19): siRNA sense strand
gaaagagcaugaugacaua

SEQ ID NO: 1413408 - RNA, 19 nt, Homo sapiens
  misc_RNA (1)...(19): siRNA sense strand
gaacagcucugaaagcauu

SEQ ID NO: 1413409 - RNA, 19 nt, Homo sapiens
  misc_RNA (1)...(19): siRNA sense strand
gagaagauguugaaaugua

SEQ ID NO: 1413410 - RNA, 19 nt, Homo sapiens
  misc_RNA (1)...(19): siRNA sense strand
gaggacagcuugaggguua

SEQ ID NO: 1413411 - RNA, 19 nt, Homo sapiens
  misc_RNA (1)...(19): siRNA sense strand
gaaacugaauggaagaaua

SEQ ID NO: 1413412 - RNA, 19 nt, Homo sapiens
  misc_RNA (1)...(19): siRNA sense strand
aaagaaggcuguaccguua

SEQ ID NO: 1413413 - RNA, 19 nt, Homo sapiens
  misc_RNA (1)...(19): siRNA sense strand
aaacacagcucuggaauaa

SEQ ID NO: 1413414 - RNA, 19 nt, Homo sapiens
  misc_RNA (1)...(19): siRNA sense strand
gaaauagaacuucgaauga

SEQ ID NO: 1413415 - RNA, 19 nt, Homo sapiens
  misc_RNA (1)...(19): siRNA sense strand
gcaaugauguggucuuguu

SEQ ID NO: 1413416 - RNA, 19 nt, Homo sapiens
  misc_RNA (1)...(19): siRNA sense strand
gaccauauccuuaaaugua

SEQ ID NO: 1413417 - RNA, 19 nt, Homo sapiens
  misc_RNA (1)...(19): siRNA sense strand
gcaaugggaugcagcuauu

SEQ ID NO: 1413418 - RNA, 19 nt, Homo sapiens
  misc_RNA (1)...(19): siRNA sense strand
cagcuuaucuugcaaguga

SEQ ID NO: 1413419 - RNA, 19 nt, Homo sapiens
  misc_RNA (1)...(19): siRNA sense strand
gaaguuaggcgauuagaga

SEQ ID NO: 1413420 - RNA, 19 nt, Homo sapiens
  misc_RNA (1)...(19): siRNA sense strand
gacaaaggcauucaucaua

SEQ ID NO: 1413421 - RNA, 19 nt, Homo sapiens
  misc_RNA (1)...(19): siRNA sense strand
gauccaagcuugauuaagg

SEQ ID NO: 1413422 - RNA, 19 nt, Homo sapiens
  misc_RNA (1)...(19): siRNA sense strand
ggaagaaaguauuaaacga

SEQ ID NO: 1413423 - RNA, 19 nt, Homo sapiens
  misc_RNA (1)...(19): siRNA sense strand
aaacagcucuaaaccauug

SEQ ID NO: 1413424 - RNA, 19 nt, Homo sapiens
  misc_RNA (1)...(19): siRNA sense strand
ugacauguauucugaaguu

SEQ ID NO: 1413425 - RNA, 19 nt, Homo sapiens
  misc_RNA (1)...(19): siRNA sense strand
gaagaccucaagaaaguua

SEQ ID NO: 1413426 - RNA, 19 nt, Homo sapiens
  misc_RNA (1)...(19): siRNA sense strand
gcugaacgcaguauuguua

SEQ ID NO: 1413427 - RNA, 19 nt, Homo sapiens
  misc_RNA (1)...(19): siRNA sense strand
gauggugcuuguugacuua

SEQ ID NO: 1413428 - RNA, 19 nt, Homo sapiens
  misc_RNA (1)...(19): siRNA sense strand
ggacauccuuucagcaguu

SEQ ID NO: 1413429 - RNA, 19 nt, Homo sapiens
  misc_RNA (1)...(19): siRNA sense strand
gaaacacagcucuggaaua

SEQ ID NO: 1413430 - RNA, 19 nt, Homo sapiens
  misc_RNA (1)...(19): siRNA sense strand
ggaaauccuucaacaaucu

SEQ ID NO: 1413431 - RNA, 19 nt, Homo sapiens
  misc_RNA (1)...(19): siRNA sense strand
gcagauaauugaaggaaag

SEQ ID NO: 1413432 - RNA, 19 nt, Homo sapiens
  misc_RNA (1)...(19): siRNA sense strand
ugaaagcauugaagcuaua

SEQ ID NO: 1413433 - RNA, 19 nt, Homo sapiens
  misc_RNA (1)...(19): siRNA sense strand
ggaaagagcaugaugacau

SEQ ID NO: 1413434 - RNA, 19 nt, Homo sapiens
  misc_RNA (1)...(19): siRNA sense strand
ucacgaagcauuuaucauu

SEQ ID NO: 1413435 - RNA, 19 nt, Homo sapiens
  misc_RNA (1)...(19): siRNA sense strand
gcaguucucuucucugaca

SEQ ID NO: 1413436 - RNA, 19 nt, Homo sapiens
  misc_RNA (1)...(19): siRNA sense strand
uuaaagagguauuggaaga

SEQ ID NO: 1413437 - RNA, 19 nt, Homo sapiens
  misc_RNA (1)...(19): siRNA sense strand
aaacugaaauucucuccaa

SEQ ID NO: 1413438 - RNA, 19 nt, Homo sapiens
  misc_RNA (1)...(19): siRNA sense strand
ggcaacaacuuacaaauac

SEQ ID NO: 1413439 - RNA, 19 nt, Homo sapiens
  misc_RNA (1)...(19): siRNA sense strand
gaagaccgauccauaucug

SEQ ID NO: 1413440 - RNA, 19 nt, Homo sapiens
  misc_RNA (1)...(19): siRNA sense strand
ugaccggaaugaacuauuu

SEQ ID NO: 1413441 - RNA, 19 nt, Homo sapiens
  misc_RNA (1)...(19): siRNA sense strand
caaugaaagcuuuagguua

SEQ ID NO: 1413442 - RNA, 19 nt, Homo sapiens
  misc_RNA (1)...(19): siRNA sense strand
ggaccuuagugaauauaaa

SEQ ID NO: 1413443 - RNA, 19 nt, Homo sapiens
  misc_RNA (1)...(19): siRNA sense strand
ggaaauugaugaguauauc

SEQ ID NO: 1413444 - RNA, 19 nt, Homo sapiens
  misc_RNA (1)...(19): siRNA sense strand
cggaagaccucaagaaagu

SEQ ID NO: 1413445 - RNA, 19 nt, Homo sapiens
  misc_RNA (1)...(19): siRNA sense strand
gcaucaaguuuauagaaga

SEQ ID NO: 1413446 - RNA, 19 nt, Homo sapiens
  misc_RNA (1)...(19): siRNA sense strand
gcacccagcuuaucuugca

SEQ ID NO: 1413447 - RNA, 19 nt, Homo sapiens
  misc_RNA (1)...(19): siRNA sense strand
ggaagaaucggacccaaga

SEQ ID NO: 1413448 - RNA, 19 nt, Homo sapiens
  misc_RNA (1)...(19): siRNA sense strand
ugaaauccuugaugaaguu

SEQ ID NO: 1413449 - RNA, 19 nt, Homo sapiens
  misc_RNA (1)...(19): siRNA sense strand
gcugauaguuucaaagcaa

SEQ ID NO: 1413450 - RNA, 19 nt, Homo sapiens
  misc_RNA (1)...(19): siRNA sense strand
gagaccauauccuuaaaug

SEQ ID NO: 1413451 - RNA, 19 nt, Homo sapiens
  misc_RNA (1)...(19): siRNA sense strand
uaaagaggccguuaaggaa

SEQ ID NO: 1413452 - RNA, 19 nt, Homo sapiens
  misc_RNA (1)...(19): siRNA sense strand
guagauccaagcuugauua

SEQ ID NO: 1413453 - RNA, 19 nt, Homo sapiens
  misc_RNA (1)...(19): siRNA sense strand
uggagaagauguugaaaug

SEQ ID NO: 1413454 - RNA, 19 nt, Homo sapiens
  misc_RNA (1)...(19): siRNA sense strand
cagcaguucucuucucuga

SEQ ID NO: 1413455 - RNA, 19 nt, Homo sapiens
  misc_RNA (1)...(19): siRNA sense strand
gaugacacguucuccaguu

SEQ ID NO: 1413456 - RNA, 19 nt, Homo sapiens
  misc_RNA (1)...(19): siRNA sense strand
caaaggcauucaucauaga

SEQ ID NO: 1413457 - RNA, 19 nt, Homo sapiens
  misc_RNA (1)...(19): siRNA sense strand
gauaugauaccggaccuua

SEQ ID NO: 1413458 - RNA, 19 nt, Homo sapiens
  misc_RNA (1)...(19): siRNA sense strand
gggaugcagcuauuuauuu

SEQ ID NO: 1413459 - RNA, 19 nt, Homo sapiens
  misc_RNA (1)...(19): siRNA sense strand
ccaagugacuacaagaaau

SEQ ID NO: 1413460 - RNA, 19 nt, Homo sapiens
  misc_RNA (1)...(19): siRNA sense strand
ugauugacauguauucuga

SEQ ID NO: 1413461 - RNA, 19 nt, Homo sapiens
  misc_RNA (1)...(19): siRNA sense strand
uaauaaagcaguagagguu

SEQ ID NO: 1413462 - RNA, 19 nt, Homo sapiens
  misc_RNA (1)...(19): siRNA sense strand
cauugaagcuauaagagaa

SEQ ID NO: 1413463 - RNA, 19 nt, Homo sapiens
  misc_RNA (1)...(19): siRNA sense strand
ggauucagcagauaauuga

SEQ ID NO: 1413464 - RNA, 19 nt, Homo sapiens
  misc_RNA (1)...(19): siRNA sense strand
aaacuucgcuaucucauac

SEQ ID NO: 1413465 - RNA, 19 nt, Homo sapiens
  misc_RNA (1)...(19): siRNA sense strand
acaaugaaaccaagaauga

SEQ ID NO: 1413466 - RNA, 19 nt, Homo sapiens
  misc_RNA (1)...(19): siRNA sense strand
caaauggacccucauggaa

SEQ ID NO: 1413467 - RNA, 19 nt, Homo sapiens
  misc_RNA (1)...(19): siRNA sense strand
ugaaauagaacuucgaaug

SEQ ID NO: 1413468 - RNA, 19 nt, Homo sapiens
  misc_RNA (1)...(19): siRNA sense strand
uaccggaccuuagugaaua

SEQ ID NO: 1413469 - RNA, 19 nt, Homo sapiens
  misc_RNA (1)...(19): siRNA sense strand
gggaacagcucugaaagca

SEQ ID NO: 1413470 - RNA, 19 nt, Homo sapiens
  misc_RNA (1)...(19): siRNA sense strand
ugacaaaccuuccuuuacg

SEQ ID NO: 1413471 - RNA, 19 nt, Homo sapiens
  misc_RNA (1)...(19): siRNA sense strand
gaacaacaggcugauaguu

SEQ ID NO: 1413472 - RNA, 19 nt, Homo sapiens
  misc_RNA (1)...(19): siRNA sense strand
gauguucucucugauuaug

SEQ ID NO: 1413473 - RNA, 19 nt, Homo sapiens
  misc_RNA (1)...(19): siRNA sense strand
gcauuuaucauucacauca

SEQ ID NO: 1413474 - RNA, 19 nt, Homo sapiens
  misc_RNA (1)...(19): siRNA sense strand
ggaugcagcuauuuauuuu

SEQ ID NO: 1413475 - RNA, 19 nt, Homo sapiens
  misc_RNA (1)...(19): siRNA sense strand
gaacuugaccggaaugaac

SEQ ID NO: 1413476 - RNA, 19 nt, Homo sapiens
  misc_RNA (1)...(19): siRNA sense strand
ggauggugcuuguugacuu

SEQ ID NO: 1413477 - RNA, 19 nt, Homo sapiens
  misc_RNA (1)...(19): siRNA sense strand
acaaaggcauucaucauag

SEQ ID NO: 1413478 - RNA, 19 nt, Homo sapiens
  misc_RNA (1)...(19): siRNA sense strand
acacucaguugaaguauca

SEQ ID NO: 1413479 - RNA, 19 nt, Homo sapiens
  misc_RNA (1)...(19): siRNA sense strand
gaaagugacaagcauuuua

SEQ ID NO: 1413480 - RNA, 19 nt, Homo sapiens
  misc_RNA (1)...(19): siRNA sense strand
gacauugugugggaaauug

SEQ ID NO: 1413481 - RNA, 19 nt, Homo sapiens
  misc_RNA (1)...(19): siRNA sense strand
ggaaguuuaccacuacaaa

SEQ ID NO: 1413482 - RNA, 19 nt, Homo sapiens
  misc_RNA (1)...(19): siRNA sense strand
gcucgaauauucccaagag

SEQ ID NO: 1413483 - RNA, 19 nt, Homo sapiens
  misc_RNA (1)...(19): siRNA sense strand
gaaagaugacaaaggcauu

SEQ ID NO: 1413484 - RNA, 19 nt, Homo sapiens
  misc_RNA (1)...(19): siRNA sense strand
uugauguucucucugauua

SEQ ID NO: 1413485 - RNA, 19 nt, Homo sapiens
  misc_RNA (1)...(19): siRNA sense strand
aaagagguauuggaagauu

SEQ ID NO: 1413486 - RNA, 19 nt, Homo sapiens
  misc_RNA (1)...(19): siRNA sense strand
gggagacccuacaagaaga

SEQ ID NO: 1413487 - RNA, 19 nt, Homo sapiens
  misc_RNA (1)...(19): siRNA sense strand
gaauccuaaugccaucaua

SEQ ID NO: 1413488 - RNA, 19 nt, Homo sapiens
  misc_RNA (1)...(19): siRNA sense strand
agaagaucuugcagcauua

SEQ ID NO: 1413489 - RNA, 19 nt, Homo sapiens
  misc_RNA (1)...(19): siRNA sense strand
caucauagaaagcuuaaga

SEQ ID NO: 1413490 - RNA, 19 nt, Homo sapiens
  misc_RNA (1)...(19): siRNA sense strand
gaagaauuuucccgcuuua

SEQ ID NO: 1413491 - RNA, 19 nt, Homo sapiens
  misc_RNA (1)...(19): siRNA sense strand
caguggauaucaagcuuaa

SEQ ID NO: 1413492 - RNA, 19 nt, Homo sapiens
  misc_RNA (1)...(19): siRNA sense strand
gcauugaagcuauaagaga

SEQ ID NO: 1413493 - RNA, 19 nt, Homo sapiens
  misc_RNA (1)...(19): siRNA sense strand
gaaagcucuucccaaugaa

SEQ ID NO: 1413494 - RNA, 19 nt, Homo sapiens
  misc_RNA (1)...(19): siRNA sense strand
ugacuuaccaggugugauu

SEQ ID NO: 1413495 - RNA, 19 nt, Homo sapiens
  misc_RNA (1)...(19): siRNA sense strand
ggaaaugauugcccaagcu

SEQ ID NO: 1413496 - RNA, 19 nt, Homo sapiens
  misc_RNA (1)...(19): siRNA sense strand
acacagcucuggaauaaaa

SEQ ID NO: 1413497 - RNA, 19 nt, Homo sapiens
  misc_RNA (1)...(19): siRNA sense strand
ugugggaaauugaugagua

SEQ ID NO: 1413498 - RNA, 19 nt, Homo sapiens
  misc_RNA (1)...(19): siRNA sense strand
cuaaaccauuguaaccuuu

SEQ ID NO: 1413499 - RNA, 19 nt, Homo sapiens
  misc_RNA (1)...(19): siRNA sense strand
agagcaugaugacauauuu

SEQ ID NO: 1413500 - RNA, 19 nt, Homo sapiens
  misc_RNA (1)...(19): siRNA sense strand
caacucaugugauugaaaa

SEQ ID NO: 1413501 - RNA, 19 nt, Homo sapiens
  misc_RNA (1)...(19): siRNA sense strand
caagugacuacaagaaauu

SEQ ID NO: 1413502 - RNA, 19 nt, Homo sapiens
  misc_RNA (1)...(19): siRNA sense strand
gcuaaaggcacaccaagug

SEQ ID NO: 1413503 - RNA, 19 nt, Homo sapiens
  misc_RNA (1)...(19): siRNA sense strand
gagaauaugaagaagaguu

SEQ ID NO: 1413504 - RNA, 19 nt, Homo sapiens
  misc_RNA (1)...(19): siRNA sense strand
gcaguauuguuacagacuu

SEQ ID NO: 1413505 - RNA, 19 nt, Homo sapiens
  misc_RNA (1)...(19): siRNA sense strand
uggaaagacuaguguguug

SEQ ID NO: 1413506 - RNA, 19 nt, Homo sapiens
  misc_RNA (1)...(19): siRNA sense strand
ggagaacaaagaauugaga

SEQ ID NO: 1413507 - RNA, 19 nt, Homo sapiens
  misc_RNA (1)...(19): siRNA sense strand
gaaagagcaugaugacaua

SEQ ID NO: 1413508 - RNA, 19 nt, Homo sapiens
  misc_RNA (1)...(19): siRNA sense strand
gaacagcucugaaagcauu

SEQ ID NO: 1413509 - RNA, 19 nt, Homo sapiens
  misc_RNA (1)...(19): siRNA sense strand
gagaagauguugaaaugua

SEQ ID NO: 1413510 - RNA, 19 nt, Homo sapiens
  misc_RNA (1)...(19): siRNA sense strand
gaggacagcuugaggguua

SEQ ID NO: 1413511 - RNA, 19 nt, Homo sapiens
  misc_RNA (1)...(19): siRNA sense strand
gaaacugaauggaagaaua

SEQ ID NO: 1413512 - RNA, 19 nt, Homo sapiens
  misc_RNA (1)...(19): siRNA sense strand
aaagaaggcuguaccguua

SEQ ID NO: 1413513 - RNA, 19 nt, Homo sapiens
  misc_RNA (1)...(19): siRNA sense strand
aaacacagcucuggaauaa

SEQ ID NO: 1413514 - RNA, 19 nt, Homo sapiens
  misc_RNA (1)...(19): siRNA sense strand
gaaauagaacuucgaauga

SEQ ID NO: 1413515 - RNA, 19 nt, Homo sapiens
  misc_RNA (1)...(19): siRNA sense strand
gcaaugauguggucuuguu

SEQ ID NO: 1413516 - RNA, 19 nt, Homo sapiens
  misc_RNA (1)...(19): siRNA sense strand
gaccauauccuuaaaugua

SEQ ID NO: 1413517 - RNA, 19 nt, Homo sapiens
  misc_RNA (1)...(19): siRNA sense strand
gcaaugggaugcagcuauu

SEQ ID NO: 1413518 - RNA, 19 nt, Homo sapiens
  misc_RNA (1)...(19): siRNA sense strand
cagcuuaucuugcaaguga

SEQ ID NO: 1413519 - RNA, 19 nt, Homo sapiens
  misc_RNA (1)...(19): siRNA sense strand
gaaguuaggcgauuagaga

SEQ ID NO: 1413520 - RNA, 19 nt, Homo sapiens
  misc_RNA (1)...(19): siRNA sense strand
gacaaaggcauucaucaua

SEQ ID NO: 1413521 - RNA, 19 nt, Homo sapiens
  misc_RNA (1)...(19): siRNA sense strand
gauccaagcuugauuaagg

SEQ ID NO: 1413522 - RNA, 19 nt, Homo sapiens
  misc_RNA (1)...(19): siRNA sense strand
ggaagaaaguauuaaacga

SEQ ID NO: 1413523 - RNA, 19 nt, Homo sapiens
  misc_RNA (1)...(19): siRNA sense strand
aaacagcucuaaaccauug

SEQ ID NO: 1413524 - RNA, 19 nt, Homo sapiens
  misc_RNA (1)...(19): siRNA sense strand
ugacauguauucugaaguu

SEQ ID NO: 1413525 - RNA, 19 nt, Homo sapiens
  misc_RNA (1)...(19): siRNA sense strand
gaagaccucaagaaaguua

SEQ ID NO: 1413526 - RNA, 19 nt, Homo sapiens
  misc_RNA (1)...(19): siRNA sense strand
gcugaacgcaguauuguua

SEQ ID NO: 1413527 - RNA, 19 nt, Homo sapiens
  misc_RNA (1)...(19): siRNA sense strand
gauggugcuuguugacuua

SEQ ID NO: 1413528 - RNA, 19 nt, Homo sapiens
  misc_RNA (1)...(19): siRNA sense strand
ggacauccuuucagcaguu

SEQ ID NO: 1413529 - RNA, 19 nt, Homo sapiens
  misc_RNA (1)...(19): siRNA sense strand
gaaacacagcucuggaaua

SEQ ID NO: 1413530 - RNA, 19 nt, Homo sapiens
  misc_RNA (1)...(19): siRNA sense strand
ggaaauccuucaacaaucu

SEQ ID NO: 1413531 - RNA, 19 nt, Homo sapiens
  misc_RNA (1)...(19): siRNA sense strand
gcagauaauugaaggaaag

SEQ ID NO: 1413532 - RNA, 19 nt, Homo sapiens
  misc_RNA (1)...(19): siRNA sense strand
ugaaagcauugaagcuaua

SEQ ID NO: 1413533 - RNA, 19 nt, Homo sapiens
  misc_RNA (1)...(19): siRNA sense strand
ggaaagagcaugaugacau

SEQ ID NO: 1413534 - RNA, 19 nt, Homo sapiens
  misc_RNA (1)...(19): siRNA sense strand
ucacgaagcauuuaucauu

SEQ ID NO: 1413535 - RNA, 19 nt, Homo sapiens
  misc_RNA (1)...(19): siRNA sense strand
gcaguucucuucucugaca

SEQ ID NO: 1413536 - RNA, 19 nt, Homo sapiens
  misc_RNA (1)...(19): siRNA sense strand
uuaaagagguauuggaaga

SEQ ID NO: 1413537 - RNA, 19 nt, Homo sapiens
  misc_RNA (1)...(19): siRNA sense strand
aaacugaaauucucuccaa

SEQ ID NO: 1413538 - RNA, 19 nt, Homo sapiens
  misc_RNA (1)...(19): siRNA sense strand
ggcaacaacuuacaaauac

SEQ ID NO: 1413539 - RNA, 19 nt, Homo sapiens
  misc_RNA (1)...(19): siRNA sense strand
gaagaccgauccauaucug

SEQ ID NO: 1413540 - RNA, 19 nt, Homo sapiens
  misc_RNA (1)...(19): siRNA sense strand
ugaccggaaugaacuauuu

SEQ ID NO: 1413541 - RNA, 19 nt, Homo sapiens
  misc_RNA (1)...(19): siRNA sense strand
caaugaaagcuuuagguua

SEQ ID NO: 1413542 - RNA, 19 nt, Homo sapiens
  misc_RNA (1)...(19): siRNA sense strand
ggaccuuagugaauauaaa

SEQ ID NO: 1413543 - RNA, 19 nt, Homo sapiens
  misc_RNA (1)...(19): siRNA sense strand
ggaaauugaugaguauauc

SEQ ID NO: 1413544 - RNA, 19 nt, Homo sapiens
  misc_RNA (1)...(19): siRNA sense strand
cggaagaccucaagaaagu

SEQ ID NO: 1413545 - RNA, 19 nt, Homo sapiens
  misc_RNA (1)...(19): siRNA sense strand
gcaucaaguuuauagaaga

SEQ ID NO: 1413546 - RNA, 19 nt, Homo sapiens
  misc_RNA (1)...(19): siRNA sense strand
gcacccagcuuaucuugca

SEQ ID NO: 1413547 - RNA, 19 nt, Homo sapiens
  misc_RNA (1)...(19): siRNA sense strand
ggaagaaucggacccaaga

SEQ ID NO: 1413548 - RNA, 19 nt, Homo sapiens
  misc_RNA (1)...(19): siRNA sense strand
ugaaauccuugaugaaguu

SEQ ID NO: 1413549 - RNA, 19 nt, Homo sapiens
  misc_RNA (1)...(19): siRNA sense strand
gcugauaguuucaaagcaa

SEQ ID NO: 1413550 - RNA, 19 nt, Homo sapiens
  misc_RNA (1)...(19): siRNA sense strand
gagaccauauccuuaaaug

SEQ ID NO: 1413551 - RNA, 19 nt, Homo sapiens
  misc_RNA (1)...(19): siRNA sense strand
uaaagaggccguuaaggaa

SEQ ID NO: 1413552 - RNA, 19 nt, Homo sapiens
  misc_RNA (1)...(19): siRNA sense strand
guagauccaagcuugauua

SEQ ID NO: 1413553 - RNA, 19 nt, Homo sapiens
  misc_RNA (1)...(19): siRNA sense strand
uggagaagauguugaaaug

SEQ ID NO: 1413554 - RNA, 19 nt, Homo sapiens
  misc_RNA (1)...(19): siRNA sense strand
cagcaguucucuucucuga

SEQ ID NO: 1413555 - RNA, 19 nt, Homo sapiens
  misc_RNA (1)...(19): siRNA sense strand
gaugacacguucuccaguu

SEQ ID NO: 1413556 - RNA, 19 nt, Homo sapiens
  misc_RNA (1)...(19): siRNA sense strand
caaaggcauucaucauaga

SEQ ID NO: 1413557 - RNA, 19 nt, Homo sapiens
  misc_RNA (1)...(19): siRNA sense strand
gauaugauaccggaccuua

SEQ ID NO: 1413558 - RNA, 19 nt, Homo sapiens
  misc_RNA (1)...(19): siRNA sense strand
gggaugcagcuauuuauuu

SEQ ID NO: 1413559 - RNA, 19 nt, Homo sapiens
  misc_RNA (1)...(19): siRNA sense strand
ccaagugacuacaagaaau

SEQ ID NO: 1413560 - RNA, 19 nt, Homo sapiens
  misc_RNA (1)...(19): siRNA sense strand
ugauugacauguauucuga

SEQ ID NO: 1413561 - RNA, 19 nt, Homo sapiens
  misc_RNA (1)...(19): siRNA sense strand
uaauaaagcaguagagguu

SEQ ID NO: 1413562 - RNA, 19 nt, Homo sapiens
  misc_RNA (1)...(19): siRNA sense strand
cauugaagcuauaagagaa

SEQ ID NO: 1413563 - RNA, 19 nt, Homo sapiens
  misc_RNA (1)...(19): siRNA sense strand
ggauucagcagauaauuga

SEQ ID NO: 1413564 - RNA, 19 nt, Homo sapiens
  misc_RNA (1)...(19): siRNA sense strand
aaacuucgcuaucucauac

SEQ ID NO: 1413565 - RNA, 19 nt, Homo sapiens
  misc_RNA (1)...(19): siRNA sense strand
acaaugaaaccaagaauga

SEQ ID NO: 1413566 - RNA, 19 nt, Homo sapiens
  misc_RNA (1)...(19): siRNA sense strand
caaauggacccucauggaa

SEQ ID NO: 1413567 - RNA, 19 nt, Homo sapiens
  misc_RNA (1)...(19): siRNA sense strand
ugaaauagaacuucgaaug

SEQ ID NO: 1413568 - RNA, 19 nt, Homo sapiens
  misc_RNA (1)...(19): siRNA sense strand
uaccggaccuuagugaaua

SEQ ID NO: 1413569 - RNA, 19 nt, Homo sapiens
  misc_RNA (1)...(19): siRNA sense strand
gggaacagcucugaaagca

SEQ ID NO: 1413570 - RNA, 19 nt, Homo sapiens
  misc_RNA (1)...(19): siRNA sense strand
ugacaaaccuuccuuuacg

SEQ ID NO: 1413571 - RNA, 19 nt, Homo sapiens
  misc_RNA (1)...(19): siRNA sense strand
gaacaacaggcugauaguu

SEQ ID NO: 1413572 - RNA, 19 nt, Homo sapiens
  misc_RNA (1)...(19): siRNA sense strand
gauguucucucugauuaug

SEQ ID NO: 1413573 - RNA, 19 nt, Homo sapiens
  misc_RNA (1)...(19): siRNA sense strand
gcauuuaucauucacauca

SEQ ID NO: 1413574 - RNA, 19 nt, Homo sapiens
  misc_RNA (1)...(19): siRNA sense strand
ggaugcagcuauuuauuuu

SEQ ID NO: 1413575 - RNA, 19 nt, Homo sapiens
  misc_RNA (1)...(19): siRNA sense strand
gaacuugaccggaaugaac

SEQ ID NO: 1413576 - RNA, 19 nt, Homo sapiens
  misc_RNA (1)...(19): siRNA sense strand
ggauggugcuuguugacuu

SEQ ID NO: 1413577 - RNA, 19 nt, Homo sapiens
  misc_RNA (1)...(19): siRNA sense strand
acaaaggcauucaucauag

SEQ ID NO: 1413578 - RNA, 19 nt, Homo sapiens
  misc_RNA (1)...(19): siRNA sense strand
acacucaguugaaguauca

SEQ ID NO: 1413579 - RNA, 19 nt, Homo sapiens
  misc_RNA (1)...(19): siRNA sense strand
gaaagugacaagcauuuua

SEQ ID NO: 1413580 - RNA, 19 nt, Homo sapiens
  misc_RNA (1)...(19): siRNA sense strand
gacauugugugggaaauug

SEQ ID NO: 1413581 - RNA, 19 nt, Homo sapiens
  misc_RNA (1)...(19): siRNA sense strand
ggaaguuuaccacuacaaa

SEQ ID NO: 1413582 - RNA, 19 nt, Homo sapiens
  misc_RNA (1)...(19): siRNA sense strand
gcucgaauauucccaagag

SEQ ID NO: 1413583 - RNA, 19 nt, Homo sapiens
  misc_RNA (1)...(19): siRNA sense strand
gaaagaugacaaaggcauu

SEQ ID NO: 1413584 - RNA, 19 nt, Homo sapiens
  misc_RNA (1)...(19): siRNA sense strand
uugauguucucucugauua

SEQ ID NO: 1413585 - RNA, 19 nt, Homo sapiens
  misc_RNA (1)...(19): siRNA sense strand
aaagagguauuggaagauu

SEQ ID NO: 1413586 - RNA, 19 nt, Homo sapiens
  misc_RNA (1)...(19): siRNA sense strand
gggagacccuacaagaaga

SEQ ID NO: 1413587 - RNA, 19 nt, Homo sapiens
  misc_RNA (1)...(19): siRNA sense strand
gaauccuaaugccaucaua

SEQ ID NO: 1413588 - RNA, 19 nt, Homo sapiens
  misc_RNA (1)...(19): siRNA sense strand
agaagaucuugcagcauua

SEQ ID NO: 1413589 - RNA, 19 nt, Homo sapiens
  misc_RNA (1)...(19): siRNA sense strand
caucauagaaagcuuaaga

SEQ ID NO: 1413590 - RNA, 19 nt, Homo sapiens
  misc_RNA (1)...(19): siRNA sense strand
gaagaauuuucccgcuuua

SEQ ID NO: 1413591 - RNA, 19 nt, Homo sapiens
  misc_RNA (1)...(19): siRNA sense strand
caguggauaucaagcuuaa

SEQ ID NO: 1413592 - RNA, 19 nt, Homo sapiens
  misc_RNA (1)...(19): siRNA sense strand
gcauugaagcuauaagaga

SEQ ID NO: 1413593 - RNA, 19 nt, Homo sapiens
  misc_RNA (1)...(19): siRNA sense strand
gaaagcucuucccaaugaa

SEQ ID NO: 1413594 - RNA, 19 nt, Homo sapiens
  misc_RNA (1)...(19): siRNA sense strand
ugacuuaccaggugugauu

SEQ ID NO: 1413595 - RNA, 19 nt, Homo sapiens
  misc_RNA (1)...(19): siRNA sense strand
ggaaaugauugcccaagcu

SEQ ID NO: 1413596 - RNA, 19 nt, Homo sapiens
  misc_RNA (1)...(19): siRNA sense strand
acacagcucuggaauaaaa

SEQ ID NO: 1413597 - RNA, 19 nt, Homo sapiens
  misc_RNA (1)...(19): siRNA sense strand
ugugggaaauugaugagua

SEQ ID NO: 1413598 - RNA, 19 nt, Homo sapiens
  misc_RNA (1)...(19): siRNA sense strand
cuaaaccauuguaaccuuu

SEQ ID NO: 1413599 - RNA, 19 nt, Homo sapiens
  misc_RNA (1)...(19): siRNA sense strand
agagcaugaugacauauuu

SEQ ID NO: 1413600 - RNA, 19 nt, Homo sapiens
  misc_RNA (1)...(19): siRNA sense strand
caacucaugugauugaaaa

SEQ ID NO: 1413601 - RNA, 19 nt, Homo sapiens
  misc_RNA (1)...(19): siRNA sense strand
caagugacuacaagaaauu

SEQ ID NO: 1413602 - RNA, 19 nt, Homo sapiens
  misc_RNA (1)...(19): siRNA sense strand
gcuaaaggcacaccaagug

SEQ ID NO: 1413603 - RNA, 19 nt, Homo sapiens
  misc_RNA (1)...(19): siRNA sense strand
gagaauaugaagaagaguu

SEQ ID NO: 1413604 - RNA, 19 nt, Homo sapiens
  misc_RNA (1)...(19): siRNA sense strand
gcaguauuguuacagacuu

SEQ ID NO: 1413605 - RNA, 19 nt, Homo sapiens
  misc_RNA (1)...(19): siRNA sense strand
uggaaagacuaguguguug

SEQ ID NO: 1413606 - RNA, 19 nt, Homo sapiens
  misc_RNA (1)...(19): siRNA sense strand
ggagaacaaagaauugaga

SEQ ID NO: 1413607 - RNA, 19 nt, Homo sapiens
  misc_RNA (1)...(19): siRNA sense strand
gaaagagcaugaugacaua

SEQ ID NO: 1413608 - RNA, 19 nt, Homo sapiens
  misc_RNA (1)...(19): siRNA sense strand
gaacagcucugaaagcauu

SEQ ID NO: 1413609 - RNA, 19 nt, Homo sapiens
  misc_RNA (1)...(19): siRNA sense strand
gagaagauguugaaaugua

SEQ ID NO: 1413610 - RNA, 19 nt, Homo sapiens
  misc_RNA (1)...(19): siRNA sense strand
gaggacagcuugaggguua

SEQ ID NO: 1413611 - RNA, 19 nt, Homo sapiens
  misc_RNA (1)...(19): siRNA sense strand
gaaacugaauggaagaaua

SEQ ID NO: 1413612 - RNA, 19 nt, Homo sapiens
  misc_RNA (1)...(19): siRNA sense strand
aaagaaggcuguaccguua

SEQ ID NO: 1413613 - RNA, 19 nt, Homo sapiens
  misc_RNA (1)...(19): siRNA sense strand
aaacacagcucuggaauaa

SEQ ID NO: 1413614 - RNA, 19 nt, Homo sapiens
  misc_RNA (1)...(19): siRNA sense strand
gaaauagaacuucgaauga

SEQ ID NO: 1413615 - RNA, 19 nt, Homo sapiens
  misc_RNA (1)...(19): siRNA sense strand
gcaaugauguggucuuguu

SEQ ID NO: 1413616 - RNA, 19 nt, Homo sapiens
  misc_RNA (1)...(19): siRNA sense strand
gaccauauccuuaaaugua

SEQ ID NO: 1413617 - RNA, 19 nt, Homo sapiens
  misc_RNA (1)...(19): siRNA sense strand
gcaaugggaugcagcuauu

SEQ ID NO: 1413618 - RNA, 19 nt, Homo sapiens
  misc_RNA (1)...(19): siRNA sense strand
cagcuuaucuugcaaguga

SEQ ID NO: 1413619 - RNA, 19 nt, Homo sapiens
  misc_RNA (1)...(19): siRNA sense strand
gaaguuaggcgauuagaga

SEQ ID NO: 1413620 - RNA, 19 nt, Homo sapiens
  misc_RNA (1)...(19): siRNA sense strand
gacaaaggcauucaucaua

SEQ ID NO: 1413621 - RNA, 19 nt, Homo sapiens
  misc_RNA (1)...(19): siRNA sense strand
gauccaagcuugauuaagg

SEQ ID NO: 1413622 - RNA, 19 nt, Homo sapiens
  misc_RNA (1)...(19): siRNA sense strand
ggaagaaaguauuaaacga

SEQ ID NO: 1413623 - RNA, 19 nt, Homo sapiens
  misc_RNA (1)...(19): siRNA sense strand
aaacagcucuaaaccauug

SEQ ID NO: 1413624 - RNA, 19 nt, Homo sapiens
  misc_RNA (1)...(19): siRNA sense strand
ugacauguauucugaaguu

SEQ ID NO: 1413625 - RNA, 19 nt, Homo sapiens
  misc_RNA (1)...(19): siRNA sense strand
gaagaccucaagaaaguua

SEQ ID NO: 1413626 - RNA, 19 nt, Homo sapiens
  misc_RNA (1)...(19): siRNA sense strand
gcugaacgcaguauuguua

SEQ ID NO: 1413627 - RNA, 19 nt, Homo sapiens
  misc_RNA (1)...(19): siRNA sense strand
gauggugcuuguugacuua

SEQ ID NO: 1413628 - RNA, 19 nt, Homo sapiens
  misc_RNA (1)...(19): siRNA sense strand
ggacauccuuucagcaguu

SEQ ID NO: 1413629 - RNA, 19 nt, Homo sapiens
  misc_RNA (1)...(19): siRNA sense strand
gaaacacagcucuggaaua

SEQ ID NO: 1413630 - RNA, 19 nt, Homo sapiens
  misc_RNA (1)...(19): siRNA sense strand
ggaaauccuucaacaaucu

SEQ ID NO: 1413631 - RNA, 19 nt, Homo sapiens
  misc_RNA (1)...(19): siRNA sense strand
gcagauaauugaaggaaag

SEQ ID NO: 1413632 - RNA, 19 nt, Homo sapiens
  misc_RNA (1)...(19): siRNA sense strand
ugaaagcauugaagcuaua

SEQ ID NO: 1413633 - RNA, 19 nt, Homo sapiens
  misc_RNA (1)...(19): siRNA sense strand
ggaaagagcaugaugacau

SEQ ID NO: 1413634 - RNA, 19 nt, Homo sapiens
  misc_RNA (1)...(19): siRNA sense strand
ucacgaagcauuuaucauu

SEQ ID NO: 1413635 - RNA, 19 nt, Homo sapiens
  misc_RNA (1)...(19): siRNA sense strand
gcaguucucuucucugaca

SEQ ID NO: 1413636 - RNA, 19 nt, Homo sapiens
  misc_RNA (1)...(19): siRNA sense strand
uuaaagagguauuggaaga

SEQ ID NO: 1413637 - RNA, 19 nt, Homo sapiens
  misc_RNA (1)...(19): siRNA sense strand
aaacugaaauucucuccaa

SEQ ID NO: 1413638 - RNA, 19 nt, Homo sapiens
  misc_RNA (1)...(19): siRNA sense strand
ggcaacaacuuacaaauac

SEQ ID NO: 1413639 - RNA, 19 nt, Homo sapiens
  misc_RNA (1)...(19): siRNA sense strand
gaagaccgauccauaucug

SEQ ID NO: 1413640 - RNA, 19 nt, Homo sapiens
  misc_RNA (1)...(19): siRNA sense strand
ugaccggaaugaacuauuu

SEQ ID NO: 1413641 - RNA, 19 nt, Homo sapiens
  misc_RNA (1)...(19): siRNA sense strand
caaugaaagcuuuagguua

SEQ ID NO: 1413642 - RNA, 19 nt, Homo sapiens
  misc_RNA (1)...(19): siRNA sense strand
ggaccuuagugaauauaaa

SEQ ID NO: 1413643 - RNA, 19 nt, Homo sapiens
  misc_RNA (1)...(19): siRNA sense strand
ggaaauugaugaguauauc

SEQ ID NO: 1413644 - RNA, 19 nt, Homo sapiens
  misc_RNA (1)...(19): siRNA sense strand
cggaagaccucaagaaagu

SEQ ID NO: 1413645 - RNA, 19 nt, Homo sapiens
  misc_RNA (1)...(19): siRNA sense strand
gcaucaaguuuauagaaga

SEQ ID NO: 1413646 - RNA, 19 nt, Homo sapiens
  misc_RNA (1)...(19): siRNA sense strand
gcacccagcuuaucuugca

SEQ ID NO: 1413647 - RNA, 19 nt, Homo sapiens
  misc_RNA (1)...(19): siRNA sense strand
ggaagaaucggacccaaga

SEQ ID NO: 1413648 - RNA, 19 nt, Homo sapiens
  misc_RNA (1)...(19): siRNA sense strand
ugaaauccuugaugaaguu

SEQ ID NO: 1413649 - RNA, 19 nt, Homo sapiens
  misc_RNA (1)...(19): siRNA sense strand
gcugauaguuucaaagcaa

SEQ ID NO: 1413650 - RNA, 19 nt, Homo sapiens
  misc_RNA (1)...(19): siRNA sense strand
gagaccauauccuuaaaug

SEQ ID NO: 1413651 - RNA, 19 nt, Homo sapiens
  misc_RNA (1)...(19): siRNA sense strand
uaaagaggccguuaaggaa

SEQ ID NO: 1413652 - RNA, 19 nt, Homo sapiens
  misc_RNA (1)...(19): siRNA sense strand
guagauccaagcuugauua

SEQ ID NO: 1413653 - RNA, 19 nt, Homo sapiens
  misc_RNA (1)...(19): siRNA sense strand
uggagaagauguugaaaug

SEQ ID NO: 1413654 - RNA, 19 nt, Homo sapiens
  misc_RNA (1)...(19): siRNA sense strand
cagcaguucucuucucuga

SEQ ID NO: 1413655 - RNA, 19 nt, Homo sapiens
  misc_RNA (1)...(19): siRNA sense strand
gaugacacguucuccaguu

SEQ ID NO: 1413656 - RNA, 19 nt, Homo sapiens
  misc_RNA (1)...(19): siRNA sense strand
caaaggcauucaucauaga

SEQ ID NO: 1413657 - RNA, 19 nt, Homo sapiens
  misc_RNA (1)...(19): siRNA sense strand
gauaugauaccggaccuua

SEQ ID NO: 1413658 - RNA, 19 nt, Homo sapiens
  misc_RNA (1)...(19): siRNA sense strand
gggaugcagcuauuuauuu

SEQ ID NO: 1413659 - RNA, 19 nt, Homo sapiens
  misc_RNA (1)...(19): siRNA sense strand
ccaagugacuacaagaaau

SEQ ID NO: 1413660 - RNA, 19 nt, Homo sapiens
  misc_RNA (1)...(19): siRNA sense strand
ugauugacauguauucuga

SEQ ID NO: 1413661 - RNA, 19 nt, Homo sapiens
  misc_RNA (1)...(19): siRNA sense strand
uaauaaagcaguagagguu

SEQ ID NO: 1413662 - RNA, 19 nt, Homo sapiens
  misc_RNA (1)...(19): siRNA sense strand
cauugaagcuauaagagaa

SEQ ID NO: 1413663 - RNA, 19 nt, Homo sapiens
  misc_RNA (1)...(19): siRNA sense strand
ggauucagcagauaauuga

SEQ ID NO: 1413664 - RNA, 19 nt, Homo sapiens
  misc_RNA (1)...(19): siRNA sense strand
aaacuucgcuaucucauac

SEQ ID NO: 1413665 - RNA, 19 nt, Homo sapiens
  misc_RNA (1)...(19): siRNA sense strand
acaaugaaaccaagaauga

SEQ ID NO: 1413666 - RNA, 19 nt, Homo sapiens
  misc_RNA (1)...(19): siRNA sense strand
caaauggacccucauggaa

SEQ ID NO: 1413667 - RNA, 19 nt, Homo sapiens
  misc_RNA (1)...(19): siRNA sense strand
ugaaauagaacuucgaaug

SEQ ID NO: 1413668 - RNA, 19 nt, Homo sapiens
  misc_RNA (1)...(19): siRNA sense strand
uaccggaccuuagugaaua

SEQ ID NO: 1413669 - RNA, 19 nt, Homo sapiens
  misc_RNA (1)...(19): siRNA sense strand
gggaacagcucugaaagca

SEQ ID NO: 1413670 - RNA, 19 nt, Homo sapiens
  misc_RNA (1)...(19): siRNA sense strand
ugacaaaccuuccuuuacg

SEQ ID NO: 1413671 - RNA, 19 nt, Homo sapiens
  misc_RNA (1)...(19): siRNA sense strand
gaacaacaggcugauaguu

SEQ ID NO: 1413672 - RNA, 19 nt, Homo sapiens
  misc_RNA (1)...(19): siRNA sense strand
gauguucucucugauuaug

SEQ ID NO: 1413673 - RNA, 19 nt, Homo sapiens
  misc_RNA (1)...(19): siRNA sense strand
gcauuuaucauucacauca

SEQ ID NO: 1413674 - RNA, 19 nt, Homo sapiens
  misc_RNA (1)...(19): siRNA sense strand
ggaugcagcuauuuauuuu

SEQ ID NO: 1413675 - RNA, 19 nt, Homo sapiens
  misc_RNA (1)...(19): siRNA sense strand
gaacuugaccggaaugaac

SEQ ID NO: 1413676 - RNA, 19 nt, Homo sapiens
  misc_RNA (1)...(19): siRNA sense strand
ggauggugcuuguugacuu

SEQ ID NO: 1413677 - RNA, 19 nt, Homo sapiens
  misc_RNA (1)...(19): siRNA sense strand
acaaaggcauucaucauag

SEQ ID NO: 1413678 - RNA, 19 nt, Homo sapiens
  misc_RNA (1)...(19): siRNA sense strand
acacucaguugaaguauca

SEQ ID NO: 1413679 - RNA, 19 nt, Homo sapiens
  misc_RNA (1)...(19): siRNA sense strand
gaaagugacaagcauuuua

SEQ ID NO: 1413680 - RNA, 19 nt, Homo sapiens
  misc_RNA (1)...(19): siRNA sense strand
gacauugugugggaaauug

SEQ ID NO: 1413681 - RNA, 19 nt, Homo sapiens
  misc_RNA (1)...(19): siRNA sense strand
ggaaguuuaccacuacaaa

SEQ ID NO: 1413682 - RNA, 19 nt, Homo sapiens
  misc_RNA (1)...(19): siRNA sense strand
gcucgaauauucccaagag

SEQ ID NO: 1413683 - RNA, 19 nt, Homo sapiens
  misc_RNA (1)...(19): siRNA sense strand
gaaagaugacaaaggcauu

SEQ ID NO: 1413684 - RNA, 19 nt, Homo sapiens
  misc_RNA (1)...(19): siRNA sense strand
uugauguucucucugauua

SEQ ID NO: 1413685 - RNA, 19 nt, Homo sapiens
  misc_RNA (1)...(19): siRNA sense strand
aaagagguauuggaagauu

SEQ ID NO: 1413686 - RNA, 19 nt, Homo sapiens
  misc_RNA (1)...(19): siRNA sense strand
gggagacccuacaagaaga

SEQ ID NO: 1413687 - RNA, 19 nt, Homo sapiens
  misc_RNA (1)...(19): siRNA sense strand
gaauccuaaugccaucaua

SEQ ID NO: 1413688 - RNA, 19 nt, Homo sapiens
  misc_RNA (1)...(19): siRNA sense strand
agaagaucuugcagcauua

SEQ ID NO: 1413689 - RNA, 19 nt, Homo sapiens
  misc_RNA (1)...(19): siRNA sense strand
caucauagaaagcuuaaga

SEQ ID NO: 1413690 - RNA, 19 nt, Homo sapiens
  misc_RNA (1)...(19): siRNA sense strand
gaagaauuuucccgcuuua

SEQ ID NO: 1413691 - RNA, 19 nt, Homo sapiens
  misc_RNA (1)...(19): siRNA sense strand
caguggauaucaagcuuaa

SEQ ID NO: 1413692 - RNA, 19 nt, Homo sapiens
  misc_RNA (1)...(19): siRNA sense strand
gcauugaagcuauaagaga

SEQ ID NO: 1413693 - RNA, 19 nt, Homo sapiens
  misc_RNA (1)...(19): siRNA sense strand
gaaagcucuucccaaugaa

SEQ ID NO: 1413694 - RNA, 19 nt, Homo sapiens
  misc_RNA (1)...(19): siRNA sense strand
ugacuuaccaggugugauu

SEQ ID NO: 1413695 - RNA, 19 nt, Homo sapiens
  misc_RNA (1)...(19): siRNA sense strand
ggaaaugauugcccaagcu

SEQ ID NO: 1413696 - RNA, 19 nt, Homo sapiens
  misc_RNA (1)...(19): siRNA sense strand
acacagcucuggaauaaaa

SEQ ID NO: 1413697 - RNA, 19 nt, Homo sapiens
  misc_RNA (1)...(19): siRNA sense strand
ugugggaaauugaugagua

SEQ ID NO: 1413698 - RNA, 19 nt, Homo sapiens
  misc_RNA (1)...(19): siRNA sense strand
cuaaaccauuguaaccuuu

SEQ ID NO: 1413699 - RNA, 19 nt, Homo sapiens
  misc_RNA (1)...(19): siRNA sense strand
agagcaugaugacauauuu

SEQ ID NO: 1413700 - RNA, 19 nt, Homo sapiens
  misc_RNA (1)...(19): siRNA sense strand
caacucaugugauugaaaa

SEQ ID NO: 1413701 - RNA, 19 nt, Homo sapiens
  misc_RNA (1)...(19): siRNA sense strand
caagugacuacaagaaauu

SEQ ID NO: 1413702 - RNA, 19 nt, Homo sapiens
  misc_RNA (1)...(19): siRNA sense strand
gcuaaaggcacaccaagug

SEQ ID NO: 1413703 - RNA, 19 nt, Homo sapiens
  misc_RNA (1)...(19): siRNA sense strand
gagaauaugaagaagaguu

SEQ ID NO: 1413704 - RNA, 19 nt, Homo sapiens
  misc_RNA (1)...(19): siRNA sense strand
gcaguauuguuacagacuu

SEQ ID NO: 1413705 - RNA, 19 nt, Homo sapiens
  misc_RNA (1)...(19): siRNA sense strand
uggaaagacuaguguguug

SEQ ID NO: 1413706 - RNA, 19 nt, Homo sapiens
  misc_RNA (1)...(19): siRNA sense strand
ggagaacaaagaauugaga

SEQ ID NO: 1413707 - RNA, 19 nt, Homo sapiens
  misc_RNA (1)...(19): siRNA sense strand
gaaagagcaugaugacaua

SEQ ID NO: 1413708 - RNA, 19 nt, Homo sapiens
  misc_RNA (1)...(19): siRNA sense strand
gaacagcucugaaagcauu

SEQ ID NO: 1413709 - RNA, 19 nt, Homo sapiens
  misc_RNA (1)...(19): siRNA sense strand
gagaagauguugaaaugua

SEQ ID NO: 1413710 - RNA, 19 nt, Homo sapiens
  misc_RNA (1)...(19): siRNA sense strand
gaggacagcuugaggguua

SEQ ID NO: 1413711 - RNA, 19 nt, Homo sapiens
  misc_RNA (1)...(19): siRNA sense strand
gaaacugaauggaagaaua

SEQ ID NO: 1413712 - RNA, 19 nt, Homo sapiens
  misc_RNA (1)...(19): siRNA sense strand
aaagaaggcuguaccguua

SEQ ID NO: 1413713 - RNA, 19 nt, Homo sapiens
  misc_RNA (1)...(19): siRNA sense strand
aaacacagcucuggaauaa

SEQ ID NO: 1413714 - RNA, 19 nt, Homo sapiens
  misc_RNA (1)...(19): siRNA sense strand
gaaauagaacuucgaauga

SEQ ID NO: 1413715 - RNA, 19 nt, Homo sapiens
  misc_RNA (1)...(19): siRNA sense strand
gcaaugauguggucuuguu

SEQ ID NO: 1413716 - RNA, 19 nt, Homo sapiens
  misc_RNA (1)...(19): siRNA sense strand
gaccauauccuuaaaugua

SEQ ID NO: 1413717 - RNA, 19 nt, Homo sapiens
  misc_RNA (1)...(19): siRNA sense strand
gcaaugggaugcagcuauu

SEQ ID NO: 1413718 - RNA, 19 nt, Homo sapiens
  misc_RNA (1)...(19): siRNA sense strand
cagcuuaucuugcaaguga

SEQ ID NO: 1413719 - RNA, 19 nt, Homo sapiens
  misc_RNA (1)...(19): siRNA sense strand
gaaguuaggcgauuagaga

SEQ ID NO: 1413720 - RNA, 19 nt, Homo sapiens
  misc_RNA (1)...(19): siRNA sense strand
gacaaaggcauucaucaua

SEQ ID NO: 1413721 - RNA, 19 nt, Homo sapiens
  misc_RNA (1)...(19): siRNA sense strand
gauccaagcuugauuaagg

SEQ ID NO: 1413722 - RNA, 19 nt, Homo sapiens
  misc_RNA (1)...(19): siRNA sense strand
ggaagaaaguauuaaacga

SEQ ID NO: 1413723 - RNA, 19 nt, Homo sapiens
  misc_RNA (1)...(19): siRNA sense strand
aaacagcucuaaaccauug

SEQ ID NO: 1413724 - RNA, 19 nt, Homo sapiens
  misc_RNA (1)...(19): siRNA sense strand
ugacauguauucugaaguu

SEQ ID NO: 1413725 - RNA, 19 nt, Homo sapiens
  misc_RNA (1)...(19): siRNA sense strand
gaagaccucaagaaaguua

SEQ ID NO: 1413726 - RNA, 19 nt, Homo sapiens
  misc_RNA (1)...(19): siRNA sense strand
gcugaacgcaguauuguua

SEQ ID NO: 1413727 - RNA, 19 nt, Homo sapiens
  misc_RNA (1)...(19): siRNA sense strand
gauggugcuuguugacuua

SEQ ID NO: 1413728 - RNA, 19 nt, Homo sapiens
  misc_RNA (1)...(19): siRNA sense strand
ggacauccuuucagcaguu

SEQ ID NO: 1413729 - RNA, 19 nt, Homo sapiens
  misc_RNA (1)...(19): siRNA sense strand
gaaacacagcucuggaaua

SEQ ID NO: 1413730 - RNA, 19 nt, Homo sapiens
  misc_RNA (1)...(19): siRNA sense strand
ggaaauccuucaacaaucu

SEQ ID NO: 1413731 - RNA, 19 nt, Homo sapiens
  misc_RNA (1)...(19): siRNA sense strand
gcagauaauugaaggaaag

SEQ ID NO: 1413732 - RNA, 19 nt, Homo sapiens
  misc_RNA (1)...(19): siRNA sense strand
ugaaagcauugaagcuaua

SEQ ID NO: 1413733 - RNA, 19 nt, Homo sapiens
  misc_RNA (1)...(19): siRNA sense strand
ggaaagagcaugaugacau

SEQ ID NO: 1413734 - RNA, 19 nt, Homo sapiens
  misc_RNA (1)...(19): siRNA sense strand
ucacgaagcauuuaucauu

SEQ ID NO: 1413735 - RNA, 19 nt, Homo sapiens
  misc_RNA (1)...(19): siRNA sense strand
gcaguucucuucucugaca

SEQ ID NO: 1413736 - RNA, 19 nt, Homo sapiens
  misc_RNA (1)...(19): siRNA sense strand
uuaaagagguauuggaaga

SEQ ID NO: 1413737 - RNA, 19 nt, Homo sapiens
  misc_RNA (1)...(19): siRNA sense strand
aaacugaaauucucuccaa

SEQ ID NO: 1413738 - RNA, 19 nt, Homo sapiens
  misc_RNA (1)...(19): siRNA sense strand
ggcaacaacuuacaaauac

SEQ ID NO: 1413739 - RNA, 19 nt, Homo sapiens
  misc_RNA (1)...(19): siRNA sense strand
gaagaccgauccauaucug

SEQ ID NO: 1413740 - RNA, 19 nt, Homo sapiens
  misc_RNA (1)...(19): siRNA sense strand
ugaccggaaugaacuauuu

SEQ ID NO: 1413741 - RNA, 19 nt, Homo sapiens
  misc_RNA (1)...(19): siRNA sense strand
caaugaaagcuuuagguua

SEQ ID NO: 1413742 - RNA, 19 nt, Homo sapiens
  misc_RNA (1)...(19): siRNA sense strand
ggaccuuagugaauauaaa

SEQ ID NO: 1413743 - RNA, 19 nt, Homo sapiens
  misc_RNA (1)...(19): siRNA sense strand
ggaaauugaugaguauauc

SEQ ID NO: 1413744 - RNA, 19 nt, Homo sapiens
  misc_RNA (1)...(19): siRNA sense strand
cggaagaccucaagaaagu

SEQ ID NO: 1413745 - RNA, 19 nt, Homo sapiens
  misc_RNA (1)...(19): siRNA sense strand
gcaucaaguuuauagaaga

SEQ ID NO: 1413746 - RNA, 19 nt, Homo sapiens
  misc_RNA (1)...(19): siRNA sense strand
gcacccagcuuaucuugca

SEQ ID NO: 1413747 - RNA, 19 nt, Homo sapiens
  misc_RNA (1)...(19): siRNA sense strand
ggaagaaucggacccaaga

SEQ ID NO: 1413748 - RNA, 19 nt, Homo sapiens
  misc_RNA (1)...(19): siRNA sense strand
ugaaauccuugaugaaguu

SEQ ID NO: 1413749 - RNA, 19 nt, Homo sapiens
  misc_RNA (1)...(19): siRNA sense strand
gcugauaguuucaaagcaa

SEQ ID NO: 1413750 - RNA, 19 nt, Homo sapiens
  misc_RNA (1)...(19): siRNA sense strand
gagaccauauccuuaaaug

SEQ ID NO: 1413751 - RNA, 19 nt, Homo sapiens
  misc_RNA (1)...(19): siRNA sense strand
uaaagaggccguuaaggaa

SEQ ID NO: 1413752 - RNA, 19 nt, Homo sapiens
  misc_RNA (1)...(19): siRNA sense strand
guagauccaagcuugauua

SEQ ID NO: 1413753 - RNA, 19 nt, Homo sapiens
  misc_RNA (1)...(19): siRNA sense strand
uggagaagauguugaaaug

SEQ ID NO: 1413754 - RNA, 19 nt, Homo sapiens
  misc_RNA (1)...(19): siRNA sense strand
cagcaguucucuucucuga

SEQ ID NO: 1413755 - RNA, 19 nt, Homo sapiens
  misc_RNA (1)...(19): siRNA sense strand
gaugacacguucuccaguu

SEQ ID NO: 1413756 - RNA, 19 nt, Homo sapiens
  misc_RNA (1)...(19): siRNA sense strand
caaaggcauucaucauaga

SEQ ID NO: 1413757 - RNA, 19 nt, Homo sapiens
  misc_RNA (1)...(19): siRNA sense strand
gauaugauaccggaccuua

SEQ ID NO: 1413758 - RNA, 19 nt, Homo sapiens
  misc_RNA (1)...(19): siRNA sense strand
gggaugcagcuauuuauuu

SEQ ID NO: 1413759 - RNA, 19 nt, Homo sapiens
  misc_RNA (1)...(19): siRNA sense strand
ccaagugacuacaagaaau

SEQ ID NO: 1413760 - RNA, 19 nt, Homo sapiens
  misc_RNA (1)...(19): siRNA sense strand
ugauugacauguauucuga

SEQ ID NO: 1413761 - RNA, 19 nt, Homo sapiens
  misc_RNA (1)...(19): siRNA sense strand
uaauaaagcaguagagguu

SEQ ID NO: 1413762 - RNA, 19 nt, Homo sapiens
  misc_RNA (1)...(19): siRNA sense strand
cauugaagcuauaagagaa

SEQ ID NO: 1413763 - RNA, 19 nt, Homo sapiens
  misc_RNA (1)...(19): siRNA sense strand
ggauucagcagauaauuga

SEQ ID NO: 1413764 - RNA, 19 nt, Homo sapiens
  misc_RNA (1)...(19): siRNA sense strand
aaacuucgcuaucucauac

SEQ ID NO: 1413765 - RNA, 19 nt, Homo sapiens
  misc_RNA (1)...(19): siRNA sense strand
acaaugaaaccaagaauga

SEQ ID NO: 1413766 - RNA, 19 nt, Homo sapiens
  misc_RNA (1)...(19): siRNA sense strand
caaauggacccucauggaa

SEQ ID NO: 1413767 - RNA, 19 nt, Homo sapiens
  misc_RNA (1)...(19): siRNA sense strand
ugaaauagaacuucgaaug

SEQ ID NO: 1413768 - RNA, 19 nt, Homo sapiens
  misc_RNA (1)...(19): siRNA sense strand
uaccggaccuuagugaaua

SEQ ID NO: 1413769 - RNA, 19 nt, Homo sapiens
  misc_RNA (1)...(19): siRNA sense strand
gggaacagcucugaaagca

SEQ ID NO: 1413770 - RNA, 19 nt, Homo sapiens
  misc_RNA (1)...(19): siRNA sense strand
ugacaaaccuuccuuuacg

SEQ ID NO: 1413771 - RNA, 19 nt, Homo sapiens
  misc_RNA (1)...(19): siRNA sense strand
gaacaacaggcugauaguu

SEQ ID NO: 1413772 - RNA, 19 nt, Homo sapiens
  misc_RNA (1)...(19): siRNA sense strand
gauguucucucugauuaug

SEQ ID NO: 1413773 - RNA, 19 nt, Homo sapiens
  misc_RNA (1)...(19): siRNA sense strand
gcauuuaucauucacauca

SEQ ID NO: 1413774 - RNA, 19 nt, Homo sapiens
  misc_RNA (1)...(19): siRNA sense strand
ggaugcagcuauuuauuuu

SEQ ID NO: 1413775 - RNA, 19 nt, Homo sapiens
  misc_RNA (1)...(19): siRNA sense strand
gaacuugaccggaaugaac

SEQ ID NO: 1413776 - RNA, 19 nt, Homo sapiens
  misc_RNA (1)...(19): siRNA sense strand
ggauggugcuuguugacuu

SEQ ID NO: 1413777 - RNA, 19 nt, Homo sapiens
  misc_RNA (1)...(19): siRNA sense strand
acaaaggcauucaucauag

SEQ ID NO: 1413778 - RNA, 19 nt, Homo sapiens
  misc_RNA (1)...(19): siRNA sense strand
acacucaguugaaguauca

SEQ ID NO: 1413779 - RNA, 19 nt, Homo sapiens
  misc_RNA (1)...(19): siRNA sense strand
gaaagugacaagcauuuua

SEQ ID NO: 1413780 - RNA, 19 nt, Homo sapiens
  misc_RNA (1)...(19): siRNA sense strand
gacauugugugggaaauug

SEQ ID NO: 1413781 - RNA, 19 nt, Homo sapiens
  misc_RNA (1)...(19): siRNA sense strand
ggaaguuuaccacuacaaa

SEQ ID NO: 1413782 - RNA, 19 nt, Homo sapiens
  misc_RNA (1)...(19): siRNA sense strand
gcucgaauauucccaagag

SEQ ID NO: 1413783 - RNA, 19 nt, Homo sapiens
  misc_RNA (1)...(19): siRNA sense strand
gaaagaugacaaaggcauu

SEQ ID NO: 1413784 - RNA, 19 nt, Homo sapiens
  misc_RNA (1)...(19): siRNA sense strand
uugauguucucucugauua

SEQ ID NO: 1413785 - RNA, 19 nt, Homo sapiens
  misc_RNA (1)...(19): siRNA sense strand
aaagagguauuggaagauu

SEQ ID NO: 1413786 - RNA, 19 nt, Homo sapiens
  misc_RNA (1)...(19): siRNA sense strand
gggagacccuacaagaaga

SEQ ID NO: 1413787 - RNA, 19 nt, Homo sapiens
  misc_RNA (1)...(19): siRNA sense strand
gaauccuaaugccaucaua

SEQ ID NO: 1413788 - RNA, 19 nt, Homo sapiens
  misc_RNA (1)...(19): siRNA sense strand
agaagaucuugcagcauua

SEQ ID NO: 1413789 - RNA, 19 nt, Homo sapiens
  misc_RNA (1)...(19): siRNA sense strand
caucauagaaagcuuaaga

SEQ ID NO: 1413790 - RNA, 19 nt, Homo sapiens
  misc_RNA (1)...(19): siRNA sense strand
gaagaauuuucccgcuuua

SEQ ID NO: 1413791 - RNA, 19 nt, Homo sapiens
  misc_RNA (1)...(19): siRNA sense strand
caguggauaucaagcuuaa

SEQ ID NO: 1413792 - RNA, 19 nt, Homo sapiens
  misc_RNA (1)...(19): siRNA sense strand
gcauugaagcuauaagaga

SEQ ID NO: 1413793 - RNA, 19 nt, Homo sapiens
  misc_RNA (1)...(19): siRNA sense strand
gaaagcucuucccaaugaa

SEQ ID NO: 1413794 - RNA, 19 nt, Homo sapiens
  misc_RNA (1)...(19): siRNA sense strand
ugacuuaccaggugugauu

SEQ ID NO: 1413795 - RNA, 19 nt, Homo sapiens
  misc_RNA (1)...(19): siRNA sense strand
ggaaaugauugcccaagcu

SEQ ID NO: 1413796 - RNA, 19 nt, Homo sapiens
  misc_RNA (1)...(19): siRNA sense strand
acacagcucuggaauaaaa

SEQ ID NO: 1413797 - RNA, 19 nt, Homo sapiens
  misc_RNA (1)...(19): siRNA sense strand
ugugggaaauugaugagua

SEQ ID NO: 1413798 - RNA, 19 nt, Homo sapiens
  misc_RNA (1)...(19): siRNA sense strand
cuaaaccauuguaaccuuu

SEQ ID NO: 1413799 - RNA, 19 nt, Homo sapiens
  misc_RNA (1)...(19): siRNA sense strand
agagcaugaugacauauuu

SEQ ID NO: 1413800 - RNA, 19 nt, Homo sapiens
  misc_RNA (1)...(19): siRNA sense strand
caacucaugugauugaaaa

SEQ ID NO: 1413801 - RNA, 19 nt, Homo sapiens
  misc_RNA (1)...(19): siRNA sense strand
caagugacuacaagaaauu

SEQ ID NO: 1413802 - RNA, 19 nt, Homo sapiens
  misc_RNA (1)...(19): siRNA sense strand
gcuaaaggcacaccaagug

SEQ ID NO: 1413803 - RNA, 19 nt, Homo sapiens
  misc_RNA (1)...(19): siRNA sense strand
gagaauaugaagaagaguu

SEQ ID NO: 1413804 - RNA, 19 nt, Homo sapiens
  misc_RNA (1)...(19): siRNA sense strand
gcaguauuguuacagacuu

SEQ ID NO: 1413805 - RNA, 19 nt, Homo sapiens
  misc_RNA (1)...(19): siRNA sense strand
uggaaagacuaguguguug

SEQ ID NO: 1413806 - RNA, 19 nt, Homo sapiens
  misc_RNA (1)...(19): siRNA sense strand
ggagaacaaagaauugaga

SEQ ID NO: 1413807 - RNA, 19 nt, Homo sapiens
  misc_RNA (1)...(19): siRNA sense strand
gcggagugaucgucaauaa

SEQ ID NO: 1413808 - RNA, 19 nt, Homo sapiens
  misc_RNA (1)...(19): siRNA sense strand
gaucaagcagcccguauuu

SEQ ID NO: 1413809 - RNA, 19 nt, Homo sapiens
  misc_RNA (1)...(19): siRNA sense strand
ggagugaucgucaauaaca

SEQ ID NO: 1413810 - RNA, 19 nt, Homo sapiens
  misc_RNA (1)...(19): siRNA sense strand
gaaagacugugagaucaag

SEQ ID NO: 1413811 - RNA, 19 nt, Homo sapiens
  misc_RNA (1)...(19): siRNA sense strand
ucaaugacaugaagaacgu

SEQ ID NO: 1413812 - RNA, 19 nt, Homo sapiens
  misc_RNA (1)...(19): siRNA sense strand
caagaaaggcacugucuac

SEQ ID NO: 1413813 - RNA, 19 nt, Homo sapiens
  misc_RNA (1)...(19): siRNA sense strand
caugaaagacugugagauc

SEQ ID NO: 1413814 - RNA, 19 nt, Homo sapiens
  misc_RNA (1)...(19): siRNA sense strand
gcaauccucacaacgucua

SEQ ID NO: 1413815 - RNA, 19 nt, Homo sapiens
  misc_RNA (1)...(19): siRNA sense strand
aagauaagaagacccagua

SEQ ID NO: 1413816 - RNA, 19 nt, Homo sapiens
  misc_RNA (1)...(19): siRNA sense strand
gcauccuaauguccuauga

SEQ ID NO: 1413817 - RNA, 19 nt, Homo sapiens
  misc_RNA (1)...(19): siRNA sense strand
ucaaagggaccaagaaagg

SEQ ID NO: 1413818 - RNA, 19 nt, Homo sapiens
  misc_RNA (1)...(19): siRNA sense strand
ucaagcagcccguauuugg

SEQ ID NO: 1413819 - RNA, 19 nt, Homo sapiens
  misc_RNA (1)...(19): siRNA sense strand
ccaagaaaggcacugucua

SEQ ID NO: 1413820 - RNA, 19 nt, Homo sapiens
  misc_RNA (1)...(19): siRNA sense strand
gccuauggcuacucuuaca

SEQ ID NO: 1413821 - RNA, 19 nt, Homo sapiens
  misc_RNA (1)...(19): siRNA sense strand
uaacaccgagagcauccua

SEQ ID NO: 1413822 - RNA, 19 nt, Homo sapiens
  misc_RNA (1)...(19): siRNA sense strand
gcucugcuuccuacaaguu

SEQ ID NO: 1413823 - RNA, 19 nt, Homo sapiens
  misc_RNA (1)...(19): siRNA sense strand
guccuaugaucacguggaa

SEQ ID NO: 1413824 - RNA, 19 nt, Homo sapiens
  misc_RNA (1)...(19): siRNA sense strand
cagccgccagcgccuauua

SEQ ID NO: 1413825 - RNA, 19 nt, Homo sapiens
  misc_RNA (1)...(19): siRNA sense strand
ugaaagacugugagaucaa

SEQ ID NO: 1413826 - RNA, 19 nt, Homo sapiens
  misc_RNA (1)...(19): siRNA sense strand
ucacguggaacucacauuc

SEQ ID NO: 1413827 - RNA, 19 nt, Homo sapiens
  misc_RNA (1)...(19): siRNA sense strand
gccagucgccaauggaaug

SEQ ID NO: 1413828 - RNA, 19 nt, Homo sapiens
  misc_RNA (1)...(19): siRNA sense strand
cuucaaagggaccaagaaa

SEQ ID NO: 1413829 - RNA, 19 nt, Homo sapiens
  misc_RNA (1)...(19): siRNA sense strand
gagaucaagcagcccguau

SEQ ID NO: 1413830 - RNA, 19 nt, Homo sapiens
  misc_RNA (1)...(19): siRNA sense strand
ucaauaacaccgagagcau

SEQ ID NO: 1413831 - RNA, 19 nt, Homo sapiens
  misc_RNA (1)...(19): siRNA sense strand
acguggaacucacauucaa

SEQ ID NO: 1413832 - RNA, 19 nt, Homo sapiens
  misc_RNA (1)...(19): siRNA sense strand
augaaagacugugagauca

SEQ ID NO: 1413833 - RNA, 19 nt, Homo sapiens
  misc_RNA (1)...(19): siRNA sense strand
ggaccaagaaaggcacugu

SEQ ID NO: 1413834 - RNA, 19 nt, Homo sapiens
  misc_RNA (1)...(19): siRNA sense strand
ccgagagcauccuaauguc

SEQ ID NO: 1413835 - RNA, 19 nt, Homo sapiens
  misc_RNA (1)...(19): siRNA sense strand
agagcauccuaauguccua

SEQ ID NO: 1413836 - RNA, 19 nt, Homo sapiens
  misc_RNA (1)...(19): siRNA sense strand
accgagagcauccuaaugu

SEQ ID NO: 1413837 - RNA, 19 nt, Homo sapiens
  misc_RNA (1)...(19): siRNA sense strand
ggaggacgaugaugaagaa

SEQ ID NO: 1413838 - RNA, 19 nt, Homo sapiens
  misc_RNA (1)...(19): siRNA sense strand
gcagugaccucgccaaagg

SEQ ID NO: 1413839 - RNA, 19 nt, Homo sapiens
  misc_RNA (1)...(19): siRNA sense strand
gaaagagcauaaggacgaa

SEQ ID NO: 1413840 - RNA, 19 nt, Homo sapiens
  misc_RNA (1)...(19): siRNA sense strand
ggacgaugaugaagaagag

SEQ ID NO: 1413841 - RNA, 19 nt, Homo sapiens
  misc_RNA (1)...(19): siRNA sense strand
ggaagaaagagcauaagga

SEQ ID NO: 1413842 - RNA, 19 nt, Homo sapiens
  misc_RNA (1)...(19): siRNA sense strand
gcucccaacucacagagaa

SEQ ID NO: 1413843 - RNA, 19 nt, Homo sapiens
  misc_RNA (1)...(19): siRNA sense strand
ucaccgagcgccagauuaa

SEQ ID NO: 1413844 - RNA, 19 nt, Homo sapiens
  misc_RNA (1)...(19): siRNA sense strand
guuccgggcuuauacaaug

SEQ ID NO: 1413845 - RNA, 19 nt, Homo sapiens
  misc_RNA (1)...(19): siRNA sense strand
ggaagacgaggaggaauga

SEQ ID NO: 1413846 - RNA, 19 nt, Homo sapiens
  misc_RNA (1)...(19): siRNA sense strand
caaaggcgccugcgacaag

SEQ ID NO: 1413847 - RNA, 19 nt, Homo sapiens
  misc_RNA (1)...(19): siRNA sense strand
gcaugaaguggaagaaaga

SEQ ID NO: 1413848 - RNA, 19 nt, Homo sapiens
  misc_RNA (1)...(19): siRNA sense strand
gggcuucucuguuccaaaa

SEQ ID NO: 1413849 - RNA, 19 nt, Homo sapiens
  misc_RNA (1)...(19): siRNA sense strand
gccgacuucuugcuccuuu

SEQ ID NO: 1413850 - RNA, 19 nt, Homo sapiens
  misc_RNA (1)...(19): siRNA sense strand
cgaggaggacgaugaugaa

SEQ ID NO: 1413851 - RNA, 19 nt, Homo sapiens
  misc_RNA (1)...(19): siRNA sense strand
cgcuggagcuggagaagga

SEQ ID NO: 1413852 - RNA, 19 nt, Homo sapiens
  misc_RNA (1)...(19): siRNA sense strand
cgcaugaaguggaagaaag

SEQ ID NO: 1413853 - RNA, 19 nt, Homo sapiens
  misc_RNA (1)...(19): siRNA sense strand
aaaggcgccugcgacaaga

SEQ ID NO: 1413854 - RNA, 19 nt, Homo sapiens
  misc_RNA (1)...(19): siRNA sense strand
cgaccguuccgggcuuaua

SEQ ID NO: 1413855 - RNA, 19 nt, Homo sapiens
  misc_RNA (1)...(19): siRNA sense strand
cuccuuugcucccaacuca

SEQ ID NO: 1413856 - RNA, 19 nt, Homo sapiens
  misc_RNA (1)...(19): siRNA sense strand
acgaggaggacgaugauga

SEQ ID NO: 1413857 - RNA, 19 nt, Homo sapiens
  misc_RNA (1)...(19): siRNA sense strand
cgacgaggaggacgaugau

SEQ ID NO: 1413858 - RNA, 19 nt, Homo sapiens
  misc_RNA (1)...(19): siRNA sense strand
gggcuuauacaaugucaac

SEQ ID NO: 1413859 - RNA, 19 nt, Homo sapiens
  misc_RNA (1)...(19): siRNA sense strand
gaaguggaagaaagagcau

SEQ ID NO: 1413860 - RNA, 19 nt, Homo sapiens
  misc_RNA (1)...(19): siRNA sense strand
gcaaagaacaucagaacuu

SEQ ID NO: 1413861 - RNA, 19 nt, Homo sapiens
  misc_RNA (1)...(19): siRNA sense strand
caaagaacaucagaacuuc

SEQ ID NO: 1413862 - RNA, 19 nt, Homo sapiens
  misc_RNA (1)...(19): siRNA sense strand
gcagcucucugucggauga

SEQ ID NO: 1413863 - RNA, 19 nt, Homo sapiens
  misc_RNA (1)...(19): siRNA sense strand
guccacagaugaccucuuu

SEQ ID NO: 1413864 - RNA, 19 nt, Homo sapiens
  misc_RNA (1)...(19): siRNA sense strand
gagauugccucuacuugca

SEQ ID NO: 1413865 - RNA, 19 nt, Homo sapiens
  misc_RNA (1)...(19): siRNA sense strand
ccacccggcucuucacuga

SEQ ID NO: 1413866 - RNA, 19 nt, Homo sapiens
  misc_RNA (1)...(19): siRNA sense strand
gcaacgacauugugaccau

SEQ ID NO: 1413867 - RNA, 19 nt, Homo sapiens
  misc_RNA (1)...(19): siRNA sense strand
ggacagcccaucccagaga

SEQ ID NO: 1413868 - RNA, 19 nt, Homo sapiens
  misc_RNA (1)...(19): siRNA sense strand
gcuugagccucgaugguuu

SEQ ID NO: 1413869 - RNA, 19 nt, Homo sapiens
  misc_RNA (1)...(19): siRNA sense strand
ccaacgaggugaccacuac

SEQ ID NO: 1413870 - RNA, 19 nt, Homo sapiens
  misc_RNA (1)...(19): siRNA sense strand
gcucggaggaggagaugua

SEQ ID NO: 1413871 - RNA, 19 nt, Homo sapiens
  misc_RNA (1)...(19): siRNA sense strand
aggaggagauguacaacaa

SEQ ID NO: 1413872 - RNA, 19 nt, Homo sapiens
  misc_RNA (1)...(19): siRNA sense strand
caaauacuucuauggcaaa

SEQ ID NO: 1413873 - RNA, 19 nt, Homo sapiens
  misc_RNA (1)...(19): siRNA sense strand
uguccacgaugcugccuua

SEQ ID NO: 1413874 - RNA, 19 nt, Homo sapiens
  misc_RNA (1)...(19): siRNA sense strand
gcacagcuaccgcgucauc

SEQ ID NO: 1413875 - RNA, 19 nt, Homo sapiens
  misc_RNA (1)...(19): siRNA sense strand
aggaggaccugcagaagga

SEQ ID NO: 1413876 - RNA, 19 nt, Homo sapiens
  misc_RNA (1)...(19): siRNA sense strand
uaagggaacuccaaaaucu

SEQ ID NO: 1413877 - RNA, 19 nt, Homo sapiens
  misc_RNA (1)...(19): siRNA sense strand
gcuacuaccgcaaauacuu

SEQ ID NO: 1413878 - RNA, 19 nt, Homo sapiens
  misc_RNA (1)...(19): siRNA sense strand
gcaaggugggcauccugua

SEQ ID NO: 1413879 - RNA, 19 nt, Homo sapiens
  misc_RNA (1)...(19): siRNA sense strand
gggcccagcuagacaccaa

SEQ ID NO: 1413880 - RNA, 19 nt, Homo sapiens
  misc_RNA (1)...(19): siRNA sense strand
ugcaagaccuggccaccaa

SEQ ID NO: 1413881 - RNA, 19 nt, Homo sapiens
  misc_RNA (1)...(19): siRNA sense strand
gcacuuccagcacguguuc

SEQ ID NO: 1413882 - RNA, 19 nt, Homo sapiens
  misc_RNA (1)...(19): siRNA sense strand
ccacauuggcaacgacauu

SEQ ID NO: 1413883 - RNA, 19 nt, Homo sapiens
  misc_RNA (1)...(19): siRNA sense strand
guggagcgcuucacauucg

SEQ ID NO: 1413884 - RNA, 19 nt, Homo sapiens
  misc_RNA (1)...(19): siRNA sense strand
gaugguuugcccacuauga

SEQ ID NO: 1413885 - RNA, 19 nt, Homo sapiens
  misc_RNA (1)...(19): siRNA sense strand
gugcggagccugagacaca

SEQ ID NO: 1413886 - RNA, 19 nt, Homo sapiens
  misc_RNA (1)...(19): siRNA sense strand
gcacguggagcgcuucaca

SEQ ID NO: 1413887 - RNA, 19 nt, Homo sapiens
  misc_RNA (1)...(19): siRNA sense strand
gaccggccuucaugcaguu

SEQ ID NO: 1413888 - RNA, 19 nt, Homo sapiens
  misc_RNA (1)...(19): siRNA sense strand
ccacgaugcugccuuacac

SEQ ID NO: 1413889 - RNA, 19 nt, Homo sapiens
  misc_RNA (1)...(19): siRNA sense strand
ggaacuccaucagcaggau

SEQ ID NO: 1413890 - RNA, 19 nt, Homo sapiens
  misc_RNA (1)...(19): siRNA sense strand
caccuggcuuuguguguga

SEQ ID NO: 1413891 - RNA, 19 nt, Homo sapiens
  misc_RNA (1)...(19): siRNA sense strand
ggaccacgagaucauguuc

SEQ ID NO: 1413892 - RNA, 19 nt, Homo sapiens
  misc_RNA (1)...(19): siRNA sense strand
ucaugcaguuucucaccuu

SEQ ID NO: 1413893 - RNA, 19 nt, Homo sapiens
  misc_RNA (1)...(19): siRNA sense strand
cggaggaggagauguacaa

SEQ ID NO: 1413894 - RNA, 19 nt, Homo sapiens
  misc_RNA (1)...(19): siRNA sense strand
ccacagaugaccucuuugc

SEQ ID NO: 1413895 - RNA, 19 nt, Homo sapiens
  misc_RNA (1)...(19): siRNA sense strand
gcaaguggugagcuuccaa

SEQ ID NO: 1413896 - RNA, 19 nt, Homo sapiens
  misc_RNA (1)...(19): siRNA sense strand
gugcuggccuggaccuucu

SEQ ID NO: 1413897 - RNA, 19 nt, Homo sapiens
  misc_RNA (1)...(19): siRNA sense strand
ucgaugguuugcccacuau

SEQ ID NO: 1413898 - RNA, 19 nt, Homo sapiens
  misc_RNA (1)...(19): siRNA sense strand
gaggaggagauguacaaca

SEQ ID NO: 1413899 - RNA, 19 nt, Homo sapiens
  misc_RNA (1)...(19): siRNA sense strand
ucaccuugcugggcgaugu

SEQ ID NO: 1413900 - RNA, 19 nt, Homo sapiens
  misc_RNA (1)...(19): siRNA sense strand
ccgaggagaggacugaguu

SEQ ID NO: 1413901 - RNA, 19 nt, Homo sapiens
  misc_RNA (1)...(19): siRNA sense strand
gccgcguaguguucaauug

SEQ ID NO: 1413902 - RNA, 19 nt, Homo sapiens
  misc_RNA (1)...(19): siRNA sense strand
ucaccacgcagcucucugu

SEQ ID NO: 1413903 - RNA, 19 nt, Homo sapiens
  misc_RNA (1)...(19): siRNA sense strand
cacggacgcugcucacacu

SEQ ID NO: 1413904 - RNA, 19 nt, Homo sapiens
  misc_RNA (1)...(19): siRNA sense strand
ccacagccaagccaucagu

SEQ ID NO: 1413905 - RNA, 19 nt, Homo sapiens
  misc_RNA (1)...(19): siRNA sense strand
ggcacgcacucccucuaca

SEQ ID NO: 1413906 - RNA, 19 nt, Homo sapiens
  misc_RNA (1)...(19): siRNA sense strand
caaggugggcauccuguac

SEQ ID NO: 1413907 - RNA, 19 nt, Homo sapiens
  misc_RNA (1)...(19): siRNA sense strand
gcaaagaacaucagaacuu

SEQ ID NO: 1413908 - RNA, 19 nt, Homo sapiens
  misc_RNA (1)...(19): siRNA sense strand
caaagaacaucagaacuuc

SEQ ID NO: 1413909 - RNA, 19 nt, Homo sapiens
  misc_RNA (1)...(19): siRNA sense strand
gcagcucucugucggauga

SEQ ID NO: 1413910 - RNA, 19 nt, Homo sapiens
  misc_RNA (1)...(19): siRNA sense strand
guccacagaugaccucuuu

SEQ ID NO: 1413911 - RNA, 19 nt, Homo sapiens
  misc_RNA (1)...(19): siRNA sense strand
gagauugccucuacuugca

SEQ ID NO: 1413912 - RNA, 19 nt, Homo sapiens
  misc_RNA (1)...(19): siRNA sense strand
ccacccggcucuucacuga

SEQ ID NO: 1413913 - RNA, 19 nt, Homo sapiens
  misc_RNA (1)...(19): siRNA sense strand
gcaacgacauugugaccau

SEQ ID NO: 1413914 - RNA, 19 nt, Homo sapiens
  misc_RNA (1)...(19): siRNA sense strand
ggacagcccaucccagaga

SEQ ID NO: 1413915 - RNA, 19 nt, Homo sapiens
  misc_RNA (1)...(19): siRNA sense strand
gcuugagccucgaugguuu

SEQ ID NO: 1413916 - RNA, 19 nt, Homo sapiens
  misc_RNA (1)...(19): siRNA sense strand
ccaacgaggugaccacuac

SEQ ID NO: 1413917 - RNA, 19 nt, Homo sapiens
  misc_RNA (1)...(19): siRNA sense strand
gcucggaggaggagaugua

SEQ ID NO: 1413918 - RNA, 19 nt, Homo sapiens
  misc_RNA (1)...(19): siRNA sense strand
aggaggagauguacaacaa

SEQ ID NO: 1413919 - RNA, 19 nt, Homo sapiens
  misc_RNA (1)...(19): siRNA sense strand
caaauacuucuauggcaaa

SEQ ID NO: 1413920 - RNA, 19 nt, Homo sapiens
  misc_RNA (1)...(19): siRNA sense strand
uguccacgaugcugccuua

SEQ ID NO: 1413921 - RNA, 19 nt, Homo sapiens
  misc_RNA (1)...(19): siRNA sense strand
gcacagcuaccgcgucauc

SEQ ID NO: 1413922 - RNA, 19 nt, Homo sapiens
  misc_RNA (1)...(19): siRNA sense strand
aggaggaccugcagaagga

SEQ ID NO: 1413923 - RNA, 19 nt, Homo sapiens
  misc_RNA (1)...(19): siRNA sense strand
uaagggaacuccaaaaucu

SEQ ID NO: 1413924 - RNA, 19 nt, Homo sapiens
  misc_RNA (1)...(19): siRNA sense strand
gcuacuaccgcaaauacuu

SEQ ID NO: 1413925 - RNA, 19 nt, Homo sapiens
  misc_RNA (1)...(19): siRNA sense strand
gcaaggugggcauccugua

SEQ ID NO: 1413926 - RNA, 19 nt, Homo sapiens
  misc_RNA (1)...(19): siRNA sense strand
gggcccagcuagacaccaa

SEQ ID NO: 1413927 - RNA, 19 nt, Homo sapiens
  misc_RNA (1)...(19): siRNA sense strand
ugcaagaccuggccaccaa

SEQ ID NO: 1413928 - RNA, 19 nt, Homo sapiens
  misc_RNA (1)...(19): siRNA sense strand
gcacuuccagcacguguuc

SEQ ID NO: 1413929 - RNA, 19 nt, Homo sapiens
  misc_RNA (1)...(19): siRNA sense strand
ccacauuggcaacgacauu

SEQ ID NO: 1413930 - RNA, 19 nt, Homo sapiens
  misc_RNA (1)...(19): siRNA sense strand
guggagcgcuucacauucg

SEQ ID NO: 1413931 - RNA, 19 nt, Homo sapiens
  misc_RNA (1)...(19): siRNA sense strand
gaugguuugcccacuauga

SEQ ID NO: 1413932 - RNA, 19 nt, Homo sapiens
  misc_RNA (1)...(19): siRNA sense strand
gugcggagccugagacaca

SEQ ID NO: 1413933 - RNA, 19 nt, Homo sapiens
  misc_RNA (1)...(19): siRNA sense strand
gcacguggagcgcuucaca

SEQ ID NO: 1413934 - RNA, 19 nt, Homo sapiens
  misc_RNA (1)...(19): siRNA sense strand
gaccggccuucaugcaguu

SEQ ID NO: 1413935 - RNA, 19 nt, Homo sapiens
  misc_RNA (1)...(19): siRNA sense strand
ccacgaugcugccuuacac

SEQ ID NO: 1413936 - RNA, 19 nt, Homo sapiens
  misc_RNA (1)...(19): siRNA sense strand
ggaacuccaucagcaggau

SEQ ID NO: 1413937 - RNA, 19 nt, Homo sapiens
  misc_RNA (1)...(19): siRNA sense strand
caccuggcuuuguguguga

SEQ ID NO: 1413938 - RNA, 19 nt, Homo sapiens
  misc_RNA (1)...(19): siRNA sense strand
ggaccacgagaucauguuc

SEQ ID NO: 1413939 - RNA, 19 nt, Homo sapiens
  misc_RNA (1)...(19): siRNA sense strand
ucaugcaguuucucaccuu

SEQ ID NO: 1413940 - RNA, 19 nt, Homo sapiens
  misc_RNA (1)...(19): siRNA sense strand
cggaggaggagauguacaa

SEQ ID NO: 1413941 - RNA, 19 nt, Homo sapiens
  misc_RNA (1)...(19): siRNA sense strand
ccacagaugaccucuuugc

SEQ ID NO: 1413942 - RNA, 19 nt, Homo sapiens
  misc_RNA (1)...(19): siRNA sense strand
gcaaguggugagcuuccaa

SEQ ID NO: 1413943 - RNA, 19 nt, Homo sapiens
  misc_RNA (1)...(19): siRNA sense strand
gugcuggccuggaccuucu

SEQ ID NO: 1413944 - RNA, 19 nt, Homo sapiens
  misc_RNA (1)...(19): siRNA sense strand
ucgaugguuugcccacuau

SEQ ID NO: 1413945 - RNA, 19 nt, Homo sapiens
  misc_RNA (1)...(19): siRNA sense strand
gaggaggagauguacaaca

SEQ ID NO: 1413946 - RNA, 19 nt, Homo sapiens
  misc_RNA (1)...(19): siRNA sense strand
ucaccuugcugggcgaugu

SEQ ID NO: 1413947 - RNA, 19 nt, Homo sapiens
  misc_RNA (1)...(19): siRNA sense strand
ccgaggagaggacugaguu

SEQ ID NO: 1413948 - RNA, 19 nt, Homo sapiens
  misc_RNA (1)...(19): siRNA sense strand
gccgcguaguguucaauug

SEQ ID NO: 1413949 - RNA, 19 nt, Homo sapiens
  misc_RNA (1)...(19): siRNA sense strand
ucaccacgcagcucucugu

SEQ ID NO: 1413950 - RNA, 19 nt, Homo sapiens
  misc_RNA (1)...(19): siRNA sense strand
cacggacgcugcucacacu

SEQ ID NO: 1413951 - RNA, 19 nt, Homo sapiens
  misc_RNA (1)...(19): siRNA sense strand
ccacagccaagccaucagu

SEQ ID NO: 1413952 - RNA, 19 nt, Homo sapiens
  misc_RNA (1)...(19): siRNA sense strand
ggcacgcacucccucuaca

SEQ ID NO: 1413953 - RNA, 19 nt, Homo sapiens
  misc_RNA (1)...(19): siRNA sense strand
caaggugggcauccuguac

SEQ ID NO: 1413954 - RNA, 19 nt, Homo sapiens
  misc_RNA (1)...(19): siRNA sense strand
aaucuuggcuaaacucuuu

SEQ ID NO: 1413955 - RNA, 19 nt, Homo sapiens
  misc_RNA (1)...(19): siRNA sense strand
ccacucgacuccauccaua

SEQ ID NO: 1413956 - RNA, 19 nt, Homo sapiens
  misc_RNA (1)...(19): siRNA sense strand
gggauuaacaugaugagua

SEQ ID NO: 1413957 - RNA, 19 nt, Homo sapiens
  misc_RNA (1)...(19): siRNA sense strand
ggauuaacaugaugaguac

SEQ ID NO: 1413958 - RNA, 19 nt, Homo sapiens
  misc_RNA (1)...(19): siRNA sense strand
aaccaaauguucuuucuug

SEQ ID NO: 1413959 - RNA, 19 nt, Homo sapiens
  misc_RNA (1)...(19): siRNA sense strand
gaaguaaaccaaauguucu

SEQ ID NO: 1413960 - RNA, 19 nt, Homo sapiens
  misc_RNA (1)...(19): siRNA sense strand
gcaguugcauuaccugucu

SEQ ID NO: 1413961 - RNA, 19 nt, Homo sapiens
  misc_RNA (1)...(19): siRNA sense strand
uuaccugucuaccuccuua

SEQ ID NO: 1413962 - RNA, 19 nt, Homo sapiens
  misc_RNA (1)...(19): siRNA sense strand
ucacagauaacuaugcaaa

SEQ ID NO: 1413963 - RNA, 19 nt, Homo sapiens
  misc_RNA (1)...(19): siRNA sense strand
ugaaguaaaccaaauguuc

SEQ ID NO: 1413964 - RNA, 19 nt, Homo sapiens
  misc_RNA (1)...(19): siRNA sense strand
uccauacaaucacagauaa

SEQ ID NO: 1413965 - RNA, 19 nt, Homo sapiens
  misc_RNA (1)...(19): siRNA sense strand
gcuacgugcucuuguuugg

SEQ ID NO: 1413966 - RNA, 19 nt, Homo sapiens
  misc_RNA (1)...(19): siRNA sense strand
auuccagccuuaagagaua

SEQ ID NO: 1413967 - RNA, 19 nt, Homo sapiens
  misc_RNA (1)...(19): siRNA sense strand
auauugggcaguugcauua

SEQ ID NO: 1413968 - RNA, 19 nt, Homo sapiens
  misc_RNA (1)...(19): siRNA sense strand
gcagaagaaauaccaagag

SEQ ID NO: 1413969 - RNA, 19 nt, Homo sapiens
  misc_RNA (1)...(19): siRNA sense strand
aucaacagcagaagaaaua

SEQ ID NO: 1413970 - RNA, 19 nt, Homo sapiens
  misc_RNA (1)...(19): siRNA sense strand
aaucacagauaacuaugca

SEQ ID NO: 1413971 - RNA, 19 nt, Homo sapiens
  misc_RNA (1)...(19): siRNA sense strand
gugcucuuguuugggauua

SEQ ID NO: 1413972 - RNA, 19 nt, Homo sapiens
  misc_RNA (1)...(19): siRNA sense strand
cuaccuccuuauugcuaua

SEQ ID NO: 1413973 - RNA, 19 nt, Homo sapiens
  misc_RNA (1)...(19): siRNA sense strand
guaaaccaaauguucuuuc

SEQ ID NO: 1413974 - RNA, 19 nt, Homo sapiens
  misc_RNA (1)...(19): siRNA sense strand
ccuccuuauugcuauagua

SEQ ID NO: 1413975 - RNA, 19 nt, Homo sapiens
  misc_RNA (1)...(19): siRNA sense strand
ccaaauguucuuucuugca

SEQ ID NO: 1413976 - RNA, 19 nt, Homo sapiens
  misc_RNA (1)...(19): siRNA sense strand
ggccauuccagccuuaaga

SEQ ID NO: 1413977 - RNA, 19 nt, Homo sapiens
  misc_RNA (1)...(19): siRNA sense strand
guucuuucuugcagccaaa

SEQ ID NO: 1413978 - RNA, 19 nt, Homo sapiens
  misc_RNA (1)...(19): siRNA sense strand
gaaucuuggcuaaacucuu

SEQ ID NO: 1413979 - RNA, 19 nt, Homo sapiens
  misc_RNA (1)...(19): siRNA sense strand
ucgacuccauccauacaau

SEQ ID NO: 1413980 - RNA, 19 nt, Homo sapiens
  misc_RNA (1)...(19): siRNA sense strand
aaaaucaacagcagaagaa

SEQ ID NO: 1413981 - RNA, 19 nt, Homo sapiens
  misc_RNA (1)...(19): siRNA sense strand
auccauacaaucacagaua

SEQ ID NO: 1413982 - RNA, 19 nt, Homo sapiens
  misc_RNA (1)...(19): siRNA sense strand
aaucuuggcuaaacucuuu

SEQ ID NO: 1413983 - RNA, 19 nt, Homo sapiens
  misc_RNA (1)...(19): siRNA sense strand
ccacucgacuccauccaua

SEQ ID NO: 1413984 - RNA, 19 nt, Homo sapiens
  misc_RNA (1)...(19): siRNA sense strand
gggauuaacaugaugagua

SEQ ID NO: 1413985 - RNA, 19 nt, Homo sapiens
  misc_RNA (1)...(19): siRNA sense strand
ggauuaacaugaugaguac

SEQ ID NO: 1413986 - RNA, 19 nt, Homo sapiens
  misc_RNA (1)...(19): siRNA sense strand
aaccaaauguucuuucuug

SEQ ID NO: 1413987 - RNA, 19 nt, Homo sapiens
  misc_RNA (1)...(19): siRNA sense strand
gaaguaaaccaaauguucu

SEQ ID NO: 1413988 - RNA, 19 nt, Homo sapiens
  misc_RNA (1)...(19): siRNA sense strand
gcaguugcauuaccugucu

SEQ ID NO: 1413989 - RNA, 19 nt, Homo sapiens
  misc_RNA (1)...(19): siRNA sense strand
ccagaaagagcgauuuaug

SEQ ID NO: 1413990 - RNA, 19 nt, Homo sapiens
  misc_RNA (1)...(19): siRNA sense strand
uuaccugucuaccuccuua

SEQ ID NO: 1413991 - RNA, 19 nt, Homo sapiens
  misc_RNA (1)...(19): siRNA sense strand
ucacagauaacuaugcaaa

SEQ ID NO: 1413992 - RNA, 19 nt, Homo sapiens
  misc_RNA (1)...(19): siRNA sense strand
ugaaguaaaccaaauguuc

SEQ ID NO: 1413993 - RNA, 19 nt, Homo sapiens
  misc_RNA (1)...(19): siRNA sense strand
uccauacaaucacagauaa

SEQ ID NO: 1413994 - RNA, 19 nt, Homo sapiens
  misc_RNA (1)...(19): siRNA sense strand
uuucuuaagcucccaauuu

SEQ ID NO: 1413995 - RNA, 19 nt, Homo sapiens
  misc_RNA (1)...(19): siRNA sense strand
gcuacgugcucuuguuugg

SEQ ID NO: 1413996 - RNA, 19 nt, Homo sapiens
  misc_RNA (1)...(19): siRNA sense strand
auuccagccuuaagagaua

SEQ ID NO: 1413997 - RNA, 19 nt, Homo sapiens
  misc_RNA (1)...(19): siRNA sense strand
auauugggcaguugcauua

SEQ ID NO: 1413998 - RNA, 19 nt, Homo sapiens
  misc_RNA (1)...(19): siRNA sense strand
gcagaagaaauaccaagag

SEQ ID NO: 1413999 - RNA, 19 nt, Homo sapiens
  misc_RNA (1)...(19): siRNA sense strand
aucaacagcagaagaaaua

SEQ ID NO: 1414000 - RNA, 19 nt, Homo sapiens
  misc_RNA (1)...(19): siRNA sense strand
cagaaagagcgauuuaugg

SEQ ID NO: 1414001 - RNA, 19 nt, Homo sapiens
  misc_RNA (1)...(19): siRNA sense strand
uucuuaagcucccaauuug

SEQ ID NO: 1414002 - RNA, 19 nt, Homo sapiens
  misc_RNA (1)...(19): siRNA sense strand
aaucacagauaacuaugca

SEQ ID NO: 1414003 - RNA, 19 nt, Homo sapiens
  misc_RNA (1)...(19): siRNA sense strand
gugcucuuguuugggauua

SEQ ID NO: 1414004 - RNA, 19 nt, Homo sapiens
  misc_RNA (1)...(19): siRNA sense strand
cuaccuccuuauugcuaua

SEQ ID NO: 1414005 - RNA, 19 nt, Homo sapiens
  misc_RNA (1)...(19): siRNA sense strand
guaaaccaaauguucuuuc

SEQ ID NO: 1414006 - RNA, 19 nt, Homo sapiens
  misc_RNA (1)...(19): siRNA sense strand
ccuccuuauugcuauagua

SEQ ID NO: 1414007 - RNA, 19 nt, Homo sapiens
  misc_RNA (1)...(19): siRNA sense strand
ugccagaaagagcgauuua

SEQ ID NO: 1414008 - RNA, 19 nt, Homo sapiens
  misc_RNA (1)...(19): siRNA sense strand
aagagcgauuuauggcuuu

SEQ ID NO: 1414009 - RNA, 19 nt, Homo sapiens
  misc_RNA (1)...(19): siRNA sense strand
ccaaauguucuuucuugca

SEQ ID NO: 1414010 - RNA, 19 nt, Homo sapiens
  misc_RNA (1)...(19): siRNA sense strand
ggccauuccagccuuaaga

SEQ ID NO: 1414011 - RNA, 19 nt, Homo sapiens
  misc_RNA (1)...(19): siRNA sense strand
guucuuucuugcagccaaa

SEQ ID NO: 1414012 - RNA, 19 nt, Homo sapiens
  misc_RNA (1)...(19): siRNA sense strand
gauuuauggcuuuguucuu

SEQ ID NO: 1414013 - RNA, 19 nt, Homo sapiens
  misc_RNA (1)...(19): siRNA sense strand
uggcuuuguucuuuucuua

SEQ ID NO: 1414014 - RNA, 19 nt, Homo sapiens
  misc_RNA (1)...(19): siRNA sense strand
gaaucuuggcuaaacucuu

SEQ ID NO: 1414015 - RNA, 19 nt, Homo sapiens
  misc_RNA (1)...(19): siRNA sense strand
ucgacuccauccauacaau

SEQ ID NO: 1414016 - RNA, 19 nt, Homo sapiens
  misc_RNA (1)...(19): siRNA sense strand
aaaaucaacagcagaagaa

SEQ ID NO: 1414017 - RNA, 19 nt, Homo sapiens
  misc_RNA (1)...(19): siRNA sense strand
auccauacaaucacagaua

SEQ ID NO: 1414018 - RNA, 19 nt, Homo sapiens
  misc_RNA (1)...(19): siRNA sense strand
aaucuuggcuaaacucuuu

SEQ ID NO: 1414019 - RNA, 19 nt, Homo sapiens
  misc_RNA (1)...(19): siRNA sense strand
ccacucgacuccauccaua

SEQ ID NO: 1414020 - RNA, 19 nt, Homo sapiens
  misc_RNA (1)...(19): siRNA sense strand
gggauuaacaugaugagua

SEQ ID NO: 1414021 - RNA, 19 nt, Homo sapiens
  misc_RNA (1)...(19): siRNA sense strand
ggauuaacaugaugaguac

SEQ ID NO: 1414022 - RNA, 19 nt, Homo sapiens
  misc_RNA (1)...(19): siRNA sense strand
aaccaaauguucuuucuug

SEQ ID NO: 1414023 - RNA, 19 nt, Homo sapiens
  misc_RNA (1)...(19): siRNA sense strand
gaaguaaaccaaauguucu

SEQ ID NO: 1414024 - RNA, 19 nt, Homo sapiens
  misc_RNA (1)...(19): siRNA sense strand
gcaguugcauuaccugucu

SEQ ID NO: 1414025 - RNA, 19 nt, Homo sapiens
  misc_RNA (1)...(19): siRNA sense strand
ccagaaagagcgauuuaug

SEQ ID NO: 1414026 - RNA, 19 nt, Homo sapiens
  misc_RNA (1)...(19): siRNA sense strand
uuaccugucuaccuccuua

SEQ ID NO: 1414027 - RNA, 19 nt, Homo sapiens
  misc_RNA (1)...(19): siRNA sense strand
ucacagauaacuaugcaaa

SEQ ID NO: 1414028 - RNA, 19 nt, Homo sapiens
  misc_RNA (1)...(19): siRNA sense strand
ugaaguaaaccaaauguuc

SEQ ID NO: 1414029 - RNA, 19 nt, Homo sapiens
  misc_RNA (1)...(19): siRNA sense strand
uccauacaaucacagauaa

SEQ ID NO: 1414030 - RNA, 19 nt, Homo sapiens
  misc_RNA (1)...(19): siRNA sense strand
uuucuuaagcucccaauuu

SEQ ID NO: 1414031 - RNA, 19 nt, Homo sapiens
  misc_RNA (1)...(19): siRNA sense strand
gcuacgugcucuuguuugg

SEQ ID NO: 1414032 - RNA, 19 nt, Homo sapiens
  misc_RNA (1)...(19): siRNA sense strand
auuccagccuuaagagaua

SEQ ID NO: 1414033 - RNA, 19 nt, Homo sapiens
  misc_RNA (1)...(19): siRNA sense strand
auauugggcaguugcauua

SEQ ID NO: 1414034 - RNA, 19 nt, Homo sapiens
  misc_RNA (1)...(19): siRNA sense strand
gcagaagaaauaccaagag

SEQ ID NO: 1414035 - RNA, 19 nt, Homo sapiens
  misc_RNA (1)...(19): siRNA sense strand
aucaacagcagaagaaaua

SEQ ID NO: 1414036 - RNA, 19 nt, Homo sapiens
  misc_RNA (1)...(19): siRNA sense strand
cagaaagagcgauuuaugg

SEQ ID NO: 1414037 - RNA, 19 nt, Homo sapiens
  misc_RNA (1)...(19): siRNA sense strand
uucuuaagcucccaauuug

SEQ ID NO: 1414038 - RNA, 19 nt, Homo sapiens
  misc_RNA (1)...(19): siRNA sense strand
aaucacagauaacuaugca

SEQ ID NO: 1414039 - RNA, 19 nt, Homo sapiens
  misc_RNA (1)...(19): siRNA sense strand
gugcucuuguuugggauua

SEQ ID NO: 1414040 - RNA, 19 nt, Homo sapiens
  misc_RNA (1)...(19): siRNA sense strand
cuaccuccuuauugcuaua

SEQ ID NO: 1414041 - RNA, 19 nt, Homo sapiens
  misc_RNA (1)...(19): siRNA sense strand
guaaaccaaauguucuuuc

SEQ ID NO: 1414042 - RNA, 19 nt, Homo sapiens
  misc_RNA (1)...(19): siRNA sense strand
ccuccuuauugcuauagua

SEQ ID NO: 1414043 - RNA, 19 nt, Homo sapiens
  misc_RNA (1)...(19): siRNA sense strand
ugccagaaagagcgauuua

SEQ ID NO: 1414044 - RNA, 19 nt, Homo sapiens
  misc_RNA (1)...(19): siRNA sense strand
aagagcgauuuauggcuuu

SEQ ID NO: 1414045 - RNA, 19 nt, Homo sapiens
  misc_RNA (1)...(19): siRNA sense strand
ccaaauguucuuucuugca

SEQ ID NO: 1414046 - RNA, 19 nt, Homo sapiens
  misc_RNA (1)...(19): siRNA sense strand
ggccauuccagccuuaaga

SEQ ID NO: 1414047 - RNA, 19 nt, Homo sapiens
  misc_RNA (1)...(19): siRNA sense strand
guucuuucuugcagccaaa

SEQ ID NO: 1414048 - RNA, 19 nt, Homo sapiens
  misc_RNA (1)...(19): siRNA sense strand
gauuuauggcuuuguucuu

SEQ ID NO: 1414049 - RNA, 19 nt, Homo sapiens
  misc_RNA (1)...(19): siRNA sense strand
uggcuuuguucuuuucuua

SEQ ID NO: 1414050 - RNA, 19 nt, Homo sapiens
  misc_RNA (1)...(19): siRNA sense strand
gaaucuuggcuaaacucuu

SEQ ID NO: 1414051 - RNA, 19 nt, Homo sapiens
  misc_RNA (1)...(19): siRNA sense strand
ucgacuccauccauacaau

SEQ ID NO: 1414052 - RNA, 19 nt, Homo sapiens
  misc_RNA (1)...(19): siRNA sense strand
aaaaucaacagcagaagaa

SEQ ID NO: 1414053 - RNA, 19 nt, Homo sapiens
  misc_RNA (1)...(19): siRNA sense strand
auccauacaaucacagaua

SEQ ID NO: 1414054 - RNA, 19 nt, Homo sapiens
  misc_RNA (1)...(19): siRNA sense strand
aaucuuggcuaaacucuuu

SEQ ID NO: 1414055 - RNA, 19 nt, Homo sapiens
  misc_RNA (1)...(19): siRNA sense strand
ccacucgacuccauccaua

SEQ ID NO: 1414056 - RNA, 19 nt, Homo sapiens
  misc_RNA (1)...(19): siRNA sense strand
gggauuaacaugaugagua

SEQ ID NO: 1414057 - RNA, 19 nt, Homo sapiens
  misc_RNA (1)...(19): siRNA sense strand
ggauuaacaugaugaguac

SEQ ID NO: 1414058 - RNA, 19 nt, Homo sapiens
  misc_RNA (1)...(19): siRNA sense strand
aaccaaauguucuuucuug

SEQ ID NO: 1414059 - RNA, 19 nt, Homo sapiens
  misc_RNA (1)...(19): siRNA sense strand
gaaguaaaccaaauguucu

SEQ ID NO: 1414060 - RNA, 19 nt, Homo sapiens
  misc_RNA (1)...(19): siRNA sense strand
gcaguugcauuaccugucu

SEQ ID NO: 1414061 - RNA, 19 nt, Homo sapiens
  misc_RNA (1)...(19): siRNA sense strand
uuaccugucuaccuccuua

SEQ ID NO: 1414062 - RNA, 19 nt, Homo sapiens
  misc_RNA (1)...(19): siRNA sense strand
ucacagauaacuaugcaaa

SEQ ID NO: 1414063 - RNA, 19 nt, Homo sapiens
  misc_RNA (1)...(19): siRNA sense strand
ugaaguaaaccaaauguuc

SEQ ID NO: 1414064 - RNA, 19 nt, Homo sapiens
  misc_RNA (1)...(19): siRNA sense strand
uccauacaaucacagauaa

SEQ ID NO: 1414065 - RNA, 19 nt, Homo sapiens
  misc_RNA (1)...(19): siRNA sense strand
gcuacgugcucuuguuugg

SEQ ID NO: 1414066 - RNA, 19 nt, Homo sapiens
  misc_RNA (1)...(19): siRNA sense strand
auuccagccuuaagagaua

SEQ ID NO: 1414067 - RNA, 19 nt, Homo sapiens
  misc_RNA (1)...(19): siRNA sense strand
auauugggcaguugcauua

SEQ ID NO: 1414068 - RNA, 19 nt, Homo sapiens
  misc_RNA (1)...(19): siRNA sense strand
gcagaagaaauaccaagag

SEQ ID NO: 1414069 - RNA, 19 nt, Homo sapiens
  misc_RNA (1)...(19): siRNA sense strand
aucaacagcagaagaaaua

SEQ ID NO: 1414070 - RNA, 19 nt, Homo sapiens
  misc_RNA (1)...(19): siRNA sense strand
aaucacagauaacuaugca

SEQ ID NO: 1414071 - RNA, 19 nt, Homo sapiens
  misc_RNA (1)...(19): siRNA sense strand
gugcucuuguuugggauua

SEQ ID NO: 1414072 - RNA, 19 nt, Homo sapiens
  misc_RNA (1)...(19): siRNA sense strand
cuaccuccuuauugcuaua

SEQ ID NO: 1414073 - RNA, 19 nt, Homo sapiens
  misc_RNA (1)...(19): siRNA sense strand
guaaaccaaauguucuuuc

SEQ ID NO: 1414074 - RNA, 19 nt, Homo sapiens
  misc_RNA (1)...(19): siRNA sense strand
ccuccuuauugcuauagua

SEQ ID NO: 1414075 - RNA, 19 nt, Homo sapiens
  misc_RNA (1)...(19): siRNA sense strand
ccaaauguucuuucuugca

SEQ ID NO: 1414076 - RNA, 19 nt, Homo sapiens
  misc_RNA (1)...(19): siRNA sense strand
ggccauuccagccuuaaga

SEQ ID NO: 1414077 - RNA, 19 nt, Homo sapiens
  misc_RNA (1)...(19): siRNA sense strand
guucuuucuugcagccaaa

SEQ ID NO: 1414078 - RNA, 19 nt, Homo sapiens
  misc_RNA (1)...(19): siRNA sense strand
gaaucuuggcuaaacucuu

SEQ ID NO: 1414079 - RNA, 19 nt, Homo sapiens
  misc_RNA (1)...(19): siRNA sense strand
ucgacuccauccauacaau

SEQ ID NO: 1414080 - RNA, 19 nt, Homo sapiens
  misc_RNA (1)...(19): siRNA sense strand
aaaaucaacagcagaagaa

SEQ ID NO: 1414081 - RNA, 19 nt, Homo sapiens
  misc_RNA (1)...(19): siRNA sense strand
auccauacaaucacagaua

SEQ ID NO: 1414082 - RNA, 19 nt, Homo sapiens
  misc_RNA (1)...(19): siRNA sense strand
aaucuuggcuaaacucuuu

SEQ ID NO: 1414083 - RNA, 19 nt, Homo sapiens
  misc_RNA (1)...(19): siRNA sense strand
ccacucgacuccauccaua

SEQ ID NO: 1414084 - RNA, 19 nt, Homo sapiens
  misc_RNA (1)...(19): siRNA sense strand
gggauuaacaugaugagua

SEQ ID NO: 1414085 - RNA, 19 nt, Homo sapiens
  misc_RNA (1)...(19): siRNA sense strand
ggauuaacaugaugaguac

SEQ ID NO: 1414086 - RNA, 19 nt, Homo sapiens
  misc_RNA (1)...(19): siRNA sense strand
aaccaaauguucuuucuug

SEQ ID NO: 1414087 - RNA, 19 nt, Homo sapiens
  misc_RNA (1)...(19): siRNA sense strand
gaaguaaaccaaauguucu

SEQ ID NO: 1414088 - RNA, 19 nt, Homo sapiens
  misc_RNA (1)...(19): siRNA sense strand
gcaguugcauuaccugucu

SEQ ID NO: 1414089 - RNA, 19 nt, Homo sapiens
  misc_RNA (1)...(19): siRNA sense strand
ccagaaagagcgauuuaug

SEQ ID NO: 1414090 - RNA, 19 nt, Homo sapiens
  misc_RNA (1)...(19): siRNA sense strand
uuaccugucuaccuccuua

SEQ ID NO: 1414091 - RNA, 19 nt, Homo sapiens
  misc_RNA (1)...(19): siRNA sense strand
ucacagauaacuaugcaaa

SEQ ID NO: 1414092 - RNA, 19 nt, Homo sapiens
  misc_RNA (1)...(19): siRNA sense strand
ugaaguaaaccaaauguuc

SEQ ID NO: 1414093 - RNA, 19 nt, Homo sapiens
  misc_RNA (1)...(19): siRNA sense strand
uccauacaaucacagauaa

SEQ ID NO: 1414094 - RNA, 19 nt, Homo sapiens
  misc_RNA (1)...(19): siRNA sense strand
uuucuuaagcucccaauuu

SEQ ID NO: 1414095 - RNA, 19 nt, Homo sapiens
  misc_RNA (1)...(19): siRNA sense strand
gcuacgugcucuuguuugg

SEQ ID NO: 1414096 - RNA, 19 nt, Homo sapiens
  misc_RNA (1)...(19): siRNA sense strand
auuccagccuuaagagaua

SEQ ID NO: 1414097 - RNA, 19 nt, Homo sapiens
  misc_RNA (1)...(19): siRNA sense strand
auauugggcaguugcauua

SEQ ID NO: 1414098 - RNA, 19 nt, Homo sapiens
  misc_RNA (1)...(19): siRNA sense strand
gcagaagaaauaccaagag

SEQ ID NO: 1414099 - RNA, 19 nt, Homo sapiens
  misc_RNA (1)...(19): siRNA sense strand
aucaacagcagaagaaaua

SEQ ID NO: 1414100 - RNA, 19 nt, Homo sapiens
  misc_RNA (1)...(19): siRNA sense strand
cagaaagagcgauuuaugg

SEQ ID NO: 1414101 - RNA, 19 nt, Homo sapiens
  misc_RNA (1)...(19): siRNA sense strand
uucuuaagcucccaauuug

SEQ ID NO: 1414102 - RNA, 19 nt, Homo sapiens
  misc_RNA (1)...(19): siRNA sense strand
aaucacagauaacuaugca

SEQ ID NO: 1414103 - RNA, 19 nt, Homo sapiens
  misc_RNA (1)...(19): siRNA sense strand
gugcucuuguuugggauua

SEQ ID NO: 1414104 - RNA, 19 nt, Homo sapiens
  misc_RNA (1)...(19): siRNA sense strand
cuaccuccuuauugcuaua

SEQ ID NO: 1414105 - RNA, 19 nt, Homo sapiens
  misc_RNA (1)...(19): siRNA sense strand
guaaaccaaauguucuuuc

SEQ ID NO: 1414106 - RNA, 19 nt, Homo sapiens
  misc_RNA (1)...(19): siRNA sense strand
ccuccuuauugcuauagua

SEQ ID NO: 1414107 - RNA, 19 nt, Homo sapiens
  misc_RNA (1)...(19): siRNA sense strand
ugccagaaagagcgauuua

SEQ ID NO: 1414108 - RNA, 19 nt, Homo sapiens
  misc_RNA (1)...(19): siRNA sense strand
aagagcgauuuauggcuuu

SEQ ID NO: 1414109 - RNA, 19 nt, Homo sapiens
  misc_RNA (1)...(19): siRNA sense strand
ccaaauguucuuucuugca

SEQ ID NO: 1414110 - RNA, 19 nt, Homo sapiens
  misc_RNA (1)...(19): siRNA sense strand
ggccauuccagccuuaaga

SEQ ID NO: 1414111 - RNA, 19 nt, Homo sapiens
  misc_RNA (1)...(19): siRNA sense strand
guucuuucuugcagccaaa

SEQ ID NO: 1414112 - RNA, 19 nt, Homo sapiens
  misc_RNA (1)...(19): siRNA sense strand
gauuuauggcuuuguucuu

SEQ ID NO: 1414113 - RNA, 19 nt, Homo sapiens
  misc_RNA (1)...(19): siRNA sense strand
uggcuuuguucuuuucuua

SEQ ID NO: 1414114 - RNA, 19 nt, Homo sapiens
  misc_RNA (1)...(19): siRNA sense strand
gaaucuuggcuaaacucuu

SEQ ID NO: 1414115 - RNA, 19 nt, Homo sapiens
  misc_RNA (1)...(19): siRNA sense strand
ucgacuccauccauacaau

SEQ ID NO: 1414116 - RNA, 19 nt, Homo sapiens
  misc_RNA (1)...(19): siRNA sense strand
aaaaucaacagcagaagaa

SEQ ID NO: 1414117 - RNA, 19 nt, Homo sapiens
  misc_RNA (1)...(19): siRNA sense strand
auccauacaaucacagaua

SEQ ID NO: 1414118 - RNA, 19 nt, Homo sapiens
  misc_RNA (1)...(19): siRNA sense strand
aaucuuggcuaaacucuuu

SEQ ID NO: 1414119 - RNA, 19 nt, Homo sapiens
  misc_RNA (1)...(19): siRNA sense strand
ccacucgacuccauccaua

SEQ ID NO: 1414120 - RNA, 19 nt, Homo sapiens
  misc_RNA (1)...(19): siRNA sense strand
gggauuaacaugaugagua

SEQ ID NO: 1414121 - RNA, 19 nt, Homo sapiens
  misc_RNA (1)...(19): siRNA sense strand
ggauuaacaugaugaguac

SEQ ID NO: 1414122 - RNA, 19 nt, Homo sapiens
  misc_RNA (1)...(19): siRNA sense strand
aaccaaauguucuuucuug

SEQ ID NO: 1414123 - RNA, 19 nt, Homo sapiens
  misc_RNA (1)...(19): siRNA sense strand
gaaguaaaccaaauguucu

SEQ ID NO: 1414124 - RNA, 19 nt, Homo sapiens
  misc_RNA (1)...(19): siRNA sense strand
gcaguugcauuaccugucu

SEQ ID NO: 1414125 - RNA, 19 nt, Homo sapiens
  misc_RNA (1)...(19): siRNA sense strand
ccagaaagagcgauuuaug

SEQ ID NO: 1414126 - RNA, 19 nt, Homo sapiens
  misc_RNA (1)...(19): siRNA sense strand
uuaccugucuaccuccuua

SEQ ID NO: 1414127 - RNA, 19 nt, Homo sapiens
  misc_RNA (1)...(19): siRNA sense strand
ucacagauaacuaugcaaa

SEQ ID NO: 1414128 - RNA, 19 nt, Homo sapiens
  misc_RNA (1)...(19): siRNA sense strand
ugaaguaaaccaaauguuc

SEQ ID NO: 1414129 - RNA, 19 nt, Homo sapiens
  misc_RNA (1)...(19): siRNA sense strand
uccauacaaucacagauaa

SEQ ID NO: 1414130 - RNA, 19 nt, Homo sapiens
  misc_RNA (1)...(19): siRNA sense strand
uuucuuaagcucccaauuu

SEQ ID NO: 1414131 - RNA, 19 nt, Homo sapiens
  misc_RNA (1)...(19): siRNA sense strand
gcuacgugcucuuguuugg

SEQ ID NO: 1414132 - RNA, 19 nt, Homo sapiens
  misc_RNA (1)...(19): siRNA sense strand
auuccagccuuaagagaua

SEQ ID NO: 1414133 - RNA, 19 nt, Homo sapiens
  misc_RNA (1)...(19): siRNA sense strand
auauugggcaguugcauua

SEQ ID NO: 1414134 - RNA, 19 nt, Homo sapiens
  misc_RNA (1)...(19): siRNA sense strand
gcagaagaaauaccaagag

SEQ ID NO: 1414135 - RNA, 19 nt, Homo sapiens
  misc_RNA (1)...(19): siRNA sense strand
aucaacagcagaagaaaua

SEQ ID NO: 1414136 - RNA, 19 nt, Homo sapiens
  misc_RNA (1)...(19): siRNA sense strand
cagaaagagcgauuuaugg

SEQ ID NO: 1414137 - RNA, 19 nt, Homo sapiens
  misc_RNA (1)...(19): siRNA sense strand
uucuuaagcucccaauuug

SEQ ID NO: 1414138 - RNA, 19 nt, Homo sapiens
  misc_RNA (1)...(19): siRNA sense strand
aaucacagauaacuaugca

SEQ ID NO: 1414139 - RNA, 19 nt, Homo sapiens
  misc_RNA (1)...(19): siRNA sense strand
gugcucuuguuugggauua

SEQ ID NO: 1414140 - RNA, 19 nt, Homo sapiens
  misc_RNA (1)...(19): siRNA sense strand
cuaccuccuuauugcuaua

SEQ ID NO: 1414141 - RNA, 19 nt, Homo sapiens
  misc_RNA (1)...(19): siRNA sense strand
guaaaccaaauguucuuuc

SEQ ID NO: 1414142 - RNA, 19 nt, Homo sapiens
  misc_RNA (1)...(19): siRNA sense strand
ccuccuuauugcuauagua

SEQ ID NO: 1414143 - RNA, 19 nt, Homo sapiens
  misc_RNA (1)...(19): siRNA sense strand
ugccagaaagagcgauuua

SEQ ID NO: 1414144 - RNA, 19 nt, Homo sapiens
  misc_RNA (1)...(19): siRNA sense strand
aagagcgauuuauggcuuu

SEQ ID NO: 1414145 - RNA, 19 nt, Homo sapiens
  misc_RNA (1)...(19): siRNA sense strand
ccaaauguucuuucuugca

SEQ ID NO: 1414146 - RNA, 19 nt, Homo sapiens
  misc_RNA (1)...(19): siRNA sense strand
ggccauuccagccuuaaga

SEQ ID NO: 1414147 - RNA, 19 nt, Homo sapiens
  misc_RNA (1)...(19): siRNA sense strand
guucuuucuugcagccaaa

SEQ ID NO: 1414148 - RNA, 19 nt, Homo sapiens
  misc_RNA (1)...(19): siRNA sense strand
gauuuauggcuuuguucuu

SEQ ID NO: 1414149 - RNA, 19 nt, Homo sapiens
  misc_RNA (1)...(19): siRNA sense strand
uggcuuuguucuuuucuua

SEQ ID NO: 1414150 - RNA, 19 nt, Homo sapiens
  misc_RNA (1)...(19): siRNA sense strand
gaaucuuggcuaaacucuu

SEQ ID NO: 1414151 - RNA, 19 nt, Homo sapiens
  misc_RNA (1)...(19): siRNA sense strand
ucgacuccauccauacaau

SEQ ID NO: 1414152 - RNA, 19 nt, Homo sapiens
  misc_RNA (1)...(19): siRNA sense strand
aaaaucaacagcagaagaa

SEQ ID NO: 1414153 - RNA, 19 nt, Homo sapiens
  misc_RNA (1)...(19): siRNA sense strand
auccauacaaucacagaua

SEQ ID NO: 1414154 - RNA, 19 nt, Homo sapiens
  misc_RNA (1)...(19): siRNA sense strand
ggauugaccuugaauuuaa

SEQ ID NO: 1414155 - RNA, 19 nt, Homo sapiens
  misc_RNA (1)...(19): siRNA sense strand
caagagagaugaugccaaa

SEQ ID NO: 1414156 - RNA, 19 nt, Homo sapiens
  misc_RNA (1)...(19): siRNA sense strand
gcagaagaaguuacaaaua

SEQ ID NO: 1414157 - RNA, 19 nt, Homo sapiens
  misc_RNA (1)...(19): siRNA sense strand
cagaagaaguuacaaauag

SEQ ID NO: 1414158 - RNA, 19 nt, Homo sapiens
  misc_RNA (1)...(19): siRNA sense strand
gagagaugaugccaaauau

SEQ ID NO: 1414159 - RNA, 19 nt, Homo sapiens
  misc_RNA (1)...(19): siRNA sense strand
uuaccgaccugaauguuua

SEQ ID NO: 1414160 - RNA, 19 nt, Homo sapiens
  misc_RNA (1)...(19): siRNA sense strand
gaucaauccucgaagaaug

SEQ ID NO: 1414161 - RNA, 19 nt, Homo sapiens
  misc_RNA (1)...(19): siRNA sense strand
gagaugaugccaaauauau

SEQ ID NO: 1414162 - RNA, 19 nt, Homo sapiens
  misc_RNA (1)...(19): siRNA sense strand
gaauuuaaccauccucaaa

SEQ ID NO: 1414163 - RNA, 19 nt, Homo sapiens
  misc_RNA (1)...(19): siRNA sense strand
gaaaauggcugguuugucu

SEQ ID NO: 1414164 - RNA, 19 nt, Homo sapiens
  misc_RNA (1)...(19): siRNA sense strand
caugaaacauuacaggaaa

SEQ ID NO: 1414165 - RNA, 19 nt, Homo sapiens
  misc_RNA (1)...(19): siRNA sense strand
caucuauucugccugauuu

SEQ ID NO: 1414166 - RNA, 19 nt, Homo sapiens
  misc_RNA (1)...(19): siRNA sense strand
gguuuggccucuaucguua

SEQ ID NO: 1414167 - RNA, 19 nt, Homo sapiens
  misc_RNA (1)...(19): siRNA sense strand
gcggauacuuugcuuauuc

SEQ ID NO: 1414168 - RNA, 19 nt, Homo sapiens
  misc_RNA (1)...(19): siRNA sense strand
aggcauccaugaaacauua

SEQ ID NO: 1414169 - RNA, 19 nt, Homo sapiens
  misc_RNA (1)...(19): siRNA sense strand
caacugcuuuccuggauug

SEQ ID NO: 1414170 - RNA, 19 nt, Homo sapiens
  misc_RNA (1)...(19): siRNA sense strand
gaagaaaggcagaagaagu

SEQ ID NO: 1414171 - RNA, 19 nt, Homo sapiens
  misc_RNA (1)...(19): siRNA sense strand
ccgagagcaugaagaauaa

SEQ ID NO: 1414172 - RNA, 19 nt, Homo sapiens
  misc_RNA (1)...(19): siRNA sense strand
gaaccugccugcccuuucu

SEQ ID NO: 1414173 - RNA, 19 nt, Homo sapiens
  misc_RNA (1)...(19): siRNA sense strand
ccaaacccguauuuauuga

SEQ ID NO: 1414174 - RNA, 19 nt, Homo sapiens
  misc_RNA (1)...(19): siRNA sense strand
ggaaagauuuuguccagaa

SEQ ID NO: 1414175 - RNA, 19 nt, Homo sapiens
  misc_RNA (1)...(19): siRNA sense strand
cagcugaggguguauuaua

SEQ ID NO: 1414176 - RNA, 19 nt, Homo sapiens
  misc_RNA (1)...(19): siRNA sense strand
agagagaugaugccaaaua

SEQ ID NO: 1414177 - RNA, 19 nt, Homo sapiens
  misc_RNA (1)...(19): siRNA sense strand
ugacaacuacauucaagua

SEQ ID NO: 1414178 - RNA, 19 nt, Homo sapiens
  misc_RNA (1)...(19): siRNA sense strand
ugaaugagccguauacaag

SEQ ID NO: 1414179 - RNA, 19 nt, Homo sapiens
  misc_RNA (1)...(19): siRNA sense strand
gcaacugcuuuccuggauu

SEQ ID NO: 1414180 - RNA, 19 nt, Homo sapiens
  misc_RNA (1)...(19): siRNA sense strand
gccaaacccguauuuauug

SEQ ID NO: 1414181 - RNA, 19 nt, Homo sapiens
  misc_RNA (1)...(19): siRNA sense strand
gaccacagcaucaaagaau

SEQ ID NO: 1414182 - RNA, 19 nt, Homo sapiens
  misc_RNA (1)...(19): siRNA sense strand
ccgcacagcuccgagguuu

SEQ ID NO: 1414183 - RNA, 19 nt, Homo sapiens
  misc_RNA (1)...(19): siRNA sense strand
gugcugaacuggcugaagu

SEQ ID NO: 1414184 - RNA, 19 nt, Homo sapiens
  misc_RNA (1)...(19): siRNA sense strand
caucaggcguggacucuuc

SEQ ID NO: 1414185 - RNA, 19 nt, Homo sapiens
  misc_RNA (1)...(19): siRNA sense strand
cauaaacgaagcucucaaa

SEQ ID NO: 1414186 - RNA, 19 nt, Homo sapiens
  misc_RNA (1)...(19): siRNA sense strand
gauuauccaugggugauga

SEQ ID NO: 1414187 - RNA, 19 nt, Homo sapiens
  misc_RNA (1)...(19): siRNA sense strand
cguggacucuucuauguug

SEQ ID NO: 1414188 - RNA, 19 nt, Homo sapiens
  misc_RNA (1)...(19): siRNA sense strand
cccgagagcaugaagaaua

SEQ ID NO: 1414189 - RNA, 19 nt, Homo sapiens
  misc_RNA (1)...(19): siRNA sense strand
gcccaaggcauccaugaaa

SEQ ID NO: 1414190 - RNA, 19 nt, Homo sapiens
  misc_RNA (1)...(19): siRNA sense strand
gggacuggcugaaccaaag

SEQ ID NO: 1414191 - RNA, 19 nt, Homo sapiens
  misc_RNA (1)...(19): siRNA sense strand
gacauuucccugugacuuu

SEQ ID NO: 1414192 - RNA, 19 nt, Homo sapiens
  misc_RNA (1)...(19): siRNA sense strand
acucuucuauguugacuuu

SEQ ID NO: 1414193 - RNA, 19 nt, Homo sapiens
  misc_RNA (1)...(19): siRNA sense strand
gaugaugccaaauauaugu

SEQ ID NO: 1414194 - RNA, 19 nt, Homo sapiens
  misc_RNA (1)...(19): siRNA sense strand
ggcguggacucuucuaugu

SEQ ID NO: 1414195 - RNA, 19 nt, Homo sapiens
  misc_RNA (1)...(19): siRNA sense strand
uggcaucucuacaauacuu

SEQ ID NO: 1414196 - RNA, 19 nt, Homo sapiens
  misc_RNA (1)...(19): siRNA sense strand
aagaaaggcagaagaaguu

SEQ ID NO: 1414197 - RNA, 19 nt, Homo sapiens
  misc_RNA (1)...(19): siRNA sense strand
gaagaauaaccuuucaucu

SEQ ID NO: 1414198 - RNA, 19 nt, Homo sapiens
  misc_RNA (1)...(19): siRNA sense strand
gcaugaagaauaaccuuuc

SEQ ID NO: 1414199 - RNA, 19 nt, Homo sapiens
  misc_RNA (1)...(19): siRNA sense strand
gaagaauucaccgugugua

SEQ ID NO: 1414200 - RNA, 19 nt, Homo sapiens
  misc_RNA (1)...(19): siRNA sense strand
ucucaaagcccacauacug

SEQ ID NO: 1414201 - RNA, 19 nt, Homo sapiens
  misc_RNA (1)...(19): siRNA sense strand
gcaggcugauuggauagaa

SEQ ID NO: 1414202 - RNA, 19 nt, Homo sapiens
  misc_RNA (1)...(19): siRNA sense strand
ugccaaacccguauuuauu

SEQ ID NO: 1414203 - RNA, 19 nt, Homo sapiens
  misc_RNA (1)...(19): siRNA sense strand
uggcauguguacaaugaaa

SEQ ID NO: 1414204 - RNA, 19 nt, Homo sapiens
  misc_RNA (1)...(19): siRNA sense strand
acaccauccugcaguacua

SEQ ID NO: 1414205 - RNA, 19 nt, Homo sapiens
  misc_RNA (1)...(19): siRNA sense strand
uggauugaccuugaauuua

SEQ ID NO: 1414206 - RNA, 19 nt, Homo sapiens
  misc_RNA (1)...(19): siRNA sense strand
gcggucaggucaaguacug

SEQ ID NO: 1414207 - RNA, 19 nt, Homo sapiens
  misc_RNA (1)...(19): siRNA sense strand
ccauguacauaauauccaa

SEQ ID NO: 1414208 - RNA, 19 nt, Homo sapiens
  misc_RNA (1)...(19): siRNA sense strand
ccaggguaccuuugacuuu

SEQ ID NO: 1414209 - RNA, 19 nt, Homo sapiens
  misc_RNA (1)...(19): siRNA sense strand
gcuaauccaggguaccuuu

SEQ ID NO: 1414210 - RNA, 19 nt, Homo sapiens
  misc_RNA (1)...(19): siRNA sense strand
aaacccguauuuauugaug

SEQ ID NO: 1414211 - RNA, 19 nt, Homo sapiens
  misc_RNA (1)...(19): siRNA sense strand
ggaaaauuauugacagcaa

SEQ ID NO: 1414212 - RNA, 19 nt, Homo sapiens
  misc_RNA (1)...(19): siRNA sense strand
gcagaauuacauaaacgaa

SEQ ID NO: 1414213 - RNA, 19 nt, Homo sapiens
  misc_RNA (1)...(19): siRNA sense strand
cuugcaggcugauuggaua

SEQ ID NO: 1414214 - RNA, 19 nt, Homo sapiens
  misc_RNA (1)...(19): siRNA sense strand
gccaucacgucaagcuuug

SEQ ID NO: 1414215 - RNA, 19 nt, Homo sapiens
  misc_RNA (1)...(19): siRNA sense strand
gaggucagguguccauugc

SEQ ID NO: 1414216 - RNA, 19 nt, Homo sapiens
  misc_RNA (1)...(19): siRNA sense strand
ggccaucacgucaagcuuu

SEQ ID NO: 1414217 - RNA, 19 nt, Homo sapiens
  misc_RNA (1)...(19): siRNA sense strand
gccgaccacuucagggauu

SEQ ID NO: 1414218 - RNA, 19 nt, Homo sapiens
  misc_RNA (1)...(19): siRNA sense strand
gaauucaccguguguacug

SEQ ID NO: 1414219 - RNA, 19 nt, Homo sapiens
  misc_RNA (1)...(19): siRNA sense strand
ccaugaaacauuacaggaa

SEQ ID NO: 1414220 - RNA, 19 nt, Homo sapiens
  misc_RNA (1)...(19): siRNA sense strand
gcacagcuccgagguuugg

SEQ ID NO: 1414221 - RNA, 19 nt, Homo sapiens
  misc_RNA (1)...(19): siRNA sense strand
ggacauuucccugugacuu

SEQ ID NO: 1414222 - RNA, 19 nt, Homo sapiens
  misc_RNA (1)...(19): siRNA sense strand
guucaucauggaaaccuua

SEQ ID NO: 1414223 - RNA, 19 nt, Homo sapiens
  misc_RNA (1)...(19): siRNA sense strand
ggacccaccuugaguuuuc

SEQ ID NO: 1414224 - RNA, 19 nt, Homo sapiens
  misc_RNA (1)...(19): siRNA sense strand
uggaugguaucaaucuuug

SEQ ID NO: 1414225 - RNA, 19 nt, Homo sapiens
  misc_RNA (1)...(19): siRNA sense strand
ggaggucagguguccauug

SEQ ID NO: 1414226 - RNA, 19 nt, Homo sapiens
  misc_RNA (1)...(19): siRNA sense strand
cacaugaaguuccgccaau

SEQ ID NO: 1414227 - RNA, 19 nt, Homo sapiens
  misc_RNA (1)...(19): siRNA sense strand
ggcagaagaaguuacaaau

SEQ ID NO: 1414228 - RNA, 19 nt, Homo sapiens
  misc_RNA (1)...(19): siRNA sense strand
uuauuucucucucccuuau

SEQ ID NO: 1414229 - RNA, 19 nt, Homo sapiens
  misc_RNA (1)...(19): siRNA sense strand
uuucggcucuggagauuau

SEQ ID NO: 1414230 - RNA, 19 nt, Homo sapiens
  misc_RNA (1)...(19): siRNA sense strand
cuuggcauguguacaauga

SEQ ID NO: 1414231 - RNA, 19 nt, Homo sapiens
  misc_RNA (1)...(19): siRNA sense strand
ucacgucaagcuuuggaua

SEQ ID NO: 1414232 - RNA, 19 nt, Homo sapiens
  misc_RNA (1)...(19): siRNA sense strand
auaccacucugucucaguu

SEQ ID NO: 1414233 - RNA, 19 nt, Homo sapiens
  misc_RNA (1)...(19): siRNA sense strand
ggcaacugcuuuccuggau

SEQ ID NO: 1414234 - RNA, 19 nt, Homo sapiens
  misc_RNA (1)...(19): siRNA sense strand
gggauguccaccacaguaa

SEQ ID NO: 1414235 - RNA, 19 nt, Homo sapiens
  misc_RNA (1)...(19): siRNA sense strand
ucaaaggaacugcugacuu

SEQ ID NO: 1414236 - RNA, 19 nt, Homo sapiens
  misc_RNA (1)...(19): siRNA sense strand
caagaaaugaccgacauca

SEQ ID NO: 1414237 - RNA, 19 nt, Homo sapiens
  misc_RNA (1)...(19): siRNA sense strand
caccauccuuguagacuca

SEQ ID NO: 1414238 - RNA, 19 nt, Homo sapiens
  misc_RNA (1)...(19): siRNA sense strand
gcucggccaucacgucaag

SEQ ID NO: 1414239 - RNA, 19 nt, Homo sapiens
  misc_RNA (1)...(19): siRNA sense strand
ggauguccaccacaguaaa

SEQ ID NO: 1414240 - RNA, 19 nt, Homo sapiens
  misc_RNA (1)...(19): siRNA sense strand
ucuggcaucucuacaauac

SEQ ID NO: 1414241 - RNA, 19 nt, Homo sapiens
  misc_RNA (1)...(19): siRNA sense strand
ccacagcaucaaagaaugu

SEQ ID NO: 1414242 - RNA, 19 nt, Homo sapiens
  misc_RNA (1)...(19): siRNA sense strand
ucgaagaaaggcagaagaa

SEQ ID NO: 1414243 - RNA, 19 nt, Homo sapiens
  misc_RNA (1)...(19): siRNA sense strand
ggaaauccuacuguguuga

SEQ ID NO: 1414244 - RNA, 19 nt, Homo sapiens
  misc_RNA (1)...(19): siRNA sense strand
agagaugaugccaaauaua

SEQ ID NO: 1414245 - RNA, 19 nt, Homo sapiens
  misc_RNA (1)...(19): siRNA sense strand
gagcaugaagaauaaccuu

SEQ ID NO: 1414246 - RNA, 19 nt, Homo sapiens
  misc_RNA (1)...(19): siRNA sense strand
ccagucagguggcgguagu

SEQ ID NO: 1414247 - RNA, 19 nt, Homo sapiens
  misc_RNA (1)...(19): siRNA sense strand
guuuaggcaugcucagaau

SEQ ID NO: 1414248 - RNA, 19 nt, Homo sapiens
  misc_RNA (1)...(19): siRNA sense strand
caugaaguuccgccaauug

SEQ ID NO: 1414249 - RNA, 19 nt, Homo sapiens
  misc_RNA (1)...(19): siRNA sense strand
accaaaagcugauagagaa

SEQ ID NO: 1414250 - RNA, 19 nt, Homo sapiens
  misc_RNA (1)...(19): siRNA sense strand
agaaaggcagaagaaguua

SEQ ID NO: 1414251 - RNA, 19 nt, Homo sapiens
  misc_RNA (1)...(19): siRNA sense strand
ccuagaagugcaagaaaug

SEQ ID NO: 1414252 - RNA, 19 nt, Homo sapiens
  misc_RNA (1)...(19): siRNA sense strand
ccguauacaaggaauauga

SEQ ID NO: 1414253 - RNA, 19 nt, Homo sapiens
  misc_RNA (1)...(19): siRNA sense strand
uucaagagcucggccauca

SEQ ID NO: 1414254 - RNA, 19 nt, Homo sapiens
  misc_RNA (1)...(19): siRNA sense strand
ggauugaccuugaauuuaa

SEQ ID NO: 1414255 - RNA, 19 nt, Homo sapiens
  misc_RNA (1)...(19): siRNA sense strand
caagagagaugaugccaaa

SEQ ID NO: 1414256 - RNA, 19 nt, Homo sapiens
  misc_RNA (1)...(19): siRNA sense strand
gagagaugaugccaaauau

SEQ ID NO: 1414257 - RNA, 19 nt, Homo sapiens
  misc_RNA (1)...(19): siRNA sense strand
gaucaauccucgaagaaug

SEQ ID NO: 1414258 - RNA, 19 nt, Homo sapiens
  misc_RNA (1)...(19): siRNA sense strand
gagaugaugccaaauauau

SEQ ID NO: 1414259 - RNA, 19 nt, Homo sapiens
  misc_RNA (1)...(19): siRNA sense strand
gaauuuaaccauccucaaa

SEQ ID NO: 1414260 - RNA, 19 nt, Homo sapiens
  misc_RNA (1)...(19): siRNA sense strand
gaaaauggcugguuugucu

SEQ ID NO: 1414261 - RNA, 19 nt, Homo sapiens
  misc_RNA (1)...(19): siRNA sense strand
caucuauucugccugauuu

SEQ ID NO: 1414262 - RNA, 19 nt, Homo sapiens
  misc_RNA (1)...(19): siRNA sense strand
caacugcuuuccuggauug

SEQ ID NO: 1414263 - RNA, 19 nt, Homo sapiens
  misc_RNA (1)...(19): siRNA sense strand
ccgagagcaugaagaauaa

SEQ ID NO: 1414264 - RNA, 19 nt, Homo sapiens
  misc_RNA (1)...(19): siRNA sense strand
ccaaacccguauuuauuga

SEQ ID NO: 1414265 - RNA, 19 nt, Homo sapiens
  misc_RNA (1)...(19): siRNA sense strand
agagagaugaugccaaaua

SEQ ID NO: 1414266 - RNA, 19 nt, Homo sapiens
  misc_RNA (1)...(19): siRNA sense strand
ugacaacuacauucaagua

SEQ ID NO: 1414267 - RNA, 19 nt, Homo sapiens
  misc_RNA (1)...(19): siRNA sense strand
gcaacugcuuuccuggauu

SEQ ID NO: 1414268 - RNA, 19 nt, Homo sapiens
  misc_RNA (1)...(19): siRNA sense strand
gccaaacccguauuuauug

SEQ ID NO: 1414269 - RNA, 19 nt, Homo sapiens
  misc_RNA (1)...(19): siRNA sense strand
gaccacagcaucaaagaau

SEQ ID NO: 1414270 - RNA, 19 nt, Homo sapiens
  misc_RNA (1)...(19): siRNA sense strand
caucaggcguggacucuuc

SEQ ID NO: 1414271 - RNA, 19 nt, Homo sapiens
  misc_RNA (1)...(19): siRNA sense strand
cguggacucuucuauguug

SEQ ID NO: 1414272 - RNA, 19 nt, Homo sapiens
  misc_RNA (1)...(19): siRNA sense strand
cccgagagcaugaagaaua

SEQ ID NO: 1414273 - RNA, 19 nt, Homo sapiens
  misc_RNA (1)...(19): siRNA sense strand
gacauuucccugugacuuu

SEQ ID NO: 1414274 - RNA, 19 nt, Homo sapiens
  misc_RNA (1)...(19): siRNA sense strand
acucuucuauguugacuuu

SEQ ID NO: 1414275 - RNA, 19 nt, Homo sapiens
  misc_RNA (1)...(19): siRNA sense strand
gaugaugccaaauauaugu

SEQ ID NO: 1414276 - RNA, 19 nt, Homo sapiens
  misc_RNA (1)...(19): siRNA sense strand
ggcguggacucuucuaugu

SEQ ID NO: 1414277 - RNA, 19 nt, Homo sapiens
  misc_RNA (1)...(19): siRNA sense strand
uggcaucucuacaauacuu

SEQ ID NO: 1414278 - RNA, 19 nt, Homo sapiens
  misc_RNA (1)...(19): siRNA sense strand
gaagaauaaccuuucaucu

SEQ ID NO: 1414279 - RNA, 19 nt, Homo sapiens
  misc_RNA (1)...(19): siRNA sense strand
gcaugaagaauaaccuuuc

SEQ ID NO: 1414280 - RNA, 19 nt, Homo sapiens
  misc_RNA (1)...(19): siRNA sense strand
ugccaaacccguauuuauu

SEQ ID NO: 1414281 - RNA, 19 nt, Homo sapiens
  misc_RNA (1)...(19): siRNA sense strand
gcggucaggucaaguacug

SEQ ID NO: 1414282 - RNA, 19 nt, Homo sapiens
  misc_RNA (1)...(19): siRNA sense strand
uggauugaccuugaauuua

SEQ ID NO: 1414283 - RNA, 19 nt, Homo sapiens
  misc_RNA (1)...(19): siRNA sense strand
aaacccguauuuauugaug

SEQ ID NO: 1414284 - RNA, 19 nt, Homo sapiens
  misc_RNA (1)...(19): siRNA sense strand
gaggucagguguccauugc

SEQ ID NO: 1414285 - RNA, 19 nt, Homo sapiens
  misc_RNA (1)...(19): siRNA sense strand
ggacccaccuugaguuuuc

SEQ ID NO: 1414286 - RNA, 19 nt, Homo sapiens
  misc_RNA (1)...(19): siRNA sense strand
ggacauuucccugugacuu

SEQ ID NO: 1414287 - RNA, 19 nt, Homo sapiens
  misc_RNA (1)...(19): siRNA sense strand
gccgaccacuucagggauu

SEQ ID NO: 1414288 - RNA, 19 nt, Homo sapiens
  misc_RNA (1)...(19): siRNA sense strand
guucaucauggaaaccuua

SEQ ID NO: 1414289 - RNA, 19 nt, Homo sapiens
  misc_RNA (1)...(19): siRNA sense strand
ggaggucagguguccauug

SEQ ID NO: 1414290 - RNA, 19 nt, Homo sapiens
  misc_RNA (1)...(19): siRNA sense strand
cacaugaaguuccgccaau

SEQ ID NO: 1414291 - RNA, 19 nt, Homo sapiens
  misc_RNA (1)...(19): siRNA sense strand
ggcaacugcuuuccuggau

SEQ ID NO: 1414292 - RNA, 19 nt, Homo sapiens
  misc_RNA (1)...(19): siRNA sense strand
ucaaaggaacugcugacuu

SEQ ID NO: 1414293 - RNA, 19 nt, Homo sapiens
  misc_RNA (1)...(19): siRNA sense strand
ucuggcaucucuacaauac

SEQ ID NO: 1414294 - RNA, 19 nt, Homo sapiens
  misc_RNA (1)...(19): siRNA sense strand
ccacagcaucaaagaaugu

SEQ ID NO: 1414295 - RNA, 19 nt, Homo sapiens
  misc_RNA (1)...(19): siRNA sense strand
agagaugaugccaaauaua

SEQ ID NO: 1414296 - RNA, 19 nt, Homo sapiens
  misc_RNA (1)...(19): siRNA sense strand
gagcaugaagaauaaccuu

SEQ ID NO: 1414297 - RNA, 19 nt, Homo sapiens
  misc_RNA (1)...(19): siRNA sense strand
caugaaguuccgccaauug

SEQ ID NO: 1414298 - RNA, 19 nt, Homo sapiens
  misc_RNA (1)...(19): siRNA sense strand
acaugaaguuccgccaauu

SEQ ID NO: 1414299 - RNA, 19 nt, Homo sapiens
  misc_RNA (1)...(19): siRNA sense strand
accaaaagcugauagagaa

SEQ ID NO: 1414300 - RNA, 19 nt, Homo sapiens
  misc_RNA (1)...(19): siRNA sense strand
cuggauugaccuugaauuu

SEQ ID NO: 1414301 - RNA, 19 nt, Homo sapiens
  misc_RNA (1)...(19): siRNA sense strand
gcaagggugcguccaucug

SEQ ID NO: 1414302 - RNA, 19 nt, Homo sapiens
  misc_RNA (1)...(19): siRNA sense strand
ucucuggacuuuguacuag

SEQ ID NO: 1414303 - RNA, 19 nt, Homo sapiens
  misc_RNA (1)...(19): siRNA sense strand
caaagucuucagccuuguu

SEQ ID NO: 1414304 - RNA, 19 nt, Homo sapiens
  misc_RNA (1)...(19): siRNA sense strand
caaagucuggcaucucuac

SEQ ID NO: 1414305 - RNA, 19 nt, Homo sapiens
  misc_RNA (1)...(19): siRNA sense strand
cuucuauguugacuuucua

SEQ ID NO: 1414306 - RNA, 19 nt, Homo sapiens
  misc_RNA (1)...(19): siRNA sense strand
caggucaaguacuggauca

SEQ ID NO: 1414307 - RNA, 19 nt, Homo sapiens
  misc_RNA (1)...(19): siRNA sense strand
gaccgaccacagcaucaaa

SEQ ID NO: 1414308 - RNA, 19 nt, Homo sapiens
  misc_RNA (1)...(19): siRNA sense strand
ccgaccacuucagggauua

SEQ ID NO: 1414309 - RNA, 19 nt, Homo sapiens
  misc_RNA (1)...(19): siRNA sense strand
gauugaccuugaauuuaac

SEQ ID NO: 1414310 - RNA, 19 nt, Homo sapiens
  misc_RNA (1)...(19): siRNA sense strand
acauuucccugugacuuug

SEQ ID NO: 1414311 - RNA, 19 nt, Homo sapiens
  misc_RNA (1)...(19): siRNA sense strand
aaauggcuucccuccuuua

SEQ ID NO: 1414312 - RNA, 19 nt, Homo sapiens
  misc_RNA (1)...(19): siRNA sense strand
cacagagguuacagcauca

SEQ ID NO: 1414313 - RNA, 19 nt, Homo sapiens
  misc_RNA (1)...(19): siRNA sense strand
ggucccucauggaugguuu

SEQ ID NO: 1414314 - RNA, 19 nt, Homo sapiens
  misc_RNA (1)...(19): siRNA sense strand
cgaccacagcaucaaagaa

SEQ ID NO: 1414315 - RNA, 19 nt, Homo sapiens
  misc_RNA (1)...(19): siRNA sense strand
ucgaguggcacagagguua

SEQ ID NO: 1414316 - RNA, 19 nt, Homo sapiens
  misc_RNA (1)...(19): siRNA sense strand
ggaccaccaagagagauga

SEQ ID NO: 1414317 - RNA, 19 nt, Homo sapiens
  misc_RNA (1)...(19): siRNA sense strand
agucuggcaucucuacaau

SEQ ID NO: 1414318 - RNA, 19 nt, Homo sapiens
  misc_RNA (1)...(19): siRNA sense strand
uuuccuggauugaccuuga

SEQ ID NO: 1414319 - RNA, 19 nt, Homo sapiens
  misc_RNA (1)...(19): siRNA sense strand
aagauguuguugccaaagu

SEQ ID NO: 1414320 - RNA, 19 nt, Homo sapiens
  misc_RNA (1)...(19): siRNA sense strand
ucucuacaauacuucuuuc

SEQ ID NO: 1414321 - RNA, 19 nt, Homo sapiens
  misc_RNA (1)...(19): siRNA sense strand
uaagccaggacaagauguu

SEQ ID NO: 1414322 - RNA, 19 nt, Homo sapiens
  misc_RNA (1)...(19): siRNA sense strand
aaaauggcuucccuccuuu

SEQ ID NO: 1414323 - RNA, 19 nt, Homo sapiens
  misc_RNA (1)...(19): siRNA sense strand
ccauugcccuaagcucuca

SEQ ID NO: 1414324 - RNA, 19 nt, Homo sapiens
  misc_RNA (1)...(19): siRNA sense strand
cacuaccgcuucuccaucu

SEQ ID NO: 1414325 - RNA, 19 nt, Homo sapiens
  misc_RNA (1)...(19): siRNA sense strand
uugccaaacccguauuuau

SEQ ID NO: 1414326 - RNA, 19 nt, Homo sapiens
  misc_RNA (1)...(19): siRNA sense strand
ggacucuucuauguugacu

SEQ ID NO: 1414327 - RNA, 19 nt, Homo sapiens
  misc_RNA (1)...(19): siRNA sense strand
aaccugaggcaacugcuuu

SEQ ID NO: 1414328 - RNA, 19 nt, Homo sapiens
  misc_RNA (1)...(19): siRNA sense strand
gacuaucccgagagcauga

SEQ ID NO: 1414329 - RNA, 19 nt, Homo sapiens
  misc_RNA (1)...(19): siRNA sense strand
gaauagagccauaaagaaa

SEQ ID NO: 1414330 - RNA, 19 nt, Homo sapiens
  misc_RNA (1)...(19): siRNA sense strand
gcaaagcgcagaaauguug

SEQ ID NO: 1414331 - RNA, 19 nt, Homo sapiens
  misc_RNA (1)...(19): siRNA sense strand
gaaagugaaucuaacaaag

SEQ ID NO: 1414332 - RNA, 19 nt, Homo sapiens
  misc_RNA (1)...(19): siRNA sense strand
caagaaagacaaugaguuu

SEQ ID NO: 1414333 - RNA, 19 nt, Homo sapiens
  misc_RNA (1)...(19): siRNA sense strand
gaucugacaccuaucuuua

SEQ ID NO: 1414334 - RNA, 19 nt, Homo sapiens
  misc_RNA (1)...(19): siRNA sense strand
acaagugccucauuuaauu

SEQ ID NO: 1414335 - RNA, 19 nt, Homo sapiens
  misc_RNA (1)...(19): siRNA sense strand
gaauugggaucaagaagau

SEQ ID NO: 1414336 - RNA, 19 nt, Homo sapiens
  misc_RNA (1)...(19): siRNA sense strand
gaaggacugucgaauggaa

SEQ ID NO: 1414337 - RNA, 19 nt, Homo sapiens
  misc_RNA (1)...(19): siRNA sense strand
gagaaggaacugacagaua

SEQ ID NO: 1414338 - RNA, 19 nt, Homo sapiens
  misc_RNA (1)...(19): siRNA sense strand
gacaaugaguuuaaagaga

SEQ ID NO: 1414339 - RNA, 19 nt, Homo sapiens
  misc_RNA (1)...(19): siRNA sense strand
ucaagaagaugaagcugaa

SEQ ID NO: 1414340 - RNA, 19 nt, Homo sapiens
  misc_RNA (1)...(19): siRNA sense strand
gaaaguugauagcucuguu

SEQ ID NO: 1414341 - RNA, 19 nt, Homo sapiens
  misc_RNA (1)...(19): siRNA sense strand
gaacugacagauaggaauu

SEQ ID NO: 1414342 - RNA, 19 nt, Homo sapiens
  misc_RNA (1)...(19): siRNA sense strand
agaaggaacugacagauag

SEQ ID NO: 1414343 - RNA, 19 nt, Homo sapiens
  misc_RNA (1)...(19): siRNA sense strand
caacaaaacugaagauaca

SEQ ID NO: 1414344 - RNA, 19 nt, Homo sapiens
  misc_RNA (1)...(19): siRNA sense strand
ugaagcacgugaauacaaa

SEQ ID NO: 1414345 - RNA, 19 nt, Homo sapiens
  misc_RNA (1)...(19): siRNA sense strand
cgacaagugccucauuuaa

SEQ ID NO: 1414346 - RNA, 19 nt, Homo sapiens
  misc_RNA (1)...(19): siRNA sense strand
gaagauacaccugacaaga

SEQ ID NO: 1414347 - RNA, 19 nt, Homo sapiens
  misc_RNA (1)...(19): siRNA sense strand
cauagguacucugcauuua

SEQ ID NO: 1414348 - RNA, 19 nt, Homo sapiens
  misc_RNA (1)...(19): siRNA sense strand
ugacaguggugaaugcaaa

SEQ ID NO: 1414349 - RNA, 19 nt, Homo sapiens
  misc_RNA (1)...(19): siRNA sense strand
gcauagguacucugcauuu

SEQ ID NO: 1414350 - RNA, 19 nt, Homo sapiens
  misc_RNA (1)...(19): siRNA sense strand
uagguacucugcauuuaaa

SEQ ID NO: 1414351 - RNA, 19 nt, Homo sapiens
  misc_RNA (1)...(19): siRNA sense strand
ggaauugggaucaagaaga

SEQ ID NO: 1414352 - RNA, 19 nt, Homo sapiens
  misc_RNA (1)...(19): siRNA sense strand
gcaggaauucugaaaguga

SEQ ID NO: 1414353 - RNA, 19 nt, Homo sapiens
  misc_RNA (1)...(19): siRNA sense strand
caaaguggcagcugaaaca

SEQ ID NO: 1414354 - RNA, 19 nt, Homo sapiens
  misc_RNA (1)...(19): siRNA sense strand
gaacagggaagaauaacgu

SEQ ID NO: 1414355 - RNA, 19 nt, Homo sapiens
  misc_RNA (1)...(19): siRNA sense strand
gagaugaagaagagaauga

SEQ ID NO: 1414356 - RNA, 19 nt, Homo sapiens
  misc_RNA (1)...(19): siRNA sense strand
gaaagcaaagcgcagaaau

SEQ ID NO: 1414357 - RNA, 19 nt, Homo sapiens
  misc_RNA (1)...(19): siRNA sense strand
aaagagaaaggcauaggua

SEQ ID NO: 1414358 - RNA, 19 nt, Homo sapiens
  misc_RNA (1)...(19): siRNA sense strand
aagaauagagccauaaaga

SEQ ID NO: 1414359 - RNA, 19 nt, Homo sapiens
  misc_RNA (1)...(19): siRNA sense strand
gacaagugccucauuuaau

SEQ ID NO: 1414360 - RNA, 19 nt, Homo sapiens
  misc_RNA (1)...(19): siRNA sense strand
gcgacaagugccucauuua

SEQ ID NO: 1414361 - RNA, 19 nt, Homo sapiens
  misc_RNA (1)...(19): siRNA sense strand
caccuugguugauaaaguu

SEQ ID NO: 1414362 - RNA, 19 nt, Homo sapiens
  misc_RNA (1)...(19): siRNA sense strand
aguaguaguuaccgaagua

SEQ ID NO: 1414363 - RNA, 19 nt, Homo sapiens
  misc_RNA (1)...(19): siRNA sense strand
ucugacaccuaucuuuaaa

SEQ ID NO: 1414364 - RNA, 19 nt, Homo sapiens
  misc_RNA (1)...(19): siRNA sense strand
aaagaaaugccgagaagga

SEQ ID NO: 1414365 - RNA, 19 nt, Homo sapiens
  misc_RNA (1)...(19): siRNA sense strand
caaagauacuacccagagu

SEQ ID NO: 1414366 - RNA, 19 nt, Homo sapiens
  misc_RNA (1)...(19): siRNA sense strand
caagugccucauuuaauuu

SEQ ID NO: 1414367 - RNA, 19 nt, Homo sapiens
  misc_RNA (1)...(19): siRNA sense strand
caaauggcccuaccaccuu

SEQ ID NO: 1414368 - RNA, 19 nt, Homo sapiens
  misc_RNA (1)...(19): siRNA sense strand
caggaauucugaaagugaa

SEQ ID NO: 1414369 - RNA, 19 nt, Homo sapiens
  misc_RNA (1)...(19): siRNA sense strand
gcgggcagacaccaauuua

SEQ ID NO: 1414370 - RNA, 19 nt, Homo sapiens
  misc_RNA (1)...(19): siRNA sense strand
uaacaaaguggcagcugaa

SEQ ID NO: 1414371 - RNA, 19 nt, Homo sapiens
  misc_RNA (1)...(19): siRNA sense strand
caaaagaaaugccgagaag

SEQ ID NO: 1414372 - RNA, 19 nt, Homo sapiens
  misc_RNA (1)...(19): siRNA sense strand
uggaaggacugucgaaugg

SEQ ID NO: 1414373 - RNA, 19 nt, Homo sapiens
  misc_RNA (1)...(19): siRNA sense strand
guucugauuccacccaaua

SEQ ID NO: 1414374 - RNA, 19 nt, Homo sapiens
  misc_RNA (1)...(19): siRNA sense strand
augcaaagguggagaugaa

SEQ ID NO: 1414375 - RNA, 19 nt, Homo sapiens
  misc_RNA (1)...(19): siRNA sense strand
ucugugaucugacaccuau

SEQ ID NO: 1414376 - RNA, 19 nt, Homo sapiens
  misc_RNA (1)...(19): siRNA sense strand
gggauuggauagugaagca

SEQ ID NO: 1414377 - RNA, 19 nt, Homo sapiens
  misc_RNA (1)...(19): siRNA sense strand
caacaaaauuacagcaaga

SEQ ID NO: 1414378 - RNA, 19 nt, Homo sapiens
  misc_RNA (1)...(19): siRNA sense strand
caaagguggagaugaagaa

SEQ ID NO: 1414379 - RNA, 19 nt, Homo sapiens
  misc_RNA (1)...(19): siRNA sense strand
gcaaagguggagaugaaga

SEQ ID NO: 1414380 - RNA, 19 nt, Homo sapiens
  misc_RNA (1)...(19): siRNA sense strand
ccaccuugguugauaaagu

SEQ ID NO: 1414381 - RNA, 19 nt, Homo sapiens
  misc_RNA (1)...(19): siRNA sense strand
cagcaaaucagaagacaca

SEQ ID NO: 1414382 - RNA, 19 nt, Homo sapiens
  misc_RNA (1)...(19): siRNA sense strand
accagucucuucaccauuu

SEQ ID NO: 1414383 - RNA, 19 nt, Homo sapiens
  misc_RNA (1)...(19): siRNA sense strand
gaagaauagagccauaaag

SEQ ID NO: 1414384 - RNA, 19 nt, Homo sapiens
  misc_RNA (1)...(19): siRNA sense strand
uaucgucuguguuccaaau

SEQ ID NO: 1414385 - RNA, 19 nt, Homo sapiens
  misc_RNA (1)...(19): siRNA sense strand
gauaggaauugggaucaag

SEQ ID NO: 1414386 - RNA, 19 nt, Homo sapiens
  misc_RNA (1)...(19): siRNA sense strand
ggaggacgcuuuucuggau

SEQ ID NO: 1414387 - RNA, 19 nt, Homo sapiens
  misc_RNA (1)...(19): siRNA sense strand
agaauagagccauaaagaa

SEQ ID NO: 1414388 - RNA, 19 nt, Homo sapiens
  misc_RNA (1)...(19): siRNA sense strand
gaguaaaccagucucuuca

SEQ ID NO: 1414389 - RNA, 19 nt, Homo sapiens
  misc_RNA (1)...(19): siRNA sense strand
guucuuaucgucuguguuc

SEQ ID NO: 1414390 - RNA, 19 nt, Homo sapiens
  misc_RNA (1)...(19): siRNA sense strand
gugcgggauuggauaguga

SEQ ID NO: 1414391 - RNA, 19 nt, Homo sapiens
  misc_RNA (1)...(19): siRNA sense strand
gcagacgaguugcacaaaa

SEQ ID NO: 1414392 - RNA, 19 nt, Homo sapiens
  misc_RNA (1)...(19): siRNA sense strand
caacauauugcugaacguu

SEQ ID NO: 1414393 - RNA, 19 nt, Homo sapiens
  misc_RNA (1)...(19): siRNA sense strand
aaaccagucucuucaccau

SEQ ID NO: 1414394 - RNA, 19 nt, Homo sapiens
  misc_RNA (1)...(19): siRNA sense strand
aagauacaccugacaagaa

SEQ ID NO: 1414395 - RNA, 19 nt, Homo sapiens
  misc_RNA (1)...(19): siRNA sense strand
uggcaggaauucugaaagu

SEQ ID NO: 1414396 - RNA, 19 nt, Homo sapiens
  misc_RNA (1)...(19): siRNA sense strand
uaaagcuugugucggaaau

SEQ ID NO: 1414397 - RNA, 19 nt, Homo sapiens
  misc_RNA (1)...(19): siRNA sense strand
ugaagaauagagccauaaa

SEQ ID NO: 1414398 - RNA, 19 nt, Homo sapiens
  misc_RNA (1)...(19): siRNA sense strand
gagcgacaagugccucauu

SEQ ID NO: 1414399 - RNA, 19 nt, Homo sapiens
  misc_RNA (1)...(19): siRNA sense strand
agauacaccugacaagaag

SEQ ID NO: 1414400 - RNA, 19 nt, Homo sapiens
  misc_RNA (1)...(19): siRNA sense strand
gggaacaguggcaggaauu

SEQ ID NO: 1414401 - RNA, 19 nt, Homo sapiens
  misc_RNA (1)...(19): siRNA sense strand
ggaacugacagauaggaau

SEQ ID NO: 1414402 - RNA, 19 nt, Homo sapiens
  misc_RNA (1)...(19): siRNA sense strand
gugaagcacgugaauacaa

SEQ ID NO: 1414403 - RNA, 19 nt, Homo sapiens
  misc_RNA (1)...(19): siRNA sense strand
gaaaugccuaucacaagca

SEQ ID NO: 1414404 - RNA, 19 nt, Homo sapiens
  misc_RNA (1)...(19): siRNA sense strand
guaaagcuugugucggaaa

SEQ ID NO: 1414405 - RNA, 19 nt, Homo sapiens
  misc_RNA (1)...(19): siRNA sense strand
aaucagaagacacagcuuu

SEQ ID NO: 1414406 - RNA, 19 nt, Homo sapiens
  misc_RNA (1)...(19): siRNA sense strand
gaugagccacccaaaguag

SEQ ID NO: 1414407 - RNA, 19 nt, Homo sapiens
  misc_RNA (1)...(19): siRNA sense strand
gaaggugacaguggugaau

SEQ ID NO: 1414408 - RNA, 19 nt, Homo sapiens
  misc_RNA (1)...(19): siRNA sense strand
gguggcaucugaaaagaaa

SEQ ID NO: 1414409 - RNA, 19 nt, Homo sapiens
  misc_RNA (1)...(19): siRNA sense strand
aagcaaagcgcagaaaugu

SEQ ID NO: 1414410 - RNA, 19 nt, Homo sapiens
  misc_RNA (1)...(19): siRNA sense strand
aagugaaucuaacaaagug

SEQ ID NO: 1414411 - RNA, 19 nt, Homo sapiens
  misc_RNA (1)...(19): siRNA sense strand
cuugaagaauagagccaua

SEQ ID NO: 1414412 - RNA, 19 nt, Homo sapiens
  misc_RNA (1)...(19): siRNA sense strand
guuuaaagagaaaggcaua

SEQ ID NO: 1414413 - RNA, 19 nt, Homo sapiens
  misc_RNA (1)...(19): siRNA sense strand
acaagaaagacaaugaguu

SEQ ID NO: 1414414 - RNA, 19 nt, Homo sapiens
  misc_RNA (1)...(19): siRNA sense strand
ucgaauggaaacaacauaa

SEQ ID NO: 1414415 - RNA, 19 nt, Homo sapiens
  misc_RNA (1)...(19): siRNA sense strand
ccaauugacgagaagaaug

SEQ ID NO: 1414416 - RNA, 19 nt, Homo sapiens
  misc_RNA (1)...(19): siRNA sense strand
gagaaaggcauagguacuc

SEQ ID NO: 1414417 - RNA, 19 nt, Homo sapiens
  misc_RNA (1)...(19): siRNA sense strand
cuucaccauuucccacuaa

SEQ ID NO: 1414418 - RNA, 19 nt, Homo sapiens
  misc_RNA (1)...(19): siRNA sense strand
aaagcaaagcgcagaaaug

SEQ ID NO: 1414419 - RNA, 19 nt, Homo sapiens
  misc_RNA (1)...(19): siRNA sense strand
cagcaagagucaacguuuu

SEQ ID NO: 1414420 - RNA, 19 nt, Homo sapiens
  misc_RNA (1)...(19): siRNA sense strand
gaacagcaacacgggaaca

SEQ ID NO: 1414421 - RNA, 19 nt, Homo sapiens
  misc_RNA (1)...(19): siRNA sense strand
gauagugaagcacgugaau

SEQ ID NO: 1414422 - RNA, 19 nt, Homo sapiens
  misc_RNA (1)...(19): siRNA sense strand
gaaaugccgagaaggaacu

SEQ ID NO: 1414423 - RNA, 19 nt, Homo sapiens
  misc_RNA (1)...(19): siRNA sense strand
gggcagacaccaauuuagg

SEQ ID NO: 1414424 - RNA, 19 nt, Homo sapiens
  misc_RNA (1)...(19): siRNA sense strand
ccacccaaaguaguaguua

SEQ ID NO: 1414425 - RNA, 19 nt, Homo sapiens
  misc_RNA (1)...(19): siRNA sense strand
gaaugaugagccacccaaa

SEQ ID NO: 1414426 - RNA, 19 nt, Homo sapiens
  misc_RNA (1)...(19): siRNA sense strand
aaaccuacagcaaaucaga

SEQ ID NO: 1414427 - RNA, 19 nt, Homo sapiens
  misc_RNA (1)...(19): siRNA sense strand
ccagucaccauguugauuc

SEQ ID NO: 1414428 - RNA, 19 nt, Homo sapiens
  misc_RNA (1)...(19): siRNA sense strand
ccaauuuaggcaacauauu

SEQ ID NO: 1414429 - RNA, 19 nt, Homo sapiens
  misc_RNA (1)...(19): siRNA sense strand
gaauagagccauaaagaaa

SEQ ID NO: 1414430 - RNA, 19 nt, Homo sapiens
  misc_RNA (1)...(19): siRNA sense strand
gcaaagcgcagaaauguug

SEQ ID NO: 1414431 - RNA, 19 nt, Homo sapiens
  misc_RNA (1)...(19): siRNA sense strand
gaaagugaaucuaacaaag

SEQ ID NO: 1414432 - RNA, 19 nt, Homo sapiens
  misc_RNA (1)...(19): siRNA sense strand
caagaaagacaaugaguuu

SEQ ID NO: 1414433 - RNA, 19 nt, Homo sapiens
  misc_RNA (1)...(19): siRNA sense strand
gaucugacaccuaucuuua

SEQ ID NO: 1414434 - RNA, 19 nt, Homo sapiens
  misc_RNA (1)...(19): siRNA sense strand
acaagugccucauuuaauu

SEQ ID NO: 1414435 - RNA, 19 nt, Homo sapiens
  misc_RNA (1)...(19): siRNA sense strand
gaaggacugucgaauggaa

SEQ ID NO: 1414436 - RNA, 19 nt, Homo sapiens
  misc_RNA (1)...(19): siRNA sense strand
gacaaugaguuuaaagaga

SEQ ID NO: 1414437 - RNA, 19 nt, Homo sapiens
  misc_RNA (1)...(19): siRNA sense strand
gaaaguugauagcucuguu

SEQ ID NO: 1414438 - RNA, 19 nt, Homo sapiens
  misc_RNA (1)...(19): siRNA sense strand
caacaaaacugaagauaca

SEQ ID NO: 1414439 - RNA, 19 nt, Homo sapiens
  misc_RNA (1)...(19): siRNA sense strand
ugaagcacgugaauacaaa

SEQ ID NO: 1414440 - RNA, 19 nt, Homo sapiens
  misc_RNA (1)...(19): siRNA sense strand
cgacaagugccucauuuaa

SEQ ID NO: 1414441 - RNA, 19 nt, Homo sapiens
  misc_RNA (1)...(19): siRNA sense strand
gaagauacaccugacaaga

SEQ ID NO: 1414442 - RNA, 19 nt, Homo sapiens
  misc_RNA (1)...(19): siRNA sense strand
cauagguacucugcauuua

SEQ ID NO: 1414443 - RNA, 19 nt, Homo sapiens
  misc_RNA (1)...(19): siRNA sense strand
ugacaguggugaaugcaaa

SEQ ID NO: 1414444 - RNA, 19 nt, Homo sapiens
  misc_RNA (1)...(19): siRNA sense strand
gcauagguacucugcauuu

SEQ ID NO: 1414445 - RNA, 19 nt, Homo sapiens
  misc_RNA (1)...(19): siRNA sense strand
uagguacucugcauuuaaa

SEQ ID NO: 1414446 - RNA, 19 nt, Homo sapiens
  misc_RNA (1)...(19): siRNA sense strand
gcaggaauucugaaaguga

SEQ ID NO: 1414447 - RNA, 19 nt, Homo sapiens
  misc_RNA (1)...(19): siRNA sense strand
caaaguggcagcugaaaca

SEQ ID NO: 1414448 - RNA, 19 nt, Homo sapiens
  misc_RNA (1)...(19): siRNA sense strand
gaacagggaagaauaacgu

SEQ ID NO: 1414449 - RNA, 19 nt, Homo sapiens
  misc_RNA (1)...(19): siRNA sense strand
gagaugaagaagagaauga

SEQ ID NO: 1414450 - RNA, 19 nt, Homo sapiens
  misc_RNA (1)...(19): siRNA sense strand
gaaagcaaagcgcagaaau

SEQ ID NO: 1414451 - RNA, 19 nt, Homo sapiens
  misc_RNA (1)...(19): siRNA sense strand
aaagagaaaggcauaggua

SEQ ID NO: 1414452 - RNA, 19 nt, Homo sapiens
  misc_RNA (1)...(19): siRNA sense strand
gcgacaagugccucauuua

SEQ ID NO: 1414453 - RNA, 19 nt, Homo sapiens
  misc_RNA (1)...(19): siRNA sense strand
aagaauagagccauaaaga

SEQ ID NO: 1414454 - RNA, 19 nt, Homo sapiens
  misc_RNA (1)...(19): siRNA sense strand
gacaagugccucauuuaau

SEQ ID NO: 1414455 - RNA, 19 nt, Homo sapiens
  misc_RNA (1)...(19): siRNA sense strand
caccuugguugauaaaguu

SEQ ID NO: 1414456 - RNA, 19 nt, Homo sapiens
  misc_RNA (1)...(19): siRNA sense strand
aguaguaguuaccgaagua

SEQ ID NO: 1414457 - RNA, 19 nt, Homo sapiens
  misc_RNA (1)...(19): siRNA sense strand
ucugacaccuaucuuuaaa

SEQ ID NO: 1414458 - RNA, 19 nt, Homo sapiens
  misc_RNA (1)...(19): siRNA sense strand
caaauggcccuaccaccuu

SEQ ID NO: 1414459 - RNA, 19 nt, Homo sapiens
  misc_RNA (1)...(19): siRNA sense strand
caaagauacuacccagagu

SEQ ID NO: 1414460 - RNA, 19 nt, Homo sapiens
  misc_RNA (1)...(19): siRNA sense strand
caagugccucauuuaauuu

SEQ ID NO: 1414461 - RNA, 19 nt, Homo sapiens
  misc_RNA (1)...(19): siRNA sense strand
caggaauucugaaagugaa

SEQ ID NO: 1414462 - RNA, 19 nt, Homo sapiens
  misc_RNA (1)...(19): siRNA sense strand
gcgggcagacaccaauuua

SEQ ID NO: 1414463 - RNA, 19 nt, Homo sapiens
  misc_RNA (1)...(19): siRNA sense strand
uaacaaaguggcagcugaa

SEQ ID NO: 1414464 - RNA, 19 nt, Homo sapiens
  misc_RNA (1)...(19): siRNA sense strand
uggaaggacugucgaaugg

SEQ ID NO: 1414465 - RNA, 19 nt, Homo sapiens
  misc_RNA (1)...(19): siRNA sense strand
guucugauuccacccaaua

SEQ ID NO: 1414466 - RNA, 19 nt, Homo sapiens
  misc_RNA (1)...(19): siRNA sense strand
augcaaagguggagaugaa

SEQ ID NO: 1414467 - RNA, 19 nt, Homo sapiens
  misc_RNA (1)...(19): siRNA sense strand
ucugugaucugacaccuau

SEQ ID NO: 1414468 - RNA, 19 nt, Homo sapiens
  misc_RNA (1)...(19): siRNA sense strand
gggauuggauagugaagca

SEQ ID NO: 1414469 - RNA, 19 nt, Homo sapiens
  misc_RNA (1)...(19): siRNA sense strand
caacaaaauuacagcaaga

SEQ ID NO: 1414470 - RNA, 19 nt, Homo sapiens
  misc_RNA (1)...(19): siRNA sense strand
caaagguggagaugaagaa

SEQ ID NO: 1414471 - RNA, 19 nt, Homo sapiens
  misc_RNA (1)...(19): siRNA sense strand
gcaaagguggagaugaaga

SEQ ID NO: 1414472 - RNA, 19 nt, Homo sapiens
  misc_RNA (1)...(19): siRNA sense strand
ccaccuugguugauaaagu

SEQ ID NO: 1414473 - RNA, 19 nt, Homo sapiens
  misc_RNA (1)...(19): siRNA sense strand
cagcaaaucagaagacaca

SEQ ID NO: 1414474 - RNA, 19 nt, Homo sapiens
  misc_RNA (1)...(19): siRNA sense strand
accagucucuucaccauuu

SEQ ID NO: 1414475 - RNA, 19 nt, Homo sapiens
  misc_RNA (1)...(19): siRNA sense strand
gaagaauagagccauaaag

SEQ ID NO: 1414476 - RNA, 19 nt, Homo sapiens
  misc_RNA (1)...(19): siRNA sense strand
uaucgucuguguuccaaau

SEQ ID NO: 1414477 - RNA, 19 nt, Homo sapiens
  misc_RNA (1)...(19): siRNA sense strand
ggaggacgcuuuucuggau

SEQ ID NO: 1414478 - RNA, 19 nt, Homo sapiens
  misc_RNA (1)...(19): siRNA sense strand
agaauagagccauaaagaa

SEQ ID NO: 1414479 - RNA, 19 nt, Homo sapiens
  misc_RNA (1)...(19): siRNA sense strand
gaguaaaccagucucuuca

SEQ ID NO: 1414480 - RNA, 19 nt, Homo sapiens
  misc_RNA (1)...(19): siRNA sense strand
guucuuaucgucuguguuc

SEQ ID NO: 1414481 - RNA, 19 nt, Homo sapiens
  misc_RNA (1)...(19): siRNA sense strand
gugcgggauuggauaguga

SEQ ID NO: 1414482 - RNA, 19 nt, Homo sapiens
  misc_RNA (1)...(19): siRNA sense strand
gcagacgaguugcacaaaa

SEQ ID NO: 1414483 - RNA, 19 nt, Homo sapiens
  misc_RNA (1)...(19): siRNA sense strand
caacauauugcugaacguu

SEQ ID NO: 1414484 - RNA, 19 nt, Homo sapiens
  misc_RNA (1)...(19): siRNA sense strand
aaaccagucucuucaccau

SEQ ID NO: 1414485 - RNA, 19 nt, Homo sapiens
  misc_RNA (1)...(19): siRNA sense strand
aagauacaccugacaagaa

SEQ ID NO: 1414486 - RNA, 19 nt, Homo sapiens
  misc_RNA (1)...(19): siRNA sense strand
uggcaggaauucugaaagu

SEQ ID NO: 1414487 - RNA, 19 nt, Homo sapiens
  misc_RNA (1)...(19): siRNA sense strand
uaaagcuugugucggaaau

SEQ ID NO: 1414488 - RNA, 19 nt, Homo sapiens
  misc_RNA (1)...(19): siRNA sense strand
gagcgacaagugccucauu

SEQ ID NO: 1414489 - RNA, 19 nt, Homo sapiens
  misc_RNA (1)...(19): siRNA sense strand
agauacaccugacaagaag

SEQ ID NO: 1414490 - RNA, 19 nt, Homo sapiens
  misc_RNA (1)...(19): siRNA sense strand
ugaagaauagagccauaaa

SEQ ID NO: 1414491 - RNA, 19 nt, Homo sapiens
  misc_RNA (1)...(19): siRNA sense strand
gggaacaguggcaggaauu

SEQ ID NO: 1414492 - RNA, 19 nt, Homo sapiens
  misc_RNA (1)...(19): siRNA sense strand
gugaagcacgugaauacaa

SEQ ID NO: 1414493 - RNA, 19 nt, Homo sapiens
  misc_RNA (1)...(19): siRNA sense strand
gaaaugccuaucacaagca

SEQ ID NO: 1414494 - RNA, 19 nt, Homo sapiens
  misc_RNA (1)...(19): siRNA sense strand
guaaagcuugugucggaaa

SEQ ID NO: 1414495 - RNA, 19 nt, Homo sapiens
  misc_RNA (1)...(19): siRNA sense strand
aaucagaagacacagcuuu

SEQ ID NO: 1414496 - RNA, 19 nt, Homo sapiens
  misc_RNA (1)...(19): siRNA sense strand
gaugagccacccaaaguag

SEQ ID NO: 1414497 - RNA, 19 nt, Homo sapiens
  misc_RNA (1)...(19): siRNA sense strand
aagcaaagcgcagaaaugu

SEQ ID NO: 1414498 - RNA, 19 nt, Homo sapiens
  misc_RNA (1)...(19): siRNA sense strand
gaaggugacaguggugaau

SEQ ID NO: 1414499 - RNA, 19 nt, Homo sapiens
  misc_RNA (1)...(19): siRNA sense strand
gguggcaucugaaaagaaa

SEQ ID NO: 1414500 - RNA, 19 nt, Homo sapiens
  misc_RNA (1)...(19): siRNA sense strand
aagugaaucuaacaaagug

SEQ ID NO: 1414501 - RNA, 19 nt, Homo sapiens
  misc_RNA (1)...(19): siRNA sense strand
cuugaagaauagagccaua

SEQ ID NO: 1414502 - RNA, 19 nt, Homo sapiens
  misc_RNA (1)...(19): siRNA sense strand
guuuaaagagaaaggcaua

SEQ ID NO: 1414503 - RNA, 19 nt, Homo sapiens
  misc_RNA (1)...(19): siRNA sense strand
acaagaaagacaaugaguu

SEQ ID NO: 1414504 - RNA, 19 nt, Homo sapiens
  misc_RNA (1)...(19): siRNA sense strand
gauagugaagcacgugaau

SEQ ID NO: 1414505 - RNA, 19 nt, Homo sapiens
  misc_RNA (1)...(19): siRNA sense strand
ccaauugacgagaagaaug

SEQ ID NO: 1414506 - RNA, 19 nt, Homo sapiens
  misc_RNA (1)...(19): siRNA sense strand
gagaaaggcauagguacuc

SEQ ID NO: 1414507 - RNA, 19 nt, Homo sapiens
  misc_RNA (1)...(19): siRNA sense strand
aaagcaaagcgcagaaaug

SEQ ID NO: 1414508 - RNA, 19 nt, Homo sapiens
  misc_RNA (1)...(19): siRNA sense strand
ucgaauggaaacaacauaa

SEQ ID NO: 1414509 - RNA, 19 nt, Homo sapiens
  misc_RNA (1)...(19): siRNA sense strand
cuucaccauuucccacuaa

SEQ ID NO: 1414510 - RNA, 19 nt, Homo sapiens
  misc_RNA (1)...(19): siRNA sense strand
cagcaagagucaacguuuu

SEQ ID NO: 1414511 - RNA, 19 nt, Homo sapiens
  misc_RNA (1)...(19): siRNA sense strand
gaacagcaacacgggaaca

SEQ ID NO: 1414512 - RNA, 19 nt, Homo sapiens
  misc_RNA (1)...(19): siRNA sense strand
gaaugaugagccacccaaa

SEQ ID NO: 1414513 - RNA, 19 nt, Homo sapiens
  misc_RNA (1)...(19): siRNA sense strand
gggcagacaccaauuuagg

SEQ ID NO: 1414514 - RNA, 19 nt, Homo sapiens
  misc_RNA (1)...(19): siRNA sense strand
ccacccaaaguaguaguua

SEQ ID NO: 1414515 - RNA, 19 nt, Homo sapiens
  misc_RNA (1)...(19): siRNA sense strand
cauuuaauuucggcaagaa

SEQ ID NO: 1414516 - RNA, 19 nt, Homo sapiens
  misc_RNA (1)...(19): siRNA sense strand
ccagucaccauguugauuc

SEQ ID NO: 1414517 - RNA, 19 nt, Homo sapiens
  misc_RNA (1)...(19): siRNA sense strand
ccaauuuaggcaacauauu

SEQ ID NO: 1414518 - RNA, 19 nt, Homo sapiens
  misc_RNA (1)...(19): siRNA sense strand
aaaccuacagcaaaucaga

SEQ ID NO: 1414519 - RNA, 19 nt, Homo sapiens
  misc_RNA (1)...(19): siRNA sense strand
ugaugagccacccaaagua

SEQ ID NO: 1414520 - RNA, 19 nt, Homo sapiens
  misc_RNA (1)...(19): siRNA sense strand
ggcaggaauucugaaagug

SEQ ID NO: 1414521 - RNA, 19 nt, Homo sapiens
  misc_RNA (1)...(19): siRNA sense strand
guuccaaauccaccaauug

SEQ ID NO: 1414522 - RNA, 19 nt, Homo sapiens
  misc_RNA (1)...(19): siRNA sense strand
ugagccacccaaaguagua

SEQ ID NO: 1414523 - RNA, 19 nt, Homo sapiens
  misc_RNA (1)...(19): siRNA sense strand
gaugaagaagagaaugaug

SEQ ID NO: 1414524 - RNA, 19 nt, Homo sapiens
  misc_RNA (1)...(19): siRNA sense strand
uggccuugcuuccaguaaa

SEQ ID NO: 1414525 - RNA, 19 nt, Homo sapiens
  misc_RNA (1)...(19): siRNA sense strand
cgaggaugcagacgaguug

SEQ ID NO: 1414526 - RNA, 19 nt, Homo sapiens
  misc_RNA (1)...(19): siRNA sense strand
uaacguucuuaucgucugu

SEQ ID NO: 1414527 - RNA, 19 nt, Homo sapiens
  misc_RNA (1)...(19): siRNA sense strand
ccagugaggaagucuugaa

SEQ ID NO: 1414528 - RNA, 19 nt, Homo sapiens
  misc_RNA (1)...(19): siRNA sense strand
gcgaggaugcagacgaguu

SEQ ID NO: 1414529 - RNA, 19 nt, Homo sapiens
  misc_RNA (1)...(19): siRNA sense strand
gaauagagccauaaagaaa

SEQ ID NO: 1414530 - RNA, 19 nt, Homo sapiens
  misc_RNA (1)...(19): siRNA sense strand
gcaaagcgcagaaauguug

SEQ ID NO: 1414531 - RNA, 19 nt, Homo sapiens
  misc_RNA (1)...(19): siRNA sense strand
gaaagugaaucuaacaaag

SEQ ID NO: 1414532 - RNA, 19 nt, Homo sapiens
  misc_RNA (1)...(19): siRNA sense strand
caagaaagacaaugaguuu

SEQ ID NO: 1414533 - RNA, 19 nt, Homo sapiens
  misc_RNA (1)...(19): siRNA sense strand
gaucugacaccuaucuuua

SEQ ID NO: 1414534 - RNA, 19 nt, Homo sapiens
  misc_RNA (1)...(19): siRNA sense strand
acaagugccucauuuaauu

SEQ ID NO: 1414535 - RNA, 19 nt, Homo sapiens
  misc_RNA (1)...(19): siRNA sense strand
gaaggacugucgaauggaa

SEQ ID NO: 1414536 - RNA, 19 nt, Homo sapiens
  misc_RNA (1)...(19): siRNA sense strand
gacaaugaguuuaaagaga

SEQ ID NO: 1414537 - RNA, 19 nt, Homo sapiens
  misc_RNA (1)...(19): siRNA sense strand
gaaaguugauagcucuguu

SEQ ID NO: 1414538 - RNA, 19 nt, Homo sapiens
  misc_RNA (1)...(19): siRNA sense strand
caacaaaacugaagauaca

SEQ ID NO: 1414539 - RNA, 19 nt, Homo sapiens
  misc_RNA (1)...(19): siRNA sense strand
ugaagcacgugaauacaaa

SEQ ID NO: 1414540 - RNA, 19 nt, Homo sapiens
  misc_RNA (1)...(19): siRNA sense strand
cgacaagugccucauuuaa

SEQ ID NO: 1414541 - RNA, 19 nt, Homo sapiens
  misc_RNA (1)...(19): siRNA sense strand
gaagauacaccugacaaga

SEQ ID NO: 1414542 - RNA, 19 nt, Homo sapiens
  misc_RNA (1)...(19): siRNA sense strand
cauagguacucugcauuua

SEQ ID NO: 1414543 - RNA, 19 nt, Homo sapiens
  misc_RNA (1)...(19): siRNA sense strand
ugacaguggugaaugcaaa

SEQ ID NO: 1414544 - RNA, 19 nt, Homo sapiens
  misc_RNA (1)...(19): siRNA sense strand
gcauagguacucugcauuu

SEQ ID NO: 1414545 - RNA, 19 nt, Homo sapiens
  misc_RNA (1)...(19): siRNA sense strand
uagguacucugcauuuaaa

SEQ ID NO: 1414546 - RNA, 19 nt, Homo sapiens
  misc_RNA (1)...(19): siRNA sense strand
gcaggaauucugaaaguga

SEQ ID NO: 1414547 - RNA, 19 nt, Homo sapiens
  misc_RNA (1)...(19): siRNA sense strand
caaaguggcagcugaaaca

SEQ ID NO: 1414548 - RNA, 19 nt, Homo sapiens
  misc_RNA (1)...(19): siRNA sense strand
gaacagggaagaauaacgu

SEQ ID NO: 1414549 - RNA, 19 nt, Homo sapiens
  misc_RNA (1)...(19): siRNA sense strand
gagaugaagaagagaauga

SEQ ID NO: 1414550 - RNA, 19 nt, Homo sapiens
  misc_RNA (1)...(19): siRNA sense strand
gaaagcaaagcgcagaaau

SEQ ID NO: 1414551 - RNA, 19 nt, Homo sapiens
  misc_RNA (1)...(19): siRNA sense strand
aaagagaaaggcauaggua

SEQ ID NO: 1414552 - RNA, 19 nt, Homo sapiens
  misc_RNA (1)...(19): siRNA sense strand
gcgacaagugccucauuua

SEQ ID NO: 1414553 - RNA, 19 nt, Homo sapiens
  misc_RNA (1)...(19): siRNA sense strand
aagaauagagccauaaaga

SEQ ID NO: 1414554 - RNA, 19 nt, Homo sapiens
  misc_RNA (1)...(19): siRNA sense strand
gacaagugccucauuuaau

SEQ ID NO: 1414555 - RNA, 19 nt, Homo sapiens
  misc_RNA (1)...(19): siRNA sense strand
caccuugguugauaaaguu

SEQ ID NO: 1414556 - RNA, 19 nt, Homo sapiens
  misc_RNA (1)...(19): siRNA sense strand
aguaguaguuaccgaagua

SEQ ID NO: 1414557 - RNA, 19 nt, Homo sapiens
  misc_RNA (1)...(19): siRNA sense strand
ucugacaccuaucuuuaaa

SEQ ID NO: 1414558 - RNA, 19 nt, Homo sapiens
  misc_RNA (1)...(19): siRNA sense strand
caaauggcccuaccaccuu

SEQ ID NO: 1414559 - RNA, 19 nt, Homo sapiens
  misc_RNA (1)...(19): siRNA sense strand
caaagauacuacccagagu

SEQ ID NO: 1414560 - RNA, 19 nt, Homo sapiens
  misc_RNA (1)...(19): siRNA sense strand
caagugccucauuuaauuu

SEQ ID NO: 1414561 - RNA, 19 nt, Homo sapiens
  misc_RNA (1)...(19): siRNA sense strand
caggaauucugaaagugaa

SEQ ID NO: 1414562 - RNA, 19 nt, Homo sapiens
  misc_RNA (1)...(19): siRNA sense strand
gcgggcagacaccaauuua

SEQ ID NO: 1414563 - RNA, 19 nt, Homo sapiens
  misc_RNA (1)...(19): siRNA sense strand
uaacaaaguggcagcugaa

SEQ ID NO: 1414564 - RNA, 19 nt, Homo sapiens
  misc_RNA (1)...(19): siRNA sense strand
uggaaggacugucgaaugg

SEQ ID NO: 1414565 - RNA, 19 nt, Homo sapiens
  misc_RNA (1)...(19): siRNA sense strand
guucugauuccacccaaua

SEQ ID NO: 1414566 - RNA, 19 nt, Homo sapiens
  misc_RNA (1)...(19): siRNA sense strand
augcaaagguggagaugaa

SEQ ID NO: 1414567 - RNA, 19 nt, Homo sapiens
  misc_RNA (1)...(19): siRNA sense strand
ucugugaucugacaccuau

SEQ ID NO: 1414568 - RNA, 19 nt, Homo sapiens
  misc_RNA (1)...(19): siRNA sense strand
gggauuggauagugaagca

SEQ ID NO: 1414569 - RNA, 19 nt, Homo sapiens
  misc_RNA (1)...(19): siRNA sense strand
caacaaaauuacagcaaga

SEQ ID NO: 1414570 - RNA, 19 nt, Homo sapiens
  misc_RNA (1)...(19): siRNA sense strand
caaagguggagaugaagaa

SEQ ID NO: 1414571 - RNA, 19 nt, Homo sapiens
  misc_RNA (1)...(19): siRNA sense strand
gcaaagguggagaugaaga

SEQ ID NO: 1414572 - RNA, 19 nt, Homo sapiens
  misc_RNA (1)...(19): siRNA sense strand
ccaccuugguugauaaagu

SEQ ID NO: 1414573 - RNA, 19 nt, Homo sapiens
  misc_RNA (1)...(19): siRNA sense strand
cagcaaaucagaagacaca

SEQ ID NO: 1414574 - RNA, 19 nt, Homo sapiens
  misc_RNA (1)...(19): siRNA sense strand
accagucucuucaccauuu

SEQ ID NO: 1414575 - RNA, 19 nt, Homo sapiens
  misc_RNA (1)...(19): siRNA sense strand
gaagaauagagccauaaag

SEQ ID NO: 1414576 - RNA, 19 nt, Homo sapiens
  misc_RNA (1)...(19): siRNA sense strand
uaucgucuguguuccaaau

SEQ ID NO: 1414577 - RNA, 19 nt, Homo sapiens
  misc_RNA (1)...(19): siRNA sense strand
ggaggacgcuuuucuggau

SEQ ID NO: 1414578 - RNA, 19 nt, Homo sapiens
  misc_RNA (1)...(19): siRNA sense strand
agaauagagccauaaagaa

SEQ ID NO: 1414579 - RNA, 19 nt, Homo sapiens
  misc_RNA (1)...(19): siRNA sense strand
gaguaaaccagucucuuca

SEQ ID NO: 1414580 - RNA, 19 nt, Homo sapiens
  misc_RNA (1)...(19): siRNA sense strand
guucuuaucgucuguguuc

SEQ ID NO: 1414581 - RNA, 19 nt, Homo sapiens
  misc_RNA (1)...(19): siRNA sense strand
gugcgggauuggauaguga

SEQ ID NO: 1414582 - RNA, 19 nt, Homo sapiens
  misc_RNA (1)...(19): siRNA sense strand
gcagacgaguugcacaaaa

SEQ ID NO: 1414583 - RNA, 19 nt, Homo sapiens
  misc_RNA (1)...(19): siRNA sense strand
caacauauugcugaacguu

SEQ ID NO: 1414584 - RNA, 19 nt, Homo sapiens
  misc_RNA (1)...(19): siRNA sense strand
aaaccagucucuucaccau

SEQ ID NO: 1414585 - RNA, 19 nt, Homo sapiens
  misc_RNA (1)...(19): siRNA sense strand
aagauacaccugacaagaa

SEQ ID NO: 1414586 - RNA, 19 nt, Homo sapiens
  misc_RNA (1)...(19): siRNA sense strand
uggcaggaauucugaaagu

SEQ ID NO: 1414587 - RNA, 19 nt, Homo sapiens
  misc_RNA (1)...(19): siRNA sense strand
uaaagcuugugucggaaau

SEQ ID NO: 1414588 - RNA, 19 nt, Homo sapiens
  misc_RNA (1)...(19): siRNA sense strand
gagcgacaagugccucauu

SEQ ID NO: 1414589 - RNA, 19 nt, Homo sapiens
  misc_RNA (1)...(19): siRNA sense strand
agauacaccugacaagaag

SEQ ID NO: 1414590 - RNA, 19 nt, Homo sapiens
  misc_RNA (1)...(19): siRNA sense strand
ugaagaauagagccauaaa

SEQ ID NO: 1414591 - RNA, 19 nt, Homo sapiens
  misc_RNA (1)...(19): siRNA sense strand
gggaacaguggcaggaauu

SEQ ID NO: 1414592 - RNA, 19 nt, Homo sapiens
  misc_RNA (1)...(19): siRNA sense strand
gugaagcacgugaauacaa

SEQ ID NO: 1414593 - RNA, 19 nt, Homo sapiens
  misc_RNA (1)...(19): siRNA sense strand
gaaaugccuaucacaagca

SEQ ID NO: 1414594 - RNA, 19 nt, Homo sapiens
  misc_RNA (1)...(19): siRNA sense strand
guaaagcuugugucggaaa

SEQ ID NO: 1414595 - RNA, 19 nt, Homo sapiens
  misc_RNA (1)...(19): siRNA sense strand
aaucagaagacacagcuuu

SEQ ID NO: 1414596 - RNA, 19 nt, Homo sapiens
  misc_RNA (1)...(19): siRNA sense strand
gaugagccacccaaaguag

SEQ ID NO: 1414597 - RNA, 19 nt, Homo sapiens
  misc_RNA (1)...(19): siRNA sense strand
aagcaaagcgcagaaaugu

SEQ ID NO: 1414598 - RNA, 19 nt, Homo sapiens
  misc_RNA (1)...(19): siRNA sense strand
gaaggugacaguggugaau

SEQ ID NO: 1414599 - RNA, 19 nt, Homo sapiens
  misc_RNA (1)...(19): siRNA sense strand
gguggcaucugaaaagaaa

SEQ ID NO: 1414600 - RNA, 19 nt, Homo sapiens
  misc_RNA (1)...(19): siRNA sense strand
aagugaaucuaacaaagug

SEQ ID NO: 1414601 - RNA, 19 nt, Homo sapiens
  misc_RNA (1)...(19): siRNA sense strand
cuugaagaauagagccaua

SEQ ID NO: 1414602 - RNA, 19 nt, Homo sapiens
  misc_RNA (1)...(19): siRNA sense strand
guuuaaagagaaaggcaua

SEQ ID NO: 1414603 - RNA, 19 nt, Homo sapiens
  misc_RNA (1)...(19): siRNA sense strand
acaagaaagacaaugaguu

SEQ ID NO: 1414604 - RNA, 19 nt, Homo sapiens
  misc_RNA (1)...(19): siRNA sense strand
gauagugaagcacgugaau

SEQ ID NO: 1414605 - RNA, 19 nt, Homo sapiens
  misc_RNA (1)...(19): siRNA sense strand
ccaauugacgagaagaaug

SEQ ID NO: 1414606 - RNA, 19 nt, Homo sapiens
  misc_RNA (1)...(19): siRNA sense strand
gagaaaggcauagguacuc

SEQ ID NO: 1414607 - RNA, 19 nt, Homo sapiens
  misc_RNA (1)...(19): siRNA sense strand
aaagcaaagcgcagaaaug

SEQ ID NO: 1414608 - RNA, 19 nt, Homo sapiens
  misc_RNA (1)...(19): siRNA sense strand
ucgaauggaaacaacauaa

SEQ ID NO: 1414609 - RNA, 19 nt, Homo sapiens
  misc_RNA (1)...(19): siRNA sense strand
cuucaccauuucccacuaa

SEQ ID NO: 1414610 - RNA, 19 nt, Homo sapiens
  misc_RNA (1)...(19): siRNA sense strand
cagcaagagucaacguuuu

SEQ ID NO: 1414611 - RNA, 19 nt, Homo sapiens
  misc_RNA (1)...(19): siRNA sense strand
gaacagcaacacgggaaca

SEQ ID NO: 1414612 - RNA, 19 nt, Homo sapiens
  misc_RNA (1)...(19): siRNA sense strand
gaaugaugagccacccaaa

SEQ ID NO: 1414613 - RNA, 19 nt, Homo sapiens
  misc_RNA (1)...(19): siRNA sense strand
gggcagacaccaauuuagg

SEQ ID NO: 1414614 - RNA, 19 nt, Homo sapiens
  misc_RNA (1)...(19): siRNA sense strand
ccacccaaaguaguaguua

SEQ ID NO: 1414615 - RNA, 19 nt, Homo sapiens
  misc_RNA (1)...(19): siRNA sense strand
cauuuaauuucggcaagaa

SEQ ID NO: 1414616 - RNA, 19 nt, Homo sapiens
  misc_RNA (1)...(19): siRNA sense strand
ccagucaccauguugauuc

SEQ ID NO: 1414617 - RNA, 19 nt, Homo sapiens
  misc_RNA (1)...(19): siRNA sense strand
ccaauuuaggcaacauauu

SEQ ID NO: 1414618 - RNA, 19 nt, Homo sapiens
  misc_RNA (1)...(19): siRNA sense strand
aaaccuacagcaaaucaga

SEQ ID NO: 1414619 - RNA, 19 nt, Homo sapiens
  misc_RNA (1)...(19): siRNA sense strand
ugaugagccacccaaagua

SEQ ID NO: 1414620 - RNA, 19 nt, Homo sapiens
  misc_RNA (1)...(19): siRNA sense strand
ggcaggaauucugaaagug

SEQ ID NO: 1414621 - RNA, 19 nt, Homo sapiens
  misc_RNA (1)...(19): siRNA sense strand
guuccaaauccaccaauug

SEQ ID NO: 1414622 - RNA, 19 nt, Homo sapiens
  misc_RNA (1)...(19): siRNA sense strand
ugagccacccaaaguagua

SEQ ID NO: 1414623 - RNA, 19 nt, Homo sapiens
  misc_RNA (1)...(19): siRNA sense strand
gaugaagaagagaaugaug

SEQ ID NO: 1414624 - RNA, 19 nt, Homo sapiens
  misc_RNA (1)...(19): siRNA sense strand
uggccuugcuuccaguaaa

SEQ ID NO: 1414625 - RNA, 19 nt, Homo sapiens
  misc_RNA (1)...(19): siRNA sense strand
cgaggaugcagacgaguug

SEQ ID NO: 1414626 - RNA, 19 nt, Homo sapiens
  misc_RNA (1)...(19): siRNA sense strand
uaacguucuuaucgucugu

SEQ ID NO: 1414627 - RNA, 19 nt, Homo sapiens
  misc_RNA (1)...(19): siRNA sense strand
ccagugaggaagucuugaa

SEQ ID NO: 1414628 - RNA, 19 nt, Homo sapiens
  misc_RNA (1)...(19): siRNA sense strand
gcgaggaugcagacgaguu

SEQ ID NO: 1414629 - RNA, 19 nt, Homo sapiens
  misc_RNA (1)...(19): siRNA sense strand
gaaagagcaugaugacaua

SEQ ID NO: 1414630 - RNA, 19 nt, Homo sapiens
  misc_RNA (1)...(19): siRNA sense strand
gaacagcucugaaagcauu

SEQ ID NO: 1414631 - RNA, 19 nt, Homo sapiens
  misc_RNA (1)...(19): siRNA sense strand
gagaagauguugaaaugua

SEQ ID NO: 1414632 - RNA, 19 nt, Homo sapiens
  misc_RNA (1)...(19): siRNA sense strand
gaggacagcuugaggguua

SEQ ID NO: 1414633 - RNA, 19 nt, Homo sapiens
  misc_RNA (1)...(19): siRNA sense strand
gaaacugaauggaagaaua

SEQ ID NO: 1414634 - RNA, 19 nt, Homo sapiens
  misc_RNA (1)...(19): siRNA sense strand
aaagaaggcuguaccguua

SEQ ID NO: 1414635 - RNA, 19 nt, Homo sapiens
  misc_RNA (1)...(19): siRNA sense strand
aaacacagcucuggaauaa

SEQ ID NO: 1414636 - RNA, 19 nt, Homo sapiens
  misc_RNA (1)...(19): siRNA sense strand
gaaauagaacuucgaauga

SEQ ID NO: 1414637 - RNA, 19 nt, Homo sapiens
  misc_RNA (1)...(19): siRNA sense strand
gcaaugauguggucuuguu

SEQ ID NO: 1414638 - RNA, 19 nt, Homo sapiens
  misc_RNA (1)...(19): siRNA sense strand
gaccauauccuuaaaugua

SEQ ID NO: 1414639 - RNA, 19 nt, Homo sapiens
  misc_RNA (1)...(19): siRNA sense strand
gcaaugggaugcagcuauu

SEQ ID NO: 1414640 - RNA, 19 nt, Homo sapiens
  misc_RNA (1)...(19): siRNA sense strand
cagcuuaucuugcaaguga

SEQ ID NO: 1414641 - RNA, 19 nt, Homo sapiens
  misc_RNA (1)...(19): siRNA sense strand
gaaguuaggcgauuagaga

SEQ ID NO: 1414642 - RNA, 19 nt, Homo sapiens
  misc_RNA (1)...(19): siRNA sense strand
gacaaaggcauucaucaua

SEQ ID NO: 1414643 - RNA, 19 nt, Homo sapiens
  misc_RNA (1)...(19): siRNA sense strand
gauccaagcuugauuaagg

SEQ ID NO: 1414644 - RNA, 19 nt, Homo sapiens
  misc_RNA (1)...(19): siRNA sense strand
ggaagaaaguauuaaacga

SEQ ID NO: 1414645 - RNA, 19 nt, Homo sapiens
  misc_RNA (1)...(19): siRNA sense strand
aaacagcucuaaaccauug

SEQ ID NO: 1414646 - RNA, 19 nt, Homo sapiens
  misc_RNA (1)...(19): siRNA sense strand
ugacauguauucugaaguu

SEQ ID NO: 1414647 - RNA, 19 nt, Homo sapiens
  misc_RNA (1)...(19): siRNA sense strand
gaagaccucaagaaaguua

SEQ ID NO: 1414648 - RNA, 19 nt, Homo sapiens
  misc_RNA (1)...(19): siRNA sense strand
gcugaacgcaguauuguua

SEQ ID NO: 1414649 - RNA, 19 nt, Homo sapiens
  misc_RNA (1)...(19): siRNA sense strand
gauggugcuuguugacuua

SEQ ID NO: 1414650 - RNA, 19 nt, Homo sapiens
  misc_RNA (1)...(19): siRNA sense strand
ggacauccuuucagcaguu

SEQ ID NO: 1414651 - RNA, 19 nt, Homo sapiens
  misc_RNA (1)...(19): siRNA sense strand
gaaacacagcucuggaaua

SEQ ID NO: 1414652 - RNA, 19 nt, Homo sapiens
  misc_RNA (1)...(19): siRNA sense strand
ggaaauccuucaacaaucu

SEQ ID NO: 1414653 - RNA, 19 nt, Homo sapiens
  misc_RNA (1)...(19): siRNA sense strand
gcagauaauugaaggaaag

SEQ ID NO: 1414654 - RNA, 19 nt, Homo sapiens
  misc_RNA (1)...(19): siRNA sense strand
ugaaagcauugaagcuaua

SEQ ID NO: 1414655 - RNA, 19 nt, Homo sapiens
  misc_RNA (1)...(19): siRNA sense strand
ggaaagagcaugaugacau

SEQ ID NO: 1414656 - RNA, 19 nt, Homo sapiens
  misc_RNA (1)...(19): siRNA sense strand
ucacgaagcauuuaucauu

SEQ ID NO: 1414657 - RNA, 19 nt, Homo sapiens
  misc_RNA (1)...(19): siRNA sense strand
gcaguucucuucucugaca

SEQ ID NO: 1414658 - RNA, 19 nt, Homo sapiens
  misc_RNA (1)...(19): siRNA sense strand
uuaaagagguauuggaaga

SEQ ID NO: 1414659 - RNA, 19 nt, Homo sapiens
  misc_RNA (1)...(19): siRNA sense strand
aaacugaaauucucuccaa

SEQ ID NO: 1414660 - RNA, 19 nt, Homo sapiens
  misc_RNA (1)...(19): siRNA sense strand
ggcaacaacuuacaaauac

SEQ ID NO: 1414661 - RNA, 19 nt, Homo sapiens
  misc_RNA (1)...(19): siRNA sense strand
gaagaccgauccauaucug

SEQ ID NO: 1414662 - RNA, 19 nt, Homo sapiens
  misc_RNA (1)...(19): siRNA sense strand
ugaccggaaugaacuauuu

SEQ ID NO: 1414663 - RNA, 19 nt, Homo sapiens
  misc_RNA (1)...(19): siRNA sense strand
caaugaaagcuuuagguua

SEQ ID NO: 1414664 - RNA, 19 nt, Homo sapiens
  misc_RNA (1)...(19): siRNA sense strand
ggaccuuagugaauauaaa

SEQ ID NO: 1414665 - RNA, 19 nt, Homo sapiens
  misc_RNA (1)...(19): siRNA sense strand
ggaaauugaugaguauauc

SEQ ID NO: 1414666 - RNA, 19 nt, Homo sapiens
  misc_RNA (1)...(19): siRNA sense strand
cggaagaccucaagaaagu

SEQ ID NO: 1414667 - RNA, 19 nt, Homo sapiens
  misc_RNA (1)...(19): siRNA sense strand
gcaucaaguuuauagaaga

SEQ ID NO: 1414668 - RNA, 19 nt, Homo sapiens
  misc_RNA (1)...(19): siRNA sense strand
gcacccagcuuaucuugca

SEQ ID NO: 1414669 - RNA, 19 nt, Homo sapiens
  misc_RNA (1)...(19): siRNA sense strand
ggaagaaucggacccaaga

SEQ ID NO: 1414670 - RNA, 19 nt, Homo sapiens
  misc_RNA (1)...(19): siRNA sense strand
ugaaauccuugaugaaguu

SEQ ID NO: 1414671 - RNA, 19 nt, Homo sapiens
  misc_RNA (1)...(19): siRNA sense strand
gcugauaguuucaaagcaa

SEQ ID NO: 1414672 - RNA, 19 nt, Homo sapiens
  misc_RNA (1)...(19): siRNA sense strand
gagaccauauccuuaaaug

SEQ ID NO: 1414673 - RNA, 19 nt, Homo sapiens
  misc_RNA (1)...(19): siRNA sense strand
uaaagaggccguuaaggaa

SEQ ID NO: 1414674 - RNA, 19 nt, Homo sapiens
  misc_RNA (1)...(19): siRNA sense strand
guagauccaagcuugauua

SEQ ID NO: 1414675 - RNA, 19 nt, Homo sapiens
  misc_RNA (1)...(19): siRNA sense strand
uggagaagauguugaaaug

SEQ ID NO: 1414676 - RNA, 19 nt, Homo sapiens
  misc_RNA (1)...(19): siRNA sense strand
cagcaguucucuucucuga

SEQ ID NO: 1414677 - RNA, 19 nt, Homo sapiens
  misc_RNA (1)...(19): siRNA sense strand
gaugacacguucuccaguu

SEQ ID NO: 1414678 - RNA, 19 nt, Homo sapiens
  misc_RNA (1)...(19): siRNA sense strand
caaaggcauucaucauaga

SEQ ID NO: 1414679 - RNA, 19 nt, Homo sapiens
  misc_RNA (1)...(19): siRNA sense strand
gauaugauaccggaccuua

SEQ ID NO: 1414680 - RNA, 19 nt, Homo sapiens
  misc_RNA (1)...(19): siRNA sense strand
gggaugcagcuauuuauuu

SEQ ID NO: 1414681 - RNA, 19 nt, Homo sapiens
  misc_RNA (1)...(19): siRNA sense strand
ccaagugacuacaagaaau

SEQ ID NO: 1414682 - RNA, 19 nt, Homo sapiens
  misc_RNA (1)...(19): siRNA sense strand
ugauugacauguauucuga

SEQ ID NO: 1414683 - RNA, 19 nt, Homo sapiens
  misc_RNA (1)...(19): siRNA sense strand
uaauaaagcaguagagguu

SEQ ID NO: 1414684 - RNA, 19 nt, Homo sapiens
  misc_RNA (1)...(19): siRNA sense strand
cauugaagcuauaagagaa

SEQ ID NO: 1414685 - RNA, 19 nt, Homo sapiens
  misc_RNA (1)...(19): siRNA sense strand
ggauucagcagauaauuga

SEQ ID NO: 1414686 - RNA, 19 nt, Homo sapiens
  misc_RNA (1)...(19): siRNA sense strand
aaacuucgcuaucucauac

SEQ ID NO: 1414687 - RNA, 19 nt, Homo sapiens
  misc_RNA (1)...(19): siRNA sense strand
acaaugaaaccaagaauga

SEQ ID NO: 1414688 - RNA, 19 nt, Homo sapiens
  misc_RNA (1)...(19): siRNA sense strand
caaauggacccucauggaa

SEQ ID NO: 1414689 - RNA, 19 nt, Homo sapiens
  misc_RNA (1)...(19): siRNA sense strand
ugaaauagaacuucgaaug

SEQ ID NO: 1414690 - RNA, 19 nt, Homo sapiens
  misc_RNA (1)...(19): siRNA sense strand
uaccggaccuuagugaaua

SEQ ID NO: 1414691 - RNA, 19 nt, Homo sapiens
  misc_RNA (1)...(19): siRNA sense strand
gggaacagcucugaaagca

SEQ ID NO: 1414692 - RNA, 19 nt, Homo sapiens
  misc_RNA (1)...(19): siRNA sense strand
ugacaaaccuuccuuuacg

SEQ ID NO: 1414693 - RNA, 19 nt, Homo sapiens
  misc_RNA (1)...(19): siRNA sense strand
gaacaacaggcugauaguu

SEQ ID NO: 1414694 - RNA, 19 nt, Homo sapiens
  misc_RNA (1)...(19): siRNA sense strand
gauguucucucugauuaug

SEQ ID NO: 1414695 - RNA, 19 nt, Homo sapiens
  misc_RNA (1)...(19): siRNA sense strand
gcauuuaucauucacauca

SEQ ID NO: 1414696 - RNA, 19 nt, Homo sapiens
  misc_RNA (1)...(19): siRNA sense strand
ggaugcagcuauuuauuuu

SEQ ID NO: 1414697 - RNA, 19 nt, Homo sapiens
  misc_RNA (1)...(19): siRNA sense strand
gaacuugaccggaaugaac

SEQ ID NO: 1414698 - RNA, 19 nt, Homo sapiens
  misc_RNA (1)...(19): siRNA sense strand
ggauggugcuuguugacuu

SEQ ID NO: 1414699 - RNA, 19 nt, Homo sapiens
  misc_RNA (1)...(19): siRNA sense strand
acaaaggcauucaucauag

SEQ ID NO: 1414700 - RNA, 19 nt, Homo sapiens
  misc_RNA (1)...(19): siRNA sense strand
acacucaguugaaguauca

SEQ ID NO: 1414701 - RNA, 19 nt, Homo sapiens
  misc_RNA (1)...(19): siRNA sense strand
gaaagugacaagcauuuua

SEQ ID NO: 1414702 - RNA, 19 nt, Homo sapiens
  misc_RNA (1)...(19): siRNA sense strand
gacauugugugggaaauug

SEQ ID NO: 1414703 - RNA, 19 nt, Homo sapiens
  misc_RNA (1)...(19): siRNA sense strand
ggaaguuuaccacuacaaa

SEQ ID NO: 1414704 - RNA, 19 nt, Homo sapiens
  misc_RNA (1)...(19): siRNA sense strand
gcucgaauauucccaagag

SEQ ID NO: 1414705 - RNA, 19 nt, Homo sapiens
  misc_RNA (1)...(19): siRNA sense strand
gaaagaugacaaaggcauu

SEQ ID NO: 1414706 - RNA, 19 nt, Homo sapiens
  misc_RNA (1)...(19): siRNA sense strand
uugauguucucucugauua

SEQ ID NO: 1414707 - RNA, 19 nt, Homo sapiens
  misc_RNA (1)...(19): siRNA sense strand
aaagagguauuggaagauu

SEQ ID NO: 1414708 - RNA, 19 nt, Homo sapiens
  misc_RNA (1)...(19): siRNA sense strand
gggagacccuacaagaaga

SEQ ID NO: 1414709 - RNA, 19 nt, Homo sapiens
  misc_RNA (1)...(19): siRNA sense strand
gaauccuaaugccaucaua

SEQ ID NO: 1414710 - RNA, 19 nt, Homo sapiens
  misc_RNA (1)...(19): siRNA sense strand
agaagaucuugcagcauua

SEQ ID NO: 1414711 - RNA, 19 nt, Homo sapiens
  misc_RNA (1)...(19): siRNA sense strand
caucauagaaagcuuaaga

SEQ ID NO: 1414712 - RNA, 19 nt, Homo sapiens
  misc_RNA (1)...(19): siRNA sense strand
gaagaauuuucccgcuuua

SEQ ID NO: 1414713 - RNA, 19 nt, Homo sapiens
  misc_RNA (1)...(19): siRNA sense strand
caguggauaucaagcuuaa

SEQ ID NO: 1414714 - RNA, 19 nt, Homo sapiens
  misc_RNA (1)...(19): siRNA sense strand
gcauugaagcuauaagaga

SEQ ID NO: 1414715 - RNA, 19 nt, Homo sapiens
  misc_RNA (1)...(19): siRNA sense strand
gaaagcucuucccaaugaa

SEQ ID NO: 1414716 - RNA, 19 nt, Homo sapiens
  misc_RNA (1)...(19): siRNA sense strand
ugacuuaccaggugugauu

SEQ ID NO: 1414717 - RNA, 19 nt, Homo sapiens
  misc_RNA (1)...(19): siRNA sense strand
ggaaaugauugcccaagcu

SEQ ID NO: 1414718 - RNA, 19 nt, Homo sapiens
  misc_RNA (1)...(19): siRNA sense strand
acacagcucuggaauaaaa

SEQ ID NO: 1414719 - RNA, 19 nt, Homo sapiens
  misc_RNA (1)...(19): siRNA sense strand
ugugggaaauugaugagua

SEQ ID NO: 1414720 - RNA, 19 nt, Homo sapiens
  misc_RNA (1)...(19): siRNA sense strand
cuaaaccauuguaaccuuu

SEQ ID NO: 1414721 - RNA, 19 nt, Homo sapiens
  misc_RNA (1)...(19): siRNA sense strand
agagcaugaugacauauuu

SEQ ID NO: 1414722 - RNA, 19 nt, Homo sapiens
  misc_RNA (1)...(19): siRNA sense strand
caacucaugugauugaaaa

SEQ ID NO: 1414723 - RNA, 19 nt, Homo sapiens
  misc_RNA (1)...(19): siRNA sense strand
caagugacuacaagaaauu

SEQ ID NO: 1414724 - RNA, 19 nt, Homo sapiens
  misc_RNA (1)...(19): siRNA sense strand
gcuaaaggcacaccaagug

SEQ ID NO: 1414725 - RNA, 19 nt, Homo sapiens
  misc_RNA (1)...(19): siRNA sense strand
gagaauaugaagaagaguu

SEQ ID NO: 1414726 - RNA, 19 nt, Homo sapiens
  misc_RNA (1)...(19): siRNA sense strand
gcaguauuguuacagacuu

SEQ ID NO: 1414727 - RNA, 19 nt, Homo sapiens
  misc_RNA (1)...(19): siRNA sense strand
uggaaagacuaguguguug

SEQ ID NO: 1414728 - RNA, 19 nt, Homo sapiens
  misc_RNA (1)...(19): siRNA sense strand
ggagaacaaagaauugaga

SEQ ID NO: 1414729 - RNA, 19 nt, Homo sapiens
  misc_RNA (1)...(19): siRNA sense strand
gaaagagcaugaugacaua

SEQ ID NO: 1414730 - RNA, 19 nt, Homo sapiens
  misc_RNA (1)...(19): siRNA sense strand
gaacagcucugaaagcauu

SEQ ID NO: 1414731 - RNA, 19 nt, Homo sapiens
  misc_RNA (1)...(19): siRNA sense strand
gagaagauguugaaaugua

SEQ ID NO: 1414732 - RNA, 19 nt, Homo sapiens
  misc_RNA (1)...(19): siRNA sense strand
gaggacagcuugaggguua

SEQ ID NO: 1414733 - RNA, 19 nt, Homo sapiens
  misc_RNA (1)...(19): siRNA sense strand
gaaacugaauggaagaaua

SEQ ID NO: 1414734 - RNA, 19 nt, Homo sapiens
  misc_RNA (1)...(19): siRNA sense strand
aaagaaggcuguaccguua

SEQ ID NO: 1414735 - RNA, 19 nt, Homo sapiens
  misc_RNA (1)...(19): siRNA sense strand
aaacacagcucuggaauaa

SEQ ID NO: 1414736 - RNA, 19 nt, Homo sapiens
  misc_RNA (1)...(19): siRNA sense strand
gaaauagaacuucgaauga

SEQ ID NO: 1414737 - RNA, 19 nt, Homo sapiens
  misc_RNA (1)...(19): siRNA sense strand
gcaaugauguggucuuguu

SEQ ID NO: 1414738 - RNA, 19 nt, Homo sapiens
  misc_RNA (1)...(19): siRNA sense strand
gaccauauccuuaaaugua

SEQ ID NO: 1414739 - RNA, 19 nt, Homo sapiens
  misc_RNA (1)...(19): siRNA sense strand
gcaaugggaugcagcuauu

SEQ ID NO: 1414740 - RNA, 19 nt, Homo sapiens
  misc_RNA (1)...(19): siRNA sense strand
cagcuuaucuugcaaguga

SEQ ID NO: 1414741 - RNA, 19 nt, Homo sapiens
  misc_RNA (1)...(19): siRNA sense strand
gaaguuaggcgauuagaga

SEQ ID NO: 1414742 - RNA, 19 nt, Homo sapiens
  misc_RNA (1)...(19): siRNA sense strand
gacaaaggcauucaucaua

SEQ ID NO: 1414743 - RNA, 19 nt, Homo sapiens
  misc_RNA (1)...(19): siRNA sense strand
gauccaagcuugauuaagg

SEQ ID NO: 1414744 - RNA, 19 nt, Homo sapiens
  misc_RNA (1)...(19): siRNA sense strand
ggaagaaaguauuaaacga

SEQ ID NO: 1414745 - RNA, 19 nt, Homo sapiens
  misc_RNA (1)...(19): siRNA sense strand
aaacagcucuaaaccauug

SEQ ID NO: 1414746 - RNA, 19 nt, Homo sapiens
  misc_RNA (1)...(19): siRNA sense strand
ugacauguauucugaaguu

SEQ ID NO: 1414747 - RNA, 19 nt, Homo sapiens
  misc_RNA (1)...(19): siRNA sense strand
gaagaccucaagaaaguua

SEQ ID NO: 1414748 - RNA, 19 nt, Homo sapiens
  misc_RNA (1)...(19): siRNA sense strand
gcugaacgcaguauuguua

SEQ ID NO: 1414749 - RNA, 19 nt, Homo sapiens
  misc_RNA (1)...(19): siRNA sense strand
gauggugcuuguugacuua

SEQ ID NO: 1414750 - RNA, 19 nt, Homo sapiens
  misc_RNA (1)...(19): siRNA sense strand
ggacauccuuucagcaguu

SEQ ID NO: 1414751 - RNA, 19 nt, Homo sapiens
  misc_RNA (1)...(19): siRNA sense strand
gaaacacagcucuggaaua

SEQ ID NO: 1414752 - RNA, 19 nt, Homo sapiens
  misc_RNA (1)...(19): siRNA sense strand
ggaaauccuucaacaaucu

SEQ ID NO: 1414753 - RNA, 19 nt, Homo sapiens
  misc_RNA (1)...(19): siRNA sense strand
gcagauaauugaaggaaag

SEQ ID NO: 1414754 - RNA, 19 nt, Homo sapiens
  misc_RNA (1)...(19): siRNA sense strand
ugaaagcauugaagcuaua

SEQ ID NO: 1414755 - RNA, 19 nt, Homo sapiens
  misc_RNA (1)...(19): siRNA sense strand
ggaaagagcaugaugacau

SEQ ID NO: 1414756 - RNA, 19 nt, Homo sapiens
  misc_RNA (1)...(19): siRNA sense strand
ucacgaagcauuuaucauu

SEQ ID NO: 1414757 - RNA, 19 nt, Homo sapiens
  misc_RNA (1)...(19): siRNA sense strand
gcaguucucuucucugaca

SEQ ID NO: 1414758 - RNA, 19 nt, Homo sapiens
  misc_RNA (1)...(19): siRNA sense strand
uuaaagagguauuggaaga

SEQ ID NO: 1414759 - RNA, 19 nt, Homo sapiens
  misc_RNA (1)...(19): siRNA sense strand
aaacugaaauucucuccaa

SEQ ID NO: 1414760 - RNA, 19 nt, Homo sapiens
  misc_RNA (1)...(19): siRNA sense strand
ggcaacaacuuacaaauac

SEQ ID NO: 1414761 - RNA, 19 nt, Homo sapiens
  misc_RNA (1)...(19): siRNA sense strand
gaagaccgauccauaucug

SEQ ID NO: 1414762 - RNA, 19 nt, Homo sapiens
  misc_RNA (1)...(19): siRNA sense strand
ugaccggaaugaacuauuu

SEQ ID NO: 1414763 - RNA, 19 nt, Homo sapiens
  misc_RNA (1)...(19): siRNA sense strand
caaugaaagcuuuagguua

SEQ ID NO: 1414764 - RNA, 19 nt, Homo sapiens
  misc_RNA (1)...(19): siRNA sense strand
ggaccuuagugaauauaaa

SEQ ID NO: 1414765 - RNA, 19 nt, Homo sapiens
  misc_RNA (1)...(19): siRNA sense strand
ggaaauugaugaguauauc

SEQ ID NO: 1414766 - RNA, 19 nt, Homo sapiens
  misc_RNA (1)...(19): siRNA sense strand
cggaagaccucaagaaagu

SEQ ID NO: 1414767 - RNA, 19 nt, Homo sapiens
  misc_RNA (1)...(19): siRNA sense strand
gcaucaaguuuauagaaga

SEQ ID NO: 1414768 - RNA, 19 nt, Homo sapiens
  misc_RNA (1)...(19): siRNA sense strand
gcacccagcuuaucuugca

SEQ ID NO: 1414769 - RNA, 19 nt, Homo sapiens
  misc_RNA (1)...(19): siRNA sense strand
ggaagaaucggacccaaga

SEQ ID NO: 1414770 - RNA, 19 nt, Homo sapiens
  misc_RNA (1)...(19): siRNA sense strand
ugaaauccuugaugaaguu

SEQ ID NO: 1414771 - RNA, 19 nt, Homo sapiens
  misc_RNA (1)...(19): siRNA sense strand
gcugauaguuucaaagcaa

SEQ ID NO: 1414772 - RNA, 19 nt, Homo sapiens
  misc_RNA (1)...(19): siRNA sense strand
gagaccauauccuuaaaug

SEQ ID NO: 1414773 - RNA, 19 nt, Homo sapiens
  misc_RNA (1)...(19): siRNA sense strand
uaaagaggccguuaaggaa

SEQ ID NO: 1414774 - RNA, 19 nt, Homo sapiens
  misc_RNA (1)...(19): siRNA sense strand
guagauccaagcuugauua

SEQ ID NO: 1414775 - RNA, 19 nt, Homo sapiens
  misc_RNA (1)...(19): siRNA sense strand
uggagaagauguugaaaug

SEQ ID NO: 1414776 - RNA, 19 nt, Homo sapiens
  misc_RNA (1)...(19): siRNA sense strand
cagcaguucucuucucuga

SEQ ID NO: 1414777 - RNA, 19 nt, Homo sapiens
  misc_RNA (1)...(19): siRNA sense strand
gaugacacguucuccaguu

SEQ ID NO: 1414778 - RNA, 19 nt, Homo sapiens
  misc_RNA (1)...(19): siRNA sense strand
caaaggcauucaucauaga

SEQ ID NO: 1414779 - RNA, 19 nt, Homo sapiens
  misc_RNA (1)...(19): siRNA sense strand
gauaugauaccggaccuua

SEQ ID NO: 1414780 - RNA, 19 nt, Homo sapiens
  misc_RNA (1)...(19): siRNA sense strand
gggaugcagcuauuuauuu

SEQ ID NO: 1414781 - RNA, 19 nt, Homo sapiens
  misc_RNA (1)...(19): siRNA sense strand
ccaagugacuacaagaaau

SEQ ID NO: 1414782 - RNA, 19 nt, Homo sapiens
  misc_RNA (1)...(19): siRNA sense strand
ugauugacauguauucuga

SEQ ID NO: 1414783 - RNA, 19 nt, Homo sapiens
  misc_RNA (1)...(19): siRNA sense strand
uaauaaagcaguagagguu

SEQ ID NO: 1414784 - RNA, 19 nt, Homo sapiens
  misc_RNA (1)...(19): siRNA sense strand
cauugaagcuauaagagaa

SEQ ID NO: 1414785 - RNA, 19 nt, Homo sapiens
  misc_RNA (1)...(19): siRNA sense strand
ggauucagcagauaauuga

SEQ ID NO: 1414786 - RNA, 19 nt, Homo sapiens
  misc_RNA (1)...(19): siRNA sense strand
aaacuucgcuaucucauac

SEQ ID NO: 1414787 - RNA, 19 nt, Homo sapiens
  misc_RNA (1)...(19): siRNA sense strand
acaaugaaaccaagaauga

SEQ ID NO: 1414788 - RNA, 19 nt, Homo sapiens
  misc_RNA (1)...(19): siRNA sense strand
caaauggacccucauggaa

SEQ ID NO: 1414789 - RNA, 19 nt, Homo sapiens
  misc_RNA (1)...(19): siRNA sense strand
ugaaauagaacuucgaaug

SEQ ID NO: 1414790 - RNA, 19 nt, Homo sapiens
  misc_RNA (1)...(19): siRNA sense strand
uaccggaccuuagugaaua

SEQ ID NO: 1414791 - RNA, 19 nt, Homo sapiens
  misc_RNA (1)...(19): siRNA sense strand
gggaacagcucugaaagca

SEQ ID NO: 1414792 - RNA, 19 nt, Homo sapiens
  misc_RNA (1)...(19): siRNA sense strand
ugacaaaccuuccuuuacg

SEQ ID NO: 1414793 - RNA, 19 nt, Homo sapiens
  misc_RNA (1)...(19): siRNA sense strand
gaacaacaggcugauaguu

SEQ ID NO: 1414794 - RNA, 19 nt, Homo sapiens
  misc_RNA (1)...(19): siRNA sense strand
gauguucucucugauuaug

SEQ ID NO: 1414795 - RNA, 19 nt, Homo sapiens
  misc_RNA (1)...(19): siRNA sense strand
gcauuuaucauucacauca

SEQ ID NO: 1414796 - RNA, 19 nt, Homo sapiens
  misc_RNA (1)...(19): siRNA sense strand
ggaugcagcuauuuauuuu

SEQ ID NO: 1414797 - RNA, 19 nt, Homo sapiens
  misc_RNA (1)...(19): siRNA sense strand
gaacuugaccggaaugaac

SEQ ID NO: 1414798 - RNA, 19 nt, Homo sapiens
  misc_RNA (1)...(19): siRNA sense strand
ggauggugcuuguugacuu

SEQ ID NO: 1414799 - RNA, 19 nt, Homo sapiens
  misc_RNA (1)...(19): siRNA sense strand
acaaaggcauucaucauag

SEQ ID NO: 1414800 - RNA, 19 nt, Homo sapiens
  misc_RNA (1)...(19): siRNA sense strand
acacucaguugaaguauca

SEQ ID NO: 1414801 - RNA, 19 nt, Homo sapiens
  misc_RNA (1)...(19): siRNA sense strand
gaaagugacaagcauuuua

SEQ ID NO: 1414802 - RNA, 19 nt, Homo sapiens
  misc_RNA (1)...(19): siRNA sense strand
gacauugugugggaaauug

SEQ ID NO: 1414803 - RNA, 19 nt, Homo sapiens
  misc_RNA (1)...(19): siRNA sense strand
ggaaguuuaccacuacaaa

SEQ ID NO: 1414804 - RNA, 19 nt, Homo sapiens
  misc_RNA (1)...(19): siRNA sense strand
gcucgaauauucccaagag

SEQ ID NO: 1414805 - RNA, 19 nt, Homo sapiens
  misc_RNA (1)...(19): siRNA sense strand
gaaagaugacaaaggcauu

SEQ ID NO: 1414806 - RNA, 19 nt, Homo sapiens
  misc_RNA (1)...(19): siRNA sense strand
uugauguucucucugauua

SEQ ID NO: 1414807 - RNA, 19 nt, Homo sapiens
  misc_RNA (1)...(19): siRNA sense strand
aaagagguauuggaagauu

SEQ ID NO: 1414808 - RNA, 19 nt, Homo sapiens
  misc_RNA (1)...(19): siRNA sense strand
gggagacccuacaagaaga

SEQ ID NO: 1414809 - RNA, 19 nt, Homo sapiens
  misc_RNA (1)...(19): siRNA sense strand
gaauccuaaugccaucaua

SEQ ID NO: 1414810 - RNA, 19 nt, Homo sapiens
  misc_RNA (1)...(19): siRNA sense strand
agaagaucuugcagcauua

SEQ ID NO: 1414811 - RNA, 19 nt, Homo sapiens
  misc_RNA (1)...(19): siRNA sense strand
caucauagaaagcuuaaga

SEQ ID NO: 1414812 - RNA, 19 nt, Homo sapiens
  misc_RNA (1)...(19): siRNA sense strand
gaagaauuuucccgcuuua

SEQ ID NO: 1414813 - RNA, 19 nt, Homo sapiens
  misc_RNA (1)...(19): siRNA sense strand
caguggauaucaagcuuaa

SEQ ID NO: 1414814 - RNA, 19 nt, Homo sapiens
  misc_RNA (1)...(19): siRNA sense strand
gcauugaagcuauaagaga

SEQ ID NO: 1414815 - RNA, 19 nt, Homo sapiens
  misc_RNA (1)...(19): siRNA sense strand
gaaagcucuucccaaugaa

SEQ ID NO: 1414816 - RNA, 19 nt, Homo sapiens
  misc_RNA (1)...(19): siRNA sense strand
ugacuuaccaggugugauu

SEQ ID NO: 1414817 - RNA, 19 nt, Homo sapiens
  misc_RNA (1)...(19): siRNA sense strand
ggaaaugauugcccaagcu

SEQ ID NO: 1414818 - RNA, 19 nt, Homo sapiens
  misc_RNA (1)...(19): siRNA sense strand
acacagcucuggaauaaaa

SEQ ID NO: 1414819 - RNA, 19 nt, Homo sapiens
  misc_RNA (1)...(19): siRNA sense strand
ugugggaaauugaugagua

SEQ ID NO: 1414820 - RNA, 19 nt, Homo sapiens
  misc_RNA (1)...(19): siRNA sense strand
cuaaaccauuguaaccuuu

SEQ ID NO: 1414821 - RNA, 19 nt, Homo sapiens
  misc_RNA (1)...(19): siRNA sense strand
agagcaugaugacauauuu

SEQ ID NO: 1414822 - RNA, 19 nt, Homo sapiens
  misc_RNA (1)...(19): siRNA sense strand
caacucaugugauugaaaa

SEQ ID NO: 1414823 - RNA, 19 nt, Homo sapiens
  misc_RNA (1)...(19): siRNA sense strand
caagugacuacaagaaauu

SEQ ID NO: 1414824 - RNA, 19 nt, Homo sapiens
  misc_RNA (1)...(19): siRNA sense strand
gcuaaaggcacaccaagug

SEQ ID NO: 1414825 - RNA, 19 nt, Homo sapiens
  misc_RNA (1)...(19): siRNA sense strand
gagaauaugaagaagaguu

SEQ ID NO: 1414826 - RNA, 19 nt, Homo sapiens
  misc_RNA (1)...(19): siRNA sense strand
gcaguauuguuacagacuu

SEQ ID NO: 1414827 - RNA, 19 nt, Homo sapiens
  misc_RNA (1)...(19): siRNA sense strand
uggaaagacuaguguguug

SEQ ID NO: 1414828 - RNA, 19 nt, Homo sapiens
  misc_RNA (1)...(19): siRNA sense strand
ggagaacaaagaauugaga

SEQ ID NO: 1414829 - RNA, 19 nt, Homo sapiens
  misc_RNA (1)...(19): siRNA sense strand
gaaagagcaugaugacaua

SEQ ID NO: 1414830 - RNA, 19 nt, Homo sapiens
  misc_RNA (1)...(19): siRNA sense strand
gaacagcucugaaagcauu

SEQ ID NO: 1414831 - RNA, 19 nt, Homo sapiens
  misc_RNA (1)...(19): siRNA sense strand
gagaagauguugaaaugua

SEQ ID NO: 1414832 - RNA, 19 nt, Homo sapiens
  misc_RNA (1)...(19): siRNA sense strand
gaggacagcuugaggguua

SEQ ID NO: 1414833 - RNA, 19 nt, Homo sapiens
  misc_RNA (1)...(19): siRNA sense strand
gaaacugaauggaagaaua

SEQ ID NO: 1414834 - RNA, 19 nt, Homo sapiens
  misc_RNA (1)...(19): siRNA sense strand
aaagaaggcuguaccguua

SEQ ID NO: 1414835 - RNA, 19 nt, Homo sapiens
  misc_RNA (1)...(19): siRNA sense strand
aaacacagcucuggaauaa

SEQ ID NO: 1414836 - RNA, 19 nt, Homo sapiens
  misc_RNA (1)...(19): siRNA sense strand
gaaauagaacuucgaauga

SEQ ID NO: 1414837 - RNA, 19 nt, Homo sapiens
  misc_RNA (1)...(19): siRNA sense strand
gcaaugauguggucuuguu

SEQ ID NO: 1414838 - RNA, 19 nt, Homo sapiens
  misc_RNA (1)...(19): siRNA sense strand
gaccauauccuuaaaugua

SEQ ID NO: 1414839 - RNA, 19 nt, Homo sapiens
  misc_RNA (1)...(19): siRNA sense strand
gcaaugggaugcagcuauu

SEQ ID NO: 1414840 - RNA, 19 nt, Homo sapiens
  misc_RNA (1)...(19): siRNA sense strand
cagcuuaucuugcaaguga

SEQ ID NO: 1414841 - RNA, 19 nt, Homo sapiens
  misc_RNA (1)...(19): siRNA sense strand
gaaguuaggcgauuagaga

SEQ ID NO: 1414842 - RNA, 19 nt, Homo sapiens
  misc_RNA (1)...(19): siRNA sense strand
gacaaaggcauucaucaua

SEQ ID NO: 1414843 - RNA, 19 nt, Homo sapiens
  misc_RNA (1)...(19): siRNA sense strand
gauccaagcuugauuaagg

SEQ ID NO: 1414844 - RNA, 19 nt, Homo sapiens
  misc_RNA (1)...(19): siRNA sense strand
ggaagaaaguauuaaacga

SEQ ID NO: 1414845 - RNA, 19 nt, Homo sapiens
  misc_RNA (1)...(19): siRNA sense strand
aaacagcucuaaaccauug

SEQ ID NO: 1414846 - RNA, 19 nt, Homo sapiens
  misc_RNA (1)...(19): siRNA sense strand
ugacauguauucugaaguu

SEQ ID NO: 1414847 - RNA, 19 nt, Homo sapiens
  misc_RNA (1)...(19): siRNA sense strand
gaagaccucaagaaaguua

SEQ ID NO: 1414848 - RNA, 19 nt, Homo sapiens
  misc_RNA (1)...(19): siRNA sense strand
gcugaacgcaguauuguua

SEQ ID NO: 1414849 - RNA, 19 nt, Homo sapiens
  misc_RNA (1)...(19): siRNA sense strand
gauggugcuuguugacuua

SEQ ID NO: 1414850 - RNA, 19 nt, Homo sapiens
  misc_RNA (1)...(19): siRNA sense strand
ggacauccuuucagcaguu

SEQ ID NO: 1414851 - RNA, 19 nt, Homo sapiens
  misc_RNA (1)...(19): siRNA sense strand
gaaacacagcucuggaaua

SEQ ID NO: 1414852 - RNA, 19 nt, Homo sapiens
  misc_RNA (1)...(19): siRNA sense strand
ggaaauccuucaacaaucu

SEQ ID NO: 1414853 - RNA, 19 nt, Homo sapiens
  misc_RNA (1)...(19): siRNA sense strand
gcagauaauugaaggaaag

SEQ ID NO: 1414854 - RNA, 19 nt, Homo sapiens
  misc_RNA (1)...(19): siRNA sense strand
ugaaagcauugaagcuaua

SEQ ID NO: 1414855 - RNA, 19 nt, Homo sapiens
  misc_RNA (1)...(19): siRNA sense strand
ggaaagagcaugaugacau

SEQ ID NO: 1414856 - RNA, 19 nt, Homo sapiens
  misc_RNA (1)...(19): siRNA sense strand
ucacgaagcauuuaucauu

SEQ ID NO: 1414857 - RNA, 19 nt, Homo sapiens
  misc_RNA (1)...(19): siRNA sense strand
gcaguucucuucucugaca

SEQ ID NO: 1414858 - RNA, 19 nt, Homo sapiens
  misc_RNA (1)...(19): siRNA sense strand
uuaaagagguauuggaaga

SEQ ID NO: 1414859 - RNA, 19 nt, Homo sapiens
  misc_RNA (1)...(19): siRNA sense strand
aaacugaaauucucuccaa

SEQ ID NO: 1414860 - RNA, 19 nt, Homo sapiens
  misc_RNA (1)...(19): siRNA sense strand
ggcaacaacuuacaaauac

SEQ ID NO: 1414861 - RNA, 19 nt, Homo sapiens
  misc_RNA (1)...(19): siRNA sense strand
gaagaccgauccauaucug

SEQ ID NO: 1414862 - RNA, 19 nt, Homo sapiens
  misc_RNA (1)...(19): siRNA sense strand
ugaccggaaugaacuauuu

SEQ ID NO: 1414863 - RNA, 19 nt, Homo sapiens
  misc_RNA (1)...(19): siRNA sense strand
caaugaaagcuuuagguua

SEQ ID NO: 1414864 - RNA, 19 nt, Homo sapiens
  misc_RNA (1)...(19): siRNA sense strand
ggaccuuagugaauauaaa

SEQ ID NO: 1414865 - RNA, 19 nt, Homo sapiens
  misc_RNA (1)...(19): siRNA sense strand
ggaaauugaugaguauauc

SEQ ID NO: 1414866 - RNA, 19 nt, Homo sapiens
  misc_RNA (1)...(19): siRNA sense strand
cggaagaccucaagaaagu

SEQ ID NO: 1414867 - RNA, 19 nt, Homo sapiens
  misc_RNA (1)...(19): siRNA sense strand
gcaucaaguuuauagaaga

SEQ ID NO: 1414868 - RNA, 19 nt, Homo sapiens
  misc_RNA (1)...(19): siRNA sense strand
gcacccagcuuaucuugca

SEQ ID NO: 1414869 - RNA, 19 nt, Homo sapiens
  misc_RNA (1)...(19): siRNA sense strand
ggaagaaucggacccaaga

SEQ ID NO: 1414870 - RNA, 19 nt, Homo sapiens
  misc_RNA (1)...(19): siRNA sense strand
ugaaauccuugaugaaguu

SEQ ID NO: 1414871 - RNA, 19 nt, Homo sapiens
  misc_RNA (1)...(19): siRNA sense strand
gcugauaguuucaaagcaa

SEQ ID NO: 1414872 - RNA, 19 nt, Homo sapiens
  misc_RNA (1)...(19): siRNA sense strand
gagaccauauccuuaaaug

SEQ ID NO: 1414873 - RNA, 19 nt, Homo sapiens
  misc_RNA (1)...(19): siRNA sense strand
uaaagaggccguuaaggaa

SEQ ID NO: 1414874 - RNA, 19 nt, Homo sapiens
  misc_RNA (1)...(19): siRNA sense strand
guagauccaagcuugauua

SEQ ID NO: 1414875 - RNA, 19 nt, Homo sapiens
  misc_RNA (1)...(19): siRNA sense strand
uggagaagauguugaaaug

SEQ ID NO: 1414876 - RNA, 19 nt, Homo sapiens
  misc_RNA (1)...(19): siRNA sense strand
cagcaguucucuucucuga

SEQ ID NO: 1414877 - RNA, 19 nt, Homo sapiens
  misc_RNA (1)...(19): siRNA sense strand
gaugacacguucuccaguu

SEQ ID NO: 1414878 - RNA, 19 nt, Homo sapiens
  misc_RNA (1)...(19): siRNA sense strand
caaaggcauucaucauaga

SEQ ID NO: 1414879 - RNA, 19 nt, Homo sapiens
  misc_RNA (1)...(19): siRNA sense strand
gauaugauaccggaccuua

SEQ ID NO: 1414880 - RNA, 19 nt, Homo sapiens
  misc_RNA (1)...(19): siRNA sense strand
gggaugcagcuauuuauuu

SEQ ID NO: 1414881 - RNA, 19 nt, Homo sapiens
  misc_RNA (1)...(19): siRNA sense strand
ccaagugacuacaagaaau

SEQ ID NO: 1414882 - RNA, 19 nt, Homo sapiens
  misc_RNA (1)...(19): siRNA sense strand
ugauugacauguauucuga

SEQ ID NO: 1414883 - RNA, 19 nt, Homo sapiens
  misc_RNA (1)...(19): siRNA sense strand
uaauaaagcaguagagguu

SEQ ID NO: 1414884 - RNA, 19 nt, Homo sapiens
  misc_RNA (1)...(19): siRNA sense strand
cauugaagcuauaagagaa

SEQ ID NO: 1414885 - RNA, 19 nt, Homo sapiens
  misc_RNA (1)...(19): siRNA sense strand
ggauucagcagauaauuga

SEQ ID NO: 1414886 - RNA, 19 nt, Homo sapiens
  misc_RNA (1)...(19): siRNA sense strand
aaacuucgcuaucucauac

SEQ ID NO: 1414887 - RNA, 19 nt, Homo sapiens
  misc_RNA (1)...(19): siRNA sense strand
acaaugaaaccaagaauga

SEQ ID NO: 1414888 - RNA, 19 nt, Homo sapiens
  misc_RNA (1)...(19): siRNA sense strand
caaauggacccucauggaa

SEQ ID NO: 1414889 - RNA, 19 nt, Homo sapiens
  misc_RNA (1)...(19): siRNA sense strand
ugaaauagaacuucgaaug

SEQ ID NO: 1414890 - RNA, 19 nt, Homo sapiens
  misc_RNA (1)...(19): siRNA sense strand
uaccggaccuuagugaaua

SEQ ID NO: 1414891 - RNA, 19 nt, Homo sapiens
  misc_RNA (1)...(19): siRNA sense strand
gggaacagcucugaaagca

SEQ ID NO: 1414892 - RNA, 19 nt, Homo sapiens
  misc_RNA (1)...(19): siRNA sense strand
ugacaaaccuuccuuuacg

SEQ ID NO: 1414893 - RNA, 19 nt, Homo sapiens
  misc_RNA (1)...(19): siRNA sense strand
gaacaacaggcugauaguu

SEQ ID NO: 1414894 - RNA, 19 nt, Homo sapiens
  misc_RNA (1)...(19): siRNA sense strand
gauguucucucugauuaug

SEQ ID NO: 1414895 - RNA, 19 nt, Homo sapiens
  misc_RNA (1)...(19): siRNA sense strand
gcauuuaucauucacauca

SEQ ID NO: 1414896 - RNA, 19 nt, Homo sapiens
  misc_RNA (1)...(19): siRNA sense strand
ggaugcagcuauuuauuuu

SEQ ID NO: 1414897 - RNA, 19 nt, Homo sapiens
  misc_RNA (1)...(19): siRNA sense strand
gaacuugaccggaaugaac

SEQ ID NO: 1414898 - RNA, 19 nt, Homo sapiens
  misc_RNA (1)...(19): siRNA sense strand
ggauggugcuuguugacuu

SEQ ID NO: 1414899 - RNA, 19 nt, Homo sapiens
  misc_RNA (1)...(19): siRNA sense strand
acaaaggcauucaucauag

SEQ ID NO: 1414900 - RNA, 19 nt, Homo sapiens
  misc_RNA (1)...(19): siRNA sense strand
acacucaguugaaguauca

SEQ ID NO: 1414901 - RNA, 19 nt, Homo sapiens
  misc_RNA (1)...(19): siRNA sense strand
gaaagugacaagcauuuua

SEQ ID NO: 1414902 - RNA, 19 nt, Homo sapiens
  misc_RNA (1)...(19): siRNA sense strand
gacauugugugggaaauug

SEQ ID NO: 1414903 - RNA, 19 nt, Homo sapiens
  misc_RNA (1)...(19): siRNA sense strand
ggaaguuuaccacuacaaa

SEQ ID NO: 1414904 - RNA, 19 nt, Homo sapiens
  misc_RNA (1)...(19): siRNA sense strand
gcucgaauauucccaagag

SEQ ID NO: 1414905 - RNA, 19 nt, Homo sapiens
  misc_RNA (1)...(19): siRNA sense strand
gaaagaugacaaaggcauu

SEQ ID NO: 1414906 - RNA, 19 nt, Homo sapiens
  misc_RNA (1)...(19): siRNA sense strand
uugauguucucucugauua

SEQ ID NO: 1414907 - RNA, 19 nt, Homo sapiens
  misc_RNA (1)...(19): siRNA sense strand
aaagagguauuggaagauu

SEQ ID NO: 1414908 - RNA, 19 nt, Homo sapiens
  misc_RNA (1)...(19): siRNA sense strand
gggagacccuacaagaaga

SEQ ID NO: 1414909 - RNA, 19 nt, Homo sapiens
  misc_RNA (1)...(19): siRNA sense strand
gaauccuaaugccaucaua

SEQ ID NO: 1414910 - RNA, 19 nt, Homo sapiens
  misc_RNA (1)...(19): siRNA sense strand
agaagaucuugcagcauua

SEQ ID NO: 1414911 - RNA, 19 nt, Homo sapiens
  misc_RNA (1)...(19): siRNA sense strand
caucauagaaagcuuaaga

SEQ ID NO: 1414912 - RNA, 19 nt, Homo sapiens
  misc_RNA (1)...(19): siRNA sense strand
gaagaauuuucccgcuuua

SEQ ID NO: 1414913 - RNA, 19 nt, Homo sapiens
  misc_RNA (1)...(19): siRNA sense strand
caguggauaucaagcuuaa

SEQ ID NO: 1414914 - RNA, 19 nt, Homo sapiens
  misc_RNA (1)...(19): siRNA sense strand
gcauugaagcuauaagaga

SEQ ID NO: 1414915 - RNA, 19 nt, Homo sapiens
  misc_RNA (1)...(19): siRNA sense strand
gaaagcucuucccaaugaa

SEQ ID NO: 1414916 - RNA, 19 nt, Homo sapiens
  misc_RNA (1)...(19): siRNA sense strand
ugacuuaccaggugugauu

SEQ ID NO: 1414917 - RNA, 19 nt, Homo sapiens
  misc_RNA (1)...(19): siRNA sense strand
ggaaaugauugcccaagcu

SEQ ID NO: 1414918 - RNA, 19 nt, Homo sapiens
  misc_RNA (1)...(19): siRNA sense strand
acacagcucuggaauaaaa

SEQ ID NO: 1414919 - RNA, 19 nt, Homo sapiens
  misc_RNA (1)...(19): siRNA sense strand
ugugggaaauugaugagua

SEQ ID NO: 1414920 - RNA, 19 nt, Homo sapiens
  misc_RNA (1)...(19): siRNA sense strand
cuaaaccauuguaaccuuu

SEQ ID NO: 1414921 - RNA, 19 nt, Homo sapiens
  misc_RNA (1)...(19): siRNA sense strand
agagcaugaugacauauuu

SEQ ID NO: 1414922 - RNA, 19 nt, Homo sapiens
  misc_RNA (1)...(19): siRNA sense strand
caacucaugugauugaaaa

SEQ ID NO: 1414923 - RNA, 19 nt, Homo sapiens
  misc_RNA (1)...(19): siRNA sense strand
caagugacuacaagaaauu

SEQ ID NO: 1414924 - RNA, 19 nt, Homo sapiens
  misc_RNA (1)...(19): siRNA sense strand
gcuaaaggcacaccaagug

SEQ ID NO: 1414925 - RNA, 19 nt, Homo sapiens
  misc_RNA (1)...(19): siRNA sense strand
gagaauaugaagaagaguu

SEQ ID NO: 1414926 - RNA, 19 nt, Homo sapiens
  misc_RNA (1)...(19): siRNA sense strand
gcaguauuguuacagacuu

SEQ ID NO: 1414927 - RNA, 19 nt, Homo sapiens
  misc_RNA (1)...(19): siRNA sense strand
uggaaagacuaguguguug

SEQ ID NO: 1414928 - RNA, 19 nt, Homo sapiens
  misc_RNA (1)...(19): siRNA sense strand
ggagaacaaagaauugaga

SEQ ID NO: 1414929 - RNA, 19 nt, Homo sapiens
  misc_RNA (1)...(19): siRNA sense strand
gaaagagcaugaugacaua

SEQ ID NO: 1414930 - RNA, 19 nt, Homo sapiens
  misc_RNA (1)...(19): siRNA sense strand
gaacagcucugaaagcauu

SEQ ID NO: 1414931 - RNA, 19 nt, Homo sapiens
  misc_RNA (1)...(19): siRNA sense strand
gagaagauguugaaaugua

SEQ ID NO: 1414932 - RNA, 19 nt, Homo sapiens
  misc_RNA (1)...(19): siRNA sense strand
gaggacagcuugaggguua

SEQ ID NO: 1414933 - RNA, 19 nt, Homo sapiens
  misc_RNA (1)...(19): siRNA sense strand
gaaacugaauggaagaaua

SEQ ID NO: 1414934 - RNA, 19 nt, Homo sapiens
  misc_RNA (1)...(19): siRNA sense strand
aaagaaggcuguaccguua

SEQ ID NO: 1414935 - RNA, 19 nt, Homo sapiens
  misc_RNA (1)...(19): siRNA sense strand
aaacacagcucuggaauaa

SEQ ID NO: 1414936 - RNA, 19 nt, Homo sapiens
  misc_RNA (1)...(19): siRNA sense strand
gaaauagaacuucgaauga

SEQ ID NO: 1414937 - RNA, 19 nt, Homo sapiens
  misc_RNA (1)...(19): siRNA sense strand
gcaaugauguggucuuguu

SEQ ID NO: 1414938 - RNA, 19 nt, Homo sapiens
  misc_RNA (1)...(19): siRNA sense strand
gaccauauccuuaaaugua

SEQ ID NO: 1414939 - RNA, 19 nt, Homo sapiens
  misc_RNA (1)...(19): siRNA sense strand
gcaaugggaugcagcuauu

SEQ ID NO: 1414940 - RNA, 19 nt, Homo sapiens
  misc_RNA (1)...(19): siRNA sense strand
cagcuuaucuugcaaguga

SEQ ID NO: 1414941 - RNA, 19 nt, Homo sapiens
  misc_RNA (1)...(19): siRNA sense strand
gaaguuaggcgauuagaga

SEQ ID NO: 1414942 - RNA, 19 nt, Homo sapiens
  misc_RNA (1)...(19): siRNA sense strand
gacaaaggcauucaucaua

SEQ ID NO: 1414943 - RNA, 19 nt, Homo sapiens
  misc_RNA (1)...(19): siRNA sense strand
gauccaagcuugauuaagg

SEQ ID NO: 1414944 - RNA, 19 nt, Homo sapiens
  misc_RNA (1)...(19): siRNA sense strand
ggaagaaaguauuaaacga

SEQ ID NO: 1414945 - RNA, 19 nt, Homo sapiens
  misc_RNA (1)...(19): siRNA sense strand
aaacagcucuaaaccauug

SEQ ID NO: 1414946 - RNA, 19 nt, Homo sapiens
  misc_RNA (1)...(19): siRNA sense strand
ugacauguauucugaaguu

SEQ ID NO: 1414947 - RNA, 19 nt, Homo sapiens
  misc_RNA (1)...(19): siRNA sense strand
gaagaccucaagaaaguua

SEQ ID NO: 1414948 - RNA, 19 nt, Homo sapiens
  misc_RNA (1)...(19): siRNA sense strand
gcugaacgcaguauuguua

SEQ ID NO: 1414949 - RNA, 19 nt, Homo sapiens
  misc_RNA (1)...(19): siRNA sense strand
gauggugcuuguugacuua

SEQ ID NO: 1414950 - RNA, 19 nt, Homo sapiens
  misc_RNA (1)...(19): siRNA sense strand
ggacauccuuucagcaguu

SEQ ID NO: 1414951 - RNA, 19 nt, Homo sapiens
  misc_RNA (1)...(19): siRNA sense strand
gaaacacagcucuggaaua

SEQ ID NO: 1414952 - RNA, 19 nt, Homo sapiens
  misc_RNA (1)...(19): siRNA sense strand
ggaaauccuucaacaaucu

SEQ ID NO: 1414953 - RNA, 19 nt, Homo sapiens
  misc_RNA (1)...(19): siRNA sense strand
gcagauaauugaaggaaag

SEQ ID NO: 1414954 - RNA, 19 nt, Homo sapiens
  misc_RNA (1)...(19): siRNA sense strand
ugaaagcauugaagcuaua

SEQ ID NO: 1414955 - RNA, 19 nt, Homo sapiens
  misc_RNA (1)...(19): siRNA sense strand
ggaaagagcaugaugacau

SEQ ID NO: 1414956 - RNA, 19 nt, Homo sapiens
  misc_RNA (1)...(19): siRNA sense strand
ucacgaagcauuuaucauu

SEQ ID NO: 1414957 - RNA, 19 nt, Homo sapiens
  misc_RNA (1)...(19): siRNA sense strand
gcaguucucuucucugaca

SEQ ID NO: 1414958 - RNA, 19 nt, Homo sapiens
  misc_RNA (1)...(19): siRNA sense strand
uuaaagagguauuggaaga

SEQ ID NO: 1414959 - RNA, 19 nt, Homo sapiens
  misc_RNA (1)...(19): siRNA sense strand
aaacugaaauucucuccaa

SEQ ID NO: 1414960 - RNA, 19 nt, Homo sapiens
  misc_RNA (1)...(19): siRNA sense strand
ggcaacaacuuacaaauac

SEQ ID NO: 1414961 - RNA, 19 nt, Homo sapiens
  misc_RNA (1)...(19): siRNA sense strand
gaagaccgauccauaucug

SEQ ID NO: 1414962 - RNA, 19 nt, Homo sapiens
  misc_RNA (1)...(19): siRNA sense strand
ugaccggaaugaacuauuu

SEQ ID NO: 1414963 - RNA, 19 nt, Homo sapiens
  misc_RNA (1)...(19): siRNA sense strand
caaugaaagcuuuagguua

SEQ ID NO: 1414964 - RNA, 19 nt, Homo sapiens
  misc_RNA (1)...(19): siRNA sense strand
ggaccuuagugaauauaaa

SEQ ID NO: 1414965 - RNA, 19 nt, Homo sapiens
  misc_RNA (1)...(19): siRNA sense strand
ggaaauugaugaguauauc

SEQ ID NO: 1414966 - RNA, 19 nt, Homo sapiens
  misc_RNA (1)...(19): siRNA sense strand
cggaagaccucaagaaagu

SEQ ID NO: 1414967 - RNA, 19 nt, Homo sapiens
  misc_RNA (1)...(19): siRNA sense strand
gcaucaaguuuauagaaga

SEQ ID NO: 1414968 - RNA, 19 nt, Homo sapiens
  misc_RNA (1)...(19): siRNA sense strand
gcacccagcuuaucuugca

SEQ ID NO: 1414969 - RNA, 19 nt, Homo sapiens
  misc_RNA (1)...(19): siRNA sense strand
ggaagaaucggacccaaga

SEQ ID NO: 1414970 - RNA, 19 nt, Homo sapiens
  misc_RNA (1)...(19): siRNA sense strand
ugaaauccuugaugaaguu

SEQ ID NO: 1414971 - RNA, 19 nt, Homo sapiens
  misc_RNA (1)...(19): siRNA sense strand
gcugauaguuucaaagcaa

SEQ ID NO: 1414972 - RNA, 19 nt, Homo sapiens
  misc_RNA (1)...(19): siRNA sense strand
gagaccauauccuuaaaug

SEQ ID NO: 1414973 - RNA, 19 nt, Homo sapiens
  misc_RNA (1)...(19): siRNA sense strand
uaaagaggccguuaaggaa

SEQ ID NO: 1414974 - RNA, 19 nt, Homo sapiens
  misc_RNA (1)...(19): siRNA sense strand
guagauccaagcuugauua

SEQ ID NO: 1414975 - RNA, 19 nt, Homo sapiens
  misc_RNA (1)...(19): siRNA sense strand
uggagaagauguugaaaug

SEQ ID NO: 1414976 - RNA, 19 nt, Homo sapiens
  misc_RNA (1)...(19): siRNA sense strand
cagcaguucucuucucuga

SEQ ID NO: 1414977 - RNA, 19 nt, Homo sapiens
  misc_RNA (1)...(19): siRNA sense strand
gaugacacguucuccaguu

SEQ ID NO: 1414978 - RNA, 19 nt, Homo sapiens
  misc_RNA (1)...(19): siRNA sense strand
caaaggcauucaucauaga

SEQ ID NO: 1414979 - RNA, 19 nt, Homo sapiens
  misc_RNA (1)...(19): siRNA sense strand
gauaugauaccggaccuua

SEQ ID NO: 1414980 - RNA, 19 nt, Homo sapiens
  misc_RNA (1)...(19): siRNA sense strand
gggaugcagcuauuuauuu

SEQ ID NO: 1414981 - RNA, 19 nt, Homo sapiens
  misc_RNA (1)...(19): siRNA sense strand
ccaagugacuacaagaaau

SEQ ID NO: 1414982 - RNA, 19 nt, Homo sapiens
  misc_RNA (1)...(19): siRNA sense strand
ugauugacauguauucuga

SEQ ID NO: 1414983 - RNA, 19 nt, Homo sapiens
  misc_RNA (1)...(19): siRNA sense strand
uaauaaagcaguagagguu

SEQ ID NO: 1414984 - RNA, 19 nt, Homo sapiens
  misc_RNA (1)...(19): siRNA sense strand
cauugaagcuauaagagaa

SEQ ID NO: 1414985 - RNA, 19 nt, Homo sapiens
  misc_RNA (1)...(19): siRNA sense strand
ggauucagcagauaauuga

SEQ ID NO: 1414986 - RNA, 19 nt, Homo sapiens
  misc_RNA (1)...(19): siRNA sense strand
aaacuucgcuaucucauac

SEQ ID NO: 1414987 - RNA, 19 nt, Homo sapiens
  misc_RNA (1)...(19): siRNA sense strand
acaaugaaaccaagaauga

SEQ ID NO: 1414988 - RNA, 19 nt, Homo sapiens
  misc_RNA (1)...(19): siRNA sense strand
caaauggacccucauggaa

SEQ ID NO: 1414989 - RNA, 19 nt, Homo sapiens
  misc_RNA (1)...(19): siRNA sense strand
ugaaauagaacuucgaaug

SEQ ID NO: 1414990 - RNA, 19 nt, Homo sapiens
  misc_RNA (1)...(19): siRNA sense strand
uaccggaccuuagugaaua

SEQ ID NO: 1414991 - RNA, 19 nt, Homo sapiens
  misc_RNA (1)...(19): siRNA sense strand
gggaacagcucugaaagca

SEQ ID NO: 1414992 - RNA, 19 nt, Homo sapiens
  misc_RNA (1)...(19): siRNA sense strand
ugacaaaccuuccuuuacg

SEQ ID NO: 1414993 - RNA, 19 nt, Homo sapiens
  misc_RNA (1)...(19): siRNA sense strand
gaacaacaggcugauaguu

SEQ ID NO: 1414994 - RNA, 19 nt, Homo sapiens
  misc_RNA (1)...(19): siRNA sense strand
gauguucucucugauuaug

SEQ ID NO: 1414995 - RNA, 19 nt, Homo sapiens
  misc_RNA (1)...(19): siRNA sense strand
gcauuuaucauucacauca

SEQ ID NO: 1414996 - RNA, 19 nt, Homo sapiens
  misc_RNA (1)...(19): siRNA sense strand
ggaugcagcuauuuauuuu

SEQ ID NO: 1414997 - RNA, 19 nt, Homo sapiens
  misc_RNA (1)...(19): siRNA sense strand
gaacuugaccggaaugaac

SEQ ID NO: 1414998 - RNA, 19 nt, Homo sapiens
  misc_RNA (1)...(19): siRNA sense strand
ggauggugcuuguugacuu

SEQ ID NO: 1414999 - RNA, 19 nt, Homo sapiens
  misc_RNA (1)...(19): siRNA sense strand
acaaaggcauucaucauag

SEQ ID NO: 1415000 - RNA, 19 nt, Homo sapiens
  misc_RNA (1)...(19): siRNA sense strand
acacucaguugaaguauca

SEQ ID NO: 1415001 - RNA, 19 nt, Homo sapiens
  misc_RNA (1)...(19): siRNA sense strand
gaaagugacaagcauuuua

SEQ ID NO: 1415002 - RNA, 19 nt, Homo sapiens
  misc_RNA (1)...(19): siRNA sense strand
gacauugugugggaaauug

SEQ ID NO: 1415003 - RNA, 19 nt, Homo sapiens
  misc_RNA (1)...(19): siRNA sense strand
ggaaguuuaccacuacaaa

SEQ ID NO: 1415004 - RNA, 19 nt, Homo sapiens
  misc_RNA (1)...(19): siRNA sense strand
gcucgaauauucccaagag

SEQ ID NO: 1415005 - RNA, 19 nt, Homo sapiens
  misc_RNA (1)...(19): siRNA sense strand
gaaagaugacaaaggcauu

SEQ ID NO: 1415006 - RNA, 19 nt, Homo sapiens
  misc_RNA (1)...(19): siRNA sense strand
uugauguucucucugauua

SEQ ID NO: 1415007 - RNA, 19 nt, Homo sapiens
  misc_RNA (1)...(19): siRNA sense strand
aaagagguauuggaagauu

SEQ ID NO: 1415008 - RNA, 19 nt, Homo sapiens
  misc_RNA (1)...(19): siRNA sense strand
gggagacccuacaagaaga

SEQ ID NO: 1415009 - RNA, 19 nt, Homo sapiens
  misc_RNA (1)...(19): siRNA sense strand
gaauccuaaugccaucaua

SEQ ID NO: 1415010 - RNA, 19 nt, Homo sapiens
  misc_RNA (1)...(19): siRNA sense strand
agaagaucuugcagcauua

SEQ ID NO: 1415011 - RNA, 19 nt, Homo sapiens
  misc_RNA (1)...(19): siRNA sense strand
caucauagaaagcuuaaga

SEQ ID NO: 1415012 - RNA, 19 nt, Homo sapiens
  misc_RNA (1)...(19): siRNA sense strand
gaagaauuuucccgcuuua

SEQ ID NO: 1415013 - RNA, 19 nt, Homo sapiens
  misc_RNA (1)...(19): siRNA sense strand
caguggauaucaagcuuaa

SEQ ID NO: 1415014 - RNA, 19 nt, Homo sapiens
  misc_RNA (1)...(19): siRNA sense strand
gcauugaagcuauaagaga

SEQ ID NO: 1415015 - RNA, 19 nt, Homo sapiens
  misc_RNA (1)...(19): siRNA sense strand
gaaagcucuucccaaugaa

SEQ ID NO: 1415016 - RNA, 19 nt, Homo sapiens
  misc_RNA (1)...(19): siRNA sense strand
ugacuuaccaggugugauu

SEQ ID NO: 1415017 - RNA, 19 nt, Homo sapiens
  misc_RNA (1)...(19): siRNA sense strand
ggaaaugauugcccaagcu

SEQ ID NO: 1415018 - RNA, 19 nt, Homo sapiens
  misc_RNA (1)...(19): siRNA sense strand
acacagcucuggaauaaaa

SEQ ID NO: 1415019 - RNA, 19 nt, Homo sapiens
  misc_RNA (1)...(19): siRNA sense strand
ugugggaaauugaugagua

SEQ ID NO: 1415020 - RNA, 19 nt, Homo sapiens
  misc_RNA (1)...(19): siRNA sense strand
cuaaaccauuguaaccuuu

SEQ ID NO: 1415021 - RNA, 19 nt, Homo sapiens
  misc_RNA (1)...(19): siRNA sense strand
agagcaugaugacauauuu

SEQ ID NO: 1415022 - RNA, 19 nt, Homo sapiens
  misc_RNA (1)...(19): siRNA sense strand
caacucaugugauugaaaa

SEQ ID NO: 1415023 - RNA, 19 nt, Homo sapiens
  misc_RNA (1)...(19): siRNA sense strand
caagugacuacaagaaauu

SEQ ID NO: 1415024 - RNA, 19 nt, Homo sapiens
  misc_RNA (1)...(19): siRNA sense strand
gcuaaaggcacaccaagug

SEQ ID NO: 1415025 - RNA, 19 nt, Homo sapiens
  misc_RNA (1)...(19): siRNA sense strand
gagaauaugaagaagaguu

SEQ ID NO: 1415026 - RNA, 19 nt, Homo sapiens
  misc_RNA (1)...(19): siRNA sense strand
gcaguauuguuacagacuu

SEQ ID NO: 1415027 - RNA, 19 nt, Homo sapiens
  misc_RNA (1)...(19): siRNA sense strand
uggaaagacuaguguguug

SEQ ID NO: 1415028 - RNA, 19 nt, Homo sapiens
  misc_RNA (1)...(19): siRNA sense strand
ggagaacaaagaauugaga

SEQ ID NO: 1415029 - RNA, 19 nt, Homo sapiens
  misc_RNA (1)...(19): siRNA sense strand
gaaagagcaugaugacaua

SEQ ID NO: 1415030 - RNA, 19 nt, Homo sapiens
  misc_RNA (1)...(19): siRNA sense strand
gaacagcucugaaagcauu

SEQ ID NO: 1415031 - RNA, 19 nt, Homo sapiens
  misc_RNA (1)...(19): siRNA sense strand
gagaagauguugaaaugua

SEQ ID NO: 1415032 - RNA, 19 nt, Homo sapiens
  misc_RNA (1)...(19): siRNA sense strand
gaggacagcuugaggguua

SEQ ID NO: 1415033 - RNA, 19 nt, Homo sapiens
  misc_RNA (1)...(19): siRNA sense strand
gaaacugaauggaagaaua

SEQ ID NO: 1415034 - RNA, 19 nt, Homo sapiens
  misc_RNA (1)...(19): siRNA sense strand
aaagaaggcuguaccguua

SEQ ID NO: 1415035 - RNA, 19 nt, Homo sapiens
  misc_RNA (1)...(19): siRNA sense strand
aaacacagcucuggaauaa

SEQ ID NO: 1415036 - RNA, 19 nt, Homo sapiens
  misc_RNA (1)...(19): siRNA sense strand
gaaauagaacuucgaauga

SEQ ID NO: 1415037 - RNA, 19 nt, Homo sapiens
  misc_RNA (1)...(19): siRNA sense strand
gcaaugauguggucuuguu

SEQ ID NO: 1415038 - RNA, 19 nt, Homo sapiens
  misc_RNA (1)...(19): siRNA sense strand
gaccauauccuuaaaugua

SEQ ID NO: 1415039 - RNA, 19 nt, Homo sapiens
  misc_RNA (1)...(19): siRNA sense strand
gcaaugggaugcagcuauu

SEQ ID NO: 1415040 - RNA, 19 nt, Homo sapiens
  misc_RNA (1)...(19): siRNA sense strand
cagcuuaucuugcaaguga

SEQ ID NO: 1415041 - RNA, 19 nt, Homo sapiens
  misc_RNA (1)...(19): siRNA sense strand
gaaguuaggcgauuagaga

SEQ ID NO: 1415042 - RNA, 19 nt, Homo sapiens
  misc_RNA (1)...(19): siRNA sense strand
gacaaaggcauucaucaua

SEQ ID NO: 1415043 - RNA, 19 nt, Homo sapiens
  misc_RNA (1)...(19): siRNA sense strand
gauccaagcuugauuaagg

SEQ ID NO: 1415044 - RNA, 19 nt, Homo sapiens
  misc_RNA (1)...(19): siRNA sense strand
ggaagaaaguauuaaacga

SEQ ID NO: 1415045 - RNA, 19 nt, Homo sapiens
  misc_RNA (1)...(19): siRNA sense strand
aaacagcucuaaaccauug

SEQ ID NO: 1415046 - RNA, 19 nt, Homo sapiens
  misc_RNA (1)...(19): siRNA sense strand
ugacauguauucugaaguu

SEQ ID NO: 1415047 - RNA, 19 nt, Homo sapiens
  misc_RNA (1)...(19): siRNA sense strand
gaagaccucaagaaaguua

SEQ ID NO: 1415048 - RNA, 19 nt, Homo sapiens
  misc_RNA (1)...(19): siRNA sense strand
gcugaacgcaguauuguua

SEQ ID NO: 1415049 - RNA, 19 nt, Homo sapiens
  misc_RNA (1)...(19): siRNA sense strand
gauggugcuuguugacuua

SEQ ID NO: 1415050 - RNA, 19 nt, Homo sapiens
  misc_RNA (1)...(19): siRNA sense strand
ggacauccuuucagcaguu

SEQ ID NO: 1415051 - RNA, 19 nt, Homo sapiens
  misc_RNA (1)...(19): siRNA sense strand
gaaacacagcucuggaaua

SEQ ID NO: 1415052 - RNA, 19 nt, Homo sapiens
  misc_RNA (1)...(19): siRNA sense strand
ggaaauccuucaacaaucu

SEQ ID NO: 1415053 - RNA, 19 nt, Homo sapiens
  misc_RNA (1)...(19): siRNA sense strand
gcagauaauugaaggaaag

SEQ ID NO: 1415054 - RNA, 19 nt, Homo sapiens
  misc_RNA (1)...(19): siRNA sense strand
ugaaagcauugaagcuaua

SEQ ID NO: 1415055 - RNA, 19 nt, Homo sapiens
  misc_RNA (1)...(19): siRNA sense strand
ggaaagagcaugaugacau

SEQ ID NO: 1415056 - RNA, 19 nt, Homo sapiens
  misc_RNA (1)...(19): siRNA sense strand
ucacgaagcauuuaucauu

SEQ ID NO: 1415057 - RNA, 19 nt, Homo sapiens
  misc_RNA (1)...(19): siRNA sense strand
gcaguucucuucucugaca

SEQ ID NO: 1415058 - RNA, 19 nt, Homo sapiens
  misc_RNA (1)...(19): siRNA sense strand
uuaaagagguauuggaaga

SEQ ID NO: 1415059 - RNA, 19 nt, Homo sapiens
  misc_RNA (1)...(19): siRNA sense strand
aaacugaaauucucuccaa

SEQ ID NO: 1415060 - RNA, 19 nt, Homo sapiens
  misc_RNA (1)...(19): siRNA sense strand
ggcaacaacuuacaaauac

SEQ ID NO: 1415061 - RNA, 19 nt, Homo sapiens
  misc_RNA (1)...(19): siRNA sense strand
gaagaccgauccauaucug

SEQ ID NO: 1415062 - RNA, 19 nt, Homo sapiens
  misc_RNA (1)...(19): siRNA sense strand
ugaccggaaugaacuauuu

SEQ ID NO: 1415063 - RNA, 19 nt, Homo sapiens
  misc_RNA (1)...(19): siRNA sense strand
caaugaaagcuuuagguua

SEQ ID NO: 1415064 - RNA, 19 nt, Homo sapiens
  misc_RNA (1)...(19): siRNA sense strand
ggaccuuagugaauauaaa

SEQ ID NO: 1415065 - RNA, 19 nt, Homo sapiens
  misc_RNA (1)...(19): siRNA sense strand
ggaaauugaugaguauauc

SEQ ID NO: 1415066 - RNA, 19 nt, Homo sapiens
  misc_RNA (1)...(19): siRNA sense strand
cggaagaccucaagaaagu

SEQ ID NO: 1415067 - RNA, 19 nt, Homo sapiens
  misc_RNA (1)...(19): siRNA sense strand
gcaucaaguuuauagaaga

SEQ ID NO: 1415068 - RNA, 19 nt, Homo sapiens
  misc_RNA (1)...(19): siRNA sense strand
gcacccagcuuaucuugca

SEQ ID NO: 1415069 - RNA, 19 nt, Homo sapiens
  misc_RNA (1)...(19): siRNA sense strand
ggaagaaucggacccaaga

SEQ ID NO: 1415070 - RNA, 19 nt, Homo sapiens
  misc_RNA (1)...(19): siRNA sense strand
ugaaauccuugaugaaguu

SEQ ID NO: 1415071 - RNA, 19 nt, Homo sapiens
  misc_RNA (1)...(19): siRNA sense strand
gcugauaguuucaaagcaa

SEQ ID NO: 1415072 - RNA, 19 nt, Homo sapiens
  misc_RNA (1)...(19): siRNA sense strand
gagaccauauccuuaaaug

SEQ ID NO: 1415073 - RNA, 19 nt, Homo sapiens
  misc_RNA (1)...(19): siRNA sense strand
uaaagaggccguuaaggaa

SEQ ID NO: 1415074 - RNA, 19 nt, Homo sapiens
  misc_RNA (1)...(19): siRNA sense strand
guagauccaagcuugauua

SEQ ID NO: 1415075 - RNA, 19 nt, Homo sapiens
  misc_RNA (1)...(19): siRNA sense strand
uggagaagauguugaaaug

SEQ ID NO: 1415076 - RNA, 19 nt, Homo sapiens
  misc_RNA (1)...(19): siRNA sense strand
cagcaguucucuucucuga

SEQ ID NO: 1415077 - RNA, 19 nt, Homo sapiens
  misc_RNA (1)...(19): siRNA sense strand
gaugacacguucuccaguu

SEQ ID NO: 1415078 - RNA, 19 nt, Homo sapiens
  misc_RNA (1)...(19): siRNA sense strand
caaaggcauucaucauaga

SEQ ID NO: 1415079 - RNA, 19 nt, Homo sapiens
  misc_RNA (1)...(19): siRNA sense strand
gauaugauaccggaccuua

SEQ ID NO: 1415080 - RNA, 19 nt, Homo sapiens
  misc_RNA (1)...(19): siRNA sense strand
gggaugcagcuauuuauuu

SEQ ID NO: 1415081 - RNA, 19 nt, Homo sapiens
  misc_RNA (1)...(19): siRNA sense strand
ccaagugacuacaagaaau

SEQ ID NO: 1415082 - RNA, 19 nt, Homo sapiens
  misc_RNA (1)...(19): siRNA sense strand
ugauugacauguauucuga

SEQ ID NO: 1415083 - RNA, 19 nt, Homo sapiens
  misc_RNA (1)...(19): siRNA sense strand
uaauaaagcaguagagguu

SEQ ID NO: 1415084 - RNA, 19 nt, Homo sapiens
  misc_RNA (1)...(19): siRNA sense strand
cauugaagcuauaagagaa

SEQ ID NO: 1415085 - RNA, 19 nt, Homo sapiens
  misc_RNA (1)...(19): siRNA sense strand
ggauucagcagauaauuga

SEQ ID NO: 1415086 - RNA, 19 nt, Homo sapiens
  misc_RNA (1)...(19): siRNA sense strand
aaacuucgcuaucucauac

SEQ ID NO: 1415087 - RNA, 19 nt, Homo sapiens
  misc_RNA (1)...(19): siRNA sense strand
acaaugaaaccaagaauga

SEQ ID NO: 1415088 - RNA, 19 nt, Homo sapiens
  misc_RNA (1)...(19): siRNA sense strand
caaauggacccucauggaa

SEQ ID NO: 1415089 - RNA, 19 nt, Homo sapiens
  misc_RNA (1)...(19): siRNA sense strand
ugaaauagaacuucgaaug

SEQ ID NO: 1415090 - RNA, 19 nt, Homo sapiens
  misc_RNA (1)...(19): siRNA sense strand
uaccggaccuuagugaaua

SEQ ID NO: 1415091 - RNA, 19 nt, Homo sapiens
  misc_RNA (1)...(19): siRNA sense strand
gggaacagcucugaaagca

SEQ ID NO: 1415092 - RNA, 19 nt, Homo sapiens
  misc_RNA (1)...(19): siRNA sense strand
ugacaaaccuuccuuuacg

SEQ ID NO: 1415093 - RNA, 19 nt, Homo sapiens
  misc_RNA (1)...(19): siRNA sense strand
gaacaacaggcugauaguu

SEQ ID NO: 1415094 - RNA, 19 nt, Homo sapiens
  misc_RNA (1)...(19): siRNA sense strand
gauguucucucugauuaug

SEQ ID NO: 1415095 - RNA, 19 nt, Homo sapiens
  misc_RNA (1)...(19): siRNA sense strand
gcauuuaucauucacauca

SEQ ID NO: 1415096 - RNA, 19 nt, Homo sapiens
  misc_RNA (1)...(19): siRNA sense strand
ggaugcagcuauuuauuuu

SEQ ID NO: 1415097 - RNA, 19 nt, Homo sapiens
  misc_RNA (1)...(19): siRNA sense strand
gaacuugaccggaaugaac

SEQ ID NO: 1415098 - RNA, 19 nt, Homo sapiens
  misc_RNA (1)...(19): siRNA sense strand
ggauggugcuuguugacuu

SEQ ID NO: 1415099 - RNA, 19 nt, Homo sapiens
  misc_RNA (1)...(19): siRNA sense strand
acaaaggcauucaucauag

SEQ ID NO: 1415100 - RNA, 19 nt, Homo sapiens
  misc_RNA (1)...(19): siRNA sense strand
acacucaguugaaguauca

SEQ ID NO: 1415101 - RNA, 19 nt, Homo sapiens
  misc_RNA (1)...(19): siRNA sense strand
gaaagugacaagcauuuua

SEQ ID NO: 1415102 - RNA, 19 nt, Homo sapiens
  misc_RNA (1)...(19): siRNA sense strand
gacauugugugggaaauug

SEQ ID NO: 1415103 - RNA, 19 nt, Homo sapiens
  misc_RNA (1)...(19): siRNA sense strand
ggaaguuuaccacuacaaa

SEQ ID NO: 1415104 - RNA, 19 nt, Homo sapiens
  misc_RNA (1)...(19): siRNA sense strand
gcucgaauauucccaagag

SEQ ID NO: 1415105 - RNA, 19 nt, Homo sapiens
  misc_RNA (1)...(19): siRNA sense strand
gaaagaugacaaaggcauu

SEQ ID NO: 1415106 - RNA, 19 nt, Homo sapiens
  misc_RNA (1)...(19): siRNA sense strand
uugauguucucucugauua

SEQ ID NO: 1415107 - RNA, 19 nt, Homo sapiens
  misc_RNA (1)...(19): siRNA sense strand
aaagagguauuggaagauu

SEQ ID NO: 1415108 - RNA, 19 nt, Homo sapiens
  misc_RNA (1)...(19): siRNA sense strand
gggagacccuacaagaaga

SEQ ID NO: 1415109 - RNA, 19 nt, Homo sapiens
  misc_RNA (1)...(19): siRNA sense strand
gaauccuaaugccaucaua

SEQ ID NO: 1415110 - RNA, 19 nt, Homo sapiens
  misc_RNA (1)...(19): siRNA sense strand
agaagaucuugcagcauua

SEQ ID NO: 1415111 - RNA, 19 nt, Homo sapiens
  misc_RNA (1)...(19): siRNA sense strand
caucauagaaagcuuaaga

SEQ ID NO: 1415112 - RNA, 19 nt, Homo sapiens
  misc_RNA (1)...(19): siRNA sense strand
gaagaauuuucccgcuuua

SEQ ID NO: 1415113 - RNA, 19 nt, Homo sapiens
  misc_RNA (1)...(19): siRNA sense strand
caguggauaucaagcuuaa

SEQ ID NO: 1415114 - RNA, 19 nt, Homo sapiens
  misc_RNA (1)...(19): siRNA sense strand
gcauugaagcuauaagaga

SEQ ID NO: 1415115 - RNA, 19 nt, Homo sapiens
  misc_RNA (1)...(19): siRNA sense strand
gaaagcucuucccaaugaa

SEQ ID NO: 1415116 - RNA, 19 nt, Homo sapiens
  misc_RNA (1)...(19): siRNA sense strand
ugacuuaccaggugugauu

SEQ ID NO: 1415117 - RNA, 19 nt, Homo sapiens
  misc_RNA (1)...(19): siRNA sense strand
ggaaaugauugcccaagcu

SEQ ID NO: 1415118 - RNA, 19 nt, Homo sapiens
  misc_RNA (1)...(19): siRNA sense strand
acacagcucuggaauaaaa

SEQ ID NO: 1415119 - RNA, 19 nt, Homo sapiens
  misc_RNA (1)...(19): siRNA sense strand
ugugggaaauugaugagua

SEQ ID NO: 1415120 - RNA, 19 nt, Homo sapiens
  misc_RNA (1)...(19): siRNA sense strand
cuaaaccauuguaaccuuu

SEQ ID NO: 1415121 - RNA, 19 nt, Homo sapiens
  misc_RNA (1)...(19): siRNA sense strand
agagcaugaugacauauuu

SEQ ID NO: 1415122 - RNA, 19 nt, Homo sapiens
  misc_RNA (1)...(19): siRNA sense strand
caacucaugugauugaaaa

SEQ ID NO: 1415123 - RNA, 19 nt, Homo sapiens
  misc_RNA (1)...(19): siRNA sense strand
caagugacuacaagaaauu

SEQ ID NO: 1415124 - RNA, 19 nt, Homo sapiens
  misc_RNA (1)...(19): siRNA sense strand
gcuaaaggcacaccaagug

SEQ ID NO: 1415125 - RNA, 19 nt, Homo sapiens
  misc_RNA (1)...(19): siRNA sense strand
gagaauaugaagaagaguu

SEQ ID NO: 1415126 - RNA, 19 nt, Homo sapiens
  misc_RNA (1)...(19): siRNA sense strand
gcaguauuguuacagacuu

SEQ ID NO: 1415127 - RNA, 19 nt, Homo sapiens
  misc_RNA (1)...(19): siRNA sense strand
uggaaagacuaguguguug

SEQ ID NO: 1415128 - RNA, 19 nt, Homo sapiens
  misc_RNA (1)...(19): siRNA sense strand
ggagaacaaagaauugaga

SEQ ID NO: 1415129 - RNA, 19 nt, Homo sapiens
  misc_RNA (1)...(19): siRNA sense strand
gaaagagcaugaugacaua

SEQ ID NO: 1415130 - RNA, 19 nt, Homo sapiens
  misc_RNA (1)...(19): siRNA sense strand
gaacagcucugaaagcauu

SEQ ID NO: 1415131 - RNA, 19 nt, Homo sapiens
  misc_RNA (1)...(19): siRNA sense strand
gagaagauguugaaaugua

SEQ ID NO: 1415132 - RNA, 19 nt, Homo sapiens
  misc_RNA (1)...(19): siRNA sense strand
gaggacagcuugaggguua

SEQ ID NO: 1415133 - RNA, 19 nt, Homo sapiens
  misc_RNA (1)...(19): siRNA sense strand
gaaacugaauggaagaaua

SEQ ID NO: 1415134 - RNA, 19 nt, Homo sapiens
  misc_RNA (1)...(19): siRNA sense strand
aaagaaggcuguaccguua

SEQ ID NO: 1415135 - RNA, 19 nt, Homo sapiens
  misc_RNA (1)...(19): siRNA sense strand
aaacacagcucuggaauaa

SEQ ID NO: 1415136 - RNA, 19 nt, Homo sapiens
  misc_RNA (1)...(19): siRNA sense strand
gaaauagaacuucgaauga

SEQ ID NO: 1415137 - RNA, 19 nt, Homo sapiens
  misc_RNA (1)...(19): siRNA sense strand
gcaaugauguggucuuguu

SEQ ID NO: 1415138 - RNA, 19 nt, Homo sapiens
  misc_RNA (1)...(19): siRNA sense strand
gaccauauccuuaaaugua

SEQ ID NO: 1415139 - RNA, 19 nt, Homo sapiens
  misc_RNA (1)...(19): siRNA sense strand
gcaaugggaugcagcuauu

SEQ ID NO: 1415140 - RNA, 19 nt, Homo sapiens
  misc_RNA (1)...(19): siRNA sense strand
cagcuuaucuugcaaguga

SEQ ID NO: 1415141 - RNA, 19 nt, Homo sapiens
  misc_RNA (1)...(19): siRNA sense strand
gaaguuaggcgauuagaga

SEQ ID NO: 1415142 - RNA, 19 nt, Homo sapiens
  misc_RNA (1)...(19): siRNA sense strand
gacaaaggcauucaucaua

SEQ ID NO: 1415143 - RNA, 19 nt, Homo sapiens
  misc_RNA (1)...(19): siRNA sense strand
gauccaagcuugauuaagg

SEQ ID NO: 1415144 - RNA, 19 nt, Homo sapiens
  misc_RNA (1)...(19): siRNA sense strand
ggaagaaaguauuaaacga

SEQ ID NO: 1415145 - RNA, 19 nt, Homo sapiens
  misc_RNA (1)...(19): siRNA sense strand
aaacagcucuaaaccauug

SEQ ID NO: 1415146 - RNA, 19 nt, Homo sapiens
  misc_RNA (1)...(19): siRNA sense strand
ugacauguauucugaaguu

SEQ ID NO: 1415147 - RNA, 19 nt, Homo sapiens
  misc_RNA (1)...(19): siRNA sense strand
gaagaccucaagaaaguua

SEQ ID NO: 1415148 - RNA, 19 nt, Homo sapiens
  misc_RNA (1)...(19): siRNA sense strand
gcugaacgcaguauuguua

SEQ ID NO: 1415149 - RNA, 19 nt, Homo sapiens
  misc_RNA (1)...(19): siRNA sense strand
gauggugcuuguugacuua

SEQ ID NO: 1415150 - RNA, 19 nt, Homo sapiens
  misc_RNA (1)...(19): siRNA sense strand
ggacauccuuucagcaguu

SEQ ID NO: 1415151 - RNA, 19 nt, Homo sapiens
  misc_RNA (1)...(19): siRNA sense strand
gaaacacagcucuggaaua

SEQ ID NO: 1415152 - RNA, 19 nt, Homo sapiens
  misc_RNA (1)...(19): siRNA sense strand
ggaaauccuucaacaaucu

SEQ ID NO: 1415153 - RNA, 19 nt, Homo sapiens
  misc_RNA (1)...(19): siRNA sense strand
gcagauaauugaaggaaag

SEQ ID NO: 1415154 - RNA, 19 nt, Homo sapiens
  misc_RNA (1)...(19): siRNA sense strand
ugaaagcauugaagcuaua

SEQ ID NO: 1415155 - RNA, 19 nt, Homo sapiens
  misc_RNA (1)...(19): siRNA sense strand
ggaaagagcaugaugacau

SEQ ID NO: 1415156 - RNA, 19 nt, Homo sapiens
  misc_RNA (1)...(19): siRNA sense strand
ucacgaagcauuuaucauu

SEQ ID NO: 1415157 - RNA, 19 nt, Homo sapiens
  misc_RNA (1)...(19): siRNA sense strand
gcaguucucuucucugaca

SEQ ID NO: 1415158 - RNA, 19 nt, Homo sapiens
  misc_RNA (1)...(19): siRNA sense strand
uuaaagagguauuggaaga

SEQ ID NO: 1415159 - RNA, 19 nt, Homo sapiens
  misc_RNA (1)...(19): siRNA sense strand
aaacugaaauucucuccaa

SEQ ID NO: 1415160 - RNA, 19 nt, Homo sapiens
  misc_RNA (1)...(19): siRNA sense strand
ggcaacaacuuacaaauac

SEQ ID NO: 1415161 - RNA, 19 nt, Homo sapiens
  misc_RNA (1)...(19): siRNA sense strand
gaagaccgauccauaucug

SEQ ID NO: 1415162 - RNA, 19 nt, Homo sapiens
  misc_RNA (1)...(19): siRNA sense strand
ugaccggaaugaacuauuu

SEQ ID NO: 1415163 - RNA, 19 nt, Homo sapiens
  misc_RNA (1)...(19): siRNA sense strand
caaugaaagcuuuagguua

SEQ ID NO: 1415164 - RNA, 19 nt, Homo sapiens
  misc_RNA (1)...(19): siRNA sense strand
ggaccuuagugaauauaaa

SEQ ID NO: 1415165 - RNA, 19 nt, Homo sapiens
  misc_RNA (1)...(19): siRNA sense strand
ggaaauugaugaguauauc

SEQ ID NO: 1415166 - RNA, 19 nt, Homo sapiens
  misc_RNA (1)...(19): siRNA sense strand
cggaagaccucaagaaagu

SEQ ID NO: 1415167 - RNA, 19 nt, Homo sapiens
  misc_RNA (1)...(19): siRNA sense strand
gcaucaaguuuauagaaga

SEQ ID NO: 1415168 - RNA, 19 nt, Homo sapiens
  misc_RNA (1)...(19): siRNA sense strand
gcacccagcuuaucuugca

SEQ ID NO: 1415169 - RNA, 19 nt, Homo sapiens
  misc_RNA (1)...(19): siRNA sense strand
ggaagaaucggacccaaga

SEQ ID NO: 1415170 - RNA, 19 nt, Homo sapiens
  misc_RNA (1)...(19): siRNA sense strand
ugaaauccuugaugaaguu

SEQ ID NO: 1415171 - RNA, 19 nt, Homo sapiens
  misc_RNA (1)...(19): siRNA sense strand
gcugauaguuucaaagcaa

SEQ ID NO: 1415172 - RNA, 19 nt, Homo sapiens
  misc_RNA (1)...(19): siRNA sense strand
gagaccauauccuuaaaug

SEQ ID NO: 1415173 - RNA, 19 nt, Homo sapiens
  misc_RNA (1)...(19): siRNA sense strand
uaaagaggccguuaaggaa

SEQ ID NO: 1415174 - RNA, 19 nt, Homo sapiens
  misc_RNA (1)...(19): siRNA sense strand
guagauccaagcuugauua

SEQ ID NO: 1415175 - RNA, 19 nt, Homo sapiens
  misc_RNA (1)...(19): siRNA sense strand
uggagaagauguugaaaug

SEQ ID NO: 1415176 - RNA, 19 nt, Homo sapiens
  misc_RNA (1)...(19): siRNA sense strand
cagcaguucucuucucuga

SEQ ID NO: 1415177 - RNA, 19 nt, Homo sapiens
  misc_RNA (1)...(19): siRNA sense strand
gaugacacguucuccaguu

SEQ ID NO: 1415178 - RNA, 19 nt, Homo sapiens
  misc_RNA (1)...(19): siRNA sense strand
caaaggcauucaucauaga

SEQ ID NO: 1415179 - RNA, 19 nt, Homo sapiens
  misc_RNA (1)...(19): siRNA sense strand
gauaugauaccggaccuua

SEQ ID NO: 1415180 - RNA, 19 nt, Homo sapiens
  misc_RNA (1)...(19): siRNA sense strand
gggaugcagcuauuuauuu

SEQ ID NO: 1415181 - RNA, 19 nt, Homo sapiens
  misc_RNA (1)...(19): siRNA sense strand
ccaagugacuacaagaaau

SEQ ID NO: 1415182 - RNA, 19 nt, Homo sapiens
  misc_RNA (1)...(19): siRNA sense strand
ugauugacauguauucuga

SEQ ID NO: 1415183 - RNA, 19 nt, Homo sapiens
  misc_RNA (1)...(19): siRNA sense strand
uaauaaagcaguagagguu

SEQ ID NO: 1415184 - RNA, 19 nt, Homo sapiens
  misc_RNA (1)...(19): siRNA sense strand
cauugaagcuauaagagaa

SEQ ID NO: 1415185 - RNA, 19 nt, Homo sapiens
  misc_RNA (1)...(19): siRNA sense strand
ggauucagcagauaauuga

SEQ ID NO: 1415186 - RNA, 19 nt, Homo sapiens
  misc_RNA (1)...(19): siRNA sense strand
aaacuucgcuaucucauac

SEQ ID NO: 1415187 - RNA, 19 nt, Homo sapiens
  misc_RNA (1)...(19): siRNA sense strand
acaaugaaaccaagaauga

SEQ ID NO: 1415188 - RNA, 19 nt, Homo sapiens
  misc_RNA (1)...(19): siRNA sense strand
caaauggacccucauggaa

SEQ ID NO: 1415189 - RNA, 19 nt, Homo sapiens
  misc_RNA (1)...(19): siRNA sense strand
ugaaauagaacuucgaaug

SEQ ID NO: 1415190 - RNA, 19 nt, Homo sapiens
  misc_RNA (1)...(19): siRNA sense strand
uaccggaccuuagugaaua

SEQ ID NO: 1415191 - RNA, 19 nt, Homo sapiens
  misc_RNA (1)...(19): siRNA sense strand
gggaacagcucugaaagca

SEQ ID NO: 1415192 - RNA, 19 nt, Homo sapiens
  misc_RNA (1)...(19): siRNA sense strand
ugacaaaccuuccuuuacg

SEQ ID NO: 1415193 - RNA, 19 nt, Homo sapiens
  misc_RNA (1)...(19): siRNA sense strand
gaacaacaggcugauaguu

SEQ ID NO: 1415194 - RNA, 19 nt, Homo sapiens
  misc_RNA (1)...(19): siRNA sense strand
gauguucucucugauuaug

SEQ ID NO: 1415195 - RNA, 19 nt, Homo sapiens
  misc_RNA (1)...(19): siRNA sense strand
gcauuuaucauucacauca

SEQ ID NO: 1415196 - RNA, 19 nt, Homo sapiens
  misc_RNA (1)...(19): siRNA sense strand
ggaugcagcuauuuauuuu

SEQ ID NO: 1415197 - RNA, 19 nt, Homo sapiens
  misc_RNA (1)...(19): siRNA sense strand
gaacuugaccggaaugaac

SEQ ID NO: 1415198 - RNA, 19 nt, Homo sapiens
  misc_RNA (1)...(19): siRNA sense strand
ggauggugcuuguugacuu

SEQ ID NO: 1415199 - RNA, 19 nt, Homo sapiens
  misc_RNA (1)...(19): siRNA sense strand
acaaaggcauucaucauag

SEQ ID NO: 1415200 - RNA, 19 nt, Homo sapiens
  misc_RNA (1)...(19): siRNA sense strand
acacucaguugaaguauca

SEQ ID NO: 1415201 - RNA, 19 nt, Homo sapiens
  misc_RNA (1)...(19): siRNA sense strand
gaaagugacaagcauuuua

SEQ ID NO: 1415202 - RNA, 19 nt, Homo sapiens
  misc_RNA (1)...(19): siRNA sense strand
gacauugugugggaaauug

SEQ ID NO: 1415203 - RNA, 19 nt, Homo sapiens
  misc_RNA (1)...(19): siRNA sense strand
ggaaguuuaccacuacaaa

SEQ ID NO: 1415204 - RNA, 19 nt, Homo sapiens
  misc_RNA (1)...(19): siRNA sense strand
gcucgaauauucccaagag

SEQ ID NO: 1415205 - RNA, 19 nt, Homo sapiens
  misc_RNA (1)...(19): siRNA sense strand
gaaagaugacaaaggcauu

SEQ ID NO: 1415206 - RNA, 19 nt, Homo sapiens
  misc_RNA (1)...(19): siRNA sense strand
uugauguucucucugauua

SEQ ID NO: 1415207 - RNA, 19 nt, Homo sapiens
  misc_RNA (1)...(19): siRNA sense strand
aaagagguauuggaagauu

SEQ ID NO: 1415208 - RNA, 19 nt, Homo sapiens
  misc_RNA (1)...(19): siRNA sense strand
gggagacccuacaagaaga

SEQ ID NO: 1415209 - RNA, 19 nt, Homo sapiens
  misc_RNA (1)...(19): siRNA sense strand
gaauccuaaugccaucaua

SEQ ID NO: 1415210 - RNA, 19 nt, Homo sapiens
  misc_RNA (1)...(19): siRNA sense strand
agaagaucuugcagcauua

SEQ ID NO: 1415211 - RNA, 19 nt, Homo sapiens
  misc_RNA (1)...(19): siRNA sense strand
caucauagaaagcuuaaga

SEQ ID NO: 1415212 - RNA, 19 nt, Homo sapiens
  misc_RNA (1)...(19): siRNA sense strand
gaagaauuuucccgcuuua

SEQ ID NO: 1415213 - RNA, 19 nt, Homo sapiens
  misc_RNA (1)...(19): siRNA sense strand
caguggauaucaagcuuaa

SEQ ID NO: 1415214 - RNA, 19 nt, Homo sapiens
  misc_RNA (1)...(19): siRNA sense strand
gcauugaagcuauaagaga

SEQ ID NO: 1415215 - RNA, 19 nt, Homo sapiens
  misc_RNA (1)...(19): siRNA sense strand
gaaagcucuucccaaugaa

SEQ ID NO: 1415216 - RNA, 19 nt, Homo sapiens
  misc_RNA (1)...(19): siRNA sense strand
ugacuuaccaggugugauu

SEQ ID NO: 1415217 - RNA, 19 nt, Homo sapiens
  misc_RNA (1)...(19): siRNA sense strand
ggaaaugauugcccaagcu

SEQ ID NO: 1415218 - RNA, 19 nt, Homo sapiens
  misc_RNA (1)...(19): siRNA sense strand
acacagcucuggaauaaaa

SEQ ID NO: 1415219 - RNA, 19 nt, Homo sapiens
  misc_RNA (1)...(19): siRNA sense strand
ugugggaaauugaugagua

SEQ ID NO: 1415220 - RNA, 19 nt, Homo sapiens
  misc_RNA (1)...(19): siRNA sense strand
cuaaaccauuguaaccuuu

SEQ ID NO: 1415221 - RNA, 19 nt, Homo sapiens
  misc_RNA (1)...(19): siRNA sense strand
agagcaugaugacauauuu

SEQ ID NO: 1415222 - RNA, 19 nt, Homo sapiens
  misc_RNA (1)...(19): siRNA sense strand
caacucaugugauugaaaa

SEQ ID NO: 1415223 - RNA, 19 nt, Homo sapiens
  misc_RNA (1)...(19): siRNA sense strand
caagugacuacaagaaauu

SEQ ID NO: 1415224 - RNA, 19 nt, Homo sapiens
  misc_RNA (1)...(19): siRNA sense strand
gcuaaaggcacaccaagug

SEQ ID NO: 1415225 - RNA, 19 nt, Homo sapiens
  misc_RNA (1)...(19): siRNA sense strand
gagaauaugaagaagaguu

SEQ ID NO: 1415226 - RNA, 19 nt, Homo sapiens
  misc_RNA (1)...(19): siRNA sense strand
gcaguauuguuacagacuu

SEQ ID NO: 1415227 - RNA, 19 nt, Homo sapiens
  misc_RNA (1)...(19): siRNA sense strand
uggaaagacuaguguguug

SEQ ID NO: 1415228 - RNA, 19 nt, Homo sapiens
  misc_RNA (1)...(19): siRNA sense strand
ggagaacaaagaauugaga

SEQ ID NO: 1415229 - RNA, 19 nt, Homo sapiens
  misc_RNA (1)...(19): siRNA sense strand
gaaagagcaugaugacaua

SEQ ID NO: 1415230 - RNA, 19 nt, Homo sapiens
  misc_RNA (1)...(19): siRNA sense strand
gaacagcucugaaagcauu

SEQ ID NO: 1415231 - RNA, 19 nt, Homo sapiens
  misc_RNA (1)...(19): siRNA sense strand
gagaagauguugaaaugua

SEQ ID NO: 1415232 - RNA, 19 nt, Homo sapiens
  misc_RNA (1)...(19): siRNA sense strand
gaggacagcuugaggguua

SEQ ID NO: 1415233 - RNA, 19 nt, Homo sapiens
  misc_RNA (1)...(19): siRNA sense strand
gaaacugaauggaagaaua

SEQ ID NO: 1415234 - RNA, 19 nt, Homo sapiens
  misc_RNA (1)...(19): siRNA sense strand
aaagaaggcuguaccguua

SEQ ID NO: 1415235 - RNA, 19 nt, Homo sapiens
  misc_RNA (1)...(19): siRNA sense strand
aaacacagcucuggaauaa

SEQ ID NO: 1415236 - RNA, 19 nt, Homo sapiens
  misc_RNA (1)...(19): siRNA sense strand
gaaauagaacuucgaauga

SEQ ID NO: 1415237 - RNA, 19 nt, Homo sapiens
  misc_RNA (1)...(19): siRNA sense strand
gcaaugauguggucuuguu

SEQ ID NO: 1415238 - RNA, 19 nt, Homo sapiens
  misc_RNA (1)...(19): siRNA sense strand
gaccauauccuuaaaugua

SEQ ID NO: 1415239 - RNA, 19 nt, Homo sapiens
  misc_RNA (1)...(19): siRNA sense strand
gcaaugggaugcagcuauu

SEQ ID NO: 1415240 - RNA, 19 nt, Homo sapiens
  misc_RNA (1)...(19): siRNA sense strand
cagcuuaucuugcaaguga

SEQ ID NO: 1415241 - RNA, 19 nt, Homo sapiens
  misc_RNA (1)...(19): siRNA sense strand
gaaguuaggcgauuagaga

SEQ ID NO: 1415242 - RNA, 19 nt, Homo sapiens
  misc_RNA (1)...(19): siRNA sense strand
gacaaaggcauucaucaua

SEQ ID NO: 1415243 - RNA, 19 nt, Homo sapiens
  misc_RNA (1)...(19): siRNA sense strand
gauccaagcuugauuaagg

SEQ ID NO: 1415244 - RNA, 19 nt, Homo sapiens
  misc_RNA (1)...(19): siRNA sense strand
ggaagaaaguauuaaacga

SEQ ID NO: 1415245 - RNA, 19 nt, Homo sapiens
  misc_RNA (1)...(19): siRNA sense strand
aaacagcucuaaaccauug

SEQ ID NO: 1415246 - RNA, 19 nt, Homo sapiens
  misc_RNA (1)...(19): siRNA sense strand
ugacauguauucugaaguu

SEQ ID NO: 1415247 - RNA, 19 nt, Homo sapiens
  misc_RNA (1)...(19): siRNA sense strand
gaagaccucaagaaaguua

SEQ ID NO: 1415248 - RNA, 19 nt, Homo sapiens
  misc_RNA (1)...(19): siRNA sense strand
gcugaacgcaguauuguua

SEQ ID NO: 1415249 - RNA, 19 nt, Homo sapiens
  misc_RNA (1)...(19): siRNA sense strand
gauggugcuuguugacuua

SEQ ID NO: 1415250 - RNA, 19 nt, Homo sapiens
  misc_RNA (1)...(19): siRNA sense strand
ggacauccuuucagcaguu

SEQ ID NO: 1415251 - RNA, 19 nt, Homo sapiens
  misc_RNA (1)...(19): siRNA sense strand
gaaacacagcucuggaaua

SEQ ID NO: 1415252 - RNA, 19 nt, Homo sapiens
  misc_RNA (1)...(19): siRNA sense strand
ggaaauccuucaacaaucu

SEQ ID NO: 1415253 - RNA, 19 nt, Homo sapiens
  misc_RNA (1)...(19): siRNA sense strand
gcagauaauugaaggaaag

SEQ ID NO: 1415254 - RNA, 19 nt, Homo sapiens
  misc_RNA (1)...(19): siRNA sense strand
ugaaagcauugaagcuaua

SEQ ID NO: 1415255 - RNA, 19 nt, Homo sapiens
  misc_RNA (1)...(19): siRNA sense strand
ggaaagagcaugaugacau

SEQ ID NO: 1415256 - RNA, 19 nt, Homo sapiens
  misc_RNA (1)...(19): siRNA sense strand
ucacgaagcauuuaucauu

SEQ ID NO: 1415257 - RNA, 19 nt, Homo sapiens
  misc_RNA (1)...(19): siRNA sense strand
gcaguucucuucucugaca

SEQ ID NO: 1415258 - RNA, 19 nt, Homo sapiens
  misc_RNA (1)...(19): siRNA sense strand
uuaaagagguauuggaaga

SEQ ID NO: 1415259 - RNA, 19 nt, Homo sapiens
  misc_RNA (1)...(19): siRNA sense strand
aaacugaaauucucuccaa

SEQ ID NO: 1415260 - RNA, 19 nt, Homo sapiens
  misc_RNA (1)...(19): siRNA sense strand
ggcaacaacuuacaaauac

SEQ ID NO: 1415261 - RNA, 19 nt, Homo sapiens
  misc_RNA (1)...(19): siRNA sense strand
gaagaccgauccauaucug

SEQ ID NO: 1415262 - RNA, 19 nt, Homo sapiens
  misc_RNA (1)...(19): siRNA sense strand
ugaccggaaugaacuauuu

SEQ ID NO: 1415263 - RNA, 19 nt, Homo sapiens
  misc_RNA (1)...(19): siRNA sense strand
caaugaaagcuuuagguua

SEQ ID NO: 1415264 - RNA, 19 nt, Homo sapiens
  misc_RNA (1)...(19): siRNA sense strand
ggaccuuagugaauauaaa

SEQ ID NO: 1415265 - RNA, 19 nt, Homo sapiens
  misc_RNA (1)...(19): siRNA sense strand
ggaaauugaugaguauauc

SEQ ID NO: 1415266 - RNA, 19 nt, Homo sapiens
  misc_RNA (1)...(19): siRNA sense strand
cggaagaccucaagaaagu

SEQ ID NO: 1415267 - RNA, 19 nt, Homo sapiens
  misc_RNA (1)...(19): siRNA sense strand
gcaucaaguuuauagaaga

SEQ ID NO: 1415268 - RNA, 19 nt, Homo sapiens
  misc_RNA (1)...(19): siRNA sense strand
gcacccagcuuaucuugca

SEQ ID NO: 1415269 - RNA, 19 nt, Homo sapiens
  misc_RNA (1)...(19): siRNA sense strand
ggaagaaucggacccaaga

SEQ ID NO: 1415270 - RNA, 19 nt, Homo sapiens
  misc_RNA (1)...(19): siRNA sense strand
ugaaauccuugaugaaguu

SEQ ID NO: 1415271 - RNA, 19 nt, Homo sapiens
  misc_RNA (1)...(19): siRNA sense strand
gcugauaguuucaaagcaa

SEQ ID NO: 1415272 - RNA, 19 nt, Homo sapiens
  misc_RNA (1)...(19): siRNA sense strand
gagaccauauccuuaaaug

SEQ ID NO: 1415273 - RNA, 19 nt, Homo sapiens
  misc_RNA (1)...(19): siRNA sense strand
uaaagaggccguuaaggaa

SEQ ID NO: 1415274 - RNA, 19 nt, Homo sapiens
  misc_RNA (1)...(19): siRNA sense strand
guagauccaagcuugauua

SEQ ID NO: 1415275 - RNA, 19 nt, Homo sapiens
  misc_RNA (1)...(19): siRNA sense strand
uggagaagauguugaaaug

SEQ ID NO: 1415276 - RNA, 19 nt, Homo sapiens
  misc_RNA (1)...(19): siRNA sense strand
cagcaguucucuucucuga

SEQ ID NO: 1415277 - RNA, 19 nt, Homo sapiens
  misc_RNA (1)...(19): siRNA sense strand
gaugacacguucuccaguu

SEQ ID NO: 1415278 - RNA, 19 nt, Homo sapiens
  misc_RNA (1)...(19): siRNA sense strand
caaaggcauucaucauaga

SEQ ID NO: 1415279 - RNA, 19 nt, Homo sapiens
  misc_RNA (1)...(19): siRNA sense strand
gauaugauaccggaccuua

SEQ ID NO: 1415280 - RNA, 19 nt, Homo sapiens
  misc_RNA (1)...(19): siRNA sense strand
gggaugcagcuauuuauuu

SEQ ID NO: 1415281 - RNA, 19 nt, Homo sapiens
  misc_RNA (1)...(19): siRNA sense strand
ccaagugacuacaagaaau

SEQ ID NO: 1415282 - RNA, 19 nt, Homo sapiens
  misc_RNA (1)...(19): siRNA sense strand
ugauugacauguauucuga

SEQ ID NO: 1415283 - RNA, 19 nt, Homo sapiens
  misc_RNA (1)...(19): siRNA sense strand
uaauaaagcaguagagguu

SEQ ID NO: 1415284 - RNA, 19 nt, Homo sapiens
  misc_RNA (1)...(19): siRNA sense strand
cauugaagcuauaagagaa

SEQ ID NO: 1415285 - RNA, 19 nt, Homo sapiens
  misc_RNA (1)...(19): siRNA sense strand
ggauucagcagauaauuga

SEQ ID NO: 1415286 - RNA, 19 nt, Homo sapiens
  misc_RNA (1)...(19): siRNA sense strand
aaacuucgcuaucucauac

SEQ ID NO: 1415287 - RNA, 19 nt, Homo sapiens
  misc_RNA (1)...(19): siRNA sense strand
acaaugaaaccaagaauga

SEQ ID NO: 1415288 - RNA, 19 nt, Homo sapiens
  misc_RNA (1)...(19): siRNA sense strand
caaauggacccucauggaa

SEQ ID NO: 1415289 - RNA, 19 nt, Homo sapiens
  misc_RNA (1)...(19): siRNA sense strand
ugaaauagaacuucgaaug

SEQ ID NO: 1415290 - RNA, 19 nt, Homo sapiens
  misc_RNA (1)...(19): siRNA sense strand
uaccggaccuuagugaaua

SEQ ID NO: 1415291 - RNA, 19 nt, Homo sapiens
  misc_RNA (1)...(19): siRNA sense strand
gggaacagcucugaaagca

SEQ ID NO: 1415292 - RNA, 19 nt, Homo sapiens
  misc_RNA (1)...(19): siRNA sense strand
ugacaaaccuuccuuuacg

SEQ ID NO: 1415293 - RNA, 19 nt, Homo sapiens
  misc_RNA (1)...(19): siRNA sense strand
gaacaacaggcugauaguu

SEQ ID NO: 1415294 - RNA, 19 nt, Homo sapiens
  misc_RNA (1)...(19): siRNA sense strand
gauguucucucugauuaug

SEQ ID NO: 1415295 - RNA, 19 nt, Homo sapiens
  misc_RNA (1)...(19): siRNA sense strand
gcauuuaucauucacauca

SEQ ID NO: 1415296 - RNA, 19 nt, Homo sapiens
  misc_RNA (1)...(19): siRNA sense strand
ggaugcagcuauuuauuuu

SEQ ID NO: 1415297 - RNA, 19 nt, Homo sapiens
  misc_RNA (1)...(19): siRNA sense strand
gaacuugaccggaaugaac

SEQ ID NO: 1415298 - RNA, 19 nt, Homo sapiens
  misc_RNA (1)...(19): siRNA sense strand
ggauggugcuuguugacuu

SEQ ID NO: 1415299 - RNA, 19 nt, Homo sapiens
  misc_RNA (1)...(19): siRNA sense strand
acaaaggcauucaucauag

SEQ ID NO: 1415300 - RNA, 19 nt, Homo sapiens
  misc_RNA (1)...(19): siRNA sense strand
acacucaguugaaguauca

SEQ ID NO: 1415301 - RNA, 19 nt, Homo sapiens
  misc_RNA (1)...(19): siRNA sense strand
gaaagugacaagcauuuua

SEQ ID NO: 1415302 - RNA, 19 nt, Homo sapiens
  misc_RNA (1)...(19): siRNA sense strand
gacauugugugggaaauug

SEQ ID NO: 1415303 - RNA, 19 nt, Homo sapiens
  misc_RNA (1)...(19): siRNA sense strand
ggaaguuuaccacuacaaa

SEQ ID NO: 1415304 - RNA, 19 nt, Homo sapiens
  misc_RNA (1)...(19): siRNA sense strand
gcucgaauauucccaagag

SEQ ID NO: 1415305 - RNA, 19 nt, Homo sapiens
  misc_RNA (1)...(19): siRNA sense strand
gaaagaugacaaaggcauu

SEQ ID NO: 1415306 - RNA, 19 nt, Homo sapiens
  misc_RNA (1)...(19): siRNA sense strand
uugauguucucucugauua

SEQ ID NO: 1415307 - RNA, 19 nt, Homo sapiens
  misc_RNA (1)...(19): siRNA sense strand
aaagagguauuggaagauu

SEQ ID NO: 1415308 - RNA, 19 nt, Homo sapiens
  misc_RNA (1)...(19): siRNA sense strand
gggagacccuacaagaaga

SEQ ID NO: 1415309 - RNA, 19 nt, Homo sapiens
  misc_RNA (1)...(19): siRNA sense strand
gaauccuaaugccaucaua

SEQ ID NO: 1415310 - RNA, 19 nt, Homo sapiens
  misc_RNA (1)...(19): siRNA sense strand
agaagaucuugcagcauua

SEQ ID NO: 1415311 - RNA, 19 nt, Homo sapiens
  misc_RNA (1)...(19): siRNA sense strand
caucauagaaagcuuaaga

SEQ ID NO: 1415312 - RNA, 19 nt, Homo sapiens
  misc_RNA (1)...(19): siRNA sense strand
gaagaauuuucccgcuuua

SEQ ID NO: 1415313 - RNA, 19 nt, Homo sapiens
  misc_RNA (1)...(19): siRNA sense strand
caguggauaucaagcuuaa

SEQ ID NO: 1415314 - RNA, 19 nt, Homo sapiens
  misc_RNA (1)...(19): siRNA sense strand
gcauugaagcuauaagaga

SEQ ID NO: 1415315 - RNA, 19 nt, Homo sapiens
  misc_RNA (1)...(19): siRNA sense strand
gaaagcucuucccaaugaa

SEQ ID NO: 1415316 - RNA, 19 nt, Homo sapiens
  misc_RNA (1)...(19): siRNA sense strand
ugacuuaccaggugugauu

SEQ ID NO: 1415317 - RNA, 19 nt, Homo sapiens
  misc_RNA (1)...(19): siRNA sense strand
ggaaaugauugcccaagcu

SEQ ID NO: 1415318 - RNA, 19 nt, Homo sapiens
  misc_RNA (1)...(19): siRNA sense strand
acacagcucuggaauaaaa

SEQ ID NO: 1415319 - RNA, 19 nt, Homo sapiens
  misc_RNA (1)...(19): siRNA sense strand
ugugggaaauugaugagua

SEQ ID NO: 1415320 - RNA, 19 nt, Homo sapiens
  misc_RNA (1)...(19): siRNA sense strand
cuaaaccauuguaaccuuu

SEQ ID NO: 1415321 - RNA, 19 nt, Homo sapiens
  misc_RNA (1)...(19): siRNA sense strand
agagcaugaugacauauuu

SEQ ID NO: 1415322 - RNA, 19 nt, Homo sapiens
  misc_RNA (1)...(19): siRNA sense strand
caacucaugugauugaaaa

SEQ ID NO: 1415323 - RNA, 19 nt, Homo sapiens
  misc_RNA (1)...(19): siRNA sense strand
caagugacuacaagaaauu

SEQ ID NO: 1415324 - RNA, 19 nt, Homo sapiens
  misc_RNA (1)...(19): siRNA sense strand
gcuaaaggcacaccaagug

SEQ ID NO: 1415325 - RNA, 19 nt, Homo sapiens
  misc_RNA (1)...(19): siRNA sense strand
gagaauaugaagaagaguu

SEQ ID NO: 1415326 - RNA, 19 nt, Homo sapiens
  misc_RNA (1)...(19): siRNA sense strand
gcaguauuguuacagacuu

SEQ ID NO: 1415327 - RNA, 19 nt, Homo sapiens
  misc_RNA (1)...(19): siRNA sense strand
uggaaagacuaguguguug

SEQ ID NO: 1415328 - RNA, 19 nt, Homo sapiens
  misc_RNA (1)...(19): siRNA sense strand
ggagaacaaagaauugaga

SEQ ID NO: 1415329 - RNA, 19 nt, Homo sapiens
  misc_RNA (1)...(19): siRNA sense strand
gaaagagcaugaugacaua

SEQ ID NO: 1415330 - RNA, 19 nt, Homo sapiens
  misc_RNA (1)...(19): siRNA sense strand
gaacagcucugaaagcauu

SEQ ID NO: 1415331 - RNA, 19 nt, Homo sapiens
  misc_RNA (1)...(19): siRNA sense strand
gagaagauguugaaaugua

SEQ ID NO: 1415332 - RNA, 19 nt, Homo sapiens
  misc_RNA (1)...(19): siRNA sense strand
gaggacagcuugaggguua

SEQ ID NO: 1415333 - RNA, 19 nt, Homo sapiens
  misc_RNA (1)...(19): siRNA sense strand
gaaacugaauggaagaaua

SEQ ID NO: 1415334 - RNA, 19 nt, Homo sapiens
  misc_RNA (1)...(19): siRNA sense strand
aaagaaggcuguaccguua

SEQ ID NO: 1415335 - RNA, 19 nt, Homo sapiens
  misc_RNA (1)...(19): siRNA sense strand
aaacacagcucuggaauaa

SEQ ID NO: 1415336 - RNA, 19 nt, Homo sapiens
  misc_RNA (1)...(19): siRNA sense strand
gaaauagaacuucgaauga

SEQ ID NO: 1415337 - RNA, 19 nt, Homo sapiens
  misc_RNA (1)...(19): siRNA sense strand
gcaaugauguggucuuguu

SEQ ID NO: 1415338 - RNA, 19 nt, Homo sapiens
  misc_RNA (1)...(19): siRNA sense strand
gaccauauccuuaaaugua

SEQ ID NO: 1415339 - RNA, 19 nt, Homo sapiens
  misc_RNA (1)...(19): siRNA sense strand
gcaaugggaugcagcuauu

SEQ ID NO: 1415340 - RNA, 19 nt, Homo sapiens
  misc_RNA (1)...(19): siRNA sense strand
cagcuuaucuugcaaguga

SEQ ID NO: 1415341 - RNA, 19 nt, Homo sapiens
  misc_RNA (1)...(19): siRNA sense strand
gaaguuaggcgauuagaga

SEQ ID NO: 1415342 - RNA, 19 nt, Homo sapiens
  misc_RNA (1)...(19): siRNA sense strand
gacaaaggcauucaucaua

SEQ ID NO: 1415343 - RNA, 19 nt, Homo sapiens
  misc_RNA (1)...(19): siRNA sense strand
gauccaagcuugauuaagg

SEQ ID NO: 1415344 - RNA, 19 nt, Homo sapiens
  misc_RNA (1)...(19): siRNA sense strand
ggaagaaaguauuaaacga

SEQ ID NO: 1415345 - RNA, 19 nt, Homo sapiens
  misc_RNA (1)...(19): siRNA sense strand
aaacagcucuaaaccauug

SEQ ID NO: 1415346 - RNA, 19 nt, Homo sapiens
  misc_RNA (1)...(19): siRNA sense strand
ugacauguauucugaaguu

SEQ ID NO: 1415347 - RNA, 19 nt, Homo sapiens
  misc_RNA (1)...(19): siRNA sense strand
gaagaccucaagaaaguua

SEQ ID NO: 1415348 - RNA, 19 nt, Homo sapiens
  misc_RNA (1)...(19): siRNA sense strand
gcugaacgcaguauuguua

SEQ ID NO: 1415349 - RNA, 19 nt, Homo sapiens
  misc_RNA (1)...(19): siRNA sense strand
gauggugcuuguugacuua

SEQ ID NO: 1415350 - RNA, 19 nt, Homo sapiens
  misc_RNA (1)...(19): siRNA sense strand
ggacauccuuucagcaguu

SEQ ID NO: 1415351 - RNA, 19 nt, Homo sapiens
  misc_RNA (1)...(19): siRNA sense strand
gaaacacagcucuggaaua

SEQ ID NO: 1415352 - RNA, 19 nt, Homo sapiens
  misc_RNA (1)...(19): siRNA sense strand
ggaaauccuucaacaaucu

SEQ ID NO: 1415353 - RNA, 19 nt, Homo sapiens
  misc_RNA (1)...(19): siRNA sense strand
gcagauaauugaaggaaag

SEQ ID NO: 1415354 - RNA, 19 nt, Homo sapiens
  misc_RNA (1)...(19): siRNA sense strand
ugaaagcauugaagcuaua

SEQ ID NO: 1415355 - RNA, 19 nt, Homo sapiens
  misc_RNA (1)...(19): siRNA sense strand
ggaaagagcaugaugacau

SEQ ID NO: 1415356 - RNA, 19 nt, Homo sapiens
  misc_RNA (1)...(19): siRNA sense strand
ucacgaagcauuuaucauu

SEQ ID NO: 1415357 - RNA, 19 nt, Homo sapiens
  misc_RNA (1)...(19): siRNA sense strand
gcaguucucuucucugaca

SEQ ID NO: 1415358 - RNA, 19 nt, Homo sapiens
  misc_RNA (1)...(19): siRNA sense strand
uuaaagagguauuggaaga

SEQ ID NO: 1415359 - RNA, 19 nt, Homo sapiens
  misc_RNA (1)...(19): siRNA sense strand
aaacugaaauucucuccaa

SEQ ID NO: 1415360 - RNA, 19 nt, Homo sapiens
  misc_RNA (1)...(19): siRNA sense strand
ggcaacaacuuacaaauac

SEQ ID NO: 1415361 - RNA, 19 nt, Homo sapiens
  misc_RNA (1)...(19): siRNA sense strand
gaagaccgauccauaucug

SEQ ID NO: 1415362 - RNA, 19 nt, Homo sapiens
  misc_RNA (1)...(19): siRNA sense strand
ugaccggaaugaacuauuu

SEQ ID NO: 1415363 - RNA, 19 nt, Homo sapiens
  misc_RNA (1)...(19): siRNA sense strand
caaugaaagcuuuagguua

SEQ ID NO: 1415364 - RNA, 19 nt, Homo sapiens
  misc_RNA (1)...(19): siRNA sense strand
ggaccuuagugaauauaaa

SEQ ID NO: 1415365 - RNA, 19 nt, Homo sapiens
  misc_RNA (1)...(19): siRNA sense strand
ggaaauugaugaguauauc

SEQ ID NO: 1415366 - RNA, 19 nt, Homo sapiens
  misc_RNA (1)...(19): siRNA sense strand
cggaagaccucaagaaagu

SEQ ID NO: 1415367 - RNA, 19 nt, Homo sapiens
  misc_RNA (1)...(19): siRNA sense strand
gcaucaaguuuauagaaga

SEQ ID NO: 1415368 - RNA, 19 nt, Homo sapiens
  misc_RNA (1)...(19): siRNA sense strand
gcacccagcuuaucuugca

SEQ ID NO: 1415369 - RNA, 19 nt, Homo sapiens
  misc_RNA (1)...(19): siRNA sense strand
ggaagaaucggacccaaga

SEQ ID NO: 1415370 - RNA, 19 nt, Homo sapiens
  misc_RNA (1)...(19): siRNA sense strand
ugaaauccuugaugaaguu

SEQ ID NO: 1415371 - RNA, 19 nt, Homo sapiens
  misc_RNA (1)...(19): siRNA sense strand
gcugauaguuucaaagcaa

SEQ ID NO: 1415372 - RNA, 19 nt, Homo sapiens
  misc_RNA (1)...(19): siRNA sense strand
gagaccauauccuuaaaug

SEQ ID NO: 1415373 - RNA, 19 nt, Homo sapiens
  misc_RNA (1)...(19): siRNA sense strand
uaaagaggccguuaaggaa

SEQ ID NO: 1415374 - RNA, 19 nt, Homo sapiens
  misc_RNA (1)...(19): siRNA sense strand
guagauccaagcuugauua

SEQ ID NO: 1415375 - RNA, 19 nt, Homo sapiens
  misc_RNA (1)...(19): siRNA sense strand
uggagaagauguugaaaug

SEQ ID NO: 1415376 - RNA, 19 nt, Homo sapiens
  misc_RNA (1)...(19): siRNA sense strand
cagcaguucucuucucuga

SEQ ID NO: 1415377 - RNA, 19 nt, Homo sapiens
  misc_RNA (1)...(19): siRNA sense strand
gaugacacguucuccaguu

SEQ ID NO: 1415378 - RNA, 19 nt, Homo sapiens
  misc_RNA (1)...(19): siRNA sense strand
caaaggcauucaucauaga

SEQ ID NO: 1415379 - RNA, 19 nt, Homo sapiens
  misc_RNA (1)...(19): siRNA sense strand
gauaugauaccggaccuua

SEQ ID NO: 1415380 - RNA, 19 nt, Homo sapiens
  misc_RNA (1)...(19): siRNA sense strand
gggaugcagcuauuuauuu

SEQ ID NO: 1415381 - RNA, 19 nt, Homo sapiens
  misc_RNA (1)...(19): siRNA sense strand
ccaagugacuacaagaaau

SEQ ID NO: 1415382 - RNA, 19 nt, Homo sapiens
  misc_RNA (1)...(19): siRNA sense strand
ugauugacauguauucuga

SEQ ID NO: 1415383 - RNA, 19 nt, Homo sapiens
  misc_RNA (1)...(19): siRNA sense strand
uaauaaagcaguagagguu

SEQ ID NO: 1415384 - RNA, 19 nt, Homo sapiens
  misc_RNA (1)...(19): siRNA sense strand
cauugaagcuauaagagaa

SEQ ID NO: 1415385 - RNA, 19 nt, Homo sapiens
  misc_RNA (1)...(19): siRNA sense strand
ggauucagcagauaauuga

SEQ ID NO: 1415386 - RNA, 19 nt, Homo sapiens
  misc_RNA (1)...(19): siRNA sense strand
aaacuucgcuaucucauac

SEQ ID NO: 1415387 - RNA, 19 nt, Homo sapiens
  misc_RNA (1)...(19): siRNA sense strand
acaaugaaaccaagaauga

SEQ ID NO: 1415388 - RNA, 19 nt, Homo sapiens
  misc_RNA (1)...(19): siRNA sense strand
caaauggacccucauggaa

SEQ ID NO: 1415389 - RNA, 19 nt, Homo sapiens
  misc_RNA (1)...(19): siRNA sense strand
ugaaauagaacuucgaaug

SEQ ID NO: 1415390 - RNA, 19 nt, Homo sapiens
  misc_RNA (1)...(19): siRNA sense strand
uaccggaccuuagugaaua

SEQ ID NO: 1415391 - RNA, 19 nt, Homo sapiens
  misc_RNA (1)...(19): siRNA sense strand
gggaacagcucugaaagca

SEQ ID NO: 1415392 - RNA, 19 nt, Homo sapiens
  misc_RNA (1)...(19): siRNA sense strand
ugacaaaccuuccuuuacg

SEQ ID NO: 1415393 - RNA, 19 nt, Homo sapiens
  misc_RNA (1)...(19): siRNA sense strand
gaacaacaggcugauaguu

SEQ ID NO: 1415394 - RNA, 19 nt, Homo sapiens
  misc_RNA (1)...(19): siRNA sense strand
gauguucucucugauuaug

SEQ ID NO: 1415395 - RNA, 19 nt, Homo sapiens
  misc_RNA (1)...(19): siRNA sense strand
gcauuuaucauucacauca

SEQ ID NO: 1415396 - RNA, 19 nt, Homo sapiens
  misc_RNA (1)...(19): siRNA sense strand
ggaugcagcuauuuauuuu

SEQ ID NO: 1415397 - RNA, 19 nt, Homo sapiens
  misc_RNA (1)...(19): siRNA sense strand
gaacuugaccggaaugaac

SEQ ID NO: 1415398 - RNA, 19 nt, Homo sapiens
  misc_RNA (1)...(19): siRNA sense strand
ggauggugcuuguugacuu

SEQ ID NO: 1415399 - RNA, 19 nt, Homo sapiens
  misc_RNA (1)...(19): siRNA sense strand
acaaaggcauucaucauag

SEQ ID NO: 1415400 - RNA, 19 nt, Homo sapiens
  misc_RNA (1)...(19): siRNA sense strand
acacucaguugaaguauca

SEQ ID NO: 1415401 - RNA, 19 nt, Homo sapiens
  misc_RNA (1)...(19): siRNA sense strand
gaaagugacaagcauuuua

SEQ ID NO: 1415402 - RNA, 19 nt, Homo sapiens
  misc_RNA (1)...(19): siRNA sense strand
gacauugugugggaaauug

SEQ ID NO: 1415403 - RNA, 19 nt, Homo sapiens
  misc_RNA (1)...(19): siRNA sense strand
ggaaguuuaccacuacaaa

SEQ ID NO: 1415404 - RNA, 19 nt, Homo sapiens
  misc_RNA (1)...(19): siRNA sense strand
gcucgaauauucccaagag

SEQ ID NO: 1415405 - RNA, 19 nt, Homo sapiens
  misc_RNA (1)...(19): siRNA sense strand
gaaagaugacaaaggcauu

SEQ ID NO: 1415406 - RNA, 19 nt, Homo sapiens
  misc_RNA (1)...(19): siRNA sense strand
uugauguucucucugauua

SEQ ID NO: 1415407 - RNA, 19 nt, Homo sapiens
  misc_RNA (1)...(19): siRNA sense strand
aaagagguauuggaagauu

SEQ ID NO: 1415408 - RNA, 19 nt, Homo sapiens
  misc_RNA (1)...(19): siRNA sense strand
gggagacccuacaagaaga

SEQ ID NO: 1415409 - RNA, 19 nt, Homo sapiens
  misc_RNA (1)...(19): siRNA sense strand
gaauccuaaugccaucaua

SEQ ID NO: 1415410 - RNA, 19 nt, Homo sapiens
  misc_RNA (1)...(19): siRNA sense strand
agaagaucuugcagcauua

SEQ ID NO: 1415411 - RNA, 19 nt, Homo sapiens
  misc_RNA (1)...(19): siRNA sense strand
caucauagaaagcuuaaga

SEQ ID NO: 1415412 - RNA, 19 nt, Homo sapiens
  misc_RNA (1)...(19): siRNA sense strand
gaagaauuuucccgcuuua

SEQ ID NO: 1415413 - RNA, 19 nt, Homo sapiens
  misc_RNA (1)...(19): siRNA sense strand
caguggauaucaagcuuaa

SEQ ID NO: 1415414 - RNA, 19 nt, Homo sapiens
  misc_RNA (1)...(19): siRNA sense strand
gcauugaagcuauaagaga

SEQ ID NO: 1415415 - RNA, 19 nt, Homo sapiens
  misc_RNA (1)...(19): siRNA sense strand
gaaagcucuucccaaugaa

SEQ ID NO: 1415416 - RNA, 19 nt, Homo sapiens
  misc_RNA (1)...(19): siRNA sense strand
ugacuuaccaggugugauu

SEQ ID NO: 1415417 - RNA, 19 nt, Homo sapiens
  misc_RNA (1)...(19): siRNA sense strand
ggaaaugauugcccaagcu

SEQ ID NO: 1415418 - RNA, 19 nt, Homo sapiens
  misc_RNA (1)...(19): siRNA sense strand
acacagcucuggaauaaaa

SEQ ID NO: 1415419 - RNA, 19 nt, Homo sapiens
  misc_RNA (1)...(19): siRNA sense strand
ugugggaaauugaugagua

SEQ ID NO: 1415420 - RNA, 19 nt, Homo sapiens
  misc_RNA (1)...(19): siRNA sense strand
cuaaaccauuguaaccuuu

SEQ ID NO: 1415421 - RNA, 19 nt, Homo sapiens
  misc_RNA (1)...(19): siRNA sense strand
agagcaugaugacauauuu

SEQ ID NO: 1415422 - RNA, 19 nt, Homo sapiens
  misc_RNA (1)...(19): siRNA sense strand
caacucaugugauugaaaa

SEQ ID NO: 1415423 - RNA, 19 nt, Homo sapiens
  misc_RNA (1)...(19): siRNA sense strand
caagugacuacaagaaauu

SEQ ID NO: 1415424 - RNA, 19 nt, Homo sapiens
  misc_RNA (1)...(19): siRNA sense strand
gcuaaaggcacaccaagug

SEQ ID NO: 1415425 - RNA, 19 nt, Homo sapiens
  misc_RNA (1)...(19): siRNA sense strand
gagaauaugaagaagaguu

SEQ ID NO: 1415426 - RNA, 19 nt, Homo sapiens
  misc_RNA (1)...(19): siRNA sense strand
gcaguauuguuacagacuu

SEQ ID NO: 1415427 - RNA, 19 nt, Homo sapiens
  misc_RNA (1)...(19): siRNA sense strand
uggaaagacuaguguguug

SEQ ID NO: 1415428 - RNA, 19 nt, Homo sapiens
  misc_RNA (1)...(19): siRNA sense strand
ggagaacaaagaauugaga

SEQ ID NO: 1415429 - RNA, 19 nt, Homo sapiens
  misc_RNA (1)...(19): siRNA sense strand
caaagugugugcaagcaaa

SEQ ID NO: 1415430 - RNA, 19 nt, Homo sapiens
  misc_RNA (1)...(19): siRNA sense strand
gaagauggacaaauauguu

SEQ ID NO: 1415431 - RNA, 19 nt, Homo sapiens
  misc_RNA (1)...(19): siRNA sense strand
uaacagaggcuuccuuuca

SEQ ID NO: 1415432 - RNA, 19 nt, Homo sapiens
  misc_RNA (1)...(19): siRNA sense strand
gauuagaaaugaagaugga

SEQ ID NO: 1415433 - RNA, 19 nt, Homo sapiens
  misc_RNA (1)...(19): siRNA sense strand
ccacguguuucgcaacuaa

SEQ ID NO: 1415434 - RNA, 19 nt, Homo sapiens
  misc_RNA (1)...(19): siRNA sense strand
gauaacagaggcuuccuuu

SEQ ID NO: 1415435 - RNA, 19 nt, Homo sapiens
  misc_RNA (1)...(19): siRNA sense strand
gcauuaguccuaucuugua

SEQ ID NO: 1415436 - RNA, 19 nt, Homo sapiens
  misc_RNA (1)...(19): siRNA sense strand
gucaacagauacaagauuu

SEQ ID NO: 1415437 - RNA, 19 nt, Homo sapiens
  misc_RNA (1)...(19): siRNA sense strand
uuaggaaucucuccacuau

SEQ ID NO: 1415438 - RNA, 19 nt, Homo sapiens
  misc_RNA (1)...(19): siRNA sense strand
ggaagcauuucauuguaau

SEQ ID NO: 1415439 - RNA, 19 nt, Homo sapiens
  misc_RNA (1)...(19): siRNA sense strand
gauacaagauuuccuuacu

SEQ ID NO: 1415440 - RNA, 19 nt, Homo sapiens
  misc_RNA (1)...(19): siRNA sense strand
ugaagaaguuccugaaucu

SEQ ID NO: 1415441 - RNA, 19 nt, Homo sapiens
  misc_RNA (1)...(19): siRNA sense strand
gaaguucccaccuugacua

SEQ ID NO: 1415442 - RNA, 19 nt, Homo sapiens
  misc_RNA (1)...(19): siRNA sense strand
cgagugaaguccuacaaau

SEQ ID NO: 1415443 - RNA, 19 nt, Homo sapiens
  misc_RNA (1)...(19): siRNA sense strand
gauggaagcauuucauugu

SEQ ID NO: 1415444 - RNA, 19 nt, Homo sapiens
  misc_RNA (1)...(19): siRNA sense strand
agugaaguccuacaaauua

SEQ ID NO: 1415445 - RNA, 19 nt, Homo sapiens
  misc_RNA (1)...(19): siRNA sense strand
uacaagauuuccuuacuga

SEQ ID NO: 1415446 - RNA, 19 nt, Homo sapiens
  misc_RNA (1)...(19): siRNA sense strand
gcauuucauuguaaucaga

SEQ ID NO: 1415447 - RNA, 19 nt, Homo sapiens
  misc_RNA (1)...(19): siRNA sense strand
uggaagcauuucauuguaa

SEQ ID NO: 1415448 - RNA, 19 nt, Homo sapiens
  misc_RNA (1)...(19): siRNA sense strand
aguccuaucuuguaaggua

SEQ ID NO: 1415449 - RNA, 19 nt, Homo sapiens
  misc_RNA (1)...(19): siRNA sense strand
agacccaagucaacagaua

SEQ ID NO: 1415450 - RNA, 19 nt, Homo sapiens
  misc_RNA (1)...(19): siRNA sense strand
gagugaaguccuacaaauu

SEQ ID NO: 1415451 - RNA, 19 nt, Homo sapiens
  misc_RNA (1)...(19): siRNA sense strand
gaaaugaagauggacaaau

SEQ ID NO: 1415452 - RNA, 19 nt, Homo sapiens
  misc_RNA (1)...(19): siRNA sense strand
uaacugcacuucgaaugug

SEQ ID NO: 1415453 - RNA, 19 nt, Homo sapiens
  misc_RNA (1)...(19): siRNA sense strand
cagcaccaauguuauuaau

SEQ ID NO: 1415454 - RNA, 19 nt, Homo sapiens
  misc_RNA (1)...(19): siRNA sense strand
cauuaguccuaucuuguaa

SEQ ID NO: 1415455 - RNA, 19 nt, Homo sapiens
  misc_RNA (1)...(19): siRNA sense strand
caagccuuauuucagguua

SEQ ID NO: 1415456 - RNA, 19 nt, Homo sapiens
  misc_RNA (1)...(19): siRNA sense strand
caagucaacagauacaaga

SEQ ID NO: 1415457 - RNA, 19 nt, Homo sapiens
  misc_RNA (1)...(19): siRNA sense strand
cagaggcuuccuuucauua

SEQ ID NO: 1415458 - RNA, 19 nt, Homo sapiens
  misc_RNA (1)...(19): siRNA sense strand
gacuuuaacugcacuucga

SEQ ID NO: 1415459 - RNA, 19 nt, Homo sapiens
  misc_RNA (1)...(19): siRNA sense strand
gcagcaccaauguuauuaa

SEQ ID NO: 1415460 - RNA, 19 nt, Homo sapiens
  misc_RNA (1)...(19): siRNA sense strand
gaaucucuccacuaucuug

SEQ ID NO: 1415461 - RNA, 19 nt, Homo sapiens
  misc_RNA (1)...(19): siRNA sense strand
acagaggcuuccuuucauu

SEQ ID NO: 1415462 - RNA, 19 nt, Homo sapiens
  misc_RNA (1)...(19): siRNA sense strand
gaggagacccuggacuuug

SEQ ID NO: 1415463 - RNA, 19 nt, Homo sapiens
  misc_RNA (1)...(19): siRNA sense strand
agacgaggaugaucaguac

SEQ ID NO: 1415464 - RNA, 19 nt, Homo sapiens
  misc_RNA (1)...(19): siRNA sense strand
cugcugcccugaugaagaa

SEQ ID NO: 1415465 - RNA, 19 nt, Homo sapiens
  misc_RNA (1)...(19): siRNA sense strand
caaaaucaauacacaggaa

SEQ ID NO: 1415466 - RNA, 19 nt, Homo sapiens
  misc_RNA (1)...(19): siRNA sense strand
aggaaucucuccacuaucu

SEQ ID NO: 1415467 - RNA, 19 nt, Homo sapiens
  misc_RNA (1)...(19): siRNA sense strand
aggagacccuggacuuuga

SEQ ID NO: 1415468 - RNA, 19 nt, Homo sapiens
  misc_RNA (1)...(19): siRNA sense strand
acaaaggcauuaguccuau

SEQ ID NO: 1415469 - RNA, 19 nt, Homo sapiens
  misc_RNA (1)...(19): siRNA sense strand
guaaucagacccaagucaa

SEQ ID NO: 1415470 - RNA, 19 nt, Homo sapiens
  misc_RNA (1)...(19): siRNA sense strand
aauuggauaugacgaguga

SEQ ID NO: 1415471 - RNA, 19 nt, Homo sapiens
  misc_RNA (1)...(19): siRNA sense strand
uacaaaggcauuaguccua

SEQ ID NO: 1415472 - RNA, 19 nt, Homo sapiens
  misc_RNA (1)...(19): siRNA sense strand
uaugacgagugaaguccua

SEQ ID NO: 1415473 - RNA, 19 nt, Homo sapiens
  misc_RNA (1)...(19): siRNA sense strand
gaugaagaaguuccugaau

SEQ ID NO: 1415474 - RNA, 19 nt, Homo sapiens
  misc_RNA (1)...(19): siRNA sense strand
gaggcuuccuuucauuaca

SEQ ID NO: 1415475 - RNA, 19 nt, Homo sapiens
  misc_RNA (1)...(19): siRNA sense strand
cugaaacccucuacaaagg

SEQ ID NO: 1415476 - RNA, 19 nt, Homo sapiens
  misc_RNA (1)...(19): siRNA sense strand
cagauacaagauuuccuua

SEQ ID NO: 1415477 - RNA, 19 nt, Homo sapiens
  misc_RNA (1)...(19): siRNA sense strand
ggccagccuugacaacguu

SEQ ID NO: 1415478 - RNA, 19 nt, Homo sapiens
  misc_RNA (1)...(19): siRNA sense strand
ucucuccacuaucuugaaa

SEQ ID NO: 1415479 - RNA, 19 nt, Homo sapiens
  misc_RNA (1)...(19): siRNA sense strand
aagaaguuccugaaucuga

SEQ ID NO: 1415480 - RNA, 19 nt, Homo sapiens
  misc_RNA (1)...(19): siRNA sense strand
uuacugaaacccucuacaa

SEQ ID NO: 1415481 - RNA, 19 nt, Homo sapiens
  misc_RNA (1)...(19): siRNA sense strand
gcaaagugugugcaagcaa

SEQ ID NO: 1415482 - RNA, 19 nt, Homo sapiens
  misc_RNA (1)...(19): siRNA sense strand
caaaggcauuaguccuauc

SEQ ID NO: 1415483 - RNA, 19 nt, Homo sapiens
  misc_RNA (1)...(19): siRNA sense strand
gugaaguccuacaaauuac

SEQ ID NO: 1415484 - RNA, 19 nt, Homo sapiens
  misc_RNA (1)...(19): siRNA sense strand
auggaagcauuucauugua

SEQ ID NO: 1415485 - RNA, 19 nt, Homo sapiens
  misc_RNA (1)...(19): siRNA sense strand
auacaagauuuccuuacug

SEQ ID NO: 1415486 - RNA, 19 nt, Homo sapiens
  misc_RNA (1)...(19): siRNA sense strand
ugaagcauuuucugaauug

SEQ ID NO: 1415487 - RNA, 19 nt, Homo sapiens
  misc_RNA (1)...(19): siRNA sense strand
aggcauuaguccuaucuug

SEQ ID NO: 1415488 - RNA, 19 nt, Homo sapiens
  misc_RNA (1)...(19): siRNA sense strand
augaagaaguuccugaauc

SEQ ID NO: 1415489 - RNA, 19 nt, Homo sapiens
  misc_RNA (1)...(19): siRNA sense strand
guuaggaaucucuccacua

SEQ ID NO: 1415490 - RNA, 19 nt, Homo sapiens
  misc_RNA (1)...(19): siRNA sense strand
gacccuggacuuugauuuc

SEQ ID NO: 1415491 - RNA, 19 nt, Homo sapiens
  misc_RNA (1)...(19): siRNA sense strand
ugaagauggacaaauaugu

SEQ ID NO: 1415492 - RNA, 19 nt, Homo sapiens
  misc_RNA (1)...(19): siRNA sense strand
cugauuugauggaagcauu

SEQ ID NO: 1415493 - RNA, 19 nt, Homo sapiens
  misc_RNA (1)...(19): siRNA sense strand
ugaggagacccuggacuuu

SEQ ID NO: 1415494 - RNA, 19 nt, Homo sapiens
  misc_RNA (1)...(19): siRNA sense strand
uaucaaaguaacaguggaa

SEQ ID NO: 1415495 - RNA, 19 nt, Homo sapiens
  misc_RNA (1)...(19): siRNA sense strand
ggauaugacgagugaaguc

SEQ ID NO: 1415496 - RNA, 19 nt, Homo sapiens
  misc_RNA (1)...(19): siRNA sense strand
aacagaggcuuccuuucau

SEQ ID NO: 1415497 - RNA, 19 nt, Homo sapiens
  misc_RNA (1)...(19): siRNA sense strand
aagacgaggaugaucagua

SEQ ID NO: 1415498 - RNA, 19 nt, Homo sapiens
  misc_RNA (1)...(19): siRNA sense strand
caccuugacuaucccaaag

SEQ ID NO: 1415499 - RNA, 19 nt, Homo sapiens
  misc_RNA (1)...(19): siRNA sense strand
uauuacugcugcccugaug

SEQ ID NO: 1415500 - RNA, 19 nt, Homo sapiens
  misc_RNA (1)...(19): siRNA sense strand
ggcauuaguccuaucuugu

SEQ ID NO: 1415501 - RNA, 19 nt, Homo sapiens
  misc_RNA (1)...(19): siRNA sense strand
acagauacaagauuuccuu

SEQ ID NO: 1415502 - RNA, 19 nt, Homo sapiens
  misc_RNA (1)...(19): siRNA sense strand
gugaagcauuuucugaauu

SEQ ID NO: 1415503 - RNA, 19 nt, Homo sapiens
  misc_RNA (1)...(19): siRNA sense strand
gaagaaguuccugaaucug

SEQ ID NO: 1415504 - RNA, 19 nt, Homo sapiens
  misc_RNA (1)...(19): siRNA sense strand
uacugaaacccucuacaaa

SEQ ID NO: 1415505 - RNA, 19 nt, Homo sapiens
  misc_RNA (1)...(19): siRNA sense strand
cugcagcaccaauguuauu

SEQ ID NO: 1415506 - RNA, 19 nt, Homo sapiens
  misc_RNA (1)...(19): siRNA sense strand
ugauggaagcauuucauug

SEQ ID NO: 1415507 - RNA, 19 nt, Homo sapiens
  misc_RNA (1)...(19): siRNA sense strand
ccaccuugacuaucccaaa

SEQ ID NO: 1415508 - RNA, 19 nt, Homo sapiens
  misc_RNA (1)...(19): siRNA sense strand
caaaguaacaguggaaaau

SEQ ID NO: 1415509 - RNA, 19 nt, Homo sapiens
  misc_RNA (1)...(19): siRNA sense strand
gaaguccuacaaauuacca

SEQ ID NO: 1415510 - RNA, 19 nt, Homo sapiens
  misc_RNA (1)...(19): siRNA sense strand
ugacccaacagauccaaga

SEQ ID NO: 1415511 - RNA, 19 nt, Homo sapiens
  misc_RNA (1)...(19): siRNA sense strand
ugaugaagaaguuccugaa

SEQ ID NO: 1415512 - RNA, 19 nt, Homo sapiens
  misc_RNA (1)...(19): siRNA sense strand
gugacagucugcaaaauca

SEQ ID NO: 1415513 - RNA, 19 nt, Homo sapiens
  misc_RNA (1)...(19): siRNA sense strand
guucccaccuugacuaucc

SEQ ID NO: 1415514 - RNA, 19 nt, Homo sapiens
  misc_RNA (1)...(19): siRNA sense strand
cuccugacaagccuuauuu

SEQ ID NO: 1415515 - RNA, 19 nt, Homo sapiens
  misc_RNA (1)...(19): siRNA sense strand
gacgagugaaguccuacaa

SEQ ID NO: 1415516 - RNA, 19 nt, Homo sapiens
  misc_RNA (1)...(19): siRNA sense strand
acugaaacccucuacaaag

SEQ ID NO: 1415517 - RNA, 19 nt, Homo sapiens
  misc_RNA (1)...(19): siRNA sense strand
agucaacagauacaagauu

SEQ ID NO: 1415518 - RNA, 19 nt, Homo sapiens
  misc_RNA (1)...(19): siRNA sense strand
aaggaggaguggugacagu

SEQ ID NO: 1415519 - RNA, 19 nt, Homo sapiens
  misc_RNA (1)...(19): siRNA sense strand
ccaagucaacagauacaag

SEQ ID NO: 1415520 - RNA, 19 nt, Homo sapiens
  misc_RNA (1)...(19): siRNA sense strand
ccugacaagccuuauuuca

SEQ ID NO: 1415521 - RNA, 19 nt, Homo sapiens
  misc_RNA (1)...(19): siRNA sense strand
gaagauggacaaauauguu

SEQ ID NO: 1415522 - RNA, 19 nt, Homo sapiens
  misc_RNA (1)...(19): siRNA sense strand
uaacagaggcuuccuuuca

SEQ ID NO: 1415523 - RNA, 19 nt, Homo sapiens
  misc_RNA (1)...(19): siRNA sense strand
gauuagaaaugaagaugga

SEQ ID NO: 1415524 - RNA, 19 nt, Homo sapiens
  misc_RNA (1)...(19): siRNA sense strand
gucaacagauacaagauuu

SEQ ID NO: 1415525 - RNA, 19 nt, Homo sapiens
  misc_RNA (1)...(19): siRNA sense strand
gauaacagaggcuuccuuu

SEQ ID NO: 1415526 - RNA, 19 nt, Homo sapiens
  misc_RNA (1)...(19): siRNA sense strand
gcauuaguccuaucuugua

SEQ ID NO: 1415527 - RNA, 19 nt, Homo sapiens
  misc_RNA (1)...(19): siRNA sense strand
ggaagcauuucauuguaau

SEQ ID NO: 1415528 - RNA, 19 nt, Homo sapiens
  misc_RNA (1)...(19): siRNA sense strand
gauacaagauuuccuuacu

SEQ ID NO: 1415529 - RNA, 19 nt, Homo sapiens
  misc_RNA (1)...(19): siRNA sense strand
ugaagaaguuccugaaucu

SEQ ID NO: 1415530 - RNA, 19 nt, Homo sapiens
  misc_RNA (1)...(19): siRNA sense strand
gaaguucccaccuugacua

SEQ ID NO: 1415531 - RNA, 19 nt, Homo sapiens
  misc_RNA (1)...(19): siRNA sense strand
cgagugaaguccuacaaau

SEQ ID NO: 1415532 - RNA, 19 nt, Homo sapiens
  misc_RNA (1)...(19): siRNA sense strand
gauggaagcauuucauugu

SEQ ID NO: 1415533 - RNA, 19 nt, Homo sapiens
  misc_RNA (1)...(19): siRNA sense strand
agugaaguccuacaaauua

SEQ ID NO: 1415534 - RNA, 19 nt, Homo sapiens
  misc_RNA (1)...(19): siRNA sense strand
uacaagauuuccuuacuga

SEQ ID NO: 1415535 - RNA, 19 nt, Homo sapiens
  misc_RNA (1)...(19): siRNA sense strand
gcauuucauuguaaucaga

SEQ ID NO: 1415536 - RNA, 19 nt, Homo sapiens
  misc_RNA (1)...(19): siRNA sense strand
uggaagcauuucauuguaa

SEQ ID NO: 1415537 - RNA, 19 nt, Homo sapiens
  misc_RNA (1)...(19): siRNA sense strand
aguccuaucuuguaaggua

SEQ ID NO: 1415538 - RNA, 19 nt, Homo sapiens
  misc_RNA (1)...(19): siRNA sense strand
agacccaagucaacagaua

SEQ ID NO: 1415539 - RNA, 19 nt, Homo sapiens
  misc_RNA (1)...(19): siRNA sense strand
gagugaaguccuacaaauu

SEQ ID NO: 1415540 - RNA, 19 nt, Homo sapiens
  misc_RNA (1)...(19): siRNA sense strand
gaaaugaagauggacaaau

SEQ ID NO: 1415541 - RNA, 19 nt, Homo sapiens
  misc_RNA (1)...(19): siRNA sense strand
cagcaccaauguuauuaau

SEQ ID NO: 1415542 - RNA, 19 nt, Homo sapiens
  misc_RNA (1)...(19): siRNA sense strand
cauuaguccuaucuuguaa

SEQ ID NO: 1415543 - RNA, 19 nt, Homo sapiens
  misc_RNA (1)...(19): siRNA sense strand
caagccuuauuucagguua

SEQ ID NO: 1415544 - RNA, 19 nt, Homo sapiens
  misc_RNA (1)...(19): siRNA sense strand
caagucaacagauacaaga

SEQ ID NO: 1415545 - RNA, 19 nt, Homo sapiens
  misc_RNA (1)...(19): siRNA sense strand
cagaggcuuccuuucauua

SEQ ID NO: 1415546 - RNA, 19 nt, Homo sapiens
  misc_RNA (1)...(19): siRNA sense strand
gcagcaccaauguuauuaa

SEQ ID NO: 1415547 - RNA, 19 nt, Homo sapiens
  misc_RNA (1)...(19): siRNA sense strand
gaggagacccuggacuuug

SEQ ID NO: 1415548 - RNA, 19 nt, Homo sapiens
  misc_RNA (1)...(19): siRNA sense strand
acagaggcuuccuuucauu

SEQ ID NO: 1415549 - RNA, 19 nt, Homo sapiens
  misc_RNA (1)...(19): siRNA sense strand
caaaaucaauacacaggaa

SEQ ID NO: 1415550 - RNA, 19 nt, Homo sapiens
  misc_RNA (1)...(19): siRNA sense strand
cugcugcccugaugaagaa

SEQ ID NO: 1415551 - RNA, 19 nt, Homo sapiens
  misc_RNA (1)...(19): siRNA sense strand
guaaucagacccaagucaa

SEQ ID NO: 1415552 - RNA, 19 nt, Homo sapiens
  misc_RNA (1)...(19): siRNA sense strand
aggagacccuggacuuuga

SEQ ID NO: 1415553 - RNA, 19 nt, Homo sapiens
  misc_RNA (1)...(19): siRNA sense strand
acaaaggcauuaguccuau

SEQ ID NO: 1415554 - RNA, 19 nt, Homo sapiens
  misc_RNA (1)...(19): siRNA sense strand
aauuggauaugacgaguga

SEQ ID NO: 1415555 - RNA, 19 nt, Homo sapiens
  misc_RNA (1)...(19): siRNA sense strand
uacaaaggcauuaguccua

SEQ ID NO: 1415556 - RNA, 19 nt, Homo sapiens
  misc_RNA (1)...(19): siRNA sense strand
uaugacgagugaaguccua

SEQ ID NO: 1415557 - RNA, 19 nt, Homo sapiens
  misc_RNA (1)...(19): siRNA sense strand
gaugaagaaguuccugaau

SEQ ID NO: 1415558 - RNA, 19 nt, Homo sapiens
  misc_RNA (1)...(19): siRNA sense strand
gaggcuuccuuucauuaca

SEQ ID NO: 1415559 - RNA, 19 nt, Homo sapiens
  misc_RNA (1)...(19): siRNA sense strand
cugaaacccucuacaaagg

SEQ ID NO: 1415560 - RNA, 19 nt, Homo sapiens
  misc_RNA (1)...(19): siRNA sense strand
cagauacaagauuuccuua

SEQ ID NO: 1415561 - RNA, 19 nt, Homo sapiens
  misc_RNA (1)...(19): siRNA sense strand
uuacugaaacccucuacaa

SEQ ID NO: 1415562 - RNA, 19 nt, Homo sapiens
  misc_RNA (1)...(19): siRNA sense strand
aagaaguuccugaaucuga

SEQ ID NO: 1415563 - RNA, 19 nt, Homo sapiens
  misc_RNA (1)...(19): siRNA sense strand
gugaaguccuacaaauuac

SEQ ID NO: 1415564 - RNA, 19 nt, Homo sapiens
  misc_RNA (1)...(19): siRNA sense strand
caaaggcauuaguccuauc

SEQ ID NO: 1415565 - RNA, 19 nt, Homo sapiens
  misc_RNA (1)...(19): siRNA sense strand
auggaagcauuucauugua

SEQ ID NO: 1415566 - RNA, 19 nt, Homo sapiens
  misc_RNA (1)...(19): siRNA sense strand
auacaagauuuccuuacug

SEQ ID NO: 1415567 - RNA, 19 nt, Homo sapiens
  misc_RNA (1)...(19): siRNA sense strand
ugaagcauuuucugaauug

SEQ ID NO: 1415568 - RNA, 19 nt, Homo sapiens
  misc_RNA (1)...(19): siRNA sense strand
aggcauuaguccuaucuug

SEQ ID NO: 1415569 - RNA, 19 nt, Homo sapiens
  misc_RNA (1)...(19): siRNA sense strand
augaagaaguuccugaauc

SEQ ID NO: 1415570 - RNA, 19 nt, Homo sapiens
  misc_RNA (1)...(19): siRNA sense strand
cugauuugauggaagcauu

SEQ ID NO: 1415571 - RNA, 19 nt, Homo sapiens
  misc_RNA (1)...(19): siRNA sense strand
ugaagauggacaaauaugu

SEQ ID NO: 1415572 - RNA, 19 nt, Homo sapiens
  misc_RNA (1)...(19): siRNA sense strand
gacccuggacuuugauuuc

SEQ ID NO: 1415573 - RNA, 19 nt, Homo sapiens
  misc_RNA (1)...(19): siRNA sense strand
ugaggagacccuggacuuu

SEQ ID NO: 1415574 - RNA, 19 nt, Homo sapiens
  misc_RNA (1)...(19): siRNA sense strand
ggauaugacgagugaaguc

SEQ ID NO: 1415575 - RNA, 19 nt, Homo sapiens
  misc_RNA (1)...(19): siRNA sense strand
aacagaggcuuccuuucau

SEQ ID NO: 1415576 - RNA, 19 nt, Homo sapiens
  misc_RNA (1)...(19): siRNA sense strand
caccuugacuaucccaaag

SEQ ID NO: 1415577 - RNA, 19 nt, Homo sapiens
  misc_RNA (1)...(19): siRNA sense strand
uauuacugcugcccugaug

SEQ ID NO: 1415578 - RNA, 19 nt, Homo sapiens
  misc_RNA (1)...(19): siRNA sense strand
ggcauuaguccuaucuugu

SEQ ID NO: 1415579 - RNA, 19 nt, Homo sapiens
  misc_RNA (1)...(19): siRNA sense strand
acagauacaagauuuccuu

SEQ ID NO: 1415580 - RNA, 19 nt, Homo sapiens
  misc_RNA (1)...(19): siRNA sense strand
gugaagcauuuucugaauu

SEQ ID NO: 1415581 - RNA, 19 nt, Homo sapiens
  misc_RNA (1)...(19): siRNA sense strand
gaagaaguuccugaaucug

SEQ ID NO: 1415582 - RNA, 19 nt, Homo sapiens
  misc_RNA (1)...(19): siRNA sense strand
uacugaaacccucuacaaa

SEQ ID NO: 1415583 - RNA, 19 nt, Homo sapiens
  misc_RNA (1)...(19): siRNA sense strand
ccaccuugacuaucccaaa

SEQ ID NO: 1415584 - RNA, 19 nt, Homo sapiens
  misc_RNA (1)...(19): siRNA sense strand
cugcagcaccaauguuauu

SEQ ID NO: 1415585 - RNA, 19 nt, Homo sapiens
  misc_RNA (1)...(19): siRNA sense strand
ugauggaagcauuucauug

SEQ ID NO: 1415586 - RNA, 19 nt, Homo sapiens
  misc_RNA (1)...(19): siRNA sense strand
gaaguccuacaaauuacca

SEQ ID NO: 1415587 - RNA, 19 nt, Homo sapiens
  misc_RNA (1)...(19): siRNA sense strand
ugaugaagaaguuccugaa

SEQ ID NO: 1415588 - RNA, 19 nt, Homo sapiens
  misc_RNA (1)...(19): siRNA sense strand
cuccugacaagccuuauuu

SEQ ID NO: 1415589 - RNA, 19 nt, Homo sapiens
  misc_RNA (1)...(19): siRNA sense strand
gugacagucugcaaaauca

SEQ ID NO: 1415590 - RNA, 19 nt, Homo sapiens
  misc_RNA (1)...(19): siRNA sense strand
guucccaccuugacuaucc

SEQ ID NO: 1415591 - RNA, 19 nt, Homo sapiens
  misc_RNA (1)...(19): siRNA sense strand
ccugacaagccuuauuuca

SEQ ID NO: 1415592 - RNA, 19 nt, Homo sapiens
  misc_RNA (1)...(19): siRNA sense strand
acugaaacccucuacaaag

SEQ ID NO: 1415593 - RNA, 19 nt, Homo sapiens
  misc_RNA (1)...(19): siRNA sense strand
agucaacagauacaagauu

SEQ ID NO: 1415594 - RNA, 19 nt, Homo sapiens
  misc_RNA (1)...(19): siRNA sense strand
gacgagugaaguccuacaa

SEQ ID NO: 1415595 - RNA, 19 nt, Homo sapiens
  misc_RNA (1)...(19): siRNA sense strand
ccaagucaacagauacaag

SEQ ID NO: 1415596 - RNA, 19 nt, Homo sapiens
  misc_RNA (1)...(19): siRNA sense strand
aaggaggaguggugacagu

SEQ ID NO: 1415597 - RNA, 19 nt, Homo sapiens
  misc_RNA (1)...(19): siRNA sense strand
caaagugugugcaagcaaa

SEQ ID NO: 1415598 - RNA, 19 nt, Homo sapiens
  misc_RNA (1)...(19): siRNA sense strand
gaagauggacaaauauguu

SEQ ID NO: 1415599 - RNA, 19 nt, Homo sapiens
  misc_RNA (1)...(19): siRNA sense strand
uaacagaggcuuccuuuca

SEQ ID NO: 1415600 - RNA, 19 nt, Homo sapiens
  misc_RNA (1)...(19): siRNA sense strand
gauuagaaaugaagaugga

SEQ ID NO: 1415601 - RNA, 19 nt, Homo sapiens
  misc_RNA (1)...(19): siRNA sense strand
ccacguguuucgcaacuaa

SEQ ID NO: 1415602 - RNA, 19 nt, Homo sapiens
  misc_RNA (1)...(19): siRNA sense strand
gauaacagaggcuuccuuu

SEQ ID NO: 1415603 - RNA, 19 nt, Homo sapiens
  misc_RNA (1)...(19): siRNA sense strand
gcauuaguccuaucuugua

SEQ ID NO: 1415604 - RNA, 19 nt, Homo sapiens
  misc_RNA (1)...(19): siRNA sense strand
gucaacagauacaagauuu

SEQ ID NO: 1415605 - RNA, 19 nt, Homo sapiens
  misc_RNA (1)...(19): siRNA sense strand
uuaggaaucucuccacuau

SEQ ID NO: 1415606 - RNA, 19 nt, Homo sapiens
  misc_RNA (1)...(19): siRNA sense strand
ggaagcauuucauuguaau

SEQ ID NO: 1415607 - RNA, 19 nt, Homo sapiens
  misc_RNA (1)...(19): siRNA sense strand
gauacaagauuuccuuacu

SEQ ID NO: 1415608 - RNA, 19 nt, Homo sapiens
  misc_RNA (1)...(19): siRNA sense strand
ugaagaaguuccugaaucu

SEQ ID NO: 1415609 - RNA, 19 nt, Homo sapiens
  misc_RNA (1)...(19): siRNA sense strand
gaaguucccaccuugacua

SEQ ID NO: 1415610 - RNA, 19 nt, Homo sapiens
  misc_RNA (1)...(19): siRNA sense strand
cgagugaaguccuacaaau

SEQ ID NO: 1415611 - RNA, 19 nt, Homo sapiens
  misc_RNA (1)...(19): siRNA sense strand
gauggaagcauuucauugu

SEQ ID NO: 1415612 - RNA, 19 nt, Homo sapiens
  misc_RNA (1)...(19): siRNA sense strand
agugaaguccuacaaauua

SEQ ID NO: 1415613 - RNA, 19 nt, Homo sapiens
  misc_RNA (1)...(19): siRNA sense strand
uacaagauuuccuuacuga

SEQ ID NO: 1415614 - RNA, 19 nt, Homo sapiens
  misc_RNA (1)...(19): siRNA sense strand
gcauuucauuguaaucaga

SEQ ID NO: 1415615 - RNA, 19 nt, Homo sapiens
  misc_RNA (1)...(19): siRNA sense strand
uggaagcauuucauuguaa

SEQ ID NO: 1415616 - RNA, 19 nt, Homo sapiens
  misc_RNA (1)...(19): siRNA sense strand
aguccuaucuuguaaggua

SEQ ID NO: 1415617 - RNA, 19 nt, Homo sapiens
  misc_RNA (1)...(19): siRNA sense strand
agacccaagucaacagaua

SEQ ID NO: 1415618 - RNA, 19 nt, Homo sapiens
  misc_RNA (1)...(19): siRNA sense strand
gagugaaguccuacaaauu

SEQ ID NO: 1415619 - RNA, 19 nt, Homo sapiens
  misc_RNA (1)...(19): siRNA sense strand
gaaaugaagauggacaaau

SEQ ID NO: 1415620 - RNA, 19 nt, Homo sapiens
  misc_RNA (1)...(19): siRNA sense strand
uaacugcacuucgaaugug

SEQ ID NO: 1415621 - RNA, 19 nt, Homo sapiens
  misc_RNA (1)...(19): siRNA sense strand
cagcaccaauguuauuaau

SEQ ID NO: 1415622 - RNA, 19 nt, Homo sapiens
  misc_RNA (1)...(19): siRNA sense strand
cauuaguccuaucuuguaa

SEQ ID NO: 1415623 - RNA, 19 nt, Homo sapiens
  misc_RNA (1)...(19): siRNA sense strand
caagccuuauuucagguua

SEQ ID NO: 1415624 - RNA, 19 nt, Homo sapiens
  misc_RNA (1)...(19): siRNA sense strand
caagucaacagauacaaga

SEQ ID NO: 1415625 - RNA, 19 nt, Homo sapiens
  misc_RNA (1)...(19): siRNA sense strand
cagaggcuuccuuucauua

SEQ ID NO: 1415626 - RNA, 19 nt, Homo sapiens
  misc_RNA (1)...(19): siRNA sense strand
gacuuuaacugcacuucga

SEQ ID NO: 1415627 - RNA, 19 nt, Homo sapiens
  misc_RNA (1)...(19): siRNA sense strand
gcagcaccaauguuauuaa

SEQ ID NO: 1415628 - RNA, 19 nt, Homo sapiens
  misc_RNA (1)...(19): siRNA sense strand
gaaucucuccacuaucuug

SEQ ID NO: 1415629 - RNA, 19 nt, Homo sapiens
  misc_RNA (1)...(19): siRNA sense strand
acagaggcuuccuuucauu

SEQ ID NO: 1415630 - RNA, 19 nt, Homo sapiens
  misc_RNA (1)...(19): siRNA sense strand
gaggagacccuggacuuug

SEQ ID NO: 1415631 - RNA, 19 nt, Homo sapiens
  misc_RNA (1)...(19): siRNA sense strand
agacgaggaugaucaguac

SEQ ID NO: 1415632 - RNA, 19 nt, Homo sapiens
  misc_RNA (1)...(19): siRNA sense strand
cugcugcccugaugaagaa

SEQ ID NO: 1415633 - RNA, 19 nt, Homo sapiens
  misc_RNA (1)...(19): siRNA sense strand
caaaaucaauacacaggaa

SEQ ID NO: 1415634 - RNA, 19 nt, Homo sapiens
  misc_RNA (1)...(19): siRNA sense strand
aggaaucucuccacuaucu

SEQ ID NO: 1415635 - RNA, 19 nt, Homo sapiens
  misc_RNA (1)...(19): siRNA sense strand
aggagacccuggacuuuga

SEQ ID NO: 1415636 - RNA, 19 nt, Homo sapiens
  misc_RNA (1)...(19): siRNA sense strand
acaaaggcauuaguccuau

SEQ ID NO: 1415637 - RNA, 19 nt, Homo sapiens
  misc_RNA (1)...(19): siRNA sense strand
guaaucagacccaagucaa

SEQ ID NO: 1415638 - RNA, 19 nt, Homo sapiens
  misc_RNA (1)...(19): siRNA sense strand
aauuggauaugacgaguga

SEQ ID NO: 1415639 - RNA, 19 nt, Homo sapiens
  misc_RNA (1)...(19): siRNA sense strand
uacaaaggcauuaguccua

SEQ ID NO: 1415640 - RNA, 19 nt, Homo sapiens
  misc_RNA (1)...(19): siRNA sense strand
uaugacgagugaaguccua

SEQ ID NO: 1415641 - RNA, 19 nt, Homo sapiens
  misc_RNA (1)...(19): siRNA sense strand
gaugaagaaguuccugaau

SEQ ID NO: 1415642 - RNA, 19 nt, Homo sapiens
  misc_RNA (1)...(19): siRNA sense strand
gaggcuuccuuucauuaca

SEQ ID NO: 1415643 - RNA, 19 nt, Homo sapiens
  misc_RNA (1)...(19): siRNA sense strand
cugaaacccucuacaaagg

SEQ ID NO: 1415644 - RNA, 19 nt, Homo sapiens
  misc_RNA (1)...(19): siRNA sense strand
cagauacaagauuuccuua

SEQ ID NO: 1415645 - RNA, 19 nt, Homo sapiens
  misc_RNA (1)...(19): siRNA sense strand
ggccagccuugacaacguu

SEQ ID NO: 1415646 - RNA, 19 nt, Homo sapiens
  misc_RNA (1)...(19): siRNA sense strand
ucucuccacuaucuugaaa

SEQ ID NO: 1415647 - RNA, 19 nt, Homo sapiens
  misc_RNA (1)...(19): siRNA sense strand
aagaaguuccugaaucuga

SEQ ID NO: 1415648 - RNA, 19 nt, Homo sapiens
  misc_RNA (1)...(19): siRNA sense strand
uuacugaaacccucuacaa

SEQ ID NO: 1415649 - RNA, 19 nt, Homo sapiens
  misc_RNA (1)...(19): siRNA sense strand
gcaaagugugugcaagcaa

SEQ ID NO: 1415650 - RNA, 19 nt, Homo sapiens
  misc_RNA (1)...(19): siRNA sense strand
caaaggcauuaguccuauc

SEQ ID NO: 1415651 - RNA, 19 nt, Homo sapiens
  misc_RNA (1)...(19): siRNA sense strand
gugaaguccuacaaauuac

SEQ ID NO: 1415652 - RNA, 19 nt, Homo sapiens
  misc_RNA (1)...(19): siRNA sense strand
auggaagcauuucauugua

SEQ ID NO: 1415653 - RNA, 19 nt, Homo sapiens
  misc_RNA (1)...(19): siRNA sense strand
auacaagauuuccuuacug

SEQ ID NO: 1415654 - RNA, 19 nt, Homo sapiens
  misc_RNA (1)...(19): siRNA sense strand
ugaagcauuuucugaauug

SEQ ID NO: 1415655 - RNA, 19 nt, Homo sapiens
  misc_RNA (1)...(19): siRNA sense strand
aggcauuaguccuaucuug

SEQ ID NO: 1415656 - RNA, 19 nt, Homo sapiens
  misc_RNA (1)...(19): siRNA sense strand
augaagaaguuccugaauc

SEQ ID NO: 1415657 - RNA, 19 nt, Homo sapiens
  misc_RNA (1)...(19): siRNA sense strand
guuaggaaucucuccacua

SEQ ID NO: 1415658 - RNA, 19 nt, Homo sapiens
  misc_RNA (1)...(19): siRNA sense strand
gacccuggacuuugauuuc

SEQ ID NO: 1415659 - RNA, 19 nt, Homo sapiens
  misc_RNA (1)...(19): siRNA sense strand
ugaagauggacaaauaugu

SEQ ID NO: 1415660 - RNA, 19 nt, Homo sapiens
  misc_RNA (1)...(19): siRNA sense strand
cugauuugauggaagcauu

SEQ ID NO: 1415661 - RNA, 19 nt, Homo sapiens
  misc_RNA (1)...(19): siRNA sense strand
ugaggagacccuggacuuu

SEQ ID NO: 1415662 - RNA, 19 nt, Homo sapiens
  misc_RNA (1)...(19): siRNA sense strand
uaucaaaguaacaguggaa

SEQ ID NO: 1415663 - RNA, 19 nt, Homo sapiens
  misc_RNA (1)...(19): siRNA sense strand
ggauaugacgagugaaguc

SEQ ID NO: 1415664 - RNA, 19 nt, Homo sapiens
  misc_RNA (1)...(19): siRNA sense strand
aacagaggcuuccuuucau

SEQ ID NO: 1415665 - RNA, 19 nt, Homo sapiens
  misc_RNA (1)...(19): siRNA sense strand
aagacgaggaugaucagua

SEQ ID NO: 1415666 - RNA, 19 nt, Homo sapiens
  misc_RNA (1)...(19): siRNA sense strand
caccuugacuaucccaaag

SEQ ID NO: 1415667 - RNA, 19 nt, Homo sapiens
  misc_RNA (1)...(19): siRNA sense strand
uauuacugcugcccugaug

SEQ ID NO: 1415668 - RNA, 19 nt, Homo sapiens
  misc_RNA (1)...(19): siRNA sense strand
ggcauuaguccuaucuugu

SEQ ID NO: 1415669 - RNA, 19 nt, Homo sapiens
  misc_RNA (1)...(19): siRNA sense strand
acagauacaagauuuccuu

SEQ ID NO: 1415670 - RNA, 19 nt, Homo sapiens
  misc_RNA (1)...(19): siRNA sense strand
gugaagcauuuucugaauu

SEQ ID NO: 1415671 - RNA, 19 nt, Homo sapiens
  misc_RNA (1)...(19): siRNA sense strand
gaagaaguuccugaaucug

SEQ ID NO: 1415672 - RNA, 19 nt, Homo sapiens
  misc_RNA (1)...(19): siRNA sense strand
uacugaaacccucuacaaa

SEQ ID NO: 1415673 - RNA, 19 nt, Homo sapiens
  misc_RNA (1)...(19): siRNA sense strand
cugcagcaccaauguuauu

SEQ ID NO: 1415674 - RNA, 19 nt, Homo sapiens
  misc_RNA (1)...(19): siRNA sense strand
ugauggaagcauuucauug

SEQ ID NO: 1415675 - RNA, 19 nt, Homo sapiens
  misc_RNA (1)...(19): siRNA sense strand
ccaccuugacuaucccaaa

SEQ ID NO: 1415676 - RNA, 19 nt, Homo sapiens
  misc_RNA (1)...(19): siRNA sense strand
caaaguaacaguggaaaau

SEQ ID NO: 1415677 - RNA, 19 nt, Homo sapiens
  misc_RNA (1)...(19): siRNA sense strand
gaaguccuacaaauuacca

SEQ ID NO: 1415678 - RNA, 19 nt, Homo sapiens
  misc_RNA (1)...(19): siRNA sense strand
ugacccaacagauccaaga

SEQ ID NO: 1415679 - RNA, 19 nt, Homo sapiens
  misc_RNA (1)...(19): siRNA sense strand
ugaugaagaaguuccugaa

SEQ ID NO: 1415680 - RNA, 19 nt, Homo sapiens
  misc_RNA (1)...(19): siRNA sense strand
gugacagucugcaaaauca

SEQ ID NO: 1415681 - RNA, 19 nt, Homo sapiens
  misc_RNA (1)...(19): siRNA sense strand
guucccaccuugacuaucc

SEQ ID NO: 1415682 - RNA, 19 nt, Homo sapiens
  misc_RNA (1)...(19): siRNA sense strand
cuccugacaagccuuauuu

SEQ ID NO: 1415683 - RNA, 19 nt, Homo sapiens
  misc_RNA (1)...(19): siRNA sense strand
gacgagugaaguccuacaa

SEQ ID NO: 1415684 - RNA, 19 nt, Homo sapiens
  misc_RNA (1)...(19): siRNA sense strand
acugaaacccucuacaaag

SEQ ID NO: 1415685 - RNA, 19 nt, Homo sapiens
  misc_RNA (1)...(19): siRNA sense strand
agucaacagauacaagauu

SEQ ID NO: 1415686 - RNA, 19 nt, Homo sapiens
  misc_RNA (1)...(19): siRNA sense strand
aaggaggaguggugacagu

SEQ ID NO: 1415687 - RNA, 19 nt, Homo sapiens
  misc_RNA (1)...(19): siRNA sense strand
ccaagucaacagauacaag

SEQ ID NO: 1415688 - RNA, 19 nt, Homo sapiens
  misc_RNA (1)...(19): siRNA sense strand
ccugacaagccuuauuuca

SEQ ID NO: 1415689 - RNA, 19 nt, Homo sapiens
  misc_RNA (1)...(19): siRNA sense strand
gaaaugaaauccaaagcuu

SEQ ID NO: 1415690 - RNA, 19 nt, Homo sapiens
  misc_RNA (1)...(19): siRNA sense strand
gaaagaauggugucaauga

SEQ ID NO: 1415691 - RNA, 19 nt, Homo sapiens
  misc_RNA (1)...(19): siRNA sense strand
uagaugagaucaagaauga

SEQ ID NO: 1415692 - RNA, 19 nt, Homo sapiens
  misc_RNA (1)...(19): siRNA sense strand
gaaagaagcguaugacaca

SEQ ID NO: 1415693 - RNA, 19 nt, Homo sapiens
  misc_RNA (1)...(19): siRNA sense strand
ucaaggacauuacuaguga

SEQ ID NO: 1415694 - RNA, 19 nt, Homo sapiens
  misc_RNA (1)...(19): siRNA sense strand
gaauugaggaagacuguua

SEQ ID NO: 1415695 - RNA, 19 nt, Homo sapiens
  misc_RNA (1)...(19): siRNA sense strand
gaaagaaagaagcguauga

SEQ ID NO: 1415696 - RNA, 19 nt, Homo sapiens
  misc_RNA (1)...(19): siRNA sense strand
ggacauuacuagugacuca

SEQ ID NO: 1415697 - RNA, 19 nt, Homo sapiens
  misc_RNA (1)...(19): siRNA sense strand
gacacuaagucaaguuaaa

SEQ ID NO: 1415698 - RNA, 19 nt, Homo sapiens
  misc_RNA (1)...(19): siRNA sense strand
gaggaagacuguuacuaca

SEQ ID NO: 1415699 - RNA, 19 nt, Homo sapiens
  misc_RNA (1)...(19): siRNA sense strand
ggcaucaacuucauggaaa

SEQ ID NO: 1415700 - RNA, 19 nt, Homo sapiens
  misc_RNA (1)...(19): siRNA sense strand
ggauuggaauugaggaaga

SEQ ID NO: 1415701 - RNA, 19 nt, Homo sapiens
  misc_RNA (1)...(19): siRNA sense strand
aaagaauggugucaaugaa

SEQ ID NO: 1415702 - RNA, 19 nt, Homo sapiens
  misc_RNA (1)...(19): siRNA sense strand
ugacugacaucaacuccaa

SEQ ID NO: 1415703 - RNA, 19 nt, Homo sapiens
  misc_RNA (1)...(19): siRNA sense strand
gcguaugacacauugauua

SEQ ID NO: 1415704 - RNA, 19 nt, Homo sapiens
  misc_RNA (1)...(19): siRNA sense strand
uggaaggccugcaucauga

SEQ ID NO: 1415705 - RNA, 19 nt, Homo sapiens
  misc_RNA (1)...(19): siRNA sense strand
agacacagcagaacagaaa

SEQ ID NO: 1415706 - RNA, 19 nt, Homo sapiens
  misc_RNA (1)...(19): siRNA sense strand
ccaagugacugacaucaac

SEQ ID NO: 1415707 - RNA, 19 nt, Homo sapiens
  misc_RNA (1)...(19): siRNA sense strand
guaauuggcaucaacuuca

SEQ ID NO: 1415708 - RNA, 19 nt, Homo sapiens
  misc_RNA (1)...(19): siRNA sense strand
uuacgucuguugcuagauu

SEQ ID NO: 1415709 - RNA, 19 nt, Homo sapiens
  misc_RNA (1)...(19): siRNA sense strand
guucaacugcuucguaauu

SEQ ID NO: 1415710 - RNA, 19 nt, Homo sapiens
  misc_RNA (1)...(19): siRNA sense strand
caaaauagaugagaucaag

SEQ ID NO: 1415711 - RNA, 19 nt, Homo sapiens
  misc_RNA (1)...(19): siRNA sense strand
guucuuacgucuguugcua

SEQ ID NO: 1415712 - RNA, 19 nt, Homo sapiens
  misc_RNA (1)...(19): siRNA sense strand
ucaacuucauggaaagaaa

SEQ ID NO: 1415713 - RNA, 19 nt, Homo sapiens
  misc_RNA (1)...(19): siRNA sense strand
agaagcguaugacacauug

SEQ ID NO: 1415714 - RNA, 19 nt, Homo sapiens
  misc_RNA (1)...(19): siRNA sense strand
gcuggagucaugacacuaa

SEQ ID NO: 1415715 - RNA, 19 nt, Homo sapiens
  misc_RNA (1)...(19): siRNA sense strand
gaugagaucaagaaugaca

SEQ ID NO: 1415716 - RNA, 19 nt, Homo sapiens
  misc_RNA (1)...(19): siRNA sense strand
ucgaaagaauggugucaau

SEQ ID NO: 1415717 - RNA, 19 nt, Homo sapiens
  misc_RNA (1)...(19): siRNA sense strand
cguaugacacauugauuaa

SEQ ID NO: 1415718 - RNA, 19 nt, Homo sapiens
  misc_RNA (1)...(19): siRNA sense strand
cagagaaaauucagacuau

SEQ ID NO: 1415719 - RNA, 19 nt, Homo sapiens
  misc_RNA (1)...(19): siRNA sense strand
gcaucaacuucauggaaag

SEQ ID NO: 1415720 - RNA, 19 nt, Homo sapiens
  misc_RNA (1)...(19): siRNA sense strand
ugaggaagacuguuacuac

SEQ ID NO: 1415721 - RNA, 19 nt, Homo sapiens
  misc_RNA (1)...(19): siRNA sense strand
ggaaagaaagaagcguaug

SEQ ID NO: 1415722 - RNA, 19 nt, Homo sapiens
  misc_RNA (1)...(19): siRNA sense strand
cacuauugcuggagucaug

SEQ ID NO: 1415723 - RNA, 19 nt, Homo sapiens
  misc_RNA (1)...(19): siRNA sense strand
gcagagaaaauucagacua

SEQ ID NO: 1415724 - RNA, 19 nt, Homo sapiens
  misc_RNA (1)...(19): siRNA sense strand
ggccaauucugccauaagc

SEQ ID NO: 1415725 - RNA, 19 nt, Homo sapiens
  misc_RNA (1)...(19): siRNA sense strand
uaauuggcaucaacuucau

SEQ ID NO: 1415726 - RNA, 19 nt, Homo sapiens
  misc_RNA (1)...(19): siRNA sense strand
aacauggaaucaucaagga

SEQ ID NO: 1415727 - RNA, 19 nt, Homo sapiens
  misc_RNA (1)...(19): siRNA sense strand
caucaacuccaagggauug

SEQ ID NO: 1415728 - RNA, 19 nt, Homo sapiens
  misc_RNA (1)...(19): siRNA sense strand
uacgucuguugcuagauua

SEQ ID NO: 1415729 - RNA, 19 nt, Homo sapiens
  misc_RNA (1)...(19): siRNA sense strand
ggagucaugacacuaaguc

SEQ ID NO: 1415730 - RNA, 19 nt, Homo sapiens
  misc_RNA (1)...(19): siRNA sense strand
cauggaaucaucaaggaau

SEQ ID NO: 1415731 - RNA, 19 nt, Homo sapiens
  misc_RNA (1)...(19): siRNA sense strand
cgaaagaauggugucaaug

SEQ ID NO: 1415732 - RNA, 19 nt, Homo sapiens
  misc_RNA (1)...(19): siRNA sense strand
gcaacaccaagugcaaaga

SEQ ID NO: 1415733 - RNA, 19 nt, Homo sapiens
  misc_RNA (1)...(19): siRNA sense strand
caacaccaagugcaaagag

SEQ ID NO: 1415734 - RNA, 19 nt, Homo sapiens
  misc_RNA (1)...(19): siRNA sense strand
gagaaaauucagacuauca

SEQ ID NO: 1415735 - RNA, 19 nt, Homo sapiens
  misc_RNA (1)...(19): siRNA sense strand
aagaagcguaugacacauu

SEQ ID NO: 1415736 - RNA, 19 nt, Homo sapiens
  misc_RNA (1)...(19): siRNA sense strand
caagacacagcagaacaga

SEQ ID NO: 1415737 - RNA, 19 nt, Homo sapiens
  misc_RNA (1)...(19): siRNA sense strand
ccuccuaccucugguucuu

SEQ ID NO: 1415738 - RNA, 19 nt, Homo sapiens
  misc_RNA (1)...(19): siRNA sense strand
caacuucauggaaagaaag

SEQ ID NO: 1415739 - RNA, 19 nt, Homo sapiens
  misc_RNA (1)...(19): siRNA sense strand
gcuagauuaucguccaaaa

SEQ ID NO: 1415740 - RNA, 19 nt, Homo sapiens
  misc_RNA (1)...(19): siRNA sense strand
uggcaucaacuucauggaa

SEQ ID NO: 1415741 - RNA, 19 nt, Homo sapiens
  misc_RNA (1)...(19): siRNA sense strand
cagcaacaccaagugcaaa

SEQ ID NO: 1415742 - RNA, 19 nt, Homo sapiens
  misc_RNA (1)...(19): siRNA sense strand
ucaacugcuucguaauugg

SEQ ID NO: 1415743 - RNA, 19 nt, Homo sapiens
  misc_RNA (1)...(19): siRNA sense strand
caaugaagccaaaauagau

SEQ ID NO: 1415744 - RNA, 19 nt, Homo sapiens
  misc_RNA (1)...(19): siRNA sense strand
uuaaugcccaagugacuga

SEQ ID NO: 1415745 - RNA, 19 nt, Homo sapiens
  misc_RNA (1)...(19): siRNA sense strand
ggaaggccugcaucaugau

SEQ ID NO: 1415746 - RNA, 19 nt, Homo sapiens
  misc_RNA (1)...(19): siRNA sense strand
cauuacuagugacucagaa

SEQ ID NO: 1415747 - RNA, 19 nt, Homo sapiens
  misc_RNA (1)...(19): siRNA sense strand
uucaacugcuucguaauug

SEQ ID NO: 1415748 - RNA, 19 nt, Homo sapiens
  misc_RNA (1)...(19): siRNA sense strand
aaugcacacucaccagcaa

SEQ ID NO: 1415749 - RNA, 19 nt, Homo sapiens
  misc_RNA (1)...(19): siRNA sense strand
ucagaaaugaaauccaaag

SEQ ID NO: 1415750 - RNA, 19 nt, Homo sapiens
  misc_RNA (1)...(19): siRNA sense strand
ccagcaacaccaagugcaa

SEQ ID NO: 1415751 - RNA, 19 nt, Homo sapiens
  misc_RNA (1)...(19): siRNA sense strand
gaaaugaaauccaaagcuu

SEQ ID NO: 1415752 - RNA, 19 nt, Homo sapiens
  misc_RNA (1)...(19): siRNA sense strand
gaaagaauggugucaauga

SEQ ID NO: 1415753 - RNA, 19 nt, Homo sapiens
  misc_RNA (1)...(19): siRNA sense strand
uagaugagaucaagaauga

SEQ ID NO: 1415754 - RNA, 19 nt, Homo sapiens
  misc_RNA (1)...(19): siRNA sense strand
gaaagaagcguaugacaca

SEQ ID NO: 1415755 - RNA, 19 nt, Homo sapiens
  misc_RNA (1)...(19): siRNA sense strand
ucaaggacauuacuaguga

SEQ ID NO: 1415756 - RNA, 19 nt, Homo sapiens
  misc_RNA (1)...(19): siRNA sense strand
gaauugaggaagacuguua

SEQ ID NO: 1415757 - RNA, 19 nt, Homo sapiens
  misc_RNA (1)...(19): siRNA sense strand
gaaagaaagaagcguauga

SEQ ID NO: 1415758 - RNA, 19 nt, Homo sapiens
  misc_RNA (1)...(19): siRNA sense strand
ggacauuacuagugacuca

SEQ ID NO: 1415759 - RNA, 19 nt, Homo sapiens
  misc_RNA (1)...(19): siRNA sense strand
gacacuaagucaaguuaaa

SEQ ID NO: 1415760 - RNA, 19 nt, Homo sapiens
  misc_RNA (1)...(19): siRNA sense strand
gaggaagacuguuacuaca

SEQ ID NO: 1415761 - RNA, 19 nt, Homo sapiens
  misc_RNA (1)...(19): siRNA sense strand
ggcaucaacuucauggaaa

SEQ ID NO: 1415762 - RNA, 19 nt, Homo sapiens
  misc_RNA (1)...(19): siRNA sense strand
ggauuggaauugaggaaga

SEQ ID NO: 1415763 - RNA, 19 nt, Homo sapiens
  misc_RNA (1)...(19): siRNA sense strand
aaagaauggugucaaugaa

SEQ ID NO: 1415764 - RNA, 19 nt, Homo sapiens
  misc_RNA (1)...(19): siRNA sense strand
ugacugacaucaacuccaa

SEQ ID NO: 1415765 - RNA, 19 nt, Homo sapiens
  misc_RNA (1)...(19): siRNA sense strand
gcguaugacacauugauua

SEQ ID NO: 1415766 - RNA, 19 nt, Homo sapiens
  misc_RNA (1)...(19): siRNA sense strand
uggaaggccugcaucauga

SEQ ID NO: 1415767 - RNA, 19 nt, Homo sapiens
  misc_RNA (1)...(19): siRNA sense strand
agacacagcagaacagaaa

SEQ ID NO: 1415768 - RNA, 19 nt, Homo sapiens
  misc_RNA (1)...(19): siRNA sense strand
ccaagugacugacaucaac

SEQ ID NO: 1415769 - RNA, 19 nt, Homo sapiens
  misc_RNA (1)...(19): siRNA sense strand
guaauuggcaucaacuuca

SEQ ID NO: 1415770 - RNA, 19 nt, Homo sapiens
  misc_RNA (1)...(19): siRNA sense strand
uuacgucuguugcuagauu

SEQ ID NO: 1415771 - RNA, 19 nt, Homo sapiens
  misc_RNA (1)...(19): siRNA sense strand
guucaacugcuucguaauu

SEQ ID NO: 1415772 - RNA, 19 nt, Homo sapiens
  misc_RNA (1)...(19): siRNA sense strand
caaaauagaugagaucaag

SEQ ID NO: 1415773 - RNA, 19 nt, Homo sapiens
  misc_RNA (1)...(19): siRNA sense strand
guucuuacgucuguugcua

SEQ ID NO: 1415774 - RNA, 19 nt, Homo sapiens
  misc_RNA (1)...(19): siRNA sense strand
ucaacuucauggaaagaaa

SEQ ID NO: 1415775 - RNA, 19 nt, Homo sapiens
  misc_RNA (1)...(19): siRNA sense strand
agaagcguaugacacauug

SEQ ID NO: 1415776 - RNA, 19 nt, Homo sapiens
  misc_RNA (1)...(19): siRNA sense strand
gcuggagucaugacacuaa

SEQ ID NO: 1415777 - RNA, 19 nt, Homo sapiens
  misc_RNA (1)...(19): siRNA sense strand
gaugagaucaagaaugaca

SEQ ID NO: 1415778 - RNA, 19 nt, Homo sapiens
  misc_RNA (1)...(19): siRNA sense strand
ucgaaagaauggugucaau

SEQ ID NO: 1415779 - RNA, 19 nt, Homo sapiens
  misc_RNA (1)...(19): siRNA sense strand
cguaugacacauugauuaa

SEQ ID NO: 1415780 - RNA, 19 nt, Homo sapiens
  misc_RNA (1)...(19): siRNA sense strand
cagagaaaauucagacuau

SEQ ID NO: 1415781 - RNA, 19 nt, Homo sapiens
  misc_RNA (1)...(19): siRNA sense strand
gcaucaacuucauggaaag

SEQ ID NO: 1415782 - RNA, 19 nt, Homo sapiens
  misc_RNA (1)...(19): siRNA sense strand
ugaggaagacuguuacuac

SEQ ID NO: 1415783 - RNA, 19 nt, Homo sapiens
  misc_RNA (1)...(19): siRNA sense strand
ggaaagaaagaagcguaug

SEQ ID NO: 1415784 - RNA, 19 nt, Homo sapiens
  misc_RNA (1)...(19): siRNA sense strand
cacuauugcuggagucaug

SEQ ID NO: 1415785 - RNA, 19 nt, Homo sapiens
  misc_RNA (1)...(19): siRNA sense strand
gcagagaaaauucagacua

SEQ ID NO: 1415786 - RNA, 19 nt, Homo sapiens
  misc_RNA (1)...(19): siRNA sense strand
ggccaauucugccauaagc

SEQ ID NO: 1415787 - RNA, 19 nt, Homo sapiens
  misc_RNA (1)...(19): siRNA sense strand
uaauuggcaucaacuucau

SEQ ID NO: 1415788 - RNA, 19 nt, Homo sapiens
  misc_RNA (1)...(19): siRNA sense strand
aacauggaaucaucaagga

SEQ ID NO: 1415789 - RNA, 19 nt, Homo sapiens
  misc_RNA (1)...(19): siRNA sense strand
caucaacuccaagggauug

SEQ ID NO: 1415790 - RNA, 19 nt, Homo sapiens
  misc_RNA (1)...(19): siRNA sense strand
uacgucuguugcuagauua

SEQ ID NO: 1415791 - RNA, 19 nt, Homo sapiens
  misc_RNA (1)...(19): siRNA sense strand
ggagucaugacacuaaguc

SEQ ID NO: 1415792 - RNA, 19 nt, Homo sapiens
  misc_RNA (1)...(19): siRNA sense strand
cauggaaucaucaaggaau

SEQ ID NO: 1415793 - RNA, 19 nt, Homo sapiens
  misc_RNA (1)...(19): siRNA sense strand
cgaaagaauggugucaaug

SEQ ID NO: 1415794 - RNA, 19 nt, Homo sapiens
  misc_RNA (1)...(19): siRNA sense strand
gcaacaccaagugcaaaga

SEQ ID NO: 1415795 - RNA, 19 nt, Homo sapiens
  misc_RNA (1)...(19): siRNA sense strand
caacaccaagugcaaagag

SEQ ID NO: 1415796 - RNA, 19 nt, Homo sapiens
  misc_RNA (1)...(19): siRNA sense strand
gagaaaauucagacuauca

SEQ ID NO: 1415797 - RNA, 19 nt, Homo sapiens
  misc_RNA (1)...(19): siRNA sense strand
aagaagcguaugacacauu

SEQ ID NO: 1415798 - RNA, 19 nt, Homo sapiens
  misc_RNA (1)...(19): siRNA sense strand
caagacacagcagaacaga

SEQ ID NO: 1415799 - RNA, 19 nt, Homo sapiens
  misc_RNA (1)...(19): siRNA sense strand
ccuccuaccucugguucuu

SEQ ID NO: 1415800 - RNA, 19 nt, Homo sapiens
  misc_RNA (1)...(19): siRNA sense strand
caacuucauggaaagaaag

SEQ ID NO: 1415801 - RNA, 19 nt, Homo sapiens
  misc_RNA (1)...(19): siRNA sense strand
gcuagauuaucguccaaaa

SEQ ID NO: 1415802 - RNA, 19 nt, Homo sapiens
  misc_RNA (1)...(19): siRNA sense strand
uggcaucaacuucauggaa

SEQ ID NO: 1415803 - RNA, 19 nt, Homo sapiens
  misc_RNA (1)...(19): siRNA sense strand
cagcaacaccaagugcaaa

SEQ ID NO: 1415804 - RNA, 19 nt, Homo sapiens
  misc_RNA (1)...(19): siRNA sense strand
ucaacugcuucguaauugg

SEQ ID NO: 1415805 - RNA, 19 nt, Homo sapiens
  misc_RNA (1)...(19): siRNA sense strand
caaugaagccaaaauagau

SEQ ID NO: 1415806 - RNA, 19 nt, Homo sapiens
  misc_RNA (1)...(19): siRNA sense strand
uuaaugcccaagugacuga

SEQ ID NO: 1415807 - RNA, 19 nt, Homo sapiens
  misc_RNA (1)...(19): siRNA sense strand
ggaaggccugcaucaugau

SEQ ID NO: 1415808 - RNA, 19 nt, Homo sapiens
  misc_RNA (1)...(19): siRNA sense strand
cauuacuagugacucagaa

SEQ ID NO: 1415809 - RNA, 19 nt, Homo sapiens
  misc_RNA (1)...(19): siRNA sense strand
uucaacugcuucguaauug

SEQ ID NO: 1415810 - RNA, 19 nt, Homo sapiens
  misc_RNA (1)...(19): siRNA sense strand
aaugcacacucaccagcaa

SEQ ID NO: 1415811 - RNA, 19 nt, Homo sapiens
  misc_RNA (1)...(19): siRNA sense strand
ucagaaaugaaauccaaag

SEQ ID NO: 1415812 - RNA, 19 nt, Homo sapiens
  misc_RNA (1)...(19): siRNA sense strand
ccagcaacaccaagugcaa

SEQ ID NO: 1415813 - RNA, 19 nt, Homo sapiens
  misc_RNA (1)...(19): siRNA sense strand
gaauugaggaagacuguua

SEQ ID NO: 1415814 - RNA, 19 nt, Homo sapiens
  misc_RNA (1)...(19): siRNA sense strand
gaggaagacuguuacuaca

SEQ ID NO: 1415815 - RNA, 19 nt, Homo sapiens
  misc_RNA (1)...(19): siRNA sense strand
ggauuggaauugaggaaga

SEQ ID NO: 1415816 - RNA, 19 nt, Homo sapiens
  misc_RNA (1)...(19): siRNA sense strand
ugacugacaucaacuccaa

SEQ ID NO: 1415817 - RNA, 19 nt, Homo sapiens
  misc_RNA (1)...(19): siRNA sense strand
uggaaggccugcaucauga

SEQ ID NO: 1415818 - RNA, 19 nt, Homo sapiens
  misc_RNA (1)...(19): siRNA sense strand
uuacgucuguugcuagauu

SEQ ID NO: 1415819 - RNA, 19 nt, Homo sapiens
  misc_RNA (1)...(19): siRNA sense strand
ccaagugacugacaucaac

SEQ ID NO: 1415820 - RNA, 19 nt, Homo sapiens
  misc_RNA (1)...(19): siRNA sense strand
guucuuacgucuguugcua

SEQ ID NO: 1415821 - RNA, 19 nt, Homo sapiens
  misc_RNA (1)...(19): siRNA sense strand
ugaggaagacuguuacuac

SEQ ID NO: 1415822 - RNA, 19 nt, Homo sapiens
  misc_RNA (1)...(19): siRNA sense strand
ggccaauucugccauaagc

SEQ ID NO: 1415823 - RNA, 19 nt, Homo sapiens
  misc_RNA (1)...(19): siRNA sense strand
aacauggaaucaucaagga

SEQ ID NO: 1415824 - RNA, 19 nt, Homo sapiens
  misc_RNA (1)...(19): siRNA sense strand
uacgucuguugcuagauua

SEQ ID NO: 1415825 - RNA, 19 nt, Homo sapiens
  misc_RNA (1)...(19): siRNA sense strand
caucaacuccaagggauug

SEQ ID NO: 1415826 - RNA, 19 nt, Homo sapiens
  misc_RNA (1)...(19): siRNA sense strand
cauggaaucaucaaggaau

SEQ ID NO: 1415827 - RNA, 19 nt, Homo sapiens
  misc_RNA (1)...(19): siRNA sense strand
gcaacaccaagugcaaaga

SEQ ID NO: 1415828 - RNA, 19 nt, Homo sapiens
  misc_RNA (1)...(19): siRNA sense strand
caacaccaagugcaaagag

SEQ ID NO: 1415829 - RNA, 19 nt, Homo sapiens
  misc_RNA (1)...(19): siRNA sense strand
gcuagauuaucguccaaaa

SEQ ID NO: 1415830 - RNA, 19 nt, Homo sapiens
  misc_RNA (1)...(19): siRNA sense strand
ccuccuaccucugguucuu

SEQ ID NO: 1415831 - RNA, 19 nt, Homo sapiens
  misc_RNA (1)...(19): siRNA sense strand
cagcaacaccaagugcaaa

SEQ ID NO: 1415832 - RNA, 19 nt, Homo sapiens
  misc_RNA (1)...(19): siRNA sense strand
uuaaugcccaagugacuga

SEQ ID NO: 1415833 - RNA, 19 nt, Homo sapiens
  misc_RNA (1)...(19): siRNA sense strand
ggaaggccugcaucaugau

SEQ ID NO: 1415834 - RNA, 19 nt, Homo sapiens
  misc_RNA (1)...(19): siRNA sense strand
aaugcacacucaccagcaa

SEQ ID NO: 1415835 - RNA, 19 nt, Homo sapiens
  misc_RNA (1)...(19): siRNA sense strand
ccagcaacaccaagugcaa

SEQ ID NO: 1415836 - RNA, 19 nt, Homo sapiens
  misc_RNA (1)...(19): siRNA sense strand
gaauugaggaagacuguua

SEQ ID NO: 1415837 - RNA, 19 nt, Homo sapiens
  misc_RNA (1)...(19): siRNA sense strand
gaggaagacuguuacuaca

SEQ ID NO: 1415838 - RNA, 19 nt, Homo sapiens
  misc_RNA (1)...(19): siRNA sense strand
ggauuggaauugaggaaga

SEQ ID NO: 1415839 - RNA, 19 nt, Homo sapiens
  misc_RNA (1)...(19): siRNA sense strand
ugacugacaucaacuccaa

SEQ ID NO: 1415840 - RNA, 19 nt, Homo sapiens
  misc_RNA (1)...(19): siRNA sense strand
uggaaggccugcaucauga

SEQ ID NO: 1415841 - RNA, 19 nt, Homo sapiens
  misc_RNA (1)...(19): siRNA sense strand
uuacgucuguugcuagauu

SEQ ID NO: 1415842 - RNA, 19 nt, Homo sapiens
  misc_RNA (1)...(19): siRNA sense strand
ccaagugacugacaucaac

SEQ ID NO: 1415843 - RNA, 19 nt, Homo sapiens
  misc_RNA (1)...(19): siRNA sense strand
guucuuacgucuguugcua

SEQ ID NO: 1415844 - RNA, 19 nt, Homo sapiens
  misc_RNA (1)...(19): siRNA sense strand
ugaggaagacuguuacuac

SEQ ID NO: 1415845 - RNA, 19 nt, Homo sapiens
  misc_RNA (1)...(19): siRNA sense strand
ggccaauucugccauaagc

SEQ ID NO: 1415846 - RNA, 19 nt, Homo sapiens
  misc_RNA (1)...(19): siRNA sense strand
aacauggaaucaucaagga

SEQ ID NO: 1415847 - RNA, 19 nt, Homo sapiens
  misc_RNA (1)...(19): siRNA sense strand
uacgucuguugcuagauua

SEQ ID NO: 1415848 - RNA, 19 nt, Homo sapiens
  misc_RNA (1)...(19): siRNA sense strand
caucaacuccaagggauug

SEQ ID NO: 1415849 - RNA, 19 nt, Homo sapiens
  misc_RNA (1)...(19): siRNA sense strand
cauggaaucaucaaggaau

SEQ ID NO: 1415850 - RNA, 19 nt, Homo sapiens
  misc_RNA (1)...(19): siRNA sense strand
gcaacaccaagugcaaaga

SEQ ID NO: 1415851 - RNA, 19 nt, Homo sapiens
  misc_RNA (1)...(19): siRNA sense strand
caacaccaagugcaaagag

SEQ ID NO: 1415852 - RNA, 19 nt, Homo sapiens
  misc_RNA (1)...(19): siRNA sense strand
gcuagauuaucguccaaaa

SEQ ID NO: 1415853 - RNA, 19 nt, Homo sapiens
  misc_RNA (1)...(19): siRNA sense strand
ccuccuaccucugguucuu

SEQ ID NO: 1415854 - RNA, 19 nt, Homo sapiens
  misc_RNA (1)...(19): siRNA sense strand
cagcaacaccaagugcaaa

SEQ ID NO: 1415855 - RNA, 19 nt, Homo sapiens
  misc_RNA (1)...(19): siRNA sense strand
uuaaugcccaagugacuga

SEQ ID NO: 1415856 - RNA, 19 nt, Homo sapiens
  misc_RNA (1)...(19): siRNA sense strand
ggaaggccugcaucaugau

SEQ ID NO: 1415857 - RNA, 19 nt, Homo sapiens
  misc_RNA (1)...(19): siRNA sense strand
aaugcacacucaccagcaa

SEQ ID NO: 1415858 - RNA, 19 nt, Homo sapiens
  misc_RNA (1)...(19): siRNA sense strand
ccagcaacaccaagugcaa

SEQ ID NO: 1415859 - RNA, 19 nt, Homo sapiens
  misc_RNA (1)...(19): siRNA sense strand
gaauugaggaagacuguua

SEQ ID NO: 1415860 - RNA, 19 nt, Homo sapiens
  misc_RNA (1)...(19): siRNA sense strand
gaggaagacuguuacuaca

SEQ ID NO: 1415861 - RNA, 19 nt, Homo sapiens
  misc_RNA (1)...(19): siRNA sense strand
ggauuggaauugaggaaga

SEQ ID NO: 1415862 - RNA, 19 nt, Homo sapiens
  misc_RNA (1)...(19): siRNA sense strand
ugacugacaucaacuccaa

SEQ ID NO: 1415863 - RNA, 19 nt, Homo sapiens
  misc_RNA (1)...(19): siRNA sense strand
uggaaggccugcaucauga

SEQ ID NO: 1415864 - RNA, 19 nt, Homo sapiens
  misc_RNA (1)...(19): siRNA sense strand
uuacgucuguugcuagauu

SEQ ID NO: 1415865 - RNA, 19 nt, Homo sapiens
  misc_RNA (1)...(19): siRNA sense strand
ccaagugacugacaucaac

SEQ ID NO: 1415866 - RNA, 19 nt, Homo sapiens
  misc_RNA (1)...(19): siRNA sense strand
guucuuacgucuguugcua

SEQ ID NO: 1415867 - RNA, 19 nt, Homo sapiens
  misc_RNA (1)...(19): siRNA sense strand
ugaggaagacuguuacuac

SEQ ID NO: 1415868 - RNA, 19 nt, Homo sapiens
  misc_RNA (1)...(19): siRNA sense strand
ggccaauucugccauaagc

SEQ ID NO: 1415869 - RNA, 19 nt, Homo sapiens
  misc_RNA (1)...(19): siRNA sense strand
aacauggaaucaucaagga

SEQ ID NO: 1415870 - RNA, 19 nt, Homo sapiens
  misc_RNA (1)...(19): siRNA sense strand
uacgucuguugcuagauua

SEQ ID NO: 1415871 - RNA, 19 nt, Homo sapiens
  misc_RNA (1)...(19): siRNA sense strand
caucaacuccaagggauug

SEQ ID NO: 1415872 - RNA, 19 nt, Homo sapiens
  misc_RNA (1)...(19): siRNA sense strand
cauggaaucaucaaggaau

SEQ ID NO: 1415873 - RNA, 19 nt, Homo sapiens
  misc_RNA (1)...(19): siRNA sense strand
gcaacaccaagugcaaaga

SEQ ID NO: 1415874 - RNA, 19 nt, Homo sapiens
  misc_RNA (1)...(19): siRNA sense strand
caacaccaagugcaaagag

SEQ ID NO: 1415875 - RNA, 19 nt, Homo sapiens
  misc_RNA (1)...(19): siRNA sense strand
gcuagauuaucguccaaaa

SEQ ID NO: 1415876 - RNA, 19 nt, Homo sapiens
  misc_RNA (1)...(19): siRNA sense strand
ccuccuaccucugguucuu

SEQ ID NO: 1415877 - RNA, 19 nt, Homo sapiens
  misc_RNA (1)...(19): siRNA sense strand
cagcaacaccaagugcaaa

SEQ ID NO: 1415878 - RNA, 19 nt, Homo sapiens
  misc_RNA (1)...(19): siRNA sense strand
uuaaugcccaagugacuga

SEQ ID NO: 1415879 - RNA, 19 nt, Homo sapiens
  misc_RNA (1)...(19): siRNA sense strand
ggaaggccugcaucaugau

SEQ ID NO: 1415880 - RNA, 19 nt, Homo sapiens
  misc_RNA (1)...(19): siRNA sense strand
aaugcacacucaccagcaa

SEQ ID NO: 1415881 - RNA, 19 nt, Homo sapiens
  misc_RNA (1)...(19): siRNA sense strand
ccagcaacaccaagugcaa

SEQ ID NO: 1415882 - RNA, 19 nt, Homo sapiens
  misc_RNA (1)...(19): siRNA sense strand
gaauugaggaagacuguua

SEQ ID NO: 1415883 - RNA, 19 nt, Homo sapiens
  misc_RNA (1)...(19): siRNA sense strand
gaggaagacuguuacuaca

SEQ ID NO: 1415884 - RNA, 19 nt, Homo sapiens
  misc_RNA (1)...(19): siRNA sense strand
ggauuggaauugaggaaga

SEQ ID NO: 1415885 - RNA, 19 nt, Homo sapiens
  misc_RNA (1)...(19): siRNA sense strand
ugacugacaucaacuccaa

SEQ ID NO: 1415886 - RNA, 19 nt, Homo sapiens
  misc_RNA (1)...(19): siRNA sense strand
uggaaggccugcaucauga

SEQ ID NO: 1415887 - RNA, 19 nt, Homo sapiens
  misc_RNA (1)...(19): siRNA sense strand
uuacgucuguugcuagauu

SEQ ID NO: 1415888 - RNA, 19 nt, Homo sapiens
  misc_RNA (1)...(19): siRNA sense strand
ccaagugacugacaucaac

SEQ ID NO: 1415889 - RNA, 19 nt, Homo sapiens
  misc_RNA (1)...(19): siRNA sense strand
guucuuacgucuguugcua

SEQ ID NO: 1415890 - RNA, 19 nt, Homo sapiens
  misc_RNA (1)...(19): siRNA sense strand
ugaggaagacuguuacuac

SEQ ID NO: 1415891 - RNA, 19 nt, Homo sapiens
  misc_RNA (1)...(19): siRNA sense strand
ggccaauucugccauaagc

SEQ ID NO: 1415892 - RNA, 19 nt, Homo sapiens
  misc_RNA (1)...(19): siRNA sense strand
aacauggaaucaucaagga

SEQ ID NO: 1415893 - RNA, 19 nt, Homo sapiens
  misc_RNA (1)...(19): siRNA sense strand
uacgucuguugcuagauua

SEQ ID NO: 1415894 - RNA, 19 nt, Homo sapiens
  misc_RNA (1)...(19): siRNA sense strand
caucaacuccaagggauug

SEQ ID NO: 1415895 - RNA, 19 nt, Homo sapiens
  misc_RNA (1)...(19): siRNA sense strand
cauggaaucaucaaggaau

SEQ ID NO: 1415896 - RNA, 19 nt, Homo sapiens
  misc_RNA (1)...(19): siRNA sense strand
gcaacaccaagugcaaaga

SEQ ID NO: 1415897 - RNA, 19 nt, Homo sapiens
  misc_RNA (1)...(19): siRNA sense strand
caacaccaagugcaaagag

SEQ ID NO: 1415898 - RNA, 19 nt, Homo sapiens
  misc_RNA (1)...(19): siRNA sense strand
gcuagauuaucguccaaaa

SEQ ID NO: 1415899 - RNA, 19 nt, Homo sapiens
  misc_RNA (1)...(19): siRNA sense strand
ccuccuaccucugguucuu

SEQ ID NO: 1415900 - RNA, 19 nt, Homo sapiens
  misc_RNA (1)...(19): siRNA sense strand
cagcaacaccaagugcaaa

SEQ ID NO: 1415901 - RNA, 19 nt, Homo sapiens
  misc_RNA (1)...(19): siRNA sense strand
uuaaugcccaagugacuga

SEQ ID NO: 1415902 - RNA, 19 nt, Homo sapiens
  misc_RNA (1)...(19): siRNA sense strand
ggaaggccugcaucaugau

SEQ ID NO: 1415903 - RNA, 19 nt, Homo sapiens
  misc_RNA (1)...(19): siRNA sense strand
aaugcacacucaccagcaa

SEQ ID NO: 1415904 - RNA, 19 nt, Homo sapiens
  misc_RNA (1)...(19): siRNA sense strand
ccagcaacaccaagugcaa

SEQ ID NO: 1415905 - RNA, 19 nt, Homo sapiens
  misc_RNA (1)...(19): siRNA sense strand
gaauugaggaagacuguua

SEQ ID NO: 1415906 - RNA, 19 nt, Homo sapiens
  misc_RNA (1)...(19): siRNA sense strand
gaggaagacuguuacuaca

SEQ ID NO: 1415907 - RNA, 19 nt, Homo sapiens
  misc_RNA (1)...(19): siRNA sense strand
ggauuggaauugaggaaga

SEQ ID NO: 1415908 - RNA, 19 nt, Homo sapiens
  misc_RNA (1)...(19): siRNA sense strand
ugacugacaucaacuccaa

SEQ ID NO: 1415909 - RNA, 19 nt, Homo sapiens
  misc_RNA (1)...(19): siRNA sense strand
uggaaggccugcaucauga

SEQ ID NO: 1415910 - RNA, 19 nt, Homo sapiens
  misc_RNA (1)...(19): siRNA sense strand
uuacgucuguugcuagauu

SEQ ID NO: 1415911 - RNA, 19 nt, Homo sapiens
  misc_RNA (1)...(19): siRNA sense strand
ccaagugacugacaucaac

SEQ ID NO: 1415912 - RNA, 19 nt, Homo sapiens
  misc_RNA (1)...(19): siRNA sense strand
guucuuacgucuguugcua

SEQ ID NO: 1415913 - RNA, 19 nt, Homo sapiens
  misc_RNA (1)...(19): siRNA sense strand
ugaggaagacuguuacuac

SEQ ID NO: 1415914 - RNA, 19 nt, Homo sapiens
  misc_RNA (1)...(19): siRNA sense strand
ggccaauucugccauaagc

SEQ ID NO: 1415915 - RNA, 19 nt, Homo sapiens
  misc_RNA (1)...(19): siRNA sense strand
aacauggaaucaucaagga

SEQ ID NO: 1415916 - RNA, 19 nt, Homo sapiens
  misc_RNA (1)...(19): siRNA sense strand
uacgucuguugcuagauua

SEQ ID NO: 1415917 - RNA, 19 nt, Homo sapiens
  misc_RNA (1)...(19): siRNA sense strand
caucaacuccaagggauug

SEQ ID NO: 1415918 - RNA, 19 nt, Homo sapiens
  misc_RNA (1)...(19): siRNA sense strand
cauggaaucaucaaggaau

SEQ ID NO: 1415919 - RNA, 19 nt, Homo sapiens
  misc_RNA (1)...(19): siRNA sense strand
gcaacaccaagugcaaaga

SEQ ID NO: 1415920 - RNA, 19 nt, Homo sapiens
  misc_RNA (1)...(19): siRNA sense strand
caacaccaagugcaaagag

SEQ ID NO: 1415921 - RNA, 19 nt, Homo sapiens
  misc_RNA (1)...(19): siRNA sense strand
gcuagauuaucguccaaaa

SEQ ID NO: 1415922 - RNA, 19 nt, Homo sapiens
  misc_RNA (1)...(19): siRNA sense strand
ccuccuaccucugguucuu

SEQ ID NO: 1415923 - RNA, 19 nt, Homo sapiens
  misc_RNA (1)...(19): siRNA sense strand
cagcaacaccaagugcaaa

SEQ ID NO: 1415924 - RNA, 19 nt, Homo sapiens
  misc_RNA (1)...(19): siRNA sense strand
uuaaugcccaagugacuga

SEQ ID NO: 1415925 - RNA, 19 nt, Homo sapiens
  misc_RNA (1)...(19): siRNA sense strand
ggaaggccugcaucaugau

SEQ ID NO: 1415926 - RNA, 19 nt, Homo sapiens
  misc_RNA (1)...(19): siRNA sense strand
aaugcacacucaccagcaa

SEQ ID NO: 1415927 - RNA, 19 nt, Homo sapiens
  misc_RNA (1)...(19): siRNA sense strand
ccagcaacaccaagugcaa

SEQ ID NO: 1415928 - RNA, 19 nt, Homo sapiens
  misc_RNA (1)...(19): siRNA sense strand
gaauugaggaagacuguua

SEQ ID NO: 1415929 - RNA, 19 nt, Homo sapiens
  misc_RNA (1)...(19): siRNA sense strand
gaggaagacuguuacuaca

SEQ ID NO: 1415930 - RNA, 19 nt, Homo sapiens
  misc_RNA (1)...(19): siRNA sense strand
ggauuggaauugaggaaga

SEQ ID NO: 1415931 - RNA, 19 nt, Homo sapiens
  misc_RNA (1)...(19): siRNA sense strand
ugacugacaucaacuccaa

SEQ ID NO: 1415932 - RNA, 19 nt, Homo sapiens
  misc_RNA (1)...(19): siRNA sense strand
uggaaggccugcaucauga

SEQ ID NO: 1415933 - RNA, 19 nt, Homo sapiens
  misc_RNA (1)...(19): siRNA sense strand
uuacgucuguugcuagauu

SEQ ID NO: 1415934 - RNA, 19 nt, Homo sapiens
  misc_RNA (1)...(19): siRNA sense strand
ccaagugacugacaucaac

SEQ ID NO: 1415935 - RNA, 19 nt, Homo sapiens
  misc_RNA (1)...(19): siRNA sense strand
guucuuacgucuguugcua

SEQ ID NO: 1415936 - RNA, 19 nt, Homo sapiens
  misc_RNA (1)...(19): siRNA sense strand
ugaggaagacuguuacuac

SEQ ID NO: 1415937 - RNA, 19 nt, Homo sapiens
  misc_RNA (1)...(19): siRNA sense strand
ggccaauucugccauaagc

SEQ ID NO: 1415938 - RNA, 19 nt, Homo sapiens
  misc_RNA (1)...(19): siRNA sense strand
aacauggaaucaucaagga

SEQ ID NO: 1415939 - RNA, 19 nt, Homo sapiens
  misc_RNA (1)...(19): siRNA sense strand
uacgucuguugcuagauua

SEQ ID NO: 1415940 - RNA, 19 nt, Homo sapiens
  misc_RNA (1)...(19): siRNA sense strand
caucaacuccaagggauug

SEQ ID NO: 1415941 - RNA, 19 nt, Homo sapiens
  misc_RNA (1)...(19): siRNA sense strand
cauggaaucaucaaggaau

SEQ ID NO: 1415942 - RNA, 19 nt, Homo sapiens
  misc_RNA (1)...(19): siRNA sense strand
gcaacaccaagugcaaaga

SEQ ID NO: 1415943 - RNA, 19 nt, Homo sapiens
  misc_RNA (1)...(19): siRNA sense strand
caacaccaagugcaaagag

SEQ ID NO: 1415944 - RNA, 19 nt, Homo sapiens
  misc_RNA (1)...(19): siRNA sense strand
gcuagauuaucguccaaaa

SEQ ID NO: 1415945 - RNA, 19 nt, Homo sapiens
  misc_RNA (1)...(19): siRNA sense strand
ccuccuaccucugguucuu

SEQ ID NO: 1415946 - RNA, 19 nt, Homo sapiens
  misc_RNA (1)...(19): siRNA sense strand
cagcaacaccaagugcaaa

SEQ ID NO: 1415947 - RNA, 19 nt, Homo sapiens
  misc_RNA (1)...(19): siRNA sense strand
uuaaugcccaagugacuga

SEQ ID NO: 1415948 - RNA, 19 nt, Homo sapiens
  misc_RNA (1)...(19): siRNA sense strand
ggaaggccugcaucaugau

SEQ ID NO: 1415949 - RNA, 19 nt, Homo sapiens
  misc_RNA (1)...(19): siRNA sense strand
aaugcacacucaccagcaa

SEQ ID NO: 1415950 - RNA, 19 nt, Homo sapiens
  misc_RNA (1)...(19): siRNA sense strand
ccagcaacaccaagugcaa

SEQ ID NO: 1415951 - RNA, 19 nt, Homo sapiens
  misc_RNA (1)...(19): siRNA sense strand
gaaaugaaauccaaagcuu

SEQ ID NO: 1415952 - RNA, 19 nt, Homo sapiens
  misc_RNA (1)...(19): siRNA sense strand
gaaagaauggugucaauga

SEQ ID NO: 1415953 - RNA, 19 nt, Homo sapiens
  misc_RNA (1)...(19): siRNA sense strand
uagaugagaucaagaauga

SEQ ID NO: 1415954 - RNA, 19 nt, Homo sapiens
  misc_RNA (1)...(19): siRNA sense strand
gaaagaagcguaugacaca

SEQ ID NO: 1415955 - RNA, 19 nt, Homo sapiens
  misc_RNA (1)...(19): siRNA sense strand
ucaaggacauuacuaguga

SEQ ID NO: 1415956 - RNA, 19 nt, Homo sapiens
  misc_RNA (1)...(19): siRNA sense strand
gaauugaggaagacuguua

SEQ ID NO: 1415957 - RNA, 19 nt, Homo sapiens
  misc_RNA (1)...(19): siRNA sense strand
gaaagaaagaagcguauga

SEQ ID NO: 1415958 - RNA, 19 nt, Homo sapiens
  misc_RNA (1)...(19): siRNA sense strand
ggacauuacuagugacuca

SEQ ID NO: 1415959 - RNA, 19 nt, Homo sapiens
  misc_RNA (1)...(19): siRNA sense strand
gacacuaagucaaguuaaa

SEQ ID NO: 1415960 - RNA, 19 nt, Homo sapiens
  misc_RNA (1)...(19): siRNA sense strand
gaggaagacuguuacuaca

SEQ ID NO: 1415961 - RNA, 19 nt, Homo sapiens
  misc_RNA (1)...(19): siRNA sense strand
ggcaucaacuucauggaaa

SEQ ID NO: 1415962 - RNA, 19 nt, Homo sapiens
  misc_RNA (1)...(19): siRNA sense strand
ggauuggaauugaggaaga

SEQ ID NO: 1415963 - RNA, 19 nt, Homo sapiens
  misc_RNA (1)...(19): siRNA sense strand
aaagaauggugucaaugaa

SEQ ID NO: 1415964 - RNA, 19 nt, Homo sapiens
  misc_RNA (1)...(19): siRNA sense strand
ugacugacaucaacuccaa

SEQ ID NO: 1415965 - RNA, 19 nt, Homo sapiens
  misc_RNA (1)...(19): siRNA sense strand
gcguaugacacauugauua

SEQ ID NO: 1415966 - RNA, 19 nt, Homo sapiens
  misc_RNA (1)...(19): siRNA sense strand
uggaaggccugcaucauga

SEQ ID NO: 1415967 - RNA, 19 nt, Homo sapiens
  misc_RNA (1)...(19): siRNA sense strand
agacacagcagaacagaaa

SEQ ID NO: 1415968 - RNA, 19 nt, Homo sapiens
  misc_RNA (1)...(19): siRNA sense strand
ccaagugacugacaucaac

SEQ ID NO: 1415969 - RNA, 19 nt, Homo sapiens
  misc_RNA (1)...(19): siRNA sense strand
guaauuggcaucaacuuca

SEQ ID NO: 1415970 - RNA, 19 nt, Homo sapiens
  misc_RNA (1)...(19): siRNA sense strand
uuacgucuguugcuagauu

SEQ ID NO: 1415971 - RNA, 19 nt, Homo sapiens
  misc_RNA (1)...(19): siRNA sense strand
guucaacugcuucguaauu

SEQ ID NO: 1415972 - RNA, 19 nt, Homo sapiens
  misc_RNA (1)...(19): siRNA sense strand
caaaauagaugagaucaag

SEQ ID NO: 1415973 - RNA, 19 nt, Homo sapiens
  misc_RNA (1)...(19): siRNA sense strand
guucuuacgucuguugcua

SEQ ID NO: 1415974 - RNA, 19 nt, Homo sapiens
  misc_RNA (1)...(19): siRNA sense strand
ucaacuucauggaaagaaa

SEQ ID NO: 1415975 - RNA, 19 nt, Homo sapiens
  misc_RNA (1)...(19): siRNA sense strand
agaagcguaugacacauug

SEQ ID NO: 1415976 - RNA, 19 nt, Homo sapiens
  misc_RNA (1)...(19): siRNA sense strand
gcuggagucaugacacuaa

SEQ ID NO: 1415977 - RNA, 19 nt, Homo sapiens
  misc_RNA (1)...(19): siRNA sense strand
gaugagaucaagaaugaca

SEQ ID NO: 1415978 - RNA, 19 nt, Homo sapiens
  misc_RNA (1)...(19): siRNA sense strand
ucgaaagaauggugucaau

SEQ ID NO: 1415979 - RNA, 19 nt, Homo sapiens
  misc_RNA (1)...(19): siRNA sense strand
cguaugacacauugauuaa

SEQ ID NO: 1415980 - RNA, 19 nt, Homo sapiens
  misc_RNA (1)...(19): siRNA sense strand
cagagaaaauucagacuau

SEQ ID NO: 1415981 - RNA, 19 nt, Homo sapiens
  misc_RNA (1)...(19): siRNA sense strand
gcaucaacuucauggaaag

SEQ ID NO: 1415982 - RNA, 19 nt, Homo sapiens
  misc_RNA (1)...(19): siRNA sense strand
ugaggaagacuguuacuac

SEQ ID NO: 1415983 - RNA, 19 nt, Homo sapiens
  misc_RNA (1)...(19): siRNA sense strand
ggaaagaaagaagcguaug

SEQ ID NO: 1415984 - RNA, 19 nt, Homo sapiens
  misc_RNA (1)...(19): siRNA sense strand
cacuauugcuggagucaug

SEQ ID NO: 1415985 - RNA, 19 nt, Homo sapiens
  misc_RNA (1)...(19): siRNA sense strand
gcagagaaaauucagacua

SEQ ID NO: 1415986 - RNA, 19 nt, Homo sapiens
  misc_RNA (1)...(19): siRNA sense strand
ggccaauucugccauaagc

SEQ ID NO: 1415987 - RNA, 19 nt, Homo sapiens
  misc_RNA (1)...(19): siRNA sense strand
uaauuggcaucaacuucau

SEQ ID NO: 1415988 - RNA, 19 nt, Homo sapiens
  misc_RNA (1)...(19): siRNA sense strand
aacauggaaucaucaagga

SEQ ID NO: 1415989 - RNA, 19 nt, Homo sapiens
  misc_RNA (1)...(19): siRNA sense strand
caucaacuccaagggauug

SEQ ID NO: 1415990 - RNA, 19 nt, Homo sapiens
  misc_RNA (1)...(19): siRNA sense strand
uacgucuguugcuagauua

SEQ ID NO: 1415991 - RNA, 19 nt, Homo sapiens
  misc_RNA (1)...(19): siRNA sense strand
ggagucaugacacuaaguc

SEQ ID NO: 1415992 - RNA, 19 nt, Homo sapiens
  misc_RNA (1)...(19): siRNA sense strand
cauggaaucaucaaggaau

SEQ ID NO: 1415993 - RNA, 19 nt, Homo sapiens
  misc_RNA (1)...(19): siRNA sense strand
cgaaagaauggugucaaug

SEQ ID NO: 1415994 - RNA, 19 nt, Homo sapiens
  misc_RNA (1)...(19): siRNA sense strand
gcaacaccaagugcaaaga

SEQ ID NO: 1415995 - RNA, 19 nt, Homo sapiens
  misc_RNA (1)...(19): siRNA sense strand
caacaccaagugcaaagag

SEQ ID NO: 1415996 - RNA, 19 nt, Homo sapiens
  misc_RNA (1)...(19): siRNA sense strand
gagaaaauucagacuauca

SEQ ID NO: 1415997 - RNA, 19 nt, Homo sapiens
  misc_RNA (1)...(19): siRNA sense strand
aagaagcguaugacacauu

SEQ ID NO: 1415998 - RNA, 19 nt, Homo sapiens
  misc_RNA (1)...(19): siRNA sense strand
caagacacagcagaacaga

SEQ ID NO: 1415999 - RNA, 19 nt, Homo sapiens
  misc_RNA (1)...(19): siRNA sense strand
ccuccuaccucugguucuu

SEQ ID NO: 1416000 - RNA, 19 nt, Homo sapiens
  misc_RNA (1)...(19): siRNA sense strand
caacuucauggaaagaaag

SEQ ID NO: 1416001 - RNA, 19 nt, Homo sapiens
  misc_RNA (1)...(19): siRNA sense strand
gcuagauuaucguccaaaa

SEQ ID NO: 1416002 - RNA, 19 nt, Homo sapiens
  misc_RNA (1)...(19): siRNA sense strand
uggcaucaacuucauggaa

SEQ ID NO: 1416003 - RNA, 19 nt, Homo sapiens
  misc_RNA (1)...(19): siRNA sense strand
cagcaacaccaagugcaaa

SEQ ID NO: 1416004 - RNA, 19 nt, Homo sapiens
  misc_RNA (1)...(19): siRNA sense strand
ucaacugcuucguaauugg

SEQ ID NO: 1416005 - RNA, 19 nt, Homo sapiens
  misc_RNA (1)...(19): siRNA sense strand
caaugaagccaaaauagau

SEQ ID NO: 1416006 - RNA, 19 nt, Homo sapiens
  misc_RNA (1)...(19): siRNA sense strand
uuaaugcccaagugacuga

SEQ ID NO: 1416007 - RNA, 19 nt, Homo sapiens
  misc_RNA (1)...(19): siRNA sense strand
ggaaggccugcaucaugau

SEQ ID NO: 1416008 - RNA, 19 nt, Homo sapiens
  misc_RNA (1)...(19): siRNA sense strand
cauuacuagugacucagaa

SEQ ID NO: 1416009 - RNA, 19 nt, Homo sapiens
  misc_RNA (1)...(19): siRNA sense strand
uucaacugcuucguaauug

SEQ ID NO: 1416010 - RNA, 19 nt, Homo sapiens
  misc_RNA (1)...(19): siRNA sense strand
aaugcacacucaccagcaa

SEQ ID NO: 1416011 - RNA, 19 nt, Homo sapiens
  misc_RNA (1)...(19): siRNA sense strand
ucagaaaugaaauccaaag

SEQ ID NO: 1416012 - RNA, 19 nt, Homo sapiens
  misc_RNA (1)...(19): siRNA sense strand
ccagcaacaccaagugcaa

SEQ ID NO: 1416013 - RNA, 19 nt, Homo sapiens
  misc_RNA (1)...(19): siRNA sense strand
gaaaugaaauccaaagcuu

SEQ ID NO: 1416014 - RNA, 19 nt, Homo sapiens
  misc_RNA (1)...(19): siRNA sense strand
gaaagaauggugucaauga

SEQ ID NO: 1416015 - RNA, 19 nt, Homo sapiens
  misc_RNA (1)...(19): siRNA sense strand
uagaugagaucaagaauga

SEQ ID NO: 1416016 - RNA, 19 nt, Homo sapiens
  misc_RNA (1)...(19): siRNA sense strand
gaaagaagcguaugacaca

SEQ ID NO: 1416017 - RNA, 19 nt, Homo sapiens
  misc_RNA (1)...(19): siRNA sense strand
ucaaggacauuacuaguga

SEQ ID NO: 1416018 - RNA, 19 nt, Homo sapiens
  misc_RNA (1)...(19): siRNA sense strand
gaauugaggaagacuguua

SEQ ID NO: 1416019 - RNA, 19 nt, Homo sapiens
  misc_RNA (1)...(19): siRNA sense strand
gaaagaaagaagcguauga

SEQ ID NO: 1416020 - RNA, 19 nt, Homo sapiens
  misc_RNA (1)...(19): siRNA sense strand
ggacauuacuagugacuca

SEQ ID NO: 1416021 - RNA, 19 nt, Homo sapiens
  misc_RNA (1)...(19): siRNA sense strand
gacacuaagucaaguuaaa

SEQ ID NO: 1416022 - RNA, 19 nt, Homo sapiens
  misc_RNA (1)...(19): siRNA sense strand
gaggaagacuguuacuaca

SEQ ID NO: 1416023 - RNA, 19 nt, Homo sapiens
  misc_RNA (1)...(19): siRNA sense strand
ggcaucaacuucauggaaa

SEQ ID NO: 1416024 - RNA, 19 nt, Homo sapiens
  misc_RNA (1)...(19): siRNA sense strand
ggauuggaauugaggaaga

SEQ ID NO: 1416025 - RNA, 19 nt, Homo sapiens
  misc_RNA (1)...(19): siRNA sense strand
aaagaauggugucaaugaa

SEQ ID NO: 1416026 - RNA, 19 nt, Homo sapiens
  misc_RNA (1)...(19): siRNA sense strand
ugacugacaucaacuccaa

SEQ ID NO: 1416027 - RNA, 19 nt, Homo sapiens
  misc_RNA (1)...(19): siRNA sense strand
gcguaugacacauugauua

SEQ ID NO: 1416028 - RNA, 19 nt, Homo sapiens
  misc_RNA (1)...(19): siRNA sense strand
uggaaggccugcaucauga

SEQ ID NO: 1416029 - RNA, 19 nt, Homo sapiens
  misc_RNA (1)...(19): siRNA sense strand
agacacagcagaacagaaa

SEQ ID NO: 1416030 - RNA, 19 nt, Homo sapiens
  misc_RNA (1)...(19): siRNA sense strand
ccaagugacugacaucaac

SEQ ID NO: 1416031 - RNA, 19 nt, Homo sapiens
  misc_RNA (1)...(19): siRNA sense strand
guaauuggcaucaacuuca

SEQ ID NO: 1416032 - RNA, 19 nt, Homo sapiens
  misc_RNA (1)...(19): siRNA sense strand
uuacgucuguugcuagauu

SEQ ID NO: 1416033 - RNA, 19 nt, Homo sapiens
  misc_RNA (1)...(19): siRNA sense strand
guucaacugcuucguaauu

SEQ ID NO: 1416034 - RNA, 19 nt, Homo sapiens
  misc_RNA (1)...(19): siRNA sense strand
caaaauagaugagaucaag

SEQ ID NO: 1416035 - RNA, 19 nt, Homo sapiens
  misc_RNA (1)...(19): siRNA sense strand
guucuuacgucuguugcua

SEQ ID NO: 1416036 - RNA, 19 nt, Homo sapiens
  misc_RNA (1)...(19): siRNA sense strand
ucaacuucauggaaagaaa

SEQ ID NO: 1416037 - RNA, 19 nt, Homo sapiens
  misc_RNA (1)...(19): siRNA sense strand
agaagcguaugacacauug

SEQ ID NO: 1416038 - RNA, 19 nt, Homo sapiens
  misc_RNA (1)...(19): siRNA sense strand
gcuggagucaugacacuaa

SEQ ID NO: 1416039 - RNA, 19 nt, Homo sapiens
  misc_RNA (1)...(19): siRNA sense strand
gaugagaucaagaaugaca

SEQ ID NO: 1416040 - RNA, 19 nt, Homo sapiens
  misc_RNA (1)...(19): siRNA sense strand
ucgaaagaauggugucaau

SEQ ID NO: 1416041 - RNA, 19 nt, Homo sapiens
  misc_RNA (1)...(19): siRNA sense strand
cguaugacacauugauuaa

SEQ ID NO: 1416042 - RNA, 19 nt, Homo sapiens
  misc_RNA (1)...(19): siRNA sense strand
cagagaaaauucagacuau

SEQ ID NO: 1416043 - RNA, 19 nt, Homo sapiens
  misc_RNA (1)...(19): siRNA sense strand
gcaucaacuucauggaaag

SEQ ID NO: 1416044 - RNA, 19 nt, Homo sapiens
  misc_RNA (1)...(19): siRNA sense strand
ugaggaagacuguuacuac

SEQ ID NO: 1416045 - RNA, 19 nt, Homo sapiens
  misc_RNA (1)...(19): siRNA sense strand
ggaaagaaagaagcguaug

SEQ ID NO: 1416046 - RNA, 19 nt, Homo sapiens
  misc_RNA (1)...(19): siRNA sense strand
cacuauugcuggagucaug

SEQ ID NO: 1416047 - RNA, 19 nt, Homo sapiens
  misc_RNA (1)...(19): siRNA sense strand
gcagagaaaauucagacua

SEQ ID NO: 1416048 - RNA, 19 nt, Homo sapiens
  misc_RNA (1)...(19): siRNA sense strand
ggccaauucugccauaagc

SEQ ID NO: 1416049 - RNA, 19 nt, Homo sapiens
  misc_RNA (1)...(19): siRNA sense strand
uaauuggcaucaacuucau

SEQ ID NO: 1416050 - RNA, 19 nt, Homo sapiens
  misc_RNA (1)...(19): siRNA sense strand
aacauggaaucaucaagga

SEQ ID NO: 1416051 - RNA, 19 nt, Homo sapiens
  misc_RNA (1)...(19): siRNA sense strand
caucaacuccaagggauug

SEQ ID NO: 1416052 - RNA, 19 nt, Homo sapiens
  misc_RNA (1)...(19): siRNA sense strand
uacgucuguugcuagauua

SEQ ID NO: 1416053 - RNA, 19 nt, Homo sapiens
  misc_RNA (1)...(19): siRNA sense strand
ggagucaugacacuaaguc

SEQ ID NO: 1416054 - RNA, 19 nt, Homo sapiens
  misc_RNA (1)...(19): siRNA sense strand
cauggaaucaucaaggaau

SEQ ID NO: 1416055 - RNA, 19 nt, Homo sapiens
  misc_RNA (1)...(19): siRNA sense strand
cgaaagaauggugucaaug

SEQ ID NO: 1416056 - RNA, 19 nt, Homo sapiens
  misc_RNA (1)...(19): siRNA sense strand
gcaacaccaagugcaaaga

SEQ ID NO: 1416057 - RNA, 19 nt, Homo sapiens
  misc_RNA (1)...(19): siRNA sense strand
caacaccaagugcaaagag

SEQ ID NO: 1416058 - RNA, 19 nt, Homo sapiens
  misc_RNA (1)...(19): siRNA sense strand
gagaaaauucagacuauca

SEQ ID NO: 1416059 - RNA, 19 nt, Homo sapiens
  misc_RNA (1)...(19): siRNA sense strand
aagaagcguaugacacauu

SEQ ID NO: 1416060 - RNA, 19 nt, Homo sapiens
  misc_RNA (1)...(19): siRNA sense strand
caagacacagcagaacaga

SEQ ID NO: 1416061 - RNA, 19 nt, Homo sapiens
  misc_RNA (1)...(19): siRNA sense strand
ccuccuaccucugguucuu

SEQ ID NO: 1416062 - RNA, 19 nt, Homo sapiens
  misc_RNA (1)...(19): siRNA sense strand
caacuucauggaaagaaag

SEQ ID NO: 1416063 - RNA, 19 nt, Homo sapiens
  misc_RNA (1)...(19): siRNA sense strand
gcuagauuaucguccaaaa

SEQ ID NO: 1416064 - RNA, 19 nt, Homo sapiens
  misc_RNA (1)...(19): siRNA sense strand
uggcaucaacuucauggaa

SEQ ID NO: 1416065 - RNA, 19 nt, Homo sapiens
  misc_RNA (1)...(19): siRNA sense strand
cagcaacaccaagugcaaa

SEQ ID NO: 1416066 - RNA, 19 nt, Homo sapiens
  misc_RNA (1)...(19): siRNA sense strand
ucaacugcuucguaauugg

SEQ ID NO: 1416067 - RNA, 19 nt, Homo sapiens
  misc_RNA (1)...(19): siRNA sense strand
caaugaagccaaaauagau

SEQ ID NO: 1416068 - RNA, 19 nt, Homo sapiens
  misc_RNA (1)...(19): siRNA sense strand
uuaaugcccaagugacuga

SEQ ID NO: 1416069 - RNA, 19 nt, Homo sapiens
  misc_RNA (1)...(19): siRNA sense strand
ggaaggccugcaucaugau

SEQ ID NO: 1416070 - RNA, 19 nt, Homo sapiens
  misc_RNA (1)...(19): siRNA sense strand
cauuacuagugacucagaa

SEQ ID NO: 1416071 - RNA, 19 nt, Homo sapiens
  misc_RNA (1)...(19): siRNA sense strand
uucaacugcuucguaauug

SEQ ID NO: 1416072 - RNA, 19 nt, Homo sapiens
  misc_RNA (1)...(19): siRNA sense strand
aaugcacacucaccagcaa

SEQ ID NO: 1416073 - RNA, 19 nt, Homo sapiens
  misc_RNA (1)...(19): siRNA sense strand
ucagaaaugaaauccaaag

SEQ ID NO: 1416074 - RNA, 19 nt, Homo sapiens
  misc_RNA (1)...(19): siRNA sense strand
ccagcaacaccaagugcaa

SEQ ID NO: 1416075 - RNA, 19 nt, Homo sapiens
  misc_RNA (1)...(19): siRNA sense strand
gaauugaggaagacuguua

SEQ ID NO: 1416076 - RNA, 19 nt, Homo sapiens
  misc_RNA (1)...(19): siRNA sense strand
gaggaagacuguuacuaca

SEQ ID NO: 1416077 - RNA, 19 nt, Homo sapiens
  misc_RNA (1)...(19): siRNA sense strand
ggauuggaauugaggaaga

SEQ ID NO: 1416078 - RNA, 19 nt, Homo sapiens
  misc_RNA (1)...(19): siRNA sense strand
ugacugacaucaacuccaa

SEQ ID NO: 1416079 - RNA, 19 nt, Homo sapiens
  misc_RNA (1)...(19): siRNA sense strand
uggaaggccugcaucauga

SEQ ID NO: 1416080 - RNA, 19 nt, Homo sapiens
  misc_RNA (1)...(19): siRNA sense strand
uuacgucuguugcuagauu

SEQ ID NO: 1416081 - RNA, 19 nt, Homo sapiens
  misc_RNA (1)...(19): siRNA sense strand
ccaagugacugacaucaac

SEQ ID NO: 1416082 - RNA, 19 nt, Homo sapiens
  misc_RNA (1)...(19): siRNA sense strand
guucuuacgucuguugcua

SEQ ID NO: 1416083 - RNA, 19 nt, Homo sapiens
  misc_RNA (1)...(19): siRNA sense strand
ugaggaagacuguuacuac

SEQ ID NO: 1416084 - RNA, 19 nt, Homo sapiens
  misc_RNA (1)...(19): siRNA sense strand
ggccaauucugccauaagc

SEQ ID NO: 1416085 - RNA, 19 nt, Homo sapiens
  misc_RNA (1)...(19): siRNA sense strand
aacauggaaucaucaagga

SEQ ID NO: 1416086 - RNA, 19 nt, Homo sapiens
  misc_RNA (1)...(19): siRNA sense strand
uacgucuguugcuagauua

SEQ ID NO: 1416087 - RNA, 19 nt, Homo sapiens
  misc_RNA (1)...(19): siRNA sense strand
caucaacuccaagggauug

SEQ ID NO: 1416088 - RNA, 19 nt, Homo sapiens
  misc_RNA (1)...(19): siRNA sense strand
cauggaaucaucaaggaau

SEQ ID NO: 1416089 - RNA, 19 nt, Homo sapiens
  misc_RNA (1)...(19): siRNA sense strand
gcaacaccaagugcaaaga

SEQ ID NO: 1416090 - RNA, 19 nt, Homo sapiens
  misc_RNA (1)...(19): siRNA sense strand
caacaccaagugcaaagag

SEQ ID NO: 1416091 - RNA, 19 nt, Homo sapiens
  misc_RNA (1)...(19): siRNA sense strand
gcuagauuaucguccaaaa

SEQ ID NO: 1416092 - RNA, 19 nt, Homo sapiens
  misc_RNA (1)...(19): siRNA sense strand
ccuccuaccucugguucuu

SEQ ID NO: 1416093 - RNA, 19 nt, Homo sapiens
  misc_RNA (1)...(19): siRNA sense strand
cagcaacaccaagugcaaa

SEQ ID NO: 1416094 - RNA, 19 nt, Homo sapiens
  misc_RNA (1)...(19): siRNA sense strand
uuaaugcccaagugacuga

SEQ ID NO: 1416095 - RNA, 19 nt, Homo sapiens
  misc_RNA (1)...(19): siRNA sense strand
ggaaggccugcaucaugau

SEQ ID NO: 1416096 - RNA, 19 nt, Homo sapiens
  misc_RNA (1)...(19): siRNA sense strand
aaugcacacucaccagcaa

SEQ ID NO: 1416097 - RNA, 19 nt, Homo sapiens
  misc_RNA (1)...(19): siRNA sense strand
ccagcaacaccaagugcaa

SEQ ID NO: 1416098 - RNA, 19 nt, Homo sapiens
  misc_RNA (1)...(19): siRNA sense strand
gaauugaggaagacuguua

SEQ ID NO: 1416099 - RNA, 19 nt, Homo sapiens
  misc_RNA (1)...(19): siRNA sense strand
gaggaagacuguuacuaca

SEQ ID NO: 1416100 - RNA, 19 nt, Homo sapiens
  misc_RNA (1)...(19): siRNA sense strand
ggauuggaauugaggaaga

SEQ ID NO: 1416101 - RNA, 19 nt, Homo sapiens
  misc_RNA (1)...(19): siRNA sense strand
ugacugacaucaacuccaa

SEQ ID NO: 1416102 - RNA, 19 nt, Homo sapiens
  misc_RNA (1)...(19): siRNA sense strand
uggaaggccugcaucauga

SEQ ID NO: 1416103 - RNA, 19 nt, Homo sapiens
  misc_RNA (1)...(19): siRNA sense strand
uuacgucuguugcuagauu

SEQ ID NO: 1416104 - RNA, 19 nt, Homo sapiens
  misc_RNA (1)...(19): siRNA sense strand
ccaagugacugacaucaac

SEQ ID NO: 1416105 - RNA, 19 nt, Homo sapiens
  misc_RNA (1)...(19): siRNA sense strand
guucuuacgucuguugcua

SEQ ID NO: 1416106 - RNA, 19 nt, Homo sapiens
  misc_RNA (1)...(19): siRNA sense strand
ugaggaagacuguuacuac

SEQ ID NO: 1416107 - RNA, 19 nt, Homo sapiens
  misc_RNA (1)...(19): siRNA sense strand
ggccaauucugccauaagc

SEQ ID NO: 1416108 - RNA, 19 nt, Homo sapiens
  misc_RNA (1)...(19): siRNA sense strand
aacauggaaucaucaagga

SEQ ID NO: 1416109 - RNA, 19 nt, Homo sapiens
  misc_RNA (1)...(19): siRNA sense strand
uacgucuguugcuagauua

SEQ ID NO: 1416110 - RNA, 19 nt, Homo sapiens
  misc_RNA (1)...(19): siRNA sense strand
caucaacuccaagggauug

SEQ ID NO: 1416111 - RNA, 19 nt, Homo sapiens
  misc_RNA (1)...(19): siRNA sense strand
cauggaaucaucaaggaau

SEQ ID NO: 1416112 - RNA, 19 nt, Homo sapiens
  misc_RNA (1)...(19): siRNA sense strand
gcaacaccaagugcaaaga

SEQ ID NO: 1416113 - RNA, 19 nt, Homo sapiens
  misc_RNA (1)...(19): siRNA sense strand
caacaccaagugcaaagag

SEQ ID NO: 1416114 - RNA, 19 nt, Homo sapiens
  misc_RNA (1)...(19): siRNA sense strand
gcuagauuaucguccaaaa

SEQ ID NO: 1416115 - RNA, 19 nt, Homo sapiens
  misc_RNA (1)...(19): siRNA sense strand
ccuccuaccucugguucuu

SEQ ID NO: 1416116 - RNA, 19 nt, Homo sapiens
  misc_RNA (1)...(19): siRNA sense strand
cagcaacaccaagugcaaa

SEQ ID NO: 1416117 - RNA, 19 nt, Homo sapiens
  misc_RNA (1)...(19): siRNA sense strand
uuaaugcccaagugacuga

SEQ ID NO: 1416118 - RNA, 19 nt, Homo sapiens
  misc_RNA (1)...(19): siRNA sense strand
ggaaggccugcaucaugau

SEQ ID NO: 1416119 - RNA, 19 nt, Homo sapiens
  misc_RNA (1)...(19): siRNA sense strand
aaugcacacucaccagcaa

SEQ ID NO: 1416120 - RNA, 19 nt, Homo sapiens
  misc_RNA (1)...(19): siRNA sense strand
ccagcaacaccaagugcaa

SEQ ID NO: 1416121 - RNA, 19 nt, Homo sapiens
  misc_RNA (1)...(19): siRNA sense strand
gaauugaggaagacuguua

SEQ ID NO: 1416122 - RNA, 19 nt, Homo sapiens
  misc_RNA (1)...(19): siRNA sense strand
gaggaagacuguuacuaca

SEQ ID NO: 1416123 - RNA, 19 nt, Homo sapiens
  misc_RNA (1)...(19): siRNA sense strand
ggauuggaauugaggaaga

SEQ ID NO: 1416124 - RNA, 19 nt, Homo sapiens
  misc_RNA (1)...(19): siRNA sense strand
ugacugacaucaacuccaa

SEQ ID NO: 1416125 - RNA, 19 nt, Homo sapiens
  misc_RNA (1)...(19): siRNA sense strand
uggaaggccugcaucauga

SEQ ID NO: 1416126 - RNA, 19 nt, Homo sapiens
  misc_RNA (1)...(19): siRNA sense strand
uuacgucuguugcuagauu

SEQ ID NO: 1416127 - RNA, 19 nt, Homo sapiens
  misc_RNA (1)...(19): siRNA sense strand
ccaagugacugacaucaac

SEQ ID NO: 1416128 - RNA, 19 nt, Homo sapiens
  misc_RNA (1)...(19): siRNA sense strand
guucuuacgucuguugcua

SEQ ID NO: 1416129 - RNA, 19 nt, Homo sapiens
  misc_RNA (1)...(19): siRNA sense strand
ugaggaagacuguuacuac

SEQ ID NO: 1416130 - RNA, 19 nt, Homo sapiens
  misc_RNA (1)...(19): siRNA sense strand
ggccaauucugccauaagc

SEQ ID NO: 1416131 - RNA, 19 nt, Homo sapiens
  misc_RNA (1)...(19): siRNA sense strand
aacauggaaucaucaagga

SEQ ID NO: 1416132 - RNA, 19 nt, Homo sapiens
  misc_RNA (1)...(19): siRNA sense strand
uacgucuguugcuagauua

SEQ ID NO: 1416133 - RNA, 19 nt, Homo sapiens
  misc_RNA (1)...(19): siRNA sense strand
caucaacuccaagggauug

SEQ ID NO: 1416134 - RNA, 19 nt, Homo sapiens
  misc_RNA (1)...(19): siRNA sense strand
cauggaaucaucaaggaau

SEQ ID NO: 1416135 - RNA, 19 nt, Homo sapiens
  misc_RNA (1)...(19): siRNA sense strand
gcaacaccaagugcaaaga

SEQ ID NO: 1416136 - RNA, 19 nt, Homo sapiens
  misc_RNA (1)...(19): siRNA sense strand
caacaccaagugcaaagag

SEQ ID NO: 1416137 - RNA, 19 nt, Homo sapiens
  misc_RNA (1)...(19): siRNA sense strand
gcuagauuaucguccaaaa

SEQ ID NO: 1416138 - RNA, 19 nt, Homo sapiens
  misc_RNA (1)...(19): siRNA sense strand
ccuccuaccucugguucuu

SEQ ID NO: 1416139 - RNA, 19 nt, Homo sapiens
  misc_RNA (1)...(19): siRNA sense strand
cagcaacaccaagugcaaa

SEQ ID NO: 1416140 - RNA, 19 nt, Homo sapiens
  misc_RNA (1)...(19): siRNA sense strand
uuaaugcccaagugacuga

SEQ ID NO: 1416141 - RNA, 19 nt, Homo sapiens
  misc_RNA (1)...(19): siRNA sense strand
ggaaggccugcaucaugau

SEQ ID NO: 1416142 - RNA, 19 nt, Homo sapiens
  misc_RNA (1)...(19): siRNA sense strand
aaugcacacucaccagcaa

SEQ ID NO: 1416143 - RNA, 19 nt, Homo sapiens
  misc_RNA (1)...(19): siRNA sense strand
ccagcaacaccaagugcaa

SEQ ID NO: 1416144 - RNA, 19 nt, Homo sapiens
  misc_RNA (1)...(19): siRNA sense strand
gaauugaggaagacuguua

SEQ ID NO: 1416145 - RNA, 19 nt, Homo sapiens
  misc_RNA (1)...(19): siRNA sense strand
gaggaagacuguuacuaca

SEQ ID NO: 1416146 - RNA, 19 nt, Homo sapiens
  misc_RNA (1)...(19): siRNA sense strand
ggauuggaauugaggaaga

SEQ ID NO: 1416147 - RNA, 19 nt, Homo sapiens
  misc_RNA (1)...(19): siRNA sense strand
ugacugacaucaacuccaa

SEQ ID NO: 1416148 - RNA, 19 nt, Homo sapiens
  misc_RNA (1)...(19): siRNA sense strand
uggaaggccugcaucauga

SEQ ID NO: 1416149 - RNA, 19 nt, Homo sapiens
  misc_RNA (1)...(19): siRNA sense strand
uuacgucuguugcuagauu

SEQ ID NO: 1416150 - RNA, 19 nt, Homo sapiens
  misc_RNA (1)...(19): siRNA sense strand
ccaagugacugacaucaac

SEQ ID NO: 1416151 - RNA, 19 nt, Homo sapiens
  misc_RNA (1)...(19): siRNA sense strand
guucuuacgucuguugcua

SEQ ID NO: 1416152 - RNA, 19 nt, Homo sapiens
  misc_RNA (1)...(19): siRNA sense strand
ugaggaagacuguuacuac

SEQ ID NO: 1416153 - RNA, 19 nt, Homo sapiens
  misc_RNA (1)...(19): siRNA sense strand
ggccaauucugccauaagc

SEQ ID NO: 1416154 - RNA, 19 nt, Homo sapiens
  misc_RNA (1)...(19): siRNA sense strand
aacauggaaucaucaagga

SEQ ID NO: 1416155 - RNA, 19 nt, Homo sapiens
  misc_RNA (1)...(19): siRNA sense strand
uacgucuguugcuagauua

SEQ ID NO: 1416156 - RNA, 19 nt, Homo sapiens
  misc_RNA (1)...(19): siRNA sense strand
caucaacuccaagggauug

SEQ ID NO: 1416157 - RNA, 19 nt, Homo sapiens
  misc_RNA (1)...(19): siRNA sense strand
cauggaaucaucaaggaau

SEQ ID NO: 1416158 - RNA, 19 nt, Homo sapiens
  misc_RNA (1)...(19): siRNA sense strand
gcaacaccaagugcaaaga

SEQ ID NO: 1416159 - RNA, 19 nt, Homo sapiens
  misc_RNA (1)...(19): siRNA sense strand
caacaccaagugcaaagag

SEQ ID NO: 1416160 - RNA, 19 nt, Homo sapiens
  misc_RNA (1)...(19): siRNA sense strand
gcuagauuaucguccaaaa

SEQ ID NO: 1416161 - RNA, 19 nt, Homo sapiens
  misc_RNA (1)...(19): siRNA sense strand
ccuccuaccucugguucuu

SEQ ID NO: 1416162 - RNA, 19 nt, Homo sapiens
  misc_RNA (1)...(19): siRNA sense strand
cagcaacaccaagugcaaa

SEQ ID NO: 1416163 - RNA, 19 nt, Homo sapiens
  misc_RNA (1)...(19): siRNA sense strand
uuaaugcccaagugacuga

SEQ ID NO: 1416164 - RNA, 19 nt, Homo sapiens
  misc_RNA (1)...(19): siRNA sense strand
ggaaggccugcaucaugau

SEQ ID NO: 1416165 - RNA, 19 nt, Homo sapiens
  misc_RNA (1)...(19): siRNA sense strand
aaugcacacucaccagcaa

SEQ ID NO: 1416166 - RNA, 19 nt, Homo sapiens
  misc_RNA (1)...(19): siRNA sense strand
ccagcaacaccaagugcaa

SEQ ID NO: 1416167 - RNA, 19 nt, Homo sapiens
  misc_RNA (1)...(19): siRNA sense strand
gaauugaggaagacuguua

SEQ ID NO: 1416168 - RNA, 19 nt, Homo sapiens
  misc_RNA (1)...(19): siRNA sense strand
gaggaagacuguuacuaca

SEQ ID NO: 1416169 - RNA, 19 nt, Homo sapiens
  misc_RNA (1)...(19): siRNA sense strand
ggauuggaauugaggaaga

SEQ ID NO: 1416170 - RNA, 19 nt, Homo sapiens
  misc_RNA (1)...(19): siRNA sense strand
ugacugacaucaacuccaa

SEQ ID NO: 1416171 - RNA, 19 nt, Homo sapiens
  misc_RNA (1)...(19): siRNA sense strand
uggaaggccugcaucauga

SEQ ID NO: 1416172 - RNA, 19 nt, Homo sapiens
  misc_RNA (1)...(19): siRNA sense strand
uuacgucuguugcuagauu

SEQ ID NO: 1416173 - RNA, 19 nt, Homo sapiens
  misc_RNA (1)...(19): siRNA sense strand
ccaagugacugacaucaac

SEQ ID NO: 1416174 - RNA, 19 nt, Homo sapiens
  misc_RNA (1)...(19): siRNA sense strand
guucuuacgucuguugcua

SEQ ID NO: 1416175 - RNA, 19 nt, Homo sapiens
  misc_RNA (1)...(19): siRNA sense strand
ugaggaagacuguuacuac

SEQ ID NO: 1416176 - RNA, 19 nt, Homo sapiens
  misc_RNA (1)...(19): siRNA sense strand
ggccaauucugccauaagc

SEQ ID NO: 1416177 - RNA, 19 nt, Homo sapiens
  misc_RNA (1)...(19): siRNA sense strand
aacauggaaucaucaagga

SEQ ID NO: 1416178 - RNA, 19 nt, Homo sapiens
  misc_RNA (1)...(19): siRNA sense strand
uacgucuguugcuagauua

SEQ ID NO: 1416179 - RNA, 19 nt, Homo sapiens
  misc_RNA (1)...(19): siRNA sense strand
caucaacuccaagggauug

SEQ ID NO: 1416180 - RNA, 19 nt, Homo sapiens
  misc_RNA (1)...(19): siRNA sense strand
cauggaaucaucaaggaau

SEQ ID NO: 1416181 - RNA, 19 nt, Homo sapiens
  misc_RNA (1)...(19): siRNA sense strand
gcaacaccaagugcaaaga

SEQ ID NO: 1416182 - RNA, 19 nt, Homo sapiens
  misc_RNA (1)...(19): siRNA sense strand
caacaccaagugcaaagag

SEQ ID NO: 1416183 - RNA, 19 nt, Homo sapiens
  misc_RNA (1)...(19): siRNA sense strand
gcuagauuaucguccaaaa

SEQ ID NO: 1416184 - RNA, 19 nt, Homo sapiens
  misc_RNA (1)...(19): siRNA sense strand
ccuccuaccucugguucuu

SEQ ID NO: 1416185 - RNA, 19 nt, Homo sapiens
  misc_RNA (1)...(19): siRNA sense strand
cagcaacaccaagugcaaa

SEQ ID NO: 1416186 - RNA, 19 nt, Homo sapiens
  misc_RNA (1)...(19): siRNA sense strand
uuaaugcccaagugacuga

SEQ ID NO: 1416187 - RNA, 19 nt, Homo sapiens
  misc_RNA (1)...(19): siRNA sense strand
ggaaggccugcaucaugau

SEQ ID NO: 1416188 - RNA, 19 nt, Homo sapiens
  misc_RNA (1)...(19): siRNA sense strand
aaugcacacucaccagcaa

SEQ ID NO: 1416189 - RNA, 19 nt, Homo sapiens
  misc_RNA (1)...(19): siRNA sense strand
ccagcaacaccaagugcaa

SEQ ID NO: 1416190 - RNA, 19 nt, Homo sapiens
  misc_RNA (1)...(19): siRNA sense strand
gaauugaggaagacuguua

SEQ ID NO: 1416191 - RNA, 19 nt, Homo sapiens
  misc_RNA (1)...(19): siRNA sense strand
gaggaagacuguuacuaca

SEQ ID NO: 1416192 - RNA, 19 nt, Homo sapiens
  misc_RNA (1)...(19): siRNA sense strand
ggauuggaauugaggaaga

SEQ ID NO: 1416193 - RNA, 19 nt, Homo sapiens
  misc_RNA (1)...(19): siRNA sense strand
ugacugacaucaacuccaa

SEQ ID NO: 1416194 - RNA, 19 nt, Homo sapiens
  misc_RNA (1)...(19): siRNA sense strand
uggaaggccugcaucauga

SEQ ID NO: 1416195 - RNA, 19 nt, Homo sapiens
  misc_RNA (1)...(19): siRNA sense strand
uuacgucuguugcuagauu

SEQ ID NO: 1416196 - RNA, 19 nt, Homo sapiens
  misc_RNA (1)...(19): siRNA sense strand
ccaagugacugacaucaac

SEQ ID NO: 1416197 - RNA, 19 nt, Homo sapiens
  misc_RNA (1)...(19): siRNA sense strand
guucuuacgucuguugcua

SEQ ID NO: 1416198 - RNA, 19 nt, Homo sapiens
  misc_RNA (1)...(19): siRNA sense strand
ugaggaagacuguuacuac

SEQ ID NO: 1416199 - RNA, 19 nt, Homo sapiens
  misc_RNA (1)...(19): siRNA sense strand
ggccaauucugccauaagc

SEQ ID NO: 1416200 - RNA, 19 nt, Homo sapiens
  misc_RNA (1)...(19): siRNA sense strand
aacauggaaucaucaagga

SEQ ID NO: 1416201 - RNA, 19 nt, Homo sapiens
  misc_RNA (1)...(19): siRNA sense strand
uacgucuguugcuagauua

SEQ ID NO: 1416202 - RNA, 19 nt, Homo sapiens
  misc_RNA (1)...(19): siRNA sense strand
caucaacuccaagggauug

SEQ ID NO: 1416203 - RNA, 19 nt, Homo sapiens
  misc_RNA (1)...(19): siRNA sense strand
cauggaaucaucaaggaau

SEQ ID NO: 1416204 - RNA, 19 nt, Homo sapiens
  misc_RNA (1)...(19): siRNA sense strand
gcaacaccaagugcaaaga

SEQ ID NO: 1416205 - RNA, 19 nt, Homo sapiens
  misc_RNA (1)...(19): siRNA sense strand
caacaccaagugcaaagag

SEQ ID NO: 1416206 - RNA, 19 nt, Homo sapiens
  misc_RNA (1)...(19): siRNA sense strand
gcuagauuaucguccaaaa

SEQ ID NO: 1416207 - RNA, 19 nt, Homo sapiens
  misc_RNA (1)...(19): siRNA sense strand
ccuccuaccucugguucuu

SEQ ID NO: 1416208 - RNA, 19 nt, Homo sapiens
  misc_RNA (1)...(19): siRNA sense strand
cagcaacaccaagugcaaa

SEQ ID NO: 1416209 - RNA, 19 nt, Homo sapiens
  misc_RNA (1)...(19): siRNA sense strand
uuaaugcccaagugacuga

SEQ ID NO: 1416210 - RNA, 19 nt, Homo sapiens
  misc_RNA (1)...(19): siRNA sense strand
ggaaggccugcaucaugau

SEQ ID NO: 1416211 - RNA, 19 nt, Homo sapiens
  misc_RNA (1)...(19): siRNA sense strand
aaugcacacucaccagcaa

SEQ ID NO: 1416212 - RNA, 19 nt, Homo sapiens
  misc_RNA (1)...(19): siRNA sense strand
ccagcaacaccaagugcaa

SEQ ID NO: 1416213 - RNA, 19 nt, Homo sapiens
  misc_RNA (1)...(19): siRNA sense strand
ggaagcaggagaucauuaa

SEQ ID NO: 1416214 - RNA, 19 nt, Homo sapiens
  misc_RNA (1)...(19): siRNA sense strand
caacaacggugacuuugag

SEQ ID NO: 1416215 - RNA, 19 nt, Homo sapiens
  misc_RNA (1)...(19): siRNA sense strand
cagcaggcaugguuugguu

SEQ ID NO: 1416216 - RNA, 19 nt, Homo sapiens
  misc_RNA (1)...(19): siRNA sense strand
gcacgucauuggagaggau

SEQ ID NO: 1416217 - RNA, 19 nt, Homo sapiens
  misc_RNA (1)...(19): siRNA sense strand
cagugaagcuggcagacuu

SEQ ID NO: 1416218 - RNA, 19 nt, Homo sapiens
  misc_RNA (1)...(19): siRNA sense strand
ccaagaucaucaacaccaa

SEQ ID NO: 1416219 - RNA, 19 nt, Homo sapiens
  misc_RNA (1)...(19): siRNA sense strand
gcaagccuguggacaucug

SEQ ID NO: 1416220 - RNA, 19 nt, Homo sapiens
  misc_RNA (1)...(19): siRNA sense strand
caaaggggcugcagugaag

SEQ ID NO: 1416221 - RNA, 19 nt, Homo sapiens
  misc_RNA (1)...(19): siRNA sense strand
uaccagcucuacgaggaua

SEQ ID NO: 1416222 - RNA, 19 nt, Homo sapiens
  misc_RNA (1)...(19): siRNA sense strand
agaaccugcuggccaagaa

SEQ ID NO: 1416223 - RNA, 19 nt, Homo sapiens
  misc_RNA (1)...(19): siRNA sense strand
gaucaucaacaccaagaag

SEQ ID NO: 1416224 - RNA, 19 nt, Homo sapiens
  misc_RNA (1)...(19): siRNA sense strand
cggaagcaggagaucauua

SEQ ID NO: 1416225 - RNA, 19 nt, Homo sapiens
  misc_RNA (1)...(19): siRNA sense strand
cgucacuccugaagccaaa

SEQ ID NO: 1416226 - RNA, 19 nt, Homo sapiens
  misc_RNA (1)...(19): siRNA sense strand
cagccaagaucaucaacac

SEQ ID NO: 1416227 - RNA, 19 nt, Homo sapiens
  misc_RNA (1)...(19): siRNA sense strand
ucaaccagaugcugaccau

SEQ ID NO: 1416228 - RNA, 19 nt, Homo sapiens
  misc_RNA (1)...(19): siRNA sense strand
gcagacuucggccuagcua

SEQ ID NO: 1416229 - RNA, 19 nt, Homo sapiens
  misc_RNA (1)...(19): siRNA sense strand
acauccggcucacgcagua

SEQ ID NO: 1416230 - RNA, 19 nt, Homo sapiens
  misc_RNA (1)...(19): siRNA sense strand
agccagagaucaccagaag

SEQ ID NO: 1416231 - RNA, 19 nt, Homo sapiens
  misc_RNA (1)...(19): siRNA sense strand
ggacgaggaccagcacaag

SEQ ID NO: 1416232 - RNA, 19 nt, Homo sapiens
  misc_RNA (1)...(19): siRNA sense strand
ggacaccgucacuccugaa

SEQ ID NO: 1416233 - RNA, 19 nt, Homo sapiens
  misc_RNA (1)...(19): siRNA sense strand
ccagagaucaccagaagcu

SEQ ID NO: 1416234 - RNA, 19 nt, Homo sapiens
  misc_RNA (1)...(19): siRNA sense strand
gagccauccucaccaccau

SEQ ID NO: 1416235 - RNA, 19 nt, Homo sapiens
  misc_RNA (1)...(19): siRNA sense strand
gcaaaggggcugcagugaa

SEQ ID NO: 1416236 - RNA, 19 nt, Homo sapiens
  misc_RNA (1)...(19): siRNA sense strand
guucuccauugucaccaaa

SEQ ID NO: 1416237 - RNA, 19 nt, Homo sapiens
  misc_RNA (1)...(19): siRNA sense strand
ggucuucgaucuggucacu

SEQ ID NO: 1416238 - RNA, 19 nt, Homo sapiens
  misc_RNA (1)...(19): siRNA sense strand
aagcaggagaucauuaaga

SEQ ID NO: 1416239 - RNA, 19 nt, Homo sapiens
  misc_RNA (1)...(19): siRNA sense strand
gcaggcaugguuugguuuc

SEQ ID NO: 1416240 - RNA, 19 nt, Homo sapiens
  misc_RNA (1)...(19): siRNA sense strand
ccgaggagggcuuccacua

SEQ ID NO: 1416241 - RNA, 19 nt, Homo sapiens
  misc_RNA (1)...(19): siRNA sense strand
ggcagaacgugcacuucca

SEQ ID NO: 1416242 - RNA, 19 nt, Homo sapiens
  misc_RNA (1)...(19): siRNA sense strand
gcaccggccaugaguaugc

SEQ ID NO: 1416243 - RNA, 19 nt, Homo sapiens
  misc_RNA (1)...(19): siRNA sense strand
gaagcaggagaucauuaag

SEQ ID NO: 1416244 - RNA, 19 nt, Homo sapiens
  misc_RNA (1)...(19): siRNA sense strand
caucgaggccgucaacaac

SEQ ID NO: 1416245 - RNA, 19 nt, Homo sapiens
  misc_RNA (1)...(19): siRNA sense strand
uggcaagccuguggacauc

SEQ ID NO: 1416246 - RNA, 19 nt, Homo sapiens
  misc_RNA (1)...(19): siRNA sense strand
gaguaugcagccaagauca

SEQ ID NO: 1416247 - RNA, 19 nt, Homo sapiens
  misc_RNA (1)...(19): siRNA sense strand
gacuguggagugucugaaa

SEQ ID NO: 1416248 - RNA, 19 nt, Homo sapiens
  misc_RNA (1)...(19): siRNA sense strand
gagaaccugcuggccaaga

SEQ ID NO: 1416249 - RNA, 19 nt, Homo sapiens
  misc_RNA (1)...(19): siRNA sense strand
agcaggagaucauuaagac

SEQ ID NO: 1416250 - RNA, 19 nt, Homo sapiens
  misc_RNA (1)...(19): siRNA sense strand
ggaagcaggagaucauuaa

SEQ ID NO: 1416251 - RNA, 19 nt, Homo sapiens
  misc_RNA (1)...(19): siRNA sense strand
caacaacggugacuuugag

SEQ ID NO: 1416252 - RNA, 19 nt, Homo sapiens
  misc_RNA (1)...(19): siRNA sense strand
cagcaggcaugguuugguu

SEQ ID NO: 1416253 - RNA, 19 nt, Homo sapiens
  misc_RNA (1)...(19): siRNA sense strand
gcacgucauuggagaggau

SEQ ID NO: 1416254 - RNA, 19 nt, Homo sapiens
  misc_RNA (1)...(19): siRNA sense strand
cagugaagcuggcagacuu

SEQ ID NO: 1416255 - RNA, 19 nt, Homo sapiens
  misc_RNA (1)...(19): siRNA sense strand
ccaagaucaucaacaccaa

SEQ ID NO: 1416256 - RNA, 19 nt, Homo sapiens
  misc_RNA (1)...(19): siRNA sense strand
gcaagccuguggacaucug

SEQ ID NO: 1416257 - RNA, 19 nt, Homo sapiens
  misc_RNA (1)...(19): siRNA sense strand
caaaggggcugcagugaag

SEQ ID NO: 1416258 - RNA, 19 nt, Homo sapiens
  misc_RNA (1)...(19): siRNA sense strand
uaccagcucuacgaggaua

SEQ ID NO: 1416259 - RNA, 19 nt, Homo sapiens
  misc_RNA (1)...(19): siRNA sense strand
agaaccugcuggccaagaa

SEQ ID NO: 1416260 - RNA, 19 nt, Homo sapiens
  misc_RNA (1)...(19): siRNA sense strand
gaucaucaacaccaagaag

SEQ ID NO: 1416261 - RNA, 19 nt, Homo sapiens
  misc_RNA (1)...(19): siRNA sense strand
cggaagcaggagaucauua

SEQ ID NO: 1416262 - RNA, 19 nt, Homo sapiens
  misc_RNA (1)...(19): siRNA sense strand
cgucacuccugaagccaaa

SEQ ID NO: 1416263 - RNA, 19 nt, Homo sapiens
  misc_RNA (1)...(19): siRNA sense strand
cagccaagaucaucaacac

SEQ ID NO: 1416264 - RNA, 19 nt, Homo sapiens
  misc_RNA (1)...(19): siRNA sense strand
ucaaccagaugcugaccau

SEQ ID NO: 1416265 - RNA, 19 nt, Homo sapiens
  misc_RNA (1)...(19): siRNA sense strand
gcagacuucggccuagcua

SEQ ID NO: 1416266 - RNA, 19 nt, Homo sapiens
  misc_RNA (1)...(19): siRNA sense strand
acauccggcucacgcagua

SEQ ID NO: 1416267 - RNA, 19 nt, Homo sapiens
  misc_RNA (1)...(19): siRNA sense strand
agccagagaucaccagaag

SEQ ID NO: 1416268 - RNA, 19 nt, Homo sapiens
  misc_RNA (1)...(19): siRNA sense strand
ggacgaggaccagcacaag

SEQ ID NO: 1416269 - RNA, 19 nt, Homo sapiens
  misc_RNA (1)...(19): siRNA sense strand
ggacaccgucacuccugaa

SEQ ID NO: 1416270 - RNA, 19 nt, Homo sapiens
  misc_RNA (1)...(19): siRNA sense strand
ccagagaucaccagaagcu

SEQ ID NO: 1416271 - RNA, 19 nt, Homo sapiens
  misc_RNA (1)...(19): siRNA sense strand
gagccauccucaccaccau

SEQ ID NO: 1416272 - RNA, 19 nt, Homo sapiens
  misc_RNA (1)...(19): siRNA sense strand
gcaaaggggcugcagugaa

SEQ ID NO: 1416273 - RNA, 19 nt, Homo sapiens
  misc_RNA (1)...(19): siRNA sense strand
guucuccauugucaccaaa

SEQ ID NO: 1416274 - RNA, 19 nt, Homo sapiens
  misc_RNA (1)...(19): siRNA sense strand
ggucuucgaucuggucacu

SEQ ID NO: 1416275 - RNA, 19 nt, Homo sapiens
  misc_RNA (1)...(19): siRNA sense strand
aagcaggagaucauuaaga

SEQ ID NO: 1416276 - RNA, 19 nt, Homo sapiens
  misc_RNA (1)...(19): siRNA sense strand
gcaggcaugguuugguuuc

SEQ ID NO: 1416277 - RNA, 19 nt, Homo sapiens
  misc_RNA (1)...(19): siRNA sense strand
ccgaggagggcuuccacua

SEQ ID NO: 1416278 - RNA, 19 nt, Homo sapiens
  misc_RNA (1)...(19): siRNA sense strand
ggcagaacgugcacuucca

SEQ ID NO: 1416279 - RNA, 19 nt, Homo sapiens
  misc_RNA (1)...(19): siRNA sense strand
gcaccggccaugaguaugc

SEQ ID NO: 1416280 - RNA, 19 nt, Homo sapiens
  misc_RNA (1)...(19): siRNA sense strand
gaagcaggagaucauuaag

SEQ ID NO: 1416281 - RNA, 19 nt, Homo sapiens
  misc_RNA (1)...(19): siRNA sense strand
caucgaggccgucaacaac

SEQ ID NO: 1416282 - RNA, 19 nt, Homo sapiens
  misc_RNA (1)...(19): siRNA sense strand
uggcaagccuguggacauc

SEQ ID NO: 1416283 - RNA, 19 nt, Homo sapiens
  misc_RNA (1)...(19): siRNA sense strand
gaguaugcagccaagauca

SEQ ID NO: 1416284 - RNA, 19 nt, Homo sapiens
  misc_RNA (1)...(19): siRNA sense strand
gacuguggagugucugaaa

SEQ ID NO: 1416285 - RNA, 19 nt, Homo sapiens
  misc_RNA (1)...(19): siRNA sense strand
gagaaccugcuggccaaga

SEQ ID NO: 1416286 - RNA, 19 nt, Homo sapiens
  misc_RNA (1)...(19): siRNA sense strand
agcaggagaucauuaagac

SEQ ID NO: 1416287 - RNA, 19 nt, Homo sapiens
  misc_RNA (1)...(19): siRNA sense strand
ggaagcaggagaucauuaa

SEQ ID NO: 1416288 - RNA, 19 nt, Homo sapiens
  misc_RNA (1)...(19): siRNA sense strand
caacaacggugacuuugag

SEQ ID NO: 1416289 - RNA, 19 nt, Homo sapiens
  misc_RNA (1)...(19): siRNA sense strand
cagcaggcaugguuugguu

SEQ ID NO: 1416290 - RNA, 19 nt, Homo sapiens
  misc_RNA (1)...(19): siRNA sense strand
gcacgucauuggagaggau

SEQ ID NO: 1416291 - RNA, 19 nt, Homo sapiens
  misc_RNA (1)...(19): siRNA sense strand
cagugaagcuggcagacuu

SEQ ID NO: 1416292 - RNA, 19 nt, Homo sapiens
  misc_RNA (1)...(19): siRNA sense strand
ccaagaucaucaacaccaa

SEQ ID NO: 1416293 - RNA, 19 nt, Homo sapiens
  misc_RNA (1)...(19): siRNA sense strand
gcaagccuguggacaucug

SEQ ID NO: 1416294 - RNA, 19 nt, Homo sapiens
  misc_RNA (1)...(19): siRNA sense strand
caaaggggcugcagugaag

SEQ ID NO: 1416295 - RNA, 19 nt, Homo sapiens
  misc_RNA (1)...(19): siRNA sense strand
uaccagcucuacgaggaua

SEQ ID NO: 1416296 - RNA, 19 nt, Homo sapiens
  misc_RNA (1)...(19): siRNA sense strand
agaaccugcuggccaagaa

SEQ ID NO: 1416297 - RNA, 19 nt, Homo sapiens
  misc_RNA (1)...(19): siRNA sense strand
gaucaucaacaccaagaag

SEQ ID NO: 1416298 - RNA, 19 nt, Homo sapiens
  misc_RNA (1)...(19): siRNA sense strand
cggaagcaggagaucauua

SEQ ID NO: 1416299 - RNA, 19 nt, Homo sapiens
  misc_RNA (1)...(19): siRNA sense strand
cgucacuccugaagccaaa

SEQ ID NO: 1416300 - RNA, 19 nt, Homo sapiens
  misc_RNA (1)...(19): siRNA sense strand
cagccaagaucaucaacac

SEQ ID NO: 1416301 - RNA, 19 nt, Homo sapiens
  misc_RNA (1)...(19): siRNA sense strand
ucaaccagaugcugaccau

SEQ ID NO: 1416302 - RNA, 19 nt, Homo sapiens
  misc_RNA (1)...(19): siRNA sense strand
gcagacuucggccuagcua

SEQ ID NO: 1416303 - RNA, 19 nt, Homo sapiens
  misc_RNA (1)...(19): siRNA sense strand
acauccggcucacgcagua

SEQ ID NO: 1416304 - RNA, 19 nt, Homo sapiens
  misc_RNA (1)...(19): siRNA sense strand
agccagagaucaccagaag

SEQ ID NO: 1416305 - RNA, 19 nt, Homo sapiens
  misc_RNA (1)...(19): siRNA sense strand
ggacgaggaccagcacaag

SEQ ID NO: 1416306 - RNA, 19 nt, Homo sapiens
  misc_RNA (1)...(19): siRNA sense strand
ggacaccgucacuccugaa

SEQ ID NO: 1416307 - RNA, 19 nt, Homo sapiens
  misc_RNA (1)...(19): siRNA sense strand
ccagagaucaccagaagcu

SEQ ID NO: 1416308 - RNA, 19 nt, Homo sapiens
  misc_RNA (1)...(19): siRNA sense strand
gagccauccucaccaccau

SEQ ID NO: 1416309 - RNA, 19 nt, Homo sapiens
  misc_RNA (1)...(19): siRNA sense strand
gcaaaggggcugcagugaa

SEQ ID NO: 1416310 - RNA, 19 nt, Homo sapiens
  misc_RNA (1)...(19): siRNA sense strand
guucuccauugucaccaaa

SEQ ID NO: 1416311 - RNA, 19 nt, Homo sapiens
  misc_RNA (1)...(19): siRNA sense strand
ggucuucgaucuggucacu

SEQ ID NO: 1416312 - RNA, 19 nt, Homo sapiens
  misc_RNA (1)...(19): siRNA sense strand
aagcaggagaucauuaaga

SEQ ID NO: 1416313 - RNA, 19 nt, Homo sapiens
  misc_RNA (1)...(19): siRNA sense strand
gcaggcaugguuugguuuc

SEQ ID NO: 1416314 - RNA, 19 nt, Homo sapiens
  misc_RNA (1)...(19): siRNA sense strand
ccgaggagggcuuccacua

SEQ ID NO: 1416315 - RNA, 19 nt, Homo sapiens
  misc_RNA (1)...(19): siRNA sense strand
ggcagaacgugcacuucca

SEQ ID NO: 1416316 - RNA, 19 nt, Homo sapiens
  misc_RNA (1)...(19): siRNA sense strand
gcaccggccaugaguaugc

SEQ ID NO: 1416317 - RNA, 19 nt, Homo sapiens
  misc_RNA (1)...(19): siRNA sense strand
gaagcaggagaucauuaag

SEQ ID NO: 1416318 - RNA, 19 nt, Homo sapiens
  misc_RNA (1)...(19): siRNA sense strand
caucgaggccgucaacaac

SEQ ID NO: 1416319 - RNA, 19 nt, Homo sapiens
  misc_RNA (1)...(19): siRNA sense strand
uggcaagccuguggacauc

SEQ ID NO: 1416320 - RNA, 19 nt, Homo sapiens
  misc_RNA (1)...(19): siRNA sense strand
gaguaugcagccaagauca

SEQ ID NO: 1416321 - RNA, 19 nt, Homo sapiens
  misc_RNA (1)...(19): siRNA sense strand
gacuguggagugucugaaa

SEQ ID NO: 1416322 - RNA, 19 nt, Homo sapiens
  misc_RNA (1)...(19): siRNA sense strand
gagaaccugcuggccaaga

SEQ ID NO: 1416323 - RNA, 19 nt, Homo sapiens
  misc_RNA (1)...(19): siRNA sense strand
agcaggagaucauuaagac

SEQ ID NO: 1416324 - RNA, 19 nt, Homo sapiens
  misc_RNA (1)...(19): siRNA sense strand
ggaagcaggagaucauuaa

SEQ ID NO: 1416325 - RNA, 19 nt, Homo sapiens
  misc_RNA (1)...(19): siRNA sense strand
caacaacggugacuuugag

SEQ ID NO: 1416326 - RNA, 19 nt, Homo sapiens
  misc_RNA (1)...(19): siRNA sense strand
cagcaggcaugguuugguu

SEQ ID NO: 1416327 - RNA, 19 nt, Homo sapiens
  misc_RNA (1)...(19): siRNA sense strand
gcacgucauuggagaggau

SEQ ID NO: 1416328 - RNA, 19 nt, Homo sapiens
  misc_RNA (1)...(19): siRNA sense strand
cagugaagcuggcagacuu

SEQ ID NO: 1416329 - RNA, 19 nt, Homo sapiens
  misc_RNA (1)...(19): siRNA sense strand
ccaagaucaucaacaccaa

SEQ ID NO: 1416330 - RNA, 19 nt, Homo sapiens
  misc_RNA (1)...(19): siRNA sense strand
gcaagccuguggacaucug

SEQ ID NO: 1416331 - RNA, 19 nt, Homo sapiens
  misc_RNA (1)...(19): siRNA sense strand
caaaggggcugcagugaag

SEQ ID NO: 1416332 - RNA, 19 nt, Homo sapiens
  misc_RNA (1)...(19): siRNA sense strand
uaccagcucuacgaggaua

SEQ ID NO: 1416333 - RNA, 19 nt, Homo sapiens
  misc_RNA (1)...(19): siRNA sense strand
agaaccugcuggccaagaa

SEQ ID NO: 1416334 - RNA, 19 nt, Homo sapiens
  misc_RNA (1)...(19): siRNA sense strand
gaucaucaacaccaagaag

SEQ ID NO: 1416335 - RNA, 19 nt, Homo sapiens
  misc_RNA (1)...(19): siRNA sense strand
cggaagcaggagaucauua

SEQ ID NO: 1416336 - RNA, 19 nt, Homo sapiens
  misc_RNA (1)...(19): siRNA sense strand
cgucacuccugaagccaaa

SEQ ID NO: 1416337 - RNA, 19 nt, Homo sapiens
  misc_RNA (1)...(19): siRNA sense strand
cagccaagaucaucaacac

SEQ ID NO: 1416338 - RNA, 19 nt, Homo sapiens
  misc_RNA (1)...(19): siRNA sense strand
ucaaccagaugcugaccau

SEQ ID NO: 1416339 - RNA, 19 nt, Homo sapiens
  misc_RNA (1)...(19): siRNA sense strand
gcagacuucggccuagcua

SEQ ID NO: 1416340 - RNA, 19 nt, Homo sapiens
  misc_RNA (1)...(19): siRNA sense strand
acauccggcucacgcagua

SEQ ID NO: 1416341 - RNA, 19 nt, Homo sapiens
  misc_RNA (1)...(19): siRNA sense strand
agccagagaucaccagaag

SEQ ID NO: 1416342 - RNA, 19 nt, Homo sapiens
  misc_RNA (1)...(19): siRNA sense strand
ggacgaggaccagcacaag

SEQ ID NO: 1416343 - RNA, 19 nt, Homo sapiens
  misc_RNA (1)...(19): siRNA sense strand
ggacaccgucacuccugaa

SEQ ID NO: 1416344 - RNA, 19 nt, Homo sapiens
  misc_RNA (1)...(19): siRNA sense strand
ccagagaucaccagaagcu

SEQ ID NO: 1416345 - RNA, 19 nt, Homo sapiens
  misc_RNA (1)...(19): siRNA sense strand
gagccauccucaccaccau

SEQ ID NO: 1416346 - RNA, 19 nt, Homo sapiens
  misc_RNA (1)...(19): siRNA sense strand
gcaaaggggcugcagugaa

SEQ ID NO: 1416347 - RNA, 19 nt, Homo sapiens
  misc_RNA (1)...(19): siRNA sense strand
guucuccauugucaccaaa

SEQ ID NO: 1416348 - RNA, 19 nt, Homo sapiens
  misc_RNA (1)...(19): siRNA sense strand
ggucuucgaucuggucacu

SEQ ID NO: 1416349 - RNA, 19 nt, Homo sapiens
  misc_RNA (1)...(19): siRNA sense strand
aagcaggagaucauuaaga

SEQ ID NO: 1416350 - RNA, 19 nt, Homo sapiens
  misc_RNA (1)...(19): siRNA sense strand
gcaggcaugguuugguuuc

SEQ ID NO: 1416351 - RNA, 19 nt, Homo sapiens
  misc_RNA (1)...(19): siRNA sense strand
ccgaggagggcuuccacua

SEQ ID NO: 1416352 - RNA, 19 nt, Homo sapiens
  misc_RNA (1)...(19): siRNA sense strand
ggcagaacgugcacuucca

SEQ ID NO: 1416353 - RNA, 19 nt, Homo sapiens
  misc_RNA (1)...(19): siRNA sense strand
gcaccggccaugaguaugc

SEQ ID NO: 1416354 - RNA, 19 nt, Homo sapiens
  misc_RNA (1)...(19): siRNA sense strand
gaagcaggagaucauuaag

SEQ ID NO: 1416355 - RNA, 19 nt, Homo sapiens
  misc_RNA (1)...(19): siRNA sense strand
caucgaggccgucaacaac

SEQ ID NO: 1416356 - RNA, 19 nt, Homo sapiens
  misc_RNA (1)...(19): siRNA sense strand
uggcaagccuguggacauc

SEQ ID NO: 1416357 - RNA, 19 nt, Homo sapiens
  misc_RNA (1)...(19): siRNA sense strand
gaguaugcagccaagauca

SEQ ID NO: 1416358 - RNA, 19 nt, Homo sapiens
  misc_RNA (1)...(19): siRNA sense strand
gacuguggagugucugaaa

SEQ ID NO: 1416359 - RNA, 19 nt, Homo sapiens
  misc_RNA (1)...(19): siRNA sense strand
gagaaccugcuggccaaga

SEQ ID NO: 1416360 - RNA, 19 nt, Homo sapiens
  misc_RNA (1)...(19): siRNA sense strand
agcaggagaucauuaagac

SEQ ID NO: 1416361 - RNA, 19 nt, Homo sapiens
  misc_RNA (1)...(19): siRNA sense strand
ggaagcaggagaucauuaa

SEQ ID NO: 1416362 - RNA, 19 nt, Homo sapiens
  misc_RNA (1)...(19): siRNA sense strand
caacaacggugacuuugag

SEQ ID NO: 1416363 - RNA, 19 nt, Homo sapiens
  misc_RNA (1)...(19): siRNA sense strand
cagcaggcaugguuugguu

SEQ ID NO: 1416364 - RNA, 19 nt, Homo sapiens
  misc_RNA (1)...(19): siRNA sense strand
gcacgucauuggagaggau

SEQ ID NO: 1416365 - RNA, 19 nt, Homo sapiens
  misc_RNA (1)...(19): siRNA sense strand
cagugaagcuggcagacuu

SEQ ID NO: 1416366 - RNA, 19 nt, Homo sapiens
  misc_RNA (1)...(19): siRNA sense strand
ccaagaucaucaacaccaa

SEQ ID NO: 1416367 - RNA, 19 nt, Homo sapiens
  misc_RNA (1)...(19): siRNA sense strand
gcaagccuguggacaucug

SEQ ID NO: 1416368 - RNA, 19 nt, Homo sapiens
  misc_RNA (1)...(19): siRNA sense strand
caaaggggcugcagugaag

SEQ ID NO: 1416369 - RNA, 19 nt, Homo sapiens
  misc_RNA (1)...(19): siRNA sense strand
uaccagcucuacgaggaua

SEQ ID NO: 1416370 - RNA, 19 nt, Homo sapiens
  misc_RNA (1)...(19): siRNA sense strand
agaaccugcuggccaagaa

SEQ ID NO: 1416371 - RNA, 19 nt, Homo sapiens
  misc_RNA (1)...(19): siRNA sense strand
gaucaucaacaccaagaag

SEQ ID NO: 1416372 - RNA, 19 nt, Homo sapiens
  misc_RNA (1)...(19): siRNA sense strand
cggaagcaggagaucauua

SEQ ID NO: 1416373 - RNA, 19 nt, Homo sapiens
  misc_RNA (1)...(19): siRNA sense strand
cgucacuccugaagccaaa

SEQ ID NO: 1416374 - RNA, 19 nt, Homo sapiens
  misc_RNA (1)...(19): siRNA sense strand
cagccaagaucaucaacac

SEQ ID NO: 1416375 - RNA, 19 nt, Homo sapiens
  misc_RNA (1)...(19): siRNA sense strand
ucaaccagaugcugaccau

SEQ ID NO: 1416376 - RNA, 19 nt, Homo sapiens
  misc_RNA (1)...(19): siRNA sense strand
gcagacuucggccuagcua

SEQ ID NO: 1416377 - RNA, 19 nt, Homo sapiens
  misc_RNA (1)...(19): siRNA sense strand
acauccggcucacgcagua

SEQ ID NO: 1416378 - RNA, 19 nt, Homo sapiens
  misc_RNA (1)...(19): siRNA sense strand
agccagagaucaccagaag

SEQ ID NO: 1416379 - RNA, 19 nt, Homo sapiens
  misc_RNA (1)...(19): siRNA sense strand
ggacgaggaccagcacaag

SEQ ID NO: 1416380 - RNA, 19 nt, Homo sapiens
  misc_RNA (1)...(19): siRNA sense strand
ggacaccgucacuccugaa

SEQ ID NO: 1416381 - RNA, 19 nt, Homo sapiens
  misc_RNA (1)...(19): siRNA sense strand
ccagagaucaccagaagcu

SEQ ID NO: 1416382 - RNA, 19 nt, Homo sapiens
  misc_RNA (1)...(19): siRNA sense strand
gagccauccucaccaccau

SEQ ID NO: 1416383 - RNA, 19 nt, Homo sapiens
  misc_RNA (1)...(19): siRNA sense strand
gcaaaggggcugcagugaa

SEQ ID NO: 1416384 - RNA, 19 nt, Homo sapiens
  misc_RNA (1)...(19): siRNA sense strand
guucuccauugucaccaaa

SEQ ID NO: 1416385 - RNA, 19 nt, Homo sapiens
  misc_RNA (1)...(19): siRNA sense strand
ggucuucgaucuggucacu

SEQ ID NO: 1416386 - RNA, 19 nt, Homo sapiens
  misc_RNA (1)...(19): siRNA sense strand
aagcaggagaucauuaaga

SEQ ID NO: 1416387 - RNA, 19 nt, Homo sapiens
  misc_RNA (1)...(19): siRNA sense strand
gcaggcaugguuugguuuc

SEQ ID NO: 1416388 - RNA, 19 nt, Homo sapiens
  misc_RNA (1)...(19): siRNA sense strand
ccgaggagggcuuccacua

SEQ ID NO: 1416389 - RNA, 19 nt, Homo sapiens
  misc_RNA (1)...(19): siRNA sense strand
ggcagaacgugcacuucca

SEQ ID NO: 1416390 - RNA, 19 nt, Homo sapiens
  misc_RNA (1)...(19): siRNA sense strand
gcaccggccaugaguaugc

SEQ ID NO: 1416391 - RNA, 19 nt, Homo sapiens
  misc_RNA (1)...(19): siRNA sense strand
gaagcaggagaucauuaag

SEQ ID NO: 1416392 - RNA, 19 nt, Homo sapiens
  misc_RNA (1)...(19): siRNA sense strand
caucgaggccgucaacaac

SEQ ID NO: 1416393 - RNA, 19 nt, Homo sapiens
  misc_RNA (1)...(19): siRNA sense strand
uggcaagccuguggacauc

SEQ ID NO: 1416394 - RNA, 19 nt, Homo sapiens
  misc_RNA (1)...(19): siRNA sense strand
gaguaugcagccaagauca

SEQ ID NO: 1416395 - RNA, 19 nt, Homo sapiens
  misc_RNA (1)...(19): siRNA sense strand
gacuguggagugucugaaa

SEQ ID NO: 1416396 - RNA, 19 nt, Homo sapiens
  misc_RNA (1)...(19): siRNA sense strand
gagaaccugcuggccaaga

SEQ ID NO: 1416397 - RNA, 19 nt, Homo sapiens
  misc_RNA (1)...(19): siRNA sense strand
agcaggagaucauuaagac

SEQ ID NO: 1416398 - RNA, 19 nt, Homo sapiens
  misc_RNA (1)...(19): siRNA sense strand
ggaagcaggagaucauuaa

SEQ ID NO: 1416399 - RNA, 19 nt, Homo sapiens
  misc_RNA (1)...(19): siRNA sense strand
caacaacggugacuuugag

SEQ ID NO: 1416400 - RNA, 19 nt, Homo sapiens
  misc_RNA (1)...(19): siRNA sense strand
cagcaggcaugguuugguu

SEQ ID NO: 1416401 - RNA, 19 nt, Homo sapiens
  misc_RNA (1)...(19): siRNA sense strand
gcacgucauuggagaggau

SEQ ID NO: 1416402 - RNA, 19 nt, Homo sapiens
  misc_RNA (1)...(19): siRNA sense strand
cagugaagcuggcagacuu

SEQ ID NO: 1416403 - RNA, 19 nt, Homo sapiens
  misc_RNA (1)...(19): siRNA sense strand
ccaagaucaucaacaccaa

SEQ ID NO: 1416404 - RNA, 19 nt, Homo sapiens
  misc_RNA (1)...(19): siRNA sense strand
gcaagccuguggacaucug

SEQ ID NO: 1416405 - RNA, 19 nt, Homo sapiens
  misc_RNA (1)...(19): siRNA sense strand
caaaggggcugcagugaag

SEQ ID NO: 1416406 - RNA, 19 nt, Homo sapiens
  misc_RNA (1)...(19): siRNA sense strand
uaccagcucuacgaggaua

SEQ ID NO: 1416407 - RNA, 19 nt, Homo sapiens
  misc_RNA (1)...(19): siRNA sense strand
agaaccugcuggccaagaa

SEQ ID NO: 1416408 - RNA, 19 nt, Homo sapiens
  misc_RNA (1)...(19): siRNA sense strand
gaucaucaacaccaagaag

SEQ ID NO: 1416409 - RNA, 19 nt, Homo sapiens
  misc_RNA (1)...(19): siRNA sense strand
cggaagcaggagaucauua

SEQ ID NO: 1416410 - RNA, 19 nt, Homo sapiens
  misc_RNA (1)...(19): siRNA sense strand
cgucacuccugaagccaaa

SEQ ID NO: 1416411 - RNA, 19 nt, Homo sapiens
  misc_RNA (1)...(19): siRNA sense strand
cagccaagaucaucaacac

SEQ ID NO: 1416412 - RNA, 19 nt, Homo sapiens
  misc_RNA (1)...(19): siRNA sense strand
ucaaccagaugcugaccau

SEQ ID NO: 1416413 - RNA, 19 nt, Homo sapiens
  misc_RNA (1)...(19): siRNA sense strand
gcagacuucggccuagcua

SEQ ID NO: 1416414 - RNA, 19 nt, Homo sapiens
  misc_RNA (1)...(19): siRNA sense strand
acauccggcucacgcagua

SEQ ID NO: 1416415 - RNA, 19 nt, Homo sapiens
  misc_RNA (1)...(19): siRNA sense strand
agccagagaucaccagaag

SEQ ID NO: 1416416 - RNA, 19 nt, Homo sapiens
  misc_RNA (1)...(19): siRNA sense strand
ggacgaggaccagcacaag

SEQ ID NO: 1416417 - RNA, 19 nt, Homo sapiens
  misc_RNA (1)...(19): siRNA sense strand
ggacaccgucacuccugaa

SEQ ID NO: 1416418 - RNA, 19 nt, Homo sapiens
  misc_RNA (1)...(19): siRNA sense strand
ccagagaucaccagaagcu

SEQ ID NO: 1416419 - RNA, 19 nt, Homo sapiens
  misc_RNA (1)...(19): siRNA sense strand
gagccauccucaccaccau

SEQ ID NO: 1416420 - RNA, 19 nt, Homo sapiens
  misc_RNA (1)...(19): siRNA sense strand
gcaaaggggcugcagugaa

SEQ ID NO: 1416421 - RNA, 19 nt, Homo sapiens
  misc_RNA (1)...(19): siRNA sense strand
guucuccauugucaccaaa

SEQ ID NO: 1416422 - RNA, 19 nt, Homo sapiens
  misc_RNA (1)...(19): siRNA sense strand
ggucuucgaucuggucacu

SEQ ID NO: 1416423 - RNA, 19 nt, Homo sapiens
  misc_RNA (1)...(19): siRNA sense strand
aagcaggagaucauuaaga

SEQ ID NO: 1416424 - RNA, 19 nt, Homo sapiens
  misc_RNA (1)...(19): siRNA sense strand
gcaggcaugguuugguuuc

SEQ ID NO: 1416425 - RNA, 19 nt, Homo sapiens
  misc_RNA (1)...(19): siRNA sense strand
ccgaggagggcuuccacua

SEQ ID NO: 1416426 - RNA, 19 nt, Homo sapiens
  misc_RNA (1)...(19): siRNA sense strand
ggcagaacgugcacuucca

SEQ ID NO: 1416427 - RNA, 19 nt, Homo sapiens
  misc_RNA (1)...(19): siRNA sense strand
gcaccggccaugaguaugc

SEQ ID NO: 1416428 - RNA, 19 nt, Homo sapiens
  misc_RNA (1)...(19): siRNA sense strand
gaagcaggagaucauuaag

SEQ ID NO: 1416429 - RNA, 19 nt, Homo sapiens
  misc_RNA (1)...(19): siRNA sense strand
caucgaggccgucaacaac

SEQ ID NO: 1416430 - RNA, 19 nt, Homo sapiens
  misc_RNA (1)...(19): siRNA sense strand
uggcaagccuguggacauc

SEQ ID NO: 1416431 - RNA, 19 nt, Homo sapiens
  misc_RNA (1)...(19): siRNA sense strand
gaguaugcagccaagauca

SEQ ID NO: 1416432 - RNA, 19 nt, Homo sapiens
  misc_RNA (1)...(19): siRNA sense strand
gacuguggagugucugaaa

SEQ ID NO: 1416433 - RNA, 19 nt, Homo sapiens
  misc_RNA (1)...(19): siRNA sense strand
gagaaccugcuggccaaga

SEQ ID NO: 1416434 - RNA, 19 nt, Homo sapiens
  misc_RNA (1)...(19): siRNA sense strand
agcaggagaucauuaagac

SEQ ID NO: 1416435 - RNA, 19 nt, Homo sapiens
  misc_RNA (1)...(19): siRNA sense strand
ggaagcaggagaucauuaa

SEQ ID NO: 1416436 - RNA, 19 nt, Homo sapiens
  misc_RNA (1)...(19): siRNA sense strand
caacaacggugacuuugag

SEQ ID NO: 1416437 - RNA, 19 nt, Homo sapiens
  misc_RNA (1)...(19): siRNA sense strand
cagcaggcaugguuugguu

SEQ ID NO: 1416438 - RNA, 19 nt, Homo sapiens
  misc_RNA (1)...(19): siRNA sense strand
gcacgucauuggagaggau

SEQ ID NO: 1416439 - RNA, 19 nt, Homo sapiens
  misc_RNA (1)...(19): siRNA sense strand
cagugaagcuggcagacuu

SEQ ID NO: 1416440 - RNA, 19 nt, Homo sapiens
  misc_RNA (1)...(19): siRNA sense strand
ccaagaucaucaacaccaa

SEQ ID NO: 1416441 - RNA, 19 nt, Homo sapiens
  misc_RNA (1)...(19): siRNA sense strand
gcaagccuguggacaucug

SEQ ID NO: 1416442 - RNA, 19 nt, Homo sapiens
  misc_RNA (1)...(19): siRNA sense strand
caaaggggcugcagugaag

SEQ ID NO: 1416443 - RNA, 19 nt, Homo sapiens
  misc_RNA (1)...(19): siRNA sense strand
uaccagcucuacgaggaua

SEQ ID NO: 1416444 - RNA, 19 nt, Homo sapiens
  misc_RNA (1)...(19): siRNA sense strand
agaaccugcuggccaagaa

SEQ ID NO: 1416445 - RNA, 19 nt, Homo sapiens
  misc_RNA (1)...(19): siRNA sense strand
gaucaucaacaccaagaag

SEQ ID NO: 1416446 - RNA, 19 nt, Homo sapiens
  misc_RNA (1)...(19): siRNA sense strand
cggaagcaggagaucauua

SEQ ID NO: 1416447 - RNA, 19 nt, Homo sapiens
  misc_RNA (1)...(19): siRNA sense strand
cgucacuccugaagccaaa

SEQ ID NO: 1416448 - RNA, 19 nt, Homo sapiens
  misc_RNA (1)...(19): siRNA sense strand
cagccaagaucaucaacac

SEQ ID NO: 1416449 - RNA, 19 nt, Homo sapiens
  misc_RNA (1)...(19): siRNA sense strand
ucaaccagaugcugaccau

SEQ ID NO: 1416450 - RNA, 19 nt, Homo sapiens
  misc_RNA (1)...(19): siRNA sense strand
gcagacuucggccuagcua

SEQ ID NO: 1416451 - RNA, 19 nt, Homo sapiens
  misc_RNA (1)...(19): siRNA sense strand
acauccggcucacgcagua

SEQ ID NO: 1416452 - RNA, 19 nt, Homo sapiens
  misc_RNA (1)...(19): siRNA sense strand
agccagagaucaccagaag

SEQ ID NO: 1416453 - RNA, 19 nt, Homo sapiens
  misc_RNA (1)...(19): siRNA sense strand
ggacgaggaccagcacaag

SEQ ID NO: 1416454 - RNA, 19 nt, Homo sapiens
  misc_RNA (1)...(19): siRNA sense strand
ggacaccgucacuccugaa

SEQ ID NO: 1416455 - RNA, 19 nt, Homo sapiens
  misc_RNA (1)...(19): siRNA sense strand
ccagagaucaccagaagcu

SEQ ID NO: 1416456 - RNA, 19 nt, Homo sapiens
  misc_RNA (1)...(19): siRNA sense strand
gagccauccucaccaccau

SEQ ID NO: 1416457 - RNA, 19 nt, Homo sapiens
  misc_RNA (1)...(19): siRNA sense strand
gcaaaggggcugcagugaa

SEQ ID NO: 1416458 - RNA, 19 nt, Homo sapiens
  misc_RNA (1)...(19): siRNA sense strand
guucuccauugucaccaaa

SEQ ID NO: 1416459 - RNA, 19 nt, Homo sapiens
  misc_RNA (1)...(19): siRNA sense strand
ggucuucgaucuggucacu

SEQ ID NO: 1416460 - RNA, 19 nt, Homo sapiens
  misc_RNA (1)...(19): siRNA sense strand
aagcaggagaucauuaaga

SEQ ID NO: 1416461 - RNA, 19 nt, Homo sapiens
  misc_RNA (1)...(19): siRNA sense strand
gcaggcaugguuugguuuc

SEQ ID NO: 1416462 - RNA, 19 nt, Homo sapiens
  misc_RNA (1)...(19): siRNA sense strand
ccgaggagggcuuccacua

SEQ ID NO: 1416463 - RNA, 19 nt, Homo sapiens
  misc_RNA (1)...(19): siRNA sense strand
ggcagaacgugcacuucca

SEQ ID NO: 1416464 - RNA, 19 nt, Homo sapiens
  misc_RNA (1)...(19): siRNA sense strand
gcaccggccaugaguaugc

SEQ ID NO: 1416465 - RNA, 19 nt, Homo sapiens
  misc_RNA (1)...(19): siRNA sense strand
gaagcaggagaucauuaag

SEQ ID NO: 1416466 - RNA, 19 nt, Homo sapiens
  misc_RNA (1)...(19): siRNA sense strand
caucgaggccgucaacaac

SEQ ID NO: 1416467 - RNA, 19 nt, Homo sapiens
  misc_RNA (1)...(19): siRNA sense strand
uggcaagccuguggacauc

SEQ ID NO: 1416468 - RNA, 19 nt, Homo sapiens
  misc_RNA (1)...(19): siRNA sense strand
gaguaugcagccaagauca

SEQ ID NO: 1416469 - RNA, 19 nt, Homo sapiens
  misc_RNA (1)...(19): siRNA sense strand
gacuguggagugucugaaa

SEQ ID NO: 1416470 - RNA, 19 nt, Homo sapiens
  misc_RNA (1)...(19): siRNA sense strand
gagaaccugcuggccaaga

SEQ ID NO: 1416471 - RNA, 19 nt, Homo sapiens
  misc_RNA (1)...(19): siRNA sense strand
agcaggagaucauuaagac

SEQ ID NO: 1416472 - RNA, 19 nt, Homo sapiens
  misc_RNA (1)...(19): siRNA sense strand
ggaagcaggagaucauuaa

SEQ ID NO: 1416473 - RNA, 19 nt, Homo sapiens
  misc_RNA (1)...(19): siRNA sense strand
caacaacggugacuuugag

SEQ ID NO: 1416474 - RNA, 19 nt, Homo sapiens
  misc_RNA (1)...(19): siRNA sense strand
cagcaggcaugguuugguu

SEQ ID NO: 1416475 - RNA, 19 nt, Homo sapiens
  misc_RNA (1)...(19): siRNA sense strand
gcacgucauuggagaggau

SEQ ID NO: 1416476 - RNA, 19 nt, Homo sapiens
  misc_RNA (1)...(19): siRNA sense strand
cagugaagcuggcagacuu

SEQ ID NO: 1416477 - RNA, 19 nt, Homo sapiens
  misc_RNA (1)...(19): siRNA sense strand
ccaagaucaucaacaccaa

SEQ ID NO: 1416478 - RNA, 19 nt, Homo sapiens
  misc_RNA (1)...(19): siRNA sense strand
gcaagccuguggacaucug

SEQ ID NO: 1416479 - RNA, 19 nt, Homo sapiens
  misc_RNA (1)...(19): siRNA sense strand
caaaggggcugcagugaag

SEQ ID NO: 1416480 - RNA, 19 nt, Homo sapiens
  misc_RNA (1)...(19): siRNA sense strand
uaccagcucuacgaggaua

SEQ ID NO: 1416481 - RNA, 19 nt, Homo sapiens
  misc_RNA (1)...(19): siRNA sense strand
agaaccugcuggccaagaa

SEQ ID NO: 1416482 - RNA, 19 nt, Homo sapiens
  misc_RNA (1)...(19): siRNA sense strand
gaucaucaacaccaagaag

SEQ ID NO: 1416483 - RNA, 19 nt, Homo sapiens
  misc_RNA (1)...(19): siRNA sense strand
cggaagcaggagaucauua

SEQ ID NO: 1416484 - RNA, 19 nt, Homo sapiens
  misc_RNA (1)...(19): siRNA sense strand
cgucacuccugaagccaaa

SEQ ID NO: 1416485 - RNA, 19 nt, Homo sapiens
  misc_RNA (1)...(19): siRNA sense strand
cagccaagaucaucaacac

SEQ ID NO: 1416486 - RNA, 19 nt, Homo sapiens
  misc_RNA (1)...(19): siRNA sense strand
ucaaccagaugcugaccau

SEQ ID NO: 1416487 - RNA, 19 nt, Homo sapiens
  misc_RNA (1)...(19): siRNA sense strand
gcagacuucggccuagcua

SEQ ID NO: 1416488 - RNA, 19 nt, Homo sapiens
  misc_RNA (1)...(19): siRNA sense strand
acauccggcucacgcagua

SEQ ID NO: 1416489 - RNA, 19 nt, Homo sapiens
  misc_RNA (1)...(19): siRNA sense strand
agccagagaucaccagaag

SEQ ID NO: 1416490 - RNA, 19 nt, Homo sapiens
  misc_RNA (1)...(19): siRNA sense strand
ggacgaggaccagcacaag

SEQ ID NO: 1416491 - RNA, 19 nt, Homo sapiens
  misc_RNA (1)...(19): siRNA sense strand
ggacaccgucacuccugaa

SEQ ID NO: 1416492 - RNA, 19 nt, Homo sapiens
  misc_RNA (1)...(19): siRNA sense strand
ccagagaucaccagaagcu

SEQ ID NO: 1416493 - RNA, 19 nt, Homo sapiens
  misc_RNA (1)...(19): siRNA sense strand
gagccauccucaccaccau

SEQ ID NO: 1416494 - RNA, 19 nt, Homo sapiens
  misc_RNA (1)...(19): siRNA sense strand
gcaaaggggcugcagugaa

SEQ ID NO: 1416495 - RNA, 19 nt, Homo sapiens
  misc_RNA (1)...(19): siRNA sense strand
guucuccauugucaccaaa

SEQ ID NO: 1416496 - RNA, 19 nt, Homo sapiens
  misc_RNA (1)...(19): siRNA sense strand
ggucuucgaucuggucacu

SEQ ID NO: 1416497 - RNA, 19 nt, Homo sapiens
  misc_RNA (1)...(19): siRNA sense strand
aagcaggagaucauuaaga

SEQ ID NO: 1416498 - RNA, 19 nt, Homo sapiens
  misc_RNA (1)...(19): siRNA sense strand
gcaggcaugguuugguuuc

SEQ ID NO: 1416499 - RNA, 19 nt, Homo sapiens
  misc_RNA (1)...(19): siRNA sense strand
ccgaggagggcuuccacua

SEQ ID NO: 1416500 - RNA, 19 nt, Homo sapiens
  misc_RNA (1)...(19): siRNA sense strand
ggcagaacgugcacuucca

SEQ ID NO: 1416501 - RNA, 19 nt, Homo sapiens
  misc_RNA (1)...(19): siRNA sense strand
gcaccggccaugaguaugc

SEQ ID NO: 1416502 - RNA, 19 nt, Homo sapiens
  misc_RNA (1)...(19): siRNA sense strand
gaagcaggagaucauuaag

SEQ ID NO: 1416503 - RNA, 19 nt, Homo sapiens
  misc_RNA (1)...(19): siRNA sense strand
caucgaggccgucaacaac

SEQ ID NO: 1416504 - RNA, 19 nt, Homo sapiens
  misc_RNA (1)...(19): siRNA sense strand
uggcaagccuguggacauc

SEQ ID NO: 1416505 - RNA, 19 nt, Homo sapiens
  misc_RNA (1)...(19): siRNA sense strand
gaguaugcagccaagauca

SEQ ID NO: 1416506 - RNA, 19 nt, Homo sapiens
  misc_RNA (1)...(19): siRNA sense strand
gacuguggagugucugaaa

SEQ ID NO: 1416507 - RNA, 19 nt, Homo sapiens
  misc_RNA (1)...(19): siRNA sense strand
gagaaccugcuggccaaga

SEQ ID NO: 1416508 - RNA, 19 nt, Homo sapiens
  misc_RNA (1)...(19): siRNA sense strand
agcaggagaucauuaagac

SEQ ID NO: 1416509 - RNA, 19 nt, Homo sapiens
  misc_RNA (1)...(19): siRNA sense strand
ggaagcaggagaucauuaa

SEQ ID NO: 1416510 - RNA, 19 nt, Homo sapiens
  misc_RNA (1)...(19): siRNA sense strand
caacaacggugacuuugag

SEQ ID NO: 1416511 - RNA, 19 nt, Homo sapiens
  misc_RNA (1)...(19): siRNA sense strand
cagcaggcaugguuugguu

SEQ ID NO: 1416512 - RNA, 19 nt, Homo sapiens
  misc_RNA (1)...(19): siRNA sense strand
gcacgucauuggagaggau

SEQ ID NO: 1416513 - RNA, 19 nt, Homo sapiens
  misc_RNA (1)...(19): siRNA sense strand
cagugaagcuggcagacuu

SEQ ID NO: 1416514 - RNA, 19 nt, Homo sapiens
  misc_RNA (1)...(19): siRNA sense strand
ccaagaucaucaacaccaa

SEQ ID NO: 1416515 - RNA, 19 nt, Homo sapiens
  misc_RNA (1)...(19): siRNA sense strand
gcaagccuguggacaucug

SEQ ID NO: 1416516 - RNA, 19 nt, Homo sapiens
  misc_RNA (1)...(19): siRNA sense strand
caaaggggcugcagugaag

SEQ ID NO: 1416517 - RNA, 19 nt, Homo sapiens
  misc_RNA (1)...(19): siRNA sense strand
uaccagcucuacgaggaua

SEQ ID NO: 1416518 - RNA, 19 nt, Homo sapiens
  misc_RNA (1)...(19): siRNA sense strand
agaaccugcuggccaagaa

SEQ ID NO: 1416519 - RNA, 19 nt, Homo sapiens
  misc_RNA (1)...(19): siRNA sense strand
gaucaucaacaccaagaag

SEQ ID NO: 1416520 - RNA, 19 nt, Homo sapiens
  misc_RNA (1)...(19): siRNA sense strand
cggaagcaggagaucauua

SEQ ID NO: 1416521 - RNA, 19 nt, Homo sapiens
  misc_RNA (1)...(19): siRNA sense strand
cgucacuccugaagccaaa

SEQ ID NO: 1416522 - RNA, 19 nt, Homo sapiens
  misc_RNA (1)...(19): siRNA sense strand
cagccaagaucaucaacac

SEQ ID NO: 1416523 - RNA, 19 nt, Homo sapiens
  misc_RNA (1)...(19): siRNA sense strand
ucaaccagaugcugaccau

SEQ ID NO: 1416524 - RNA, 19 nt, Homo sapiens
  misc_RNA (1)...(19): siRNA sense strand
gcagacuucggccuagcua

SEQ ID NO: 1416525 - RNA, 19 nt, Homo sapiens
  misc_RNA (1)...(19): siRNA sense strand
acauccggcucacgcagua

SEQ ID NO: 1416526 - RNA, 19 nt, Homo sapiens
  misc_RNA (1)...(19): siRNA sense strand
agccagagaucaccagaag

SEQ ID NO: 1416527 - RNA, 19 nt, Homo sapiens
  misc_RNA (1)...(19): siRNA sense strand
ggacgaggaccagcacaag

SEQ ID NO: 1416528 - RNA, 19 nt, Homo sapiens
  misc_RNA (1)...(19): siRNA sense strand
ggacaccgucacuccugaa

SEQ ID NO: 1416529 - RNA, 19 nt, Homo sapiens
  misc_RNA (1)...(19): siRNA sense strand
ccagagaucaccagaagcu

SEQ ID NO: 1416530 - RNA, 19 nt, Homo sapiens
  misc_RNA (1)...(19): siRNA sense strand
gagccauccucaccaccau

SEQ ID NO: 1416531 - RNA, 19 nt, Homo sapiens
  misc_RNA (1)...(19): siRNA sense strand
gcaaaggggcugcagugaa

SEQ ID NO: 1416532 - RNA, 19 nt, Homo sapiens
  misc_RNA (1)...(19): siRNA sense strand
guucuccauugucaccaaa

SEQ ID NO: 1416533 - RNA, 19 nt, Homo sapiens
  misc_RNA (1)...(19): siRNA sense strand
ggucuucgaucuggucacu

SEQ ID NO: 1416534 - RNA, 19 nt, Homo sapiens
  misc_RNA (1)...(19): siRNA sense strand
aagcaggagaucauuaaga

SEQ ID NO: 1416535 - RNA, 19 nt, Homo sapiens
  misc_RNA (1)...(19): siRNA sense strand
gcaggcaugguuugguuuc

SEQ ID NO: 1416536 - RNA, 19 nt, Homo sapiens
  misc_RNA (1)...(19): siRNA sense strand
ccgaggagggcuuccacua

SEQ ID NO: 1416537 - RNA, 19 nt, Homo sapiens
  misc_RNA (1)...(19): siRNA sense strand
ggcagaacgugcacuucca

SEQ ID NO: 1416538 - RNA, 19 nt, Homo sapiens
  misc_RNA (1)...(19): siRNA sense strand
gcaccggccaugaguaugc

SEQ ID NO: 1416539 - RNA, 19 nt, Homo sapiens
  misc_RNA (1)...(19): siRNA sense strand
gaagcaggagaucauuaag

SEQ ID NO: 1416540 - RNA, 19 nt, Homo sapiens
  misc_RNA (1)...(19): siRNA sense strand
caucgaggccgucaacaac

SEQ ID NO: 1416541 - RNA, 19 nt, Homo sapiens
  misc_RNA (1)...(19): siRNA sense strand
uggcaagccuguggacauc

SEQ ID NO: 1416542 - RNA, 19 nt, Homo sapiens
  misc_RNA (1)...(19): siRNA sense strand
gaguaugcagccaagauca

SEQ ID NO: 1416543 - RNA, 19 nt, Homo sapiens
  misc_RNA (1)...(19): siRNA sense strand
gacuguggagugucugaaa

SEQ ID NO: 1416544 - RNA, 19 nt, Homo sapiens
  misc_RNA (1)...(19): siRNA sense strand
gagaaccugcuggccaaga

SEQ ID NO: 1416545 - RNA, 19 nt, Homo sapiens
  misc_RNA (1)...(19): siRNA sense strand
agcaggagaucauuaagac

SEQ ID NO: 1416546 - RNA, 19 nt, Homo sapiens
  misc_RNA (1)...(19): siRNA sense strand
ggaagcaggagaucauuaa

SEQ ID NO: 1416547 - RNA, 19 nt, Homo sapiens
  misc_RNA (1)...(19): siRNA sense strand
caacaacggugacuuugag

SEQ ID NO: 1416548 - RNA, 19 nt, Homo sapiens
  misc_RNA (1)...(19): siRNA sense strand
cagcaggcaugguuugguu

SEQ ID NO: 1416549 - RNA, 19 nt, Homo sapiens
  misc_RNA (1)...(19): siRNA sense strand
gcacgucauuggagaggau

SEQ ID NO: 1416550 - RNA, 19 nt, Homo sapiens
  misc_RNA (1)...(19): siRNA sense strand
cagugaagcuggcagacuu

SEQ ID NO: 1416551 - RNA, 19 nt, Homo sapiens
  misc_RNA (1)...(19): siRNA sense strand
ccaagaucaucaacaccaa

SEQ ID NO: 1416552 - RNA, 19 nt, Homo sapiens
  misc_RNA (1)...(19): siRNA sense strand
gcaagccuguggacaucug

SEQ ID NO: 1416553 - RNA, 19 nt, Homo sapiens
  misc_RNA (1)...(19): siRNA sense strand
caaaggggcugcagugaag

SEQ ID NO: 1416554 - RNA, 19 nt, Homo sapiens
  misc_RNA (1)...(19): siRNA sense strand
uaccagcucuacgaggaua

SEQ ID NO: 1416555 - RNA, 19 nt, Homo sapiens
  misc_RNA (1)...(19): siRNA sense strand
agaaccugcuggccaagaa

SEQ ID NO: 1416556 - RNA, 19 nt, Homo sapiens
  misc_RNA (1)...(19): siRNA sense strand
gaucaucaacaccaagaag

SEQ ID NO: 1416557 - RNA, 19 nt, Homo sapiens
  misc_RNA (1)...(19): siRNA sense strand
cggaagcaggagaucauua

SEQ ID NO: 1416558 - RNA, 19 nt, Homo sapiens
  misc_RNA (1)...(19): siRNA sense strand
cgucacuccugaagccaaa

SEQ ID NO: 1416559 - RNA, 19 nt, Homo sapiens
  misc_RNA (1)...(19): siRNA sense strand
cagccaagaucaucaacac

SEQ ID NO: 1416560 - RNA, 19 nt, Homo sapiens
  misc_RNA (1)...(19): siRNA sense strand
ucaaccagaugcugaccau

SEQ ID NO: 1416561 - RNA, 19 nt, Homo sapiens
  misc_RNA (1)...(19): siRNA sense strand
gcagacuucggccuagcua

SEQ ID NO: 1416562 - RNA, 19 nt, Homo sapiens
  misc_RNA (1)...(19): siRNA sense strand
acauccggcucacgcagua

SEQ ID NO: 1416563 - RNA, 19 nt, Homo sapiens
  misc_RNA (1)...(19): siRNA sense strand
agccagagaucaccagaag

SEQ ID NO: 1416564 - RNA, 19 nt, Homo sapiens
  misc_RNA (1)...(19): siRNA sense strand
ggacgaggaccagcacaag

SEQ ID NO: 1416565 - RNA, 19 nt, Homo sapiens
  misc_RNA (1)...(19): siRNA sense strand
ggacaccgucacuccugaa

SEQ ID NO: 1416566 - RNA, 19 nt, Homo sapiens
  misc_RNA (1)...(19): siRNA sense strand
ccagagaucaccagaagcu

SEQ ID NO: 1416567 - RNA, 19 nt, Homo sapiens
  misc_RNA (1)...(19): siRNA sense strand
gagccauccucaccaccau

SEQ ID NO: 1416568 - RNA, 19 nt, Homo sapiens
  misc_RNA (1)...(19): siRNA sense strand
gcaaaggggcugcagugaa

SEQ ID NO: 1416569 - RNA, 19 nt, Homo sapiens
  misc_RNA (1)...(19): siRNA sense strand
guucuccauugucaccaaa

SEQ ID NO: 1416570 - RNA, 19 nt, Homo sapiens
  misc_RNA (1)...(19): siRNA sense strand
ggucuucgaucuggucacu

SEQ ID NO: 1416571 - RNA, 19 nt, Homo sapiens
  misc_RNA (1)...(19): siRNA sense strand
aagcaggagaucauuaaga

SEQ ID NO: 1416572 - RNA, 19 nt, Homo sapiens
  misc_RNA (1)...(19): siRNA sense strand
gcaggcaugguuugguuuc

SEQ ID NO: 1416573 - RNA, 19 nt, Homo sapiens
  misc_RNA (1)...(19): siRNA sense strand
ccgaggagggcuuccacua

SEQ ID NO: 1416574 - RNA, 19 nt, Homo sapiens
  misc_RNA (1)...(19): siRNA sense strand
ggcagaacgugcacuucca

SEQ ID NO: 1416575 - RNA, 19 nt, Homo sapiens
  misc_RNA (1)...(19): siRNA sense strand
gcaccggccaugaguaugc

SEQ ID NO: 1416576 - RNA, 19 nt, Homo sapiens
  misc_RNA (1)...(19): siRNA sense strand
gaagcaggagaucauuaag

SEQ ID NO: 1416577 - RNA, 19 nt, Homo sapiens
  misc_RNA (1)...(19): siRNA sense strand
caucgaggccgucaacaac

SEQ ID NO: 1416578 - RNA, 19 nt, Homo sapiens
  misc_RNA (1)...(19): siRNA sense strand
uggcaagccuguggacauc

SEQ ID NO: 1416579 - RNA, 19 nt, Homo sapiens
  misc_RNA (1)...(19): siRNA sense strand
gaguaugcagccaagauca

SEQ ID NO: 1416580 - RNA, 19 nt, Homo sapiens
  misc_RNA (1)...(19): siRNA sense strand
gacuguggagugucugaaa

SEQ ID NO: 1416581 - RNA, 19 nt, Homo sapiens
  misc_RNA (1)...(19): siRNA sense strand
gagaaccugcuggccaaga

SEQ ID NO: 1416582 - RNA, 19 nt, Homo sapiens
  misc_RNA (1)...(19): siRNA sense strand
agcaggagaucauuaagac

SEQ ID NO: 1416583 - RNA, 19 nt, Homo sapiens
  misc_RNA (1)...(19): siRNA sense strand
ggaagcaggagaucauuaa

SEQ ID NO: 1416584 - RNA, 19 nt, Homo sapiens
  misc_RNA (1)...(19): siRNA sense strand
caacaacggugacuuugag

SEQ ID NO: 1416585 - RNA, 19 nt, Homo sapiens
  misc_RNA (1)...(19): siRNA sense strand
cagcaggcaugguuugguu

SEQ ID NO: 1416586 - RNA, 19 nt, Homo sapiens
  misc_RNA (1)...(19): siRNA sense strand
gcacgucauuggagaggau

SEQ ID NO: 1416587 - RNA, 19 nt, Homo sapiens
  misc_RNA (1)...(19): siRNA sense strand
cagugaagcuggcagacuu

SEQ ID NO: 1416588 - RNA, 19 nt, Homo sapiens
  misc_RNA (1)...(19): siRNA sense strand
ccaagaucaucaacaccaa

SEQ ID NO: 1416589 - RNA, 19 nt, Homo sapiens
  misc_RNA (1)...(19): siRNA sense strand
gcaagccuguggacaucug

SEQ ID NO: 1416590 - RNA, 19 nt, Homo sapiens
  misc_RNA (1)...(19): siRNA sense strand
caaaggggcugcagugaag

SEQ ID NO: 1416591 - RNA, 19 nt, Homo sapiens
  misc_RNA (1)...(19): siRNA sense strand
uaccagcucuacgaggaua

SEQ ID NO: 1416592 - RNA, 19 nt, Homo sapiens
  misc_RNA (1)...(19): siRNA sense strand
agaaccugcuggccaagaa

SEQ ID NO: 1416593 - RNA, 19 nt, Homo sapiens
  misc_RNA (1)...(19): siRNA sense strand
gaucaucaacaccaagaag

SEQ ID NO: 1416594 - RNA, 19 nt, Homo sapiens
  misc_RNA (1)...(19): siRNA sense strand
cggaagcaggagaucauua

SEQ ID NO: 1416595 - RNA, 19 nt, Homo sapiens
  misc_RNA (1)...(19): siRNA sense strand
cgucacuccugaagccaaa

SEQ ID NO: 1416596 - RNA, 19 nt, Homo sapiens
  misc_RNA (1)...(19): siRNA sense strand
cagccaagaucaucaacac

SEQ ID NO: 1416597 - RNA, 19 nt, Homo sapiens
  misc_RNA (1)...(19): siRNA sense strand
ucaaccagaugcugaccau

SEQ ID NO: 1416598 - RNA, 19 nt, Homo sapiens
  misc_RNA (1)...(19): siRNA sense strand
gcagacuucggccuagcua

SEQ ID NO: 1416599 - RNA, 19 nt, Homo sapiens
  misc_RNA (1)...(19): siRNA sense strand
acauccggcucacgcagua

SEQ ID NO: 1416600 - RNA, 19 nt, Homo sapiens
  misc_RNA (1)...(19): siRNA sense strand
agccagagaucaccagaag

SEQ ID NO: 1416601 - RNA, 19 nt, Homo sapiens
  misc_RNA (1)...(19): siRNA sense strand
ggacgaggaccagcacaag

SEQ ID NO: 1416602 - RNA, 19 nt, Homo sapiens
  misc_RNA (1)...(19): siRNA sense strand
ggacaccgucacuccugaa

SEQ ID NO: 1416603 - RNA, 19 nt, Homo sapiens
  misc_RNA (1)...(19): siRNA sense strand
ccagagaucaccagaagcu

SEQ ID NO: 1416604 - RNA, 19 nt, Homo sapiens
  misc_RNA (1)...(19): siRNA sense strand
gagccauccucaccaccau

SEQ ID NO: 1416605 - RNA, 19 nt, Homo sapiens
  misc_RNA (1)...(19): siRNA sense strand
gcaaaggggcugcagugaa

SEQ ID NO: 1416606 - RNA, 19 nt, Homo sapiens
  misc_RNA (1)...(19): siRNA sense strand
guucuccauugucaccaaa

SEQ ID NO: 1416607 - RNA, 19 nt, Homo sapiens
  misc_RNA (1)...(19): siRNA sense strand
ggucuucgaucuggucacu

SEQ ID NO: 1416608 - RNA, 19 nt, Homo sapiens
  misc_RNA (1)...(19): siRNA sense strand
aagcaggagaucauuaaga

SEQ ID NO: 1416609 - RNA, 19 nt, Homo sapiens
  misc_RNA (1)...(19): siRNA sense strand
gcaggcaugguuugguuuc

SEQ ID NO: 1416610 - RNA, 19 nt, Homo sapiens
  misc_RNA (1)...(19): siRNA sense strand
ccgaggagggcuuccacua

SEQ ID NO: 1416611 - RNA, 19 nt, Homo sapiens
  misc_RNA (1)...(19): siRNA sense strand
ggcagaacgugcacuucca

SEQ ID NO: 1416612 - RNA, 19 nt, Homo sapiens
  misc_RNA (1)...(19): siRNA sense strand
gcaccggccaugaguaugc

SEQ ID NO: 1416613 - RNA, 19 nt, Homo sapiens
  misc_RNA (1)...(19): siRNA sense strand
gaagcaggagaucauuaag

SEQ ID NO: 1416614 - RNA, 19 nt, Homo sapiens
  misc_RNA (1)...(19): siRNA sense strand
caucgaggccgucaacaac

SEQ ID NO: 1416615 - RNA, 19 nt, Homo sapiens
  misc_RNA (1)...(19): siRNA sense strand
uggcaagccuguggacauc

SEQ ID NO: 1416616 - RNA, 19 nt, Homo sapiens
  misc_RNA (1)...(19): siRNA sense strand
gaguaugcagccaagauca

SEQ ID NO: 1416617 - RNA, 19 nt, Homo sapiens
  misc_RNA (1)...(19): siRNA sense strand
gacuguggagugucugaaa

SEQ ID NO: 1416618 - RNA, 19 nt, Homo sapiens
  misc_RNA (1)...(19): siRNA sense strand
gagaaccugcuggccaaga

SEQ ID NO: 1416619 - RNA, 19 nt, Homo sapiens
  misc_RNA (1)...(19): siRNA sense strand
agcaggagaucauuaagac

SEQ ID NO: 1416620 - RNA, 19 nt, Homo sapiens
  misc_RNA (1)...(19): siRNA sense strand
ggaagcaggagaucauuaa

SEQ ID NO: 1416621 - RNA, 19 nt, Homo sapiens
  misc_RNA (1)...(19): siRNA sense strand
caacaacggugacuuugag

SEQ ID NO: 1416622 - RNA, 19 nt, Homo sapiens
  misc_RNA (1)...(19): siRNA sense strand
cagcaggcaugguuugguu

SEQ ID NO: 1416623 - RNA, 19 nt, Homo sapiens
  misc_RNA (1)...(19): siRNA sense strand
gcacgucauuggagaggau

SEQ ID NO: 1416624 - RNA, 19 nt, Homo sapiens
  misc_RNA (1)...(19): siRNA sense strand
cagugaagcuggcagacuu

SEQ ID NO: 1416625 - RNA, 19 nt, Homo sapiens
  misc_RNA (1)...(19): siRNA sense strand
ccaagaucaucaacaccaa

SEQ ID NO: 1416626 - RNA, 19 nt, Homo sapiens
  misc_RNA (1)...(19): siRNA sense strand
gcaagccuguggacaucug

SEQ ID NO: 1416627 - RNA, 19 nt, Homo sapiens
  misc_RNA (1)...(19): siRNA sense strand
caaaggggcugcagugaag

SEQ ID NO: 1416628 - RNA, 19 nt, Homo sapiens
  misc_RNA (1)...(19): siRNA sense strand
uaccagcucuacgaggaua

SEQ ID NO: 1416629 - RNA, 19 nt, Homo sapiens
  misc_RNA (1)...(19): siRNA sense strand
agaaccugcuggccaagaa

SEQ ID NO: 1416630 - RNA, 19 nt, Homo sapiens
  misc_RNA (1)...(19): siRNA sense strand
gaucaucaacaccaagaag

SEQ ID NO: 1416631 - RNA, 19 nt, Homo sapiens
  misc_RNA (1)...(19): siRNA sense strand
cggaagcaggagaucauua

SEQ ID NO: 1416632 - RNA, 19 nt, Homo sapiens
  misc_RNA (1)...(19): siRNA sense strand
cgucacuccugaagccaaa

SEQ ID NO: 1416633 - RNA, 19 nt, Homo sapiens
  misc_RNA (1)...(19): siRNA sense strand
cagccaagaucaucaacac

SEQ ID NO: 1416634 - RNA, 19 nt, Homo sapiens
  misc_RNA (1)...(19): siRNA sense strand
ucaaccagaugcugaccau

SEQ ID NO: 1416635 - RNA, 19 nt, Homo sapiens
  misc_RNA (1)...(19): siRNA sense strand
gcagacuucggccuagcua

SEQ ID NO: 1416636 - RNA, 19 nt, Homo sapiens
  misc_RNA (1)...(19): siRNA sense strand
acauccggcucacgcagua

SEQ ID NO: 1416637 - RNA, 19 nt, Homo sapiens
  misc_RNA (1)...(19): siRNA sense strand
agccagagaucaccagaag

SEQ ID NO: 1416638 - RNA, 19 nt, Homo sapiens
  misc_RNA (1)...(19): siRNA sense strand
ggacgaggaccagcacaag

SEQ ID NO: 1416639 - RNA, 19 nt, Homo sapiens
  misc_RNA (1)...(19): siRNA sense strand
ggacaccgucacuccugaa

SEQ ID NO: 1416640 - RNA, 19 nt, Homo sapiens
  misc_RNA (1)...(19): siRNA sense strand
ccagagaucaccagaagcu

SEQ ID NO: 1416641 - RNA, 19 nt, Homo sapiens
  misc_RNA (1)...(19): siRNA sense strand
gagccauccucaccaccau

SEQ ID NO: 1416642 - RNA, 19 nt, Homo sapiens
  misc_RNA (1)...(19): siRNA sense strand
gcaaaggggcugcagugaa

SEQ ID NO: 1416643 - RNA, 19 nt, Homo sapiens
  misc_RNA (1)...(19): siRNA sense strand
guucuccauugucaccaaa

SEQ ID NO: 1416644 - RNA, 19 nt, Homo sapiens
  misc_RNA (1)...(19): siRNA sense strand
ggucuucgaucuggucacu

SEQ ID NO: 1416645 - RNA, 19 nt, Homo sapiens
  misc_RNA (1)...(19): siRNA sense strand
aagcaggagaucauuaaga

SEQ ID NO: 1416646 - RNA, 19 nt, Homo sapiens
  misc_RNA (1)...(19): siRNA sense strand
gcaggcaugguuugguuuc

SEQ ID NO: 1416647 - RNA, 19 nt, Homo sapiens
  misc_RNA (1)...(19): siRNA sense strand
ccgaggagggcuuccacua

SEQ ID NO: 1416648 - RNA, 19 nt, Homo sapiens
  misc_RNA (1)...(19): siRNA sense strand
ggcagaacgugcacuucca

SEQ ID NO: 1416649 - RNA, 19 nt, Homo sapiens
  misc_RNA (1)...(19): siRNA sense strand
gcaccggccaugaguaugc

SEQ ID NO: 1416650 - RNA, 19 nt, Homo sapiens
  misc_RNA (1)...(19): siRNA sense strand
gaagcaggagaucauuaag

SEQ ID NO: 1416651 - RNA, 19 nt, Homo sapiens
  misc_RNA (1)...(19): siRNA sense strand
caucgaggccgucaacaac

SEQ ID NO: 1416652 - RNA, 19 nt, Homo sapiens
  misc_RNA (1)...(19): siRNA sense strand
uggcaagccuguggacauc

SEQ ID NO: 1416653 - RNA, 19 nt, Homo sapiens
  misc_RNA (1)...(19): siRNA sense strand
gaguaugcagccaagauca

SEQ ID NO: 1416654 - RNA, 19 nt, Homo sapiens
  misc_RNA (1)...(19): siRNA sense strand
gacuguggagugucugaaa

SEQ ID NO: 1416655 - RNA, 19 nt, Homo sapiens
  misc_RNA (1)...(19): siRNA sense strand
gagaaccugcuggccaaga

SEQ ID NO: 1416656 - RNA, 19 nt, Homo sapiens
  misc_RNA (1)...(19): siRNA sense strand
agcaggagaucauuaagac

SEQ ID NO: 1416657 - RNA, 19 nt, Homo sapiens
  misc_RNA (1)...(19): siRNA sense strand
ggaagcaggagaucauuaa

SEQ ID NO: 1416658 - RNA, 19 nt, Homo sapiens
  misc_RNA (1)...(19): siRNA sense strand
caacaacggugacuuugag

SEQ ID NO: 1416659 - RNA, 19 nt, Homo sapiens
  misc_RNA (1)...(19): siRNA sense strand
cagcaggcaugguuugguu

SEQ ID NO: 1416660 - RNA, 19 nt, Homo sapiens
  misc_RNA (1)...(19): siRNA sense strand
gcacgucauuggagaggau

SEQ ID NO: 1416661 - RNA, 19 nt, Homo sapiens
  misc_RNA (1)...(19): siRNA sense strand
cagugaagcuggcagacuu

SEQ ID NO: 1416662 - RNA, 19 nt, Homo sapiens
  misc_RNA (1)...(19): siRNA sense strand
ccaagaucaucaacaccaa

SEQ ID NO: 1416663 - RNA, 19 nt, Homo sapiens
  misc_RNA (1)...(19): siRNA sense strand
gcaagccuguggacaucug

SEQ ID NO: 1416664 - RNA, 19 nt, Homo sapiens
  misc_RNA (1)...(19): siRNA sense strand
caaaggggcugcagugaag

SEQ ID NO: 1416665 - RNA, 19 nt, Homo sapiens
  misc_RNA (1)...(19): siRNA sense strand
uaccagcucuacgaggaua

SEQ ID NO: 1416666 - RNA, 19 nt, Homo sapiens
  misc_RNA (1)...(19): siRNA sense strand
agaaccugcuggccaagaa

SEQ ID NO: 1416667 - RNA, 19 nt, Homo sapiens
  misc_RNA (1)...(19): siRNA sense strand
gaucaucaacaccaagaag

SEQ ID NO: 1416668 - RNA, 19 nt, Homo sapiens
  misc_RNA (1)...(19): siRNA sense strand
cggaagcaggagaucauua

SEQ ID NO: 1416669 - RNA, 19 nt, Homo sapiens
  misc_RNA (1)...(19): siRNA sense strand
cgucacuccugaagccaaa

SEQ ID NO: 1416670 - RNA, 19 nt, Homo sapiens
  misc_RNA (1)...(19): siRNA sense strand
cagccaagaucaucaacac

SEQ ID NO: 1416671 - RNA, 19 nt, Homo sapiens
  misc_RNA (1)...(19): siRNA sense strand
ucaaccagaugcugaccau

SEQ ID NO: 1416672 - RNA, 19 nt, Homo sapiens
  misc_RNA (1)...(19): siRNA sense strand
gcagacuucggccuagcua

SEQ ID NO: 1416673 - RNA, 19 nt, Homo sapiens
  misc_RNA (1)...(19): siRNA sense strand
acauccggcucacgcagua

SEQ ID NO: 1416674 - RNA, 19 nt, Homo sapiens
  misc_RNA (1)...(19): siRNA sense strand
agccagagaucaccagaag

SEQ ID NO: 1416675 - RNA, 19 nt, Homo sapiens
  misc_RNA (1)...(19): siRNA sense strand
ggacgaggaccagcacaag

SEQ ID NO: 1416676 - RNA, 19 nt, Homo sapiens
  misc_RNA (1)...(19): siRNA sense strand
ggacaccgucacuccugaa

SEQ ID NO: 1416677 - RNA, 19 nt, Homo sapiens
  misc_RNA (1)...(19): siRNA sense strand
ccagagaucaccagaagcu

SEQ ID NO: 1416678 - RNA, 19 nt, Homo sapiens
  misc_RNA (1)...(19): siRNA sense strand
gagccauccucaccaccau

SEQ ID NO: 1416679 - RNA, 19 nt, Homo sapiens
  misc_RNA (1)...(19): siRNA sense strand
gcaaaggggcugcagugaa

SEQ ID NO: 1416680 - RNA, 19 nt, Homo sapiens
  misc_RNA (1)...(19): siRNA sense strand
guucuccauugucaccaaa

SEQ ID NO: 1416681 - RNA, 19 nt, Homo sapiens
  misc_RNA (1)...(19): siRNA sense strand
ggucuucgaucuggucacu

SEQ ID NO: 1416682 - RNA, 19 nt, Homo sapiens
  misc_RNA (1)...(19): siRNA sense strand
aagcaggagaucauuaaga

SEQ ID NO: 1416683 - RNA, 19 nt, Homo sapiens
  misc_RNA (1)...(19): siRNA sense strand
gcaggcaugguuugguuuc

SEQ ID NO: 1416684 - RNA, 19 nt, Homo sapiens
  misc_RNA (1)...(19): siRNA sense strand
ccgaggagggcuuccacua

SEQ ID NO: 1416685 - RNA, 19 nt, Homo sapiens
  misc_RNA (1)...(19): siRNA sense strand
ggcagaacgugcacuucca

SEQ ID NO: 1416686 - RNA, 19 nt, Homo sapiens
  misc_RNA (1)...(19): siRNA sense strand
gcaccggccaugaguaugc

SEQ ID NO: 1416687 - RNA, 19 nt, Homo sapiens
  misc_RNA (1)...(19): siRNA sense strand
gaagcaggagaucauuaag

SEQ ID NO: 1416688 - RNA, 19 nt, Homo sapiens
  misc_RNA (1)...(19): siRNA sense strand
caucgaggccgucaacaac

SEQ ID NO: 1416689 - RNA, 19 nt, Homo sapiens
  misc_RNA (1)...(19): siRNA sense strand
uggcaagccuguggacauc

SEQ ID NO: 1416690 - RNA, 19 nt, Homo sapiens
  misc_RNA (1)...(19): siRNA sense strand
gaguaugcagccaagauca

SEQ ID NO: 1416691 - RNA, 19 nt, Homo sapiens
  misc_RNA (1)...(19): siRNA sense strand
gacuguggagugucugaaa

SEQ ID NO: 1416692 - RNA, 19 nt, Homo sapiens
  misc_RNA (1)...(19): siRNA sense strand
gagaaccugcuggccaaga

SEQ ID NO: 1416693 - RNA, 19 nt, Homo sapiens
  misc_RNA (1)...(19): siRNA sense strand
agcaggagaucauuaagac

SEQ ID NO: 1416694 - RNA, 19 nt, Homo sapiens
  misc_RNA (1)...(19): siRNA sense strand
ggaagcaggagaucauuaa

SEQ ID NO: 1416695 - RNA, 19 nt, Homo sapiens
  misc_RNA (1)...(19): siRNA sense strand
caacaacggugacuuugag

SEQ ID NO: 1416696 - RNA, 19 nt, Homo sapiens
  misc_RNA (1)...(19): siRNA sense strand
cagcaggcaugguuugguu

SEQ ID NO: 1416697 - RNA, 19 nt, Homo sapiens
  misc_RNA (1)...(19): siRNA sense strand
gcacgucauuggagaggau

SEQ ID NO: 1416698 - RNA, 19 nt, Homo sapiens
  misc_RNA (1)...(19): siRNA sense strand
cagugaagcuggcagacuu

SEQ ID NO: 1416699 - RNA, 19 nt, Homo sapiens
  misc_RNA (1)...(19): siRNA sense strand
ccaagaucaucaacaccaa

SEQ ID NO: 1416700 - RNA, 19 nt, Homo sapiens
  misc_RNA (1)...(19): siRNA sense strand
gcaagccuguggacaucug

SEQ ID NO: 1416701 - RNA, 19 nt, Homo sapiens
  misc_RNA (1)...(19): siRNA sense strand
caaaggggcugcagugaag

SEQ ID NO: 1416702 - RNA, 19 nt, Homo sapiens
  misc_RNA (1)...(19): siRNA sense strand
uaccagcucuacgaggaua

SEQ ID NO: 1416703 - RNA, 19 nt, Homo sapiens
  misc_RNA (1)...(19): siRNA sense strand
agaaccugcuggccaagaa

SEQ ID NO: 1416704 - RNA, 19 nt, Homo sapiens
  misc_RNA (1)...(19): siRNA sense strand
gaucaucaacaccaagaag

SEQ ID NO: 1416705 - RNA, 19 nt, Homo sapiens
  misc_RNA (1)...(19): siRNA sense strand
cggaagcaggagaucauua

SEQ ID NO: 1416706 - RNA, 19 nt, Homo sapiens
  misc_RNA (1)...(19): siRNA sense strand
cgucacuccugaagccaaa

SEQ ID NO: 1416707 - RNA, 19 nt, Homo sapiens
  misc_RNA (1)...(19): siRNA sense strand
cagccaagaucaucaacac

SEQ ID NO: 1416708 - RNA, 19 nt, Homo sapiens
  misc_RNA (1)...(19): siRNA sense strand
ucaaccagaugcugaccau

SEQ ID NO: 1416709 - RNA, 19 nt, Homo sapiens
  misc_RNA (1)...(19): siRNA sense strand
gcagacuucggccuagcua

SEQ ID NO: 1416710 - RNA, 19 nt, Homo sapiens
  misc_RNA (1)...(19): siRNA sense strand
acauccggcucacgcagua

SEQ ID NO: 1416711 - RNA, 19 nt, Homo sapiens
  misc_RNA (1)...(19): siRNA sense strand
agccagagaucaccagaag

SEQ ID NO: 1416712 - RNA, 19 nt, Homo sapiens
  misc_RNA (1)...(19): siRNA sense strand
ggacgaggaccagcacaag

SEQ ID NO: 1416713 - RNA, 19 nt, Homo sapiens
  misc_RNA (1)...(19): siRNA sense strand
ggacaccgucacuccugaa

SEQ ID NO: 1416714 - RNA, 19 nt, Homo sapiens
  misc_RNA (1)...(19): siRNA sense strand
ccagagaucaccagaagcu

SEQ ID NO: 1416715 - RNA, 19 nt, Homo sapiens
  misc_RNA (1)...(19): siRNA sense strand
gagccauccucaccaccau

SEQ ID NO: 1416716 - RNA, 19 nt, Homo sapiens
  misc_RNA (1)...(19): siRNA sense strand
gcaaaggggcugcagugaa

SEQ ID NO: 1416717 - RNA, 19 nt, Homo sapiens
  misc_RNA (1)...(19): siRNA sense strand
guucuccauugucaccaaa

SEQ ID NO: 1416718 - RNA, 19 nt, Homo sapiens
  misc_RNA (1)...(19): siRNA sense strand
ggucuucgaucuggucacu

SEQ ID NO: 1416719 - RNA, 19 nt, Homo sapiens
  misc_RNA (1)...(19): siRNA sense strand
aagcaggagaucauuaaga

SEQ ID NO: 1416720 - RNA, 19 nt, Homo sapiens
  misc_RNA (1)...(19): siRNA sense strand
gcaggcaugguuugguuuc

SEQ ID NO: 1416721 - RNA, 19 nt, Homo sapiens
  misc_RNA (1)...(19): siRNA sense strand
ccgaggagggcuuccacua

SEQ ID NO: 1416722 - RNA, 19 nt, Homo sapiens
  misc_RNA (1)...(19): siRNA sense strand
ggcagaacgugcacuucca

SEQ ID NO: 1416723 - RNA, 19 nt, Homo sapiens
  misc_RNA (1)...(19): siRNA sense strand
gcaccggccaugaguaugc

SEQ ID NO: 1416724 - RNA, 19 nt, Homo sapiens
  misc_RNA (1)...(19): siRNA sense strand
gaagcaggagaucauuaag

SEQ ID NO: 1416725 - RNA, 19 nt, Homo sapiens
  misc_RNA (1)...(19): siRNA sense strand
caucgaggccgucaacaac

SEQ ID NO: 1416726 - RNA, 19 nt, Homo sapiens
  misc_RNA (1)...(19): siRNA sense strand
uggcaagccuguggacauc

SEQ ID NO: 1416727 - RNA, 19 nt, Homo sapiens
  misc_RNA (1)...(19): siRNA sense strand
gaguaugcagccaagauca

SEQ ID NO: 1416728 - RNA, 19 nt, Homo sapiens
  misc_RNA (1)...(19): siRNA sense strand
gacuguggagugucugaaa

SEQ ID NO: 1416729 - RNA, 19 nt, Homo sapiens
  misc_RNA (1)...(19): siRNA sense strand
gagaaccugcuggccaaga

SEQ ID NO: 1416730 - RNA, 19 nt, Homo sapiens
  misc_RNA (1)...(19): siRNA sense strand
agcaggagaucauuaagac

SEQ ID NO: 1416731 - RNA, 19 nt, Homo sapiens
  misc_RNA (1)...(19): siRNA sense strand
ggaagcaggagaucauuaa

SEQ ID NO: 1416732 - RNA, 19 nt, Homo sapiens
  misc_RNA (1)...(19): siRNA sense strand
caacaacggugacuuugag

SEQ ID NO: 1416733 - RNA, 19 nt, Homo sapiens
  misc_RNA (1)...(19): siRNA sense strand
cagcaggcaugguuugguu

SEQ ID NO: 1416734 - RNA, 19 nt, Homo sapiens
  misc_RNA (1)...(19): siRNA sense strand
gcacgucauuggagaggau

SEQ ID NO: 1416735 - RNA, 19 nt, Homo sapiens
  misc_RNA (1)...(19): siRNA sense strand
cagugaagcuggcagacuu

SEQ ID NO: 1416736 - RNA, 19 nt, Homo sapiens
  misc_RNA (1)...(19): siRNA sense strand
ccaagaucaucaacaccaa

SEQ ID NO: 1416737 - RNA, 19 nt, Homo sapiens
  misc_RNA (1)...(19): siRNA sense strand
gcaagccuguggacaucug

SEQ ID NO: 1416738 - RNA, 19 nt, Homo sapiens
  misc_RNA (1)...(19): siRNA sense strand
caaaggggcugcagugaag

SEQ ID NO: 1416739 - RNA, 19 nt, Homo sapiens
  misc_RNA (1)...(19): siRNA sense strand
uaccagcucuacgaggaua

SEQ ID NO: 1416740 - RNA, 19 nt, Homo sapiens
  misc_RNA (1)...(19): siRNA sense strand
agaaccugcuggccaagaa

SEQ ID NO: 1416741 - RNA, 19 nt, Homo sapiens
  misc_RNA (1)...(19): siRNA sense strand
gaucaucaacaccaagaag

SEQ ID NO: 1416742 - RNA, 19 nt, Homo sapiens
  misc_RNA (1)...(19): siRNA sense strand
cggaagcaggagaucauua

SEQ ID NO: 1416743 - RNA, 19 nt, Homo sapiens
  misc_RNA (1)...(19): siRNA sense strand
cgucacuccugaagccaaa

SEQ ID NO: 1416744 - RNA, 19 nt, Homo sapiens
  misc_RNA (1)...(19): siRNA sense strand
cagccaagaucaucaacac

SEQ ID NO: 1416745 - RNA, 19 nt, Homo sapiens
  misc_RNA (1)...(19): siRNA sense strand
ucaaccagaugcugaccau

SEQ ID NO: 1416746 - RNA, 19 nt, Homo sapiens
  misc_RNA (1)...(19): siRNA sense strand
gcagacuucggccuagcua

SEQ ID NO: 1416747 - RNA, 19 nt, Homo sapiens
  misc_RNA (1)...(19): siRNA sense strand
acauccggcucacgcagua

SEQ ID NO: 1416748 - RNA, 19 nt, Homo sapiens
  misc_RNA (1)...(19): siRNA sense strand
agccagagaucaccagaag

SEQ ID NO: 1416749 - RNA, 19 nt, Homo sapiens
  misc_RNA (1)...(19): siRNA sense strand
ggacgaggaccagcacaag

SEQ ID NO: 1416750 - RNA, 19 nt, Homo sapiens
  misc_RNA (1)...(19): siRNA sense strand
ggacaccgucacuccugaa

SEQ ID NO: 1416751 - RNA, 19 nt, Homo sapiens
  misc_RNA (1)...(19): siRNA sense strand
ccagagaucaccagaagcu

SEQ ID NO: 1416752 - RNA, 19 nt, Homo sapiens
  misc_RNA (1)...(19): siRNA sense strand
gagccauccucaccaccau

SEQ ID NO: 1416753 - RNA, 19 nt, Homo sapiens
  misc_RNA (1)...(19): siRNA sense strand
gcaaaggggcugcagugaa

SEQ ID NO: 1416754 - RNA, 19 nt, Homo sapiens
  misc_RNA (1)...(19): siRNA sense strand
guucuccauugucaccaaa

SEQ ID NO: 1416755 - RNA, 19 nt, Homo sapiens
  misc_RNA (1)...(19): siRNA sense strand
ggucuucgaucuggucacu

SEQ ID NO: 1416756 - RNA, 19 nt, Homo sapiens
  misc_RNA (1)...(19): siRNA sense strand
aagcaggagaucauuaaga

SEQ ID NO: 1416757 - RNA, 19 nt, Homo sapiens
  misc_RNA (1)...(19): siRNA sense strand
gcaggcaugguuugguuuc

SEQ ID NO: 1416758 - RNA, 19 nt, Homo sapiens
  misc_RNA (1)...(19): siRNA sense strand
ccgaggagggcuuccacua

SEQ ID NO: 1416759 - RNA, 19 nt, Homo sapiens
  misc_RNA (1)...(19): siRNA sense strand
ggcagaacgugcacuucca

SEQ ID NO: 1416760 - RNA, 19 nt, Homo sapiens
  misc_RNA (1)...(19): siRNA sense strand
gcaccggccaugaguaugc

SEQ ID NO: 1416761 - RNA, 19 nt, Homo sapiens
  misc_RNA (1)...(19): siRNA sense strand
gaagcaggagaucauuaag

SEQ ID NO: 1416762 - RNA, 19 nt, Homo sapiens
  misc_RNA (1)...(19): siRNA sense strand
caucgaggccgucaacaac

SEQ ID NO: 1416763 - RNA, 19 nt, Homo sapiens
  misc_RNA (1)...(19): siRNA sense strand
uggcaagccuguggacauc

SEQ ID NO: 1416764 - RNA, 19 nt, Homo sapiens
  misc_RNA (1)...(19): siRNA sense strand
gaguaugcagccaagauca

SEQ ID NO: 1416765 - RNA, 19 nt, Homo sapiens
  misc_RNA (1)...(19): siRNA sense strand
gacuguggagugucugaaa

SEQ ID NO: 1416766 - RNA, 19 nt, Homo sapiens
  misc_RNA (1)...(19): siRNA sense strand
gagaaccugcuggccaaga

SEQ ID NO: 1416767 - RNA, 19 nt, Homo sapiens
  misc_RNA (1)...(19): siRNA sense strand
agcaggagaucauuaagac

SEQ ID NO: 1416768 - RNA, 19 nt, Homo sapiens
  misc_RNA (1)...(19): siRNA sense strand
ggaagcaggagaucauuaa

SEQ ID NO: 1416769 - RNA, 19 nt, Homo sapiens
  misc_RNA (1)...(19): siRNA sense strand
caacaacggugacuuugag

SEQ ID NO: 1416770 - RNA, 19 nt, Homo sapiens
  misc_RNA (1)...(19): siRNA sense strand
cagcaggcaugguuugguu

SEQ ID NO: 1416771 - RNA, 19 nt, Homo sapiens
  misc_RNA (1)...(19): siRNA sense strand
gcacgucauuggagaggau

SEQ ID NO: 1416772 - RNA, 19 nt, Homo sapiens
  misc_RNA (1)...(19): siRNA sense strand
cagugaagcuggcagacuu

SEQ ID NO: 1416773 - RNA, 19 nt, Homo sapiens
  misc_RNA (1)...(19): siRNA sense strand
ccaagaucaucaacaccaa

SEQ ID NO: 1416774 - RNA, 19 nt, Homo sapiens
  misc_RNA (1)...(19): siRNA sense strand
gcaagccuguggacaucug

SEQ ID NO: 1416775 - RNA, 19 nt, Homo sapiens
  misc_RNA (1)...(19): siRNA sense strand
caaaggggcugcagugaag

SEQ ID NO: 1416776 - RNA, 19 nt, Homo sapiens
  misc_RNA (1)...(19): siRNA sense strand
uaccagcucuacgaggaua

SEQ ID NO: 1416777 - RNA, 19 nt, Homo sapiens
  misc_RNA (1)...(19): siRNA sense strand
agaaccugcuggccaagaa

SEQ ID NO: 1416778 - RNA, 19 nt, Homo sapiens
  misc_RNA (1)...(19): siRNA sense strand
gaucaucaacaccaagaag

SEQ ID NO: 1416779 - RNA, 19 nt, Homo sapiens
  misc_RNA (1)...(19): siRNA sense strand
cggaagcaggagaucauua

SEQ ID NO: 1416780 - RNA, 19 nt, Homo sapiens
  misc_RNA (1)...(19): siRNA sense strand
cgucacuccugaagccaaa

SEQ ID NO: 1416781 - RNA, 19 nt, Homo sapiens
  misc_RNA (1)...(19): siRNA sense strand
cagccaagaucaucaacac

SEQ ID NO: 1416782 - RNA, 19 nt, Homo sapiens
  misc_RNA (1)...(19): siRNA sense strand
ucaaccagaugcugaccau

SEQ ID NO: 1416783 - RNA, 19 nt, Homo sapiens
  misc_RNA (1)...(19): siRNA sense strand
gcagacuucggccuagcua

SEQ ID NO: 1416784 - RNA, 19 nt, Homo sapiens
  misc_RNA (1)...(19): siRNA sense strand
acauccggcucacgcagua

SEQ ID NO: 1416785 - RNA, 19 nt, Homo sapiens
  misc_RNA (1)...(19): siRNA sense strand
agccagagaucaccagaag

SEQ ID NO: 1416786 - RNA, 19 nt, Homo sapiens
  misc_RNA (1)...(19): siRNA sense strand
ggacgaggaccagcacaag

SEQ ID NO: 1416787 - RNA, 19 nt, Homo sapiens
  misc_RNA (1)...(19): siRNA sense strand
ggacaccgucacuccugaa

SEQ ID NO: 1416788 - RNA, 19 nt, Homo sapiens
  misc_RNA (1)...(19): siRNA sense strand
ccagagaucaccagaagcu

SEQ ID NO: 1416789 - RNA, 19 nt, Homo sapiens
  misc_RNA (1)...(19): siRNA sense strand
gagccauccucaccaccau

SEQ ID NO: 1416790 - RNA, 19 nt, Homo sapiens
  misc_RNA (1)...(19): siRNA sense strand
gcaaaggggcugcagugaa

SEQ ID NO: 1416791 - RNA, 19 nt, Homo sapiens
  misc_RNA (1)...(19): siRNA sense strand
guucuccauugucaccaaa

SEQ ID NO: 1416792 - RNA, 19 nt, Homo sapiens
  misc_RNA (1)...(19): siRNA sense strand
ggucuucgaucuggucacu

SEQ ID NO: 1416793 - RNA, 19 nt, Homo sapiens
  misc_RNA (1)...(19): siRNA sense strand
aagcaggagaucauuaaga

SEQ ID NO: 1416794 - RNA, 19 nt, Homo sapiens
  misc_RNA (1)...(19): siRNA sense strand
gcaggcaugguuugguuuc

SEQ ID NO: 1416795 - RNA, 19 nt, Homo sapiens
  misc_RNA (1)...(19): siRNA sense strand
ccgaggagggcuuccacua

SEQ ID NO: 1416796 - RNA, 19 nt, Homo sapiens
  misc_RNA (1)...(19): siRNA sense strand
ggcagaacgugcacuucca

SEQ ID NO: 1416797 - RNA, 19 nt, Homo sapiens
  misc_RNA (1)...(19): siRNA sense strand
gcaccggccaugaguaugc

SEQ ID NO: 1416798 - RNA, 19 nt, Homo sapiens
  misc_RNA (1)...(19): siRNA sense strand
gaagcaggagaucauuaag

SEQ ID NO: 1416799 - RNA, 19 nt, Homo sapiens
  misc_RNA (1)...(19): siRNA sense strand
caucgaggccgucaacaac

SEQ ID NO: 1416800 - RNA, 19 nt, Homo sapiens
  misc_RNA (1)...(19): siRNA sense strand
uggcaagccuguggacauc

SEQ ID NO: 1416801 - RNA, 19 nt, Homo sapiens
  misc_RNA (1)...(19): siRNA sense strand
gaguaugcagccaagauca

SEQ ID NO: 1416802 - RNA, 19 nt, Homo sapiens
  misc_RNA (1)...(19): siRNA sense strand
gacuguggagugucugaaa

SEQ ID NO: 1416803 - RNA, 19 nt, Homo sapiens
  misc_RNA (1)...(19): siRNA sense strand
gagaaccugcuggccaaga

SEQ ID NO: 1416804 - RNA, 19 nt, Homo sapiens
  misc_RNA (1)...(19): siRNA sense strand
agcaggagaucauuaagac

SEQ ID NO: 1416805 - RNA, 19 nt, Homo sapiens
  misc_RNA (1)...(19): siRNA sense strand
gaaagagcaugaugacaua

SEQ ID NO: 1416806 - RNA, 19 nt, Homo sapiens
  misc_RNA (1)...(19): siRNA sense strand
gaacagcucugaaagcauu

SEQ ID NO: 1416807 - RNA, 19 nt, Homo sapiens
  misc_RNA (1)...(19): siRNA sense strand
gagaagauguugaaaugua

SEQ ID NO: 1416808 - RNA, 19 nt, Homo sapiens
  misc_RNA (1)...(19): siRNA sense strand
gaggacagcuugaggguua

SEQ ID NO: 1416809 - RNA, 19 nt, Homo sapiens
  misc_RNA (1)...(19): siRNA sense strand
gaaacugaauggaagaaua

SEQ ID NO: 1416810 - RNA, 19 nt, Homo sapiens
  misc_RNA (1)...(19): siRNA sense strand
aaagaaggcuguaccguua

SEQ ID NO: 1416811 - RNA, 19 nt, Homo sapiens
  misc_RNA (1)...(19): siRNA sense strand
aaacacagcucuggaauaa

SEQ ID NO: 1416812 - RNA, 19 nt, Homo sapiens
  misc_RNA (1)...(19): siRNA sense strand
gaaauagaacuucgaauga

SEQ ID NO: 1416813 - RNA, 19 nt, Homo sapiens
  misc_RNA (1)...(19): siRNA sense strand
gcaaugauguggucuuguu

SEQ ID NO: 1416814 - RNA, 19 nt, Homo sapiens
  misc_RNA (1)...(19): siRNA sense strand
gaccauauccuuaaaugua

SEQ ID NO: 1416815 - RNA, 19 nt, Homo sapiens
  misc_RNA (1)...(19): siRNA sense strand
gcaaugggaugcagcuauu

SEQ ID NO: 1416816 - RNA, 19 nt, Homo sapiens
  misc_RNA (1)...(19): siRNA sense strand
cagcuuaucuugcaaguga

SEQ ID NO: 1416817 - RNA, 19 nt, Homo sapiens
  misc_RNA (1)...(19): siRNA sense strand
gaaguuaggcgauuagaga

SEQ ID NO: 1416818 - RNA, 19 nt, Homo sapiens
  misc_RNA (1)...(19): siRNA sense strand
gacaaaggcauucaucaua

SEQ ID NO: 1416819 - RNA, 19 nt, Homo sapiens
  misc_RNA (1)...(19): siRNA sense strand
gauccaagcuugauuaagg

SEQ ID NO: 1416820 - RNA, 19 nt, Homo sapiens
  misc_RNA (1)...(19): siRNA sense strand
ggaagaaaguauuaaacga

SEQ ID NO: 1416821 - RNA, 19 nt, Homo sapiens
  misc_RNA (1)...(19): siRNA sense strand
aaacagcucuaaaccauug

SEQ ID NO: 1416822 - RNA, 19 nt, Homo sapiens
  misc_RNA (1)...(19): siRNA sense strand
ugacauguauucugaaguu

SEQ ID NO: 1416823 - RNA, 19 nt, Homo sapiens
  misc_RNA (1)...(19): siRNA sense strand
gaagaccucaagaaaguua

SEQ ID NO: 1416824 - RNA, 19 nt, Homo sapiens
  misc_RNA (1)...(19): siRNA sense strand
gcugaacgcaguauuguua

SEQ ID NO: 1416825 - RNA, 19 nt, Homo sapiens
  misc_RNA (1)...(19): siRNA sense strand
gauggugcuuguugacuua

SEQ ID NO: 1416826 - RNA, 19 nt, Homo sapiens
  misc_RNA (1)...(19): siRNA sense strand
ggacauccuuucagcaguu

SEQ ID NO: 1416827 - RNA, 19 nt, Homo sapiens
  misc_RNA (1)...(19): siRNA sense strand
gaaacacagcucuggaaua

SEQ ID NO: 1416828 - RNA, 19 nt, Homo sapiens
  misc_RNA (1)...(19): siRNA sense strand
ggaaauccuucaacaaucu

SEQ ID NO: 1416829 - RNA, 19 nt, Homo sapiens
  misc_RNA (1)...(19): siRNA sense strand
gcagauaauugaaggaaag

SEQ ID NO: 1416830 - RNA, 19 nt, Homo sapiens
  misc_RNA (1)...(19): siRNA sense strand
ugaaagcauugaagcuaua

SEQ ID NO: 1416831 - RNA, 19 nt, Homo sapiens
  misc_RNA (1)...(19): siRNA sense strand
ggaaagagcaugaugacau

SEQ ID NO: 1416832 - RNA, 19 nt, Homo sapiens
  misc_RNA (1)...(19): siRNA sense strand
ucacgaagcauuuaucauu

SEQ ID NO: 1416833 - RNA, 19 nt, Homo sapiens
  misc_RNA (1)...(19): siRNA sense strand
gcaguucucuucucugaca

SEQ ID NO: 1416834 - RNA, 19 nt, Homo sapiens
  misc_RNA (1)...(19): siRNA sense strand
uuaaagagguauuggaaga

SEQ ID NO: 1416835 - RNA, 19 nt, Homo sapiens
  misc_RNA (1)...(19): siRNA sense strand
aaacugaaauucucuccaa

SEQ ID NO: 1416836 - RNA, 19 nt, Homo sapiens
  misc_RNA (1)...(19): siRNA sense strand
ggcaacaacuuacaaauac

SEQ ID NO: 1416837 - RNA, 19 nt, Homo sapiens
  misc_RNA (1)...(19): siRNA sense strand
gaagaccgauccauaucug

SEQ ID NO: 1416838 - RNA, 19 nt, Homo sapiens
  misc_RNA (1)...(19): siRNA sense strand
ugaccggaaugaacuauuu

SEQ ID NO: 1416839 - RNA, 19 nt, Homo sapiens
  misc_RNA (1)...(19): siRNA sense strand
caaugaaagcuuuagguua

SEQ ID NO: 1416840 - RNA, 19 nt, Homo sapiens
  misc_RNA (1)...(19): siRNA sense strand
ggaccuuagugaauauaaa

SEQ ID NO: 1416841 - RNA, 19 nt, Homo sapiens
  misc_RNA (1)...(19): siRNA sense strand
ggaaauugaugaguauauc

SEQ ID NO: 1416842 - RNA, 19 nt, Homo sapiens
  misc_RNA (1)...(19): siRNA sense strand
cggaagaccucaagaaagu

SEQ ID NO: 1416843 - RNA, 19 nt, Homo sapiens
  misc_RNA (1)...(19): siRNA sense strand
gcaucaaguuuauagaaga

SEQ ID NO: 1416844 - RNA, 19 nt, Homo sapiens
  misc_RNA (1)...(19): siRNA sense strand
gcacccagcuuaucuugca

SEQ ID NO: 1416845 - RNA, 19 nt, Homo sapiens
  misc_RNA (1)...(19): siRNA sense strand
ggaagaaucggacccaaga

SEQ ID NO: 1416846 - RNA, 19 nt, Homo sapiens
  misc_RNA (1)...(19): siRNA sense strand
ugaaauccuugaugaaguu

SEQ ID NO: 1416847 - RNA, 19 nt, Homo sapiens
  misc_RNA (1)...(19): siRNA sense strand
gcugauaguuucaaagcaa

SEQ ID NO: 1416848 - RNA, 19 nt, Homo sapiens
  misc_RNA (1)...(19): siRNA sense strand
gagaccauauccuuaaaug

SEQ ID NO: 1416849 - RNA, 19 nt, Homo sapiens
  misc_RNA (1)...(19): siRNA sense strand
uaaagaggccguuaaggaa

SEQ ID NO: 1416850 - RNA, 19 nt, Homo sapiens
  misc_RNA (1)...(19): siRNA sense strand
guagauccaagcuugauua

SEQ ID NO: 1416851 - RNA, 19 nt, Homo sapiens
  misc_RNA (1)...(19): siRNA sense strand
uggagaagauguugaaaug

SEQ ID NO: 1416852 - RNA, 19 nt, Homo sapiens
  misc_RNA (1)...(19): siRNA sense strand
cagcaguucucuucucuga

SEQ ID NO: 1416853 - RNA, 19 nt, Homo sapiens
  misc_RNA (1)...(19): siRNA sense strand
gaugacacguucuccaguu

SEQ ID NO: 1416854 - RNA, 19 nt, Homo sapiens
  misc_RNA (1)...(19): siRNA sense strand
caaaggcauucaucauaga

SEQ ID NO: 1416855 - RNA, 19 nt, Homo sapiens
  misc_RNA (1)...(19): siRNA sense strand
gauaugauaccggaccuua

SEQ ID NO: 1416856 - RNA, 19 nt, Homo sapiens
  misc_RNA (1)...(19): siRNA sense strand
gggaugcagcuauuuauuu

SEQ ID NO: 1416857 - RNA, 19 nt, Homo sapiens
  misc_RNA (1)...(19): siRNA sense strand
ccaagugacuacaagaaau

SEQ ID NO: 1416858 - RNA, 19 nt, Homo sapiens
  misc_RNA (1)...(19): siRNA sense strand
ugauugacauguauucuga

SEQ ID NO: 1416859 - RNA, 19 nt, Homo sapiens
  misc_RNA (1)...(19): siRNA sense strand
uaauaaagcaguagagguu

SEQ ID NO: 1416860 - RNA, 19 nt, Homo sapiens
  misc_RNA (1)...(19): siRNA sense strand
cauugaagcuauaagagaa

SEQ ID NO: 1416861 - RNA, 19 nt, Homo sapiens
  misc_RNA (1)...(19): siRNA sense strand
ggauucagcagauaauuga

SEQ ID NO: 1416862 - RNA, 19 nt, Homo sapiens
  misc_RNA (1)...(19): siRNA sense strand
aaacuucgcuaucucauac

SEQ ID NO: 1416863 - RNA, 19 nt, Homo sapiens
  misc_RNA (1)...(19): siRNA sense strand
acaaugaaaccaagaauga

SEQ ID NO: 1416864 - RNA, 19 nt, Homo sapiens
  misc_RNA (1)...(19): siRNA sense strand
caaauggacccucauggaa

SEQ ID NO: 1416865 - RNA, 19 nt, Homo sapiens
  misc_RNA (1)...(19): siRNA sense strand
ugaaauagaacuucgaaug

SEQ ID NO: 1416866 - RNA, 19 nt, Homo sapiens
  misc_RNA (1)...(19): siRNA sense strand
uaccggaccuuagugaaua

SEQ ID NO: 1416867 - RNA, 19 nt, Homo sapiens
  misc_RNA (1)...(19): siRNA sense strand
gggaacagcucugaaagca

SEQ ID NO: 1416868 - RNA, 19 nt, Homo sapiens
  misc_RNA (1)...(19): siRNA sense strand
ugacaaaccuuccuuuacg

SEQ ID NO: 1416869 - RNA, 19 nt, Homo sapiens
  misc_RNA (1)...(19): siRNA sense strand
gaacaacaggcugauaguu

SEQ ID NO: 1416870 - RNA, 19 nt, Homo sapiens
  misc_RNA (1)...(19): siRNA sense strand
gauguucucucugauuaug

SEQ ID NO: 1416871 - RNA, 19 nt, Homo sapiens
  misc_RNA (1)...(19): siRNA sense strand
gcauuuaucauucacauca

SEQ ID NO: 1416872 - RNA, 19 nt, Homo sapiens
  misc_RNA (1)...(19): siRNA sense strand
ggaugcagcuauuuauuuu

SEQ ID NO: 1416873 - RNA, 19 nt, Homo sapiens
  misc_RNA (1)...(19): siRNA sense strand
gaacuugaccggaaugaac

SEQ ID NO: 1416874 - RNA, 19 nt, Homo sapiens
  misc_RNA (1)...(19): siRNA sense strand
ggauggugcuuguugacuu

SEQ ID NO: 1416875 - RNA, 19 nt, Homo sapiens
  misc_RNA (1)...(19): siRNA sense strand
acaaaggcauucaucauag

SEQ ID NO: 1416876 - RNA, 19 nt, Homo sapiens
  misc_RNA (1)...(19): siRNA sense strand
acacucaguugaaguauca

SEQ ID NO: 1416877 - RNA, 19 nt, Homo sapiens
  misc_RNA (1)...(19): siRNA sense strand
gaaagugacaagcauuuua

SEQ ID NO: 1416878 - RNA, 19 nt, Homo sapiens
  misc_RNA (1)...(19): siRNA sense strand
gacauugugugggaaauug

SEQ ID NO: 1416879 - RNA, 19 nt, Homo sapiens
  misc_RNA (1)...(19): siRNA sense strand
ggaaguuuaccacuacaaa

SEQ ID NO: 1416880 - RNA, 19 nt, Homo sapiens
  misc_RNA (1)...(19): siRNA sense strand
gcucgaauauucccaagag

SEQ ID NO: 1416881 - RNA, 19 nt, Homo sapiens
  misc_RNA (1)...(19): siRNA sense strand
gaaagaugacaaaggcauu

SEQ ID NO: 1416882 - RNA, 19 nt, Homo sapiens
  misc_RNA (1)...(19): siRNA sense strand
uugauguucucucugauua

SEQ ID NO: 1416883 - RNA, 19 nt, Homo sapiens
  misc_RNA (1)...(19): siRNA sense strand
aaagagguauuggaagauu

SEQ ID NO: 1416884 - RNA, 19 nt, Homo sapiens
  misc_RNA (1)...(19): siRNA sense strand
gggagacccuacaagaaga

SEQ ID NO: 1416885 - RNA, 19 nt, Homo sapiens
  misc_RNA (1)...(19): siRNA sense strand
gaauccuaaugccaucaua

SEQ ID NO: 1416886 - RNA, 19 nt, Homo sapiens
  misc_RNA (1)...(19): siRNA sense strand
agaagaucuugcagcauua

SEQ ID NO: 1416887 - RNA, 19 nt, Homo sapiens
  misc_RNA (1)...(19): siRNA sense strand
caucauagaaagcuuaaga

SEQ ID NO: 1416888 - RNA, 19 nt, Homo sapiens
  misc_RNA (1)...(19): siRNA sense strand
gaagaauuuucccgcuuua

SEQ ID NO: 1416889 - RNA, 19 nt, Homo sapiens
  misc_RNA (1)...(19): siRNA sense strand
caguggauaucaagcuuaa

SEQ ID NO: 1416890 - RNA, 19 nt, Homo sapiens
  misc_RNA (1)...(19): siRNA sense strand
gcauugaagcuauaagaga

SEQ ID NO: 1416891 - RNA, 19 nt, Homo sapiens
  misc_RNA (1)...(19): siRNA sense strand
gaaagcucuucccaaugaa

SEQ ID NO: 1416892 - RNA, 19 nt, Homo sapiens
  misc_RNA (1)...(19): siRNA sense strand
ugacuuaccaggugugauu

SEQ ID NO: 1416893 - RNA, 19 nt, Homo sapiens
  misc_RNA (1)...(19): siRNA sense strand
ggaaaugauugcccaagcu

SEQ ID NO: 1416894 - RNA, 19 nt, Homo sapiens
  misc_RNA (1)...(19): siRNA sense strand
acacagcucuggaauaaaa

SEQ ID NO: 1416895 - RNA, 19 nt, Homo sapiens
  misc_RNA (1)...(19): siRNA sense strand
ugugggaaauugaugagua

SEQ ID NO: 1416896 - RNA, 19 nt, Homo sapiens
  misc_RNA (1)...(19): siRNA sense strand
cuaaaccauuguaaccuuu

SEQ ID NO: 1416897 - RNA, 19 nt, Homo sapiens
  misc_RNA (1)...(19): siRNA sense strand
agagcaugaugacauauuu

SEQ ID NO: 1416898 - RNA, 19 nt, Homo sapiens
  misc_RNA (1)...(19): siRNA sense strand
caacucaugugauugaaaa

SEQ ID NO: 1416899 - RNA, 19 nt, Homo sapiens
  misc_RNA (1)...(19): siRNA sense strand
caagugacuacaagaaauu

SEQ ID NO: 1416900 - RNA, 19 nt, Homo sapiens
  misc_RNA (1)...(19): siRNA sense strand
gcuaaaggcacaccaagug

SEQ ID NO: 1416901 - RNA, 19 nt, Homo sapiens
  misc_RNA (1)...(19): siRNA sense strand
gagaauaugaagaagaguu

SEQ ID NO: 1416902 - RNA, 19 nt, Homo sapiens
  misc_RNA (1)...(19): siRNA sense strand
gcaguauuguuacagacuu

SEQ ID NO: 1416903 - RNA, 19 nt, Homo sapiens
  misc_RNA (1)...(19): siRNA sense strand
uggaaagacuaguguguug

SEQ ID NO: 1416904 - RNA, 19 nt, Homo sapiens
  misc_RNA (1)...(19): siRNA sense strand
ggagaacaaagaauugaga

SEQ ID NO: 1416905 - RNA, 19 nt, Homo sapiens
  misc_RNA (1)...(19): siRNA sense strand
gaaagagcaugaugacaua

SEQ ID NO: 1416906 - RNA, 19 nt, Homo sapiens
  misc_RNA (1)...(19): siRNA sense strand
gaacagcucugaaagcauu

SEQ ID NO: 1416907 - RNA, 19 nt, Homo sapiens
  misc_RNA (1)...(19): siRNA sense strand
gagaagauguugaaaugua

SEQ ID NO: 1416908 - RNA, 19 nt, Homo sapiens
  misc_RNA (1)...(19): siRNA sense strand
gaggacagcuugaggguua

SEQ ID NO: 1416909 - RNA, 19 nt, Homo sapiens
  misc_RNA (1)...(19): siRNA sense strand
gaaacugaauggaagaaua

SEQ ID NO: 1416910 - RNA, 19 nt, Homo sapiens
  misc_RNA (1)...(19): siRNA sense strand
aaagaaggcuguaccguua

SEQ ID NO: 1416911 - RNA, 19 nt, Homo sapiens
  misc_RNA (1)...(19): siRNA sense strand
aaacacagcucuggaauaa

SEQ ID NO: 1416912 - RNA, 19 nt, Homo sapiens
  misc_RNA (1)...(19): siRNA sense strand
gaaauagaacuucgaauga

SEQ ID NO: 1416913 - RNA, 19 nt, Homo sapiens
  misc_RNA (1)...(19): siRNA sense strand
gcaaugauguggucuuguu

SEQ ID NO: 1416914 - RNA, 19 nt, Homo sapiens
  misc_RNA (1)...(19): siRNA sense strand
gaccauauccuuaaaugua

SEQ ID NO: 1416915 - RNA, 19 nt, Homo sapiens
  misc_RNA (1)...(19): siRNA sense strand
gcaaugggaugcagcuauu

SEQ ID NO: 1416916 - RNA, 19 nt, Homo sapiens
  misc_RNA (1)...(19): siRNA sense strand
cagcuuaucuugcaaguga

SEQ ID NO: 1416917 - RNA, 19 nt, Homo sapiens
  misc_RNA (1)...(19): siRNA sense strand
gaaguuaggcgauuagaga

SEQ ID NO: 1416918 - RNA, 19 nt, Homo sapiens
  misc_RNA (1)...(19): siRNA sense strand
gacaaaggcauucaucaua

SEQ ID NO: 1416919 - RNA, 19 nt, Homo sapiens
  misc_RNA (1)...(19): siRNA sense strand
gauccaagcuugauuaagg

SEQ ID NO: 1416920 - RNA, 19 nt, Homo sapiens
  misc_RNA (1)...(19): siRNA sense strand
ggaagaaaguauuaaacga

SEQ ID NO: 1416921 - RNA, 19 nt, Homo sapiens
  misc_RNA (1)...(19): siRNA sense strand
aaacagcucuaaaccauug

SEQ ID NO: 1416922 - RNA, 19 nt, Homo sapiens
  misc_RNA (1)...(19): siRNA sense strand
ugacauguauucugaaguu

SEQ ID NO: 1416923 - RNA, 19 nt, Homo sapiens
  misc_RNA (1)...(19): siRNA sense strand
gaagaccucaagaaaguua

SEQ ID NO: 1416924 - RNA, 19 nt, Homo sapiens
  misc_RNA (1)...(19): siRNA sense strand
gcugaacgcaguauuguua

SEQ ID NO: 1416925 - RNA, 19 nt, Homo sapiens
  misc_RNA (1)...(19): siRNA sense strand
gauggugcuuguugacuua

SEQ ID NO: 1416926 - RNA, 19 nt, Homo sapiens
  misc_RNA (1)...(19): siRNA sense strand
ggacauccuuucagcaguu

SEQ ID NO: 1416927 - RNA, 19 nt, Homo sapiens
  misc_RNA (1)...(19): siRNA sense strand
gaaacacagcucuggaaua

SEQ ID NO: 1416928 - RNA, 19 nt, Homo sapiens
  misc_RNA (1)...(19): siRNA sense strand
ggaaauccuucaacaaucu

SEQ ID NO: 1416929 - RNA, 19 nt, Homo sapiens
  misc_RNA (1)...(19): siRNA sense strand
gcagauaauugaaggaaag

SEQ ID NO: 1416930 - RNA, 19 nt, Homo sapiens
  misc_RNA (1)...(19): siRNA sense strand
ugaaagcauugaagcuaua

SEQ ID NO: 1416931 - RNA, 19 nt, Homo sapiens
  misc_RNA (1)...(19): siRNA sense strand
ggaaagagcaugaugacau

SEQ ID NO: 1416932 - RNA, 19 nt, Homo sapiens
  misc_RNA (1)...(19): siRNA sense strand
ucacgaagcauuuaucauu

SEQ ID NO: 1416933 - RNA, 19 nt, Homo sapiens
  misc_RNA (1)...(19): siRNA sense strand
gcaguucucuucucugaca

SEQ ID NO: 1416934 - RNA, 19 nt, Homo sapiens
  misc_RNA (1)...(19): siRNA sense strand
uuaaagagguauuggaaga

SEQ ID NO: 1416935 - RNA, 19 nt, Homo sapiens
  misc_RNA (1)...(19): siRNA sense strand
aaacugaaauucucuccaa

SEQ ID NO: 1416936 - RNA, 19 nt, Homo sapiens
  misc_RNA (1)...(19): siRNA sense strand
ggcaacaacuuacaaauac

SEQ ID NO: 1416937 - RNA, 19 nt, Homo sapiens
  misc_RNA (1)...(19): siRNA sense strand
gaagaccgauccauaucug

SEQ ID NO: 1416938 - RNA, 19 nt, Homo sapiens
  misc_RNA (1)...(19): siRNA sense strand
ugaccggaaugaacuauuu

SEQ ID NO: 1416939 - RNA, 19 nt, Homo sapiens
  misc_RNA (1)...(19): siRNA sense strand
caaugaaagcuuuagguua

SEQ ID NO: 1416940 - RNA, 19 nt, Homo sapiens
  misc_RNA (1)...(19): siRNA sense strand
ggaccuuagugaauauaaa

SEQ ID NO: 1416941 - RNA, 19 nt, Homo sapiens
  misc_RNA (1)...(19): siRNA sense strand
ggaaauugaugaguauauc

SEQ ID NO: 1416942 - RNA, 19 nt, Homo sapiens
  misc_RNA (1)...(19): siRNA sense strand
cggaagaccucaagaaagu

SEQ ID NO: 1416943 - RNA, 19 nt, Homo sapiens
  misc_RNA (1)...(19): siRNA sense strand
gcaucaaguuuauagaaga

SEQ ID NO: 1416944 - RNA, 19 nt, Homo sapiens
  misc_RNA (1)...(19): siRNA sense strand
gcacccagcuuaucuugca

SEQ ID NO: 1416945 - RNA, 19 nt, Homo sapiens
  misc_RNA (1)...(19): siRNA sense strand
ggaagaaucggacccaaga

SEQ ID NO: 1416946 - RNA, 19 nt, Homo sapiens
  misc_RNA (1)...(19): siRNA sense strand
ugaaauccuugaugaaguu

SEQ ID NO: 1416947 - RNA, 19 nt, Homo sapiens
  misc_RNA (1)...(19): siRNA sense strand
gcugauaguuucaaagcaa

SEQ ID NO: 1416948 - RNA, 19 nt, Homo sapiens
  misc_RNA (1)...(19): siRNA sense strand
gagaccauauccuuaaaug

SEQ ID NO: 1416949 - RNA, 19 nt, Homo sapiens
  misc_RNA (1)...(19): siRNA sense strand
uaaagaggccguuaaggaa

SEQ ID NO: 1416950 - RNA, 19 nt, Homo sapiens
  misc_RNA (1)...(19): siRNA sense strand
guagauccaagcuugauua

SEQ ID NO: 1416951 - RNA, 19 nt, Homo sapiens
  misc_RNA (1)...(19): siRNA sense strand
uggagaagauguugaaaug

SEQ ID NO: 1416952 - RNA, 19 nt, Homo sapiens
  misc_RNA (1)...(19): siRNA sense strand
cagcaguucucuucucuga

SEQ ID NO: 1416953 - RNA, 19 nt, Homo sapiens
  misc_RNA (1)...(19): siRNA sense strand
gaugacacguucuccaguu

SEQ ID NO: 1416954 - RNA, 19 nt, Homo sapiens
  misc_RNA (1)...(19): siRNA sense strand
caaaggcauucaucauaga

SEQ ID NO: 1416955 - RNA, 19 nt, Homo sapiens
  misc_RNA (1)...(19): siRNA sense strand
gauaugauaccggaccuua

SEQ ID NO: 1416956 - RNA, 19 nt, Homo sapiens
  misc_RNA (1)...(19): siRNA sense strand
gggaugcagcuauuuauuu

SEQ ID NO: 1416957 - RNA, 19 nt, Homo sapiens
  misc_RNA (1)...(19): siRNA sense strand
ccaagugacuacaagaaau

SEQ ID NO: 1416958 - RNA, 19 nt, Homo sapiens
  misc_RNA (1)...(19): siRNA sense strand
ugauugacauguauucuga

SEQ ID NO: 1416959 - RNA, 19 nt, Homo sapiens
  misc_RNA (1)...(19): siRNA sense strand
uaauaaagcaguagagguu

SEQ ID NO: 1416960 - RNA, 19 nt, Homo sapiens
  misc_RNA (1)...(19): siRNA sense strand
cauugaagcuauaagagaa

SEQ ID NO: 1416961 - RNA, 19 nt, Homo sapiens
  misc_RNA (1)...(19): siRNA sense strand
ggauucagcagauaauuga

SEQ ID NO: 1416962 - RNA, 19 nt, Homo sapiens
  misc_RNA (1)...(19): siRNA sense strand
aaacuucgcuaucucauac

SEQ ID NO: 1416963 - RNA, 19 nt, Homo sapiens
  misc_RNA (1)...(19): siRNA sense strand
acaaugaaaccaagaauga

SEQ ID NO: 1416964 - RNA, 19 nt, Homo sapiens
  misc_RNA (1)...(19): siRNA sense strand
caaauggacccucauggaa

SEQ ID NO: 1416965 - RNA, 19 nt, Homo sapiens
  misc_RNA (1)...(19): siRNA sense strand
ugaaauagaacuucgaaug

SEQ ID NO: 1416966 - RNA, 19 nt, Homo sapiens
  misc_RNA (1)...(19): siRNA sense strand
uaccggaccuuagugaaua

SEQ ID NO: 1416967 - RNA, 19 nt, Homo sapiens
  misc_RNA (1)...(19): siRNA sense strand
gggaacagcucugaaagca

SEQ ID NO: 1416968 - RNA, 19 nt, Homo sapiens
  misc_RNA (1)...(19): siRNA sense strand
ugacaaaccuuccuuuacg

SEQ ID NO: 1416969 - RNA, 19 nt, Homo sapiens
  misc_RNA (1)...(19): siRNA sense strand
gaacaacaggcugauaguu

SEQ ID NO: 1416970 - RNA, 19 nt, Homo sapiens
  misc_RNA (1)...(19): siRNA sense strand
gauguucucucugauuaug

SEQ ID NO: 1416971 - RNA, 19 nt, Homo sapiens
  misc_RNA (1)...(19): siRNA sense strand
gcauuuaucauucacauca

SEQ ID NO: 1416972 - RNA, 19 nt, Homo sapiens
  misc_RNA (1)...(19): siRNA sense strand
ggaugcagcuauuuauuuu

SEQ ID NO: 1416973 - RNA, 19 nt, Homo sapiens
  misc_RNA (1)...(19): siRNA sense strand
gaacuugaccggaaugaac

SEQ ID NO: 1416974 - RNA, 19 nt, Homo sapiens
  misc_RNA (1)...(19): siRNA sense strand
ggauggugcuuguugacuu

SEQ ID NO: 1416975 - RNA, 19 nt, Homo sapiens
  misc_RNA (1)...(19): siRNA sense strand
acaaaggcauucaucauag

SEQ ID NO: 1416976 - RNA, 19 nt, Homo sapiens
  misc_RNA (1)...(19): siRNA sense strand
acacucaguugaaguauca

SEQ ID NO: 1416977 - RNA, 19 nt, Homo sapiens
  misc_RNA (1)...(19): siRNA sense strand
gaaagugacaagcauuuua

SEQ ID NO: 1416978 - RNA, 19 nt, Homo sapiens
  misc_RNA (1)...(19): siRNA sense strand
gacauugugugggaaauug

SEQ ID NO: 1416979 - RNA, 19 nt, Homo sapiens
  misc_RNA (1)...(19): siRNA sense strand
ggaaguuuaccacuacaaa

SEQ ID NO: 1416980 - RNA, 19 nt, Homo sapiens
  misc_RNA (1)...(19): siRNA sense strand
gcucgaauauucccaagag

SEQ ID NO: 1416981 - RNA, 19 nt, Homo sapiens
  misc_RNA (1)...(19): siRNA sense strand
gaaagaugacaaaggcauu

SEQ ID NO: 1416982 - RNA, 19 nt, Homo sapiens
  misc_RNA (1)...(19): siRNA sense strand
uugauguucucucugauua

SEQ ID NO: 1416983 - RNA, 19 nt, Homo sapiens
  misc_RNA (1)...(19): siRNA sense strand
aaagagguauuggaagauu

SEQ ID NO: 1416984 - RNA, 19 nt, Homo sapiens
  misc_RNA (1)...(19): siRNA sense strand
gggagacccuacaagaaga

SEQ ID NO: 1416985 - RNA, 19 nt, Homo sapiens
  misc_RNA (1)...(19): siRNA sense strand
gaauccuaaugccaucaua

SEQ ID NO: 1416986 - RNA, 19 nt, Homo sapiens
  misc_RNA (1)...(19): siRNA sense strand
agaagaucuugcagcauua

SEQ ID NO: 1416987 - RNA, 19 nt, Homo sapiens
  misc_RNA (1)...(19): siRNA sense strand
caucauagaaagcuuaaga

SEQ ID NO: 1416988 - RNA, 19 nt, Homo sapiens
  misc_RNA (1)...(19): siRNA sense strand
gaagaauuuucccgcuuua

SEQ ID NO: 1416989 - RNA, 19 nt, Homo sapiens
  misc_RNA (1)...(19): siRNA sense strand
caguggauaucaagcuuaa

SEQ ID NO: 1416990 - RNA, 19 nt, Homo sapiens
  misc_RNA (1)...(19): siRNA sense strand
gcauugaagcuauaagaga

SEQ ID NO: 1416991 - RNA, 19 nt, Homo sapiens
  misc_RNA (1)...(19): siRNA sense strand
gaaagcucuucccaaugaa

SEQ ID NO: 1416992 - RNA, 19 nt, Homo sapiens
  misc_RNA (1)...(19): siRNA sense strand
ugacuuaccaggugugauu

SEQ ID NO: 1416993 - RNA, 19 nt, Homo sapiens
  misc_RNA (1)...(19): siRNA sense strand
ggaaaugauugcccaagcu

SEQ ID NO: 1416994 - RNA, 19 nt, Homo sapiens
  misc_RNA (1)...(19): siRNA sense strand
acacagcucuggaauaaaa

SEQ ID NO: 1416995 - RNA, 19 nt, Homo sapiens
  misc_RNA (1)...(19): siRNA sense strand
ugugggaaauugaugagua

SEQ ID NO: 1416996 - RNA, 19 nt, Homo sapiens
  misc_RNA (1)...(19): siRNA sense strand
cuaaaccauuguaaccuuu

SEQ ID NO: 1416997 - RNA, 19 nt, Homo sapiens
  misc_RNA (1)...(19): siRNA sense strand
agagcaugaugacauauuu

SEQ ID NO: 1416998 - RNA, 19 nt, Homo sapiens
  misc_RNA (1)...(19): siRNA sense strand
caacucaugugauugaaaa

SEQ ID NO: 1416999 - RNA, 19 nt, Homo sapiens
  misc_RNA (1)...(19): siRNA sense strand
caagugacuacaagaaauu

SEQ ID NO: 1417000 - RNA, 19 nt, Homo sapiens
  misc_RNA (1)...(19): siRNA sense strand
gcuaaaggcacaccaagug

SEQ ID NO: 1417001 - RNA, 19 nt, Homo sapiens
  misc_RNA (1)...(19): siRNA sense strand
gagaauaugaagaagaguu

SEQ ID NO: 1417002 - RNA, 19 nt, Homo sapiens
  misc_RNA (1)...(19): siRNA sense strand
gcaguauuguuacagacuu

SEQ ID NO: 1417003 - RNA, 19 nt, Homo sapiens
  misc_RNA (1)...(19): siRNA sense strand
uggaaagacuaguguguug

SEQ ID NO: 1417004 - RNA, 19 nt, Homo sapiens
  misc_RNA (1)...(19): siRNA sense strand
ggagaacaaagaauugaga

SEQ ID NO: 1417005 - RNA, 19 nt, Homo sapiens
  misc_RNA (1)...(19): siRNA sense strand
gaaagagcaugaugacaua

SEQ ID NO: 1417006 - RNA, 19 nt, Homo sapiens
  misc_RNA (1)...(19): siRNA sense strand
gaacagcucugaaagcauu

SEQ ID NO: 1417007 - RNA, 19 nt, Homo sapiens
  misc_RNA (1)...(19): siRNA sense strand
gagaagauguugaaaugua

SEQ ID NO: 1417008 - RNA, 19 nt, Homo sapiens
  misc_RNA (1)...(19): siRNA sense strand
gaggacagcuugaggguua

SEQ ID NO: 1417009 - RNA, 19 nt, Homo sapiens
  misc_RNA (1)...(19): siRNA sense strand
gaaacugaauggaagaaua

SEQ ID NO: 1417010 - RNA, 19 nt, Homo sapiens
  misc_RNA (1)...(19): siRNA sense strand
aaagaaggcuguaccguua

SEQ ID NO: 1417011 - RNA, 19 nt, Homo sapiens
  misc_RNA (1)...(19): siRNA sense strand
aaacacagcucuggaauaa

SEQ ID NO: 1417012 - RNA, 19 nt, Homo sapiens
  misc_RNA (1)...(19): siRNA sense strand
gaaauagaacuucgaauga

SEQ ID NO: 1417013 - RNA, 19 nt, Homo sapiens
  misc_RNA (1)...(19): siRNA sense strand
gcaaugauguggucuuguu

SEQ ID NO: 1417014 - RNA, 19 nt, Homo sapiens
  misc_RNA (1)...(19): siRNA sense strand
gaccauauccuuaaaugua

SEQ ID NO: 1417015 - RNA, 19 nt, Homo sapiens
  misc_RNA (1)...(19): siRNA sense strand
gcaaugggaugcagcuauu

SEQ ID NO: 1417016 - RNA, 19 nt, Homo sapiens
  misc_RNA (1)...(19): siRNA sense strand
cagcuuaucuugcaaguga

SEQ ID NO: 1417017 - RNA, 19 nt, Homo sapiens
  misc_RNA (1)...(19): siRNA sense strand
gaaguuaggcgauuagaga

SEQ ID NO: 1417018 - RNA, 19 nt, Homo sapiens
  misc_RNA (1)...(19): siRNA sense strand
gacaaaggcauucaucaua

SEQ ID NO: 1417019 - RNA, 19 nt, Homo sapiens
  misc_RNA (1)...(19): siRNA sense strand
gauccaagcuugauuaagg

SEQ ID NO: 1417020 - RNA, 19 nt, Homo sapiens
  misc_RNA (1)...(19): siRNA sense strand
ggaagaaaguauuaaacga

SEQ ID NO: 1417021 - RNA, 19 nt, Homo sapiens
  misc_RNA (1)...(19): siRNA sense strand
aaacagcucuaaaccauug

SEQ ID NO: 1417022 - RNA, 19 nt, Homo sapiens
  misc_RNA (1)...(19): siRNA sense strand
ugacauguauucugaaguu

SEQ ID NO: 1417023 - RNA, 19 nt, Homo sapiens
  misc_RNA (1)...(19): siRNA sense strand
gaagaccucaagaaaguua

SEQ ID NO: 1417024 - RNA, 19 nt, Homo sapiens
  misc_RNA (1)...(19): siRNA sense strand
gcugaacgcaguauuguua

SEQ ID NO: 1417025 - RNA, 19 nt, Homo sapiens
  misc_RNA (1)...(19): siRNA sense strand
gauggugcuuguugacuua

SEQ ID NO: 1417026 - RNA, 19 nt, Homo sapiens
  misc_RNA (1)...(19): siRNA sense strand
ggacauccuuucagcaguu

SEQ ID NO: 1417027 - RNA, 19 nt, Homo sapiens
  misc_RNA (1)...(19): siRNA sense strand
gaaacacagcucuggaaua

SEQ ID NO: 1417028 - RNA, 19 nt, Homo sapiens
  misc_RNA (1)...(19): siRNA sense strand
ggaaauccuucaacaaucu

SEQ ID NO: 1417029 - RNA, 19 nt, Homo sapiens
  misc_RNA (1)...(19): siRNA sense strand
gcagauaauugaaggaaag

SEQ ID NO: 1417030 - RNA, 19 nt, Homo sapiens
  misc_RNA (1)...(19): siRNA sense strand
ugaaagcauugaagcuaua

SEQ ID NO: 1417031 - RNA, 19 nt, Homo sapiens
  misc_RNA (1)...(19): siRNA sense strand
ggaaagagcaugaugacau

SEQ ID NO: 1417032 - RNA, 19 nt, Homo sapiens
  misc_RNA (1)...(19): siRNA sense strand
ucacgaagcauuuaucauu

SEQ ID NO: 1417033 - RNA, 19 nt, Homo sapiens
  misc_RNA (1)...(19): siRNA sense strand
gcaguucucuucucugaca

SEQ ID NO: 1417034 - RNA, 19 nt, Homo sapiens
  misc_RNA (1)...(19): siRNA sense strand
uuaaagagguauuggaaga

SEQ ID NO: 1417035 - RNA, 19 nt, Homo sapiens
  misc_RNA (1)...(19): siRNA sense strand
aaacugaaauucucuccaa

SEQ ID NO: 1417036 - RNA, 19 nt, Homo sapiens
  misc_RNA (1)...(19): siRNA sense strand
ggcaacaacuuacaaauac

SEQ ID NO: 1417037 - RNA, 19 nt, Homo sapiens
  misc_RNA (1)...(19): siRNA sense strand
gaagaccgauccauaucug

SEQ ID NO: 1417038 - RNA, 19 nt, Homo sapiens
  misc_RNA (1)...(19): siRNA sense strand
ugaccggaaugaacuauuu

SEQ ID NO: 1417039 - RNA, 19 nt, Homo sapiens
  misc_RNA (1)...(19): siRNA sense strand
caaugaaagcuuuagguua

SEQ ID NO: 1417040 - RNA, 19 nt, Homo sapiens
  misc_RNA (1)...(19): siRNA sense strand
ggaccuuagugaauauaaa

SEQ ID NO: 1417041 - RNA, 19 nt, Homo sapiens
  misc_RNA (1)...(19): siRNA sense strand
ggaaauugaugaguauauc

SEQ ID NO: 1417042 - RNA, 19 nt, Homo sapiens
  misc_RNA (1)...(19): siRNA sense strand
cggaagaccucaagaaagu

SEQ ID NO: 1417043 - RNA, 19 nt, Homo sapiens
  misc_RNA (1)...(19): siRNA sense strand
gcaucaaguuuauagaaga

SEQ ID NO: 1417044 - RNA, 19 nt, Homo sapiens
  misc_RNA (1)...(19): siRNA sense strand
gcacccagcuuaucuugca

SEQ ID NO: 1417045 - RNA, 19 nt, Homo sapiens
  misc_RNA (1)...(19): siRNA sense strand
ggaagaaucggacccaaga

SEQ ID NO: 1417046 - RNA, 19 nt, Homo sapiens
  misc_RNA (1)...(19): siRNA sense strand
ugaaauccuugaugaaguu

SEQ ID NO: 1417047 - RNA, 19 nt, Homo sapiens
  misc_RNA (1)...(19): siRNA sense strand
gcugauaguuucaaagcaa

SEQ ID NO: 1417048 - RNA, 19 nt, Homo sapiens
  misc_RNA (1)...(19): siRNA sense strand
gagaccauauccuuaaaug

SEQ ID NO: 1417049 - RNA, 19 nt, Homo sapiens
  misc_RNA (1)...(19): siRNA sense strand
uaaagaggccguuaaggaa

SEQ ID NO: 1417050 - RNA, 19 nt, Homo sapiens
  misc_RNA (1)...(19): siRNA sense strand
guagauccaagcuugauua

SEQ ID NO: 1417051 - RNA, 19 nt, Homo sapiens
  misc_RNA (1)...(19): siRNA sense strand
uggagaagauguugaaaug

SEQ ID NO: 1417052 - RNA, 19 nt, Homo sapiens
  misc_RNA (1)...(19): siRNA sense strand
cagcaguucucuucucuga

SEQ ID NO: 1417053 - RNA, 19 nt, Homo sapiens
  misc_RNA (1)...(19): siRNA sense strand
gaugacacguucuccaguu

SEQ ID NO: 1417054 - RNA, 19 nt, Homo sapiens
  misc_RNA (1)...(19): siRNA sense strand
caaaggcauucaucauaga

SEQ ID NO: 1417055 - RNA, 19 nt, Homo sapiens
  misc_RNA (1)...(19): siRNA sense strand
gauaugauaccggaccuua

SEQ ID NO: 1417056 - RNA, 19 nt, Homo sapiens
  misc_RNA (1)...(19): siRNA sense strand
gggaugcagcuauuuauuu

SEQ ID NO: 1417057 - RNA, 19 nt, Homo sapiens
  misc_RNA (1)...(19): siRNA sense strand
ccaagugacuacaagaaau

SEQ ID NO: 1417058 - RNA, 19 nt, Homo sapiens
  misc_RNA (1)...(19): siRNA sense strand
ugauugacauguauucuga

SEQ ID NO: 1417059 - RNA, 19 nt, Homo sapiens
  misc_RNA (1)...(19): siRNA sense strand
uaauaaagcaguagagguu

SEQ ID NO: 1417060 - RNA, 19 nt, Homo sapiens
  misc_RNA (1)...(19): siRNA sense strand
cauugaagcuauaagagaa

SEQ ID NO: 1417061 - RNA, 19 nt, Homo sapiens
  misc_RNA (1)...(19): siRNA sense strand
ggauucagcagauaauuga

SEQ ID NO: 1417062 - RNA, 19 nt, Homo sapiens
  misc_RNA (1)...(19): siRNA sense strand
aaacuucgcuaucucauac

SEQ ID NO: 1417063 - RNA, 19 nt, Homo sapiens
  misc_RNA (1)...(19): siRNA sense strand
acaaugaaaccaagaauga

SEQ ID NO: 1417064 - RNA, 19 nt, Homo sapiens
  misc_RNA (1)...(19): siRNA sense strand
caaauggacccucauggaa

SEQ ID NO: 1417065 - RNA, 19 nt, Homo sapiens
  misc_RNA (1)...(19): siRNA sense strand
ugaaauagaacuucgaaug

SEQ ID NO: 1417066 - RNA, 19 nt, Homo sapiens
  misc_RNA (1)...(19): siRNA sense strand
uaccggaccuuagugaaua

SEQ ID NO: 1417067 - RNA, 19 nt, Homo sapiens
  misc_RNA (1)...(19): siRNA sense strand
gggaacagcucugaaagca

SEQ ID NO: 1417068 - RNA, 19 nt, Homo sapiens
  misc_RNA (1)...(19): siRNA sense strand
ugacaaaccuuccuuuacg

SEQ ID NO: 1417069 - RNA, 19 nt, Homo sapiens
  misc_RNA (1)...(19): siRNA sense strand
gaacaacaggcugauaguu

SEQ ID NO: 1417070 - RNA, 19 nt, Homo sapiens
  misc_RNA (1)...(19): siRNA sense strand
gauguucucucugauuaug

SEQ ID NO: 1417071 - RNA, 19 nt, Homo sapiens
  misc_RNA (1)...(19): siRNA sense strand
gcauuuaucauucacauca

SEQ ID NO: 1417072 - RNA, 19 nt, Homo sapiens
  misc_RNA (1)...(19): siRNA sense strand
ggaugcagcuauuuauuuu

SEQ ID NO: 1417073 - RNA, 19 nt, Homo sapiens
  misc_RNA (1)...(19): siRNA sense strand
gaacuugaccggaaugaac

SEQ ID NO: 1417074 - RNA, 19 nt, Homo sapiens
  misc_RNA (1)...(19): siRNA sense strand
ggauggugcuuguugacuu

SEQ ID NO: 1417075 - RNA, 19 nt, Homo sapiens
  misc_RNA (1)...(19): siRNA sense strand
acaaaggcauucaucauag

SEQ ID NO: 1417076 - RNA, 19 nt, Homo sapiens
  misc_RNA (1)...(19): siRNA sense strand
acacucaguugaaguauca

SEQ ID NO: 1417077 - RNA, 19 nt, Homo sapiens
  misc_RNA (1)...(19): siRNA sense strand
gaaagugacaagcauuuua

SEQ ID NO: 1417078 - RNA, 19 nt, Homo sapiens
  misc_RNA (1)...(19): siRNA sense strand
gacauugugugggaaauug

SEQ ID NO: 1417079 - RNA, 19 nt, Homo sapiens
  misc_RNA (1)...(19): siRNA sense strand
ggaaguuuaccacuacaaa

SEQ ID NO: 1417080 - RNA, 19 nt, Homo sapiens
  misc_RNA (1)...(19): siRNA sense strand
gcucgaauauucccaagag

SEQ ID NO: 1417081 - RNA, 19 nt, Homo sapiens
  misc_RNA (1)...(19): siRNA sense strand
gaaagaugacaaaggcauu

SEQ ID NO: 1417082 - RNA, 19 nt, Homo sapiens
  misc_RNA (1)...(19): siRNA sense strand
uugauguucucucugauua

SEQ ID NO: 1417083 - RNA, 19 nt, Homo sapiens
  misc_RNA (1)...(19): siRNA sense strand
aaagagguauuggaagauu

SEQ ID NO: 1417084 - RNA, 19 nt, Homo sapiens
  misc_RNA (1)...(19): siRNA sense strand
gggagacccuacaagaaga

SEQ ID NO: 1417085 - RNA, 19 nt, Homo sapiens
  misc_RNA (1)...(19): siRNA sense strand
gaauccuaaugccaucaua

SEQ ID NO: 1417086 - RNA, 19 nt, Homo sapiens
  misc_RNA (1)...(19): siRNA sense strand
agaagaucuugcagcauua

SEQ ID NO: 1417087 - RNA, 19 nt, Homo sapiens
  misc_RNA (1)...(19): siRNA sense strand
caucauagaaagcuuaaga

SEQ ID NO: 1417088 - RNA, 19 nt, Homo sapiens
  misc_RNA (1)...(19): siRNA sense strand
gaagaauuuucccgcuuua

SEQ ID NO: 1417089 - RNA, 19 nt, Homo sapiens
  misc_RNA (1)...(19): siRNA sense strand
caguggauaucaagcuuaa

SEQ ID NO: 1417090 - RNA, 19 nt, Homo sapiens
  misc_RNA (1)...(19): siRNA sense strand
gcauugaagcuauaagaga

SEQ ID NO: 1417091 - RNA, 19 nt, Homo sapiens
  misc_RNA (1)...(19): siRNA sense strand
gaaagcucuucccaaugaa

SEQ ID NO: 1417092 - RNA, 19 nt, Homo sapiens
  misc_RNA (1)...(19): siRNA sense strand
ugacuuaccaggugugauu

SEQ ID NO: 1417093 - RNA, 19 nt, Homo sapiens
  misc_RNA (1)...(19): siRNA sense strand
ggaaaugauugcccaagcu

SEQ ID NO: 1417094 - RNA, 19 nt, Homo sapiens
  misc_RNA (1)...(19): siRNA sense strand
acacagcucuggaauaaaa

SEQ ID NO: 1417095 - RNA, 19 nt, Homo sapiens
  misc_RNA (1)...(19): siRNA sense strand
ugugggaaauugaugagua

SEQ ID NO: 1417096 - RNA, 19 nt, Homo sapiens
  misc_RNA (1)...(19): siRNA sense strand
cuaaaccauuguaaccuuu

SEQ ID NO: 1417097 - RNA, 19 nt, Homo sapiens
  misc_RNA (1)...(19): siRNA sense strand
agagcaugaugacauauuu

SEQ ID NO: 1417098 - RNA, 19 nt, Homo sapiens
  misc_RNA (1)...(19): siRNA sense strand
caacucaugugauugaaaa

SEQ ID NO: 1417099 - RNA, 19 nt, Homo sapiens
  misc_RNA (1)...(19): siRNA sense strand
caagugacuacaagaaauu

SEQ ID NO: 1417100 - RNA, 19 nt, Homo sapiens
  misc_RNA (1)...(19): siRNA sense strand
gcuaaaggcacaccaagug

SEQ ID NO: 1417101 - RNA, 19 nt, Homo sapiens
  misc_RNA (1)...(19): siRNA sense strand
gagaauaugaagaagaguu

SEQ ID NO: 1417102 - RNA, 19 nt, Homo sapiens
  misc_RNA (1)...(19): siRNA sense strand
gcaguauuguuacagacuu

SEQ ID NO: 1417103 - RNA, 19 nt, Homo sapiens
  misc_RNA (1)...(19): siRNA sense strand
uggaaagacuaguguguug

SEQ ID NO: 1417104 - RNA, 19 nt, Homo sapiens
  misc_RNA (1)...(19): siRNA sense strand
ggagaacaaagaauugaga

SEQ ID NO: 1417105 - RNA, 19 nt, Homo sapiens
  misc_RNA (1)...(19): siRNA sense strand
gaaagagcaugaugacaua

SEQ ID NO: 1417106 - RNA, 19 nt, Homo sapiens
  misc_RNA (1)...(19): siRNA sense strand
gaacagcucugaaagcauu

SEQ ID NO: 1417107 - RNA, 19 nt, Homo sapiens
  misc_RNA (1)...(19): siRNA sense strand
gagaagauguugaaaugua

SEQ ID NO: 1417108 - RNA, 19 nt, Homo sapiens
  misc_RNA (1)...(19): siRNA sense strand
gaggacagcuugaggguua

SEQ ID NO: 1417109 - RNA, 19 nt, Homo sapiens
  misc_RNA (1)...(19): siRNA sense strand
gaaacugaauggaagaaua

SEQ ID NO: 1417110 - RNA, 19 nt, Homo sapiens
  misc_RNA (1)...(19): siRNA sense strand
aaagaaggcuguaccguua

SEQ ID NO: 1417111 - RNA, 19 nt, Homo sapiens
  misc_RNA (1)...(19): siRNA sense strand
aaacacagcucuggaauaa

SEQ ID NO: 1417112 - RNA, 19 nt, Homo sapiens
  misc_RNA (1)...(19): siRNA sense strand
gaaauagaacuucgaauga

SEQ ID NO: 1417113 - RNA, 19 nt, Homo sapiens
  misc_RNA (1)...(19): siRNA sense strand
gcaaugauguggucuuguu

SEQ ID NO: 1417114 - RNA, 19 nt, Homo sapiens
  misc_RNA (1)...(19): siRNA sense strand
gaccauauccuuaaaugua

SEQ ID NO: 1417115 - RNA, 19 nt, Homo sapiens
  misc_RNA (1)...(19): siRNA sense strand
gcaaugggaugcagcuauu

SEQ ID NO: 1417116 - RNA, 19 nt, Homo sapiens
  misc_RNA (1)...(19): siRNA sense strand
cagcuuaucuugcaaguga

SEQ ID NO: 1417117 - RNA, 19 nt, Homo sapiens
  misc_RNA (1)...(19): siRNA sense strand
gaaguuaggcgauuagaga

SEQ ID NO: 1417118 - RNA, 19 nt, Homo sapiens
  misc_RNA (1)...(19): siRNA sense strand
gacaaaggcauucaucaua

SEQ ID NO: 1417119 - RNA, 19 nt, Homo sapiens
  misc_RNA (1)...(19): siRNA sense strand
gauccaagcuugauuaagg

SEQ ID NO: 1417120 - RNA, 19 nt, Homo sapiens
  misc_RNA (1)...(19): siRNA sense strand
ggaagaaaguauuaaacga

SEQ ID NO: 1417121 - RNA, 19 nt, Homo sapiens
  misc_RNA (1)...(19): siRNA sense strand
aaacagcucuaaaccauug

SEQ ID NO: 1417122 - RNA, 19 nt, Homo sapiens
  misc_RNA (1)...(19): siRNA sense strand
ugacauguauucugaaguu

SEQ ID NO: 1417123 - RNA, 19 nt, Homo sapiens
  misc_RNA (1)...(19): siRNA sense strand
gaagaccucaagaaaguua

SEQ ID NO: 1417124 - RNA, 19 nt, Homo sapiens
  misc_RNA (1)...(19): siRNA sense strand
gcugaacgcaguauuguua

SEQ ID NO: 1417125 - RNA, 19 nt, Homo sapiens
  misc_RNA (1)...(19): siRNA sense strand
gauggugcuuguugacuua

SEQ ID NO: 1417126 - RNA, 19 nt, Homo sapiens
  misc_RNA (1)...(19): siRNA sense strand
ggacauccuuucagcaguu

SEQ ID NO: 1417127 - RNA, 19 nt, Homo sapiens
  misc_RNA (1)...(19): siRNA sense strand
gaaacacagcucuggaaua

SEQ ID NO: 1417128 - RNA, 19 nt, Homo sapiens
  misc_RNA (1)...(19): siRNA sense strand
ggaaauccuucaacaaucu

SEQ ID NO: 1417129 - RNA, 19 nt, Homo sapiens
  misc_RNA (1)...(19): siRNA sense strand
gcagauaauugaaggaaag

SEQ ID NO: 1417130 - RNA, 19 nt, Homo sapiens
  misc_RNA (1)...(19): siRNA sense strand
ugaaagcauugaagcuaua

SEQ ID NO: 1417131 - RNA, 19 nt, Homo sapiens
  misc_RNA (1)...(19): siRNA sense strand
ggaaagagcaugaugacau

SEQ ID NO: 1417132 - RNA, 19 nt, Homo sapiens
  misc_RNA (1)...(19): siRNA sense strand
ucacgaagcauuuaucauu

SEQ ID NO: 1417133 - RNA, 19 nt, Homo sapiens
  misc_RNA (1)...(19): siRNA sense strand
gcaguucucuucucugaca

SEQ ID NO: 1417134 - RNA, 19 nt, Homo sapiens
  misc_RNA (1)...(19): siRNA sense strand
uuaaagagguauuggaaga

SEQ ID NO: 1417135 - RNA, 19 nt, Homo sapiens
  misc_RNA (1)...(19): siRNA sense strand
aaacugaaauucucuccaa

SEQ ID NO: 1417136 - RNA, 19 nt, Homo sapiens
  misc_RNA (1)...(19): siRNA sense strand
ggcaacaacuuacaaauac

SEQ ID NO: 1417137 - RNA, 19 nt, Homo sapiens
  misc_RNA (1)...(19): siRNA sense strand
gaagaccgauccauaucug

SEQ ID NO: 1417138 - RNA, 19 nt, Homo sapiens
  misc_RNA (1)...(19): siRNA sense strand
ugaccggaaugaacuauuu

SEQ ID NO: 1417139 - RNA, 19 nt, Homo sapiens
  misc_RNA (1)...(19): siRNA sense strand
caaugaaagcuuuagguua

SEQ ID NO: 1417140 - RNA, 19 nt, Homo sapiens
  misc_RNA (1)...(19): siRNA sense strand
ggaccuuagugaauauaaa

SEQ ID NO: 1417141 - RNA, 19 nt, Homo sapiens
  misc_RNA (1)...(19): siRNA sense strand
ggaaauugaugaguauauc

SEQ ID NO: 1417142 - RNA, 19 nt, Homo sapiens
  misc_RNA (1)...(19): siRNA sense strand
cggaagaccucaagaaagu

SEQ ID NO: 1417143 - RNA, 19 nt, Homo sapiens
  misc_RNA (1)...(19): siRNA sense strand
gcaucaaguuuauagaaga

SEQ ID NO: 1417144 - RNA, 19 nt, Homo sapiens
  misc_RNA (1)...(19): siRNA sense strand
gcacccagcuuaucuugca

SEQ ID NO: 1417145 - RNA, 19 nt, Homo sapiens
  misc_RNA (1)...(19): siRNA sense strand
ggaagaaucggacccaaga

SEQ ID NO: 1417146 - RNA, 19 nt, Homo sapiens
  misc_RNA (1)...(19): siRNA sense strand
ugaaauccuugaugaaguu

SEQ ID NO: 1417147 - RNA, 19 nt, Homo sapiens
  misc_RNA (1)...(19): siRNA sense strand
gcugauaguuucaaagcaa

SEQ ID NO: 1417148 - RNA, 19 nt, Homo sapiens
  misc_RNA (1)...(19): siRNA sense strand
gagaccauauccuuaaaug

SEQ ID NO: 1417149 - RNA, 19 nt, Homo sapiens
  misc_RNA (1)...(19): siRNA sense strand
uaaagaggccguuaaggaa

SEQ ID NO: 1417150 - RNA, 19 nt, Homo sapiens
  misc_RNA (1)...(19): siRNA sense strand
guagauccaagcuugauua

SEQ ID NO: 1417151 - RNA, 19 nt, Homo sapiens
  misc_RNA (1)...(19): siRNA sense strand
uggagaagauguugaaaug

SEQ ID NO: 1417152 - RNA, 19 nt, Homo sapiens
  misc_RNA (1)...(19): siRNA sense strand
cagcaguucucuucucuga

SEQ ID NO: 1417153 - RNA, 19 nt, Homo sapiens
  misc_RNA (1)...(19): siRNA sense strand
gaugacacguucuccaguu

SEQ ID NO: 1417154 - RNA, 19 nt, Homo sapiens
  misc_RNA (1)...(19): siRNA sense strand
caaaggcauucaucauaga

SEQ ID NO: 1417155 - RNA, 19 nt, Homo sapiens
  misc_RNA (1)...(19): siRNA sense strand
gauaugauaccggaccuua

SEQ ID NO: 1417156 - RNA, 19 nt, Homo sapiens
  misc_RNA (1)...(19): siRNA sense strand
gggaugcagcuauuuauuu

SEQ ID NO: 1417157 - RNA, 19 nt, Homo sapiens
  misc_RNA (1)...(19): siRNA sense strand
ccaagugacuacaagaaau

SEQ ID NO: 1417158 - RNA, 19 nt, Homo sapiens
  misc_RNA (1)...(19): siRNA sense strand
ugauugacauguauucuga

SEQ ID NO: 1417159 - RNA, 19 nt, Homo sapiens
  misc_RNA (1)...(19): siRNA sense strand
uaauaaagcaguagagguu

SEQ ID NO: 1417160 - RNA, 19 nt, Homo sapiens
  misc_RNA (1)...(19): siRNA sense strand
cauugaagcuauaagagaa

SEQ ID NO: 1417161 - RNA, 19 nt, Homo sapiens
  misc_RNA (1)...(19): siRNA sense strand
ggauucagcagauaauuga

SEQ ID NO: 1417162 - RNA, 19 nt, Homo sapiens
  misc_RNA (1)...(19): siRNA sense strand
aaacuucgcuaucucauac

SEQ ID NO: 1417163 - RNA, 19 nt, Homo sapiens
  misc_RNA (1)...(19): siRNA sense strand
acaaugaaaccaagaauga

SEQ ID NO: 1417164 - RNA, 19 nt, Homo sapiens
  misc_RNA (1)...(19): siRNA sense strand
caaauggacccucauggaa

SEQ ID NO: 1417165 - RNA, 19 nt, Homo sapiens
  misc_RNA (1)...(19): siRNA sense strand
ugaaauagaacuucgaaug

SEQ ID NO: 1417166 - RNA, 19 nt, Homo sapiens
  misc_RNA (1)...(19): siRNA sense strand
uaccggaccuuagugaaua

SEQ ID NO: 1417167 - RNA, 19 nt, Homo sapiens
  misc_RNA (1)...(19): siRNA sense strand
gggaacagcucugaaagca

SEQ ID NO: 1417168 - RNA, 19 nt, Homo sapiens
  misc_RNA (1)...(19): siRNA sense strand
ugacaaaccuuccuuuacg

SEQ ID NO: 1417169 - RNA, 19 nt, Homo sapiens
  misc_RNA (1)...(19): siRNA sense strand
gaacaacaggcugauaguu

SEQ ID NO: 1417170 - RNA, 19 nt, Homo sapiens
  misc_RNA (1)...(19): siRNA sense strand
gauguucucucugauuaug

SEQ ID NO: 1417171 - RNA, 19 nt, Homo sapiens
  misc_RNA (1)...(19): siRNA sense strand
gcauuuaucauucacauca

SEQ ID NO: 1417172 - RNA, 19 nt, Homo sapiens
  misc_RNA (1)...(19): siRNA sense strand
ggaugcagcuauuuauuuu

SEQ ID NO: 1417173 - RNA, 19 nt, Homo sapiens
  misc_RNA (1)...(19): siRNA sense strand
gaacuugaccggaaugaac

SEQ ID NO: 1417174 - RNA, 19 nt, Homo sapiens
  misc_RNA (1)...(19): siRNA sense strand
ggauggugcuuguugacuu

SEQ ID NO: 1417175 - RNA, 19 nt, Homo sapiens
  misc_RNA (1)...(19): siRNA sense strand
acaaaggcauucaucauag

SEQ ID NO: 1417176 - RNA, 19 nt, Homo sapiens
  misc_RNA (1)...(19): siRNA sense strand
acacucaguugaaguauca

SEQ ID NO: 1417177 - RNA, 19 nt, Homo sapiens
  misc_RNA (1)...(19): siRNA sense strand
gaaagugacaagcauuuua

SEQ ID NO: 1417178 - RNA, 19 nt, Homo sapiens
  misc_RNA (1)...(19): siRNA sense strand
gacauugugugggaaauug

SEQ ID NO: 1417179 - RNA, 19 nt, Homo sapiens
  misc_RNA (1)...(19): siRNA sense strand
ggaaguuuaccacuacaaa

SEQ ID NO: 1417180 - RNA, 19 nt, Homo sapiens
  misc_RNA (1)...(19): siRNA sense strand
gcucgaauauucccaagag

SEQ ID NO: 1417181 - RNA, 19 nt, Homo sapiens
  misc_RNA (1)...(19): siRNA sense strand
gaaagaugacaaaggcauu

SEQ ID NO: 1417182 - RNA, 19 nt, Homo sapiens
  misc_RNA (1)...(19): siRNA sense strand
uugauguucucucugauua

SEQ ID NO: 1417183 - RNA, 19 nt, Homo sapiens
  misc_RNA (1)...(19): siRNA sense strand
aaagagguauuggaagauu

SEQ ID NO: 1417184 - RNA, 19 nt, Homo sapiens
  misc_RNA (1)...(19): siRNA sense strand
gggagacccuacaagaaga

SEQ ID NO: 1417185 - RNA, 19 nt, Homo sapiens
  misc_RNA (1)...(19): siRNA sense strand
gaauccuaaugccaucaua

SEQ ID NO: 1417186 - RNA, 19 nt, Homo sapiens
  misc_RNA (1)...(19): siRNA sense strand
agaagaucuugcagcauua

SEQ ID NO: 1417187 - RNA, 19 nt, Homo sapiens
  misc_RNA (1)...(19): siRNA sense strand
caucauagaaagcuuaaga

SEQ ID NO: 1417188 - RNA, 19 nt, Homo sapiens
  misc_RNA (1)...(19): siRNA sense strand
gaagaauuuucccgcuuua

SEQ ID NO: 1417189 - RNA, 19 nt, Homo sapiens
  misc_RNA (1)...(19): siRNA sense strand
caguggauaucaagcuuaa

SEQ ID NO: 1417190 - RNA, 19 nt, Homo sapiens
  misc_RNA (1)...(19): siRNA sense strand
gcauugaagcuauaagaga

SEQ ID NO: 1417191 - RNA, 19 nt, Homo sapiens
  misc_RNA (1)...(19): siRNA sense strand
gaaagcucuucccaaugaa

SEQ ID NO: 1417192 - RNA, 19 nt, Homo sapiens
  misc_RNA (1)...(19): siRNA sense strand
ugacuuaccaggugugauu

SEQ ID NO: 1417193 - RNA, 19 nt, Homo sapiens
  misc_RNA (1)...(19): siRNA sense strand
ggaaaugauugcccaagcu

SEQ ID NO: 1417194 - RNA, 19 nt, Homo sapiens
  misc_RNA (1)...(19): siRNA sense strand
acacagcucuggaauaaaa

SEQ ID NO: 1417195 - RNA, 19 nt, Homo sapiens
  misc_RNA (1)...(19): siRNA sense strand
ugugggaaauugaugagua

SEQ ID NO: 1417196 - RNA, 19 nt, Homo sapiens
  misc_RNA (1)...(19): siRNA sense strand
cuaaaccauuguaaccuuu

SEQ ID NO: 1417197 - RNA, 19 nt, Homo sapiens
  misc_RNA (1)...(19): siRNA sense strand
agagcaugaugacauauuu

SEQ ID NO: 1417198 - RNA, 19 nt, Homo sapiens
  misc_RNA (1)...(19): siRNA sense strand
caacucaugugauugaaaa

SEQ ID NO: 1417199 - RNA, 19 nt, Homo sapiens
  misc_RNA (1)...(19): siRNA sense strand
caagugacuacaagaaauu

SEQ ID NO: 1417200 - RNA, 19 nt, Homo sapiens
  misc_RNA (1)...(19): siRNA sense strand
gcuaaaggcacaccaagug

SEQ ID NO: 1417201 - RNA, 19 nt, Homo sapiens
  misc_RNA (1)...(19): siRNA sense strand
gagaauaugaagaagaguu

SEQ ID NO: 1417202 - RNA, 19 nt, Homo sapiens
  misc_RNA (1)...(19): siRNA sense strand
gcaguauuguuacagacuu

SEQ ID NO: 1417203 - RNA, 19 nt, Homo sapiens
  misc_RNA (1)...(19): siRNA sense strand
uggaaagacuaguguguug

SEQ ID NO: 1417204 - RNA, 19 nt, Homo sapiens
  misc_RNA (1)...(19): siRNA sense strand
ggagaacaaagaauugaga

SEQ ID NO: 1417205 - RNA, 19 nt, Homo sapiens
  misc_RNA (1)...(19): siRNA sense strand
gaaagagcaugaugacaua

SEQ ID NO: 1417206 - RNA, 19 nt, Homo sapiens
  misc_RNA (1)...(19): siRNA sense strand
gaacagcucugaaagcauu

SEQ ID NO: 1417207 - RNA, 19 nt, Homo sapiens
  misc_RNA (1)...(19): siRNA sense strand
gagaagauguugaaaugua

SEQ ID NO: 1417208 - RNA, 19 nt, Homo sapiens
  misc_RNA (1)...(19): siRNA sense strand
gaggacagcuugaggguua

SEQ ID NO: 1417209 - RNA, 19 nt, Homo sapiens
  misc_RNA (1)...(19): siRNA sense strand
gaaacugaauggaagaaua

SEQ ID NO: 1417210 - RNA, 19 nt, Homo sapiens
  misc_RNA (1)...(19): siRNA sense strand
aaagaaggcuguaccguua

SEQ ID NO: 1417211 - RNA, 19 nt, Homo sapiens
  misc_RNA (1)...(19): siRNA sense strand
aaacacagcucuggaauaa

SEQ ID NO: 1417212 - RNA, 19 nt, Homo sapiens
  misc_RNA (1)...(19): siRNA sense strand
gaaauagaacuucgaauga

SEQ ID NO: 1417213 - RNA, 19 nt, Homo sapiens
  misc_RNA (1)...(19): siRNA sense strand
gcaaugauguggucuuguu

SEQ ID NO: 1417214 - RNA, 19 nt, Homo sapiens
  misc_RNA (1)...(19): siRNA sense strand
gaccauauccuuaaaugua

SEQ ID NO: 1417215 - RNA, 19 nt, Homo sapiens
  misc_RNA (1)...(19): siRNA sense strand
gcaaugggaugcagcuauu

SEQ ID NO: 1417216 - RNA, 19 nt, Homo sapiens
  misc_RNA (1)...(19): siRNA sense strand
cagcuuaucuugcaaguga

SEQ ID NO: 1417217 - RNA, 19 nt, Homo sapiens
  misc_RNA (1)...(19): siRNA sense strand
gaaguuaggcgauuagaga

SEQ ID NO: 1417218 - RNA, 19 nt, Homo sapiens
  misc_RNA (1)...(19): siRNA sense strand
gacaaaggcauucaucaua

SEQ ID NO: 1417219 - RNA, 19 nt, Homo sapiens
  misc_RNA (1)...(19): siRNA sense strand
gauccaagcuugauuaagg

SEQ ID NO: 1417220 - RNA, 19 nt, Homo sapiens
  misc_RNA (1)...(19): siRNA sense strand
ggaagaaaguauuaaacga

SEQ ID NO: 1417221 - RNA, 19 nt, Homo sapiens
  misc_RNA (1)...(19): siRNA sense strand
aaacagcucuaaaccauug

SEQ ID NO: 1417222 - RNA, 19 nt, Homo sapiens
  misc_RNA (1)...(19): siRNA sense strand
ugacauguauucugaaguu

SEQ ID NO: 1417223 - RNA, 19 nt, Homo sapiens
  misc_RNA (1)...(19): siRNA sense strand
gaagaccucaagaaaguua

SEQ ID NO: 1417224 - RNA, 19 nt, Homo sapiens
  misc_RNA (1)...(19): siRNA sense strand
gcugaacgcaguauuguua

SEQ ID NO: 1417225 - RNA, 19 nt, Homo sapiens
  misc_RNA (1)...(19): siRNA sense strand
gauggugcuuguugacuua

SEQ ID NO: 1417226 - RNA, 19 nt, Homo sapiens
  misc_RNA (1)...(19): siRNA sense strand
ggacauccuuucagcaguu

SEQ ID NO: 1417227 - RNA, 19 nt, Homo sapiens
  misc_RNA (1)...(19): siRNA sense strand
gaaacacagcucuggaaua

SEQ ID NO: 1417228 - RNA, 19 nt, Homo sapiens
  misc_RNA (1)...(19): siRNA sense strand
ggaaauccuucaacaaucu

SEQ ID NO: 1417229 - RNA, 19 nt, Homo sapiens
  misc_RNA (1)...(19): siRNA sense strand
gcagauaauugaaggaaag

SEQ ID NO: 1417230 - RNA, 19 nt, Homo sapiens
  misc_RNA (1)...(19): siRNA sense strand
ugaaagcauugaagcuaua

SEQ ID NO: 1417231 - RNA, 19 nt, Homo sapiens
  misc_RNA (1)...(19): siRNA sense strand
ggaaagagcaugaugacau

SEQ ID NO: 1417232 - RNA, 19 nt, Homo sapiens
  misc_RNA (1)...(19): siRNA sense strand
ucacgaagcauuuaucauu

SEQ ID NO: 1417233 - RNA, 19 nt, Homo sapiens
  misc_RNA (1)...(19): siRNA sense strand
gcaguucucuucucugaca

SEQ ID NO: 1417234 - RNA, 19 nt, Homo sapiens
  misc_RNA (1)...(19): siRNA sense strand
uuaaagagguauuggaaga

SEQ ID NO: 1417235 - RNA, 19 nt, Homo sapiens
  misc_RNA (1)...(19): siRNA sense strand
aaacugaaauucucuccaa

SEQ ID NO: 1417236 - RNA, 19 nt, Homo sapiens
  misc_RNA (1)...(19): siRNA sense strand
ggcaacaacuuacaaauac

SEQ ID NO: 1417237 - RNA, 19 nt, Homo sapiens
  misc_RNA (1)...(19): siRNA sense strand
gaagaccgauccauaucug

SEQ ID NO: 1417238 - RNA, 19 nt, Homo sapiens
  misc_RNA (1)...(19): siRNA sense strand
ugaccggaaugaacuauuu

SEQ ID NO: 1417239 - RNA, 19 nt, Homo sapiens
  misc_RNA (1)...(19): siRNA sense strand
caaugaaagcuuuagguua

SEQ ID NO: 1417240 - RNA, 19 nt, Homo sapiens
  misc_RNA (1)...(19): siRNA sense strand
ggaccuuagugaauauaaa

SEQ ID NO: 1417241 - RNA, 19 nt, Homo sapiens
  misc_RNA (1)...(19): siRNA sense strand
ggaaauugaugaguauauc

SEQ ID NO: 1417242 - RNA, 19 nt, Homo sapiens
  misc_RNA (1)...(19): siRNA sense strand
cggaagaccucaagaaagu

SEQ ID NO: 1417243 - RNA, 19 nt, Homo sapiens
  misc_RNA (1)...(19): siRNA sense strand
gcaucaaguuuauagaaga

SEQ ID NO: 1417244 - RNA, 19 nt, Homo sapiens
  misc_RNA (1)...(19): siRNA sense strand
gcacccagcuuaucuugca

SEQ ID NO: 1417245 - RNA, 19 nt, Homo sapiens
  misc_RNA (1)...(19): siRNA sense strand
ggaagaaucggacccaaga

SEQ ID NO: 1417246 - RNA, 19 nt, Homo sapiens
  misc_RNA (1)...(19): siRNA sense strand
ugaaauccuugaugaaguu

SEQ ID NO: 1417247 - RNA, 19 nt, Homo sapiens
  misc_RNA (1)...(19): siRNA sense strand
gcugauaguuucaaagcaa

SEQ ID NO: 1417248 - RNA, 19 nt, Homo sapiens
  misc_RNA (1)...(19): siRNA sense strand
gagaccauauccuuaaaug

SEQ ID NO: 1417249 - RNA, 19 nt, Homo sapiens
  misc_RNA (1)...(19): siRNA sense strand
uaaagaggccguuaaggaa

SEQ ID NO: 1417250 - RNA, 19 nt, Homo sapiens
  misc_RNA (1)...(19): siRNA sense strand
guagauccaagcuugauua

SEQ ID NO: 1417251 - RNA, 19 nt, Homo sapiens
  misc_RNA (1)...(19): siRNA sense strand
uggagaagauguugaaaug

SEQ ID NO: 1417252 - RNA, 19 nt, Homo sapiens
  misc_RNA (1)...(19): siRNA sense strand
cagcaguucucuucucuga

SEQ ID NO: 1417253 - RNA, 19 nt, Homo sapiens
  misc_RNA (1)...(19): siRNA sense strand
gaugacacguucuccaguu

SEQ ID NO: 1417254 - RNA, 19 nt, Homo sapiens
  misc_RNA (1)...(19): siRNA sense strand
caaaggcauucaucauaga

SEQ ID NO: 1417255 - RNA, 19 nt, Homo sapiens
  misc_RNA (1)...(19): siRNA sense strand
gauaugauaccggaccuua

SEQ ID NO: 1417256 - RNA, 19 nt, Homo sapiens
  misc_RNA (1)...(19): siRNA sense strand
gggaugcagcuauuuauuu

SEQ ID NO: 1417257 - RNA, 19 nt, Homo sapiens
  misc_RNA (1)...(19): siRNA sense strand
ccaagugacuacaagaaau

SEQ ID NO: 1417258 - RNA, 19 nt, Homo sapiens
  misc_RNA (1)...(19): siRNA sense strand
ugauugacauguauucuga

SEQ ID NO: 1417259 - RNA, 19 nt, Homo sapiens
  misc_RNA (1)...(19): siRNA sense strand
uaauaaagcaguagagguu

SEQ ID NO: 1417260 - RNA, 19 nt, Homo sapiens
  misc_RNA (1)...(19): siRNA sense strand
cauugaagcuauaagagaa

SEQ ID NO: 1417261 - RNA, 19 nt, Homo sapiens
  misc_RNA (1)...(19): siRNA sense strand
ggauucagcagauaauuga

SEQ ID NO: 1417262 - RNA, 19 nt, Homo sapiens
  misc_RNA (1)...(19): siRNA sense strand
aaacuucgcuaucucauac

SEQ ID NO: 1417263 - RNA, 19 nt, Homo sapiens
  misc_RNA (1)...(19): siRNA sense strand
acaaugaaaccaagaauga

SEQ ID NO: 1417264 - RNA, 19 nt, Homo sapiens
  misc_RNA (1)...(19): siRNA sense strand
caaauggacccucauggaa

SEQ ID NO: 1417265 - RNA, 19 nt, Homo sapiens
  misc_RNA (1)...(19): siRNA sense strand
ugaaauagaacuucgaaug

SEQ ID NO: 1417266 - RNA, 19 nt, Homo sapiens
  misc_RNA (1)...(19): siRNA sense strand
uaccggaccuuagugaaua

SEQ ID NO: 1417267 - RNA, 19 nt, Homo sapiens
  misc_RNA (1)...(19): siRNA sense strand
gggaacagcucugaaagca

SEQ ID NO: 1417268 - RNA, 19 nt, Homo sapiens
  misc_RNA (1)...(19): siRNA sense strand
ugacaaaccuuccuuuacg

SEQ ID NO: 1417269 - RNA, 19 nt, Homo sapiens
  misc_RNA (1)...(19): siRNA sense strand
gaacaacaggcugauaguu

SEQ ID NO: 1417270 - RNA, 19 nt, Homo sapiens
  misc_RNA (1)...(19): siRNA sense strand
gauguucucucugauuaug

SEQ ID NO: 1417271 - RNA, 19 nt, Homo sapiens
  misc_RNA (1)...(19): siRNA sense strand
gcauuuaucauucacauca

SEQ ID NO: 1417272 - RNA, 19 nt, Homo sapiens
  misc_RNA (1)...(19): siRNA sense strand
ggaugcagcuauuuauuuu

SEQ ID NO: 1417273 - RNA, 19 nt, Homo sapiens
  misc_RNA (1)...(19): siRNA sense strand
gaacuugaccggaaugaac

SEQ ID NO: 1417274 - RNA, 19 nt, Homo sapiens
  misc_RNA (1)...(19): siRNA sense strand
ggauggugcuuguugacuu

SEQ ID NO: 1417275 - RNA, 19 nt, Homo sapiens
  misc_RNA (1)...(19): siRNA sense strand
acaaaggcauucaucauag

SEQ ID NO: 1417276 - RNA, 19 nt, Homo sapiens
  misc_RNA (1)...(19): siRNA sense strand
acacucaguugaaguauca

SEQ ID NO: 1417277 - RNA, 19 nt, Homo sapiens
  misc_RNA (1)...(19): siRNA sense strand
gaaagugacaagcauuuua

SEQ ID NO: 1417278 - RNA, 19 nt, Homo sapiens
  misc_RNA (1)...(19): siRNA sense strand
gacauugugugggaaauug

SEQ ID NO: 1417279 - RNA, 19 nt, Homo sapiens
  misc_RNA (1)...(19): siRNA sense strand
ggaaguuuaccacuacaaa

SEQ ID NO: 1417280 - RNA, 19 nt, Homo sapiens
  misc_RNA (1)...(19): siRNA sense strand
gcucgaauauucccaagag

SEQ ID NO: 1417281 - RNA, 19 nt, Homo sapiens
  misc_RNA (1)...(19): siRNA sense strand
gaaagaugacaaaggcauu

SEQ ID NO: 1417282 - RNA, 19 nt, Homo sapiens
  misc_RNA (1)...(19): siRNA sense strand
uugauguucucucugauua

SEQ ID NO: 1417283 - RNA, 19 nt, Homo sapiens
  misc_RNA (1)...(19): siRNA sense strand
aaagagguauuggaagauu

SEQ ID NO: 1417284 - RNA, 19 nt, Homo sapiens
  misc_RNA (1)...(19): siRNA sense strand
gggagacccuacaagaaga

SEQ ID NO: 1417285 - RNA, 19 nt, Homo sapiens
  misc_RNA (1)...(19): siRNA sense strand
gaauccuaaugccaucaua

SEQ ID NO: 1417286 - RNA, 19 nt, Homo sapiens
  misc_RNA (1)...(19): siRNA sense strand
agaagaucuugcagcauua

SEQ ID NO: 1417287 - RNA, 19 nt, Homo sapiens
  misc_RNA (1)...(19): siRNA sense strand
caucauagaaagcuuaaga

SEQ ID NO: 1417288 - RNA, 19 nt, Homo sapiens
  misc_RNA (1)...(19): siRNA sense strand
gaagaauuuucccgcuuua

SEQ ID NO: 1417289 - RNA, 19 nt, Homo sapiens
  misc_RNA (1)...(19): siRNA sense strand
caguggauaucaagcuuaa

SEQ ID NO: 1417290 - RNA, 19 nt, Homo sapiens
  misc_RNA (1)...(19): siRNA sense strand
gcauugaagcuauaagaga

SEQ ID NO: 1417291 - RNA, 19 nt, Homo sapiens
  misc_RNA (1)...(19): siRNA sense strand
gaaagcucuucccaaugaa

SEQ ID NO: 1417292 - RNA, 19 nt, Homo sapiens
  misc_RNA (1)...(19): siRNA sense strand
ugacuuaccaggugugauu

SEQ ID NO: 1417293 - RNA, 19 nt, Homo sapiens
  misc_RNA (1)...(19): siRNA sense strand
ggaaaugauugcccaagcu

SEQ ID NO: 1417294 - RNA, 19 nt, Homo sapiens
  misc_RNA (1)...(19): siRNA sense strand
acacagcucuggaauaaaa

SEQ ID NO: 1417295 - RNA, 19 nt, Homo sapiens
  misc_RNA (1)...(19): siRNA sense strand
ugugggaaauugaugagua

SEQ ID NO: 1417296 - RNA, 19 nt, Homo sapiens
  misc_RNA (1)...(19): siRNA sense strand
cuaaaccauuguaaccuuu

SEQ ID NO: 1417297 - RNA, 19 nt, Homo sapiens
  misc_RNA (1)...(19): siRNA sense strand
agagcaugaugacauauuu

SEQ ID NO: 1417298 - RNA, 19 nt, Homo sapiens
  misc_RNA (1)...(19): siRNA sense strand
caacucaugugauugaaaa

SEQ ID NO: 1417299 - RNA, 19 nt, Homo sapiens
  misc_RNA (1)...(19): siRNA sense strand
caagugacuacaagaaauu

SEQ ID NO: 1417300 - RNA, 19 nt, Homo sapiens
  misc_RNA (1)...(19): siRNA sense strand
gcuaaaggcacaccaagug

SEQ ID NO: 1417301 - RNA, 19 nt, Homo sapiens
  misc_RNA (1)...(19): siRNA sense strand
gagaauaugaagaagaguu

SEQ ID NO: 1417302 - RNA, 19 nt, Homo sapiens
  misc_RNA (1)...(19): siRNA sense strand
gcaguauuguuacagacuu

SEQ ID NO: 1417303 - RNA, 19 nt, Homo sapiens
  misc_RNA (1)...(19): siRNA sense strand
uggaaagacuaguguguug

SEQ ID NO: 1417304 - RNA, 19 nt, Homo sapiens
  misc_RNA (1)...(19): siRNA sense strand
ggagaacaaagaauugaga

SEQ ID NO: 1417305 - RNA, 19 nt, Homo sapiens
  misc_RNA (1)...(19): siRNA sense strand
gaaagagcaugaugacaua

SEQ ID NO: 1417306 - RNA, 19 nt, Homo sapiens
  misc_RNA (1)...(19): siRNA sense strand
gaacagcucugaaagcauu

SEQ ID NO: 1417307 - RNA, 19 nt, Homo sapiens
  misc_RNA (1)...(19): siRNA sense strand
gagaagauguugaaaugua

SEQ ID NO: 1417308 - RNA, 19 nt, Homo sapiens
  misc_RNA (1)...(19): siRNA sense strand
gaggacagcuugaggguua

SEQ ID NO: 1417309 - RNA, 19 nt, Homo sapiens
  misc_RNA (1)...(19): siRNA sense strand
gaaacugaauggaagaaua

SEQ ID NO: 1417310 - RNA, 19 nt, Homo sapiens
  misc_RNA (1)...(19): siRNA sense strand
aaagaaggcuguaccguua

SEQ ID NO: 1417311 - RNA, 19 nt, Homo sapiens
  misc_RNA (1)...(19): siRNA sense strand
aaacacagcucuggaauaa

SEQ ID NO: 1417312 - RNA, 19 nt, Homo sapiens
  misc_RNA (1)...(19): siRNA sense strand
gaaauagaacuucgaauga

SEQ ID NO: 1417313 - RNA, 19 nt, Homo sapiens
  misc_RNA (1)...(19): siRNA sense strand
gcaaugauguggucuuguu

SEQ ID NO: 1417314 - RNA, 19 nt, Homo sapiens
  misc_RNA (1)...(19): siRNA sense strand
gaccauauccuuaaaugua

SEQ ID NO: 1417315 - RNA, 19 nt, Homo sapiens
  misc_RNA (1)...(19): siRNA sense strand
gcaaugggaugcagcuauu

SEQ ID NO: 1417316 - RNA, 19 nt, Homo sapiens
  misc_RNA (1)...(19): siRNA sense strand
cagcuuaucuugcaaguga

SEQ ID NO: 1417317 - RNA, 19 nt, Homo sapiens
  misc_RNA (1)...(19): siRNA sense strand
gaaguuaggcgauuagaga

SEQ ID NO: 1417318 - RNA, 19 nt, Homo sapiens
  misc_RNA (1)...(19): siRNA sense strand
gacaaaggcauucaucaua

SEQ ID NO: 1417319 - RNA, 19 nt, Homo sapiens
  misc_RNA (1)...(19): siRNA sense strand
gauccaagcuugauuaagg

SEQ ID NO: 1417320 - RNA, 19 nt, Homo sapiens
  misc_RNA (1)...(19): siRNA sense strand
ggaagaaaguauuaaacga

SEQ ID NO: 1417321 - RNA, 19 nt, Homo sapiens
  misc_RNA (1)...(19): siRNA sense strand
aaacagcucuaaaccauug

SEQ ID NO: 1417322 - RNA, 19 nt, Homo sapiens
  misc_RNA (1)...(19): siRNA sense strand
ugacauguauucugaaguu

SEQ ID NO: 1417323 - RNA, 19 nt, Homo sapiens
  misc_RNA (1)...(19): siRNA sense strand
gaagaccucaagaaaguua

SEQ ID NO: 1417324 - RNA, 19 nt, Homo sapiens
  misc_RNA (1)...(19): siRNA sense strand
gcugaacgcaguauuguua

SEQ ID NO: 1417325 - RNA, 19 nt, Homo sapiens
  misc_RNA (1)...(19): siRNA sense strand
gauggugcuuguugacuua

SEQ ID NO: 1417326 - RNA, 19 nt, Homo sapiens
  misc_RNA (1)...(19): siRNA sense strand
ggacauccuuucagcaguu

SEQ ID NO: 1417327 - RNA, 19 nt, Homo sapiens
  misc_RNA (1)...(19): siRNA sense strand
gaaacacagcucuggaaua

SEQ ID NO: 1417328 - RNA, 19 nt, Homo sapiens
  misc_RNA (1)...(19): siRNA sense strand
ggaaauccuucaacaaucu

SEQ ID NO: 1417329 - RNA, 19 nt, Homo sapiens
  misc_RNA (1)...(19): siRNA sense strand
gcagauaauugaaggaaag

SEQ ID NO: 1417330 - RNA, 19 nt, Homo sapiens
  misc_RNA (1)...(19): siRNA sense strand
ugaaagcauugaagcuaua

SEQ ID NO: 1417331 - RNA, 19 nt, Homo sapiens
  misc_RNA (1)...(19): siRNA sense strand
ggaaagagcaugaugacau

SEQ ID NO: 1417332 - RNA, 19 nt, Homo sapiens
  misc_RNA (1)...(19): siRNA sense strand
ucacgaagcauuuaucauu

SEQ ID NO: 1417333 - RNA, 19 nt, Homo sapiens
  misc_RNA (1)...(19): siRNA sense strand
gcaguucucuucucugaca

SEQ ID NO: 1417334 - RNA, 19 nt, Homo sapiens
  misc_RNA (1)...(19): siRNA sense strand
uuaaagagguauuggaaga

SEQ ID NO: 1417335 - RNA, 19 nt, Homo sapiens
  misc_RNA (1)...(19): siRNA sense strand
aaacugaaauucucuccaa

SEQ ID NO: 1417336 - RNA, 19 nt, Homo sapiens
  misc_RNA (1)...(19): siRNA sense strand
ggcaacaacuuacaaauac

SEQ ID NO: 1417337 - RNA, 19 nt, Homo sapiens
  misc_RNA (1)...(19): siRNA sense strand
gaagaccgauccauaucug

SEQ ID NO: 1417338 - RNA, 19 nt, Homo sapiens
  misc_RNA (1)...(19): siRNA sense strand
ugaccggaaugaacuauuu

SEQ ID NO: 1417339 - RNA, 19 nt, Homo sapiens
  misc_RNA (1)...(19): siRNA sense strand
caaugaaagcuuuagguua

SEQ ID NO: 1417340 - RNA, 19 nt, Homo sapiens
  misc_RNA (1)...(19): siRNA sense strand
ggaccuuagugaauauaaa

SEQ ID NO: 1417341 - RNA, 19 nt, Homo sapiens
  misc_RNA (1)...(19): siRNA sense strand
ggaaauugaugaguauauc

SEQ ID NO: 1417342 - RNA, 19 nt, Homo sapiens
  misc_RNA (1)...(19): siRNA sense strand
cggaagaccucaagaaagu

SEQ ID NO: 1417343 - RNA, 19 nt, Homo sapiens
  misc_RNA (1)...(19): siRNA sense strand
gcaucaaguuuauagaaga

SEQ ID NO: 1417344 - RNA, 19 nt, Homo sapiens
  misc_RNA (1)...(19): siRNA sense strand
gcacccagcuuaucuugca

SEQ ID NO: 1417345 - RNA, 19 nt, Homo sapiens
  misc_RNA (1)...(19): siRNA sense strand
ggaagaaucggacccaaga

SEQ ID NO: 1417346 - RNA, 19 nt, Homo sapiens
  misc_RNA (1)...(19): siRNA sense strand
ugaaauccuugaugaaguu

SEQ ID NO: 1417347 - RNA, 19 nt, Homo sapiens
  misc_RNA (1)...(19): siRNA sense strand
gcugauaguuucaaagcaa

SEQ ID NO: 1417348 - RNA, 19 nt, Homo sapiens
  misc_RNA (1)...(19): siRNA sense strand
gagaccauauccuuaaaug

SEQ ID NO: 1417349 - RNA, 19 nt, Homo sapiens
  misc_RNA (1)...(19): siRNA sense strand
uaaagaggccguuaaggaa

SEQ ID NO: 1417350 - RNA, 19 nt, Homo sapiens
  misc_RNA (1)...(19): siRNA sense strand
guagauccaagcuugauua

SEQ ID NO: 1417351 - RNA, 19 nt, Homo sapiens
  misc_RNA (1)...(19): siRNA sense strand
uggagaagauguugaaaug

SEQ ID NO: 1417352 - RNA, 19 nt, Homo sapiens
  misc_RNA (1)...(19): siRNA sense strand
cagcaguucucuucucuga

SEQ ID NO: 1417353 - RNA, 19 nt, Homo sapiens
  misc_RNA (1)...(19): siRNA sense strand
gaugacacguucuccaguu

SEQ ID NO: 1417354 - RNA, 19 nt, Homo sapiens
  misc_RNA (1)...(19): siRNA sense strand
caaaggcauucaucauaga

SEQ ID NO: 1417355 - RNA, 19 nt, Homo sapiens
  misc_RNA (1)...(19): siRNA sense strand
gauaugauaccggaccuua

SEQ ID NO: 1417356 - RNA, 19 nt, Homo sapiens
  misc_RNA (1)...(19): siRNA sense strand
gggaugcagcuauuuauuu

SEQ ID NO: 1417357 - RNA, 19 nt, Homo sapiens
  misc_RNA (1)...(19): siRNA sense strand
ccaagugacuacaagaaau

SEQ ID NO: 1417358 - RNA, 19 nt, Homo sapiens
  misc_RNA (1)...(19): siRNA sense strand
ugauugacauguauucuga

SEQ ID NO: 1417359 - RNA, 19 nt, Homo sapiens
  misc_RNA (1)...(19): siRNA sense strand
uaauaaagcaguagagguu

SEQ ID NO: 1417360 - RNA, 19 nt, Homo sapiens
  misc_RNA (1)...(19): siRNA sense strand
cauugaagcuauaagagaa

SEQ ID NO: 1417361 - RNA, 19 nt, Homo sapiens
  misc_RNA (1)...(19): siRNA sense strand
ggauucagcagauaauuga

SEQ ID NO: 1417362 - RNA, 19 nt, Homo sapiens
  misc_RNA (1)...(19): siRNA sense strand
aaacuucgcuaucucauac

SEQ ID NO: 1417363 - RNA, 19 nt, Homo sapiens
  misc_RNA (1)...(19): siRNA sense strand
acaaugaaaccaagaauga

SEQ ID NO: 1417364 - RNA, 19 nt, Homo sapiens
  misc_RNA (1)...(19): siRNA sense strand
caaauggacccucauggaa

SEQ ID NO: 1417365 - RNA, 19 nt, Homo sapiens
  misc_RNA (1)...(19): siRNA sense strand
ugaaauagaacuucgaaug

SEQ ID NO: 1417366 - RNA, 19 nt, Homo sapiens
  misc_RNA (1)...(19): siRNA sense strand
uaccggaccuuagugaaua

SEQ ID NO: 1417367 - RNA, 19 nt, Homo sapiens
  misc_RNA (1)...(19): siRNA sense strand
gggaacagcucugaaagca

SEQ ID NO: 1417368 - RNA, 19 nt, Homo sapiens
  misc_RNA (1)...(19): siRNA sense strand
ugacaaaccuuccuuuacg

SEQ ID NO: 1417369 - RNA, 19 nt, Homo sapiens
  misc_RNA (1)...(19): siRNA sense strand
gaacaacaggcugauaguu

SEQ ID NO: 1417370 - RNA, 19 nt, Homo sapiens
  misc_RNA (1)...(19): siRNA sense strand
gauguucucucugauuaug

SEQ ID NO: 1417371 - RNA, 19 nt, Homo sapiens
  misc_RNA (1)...(19): siRNA sense strand
gcauuuaucauucacauca

SEQ ID NO: 1417372 - RNA, 19 nt, Homo sapiens
  misc_RNA (1)...(19): siRNA sense strand
ggaugcagcuauuuauuuu

SEQ ID NO: 1417373 - RNA, 19 nt, Homo sapiens
  misc_RNA (1)...(19): siRNA sense strand
gaacuugaccggaaugaac

SEQ ID NO: 1417374 - RNA, 19 nt, Homo sapiens
  misc_RNA (1)...(19): siRNA sense strand
ggauggugcuuguugacuu

SEQ ID NO: 1417375 - RNA, 19 nt, Homo sapiens
  misc_RNA (1)...(19): siRNA sense strand
acaaaggcauucaucauag

SEQ ID NO: 1417376 - RNA, 19 nt, Homo sapiens
  misc_RNA (1)...(19): siRNA sense strand
acacucaguugaaguauca

SEQ ID NO: 1417377 - RNA, 19 nt, Homo sapiens
  misc_RNA (1)...(19): siRNA sense strand
gaaagugacaagcauuuua

SEQ ID NO: 1417378 - RNA, 19 nt, Homo sapiens
  misc_RNA (1)...(19): siRNA sense strand
gacauugugugggaaauug

SEQ ID NO: 1417379 - RNA, 19 nt, Homo sapiens
  misc_RNA (1)...(19): siRNA sense strand
ggaaguuuaccacuacaaa

SEQ ID NO: 1417380 - RNA, 19 nt, Homo sapiens
  misc_RNA (1)...(19): siRNA sense strand
gcucgaauauucccaagag

SEQ ID NO: 1417381 - RNA, 19 nt, Homo sapiens
  misc_RNA (1)...(19): siRNA sense strand
gaaagaugacaaaggcauu

SEQ ID NO: 1417382 - RNA, 19 nt, Homo sapiens
  misc_RNA (1)...(19): siRNA sense strand
uugauguucucucugauua

SEQ ID NO: 1417383 - RNA, 19 nt, Homo sapiens
  misc_RNA (1)...(19): siRNA sense strand
aaagagguauuggaagauu

SEQ ID NO: 1417384 - RNA, 19 nt, Homo sapiens
  misc_RNA (1)...(19): siRNA sense strand
gggagacccuacaagaaga

SEQ ID NO: 1417385 - RNA, 19 nt, Homo sapiens
  misc_RNA (1)...(19): siRNA sense strand
gaauccuaaugccaucaua

SEQ ID NO: 1417386 - RNA, 19 nt, Homo sapiens
  misc_RNA (1)...(19): siRNA sense strand
agaagaucuugcagcauua

SEQ ID NO: 1417387 - RNA, 19 nt, Homo sapiens
  misc_RNA (1)...(19): siRNA sense strand
caucauagaaagcuuaaga

SEQ ID NO: 1417388 - RNA, 19 nt, Homo sapiens
  misc_RNA (1)...(19): siRNA sense strand
gaagaauuuucccgcuuua

SEQ ID NO: 1417389 - RNA, 19 nt, Homo sapiens
  misc_RNA (1)...(19): siRNA sense strand
caguggauaucaagcuuaa

SEQ ID NO: 1417390 - RNA, 19 nt, Homo sapiens
  misc_RNA (1)...(19): siRNA sense strand
gcauugaagcuauaagaga

SEQ ID NO: 1417391 - RNA, 19 nt, Homo sapiens
  misc_RNA (1)...(19): siRNA sense strand
gaaagcucuucccaaugaa

SEQ ID NO: 1417392 - RNA, 19 nt, Homo sapiens
  misc_RNA (1)...(19): siRNA sense strand
ugacuuaccaggugugauu

SEQ ID NO: 1417393 - RNA, 19 nt, Homo sapiens
  misc_RNA (1)...(19): siRNA sense strand
ggaaaugauugcccaagcu

SEQ ID NO: 1417394 - RNA, 19 nt, Homo sapiens
  misc_RNA (1)...(19): siRNA sense strand
acacagcucuggaauaaaa

SEQ ID NO: 1417395 - RNA, 19 nt, Homo sapiens
  misc_RNA (1)...(19): siRNA sense strand
ugugggaaauugaugagua

SEQ ID NO: 1417396 - RNA, 19 nt, Homo sapiens
  misc_RNA (1)...(19): siRNA sense strand
cuaaaccauuguaaccuuu

SEQ ID NO: 1417397 - RNA, 19 nt, Homo sapiens
  misc_RNA (1)...(19): siRNA sense strand
agagcaugaugacauauuu

SEQ ID NO: 1417398 - RNA, 19 nt, Homo sapiens
  misc_RNA (1)...(19): siRNA sense strand
caacucaugugauugaaaa

SEQ ID NO: 1417399 - RNA, 19 nt, Homo sapiens
  misc_RNA (1)...(19): siRNA sense strand
caagugacuacaagaaauu

SEQ ID NO: 1417400 - RNA, 19 nt, Homo sapiens
  misc_RNA (1)...(19): siRNA sense strand
gcuaaaggcacaccaagug

SEQ ID NO: 1417401 - RNA, 19 nt, Homo sapiens
  misc_RNA (1)...(19): siRNA sense strand
gagaauaugaagaagaguu

SEQ ID NO: 1417402 - RNA, 19 nt, Homo sapiens
  misc_RNA (1)...(19): siRNA sense strand
gcaguauuguuacagacuu

SEQ ID NO: 1417403 - RNA, 19 nt, Homo sapiens
  misc_RNA (1)...(19): siRNA sense strand
uggaaagacuaguguguug

SEQ ID NO: 1417404 - RNA, 19 nt, Homo sapiens
  misc_RNA (1)...(19): siRNA sense strand
ggagaacaaagaauugaga

SEQ ID NO: 1417405 - RNA, 19 nt, Homo sapiens
  misc_RNA (1)...(19): siRNA sense strand
gaaagagcaugaugacaua

SEQ ID NO: 1417406 - RNA, 19 nt, Homo sapiens
  misc_RNA (1)...(19): siRNA sense strand
gaacagcucugaaagcauu

SEQ ID NO: 1417407 - RNA, 19 nt, Homo sapiens
  misc_RNA (1)...(19): siRNA sense strand
gagaagauguugaaaugua

SEQ ID NO: 1417408 - RNA, 19 nt, Homo sapiens
  misc_RNA (1)...(19): siRNA sense strand
gaggacagcuugaggguua

SEQ ID NO: 1417409 - RNA, 19 nt, Homo sapiens
  misc_RNA (1)...(19): siRNA sense strand
gaaacugaauggaagaaua

SEQ ID NO: 1417410 - RNA, 19 nt, Homo sapiens
  misc_RNA (1)...(19): siRNA sense strand
aaagaaggcuguaccguua

SEQ ID NO: 1417411 - RNA, 19 nt, Homo sapiens
  misc_RNA (1)...(19): siRNA sense strand
aaacacagcucuggaauaa

SEQ ID NO: 1417412 - RNA, 19 nt, Homo sapiens
  misc_RNA (1)...(19): siRNA sense strand
gaaauagaacuucgaauga

SEQ ID NO: 1417413 - RNA, 19 nt, Homo sapiens
  misc_RNA (1)...(19): siRNA sense strand
gcaaugauguggucuuguu

SEQ ID NO: 1417414 - RNA, 19 nt, Homo sapiens
  misc_RNA (1)...(19): siRNA sense strand
gaccauauccuuaaaugua

SEQ ID NO: 1417415 - RNA, 19 nt, Homo sapiens
  misc_RNA (1)...(19): siRNA sense strand
gcaaugggaugcagcuauu

SEQ ID NO: 1417416 - RNA, 19 nt, Homo sapiens
  misc_RNA (1)...(19): siRNA sense strand
cagcuuaucuugcaaguga

SEQ ID NO: 1417417 - RNA, 19 nt, Homo sapiens
  misc_RNA (1)...(19): siRNA sense strand
gaaguuaggcgauuagaga

SEQ ID NO: 1417418 - RNA, 19 nt, Homo sapiens
  misc_RNA (1)...(19): siRNA sense strand
gacaaaggcauucaucaua

SEQ ID NO: 1417419 - RNA, 19 nt, Homo sapiens
  misc_RNA (1)...(19): siRNA sense strand
gauccaagcuugauuaagg

SEQ ID NO: 1417420 - RNA, 19 nt, Homo sapiens
  misc_RNA (1)...(19): siRNA sense strand
ggaagaaaguauuaaacga

SEQ ID NO: 1417421 - RNA, 19 nt, Homo sapiens
  misc_RNA (1)...(19): siRNA sense strand
aaacagcucuaaaccauug

SEQ ID NO: 1417422 - RNA, 19 nt, Homo sapiens
  misc_RNA (1)...(19): siRNA sense strand
ugacauguauucugaaguu

SEQ ID NO: 1417423 - RNA, 19 nt, Homo sapiens
  misc_RNA (1)...(19): siRNA sense strand
gaagaccucaagaaaguua

SEQ ID NO: 1417424 - RNA, 19 nt, Homo sapiens
  misc_RNA (1)...(19): siRNA sense strand
gcugaacgcaguauuguua

SEQ ID NO: 1417425 - RNA, 19 nt, Homo sapiens
  misc_RNA (1)...(19): siRNA sense strand
gauggugcuuguugacuua

SEQ ID NO: 1417426 - RNA, 19 nt, Homo sapiens
  misc_RNA (1)...(19): siRNA sense strand
ggacauccuuucagcaguu

SEQ ID NO: 1417427 - RNA, 19 nt, Homo sapiens
  misc_RNA (1)...(19): siRNA sense strand
gaaacacagcucuggaaua

SEQ ID NO: 1417428 - RNA, 19 nt, Homo sapiens
  misc_RNA (1)...(19): siRNA sense strand
ggaaauccuucaacaaucu

SEQ ID NO: 1417429 - RNA, 19 nt, Homo sapiens
  misc_RNA (1)...(19): siRNA sense strand
gcagauaauugaaggaaag

SEQ ID NO: 1417430 - RNA, 19 nt, Homo sapiens
  misc_RNA (1)...(19): siRNA sense strand
ugaaagcauugaagcuaua

SEQ ID NO: 1417431 - RNA, 19 nt, Homo sapiens
  misc_RNA (1)...(19): siRNA sense strand
ggaaagagcaugaugacau

SEQ ID NO: 1417432 - RNA, 19 nt, Homo sapiens
  misc_RNA (1)...(19): siRNA sense strand
ucacgaagcauuuaucauu

SEQ ID NO: 1417433 - RNA, 19 nt, Homo sapiens
  misc_RNA (1)...(19): siRNA sense strand
gcaguucucuucucugaca

SEQ ID NO: 1417434 - RNA, 19 nt, Homo sapiens
  misc_RNA (1)...(19): siRNA sense strand
uuaaagagguauuggaaga

SEQ ID NO: 1417435 - RNA, 19 nt, Homo sapiens
  misc_RNA (1)...(19): siRNA sense strand
aaacugaaauucucuccaa

SEQ ID NO: 1417436 - RNA, 19 nt, Homo sapiens
  misc_RNA (1)...(19): siRNA sense strand
ggcaacaacuuacaaauac

SEQ ID NO: 1417437 - RNA, 19 nt, Homo sapiens
  misc_RNA (1)...(19): siRNA sense strand
gaagaccgauccauaucug

SEQ ID NO: 1417438 - RNA, 19 nt, Homo sapiens
  misc_RNA (1)...(19): siRNA sense strand
ugaccggaaugaacuauuu

SEQ ID NO: 1417439 - RNA, 19 nt, Homo sapiens
  misc_RNA (1)...(19): siRNA sense strand
caaugaaagcuuuagguua

SEQ ID NO: 1417440 - RNA, 19 nt, Homo sapiens
  misc_RNA (1)...(19): siRNA sense strand
ggaccuuagugaauauaaa

SEQ ID NO: 1417441 - RNA, 19 nt, Homo sapiens
  misc_RNA (1)...(19): siRNA sense strand
ggaaauugaugaguauauc

SEQ ID NO: 1417442 - RNA, 19 nt, Homo sapiens
  misc_RNA (1)...(19): siRNA sense strand
cggaagaccucaagaaagu

SEQ ID NO: 1417443 - RNA, 19 nt, Homo sapiens
  misc_RNA (1)...(19): siRNA sense strand
gcaucaaguuuauagaaga

SEQ ID NO: 1417444 - RNA, 19 nt, Homo sapiens
  misc_RNA (1)...(19): siRNA sense strand
gcacccagcuuaucuugca

SEQ ID NO: 1417445 - RNA, 19 nt, Homo sapiens
  misc_RNA (1)...(19): siRNA sense strand
ggaagaaucggacccaaga

SEQ ID NO: 1417446 - RNA, 19 nt, Homo sapiens
  misc_RNA (1)...(19): siRNA sense strand
ugaaauccuugaugaaguu

SEQ ID NO: 1417447 - RNA, 19 nt, Homo sapiens
  misc_RNA (1)...(19): siRNA sense strand
gcugauaguuucaaagcaa

SEQ ID NO: 1417448 - RNA, 19 nt, Homo sapiens
  misc_RNA (1)...(19): siRNA sense strand
gagaccauauccuuaaaug

SEQ ID NO: 1417449 - RNA, 19 nt, Homo sapiens
  misc_RNA (1)...(19): siRNA sense strand
uaaagaggccguuaaggaa

SEQ ID NO: 1417450 - RNA, 19 nt, Homo sapiens
  misc_RNA (1)...(19): siRNA sense strand
guagauccaagcuugauua

SEQ ID NO: 1417451 - RNA, 19 nt, Homo sapiens
  misc_RNA (1)...(19): siRNA sense strand
uggagaagauguugaaaug

SEQ ID NO: 1417452 - RNA, 19 nt, Homo sapiens
  misc_RNA (1)...(19): siRNA sense strand
cagcaguucucuucucuga

SEQ ID NO: 1417453 - RNA, 19 nt, Homo sapiens
  misc_RNA (1)...(19): siRNA sense strand
gaugacacguucuccaguu

SEQ ID NO: 1417454 - RNA, 19 nt, Homo sapiens
  misc_RNA (1)...(19): siRNA sense strand
caaaggcauucaucauaga

SEQ ID NO: 1417455 - RNA, 19 nt, Homo sapiens
  misc_RNA (1)...(19): siRNA sense strand
gauaugauaccggaccuua

SEQ ID NO: 1417456 - RNA, 19 nt, Homo sapiens
  misc_RNA (1)...(19): siRNA sense strand
gggaugcagcuauuuauuu

SEQ ID NO: 1417457 - RNA, 19 nt, Homo sapiens
  misc_RNA (1)...(19): siRNA sense strand
ccaagugacuacaagaaau

SEQ ID NO: 1417458 - RNA, 19 nt, Homo sapiens
  misc_RNA (1)...(19): siRNA sense strand
ugauugacauguauucuga

SEQ ID NO: 1417459 - RNA, 19 nt, Homo sapiens
  misc_RNA (1)...(19): siRNA sense strand
uaauaaagcaguagagguu

SEQ ID NO: 1417460 - RNA, 19 nt, Homo sapiens
  misc_RNA (1)...(19): siRNA sense strand
cauugaagcuauaagagaa

SEQ ID NO: 1417461 - RNA, 19 nt, Homo sapiens
  misc_RNA (1)...(19): siRNA sense strand
ggauucagcagauaauuga

SEQ ID NO: 1417462 - RNA, 19 nt, Homo sapiens
  misc_RNA (1)...(19): siRNA sense strand
aaacuucgcuaucucauac

SEQ ID NO: 1417463 - RNA, 19 nt, Homo sapiens
  misc_RNA (1)...(19): siRNA sense strand
acaaugaaaccaagaauga

SEQ ID NO: 1417464 - RNA, 19 nt, Homo sapiens
  misc_RNA (1)...(19): siRNA sense strand
caaauggacccucauggaa

SEQ ID NO: 1417465 - RNA, 19 nt, Homo sapiens
  misc_RNA (1)...(19): siRNA sense strand
ugaaauagaacuucgaaug

SEQ ID NO: 1417466 - RNA, 19 nt, Homo sapiens
  misc_RNA (1)...(19): siRNA sense strand
uaccggaccuuagugaaua

SEQ ID NO: 1417467 - RNA, 19 nt, Homo sapiens
  misc_RNA (1)...(19): siRNA sense strand
gggaacagcucugaaagca

SEQ ID NO: 1417468 - RNA, 19 nt, Homo sapiens
  misc_RNA (1)...(19): siRNA sense strand
ugacaaaccuuccuuuacg

SEQ ID NO: 1417469 - RNA, 19 nt, Homo sapiens
  misc_RNA (1)...(19): siRNA sense strand
gaacaacaggcugauaguu

SEQ ID NO: 1417470 - RNA, 19 nt, Homo sapiens
  misc_RNA (1)...(19): siRNA sense strand
gauguucucucugauuaug

SEQ ID NO: 1417471 - RNA, 19 nt, Homo sapiens
  misc_RNA (1)...(19): siRNA sense strand
gcauuuaucauucacauca

SEQ ID NO: 1417472 - RNA, 19 nt, Homo sapiens
  misc_RNA (1)...(19): siRNA sense strand
ggaugcagcuauuuauuuu

SEQ ID NO: 1417473 - RNA, 19 nt, Homo sapiens
  misc_RNA (1)...(19): siRNA sense strand
gaacuugaccggaaugaac

SEQ ID NO: 1417474 - RNA, 19 nt, Homo sapiens
  misc_RNA (1)...(19): siRNA sense strand
ggauggugcuuguugacuu

SEQ ID NO: 1417475 - RNA, 19 nt, Homo sapiens
  misc_RNA (1)...(19): siRNA sense strand
acaaaggcauucaucauag

SEQ ID NO: 1417476 - RNA, 19 nt, Homo sapiens
  misc_RNA (1)...(19): siRNA sense strand
acacucaguugaaguauca

SEQ ID NO: 1417477 - RNA, 19 nt, Homo sapiens
  misc_RNA (1)...(19): siRNA sense strand
gaaagugacaagcauuuua

SEQ ID NO: 1417478 - RNA, 19 nt, Homo sapiens
  misc_RNA (1)...(19): siRNA sense strand
gacauugugugggaaauug

SEQ ID NO: 1417479 - RNA, 19 nt, Homo sapiens
  misc_RNA (1)...(19): siRNA sense strand
ggaaguuuaccacuacaaa

SEQ ID NO: 1417480 - RNA, 19 nt, Homo sapiens
  misc_RNA (1)...(19): siRNA sense strand
gcucgaauauucccaagag

SEQ ID NO: 1417481 - RNA, 19 nt, Homo sapiens
  misc_RNA (1)...(19): siRNA sense strand
gaaagaugacaaaggcauu

SEQ ID NO: 1417482 - RNA, 19 nt, Homo sapiens
  misc_RNA (1)...(19): siRNA sense strand
uugauguucucucugauua

SEQ ID NO: 1417483 - RNA, 19 nt, Homo sapiens
  misc_RNA (1)...(19): siRNA sense strand
aaagagguauuggaagauu

SEQ ID NO: 1417484 - RNA, 19 nt, Homo sapiens
  misc_RNA (1)...(19): siRNA sense strand
gggagacccuacaagaaga

SEQ ID NO: 1417485 - RNA, 19 nt, Homo sapiens
  misc_RNA (1)...(19): siRNA sense strand
gaauccuaaugccaucaua

SEQ ID NO: 1417486 - RNA, 19 nt, Homo sapiens
  misc_RNA (1)...(19): siRNA sense strand
agaagaucuugcagcauua

SEQ ID NO: 1417487 - RNA, 19 nt, Homo sapiens
  misc_RNA (1)...(19): siRNA sense strand
caucauagaaagcuuaaga

SEQ ID NO: 1417488 - RNA, 19 nt, Homo sapiens
  misc_RNA (1)...(19): siRNA sense strand
gaagaauuuucccgcuuua

SEQ ID NO: 1417489 - RNA, 19 nt, Homo sapiens
  misc_RNA (1)...(19): siRNA sense strand
caguggauaucaagcuuaa

SEQ ID NO: 1417490 - RNA, 19 nt, Homo sapiens
  misc_RNA (1)...(19): siRNA sense strand
gcauugaagcuauaagaga

SEQ ID NO: 1417491 - RNA, 19 nt, Homo sapiens
  misc_RNA (1)...(19): siRNA sense strand
gaaagcucuucccaaugaa

SEQ ID NO: 1417492 - RNA, 19 nt, Homo sapiens
  misc_RNA (1)...(19): siRNA sense strand
ugacuuaccaggugugauu

SEQ ID NO: 1417493 - RNA, 19 nt, Homo sapiens
  misc_RNA (1)...(19): siRNA sense strand
ggaaaugauugcccaagcu

SEQ ID NO: 1417494 - RNA, 19 nt, Homo sapiens
  misc_RNA (1)...(19): siRNA sense strand
acacagcucuggaauaaaa

SEQ ID NO: 1417495 - RNA, 19 nt, Homo sapiens
  misc_RNA (1)...(19): siRNA sense strand
ugugggaaauugaugagua

SEQ ID NO: 1417496 - RNA, 19 nt, Homo sapiens
  misc_RNA (1)...(19): siRNA sense strand
cuaaaccauuguaaccuuu

SEQ ID NO: 1417497 - RNA, 19 nt, Homo sapiens
  misc_RNA (1)...(19): siRNA sense strand
agagcaugaugacauauuu

SEQ ID NO: 1417498 - RNA, 19 nt, Homo sapiens
  misc_RNA (1)...(19): siRNA sense strand
caacucaugugauugaaaa

SEQ ID NO: 1417499 - RNA, 19 nt, Homo sapiens
  misc_RNA (1)...(19): siRNA sense strand
caagugacuacaagaaauu

SEQ ID NO: 1417500 - RNA, 19 nt, Homo sapiens
  misc_RNA (1)...(19): siRNA sense strand
gcuaaaggcacaccaagug

SEQ ID NO: 1417501 - RNA, 19 nt, Homo sapiens
  misc_RNA (1)...(19): siRNA sense strand
gagaauaugaagaagaguu

SEQ ID NO: 1417502 - RNA, 19 nt, Homo sapiens
  misc_RNA (1)...(19): siRNA sense strand
gcaguauuguuacagacuu

SEQ ID NO: 1417503 - RNA, 19 nt, Homo sapiens
  misc_RNA (1)...(19): siRNA sense strand
uggaaagacuaguguguug

SEQ ID NO: 1417504 - RNA, 19 nt, Homo sapiens
  misc_RNA (1)...(19): siRNA sense strand
ggagaacaaagaauugaga

SEQ ID NO: 1417505 - RNA, 19 nt, Homo sapiens
  misc_RNA (1)...(19): siRNA sense strand
gaaagagcaugaugacaua

SEQ ID NO: 1417506 - RNA, 19 nt, Homo sapiens
  misc_RNA (1)...(19): siRNA sense strand
gaacagcucugaaagcauu

SEQ ID NO: 1417507 - RNA, 19 nt, Homo sapiens
  misc_RNA (1)...(19): siRNA sense strand
gagaagauguugaaaugua

SEQ ID NO: 1417508 - RNA, 19 nt, Homo sapiens
  misc_RNA (1)...(19): siRNA sense strand
gaggacagcuugaggguua

SEQ ID NO: 1417509 - RNA, 19 nt, Homo sapiens
  misc_RNA (1)...(19): siRNA sense strand
gaaacugaauggaagaaua

SEQ ID NO: 1417510 - RNA, 19 nt, Homo sapiens
  misc_RNA (1)...(19): siRNA sense strand
aaagaaggcuguaccguua

SEQ ID NO: 1417511 - RNA, 19 nt, Homo sapiens
  misc_RNA (1)...(19): siRNA sense strand
aaacacagcucuggaauaa

SEQ ID NO: 1417512 - RNA, 19 nt, Homo sapiens
  misc_RNA (1)...(19): siRNA sense strand
gaaauagaacuucgaauga

SEQ ID NO: 1417513 - RNA, 19 nt, Homo sapiens
  misc_RNA (1)...(19): siRNA sense strand
gcaaugauguggucuuguu

SEQ ID NO: 1417514 - RNA, 19 nt, Homo sapiens
  misc_RNA (1)...(19): siRNA sense strand
gaccauauccuuaaaugua

SEQ ID NO: 1417515 - RNA, 19 nt, Homo sapiens
  misc_RNA (1)...(19): siRNA sense strand
gcaaugggaugcagcuauu

SEQ ID NO: 1417516 - RNA, 19 nt, Homo sapiens
  misc_RNA (1)...(19): siRNA sense strand
cagcuuaucuugcaaguga

SEQ ID NO: 1417517 - RNA, 19 nt, Homo sapiens
  misc_RNA (1)...(19): siRNA sense strand
gaaguuaggcgauuagaga

SEQ ID NO: 1417518 - RNA, 19 nt, Homo sapiens
  misc_RNA (1)...(19): siRNA sense strand
gacaaaggcauucaucaua

SEQ ID NO: 1417519 - RNA, 19 nt, Homo sapiens
  misc_RNA (1)...(19): siRNA sense strand
gauccaagcuugauuaagg

SEQ ID NO: 1417520 - RNA, 19 nt, Homo sapiens
  misc_RNA (1)...(19): siRNA sense strand
ggaagaaaguauuaaacga

SEQ ID NO: 1417521 - RNA, 19 nt, Homo sapiens
  misc_RNA (1)...(19): siRNA sense strand
aaacagcucuaaaccauug

SEQ ID NO: 1417522 - RNA, 19 nt, Homo sapiens
  misc_RNA (1)...(19): siRNA sense strand
ugacauguauucugaaguu

SEQ ID NO: 1417523 - RNA, 19 nt, Homo sapiens
  misc_RNA (1)...(19): siRNA sense strand
gaagaccucaagaaaguua

SEQ ID NO: 1417524 - RNA, 19 nt, Homo sapiens
  misc_RNA (1)...(19): siRNA sense strand
gcugaacgcaguauuguua

SEQ ID NO: 1417525 - RNA, 19 nt, Homo sapiens
  misc_RNA (1)...(19): siRNA sense strand
gauggugcuuguugacuua

SEQ ID NO: 1417526 - RNA, 19 nt, Homo sapiens
  misc_RNA (1)...(19): siRNA sense strand
ggacauccuuucagcaguu

SEQ ID NO: 1417527 - RNA, 19 nt, Homo sapiens
  misc_RNA (1)...(19): siRNA sense strand
gaaacacagcucuggaaua

SEQ ID NO: 1417528 - RNA, 19 nt, Homo sapiens
  misc_RNA (1)...(19): siRNA sense strand
ggaaauccuucaacaaucu

SEQ ID NO: 1417529 - RNA, 19 nt, Homo sapiens
  misc_RNA (1)...(19): siRNA sense strand
gcagauaauugaaggaaag

SEQ ID NO: 1417530 - RNA, 19 nt, Homo sapiens
  misc_RNA (1)...(19): siRNA sense strand
ugaaagcauugaagcuaua

SEQ ID NO: 1417531 - RNA, 19 nt, Homo sapiens
  misc_RNA (1)...(19): siRNA sense strand
ggaaagagcaugaugacau

SEQ ID NO: 1417532 - RNA, 19 nt, Homo sapiens
  misc_RNA (1)...(19): siRNA sense strand
ucacgaagcauuuaucauu

SEQ ID NO: 1417533 - RNA, 19 nt, Homo sapiens
  misc_RNA (1)...(19): siRNA sense strand
gcaguucucuucucugaca

SEQ ID NO: 1417534 - RNA, 19 nt, Homo sapiens
  misc_RNA (1)...(19): siRNA sense strand
uuaaagagguauuggaaga

SEQ ID NO: 1417535 - RNA, 19 nt, Homo sapiens
  misc_RNA (1)...(19): siRNA sense strand
aaacugaaauucucuccaa

SEQ ID NO: 1417536 - RNA, 19 nt, Homo sapiens
  misc_RNA (1)...(19): siRNA sense strand
ggcaacaacuuacaaauac

SEQ ID NO: 1417537 - RNA, 19 nt, Homo sapiens
  misc_RNA (1)...(19): siRNA sense strand
gaagaccgauccauaucug

SEQ ID NO: 1417538 - RNA, 19 nt, Homo sapiens
  misc_RNA (1)...(19): siRNA sense strand
ugaccggaaugaacuauuu

SEQ ID NO: 1417539 - RNA, 19 nt, Homo sapiens
  misc_RNA (1)...(19): siRNA sense strand
caaugaaagcuuuagguua

SEQ ID NO: 1417540 - RNA, 19 nt, Homo sapiens
  misc_RNA (1)...(19): siRNA sense strand
ggaccuuagugaauauaaa

SEQ ID NO: 1417541 - RNA, 19 nt, Homo sapiens
  misc_RNA (1)...(19): siRNA sense strand
ggaaauugaugaguauauc

SEQ ID NO: 1417542 - RNA, 19 nt, Homo sapiens
  misc_RNA (1)...(19): siRNA sense strand
cggaagaccucaagaaagu

SEQ ID NO: 1417543 - RNA, 19 nt, Homo sapiens
  misc_RNA (1)...(19): siRNA sense strand
gcaucaaguuuauagaaga

SEQ ID NO: 1417544 - RNA, 19 nt, Homo sapiens
  misc_RNA (1)...(19): siRNA sense strand
gcacccagcuuaucuugca

SEQ ID NO: 1417545 - RNA, 19 nt, Homo sapiens
  misc_RNA (1)...(19): siRNA sense strand
ggaagaaucggacccaaga

SEQ ID NO: 1417546 - RNA, 19 nt, Homo sapiens
  misc_RNA (1)...(19): siRNA sense strand
ugaaauccuugaugaaguu

SEQ ID NO: 1417547 - RNA, 19 nt, Homo sapiens
  misc_RNA (1)...(19): siRNA sense strand
gcugauaguuucaaagcaa

SEQ ID NO: 1417548 - RNA, 19 nt, Homo sapiens
  misc_RNA (1)...(19): siRNA sense strand
gagaccauauccuuaaaug

SEQ ID NO: 1417549 - RNA, 19 nt, Homo sapiens
  misc_RNA (1)...(19): siRNA sense strand
uaaagaggccguuaaggaa

SEQ ID NO: 1417550 - RNA, 19 nt, Homo sapiens
  misc_RNA (1)...(19): siRNA sense strand
guagauccaagcuugauua

SEQ ID NO: 1417551 - RNA, 19 nt, Homo sapiens
  misc_RNA (1)...(19): siRNA sense strand
uggagaagauguugaaaug

SEQ ID NO: 1417552 - RNA, 19 nt, Homo sapiens
  misc_RNA (1)...(19): siRNA sense strand
cagcaguucucuucucuga

SEQ ID NO: 1417553 - RNA, 19 nt, Homo sapiens
  misc_RNA (1)...(19): siRNA sense strand
gaugacacguucuccaguu

SEQ ID NO: 1417554 - RNA, 19 nt, Homo sapiens
  misc_RNA (1)...(19): siRNA sense strand
caaaggcauucaucauaga

SEQ ID NO: 1417555 - RNA, 19 nt, Homo sapiens
  misc_RNA (1)...(19): siRNA sense strand
gauaugauaccggaccuua

SEQ ID NO: 1417556 - RNA, 19 nt, Homo sapiens
  misc_RNA (1)...(19): siRNA sense strand
gggaugcagcuauuuauuu

SEQ ID NO: 1417557 - RNA, 19 nt, Homo sapiens
  misc_RNA (1)...(19): siRNA sense strand
ccaagugacuacaagaaau

SEQ ID NO: 1417558 - RNA, 19 nt, Homo sapiens
  misc_RNA (1)...(19): siRNA sense strand
ugauugacauguauucuga

SEQ ID NO: 1417559 - RNA, 19 nt, Homo sapiens
  misc_RNA (1)...(19): siRNA sense strand
uaauaaagcaguagagguu

SEQ ID NO: 1417560 - RNA, 19 nt, Homo sapiens
  misc_RNA (1)...(19): siRNA sense strand
cauugaagcuauaagagaa

SEQ ID NO: 1417561 - RNA, 19 nt, Homo sapiens
  misc_RNA (1)...(19): siRNA sense strand
ggauucagcagauaauuga

SEQ ID NO: 1417562 - RNA, 19 nt, Homo sapiens
  misc_RNA (1)...(19): siRNA sense strand
aaacuucgcuaucucauac

SEQ ID NO: 1417563 - RNA, 19 nt, Homo sapiens
  misc_RNA (1)...(19): siRNA sense strand
acaaugaaaccaagaauga

SEQ ID NO: 1417564 - RNA, 19 nt, Homo sapiens
  misc_RNA (1)...(19): siRNA sense strand
caaauggacccucauggaa

SEQ ID NO: 1417565 - RNA, 19 nt, Homo sapiens
  misc_RNA (1)...(19): siRNA sense strand
ugaaauagaacuucgaaug

SEQ ID NO: 1417566 - RNA, 19 nt, Homo sapiens
  misc_RNA (1)...(19): siRNA sense strand
uaccggaccuuagugaaua

SEQ ID NO: 1417567 - RNA, 19 nt, Homo sapiens
  misc_RNA (1)...(19): siRNA sense strand
gggaacagcucugaaagca

SEQ ID NO: 1417568 - RNA, 19 nt, Homo sapiens
  misc_RNA (1)...(19): siRNA sense strand
ugacaaaccuuccuuuacg

SEQ ID NO: 1417569 - RNA, 19 nt, Homo sapiens
  misc_RNA (1)...(19): siRNA sense strand
gaacaacaggcugauaguu

SEQ ID NO: 1417570 - RNA, 19 nt, Homo sapiens
  misc_RNA (1)...(19): siRNA sense strand
gauguucucucugauuaug

SEQ ID NO: 1417571 - RNA, 19 nt, Homo sapiens
  misc_RNA (1)...(19): siRNA sense strand
gcauuuaucauucacauca

SEQ ID NO: 1417572 - RNA, 19 nt, Homo sapiens
  misc_RNA (1)...(19): siRNA sense strand
ggaugcagcuauuuauuuu

SEQ ID NO: 1417573 - RNA, 19 nt, Homo sapiens
  misc_RNA (1)...(19): siRNA sense strand
gaacuugaccggaaugaac

SEQ ID NO: 1417574 - RNA, 19 nt, Homo sapiens
  misc_RNA (1)...(19): siRNA sense strand
ggauggugcuuguugacuu

SEQ ID NO: 1417575 - RNA, 19 nt, Homo sapiens
  misc_RNA (1)...(19): siRNA sense strand
acaaaggcauucaucauag

SEQ ID NO: 1417576 - RNA, 19 nt, Homo sapiens
  misc_RNA (1)...(19): siRNA sense strand
acacucaguugaaguauca

SEQ ID NO: 1417577 - RNA, 19 nt, Homo sapiens
  misc_RNA (1)...(19): siRNA sense strand
gaaagugacaagcauuuua

SEQ ID NO: 1417578 - RNA, 19 nt, Homo sapiens
  misc_RNA (1)...(19): siRNA sense strand
gacauugugugggaaauug

SEQ ID NO: 1417579 - RNA, 19 nt, Homo sapiens
  misc_RNA (1)...(19): siRNA sense strand
ggaaguuuaccacuacaaa

SEQ ID NO: 1417580 - RNA, 19 nt, Homo sapiens
  misc_RNA (1)...(19): siRNA sense strand
gcucgaauauucccaagag

SEQ ID NO: 1417581 - RNA, 19 nt, Homo sapiens
  misc_RNA (1)...(19): siRNA sense strand
gaaagaugacaaaggcauu

SEQ ID NO: 1417582 - RNA, 19 nt, Homo sapiens
  misc_RNA (1)...(19): siRNA sense strand
uugauguucucucugauua

SEQ ID NO: 1417583 - RNA, 19 nt, Homo sapiens
  misc_RNA (1)...(19): siRNA sense strand
aaagagguauuggaagauu

SEQ ID NO: 1417584 - RNA, 19 nt, Homo sapiens
  misc_RNA (1)...(19): siRNA sense strand
gggagacccuacaagaaga

SEQ ID NO: 1417585 - RNA, 19 nt, Homo sapiens
  misc_RNA (1)...(19): siRNA sense strand
gaauccuaaugccaucaua

SEQ ID NO: 1417586 - RNA, 19 nt, Homo sapiens
  misc_RNA (1)...(19): siRNA sense strand
agaagaucuugcagcauua

SEQ ID NO: 1417587 - RNA, 19 nt, Homo sapiens
  misc_RNA (1)...(19): siRNA sense strand
caucauagaaagcuuaaga

SEQ ID NO: 1417588 - RNA, 19 nt, Homo sapiens
  misc_RNA (1)...(19): siRNA sense strand
gaagaauuuucccgcuuua

SEQ ID NO: 1417589 - RNA, 19 nt, Homo sapiens
  misc_RNA (1)...(19): siRNA sense strand
caguggauaucaagcuuaa

SEQ ID NO: 1417590 - RNA, 19 nt, Homo sapiens
  misc_RNA (1)...(19): siRNA sense strand
gcauugaagcuauaagaga

SEQ ID NO: 1417591 - RNA, 19 nt, Homo sapiens
  misc_RNA (1)...(19): siRNA sense strand
gaaagcucuucccaaugaa

SEQ ID NO: 1417592 - RNA, 19 nt, Homo sapiens
  misc_RNA (1)...(19): siRNA sense strand
ugacuuaccaggugugauu

SEQ ID NO: 1417593 - RNA, 19 nt, Homo sapiens
  misc_RNA (1)...(19): siRNA sense strand
ggaaaugauugcccaagcu

SEQ ID NO: 1417594 - RNA, 19 nt, Homo sapiens
  misc_RNA (1)...(19): siRNA sense strand
acacagcucuggaauaaaa

SEQ ID NO: 1417595 - RNA, 19 nt, Homo sapiens
  misc_RNA (1)...(19): siRNA sense strand
ugugggaaauugaugagua

SEQ ID NO: 1417596 - RNA, 19 nt, Homo sapiens
  misc_RNA (1)...(19): siRNA sense strand
cuaaaccauuguaaccuuu

SEQ ID NO: 1417597 - RNA, 19 nt, Homo sapiens
  misc_RNA (1)...(19): siRNA sense strand
agagcaugaugacauauuu

SEQ ID NO: 1417598 - RNA, 19 nt, Homo sapiens
  misc_RNA (1)...(19): siRNA sense strand
caacucaugugauugaaaa

SEQ ID NO: 1417599 - RNA, 19 nt, Homo sapiens
  misc_RNA (1)...(19): siRNA sense strand
caagugacuacaagaaauu

SEQ ID NO: 1417600 - RNA, 19 nt, Homo sapiens
  misc_RNA (1)...(19): siRNA sense strand
gcuaaaggcacaccaagug

SEQ ID NO: 1417601 - RNA, 19 nt, Homo sapiens
  misc_RNA (1)...(19): siRNA sense strand
gagaauaugaagaagaguu

SEQ ID NO: 1417602 - RNA, 19 nt, Homo sapiens
  misc_RNA (1)...(19): siRNA sense strand
gcaguauuguuacagacuu

SEQ ID NO: 1417603 - RNA, 19 nt, Homo sapiens
  misc_RNA (1)...(19): siRNA sense strand
uggaaagacuaguguguug

SEQ ID NO: 1417604 - RNA, 19 nt, Homo sapiens
  misc_RNA (1)...(19): siRNA sense strand
ggagaacaaagaauugaga

SEQ ID NO: 1417605 - RNA, 19 nt, Homo sapiens
  misc_RNA (1)...(19): siRNA sense strand
gaaaugaaauccaaagcuu

SEQ ID NO: 1417606 - RNA, 19 nt, Homo sapiens
  misc_RNA (1)...(19): siRNA sense strand
gaaagaauggugucaauga

SEQ ID NO: 1417607 - RNA, 19 nt, Homo sapiens
  misc_RNA (1)...(19): siRNA sense strand
uagaugagaucaagaauga

SEQ ID NO: 1417608 - RNA, 19 nt, Homo sapiens
  misc_RNA (1)...(19): siRNA sense strand
gaaagaagcguaugacaca

SEQ ID NO: 1417609 - RNA, 19 nt, Homo sapiens
  misc_RNA (1)...(19): siRNA sense strand
ucaaggacauuacuaguga

SEQ ID NO: 1417610 - RNA, 19 nt, Homo sapiens
  misc_RNA (1)...(19): siRNA sense strand
gaauugaggaagacuguua

SEQ ID NO: 1417611 - RNA, 19 nt, Homo sapiens
  misc_RNA (1)...(19): siRNA sense strand
gaaagaaagaagcguauga

SEQ ID NO: 1417612 - RNA, 19 nt, Homo sapiens
  misc_RNA (1)...(19): siRNA sense strand
ggacauuacuagugacuca

SEQ ID NO: 1417613 - RNA, 19 nt, Homo sapiens
  misc_RNA (1)...(19): siRNA sense strand
gacacuaagucaaguuaaa

SEQ ID NO: 1417614 - RNA, 19 nt, Homo sapiens
  misc_RNA (1)...(19): siRNA sense strand
gaggaagacuguuacuaca

SEQ ID NO: 1417615 - RNA, 19 nt, Homo sapiens
  misc_RNA (1)...(19): siRNA sense strand
ggcaucaacuucauggaaa

SEQ ID NO: 1417616 - RNA, 19 nt, Homo sapiens
  misc_RNA (1)...(19): siRNA sense strand
ggauuggaauugaggaaga

SEQ ID NO: 1417617 - RNA, 19 nt, Homo sapiens
  misc_RNA (1)...(19): siRNA sense strand
aaagaauggugucaaugaa

SEQ ID NO: 1417618 - RNA, 19 nt, Homo sapiens
  misc_RNA (1)...(19): siRNA sense strand
ugacugacaucaacuccaa

SEQ ID NO: 1417619 - RNA, 19 nt, Homo sapiens
  misc_RNA (1)...(19): siRNA sense strand
gcguaugacacauugauua

SEQ ID NO: 1417620 - RNA, 19 nt, Homo sapiens
  misc_RNA (1)...(19): siRNA sense strand
uggaaggccugcaucauga

SEQ ID NO: 1417621 - RNA, 19 nt, Homo sapiens
  misc_RNA (1)...(19): siRNA sense strand
agacacagcagaacagaaa

SEQ ID NO: 1417622 - RNA, 19 nt, Homo sapiens
  misc_RNA (1)...(19): siRNA sense strand
ccaagugacugacaucaac

SEQ ID NO: 1417623 - RNA, 19 nt, Homo sapiens
  misc_RNA (1)...(19): siRNA sense strand
guaauuggcaucaacuuca

SEQ ID NO: 1417624 - RNA, 19 nt, Homo sapiens
  misc_RNA (1)...(19): siRNA sense strand
uuacgucuguugcuagauu

SEQ ID NO: 1417625 - RNA, 19 nt, Homo sapiens
  misc_RNA (1)...(19): siRNA sense strand
guucaacugcuucguaauu

SEQ ID NO: 1417626 - RNA, 19 nt, Homo sapiens
  misc_RNA (1)...(19): siRNA sense strand
caaaauagaugagaucaag

SEQ ID NO: 1417627 - RNA, 19 nt, Homo sapiens
  misc_RNA (1)...(19): siRNA sense strand
guucuuacgucuguugcua

SEQ ID NO: 1417628 - RNA, 19 nt, Homo sapiens
  misc_RNA (1)...(19): siRNA sense strand
ucaacuucauggaaagaaa

SEQ ID NO: 1417629 - RNA, 19 nt, Homo sapiens
  misc_RNA (1)...(19): siRNA sense strand
agaagcguaugacacauug

SEQ ID NO: 1417630 - RNA, 19 nt, Homo sapiens
  misc_RNA (1)...(19): siRNA sense strand
gcuggagucaugacacuaa

SEQ ID NO: 1417631 - RNA, 19 nt, Homo sapiens
  misc_RNA (1)...(19): siRNA sense strand
gaugagaucaagaaugaca

SEQ ID NO: 1417632 - RNA, 19 nt, Homo sapiens
  misc_RNA (1)...(19): siRNA sense strand
ucgaaagaauggugucaau

SEQ ID NO: 1417633 - RNA, 19 nt, Homo sapiens
  misc_RNA (1)...(19): siRNA sense strand
cguaugacacauugauuaa

SEQ ID NO: 1417634 - RNA, 19 nt, Homo sapiens
  misc_RNA (1)...(19): siRNA sense strand
cagagaaaauucagacuau

SEQ ID NO: 1417635 - RNA, 19 nt, Homo sapiens
  misc_RNA (1)...(19): siRNA sense strand
gcaucaacuucauggaaag

SEQ ID NO: 1417636 - RNA, 19 nt, Homo sapiens
  misc_RNA (1)...(19): siRNA sense strand
ugaggaagacuguuacuac

SEQ ID NO: 1417637 - RNA, 19 nt, Homo sapiens
  misc_RNA (1)...(19): siRNA sense strand
ggaaagaaagaagcguaug

SEQ ID NO: 1417638 - RNA, 19 nt, Homo sapiens
  misc_RNA (1)...(19): siRNA sense strand
cacuauugcuggagucaug

SEQ ID NO: 1417639 - RNA, 19 nt, Homo sapiens
  misc_RNA (1)...(19): siRNA sense strand
gcagagaaaauucagacua

SEQ ID NO: 1417640 - RNA, 19 nt, Homo sapiens
  misc_RNA (1)...(19): siRNA sense strand
ggccaauucugccauaagc

SEQ ID NO: 1417641 - RNA, 19 nt, Homo sapiens
  misc_RNA (1)...(19): siRNA sense strand
uaauuggcaucaacuucau

SEQ ID NO: 1417642 - RNA, 19 nt, Homo sapiens
  misc_RNA (1)...(19): siRNA sense strand
aacauggaaucaucaagga

SEQ ID NO: 1417643 - RNA, 19 nt, Homo sapiens
  misc_RNA (1)...(19): siRNA sense strand
caucaacuccaagggauug

SEQ ID NO: 1417644 - RNA, 19 nt, Homo sapiens
  misc_RNA (1)...(19): siRNA sense strand
uacgucuguugcuagauua

SEQ ID NO: 1417645 - RNA, 19 nt, Homo sapiens
  misc_RNA (1)...(19): siRNA sense strand
ggagucaugacacuaaguc

SEQ ID NO: 1417646 - RNA, 19 nt, Homo sapiens
  misc_RNA (1)...(19): siRNA sense strand
cauggaaucaucaaggaau

SEQ ID NO: 1417647 - RNA, 19 nt, Homo sapiens
  misc_RNA (1)...(19): siRNA sense strand
cgaaagaauggugucaaug

SEQ ID NO: 1417648 - RNA, 19 nt, Homo sapiens
  misc_RNA (1)...(19): siRNA sense strand
gcaacaccaagugcaaaga

SEQ ID NO: 1417649 - RNA, 19 nt, Homo sapiens
  misc_RNA (1)...(19): siRNA sense strand
caacaccaagugcaaagag

SEQ ID NO: 1417650 - RNA, 19 nt, Homo sapiens
  misc_RNA (1)...(19): siRNA sense strand
gagaaaauucagacuauca

SEQ ID NO: 1417651 - RNA, 19 nt, Homo sapiens
  misc_RNA (1)...(19): siRNA sense strand
aagaagcguaugacacauu

SEQ ID NO: 1417652 - RNA, 19 nt, Homo sapiens
  misc_RNA (1)...(19): siRNA sense strand
caagacacagcagaacaga

SEQ ID NO: 1417653 - RNA, 19 nt, Homo sapiens
  misc_RNA (1)...(19): siRNA sense strand
ccuccuaccucugguucuu

SEQ ID NO: 1417654 - RNA, 19 nt, Homo sapiens
  misc_RNA (1)...(19): siRNA sense strand
caacuucauggaaagaaag

SEQ ID NO: 1417655 - RNA, 19 nt, Homo sapiens
  misc_RNA (1)...(19): siRNA sense strand
gcuagauuaucguccaaaa

SEQ ID NO: 1417656 - RNA, 19 nt, Homo sapiens
  misc_RNA (1)...(19): siRNA sense strand
uggcaucaacuucauggaa

SEQ ID NO: 1417657 - RNA, 19 nt, Homo sapiens
  misc_RNA (1)...(19): siRNA sense strand
cagcaacaccaagugcaaa

SEQ ID NO: 1417658 - RNA, 19 nt, Homo sapiens
  misc_RNA (1)...(19): siRNA sense strand
ucaacugcuucguaauugg

SEQ ID NO: 1417659 - RNA, 19 nt, Homo sapiens
  misc_RNA (1)...(19): siRNA sense strand
caaugaagccaaaauagau

SEQ ID NO: 1417660 - RNA, 19 nt, Homo sapiens
  misc_RNA (1)...(19): siRNA sense strand
uuaaugcccaagugacuga

SEQ ID NO: 1417661 - RNA, 19 nt, Homo sapiens
  misc_RNA (1)...(19): siRNA sense strand
ggaaggccugcaucaugau

SEQ ID NO: 1417662 - RNA, 19 nt, Homo sapiens
  misc_RNA (1)...(19): siRNA sense strand
cauuacuagugacucagaa

SEQ ID NO: 1417663 - RNA, 19 nt, Homo sapiens
  misc_RNA (1)...(19): siRNA sense strand
uucaacugcuucguaauug

SEQ ID NO: 1417664 - RNA, 19 nt, Homo sapiens
  misc_RNA (1)...(19): siRNA sense strand
aaugcacacucaccagcaa

SEQ ID NO: 1417665 - RNA, 19 nt, Homo sapiens
  misc_RNA (1)...(19): siRNA sense strand
ucagaaaugaaauccaaag

SEQ ID NO: 1417666 - RNA, 19 nt, Homo sapiens
  misc_RNA (1)...(19): siRNA sense strand
ccagcaacaccaagugcaa

SEQ ID NO: 1417667 - RNA, 19 nt, Homo sapiens
  misc_RNA (1)...(19): siRNA sense strand
gaaaugaaauccaaagcuu

SEQ ID NO: 1417668 - RNA, 19 nt, Homo sapiens
  misc_RNA (1)...(19): siRNA sense strand
gaaagaauggugucaauga

SEQ ID NO: 1417669 - RNA, 19 nt, Homo sapiens
  misc_RNA (1)...(19): siRNA sense strand
uagaugagaucaagaauga

SEQ ID NO: 1417670 - RNA, 19 nt, Homo sapiens
  misc_RNA (1)...(19): siRNA sense strand
gaaagaagcguaugacaca

SEQ ID NO: 1417671 - RNA, 19 nt, Homo sapiens
  misc_RNA (1)...(19): siRNA sense strand
ucaaggacauuacuaguga

SEQ ID NO: 1417672 - RNA, 19 nt, Homo sapiens
  misc_RNA (1)...(19): siRNA sense strand
gaauugaggaagacuguua

SEQ ID NO: 1417673 - RNA, 19 nt, Homo sapiens
  misc_RNA (1)...(19): siRNA sense strand
gaaagaaagaagcguauga

SEQ ID NO: 1417674 - RNA, 19 nt, Homo sapiens
  misc_RNA (1)...(19): siRNA sense strand
ggacauuacuagugacuca

SEQ ID NO: 1417675 - RNA, 19 nt, Homo sapiens
  misc_RNA (1)...(19): siRNA sense strand
gacacuaagucaaguuaaa

SEQ ID NO: 1417676 - RNA, 19 nt, Homo sapiens
  misc_RNA (1)...(19): siRNA sense strand
gaggaagacuguuacuaca

SEQ ID NO: 1417677 - RNA, 19 nt, Homo sapiens
  misc_RNA (1)...(19): siRNA sense strand
ggcaucaacuucauggaaa

SEQ ID NO: 1417678 - RNA, 19 nt, Homo sapiens
  misc_RNA (1)...(19): siRNA sense strand
ggauuggaauugaggaaga

SEQ ID NO: 1417679 - RNA, 19 nt, Homo sapiens
  misc_RNA (1)...(19): siRNA sense strand
aaagaauggugucaaugaa

SEQ ID NO: 1417680 - RNA, 19 nt, Homo sapiens
  misc_RNA (1)...(19): siRNA sense strand
ugacugacaucaacuccaa

SEQ ID NO: 1417681 - RNA, 19 nt, Homo sapiens
  misc_RNA (1)...(19): siRNA sense strand
gcguaugacacauugauua

SEQ ID NO: 1417682 - RNA, 19 nt, Homo sapiens
  misc_RNA (1)...(19): siRNA sense strand
uggaaggccugcaucauga

SEQ ID NO: 1417683 - RNA, 19 nt, Homo sapiens
  misc_RNA (1)...(19): siRNA sense strand
agacacagcagaacagaaa

SEQ ID NO: 1417684 - RNA, 19 nt, Homo sapiens
  misc_RNA (1)...(19): siRNA sense strand
ccaagugacugacaucaac

SEQ ID NO: 1417685 - RNA, 19 nt, Homo sapiens
  misc_RNA (1)...(19): siRNA sense strand
guaauuggcaucaacuuca

SEQ ID NO: 1417686 - RNA, 19 nt, Homo sapiens
  misc_RNA (1)...(19): siRNA sense strand
uuacgucuguugcuagauu

SEQ ID NO: 1417687 - RNA, 19 nt, Homo sapiens
  misc_RNA (1)...(19): siRNA sense strand
guucaacugcuucguaauu

SEQ ID NO: 1417688 - RNA, 19 nt, Homo sapiens
  misc_RNA (1)...(19): siRNA sense strand
caaaauagaugagaucaag

SEQ ID NO: 1417689 - RNA, 19 nt, Homo sapiens
  misc_RNA (1)...(19): siRNA sense strand
guucuuacgucuguugcua

SEQ ID NO: 1417690 - RNA, 19 nt, Homo sapiens
  misc_RNA (1)...(19): siRNA sense strand
ucaacuucauggaaagaaa

SEQ ID NO: 1417691 - RNA, 19 nt, Homo sapiens
  misc_RNA (1)...(19): siRNA sense strand
agaagcguaugacacauug

SEQ ID NO: 1417692 - RNA, 19 nt, Homo sapiens
  misc_RNA (1)...(19): siRNA sense strand
gcuggagucaugacacuaa

SEQ ID NO: 1417693 - RNA, 19 nt, Homo sapiens
  misc_RNA (1)...(19): siRNA sense strand
gaugagaucaagaaugaca

SEQ ID NO: 1417694 - RNA, 19 nt, Homo sapiens
  misc_RNA (1)...(19): siRNA sense strand
ucgaaagaauggugucaau

SEQ ID NO: 1417695 - RNA, 19 nt, Homo sapiens
  misc_RNA (1)...(19): siRNA sense strand
cguaugacacauugauuaa

SEQ ID NO: 1417696 - RNA, 19 nt, Homo sapiens
  misc_RNA (1)...(19): siRNA sense strand
cagagaaaauucagacuau

SEQ ID NO: 1417697 - RNA, 19 nt, Homo sapiens
  misc_RNA (1)...(19): siRNA sense strand
gcaucaacuucauggaaag

SEQ ID NO: 1417698 - RNA, 19 nt, Homo sapiens
  misc_RNA (1)...(19): siRNA sense strand
ugaggaagacuguuacuac

SEQ ID NO: 1417699 - RNA, 19 nt, Homo sapiens
  misc_RNA (1)...(19): siRNA sense strand
ggaaagaaagaagcguaug

SEQ ID NO: 1417700 - RNA, 19 nt, Homo sapiens
  misc_RNA (1)...(19): siRNA sense strand
cacuauugcuggagucaug

SEQ ID NO: 1417701 - RNA, 19 nt, Homo sapiens
  misc_RNA (1)...(19): siRNA sense strand
gcagagaaaauucagacua

SEQ ID NO: 1417702 - RNA, 19 nt, Homo sapiens
  misc_RNA (1)...(19): siRNA sense strand
ggccaauucugccauaagc

SEQ ID NO: 1417703 - RNA, 19 nt, Homo sapiens
  misc_RNA (1)...(19): siRNA sense strand
uaauuggcaucaacuucau

SEQ ID NO: 1417704 - RNA, 19 nt, Homo sapiens
  misc_RNA (1)...(19): siRNA sense strand
aacauggaaucaucaagga

SEQ ID NO: 1417705 - RNA, 19 nt, Homo sapiens
  misc_RNA (1)...(19): siRNA sense strand
caucaacuccaagggauug

SEQ ID NO: 1417706 - RNA, 19 nt, Homo sapiens
  misc_RNA (1)...(19): siRNA sense strand
uacgucuguugcuagauua

SEQ ID NO: 1417707 - RNA, 19 nt, Homo sapiens
  misc_RNA (1)...(19): siRNA sense strand
ggagucaugacacuaaguc

SEQ ID NO: 1417708 - RNA, 19 nt, Homo sapiens
  misc_RNA (1)...(19): siRNA sense strand
cauggaaucaucaaggaau

SEQ ID NO: 1417709 - RNA, 19 nt, Homo sapiens
  misc_RNA (1)...(19): siRNA sense strand
cgaaagaauggugucaaug

SEQ ID NO: 1417710 - RNA, 19 nt, Homo sapiens
  misc_RNA (1)...(19): siRNA sense strand
gcaacaccaagugcaaaga

SEQ ID NO: 1417711 - RNA, 19 nt, Homo sapiens
  misc_RNA (1)...(19): siRNA sense strand
caacaccaagugcaaagag

SEQ ID NO: 1417712 - RNA, 19 nt, Homo sapiens
  misc_RNA (1)...(19): siRNA sense strand
gagaaaauucagacuauca

SEQ ID NO: 1417713 - RNA, 19 nt, Homo sapiens
  misc_RNA (1)...(19): siRNA sense strand
aagaagcguaugacacauu

SEQ ID NO: 1417714 - RNA, 19 nt, Homo sapiens
  misc_RNA (1)...(19): siRNA sense strand
caagacacagcagaacaga

SEQ ID NO: 1417715 - RNA, 19 nt, Homo sapiens
  misc_RNA (1)...(19): siRNA sense strand
ccuccuaccucugguucuu

SEQ ID NO: 1417716 - RNA, 19 nt, Homo sapiens
  misc_RNA (1)...(19): siRNA sense strand
caacuucauggaaagaaag

SEQ ID NO: 1417717 - RNA, 19 nt, Homo sapiens
  misc_RNA (1)...(19): siRNA sense strand
gcuagauuaucguccaaaa

SEQ ID NO: 1417718 - RNA, 19 nt, Homo sapiens
  misc_RNA (1)...(19): siRNA sense strand
uggcaucaacuucauggaa

SEQ ID NO: 1417719 - RNA, 19 nt, Homo sapiens
  misc_RNA (1)...(19): siRNA sense strand
cagcaacaccaagugcaaa

SEQ ID NO: 1417720 - RNA, 19 nt, Homo sapiens
  misc_RNA (1)...(19): siRNA sense strand
ucaacugcuucguaauugg

SEQ ID NO: 1417721 - RNA, 19 nt, Homo sapiens
  misc_RNA (1)...(19): siRNA sense strand
caaugaagccaaaauagau

SEQ ID NO: 1417722 - RNA, 19 nt, Homo sapiens
  misc_RNA (1)...(19): siRNA sense strand
uuaaugcccaagugacuga

SEQ ID NO: 1417723 - RNA, 19 nt, Homo sapiens
  misc_RNA (1)...(19): siRNA sense strand
ggaaggccugcaucaugau

SEQ ID NO: 1417724 - RNA, 19 nt, Homo sapiens
  misc_RNA (1)...(19): siRNA sense strand
cauuacuagugacucagaa

SEQ ID NO: 1417725 - RNA, 19 nt, Homo sapiens
  misc_RNA (1)...(19): siRNA sense strand
uucaacugcuucguaauug

SEQ ID NO: 1417726 - RNA, 19 nt, Homo sapiens
  misc_RNA (1)...(19): siRNA sense strand
aaugcacacucaccagcaa

SEQ ID NO: 1417727 - RNA, 19 nt, Homo sapiens
  misc_RNA (1)...(19): siRNA sense strand
ucagaaaugaaauccaaag

SEQ ID NO: 1417728 - RNA, 19 nt, Homo sapiens
  misc_RNA (1)...(19): siRNA sense strand
ccagcaacaccaagugcaa

SEQ ID NO: 1417729 - RNA, 19 nt, Homo sapiens
  misc_RNA (1)...(19): siRNA sense strand
gaauugaggaagacuguua

SEQ ID NO: 1417730 - RNA, 19 nt, Homo sapiens
  misc_RNA (1)...(19): siRNA sense strand
gaggaagacuguuacuaca

SEQ ID NO: 1417731 - RNA, 19 nt, Homo sapiens
  misc_RNA (1)...(19): siRNA sense strand
ggauuggaauugaggaaga

SEQ ID NO: 1417732 - RNA, 19 nt, Homo sapiens
  misc_RNA (1)...(19): siRNA sense strand
ugacugacaucaacuccaa

SEQ ID NO: 1417733 - RNA, 19 nt, Homo sapiens
  misc_RNA (1)...(19): siRNA sense strand
uggaaggccugcaucauga

SEQ ID NO: 1417734 - RNA, 19 nt, Homo sapiens
  misc_RNA (1)...(19): siRNA sense strand
uuacgucuguugcuagauu

SEQ ID NO: 1417735 - RNA, 19 nt, Homo sapiens
  misc_RNA (1)...(19): siRNA sense strand
ccaagugacugacaucaac

SEQ ID NO: 1417736 - RNA, 19 nt, Homo sapiens
  misc_RNA (1)...(19): siRNA sense strand
guucuuacgucuguugcua

SEQ ID NO: 1417737 - RNA, 19 nt, Homo sapiens
  misc_RNA (1)...(19): siRNA sense strand
ugaggaagacuguuacuac

SEQ ID NO: 1417738 - RNA, 19 nt, Homo sapiens
  misc_RNA (1)...(19): siRNA sense strand
ggccaauucugccauaagc

SEQ ID NO: 1417739 - RNA, 19 nt, Homo sapiens
  misc_RNA (1)...(19): siRNA sense strand
aacauggaaucaucaagga

SEQ ID NO: 1417740 - RNA, 19 nt, Homo sapiens
  misc_RNA (1)...(19): siRNA sense strand
uacgucuguugcuagauua

SEQ ID NO: 1417741 - RNA, 19 nt, Homo sapiens
  misc_RNA (1)...(19): siRNA sense strand
caucaacuccaagggauug

SEQ ID NO: 1417742 - RNA, 19 nt, Homo sapiens
  misc_RNA (1)...(19): siRNA sense strand
cauggaaucaucaaggaau

SEQ ID NO: 1417743 - RNA, 19 nt, Homo sapiens
  misc_RNA (1)...(19): siRNA sense strand
gcaacaccaagugcaaaga

SEQ ID NO: 1417744 - RNA, 19 nt, Homo sapiens
  misc_RNA (1)...(19): siRNA sense strand
caacaccaagugcaaagag

SEQ ID NO: 1417745 - RNA, 19 nt, Homo sapiens
  misc_RNA (1)...(19): siRNA sense strand
gcuagauuaucguccaaaa

SEQ ID NO: 1417746 - RNA, 19 nt, Homo sapiens
  misc_RNA (1)...(19): siRNA sense strand
ccuccuaccucugguucuu

SEQ ID NO: 1417747 - RNA, 19 nt, Homo sapiens
  misc_RNA (1)...(19): siRNA sense strand
cagcaacaccaagugcaaa

SEQ ID NO: 1417748 - RNA, 19 nt, Homo sapiens
  misc_RNA (1)...(19): siRNA sense strand
uuaaugcccaagugacuga

SEQ ID NO: 1417749 - RNA, 19 nt, Homo sapiens
  misc_RNA (1)...(19): siRNA sense strand
ggaaggccugcaucaugau

SEQ ID NO: 1417750 - RNA, 19 nt, Homo sapiens
  misc_RNA (1)...(19): siRNA sense strand
aaugcacacucaccagcaa

SEQ ID NO: 1417751 - RNA, 19 nt, Homo sapiens
  misc_RNA (1)...(19): siRNA sense strand
ccagcaacaccaagugcaa

SEQ ID NO: 1417752 - RNA, 19 nt, Homo sapiens
  misc_RNA (1)...(19): siRNA sense strand
gaauugaggaagacuguua

SEQ ID NO: 1417753 - RNA, 19 nt, Homo sapiens
  misc_RNA (1)...(19): siRNA sense strand
gaggaagacuguuacuaca

SEQ ID NO: 1417754 - RNA, 19 nt, Homo sapiens
  misc_RNA (1)...(19): siRNA sense strand
ggauuggaauugaggaaga

SEQ ID NO: 1417755 - RNA, 19 nt, Homo sapiens
  misc_RNA (1)...(19): siRNA sense strand
ugacugacaucaacuccaa

SEQ ID NO: 1417756 - RNA, 19 nt, Homo sapiens
  misc_RNA (1)...(19): siRNA sense strand
uggaaggccugcaucauga

SEQ ID NO: 1417757 - RNA, 19 nt, Homo sapiens
  misc_RNA (1)...(19): siRNA sense strand
uuacgucuguugcuagauu

SEQ ID NO: 1417758 - RNA, 19 nt, Homo sapiens
  misc_RNA (1)...(19): siRNA sense strand
ccaagugacugacaucaac

SEQ ID NO: 1417759 - RNA, 19 nt, Homo sapiens
  misc_RNA (1)...(19): siRNA sense strand
guucuuacgucuguugcua

SEQ ID NO: 1417760 - RNA, 19 nt, Homo sapiens
  misc_RNA (1)...(19): siRNA sense strand
ugaggaagacuguuacuac

SEQ ID NO: 1417761 - RNA, 19 nt, Homo sapiens
  misc_RNA (1)...(19): siRNA sense strand
ggccaauucugccauaagc

SEQ ID NO: 1417762 - RNA, 19 nt, Homo sapiens
  misc_RNA (1)...(19): siRNA sense strand
aacauggaaucaucaagga

SEQ ID NO: 1417763 - RNA, 19 nt, Homo sapiens
  misc_RNA (1)...(19): siRNA sense strand
uacgucuguugcuagauua

SEQ ID NO: 1417764 - RNA, 19 nt, Homo sapiens
  misc_RNA (1)...(19): siRNA sense strand
caucaacuccaagggauug

SEQ ID NO: 1417765 - RNA, 19 nt, Homo sapiens
  misc_RNA (1)...(19): siRNA sense strand
cauggaaucaucaaggaau

SEQ ID NO: 1417766 - RNA, 19 nt, Homo sapiens
  misc_RNA (1)...(19): siRNA sense strand
gcaacaccaagugcaaaga

SEQ ID NO: 1417767 - RNA, 19 nt, Homo sapiens
  misc_RNA (1)...(19): siRNA sense strand
caacaccaagugcaaagag

SEQ ID NO: 1417768 - RNA, 19 nt, Homo sapiens
  misc_RNA (1)...(19): siRNA sense strand
gcuagauuaucguccaaaa

SEQ ID NO: 1417769 - RNA, 19 nt, Homo sapiens
  misc_RNA (1)...(19): siRNA sense strand
ccuccuaccucugguucuu

SEQ ID NO: 1417770 - RNA, 19 nt, Homo sapiens
  misc_RNA (1)...(19): siRNA sense strand
cagcaacaccaagugcaaa

SEQ ID NO: 1417771 - RNA, 19 nt, Homo sapiens
  misc_RNA (1)...(19): siRNA sense strand
uuaaugcccaagugacuga

SEQ ID NO: 1417772 - RNA, 19 nt, Homo sapiens
  misc_RNA (1)...(19): siRNA sense strand
ggaaggccugcaucaugau

SEQ ID NO: 1417773 - RNA, 19 nt, Homo sapiens
  misc_RNA (1)...(19): siRNA sense strand
aaugcacacucaccagcaa

SEQ ID NO: 1417774 - RNA, 19 nt, Homo sapiens
  misc_RNA (1)...(19): siRNA sense strand
ccagcaacaccaagugcaa

SEQ ID NO: 1417775 - RNA, 19 nt, Homo sapiens
  misc_RNA (1)...(19): siRNA sense strand
gaauugaggaagacuguua

SEQ ID NO: 1417776 - RNA, 19 nt, Homo sapiens
  misc_RNA (1)...(19): siRNA sense strand
gaggaagacuguuacuaca

SEQ ID NO: 1417777 - RNA, 19 nt, Homo sapiens
  misc_RNA (1)...(19): siRNA sense strand
ggauuggaauugaggaaga

SEQ ID NO: 1417778 - RNA, 19 nt, Homo sapiens
  misc_RNA (1)...(19): siRNA sense strand
ugacugacaucaacuccaa

SEQ ID NO: 1417779 - RNA, 19 nt, Homo sapiens
  misc_RNA (1)...(19): siRNA sense strand
uggaaggccugcaucauga

SEQ ID NO: 1417780 - RNA, 19 nt, Homo sapiens
  misc_RNA (1)...(19): siRNA sense strand
uuacgucuguugcuagauu

SEQ ID NO: 1417781 - RNA, 19 nt, Homo sapiens
  misc_RNA (1)...(19): siRNA sense strand
ccaagugacugacaucaac

SEQ ID NO: 1417782 - RNA, 19 nt, Homo sapiens
  misc_RNA (1)...(19): siRNA sense strand
guucuuacgucuguugcua

SEQ ID NO: 1417783 - RNA, 19 nt, Homo sapiens
  misc_RNA (1)...(19): siRNA sense strand
ugaggaagacuguuacuac

SEQ ID NO: 1417784 - RNA, 19 nt, Homo sapiens
  misc_RNA (1)...(19): siRNA sense strand
ggccaauucugccauaagc

SEQ ID NO: 1417785 - RNA, 19 nt, Homo sapiens
  misc_RNA (1)...(19): siRNA sense strand
aacauggaaucaucaagga

SEQ ID NO: 1417786 - RNA, 19 nt, Homo sapiens
  misc_RNA (1)...(19): siRNA sense strand
uacgucuguugcuagauua

SEQ ID NO: 1417787 - RNA, 19 nt, Homo sapiens
  misc_RNA (1)...(19): siRNA sense strand
caucaacuccaagggauug

SEQ ID NO: 1417788 - RNA, 19 nt, Homo sapiens
  misc_RNA (1)...(19): siRNA sense strand
cauggaaucaucaaggaau

SEQ ID NO: 1417789 - RNA, 19 nt, Homo sapiens
  misc_RNA (1)...(19): siRNA sense strand
gcaacaccaagugcaaaga

SEQ ID NO: 1417790 - RNA, 19 nt, Homo sapiens
  misc_RNA (1)...(19): siRNA sense strand
caacaccaagugcaaagag

SEQ ID NO: 1417791 - RNA, 19 nt, Homo sapiens
  misc_RNA (1)...(19): siRNA sense strand
gcuagauuaucguccaaaa

SEQ ID NO: 1417792 - RNA, 19 nt, Homo sapiens
  misc_RNA (1)...(19): siRNA sense strand
ccuccuaccucugguucuu

SEQ ID NO: 1417793 - RNA, 19 nt, Homo sapiens
  misc_RNA (1)...(19): siRNA sense strand
cagcaacaccaagugcaaa

SEQ ID NO: 1417794 - RNA, 19 nt, Homo sapiens
  misc_RNA (1)...(19): siRNA sense strand
uuaaugcccaagugacuga

SEQ ID NO: 1417795 - RNA, 19 nt, Homo sapiens
  misc_RNA (1)...(19): siRNA sense strand
ggaaggccugcaucaugau

SEQ ID NO: 1417796 - RNA, 19 nt, Homo sapiens
  misc_RNA (1)...(19): siRNA sense strand
aaugcacacucaccagcaa

SEQ ID NO: 1417797 - RNA, 19 nt, Homo sapiens
  misc_RNA (1)...(19): siRNA sense strand
ccagcaacaccaagugcaa

SEQ ID NO: 1417798 - RNA, 19 nt, Homo sapiens
  misc_RNA (1)...(19): siRNA sense strand
gaauugaggaagacuguua

SEQ ID NO: 1417799 - RNA, 19 nt, Homo sapiens
  misc_RNA (1)...(19): siRNA sense strand
gaggaagacuguuacuaca

SEQ ID NO: 1417800 - RNA, 19 nt, Homo sapiens
  misc_RNA (1)...(19): siRNA sense strand
ggauuggaauugaggaaga

SEQ ID NO: 1417801 - RNA, 19 nt, Homo sapiens
  misc_RNA (1)...(19): siRNA sense strand
ugacugacaucaacuccaa

SEQ ID NO: 1417802 - RNA, 19 nt, Homo sapiens
  misc_RNA (1)...(19): siRNA sense strand
uggaaggccugcaucauga

SEQ ID NO: 1417803 - RNA, 19 nt, Homo sapiens
  misc_RNA (1)...(19): siRNA sense strand
uuacgucuguugcuagauu

SEQ ID NO: 1417804 - RNA, 19 nt, Homo sapiens
  misc_RNA (1)...(19): siRNA sense strand
ccaagugacugacaucaac

SEQ ID NO: 1417805 - RNA, 19 nt, Homo sapiens
  misc_RNA (1)...(19): siRNA sense strand
guucuuacgucuguugcua

SEQ ID NO: 1417806 - RNA, 19 nt, Homo sapiens
  misc_RNA (1)...(19): siRNA sense strand
ugaggaagacuguuacuac

SEQ ID NO: 1417807 - RNA, 19 nt, Homo sapiens
  misc_RNA (1)...(19): siRNA sense strand
ggccaauucugccauaagc

SEQ ID NO: 1417808 - RNA, 19 nt, Homo sapiens
  misc_RNA (1)...(19): siRNA sense strand
aacauggaaucaucaagga

SEQ ID NO: 1417809 - RNA, 19 nt, Homo sapiens
  misc_RNA (1)...(19): siRNA sense strand
uacgucuguugcuagauua

SEQ ID NO: 1417810 - RNA, 19 nt, Homo sapiens
  misc_RNA (1)...(19): siRNA sense strand
caucaacuccaagggauug

SEQ ID NO: 1417811 - RNA, 19 nt, Homo sapiens
  misc_RNA (1)...(19): siRNA sense strand
cauggaaucaucaaggaau

SEQ ID NO: 1417812 - RNA, 19 nt, Homo sapiens
  misc_RNA (1)...(19): siRNA sense strand
gcaacaccaagugcaaaga

SEQ ID NO: 1417813 - RNA, 19 nt, Homo sapiens
  misc_RNA (1)...(19): siRNA sense strand
caacaccaagugcaaagag

SEQ ID NO: 1417814 - RNA, 19 nt, Homo sapiens
  misc_RNA (1)...(19): siRNA sense strand
gcuagauuaucguccaaaa

SEQ ID NO: 1417815 - RNA, 19 nt, Homo sapiens
  misc_RNA (1)...(19): siRNA sense strand
ccuccuaccucugguucuu

SEQ ID NO: 1417816 - RNA, 19 nt, Homo sapiens
  misc_RNA (1)...(19): siRNA sense strand
cagcaacaccaagugcaaa

SEQ ID NO: 1417817 - RNA, 19 nt, Homo sapiens
  misc_RNA (1)...(19): siRNA sense strand
uuaaugcccaagugacuga

SEQ ID NO: 1417818 - RNA, 19 nt, Homo sapiens
  misc_RNA (1)...(19): siRNA sense strand
ggaaggccugcaucaugau

SEQ ID NO: 1417819 - RNA, 19 nt, Homo sapiens
  misc_RNA (1)...(19): siRNA sense strand
aaugcacacucaccagcaa

SEQ ID NO: 1417820 - RNA, 19 nt, Homo sapiens
  misc_RNA (1)...(19): siRNA sense strand
ccagcaacaccaagugcaa

SEQ ID NO: 1417821 - RNA, 19 nt, Homo sapiens
  misc_RNA (1)...(19): siRNA sense strand
gaauugaggaagacuguua

SEQ ID NO: 1417822 - RNA, 19 nt, Homo sapiens
  misc_RNA (1)...(19): siRNA sense strand
gaggaagacuguuacuaca

SEQ ID NO: 1417823 - RNA, 19 nt, Homo sapiens
  misc_RNA (1)...(19): siRNA sense strand
ggauuggaauugaggaaga

SEQ ID NO: 1417824 - RNA, 19 nt, Homo sapiens
  misc_RNA (1)...(19): siRNA sense strand
ugacugacaucaacuccaa

SEQ ID NO: 1417825 - RNA, 19 nt, Homo sapiens
  misc_RNA (1)...(19): siRNA sense strand
uggaaggccugcaucauga

SEQ ID NO: 1417826 - RNA, 19 nt, Homo sapiens
  misc_RNA (1)...(19): siRNA sense strand
uuacgucuguugcuagauu

SEQ ID NO: 1417827 - RNA, 19 nt, Homo sapiens
  misc_RNA (1)...(19): siRNA sense strand
ccaagugacugacaucaac

SEQ ID NO: 1417828 - RNA, 19 nt, Homo sapiens
  misc_RNA (1)...(19): siRNA sense strand
guucuuacgucuguugcua

SEQ ID NO: 1417829 - RNA, 19 nt, Homo sapiens
  misc_RNA (1)...(19): siRNA sense strand
ugaggaagacuguuacuac

SEQ ID NO: 1417830 - RNA, 19 nt, Homo sapiens
  misc_RNA (1)...(19): siRNA sense strand
ggccaauucugccauaagc

SEQ ID NO: 1417831 - RNA, 19 nt, Homo sapiens
  misc_RNA (1)...(19): siRNA sense strand
aacauggaaucaucaagga

SEQ ID NO: 1417832 - RNA, 19 nt, Homo sapiens
  misc_RNA (1)...(19): siRNA sense strand
uacgucuguugcuagauua

SEQ ID NO: 1417833 - RNA, 19 nt, Homo sapiens
  misc_RNA (1)...(19): siRNA sense strand
caucaacuccaagggauug

SEQ ID NO: 1417834 - RNA, 19 nt, Homo sapiens
  misc_RNA (1)...(19): siRNA sense strand
cauggaaucaucaaggaau

SEQ ID NO: 1417835 - RNA, 19 nt, Homo sapiens
  misc_RNA (1)...(19): siRNA sense strand
gcaacaccaagugcaaaga

SEQ ID NO: 1417836 - RNA, 19 nt, Homo sapiens
  misc_RNA (1)...(19): siRNA sense strand
caacaccaagugcaaagag

SEQ ID NO: 1417837 - RNA, 19 nt, Homo sapiens
  misc_RNA (1)...(19): siRNA sense strand
gcuagauuaucguccaaaa

SEQ ID NO: 1417838 - RNA, 19 nt, Homo sapiens
  misc_RNA (1)...(19): siRNA sense strand
ccuccuaccucugguucuu

SEQ ID NO: 1417839 - RNA, 19 nt, Homo sapiens
  misc_RNA (1)...(19): siRNA sense strand
cagcaacaccaagugcaaa

SEQ ID NO: 1417840 - RNA, 19 nt, Homo sapiens
  misc_RNA (1)...(19): siRNA sense strand
uuaaugcccaagugacuga

SEQ ID NO: 1417841 - RNA, 19 nt, Homo sapiens
  misc_RNA (1)...(19): siRNA sense strand
ggaaggccugcaucaugau

SEQ ID NO: 1417842 - RNA, 19 nt, Homo sapiens
  misc_RNA (1)...(19): siRNA sense strand
aaugcacacucaccagcaa

SEQ ID NO: 1417843 - RNA, 19 nt, Homo sapiens
  misc_RNA (1)...(19): siRNA sense strand
ccagcaacaccaagugcaa

SEQ ID NO: 1417844 - RNA, 19 nt, Homo sapiens
  misc_RNA (1)...(19): siRNA sense strand
gaauugaggaagacuguua

SEQ ID NO: 1417845 - RNA, 19 nt, Homo sapiens
  misc_RNA (1)...(19): siRNA sense strand
gaggaagacuguuacuaca

SEQ ID NO: 1417846 - RNA, 19 nt, Homo sapiens
  misc_RNA (1)...(19): siRNA sense strand
ggauuggaauugaggaaga

SEQ ID NO: 1417847 - RNA, 19 nt, Homo sapiens
  misc_RNA (1)...(19): siRNA sense strand
ugacugacaucaacuccaa

SEQ ID NO: 1417848 - RNA, 19 nt, Homo sapiens
  misc_RNA (1)...(19): siRNA sense strand
uggaaggccugcaucauga

SEQ ID NO: 1417849 - RNA, 19 nt, Homo sapiens
  misc_RNA (1)...(19): siRNA sense strand
uuacgucuguugcuagauu

SEQ ID NO: 1417850 - RNA, 19 nt, Homo sapiens
  misc_RNA (1)...(19): siRNA sense strand
ccaagugacugacaucaac

SEQ ID NO: 1417851 - RNA, 19 nt, Homo sapiens
  misc_RNA (1)...(19): siRNA sense strand
guucuuacgucuguugcua

SEQ ID NO: 1417852 - RNA, 19 nt, Homo sapiens
  misc_RNA (1)...(19): siRNA sense strand
ugaggaagacuguuacuac

SEQ ID NO: 1417853 - RNA, 19 nt, Homo sapiens
  misc_RNA (1)...(19): siRNA sense strand
ggccaauucugccauaagc

SEQ ID NO: 1417854 - RNA, 19 nt, Homo sapiens
  misc_RNA (1)...(19): siRNA sense strand
aacauggaaucaucaagga

SEQ ID NO: 1417855 - RNA, 19 nt, Homo sapiens
  misc_RNA (1)...(19): siRNA sense strand
uacgucuguugcuagauua

SEQ ID NO: 1417856 - RNA, 19 nt, Homo sapiens
  misc_RNA (1)...(19): siRNA sense strand
caucaacuccaagggauug

SEQ ID NO: 1417857 - RNA, 19 nt, Homo sapiens
  misc_RNA (1)...(19): siRNA sense strand
cauggaaucaucaaggaau

SEQ ID NO: 1417858 - RNA, 19 nt, Homo sapiens
  misc_RNA (1)...(19): siRNA sense strand
gcaacaccaagugcaaaga

SEQ ID NO: 1417859 - RNA, 19 nt, Homo sapiens
  misc_RNA (1)...(19): siRNA sense strand
caacaccaagugcaaagag

SEQ ID NO: 1417860 - RNA, 19 nt, Homo sapiens
  misc_RNA (1)...(19): siRNA sense strand
gcuagauuaucguccaaaa

SEQ ID NO: 1417861 - RNA, 19 nt, Homo sapiens
  misc_RNA (1)...(19): siRNA sense strand
ccuccuaccucugguucuu

SEQ ID NO: 1417862 - RNA, 19 nt, Homo sapiens
  misc_RNA (1)...(19): siRNA sense strand
cagcaacaccaagugcaaa

SEQ ID NO: 1417863 - RNA, 19 nt, Homo sapiens
  misc_RNA (1)...(19): siRNA sense strand
uuaaugcccaagugacuga

SEQ ID NO: 1417864 - RNA, 19 nt, Homo sapiens
  misc_RNA (1)...(19): siRNA sense strand
ggaaggccugcaucaugau

SEQ ID NO: 1417865 - RNA, 19 nt, Homo sapiens
  misc_RNA (1)...(19): siRNA sense strand
aaugcacacucaccagcaa

SEQ ID NO: 1417866 - RNA, 19 nt, Homo sapiens
  misc_RNA (1)...(19): siRNA sense strand
ccagcaacaccaagugcaa

SEQ ID NO: 1417867 - RNA, 19 nt, Homo sapiens
  misc_RNA (1)...(19): siRNA sense strand
cagcaaagcucuaaagauc

SEQ ID NO: 1417868 - RNA, 19 nt, Homo sapiens
  misc_RNA (1)...(19): siRNA sense strand
gcaaagcucuaaagaucaa

SEQ ID NO: 1417869 - RNA, 19 nt, Homo sapiens
  misc_RNA (1)...(19): siRNA sense strand
aggaggagcugcagaagca

SEQ ID NO: 1417870 - RNA, 19 nt, Homo sapiens
  misc_RNA (1)...(19): siRNA sense strand
agaaggaggagcugcagaa

SEQ ID NO: 1417871 - RNA, 19 nt, Homo sapiens
  misc_RNA (1)...(19): siRNA sense strand
ccagcaaagcucuaaagau

SEQ ID NO: 1417872 - RNA, 19 nt, Homo sapiens
  misc_RNA (1)...(19): siRNA sense strand
agcgagagcugagcgagaa

SEQ ID NO: 1417873 - RNA, 19 nt, Homo sapiens
  misc_RNA (1)...(19): siRNA sense strand
gaaggaggagcugcagaag

SEQ ID NO: 1417874 - RNA, 19 nt, Homo sapiens
  misc_RNA (1)...(19): siRNA sense strand
ugaagcgcgugugccagaa

SEQ ID NO: 1417875 - RNA, 19 nt, Homo sapiens
  misc_RNA (1)...(19): siRNA sense strand
cagcaaagcucuaaagauc

SEQ ID NO: 1417876 - RNA, 19 nt, Homo sapiens
  misc_RNA (1)...(19): siRNA sense strand
gcaaagcucuaaagaucaa

SEQ ID NO: 1417877 - RNA, 19 nt, Homo sapiens
  misc_RNA (1)...(19): siRNA sense strand
aggaggagcugcagaagca

SEQ ID NO: 1417878 - RNA, 19 nt, Homo sapiens
  misc_RNA (1)...(19): siRNA sense strand
agaaggaggagcugcagaa

SEQ ID NO: 1417879 - RNA, 19 nt, Homo sapiens
  misc_RNA (1)...(19): siRNA sense strand
ccagcaaagcucuaaagau

SEQ ID NO: 1417880 - RNA, 19 nt, Homo sapiens
  misc_RNA (1)...(19): siRNA sense strand
agcgagagcugagcgagaa

SEQ ID NO: 1417881 - RNA, 19 nt, Homo sapiens
  misc_RNA (1)...(19): siRNA sense strand
gaaggaggagcugcagaag

SEQ ID NO: 1417882 - RNA, 19 nt, Homo sapiens
  misc_RNA (1)...(19): siRNA sense strand
ugaagcgcgugugccagaa

SEQ ID NO: 1417883 - RNA, 19 nt, Homo sapiens
  misc_RNA (1)...(19): siRNA sense strand
gcgagaaggugucugaguu

SEQ ID NO: 1417884 - RNA, 19 nt, Homo sapiens
  misc_RNA (1)...(19): siRNA sense strand
gaaggugucugaguuugug

SEQ ID NO: 1417885 - RNA, 19 nt, Homo sapiens
  misc_RNA (1)...(19): siRNA sense strand
gaugaccacuuccgagaga

SEQ ID NO: 1417886 - RNA, 19 nt, Homo sapiens
  misc_RNA (1)...(19): siRNA sense strand
ucacucacgugcucuacua

SEQ ID NO: 1417887 - RNA, 19 nt, Homo sapiens
  misc_RNA (1)...(19): siRNA sense strand
gggcaagagugucgugguu

SEQ ID NO: 1417888 - RNA, 19 nt, Homo sapiens
  misc_RNA (1)...(19): siRNA sense strand
gagaaggugucugaguuug

SEQ ID NO: 1417889 - RNA, 19 nt, Homo sapiens
  misc_RNA (1)...(19): siRNA sense strand
guacauggccaaggucauu

SEQ ID NO: 1417890 - RNA, 19 nt, Homo sapiens
  misc_RNA (1)...(19): siRNA sense strand
gcguagagcaugugaguga

SEQ ID NO: 1417891 - RNA, 19 nt, Homo sapiens
  misc_RNA (1)...(19): siRNA sense strand
gcaagagugucgugguucu

SEQ ID NO: 1417892 - RNA, 19 nt, Homo sapiens
  misc_RNA (1)...(19): siRNA sense strand
gagcugcccuucccuuguc

SEQ ID NO: 1417893 - RNA, 19 nt, Homo sapiens
  misc_RNA (1)...(19): siRNA sense strand
gcuccgaggugaucuuugg

SEQ ID NO: 1417894 - RNA, 19 nt, Homo sapiens
  misc_RNA (1)...(19): siRNA sense strand
cgagaaggugucugaguuu

SEQ ID NO: 1417895 - RNA, 19 nt, Homo sapiens
  misc_RNA (1)...(19): siRNA sense strand
ugaaggugcugaccaucga

SEQ ID NO: 1417896 - RNA, 19 nt, Homo sapiens
  misc_RNA (1)...(19): siRNA sense strand
uggccaaggucauugagaa

SEQ ID NO: 1417897 - RNA, 19 nt, Homo sapiens
  misc_RNA (1)...(19): siRNA sense strand
caacagcugcccugacauc

SEQ ID NO: 1417898 - RNA, 19 nt, Homo sapiens
  misc_RNA (1)...(19): siRNA sense strand
ccaucggucuggacuguug

SEQ ID NO: 1417899 - RNA, 19 nt, Homo sapiens
  misc_RNA (1)...(19): siRNA sense strand
ggcaggagacggacucuau

SEQ ID NO: 1417900 - RNA, 19 nt, Homo sapiens
  misc_RNA (1)...(19): siRNA sense strand
gcagaccuacagcgccaua

SEQ ID NO: 1417901 - RNA, 19 nt, Homo sapiens
  misc_RNA (1)...(19): siRNA sense strand
ggacauuggcguagagcau

SEQ ID NO: 1417902 - RNA, 19 nt, Homo sapiens
  misc_RNA (1)...(19): siRNA sense strand
caucucacccgacgucuuc

SEQ ID NO: 1417903 - RNA, 19 nt, Homo sapiens
  misc_RNA (1)...(19): siRNA sense strand
uccgagcccugcuggauga

SEQ ID NO: 1417904 - RNA, 19 nt, Homo sapiens
  misc_RNA (1)...(19): siRNA sense strand
cugaguuuguggcgucuaa

SEQ ID NO: 1417905 - RNA, 19 nt, Homo sapiens
  misc_RNA (1)...(19): siRNA sense strand
cacccgacgucuucacuca

SEQ ID NO: 1417906 - RNA, 19 nt, Homo sapiens
  misc_RNA (1)...(19): siRNA sense strand
gagcuccgaggugaucuuu

SEQ ID NO: 1417907 - RNA, 19 nt, Homo sapiens
  misc_RNA (1)...(19): siRNA sense strand
uucaacagcugcccugaca

SEQ ID NO: 1417908 - RNA, 19 nt, Homo sapiens
  misc_RNA (1)...(19): siRNA sense strand
gcaggagacggacucuauc

SEQ ID NO: 1417909 - RNA, 19 nt, Homo sapiens
  misc_RNA (1)...(19): siRNA sense strand
caaauggaagggcaagagu

SEQ ID NO: 1417910 - RNA, 19 nt, Homo sapiens
  misc_RNA (1)...(19): siRNA sense strand
ggagcugcccuucccuugu

SEQ ID NO: 1417911 - RNA, 19 nt, Homo sapiens
  misc_RNA (1)...(19): siRNA sense strand
cacgugcucuacuacaugu

SEQ ID NO: 1417912 - RNA, 19 nt, Homo sapiens
  misc_RNA (1)...(19): siRNA sense strand
ccaaggucauugagaagcu

SEQ ID NO: 1417913 - RNA, 19 nt, Homo sapiens
  misc_RNA (1)...(19): siRNA sense strand
cugaguacauggccaaggu

SEQ ID NO: 1417914 - RNA, 19 nt, Homo sapiens
  misc_RNA (1)...(19): siRNA sense strand
gugugaaggugcugaccau

SEQ ID NO: 1417915 - RNA, 19 nt, Homo sapiens
  misc_RNA (1)...(19): siRNA sense strand
ccugcuggaugaccacuuc

SEQ ID NO: 1417916 - RNA, 19 nt, Homo sapiens
  misc_RNA (1)...(19): siRNA sense strand
ucacgugcucuacuacaug

SEQ ID NO: 1417917 - RNA, 19 nt, Homo sapiens
  misc_RNA (1)...(19): siRNA sense strand
gcgagaaggugucugaguu

SEQ ID NO: 1417918 - RNA, 19 nt, Homo sapiens
  misc_RNA (1)...(19): siRNA sense strand
gaaggugucugaguuugug

SEQ ID NO: 1417919 - RNA, 19 nt, Homo sapiens
  misc_RNA (1)...(19): siRNA sense strand
gcaggaggcgggauuacua

SEQ ID NO: 1417920 - RNA, 19 nt, Homo sapiens
  misc_RNA (1)...(19): siRNA sense strand
gaugaccacuuccgagaga

SEQ ID NO: 1417921 - RNA, 19 nt, Homo sapiens
  misc_RNA (1)...(19): siRNA sense strand
ucacucacgugcucuacua

SEQ ID NO: 1417922 - RNA, 19 nt, Homo sapiens
  misc_RNA (1)...(19): siRNA sense strand
ggugagcgcugccucuaug

SEQ ID NO: 1417923 - RNA, 19 nt, Homo sapiens
  misc_RNA (1)...(19): siRNA sense strand
ggauuacuaugacgacuuc

SEQ ID NO: 1417924 - RNA, 19 nt, Homo sapiens
  misc_RNA (1)...(19): siRNA sense strand
gggcaagagugucgugguu

SEQ ID NO: 1417925 - RNA, 19 nt, Homo sapiens
  misc_RNA (1)...(19): siRNA sense strand
gagaaggugucugaguuug

SEQ ID NO: 1417926 - RNA, 19 nt, Homo sapiens
  misc_RNA (1)...(19): siRNA sense strand
guacauggccaaggucauu

SEQ ID NO: 1417927 - RNA, 19 nt, Homo sapiens
  misc_RNA (1)...(19): siRNA sense strand
ugacguggucuuuguagua

SEQ ID NO: 1417928 - RNA, 19 nt, Homo sapiens
  misc_RNA (1)...(19): siRNA sense strand
gcguagagcaugugaguga

SEQ ID NO: 1417929 - RNA, 19 nt, Homo sapiens
  misc_RNA (1)...(19): siRNA sense strand
gcaagagugucgugguucu

SEQ ID NO: 1417930 - RNA, 19 nt, Homo sapiens
  misc_RNA (1)...(19): siRNA sense strand
gagcugcccuucccuuguc

SEQ ID NO: 1417931 - RNA, 19 nt, Homo sapiens
  misc_RNA (1)...(19): siRNA sense strand
acgaggagcugguacucua

SEQ ID NO: 1417932 - RNA, 19 nt, Homo sapiens
  misc_RNA (1)...(19): siRNA sense strand
gcuccgaggugaucuuugg

SEQ ID NO: 1417933 - RNA, 19 nt, Homo sapiens
  misc_RNA (1)...(19): siRNA sense strand
guacuaugccugcuugugu

SEQ ID NO: 1417934 - RNA, 19 nt, Homo sapiens
  misc_RNA (1)...(19): siRNA sense strand
ggaggcgggauuacuauga

SEQ ID NO: 1417935 - RNA, 19 nt, Homo sapiens
  misc_RNA (1)...(19): siRNA sense strand
ccaacaugcuggacaccaa

SEQ ID NO: 1417936 - RNA, 19 nt, Homo sapiens
  misc_RNA (1)...(19): siRNA sense strand
cgagaaggugucugaguuu

SEQ ID NO: 1417937 - RNA, 19 nt, Homo sapiens
  misc_RNA (1)...(19): siRNA sense strand
acagugacguggucuuugu

SEQ ID NO: 1417938 - RNA, 19 nt, Homo sapiens
  misc_RNA (1)...(19): siRNA sense strand
uggccaaggucauugagaa

SEQ ID NO: 1417939 - RNA, 19 nt, Homo sapiens
  misc_RNA (1)...(19): siRNA sense strand
ugaaggugcugaccaucga

SEQ ID NO: 1417940 - RNA, 19 nt, Homo sapiens
  misc_RNA (1)...(19): siRNA sense strand
ggacaccagcgaccuguuc

SEQ ID NO: 1417941 - RNA, 19 nt, Homo sapiens
  misc_RNA (1)...(19): siRNA sense strand
caacagcugcccugacauc

SEQ ID NO: 1417942 - RNA, 19 nt, Homo sapiens
  misc_RNA (1)...(19): siRNA sense strand
ccaucggucuggacuguug

SEQ ID NO: 1417943 - RNA, 19 nt, Homo sapiens
  misc_RNA (1)...(19): siRNA sense strand
ggcaggagacggacucuau

SEQ ID NO: 1417944 - RNA, 19 nt, Homo sapiens
  misc_RNA (1)...(19): siRNA sense strand
caacaugcuggacaccaaa

SEQ ID NO: 1417945 - RNA, 19 nt, Homo sapiens
  misc_RNA (1)...(19): siRNA sense strand
gcagaccuacagcgccaua

SEQ ID NO: 1417946 - RNA, 19 nt, Homo sapiens
  misc_RNA (1)...(19): siRNA sense strand
ggacauuggcguagagcau

SEQ ID NO: 1417947 - RNA, 19 nt, Homo sapiens
  misc_RNA (1)...(19): siRNA sense strand
caucucacccgacgucuuc

SEQ ID NO: 1417948 - RNA, 19 nt, Homo sapiens
  misc_RNA (1)...(19): siRNA sense strand
uccgagcccugcuggauga

SEQ ID NO: 1417949 - RNA, 19 nt, Homo sapiens
  misc_RNA (1)...(19): siRNA sense strand
gacguggucuuuguaguac

SEQ ID NO: 1417950 - RNA, 19 nt, Homo sapiens
  misc_RNA (1)...(19): siRNA sense strand
uuacuaugacgacuucuug

SEQ ID NO: 1417951 - RNA, 19 nt, Homo sapiens
  misc_RNA (1)...(19): siRNA sense strand
cacccgacgucuucacuca

SEQ ID NO: 1417952 - RNA, 19 nt, Homo sapiens
  misc_RNA (1)...(19): siRNA sense strand
gagcuccgaggugaucuuu

SEQ ID NO: 1417953 - RNA, 19 nt, Homo sapiens
  misc_RNA (1)...(19): siRNA sense strand
cugaguuuguggcgucuaa

SEQ ID NO: 1417954 - RNA, 19 nt, Homo sapiens
  misc_RNA (1)...(19): siRNA sense strand
caaauggaagggcaagagu

SEQ ID NO: 1417955 - RNA, 19 nt, Homo sapiens
  misc_RNA (1)...(19): siRNA sense strand
gcaggagacggacucuauc

SEQ ID NO: 1417956 - RNA, 19 nt, Homo sapiens
  misc_RNA (1)...(19): siRNA sense strand
uucaacagcugcccugaca

SEQ ID NO: 1417957 - RNA, 19 nt, Homo sapiens
  misc_RNA (1)...(19): siRNA sense strand
ggagcugcccuucccuugu

SEQ ID NO: 1417958 - RNA, 19 nt, Homo sapiens
  misc_RNA (1)...(19): siRNA sense strand
cacgugcucuacuacaugu

SEQ ID NO: 1417959 - RNA, 19 nt, Homo sapiens
  misc_RNA (1)...(19): siRNA sense strand
gaggcgggauuacuaugac

SEQ ID NO: 1417960 - RNA, 19 nt, Homo sapiens
  misc_RNA (1)...(19): siRNA sense strand
ccaaggucauugagaagcu

SEQ ID NO: 1417961 - RNA, 19 nt, Homo sapiens
  misc_RNA (1)...(19): siRNA sense strand
cugaguacauggccaaggu

SEQ ID NO: 1417962 - RNA, 19 nt, Homo sapiens
  misc_RNA (1)...(19): siRNA sense strand
gugugaaggugcugaccau

SEQ ID NO: 1417963 - RNA, 19 nt, Homo sapiens
  misc_RNA (1)...(19): siRNA sense strand
ccugcuggaugaccacuuc

SEQ ID NO: 1417964 - RNA, 19 nt, Homo sapiens
  misc_RNA (1)...(19): siRNA sense strand
gugccuacuuugccaacau

SEQ ID NO: 1417965 - RNA, 19 nt, Homo sapiens
  misc_RNA (1)...(19): siRNA sense strand
gggauuacuaugacgacuu

SEQ ID NO: 1417966 - RNA, 19 nt, Homo sapiens
  misc_RNA (1)...(19): siRNA sense strand
ucacgugcucuacuacaug

SEQ ID NO: 1417967 - RNA, 19 nt, Homo sapiens
  misc_RNA (1)...(19): siRNA sense strand
ggccaacaccuucgauggu

SEQ ID NO: 1417968 - RNA, 19 nt, Homo sapiens
  misc_RNA (1)...(19): siRNA sense strand
gcgagaaggugucugaguu

SEQ ID NO: 1417969 - RNA, 19 nt, Homo sapiens
  misc_RNA (1)...(19): siRNA sense strand
gaaggugucugaguuugug

SEQ ID NO: 1417970 - RNA, 19 nt, Homo sapiens
  misc_RNA (1)...(19): siRNA sense strand
gcaggaggcgggauuacua

SEQ ID NO: 1417971 - RNA, 19 nt, Homo sapiens
  misc_RNA (1)...(19): siRNA sense strand
gaugaccacuuccgagaga

SEQ ID NO: 1417972 - RNA, 19 nt, Homo sapiens
  misc_RNA (1)...(19): siRNA sense strand
ucacucacgugcucuacua

SEQ ID NO: 1417973 - RNA, 19 nt, Homo sapiens
  misc_RNA (1)...(19): siRNA sense strand
ggugagcgcugccucuaug

SEQ ID NO: 1417974 - RNA, 19 nt, Homo sapiens
  misc_RNA (1)...(19): siRNA sense strand
ggauuacuaugacgacuuc

SEQ ID NO: 1417975 - RNA, 19 nt, Homo sapiens
  misc_RNA (1)...(19): siRNA sense strand
gggcaagagugucgugguu

SEQ ID NO: 1417976 - RNA, 19 nt, Homo sapiens
  misc_RNA (1)...(19): siRNA sense strand
gagaaggugucugaguuug

SEQ ID NO: 1417977 - RNA, 19 nt, Homo sapiens
  misc_RNA (1)...(19): siRNA sense strand
guacauggccaaggucauu

SEQ ID NO: 1417978 - RNA, 19 nt, Homo sapiens
  misc_RNA (1)...(19): siRNA sense strand
ugacguggucuuuguagua

SEQ ID NO: 1417979 - RNA, 19 nt, Homo sapiens
  misc_RNA (1)...(19): siRNA sense strand
gcguagagcaugugaguga

SEQ ID NO: 1417980 - RNA, 19 nt, Homo sapiens
  misc_RNA (1)...(19): siRNA sense strand
acgaggagcugguacucua

SEQ ID NO: 1417981 - RNA, 19 nt, Homo sapiens
  misc_RNA (1)...(19): siRNA sense strand
gagcugcccuucccuuguc

SEQ ID NO: 1417982 - RNA, 19 nt, Homo sapiens
  misc_RNA (1)...(19): siRNA sense strand
gcaagagugucgugguucu

SEQ ID NO: 1417983 - RNA, 19 nt, Homo sapiens
  misc_RNA (1)...(19): siRNA sense strand
guacuaugccugcuugugu

SEQ ID NO: 1417984 - RNA, 19 nt, Homo sapiens
  misc_RNA (1)...(19): siRNA sense strand
gcuccgaggugaucuuugg

SEQ ID NO: 1417985 - RNA, 19 nt, Homo sapiens
  misc_RNA (1)...(19): siRNA sense strand
ggaggcgggauuacuauga

SEQ ID NO: 1417986 - RNA, 19 nt, Homo sapiens
  misc_RNA (1)...(19): siRNA sense strand
ccaacaugcuggacaccaa

SEQ ID NO: 1417987 - RNA, 19 nt, Homo sapiens
  misc_RNA (1)...(19): siRNA sense strand
cgagaaggugucugaguuu

SEQ ID NO: 1417988 - RNA, 19 nt, Homo sapiens
  misc_RNA (1)...(19): siRNA sense strand
acagugacguggucuuugu

SEQ ID NO: 1417989 - RNA, 19 nt, Homo sapiens
  misc_RNA (1)...(19): siRNA sense strand
uggccaaggucauugagaa

SEQ ID NO: 1417990 - RNA, 19 nt, Homo sapiens
  misc_RNA (1)...(19): siRNA sense strand
ugaaggugcugaccaucga

SEQ ID NO: 1417991 - RNA, 19 nt, Homo sapiens
  misc_RNA (1)...(19): siRNA sense strand
caacagcugcccugacauc

SEQ ID NO: 1417992 - RNA, 19 nt, Homo sapiens
  misc_RNA (1)...(19): siRNA sense strand
ccaucggucuggacuguug

SEQ ID NO: 1417993 - RNA, 19 nt, Homo sapiens
  misc_RNA (1)...(19): siRNA sense strand
ggcaggagacggacucuau

SEQ ID NO: 1417994 - RNA, 19 nt, Homo sapiens
  misc_RNA (1)...(19): siRNA sense strand
caacaugcuggacaccaaa

SEQ ID NO: 1417995 - RNA, 19 nt, Homo sapiens
  misc_RNA (1)...(19): siRNA sense strand
gcagaccuacagcgccaua

SEQ ID NO: 1417996 - RNA, 19 nt, Homo sapiens
  misc_RNA (1)...(19): siRNA sense strand
ggacauuggcguagagcau

SEQ ID NO: 1417997 - RNA, 19 nt, Homo sapiens
  misc_RNA (1)...(19): siRNA sense strand
caucucacccgacgucuuc

SEQ ID NO: 1417998 - RNA, 19 nt, Homo sapiens
  misc_RNA (1)...(19): siRNA sense strand
uccgagcccugcuggauga

SEQ ID NO: 1417999 - RNA, 19 nt, Homo sapiens
  misc_RNA (1)...(19): siRNA sense strand
gacguggucuuuguaguac

SEQ ID NO: 1418000 - RNA, 19 nt, Homo sapiens
  misc_RNA (1)...(19): siRNA sense strand
uuacuaugacgacuucuug

SEQ ID NO: 1418001 - RNA, 19 nt, Homo sapiens
  misc_RNA (1)...(19): siRNA sense strand
cacccgacgucuucacuca

SEQ ID NO: 1418002 - RNA, 19 nt, Homo sapiens
  misc_RNA (1)...(19): siRNA sense strand
gagcuccgaggugaucuuu

SEQ ID NO: 1418003 - RNA, 19 nt, Homo sapiens
  misc_RNA (1)...(19): siRNA sense strand
cugaguuuguggcgucuaa

SEQ ID NO: 1418004 - RNA, 19 nt, Homo sapiens
  misc_RNA (1)...(19): siRNA sense strand
caaauggaagggcaagagu

SEQ ID NO: 1418005 - RNA, 19 nt, Homo sapiens
  misc_RNA (1)...(19): siRNA sense strand
gcaggagacggacucuauc

SEQ ID NO: 1418006 - RNA, 19 nt, Homo sapiens
  misc_RNA (1)...(19): siRNA sense strand
uucaacagcugcccugaca

SEQ ID NO: 1418007 - RNA, 19 nt, Homo sapiens
  misc_RNA (1)...(19): siRNA sense strand
ggagcugcccuucccuugu

SEQ ID NO: 1418008 - RNA, 19 nt, Homo sapiens
  misc_RNA (1)...(19): siRNA sense strand
cacgugcucuacuacaugu

SEQ ID NO: 1418009 - RNA, 19 nt, Homo sapiens
  misc_RNA (1)...(19): siRNA sense strand
gaggcgggauuacuaugac

SEQ ID NO: 1418010 - RNA, 19 nt, Homo sapiens
  misc_RNA (1)...(19): siRNA sense strand
ccaaggucauugagaagcu

SEQ ID NO: 1418011 - RNA, 19 nt, Homo sapiens
  misc_RNA (1)...(19): siRNA sense strand
cugaguacauggccaaggu

SEQ ID NO: 1418012 - RNA, 19 nt, Homo sapiens
  misc_RNA (1)...(19): siRNA sense strand
gugugaaggugcugaccau

SEQ ID NO: 1418013 - RNA, 19 nt, Homo sapiens
  misc_RNA (1)...(19): siRNA sense strand
ccugcuggaugaccacuuc

SEQ ID NO: 1418014 - RNA, 19 nt, Homo sapiens
  misc_RNA (1)...(19): siRNA sense strand
gugccuacuuugccaacau

SEQ ID NO: 1418015 - RNA, 19 nt, Homo sapiens
  misc_RNA (1)...(19): siRNA sense strand
gggauuacuaugacgacuu

SEQ ID NO: 1418016 - RNA, 19 nt, Homo sapiens
  misc_RNA (1)...(19): siRNA sense strand
ucacgugcucuacuacaug

SEQ ID NO: 1418017 - RNA, 19 nt, Homo sapiens
  misc_RNA (1)...(19): siRNA sense strand
ggccaacaccuucgauggu

SEQ ID NO: 1418018 - RNA, 19 nt, Homo sapiens
  misc_RNA (1)...(19): siRNA sense strand
gcgagaaggugucugaguu

SEQ ID NO: 1418019 - RNA, 19 nt, Homo sapiens
  misc_RNA (1)...(19): siRNA sense strand
gaaggugucugaguuugug

SEQ ID NO: 1418020 - RNA, 19 nt, Homo sapiens
  misc_RNA (1)...(19): siRNA sense strand
gaugaccacuuccgagaga

SEQ ID NO: 1418021 - RNA, 19 nt, Homo sapiens
  misc_RNA (1)...(19): siRNA sense strand
ucacucacgugcucuacua

SEQ ID NO: 1418022 - RNA, 19 nt, Homo sapiens
  misc_RNA (1)...(19): siRNA sense strand
gggcaagagugucgugguu

SEQ ID NO: 1418023 - RNA, 19 nt, Homo sapiens
  misc_RNA (1)...(19): siRNA sense strand
gagaaggugucugaguuug

SEQ ID NO: 1418024 - RNA, 19 nt, Homo sapiens
  misc_RNA (1)...(19): siRNA sense strand
guacauggccaaggucauu

SEQ ID NO: 1418025 - RNA, 19 nt, Homo sapiens
  misc_RNA (1)...(19): siRNA sense strand
gcguagagcaugugaguga

SEQ ID NO: 1418026 - RNA, 19 nt, Homo sapiens
  misc_RNA (1)...(19): siRNA sense strand
gcaagagugucgugguucu

SEQ ID NO: 1418027 - RNA, 19 nt, Homo sapiens
  misc_RNA (1)...(19): siRNA sense strand
gagcugcccuucccuuguc

SEQ ID NO: 1418028 - RNA, 19 nt, Homo sapiens
  misc_RNA (1)...(19): siRNA sense strand
gcuccgaggugaucuuugg

SEQ ID NO: 1418029 - RNA, 19 nt, Homo sapiens
  misc_RNA (1)...(19): siRNA sense strand
cgagaaggugucugaguuu

SEQ ID NO: 1418030 - RNA, 19 nt, Homo sapiens
  misc_RNA (1)...(19): siRNA sense strand
ugaaggugcugaccaucga

SEQ ID NO: 1418031 - RNA, 19 nt, Homo sapiens
  misc_RNA (1)...(19): siRNA sense strand
uggccaaggucauugagaa

SEQ ID NO: 1418032 - RNA, 19 nt, Homo sapiens
  misc_RNA (1)...(19): siRNA sense strand
caacagcugcccugacauc

SEQ ID NO: 1418033 - RNA, 19 nt, Homo sapiens
  misc_RNA (1)...(19): siRNA sense strand
ccaucggucuggacuguug

SEQ ID NO: 1418034 - RNA, 19 nt, Homo sapiens
  misc_RNA (1)...(19): siRNA sense strand
ggcaggagacggacucuau

SEQ ID NO: 1418035 - RNA, 19 nt, Homo sapiens
  misc_RNA (1)...(19): siRNA sense strand
gcagaccuacagcgccaua

SEQ ID NO: 1418036 - RNA, 19 nt, Homo sapiens
  misc_RNA (1)...(19): siRNA sense strand
ggacauuggcguagagcau

SEQ ID NO: 1418037 - RNA, 19 nt, Homo sapiens
  misc_RNA (1)...(19): siRNA sense strand
caucucacccgacgucuuc

SEQ ID NO: 1418038 - RNA, 19 nt, Homo sapiens
  misc_RNA (1)...(19): siRNA sense strand
uccgagcccugcuggauga

SEQ ID NO: 1418039 - RNA, 19 nt, Homo sapiens
  misc_RNA (1)...(19): siRNA sense strand
cugaguuuguggcgucuaa

SEQ ID NO: 1418040 - RNA, 19 nt, Homo sapiens
  misc_RNA (1)...(19): siRNA sense strand
cacccgacgucuucacuca

SEQ ID NO: 1418041 - RNA, 19 nt, Homo sapiens
  misc_RNA (1)...(19): siRNA sense strand
gagcuccgaggugaucuuu

SEQ ID NO: 1418042 - RNA, 19 nt, Homo sapiens
  misc_RNA (1)...(19): siRNA sense strand
uucaacagcugcccugaca

SEQ ID NO: 1418043 - RNA, 19 nt, Homo sapiens
  misc_RNA (1)...(19): siRNA sense strand
gcaggagacggacucuauc

SEQ ID NO: 1418044 - RNA, 19 nt, Homo sapiens
  misc_RNA (1)...(19): siRNA sense strand
caaauggaagggcaagagu

SEQ ID NO: 1418045 - RNA, 19 nt, Homo sapiens
  misc_RNA (1)...(19): siRNA sense strand
ggagcugcccuucccuugu

SEQ ID NO: 1418046 - RNA, 19 nt, Homo sapiens
  misc_RNA (1)...(19): siRNA sense strand
cacgugcucuacuacaugu

SEQ ID NO: 1418047 - RNA, 19 nt, Homo sapiens
  misc_RNA (1)...(19): siRNA sense strand
ccaaggucauugagaagcu

SEQ ID NO: 1418048 - RNA, 19 nt, Homo sapiens
  misc_RNA (1)...(19): siRNA sense strand
cugaguacauggccaaggu

SEQ ID NO: 1418049 - RNA, 19 nt, Homo sapiens
  misc_RNA (1)...(19): siRNA sense strand
gugugaaggugcugaccau

SEQ ID NO: 1418050 - RNA, 19 nt, Homo sapiens
  misc_RNA (1)...(19): siRNA sense strand
ccugcuggaugaccacuuc

SEQ ID NO: 1418051 - RNA, 19 nt, Homo sapiens
  misc_RNA (1)...(19): siRNA sense strand
ucacgugcucuacuacaug

SEQ ID NO: 1418052 - RNA, 19 nt, Homo sapiens
  misc_RNA (1)...(19): siRNA sense strand
gcgagaaggugucugaguu

SEQ ID NO: 1418053 - RNA, 19 nt, Homo sapiens
  misc_RNA (1)...(19): siRNA sense strand
gaaggugucugaguuugug

SEQ ID NO: 1418054 - RNA, 19 nt, Homo sapiens
  misc_RNA (1)...(19): siRNA sense strand
gcaggaggcgggauuacua

SEQ ID NO: 1418055 - RNA, 19 nt, Homo sapiens
  misc_RNA (1)...(19): siRNA sense strand
gaugaccacuuccgagaga

SEQ ID NO: 1418056 - RNA, 19 nt, Homo sapiens
  misc_RNA (1)...(19): siRNA sense strand
ucacucacgugcucuacua

SEQ ID NO: 1418057 - RNA, 19 nt, Homo sapiens
  misc_RNA (1)...(19): siRNA sense strand
ggugagcgcugccucuaug

SEQ ID NO: 1418058 - RNA, 19 nt, Homo sapiens
  misc_RNA (1)...(19): siRNA sense strand
ggauuacuaugacgacuuc

SEQ ID NO: 1418059 - RNA, 19 nt, Homo sapiens
  misc_RNA (1)...(19): siRNA sense strand
gggcaagagugucgugguu

SEQ ID NO: 1418060 - RNA, 19 nt, Homo sapiens
  misc_RNA (1)...(19): siRNA sense strand
gagaaggugucugaguuug

SEQ ID NO: 1418061 - RNA, 19 nt, Homo sapiens
  misc_RNA (1)...(19): siRNA sense strand
guacauggccaaggucauu

SEQ ID NO: 1418062 - RNA, 19 nt, Homo sapiens
  misc_RNA (1)...(19): siRNA sense strand
ugacguggucuuuguagua

SEQ ID NO: 1418063 - RNA, 19 nt, Homo sapiens
  misc_RNA (1)...(19): siRNA sense strand
gcguagagcaugugaguga

SEQ ID NO: 1418064 - RNA, 19 nt, Homo sapiens
  misc_RNA (1)...(19): siRNA sense strand
gcaagagugucgugguucu

SEQ ID NO: 1418065 - RNA, 19 nt, Homo sapiens
  misc_RNA (1)...(19): siRNA sense strand
gagcugcccuucccuuguc

SEQ ID NO: 1418066 - RNA, 19 nt, Homo sapiens
  misc_RNA (1)...(19): siRNA sense strand
acgaggagcugguacucua

SEQ ID NO: 1418067 - RNA, 19 nt, Homo sapiens
  misc_RNA (1)...(19): siRNA sense strand
gcuccgaggugaucuuugg

SEQ ID NO: 1418068 - RNA, 19 nt, Homo sapiens
  misc_RNA (1)...(19): siRNA sense strand
guacuaugccugcuugugu

SEQ ID NO: 1418069 - RNA, 19 nt, Homo sapiens
  misc_RNA (1)...(19): siRNA sense strand
ggaggcgggauuacuauga

SEQ ID NO: 1418070 - RNA, 19 nt, Homo sapiens
  misc_RNA (1)...(19): siRNA sense strand
ccaacaugcuggacaccaa

SEQ ID NO: 1418071 - RNA, 19 nt, Homo sapiens
  misc_RNA (1)...(19): siRNA sense strand
cgagaaggugucugaguuu

SEQ ID NO: 1418072 - RNA, 19 nt, Homo sapiens
  misc_RNA (1)...(19): siRNA sense strand
acagugacguggucuuugu

SEQ ID NO: 1418073 - RNA, 19 nt, Homo sapiens
  misc_RNA (1)...(19): siRNA sense strand
uggccaaggucauugagaa

SEQ ID NO: 1418074 - RNA, 19 nt, Homo sapiens
  misc_RNA (1)...(19): siRNA sense strand
ugaaggugcugaccaucga

SEQ ID NO: 1418075 - RNA, 19 nt, Homo sapiens
  misc_RNA (1)...(19): siRNA sense strand
ggacaccagcgaccuguuc

SEQ ID NO: 1418076 - RNA, 19 nt, Homo sapiens
  misc_RNA (1)...(19): siRNA sense strand
caacagcugcccugacauc

SEQ ID NO: 1418077 - RNA, 19 nt, Homo sapiens
  misc_RNA (1)...(19): siRNA sense strand
ccaucggucuggacuguug

SEQ ID NO: 1418078 - RNA, 19 nt, Homo sapiens
  misc_RNA (1)...(19): siRNA sense strand
ggcaggagacggacucuau

SEQ ID NO: 1418079 - RNA, 19 nt, Homo sapiens
  misc_RNA (1)...(19): siRNA sense strand
caacaugcuggacaccaaa

SEQ ID NO: 1418080 - RNA, 19 nt, Homo sapiens
  misc_RNA (1)...(19): siRNA sense strand
gcagaccuacagcgccaua

SEQ ID NO: 1418081 - RNA, 19 nt, Homo sapiens
  misc_RNA (1)...(19): siRNA sense strand
ggacauuggcguagagcau

SEQ ID NO: 1418082 - RNA, 19 nt, Homo sapiens
  misc_RNA (1)...(19): siRNA sense strand
caucucacccgacgucuuc

SEQ ID NO: 1418083 - RNA, 19 nt, Homo sapiens
  misc_RNA (1)...(19): siRNA sense strand
uccgagcccugcuggauga

SEQ ID NO: 1418084 - RNA, 19 nt, Homo sapiens
  misc_RNA (1)...(19): siRNA sense strand
gacguggucuuuguaguac

SEQ ID NO: 1418085 - RNA, 19 nt, Homo sapiens
  misc_RNA (1)...(19): siRNA sense strand
uuacuaugacgacuucuug

SEQ ID NO: 1418086 - RNA, 19 nt, Homo sapiens
  misc_RNA (1)...(19): siRNA sense strand
cacccgacgucuucacuca

SEQ ID NO: 1418087 - RNA, 19 nt, Homo sapiens
  misc_RNA (1)...(19): siRNA sense strand
gagcuccgaggugaucuuu

SEQ ID NO: 1418088 - RNA, 19 nt, Homo sapiens
  misc_RNA (1)...(19): siRNA sense strand
cugaguuuguggcgucuaa

SEQ ID NO: 1418089 - RNA, 19 nt, Homo sapiens
  misc_RNA (1)...(19): siRNA sense strand
caaauggaagggcaagagu

SEQ ID NO: 1418090 - RNA, 19 nt, Homo sapiens
  misc_RNA (1)...(19): siRNA sense strand
gcaggagacggacucuauc

SEQ ID NO: 1418091 - RNA, 19 nt, Homo sapiens
  misc_RNA (1)...(19): siRNA sense strand
uucaacagcugcccugaca

SEQ ID NO: 1418092 - RNA, 19 nt, Homo sapiens
  misc_RNA (1)...(19): siRNA sense strand
ggagcugcccuucccuugu

SEQ ID NO: 1418093 - RNA, 19 nt, Homo sapiens
  misc_RNA (1)...(19): siRNA sense strand
cacgugcucuacuacaugu

SEQ ID NO: 1418094 - RNA, 19 nt, Homo sapiens
  misc_RNA (1)...(19): siRNA sense strand
gaggcgggauuacuaugac

SEQ ID NO: 1418095 - RNA, 19 nt, Homo sapiens
  misc_RNA (1)...(19): siRNA sense strand
ccaaggucauugagaagcu

SEQ ID NO: 1418096 - RNA, 19 nt, Homo sapiens
  misc_RNA (1)...(19): siRNA sense strand
cugaguacauggccaaggu

SEQ ID NO: 1418097 - RNA, 19 nt, Homo sapiens
  misc_RNA (1)...(19): siRNA sense strand
gugugaaggugcugaccau

SEQ ID NO: 1418098 - RNA, 19 nt, Homo sapiens
  misc_RNA (1)...(19): siRNA sense strand
ccugcuggaugaccacuuc

SEQ ID NO: 1418099 - RNA, 19 nt, Homo sapiens
  misc_RNA (1)...(19): siRNA sense strand
gugccuacuuugccaacau

SEQ ID NO: 1418100 - RNA, 19 nt, Homo sapiens
  misc_RNA (1)...(19): siRNA sense strand
gggauuacuaugacgacuu

SEQ ID NO: 1418101 - RNA, 19 nt, Homo sapiens
  misc_RNA (1)...(19): siRNA sense strand
ucacgugcucuacuacaug

SEQ ID NO: 1418102 - RNA, 19 nt, Homo sapiens
  misc_RNA (1)...(19): siRNA sense strand
ggccaacaccuucgauggu

SEQ ID NO: 1418103 - RNA, 19 nt, Homo sapiens
  misc_RNA (1)...(19): siRNA sense strand
gcgagaaggugucugaguu

SEQ ID NO: 1418104 - RNA, 19 nt, Homo sapiens
  misc_RNA (1)...(19): siRNA sense strand
gaaggugucugaguuugug

SEQ ID NO: 1418105 - RNA, 19 nt, Homo sapiens
  misc_RNA (1)...(19): siRNA sense strand
gcaggaggcgggauuacua

SEQ ID NO: 1418106 - RNA, 19 nt, Homo sapiens
  misc_RNA (1)...(19): siRNA sense strand
gaugaccacuuccgagaga

SEQ ID NO: 1418107 - RNA, 19 nt, Homo sapiens
  misc_RNA (1)...(19): siRNA sense strand
ucacucacgugcucuacua

SEQ ID NO: 1418108 - RNA, 19 nt, Homo sapiens
  misc_RNA (1)...(19): siRNA sense strand
ggugagcgcugccucuaug

SEQ ID NO: 1418109 - RNA, 19 nt, Homo sapiens
  misc_RNA (1)...(19): siRNA sense strand
ggauuacuaugacgacuuc

SEQ ID NO: 1418110 - RNA, 19 nt, Homo sapiens
  misc_RNA (1)...(19): siRNA sense strand
gggcaagagugucgugguu

SEQ ID NO: 1418111 - RNA, 19 nt, Homo sapiens
  misc_RNA (1)...(19): siRNA sense strand
gagaaggugucugaguuug

SEQ ID NO: 1418112 - RNA, 19 nt, Homo sapiens
  misc_RNA (1)...(19): siRNA sense strand
guacauggccaaggucauu

SEQ ID NO: 1418113 - RNA, 19 nt, Homo sapiens
  misc_RNA (1)...(19): siRNA sense strand
ugacguggucuuuguagua

SEQ ID NO: 1418114 - RNA, 19 nt, Homo sapiens
  misc_RNA (1)...(19): siRNA sense strand
gcguagagcaugugaguga

SEQ ID NO: 1418115 - RNA, 19 nt, Homo sapiens
  misc_RNA (1)...(19): siRNA sense strand
acgaggagcugguacucua

SEQ ID NO: 1418116 - RNA, 19 nt, Homo sapiens
  misc_RNA (1)...(19): siRNA sense strand
gagcugcccuucccuuguc

SEQ ID NO: 1418117 - RNA, 19 nt, Homo sapiens
  misc_RNA (1)...(19): siRNA sense strand
gcaagagugucgugguucu

SEQ ID NO: 1418118 - RNA, 19 nt, Homo sapiens
  misc_RNA (1)...(19): siRNA sense strand
guacuaugccugcuugugu

SEQ ID NO: 1418119 - RNA, 19 nt, Homo sapiens
  misc_RNA (1)...(19): siRNA sense strand
gcuccgaggugaucuuugg

SEQ ID NO: 1418120 - RNA, 19 nt, Homo sapiens
  misc_RNA (1)...(19): siRNA sense strand
ggaggcgggauuacuauga

SEQ ID NO: 1418121 - RNA, 19 nt, Homo sapiens
  misc_RNA (1)...(19): siRNA sense strand
ccaacaugcuggacaccaa

SEQ ID NO: 1418122 - RNA, 19 nt, Homo sapiens
  misc_RNA (1)...(19): siRNA sense strand
cgagaaggugucugaguuu

SEQ ID NO: 1418123 - RNA, 19 nt, Homo sapiens
  misc_RNA (1)...(19): siRNA sense strand
acagugacguggucuuugu

SEQ ID NO: 1418124 - RNA, 19 nt, Homo sapiens
  misc_RNA (1)...(19): siRNA sense strand
uggccaaggucauugagaa

SEQ ID NO: 1418125 - RNA, 19 nt, Homo sapiens
  misc_RNA (1)...(19): siRNA sense strand
ugaaggugcugaccaucga

SEQ ID NO: 1418126 - RNA, 19 nt, Homo sapiens
  misc_RNA (1)...(19): siRNA sense strand
caacagcugcccugacauc

SEQ ID NO: 1418127 - RNA, 19 nt, Homo sapiens
  misc_RNA (1)...(19): siRNA sense strand
ccaucggucuggacuguug

SEQ ID NO: 1418128 - RNA, 19 nt, Homo sapiens
  misc_RNA (1)...(19): siRNA sense strand
ggcaggagacggacucuau

SEQ ID NO: 1418129 - RNA, 19 nt, Homo sapiens
  misc_RNA (1)...(19): siRNA sense strand
caacaugcuggacaccaaa

SEQ ID NO: 1418130 - RNA, 19 nt, Homo sapiens
  misc_RNA (1)...(19): siRNA sense strand
gcagaccuacagcgccaua

SEQ ID NO: 1418131 - RNA, 19 nt, Homo sapiens
  misc_RNA (1)...(19): siRNA sense strand
ggacauuggcguagagcau

SEQ ID NO: 1418132 - RNA, 19 nt, Homo sapiens
  misc_RNA (1)...(19): siRNA sense strand
caucucacccgacgucuuc

SEQ ID NO: 1418133 - RNA, 19 nt, Homo sapiens
  misc_RNA (1)...(19): siRNA sense strand
uccgagcccugcuggauga

SEQ ID NO: 1418134 - RNA, 19 nt, Homo sapiens
  misc_RNA (1)...(19): siRNA sense strand
gacguggucuuuguaguac

SEQ ID NO: 1418135 - RNA, 19 nt, Homo sapiens
  misc_RNA (1)...(19): siRNA sense strand
uuacuaugacgacuucuug

SEQ ID NO: 1418136 - RNA, 19 nt, Homo sapiens
  misc_RNA (1)...(19): siRNA sense strand
cacccgacgucuucacuca

SEQ ID NO: 1418137 - RNA, 19 nt, Homo sapiens
  misc_RNA (1)...(19): siRNA sense strand
gagcuccgaggugaucuuu

SEQ ID NO: 1418138 - RNA, 19 nt, Homo sapiens
  misc_RNA (1)...(19): siRNA sense strand
cugaguuuguggcgucuaa

SEQ ID NO: 1418139 - RNA, 19 nt, Homo sapiens
  misc_RNA (1)...(19): siRNA sense strand
caaauggaagggcaagagu

SEQ ID NO: 1418140 - RNA, 19 nt, Homo sapiens
  misc_RNA (1)...(19): siRNA sense strand
gcaggagacggacucuauc

SEQ ID NO: 1418141 - RNA, 19 nt, Homo sapiens
  misc_RNA (1)...(19): siRNA sense strand
uucaacagcugcccugaca

SEQ ID NO: 1418142 - RNA, 19 nt, Homo sapiens
  misc_RNA (1)...(19): siRNA sense strand
ggagcugcccuucccuugu

SEQ ID NO: 1418143 - RNA, 19 nt, Homo sapiens
  misc_RNA (1)...(19): siRNA sense strand
cacgugcucuacuacaugu

SEQ ID NO: 1418144 - RNA, 19 nt, Homo sapiens
  misc_RNA (1)...(19): siRNA sense strand
gaggcgggauuacuaugac

SEQ ID NO: 1418145 - RNA, 19 nt, Homo sapiens
  misc_RNA (1)...(19): siRNA sense strand
ccaaggucauugagaagcu

SEQ ID NO: 1418146 - RNA, 19 nt, Homo sapiens
  misc_RNA (1)...(19): siRNA sense strand
cugaguacauggccaaggu

SEQ ID NO: 1418147 - RNA, 19 nt, Homo sapiens
  misc_RNA (1)...(19): siRNA sense strand
gugugaaggugcugaccau

SEQ ID NO: 1418148 - RNA, 19 nt, Homo sapiens
  misc_RNA (1)...(19): siRNA sense strand
ccugcuggaugaccacuuc

SEQ ID NO: 1418149 - RNA, 19 nt, Homo sapiens
  misc_RNA (1)...(19): siRNA sense strand
gugccuacuuugccaacau

SEQ ID NO: 1418150 - RNA, 19 nt, Homo sapiens
  misc_RNA (1)...(19): siRNA sense strand
gggauuacuaugacgacuu

SEQ ID NO: 1418151 - RNA, 19 nt, Homo sapiens
  misc_RNA (1)...(19): siRNA sense strand
ucacgugcucuacuacaug

SEQ ID NO: 1418152 - RNA, 19 nt, Homo sapiens
  misc_RNA (1)...(19): siRNA sense strand
ggccaacaccuucgauggu

SEQ ID NO: 1418153 - RNA, 19 nt, Homo sapiens
  misc_RNA (1)...(19): siRNA sense strand
gcuggaccauccugcauua

SEQ ID NO: 1418154 - RNA, 19 nt, Homo sapiens
  misc_RNA (1)...(19): siRNA sense strand
gaagcuggaucgcuacuca

SEQ ID NO: 1418155 - RNA, 19 nt, Homo sapiens
  misc_RNA (1)...(19): siRNA sense strand
cuacacggcugucuucaca

SEQ ID NO: 1418156 - RNA, 19 nt, Homo sapiens
  misc_RNA (1)...(19): siRNA sense strand
ccaacggcaucgacaugaa

SEQ ID NO: 1418157 - RNA, 19 nt, Homo sapiens
  misc_RNA (1)...(19): siRNA sense strand
ggacauccucaucaacuuc

SEQ ID NO: 1418158 - RNA, 19 nt, Homo sapiens
  misc_RNA (1)...(19): siRNA sense strand
ggaccauccugcauuacag

SEQ ID NO: 1418159 - RNA, 19 nt, Homo sapiens
  misc_RNA (1)...(19): siRNA sense strand
ccgacgugcugccugagua

SEQ ID NO: 1418160 - RNA, 19 nt, Homo sapiens
  misc_RNA (1)...(19): siRNA sense strand
ggcaacgucucucccaaca

SEQ ID NO: 1418161 - RNA, 19 nt, Homo sapiens
  misc_RNA (1)...(19): siRNA sense strand
gugcuguucuugcucaugu

SEQ ID NO: 1418162 - RNA, 19 nt, Homo sapiens
  misc_RNA (1)...(19): siRNA sense strand
gcaucgccguccacuacuu

SEQ ID NO: 1418163 - RNA, 19 nt, Homo sapiens
  misc_RNA (1)...(19): siRNA sense strand
caacgugucggccaucauc

SEQ ID NO: 1418164 - RNA, 19 nt, Homo sapiens
  misc_RNA (1)...(19): siRNA sense strand
ucagcagccucaccagugu

SEQ ID NO: 1418165 - RNA, 19 nt, Homo sapiens
  misc_RNA (1)...(19): siRNA sense strand
gcucauuggcucccucaug

SEQ ID NO: 1418166 - RNA, 19 nt, Homo sapiens
  misc_RNA (1)...(19): siRNA sense strand
caacaccaacucagagaag

SEQ ID NO: 1418167 - RNA, 19 nt, Homo sapiens
  misc_RNA (1)...(19): siRNA sense strand
ugacggcgcucuacuucac

SEQ ID NO: 1418168 - RNA, 19 nt, Homo sapiens
  misc_RNA (1)...(19): siRNA sense strand
gcgcucuacuucaccuuca

SEQ ID NO: 1418169 - RNA, 19 nt, Homo sapiens
  misc_RNA (1)...(19): siRNA sense strand
cagcacgccugguccuaca

SEQ ID NO: 1418170 - RNA, 19 nt, Homo sapiens
  misc_RNA (1)...(19): siRNA sense strand
cucauuggcucccucaugu

SEQ ID NO: 1418171 - RNA, 19 nt, Homo sapiens
  misc_RNA (1)...(19): siRNA sense strand
caucuacacggcugucuuc

SEQ ID NO: 1418172 - RNA, 19 nt, Homo sapiens
  misc_RNA (1)...(19): siRNA sense strand
ccaucaaggacaaguaugu

SEQ ID NO: 1418173 - RNA, 19 nt, Homo sapiens
  misc_RNA (1)...(19): siRNA sense strand
gcugguuccucaucgacau

SEQ ID NO: 1418174 - RNA, 19 nt, Homo sapiens
  misc_RNA (1)...(19): siRNA sense strand
uggacauccucaucaacuu

SEQ ID NO: 1418175 - RNA, 19 nt, Homo sapiens
  misc_RNA (1)...(19): siRNA sense strand
ccuucgaccugcucaucuu

SEQ ID NO: 1418176 - RNA, 19 nt, Homo sapiens
  misc_RNA (1)...(19): siRNA sense strand
gaaguucaagaccacacau

SEQ ID NO: 1418177 - RNA, 19 nt, Homo sapiens
  misc_RNA (1)...(19): siRNA sense strand
uugcucaugugcaccuuug

SEQ ID NO: 1418178 - RNA, 19 nt, Homo sapiens
  misc_RNA (1)...(19): siRNA sense strand
gcuggaccauccugcauua

SEQ ID NO: 1418179 - RNA, 19 nt, Homo sapiens
  misc_RNA (1)...(19): siRNA sense strand
gaagcuggaucgcuacuca

SEQ ID NO: 1418180 - RNA, 19 nt, Homo sapiens
  misc_RNA (1)...(19): siRNA sense strand
cuacacggcugucuucaca

SEQ ID NO: 1418181 - RNA, 19 nt, Homo sapiens
  misc_RNA (1)...(19): siRNA sense strand
ccaacggcaucgacaugaa

SEQ ID NO: 1418182 - RNA, 19 nt, Homo sapiens
  misc_RNA (1)...(19): siRNA sense strand
ggacauccucaucaacuuc

SEQ ID NO: 1418183 - RNA, 19 nt, Homo sapiens
  misc_RNA (1)...(19): siRNA sense strand
ggaccauccugcauuacag

SEQ ID NO: 1418184 - RNA, 19 nt, Homo sapiens
  misc_RNA (1)...(19): siRNA sense strand
ccgacgugcugccugagua

SEQ ID NO: 1418185 - RNA, 19 nt, Homo sapiens
  misc_RNA (1)...(19): siRNA sense strand
ggcaacgucucucccaaca

SEQ ID NO: 1418186 - RNA, 19 nt, Homo sapiens
  misc_RNA (1)...(19): siRNA sense strand
gugcuguucuugcucaugu

SEQ ID NO: 1418187 - RNA, 19 nt, Homo sapiens
  misc_RNA (1)...(19): siRNA sense strand
gcaucgccguccacuacuu

SEQ ID NO: 1418188 - RNA, 19 nt, Homo sapiens
  misc_RNA (1)...(19): siRNA sense strand
caacgugucggccaucauc

SEQ ID NO: 1418189 - RNA, 19 nt, Homo sapiens
  misc_RNA (1)...(19): siRNA sense strand
ucagcagccucaccagugu

SEQ ID NO: 1418190 - RNA, 19 nt, Homo sapiens
  misc_RNA (1)...(19): siRNA sense strand
gcucauuggcucccucaug

SEQ ID NO: 1418191 - RNA, 19 nt, Homo sapiens
  misc_RNA (1)...(19): siRNA sense strand
caacaccaacucagagaag

SEQ ID NO: 1418192 - RNA, 19 nt, Homo sapiens
  misc_RNA (1)...(19): siRNA sense strand
ugacggcgcucuacuucac

SEQ ID NO: 1418193 - RNA, 19 nt, Homo sapiens
  misc_RNA (1)...(19): siRNA sense strand
gcgcucuacuucaccuuca

SEQ ID NO: 1418194 - RNA, 19 nt, Homo sapiens
  misc_RNA (1)...(19): siRNA sense strand
cagcacgccugguccuaca

SEQ ID NO: 1418195 - RNA, 19 nt, Homo sapiens
  misc_RNA (1)...(19): siRNA sense strand
cucauuggcucccucaugu

SEQ ID NO: 1418196 - RNA, 19 nt, Homo sapiens
  misc_RNA (1)...(19): siRNA sense strand
caucuacacggcugucuuc

SEQ ID NO: 1418197 - RNA, 19 nt, Homo sapiens
  misc_RNA (1)...(19): siRNA sense strand
ccaucaaggacaaguaugu

SEQ ID NO: 1418198 - RNA, 19 nt, Homo sapiens
  misc_RNA (1)...(19): siRNA sense strand
gcugguuccucaucgacau

SEQ ID NO: 1418199 - RNA, 19 nt, Homo sapiens
  misc_RNA (1)...(19): siRNA sense strand
uggacauccucaucaacuu

SEQ ID NO: 1418200 - RNA, 19 nt, Homo sapiens
  misc_RNA (1)...(19): siRNA sense strand
ccuucgaccugcucaucuu

SEQ ID NO: 1418201 - RNA, 19 nt, Homo sapiens
  misc_RNA (1)...(19): siRNA sense strand
gaaguucaagaccacacau

SEQ ID NO: 1418202 - RNA, 19 nt, Homo sapiens
  misc_RNA (1)...(19): siRNA sense strand
uugcucaugugcaccuuug

SEQ ID NO: 1418203 - RNA, 19 nt, Homo sapiens
  misc_RNA (1)...(19): siRNA sense strand
gcuggaccauccugcauua

SEQ ID NO: 1418204 - RNA, 19 nt, Homo sapiens
  misc_RNA (1)...(19): siRNA sense strand
gaagcuggaucgcuacuca

SEQ ID NO: 1418205 - RNA, 19 nt, Homo sapiens
  misc_RNA (1)...(19): siRNA sense strand
cuacacggcugucuucaca

SEQ ID NO: 1418206 - RNA, 19 nt, Homo sapiens
  misc_RNA (1)...(19): siRNA sense strand
ccaacggcaucgacaugaa

SEQ ID NO: 1418207 - RNA, 19 nt, Homo sapiens
  misc_RNA (1)...(19): siRNA sense strand
ggacauccucaucaacuuc

SEQ ID NO: 1418208 - RNA, 19 nt, Homo sapiens
  misc_RNA (1)...(19): siRNA sense strand
ggaccauccugcauuacag

SEQ ID NO: 1418209 - RNA, 19 nt, Homo sapiens
  misc_RNA (1)...(19): siRNA sense strand
ccgacgugcugccugagua

SEQ ID NO: 1418210 - RNA, 19 nt, Homo sapiens
  misc_RNA (1)...(19): siRNA sense strand
ggcaacgucucucccaaca

SEQ ID NO: 1418211 - RNA, 19 nt, Homo sapiens
  misc_RNA (1)...(19): siRNA sense strand
gugcuguucuugcucaugu

SEQ ID NO: 1418212 - RNA, 19 nt, Homo sapiens
  misc_RNA (1)...(19): siRNA sense strand
gcaucgccguccacuacuu

SEQ ID NO: 1418213 - RNA, 19 nt, Homo sapiens
  misc_RNA (1)...(19): siRNA sense strand
caacgugucggccaucauc

SEQ ID NO: 1418214 - RNA, 19 nt, Homo sapiens
  misc_RNA (1)...(19): siRNA sense strand
ucagcagccucaccagugu

SEQ ID NO: 1418215 - RNA, 19 nt, Homo sapiens
  misc_RNA (1)...(19): siRNA sense strand
gcucauuggcucccucaug

SEQ ID NO: 1418216 - RNA, 19 nt, Homo sapiens
  misc_RNA (1)...(19): siRNA sense strand
caacaccaacucagagaag

SEQ ID NO: 1418217 - RNA, 19 nt, Homo sapiens
  misc_RNA (1)...(19): siRNA sense strand
ugacggcgcucuacuucac

SEQ ID NO: 1418218 - RNA, 19 nt, Homo sapiens
  misc_RNA (1)...(19): siRNA sense strand
gcgcucuacuucaccuuca

SEQ ID NO: 1418219 - RNA, 19 nt, Homo sapiens
  misc_RNA (1)...(19): siRNA sense strand
cagcacgccugguccuaca

SEQ ID NO: 1418220 - RNA, 19 nt, Homo sapiens
  misc_RNA (1)...(19): siRNA sense strand
cucauuggcucccucaugu

SEQ ID NO: 1418221 - RNA, 19 nt, Homo sapiens
  misc_RNA (1)...(19): siRNA sense strand
caucuacacggcugucuuc

SEQ ID NO: 1418222 - RNA, 19 nt, Homo sapiens
  misc_RNA (1)...(19): siRNA sense strand
ccaucaaggacaaguaugu

SEQ ID NO: 1418223 - RNA, 19 nt, Homo sapiens
  misc_RNA (1)...(19): siRNA sense strand
gcugguuccucaucgacau

SEQ ID NO: 1418224 - RNA, 19 nt, Homo sapiens
  misc_RNA (1)...(19): siRNA sense strand
uggacauccucaucaacuu

SEQ ID NO: 1418225 - RNA, 19 nt, Homo sapiens
  misc_RNA (1)...(19): siRNA sense strand
ccuucgaccugcucaucuu

SEQ ID NO: 1418226 - RNA, 19 nt, Homo sapiens
  misc_RNA (1)...(19): siRNA sense strand
gaaguucaagaccacacau

SEQ ID NO: 1418227 - RNA, 19 nt, Homo sapiens
  misc_RNA (1)...(19): siRNA sense strand
uugcucaugugcaccuuug

SEQ ID NO: 1418228 - RNA, 19 nt, Homo sapiens
  misc_RNA (1)...(19): siRNA sense strand
gcuggaccauccugcauua

SEQ ID NO: 1418229 - RNA, 19 nt, Homo sapiens
  misc_RNA (1)...(19): siRNA sense strand
gaagcuggaucgcuacuca

SEQ ID NO: 1418230 - RNA, 19 nt, Homo sapiens
  misc_RNA (1)...(19): siRNA sense strand
cuacacggcugucuucaca

SEQ ID NO: 1418231 - RNA, 19 nt, Homo sapiens
  misc_RNA (1)...(19): siRNA sense strand
ccaacggcaucgacaugaa

SEQ ID NO: 1418232 - RNA, 19 nt, Homo sapiens
  misc_RNA (1)...(19): siRNA sense strand
ggacauccucaucaacuuc

SEQ ID NO: 1418233 - RNA, 19 nt, Homo sapiens
  misc_RNA (1)...(19): siRNA sense strand
ggaccauccugcauuacag

SEQ ID NO: 1418234 - RNA, 19 nt, Homo sapiens
  misc_RNA (1)...(19): siRNA sense strand
ccgacgugcugccugagua

SEQ ID NO: 1418235 - RNA, 19 nt, Homo sapiens
  misc_RNA (1)...(19): siRNA sense strand
ggcaacgucucucccaaca

SEQ ID NO: 1418236 - RNA, 19 nt, Homo sapiens
  misc_RNA (1)...(19): siRNA sense strand
gugcuguucuugcucaugu

SEQ ID NO: 1418237 - RNA, 19 nt, Homo sapiens
  misc_RNA (1)...(19): siRNA sense strand
gcaucgccguccacuacuu

SEQ ID NO: 1418238 - RNA, 19 nt, Homo sapiens
  misc_RNA (1)...(19): siRNA sense strand
caacgugucggccaucauc

SEQ ID NO: 1418239 - RNA, 19 nt, Homo sapiens
  misc_RNA (1)...(19): siRNA sense strand
ucagcagccucaccagugu

SEQ ID NO: 1418240 - RNA, 19 nt, Homo sapiens
  misc_RNA (1)...(19): siRNA sense strand
gcucauuggcucccucaug

SEQ ID NO: 1418241 - RNA, 19 nt, Homo sapiens
  misc_RNA (1)...(19): siRNA sense strand
caacaccaacucagagaag

SEQ ID NO: 1418242 - RNA, 19 nt, Homo sapiens
  misc_RNA (1)...(19): siRNA sense strand
ugacggcgcucuacuucac

SEQ ID NO: 1418243 - RNA, 19 nt, Homo sapiens
  misc_RNA (1)...(19): siRNA sense strand
gcgcucuacuucaccuuca

SEQ ID NO: 1418244 - RNA, 19 nt, Homo sapiens
  misc_RNA (1)...(19): siRNA sense strand
cagcacgccugguccuaca

SEQ ID NO: 1418245 - RNA, 19 nt, Homo sapiens
  misc_RNA (1)...(19): siRNA sense strand
cucauuggcucccucaugu

SEQ ID NO: 1418246 - RNA, 19 nt, Homo sapiens
  misc_RNA (1)...(19): siRNA sense strand
caucuacacggcugucuuc

SEQ ID NO: 1418247 - RNA, 19 nt, Homo sapiens
  misc_RNA (1)...(19): siRNA sense strand
ccaucaaggacaaguaugu

SEQ ID NO: 1418248 - RNA, 19 nt, Homo sapiens
  misc_RNA (1)...(19): siRNA sense strand
gcugguuccucaucgacau

SEQ ID NO: 1418249 - RNA, 19 nt, Homo sapiens
  misc_RNA (1)...(19): siRNA sense strand
uggacauccucaucaacuu

SEQ ID NO: 1418250 - RNA, 19 nt, Homo sapiens
  misc_RNA (1)...(19): siRNA sense strand
ccuucgaccugcucaucuu

SEQ ID NO: 1418251 - RNA, 19 nt, Homo sapiens
  misc_RNA (1)...(19): siRNA sense strand
gaaguucaagaccacacau

SEQ ID NO: 1418252 - RNA, 19 nt, Homo sapiens
  misc_RNA (1)...(19): siRNA sense strand
uugcucaugugcaccuuug

SEQ ID NO: 1418253 - RNA, 19 nt, Homo sapiens
  misc_RNA (1)...(19): siRNA sense strand
gcuggaccauccugcauua

SEQ ID NO: 1418254 - RNA, 19 nt, Homo sapiens
  misc_RNA (1)...(19): siRNA sense strand
gaagcuggaucgcuacuca

SEQ ID NO: 1418255 - RNA, 19 nt, Homo sapiens
  misc_RNA (1)...(19): siRNA sense strand
cuacacggcugucuucaca

SEQ ID NO: 1418256 - RNA, 19 nt, Homo sapiens
  misc_RNA (1)...(19): siRNA sense strand
ccaacggcaucgacaugaa

SEQ ID NO: 1418257 - RNA, 19 nt, Homo sapiens
  misc_RNA (1)...(19): siRNA sense strand
ggacauccucaucaacuuc

SEQ ID NO: 1418258 - RNA, 19 nt, Homo sapiens
  misc_RNA (1)...(19): siRNA sense strand
ggaccauccugcauuacag

SEQ ID NO: 1418259 - RNA, 19 nt, Homo sapiens
  misc_RNA (1)...(19): siRNA sense strand
ccgacgugcugccugagua

SEQ ID NO: 1418260 - RNA, 19 nt, Homo sapiens
  misc_RNA (1)...(19): siRNA sense strand
ggcaacgucucucccaaca

SEQ ID NO: 1418261 - RNA, 19 nt, Homo sapiens
  misc_RNA (1)...(19): siRNA sense strand
gugcuguucuugcucaugu

SEQ ID NO: 1418262 - RNA, 19 nt, Homo sapiens
  misc_RNA (1)...(19): siRNA sense strand
gcaucgccguccacuacuu

SEQ ID NO: 1418263 - RNA, 19 nt, Homo sapiens
  misc_RNA (1)...(19): siRNA sense strand
caacgugucggccaucauc

SEQ ID NO: 1418264 - RNA, 19 nt, Homo sapiens
  misc_RNA (1)...(19): siRNA sense strand
ucagcagccucaccagugu

SEQ ID NO: 1418265 - RNA, 19 nt, Homo sapiens
  misc_RNA (1)...(19): siRNA sense strand
gcucauuggcucccucaug

SEQ ID NO: 1418266 - RNA, 19 nt, Homo sapiens
  misc_RNA (1)...(19): siRNA sense strand
caacaccaacucagagaag

SEQ ID NO: 1418267 - RNA, 19 nt, Homo sapiens
  misc_RNA (1)...(19): siRNA sense strand
ugacggcgcucuacuucac

SEQ ID NO: 1418268 - RNA, 19 nt, Homo sapiens
  misc_RNA (1)...(19): siRNA sense strand
gcgcucuacuucaccuuca

SEQ ID NO: 1418269 - RNA, 19 nt, Homo sapiens
  misc_RNA (1)...(19): siRNA sense strand
cagcacgccugguccuaca

SEQ ID NO: 1418270 - RNA, 19 nt, Homo sapiens
  misc_RNA (1)...(19): siRNA sense strand
cucauuggcucccucaugu

SEQ ID NO: 1418271 - RNA, 19 nt, Homo sapiens
  misc_RNA (1)...(19): siRNA sense strand
caucuacacggcugucuuc

SEQ ID NO: 1418272 - RNA, 19 nt, Homo sapiens
  misc_RNA (1)...(19): siRNA sense strand
ccaucaaggacaaguaugu

SEQ ID NO: 1418273 - RNA, 19 nt, Homo sapiens
  misc_RNA (1)...(19): siRNA sense strand
gcugguuccucaucgacau

SEQ ID NO: 1418274 - RNA, 19 nt, Homo sapiens
  misc_RNA (1)...(19): siRNA sense strand
uggacauccucaucaacuu

SEQ ID NO: 1418275 - RNA, 19 nt, Homo sapiens
  misc_RNA (1)...(19): siRNA sense strand
ccuucgaccugcucaucuu

SEQ ID NO: 1418276 - RNA, 19 nt, Homo sapiens
  misc_RNA (1)...(19): siRNA sense strand
gaaguucaagaccacacau

SEQ ID NO: 1418277 - RNA, 19 nt, Homo sapiens
  misc_RNA (1)...(19): siRNA sense strand
uugcucaugugcaccuuug

SEQ ID NO: 1418278 - RNA, 19 nt, Homo sapiens
  misc_RNA (1)...(19): siRNA sense strand
gcuggaccauccugcauua

SEQ ID NO: 1418279 - RNA, 19 nt, Homo sapiens
  misc_RNA (1)...(19): siRNA sense strand
gaagcuggaucgcuacuca

SEQ ID NO: 1418280 - RNA, 19 nt, Homo sapiens
  misc_RNA (1)...(19): siRNA sense strand
cuacacggcugucuucaca

SEQ ID NO: 1418281 - RNA, 19 nt, Homo sapiens
  misc_RNA (1)...(19): siRNA sense strand
ccaacggcaucgacaugaa

SEQ ID NO: 1418282 - RNA, 19 nt, Homo sapiens
  misc_RNA (1)...(19): siRNA sense strand
ggacauccucaucaacuuc

SEQ ID NO: 1418283 - RNA, 19 nt, Homo sapiens
  misc_RNA (1)...(19): siRNA sense strand
ggaccauccugcauuacag

SEQ ID NO: 1418284 - RNA, 19 nt, Homo sapiens
  misc_RNA (1)...(19): siRNA sense strand
ccgacgugcugccugagua

SEQ ID NO: 1418285 - RNA, 19 nt, Homo sapiens
  misc_RNA (1)...(19): siRNA sense strand
ggcaacgucucucccaaca

SEQ ID NO: 1418286 - RNA, 19 nt, Homo sapiens
  misc_RNA (1)...(19): siRNA sense strand
gugcuguucuugcucaugu

SEQ ID NO: 1418287 - RNA, 19 nt, Homo sapiens
  misc_RNA (1)...(19): siRNA sense strand
gcaucgccguccacuacuu

SEQ ID NO: 1418288 - RNA, 19 nt, Homo sapiens
  misc_RNA (1)...(19): siRNA sense strand
caacgugucggccaucauc

SEQ ID NO: 1418289 - RNA, 19 nt, Homo sapiens
  misc_RNA (1)...(19): siRNA sense strand
ucagcagccucaccagugu

SEQ ID NO: 1418290 - RNA, 19 nt, Homo sapiens
  misc_RNA (1)...(19): siRNA sense strand
gcucauuggcucccucaug

SEQ ID NO: 1418291 - RNA, 19 nt, Homo sapiens
  misc_RNA (1)...(19): siRNA sense strand
caacaccaacucagagaag

SEQ ID NO: 1418292 - RNA, 19 nt, Homo sapiens
  misc_RNA (1)...(19): siRNA sense strand
ugacggcgcucuacuucac

SEQ ID NO: 1418293 - RNA, 19 nt, Homo sapiens
  misc_RNA (1)...(19): siRNA sense strand
gcgcucuacuucaccuuca

SEQ ID NO: 1418294 - RNA, 19 nt, Homo sapiens
  misc_RNA (1)...(19): siRNA sense strand
cagcacgccugguccuaca

SEQ ID NO: 1418295 - RNA, 19 nt, Homo sapiens
  misc_RNA (1)...(19): siRNA sense strand
cucauuggcucccucaugu

SEQ ID NO: 1418296 - RNA, 19 nt, Homo sapiens
  misc_RNA (1)...(19): siRNA sense strand
caucuacacggcugucuuc

SEQ ID NO: 1418297 - RNA, 19 nt, Homo sapiens
  misc_RNA (1)...(19): siRNA sense strand
ccaucaaggacaaguaugu

SEQ ID NO: 1418298 - RNA, 19 nt, Homo sapiens
  misc_RNA (1)...(19): siRNA sense strand
gcugguuccucaucgacau

SEQ ID NO: 1418299 - RNA, 19 nt, Homo sapiens
  misc_RNA (1)...(19): siRNA sense strand
uggacauccucaucaacuu

SEQ ID NO: 1418300 - RNA, 19 nt, Homo sapiens
  misc_RNA (1)...(19): siRNA sense strand
ccuucgaccugcucaucuu

SEQ ID NO: 1418301 - RNA, 19 nt, Homo sapiens
  misc_RNA (1)...(19): siRNA sense strand
gaaguucaagaccacacau

SEQ ID NO: 1418302 - RNA, 19 nt, Homo sapiens
  misc_RNA (1)...(19): siRNA sense strand
uugcucaugugcaccuuug

SEQ ID NO: 1418303 - RNA, 19 nt, Homo sapiens
  misc_RNA (1)...(19): siRNA sense strand
ggaaauaauucacucacaa

SEQ ID NO: 1418304 - RNA, 19 nt, Homo sapiens
  misc_RNA (1)...(19): siRNA sense strand
gcaacaagcuacagccuau

SEQ ID NO: 1418305 - RNA, 19 nt, Homo sapiens
  misc_RNA (1)...(19): siRNA sense strand
uauaggagaugguguagaa

SEQ ID NO: 1418306 - RNA, 19 nt, Homo sapiens
  misc_RNA (1)...(19): siRNA sense strand
gaagguggauugucacagu

SEQ ID NO: 1418307 - RNA, 19 nt, Homo sapiens
  misc_RNA (1)...(19): siRNA sense strand
caacacccauuaaagauuc

SEQ ID NO: 1418308 - RNA, 19 nt, Homo sapiens
  misc_RNA (1)...(19): siRNA sense strand
gaagaaaagugguguaugu

SEQ ID NO: 1418309 - RNA, 19 nt, Homo sapiens
  misc_RNA (1)...(19): siRNA sense strand
ggacaaacugugugaauau

SEQ ID NO: 1418310 - RNA, 19 nt, Homo sapiens
  misc_RNA (1)...(19): siRNA sense strand
cgacgggucuuuaaacaau

SEQ ID NO: 1418311 - RNA, 19 nt, Homo sapiens
  misc_RNA (1)...(19): siRNA sense strand
gacaggaccuaagcacaua

SEQ ID NO: 1418312 - RNA, 19 nt, Homo sapiens
  misc_RNA (1)...(19): siRNA sense strand
ccaaugagcagcagugaaa

SEQ ID NO: 1418313 - RNA, 19 nt, Homo sapiens
  misc_RNA (1)...(19): siRNA sense strand
ggacagacaggauuucuca

SEQ ID NO: 1418314 - RNA, 19 nt, Homo sapiens
  misc_RNA (1)...(19): siRNA sense strand
aaagaaagcuguuuugaga

SEQ ID NO: 1418315 - RNA, 19 nt, Homo sapiens
  misc_RNA (1)...(19): siRNA sense strand
ccauauagaugauguuucu

SEQ ID NO: 1418316 - RNA, 19 nt, Homo sapiens
  misc_RNA (1)...(19): siRNA sense strand
caucaacacccauuaaaga

SEQ ID NO: 1418317 - RNA, 19 nt, Homo sapiens
  misc_RNA (1)...(19): siRNA sense strand
gacaaacugugugaauauu

SEQ ID NO: 1418318 - RNA, 19 nt, Homo sapiens
  misc_RNA (1)...(19): siRNA sense strand
uagaugauguuucuucaga

SEQ ID NO: 1418319 - RNA, 19 nt, Homo sapiens
  misc_RNA (1)...(19): siRNA sense strand
ggacuuggaugagacaauc

SEQ ID NO: 1418320 - RNA, 19 nt, Homo sapiens
  misc_RNA (1)...(19): siRNA sense strand
gcaauugggagcaguaguu

SEQ ID NO: 1418321 - RNA, 19 nt, Homo sapiens
  misc_RNA (1)...(19): siRNA sense strand
gaugauguuucuucagaug

SEQ ID NO: 1418322 - RNA, 19 nt, Homo sapiens
  misc_RNA (1)...(19): siRNA sense strand
gauuuacccuuccaacaga

SEQ ID NO: 1418323 - RNA, 19 nt, Homo sapiens
  misc_RNA (1)...(19): siRNA sense strand
guacggcauuuccucauau

SEQ ID NO: 1418324 - RNA, 19 nt, Homo sapiens
  misc_RNA (1)...(19): siRNA sense strand
ggaacuggaguaccuguaa

SEQ ID NO: 1418325 - RNA, 19 nt, Homo sapiens
  misc_RNA (1)...(19): siRNA sense strand
cgaaaguccugcuguaugg

SEQ ID NO: 1418326 - RNA, 19 nt, Homo sapiens
  misc_RNA (1)...(19): siRNA sense strand
uauaacagcucaccguauc

SEQ ID NO: 1418327 - RNA, 19 nt, Homo sapiens
  misc_RNA (1)...(19): siRNA sense strand
cggacaaacugugugaaua

SEQ ID NO: 1418328 - RNA, 19 nt, Homo sapiens
  misc_RNA (1)...(19): siRNA sense strand
gagaugguguagaagaaga

SEQ ID NO: 1418329 - RNA, 19 nt, Homo sapiens
  misc_RNA (1)...(19): siRNA sense strand
gguguggacuggaugagaa

SEQ ID NO: 1418330 - RNA, 19 nt, Homo sapiens
  misc_RNA (1)...(19): siRNA sense strand
gacaggauuucucagcuau

SEQ ID NO: 1418331 - RNA, 19 nt, Homo sapiens
  misc_RNA (1)...(19): siRNA sense strand
aaagugguguauguuguua

SEQ ID NO: 1418332 - RNA, 19 nt, Homo sapiens
  misc_RNA (1)...(19): siRNA sense strand
caccguauccagcacauua

SEQ ID NO: 1418333 - RNA, 19 nt, Homo sapiens
  misc_RNA (1)...(19): siRNA sense strand
gacugaagguggauuguca

SEQ ID NO: 1418334 - RNA, 19 nt, Homo sapiens
  misc_RNA (1)...(19): siRNA sense strand
ccuaagcacauauaacuuu

SEQ ID NO: 1418335 - RNA, 19 nt, Homo sapiens
  misc_RNA (1)...(19): siRNA sense strand
ggacaggaccuaagcacau

SEQ ID NO: 1418336 - RNA, 19 nt, Homo sapiens
  misc_RNA (1)...(19): siRNA sense strand
ucaggaauauauacaggaa

SEQ ID NO: 1418337 - RNA, 19 nt, Homo sapiens
  misc_RNA (1)...(19): siRNA sense strand
ccacuuaccagcuucaaga

SEQ ID NO: 1418338 - RNA, 19 nt, Homo sapiens
  misc_RNA (1)...(19): siRNA sense strand
gaaaagugguguauguugu

SEQ ID NO: 1418339 - RNA, 19 nt, Homo sapiens
  misc_RNA (1)...(19): siRNA sense strand
agacaggauuucucagcua

SEQ ID NO: 1418340 - RNA, 19 nt, Homo sapiens
  misc_RNA (1)...(19): siRNA sense strand
caacagaccauacccacau

SEQ ID NO: 1418341 - RNA, 19 nt, Homo sapiens
  misc_RNA (1)...(19): siRNA sense strand
gguccuacgccaacagaua

SEQ ID NO: 1418342 - RNA, 19 nt, Homo sapiens
  misc_RNA (1)...(19): siRNA sense strand
uacaacaucaucaggaaua

SEQ ID NO: 1418343 - RNA, 19 nt, Homo sapiens
  misc_RNA (1)...(19): siRNA sense strand
gaccuaagcacauauaacu

SEQ ID NO: 1418344 - RNA, 19 nt, Homo sapiens
  misc_RNA (1)...(19): siRNA sense strand
gucaguacgcacaguauua

SEQ ID NO: 1418345 - RNA, 19 nt, Homo sapiens
  misc_RNA (1)...(19): siRNA sense strand
cguacggcauuuccucaua

SEQ ID NO: 1418346 - RNA, 19 nt, Homo sapiens
  misc_RNA (1)...(19): siRNA sense strand
gcaguugagggccgaaauu

SEQ ID NO: 1418347 - RNA, 19 nt, Homo sapiens
  misc_RNA (1)...(19): siRNA sense strand
gaucuacaacaccuacaaa

SEQ ID NO: 1418348 - RNA, 19 nt, Homo sapiens
  misc_RNA (1)...(19): siRNA sense strand
gcaggacuauccgucuuau

SEQ ID NO: 1418349 - RNA, 19 nt, Homo sapiens
  misc_RNA (1)...(19): siRNA sense strand
ucacaaauuccucuggauu

SEQ ID NO: 1418350 - RNA, 19 nt, Homo sapiens
  misc_RNA (1)...(19): siRNA sense strand
caacaucaucaggaauaua

SEQ ID NO: 1418351 - RNA, 19 nt, Homo sapiens
  misc_RNA (1)...(19): siRNA sense strand
gaccaaguccauauagaug

SEQ ID NO: 1418352 - RNA, 19 nt, Homo sapiens
  misc_RNA (1)...(19): siRNA sense strand
aaagcacucucgcucauuc

SEQ ID NO: 1418353 - RNA, 19 nt, Homo sapiens
  misc_RNA (1)...(19): siRNA sense strand
ugaaagcacucucgcucau

SEQ ID NO: 1418354 - RNA, 19 nt, Homo sapiens
  misc_RNA (1)...(19): siRNA sense strand
cuaagcacauauaacuuug

SEQ ID NO: 1418355 - RNA, 19 nt, Homo sapiens
  misc_RNA (1)...(19): siRNA sense strand
gauguuucuucagaugaua

SEQ ID NO: 1418356 - RNA, 19 nt, Homo sapiens
  misc_RNA (1)...(19): siRNA sense strand
gaaugugaccaaguccaua

SEQ ID NO: 1418357 - RNA, 19 nt, Homo sapiens
  misc_RNA (1)...(19): siRNA sense strand
gcgaaaguccugcuguaug

SEQ ID NO: 1418358 - RNA, 19 nt, Homo sapiens
  misc_RNA (1)...(19): siRNA sense strand
gaaagcacucucgcucauu

SEQ ID NO: 1418359 - RNA, 19 nt, Homo sapiens
  misc_RNA (1)...(19): siRNA sense strand
guugagggccgaaauugaa

SEQ ID NO: 1418360 - RNA, 19 nt, Homo sapiens
  misc_RNA (1)...(19): siRNA sense strand
uaacuuauguuuggcaacu

SEQ ID NO: 1418361 - RNA, 19 nt, Homo sapiens
  misc_RNA (1)...(19): siRNA sense strand
cauauaacuuuggaacaga

SEQ ID NO: 1418362 - RNA, 19 nt, Homo sapiens
  misc_RNA (1)...(19): siRNA sense strand
uggcgaaaguccugcugua

SEQ ID NO: 1418363 - RNA, 19 nt, Homo sapiens
  misc_RNA (1)...(19): siRNA sense strand
agugguguauguuguuaua

SEQ ID NO: 1418364 - RNA, 19 nt, Homo sapiens
  misc_RNA (1)...(19): siRNA sense strand
gaccauacccacauauucu

SEQ ID NO: 1418365 - RNA, 19 nt, Homo sapiens
  misc_RNA (1)...(19): siRNA sense strand
ccaaguccauauagaugau

SEQ ID NO: 1418366 - RNA, 19 nt, Homo sapiens
  misc_RNA (1)...(19): siRNA sense strand
cgaagaaacaauaauccuu

SEQ ID NO: 1418367 - RNA, 19 nt, Homo sapiens
  misc_RNA (1)...(19): siRNA sense strand
uuucucagguucagcaauu

SEQ ID NO: 1418368 - RNA, 19 nt, Homo sapiens
  misc_RNA (1)...(19): siRNA sense strand
ucagucaccuggacagaca

SEQ ID NO: 1418369 - RNA, 19 nt, Homo sapiens
  misc_RNA (1)...(19): siRNA sense strand
caaugccacuuaccagcuu

SEQ ID NO: 1418370 - RNA, 19 nt, Homo sapiens
  misc_RNA (1)...(19): siRNA sense strand
gguguauguuguuauagga

SEQ ID NO: 1418371 - RNA, 19 nt, Homo sapiens
  misc_RNA (1)...(19): siRNA sense strand
ccagugcuaacuuauguuu

SEQ ID NO: 1418372 - RNA, 19 nt, Homo sapiens
  misc_RNA (1)...(19): siRNA sense strand
uaaaagagaucuacaacac

SEQ ID NO: 1418373 - RNA, 19 nt, Homo sapiens
  misc_RNA (1)...(19): siRNA sense strand
cagcaggacuauccgucuu

SEQ ID NO: 1418374 - RNA, 19 nt, Homo sapiens
  misc_RNA (1)...(19): siRNA sense strand
aaccagugcuaacuuaugu

SEQ ID NO: 1418375 - RNA, 19 nt, Homo sapiens
  misc_RNA (1)...(19): siRNA sense strand
caacgacaccauccaccaa

SEQ ID NO: 1418376 - RNA, 19 nt, Homo sapiens
  misc_RNA (1)...(19): siRNA sense strand
caaccagugcuaacuuaug

SEQ ID NO: 1418377 - RNA, 19 nt, Homo sapiens
  misc_RNA (1)...(19): siRNA sense strand
ucaacacccauuaaagauu

SEQ ID NO: 1418378 - RNA, 19 nt, Homo sapiens
  misc_RNA (1)...(19): siRNA sense strand
gccgacgggucuuuaaaca

SEQ ID NO: 1418379 - RNA, 19 nt, Homo sapiens
  misc_RNA (1)...(19): siRNA sense strand
ccucuggauuuaauaguuc

SEQ ID NO: 1418380 - RNA, 19 nt, Homo sapiens
  misc_RNA (1)...(19): siRNA sense strand
gugaccaaguccauauaga

SEQ ID NO: 1418381 - RNA, 19 nt, Homo sapiens
  misc_RNA (1)...(19): siRNA sense strand
gcccaucaacacccauuaa

SEQ ID NO: 1418382 - RNA, 19 nt, Homo sapiens
  misc_RNA (1)...(19): siRNA sense strand
gacaggcaccauacagcua

SEQ ID NO: 1418383 - RNA, 19 nt, Homo sapiens
  misc_RNA (1)...(19): siRNA sense strand
gacgggucuuuaaacaauu

SEQ ID NO: 1418384 - RNA, 19 nt, Homo sapiens
  misc_RNA (1)...(19): siRNA sense strand
gguugacacuggcccugaa

SEQ ID NO: 1418385 - RNA, 19 nt, Homo sapiens
  misc_RNA (1)...(19): siRNA sense strand
aagcacauauaacuuugga

SEQ ID NO: 1418386 - RNA, 19 nt, Homo sapiens
  misc_RNA (1)...(19): siRNA sense strand
caagguagcaguuuuacaa

SEQ ID NO: 1418387 - RNA, 19 nt, Homo sapiens
  misc_RNA (1)...(19): siRNA sense strand
gauaacggacaggaccuaa

SEQ ID NO: 1418388 - RNA, 19 nt, Homo sapiens
  misc_RNA (1)...(19): siRNA sense strand
gaagaagaacaaggagcaa

SEQ ID NO: 1418389 - RNA, 19 nt, Homo sapiens
  misc_RNA (1)...(19): siRNA sense strand
aacagaccauacccacaua

SEQ ID NO: 1418390 - RNA, 19 nt, Homo sapiens
  misc_RNA (1)...(19): siRNA sense strand
gcaaccagugcuaacuuau

SEQ ID NO: 1418391 - RNA, 19 nt, Homo sapiens
  misc_RNA (1)...(19): siRNA sense strand
ccacagauuuacccuucca

SEQ ID NO: 1418392 - RNA, 19 nt, Homo sapiens
  misc_RNA (1)...(19): siRNA sense strand
ggucaguacgcacaguauu

SEQ ID NO: 1418393 - RNA, 19 nt, Homo sapiens
  misc_RNA (1)...(19): siRNA sense strand
aggagaugguguagaagaa

SEQ ID NO: 1418394 - RNA, 19 nt, Homo sapiens
  misc_RNA (1)...(19): siRNA sense strand
uggguuaggaauuguauuu

SEQ ID NO: 1418395 - RNA, 19 nt, Homo sapiens
  misc_RNA (1)...(19): siRNA sense strand
ggacuggaugagaaaguug

SEQ ID NO: 1418396 - RNA, 19 nt, Homo sapiens
  misc_RNA (1)...(19): siRNA sense strand
acauauaacuuuggaacag

SEQ ID NO: 1418397 - RNA, 19 nt, Homo sapiens
  misc_RNA (1)...(19): siRNA sense strand
ugaccaaguccauauagau

SEQ ID NO: 1418398 - RNA, 19 nt, Homo sapiens
  misc_RNA (1)...(19): siRNA sense strand
cauccaccaaugccacuua

SEQ ID NO: 1418399 - RNA, 19 nt, Homo sapiens
  misc_RNA (1)...(19): siRNA sense strand
cauaugggcaaacacaguu

SEQ ID NO: 1418400 - RNA, 19 nt, Homo sapiens
  misc_RNA (1)...(19): siRNA sense strand
auucugaucuugagagagu

SEQ ID NO: 1418401 - RNA, 19 nt, Homo sapiens
  misc_RNA (1)...(19): siRNA sense strand
gcauaugggcaaacacagu

SEQ ID NO: 1418402 - RNA, 19 nt, Homo sapiens
  misc_RNA (1)...(19): siRNA sense strand
gaugcaagguagcaguuuu

SEQ ID NO: 1418403 - RNA, 19 nt, Homo sapiens
  misc_RNA (1)...(19): siRNA sense strand
ggaaauaauucacucacaa

SEQ ID NO: 1418404 - RNA, 19 nt, Homo sapiens
  misc_RNA (1)...(19): siRNA sense strand
gcaacaagcuacagccuau

SEQ ID NO: 1418405 - RNA, 19 nt, Homo sapiens
  misc_RNA (1)...(19): siRNA sense strand
uauaggagaugguguagaa

SEQ ID NO: 1418406 - RNA, 19 nt, Homo sapiens
  misc_RNA (1)...(19): siRNA sense strand
gaagguggauugucacagu

SEQ ID NO: 1418407 - RNA, 19 nt, Homo sapiens
  misc_RNA (1)...(19): siRNA sense strand
caacacccauuaaagauuc

SEQ ID NO: 1418408 - RNA, 19 nt, Homo sapiens
  misc_RNA (1)...(19): siRNA sense strand
gaagaaaagugguguaugu

SEQ ID NO: 1418409 - RNA, 19 nt, Homo sapiens
  misc_RNA (1)...(19): siRNA sense strand
ggacaaacugugugaauau

SEQ ID NO: 1418410 - RNA, 19 nt, Homo sapiens
  misc_RNA (1)...(19): siRNA sense strand
cgacgggucuuuaaacaau

SEQ ID NO: 1418411 - RNA, 19 nt, Homo sapiens
  misc_RNA (1)...(19): siRNA sense strand
gacaggaccuaagcacaua

SEQ ID NO: 1418412 - RNA, 19 nt, Homo sapiens
  misc_RNA (1)...(19): siRNA sense strand
ccaaugagcagcagugaaa

SEQ ID NO: 1418413 - RNA, 19 nt, Homo sapiens
  misc_RNA (1)...(19): siRNA sense strand
ggacagacaggauuucuca

SEQ ID NO: 1418414 - RNA, 19 nt, Homo sapiens
  misc_RNA (1)...(19): siRNA sense strand
aaagaaagcuguuuugaga

SEQ ID NO: 1418415 - RNA, 19 nt, Homo sapiens
  misc_RNA (1)...(19): siRNA sense strand
ccauauagaugauguuucu

SEQ ID NO: 1418416 - RNA, 19 nt, Homo sapiens
  misc_RNA (1)...(19): siRNA sense strand
caucaacacccauuaaaga

SEQ ID NO: 1418417 - RNA, 19 nt, Homo sapiens
  misc_RNA (1)...(19): siRNA sense strand
gacaaacugugugaauauu

SEQ ID NO: 1418418 - RNA, 19 nt, Homo sapiens
  misc_RNA (1)...(19): siRNA sense strand
uagaugauguuucuucaga

SEQ ID NO: 1418419 - RNA, 19 nt, Homo sapiens
  misc_RNA (1)...(19): siRNA sense strand
ggacuuggaugagacaauc

SEQ ID NO: 1418420 - RNA, 19 nt, Homo sapiens
  misc_RNA (1)...(19): siRNA sense strand
gcaauugggagcaguaguu

SEQ ID NO: 1418421 - RNA, 19 nt, Homo sapiens
  misc_RNA (1)...(19): siRNA sense strand
gaugauguuucuucagaug

SEQ ID NO: 1418422 - RNA, 19 nt, Homo sapiens
  misc_RNA (1)...(19): siRNA sense strand
gauuuacccuuccaacaga

SEQ ID NO: 1418423 - RNA, 19 nt, Homo sapiens
  misc_RNA (1)...(19): siRNA sense strand
guacggcauuuccucauau

SEQ ID NO: 1418424 - RNA, 19 nt, Homo sapiens
  misc_RNA (1)...(19): siRNA sense strand
ggaacuggaguaccuguaa

SEQ ID NO: 1418425 - RNA, 19 nt, Homo sapiens
  misc_RNA (1)...(19): siRNA sense strand
cgaaaguccugcuguaugg

SEQ ID NO: 1418426 - RNA, 19 nt, Homo sapiens
  misc_RNA (1)...(19): siRNA sense strand
uauaacagcucaccguauc

SEQ ID NO: 1418427 - RNA, 19 nt, Homo sapiens
  misc_RNA (1)...(19): siRNA sense strand
cggacaaacugugugaaua

SEQ ID NO: 1418428 - RNA, 19 nt, Homo sapiens
  misc_RNA (1)...(19): siRNA sense strand
gagaugguguagaagaaga

SEQ ID NO: 1418429 - RNA, 19 nt, Homo sapiens
  misc_RNA (1)...(19): siRNA sense strand
gguguggacuggaugagaa

SEQ ID NO: 1418430 - RNA, 19 nt, Homo sapiens
  misc_RNA (1)...(19): siRNA sense strand
gacaggauuucucagcuau

SEQ ID NO: 1418431 - RNA, 19 nt, Homo sapiens
  misc_RNA (1)...(19): siRNA sense strand
aaagugguguauguuguua

SEQ ID NO: 1418432 - RNA, 19 nt, Homo sapiens
  misc_RNA (1)...(19): siRNA sense strand
caccguauccagcacauua

SEQ ID NO: 1418433 - RNA, 19 nt, Homo sapiens
  misc_RNA (1)...(19): siRNA sense strand
gacugaagguggauuguca

SEQ ID NO: 1418434 - RNA, 19 nt, Homo sapiens
  misc_RNA (1)...(19): siRNA sense strand
ccuaagcacauauaacuuu

SEQ ID NO: 1418435 - RNA, 19 nt, Homo sapiens
  misc_RNA (1)...(19): siRNA sense strand
ggacaggaccuaagcacau

SEQ ID NO: 1418436 - RNA, 19 nt, Homo sapiens
  misc_RNA (1)...(19): siRNA sense strand
ucaggaauauauacaggaa

SEQ ID NO: 1418437 - RNA, 19 nt, Homo sapiens
  misc_RNA (1)...(19): siRNA sense strand
ccacuuaccagcuucaaga

SEQ ID NO: 1418438 - RNA, 19 nt, Homo sapiens
  misc_RNA (1)...(19): siRNA sense strand
gaaaagugguguauguugu

SEQ ID NO: 1418439 - RNA, 19 nt, Homo sapiens
  misc_RNA (1)...(19): siRNA sense strand
agacaggauuucucagcua

SEQ ID NO: 1418440 - RNA, 19 nt, Homo sapiens
  misc_RNA (1)...(19): siRNA sense strand
caacagaccauacccacau

SEQ ID NO: 1418441 - RNA, 19 nt, Homo sapiens
  misc_RNA (1)...(19): siRNA sense strand
gguccuacgccaacagaua

SEQ ID NO: 1418442 - RNA, 19 nt, Homo sapiens
  misc_RNA (1)...(19): siRNA sense strand
uacaacaucaucaggaaua

SEQ ID NO: 1418443 - RNA, 19 nt, Homo sapiens
  misc_RNA (1)...(19): siRNA sense strand
gaccuaagcacauauaacu

SEQ ID NO: 1418444 - RNA, 19 nt, Homo sapiens
  misc_RNA (1)...(19): siRNA sense strand
gucaguacgcacaguauua

SEQ ID NO: 1418445 - RNA, 19 nt, Homo sapiens
  misc_RNA (1)...(19): siRNA sense strand
cguacggcauuuccucaua

SEQ ID NO: 1418446 - RNA, 19 nt, Homo sapiens
  misc_RNA (1)...(19): siRNA sense strand
gcaguugagggccgaaauu

SEQ ID NO: 1418447 - RNA, 19 nt, Homo sapiens
  misc_RNA (1)...(19): siRNA sense strand
gaucuacaacaccuacaaa

SEQ ID NO: 1418448 - RNA, 19 nt, Homo sapiens
  misc_RNA (1)...(19): siRNA sense strand
gcaggacuauccgucuuau

SEQ ID NO: 1418449 - RNA, 19 nt, Homo sapiens
  misc_RNA (1)...(19): siRNA sense strand
ucacaaauuccucuggauu

SEQ ID NO: 1418450 - RNA, 19 nt, Homo sapiens
  misc_RNA (1)...(19): siRNA sense strand
caacaucaucaggaauaua

SEQ ID NO: 1418451 - RNA, 19 nt, Homo sapiens
  misc_RNA (1)...(19): siRNA sense strand
gaccaaguccauauagaug

SEQ ID NO: 1418452 - RNA, 19 nt, Homo sapiens
  misc_RNA (1)...(19): siRNA sense strand
aaagcacucucgcucauuc

SEQ ID NO: 1418453 - RNA, 19 nt, Homo sapiens
  misc_RNA (1)...(19): siRNA sense strand
ugaaagcacucucgcucau

SEQ ID NO: 1418454 - RNA, 19 nt, Homo sapiens
  misc_RNA (1)...(19): siRNA sense strand
cuaagcacauauaacuuug

SEQ ID NO: 1418455 - RNA, 19 nt, Homo sapiens
  misc_RNA (1)...(19): siRNA sense strand
gauguuucuucagaugaua

SEQ ID NO: 1418456 - RNA, 19 nt, Homo sapiens
  misc_RNA (1)...(19): siRNA sense strand
gaaugugaccaaguccaua

SEQ ID NO: 1418457 - RNA, 19 nt, Homo sapiens
  misc_RNA (1)...(19): siRNA sense strand
gcgaaaguccugcuguaug

SEQ ID NO: 1418458 - RNA, 19 nt, Homo sapiens
  misc_RNA (1)...(19): siRNA sense strand
gaaagcacucucgcucauu

SEQ ID NO: 1418459 - RNA, 19 nt, Homo sapiens
  misc_RNA (1)...(19): siRNA sense strand
guugagggccgaaauugaa

SEQ ID NO: 1418460 - RNA, 19 nt, Homo sapiens
  misc_RNA (1)...(19): siRNA sense strand
uaacuuauguuuggcaacu

SEQ ID NO: 1418461 - RNA, 19 nt, Homo sapiens
  misc_RNA (1)...(19): siRNA sense strand
cauauaacuuuggaacaga

SEQ ID NO: 1418462 - RNA, 19 nt, Homo sapiens
  misc_RNA (1)...(19): siRNA sense strand
uggcgaaaguccugcugua

SEQ ID NO: 1418463 - RNA, 19 nt, Homo sapiens
  misc_RNA (1)...(19): siRNA sense strand
agugguguauguuguuaua

SEQ ID NO: 1418464 - RNA, 19 nt, Homo sapiens
  misc_RNA (1)...(19): siRNA sense strand
gaccauacccacauauucu

SEQ ID NO: 1418465 - RNA, 19 nt, Homo sapiens
  misc_RNA (1)...(19): siRNA sense strand
ccaaguccauauagaugau

SEQ ID NO: 1418466 - RNA, 19 nt, Homo sapiens
  misc_RNA (1)...(19): siRNA sense strand
cgaagaaacaauaauccuu

SEQ ID NO: 1418467 - RNA, 19 nt, Homo sapiens
  misc_RNA (1)...(19): siRNA sense strand
uuucucagguucagcaauu

SEQ ID NO: 1418468 - RNA, 19 nt, Homo sapiens
  misc_RNA (1)...(19): siRNA sense strand
ucagucaccuggacagaca

SEQ ID NO: 1418469 - RNA, 19 nt, Homo sapiens
  misc_RNA (1)...(19): siRNA sense strand
caaugccacuuaccagcuu

SEQ ID NO: 1418470 - RNA, 19 nt, Homo sapiens
  misc_RNA (1)...(19): siRNA sense strand
gguguauguuguuauagga

SEQ ID NO: 1418471 - RNA, 19 nt, Homo sapiens
  misc_RNA (1)...(19): siRNA sense strand
ccagugcuaacuuauguuu

SEQ ID NO: 1418472 - RNA, 19 nt, Homo sapiens
  misc_RNA (1)...(19): siRNA sense strand
uaaaagagaucuacaacac

SEQ ID NO: 1418473 - RNA, 19 nt, Homo sapiens
  misc_RNA (1)...(19): siRNA sense strand
cagcaggacuauccgucuu

SEQ ID NO: 1418474 - RNA, 19 nt, Homo sapiens
  misc_RNA (1)...(19): siRNA sense strand
aaccagugcuaacuuaugu

SEQ ID NO: 1418475 - RNA, 19 nt, Homo sapiens
  misc_RNA (1)...(19): siRNA sense strand
caacgacaccauccaccaa

SEQ ID NO: 1418476 - RNA, 19 nt, Homo sapiens
  misc_RNA (1)...(19): siRNA sense strand
caaccagugcuaacuuaug

SEQ ID NO: 1418477 - RNA, 19 nt, Homo sapiens
  misc_RNA (1)...(19): siRNA sense strand
ucaacacccauuaaagauu

SEQ ID NO: 1418478 - RNA, 19 nt, Homo sapiens
  misc_RNA (1)...(19): siRNA sense strand
gccgacgggucuuuaaaca

SEQ ID NO: 1418479 - RNA, 19 nt, Homo sapiens
  misc_RNA (1)...(19): siRNA sense strand
ccucuggauuuaauaguuc

SEQ ID NO: 1418480 - RNA, 19 nt, Homo sapiens
  misc_RNA (1)...(19): siRNA sense strand
gugaccaaguccauauaga

SEQ ID NO: 1418481 - RNA, 19 nt, Homo sapiens
  misc_RNA (1)...(19): siRNA sense strand
gcccaucaacacccauuaa

SEQ ID NO: 1418482 - RNA, 19 nt, Homo sapiens
  misc_RNA (1)...(19): siRNA sense strand
gacaggcaccauacagcua

SEQ ID NO: 1418483 - RNA, 19 nt, Homo sapiens
  misc_RNA (1)...(19): siRNA sense strand
gacgggucuuuaaacaauu

SEQ ID NO: 1418484 - RNA, 19 nt, Homo sapiens
  misc_RNA (1)...(19): siRNA sense strand
gguugacacuggcccugaa

SEQ ID NO: 1418485 - RNA, 19 nt, Homo sapiens
  misc_RNA (1)...(19): siRNA sense strand
aagcacauauaacuuugga

SEQ ID NO: 1418486 - RNA, 19 nt, Homo sapiens
  misc_RNA (1)...(19): siRNA sense strand
caagguagcaguuuuacaa

SEQ ID NO: 1418487 - RNA, 19 nt, Homo sapiens
  misc_RNA (1)...(19): siRNA sense strand
gauaacggacaggaccuaa

SEQ ID NO: 1418488 - RNA, 19 nt, Homo sapiens
  misc_RNA (1)...(19): siRNA sense strand
gaagaagaacaaggagcaa

SEQ ID NO: 1418489 - RNA, 19 nt, Homo sapiens
  misc_RNA (1)...(19): siRNA sense strand
aacagaccauacccacaua

SEQ ID NO: 1418490 - RNA, 19 nt, Homo sapiens
  misc_RNA (1)...(19): siRNA sense strand
gcaaccagugcuaacuuau

SEQ ID NO: 1418491 - RNA, 19 nt, Homo sapiens
  misc_RNA (1)...(19): siRNA sense strand
ccacagauuuacccuucca

SEQ ID NO: 1418492 - RNA, 19 nt, Homo sapiens
  misc_RNA (1)...(19): siRNA sense strand
ggucaguacgcacaguauu

SEQ ID NO: 1418493 - RNA, 19 nt, Homo sapiens
  misc_RNA (1)...(19): siRNA sense strand
aggagaugguguagaagaa

SEQ ID NO: 1418494 - RNA, 19 nt, Homo sapiens
  misc_RNA (1)...(19): siRNA sense strand
uggguuaggaauuguauuu

SEQ ID NO: 1418495 - RNA, 19 nt, Homo sapiens
  misc_RNA (1)...(19): siRNA sense strand
ggacuggaugagaaaguug

SEQ ID NO: 1418496 - RNA, 19 nt, Homo sapiens
  misc_RNA (1)...(19): siRNA sense strand
acauauaacuuuggaacag

SEQ ID NO: 1418497 - RNA, 19 nt, Homo sapiens
  misc_RNA (1)...(19): siRNA sense strand
ugaccaaguccauauagau

SEQ ID NO: 1418498 - RNA, 19 nt, Homo sapiens
  misc_RNA (1)...(19): siRNA sense strand
cauccaccaaugccacuua

SEQ ID NO: 1418499 - RNA, 19 nt, Homo sapiens
  misc_RNA (1)...(19): siRNA sense strand
cauaugggcaaacacaguu

SEQ ID NO: 1418500 - RNA, 19 nt, Homo sapiens
  misc_RNA (1)...(19): siRNA sense strand
auucugaucuugagagagu

SEQ ID NO: 1418501 - RNA, 19 nt, Homo sapiens
  misc_RNA (1)...(19): siRNA sense strand
gcauaugggcaaacacagu

SEQ ID NO: 1418502 - RNA, 19 nt, Homo sapiens
  misc_RNA (1)...(19): siRNA sense strand
gaugcaagguagcaguuuu

SEQ ID NO: 1418503 - RNA, 19 nt, Homo sapiens
  misc_RNA (1)...(19): siRNA sense strand
ggaaauaauucacucacaa

SEQ ID NO: 1418504 - RNA, 19 nt, Homo sapiens
  misc_RNA (1)...(19): siRNA sense strand
gcaacaagcuacagccuau

SEQ ID NO: 1418505 - RNA, 19 nt, Homo sapiens
  misc_RNA (1)...(19): siRNA sense strand
uauaggagaugguguagaa

SEQ ID NO: 1418506 - RNA, 19 nt, Homo sapiens
  misc_RNA (1)...(19): siRNA sense strand
gaagguggauugucacagu

SEQ ID NO: 1418507 - RNA, 19 nt, Homo sapiens
  misc_RNA (1)...(19): siRNA sense strand
caacacccauuaaagauuc

SEQ ID NO: 1418508 - RNA, 19 nt, Homo sapiens
  misc_RNA (1)...(19): siRNA sense strand
gaagaaaagugguguaugu

SEQ ID NO: 1418509 - RNA, 19 nt, Homo sapiens
  misc_RNA (1)...(19): siRNA sense strand
ggacaaacugugugaauau

SEQ ID NO: 1418510 - RNA, 19 nt, Homo sapiens
  misc_RNA (1)...(19): siRNA sense strand
cgacgggucuuuaaacaau

SEQ ID NO: 1418511 - RNA, 19 nt, Homo sapiens
  misc_RNA (1)...(19): siRNA sense strand
gacaggaccuaagcacaua

SEQ ID NO: 1418512 - RNA, 19 nt, Homo sapiens
  misc_RNA (1)...(19): siRNA sense strand
ccaaugagcagcagugaaa

SEQ ID NO: 1418513 - RNA, 19 nt, Homo sapiens
  misc_RNA (1)...(19): siRNA sense strand
ggacagacaggauuucuca

SEQ ID NO: 1418514 - RNA, 19 nt, Homo sapiens
  misc_RNA (1)...(19): siRNA sense strand
aaagaaagcuguuuugaga

SEQ ID NO: 1418515 - RNA, 19 nt, Homo sapiens
  misc_RNA (1)...(19): siRNA sense strand
ccauauagaugauguuucu

SEQ ID NO: 1418516 - RNA, 19 nt, Homo sapiens
  misc_RNA (1)...(19): siRNA sense strand
caucaacacccauuaaaga

SEQ ID NO: 1418517 - RNA, 19 nt, Homo sapiens
  misc_RNA (1)...(19): siRNA sense strand
gacaaacugugugaauauu

SEQ ID NO: 1418518 - RNA, 19 nt, Homo sapiens
  misc_RNA (1)...(19): siRNA sense strand
uagaugauguuucuucaga

SEQ ID NO: 1418519 - RNA, 19 nt, Homo sapiens
  misc_RNA (1)...(19): siRNA sense strand
ggacuuggaugagacaauc

SEQ ID NO: 1418520 - RNA, 19 nt, Homo sapiens
  misc_RNA (1)...(19): siRNA sense strand
gcaauugggagcaguaguu

SEQ ID NO: 1418521 - RNA, 19 nt, Homo sapiens
  misc_RNA (1)...(19): siRNA sense strand
gaugauguuucuucagaug

SEQ ID NO: 1418522 - RNA, 19 nt, Homo sapiens
  misc_RNA (1)...(19): siRNA sense strand
gauuuacccuuccaacaga

SEQ ID NO: 1418523 - RNA, 19 nt, Homo sapiens
  misc_RNA (1)...(19): siRNA sense strand
guacggcauuuccucauau

SEQ ID NO: 1418524 - RNA, 19 nt, Homo sapiens
  misc_RNA (1)...(19): siRNA sense strand
ggaacuggaguaccuguaa

SEQ ID NO: 1418525 - RNA, 19 nt, Homo sapiens
  misc_RNA (1)...(19): siRNA sense strand
cgaaaguccugcuguaugg

SEQ ID NO: 1418526 - RNA, 19 nt, Homo sapiens
  misc_RNA (1)...(19): siRNA sense strand
uauaacagcucaccguauc

SEQ ID NO: 1418527 - RNA, 19 nt, Homo sapiens
  misc_RNA (1)...(19): siRNA sense strand
cggacaaacugugugaaua

SEQ ID NO: 1418528 - RNA, 19 nt, Homo sapiens
  misc_RNA (1)...(19): siRNA sense strand
gagaugguguagaagaaga

SEQ ID NO: 1418529 - RNA, 19 nt, Homo sapiens
  misc_RNA (1)...(19): siRNA sense strand
gguguggacuggaugagaa

SEQ ID NO: 1418530 - RNA, 19 nt, Homo sapiens
  misc_RNA (1)...(19): siRNA sense strand
gacaggauuucucagcuau

SEQ ID NO: 1418531 - RNA, 19 nt, Homo sapiens
  misc_RNA (1)...(19): siRNA sense strand
aaagugguguauguuguua

SEQ ID NO: 1418532 - RNA, 19 nt, Homo sapiens
  misc_RNA (1)...(19): siRNA sense strand
caccguauccagcacauua

SEQ ID NO: 1418533 - RNA, 19 nt, Homo sapiens
  misc_RNA (1)...(19): siRNA sense strand
gacugaagguggauuguca

SEQ ID NO: 1418534 - RNA, 19 nt, Homo sapiens
  misc_RNA (1)...(19): siRNA sense strand
ccuaagcacauauaacuuu

SEQ ID NO: 1418535 - RNA, 19 nt, Homo sapiens
  misc_RNA (1)...(19): siRNA sense strand
ggacaggaccuaagcacau

SEQ ID NO: 1418536 - RNA, 19 nt, Homo sapiens
  misc_RNA (1)...(19): siRNA sense strand
ucaggaauauauacaggaa

SEQ ID NO: 1418537 - RNA, 19 nt, Homo sapiens
  misc_RNA (1)...(19): siRNA sense strand
ccacuuaccagcuucaaga

SEQ ID NO: 1418538 - RNA, 19 nt, Homo sapiens
  misc_RNA (1)...(19): siRNA sense strand
gaaaagugguguauguugu

SEQ ID NO: 1418539 - RNA, 19 nt, Homo sapiens
  misc_RNA (1)...(19): siRNA sense strand
agacaggauuucucagcua

SEQ ID NO: 1418540 - RNA, 19 nt, Homo sapiens
  misc_RNA (1)...(19): siRNA sense strand
caacagaccauacccacau

SEQ ID NO: 1418541 - RNA, 19 nt, Homo sapiens
  misc_RNA (1)...(19): siRNA sense strand
gguccuacgccaacagaua

SEQ ID NO: 1418542 - RNA, 19 nt, Homo sapiens
  misc_RNA (1)...(19): siRNA sense strand
uacaacaucaucaggaaua

SEQ ID NO: 1418543 - RNA, 19 nt, Homo sapiens
  misc_RNA (1)...(19): siRNA sense strand
gaccuaagcacauauaacu

SEQ ID NO: 1418544 - RNA, 19 nt, Homo sapiens
  misc_RNA (1)...(19): siRNA sense strand
gucaguacgcacaguauua

SEQ ID NO: 1418545 - RNA, 19 nt, Homo sapiens
  misc_RNA (1)...(19): siRNA sense strand
cguacggcauuuccucaua

SEQ ID NO: 1418546 - RNA, 19 nt, Homo sapiens
  misc_RNA (1)...(19): siRNA sense strand
gcaguugagggccgaaauu

SEQ ID NO: 1418547 - RNA, 19 nt, Homo sapiens
  misc_RNA (1)...(19): siRNA sense strand
gaucuacaacaccuacaaa

SEQ ID NO: 1418548 - RNA, 19 nt, Homo sapiens
  misc_RNA (1)...(19): siRNA sense strand
gcaggacuauccgucuuau

SEQ ID NO: 1418549 - RNA, 19 nt, Homo sapiens
  misc_RNA (1)...(19): siRNA sense strand
ucacaaauuccucuggauu

SEQ ID NO: 1418550 - RNA, 19 nt, Homo sapiens
  misc_RNA (1)...(19): siRNA sense strand
caacaucaucaggaauaua

SEQ ID NO: 1418551 - RNA, 19 nt, Homo sapiens
  misc_RNA (1)...(19): siRNA sense strand
gaccaaguccauauagaug

SEQ ID NO: 1418552 - RNA, 19 nt, Homo sapiens
  misc_RNA (1)...(19): siRNA sense strand
aaagcacucucgcucauuc

SEQ ID NO: 1418553 - RNA, 19 nt, Homo sapiens
  misc_RNA (1)...(19): siRNA sense strand
ugaaagcacucucgcucau

SEQ ID NO: 1418554 - RNA, 19 nt, Homo sapiens
  misc_RNA (1)...(19): siRNA sense strand
cuaagcacauauaacuuug

SEQ ID NO: 1418555 - RNA, 19 nt, Homo sapiens
  misc_RNA (1)...(19): siRNA sense strand
gauguuucuucagaugaua

SEQ ID NO: 1418556 - RNA, 19 nt, Homo sapiens
  misc_RNA (1)...(19): siRNA sense strand
gaaugugaccaaguccaua

SEQ ID NO: 1418557 - RNA, 19 nt, Homo sapiens
  misc_RNA (1)...(19): siRNA sense strand
gcgaaaguccugcuguaug

SEQ ID NO: 1418558 - RNA, 19 nt, Homo sapiens
  misc_RNA (1)...(19): siRNA sense strand
gaaagcacucucgcucauu

SEQ ID NO: 1418559 - RNA, 19 nt, Homo sapiens
  misc_RNA (1)...(19): siRNA sense strand
guugagggccgaaauugaa

SEQ ID NO: 1418560 - RNA, 19 nt, Homo sapiens
  misc_RNA (1)...(19): siRNA sense strand
uaacuuauguuuggcaacu

SEQ ID NO: 1418561 - RNA, 19 nt, Homo sapiens
  misc_RNA (1)...(19): siRNA sense strand
cauauaacuuuggaacaga

SEQ ID NO: 1418562 - RNA, 19 nt, Homo sapiens
  misc_RNA (1)...(19): siRNA sense strand
uggcgaaaguccugcugua

SEQ ID NO: 1418563 - RNA, 19 nt, Homo sapiens
  misc_RNA (1)...(19): siRNA sense strand
agugguguauguuguuaua

SEQ ID NO: 1418564 - RNA, 19 nt, Homo sapiens
  misc_RNA (1)...(19): siRNA sense strand
gaccauacccacauauucu

SEQ ID NO: 1418565 - RNA, 19 nt, Homo sapiens
  misc_RNA (1)...(19): siRNA sense strand
ccaaguccauauagaugau

SEQ ID NO: 1418566 - RNA, 19 nt, Homo sapiens
  misc_RNA (1)...(19): siRNA sense strand
cgaagaaacaauaauccuu

SEQ ID NO: 1418567 - RNA, 19 nt, Homo sapiens
  misc_RNA (1)...(19): siRNA sense strand
uuucucagguucagcaauu

SEQ ID NO: 1418568 - RNA, 19 nt, Homo sapiens
  misc_RNA (1)...(19): siRNA sense strand
ucagucaccuggacagaca

SEQ ID NO: 1418569 - RNA, 19 nt, Homo sapiens
  misc_RNA (1)...(19): siRNA sense strand
caaugccacuuaccagcuu

SEQ ID NO: 1418570 - RNA, 19 nt, Homo sapiens
  misc_RNA (1)...(19): siRNA sense strand
gguguauguuguuauagga

SEQ ID NO: 1418571 - RNA, 19 nt, Homo sapiens
  misc_RNA (1)...(19): siRNA sense strand
ccagugcuaacuuauguuu

SEQ ID NO: 1418572 - RNA, 19 nt, Homo sapiens
  misc_RNA (1)...(19): siRNA sense strand
uaaaagagaucuacaacac

SEQ ID NO: 1418573 - RNA, 19 nt, Homo sapiens
  misc_RNA (1)...(19): siRNA sense strand
cagcaggacuauccgucuu

SEQ ID NO: 1418574 - RNA, 19 nt, Homo sapiens
  misc_RNA (1)...(19): siRNA sense strand
aaccagugcuaacuuaugu

SEQ ID NO: 1418575 - RNA, 19 nt, Homo sapiens
  misc_RNA (1)...(19): siRNA sense strand
caacgacaccauccaccaa

SEQ ID NO: 1418576 - RNA, 19 nt, Homo sapiens
  misc_RNA (1)...(19): siRNA sense strand
caaccagugcuaacuuaug

SEQ ID NO: 1418577 - RNA, 19 nt, Homo sapiens
  misc_RNA (1)...(19): siRNA sense strand
ucaacacccauuaaagauu

SEQ ID NO: 1418578 - RNA, 19 nt, Homo sapiens
  misc_RNA (1)...(19): siRNA sense strand
gccgacgggucuuuaaaca

SEQ ID NO: 1418579 - RNA, 19 nt, Homo sapiens
  misc_RNA (1)...(19): siRNA sense strand
ccucuggauuuaauaguuc

SEQ ID NO: 1418580 - RNA, 19 nt, Homo sapiens
  misc_RNA (1)...(19): siRNA sense strand
gugaccaaguccauauaga

SEQ ID NO: 1418581 - RNA, 19 nt, Homo sapiens
  misc_RNA (1)...(19): siRNA sense strand
gcccaucaacacccauuaa

SEQ ID NO: 1418582 - RNA, 19 nt, Homo sapiens
  misc_RNA (1)...(19): siRNA sense strand
gacaggcaccauacagcua

SEQ ID NO: 1418583 - RNA, 19 nt, Homo sapiens
  misc_RNA (1)...(19): siRNA sense strand
gacgggucuuuaaacaauu

SEQ ID NO: 1418584 - RNA, 19 nt, Homo sapiens
  misc_RNA (1)...(19): siRNA sense strand
gguugacacuggcccugaa

SEQ ID NO: 1418585 - RNA, 19 nt, Homo sapiens
  misc_RNA (1)...(19): siRNA sense strand
aagcacauauaacuuugga

SEQ ID NO: 1418586 - RNA, 19 nt, Homo sapiens
  misc_RNA (1)...(19): siRNA sense strand
caagguagcaguuuuacaa

SEQ ID NO: 1418587 - RNA, 19 nt, Homo sapiens
  misc_RNA (1)...(19): siRNA sense strand
gauaacggacaggaccuaa

SEQ ID NO: 1418588 - RNA, 19 nt, Homo sapiens
  misc_RNA (1)...(19): siRNA sense strand
gaagaagaacaaggagcaa

SEQ ID NO: 1418589 - RNA, 19 nt, Homo sapiens
  misc_RNA (1)...(19): siRNA sense strand
aacagaccauacccacaua

SEQ ID NO: 1418590 - RNA, 19 nt, Homo sapiens
  misc_RNA (1)...(19): siRNA sense strand
gcaaccagugcuaacuuau

SEQ ID NO: 1418591 - RNA, 19 nt, Homo sapiens
  misc_RNA (1)...(19): siRNA sense strand
ccacagauuuacccuucca

SEQ ID NO: 1418592 - RNA, 19 nt, Homo sapiens
  misc_RNA (1)...(19): siRNA sense strand
ggucaguacgcacaguauu

SEQ ID NO: 1418593 - RNA, 19 nt, Homo sapiens
  misc_RNA (1)...(19): siRNA sense strand
aggagaugguguagaagaa

SEQ ID NO: 1418594 - RNA, 19 nt, Homo sapiens
  misc_RNA (1)...(19): siRNA sense strand
uggguuaggaauuguauuu

SEQ ID NO: 1418595 - RNA, 19 nt, Homo sapiens
  misc_RNA (1)...(19): siRNA sense strand
ggacuggaugagaaaguug

SEQ ID NO: 1418596 - RNA, 19 nt, Homo sapiens
  misc_RNA (1)...(19): siRNA sense strand
acauauaacuuuggaacag

SEQ ID NO: 1418597 - RNA, 19 nt, Homo sapiens
  misc_RNA (1)...(19): siRNA sense strand
ugaccaaguccauauagau

SEQ ID NO: 1418598 - RNA, 19 nt, Homo sapiens
  misc_RNA (1)...(19): siRNA sense strand
cauccaccaaugccacuua

SEQ ID NO: 1418599 - RNA, 19 nt, Homo sapiens
  misc_RNA (1)...(19): siRNA sense strand
cauaugggcaaacacaguu

SEQ ID NO: 1418600 - RNA, 19 nt, Homo sapiens
  misc_RNA (1)...(19): siRNA sense strand
auucugaucuugagagagu

SEQ ID NO: 1418601 - RNA, 19 nt, Homo sapiens
  misc_RNA (1)...(19): siRNA sense strand
gcauaugggcaaacacagu

SEQ ID NO: 1418602 - RNA, 19 nt, Homo sapiens
  misc_RNA (1)...(19): siRNA sense strand
gaugcaagguagcaguuuu

SEQ ID NO: 1418603 - RNA, 19 nt, Homo sapiens
  misc_RNA (1)...(19): siRNA sense strand
ggaaauaauucacucacaa

SEQ ID NO: 1418604 - RNA, 19 nt, Homo sapiens
  misc_RNA (1)...(19): siRNA sense strand
gcaacaagcuacagccuau

SEQ ID NO: 1418605 - RNA, 19 nt, Homo sapiens
  misc_RNA (1)...(19): siRNA sense strand
uauaggagaugguguagaa

SEQ ID NO: 1418606 - RNA, 19 nt, Homo sapiens
  misc_RNA (1)...(19): siRNA sense strand
gaagguggauugucacagu

SEQ ID NO: 1418607 - RNA, 19 nt, Homo sapiens
  misc_RNA (1)...(19): siRNA sense strand
caacacccauuaaagauuc

SEQ ID NO: 1418608 - RNA, 19 nt, Homo sapiens
  misc_RNA (1)...(19): siRNA sense strand
gaagaaaagugguguaugu

SEQ ID NO: 1418609 - RNA, 19 nt, Homo sapiens
  misc_RNA (1)...(19): siRNA sense strand
ggacaaacugugugaauau

SEQ ID NO: 1418610 - RNA, 19 nt, Homo sapiens
  misc_RNA (1)...(19): siRNA sense strand
cgacgggucuuuaaacaau

SEQ ID NO: 1418611 - RNA, 19 nt, Homo sapiens
  misc_RNA (1)...(19): siRNA sense strand
ccaaugagcagcagugaaa

SEQ ID NO: 1418612 - RNA, 19 nt, Homo sapiens
  misc_RNA (1)...(19): siRNA sense strand
gacaggaccuaagcacaua

SEQ ID NO: 1418613 - RNA, 19 nt, Homo sapiens
  misc_RNA (1)...(19): siRNA sense strand
ggacagacaggauuucuca

SEQ ID NO: 1418614 - RNA, 19 nt, Homo sapiens
  misc_RNA (1)...(19): siRNA sense strand
aaagaaagcuguuuugaga

SEQ ID NO: 1418615 - RNA, 19 nt, Homo sapiens
  misc_RNA (1)...(19): siRNA sense strand
ccauauagaugauguuucu

SEQ ID NO: 1418616 - RNA, 19 nt, Homo sapiens
  misc_RNA (1)...(19): siRNA sense strand
caucaacacccauuaaaga

SEQ ID NO: 1418617 - RNA, 19 nt, Homo sapiens
  misc_RNA (1)...(19): siRNA sense strand
gacaaacugugugaauauu

SEQ ID NO: 1418618 - RNA, 19 nt, Homo sapiens
  misc_RNA (1)...(19): siRNA sense strand
uagaugauguuucuucaga

SEQ ID NO: 1418619 - RNA, 19 nt, Homo sapiens
  misc_RNA (1)...(19): siRNA sense strand
ggacuuggaugagacaauc

SEQ ID NO: 1418620 - RNA, 19 nt, Homo sapiens
  misc_RNA (1)...(19): siRNA sense strand
gcaauugggagcaguaguu

SEQ ID NO: 1418621 - RNA, 19 nt, Homo sapiens
  misc_RNA (1)...(19): siRNA sense strand
gaugauguuucuucagaug

SEQ ID NO: 1418622 - RNA, 19 nt, Homo sapiens
  misc_RNA (1)...(19): siRNA sense strand
gauuuacccuuccaacaga

SEQ ID NO: 1418623 - RNA, 19 nt, Homo sapiens
  misc_RNA (1)...(19): siRNA sense strand
guacggcauuuccucauau

SEQ ID NO: 1418624 - RNA, 19 nt, Homo sapiens
  misc_RNA (1)...(19): siRNA sense strand
ggaacuggaguaccuguaa

SEQ ID NO: 1418625 - RNA, 19 nt, Homo sapiens
  misc_RNA (1)...(19): siRNA sense strand
cgaaaguccugcuguaugg

SEQ ID NO: 1418626 - RNA, 19 nt, Homo sapiens
  misc_RNA (1)...(19): siRNA sense strand
uauaacagcucaccguauc

SEQ ID NO: 1418627 - RNA, 19 nt, Homo sapiens
  misc_RNA (1)...(19): siRNA sense strand
cggacaaacugugugaaua

SEQ ID NO: 1418628 - RNA, 19 nt, Homo sapiens
  misc_RNA (1)...(19): siRNA sense strand
gagaugguguagaagaaga

SEQ ID NO: 1418629 - RNA, 19 nt, Homo sapiens
  misc_RNA (1)...(19): siRNA sense strand
gguguggacuggaugagaa

SEQ ID NO: 1418630 - RNA, 19 nt, Homo sapiens
  misc_RNA (1)...(19): siRNA sense strand
gacaggauuucucagcuau

SEQ ID NO: 1418631 - RNA, 19 nt, Homo sapiens
  misc_RNA (1)...(19): siRNA sense strand
aaagugguguauguuguua

SEQ ID NO: 1418632 - RNA, 19 nt, Homo sapiens
  misc_RNA (1)...(19): siRNA sense strand
caccguauccagcacauua

SEQ ID NO: 1418633 - RNA, 19 nt, Homo sapiens
  misc_RNA (1)...(19): siRNA sense strand
gacugaagguggauuguca

SEQ ID NO: 1418634 - RNA, 19 nt, Homo sapiens
  misc_RNA (1)...(19): siRNA sense strand
ccuaagcacauauaacuuu

SEQ ID NO: 1418635 - RNA, 19 nt, Homo sapiens
  misc_RNA (1)...(19): siRNA sense strand
ggacaggaccuaagcacau

SEQ ID NO: 1418636 - RNA, 19 nt, Homo sapiens
  misc_RNA (1)...(19): siRNA sense strand
ucaggaauauauacaggaa

SEQ ID NO: 1418637 - RNA, 19 nt, Homo sapiens
  misc_RNA (1)...(19): siRNA sense strand
ccacuuaccagcuucaaga

SEQ ID NO: 1418638 - RNA, 19 nt, Homo sapiens
  misc_RNA (1)...(19): siRNA sense strand
gaaaagugguguauguugu

SEQ ID NO: 1418639 - RNA, 19 nt, Homo sapiens
  misc_RNA (1)...(19): siRNA sense strand
agacaggauuucucagcua

SEQ ID NO: 1418640 - RNA, 19 nt, Homo sapiens
  misc_RNA (1)...(19): siRNA sense strand
caacagaccauacccacau

SEQ ID NO: 1418641 - RNA, 19 nt, Homo sapiens
  misc_RNA (1)...(19): siRNA sense strand
gguccuacgccaacagaua

SEQ ID NO: 1418642 - RNA, 19 nt, Homo sapiens
  misc_RNA (1)...(19): siRNA sense strand
uacaacaucaucaggaaua

SEQ ID NO: 1418643 - RNA, 19 nt, Homo sapiens
  misc_RNA (1)...(19): siRNA sense strand
gaccuaagcacauauaacu

SEQ ID NO: 1418644 - RNA, 19 nt, Homo sapiens
  misc_RNA (1)...(19): siRNA sense strand
gucaguacgcacaguauua

SEQ ID NO: 1418645 - RNA, 19 nt, Homo sapiens
  misc_RNA (1)...(19): siRNA sense strand
cguacggcauuuccucaua

SEQ ID NO: 1418646 - RNA, 19 nt, Homo sapiens
  misc_RNA (1)...(19): siRNA sense strand
gcaguugagggccgaaauu

SEQ ID NO: 1418647 - RNA, 19 nt, Homo sapiens
  misc_RNA (1)...(19): siRNA sense strand
gaucuacaacaccuacaaa

SEQ ID NO: 1418648 - RNA, 19 nt, Homo sapiens
  misc_RNA (1)...(19): siRNA sense strand
gcaggacuauccgucuuau

SEQ ID NO: 1418649 - RNA, 19 nt, Homo sapiens
  misc_RNA (1)...(19): siRNA sense strand
ucacaaauuccucuggauu

SEQ ID NO: 1418650 - RNA, 19 nt, Homo sapiens
  misc_RNA (1)...(19): siRNA sense strand
caacaucaucaggaauaua

SEQ ID NO: 1418651 - RNA, 19 nt, Homo sapiens
  misc_RNA (1)...(19): siRNA sense strand
gaccaaguccauauagaug

SEQ ID NO: 1418652 - RNA, 19 nt, Homo sapiens
  misc_RNA (1)...(19): siRNA sense strand
aaagcacucucgcucauuc

SEQ ID NO: 1418653 - RNA, 19 nt, Homo sapiens
  misc_RNA (1)...(19): siRNA sense strand
ugaaagcacucucgcucau

SEQ ID NO: 1418654 - RNA, 19 nt, Homo sapiens
  misc_RNA (1)...(19): siRNA sense strand
cuaagcacauauaacuuug

SEQ ID NO: 1418655 - RNA, 19 nt, Homo sapiens
  misc_RNA (1)...(19): siRNA sense strand
gauguuucuucagaugaua

SEQ ID NO: 1418656 - RNA, 19 nt, Homo sapiens
  misc_RNA (1)...(19): siRNA sense strand
gaaugugaccaaguccaua

SEQ ID NO: 1418657 - RNA, 19 nt, Homo sapiens
  misc_RNA (1)...(19): siRNA sense strand
gcgaaaguccugcuguaug

SEQ ID NO: 1418658 - RNA, 19 nt, Homo sapiens
  misc_RNA (1)...(19): siRNA sense strand
gaaagcacucucgcucauu

SEQ ID NO: 1418659 - RNA, 19 nt, Homo sapiens
  misc_RNA (1)...(19): siRNA sense strand
guugagggccgaaauugaa

SEQ ID NO: 1418660 - RNA, 19 nt, Homo sapiens
  misc_RNA (1)...(19): siRNA sense strand
uaacuuauguuuggcaacu

SEQ ID NO: 1418661 - RNA, 19 nt, Homo sapiens
  misc_RNA (1)...(19): siRNA sense strand
cauauaacuuuggaacaga

SEQ ID NO: 1418662 - RNA, 19 nt, Homo sapiens
  misc_RNA (1)...(19): siRNA sense strand
uggcgaaaguccugcugua

SEQ ID NO: 1418663 - RNA, 19 nt, Homo sapiens
  misc_RNA (1)...(19): siRNA sense strand
agugguguauguuguuaua

SEQ ID NO: 1418664 - RNA, 19 nt, Homo sapiens
  misc_RNA (1)...(19): siRNA sense strand
gaccauacccacauauucu

SEQ ID NO: 1418665 - RNA, 19 nt, Homo sapiens
  misc_RNA (1)...(19): siRNA sense strand
uuucucagguucagcaauu

SEQ ID NO: 1418666 - RNA, 19 nt, Homo sapiens
  misc_RNA (1)...(19): siRNA sense strand
ccaaguccauauagaugau

SEQ ID NO: 1418667 - RNA, 19 nt, Homo sapiens
  misc_RNA (1)...(19): siRNA sense strand
cgaagaaacaauaauccuu

SEQ ID NO: 1418668 - RNA, 19 nt, Homo sapiens
  misc_RNA (1)...(19): siRNA sense strand
ucagucaccuggacagaca

SEQ ID NO: 1418669 - RNA, 19 nt, Homo sapiens
  misc_RNA (1)...(19): siRNA sense strand
caaugccacuuaccagcuu

SEQ ID NO: 1418670 - RNA, 19 nt, Homo sapiens
  misc_RNA (1)...(19): siRNA sense strand
gguguauguuguuauagga

SEQ ID NO: 1418671 - RNA, 19 nt, Homo sapiens
  misc_RNA (1)...(19): siRNA sense strand
ccagugcuaacuuauguuu

SEQ ID NO: 1418672 - RNA, 19 nt, Homo sapiens
  misc_RNA (1)...(19): siRNA sense strand
uaaaagagaucuacaacac

SEQ ID NO: 1418673 - RNA, 19 nt, Homo sapiens
  misc_RNA (1)...(19): siRNA sense strand
cagcaggacuauccgucuu

SEQ ID NO: 1418674 - RNA, 19 nt, Homo sapiens
  misc_RNA (1)...(19): siRNA sense strand
aaccagugcuaacuuaugu

SEQ ID NO: 1418675 - RNA, 19 nt, Homo sapiens
  misc_RNA (1)...(19): siRNA sense strand
caacgacaccauccaccaa

SEQ ID NO: 1418676 - RNA, 19 nt, Homo sapiens
  misc_RNA (1)...(19): siRNA sense strand
caaccagugcuaacuuaug

SEQ ID NO: 1418677 - RNA, 19 nt, Homo sapiens
  misc_RNA (1)...(19): siRNA sense strand
gccgacgggucuuuaaaca

SEQ ID NO: 1418678 - RNA, 19 nt, Homo sapiens
  misc_RNA (1)...(19): siRNA sense strand
ucaacacccauuaaagauu

SEQ ID NO: 1418679 - RNA, 19 nt, Homo sapiens
  misc_RNA (1)...(19): siRNA sense strand
ccucuggauuuaauaguuc

SEQ ID NO: 1418680 - RNA, 19 nt, Homo sapiens
  misc_RNA (1)...(19): siRNA sense strand
gugaccaaguccauauaga

SEQ ID NO: 1418681 - RNA, 19 nt, Homo sapiens
  misc_RNA (1)...(19): siRNA sense strand
gcccaucaacacccauuaa

SEQ ID NO: 1418682 - RNA, 19 nt, Homo sapiens
  misc_RNA (1)...(19): siRNA sense strand
gacgggucuuuaaacaauu

SEQ ID NO: 1418683 - RNA, 19 nt, Homo sapiens
  misc_RNA (1)...(19): siRNA sense strand
gguugacacuggcccugaa

SEQ ID NO: 1418684 - RNA, 19 nt, Homo sapiens
  misc_RNA (1)...(19): siRNA sense strand
aagcacauauaacuuugga

SEQ ID NO: 1418685 - RNA, 19 nt, Homo sapiens
  misc_RNA (1)...(19): siRNA sense strand
caagguagcaguuuuacaa

SEQ ID NO: 1418686 - RNA, 19 nt, Homo sapiens
  misc_RNA (1)...(19): siRNA sense strand
gacaggcaccauacagcua

SEQ ID NO: 1418687 - RNA, 19 nt, Homo sapiens
  misc_RNA (1)...(19): siRNA sense strand
aacagaccauacccacaua

SEQ ID NO: 1418688 - RNA, 19 nt, Homo sapiens
  misc_RNA (1)...(19): siRNA sense strand
gaagaagaacaaggagcaa

SEQ ID NO: 1418689 - RNA, 19 nt, Homo sapiens
  misc_RNA (1)...(19): siRNA sense strand
ccacagauuuacccuucca

SEQ ID NO: 1418690 - RNA, 19 nt, Homo sapiens
  misc_RNA (1)...(19): siRNA sense strand
gcaaccagugcuaacuuau

SEQ ID NO: 1418691 - RNA, 19 nt, Homo sapiens
  misc_RNA (1)...(19): siRNA sense strand
gauaacggacaggaccuaa

SEQ ID NO: 1418692 - RNA, 19 nt, Homo sapiens
  misc_RNA (1)...(19): siRNA sense strand
ggucaguacgcacaguauu

SEQ ID NO: 1418693 - RNA, 19 nt, Homo sapiens
  misc_RNA (1)...(19): siRNA sense strand
aggagaugguguagaagaa

SEQ ID NO: 1418694 - RNA, 19 nt, Homo sapiens
  misc_RNA (1)...(19): siRNA sense strand
uggguuaggaauuguauuu

SEQ ID NO: 1418695 - RNA, 19 nt, Homo sapiens
  misc_RNA (1)...(19): siRNA sense strand
ggacuggaugagaaaguug

SEQ ID NO: 1418696 - RNA, 19 nt, Homo sapiens
  misc_RNA (1)...(19): siRNA sense strand
acauauaacuuuggaacag

SEQ ID NO: 1418697 - RNA, 19 nt, Homo sapiens
  misc_RNA (1)...(19): siRNA sense strand
ugaccaaguccauauagau

SEQ ID NO: 1418698 - RNA, 19 nt, Homo sapiens
  misc_RNA (1)...(19): siRNA sense strand
cauccaccaaugccacuua

SEQ ID NO: 1418699 - RNA, 19 nt, Homo sapiens
  misc_RNA (1)...(19): siRNA sense strand
gaugcaagguagcaguuuu

SEQ ID NO: 1418700 - RNA, 19 nt, Homo sapiens
  misc_RNA (1)...(19): siRNA sense strand
gcauaugggcaaacacagu

SEQ ID NO: 1418701 - RNA, 19 nt, Homo sapiens
  misc_RNA (1)...(19): siRNA sense strand
cauaugggcaaacacaguu

SEQ ID NO: 1418702 - RNA, 19 nt, Homo sapiens
  misc_RNA (1)...(19): siRNA sense strand
auucugaucuugagagagu

SEQ ID NO: 1418703 - RNA, 19 nt, Homo sapiens
  misc_RNA (1)...(19): siRNA sense strand
ggaaauaauucacucacaa

SEQ ID NO: 1418704 - RNA, 19 nt, Homo sapiens
  misc_RNA (1)...(19): siRNA sense strand
gcaacaagcuacagccuau

SEQ ID NO: 1418705 - RNA, 19 nt, Homo sapiens
  misc_RNA (1)...(19): siRNA sense strand
uauaggagaugguguagaa

SEQ ID NO: 1418706 - RNA, 19 nt, Homo sapiens
  misc_RNA (1)...(19): siRNA sense strand
gaagguggauugucacagu

SEQ ID NO: 1418707 - RNA, 19 nt, Homo sapiens
  misc_RNA (1)...(19): siRNA sense strand
caacacccauuaaagauuc

SEQ ID NO: 1418708 - RNA, 19 nt, Homo sapiens
  misc_RNA (1)...(19): siRNA sense strand
gaagaaaagugguguaugu

SEQ ID NO: 1418709 - RNA, 19 nt, Homo sapiens
  misc_RNA (1)...(19): siRNA sense strand
ggacaaacugugugaauau

SEQ ID NO: 1418710 - RNA, 19 nt, Homo sapiens
  misc_RNA (1)...(19): siRNA sense strand
cgacgggucuuuaaacaau

SEQ ID NO: 1418711 - RNA, 19 nt, Homo sapiens
  misc_RNA (1)...(19): siRNA sense strand
gacaggaccuaagcacaua

SEQ ID NO: 1418712 - RNA, 19 nt, Homo sapiens
  misc_RNA (1)...(19): siRNA sense strand
ccaaugagcagcagugaaa

SEQ ID NO: 1418713 - RNA, 19 nt, Homo sapiens
  misc_RNA (1)...(19): siRNA sense strand
ggacagacaggauuucuca

SEQ ID NO: 1418714 - RNA, 19 nt, Homo sapiens
  misc_RNA (1)...(19): siRNA sense strand
aaagaaagcuguuuugaga

SEQ ID NO: 1418715 - RNA, 19 nt, Homo sapiens
  misc_RNA (1)...(19): siRNA sense strand
ccauauagaugauguuucu

SEQ ID NO: 1418716 - RNA, 19 nt, Homo sapiens
  misc_RNA (1)...(19): siRNA sense strand
caucaacacccauuaaaga

SEQ ID NO: 1418717 - RNA, 19 nt, Homo sapiens
  misc_RNA (1)...(19): siRNA sense strand
gacaaacugugugaauauu

SEQ ID NO: 1418718 - RNA, 19 nt, Homo sapiens
  misc_RNA (1)...(19): siRNA sense strand
uagaugauguuucuucaga

SEQ ID NO: 1418719 - RNA, 19 nt, Homo sapiens
  misc_RNA (1)...(19): siRNA sense strand
ggacuuggaugagacaauc

SEQ ID NO: 1418720 - RNA, 19 nt, Homo sapiens
  misc_RNA (1)...(19): siRNA sense strand
gcaauugggagcaguaguu

SEQ ID NO: 1418721 - RNA, 19 nt, Homo sapiens
  misc_RNA (1)...(19): siRNA sense strand
gaugauguuucuucagaug

SEQ ID NO: 1418722 - RNA, 19 nt, Homo sapiens
  misc_RNA (1)...(19): siRNA sense strand
gauuuacccuuccaacaga

SEQ ID NO: 1418723 - RNA, 19 nt, Homo sapiens
  misc_RNA (1)...(19): siRNA sense strand
guacggcauuuccucauau

SEQ ID NO: 1418724 - RNA, 19 nt, Homo sapiens
  misc_RNA (1)...(19): siRNA sense strand
ggaacuggaguaccuguaa

SEQ ID NO: 1418725 - RNA, 19 nt, Homo sapiens
  misc_RNA (1)...(19): siRNA sense strand
cgaaaguccugcuguaugg

SEQ ID NO: 1418726 - RNA, 19 nt, Homo sapiens
  misc_RNA (1)...(19): siRNA sense strand
uauaacagcucaccguauc

SEQ ID NO: 1418727 - RNA, 19 nt, Homo sapiens
  misc_RNA (1)...(19): siRNA sense strand
cggacaaacugugugaaua

SEQ ID NO: 1418728 - RNA, 19 nt, Homo sapiens
  misc_RNA (1)...(19): siRNA sense strand
gagaugguguagaagaaga

SEQ ID NO: 1418729 - RNA, 19 nt, Homo sapiens
  misc_RNA (1)...(19): siRNA sense strand
gguguggacuggaugagaa

SEQ ID NO: 1418730 - RNA, 19 nt, Homo sapiens
  misc_RNA (1)...(19): siRNA sense strand
gacaggauuucucagcuau

SEQ ID NO: 1418731 - RNA, 19 nt, Homo sapiens
  misc_RNA (1)...(19): siRNA sense strand
aaagugguguauguuguua

SEQ ID NO: 1418732 - RNA, 19 nt, Homo sapiens
  misc_RNA (1)...(19): siRNA sense strand
caccguauccagcacauua

SEQ ID NO: 1418733 - RNA, 19 nt, Homo sapiens
  misc_RNA (1)...(19): siRNA sense strand
gacugaagguggauuguca

SEQ ID NO: 1418734 - RNA, 19 nt, Homo sapiens
  misc_RNA (1)...(19): siRNA sense strand
ccuaagcacauauaacuuu

SEQ ID NO: 1418735 - RNA, 19 nt, Homo sapiens
  misc_RNA (1)...(19): siRNA sense strand
ggacaggaccuaagcacau

SEQ ID NO: 1418736 - RNA, 19 nt, Homo sapiens
  misc_RNA (1)...(19): siRNA sense strand
ucaggaauauauacaggaa

SEQ ID NO: 1418737 - RNA, 19 nt, Homo sapiens
  misc_RNA (1)...(19): siRNA sense strand
ccacuuaccagcuucaaga

SEQ ID NO: 1418738 - RNA, 19 nt, Homo sapiens
  misc_RNA (1)...(19): siRNA sense strand
gaaaagugguguauguugu

SEQ ID NO: 1418739 - RNA, 19 nt, Homo sapiens
  misc_RNA (1)...(19): siRNA sense strand
agacaggauuucucagcua

SEQ ID NO: 1418740 - RNA, 19 nt, Homo sapiens
  misc_RNA (1)...(19): siRNA sense strand
caacagaccauacccacau

SEQ ID NO: 1418741 - RNA, 19 nt, Homo sapiens
  misc_RNA (1)...(19): siRNA sense strand
gguccuacgccaacagaua

SEQ ID NO: 1418742 - RNA, 19 nt, Homo sapiens
  misc_RNA (1)...(19): siRNA sense strand
uacaacaucaucaggaaua

SEQ ID NO: 1418743 - RNA, 19 nt, Homo sapiens
  misc_RNA (1)...(19): siRNA sense strand
gaccuaagcacauauaacu

SEQ ID NO: 1418744 - RNA, 19 nt, Homo sapiens
  misc_RNA (1)...(19): siRNA sense strand
gucaguacgcacaguauua

SEQ ID NO: 1418745 - RNA, 19 nt, Homo sapiens
  misc_RNA (1)...(19): siRNA sense strand
cguacggcauuuccucaua

SEQ ID NO: 1418746 - RNA, 19 nt, Homo sapiens
  misc_RNA (1)...(19): siRNA sense strand
gcaguugagggccgaaauu

SEQ ID NO: 1418747 - RNA, 19 nt, Homo sapiens
  misc_RNA (1)...(19): siRNA sense strand
gaucuacaacaccuacaaa

SEQ ID NO: 1418748 - RNA, 19 nt, Homo sapiens
  misc_RNA (1)...(19): siRNA sense strand
gcaggacuauccgucuuau

SEQ ID NO: 1418749 - RNA, 19 nt, Homo sapiens
  misc_RNA (1)...(19): siRNA sense strand
ucacaaauuccucuggauu

SEQ ID NO: 1418750 - RNA, 19 nt, Homo sapiens
  misc_RNA (1)...(19): siRNA sense strand
caacaucaucaggaauaua

SEQ ID NO: 1418751 - RNA, 19 nt, Homo sapiens
  misc_RNA (1)...(19): siRNA sense strand
gaccaaguccauauagaug

SEQ ID NO: 1418752 - RNA, 19 nt, Homo sapiens
  misc_RNA (1)...(19): siRNA sense strand
aaagcacucucgcucauuc

SEQ ID NO: 1418753 - RNA, 19 nt, Homo sapiens
  misc_RNA (1)...(19): siRNA sense strand
ugaaagcacucucgcucau

SEQ ID NO: 1418754 - RNA, 19 nt, Homo sapiens
  misc_RNA (1)...(19): siRNA sense strand
cuaagcacauauaacuuug

SEQ ID NO: 1418755 - RNA, 19 nt, Homo sapiens
  misc_RNA (1)...(19): siRNA sense strand
gauguuucuucagaugaua

SEQ ID NO: 1418756 - RNA, 19 nt, Homo sapiens
  misc_RNA (1)...(19): siRNA sense strand
gaaugugaccaaguccaua

SEQ ID NO: 1418757 - RNA, 19 nt, Homo sapiens
  misc_RNA (1)...(19): siRNA sense strand
gcgaaaguccugcuguaug

SEQ ID NO: 1418758 - RNA, 19 nt, Homo sapiens
  misc_RNA (1)...(19): siRNA sense strand
gaaagcacucucgcucauu

SEQ ID NO: 1418759 - RNA, 19 nt, Homo sapiens
  misc_RNA (1)...(19): siRNA sense strand
guugagggccgaaauugaa

SEQ ID NO: 1418760 - RNA, 19 nt, Homo sapiens
  misc_RNA (1)...(19): siRNA sense strand
uaacuuauguuuggcaacu

SEQ ID NO: 1418761 - RNA, 19 nt, Homo sapiens
  misc_RNA (1)...(19): siRNA sense strand
cauauaacuuuggaacaga

SEQ ID NO: 1418762 - RNA, 19 nt, Homo sapiens
  misc_RNA (1)...(19): siRNA sense strand
uggcgaaaguccugcugua

SEQ ID NO: 1418763 - RNA, 19 nt, Homo sapiens
  misc_RNA (1)...(19): siRNA sense strand
agugguguauguuguuaua

SEQ ID NO: 1418764 - RNA, 19 nt, Homo sapiens
  misc_RNA (1)...(19): siRNA sense strand
gaccauacccacauauucu

SEQ ID NO: 1418765 - RNA, 19 nt, Homo sapiens
  misc_RNA (1)...(19): siRNA sense strand
ccaaguccauauagaugau

SEQ ID NO: 1418766 - RNA, 19 nt, Homo sapiens
  misc_RNA (1)...(19): siRNA sense strand
cgaagaaacaauaauccuu

SEQ ID NO: 1418767 - RNA, 19 nt, Homo sapiens
  misc_RNA (1)...(19): siRNA sense strand
uuucucagguucagcaauu

SEQ ID NO: 1418768 - RNA, 19 nt, Homo sapiens
  misc_RNA (1)...(19): siRNA sense strand
ucagucaccuggacagaca

SEQ ID NO: 1418769 - RNA, 19 nt, Homo sapiens
  misc_RNA (1)...(19): siRNA sense strand
caaugccacuuaccagcuu

SEQ ID NO: 1418770 - RNA, 19 nt, Homo sapiens
  misc_RNA (1)...(19): siRNA sense strand
gguguauguuguuauagga

SEQ ID NO: 1418771 - RNA, 19 nt, Homo sapiens
  misc_RNA (1)...(19): siRNA sense strand
ccagugcuaacuuauguuu

SEQ ID NO: 1418772 - RNA, 19 nt, Homo sapiens
  misc_RNA (1)...(19): siRNA sense strand
uaaaagagaucuacaacac

SEQ ID NO: 1418773 - RNA, 19 nt, Homo sapiens
  misc_RNA (1)...(19): siRNA sense strand
cagcaggacuauccgucuu

SEQ ID NO: 1418774 - RNA, 19 nt, Homo sapiens
  misc_RNA (1)...(19): siRNA sense strand
aaccagugcuaacuuaugu

SEQ ID NO: 1418775 - RNA, 19 nt, Homo sapiens
  misc_RNA (1)...(19): siRNA sense strand
caacgacaccauccaccaa

SEQ ID NO: 1418776 - RNA, 19 nt, Homo sapiens
  misc_RNA (1)...(19): siRNA sense strand
caaccagugcuaacuuaug

SEQ ID NO: 1418777 - RNA, 19 nt, Homo sapiens
  misc_RNA (1)...(19): siRNA sense strand
ucaacacccauuaaagauu

SEQ ID NO: 1418778 - RNA, 19 nt, Homo sapiens
  misc_RNA (1)...(19): siRNA sense strand
gccgacgggucuuuaaaca

SEQ ID NO: 1418779 - RNA, 19 nt, Homo sapiens
  misc_RNA (1)...(19): siRNA sense strand
ccucuggauuuaauaguuc

SEQ ID NO: 1418780 - RNA, 19 nt, Homo sapiens
  misc_RNA (1)...(19): siRNA sense strand
gugaccaaguccauauaga

SEQ ID NO: 1418781 - RNA, 19 nt, Homo sapiens
  misc_RNA (1)...(19): siRNA sense strand
gcccaucaacacccauuaa

SEQ ID NO: 1418782 - RNA, 19 nt, Homo sapiens
  misc_RNA (1)...(19): siRNA sense strand
gacaggcaccauacagcua

SEQ ID NO: 1418783 - RNA, 19 nt, Homo sapiens
  misc_RNA (1)...(19): siRNA sense strand
gacgggucuuuaaacaauu

SEQ ID NO: 1418784 - RNA, 19 nt, Homo sapiens
  misc_RNA (1)...(19): siRNA sense strand
gguugacacuggcccugaa

SEQ ID NO: 1418785 - RNA, 19 nt, Homo sapiens
  misc_RNA (1)...(19): siRNA sense strand
aagcacauauaacuuugga

SEQ ID NO: 1418786 - RNA, 19 nt, Homo sapiens
  misc_RNA (1)...(19): siRNA sense strand
caagguagcaguuuuacaa

SEQ ID NO: 1418787 - RNA, 19 nt, Homo sapiens
  misc_RNA (1)...(19): siRNA sense strand
gauaacggacaggaccuaa

SEQ ID NO: 1418788 - RNA, 19 nt, Homo sapiens
  misc_RNA (1)...(19): siRNA sense strand
gaagaagaacaaggagcaa

SEQ ID NO: 1418789 - RNA, 19 nt, Homo sapiens
  misc_RNA (1)...(19): siRNA sense strand
aacagaccauacccacaua

SEQ ID NO: 1418790 - RNA, 19 nt, Homo sapiens
  misc_RNA (1)...(19): siRNA sense strand
gcaaccagugcuaacuuau

SEQ ID NO: 1418791 - RNA, 19 nt, Homo sapiens
  misc_RNA (1)...(19): siRNA sense strand
ccacagauuuacccuucca

SEQ ID NO: 1418792 - RNA, 19 nt, Homo sapiens
  misc_RNA (1)...(19): siRNA sense strand
ggucaguacgcacaguauu

SEQ ID NO: 1418793 - RNA, 19 nt, Homo sapiens
  misc_RNA (1)...(19): siRNA sense strand
aggagaugguguagaagaa

SEQ ID NO: 1418794 - RNA, 19 nt, Homo sapiens
  misc_RNA (1)...(19): siRNA sense strand
uggguuaggaauuguauuu

SEQ ID NO: 1418795 - RNA, 19 nt, Homo sapiens
  misc_RNA (1)...(19): siRNA sense strand
ggacuggaugagaaaguug

SEQ ID NO: 1418796 - RNA, 19 nt, Homo sapiens
  misc_RNA (1)...(19): siRNA sense strand
acauauaacuuuggaacag

SEQ ID NO: 1418797 - RNA, 19 nt, Homo sapiens
  misc_RNA (1)...(19): siRNA sense strand
ugaccaaguccauauagau

SEQ ID NO: 1418798 - RNA, 19 nt, Homo sapiens
  misc_RNA (1)...(19): siRNA sense strand
cauccaccaaugccacuua

SEQ ID NO: 1418799 - RNA, 19 nt, Homo sapiens
  misc_RNA (1)...(19): siRNA sense strand
cauaugggcaaacacaguu

SEQ ID NO: 1418800 - RNA, 19 nt, Homo sapiens
  misc_RNA (1)...(19): siRNA sense strand
auucugaucuugagagagu

SEQ ID NO: 1418801 - RNA, 19 nt, Homo sapiens
  misc_RNA (1)...(19): siRNA sense strand
gcauaugggcaaacacagu

SEQ ID NO: 1418802 - RNA, 19 nt, Homo sapiens
  misc_RNA (1)...(19): siRNA sense strand
gaugcaagguagcaguuuu

SEQ ID NO: 1418803 - RNA, 19 nt, Homo sapiens
  misc_RNA (1)...(19): siRNA sense strand
ggaaauaauucacucacaa

SEQ ID NO: 1418804 - RNA, 19 nt, Homo sapiens
  misc_RNA (1)...(19): siRNA sense strand
gcaacaagcuacagccuau

SEQ ID NO: 1418805 - RNA, 19 nt, Homo sapiens
  misc_RNA (1)...(19): siRNA sense strand
uauaggagaugguguagaa

SEQ ID NO: 1418806 - RNA, 19 nt, Homo sapiens
  misc_RNA (1)...(19): siRNA sense strand
gaagguggauugucacagu

SEQ ID NO: 1418807 - RNA, 19 nt, Homo sapiens
  misc_RNA (1)...(19): siRNA sense strand
caacacccauuaaagauuc

SEQ ID NO: 1418808 - RNA, 19 nt, Homo sapiens
  misc_RNA (1)...(19): siRNA sense strand
gaagaaaagugguguaugu

SEQ ID NO: 1418809 - RNA, 19 nt, Homo sapiens
  misc_RNA (1)...(19): siRNA sense strand
ggacaaacugugugaauau

SEQ ID NO: 1418810 - RNA, 19 nt, Homo sapiens
  misc_RNA (1)...(19): siRNA sense strand
cgacgggucuuuaaacaau

SEQ ID NO: 1418811 - RNA, 19 nt, Homo sapiens
  misc_RNA (1)...(19): siRNA sense strand
gacaggaccuaagcacaua

SEQ ID NO: 1418812 - RNA, 19 nt, Homo sapiens
  misc_RNA (1)...(19): siRNA sense strand
ccaaugagcagcagugaaa

SEQ ID NO: 1418813 - RNA, 19 nt, Homo sapiens
  misc_RNA (1)...(19): siRNA sense strand
ggacagacaggauuucuca

SEQ ID NO: 1418814 - RNA, 19 nt, Homo sapiens
  misc_RNA (1)...(19): siRNA sense strand
aaagaaagcuguuuugaga

SEQ ID NO: 1418815 - RNA, 19 nt, Homo sapiens
  misc_RNA (1)...(19): siRNA sense strand
ccauauagaugauguuucu

SEQ ID NO: 1418816 - RNA, 19 nt, Homo sapiens
  misc_RNA (1)...(19): siRNA sense strand
caucaacacccauuaaaga

SEQ ID NO: 1418817 - RNA, 19 nt, Homo sapiens
  misc_RNA (1)...(19): siRNA sense strand
gacaaacugugugaauauu

SEQ ID NO: 1418818 - RNA, 19 nt, Homo sapiens
  misc_RNA (1)...(19): siRNA sense strand
uagaugauguuucuucaga

SEQ ID NO: 1418819 - RNA, 19 nt, Homo sapiens
  misc_RNA (1)...(19): siRNA sense strand
ggacuuggaugagacaauc

SEQ ID NO: 1418820 - RNA, 19 nt, Homo sapiens
  misc_RNA (1)...(19): siRNA sense strand
gcaauugggagcaguaguu

SEQ ID NO: 1418821 - RNA, 19 nt, Homo sapiens
  misc_RNA (1)...(19): siRNA sense strand
gaugauguuucuucagaug

SEQ ID NO: 1418822 - RNA, 19 nt, Homo sapiens
  misc_RNA (1)...(19): siRNA sense strand
gauuuacccuuccaacaga

SEQ ID NO: 1418823 - RNA, 19 nt, Homo sapiens
  misc_RNA (1)...(19): siRNA sense strand
guacggcauuuccucauau

SEQ ID NO: 1418824 - RNA, 19 nt, Homo sapiens
  misc_RNA (1)...(19): siRNA sense strand
ggaacuggaguaccuguaa

SEQ ID NO: 1418825 - RNA, 19 nt, Homo sapiens
  misc_RNA (1)...(19): siRNA sense strand
cgaaaguccugcuguaugg

SEQ ID NO: 1418826 - RNA, 19 nt, Homo sapiens
  misc_RNA (1)...(19): siRNA sense strand
uauaacagcucaccguauc

SEQ ID NO: 1418827 - RNA, 19 nt, Homo sapiens
  misc_RNA (1)...(19): siRNA sense strand
cggacaaacugugugaaua

SEQ ID NO: 1418828 - RNA, 19 nt, Homo sapiens
  misc_RNA (1)...(19): siRNA sense strand
gagaugguguagaagaaga

SEQ ID NO: 1418829 - RNA, 19 nt, Homo sapiens
  misc_RNA (1)...(19): siRNA sense strand
gguguggacuggaugagaa

SEQ ID NO: 1418830 - RNA, 19 nt, Homo sapiens
  misc_RNA (1)...(19): siRNA sense strand
gacaggauuucucagcuau

SEQ ID NO: 1418831 - RNA, 19 nt, Homo sapiens
  misc_RNA (1)...(19): siRNA sense strand
aaagugguguauguuguua

SEQ ID NO: 1418832 - RNA, 19 nt, Homo sapiens
  misc_RNA (1)...(19): siRNA sense strand
caccguauccagcacauua

SEQ ID NO: 1418833 - RNA, 19 nt, Homo sapiens
  misc_RNA (1)...(19): siRNA sense strand
gacugaagguggauuguca

SEQ ID NO: 1418834 - RNA, 19 nt, Homo sapiens
  misc_RNA (1)...(19): siRNA sense strand
ccuaagcacauauaacuuu

SEQ ID NO: 1418835 - RNA, 19 nt, Homo sapiens
  misc_RNA (1)...(19): siRNA sense strand
ggacaggaccuaagcacau

SEQ ID NO: 1418836 - RNA, 19 nt, Homo sapiens
  misc_RNA (1)...(19): siRNA sense strand
ucaggaauauauacaggaa

SEQ ID NO: 1418837 - RNA, 19 nt, Homo sapiens
  misc_RNA (1)...(19): siRNA sense strand
ccacuuaccagcuucaaga

SEQ ID NO: 1418838 - RNA, 19 nt, Homo sapiens
  misc_RNA (1)...(19): siRNA sense strand
gaaaagugguguauguugu

SEQ ID NO: 1418839 - RNA, 19 nt, Homo sapiens
  misc_RNA (1)...(19): siRNA sense strand
agacaggauuucucagcua

SEQ ID NO: 1418840 - RNA, 19 nt, Homo sapiens
  misc_RNA (1)...(19): siRNA sense strand
caacagaccauacccacau

SEQ ID NO: 1418841 - RNA, 19 nt, Homo sapiens
  misc_RNA (1)...(19): siRNA sense strand
gguccuacgccaacagaua

SEQ ID NO: 1418842 - RNA, 19 nt, Homo sapiens
  misc_RNA (1)...(19): siRNA sense strand
uacaacaucaucaggaaua

SEQ ID NO: 1418843 - RNA, 19 nt, Homo sapiens
  misc_RNA (1)...(19): siRNA sense strand
gaccuaagcacauauaacu

SEQ ID NO: 1418844 - RNA, 19 nt, Homo sapiens
  misc_RNA (1)...(19): siRNA sense strand
gucaguacgcacaguauua

SEQ ID NO: 1418845 - RNA, 19 nt, Homo sapiens
  misc_RNA (1)...(19): siRNA sense strand
cguacggcauuuccucaua

SEQ ID NO: 1418846 - RNA, 19 nt, Homo sapiens
  misc_RNA (1)...(19): siRNA sense strand
gcaguugagggccgaaauu

SEQ ID NO: 1418847 - RNA, 19 nt, Homo sapiens
  misc_RNA (1)...(19): siRNA sense strand
gaucuacaacaccuacaaa

SEQ ID NO: 1418848 - RNA, 19 nt, Homo sapiens
  misc_RNA (1)...(19): siRNA sense strand
gcaggacuauccgucuuau

SEQ ID NO: 1418849 - RNA, 19 nt, Homo sapiens
  misc_RNA (1)...(19): siRNA sense strand
ucacaaauuccucuggauu

SEQ ID NO: 1418850 - RNA, 19 nt, Homo sapiens
  misc_RNA (1)...(19): siRNA sense strand
caacaucaucaggaauaua

SEQ ID NO: 1418851 - RNA, 19 nt, Homo sapiens
  misc_RNA (1)...(19): siRNA sense strand
gaccaaguccauauagaug

SEQ ID NO: 1418852 - RNA, 19 nt, Homo sapiens
  misc_RNA (1)...(19): siRNA sense strand
aaagcacucucgcucauuc

SEQ ID NO: 1418853 - RNA, 19 nt, Homo sapiens
  misc_RNA (1)...(19): siRNA sense strand
ugaaagcacucucgcucau

SEQ ID NO: 1418854 - RNA, 19 nt, Homo sapiens
  misc_RNA (1)...(19): siRNA sense strand
cuaagcacauauaacuuug

SEQ ID NO: 1418855 - RNA, 19 nt, Homo sapiens
  misc_RNA (1)...(19): siRNA sense strand
gauguuucuucagaugaua

SEQ ID NO: 1418856 - RNA, 19 nt, Homo sapiens
  misc_RNA (1)...(19): siRNA sense strand
gaaugugaccaaguccaua

SEQ ID NO: 1418857 - RNA, 19 nt, Homo sapiens
  misc_RNA (1)...(19): siRNA sense strand
gcgaaaguccugcuguaug

SEQ ID NO: 1418858 - RNA, 19 nt, Homo sapiens
  misc_RNA (1)...(19): siRNA sense strand
gaaagcacucucgcucauu

SEQ ID NO: 1418859 - RNA, 19 nt, Homo sapiens
  misc_RNA (1)...(19): siRNA sense strand
guugagggccgaaauugaa

SEQ ID NO: 1418860 - RNA, 19 nt, Homo sapiens
  misc_RNA (1)...(19): siRNA sense strand
uaacuuauguuuggcaacu

SEQ ID NO: 1418861 - RNA, 19 nt, Homo sapiens
  misc_RNA (1)...(19): siRNA sense strand
cauauaacuuuggaacaga

SEQ ID NO: 1418862 - RNA, 19 nt, Homo sapiens
  misc_RNA (1)...(19): siRNA sense strand
uggcgaaaguccugcugua

SEQ ID NO: 1418863 - RNA, 19 nt, Homo sapiens
  misc_RNA (1)...(19): siRNA sense strand
agugguguauguuguuaua

SEQ ID NO: 1418864 - RNA, 19 nt, Homo sapiens
  misc_RNA (1)...(19): siRNA sense strand
gaccauacccacauauucu

SEQ ID NO: 1418865 - RNA, 19 nt, Homo sapiens
  misc_RNA (1)...(19): siRNA sense strand
ccaaguccauauagaugau

SEQ ID NO: 1418866 - RNA, 19 nt, Homo sapiens
  misc_RNA (1)...(19): siRNA sense strand
cgaagaaacaauaauccuu

SEQ ID NO: 1418867 - RNA, 19 nt, Homo sapiens
  misc_RNA (1)...(19): siRNA sense strand
uuucucagguucagcaauu

SEQ ID NO: 1418868 - RNA, 19 nt, Homo sapiens
  misc_RNA (1)...(19): siRNA sense strand
ucagucaccuggacagaca

SEQ ID NO: 1418869 - RNA, 19 nt, Homo sapiens
  misc_RNA (1)...(19): siRNA sense strand
caaugccacuuaccagcuu

SEQ ID NO: 1418870 - RNA, 19 nt, Homo sapiens
  misc_RNA (1)...(19): siRNA sense strand
gguguauguuguuauagga

SEQ ID NO: 1418871 - RNA, 19 nt, Homo sapiens
  misc_RNA (1)...(19): siRNA sense strand
ccagugcuaacuuauguuu

SEQ ID NO: 1418872 - RNA, 19 nt, Homo sapiens
  misc_RNA (1)...(19): siRNA sense strand
uaaaagagaucuacaacac

SEQ ID NO: 1418873 - RNA, 19 nt, Homo sapiens
  misc_RNA (1)...(19): siRNA sense strand
cagcaggacuauccgucuu

SEQ ID NO: 1418874 - RNA, 19 nt, Homo sapiens
  misc_RNA (1)...(19): siRNA sense strand
aaccagugcuaacuuaugu

SEQ ID NO: 1418875 - RNA, 19 nt, Homo sapiens
  misc_RNA (1)...(19): siRNA sense strand
caacgacaccauccaccaa

SEQ ID NO: 1418876 - RNA, 19 nt, Homo sapiens
  misc_RNA (1)...(19): siRNA sense strand
caaccagugcuaacuuaug

SEQ ID NO: 1418877 - RNA, 19 nt, Homo sapiens
  misc_RNA (1)...(19): siRNA sense strand
ucaacacccauuaaagauu

SEQ ID NO: 1418878 - RNA, 19 nt, Homo sapiens
  misc_RNA (1)...(19): siRNA sense strand
gccgacgggucuuuaaaca

SEQ ID NO: 1418879 - RNA, 19 nt, Homo sapiens
  misc_RNA (1)...(19): siRNA sense strand
ccucuggauuuaauaguuc

SEQ ID NO: 1418880 - RNA, 19 nt, Homo sapiens
  misc_RNA (1)...(19): siRNA sense strand
gugaccaaguccauauaga

SEQ ID NO: 1418881 - RNA, 19 nt, Homo sapiens
  misc_RNA (1)...(19): siRNA sense strand
gcccaucaacacccauuaa

SEQ ID NO: 1418882 - RNA, 19 nt, Homo sapiens
  misc_RNA (1)...(19): siRNA sense strand
gacaggcaccauacagcua

SEQ ID NO: 1418883 - RNA, 19 nt, Homo sapiens
  misc_RNA (1)...(19): siRNA sense strand
gacgggucuuuaaacaauu

SEQ ID NO: 1418884 - RNA, 19 nt, Homo sapiens
  misc_RNA (1)...(19): siRNA sense strand
gguugacacuggcccugaa

SEQ ID NO: 1418885 - RNA, 19 nt, Homo sapiens
  misc_RNA (1)...(19): siRNA sense strand
aagcacauauaacuuugga

SEQ ID NO: 1418886 - RNA, 19 nt, Homo sapiens
  misc_RNA (1)...(19): siRNA sense strand
caagguagcaguuuuacaa

SEQ ID NO: 1418887 - RNA, 19 nt, Homo sapiens
  misc_RNA (1)...(19): siRNA sense strand
gauaacggacaggaccuaa

SEQ ID NO: 1418888 - RNA, 19 nt, Homo sapiens
  misc_RNA (1)...(19): siRNA sense strand
gaagaagaacaaggagcaa

SEQ ID NO: 1418889 - RNA, 19 nt, Homo sapiens
  misc_RNA (1)...(19): siRNA sense strand
aacagaccauacccacaua

SEQ ID NO: 1418890 - RNA, 19 nt, Homo sapiens
  misc_RNA (1)...(19): siRNA sense strand
gcaaccagugcuaacuuau

SEQ ID NO: 1418891 - RNA, 19 nt, Homo sapiens
  misc_RNA (1)...(19): siRNA sense strand
ccacagauuuacccuucca

SEQ ID NO: 1418892 - RNA, 19 nt, Homo sapiens
  misc_RNA (1)...(19): siRNA sense strand
ggucaguacgcacaguauu

SEQ ID NO: 1418893 - RNA, 19 nt, Homo sapiens
  misc_RNA (1)...(19): siRNA sense strand
aggagaugguguagaagaa

SEQ ID NO: 1418894 - RNA, 19 nt, Homo sapiens
  misc_RNA (1)...(19): siRNA sense strand
uggguuaggaauuguauuu

SEQ ID NO: 1418895 - RNA, 19 nt, Homo sapiens
  misc_RNA (1)...(19): siRNA sense strand
ggacuggaugagaaaguug

SEQ ID NO: 1418896 - RNA, 19 nt, Homo sapiens
  misc_RNA (1)...(19): siRNA sense strand
acauauaacuuuggaacag

SEQ ID NO: 1418897 - RNA, 19 nt, Homo sapiens
  misc_RNA (1)...(19): siRNA sense strand
ugaccaaguccauauagau

SEQ ID NO: 1418898 - RNA, 19 nt, Homo sapiens
  misc_RNA (1)...(19): siRNA sense strand
cauccaccaaugccacuua

SEQ ID NO: 1418899 - RNA, 19 nt, Homo sapiens
  misc_RNA (1)...(19): siRNA sense strand
cauaugggcaaacacaguu

SEQ ID NO: 1418900 - RNA, 19 nt, Homo sapiens
  misc_RNA (1)...(19): siRNA sense strand
auucugaucuugagagagu

SEQ ID NO: 1418901 - RNA, 19 nt, Homo sapiens
  misc_RNA (1)...(19): siRNA sense strand
gcauaugggcaaacacagu

SEQ ID NO: 1418902 - RNA, 19 nt, Homo sapiens
  misc_RNA (1)...(19): siRNA sense strand
gaugcaagguagcaguuuu

SEQ ID NO: 1418903 - RNA, 19 nt, Homo sapiens
  misc_RNA (1)...(19): siRNA sense strand
ggaaauaauucacucacaa

SEQ ID NO: 1418904 - RNA, 19 nt, Homo sapiens
  misc_RNA (1)...(19): siRNA sense strand
gcaacaagcuacagccuau

SEQ ID NO: 1418905 - RNA, 19 nt, Homo sapiens
  misc_RNA (1)...(19): siRNA sense strand
uauaggagaugguguagaa

SEQ ID NO: 1418906 - RNA, 19 nt, Homo sapiens
  misc_RNA (1)...(19): siRNA sense strand
gaagguggauugucacagu

SEQ ID NO: 1418907 - RNA, 19 nt, Homo sapiens
  misc_RNA (1)...(19): siRNA sense strand
caacacccauuaaagauuc

SEQ ID NO: 1418908 - RNA, 19 nt, Homo sapiens
  misc_RNA (1)...(19): siRNA sense strand
gaagaaaagugguguaugu

SEQ ID NO: 1418909 - RNA, 19 nt, Homo sapiens
  misc_RNA (1)...(19): siRNA sense strand
ggacaaacugugugaauau

SEQ ID NO: 1418910 - RNA, 19 nt, Homo sapiens
  misc_RNA (1)...(19): siRNA sense strand
cgacgggucuuuaaacaau

SEQ ID NO: 1418911 - RNA, 19 nt, Homo sapiens
  misc_RNA (1)...(19): siRNA sense strand
gacaggaccuaagcacaua

SEQ ID NO: 1418912 - RNA, 19 nt, Homo sapiens
  misc_RNA (1)...(19): siRNA sense strand
ccaaugagcagcagugaaa

SEQ ID NO: 1418913 - RNA, 19 nt, Homo sapiens
  misc_RNA (1)...(19): siRNA sense strand
ggacagacaggauuucuca

SEQ ID NO: 1418914 - RNA, 19 nt, Homo sapiens
  misc_RNA (1)...(19): siRNA sense strand
aaagaaagcuguuuugaga

SEQ ID NO: 1418915 - RNA, 19 nt, Homo sapiens
  misc_RNA (1)...(19): siRNA sense strand
ccauauagaugauguuucu

SEQ ID NO: 1418916 - RNA, 19 nt, Homo sapiens
  misc_RNA (1)...(19): siRNA sense strand
caucaacacccauuaaaga

SEQ ID NO: 1418917 - RNA, 19 nt, Homo sapiens
  misc_RNA (1)...(19): siRNA sense strand
gacaaacugugugaauauu

SEQ ID NO: 1418918 - RNA, 19 nt, Homo sapiens
  misc_RNA (1)...(19): siRNA sense strand
uagaugauguuucuucaga

SEQ ID NO: 1418919 - RNA, 19 nt, Homo sapiens
  misc_RNA (1)...(19): siRNA sense strand
ggacuuggaugagacaauc

SEQ ID NO: 1418920 - RNA, 19 nt, Homo sapiens
  misc_RNA (1)...(19): siRNA sense strand
gcaauugggagcaguaguu

SEQ ID NO: 1418921 - RNA, 19 nt, Homo sapiens
  misc_RNA (1)...(19): siRNA sense strand
gaugauguuucuucagaug

SEQ ID NO: 1418922 - RNA, 19 nt, Homo sapiens
  misc_RNA (1)...(19): siRNA sense strand
gauuuacccuuccaacaga

SEQ ID NO: 1418923 - RNA, 19 nt, Homo sapiens
  misc_RNA (1)...(19): siRNA sense strand
guacggcauuuccucauau

SEQ ID NO: 1418924 - RNA, 19 nt, Homo sapiens
  misc_RNA (1)...(19): siRNA sense strand
ggaacuggaguaccuguaa

SEQ ID NO: 1418925 - RNA, 19 nt, Homo sapiens
  misc_RNA (1)...(19): siRNA sense strand
cgaaaguccugcuguaugg

SEQ ID NO: 1418926 - RNA, 19 nt, Homo sapiens
  misc_RNA (1)...(19): siRNA sense strand
uauaacagcucaccguauc

SEQ ID NO: 1418927 - RNA, 19 nt, Homo sapiens
  misc_RNA (1)...(19): siRNA sense strand
cggacaaacugugugaaua

SEQ ID NO: 1418928 - RNA, 19 nt, Homo sapiens
  misc_RNA (1)...(19): siRNA sense strand
gagaugguguagaagaaga

SEQ ID NO: 1418929 - RNA, 19 nt, Homo sapiens
  misc_RNA (1)...(19): siRNA sense strand
gguguggacuggaugagaa

SEQ ID NO: 1418930 - RNA, 19 nt, Homo sapiens
  misc_RNA (1)...(19): siRNA sense strand
gacaggauuucucagcuau

SEQ ID NO: 1418931 - RNA, 19 nt, Homo sapiens
  misc_RNA (1)...(19): siRNA sense strand
aaagugguguauguuguua

SEQ ID NO: 1418932 - RNA, 19 nt, Homo sapiens
  misc_RNA (1)...(19): siRNA sense strand
caccguauccagcacauua

SEQ ID NO: 1418933 - RNA, 19 nt, Homo sapiens
  misc_RNA (1)...(19): siRNA sense strand
gacugaagguggauuguca

SEQ ID NO: 1418934 - RNA, 19 nt, Homo sapiens
  misc_RNA (1)...(19): siRNA sense strand
ccuaagcacauauaacuuu

SEQ ID NO: 1418935 - RNA, 19 nt, Homo sapiens
  misc_RNA (1)...(19): siRNA sense strand
ggacaggaccuaagcacau

SEQ ID NO: 1418936 - RNA, 19 nt, Homo sapiens
  misc_RNA (1)...(19): siRNA sense strand
ucaggaauauauacaggaa

SEQ ID NO: 1418937 - RNA, 19 nt, Homo sapiens
  misc_RNA (1)...(19): siRNA sense strand
ccacuuaccagcuucaaga

SEQ ID NO: 1418938 - RNA, 19 nt, Homo sapiens
  misc_RNA (1)...(19): siRNA sense strand
gaaaagugguguauguugu

SEQ ID NO: 1418939 - RNA, 19 nt, Homo sapiens
  misc_RNA (1)...(19): siRNA sense strand
agacaggauuucucagcua

SEQ ID NO: 1418940 - RNA, 19 nt, Homo sapiens
  misc_RNA (1)...(19): siRNA sense strand
caacagaccauacccacau

SEQ ID NO: 1418941 - RNA, 19 nt, Homo sapiens
  misc_RNA (1)...(19): siRNA sense strand
gguccuacgccaacagaua

SEQ ID NO: 1418942 - RNA, 19 nt, Homo sapiens
  misc_RNA (1)...(19): siRNA sense strand
uacaacaucaucaggaaua

SEQ ID NO: 1418943 - RNA, 19 nt, Homo sapiens
  misc_RNA (1)...(19): siRNA sense strand
gaccuaagcacauauaacu

SEQ ID NO: 1418944 - RNA, 19 nt, Homo sapiens
  misc_RNA (1)...(19): siRNA sense strand
gucaguacgcacaguauua

SEQ ID NO: 1418945 - RNA, 19 nt, Homo sapiens
  misc_RNA (1)...(19): siRNA sense strand
cguacggcauuuccucaua

SEQ ID NO: 1418946 - RNA, 19 nt, Homo sapiens
  misc_RNA (1)...(19): siRNA sense strand
gcaguugagggccgaaauu

SEQ ID NO: 1418947 - RNA, 19 nt, Homo sapiens
  misc_RNA (1)...(19): siRNA sense strand
gaucuacaacaccuacaaa

SEQ ID NO: 1418948 - RNA, 19 nt, Homo sapiens
  misc_RNA (1)...(19): siRNA sense strand
gcaggacuauccgucuuau

SEQ ID NO: 1418949 - RNA, 19 nt, Homo sapiens
  misc_RNA (1)...(19): siRNA sense strand
ucacaaauuccucuggauu

SEQ ID NO: 1418950 - RNA, 19 nt, Homo sapiens
  misc_RNA (1)...(19): siRNA sense strand
caacaucaucaggaauaua

SEQ ID NO: 1418951 - RNA, 19 nt, Homo sapiens
  misc_RNA (1)...(19): siRNA sense strand
gaccaaguccauauagaug

SEQ ID NO: 1418952 - RNA, 19 nt, Homo sapiens
  misc_RNA (1)...(19): siRNA sense strand
aaagcacucucgcucauuc

SEQ ID NO: 1418953 - RNA, 19 nt, Homo sapiens
  misc_RNA (1)...(19): siRNA sense strand
ugaaagcacucucgcucau

SEQ ID NO: 1418954 - RNA, 19 nt, Homo sapiens
  misc_RNA (1)...(19): siRNA sense strand
cuaagcacauauaacuuug

SEQ ID NO: 1418955 - RNA, 19 nt, Homo sapiens
  misc_RNA (1)...(19): siRNA sense strand
gauguuucuucagaugaua

SEQ ID NO: 1418956 - RNA, 19 nt, Homo sapiens
  misc_RNA (1)...(19): siRNA sense strand
gaaugugaccaaguccaua

SEQ ID NO: 1418957 - RNA, 19 nt, Homo sapiens
  misc_RNA (1)...(19): siRNA sense strand
gcgaaaguccugcuguaug

SEQ ID NO: 1418958 - RNA, 19 nt, Homo sapiens
  misc_RNA (1)...(19): siRNA sense strand
gaaagcacucucgcucauu

SEQ ID NO: 1418959 - RNA, 19 nt, Homo sapiens
  misc_RNA (1)...(19): siRNA sense strand
guugagggccgaaauugaa

SEQ ID NO: 1418960 - RNA, 19 nt, Homo sapiens
  misc_RNA (1)...(19): siRNA sense strand
uaacuuauguuuggcaacu

SEQ ID NO: 1418961 - RNA, 19 nt, Homo sapiens
  misc_RNA (1)...(19): siRNA sense strand
cauauaacuuuggaacaga

SEQ ID NO: 1418962 - RNA, 19 nt, Homo sapiens
  misc_RNA (1)...(19): siRNA sense strand
uggcgaaaguccugcugua

SEQ ID NO: 1418963 - RNA, 19 nt, Homo sapiens
  misc_RNA (1)...(19): siRNA sense strand
agugguguauguuguuaua

SEQ ID NO: 1418964 - RNA, 19 nt, Homo sapiens
  misc_RNA (1)...(19): siRNA sense strand
gaccauacccacauauucu

SEQ ID NO: 1418965 - RNA, 19 nt, Homo sapiens
  misc_RNA (1)...(19): siRNA sense strand
ccaaguccauauagaugau

SEQ ID NO: 1418966 - RNA, 19 nt, Homo sapiens
  misc_RNA (1)...(19): siRNA sense strand
cgaagaaacaauaauccuu

SEQ ID NO: 1418967 - RNA, 19 nt, Homo sapiens
  misc_RNA (1)...(19): siRNA sense strand
uuucucagguucagcaauu

SEQ ID NO: 1418968 - RNA, 19 nt, Homo sapiens
  misc_RNA (1)...(19): siRNA sense strand
ucagucaccuggacagaca

SEQ ID NO: 1418969 - RNA, 19 nt, Homo sapiens
  misc_RNA (1)...(19): siRNA sense strand
caaugccacuuaccagcuu

SEQ ID NO: 1418970 - RNA, 19 nt, Homo sapiens
  misc_RNA (1)...(19): siRNA sense strand
gguguauguuguuauagga

SEQ ID NO: 1418971 - RNA, 19 nt, Homo sapiens
  misc_RNA (1)...(19): siRNA sense strand
ccagugcuaacuuauguuu

SEQ ID NO: 1418972 - RNA, 19 nt, Homo sapiens
  misc_RNA (1)...(19): siRNA sense strand
uaaaagagaucuacaacac

SEQ ID NO: 1418973 - RNA, 19 nt, Homo sapiens
  misc_RNA (1)...(19): siRNA sense strand
cagcaggacuauccgucuu

SEQ ID NO: 1418974 - RNA, 19 nt, Homo sapiens
  misc_RNA (1)...(19): siRNA sense strand
aaccagugcuaacuuaugu

SEQ ID NO: 1418975 - RNA, 19 nt, Homo sapiens
  misc_RNA (1)...(19): siRNA sense strand
caacgacaccauccaccaa

SEQ ID NO: 1418976 - RNA, 19 nt, Homo sapiens
  misc_RNA (1)...(19): siRNA sense strand
caaccagugcuaacuuaug

SEQ ID NO: 1418977 - RNA, 19 nt, Homo sapiens
  misc_RNA (1)...(19): siRNA sense strand
ucaacacccauuaaagauu

SEQ ID NO: 1418978 - RNA, 19 nt, Homo sapiens
  misc_RNA (1)...(19): siRNA sense strand
gccgacgggucuuuaaaca

SEQ ID NO: 1418979 - RNA, 19 nt, Homo sapiens
  misc_RNA (1)...(19): siRNA sense strand
ccucuggauuuaauaguuc

SEQ ID NO: 1418980 - RNA, 19 nt, Homo sapiens
  misc_RNA (1)...(19): siRNA sense strand
gugaccaaguccauauaga

SEQ ID NO: 1418981 - RNA, 19 nt, Homo sapiens
  misc_RNA (1)...(19): siRNA sense strand
gcccaucaacacccauuaa

SEQ ID NO: 1418982 - RNA, 19 nt, Homo sapiens
  misc_RNA (1)...(19): siRNA sense strand
gacaggcaccauacagcua

SEQ ID NO: 1418983 - RNA, 19 nt, Homo sapiens
  misc_RNA (1)...(19): siRNA sense strand
gacgggucuuuaaacaauu

SEQ ID NO: 1418984 - RNA, 19 nt, Homo sapiens
  misc_RNA (1)...(19): siRNA sense strand
gguugacacuggcccugaa

SEQ ID NO: 1418985 - RNA, 19 nt, Homo sapiens
  misc_RNA (1)...(19): siRNA sense strand
aagcacauauaacuuugga

SEQ ID NO: 1418986 - RNA, 19 nt, Homo sapiens
  misc_RNA (1)...(19): siRNA sense strand
caagguagcaguuuuacaa

SEQ ID NO: 1418987 - RNA, 19 nt, Homo sapiens
  misc_RNA (1)...(19): siRNA sense strand
gauaacggacaggaccuaa

SEQ ID NO: 1418988 - RNA, 19 nt, Homo sapiens
  misc_RNA (1)...(19): siRNA sense strand
gaagaagaacaaggagcaa

SEQ ID NO: 1418989 - RNA, 19 nt, Homo sapiens
  misc_RNA (1)...(19): siRNA sense strand
aacagaccauacccacaua

SEQ ID NO: 1418990 - RNA, 19 nt, Homo sapiens
  misc_RNA (1)...(19): siRNA sense strand
gcaaccagugcuaacuuau

SEQ ID NO: 1418991 - RNA, 19 nt, Homo sapiens
  misc_RNA (1)...(19): siRNA sense strand
ccacagauuuacccuucca

SEQ ID NO: 1418992 - RNA, 19 nt, Homo sapiens
  misc_RNA (1)...(19): siRNA sense strand
ggucaguacgcacaguauu

SEQ ID NO: 1418993 - RNA, 19 nt, Homo sapiens
  misc_RNA (1)...(19): siRNA sense strand
aggagaugguguagaagaa

SEQ ID NO: 1418994 - RNA, 19 nt, Homo sapiens
  misc_RNA (1)...(19): siRNA sense strand
uggguuaggaauuguauuu

SEQ ID NO: 1418995 - RNA, 19 nt, Homo sapiens
  misc_RNA (1)...(19): siRNA sense strand
ggacuggaugagaaaguug

SEQ ID NO: 1418996 - RNA, 19 nt, Homo sapiens
  misc_RNA (1)...(19): siRNA sense strand
acauauaacuuuggaacag

SEQ ID NO: 1418997 - RNA, 19 nt, Homo sapiens
  misc_RNA (1)...(19): siRNA sense strand
ugaccaaguccauauagau

SEQ ID NO: 1418998 - RNA, 19 nt, Homo sapiens
  misc_RNA (1)...(19): siRNA sense strand
cauccaccaaugccacuua

SEQ ID NO: 1418999 - RNA, 19 nt, Homo sapiens
  misc_RNA (1)...(19): siRNA sense strand
cauaugggcaaacacaguu

SEQ ID NO: 1419000 - RNA, 19 nt, Homo sapiens
  misc_RNA (1)...(19): siRNA sense strand
auucugaucuugagagagu

SEQ ID NO: 1419001 - RNA, 19 nt, Homo sapiens
  misc_RNA (1)...(19): siRNA sense strand
gcauaugggcaaacacagu

SEQ ID NO: 1419002 - RNA, 19 nt, Homo sapiens
  misc_RNA (1)...(19): siRNA sense strand
gaugcaagguagcaguuuu

SEQ ID NO: 1419003 - RNA, 19 nt, Homo sapiens
  misc_RNA (1)...(19): siRNA sense strand
ggaaauaauucacucacaa

SEQ ID NO: 1419004 - RNA, 19 nt, Homo sapiens
  misc_RNA (1)...(19): siRNA sense strand
gcaacaagcuacagccuau

SEQ ID NO: 1419005 - RNA, 19 nt, Homo sapiens
  misc_RNA (1)...(19): siRNA sense strand
uauaggagaugguguagaa

SEQ ID NO: 1419006 - RNA, 19 nt, Homo sapiens
  misc_RNA (1)...(19): siRNA sense strand
gaagguggauugucacagu

SEQ ID NO: 1419007 - RNA, 19 nt, Homo sapiens
  misc_RNA (1)...(19): siRNA sense strand
caacacccauuaaagauuc

SEQ ID NO: 1419008 - RNA, 19 nt, Homo sapiens
  misc_RNA (1)...(19): siRNA sense strand
gaagaaaagugguguaugu

SEQ ID NO: 1419009 - RNA, 19 nt, Homo sapiens
  misc_RNA (1)...(19): siRNA sense strand
ggacaaacugugugaauau

SEQ ID NO: 1419010 - RNA, 19 nt, Homo sapiens
  misc_RNA (1)...(19): siRNA sense strand
cgacgggucuuuaaacaau

SEQ ID NO: 1419011 - RNA, 19 nt, Homo sapiens
  misc_RNA (1)...(19): siRNA sense strand
ccaaugagcagcagugaaa

SEQ ID NO: 1419012 - RNA, 19 nt, Homo sapiens
  misc_RNA (1)...(19): siRNA sense strand
gacaggaccuaagcacaua

SEQ ID NO: 1419013 - RNA, 19 nt, Homo sapiens
  misc_RNA (1)...(19): siRNA sense strand
ggacagacaggauuucuca

SEQ ID NO: 1419014 - RNA, 19 nt, Homo sapiens
  misc_RNA (1)...(19): siRNA sense strand
aaagaaagcuguuuugaga

SEQ ID NO: 1419015 - RNA, 19 nt, Homo sapiens
  misc_RNA (1)...(19): siRNA sense strand
ccauauagaugauguuucu

SEQ ID NO: 1419016 - RNA, 19 nt, Homo sapiens
  misc_RNA (1)...(19): siRNA sense strand
caucaacacccauuaaaga

SEQ ID NO: 1419017 - RNA, 19 nt, Homo sapiens
  misc_RNA (1)...(19): siRNA sense strand
gacaaacugugugaauauu

SEQ ID NO: 1419018 - RNA, 19 nt, Homo sapiens
  misc_RNA (1)...(19): siRNA sense strand
uagaugauguuucuucaga

SEQ ID NO: 1419019 - RNA, 19 nt, Homo sapiens
  misc_RNA (1)...(19): siRNA sense strand
ggacuuggaugagacaauc

SEQ ID NO: 1419020 - RNA, 19 nt, Homo sapiens
  misc_RNA (1)...(19): siRNA sense strand
gcaauugggagcaguaguu

SEQ ID NO: 1419021 - RNA, 19 nt, Homo sapiens
  misc_RNA (1)...(19): siRNA sense strand
gaugauguuucuucagaug

SEQ ID NO: 1419022 - RNA, 19 nt, Homo sapiens
  misc_RNA (1)...(19): siRNA sense strand
gauuuacccuuccaacaga

SEQ ID NO: 1419023 - RNA, 19 nt, Homo sapiens
  misc_RNA (1)...(19): siRNA sense strand
guacggcauuuccucauau

SEQ ID NO: 1419024 - RNA, 19 nt, Homo sapiens
  misc_RNA (1)...(19): siRNA sense strand
ggaacuggaguaccuguaa

SEQ ID NO: 1419025 - RNA, 19 nt, Homo sapiens
  misc_RNA (1)...(19): siRNA sense strand
cgaaaguccugcuguaugg

SEQ ID NO: 1419026 - RNA, 19 nt, Homo sapiens
  misc_RNA (1)...(19): siRNA sense strand
uauaacagcucaccguauc

SEQ ID NO: 1419027 - RNA, 19 nt, Homo sapiens
  misc_RNA (1)...(19): siRNA sense strand
cggacaaacugugugaaua

SEQ ID NO: 1419028 - RNA, 19 nt, Homo sapiens
  misc_RNA (1)...(19): siRNA sense strand
gagaugguguagaagaaga

SEQ ID NO: 1419029 - RNA, 19 nt, Homo sapiens
  misc_RNA (1)...(19): siRNA sense strand
gguguggacuggaugagaa

SEQ ID NO: 1419030 - RNA, 19 nt, Homo sapiens
  misc_RNA (1)...(19): siRNA sense strand
gacaggauuucucagcuau

SEQ ID NO: 1419031 - RNA, 19 nt, Homo sapiens
  misc_RNA (1)...(19): siRNA sense strand
aaagugguguauguuguua

SEQ ID NO: 1419032 - RNA, 19 nt, Homo sapiens
  misc_RNA (1)...(19): siRNA sense strand
caccguauccagcacauua

SEQ ID NO: 1419033 - RNA, 19 nt, Homo sapiens
  misc_RNA (1)...(19): siRNA sense strand
gacugaagguggauuguca

SEQ ID NO: 1419034 - RNA, 19 nt, Homo sapiens
  misc_RNA (1)...(19): siRNA sense strand
ccuaagcacauauaacuuu

SEQ ID NO: 1419035 - RNA, 19 nt, Homo sapiens
  misc_RNA (1)...(19): siRNA sense strand
ggacaggaccuaagcacau

SEQ ID NO: 1419036 - RNA, 19 nt, Homo sapiens
  misc_RNA (1)...(19): siRNA sense strand
ucaggaauauauacaggaa

SEQ ID NO: 1419037 - RNA, 19 nt, Homo sapiens
  misc_RNA (1)...(19): siRNA sense strand
ccacuuaccagcuucaaga

SEQ ID NO: 1419038 - RNA, 19 nt, Homo sapiens
  misc_RNA (1)...(19): siRNA sense strand
gaaaagugguguauguugu

SEQ ID NO: 1419039 - RNA, 19 nt, Homo sapiens
  misc_RNA (1)...(19): siRNA sense strand
agacaggauuucucagcua

SEQ ID NO: 1419040 - RNA, 19 nt, Homo sapiens
  misc_RNA (1)...(19): siRNA sense strand
caacagaccauacccacau

SEQ ID NO: 1419041 - RNA, 19 nt, Homo sapiens
  misc_RNA (1)...(19): siRNA sense strand
gguccuacgccaacagaua

SEQ ID NO: 1419042 - RNA, 19 nt, Homo sapiens
  misc_RNA (1)...(19): siRNA sense strand
uacaacaucaucaggaaua

SEQ ID NO: 1419043 - RNA, 19 nt, Homo sapiens
  misc_RNA (1)...(19): siRNA sense strand
gaccuaagcacauauaacu

SEQ ID NO: 1419044 - RNA, 19 nt, Homo sapiens
  misc_RNA (1)...(19): siRNA sense strand
gucaguacgcacaguauua

SEQ ID NO: 1419045 - RNA, 19 nt, Homo sapiens
  misc_RNA (1)...(19): siRNA sense strand
cguacggcauuuccucaua

SEQ ID NO: 1419046 - RNA, 19 nt, Homo sapiens
  misc_RNA (1)...(19): siRNA sense strand
gcaguugagggccgaaauu

SEQ ID NO: 1419047 - RNA, 19 nt, Homo sapiens
  misc_RNA (1)...(19): siRNA sense strand
gaucuacaacaccuacaaa

SEQ ID NO: 1419048 - RNA, 19 nt, Homo sapiens
  misc_RNA (1)...(19): siRNA sense strand
gcaggacuauccgucuuau

SEQ ID NO: 1419049 - RNA, 19 nt, Homo sapiens
  misc_RNA (1)...(19): siRNA sense strand
ucacaaauuccucuggauu

SEQ ID NO: 1419050 - RNA, 19 nt, Homo sapiens
  misc_RNA (1)...(19): siRNA sense strand
caacaucaucaggaauaua

SEQ ID NO: 1419051 - RNA, 19 nt, Homo sapiens
  misc_RNA (1)...(19): siRNA sense strand
gaccaaguccauauagaug

SEQ ID NO: 1419052 - RNA, 19 nt, Homo sapiens
  misc_RNA (1)...(19): siRNA sense strand
aaagcacucucgcucauuc

SEQ ID NO: 1419053 - RNA, 19 nt, Homo sapiens
  misc_RNA (1)...(19): siRNA sense strand
ugaaagcacucucgcucau

SEQ ID NO: 1419054 - RNA, 19 nt, Homo sapiens
  misc_RNA (1)...(19): siRNA sense strand
cuaagcacauauaacuuug

SEQ ID NO: 1419055 - RNA, 19 nt, Homo sapiens
  misc_RNA (1)...(19): siRNA sense strand
gauguuucuucagaugaua

SEQ ID NO: 1419056 - RNA, 19 nt, Homo sapiens
  misc_RNA (1)...(19): siRNA sense strand
gaaugugaccaaguccaua

SEQ ID NO: 1419057 - RNA, 19 nt, Homo sapiens
  misc_RNA (1)...(19): siRNA sense strand
gcgaaaguccugcuguaug

SEQ ID NO: 1419058 - RNA, 19 nt, Homo sapiens
  misc_RNA (1)...(19): siRNA sense strand
gaaagcacucucgcucauu

SEQ ID NO: 1419059 - RNA, 19 nt, Homo sapiens
  misc_RNA (1)...(19): siRNA sense strand
guugagggccgaaauugaa

SEQ ID NO: 1419060 - RNA, 19 nt, Homo sapiens
  misc_RNA (1)...(19): siRNA sense strand
uaacuuauguuuggcaacu

SEQ ID NO: 1419061 - RNA, 19 nt, Homo sapiens
  misc_RNA (1)...(19): siRNA sense strand
cauauaacuuuggaacaga

SEQ ID NO: 1419062 - RNA, 19 nt, Homo sapiens
  misc_RNA (1)...(19): siRNA sense strand
uggcgaaaguccugcugua

SEQ ID NO: 1419063 - RNA, 19 nt, Homo sapiens
  misc_RNA (1)...(19): siRNA sense strand
agugguguauguuguuaua

SEQ ID NO: 1419064 - RNA, 19 nt, Homo sapiens
  misc_RNA (1)...(19): siRNA sense strand
gaccauacccacauauucu

SEQ ID NO: 1419065 - RNA, 19 nt, Homo sapiens
  misc_RNA (1)...(19): siRNA sense strand
uuucucagguucagcaauu

SEQ ID NO: 1419066 - RNA, 19 nt, Homo sapiens
  misc_RNA (1)...(19): siRNA sense strand
ccaaguccauauagaugau

SEQ ID NO: 1419067 - RNA, 19 nt, Homo sapiens
  misc_RNA (1)...(19): siRNA sense strand
cgaagaaacaauaauccuu

SEQ ID NO: 1419068 - RNA, 19 nt, Homo sapiens
  misc_RNA (1)...(19): siRNA sense strand
ucagucaccuggacagaca

SEQ ID NO: 1419069 - RNA, 19 nt, Homo sapiens
  misc_RNA (1)...(19): siRNA sense strand
caaugccacuuaccagcuu

SEQ ID NO: 1419070 - RNA, 19 nt, Homo sapiens
  misc_RNA (1)...(19): siRNA sense strand
gguguauguuguuauagga

SEQ ID NO: 1419071 - RNA, 19 nt, Homo sapiens
  misc_RNA (1)...(19): siRNA sense strand
ccagugcuaacuuauguuu

SEQ ID NO: 1419072 - RNA, 19 nt, Homo sapiens
  misc_RNA (1)...(19): siRNA sense strand
uaaaagagaucuacaacac

SEQ ID NO: 1419073 - RNA, 19 nt, Homo sapiens
  misc_RNA (1)...(19): siRNA sense strand
cagcaggacuauccgucuu

SEQ ID NO: 1419074 - RNA, 19 nt, Homo sapiens
  misc_RNA (1)...(19): siRNA sense strand
aaccagugcuaacuuaugu

SEQ ID NO: 1419075 - RNA, 19 nt, Homo sapiens
  misc_RNA (1)...(19): siRNA sense strand
caacgacaccauccaccaa

SEQ ID NO: 1419076 - RNA, 19 nt, Homo sapiens
  misc_RNA (1)...(19): siRNA sense strand
caaccagugcuaacuuaug

SEQ ID NO: 1419077 - RNA, 19 nt, Homo sapiens
  misc_RNA (1)...(19): siRNA sense strand
gccgacgggucuuuaaaca

SEQ ID NO: 1419078 - RNA, 19 nt, Homo sapiens
  misc_RNA (1)...(19): siRNA sense strand
ucaacacccauuaaagauu

SEQ ID NO: 1419079 - RNA, 19 nt, Homo sapiens
  misc_RNA (1)...(19): siRNA sense strand
ccucuggauuuaauaguuc

SEQ ID NO: 1419080 - RNA, 19 nt, Homo sapiens
  misc_RNA (1)...(19): siRNA sense strand
gugaccaaguccauauaga

SEQ ID NO: 1419081 - RNA, 19 nt, Homo sapiens
  misc_RNA (1)...(19): siRNA sense strand
gcccaucaacacccauuaa

SEQ ID NO: 1419082 - RNA, 19 nt, Homo sapiens
  misc_RNA (1)...(19): siRNA sense strand
gacgggucuuuaaacaauu

SEQ ID NO: 1419083 - RNA, 19 nt, Homo sapiens
  misc_RNA (1)...(19): siRNA sense strand
gguugacacuggcccugaa

SEQ ID NO: 1419084 - RNA, 19 nt, Homo sapiens
  misc_RNA (1)...(19): siRNA sense strand
aagcacauauaacuuugga

SEQ ID NO: 1419085 - RNA, 19 nt, Homo sapiens
  misc_RNA (1)...(19): siRNA sense strand
caagguagcaguuuuacaa

SEQ ID NO: 1419086 - RNA, 19 nt, Homo sapiens
  misc_RNA (1)...(19): siRNA sense strand
gacaggcaccauacagcua

SEQ ID NO: 1419087 - RNA, 19 nt, Homo sapiens
  misc_RNA (1)...(19): siRNA sense strand
aacagaccauacccacaua

SEQ ID NO: 1419088 - RNA, 19 nt, Homo sapiens
  misc_RNA (1)...(19): siRNA sense strand
gaagaagaacaaggagcaa

SEQ ID NO: 1419089 - RNA, 19 nt, Homo sapiens
  misc_RNA (1)...(19): siRNA sense strand
ccacagauuuacccuucca

SEQ ID NO: 1419090 - RNA, 19 nt, Homo sapiens
  misc_RNA (1)...(19): siRNA sense strand
gcaaccagugcuaacuuau

SEQ ID NO: 1419091 - RNA, 19 nt, Homo sapiens
  misc_RNA (1)...(19): siRNA sense strand
gauaacggacaggaccuaa

SEQ ID NO: 1419092 - RNA, 19 nt, Homo sapiens
  misc_RNA (1)...(19): siRNA sense strand
ggucaguacgcacaguauu

SEQ ID NO: 1419093 - RNA, 19 nt, Homo sapiens
  misc_RNA (1)...(19): siRNA sense strand
aggagaugguguagaagaa

SEQ ID NO: 1419094 - RNA, 19 nt, Homo sapiens
  misc_RNA (1)...(19): siRNA sense strand
uggguuaggaauuguauuu

SEQ ID NO: 1419095 - RNA, 19 nt, Homo sapiens
  misc_RNA (1)...(19): siRNA sense strand
ggacuggaugagaaaguug

SEQ ID NO: 1419096 - RNA, 19 nt, Homo sapiens
  misc_RNA (1)...(19): siRNA sense strand
acauauaacuuuggaacag

SEQ ID NO: 1419097 - RNA, 19 nt, Homo sapiens
  misc_RNA (1)...(19): siRNA sense strand
ugaccaaguccauauagau

SEQ ID NO: 1419098 - RNA, 19 nt, Homo sapiens
  misc_RNA (1)...(19): siRNA sense strand
cauccaccaaugccacuua

SEQ ID NO: 1419099 - RNA, 19 nt, Homo sapiens
  misc_RNA (1)...(19): siRNA sense strand
gaugcaagguagcaguuuu

SEQ ID NO: 1419100 - RNA, 19 nt, Homo sapiens
  misc_RNA (1)...(19): siRNA sense strand
gcauaugggcaaacacagu

SEQ ID NO: 1419101 - RNA, 19 nt, Homo sapiens
  misc_RNA (1)...(19): siRNA sense strand
cauaugggcaaacacaguu

SEQ ID NO: 1419102 - RNA, 19 nt, Homo sapiens
  misc_RNA (1)...(19): siRNA sense strand
auucugaucuugagagagu

SEQ ID NO: 1419103 - RNA, 19 nt, Homo sapiens
  misc_RNA (1)...(19): siRNA sense strand
ggaaauaauucacucacaa

SEQ ID NO: 1419104 - RNA, 19 nt, Homo sapiens
  misc_RNA (1)...(19): siRNA sense strand
gcaacaagcuacagccuau

SEQ ID NO: 1419105 - RNA, 19 nt, Homo sapiens
  misc_RNA (1)...(19): siRNA sense strand
uauaggagaugguguagaa

SEQ ID NO: 1419106 - RNA, 19 nt, Homo sapiens
  misc_RNA (1)...(19): siRNA sense strand
gaagguggauugucacagu

SEQ ID NO: 1419107 - RNA, 19 nt, Homo sapiens
  misc_RNA (1)...(19): siRNA sense strand
caacacccauuaaagauuc

SEQ ID NO: 1419108 - RNA, 19 nt, Homo sapiens
  misc_RNA (1)...(19): siRNA sense strand
gaagaaaagugguguaugu

SEQ ID NO: 1419109 - RNA, 19 nt, Homo sapiens
  misc_RNA (1)...(19): siRNA sense strand
ggacaaacugugugaauau

SEQ ID NO: 1419110 - RNA, 19 nt, Homo sapiens
  misc_RNA (1)...(19): siRNA sense strand
cgacgggucuuuaaacaau

SEQ ID NO: 1419111 - RNA, 19 nt, Homo sapiens
  misc_RNA (1)...(19): siRNA sense strand
gacaggaccuaagcacaua

SEQ ID NO: 1419112 - RNA, 19 nt, Homo sapiens
  misc_RNA (1)...(19): siRNA sense strand
ccaaugagcagcagugaaa

SEQ ID NO: 1419113 - RNA, 19 nt, Homo sapiens
  misc_RNA (1)...(19): siRNA sense strand
ggacagacaggauuucuca

SEQ ID NO: 1419114 - RNA, 19 nt, Homo sapiens
  misc_RNA (1)...(19): siRNA sense strand
aaagaaagcuguuuugaga

SEQ ID NO: 1419115 - RNA, 19 nt, Homo sapiens
  misc_RNA (1)...(19): siRNA sense strand
ccauauagaugauguuucu

SEQ ID NO: 1419116 - RNA, 19 nt, Homo sapiens
  misc_RNA (1)...(19): siRNA sense strand
caucaacacccauuaaaga

SEQ ID NO: 1419117 - RNA, 19 nt, Homo sapiens
  misc_RNA (1)...(19): siRNA sense strand
gacaaacugugugaauauu

SEQ ID NO: 1419118 - RNA, 19 nt, Homo sapiens
  misc_RNA (1)...(19): siRNA sense strand
uagaugauguuucuucaga

SEQ ID NO: 1419119 - RNA, 19 nt, Homo sapiens
  misc_RNA (1)...(19): siRNA sense strand
ggacuuggaugagacaauc

SEQ ID NO: 1419120 - RNA, 19 nt, Homo sapiens
  misc_RNA (1)...(19): siRNA sense strand
gcaauugggagcaguaguu

SEQ ID NO: 1419121 - RNA, 19 nt, Homo sapiens
  misc_RNA (1)...(19): siRNA sense strand
gaugauguuucuucagaug

SEQ ID NO: 1419122 - RNA, 19 nt, Homo sapiens
  misc_RNA (1)...(19): siRNA sense strand
gauuuacccuuccaacaga

SEQ ID NO: 1419123 - RNA, 19 nt, Homo sapiens
  misc_RNA (1)...(19): siRNA sense strand
guacggcauuuccucauau

SEQ ID NO: 1419124 - RNA, 19 nt, Homo sapiens
  misc_RNA (1)...(19): siRNA sense strand
ggaacuggaguaccuguaa

SEQ ID NO: 1419125 - RNA, 19 nt, Homo sapiens
  misc_RNA (1)...(19): siRNA sense strand
cgaaaguccugcuguaugg

SEQ ID NO: 1419126 - RNA, 19 nt, Homo sapiens
  misc_RNA (1)...(19): siRNA sense strand
uauaacagcucaccguauc

SEQ ID NO: 1419127 - RNA, 19 nt, Homo sapiens
  misc_RNA (1)...(19): siRNA sense strand
cggacaaacugugugaaua

SEQ ID NO: 1419128 - RNA, 19 nt, Homo sapiens
  misc_RNA (1)...(19): siRNA sense strand
gagaugguguagaagaaga

SEQ ID NO: 1419129 - RNA, 19 nt, Homo sapiens
  misc_RNA (1)...(19): siRNA sense strand
gguguggacuggaugagaa

SEQ ID NO: 1419130 - RNA, 19 nt, Homo sapiens
  misc_RNA (1)...(19): siRNA sense strand
gacaggauuucucagcuau

SEQ ID NO: 1419131 - RNA, 19 nt, Homo sapiens
  misc_RNA (1)...(19): siRNA sense strand
aaagugguguauguuguua

SEQ ID NO: 1419132 - RNA, 19 nt, Homo sapiens
  misc_RNA (1)...(19): siRNA sense strand
caccguauccagcacauua

SEQ ID NO: 1419133 - RNA, 19 nt, Homo sapiens
  misc_RNA (1)...(19): siRNA sense strand
gacugaagguggauuguca

SEQ ID NO: 1419134 - RNA, 19 nt, Homo sapiens
  misc_RNA (1)...(19): siRNA sense strand
ccuaagcacauauaacuuu

SEQ ID NO: 1419135 - RNA, 19 nt, Homo sapiens
  misc_RNA (1)...(19): siRNA sense strand
ggacaggaccuaagcacau

SEQ ID NO: 1419136 - RNA, 19 nt, Homo sapiens
  misc_RNA (1)...(19): siRNA sense strand
ucaggaauauauacaggaa

SEQ ID NO: 1419137 - RNA, 19 nt, Homo sapiens
  misc_RNA (1)...(19): siRNA sense strand
ccacuuaccagcuucaaga

SEQ ID NO: 1419138 - RNA, 19 nt, Homo sapiens
  misc_RNA (1)...(19): siRNA sense strand
gaaaagugguguauguugu

SEQ ID NO: 1419139 - RNA, 19 nt, Homo sapiens
  misc_RNA (1)...(19): siRNA sense strand
agacaggauuucucagcua

SEQ ID NO: 1419140 - RNA, 19 nt, Homo sapiens
  misc_RNA (1)...(19): siRNA sense strand
caacagaccauacccacau

SEQ ID NO: 1419141 - RNA, 19 nt, Homo sapiens
  misc_RNA (1)...(19): siRNA sense strand
gguccuacgccaacagaua

SEQ ID NO: 1419142 - RNA, 19 nt, Homo sapiens
  misc_RNA (1)...(19): siRNA sense strand
uacaacaucaucaggaaua

SEQ ID NO: 1419143 - RNA, 19 nt, Homo sapiens
  misc_RNA (1)...(19): siRNA sense strand
gaccuaagcacauauaacu

SEQ ID NO: 1419144 - RNA, 19 nt, Homo sapiens
  misc_RNA (1)...(19): siRNA sense strand
gucaguacgcacaguauua

SEQ ID NO: 1419145 - RNA, 19 nt, Homo sapiens
  misc_RNA (1)...(19): siRNA sense strand
cguacggcauuuccucaua

SEQ ID NO: 1419146 - RNA, 19 nt, Homo sapiens
  misc_RNA (1)...(19): siRNA sense strand
gcaguugagggccgaaauu

SEQ ID NO: 1419147 - RNA, 19 nt, Homo sapiens
  misc_RNA (1)...(19): siRNA sense strand
gaucuacaacaccuacaaa

SEQ ID NO: 1419148 - RNA, 19 nt, Homo sapiens
  misc_RNA (1)...(19): siRNA sense strand
gcaggacuauccgucuuau

SEQ ID NO: 1419149 - RNA, 19 nt, Homo sapiens
  misc_RNA (1)...(19): siRNA sense strand
ucacaaauuccucuggauu

SEQ ID NO: 1419150 - RNA, 19 nt, Homo sapiens
  misc_RNA (1)...(19): siRNA sense strand
caacaucaucaggaauaua

SEQ ID NO: 1419151 - RNA, 19 nt, Homo sapiens
  misc_RNA (1)...(19): siRNA sense strand
gaccaaguccauauagaug

SEQ ID NO: 1419152 - RNA, 19 nt, Homo sapiens
  misc_RNA (1)...(19): siRNA sense strand
aaagcacucucgcucauuc

SEQ ID NO: 1419153 - RNA, 19 nt, Homo sapiens
  misc_RNA (1)...(19): siRNA sense strand
ugaaagcacucucgcucau

SEQ ID NO: 1419154 - RNA, 19 nt, Homo sapiens
  misc_RNA (1)...(19): siRNA sense strand
cuaagcacauauaacuuug

SEQ ID NO: 1419155 - RNA, 19 nt, Homo sapiens
  misc_RNA (1)...(19): siRNA sense strand
gauguuucuucagaugaua

SEQ ID NO: 1419156 - RNA, 19 nt, Homo sapiens
  misc_RNA (1)...(19): siRNA sense strand
gaaugugaccaaguccaua

SEQ ID NO: 1419157 - RNA, 19 nt, Homo sapiens
  misc_RNA (1)...(19): siRNA sense strand
gcgaaaguccugcuguaug

SEQ ID NO: 1419158 - RNA, 19 nt, Homo sapiens
  misc_RNA (1)...(19): siRNA sense strand
gaaagcacucucgcucauu

SEQ ID NO: 1419159 - RNA, 19 nt, Homo sapiens
  misc_RNA (1)...(19): siRNA sense strand
guugagggccgaaauugaa

SEQ ID NO: 1419160 - RNA, 19 nt, Homo sapiens
  misc_RNA (1)...(19): siRNA sense strand
uaacuuauguuuggcaacu

SEQ ID NO: 1419161 - RNA, 19 nt, Homo sapiens
  misc_RNA (1)...(19): siRNA sense strand
cauauaacuuuggaacaga

SEQ ID NO: 1419162 - RNA, 19 nt, Homo sapiens
  misc_RNA (1)...(19): siRNA sense strand
uggcgaaaguccugcugua

SEQ ID NO: 1419163 - RNA, 19 nt, Homo sapiens
  misc_RNA (1)...(19): siRNA sense strand
agugguguauguuguuaua

SEQ ID NO: 1419164 - RNA, 19 nt, Homo sapiens
  misc_RNA (1)...(19): siRNA sense strand
gaccauacccacauauucu

SEQ ID NO: 1419165 - RNA, 19 nt, Homo sapiens
  misc_RNA (1)...(19): siRNA sense strand
ccaaguccauauagaugau

SEQ ID NO: 1419166 - RNA, 19 nt, Homo sapiens
  misc_RNA (1)...(19): siRNA sense strand
cgaagaaacaauaauccuu

SEQ ID NO: 1419167 - RNA, 19 nt, Homo sapiens
  misc_RNA (1)...(19): siRNA sense strand
uuucucagguucagcaauu

SEQ ID NO: 1419168 - RNA, 19 nt, Homo sapiens
  misc_RNA (1)...(19): siRNA sense strand
ucagucaccuggacagaca

SEQ ID NO: 1419169 - RNA, 19 nt, Homo sapiens
  misc_RNA (1)...(19): siRNA sense strand
caaugccacuuaccagcuu

SEQ ID NO: 1419170 - RNA, 19 nt, Homo sapiens
  misc_RNA (1)...(19): siRNA sense strand
gguguauguuguuauagga

SEQ ID NO: 1419171 - RNA, 19 nt, Homo sapiens
  misc_RNA (1)...(19): siRNA sense strand
ccagugcuaacuuauguuu

SEQ ID NO: 1419172 - RNA, 19 nt, Homo sapiens
  misc_RNA (1)...(19): siRNA sense strand
uaaaagagaucuacaacac

SEQ ID NO: 1419173 - RNA, 19 nt, Homo sapiens
  misc_RNA (1)...(19): siRNA sense strand
cagcaggacuauccgucuu

SEQ ID NO: 1419174 - RNA, 19 nt, Homo sapiens
  misc_RNA (1)...(19): siRNA sense strand
aaccagugcuaacuuaugu

SEQ ID NO: 1419175 - RNA, 19 nt, Homo sapiens
  misc_RNA (1)...(19): siRNA sense strand
caacgacaccauccaccaa

SEQ ID NO: 1419176 - RNA, 19 nt, Homo sapiens
  misc_RNA (1)...(19): siRNA sense strand
caaccagugcuaacuuaug

SEQ ID NO: 1419177 - RNA, 19 nt, Homo sapiens
  misc_RNA (1)...(19): siRNA sense strand
ucaacacccauuaaagauu

SEQ ID NO: 1419178 - RNA, 19 nt, Homo sapiens
  misc_RNA (1)...(19): siRNA sense strand
gccgacgggucuuuaaaca

SEQ ID NO: 1419179 - RNA, 19 nt, Homo sapiens
  misc_RNA (1)...(19): siRNA sense strand
ccucuggauuuaauaguuc

SEQ ID NO: 1419180 - RNA, 19 nt, Homo sapiens
  misc_RNA (1)...(19): siRNA sense strand
gugaccaaguccauauaga

SEQ ID NO: 1419181 - RNA, 19 nt, Homo sapiens
  misc_RNA (1)...(19): siRNA sense strand
gcccaucaacacccauuaa

SEQ ID NO: 1419182 - RNA, 19 nt, Homo sapiens
  misc_RNA (1)...(19): siRNA sense strand
gacaggcaccauacagcua

SEQ ID NO: 1419183 - RNA, 19 nt, Homo sapiens
  misc_RNA (1)...(19): siRNA sense strand
gacgggucuuuaaacaauu

SEQ ID NO: 1419184 - RNA, 19 nt, Homo sapiens
  misc_RNA (1)...(19): siRNA sense strand
gguugacacuggcccugaa

SEQ ID NO: 1419185 - RNA, 19 nt, Homo sapiens
  misc_RNA (1)...(19): siRNA sense strand
aagcacauauaacuuugga

SEQ ID NO: 1419186 - RNA, 19 nt, Homo sapiens
  misc_RNA (1)...(19): siRNA sense strand
caagguagcaguuuuacaa

SEQ ID NO: 1419187 - RNA, 19 nt, Homo sapiens
  misc_RNA (1)...(19): siRNA sense strand
gauaacggacaggaccuaa

SEQ ID NO: 1419188 - RNA, 19 nt, Homo sapiens
  misc_RNA (1)...(19): siRNA sense strand
gaagaagaacaaggagcaa

SEQ ID NO: 1419189 - RNA, 19 nt, Homo sapiens
  misc_RNA (1)...(19): siRNA sense strand
aacagaccauacccacaua

SEQ ID NO: 1419190 - RNA, 19 nt, Homo sapiens
  misc_RNA (1)...(19): siRNA sense strand
gcaaccagugcuaacuuau

SEQ ID NO: 1419191 - RNA, 19 nt, Homo sapiens
  misc_RNA (1)...(19): siRNA sense strand
ccacagauuuacccuucca

SEQ ID NO: 1419192 - RNA, 19 nt, Homo sapiens
  misc_RNA (1)...(19): siRNA sense strand
ggucaguacgcacaguauu

SEQ ID NO: 1419193 - RNA, 19 nt, Homo sapiens
  misc_RNA (1)...(19): siRNA sense strand
aggagaugguguagaagaa

SEQ ID NO: 1419194 - RNA, 19 nt, Homo sapiens
  misc_RNA (1)...(19): siRNA sense strand
uggguuaggaauuguauuu

SEQ ID NO: 1419195 - RNA, 19 nt, Homo sapiens
  misc_RNA (1)...(19): siRNA sense strand
ggacuggaugagaaaguug

SEQ ID NO: 1419196 - RNA, 19 nt, Homo sapiens
  misc_RNA (1)...(19): siRNA sense strand
acauauaacuuuggaacag

SEQ ID NO: 1419197 - RNA, 19 nt, Homo sapiens
  misc_RNA (1)...(19): siRNA sense strand
ugaccaaguccauauagau

SEQ ID NO: 1419198 - RNA, 19 nt, Homo sapiens
  misc_RNA (1)...(19): siRNA sense strand
cauccaccaaugccacuua

SEQ ID NO: 1419199 - RNA, 19 nt, Homo sapiens
  misc_RNA (1)...(19): siRNA sense strand
cauaugggcaaacacaguu

SEQ ID NO: 1419200 - RNA, 19 nt, Homo sapiens
  misc_RNA (1)...(19): siRNA sense strand
auucugaucuugagagagu

SEQ ID NO: 1419201 - RNA, 19 nt, Homo sapiens
  misc_RNA (1)...(19): siRNA sense strand
gcauaugggcaaacacagu

SEQ ID NO: 1419202 - RNA, 19 nt, Homo sapiens
  misc_RNA (1)...(19): siRNA sense strand
gaugcaagguagcaguuuu

SEQ ID NO: 1419203 - RNA, 19 nt, Homo sapiens
  misc_RNA (1)...(19): siRNA sense strand
ggaaauaauucacucacaa

SEQ ID NO: 1419204 - RNA, 19 nt, Homo sapiens
  misc_RNA (1)...(19): siRNA sense strand
gcaacaagcuacagccuau

SEQ ID NO: 1419205 - RNA, 19 nt, Homo sapiens
  misc_RNA (1)...(19): siRNA sense strand
uauaggagaugguguagaa

SEQ ID NO: 1419206 - RNA, 19 nt, Homo sapiens
  misc_RNA (1)...(19): siRNA sense strand
gaagguggauugucacagu

SEQ ID NO: 1419207 - RNA, 19 nt, Homo sapiens
  misc_RNA (1)...(19): siRNA sense strand
caacacccauuaaagauuc

SEQ ID NO: 1419208 - RNA, 19 nt, Homo sapiens
  misc_RNA (1)...(19): siRNA sense strand
gaagaaaagugguguaugu

SEQ ID NO: 1419209 - RNA, 19 nt, Homo sapiens
  misc_RNA (1)...(19): siRNA sense strand
ggacaaacugugugaauau

SEQ ID NO: 1419210 - RNA, 19 nt, Homo sapiens
  misc_RNA (1)...(19): siRNA sense strand
cgacgggucuuuaaacaau

SEQ ID NO: 1419211 - RNA, 19 nt, Homo sapiens
  misc_RNA (1)...(19): siRNA sense strand
gacaggaccuaagcacaua

SEQ ID NO: 1419212 - RNA, 19 nt, Homo sapiens
  misc_RNA (1)...(19): siRNA sense strand
ccaaugagcagcagugaaa

SEQ ID NO: 1419213 - RNA, 19 nt, Homo sapiens
  misc_RNA (1)...(19): siRNA sense strand
ggacagacaggauuucuca

SEQ ID NO: 1419214 - RNA, 19 nt, Homo sapiens
  misc_RNA (1)...(19): siRNA sense strand
aaagaaagcuguuuugaga

SEQ ID NO: 1419215 - RNA, 19 nt, Homo sapiens
  misc_RNA (1)...(19): siRNA sense strand
ccauauagaugauguuucu

SEQ ID NO: 1419216 - RNA, 19 nt, Homo sapiens
  misc_RNA (1)...(19): siRNA sense strand
caucaacacccauuaaaga

SEQ ID NO: 1419217 - RNA, 19 nt, Homo sapiens
  misc_RNA (1)...(19): siRNA sense strand
gacaaacugugugaauauu

SEQ ID NO: 1419218 - RNA, 19 nt, Homo sapiens
  misc_RNA (1)...(19): siRNA sense strand
uagaugauguuucuucaga

SEQ ID NO: 1419219 - RNA, 19 nt, Homo sapiens
  misc_RNA (1)...(19): siRNA sense strand
ggacuuggaugagacaauc

SEQ ID NO: 1419220 - RNA, 19 nt, Homo sapiens
  misc_RNA (1)...(19): siRNA sense strand
gcaauugggagcaguaguu

SEQ ID NO: 1419221 - RNA, 19 nt, Homo sapiens
  misc_RNA (1)...(19): siRNA sense strand
gaugauguuucuucagaug

SEQ ID NO: 1419222 - RNA, 19 nt, Homo sapiens
  misc_RNA (1)...(19): siRNA sense strand
gauuuacccuuccaacaga

SEQ ID NO: 1419223 - RNA, 19 nt, Homo sapiens
  misc_RNA (1)...(19): siRNA sense strand
guacggcauuuccucauau

SEQ ID NO: 1419224 - RNA, 19 nt, Homo sapiens
  misc_RNA (1)...(19): siRNA sense strand
ggaacuggaguaccuguaa

SEQ ID NO: 1419225 - RNA, 19 nt, Homo sapiens
  misc_RNA (1)...(19): siRNA sense strand
cgaaaguccugcuguaugg

SEQ ID NO: 1419226 - RNA, 19 nt, Homo sapiens
  misc_RNA (1)...(19): siRNA sense strand
uauaacagcucaccguauc

SEQ ID NO: 1419227 - RNA, 19 nt, Homo sapiens
  misc_RNA (1)...(19): siRNA sense strand
cggacaaacugugugaaua

SEQ ID NO: 1419228 - RNA, 19 nt, Homo sapiens
  misc_RNA (1)...(19): siRNA sense strand
gagaugguguagaagaaga

SEQ ID NO: 1419229 - RNA, 19 nt, Homo sapiens
  misc_RNA (1)...(19): siRNA sense strand
gguguggacuggaugagaa

SEQ ID NO: 1419230 - RNA, 19 nt, Homo sapiens
  misc_RNA (1)...(19): siRNA sense strand
gacaggauuucucagcuau

SEQ ID NO: 1419231 - RNA, 19 nt, Homo sapiens
  misc_RNA (1)...(19): siRNA sense strand
aaagugguguauguuguua

SEQ ID NO: 1419232 - RNA, 19 nt, Homo sapiens
  misc_RNA (1)...(19): siRNA sense strand
caccguauccagcacauua

SEQ ID NO: 1419233 - RNA, 19 nt, Homo sapiens
  misc_RNA (1)...(19): siRNA sense strand
gacugaagguggauuguca

SEQ ID NO: 1419234 - RNA, 19 nt, Homo sapiens
  misc_RNA (1)...(19): siRNA sense strand
ccuaagcacauauaacuuu

SEQ ID NO: 1419235 - RNA, 19 nt, Homo sapiens
  misc_RNA (1)...(19): siRNA sense strand
ggacaggaccuaagcacau

SEQ ID NO: 1419236 - RNA, 19 nt, Homo sapiens
  misc_RNA (1)...(19): siRNA sense strand
ucaggaauauauacaggaa

SEQ ID NO: 1419237 - RNA, 19 nt, Homo sapiens
  misc_RNA (1)...(19): siRNA sense strand
ccacuuaccagcuucaaga

SEQ ID NO: 1419238 - RNA, 19 nt, Homo sapiens
  misc_RNA (1)...(19): siRNA sense strand
gaaaagugguguauguugu

SEQ ID NO: 1419239 - RNA, 19 nt, Homo sapiens
  misc_RNA (1)...(19): siRNA sense strand
agacaggauuucucagcua

SEQ ID NO: 1419240 - RNA, 19 nt, Homo sapiens
  misc_RNA (1)...(19): siRNA sense strand
caacagaccauacccacau

SEQ ID NO: 1419241 - RNA, 19 nt, Homo sapiens
  misc_RNA (1)...(19): siRNA sense strand
gguccuacgccaacagaua

SEQ ID NO: 1419242 - RNA, 19 nt, Homo sapiens
  misc_RNA (1)...(19): siRNA sense strand
uacaacaucaucaggaaua

SEQ ID NO: 1419243 - RNA, 19 nt, Homo sapiens
  misc_RNA (1)...(19): siRNA sense strand
gaccuaagcacauauaacu

SEQ ID NO: 1419244 - RNA, 19 nt, Homo sapiens
  misc_RNA (1)...(19): siRNA sense strand
gucaguacgcacaguauua

SEQ ID NO: 1419245 - RNA, 19 nt, Homo sapiens
  misc_RNA (1)...(19): siRNA sense strand
cguacggcauuuccucaua

SEQ ID NO: 1419246 - RNA, 19 nt, Homo sapiens
  misc_RNA (1)...(19): siRNA sense strand
gcaguugagggccgaaauu

SEQ ID NO: 1419247 - RNA, 19 nt, Homo sapiens
  misc_RNA (1)...(19): siRNA sense strand
gaucuacaacaccuacaaa

SEQ ID NO: 1419248 - RNA, 19 nt, Homo sapiens
  misc_RNA (1)...(19): siRNA sense strand
gcaggacuauccgucuuau

SEQ ID NO: 1419249 - RNA, 19 nt, Homo sapiens
  misc_RNA (1)...(19): siRNA sense strand
ucacaaauuccucuggauu

SEQ ID NO: 1419250 - RNA, 19 nt, Homo sapiens
  misc_RNA (1)...(19): siRNA sense strand
caacaucaucaggaauaua

SEQ ID NO: 1419251 - RNA, 19 nt, Homo sapiens
  misc_RNA (1)...(19): siRNA sense strand
gaccaaguccauauagaug

SEQ ID NO: 1419252 - RNA, 19 nt, Homo sapiens
  misc_RNA (1)...(19): siRNA sense strand
aaagcacucucgcucauuc

SEQ ID NO: 1419253 - RNA, 19 nt, Homo sapiens
  misc_RNA (1)...(19): siRNA sense strand
ugaaagcacucucgcucau

SEQ ID NO: 1419254 - RNA, 19 nt, Homo sapiens
  misc_RNA (1)...(19): siRNA sense strand
cuaagcacauauaacuuug

SEQ ID NO: 1419255 - RNA, 19 nt, Homo sapiens
  misc_RNA (1)...(19): siRNA sense strand
gauguuucuucagaugaua

SEQ ID NO: 1419256 - RNA, 19 nt, Homo sapiens
  misc_RNA (1)...(19): siRNA sense strand
gaaugugaccaaguccaua

SEQ ID NO: 1419257 - RNA, 19 nt, Homo sapiens
  misc_RNA (1)...(19): siRNA sense strand
gcgaaaguccugcuguaug

SEQ ID NO: 1419258 - RNA, 19 nt, Homo sapiens
  misc_RNA (1)...(19): siRNA sense strand
gaaagcacucucgcucauu

SEQ ID NO: 1419259 - RNA, 19 nt, Homo sapiens
  misc_RNA (1)...(19): siRNA sense strand
guugagggccgaaauugaa

SEQ ID NO: 1419260 - RNA, 19 nt, Homo sapiens
  misc_RNA (1)...(19): siRNA sense strand
uaacuuauguuuggcaacu

SEQ ID NO: 1419261 - RNA, 19 nt, Homo sapiens
  misc_RNA (1)...(19): siRNA sense strand
cauauaacuuuggaacaga

SEQ ID NO: 1419262 - RNA, 19 nt, Homo sapiens
  misc_RNA (1)...(19): siRNA sense strand
uggcgaaaguccugcugua

SEQ ID NO: 1419263 - RNA, 19 nt, Homo sapiens
  misc_RNA (1)...(19): siRNA sense strand
agugguguauguuguuaua

SEQ ID NO: 1419264 - RNA, 19 nt, Homo sapiens
  misc_RNA (1)...(19): siRNA sense strand
gaccauacccacauauucu

SEQ ID NO: 1419265 - RNA, 19 nt, Homo sapiens
  misc_RNA (1)...(19): siRNA sense strand
ccaaguccauauagaugau

SEQ ID NO: 1419266 - RNA, 19 nt, Homo sapiens
  misc_RNA (1)...(19): siRNA sense strand
cgaagaaacaauaauccuu

SEQ ID NO: 1419267 - RNA, 19 nt, Homo sapiens
  misc_RNA (1)...(19): siRNA sense strand
uuucucagguucagcaauu

SEQ ID NO: 1419268 - RNA, 19 nt, Homo sapiens
  misc_RNA (1)...(19): siRNA sense strand
ucagucaccuggacagaca

SEQ ID NO: 1419269 - RNA, 19 nt, Homo sapiens
  misc_RNA (1)...(19): siRNA sense strand
caaugccacuuaccagcuu

SEQ ID NO: 1419270 - RNA, 19 nt, Homo sapiens
  misc_RNA (1)...(19): siRNA sense strand
gguguauguuguuauagga

SEQ ID NO: 1419271 - RNA, 19 nt, Homo sapiens
  misc_RNA (1)...(19): siRNA sense strand
ccagugcuaacuuauguuu

SEQ ID NO: 1419272 - RNA, 19 nt, Homo sapiens
  misc_RNA (1)...(19): siRNA sense strand
uaaaagagaucuacaacac

SEQ ID NO: 1419273 - RNA, 19 nt, Homo sapiens
  misc_RNA (1)...(19): siRNA sense strand
cagcaggacuauccgucuu

SEQ ID NO: 1419274 - RNA, 19 nt, Homo sapiens
  misc_RNA (1)...(19): siRNA sense strand
aaccagugcuaacuuaugu

SEQ ID NO: 1419275 - RNA, 19 nt, Homo sapiens
  misc_RNA (1)...(19): siRNA sense strand
caacgacaccauccaccaa

SEQ ID NO: 1419276 - RNA, 19 nt, Homo sapiens
  misc_RNA (1)...(19): siRNA sense strand
caaccagugcuaacuuaug

SEQ ID NO: 1419277 - RNA, 19 nt, Homo sapiens
  misc_RNA (1)...(19): siRNA sense strand
ucaacacccauuaaagauu

SEQ ID NO: 1419278 - RNA, 19 nt, Homo sapiens
  misc_RNA (1)...(19): siRNA sense strand
gccgacgggucuuuaaaca

SEQ ID NO: 1419279 - RNA, 19 nt, Homo sapiens
  misc_RNA (1)...(19): siRNA sense strand
ccucuggauuuaauaguuc

SEQ ID NO: 1419280 - RNA, 19 nt, Homo sapiens
  misc_RNA (1)...(19): siRNA sense strand
gugaccaaguccauauaga

SEQ ID NO: 1419281 - RNA, 19 nt, Homo sapiens
  misc_RNA (1)...(19): siRNA sense strand
gcccaucaacacccauuaa

SEQ ID NO: 1419282 - RNA, 19 nt, Homo sapiens
  misc_RNA (1)...(19): siRNA sense strand
gacaggcaccauacagcua

SEQ ID NO: 1419283 - RNA, 19 nt, Homo sapiens
  misc_RNA (1)...(19): siRNA sense strand
gacgggucuuuaaacaauu

SEQ ID NO: 1419284 - RNA, 19 nt, Homo sapiens
  misc_RNA (1)...(19): siRNA sense strand
gguugacacuggcccugaa

SEQ ID NO: 1419285 - RNA, 19 nt, Homo sapiens
  misc_RNA (1)...(19): siRNA sense strand
aagcacauauaacuuugga

SEQ ID NO: 1419286 - RNA, 19 nt, Homo sapiens
  misc_RNA (1)...(19): siRNA sense strand
caagguagcaguuuuacaa

SEQ ID NO: 1419287 - RNA, 19 nt, Homo sapiens
  misc_RNA (1)...(19): siRNA sense strand
gauaacggacaggaccuaa

SEQ ID NO: 1419288 - RNA, 19 nt, Homo sapiens
  misc_RNA (1)...(19): siRNA sense strand
gaagaagaacaaggagcaa

SEQ ID NO: 1419289 - RNA, 19 nt, Homo sapiens
  misc_RNA (1)...(19): siRNA sense strand
aacagaccauacccacaua

SEQ ID NO: 1419290 - RNA, 19 nt, Homo sapiens
  misc_RNA (1)...(19): siRNA sense strand
gcaaccagugcuaacuuau

SEQ ID NO: 1419291 - RNA, 19 nt, Homo sapiens
  misc_RNA (1)...(19): siRNA sense strand
ccacagauuuacccuucca

SEQ ID NO: 1419292 - RNA, 19 nt, Homo sapiens
  misc_RNA (1)...(19): siRNA sense strand
ggucaguacgcacaguauu

SEQ ID NO: 1419293 - RNA, 19 nt, Homo sapiens
  misc_RNA (1)...(19): siRNA sense strand
aggagaugguguagaagaa

SEQ ID NO: 1419294 - RNA, 19 nt, Homo sapiens
  misc_RNA (1)...(19): siRNA sense strand
uggguuaggaauuguauuu

SEQ ID NO: 1419295 - RNA, 19 nt, Homo sapiens
  misc_RNA (1)...(19): siRNA sense strand
ggacuggaugagaaaguug

SEQ ID NO: 1419296 - RNA, 19 nt, Homo sapiens
  misc_RNA (1)...(19): siRNA sense strand
acauauaacuuuggaacag

SEQ ID NO: 1419297 - RNA, 19 nt, Homo sapiens
  misc_RNA (1)...(19): siRNA sense strand
ugaccaaguccauauagau

SEQ ID NO: 1419298 - RNA, 19 nt, Homo sapiens
  misc_RNA (1)...(19): siRNA sense strand
cauccaccaaugccacuua

SEQ ID NO: 1419299 - RNA, 19 nt, Homo sapiens
  misc_RNA (1)...(19): siRNA sense strand
cauaugggcaaacacaguu

SEQ ID NO: 1419300 - RNA, 19 nt, Homo sapiens
  misc_RNA (1)...(19): siRNA sense strand
auucugaucuugagagagu

SEQ ID NO: 1419301 - RNA, 19 nt, Homo sapiens
  misc_RNA (1)...(19): siRNA sense strand
gcauaugggcaaacacagu

SEQ ID NO: 1419302 - RNA, 19 nt, Homo sapiens
  misc_RNA (1)...(19): siRNA sense strand
gaugcaagguagcaguuuu

SEQ ID NO: 1419303 - RNA, 19 nt, Homo sapiens
  misc_RNA (1)...(19): siRNA sense strand
ggaaauaauucacucacaa

SEQ ID NO: 1419304 - RNA, 19 nt, Homo sapiens
  misc_RNA (1)...(19): siRNA sense strand
gcaacaagcuacagccuau

SEQ ID NO: 1419305 - RNA, 19 nt, Homo sapiens
  misc_RNA (1)...(19): siRNA sense strand
uauaggagaugguguagaa

SEQ ID NO: 1419306 - RNA, 19 nt, Homo sapiens
  misc_RNA (1)...(19): siRNA sense strand
gaagguggauugucacagu

SEQ ID NO: 1419307 - RNA, 19 nt, Homo sapiens
  misc_RNA (1)...(19): siRNA sense strand
caacacccauuaaagauuc

SEQ ID NO: 1419308 - RNA, 19 nt, Homo sapiens
  misc_RNA (1)...(19): siRNA sense strand
gaagaaaagugguguaugu

SEQ ID NO: 1419309 - RNA, 19 nt, Homo sapiens
  misc_RNA (1)...(19): siRNA sense strand
ggacaaacugugugaauau

SEQ ID NO: 1419310 - RNA, 19 nt, Homo sapiens
  misc_RNA (1)...(19): siRNA sense strand
cgacgggucuuuaaacaau

SEQ ID NO: 1419311 - RNA, 19 nt, Homo sapiens
  misc_RNA (1)...(19): siRNA sense strand
gacaggaccuaagcacaua

SEQ ID NO: 1419312 - RNA, 19 nt, Homo sapiens
  misc_RNA (1)...(19): siRNA sense strand
ccaaugagcagcagugaaa

SEQ ID NO: 1419313 - RNA, 19 nt, Homo sapiens
  misc_RNA (1)...(19): siRNA sense strand
ggacagacaggauuucuca

SEQ ID NO: 1419314 - RNA, 19 nt, Homo sapiens
  misc_RNA (1)...(19): siRNA sense strand
aaagaaagcuguuuugaga

SEQ ID NO: 1419315 - RNA, 19 nt, Homo sapiens
  misc_RNA (1)...(19): siRNA sense strand
ccauauagaugauguuucu

SEQ ID NO: 1419316 - RNA, 19 nt, Homo sapiens
  misc_RNA (1)...(19): siRNA sense strand
caucaacacccauuaaaga

SEQ ID NO: 1419317 - RNA, 19 nt, Homo sapiens
  misc_RNA (1)...(19): siRNA sense strand
gacaaacugugugaauauu

SEQ ID NO: 1419318 - RNA, 19 nt, Homo sapiens
  misc_RNA (1)...(19): siRNA sense strand
uagaugauguuucuucaga

SEQ ID NO: 1419319 - RNA, 19 nt, Homo sapiens
  misc_RNA (1)...(19): siRNA sense strand
ggacuuggaugagacaauc

SEQ ID NO: 1419320 - RNA, 19 nt, Homo sapiens
  misc_RNA (1)...(19): siRNA sense strand
gcaauugggagcaguaguu

SEQ ID NO: 1419321 - RNA, 19 nt, Homo sapiens
  misc_RNA (1)...(19): siRNA sense strand
gaugauguuucuucagaug

SEQ ID NO: 1419322 - RNA, 19 nt, Homo sapiens
  misc_RNA (1)...(19): siRNA sense strand
gauuuacccuuccaacaga

SEQ ID NO: 1419323 - RNA, 19 nt, Homo sapiens
  misc_RNA (1)...(19): siRNA sense strand
guacggcauuuccucauau

SEQ ID NO: 1419324 - RNA, 19 nt, Homo sapiens
  misc_RNA (1)...(19): siRNA sense strand
ggaacuggaguaccuguaa

SEQ ID NO: 1419325 - RNA, 19 nt, Homo sapiens
  misc_RNA (1)...(19): siRNA sense strand
cgaaaguccugcuguaugg

SEQ ID NO: 1419326 - RNA, 19 nt, Homo sapiens
  misc_RNA (1)...(19): siRNA sense strand
uauaacagcucaccguauc

SEQ ID NO: 1419327 - RNA, 19 nt, Homo sapiens
  misc_RNA (1)...(19): siRNA sense strand
cggacaaacugugugaaua

SEQ ID NO: 1419328 - RNA, 19 nt, Homo sapiens
  misc_RNA (1)...(19): siRNA sense strand
gagaugguguagaagaaga

SEQ ID NO: 1419329 - RNA, 19 nt, Homo sapiens
  misc_RNA (1)...(19): siRNA sense strand
gguguggacuggaugagaa

SEQ ID NO: 1419330 - RNA, 19 nt, Homo sapiens
  misc_RNA (1)...(19): siRNA sense strand
gacaggauuucucagcuau

SEQ ID NO: 1419331 - RNA, 19 nt, Homo sapiens
  misc_RNA (1)...(19): siRNA sense strand
aaagugguguauguuguua

SEQ ID NO: 1419332 - RNA, 19 nt, Homo sapiens
  misc_RNA (1)...(19): siRNA sense strand
caccguauccagcacauua

SEQ ID NO: 1419333 - RNA, 19 nt, Homo sapiens
  misc_RNA (1)...(19): siRNA sense strand
gacugaagguggauuguca

SEQ ID NO: 1419334 - RNA, 19 nt, Homo sapiens
  misc_RNA (1)...(19): siRNA sense strand
ccuaagcacauauaacuuu

SEQ ID NO: 1419335 - RNA, 19 nt, Homo sapiens
  misc_RNA (1)...(19): siRNA sense strand
ggacaggaccuaagcacau

SEQ ID NO: 1419336 - RNA, 19 nt, Homo sapiens
  misc_RNA (1)...(19): siRNA sense strand
ucaggaauauauacaggaa

SEQ ID NO: 1419337 - RNA, 19 nt, Homo sapiens
  misc_RNA (1)...(19): siRNA sense strand
ccacuuaccagcuucaaga

SEQ ID NO: 1419338 - RNA, 19 nt, Homo sapiens
  misc_RNA (1)...(19): siRNA sense strand
gaaaagugguguauguugu

SEQ ID NO: 1419339 - RNA, 19 nt, Homo sapiens
  misc_RNA (1)...(19): siRNA sense strand
agacaggauuucucagcua

SEQ ID NO: 1419340 - RNA, 19 nt, Homo sapiens
  misc_RNA (1)...(19): siRNA sense strand
caacagaccauacccacau

SEQ ID NO: 1419341 - RNA, 19 nt, Homo sapiens
  misc_RNA (1)...(19): siRNA sense strand
gguccuacgccaacagaua

SEQ ID NO: 1419342 - RNA, 19 nt, Homo sapiens
  misc_RNA (1)...(19): siRNA sense strand
uacaacaucaucaggaaua

SEQ ID NO: 1419343 - RNA, 19 nt, Homo sapiens
  misc_RNA (1)...(19): siRNA sense strand
gaccuaagcacauauaacu

SEQ ID NO: 1419344 - RNA, 19 nt, Homo sapiens
  misc_RNA (1)...(19): siRNA sense strand
gucaguacgcacaguauua

SEQ ID NO: 1419345 - RNA, 19 nt, Homo sapiens
  misc_RNA (1)...(19): siRNA sense strand
cguacggcauuuccucaua

SEQ ID NO: 1419346 - RNA, 19 nt, Homo sapiens
  misc_RNA (1)...(19): siRNA sense strand
gcaguugagggccgaaauu

SEQ ID NO: 1419347 - RNA, 19 nt, Homo sapiens
  misc_RNA (1)...(19): siRNA sense strand
gaucuacaacaccuacaaa

SEQ ID NO: 1419348 - RNA, 19 nt, Homo sapiens
  misc_RNA (1)...(19): siRNA sense strand
gcaggacuauccgucuuau

SEQ ID NO: 1419349 - RNA, 19 nt, Homo sapiens
  misc_RNA (1)...(19): siRNA sense strand
ucacaaauuccucuggauu

SEQ ID NO: 1419350 - RNA, 19 nt, Homo sapiens
  misc_RNA (1)...(19): siRNA sense strand
caacaucaucaggaauaua

SEQ ID NO: 1419351 - RNA, 19 nt, Homo sapiens
  misc_RNA (1)...(19): siRNA sense strand
gaccaaguccauauagaug

SEQ ID NO: 1419352 - RNA, 19 nt, Homo sapiens
  misc_RNA (1)...(19): siRNA sense strand
aaagcacucucgcucauuc

SEQ ID NO: 1419353 - RNA, 19 nt, Homo sapiens
  misc_RNA (1)...(19): siRNA sense strand
ugaaagcacucucgcucau

SEQ ID NO: 1419354 - RNA, 19 nt, Homo sapiens
  misc_RNA (1)...(19): siRNA sense strand
cuaagcacauauaacuuug

SEQ ID NO: 1419355 - RNA, 19 nt, Homo sapiens
  misc_RNA (1)...(19): siRNA sense strand
gauguuucuucagaugaua

SEQ ID NO: 1419356 - RNA, 19 nt, Homo sapiens
  misc_RNA (1)...(19): siRNA sense strand
gaaugugaccaaguccaua

SEQ ID NO: 1419357 - RNA, 19 nt, Homo sapiens
  misc_RNA (1)...(19): siRNA sense strand
gcgaaaguccugcuguaug

SEQ ID NO: 1419358 - RNA, 19 nt, Homo sapiens
  misc_RNA (1)...(19): siRNA sense strand
gaaagcacucucgcucauu

SEQ ID NO: 1419359 - RNA, 19 nt, Homo sapiens
  misc_RNA (1)...(19): siRNA sense strand
guugagggccgaaauugaa

SEQ ID NO: 1419360 - RNA, 19 nt, Homo sapiens
  misc_RNA (1)...(19): siRNA sense strand
uaacuuauguuuggcaacu

SEQ ID NO: 1419361 - RNA, 19 nt, Homo sapiens
  misc_RNA (1)...(19): siRNA sense strand
cauauaacuuuggaacaga

SEQ ID NO: 1419362 - RNA, 19 nt, Homo sapiens
  misc_RNA (1)...(19): siRNA sense strand
uggcgaaaguccugcugua

SEQ ID NO: 1419363 - RNA, 19 nt, Homo sapiens
  misc_RNA (1)...(19): siRNA sense strand
agugguguauguuguuaua

SEQ ID NO: 1419364 - RNA, 19 nt, Homo sapiens
  misc_RNA (1)...(19): siRNA sense strand
gaccauacccacauauucu

SEQ ID NO: 1419365 - RNA, 19 nt, Homo sapiens
  misc_RNA (1)...(19): siRNA sense strand
ccaaguccauauagaugau

SEQ ID NO: 1419366 - RNA, 19 nt, Homo sapiens
  misc_RNA (1)...(19): siRNA sense strand
cgaagaaacaauaauccuu

SEQ ID NO: 1419367 - RNA, 19 nt, Homo sapiens
  misc_RNA (1)...(19): siRNA sense strand
uuucucagguucagcaauu

SEQ ID NO: 1419368 - RNA, 19 nt, Homo sapiens
  misc_RNA (1)...(19): siRNA sense strand
ucagucaccuggacagaca

SEQ ID NO: 1419369 - RNA, 19 nt, Homo sapiens
  misc_RNA (1)...(19): siRNA sense strand
caaugccacuuaccagcuu

SEQ ID NO: 1419370 - RNA, 19 nt, Homo sapiens
  misc_RNA (1)...(19): siRNA sense strand
gguguauguuguuauagga

SEQ ID NO: 1419371 - RNA, 19 nt, Homo sapiens
  misc_RNA (1)...(19): siRNA sense strand
ccagugcuaacuuauguuu

SEQ ID NO: 1419372 - RNA, 19 nt, Homo sapiens
  misc_RNA (1)...(19): siRNA sense strand
uaaaagagaucuacaacac

SEQ ID NO: 1419373 - RNA, 19 nt, Homo sapiens
  misc_RNA (1)...(19): siRNA sense strand
cagcaggacuauccgucuu

SEQ ID NO: 1419374 - RNA, 19 nt, Homo sapiens
  misc_RNA (1)...(19): siRNA sense strand
aaccagugcuaacuuaugu

SEQ ID NO: 1419375 - RNA, 19 nt, Homo sapiens
  misc_RNA (1)...(19): siRNA sense strand
caacgacaccauccaccaa

SEQ ID NO: 1419376 - RNA, 19 nt, Homo sapiens
  misc_RNA (1)...(19): siRNA sense strand
caaccagugcuaacuuaug

SEQ ID NO: 1419377 - RNA, 19 nt, Homo sapiens
  misc_RNA (1)...(19): siRNA sense strand
ucaacacccauuaaagauu

SEQ ID NO: 1419378 - RNA, 19 nt, Homo sapiens
  misc_RNA (1)...(19): siRNA sense strand
gccgacgggucuuuaaaca

SEQ ID NO: 1419379 - RNA, 19 nt, Homo sapiens
  misc_RNA (1)...(19): siRNA sense strand
ccucuggauuuaauaguuc

SEQ ID NO: 1419380 - RNA, 19 nt, Homo sapiens
  misc_RNA (1)...(19): siRNA sense strand
gugaccaaguccauauaga

SEQ ID NO: 1419381 - RNA, 19 nt, Homo sapiens
  misc_RNA (1)...(19): siRNA sense strand
gcccaucaacacccauuaa

SEQ ID NO: 1419382 - RNA, 19 nt, Homo sapiens
  misc_RNA (1)...(19): siRNA sense strand
gacaggcaccauacagcua

SEQ ID NO: 1419383 - RNA, 19 nt, Homo sapiens
  misc_RNA (1)...(19): siRNA sense strand
gacgggucuuuaaacaauu

SEQ ID NO: 1419384 - RNA, 19 nt, Homo sapiens
  misc_RNA (1)...(19): siRNA sense strand
gguugacacuggcccugaa

SEQ ID NO: 1419385 - RNA, 19 nt, Homo sapiens
  misc_RNA (1)...(19): siRNA sense strand
aagcacauauaacuuugga

SEQ ID NO: 1419386 - RNA, 19 nt, Homo sapiens
  misc_RNA (1)...(19): siRNA sense strand
caagguagcaguuuuacaa

SEQ ID NO: 1419387 - RNA, 19 nt, Homo sapiens
  misc_RNA (1)...(19): siRNA sense strand
gauaacggacaggaccuaa

SEQ ID NO: 1419388 - RNA, 19 nt, Homo sapiens
  misc_RNA (1)...(19): siRNA sense strand
gaagaagaacaaggagcaa

SEQ ID NO: 1419389 - RNA, 19 nt, Homo sapiens
  misc_RNA (1)...(19): siRNA sense strand
aacagaccauacccacaua

SEQ ID NO: 1419390 - RNA, 19 nt, Homo sapiens
  misc_RNA (1)...(19): siRNA sense strand
gcaaccagugcuaacuuau

SEQ ID NO: 1419391 - RNA, 19 nt, Homo sapiens
  misc_RNA (1)...(19): siRNA sense strand
ccacagauuuacccuucca

SEQ ID NO: 1419392 - RNA, 19 nt, Homo sapiens
  misc_RNA (1)...(19): siRNA sense strand
ggucaguacgcacaguauu

SEQ ID NO: 1419393 - RNA, 19 nt, Homo sapiens
  misc_RNA (1)...(19): siRNA sense strand
aggagaugguguagaagaa

SEQ ID NO: 1419394 - RNA, 19 nt, Homo sapiens
  misc_RNA (1)...(19): siRNA sense strand
uggguuaggaauuguauuu

SEQ ID NO: 1419395 - RNA, 19 nt, Homo sapiens
  misc_RNA (1)...(19): siRNA sense strand
ggacuggaugagaaaguug

SEQ ID NO: 1419396 - RNA, 19 nt, Homo sapiens
  misc_RNA (1)...(19): siRNA sense strand
acauauaacuuuggaacag

SEQ ID NO: 1419397 - RNA, 19 nt, Homo sapiens
  misc_RNA (1)...(19): siRNA sense strand
ugaccaaguccauauagau

SEQ ID NO: 1419398 - RNA, 19 nt, Homo sapiens
  misc_RNA (1)...(19): siRNA sense strand
cauccaccaaugccacuua

SEQ ID NO: 1419399 - RNA, 19 nt, Homo sapiens
  misc_RNA (1)...(19): siRNA sense strand
cauaugggcaaacacaguu

SEQ ID NO: 1419400 - RNA, 19 nt, Homo sapiens
  misc_RNA (1)...(19): siRNA sense strand
auucugaucuugagagagu

SEQ ID NO: 1419401 - RNA, 19 nt, Homo sapiens
  misc_RNA (1)...(19): siRNA sense strand
gcauaugggcaaacacagu

SEQ ID NO: 1419402 - RNA, 19 nt, Homo sapiens
  misc_RNA (1)...(19): siRNA sense strand
gaugcaagguagcaguuuu

SEQ ID NO: 1419403 - RNA, 19 nt, Homo sapiens
  misc_RNA (1)...(19): siRNA sense strand
ggaaauaauucacucacaa

SEQ ID NO: 1419404 - RNA, 19 nt, Homo sapiens
  misc_RNA (1)...(19): siRNA sense strand
gcaacaagcuacagccuau

SEQ ID NO: 1419405 - RNA, 19 nt, Homo sapiens
  misc_RNA (1)...(19): siRNA sense strand
uauaggagaugguguagaa

SEQ ID NO: 1419406 - RNA, 19 nt, Homo sapiens
  misc_RNA (1)...(19): siRNA sense strand
gaagguggauugucacagu

SEQ ID NO: 1419407 - RNA, 19 nt, Homo sapiens
  misc_RNA (1)...(19): siRNA sense strand
caacacccauuaaagauuc

SEQ ID NO: 1419408 - RNA, 19 nt, Homo sapiens
  misc_RNA (1)...(19): siRNA sense strand
gaagaaaagugguguaugu

SEQ ID NO: 1419409 - RNA, 19 nt, Homo sapiens
  misc_RNA (1)...(19): siRNA sense strand
ggacaaacugugugaauau

SEQ ID NO: 1419410 - RNA, 19 nt, Homo sapiens
  misc_RNA (1)...(19): siRNA sense strand
cgacgggucuuuaaacaau

SEQ ID NO: 1419411 - RNA, 19 nt, Homo sapiens
  misc_RNA (1)...(19): siRNA sense strand
ccaaugagcagcagugaaa

SEQ ID NO: 1419412 - RNA, 19 nt, Homo sapiens
  misc_RNA (1)...(19): siRNA sense strand
gacaggaccuaagcacaua

SEQ ID NO: 1419413 - RNA, 19 nt, Homo sapiens
  misc_RNA (1)...(19): siRNA sense strand
ggacagacaggauuucuca

SEQ ID NO: 1419414 - RNA, 19 nt, Homo sapiens
  misc_RNA (1)...(19): siRNA sense strand
aaagaaagcuguuuugaga

SEQ ID NO: 1419415 - RNA, 19 nt, Homo sapiens
  misc_RNA (1)...(19): siRNA sense strand
ccauauagaugauguuucu

SEQ ID NO: 1419416 - RNA, 19 nt, Homo sapiens
  misc_RNA (1)...(19): siRNA sense strand
caucaacacccauuaaaga

SEQ ID NO: 1419417 - RNA, 19 nt, Homo sapiens
  misc_RNA (1)...(19): siRNA sense strand
gacaaacugugugaauauu

SEQ ID NO: 1419418 - RNA, 19 nt, Homo sapiens
  misc_RNA (1)...(19): siRNA sense strand
uagaugauguuucuucaga

SEQ ID NO: 1419419 - RNA, 19 nt, Homo sapiens
  misc_RNA (1)...(19): siRNA sense strand
ggacuuggaugagacaauc

SEQ ID NO: 1419420 - RNA, 19 nt, Homo sapiens
  misc_RNA (1)...(19): siRNA sense strand
gcaauugggagcaguaguu

SEQ ID NO: 1419421 - RNA, 19 nt, Homo sapiens
  misc_RNA (1)...(19): siRNA sense strand
gaugauguuucuucagaug

SEQ ID NO: 1419422 - RNA, 19 nt, Homo sapiens
  misc_RNA (1)...(19): siRNA sense strand
gauuuacccuuccaacaga

SEQ ID NO: 1419423 - RNA, 19 nt, Homo sapiens
  misc_RNA (1)...(19): siRNA sense strand
guacggcauuuccucauau

SEQ ID NO: 1419424 - RNA, 19 nt, Homo sapiens
  misc_RNA (1)...(19): siRNA sense strand
ggaacuggaguaccuguaa

SEQ ID NO: 1419425 - RNA, 19 nt, Homo sapiens
  misc_RNA (1)...(19): siRNA sense strand
cgaaaguccugcuguaugg

SEQ ID NO: 1419426 - RNA, 19 nt, Homo sapiens
  misc_RNA (1)...(19): siRNA sense strand
uauaacagcucaccguauc

SEQ ID NO: 1419427 - RNA, 19 nt, Homo sapiens
  misc_RNA (1)...(19): siRNA sense strand
cggacaaacugugugaaua

SEQ ID NO: 1419428 - RNA, 19 nt, Homo sapiens
  misc_RNA (1)...(19): siRNA sense strand
gagaugguguagaagaaga

SEQ ID NO: 1419429 - RNA, 19 nt, Homo sapiens
  misc_RNA (1)...(19): siRNA sense strand
gguguggacuggaugagaa

SEQ ID NO: 1419430 - RNA, 19 nt, Homo sapiens
  misc_RNA (1)...(19): siRNA sense strand
gacaggauuucucagcuau

SEQ ID NO: 1419431 - RNA, 19 nt, Homo sapiens
  misc_RNA (1)...(19): siRNA sense strand
aaagugguguauguuguua

SEQ ID NO: 1419432 - RNA, 19 nt, Homo sapiens
  misc_RNA (1)...(19): siRNA sense strand
caccguauccagcacauua

SEQ ID NO: 1419433 - RNA, 19 nt, Homo sapiens
  misc_RNA (1)...(19): siRNA sense strand
gacugaagguggauuguca

SEQ ID NO: 1419434 - RNA, 19 nt, Homo sapiens
  misc_RNA (1)...(19): siRNA sense strand
ccuaagcacauauaacuuu

SEQ ID NO: 1419435 - RNA, 19 nt, Homo sapiens
  misc_RNA (1)...(19): siRNA sense strand
ggacaggaccuaagcacau

SEQ ID NO: 1419436 - RNA, 19 nt, Homo sapiens
  misc_RNA (1)...(19): siRNA sense strand
ucaggaauauauacaggaa

SEQ ID NO: 1419437 - RNA, 19 nt, Homo sapiens
  misc_RNA (1)...(19): siRNA sense strand
ccacuuaccagcuucaaga

SEQ ID NO: 1419438 - RNA, 19 nt, Homo sapiens
  misc_RNA (1)...(19): siRNA sense strand
gaaaagugguguauguugu

SEQ ID NO: 1419439 - RNA, 19 nt, Homo sapiens
  misc_RNA (1)...(19): siRNA sense strand
agacaggauuucucagcua

SEQ ID NO: 1419440 - RNA, 19 nt, Homo sapiens
  misc_RNA (1)...(19): siRNA sense strand
caacagaccauacccacau

SEQ ID NO: 1419441 - RNA, 19 nt, Homo sapiens
  misc_RNA (1)...(19): siRNA sense strand
gguccuacgccaacagaua

SEQ ID NO: 1419442 - RNA, 19 nt, Homo sapiens
  misc_RNA (1)...(19): siRNA sense strand
uacaacaucaucaggaaua

SEQ ID NO: 1419443 - RNA, 19 nt, Homo sapiens
  misc_RNA (1)...(19): siRNA sense strand
gaccuaagcacauauaacu

SEQ ID NO: 1419444 - RNA, 19 nt, Homo sapiens
  misc_RNA (1)...(19): siRNA sense strand
gucaguacgcacaguauua

SEQ ID NO: 1419445 - RNA, 19 nt, Homo sapiens
  misc_RNA (1)...(19): siRNA sense strand
cguacggcauuuccucaua

SEQ ID NO: 1419446 - RNA, 19 nt, Homo sapiens
  misc_RNA (1)...(19): siRNA sense strand
gcaguugagggccgaaauu

SEQ ID NO: 1419447 - RNA, 19 nt, Homo sapiens
  misc_RNA (1)...(19): siRNA sense strand
gaucuacaacaccuacaaa

SEQ ID NO: 1419448 - RNA, 19 nt, Homo sapiens
  misc_RNA (1)...(19): siRNA sense strand
gcaggacuauccgucuuau

SEQ ID NO: 1419449 - RNA, 19 nt, Homo sapiens
  misc_RNA (1)...(19): siRNA sense strand
ucacaaauuccucuggauu

SEQ ID NO: 1419450 - RNA, 19 nt, Homo sapiens
  misc_RNA (1)...(19): siRNA sense strand
caacaucaucaggaauaua

SEQ ID NO: 1419451 - RNA, 19 nt, Homo sapiens
  misc_RNA (1)...(19): siRNA sense strand
gaccaaguccauauagaug

SEQ ID NO: 1419452 - RNA, 19 nt, Homo sapiens
  misc_RNA (1)...(19): siRNA sense strand
aaagcacucucgcucauuc

SEQ ID NO: 1419453 - RNA, 19 nt, Homo sapiens
  misc_RNA (1)...(19): siRNA sense strand
ugaaagcacucucgcucau

SEQ ID NO: 1419454 - RNA, 19 nt, Homo sapiens
  misc_RNA (1)...(19): siRNA sense strand
cuaagcacauauaacuuug

SEQ ID NO: 1419455 - RNA, 19 nt, Homo sapiens
  misc_RNA (1)...(19): siRNA sense strand
gauguuucuucagaugaua

SEQ ID NO: 1419456 - RNA, 19 nt, Homo sapiens
  misc_RNA (1)...(19): siRNA sense strand
gaaugugaccaaguccaua

SEQ ID NO: 1419457 - RNA, 19 nt, Homo sapiens
  misc_RNA (1)...(19): siRNA sense strand
gcgaaaguccugcuguaug

SEQ ID NO: 1419458 - RNA, 19 nt, Homo sapiens
  misc_RNA (1)...(19): siRNA sense strand
gaaagcacucucgcucauu

SEQ ID NO: 1419459 - RNA, 19 nt, Homo sapiens
  misc_RNA (1)...(19): siRNA sense strand
guugagggccgaaauugaa

SEQ ID NO: 1419460 - RNA, 19 nt, Homo sapiens
  misc_RNA (1)...(19): siRNA sense strand
uaacuuauguuuggcaacu

SEQ ID NO: 1419461 - RNA, 19 nt, Homo sapiens
  misc_RNA (1)...(19): siRNA sense strand
cauauaacuuuggaacaga

SEQ ID NO: 1419462 - RNA, 19 nt, Homo sapiens
  misc_RNA (1)...(19): siRNA sense strand
uggcgaaaguccugcugua

SEQ ID NO: 1419463 - RNA, 19 nt, Homo sapiens
  misc_RNA (1)...(19): siRNA sense strand
agugguguauguuguuaua

SEQ ID NO: 1419464 - RNA, 19 nt, Homo sapiens
  misc_RNA (1)...(19): siRNA sense strand
gaccauacccacauauucu

SEQ ID NO: 1419465 - RNA, 19 nt, Homo sapiens
  misc_RNA (1)...(19): siRNA sense strand
uuucucagguucagcaauu

SEQ ID NO: 1419466 - RNA, 19 nt, Homo sapiens
  misc_RNA (1)...(19): siRNA sense strand
ccaaguccauauagaugau

SEQ ID NO: 1419467 - RNA, 19 nt, Homo sapiens
  misc_RNA (1)...(19): siRNA sense strand
cgaagaaacaauaauccuu

SEQ ID NO: 1419468 - RNA, 19 nt, Homo sapiens
  misc_RNA (1)...(19): siRNA sense strand
ucagucaccuggacagaca

SEQ ID NO: 1419469 - RNA, 19 nt, Homo sapiens
  misc_RNA (1)...(19): siRNA sense strand
caaugccacuuaccagcuu

SEQ ID NO: 1419470 - RNA, 19 nt, Homo sapiens
  misc_RNA (1)...(19): siRNA sense strand
gguguauguuguuauagga

SEQ ID NO: 1419471 - RNA, 19 nt, Homo sapiens
  misc_RNA (1)...(19): siRNA sense strand
ccagugcuaacuuauguuu

SEQ ID NO: 1419472 - RNA, 19 nt, Homo sapiens
  misc_RNA (1)...(19): siRNA sense strand
uaaaagagaucuacaacac

SEQ ID NO: 1419473 - RNA, 19 nt, Homo sapiens
  misc_RNA (1)...(19): siRNA sense strand
cagcaggacuauccgucuu

SEQ ID NO: 1419474 - RNA, 19 nt, Homo sapiens
  misc_RNA (1)...(19): siRNA sense strand
aaccagugcuaacuuaugu

SEQ ID NO: 1419475 - RNA, 19 nt, Homo sapiens
  misc_RNA (1)...(19): siRNA sense strand
caacgacaccauccaccaa

SEQ ID NO: 1419476 - RNA, 19 nt, Homo sapiens
  misc_RNA (1)...(19): siRNA sense strand
caaccagugcuaacuuaug

SEQ ID NO: 1419477 - RNA, 19 nt, Homo sapiens
  misc_RNA (1)...(19): siRNA sense strand
gccgacgggucuuuaaaca

SEQ ID NO: 1419478 - RNA, 19 nt, Homo sapiens
  misc_RNA (1)...(19): siRNA sense strand
ucaacacccauuaaagauu

SEQ ID NO: 1419479 - RNA, 19 nt, Homo sapiens
  misc_RNA (1)...(19): siRNA sense strand
ccucuggauuuaauaguuc

SEQ ID NO: 1419480 - RNA, 19 nt, Homo sapiens
  misc_RNA (1)...(19): siRNA sense strand
gugaccaaguccauauaga

SEQ ID NO: 1419481 - RNA, 19 nt, Homo sapiens
  misc_RNA (1)...(19): siRNA sense strand
gcccaucaacacccauuaa

SEQ ID NO: 1419482 - RNA, 19 nt, Homo sapiens
  misc_RNA (1)...(19): siRNA sense strand
gacgggucuuuaaacaauu

SEQ ID NO: 1419483 - RNA, 19 nt, Homo sapiens
  misc_RNA (1)...(19): siRNA sense strand
gguugacacuggcccugaa

SEQ ID NO: 1419484 - RNA, 19 nt, Homo sapiens
  misc_RNA (1)...(19): siRNA sense strand
aagcacauauaacuuugga

SEQ ID NO: 1419485 - RNA, 19 nt, Homo sapiens
  misc_RNA (1)...(19): siRNA sense strand
caagguagcaguuuuacaa

SEQ ID NO: 1419486 - RNA, 19 nt, Homo sapiens
  misc_RNA (1)...(19): siRNA sense strand
gacaggcaccauacagcua

SEQ ID NO: 1419487 - RNA, 19 nt, Homo sapiens
  misc_RNA (1)...(19): siRNA sense strand
aacagaccauacccacaua

SEQ ID NO: 1419488 - RNA, 19 nt, Homo sapiens
  misc_RNA (1)...(19): siRNA sense strand
gaagaagaacaaggagcaa

SEQ ID NO: 1419489 - RNA, 19 nt, Homo sapiens
  misc_RNA (1)...(19): siRNA sense strand
ccacagauuuacccuucca

SEQ ID NO: 1419490 - RNA, 19 nt, Homo sapiens
  misc_RNA (1)...(19): siRNA sense strand
gcaaccagugcuaacuuau

SEQ ID NO: 1419491 - RNA, 19 nt, Homo sapiens
  misc_RNA (1)...(19): siRNA sense strand
gauaacggacaggaccuaa

SEQ ID NO: 1419492 - RNA, 19 nt, Homo sapiens
  misc_RNA (1)...(19): siRNA sense strand
ggucaguacgcacaguauu

SEQ ID NO: 1419493 - RNA, 19 nt, Homo sapiens
  misc_RNA (1)...(19): siRNA sense strand
aggagaugguguagaagaa

SEQ ID NO: 1419494 - RNA, 19 nt, Homo sapiens
  misc_RNA (1)...(19): siRNA sense strand
uggguuaggaauuguauuu

SEQ ID NO: 1419495 - RNA, 19 nt, Homo sapiens
  misc_RNA (1)...(19): siRNA sense strand
ggacuggaugagaaaguug

SEQ ID NO: 1419496 - RNA, 19 nt, Homo sapiens
  misc_RNA (1)...(19): siRNA sense strand
acauauaacuuuggaacag

SEQ ID NO: 1419497 - RNA, 19 nt, Homo sapiens
  misc_RNA (1)...(19): siRNA sense strand
ugaccaaguccauauagau

SEQ ID NO: 1419498 - RNA, 19 nt, Homo sapiens
  misc_RNA (1)...(19): siRNA sense strand
cauccaccaaugccacuua

SEQ ID NO: 1419499 - RNA, 19 nt, Homo sapiens
  misc_RNA (1)...(19): siRNA sense strand
gaugcaagguagcaguuuu

SEQ ID NO: 1419500 - RNA, 19 nt, Homo sapiens
  misc_RNA (1)...(19): siRNA sense strand
gcauaugggcaaacacagu

SEQ ID NO: 1419501 - RNA, 19 nt, Homo sapiens
  misc_RNA (1)...(19): siRNA sense strand
cauaugggcaaacacaguu

SEQ ID NO: 1419502 - RNA, 19 nt, Homo sapiens
  misc_RNA (1)...(19): siRNA sense strand
auucugaucuugagagagu

SEQ ID NO: 1419503 - RNA, 19 nt, Homo sapiens
  misc_RNA (1)...(19): siRNA sense strand
ggaagcaggagaucauuaa

SEQ ID NO: 1419504 - RNA, 19 nt, Homo sapiens
  misc_RNA (1)...(19): siRNA sense strand
caacaacggugacuuugag

SEQ ID NO: 1419505 - RNA, 19 nt, Homo sapiens
  misc_RNA (1)...(19): siRNA sense strand
cagcaggcaugguuugguu

SEQ ID NO: 1419506 - RNA, 19 nt, Homo sapiens
  misc_RNA (1)...(19): siRNA sense strand
gcacgucauuggagaggau

SEQ ID NO: 1419507 - RNA, 19 nt, Homo sapiens
  misc_RNA (1)...(19): siRNA sense strand
cagugaagcuggcagacuu

SEQ ID NO: 1419508 - RNA, 19 nt, Homo sapiens
  misc_RNA (1)...(19): siRNA sense strand
ccaagaucaucaacaccaa

SEQ ID NO: 1419509 - RNA, 19 nt, Homo sapiens
  misc_RNA (1)...(19): siRNA sense strand
gcaagccuguggacaucug

SEQ ID NO: 1419510 - RNA, 19 nt, Homo sapiens
  misc_RNA (1)...(19): siRNA sense strand
caaaggggcugcagugaag

SEQ ID NO: 1419511 - RNA, 19 nt, Homo sapiens
  misc_RNA (1)...(19): siRNA sense strand
uaccagcucuacgaggaua

SEQ ID NO: 1419512 - RNA, 19 nt, Homo sapiens
  misc_RNA (1)...(19): siRNA sense strand
agaaccugcuggccaagaa

SEQ ID NO: 1419513 - RNA, 19 nt, Homo sapiens
  misc_RNA (1)...(19): siRNA sense strand
gaucaucaacaccaagaag

SEQ ID NO: 1419514 - RNA, 19 nt, Homo sapiens
  misc_RNA (1)...(19): siRNA sense strand
cggaagcaggagaucauua

SEQ ID NO: 1419515 - RNA, 19 nt, Homo sapiens
  misc_RNA (1)...(19): siRNA sense strand
cgucacuccugaagccaaa

SEQ ID NO: 1419516 - RNA, 19 nt, Homo sapiens
  misc_RNA (1)...(19): siRNA sense strand
cagccaagaucaucaacac

SEQ ID NO: 1419517 - RNA, 19 nt, Homo sapiens
  misc_RNA (1)...(19): siRNA sense strand
ucaaccagaugcugaccau

SEQ ID NO: 1419518 - RNA, 19 nt, Homo sapiens
  misc_RNA (1)...(19): siRNA sense strand
gcagacuucggccuagcua

SEQ ID NO: 1419519 - RNA, 19 nt, Homo sapiens
  misc_RNA (1)...(19): siRNA sense strand
acauccggcucacgcagua

SEQ ID NO: 1419520 - RNA, 19 nt, Homo sapiens
  misc_RNA (1)...(19): siRNA sense strand
agccagagaucaccagaag

SEQ ID NO: 1419521 - RNA, 19 nt, Homo sapiens
  misc_RNA (1)...(19): siRNA sense strand
ggacgaggaccagcacaag

SEQ ID NO: 1419522 - RNA, 19 nt, Homo sapiens
  misc_RNA (1)...(19): siRNA sense strand
ggacaccgucacuccugaa

SEQ ID NO: 1419523 - RNA, 19 nt, Homo sapiens
  misc_RNA (1)...(19): siRNA sense strand
ccagagaucaccagaagcu

SEQ ID NO: 1419524 - RNA, 19 nt, Homo sapiens
  misc_RNA (1)...(19): siRNA sense strand
gagccauccucaccaccau

SEQ ID NO: 1419525 - RNA, 19 nt, Homo sapiens
  misc_RNA (1)...(19): siRNA sense strand
gcaaaggggcugcagugaa

SEQ ID NO: 1419526 - RNA, 19 nt, Homo sapiens
  misc_RNA (1)...(19): siRNA sense strand
guucuccauugucaccaaa

SEQ ID NO: 1419527 - RNA, 19 nt, Homo sapiens
  misc_RNA (1)...(19): siRNA sense strand
ggucuucgaucuggucacu

SEQ ID NO: 1419528 - RNA, 19 nt, Homo sapiens
  misc_RNA (1)...(19): siRNA sense strand
aagcaggagaucauuaaga

SEQ ID NO: 1419529 - RNA, 19 nt, Homo sapiens
  misc_RNA (1)...(19): siRNA sense strand
gcaggcaugguuugguuuc

SEQ ID NO: 1419530 - RNA, 19 nt, Homo sapiens
  misc_RNA (1)...(19): siRNA sense strand
ccgaggagggcuuccacua

SEQ ID NO: 1419531 - RNA, 19 nt, Homo sapiens
  misc_RNA (1)...(19): siRNA sense strand
ggcagaacgugcacuucca

SEQ ID NO: 1419532 - RNA, 19 nt, Homo sapiens
  misc_RNA (1)...(19): siRNA sense strand
gcaccggccaugaguaugc

SEQ ID NO: 1419533 - RNA, 19 nt, Homo sapiens
  misc_RNA (1)...(19): siRNA sense strand
gaagcaggagaucauuaag

SEQ ID NO: 1419534 - RNA, 19 nt, Homo sapiens
  misc_RNA (1)...(19): siRNA sense strand
caucgaggccgucaacaac

SEQ ID NO: 1419535 - RNA, 19 nt, Homo sapiens
  misc_RNA (1)...(19): siRNA sense strand
uggcaagccuguggacauc

SEQ ID NO: 1419536 - RNA, 19 nt, Homo sapiens
  misc_RNA (1)...(19): siRNA sense strand
gaguaugcagccaagauca

SEQ ID NO: 1419537 - RNA, 19 nt, Homo sapiens
  misc_RNA (1)...(19): siRNA sense strand
gacuguggagugucugaaa

SEQ ID NO: 1419538 - RNA, 19 nt, Homo sapiens
  misc_RNA (1)...(19): siRNA sense strand
gagaaccugcuggccaaga

SEQ ID NO: 1419539 - RNA, 19 nt, Homo sapiens
  misc_RNA (1)...(19): siRNA sense strand
agcaggagaucauuaagac

SEQ ID NO: 1419540 - RNA, 19 nt, Homo sapiens
  misc_RNA (1)...(19): siRNA sense strand
ggaagcaggagaucauuaa

SEQ ID NO: 1419541 - RNA, 19 nt, Homo sapiens
  misc_RNA (1)...(19): siRNA sense strand
caacaacggugacuuugag

SEQ ID NO: 1419542 - RNA, 19 nt, Homo sapiens
  misc_RNA (1)...(19): siRNA sense strand
cagcaggcaugguuugguu

SEQ ID NO: 1419543 - RNA, 19 nt, Homo sapiens
  misc_RNA (1)...(19): siRNA sense strand
gcacgucauuggagaggau

SEQ ID NO: 1419544 - RNA, 19 nt, Homo sapiens
  misc_RNA (1)...(19): siRNA sense strand
cagugaagcuggcagacuu

SEQ ID NO: 1419545 - RNA, 19 nt, Homo sapiens
  misc_RNA (1)...(19): siRNA sense strand
ccaagaucaucaacaccaa

SEQ ID NO: 1419546 - RNA, 19 nt, Homo sapiens
  misc_RNA (1)...(19): siRNA sense strand
gcaagccuguggacaucug

SEQ ID NO: 1419547 - RNA, 19 nt, Homo sapiens
  misc_RNA (1)...(19): siRNA sense strand
caaaggggcugcagugaag

SEQ ID NO: 1419548 - RNA, 19 nt, Homo sapiens
  misc_RNA (1)...(19): siRNA sense strand
uaccagcucuacgaggaua

SEQ ID NO: 1419549 - RNA, 19 nt, Homo sapiens
  misc_RNA (1)...(19): siRNA sense strand
agaaccugcuggccaagaa

SEQ ID NO: 1419550 - RNA, 19 nt, Homo sapiens
  misc_RNA (1)...(19): siRNA sense strand
gaucaucaacaccaagaag

SEQ ID NO: 1419551 - RNA, 19 nt, Homo sapiens
  misc_RNA (1)...(19): siRNA sense strand
cggaagcaggagaucauua

SEQ ID NO: 1419552 - RNA, 19 nt, Homo sapiens
  misc_RNA (1)...(19): siRNA sense strand
cgucacuccugaagccaaa

SEQ ID NO: 1419553 - RNA, 19 nt, Homo sapiens
  misc_RNA (1)...(19): siRNA sense strand
cagccaagaucaucaacac

SEQ ID NO: 1419554 - RNA, 19 nt, Homo sapiens
  misc_RNA (1)...(19): siRNA sense strand
ucaaccagaugcugaccau

SEQ ID NO: 1419555 - RNA, 19 nt, Homo sapiens
  misc_RNA (1)...(19): siRNA sense strand
gcagacuucggccuagcua

SEQ ID NO: 1419556 - RNA, 19 nt, Homo sapiens
  misc_RNA (1)...(19): siRNA sense strand
acauccggcucacgcagua

SEQ ID NO: 1419557 - RNA, 19 nt, Homo sapiens
  misc_RNA (1)...(19): siRNA sense strand
agccagagaucaccagaag

SEQ ID NO: 1419558 - RNA, 19 nt, Homo sapiens
  misc_RNA (1)...(19): siRNA sense strand
ggacgaggaccagcacaag

SEQ ID NO: 1419559 - RNA, 19 nt, Homo sapiens
  misc_RNA (1)...(19): siRNA sense strand
ggacaccgucacuccugaa

SEQ ID NO: 1419560 - RNA, 19 nt, Homo sapiens
  misc_RNA (1)...(19): siRNA sense strand
ccagagaucaccagaagcu

SEQ ID NO: 1419561 - RNA, 19 nt, Homo sapiens
  misc_RNA (1)...(19): siRNA sense strand
gagccauccucaccaccau

SEQ ID NO: 1419562 - RNA, 19 nt, Homo sapiens
  misc_RNA (1)...(19): siRNA sense strand
gcaaaggggcugcagugaa

SEQ ID NO: 1419563 - RNA, 19 nt, Homo sapiens
  misc_RNA (1)...(19): siRNA sense strand
guucuccauugucaccaaa

SEQ ID NO: 1419564 - RNA, 19 nt, Homo sapiens
  misc_RNA (1)...(19): siRNA sense strand
ggucuucgaucuggucacu

SEQ ID NO: 1419565 - RNA, 19 nt, Homo sapiens
  misc_RNA (1)...(19): siRNA sense strand
aagcaggagaucauuaaga

SEQ ID NO: 1419566 - RNA, 19 nt, Homo sapiens
  misc_RNA (1)...(19): siRNA sense strand
gcaggcaugguuugguuuc

SEQ ID NO: 1419567 - RNA, 19 nt, Homo sapiens
  misc_RNA (1)...(19): siRNA sense strand
ccgaggagggcuuccacua

SEQ ID NO: 1419568 - RNA, 19 nt, Homo sapiens
  misc_RNA (1)...(19): siRNA sense strand
ggcagaacgugcacuucca

SEQ ID NO: 1419569 - RNA, 19 nt, Homo sapiens
  misc_RNA (1)...(19): siRNA sense strand
gcaccggccaugaguaugc

SEQ ID NO: 1419570 - RNA, 19 nt, Homo sapiens
  misc_RNA (1)...(19): siRNA sense strand
gaagcaggagaucauuaag

SEQ ID NO: 1419571 - RNA, 19 nt, Homo sapiens
  misc_RNA (1)...(19): siRNA sense strand
caucgaggccgucaacaac

SEQ ID NO: 1419572 - RNA, 19 nt, Homo sapiens
  misc_RNA (1)...(19): siRNA sense strand
uggcaagccuguggacauc

SEQ ID NO: 1419573 - RNA, 19 nt, Homo sapiens
  misc_RNA (1)...(19): siRNA sense strand
gaguaugcagccaagauca

SEQ ID NO: 1419574 - RNA, 19 nt, Homo sapiens
  misc_RNA (1)...(19): siRNA sense strand
gacuguggagugucugaaa

SEQ ID NO: 1419575 - RNA, 19 nt, Homo sapiens
  misc_RNA (1)...(19): siRNA sense strand
gagaaccugcuggccaaga

SEQ ID NO: 1419576 - RNA, 19 nt, Homo sapiens
  misc_RNA (1)...(19): siRNA sense strand
agcaggagaucauuaagac

SEQ ID NO: 1419577 - RNA, 19 nt, Homo sapiens
  misc_RNA (1)...(19): siRNA sense strand
ggaagcaggagaucauuaa

SEQ ID NO: 1419578 - RNA, 19 nt, Homo sapiens
  misc_RNA (1)...(19): siRNA sense strand
caacaacggugacuuugag

SEQ ID NO: 1419579 - RNA, 19 nt, Homo sapiens
  misc_RNA (1)...(19): siRNA sense strand
cagcaggcaugguuugguu

SEQ ID NO: 1419580 - RNA, 19 nt, Homo sapiens
  misc_RNA (1)...(19): siRNA sense strand
gcacgucauuggagaggau

SEQ ID NO: 1419581 - RNA, 19 nt, Homo sapiens
  misc_RNA (1)...(19): siRNA sense strand
cagugaagcuggcagacuu

SEQ ID NO: 1419582 - RNA, 19 nt, Homo sapiens
  misc_RNA (1)...(19): siRNA sense strand
ccaagaucaucaacaccaa

SEQ ID NO: 1419583 - RNA, 19 nt, Homo sapiens
  misc_RNA (1)...(19): siRNA sense strand
gcaagccuguggacaucug

SEQ ID NO: 1419584 - RNA, 19 nt, Homo sapiens
  misc_RNA (1)...(19): siRNA sense strand
caaaggggcugcagugaag

SEQ ID NO: 1419585 - RNA, 19 nt, Homo sapiens
  misc_RNA (1)...(19): siRNA sense strand
uaccagcucuacgaggaua

SEQ ID NO: 1419586 - RNA, 19 nt, Homo sapiens
  misc_RNA (1)...(19): siRNA sense strand
agaaccugcuggccaagaa

SEQ ID NO: 1419587 - RNA, 19 nt, Homo sapiens
  misc_RNA (1)...(19): siRNA sense strand
gaucaucaacaccaagaag

SEQ ID NO: 1419588 - RNA, 19 nt, Homo sapiens
  misc_RNA (1)...(19): siRNA sense strand
cggaagcaggagaucauua

SEQ ID NO: 1419589 - RNA, 19 nt, Homo sapiens
  misc_RNA (1)...(19): siRNA sense strand
cgucacuccugaagccaaa

SEQ ID NO: 1419590 - RNA, 19 nt, Homo sapiens
  misc_RNA (1)...(19): siRNA sense strand
cagccaagaucaucaacac

SEQ ID NO: 1419591 - RNA, 19 nt, Homo sapiens
  misc_RNA (1)...(19): siRNA sense strand
ucaaccagaugcugaccau

SEQ ID NO: 1419592 - RNA, 19 nt, Homo sapiens
  misc_RNA (1)...(19): siRNA sense strand
gcagacuucggccuagcua

SEQ ID NO: 1419593 - RNA, 19 nt, Homo sapiens
  misc_RNA (1)...(19): siRNA sense strand
acauccggcucacgcagua

SEQ ID NO: 1419594 - RNA, 19 nt, Homo sapiens
  misc_RNA (1)...(19): siRNA sense strand
agccagagaucaccagaag

SEQ ID NO: 1419595 - RNA, 19 nt, Homo sapiens
  misc_RNA (1)...(19): siRNA sense strand
ggacgaggaccagcacaag

SEQ ID NO: 1419596 - RNA, 19 nt, Homo sapiens
  misc_RNA (1)...(19): siRNA sense strand
ggacaccgucacuccugaa

SEQ ID NO: 1419597 - RNA, 19 nt, Homo sapiens
  misc_RNA (1)...(19): siRNA sense strand
ccagagaucaccagaagcu

SEQ ID NO: 1419598 - RNA, 19 nt, Homo sapiens
  misc_RNA (1)...(19): siRNA sense strand
gagccauccucaccaccau

SEQ ID NO: 1419599 - RNA, 19 nt, Homo sapiens
  misc_RNA (1)...(19): siRNA sense strand
gcaaaggggcugcagugaa

SEQ ID NO: 1419600 - RNA, 19 nt, Homo sapiens
  misc_RNA (1)...(19): siRNA sense strand
guucuccauugucaccaaa

SEQ ID NO: 1419601 - RNA, 19 nt, Homo sapiens
  misc_RNA (1)...(19): siRNA sense strand
ggucuucgaucuggucacu

SEQ ID NO: 1419602 - RNA, 19 nt, Homo sapiens
  misc_RNA (1)...(19): siRNA sense strand
aagcaggagaucauuaaga

SEQ ID NO: 1419603 - RNA, 19 nt, Homo sapiens
  misc_RNA (1)...(19): siRNA sense strand
gcaggcaugguuugguuuc

SEQ ID NO: 1419604 - RNA, 19 nt, Homo sapiens
  misc_RNA (1)...(19): siRNA sense strand
ccgaggagggcuuccacua

SEQ ID NO: 1419605 - RNA, 19 nt, Homo sapiens
  misc_RNA (1)...(19): siRNA sense strand
ggcagaacgugcacuucca

SEQ ID NO: 1419606 - RNA, 19 nt, Homo sapiens
  misc_RNA (1)...(19): siRNA sense strand
gcaccggccaugaguaugc

SEQ ID NO: 1419607 - RNA, 19 nt, Homo sapiens
  misc_RNA (1)...(19): siRNA sense strand
gaagcaggagaucauuaag

SEQ ID NO: 1419608 - RNA, 19 nt, Homo sapiens
  misc_RNA (1)...(19): siRNA sense strand
caucgaggccgucaacaac

SEQ ID NO: 1419609 - RNA, 19 nt, Homo sapiens
  misc_RNA (1)...(19): siRNA sense strand
uggcaagccuguggacauc

SEQ ID NO: 1419610 - RNA, 19 nt, Homo sapiens
  misc_RNA (1)...(19): siRNA sense strand
gaguaugcagccaagauca

SEQ ID NO: 1419611 - RNA, 19 nt, Homo sapiens
  misc_RNA (1)...(19): siRNA sense strand
gacuguggagugucugaaa

SEQ ID NO: 1419612 - RNA, 19 nt, Homo sapiens
  misc_RNA (1)...(19): siRNA sense strand
gagaaccugcuggccaaga

SEQ ID NO: 1419613 - RNA, 19 nt, Homo sapiens
  misc_RNA (1)...(19): siRNA sense strand
agcaggagaucauuaagac

SEQ ID NO: 1419614 - RNA, 19 nt, Homo sapiens
  misc_RNA (1)...(19): siRNA sense strand
ggaagcaggagaucauuaa

SEQ ID NO: 1419615 - RNA, 19 nt, Homo sapiens
  misc_RNA (1)...(19): siRNA sense strand
caacaacggugacuuugag

SEQ ID NO: 1419616 - RNA, 19 nt, Homo sapiens
  misc_RNA (1)...(19): siRNA sense strand
cagcaggcaugguuugguu

SEQ ID NO: 1419617 - RNA, 19 nt, Homo sapiens
  misc_RNA (1)...(19): siRNA sense strand
gcacgucauuggagaggau

SEQ ID NO: 1419618 - RNA, 19 nt, Homo sapiens
  misc_RNA (1)...(19): siRNA sense strand
cagugaagcuggcagacuu

SEQ ID NO: 1419619 - RNA, 19 nt, Homo sapiens
  misc_RNA (1)...(19): siRNA sense strand
ccaagaucaucaacaccaa

SEQ ID NO: 1419620 - RNA, 19 nt, Homo sapiens
  misc_RNA (1)...(19): siRNA sense strand
gcaagccuguggacaucug

SEQ ID NO: 1419621 - RNA, 19 nt, Homo sapiens
  misc_RNA (1)...(19): siRNA sense strand
caaaggggcugcagugaag

SEQ ID NO: 1419622 - RNA, 19 nt, Homo sapiens
  misc_RNA (1)...(19): siRNA sense strand
uaccagcucuacgaggaua

SEQ ID NO: 1419623 - RNA, 19 nt, Homo sapiens
  misc_RNA (1)...(19): siRNA sense strand
agaaccugcuggccaagaa

SEQ ID NO: 1419624 - RNA, 19 nt, Homo sapiens
  misc_RNA (1)...(19): siRNA sense strand
gaucaucaacaccaagaag

SEQ ID NO: 1419625 - RNA, 19 nt, Homo sapiens
  misc_RNA (1)...(19): siRNA sense strand
cggaagcaggagaucauua

SEQ ID NO: 1419626 - RNA, 19 nt, Homo sapiens
  misc_RNA (1)...(19): siRNA sense strand
cgucacuccugaagccaaa

SEQ ID NO: 1419627 - RNA, 19 nt, Homo sapiens
  misc_RNA (1)...(19): siRNA sense strand
cagccaagaucaucaacac

SEQ ID NO: 1419628 - RNA, 19 nt, Homo sapiens
  misc_RNA (1)...(19): siRNA sense strand
ucaaccagaugcugaccau

SEQ ID NO: 1419629 - RNA, 19 nt, Homo sapiens
  misc_RNA (1)...(19): siRNA sense strand
gcagacuucggccuagcua

SEQ ID NO: 1419630 - RNA, 19 nt, Homo sapiens
  misc_RNA (1)...(19): siRNA sense strand
acauccggcucacgcagua

SEQ ID NO: 1419631 - RNA, 19 nt, Homo sapiens
  misc_RNA (1)...(19): siRNA sense strand
agccagagaucaccagaag

SEQ ID NO: 1419632 - RNA, 19 nt, Homo sapiens
  misc_RNA (1)...(19): siRNA sense strand
ggacgaggaccagcacaag

SEQ ID NO: 1419633 - RNA, 19 nt, Homo sapiens
  misc_RNA (1)...(19): siRNA sense strand
ggacaccgucacuccugaa

SEQ ID NO: 1419634 - RNA, 19 nt, Homo sapiens
  misc_RNA (1)...(19): siRNA sense strand
ccagagaucaccagaagcu

SEQ ID NO: 1419635 - RNA, 19 nt, Homo sapiens
  misc_RNA (1)...(19): siRNA sense strand
gagccauccucaccaccau

SEQ ID NO: 1419636 - RNA, 19 nt, Homo sapiens
  misc_RNA (1)...(19): siRNA sense strand
gcaaaggggcugcagugaa

SEQ ID NO: 1419637 - RNA, 19 nt, Homo sapiens
  misc_RNA (1)...(19): siRNA sense strand
guucuccauugucaccaaa

SEQ ID NO: 1419638 - RNA, 19 nt, Homo sapiens
  misc_RNA (1)...(19): siRNA sense strand
ggucuucgaucuggucacu

SEQ ID NO: 1419639 - RNA, 19 nt, Homo sapiens
  misc_RNA (1)...(19): siRNA sense strand
aagcaggagaucauuaaga

SEQ ID NO: 1419640 - RNA, 19 nt, Homo sapiens
  misc_RNA (1)...(19): siRNA sense strand
gcaggcaugguuugguuuc

SEQ ID NO: 1419641 - RNA, 19 nt, Homo sapiens
  misc_RNA (1)...(19): siRNA sense strand
ccgaggagggcuuccacua

SEQ ID NO: 1419642 - RNA, 19 nt, Homo sapiens
  misc_RNA (1)...(19): siRNA sense strand
ggcagaacgugcacuucca

SEQ ID NO: 1419643 - RNA, 19 nt, Homo sapiens
  misc_RNA (1)...(19): siRNA sense strand
gcaccggccaugaguaugc

SEQ ID NO: 1419644 - RNA, 19 nt, Homo sapiens
  misc_RNA (1)...(19): siRNA sense strand
gaagcaggagaucauuaag

SEQ ID NO: 1419645 - RNA, 19 nt, Homo sapiens
  misc_RNA (1)...(19): siRNA sense strand
caucgaggccgucaacaac

SEQ ID NO: 1419646 - RNA, 19 nt, Homo sapiens
  misc_RNA (1)...(19): siRNA sense strand
uggcaagccuguggacauc

SEQ ID NO: 1419647 - RNA, 19 nt, Homo sapiens
  misc_RNA (1)...(19): siRNA sense strand
gaguaugcagccaagauca

SEQ ID NO: 1419648 - RNA, 19 nt, Homo sapiens
  misc_RNA (1)...(19): siRNA sense strand
gacuguggagugucugaaa

SEQ ID NO: 1419649 - RNA, 19 nt, Homo sapiens
  misc_RNA (1)...(19): siRNA sense strand
gagaaccugcuggccaaga

SEQ ID NO: 1419650 - RNA, 19 nt, Homo sapiens
  misc_RNA (1)...(19): siRNA sense strand
agcaggagaucauuaagac

SEQ ID NO: 1419651 - RNA, 19 nt, Homo sapiens
  misc_RNA (1)...(19): siRNA sense strand
ggaagcaggagaucauuaa

SEQ ID NO: 1419652 - RNA, 19 nt, Homo sapiens
  misc_RNA (1)...(19): siRNA sense strand
caacaacggugacuuugag

SEQ ID NO: 1419653 - RNA, 19 nt, Homo sapiens
  misc_RNA (1)...(19): siRNA sense strand
cagcaggcaugguuugguu

SEQ ID NO: 1419654 - RNA, 19 nt, Homo sapiens
  misc_RNA (1)...(19): siRNA sense strand
gcacgucauuggagaggau

SEQ ID NO: 1419655 - RNA, 19 nt, Homo sapiens
  misc_RNA (1)...(19): siRNA sense strand
cagugaagcuggcagacuu

SEQ ID NO: 1419656 - RNA, 19 nt, Homo sapiens
  misc_RNA (1)...(19): siRNA sense strand
ccaagaucaucaacaccaa

SEQ ID NO: 1419657 - RNA, 19 nt, Homo sapiens
  misc_RNA (1)...(19): siRNA sense strand
gcaagccuguggacaucug

SEQ ID NO: 1419658 - RNA, 19 nt, Homo sapiens
  misc_RNA (1)...(19): siRNA sense strand
caaaggggcugcagugaag

SEQ ID NO: 1419659 - RNA, 19 nt, Homo sapiens
  misc_RNA (1)...(19): siRNA sense strand
uaccagcucuacgaggaua

SEQ ID NO: 1419660 - RNA, 19 nt, Homo sapiens
  misc_RNA (1)...(19): siRNA sense strand
agaaccugcuggccaagaa

SEQ ID NO: 1419661 - RNA, 19 nt, Homo sapiens
  misc_RNA (1)...(19): siRNA sense strand
gaucaucaacaccaagaag

SEQ ID NO: 1419662 - RNA, 19 nt, Homo sapiens
  misc_RNA (1)...(19): siRNA sense strand
cggaagcaggagaucauua

SEQ ID NO: 1419663 - RNA, 19 nt, Homo sapiens
  misc_RNA (1)...(19): siRNA sense strand
cgucacuccugaagccaaa

SEQ ID NO: 1419664 - RNA, 19 nt, Homo sapiens
  misc_RNA (1)...(19): siRNA sense strand
cagccaagaucaucaacac

SEQ ID NO: 1419665 - RNA, 19 nt, Homo sapiens
  misc_RNA (1)...(19): siRNA sense strand
ucaaccagaugcugaccau

SEQ ID NO: 1419666 - RNA, 19 nt, Homo sapiens
  misc_RNA (1)...(19): siRNA sense strand
gcagacuucggccuagcua

SEQ ID NO: 1419667 - RNA, 19 nt, Homo sapiens
  misc_RNA (1)...(19): siRNA sense strand
acauccggcucacgcagua

SEQ ID NO: 1419668 - RNA, 19 nt, Homo sapiens
  misc_RNA (1)...(19): siRNA sense strand
agccagagaucaccagaag

SEQ ID NO: 1419669 - RNA, 19 nt, Homo sapiens
  misc_RNA (1)...(19): siRNA sense strand
ggacgaggaccagcacaag

SEQ ID NO: 1419670 - RNA, 19 nt, Homo sapiens
  misc_RNA (1)...(19): siRNA sense strand
ggacaccgucacuccugaa

SEQ ID NO: 1419671 - RNA, 19 nt, Homo sapiens
  misc_RNA (1)...(19): siRNA sense strand
ccagagaucaccagaagcu

SEQ ID NO: 1419672 - RNA, 19 nt, Homo sapiens
  misc_RNA (1)...(19): siRNA sense strand
gagccauccucaccaccau

SEQ ID NO: 1419673 - RNA, 19 nt, Homo sapiens
  misc_RNA (1)...(19): siRNA sense strand
gcaaaggggcugcagugaa

SEQ ID NO: 1419674 - RNA, 19 nt, Homo sapiens
  misc_RNA (1)...(19): siRNA sense strand
guucuccauugucaccaaa

SEQ ID NO: 1419675 - RNA, 19 nt, Homo sapiens
  misc_RNA (1)...(19): siRNA sense strand
ggucuucgaucuggucacu

SEQ ID NO: 1419676 - RNA, 19 nt, Homo sapiens
  misc_RNA (1)...(19): siRNA sense strand
aagcaggagaucauuaaga

SEQ ID NO: 1419677 - RNA, 19 nt, Homo sapiens
  misc_RNA (1)...(19): siRNA sense strand
gcaggcaugguuugguuuc

SEQ ID NO: 1419678 - RNA, 19 nt, Homo sapiens
  misc_RNA (1)...(19): siRNA sense strand
ccgaggagggcuuccacua

SEQ ID NO: 1419679 - RNA, 19 nt, Homo sapiens
  misc_RNA (1)...(19): siRNA sense strand
ggcagaacgugcacuucca

SEQ ID NO: 1419680 - RNA, 19 nt, Homo sapiens
  misc_RNA (1)...(19): siRNA sense strand
gcaccggccaugaguaugc

SEQ ID NO: 1419681 - RNA, 19 nt, Homo sapiens
  misc_RNA (1)...(19): siRNA sense strand
gaagcaggagaucauuaag

SEQ ID NO: 1419682 - RNA, 19 nt, Homo sapiens
  misc_RNA (1)...(19): siRNA sense strand
caucgaggccgucaacaac

SEQ ID NO: 1419683 - RNA, 19 nt, Homo sapiens
  misc_RNA (1)...(19): siRNA sense strand
uggcaagccuguggacauc

SEQ ID NO: 1419684 - RNA, 19 nt, Homo sapiens
  misc_RNA (1)...(19): siRNA sense strand
gaguaugcagccaagauca

SEQ ID NO: 1419685 - RNA, 19 nt, Homo sapiens
  misc_RNA (1)...(19): siRNA sense strand
gacuguggagugucugaaa

SEQ ID NO: 1419686 - RNA, 19 nt, Homo sapiens
  misc_RNA (1)...(19): siRNA sense strand
gagaaccugcuggccaaga

SEQ ID NO: 1419687 - RNA, 19 nt, Homo sapiens
  misc_RNA (1)...(19): siRNA sense strand
agcaggagaucauuaagac

SEQ ID NO: 1419688 - RNA, 19 nt, Homo sapiens
  misc_RNA (1)...(19): siRNA sense strand
ggaagcaggagaucauuaa

SEQ ID NO: 1419689 - RNA, 19 nt, Homo sapiens
  misc_RNA (1)...(19): siRNA sense strand
caacaacggugacuuugag

SEQ ID NO: 1419690 - RNA, 19 nt, Homo sapiens
  misc_RNA (1)...(19): siRNA sense strand
cagcaggcaugguuugguu

SEQ ID NO: 1419691 - RNA, 19 nt, Homo sapiens
  misc_RNA (1)...(19): siRNA sense strand
gcacgucauuggagaggau

SEQ ID NO: 1419692 - RNA, 19 nt, Homo sapiens
  misc_RNA (1)...(19): siRNA sense strand
cagugaagcuggcagacuu

SEQ ID NO: 1419693 - RNA, 19 nt, Homo sapiens
  misc_RNA (1)...(19): siRNA sense strand
ccaagaucaucaacaccaa

SEQ ID NO: 1419694 - RNA, 19 nt, Homo sapiens
  misc_RNA (1)...(19): siRNA sense strand
gcaagccuguggacaucug

SEQ ID NO: 1419695 - RNA, 19 nt, Homo sapiens
  misc_RNA (1)...(19): siRNA sense strand
caaaggggcugcagugaag

SEQ ID NO: 1419696 - RNA, 19 nt, Homo sapiens
  misc_RNA (1)...(19): siRNA sense strand
uaccagcucuacgaggaua

SEQ ID NO: 1419697 - RNA, 19 nt, Homo sapiens
  misc_RNA (1)...(19): siRNA sense strand
agaaccugcuggccaagaa

SEQ ID NO: 1419698 - RNA, 19 nt, Homo sapiens
  misc_RNA (1)...(19): siRNA sense strand
gaucaucaacaccaagaag

SEQ ID NO: 1419699 - RNA, 19 nt, Homo sapiens
  misc_RNA (1)...(19): siRNA sense strand
cggaagcaggagaucauua

SEQ ID NO: 1419700 - RNA, 19 nt, Homo sapiens
  misc_RNA (1)...(19): siRNA sense strand
cgucacuccugaagccaaa

SEQ ID NO: 1419701 - RNA, 19 nt, Homo sapiens
  misc_RNA (1)...(19): siRNA sense strand
cagccaagaucaucaacac

SEQ ID NO: 1419702 - RNA, 19 nt, Homo sapiens
  misc_RNA (1)...(19): siRNA sense strand
ucaaccagaugcugaccau

SEQ ID NO: 1419703 - RNA, 19 nt, Homo sapiens
  misc_RNA (1)...(19): siRNA sense strand
gcagacuucggccuagcua

SEQ ID NO: 1419704 - RNA, 19 nt, Homo sapiens
  misc_RNA (1)...(19): siRNA sense strand
acauccggcucacgcagua

SEQ ID NO: 1419705 - RNA, 19 nt, Homo sapiens
  misc_RNA (1)...(19): siRNA sense strand
agccagagaucaccagaag

SEQ ID NO: 1419706 - RNA, 19 nt, Homo sapiens
  misc_RNA (1)...(19): siRNA sense strand
ggacgaggaccagcacaag

SEQ ID NO: 1419707 - RNA, 19 nt, Homo sapiens
  misc_RNA (1)...(19): siRNA sense strand
ggacaccgucacuccugaa

SEQ ID NO: 1419708 - RNA, 19 nt, Homo sapiens
  misc_RNA (1)...(19): siRNA sense strand
ccagagaucaccagaagcu

SEQ ID NO: 1419709 - RNA, 19 nt, Homo sapiens
  misc_RNA (1)...(19): siRNA sense strand
gagccauccucaccaccau

SEQ ID NO: 1419710 - RNA, 19 nt, Homo sapiens
  misc_RNA (1)...(19): siRNA sense strand
gcaaaggggcugcagugaa

SEQ ID NO: 1419711 - RNA, 19 nt, Homo sapiens
  misc_RNA (1)...(19): siRNA sense strand
guucuccauugucaccaaa

SEQ ID NO: 1419712 - RNA, 19 nt, Homo sapiens
  misc_RNA (1)...(19): siRNA sense strand
ggucuucgaucuggucacu

SEQ ID NO: 1419713 - RNA, 19 nt, Homo sapiens
  misc_RNA (1)...(19): siRNA sense strand
aagcaggagaucauuaaga

SEQ ID NO: 1419714 - RNA, 19 nt, Homo sapiens
  misc_RNA (1)...(19): siRNA sense strand
gcaggcaugguuugguuuc

SEQ ID NO: 1419715 - RNA, 19 nt, Homo sapiens
  misc_RNA (1)...(19): siRNA sense strand
ccgaggagggcuuccacua

SEQ ID NO: 1419716 - RNA, 19 nt, Homo sapiens
  misc_RNA (1)...(19): siRNA sense strand
ggcagaacgugcacuucca

SEQ ID NO: 1419717 - RNA, 19 nt, Homo sapiens
  misc_RNA (1)...(19): siRNA sense strand
gcaccggccaugaguaugc

SEQ ID NO: 1419718 - RNA, 19 nt, Homo sapiens
  misc_RNA (1)...(19): siRNA sense strand
gaagcaggagaucauuaag

SEQ ID NO: 1419719 - RNA, 19 nt, Homo sapiens
  misc_RNA (1)...(19): siRNA sense strand
caucgaggccgucaacaac

SEQ ID NO: 1419720 - RNA, 19 nt, Homo sapiens
  misc_RNA (1)...(19): siRNA sense strand
uggcaagccuguggacauc

SEQ ID NO: 1419721 - RNA, 19 nt, Homo sapiens
  misc_RNA (1)...(19): siRNA sense strand
gaguaugcagccaagauca

SEQ ID NO: 1419722 - RNA, 19 nt, Homo sapiens
  misc_RNA (1)...(19): siRNA sense strand
gacuguggagugucugaaa

SEQ ID NO: 1419723 - RNA, 19 nt, Homo sapiens
  misc_RNA (1)...(19): siRNA sense strand
gagaaccugcuggccaaga

SEQ ID NO: 1419724 - RNA, 19 nt, Homo sapiens
  misc_RNA (1)...(19): siRNA sense strand
agcaggagaucauuaagac

SEQ ID NO: 1419725 - RNA, 19 nt, Homo sapiens
  misc_RNA (1)...(19): siRNA sense strand
ggaagcaggagaucauuaa

SEQ ID NO: 1419726 - RNA, 19 nt, Homo sapiens
  misc_RNA (1)...(19): siRNA sense strand
caacaacggugacuuugag

SEQ ID NO: 1419727 - RNA, 19 nt, Homo sapiens
  misc_RNA (1)...(19): siRNA sense strand
cagcaggcaugguuugguu

SEQ ID NO: 1419728 - RNA, 19 nt, Homo sapiens
  misc_RNA (1)...(19): siRNA sense strand
gcacgucauuggagaggau

SEQ ID NO: 1419729 - RNA, 19 nt, Homo sapiens
  misc_RNA (1)...(19): siRNA sense strand
cagugaagcuggcagacuu

SEQ ID NO: 1419730 - RNA, 19 nt, Homo sapiens
  misc_RNA (1)...(19): siRNA sense strand
ccaagaucaucaacaccaa

SEQ ID NO: 1419731 - RNA, 19 nt, Homo sapiens
  misc_RNA (1)...(19): siRNA sense strand
gcaagccuguggacaucug

SEQ ID NO: 1419732 - RNA, 19 nt, Homo sapiens
  misc_RNA (1)...(19): siRNA sense strand
caaaggggcugcagugaag

SEQ ID NO: 1419733 - RNA, 19 nt, Homo sapiens
  misc_RNA (1)...(19): siRNA sense strand
uaccagcucuacgaggaua

SEQ ID NO: 1419734 - RNA, 19 nt, Homo sapiens
  misc_RNA (1)...(19): siRNA sense strand
agaaccugcuggccaagaa

SEQ ID NO: 1419735 - RNA, 19 nt, Homo sapiens
  misc_RNA (1)...(19): siRNA sense strand
gaucaucaacaccaagaag

SEQ ID NO: 1419736 - RNA, 19 nt, Homo sapiens
  misc_RNA (1)...(19): siRNA sense strand
cggaagcaggagaucauua

SEQ ID NO: 1419737 - RNA, 19 nt, Homo sapiens
  misc_RNA (1)...(19): siRNA sense strand
cgucacuccugaagccaaa

SEQ ID NO: 1419738 - RNA, 19 nt, Homo sapiens
  misc_RNA (1)...(19): siRNA sense strand
cagccaagaucaucaacac

SEQ ID NO: 1419739 - RNA, 19 nt, Homo sapiens
  misc_RNA (1)...(19): siRNA sense strand
ucaaccagaugcugaccau

SEQ ID NO: 1419740 - RNA, 19 nt, Homo sapiens
  misc_RNA (1)...(19): siRNA sense strand
gcagacuucggccuagcua

SEQ ID NO: 1419741 - RNA, 19 nt, Homo sapiens
  misc_RNA (1)...(19): siRNA sense strand
acauccggcucacgcagua

SEQ ID NO: 1419742 - RNA, 19 nt, Homo sapiens
  misc_RNA (1)...(19): siRNA sense strand
agccagagaucaccagaag

SEQ ID NO: 1419743 - RNA, 19 nt, Homo sapiens
  misc_RNA (1)...(19): siRNA sense strand
ggacgaggaccagcacaag

SEQ ID NO: 1419744 - RNA, 19 nt, Homo sapiens
  misc_RNA (1)...(19): siRNA sense strand
ggacaccgucacuccugaa

SEQ ID NO: 1419745 - RNA, 19 nt, Homo sapiens
  misc_RNA (1)...(19): siRNA sense strand
ccagagaucaccagaagcu

SEQ ID NO: 1419746 - RNA, 19 nt, Homo sapiens
  misc_RNA (1)...(19): siRNA sense strand
gagccauccucaccaccau

SEQ ID NO: 1419747 - RNA, 19 nt, Homo sapiens
  misc_RNA (1)...(19): siRNA sense strand
gcaaaggggcugcagugaa

SEQ ID NO: 1419748 - RNA, 19 nt, Homo sapiens
  misc_RNA (1)...(19): siRNA sense strand
guucuccauugucaccaaa

SEQ ID NO: 1419749 - RNA, 19 nt, Homo sapiens
  misc_RNA (1)...(19): siRNA sense strand
ggucuucgaucuggucacu

SEQ ID NO: 1419750 - RNA, 19 nt, Homo sapiens
  misc_RNA (1)...(19): siRNA sense strand
aagcaggagaucauuaaga

SEQ ID NO: 1419751 - RNA, 19 nt, Homo sapiens
  misc_RNA (1)...(19): siRNA sense strand
gcaggcaugguuugguuuc

SEQ ID NO: 1419752 - RNA, 19 nt, Homo sapiens
  misc_RNA (1)...(19): siRNA sense strand
ccgaggagggcuuccacua

SEQ ID NO: 1419753 - RNA, 19 nt, Homo sapiens
  misc_RNA (1)...(19): siRNA sense strand
ggcagaacgugcacuucca

SEQ ID NO: 1419754 - RNA, 19 nt, Homo sapiens
  misc_RNA (1)...(19): siRNA sense strand
gcaccggccaugaguaugc

SEQ ID NO: 1419755 - RNA, 19 nt, Homo sapiens
  misc_RNA (1)...(19): siRNA sense strand
gaagcaggagaucauuaag

SEQ ID NO: 1419756 - RNA, 19 nt, Homo sapiens
  misc_RNA (1)...(19): siRNA sense strand
caucgaggccgucaacaac

SEQ ID NO: 1419757 - RNA, 19 nt, Homo sapiens
  misc_RNA (1)...(19): siRNA sense strand
uggcaagccuguggacauc

SEQ ID NO: 1419758 - RNA, 19 nt, Homo sapiens
  misc_RNA (1)...(19): siRNA sense strand
gaguaugcagccaagauca

SEQ ID NO: 1419759 - RNA, 19 nt, Homo sapiens
  misc_RNA (1)...(19): siRNA sense strand
gacuguggagugucugaaa

SEQ ID NO: 1419760 - RNA, 19 nt, Homo sapiens
  misc_RNA (1)...(19): siRNA sense strand
gagaaccugcuggccaaga

SEQ ID NO: 1419761 - RNA, 19 nt, Homo sapiens
  misc_RNA (1)...(19): siRNA sense strand
agcaggagaucauuaagac

SEQ ID NO: 1419762 - RNA, 19 nt, Homo sapiens
  misc_RNA (1)...(19): siRNA sense strand
ggaagcaggagaucauuaa

SEQ ID NO: 1419763 - RNA, 19 nt, Homo sapiens
  misc_RNA (1)...(19): siRNA sense strand
caacaacggugacuuugag

SEQ ID NO: 1419764 - RNA, 19 nt, Homo sapiens
  misc_RNA (1)...(19): siRNA sense strand
cagcaggcaugguuugguu

SEQ ID NO: 1419765 - RNA, 19 nt, Homo sapiens
  misc_RNA (1)...(19): siRNA sense strand
gcacgucauuggagaggau

SEQ ID NO: 1419766 - RNA, 19 nt, Homo sapiens
  misc_RNA (1)...(19): siRNA sense strand
cagugaagcuggcagacuu

SEQ ID NO: 1419767 - RNA, 19 nt, Homo sapiens
  misc_RNA (1)...(19): siRNA sense strand
ccaagaucaucaacaccaa

SEQ ID NO: 1419768 - RNA, 19 nt, Homo sapiens
  misc_RNA (1)...(19): siRNA sense strand
gcaagccuguggacaucug

SEQ ID NO: 1419769 - RNA, 19 nt, Homo sapiens
  misc_RNA (1)...(19): siRNA sense strand
caaaggggcugcagugaag

SEQ ID NO: 1419770 - RNA, 19 nt, Homo sapiens
  misc_RNA (1)...(19): siRNA sense strand
uaccagcucuacgaggaua

SEQ ID NO: 1419771 - RNA, 19 nt, Homo sapiens
  misc_RNA (1)...(19): siRNA sense strand
agaaccugcuggccaagaa

SEQ ID NO: 1419772 - RNA, 19 nt, Homo sapiens
  misc_RNA (1)...(19): siRNA sense strand
gaucaucaacaccaagaag

SEQ ID NO: 1419773 - RNA, 19 nt, Homo sapiens
  misc_RNA (1)...(19): siRNA sense strand
cggaagcaggagaucauua

SEQ ID NO: 1419774 - RNA, 19 nt, Homo sapiens
  misc_RNA (1)...(19): siRNA sense strand
cgucacuccugaagccaaa

SEQ ID NO: 1419775 - RNA, 19 nt, Homo sapiens
  misc_RNA (1)...(19): siRNA sense strand
cagccaagaucaucaacac

SEQ ID NO: 1419776 - RNA, 19 nt, Homo sapiens
  misc_RNA (1)...(19): siRNA sense strand
ucaaccagaugcugaccau

SEQ ID NO: 1419777 - RNA, 19 nt, Homo sapiens
  misc_RNA (1)...(19): siRNA sense strand
gcagacuucggccuagcua

SEQ ID NO: 1419778 - RNA, 19 nt, Homo sapiens
  misc_RNA (1)...(19): siRNA sense strand
acauccggcucacgcagua

SEQ ID NO: 1419779 - RNA, 19 nt, Homo sapiens
  misc_RNA (1)...(19): siRNA sense strand
agccagagaucaccagaag

SEQ ID NO: 1419780 - RNA, 19 nt, Homo sapiens
  misc_RNA (1)...(19): siRNA sense strand
ggacgaggaccagcacaag

SEQ ID NO: 1419781 - RNA, 19 nt, Homo sapiens
  misc_RNA (1)...(19): siRNA sense strand
ggacaccgucacuccugaa

SEQ ID NO: 1419782 - RNA, 19 nt, Homo sapiens
  misc_RNA (1)...(19): siRNA sense strand
ccagagaucaccagaagcu

SEQ ID NO: 1419783 - RNA, 19 nt, Homo sapiens
  misc_RNA (1)...(19): siRNA sense strand
gagccauccucaccaccau

SEQ ID NO: 1419784 - RNA, 19 nt, Homo sapiens
  misc_RNA (1)...(19): siRNA sense strand
gcaaaggggcugcagugaa

SEQ ID NO: 1419785 - RNA, 19 nt, Homo sapiens
  misc_RNA (1)...(19): siRNA sense strand
guucuccauugucaccaaa

SEQ ID NO: 1419786 - RNA, 19 nt, Homo sapiens
  misc_RNA (1)...(19): siRNA sense strand
ggucuucgaucuggucacu

SEQ ID NO: 1419787 - RNA, 19 nt, Homo sapiens
  misc_RNA (1)...(19): siRNA sense strand
aagcaggagaucauuaaga

SEQ ID NO: 1419788 - RNA, 19 nt, Homo sapiens
  misc_RNA (1)...(19): siRNA sense strand
gcaggcaugguuugguuuc

SEQ ID NO: 1419789 - RNA, 19 nt, Homo sapiens
  misc_RNA (1)...(19): siRNA sense strand
ccgaggagggcuuccacua

SEQ ID NO: 1419790 - RNA, 19 nt, Homo sapiens
  misc_RNA (1)...(19): siRNA sense strand
ggcagaacgugcacuucca

SEQ ID NO: 1419791 - RNA, 19 nt, Homo sapiens
  misc_RNA (1)...(19): siRNA sense strand
gcaccggccaugaguaugc

SEQ ID NO: 1419792 - RNA, 19 nt, Homo sapiens
  misc_RNA (1)...(19): siRNA sense strand
gaagcaggagaucauuaag

SEQ ID NO: 1419793 - RNA, 19 nt, Homo sapiens
  misc_RNA (1)...(19): siRNA sense strand
caucgaggccgucaacaac

SEQ ID NO: 1419794 - RNA, 19 nt, Homo sapiens
  misc_RNA (1)...(19): siRNA sense strand
uggcaagccuguggacauc

SEQ ID NO: 1419795 - RNA, 19 nt, Homo sapiens
  misc_RNA (1)...(19): siRNA sense strand
gaguaugcagccaagauca

SEQ ID NO: 1419796 - RNA, 19 nt, Homo sapiens
  misc_RNA (1)...(19): siRNA sense strand
gacuguggagugucugaaa

SEQ ID NO: 1419797 - RNA, 19 nt, Homo sapiens
  misc_RNA (1)...(19): siRNA sense strand
gagaaccugcuggccaaga

SEQ ID NO: 1419798 - RNA, 19 nt, Homo sapiens
  misc_RNA (1)...(19): siRNA sense strand
agcaggagaucauuaagac

SEQ ID NO: 1419799 - RNA, 19 nt, Homo sapiens
  misc_RNA (1)...(19): siRNA sense strand
ggaagcaggagaucauuaa

SEQ ID NO: 1419800 - RNA, 19 nt, Homo sapiens
  misc_RNA (1)...(19): siRNA sense strand
caacaacggugacuuugag

SEQ ID NO: 1419801 - RNA, 19 nt, Homo sapiens
  misc_RNA (1)...(19): siRNA sense strand
cagcaggcaugguuugguu

SEQ ID NO: 1419802 - RNA, 19 nt, Homo sapiens
  misc_RNA (1)...(19): siRNA sense strand
gcacgucauuggagaggau

SEQ ID NO: 1419803 - RNA, 19 nt, Homo sapiens
  misc_RNA (1)...(19): siRNA sense strand
cagugaagcuggcagacuu

SEQ ID NO: 1419804 - RNA, 19 nt, Homo sapiens
  misc_RNA (1)...(19): siRNA sense strand
ccaagaucaucaacaccaa

SEQ ID NO: 1419805 - RNA, 19 nt, Homo sapiens
  misc_RNA (1)...(19): siRNA sense strand
gcaagccuguggacaucug

SEQ ID NO: 1419806 - RNA, 19 nt, Homo sapiens
  misc_RNA (1)...(19): siRNA sense strand
caaaggggcugcagugaag

SEQ ID NO: 1419807 - RNA, 19 nt, Homo sapiens
  misc_RNA (1)...(19): siRNA sense strand
uaccagcucuacgaggaua

SEQ ID NO: 1419808 - RNA, 19 nt, Homo sapiens
  misc_RNA (1)...(19): siRNA sense strand
agaaccugcuggccaagaa

SEQ ID NO: 1419809 - RNA, 19 nt, Homo sapiens
  misc_RNA (1)...(19): siRNA sense strand
gaucaucaacaccaagaag

SEQ ID NO: 1419810 - RNA, 19 nt, Homo sapiens
  misc_RNA (1)...(19): siRNA sense strand
cggaagcaggagaucauua

SEQ ID NO: 1419811 - RNA, 19 nt, Homo sapiens
  misc_RNA (1)...(19): siRNA sense strand
cgucacuccugaagccaaa

SEQ ID NO: 1419812 - RNA, 19 nt, Homo sapiens
  misc_RNA (1)...(19): siRNA sense strand
cagccaagaucaucaacac

SEQ ID NO: 1419813 - RNA, 19 nt, Homo sapiens
  misc_RNA (1)...(19): siRNA sense strand
ucaaccagaugcugaccau

SEQ ID NO: 1419814 - RNA, 19 nt, Homo sapiens
  misc_RNA (1)...(19): siRNA sense strand
gcagacuucggccuagcua

SEQ ID NO: 1419815 - RNA, 19 nt, Homo sapiens
  misc_RNA (1)...(19): siRNA sense strand
acauccggcucacgcagua

SEQ ID NO: 1419816 - RNA, 19 nt, Homo sapiens
  misc_RNA (1)...(19): siRNA sense strand
agccagagaucaccagaag

SEQ ID NO: 1419817 - RNA, 19 nt, Homo sapiens
  misc_RNA (1)...(19): siRNA sense strand
ggacgaggaccagcacaag

SEQ ID NO: 1419818 - RNA, 19 nt, Homo sapiens
  misc_RNA (1)...(19): siRNA sense strand
ggacaccgucacuccugaa

SEQ ID NO: 1419819 - RNA, 19 nt, Homo sapiens
  misc_RNA (1)...(19): siRNA sense strand
ccagagaucaccagaagcu

SEQ ID NO: 1419820 - RNA, 19 nt, Homo sapiens
  misc_RNA (1)...(19): siRNA sense strand
gagccauccucaccaccau

SEQ ID NO: 1419821 - RNA, 19 nt, Homo sapiens
  misc_RNA (1)...(19): siRNA sense strand
gcaaaggggcugcagugaa

SEQ ID NO: 1419822 - RNA, 19 nt, Homo sapiens
  misc_RNA (1)...(19): siRNA sense strand
guucuccauugucaccaaa

SEQ ID NO: 1419823 - RNA, 19 nt, Homo sapiens
  misc_RNA (1)...(19): siRNA sense strand
ggucuucgaucuggucacu

SEQ ID NO: 1419824 - RNA, 19 nt, Homo sapiens
  misc_RNA (1)...(19): siRNA sense strand
aagcaggagaucauuaaga

SEQ ID NO: 1419825 - RNA, 19 nt, Homo sapiens
  misc_RNA (1)...(19): siRNA sense strand
gcaggcaugguuugguuuc

SEQ ID NO: 1419826 - RNA, 19 nt, Homo sapiens
  misc_RNA (1)...(19): siRNA sense strand
ccgaggagggcuuccacua

SEQ ID NO: 1419827 - RNA, 19 nt, Homo sapiens
  misc_RNA (1)...(19): siRNA sense strand
ggcagaacgugcacuucca

SEQ ID NO: 1419828 - RNA, 19 nt, Homo sapiens
  misc_RNA (1)...(19): siRNA sense strand
gcaccggccaugaguaugc

SEQ ID NO: 1419829 - RNA, 19 nt, Homo sapiens
  misc_RNA (1)...(19): siRNA sense strand
gaagcaggagaucauuaag

SEQ ID NO: 1419830 - RNA, 19 nt, Homo sapiens
  misc_RNA (1)...(19): siRNA sense strand
caucgaggccgucaacaac

SEQ ID NO: 1419831 - RNA, 19 nt, Homo sapiens
  misc_RNA (1)...(19): siRNA sense strand
uggcaagccuguggacauc

SEQ ID NO: 1419832 - RNA, 19 nt, Homo sapiens
  misc_RNA (1)...(19): siRNA sense strand
gaguaugcagccaagauca

SEQ ID NO: 1419833 - RNA, 19 nt, Homo sapiens
  misc_RNA (1)...(19): siRNA sense strand
gacuguggagugucugaaa

SEQ ID NO: 1419834 - RNA, 19 nt, Homo sapiens
  misc_RNA (1)...(19): siRNA sense strand
gagaaccugcuggccaaga

SEQ ID NO: 1419835 - RNA, 19 nt, Homo sapiens
  misc_RNA (1)...(19): siRNA sense strand
agcaggagaucauuaagac

SEQ ID NO: 1419836 - RNA, 19 nt, Homo sapiens
  misc_RNA (1)...(19): siRNA sense strand
ggaagcaggagaucauuaa

SEQ ID NO: 1419837 - RNA, 19 nt, Homo sapiens
  misc_RNA (1)...(19): siRNA sense strand
caacaacggugacuuugag

SEQ ID NO: 1419838 - RNA, 19 nt, Homo sapiens
  misc_RNA (1)...(19): siRNA sense strand
cagcaggcaugguuugguu

SEQ ID NO: 1419839 - RNA, 19 nt, Homo sapiens
  misc_RNA (1)...(19): siRNA sense strand
gcacgucauuggagaggau

SEQ ID NO: 1419840 - RNA, 19 nt, Homo sapiens
  misc_RNA (1)...(19): siRNA sense strand
cagugaagcuggcagacuu

SEQ ID NO: 1419841 - RNA, 19 nt, Homo sapiens
  misc_RNA (1)...(19): siRNA sense strand
ccaagaucaucaacaccaa

SEQ ID NO: 1419842 - RNA, 19 nt, Homo sapiens
  misc_RNA (1)...(19): siRNA sense strand
gcaagccuguggacaucug

SEQ ID NO: 1419843 - RNA, 19 nt, Homo sapiens
  misc_RNA (1)...(19): siRNA sense strand
caaaggggcugcagugaag

SEQ ID NO: 1419844 - RNA, 19 nt, Homo sapiens
  misc_RNA (1)...(19): siRNA sense strand
uaccagcucuacgaggaua

SEQ ID NO: 1419845 - RNA, 19 nt, Homo sapiens
  misc_RNA (1)...(19): siRNA sense strand
agaaccugcuggccaagaa

SEQ ID NO: 1419846 - RNA, 19 nt, Homo sapiens
  misc_RNA (1)...(19): siRNA sense strand
gaucaucaacaccaagaag

SEQ ID NO: 1419847 - RNA, 19 nt, Homo sapiens
  misc_RNA (1)...(19): siRNA sense strand
cggaagcaggagaucauua

SEQ ID NO: 1419848 - RNA, 19 nt, Homo sapiens
  misc_RNA (1)...(19): siRNA sense strand
cgucacuccugaagccaaa

SEQ ID NO: 1419849 - RNA, 19 nt, Homo sapiens
  misc_RNA (1)...(19): siRNA sense strand
cagccaagaucaucaacac

SEQ ID NO: 1419850 - RNA, 19 nt, Homo sapiens
  misc_RNA (1)...(19): siRNA sense strand
ucaaccagaugcugaccau

SEQ ID NO: 1419851 - RNA, 19 nt, Homo sapiens
  misc_RNA (1)...(19): siRNA sense strand
gcagacuucggccuagcua

SEQ ID NO: 1419852 - RNA, 19 nt, Homo sapiens
  misc_RNA (1)...(19): siRNA sense strand
acauccggcucacgcagua

SEQ ID NO: 1419853 - RNA, 19 nt, Homo sapiens
  misc_RNA (1)...(19): siRNA sense strand
agccagagaucaccagaag

SEQ ID NO: 1419854 - RNA, 19 nt, Homo sapiens
  misc_RNA (1)...(19): siRNA sense strand
ggacgaggaccagcacaag

SEQ ID NO: 1419855 - RNA, 19 nt, Homo sapiens
  misc_RNA (1)...(19): siRNA sense strand
ggacaccgucacuccugaa

SEQ ID NO: 1419856 - RNA, 19 nt, Homo sapiens
  misc_RNA (1)...(19): siRNA sense strand
ccagagaucaccagaagcu

SEQ ID NO: 1419857 - RNA, 19 nt, Homo sapiens
  misc_RNA (1)...(19): siRNA sense strand
gagccauccucaccaccau

SEQ ID NO: 1419858 - RNA, 19 nt, Homo sapiens
  misc_RNA (1)...(19): siRNA sense strand
gcaaaggggcugcagugaa

SEQ ID NO: 1419859 - RNA, 19 nt, Homo sapiens
  misc_RNA (1)...(19): siRNA sense strand
guucuccauugucaccaaa

SEQ ID NO: 1419860 - RNA, 19 nt, Homo sapiens
  misc_RNA (1)...(19): siRNA sense strand
ggucuucgaucuggucacu

SEQ ID NO: 1419861 - RNA, 19 nt, Homo sapiens
  misc_RNA (1)...(19): siRNA sense strand
aagcaggagaucauuaaga

SEQ ID NO: 1419862 - RNA, 19 nt, Homo sapiens
  misc_RNA (1)...(19): siRNA sense strand
gcaggcaugguuugguuuc

SEQ ID NO: 1419863 - RNA, 19 nt, Homo sapiens
  misc_RNA (1)...(19): siRNA sense strand
ccgaggagggcuuccacua

SEQ ID NO: 1419864 - RNA, 19 nt, Homo sapiens
  misc_RNA (1)...(19): siRNA sense strand
ggcagaacgugcacuucca

SEQ ID NO: 1419865 - RNA, 19 nt, Homo sapiens
  misc_RNA (1)...(19): siRNA sense strand
gcaccggccaugaguaugc

SEQ ID NO: 1419866 - RNA, 19 nt, Homo sapiens
  misc_RNA (1)...(19): siRNA sense strand
gaagcaggagaucauuaag

SEQ ID NO: 1419867 - RNA, 19 nt, Homo sapiens
  misc_RNA (1)...(19): siRNA sense strand
caucgaggccgucaacaac

SEQ ID NO: 1419868 - RNA, 19 nt, Homo sapiens
  misc_RNA (1)...(19): siRNA sense strand
uggcaagccuguggacauc

SEQ ID NO: 1419869 - RNA, 19 nt, Homo sapiens
  misc_RNA (1)...(19): siRNA sense strand
gaguaugcagccaagauca

SEQ ID NO: 1419870 - RNA, 19 nt, Homo sapiens
  misc_RNA (1)...(19): siRNA sense strand
gacuguggagugucugaaa

SEQ ID NO: 1419871 - RNA, 19 nt, Homo sapiens
  misc_RNA (1)...(19): siRNA sense strand
gagaaccugcuggccaaga

SEQ ID NO: 1419872 - RNA, 19 nt, Homo sapiens
  misc_RNA (1)...(19): siRNA sense strand
agcaggagaucauuaagac

SEQ ID NO: 1419873 - RNA, 19 nt, Homo sapiens
  misc_RNA (1)...(19): siRNA sense strand
ggaagcaggagaucauuaa

SEQ ID NO: 1419874 - RNA, 19 nt, Homo sapiens
  misc_RNA (1)...(19): siRNA sense strand
caacaacggugacuuugag

SEQ ID NO: 1419875 - RNA, 19 nt, Homo sapiens
  misc_RNA (1)...(19): siRNA sense strand
cagcaggcaugguuugguu

SEQ ID NO: 1419876 - RNA, 19 nt, Homo sapiens
  misc_RNA (1)...(19): siRNA sense strand
gcacgucauuggagaggau

SEQ ID NO: 1419877 - RNA, 19 nt, Homo sapiens
  misc_RNA (1)...(19): siRNA sense strand
cagugaagcuggcagacuu

SEQ ID NO: 1419878 - RNA, 19 nt, Homo sapiens
  misc_RNA (1)...(19): siRNA sense strand
ccaagaucaucaacaccaa

SEQ ID NO: 1419879 - RNA, 19 nt, Homo sapiens
  misc_RNA (1)...(19): siRNA sense strand
gcaagccuguggacaucug

SEQ ID NO: 1419880 - RNA, 19 nt, Homo sapiens
  misc_RNA (1)...(19): siRNA sense strand
caaaggggcugcagugaag

SEQ ID NO: 1419881 - RNA, 19 nt, Homo sapiens
  misc_RNA (1)...(19): siRNA sense strand
uaccagcucuacgaggaua

SEQ ID NO: 1419882 - RNA, 19 nt, Homo sapiens
  misc_RNA (1)...(19): siRNA sense strand
agaaccugcuggccaagaa

SEQ ID NO: 1419883 - RNA, 19 nt, Homo sapiens
  misc_RNA (1)...(19): siRNA sense strand
gaucaucaacaccaagaag

SEQ ID NO: 1419884 - RNA, 19 nt, Homo sapiens
  misc_RNA (1)...(19): siRNA sense strand
cggaagcaggagaucauua

SEQ ID NO: 1419885 - RNA, 19 nt, Homo sapiens
  misc_RNA (1)...(19): siRNA sense strand
cgucacuccugaagccaaa

SEQ ID NO: 1419886 - RNA, 19 nt, Homo sapiens
  misc_RNA (1)...(19): siRNA sense strand
cagccaagaucaucaacac

SEQ ID NO: 1419887 - RNA, 19 nt, Homo sapiens
  misc_RNA (1)...(19): siRNA sense strand
ucaaccagaugcugaccau

SEQ ID NO: 1419888 - RNA, 19 nt, Homo sapiens
  misc_RNA (1)...(19): siRNA sense strand
gcagacuucggccuagcua

SEQ ID NO: 1419889 - RNA, 19 nt, Homo sapiens
  misc_RNA (1)...(19): siRNA sense strand
acauccggcucacgcagua

SEQ ID NO: 1419890 - RNA, 19 nt, Homo sapiens
  misc_RNA (1)...(19): siRNA sense strand
agccagagaucaccagaag

SEQ ID NO: 1419891 - RNA, 19 nt, Homo sapiens
  misc_RNA (1)...(19): siRNA sense strand
ggacgaggaccagcacaag

SEQ ID NO: 1419892 - RNA, 19 nt, Homo sapiens
  misc_RNA (1)...(19): siRNA sense strand
ggacaccgucacuccugaa

SEQ ID NO: 1419893 - RNA, 19 nt, Homo sapiens
  misc_RNA (1)...(19): siRNA sense strand
ccagagaucaccagaagcu

SEQ ID NO: 1419894 - RNA, 19 nt, Homo sapiens
  misc_RNA (1)...(19): siRNA sense strand
gagccauccucaccaccau

SEQ ID NO: 1419895 - RNA, 19 nt, Homo sapiens
  misc_RNA (1)...(19): siRNA sense strand
gcaaaggggcugcagugaa

SEQ ID NO: 1419896 - RNA, 19 nt, Homo sapiens
  misc_RNA (1)...(19): siRNA sense strand
guucuccauugucaccaaa

SEQ ID NO: 1419897 - RNA, 19 nt, Homo sapiens
  misc_RNA (1)...(19): siRNA sense strand
ggucuucgaucuggucacu

SEQ ID NO: 1419898 - RNA, 19 nt, Homo sapiens
  misc_RNA (1)...(19): siRNA sense strand
aagcaggagaucauuaaga

SEQ ID NO: 1419899 - RNA, 19 nt, Homo sapiens
  misc_RNA (1)...(19): siRNA sense strand
gcaggcaugguuugguuuc

SEQ ID NO: 1419900 - RNA, 19 nt, Homo sapiens
  misc_RNA (1)...(19): siRNA sense strand
ccgaggagggcuuccacua

SEQ ID NO: 1419901 - RNA, 19 nt, Homo sapiens
  misc_RNA (1)...(19): siRNA sense strand
ggcagaacgugcacuucca

SEQ ID NO: 1419902 - RNA, 19 nt, Homo sapiens
  misc_RNA (1)...(19): siRNA sense strand
gcaccggccaugaguaugc

SEQ ID NO: 1419903 - RNA, 19 nt, Homo sapiens
  misc_RNA (1)...(19): siRNA sense strand
gaagcaggagaucauuaag

SEQ ID NO: 1419904 - RNA, 19 nt, Homo sapiens
  misc_RNA (1)...(19): siRNA sense strand
caucgaggccgucaacaac

SEQ ID NO: 1419905 - RNA, 19 nt, Homo sapiens
  misc_RNA (1)...(19): siRNA sense strand
uggcaagccuguggacauc

SEQ ID NO: 1419906 - RNA, 19 nt, Homo sapiens
  misc_RNA (1)...(19): siRNA sense strand
gaguaugcagccaagauca

SEQ ID NO: 1419907 - RNA, 19 nt, Homo sapiens
  misc_RNA (1)...(19): siRNA sense strand
gacuguggagugucugaaa

SEQ ID NO: 1419908 - RNA, 19 nt, Homo sapiens
  misc_RNA (1)...(19): siRNA sense strand
gagaaccugcuggccaaga

SEQ ID NO: 1419909 - RNA, 19 nt, Homo sapiens
  misc_RNA (1)...(19): siRNA sense strand
agcaggagaucauuaagac

SEQ ID NO: 1419910 - RNA, 19 nt, Homo sapiens
  misc_RNA (1)...(19): siRNA sense strand
ggaagcaggagaucauuaa

SEQ ID NO: 1419911 - RNA, 19 nt, Homo sapiens
  misc_RNA (1)...(19): siRNA sense strand
caacaacggugacuuugag

SEQ ID NO: 1419912 - RNA, 19 nt, Homo sapiens
  misc_RNA (1)...(19): siRNA sense strand
cagcaggcaugguuugguu

SEQ ID NO: 1419913 - RNA, 19 nt, Homo sapiens
  misc_RNA (1)...(19): siRNA sense strand
gcacgucauuggagaggau

SEQ ID NO: 1419914 - RNA, 19 nt, Homo sapiens
  misc_RNA (1)...(19): siRNA sense strand
cagugaagcuggcagacuu

SEQ ID NO: 1419915 - RNA, 19 nt, Homo sapiens
  misc_RNA (1)...(19): siRNA sense strand
ccaagaucaucaacaccaa

SEQ ID NO: 1419916 - RNA, 19 nt, Homo sapiens
  misc_RNA (1)...(19): siRNA sense strand
gcaagccuguggacaucug

SEQ ID NO: 1419917 - RNA, 19 nt, Homo sapiens
  misc_RNA (1)...(19): siRNA sense strand
caaaggggcugcagugaag

SEQ ID NO: 1419918 - RNA, 19 nt, Homo sapiens
  misc_RNA (1)...(19): siRNA sense strand
uaccagcucuacgaggaua

SEQ ID NO: 1419919 - RNA, 19 nt, Homo sapiens
  misc_RNA (1)...(19): siRNA sense strand
agaaccugcuggccaagaa

SEQ ID NO: 1419920 - RNA, 19 nt, Homo sapiens
  misc_RNA (1)...(19): siRNA sense strand
gaucaucaacaccaagaag

SEQ ID NO: 1419921 - RNA, 19 nt, Homo sapiens
  misc_RNA (1)...(19): siRNA sense strand
cggaagcaggagaucauua

SEQ ID NO: 1419922 - RNA, 19 nt, Homo sapiens
  misc_RNA (1)...(19): siRNA sense strand
cgucacuccugaagccaaa

SEQ ID NO: 1419923 - RNA, 19 nt, Homo sapiens
  misc_RNA (1)...(19): siRNA sense strand
cagccaagaucaucaacac

SEQ ID NO: 1419924 - RNA, 19 nt, Homo sapiens
  misc_RNA (1)...(19): siRNA sense strand
ucaaccagaugcugaccau

SEQ ID NO: 1419925 - RNA, 19 nt, Homo sapiens
  misc_RNA (1)...(19): siRNA sense strand
gcagacuucggccuagcua

SEQ ID NO: 1419926 - RNA, 19 nt, Homo sapiens
  misc_RNA (1)...(19): siRNA sense strand
acauccggcucacgcagua

SEQ ID NO: 1419927 - RNA, 19 nt, Homo sapiens
  misc_RNA (1)...(19): siRNA sense strand
agccagagaucaccagaag

SEQ ID NO: 1419928 - RNA, 19 nt, Homo sapiens
  misc_RNA (1)...(19): siRNA sense strand
ggacgaggaccagcacaag

SEQ ID NO: 1419929 - RNA, 19 nt, Homo sapiens
  misc_RNA (1)...(19): siRNA sense strand
ggacaccgucacuccugaa

SEQ ID NO: 1419930 - RNA, 19 nt, Homo sapiens
  misc_RNA (1)...(19): siRNA sense strand
ccagagaucaccagaagcu

SEQ ID NO: 1419931 - RNA, 19 nt, Homo sapiens
  misc_RNA (1)...(19): siRNA sense strand
gagccauccucaccaccau

SEQ ID NO: 1419932 - RNA, 19 nt, Homo sapiens
  misc_RNA (1)...(19): siRNA sense strand
gcaaaggggcugcagugaa

SEQ ID NO: 1419933 - RNA, 19 nt, Homo sapiens
  misc_RNA (1)...(19): siRNA sense strand
guucuccauugucaccaaa

SEQ ID NO: 1419934 - RNA, 19 nt, Homo sapiens
  misc_RNA (1)...(19): siRNA sense strand
ggucuucgaucuggucacu

SEQ ID NO: 1419935 - RNA, 19 nt, Homo sapiens
  misc_RNA (1)...(19): siRNA sense strand
aagcaggagaucauuaaga

SEQ ID NO: 1419936 - RNA, 19 nt, Homo sapiens
  misc_RNA (1)...(19): siRNA sense strand
gcaggcaugguuugguuuc

SEQ ID NO: 1419937 - RNA, 19 nt, Homo sapiens
  misc_RNA (1)...(19): siRNA sense strand
ccgaggagggcuuccacua

SEQ ID NO: 1419938 - RNA, 19 nt, Homo sapiens
  misc_RNA (1)...(19): siRNA sense strand
ggcagaacgugcacuucca

SEQ ID NO: 1419939 - RNA, 19 nt, Homo sapiens
  misc_RNA (1)...(19): siRNA sense strand
gcaccggccaugaguaugc

SEQ ID NO: 1419940 - RNA, 19 nt, Homo sapiens
  misc_RNA (1)...(19): siRNA sense strand
gaagcaggagaucauuaag

SEQ ID NO: 1419941 - RNA, 19 nt, Homo sapiens
  misc_RNA (1)...(19): siRNA sense strand
caucgaggccgucaacaac

SEQ ID NO: 1419942 - RNA, 19 nt, Homo sapiens
  misc_RNA (1)...(19): siRNA sense strand
uggcaagccuguggacauc

SEQ ID NO: 1419943 - RNA, 19 nt, Homo sapiens
  misc_RNA (1)...(19): siRNA sense strand
gaguaugcagccaagauca

SEQ ID NO: 1419944 - RNA, 19 nt, Homo sapiens
  misc_RNA (1)...(19): siRNA sense strand
gacuguggagugucugaaa

SEQ ID NO: 1419945 - RNA, 19 nt, Homo sapiens
  misc_RNA (1)...(19): siRNA sense strand
gagaaccugcuggccaaga

SEQ ID NO: 1419946 - RNA, 19 nt, Homo sapiens
  misc_RNA (1)...(19): siRNA sense strand
agcaggagaucauuaagac

SEQ ID NO: 1419947 - RNA, 19 nt, Homo sapiens
  misc_RNA (1)...(19): siRNA sense strand
ggaagcaggagaucauuaa

SEQ ID NO: 1419948 - RNA, 19 nt, Homo sapiens
  misc_RNA (1)...(19): siRNA sense strand
caacaacggugacuuugag

SEQ ID NO: 1419949 - RNA, 19 nt, Homo sapiens
  misc_RNA (1)...(19): siRNA sense strand
cagcaggcaugguuugguu

SEQ ID NO: 1419950 - RNA, 19 nt, Homo sapiens
  misc_RNA (1)...(19): siRNA sense strand
gcacgucauuggagaggau

SEQ ID NO: 1419951 - RNA, 19 nt, Homo sapiens
  misc_RNA (1)...(19): siRNA sense strand
cagugaagcuggcagacuu

SEQ ID NO: 1419952 - RNA, 19 nt, Homo sapiens
  misc_RNA (1)...(19): siRNA sense strand
ccaagaucaucaacaccaa

SEQ ID NO: 1419953 - RNA, 19 nt, Homo sapiens
  misc_RNA (1)...(19): siRNA sense strand
gcaagccuguggacaucug

SEQ ID NO: 1419954 - RNA, 19 nt, Homo sapiens
  misc_RNA (1)...(19): siRNA sense strand
caaaggggcugcagugaag

SEQ ID NO: 1419955 - RNA, 19 nt, Homo sapiens
  misc_RNA (1)...(19): siRNA sense strand
uaccagcucuacgaggaua

SEQ ID NO: 1419956 - RNA, 19 nt, Homo sapiens
  misc_RNA (1)...(19): siRNA sense strand
agaaccugcuggccaagaa

SEQ ID NO: 1419957 - RNA, 19 nt, Homo sapiens
  misc_RNA (1)...(19): siRNA sense strand
gaucaucaacaccaagaag

SEQ ID NO: 1419958 - RNA, 19 nt, Homo sapiens
  misc_RNA (1)...(19): siRNA sense strand
cggaagcaggagaucauua

SEQ ID NO: 1419959 - RNA, 19 nt, Homo sapiens
  misc_RNA (1)...(19): siRNA sense strand
cgucacuccugaagccaaa

SEQ ID NO: 1419960 - RNA, 19 nt, Homo sapiens
  misc_RNA (1)...(19): siRNA sense strand
cagccaagaucaucaacac

SEQ ID NO: 1419961 - RNA, 19 nt, Homo sapiens
  misc_RNA (1)...(19): siRNA sense strand
ucaaccagaugcugaccau

SEQ ID NO: 1419962 - RNA, 19 nt, Homo sapiens
  misc_RNA (1)...(19): siRNA sense strand
gcagacuucggccuagcua

SEQ ID NO: 1419963 - RNA, 19 nt, Homo sapiens
  misc_RNA (1)...(19): siRNA sense strand
acauccggcucacgcagua

SEQ ID NO: 1419964 - RNA, 19 nt, Homo sapiens
  misc_RNA (1)...(19): siRNA sense strand
agccagagaucaccagaag

SEQ ID NO: 1419965 - RNA, 19 nt, Homo sapiens
  misc_RNA (1)...(19): siRNA sense strand
ggacgaggaccagcacaag

SEQ ID NO: 1419966 - RNA, 19 nt, Homo sapiens
  misc_RNA (1)...(19): siRNA sense strand
ggacaccgucacuccugaa

SEQ ID NO: 1419967 - RNA, 19 nt, Homo sapiens
  misc_RNA (1)...(19): siRNA sense strand
ccagagaucaccagaagcu

SEQ ID NO: 1419968 - RNA, 19 nt, Homo sapiens
  misc_RNA (1)...(19): siRNA sense strand
gagccauccucaccaccau

SEQ ID NO: 1419969 - RNA, 19 nt, Homo sapiens
  misc_RNA (1)...(19): siRNA sense strand
gcaaaggggcugcagugaa

SEQ ID NO: 1419970 - RNA, 19 nt, Homo sapiens
  misc_RNA (1)...(19): siRNA sense strand
guucuccauugucaccaaa

SEQ ID NO: 1419971 - RNA, 19 nt, Homo sapiens
  misc_RNA (1)...(19): siRNA sense strand
ggucuucgaucuggucacu

SEQ ID NO: 1419972 - RNA, 19 nt, Homo sapiens
  misc_RNA (1)...(19): siRNA sense strand
aagcaggagaucauuaaga

SEQ ID NO: 1419973 - RNA, 19 nt, Homo sapiens
  misc_RNA (1)...(19): siRNA sense strand
gcaggcaugguuugguuuc

SEQ ID NO: 1419974 - RNA, 19 nt, Homo sapiens
  misc_RNA (1)...(19): siRNA sense strand
ccgaggagggcuuccacua

SEQ ID NO: 1419975 - RNA, 19 nt, Homo sapiens
  misc_RNA (1)...(19): siRNA sense strand
ggcagaacgugcacuucca

SEQ ID NO: 1419976 - RNA, 19 nt, Homo sapiens
  misc_RNA (1)...(19): siRNA sense strand
gcaccggccaugaguaugc

SEQ ID NO: 1419977 - RNA, 19 nt, Homo sapiens
  misc_RNA (1)...(19): siRNA sense strand
gaagcaggagaucauuaag

SEQ ID NO: 1419978 - RNA, 19 nt, Homo sapiens
  misc_RNA (1)...(19): siRNA sense strand
caucgaggccgucaacaac

SEQ ID NO: 1419979 - RNA, 19 nt, Homo sapiens
  misc_RNA (1)...(19): siRNA sense strand
uggcaagccuguggacauc

SEQ ID NO: 1419980 - RNA, 19 nt, Homo sapiens
  misc_RNA (1)...(19): siRNA sense strand
gaguaugcagccaagauca

SEQ ID NO: 1419981 - RNA, 19 nt, Homo sapiens
  misc_RNA (1)...(19): siRNA sense strand
gacuguggagugucugaaa

SEQ ID NO: 1419982 - RNA, 19 nt, Homo sapiens
  misc_RNA (1)...(19): siRNA sense strand
gagaaccugcuggccaaga

SEQ ID NO: 1419983 - RNA, 19 nt, Homo sapiens
  misc_RNA (1)...(19): siRNA sense strand
agcaggagaucauuaagac

SEQ ID NO: 1419984 - RNA, 19 nt, Homo sapiens
  misc_RNA (1)...(19): siRNA sense strand
ggaagcaggagaucauuaa

SEQ ID NO: 1419985 - RNA, 19 nt, Homo sapiens
  misc_RNA (1)...(19): siRNA sense strand
caacaacggugacuuugag

SEQ ID NO: 1419986 - RNA, 19 nt, Homo sapiens
  misc_RNA (1)...(19): siRNA sense strand
cagcaggcaugguuugguu

SEQ ID NO: 1419987 - RNA, 19 nt, Homo sapiens
  misc_RNA (1)...(19): siRNA sense strand
gcacgucauuggagaggau

SEQ ID NO: 1419988 - RNA, 19 nt, Homo sapiens
  misc_RNA (1)...(19): siRNA sense strand
cagugaagcuggcagacuu

SEQ ID NO: 1419989 - RNA, 19 nt, Homo sapiens
  misc_RNA (1)...(19): siRNA sense strand
ccaagaucaucaacaccaa

SEQ ID NO: 1419990 - RNA, 19 nt, Homo sapiens
  misc_RNA (1)...(19): siRNA sense strand
gcaagccuguggacaucug

SEQ ID NO: 1419991 - RNA, 19 nt, Homo sapiens
  misc_RNA (1)...(19): siRNA sense strand
caaaggggcugcagugaag

SEQ ID NO: 1419992 - RNA, 19 nt, Homo sapiens
  misc_RNA (1)...(19): siRNA sense strand
uaccagcucuacgaggaua

SEQ ID NO: 1419993 - RNA, 19 nt, Homo sapiens
  misc_RNA (1)...(19): siRNA sense strand
agaaccugcuggccaagaa

SEQ ID NO: 1419994 - RNA, 19 nt, Homo sapiens
  misc_RNA (1)...(19): siRNA sense strand
gaucaucaacaccaagaag

SEQ ID NO: 1419995 - RNA, 19 nt, Homo sapiens
  misc_RNA (1)...(19): siRNA sense strand
cggaagcaggagaucauua

SEQ ID NO: 1419996 - RNA, 19 nt, Homo sapiens
  misc_RNA (1)...(19): siRNA sense strand
cgucacuccugaagccaaa

SEQ ID NO: 1419997 - RNA, 19 nt, Homo sapiens
  misc_RNA (1)...(19): siRNA sense strand
cagccaagaucaucaacac

SEQ ID NO: 1419998 - RNA, 19 nt, Homo sapiens
  misc_RNA (1)...(19): siRNA sense strand
ucaaccagaugcugaccau

SEQ ID NO: 1419999 - RNA, 19 nt, Homo sapiens
  misc_RNA (1)...(19): siRNA sense strand
gcagacuucggccuagcua

SEQ ID NO: 1420000 - RNA, 19 nt, Homo sapiens
  misc_RNA (1)...(19): siRNA sense strand
acauccggcucacgcagua

SEQ ID NO: 1420001 - RNA, 19 nt, Homo sapiens
  misc_RNA (1)...(19): siRNA sense strand
agccagagaucaccagaag

SEQ ID NO: 1420002 - RNA, 19 nt, Homo sapiens
  misc_RNA (1)...(19): siRNA sense strand
ggacgaggaccagcacaag

SEQ ID NO: 1420003 - RNA, 19 nt, Homo sapiens
  misc_RNA (1)...(19): siRNA sense strand
ggacaccgucacuccugaa

SEQ ID NO: 1420004 - RNA, 19 nt, Homo sapiens
  misc_RNA (1)...(19): siRNA sense strand
ccagagaucaccagaagcu

SEQ ID NO: 1420005 - RNA, 19 nt, Homo sapiens
  misc_RNA (1)...(19): siRNA sense strand
gagccauccucaccaccau

SEQ ID NO: 1420006 - RNA, 19 nt, Homo sapiens
  misc_RNA (1)...(19): siRNA sense strand
gcaaaggggcugcagugaa

SEQ ID NO: 1420007 - RNA, 19 nt, Homo sapiens
  misc_RNA (1)...(19): siRNA sense strand
guucuccauugucaccaaa

SEQ ID NO: 1420008 - RNA, 19 nt, Homo sapiens
  misc_RNA (1)...(19): siRNA sense strand
ggucuucgaucuggucacu

SEQ ID NO: 1420009 - RNA, 19 nt, Homo sapiens
  misc_RNA (1)...(19): siRNA sense strand
aagcaggagaucauuaaga

SEQ ID NO: 1420010 - RNA, 19 nt, Homo sapiens
  misc_RNA (1)...(19): siRNA sense strand
gcaggcaugguuugguuuc

SEQ ID NO: 1420011 - RNA, 19 nt, Homo sapiens
  misc_RNA (1)...(19): siRNA sense strand
ccgaggagggcuuccacua

SEQ ID NO: 1420012 - RNA, 19 nt, Homo sapiens
  misc_RNA (1)...(19): siRNA sense strand
ggcagaacgugcacuucca

SEQ ID NO: 1420013 - RNA, 19 nt, Homo sapiens
  misc_RNA (1)...(19): siRNA sense strand
gcaccggccaugaguaugc

SEQ ID NO: 1420014 - RNA, 19 nt, Homo sapiens
  misc_RNA (1)...(19): siRNA sense strand
gaagcaggagaucauuaag

SEQ ID NO: 1420015 - RNA, 19 nt, Homo sapiens
  misc_RNA (1)...(19): siRNA sense strand
caucgaggccgucaacaac

SEQ ID NO: 1420016 - RNA, 19 nt, Homo sapiens
  misc_RNA (1)...(19): siRNA sense strand
uggcaagccuguggacauc

SEQ ID NO: 1420017 - RNA, 19 nt, Homo sapiens
  misc_RNA (1)...(19): siRNA sense strand
gaguaugcagccaagauca

SEQ ID NO: 1420018 - RNA, 19 nt, Homo sapiens
  misc_RNA (1)...(19): siRNA sense strand
gacuguggagugucugaaa

SEQ ID NO: 1420019 - RNA, 19 nt, Homo sapiens
  misc_RNA (1)...(19): siRNA sense strand
gagaaccugcuggccaaga

SEQ ID NO: 1420020 - RNA, 19 nt, Homo sapiens
  misc_RNA (1)...(19): siRNA sense strand
agcaggagaucauuaagac

SEQ ID NO: 1420021 - RNA, 19 nt, Homo sapiens
  misc_RNA (1)...(19): siRNA sense strand
ggaagcaggagaucauuaa

SEQ ID NO: 1420022 - RNA, 19 nt, Homo sapiens
  misc_RNA (1)...(19): siRNA sense strand
caacaacggugacuuugag

SEQ ID NO: 1420023 - RNA, 19 nt, Homo sapiens
  misc_RNA (1)...(19): siRNA sense strand
cagcaggcaugguuugguu

SEQ ID NO: 1420024 - RNA, 19 nt, Homo sapiens
  misc_RNA (1)...(19): siRNA sense strand
gcacgucauuggagaggau

SEQ ID NO: 1420025 - RNA, 19 nt, Homo sapiens
  misc_RNA (1)...(19): siRNA sense strand
cagugaagcuggcagacuu

SEQ ID NO: 1420026 - RNA, 19 nt, Homo sapiens
  misc_RNA (1)...(19): siRNA sense strand
ccaagaucaucaacaccaa

SEQ ID NO: 1420027 - RNA, 19 nt, Homo sapiens
  misc_RNA (1)...(19): siRNA sense strand
gcaagccuguggacaucug

SEQ ID NO: 1420028 - RNA, 19 nt, Homo sapiens
  misc_RNA (1)...(19): siRNA sense strand
caaaggggcugcagugaag

SEQ ID NO: 1420029 - RNA, 19 nt, Homo sapiens
  misc_RNA (1)...(19): siRNA sense strand
uaccagcucuacgaggaua

SEQ ID NO: 1420030 - RNA, 19 nt, Homo sapiens
  misc_RNA (1)...(19): siRNA sense strand
agaaccugcuggccaagaa

SEQ ID NO: 1420031 - RNA, 19 nt, Homo sapiens
  misc_RNA (1)...(19): siRNA sense strand
gaucaucaacaccaagaag

SEQ ID NO: 1420032 - RNA, 19 nt, Homo sapiens
  misc_RNA (1)...(19): siRNA sense strand
cggaagcaggagaucauua

SEQ ID NO: 1420033 - RNA, 19 nt, Homo sapiens
  misc_RNA (1)...(19): siRNA sense strand
cgucacuccugaagccaaa

SEQ ID NO: 1420034 - RNA, 19 nt, Homo sapiens
  misc_RNA (1)...(19): siRNA sense strand
cagccaagaucaucaacac

SEQ ID NO: 1420035 - RNA, 19 nt, Homo sapiens
  misc_RNA (1)...(19): siRNA sense strand
ucaaccagaugcugaccau

SEQ ID NO: 1420036 - RNA, 19 nt, Homo sapiens
  misc_RNA (1)...(19): siRNA sense strand
gcagacuucggccuagcua

SEQ ID NO: 1420037 - RNA, 19 nt, Homo sapiens
  misc_RNA (1)...(19): siRNA sense strand
acauccggcucacgcagua

SEQ ID NO: 1420038 - RNA, 19 nt, Homo sapiens
  misc_RNA (1)...(19): siRNA sense strand
agccagagaucaccagaag

SEQ ID NO: 1420039 - RNA, 19 nt, Homo sapiens
  misc_RNA (1)...(19): siRNA sense strand
ggacgaggaccagcacaag

SEQ ID NO: 1420040 - RNA, 19 nt, Homo sapiens
  misc_RNA (1)...(19): siRNA sense strand
ggacaccgucacuccugaa

SEQ ID NO: 1420041 - RNA, 19 nt, Homo sapiens
  misc_RNA (1)...(19): siRNA sense strand
ccagagaucaccagaagcu

SEQ ID NO: 1420042 - RNA, 19 nt, Homo sapiens
  misc_RNA (1)...(19): siRNA sense strand
gagccauccucaccaccau

SEQ ID NO: 1420043 - RNA, 19 nt, Homo sapiens
  misc_RNA (1)...(19): siRNA sense strand
gcaaaggggcugcagugaa

SEQ ID NO: 1420044 - RNA, 19 nt, Homo sapiens
  misc_RNA (1)...(19): siRNA sense strand
guucuccauugucaccaaa

SEQ ID NO: 1420045 - RNA, 19 nt, Homo sapiens
  misc_RNA (1)...(19): siRNA sense strand
ggucuucgaucuggucacu

SEQ ID NO: 1420046 - RNA, 19 nt, Homo sapiens
  misc_RNA (1)...(19): siRNA sense strand
aagcaggagaucauuaaga

SEQ ID NO: 1420047 - RNA, 19 nt, Homo sapiens
  misc_RNA (1)...(19): siRNA sense strand
gcaggcaugguuugguuuc

SEQ ID NO: 1420048 - RNA, 19 nt, Homo sapiens
  misc_RNA (1)...(19): siRNA sense strand
ccgaggagggcuuccacua

SEQ ID NO: 1420049 - RNA, 19 nt, Homo sapiens
  misc_RNA (1)...(19): siRNA sense strand
ggcagaacgugcacuucca

SEQ ID NO: 1420050 - RNA, 19 nt, Homo sapiens
  misc_RNA (1)...(19): siRNA sense strand
gcaccggccaugaguaugc

SEQ ID NO: 1420051 - RNA, 19 nt, Homo sapiens
  misc_RNA (1)...(19): siRNA sense strand
gaagcaggagaucauuaag

SEQ ID NO: 1420052 - RNA, 19 nt, Homo sapiens
  misc_RNA (1)...(19): siRNA sense strand
caucgaggccgucaacaac

SEQ ID NO: 1420053 - RNA, 19 nt, Homo sapiens
  misc_RNA (1)...(19): siRNA sense strand
uggcaagccuguggacauc

SEQ ID NO: 1420054 - RNA, 19 nt, Homo sapiens
  misc_RNA (1)...(19): siRNA sense strand
gaguaugcagccaagauca

SEQ ID NO: 1420055 - RNA, 19 nt, Homo sapiens
  misc_RNA (1)...(19): siRNA sense strand
gacuguggagugucugaaa

SEQ ID NO: 1420056 - RNA, 19 nt, Homo sapiens
  misc_RNA (1)...(19): siRNA sense strand
gagaaccugcuggccaaga

SEQ ID NO: 1420057 - RNA, 19 nt, Homo sapiens
  misc_RNA (1)...(19): siRNA sense strand
agcaggagaucauuaagac

SEQ ID NO: 1420058 - RNA, 19 nt, Homo sapiens
  misc_RNA (1)...(19): siRNA sense strand
ggaagcaggagaucauuaa

SEQ ID NO: 1420059 - RNA, 19 nt, Homo sapiens
  misc_RNA (1)...(19): siRNA sense strand
caacaacggugacuuugag

SEQ ID NO: 1420060 - RNA, 19 nt, Homo sapiens
  misc_RNA (1)...(19): siRNA sense strand
cagcaggcaugguuugguu

SEQ ID NO: 1420061 - RNA, 19 nt, Homo sapiens
  misc_RNA (1)...(19): siRNA sense strand
gcacgucauuggagaggau

SEQ ID NO: 1420062 - RNA, 19 nt, Homo sapiens
  misc_RNA (1)...(19): siRNA sense strand
cagugaagcuggcagacuu

SEQ ID NO: 1420063 - RNA, 19 nt, Homo sapiens
  misc_RNA (1)...(19): siRNA sense strand
ccaagaucaucaacaccaa

SEQ ID NO: 1420064 - RNA, 19 nt, Homo sapiens
  misc_RNA (1)...(19): siRNA sense strand
gcaagccuguggacaucug

SEQ ID NO: 1420065 - RNA, 19 nt, Homo sapiens
  misc_RNA (1)...(19): siRNA sense strand
caaaggggcugcagugaag

SEQ ID NO: 1420066 - RNA, 19 nt, Homo sapiens
  misc_RNA (1)...(19): siRNA sense strand
uaccagcucuacgaggaua

SEQ ID NO: 1420067 - RNA, 19 nt, Homo sapiens
  misc_RNA (1)...(19): siRNA sense strand
agaaccugcuggccaagaa

SEQ ID NO: 1420068 - RNA, 19 nt, Homo sapiens
  misc_RNA (1)...(19): siRNA sense strand
gaucaucaacaccaagaag

SEQ ID NO: 1420069 - RNA, 19 nt, Homo sapiens
  misc_RNA (1)...(19): siRNA sense strand
cggaagcaggagaucauua

SEQ ID NO: 1420070 - RNA, 19 nt, Homo sapiens
  misc_RNA (1)...(19): siRNA sense strand
cgucacuccugaagccaaa

SEQ ID NO: 1420071 - RNA, 19 nt, Homo sapiens
  misc_RNA (1)...(19): siRNA sense strand
cagccaagaucaucaacac

SEQ ID NO: 1420072 - RNA, 19 nt, Homo sapiens
  misc_RNA (1)...(19): siRNA sense strand
ucaaccagaugcugaccau

SEQ ID NO: 1420073 - RNA, 19 nt, Homo sapiens
  misc_RNA (1)...(19): siRNA sense strand
gcagacuucggccuagcua

SEQ ID NO: 1420074 - RNA, 19 nt, Homo sapiens
  misc_RNA (1)...(19): siRNA sense strand
acauccggcucacgcagua

SEQ ID NO: 1420075 - RNA, 19 nt, Homo sapiens
  misc_RNA (1)...(19): siRNA sense strand
agccagagaucaccagaag

SEQ ID NO: 1420076 - RNA, 19 nt, Homo sapiens
  misc_RNA (1)...(19): siRNA sense strand
ggacgaggaccagcacaag

SEQ ID NO: 1420077 - RNA, 19 nt, Homo sapiens
  misc_RNA (1)...(19): siRNA sense strand
ggacaccgucacuccugaa

SEQ ID NO: 1420078 - RNA, 19 nt, Homo sapiens
  misc_RNA (1)...(19): siRNA sense strand
ccagagaucaccagaagcu

SEQ ID NO: 1420079 - RNA, 19 nt, Homo sapiens
  misc_RNA (1)...(19): siRNA sense strand
gagccauccucaccaccau

SEQ ID NO: 1420080 - RNA, 19 nt, Homo sapiens
  misc_RNA (1)...(19): siRNA sense strand
gcaaaggggcugcagugaa

SEQ ID NO: 1420081 - RNA, 19 nt, Homo sapiens
  misc_RNA (1)...(19): siRNA sense strand
guucuccauugucaccaaa

SEQ ID NO: 1420082 - RNA, 19 nt, Homo sapiens
  misc_RNA (1)...(19): siRNA sense strand
ggucuucgaucuggucacu

SEQ ID NO: 1420083 - RNA, 19 nt, Homo sapiens
  misc_RNA (1)...(19): siRNA sense strand
aagcaggagaucauuaaga

SEQ ID NO: 1420084 - RNA, 19 nt, Homo sapiens
  misc_RNA (1)...(19): siRNA sense strand
gcaggcaugguuugguuuc

SEQ ID NO: 1420085 - RNA, 19 nt, Homo sapiens
  misc_RNA (1)...(19): siRNA sense strand
ccgaggagggcuuccacua

SEQ ID NO: 1420086 - RNA, 19 nt, Homo sapiens
  misc_RNA (1)...(19): siRNA sense strand
ggcagaacgugcacuucca

SEQ ID NO: 1420087 - RNA, 19 nt, Homo sapiens
  misc_RNA (1)...(19): siRNA sense strand
gcaccggccaugaguaugc

SEQ ID NO: 1420088 - RNA, 19 nt, Homo sapiens
  misc_RNA (1)...(19): siRNA sense strand
gaagcaggagaucauuaag

SEQ ID NO: 1420089 - RNA, 19 nt, Homo sapiens
  misc_RNA (1)...(19): siRNA sense strand
caucgaggccgucaacaac

SEQ ID NO: 1420090 - RNA, 19 nt, Homo sapiens
  misc_RNA (1)...(19): siRNA sense strand
uggcaagccuguggacauc

SEQ ID NO: 1420091 - RNA, 19 nt, Homo sapiens
  misc_RNA (1)...(19): siRNA sense strand
gaguaugcagccaagauca

SEQ ID NO: 1420092 - RNA, 19 nt, Homo sapiens
  misc_RNA (1)...(19): siRNA sense strand
gacuguggagugucugaaa

SEQ ID NO: 1420093 - RNA, 19 nt, Homo sapiens
  misc_RNA (1)...(19): siRNA sense strand
gagaaccugcuggccaaga

SEQ ID NO: 1420094 - RNA, 19 nt, Homo sapiens
  misc_RNA (1)...(19): siRNA sense strand
agcaggagaucauuaagac

SEQ ID NO: 1420095 - RNA, 19 nt, Homo sapiens
  misc_RNA (1)...(19): siRNA sense strand
ggaagcaggagaucauuaa

SEQ ID NO: 1420096 - RNA, 19 nt, Homo sapiens
  misc_RNA (1)...(19): siRNA sense strand
caacaacggugacuuugag

SEQ ID NO: 1420097 - RNA, 19 nt, Homo sapiens
  misc_RNA (1)...(19): siRNA sense strand
cagcaggcaugguuugguu

SEQ ID NO: 1420098 - RNA, 19 nt, Homo sapiens
  misc_RNA (1)...(19): siRNA sense strand
gcacgucauuggagaggau

SEQ ID NO: 1420099 - RNA, 19 nt, Homo sapiens
  misc_RNA (1)...(19): siRNA sense strand
cagugaagcuggcagacuu

SEQ ID NO: 1420100 - RNA, 19 nt, Homo sapiens
  misc_RNA (1)...(19): siRNA sense strand
ccaagaucaucaacaccaa

SEQ ID NO: 1420101 - RNA, 19 nt, Homo sapiens
  misc_RNA (1)...(19): siRNA sense strand
gcaagccuguggacaucug

SEQ ID NO: 1420102 - RNA, 19 nt, Homo sapiens
  misc_RNA (1)...(19): siRNA sense strand
caaaggggcugcagugaag

SEQ ID NO: 1420103 - RNA, 19 nt, Homo sapiens
  misc_RNA (1)...(19): siRNA sense strand
uaccagcucuacgaggaua

SEQ ID NO: 1420104 - RNA, 19 nt, Homo sapiens
  misc_RNA (1)...(19): siRNA sense strand
agaaccugcuggccaagaa

SEQ ID NO: 1420105 - RNA, 19 nt, Homo sapiens
  misc_RNA (1)...(19): siRNA sense strand
gaucaucaacaccaagaag

SEQ ID NO: 1420106 - RNA, 19 nt, Homo sapiens
  misc_RNA (1)...(19): siRNA sense strand
cggaagcaggagaucauua

SEQ ID NO: 1420107 - RNA, 19 nt, Homo sapiens
  misc_RNA (1)...(19): siRNA sense strand
cgucacuccugaagccaaa

SEQ ID NO: 1420108 - RNA, 19 nt, Homo sapiens
  misc_RNA (1)...(19): siRNA sense strand
cagccaagaucaucaacac

SEQ ID NO: 1420109 - RNA, 19 nt, Homo sapiens
  misc_RNA (1)...(19): siRNA sense strand
ucaaccagaugcugaccau

SEQ ID NO: 1420110 - RNA, 19 nt, Homo sapiens
  misc_RNA (1)...(19): siRNA sense strand
gcagacuucggccuagcua

SEQ ID NO: 1420111 - RNA, 19 nt, Homo sapiens
  misc_RNA (1)...(19): siRNA sense strand
acauccggcucacgcagua

SEQ ID NO: 1420112 - RNA, 19 nt, Homo sapiens
  misc_RNA (1)...(19): siRNA sense strand
agccagagaucaccagaag

SEQ ID NO: 1420113 - RNA, 19 nt, Homo sapiens
  misc_RNA (1)...(19): siRNA sense strand
ggacgaggaccagcacaag

SEQ ID NO: 1420114 - RNA, 19 nt, Homo sapiens
  misc_RNA (1)...(19): siRNA sense strand
ggacaccgucacuccugaa

SEQ ID NO: 1420115 - RNA, 19 nt, Homo sapiens
  misc_RNA (1)...(19): siRNA sense strand
ccagagaucaccagaagcu

SEQ ID NO: 1420116 - RNA, 19 nt, Homo sapiens
  misc_RNA (1)...(19): siRNA sense strand
gagccauccucaccaccau

SEQ ID NO: 1420117 - RNA, 19 nt, Homo sapiens
  misc_RNA (1)...(19): siRNA sense strand
gcaaaggggcugcagugaa

SEQ ID NO: 1420118 - RNA, 19 nt, Homo sapiens
  misc_RNA (1)...(19): siRNA sense strand
guucuccauugucaccaaa

SEQ ID NO: 1420119 - RNA, 19 nt, Homo sapiens
  misc_RNA (1)...(19): siRNA sense strand
ggucuucgaucuggucacu

SEQ ID NO: 1420120 - RNA, 19 nt, Homo sapiens
  misc_RNA (1)...(19): siRNA sense strand
aagcaggagaucauuaaga

SEQ ID NO: 1420121 - RNA, 19 nt, Homo sapiens
  misc_RNA (1)...(19): siRNA sense strand
gcaggcaugguuugguuuc

SEQ ID NO: 1420122 - RNA, 19 nt, Homo sapiens
  misc_RNA (1)...(19): siRNA sense strand
ccgaggagggcuuccacua

SEQ ID NO: 1420123 - RNA, 19 nt, Homo sapiens
  misc_RNA (1)...(19): siRNA sense strand
ggcagaacgugcacuucca

SEQ ID NO: 1420124 - RNA, 19 nt, Homo sapiens
  misc_RNA (1)...(19): siRNA sense strand
gcaccggccaugaguaugc

SEQ ID NO: 1420125 - RNA, 19 nt, Homo sapiens
  misc_RNA (1)...(19): siRNA sense strand
gaagcaggagaucauuaag

SEQ ID NO: 1420126 - RNA, 19 nt, Homo sapiens
  misc_RNA (1)...(19): siRNA sense strand
caucgaggccgucaacaac

SEQ ID NO: 1420127 - RNA, 19 nt, Homo sapiens
  misc_RNA (1)...(19): siRNA sense strand
uggcaagccuguggacauc

SEQ ID NO: 1420128 - RNA, 19 nt, Homo sapiens
  misc_RNA (1)...(19): siRNA sense strand
gaguaugcagccaagauca

SEQ ID NO: 1420129 - RNA, 19 nt, Homo sapiens
  misc_RNA (1)...(19): siRNA sense strand
gacuguggagugucugaaa

SEQ ID NO: 1420130 - RNA, 19 nt, Homo sapiens
  misc_RNA (1)...(19): siRNA sense strand
gagaaccugcuggccaaga

SEQ ID NO: 1420131 - RNA, 19 nt, Homo sapiens
  misc_RNA (1)...(19): siRNA sense strand
agcaggagaucauuaagac

SEQ ID NO: 1420132 - RNA, 19 nt, Homo sapiens
  misc_RNA (1)...(19): siRNA sense strand
ggaagcaggagaucauuaa

SEQ ID NO: 1420133 - RNA, 19 nt, Homo sapiens
  misc_RNA (1)...(19): siRNA sense strand
caacaacggugacuuugag

SEQ ID NO: 1420134 - RNA, 19 nt, Homo sapiens
  misc_RNA (1)...(19): siRNA sense strand
cagcaggcaugguuugguu

SEQ ID NO: 1420135 - RNA, 19 nt, Homo sapiens
  misc_RNA (1)...(19): siRNA sense strand
gcacgucauuggagaggau

SEQ ID NO: 1420136 - RNA, 19 nt, Homo sapiens
  misc_RNA (1)...(19): siRNA sense strand
cagugaagcuggcagacuu

SEQ ID NO: 1420137 - RNA, 19 nt, Homo sapiens
  misc_RNA (1)...(19): siRNA sense strand
ccaagaucaucaacaccaa

SEQ ID NO: 1420138 - RNA, 19 nt, Homo sapiens
  misc_RNA (1)...(19): siRNA sense strand
gcaagccuguggacaucug

SEQ ID NO: 1420139 - RNA, 19 nt, Homo sapiens
  misc_RNA (1)...(19): siRNA sense strand
caaaggggcugcagugaag

SEQ ID NO: 1420140 - RNA, 19 nt, Homo sapiens
  misc_RNA (1)...(19): siRNA sense strand
uaccagcucuacgaggaua

SEQ ID NO: 1420141 - RNA, 19 nt, Homo sapiens
  misc_RNA (1)...(19): siRNA sense strand
agaaccugcuggccaagaa

SEQ ID NO: 1420142 - RNA, 19 nt, Homo sapiens
  misc_RNA (1)...(19): siRNA sense strand
gaucaucaacaccaagaag

SEQ ID NO: 1420143 - RNA, 19 nt, Homo sapiens
  misc_RNA (1)...(19): siRNA sense strand
cggaagcaggagaucauua

SEQ ID NO: 1420144 - RNA, 19 nt, Homo sapiens
  misc_RNA (1)...(19): siRNA sense strand
cgucacuccugaagccaaa

SEQ ID NO: 1420145 - RNA, 19 nt, Homo sapiens
  misc_RNA (1)...(19): siRNA sense strand
cagccaagaucaucaacac

SEQ ID NO: 1420146 - RNA, 19 nt, Homo sapiens
  misc_RNA (1)...(19): siRNA sense strand
ucaaccagaugcugaccau

SEQ ID NO: 1420147 - RNA, 19 nt, Homo sapiens
  misc_RNA (1)...(19): siRNA sense strand
gcagacuucggccuagcua

SEQ ID NO: 1420148 - RNA, 19 nt, Homo sapiens
  misc_RNA (1)...(19): siRNA sense strand
acauccggcucacgcagua

SEQ ID NO: 1420149 - RNA, 19 nt, Homo sapiens
  misc_RNA (1)...(19): siRNA sense strand
agccagagaucaccagaag

SEQ ID NO: 1420150 - RNA, 19 nt, Homo sapiens
  misc_RNA (1)...(19): siRNA sense strand
ggacgaggaccagcacaag

SEQ ID NO: 1420151 - RNA, 19 nt, Homo sapiens
  misc_RNA (1)...(19): siRNA sense strand
ggacaccgucacuccugaa

SEQ ID NO: 1420152 - RNA, 19 nt, Homo sapiens
  misc_RNA (1)...(19): siRNA sense strand
ccagagaucaccagaagcu

SEQ ID NO: 1420153 - RNA, 19 nt, Homo sapiens
  misc_RNA (1)...(19): siRNA sense strand
gagccauccucaccaccau

SEQ ID NO: 1420154 - RNA, 19 nt, Homo sapiens
  misc_RNA (1)...(19): siRNA sense strand
gcaaaggggcugcagugaa

SEQ ID NO: 1420155 - RNA, 19 nt, Homo sapiens
  misc_RNA (1)...(19): siRNA sense strand
guucuccauugucaccaaa

SEQ ID NO: 1420156 - RNA, 19 nt, Homo sapiens
  misc_RNA (1)...(19): siRNA sense strand
ggucuucgaucuggucacu

SEQ ID NO: 1420157 - RNA, 19 nt, Homo sapiens
  misc_RNA (1)...(19): siRNA sense strand
aagcaggagaucauuaaga

SEQ ID NO: 1420158 - RNA, 19 nt, Homo sapiens
  misc_RNA (1)...(19): siRNA sense strand
gcaggcaugguuugguuuc

SEQ ID NO: 1420159 - RNA, 19 nt, Homo sapiens
  misc_RNA (1)...(19): siRNA sense strand
ccgaggagggcuuccacua

SEQ ID NO: 1420160 - RNA, 19 nt, Homo sapiens
  misc_RNA (1)...(19): siRNA sense strand
ggcagaacgugcacuucca

SEQ ID NO: 1420161 - RNA, 19 nt, Homo sapiens
  misc_RNA (1)...(19): siRNA sense strand
gcaccggccaugaguaugc

SEQ ID NO: 1420162 - RNA, 19 nt, Homo sapiens
  misc_RNA (1)...(19): siRNA sense strand
gaagcaggagaucauuaag

SEQ ID NO: 1420163 - RNA, 19 nt, Homo sapiens
  misc_RNA (1)...(19): siRNA sense strand
caucgaggccgucaacaac

SEQ ID NO: 1420164 - RNA, 19 nt, Homo sapiens
  misc_RNA (1)...(19): siRNA sense strand
uggcaagccuguggacauc

SEQ ID NO: 1420165 - RNA, 19 nt, Homo sapiens
  misc_RNA (1)...(19): siRNA sense strand
gaguaugcagccaagauca

SEQ ID NO: 1420166 - RNA, 19 nt, Homo sapiens
  misc_RNA (1)...(19): siRNA sense strand
gacuguggagugucugaaa

SEQ ID NO: 1420167 - RNA, 19 nt, Homo sapiens
  misc_RNA (1)...(19): siRNA sense strand
gagaaccugcuggccaaga

SEQ ID NO: 1420168 - RNA, 19 nt, Homo sapiens
  misc_RNA (1)...(19): siRNA sense strand
agcaggagaucauuaagac

SEQ ID NO: 1420169 - RNA, 19 nt, Homo sapiens
  misc_RNA (1)...(19): siRNA sense strand
ggaagcaggagaucauuaa

SEQ ID NO: 1420170 - RNA, 19 nt, Homo sapiens
  misc_RNA (1)...(19): siRNA sense strand
caacaacggugacuuugag

SEQ ID NO: 1420171 - RNA, 19 nt, Homo sapiens
  misc_RNA (1)...(19): siRNA sense strand
cagcaggcaugguuugguu

SEQ ID NO: 1420172 - RNA, 19 nt, Homo sapiens
  misc_RNA (1)...(19): siRNA sense strand
gcacgucauuggagaggau

SEQ ID NO: 1420173 - RNA, 19 nt, Homo sapiens
  misc_RNA (1)...(19): siRNA sense strand
cagugaagcuggcagacuu

SEQ ID NO: 1420174 - RNA, 19 nt, Homo sapiens
  misc_RNA (1)...(19): siRNA sense strand
ccaagaucaucaacaccaa

SEQ ID NO: 1420175 - RNA, 19 nt, Homo sapiens
  misc_RNA (1)...(19): siRNA sense strand
gcaagccuguggacaucug

SEQ ID NO: 1420176 - RNA, 19 nt, Homo sapiens
  misc_RNA (1)...(19): siRNA sense strand
caaaggggcugcagugaag

SEQ ID NO: 1420177 - RNA, 19 nt, Homo sapiens
  misc_RNA (1)...(19): siRNA sense strand
uaccagcucuacgaggaua

SEQ ID NO: 1420178 - RNA, 19 nt, Homo sapiens
  misc_RNA (1)...(19): siRNA sense strand
agaaccugcuggccaagaa

SEQ ID NO: 1420179 - RNA, 19 nt, Homo sapiens
  misc_RNA (1)...(19): siRNA sense strand
gaucaucaacaccaagaag

SEQ ID NO: 1420180 - RNA, 19 nt, Homo sapiens
  misc_RNA (1)...(19): siRNA sense strand
cggaagcaggagaucauua

SEQ ID NO: 1420181 - RNA, 19 nt, Homo sapiens
  misc_RNA (1)...(19): siRNA sense strand
cgucacuccugaagccaaa

SEQ ID NO: 1420182 - RNA, 19 nt, Homo sapiens
  misc_RNA (1)...(19): siRNA sense strand
cagccaagaucaucaacac

SEQ ID NO: 1420183 - RNA, 19 nt, Homo sapiens
  misc_RNA (1)...(19): siRNA sense strand
ucaaccagaugcugaccau

SEQ ID NO: 1420184 - RNA, 19 nt, Homo sapiens
  misc_RNA (1)...(19): siRNA sense strand
gcagacuucggccuagcua

SEQ ID NO: 1420185 - RNA, 19 nt, Homo sapiens
  misc_RNA (1)...(19): siRNA sense strand
acauccggcucacgcagua

SEQ ID NO: 1420186 - RNA, 19 nt, Homo sapiens
  misc_RNA (1)...(19): siRNA sense strand
agccagagaucaccagaag

SEQ ID NO: 1420187 - RNA, 19 nt, Homo sapiens
  misc_RNA (1)...(19): siRNA sense strand
ggacgaggaccagcacaag

SEQ ID NO: 1420188 - RNA, 19 nt, Homo sapiens
  misc_RNA (1)...(19): siRNA sense strand
ggacaccgucacuccugaa

SEQ ID NO: 1420189 - RNA, 19 nt, Homo sapiens
  misc_RNA (1)...(19): siRNA sense strand
ccagagaucaccagaagcu

SEQ ID NO: 1420190 - RNA, 19 nt, Homo sapiens
  misc_RNA (1)...(19): siRNA sense strand
gagccauccucaccaccau

SEQ ID NO: 1420191 - RNA, 19 nt, Homo sapiens
  misc_RNA (1)...(19): siRNA sense strand
gcaaaggggcugcagugaa

SEQ ID NO: 1420192 - RNA, 19 nt, Homo sapiens
  misc_RNA (1)...(19): siRNA sense strand
guucuccauugucaccaaa

SEQ ID NO: 1420193 - RNA, 19 nt, Homo sapiens
  misc_RNA (1)...(19): siRNA sense strand
ggucuucgaucuggucacu

SEQ ID NO: 1420194 - RNA, 19 nt, Homo sapiens
  misc_RNA (1)...(19): siRNA sense strand
aagcaggagaucauuaaga

SEQ ID NO: 1420195 - RNA, 19 nt, Homo sapiens
  misc_RNA (1)...(19): siRNA sense strand
gcaggcaugguuugguuuc

SEQ ID NO: 1420196 - RNA, 19 nt, Homo sapiens
  misc_RNA (1)...(19): siRNA sense strand
ccgaggagggcuuccacua

SEQ ID NO: 1420197 - RNA, 19 nt, Homo sapiens
  misc_RNA (1)...(19): siRNA sense strand
ggcagaacgugcacuucca

SEQ ID NO: 1420198 - RNA, 19 nt, Homo sapiens
  misc_RNA (1)...(19): siRNA sense strand
gcaccggccaugaguaugc

SEQ ID NO: 1420199 - RNA, 19 nt, Homo sapiens
  misc_RNA (1)...(19): siRNA sense strand
gaagcaggagaucauuaag

SEQ ID NO: 1420200 - RNA, 19 nt, Homo sapiens
  misc_RNA (1)...(19): siRNA sense strand
caucgaggccgucaacaac

SEQ ID NO: 1420201 - RNA, 19 nt, Homo sapiens
  misc_RNA (1)...(19): siRNA sense strand
uggcaagccuguggacauc

SEQ ID NO: 1420202 - RNA, 19 nt, Homo sapiens
  misc_RNA (1)...(19): siRNA sense strand
gaguaugcagccaagauca

SEQ ID NO: 1420203 - RNA, 19 nt, Homo sapiens
  misc_RNA (1)...(19): siRNA sense strand
gacuguggagugucugaaa

SEQ ID NO: 1420204 - RNA, 19 nt, Homo sapiens
  misc_RNA (1)...(19): siRNA sense strand
gagaaccugcuggccaaga

SEQ ID NO: 1420205 - RNA, 19 nt, Homo sapiens
  misc_RNA (1)...(19): siRNA sense strand
agcaggagaucauuaagac

SEQ ID NO: 1420206 - RNA, 19 nt, Homo sapiens
  misc_RNA (1)...(19): siRNA sense strand
ggaagcaggagaucauuaa

SEQ ID NO: 1420207 - RNA, 19 nt, Homo sapiens
  misc_RNA (1)...(19): siRNA sense strand
caacaacggugacuuugag

SEQ ID NO: 1420208 - RNA, 19 nt, Homo sapiens
  misc_RNA (1)...(19): siRNA sense strand
cagcaggcaugguuugguu

SEQ ID NO: 1420209 - RNA, 19 nt, Homo sapiens
  misc_RNA (1)...(19): siRNA sense strand
gcacgucauuggagaggau

SEQ ID NO: 1420210 - RNA, 19 nt, Homo sapiens
  misc_RNA (1)...(19): siRNA sense strand
cagugaagcuggcagacuu

SEQ ID NO: 1420211 - RNA, 19 nt, Homo sapiens
  misc_RNA (1)...(19): siRNA sense strand
ccaagaucaucaacaccaa

SEQ ID NO: 1420212 - RNA, 19 nt, Homo sapiens
  misc_RNA (1)...(19): siRNA sense strand
gcaagccuguggacaucug

SEQ ID NO: 1420213 - RNA, 19 nt, Homo sapiens
  misc_RNA (1)...(19): siRNA sense strand
caaaggggcugcagugaag

SEQ ID NO: 1420214 - RNA, 19 nt, Homo sapiens
  misc_RNA (1)...(19): siRNA sense strand
uaccagcucuacgaggaua

SEQ ID NO: 1420215 - RNA, 19 nt, Homo sapiens
  misc_RNA (1)...(19): siRNA sense strand
agaaccugcuggccaagaa

SEQ ID NO: 1420216 - RNA, 19 nt, Homo sapiens
  misc_RNA (1)...(19): siRNA sense strand
gaucaucaacaccaagaag

SEQ ID NO: 1420217 - RNA, 19 nt, Homo sapiens
  misc_RNA (1)...(19): siRNA sense strand
cggaagcaggagaucauua

SEQ ID NO: 1420218 - RNA, 19 nt, Homo sapiens
  misc_RNA (1)...(19): siRNA sense strand
cgucacuccugaagccaaa

SEQ ID NO: 1420219 - RNA, 19 nt, Homo sapiens
  misc_RNA (1)...(19): siRNA sense strand
cagccaagaucaucaacac

SEQ ID NO: 1420220 - RNA, 19 nt, Homo sapiens
  misc_RNA (1)...(19): siRNA sense strand
ucaaccagaugcugaccau

SEQ ID NO: 1420221 - RNA, 19 nt, Homo sapiens
  misc_RNA (1)...(19): siRNA sense strand
gcagacuucggccuagcua

SEQ ID NO: 1420222 - RNA, 19 nt, Homo sapiens
  misc_RNA (1)...(19): siRNA sense strand
acauccggcucacgcagua

SEQ ID NO: 1420223 - RNA, 19 nt, Homo sapiens
  misc_RNA (1)...(19): siRNA sense strand
agccagagaucaccagaag

SEQ ID NO: 1420224 - RNA, 19 nt, Homo sapiens
  misc_RNA (1)...(19): siRNA sense strand
ggacgaggaccagcacaag

SEQ ID NO: 1420225 - RNA, 19 nt, Homo sapiens
  misc_RNA (1)...(19): siRNA sense strand
ggacaccgucacuccugaa

SEQ ID NO: 1420226 - RNA, 19 nt, Homo sapiens
  misc_RNA (1)...(19): siRNA sense strand
ccagagaucaccagaagcu

SEQ ID NO: 1420227 - RNA, 19 nt, Homo sapiens
  misc_RNA (1)...(19): siRNA sense strand
gagccauccucaccaccau

SEQ ID NO: 1420228 - RNA, 19 nt, Homo sapiens
  misc_RNA (1)...(19): siRNA sense strand
gcaaaggggcugcagugaa

SEQ ID NO: 1420229 - RNA, 19 nt, Homo sapiens
  misc_RNA (1)...(19): siRNA sense strand
guucuccauugucaccaaa

SEQ ID NO: 1420230 - RNA, 19 nt, Homo sapiens
  misc_RNA (1)...(19): siRNA sense strand
ggucuucgaucuggucacu

SEQ ID NO: 1420231 - RNA, 19 nt, Homo sapiens
  misc_RNA (1)...(19): siRNA sense strand
aagcaggagaucauuaaga

SEQ ID NO: 1420232 - RNA, 19 nt, Homo sapiens
  misc_RNA (1)...(19): siRNA sense strand
gcaggcaugguuugguuuc

SEQ ID NO: 1420233 - RNA, 19 nt, Homo sapiens
  misc_RNA (1)...(19): siRNA sense strand
ccgaggagggcuuccacua

SEQ ID NO: 1420234 - RNA, 19 nt, Homo sapiens
  misc_RNA (1)...(19): siRNA sense strand
ggcagaacgugcacuucca

SEQ ID NO: 1420235 - RNA, 19 nt, Homo sapiens
  misc_RNA (1)...(19): siRNA sense strand
gcaccggccaugaguaugc

SEQ ID NO: 1420236 - RNA, 19 nt, Homo sapiens
  misc_RNA (1)...(19): siRNA sense strand
gaagcaggagaucauuaag

SEQ ID NO: 1420237 - RNA, 19 nt, Homo sapiens
  misc_RNA (1)...(19): siRNA sense strand
caucgaggccgucaacaac

SEQ ID NO: 1420238 - RNA, 19 nt, Homo sapiens
  misc_RNA (1)...(19): siRNA sense strand
uggcaagccuguggacauc

SEQ ID NO: 1420239 - RNA, 19 nt, Homo sapiens
  misc_RNA (1)...(19): siRNA sense strand
gaguaugcagccaagauca

SEQ ID NO: 1420240 - RNA, 19 nt, Homo sapiens
  misc_RNA (1)...(19): siRNA sense strand
gacuguggagugucugaaa

SEQ ID NO: 1420241 - RNA, 19 nt, Homo sapiens
  misc_RNA (1)...(19): siRNA sense strand
gagaaccugcuggccaaga

SEQ ID NO: 1420242 - RNA, 19 nt, Homo sapiens
  misc_RNA (1)...(19): siRNA sense strand
agcaggagaucauuaagac

SEQ ID NO: 1420243 - RNA, 19 nt, Homo sapiens
  misc_RNA (1)...(19): siRNA sense strand
ggaagcaggagaucauuaa

SEQ ID NO: 1420244 - RNA, 19 nt, Homo sapiens
  misc_RNA (1)...(19): siRNA sense strand
caacaacggugacuuugag

SEQ ID NO: 1420245 - RNA, 19 nt, Homo sapiens
  misc_RNA (1)...(19): siRNA sense strand
cagcaggcaugguuugguu

SEQ ID NO: 1420246 - RNA, 19 nt, Homo sapiens
  misc_RNA (1)...(19): siRNA sense strand
gcacgucauuggagaggau

SEQ ID NO: 1420247 - RNA, 19 nt, Homo sapiens
  misc_RNA (1)...(19): siRNA sense strand
cagugaagcuggcagacuu

SEQ ID NO: 1420248 - RNA, 19 nt, Homo sapiens
  misc_RNA (1)...(19): siRNA sense strand
ccaagaucaucaacaccaa

SEQ ID NO: 1420249 - RNA, 19 nt, Homo sapiens
  misc_RNA (1)...(19): siRNA sense strand
gcaagccuguggacaucug

SEQ ID NO: 1420250 - RNA, 19 nt, Homo sapiens
  misc_RNA (1)...(19): siRNA sense strand
caaaggggcugcagugaag

SEQ ID NO: 1420251 - RNA, 19 nt, Homo sapiens
  misc_RNA (1)...(19): siRNA sense strand
uaccagcucuacgaggaua

SEQ ID NO: 1420252 - RNA, 19 nt, Homo sapiens
  misc_RNA (1)...(19): siRNA sense strand
agaaccugcuggccaagaa

SEQ ID NO: 1420253 - RNA, 19 nt, Homo sapiens
  misc_RNA (1)...(19): siRNA sense strand
gaucaucaacaccaagaag

SEQ ID NO: 1420254 - RNA, 19 nt, Homo sapiens
  misc_RNA (1)...(19): siRNA sense strand
cggaagcaggagaucauua

SEQ ID NO: 1420255 - RNA, 19 nt, Homo sapiens
  misc_RNA (1)...(19): siRNA sense strand
cgucacuccugaagccaaa

SEQ ID NO: 1420256 - RNA, 19 nt, Homo sapiens
  misc_RNA (1)...(19): siRNA sense strand
cagccaagaucaucaacac

SEQ ID NO: 1420257 - RNA, 19 nt, Homo sapiens
  misc_RNA (1)...(19): siRNA sense strand
ucaaccagaugcugaccau

SEQ ID NO: 1420258 - RNA, 19 nt, Homo sapiens
  misc_RNA (1)...(19): siRNA sense strand
gcagacuucggccuagcua

SEQ ID NO: 1420259 - RNA, 19 nt, Homo sapiens
  misc_RNA (1)...(19): siRNA sense strand
acauccggcucacgcagua

SEQ ID NO: 1420260 - RNA, 19 nt, Homo sapiens
  misc_RNA (1)...(19): siRNA sense strand
agccagagaucaccagaag

SEQ ID NO: 1420261 - RNA, 19 nt, Homo sapiens
  misc_RNA (1)...(19): siRNA sense strand
ggacgaggaccagcacaag

SEQ ID NO: 1420262 - RNA, 19 nt, Homo sapiens
  misc_RNA (1)...(19): siRNA sense strand
ggacaccgucacuccugaa

SEQ ID NO: 1420263 - RNA, 19 nt, Homo sapiens
  misc_RNA (1)...(19): siRNA sense strand
ccagagaucaccagaagcu

SEQ ID NO: 1420264 - RNA, 19 nt, Homo sapiens
  misc_RNA (1)...(19): siRNA sense strand
gagccauccucaccaccau

SEQ ID NO: 1420265 - RNA, 19 nt, Homo sapiens
  misc_RNA (1)...(19): siRNA sense strand
gcaaaggggcugcagugaa

SEQ ID NO: 1420266 - RNA, 19 nt, Homo sapiens
  misc_RNA (1)...(19): siRNA sense strand
guucuccauugucaccaaa

SEQ ID NO: 1420267 - RNA, 19 nt, Homo sapiens
  misc_RNA (1)...(19): siRNA sense strand
ggucuucgaucuggucacu

SEQ ID NO: 1420268 - RNA, 19 nt, Homo sapiens
  misc_RNA (1)...(19): siRNA sense strand
aagcaggagaucauuaaga

SEQ ID NO: 1420269 - RNA, 19 nt, Homo sapiens
  misc_RNA (1)...(19): siRNA sense strand
gcaggcaugguuugguuuc

SEQ ID NO: 1420270 - RNA, 19 nt, Homo sapiens
  misc_RNA (1)...(19): siRNA sense strand
ccgaggagggcuuccacua

SEQ ID NO: 1420271 - RNA, 19 nt, Homo sapiens
  misc_RNA (1)...(19): siRNA sense strand
ggcagaacgugcacuucca

SEQ ID NO: 1420272 - RNA, 19 nt, Homo sapiens
  misc_RNA (1)...(19): siRNA sense strand
gcaccggccaugaguaugc

SEQ ID NO: 1420273 - RNA, 19 nt, Homo sapiens
  misc_RNA (1)...(19): siRNA sense strand
gaagcaggagaucauuaag

SEQ ID NO: 1420274 - RNA, 19 nt, Homo sapiens
  misc_RNA (1)...(19): siRNA sense strand
caucgaggccgucaacaac

SEQ ID NO: 1420275 - RNA, 19 nt, Homo sapiens
  misc_RNA (1)...(19): siRNA sense strand
uggcaagccuguggacauc

SEQ ID NO: 1420276 - RNA, 19 nt, Homo sapiens
  misc_RNA (1)...(19): siRNA sense strand
gaguaugcagccaagauca

SEQ ID NO: 1420277 - RNA, 19 nt, Homo sapiens
  misc_RNA (1)...(19): siRNA sense strand
gacuguggagugucugaaa

SEQ ID NO: 1420278 - RNA, 19 nt, Homo sapiens
  misc_RNA (1)...(19): siRNA sense strand
gagaaccugcuggccaaga

SEQ ID NO: 1420279 - RNA, 19 nt, Homo sapiens
  misc_RNA (1)...(19): siRNA sense strand
agcaggagaucauuaagac

SEQ ID NO: 1420280 - RNA, 19 nt, Homo sapiens
  misc_RNA (1)...(19): siRNA sense strand
ggaagcaggagaucauuaa

SEQ ID NO: 1420281 - RNA, 19 nt, Homo sapiens
  misc_RNA (1)...(19): siRNA sense strand
caacaacggugacuuugag

SEQ ID NO: 1420282 - RNA, 19 nt, Homo sapiens
  misc_RNA (1)...(19): siRNA sense strand
cagcaggcaugguuugguu

SEQ ID NO: 1420283 - RNA, 19 nt, Homo sapiens
  misc_RNA (1)...(19): siRNA sense strand
gcacgucauuggagaggau

SEQ ID NO: 1420284 - RNA, 19 nt, Homo sapiens
  misc_RNA (1)...(19): siRNA sense strand
cagugaagcuggcagacuu

SEQ ID NO: 1420285 - RNA, 19 nt, Homo sapiens
  misc_RNA (1)...(19): siRNA sense strand
ccaagaucaucaacaccaa

SEQ ID NO: 1420286 - RNA, 19 nt, Homo sapiens
  misc_RNA (1)...(19): siRNA sense strand
gcaagccuguggacaucug

SEQ ID NO: 1420287 - RNA, 19 nt, Homo sapiens
  misc_RNA (1)...(19): siRNA sense strand
caaaggggcugcagugaag

SEQ ID NO: 1420288 - RNA, 19 nt, Homo sapiens
  misc_RNA (1)...(19): siRNA sense strand
uaccagcucuacgaggaua

SEQ ID NO: 1420289 - RNA, 19 nt, Homo sapiens
  misc_RNA (1)...(19): siRNA sense strand
agaaccugcuggccaagaa

SEQ ID NO: 1420290 - RNA, 19 nt, Homo sapiens
  misc_RNA (1)...(19): siRNA sense strand
gaucaucaacaccaagaag

SEQ ID NO: 1420291 - RNA, 19 nt, Homo sapiens
  misc_RNA (1)...(19): siRNA sense strand
cggaagcaggagaucauua

SEQ ID NO: 1420292 - RNA, 19 nt, Homo sapiens
  misc_RNA (1)...(19): siRNA sense strand
cgucacuccugaagccaaa

SEQ ID NO: 1420293 - RNA, 19 nt, Homo sapiens
  misc_RNA (1)...(19): siRNA sense strand
cagccaagaucaucaacac

SEQ ID NO: 1420294 - RNA, 19 nt, Homo sapiens
  misc_RNA (1)...(19): siRNA sense strand
ucaaccagaugcugaccau

SEQ ID NO: 1420295 - RNA, 19 nt, Homo sapiens
  misc_RNA (1)...(19): siRNA sense strand
gcagacuucggccuagcua

SEQ ID NO: 1420296 - RNA, 19 nt, Homo sapiens
  misc_RNA (1)...(19): siRNA sense strand
acauccggcucacgcagua

SEQ ID NO: 1420297 - RNA, 19 nt, Homo sapiens
  misc_RNA (1)...(19): siRNA sense strand
agccagagaucaccagaag

SEQ ID NO: 1420298 - RNA, 19 nt, Homo sapiens
  misc_RNA (1)...(19): siRNA sense strand
ggacgaggaccagcacaag

SEQ ID NO: 1420299 - RNA, 19 nt, Homo sapiens
  misc_RNA (1)...(19): siRNA sense strand
ggacaccgucacuccugaa

SEQ ID NO: 1420300 - RNA, 19 nt, Homo sapiens
  misc_RNA (1)...(19): siRNA sense strand
ccagagaucaccagaagcu

SEQ ID NO: 1420301 - RNA, 19 nt, Homo sapiens
  misc_RNA (1)...(19): siRNA sense strand
gagccauccucaccaccau

SEQ ID NO: 1420302 - RNA, 19 nt, Homo sapiens
  misc_RNA (1)...(19): siRNA sense strand
gcaaaggggcugcagugaa

SEQ ID NO: 1420303 - RNA, 19 nt, Homo sapiens
  misc_RNA (1)...(19): siRNA sense strand
guucuccauugucaccaaa

SEQ ID NO: 1420304 - RNA, 19 nt, Homo sapiens
  misc_RNA (1)...(19): siRNA sense strand
ggucuucgaucuggucacu

SEQ ID NO: 1420305 - RNA, 19 nt, Homo sapiens
  misc_RNA (1)...(19): siRNA sense strand
aagcaggagaucauuaaga

SEQ ID NO: 1420306 - RNA, 19 nt, Homo sapiens
  misc_RNA (1)...(19): siRNA sense strand
gcaggcaugguuugguuuc

SEQ ID NO: 1420307 - RNA, 19 nt, Homo sapiens
  misc_RNA (1)...(19): siRNA sense strand
ccgaggagggcuuccacua

SEQ ID NO: 1420308 - RNA, 19 nt, Homo sapiens
  misc_RNA (1)...(19): siRNA sense strand
ggcagaacgugcacuucca

SEQ ID NO: 1420309 - RNA, 19 nt, Homo sapiens
  misc_RNA (1)...(19): siRNA sense strand
gcaccggccaugaguaugc

SEQ ID NO: 1420310 - RNA, 19 nt, Homo sapiens
  misc_RNA (1)...(19): siRNA sense strand
gaagcaggagaucauuaag

SEQ ID NO: 1420311 - RNA, 19 nt, Homo sapiens
  misc_RNA (1)...(19): siRNA sense strand
caucgaggccgucaacaac

SEQ ID NO: 1420312 - RNA, 19 nt, Homo sapiens
  misc_RNA (1)...(19): siRNA sense strand
uggcaagccuguggacauc

SEQ ID NO: 1420313 - RNA, 19 nt, Homo sapiens
  misc_RNA (1)...(19): siRNA sense strand
gaguaugcagccaagauca

SEQ ID NO: 1420314 - RNA, 19 nt, Homo sapiens
  misc_RNA (1)...(19): siRNA sense strand
gacuguggagugucugaaa

SEQ ID NO: 1420315 - RNA, 19 nt, Homo sapiens
  misc_RNA (1)...(19): siRNA sense strand
gagaaccugcuggccaaga

SEQ ID NO: 1420316 - RNA, 19 nt, Homo sapiens
  misc_RNA (1)...(19): siRNA sense strand
agcaggagaucauuaagac

SEQ ID NO: 1420317 - RNA, 19 nt, Homo sapiens
  misc_RNA (1)...(19): siRNA sense strand
ggaagcaggagaucauuaa

SEQ ID NO: 1420318 - RNA, 19 nt, Homo sapiens
  misc_RNA (1)...(19): siRNA sense strand
caacaacggugacuuugag

SEQ ID NO: 1420319 - RNA, 19 nt, Homo sapiens
  misc_RNA (1)...(19): siRNA sense strand
cagcaggcaugguuugguu

SEQ ID NO: 1420320 - RNA, 19 nt, Homo sapiens
  misc_RNA (1)...(19): siRNA sense strand
gcacgucauuggagaggau

SEQ ID NO: 1420321 - RNA, 19 nt, Homo sapiens
  misc_RNA (1)...(19): siRNA sense strand
cagugaagcuggcagacuu

SEQ ID NO: 1420322 - RNA, 19 nt, Homo sapiens
  misc_RNA (1)...(19): siRNA sense strand
ccaagaucaucaacaccaa

SEQ ID NO: 1420323 - RNA, 19 nt, Homo sapiens
  misc_RNA (1)...(19): siRNA sense strand
gcaagccuguggacaucug

SEQ ID NO: 1420324 - RNA, 19 nt, Homo sapiens
  misc_RNA (1)...(19): siRNA sense strand
caaaggggcugcagugaag

SEQ ID NO: 1420325 - RNA, 19 nt, Homo sapiens
  misc_RNA (1)...(19): siRNA sense strand
uaccagcucuacgaggaua

SEQ ID NO: 1420326 - RNA, 19 nt, Homo sapiens
  misc_RNA (1)...(19): siRNA sense strand
agaaccugcuggccaagaa

SEQ ID NO: 1420327 - RNA, 19 nt, Homo sapiens
  misc_RNA (1)...(19): siRNA sense strand
gaucaucaacaccaagaag

SEQ ID NO: 1420328 - RNA, 19 nt, Homo sapiens
  misc_RNA (1)...(19): siRNA sense strand
cggaagcaggagaucauua

SEQ ID NO: 1420329 - RNA, 19 nt, Homo sapiens
  misc_RNA (1)...(19): siRNA sense strand
cgucacuccugaagccaaa

SEQ ID NO: 1420330 - RNA, 19 nt, Homo sapiens
  misc_RNA (1)...(19): siRNA sense strand
cagccaagaucaucaacac

SEQ ID NO: 1420331 - RNA, 19 nt, Homo sapiens
  misc_RNA (1)...(19): siRNA sense strand
ucaaccagaugcugaccau

SEQ ID NO: 1420332 - RNA, 19 nt, Homo sapiens
  misc_RNA (1)...(19): siRNA sense strand
gcagacuucggccuagcua

SEQ ID NO: 1420333 - RNA, 19 nt, Homo sapiens
  misc_RNA (1)...(19): siRNA sense strand
acauccggcucacgcagua

SEQ ID NO: 1420334 - RNA, 19 nt, Homo sapiens
  misc_RNA (1)...(19): siRNA sense strand
agccagagaucaccagaag

SEQ ID NO: 1420335 - RNA, 19 nt, Homo sapiens
  misc_RNA (1)...(19): siRNA sense strand
ggacgaggaccagcacaag

SEQ ID NO: 1420336 - RNA, 19 nt, Homo sapiens
  misc_RNA (1)...(19): siRNA sense strand
ggacaccgucacuccugaa

SEQ ID NO: 1420337 - RNA, 19 nt, Homo sapiens
  misc_RNA (1)...(19): siRNA sense strand
ccagagaucaccagaagcu

SEQ ID NO: 1420338 - RNA, 19 nt, Homo sapiens
  misc_RNA (1)...(19): siRNA sense strand
gagccauccucaccaccau

SEQ ID NO: 1420339 - RNA, 19 nt, Homo sapiens
  misc_RNA (1)...(19): siRNA sense strand
gcaaaggggcugcagugaa

SEQ ID NO: 1420340 - RNA, 19 nt, Homo sapiens
  misc_RNA (1)...(19): siRNA sense strand
guucuccauugucaccaaa

SEQ ID NO: 1420341 - RNA, 19 nt, Homo sapiens
  misc_RNA (1)...(19): siRNA sense strand
ggucuucgaucuggucacu

SEQ ID NO: 1420342 - RNA, 19 nt, Homo sapiens
  misc_RNA (1)...(19): siRNA sense strand
aagcaggagaucauuaaga

SEQ ID NO: 1420343 - RNA, 19 nt, Homo sapiens
  misc_RNA (1)...(19): siRNA sense strand
gcaggcaugguuugguuuc

SEQ ID NO: 1420344 - RNA, 19 nt, Homo sapiens
  misc_RNA (1)...(19): siRNA sense strand
ccgaggagggcuuccacua

SEQ ID NO: 1420345 - RNA, 19 nt, Homo sapiens
  misc_RNA (1)...(19): siRNA sense strand
ggcagaacgugcacuucca

SEQ ID NO: 1420346 - RNA, 19 nt, Homo sapiens
  misc_RNA (1)...(19): siRNA sense strand
gcaccggccaugaguaugc

SEQ ID NO: 1420347 - RNA, 19 nt, Homo sapiens
  misc_RNA (1)...(19): siRNA sense strand
gaagcaggagaucauuaag

SEQ ID NO: 1420348 - RNA, 19 nt, Homo sapiens
  misc_RNA (1)...(19): siRNA sense strand
caucgaggccgucaacaac

SEQ ID NO: 1420349 - RNA, 19 nt, Homo sapiens
  misc_RNA (1)...(19): siRNA sense strand
uggcaagccuguggacauc

SEQ ID NO: 1420350 - RNA, 19 nt, Homo sapiens
  misc_RNA (1)...(19): siRNA sense strand
gaguaugcagccaagauca

SEQ ID NO: 1420351 - RNA, 19 nt, Homo sapiens
  misc_RNA (1)...(19): siRNA sense strand
gacuguggagugucugaaa

SEQ ID NO: 1420352 - RNA, 19 nt, Homo sapiens
  misc_RNA (1)...(19): siRNA sense strand
gagaaccugcuggccaaga

SEQ ID NO: 1420353 - RNA, 19 nt, Homo sapiens
  misc_RNA (1)...(19): siRNA sense strand
agcaggagaucauuaagac

SEQ ID NO: 1420354 - RNA, 19 nt, Homo sapiens
  misc_RNA (1)...(19): siRNA sense strand
ggaagcaggagaucauuaa

SEQ ID NO: 1420355 - RNA, 19 nt, Homo sapiens
  misc_RNA (1)...(19): siRNA sense strand
caacaacggugacuuugag

SEQ ID NO: 1420356 - RNA, 19 nt, Homo sapiens
  misc_RNA (1)...(19): siRNA sense strand
cagcaggcaugguuugguu

SEQ ID NO: 1420357 - RNA, 19 nt, Homo sapiens
  misc_RNA (1)...(19): siRNA sense strand
gcacgucauuggagaggau

SEQ ID NO: 1420358 - RNA, 19 nt, Homo sapiens
  misc_RNA (1)...(19): siRNA sense strand
cagugaagcuggcagacuu

SEQ ID NO: 1420359 - RNA, 19 nt, Homo sapiens
  misc_RNA (1)...(19): siRNA sense strand
ccaagaucaucaacaccaa

SEQ ID NO: 1420360 - RNA, 19 nt, Homo sapiens
  misc_RNA (1)...(19): siRNA sense strand
gcaagccuguggacaucug

SEQ ID NO: 1420361 - RNA, 19 nt, Homo sapiens
  misc_RNA (1)...(19): siRNA sense strand
caaaggggcugcagugaag

SEQ ID NO: 1420362 - RNA, 19 nt, Homo sapiens
  misc_RNA (1)...(19): siRNA sense strand
uaccagcucuacgaggaua

SEQ ID NO: 1420363 - RNA, 19 nt, Homo sapiens
  misc_RNA (1)...(19): siRNA sense strand
agaaccugcuggccaagaa

SEQ ID NO: 1420364 - RNA, 19 nt, Homo sapiens
  misc_RNA (1)...(19): siRNA sense strand
gaucaucaacaccaagaag

SEQ ID NO: 1420365 - RNA, 19 nt, Homo sapiens
  misc_RNA (1)...(19): siRNA sense strand
cggaagcaggagaucauua

SEQ ID NO: 1420366 - RNA, 19 nt, Homo sapiens
  misc_RNA (1)...(19): siRNA sense strand
cgucacuccugaagccaaa

SEQ ID NO: 1420367 - RNA, 19 nt, Homo sapiens
  misc_RNA (1)...(19): siRNA sense strand
cagccaagaucaucaacac

SEQ ID NO: 1420368 - RNA, 19 nt, Homo sapiens
  misc_RNA (1)...(19): siRNA sense strand
ucaaccagaugcugaccau

SEQ ID NO: 1420369 - RNA, 19 nt, Homo sapiens
  misc_RNA (1)...(19): siRNA sense strand
gcagacuucggccuagcua

SEQ ID NO: 1420370 - RNA, 19 nt, Homo sapiens
  misc_RNA (1)...(19): siRNA sense strand
acauccggcucacgcagua

SEQ ID NO: 1420371 - RNA, 19 nt, Homo sapiens
  misc_RNA (1)...(19): siRNA sense strand
agccagagaucaccagaag

SEQ ID NO: 1420372 - RNA, 19 nt, Homo sapiens
  misc_RNA (1)...(19): siRNA sense strand
ggacgaggaccagcacaag

SEQ ID NO: 1420373 - RNA, 19 nt, Homo sapiens
  misc_RNA (1)...(19): siRNA sense strand
ggacaccgucacuccugaa

SEQ ID NO: 1420374 - RNA, 19 nt, Homo sapiens
  misc_RNA (1)...(19): siRNA sense strand
ccagagaucaccagaagcu

SEQ ID NO: 1420375 - RNA, 19 nt, Homo sapiens
  misc_RNA (1)...(19): siRNA sense strand
gagccauccucaccaccau

SEQ ID NO: 1420376 - RNA, 19 nt, Homo sapiens
  misc_RNA (1)...(19): siRNA sense strand
gcaaaggggcugcagugaa

SEQ ID NO: 1420377 - RNA, 19 nt, Homo sapiens
  misc_RNA (1)...(19): siRNA sense strand
guucuccauugucaccaaa

SEQ ID NO: 1420378 - RNA, 19 nt, Homo sapiens
  misc_RNA (1)...(19): siRNA sense strand
ggucuucgaucuggucacu

SEQ ID NO: 1420379 - RNA, 19 nt, Homo sapiens
  misc_RNA (1)...(19): siRNA sense strand
aagcaggagaucauuaaga

SEQ ID NO: 1420380 - RNA, 19 nt, Homo sapiens
  misc_RNA (1)...(19): siRNA sense strand
gcaggcaugguuugguuuc

SEQ ID NO: 1420381 - RNA, 19 nt, Homo sapiens
  misc_RNA (1)...(19): siRNA sense strand
ccgaggagggcuuccacua

SEQ ID NO: 1420382 - RNA, 19 nt, Homo sapiens
  misc_RNA (1)...(19): siRNA sense strand
ggcagaacgugcacuucca

SEQ ID NO: 1420383 - RNA, 19 nt, Homo sapiens
  misc_RNA (1)...(19): siRNA sense strand
gcaccggccaugaguaugc

SEQ ID NO: 1420384 - RNA, 19 nt, Homo sapiens
  misc_RNA (1)...(19): siRNA sense strand
gaagcaggagaucauuaag

SEQ ID NO: 1420385 - RNA, 19 nt, Homo sapiens
  misc_RNA (1)...(19): siRNA sense strand
caucgaggccgucaacaac

SEQ ID NO: 1420386 - RNA, 19 nt, Homo sapiens
  misc_RNA (1)...(19): siRNA sense strand
uggcaagccuguggacauc

SEQ ID NO: 1420387 - RNA, 19 nt, Homo sapiens
  misc_RNA (1)...(19): siRNA sense strand
gaguaugcagccaagauca

SEQ ID NO: 1420388 - RNA, 19 nt, Homo sapiens
  misc_RNA (1)...(19): siRNA sense strand
gacuguggagugucugaaa

SEQ ID NO: 1420389 - RNA, 19 nt, Homo sapiens
  misc_RNA (1)...(19): siRNA sense strand
gagaaccugcuggccaaga

SEQ ID NO: 1420390 - RNA, 19 nt, Homo sapiens
  misc_RNA (1)...(19): siRNA sense strand
agcaggagaucauuaagac

SEQ ID NO: 1420391 - RNA, 19 nt, Homo sapiens
  misc_RNA (1)...(19): siRNA sense strand
ggaagcaggagaucauuaa

SEQ ID NO: 1420392 - RNA, 19 nt, Homo sapiens
  misc_RNA (1)...(19): siRNA sense strand
caacaacggugacuuugag

SEQ ID NO: 1420393 - RNA, 19 nt, Homo sapiens
  misc_RNA (1)...(19): siRNA sense strand
cagcaggcaugguuugguu

SEQ ID NO: 1420394 - RNA, 19 nt, Homo sapiens
  misc_RNA (1)...(19): siRNA sense strand
gcacgucauuggagaggau

SEQ ID NO: 1420395 - RNA, 19 nt, Homo sapiens
  misc_RNA (1)...(19): siRNA sense strand
cagugaagcuggcagacuu

SEQ ID NO: 1420396 - RNA, 19 nt, Homo sapiens
  misc_RNA (1)...(19): siRNA sense strand
ccaagaucaucaacaccaa

SEQ ID NO: 1420397 - RNA, 19 nt, Homo sapiens
  misc_RNA (1)...(19): siRNA sense strand
gcaagccuguggacaucug

SEQ ID NO: 1420398 - RNA, 19 nt, Homo sapiens
  misc_RNA (1)...(19): siRNA sense strand
caaaggggcugcagugaag

SEQ ID NO: 1420399 - RNA, 19 nt, Homo sapiens
  misc_RNA (1)...(19): siRNA sense strand
uaccagcucuacgaggaua

SEQ ID NO: 1420400 - RNA, 19 nt, Homo sapiens
  misc_RNA (1)...(19): siRNA sense strand
agaaccugcuggccaagaa

SEQ ID NO: 1420401 - RNA, 19 nt, Homo sapiens
  misc_RNA (1)...(19): siRNA sense strand
gaucaucaacaccaagaag

SEQ ID NO: 1420402 - RNA, 19 nt, Homo sapiens
  misc_RNA (1)...(19): siRNA sense strand
cggaagcaggagaucauua

SEQ ID NO: 1420403 - RNA, 19 nt, Homo sapiens
  misc_RNA (1)...(19): siRNA sense strand
cgucacuccugaagccaaa

SEQ ID NO: 1420404 - RNA, 19 nt, Homo sapiens
  misc_RNA (1)...(19): siRNA sense strand
cagccaagaucaucaacac

SEQ ID NO: 1420405 - RNA, 19 nt, Homo sapiens
  misc_RNA (1)...(19): siRNA sense strand
ucaaccagaugcugaccau

SEQ ID NO: 1420406 - RNA, 19 nt, Homo sapiens
  misc_RNA (1)...(19): siRNA sense strand
gcagacuucggccuagcua

SEQ ID NO: 1420407 - RNA, 19 nt, Homo sapiens
  misc_RNA (1)...(19): siRNA sense strand
acauccggcucacgcagua

SEQ ID NO: 1420408 - RNA, 19 nt, Homo sapiens
  misc_RNA (1)...(19): siRNA sense strand
agccagagaucaccagaag

SEQ ID NO: 1420409 - RNA, 19 nt, Homo sapiens
  misc_RNA (1)...(19): siRNA sense strand
ggacgaggaccagcacaag

SEQ ID NO: 1420410 - RNA, 19 nt, Homo sapiens
  misc_RNA (1)...(19): siRNA sense strand
ggacaccgucacuccugaa

SEQ ID NO: 1420411 - RNA, 19 nt, Homo sapiens
  misc_RNA (1)...(19): siRNA sense strand
ccagagaucaccagaagcu

SEQ ID NO: 1420412 - RNA, 19 nt, Homo sapiens
  misc_RNA (1)...(19): siRNA sense strand
gagccauccucaccaccau

SEQ ID NO: 1420413 - RNA, 19 nt, Homo sapiens
  misc_RNA (1)...(19): siRNA sense strand
gcaaaggggcugcagugaa

SEQ ID NO: 1420414 - RNA, 19 nt, Homo sapiens
  misc_RNA (1)...(19): siRNA sense strand
guucuccauugucaccaaa

SEQ ID NO: 1420415 - RNA, 19 nt, Homo sapiens
  misc_RNA (1)...(19): siRNA sense strand
ggucuucgaucuggucacu

SEQ ID NO: 1420416 - RNA, 19 nt, Homo sapiens
  misc_RNA (1)...(19): siRNA sense strand
aagcaggagaucauuaaga

SEQ ID NO: 1420417 - RNA, 19 nt, Homo sapiens
  misc_RNA (1)...(19): siRNA sense strand
gcaggcaugguuugguuuc

SEQ ID NO: 1420418 - RNA, 19 nt, Homo sapiens
  misc_RNA (1)...(19): siRNA sense strand
ccgaggagggcuuccacua

SEQ ID NO: 1420419 - RNA, 19 nt, Homo sapiens
  misc_RNA (1)...(19): siRNA sense strand
ggcagaacgugcacuucca

SEQ ID NO: 1420420 - RNA, 19 nt, Homo sapiens
  misc_RNA (1)...(19): siRNA sense strand
gcaccggccaugaguaugc

SEQ ID NO: 1420421 - RNA, 19 nt, Homo sapiens
  misc_RNA (1)...(19): siRNA sense strand
gaagcaggagaucauuaag

SEQ ID NO: 1420422 - RNA, 19 nt, Homo sapiens
  misc_RNA (1)...(19): siRNA sense strand
caucgaggccgucaacaac

SEQ ID NO: 1420423 - RNA, 19 nt, Homo sapiens
  misc_RNA (1)...(19): siRNA sense strand
uggcaagccuguggacauc

SEQ ID NO: 1420424 - RNA, 19 nt, Homo sapiens
  misc_RNA (1)...(19): siRNA sense strand
gaguaugcagccaagauca

SEQ ID NO: 1420425 - RNA, 19 nt, Homo sapiens
  misc_RNA (1)...(19): siRNA sense strand
gacuguggagugucugaaa

SEQ ID NO: 1420426 - RNA, 19 nt, Homo sapiens
  misc_RNA (1)...(19): siRNA sense strand
gagaaccugcuggccaaga

SEQ ID NO: 1420427 - RNA, 19 nt, Homo sapiens
  misc_RNA (1)...(19): siRNA sense strand
agcaggagaucauuaagac

SEQ ID NO: 1420428 - RNA, 19 nt, Homo sapiens
  misc_RNA (1)...(19): siRNA sense strand
ggaagcaggagaucauuaa

SEQ ID NO: 1420429 - RNA, 19 nt, Homo sapiens
  misc_RNA (1)...(19): siRNA sense strand
caacaacggugacuuugag

SEQ ID NO: 1420430 - RNA, 19 nt, Homo sapiens
  misc_RNA (1)...(19): siRNA sense strand
cagcaggcaugguuugguu

SEQ ID NO: 1420431 - RNA, 19 nt, Homo sapiens
  misc_RNA (1)...(19): siRNA sense strand
gcacgucauuggagaggau

SEQ ID NO: 1420432 - RNA, 19 nt, Homo sapiens
  misc_RNA (1)...(19): siRNA sense strand
cagugaagcuggcagacuu

SEQ ID NO: 1420433 - RNA, 19 nt, Homo sapiens
  misc_RNA (1)...(19): siRNA sense strand
ccaagaucaucaacaccaa

SEQ ID NO: 1420434 - RNA, 19 nt, Homo sapiens
  misc_RNA (1)...(19): siRNA sense strand
gcaagccuguggacaucug

SEQ ID NO: 1420435 - RNA, 19 nt, Homo sapiens
  misc_RNA (1)...(19): siRNA sense strand
caaaggggcugcagugaag

SEQ ID NO: 1420436 - RNA, 19 nt, Homo sapiens
  misc_RNA (1)...(19): siRNA sense strand
uaccagcucuacgaggaua

SEQ ID NO: 1420437 - RNA, 19 nt, Homo sapiens
  misc_RNA (1)...(19): siRNA sense strand
agaaccugcuggccaagaa

SEQ ID NO: 1420438 - RNA, 19 nt, Homo sapiens
  misc_RNA (1)...(19): siRNA sense strand
gaucaucaacaccaagaag

SEQ ID NO: 1420439 - RNA, 19 nt, Homo sapiens
  misc_RNA (1)...(19): siRNA sense strand
cggaagcaggagaucauua

SEQ ID NO: 1420440 - RNA, 19 nt, Homo sapiens
  misc_RNA (1)...(19): siRNA sense strand
cgucacuccugaagccaaa

SEQ ID NO: 1420441 - RNA, 19 nt, Homo sapiens
  misc_RNA (1)...(19): siRNA sense strand
cagccaagaucaucaacac

SEQ ID NO: 1420442 - RNA, 19 nt, Homo sapiens
  misc_RNA (1)...(19): siRNA sense strand
ucaaccagaugcugaccau

SEQ ID NO: 1420443 - RNA, 19 nt, Homo sapiens
  misc_RNA (1)...(19): siRNA sense strand
gcagacuucggccuagcua

SEQ ID NO: 1420444 - RNA, 19 nt, Homo sapiens
  misc_RNA (1)...(19): siRNA sense strand
acauccggcucacgcagua

SEQ ID NO: 1420445 - RNA, 19 nt, Homo sapiens
  misc_RNA (1)...(19): siRNA sense strand
agccagagaucaccagaag

SEQ ID NO: 1420446 - RNA, 19 nt, Homo sapiens
  misc_RNA (1)...(19): siRNA sense strand
ggacgaggaccagcacaag

SEQ ID NO: 1420447 - RNA, 19 nt, Homo sapiens
  misc_RNA (1)...(19): siRNA sense strand
ggacaccgucacuccugaa

SEQ ID NO: 1420448 - RNA, 19 nt, Homo sapiens
  misc_RNA (1)...(19): siRNA sense strand
ccagagaucaccagaagcu

SEQ ID NO: 1420449 - RNA, 19 nt, Homo sapiens
  misc_RNA (1)...(19): siRNA sense strand
gagccauccucaccaccau

SEQ ID NO: 1420450 - RNA, 19 nt, Homo sapiens
  misc_RNA (1)...(19): siRNA sense strand
gcaaaggggcugcagugaa

SEQ ID NO: 1420451 - RNA, 19 nt, Homo sapiens
  misc_RNA (1)...(19): siRNA sense strand
guucuccauugucaccaaa

SEQ ID NO: 1420452 - RNA, 19 nt, Homo sapiens
  misc_RNA (1)...(19): siRNA sense strand
ggucuucgaucuggucacu

SEQ ID NO: 1420453 - RNA, 19 nt, Homo sapiens
  misc_RNA (1)...(19): siRNA sense strand
aagcaggagaucauuaaga

SEQ ID NO: 1420454 - RNA, 19 nt, Homo sapiens
  misc_RNA (1)...(19): siRNA sense strand
gcaggcaugguuugguuuc

SEQ ID NO: 1420455 - RNA, 19 nt, Homo sapiens
  misc_RNA (1)...(19): siRNA sense strand
ccgaggagggcuuccacua

SEQ ID NO: 1420456 - RNA, 19 nt, Homo sapiens
  misc_RNA (1)...(19): siRNA sense strand
ggcagaacgugcacuucca

SEQ ID NO: 1420457 - RNA, 19 nt, Homo sapiens
  misc_RNA (1)...(19): siRNA sense strand
gcaccggccaugaguaugc

SEQ ID NO: 1420458 - RNA, 19 nt, Homo sapiens
  misc_RNA (1)...(19): siRNA sense strand
gaagcaggagaucauuaag

SEQ ID NO: 1420459 - RNA, 19 nt, Homo sapiens
  misc_RNA (1)...(19): siRNA sense strand
caucgaggccgucaacaac

SEQ ID NO: 1420460 - RNA, 19 nt, Homo sapiens
  misc_RNA (1)...(19): siRNA sense strand
uggcaagccuguggacauc

SEQ ID NO: 1420461 - RNA, 19 nt, Homo sapiens
  misc_RNA (1)...(19): siRNA sense strand
gaguaugcagccaagauca

SEQ ID NO: 1420462 - RNA, 19 nt, Homo sapiens
  misc_RNA (1)...(19): siRNA sense strand
gacuguggagugucugaaa

SEQ ID NO: 1420463 - RNA, 19 nt, Homo sapiens
  misc_RNA (1)...(19): siRNA sense strand
gagaaccugcuggccaaga

SEQ ID NO: 1420464 - RNA, 19 nt, Homo sapiens
  misc_RNA (1)...(19): siRNA sense strand
agcaggagaucauuaagac

SEQ ID NO: 1420465 - RNA, 19 nt, Homo sapiens
  misc_RNA (1)...(19): siRNA sense strand
ggaagcaggagaucauuaa

SEQ ID NO: 1420466 - RNA, 19 nt, Homo sapiens
  misc_RNA (1)...(19): siRNA sense strand
caacaacggugacuuugag

SEQ ID NO: 1420467 - RNA, 19 nt, Homo sapiens
  misc_RNA (1)...(19): siRNA sense strand
cagcaggcaugguuugguu

SEQ ID NO: 1420468 - RNA, 19 nt, Homo sapiens
  misc_RNA (1)...(19): siRNA sense strand
gcacgucauuggagaggau

SEQ ID NO: 1420469 - RNA, 19 nt, Homo sapiens
  misc_RNA (1)...(19): siRNA sense strand
cagugaagcuggcagacuu

SEQ ID NO: 1420470 - RNA, 19 nt, Homo sapiens
  misc_RNA (1)...(19): siRNA sense strand
ccaagaucaucaacaccaa

SEQ ID NO: 1420471 - RNA, 19 nt, Homo sapiens
  misc_RNA (1)...(19): siRNA sense strand
gcaagccuguggacaucug

SEQ ID NO: 1420472 - RNA, 19 nt, Homo sapiens
  misc_RNA (1)...(19): siRNA sense strand
caaaggggcugcagugaag

SEQ ID NO: 1420473 - RNA, 19 nt, Homo sapiens
  misc_RNA (1)...(19): siRNA sense strand
uaccagcucuacgaggaua

SEQ ID NO: 1420474 - RNA, 19 nt, Homo sapiens
  misc_RNA (1)...(19): siRNA sense strand
agaaccugcuggccaagaa

SEQ ID NO: 1420475 - RNA, 19 nt, Homo sapiens
  misc_RNA (1)...(19): siRNA sense strand
gaucaucaacaccaagaag

SEQ ID NO: 1420476 - RNA, 19 nt, Homo sapiens
  misc_RNA (1)...(19): siRNA sense strand
cggaagcaggagaucauua

SEQ ID NO: 1420477 - RNA, 19 nt, Homo sapiens
  misc_RNA (1)...(19): siRNA sense strand
cgucacuccugaagccaaa

SEQ ID NO: 1420478 - RNA, 19 nt, Homo sapiens
  misc_RNA (1)...(19): siRNA sense strand
cagccaagaucaucaacac

SEQ ID NO: 1420479 - RNA, 19 nt, Homo sapiens
  misc_RNA (1)...(19): siRNA sense strand
ucaaccagaugcugaccau

SEQ ID NO: 1420480 - RNA, 19 nt, Homo sapiens
  misc_RNA (1)...(19): siRNA sense strand
gcagacuucggccuagcua

SEQ ID NO: 1420481 - RNA, 19 nt, Homo sapiens
  misc_RNA (1)...(19): siRNA sense strand
acauccggcucacgcagua

SEQ ID NO: 1420482 - RNA, 19 nt, Homo sapiens
  misc_RNA (1)...(19): siRNA sense strand
agccagagaucaccagaag

SEQ ID NO: 1420483 - RNA, 19 nt, Homo sapiens
  misc_RNA (1)...(19): siRNA sense strand
ggacgaggaccagcacaag

SEQ ID NO: 1420484 - RNA, 19 nt, Homo sapiens
  misc_RNA (1)...(19): siRNA sense strand
ggacaccgucacuccugaa

SEQ ID NO: 1420485 - RNA, 19 nt, Homo sapiens
  misc_RNA (1)...(19): siRNA sense strand
ccagagaucaccagaagcu

SEQ ID NO: 1420486 - RNA, 19 nt, Homo sapiens
  misc_RNA (1)...(19): siRNA sense strand
gagccauccucaccaccau

SEQ ID NO: 1420487 - RNA, 19 nt, Homo sapiens
  misc_RNA (1)...(19): siRNA sense strand
gcaaaggggcugcagugaa

SEQ ID NO: 1420488 - RNA, 19 nt, Homo sapiens
  misc_RNA (1)...(19): siRNA sense strand
guucuccauugucaccaaa

SEQ ID NO: 1420489 - RNA, 19 nt, Homo sapiens
  misc_RNA (1)...(19): siRNA sense strand
ggucuucgaucuggucacu

SEQ ID NO: 1420490 - RNA, 19 nt, Homo sapiens
  misc_RNA (1)...(19): siRNA sense strand
aagcaggagaucauuaaga

SEQ ID NO: 1420491 - RNA, 19 nt, Homo sapiens
  misc_RNA (1)...(19): siRNA sense strand
gcaggcaugguuugguuuc

SEQ ID NO: 1420492 - RNA, 19 nt, Homo sapiens
  misc_RNA (1)...(19): siRNA sense strand
ccgaggagggcuuccacua

SEQ ID NO: 1420493 - RNA, 19 nt, Homo sapiens
  misc_RNA (1)...(19): siRNA sense strand
ggcagaacgugcacuucca

SEQ ID NO: 1420494 - RNA, 19 nt, Homo sapiens
  misc_RNA (1)...(19): siRNA sense strand
gcaccggccaugaguaugc

SEQ ID NO: 1420495 - RNA, 19 nt, Homo sapiens
  misc_RNA (1)...(19): siRNA sense strand
gaagcaggagaucauuaag

SEQ ID NO: 1420496 - RNA, 19 nt, Homo sapiens
  misc_RNA (1)...(19): siRNA sense strand
caucgaggccgucaacaac

SEQ ID NO: 1420497 - RNA, 19 nt, Homo sapiens
  misc_RNA (1)...(19): siRNA sense strand
uggcaagccuguggacauc

SEQ ID NO: 1420498 - RNA, 19 nt, Homo sapiens
  misc_RNA (1)...(19): siRNA sense strand
gaguaugcagccaagauca

SEQ ID NO: 1420499 - RNA, 19 nt, Homo sapiens
  misc_RNA (1)...(19): siRNA sense strand
gacuguggagugucugaaa

SEQ ID NO: 1420500 - RNA, 19 nt, Homo sapiens
  misc_RNA (1)...(19): siRNA sense strand
gagaaccugcuggccaaga

SEQ ID NO: 1420501 - RNA, 19 nt, Homo sapiens
  misc_RNA (1)...(19): siRNA sense strand
agcaggagaucauuaagac

SEQ ID NO: 1420502 - RNA, 19 nt, Homo sapiens
  misc_RNA (1)...(19): siRNA sense strand
ggaagcaggagaucauuaa

SEQ ID NO: 1420503 - RNA, 19 nt, Homo sapiens
  misc_RNA (1)...(19): siRNA sense strand
caacaacggugacuuugag

SEQ ID NO: 1420504 - RNA, 19 nt, Homo sapiens
  misc_RNA (1)...(19): siRNA sense strand
cagcaggcaugguuugguu

SEQ ID NO: 1420505 - RNA, 19 nt, Homo sapiens
  misc_RNA (1)...(19): siRNA sense strand
gcacgucauuggagaggau

SEQ ID NO: 1420506 - RNA, 19 nt, Homo sapiens
  misc_RNA (1)...(19): siRNA sense strand
cagugaagcuggcagacuu

SEQ ID NO: 1420507 - RNA, 19 nt, Homo sapiens
  misc_RNA (1)...(19): siRNA sense strand
ccaagaucaucaacaccaa

SEQ ID NO: 1420508 - RNA, 19 nt, Homo sapiens
  misc_RNA (1)...(19): siRNA sense strand
gcaagccuguggacaucug

SEQ ID NO: 1420509 - RNA, 19 nt, Homo sapiens
  misc_RNA (1)...(19): siRNA sense strand
caaaggggcugcagugaag

SEQ ID NO: 1420510 - RNA, 19 nt, Homo sapiens
  misc_RNA (1)...(19): siRNA sense strand
uaccagcucuacgaggaua

SEQ ID NO: 1420511 - RNA, 19 nt, Homo sapiens
  misc_RNA (1)...(19): siRNA sense strand
agaaccugcuggccaagaa

SEQ ID NO: 1420512 - RNA, 19 nt, Homo sapiens
  misc_RNA (1)...(19): siRNA sense strand
gaucaucaacaccaagaag

SEQ ID NO: 1420513 - RNA, 19 nt, Homo sapiens
  misc_RNA (1)...(19): siRNA sense strand
cggaagcaggagaucauua

SEQ ID NO: 1420514 - RNA, 19 nt, Homo sapiens
  misc_RNA (1)...(19): siRNA sense strand
cgucacuccugaagccaaa

SEQ ID NO: 1420515 - RNA, 19 nt, Homo sapiens
  misc_RNA (1)...(19): siRNA sense strand
cagccaagaucaucaacac

SEQ ID NO: 1420516 - RNA, 19 nt, Homo sapiens
  misc_RNA (1)...(19): siRNA sense strand
ucaaccagaugcugaccau

SEQ ID NO: 1420517 - RNA, 19 nt, Homo sapiens
  misc_RNA (1)...(19): siRNA sense strand
gcagacuucggccuagcua

SEQ ID NO: 1420518 - RNA, 19 nt, Homo sapiens
  misc_RNA (1)...(19): siRNA sense strand
acauccggcucacgcagua

SEQ ID NO: 1420519 - RNA, 19 nt, Homo sapiens
  misc_RNA (1)...(19): siRNA sense strand
agccagagaucaccagaag

SEQ ID NO: 1420520 - RNA, 19 nt, Homo sapiens
  misc_RNA (1)...(19): siRNA sense strand
ggacgaggaccagcacaag

SEQ ID NO: 1420521 - RNA, 19 nt, Homo sapiens
  misc_RNA (1)...(19): siRNA sense strand
ggacaccgucacuccugaa

SEQ ID NO: 1420522 - RNA, 19 nt, Homo sapiens
  misc_RNA (1)...(19): siRNA sense strand
ccagagaucaccagaagcu

SEQ ID NO: 1420523 - RNA, 19 nt, Homo sapiens
  misc_RNA (1)...(19): siRNA sense strand
gagccauccucaccaccau

SEQ ID NO: 1420524 - RNA, 19 nt, Homo sapiens
  misc_RNA (1)...(19): siRNA sense strand
gcaaaggggcugcagugaa

SEQ ID NO: 1420525 - RNA, 19 nt, Homo sapiens
  misc_RNA (1)...(19): siRNA sense strand
guucuccauugucaccaaa

SEQ ID NO: 1420526 - RNA, 19 nt, Homo sapiens
  misc_RNA (1)...(19): siRNA sense strand
ggucuucgaucuggucacu

SEQ ID NO: 1420527 - RNA, 19 nt, Homo sapiens
  misc_RNA (1)...(19): siRNA sense strand
aagcaggagaucauuaaga

SEQ ID NO: 1420528 - RNA, 19 nt, Homo sapiens
  misc_RNA (1)...(19): siRNA sense strand
gcaggcaugguuugguuuc

SEQ ID NO: 1420529 - RNA, 19 nt, Homo sapiens
  misc_RNA (1)...(19): siRNA sense strand
ccgaggagggcuuccacua

SEQ ID NO: 1420530 - RNA, 19 nt, Homo sapiens
  misc_RNA (1)...(19): siRNA sense strand
ggcagaacgugcacuucca

SEQ ID NO: 1420531 - RNA, 19 nt, Homo sapiens
  misc_RNA (1)...(19): siRNA sense strand
gcaccggccaugaguaugc

SEQ ID NO: 1420532 - RNA, 19 nt, Homo sapiens
  misc_RNA (1)...(19): siRNA sense strand
gaagcaggagaucauuaag

SEQ ID NO: 1420533 - RNA, 19 nt, Homo sapiens
  misc_RNA (1)...(19): siRNA sense strand
caucgaggccgucaacaac

SEQ ID NO: 1420534 - RNA, 19 nt, Homo sapiens
  misc_RNA (1)...(19): siRNA sense strand
uggcaagccuguggacauc

SEQ ID NO: 1420535 - RNA, 19 nt, Homo sapiens
  misc_RNA (1)...(19): siRNA sense strand
gaguaugcagccaagauca

SEQ ID NO: 1420536 - RNA, 19 nt, Homo sapiens
  misc_RNA (1)...(19): siRNA sense strand
gacuguggagugucugaaa

SEQ ID NO: 1420537 - RNA, 19 nt, Homo sapiens
  misc_RNA (1)...(19): siRNA sense strand
gagaaccugcuggccaaga

SEQ ID NO: 1420538 - RNA, 19 nt, Homo sapiens
  misc_RNA (1)...(19): siRNA sense strand
agcaggagaucauuaagac

SEQ ID NO: 1420539 - RNA, 19 nt, Homo sapiens
  misc_RNA (1)...(19): siRNA sense strand
ggaagcaggagaucauuaa

SEQ ID NO: 1420540 - RNA, 19 nt, Homo sapiens
  misc_RNA (1)...(19): siRNA sense strand
caacaacggugacuuugag

SEQ ID NO: 1420541 - RNA, 19 nt, Homo sapiens
  misc_RNA (1)...(19): siRNA sense strand
cagcaggcaugguuugguu

SEQ ID NO: 1420542 - RNA, 19 nt, Homo sapiens
  misc_RNA (1)...(19): siRNA sense strand
gcacgucauuggagaggau

SEQ ID NO: 1420543 - RNA, 19 nt, Homo sapiens
  misc_RNA (1)...(19): siRNA sense strand
cagugaagcuggcagacuu

SEQ ID NO: 1420544 - RNA, 19 nt, Homo sapiens
  misc_RNA (1)...(19): siRNA sense strand
ccaagaucaucaacaccaa

SEQ ID NO: 1420545 - RNA, 19 nt, Homo sapiens
  misc_RNA (1)...(19): siRNA sense strand
gcaagccuguggacaucug

SEQ ID NO: 1420546 - RNA, 19 nt, Homo sapiens
  misc_RNA (1)...(19): siRNA sense strand
caaaggggcugcagugaag

SEQ ID NO: 1420547 - RNA, 19 nt, Homo sapiens
  misc_RNA (1)...(19): siRNA sense strand
uaccagcucuacgaggaua

SEQ ID NO: 1420548 - RNA, 19 nt, Homo sapiens
  misc_RNA (1)...(19): siRNA sense strand
agaaccugcuggccaagaa

SEQ ID NO: 1420549 - RNA, 19 nt, Homo sapiens
  misc_RNA (1)...(19): siRNA sense strand
gaucaucaacaccaagaag

SEQ ID NO: 1420550 - RNA, 19 nt, Homo sapiens
  misc_RNA (1)...(19): siRNA sense strand
cggaagcaggagaucauua

SEQ ID NO: 1420551 - RNA, 19 nt, Homo sapiens
  misc_RNA (1)...(19): siRNA sense strand
cgucacuccugaagccaaa

SEQ ID NO: 1420552 - RNA, 19 nt, Homo sapiens
  misc_RNA (1)...(19): siRNA sense strand
cagccaagaucaucaacac

SEQ ID NO: 1420553 - RNA, 19 nt, Homo sapiens
  misc_RNA (1)...(19): siRNA sense strand
ucaaccagaugcugaccau

SEQ ID NO: 1420554 - RNA, 19 nt, Homo sapiens
  misc_RNA (1)...(19): siRNA sense strand
gcagacuucggccuagcua

SEQ ID NO: 1420555 - RNA, 19 nt, Homo sapiens
  misc_RNA (1)...(19): siRNA sense strand
acauccggcucacgcagua

SEQ ID NO: 1420556 - RNA, 19 nt, Homo sapiens
  misc_RNA (1)...(19): siRNA sense strand
agccagagaucaccagaag

SEQ ID NO: 1420557 - RNA, 19 nt, Homo sapiens
  misc_RNA (1)...(19): siRNA sense strand
ggacgaggaccagcacaag

SEQ ID NO: 1420558 - RNA, 19 nt, Homo sapiens
  misc_RNA (1)...(19): siRNA sense strand
ggacaccgucacuccugaa

SEQ ID NO: 1420559 - RNA, 19 nt, Homo sapiens
  misc_RNA (1)...(19): siRNA sense strand
ccagagaucaccagaagcu

SEQ ID NO: 1420560 - RNA, 19 nt, Homo sapiens
  misc_RNA (1)...(19): siRNA sense strand
gagccauccucaccaccau

SEQ ID NO: 1420561 - RNA, 19 nt, Homo sapiens
  misc_RNA (1)...(19): siRNA sense strand
gcaaaggggcugcagugaa

SEQ ID NO: 1420562 - RNA, 19 nt, Homo sapiens
  misc_RNA (1)...(19): siRNA sense strand
guucuccauugucaccaaa

SEQ ID NO: 1420563 - RNA, 19 nt, Homo sapiens
  misc_RNA (1)...(19): siRNA sense strand
ggucuucgaucuggucacu

SEQ ID NO: 1420564 - RNA, 19 nt, Homo sapiens
  misc_RNA (1)...(19): siRNA sense strand
aagcaggagaucauuaaga

SEQ ID NO: 1420565 - RNA, 19 nt, Homo sapiens
  misc_RNA (1)...(19): siRNA sense strand
gcaggcaugguuugguuuc

SEQ ID NO: 1420566 - RNA, 19 nt, Homo sapiens
  misc_RNA (1)...(19): siRNA sense strand
ccgaggagggcuuccacua

SEQ ID NO: 1420567 - RNA, 19 nt, Homo sapiens
  misc_RNA (1)...(19): siRNA sense strand
ggcagaacgugcacuucca

SEQ ID NO: 1420568 - RNA, 19 nt, Homo sapiens
  misc_RNA (1)...(19): siRNA sense strand
gcaccggccaugaguaugc

SEQ ID NO: 1420569 - RNA, 19 nt, Homo sapiens
  misc_RNA (1)...(19): siRNA sense strand
gaagcaggagaucauuaag

SEQ ID NO: 1420570 - RNA, 19 nt, Homo sapiens
  misc_RNA (1)...(19): siRNA sense strand
caucgaggccgucaacaac

SEQ ID NO: 1420571 - RNA, 19 nt, Homo sapiens
  misc_RNA (1)...(19): siRNA sense strand
uggcaagccuguggacauc

SEQ ID NO: 1420572 - RNA, 19 nt, Homo sapiens
  misc_RNA (1)...(19): siRNA sense strand
gaguaugcagccaagauca

SEQ ID NO: 1420573 - RNA, 19 nt, Homo sapiens
  misc_RNA (1)...(19): siRNA sense strand
gacuguggagugucugaaa

SEQ ID NO: 1420574 - RNA, 19 nt, Homo sapiens
  misc_RNA (1)...(19): siRNA sense strand
gagaaccugcuggccaaga

SEQ ID NO: 1420575 - RNA, 19 nt, Homo sapiens
  misc_RNA (1)...(19): siRNA sense strand
agcaggagaucauuaagac

SEQ ID NO: 1420576 - RNA, 19 nt, Homo sapiens
  misc_RNA (1)...(19): siRNA sense strand
ggaagcaggagaucauuaa

SEQ ID NO: 1420577 - RNA, 19 nt, Homo sapiens
  misc_RNA (1)...(19): siRNA sense strand
caacaacggugacuuugag

SEQ ID NO: 1420578 - RNA, 19 nt, Homo sapiens
  misc_RNA (1)...(19): siRNA sense strand
cagcaggcaugguuugguu

SEQ ID NO: 1420579 - RNA, 19 nt, Homo sapiens
  misc_RNA (1)...(19): siRNA sense strand
gcacgucauuggagaggau

SEQ ID NO: 1420580 - RNA, 19 nt, Homo sapiens
  misc_RNA (1)...(19): siRNA sense strand
cagugaagcuggcagacuu

SEQ ID NO: 1420581 - RNA, 19 nt, Homo sapiens
  misc_RNA (1)...(19): siRNA sense strand
ccaagaucaucaacaccaa

SEQ ID NO: 1420582 - RNA, 19 nt, Homo sapiens
  misc_RNA (1)...(19): siRNA sense strand
gcaagccuguggacaucug

SEQ ID NO: 1420583 - RNA, 19 nt, Homo sapiens
  misc_RNA (1)...(19): siRNA sense strand
caaaggggcugcagugaag

SEQ ID NO: 1420584 - RNA, 19 nt, Homo sapiens
  misc_RNA (1)...(19): siRNA sense strand
uaccagcucuacgaggaua

SEQ ID NO: 1420585 - RNA, 19 nt, Homo sapiens
  misc_RNA (1)...(19): siRNA sense strand
agaaccugcuggccaagaa

SEQ ID NO: 1420586 - RNA, 19 nt, Homo sapiens
  misc_RNA (1)...(19): siRNA sense strand
gaucaucaacaccaagaag

SEQ ID NO: 1420587 - RNA, 19 nt, Homo sapiens
  misc_RNA (1)...(19): siRNA sense strand
cggaagcaggagaucauua

SEQ ID NO: 1420588 - RNA, 19 nt, Homo sapiens
  misc_RNA (1)...(19): siRNA sense strand
cgucacuccugaagccaaa

SEQ ID NO: 1420589 - RNA, 19 nt, Homo sapiens
  misc_RNA (1)...(19): siRNA sense strand
cagccaagaucaucaacac

SEQ ID NO: 1420590 - RNA, 19 nt, Homo sapiens
  misc_RNA (1)...(19): siRNA sense strand
ucaaccagaugcugaccau

SEQ ID NO: 1420591 - RNA, 19 nt, Homo sapiens
  misc_RNA (1)...(19): siRNA sense strand
gcagacuucggccuagcua

SEQ ID NO: 1420592 - RNA, 19 nt, Homo sapiens
  misc_RNA (1)...(19): siRNA sense strand
acauccggcucacgcagua

SEQ ID NO: 1420593 - RNA, 19 nt, Homo sapiens
  misc_RNA (1)...(19): siRNA sense strand
agccagagaucaccagaag

SEQ ID NO: 1420594 - RNA, 19 nt, Homo sapiens
  misc_RNA (1)...(19): siRNA sense strand
ggacgaggaccagcacaag

SEQ ID NO: 1420595 - RNA, 19 nt, Homo sapiens
  misc_RNA (1)...(19): siRNA sense strand
ggacaccgucacuccugaa

SEQ ID NO: 1420596 - RNA, 19 nt, Homo sapiens
  misc_RNA (1)...(19): siRNA sense strand
ccagagaucaccagaagcu

SEQ ID NO: 1420597 - RNA, 19 nt, Homo sapiens
  misc_RNA (1)...(19): siRNA sense strand
gagccauccucaccaccau

SEQ ID NO: 1420598 - RNA, 19 nt, Homo sapiens
  misc_RNA (1)...(19): siRNA sense strand
gcaaaggggcugcagugaa

SEQ ID NO: 1420599 - RNA, 19 nt, Homo sapiens
  misc_RNA (1)...(19): siRNA sense strand
guucuccauugucaccaaa

SEQ ID NO: 1420600 - RNA, 19 nt, Homo sapiens
  misc_RNA (1)...(19): siRNA sense strand
ggucuucgaucuggucacu

SEQ ID NO: 1420601 - RNA, 19 nt, Homo sapiens
  misc_RNA (1)...(19): siRNA sense strand
aagcaggagaucauuaaga

SEQ ID NO: 1420602 - RNA, 19 nt, Homo sapiens
  misc_RNA (1)...(19): siRNA sense strand
gcaggcaugguuugguuuc

SEQ ID NO: 1420603 - RNA, 19 nt, Homo sapiens
  misc_RNA (1)...(19): siRNA sense strand
ccgaggagggcuuccacua

SEQ ID NO: 1420604 - RNA, 19 nt, Homo sapiens
  misc_RNA (1)...(19): siRNA sense strand
ggcagaacgugcacuucca

SEQ ID NO: 1420605 - RNA, 19 nt, Homo sapiens
  misc_RNA (1)...(19): siRNA sense strand
gcaccggccaugaguaugc

SEQ ID NO: 1420606 - RNA, 19 nt, Homo sapiens
  misc_RNA (1)...(19): siRNA sense strand
gaagcaggagaucauuaag

SEQ ID NO: 1420607 - RNA, 19 nt, Homo sapiens
  misc_RNA (1)...(19): siRNA sense strand
caucgaggccgucaacaac

SEQ ID NO: 1420608 - RNA, 19 nt, Homo sapiens
  misc_RNA (1)...(19): siRNA sense strand
uggcaagccuguggacauc

SEQ ID NO: 1420609 - RNA, 19 nt, Homo sapiens
  misc_RNA (1)...(19): siRNA sense strand
gaguaugcagccaagauca

SEQ ID NO: 1420610 - RNA, 19 nt, Homo sapiens
  misc_RNA (1)...(19): siRNA sense strand
gacuguggagugucugaaa

SEQ ID NO: 1420611 - RNA, 19 nt, Homo sapiens
  misc_RNA (1)...(19): siRNA sense strand
gagaaccugcuggccaaga

SEQ ID NO: 1420612 - RNA, 19 nt, Homo sapiens
  misc_RNA (1)...(19): siRNA sense strand
agcaggagaucauuaagac

SEQ ID NO: 1420613 - RNA, 19 nt, Homo sapiens
  misc_RNA (1)...(19): siRNA sense strand
ggaagcaggagaucauuaa

SEQ ID NO: 1420614 - RNA, 19 nt, Homo sapiens
  misc_RNA (1)...(19): siRNA sense strand
caacaacggugacuuugag

SEQ ID NO: 1420615 - RNA, 19 nt, Homo sapiens
  misc_RNA (1)...(19): siRNA sense strand
cagcaggcaugguuugguu

SEQ ID NO: 1420616 - RNA, 19 nt, Homo sapiens
  misc_RNA (1)...(19): siRNA sense strand
gcacgucauuggagaggau

SEQ ID NO: 1420617 - RNA, 19 nt, Homo sapiens
  misc_RNA (1)...(19): siRNA sense strand
cagugaagcuggcagacuu

SEQ ID NO: 1420618 - RNA, 19 nt, Homo sapiens
  misc_RNA (1)...(19): siRNA sense strand
ccaagaucaucaacaccaa

SEQ ID NO: 1420619 - RNA, 19 nt, Homo sapiens
  misc_RNA (1)...(19): siRNA sense strand
gcaagccuguggacaucug

SEQ ID NO: 1420620 - RNA, 19 nt, Homo sapiens
  misc_RNA (1)...(19): siRNA sense strand
caaaggggcugcagugaag

SEQ ID NO: 1420621 - RNA, 19 nt, Homo sapiens
  misc_RNA (1)...(19): siRNA sense strand
uaccagcucuacgaggaua

SEQ ID NO: 1420622 - RNA, 19 nt, Homo sapiens
  misc_RNA (1)...(19): siRNA sense strand
agaaccugcuggccaagaa

SEQ ID NO: 1420623 - RNA, 19 nt, Homo sapiens
  misc_RNA (1)...(19): siRNA sense strand
gaucaucaacaccaagaag

SEQ ID NO: 1420624 - RNA, 19 nt, Homo sapiens
  misc_RNA (1)...(19): siRNA sense strand
cggaagcaggagaucauua

SEQ ID NO: 1420625 - RNA, 19 nt, Homo sapiens
  misc_RNA (1)...(19): siRNA sense strand
cgucacuccugaagccaaa

SEQ ID NO: 1420626 - RNA, 19 nt, Homo sapiens
  misc_RNA (1)...(19): siRNA sense strand
cagccaagaucaucaacac

SEQ ID NO: 1420627 - RNA, 19 nt, Homo sapiens
  misc_RNA (1)...(19): siRNA sense strand
ucaaccagaugcugaccau

SEQ ID NO: 1420628 - RNA, 19 nt, Homo sapiens
  misc_RNA (1)...(19): siRNA sense strand
gcagacuucggccuagcua

SEQ ID NO: 1420629 - RNA, 19 nt, Homo sapiens
  misc_RNA (1)...(19): siRNA sense strand
acauccggcucacgcagua

SEQ ID NO: 1420630 - RNA, 19 nt, Homo sapiens
  misc_RNA (1)...(19): siRNA sense strand
agccagagaucaccagaag

SEQ ID NO: 1420631 - RNA, 19 nt, Homo sapiens
  misc_RNA (1)...(19): siRNA sense strand
ggacgaggaccagcacaag

SEQ ID NO: 1420632 - RNA, 19 nt, Homo sapiens
  misc_RNA (1)...(19): siRNA sense strand
ggacaccgucacuccugaa

SEQ ID NO: 1420633 - RNA, 19 nt, Homo sapiens
  misc_RNA (1)...(19): siRNA sense strand
ccagagaucaccagaagcu

SEQ ID NO: 1420634 - RNA, 19 nt, Homo sapiens
  misc_RNA (1)...(19): siRNA sense strand
gagccauccucaccaccau

SEQ ID NO: 1420635 - RNA, 19 nt, Homo sapiens
  misc_RNA (1)...(19): siRNA sense strand
gcaaaggggcugcagugaa

SEQ ID NO: 1420636 - RNA, 19 nt, Homo sapiens
  misc_RNA (1)...(19): siRNA sense strand
guucuccauugucaccaaa

SEQ ID NO: 1420637 - RNA, 19 nt, Homo sapiens
  misc_RNA (1)...(19): siRNA sense strand
ggucuucgaucuggucacu

SEQ ID NO: 1420638 - RNA, 19 nt, Homo sapiens
  misc_RNA (1)...(19): siRNA sense strand
aagcaggagaucauuaaga

SEQ ID NO: 1420639 - RNA, 19 nt, Homo sapiens
  misc_RNA (1)...(19): siRNA sense strand
gcaggcaugguuugguuuc

SEQ ID NO: 1420640 - RNA, 19 nt, Homo sapiens
  misc_RNA (1)...(19): siRNA sense strand
ccgaggagggcuuccacua

SEQ ID NO: 1420641 - RNA, 19 nt, Homo sapiens
  misc_RNA (1)...(19): siRNA sense strand
ggcagaacgugcacuucca

SEQ ID NO: 1420642 - RNA, 19 nt, Homo sapiens
  misc_RNA (1)...(19): siRNA sense strand
gcaccggccaugaguaugc

SEQ ID NO: 1420643 - RNA, 19 nt, Homo sapiens
  misc_RNA (1)...(19): siRNA sense strand
gaagcaggagaucauuaag

SEQ ID NO: 1420644 - RNA, 19 nt, Homo sapiens
  misc_RNA (1)...(19): siRNA sense strand
caucgaggccgucaacaac

SEQ ID NO: 1420645 - RNA, 19 nt, Homo sapiens
  misc_RNA (1)...(19): siRNA sense strand
uggcaagccuguggacauc

SEQ ID NO: 1420646 - RNA, 19 nt, Homo sapiens
  misc_RNA (1)...(19): siRNA sense strand
gaguaugcagccaagauca

SEQ ID NO: 1420647 - RNA, 19 nt, Homo sapiens
  misc_RNA (1)...(19): siRNA sense strand
gacuguggagugucugaaa

SEQ ID NO: 1420648 - RNA, 19 nt, Homo sapiens
  misc_RNA (1)...(19): siRNA sense strand
gagaaccugcuggccaaga

SEQ ID NO: 1420649 - RNA, 19 nt, Homo sapiens
  misc_RNA (1)...(19): siRNA sense strand
agcaggagaucauuaagac

SEQ ID NO: 1420650 - RNA, 19 nt, Homo sapiens
  misc_RNA (1)...(19): siRNA sense strand
ggaagcaggagaucauuaa

SEQ ID NO: 1420651 - RNA, 19 nt, Homo sapiens
  misc_RNA (1)...(19): siRNA sense strand
caacaacggugacuuugag

SEQ ID NO: 1420652 - RNA, 19 nt, Homo sapiens
  misc_RNA (1)...(19): siRNA sense strand
cagcaggcaugguuugguu

SEQ ID NO: 1420653 - RNA, 19 nt, Homo sapiens
  misc_RNA (1)...(19): siRNA sense strand
gcacgucauuggagaggau

SEQ ID NO: 1420654 - RNA, 19 nt, Homo sapiens
  misc_RNA (1)...(19): siRNA sense strand
cagugaagcuggcagacuu

SEQ ID NO: 1420655 - RNA, 19 nt, Homo sapiens
  misc_RNA (1)...(19): siRNA sense strand
ccaagaucaucaacaccaa

SEQ ID NO: 1420656 - RNA, 19 nt, Homo sapiens
  misc_RNA (1)...(19): siRNA sense strand
gcaagccuguggacaucug

SEQ ID NO: 1420657 - RNA, 19 nt, Homo sapiens
  misc_RNA (1)...(19): siRNA sense strand
caaaggggcugcagugaag

SEQ ID NO: 1420658 - RNA, 19 nt, Homo sapiens
  misc_RNA (1)...(19): siRNA sense strand
uaccagcucuacgaggaua

SEQ ID NO: 1420659 - RNA, 19 nt, Homo sapiens
  misc_RNA (1)...(19): siRNA sense strand
agaaccugcuggccaagaa

SEQ ID NO: 1420660 - RNA, 19 nt, Homo sapiens
  misc_RNA (1)...(19): siRNA sense strand
gaucaucaacaccaagaag

SEQ ID NO: 1420661 - RNA, 19 nt, Homo sapiens
  misc_RNA (1)...(19): siRNA sense strand
cggaagcaggagaucauua

SEQ ID NO: 1420662 - RNA, 19 nt, Homo sapiens
  misc_RNA (1)...(19): siRNA sense strand
cgucacuccugaagccaaa

SEQ ID NO: 1420663 - RNA, 19 nt, Homo sapiens
  misc_RNA (1)...(19): siRNA sense strand
cagccaagaucaucaacac

SEQ ID NO: 1420664 - RNA, 19 nt, Homo sapiens
  misc_RNA (1)...(19): siRNA sense strand
ucaaccagaugcugaccau

SEQ ID NO: 1420665 - RNA, 19 nt, Homo sapiens
  misc_RNA (1)...(19): siRNA sense strand
gcagacuucggccuagcua

SEQ ID NO: 1420666 - RNA, 19 nt, Homo sapiens
  misc_RNA (1)...(19): siRNA sense strand
acauccggcucacgcagua

SEQ ID NO: 1420667 - RNA, 19 nt, Homo sapiens
  misc_RNA (1)...(19): siRNA sense strand
agccagagaucaccagaag

SEQ ID NO: 1420668 - RNA, 19 nt, Homo sapiens
  misc_RNA (1)...(19): siRNA sense strand
ggacgaggaccagcacaag

SEQ ID NO: 1420669 - RNA, 19 nt, Homo sapiens
  misc_RNA (1)...(19): siRNA sense strand
ggacaccgucacuccugaa

SEQ ID NO: 1420670 - RNA, 19 nt, Homo sapiens
  misc_RNA (1)...(19): siRNA sense strand
ccagagaucaccagaagcu

SEQ ID NO: 1420671 - RNA, 19 nt, Homo sapiens
  misc_RNA (1)...(19): siRNA sense strand
gagccauccucaccaccau

SEQ ID NO: 1420672 - RNA, 19 nt, Homo sapiens
  misc_RNA (1)...(19): siRNA sense strand
gcaaaggggcugcagugaa

SEQ ID NO: 1420673 - RNA, 19 nt, Homo sapiens
  misc_RNA (1)...(19): siRNA sense strand
guucuccauugucaccaaa

SEQ ID NO: 1420674 - RNA, 19 nt, Homo sapiens
  misc_RNA (1)...(19): siRNA sense strand
ggucuucgaucuggucacu

SEQ ID NO: 1420675 - RNA, 19 nt, Homo sapiens
  misc_RNA (1)...(19): siRNA sense strand
aagcaggagaucauuaaga

SEQ ID NO: 1420676 - RNA, 19 nt, Homo sapiens
  misc_RNA (1)...(19): siRNA sense strand
gcaggcaugguuugguuuc

SEQ ID NO: 1420677 - RNA, 19 nt, Homo sapiens
  misc_RNA (1)...(19): siRNA sense strand
ccgaggagggcuuccacua

SEQ ID NO: 1420678 - RNA, 19 nt, Homo sapiens
  misc_RNA (1)...(19): siRNA sense strand
ggcagaacgugcacuucca

SEQ ID NO: 1420679 - RNA, 19 nt, Homo sapiens
  misc_RNA (1)...(19): siRNA sense strand
gcaccggccaugaguaugc

SEQ ID NO: 1420680 - RNA, 19 nt, Homo sapiens
  misc_RNA (1)...(19): siRNA sense strand
gaagcaggagaucauuaag

SEQ ID NO: 1420681 - RNA, 19 nt, Homo sapiens
  misc_RNA (1)...(19): siRNA sense strand
caucgaggccgucaacaac

SEQ ID NO: 1420682 - RNA, 19 nt, Homo sapiens
  misc_RNA (1)...(19): siRNA sense strand
uggcaagccuguggacauc

SEQ ID NO: 1420683 - RNA, 19 nt, Homo sapiens
  misc_RNA (1)...(19): siRNA sense strand
gaguaugcagccaagauca

SEQ ID NO: 1420684 - RNA, 19 nt, Homo sapiens
  misc_RNA (1)...(19): siRNA sense strand
gacuguggagugucugaaa

SEQ ID NO: 1420685 - RNA, 19 nt, Homo sapiens
  misc_RNA (1)...(19): siRNA sense strand
gagaaccugcuggccaaga

SEQ ID NO: 1420686 - RNA, 19 nt, Homo sapiens
  misc_RNA (1)...(19): siRNA sense strand
agcaggagaucauuaagac

SEQ ID NO: 1420687 - RNA, 19 nt, Homo sapiens
  misc_RNA (1)...(19): siRNA sense strand
gaaagagcaugaugacaua

SEQ ID NO: 1420688 - RNA, 19 nt, Homo sapiens
  misc_RNA (1)...(19): siRNA sense strand
gaacagcucugaaagcauu

SEQ ID NO: 1420689 - RNA, 19 nt, Homo sapiens
  misc_RNA (1)...(19): siRNA sense strand
gagaagauguugaaaugua

SEQ ID NO: 1420690 - RNA, 19 nt, Homo sapiens
  misc_RNA (1)...(19): siRNA sense strand
gaggacagcuugaggguua

SEQ ID NO: 1420691 - RNA, 19 nt, Homo sapiens
  misc_RNA (1)...(19): siRNA sense strand
gaaacugaauggaagaaua

SEQ ID NO: 1420692 - RNA, 19 nt, Homo sapiens
  misc_RNA (1)...(19): siRNA sense strand
aaagaaggcuguaccguua

SEQ ID NO: 1420693 - RNA, 19 nt, Homo sapiens
  misc_RNA (1)...(19): siRNA sense strand
aaacacagcucuggaauaa

SEQ ID NO: 1420694 - RNA, 19 nt, Homo sapiens
  misc_RNA (1)...(19): siRNA sense strand
gaaauagaacuucgaauga

SEQ ID NO: 1420695 - RNA, 19 nt, Homo sapiens
  misc_RNA (1)...(19): siRNA sense strand
gcaaugauguggucuuguu

SEQ ID NO: 1420696 - RNA, 19 nt, Homo sapiens
  misc_RNA (1)...(19): siRNA sense strand
gaccauauccuuaaaugua

SEQ ID NO: 1420697 - RNA, 19 nt, Homo sapiens
  misc_RNA (1)...(19): siRNA sense strand
gcaaugggaugcagcuauu

SEQ ID NO: 1420698 - RNA, 19 nt, Homo sapiens
  misc_RNA (1)...(19): siRNA sense strand
cagcuuaucuugcaaguga

SEQ ID NO: 1420699 - RNA, 19 nt, Homo sapiens
  misc_RNA (1)...(19): siRNA sense strand
gaaguuaggcgauuagaga

SEQ ID NO: 1420700 - RNA, 19 nt, Homo sapiens
  misc_RNA (1)...(19): siRNA sense strand
gacaaaggcauucaucaua

SEQ ID NO: 1420701 - RNA, 19 nt, Homo sapiens
  misc_RNA (1)...(19): siRNA sense strand
gauccaagcuugauuaagg

SEQ ID NO: 1420702 - RNA, 19 nt, Homo sapiens
  misc_RNA (1)...(19): siRNA sense strand
ggaagaaaguauuaaacga

SEQ ID NO: 1420703 - RNA, 19 nt, Homo sapiens
  misc_RNA (1)...(19): siRNA sense strand
aaacagcucuaaaccauug

SEQ ID NO: 1420704 - RNA, 19 nt, Homo sapiens
  misc_RNA (1)...(19): siRNA sense strand
ugacauguauucugaaguu

SEQ ID NO: 1420705 - RNA, 19 nt, Homo sapiens
  misc_RNA (1)...(19): siRNA sense strand
gaagaccucaagaaaguua

SEQ ID NO: 1420706 - RNA, 19 nt, Homo sapiens
  misc_RNA (1)...(19): siRNA sense strand
gcugaacgcaguauuguua

SEQ ID NO: 1420707 - RNA, 19 nt, Homo sapiens
  misc_RNA (1)...(19): siRNA sense strand
gauggugcuuguugacuua

SEQ ID NO: 1420708 - RNA, 19 nt, Homo sapiens
  misc_RNA (1)...(19): siRNA sense strand
ggacauccuuucagcaguu

SEQ ID NO: 1420709 - RNA, 19 nt, Homo sapiens
  misc_RNA (1)...(19): siRNA sense strand
gaaacacagcucuggaaua

SEQ ID NO: 1420710 - RNA, 19 nt, Homo sapiens
  misc_RNA (1)...(19): siRNA sense strand
ggaaauccuucaacaaucu

SEQ ID NO: 1420711 - RNA, 19 nt, Homo sapiens
  misc_RNA (1)...(19): siRNA sense strand
gcagauaauugaaggaaag

SEQ ID NO: 1420712 - RNA, 19 nt, Homo sapiens
  misc_RNA (1)...(19): siRNA sense strand
ugaaagcauugaagcuaua

SEQ ID NO: 1420713 - RNA, 19 nt, Homo sapiens
  misc_RNA (1)...(19): siRNA sense strand
ggaaagagcaugaugacau

SEQ ID NO: 1420714 - RNA, 19 nt, Homo sapiens
  misc_RNA (1)...(19): siRNA sense strand
ucacgaagcauuuaucauu

SEQ ID NO: 1420715 - RNA, 19 nt, Homo sapiens
  misc_RNA (1)...(19): siRNA sense strand
gcaguucucuucucugaca

SEQ ID NO: 1420716 - RNA, 19 nt, Homo sapiens
  misc_RNA (1)...(19): siRNA sense strand
uuaaagagguauuggaaga

SEQ ID NO: 1420717 - RNA, 19 nt, Homo sapiens
  misc_RNA (1)...(19): siRNA sense strand
aaacugaaauucucuccaa

SEQ ID NO: 1420718 - RNA, 19 nt, Homo sapiens
  misc_RNA (1)...(19): siRNA sense strand
ggcaacaacuuacaaauac

SEQ ID NO: 1420719 - RNA, 19 nt, Homo sapiens
  misc_RNA (1)...(19): siRNA sense strand
gaagaccgauccauaucug

SEQ ID NO: 1420720 - RNA, 19 nt, Homo sapiens
  misc_RNA (1)...(19): siRNA sense strand
ugaccggaaugaacuauuu

SEQ ID NO: 1420721 - RNA, 19 nt, Homo sapiens
  misc_RNA (1)...(19): siRNA sense strand
caaugaaagcuuuagguua

SEQ ID NO: 1420722 - RNA, 19 nt, Homo sapiens
  misc_RNA (1)...(19): siRNA sense strand
ggaccuuagugaauauaaa

SEQ ID NO: 1420723 - RNA, 19 nt, Homo sapiens
  misc_RNA (1)...(19): siRNA sense strand
ggaaauugaugaguauauc

SEQ ID NO: 1420724 - RNA, 19 nt, Homo sapiens
  misc_RNA (1)...(19): siRNA sense strand
cggaagaccucaagaaagu

SEQ ID NO: 1420725 - RNA, 19 nt, Homo sapiens
  misc_RNA (1)...(19): siRNA sense strand
gcaucaaguuuauagaaga

SEQ ID NO: 1420726 - RNA, 19 nt, Homo sapiens
  misc_RNA (1)...(19): siRNA sense strand
gcacccagcuuaucuugca

SEQ ID NO: 1420727 - RNA, 19 nt, Homo sapiens
  misc_RNA (1)...(19): siRNA sense strand
ggaagaaucggacccaaga

SEQ ID NO: 1420728 - RNA, 19 nt, Homo sapiens
  misc_RNA (1)...(19): siRNA sense strand
ugaaauccuugaugaaguu

SEQ ID NO: 1420729 - RNA, 19 nt, Homo sapiens
  misc_RNA (1)...(19): siRNA sense strand
gcugauaguuucaaagcaa

SEQ ID NO: 1420730 - RNA, 19 nt, Homo sapiens
  misc_RNA (1)...(19): siRNA sense strand
gagaccauauccuuaaaug

SEQ ID NO: 1420731 - RNA, 19 nt, Homo sapiens
  misc_RNA (1)...(19): siRNA sense strand
uaaagaggccguuaaggaa

SEQ ID NO: 1420732 - RNA, 19 nt, Homo sapiens
  misc_RNA (1)...(19): siRNA sense strand
guagauccaagcuugauua

SEQ ID NO: 1420733 - RNA, 19 nt, Homo sapiens
  misc_RNA (1)...(19): siRNA sense strand
uggagaagauguugaaaug

SEQ ID NO: 1420734 - RNA, 19 nt, Homo sapiens
  misc_RNA (1)...(19): siRNA sense strand
cagcaguucucuucucuga

SEQ ID NO: 1420735 - RNA, 19 nt, Homo sapiens
  misc_RNA (1)...(19): siRNA sense strand
gaugacacguucuccaguu

SEQ ID NO: 1420736 - RNA, 19 nt, Homo sapiens
  misc_RNA (1)...(19): siRNA sense strand
caaaggcauucaucauaga

SEQ ID NO: 1420737 - RNA, 19 nt, Homo sapiens
  misc_RNA (1)...(19): siRNA sense strand
gauaugauaccggaccuua

SEQ ID NO: 1420738 - RNA, 19 nt, Homo sapiens
  misc_RNA (1)...(19): siRNA sense strand
gggaugcagcuauuuauuu

SEQ ID NO: 1420739 - RNA, 19 nt, Homo sapiens
  misc_RNA (1)...(19): siRNA sense strand
ccaagugacuacaagaaau

SEQ ID NO: 1420740 - RNA, 19 nt, Homo sapiens
  misc_RNA (1)...(19): siRNA sense strand
ugauugacauguauucuga

SEQ ID NO: 1420741 - RNA, 19 nt, Homo sapiens
  misc_RNA (1)...(19): siRNA sense strand
uaauaaagcaguagagguu

SEQ ID NO: 1420742 - RNA, 19 nt, Homo sapiens
  misc_RNA (1)...(19): siRNA sense strand
cauugaagcuauaagagaa

SEQ ID NO: 1420743 - RNA, 19 nt, Homo sapiens
  misc_RNA (1)...(19): siRNA sense strand
ggauucagcagauaauuga

SEQ ID NO: 1420744 - RNA, 19 nt, Homo sapiens
  misc_RNA (1)...(19): siRNA sense strand
aaacuucgcuaucucauac

SEQ ID NO: 1420745 - RNA, 19 nt, Homo sapiens
  misc_RNA (1)...(19): siRNA sense strand
acaaugaaaccaagaauga

SEQ ID NO: 1420746 - RNA, 19 nt, Homo sapiens
  misc_RNA (1)...(19): siRNA sense strand
caaauggacccucauggaa

SEQ ID NO: 1420747 - RNA, 19 nt, Homo sapiens
  misc_RNA (1)...(19): siRNA sense strand
ugaaauagaacuucgaaug

SEQ ID NO: 1420748 - RNA, 19 nt, Homo sapiens
  misc_RNA (1)...(19): siRNA sense strand
uaccggaccuuagugaaua

SEQ ID NO: 1420749 - RNA, 19 nt, Homo sapiens
  misc_RNA (1)...(19): siRNA sense strand
gggaacagcucugaaagca

SEQ ID NO: 1420750 - RNA, 19 nt, Homo sapiens
  misc_RNA (1)...(19): siRNA sense strand
ugacaaaccuuccuuuacg

SEQ ID NO: 1420751 - RNA, 19 nt, Homo sapiens
  misc_RNA (1)...(19): siRNA sense strand
gaacaacaggcugauaguu

SEQ ID NO: 1420752 - RNA, 19 nt, Homo sapiens
  misc_RNA (1)...(19): siRNA sense strand
gauguucucucugauuaug

SEQ ID NO: 1420753 - RNA, 19 nt, Homo sapiens
  misc_RNA (1)...(19): siRNA sense strand
gcauuuaucauucacauca

SEQ ID NO: 1420754 - RNA, 19 nt, Homo sapiens
  misc_RNA (1)...(19): siRNA sense strand
ggaugcagcuauuuauuuu

SEQ ID NO: 1420755 - RNA, 19 nt, Homo sapiens
  misc_RNA (1)...(19): siRNA sense strand
gaacuugaccggaaugaac

SEQ ID NO: 1420756 - RNA, 19 nt, Homo sapiens
  misc_RNA (1)...(19): siRNA sense strand
ggauggugcuuguugacuu

SEQ ID NO: 1420757 - RNA, 19 nt, Homo sapiens
  misc_RNA (1)...(19): siRNA sense strand
acaaaggcauucaucauag

SEQ ID NO: 1420758 - RNA, 19 nt, Homo sapiens
  misc_RNA (1)...(19): siRNA sense strand
acacucaguugaaguauca

SEQ ID NO: 1420759 - RNA, 19 nt, Homo sapiens
  misc_RNA (1)...(19): siRNA sense strand
gaaagugacaagcauuuua

SEQ ID NO: 1420760 - RNA, 19 nt, Homo sapiens
  misc_RNA (1)...(19): siRNA sense strand
gacauugugugggaaauug

SEQ ID NO: 1420761 - RNA, 19 nt, Homo sapiens
  misc_RNA (1)...(19): siRNA sense strand
ggaaguuuaccacuacaaa

SEQ ID NO: 1420762 - RNA, 19 nt, Homo sapiens
  misc_RNA (1)...(19): siRNA sense strand
gcucgaauauucccaagag

SEQ ID NO: 1420763 - RNA, 19 nt, Homo sapiens
  misc_RNA (1)...(19): siRNA sense strand
gaaagaugacaaaggcauu

SEQ ID NO: 1420764 - RNA, 19 nt, Homo sapiens
  misc_RNA (1)...(19): siRNA sense strand
uugauguucucucugauua

SEQ ID NO: 1420765 - RNA, 19 nt, Homo sapiens
  misc_RNA (1)...(19): siRNA sense strand
aaagagguauuggaagauu

SEQ ID NO: 1420766 - RNA, 19 nt, Homo sapiens
  misc_RNA (1)...(19): siRNA sense strand
gggagacccuacaagaaga

SEQ ID NO: 1420767 - RNA, 19 nt, Homo sapiens
  misc_RNA (1)...(19): siRNA sense strand
gaauccuaaugccaucaua

SEQ ID NO: 1420768 - RNA, 19 nt, Homo sapiens
  misc_RNA (1)...(19): siRNA sense strand
agaagaucuugcagcauua

SEQ ID NO: 1420769 - RNA, 19 nt, Homo sapiens
  misc_RNA (1)...(19): siRNA sense strand
caucauagaaagcuuaaga

SEQ ID NO: 1420770 - RNA, 19 nt, Homo sapiens
  misc_RNA (1)...(19): siRNA sense strand
gaagaauuuucccgcuuua

SEQ ID NO: 1420771 - RNA, 19 nt, Homo sapiens
  misc_RNA (1)...(19): siRNA sense strand
caguggauaucaagcuuaa

SEQ ID NO: 1420772 - RNA, 19 nt, Homo sapiens
  misc_RNA (1)...(19): siRNA sense strand
gcauugaagcuauaagaga

SEQ ID NO: 1420773 - RNA, 19 nt, Homo sapiens
  misc_RNA (1)...(19): siRNA sense strand
gaaagcucuucccaaugaa

SEQ ID NO: 1420774 - RNA, 19 nt, Homo sapiens
  misc_RNA (1)...(19): siRNA sense strand
ugacuuaccaggugugauu

SEQ ID NO: 1420775 - RNA, 19 nt, Homo sapiens
  misc_RNA (1)...(19): siRNA sense strand
ggaaaugauugcccaagcu

SEQ ID NO: 1420776 - RNA, 19 nt, Homo sapiens
  misc_RNA (1)...(19): siRNA sense strand
acacagcucuggaauaaaa

SEQ ID NO: 1420777 - RNA, 19 nt, Homo sapiens
  misc_RNA (1)...(19): siRNA sense strand
ugugggaaauugaugagua

SEQ ID NO: 1420778 - RNA, 19 nt, Homo sapiens
  misc_RNA (1)...(19): siRNA sense strand
cuaaaccauuguaaccuuu

SEQ ID NO: 1420779 - RNA, 19 nt, Homo sapiens
  misc_RNA (1)...(19): siRNA sense strand
agagcaugaugacauauuu

SEQ ID NO: 1420780 - RNA, 19 nt, Homo sapiens
  misc_RNA (1)...(19): siRNA sense strand
caacucaugugauugaaaa

SEQ ID NO: 1420781 - RNA, 19 nt, Homo sapiens
  misc_RNA (1)...(19): siRNA sense strand
caagugacuacaagaaauu

SEQ ID NO: 1420782 - RNA, 19 nt, Homo sapiens
  misc_RNA (1)...(19): siRNA sense strand
gcuaaaggcacaccaagug

SEQ ID NO: 1420783 - RNA, 19 nt, Homo sapiens
  misc_RNA (1)...(19): siRNA sense strand
gagaauaugaagaagaguu

SEQ ID NO: 1420784 - RNA, 19 nt, Homo sapiens
  misc_RNA (1)...(19): siRNA sense strand
gcaguauuguuacagacuu

SEQ ID NO: 1420785 - RNA, 19 nt, Homo sapiens
  misc_RNA (1)...(19): siRNA sense strand
uggaaagacuaguguguug

SEQ ID NO: 1420786 - RNA, 19 nt, Homo sapiens
  misc_RNA (1)...(19): siRNA sense strand
ggagaacaaagaauugaga

SEQ ID NO: 1420787 - RNA, 19 nt, Homo sapiens
  misc_RNA (1)...(19): siRNA sense strand
gaaagagcaugaugacaua

SEQ ID NO: 1420788 - RNA, 19 nt, Homo sapiens
  misc_RNA (1)...(19): siRNA sense strand
gaacagcucugaaagcauu

SEQ ID NO: 1420789 - RNA, 19 nt, Homo sapiens
  misc_RNA (1)...(19): siRNA sense strand
gagaagauguugaaaugua

SEQ ID NO: 1420790 - RNA, 19 nt, Homo sapiens
  misc_RNA (1)...(19): siRNA sense strand
gaggacagcuugaggguua

SEQ ID NO: 1420791 - RNA, 19 nt, Homo sapiens
  misc_RNA (1)...(19): siRNA sense strand
gaaacugaauggaagaaua

SEQ ID NO: 1420792 - RNA, 19 nt, Homo sapiens
  misc_RNA (1)...(19): siRNA sense strand
aaagaaggcuguaccguua

SEQ ID NO: 1420793 - RNA, 19 nt, Homo sapiens
  misc_RNA (1)...(19): siRNA sense strand
aaacacagcucuggaauaa

SEQ ID NO: 1420794 - RNA, 19 nt, Homo sapiens
  misc_RNA (1)...(19): siRNA sense strand
gaaauagaacuucgaauga

SEQ ID NO: 1420795 - RNA, 19 nt, Homo sapiens
  misc_RNA (1)...(19): siRNA sense strand
gcaaugauguggucuuguu

SEQ ID NO: 1420796 - RNA, 19 nt, Homo sapiens
  misc_RNA (1)...(19): siRNA sense strand
gaccauauccuuaaaugua

SEQ ID NO: 1420797 - RNA, 19 nt, Homo sapiens
  misc_RNA (1)...(19): siRNA sense strand
gcaaugggaugcagcuauu

SEQ ID NO: 1420798 - RNA, 19 nt, Homo sapiens
  misc_RNA (1)...(19): siRNA sense strand
cagcuuaucuugcaaguga

SEQ ID NO: 1420799 - RNA, 19 nt, Homo sapiens
  misc_RNA (1)...(19): siRNA sense strand
gaaguuaggcgauuagaga

SEQ ID NO: 1420800 - RNA, 19 nt, Homo sapiens
  misc_RNA (1)...(19): siRNA sense strand
gacaaaggcauucaucaua

SEQ ID NO: 1420801 - RNA, 19 nt, Homo sapiens
  misc_RNA (1)...(19): siRNA sense strand
gauccaagcuugauuaagg

SEQ ID NO: 1420802 - RNA, 19 nt, Homo sapiens
  misc_RNA (1)...(19): siRNA sense strand
ggaagaaaguauuaaacga

SEQ ID NO: 1420803 - RNA, 19 nt, Homo sapiens
  misc_RNA (1)...(19): siRNA sense strand
aaacagcucuaaaccauug

SEQ ID NO: 1420804 - RNA, 19 nt, Homo sapiens
  misc_RNA (1)...(19): siRNA sense strand
ugacauguauucugaaguu

SEQ ID NO: 1420805 - RNA, 19 nt, Homo sapiens
  misc_RNA (1)...(19): siRNA sense strand
gaagaccucaagaaaguua

SEQ ID NO: 1420806 - RNA, 19 nt, Homo sapiens
  misc_RNA (1)...(19): siRNA sense strand
gcugaacgcaguauuguua

SEQ ID NO: 1420807 - RNA, 19 nt, Homo sapiens
  misc_RNA (1)...(19): siRNA sense strand
gauggugcuuguugacuua

SEQ ID NO: 1420808 - RNA, 19 nt, Homo sapiens
  misc_RNA (1)...(19): siRNA sense strand
ggacauccuuucagcaguu

SEQ ID NO: 1420809 - RNA, 19 nt, Homo sapiens
  misc_RNA (1)...(19): siRNA sense strand
gaaacacagcucuggaaua

SEQ ID NO: 1420810 - RNA, 19 nt, Homo sapiens
  misc_RNA (1)...(19): siRNA sense strand
ggaaauccuucaacaaucu

SEQ ID NO: 1420811 - RNA, 19 nt, Homo sapiens
  misc_RNA (1)...(19): siRNA sense strand
gcagauaauugaaggaaag

SEQ ID NO: 1420812 - RNA, 19 nt, Homo sapiens
  misc_RNA (1)...(19): siRNA sense strand
ugaaagcauugaagcuaua

SEQ ID NO: 1420813 - RNA, 19 nt, Homo sapiens
  misc_RNA (1)...(19): siRNA sense strand
ggaaagagcaugaugacau

SEQ ID NO: 1420814 - RNA, 19 nt, Homo sapiens
  misc_RNA (1)...(19): siRNA sense strand
ucacgaagcauuuaucauu

SEQ ID NO: 1420815 - RNA, 19 nt, Homo sapiens
  misc_RNA (1)...(19): siRNA sense strand
gcaguucucuucucugaca

SEQ ID NO: 1420816 - RNA, 19 nt, Homo sapiens
  misc_RNA (1)...(19): siRNA sense strand
uuaaagagguauuggaaga

SEQ ID NO: 1420817 - RNA, 19 nt, Homo sapiens
  misc_RNA (1)...(19): siRNA sense strand
aaacugaaauucucuccaa

SEQ ID NO: 1420818 - RNA, 19 nt, Homo sapiens
  misc_RNA (1)...(19): siRNA sense strand
ggcaacaacuuacaaauac

SEQ ID NO: 1420819 - RNA, 19 nt, Homo sapiens
  misc_RNA (1)...(19): siRNA sense strand
gaagaccgauccauaucug

SEQ ID NO: 1420820 - RNA, 19 nt, Homo sapiens
  misc_RNA (1)...(19): siRNA sense strand
ugaccggaaugaacuauuu

SEQ ID NO: 1420821 - RNA, 19 nt, Homo sapiens
  misc_RNA (1)...(19): siRNA sense strand
caaugaaagcuuuagguua

SEQ ID NO: 1420822 - RNA, 19 nt, Homo sapiens
  misc_RNA (1)...(19): siRNA sense strand
ggaccuuagugaauauaaa

SEQ ID NO: 1420823 - RNA, 19 nt, Homo sapiens
  misc_RNA (1)...(19): siRNA sense strand
ggaaauugaugaguauauc

SEQ ID NO: 1420824 - RNA, 19 nt, Homo sapiens
  misc_RNA (1)...(19): siRNA sense strand
cggaagaccucaagaaagu

SEQ ID NO: 1420825 - RNA, 19 nt, Homo sapiens
  misc_RNA (1)...(19): siRNA sense strand
gcaucaaguuuauagaaga

SEQ ID NO: 1420826 - RNA, 19 nt, Homo sapiens
  misc_RNA (1)...(19): siRNA sense strand
gcacccagcuuaucuugca

SEQ ID NO: 1420827 - RNA, 19 nt, Homo sapiens
  misc_RNA (1)...(19): siRNA sense strand
ggaagaaucggacccaaga

SEQ ID NO: 1420828 - RNA, 19 nt, Homo sapiens
  misc_RNA (1)...(19): siRNA sense strand
ugaaauccuugaugaaguu

SEQ ID NO: 1420829 - RNA, 19 nt, Homo sapiens
  misc_RNA (1)...(19): siRNA sense strand
gcugauaguuucaaagcaa

SEQ ID NO: 1420830 - RNA, 19 nt, Homo sapiens
  misc_RNA (1)...(19): siRNA sense strand
gagaccauauccuuaaaug

SEQ ID NO: 1420831 - RNA, 19 nt, Homo sapiens
  misc_RNA (1)...(19): siRNA sense strand
uaaagaggccguuaaggaa

SEQ ID NO: 1420832 - RNA, 19 nt, Homo sapiens
  misc_RNA (1)...(19): siRNA sense strand
guagauccaagcuugauua

SEQ ID NO: 1420833 - RNA, 19 nt, Homo sapiens
  misc_RNA (1)...(19): siRNA sense strand
uggagaagauguugaaaug

SEQ ID NO: 1420834 - RNA, 19 nt, Homo sapiens
  misc_RNA (1)...(19): siRNA sense strand
cagcaguucucuucucuga

SEQ ID NO: 1420835 - RNA, 19 nt, Homo sapiens
  misc_RNA (1)...(19): siRNA sense strand
gaugacacguucuccaguu

SEQ ID NO: 1420836 - RNA, 19 nt, Homo sapiens
  misc_RNA (1)...(19): siRNA sense strand
caaaggcauucaucauaga

SEQ ID NO: 1420837 - RNA, 19 nt, Homo sapiens
  misc_RNA (1)...(19): siRNA sense strand
gauaugauaccggaccuua

SEQ ID NO: 1420838 - RNA, 19 nt, Homo sapiens
  misc_RNA (1)...(19): siRNA sense strand
gggaugcagcuauuuauuu

SEQ ID NO: 1420839 - RNA, 19 nt, Homo sapiens
  misc_RNA (1)...(19): siRNA sense strand
ccaagugacuacaagaaau

SEQ ID NO: 1420840 - RNA, 19 nt, Homo sapiens
  misc_RNA (1)...(19): siRNA sense strand
ugauugacauguauucuga

SEQ ID NO: 1420841 - RNA, 19 nt, Homo sapiens
  misc_RNA (1)...(19): siRNA sense strand
uaauaaagcaguagagguu

SEQ ID NO: 1420842 - RNA, 19 nt, Homo sapiens
  misc_RNA (1)...(19): siRNA sense strand
cauugaagcuauaagagaa

SEQ ID NO: 1420843 - RNA, 19 nt, Homo sapiens
  misc_RNA (1)...(19): siRNA sense strand
ggauucagcagauaauuga

SEQ ID NO: 1420844 - RNA, 19 nt, Homo sapiens
  misc_RNA (1)...(19): siRNA sense strand
aaacuucgcuaucucauac

SEQ ID NO: 1420845 - RNA, 19 nt, Homo sapiens
  misc_RNA (1)...(19): siRNA sense strand
acaaugaaaccaagaauga

SEQ ID NO: 1420846 - RNA, 19 nt, Homo sapiens
  misc_RNA (1)...(19): siRNA sense strand
caaauggacccucauggaa

SEQ ID NO: 1420847 - RNA, 19 nt, Homo sapiens
  misc_RNA (1)...(19): siRNA sense strand
ugaaauagaacuucgaaug

SEQ ID NO: 1420848 - RNA, 19 nt, Homo sapiens
  misc_RNA (1)...(19): siRNA sense strand
uaccggaccuuagugaaua

SEQ ID NO: 1420849 - RNA, 19 nt, Homo sapiens
  misc_RNA (1)...(19): siRNA sense strand
gggaacagcucugaaagca

SEQ ID NO: 1420850 - RNA, 19 nt, Homo sapiens
  misc_RNA (1)...(19): siRNA sense strand
ugacaaaccuuccuuuacg

SEQ ID NO: 1420851 - RNA, 19 nt, Homo sapiens
  misc_RNA (1)...(19): siRNA sense strand
gaacaacaggcugauaguu

SEQ ID NO: 1420852 - RNA, 19 nt, Homo sapiens
  misc_RNA (1)...(19): siRNA sense strand
gauguucucucugauuaug

SEQ ID NO: 1420853 - RNA, 19 nt, Homo sapiens
  misc_RNA (1)...(19): siRNA sense strand
gcauuuaucauucacauca

SEQ ID NO: 1420854 - RNA, 19 nt, Homo sapiens
  misc_RNA (1)...(19): siRNA sense strand
ggaugcagcuauuuauuuu

SEQ ID NO: 1420855 - RNA, 19 nt, Homo sapiens
  misc_RNA (1)...(19): siRNA sense strand
gaacuugaccggaaugaac

SEQ ID NO: 1420856 - RNA, 19 nt, Homo sapiens
  misc_RNA (1)...(19): siRNA sense strand
ggauggugcuuguugacuu

SEQ ID NO: 1420857 - RNA, 19 nt, Homo sapiens
  misc_RNA (1)...(19): siRNA sense strand
acaaaggcauucaucauag

SEQ ID NO: 1420858 - RNA, 19 nt, Homo sapiens
  misc_RNA (1)...(19): siRNA sense strand
acacucaguugaaguauca

SEQ ID NO: 1420859 - RNA, 19 nt, Homo sapiens
  misc_RNA (1)...(19): siRNA sense strand
gaaagugacaagcauuuua

SEQ ID NO: 1420860 - RNA, 19 nt, Homo sapiens
  misc_RNA (1)...(19): siRNA sense strand
gacauugugugggaaauug

SEQ ID NO: 1420861 - RNA, 19 nt, Homo sapiens
  misc_RNA (1)...(19): siRNA sense strand
ggaaguuuaccacuacaaa

SEQ ID NO: 1420862 - RNA, 19 nt, Homo sapiens
  misc_RNA (1)...(19): siRNA sense strand
gcucgaauauucccaagag

SEQ ID NO: 1420863 - RNA, 19 nt, Homo sapiens
  misc_RNA (1)...(19): siRNA sense strand
gaaagaugacaaaggcauu

SEQ ID NO: 1420864 - RNA, 19 nt, Homo sapiens
  misc_RNA (1)...(19): siRNA sense strand
uugauguucucucugauua

SEQ ID NO: 1420865 - RNA, 19 nt, Homo sapiens
  misc_RNA (1)...(19): siRNA sense strand
aaagagguauuggaagauu

SEQ ID NO: 1420866 - RNA, 19 nt, Homo sapiens
  misc_RNA (1)...(19): siRNA sense strand
gggagacccuacaagaaga

SEQ ID NO: 1420867 - RNA, 19 nt, Homo sapiens
  misc_RNA (1)...(19): siRNA sense strand
gaauccuaaugccaucaua

SEQ ID NO: 1420868 - RNA, 19 nt, Homo sapiens
  misc_RNA (1)...(19): siRNA sense strand
agaagaucuugcagcauua

SEQ ID NO: 1420869 - RNA, 19 nt, Homo sapiens
  misc_RNA (1)...(19): siRNA sense strand
caucauagaaagcuuaaga

SEQ ID NO: 1420870 - RNA, 19 nt, Homo sapiens
  misc_RNA (1)...(19): siRNA sense strand
gaagaauuuucccgcuuua

SEQ ID NO: 1420871 - RNA, 19 nt, Homo sapiens
  misc_RNA (1)...(19): siRNA sense strand
caguggauaucaagcuuaa

SEQ ID NO: 1420872 - RNA, 19 nt, Homo sapiens
  misc_RNA (1)...(19): siRNA sense strand
gcauugaagcuauaagaga

SEQ ID NO: 1420873 - RNA, 19 nt, Homo sapiens
  misc_RNA (1)...(19): siRNA sense strand
gaaagcucuucccaaugaa

SEQ ID NO: 1420874 - RNA, 19 nt, Homo sapiens
  misc_RNA (1)...(19): siRNA sense strand
ugacuuaccaggugugauu

SEQ ID NO: 1420875 - RNA, 19 nt, Homo sapiens
  misc_RNA (1)...(19): siRNA sense strand
ggaaaugauugcccaagcu

SEQ ID NO: 1420876 - RNA, 19 nt, Homo sapiens
  misc_RNA (1)...(19): siRNA sense strand
acacagcucuggaauaaaa

SEQ ID NO: 1420877 - RNA, 19 nt, Homo sapiens
  misc_RNA (1)...(19): siRNA sense strand
ugugggaaauugaugagua

SEQ ID NO: 1420878 - RNA, 19 nt, Homo sapiens
  misc_RNA (1)...(19): siRNA sense strand
cuaaaccauuguaaccuuu

SEQ ID NO: 1420879 - RNA, 19 nt, Homo sapiens
  misc_RNA (1)...(19): siRNA sense strand
agagcaugaugacauauuu

SEQ ID NO: 1420880 - RNA, 19 nt, Homo sapiens
  misc_RNA (1)...(19): siRNA sense strand
caacucaugugauugaaaa

SEQ ID NO: 1420881 - RNA, 19 nt, Homo sapiens
  misc_RNA (1)...(19): siRNA sense strand
caagugacuacaagaaauu

SEQ ID NO: 1420882 - RNA, 19 nt, Homo sapiens
  misc_RNA (1)...(19): siRNA sense strand
gcuaaaggcacaccaagug

SEQ ID NO: 1420883 - RNA, 19 nt, Homo sapiens
  misc_RNA (1)...(19): siRNA sense strand
gagaauaugaagaagaguu

SEQ ID NO: 1420884 - RNA, 19 nt, Homo sapiens
  misc_RNA (1)...(19): siRNA sense strand
gcaguauuguuacagacuu

SEQ ID NO: 1420885 - RNA, 19 nt, Homo sapiens
  misc_RNA (1)...(19): siRNA sense strand
uggaaagacuaguguguug

SEQ ID NO: 1420886 - RNA, 19 nt, Homo sapiens
  misc_RNA (1)...(19): siRNA sense strand
ggagaacaaagaauugaga

SEQ ID NO: 1420887 - RNA, 19 nt, Homo sapiens
  misc_RNA (1)...(19): siRNA sense strand
gaaagagcaugaugacaua

SEQ ID NO: 1420888 - RNA, 19 nt, Homo sapiens
  misc_RNA (1)...(19): siRNA sense strand
gaacagcucugaaagcauu

SEQ ID NO: 1420889 - RNA, 19 nt, Homo sapiens
  misc_RNA (1)...(19): siRNA sense strand
gagaagauguugaaaugua

SEQ ID NO: 1420890 - RNA, 19 nt, Homo sapiens
  misc_RNA (1)...(19): siRNA sense strand
gaggacagcuugaggguua

SEQ ID NO: 1420891 - RNA, 19 nt, Homo sapiens
  misc_RNA (1)...(19): siRNA sense strand
gaaacugaauggaagaaua

SEQ ID NO: 1420892 - RNA, 19 nt, Homo sapiens
  misc_RNA (1)...(19): siRNA sense strand
aaagaaggcuguaccguua

SEQ ID NO: 1420893 - RNA, 19 nt, Homo sapiens
  misc_RNA (1)...(19): siRNA sense strand
aaacacagcucuggaauaa

SEQ ID NO: 1420894 - RNA, 19 nt, Homo sapiens
  misc_RNA (1)...(19): siRNA sense strand
gaaauagaacuucgaauga

SEQ ID NO: 1420895 - RNA, 19 nt, Homo sapiens
  misc_RNA (1)...(19): siRNA sense strand
gcaaugauguggucuuguu

SEQ ID NO: 1420896 - RNA, 19 nt, Homo sapiens
  misc_RNA (1)...(19): siRNA sense strand
gaccauauccuuaaaugua

SEQ ID NO: 1420897 - RNA, 19 nt, Homo sapiens
  misc_RNA (1)...(19): siRNA sense strand
gcaaugggaugcagcuauu

SEQ ID NO: 1420898 - RNA, 19 nt, Homo sapiens
  misc_RNA (1)...(19): siRNA sense strand
cagcuuaucuugcaaguga

SEQ ID NO: 1420899 - RNA, 19 nt, Homo sapiens
  misc_RNA (1)...(19): siRNA sense strand
gaaguuaggcgauuagaga

SEQ ID NO: 1420900 - RNA, 19 nt, Homo sapiens
  misc_RNA (1)...(19): siRNA sense strand
gacaaaggcauucaucaua

SEQ ID NO: 1420901 - RNA, 19 nt, Homo sapiens
  misc_RNA (1)...(19): siRNA sense strand
gauccaagcuugauuaagg

SEQ ID NO: 1420902 - RNA, 19 nt, Homo sapiens
  misc_RNA (1)...(19): siRNA sense strand
ggaagaaaguauuaaacga

SEQ ID NO: 1420903 - RNA, 19 nt, Homo sapiens
  misc_RNA (1)...(19): siRNA sense strand
aaacagcucuaaaccauug

SEQ ID NO: 1420904 - RNA, 19 nt, Homo sapiens
  misc_RNA (1)...(19): siRNA sense strand
ugacauguauucugaaguu

SEQ ID NO: 1420905 - RNA, 19 nt, Homo sapiens
  misc_RNA (1)...(19): siRNA sense strand
gaagaccucaagaaaguua

SEQ ID NO: 1420906 - RNA, 19 nt, Homo sapiens
  misc_RNA (1)...(19): siRNA sense strand
gcugaacgcaguauuguua

SEQ ID NO: 1420907 - RNA, 19 nt, Homo sapiens
  misc_RNA (1)...(19): siRNA sense strand
gauggugcuuguugacuua

SEQ ID NO: 1420908 - RNA, 19 nt, Homo sapiens
  misc_RNA (1)...(19): siRNA sense strand
ggacauccuuucagcaguu

SEQ ID NO: 1420909 - RNA, 19 nt, Homo sapiens
  misc_RNA (1)...(19): siRNA sense strand
gaaacacagcucuggaaua

SEQ ID NO: 1420910 - RNA, 19 nt, Homo sapiens
  misc_RNA (1)...(19): siRNA sense strand
ggaaauccuucaacaaucu

SEQ ID NO: 1420911 - RNA, 19 nt, Homo sapiens
  misc_RNA (1)...(19): siRNA sense strand
gcagauaauugaaggaaag

SEQ ID NO: 1420912 - RNA, 19 nt, Homo sapiens
  misc_RNA (1)...(19): siRNA sense strand
ugaaagcauugaagcuaua

SEQ ID NO: 1420913 - RNA, 19 nt, Homo sapiens
  misc_RNA (1)...(19): siRNA sense strand
ggaaagagcaugaugacau

SEQ ID NO: 1420914 - RNA, 19 nt, Homo sapiens
  misc_RNA (1)...(19): siRNA sense strand
ucacgaagcauuuaucauu

SEQ ID NO: 1420915 - RNA, 19 nt, Homo sapiens
  misc_RNA (1)...(19): siRNA sense strand
gcaguucucuucucugaca

SEQ ID NO: 1420916 - RNA, 19 nt, Homo sapiens
  misc_RNA (1)...(19): siRNA sense strand
uuaaagagguauuggaaga

SEQ ID NO: 1420917 - RNA, 19 nt, Homo sapiens
  misc_RNA (1)...(19): siRNA sense strand
aaacugaaauucucuccaa

SEQ ID NO: 1420918 - RNA, 19 nt, Homo sapiens
  misc_RNA (1)...(19): siRNA sense strand
ggcaacaacuuacaaauac

SEQ ID NO: 1420919 - RNA, 19 nt, Homo sapiens
  misc_RNA (1)...(19): siRNA sense strand
gaagaccgauccauaucug

SEQ ID NO: 1420920 - RNA, 19 nt, Homo sapiens
  misc_RNA (1)...(19): siRNA sense strand
ugaccggaaugaacuauuu

SEQ ID NO: 1420921 - RNA, 19 nt, Homo sapiens
  misc_RNA (1)...(19): siRNA sense strand
caaugaaagcuuuagguua

SEQ ID NO: 1420922 - RNA, 19 nt, Homo sapiens
  misc_RNA (1)...(19): siRNA sense strand
ggaccuuagugaauauaaa

SEQ ID NO: 1420923 - RNA, 19 nt, Homo sapiens
  misc_RNA (1)...(19): siRNA sense strand
ggaaauugaugaguauauc

SEQ ID NO: 1420924 - RNA, 19 nt, Homo sapiens
  misc_RNA (1)...(19): siRNA sense strand
cggaagaccucaagaaagu

SEQ ID NO: 1420925 - RNA, 19 nt, Homo sapiens
  misc_RNA (1)...(19): siRNA sense strand
gcaucaaguuuauagaaga

SEQ ID NO: 1420926 - RNA, 19 nt, Homo sapiens
  misc_RNA (1)...(19): siRNA sense strand
gcacccagcuuaucuugca

SEQ ID NO: 1420927 - RNA, 19 nt, Homo sapiens
  misc_RNA (1)...(19): siRNA sense strand
ggaagaaucggacccaaga

SEQ ID NO: 1420928 - RNA, 19 nt, Homo sapiens
  misc_RNA (1)...(19): siRNA sense strand
ugaaauccuugaugaaguu

SEQ ID NO: 1420929 - RNA, 19 nt, Homo sapiens
  misc_RNA (1)...(19): siRNA sense strand
gcugauaguuucaaagcaa

SEQ ID NO: 1420930 - RNA, 19 nt, Homo sapiens
  misc_RNA (1)...(19): siRNA sense strand
gagaccauauccuuaaaug

SEQ ID NO: 1420931 - RNA, 19 nt, Homo sapiens
  misc_RNA (1)...(19): siRNA sense strand
uaaagaggccguuaaggaa

SEQ ID NO: 1420932 - RNA, 19 nt, Homo sapiens
  misc_RNA (1)...(19): siRNA sense strand
guagauccaagcuugauua

SEQ ID NO: 1420933 - RNA, 19 nt, Homo sapiens
  misc_RNA (1)...(19): siRNA sense strand
uggagaagauguugaaaug

SEQ ID NO: 1420934 - RNA, 19 nt, Homo sapiens
  misc_RNA (1)...(19): siRNA sense strand
cagcaguucucuucucuga

SEQ ID NO: 1420935 - RNA, 19 nt, Homo sapiens
  misc_RNA (1)...(19): siRNA sense strand
gaugacacguucuccaguu

SEQ ID NO: 1420936 - RNA, 19 nt, Homo sapiens
  misc_RNA (1)...(19): siRNA sense strand
caaaggcauucaucauaga

SEQ ID NO: 1420937 - RNA, 19 nt, Homo sapiens
  misc_RNA (1)...(19): siRNA sense strand
gauaugauaccggaccuua

SEQ ID NO: 1420938 - RNA, 19 nt, Homo sapiens
  misc_RNA (1)...(19): siRNA sense strand
gggaugcagcuauuuauuu

SEQ ID NO: 1420939 - RNA, 19 nt, Homo sapiens
  misc_RNA (1)...(19): siRNA sense strand
ccaagugacuacaagaaau

SEQ ID NO: 1420940 - RNA, 19 nt, Homo sapiens
  misc_RNA (1)...(19): siRNA sense strand
ugauugacauguauucuga

SEQ ID NO: 1420941 - RNA, 19 nt, Homo sapiens
  misc_RNA (1)...(19): siRNA sense strand
uaauaaagcaguagagguu

SEQ ID NO: 1420942 - RNA, 19 nt, Homo sapiens
  misc_RNA (1)...(19): siRNA sense strand
cauugaagcuauaagagaa

SEQ ID NO: 1420943 - RNA, 19 nt, Homo sapiens
  misc_RNA (1)...(19): siRNA sense strand
ggauucagcagauaauuga

SEQ ID NO: 1420944 - RNA, 19 nt, Homo sapiens
  misc_RNA (1)...(19): siRNA sense strand
aaacuucgcuaucucauac

SEQ ID NO: 1420945 - RNA, 19 nt, Homo sapiens
  misc_RNA (1)...(19): siRNA sense strand
acaaugaaaccaagaauga

SEQ ID NO: 1420946 - RNA, 19 nt, Homo sapiens
  misc_RNA (1)...(19): siRNA sense strand
caaauggacccucauggaa

SEQ ID NO: 1420947 - RNA, 19 nt, Homo sapiens
  misc_RNA (1)...(19): siRNA sense strand
ugaaauagaacuucgaaug

SEQ ID NO: 1420948 - RNA, 19 nt, Homo sapiens
  misc_RNA (1)...(19): siRNA sense strand
uaccggaccuuagugaaua

SEQ ID NO: 1420949 - RNA, 19 nt, Homo sapiens
  misc_RNA (1)...(19): siRNA sense strand
gggaacagcucugaaagca

SEQ ID NO: 1420950 - RNA, 19 nt, Homo sapiens
  misc_RNA (1)...(19): siRNA sense strand
ugacaaaccuuccuuuacg

SEQ ID NO: 1420951 - RNA, 19 nt, Homo sapiens
  misc_RNA (1)...(19): siRNA sense strand
gaacaacaggcugauaguu

SEQ ID NO: 1420952 - RNA, 19 nt, Homo sapiens
  misc_RNA (1)...(19): siRNA sense strand
gauguucucucugauuaug

SEQ ID NO: 1420953 - RNA, 19 nt, Homo sapiens
  misc_RNA (1)...(19): siRNA sense strand
gcauuuaucauucacauca

SEQ ID NO: 1420954 - RNA, 19 nt, Homo sapiens
  misc_RNA (1)...(19): siRNA sense strand
ggaugcagcuauuuauuuu

SEQ ID NO: 1420955 - RNA, 19 nt, Homo sapiens
  misc_RNA (1)...(19): siRNA sense strand
gaacuugaccggaaugaac

SEQ ID NO: 1420956 - RNA, 19 nt, Homo sapiens
  misc_RNA (1)...(19): siRNA sense strand
ggauggugcuuguugacuu

SEQ ID NO: 1420957 - RNA, 19 nt, Homo sapiens
  misc_RNA (1)...(19): siRNA sense strand
acaaaggcauucaucauag

SEQ ID NO: 1420958 - RNA, 19 nt, Homo sapiens
  misc_RNA (1)...(19): siRNA sense strand
acacucaguugaaguauca

SEQ ID NO: 1420959 - RNA, 19 nt, Homo sapiens
  misc_RNA (1)...(19): siRNA sense strand
gaaagugacaagcauuuua

SEQ ID NO: 1420960 - RNA, 19 nt, Homo sapiens
  misc_RNA (1)...(19): siRNA sense strand
gacauugugugggaaauug

SEQ ID NO: 1420961 - RNA, 19 nt, Homo sapiens
  misc_RNA (1)...(19): siRNA sense strand
ggaaguuuaccacuacaaa

SEQ ID NO: 1420962 - RNA, 19 nt, Homo sapiens
  misc_RNA (1)...(19): siRNA sense strand
gcucgaauauucccaagag

SEQ ID NO: 1420963 - RNA, 19 nt, Homo sapiens
  misc_RNA (1)...(19): siRNA sense strand
gaaagaugacaaaggcauu

SEQ ID NO: 1420964 - RNA, 19 nt, Homo sapiens
  misc_RNA (1)...(19): siRNA sense strand
uugauguucucucugauua

SEQ ID NO: 1420965 - RNA, 19 nt, Homo sapiens
  misc_RNA (1)...(19): siRNA sense strand
aaagagguauuggaagauu

SEQ ID NO: 1420966 - RNA, 19 nt, Homo sapiens
  misc_RNA (1)...(19): siRNA sense strand
gggagacccuacaagaaga

SEQ ID NO: 1420967 - RNA, 19 nt, Homo sapiens
  misc_RNA (1)...(19): siRNA sense strand
gaauccuaaugccaucaua

SEQ ID NO: 1420968 - RNA, 19 nt, Homo sapiens
  misc_RNA (1)...(19): siRNA sense strand
agaagaucuugcagcauua

SEQ ID NO: 1420969 - RNA, 19 nt, Homo sapiens
  misc_RNA (1)...(19): siRNA sense strand
caucauagaaagcuuaaga

SEQ ID NO: 1420970 - RNA, 19 nt, Homo sapiens
  misc_RNA (1)...(19): siRNA sense strand
gaagaauuuucccgcuuua

SEQ ID NO: 1420971 - RNA, 19 nt, Homo sapiens
  misc_RNA (1)...(19): siRNA sense strand
caguggauaucaagcuuaa

SEQ ID NO: 1420972 - RNA, 19 nt, Homo sapiens
  misc_RNA (1)...(19): siRNA sense strand
gcauugaagcuauaagaga

SEQ ID NO: 1420973 - RNA, 19 nt, Homo sapiens
  misc_RNA (1)...(19): siRNA sense strand
gaaagcucuucccaaugaa

SEQ ID NO: 1420974 - RNA, 19 nt, Homo sapiens
  misc_RNA (1)...(19): siRNA sense strand
ugacuuaccaggugugauu

SEQ ID NO: 1420975 - RNA, 19 nt, Homo sapiens
  misc_RNA (1)...(19): siRNA sense strand
ggaaaugauugcccaagcu

SEQ ID NO: 1420976 - RNA, 19 nt, Homo sapiens
  misc_RNA (1)...(19): siRNA sense strand
acacagcucuggaauaaaa

SEQ ID NO: 1420977 - RNA, 19 nt, Homo sapiens
  misc_RNA (1)...(19): siRNA sense strand
ugugggaaauugaugagua

SEQ ID NO: 1420978 - RNA, 19 nt, Homo sapiens
  misc_RNA (1)...(19): siRNA sense strand
cuaaaccauuguaaccuuu

SEQ ID NO: 1420979 - RNA, 19 nt, Homo sapiens
  misc_RNA (1)...(19): siRNA sense strand
agagcaugaugacauauuu

SEQ ID NO: 1420980 - RNA, 19 nt, Homo sapiens
  misc_RNA (1)...(19): siRNA sense strand
caacucaugugauugaaaa

SEQ ID NO: 1420981 - RNA, 19 nt, Homo sapiens
  misc_RNA (1)...(19): siRNA sense strand
caagugacuacaagaaauu

SEQ ID NO: 1420982 - RNA, 19 nt, Homo sapiens
  misc_RNA (1)...(19): siRNA sense strand
gcuaaaggcacaccaagug

SEQ ID NO: 1420983 - RNA, 19 nt, Homo sapiens
  misc_RNA (1)...(19): siRNA sense strand
gagaauaugaagaagaguu

SEQ ID NO: 1420984 - RNA, 19 nt, Homo sapiens
  misc_RNA (1)...(19): siRNA sense strand
gcaguauuguuacagacuu

SEQ ID NO: 1420985 - RNA, 19 nt, Homo sapiens
  misc_RNA (1)...(19): siRNA sense strand
uggaaagacuaguguguug

SEQ ID NO: 1420986 - RNA, 19 nt, Homo sapiens
  misc_RNA (1)...(19): siRNA sense strand
ggagaacaaagaauugaga

SEQ ID NO: 1420987 - RNA, 19 nt, Homo sapiens
  misc_RNA (1)...(19): siRNA sense strand
gaaagagcaugaugacaua

SEQ ID NO: 1420988 - RNA, 19 nt, Homo sapiens
  misc_RNA (1)...(19): siRNA sense strand
gaacagcucugaaagcauu

SEQ ID NO: 1420989 - RNA, 19 nt, Homo sapiens
  misc_RNA (1)...(19): siRNA sense strand
gagaagauguugaaaugua

SEQ ID NO: 1420990 - RNA, 19 nt, Homo sapiens
  misc_RNA (1)...(19): siRNA sense strand
gaggacagcuugaggguua

SEQ ID NO: 1420991 - RNA, 19 nt, Homo sapiens
  misc_RNA (1)...(19): siRNA sense strand
gaaacugaauggaagaaua

SEQ ID NO: 1420992 - RNA, 19 nt, Homo sapiens
  misc_RNA (1)...(19): siRNA sense strand
aaagaaggcuguaccguua

SEQ ID NO: 1420993 - RNA, 19 nt, Homo sapiens
  misc_RNA (1)...(19): siRNA sense strand
aaacacagcucuggaauaa

SEQ ID NO: 1420994 - RNA, 19 nt, Homo sapiens
  misc_RNA (1)...(19): siRNA sense strand
gaaauagaacuucgaauga

SEQ ID NO: 1420995 - RNA, 19 nt, Homo sapiens
  misc_RNA (1)...(19): siRNA sense strand
gcaaugauguggucuuguu

SEQ ID NO: 1420996 - RNA, 19 nt, Homo sapiens
  misc_RNA (1)...(19): siRNA sense strand
gaccauauccuuaaaugua

SEQ ID NO: 1420997 - RNA, 19 nt, Homo sapiens
  misc_RNA (1)...(19): siRNA sense strand
gcaaugggaugcagcuauu

SEQ ID NO: 1420998 - RNA, 19 nt, Homo sapiens
  misc_RNA (1)...(19): siRNA sense strand
cagcuuaucuugcaaguga

SEQ ID NO: 1420999 - RNA, 19 nt, Homo sapiens
  misc_RNA (1)...(19): siRNA sense strand
gaaguuaggcgauuagaga

SEQ ID NO: 1421000 - RNA, 19 nt, Homo sapiens
  misc_RNA (1)...(19): siRNA sense strand
gacaaaggcauucaucaua

SEQ ID NO: 1421001 - RNA, 19 nt, Homo sapiens
  misc_RNA (1)...(19): siRNA sense strand
gauccaagcuugauuaagg

SEQ ID NO: 1421002 - RNA, 19 nt, Homo sapiens
  misc_RNA (1)...(19): siRNA sense strand
ggaagaaaguauuaaacga

SEQ ID NO: 1421003 - RNA, 19 nt, Homo sapiens
  misc_RNA (1)...(19): siRNA sense strand
aaacagcucuaaaccauug

SEQ ID NO: 1421004 - RNA, 19 nt, Homo sapiens
  misc_RNA (1)...(19): siRNA sense strand
ugacauguauucugaaguu

SEQ ID NO: 1421005 - RNA, 19 nt, Homo sapiens
  misc_RNA (1)...(19): siRNA sense strand
gaagaccucaagaaaguua

SEQ ID NO: 1421006 - RNA, 19 nt, Homo sapiens
  misc_RNA (1)...(19): siRNA sense strand
gcugaacgcaguauuguua

SEQ ID NO: 1421007 - RNA, 19 nt, Homo sapiens
  misc_RNA (1)...(19): siRNA sense strand
gauggugcuuguugacuua

SEQ ID NO: 1421008 - RNA, 19 nt, Homo sapiens
  misc_RNA (1)...(19): siRNA sense strand
ggacauccuuucagcaguu

SEQ ID NO: 1421009 - RNA, 19 nt, Homo sapiens
  misc_RNA (1)...(19): siRNA sense strand
gaaacacagcucuggaaua

SEQ ID NO: 1421010 - RNA, 19 nt, Homo sapiens
  misc_RNA (1)...(19): siRNA sense strand
ggaaauccuucaacaaucu

SEQ ID NO: 1421011 - RNA, 19 nt, Homo sapiens
  misc_RNA (1)...(19): siRNA sense strand
gcagauaauugaaggaaag

SEQ ID NO: 1421012 - RNA, 19 nt, Homo sapiens
  misc_RNA (1)...(19): siRNA sense strand
ugaaagcauugaagcuaua

SEQ ID NO: 1421013 - RNA, 19 nt, Homo sapiens
  misc_RNA (1)...(19): siRNA sense strand
ggaaagagcaugaugacau

SEQ ID NO: 1421014 - RNA, 19 nt, Homo sapiens
  misc_RNA (1)...(19): siRNA sense strand
ucacgaagcauuuaucauu

SEQ ID NO: 1421015 - RNA, 19 nt, Homo sapiens
  misc_RNA (1)...(19): siRNA sense strand
gcaguucucuucucugaca

SEQ ID NO: 1421016 - RNA, 19 nt, Homo sapiens
  misc_RNA (1)...(19): siRNA sense strand
uuaaagagguauuggaaga

SEQ ID NO: 1421017 - RNA, 19 nt, Homo sapiens
  misc_RNA (1)...(19): siRNA sense strand
aaacugaaauucucuccaa

SEQ ID NO: 1421018 - RNA, 19 nt, Homo sapiens
  misc_RNA (1)...(19): siRNA sense strand
ggcaacaacuuacaaauac

SEQ ID NO: 1421019 - RNA, 19 nt, Homo sapiens
  misc_RNA (1)...(19): siRNA sense strand
gaagaccgauccauaucug

SEQ ID NO: 1421020 - RNA, 19 nt, Homo sapiens
  misc_RNA (1)...(19): siRNA sense strand
ugaccggaaugaacuauuu

SEQ ID NO: 1421021 - RNA, 19 nt, Homo sapiens
  misc_RNA (1)...(19): siRNA sense strand
caaugaaagcuuuagguua

SEQ ID NO: 1421022 - RNA, 19 nt, Homo sapiens
  misc_RNA (1)...(19): siRNA sense strand
ggaccuuagugaauauaaa

SEQ ID NO: 1421023 - RNA, 19 nt, Homo sapiens
  misc_RNA (1)...(19): siRNA sense strand
ggaaauugaugaguauauc

SEQ ID NO: 1421024 - RNA, 19 nt, Homo sapiens
  misc_RNA (1)...(19): siRNA sense strand
cggaagaccucaagaaagu

SEQ ID NO: 1421025 - RNA, 19 nt, Homo sapiens
  misc_RNA (1)...(19): siRNA sense strand
gcaucaaguuuauagaaga

SEQ ID NO: 1421026 - RNA, 19 nt, Homo sapiens
  misc_RNA (1)...(19): siRNA sense strand
gcacccagcuuaucuugca

SEQ ID NO: 1421027 - RNA, 19 nt, Homo sapiens
  misc_RNA (1)...(19): siRNA sense strand
ggaagaaucggacccaaga

SEQ ID NO: 1421028 - RNA, 19 nt, Homo sapiens
  misc_RNA (1)...(19): siRNA sense strand
ugaaauccuugaugaaguu

SEQ ID NO: 1421029 - RNA, 19 nt, Homo sapiens
  misc_RNA (1)...(19): siRNA sense strand
gcugauaguuucaaagcaa

SEQ ID NO: 1421030 - RNA, 19 nt, Homo sapiens
  misc_RNA (1)...(19): siRNA sense strand
gagaccauauccuuaaaug

SEQ ID NO: 1421031 - RNA, 19 nt, Homo sapiens
  misc_RNA (1)...(19): siRNA sense strand
uaaagaggccguuaaggaa

SEQ ID NO: 1421032 - RNA, 19 nt, Homo sapiens
  misc_RNA (1)...(19): siRNA sense strand
guagauccaagcuugauua

SEQ ID NO: 1421033 - RNA, 19 nt, Homo sapiens
  misc_RNA (1)...(19): siRNA sense strand
uggagaagauguugaaaug

SEQ ID NO: 1421034 - RNA, 19 nt, Homo sapiens
  misc_RNA (1)...(19): siRNA sense strand
cagcaguucucuucucuga

SEQ ID NO: 1421035 - RNA, 19 nt, Homo sapiens
  misc_RNA (1)...(19): siRNA sense strand
gaugacacguucuccaguu

SEQ ID NO: 1421036 - RNA, 19 nt, Homo sapiens
  misc_RNA (1)...(19): siRNA sense strand
caaaggcauucaucauaga

SEQ ID NO: 1421037 - RNA, 19 nt, Homo sapiens
  misc_RNA (1)...(19): siRNA sense strand
gauaugauaccggaccuua

SEQ ID NO: 1421038 - RNA, 19 nt, Homo sapiens
  misc_RNA (1)...(19): siRNA sense strand
gggaugcagcuauuuauuu

SEQ ID NO: 1421039 - RNA, 19 nt, Homo sapiens
  misc_RNA (1)...(19): siRNA sense strand
ccaagugacuacaagaaau

SEQ ID NO: 1421040 - RNA, 19 nt, Homo sapiens
  misc_RNA (1)...(19): siRNA sense strand
ugauugacauguauucuga

SEQ ID NO: 1421041 - RNA, 19 nt, Homo sapiens
  misc_RNA (1)...(19): siRNA sense strand
uaauaaagcaguagagguu

SEQ ID NO: 1421042 - RNA, 19 nt, Homo sapiens
  misc_RNA (1)...(19): siRNA sense strand
cauugaagcuauaagagaa

SEQ ID NO: 1421043 - RNA, 19 nt, Homo sapiens
  misc_RNA (1)...(19): siRNA sense strand
ggauucagcagauaauuga

SEQ ID NO: 1421044 - RNA, 19 nt, Homo sapiens
  misc_RNA (1)...(19): siRNA sense strand
aaacuucgcuaucucauac

SEQ ID NO: 1421045 - RNA, 19 nt, Homo sapiens
  misc_RNA (1)...(19): siRNA sense strand
acaaugaaaccaagaauga

SEQ ID NO: 1421046 - RNA, 19 nt, Homo sapiens
  misc_RNA (1)...(19): siRNA sense strand
caaauggacccucauggaa

SEQ ID NO: 1421047 - RNA, 19 nt, Homo sapiens
  misc_RNA (1)...(19): siRNA sense strand
ugaaauagaacuucgaaug

SEQ ID NO: 1421048 - RNA, 19 nt, Homo sapiens
  misc_RNA (1)...(19): siRNA sense strand
uaccggaccuuagugaaua

SEQ ID NO: 1421049 - RNA, 19 nt, Homo sapiens
  misc_RNA (1)...(19): siRNA sense strand
gggaacagcucugaaagca

SEQ ID NO: 1421050 - RNA, 19 nt, Homo sapiens
  misc_RNA (1)...(19): siRNA sense strand
ugacaaaccuuccuuuacg

SEQ ID NO: 1421051 - RNA, 19 nt, Homo sapiens
  misc_RNA (1)...(19): siRNA sense strand
gaacaacaggcugauaguu

SEQ ID NO: 1421052 - RNA, 19 nt, Homo sapiens
  misc_RNA (1)...(19): siRNA sense strand
gauguucucucugauuaug

SEQ ID NO: 1421053 - RNA, 19 nt, Homo sapiens
  misc_RNA (1)...(19): siRNA sense strand
gcauuuaucauucacauca

SEQ ID NO: 1421054 - RNA, 19 nt, Homo sapiens
  misc_RNA (1)...(19): siRNA sense strand
ggaugcagcuauuuauuuu

SEQ ID NO: 1421055 - RNA, 19 nt, Homo sapiens
  misc_RNA (1)...(19): siRNA sense strand
gaacuugaccggaaugaac

SEQ ID NO: 1421056 - RNA, 19 nt, Homo sapiens
  misc_RNA (1)...(19): siRNA sense strand
ggauggugcuuguugacuu

SEQ ID NO: 1421057 - RNA, 19 nt, Homo sapiens
  misc_RNA (1)...(19): siRNA sense strand
acaaaggcauucaucauag

SEQ ID NO: 1421058 - RNA, 19 nt, Homo sapiens
  misc_RNA (1)...(19): siRNA sense strand
acacucaguugaaguauca

SEQ ID NO: 1421059 - RNA, 19 nt, Homo sapiens
  misc_RNA (1)...(19): siRNA sense strand
gaaagugacaagcauuuua

SEQ ID NO: 1421060 - RNA, 19 nt, Homo sapiens
  misc_RNA (1)...(19): siRNA sense strand
gacauugugugggaaauug

SEQ ID NO: 1421061 - RNA, 19 nt, Homo sapiens
  misc_RNA (1)...(19): siRNA sense strand
ggaaguuuaccacuacaaa

SEQ ID NO: 1421062 - RNA, 19 nt, Homo sapiens
  misc_RNA (1)...(19): siRNA sense strand
gcucgaauauucccaagag

SEQ ID NO: 1421063 - RNA, 19 nt, Homo sapiens
  misc_RNA (1)...(19): siRNA sense strand
gaaagaugacaaaggcauu

SEQ ID NO: 1421064 - RNA, 19 nt, Homo sapiens
  misc_RNA (1)...(19): siRNA sense strand
uugauguucucucugauua

SEQ ID NO: 1421065 - RNA, 19 nt, Homo sapiens
  misc_RNA (1)...(19): siRNA sense strand
aaagagguauuggaagauu

SEQ ID NO: 1421066 - RNA, 19 nt, Homo sapiens
  misc_RNA (1)...(19): siRNA sense strand
gggagacccuacaagaaga

SEQ ID NO: 1421067 - RNA, 19 nt, Homo sapiens
  misc_RNA (1)...(19): siRNA sense strand
gaauccuaaugccaucaua

SEQ ID NO: 1421068 - RNA, 19 nt, Homo sapiens
  misc_RNA (1)...(19): siRNA sense strand
agaagaucuugcagcauua

SEQ ID NO: 1421069 - RNA, 19 nt, Homo sapiens
  misc_RNA (1)...(19): siRNA sense strand
caucauagaaagcuuaaga

SEQ ID NO: 1421070 - RNA, 19 nt, Homo sapiens
  misc_RNA (1)...(19): siRNA sense strand
gaagaauuuucccgcuuua

SEQ ID NO: 1421071 - RNA, 19 nt, Homo sapiens
  misc_RNA (1)...(19): siRNA sense strand
caguggauaucaagcuuaa

SEQ ID NO: 1421072 - RNA, 19 nt, Homo sapiens
  misc_RNA (1)...(19): siRNA sense strand
gcauugaagcuauaagaga

SEQ ID NO: 1421073 - RNA, 19 nt, Homo sapiens
  misc_RNA (1)...(19): siRNA sense strand
gaaagcucuucccaaugaa

SEQ ID NO: 1421074 - RNA, 19 nt, Homo sapiens
  misc_RNA (1)...(19): siRNA sense strand
ugacuuaccaggugugauu

SEQ ID NO: 1421075 - RNA, 19 nt, Homo sapiens
  misc_RNA (1)...(19): siRNA sense strand
ggaaaugauugcccaagcu

SEQ ID NO: 1421076 - RNA, 19 nt, Homo sapiens
  misc_RNA (1)...(19): siRNA sense strand
acacagcucuggaauaaaa

SEQ ID NO: 1421077 - RNA, 19 nt, Homo sapiens
  misc_RNA (1)...(19): siRNA sense strand
ugugggaaauugaugagua

SEQ ID NO: 1421078 - RNA, 19 nt, Homo sapiens
  misc_RNA (1)...(19): siRNA sense strand
cuaaaccauuguaaccuuu

SEQ ID NO: 1421079 - RNA, 19 nt, Homo sapiens
  misc_RNA (1)...(19): siRNA sense strand
agagcaugaugacauauuu

SEQ ID NO: 1421080 - RNA, 19 nt, Homo sapiens
  misc_RNA (1)...(19): siRNA sense strand
caacucaugugauugaaaa

SEQ ID NO: 1421081 - RNA, 19 nt, Homo sapiens
  misc_RNA (1)...(19): siRNA sense strand
caagugacuacaagaaauu

SEQ ID NO: 1421082 - RNA, 19 nt, Homo sapiens
  misc_RNA (1)...(19): siRNA sense strand
gcuaaaggcacaccaagug

SEQ ID NO: 1421083 - RNA, 19 nt, Homo sapiens
  misc_RNA (1)...(19): siRNA sense strand
gagaauaugaagaagaguu

SEQ ID NO: 1421084 - RNA, 19 nt, Homo sapiens
  misc_RNA (1)...(19): siRNA sense strand
gcaguauuguuacagacuu

SEQ ID NO: 1421085 - RNA, 19 nt, Homo sapiens
  misc_RNA (1)...(19): siRNA sense strand
uggaaagacuaguguguug

SEQ ID NO: 1421086 - RNA, 19 nt, Homo sapiens
  misc_RNA (1)...(19): siRNA sense strand
ggagaacaaagaauugaga

SEQ ID NO: 1421087 - RNA, 19 nt, Homo sapiens
  misc_RNA (1)...(19): siRNA sense strand
gaaagagcaugaugacaua

SEQ ID NO: 1421088 - RNA, 19 nt, Homo sapiens
  misc_RNA (1)...(19): siRNA sense strand
gaacagcucugaaagcauu

SEQ ID NO: 1421089 - RNA, 19 nt, Homo sapiens
  misc_RNA (1)...(19): siRNA sense strand
gagaagauguugaaaugua

SEQ ID NO: 1421090 - RNA, 19 nt, Homo sapiens
  misc_RNA (1)...(19): siRNA sense strand
gaggacagcuugaggguua

SEQ ID NO: 1421091 - RNA, 19 nt, Homo sapiens
  misc_RNA (1)...(19): siRNA sense strand
gaaacugaauggaagaaua

SEQ ID NO: 1421092 - RNA, 19 nt, Homo sapiens
  misc_RNA (1)...(19): siRNA sense strand
aaagaaggcuguaccguua

SEQ ID NO: 1421093 - RNA, 19 nt, Homo sapiens
  misc_RNA (1)...(19): siRNA sense strand
aaacacagcucuggaauaa

SEQ ID NO: 1421094 - RNA, 19 nt, Homo sapiens
  misc_RNA (1)...(19): siRNA sense strand
gaaauagaacuucgaauga

SEQ ID NO: 1421095 - RNA, 19 nt, Homo sapiens
  misc_RNA (1)...(19): siRNA sense strand
gcaaugauguggucuuguu

SEQ ID NO: 1421096 - RNA, 19 nt, Homo sapiens
  misc_RNA (1)...(19): siRNA sense strand
gaccauauccuuaaaugua

SEQ ID NO: 1421097 - RNA, 19 nt, Homo sapiens
  misc_RNA (1)...(19): siRNA sense strand
gcaaugggaugcagcuauu

SEQ ID NO: 1421098 - RNA, 19 nt, Homo sapiens
  misc_RNA (1)...(19): siRNA sense strand
cagcuuaucuugcaaguga

SEQ ID NO: 1421099 - RNA, 19 nt, Homo sapiens
  misc_RNA (1)...(19): siRNA sense strand
gaaguuaggcgauuagaga

SEQ ID NO: 1421100 - RNA, 19 nt, Homo sapiens
  misc_RNA (1)...(19): siRNA sense strand
gacaaaggcauucaucaua

SEQ ID NO: 1421101 - RNA, 19 nt, Homo sapiens
  misc_RNA (1)...(19): siRNA sense strand
gauccaagcuugauuaagg

SEQ ID NO: 1421102 - RNA, 19 nt, Homo sapiens
  misc_RNA (1)...(19): siRNA sense strand
ggaagaaaguauuaaacga

SEQ ID NO: 1421103 - RNA, 19 nt, Homo sapiens
  misc_RNA (1)...(19): siRNA sense strand
aaacagcucuaaaccauug

SEQ ID NO: 1421104 - RNA, 19 nt, Homo sapiens
  misc_RNA (1)...(19): siRNA sense strand
ugacauguauucugaaguu

SEQ ID NO: 1421105 - RNA, 19 nt, Homo sapiens
  misc_RNA (1)...(19): siRNA sense strand
gaagaccucaagaaaguua

SEQ ID NO: 1421106 - RNA, 19 nt, Homo sapiens
  misc_RNA (1)...(19): siRNA sense strand
gcugaacgcaguauuguua

SEQ ID NO: 1421107 - RNA, 19 nt, Homo sapiens
  misc_RNA (1)...(19): siRNA sense strand
gauggugcuuguugacuua

SEQ ID NO: 1421108 - RNA, 19 nt, Homo sapiens
  misc_RNA (1)...(19): siRNA sense strand
ggacauccuuucagcaguu

SEQ ID NO: 1421109 - RNA, 19 nt, Homo sapiens
  misc_RNA (1)...(19): siRNA sense strand
gaaacacagcucuggaaua

SEQ ID NO: 1421110 - RNA, 19 nt, Homo sapiens
  misc_RNA (1)...(19): siRNA sense strand
ggaaauccuucaacaaucu

SEQ ID NO: 1421111 - RNA, 19 nt, Homo sapiens
  misc_RNA (1)...(19): siRNA sense strand
gcagauaauugaaggaaag

SEQ ID NO: 1421112 - RNA, 19 nt, Homo sapiens
  misc_RNA (1)...(19): siRNA sense strand
ugaaagcauugaagcuaua

SEQ ID NO: 1421113 - RNA, 19 nt, Homo sapiens
  misc_RNA (1)...(19): siRNA sense strand
ggaaagagcaugaugacau

SEQ ID NO: 1421114 - RNA, 19 nt, Homo sapiens
  misc_RNA (1)...(19): siRNA sense strand
ucacgaagcauuuaucauu

SEQ ID NO: 1421115 - RNA, 19 nt, Homo sapiens
  misc_RNA (1)...(19): siRNA sense strand
gcaguucucuucucugaca

SEQ ID NO: 1421116 - RNA, 19 nt, Homo sapiens
  misc_RNA (1)...(19): siRNA sense strand
uuaaagagguauuggaaga

SEQ ID NO: 1421117 - RNA, 19 nt, Homo sapiens
  misc_RNA (1)...(19): siRNA sense strand
aaacugaaauucucuccaa

SEQ ID NO: 1421118 - RNA, 19 nt, Homo sapiens
  misc_RNA (1)...(19): siRNA sense strand
ggcaacaacuuacaaauac

SEQ ID NO: 1421119 - RNA, 19 nt, Homo sapiens
  misc_RNA (1)...(19): siRNA sense strand
gaagaccgauccauaucug

SEQ ID NO: 1421120 - RNA, 19 nt, Homo sapiens
  misc_RNA (1)...(19): siRNA sense strand
ugaccggaaugaacuauuu

SEQ ID NO: 1421121 - RNA, 19 nt, Homo sapiens
  misc_RNA (1)...(19): siRNA sense strand
caaugaaagcuuuagguua

SEQ ID NO: 1421122 - RNA, 19 nt, Homo sapiens
  misc_RNA (1)...(19): siRNA sense strand
ggaccuuagugaauauaaa

SEQ ID NO: 1421123 - RNA, 19 nt, Homo sapiens
  misc_RNA (1)...(19): siRNA sense strand
ggaaauugaugaguauauc

SEQ ID NO: 1421124 - RNA, 19 nt, Homo sapiens
  misc_RNA (1)...(19): siRNA sense strand
cggaagaccucaagaaagu

SEQ ID NO: 1421125 - RNA, 19 nt, Homo sapiens
  misc_RNA (1)...(19): siRNA sense strand
gcaucaaguuuauagaaga

SEQ ID NO: 1421126 - RNA, 19 nt, Homo sapiens
  misc_RNA (1)...(19): siRNA sense strand
gcacccagcuuaucuugca

SEQ ID NO: 1421127 - RNA, 19 nt, Homo sapiens
  misc_RNA (1)...(19): siRNA sense strand
ggaagaaucggacccaaga

SEQ ID NO: 1421128 - RNA, 19 nt, Homo sapiens
  misc_RNA (1)...(19): siRNA sense strand
ugaaauccuugaugaaguu

SEQ ID NO: 1421129 - RNA, 19 nt, Homo sapiens
  misc_RNA (1)...(19): siRNA sense strand
gcugauaguuucaaagcaa

SEQ ID NO: 1421130 - RNA, 19 nt, Homo sapiens
  misc_RNA (1)...(19): siRNA sense strand
gagaccauauccuuaaaug

SEQ ID NO: 1421131 - RNA, 19 nt, Homo sapiens
  misc_RNA (1)...(19): siRNA sense strand
uaaagaggccguuaaggaa

SEQ ID NO: 1421132 - RNA, 19 nt, Homo sapiens
  misc_RNA (1)...(19): siRNA sense strand
guagauccaagcuugauua

SEQ ID NO: 1421133 - RNA, 19 nt, Homo sapiens
  misc_RNA (1)...(19): siRNA sense strand
uggagaagauguugaaaug

SEQ ID NO: 1421134 - RNA, 19 nt, Homo sapiens
  misc_RNA (1)...(19): siRNA sense strand
cagcaguucucuucucuga

SEQ ID NO: 1421135 - RNA, 19 nt, Homo sapiens
  misc_RNA (1)...(19): siRNA sense strand
gaugacacguucuccaguu

SEQ ID NO: 1421136 - RNA, 19 nt, Homo sapiens
  misc_RNA (1)...(19): siRNA sense strand
caaaggcauucaucauaga

SEQ ID NO: 1421137 - RNA, 19 nt, Homo sapiens
  misc_RNA (1)...(19): siRNA sense strand
gauaugauaccggaccuua

SEQ ID NO: 1421138 - RNA, 19 nt, Homo sapiens
  misc_RNA (1)...(19): siRNA sense strand
gggaugcagcuauuuauuu

SEQ ID NO: 1421139 - RNA, 19 nt, Homo sapiens
  misc_RNA (1)...(19): siRNA sense strand
ccaagugacuacaagaaau

SEQ ID NO: 1421140 - RNA, 19 nt, Homo sapiens
  misc_RNA (1)...(19): siRNA sense strand
ugauugacauguauucuga

SEQ ID NO: 1421141 - RNA, 19 nt, Homo sapiens
  misc_RNA (1)...(19): siRNA sense strand
uaauaaagcaguagagguu

SEQ ID NO: 1421142 - RNA, 19 nt, Homo sapiens
  misc_RNA (1)...(19): siRNA sense strand
cauugaagcuauaagagaa

SEQ ID NO: 1421143 - RNA, 19 nt, Homo sapiens
  misc_RNA (1)...(19): siRNA sense strand
ggauucagcagauaauuga

SEQ ID NO: 1421144 - RNA, 19 nt, Homo sapiens
  misc_RNA (1)...(19): siRNA sense strand
aaacuucgcuaucucauac

SEQ ID NO: 1421145 - RNA, 19 nt, Homo sapiens
  misc_RNA (1)...(19): siRNA sense strand
acaaugaaaccaagaauga

SEQ ID NO: 1421146 - RNA, 19 nt, Homo sapiens
  misc_RNA (1)...(19): siRNA sense strand
caaauggacccucauggaa

SEQ ID NO: 1421147 - RNA, 19 nt, Homo sapiens
  misc_RNA (1)...(19): siRNA sense strand
ugaaauagaacuucgaaug

SEQ ID NO: 1421148 - RNA, 19 nt, Homo sapiens
  misc_RNA (1)...(19): siRNA sense strand
uaccggaccuuagugaaua

SEQ ID NO: 1421149 - RNA, 19 nt, Homo sapiens
  misc_RNA (1)...(19): siRNA sense strand
gggaacagcucugaaagca

SEQ ID NO: 1421150 - RNA, 19 nt, Homo sapiens
  misc_RNA (1)...(19): siRNA sense strand
ugacaaaccuuccuuuacg

SEQ ID NO: 1421151 - RNA, 19 nt, Homo sapiens
  misc_RNA (1)...(19): siRNA sense strand
gaacaacaggcugauaguu

SEQ ID NO: 1421152 - RNA, 19 nt, Homo sapiens
  misc_RNA (1)...(19): siRNA sense strand
gauguucucucugauuaug

SEQ ID NO: 1421153 - RNA, 19 nt, Homo sapiens
  misc_RNA (1)...(19): siRNA sense strand
gcauuuaucauucacauca

SEQ ID NO: 1421154 - RNA, 19 nt, Homo sapiens
  misc_RNA (1)...(19): siRNA sense strand
ggaugcagcuauuuauuuu

SEQ ID NO: 1421155 - RNA, 19 nt, Homo sapiens
  misc_RNA (1)...(19): siRNA sense strand
gaacuugaccggaaugaac

SEQ ID NO: 1421156 - RNA, 19 nt, Homo sapiens
  misc_RNA (1)...(19): siRNA sense strand
ggauggugcuuguugacuu

SEQ ID NO: 1421157 - RNA, 19 nt, Homo sapiens
  misc_RNA (1)...(19): siRNA sense strand
acaaaggcauucaucauag

SEQ ID NO: 1421158 - RNA, 19 nt, Homo sapiens
  misc_RNA (1)...(19): siRNA sense strand
acacucaguugaaguauca

SEQ ID NO: 1421159 - RNA, 19 nt, Homo sapiens
  misc_RNA (1)...(19): siRNA sense strand
gaaagugacaagcauuuua

SEQ ID NO: 1421160 - RNA, 19 nt, Homo sapiens
  misc_RNA (1)...(19): siRNA sense strand
gacauugugugggaaauug

SEQ ID NO: 1421161 - RNA, 19 nt, Homo sapiens
  misc_RNA (1)...(19): siRNA sense strand
ggaaguuuaccacuacaaa

SEQ ID NO: 1421162 - RNA, 19 nt, Homo sapiens
  misc_RNA (1)...(19): siRNA sense strand
gcucgaauauucccaagag

SEQ ID NO: 1421163 - RNA, 19 nt, Homo sapiens
  misc_RNA (1)...(19): siRNA sense strand
gaaagaugacaaaggcauu

SEQ ID NO: 1421164 - RNA, 19 nt, Homo sapiens
  misc_RNA (1)...(19): siRNA sense strand
uugauguucucucugauua

SEQ ID NO: 1421165 - RNA, 19 nt, Homo sapiens
  misc_RNA (1)...(19): siRNA sense strand
aaagagguauuggaagauu

SEQ ID NO: 1421166 - RNA, 19 nt, Homo sapiens
  misc_RNA (1)...(19): siRNA sense strand
gggagacccuacaagaaga

SEQ ID NO: 1421167 - RNA, 19 nt, Homo sapiens
  misc_RNA (1)...(19): siRNA sense strand
gaauccuaaugccaucaua

SEQ ID NO: 1421168 - RNA, 19 nt, Homo sapiens
  misc_RNA (1)...(19): siRNA sense strand
agaagaucuugcagcauua

SEQ ID NO: 1421169 - RNA, 19 nt, Homo sapiens
  misc_RNA (1)...(19): siRNA sense strand
caucauagaaagcuuaaga

SEQ ID NO: 1421170 - RNA, 19 nt, Homo sapiens
  misc_RNA (1)...(19): siRNA sense strand
gaagaauuuucccgcuuua

SEQ ID NO: 1421171 - RNA, 19 nt, Homo sapiens
  misc_RNA (1)...(19): siRNA sense strand
caguggauaucaagcuuaa

SEQ ID NO: 1421172 - RNA, 19 nt, Homo sapiens
  misc_RNA (1)...(19): siRNA sense strand
gcauugaagcuauaagaga

SEQ ID NO: 1421173 - RNA, 19 nt, Homo sapiens
  misc_RNA (1)...(19): siRNA sense strand
gaaagcucuucccaaugaa

SEQ ID NO: 1421174 - RNA, 19 nt, Homo sapiens
  misc_RNA (1)...(19): siRNA sense strand
ugacuuaccaggugugauu

SEQ ID NO: 1421175 - RNA, 19 nt, Homo sapiens
  misc_RNA (1)...(19): siRNA sense strand
ggaaaugauugcccaagcu

SEQ ID NO: 1421176 - RNA, 19 nt, Homo sapiens
  misc_RNA (1)...(19): siRNA sense strand
acacagcucuggaauaaaa

SEQ ID NO: 1421177 - RNA, 19 nt, Homo sapiens
  misc_RNA (1)...(19): siRNA sense strand
ugugggaaauugaugagua

SEQ ID NO: 1421178 - RNA, 19 nt, Homo sapiens
  misc_RNA (1)...(19): siRNA sense strand
cuaaaccauuguaaccuuu

SEQ ID NO: 1421179 - RNA, 19 nt, Homo sapiens
  misc_RNA (1)...(19): siRNA sense strand
agagcaugaugacauauuu

SEQ ID NO: 1421180 - RNA, 19 nt, Homo sapiens
  misc_RNA (1)...(19): siRNA sense strand
caacucaugugauugaaaa

SEQ ID NO: 1421181 - RNA, 19 nt, Homo sapiens
  misc_RNA (1)...(19): siRNA sense strand
caagugacuacaagaaauu

SEQ ID NO: 1421182 - RNA, 19 nt, Homo sapiens
  misc_RNA (1)...(19): siRNA sense strand
gcuaaaggcacaccaagug

SEQ ID NO: 1421183 - RNA, 19 nt, Homo sapiens
  misc_RNA (1)...(19): siRNA sense strand
gagaauaugaagaagaguu

SEQ ID NO: 1421184 - RNA, 19 nt, Homo sapiens
  misc_RNA (1)...(19): siRNA sense strand
gcaguauuguuacagacuu

SEQ ID NO: 1421185 - RNA, 19 nt, Homo sapiens
  misc_RNA (1)...(19): siRNA sense strand
uggaaagacuaguguguug

SEQ ID NO: 1421186 - RNA, 19 nt, Homo sapiens
  misc_RNA (1)...(19): siRNA sense strand
ggagaacaaagaauugaga

SEQ ID NO: 1421187 - RNA, 19 nt, Homo sapiens
  misc_RNA (1)...(19): siRNA sense strand
gaaagagcaugaugacaua

SEQ ID NO: 1421188 - RNA, 19 nt, Homo sapiens
  misc_RNA (1)...(19): siRNA sense strand
gaacagcucugaaagcauu

SEQ ID NO: 1421189 - RNA, 19 nt, Homo sapiens
  misc_RNA (1)...(19): siRNA sense strand
gagaagauguugaaaugua

SEQ ID NO: 1421190 - RNA, 19 nt, Homo sapiens
  misc_RNA (1)...(19): siRNA sense strand
gaggacagcuugaggguua

SEQ ID NO: 1421191 - RNA, 19 nt, Homo sapiens
  misc_RNA (1)...(19): siRNA sense strand
gaaacugaauggaagaaua

SEQ ID NO: 1421192 - RNA, 19 nt, Homo sapiens
  misc_RNA (1)...(19): siRNA sense strand
aaagaaggcuguaccguua

SEQ ID NO: 1421193 - RNA, 19 nt, Homo sapiens
  misc_RNA (1)...(19): siRNA sense strand
aaacacagcucuggaauaa

SEQ ID NO: 1421194 - RNA, 19 nt, Homo sapiens
  misc_RNA (1)...(19): siRNA sense strand
gaaauagaacuucgaauga

SEQ ID NO: 1421195 - RNA, 19 nt, Homo sapiens
  misc_RNA (1)...(19): siRNA sense strand
gcaaugauguggucuuguu

SEQ ID NO: 1421196 - RNA, 19 nt, Homo sapiens
  misc_RNA (1)...(19): siRNA sense strand
gaccauauccuuaaaugua

SEQ ID NO: 1421197 - RNA, 19 nt, Homo sapiens
  misc_RNA (1)...(19): siRNA sense strand
gcaaugggaugcagcuauu

SEQ ID NO: 1421198 - RNA, 19 nt, Homo sapiens
  misc_RNA (1)...(19): siRNA sense strand
cagcuuaucuugcaaguga

SEQ ID NO: 1421199 - RNA, 19 nt, Homo sapiens
  misc_RNA (1)...(19): siRNA sense strand
gaaguuaggcgauuagaga

SEQ ID NO: 1421200 - RNA, 19 nt, Homo sapiens
  misc_RNA (1)...(19): siRNA sense strand
gacaaaggcauucaucaua

SEQ ID NO: 1421201 - RNA, 19 nt, Homo sapiens
  misc_RNA (1)...(19): siRNA sense strand
gauccaagcuugauuaagg

SEQ ID NO: 1421202 - RNA, 19 nt, Homo sapiens
  misc_RNA (1)...(19): siRNA sense strand
ggaagaaaguauuaaacga

SEQ ID NO: 1421203 - RNA, 19 nt, Homo sapiens
  misc_RNA (1)...(19): siRNA sense strand
aaacagcucuaaaccauug

SEQ ID NO: 1421204 - RNA, 19 nt, Homo sapiens
  misc_RNA (1)...(19): siRNA sense strand
ugacauguauucugaaguu

SEQ ID NO: 1421205 - RNA, 19 nt, Homo sapiens
  misc_RNA (1)...(19): siRNA sense strand
gaagaccucaagaaaguua

SEQ ID NO: 1421206 - RNA, 19 nt, Homo sapiens
  misc_RNA (1)...(19): siRNA sense strand
gcugaacgcaguauuguua

SEQ ID NO: 1421207 - RNA, 19 nt, Homo sapiens
  misc_RNA (1)...(19): siRNA sense strand
gauggugcuuguugacuua

SEQ ID NO: 1421208 - RNA, 19 nt, Homo sapiens
  misc_RNA (1)...(19): siRNA sense strand
ggacauccuuucagcaguu

SEQ ID NO: 1421209 - RNA, 19 nt, Homo sapiens
  misc_RNA (1)...(19): siRNA sense strand
gaaacacagcucuggaaua

SEQ ID NO: 1421210 - RNA, 19 nt, Homo sapiens
  misc_RNA (1)...(19): siRNA sense strand
ggaaauccuucaacaaucu

SEQ ID NO: 1421211 - RNA, 19 nt, Homo sapiens
  misc_RNA (1)...(19): siRNA sense strand
gcagauaauugaaggaaag

SEQ ID NO: 1421212 - RNA, 19 nt, Homo sapiens
  misc_RNA (1)...(19): siRNA sense strand
ugaaagcauugaagcuaua

SEQ ID NO: 1421213 - RNA, 19 nt, Homo sapiens
  misc_RNA (1)...(19): siRNA sense strand
ggaaagagcaugaugacau

SEQ ID NO: 1421214 - RNA, 19 nt, Homo sapiens
  misc_RNA (1)...(19): siRNA sense strand
ucacgaagcauuuaucauu

SEQ ID NO: 1421215 - RNA, 19 nt, Homo sapiens
  misc_RNA (1)...(19): siRNA sense strand
gcaguucucuucucugaca

SEQ ID NO: 1421216 - RNA, 19 nt, Homo sapiens
  misc_RNA (1)...(19): siRNA sense strand
uuaaagagguauuggaaga

SEQ ID NO: 1421217 - RNA, 19 nt, Homo sapiens
  misc_RNA (1)...(19): siRNA sense strand
aaacugaaauucucuccaa

SEQ ID NO: 1421218 - RNA, 19 nt, Homo sapiens
  misc_RNA (1)...(19): siRNA sense strand
ggcaacaacuuacaaauac

SEQ ID NO: 1421219 - RNA, 19 nt, Homo sapiens
  misc_RNA (1)...(19): siRNA sense strand
gaagaccgauccauaucug

SEQ ID NO: 1421220 - RNA, 19 nt, Homo sapiens
  misc_RNA (1)...(19): siRNA sense strand
ugaccggaaugaacuauuu

SEQ ID NO: 1421221 - RNA, 19 nt, Homo sapiens
  misc_RNA (1)...(19): siRNA sense strand
caaugaaagcuuuagguua

SEQ ID NO: 1421222 - RNA, 19 nt, Homo sapiens
  misc_RNA (1)...(19): siRNA sense strand
ggaccuuagugaauauaaa

SEQ ID NO: 1421223 - RNA, 19 nt, Homo sapiens
  misc_RNA (1)...(19): siRNA sense strand
ggaaauugaugaguauauc

SEQ ID NO: 1421224 - RNA, 19 nt, Homo sapiens
  misc_RNA (1)...(19): siRNA sense strand
cggaagaccucaagaaagu

SEQ ID NO: 1421225 - RNA, 19 nt, Homo sapiens
  misc_RNA (1)...(19): siRNA sense strand
gcaucaaguuuauagaaga

SEQ ID NO: 1421226 - RNA, 19 nt, Homo sapiens
  misc_RNA (1)...(19): siRNA sense strand
gcacccagcuuaucuugca

SEQ ID NO: 1421227 - RNA, 19 nt, Homo sapiens
  misc_RNA (1)...(19): siRNA sense strand
ggaagaaucggacccaaga

SEQ ID NO: 1421228 - RNA, 19 nt, Homo sapiens
  misc_RNA (1)...(19): siRNA sense strand
ugaaauccuugaugaaguu

SEQ ID NO: 1421229 - RNA, 19 nt, Homo sapiens
  misc_RNA (1)...(19): siRNA sense strand
gcugauaguuucaaagcaa

SEQ ID NO: 1421230 - RNA, 19 nt, Homo sapiens
  misc_RNA (1)...(19): siRNA sense strand
gagaccauauccuuaaaug

SEQ ID NO: 1421231 - RNA, 19 nt, Homo sapiens
  misc_RNA (1)...(19): siRNA sense strand
uaaagaggccguuaaggaa

SEQ ID NO: 1421232 - RNA, 19 nt, Homo sapiens
  misc_RNA (1)...(19): siRNA sense strand
guagauccaagcuugauua

SEQ ID NO: 1421233 - RNA, 19 nt, Homo sapiens
  misc_RNA (1)...(19): siRNA sense strand
uggagaagauguugaaaug

SEQ ID NO: 1421234 - RNA, 19 nt, Homo sapiens
  misc_RNA (1)...(19): siRNA sense strand
cagcaguucucuucucuga

SEQ ID NO: 1421235 - RNA, 19 nt, Homo sapiens
  misc_RNA (1)...(19): siRNA sense strand
gaugacacguucuccaguu

SEQ ID NO: 1421236 - RNA, 19 nt, Homo sapiens
  misc_RNA (1)...(19): siRNA sense strand
caaaggcauucaucauaga

SEQ ID NO: 1421237 - RNA, 19 nt, Homo sapiens
  misc_RNA (1)...(19): siRNA sense strand
gauaugauaccggaccuua

SEQ ID NO: 1421238 - RNA, 19 nt, Homo sapiens
  misc_RNA (1)...(19): siRNA sense strand
gggaugcagcuauuuauuu

SEQ ID NO: 1421239 - RNA, 19 nt, Homo sapiens
  misc_RNA (1)...(19): siRNA sense strand
ccaagugacuacaagaaau

SEQ ID NO: 1421240 - RNA, 19 nt, Homo sapiens
  misc_RNA (1)...(19): siRNA sense strand
ugauugacauguauucuga

SEQ ID NO: 1421241 - RNA, 19 nt, Homo sapiens
  misc_RNA (1)...(19): siRNA sense strand
uaauaaagcaguagagguu

SEQ ID NO: 1421242 - RNA, 19 nt, Homo sapiens
  misc_RNA (1)...(19): siRNA sense strand
cauugaagcuauaagagaa

SEQ ID NO: 1421243 - RNA, 19 nt, Homo sapiens
  misc_RNA (1)...(19): siRNA sense strand
ggauucagcagauaauuga

SEQ ID NO: 1421244 - RNA, 19 nt, Homo sapiens
  misc_RNA (1)...(19): siRNA sense strand
aaacuucgcuaucucauac

SEQ ID NO: 1421245 - RNA, 19 nt, Homo sapiens
  misc_RNA (1)...(19): siRNA sense strand
acaaugaaaccaagaauga

SEQ ID NO: 1421246 - RNA, 19 nt, Homo sapiens
  misc_RNA (1)...(19): siRNA sense strand
caaauggacccucauggaa

SEQ ID NO: 1421247 - RNA, 19 nt, Homo sapiens
  misc_RNA (1)...(19): siRNA sense strand
ugaaauagaacuucgaaug

SEQ ID NO: 1421248 - RNA, 19 nt, Homo sapiens
  misc_RNA (1)...(19): siRNA sense strand
uaccggaccuuagugaaua

SEQ ID NO: 1421249 - RNA, 19 nt, Homo sapiens
  misc_RNA (1)...(19): siRNA sense strand
gggaacagcucugaaagca

SEQ ID NO: 1421250 - RNA, 19 nt, Homo sapiens
  misc_RNA (1)...(19): siRNA sense strand
ugacaaaccuuccuuuacg

SEQ ID NO: 1421251 - RNA, 19 nt, Homo sapiens
  misc_RNA (1)...(19): siRNA sense strand
gaacaacaggcugauaguu

SEQ ID NO: 1421252 - RNA, 19 nt, Homo sapiens
  misc_RNA (1)...(19): siRNA sense strand
gauguucucucugauuaug

SEQ ID NO: 1421253 - RNA, 19 nt, Homo sapiens
  misc_RNA (1)...(19): siRNA sense strand
gcauuuaucauucacauca

SEQ ID NO: 1421254 - RNA, 19 nt, Homo sapiens
  misc_RNA (1)...(19): siRNA sense strand
ggaugcagcuauuuauuuu

SEQ ID NO: 1421255 - RNA, 19 nt, Homo sapiens
  misc_RNA (1)...(19): siRNA sense strand
gaacuugaccggaaugaac

SEQ ID NO: 1421256 - RNA, 19 nt, Homo sapiens
  misc_RNA (1)...(19): siRNA sense strand
ggauggugcuuguugacuu

SEQ ID NO: 1421257 - RNA, 19 nt, Homo sapiens
  misc_RNA (1)...(19): siRNA sense strand
acaaaggcauucaucauag

SEQ ID NO: 1421258 - RNA, 19 nt, Homo sapiens
  misc_RNA (1)...(19): siRNA sense strand
acacucaguugaaguauca

SEQ ID NO: 1421259 - RNA, 19 nt, Homo sapiens
  misc_RNA (1)...(19): siRNA sense strand
gaaagugacaagcauuuua

SEQ ID NO: 1421260 - RNA, 19 nt, Homo sapiens
  misc_RNA (1)...(19): siRNA sense strand
gacauugugugggaaauug

SEQ ID NO: 1421261 - RNA, 19 nt, Homo sapiens
  misc_RNA (1)...(19): siRNA sense strand
ggaaguuuaccacuacaaa

SEQ ID NO: 1421262 - RNA, 19 nt, Homo sapiens
  misc_RNA (1)...(19): siRNA sense strand
gcucgaauauucccaagag

SEQ ID NO: 1421263 - RNA, 19 nt, Homo sapiens
  misc_RNA (1)...(19): siRNA sense strand
gaaagaugacaaaggcauu

SEQ ID NO: 1421264 - RNA, 19 nt, Homo sapiens
  misc_RNA (1)...(19): siRNA sense strand
uugauguucucucugauua

SEQ ID NO: 1421265 - RNA, 19 nt, Homo sapiens
  misc_RNA (1)...(19): siRNA sense strand
aaagagguauuggaagauu

SEQ ID NO: 1421266 - RNA, 19 nt, Homo sapiens
  misc_RNA (1)...(19): siRNA sense strand
gggagacccuacaagaaga

SEQ ID NO: 1421267 - RNA, 19 nt, Homo sapiens
  misc_RNA (1)...(19): siRNA sense strand
gaauccuaaugccaucaua

SEQ ID NO: 1421268 - RNA, 19 nt, Homo sapiens
  misc_RNA (1)...(19): siRNA sense strand
agaagaucuugcagcauua

SEQ ID NO: 1421269 - RNA, 19 nt, Homo sapiens
  misc_RNA (1)...(19): siRNA sense strand
caucauagaaagcuuaaga

SEQ ID NO: 1421270 - RNA, 19 nt, Homo sapiens
  misc_RNA (1)...(19): siRNA sense strand
gaagaauuuucccgcuuua

SEQ ID NO: 1421271 - RNA, 19 nt, Homo sapiens
  misc_RNA (1)...(19): siRNA sense strand
caguggauaucaagcuuaa

SEQ ID NO: 1421272 - RNA, 19 nt, Homo sapiens
  misc_RNA (1)...(19): siRNA sense strand
gcauugaagcuauaagaga

SEQ ID NO: 1421273 - RNA, 19 nt, Homo sapiens
  misc_RNA (1)...(19): siRNA sense strand
gaaagcucuucccaaugaa

SEQ ID NO: 1421274 - RNA, 19 nt, Homo sapiens
  misc_RNA (1)...(19): siRNA sense strand
ugacuuaccaggugugauu

SEQ ID NO: 1421275 - RNA, 19 nt, Homo sapiens
  misc_RNA (1)...(19): siRNA sense strand
ggaaaugauugcccaagcu

SEQ ID NO: 1421276 - RNA, 19 nt, Homo sapiens
  misc_RNA (1)...(19): siRNA sense strand
acacagcucuggaauaaaa

SEQ ID NO: 1421277 - RNA, 19 nt, Homo sapiens
  misc_RNA (1)...(19): siRNA sense strand
ugugggaaauugaugagua

SEQ ID NO: 1421278 - RNA, 19 nt, Homo sapiens
  misc_RNA (1)...(19): siRNA sense strand
cuaaaccauuguaaccuuu

SEQ ID NO: 1421279 - RNA, 19 nt, Homo sapiens
  misc_RNA (1)...(19): siRNA sense strand
agagcaugaugacauauuu

SEQ ID NO: 1421280 - RNA, 19 nt, Homo sapiens
  misc_RNA (1)...(19): siRNA sense strand
caacucaugugauugaaaa

SEQ ID NO: 1421281 - RNA, 19 nt, Homo sapiens
  misc_RNA (1)...(19): siRNA sense strand
caagugacuacaagaaauu

SEQ ID NO: 1421282 - RNA, 19 nt, Homo sapiens
  misc_RNA (1)...(19): siRNA sense strand
gcuaaaggcacaccaagug

SEQ ID NO: 1421283 - RNA, 19 nt, Homo sapiens
  misc_RNA (1)...(19): siRNA sense strand
gagaauaugaagaagaguu

SEQ ID NO: 1421284 - RNA, 19 nt, Homo sapiens
  misc_RNA (1)...(19): siRNA sense strand
gcaguauuguuacagacuu

SEQ ID NO: 1421285 - RNA, 19 nt, Homo sapiens
  misc_RNA (1)...(19): siRNA sense strand
uggaaagacuaguguguug

SEQ ID NO: 1421286 - RNA, 19 nt, Homo sapiens
  misc_RNA (1)...(19): siRNA sense strand
ggagaacaaagaauugaga

SEQ ID NO: 1421287 - RNA, 19 nt, Homo sapiens
  misc_RNA (1)...(19): siRNA sense strand
gaaagagcaugaugacaua

SEQ ID NO: 1421288 - RNA, 19 nt, Homo sapiens
  misc_RNA (1)...(19): siRNA sense strand
gaacagcucugaaagcauu

SEQ ID NO: 1421289 - RNA, 19 nt, Homo sapiens
  misc_RNA (1)...(19): siRNA sense strand
gagaagauguugaaaugua

SEQ ID NO: 1421290 - RNA, 19 nt, Homo sapiens
  misc_RNA (1)...(19): siRNA sense strand
gaggacagcuugaggguua

SEQ ID NO: 1421291 - RNA, 19 nt, Homo sapiens
  misc_RNA (1)...(19): siRNA sense strand
gaaacugaauggaagaaua

SEQ ID NO: 1421292 - RNA, 19 nt, Homo sapiens
  misc_RNA (1)...(19): siRNA sense strand
aaagaaggcuguaccguua

SEQ ID NO: 1421293 - RNA, 19 nt, Homo sapiens
  misc_RNA (1)...(19): siRNA sense strand
aaacacagcucuggaauaa

SEQ ID NO: 1421294 - RNA, 19 nt, Homo sapiens
  misc_RNA (1)...(19): siRNA sense strand
gaaauagaacuucgaauga

SEQ ID NO: 1421295 - RNA, 19 nt, Homo sapiens
  misc_RNA (1)...(19): siRNA sense strand
gcaaugauguggucuuguu

SEQ ID NO: 1421296 - RNA, 19 nt, Homo sapiens
  misc_RNA (1)...(19): siRNA sense strand
gaccauauccuuaaaugua

SEQ ID NO: 1421297 - RNA, 19 nt, Homo sapiens
  misc_RNA (1)...(19): siRNA sense strand
gcaaugggaugcagcuauu

SEQ ID NO: 1421298 - RNA, 19 nt, Homo sapiens
  misc_RNA (1)...(19): siRNA sense strand
cagcuuaucuugcaaguga

SEQ ID NO: 1421299 - RNA, 19 nt, Homo sapiens
  misc_RNA (1)...(19): siRNA sense strand
gaaguuaggcgauuagaga

SEQ ID NO: 1421300 - RNA, 19 nt, Homo sapiens
  misc_RNA (1)...(19): siRNA sense strand
gacaaaggcauucaucaua

SEQ ID NO: 1421301 - RNA, 19 nt, Homo sapiens
  misc_RNA (1)...(19): siRNA sense strand
gauccaagcuugauuaagg

SEQ ID NO: 1421302 - RNA, 19 nt, Homo sapiens
  misc_RNA (1)...(19): siRNA sense strand
ggaagaaaguauuaaacga

SEQ ID NO: 1421303 - RNA, 19 nt, Homo sapiens
  misc_RNA (1)...(19): siRNA sense strand
aaacagcucuaaaccauug

SEQ ID NO: 1421304 - RNA, 19 nt, Homo sapiens
  misc_RNA (1)...(19): siRNA sense strand
ugacauguauucugaaguu

SEQ ID NO: 1421305 - RNA, 19 nt, Homo sapiens
  misc_RNA (1)...(19): siRNA sense strand
gaagaccucaagaaaguua

SEQ ID NO: 1421306 - RNA, 19 nt, Homo sapiens
  misc_RNA (1)...(19): siRNA sense strand
gcugaacgcaguauuguua

SEQ ID NO: 1421307 - RNA, 19 nt, Homo sapiens
  misc_RNA (1)...(19): siRNA sense strand
gauggugcuuguugacuua

SEQ ID NO: 1421308 - RNA, 19 nt, Homo sapiens
  misc_RNA (1)...(19): siRNA sense strand
ggacauccuuucagcaguu

SEQ ID NO: 1421309 - RNA, 19 nt, Homo sapiens
  misc_RNA (1)...(19): siRNA sense strand
gaaacacagcucuggaaua

SEQ ID NO: 1421310 - RNA, 19 nt, Homo sapiens
  misc_RNA (1)...(19): siRNA sense strand
ggaaauccuucaacaaucu

SEQ ID NO: 1421311 - RNA, 19 nt, Homo sapiens
  misc_RNA (1)...(19): siRNA sense strand
gcagauaauugaaggaaag

SEQ ID NO: 1421312 - RNA, 19 nt, Homo sapiens
  misc_RNA (1)...(19): siRNA sense strand
ugaaagcauugaagcuaua

SEQ ID NO: 1421313 - RNA, 19 nt, Homo sapiens
  misc_RNA (1)...(19): siRNA sense strand
ggaaagagcaugaugacau

SEQ ID NO: 1421314 - RNA, 19 nt, Homo sapiens
  misc_RNA (1)...(19): siRNA sense strand
ucacgaagcauuuaucauu

SEQ ID NO: 1421315 - RNA, 19 nt, Homo sapiens
  misc_RNA (1)...(19): siRNA sense strand
gcaguucucuucucugaca

SEQ ID NO: 1421316 - RNA, 19 nt, Homo sapiens
  misc_RNA (1)...(19): siRNA sense strand
uuaaagagguauuggaaga

SEQ ID NO: 1421317 - RNA, 19 nt, Homo sapiens
  misc_RNA (1)...(19): siRNA sense strand
aaacugaaauucucuccaa

SEQ ID NO: 1421318 - RNA, 19 nt, Homo sapiens
  misc_RNA (1)...(19): siRNA sense strand
ggcaacaacuuacaaauac

SEQ ID NO: 1421319 - RNA, 19 nt, Homo sapiens
  misc_RNA (1)...(19): siRNA sense strand
gaagaccgauccauaucug

SEQ ID NO: 1421320 - RNA, 19 nt, Homo sapiens
  misc_RNA (1)...(19): siRNA sense strand
ugaccggaaugaacuauuu

SEQ ID NO: 1421321 - RNA, 19 nt, Homo sapiens
  misc_RNA (1)...(19): siRNA sense strand
caaugaaagcuuuagguua

SEQ ID NO: 1421322 - RNA, 19 nt, Homo sapiens
  misc_RNA (1)...(19): siRNA sense strand
ggaccuuagugaauauaaa

SEQ ID NO: 1421323 - RNA, 19 nt, Homo sapiens
  misc_RNA (1)...(19): siRNA sense strand
ggaaauugaugaguauauc

SEQ ID NO: 1421324 - RNA, 19 nt, Homo sapiens
  misc_RNA (1)...(19): siRNA sense strand
cggaagaccucaagaaagu

SEQ ID NO: 1421325 - RNA, 19 nt, Homo sapiens
  misc_RNA (1)...(19): siRNA sense strand
gcaucaaguuuauagaaga

SEQ ID NO: 1421326 - RNA, 19 nt, Homo sapiens
  misc_RNA (1)...(19): siRNA sense strand
gcacccagcuuaucuugca

SEQ ID NO: 1421327 - RNA, 19 nt, Homo sapiens
  misc_RNA (1)...(19): siRNA sense strand
ggaagaaucggacccaaga

SEQ ID NO: 1421328 - RNA, 19 nt, Homo sapiens
  misc_RNA (1)...(19): siRNA sense strand
ugaaauccuugaugaaguu

SEQ ID NO: 1421329 - RNA, 19 nt, Homo sapiens
  misc_RNA (1)...(19): siRNA sense strand
gcugauaguuucaaagcaa

SEQ ID NO: 1421330 - RNA, 19 nt, Homo sapiens
  misc_RNA (1)...(19): siRNA sense strand
gagaccauauccuuaaaug

SEQ ID NO: 1421331 - RNA, 19 nt, Homo sapiens
  misc_RNA (1)...(19): siRNA sense strand
uaaagaggccguuaaggaa

SEQ ID NO: 1421332 - RNA, 19 nt, Homo sapiens
  misc_RNA (1)...(19): siRNA sense strand
guagauccaagcuugauua

SEQ ID NO: 1421333 - RNA, 19 nt, Homo sapiens
  misc_RNA (1)...(19): siRNA sense strand
uggagaagauguugaaaug

SEQ ID NO: 1421334 - RNA, 19 nt, Homo sapiens
  misc_RNA (1)...(19): siRNA sense strand
cagcaguucucuucucuga

SEQ ID NO: 1421335 - RNA, 19 nt, Homo sapiens
  misc_RNA (1)...(19): siRNA sense strand
gaugacacguucuccaguu

SEQ ID NO: 1421336 - RNA, 19 nt, Homo sapiens
  misc_RNA (1)...(19): siRNA sense strand
caaaggcauucaucauaga

SEQ ID NO: 1421337 - RNA, 19 nt, Homo sapiens
  misc_RNA (1)...(19): siRNA sense strand
gauaugauaccggaccuua

SEQ ID NO: 1421338 - RNA, 19 nt, Homo sapiens
  misc_RNA (1)...(19): siRNA sense strand
gggaugcagcuauuuauuu

SEQ ID NO: 1421339 - RNA, 19 nt, Homo sapiens
  misc_RNA (1)...(19): siRNA sense strand
ccaagugacuacaagaaau

SEQ ID NO: 1421340 - RNA, 19 nt, Homo sapiens
  misc_RNA (1)...(19): siRNA sense strand
ugauugacauguauucuga

SEQ ID NO: 1421341 - RNA, 19 nt, Homo sapiens
  misc_RNA (1)...(19): siRNA sense strand
uaauaaagcaguagagguu

SEQ ID NO: 1421342 - RNA, 19 nt, Homo sapiens
  misc_RNA (1)...(19): siRNA sense strand
cauugaagcuauaagagaa

SEQ ID NO: 1421343 - RNA, 19 nt, Homo sapiens
  misc_RNA (1)...(19): siRNA sense strand
ggauucagcagauaauuga

SEQ ID NO: 1421344 - RNA, 19 nt, Homo sapiens
  misc_RNA (1)...(19): siRNA sense strand
aaacuucgcuaucucauac

SEQ ID NO: 1421345 - RNA, 19 nt, Homo sapiens
  misc_RNA (1)...(19): siRNA sense strand
acaaugaaaccaagaauga

SEQ ID NO: 1421346 - RNA, 19 nt, Homo sapiens
  misc_RNA (1)...(19): siRNA sense strand
caaauggacccucauggaa

SEQ ID NO: 1421347 - RNA, 19 nt, Homo sapiens
  misc_RNA (1)...(19): siRNA sense strand
ugaaauagaacuucgaaug

SEQ ID NO: 1421348 - RNA, 19 nt, Homo sapiens
  misc_RNA (1)...(19): siRNA sense strand
uaccggaccuuagugaaua

SEQ ID NO: 1421349 - RNA, 19 nt, Homo sapiens
  misc_RNA (1)...(19): siRNA sense strand
gggaacagcucugaaagca

SEQ ID NO: 1421350 - RNA, 19 nt, Homo sapiens
  misc_RNA (1)...(19): siRNA sense strand
ugacaaaccuuccuuuacg

SEQ ID NO: 1421351 - RNA, 19 nt, Homo sapiens
  misc_RNA (1)...(19): siRNA sense strand
gaacaacaggcugauaguu

SEQ ID NO: 1421352 - RNA, 19 nt, Homo sapiens
  misc_RNA (1)...(19): siRNA sense strand
gauguucucucugauuaug

SEQ ID NO: 1421353 - RNA, 19 nt, Homo sapiens
  misc_RNA (1)...(19): siRNA sense strand
gcauuuaucauucacauca

SEQ ID NO: 1421354 - RNA, 19 nt, Homo sapiens
  misc_RNA (1)...(19): siRNA sense strand
ggaugcagcuauuuauuuu

SEQ ID NO: 1421355 - RNA, 19 nt, Homo sapiens
  misc_RNA (1)...(19): siRNA sense strand
gaacuugaccggaaugaac

SEQ ID NO: 1421356 - RNA, 19 nt, Homo sapiens
  misc_RNA (1)...(19): siRNA sense strand
ggauggugcuuguugacuu

SEQ ID NO: 1421357 - RNA, 19 nt, Homo sapiens
  misc_RNA (1)...(19): siRNA sense strand
acaaaggcauucaucauag

SEQ ID NO: 1421358 - RNA, 19 nt, Homo sapiens
  misc_RNA (1)...(19): siRNA sense strand
acacucaguugaaguauca

SEQ ID NO: 1421359 - RNA, 19 nt, Homo sapiens
  misc_RNA (1)...(19): siRNA sense strand
gaaagugacaagcauuuua

SEQ ID NO: 1421360 - RNA, 19 nt, Homo sapiens
  misc_RNA (1)...(19): siRNA sense strand
gacauugugugggaaauug

SEQ ID NO: 1421361 - RNA, 19 nt, Homo sapiens
  misc_RNA (1)...(19): siRNA sense strand
ggaaguuuaccacuacaaa

SEQ ID NO: 1421362 - RNA, 19 nt, Homo sapiens
  misc_RNA (1)...(19): siRNA sense strand
gcucgaauauucccaagag

SEQ ID NO: 1421363 - RNA, 19 nt, Homo sapiens
  misc_RNA (1)...(19): siRNA sense strand
gaaagaugacaaaggcauu

SEQ ID NO: 1421364 - RNA, 19 nt, Homo sapiens
  misc_RNA (1)...(19): siRNA sense strand
uugauguucucucugauua

SEQ ID NO: 1421365 - RNA, 19 nt, Homo sapiens
  misc_RNA (1)...(19): siRNA sense strand
aaagagguauuggaagauu

SEQ ID NO: 1421366 - RNA, 19 nt, Homo sapiens
  misc_RNA (1)...(19): siRNA sense strand
gggagacccuacaagaaga

SEQ ID NO: 1421367 - RNA, 19 nt, Homo sapiens
  misc_RNA (1)...(19): siRNA sense strand
gaauccuaaugccaucaua

SEQ ID NO: 1421368 - RNA, 19 nt, Homo sapiens
  misc_RNA (1)...(19): siRNA sense strand
agaagaucuugcagcauua

SEQ ID NO: 1421369 - RNA, 19 nt, Homo sapiens
  misc_RNA (1)...(19): siRNA sense strand
caucauagaaagcuuaaga

SEQ ID NO: 1421370 - RNA, 19 nt, Homo sapiens
  misc_RNA (1)...(19): siRNA sense strand
gaagaauuuucccgcuuua

SEQ ID NO: 1421371 - RNA, 19 nt, Homo sapiens
  misc_RNA (1)...(19): siRNA sense strand
caguggauaucaagcuuaa

SEQ ID NO: 1421372 - RNA, 19 nt, Homo sapiens
  misc_RNA (1)...(19): siRNA sense strand
gcauugaagcuauaagaga

SEQ ID NO: 1421373 - RNA, 19 nt, Homo sapiens
  misc_RNA (1)...(19): siRNA sense strand
gaaagcucuucccaaugaa

SEQ ID NO: 1421374 - RNA, 19 nt, Homo sapiens
  misc_RNA (1)...(19): siRNA sense strand
ugacuuaccaggugugauu

SEQ ID NO: 1421375 - RNA, 19 nt, Homo sapiens
  misc_RNA (1)...(19): siRNA sense strand
ggaaaugauugcccaagcu

SEQ ID NO: 1421376 - RNA, 19 nt, Homo sapiens
  misc_RNA (1)...(19): siRNA sense strand
acacagcucuggaauaaaa

SEQ ID NO: 1421377 - RNA, 19 nt, Homo sapiens
  misc_RNA (1)...(19): siRNA sense strand
ugugggaaauugaugagua

SEQ ID NO: 1421378 - RNA, 19 nt, Homo sapiens
  misc_RNA (1)...(19): siRNA sense strand
cuaaaccauuguaaccuuu

SEQ ID NO: 1421379 - RNA, 19 nt, Homo sapiens
  misc_RNA (1)...(19): siRNA sense strand
agagcaugaugacauauuu

SEQ ID NO: 1421380 - RNA, 19 nt, Homo sapiens
  misc_RNA (1)...(19): siRNA sense strand
caacucaugugauugaaaa

SEQ ID NO: 1421381 - RNA, 19 nt, Homo sapiens
  misc_RNA (1)...(19): siRNA sense strand
caagugacuacaagaaauu

SEQ ID NO: 1421382 - RNA, 19 nt, Homo sapiens
  misc_RNA (1)...(19): siRNA sense strand
gcuaaaggcacaccaagug

SEQ ID NO: 1421383 - RNA, 19 nt, Homo sapiens
  misc_RNA (1)...(19): siRNA sense strand
gagaauaugaagaagaguu

SEQ ID NO: 1421384 - RNA, 19 nt, Homo sapiens
  misc_RNA (1)...(19): siRNA sense strand
gcaguauuguuacagacuu

SEQ ID NO: 1421385 - RNA, 19 nt, Homo sapiens
  misc_RNA (1)...(19): siRNA sense strand
uggaaagacuaguguguug

SEQ ID NO: 1421386 - RNA, 19 nt, Homo sapiens
  misc_RNA (1)...(19): siRNA sense strand
ggagaacaaagaauugaga

SEQ ID NO: 1421387 - RNA, 19 nt, Homo sapiens
  misc_RNA (1)...(19): siRNA sense strand
gaaagagcaugaugacaua

SEQ ID NO: 1421388 - RNA, 19 nt, Homo sapiens
  misc_RNA (1)...(19): siRNA sense strand
gaacagcucugaaagcauu

SEQ ID NO: 1421389 - RNA, 19 nt, Homo sapiens
  misc_RNA (1)...(19): siRNA sense strand
gagaagauguugaaaugua

SEQ ID NO: 1421390 - RNA, 19 nt, Homo sapiens
  misc_RNA (1)...(19): siRNA sense strand
gaggacagcuugaggguua

SEQ ID NO: 1421391 - RNA, 19 nt, Homo sapiens
  misc_RNA (1)...(19): siRNA sense strand
gaaacugaauggaagaaua

SEQ ID NO: 1421392 - RNA, 19 nt, Homo sapiens
  misc_RNA (1)...(19): siRNA sense strand
aaagaaggcuguaccguua

SEQ ID NO: 1421393 - RNA, 19 nt, Homo sapiens
  misc_RNA (1)...(19): siRNA sense strand
aaacacagcucuggaauaa

SEQ ID NO: 1421394 - RNA, 19 nt, Homo sapiens
  misc_RNA (1)...(19): siRNA sense strand
gaaauagaacuucgaauga

SEQ ID NO: 1421395 - RNA, 19 nt, Homo sapiens
  misc_RNA (1)...(19): siRNA sense strand
gcaaugauguggucuuguu

SEQ ID NO: 1421396 - RNA, 19 nt, Homo sapiens
  misc_RNA (1)...(19): siRNA sense strand
gaccauauccuuaaaugua

SEQ ID NO: 1421397 - RNA, 19 nt, Homo sapiens
  misc_RNA (1)...(19): siRNA sense strand
gcaaugggaugcagcuauu

SEQ ID NO: 1421398 - RNA, 19 nt, Homo sapiens
  misc_RNA (1)...(19): siRNA sense strand
cagcuuaucuugcaaguga

SEQ ID NO: 1421399 - RNA, 19 nt, Homo sapiens
  misc_RNA (1)...(19): siRNA sense strand
gaaguuaggcgauuagaga

SEQ ID NO: 1421400 - RNA, 19 nt, Homo sapiens
  misc_RNA (1)...(19): siRNA sense strand
gacaaaggcauucaucaua

SEQ ID NO: 1421401 - RNA, 19 nt, Homo sapiens
  misc_RNA (1)...(19): siRNA sense strand
gauccaagcuugauuaagg

SEQ ID NO: 1421402 - RNA, 19 nt, Homo sapiens
  misc_RNA (1)...(19): siRNA sense strand
ggaagaaaguauuaaacga

SEQ ID NO: 1421403 - RNA, 19 nt, Homo sapiens
  misc_RNA (1)...(19): siRNA sense strand
aaacagcucuaaaccauug

SEQ ID NO: 1421404 - RNA, 19 nt, Homo sapiens
  misc_RNA (1)...(19): siRNA sense strand
ugacauguauucugaaguu

SEQ ID NO: 1421405 - RNA, 19 nt, Homo sapiens
  misc_RNA (1)...(19): siRNA sense strand
gaagaccucaagaaaguua

SEQ ID NO: 1421406 - RNA, 19 nt, Homo sapiens
  misc_RNA (1)...(19): siRNA sense strand
gcugaacgcaguauuguua

SEQ ID NO: 1421407 - RNA, 19 nt, Homo sapiens
  misc_RNA (1)...(19): siRNA sense strand
gauggugcuuguugacuua

SEQ ID NO: 1421408 - RNA, 19 nt, Homo sapiens
  misc_RNA (1)...(19): siRNA sense strand
ggacauccuuucagcaguu

SEQ ID NO: 1421409 - RNA, 19 nt, Homo sapiens
  misc_RNA (1)...(19): siRNA sense strand
gaaacacagcucuggaaua

SEQ ID NO: 1421410 - RNA, 19 nt, Homo sapiens
  misc_RNA (1)...(19): siRNA sense strand
ggaaauccuucaacaaucu

SEQ ID NO: 1421411 - RNA, 19 nt, Homo sapiens
  misc_RNA (1)...(19): siRNA sense strand
gcagauaauugaaggaaag

SEQ ID NO: 1421412 - RNA, 19 nt, Homo sapiens
  misc_RNA (1)...(19): siRNA sense strand
ugaaagcauugaagcuaua

SEQ ID NO: 1421413 - RNA, 19 nt, Homo sapiens
  misc_RNA (1)...(19): siRNA sense strand
ggaaagagcaugaugacau

SEQ ID NO: 1421414 - RNA, 19 nt, Homo sapiens
  misc_RNA (1)...(19): siRNA sense strand
ucacgaagcauuuaucauu

SEQ ID NO: 1421415 - RNA, 19 nt, Homo sapiens
  misc_RNA (1)...(19): siRNA sense strand
gcaguucucuucucugaca

SEQ ID NO: 1421416 - RNA, 19 nt, Homo sapiens
  misc_RNA (1)...(19): siRNA sense strand
uuaaagagguauuggaaga

SEQ ID NO: 1421417 - RNA, 19 nt, Homo sapiens
  misc_RNA (1)...(19): siRNA sense strand
aaacugaaauucucuccaa

SEQ ID NO: 1421418 - RNA, 19 nt, Homo sapiens
  misc_RNA (1)...(19): siRNA sense strand
ggcaacaacuuacaaauac

SEQ ID NO: 1421419 - RNA, 19 nt, Homo sapiens
  misc_RNA (1)...(19): siRNA sense strand
gaagaccgauccauaucug

SEQ ID NO: 1421420 - RNA, 19 nt, Homo sapiens
  misc_RNA (1)...(19): siRNA sense strand
ugaccggaaugaacuauuu

SEQ ID NO: 1421421 - RNA, 19 nt, Homo sapiens
  misc_RNA (1)...(19): siRNA sense strand
caaugaaagcuuuagguua

SEQ ID NO: 1421422 - RNA, 19 nt, Homo sapiens
  misc_RNA (1)...(19): siRNA sense strand
ggaccuuagugaauauaaa

SEQ ID NO: 1421423 - RNA, 19 nt, Homo sapiens
  misc_RNA (1)...(19): siRNA sense strand
ggaaauugaugaguauauc

SEQ ID NO: 1421424 - RNA, 19 nt, Homo sapiens
  misc_RNA (1)...(19): siRNA sense strand
cggaagaccucaagaaagu

SEQ ID NO: 1421425 - RNA, 19 nt, Homo sapiens
  misc_RNA (1)...(19): siRNA sense strand
gcaucaaguuuauagaaga

SEQ ID NO: 1421426 - RNA, 19 nt, Homo sapiens
  misc_RNA (1)...(19): siRNA sense strand
gcacccagcuuaucuugca

SEQ ID NO: 1421427 - RNA, 19 nt, Homo sapiens
  misc_RNA (1)...(19): siRNA sense strand
ggaagaaucggacccaaga

SEQ ID NO: 1421428 - RNA, 19 nt, Homo sapiens
  misc_RNA (1)...(19): siRNA sense strand
ugaaauccuugaugaaguu

SEQ ID NO: 1421429 - RNA, 19 nt, Homo sapiens
  misc_RNA (1)...(19): siRNA sense strand
gcugauaguuucaaagcaa

SEQ ID NO: 1421430 - RNA, 19 nt, Homo sapiens
  misc_RNA (1)...(19): siRNA sense strand
gagaccauauccuuaaaug

SEQ ID NO: 1421431 - RNA, 19 nt, Homo sapiens
  misc_RNA (1)...(19): siRNA sense strand
uaaagaggccguuaaggaa

SEQ ID NO: 1421432 - RNA, 19 nt, Homo sapiens
  misc_RNA (1)...(19): siRNA sense strand
guagauccaagcuugauua

SEQ ID NO: 1421433 - RNA, 19 nt, Homo sapiens
  misc_RNA (1)...(19): siRNA sense strand
uggagaagauguugaaaug

SEQ ID NO: 1421434 - RNA, 19 nt, Homo sapiens
  misc_RNA (1)...(19): siRNA sense strand
cagcaguucucuucucuga

SEQ ID NO: 1421435 - RNA, 19 nt, Homo sapiens
  misc_RNA (1)...(19): siRNA sense strand
gaugacacguucuccaguu

SEQ ID NO: 1421436 - RNA, 19 nt, Homo sapiens
  misc_RNA (1)...(19): siRNA sense strand
caaaggcauucaucauaga

SEQ ID NO: 1421437 - RNA, 19 nt, Homo sapiens
  misc_RNA (1)...(19): siRNA sense strand
gauaugauaccggaccuua

SEQ ID NO: 1421438 - RNA, 19 nt, Homo sapiens
  misc_RNA (1)...(19): siRNA sense strand
gggaugcagcuauuuauuu

SEQ ID NO: 1421439 - RNA, 19 nt, Homo sapiens
  misc_RNA (1)...(19): siRNA sense strand
ccaagugacuacaagaaau

SEQ ID NO: 1421440 - RNA, 19 nt, Homo sapiens
  misc_RNA (1)...(19): siRNA sense strand
ugauugacauguauucuga

SEQ ID NO: 1421441 - RNA, 19 nt, Homo sapiens
  misc_RNA (1)...(19): siRNA sense strand
uaauaaagcaguagagguu

SEQ ID NO: 1421442 - RNA, 19 nt, Homo sapiens
  misc_RNA (1)...(19): siRNA sense strand
cauugaagcuauaagagaa

SEQ ID NO: 1421443 - RNA, 19 nt, Homo sapiens
  misc_RNA (1)...(19): siRNA sense strand
ggauucagcagauaauuga

SEQ ID NO: 1421444 - RNA, 19 nt, Homo sapiens
  misc_RNA (1)...(19): siRNA sense strand
aaacuucgcuaucucauac

SEQ ID NO: 1421445 - RNA, 19 nt, Homo sapiens
  misc_RNA (1)...(19): siRNA sense strand
acaaugaaaccaagaauga

SEQ ID NO: 1421446 - RNA, 19 nt, Homo sapiens
  misc_RNA (1)...(19): siRNA sense strand
caaauggacccucauggaa

SEQ ID NO: 1421447 - RNA, 19 nt, Homo sapiens
  misc_RNA (1)...(19): siRNA sense strand
ugaaauagaacuucgaaug

SEQ ID NO: 1421448 - RNA, 19 nt, Homo sapiens
  misc_RNA (1)...(19): siRNA sense strand
uaccggaccuuagugaaua

SEQ ID NO: 1421449 - RNA, 19 nt, Homo sapiens
  misc_RNA (1)...(19): siRNA sense strand
gggaacagcucugaaagca

SEQ ID NO: 1421450 - RNA, 19 nt, Homo sapiens
  misc_RNA (1)...(19): siRNA sense strand
ugacaaaccuuccuuuacg

SEQ ID NO: 1421451 - RNA, 19 nt, Homo sapiens
  misc_RNA (1)...(19): siRNA sense strand
gaacaacaggcugauaguu

SEQ ID NO: 1421452 - RNA, 19 nt, Homo sapiens
  misc_RNA (1)...(19): siRNA sense strand
gauguucucucugauuaug

SEQ ID NO: 1421453 - RNA, 19 nt, Homo sapiens
  misc_RNA (1)...(19): siRNA sense strand
gcauuuaucauucacauca

SEQ ID NO: 1421454 - RNA, 19 nt, Homo sapiens
  misc_RNA (1)...(19): siRNA sense strand
ggaugcagcuauuuauuuu

SEQ ID NO: 1421455 - RNA, 19 nt, Homo sapiens
  misc_RNA (1)...(19): siRNA sense strand
gaacuugaccggaaugaac

SEQ ID NO: 1421456 - RNA, 19 nt, Homo sapiens
  misc_RNA (1)...(19): siRNA sense strand
ggauggugcuuguugacuu

SEQ ID NO: 1421457 - RNA, 19 nt, Homo sapiens
  misc_RNA (1)...(19): siRNA sense strand
acaaaggcauucaucauag

SEQ ID NO: 1421458 - RNA, 19 nt, Homo sapiens
  misc_RNA (1)...(19): siRNA sense strand
acacucaguugaaguauca

SEQ ID NO: 1421459 - RNA, 19 nt, Homo sapiens
  misc_RNA (1)...(19): siRNA sense strand
gaaagugacaagcauuuua

SEQ ID NO: 1421460 - RNA, 19 nt, Homo sapiens
  misc_RNA (1)...(19): siRNA sense strand
gacauugugugggaaauug

SEQ ID NO: 1421461 - RNA, 19 nt, Homo sapiens
  misc_RNA (1)...(19): siRNA sense strand
ggaaguuuaccacuacaaa

SEQ ID NO: 1421462 - RNA, 19 nt, Homo sapiens
  misc_RNA (1)...(19): siRNA sense strand
gcucgaauauucccaagag

SEQ ID NO: 1421463 - RNA, 19 nt, Homo sapiens
  misc_RNA (1)...(19): siRNA sense strand
gaaagaugacaaaggcauu

SEQ ID NO: 1421464 - RNA, 19 nt, Homo sapiens
  misc_RNA (1)...(19): siRNA sense strand
uugauguucucucugauua

SEQ ID NO: 1421465 - RNA, 19 nt, Homo sapiens
  misc_RNA (1)...(19): siRNA sense strand
aaagagguauuggaagauu

SEQ ID NO: 1421466 - RNA, 19 nt, Homo sapiens
  misc_RNA (1)...(19): siRNA sense strand
gggagacccuacaagaaga

SEQ ID NO: 1421467 - RNA, 19 nt, Homo sapiens
  misc_RNA (1)...(19): siRNA sense strand
gaauccuaaugccaucaua

SEQ ID NO: 1421468 - RNA, 19 nt, Homo sapiens
  misc_RNA (1)...(19): siRNA sense strand
agaagaucuugcagcauua

SEQ ID NO: 1421469 - RNA, 19 nt, Homo sapiens
  misc_RNA (1)...(19): siRNA sense strand
caucauagaaagcuuaaga

SEQ ID NO: 1421470 - RNA, 19 nt, Homo sapiens
  misc_RNA (1)...(19): siRNA sense strand
gaagaauuuucccgcuuua

SEQ ID NO: 1421471 - RNA, 19 nt, Homo sapiens
  misc_RNA (1)...(19): siRNA sense strand
caguggauaucaagcuuaa

SEQ ID NO: 1421472 - RNA, 19 nt, Homo sapiens
  misc_RNA (1)...(19): siRNA sense strand
gcauugaagcuauaagaga

SEQ ID NO: 1421473 - RNA, 19 nt, Homo sapiens
  misc_RNA (1)...(19): siRNA sense strand
gaaagcucuucccaaugaa

SEQ ID NO: 1421474 - RNA, 19 nt, Homo sapiens
  misc_RNA (1)...(19): siRNA sense strand
ugacuuaccaggugugauu

SEQ ID NO: 1421475 - RNA, 19 nt, Homo sapiens
  misc_RNA (1)...(19): siRNA sense strand
ggaaaugauugcccaagcu

SEQ ID NO: 1421476 - RNA, 19 nt, Homo sapiens
  misc_RNA (1)...(19): siRNA sense strand
acacagcucuggaauaaaa

SEQ ID NO: 1421477 - RNA, 19 nt, Homo sapiens
  misc_RNA (1)...(19): siRNA sense strand
ugugggaaauugaugagua

SEQ ID NO: 1421478 - RNA, 19 nt, Homo sapiens
  misc_RNA (1)...(19): siRNA sense strand
cuaaaccauuguaaccuuu

SEQ ID NO: 1421479 - RNA, 19 nt, Homo sapiens
  misc_RNA (1)...(19): siRNA sense strand
agagcaugaugacauauuu

SEQ ID NO: 1421480 - RNA, 19 nt, Homo sapiens
  misc_RNA (1)...(19): siRNA sense strand
caacucaugugauugaaaa

SEQ ID NO: 1421481 - RNA, 19 nt, Homo sapiens
  misc_RNA (1)...(19): siRNA sense strand
caagugacuacaagaaauu

SEQ ID NO: 1421482 - RNA, 19 nt, Homo sapiens
  misc_RNA (1)...(19): siRNA sense strand
gcuaaaggcacaccaagug

SEQ ID NO: 1421483 - RNA, 19 nt, Homo sapiens
  misc_RNA (1)...(19): siRNA sense strand
gagaauaugaagaagaguu

SEQ ID NO: 1421484 - RNA, 19 nt, Homo sapiens
  misc_RNA (1)...(19): siRNA sense strand
gcaguauuguuacagacuu

SEQ ID NO: 1421485 - RNA, 19 nt, Homo sapiens
  misc_RNA (1)...(19): siRNA sense strand
uggaaagacuaguguguug

SEQ ID NO: 1421486 - RNA, 19 nt, Homo sapiens
  misc_RNA (1)...(19): siRNA sense strand
ggagaacaaagaauugaga

SEQ ID NO: 1421487 - RNA, 19 nt, Homo sapiens
  misc_RNA (1)...(19): siRNA sense strand
ggaaagcauuugucaagag

SEQ ID NO: 1421488 - RNA, 19 nt, Homo sapiens
  misc_RNA (1)...(19): siRNA sense strand
agaagcgaaugauguauuu

SEQ ID NO: 1421489 - RNA, 19 nt, Homo sapiens
  misc_RNA (1)...(19): siRNA sense strand
caccaagaaugcagaguuu

SEQ ID NO: 1421490 - RNA, 19 nt, Homo sapiens
  misc_RNA (1)...(19): siRNA sense strand
ggaaagucccauaguaaga

SEQ ID NO: 1421491 - RNA, 19 nt, Homo sapiens
  misc_RNA (1)...(19): siRNA sense strand
agaacaagcucaucaugug

SEQ ID NO: 1421492 - RNA, 19 nt, Homo sapiens
  misc_RNA (1)...(19): siRNA sense strand
gaagaacaagcucaucaug

SEQ ID NO: 1421493 - RNA, 19 nt, Homo sapiens
  misc_RNA (1)...(19): siRNA sense strand
gaucuuccuucgaggcauu

SEQ ID NO: 1421494 - RNA, 19 nt, Homo sapiens
  misc_RNA (1)...(19): siRNA sense strand
gcacacguauugacuccau

SEQ ID NO: 1421495 - RNA, 19 nt, Homo sapiens
  misc_RNA (1)...(19): siRNA sense strand
gggcagugcugggcucauu

SEQ ID NO: 1421496 - RNA, 19 nt, Homo sapiens
  misc_RNA (1)...(19): siRNA sense strand
caagacagccggagaacau

SEQ ID NO: 1421497 - RNA, 19 nt, Homo sapiens
  misc_RNA (1)...(19): siRNA sense strand
gaaagucccauaguaagau

SEQ ID NO: 1421498 - RNA, 19 nt, Homo sapiens
  misc_RNA (1)...(19): siRNA sense strand
cggccgaguuugucccuua

SEQ ID NO: 1421499 - RNA, 19 nt, Homo sapiens
  misc_RNA (1)...(19): siRNA sense strand
ucaagauccugcccagcua

SEQ ID NO: 1421500 - RNA, 19 nt, Homo sapiens
  misc_RNA (1)...(19): siRNA sense strand
ggucaggguuacagcuuug

SEQ ID NO: 1421501 - RNA, 19 nt, Homo sapiens
  misc_RNA (1)...(19): siRNA sense strand
gcagugucauccucaagau

SEQ ID NO: 1421502 - RNA, 19 nt, Homo sapiens
  misc_RNA (1)...(19): siRNA sense strand
ccaagaaugcagaguuuga

SEQ ID NO: 1421503 - RNA, 19 nt, Homo sapiens
  misc_RNA (1)...(19): siRNA sense strand
ggagaagcggaaagcauuu

SEQ ID NO: 1421504 - RNA, 19 nt, Homo sapiens
  misc_RNA (1)...(19): siRNA sense strand
gcggaaagcauuugucaag

SEQ ID NO: 1421505 - RNA, 19 nt, Homo sapiens
  misc_RNA (1)...(19): siRNA sense strand
gcuacgaacggccgaguuu

SEQ ID NO: 1421506 - RNA, 19 nt, Homo sapiens
  misc_RNA (1)...(19): siRNA sense strand
ggagaacaucuggguguaa

SEQ ID NO: 1421507 - RNA, 19 nt, Homo sapiens
  misc_RNA (1)...(19): siRNA sense strand
ggaaaacccugguacugau

SEQ ID NO: 1421508 - RNA, 19 nt, Homo sapiens
  misc_RNA (1)...(19): siRNA sense strand
gagaacaucuggguguaac

SEQ ID NO: 1421509 - RNA, 19 nt, Homo sapiens
  misc_RNA (1)...(19): siRNA sense strand
gggcuacgggcacuacuuu

SEQ ID NO: 1421510 - RNA, 19 nt, Homo sapiens
  misc_RNA (1)...(19): siRNA sense strand
cugcagagcuggaccugau

SEQ ID NO: 1421511 - RNA, 19 nt, Homo sapiens
  misc_RNA (1)...(19): siRNA sense strand
gcuacgggcacuacuuuga

SEQ ID NO: 1421512 - RNA, 19 nt, Homo sapiens
  misc_RNA (1)...(19): siRNA sense strand
ggacuugcuccagaucgua

SEQ ID NO: 1421513 - RNA, 19 nt, Homo sapiens
  misc_RNA (1)...(19): siRNA sense strand
ccaccaagaaugcagaguu

SEQ ID NO: 1421514 - RNA, 19 nt, Homo sapiens
  misc_RNA (1)...(19): siRNA sense strand
cggaaagcauuugucaaga

SEQ ID NO: 1421515 - RNA, 19 nt, Homo sapiens
  misc_RNA (1)...(19): siRNA sense strand
gaagcuggaggccgugaga

SEQ ID NO: 1421516 - RNA, 19 nt, Homo sapiens
  misc_RNA (1)...(19): siRNA sense strand
uggagaagcuacggacaga

SEQ ID NO: 1421517 - RNA, 19 nt, Homo sapiens
  misc_RNA (1)...(19): siRNA sense strand
cggagaacaucugggugua

SEQ ID NO: 1421518 - RNA, 19 nt, Homo sapiens
  misc_RNA (1)...(19): siRNA sense strand
ugggugacaucaucaagga

SEQ ID NO: 1421519 - RNA, 19 nt, Homo sapiens
  misc_RNA (1)...(19): siRNA sense strand
aaaagaagcgaaugaugua

SEQ ID NO: 1421520 - RNA, 19 nt, Homo sapiens
  misc_RNA (1)...(19): siRNA sense strand
gaggagaagcggaaagcau

SEQ ID NO: 1421521 - RNA, 19 nt, Homo sapiens
  misc_RNA (1)...(19): siRNA sense strand
ugauguauuugaccaccaa

SEQ ID NO: 1421522 - RNA, 19 nt, Homo sapiens
  misc_RNA (1)...(19): siRNA sense strand
ggagcugacaccaaacuca

SEQ ID NO: 1421523 - RNA, 19 nt, Homo sapiens
  misc_RNA (1)...(19): siRNA sense strand
gagaagcggaaagcauuug

SEQ ID NO: 1421524 - RNA, 19 nt, Homo sapiens
  misc_RNA (1)...(19): siRNA sense strand
aagcgaaugauguauuuga

SEQ ID NO: 1421525 - RNA, 19 nt, Homo sapiens
  misc_RNA (1)...(19): siRNA sense strand
gaucguaaaccaggaugau

SEQ ID NO: 1421526 - RNA, 19 nt, Homo sapiens
  misc_RNA (1)...(19): siRNA sense strand
ggcgcagccugaagaacaa

SEQ ID NO: 1421527 - RNA, 19 nt, Homo sapiens
  misc_RNA (1)...(19): siRNA sense strand
aagaagcgaaugauguauu

SEQ ID NO: 1421528 - RNA, 19 nt, Homo sapiens
  misc_RNA (1)...(19): siRNA sense strand
gaacaucuggguguaacgu

SEQ ID NO: 1421529 - RNA, 19 nt, Homo sapiens
  misc_RNA (1)...(19): siRNA sense strand
agacagccauggagaagcu

SEQ ID NO: 1421530 - RNA, 19 nt, Homo sapiens
  misc_RNA (1)...(19): siRNA sense strand
aggagaagcggaaagcauu

SEQ ID NO: 1421531 - RNA, 19 nt, Homo sapiens
  misc_RNA (1)...(19): siRNA sense strand
guauuugaccaccaagaau

SEQ ID NO: 1421532 - RNA, 19 nt, Homo sapiens
  misc_RNA (1)...(19): siRNA sense strand
accuggagcugacaccaaa

SEQ ID NO: 1421533 - RNA, 19 nt, Homo sapiens
  misc_RNA (1)...(19): siRNA sense strand
aagaacaagcucaucaugu

SEQ ID NO: 1421534 - RNA, 19 nt, Homo sapiens
  misc_RNA (1)...(19): siRNA sense strand
gcaagacagccggagaaca

SEQ ID NO: 1421535 - RNA, 19 nt, Homo sapiens
  misc_RNA (1)...(19): siRNA sense strand
gcgggaaggucaggguuac

SEQ ID NO: 1421536 - RNA, 19 nt, Homo sapiens
  misc_RNA (1)...(19): siRNA sense strand
ggcagugucauccucaaga

SEQ ID NO: 1421537 - RNA, 19 nt, Homo sapiens
  misc_RNA (1)...(19): siRNA sense strand
gacuugcuccagaucguaa

SEQ ID NO: 1421538 - RNA, 19 nt, Homo sapiens
  misc_RNA (1)...(19): siRNA sense strand
gcuggagaguggaauaucc

SEQ ID NO: 1421539 - RNA, 19 nt, Homo sapiens
  misc_RNA (1)...(19): siRNA sense strand
gcggugaaggugcuacgaa

SEQ ID NO: 1421540 - RNA, 19 nt, Homo sapiens
  misc_RNA (1)...(19): siRNA sense strand
gaagcgaaugauguauuug

SEQ ID NO: 1421541 - RNA, 19 nt, Homo sapiens
  misc_RNA (1)...(19): siRNA sense strand
cuucgaggcauuauggaaa

SEQ ID NO: 1421542 - RNA, 19 nt, Homo sapiens
  misc_RNA (1)...(19): siRNA sense strand
aaagucccauaguaagauc

SEQ ID NO: 1421543 - RNA, 19 nt, Homo sapiens
  misc_RNA (1)...(19): siRNA sense strand
gaaggugugcgugcuggau

SEQ ID NO: 1421544 - RNA, 19 nt, Homo sapiens
  misc_RNA (1)...(19): siRNA sense strand
cuguauggcacacguauug

SEQ ID NO: 1421545 - RNA, 19 nt, Homo sapiens
  misc_RNA (1)...(19): siRNA sense strand
cggcgcagccugaagaaca

SEQ ID NO: 1421546 - RNA, 19 nt, Homo sapiens
  misc_RNA (1)...(19): siRNA sense strand
uguauuugaccaccaagaa

SEQ ID NO: 1421547 - RNA, 19 nt, Homo sapiens
  misc_RNA (1)...(19): siRNA sense strand
ccgcaagacagccggagaa

SEQ ID NO: 1421548 - RNA, 19 nt, Homo sapiens
  misc_RNA (1)...(19): siRNA sense strand
gggacuugcuccagaucgu

SEQ ID NO: 1421549 - RNA, 19 nt, Homo sapiens
  misc_RNA (1)...(19): siRNA sense strand
gaccuggagcugacaccaa

SEQ ID NO: 1421550 - RNA, 19 nt, Homo sapiens
  misc_RNA (1)...(19): siRNA sense strand
ccuggagcauggcgaauac

SEQ ID NO: 1421551 - RNA, 19 nt, Homo sapiens
  misc_RNA (1)...(19): siRNA sense strand
gccaccaacucugaaacug

SEQ ID NO: 1421552 - RNA, 19 nt, Homo sapiens
  misc_RNA (1)...(19): siRNA sense strand
cugaagaacaagcucauca

SEQ ID NO: 1421553 - RNA, 19 nt, Homo sapiens
  misc_RNA (1)...(19): siRNA sense strand
gaaaacccugguacugauu

SEQ ID NO: 1421554 - RNA, 19 nt, Homo sapiens
  misc_RNA (1)...(19): siRNA sense strand
uauuugaccaccaagaaug

SEQ ID NO: 1421555 - RNA, 19 nt, Homo sapiens
  misc_RNA (1)...(19): siRNA sense strand
uaucugaacucuaugcauu

SEQ ID NO: 1421556 - RNA, 19 nt, Homo sapiens
  misc_RNA (1)...(19): siRNA sense strand
gagaaagaguuccacuuca

SEQ ID NO: 1421557 - RNA, 19 nt, Homo sapiens
  misc_RNA (1)...(19): siRNA sense strand
ggagaaagaguuccacuuc

SEQ ID NO: 1421558 - RNA, 19 nt, Homo sapiens
  misc_RNA (1)...(19): siRNA sense strand
agaaagaguuccacuucaa

SEQ ID NO: 1421559 - RNA, 19 nt, Homo sapiens
  misc_RNA (1)...(19): siRNA sense strand
gaaagagucucgacaaaac

SEQ ID NO: 1421560 - RNA, 19 nt, Homo sapiens
  misc_RNA (1)...(19): siRNA sense strand
guggcuaucugaacucuau

SEQ ID NO: 1421561 - RNA, 19 nt, Homo sapiens
  misc_RNA (1)...(19): siRNA sense strand
gaugaaagagucucgacaa

SEQ ID NO: 1421562 - RNA, 19 nt, Homo sapiens
  misc_RNA (1)...(19): siRNA sense strand
ucaacagcgucccguauga

SEQ ID NO: 1421563 - RNA, 19 nt, Homo sapiens
  misc_RNA (1)...(19): siRNA sense strand
ugguggagcuggagaaaga

SEQ ID NO: 1421564 - RNA, 19 nt, Homo sapiens
  misc_RNA (1)...(19): siRNA sense strand
ucacugagcgccagaucaa

SEQ ID NO: 1421565 - RNA, 19 nt, Homo sapiens
  misc_RNA (1)...(19): siRNA sense strand
gaagggcaagggcaugcua

SEQ ID NO: 1421566 - RNA, 19 nt, Homo sapiens
  misc_RNA (1)...(19): siRNA sense strand
cagaaucgccgcaugaagu

SEQ ID NO: 1421567 - RNA, 19 nt, Homo sapiens
  misc_RNA (1)...(19): siRNA sense strand
gggaagaauucaggaagca

SEQ ID NO: 1421568 - RNA, 19 nt, Homo sapiens
  misc_RNA (1)...(19): siRNA sense strand
gaaagaguuccacuucaac

SEQ ID NO: 1421569 - RNA, 19 nt, Homo sapiens
  misc_RNA (1)...(19): siRNA sense strand
ccagcccucuuuggucuaa

SEQ ID NO: 1421570 - RNA, 19 nt, Homo sapiens
  misc_RNA (1)...(19): siRNA sense strand
augaaagagucucgacaaa

SEQ ID NO: 1421571 - RNA, 19 nt, Homo sapiens
  misc_RNA (1)...(19): siRNA sense strand
aagcugcgcuggcgacaag

SEQ ID NO: 1421572 - RNA, 19 nt, Homo sapiens
  misc_RNA (1)...(19): siRNA sense strand
agaaucgccgcaugaagua

SEQ ID NO: 1421573 - RNA, 19 nt, Homo sapiens
  misc_RNA (1)...(19): siRNA sense strand
ggucaacagcgucccguau

SEQ ID NO: 1421574 - RNA, 19 nt, Homo sapiens
  misc_RNA (1)...(19): siRNA sense strand
gcagggcaacggcagcuau

SEQ ID NO: 1421575 - RNA, 19 nt, Homo sapiens
  misc_RNA (1)...(19): siRNA sense strand
cacaguggccaaacaaauc

SEQ ID NO: 1421576 - RNA, 19 nt, Homo sapiens
  misc_RNA (1)...(19): siRNA sense strand
ggagcuggagaaagaguuc

SEQ ID NO: 1421577 - RNA, 19 nt, Homo sapiens
  misc_RNA (1)...(19): siRNA sense strand
ugcauucgcuggucaacag

SEQ ID NO: 1421578 - RNA, 19 nt, Homo sapiens
  misc_RNA (1)...(19): siRNA sense strand
caaaacacaaagcagaaaa

SEQ ID NO: 1421579 - RNA, 19 nt, Homo sapiens
  misc_RNA (1)...(19): siRNA sense strand
gucaacagcgucccguaug

SEQ ID NO: 1421580 - RNA, 19 nt, Homo sapiens
  misc_RNA (1)...(19): siRNA sense strand
gccgguggcuaucugaacu

SEQ ID NO: 1421581 - RNA, 19 nt, Homo sapiens
  misc_RNA (1)...(19): siRNA sense strand
ggcaagggcaugcuaacgu

SEQ ID NO: 1421582 - RNA, 19 nt, Homo sapiens
  misc_RNA (1)...(19): siRNA sense strand
uaucugaacucuaugcauu

SEQ ID NO: 1421583 - RNA, 19 nt, Homo sapiens
  misc_RNA (1)...(19): siRNA sense strand
gagaaagaguuccacuuca

SEQ ID NO: 1421584 - RNA, 19 nt, Homo sapiens
  misc_RNA (1)...(19): siRNA sense strand
ggagaaagaguuccacuuc

SEQ ID NO: 1421585 - RNA, 19 nt, Homo sapiens
  misc_RNA (1)...(19): siRNA sense strand
agaaagaguuccacuucaa

SEQ ID NO: 1421586 - RNA, 19 nt, Homo sapiens
  misc_RNA (1)...(19): siRNA sense strand
gaaagagucucgacaaaac

SEQ ID NO: 1421587 - RNA, 19 nt, Homo sapiens
  misc_RNA (1)...(19): siRNA sense strand
guggcuaucugaacucuau

SEQ ID NO: 1421588 - RNA, 19 nt, Homo sapiens
  misc_RNA (1)...(19): siRNA sense strand
gaugaaagagucucgacaa

SEQ ID NO: 1421589 - RNA, 19 nt, Homo sapiens
  misc_RNA (1)...(19): siRNA sense strand
ucaacagcgucccguauga

SEQ ID NO: 1421590 - RNA, 19 nt, Homo sapiens
  misc_RNA (1)...(19): siRNA sense strand
ugguggagcuggagaaaga

SEQ ID NO: 1421591 - RNA, 19 nt, Homo sapiens
  misc_RNA (1)...(19): siRNA sense strand
ucacugagcgccagaucaa

SEQ ID NO: 1421592 - RNA, 19 nt, Homo sapiens
  misc_RNA (1)...(19): siRNA sense strand
gaagggcaagggcaugcua

SEQ ID NO: 1421593 - RNA, 19 nt, Homo sapiens
  misc_RNA (1)...(19): siRNA sense strand
cagaaucgccgcaugaagu

SEQ ID NO: 1421594 - RNA, 19 nt, Homo sapiens
  misc_RNA (1)...(19): siRNA sense strand
gggaagaauucaggaagca

SEQ ID NO: 1421595 - RNA, 19 nt, Homo sapiens
  misc_RNA (1)...(19): siRNA sense strand
gaaagaguuccacuucaac

SEQ ID NO: 1421596 - RNA, 19 nt, Homo sapiens
  misc_RNA (1)...(19): siRNA sense strand
ccagcccucuuuggucuaa

SEQ ID NO: 1421597 - RNA, 19 nt, Homo sapiens
  misc_RNA (1)...(19): siRNA sense strand
augaaagagucucgacaaa

SEQ ID NO: 1421598 - RNA, 19 nt, Homo sapiens
  misc_RNA (1)...(19): siRNA sense strand
aagcugcgcuggcgacaag

SEQ ID NO: 1421599 - RNA, 19 nt, Homo sapiens
  misc_RNA (1)...(19): siRNA sense strand
agaaucgccgcaugaagua

SEQ ID NO: 1421600 - RNA, 19 nt, Homo sapiens
  misc_RNA (1)...(19): siRNA sense strand
ggucaacagcgucccguau

SEQ ID NO: 1421601 - RNA, 19 nt, Homo sapiens
  misc_RNA (1)...(19): siRNA sense strand
gcagggcaacggcagcuau

SEQ ID NO: 1421602 - RNA, 19 nt, Homo sapiens
  misc_RNA (1)...(19): siRNA sense strand
cacaguggccaaacaaauc

SEQ ID NO: 1421603 - RNA, 19 nt, Homo sapiens
  misc_RNA (1)...(19): siRNA sense strand
ggagcuggagaaagaguuc

SEQ ID NO: 1421604 - RNA, 19 nt, Homo sapiens
  misc_RNA (1)...(19): siRNA sense strand
ugcauucgcuggucaacag

SEQ ID NO: 1421605 - RNA, 19 nt, Homo sapiens
  misc_RNA (1)...(19): siRNA sense strand
caaaacacaaagcagaaaa

SEQ ID NO: 1421606 - RNA, 19 nt, Homo sapiens
  misc_RNA (1)...(19): siRNA sense strand
gucaacagcgucccguaug

SEQ ID NO: 1421607 - RNA, 19 nt, Homo sapiens
  misc_RNA (1)...(19): siRNA sense strand
gccgguggcuaucugaacu

SEQ ID NO: 1421608 - RNA, 19 nt, Homo sapiens
  misc_RNA (1)...(19): siRNA sense strand
ggcaagggcaugcuaacgu

SEQ ID NO: 1421609 - RNA, 19 nt, Homo sapiens
  misc_RNA (1)...(19): siRNA sense strand
uaucugaacucuaugcauu

SEQ ID NO: 1421610 - RNA, 19 nt, Homo sapiens
  misc_RNA (1)...(19): siRNA sense strand
gagaaagaguuccacuuca

SEQ ID NO: 1421611 - RNA, 19 nt, Homo sapiens
  misc_RNA (1)...(19): siRNA sense strand
ggagaaagaguuccacuuc

SEQ ID NO: 1421612 - RNA, 19 nt, Homo sapiens
  misc_RNA (1)...(19): siRNA sense strand
agaaagaguuccacuucaa

SEQ ID NO: 1421613 - RNA, 19 nt, Homo sapiens
  misc_RNA (1)...(19): siRNA sense strand
gaaagagucucgacaaaac

SEQ ID NO: 1421614 - RNA, 19 nt, Homo sapiens
  misc_RNA (1)...(19): siRNA sense strand
guggcuaucugaacucuau

SEQ ID NO: 1421615 - RNA, 19 nt, Homo sapiens
  misc_RNA (1)...(19): siRNA sense strand
ucaacagcgucccguauga

SEQ ID NO: 1421616 - RNA, 19 nt, Homo sapiens
  misc_RNA (1)...(19): siRNA sense strand
ugguggagcuggagaaaga

SEQ ID NO: 1421617 - RNA, 19 nt, Homo sapiens
  misc_RNA (1)...(19): siRNA sense strand
ucacugagcgccagaucaa

SEQ ID NO: 1421618 - RNA, 19 nt, Homo sapiens
  misc_RNA (1)...(19): siRNA sense strand
gaagggcaagggcaugcua

SEQ ID NO: 1421619 - RNA, 19 nt, Homo sapiens
  misc_RNA (1)...(19): siRNA sense strand
cagaaucgccgcaugaagu

SEQ ID NO: 1421620 - RNA, 19 nt, Homo sapiens
  misc_RNA (1)...(19): siRNA sense strand
gggaagaauucaggaagca

SEQ ID NO: 1421621 - RNA, 19 nt, Homo sapiens
  misc_RNA (1)...(19): siRNA sense strand
gaaagaguuccacuucaac

SEQ ID NO: 1421622 - RNA, 19 nt, Homo sapiens
  misc_RNA (1)...(19): siRNA sense strand
ccagcccucuuuggucuaa

SEQ ID NO: 1421623 - RNA, 19 nt, Homo sapiens
  misc_RNA (1)...(19): siRNA sense strand
aagcugcgcuggcgacaag

SEQ ID NO: 1421624 - RNA, 19 nt, Homo sapiens
  misc_RNA (1)...(19): siRNA sense strand
agaaucgccgcaugaagua

SEQ ID NO: 1421625 - RNA, 19 nt, Homo sapiens
  misc_RNA (1)...(19): siRNA sense strand
ggucaacagcgucccguau

SEQ ID NO: 1421626 - RNA, 19 nt, Homo sapiens
  misc_RNA (1)...(19): siRNA sense strand
gcagggcaacggcagcuau

SEQ ID NO: 1421627 - RNA, 19 nt, Homo sapiens
  misc_RNA (1)...(19): siRNA sense strand
ggagcuggagaaagaguuc

SEQ ID NO: 1421628 - RNA, 19 nt, Homo sapiens
  misc_RNA (1)...(19): siRNA sense strand
ugcauucgcuggucaacag

SEQ ID NO: 1421629 - RNA, 19 nt, Homo sapiens
  misc_RNA (1)...(19): siRNA sense strand
ggcaagggcaugcuaacgu

SEQ ID NO: 1421630 - RNA, 19 nt, Homo sapiens
  misc_RNA (1)...(19): siRNA sense strand
caaaacacaaagcagaaaa

SEQ ID NO: 1421631 - RNA, 19 nt, Homo sapiens
  misc_RNA (1)...(19): siRNA sense strand
gucaacagcgucccguaug

SEQ ID NO: 1421632 - RNA, 19 nt, Homo sapiens
  misc_RNA (1)...(19): siRNA sense strand
gccgguggcuaucugaacu

SEQ ID NO: 1421633 - RNA, 19 nt, Homo sapiens
  misc_RNA (1)...(19): siRNA sense strand
ggaauuagagaaagaguuu

SEQ ID NO: 1421634 - RNA, 19 nt, Homo sapiens
  misc_RNA (1)...(19): siRNA sense strand
cuacaucgauccgaaauuu

SEQ ID NO: 1421635 - RNA, 19 nt, Homo sapiens
  misc_RNA (1)...(19): siRNA sense strand
gaacacaguccggaauauu

SEQ ID NO: 1421636 - RNA, 19 nt, Homo sapiens
  misc_RNA (1)...(19): siRNA sense strand
ggacauuaccagguuauaa

SEQ ID NO: 1421637 - RNA, 19 nt, Homo sapiens
  misc_RNA (1)...(19): siRNA sense strand
gcaagcaacccauagucua

SEQ ID NO: 1421638 - RNA, 19 nt, Homo sapiens
  misc_RNA (1)...(19): siRNA sense strand
gcagcaaguccuggaauua

SEQ ID NO: 1421639 - RNA, 19 nt, Homo sapiens
  misc_RNA (1)...(19): siRNA sense strand
cagaggacauuaccagguu

SEQ ID NO: 1421640 - RNA, 19 nt, Homo sapiens
  misc_RNA (1)...(19): siRNA sense strand
cguauuugauggacucuaa

SEQ ID NO: 1421641 - RNA, 19 nt, Homo sapiens
  misc_RNA (1)...(19): siRNA sense strand
cuacaucccugaacacagu

SEQ ID NO: 1421642 - RNA, 19 nt, Homo sapiens
  misc_RNA (1)...(19): siRNA sense strand
aucaugagcucguauuuga

SEQ ID NO: 1421643 - RNA, 19 nt, Homo sapiens
  misc_RNA (1)...(19): siRNA sense strand
gauccgaaauuuccuccau

SEQ ID NO: 1421644 - RNA, 19 nt, Homo sapiens
  misc_RNA (1)...(19): siRNA sense strand
ggcagcaaguccuggaauu

SEQ ID NO: 1421645 - RNA, 19 nt, Homo sapiens
  misc_RNA (1)...(19): siRNA sense strand
gaucaugagcucguauuug

SEQ ID NO: 1421646 - RNA, 19 nt, Homo sapiens
  misc_RNA (1)...(19): siRNA sense strand
aacacaguccggaauauua

SEQ ID NO: 1421647 - RNA, 19 nt, Homo sapiens
  misc_RNA (1)...(19): siRNA sense strand
ccaaaaccgucgcaugaaa

SEQ ID NO: 1421648 - RNA, 19 nt, Homo sapiens
  misc_RNA (1)...(19): siRNA sense strand
gcaacgggcagaggacauu

SEQ ID NO: 1421649 - RNA, 19 nt, Homo sapiens
  misc_RNA (1)...(19): siRNA sense strand
ugaacacaguccggaauau

SEQ ID NO: 1421650 - RNA, 19 nt, Homo sapiens
  misc_RNA (1)...(19): siRNA sense strand
agaggacauuaccagguua

SEQ ID NO: 1421651 - RNA, 19 nt, Homo sapiens
  misc_RNA (1)...(19): siRNA sense strand
gcacggugaaccccaauua

SEQ ID NO: 1421652 - RNA, 19 nt, Homo sapiens
  misc_RNA (1)...(19): siRNA sense strand
uaacuacaucgauccgaaa

SEQ ID NO: 1421653 - RNA, 19 nt, Homo sapiens
  misc_RNA (1)...(19): siRNA sense strand
gaaggagaaggaucgagau

SEQ ID NO: 1421654 - RNA, 19 nt, Homo sapiens
  misc_RNA (1)...(19): siRNA sense strand
caacgggcagaggacauua

SEQ ID NO: 1421655 - RNA, 19 nt, Homo sapiens
  misc_RNA (1)...(19): siRNA sense strand
caugagcucguauuugaug

SEQ ID NO: 1421656 - RNA, 19 nt, Homo sapiens
  misc_RNA (1)...(19): siRNA sense strand
gcaugaaauggaagaagga

SEQ ID NO: 1421657 - RNA, 19 nt, Homo sapiens
  misc_RNA (1)...(19): siRNA sense strand
uaccugacccgaaggagaa

SEQ ID NO: 1421658 - RNA, 19 nt, Homo sapiens
  misc_RNA (1)...(19): siRNA sense strand
caagcaacccauagucuac

SEQ ID NO: 1421659 - RNA, 19 nt, Homo sapiens
  misc_RNA (1)...(19): siRNA sense strand
cagcaaguccuggaauuag

SEQ ID NO: 1421660 - RNA, 19 nt, Homo sapiens
  misc_RNA (1)...(19): siRNA sense strand
cugaacacaguccggaaua

SEQ ID NO: 1421661 - RNA, 19 nt, Homo sapiens
  misc_RNA (1)...(19): siRNA sense strand
gcaaguccuggaauuagag

SEQ ID NO: 1421662 - RNA, 19 nt, Homo sapiens
  misc_RNA (1)...(19): siRNA sense strand
agcaaguccuggaauuaga

SEQ ID NO: 1421663 - RNA, 19 nt, Homo sapiens
  misc_RNA (1)...(19): siRNA sense strand
gcucgaggacagccuauac

SEQ ID NO: 1421664 - RNA, 19 nt, Homo sapiens
  misc_RNA (1)...(19): siRNA sense strand
gaggacauuaccagguuau

SEQ ID NO: 1421665 - RNA, 19 nt, Homo sapiens
  misc_RNA (1)...(19): siRNA sense strand
ggacucuaacuacaucgau

SEQ ID NO: 1421666 - RNA, 19 nt, Homo sapiens
  misc_RNA (1)...(19): siRNA sense strand
uugauggacucuaacuaca

SEQ ID NO: 1421667 - RNA, 19 nt, Homo sapiens
  misc_RNA (1)...(19): siRNA sense strand
ggaauuagagaaagaguuu

SEQ ID NO: 1421668 - RNA, 19 nt, Homo sapiens
  misc_RNA (1)...(19): siRNA sense strand
cuacaucgauccgaaauuu

SEQ ID NO: 1421669 - RNA, 19 nt, Homo sapiens
  misc_RNA (1)...(19): siRNA sense strand
gaacacaguccggaauauu

SEQ ID NO: 1421670 - RNA, 19 nt, Homo sapiens
  misc_RNA (1)...(19): siRNA sense strand
ggacauuaccagguuauaa

SEQ ID NO: 1421671 - RNA, 19 nt, Homo sapiens
  misc_RNA (1)...(19): siRNA sense strand
gcaagcaacccauagucua

SEQ ID NO: 1421672 - RNA, 19 nt, Homo sapiens
  misc_RNA (1)...(19): siRNA sense strand
gcagcaaguccuggaauua

SEQ ID NO: 1421673 - RNA, 19 nt, Homo sapiens
  misc_RNA (1)...(19): siRNA sense strand
cagaggacauuaccagguu

SEQ ID NO: 1421674 - RNA, 19 nt, Homo sapiens
  misc_RNA (1)...(19): siRNA sense strand
cguauuugauggacucuaa

SEQ ID NO: 1421675 - RNA, 19 nt, Homo sapiens
  misc_RNA (1)...(19): siRNA sense strand
cuacaucccugaacacagu

SEQ ID NO: 1421676 - RNA, 19 nt, Homo sapiens
  misc_RNA (1)...(19): siRNA sense strand
aucaugagcucguauuuga

SEQ ID NO: 1421677 - RNA, 19 nt, Homo sapiens
  misc_RNA (1)...(19): siRNA sense strand
gauccgaaauuuccuccau

SEQ ID NO: 1421678 - RNA, 19 nt, Homo sapiens
  misc_RNA (1)...(19): siRNA sense strand
ggcagcaaguccuggaauu

SEQ ID NO: 1421679 - RNA, 19 nt, Homo sapiens
  misc_RNA (1)...(19): siRNA sense strand
gaucaugagcucguauuug

SEQ ID NO: 1421680 - RNA, 19 nt, Homo sapiens
  misc_RNA (1)...(19): siRNA sense strand
aacacaguccggaauauua

SEQ ID NO: 1421681 - RNA, 19 nt, Homo sapiens
  misc_RNA (1)...(19): siRNA sense strand
ccaaaaccgucgcaugaaa

SEQ ID NO: 1421682 - RNA, 19 nt, Homo sapiens
  misc_RNA (1)...(19): siRNA sense strand
gcaacgggcagaggacauu

SEQ ID NO: 1421683 - RNA, 19 nt, Homo sapiens
  misc_RNA (1)...(19): siRNA sense strand
ugaacacaguccggaauau

SEQ ID NO: 1421684 - RNA, 19 nt, Homo sapiens
  misc_RNA (1)...(19): siRNA sense strand
agaggacauuaccagguua

SEQ ID NO: 1421685 - RNA, 19 nt, Homo sapiens
  misc_RNA (1)...(19): siRNA sense strand
gcacggugaaccccaauua

SEQ ID NO: 1421686 - RNA, 19 nt, Homo sapiens
  misc_RNA (1)...(19): siRNA sense strand
uaacuacaucgauccgaaa

SEQ ID NO: 1421687 - RNA, 19 nt, Homo sapiens
  misc_RNA (1)...(19): siRNA sense strand
gaaggagaaggaucgagau

SEQ ID NO: 1421688 - RNA, 19 nt, Homo sapiens
  misc_RNA (1)...(19): siRNA sense strand
caacgggcagaggacauua

SEQ ID NO: 1421689 - RNA, 19 nt, Homo sapiens
  misc_RNA (1)...(19): siRNA sense strand
caugagcucguauuugaug

SEQ ID NO: 1421690 - RNA, 19 nt, Homo sapiens
  misc_RNA (1)...(19): siRNA sense strand
gcaugaaauggaagaagga

SEQ ID NO: 1421691 - RNA, 19 nt, Homo sapiens
  misc_RNA (1)...(19): siRNA sense strand
uaccugacccgaaggagaa

SEQ ID NO: 1421692 - RNA, 19 nt, Homo sapiens
  misc_RNA (1)...(19): siRNA sense strand
caagcaacccauagucuac

SEQ ID NO: 1421693 - RNA, 19 nt, Homo sapiens
  misc_RNA (1)...(19): siRNA sense strand
cagcaaguccuggaauuag

SEQ ID NO: 1421694 - RNA, 19 nt, Homo sapiens
  misc_RNA (1)...(19): siRNA sense strand
cugaacacaguccggaaua

SEQ ID NO: 1421695 - RNA, 19 nt, Homo sapiens
  misc_RNA (1)...(19): siRNA sense strand
gcaaguccuggaauuagag

SEQ ID NO: 1421696 - RNA, 19 nt, Homo sapiens
  misc_RNA (1)...(19): siRNA sense strand
agcaaguccuggaauuaga

SEQ ID NO: 1421697 - RNA, 19 nt, Homo sapiens
  misc_RNA (1)...(19): siRNA sense strand
gcucgaggacagccuauac

SEQ ID NO: 1421698 - RNA, 19 nt, Homo sapiens
  misc_RNA (1)...(19): siRNA sense strand
gaggacauuaccagguuau

SEQ ID NO: 1421699 - RNA, 19 nt, Homo sapiens
  misc_RNA (1)...(19): siRNA sense strand
ggacucuaacuacaucgau

SEQ ID NO: 1421700 - RNA, 19 nt, Homo sapiens
  misc_RNA (1)...(19): siRNA sense strand
uugauggacucuaacuaca

SEQ ID NO: 1421701 - RNA, 19 nt, Homo sapiens
  misc_RNA (1)...(19): siRNA sense strand
ggacggagguggugaagaa

SEQ ID NO: 1421702 - RNA, 19 nt, Homo sapiens
  misc_RNA (1)...(19): siRNA sense strand
cagaagagacgcaguuaua

SEQ ID NO: 1421703 - RNA, 19 nt, Homo sapiens
  misc_RNA (1)...(19): siRNA sense strand
gaaagccucucaauacuac

SEQ ID NO: 1421704 - RNA, 19 nt, Homo sapiens
  misc_RNA (1)...(19): siRNA sense strand
cgaagcaggugguggagua

SEQ ID NO: 1421705 - RNA, 19 nt, Homo sapiens
  misc_RNA (1)...(19): siRNA sense strand
ggaaagccucucaauacua

SEQ ID NO: 1421706 - RNA, 19 nt, Homo sapiens
  misc_RNA (1)...(19): siRNA sense strand
acaaggaccucuucagcaa

SEQ ID NO: 1421707 - RNA, 19 nt, Homo sapiens
  misc_RNA (1)...(19): siRNA sense strand
gauuacgacucucgaggaa

SEQ ID NO: 1421708 - RNA, 19 nt, Homo sapiens
  misc_RNA (1)...(19): siRNA sense strand
agacaaggccucuaaagug

SEQ ID NO: 1421709 - RNA, 19 nt, Homo sapiens
  misc_RNA (1)...(19): siRNA sense strand
gggaaagccucucaauacu

SEQ ID NO: 1421710 - RNA, 19 nt, Homo sapiens
  misc_RNA (1)...(19): siRNA sense strand
aguaugaggugucccauga

SEQ ID NO: 1421711 - RNA, 19 nt, Homo sapiens
  misc_RNA (1)...(19): siRNA sense strand
gaagagacgcaguuauaag

SEQ ID NO: 1421712 - RNA, 19 nt, Homo sapiens
  misc_RNA (1)...(19): siRNA sense strand
gagacaaggccucuaaagu

SEQ ID NO: 1421713 - RNA, 19 nt, Homo sapiens
  misc_RNA (1)...(19): siRNA sense strand
ggucugggauuacgacucu

SEQ ID NO: 1421714 - RNA, 19 nt, Homo sapiens
  misc_RNA (1)...(19): siRNA sense strand
ccggaucccucccaaguau

SEQ ID NO: 1421715 - RNA, 19 nt, Homo sapiens
  misc_RNA (1)...(19): siRNA sense strand
ugaggugucccaugacuuu

SEQ ID NO: 1421716 - RNA, 19 nt, Homo sapiens
  misc_RNA (1)...(19): siRNA sense strand
gaggaaagcacgacuucau

SEQ ID NO: 1421717 - RNA, 19 nt, Homo sapiens
  misc_RNA (1)...(19): siRNA sense strand
cgggaaagccucucaauac

SEQ ID NO: 1421718 - RNA, 19 nt, Homo sapiens
  misc_RNA (1)...(19): siRNA sense strand
uuacgacucucgaggaaag

SEQ ID NO: 1421719 - RNA, 19 nt, Homo sapiens
  misc_RNA (1)...(19): siRNA sense strand
agaagagacgcaguuauaa

SEQ ID NO: 1421720 - RNA, 19 nt, Homo sapiens
  misc_RNA (1)...(19): siRNA sense strand
gcagaagagacgcaguuau

SEQ ID NO: 1421721 - RNA, 19 nt, Homo sapiens
  misc_RNA (1)...(19): siRNA sense strand
ccaaauacaagcagaagag

SEQ ID NO: 1421722 - RNA, 19 nt, Homo sapiens
  misc_RNA (1)...(19): siRNA sense strand
gcccgcugcugcucaaguu

SEQ ID NO: 1421723 - RNA, 19 nt, Homo sapiens
  misc_RNA (1)...(19): siRNA sense strand
aagagacgcaguuauaaga

SEQ ID NO: 1421724 - RNA, 19 nt, Homo sapiens
  misc_RNA (1)...(19): siRNA sense strand
ggacgacaaggaccucuuc

SEQ ID NO: 1421725 - RNA, 19 nt, Homo sapiens
  misc_RNA (1)...(19): siRNA sense strand
gcuggcaaguccaccauca

SEQ ID NO: 1421726 - RNA, 19 nt, Homo sapiens
  misc_RNA (1)...(19): siRNA sense strand
ggagacaaggccucuaaag

SEQ ID NO: 1421727 - RNA, 19 nt, Homo sapiens
  misc_RNA (1)...(19): siRNA sense strand
gagacgcaguuauaagaac

SEQ ID NO: 1421728 - RNA, 19 nt, Homo sapiens
  misc_RNA (1)...(19): siRNA sense strand
gcugucaggaggacgauuu

SEQ ID NO: 1421729 - RNA, 19 nt, Homo sapiens
  misc_RNA (1)...(19): siRNA sense strand
ggaucccucccaaguauga

SEQ ID NO: 1421730 - RNA, 19 nt, Homo sapiens
  misc_RNA (1)...(19): siRNA sense strand
uucaaagucucucugaguu

SEQ ID NO: 1421731 - RNA, 19 nt, Homo sapiens
  misc_RNA (1)...(19): siRNA sense strand
ccgggaaagccucucaaua

SEQ ID NO: 1421732 - RNA, 19 nt, Homo sapiens
  misc_RNA (1)...(19): siRNA sense strand
cgacuucaucggagaauuc

SEQ ID NO: 1421733 - RNA, 19 nt, Homo sapiens
  misc_RNA (1)...(19): siRNA sense strand
ccuaccagccgaacgagua

SEQ ID NO: 1421734 - RNA, 19 nt, Homo sapiens
  misc_RNA (1)...(19): siRNA sense strand
ugacuuugccaucaauuuc

SEQ ID NO: 1421735 - RNA, 19 nt, Homo sapiens
  misc_RNA (1)...(19): siRNA sense strand
gcuugcagcugguguacag

SEQ ID NO: 1421736 - RNA, 19 nt, Homo sapiens
  misc_RNA (1)...(19): siRNA sense strand
ggaguacuacagccacaga

SEQ ID NO: 1421737 - RNA, 19 nt, Homo sapiens
  misc_RNA (1)...(19): siRNA sense strand
cggagguggugaagaacaa

SEQ ID NO: 1421738 - RNA, 19 nt, Homo sapiens
  misc_RNA (1)...(19): siRNA sense strand
gcacgacuucaucggagaa

SEQ ID NO: 1421739 - RNA, 19 nt, Homo sapiens
  misc_RNA (1)...(19): siRNA sense strand
caaauacaagcagaagaga

SEQ ID NO: 1421740 - RNA, 19 nt, Homo sapiens
  misc_RNA (1)...(19): siRNA sense strand
gaggagagcaccgggaaag

SEQ ID NO: 1421741 - RNA, 19 nt, Homo sapiens
  misc_RNA (1)...(19): siRNA sense strand
ugaggacgaugagugugaa

SEQ ID NO: 1421742 - RNA, 19 nt, Homo sapiens
  misc_RNA (1)...(19): siRNA sense strand
cguccuggcugaccucaag

SEQ ID NO: 1421743 - RNA, 19 nt, Homo sapiens
  misc_RNA (1)...(19): siRNA sense strand
ggacuaugacagugacaag

SEQ ID NO: 1421744 - RNA, 19 nt, Homo sapiens
  misc_RNA (1)...(19): siRNA sense strand
gcugcucccugcacuacau

SEQ ID NO: 1421745 - RNA, 19 nt, Homo sapiens
  misc_RNA (1)...(19): siRNA sense strand
ggugugggaggccuucaaa

SEQ ID NO: 1421746 - RNA, 19 nt, Homo sapiens
  misc_RNA (1)...(19): siRNA sense strand
ccaugacuuugccaucaau

SEQ ID NO: 1421747 - RNA, 19 nt, Homo sapiens
  misc_RNA (1)...(19): siRNA sense strand
ugacuucaccgccuccaau

SEQ ID NO: 1421748 - RNA, 19 nt, Homo sapiens
  misc_RNA (1)...(19): siRNA sense strand
ugggaggccuucaaagucu

SEQ ID NO: 1421749 - RNA, 19 nt, Homo sapiens
  misc_RNA (1)...(19): siRNA sense strand
cagccugcaucccguguuc

SEQ ID NO: 1421750 - RNA, 19 nt, Homo sapiens
  misc_RNA (1)...(19): siRNA sense strand
uggcugaccucaaguucca

SEQ ID NO: 1421751 - RNA, 19 nt, Homo sapiens
  misc_RNA (1)...(19): siRNA sense strand
acuccuuccuggacuauau

SEQ ID NO: 1421752 - RNA, 19 nt, Homo sapiens
  misc_RNA (1)...(19): siRNA sense strand
ggcagauuguggcccagaa

SEQ ID NO: 1421753 - RNA, 19 nt, Homo sapiens
  misc_RNA (1)...(19): siRNA sense strand
caagagguuuuccgcuuug

SEQ ID NO: 1421754 - RNA, 19 nt, Homo sapiens
  misc_RNA (1)...(19): siRNA sense strand
ucccaugacuuugccauca

SEQ ID NO: 1421755 - RNA, 19 nt, Homo sapiens
  misc_RNA (1)...(19): siRNA sense strand
ggaagcuggacgacaagga

SEQ ID NO: 1421756 - RNA, 19 nt, Homo sapiens
  misc_RNA (1)...(19): siRNA sense strand
aaggaccucuucagcaagu

SEQ ID NO: 1421757 - RNA, 19 nt, Homo sapiens
  misc_RNA (1)...(19): siRNA sense strand
gcaggaacgcuggcaaguc

SEQ ID NO: 1421758 - RNA, 19 nt, Homo sapiens
  misc_RNA (1)...(19): siRNA sense strand
ggugaucgccgaggacauc

SEQ ID NO: 1421759 - RNA, 19 nt, Homo sapiens
  misc_RNA (1)...(19): siRNA sense strand
ggagaugcagaaggccuuu

SEQ ID NO: 1421760 - RNA, 19 nt, Homo sapiens
  misc_RNA (1)...(19): siRNA sense strand
aagcagaagagacgcaguu

SEQ ID NO: 1421761 - RNA, 19 nt, Homo sapiens
  misc_RNA (1)...(19): siRNA sense strand
gcccauguccaucaucauc

SEQ ID NO: 1421762 - RNA, 19 nt, Homo sapiens
  misc_RNA (1)...(19): siRNA sense strand
acaagagguuuuccgcuuu

SEQ ID NO: 1421763 - RNA, 19 nt, Homo sapiens
  misc_RNA (1)...(19): siRNA sense strand
cgagaucugccaggacuau

SEQ ID NO: 1421764 - RNA, 19 nt, Homo sapiens
  misc_RNA (1)...(19): siRNA sense strand
gugggaggccuucaaaguc

SEQ ID NO: 1421765 - RNA, 19 nt, Homo sapiens
  misc_RNA (1)...(19): siRNA sense strand
aauacuacauccugcugau

SEQ ID NO: 1421766 - RNA, 19 nt, Homo sapiens
  misc_RNA (1)...(19): siRNA sense strand
gcaccgggaaagccucuca

SEQ ID NO: 1421767 - RNA, 19 nt, Homo sapiens
  misc_RNA (1)...(19): siRNA sense strand
cccaugacuuugccaucaa

SEQ ID NO: 1421768 - RNA, 19 nt, Homo sapiens
  misc_RNA (1)...(19): siRNA sense strand
ucuucacgguggacuacua

SEQ ID NO: 1421769 - RNA, 19 nt, Homo sapiens
  misc_RNA (1)...(19): siRNA sense strand
caccguggccauugacuuc

SEQ ID NO: 1421770 - RNA, 19 nt, Homo sapiens
  misc_RNA (1)...(19): siRNA sense strand
ugacagugacaagagguuu

SEQ ID NO: 1421771 - RNA, 19 nt, Homo sapiens
  misc_RNA (1)...(19): siRNA sense strand
gccaggacuaugacaguga

SEQ ID NO: 1421772 - RNA, 19 nt, Homo sapiens
  misc_RNA (1)...(19): siRNA sense strand
ucaaagucucucugaguuc

SEQ ID NO: 1421773 - RNA, 19 nt, Homo sapiens
  misc_RNA (1)...(19): siRNA sense strand
uccgggacaucguacaguu

SEQ ID NO: 1421774 - RNA, 19 nt, Homo sapiens
  misc_RNA (1)...(19): siRNA sense strand
gguggaggccuaccagaac

SEQ ID NO: 1421775 - RNA, 19 nt, Homo sapiens
  misc_RNA (1)...(19): siRNA sense strand
gacuuugccaucaauuuca

SEQ ID NO: 1421776 - RNA, 19 nt, Homo sapiens
  misc_RNA (1)...(19): siRNA sense strand
uaugaggugucccaugacu

SEQ ID NO: 1421777 - RNA, 19 nt, Homo sapiens
  misc_RNA (1)...(19): siRNA sense strand
ggacggagguggugaagaa

SEQ ID NO: 1421778 - RNA, 19 nt, Homo sapiens
  misc_RNA (1)...(19): siRNA sense strand
cagaagagacgcaguuaua

SEQ ID NO: 1421779 - RNA, 19 nt, Homo sapiens
  misc_RNA (1)...(19): siRNA sense strand
gaaagccucucaauacuac

SEQ ID NO: 1421780 - RNA, 19 nt, Homo sapiens
  misc_RNA (1)...(19): siRNA sense strand
cgaagcaggugguggagua

SEQ ID NO: 1421781 - RNA, 19 nt, Homo sapiens
  misc_RNA (1)...(19): siRNA sense strand
ggaaagccucucaauacua

SEQ ID NO: 1421782 - RNA, 19 nt, Homo sapiens
  misc_RNA (1)...(19): siRNA sense strand
acaaggaccucuucagcaa

SEQ ID NO: 1421783 - RNA, 19 nt, Homo sapiens
  misc_RNA (1)...(19): siRNA sense strand
gauuacgacucucgaggaa

SEQ ID NO: 1421784 - RNA, 19 nt, Homo sapiens
  misc_RNA (1)...(19): siRNA sense strand
agacaaggccucuaaagug

SEQ ID NO: 1421785 - RNA, 19 nt, Homo sapiens
  misc_RNA (1)...(19): siRNA sense strand
gggaaagccucucaauacu

SEQ ID NO: 1421786 - RNA, 19 nt, Homo sapiens
  misc_RNA (1)...(19): siRNA sense strand
aguaugaggugucccauga

SEQ ID NO: 1421787 - RNA, 19 nt, Homo sapiens
  misc_RNA (1)...(19): siRNA sense strand
gaagagacgcaguuauaag

SEQ ID NO: 1421788 - RNA, 19 nt, Homo sapiens
  misc_RNA (1)...(19): siRNA sense strand
gagacaaggccucuaaagu

SEQ ID NO: 1421789 - RNA, 19 nt, Homo sapiens
  misc_RNA (1)...(19): siRNA sense strand
ggucugggauuacgacucu

SEQ ID NO: 1421790 - RNA, 19 nt, Homo sapiens
  misc_RNA (1)...(19): siRNA sense strand
ccggaucccucccaaguau

SEQ ID NO: 1421791 - RNA, 19 nt, Homo sapiens
  misc_RNA (1)...(19): siRNA sense strand
ugaggugucccaugacuuu

SEQ ID NO: 1421792 - RNA, 19 nt, Homo sapiens
  misc_RNA (1)...(19): siRNA sense strand
gaggaaagcacgacuucau

SEQ ID NO: 1421793 - RNA, 19 nt, Homo sapiens
  misc_RNA (1)...(19): siRNA sense strand
cgggaaagccucucaauac

SEQ ID NO: 1421794 - RNA, 19 nt, Homo sapiens
  misc_RNA (1)...(19): siRNA sense strand
uuacgacucucgaggaaag

SEQ ID NO: 1421795 - RNA, 19 nt, Homo sapiens
  misc_RNA (1)...(19): siRNA sense strand
agaagagacgcaguuauaa

SEQ ID NO: 1421796 - RNA, 19 nt, Homo sapiens
  misc_RNA (1)...(19): siRNA sense strand
gcagaagagacgcaguuau

SEQ ID NO: 1421797 - RNA, 19 nt, Homo sapiens
  misc_RNA (1)...(19): siRNA sense strand
ccaaauacaagcagaagag

SEQ ID NO: 1421798 - RNA, 19 nt, Homo sapiens
  misc_RNA (1)...(19): siRNA sense strand
gcccgcugcugcucaaguu

SEQ ID NO: 1421799 - RNA, 19 nt, Homo sapiens
  misc_RNA (1)...(19): siRNA sense strand
aagagacgcaguuauaaga

SEQ ID NO: 1421800 - RNA, 19 nt, Homo sapiens
  misc_RNA (1)...(19): siRNA sense strand
ggacgacaaggaccucuuc

SEQ ID NO: 1421801 - RNA, 19 nt, Homo sapiens
  misc_RNA (1)...(19): siRNA sense strand
gcuggcaaguccaccauca

SEQ ID NO: 1421802 - RNA, 19 nt, Homo sapiens
  misc_RNA (1)...(19): siRNA sense strand
ggagacaaggccucuaaag

SEQ ID NO: 1421803 - RNA, 19 nt, Homo sapiens
  misc_RNA (1)...(19): siRNA sense strand
gagacgcaguuauaagaac

SEQ ID NO: 1421804 - RNA, 19 nt, Homo sapiens
  misc_RNA (1)...(19): siRNA sense strand
gcugucaggaggacgauuu

SEQ ID NO: 1421805 - RNA, 19 nt, Homo sapiens
  misc_RNA (1)...(19): siRNA sense strand
ggaucccucccaaguauga

SEQ ID NO: 1421806 - RNA, 19 nt, Homo sapiens
  misc_RNA (1)...(19): siRNA sense strand
uucaaagucucucugaguu

SEQ ID NO: 1421807 - RNA, 19 nt, Homo sapiens
  misc_RNA (1)...(19): siRNA sense strand
ccgggaaagccucucaaua

SEQ ID NO: 1421808 - RNA, 19 nt, Homo sapiens
  misc_RNA (1)...(19): siRNA sense strand
cgacuucaucggagaauuc

SEQ ID NO: 1421809 - RNA, 19 nt, Homo sapiens
  misc_RNA (1)...(19): siRNA sense strand
ccuaccagccgaacgagua

SEQ ID NO: 1421810 - RNA, 19 nt, Homo sapiens
  misc_RNA (1)...(19): siRNA sense strand
ugacuuugccaucaauuuc

SEQ ID NO: 1421811 - RNA, 19 nt, Homo sapiens
  misc_RNA (1)...(19): siRNA sense strand
gcuugcagcugguguacag

SEQ ID NO: 1421812 - RNA, 19 nt, Homo sapiens
  misc_RNA (1)...(19): siRNA sense strand
ggaguacuacagccacaga

SEQ ID NO: 1421813 - RNA, 19 nt, Homo sapiens
  misc_RNA (1)...(19): siRNA sense strand
cggagguggugaagaacaa

SEQ ID NO: 1421814 - RNA, 19 nt, Homo sapiens
  misc_RNA (1)...(19): siRNA sense strand
gcacgacuucaucggagaa

SEQ ID NO: 1421815 - RNA, 19 nt, Homo sapiens
  misc_RNA (1)...(19): siRNA sense strand
caaauacaagcagaagaga

SEQ ID NO: 1421816 - RNA, 19 nt, Homo sapiens
  misc_RNA (1)...(19): siRNA sense strand
gaggagagcaccgggaaag

SEQ ID NO: 1421817 - RNA, 19 nt, Homo sapiens
  misc_RNA (1)...(19): siRNA sense strand
ugaggacgaugagugugaa

SEQ ID NO: 1421818 - RNA, 19 nt, Homo sapiens
  misc_RNA (1)...(19): siRNA sense strand
cguccuggcugaccucaag

SEQ ID NO: 1421819 - RNA, 19 nt, Homo sapiens
  misc_RNA (1)...(19): siRNA sense strand
ggacuaugacagugacaag

SEQ ID NO: 1421820 - RNA, 19 nt, Homo sapiens
  misc_RNA (1)...(19): siRNA sense strand
gcugcucccugcacuacau

SEQ ID NO: 1421821 - RNA, 19 nt, Homo sapiens
  misc_RNA (1)...(19): siRNA sense strand
ggugugggaggccuucaaa

SEQ ID NO: 1421822 - RNA, 19 nt, Homo sapiens
  misc_RNA (1)...(19): siRNA sense strand
ccaugacuuugccaucaau

SEQ ID NO: 1421823 - RNA, 19 nt, Homo sapiens
  misc_RNA (1)...(19): siRNA sense strand
ugacuucaccgccuccaau

SEQ ID NO: 1421824 - RNA, 19 nt, Homo sapiens
  misc_RNA (1)...(19): siRNA sense strand
ugggaggccuucaaagucu

SEQ ID NO: 1421825 - RNA, 19 nt, Homo sapiens
  misc_RNA (1)...(19): siRNA sense strand
cagccugcaucccguguuc

SEQ ID NO: 1421826 - RNA, 19 nt, Homo sapiens
  misc_RNA (1)...(19): siRNA sense strand
uggcugaccucaaguucca

SEQ ID NO: 1421827 - RNA, 19 nt, Homo sapiens
  misc_RNA (1)...(19): siRNA sense strand
acuccuuccuggacuauau

SEQ ID NO: 1421828 - RNA, 19 nt, Homo sapiens
  misc_RNA (1)...(19): siRNA sense strand
ggcagauuguggcccagaa

SEQ ID NO: 1421829 - RNA, 19 nt, Homo sapiens
  misc_RNA (1)...(19): siRNA sense strand
caagagguuuuccgcuuug

SEQ ID NO: 1421830 - RNA, 19 nt, Homo sapiens
  misc_RNA (1)...(19): siRNA sense strand
ucccaugacuuugccauca

SEQ ID NO: 1421831 - RNA, 19 nt, Homo sapiens
  misc_RNA (1)...(19): siRNA sense strand
ggaagcuggacgacaagga

SEQ ID NO: 1421832 - RNA, 19 nt, Homo sapiens
  misc_RNA (1)...(19): siRNA sense strand
aaggaccucuucagcaagu

SEQ ID NO: 1421833 - RNA, 19 nt, Homo sapiens
  misc_RNA (1)...(19): siRNA sense strand
gcaggaacgcuggcaaguc

SEQ ID NO: 1421834 - RNA, 19 nt, Homo sapiens
  misc_RNA (1)...(19): siRNA sense strand
ggugaucgccgaggacauc

SEQ ID NO: 1421835 - RNA, 19 nt, Homo sapiens
  misc_RNA (1)...(19): siRNA sense strand
ggagaugcagaaggccuuu

SEQ ID NO: 1421836 - RNA, 19 nt, Homo sapiens
  misc_RNA (1)...(19): siRNA sense strand
aagcagaagagacgcaguu

SEQ ID NO: 1421837 - RNA, 19 nt, Homo sapiens
  misc_RNA (1)...(19): siRNA sense strand
gcccauguccaucaucauc

SEQ ID NO: 1421838 - RNA, 19 nt, Homo sapiens
  misc_RNA (1)...(19): siRNA sense strand
acaagagguuuuccgcuuu

SEQ ID NO: 1421839 - RNA, 19 nt, Homo sapiens
  misc_RNA (1)...(19): siRNA sense strand
cgagaucugccaggacuau

SEQ ID NO: 1421840 - RNA, 19 nt, Homo sapiens
  misc_RNA (1)...(19): siRNA sense strand
gugggaggccuucaaaguc

SEQ ID NO: 1421841 - RNA, 19 nt, Homo sapiens
  misc_RNA (1)...(19): siRNA sense strand
aauacuacauccugcugau

SEQ ID NO: 1421842 - RNA, 19 nt, Homo sapiens
  misc_RNA (1)...(19): siRNA sense strand
gcaccgggaaagccucuca

SEQ ID NO: 1421843 - RNA, 19 nt, Homo sapiens
  misc_RNA (1)...(19): siRNA sense strand
cccaugacuuugccaucaa

SEQ ID NO: 1421844 - RNA, 19 nt, Homo sapiens
  misc_RNA (1)...(19): siRNA sense strand
ucuucacgguggacuacua

SEQ ID NO: 1421845 - RNA, 19 nt, Homo sapiens
  misc_RNA (1)...(19): siRNA sense strand
caccguggccauugacuuc

SEQ ID NO: 1421846 - RNA, 19 nt, Homo sapiens
  misc_RNA (1)...(19): siRNA sense strand
ugacagugacaagagguuu

SEQ ID NO: 1421847 - RNA, 19 nt, Homo sapiens
  misc_RNA (1)...(19): siRNA sense strand
gccaggacuaugacaguga

SEQ ID NO: 1421848 - RNA, 19 nt, Homo sapiens
  misc_RNA (1)...(19): siRNA sense strand
ucaaagucucucugaguuc

SEQ ID NO: 1421849 - RNA, 19 nt, Homo sapiens
  misc_RNA (1)...(19): siRNA sense strand
uccgggacaucguacaguu

SEQ ID NO: 1421850 - RNA, 19 nt, Homo sapiens
  misc_RNA (1)...(19): siRNA sense strand
gguggaggccuaccagaac

SEQ ID NO: 1421851 - RNA, 19 nt, Homo sapiens
  misc_RNA (1)...(19): siRNA sense strand
gacuuugccaucaauuuca

SEQ ID NO: 1421852 - RNA, 19 nt, Homo sapiens
  misc_RNA (1)...(19): siRNA sense strand
uaugaggugucccaugacu

SEQ ID NO: 1421853 - RNA, 19 nt, Homo sapiens
  misc_RNA (1)...(19): siRNA sense strand
caaaguggauaaacuagua

SEQ ID NO: 1421854 - RNA, 19 nt, Homo sapiens
  misc_RNA (1)...(19): siRNA sense strand
gcaagaaugugugcccuua

SEQ ID NO: 1421855 - RNA, 19 nt, Homo sapiens
  misc_RNA (1)...(19): siRNA sense strand
gaaguuaccauuugauuug

SEQ ID NO: 1421856 - RNA, 19 nt, Homo sapiens
  misc_RNA (1)...(19): siRNA sense strand
gaacuagauugcuugauca

SEQ ID NO: 1421857 - RNA, 19 nt, Homo sapiens
  misc_RNA (1)...(19): siRNA sense strand
ggucucugcugucuucuua

SEQ ID NO: 1421858 - RNA, 19 nt, Homo sapiens
  misc_RNA (1)...(19): siRNA sense strand
gcgagaggcugucaguaaa

SEQ ID NO: 1421859 - RNA, 19 nt, Homo sapiens
  misc_RNA (1)...(19): siRNA sense strand
gcaguauauuccaaagaua

SEQ ID NO: 1421860 - RNA, 19 nt, Homo sapiens
  misc_RNA (1)...(19): siRNA sense strand
gauaaacuaguacgagaua

SEQ ID NO: 1421861 - RNA, 19 nt, Homo sapiens
  misc_RNA (1)...(19): siRNA sense strand
caaacuggaugaacuagau

SEQ ID NO: 1421862 - RNA, 19 nt, Homo sapiens
  misc_RNA (1)...(19): siRNA sense strand
ucacagugcuauuacuuug

SEQ ID NO: 1421863 - RNA, 19 nt, Homo sapiens
  misc_RNA (1)...(19): siRNA sense strand
gcaccaaaguggauaaacu

SEQ ID NO: 1421864 - RNA, 19 nt, Homo sapiens
  misc_RNA (1)...(19): siRNA sense strand
ugucagaaguuaccauuug

SEQ ID NO: 1421865 - RNA, 19 nt, Homo sapiens
  misc_RNA (1)...(19): siRNA sense strand
uggcauaugcuuuggauua

SEQ ID NO: 1421866 - RNA, 19 nt, Homo sapiens
  misc_RNA (1)...(19): siRNA sense strand
gaaugugugcccuuaauga

SEQ ID NO: 1421867 - RNA, 19 nt, Homo sapiens
  misc_RNA (1)...(19): siRNA sense strand
cauaugcuuuggauuauug

SEQ ID NO: 1421868 - RNA, 19 nt, Homo sapiens
  misc_RNA (1)...(19): siRNA sense strand
ugaacuagauugcuugauc

SEQ ID NO: 1421869 - RNA, 19 nt, Homo sapiens
  misc_RNA (1)...(19): siRNA sense strand
gaaacaugaugagcaagga

SEQ ID NO: 1421870 - RNA, 19 nt, Homo sapiens
  misc_RNA (1)...(19): siRNA sense strand
uaggugaucuucagcuuug

SEQ ID NO: 1421871 - RNA, 19 nt, Homo sapiens
  misc_RNA (1)...(19): siRNA sense strand
gagaggcugucaguaaaga

SEQ ID NO: 1421872 - RNA, 19 nt, Homo sapiens
  misc_RNA (1)...(19): siRNA sense strand
gcauaugcuuuggauuauu

SEQ ID NO: 1421873 - RNA, 19 nt, Homo sapiens
  misc_RNA (1)...(19): siRNA sense strand
cuagauugcuugaucaaag

SEQ ID NO: 1421874 - RNA, 19 nt, Homo sapiens
  misc_RNA (1)...(19): siRNA sense strand
guuagcaucuuagcaguau

SEQ ID NO: 1421875 - RNA, 19 nt, Homo sapiens
  misc_RNA (1)...(19): siRNA sense strand
gagcacuccuugagcuguu

SEQ ID NO: 1421876 - RNA, 19 nt, Homo sapiens
  misc_RNA (1)...(19): siRNA sense strand
ugaaaagugucagaaguua

SEQ ID NO: 1421877 - RNA, 19 nt, Homo sapiens
  misc_RNA (1)...(19): siRNA sense strand
ggucacagguacuagucuu

SEQ ID NO: 1421878 - RNA, 19 nt, Homo sapiens
  misc_RNA (1)...(19): siRNA sense strand
gucagaaguuaccauuuga

SEQ ID NO: 1421879 - RNA, 19 nt, Homo sapiens
  misc_RNA (1)...(19): siRNA sense strand
ggcauaugcuuuggauuau

SEQ ID NO: 1421880 - RNA, 19 nt, Homo sapiens
  misc_RNA (1)...(19): siRNA sense strand
acagugcuauuacuuugaa

SEQ ID NO: 1421881 - RNA, 19 nt, Homo sapiens
  misc_RNA (1)...(19): siRNA sense strand
caccaaaguggauaaacua

SEQ ID NO: 1421882 - RNA, 19 nt, Homo sapiens
  misc_RNA (1)...(19): siRNA sense strand
gacggucacagugcuauua

SEQ ID NO: 1421883 - RNA, 19 nt, Homo sapiens
  misc_RNA (1)...(19): siRNA sense strand
aagaaugugugcccuuaau

SEQ ID NO: 1421884 - RNA, 19 nt, Homo sapiens
  misc_RNA (1)...(19): siRNA sense strand
uggaugaacuagauugcuu

SEQ ID NO: 1421885 - RNA, 19 nt, Homo sapiens
  misc_RNA (1)...(19): siRNA sense strand
cagaaguuaccauuugauu

SEQ ID NO: 1421886 - RNA, 19 nt, Homo sapiens
  misc_RNA (1)...(19): siRNA sense strand
gaagcgagaggcugucagu

SEQ ID NO: 1421887 - RNA, 19 nt, Homo sapiens
  misc_RNA (1)...(19): siRNA sense strand
ggucacagugcuauuacuu

SEQ ID NO: 1421888 - RNA, 19 nt, Homo sapiens
  misc_RNA (1)...(19): siRNA sense strand
ccaaagauaauuacaaacg

SEQ ID NO: 1421889 - RNA, 19 nt, Homo sapiens
  misc_RNA (1)...(19): siRNA sense strand
aaacccugcugauucugaa

SEQ ID NO: 1421890 - RNA, 19 nt, Homo sapiens
  misc_RNA (1)...(19): siRNA sense strand
gcaaacuggaugaacuaga

SEQ ID NO: 1421891 - RNA, 19 nt, Homo sapiens
  misc_RNA (1)...(19): siRNA sense strand
caagaaugugugcccuuaa

SEQ ID NO: 1421892 - RNA, 19 nt, Homo sapiens
  misc_RNA (1)...(19): siRNA sense strand
caccaucaccaacaacauu

SEQ ID NO: 1421893 - RNA, 19 nt, Homo sapiens
  misc_RNA (1)...(19): siRNA sense strand
gagcgacuuugaucaccau

SEQ ID NO: 1421894 - RNA, 19 nt, Homo sapiens
  misc_RNA (1)...(19): siRNA sense strand
gauagcaccaaaguggaua

SEQ ID NO: 1421895 - RNA, 19 nt, Homo sapiens
  misc_RNA (1)...(19): siRNA sense strand
uguuggaaauuucuugaga

SEQ ID NO: 1421896 - RNA, 19 nt, Homo sapiens
  misc_RNA (1)...(19): siRNA sense strand
uccuugagcuguugaagau

SEQ ID NO: 1421897 - RNA, 19 nt, Homo sapiens
  misc_RNA (1)...(19): siRNA sense strand
gaugaacuagauugcuuga

SEQ ID NO: 1421898 - RNA, 19 nt, Homo sapiens
  misc_RNA (1)...(19): siRNA sense strand
uuucggaacacgaggguua

SEQ ID NO: 1421899 - RNA, 19 nt, Homo sapiens
  misc_RNA (1)...(19): siRNA sense strand
ggccagagcgacuuugauc

SEQ ID NO: 1421900 - RNA, 19 nt, Homo sapiens
  misc_RNA (1)...(19): siRNA sense strand
agcaguauauuccaaagau

SEQ ID NO: 1421901 - RNA, 19 nt, Homo sapiens
  misc_RNA (1)...(19): siRNA sense strand
uuggaaacaugaugagcaa

SEQ ID NO: 1421902 - RNA, 19 nt, Homo sapiens
  misc_RNA (1)...(19): siRNA sense strand
ggauaaacuaguacgagau

SEQ ID NO: 1421903 - RNA, 19 nt, Homo sapiens
  misc_RNA (1)...(19): siRNA sense strand
cuuacuggcuguaccacuu

SEQ ID NO: 1421904 - RNA, 19 nt, Homo sapiens
  misc_RNA (1)...(19): siRNA sense strand
aaacgggucacagguacua

SEQ ID NO: 1421905 - RNA, 19 nt, Homo sapiens
  misc_RNA (1)...(19): siRNA sense strand
uacaaacgggucacaggua

SEQ ID NO: 1421906 - RNA, 19 nt, Homo sapiens
  misc_RNA (1)...(19): siRNA sense strand
gguuagcaucuuagcagua

SEQ ID NO: 1421907 - RNA, 19 nt, Homo sapiens
  misc_RNA (1)...(19): siRNA sense strand
gaacacgaggguuauuuug

SEQ ID NO: 1421908 - RNA, 19 nt, Homo sapiens
  misc_RNA (1)...(19): siRNA sense strand
uagcaucuuagcaguauau

SEQ ID NO: 1421909 - RNA, 19 nt, Homo sapiens
  misc_RNA (1)...(19): siRNA sense strand
ggaacacgaggguuauuuu

SEQ ID NO: 1421910 - RNA, 19 nt, Homo sapiens
  misc_RNA (1)...(19): siRNA sense strand
caggugguauuuguuggaa

SEQ ID NO: 1421911 - RNA, 19 nt, Homo sapiens
  misc_RNA (1)...(19): siRNA sense strand
gaucuucagcuuugcaaac

SEQ ID NO: 1421912 - RNA, 19 nt, Homo sapiens
  misc_RNA (1)...(19): siRNA sense strand
caucuuagcaguauauucc

SEQ ID NO: 1421913 - RNA, 19 nt, Homo sapiens
  misc_RNA (1)...(19): siRNA sense strand
ugaaaacccugcugauucu

SEQ ID NO: 1421914 - RNA, 19 nt, Homo sapiens
  misc_RNA (1)...(19): siRNA sense strand
aguacgagauauuuaugga

SEQ ID NO: 1421915 - RNA, 19 nt, Homo sapiens
  misc_RNA (1)...(19): siRNA sense strand
gcugggcuguggcuucaag

SEQ ID NO: 1421916 - RNA, 19 nt, Homo sapiens
  misc_RNA (1)...(19): siRNA sense strand
ggacggucacagugcuauu

SEQ ID NO: 1421917 - RNA, 19 nt, Homo sapiens
  misc_RNA (1)...(19): siRNA sense strand
uagauugcuugaucaaagg

SEQ ID NO: 1421918 - RNA, 19 nt, Homo sapiens
  misc_RNA (1)...(19): siRNA sense strand
agcgagaggcugucaguaa

SEQ ID NO: 1421919 - RNA, 19 nt, Homo sapiens
  misc_RNA (1)...(19): siRNA sense strand
uuuggucucugcugucuuc

SEQ ID NO: 1421920 - RNA, 19 nt, Homo sapiens
  misc_RNA (1)...(19): siRNA sense strand
cggaacacgaggguuauuu

SEQ ID NO: 1421921 - RNA, 19 nt, Homo sapiens
  misc_RNA (1)...(19): siRNA sense strand
ucguggagauagcaccaaa

SEQ ID NO: 1421922 - RNA, 19 nt, Homo sapiens
  misc_RNA (1)...(19): siRNA sense strand
ccaaaguggauaaacuagu

SEQ ID NO: 1421923 - RNA, 19 nt, Homo sapiens
  misc_RNA (1)...(19): siRNA sense strand
gucacagugcuauuacuuu

SEQ ID NO: 1421924 - RNA, 19 nt, Homo sapiens
  misc_RNA (1)...(19): siRNA sense strand
guggagauagcaccaaagu

SEQ ID NO: 1421925 - RNA, 19 nt, Homo sapiens
  misc_RNA (1)...(19): siRNA sense strand
gagaagcgagaggcuguca

SEQ ID NO: 1421926 - RNA, 19 nt, Homo sapiens
  misc_RNA (1)...(19): siRNA sense strand
aaugugugcccuuaaugaa

SEQ ID NO: 1421927 - RNA, 19 nt, Homo sapiens
  misc_RNA (1)...(19): siRNA sense strand
cucaauagcaagaaugugu

SEQ ID NO: 1421928 - RNA, 19 nt, Homo sapiens
  misc_RNA (1)...(19): siRNA sense strand
aaacuggaugaacuagauu

SEQ ID NO: 1421929 - RNA, 19 nt, Homo sapiens
  misc_RNA (1)...(19): siRNA sense strand
caaaguggauaaacuagua

SEQ ID NO: 1421930 - RNA, 19 nt, Homo sapiens
  misc_RNA (1)...(19): siRNA sense strand
gcaagaaugugugcccuua

SEQ ID NO: 1421931 - RNA, 19 nt, Homo sapiens
  misc_RNA (1)...(19): siRNA sense strand
gcgagaggcugucaguaaa

SEQ ID NO: 1421932 - RNA, 19 nt, Homo sapiens
  misc_RNA (1)...(19): siRNA sense strand
gauaaacuaguacgagaua

SEQ ID NO: 1421933 - RNA, 19 nt, Homo sapiens
  misc_RNA (1)...(19): siRNA sense strand
gcaccaaaguggauaaacu

SEQ ID NO: 1421934 - RNA, 19 nt, Homo sapiens
  misc_RNA (1)...(19): siRNA sense strand
uggcauaugcuuuggauua

SEQ ID NO: 1421935 - RNA, 19 nt, Homo sapiens
  misc_RNA (1)...(19): siRNA sense strand
gaaugugugcccuuaauga

SEQ ID NO: 1421936 - RNA, 19 nt, Homo sapiens
  misc_RNA (1)...(19): siRNA sense strand
cauaugcuuuggauuauug

SEQ ID NO: 1421937 - RNA, 19 nt, Homo sapiens
  misc_RNA (1)...(19): siRNA sense strand
gaaacaugaugagcaagga

SEQ ID NO: 1421938 - RNA, 19 nt, Homo sapiens
  misc_RNA (1)...(19): siRNA sense strand
gagaggcugucaguaaaga

SEQ ID NO: 1421939 - RNA, 19 nt, Homo sapiens
  misc_RNA (1)...(19): siRNA sense strand
gcauaugcuuuggauuauu

SEQ ID NO: 1421940 - RNA, 19 nt, Homo sapiens
  misc_RNA (1)...(19): siRNA sense strand
gagcacuccuugagcuguu

SEQ ID NO: 1421941 - RNA, 19 nt, Homo sapiens
  misc_RNA (1)...(19): siRNA sense strand
ggcauaugcuuuggauuau

SEQ ID NO: 1421942 - RNA, 19 nt, Homo sapiens
  misc_RNA (1)...(19): siRNA sense strand
caccaaaguggauaaacua

SEQ ID NO: 1421943 - RNA, 19 nt, Homo sapiens
  misc_RNA (1)...(19): siRNA sense strand
aagaaugugugcccuuaau

SEQ ID NO: 1421944 - RNA, 19 nt, Homo sapiens
  misc_RNA (1)...(19): siRNA sense strand
gaagcgagaggcugucagu

SEQ ID NO: 1421945 - RNA, 19 nt, Homo sapiens
  misc_RNA (1)...(19): siRNA sense strand
gagcgacuuugaucaccau

SEQ ID NO: 1421946 - RNA, 19 nt, Homo sapiens
  misc_RNA (1)...(19): siRNA sense strand
caagaaugugugcccuuaa

SEQ ID NO: 1421947 - RNA, 19 nt, Homo sapiens
  misc_RNA (1)...(19): siRNA sense strand
caccaucaccaacaacauu

SEQ ID NO: 1421948 - RNA, 19 nt, Homo sapiens
  misc_RNA (1)...(19): siRNA sense strand
gauagcaccaaaguggaua

SEQ ID NO: 1421949 - RNA, 19 nt, Homo sapiens
  misc_RNA (1)...(19): siRNA sense strand
uguuggaaauuucuugaga

SEQ ID NO: 1421950 - RNA, 19 nt, Homo sapiens
  misc_RNA (1)...(19): siRNA sense strand
uccuugagcuguugaagau

SEQ ID NO: 1421951 - RNA, 19 nt, Homo sapiens
  misc_RNA (1)...(19): siRNA sense strand
ggccagagcgacuuugauc

SEQ ID NO: 1421952 - RNA, 19 nt, Homo sapiens
  misc_RNA (1)...(19): siRNA sense strand
uuucggaacacgaggguua

SEQ ID NO: 1421953 - RNA, 19 nt, Homo sapiens
  misc_RNA (1)...(19): siRNA sense strand
uuggaaacaugaugagcaa

SEQ ID NO: 1421954 - RNA, 19 nt, Homo sapiens
  misc_RNA (1)...(19): siRNA sense strand
ggauaaacuaguacgagau

SEQ ID NO: 1421955 - RNA, 19 nt, Homo sapiens
  misc_RNA (1)...(19): siRNA sense strand
gaacacgaggguuauuuug

SEQ ID NO: 1421956 - RNA, 19 nt, Homo sapiens
  misc_RNA (1)...(19): siRNA sense strand
caggugguauuuguuggaa

SEQ ID NO: 1421957 - RNA, 19 nt, Homo sapiens
  misc_RNA (1)...(19): siRNA sense strand
ggaacacgaggguuauuuu

SEQ ID NO: 1421958 - RNA, 19 nt, Homo sapiens
  misc_RNA (1)...(19): siRNA sense strand
aguacgagauauuuaugga

SEQ ID NO: 1421959 - RNA, 19 nt, Homo sapiens
  misc_RNA (1)...(19): siRNA sense strand
gcugggcuguggcuucaag

SEQ ID NO: 1421960 - RNA, 19 nt, Homo sapiens
  misc_RNA (1)...(19): siRNA sense strand
agcgagaggcugucaguaa

SEQ ID NO: 1421961 - RNA, 19 nt, Homo sapiens
  misc_RNA (1)...(19): siRNA sense strand
ucguggagauagcaccaaa

SEQ ID NO: 1421962 - RNA, 19 nt, Homo sapiens
  misc_RNA (1)...(19): siRNA sense strand
cggaacacgaggguuauuu

SEQ ID NO: 1421963 - RNA, 19 nt, Homo sapiens
  misc_RNA (1)...(19): siRNA sense strand
ccaaaguggauaaacuagu

SEQ ID NO: 1421964 - RNA, 19 nt, Homo sapiens
  misc_RNA (1)...(19): siRNA sense strand
guggagauagcaccaaagu

SEQ ID NO: 1421965 - RNA, 19 nt, Homo sapiens
  misc_RNA (1)...(19): siRNA sense strand
gagaagcgagaggcuguca

SEQ ID NO: 1421966 - RNA, 19 nt, Homo sapiens
  misc_RNA (1)...(19): siRNA sense strand
aaugugugcccuuaaugaa

SEQ ID NO: 1421967 - RNA, 19 nt, Homo sapiens
  misc_RNA (1)...(19): siRNA sense strand
cucaauagcaagaaugugu

SEQ ID NO: 1421968 - RNA, 19 nt, Homo sapiens
  misc_RNA (1)...(19): siRNA sense strand
caaaguggauaaacuagua

SEQ ID NO: 1421969 - RNA, 19 nt, Homo sapiens
  misc_RNA (1)...(19): siRNA sense strand
gcaagaaugugugcccuua

SEQ ID NO: 1421970 - RNA, 19 nt, Homo sapiens
  misc_RNA (1)...(19): siRNA sense strand
ggaaguaccugaccuccaa

SEQ ID NO: 1421971 - RNA, 19 nt, Homo sapiens
  misc_RNA (1)...(19): siRNA sense strand
gaaguuaccauuugauuug

SEQ ID NO: 1421972 - RNA, 19 nt, Homo sapiens
  misc_RNA (1)...(19): siRNA sense strand
gaacuagauugcuugauca

SEQ ID NO: 1421973 - RNA, 19 nt, Homo sapiens
  misc_RNA (1)...(19): siRNA sense strand
ggucucugcugucuucuua

SEQ ID NO: 1421974 - RNA, 19 nt, Homo sapiens
  misc_RNA (1)...(19): siRNA sense strand
agacaucacugcugaagaa

SEQ ID NO: 1421975 - RNA, 19 nt, Homo sapiens
  misc_RNA (1)...(19): siRNA sense strand
gcgagaggcugucaguaaa

SEQ ID NO: 1421976 - RNA, 19 nt, Homo sapiens
  misc_RNA (1)...(19): siRNA sense strand
gcaguauauuccaaagaua

SEQ ID NO: 1421977 - RNA, 19 nt, Homo sapiens
  misc_RNA (1)...(19): siRNA sense strand
gauaaacuaguacgagaua

SEQ ID NO: 1421978 - RNA, 19 nt, Homo sapiens
  misc_RNA (1)...(19): siRNA sense strand
caaacuggaugaacuagau

SEQ ID NO: 1421979 - RNA, 19 nt, Homo sapiens
  misc_RNA (1)...(19): siRNA sense strand
caucacugcugaagaagaa

SEQ ID NO: 1421980 - RNA, 19 nt, Homo sapiens
  misc_RNA (1)...(19): siRNA sense strand
ucacagugcuauuacuuug

SEQ ID NO: 1421981 - RNA, 19 nt, Homo sapiens
  misc_RNA (1)...(19): siRNA sense strand
gcaccaaaguggauaaacu

SEQ ID NO: 1421982 - RNA, 19 nt, Homo sapiens
  misc_RNA (1)...(19): siRNA sense strand
ugucagaaguuaccauuug

SEQ ID NO: 1421983 - RNA, 19 nt, Homo sapiens
  misc_RNA (1)...(19): siRNA sense strand
uggcauaugcuuuggauua

SEQ ID NO: 1421984 - RNA, 19 nt, Homo sapiens
  misc_RNA (1)...(19): siRNA sense strand
gaaugugugcccuuaauga

SEQ ID NO: 1421985 - RNA, 19 nt, Homo sapiens
  misc_RNA (1)...(19): siRNA sense strand
cauaugcuuuggauuauug

SEQ ID NO: 1421986 - RNA, 19 nt, Homo sapiens
  misc_RNA (1)...(19): siRNA sense strand
uggucaagcugguauauuu

SEQ ID NO: 1421987 - RNA, 19 nt, Homo sapiens
  misc_RNA (1)...(19): siRNA sense strand
ugaacuagauugcuugauc

SEQ ID NO: 1421988 - RNA, 19 nt, Homo sapiens
  misc_RNA (1)...(19): siRNA sense strand
gaaacaugaugagcaagga

SEQ ID NO: 1421989 - RNA, 19 nt, Homo sapiens
  misc_RNA (1)...(19): siRNA sense strand
uaggugaucuucagcuuug

SEQ ID NO: 1421990 - RNA, 19 nt, Homo sapiens
  misc_RNA (1)...(19): siRNA sense strand
gagaggcugucaguaaaga

SEQ ID NO: 1421991 - RNA, 19 nt, Homo sapiens
  misc_RNA (1)...(19): siRNA sense strand
gcauaugcuuuggauuauu

SEQ ID NO: 1421992 - RNA, 19 nt, Homo sapiens
  misc_RNA (1)...(19): siRNA sense strand
cuagauugcuugaucaaag

SEQ ID NO: 1421993 - RNA, 19 nt, Homo sapiens
  misc_RNA (1)...(19): siRNA sense strand
guuagcaucuuagcaguau

SEQ ID NO: 1421994 - RNA, 19 nt, Homo sapiens
  misc_RNA (1)...(19): siRNA sense strand
gagcacuccuugagcuguu

SEQ ID NO: 1421995 - RNA, 19 nt, Homo sapiens
  misc_RNA (1)...(19): siRNA sense strand
ugaaaagugucagaaguua

SEQ ID NO: 1421996 - RNA, 19 nt, Homo sapiens
  misc_RNA (1)...(19): siRNA sense strand
ggucacagguacuagucuu

SEQ ID NO: 1421997 - RNA, 19 nt, Homo sapiens
  misc_RNA (1)...(19): siRNA sense strand
gucagaaguuaccauuuga

SEQ ID NO: 1421998 - RNA, 19 nt, Homo sapiens
  misc_RNA (1)...(19): siRNA sense strand
ggcauaugcuuuggauuau

SEQ ID NO: 1421999 - RNA, 19 nt, Homo sapiens
  misc_RNA (1)...(19): siRNA sense strand
acagugcuauuacuuugaa

SEQ ID NO: 1422000 - RNA, 19 nt, Homo sapiens
  misc_RNA (1)...(19): siRNA sense strand
caccaaaguggauaaacua

SEQ ID NO: 1422001 - RNA, 19 nt, Homo sapiens
  misc_RNA (1)...(19): siRNA sense strand
gacggucacagugcuauua

SEQ ID NO: 1422002 - RNA, 19 nt, Homo sapiens
  misc_RNA (1)...(19): siRNA sense strand
aagaaugugugcccuuaau

SEQ ID NO: 1422003 - RNA, 19 nt, Homo sapiens
  misc_RNA (1)...(19): siRNA sense strand
uggaugaacuagauugcuu

SEQ ID NO: 1422004 - RNA, 19 nt, Homo sapiens
  misc_RNA (1)...(19): siRNA sense strand
ugaagaagaagaggaagaa

SEQ ID NO: 1422005 - RNA, 19 nt, Homo sapiens
  misc_RNA (1)...(19): siRNA sense strand
agaagaagaggaagaagug

SEQ ID NO: 1422006 - RNA, 19 nt, Homo sapiens
  misc_RNA (1)...(19): siRNA sense strand
cagaaguuaccauuugauu

SEQ ID NO: 1422007 - RNA, 19 nt, Homo sapiens
  misc_RNA (1)...(19): siRNA sense strand
gaagcgagaggcugucagu

SEQ ID NO: 1422008 - RNA, 19 nt, Homo sapiens
  misc_RNA (1)...(19): siRNA sense strand
ggucacagugcuauuacuu

SEQ ID NO: 1422009 - RNA, 19 nt, Homo sapiens
  misc_RNA (1)...(19): siRNA sense strand
ccaaagauaauuacaaacg

SEQ ID NO: 1422010 - RNA, 19 nt, Homo sapiens
  misc_RNA (1)...(19): siRNA sense strand
aaacccugcugauucugaa

SEQ ID NO: 1422011 - RNA, 19 nt, Homo sapiens
  misc_RNA (1)...(19): siRNA sense strand
gaaguggaaagucuuaaaa

SEQ ID NO: 1422012 - RNA, 19 nt, Homo sapiens
  misc_RNA (1)...(19): siRNA sense strand
caagaaugugugcccuuaa

SEQ ID NO: 1422013 - RNA, 19 nt, Homo sapiens
  misc_RNA (1)...(19): siRNA sense strand
caccaucaccaacaacauu

SEQ ID NO: 1422014 - RNA, 19 nt, Homo sapiens
  misc_RNA (1)...(19): siRNA sense strand
gagcgacuuugaucaccau

SEQ ID NO: 1422015 - RNA, 19 nt, Homo sapiens
  misc_RNA (1)...(19): siRNA sense strand
gcaaacuggaugaacuaga

SEQ ID NO: 1422016 - RNA, 19 nt, Homo sapiens
  misc_RNA (1)...(19): siRNA sense strand
gauagcaccaaaguggaua

SEQ ID NO: 1422017 - RNA, 19 nt, Homo sapiens
  misc_RNA (1)...(19): siRNA sense strand
aggaagaaguggaaagucu

SEQ ID NO: 1422018 - RNA, 19 nt, Homo sapiens
  misc_RNA (1)...(19): siRNA sense strand
uguuggaaauuucuugaga

SEQ ID NO: 1422019 - RNA, 19 nt, Homo sapiens
  misc_RNA (1)...(19): siRNA sense strand
guaccugaccuccaaugug

SEQ ID NO: 1422020 - RNA, 19 nt, Homo sapiens
  misc_RNA (1)...(19): siRNA sense strand
uccuugagcuguugaagau

SEQ ID NO: 1422021 - RNA, 19 nt, Homo sapiens
  misc_RNA (1)...(19): siRNA sense strand
gaagaggaagaaguggaaa

SEQ ID NO: 1422022 - RNA, 19 nt, Homo sapiens
  misc_RNA (1)...(19): siRNA sense strand
ccuccaauguggcuuaugg

SEQ ID NO: 1422023 - RNA, 19 nt, Homo sapiens
  misc_RNA (1)...(19): siRNA sense strand
guggaacucuggucaagcu

SEQ ID NO: 1422024 - RNA, 19 nt, Homo sapiens
  misc_RNA (1)...(19): siRNA sense strand
uuucggaacacgaggguua

SEQ ID NO: 1422025 - RNA, 19 nt, Homo sapiens
  misc_RNA (1)...(19): siRNA sense strand
ggccagagcgacuuugauc

SEQ ID NO: 1422026 - RNA, 19 nt, Homo sapiens
  misc_RNA (1)...(19): siRNA sense strand
gaugaacuagauugcuuga

SEQ ID NO: 1422027 - RNA, 19 nt, Homo sapiens
  misc_RNA (1)...(19): siRNA sense strand
agcaguauauuccaaagau

SEQ ID NO: 1422028 - RNA, 19 nt, Homo sapiens
  misc_RNA (1)...(19): siRNA sense strand
uuggaaacaugaugagcaa

SEQ ID NO: 1422029 - RNA, 19 nt, Homo sapiens
  misc_RNA (1)...(19): siRNA sense strand
ggauaaacuaguacgagau

SEQ ID NO: 1422030 - RNA, 19 nt, Homo sapiens
  misc_RNA (1)...(19): siRNA sense strand
cuuacuggcuguaccacuu

SEQ ID NO: 1422031 - RNA, 19 nt, Homo sapiens
  misc_RNA (1)...(19): siRNA sense strand
aaacgggucacagguacua

SEQ ID NO: 1422032 - RNA, 19 nt, Homo sapiens
  misc_RNA (1)...(19): siRNA sense strand
uacaaacgggucacaggua

SEQ ID NO: 1422033 - RNA, 19 nt, Homo sapiens
  misc_RNA (1)...(19): siRNA sense strand
gguuagcaucuuagcagua

SEQ ID NO: 1422034 - RNA, 19 nt, Homo sapiens
  misc_RNA (1)...(19): siRNA sense strand
gaacacgaggguuauuuug

SEQ ID NO: 1422035 - RNA, 19 nt, Homo sapiens
  misc_RNA (1)...(19): siRNA sense strand
agaaguggaaagucuuaaa

SEQ ID NO: 1422036 - RNA, 19 nt, Homo sapiens
  misc_RNA (1)...(19): siRNA sense strand
ugaccuccaauguggcuua

SEQ ID NO: 1422037 - RNA, 19 nt, Homo sapiens
  misc_RNA (1)...(19): siRNA sense strand
gaucuucagcuuugcaaac

SEQ ID NO: 1422038 - RNA, 19 nt, Homo sapiens
  misc_RNA (1)...(19): siRNA sense strand
ggaacacgaggguuauuuu

SEQ ID NO: 1422039 - RNA, 19 nt, Homo sapiens
  misc_RNA (1)...(19): siRNA sense strand
uuaaaagcauucggaagua

SEQ ID NO: 1422040 - RNA, 19 nt, Homo sapiens
  misc_RNA (1)...(19): siRNA sense strand
caggugguauuuguuggaa

SEQ ID NO: 1422041 - RNA, 19 nt, Homo sapiens
  misc_RNA (1)...(19): siRNA sense strand
agaagaggaagaaguggaa

SEQ ID NO: 1422042 - RNA, 19 nt, Homo sapiens
  misc_RNA (1)...(19): siRNA sense strand
caucuuagcaguauauucc

SEQ ID NO: 1422043 - RNA, 19 nt, Homo sapiens
  misc_RNA (1)...(19): siRNA sense strand
uagcaucuuagcaguauau

SEQ ID NO: 1422044 - RNA, 19 nt, Homo sapiens
  misc_RNA (1)...(19): siRNA sense strand
ugaaaacccugcugauucu

SEQ ID NO: 1422045 - RNA, 19 nt, Homo sapiens
  misc_RNA (1)...(19): siRNA sense strand
aguacgagauauuuaugga

SEQ ID NO: 1422046 - RNA, 19 nt, Homo sapiens
  misc_RNA (1)...(19): siRNA sense strand
ggaaagucuuaaaagcauu

SEQ ID NO: 1422047 - RNA, 19 nt, Homo sapiens
  misc_RNA (1)...(19): siRNA sense strand
uagauugcuugaucaaagg

SEQ ID NO: 1422048 - RNA, 19 nt, Homo sapiens
  misc_RNA (1)...(19): siRNA sense strand
agcgagaggcugucaguaa

SEQ ID NO: 1422049 - RNA, 19 nt, Homo sapiens
  misc_RNA (1)...(19): siRNA sense strand
gcugggcuguggcuucaag

SEQ ID NO: 1422050 - RNA, 19 nt, Homo sapiens
  misc_RNA (1)...(19): siRNA sense strand
ggacggucacagugcuauu

SEQ ID NO: 1422051 - RNA, 19 nt, Homo sapiens
  misc_RNA (1)...(19): siRNA sense strand
uuaugggucuacaggcauu

SEQ ID NO: 1422052 - RNA, 19 nt, Homo sapiens
  misc_RNA (1)...(19): siRNA sense strand
gaccuccaauguggcuuau

SEQ ID NO: 1422053 - RNA, 19 nt, Homo sapiens
  misc_RNA (1)...(19): siRNA sense strand
cggaacacgaggguuauuu

SEQ ID NO: 1422054 - RNA, 19 nt, Homo sapiens
  misc_RNA (1)...(19): siRNA sense strand
caaagacaucacugcugaa

SEQ ID NO: 1422055 - RNA, 19 nt, Homo sapiens
  misc_RNA (1)...(19): siRNA sense strand
ucguggagauagcaccaaa

SEQ ID NO: 1422056 - RNA, 19 nt, Homo sapiens
  misc_RNA (1)...(19): siRNA sense strand
uuuggucucugcugucuuc

SEQ ID NO: 1422057 - RNA, 19 nt, Homo sapiens
  misc_RNA (1)...(19): siRNA sense strand
gucacagugcuauuacuuu

SEQ ID NO: 1422058 - RNA, 19 nt, Homo sapiens
  misc_RNA (1)...(19): siRNA sense strand
ccaaaguggauaaacuagu

SEQ ID NO: 1422059 - RNA, 19 nt, Homo sapiens
  misc_RNA (1)...(19): siRNA sense strand
gaagaagaagaggaagaag

SEQ ID NO: 1422060 - RNA, 19 nt, Homo sapiens
  misc_RNA (1)...(19): siRNA sense strand
cugaaggaccugacucugu

SEQ ID NO: 1422061 - RNA, 19 nt, Homo sapiens
  misc_RNA (1)...(19): siRNA sense strand
guggagauagcaccaaagu

SEQ ID NO: 1422062 - RNA, 19 nt, Homo sapiens
  misc_RNA (1)...(19): siRNA sense strand
gacucuguguggacgcaaa

SEQ ID NO: 1422063 - RNA, 19 nt, Homo sapiens
  misc_RNA (1)...(19): siRNA sense strand
aaacuggaugaacuagauu

SEQ ID NO: 1422064 - RNA, 19 nt, Homo sapiens
  misc_RNA (1)...(19): siRNA sense strand
aaugugugcccuuaaugaa

SEQ ID NO: 1422065 - RNA, 19 nt, Homo sapiens
  misc_RNA (1)...(19): siRNA sense strand
cucaauagcaagaaugugu

SEQ ID NO: 1422066 - RNA, 19 nt, Homo sapiens
  misc_RNA (1)...(19): siRNA sense strand
gagaagcgagaggcuguca

SEQ ID NO: 1422067 - RNA, 19 nt, Homo sapiens
  misc_RNA (1)...(19): siRNA sense strand
ggaaguaccugaccuccaa

SEQ ID NO: 1422068 - RNA, 19 nt, Homo sapiens
  misc_RNA (1)...(19): siRNA sense strand
agacaucacugcugaagaa

SEQ ID NO: 1422069 - RNA, 19 nt, Homo sapiens
  misc_RNA (1)...(19): siRNA sense strand
caucacugcugaagaagaa

SEQ ID NO: 1422070 - RNA, 19 nt, Homo sapiens
  misc_RNA (1)...(19): siRNA sense strand
uggucaagcugguauauuu

SEQ ID NO: 1422071 - RNA, 19 nt, Homo sapiens
  misc_RNA (1)...(19): siRNA sense strand
ugaagaagaagaggaagaa

SEQ ID NO: 1422072 - RNA, 19 nt, Homo sapiens
  misc_RNA (1)...(19): siRNA sense strand
agaagaagaggaagaagug

SEQ ID NO: 1422073 - RNA, 19 nt, Homo sapiens
  misc_RNA (1)...(19): siRNA sense strand
gaaguggaaagucuuaaaa

SEQ ID NO: 1422074 - RNA, 19 nt, Homo sapiens
  misc_RNA (1)...(19): siRNA sense strand
aggaagaaguggaaagucu

SEQ ID NO: 1422075 - RNA, 19 nt, Homo sapiens
  misc_RNA (1)...(19): siRNA sense strand
gaagaggaagaaguggaaa

SEQ ID NO: 1422076 - RNA, 19 nt, Homo sapiens
  misc_RNA (1)...(19): siRNA sense strand
ccuccaauguggcuuaugg

SEQ ID NO: 1422077 - RNA, 19 nt, Homo sapiens
  misc_RNA (1)...(19): siRNA sense strand
guaccugaccuccaaugug

SEQ ID NO: 1422078 - RNA, 19 nt, Homo sapiens
  misc_RNA (1)...(19): siRNA sense strand
guggaacucuggucaagcu

SEQ ID NO: 1422079 - RNA, 19 nt, Homo sapiens
  misc_RNA (1)...(19): siRNA sense strand
agaaguggaaagucuuaaa

SEQ ID NO: 1422080 - RNA, 19 nt, Homo sapiens
  misc_RNA (1)...(19): siRNA sense strand
ugaccuccaauguggcuua

SEQ ID NO: 1422081 - RNA, 19 nt, Homo sapiens
  misc_RNA (1)...(19): siRNA sense strand
agaagaggaagaaguggaa

SEQ ID NO: 1422082 - RNA, 19 nt, Homo sapiens
  misc_RNA (1)...(19): siRNA sense strand
uuaaaagcauucggaagua

SEQ ID NO: 1422083 - RNA, 19 nt, Homo sapiens
  misc_RNA (1)...(19): siRNA sense strand
ggaaagucuuaaaagcauu

SEQ ID NO: 1422084 - RNA, 19 nt, Homo sapiens
  misc_RNA (1)...(19): siRNA sense strand
uuaugggucuacaggcauu

SEQ ID NO: 1422085 - RNA, 19 nt, Homo sapiens
  misc_RNA (1)...(19): siRNA sense strand
caaagacaucacugcugaa

SEQ ID NO: 1422086 - RNA, 19 nt, Homo sapiens
  misc_RNA (1)...(19): siRNA sense strand
gaccuccaauguggcuuau

SEQ ID NO: 1422087 - RNA, 19 nt, Homo sapiens
  misc_RNA (1)...(19): siRNA sense strand
gaagaagaagaggaagaag

SEQ ID NO: 1422088 - RNA, 19 nt, Homo sapiens
  misc_RNA (1)...(19): siRNA sense strand
gacucuguguggacgcaaa

SEQ ID NO: 1422089 - RNA, 19 nt, Homo sapiens
  misc_RNA (1)...(19): siRNA sense strand
cugaaggaccugacucugu

SEQ ID NO: 1422090 - RNA, 19 nt, Homo sapiens
  misc_RNA (1)...(19): siRNA sense strand
caaaguggauaaacuagua

SEQ ID NO: 1422091 - RNA, 19 nt, Homo sapiens
  misc_RNA (1)...(19): siRNA sense strand
gcaagaaugugugcccuua

SEQ ID NO: 1422092 - RNA, 19 nt, Homo sapiens
  misc_RNA (1)...(19): siRNA sense strand
gaaguuaccauuugauuug

SEQ ID NO: 1422093 - RNA, 19 nt, Homo sapiens
  misc_RNA (1)...(19): siRNA sense strand
gaacuagauugcuugauca

SEQ ID NO: 1422094 - RNA, 19 nt, Homo sapiens
  misc_RNA (1)...(19): siRNA sense strand
ggucucugcugucuucuua

SEQ ID NO: 1422095 - RNA, 19 nt, Homo sapiens
  misc_RNA (1)...(19): siRNA sense strand
gcgagaggcugucaguaaa

SEQ ID NO: 1422096 - RNA, 19 nt, Homo sapiens
  misc_RNA (1)...(19): siRNA sense strand
gcaguauauuccaaagaua

SEQ ID NO: 1422097 - RNA, 19 nt, Homo sapiens
  misc_RNA (1)...(19): siRNA sense strand
gauaaacuaguacgagaua

SEQ ID NO: 1422098 - RNA, 19 nt, Homo sapiens
  misc_RNA (1)...(19): siRNA sense strand
caaacuggaugaacuagau

SEQ ID NO: 1422099 - RNA, 19 nt, Homo sapiens
  misc_RNA (1)...(19): siRNA sense strand
ucacagugcuauuacuuug

SEQ ID NO: 1422100 - RNA, 19 nt, Homo sapiens
  misc_RNA (1)...(19): siRNA sense strand
gcaccaaaguggauaaacu

SEQ ID NO: 1422101 - RNA, 19 nt, Homo sapiens
  misc_RNA (1)...(19): siRNA sense strand
ugucagaaguuaccauuug

SEQ ID NO: 1422102 - RNA, 19 nt, Homo sapiens
  misc_RNA (1)...(19): siRNA sense strand
uggcauaugcuuuggauua

SEQ ID NO: 1422103 - RNA, 19 nt, Homo sapiens
  misc_RNA (1)...(19): siRNA sense strand
gaaugugugcccuuaauga

SEQ ID NO: 1422104 - RNA, 19 nt, Homo sapiens
  misc_RNA (1)...(19): siRNA sense strand
cauaugcuuuggauuauug

SEQ ID NO: 1422105 - RNA, 19 nt, Homo sapiens
  misc_RNA (1)...(19): siRNA sense strand
ugaacuagauugcuugauc

SEQ ID NO: 1422106 - RNA, 19 nt, Homo sapiens
  misc_RNA (1)...(19): siRNA sense strand
gaaacaugaugagcaagga

SEQ ID NO: 1422107 - RNA, 19 nt, Homo sapiens
  misc_RNA (1)...(19): siRNA sense strand
uaggugaucuucagcuuug

SEQ ID NO: 1422108 - RNA, 19 nt, Homo sapiens
  misc_RNA (1)...(19): siRNA sense strand
gagaggcugucaguaaaga

SEQ ID NO: 1422109 - RNA, 19 nt, Homo sapiens
  misc_RNA (1)...(19): siRNA sense strand
gcauaugcuuuggauuauu

SEQ ID NO: 1422110 - RNA, 19 nt, Homo sapiens
  misc_RNA (1)...(19): siRNA sense strand
cuagauugcuugaucaaag

SEQ ID NO: 1422111 - RNA, 19 nt, Homo sapiens
  misc_RNA (1)...(19): siRNA sense strand
guuagcaucuuagcaguau

SEQ ID NO: 1422112 - RNA, 19 nt, Homo sapiens
  misc_RNA (1)...(19): siRNA sense strand
gagcacuccuugagcuguu

SEQ ID NO: 1422113 - RNA, 19 nt, Homo sapiens
  misc_RNA (1)...(19): siRNA sense strand
ugaaaagugucagaaguua

SEQ ID NO: 1422114 - RNA, 19 nt, Homo sapiens
  misc_RNA (1)...(19): siRNA sense strand
ggucacagguacuagucuu

SEQ ID NO: 1422115 - RNA, 19 nt, Homo sapiens
  misc_RNA (1)...(19): siRNA sense strand
gucagaaguuaccauuuga

SEQ ID NO: 1422116 - RNA, 19 nt, Homo sapiens
  misc_RNA (1)...(19): siRNA sense strand
ggcauaugcuuuggauuau

SEQ ID NO: 1422117 - RNA, 19 nt, Homo sapiens
  misc_RNA (1)...(19): siRNA sense strand
acagugcuauuacuuugaa

SEQ ID NO: 1422118 - RNA, 19 nt, Homo sapiens
  misc_RNA (1)...(19): siRNA sense strand
caccaaaguggauaaacua

SEQ ID NO: 1422119 - RNA, 19 nt, Homo sapiens
  misc_RNA (1)...(19): siRNA sense strand
gacggucacagugcuauua

SEQ ID NO: 1422120 - RNA, 19 nt, Homo sapiens
  misc_RNA (1)...(19): siRNA sense strand
aagaaugugugcccuuaau

SEQ ID NO: 1422121 - RNA, 19 nt, Homo sapiens
  misc_RNA (1)...(19): siRNA sense strand
uggaugaacuagauugcuu

SEQ ID NO: 1422122 - RNA, 19 nt, Homo sapiens
  misc_RNA (1)...(19): siRNA sense strand
cagaaguuaccauuugauu

SEQ ID NO: 1422123 - RNA, 19 nt, Homo sapiens
  misc_RNA (1)...(19): siRNA sense strand
gaagcgagaggcugucagu

SEQ ID NO: 1422124 - RNA, 19 nt, Homo sapiens
  misc_RNA (1)...(19): siRNA sense strand
ggucacagugcuauuacuu

SEQ ID NO: 1422125 - RNA, 19 nt, Homo sapiens
  misc_RNA (1)...(19): siRNA sense strand
ccaaagauaauuacaaacg

SEQ ID NO: 1422126 - RNA, 19 nt, Homo sapiens
  misc_RNA (1)...(19): siRNA sense strand
aaacccugcugauucugaa

SEQ ID NO: 1422127 - RNA, 19 nt, Homo sapiens
  misc_RNA (1)...(19): siRNA sense strand
gcaaacuggaugaacuaga

SEQ ID NO: 1422128 - RNA, 19 nt, Homo sapiens
  misc_RNA (1)...(19): siRNA sense strand
caagaaugugugcccuuaa

SEQ ID NO: 1422129 - RNA, 19 nt, Homo sapiens
  misc_RNA (1)...(19): siRNA sense strand
caccaucaccaacaacauu

SEQ ID NO: 1422130 - RNA, 19 nt, Homo sapiens
  misc_RNA (1)...(19): siRNA sense strand
gagcgacuuugaucaccau

SEQ ID NO: 1422131 - RNA, 19 nt, Homo sapiens
  misc_RNA (1)...(19): siRNA sense strand
gauagcaccaaaguggaua

SEQ ID NO: 1422132 - RNA, 19 nt, Homo sapiens
  misc_RNA (1)...(19): siRNA sense strand
uguuggaaauuucuugaga

SEQ ID NO: 1422133 - RNA, 19 nt, Homo sapiens
  misc_RNA (1)...(19): siRNA sense strand
uccuugagcuguugaagau

SEQ ID NO: 1422134 - RNA, 19 nt, Homo sapiens
  misc_RNA (1)...(19): siRNA sense strand
gaugaacuagauugcuuga

SEQ ID NO: 1422135 - RNA, 19 nt, Homo sapiens
  misc_RNA (1)...(19): siRNA sense strand
uuucggaacacgaggguua

SEQ ID NO: 1422136 - RNA, 19 nt, Homo sapiens
  misc_RNA (1)...(19): siRNA sense strand
ggccagagcgacuuugauc

SEQ ID NO: 1422137 - RNA, 19 nt, Homo sapiens
  misc_RNA (1)...(19): siRNA sense strand
agcaguauauuccaaagau

SEQ ID NO: 1422138 - RNA, 19 nt, Homo sapiens
  misc_RNA (1)...(19): siRNA sense strand
uuggaaacaugaugagcaa

SEQ ID NO: 1422139 - RNA, 19 nt, Homo sapiens
  misc_RNA (1)...(19): siRNA sense strand
ggauaaacuaguacgagau

SEQ ID NO: 1422140 - RNA, 19 nt, Homo sapiens
  misc_RNA (1)...(19): siRNA sense strand
cuuacuggcuguaccacuu

SEQ ID NO: 1422141 - RNA, 19 nt, Homo sapiens
  misc_RNA (1)...(19): siRNA sense strand
aaacgggucacagguacua

SEQ ID NO: 1422142 - RNA, 19 nt, Homo sapiens
  misc_RNA (1)...(19): siRNA sense strand
uacaaacgggucacaggua

SEQ ID NO: 1422143 - RNA, 19 nt, Homo sapiens
  misc_RNA (1)...(19): siRNA sense strand
gguuagcaucuuagcagua

SEQ ID NO: 1422144 - RNA, 19 nt, Homo sapiens
  misc_RNA (1)...(19): siRNA sense strand
gaacacgaggguuauuuug

SEQ ID NO: 1422145 - RNA, 19 nt, Homo sapiens
  misc_RNA (1)...(19): siRNA sense strand
uagcaucuuagcaguauau

SEQ ID NO: 1422146 - RNA, 19 nt, Homo sapiens
  misc_RNA (1)...(19): siRNA sense strand
ggaacacgaggguuauuuu

SEQ ID NO: 1422147 - RNA, 19 nt, Homo sapiens
  misc_RNA (1)...(19): siRNA sense strand
caggugguauuuguuggaa

SEQ ID NO: 1422148 - RNA, 19 nt, Homo sapiens
  misc_RNA (1)...(19): siRNA sense strand
gaucuucagcuuugcaaac

SEQ ID NO: 1422149 - RNA, 19 nt, Homo sapiens
  misc_RNA (1)...(19): siRNA sense strand
caucuuagcaguauauucc

SEQ ID NO: 1422150 - RNA, 19 nt, Homo sapiens
  misc_RNA (1)...(19): siRNA sense strand
ugaaaacccugcugauucu

SEQ ID NO: 1422151 - RNA, 19 nt, Homo sapiens
  misc_RNA (1)...(19): siRNA sense strand
aguacgagauauuuaugga

SEQ ID NO: 1422152 - RNA, 19 nt, Homo sapiens
  misc_RNA (1)...(19): siRNA sense strand
gcugggcuguggcuucaag

SEQ ID NO: 1422153 - RNA, 19 nt, Homo sapiens
  misc_RNA (1)...(19): siRNA sense strand
ggacggucacagugcuauu

SEQ ID NO: 1422154 - RNA, 19 nt, Homo sapiens
  misc_RNA (1)...(19): siRNA sense strand
uagauugcuugaucaaagg

SEQ ID NO: 1422155 - RNA, 19 nt, Homo sapiens
  misc_RNA (1)...(19): siRNA sense strand
agcgagaggcugucaguaa

SEQ ID NO: 1422156 - RNA, 19 nt, Homo sapiens
  misc_RNA (1)...(19): siRNA sense strand
uuuggucucugcugucuuc

SEQ ID NO: 1422157 - RNA, 19 nt, Homo sapiens
  misc_RNA (1)...(19): siRNA sense strand
cggaacacgaggguuauuu

SEQ ID NO: 1422158 - RNA, 19 nt, Homo sapiens
  misc_RNA (1)...(19): siRNA sense strand
ucguggagauagcaccaaa

SEQ ID NO: 1422159 - RNA, 19 nt, Homo sapiens
  misc_RNA (1)...(19): siRNA sense strand
ccaaaguggauaaacuagu

SEQ ID NO: 1422160 - RNA, 19 nt, Homo sapiens
  misc_RNA (1)...(19): siRNA sense strand
gucacagugcuauuacuuu

SEQ ID NO: 1422161 - RNA, 19 nt, Homo sapiens
  misc_RNA (1)...(19): siRNA sense strand
guggagauagcaccaaagu

SEQ ID NO: 1422162 - RNA, 19 nt, Homo sapiens
  misc_RNA (1)...(19): siRNA sense strand
gagaagcgagaggcuguca

SEQ ID NO: 1422163 - RNA, 19 nt, Homo sapiens
  misc_RNA (1)...(19): siRNA sense strand
aaugugugcccuuaaugaa

SEQ ID NO: 1422164 - RNA, 19 nt, Homo sapiens
  misc_RNA (1)...(19): siRNA sense strand
cucaauagcaagaaugugu

SEQ ID NO: 1422165 - RNA, 19 nt, Homo sapiens
  misc_RNA (1)...(19): siRNA sense strand
aaacuggaugaacuagauu

SEQ ID NO: 1422166 - RNA, 19 nt, Homo sapiens
  misc_RNA (1)...(19): siRNA sense strand
caaaguggauaaacuagua

SEQ ID NO: 1422167 - RNA, 19 nt, Homo sapiens
  misc_RNA (1)...(19): siRNA sense strand
gcaagaaugugugcccuua

SEQ ID NO: 1422168 - RNA, 19 nt, Homo sapiens
  misc_RNA (1)...(19): siRNA sense strand
gcgagaggcugucaguaaa

SEQ ID NO: 1422169 - RNA, 19 nt, Homo sapiens
  misc_RNA (1)...(19): siRNA sense strand
gauaaacuaguacgagaua

SEQ ID NO: 1422170 - RNA, 19 nt, Homo sapiens
  misc_RNA (1)...(19): siRNA sense strand
gcaccaaaguggauaaacu

SEQ ID NO: 1422171 - RNA, 19 nt, Homo sapiens
  misc_RNA (1)...(19): siRNA sense strand
uggcauaugcuuuggauua

SEQ ID NO: 1422172 - RNA, 19 nt, Homo sapiens
  misc_RNA (1)...(19): siRNA sense strand
gaaugugugcccuuaauga

SEQ ID NO: 1422173 - RNA, 19 nt, Homo sapiens
  misc_RNA (1)...(19): siRNA sense strand
cauaugcuuuggauuauug

SEQ ID NO: 1422174 - RNA, 19 nt, Homo sapiens
  misc_RNA (1)...(19): siRNA sense strand
gaaacaugaugagcaagga

SEQ ID NO: 1422175 - RNA, 19 nt, Homo sapiens
  misc_RNA (1)...(19): siRNA sense strand
gagaggcugucaguaaaga

SEQ ID NO: 1422176 - RNA, 19 nt, Homo sapiens
  misc_RNA (1)...(19): siRNA sense strand
gcauaugcuuuggauuauu

SEQ ID NO: 1422177 - RNA, 19 nt, Homo sapiens
  misc_RNA (1)...(19): siRNA sense strand
gagcacuccuugagcuguu

SEQ ID NO: 1422178 - RNA, 19 nt, Homo sapiens
  misc_RNA (1)...(19): siRNA sense strand
ggcauaugcuuuggauuau

SEQ ID NO: 1422179 - RNA, 19 nt, Homo sapiens
  misc_RNA (1)...(19): siRNA sense strand
caccaaaguggauaaacua

SEQ ID NO: 1422180 - RNA, 19 nt, Homo sapiens
  misc_RNA (1)...(19): siRNA sense strand
aagaaugugugcccuuaau

SEQ ID NO: 1422181 - RNA, 19 nt, Homo sapiens
  misc_RNA (1)...(19): siRNA sense strand
gaagcgagaggcugucagu

SEQ ID NO: 1422182 - RNA, 19 nt, Homo sapiens
  misc_RNA (1)...(19): siRNA sense strand
gagcgacuuugaucaccau

SEQ ID NO: 1422183 - RNA, 19 nt, Homo sapiens
  misc_RNA (1)...(19): siRNA sense strand
caagaaugugugcccuuaa

SEQ ID NO: 1422184 - RNA, 19 nt, Homo sapiens
  misc_RNA (1)...(19): siRNA sense strand
caccaucaccaacaacauu

SEQ ID NO: 1422185 - RNA, 19 nt, Homo sapiens
  misc_RNA (1)...(19): siRNA sense strand
gauagcaccaaaguggaua

SEQ ID NO: 1422186 - RNA, 19 nt, Homo sapiens
  misc_RNA (1)...(19): siRNA sense strand
uguuggaaauuucuugaga

SEQ ID NO: 1422187 - RNA, 19 nt, Homo sapiens
  misc_RNA (1)...(19): siRNA sense strand
uccuugagcuguugaagau

SEQ ID NO: 1422188 - RNA, 19 nt, Homo sapiens
  misc_RNA (1)...(19): siRNA sense strand
ggccagagcgacuuugauc

SEQ ID NO: 1422189 - RNA, 19 nt, Homo sapiens
  misc_RNA (1)...(19): siRNA sense strand
uuucggaacacgaggguua

SEQ ID NO: 1422190 - RNA, 19 nt, Homo sapiens
  misc_RNA (1)...(19): siRNA sense strand
uuggaaacaugaugagcaa

SEQ ID NO: 1422191 - RNA, 19 nt, Homo sapiens
  misc_RNA (1)...(19): siRNA sense strand
ggauaaacuaguacgagau

SEQ ID NO: 1422192 - RNA, 19 nt, Homo sapiens
  misc_RNA (1)...(19): siRNA sense strand
gaacacgaggguuauuuug

SEQ ID NO: 1422193 - RNA, 19 nt, Homo sapiens
  misc_RNA (1)...(19): siRNA sense strand
caggugguauuuguuggaa

SEQ ID NO: 1422194 - RNA, 19 nt, Homo sapiens
  misc_RNA (1)...(19): siRNA sense strand
ggaacacgaggguuauuuu

SEQ ID NO: 1422195 - RNA, 19 nt, Homo sapiens
  misc_RNA (1)...(19): siRNA sense strand
aguacgagauauuuaugga

SEQ ID NO: 1422196 - RNA, 19 nt, Homo sapiens
  misc_RNA (1)...(19): siRNA sense strand
gcugggcuguggcuucaag

SEQ ID NO: 1422197 - RNA, 19 nt, Homo sapiens
  misc_RNA (1)...(19): siRNA sense strand
agcgagaggcugucaguaa

SEQ ID NO: 1422198 - RNA, 19 nt, Homo sapiens
  misc_RNA (1)...(19): siRNA sense strand
ucguggagauagcaccaaa

SEQ ID NO: 1422199 - RNA, 19 nt, Homo sapiens
  misc_RNA (1)...(19): siRNA sense strand
cggaacacgaggguuauuu

SEQ ID NO: 1422200 - RNA, 19 nt, Homo sapiens
  misc_RNA (1)...(19): siRNA sense strand
ccaaaguggauaaacuagu

SEQ ID NO: 1422201 - RNA, 19 nt, Homo sapiens
  misc_RNA (1)...(19): siRNA sense strand
guggagauagcaccaaagu

SEQ ID NO: 1422202 - RNA, 19 nt, Homo sapiens
  misc_RNA (1)...(19): siRNA sense strand
gagaagcgagaggcuguca

SEQ ID NO: 1422203 - RNA, 19 nt, Homo sapiens
  misc_RNA (1)...(19): siRNA sense strand
aaugugugcccuuaaugaa

SEQ ID NO: 1422204 - RNA, 19 nt, Homo sapiens
  misc_RNA (1)...(19): siRNA sense strand
cucaauagcaagaaugugu

SEQ ID NO: 1422205 - RNA, 19 nt, Homo sapiens
  misc_RNA (1)...(19): siRNA sense strand
caaaguggauaaacuagua

SEQ ID NO: 1422206 - RNA, 19 nt, Homo sapiens
  misc_RNA (1)...(19): siRNA sense strand
gcaagaaugugugcccuua

SEQ ID NO: 1422207 - RNA, 19 nt, Homo sapiens
  misc_RNA (1)...(19): siRNA sense strand
gaaguuaccauuugauuug

SEQ ID NO: 1422208 - RNA, 19 nt, Homo sapiens
  misc_RNA (1)...(19): siRNA sense strand
gaacuagauugcuugauca

SEQ ID NO: 1422209 - RNA, 19 nt, Homo sapiens
  misc_RNA (1)...(19): siRNA sense strand
ggucucugcugucuucuua

SEQ ID NO: 1422210 - RNA, 19 nt, Homo sapiens
  misc_RNA (1)...(19): siRNA sense strand
gcgagaggcugucaguaaa

SEQ ID NO: 1422211 - RNA, 19 nt, Homo sapiens
  misc_RNA (1)...(19): siRNA sense strand
gcaguauauuccaaagaua

SEQ ID NO: 1422212 - RNA, 19 nt, Homo sapiens
  misc_RNA (1)...(19): siRNA sense strand
gauaaacuaguacgagaua

SEQ ID NO: 1422213 - RNA, 19 nt, Homo sapiens
  misc_RNA (1)...(19): siRNA sense strand
caaacuggaugaacuagau

SEQ ID NO: 1422214 - RNA, 19 nt, Homo sapiens
  misc_RNA (1)...(19): siRNA sense strand
ucacagugcuauuacuuug

SEQ ID NO: 1422215 - RNA, 19 nt, Homo sapiens
  misc_RNA (1)...(19): siRNA sense strand
gcaccaaaguggauaaacu

SEQ ID NO: 1422216 - RNA, 19 nt, Homo sapiens
  misc_RNA (1)...(19): siRNA sense strand
ugucagaaguuaccauuug

SEQ ID NO: 1422217 - RNA, 19 nt, Homo sapiens
  misc_RNA (1)...(19): siRNA sense strand
uggcauaugcuuuggauua

SEQ ID NO: 1422218 - RNA, 19 nt, Homo sapiens
  misc_RNA (1)...(19): siRNA sense strand
gaaugugugcccuuaauga

SEQ ID NO: 1422219 - RNA, 19 nt, Homo sapiens
  misc_RNA (1)...(19): siRNA sense strand
cauaugcuuuggauuauug

SEQ ID NO: 1422220 - RNA, 19 nt, Homo sapiens
  misc_RNA (1)...(19): siRNA sense strand
ugaacuagauugcuugauc

SEQ ID NO: 1422221 - RNA, 19 nt, Homo sapiens
  misc_RNA (1)...(19): siRNA sense strand
gaaacaugaugagcaagga

SEQ ID NO: 1422222 - RNA, 19 nt, Homo sapiens
  misc_RNA (1)...(19): siRNA sense strand
uaggugaucuucagcuuug

SEQ ID NO: 1422223 - RNA, 19 nt, Homo sapiens
  misc_RNA (1)...(19): siRNA sense strand
gagaggcugucaguaaaga

SEQ ID NO: 1422224 - RNA, 19 nt, Homo sapiens
  misc_RNA (1)...(19): siRNA sense strand
gcauaugcuuuggauuauu

SEQ ID NO: 1422225 - RNA, 19 nt, Homo sapiens
  misc_RNA (1)...(19): siRNA sense strand
cuagauugcuugaucaaag

SEQ ID NO: 1422226 - RNA, 19 nt, Homo sapiens
  misc_RNA (1)...(19): siRNA sense strand
guuagcaucuuagcaguau

SEQ ID NO: 1422227 - RNA, 19 nt, Homo sapiens
  misc_RNA (1)...(19): siRNA sense strand
gagcacuccuugagcuguu

SEQ ID NO: 1422228 - RNA, 19 nt, Homo sapiens
  misc_RNA (1)...(19): siRNA sense strand
ugaaaagugucagaaguua

SEQ ID NO: 1422229 - RNA, 19 nt, Homo sapiens
  misc_RNA (1)...(19): siRNA sense strand
ggucacagguacuagucuu

SEQ ID NO: 1422230 - RNA, 19 nt, Homo sapiens
  misc_RNA (1)...(19): siRNA sense strand
gucagaaguuaccauuuga

SEQ ID NO: 1422231 - RNA, 19 nt, Homo sapiens
  misc_RNA (1)...(19): siRNA sense strand
ggcauaugcuuuggauuau

SEQ ID NO: 1422232 - RNA, 19 nt, Homo sapiens
  misc_RNA (1)...(19): siRNA sense strand
acagugcuauuacuuugaa

SEQ ID NO: 1422233 - RNA, 19 nt, Homo sapiens
  misc_RNA (1)...(19): siRNA sense strand
caccaaaguggauaaacua

SEQ ID NO: 1422234 - RNA, 19 nt, Homo sapiens
  misc_RNA (1)...(19): siRNA sense strand
gacggucacagugcuauua

SEQ ID NO: 1422235 - RNA, 19 nt, Homo sapiens
  misc_RNA (1)...(19): siRNA sense strand
aagaaugugugcccuuaau

SEQ ID NO: 1422236 - RNA, 19 nt, Homo sapiens
  misc_RNA (1)...(19): siRNA sense strand
uggaugaacuagauugcuu

SEQ ID NO: 1422237 - RNA, 19 nt, Homo sapiens
  misc_RNA (1)...(19): siRNA sense strand
cagaaguuaccauuugauu

SEQ ID NO: 1422238 - RNA, 19 nt, Homo sapiens
  misc_RNA (1)...(19): siRNA sense strand
gaagcgagaggcugucagu

SEQ ID NO: 1422239 - RNA, 19 nt, Homo sapiens
  misc_RNA (1)...(19): siRNA sense strand
ggucacagugcuauuacuu

SEQ ID NO: 1422240 - RNA, 19 nt, Homo sapiens
  misc_RNA (1)...(19): siRNA sense strand
ccaaagauaauuacaaacg

SEQ ID NO: 1422241 - RNA, 19 nt, Homo sapiens
  misc_RNA (1)...(19): siRNA sense strand
aaacccugcugauucugaa

SEQ ID NO: 1422242 - RNA, 19 nt, Homo sapiens
  misc_RNA (1)...(19): siRNA sense strand
gcaaacuggaugaacuaga

SEQ ID NO: 1422243 - RNA, 19 nt, Homo sapiens
  misc_RNA (1)...(19): siRNA sense strand
caagaaugugugcccuuaa

SEQ ID NO: 1422244 - RNA, 19 nt, Homo sapiens
  misc_RNA (1)...(19): siRNA sense strand
caccaucaccaacaacauu

SEQ ID NO: 1422245 - RNA, 19 nt, Homo sapiens
  misc_RNA (1)...(19): siRNA sense strand
gagcgacuuugaucaccau

SEQ ID NO: 1422246 - RNA, 19 nt, Homo sapiens
  misc_RNA (1)...(19): siRNA sense strand
gauagcaccaaaguggaua

SEQ ID NO: 1422247 - RNA, 19 nt, Homo sapiens
  misc_RNA (1)...(19): siRNA sense strand
uguuggaaauuucuugaga

SEQ ID NO: 1422248 - RNA, 19 nt, Homo sapiens
  misc_RNA (1)...(19): siRNA sense strand
uccuugagcuguugaagau

SEQ ID NO: 1422249 - RNA, 19 nt, Homo sapiens
  misc_RNA (1)...(19): siRNA sense strand
gaugaacuagauugcuuga

SEQ ID NO: 1422250 - RNA, 19 nt, Homo sapiens
  misc_RNA (1)...(19): siRNA sense strand
uuucggaacacgaggguua

SEQ ID NO: 1422251 - RNA, 19 nt, Homo sapiens
  misc_RNA (1)...(19): siRNA sense strand
ggccagagcgacuuugauc

SEQ ID NO: 1422252 - RNA, 19 nt, Homo sapiens
  misc_RNA (1)...(19): siRNA sense strand
agcaguauauuccaaagau

SEQ ID NO: 1422253 - RNA, 19 nt, Homo sapiens
  misc_RNA (1)...(19): siRNA sense strand
uuggaaacaugaugagcaa

SEQ ID NO: 1422254 - RNA, 19 nt, Homo sapiens
  misc_RNA (1)...(19): siRNA sense strand
ggauaaacuaguacgagau

SEQ ID NO: 1422255 - RNA, 19 nt, Homo sapiens
  misc_RNA (1)...(19): siRNA sense strand
cuuacuggcuguaccacuu

SEQ ID NO: 1422256 - RNA, 19 nt, Homo sapiens
  misc_RNA (1)...(19): siRNA sense strand
aaacgggucacagguacua

SEQ ID NO: 1422257 - RNA, 19 nt, Homo sapiens
  misc_RNA (1)...(19): siRNA sense strand
uacaaacgggucacaggua

SEQ ID NO: 1422258 - RNA, 19 nt, Homo sapiens
  misc_RNA (1)...(19): siRNA sense strand
gguuagcaucuuagcagua

SEQ ID NO: 1422259 - RNA, 19 nt, Homo sapiens
  misc_RNA (1)...(19): siRNA sense strand
gaacacgaggguuauuuug

SEQ ID NO: 1422260 - RNA, 19 nt, Homo sapiens
  misc_RNA (1)...(19): siRNA sense strand
uagcaucuuagcaguauau

SEQ ID NO: 1422261 - RNA, 19 nt, Homo sapiens
  misc_RNA (1)...(19): siRNA sense strand
ggaacacgaggguuauuuu

SEQ ID NO: 1422262 - RNA, 19 nt, Homo sapiens
  misc_RNA (1)...(19): siRNA sense strand
caggugguauuuguuggaa

SEQ ID NO: 1422263 - RNA, 19 nt, Homo sapiens
  misc_RNA (1)...(19): siRNA sense strand
gaucuucagcuuugcaaac

SEQ ID NO: 1422264 - RNA, 19 nt, Homo sapiens
  misc_RNA (1)...(19): siRNA sense strand
caucuuagcaguauauucc

SEQ ID NO: 1422265 - RNA, 19 nt, Homo sapiens
  misc_RNA (1)...(19): siRNA sense strand
ugaaaacccugcugauucu

SEQ ID NO: 1422266 - RNA, 19 nt, Homo sapiens
  misc_RNA (1)...(19): siRNA sense strand
aguacgagauauuuaugga

SEQ ID NO: 1422267 - RNA, 19 nt, Homo sapiens
  misc_RNA (1)...(19): siRNA sense strand
gcugggcuguggcuucaag

SEQ ID NO: 1422268 - RNA, 19 nt, Homo sapiens
  misc_RNA (1)...(19): siRNA sense strand
ggacggucacagugcuauu

SEQ ID NO: 1422269 - RNA, 19 nt, Homo sapiens
  misc_RNA (1)...(19): siRNA sense strand
uagauugcuugaucaaagg

SEQ ID NO: 1422270 - RNA, 19 nt, Homo sapiens
  misc_RNA (1)...(19): siRNA sense strand
agcgagaggcugucaguaa

SEQ ID NO: 1422271 - RNA, 19 nt, Homo sapiens
  misc_RNA (1)...(19): siRNA sense strand
uuuggucucugcugucuuc

SEQ ID NO: 1422272 - RNA, 19 nt, Homo sapiens
  misc_RNA (1)...(19): siRNA sense strand
cggaacacgaggguuauuu

SEQ ID NO: 1422273 - RNA, 19 nt, Homo sapiens
  misc_RNA (1)...(19): siRNA sense strand
ucguggagauagcaccaaa

SEQ ID NO: 1422274 - RNA, 19 nt, Homo sapiens
  misc_RNA (1)...(19): siRNA sense strand
ccaaaguggauaaacuagu

SEQ ID NO: 1422275 - RNA, 19 nt, Homo sapiens
  misc_RNA (1)...(19): siRNA sense strand
gucacagugcuauuacuuu

SEQ ID NO: 1422276 - RNA, 19 nt, Homo sapiens
  misc_RNA (1)...(19): siRNA sense strand
guggagauagcaccaaagu

SEQ ID NO: 1422277 - RNA, 19 nt, Homo sapiens
  misc_RNA (1)...(19): siRNA sense strand
gagaagcgagaggcuguca

SEQ ID NO: 1422278 - RNA, 19 nt, Homo sapiens
  misc_RNA (1)...(19): siRNA sense strand
aaugugugcccuuaaugaa

SEQ ID NO: 1422279 - RNA, 19 nt, Homo sapiens
  misc_RNA (1)...(19): siRNA sense strand
cucaauagcaagaaugugu

SEQ ID NO: 1422280 - RNA, 19 nt, Homo sapiens
  misc_RNA (1)...(19): siRNA sense strand
aaacuggaugaacuagauu

SEQ ID NO: 1422281 - RNA, 19 nt, Homo sapiens
  misc_RNA (1)...(19): siRNA sense strand
caaaguggauaaacuagua

SEQ ID NO: 1422282 - RNA, 19 nt, Homo sapiens
  misc_RNA (1)...(19): siRNA sense strand
gcaagaaugugugcccuua

SEQ ID NO: 1422283 - RNA, 19 nt, Homo sapiens
  misc_RNA (1)...(19): siRNA sense strand
gcgagaggcugucaguaaa

SEQ ID NO: 1422284 - RNA, 19 nt, Homo sapiens
  misc_RNA (1)...(19): siRNA sense strand
gauaaacuaguacgagaua

SEQ ID NO: 1422285 - RNA, 19 nt, Homo sapiens
  misc_RNA (1)...(19): siRNA sense strand
gcaccaaaguggauaaacu

SEQ ID NO: 1422286 - RNA, 19 nt, Homo sapiens
  misc_RNA (1)...(19): siRNA sense strand
uggcauaugcuuuggauua

SEQ ID NO: 1422287 - RNA, 19 nt, Homo sapiens
  misc_RNA (1)...(19): siRNA sense strand
gaaugugugcccuuaauga

SEQ ID NO: 1422288 - RNA, 19 nt, Homo sapiens
  misc_RNA (1)...(19): siRNA sense strand
cauaugcuuuggauuauug

SEQ ID NO: 1422289 - RNA, 19 nt, Homo sapiens
  misc_RNA (1)...(19): siRNA sense strand
gaaacaugaugagcaagga

SEQ ID NO: 1422290 - RNA, 19 nt, Homo sapiens
  misc_RNA (1)...(19): siRNA sense strand
gagaggcugucaguaaaga

SEQ ID NO: 1422291 - RNA, 19 nt, Homo sapiens
  misc_RNA (1)...(19): siRNA sense strand
gcauaugcuuuggauuauu

SEQ ID NO: 1422292 - RNA, 19 nt, Homo sapiens
  misc_RNA (1)...(19): siRNA sense strand
gagcacuccuugagcuguu

SEQ ID NO: 1422293 - RNA, 19 nt, Homo sapiens
  misc_RNA (1)...(19): siRNA sense strand
ggcauaugcuuuggauuau

SEQ ID NO: 1422294 - RNA, 19 nt, Homo sapiens
  misc_RNA (1)...(19): siRNA sense strand
caccaaaguggauaaacua

SEQ ID NO: 1422295 - RNA, 19 nt, Homo sapiens
  misc_RNA (1)...(19): siRNA sense strand
aagaaugugugcccuuaau

SEQ ID NO: 1422296 - RNA, 19 nt, Homo sapiens
  misc_RNA (1)...(19): siRNA sense strand
gaagcgagaggcugucagu

SEQ ID NO: 1422297 - RNA, 19 nt, Homo sapiens
  misc_RNA (1)...(19): siRNA sense strand
gagcgacuuugaucaccau

SEQ ID NO: 1422298 - RNA, 19 nt, Homo sapiens
  misc_RNA (1)...(19): siRNA sense strand
caagaaugugugcccuuaa

SEQ ID NO: 1422299 - RNA, 19 nt, Homo sapiens
  misc_RNA (1)...(19): siRNA sense strand
caccaucaccaacaacauu

SEQ ID NO: 1422300 - RNA, 19 nt, Homo sapiens
  misc_RNA (1)...(19): siRNA sense strand
gauagcaccaaaguggaua

SEQ ID NO: 1422301 - RNA, 19 nt, Homo sapiens
  misc_RNA (1)...(19): siRNA sense strand
uguuggaaauuucuugaga

SEQ ID NO: 1422302 - RNA, 19 nt, Homo sapiens
  misc_RNA (1)...(19): siRNA sense strand
uccuugagcuguugaagau

SEQ ID NO: 1422303 - RNA, 19 nt, Homo sapiens
  misc_RNA (1)...(19): siRNA sense strand
ggccagagcgacuuugauc

SEQ ID NO: 1422304 - RNA, 19 nt, Homo sapiens
  misc_RNA (1)...(19): siRNA sense strand
uuucggaacacgaggguua

SEQ ID NO: 1422305 - RNA, 19 nt, Homo sapiens
  misc_RNA (1)...(19): siRNA sense strand
uuggaaacaugaugagcaa

SEQ ID NO: 1422306 - RNA, 19 nt, Homo sapiens
  misc_RNA (1)...(19): siRNA sense strand
ggauaaacuaguacgagau

SEQ ID NO: 1422307 - RNA, 19 nt, Homo sapiens
  misc_RNA (1)...(19): siRNA sense strand
gaacacgaggguuauuuug

SEQ ID NO: 1422308 - RNA, 19 nt, Homo sapiens
  misc_RNA (1)...(19): siRNA sense strand
caggugguauuuguuggaa

SEQ ID NO: 1422309 - RNA, 19 nt, Homo sapiens
  misc_RNA (1)...(19): siRNA sense strand
ggaacacgaggguuauuuu

SEQ ID NO: 1422310 - RNA, 19 nt, Homo sapiens
  misc_RNA (1)...(19): siRNA sense strand
aguacgagauauuuaugga

SEQ ID NO: 1422311 - RNA, 19 nt, Homo sapiens
  misc_RNA (1)...(19): siRNA sense strand
gcugggcuguggcuucaag

SEQ ID NO: 1422312 - RNA, 19 nt, Homo sapiens
  misc_RNA (1)...(19): siRNA sense strand
agcgagaggcugucaguaa

SEQ ID NO: 1422313 - RNA, 19 nt, Homo sapiens
  misc_RNA (1)...(19): siRNA sense strand
ucguggagauagcaccaaa

SEQ ID NO: 1422314 - RNA, 19 nt, Homo sapiens
  misc_RNA (1)...(19): siRNA sense strand
cggaacacgaggguuauuu

SEQ ID NO: 1422315 - RNA, 19 nt, Homo sapiens
  misc_RNA (1)...(19): siRNA sense strand
ccaaaguggauaaacuagu

SEQ ID NO: 1422316 - RNA, 19 nt, Homo sapiens
  misc_RNA (1)...(19): siRNA sense strand
guggagauagcaccaaagu

SEQ ID NO: 1422317 - RNA, 19 nt, Homo sapiens
  misc_RNA (1)...(19): siRNA sense strand
gagaagcgagaggcuguca

SEQ ID NO: 1422318 - RNA, 19 nt, Homo sapiens
  misc_RNA (1)...(19): siRNA sense strand
aaugugugcccuuaaugaa

SEQ ID NO: 1422319 - RNA, 19 nt, Homo sapiens
  misc_RNA (1)...(19): siRNA sense strand
cucaauagcaagaaugugu

SEQ ID NO: 1422320 - RNA, 19 nt, Homo sapiens
  misc_RNA (1)...(19): siRNA sense strand
caaaguggauaaacuagua

SEQ ID NO: 1422321 - RNA, 19 nt, Homo sapiens
  misc_RNA (1)...(19): siRNA sense strand
gcaagaaugugugcccuua

SEQ ID NO: 1422322 - RNA, 19 nt, Homo sapiens
  misc_RNA (1)...(19): siRNA sense strand
ggaaguaccugaccuccaa

SEQ ID NO: 1422323 - RNA, 19 nt, Homo sapiens
  misc_RNA (1)...(19): siRNA sense strand
gaaguuaccauuugauuug

SEQ ID NO: 1422324 - RNA, 19 nt, Homo sapiens
  misc_RNA (1)...(19): siRNA sense strand
gaacuagauugcuugauca

SEQ ID NO: 1422325 - RNA, 19 nt, Homo sapiens
  misc_RNA (1)...(19): siRNA sense strand
ggucucugcugucuucuua

SEQ ID NO: 1422326 - RNA, 19 nt, Homo sapiens
  misc_RNA (1)...(19): siRNA sense strand
agacaucacugcugaagaa

SEQ ID NO: 1422327 - RNA, 19 nt, Homo sapiens
  misc_RNA (1)...(19): siRNA sense strand
gcgagaggcugucaguaaa

SEQ ID NO: 1422328 - RNA, 19 nt, Homo sapiens
  misc_RNA (1)...(19): siRNA sense strand
gcaguauauuccaaagaua

SEQ ID NO: 1422329 - RNA, 19 nt, Homo sapiens
  misc_RNA (1)...(19): siRNA sense strand
gauaaacuaguacgagaua

SEQ ID NO: 1422330 - RNA, 19 nt, Homo sapiens
  misc_RNA (1)...(19): siRNA sense strand
caaacuggaugaacuagau

SEQ ID NO: 1422331 - RNA, 19 nt, Homo sapiens
  misc_RNA (1)...(19): siRNA sense strand
caucacugcugaagaagaa

SEQ ID NO: 1422332 - RNA, 19 nt, Homo sapiens
  misc_RNA (1)...(19): siRNA sense strand
ucacagugcuauuacuuug

SEQ ID NO: 1422333 - RNA, 19 nt, Homo sapiens
  misc_RNA (1)...(19): siRNA sense strand
gcaccaaaguggauaaacu

SEQ ID NO: 1422334 - RNA, 19 nt, Homo sapiens
  misc_RNA (1)...(19): siRNA sense strand
ugucagaaguuaccauuug

SEQ ID NO: 1422335 - RNA, 19 nt, Homo sapiens
  misc_RNA (1)...(19): siRNA sense strand
uggcauaugcuuuggauua

SEQ ID NO: 1422336 - RNA, 19 nt, Homo sapiens
  misc_RNA (1)...(19): siRNA sense strand
gaaugugugcccuuaauga

SEQ ID NO: 1422337 - RNA, 19 nt, Homo sapiens
  misc_RNA (1)...(19): siRNA sense strand
cauaugcuuuggauuauug

SEQ ID NO: 1422338 - RNA, 19 nt, Homo sapiens
  misc_RNA (1)...(19): siRNA sense strand
uggucaagcugguauauuu

SEQ ID NO: 1422339 - RNA, 19 nt, Homo sapiens
  misc_RNA (1)...(19): siRNA sense strand
ugaacuagauugcuugauc

SEQ ID NO: 1422340 - RNA, 19 nt, Homo sapiens
  misc_RNA (1)...(19): siRNA sense strand
gaaacaugaugagcaagga

SEQ ID NO: 1422341 - RNA, 19 nt, Homo sapiens
  misc_RNA (1)...(19): siRNA sense strand
uaggugaucuucagcuuug

SEQ ID NO: 1422342 - RNA, 19 nt, Homo sapiens
  misc_RNA (1)...(19): siRNA sense strand
gagaggcugucaguaaaga

SEQ ID NO: 1422343 - RNA, 19 nt, Homo sapiens
  misc_RNA (1)...(19): siRNA sense strand
gcauaugcuuuggauuauu

SEQ ID NO: 1422344 - RNA, 19 nt, Homo sapiens
  misc_RNA (1)...(19): siRNA sense strand
cuagauugcuugaucaaag

SEQ ID NO: 1422345 - RNA, 19 nt, Homo sapiens
  misc_RNA (1)...(19): siRNA sense strand
guuagcaucuuagcaguau

SEQ ID NO: 1422346 - RNA, 19 nt, Homo sapiens
  misc_RNA (1)...(19): siRNA sense strand
gagcacuccuugagcuguu

SEQ ID NO: 1422347 - RNA, 19 nt, Homo sapiens
  misc_RNA (1)...(19): siRNA sense strand
ugaaaagugucagaaguua

SEQ ID NO: 1422348 - RNA, 19 nt, Homo sapiens
  misc_RNA (1)...(19): siRNA sense strand
ggucacagguacuagucuu

SEQ ID NO: 1422349 - RNA, 19 nt, Homo sapiens
  misc_RNA (1)...(19): siRNA sense strand
gucagaaguuaccauuuga

SEQ ID NO: 1422350 - RNA, 19 nt, Homo sapiens
  misc_RNA (1)...(19): siRNA sense strand
ggcauaugcuuuggauuau

SEQ ID NO: 1422351 - RNA, 19 nt, Homo sapiens
  misc_RNA (1)...(19): siRNA sense strand
acagugcuauuacuuugaa

SEQ ID NO: 1422352 - RNA, 19 nt, Homo sapiens
  misc_RNA (1)...(19): siRNA sense strand
caccaaaguggauaaacua

SEQ ID NO: 1422353 - RNA, 19 nt, Homo sapiens
  misc_RNA (1)...(19): siRNA sense strand
gacggucacagugcuauua

SEQ ID NO: 1422354 - RNA, 19 nt, Homo sapiens
  misc_RNA (1)...(19): siRNA sense strand
aagaaugugugcccuuaau

SEQ ID NO: 1422355 - RNA, 19 nt, Homo sapiens
  misc_RNA (1)...(19): siRNA sense strand
uggaugaacuagauugcuu

SEQ ID NO: 1422356 - RNA, 19 nt, Homo sapiens
  misc_RNA (1)...(19): siRNA sense strand
ugaagaagaagaggaagaa

SEQ ID NO: 1422357 - RNA, 19 nt, Homo sapiens
  misc_RNA (1)...(19): siRNA sense strand
agaagaagaggaagaagug

SEQ ID NO: 1422358 - RNA, 19 nt, Homo sapiens
  misc_RNA (1)...(19): siRNA sense strand
cagaaguuaccauuugauu

SEQ ID NO: 1422359 - RNA, 19 nt, Homo sapiens
  misc_RNA (1)...(19): siRNA sense strand
gaagcgagaggcugucagu

SEQ ID NO: 1422360 - RNA, 19 nt, Homo sapiens
  misc_RNA (1)...(19): siRNA sense strand
ggucacagugcuauuacuu

SEQ ID NO: 1422361 - RNA, 19 nt, Homo sapiens
  misc_RNA (1)...(19): siRNA sense strand
ccaaagauaauuacaaacg

SEQ ID NO: 1422362 - RNA, 19 nt, Homo sapiens
  misc_RNA (1)...(19): siRNA sense strand
aaacccugcugauucugaa

SEQ ID NO: 1422363 - RNA, 19 nt, Homo sapiens
  misc_RNA (1)...(19): siRNA sense strand
gaaguggaaagucuuaaaa

SEQ ID NO: 1422364 - RNA, 19 nt, Homo sapiens
  misc_RNA (1)...(19): siRNA sense strand
caagaaugugugcccuuaa

SEQ ID NO: 1422365 - RNA, 19 nt, Homo sapiens
  misc_RNA (1)...(19): siRNA sense strand
caccaucaccaacaacauu

SEQ ID NO: 1422366 - RNA, 19 nt, Homo sapiens
  misc_RNA (1)...(19): siRNA sense strand
gagcgacuuugaucaccau

SEQ ID NO: 1422367 - RNA, 19 nt, Homo sapiens
  misc_RNA (1)...(19): siRNA sense strand
gcaaacuggaugaacuaga

SEQ ID NO: 1422368 - RNA, 19 nt, Homo sapiens
  misc_RNA (1)...(19): siRNA sense strand
gauagcaccaaaguggaua

SEQ ID NO: 1422369 - RNA, 19 nt, Homo sapiens
  misc_RNA (1)...(19): siRNA sense strand
aggaagaaguggaaagucu

SEQ ID NO: 1422370 - RNA, 19 nt, Homo sapiens
  misc_RNA (1)...(19): siRNA sense strand
uguuggaaauuucuugaga

SEQ ID NO: 1422371 - RNA, 19 nt, Homo sapiens
  misc_RNA (1)...(19): siRNA sense strand
guaccugaccuccaaugug

SEQ ID NO: 1422372 - RNA, 19 nt, Homo sapiens
  misc_RNA (1)...(19): siRNA sense strand
uccuugagcuguugaagau

SEQ ID NO: 1422373 - RNA, 19 nt, Homo sapiens
  misc_RNA (1)...(19): siRNA sense strand
gaagaggaagaaguggaaa

SEQ ID NO: 1422374 - RNA, 19 nt, Homo sapiens
  misc_RNA (1)...(19): siRNA sense strand
ccuccaauguggcuuaugg

SEQ ID NO: 1422375 - RNA, 19 nt, Homo sapiens
  misc_RNA (1)...(19): siRNA sense strand
guggaacucuggucaagcu

SEQ ID NO: 1422376 - RNA, 19 nt, Homo sapiens
  misc_RNA (1)...(19): siRNA sense strand
uuucggaacacgaggguua

SEQ ID NO: 1422377 - RNA, 19 nt, Homo sapiens
  misc_RNA (1)...(19): siRNA sense strand
ggccagagcgacuuugauc

SEQ ID NO: 1422378 - RNA, 19 nt, Homo sapiens
  misc_RNA (1)...(19): siRNA sense strand
gaugaacuagauugcuuga

SEQ ID NO: 1422379 - RNA, 19 nt, Homo sapiens
  misc_RNA (1)...(19): siRNA sense strand
agcaguauauuccaaagau

SEQ ID NO: 1422380 - RNA, 19 nt, Homo sapiens
  misc_RNA (1)...(19): siRNA sense strand
uuggaaacaugaugagcaa

SEQ ID NO: 1422381 - RNA, 19 nt, Homo sapiens
  misc_RNA (1)...(19): siRNA sense strand
ggauaaacuaguacgagau

SEQ ID NO: 1422382 - RNA, 19 nt, Homo sapiens
  misc_RNA (1)...(19): siRNA sense strand
cuuacuggcuguaccacuu

SEQ ID NO: 1422383 - RNA, 19 nt, Homo sapiens
  misc_RNA (1)...(19): siRNA sense strand
aaacgggucacagguacua

SEQ ID NO: 1422384 - RNA, 19 nt, Homo sapiens
  misc_RNA (1)...(19): siRNA sense strand
uacaaacgggucacaggua

SEQ ID NO: 1422385 - RNA, 19 nt, Homo sapiens
  misc_RNA (1)...(19): siRNA sense strand
gguuagcaucuuagcagua

SEQ ID NO: 1422386 - RNA, 19 nt, Homo sapiens
  misc_RNA (1)...(19): siRNA sense strand
gaacacgaggguuauuuug

SEQ ID NO: 1422387 - RNA, 19 nt, Homo sapiens
  misc_RNA (1)...(19): siRNA sense strand
agaaguggaaagucuuaaa

SEQ ID NO: 1422388 - RNA, 19 nt, Homo sapiens
  misc_RNA (1)...(19): siRNA sense strand
ugaccuccaauguggcuua

SEQ ID NO: 1422389 - RNA, 19 nt, Homo sapiens
  misc_RNA (1)...(19): siRNA sense strand
gaucuucagcuuugcaaac

SEQ ID NO: 1422390 - RNA, 19 nt, Homo sapiens
  misc_RNA (1)...(19): siRNA sense strand
ggaacacgaggguuauuuu

SEQ ID NO: 1422391 - RNA, 19 nt, Homo sapiens
  misc_RNA (1)...(19): siRNA sense strand
uuaaaagcauucggaagua

SEQ ID NO: 1422392 - RNA, 19 nt, Homo sapiens
  misc_RNA (1)...(19): siRNA sense strand
caggugguauuuguuggaa

SEQ ID NO: 1422393 - RNA, 19 nt, Homo sapiens
  misc_RNA (1)...(19): siRNA sense strand
agaagaggaagaaguggaa

SEQ ID NO: 1422394 - RNA, 19 nt, Homo sapiens
  misc_RNA (1)...(19): siRNA sense strand
caucuuagcaguauauucc

SEQ ID NO: 1422395 - RNA, 19 nt, Homo sapiens
  misc_RNA (1)...(19): siRNA sense strand
uagcaucuuagcaguauau

SEQ ID NO: 1422396 - RNA, 19 nt, Homo sapiens
  misc_RNA (1)...(19): siRNA sense strand
ugaaaacccugcugauucu

SEQ ID NO: 1422397 - RNA, 19 nt, Homo sapiens
  misc_RNA (1)...(19): siRNA sense strand
aguacgagauauuuaugga

SEQ ID NO: 1422398 - RNA, 19 nt, Homo sapiens
  misc_RNA (1)...(19): siRNA sense strand
ggaaagucuuaaaagcauu

SEQ ID NO: 1422399 - RNA, 19 nt, Homo sapiens
  misc_RNA (1)...(19): siRNA sense strand
uagauugcuugaucaaagg

SEQ ID NO: 1422400 - RNA, 19 nt, Homo sapiens
  misc_RNA (1)...(19): siRNA sense strand
agcgagaggcugucaguaa

SEQ ID NO: 1422401 - RNA, 19 nt, Homo sapiens
  misc_RNA (1)...(19): siRNA sense strand
gcugggcuguggcuucaag

SEQ ID NO: 1422402 - RNA, 19 nt, Homo sapiens
  misc_RNA (1)...(19): siRNA sense strand
ggacggucacagugcuauu

SEQ ID NO: 1422403 - RNA, 19 nt, Homo sapiens
  misc_RNA (1)...(19): siRNA sense strand
uuaugggucuacaggcauu

SEQ ID NO: 1422404 - RNA, 19 nt, Homo sapiens
  misc_RNA (1)...(19): siRNA sense strand
gaccuccaauguggcuuau

SEQ ID NO: 1422405 - RNA, 19 nt, Homo sapiens
  misc_RNA (1)...(19): siRNA sense strand
cggaacacgaggguuauuu

SEQ ID NO: 1422406 - RNA, 19 nt, Homo sapiens
  misc_RNA (1)...(19): siRNA sense strand
caaagacaucacugcugaa

SEQ ID NO: 1422407 - RNA, 19 nt, Homo sapiens
  misc_RNA (1)...(19): siRNA sense strand
ucguggagauagcaccaaa

SEQ ID NO: 1422408 - RNA, 19 nt, Homo sapiens
  misc_RNA (1)...(19): siRNA sense strand
uuuggucucugcugucuuc

SEQ ID NO: 1422409 - RNA, 19 nt, Homo sapiens
  misc_RNA (1)...(19): siRNA sense strand
gucacagugcuauuacuuu

SEQ ID NO: 1422410 - RNA, 19 nt, Homo sapiens
  misc_RNA (1)...(19): siRNA sense strand
ccaaaguggauaaacuagu

SEQ ID NO: 1422411 - RNA, 19 nt, Homo sapiens
  misc_RNA (1)...(19): siRNA sense strand
gaagaagaagaggaagaag

SEQ ID NO: 1422412 - RNA, 19 nt, Homo sapiens
  misc_RNA (1)...(19): siRNA sense strand
cugaaggaccugacucugu

SEQ ID NO: 1422413 - RNA, 19 nt, Homo sapiens
  misc_RNA (1)...(19): siRNA sense strand
guggagauagcaccaaagu

SEQ ID NO: 1422414 - RNA, 19 nt, Homo sapiens
  misc_RNA (1)...(19): siRNA sense strand
gacucuguguggacgcaaa

SEQ ID NO: 1422415 - RNA, 19 nt, Homo sapiens
  misc_RNA (1)...(19): siRNA sense strand
aaacuggaugaacuagauu

SEQ ID NO: 1422416 - RNA, 19 nt, Homo sapiens
  misc_RNA (1)...(19): siRNA sense strand
aaugugugcccuuaaugaa

SEQ ID NO: 1422417 - RNA, 19 nt, Homo sapiens
  misc_RNA (1)...(19): siRNA sense strand
cucaauagcaagaaugugu

SEQ ID NO: 1422418 - RNA, 19 nt, Homo sapiens
  misc_RNA (1)...(19): siRNA sense strand
gagaagcgagaggcuguca

SEQ ID NO: 1422419 - RNA, 19 nt, Homo sapiens
  misc_RNA (1)...(19): siRNA sense strand
ggaaguaccugaccuccaa

SEQ ID NO: 1422420 - RNA, 19 nt, Homo sapiens
  misc_RNA (1)...(19): siRNA sense strand
agacaucacugcugaagaa

SEQ ID NO: 1422421 - RNA, 19 nt, Homo sapiens
  misc_RNA (1)...(19): siRNA sense strand
caucacugcugaagaagaa

SEQ ID NO: 1422422 - RNA, 19 nt, Homo sapiens
  misc_RNA (1)...(19): siRNA sense strand
uggucaagcugguauauuu

SEQ ID NO: 1422423 - RNA, 19 nt, Homo sapiens
  misc_RNA (1)...(19): siRNA sense strand
ugaagaagaagaggaagaa

SEQ ID NO: 1422424 - RNA, 19 nt, Homo sapiens
  misc_RNA (1)...(19): siRNA sense strand
agaagaagaggaagaagug

SEQ ID NO: 1422425 - RNA, 19 nt, Homo sapiens
  misc_RNA (1)...(19): siRNA sense strand
gaaguggaaagucuuaaaa

SEQ ID NO: 1422426 - RNA, 19 nt, Homo sapiens
  misc_RNA (1)...(19): siRNA sense strand
aggaagaaguggaaagucu

SEQ ID NO: 1422427 - RNA, 19 nt, Homo sapiens
  misc_RNA (1)...(19): siRNA sense strand
gaagaggaagaaguggaaa

SEQ ID NO: 1422428 - RNA, 19 nt, Homo sapiens
  misc_RNA (1)...(19): siRNA sense strand
ccuccaauguggcuuaugg

SEQ ID NO: 1422429 - RNA, 19 nt, Homo sapiens
  misc_RNA (1)...(19): siRNA sense strand
guaccugaccuccaaugug

SEQ ID NO: 1422430 - RNA, 19 nt, Homo sapiens
  misc_RNA (1)...(19): siRNA sense strand
guggaacucuggucaagcu

SEQ ID NO: 1422431 - RNA, 19 nt, Homo sapiens
  misc_RNA (1)...(19): siRNA sense strand
agaaguggaaagucuuaaa

SEQ ID NO: 1422432 - RNA, 19 nt, Homo sapiens
  misc_RNA (1)...(19): siRNA sense strand
ugaccuccaauguggcuua

SEQ ID NO: 1422433 - RNA, 19 nt, Homo sapiens
  misc_RNA (1)...(19): siRNA sense strand
agaagaggaagaaguggaa

SEQ ID NO: 1422434 - RNA, 19 nt, Homo sapiens
  misc_RNA (1)...(19): siRNA sense strand
uuaaaagcauucggaagua

SEQ ID NO: 1422435 - RNA, 19 nt, Homo sapiens
  misc_RNA (1)...(19): siRNA sense strand
ggaaagucuuaaaagcauu

SEQ ID NO: 1422436 - RNA, 19 nt, Homo sapiens
  misc_RNA (1)...(19): siRNA sense strand
uuaugggucuacaggcauu

SEQ ID NO: 1422437 - RNA, 19 nt, Homo sapiens
  misc_RNA (1)...(19): siRNA sense strand
caaagacaucacugcugaa

SEQ ID NO: 1422438 - RNA, 19 nt, Homo sapiens
  misc_RNA (1)...(19): siRNA sense strand
gaccuccaauguggcuuau

SEQ ID NO: 1422439 - RNA, 19 nt, Homo sapiens
  misc_RNA (1)...(19): siRNA sense strand
gaagaagaagaggaagaag

SEQ ID NO: 1422440 - RNA, 19 nt, Homo sapiens
  misc_RNA (1)...(19): siRNA sense strand
gacucuguguggacgcaaa

SEQ ID NO: 1422441 - RNA, 19 nt, Homo sapiens
  misc_RNA (1)...(19): siRNA sense strand
cugaaggaccugacucugu

SEQ ID NO: 1422442 - RNA, 19 nt, Homo sapiens
  misc_RNA (1)...(19): siRNA sense strand
caaaguggauaaacuagua

SEQ ID NO: 1422443 - RNA, 19 nt, Homo sapiens
  misc_RNA (1)...(19): siRNA sense strand
gcaagaaugugugcccuua

SEQ ID NO: 1422444 - RNA, 19 nt, Homo sapiens
  misc_RNA (1)...(19): siRNA sense strand
gaaguuaccauuugauuug

SEQ ID NO: 1422445 - RNA, 19 nt, Homo sapiens
  misc_RNA (1)...(19): siRNA sense strand
gaacuagauugcuugauca

SEQ ID NO: 1422446 - RNA, 19 nt, Homo sapiens
  misc_RNA (1)...(19): siRNA sense strand
ggucucugcugucuucuua

SEQ ID NO: 1422447 - RNA, 19 nt, Homo sapiens
  misc_RNA (1)...(19): siRNA sense strand
gcgagaggcugucaguaaa

SEQ ID NO: 1422448 - RNA, 19 nt, Homo sapiens
  misc_RNA (1)...(19): siRNA sense strand
gcaguauauuccaaagaua

SEQ ID NO: 1422449 - RNA, 19 nt, Homo sapiens
  misc_RNA (1)...(19): siRNA sense strand
gauaaacuaguacgagaua

SEQ ID NO: 1422450 - RNA, 19 nt, Homo sapiens
  misc_RNA (1)...(19): siRNA sense strand
caaacuggaugaacuagau

SEQ ID NO: 1422451 - RNA, 19 nt, Homo sapiens
  misc_RNA (1)...(19): siRNA sense strand
ucacagugcuauuacuuug

SEQ ID NO: 1422452 - RNA, 19 nt, Homo sapiens
  misc_RNA (1)...(19): siRNA sense strand
gcaccaaaguggauaaacu

SEQ ID NO: 1422453 - RNA, 19 nt, Homo sapiens
  misc_RNA (1)...(19): siRNA sense strand
ugucagaaguuaccauuug

SEQ ID NO: 1422454 - RNA, 19 nt, Homo sapiens
  misc_RNA (1)...(19): siRNA sense strand
uggcauaugcuuuggauua

SEQ ID NO: 1422455 - RNA, 19 nt, Homo sapiens
  misc_RNA (1)...(19): siRNA sense strand
gaaugugugcccuuaauga

SEQ ID NO: 1422456 - RNA, 19 nt, Homo sapiens
  misc_RNA (1)...(19): siRNA sense strand
cauaugcuuuggauuauug

SEQ ID NO: 1422457 - RNA, 19 nt, Homo sapiens
  misc_RNA (1)...(19): siRNA sense strand
ugaacuagauugcuugauc

SEQ ID NO: 1422458 - RNA, 19 nt, Homo sapiens
  misc_RNA (1)...(19): siRNA sense strand
gaaacaugaugagcaagga

SEQ ID NO: 1422459 - RNA, 19 nt, Homo sapiens
  misc_RNA (1)...(19): siRNA sense strand
uaggugaucuucagcuuug

SEQ ID NO: 1422460 - RNA, 19 nt, Homo sapiens
  misc_RNA (1)...(19): siRNA sense strand
gagaggcugucaguaaaga

SEQ ID NO: 1422461 - RNA, 19 nt, Homo sapiens
  misc_RNA (1)...(19): siRNA sense strand
gcauaugcuuuggauuauu

SEQ ID NO: 1422462 - RNA, 19 nt, Homo sapiens
  misc_RNA (1)...(19): siRNA sense strand
cuagauugcuugaucaaag

SEQ ID NO: 1422463 - RNA, 19 nt, Homo sapiens
  misc_RNA (1)...(19): siRNA sense strand
guuagcaucuuagcaguau

SEQ ID NO: 1422464 - RNA, 19 nt, Homo sapiens
  misc_RNA (1)...(19): siRNA sense strand
gagcacuccuugagcuguu

SEQ ID NO: 1422465 - RNA, 19 nt, Homo sapiens
  misc_RNA (1)...(19): siRNA sense strand
ugaaaagugucagaaguua

SEQ ID NO: 1422466 - RNA, 19 nt, Homo sapiens
  misc_RNA (1)...(19): siRNA sense strand
ggucacagguacuagucuu

SEQ ID NO: 1422467 - RNA, 19 nt, Homo sapiens
  misc_RNA (1)...(19): siRNA sense strand
gucagaaguuaccauuuga

SEQ ID NO: 1422468 - RNA, 19 nt, Homo sapiens
  misc_RNA (1)...(19): siRNA sense strand
ggcauaugcuuuggauuau

SEQ ID NO: 1422469 - RNA, 19 nt, Homo sapiens
  misc_RNA (1)...(19): siRNA sense strand
acagugcuauuacuuugaa

SEQ ID NO: 1422470 - RNA, 19 nt, Homo sapiens
  misc_RNA (1)...(19): siRNA sense strand
caccaaaguggauaaacua

SEQ ID NO: 1422471 - RNA, 19 nt, Homo sapiens
  misc_RNA (1)...(19): siRNA sense strand
gacggucacagugcuauua

SEQ ID NO: 1422472 - RNA, 19 nt, Homo sapiens
  misc_RNA (1)...(19): siRNA sense strand
aagaaugugugcccuuaau

SEQ ID NO: 1422473 - RNA, 19 nt, Homo sapiens
  misc_RNA (1)...(19): siRNA sense strand
uggaugaacuagauugcuu

SEQ ID NO: 1422474 - RNA, 19 nt, Homo sapiens
  misc_RNA (1)...(19): siRNA sense strand
cagaaguuaccauuugauu

SEQ ID NO: 1422475 - RNA, 19 nt, Homo sapiens
  misc_RNA (1)...(19): siRNA sense strand
gaagcgagaggcugucagu

SEQ ID NO: 1422476 - RNA, 19 nt, Homo sapiens
  misc_RNA (1)...(19): siRNA sense strand
ggucacagugcuauuacuu

SEQ ID NO: 1422477 - RNA, 19 nt, Homo sapiens
  misc_RNA (1)...(19): siRNA sense strand
ccaaagauaauuacaaacg

SEQ ID NO: 1422478 - RNA, 19 nt, Homo sapiens
  misc_RNA (1)...(19): siRNA sense strand
aaacccugcugauucugaa

SEQ ID NO: 1422479 - RNA, 19 nt, Homo sapiens
  misc_RNA (1)...(19): siRNA sense strand
gcaaacuggaugaacuaga

SEQ ID NO: 1422480 - RNA, 19 nt, Homo sapiens
  misc_RNA (1)...(19): siRNA sense strand
caagaaugugugcccuuaa

SEQ ID NO: 1422481 - RNA, 19 nt, Homo sapiens
  misc_RNA (1)...(19): siRNA sense strand
caccaucaccaacaacauu

SEQ ID NO: 1422482 - RNA, 19 nt, Homo sapiens
  misc_RNA (1)...(19): siRNA sense strand
gagcgacuuugaucaccau

SEQ ID NO: 1422483 - RNA, 19 nt, Homo sapiens
  misc_RNA (1)...(19): siRNA sense strand
gauagcaccaaaguggaua

SEQ ID NO: 1422484 - RNA, 19 nt, Homo sapiens
  misc_RNA (1)...(19): siRNA sense strand
uguuggaaauuucuugaga

SEQ ID NO: 1422485 - RNA, 19 nt, Homo sapiens
  misc_RNA (1)...(19): siRNA sense strand
uccuugagcuguugaagau

SEQ ID NO: 1422486 - RNA, 19 nt, Homo sapiens
  misc_RNA (1)...(19): siRNA sense strand
gaugaacuagauugcuuga

SEQ ID NO: 1422487 - RNA, 19 nt, Homo sapiens
  misc_RNA (1)...(19): siRNA sense strand
uuucggaacacgaggguua

SEQ ID NO: 1422488 - RNA, 19 nt, Homo sapiens
  misc_RNA (1)...(19): siRNA sense strand
ggccagagcgacuuugauc

SEQ ID NO: 1422489 - RNA, 19 nt, Homo sapiens
  misc_RNA (1)...(19): siRNA sense strand
agcaguauauuccaaagau

SEQ ID NO: 1422490 - RNA, 19 nt, Homo sapiens
  misc_RNA (1)...(19): siRNA sense strand
uuggaaacaugaugagcaa

SEQ ID NO: 1422491 - RNA, 19 nt, Homo sapiens
  misc_RNA (1)...(19): siRNA sense strand
ggauaaacuaguacgagau

SEQ ID NO: 1422492 - RNA, 19 nt, Homo sapiens
  misc_RNA (1)...(19): siRNA sense strand
cuuacuggcuguaccacuu

SEQ ID NO: 1422493 - RNA, 19 nt, Homo sapiens
  misc_RNA (1)...(19): siRNA sense strand
aaacgggucacagguacua

SEQ ID NO: 1422494 - RNA, 19 nt, Homo sapiens
  misc_RNA (1)...(19): siRNA sense strand
uacaaacgggucacaggua

SEQ ID NO: 1422495 - RNA, 19 nt, Homo sapiens
  misc_RNA (1)...(19): siRNA sense strand
gguuagcaucuuagcagua

SEQ ID NO: 1422496 - RNA, 19 nt, Homo sapiens
  misc_RNA (1)...(19): siRNA sense strand
gaacacgaggguuauuuug

SEQ ID NO: 1422497 - RNA, 19 nt, Homo sapiens
  misc_RNA (1)...(19): siRNA sense strand
uagcaucuuagcaguauau

SEQ ID NO: 1422498 - RNA, 19 nt, Homo sapiens
  misc_RNA (1)...(19): siRNA sense strand
ggaacacgaggguuauuuu

SEQ ID NO: 1422499 - RNA, 19 nt, Homo sapiens
  misc_RNA (1)...(19): siRNA sense strand
caggugguauuuguuggaa

SEQ ID NO: 1422500 - RNA, 19 nt, Homo sapiens
  misc_RNA (1)...(19): siRNA sense strand
gaucuucagcuuugcaaac

SEQ ID NO: 1422501 - RNA, 19 nt, Homo sapiens
  misc_RNA (1)...(19): siRNA sense strand
caucuuagcaguauauucc

SEQ ID NO: 1422502 - RNA, 19 nt, Homo sapiens
  misc_RNA (1)...(19): siRNA sense strand
ugaaaacccugcugauucu

SEQ ID NO: 1422503 - RNA, 19 nt, Homo sapiens
  misc_RNA (1)...(19): siRNA sense strand
aguacgagauauuuaugga

SEQ ID NO: 1422504 - RNA, 19 nt, Homo sapiens
  misc_RNA (1)...(19): siRNA sense strand
gcugggcuguggcuucaag

SEQ ID NO: 1422505 - RNA, 19 nt, Homo sapiens
  misc_RNA (1)...(19): siRNA sense strand
ggacggucacagugcuauu

SEQ ID NO: 1422506 - RNA, 19 nt, Homo sapiens
  misc_RNA (1)...(19): siRNA sense strand
uagauugcuugaucaaagg

SEQ ID NO: 1422507 - RNA, 19 nt, Homo sapiens
  misc_RNA (1)...(19): siRNA sense strand
agcgagaggcugucaguaa

SEQ ID NO: 1422508 - RNA, 19 nt, Homo sapiens
  misc_RNA (1)...(19): siRNA sense strand
uuuggucucugcugucuuc

SEQ ID NO: 1422509 - RNA, 19 nt, Homo sapiens
  misc_RNA (1)...(19): siRNA sense strand
cggaacacgaggguuauuu

SEQ ID NO: 1422510 - RNA, 19 nt, Homo sapiens
  misc_RNA (1)...(19): siRNA sense strand
ucguggagauagcaccaaa

SEQ ID NO: 1422511 - RNA, 19 nt, Homo sapiens
  misc_RNA (1)...(19): siRNA sense strand
ccaaaguggauaaacuagu

SEQ ID NO: 1422512 - RNA, 19 nt, Homo sapiens
  misc_RNA (1)...(19): siRNA sense strand
gucacagugcuauuacuuu

SEQ ID NO: 1422513 - RNA, 19 nt, Homo sapiens
  misc_RNA (1)...(19): siRNA sense strand
guggagauagcaccaaagu

SEQ ID NO: 1422514 - RNA, 19 nt, Homo sapiens
  misc_RNA (1)...(19): siRNA sense strand
gagaagcgagaggcuguca

SEQ ID NO: 1422515 - RNA, 19 nt, Homo sapiens
  misc_RNA (1)...(19): siRNA sense strand
aaugugugcccuuaaugaa

SEQ ID NO: 1422516 - RNA, 19 nt, Homo sapiens
  misc_RNA (1)...(19): siRNA sense strand
cucaauagcaagaaugugu

SEQ ID NO: 1422517 - RNA, 19 nt, Homo sapiens
  misc_RNA (1)...(19): siRNA sense strand
aaacuggaugaacuagauu

SEQ ID NO: 1422518 - RNA, 19 nt, Homo sapiens
  misc_RNA (1)...(19): siRNA sense strand
caaaguggauaaacuagua

SEQ ID NO: 1422519 - RNA, 19 nt, Homo sapiens
  misc_RNA (1)...(19): siRNA sense strand
gcaagaaugugugcccuua

SEQ ID NO: 1422520 - RNA, 19 nt, Homo sapiens
  misc_RNA (1)...(19): siRNA sense strand
gcgagaggcugucaguaaa

SEQ ID NO: 1422521 - RNA, 19 nt, Homo sapiens
  misc_RNA (1)...(19): siRNA sense strand
gauaaacuaguacgagaua

SEQ ID NO: 1422522 - RNA, 19 nt, Homo sapiens
  misc_RNA (1)...(19): siRNA sense strand
gcaccaaaguggauaaacu

SEQ ID NO: 1422523 - RNA, 19 nt, Homo sapiens
  misc_RNA (1)...(19): siRNA sense strand
uggcauaugcuuuggauua

SEQ ID NO: 1422524 - RNA, 19 nt, Homo sapiens
  misc_RNA (1)...(19): siRNA sense strand
gaaugugugcccuuaauga

SEQ ID NO: 1422525 - RNA, 19 nt, Homo sapiens
  misc_RNA (1)...(19): siRNA sense strand
cauaugcuuuggauuauug

SEQ ID NO: 1422526 - RNA, 19 nt, Homo sapiens
  misc_RNA (1)...(19): siRNA sense strand
gaaacaugaugagcaagga

SEQ ID NO: 1422527 - RNA, 19 nt, Homo sapiens
  misc_RNA (1)...(19): siRNA sense strand
gagaggcugucaguaaaga

SEQ ID NO: 1422528 - RNA, 19 nt, Homo sapiens
  misc_RNA (1)...(19): siRNA sense strand
gcauaugcuuuggauuauu

SEQ ID NO: 1422529 - RNA, 19 nt, Homo sapiens
  misc_RNA (1)...(19): siRNA sense strand
gagcacuccuugagcuguu

SEQ ID NO: 1422530 - RNA, 19 nt, Homo sapiens
  misc_RNA (1)...(19): siRNA sense strand
ggcauaugcuuuggauuau

SEQ ID NO: 1422531 - RNA, 19 nt, Homo sapiens
  misc_RNA (1)...(19): siRNA sense strand
caccaaaguggauaaacua

SEQ ID NO: 1422532 - RNA, 19 nt, Homo sapiens
  misc_RNA (1)...(19): siRNA sense strand
aagaaugugugcccuuaau

SEQ ID NO: 1422533 - RNA, 19 nt, Homo sapiens
  misc_RNA (1)...(19): siRNA sense strand
gaagcgagaggcugucagu

SEQ ID NO: 1422534 - RNA, 19 nt, Homo sapiens
  misc_RNA (1)...(19): siRNA sense strand
gagcgacuuugaucaccau

SEQ ID NO: 1422535 - RNA, 19 nt, Homo sapiens
  misc_RNA (1)...(19): siRNA sense strand
caagaaugugugcccuuaa

SEQ ID NO: 1422536 - RNA, 19 nt, Homo sapiens
  misc_RNA (1)...(19): siRNA sense strand
caccaucaccaacaacauu

SEQ ID NO: 1422537 - RNA, 19 nt, Homo sapiens
  misc_RNA (1)...(19): siRNA sense strand
gauagcaccaaaguggaua

SEQ ID NO: 1422538 - RNA, 19 nt, Homo sapiens
  misc_RNA (1)...(19): siRNA sense strand
uguuggaaauuucuugaga

SEQ ID NO: 1422539 - RNA, 19 nt, Homo sapiens
  misc_RNA (1)...(19): siRNA sense strand
uccuugagcuguugaagau

SEQ ID NO: 1422540 - RNA, 19 nt, Homo sapiens
  misc_RNA (1)...(19): siRNA sense strand
ggccagagcgacuuugauc

SEQ ID NO: 1422541 - RNA, 19 nt, Homo sapiens
  misc_RNA (1)...(19): siRNA sense strand
uuucggaacacgaggguua

SEQ ID NO: 1422542 - RNA, 19 nt, Homo sapiens
  misc_RNA (1)...(19): siRNA sense strand
uuggaaacaugaugagcaa

SEQ ID NO: 1422543 - RNA, 19 nt, Homo sapiens
  misc_RNA (1)...(19): siRNA sense strand
ggauaaacuaguacgagau

SEQ ID NO: 1422544 - RNA, 19 nt, Homo sapiens
  misc_RNA (1)...(19): siRNA sense strand
gaacacgaggguuauuuug

SEQ ID NO: 1422545 - RNA, 19 nt, Homo sapiens
  misc_RNA (1)...(19): siRNA sense strand
caggugguauuuguuggaa

SEQ ID NO: 1422546 - RNA, 19 nt, Homo sapiens
  misc_RNA (1)...(19): siRNA sense strand
ggaacacgaggguuauuuu

SEQ ID NO: 1422547 - RNA, 19 nt, Homo sapiens
  misc_RNA (1)...(19): siRNA sense strand
aguacgagauauuuaugga

SEQ ID NO: 1422548 - RNA, 19 nt, Homo sapiens
  misc_RNA (1)...(19): siRNA sense strand
gcugggcuguggcuucaag

SEQ ID NO: 1422549 - RNA, 19 nt, Homo sapiens
  misc_RNA (1)...(19): siRNA sense strand
agcgagaggcugucaguaa

SEQ ID NO: 1422550 - RNA, 19 nt, Homo sapiens
  misc_RNA (1)...(19): siRNA sense strand
ucguggagauagcaccaaa

SEQ ID NO: 1422551 - RNA, 19 nt, Homo sapiens
  misc_RNA (1)...(19): siRNA sense strand
cggaacacgaggguuauuu

SEQ ID NO: 1422552 - RNA, 19 nt, Homo sapiens
  misc_RNA (1)...(19): siRNA sense strand
ccaaaguggauaaacuagu

SEQ ID NO: 1422553 - RNA, 19 nt, Homo sapiens
  misc_RNA (1)...(19): siRNA sense strand
guggagauagcaccaaagu

SEQ ID NO: 1422554 - RNA, 19 nt, Homo sapiens
  misc_RNA (1)...(19): siRNA sense strand
gagaagcgagaggcuguca

SEQ ID NO: 1422555 - RNA, 19 nt, Homo sapiens
  misc_RNA (1)...(19): siRNA sense strand
aaugugugcccuuaaugaa

SEQ ID NO: 1422556 - RNA, 19 nt, Homo sapiens
  misc_RNA (1)...(19): siRNA sense strand
cucaauagcaagaaugugu

SEQ ID NO: 1422557 - RNA, 19 nt, Homo sapiens
  misc_RNA (1)...(19): siRNA sense strand
caaaguggauaaacuagua

SEQ ID NO: 1422558 - RNA, 19 nt, Homo sapiens
  misc_RNA (1)...(19): siRNA sense strand
gcaagaaugugugcccuua

SEQ ID NO: 1422559 - RNA, 19 nt, Homo sapiens
  misc_RNA (1)...(19): siRNA sense strand
gaaguuaccauuugauuug

SEQ ID NO: 1422560 - RNA, 19 nt, Homo sapiens
  misc_RNA (1)...(19): siRNA sense strand
gaacuagauugcuugauca

SEQ ID NO: 1422561 - RNA, 19 nt, Homo sapiens
  misc_RNA (1)...(19): siRNA sense strand
ggucucugcugucuucuua

SEQ ID NO: 1422562 - RNA, 19 nt, Homo sapiens
  misc_RNA (1)...(19): siRNA sense strand
gcgagaggcugucaguaaa

SEQ ID NO: 1422563 - RNA, 19 nt, Homo sapiens
  misc_RNA (1)...(19): siRNA sense strand
gcaguauauuccaaagaua

SEQ ID NO: 1422564 - RNA, 19 nt, Homo sapiens
  misc_RNA (1)...(19): siRNA sense strand
gauaaacuaguacgagaua

SEQ ID NO: 1422565 - RNA, 19 nt, Homo sapiens
  misc_RNA (1)...(19): siRNA sense strand
caaacuggaugaacuagau

SEQ ID NO: 1422566 - RNA, 19 nt, Homo sapiens
  misc_RNA (1)...(19): siRNA sense strand
ucacagugcuauuacuuug

SEQ ID NO: 1422567 - RNA, 19 nt, Homo sapiens
  misc_RNA (1)...(19): siRNA sense strand
gcaccaaaguggauaaacu

SEQ ID NO: 1422568 - RNA, 19 nt, Homo sapiens
  misc_RNA (1)...(19): siRNA sense strand
ugucagaaguuaccauuug

SEQ ID NO: 1422569 - RNA, 19 nt, Homo sapiens
  misc_RNA (1)...(19): siRNA sense strand
uggcauaugcuuuggauua

SEQ ID NO: 1422570 - RNA, 19 nt, Homo sapiens
  misc_RNA (1)...(19): siRNA sense strand
gaaugugugcccuuaauga

SEQ ID NO: 1422571 - RNA, 19 nt, Homo sapiens
  misc_RNA (1)...(19): siRNA sense strand
cauaugcuuuggauuauug

SEQ ID NO: 1422572 - RNA, 19 nt, Homo sapiens
  misc_RNA (1)...(19): siRNA sense strand
ugaacuagauugcuugauc

SEQ ID NO: 1422573 - RNA, 19 nt, Homo sapiens
  misc_RNA (1)...(19): siRNA sense strand
gaaacaugaugagcaagga

SEQ ID NO: 1422574 - RNA, 19 nt, Homo sapiens
  misc_RNA (1)...(19): siRNA sense strand
uaggugaucuucagcuuug

SEQ ID NO: 1422575 - RNA, 19 nt, Homo sapiens
  misc_RNA (1)...(19): siRNA sense strand
gagaggcugucaguaaaga

SEQ ID NO: 1422576 - RNA, 19 nt, Homo sapiens
  misc_RNA (1)...(19): siRNA sense strand
gcauaugcuuuggauuauu

SEQ ID NO: 1422577 - RNA, 19 nt, Homo sapiens
  misc_RNA (1)...(19): siRNA sense strand
cuagauugcuugaucaaag

SEQ ID NO: 1422578 - RNA, 19 nt, Homo sapiens
  misc_RNA (1)...(19): siRNA sense strand
guuagcaucuuagcaguau

SEQ ID NO: 1422579 - RNA, 19 nt, Homo sapiens
  misc_RNA (1)...(19): siRNA sense strand
gagcacuccuugagcuguu

SEQ ID NO: 1422580 - RNA, 19 nt, Homo sapiens
  misc_RNA (1)...(19): siRNA sense strand
ugaaaagugucagaaguua

SEQ ID NO: 1422581 - RNA, 19 nt, Homo sapiens
  misc_RNA (1)...(19): siRNA sense strand
ggucacagguacuagucuu

SEQ ID NO: 1422582 - RNA, 19 nt, Homo sapiens
  misc_RNA (1)...(19): siRNA sense strand
gucagaaguuaccauuuga

SEQ ID NO: 1422583 - RNA, 19 nt, Homo sapiens
  misc_RNA (1)...(19): siRNA sense strand
ggcauaugcuuuggauuau

SEQ ID NO: 1422584 - RNA, 19 nt, Homo sapiens
  misc_RNA (1)...(19): siRNA sense strand
acagugcuauuacuuugaa

SEQ ID NO: 1422585 - RNA, 19 nt, Homo sapiens
  misc_RNA (1)...(19): siRNA sense strand
caccaaaguggauaaacua

SEQ ID NO: 1422586 - RNA, 19 nt, Homo sapiens
  misc_RNA (1)...(19): siRNA sense strand
gacggucacagugcuauua

SEQ ID NO: 1422587 - RNA, 19 nt, Homo sapiens
  misc_RNA (1)...(19): siRNA sense strand
aagaaugugugcccuuaau

SEQ ID NO: 1422588 - RNA, 19 nt, Homo sapiens
  misc_RNA (1)...(19): siRNA sense strand
uggaugaacuagauugcuu

SEQ ID NO: 1422589 - RNA, 19 nt, Homo sapiens
  misc_RNA (1)...(19): siRNA sense strand
cagaaguuaccauuugauu

SEQ ID NO: 1422590 - RNA, 19 nt, Homo sapiens
  misc_RNA (1)...(19): siRNA sense strand
gaagcgagaggcugucagu

SEQ ID NO: 1422591 - RNA, 19 nt, Homo sapiens
  misc_RNA (1)...(19): siRNA sense strand
ggucacagugcuauuacuu

SEQ ID NO: 1422592 - RNA, 19 nt, Homo sapiens
  misc_RNA (1)...(19): siRNA sense strand
ccaaagauaauuacaaacg

SEQ ID NO: 1422593 - RNA, 19 nt, Homo sapiens
  misc_RNA (1)...(19): siRNA sense strand
aaacccugcugauucugaa

SEQ ID NO: 1422594 - RNA, 19 nt, Homo sapiens
  misc_RNA (1)...(19): siRNA sense strand
gcaaacuggaugaacuaga

SEQ ID NO: 1422595 - RNA, 19 nt, Homo sapiens
  misc_RNA (1)...(19): siRNA sense strand
caagaaugugugcccuuaa

SEQ ID NO: 1422596 - RNA, 19 nt, Homo sapiens
  misc_RNA (1)...(19): siRNA sense strand
caccaucaccaacaacauu

SEQ ID NO: 1422597 - RNA, 19 nt, Homo sapiens
  misc_RNA (1)...(19): siRNA sense strand
gagcgacuuugaucaccau

SEQ ID NO: 1422598 - RNA, 19 nt, Homo sapiens
  misc_RNA (1)...(19): siRNA sense strand
gauagcaccaaaguggaua

SEQ ID NO: 1422599 - RNA, 19 nt, Homo sapiens
  misc_RNA (1)...(19): siRNA sense strand
uguuggaaauuucuugaga

SEQ ID NO: 1422600 - RNA, 19 nt, Homo sapiens
  misc_RNA (1)...(19): siRNA sense strand
uccuugagcuguugaagau

SEQ ID NO: 1422601 - RNA, 19 nt, Homo sapiens
  misc_RNA (1)...(19): siRNA sense strand
gaugaacuagauugcuuga

SEQ ID NO: 1422602 - RNA, 19 nt, Homo sapiens
  misc_RNA (1)...(19): siRNA sense strand
uuucggaacacgaggguua

SEQ ID NO: 1422603 - RNA, 19 nt, Homo sapiens
  misc_RNA (1)...(19): siRNA sense strand
ggccagagcgacuuugauc

SEQ ID NO: 1422604 - RNA, 19 nt, Homo sapiens
  misc_RNA (1)...(19): siRNA sense strand
agcaguauauuccaaagau

SEQ ID NO: 1422605 - RNA, 19 nt, Homo sapiens
  misc_RNA (1)...(19): siRNA sense strand
uuggaaacaugaugagcaa

SEQ ID NO: 1422606 - RNA, 19 nt, Homo sapiens
  misc_RNA (1)...(19): siRNA sense strand
ggauaaacuaguacgagau

SEQ ID NO: 1422607 - RNA, 19 nt, Homo sapiens
  misc_RNA (1)...(19): siRNA sense strand
cuuacuggcuguaccacuu

SEQ ID NO: 1422608 - RNA, 19 nt, Homo sapiens
  misc_RNA (1)...(19): siRNA sense strand
aaacgggucacagguacua

SEQ ID NO: 1422609 - RNA, 19 nt, Homo sapiens
  misc_RNA (1)...(19): siRNA sense strand
uacaaacgggucacaggua

SEQ ID NO: 1422610 - RNA, 19 nt, Homo sapiens
  misc_RNA (1)...(19): siRNA sense strand
gguuagcaucuuagcagua

SEQ ID NO: 1422611 - RNA, 19 nt, Homo sapiens
  misc_RNA (1)...(19): siRNA sense strand
gaacacgaggguuauuuug

SEQ ID NO: 1422612 - RNA, 19 nt, Homo sapiens
  misc_RNA (1)...(19): siRNA sense strand
uagcaucuuagcaguauau

SEQ ID NO: 1422613 - RNA, 19 nt, Homo sapiens
  misc_RNA (1)...(19): siRNA sense strand
ggaacacgaggguuauuuu

SEQ ID NO: 1422614 - RNA, 19 nt, Homo sapiens
  misc_RNA (1)...(19): siRNA sense strand
caggugguauuuguuggaa

SEQ ID NO: 1422615 - RNA, 19 nt, Homo sapiens
  misc_RNA (1)...(19): siRNA sense strand
gaucuucagcuuugcaaac

SEQ ID NO: 1422616 - RNA, 19 nt, Homo sapiens
  misc_RNA (1)...(19): siRNA sense strand
caucuuagcaguauauucc

SEQ ID NO: 1422617 - RNA, 19 nt, Homo sapiens
  misc_RNA (1)...(19): siRNA sense strand
ugaaaacccugcugauucu

SEQ ID NO: 1422618 - RNA, 19 nt, Homo sapiens
  misc_RNA (1)...(19): siRNA sense strand
aguacgagauauuuaugga

SEQ ID NO: 1422619 - RNA, 19 nt, Homo sapiens
  misc_RNA (1)...(19): siRNA sense strand
gcugggcuguggcuucaag

SEQ ID NO: 1422620 - RNA, 19 nt, Homo sapiens
  misc_RNA (1)...(19): siRNA sense strand
ggacggucacagugcuauu

SEQ ID NO: 1422621 - RNA, 19 nt, Homo sapiens
  misc_RNA (1)...(19): siRNA sense strand
uagauugcuugaucaaagg

SEQ ID NO: 1422622 - RNA, 19 nt, Homo sapiens
  misc_RNA (1)...(19): siRNA sense strand
agcgagaggcugucaguaa

SEQ ID NO: 1422623 - RNA, 19 nt, Homo sapiens
  misc_RNA (1)...(19): siRNA sense strand
uuuggucucugcugucuuc

SEQ ID NO: 1422624 - RNA, 19 nt, Homo sapiens
  misc_RNA (1)...(19): siRNA sense strand
cggaacacgaggguuauuu

SEQ ID NO: 1422625 - RNA, 19 nt, Homo sapiens
  misc_RNA (1)...(19): siRNA sense strand
ucguggagauagcaccaaa

SEQ ID NO: 1422626 - RNA, 19 nt, Homo sapiens
  misc_RNA (1)...(19): siRNA sense strand
ccaaaguggauaaacuagu

SEQ ID NO: 1422627 - RNA, 19 nt, Homo sapiens
  misc_RNA (1)...(19): siRNA sense strand
gucacagugcuauuacuuu

SEQ ID NO: 1422628 - RNA, 19 nt, Homo sapiens
  misc_RNA (1)...(19): siRNA sense strand
guggagauagcaccaaagu

SEQ ID NO: 1422629 - RNA, 19 nt, Homo sapiens
  misc_RNA (1)...(19): siRNA sense strand
gagaagcgagaggcuguca

SEQ ID NO: 1422630 - RNA, 19 nt, Homo sapiens
  misc_RNA (1)...(19): siRNA sense strand
aaugugugcccuuaaugaa

SEQ ID NO: 1422631 - RNA, 19 nt, Homo sapiens
  misc_RNA (1)...(19): siRNA sense strand
cucaauagcaagaaugugu

SEQ ID NO: 1422632 - RNA, 19 nt, Homo sapiens
  misc_RNA (1)...(19): siRNA sense strand
aaacuggaugaacuagauu

SEQ ID NO: 1422633 - RNA, 19 nt, Homo sapiens
  misc_RNA (1)...(19): siRNA sense strand
caaaguggauaaacuagua

SEQ ID NO: 1422634 - RNA, 19 nt, Homo sapiens
  misc_RNA (1)...(19): siRNA sense strand
gcaagaaugugugcccuua

SEQ ID NO: 1422635 - RNA, 19 nt, Homo sapiens
  misc_RNA (1)...(19): siRNA sense strand
gcgagaggcugucaguaaa

SEQ ID NO: 1422636 - RNA, 19 nt, Homo sapiens
  misc_RNA (1)...(19): siRNA sense strand
gauaaacuaguacgagaua

SEQ ID NO: 1422637 - RNA, 19 nt, Homo sapiens
  misc_RNA (1)...(19): siRNA sense strand
gcaccaaaguggauaaacu

SEQ ID NO: 1422638 - RNA, 19 nt, Homo sapiens
  misc_RNA (1)...(19): siRNA sense strand
uggcauaugcuuuggauua

SEQ ID NO: 1422639 - RNA, 19 nt, Homo sapiens
  misc_RNA (1)...(19): siRNA sense strand
gaaugugugcccuuaauga

SEQ ID NO: 1422640 - RNA, 19 nt, Homo sapiens
  misc_RNA (1)...(19): siRNA sense strand
cauaugcuuuggauuauug

SEQ ID NO: 1422641 - RNA, 19 nt, Homo sapiens
  misc_RNA (1)...(19): siRNA sense strand
gaaacaugaugagcaagga

SEQ ID NO: 1422642 - RNA, 19 nt, Homo sapiens
  misc_RNA (1)...(19): siRNA sense strand
gagaggcugucaguaaaga

SEQ ID NO: 1422643 - RNA, 19 nt, Homo sapiens
  misc_RNA (1)...(19): siRNA sense strand
gcauaugcuuuggauuauu

SEQ ID NO: 1422644 - RNA, 19 nt, Homo sapiens
  misc_RNA (1)...(19): siRNA sense strand
gagcacuccuugagcuguu

SEQ ID NO: 1422645 - RNA, 19 nt, Homo sapiens
  misc_RNA (1)...(19): siRNA sense strand
ggcauaugcuuuggauuau

SEQ ID NO: 1422646 - RNA, 19 nt, Homo sapiens
  misc_RNA (1)...(19): siRNA sense strand
caccaaaguggauaaacua

SEQ ID NO: 1422647 - RNA, 19 nt, Homo sapiens
  misc_RNA (1)...(19): siRNA sense strand
aagaaugugugcccuuaau

SEQ ID NO: 1422648 - RNA, 19 nt, Homo sapiens
  misc_RNA (1)...(19): siRNA sense strand
gaagcgagaggcugucagu

SEQ ID NO: 1422649 - RNA, 19 nt, Homo sapiens
  misc_RNA (1)...(19): siRNA sense strand
gagcgacuuugaucaccau

SEQ ID NO: 1422650 - RNA, 19 nt, Homo sapiens
  misc_RNA (1)...(19): siRNA sense strand
caagaaugugugcccuuaa

SEQ ID NO: 1422651 - RNA, 19 nt, Homo sapiens
  misc_RNA (1)...(19): siRNA sense strand
caccaucaccaacaacauu

SEQ ID NO: 1422652 - RNA, 19 nt, Homo sapiens
  misc_RNA (1)...(19): siRNA sense strand
gauagcaccaaaguggaua

SEQ ID NO: 1422653 - RNA, 19 nt, Homo sapiens
  misc_RNA (1)...(19): siRNA sense strand
uguuggaaauuucuugaga

SEQ ID NO: 1422654 - RNA, 19 nt, Homo sapiens
  misc_RNA (1)...(19): siRNA sense strand
uccuugagcuguugaagau

SEQ ID NO: 1422655 - RNA, 19 nt, Homo sapiens
  misc_RNA (1)...(19): siRNA sense strand
ggccagagcgacuuugauc

SEQ ID NO: 1422656 - RNA, 19 nt, Homo sapiens
  misc_RNA (1)...(19): siRNA sense strand
uuucggaacacgaggguua

SEQ ID NO: 1422657 - RNA, 19 nt, Homo sapiens
  misc_RNA (1)...(19): siRNA sense strand
uuggaaacaugaugagcaa

SEQ ID NO: 1422658 - RNA, 19 nt, Homo sapiens
  misc_RNA (1)...(19): siRNA sense strand
ggauaaacuaguacgagau

SEQ ID NO: 1422659 - RNA, 19 nt, Homo sapiens
  misc_RNA (1)...(19): siRNA sense strand
gaacacgaggguuauuuug

SEQ ID NO: 1422660 - RNA, 19 nt, Homo sapiens
  misc_RNA (1)...(19): siRNA sense strand
caggugguauuuguuggaa

SEQ ID NO: 1422661 - RNA, 19 nt, Homo sapiens
  misc_RNA (1)...(19): siRNA sense strand
ggaacacgaggguuauuuu

SEQ ID NO: 1422662 - RNA, 19 nt, Homo sapiens
  misc_RNA (1)...(19): siRNA sense strand
aguacgagauauuuaugga

SEQ ID NO: 1422663 - RNA, 19 nt, Homo sapiens
  misc_RNA (1)...(19): siRNA sense strand
gcugggcuguggcuucaag

SEQ ID NO: 1422664 - RNA, 19 nt, Homo sapiens
  misc_RNA (1)...(19): siRNA sense strand
agcgagaggcugucaguaa

SEQ ID NO: 1422665 - RNA, 19 nt, Homo sapiens
  misc_RNA (1)...(19): siRNA sense strand
ucguggagauagcaccaaa

SEQ ID NO: 1422666 - RNA, 19 nt, Homo sapiens
  misc_RNA (1)...(19): siRNA sense strand
cggaacacgaggguuauuu

SEQ ID NO: 1422667 - RNA, 19 nt, Homo sapiens
  misc_RNA (1)...(19): siRNA sense strand
ccaaaguggauaaacuagu

SEQ ID NO: 1422668 - RNA, 19 nt, Homo sapiens
  misc_RNA (1)...(19): siRNA sense strand
guggagauagcaccaaagu

SEQ ID NO: 1422669 - RNA, 19 nt, Homo sapiens
  misc_RNA (1)...(19): siRNA sense strand
gagaagcgagaggcuguca

SEQ ID NO: 1422670 - RNA, 19 nt, Homo sapiens
  misc_RNA (1)...(19): siRNA sense strand
aaugugugcccuuaaugaa

SEQ ID NO: 1422671 - RNA, 19 nt, Homo sapiens
  misc_RNA (1)...(19): siRNA sense strand
cucaauagcaagaaugugu

SEQ ID NO: 1422672 - RNA, 19 nt, Homo sapiens
  misc_RNA (1)...(19): siRNA sense strand
caaaguggauaaacuagua

SEQ ID NO: 1422673 - RNA, 19 nt, Homo sapiens
  misc_RNA (1)...(19): siRNA sense strand
gcaagaaugugugcccuua

SEQ ID NO: 1422674 - RNA, 19 nt, Homo sapiens
  misc_RNA (1)...(19): siRNA sense strand
ggaaguaccugaccuccaa

SEQ ID NO: 1422675 - RNA, 19 nt, Homo sapiens
  misc_RNA (1)...(19): siRNA sense strand
gaaguuaccauuugauuug

SEQ ID NO: 1422676 - RNA, 19 nt, Homo sapiens
  misc_RNA (1)...(19): siRNA sense strand
gaacuagauugcuugauca

SEQ ID NO: 1422677 - RNA, 19 nt, Homo sapiens
  misc_RNA (1)...(19): siRNA sense strand
ggucucugcugucuucuua

SEQ ID NO: 1422678 - RNA, 19 nt, Homo sapiens
  misc_RNA (1)...(19): siRNA sense strand
agacaucacugcugaagaa

SEQ ID NO: 1422679 - RNA, 19 nt, Homo sapiens
  misc_RNA (1)...(19): siRNA sense strand
gcgagaggcugucaguaaa

SEQ ID NO: 1422680 - RNA, 19 nt, Homo sapiens
  misc_RNA (1)...(19): siRNA sense strand
gcaguauauuccaaagaua

SEQ ID NO: 1422681 - RNA, 19 nt, Homo sapiens
  misc_RNA (1)...(19): siRNA sense strand
gauaaacuaguacgagaua

SEQ ID NO: 1422682 - RNA, 19 nt, Homo sapiens
  misc_RNA (1)...(19): siRNA sense strand
caaacuggaugaacuagau

SEQ ID NO: 1422683 - RNA, 19 nt, Homo sapiens
  misc_RNA (1)...(19): siRNA sense strand
caucacugcugaagaagaa

SEQ ID NO: 1422684 - RNA, 19 nt, Homo sapiens
  misc_RNA (1)...(19): siRNA sense strand
ucacagugcuauuacuuug

SEQ ID NO: 1422685 - RNA, 19 nt, Homo sapiens
  misc_RNA (1)...(19): siRNA sense strand
gcaccaaaguggauaaacu

SEQ ID NO: 1422686 - RNA, 19 nt, Homo sapiens
  misc_RNA (1)...(19): siRNA sense strand
ugucagaaguuaccauuug

SEQ ID NO: 1422687 - RNA, 19 nt, Homo sapiens
  misc_RNA (1)...(19): siRNA sense strand
uggcauaugcuuuggauua

SEQ ID NO: 1422688 - RNA, 19 nt, Homo sapiens
  misc_RNA (1)...(19): siRNA sense strand
gaaugugugcccuuaauga

SEQ ID NO: 1422689 - RNA, 19 nt, Homo sapiens
  misc_RNA (1)...(19): siRNA sense strand
cauaugcuuuggauuauug

SEQ ID NO: 1422690 - RNA, 19 nt, Homo sapiens
  misc_RNA (1)...(19): siRNA sense strand
uggucaagcugguauauuu

SEQ ID NO: 1422691 - RNA, 19 nt, Homo sapiens
  misc_RNA (1)...(19): siRNA sense strand
ugaacuagauugcuugauc

SEQ ID NO: 1422692 - RNA, 19 nt, Homo sapiens
  misc_RNA (1)...(19): siRNA sense strand
gaaacaugaugagcaagga

SEQ ID NO: 1422693 - RNA, 19 nt, Homo sapiens
  misc_RNA (1)...(19): siRNA sense strand
uaggugaucuucagcuuug

SEQ ID NO: 1422694 - RNA, 19 nt, Homo sapiens
  misc_RNA (1)...(19): siRNA sense strand
gagaggcugucaguaaaga

SEQ ID NO: 1422695 - RNA, 19 nt, Homo sapiens
  misc_RNA (1)...(19): siRNA sense strand
gcauaugcuuuggauuauu

SEQ ID NO: 1422696 - RNA, 19 nt, Homo sapiens
  misc_RNA (1)...(19): siRNA sense strand
cuagauugcuugaucaaag

SEQ ID NO: 1422697 - RNA, 19 nt, Homo sapiens
  misc_RNA (1)...(19): siRNA sense strand
guuagcaucuuagcaguau

SEQ ID NO: 1422698 - RNA, 19 nt, Homo sapiens
  misc_RNA (1)...(19): siRNA sense strand
gagcacuccuugagcuguu

SEQ ID NO: 1422699 - RNA, 19 nt, Homo sapiens
  misc_RNA (1)...(19): siRNA sense strand
ugaaaagugucagaaguua

SEQ ID NO: 1422700 - RNA, 19 nt, Homo sapiens
  misc_RNA (1)...(19): siRNA sense strand
ggucacagguacuagucuu

SEQ ID NO: 1422701 - RNA, 19 nt, Homo sapiens
  misc_RNA (1)...(19): siRNA sense strand
gucagaaguuaccauuuga

SEQ ID NO: 1422702 - RNA, 19 nt, Homo sapiens
  misc_RNA (1)...(19): siRNA sense strand
ggcauaugcuuuggauuau

SEQ ID NO: 1422703 - RNA, 19 nt, Homo sapiens
  misc_RNA (1)...(19): siRNA sense strand
acagugcuauuacuuugaa

SEQ ID NO: 1422704 - RNA, 19 nt, Homo sapiens
  misc_RNA (1)...(19): siRNA sense strand
caccaaaguggauaaacua

SEQ ID NO: 1422705 - RNA, 19 nt, Homo sapiens
  misc_RNA (1)...(19): siRNA sense strand
gacggucacagugcuauua

SEQ ID NO: 1422706 - RNA, 19 nt, Homo sapiens
  misc_RNA (1)...(19): siRNA sense strand
aagaaugugugcccuuaau

SEQ ID NO: 1422707 - RNA, 19 nt, Homo sapiens
  misc_RNA (1)...(19): siRNA sense strand
uggaugaacuagauugcuu

SEQ ID NO: 1422708 - RNA, 19 nt, Homo sapiens
  misc_RNA (1)...(19): siRNA sense strand
ugaagaagaagaggaagaa

SEQ ID NO: 1422709 - RNA, 19 nt, Homo sapiens
  misc_RNA (1)...(19): siRNA sense strand
agaagaagaggaagaagug

SEQ ID NO: 1422710 - RNA, 19 nt, Homo sapiens
  misc_RNA (1)...(19): siRNA sense strand
cagaaguuaccauuugauu

SEQ ID NO: 1422711 - RNA, 19 nt, Homo sapiens
  misc_RNA (1)...(19): siRNA sense strand
gaagcgagaggcugucagu

SEQ ID NO: 1422712 - RNA, 19 nt, Homo sapiens
  misc_RNA (1)...(19): siRNA sense strand
ggucacagugcuauuacuu

SEQ ID NO: 1422713 - RNA, 19 nt, Homo sapiens
  misc_RNA (1)...(19): siRNA sense strand
ccaaagauaauuacaaacg

SEQ ID NO: 1422714 - RNA, 19 nt, Homo sapiens
  misc_RNA (1)...(19): siRNA sense strand
aaacccugcugauucugaa

SEQ ID NO: 1422715 - RNA, 19 nt, Homo sapiens
  misc_RNA (1)...(19): siRNA sense strand
gaaguggaaagucuuaaaa

SEQ ID NO: 1422716 - RNA, 19 nt, Homo sapiens
  misc_RNA (1)...(19): siRNA sense strand
caagaaugugugcccuuaa

SEQ ID NO: 1422717 - RNA, 19 nt, Homo sapiens
  misc_RNA (1)...(19): siRNA sense strand
caccaucaccaacaacauu

SEQ ID NO: 1422718 - RNA, 19 nt, Homo sapiens
  misc_RNA (1)...(19): siRNA sense strand
gagcgacuuugaucaccau

SEQ ID NO: 1422719 - RNA, 19 nt, Homo sapiens
  misc_RNA (1)...(19): siRNA sense strand
gcaaacuggaugaacuaga

SEQ ID NO: 1422720 - RNA, 19 nt, Homo sapiens
  misc_RNA (1)...(19): siRNA sense strand
gauagcaccaaaguggaua

SEQ ID NO: 1422721 - RNA, 19 nt, Homo sapiens
  misc_RNA (1)...(19): siRNA sense strand
aggaagaaguggaaagucu

SEQ ID NO: 1422722 - RNA, 19 nt, Homo sapiens
  misc_RNA (1)...(19): siRNA sense strand
uguuggaaauuucuugaga

SEQ ID NO: 1422723 - RNA, 19 nt, Homo sapiens
  misc_RNA (1)...(19): siRNA sense strand
guaccugaccuccaaugug

SEQ ID NO: 1422724 - RNA, 19 nt, Homo sapiens
  misc_RNA (1)...(19): siRNA sense strand
uccuugagcuguugaagau

SEQ ID NO: 1422725 - RNA, 19 nt, Homo sapiens
  misc_RNA (1)...(19): siRNA sense strand
gaagaggaagaaguggaaa

SEQ ID NO: 1422726 - RNA, 19 nt, Homo sapiens
  misc_RNA (1)...(19): siRNA sense strand
ccuccaauguggcuuaugg

SEQ ID NO: 1422727 - RNA, 19 nt, Homo sapiens
  misc_RNA (1)...(19): siRNA sense strand
guggaacucuggucaagcu

SEQ ID NO: 1422728 - RNA, 19 nt, Homo sapiens
  misc_RNA (1)...(19): siRNA sense strand
uuucggaacacgaggguua

SEQ ID NO: 1422729 - RNA, 19 nt, Homo sapiens
  misc_RNA (1)...(19): siRNA sense strand
ggccagagcgacuuugauc

SEQ ID NO: 1422730 - RNA, 19 nt, Homo sapiens
  misc_RNA (1)...(19): siRNA sense strand
gaugaacuagauugcuuga

SEQ ID NO: 1422731 - RNA, 19 nt, Homo sapiens
  misc_RNA (1)...(19): siRNA sense strand
agcaguauauuccaaagau

SEQ ID NO: 1422732 - RNA, 19 nt, Homo sapiens
  misc_RNA (1)...(19): siRNA sense strand
uuggaaacaugaugagcaa

SEQ ID NO: 1422733 - RNA, 19 nt, Homo sapiens
  misc_RNA (1)...(19): siRNA sense strand
ggauaaacuaguacgagau

SEQ ID NO: 1422734 - RNA, 19 nt, Homo sapiens
  misc_RNA (1)...(19): siRNA sense strand
cuuacuggcuguaccacuu

SEQ ID NO: 1422735 - RNA, 19 nt, Homo sapiens
  misc_RNA (1)...(19): siRNA sense strand
aaacgggucacagguacua

SEQ ID NO: 1422736 - RNA, 19 nt, Homo sapiens
  misc_RNA (1)...(19): siRNA sense strand
uacaaacgggucacaggua

SEQ ID NO: 1422737 - RNA, 19 nt, Homo sapiens
  misc_RNA (1)...(19): siRNA sense strand
gguuagcaucuuagcagua

SEQ ID NO: 1422738 - RNA, 19 nt, Homo sapiens
  misc_RNA (1)...(19): siRNA sense strand
gaacacgaggguuauuuug

SEQ ID NO: 1422739 - RNA, 19 nt, Homo sapiens
  misc_RNA (1)...(19): siRNA sense strand
agaaguggaaagucuuaaa

SEQ ID NO: 1422740 - RNA, 19 nt, Homo sapiens
  misc_RNA (1)...(19): siRNA sense strand
ugaccuccaauguggcuua

SEQ ID NO: 1422741 - RNA, 19 nt, Homo sapiens
  misc_RNA (1)...(19): siRNA sense strand
gaucuucagcuuugcaaac

SEQ ID NO: 1422742 - RNA, 19 nt, Homo sapiens
  misc_RNA (1)...(19): siRNA sense strand
ggaacacgaggguuauuuu

SEQ ID NO: 1422743 - RNA, 19 nt, Homo sapiens
  misc_RNA (1)...(19): siRNA sense strand
uuaaaagcauucggaagua

SEQ ID NO: 1422744 - RNA, 19 nt, Homo sapiens
  misc_RNA (1)...(19): siRNA sense strand
caggugguauuuguuggaa

SEQ ID NO: 1422745 - RNA, 19 nt, Homo sapiens
  misc_RNA (1)...(19): siRNA sense strand
agaagaggaagaaguggaa

SEQ ID NO: 1422746 - RNA, 19 nt, Homo sapiens
  misc_RNA (1)...(19): siRNA sense strand
caucuuagcaguauauucc

SEQ ID NO: 1422747 - RNA, 19 nt, Homo sapiens
  misc_RNA (1)...(19): siRNA sense strand
uagcaucuuagcaguauau

SEQ ID NO: 1422748 - RNA, 19 nt, Homo sapiens
  misc_RNA (1)...(19): siRNA sense strand
ugaaaacccugcugauucu

SEQ ID NO: 1422749 - RNA, 19 nt, Homo sapiens
  misc_RNA (1)...(19): siRNA sense strand
aguacgagauauuuaugga

SEQ ID NO: 1422750 - RNA, 19 nt, Homo sapiens
  misc_RNA (1)...(19): siRNA sense strand
ggaaagucuuaaaagcauu

SEQ ID NO: 1422751 - RNA, 19 nt, Homo sapiens
  misc_RNA (1)...(19): siRNA sense strand
uagauugcuugaucaaagg

SEQ ID NO: 1422752 - RNA, 19 nt, Homo sapiens
  misc_RNA (1)...(19): siRNA sense strand
agcgagaggcugucaguaa

SEQ ID NO: 1422753 - RNA, 19 nt, Homo sapiens
  misc_RNA (1)...(19): siRNA sense strand
gcugggcuguggcuucaag

SEQ ID NO: 1422754 - RNA, 19 nt, Homo sapiens
  misc_RNA (1)...(19): siRNA sense strand
ggacggucacagugcuauu

SEQ ID NO: 1422755 - RNA, 19 nt, Homo sapiens
  misc_RNA (1)...(19): siRNA sense strand
uuaugggucuacaggcauu

SEQ ID NO: 1422756 - RNA, 19 nt, Homo sapiens
  misc_RNA (1)...(19): siRNA sense strand
gaccuccaauguggcuuau

SEQ ID NO: 1422757 - RNA, 19 nt, Homo sapiens
  misc_RNA (1)...(19): siRNA sense strand
cggaacacgaggguuauuu

SEQ ID NO: 1422758 - RNA, 19 nt, Homo sapiens
  misc_RNA (1)...(19): siRNA sense strand
caaagacaucacugcugaa

SEQ ID NO: 1422759 - RNA, 19 nt, Homo sapiens
  misc_RNA (1)...(19): siRNA sense strand
ucguggagauagcaccaaa

SEQ ID NO: 1422760 - RNA, 19 nt, Homo sapiens
  misc_RNA (1)...(19): siRNA sense strand
uuuggucucugcugucuuc

SEQ ID NO: 1422761 - RNA, 19 nt, Homo sapiens
  misc_RNA (1)...(19): siRNA sense strand
gucacagugcuauuacuuu

SEQ ID NO: 1422762 - RNA, 19 nt, Homo sapiens
  misc_RNA (1)...(19): siRNA sense strand
ccaaaguggauaaacuagu

SEQ ID NO: 1422763 - RNA, 19 nt, Homo sapiens
  misc_RNA (1)...(19): siRNA sense strand
gaagaagaagaggaagaag

SEQ ID NO: 1422764 - RNA, 19 nt, Homo sapiens
  misc_RNA (1)...(19): siRNA sense strand
cugaaggaccugacucugu

SEQ ID NO: 1422765 - RNA, 19 nt, Homo sapiens
  misc_RNA (1)...(19): siRNA sense strand
guggagauagcaccaaagu

SEQ ID NO: 1422766 - RNA, 19 nt, Homo sapiens
  misc_RNA (1)...(19): siRNA sense strand
gacucuguguggacgcaaa

SEQ ID NO: 1422767 - RNA, 19 nt, Homo sapiens
  misc_RNA (1)...(19): siRNA sense strand
aaacuggaugaacuagauu

SEQ ID NO: 1422768 - RNA, 19 nt, Homo sapiens
  misc_RNA (1)...(19): siRNA sense strand
aaugugugcccuuaaugaa

SEQ ID NO: 1422769 - RNA, 19 nt, Homo sapiens
  misc_RNA (1)...(19): siRNA sense strand
cucaauagcaagaaugugu

SEQ ID NO: 1422770 - RNA, 19 nt, Homo sapiens
  misc_RNA (1)...(19): siRNA sense strand
gagaagcgagaggcuguca

SEQ ID NO: 1422771 - RNA, 19 nt, Homo sapiens
  misc_RNA (1)...(19): siRNA sense strand
ggaaguaccugaccuccaa

SEQ ID NO: 1422772 - RNA, 19 nt, Homo sapiens
  misc_RNA (1)...(19): siRNA sense strand
agacaucacugcugaagaa

SEQ ID NO: 1422773 - RNA, 19 nt, Homo sapiens
  misc_RNA (1)...(19): siRNA sense strand
caucacugcugaagaagaa

SEQ ID NO: 1422774 - RNA, 19 nt, Homo sapiens
  misc_RNA (1)...(19): siRNA sense strand
uggucaagcugguauauuu

SEQ ID NO: 1422775 - RNA, 19 nt, Homo sapiens
  misc_RNA (1)...(19): siRNA sense strand
ugaagaagaagaggaagaa

SEQ ID NO: 1422776 - RNA, 19 nt, Homo sapiens
  misc_RNA (1)...(19): siRNA sense strand
agaagaagaggaagaagug

SEQ ID NO: 1422777 - RNA, 19 nt, Homo sapiens
  misc_RNA (1)...(19): siRNA sense strand
gaaguggaaagucuuaaaa

SEQ ID NO: 1422778 - RNA, 19 nt, Homo sapiens
  misc_RNA (1)...(19): siRNA sense strand
aggaagaaguggaaagucu

SEQ ID NO: 1422779 - RNA, 19 nt, Homo sapiens
  misc_RNA (1)...(19): siRNA sense strand
gaagaggaagaaguggaaa

SEQ ID NO: 1422780 - RNA, 19 nt, Homo sapiens
  misc_RNA (1)...(19): siRNA sense strand
ccuccaauguggcuuaugg

SEQ ID NO: 1422781 - RNA, 19 nt, Homo sapiens
  misc_RNA (1)...(19): siRNA sense strand
guaccugaccuccaaugug

SEQ ID NO: 1422782 - RNA, 19 nt, Homo sapiens
  misc_RNA (1)...(19): siRNA sense strand
guggaacucuggucaagcu

SEQ ID NO: 1422783 - RNA, 19 nt, Homo sapiens
  misc_RNA (1)...(19): siRNA sense strand
agaaguggaaagucuuaaa

SEQ ID NO: 1422784 - RNA, 19 nt, Homo sapiens
  misc_RNA (1)...(19): siRNA sense strand
ugaccuccaauguggcuua

SEQ ID NO: 1422785 - RNA, 19 nt, Homo sapiens
  misc_RNA (1)...(19): siRNA sense strand
agaagaggaagaaguggaa

SEQ ID NO: 1422786 - RNA, 19 nt, Homo sapiens
  misc_RNA (1)...(19): siRNA sense strand
uuaaaagcauucggaagua

SEQ ID NO: 1422787 - RNA, 19 nt, Homo sapiens
  misc_RNA (1)...(19): siRNA sense strand
ggaaagucuuaaaagcauu

SEQ ID NO: 1422788 - RNA, 19 nt, Homo sapiens
  misc_RNA (1)...(19): siRNA sense strand
uuaugggucuacaggcauu

SEQ ID NO: 1422789 - RNA, 19 nt, Homo sapiens
  misc_RNA (1)...(19): siRNA sense strand
caaagacaucacugcugaa

SEQ ID NO: 1422790 - RNA, 19 nt, Homo sapiens
  misc_RNA (1)...(19): siRNA sense strand
gaccuccaauguggcuuau

SEQ ID NO: 1422791 - RNA, 19 nt, Homo sapiens
  misc_RNA (1)...(19): siRNA sense strand
gaagaagaagaggaagaag

SEQ ID NO: 1422792 - RNA, 19 nt, Homo sapiens
  misc_RNA (1)...(19): siRNA sense strand
gacucuguguggacgcaaa

SEQ ID NO: 1422793 - RNA, 19 nt, Homo sapiens
  misc_RNA (1)...(19): siRNA sense strand
cugaaggaccugacucugu

SEQ ID NO: 1422794 - RNA, 19 nt, Homo sapiens
  misc_RNA (1)...(19): siRNA sense strand
caaaguggauaaacuagua

SEQ ID NO: 1422795 - RNA, 19 nt, Homo sapiens
  misc_RNA (1)...(19): siRNA sense strand
gcaagaaugugugcccuua

SEQ ID NO: 1422796 - RNA, 19 nt, Homo sapiens
  misc_RNA (1)...(19): siRNA sense strand
gaaguuaccauuugauuug

SEQ ID NO: 1422797 - RNA, 19 nt, Homo sapiens
  misc_RNA (1)...(19): siRNA sense strand
gaacuagauugcuugauca

SEQ ID NO: 1422798 - RNA, 19 nt, Homo sapiens
  misc_RNA (1)...(19): siRNA sense strand
ggucucugcugucuucuua

SEQ ID NO: 1422799 - RNA, 19 nt, Homo sapiens
  misc_RNA (1)...(19): siRNA sense strand
gcgagaggcugucaguaaa

SEQ ID NO: 1422800 - RNA, 19 nt, Homo sapiens
  misc_RNA (1)...(19): siRNA sense strand
gcaguauauuccaaagaua

SEQ ID NO: 1422801 - RNA, 19 nt, Homo sapiens
  misc_RNA (1)...(19): siRNA sense strand
gauaaacuaguacgagaua

SEQ ID NO: 1422802 - RNA, 19 nt, Homo sapiens
  misc_RNA (1)...(19): siRNA sense strand
caaacuggaugaacuagau

SEQ ID NO: 1422803 - RNA, 19 nt, Homo sapiens
  misc_RNA (1)...(19): siRNA sense strand
ucacagugcuauuacuuug

SEQ ID NO: 1422804 - RNA, 19 nt, Homo sapiens
  misc_RNA (1)...(19): siRNA sense strand
gcaccaaaguggauaaacu

SEQ ID NO: 1422805 - RNA, 19 nt, Homo sapiens
  misc_RNA (1)...(19): siRNA sense strand
ugucagaaguuaccauuug

SEQ ID NO: 1422806 - RNA, 19 nt, Homo sapiens
  misc_RNA (1)...(19): siRNA sense strand
uggcauaugcuuuggauua

SEQ ID NO: 1422807 - RNA, 19 nt, Homo sapiens
  misc_RNA (1)...(19): siRNA sense strand
gaaugugugcccuuaauga

SEQ ID NO: 1422808 - RNA, 19 nt, Homo sapiens
  misc_RNA (1)...(19): siRNA sense strand
cauaugcuuuggauuauug

SEQ ID NO: 1422809 - RNA, 19 nt, Homo sapiens
  misc_RNA (1)...(19): siRNA sense strand
ugaacuagauugcuugauc

SEQ ID NO: 1422810 - RNA, 19 nt, Homo sapiens
  misc_RNA (1)...(19): siRNA sense strand
gaaacaugaugagcaagga

SEQ ID NO: 1422811 - RNA, 19 nt, Homo sapiens
  misc_RNA (1)...(19): siRNA sense strand
uaggugaucuucagcuuug

SEQ ID NO: 1422812 - RNA, 19 nt, Homo sapiens
  misc_RNA (1)...(19): siRNA sense strand
gagaggcugucaguaaaga

SEQ ID NO: 1422813 - RNA, 19 nt, Homo sapiens
  misc_RNA (1)...(19): siRNA sense strand
gcauaugcuuuggauuauu

SEQ ID NO: 1422814 - RNA, 19 nt, Homo sapiens
  misc_RNA (1)...(19): siRNA sense strand
cuagauugcuugaucaaag

SEQ ID NO: 1422815 - RNA, 19 nt, Homo sapiens
  misc_RNA (1)...(19): siRNA sense strand
guuagcaucuuagcaguau

SEQ ID NO: 1422816 - RNA, 19 nt, Homo sapiens
  misc_RNA (1)...(19): siRNA sense strand
gagcacuccuugagcuguu

SEQ ID NO: 1422817 - RNA, 19 nt, Homo sapiens
  misc_RNA (1)...(19): siRNA sense strand
ugaaaagugucagaaguua

SEQ ID NO: 1422818 - RNA, 19 nt, Homo sapiens
  misc_RNA (1)...(19): siRNA sense strand
ggucacagguacuagucuu

SEQ ID NO: 1422819 - RNA, 19 nt, Homo sapiens
  misc_RNA (1)...(19): siRNA sense strand
gucagaaguuaccauuuga

SEQ ID NO: 1422820 - RNA, 19 nt, Homo sapiens
  misc_RNA (1)...(19): siRNA sense strand
ggcauaugcuuuggauuau

SEQ ID NO: 1422821 - RNA, 19 nt, Homo sapiens
  misc_RNA (1)...(19): siRNA sense strand
acagugcuauuacuuugaa

SEQ ID NO: 1422822 - RNA, 19 nt, Homo sapiens
  misc_RNA (1)...(19): siRNA sense strand
caccaaaguggauaaacua

SEQ ID NO: 1422823 - RNA, 19 nt, Homo sapiens
  misc_RNA (1)...(19): siRNA sense strand
gacggucacagugcuauua

SEQ ID NO: 1422824 - RNA, 19 nt, Homo sapiens
  misc_RNA (1)...(19): siRNA sense strand
aagaaugugugcccuuaau

SEQ ID NO: 1422825 - RNA, 19 nt, Homo sapiens
  misc_RNA (1)...(19): siRNA sense strand
uggaugaacuagauugcuu

SEQ ID NO: 1422826 - RNA, 19 nt, Homo sapiens
  misc_RNA (1)...(19): siRNA sense strand
cagaaguuaccauuugauu

SEQ ID NO: 1422827 - RNA, 19 nt, Homo sapiens
  misc_RNA (1)...(19): siRNA sense strand
gaagcgagaggcugucagu

SEQ ID NO: 1422828 - RNA, 19 nt, Homo sapiens
  misc_RNA (1)...(19): siRNA sense strand
ggucacagugcuauuacuu

SEQ ID NO: 1422829 - RNA, 19 nt, Homo sapiens
  misc_RNA (1)...(19): siRNA sense strand
ccaaagauaauuacaaacg

SEQ ID NO: 1422830 - RNA, 19 nt, Homo sapiens
  misc_RNA (1)...(19): siRNA sense strand
aaacccugcugauucugaa

SEQ ID NO: 1422831 - RNA, 19 nt, Homo sapiens
  misc_RNA (1)...(19): siRNA sense strand
gcaaacuggaugaacuaga

SEQ ID NO: 1422832 - RNA, 19 nt, Homo sapiens
  misc_RNA (1)...(19): siRNA sense strand
caagaaugugugcccuuaa

SEQ ID NO: 1422833 - RNA, 19 nt, Homo sapiens
  misc_RNA (1)...(19): siRNA sense strand
caccaucaccaacaacauu

SEQ ID NO: 1422834 - RNA, 19 nt, Homo sapiens
  misc_RNA (1)...(19): siRNA sense strand
gagcgacuuugaucaccau

SEQ ID NO: 1422835 - RNA, 19 nt, Homo sapiens
  misc_RNA (1)...(19): siRNA sense strand
gauagcaccaaaguggaua

SEQ ID NO: 1422836 - RNA, 19 nt, Homo sapiens
  misc_RNA (1)...(19): siRNA sense strand
uguuggaaauuucuugaga

SEQ ID NO: 1422837 - RNA, 19 nt, Homo sapiens
  misc_RNA (1)...(19): siRNA sense strand
uccuugagcuguugaagau

SEQ ID NO: 1422838 - RNA, 19 nt, Homo sapiens
  misc_RNA (1)...(19): siRNA sense strand
gaugaacuagauugcuuga

SEQ ID NO: 1422839 - RNA, 19 nt, Homo sapiens
  misc_RNA (1)...(19): siRNA sense strand
uuucggaacacgaggguua

SEQ ID NO: 1422840 - RNA, 19 nt, Homo sapiens
  misc_RNA (1)...(19): siRNA sense strand
ggccagagcgacuuugauc

SEQ ID NO: 1422841 - RNA, 19 nt, Homo sapiens
  misc_RNA (1)...(19): siRNA sense strand
agcaguauauuccaaagau

SEQ ID NO: 1422842 - RNA, 19 nt, Homo sapiens
  misc_RNA (1)...(19): siRNA sense strand
uuggaaacaugaugagcaa

SEQ ID NO: 1422843 - RNA, 19 nt, Homo sapiens
  misc_RNA (1)...(19): siRNA sense strand
ggauaaacuaguacgagau

SEQ ID NO: 1422844 - RNA, 19 nt, Homo sapiens
  misc_RNA (1)...(19): siRNA sense strand
cuuacuggcuguaccacuu

SEQ ID NO: 1422845 - RNA, 19 nt, Homo sapiens
  misc_RNA (1)...(19): siRNA sense strand
aaacgggucacagguacua

SEQ ID NO: 1422846 - RNA, 19 nt, Homo sapiens
  misc_RNA (1)...(19): siRNA sense strand
uacaaacgggucacaggua

SEQ ID NO: 1422847 - RNA, 19 nt, Homo sapiens
  misc_RNA (1)...(19): siRNA sense strand
gguuagcaucuuagcagua

SEQ ID NO: 1422848 - RNA, 19 nt, Homo sapiens
  misc_RNA (1)...(19): siRNA sense strand
gaacacgaggguuauuuug

SEQ ID NO: 1422849 - RNA, 19 nt, Homo sapiens
  misc_RNA (1)...(19): siRNA sense strand
uagcaucuuagcaguauau

SEQ ID NO: 1422850 - RNA, 19 nt, Homo sapiens
  misc_RNA (1)...(19): siRNA sense strand
ggaacacgaggguuauuuu

SEQ ID NO: 1422851 - RNA, 19 nt, Homo sapiens
  misc_RNA (1)...(19): siRNA sense strand
caggugguauuuguuggaa

SEQ ID NO: 1422852 - RNA, 19 nt, Homo sapiens
  misc_RNA (1)...(19): siRNA sense strand
gaucuucagcuuugcaaac

SEQ ID NO: 1422853 - RNA, 19 nt, Homo sapiens
  misc_RNA (1)...(19): siRNA sense strand
caucuuagcaguauauucc

SEQ ID NO: 1422854 - RNA, 19 nt, Homo sapiens
  misc_RNA (1)...(19): siRNA sense strand
ugaaaacccugcugauucu

SEQ ID NO: 1422855 - RNA, 19 nt, Homo sapiens
  misc_RNA (1)...(19): siRNA sense strand
aguacgagauauuuaugga

SEQ ID NO: 1422856 - RNA, 19 nt, Homo sapiens
  misc_RNA (1)...(19): siRNA sense strand
gcugggcuguggcuucaag

SEQ ID NO: 1422857 - RNA, 19 nt, Homo sapiens
  misc_RNA (1)...(19): siRNA sense strand
ggacggucacagugcuauu

SEQ ID NO: 1422858 - RNA, 19 nt, Homo sapiens
  misc_RNA (1)...(19): siRNA sense strand
uagauugcuugaucaaagg

SEQ ID NO: 1422859 - RNA, 19 nt, Homo sapiens
  misc_RNA (1)...(19): siRNA sense strand
agcgagaggcugucaguaa

SEQ ID NO: 1422860 - RNA, 19 nt, Homo sapiens
  misc_RNA (1)...(19): siRNA sense strand
uuuggucucugcugucuuc

SEQ ID NO: 1422861 - RNA, 19 nt, Homo sapiens
  misc_RNA (1)...(19): siRNA sense strand
cggaacacgaggguuauuu

SEQ ID NO: 1422862 - RNA, 19 nt, Homo sapiens
  misc_RNA (1)...(19): siRNA sense strand
ucguggagauagcaccaaa

SEQ ID NO: 1422863 - RNA, 19 nt, Homo sapiens
  misc_RNA (1)...(19): siRNA sense strand
ccaaaguggauaaacuagu

SEQ ID NO: 1422864 - RNA, 19 nt, Homo sapiens
  misc_RNA (1)...(19): siRNA sense strand
gucacagugcuauuacuuu

SEQ ID NO: 1422865 - RNA, 19 nt, Homo sapiens
  misc_RNA (1)...(19): siRNA sense strand
guggagauagcaccaaagu

SEQ ID NO: 1422866 - RNA, 19 nt, Homo sapiens
  misc_RNA (1)...(19): siRNA sense strand
gagaagcgagaggcuguca

SEQ ID NO: 1422867 - RNA, 19 nt, Homo sapiens
  misc_RNA (1)...(19): siRNA sense strand
aaugugugcccuuaaugaa

SEQ ID NO: 1422868 - RNA, 19 nt, Homo sapiens
  misc_RNA (1)...(19): siRNA sense strand
cucaauagcaagaaugugu

SEQ ID NO: 1422869 - RNA, 19 nt, Homo sapiens
  misc_RNA (1)...(19): siRNA sense strand
aaacuggaugaacuagauu

SEQ ID NO: 1422870 - RNA, 19 nt, Homo sapiens
  misc_RNA (1)...(19): siRNA sense strand
caaaguggauaaacuagua

SEQ ID NO: 1422871 - RNA, 19 nt, Homo sapiens
  misc_RNA (1)...(19): siRNA sense strand
gcaagaaugugugcccuua

SEQ ID NO: 1422872 - RNA, 19 nt, Homo sapiens
  misc_RNA (1)...(19): siRNA sense strand
gcgagaggcugucaguaaa

SEQ ID NO: 1422873 - RNA, 19 nt, Homo sapiens
  misc_RNA (1)...(19): siRNA sense strand
gauaaacuaguacgagaua

SEQ ID NO: 1422874 - RNA, 19 nt, Homo sapiens
  misc_RNA (1)...(19): siRNA sense strand
gcaccaaaguggauaaacu

SEQ ID NO: 1422875 - RNA, 19 nt, Homo sapiens
  misc_RNA (1)...(19): siRNA sense strand
uggcauaugcuuuggauua

SEQ ID NO: 1422876 - RNA, 19 nt, Homo sapiens
  misc_RNA (1)...(19): siRNA sense strand
gaaugugugcccuuaauga

SEQ ID NO: 1422877 - RNA, 19 nt, Homo sapiens
  misc_RNA (1)...(19): siRNA sense strand
cauaugcuuuggauuauug

SEQ ID NO: 1422878 - RNA, 19 nt, Homo sapiens
  misc_RNA (1)...(19): siRNA sense strand
gaaacaugaugagcaagga

SEQ ID NO: 1422879 - RNA, 19 nt, Homo sapiens
  misc_RNA (1)...(19): siRNA sense strand
gagaggcugucaguaaaga

SEQ ID NO: 1422880 - RNA, 19 nt, Homo sapiens
  misc_RNA (1)...(19): siRNA sense strand
gcauaugcuuuggauuauu

SEQ ID NO: 1422881 - RNA, 19 nt, Homo sapiens
  misc_RNA (1)...(19): siRNA sense strand
gagcacuccuugagcuguu

SEQ ID NO: 1422882 - RNA, 19 nt, Homo sapiens
  misc_RNA (1)...(19): siRNA sense strand
ggcauaugcuuuggauuau

SEQ ID NO: 1422883 - RNA, 19 nt, Homo sapiens
  misc_RNA (1)...(19): siRNA sense strand
caccaaaguggauaaacua

SEQ ID NO: 1422884 - RNA, 19 nt, Homo sapiens
  misc_RNA (1)...(19): siRNA sense strand
aagaaugugugcccuuaau

SEQ ID NO: 1422885 - RNA, 19 nt, Homo sapiens
  misc_RNA (1)...(19): siRNA sense strand
gaagcgagaggcugucagu

SEQ ID NO: 1422886 - RNA, 19 nt, Homo sapiens
  misc_RNA (1)...(19): siRNA sense strand
gagcgacuuugaucaccau

SEQ ID NO: 1422887 - RNA, 19 nt, Homo sapiens
  misc_RNA (1)...(19): siRNA sense strand
caagaaugugugcccuuaa

SEQ ID NO: 1422888 - RNA, 19 nt, Homo sapiens
  misc_RNA (1)...(19): siRNA sense strand
caccaucaccaacaacauu

SEQ ID NO: 1422889 - RNA, 19 nt, Homo sapiens
  misc_RNA (1)...(19): siRNA sense strand
gauagcaccaaaguggaua

SEQ ID NO: 1422890 - RNA, 19 nt, Homo sapiens
  misc_RNA (1)...(19): siRNA sense strand
uguuggaaauuucuugaga

SEQ ID NO: 1422891 - RNA, 19 nt, Homo sapiens
  misc_RNA (1)...(19): siRNA sense strand
uccuugagcuguugaagau

SEQ ID NO: 1422892 - RNA, 19 nt, Homo sapiens
  misc_RNA (1)...(19): siRNA sense strand
ggccagagcgacuuugauc

SEQ ID NO: 1422893 - RNA, 19 nt, Homo sapiens
  misc_RNA (1)...(19): siRNA sense strand
uuucggaacacgaggguua

SEQ ID NO: 1422894 - RNA, 19 nt, Homo sapiens
  misc_RNA (1)...(19): siRNA sense strand
uuggaaacaugaugagcaa

SEQ ID NO: 1422895 - RNA, 19 nt, Homo sapiens
  misc_RNA (1)...(19): siRNA sense strand
ggauaaacuaguacgagau

SEQ ID NO: 1422896 - RNA, 19 nt, Homo sapiens
  misc_RNA (1)...(19): siRNA sense strand
gaacacgaggguuauuuug

SEQ ID NO: 1422897 - RNA, 19 nt, Homo sapiens
  misc_RNA (1)...(19): siRNA sense strand
caggugguauuuguuggaa

SEQ ID NO: 1422898 - RNA, 19 nt, Homo sapiens
  misc_RNA (1)...(19): siRNA sense strand
ggaacacgaggguuauuuu

SEQ ID NO: 1422899 - RNA, 19 nt, Homo sapiens
  misc_RNA (1)...(19): siRNA sense strand
aguacgagauauuuaugga

SEQ ID NO: 1422900 - RNA, 19 nt, Homo sapiens
  misc_RNA (1)...(19): siRNA sense strand
gcugggcuguggcuucaag

SEQ ID NO: 1422901 - RNA, 19 nt, Homo sapiens
  misc_RNA (1)...(19): siRNA sense strand
agcgagaggcugucaguaa

SEQ ID NO: 1422902 - RNA, 19 nt, Homo sapiens
  misc_RNA (1)...(19): siRNA sense strand
ucguggagauagcaccaaa

SEQ ID NO: 1422903 - RNA, 19 nt, Homo sapiens
  misc_RNA (1)...(19): siRNA sense strand
cggaacacgaggguuauuu

SEQ ID NO: 1422904 - RNA, 19 nt, Homo sapiens
  misc_RNA (1)...(19): siRNA sense strand
ccaaaguggauaaacuagu

SEQ ID NO: 1422905 - RNA, 19 nt, Homo sapiens
  misc_RNA (1)...(19): siRNA sense strand
guggagauagcaccaaagu

SEQ ID NO: 1422906 - RNA, 19 nt, Homo sapiens
  misc_RNA (1)...(19): siRNA sense strand
gagaagcgagaggcuguca

SEQ ID NO: 1422907 - RNA, 19 nt, Homo sapiens
  misc_RNA (1)...(19): siRNA sense strand
aaugugugcccuuaaugaa

SEQ ID NO: 1422908 - RNA, 19 nt, Homo sapiens
  misc_RNA (1)...(19): siRNA sense strand
cucaauagcaagaaugugu

SEQ ID NO: 1422909 - RNA, 19 nt, Homo sapiens
  misc_RNA (1)...(19): siRNA sense strand
caaaguggauaaacuagua

SEQ ID NO: 1422910 - RNA, 19 nt, Homo sapiens
  misc_RNA (1)...(19): siRNA sense strand
gcaagaaugugugcccuua

SEQ ID NO: 1422911 - RNA, 19 nt, Homo sapiens
  misc_RNA (1)...(19): siRNA sense strand
gaaguuaccauuugauuug

SEQ ID NO: 1422912 - RNA, 19 nt, Homo sapiens
  misc_RNA (1)...(19): siRNA sense strand
gaacuagauugcuugauca

SEQ ID NO: 1422913 - RNA, 19 nt, Homo sapiens
  misc_RNA (1)...(19): siRNA sense strand
ggucucugcugucuucuua

SEQ ID NO: 1422914 - RNA, 19 nt, Homo sapiens
  misc_RNA (1)...(19): siRNA sense strand
gcgagaggcugucaguaaa

SEQ ID NO: 1422915 - RNA, 19 nt, Homo sapiens
  misc_RNA (1)...(19): siRNA sense strand
gcaguauauuccaaagaua

SEQ ID NO: 1422916 - RNA, 19 nt, Homo sapiens
  misc_RNA (1)...(19): siRNA sense strand
gauaaacuaguacgagaua

SEQ ID NO: 1422917 - RNA, 19 nt, Homo sapiens
  misc_RNA (1)...(19): siRNA sense strand
caaacuggaugaacuagau

SEQ ID NO: 1422918 - RNA, 19 nt, Homo sapiens
  misc_RNA (1)...(19): siRNA sense strand
ucacagugcuauuacuuug

SEQ ID NO: 1422919 - RNA, 19 nt, Homo sapiens
  misc_RNA (1)...(19): siRNA sense strand
gcaccaaaguggauaaacu

SEQ ID NO: 1422920 - RNA, 19 nt, Homo sapiens
  misc_RNA (1)...(19): siRNA sense strand
ugucagaaguuaccauuug

SEQ ID NO: 1422921 - RNA, 19 nt, Homo sapiens
  misc_RNA (1)...(19): siRNA sense strand
uggcauaugcuuuggauua

SEQ ID NO: 1422922 - RNA, 19 nt, Homo sapiens
  misc_RNA (1)...(19): siRNA sense strand
gaaugugugcccuuaauga

SEQ ID NO: 1422923 - RNA, 19 nt, Homo sapiens
  misc_RNA (1)...(19): siRNA sense strand
cauaugcuuuggauuauug

SEQ ID NO: 1422924 - RNA, 19 nt, Homo sapiens
  misc_RNA (1)...(19): siRNA sense strand
ugaacuagauugcuugauc

SEQ ID NO: 1422925 - RNA, 19 nt, Homo sapiens
  misc_RNA (1)...(19): siRNA sense strand
gaaacaugaugagcaagga

SEQ ID NO: 1422926 - RNA, 19 nt, Homo sapiens
  misc_RNA (1)...(19): siRNA sense strand
uaggugaucuucagcuuug

SEQ ID NO: 1422927 - RNA, 19 nt, Homo sapiens
  misc_RNA (1)...(19): siRNA sense strand
gagaggcugucaguaaaga

SEQ ID NO: 1422928 - RNA, 19 nt, Homo sapiens
  misc_RNA (1)...(19): siRNA sense strand
gcauaugcuuuggauuauu

SEQ ID NO: 1422929 - RNA, 19 nt, Homo sapiens
  misc_RNA (1)...(19): siRNA sense strand
cuagauugcuugaucaaag

SEQ ID NO: 1422930 - RNA, 19 nt, Homo sapiens
  misc_RNA (1)...(19): siRNA sense strand
guuagcaucuuagcaguau

SEQ ID NO: 1422931 - RNA, 19 nt, Homo sapiens
  misc_RNA (1)...(19): siRNA sense strand
gagcacuccuugagcuguu

SEQ ID NO: 1422932 - RNA, 19 nt, Homo sapiens
  misc_RNA (1)...(19): siRNA sense strand
ugaaaagugucagaaguua

SEQ ID NO: 1422933 - RNA, 19 nt, Homo sapiens
  misc_RNA (1)...(19): siRNA sense strand
ggucacagguacuagucuu

SEQ ID NO: 1422934 - RNA, 19 nt, Homo sapiens
  misc_RNA (1)...(19): siRNA sense strand
gucagaaguuaccauuuga

SEQ ID NO: 1422935 - RNA, 19 nt, Homo sapiens
  misc_RNA (1)...(19): siRNA sense strand
ggcauaugcuuuggauuau

SEQ ID NO: 1422936 - RNA, 19 nt, Homo sapiens
  misc_RNA (1)...(19): siRNA sense strand
acagugcuauuacuuugaa

SEQ ID NO: 1422937 - RNA, 19 nt, Homo sapiens
  misc_RNA (1)...(19): siRNA sense strand
caccaaaguggauaaacua

SEQ ID NO: 1422938 - RNA, 19 nt, Homo sapiens
  misc_RNA (1)...(19): siRNA sense strand
gacggucacagugcuauua

SEQ ID NO: 1422939 - RNA, 19 nt, Homo sapiens
  misc_RNA (1)...(19): siRNA sense strand
aagaaugugugcccuuaau

SEQ ID NO: 1422940 - RNA, 19 nt, Homo sapiens
  misc_RNA (1)...(19): siRNA sense strand
uggaugaacuagauugcuu

SEQ ID NO: 1422941 - RNA, 19 nt, Homo sapiens
  misc_RNA (1)...(19): siRNA sense strand
cagaaguuaccauuugauu

SEQ ID NO: 1422942 - RNA, 19 nt, Homo sapiens
  misc_RNA (1)...(19): siRNA sense strand
gaagcgagaggcugucagu

SEQ ID NO: 1422943 - RNA, 19 nt, Homo sapiens
  misc_RNA (1)...(19): siRNA sense strand
ggucacagugcuauuacuu

SEQ ID NO: 1422944 - RNA, 19 nt, Homo sapiens
  misc_RNA (1)...(19): siRNA sense strand
ccaaagauaauuacaaacg

SEQ ID NO: 1422945 - RNA, 19 nt, Homo sapiens
  misc_RNA (1)...(19): siRNA sense strand
aaacccugcugauucugaa

SEQ ID NO: 1422946 - RNA, 19 nt, Homo sapiens
  misc_RNA (1)...(19): siRNA sense strand
gcaaacuggaugaacuaga

SEQ ID NO: 1422947 - RNA, 19 nt, Homo sapiens
  misc_RNA (1)...(19): siRNA sense strand
caagaaugugugcccuuaa

SEQ ID NO: 1422948 - RNA, 19 nt, Homo sapiens
  misc_RNA (1)...(19): siRNA sense strand
caccaucaccaacaacauu

SEQ ID NO: 1422949 - RNA, 19 nt, Homo sapiens
  misc_RNA (1)...(19): siRNA sense strand
gagcgacuuugaucaccau

SEQ ID NO: 1422950 - RNA, 19 nt, Homo sapiens
  misc_RNA (1)...(19): siRNA sense strand
gauagcaccaaaguggaua

SEQ ID NO: 1422951 - RNA, 19 nt, Homo sapiens
  misc_RNA (1)...(19): siRNA sense strand
uguuggaaauuucuugaga

SEQ ID NO: 1422952 - RNA, 19 nt, Homo sapiens
  misc_RNA (1)...(19): siRNA sense strand
uccuugagcuguugaagau

SEQ ID NO: 1422953 - RNA, 19 nt, Homo sapiens
  misc_RNA (1)...(19): siRNA sense strand
gaugaacuagauugcuuga

SEQ ID NO: 1422954 - RNA, 19 nt, Homo sapiens
  misc_RNA (1)...(19): siRNA sense strand
uuucggaacacgaggguua

SEQ ID NO: 1422955 - RNA, 19 nt, Homo sapiens
  misc_RNA (1)...(19): siRNA sense strand
ggccagagcgacuuugauc

SEQ ID NO: 1422956 - RNA, 19 nt, Homo sapiens
  misc_RNA (1)...(19): siRNA sense strand
agcaguauauuccaaagau

SEQ ID NO: 1422957 - RNA, 19 nt, Homo sapiens
  misc_RNA (1)...(19): siRNA sense strand
uuggaaacaugaugagcaa

SEQ ID NO: 1422958 - RNA, 19 nt, Homo sapiens
  misc_RNA (1)...(19): siRNA sense strand
ggauaaacuaguacgagau

SEQ ID NO: 1422959 - RNA, 19 nt, Homo sapiens
  misc_RNA (1)...(19): siRNA sense strand
cuuacuggcuguaccacuu

SEQ ID NO: 1422960 - RNA, 19 nt, Homo sapiens
  misc_RNA (1)...(19): siRNA sense strand
aaacgggucacagguacua

SEQ ID NO: 1422961 - RNA, 19 nt, Homo sapiens
  misc_RNA (1)...(19): siRNA sense strand
uacaaacgggucacaggua

SEQ ID NO: 1422962 - RNA, 19 nt, Homo sapiens
  misc_RNA (1)...(19): siRNA sense strand
gguuagcaucuuagcagua

SEQ ID NO: 1422963 - RNA, 19 nt, Homo sapiens
  misc_RNA (1)...(19): siRNA sense strand
gaacacgaggguuauuuug

SEQ ID NO: 1422964 - RNA, 19 nt, Homo sapiens
  misc_RNA (1)...(19): siRNA sense strand
uagcaucuuagcaguauau

SEQ ID NO: 1422965 - RNA, 19 nt, Homo sapiens
  misc_RNA (1)...(19): siRNA sense strand
ggaacacgaggguuauuuu

SEQ ID NO: 1422966 - RNA, 19 nt, Homo sapiens
  misc_RNA (1)...(19): siRNA sense strand
caggugguauuuguuggaa

SEQ ID NO: 1422967 - RNA, 19 nt, Homo sapiens
  misc_RNA (1)...(19): siRNA sense strand
gaucuucagcuuugcaaac

SEQ ID NO: 1422968 - RNA, 19 nt, Homo sapiens
  misc_RNA (1)...(19): siRNA sense strand
caucuuagcaguauauucc

SEQ ID NO: 1422969 - RNA, 19 nt, Homo sapiens
  misc_RNA (1)...(19): siRNA sense strand
ugaaaacccugcugauucu

SEQ ID NO: 1422970 - RNA, 19 nt, Homo sapiens
  misc_RNA (1)...(19): siRNA sense strand
aguacgagauauuuaugga

SEQ ID NO: 1422971 - RNA, 19 nt, Homo sapiens
  misc_RNA (1)...(19): siRNA sense strand
gcugggcuguggcuucaag

SEQ ID NO: 1422972 - RNA, 19 nt, Homo sapiens
  misc_RNA (1)...(19): siRNA sense strand
ggacggucacagugcuauu

SEQ ID NO: 1422973 - RNA, 19 nt, Homo sapiens
  misc_RNA (1)...(19): siRNA sense strand
uagauugcuugaucaaagg

SEQ ID NO: 1422974 - RNA, 19 nt, Homo sapiens
  misc_RNA (1)...(19): siRNA sense strand
agcgagaggcugucaguaa

SEQ ID NO: 1422975 - RNA, 19 nt, Homo sapiens
  misc_RNA (1)...(19): siRNA sense strand
uuuggucucugcugucuuc

SEQ ID NO: 1422976 - RNA, 19 nt, Homo sapiens
  misc_RNA (1)...(19): siRNA sense strand
cggaacacgaggguuauuu

SEQ ID NO: 1422977 - RNA, 19 nt, Homo sapiens
  misc_RNA (1)...(19): siRNA sense strand
ucguggagauagcaccaaa

SEQ ID NO: 1422978 - RNA, 19 nt, Homo sapiens
  misc_RNA (1)...(19): siRNA sense strand
ccaaaguggauaaacuagu

SEQ ID NO: 1422979 - RNA, 19 nt, Homo sapiens
  misc_RNA (1)...(19): siRNA sense strand
gucacagugcuauuacuuu

SEQ ID NO: 1422980 - RNA, 19 nt, Homo sapiens
  misc_RNA (1)...(19): siRNA sense strand
guggagauagcaccaaagu

SEQ ID NO: 1422981 - RNA, 19 nt, Homo sapiens
  misc_RNA (1)...(19): siRNA sense strand
gagaagcgagaggcuguca

SEQ ID NO: 1422982 - RNA, 19 nt, Homo sapiens
  misc_RNA (1)...(19): siRNA sense strand
aaugugugcccuuaaugaa

SEQ ID NO: 1422983 - RNA, 19 nt, Homo sapiens
  misc_RNA (1)...(19): siRNA sense strand
cucaauagcaagaaugugu

SEQ ID NO: 1422984 - RNA, 19 nt, Homo sapiens
  misc_RNA (1)...(19): siRNA sense strand
aaacuggaugaacuagauu

SEQ ID NO: 1422985 - RNA, 19 nt, Homo sapiens
  misc_RNA (1)...(19): siRNA sense strand
caaaguggauaaacuagua

SEQ ID NO: 1422986 - RNA, 19 nt, Homo sapiens
  misc_RNA (1)...(19): siRNA sense strand
gcaagaaugugugcccuua

SEQ ID NO: 1422987 - RNA, 19 nt, Homo sapiens
  misc_RNA (1)...(19): siRNA sense strand
gcgagaggcugucaguaaa

SEQ ID NO: 1422988 - RNA, 19 nt, Homo sapiens
  misc_RNA (1)...(19): siRNA sense strand
gauaaacuaguacgagaua

SEQ ID NO: 1422989 - RNA, 19 nt, Homo sapiens
  misc_RNA (1)...(19): siRNA sense strand
gcaccaaaguggauaaacu

SEQ ID NO: 1422990 - RNA, 19 nt, Homo sapiens
  misc_RNA (1)...(19): siRNA sense strand
uggcauaugcuuuggauua

SEQ ID NO: 1422991 - RNA, 19 nt, Homo sapiens
  misc_RNA (1)...(19): siRNA sense strand
gaaugugugcccuuaauga

SEQ ID NO: 1422992 - RNA, 19 nt, Homo sapiens
  misc_RNA (1)...(19): siRNA sense strand
cauaugcuuuggauuauug

SEQ ID NO: 1422993 - RNA, 19 nt, Homo sapiens
  misc_RNA (1)...(19): siRNA sense strand
gaaacaugaugagcaagga

SEQ ID NO: 1422994 - RNA, 19 nt, Homo sapiens
  misc_RNA (1)...(19): siRNA sense strand
gagaggcugucaguaaaga

SEQ ID NO: 1422995 - RNA, 19 nt, Homo sapiens
  misc_RNA (1)...(19): siRNA sense strand
gcauaugcuuuggauuauu

SEQ ID NO: 1422996 - RNA, 19 nt, Homo sapiens
  misc_RNA (1)...(19): siRNA sense strand
gagcacuccuugagcuguu

SEQ ID NO: 1422997 - RNA, 19 nt, Homo sapiens
  misc_RNA (1)...(19): siRNA sense strand
ggcauaugcuuuggauuau

SEQ ID NO: 1422998 - RNA, 19 nt, Homo sapiens
  misc_RNA (1)...(19): siRNA sense strand
caccaaaguggauaaacua

SEQ ID NO: 1422999 - RNA, 19 nt, Homo sapiens
  misc_RNA (1)...(19): siRNA sense strand
aagaaugugugcccuuaau

SEQ ID NO: 1423000 - RNA, 19 nt, Homo sapiens
  misc_RNA (1)...(19): siRNA sense strand
gaagcgagaggcugucagu

SEQ ID NO: 1423001 - RNA, 19 nt, Homo sapiens
  misc_RNA (1)...(19): siRNA sense strand
gagcgacuuugaucaccau

SEQ ID NO: 1423002 - RNA, 19 nt, Homo sapiens
  misc_RNA (1)...(19): siRNA sense strand
caagaaugugugcccuuaa

SEQ ID NO: 1423003 - RNA, 19 nt, Homo sapiens
  misc_RNA (1)...(19): siRNA sense strand
caccaucaccaacaacauu

SEQ ID NO: 1423004 - RNA, 19 nt, Homo sapiens
  misc_RNA (1)...(19): siRNA sense strand
gauagcaccaaaguggaua

SEQ ID NO: 1423005 - RNA, 19 nt, Homo sapiens
  misc_RNA (1)...(19): siRNA sense strand
uguuggaaauuucuugaga

SEQ ID NO: 1423006 - RNA, 19 nt, Homo sapiens
  misc_RNA (1)...(19): siRNA sense strand
uccuugagcuguugaagau

SEQ ID NO: 1423007 - RNA, 19 nt, Homo sapiens
  misc_RNA (1)...(19): siRNA sense strand
ggccagagcgacuuugauc

SEQ ID NO: 1423008 - RNA, 19 nt, Homo sapiens
  misc_RNA (1)...(19): siRNA sense strand
uuucggaacacgaggguua

SEQ ID NO: 1423009 - RNA, 19 nt, Homo sapiens
  misc_RNA (1)...(19): siRNA sense strand
uuggaaacaugaugagcaa

SEQ ID NO: 1423010 - RNA, 19 nt, Homo sapiens
  misc_RNA (1)...(19): siRNA sense strand
ggauaaacuaguacgagau

SEQ ID NO: 1423011 - RNA, 19 nt, Homo sapiens
  misc_RNA (1)...(19): siRNA sense strand
gaacacgaggguuauuuug

SEQ ID NO: 1423012 - RNA, 19 nt, Homo sapiens
  misc_RNA (1)...(19): siRNA sense strand
caggugguauuuguuggaa

SEQ ID NO: 1423013 - RNA, 19 nt, Homo sapiens
  misc_RNA (1)...(19): siRNA sense strand
ggaacacgaggguuauuuu

SEQ ID NO: 1423014 - RNA, 19 nt, Homo sapiens
  misc_RNA (1)...(19): siRNA sense strand
aguacgagauauuuaugga

SEQ ID NO: 1423015 - RNA, 19 nt, Homo sapiens
  misc_RNA (1)...(19): siRNA sense strand
gcugggcuguggcuucaag

SEQ ID NO: 1423016 - RNA, 19 nt, Homo sapiens
  misc_RNA (1)...(19): siRNA sense strand
agcgagaggcugucaguaa

SEQ ID NO: 1423017 - RNA, 19 nt, Homo sapiens
  misc_RNA (1)...(19): siRNA sense strand
ucguggagauagcaccaaa

SEQ ID NO: 1423018 - RNA, 19 nt, Homo sapiens
  misc_RNA (1)...(19): siRNA sense strand
cggaacacgaggguuauuu

SEQ ID NO: 1423019 - RNA, 19 nt, Homo sapiens
  misc_RNA (1)...(19): siRNA sense strand
ccaaaguggauaaacuagu

SEQ ID NO: 1423020 - RNA, 19 nt, Homo sapiens
  misc_RNA (1)...(19): siRNA sense strand
guggagauagcaccaaagu

SEQ ID NO: 1423021 - RNA, 19 nt, Homo sapiens
  misc_RNA (1)...(19): siRNA sense strand
gagaagcgagaggcuguca

SEQ ID NO: 1423022 - RNA, 19 nt, Homo sapiens
  misc_RNA (1)...(19): siRNA sense strand
aaugugugcccuuaaugaa

SEQ ID NO: 1423023 - RNA, 19 nt, Homo sapiens
  misc_RNA (1)...(19): siRNA sense strand
cucaauagcaagaaugugu

SEQ ID NO: 1423024 - RNA, 19 nt, Homo sapiens
  misc_RNA (1)...(19): siRNA sense strand
caaaguggauaaacuagua

SEQ ID NO: 1423025 - RNA, 19 nt, Homo sapiens
  misc_RNA (1)...(19): siRNA sense strand
gcaagaaugugugcccuua

SEQ ID NO: 1423026 - RNA, 19 nt, Homo sapiens
  misc_RNA (1)...(19): siRNA sense strand
ggaaguaccugaccuccaa

SEQ ID NO: 1423027 - RNA, 19 nt, Homo sapiens
  misc_RNA (1)...(19): siRNA sense strand
gaaguuaccauuugauuug

SEQ ID NO: 1423028 - RNA, 19 nt, Homo sapiens
  misc_RNA (1)...(19): siRNA sense strand
gaacuagauugcuugauca

SEQ ID NO: 1423029 - RNA, 19 nt, Homo sapiens
  misc_RNA (1)...(19): siRNA sense strand
ggucucugcugucuucuua

SEQ ID NO: 1423030 - RNA, 19 nt, Homo sapiens
  misc_RNA (1)...(19): siRNA sense strand
agacaucacugcugaagaa

SEQ ID NO: 1423031 - RNA, 19 nt, Homo sapiens
  misc_RNA (1)...(19): siRNA sense strand
gcgagaggcugucaguaaa

SEQ ID NO: 1423032 - RNA, 19 nt, Homo sapiens
  misc_RNA (1)...(19): siRNA sense strand
gcaguauauuccaaagaua

SEQ ID NO: 1423033 - RNA, 19 nt, Homo sapiens
  misc_RNA (1)...(19): siRNA sense strand
gauaaacuaguacgagaua

SEQ ID NO: 1423034 - RNA, 19 nt, Homo sapiens
  misc_RNA (1)...(19): siRNA sense strand
caaacuggaugaacuagau

SEQ ID NO: 1423035 - RNA, 19 nt, Homo sapiens
  misc_RNA (1)...(19): siRNA sense strand
caucacugcugaagaagaa

SEQ ID NO: 1423036 - RNA, 19 nt, Homo sapiens
  misc_RNA (1)...(19): siRNA sense strand
ucacagugcuauuacuuug

SEQ ID NO: 1423037 - RNA, 19 nt, Homo sapiens
  misc_RNA (1)...(19): siRNA sense strand
gcaccaaaguggauaaacu

SEQ ID NO: 1423038 - RNA, 19 nt, Homo sapiens
  misc_RNA (1)...(19): siRNA sense strand
ugucagaaguuaccauuug

SEQ ID NO: 1423039 - RNA, 19 nt, Homo sapiens
  misc_RNA (1)...(19): siRNA sense strand
uggcauaugcuuuggauua

SEQ ID NO: 1423040 - RNA, 19 nt, Homo sapiens
  misc_RNA (1)...(19): siRNA sense strand
gaaugugugcccuuaauga

SEQ ID NO: 1423041 - RNA, 19 nt, Homo sapiens
  misc_RNA (1)...(19): siRNA sense strand
cauaugcuuuggauuauug

SEQ ID NO: 1423042 - RNA, 19 nt, Homo sapiens
  misc_RNA (1)...(19): siRNA sense strand
uggucaagcugguauauuu

SEQ ID NO: 1423043 - RNA, 19 nt, Homo sapiens
  misc_RNA (1)...(19): siRNA sense strand
ugaacuagauugcuugauc

SEQ ID NO: 1423044 - RNA, 19 nt, Homo sapiens
  misc_RNA (1)...(19): siRNA sense strand
gaaacaugaugagcaagga

SEQ ID NO: 1423045 - RNA, 19 nt, Homo sapiens
  misc_RNA (1)...(19): siRNA sense strand
uaggugaucuucagcuuug

SEQ ID NO: 1423046 - RNA, 19 nt, Homo sapiens
  misc_RNA (1)...(19): siRNA sense strand
gagaggcugucaguaaaga

SEQ ID NO: 1423047 - RNA, 19 nt, Homo sapiens
  misc_RNA (1)...(19): siRNA sense strand
gcauaugcuuuggauuauu

SEQ ID NO: 1423048 - RNA, 19 nt, Homo sapiens
  misc_RNA (1)...(19): siRNA sense strand
cuagauugcuugaucaaag

SEQ ID NO: 1423049 - RNA, 19 nt, Homo sapiens
  misc_RNA (1)...(19): siRNA sense strand
guuagcaucuuagcaguau

SEQ ID NO: 1423050 - RNA, 19 nt, Homo sapiens
  misc_RNA (1)...(19): siRNA sense strand
gagcacuccuugagcuguu

SEQ ID NO: 1423051 - RNA, 19 nt, Homo sapiens
  misc_RNA (1)...(19): siRNA sense strand
ugaaaagugucagaaguua

SEQ ID NO: 1423052 - RNA, 19 nt, Homo sapiens
  misc_RNA (1)...(19): siRNA sense strand
ggucacagguacuagucuu

SEQ ID NO: 1423053 - RNA, 19 nt, Homo sapiens
  misc_RNA (1)...(19): siRNA sense strand
gucagaaguuaccauuuga

SEQ ID NO: 1423054 - RNA, 19 nt, Homo sapiens
  misc_RNA (1)...(19): siRNA sense strand
ggcauaugcuuuggauuau

SEQ ID NO: 1423055 - RNA, 19 nt, Homo sapiens
  misc_RNA (1)...(19): siRNA sense strand
acagugcuauuacuuugaa

SEQ ID NO: 1423056 - RNA, 19 nt, Homo sapiens
  misc_RNA (1)...(19): siRNA sense strand
caccaaaguggauaaacua

SEQ ID NO: 1423057 - RNA, 19 nt, Homo sapiens
  misc_RNA (1)...(19): siRNA sense strand
gacggucacagugcuauua

SEQ ID NO: 1423058 - RNA, 19 nt, Homo sapiens
  misc_RNA (1)...(19): siRNA sense strand
aagaaugugugcccuuaau

SEQ ID NO: 1423059 - RNA, 19 nt, Homo sapiens
  misc_RNA (1)...(19): siRNA sense strand
uggaugaacuagauugcuu

SEQ ID NO: 1423060 - RNA, 19 nt, Homo sapiens
  misc_RNA (1)...(19): siRNA sense strand
ugaagaagaagaggaagaa

SEQ ID NO: 1423061 - RNA, 19 nt, Homo sapiens
  misc_RNA (1)...(19): siRNA sense strand
agaagaagaggaagaagug

SEQ ID NO: 1423062 - RNA, 19 nt, Homo sapiens
  misc_RNA (1)...(19): siRNA sense strand
cagaaguuaccauuugauu

SEQ ID NO: 1423063 - RNA, 19 nt, Homo sapiens
  misc_RNA (1)...(19): siRNA sense strand
gaagcgagaggcugucagu

SEQ ID NO: 1423064 - RNA, 19 nt, Homo sapiens
  misc_RNA (1)...(19): siRNA sense strand
ggucacagugcuauuacuu

SEQ ID NO: 1423065 - RNA, 19 nt, Homo sapiens
  misc_RNA (1)...(19): siRNA sense strand
ccaaagauaauuacaaacg

SEQ ID NO: 1423066 - RNA, 19 nt, Homo sapiens
  misc_RNA (1)...(19): siRNA sense strand
aaacccugcugauucugaa

SEQ ID NO: 1423067 - RNA, 19 nt, Homo sapiens
  misc_RNA (1)...(19): siRNA sense strand
gaaguggaaagucuuaaaa

SEQ ID NO: 1423068 - RNA, 19 nt, Homo sapiens
  misc_RNA (1)...(19): siRNA sense strand
caagaaugugugcccuuaa

SEQ ID NO: 1423069 - RNA, 19 nt, Homo sapiens
  misc_RNA (1)...(19): siRNA sense strand
caccaucaccaacaacauu

SEQ ID NO: 1423070 - RNA, 19 nt, Homo sapiens
  misc_RNA (1)...(19): siRNA sense strand
gagcgacuuugaucaccau

SEQ ID NO: 1423071 - RNA, 19 nt, Homo sapiens
  misc_RNA (1)...(19): siRNA sense strand
gcaaacuggaugaacuaga

SEQ ID NO: 1423072 - RNA, 19 nt, Homo sapiens
  misc_RNA (1)...(19): siRNA sense strand
gauagcaccaaaguggaua

SEQ ID NO: 1423073 - RNA, 19 nt, Homo sapiens
  misc_RNA (1)...(19): siRNA sense strand
aggaagaaguggaaagucu

SEQ ID NO: 1423074 - RNA, 19 nt, Homo sapiens
  misc_RNA (1)...(19): siRNA sense strand
uguuggaaauuucuugaga

SEQ ID NO: 1423075 - RNA, 19 nt, Homo sapiens
  misc_RNA (1)...(19): siRNA sense strand
guaccugaccuccaaugug

SEQ ID NO: 1423076 - RNA, 19 nt, Homo sapiens
  misc_RNA (1)...(19): siRNA sense strand
uccuugagcuguugaagau

SEQ ID NO: 1423077 - RNA, 19 nt, Homo sapiens
  misc_RNA (1)...(19): siRNA sense strand
gaagaggaagaaguggaaa

SEQ ID NO: 1423078 - RNA, 19 nt, Homo sapiens
  misc_RNA (1)...(19): siRNA sense strand
ccuccaauguggcuuaugg

SEQ ID NO: 1423079 - RNA, 19 nt, Homo sapiens
  misc_RNA (1)...(19): siRNA sense strand
guggaacucuggucaagcu

SEQ ID NO: 1423080 - RNA, 19 nt, Homo sapiens
  misc_RNA (1)...(19): siRNA sense strand
uuucggaacacgaggguua

SEQ ID NO: 1423081 - RNA, 19 nt, Homo sapiens
  misc_RNA (1)...(19): siRNA sense strand
ggccagagcgacuuugauc

SEQ ID NO: 1423082 - RNA, 19 nt, Homo sapiens
  misc_RNA (1)...(19): siRNA sense strand
gaugaacuagauugcuuga

SEQ ID NO: 1423083 - RNA, 19 nt, Homo sapiens
  misc_RNA (1)...(19): siRNA sense strand
agcaguauauuccaaagau

SEQ ID NO: 1423084 - RNA, 19 nt, Homo sapiens
  misc_RNA (1)...(19): siRNA sense strand
uuggaaacaugaugagcaa

SEQ ID NO: 1423085 - RNA, 19 nt, Homo sapiens
  misc_RNA (1)...(19): siRNA sense strand
ggauaaacuaguacgagau

SEQ ID NO: 1423086 - RNA, 19 nt, Homo sapiens
  misc_RNA (1)...(19): siRNA sense strand
cuuacuggcuguaccacuu

SEQ ID NO: 1423087 - RNA, 19 nt, Homo sapiens
  misc_RNA (1)...(19): siRNA sense strand
aaacgggucacagguacua

SEQ ID NO: 1423088 - RNA, 19 nt, Homo sapiens
  misc_RNA (1)...(19): siRNA sense strand
uacaaacgggucacaggua

SEQ ID NO: 1423089 - RNA, 19 nt, Homo sapiens
  misc_RNA (1)...(19): siRNA sense strand
gguuagcaucuuagcagua

SEQ ID NO: 1423090 - RNA, 19 nt, Homo sapiens
  misc_RNA (1)...(19): siRNA sense strand
gaacacgaggguuauuuug

SEQ ID NO: 1423091 - RNA, 19 nt, Homo sapiens
  misc_RNA (1)...(19): siRNA sense strand
agaaguggaaagucuuaaa

SEQ ID NO: 1423092 - RNA, 19 nt, Homo sapiens
  misc_RNA (1)...(19): siRNA sense strand
ugaccuccaauguggcuua

SEQ ID NO: 1423093 - RNA, 19 nt, Homo sapiens
  misc_RNA (1)...(19): siRNA sense strand
gaucuucagcuuugcaaac

SEQ ID NO: 1423094 - RNA, 19 nt, Homo sapiens
  misc_RNA (1)...(19): siRNA sense strand
ggaacacgaggguuauuuu

SEQ ID NO: 1423095 - RNA, 19 nt, Homo sapiens
  misc_RNA (1)...(19): siRNA sense strand
uuaaaagcauucggaagua

SEQ ID NO: 1423096 - RNA, 19 nt, Homo sapiens
  misc_RNA (1)...(19): siRNA sense strand
caggugguauuuguuggaa

SEQ ID NO: 1423097 - RNA, 19 nt, Homo sapiens
  misc_RNA (1)...(19): siRNA sense strand
agaagaggaagaaguggaa

SEQ ID NO: 1423098 - RNA, 19 nt, Homo sapiens
  misc_RNA (1)...(19): siRNA sense strand
caucuuagcaguauauucc

SEQ ID NO: 1423099 - RNA, 19 nt, Homo sapiens
  misc_RNA (1)...(19): siRNA sense strand
uagcaucuuagcaguauau

SEQ ID NO: 1423100 - RNA, 19 nt, Homo sapiens
  misc_RNA (1)...(19): siRNA sense strand
ugaaaacccugcugauucu

SEQ ID NO: 1423101 - RNA, 19 nt, Homo sapiens
  misc_RNA (1)...(19): siRNA sense strand
aguacgagauauuuaugga

SEQ ID NO: 1423102 - RNA, 19 nt, Homo sapiens
  misc_RNA (1)...(19): siRNA sense strand
ggaaagucuuaaaagcauu

SEQ ID NO: 1423103 - RNA, 19 nt, Homo sapiens
  misc_RNA (1)...(19): siRNA sense strand
uagauugcuugaucaaagg

SEQ ID NO: 1423104 - RNA, 19 nt, Homo sapiens
  misc_RNA (1)...(19): siRNA sense strand
agcgagaggcugucaguaa

SEQ ID NO: 1423105 - RNA, 19 nt, Homo sapiens
  misc_RNA (1)...(19): siRNA sense strand
gcugggcuguggcuucaag

SEQ ID NO: 1423106 - RNA, 19 nt, Homo sapiens
  misc_RNA (1)...(19): siRNA sense strand
ggacggucacagugcuauu

SEQ ID NO: 1423107 - RNA, 19 nt, Homo sapiens
  misc_RNA (1)...(19): siRNA sense strand
uuaugggucuacaggcauu

SEQ ID NO: 1423108 - RNA, 19 nt, Homo sapiens
  misc_RNA (1)...(19): siRNA sense strand
gaccuccaauguggcuuau

SEQ ID NO: 1423109 - RNA, 19 nt, Homo sapiens
  misc_RNA (1)...(19): siRNA sense strand
cggaacacgaggguuauuu

SEQ ID NO: 1423110 - RNA, 19 nt, Homo sapiens
  misc_RNA (1)...(19): siRNA sense strand
caaagacaucacugcugaa

SEQ ID NO: 1423111 - RNA, 19 nt, Homo sapiens
  misc_RNA (1)...(19): siRNA sense strand
ucguggagauagcaccaaa

SEQ ID NO: 1423112 - RNA, 19 nt, Homo sapiens
  misc_RNA (1)...(19): siRNA sense strand
uuuggucucugcugucuuc

SEQ ID NO: 1423113 - RNA, 19 nt, Homo sapiens
  misc_RNA (1)...(19): siRNA sense strand
gucacagugcuauuacuuu

SEQ ID NO: 1423114 - RNA, 19 nt, Homo sapiens
  misc_RNA (1)...(19): siRNA sense strand
ccaaaguggauaaacuagu

SEQ ID NO: 1423115 - RNA, 19 nt, Homo sapiens
  misc_RNA (1)...(19): siRNA sense strand
gaagaagaagaggaagaag

SEQ ID NO: 1423116 - RNA, 19 nt, Homo sapiens
  misc_RNA (1)...(19): siRNA sense strand
cugaaggaccugacucugu

SEQ ID NO: 1423117 - RNA, 19 nt, Homo sapiens
  misc_RNA (1)...(19): siRNA sense strand
guggagauagcaccaaagu

SEQ ID NO: 1423118 - RNA, 19 nt, Homo sapiens
  misc_RNA (1)...(19): siRNA sense strand
gacucuguguggacgcaaa

SEQ ID NO: 1423119 - RNA, 19 nt, Homo sapiens
  misc_RNA (1)...(19): siRNA sense strand
aaacuggaugaacuagauu

SEQ ID NO: 1423120 - RNA, 19 nt, Homo sapiens
  misc_RNA (1)...(19): siRNA sense strand
aaugugugcccuuaaugaa

SEQ ID NO: 1423121 - RNA, 19 nt, Homo sapiens
  misc_RNA (1)...(19): siRNA sense strand
cucaauagcaagaaugugu

SEQ ID NO: 1423122 - RNA, 19 nt, Homo sapiens
  misc_RNA (1)...(19): siRNA sense strand
gagaagcgagaggcuguca

SEQ ID NO: 1423123 - RNA, 19 nt, Homo sapiens
  misc_RNA (1)...(19): siRNA sense strand
ggaaguaccugaccuccaa

SEQ ID NO: 1423124 - RNA, 19 nt, Homo sapiens
  misc_RNA (1)...(19): siRNA sense strand
agacaucacugcugaagaa

SEQ ID NO: 1423125 - RNA, 19 nt, Homo sapiens
  misc_RNA (1)...(19): siRNA sense strand
caucacugcugaagaagaa

SEQ ID NO: 1423126 - RNA, 19 nt, Homo sapiens
  misc_RNA (1)...(19): siRNA sense strand
uggucaagcugguauauuu

SEQ ID NO: 1423127 - RNA, 19 nt, Homo sapiens
  misc_RNA (1)...(19): siRNA sense strand
ugaagaagaagaggaagaa

SEQ ID NO: 1423128 - RNA, 19 nt, Homo sapiens
  misc_RNA (1)...(19): siRNA sense strand
agaagaagaggaagaagug

SEQ ID NO: 1423129 - RNA, 19 nt, Homo sapiens
  misc_RNA (1)...(19): siRNA sense strand
gaaguggaaagucuuaaaa

SEQ ID NO: 1423130 - RNA, 19 nt, Homo sapiens
  misc_RNA (1)...(19): siRNA sense strand
aggaagaaguggaaagucu

SEQ ID NO: 1423131 - RNA, 19 nt, Homo sapiens
  misc_RNA (1)...(19): siRNA sense strand
gaagaggaagaaguggaaa

SEQ ID NO: 1423132 - RNA, 19 nt, Homo sapiens
  misc_RNA (1)...(19): siRNA sense strand
ccuccaauguggcuuaugg

SEQ ID NO: 1423133 - RNA, 19 nt, Homo sapiens
  misc_RNA (1)...(19): siRNA sense strand
guaccugaccuccaaugug

SEQ ID NO: 1423134 - RNA, 19 nt, Homo sapiens
  misc_RNA (1)...(19): siRNA sense strand
guggaacucuggucaagcu

SEQ ID NO: 1423135 - RNA, 19 nt, Homo sapiens
  misc_RNA (1)...(19): siRNA sense strand
agaaguggaaagucuuaaa

SEQ ID NO: 1423136 - RNA, 19 nt, Homo sapiens
  misc_RNA (1)...(19): siRNA sense strand
ugaccuccaauguggcuua

SEQ ID NO: 1423137 - RNA, 19 nt, Homo sapiens
  misc_RNA (1)...(19): siRNA sense strand
agaagaggaagaaguggaa

SEQ ID NO: 1423138 - RNA, 19 nt, Homo sapiens
  misc_RNA (1)...(19): siRNA sense strand
uuaaaagcauucggaagua

SEQ ID NO: 1423139 - RNA, 19 nt, Homo sapiens
  misc_RNA (1)...(19): siRNA sense strand
ggaaagucuuaaaagcauu

SEQ ID NO: 1423140 - RNA, 19 nt, Homo sapiens
  misc_RNA (1)...(19): siRNA sense strand
uuaugggucuacaggcauu

SEQ ID NO: 1423141 - RNA, 19 nt, Homo sapiens
  misc_RNA (1)...(19): siRNA sense strand
caaagacaucacugcugaa

SEQ ID NO: 1423142 - RNA, 19 nt, Homo sapiens
  misc_RNA (1)...(19): siRNA sense strand
gaccuccaauguggcuuau

SEQ ID NO: 1423143 - RNA, 19 nt, Homo sapiens
  misc_RNA (1)...(19): siRNA sense strand
gaagaagaagaggaagaag

SEQ ID NO: 1423144 - RNA, 19 nt, Homo sapiens
  misc_RNA (1)...(19): siRNA sense strand
gacucuguguggacgcaaa

SEQ ID NO: 1423145 - RNA, 19 nt, Homo sapiens
  misc_RNA (1)...(19): siRNA sense strand
cugaaggaccugacucugu

SEQ ID NO: 1423146 - RNA, 19 nt, Homo sapiens
  misc_RNA (1)...(19): siRNA sense strand
caaaguggauaaacuagua

SEQ ID NO: 1423147 - RNA, 19 nt, Homo sapiens
  misc_RNA (1)...(19): siRNA sense strand
gcaagaaugugugcccuua

SEQ ID NO: 1423148 - RNA, 19 nt, Homo sapiens
  misc_RNA (1)...(19): siRNA sense strand
gaaguuaccauuugauuug

SEQ ID NO: 1423149 - RNA, 19 nt, Homo sapiens
  misc_RNA (1)...(19): siRNA sense strand
gaacuagauugcuugauca

SEQ ID NO: 1423150 - RNA, 19 nt, Homo sapiens
  misc_RNA (1)...(19): siRNA sense strand
ggucucugcugucuucuua

SEQ ID NO: 1423151 - RNA, 19 nt, Homo sapiens
  misc_RNA (1)...(19): siRNA sense strand
gcgagaggcugucaguaaa

SEQ ID NO: 1423152 - RNA, 19 nt, Homo sapiens
  misc_RNA (1)...(19): siRNA sense strand
gcaguauauuccaaagaua

SEQ ID NO: 1423153 - RNA, 19 nt, Homo sapiens
  misc_RNA (1)...(19): siRNA sense strand
gauaaacuaguacgagaua

SEQ ID NO: 1423154 - RNA, 19 nt, Homo sapiens
  misc_RNA (1)...(19): siRNA sense strand
caaacuggaugaacuagau

SEQ ID NO: 1423155 - RNA, 19 nt, Homo sapiens
  misc_RNA (1)...(19): siRNA sense strand
ucacagugcuauuacuuug

SEQ ID NO: 1423156 - RNA, 19 nt, Homo sapiens
  misc_RNA (1)...(19): siRNA sense strand
gcaccaaaguggauaaacu

SEQ ID NO: 1423157 - RNA, 19 nt, Homo sapiens
  misc_RNA (1)...(19): siRNA sense strand
ugucagaaguuaccauuug

SEQ ID NO: 1423158 - RNA, 19 nt, Homo sapiens
  misc_RNA (1)...(19): siRNA sense strand
uggcauaugcuuuggauua

SEQ ID NO: 1423159 - RNA, 19 nt, Homo sapiens
  misc_RNA (1)...(19): siRNA sense strand
gaaugugugcccuuaauga

SEQ ID NO: 1423160 - RNA, 19 nt, Homo sapiens
  misc_RNA (1)...(19): siRNA sense strand
cauaugcuuuggauuauug

SEQ ID NO: 1423161 - RNA, 19 nt, Homo sapiens
  misc_RNA (1)...(19): siRNA sense strand
ugaacuagauugcuugauc

SEQ ID NO: 1423162 - RNA, 19 nt, Homo sapiens
  misc_RNA (1)...(19): siRNA sense strand
gaaacaugaugagcaagga

SEQ ID NO: 1423163 - RNA, 19 nt, Homo sapiens
  misc_RNA (1)...(19): siRNA sense strand
uaggugaucuucagcuuug

SEQ ID NO: 1423164 - RNA, 19 nt, Homo sapiens
  misc_RNA (1)...(19): siRNA sense strand
gagaggcugucaguaaaga

SEQ ID NO: 1423165 - RNA, 19 nt, Homo sapiens
  misc_RNA (1)...(19): siRNA sense strand
gcauaugcuuuggauuauu

SEQ ID NO: 1423166 - RNA, 19 nt, Homo sapiens
  misc_RNA (1)...(19): siRNA sense strand
cuagauugcuugaucaaag

SEQ ID NO: 1423167 - RNA, 19 nt, Homo sapiens
  misc_RNA (1)...(19): siRNA sense strand
guuagcaucuuagcaguau

SEQ ID NO: 1423168 - RNA, 19 nt, Homo sapiens
  misc_RNA (1)...(19): siRNA sense strand
gagcacuccuugagcuguu

SEQ ID NO: 1423169 - RNA, 19 nt, Homo sapiens
  misc_RNA (1)...(19): siRNA sense strand
ugaaaagugucagaaguua

SEQ ID NO: 1423170 - RNA, 19 nt, Homo sapiens
  misc_RNA (1)...(19): siRNA sense strand
ggucacagguacuagucuu

SEQ ID NO: 1423171 - RNA, 19 nt, Homo sapiens
  misc_RNA (1)...(19): siRNA sense strand
gucagaaguuaccauuuga

SEQ ID NO: 1423172 - RNA, 19 nt, Homo sapiens
  misc_RNA (1)...(19): siRNA sense strand
ggcauaugcuuuggauuau

SEQ ID NO: 1423173 - RNA, 19 nt, Homo sapiens
  misc_RNA (1)...(19): siRNA sense strand
acagugcuauuacuuugaa

SEQ ID NO: 1423174 - RNA, 19 nt, Homo sapiens
  misc_RNA (1)...(19): siRNA sense strand
caccaaaguggauaaacua

SEQ ID NO: 1423175 - RNA, 19 nt, Homo sapiens
  misc_RNA (1)...(19): siRNA sense strand
gacggucacagugcuauua

SEQ ID NO: 1423176 - RNA, 19 nt, Homo sapiens
  misc_RNA (1)...(19): siRNA sense strand
aagaaugugugcccuuaau

SEQ ID NO: 1423177 - RNA, 19 nt, Homo sapiens
  misc_RNA (1)...(19): siRNA sense strand
uggaugaacuagauugcuu

SEQ ID NO: 1423178 - RNA, 19 nt, Homo sapiens
  misc_RNA (1)...(19): siRNA sense strand
cagaaguuaccauuugauu

SEQ ID NO: 1423179 - RNA, 19 nt, Homo sapiens
  misc_RNA (1)...(19): siRNA sense strand
gaagcgagaggcugucagu

SEQ ID NO: 1423180 - RNA, 19 nt, Homo sapiens
  misc_RNA (1)...(19): siRNA sense strand
ggucacagugcuauuacuu

SEQ ID NO: 1423181 - RNA, 19 nt, Homo sapiens
  misc_RNA (1)...(19): siRNA sense strand
ccaaagauaauuacaaacg

SEQ ID NO: 1423182 - RNA, 19 nt, Homo sapiens
  misc_RNA (1)...(19): siRNA sense strand
aaacccugcugauucugaa

SEQ ID NO: 1423183 - RNA, 19 nt, Homo sapiens
  misc_RNA (1)...(19): siRNA sense strand
gcaaacuggaugaacuaga

SEQ ID NO: 1423184 - RNA, 19 nt, Homo sapiens
  misc_RNA (1)...(19): siRNA sense strand
caagaaugugugcccuuaa

SEQ ID NO: 1423185 - RNA, 19 nt, Homo sapiens
  misc_RNA (1)...(19): siRNA sense strand
caccaucaccaacaacauu

SEQ ID NO: 1423186 - RNA, 19 nt, Homo sapiens
  misc_RNA (1)...(19): siRNA sense strand
gagcgacuuugaucaccau

SEQ ID NO: 1423187 - RNA, 19 nt, Homo sapiens
  misc_RNA (1)...(19): siRNA sense strand
gauagcaccaaaguggaua

SEQ ID NO: 1423188 - RNA, 19 nt, Homo sapiens
  misc_RNA (1)...(19): siRNA sense strand
uguuggaaauuucuugaga

SEQ ID NO: 1423189 - RNA, 19 nt, Homo sapiens
  misc_RNA (1)...(19): siRNA sense strand
uccuugagcuguugaagau

SEQ ID NO: 1423190 - RNA, 19 nt, Homo sapiens
  misc_RNA (1)...(19): siRNA sense strand
gaugaacuagauugcuuga

SEQ ID NO: 1423191 - RNA, 19 nt, Homo sapiens
  misc_RNA (1)...(19): siRNA sense strand
uuucggaacacgaggguua

SEQ ID NO: 1423192 - RNA, 19 nt, Homo sapiens
  misc_RNA (1)...(19): siRNA sense strand
ggccagagcgacuuugauc

SEQ ID NO: 1423193 - RNA, 19 nt, Homo sapiens
  misc_RNA (1)...(19): siRNA sense strand
agcaguauauuccaaagau

SEQ ID NO: 1423194 - RNA, 19 nt, Homo sapiens
  misc_RNA (1)...(19): siRNA sense strand
uuggaaacaugaugagcaa

SEQ ID NO: 1423195 - RNA, 19 nt, Homo sapiens
  misc_RNA (1)...(19): siRNA sense strand
ggauaaacuaguacgagau

SEQ ID NO: 1423196 - RNA, 19 nt, Homo sapiens
  misc_RNA (1)...(19): siRNA sense strand
cuuacuggcuguaccacuu

SEQ ID NO: 1423197 - RNA, 19 nt, Homo sapiens
  misc_RNA (1)...(19): siRNA sense strand
aaacgggucacagguacua

SEQ ID NO: 1423198 - RNA, 19 nt, Homo sapiens
  misc_RNA (1)...(19): siRNA sense strand
uacaaacgggucacaggua

SEQ ID NO: 1423199 - RNA, 19 nt, Homo sapiens
  misc_RNA (1)...(19): siRNA sense strand
gguuagcaucuuagcagua

SEQ ID NO: 1423200 - RNA, 19 nt, Homo sapiens
  misc_RNA (1)...(19): siRNA sense strand
gaacacgaggguuauuuug

SEQ ID NO: 1423201 - RNA, 19 nt, Homo sapiens
  misc_RNA (1)...(19): siRNA sense strand
uagcaucuuagcaguauau

SEQ ID NO: 1423202 - RNA, 19 nt, Homo sapiens
  misc_RNA (1)...(19): siRNA sense strand
ggaacacgaggguuauuuu

SEQ ID NO: 1423203 - RNA, 19 nt, Homo sapiens
  misc_RNA (1)...(19): siRNA sense strand
caggugguauuuguuggaa

SEQ ID NO: 1423204 - RNA, 19 nt, Homo sapiens
  misc_RNA (1)...(19): siRNA sense strand
gaucuucagcuuugcaaac

SEQ ID NO: 1423205 - RNA, 19 nt, Homo sapiens
  misc_RNA (1)...(19): siRNA sense strand
caucuuagcaguauauucc

SEQ ID NO: 1423206 - RNA, 19 nt, Homo sapiens
  misc_RNA (1)...(19): siRNA sense strand
ugaaaacccugcugauucu

SEQ ID NO: 1423207 - RNA, 19 nt, Homo sapiens
  misc_RNA (1)...(19): siRNA sense strand
aguacgagauauuuaugga

SEQ ID NO: 1423208 - RNA, 19 nt, Homo sapiens
  misc_RNA (1)...(19): siRNA sense strand
gcugggcuguggcuucaag

SEQ ID NO: 1423209 - RNA, 19 nt, Homo sapiens
  misc_RNA (1)...(19): siRNA sense strand
ggacggucacagugcuauu

SEQ ID NO: 1423210 - RNA, 19 nt, Homo sapiens
  misc_RNA (1)...(19): siRNA sense strand
uagauugcuugaucaaagg

SEQ ID NO: 1423211 - RNA, 19 nt, Homo sapiens
  misc_RNA (1)...(19): siRNA sense strand
agcgagaggcugucaguaa

SEQ ID NO: 1423212 - RNA, 19 nt, Homo sapiens
  misc_RNA (1)...(19): siRNA sense strand
uuuggucucugcugucuuc

SEQ ID NO: 1423213 - RNA, 19 nt, Homo sapiens
  misc_RNA (1)...(19): siRNA sense strand
cggaacacgaggguuauuu

SEQ ID NO: 1423214 - RNA, 19 nt, Homo sapiens
  misc_RNA (1)...(19): siRNA sense strand
ucguggagauagcaccaaa

SEQ ID NO: 1423215 - RNA, 19 nt, Homo sapiens
  misc_RNA (1)...(19): siRNA sense strand
ccaaaguggauaaacuagu

SEQ ID NO: 1423216 - RNA, 19 nt, Homo sapiens
  misc_RNA (1)...(19): siRNA sense strand
gucacagugcuauuacuuu

SEQ ID NO: 1423217 - RNA, 19 nt, Homo sapiens
  misc_RNA (1)...(19): siRNA sense strand
guggagauagcaccaaagu

SEQ ID NO: 1423218 - RNA, 19 nt, Homo sapiens
  misc_RNA (1)...(19): siRNA sense strand
gagaagcgagaggcuguca

SEQ ID NO: 1423219 - RNA, 19 nt, Homo sapiens
  misc_RNA (1)...(19): siRNA sense strand
aaugugugcccuuaaugaa

SEQ ID NO: 1423220 - RNA, 19 nt, Homo sapiens
  misc_RNA (1)...(19): siRNA sense strand
cucaauagcaagaaugugu

SEQ ID NO: 1423221 - RNA, 19 nt, Homo sapiens
  misc_RNA (1)...(19): siRNA sense strand
aaacuggaugaacuagauu

SEQ ID NO: 1423222 - RNA, 19 nt, Homo sapiens
  misc_RNA (1)...(19): siRNA sense strand
caaaguggauaaacuagua

SEQ ID NO: 1423223 - RNA, 19 nt, Homo sapiens
  misc_RNA (1)...(19): siRNA sense strand
gcaagaaugugugcccuua

SEQ ID NO: 1423224 - RNA, 19 nt, Homo sapiens
  misc_RNA (1)...(19): siRNA sense strand
gcgagaggcugucaguaaa

SEQ ID NO: 1423225 - RNA, 19 nt, Homo sapiens
  misc_RNA (1)...(19): siRNA sense strand
gauaaacuaguacgagaua

SEQ ID NO: 1423226 - RNA, 19 nt, Homo sapiens
  misc_RNA (1)...(19): siRNA sense strand
gcaccaaaguggauaaacu

SEQ ID NO: 1423227 - RNA, 19 nt, Homo sapiens
  misc_RNA (1)...(19): siRNA sense strand
uggcauaugcuuuggauua

SEQ ID NO: 1423228 - RNA, 19 nt, Homo sapiens
  misc_RNA (1)...(19): siRNA sense strand
gaaugugugcccuuaauga

SEQ ID NO: 1423229 - RNA, 19 nt, Homo sapiens
  misc_RNA (1)...(19): siRNA sense strand
cauaugcuuuggauuauug

SEQ ID NO: 1423230 - RNA, 19 nt, Homo sapiens
  misc_RNA (1)...(19): siRNA sense strand
gaaacaugaugagcaagga

SEQ ID NO: 1423231 - RNA, 19 nt, Homo sapiens
  misc_RNA (1)...(19): siRNA sense strand
gagaggcugucaguaaaga

SEQ ID NO: 1423232 - RNA, 19 nt, Homo sapiens
  misc_RNA (1)...(19): siRNA sense strand
gcauaugcuuuggauuauu

SEQ ID NO: 1423233 - RNA, 19 nt, Homo sapiens
  misc_RNA (1)...(19): siRNA sense strand
gagcacuccuugagcuguu

SEQ ID NO: 1423234 - RNA, 19 nt, Homo sapiens
  misc_RNA (1)...(19): siRNA sense strand
ggcauaugcuuuggauuau

SEQ ID NO: 1423235 - RNA, 19 nt, Homo sapiens
  misc_RNA (1)...(19): siRNA sense strand
caccaaaguggauaaacua

SEQ ID NO: 1423236 - RNA, 19 nt, Homo sapiens
  misc_RNA (1)...(19): siRNA sense strand
aagaaugugugcccuuaau

SEQ ID NO: 1423237 - RNA, 19 nt, Homo sapiens
  misc_RNA (1)...(19): siRNA sense strand
gaagcgagaggcugucagu

SEQ ID NO: 1423238 - RNA, 19 nt, Homo sapiens
  misc_RNA (1)...(19): siRNA sense strand
gagcgacuuugaucaccau

SEQ ID NO: 1423239 - RNA, 19 nt, Homo sapiens
  misc_RNA (1)...(19): siRNA sense strand
caagaaugugugcccuuaa

SEQ ID NO: 1423240 - RNA, 19 nt, Homo sapiens
  misc_RNA (1)...(19): siRNA sense strand
caccaucaccaacaacauu

SEQ ID NO: 1423241 - RNA, 19 nt, Homo sapiens
  misc_RNA (1)...(19): siRNA sense strand
gauagcaccaaaguggaua

SEQ ID NO: 1423242 - RNA, 19 nt, Homo sapiens
  misc_RNA (1)...(19): siRNA sense strand
uguuggaaauuucuugaga

SEQ ID NO: 1423243 - RNA, 19 nt, Homo sapiens
  misc_RNA (1)...(19): siRNA sense strand
uccuugagcuguugaagau

SEQ ID NO: 1423244 - RNA, 19 nt, Homo sapiens
  misc_RNA (1)...(19): siRNA sense strand
ggccagagcgacuuugauc

SEQ ID NO: 1423245 - RNA, 19 nt, Homo sapiens
  misc_RNA (1)...(19): siRNA sense strand
uuucggaacacgaggguua

SEQ ID NO: 1423246 - RNA, 19 nt, Homo sapiens
  misc_RNA (1)...(19): siRNA sense strand
uuggaaacaugaugagcaa

SEQ ID NO: 1423247 - RNA, 19 nt, Homo sapiens
  misc_RNA (1)...(19): siRNA sense strand
ggauaaacuaguacgagau

SEQ ID NO: 1423248 - RNA, 19 nt, Homo sapiens
  misc_RNA (1)...(19): siRNA sense strand
gaacacgaggguuauuuug

SEQ ID NO: 1423249 - RNA, 19 nt, Homo sapiens
  misc_RNA (1)...(19): siRNA sense strand
caggugguauuuguuggaa

SEQ ID NO: 1423250 - RNA, 19 nt, Homo sapiens
  misc_RNA (1)...(19): siRNA sense strand
ggaacacgaggguuauuuu

SEQ ID NO: 1423251 - RNA, 19 nt, Homo sapiens
  misc_RNA (1)...(19): siRNA sense strand
aguacgagauauuuaugga

SEQ ID NO: 1423252 - RNA, 19 nt, Homo sapiens
  misc_RNA (1)...(19): siRNA sense strand
gcugggcuguggcuucaag

SEQ ID NO: 1423253 - RNA, 19 nt, Homo sapiens
  misc_RNA (1)...(19): siRNA sense strand
agcgagaggcugucaguaa

SEQ ID NO: 1423254 - RNA, 19 nt, Homo sapiens
  misc_RNA (1)...(19): siRNA sense strand
ucguggagauagcaccaaa

SEQ ID NO: 1423255 - RNA, 19 nt, Homo sapiens
  misc_RNA (1)...(19): siRNA sense strand
cggaacacgaggguuauuu

SEQ ID NO: 1423256 - RNA, 19 nt, Homo sapiens
  misc_RNA (1)...(19): siRNA sense strand
ccaaaguggauaaacuagu

SEQ ID NO: 1423257 - RNA, 19 nt, Homo sapiens
  misc_RNA (1)...(19): siRNA sense strand
guggagauagcaccaaagu

SEQ ID NO: 1423258 - RNA, 19 nt, Homo sapiens
  misc_RNA (1)...(19): siRNA sense strand
gagaagcgagaggcuguca

SEQ ID NO: 1423259 - RNA, 19 nt, Homo sapiens
  misc_RNA (1)...(19): siRNA sense strand
aaugugugcccuuaaugaa

SEQ ID NO: 1423260 - RNA, 19 nt, Homo sapiens
  misc_RNA (1)...(19): siRNA sense strand
cucaauagcaagaaugugu

SEQ ID NO: 1423261 - RNA, 19 nt, Homo sapiens
  misc_RNA (1)...(19): siRNA sense strand
caaaguggauaaacuagua

SEQ ID NO: 1423262 - RNA, 19 nt, Homo sapiens
  misc_RNA (1)...(19): siRNA sense strand
gcaagaaugugugcccuua

SEQ ID NO: 1423263 - RNA, 19 nt, Homo sapiens
  misc_RNA (1)...(19): siRNA sense strand
gaaguuaccauuugauuug

SEQ ID NO: 1423264 - RNA, 19 nt, Homo sapiens
  misc_RNA (1)...(19): siRNA sense strand
gaacuagauugcuugauca

SEQ ID NO: 1423265 - RNA, 19 nt, Homo sapiens
  misc_RNA (1)...(19): siRNA sense strand
ggucucugcugucuucuua

SEQ ID NO: 1423266 - RNA, 19 nt, Homo sapiens
  misc_RNA (1)...(19): siRNA sense strand
gcgagaggcugucaguaaa

SEQ ID NO: 1423267 - RNA, 19 nt, Homo sapiens
  misc_RNA (1)...(19): siRNA sense strand
gcaguauauuccaaagaua

SEQ ID NO: 1423268 - RNA, 19 nt, Homo sapiens
  misc_RNA (1)...(19): siRNA sense strand
gauaaacuaguacgagaua

SEQ ID NO: 1423269 - RNA, 19 nt, Homo sapiens
  misc_RNA (1)...(19): siRNA sense strand
caaacuggaugaacuagau

SEQ ID NO: 1423270 - RNA, 19 nt, Homo sapiens
  misc_RNA (1)...(19): siRNA sense strand
ucacagugcuauuacuuug

SEQ ID NO: 1423271 - RNA, 19 nt, Homo sapiens
  misc_RNA (1)...(19): siRNA sense strand
gcaccaaaguggauaaacu

SEQ ID NO: 1423272 - RNA, 19 nt, Homo sapiens
  misc_RNA (1)...(19): siRNA sense strand
ugucagaaguuaccauuug

SEQ ID NO: 1423273 - RNA, 19 nt, Homo sapiens
  misc_RNA (1)...(19): siRNA sense strand
uggcauaugcuuuggauua

SEQ ID NO: 1423274 - RNA, 19 nt, Homo sapiens
  misc_RNA (1)...(19): siRNA sense strand
gaaugugugcccuuaauga

SEQ ID NO: 1423275 - RNA, 19 nt, Homo sapiens
  misc_RNA (1)...(19): siRNA sense strand
cauaugcuuuggauuauug

SEQ ID NO: 1423276 - RNA, 19 nt, Homo sapiens
  misc_RNA (1)...(19): siRNA sense strand
ugaacuagauugcuugauc

SEQ ID NO: 1423277 - RNA, 19 nt, Homo sapiens
  misc_RNA (1)...(19): siRNA sense strand
gaaacaugaugagcaagga

SEQ ID NO: 1423278 - RNA, 19 nt, Homo sapiens
  misc_RNA (1)...(19): siRNA sense strand
uaggugaucuucagcuuug

SEQ ID NO: 1423279 - RNA, 19 nt, Homo sapiens
  misc_RNA (1)...(19): siRNA sense strand
gagaggcugucaguaaaga

SEQ ID NO: 1423280 - RNA, 19 nt, Homo sapiens
  misc_RNA (1)...(19): siRNA sense strand
gcauaugcuuuggauuauu

SEQ ID NO: 1423281 - RNA, 19 nt, Homo sapiens
  misc_RNA (1)...(19): siRNA sense strand
cuagauugcuugaucaaag

SEQ ID NO: 1423282 - RNA, 19 nt, Homo sapiens
  misc_RNA (1)...(19): siRNA sense strand
guuagcaucuuagcaguau

SEQ ID NO: 1423283 - RNA, 19 nt, Homo sapiens
  misc_RNA (1)...(19): siRNA sense strand
gagcacuccuugagcuguu

SEQ ID NO: 1423284 - RNA, 19 nt, Homo sapiens
  misc_RNA (1)...(19): siRNA sense strand
ugaaaagugucagaaguua

SEQ ID NO: 1423285 - RNA, 19 nt, Homo sapiens
  misc_RNA (1)...(19): siRNA sense strand
ggucacagguacuagucuu

SEQ ID NO: 1423286 - RNA, 19 nt, Homo sapiens
  misc_RNA (1)...(19): siRNA sense strand
gucagaaguuaccauuuga

SEQ ID NO: 1423287 - RNA, 19 nt, Homo sapiens
  misc_RNA (1)...(19): siRNA sense strand
ggcauaugcuuuggauuau

SEQ ID NO: 1423288 - RNA, 19 nt, Homo sapiens
  misc_RNA (1)...(19): siRNA sense strand
acagugcuauuacuuugaa

SEQ ID NO: 1423289 - RNA, 19 nt, Homo sapiens
  misc_RNA (1)...(19): siRNA sense strand
caccaaaguggauaaacua

SEQ ID NO: 1423290 - RNA, 19 nt, Homo sapiens
  misc_RNA (1)...(19): siRNA sense strand
gacggucacagugcuauua

SEQ ID NO: 1423291 - RNA, 19 nt, Homo sapiens
  misc_RNA (1)...(19): siRNA sense strand
aagaaugugugcccuuaau

SEQ ID NO: 1423292 - RNA, 19 nt, Homo sapiens
  misc_RNA (1)...(19): siRNA sense strand
uggaugaacuagauugcuu

SEQ ID NO: 1423293 - RNA, 19 nt, Homo sapiens
  misc_RNA (1)...(19): siRNA sense strand
cagaaguuaccauuugauu

SEQ ID NO: 1423294 - RNA, 19 nt, Homo sapiens
  misc_RNA (1)...(19): siRNA sense strand
gaagcgagaggcugucagu

SEQ ID NO: 1423295 - RNA, 19 nt, Homo sapiens
  misc_RNA (1)...(19): siRNA sense strand
ggucacagugcuauuacuu

SEQ ID NO: 1423296 - RNA, 19 nt, Homo sapiens
  misc_RNA (1)...(19): siRNA sense strand
ccaaagauaauuacaaacg

SEQ ID NO: 1423297 - RNA, 19 nt, Homo sapiens
  misc_RNA (1)...(19): siRNA sense strand
aaacccugcugauucugaa

SEQ ID NO: 1423298 - RNA, 19 nt, Homo sapiens
  misc_RNA (1)...(19): siRNA sense strand
gcaaacuggaugaacuaga

SEQ ID NO: 1423299 - RNA, 19 nt, Homo sapiens
  misc_RNA (1)...(19): siRNA sense strand
caagaaugugugcccuuaa

SEQ ID NO: 1423300 - RNA, 19 nt, Homo sapiens
  misc_RNA (1)...(19): siRNA sense strand
caccaucaccaacaacauu

SEQ ID NO: 1423301 - RNA, 19 nt, Homo sapiens
  misc_RNA (1)...(19): siRNA sense strand
gagcgacuuugaucaccau

SEQ ID NO: 1423302 - RNA, 19 nt, Homo sapiens
  misc_RNA (1)...(19): siRNA sense strand
gauagcaccaaaguggaua

SEQ ID NO: 1423303 - RNA, 19 nt, Homo sapiens
  misc_RNA (1)...(19): siRNA sense strand
uguuggaaauuucuugaga

SEQ ID NO: 1423304 - RNA, 19 nt, Homo sapiens
  misc_RNA (1)...(19): siRNA sense strand
uccuugagcuguugaagau

SEQ ID NO: 1423305 - RNA, 19 nt, Homo sapiens
  misc_RNA (1)...(19): siRNA sense strand
gaugaacuagauugcuuga

SEQ ID NO: 1423306 - RNA, 19 nt, Homo sapiens
  misc_RNA (1)...(19): siRNA sense strand
uuucggaacacgaggguua

SEQ ID NO: 1423307 - RNA, 19 nt, Homo sapiens
  misc_RNA (1)...(19): siRNA sense strand
ggccagagcgacuuugauc

SEQ ID NO: 1423308 - RNA, 19 nt, Homo sapiens
  misc_RNA (1)...(19): siRNA sense strand
agcaguauauuccaaagau

SEQ ID NO: 1423309 - RNA, 19 nt, Homo sapiens
  misc_RNA (1)...(19): siRNA sense strand
uuggaaacaugaugagcaa

SEQ ID NO: 1423310 - RNA, 19 nt, Homo sapiens
  misc_RNA (1)...(19): siRNA sense strand
ggauaaacuaguacgagau

SEQ ID NO: 1423311 - RNA, 19 nt, Homo sapiens
  misc_RNA (1)...(19): siRNA sense strand
cuuacuggcuguaccacuu

SEQ ID NO: 1423312 - RNA, 19 nt, Homo sapiens
  misc_RNA (1)...(19): siRNA sense strand
aaacgggucacagguacua

SEQ ID NO: 1423313 - RNA, 19 nt, Homo sapiens
  misc_RNA (1)...(19): siRNA sense strand
uacaaacgggucacaggua

SEQ ID NO: 1423314 - RNA, 19 nt, Homo sapiens
  misc_RNA (1)...(19): siRNA sense strand
gguuagcaucuuagcagua

SEQ ID NO: 1423315 - RNA, 19 nt, Homo sapiens
  misc_RNA (1)...(19): siRNA sense strand
gaacacgaggguuauuuug

SEQ ID NO: 1423316 - RNA, 19 nt, Homo sapiens
  misc_RNA (1)...(19): siRNA sense strand
uagcaucuuagcaguauau

SEQ ID NO: 1423317 - RNA, 19 nt, Homo sapiens
  misc_RNA (1)...(19): siRNA sense strand
ggaacacgaggguuauuuu

SEQ ID NO: 1423318 - RNA, 19 nt, Homo sapiens
  misc_RNA (1)...(19): siRNA sense strand
caggugguauuuguuggaa

SEQ ID NO: 1423319 - RNA, 19 nt, Homo sapiens
  misc_RNA (1)...(19): siRNA sense strand
gaucuucagcuuugcaaac

SEQ ID NO: 1423320 - RNA, 19 nt, Homo sapiens
  misc_RNA (1)...(19): siRNA sense strand
caucuuagcaguauauucc

SEQ ID NO: 1423321 - RNA, 19 nt, Homo sapiens
  misc_RNA (1)...(19): siRNA sense strand
ugaaaacccugcugauucu

SEQ ID NO: 1423322 - RNA, 19 nt, Homo sapiens
  misc_RNA (1)...(19): siRNA sense strand
aguacgagauauuuaugga

SEQ ID NO: 1423323 - RNA, 19 nt, Homo sapiens
  misc_RNA (1)...(19): siRNA sense strand
gcugggcuguggcuucaag

SEQ ID NO: 1423324 - RNA, 19 nt, Homo sapiens
  misc_RNA (1)...(19): siRNA sense strand
ggacggucacagugcuauu

SEQ ID NO: 1423325 - RNA, 19 nt, Homo sapiens
  misc_RNA (1)...(19): siRNA sense strand
uagauugcuugaucaaagg

SEQ ID NO: 1423326 - RNA, 19 nt, Homo sapiens
  misc_RNA (1)...(19): siRNA sense strand
agcgagaggcugucaguaa

SEQ ID NO: 1423327 - RNA, 19 nt, Homo sapiens
  misc_RNA (1)...(19): siRNA sense strand
uuuggucucugcugucuuc

SEQ ID NO: 1423328 - RNA, 19 nt, Homo sapiens
  misc_RNA (1)...(19): siRNA sense strand
cggaacacgaggguuauuu

SEQ ID NO: 1423329 - RNA, 19 nt, Homo sapiens
  misc_RNA (1)...(19): siRNA sense strand
ucguggagauagcaccaaa

SEQ ID NO: 1423330 - RNA, 19 nt, Homo sapiens
  misc_RNA (1)...(19): siRNA sense strand
ccaaaguggauaaacuagu

SEQ ID NO: 1423331 - RNA, 19 nt, Homo sapiens
  misc_RNA (1)...(19): siRNA sense strand
gucacagugcuauuacuuu

SEQ ID NO: 1423332 - RNA, 19 nt, Homo sapiens
  misc_RNA (1)...(19): siRNA sense strand
guggagauagcaccaaagu

SEQ ID NO: 1423333 - RNA, 19 nt, Homo sapiens
  misc_RNA (1)...(19): siRNA sense strand
gagaagcgagaggcuguca

SEQ ID NO: 1423334 - RNA, 19 nt, Homo sapiens
  misc_RNA (1)...(19): siRNA sense strand
aaugugugcccuuaaugaa

SEQ ID NO: 1423335 - RNA, 19 nt, Homo sapiens
  misc_RNA (1)...(19): siRNA sense strand
cucaauagcaagaaugugu

SEQ ID NO: 1423336 - RNA, 19 nt, Homo sapiens
  misc_RNA (1)...(19): siRNA sense strand
aaacuggaugaacuagauu

SEQ ID NO: 1423337 - RNA, 19 nt, Homo sapiens
  misc_RNA (1)...(19): siRNA sense strand
caaaguggauaaacuagua

SEQ ID NO: 1423338 - RNA, 19 nt, Homo sapiens
  misc_RNA (1)...(19): siRNA sense strand
gcaagaaugugugcccuua

SEQ ID NO: 1423339 - RNA, 19 nt, Homo sapiens
  misc_RNA (1)...(19): siRNA sense strand
gcgagaggcugucaguaaa

SEQ ID NO: 1423340 - RNA, 19 nt, Homo sapiens
  misc_RNA (1)...(19): siRNA sense strand
gauaaacuaguacgagaua

SEQ ID NO: 1423341 - RNA, 19 nt, Homo sapiens
  misc_RNA (1)...(19): siRNA sense strand
gcaccaaaguggauaaacu

SEQ ID NO: 1423342 - RNA, 19 nt, Homo sapiens
  misc_RNA (1)...(19): siRNA sense strand
uggcauaugcuuuggauua

SEQ ID NO: 1423343 - RNA, 19 nt, Homo sapiens
  misc_RNA (1)...(19): siRNA sense strand
gaaugugugcccuuaauga

SEQ ID NO: 1423344 - RNA, 19 nt, Homo sapiens
  misc_RNA (1)...(19): siRNA sense strand
cauaugcuuuggauuauug

SEQ ID NO: 1423345 - RNA, 19 nt, Homo sapiens
  misc_RNA (1)...(19): siRNA sense strand
gaaacaugaugagcaagga

SEQ ID NO: 1423346 - RNA, 19 nt, Homo sapiens
  misc_RNA (1)...(19): siRNA sense strand
gagaggcugucaguaaaga

SEQ ID NO: 1423347 - RNA, 19 nt, Homo sapiens
  misc_RNA (1)...(19): siRNA sense strand
gcauaugcuuuggauuauu

SEQ ID NO: 1423348 - RNA, 19 nt, Homo sapiens
  misc_RNA (1)...(19): siRNA sense strand
gagcacuccuugagcuguu

SEQ ID NO: 1423349 - RNA, 19 nt, Homo sapiens
  misc_RNA (1)...(19): siRNA sense strand
ggcauaugcuuuggauuau

SEQ ID NO: 1423350 - RNA, 19 nt, Homo sapiens
  misc_RNA (1)...(19): siRNA sense strand
caccaaaguggauaaacua

SEQ ID NO: 1423351 - RNA, 19 nt, Homo sapiens
  misc_RNA (1)...(19): siRNA sense strand
aagaaugugugcccuuaau

SEQ ID NO: 1423352 - RNA, 19 nt, Homo sapiens
  misc_RNA (1)...(19): siRNA sense strand
gaagcgagaggcugucagu

SEQ ID NO: 1423353 - RNA, 19 nt, Homo sapiens
  misc_RNA (1)...(19): siRNA sense strand
gagcgacuuugaucaccau

SEQ ID NO: 1423354 - RNA, 19 nt, Homo sapiens
  misc_RNA (1)...(19): siRNA sense strand
caagaaugugugcccuuaa

SEQ ID NO: 1423355 - RNA, 19 nt, Homo sapiens
  misc_RNA (1)...(19): siRNA sense strand
caccaucaccaacaacauu

SEQ ID NO: 1423356 - RNA, 19 nt, Homo sapiens
  misc_RNA (1)...(19): siRNA sense strand
gauagcaccaaaguggaua

SEQ ID NO: 1423357 - RNA, 19 nt, Homo sapiens
  misc_RNA (1)...(19): siRNA sense strand
uguuggaaauuucuugaga

SEQ ID NO: 1423358 - RNA, 19 nt, Homo sapiens
  misc_RNA (1)...(19): siRNA sense strand
uccuugagcuguugaagau

SEQ ID NO: 1423359 - RNA, 19 nt, Homo sapiens
  misc_RNA (1)...(19): siRNA sense strand
ggccagagcgacuuugauc

SEQ ID NO: 1423360 - RNA, 19 nt, Homo sapiens
  misc_RNA (1)...(19): siRNA sense strand
uuucggaacacgaggguua

SEQ ID NO: 1423361 - RNA, 19 nt, Homo sapiens
  misc_RNA (1)...(19): siRNA sense strand
uuggaaacaugaugagcaa

SEQ ID NO: 1423362 - RNA, 19 nt, Homo sapiens
  misc_RNA (1)...(19): siRNA sense strand
ggauaaacuaguacgagau

SEQ ID NO: 1423363 - RNA, 19 nt, Homo sapiens
  misc_RNA (1)...(19): siRNA sense strand
gaacacgaggguuauuuug

SEQ ID NO: 1423364 - RNA, 19 nt, Homo sapiens
  misc_RNA (1)...(19): siRNA sense strand
caggugguauuuguuggaa

SEQ ID NO: 1423365 - RNA, 19 nt, Homo sapiens
  misc_RNA (1)...(19): siRNA sense strand
ggaacacgaggguuauuuu

SEQ ID NO: 1423366 - RNA, 19 nt, Homo sapiens
  misc_RNA (1)...(19): siRNA sense strand
aguacgagauauuuaugga

SEQ ID NO: 1423367 - RNA, 19 nt, Homo sapiens
  misc_RNA (1)...(19): siRNA sense strand
gcugggcuguggcuucaag

SEQ ID NO: 1423368 - RNA, 19 nt, Homo sapiens
  misc_RNA (1)...(19): siRNA sense strand
agcgagaggcugucaguaa

SEQ ID NO: 1423369 - RNA, 19 nt, Homo sapiens
  misc_RNA (1)...(19): siRNA sense strand
ucguggagauagcaccaaa

SEQ ID NO: 1423370 - RNA, 19 nt, Homo sapiens
  misc_RNA (1)...(19): siRNA sense strand
cggaacacgaggguuauuu

SEQ ID NO: 1423371 - RNA, 19 nt, Homo sapiens
  misc_RNA (1)...(19): siRNA sense strand
ccaaaguggauaaacuagu

SEQ ID NO: 1423372 - RNA, 19 nt, Homo sapiens
  misc_RNA (1)...(19): siRNA sense strand
guggagauagcaccaaagu

SEQ ID NO: 1423373 - RNA, 19 nt, Homo sapiens
  misc_RNA (1)...(19): siRNA sense strand
gagaagcgagaggcuguca

SEQ ID NO: 1423374 - RNA, 19 nt, Homo sapiens
  misc_RNA (1)...(19): siRNA sense strand
aaugugugcccuuaaugaa

SEQ ID NO: 1423375 - RNA, 19 nt, Homo sapiens
  misc_RNA (1)...(19): siRNA sense strand
cucaauagcaagaaugugu

SEQ ID NO: 1423376 - RNA, 19 nt, Homo sapiens
  misc_RNA (1)...(19): siRNA sense strand
caaaguggauaaacuagua

SEQ ID NO: 1423377 - RNA, 19 nt, Homo sapiens
  misc_RNA (1)...(19): siRNA sense strand
gcaagaaugugugcccuua

SEQ ID NO: 1423378 - RNA, 19 nt, Homo sapiens
  misc_RNA (1)...(19): siRNA sense strand
ggaaguaccugaccuccaa

SEQ ID NO: 1423379 - RNA, 19 nt, Homo sapiens
  misc_RNA (1)...(19): siRNA sense strand
gaaguuaccauuugauuug

SEQ ID NO: 1423380 - RNA, 19 nt, Homo sapiens
  misc_RNA (1)...(19): siRNA sense strand
gaacuagauugcuugauca

SEQ ID NO: 1423381 - RNA, 19 nt, Homo sapiens
  misc_RNA (1)...(19): siRNA sense strand
ggucucugcugucuucuua

SEQ ID NO: 1423382 - RNA, 19 nt, Homo sapiens
  misc_RNA (1)...(19): siRNA sense strand
agacaucacugcugaagaa

SEQ ID NO: 1423383 - RNA, 19 nt, Homo sapiens
  misc_RNA (1)...(19): siRNA sense strand
gcgagaggcugucaguaaa

SEQ ID NO: 1423384 - RNA, 19 nt, Homo sapiens
  misc_RNA (1)...(19): siRNA sense strand
gcaguauauuccaaagaua

SEQ ID NO: 1423385 - RNA, 19 nt, Homo sapiens
  misc_RNA (1)...(19): siRNA sense strand
gauaaacuaguacgagaua

SEQ ID NO: 1423386 - RNA, 19 nt, Homo sapiens
  misc_RNA (1)...(19): siRNA sense strand
caaacuggaugaacuagau

SEQ ID NO: 1423387 - RNA, 19 nt, Homo sapiens
  misc_RNA (1)...(19): siRNA sense strand
caucacugcugaagaagaa

SEQ ID NO: 1423388 - RNA, 19 nt, Homo sapiens
  misc_RNA (1)...(19): siRNA sense strand
ucacagugcuauuacuuug

SEQ ID NO: 1423389 - RNA, 19 nt, Homo sapiens
  misc_RNA (1)...(19): siRNA sense strand
gcaccaaaguggauaaacu

SEQ ID NO: 1423390 - RNA, 19 nt, Homo sapiens
  misc_RNA (1)...(19): siRNA sense strand
ugucagaaguuaccauuug

SEQ ID NO: 1423391 - RNA, 19 nt, Homo sapiens
  misc_RNA (1)...(19): siRNA sense strand
uggcauaugcuuuggauua

SEQ ID NO: 1423392 - RNA, 19 nt, Homo sapiens
  misc_RNA (1)...(19): siRNA sense strand
gaaugugugcccuuaauga

SEQ ID NO: 1423393 - RNA, 19 nt, Homo sapiens
  misc_RNA (1)...(19): siRNA sense strand
cauaugcuuuggauuauug

SEQ ID NO: 1423394 - RNA, 19 nt, Homo sapiens
  misc_RNA (1)...(19): siRNA sense strand
uggucaagcugguauauuu

SEQ ID NO: 1423395 - RNA, 19 nt, Homo sapiens
  misc_RNA (1)...(19): siRNA sense strand
ugaacuagauugcuugauc

SEQ ID NO: 1423396 - RNA, 19 nt, Homo sapiens
  misc_RNA (1)...(19): siRNA sense strand
gaaacaugaugagcaagga

SEQ ID NO: 1423397 - RNA, 19 nt, Homo sapiens
  misc_RNA (1)...(19): siRNA sense strand
uaggugaucuucagcuuug

SEQ ID NO: 1423398 - RNA, 19 nt, Homo sapiens
  misc_RNA (1)...(19): siRNA sense strand
gagaggcugucaguaaaga

SEQ ID NO: 1423399 - RNA, 19 nt, Homo sapiens
  misc_RNA (1)...(19): siRNA sense strand
gcauaugcuuuggauuauu

SEQ ID NO: 1423400 - RNA, 19 nt, Homo sapiens
  misc_RNA (1)...(19): siRNA sense strand
cuagauugcuugaucaaag

SEQ ID NO: 1423401 - RNA, 19 nt, Homo sapiens
  misc_RNA (1)...(19): siRNA sense strand
guuagcaucuuagcaguau

SEQ ID NO: 1423402 - RNA, 19 nt, Homo sapiens
  misc_RNA (1)...(19): siRNA sense strand
gagcacuccuugagcuguu

SEQ ID NO: 1423403 - RNA, 19 nt, Homo sapiens
  misc_RNA (1)...(19): siRNA sense strand
ugaaaagugucagaaguua

SEQ ID NO: 1423404 - RNA, 19 nt, Homo sapiens
  misc_RNA (1)...(19): siRNA sense strand
ggucacagguacuagucuu

SEQ ID NO: 1423405 - RNA, 19 nt, Homo sapiens
  misc_RNA (1)...(19): siRNA sense strand
gucagaaguuaccauuuga

SEQ ID NO: 1423406 - RNA, 19 nt, Homo sapiens
  misc_RNA (1)...(19): siRNA sense strand
ggcauaugcuuuggauuau

SEQ ID NO: 1423407 - RNA, 19 nt, Homo sapiens
  misc_RNA (1)...(19): siRNA sense strand
acagugcuauuacuuugaa

SEQ ID NO: 1423408 - RNA, 19 nt, Homo sapiens
  misc_RNA (1)...(19): siRNA sense strand
caccaaaguggauaaacua

SEQ ID NO: 1423409 - RNA, 19 nt, Homo sapiens
  misc_RNA (1)...(19): siRNA sense strand
gacggucacagugcuauua

SEQ ID NO: 1423410 - RNA, 19 nt, Homo sapiens
  misc_RNA (1)...(19): siRNA sense strand
aagaaugugugcccuuaau

SEQ ID NO: 1423411 - RNA, 19 nt, Homo sapiens
  misc_RNA (1)...(19): siRNA sense strand
uggaugaacuagauugcuu

SEQ ID NO: 1423412 - RNA, 19 nt, Homo sapiens
  misc_RNA (1)...(19): siRNA sense strand
ugaagaagaagaggaagaa

SEQ ID NO: 1423413 - RNA, 19 nt, Homo sapiens
  misc_RNA (1)...(19): siRNA sense strand
agaagaagaggaagaagug

SEQ ID NO: 1423414 - RNA, 19 nt, Homo sapiens
  misc_RNA (1)...(19): siRNA sense strand
cagaaguuaccauuugauu

SEQ ID NO: 1423415 - RNA, 19 nt, Homo sapiens
  misc_RNA (1)...(19): siRNA sense strand
gaagcgagaggcugucagu

SEQ ID NO: 1423416 - RNA, 19 nt, Homo sapiens
  misc_RNA (1)...(19): siRNA sense strand
ggucacagugcuauuacuu

SEQ ID NO: 1423417 - RNA, 19 nt, Homo sapiens
  misc_RNA (1)...(19): siRNA sense strand
ccaaagauaauuacaaacg

SEQ ID NO: 1423418 - RNA, 19 nt, Homo sapiens
  misc_RNA (1)...(19): siRNA sense strand
aaacccugcugauucugaa

SEQ ID NO: 1423419 - RNA, 19 nt, Homo sapiens
  misc_RNA (1)...(19): siRNA sense strand
gaaguggaaagucuuaaaa

SEQ ID NO: 1423420 - RNA, 19 nt, Homo sapiens
  misc_RNA (1)...(19): siRNA sense strand
caagaaugugugcccuuaa

SEQ ID NO: 1423421 - RNA, 19 nt, Homo sapiens
  misc_RNA (1)...(19): siRNA sense strand
caccaucaccaacaacauu

SEQ ID NO: 1423422 - RNA, 19 nt, Homo sapiens
  misc_RNA (1)...(19): siRNA sense strand
gagcgacuuugaucaccau

SEQ ID NO: 1423423 - RNA, 19 nt, Homo sapiens
  misc_RNA (1)...(19): siRNA sense strand
gcaaacuggaugaacuaga

SEQ ID NO: 1423424 - RNA, 19 nt, Homo sapiens
  misc_RNA (1)...(19): siRNA sense strand
gauagcaccaaaguggaua

SEQ ID NO: 1423425 - RNA, 19 nt, Homo sapiens
  misc_RNA (1)...(19): siRNA sense strand
aggaagaaguggaaagucu

SEQ ID NO: 1423426 - RNA, 19 nt, Homo sapiens
  misc_RNA (1)...(19): siRNA sense strand
uguuggaaauuucuugaga

SEQ ID NO: 1423427 - RNA, 19 nt, Homo sapiens
  misc_RNA (1)...(19): siRNA sense strand
guaccugaccuccaaugug

SEQ ID NO: 1423428 - RNA, 19 nt, Homo sapiens
  misc_RNA (1)...(19): siRNA sense strand
uccuugagcuguugaagau

SEQ ID NO: 1423429 - RNA, 19 nt, Homo sapiens
  misc_RNA (1)...(19): siRNA sense strand
gaagaggaagaaguggaaa

SEQ ID NO: 1423430 - RNA, 19 nt, Homo sapiens
  misc_RNA (1)...(19): siRNA sense strand
ccuccaauguggcuuaugg

SEQ ID NO: 1423431 - RNA, 19 nt, Homo sapiens
  misc_RNA (1)...(19): siRNA sense strand
guggaacucuggucaagcu

SEQ ID NO: 1423432 - RNA, 19 nt, Homo sapiens
  misc_RNA (1)...(19): siRNA sense strand
uuucggaacacgaggguua

SEQ ID NO: 1423433 - RNA, 19 nt, Homo sapiens
  misc_RNA (1)...(19): siRNA sense strand
ggccagagcgacuuugauc

SEQ ID NO: 1423434 - RNA, 19 nt, Homo sapiens
  misc_RNA (1)...(19): siRNA sense strand
gaugaacuagauugcuuga

SEQ ID NO: 1423435 - RNA, 19 nt, Homo sapiens
  misc_RNA (1)...(19): siRNA sense strand
agcaguauauuccaaagau

SEQ ID NO: 1423436 - RNA, 19 nt, Homo sapiens
  misc_RNA (1)...(19): siRNA sense strand
uuggaaacaugaugagcaa

SEQ ID NO: 1423437 - RNA, 19 nt, Homo sapiens
  misc_RNA (1)...(19): siRNA sense strand
ggauaaacuaguacgagau

SEQ ID NO: 1423438 - RNA, 19 nt, Homo sapiens
  misc_RNA (1)...(19): siRNA sense strand
cuuacuggcuguaccacuu

SEQ ID NO: 1423439 - RNA, 19 nt, Homo sapiens
  misc_RNA (1)...(19): siRNA sense strand
aaacgggucacagguacua

SEQ ID NO: 1423440 - RNA, 19 nt, Homo sapiens
  misc_RNA (1)...(19): siRNA sense strand
uacaaacgggucacaggua

SEQ ID NO: 1423441 - RNA, 19 nt, Homo sapiens
  misc_RNA (1)...(19): siRNA sense strand
gguuagcaucuuagcagua

SEQ ID NO: 1423442 - RNA, 19 nt, Homo sapiens
  misc_RNA (1)...(19): siRNA sense strand
gaacacgaggguuauuuug

SEQ ID NO: 1423443 - RNA, 19 nt, Homo sapiens
  misc_RNA (1)...(19): siRNA sense strand
agaaguggaaagucuuaaa

SEQ ID NO: 1423444 - RNA, 19 nt, Homo sapiens
  misc_RNA (1)...(19): siRNA sense strand
ugaccuccaauguggcuua

SEQ ID NO: 1423445 - RNA, 19 nt, Homo sapiens
  misc_RNA (1)...(19): siRNA sense strand
gaucuucagcuuugcaaac

SEQ ID NO: 1423446 - RNA, 19 nt, Homo sapiens
  misc_RNA (1)...(19): siRNA sense strand
ggaacacgaggguuauuuu

SEQ ID NO: 1423447 - RNA, 19 nt, Homo sapiens
  misc_RNA (1)...(19): siRNA sense strand
uuaaaagcauucggaagua

SEQ ID NO: 1423448 - RNA, 19 nt, Homo sapiens
  misc_RNA (1)...(19): siRNA sense strand
caggugguauuuguuggaa

SEQ ID NO: 1423449 - RNA, 19 nt, Homo sapiens
  misc_RNA (1)...(19): siRNA sense strand
agaagaggaagaaguggaa

SEQ ID NO: 1423450 - RNA, 19 nt, Homo sapiens
  misc_RNA (1)...(19): siRNA sense strand
caucuuagcaguauauucc

SEQ ID NO: 1423451 - RNA, 19 nt, Homo sapiens
  misc_RNA (1)...(19): siRNA sense strand
uagcaucuuagcaguauau

SEQ ID NO: 1423452 - RNA, 19 nt, Homo sapiens
  misc_RNA (1)...(19): siRNA sense strand
ugaaaacccugcugauucu

SEQ ID NO: 1423453 - RNA, 19 nt, Homo sapiens
  misc_RNA (1)...(19): siRNA sense strand
aguacgagauauuuaugga

SEQ ID NO: 1423454 - RNA, 19 nt, Homo sapiens
  misc_RNA (1)...(19): siRNA sense strand
ggaaagucuuaaaagcauu

SEQ ID NO: 1423455 - RNA, 19 nt, Homo sapiens
  misc_RNA (1)...(19): siRNA sense strand
uagauugcuugaucaaagg

SEQ ID NO: 1423456 - RNA, 19 nt, Homo sapiens
  misc_RNA (1)...(19): siRNA sense strand
agcgagaggcugucaguaa

SEQ ID NO: 1423457 - RNA, 19 nt, Homo sapiens
  misc_RNA (1)...(19): siRNA sense strand
gcugggcuguggcuucaag

SEQ ID NO: 1423458 - RNA, 19 nt, Homo sapiens
  misc_RNA (1)...(19): siRNA sense strand
ggacggucacagugcuauu

SEQ ID NO: 1423459 - RNA, 19 nt, Homo sapiens
  misc_RNA (1)...(19): siRNA sense strand
uuaugggucuacaggcauu

SEQ ID NO: 1423460 - RNA, 19 nt, Homo sapiens
  misc_RNA (1)...(19): siRNA sense strand
gaccuccaauguggcuuau

SEQ ID NO: 1423461 - RNA, 19 nt, Homo sapiens
  misc_RNA (1)...(19): siRNA sense strand
cggaacacgaggguuauuu

SEQ ID NO: 1423462 - RNA, 19 nt, Homo sapiens
  misc_RNA (1)...(19): siRNA sense strand
caaagacaucacugcugaa

SEQ ID NO: 1423463 - RNA, 19 nt, Homo sapiens
  misc_RNA (1)...(19): siRNA sense strand
ucguggagauagcaccaaa

SEQ ID NO: 1423464 - RNA, 19 nt, Homo sapiens
  misc_RNA (1)...(19): siRNA sense strand
uuuggucucugcugucuuc

SEQ ID NO: 1423465 - RNA, 19 nt, Homo sapiens
  misc_RNA (1)...(19): siRNA sense strand
gucacagugcuauuacuuu

SEQ ID NO: 1423466 - RNA, 19 nt, Homo sapiens
  misc_RNA (1)...(19): siRNA sense strand
ccaaaguggauaaacuagu

SEQ ID NO: 1423467 - RNA, 19 nt, Homo sapiens
  misc_RNA (1)...(19): siRNA sense strand
gaagaagaagaggaagaag

SEQ ID NO: 1423468 - RNA, 19 nt, Homo sapiens
  misc_RNA (1)...(19): siRNA sense strand
cugaaggaccugacucugu

SEQ ID NO: 1423469 - RNA, 19 nt, Homo sapiens
  misc_RNA (1)...(19): siRNA sense strand
guggagauagcaccaaagu

SEQ ID NO: 1423470 - RNA, 19 nt, Homo sapiens
  misc_RNA (1)...(19): siRNA sense strand
gacucuguguggacgcaaa

SEQ ID NO: 1423471 - RNA, 19 nt, Homo sapiens
  misc_RNA (1)...(19): siRNA sense strand
aaacuggaugaacuagauu

SEQ ID NO: 1423472 - RNA, 19 nt, Homo sapiens
  misc_RNA (1)...(19): siRNA sense strand
aaugugugcccuuaaugaa

SEQ ID NO: 1423473 - RNA, 19 nt, Homo sapiens
  misc_RNA (1)...(19): siRNA sense strand
cucaauagcaagaaugugu

SEQ ID NO: 1423474 - RNA, 19 nt, Homo sapiens
  misc_RNA (1)...(19): siRNA sense strand
gagaagcgagaggcuguca

SEQ ID NO: 1423475 - RNA, 19 nt, Homo sapiens
  misc_RNA (1)...(19): siRNA sense strand
ggaaguaccugaccuccaa

SEQ ID NO: 1423476 - RNA, 19 nt, Homo sapiens
  misc_RNA (1)...(19): siRNA sense strand
agacaucacugcugaagaa

SEQ ID NO: 1423477 - RNA, 19 nt, Homo sapiens
  misc_RNA (1)...(19): siRNA sense strand
caucacugcugaagaagaa

SEQ ID NO: 1423478 - RNA, 19 nt, Homo sapiens
  misc_RNA (1)...(19): siRNA sense strand
uggucaagcugguauauuu

SEQ ID NO: 1423479 - RNA, 19 nt, Homo sapiens
  misc_RNA (1)...(19): siRNA sense strand
ugaagaagaagaggaagaa

SEQ ID NO: 1423480 - RNA, 19 nt, Homo sapiens
  misc_RNA (1)...(19): siRNA sense strand
agaagaagaggaagaagug

SEQ ID NO: 1423481 - RNA, 19 nt, Homo sapiens
  misc_RNA (1)...(19): siRNA sense strand
gaaguggaaagucuuaaaa

SEQ ID NO: 1423482 - RNA, 19 nt, Homo sapiens
  misc_RNA (1)...(19): siRNA sense strand
aggaagaaguggaaagucu
